United States Patent Application Publication US 2018/0305689 A1 - sequence listing, part 18

SEQ ID NO: 232513 - RNA, 19 nt, Artificial Sequence
  Description of Artificial Sequence: Synthetic oligonucleotide
  Antisense strand to SEQ ID NO: 232512
uuauuaauuagcuguucgc

SEQ ID NO: 232514 - RNA, 19 nt, Artificial Sequence
  Description of Artificial Sequence: Synthetic oligonucleotide
  Sense strand starting at position 555 SEQ ID NO: 2992
uaaagagaaugguuauguu

SEQ ID NO: 232515 - RNA, 19 nt, Artificial Sequence
  Description of Artificial Sequence: Synthetic oligonucleotide
  Antisense strand to SEQ ID NO: 232514
aacauaaccauucucuuua

SEQ ID NO: 232516 - RNA, 19 nt, Artificial Sequence
  Description of Artificial Sequence: Synthetic oligonucleotide
  Sense strand starting at position 559 SEQ ID NO: 2992
gagaaugguuauguuugga

SEQ ID NO: 232517 - RNA, 19 nt, Artificial Sequence
  Description of Artificial Sequence: Synthetic oligonucleotide
  Antisense strand to SEQ ID NO: 232516
uccaaacauaaccauucuc

SEQ ID NO: 232518 - RNA, 19 nt, Artificial Sequence
  Description of Artificial Sequence: Synthetic oligonucleotide
  Sense strand starting at position 562 SEQ ID NO: 2992
aaugguuauguuuggagac

SEQ ID NO: 232519 - RNA, 19 nt, Artificial Sequence
  Description of Artificial Sequence: Synthetic oligonucleotide
  Antisense strand to SEQ ID NO: 232518
gucuccaaacauaaccauu

SEQ ID NO: 232520 - RNA, 19 nt, Artificial Sequence
  Description of Artificial Sequence: Synthetic oligonucleotide
  Sense strand starting at position 680 SEQ ID NO: 2992
agccucagcccuuagacaa

SEQ ID NO: 232521 - RNA, 19 nt, Artificial Sequence
  Description of Artificial Sequence: Synthetic oligonucleotide
  Antisense strand to SEQ ID NO: 232520
uugucuaagggcugaggcu

SEQ ID NO: 232522 - RNA, 19 nt, Artificial Sequence
  Description of Artificial Sequence: Synthetic oligonucleotide
  Sense strand starting at position 704 SEQ ID NO: 2992
guuaccagacagugcuaaa

SEQ ID NO: 232523 - RNA, 19 nt, Artificial Sequence
  Description of Artificial Sequence: Synthetic oligonucleotide
  Antisense strand to SEQ ID NO: 232522
uuuagcacugucugguaac

SEQ ID NO: 232524 - RNA, 19 nt, Artificial Sequence
  Description of Artificial Sequence: Synthetic oligonucleotide
  Sense strand starting at position 983 SEQ ID NO: 2992
cuggaaauggccgauggau

SEQ ID NO: 232525 - RNA, 19 nt, Artificial Sequence
  Description of Artificial Sequence: Synthetic oligonucleotide
  Antisense strand to SEQ ID NO: 232524
auccaucggccauuuccag

SEQ ID NO: 232526 - RNA, 19 nt, Artificial Sequence
  Description of Artificial Sequence: Synthetic oligonucleotide
  Sense strand starting at position 985 SEQ ID NO: 2992
ggaaauggccgauggauuc

SEQ ID NO: 232527 - RNA, 19 nt, Artificial Sequence
  Description of Artificial Sequence: Synthetic oligonucleotide
  Antisense strand to SEQ ID NO: 232526
gaauccaucggccauuucc

SEQ ID NO: 232528 - RNA, 19 nt, Artificial Sequence
  Description of Artificial Sequence: Synthetic oligonucleotide
  Sense strand starting at position 992 SEQ ID NO: 2992
gccgauggauucuauauuu

SEQ ID NO: 232529 - RNA, 19 nt, Artificial Sequence
  Description of Artificial Sequence: Synthetic oligonucleotide
  Antisense strand to SEQ ID NO: 232528
aaauauagaauccaucggc

SEQ ID NO: 232530 - RNA, 19 nt, Artificial Sequence
  Description of Artificial Sequence: Synthetic oligonucleotide
  Sense strand starting at position 1921 SEQ ID NO: 2992
aguucauuugccgggcuga

SEQ ID NO: 232531 - RNA, 19 nt, Artificial Sequence
  Description of Artificial Sequence: Synthetic oligonucleotide
  Antisense strand to SEQ ID NO: 232530
ucagcccggcaaaugaacu

SEQ ID NO: 232532 - RNA, 19 nt, Artificial Sequence
  Description of Artificial Sequence: Synthetic oligonucleotide
  Sense strand starting at position 2462 SEQ ID NO: 2992
gaaagagauuucugugagg

SEQ ID NO: 232533 - RNA, 19 nt, Artificial Sequence
  Description of Artificial Sequence: Synthetic oligonucleotide
  Antisense strand to SEQ ID NO: 232532
ccucacagaaaucucuuuc

SEQ ID NO: 232534 - RNA, 19 nt, Artificial Sequence
  Description of Artificial Sequence: Synthetic oligonucleotide
  Sense strand starting at position 2465 SEQ ID NO: 2992
agagauuucugugaggaau

SEQ ID NO: 232535 - RNA, 19 nt, Artificial Sequence
  Description of Artificial Sequence: Synthetic oligonucleotide
  Antisense strand to SEQ ID NO: 232534
auuccucacagaaaucucu

SEQ ID NO: 232536 - RNA, 19 nt, Artificial Sequence
  Description of Artificial Sequence: Synthetic oligonucleotide
  Sense strand starting at position 2467 SEQ ID NO: 2992
agauuucugugaggaauuu

SEQ ID NO: 232537 - RNA, 19 nt, Artificial Sequence
  Description of Artificial Sequence: Synthetic oligonucleotide
  Antisense strand to SEQ ID NO: 232536
aaauuccucacagaaaucu

SEQ ID NO: 232538 - RNA, 19 nt, Artificial Sequence
  Description of Artificial Sequence: Synthetic oligonucleotide
  Sense strand starting at position 3097 SEQ ID NO: 2992
agugauuaauccuucgguu

SEQ ID NO: 232539 - RNA, 19 nt, Artificial Sequence
  Description of Artificial Sequence: Synthetic oligonucleotide
  Antisense strand to SEQ ID NO: 232538
aaccgaaggauuaaucacu

SEQ ID NO: 232540 - RNA, 19 nt, Artificial Sequence
  Description of Artificial Sequence: Synthetic oligonucleotide
  Sense strand starting at position 3185 SEQ ID NO: 2992
gggagccaaucuuugguaa

SEQ ID NO: 232541 - RNA, 19 nt, Artificial Sequence
  Description of Artificial Sequence: Synthetic oligonucleotide
  Antisense strand to SEQ ID NO: 232540
uuaccaaagauuggcuccc

SEQ ID NO: 232542 - RNA, 19 nt, Artificial Sequence
  Description of Artificial Sequence: Synthetic oligonucleotide
  Sense strand starting at position 3215 SEQ ID NO: 2992
ugugguagguggguucaaa

SEQ ID NO: 232543 - RNA, 19 nt, Artificial Sequence
  Description of Artificial Sequence: Synthetic oligonucleotide
  Antisense strand to SEQ ID NO: 232542
uuugaacccaccuaccaca

SEQ ID NO: 232544 - RNA, 19 nt, Artificial Sequence
  Description of Artificial Sequence: Synthetic oligonucleotide
  Sense strand starting at position 3256 SEQ ID NO: 2992
gagauuucgugcccuuuag

SEQ ID NO: 232545 - RNA, 19 nt, Artificial Sequence
  Description of Artificial Sequence: Synthetic oligonucleotide
  Antisense strand to SEQ ID NO: 232544
cuaaagggcacgaaaucuc

SEQ ID NO: 232546 - RNA, 19 nt, Artificial Sequence
  Description of Artificial Sequence: Synthetic oligonucleotide
  Sense strand starting at position 3289 SEQ ID NO: 2992
uuugcaaacccugaagauu

SEQ ID NO: 232547 - RNA, 19 nt, Artificial Sequence
  Description of Artificial Sequence: Synthetic oligonucleotide
  Antisense strand to SEQ ID NO: 232546
aaucuucaggguuugcaaa

SEQ ID NO: 232548 - RNA, 19 nt, Artificial Sequence
  Description of Artificial Sequence: Synthetic oligonucleotide
  Sense strand starting at position 3317 SEQ ID NO: 2992
gagcuuugggcuugguaag

SEQ ID NO: 232549 - RNA, 19 nt, Artificial Sequence
  Description of Artificial Sequence: Synthetic oligonucleotide
  Antisense strand to SEQ ID NO: 232548
cuuaccaagcccaaagcuc

SEQ ID NO: 232550 - RNA, 19 nt, Artificial Sequence
  Description of Artificial Sequence: Synthetic oligonucleotide
  Sense strand starting at position 3352 SEQ ID NO: 2992
ugccuaaucguauaucauc

SEQ ID NO: 232551 - RNA, 19 nt, Artificial Sequence
  Description of Artificial Sequence: Synthetic oligonucleotide
  Antisense strand to SEQ ID NO: 232550
gaugauauacgauuaggca

SEQ ID NO: 232552 - RNA, 19 nt, Artificial Sequence
  Description of Artificial Sequence: Synthetic oligonucleotide
  Sense strand starting at position 3384 SEQ ID NO: 2992
ggcuuugaccuuuggccaa

SEQ ID NO: 232553 - RNA, 19 nt, Artificial Sequence
  Description of Artificial Sequence: Synthetic oligonucleotide
  Antisense strand to SEQ ID NO: 232552
uuggccaaaggucaaagcc

SEQ ID NO: 232554 - RNA, 19 nt, Artificial Sequence
  Description of Artificial Sequence: Synthetic oligonucleotide
  Sense strand starting at position 3409 SEQ ID NO: 2992
uuguucuuugaagaagugu

SEQ ID NO: 232555 - RNA, 19 nt, Artificial Sequence
  Description of Artificial Sequence: Synthetic oligonucleotide
  Antisense strand to SEQ ID NO: 232554
acacuucuucaaagaacaa

SEQ ID NO: 232556 - RNA, 19 nt, Artificial Sequence
  Description of Artificial Sequence: Synthetic oligonucleotide
  Sense strand starting at position 3426 SEQ ID NO: 2992
guauacaaugugugggaaa

SEQ ID NO: 232557 - RNA, 19 nt, Artificial Sequence
  Description of Artificial Sequence: Synthetic oligonucleotide
  Antisense strand to SEQ ID NO: 232556
uuucccacacauuguauac

SEQ ID NO: 232558 - RNA, 19 nt, Artificial Sequence
  Description of Artificial Sequence: Synthetic oligonucleotide
  Sense strand starting at position 3459 SEQ ID NO: 2992
gagagaaguaaauguguug

SEQ ID NO: 232559 - RNA, 19 nt, Artificial Sequence
  Description of Artificial Sequence: Synthetic oligonucleotide
  Antisense strand to SEQ ID NO: 232558
caacacauuuacuucucuc

SEQ ID NO: 232560 - RNA, 19 nt, Artificial Sequence
  Description of Artificial Sequence: Synthetic oligonucleotide
  Sense strand starting at position 3476 SEQ ID NO: 2992
ugauguugugauuguuuau

SEQ ID NO: 232561 - RNA, 19 nt, Artificial Sequence
  Description of Artificial Sequence: Synthetic oligonucleotide
  Antisense strand to SEQ ID NO: 232560
auaaacaaucacaacauca

SEQ ID NO: 232562 - RNA, 19 nt, Artificial Sequence
  Description of Artificial Sequence: Synthetic oligonucleotide
  Sense strand starting at position 3483 SEQ ID NO: 2992
gugauuguuuaugugauuu

SEQ ID NO: 232563 - RNA, 19 nt, Artificial Sequence
  Description of Artificial Sequence: Synthetic oligonucleotide
  Antisense strand to SEQ ID NO: 232562
aaaucacauaaacaaucac

SEQ ID NO: 232564 - RNA, 19 nt, Artificial Sequence
  Description of Artificial Sequence: Synthetic oligonucleotide
  Sense strand starting at position 3698 SEQ ID NO: 2992
acuggcaguuuaucugauu

SEQ ID NO: 232565 - RNA, 19 nt, Artificial Sequence
  Description of Artificial Sequence: Synthetic oligonucleotide
  Antisense strand to SEQ ID NO: 232564
aaucagauaaacugccagu

SEQ ID NO: 232566 - RNA, 19 nt, Artificial Sequence
  Description of Artificial Sequence: Synthetic oligonucleotide
  Sense strand starting at position 3699 SEQ ID NO: 2992
cuggcaguuuaucugauua

SEQ ID NO: 232567 - RNA, 19 nt, Artificial Sequence
  Description of Artificial Sequence: Synthetic oligonucleotide
  Antisense strand to SEQ ID NO: 232566
uaaucagauaaacugccag

SEQ ID NO: 232568 - RNA, 19 nt, Artificial Sequence
  Description of Artificial Sequence: Synthetic oligonucleotide
  Sense strand starting at position 3740 SEQ ID NO: 2992
gaugucucugagugucauc

SEQ ID NO: 232569 - RNA, 19 nt, Artificial Sequence
  Description of Artificial Sequence: Synthetic oligonucleotide
  Antisense strand to SEQ ID NO: 232568
gaugacacucagagacauc

SEQ ID NO: 232570 - RNA, 19 nt, Artificial Sequence
  Description of Artificial Sequence: Synthetic oligonucleotide
  Sense strand starting at position 3745 SEQ ID NO: 2992
cucugagugucaucaguug

SEQ ID NO: 232571 - RNA, 19 nt, Artificial Sequence
  Description of Artificial Sequence: Synthetic oligonucleotide
  Antisense strand to SEQ ID NO: 232570
caacugaugacacucagag

SEQ ID NO: 232572 - RNA, 19 nt, Artificial Sequence
  Description of Artificial Sequence: Synthetic oligonucleotide
  Sense strand starting at position 3757 SEQ ID NO: 2992
ucaguugcucucuagguuu

SEQ ID NO: 232573 - RNA, 19 nt, Artificial Sequence
  Description of Artificial Sequence: Synthetic oligonucleotide
  Antisense strand to SEQ ID NO: 232572
aaaccuagagagcaacuga

SEQ ID NO: 232574 - RNA, 19 nt, Artificial Sequence
  Description of Artificial Sequence: Synthetic oligonucleotide
  Sense strand starting at position 3759 SEQ ID NO: 2992
aguugcucucuagguuuga

SEQ ID NO: 232575 - RNA, 19 nt, Artificial Sequence
  Description of Artificial Sequence: Synthetic oligonucleotide
  Antisense strand to SEQ ID NO: 232574
ucaaaccuagagagcaacu

SEQ ID NO: 232576 - RNA, 19 nt, Artificial Sequence
  Description of Artificial Sequence: Synthetic oligonucleotide
  Sense strand starting at position 3763 SEQ ID NO: 2992
gcucucuagguuugacaua

SEQ ID NO: 232577 - RNA, 19 nt, Artificial Sequence
  Description of Artificial Sequence: Synthetic oligonucleotide
  Antisense strand to SEQ ID NO: 232576
uaugucaaaccuagagagc

SEQ ID NO: 232578 - RNA, 19 nt, Artificial Sequence
  Description of Artificial Sequence: Synthetic oligonucleotide
  Sense strand starting at position 3791 SEQ ID NO: 2992
gcaacuacaaagcgugaua

SEQ ID NO: 232579 - RNA, 19 nt, Artificial Sequence
  Description of Artificial Sequence: Synthetic oligonucleotide
  Antisense strand to SEQ ID NO: 232578
uaucacgcuuuguaguugc

SEQ ID NO: 232580 - RNA, 19 nt, Artificial Sequence
  Description of Artificial Sequence: Synthetic oligonucleotide
  Sense strand starting at position 3794 SEQ ID NO: 2992
acuacaaagcgugauaaag

SEQ ID NO: 232581 - RNA, 19 nt, Artificial Sequence
  Description of Artificial Sequence: Synthetic oligonucleotide
  Antisense strand to SEQ ID NO: 232580
cuuuaucacgcuuuguagu

SEQ ID NO: 232582 - RNA, 19 nt, Artificial Sequence
  Description of Artificial Sequence: Synthetic oligonucleotide
  Sense strand starting at position 3884 SEQ ID NO: 2992
ccagacuuggugugugacu

SEQ ID NO: 232583 - RNA, 19 nt, Artificial Sequence
  Description of Artificial Sequence: Synthetic oligonucleotide
  Antisense strand to SEQ ID NO: 232582
agucacacaccaagucugg

SEQ ID NO: 232584 - RNA, 19 nt, Artificial Sequence
  Description of Artificial Sequence: Synthetic oligonucleotide
  Sense strand starting at position 3885 SEQ ID NO: 2992
cagacuuggugugugacua

SEQ ID NO: 232585 - RNA, 19 nt, Artificial Sequence
  Description of Artificial Sequence: Synthetic oligonucleotide
  Antisense strand to SEQ ID NO: 232584
uagucacacaccaagucug

SEQ ID NO: 232586 - RNA, 19 nt, Artificial Sequence
  Description of Artificial Sequence: Synthetic oligonucleotide
  Sense strand starting at position 19 SEQ ID NO: 2994
cauguaagauuagaacaga

SEQ ID NO: 232587 - RNA, 19 nt, Artificial Sequence
  Description of Artificial Sequence: Synthetic oligonucleotide
  Antisense strand to SEQ ID NO: 232586
ucuguucuaaucuuacaug

SEQ ID NO: 232588 - RNA, 19 nt, Artificial Sequence
  Description of Artificial Sequence: Synthetic oligonucleotide
  Sense strand starting at position 55 SEQ ID NO: 2994
cauguuaggaggugaagaa

SEQ ID NO: 232589 - RNA, 19 nt, Artificial Sequence
  Description of Artificial Sequence: Synthetic oligonucleotide
  Antisense strand to SEQ ID NO: 232588
uucuucaccuccuaacaug

SEQ ID NO: 232590 - RNA, 19 nt, Artificial Sequence
  Description of Artificial Sequence: Synthetic oligonucleotide
  Sense strand starting at position 69 SEQ ID NO: 2994
aagaaauguuaggaucaua

SEQ ID NO: 232591 - RNA, 19 nt, Artificial Sequence
  Description of Artificial Sequence: Synthetic oligonucleotide
  Antisense strand to SEQ ID NO: 232590
uaugauccuaacauuucuu

SEQ ID NO: 232592 - RNA, 19 nt, Artificial Sequence
  Description of Artificial Sequence: Synthetic oligonucleotide
  Sense strand starting at position 74 SEQ ID NO: 2994
auguuaggaucauaaaucu

SEQ ID NO: 232593 - RNA, 19 nt, Artificial Sequence
  Description of Artificial Sequence: Synthetic oligonucleotide
  Antisense strand to SEQ ID NO: 232592
agauuuaugauccuaacau

SEQ ID NO: 232594 - RNA, 19 nt, Artificial Sequence
  Description of Artificial Sequence: Synthetic oligonucleotide
  Sense strand starting at position 753 SEQ ID NO: 2994
gggcccacugccuaugaau

SEQ ID NO: 232595 - RNA, 19 nt, Artificial Sequence
  Description of Artificial Sequence: Synthetic oligonucleotide
  Antisense strand to SEQ ID NO: 232594
auucauaggcagugggccc

SEQ ID NO: 232596 - RNA, 19 nt, Artificial Sequence
  Description of Artificial Sequence: Synthetic oligonucleotide
  Sense strand starting at position 755 SEQ ID NO: 2994
gcccacugccuaugaauua

SEQ ID NO: 232597 - RNA, 19 nt, Artificial Sequence
  Description of Artificial Sequence: Synthetic oligonucleotide
  Antisense strand to SEQ ID NO: 232596
uaauucauaggcagugggc

SEQ ID NO: 232598 - RNA, 19 nt, Artificial Sequence
  Description of Artificial Sequence: Synthetic oligonucleotide
  Sense strand starting at position 1022 SEQ ID NO: 2994
uaggaauaguaucuauuga

SEQ ID NO: 232599 - RNA, 19 nt, Artificial Sequence
  Description of Artificial Sequence: Synthetic oligonucleotide
  Antisense strand to SEQ ID NO: 232598
ucaauagauacuauuccua

SEQ ID NO: 232600 - RNA, 19 nt, Artificial Sequence
  Description of Artificial Sequence: Synthetic oligonucleotide
  Sense strand starting at position 1074 SEQ ID NO: 2994
cguaaacucagccaggauu

SEQ ID NO: 232601 - RNA, 19 nt, Artificial Sequence
  Description of Artificial Sequence: Synthetic oligonucleotide
  Antisense strand to SEQ ID NO: 232600
aauccuggcugaguuuacg

SEQ ID NO: 232602 - RNA, 19 nt, Artificial Sequence
  Description of Artificial Sequence: Synthetic oligonucleotide
  Sense strand starting at position 1091 SEQ ID NO: 2994
uuagaaacgucuucccaau

SEQ ID NO: 232603 - RNA, 19 nt, Artificial Sequence
  Description of Artificial Sequence: Synthetic oligonucleotide
  Antisense strand to SEQ ID NO: 232602
auugggaagacguuucuaa

SEQ ID NO: 232604 - RNA, 19 nt, Artificial Sequence
  Description of Artificial Sequence: Synthetic oligonucleotide
  Sense strand starting at position 1116 SEQ ID NO: 2994
cccgcucaaguugagaauu

SEQ ID NO: 232605 - RNA, 19 nt, Artificial Sequence
  Description of Artificial Sequence: Synthetic oligonucleotide
  Antisense strand to SEQ ID NO: 232604
aauucucaacuugagcggg

SEQ ID NO: 232606 - RNA, 19 nt, Artificial Sequence
  Description of Artificial Sequence: Synthetic oligonucleotide
  Sense strand starting at position 1201 SEQ ID NO: 2994
augguuacuuuggagauaa

SEQ ID NO: 232607 - RNA, 19 nt, Artificial Sequence
  Description of Artificial Sequence: Synthetic oligonucleotide
  Antisense strand to SEQ ID NO: 232606
uuaucuccaaaguaaccau

SEQ ID NO: 232608 - RNA, 19 nt, Artificial Sequence
  Description of Artificial Sequence: Synthetic oligonucleotide
  Sense strand starting at position 1216 SEQ ID NO: 2994
auaauauaauccucggucu

SEQ ID NO: 232609 - RNA, 19 nt, Artificial Sequence
  Description of Artificial Sequence: Synthetic oligonucleotide
  Antisense strand to SEQ ID NO: 232608
agaccgaggauuauauuau

SEQ ID NO: 232610 - RNA, 19 nt, Artificial Sequence
  Description of Artificial Sequence: Synthetic oligonucleotide
  Sense strand starting at position 1219 SEQ ID NO: 2994
auauaauccucggucuuau

SEQ ID NO: 232611 - RNA, 19 nt, Artificial Sequence
  Description of Artificial Sequence: Synthetic oligonucleotide
  Antisense strand to SEQ ID NO: 232610
auaagaccgaggauuauau

SEQ ID NO: 232612 - RNA, 19 nt, Artificial Sequence
  Description of Artificial Sequence: Synthetic oligonucleotide
  Sense strand starting at position 1233 SEQ ID NO: 2994
cuuauuguuguggagcaga

SEQ ID NO: 232613 - RNA, 19 nt, Artificial Sequence
  Description of Artificial Sequence: Synthetic oligonucleotide
  Antisense strand to SEQ ID NO: 232612
ucugcuccacaacaauaag

SEQ ID NO: 232614 - RNA, 19 nt, Artificial Sequence
  Description of Artificial Sequence: Synthetic oligonucleotide
  Sense strand starting at position 1246 SEQ ID NO: 2994
agcagaugucauuaugggu

SEQ ID NO: 232615 - RNA, 19 nt, Artificial Sequence
  Description of Artificial Sequence: Synthetic oligonucleotide
  Antisense strand to SEQ ID NO: 232614
acccauaaugacaucugcu

SEQ ID NO: 232616 - RNA, 19 nt, Artificial Sequence
  Description of Artificial Sequence: Synthetic oligonucleotide
  Sense strand starting at position 1596 SEQ ID NO: 2994
gaggaaacucuacggguaa

SEQ ID NO: 232617 - RNA, 19 nt, Artificial Sequence
  Description of Artificial Sequence: Synthetic oligonucleotide
  Antisense strand to SEQ ID NO: 232616
uuacccguagaguuuccuc

SEQ ID NO: 232618 - RNA, 19 nt, Artificial Sequence
  Description of Artificial Sequence: Synthetic oligonucleotide
  Sense strand starting at position 1598 SEQ ID NO: 2994
ggaaacucuacggguaaga

SEQ ID NO: 232619 - RNA, 19 nt, Artificial Sequence
  Description of Artificial Sequence: Synthetic oligonucleotide
  Antisense strand to SEQ ID NO: 232618
ucuuacccguagaguuucc

SEQ ID NO: 232620 - RNA, 19 nt, Artificial Sequence
  Description of Artificial Sequence: Synthetic oligonucleotide
  Sense strand starting at position 1663 SEQ ID NO: 2994
gaaggcuugccagggacua

SEQ ID NO: 232621 - RNA, 19 nt, Artificial Sequence
  Description of Artificial Sequence: Synthetic oligonucleotide
  Antisense strand to SEQ ID NO: 232620
uagucccuggcaagccuuc

SEQ ID NO: 232622 - RNA, 19 nt, Artificial Sequence
  Description of Artificial Sequence: Synthetic oligonucleotide
  Sense strand starting at position 2069 SEQ ID NO: 2994
acgcuuaugagcuggcaga

SEQ ID NO: 232623 - RNA, 19 nt, Artificial Sequence
  Description of Artificial Sequence: Synthetic oligonucleotide
  Antisense strand to SEQ ID NO: 232622
ucugccagcucauaagcgu

SEQ ID NO: 232624 - RNA, 19 nt, Artificial Sequence
  Description of Artificial Sequence: Synthetic oligonucleotide
  Sense strand starting at position 2070 SEQ ID NO: 2994
cgcuuaugagcuggcagaa

SEQ ID NO: 232625 - RNA, 19 nt, Artificial Sequence
  Description of Artificial Sequence: Synthetic oligonucleotide
  Antisense strand to SEQ ID NO: 232624
uucugccagcucauaagcg

SEQ ID NO: 232626 - RNA, 19 nt, Artificial Sequence
  Description of Artificial Sequence: Synthetic oligonucleotide
  Sense strand starting at position 2119 SEQ ID NO: 2994
uuccaagggucuuagggaa

SEQ ID NO: 232627 - RNA, 19 nt, Artificial Sequence
  Description of Artificial Sequence: Synthetic oligonucleotide
  Antisense strand to SEQ ID NO: 232626
uucccuaagacccuuggaa

SEQ ID NO: 232628 - RNA, 19 nt, Artificial Sequence
  Description of Artificial Sequence: Synthetic oligonucleotide
  Sense strand starting at position 2134 SEQ ID NO: 2994
ggaacccugauccgugaaa

SEQ ID NO: 232629 - RNA, 19 nt, Artificial Sequence
  Description of Artificial Sequence: Synthetic oligonucleotide
  Antisense strand to SEQ ID NO: 232628
uuucacggaucaggguucc

SEQ ID NO: 232630 - RNA, 19 nt, Artificial Sequence
  Description of Artificial Sequence: Synthetic oligonucleotide
  Sense strand starting at position 2135 SEQ ID NO: 2994
gaacccugauccgugaaau

SEQ ID NO: 232631 - RNA, 19 nt, Artificial Sequence
  Description of Artificial Sequence: Synthetic oligonucleotide
  Antisense strand to SEQ ID NO: 232630
auuucacggaucaggguuc

SEQ ID NO: 232632 - RNA, 19 nt, Artificial Sequence
  Description of Artificial Sequence: Synthetic oligonucleotide
  Sense strand starting at position 2136 SEQ ID NO: 2994
aacccugauccgugaaauu

SEQ ID NO: 232633 - RNA, 19 nt, Artificial Sequence
  Description of Artificial Sequence: Synthetic oligonucleotide
  Antisense strand to SEQ ID NO: 232632
aauuucacggaucaggguu

SEQ ID NO: 232634 - RNA, 19 nt, Artificial Sequence
  Description of Artificial Sequence: Synthetic oligonucleotide
  Sense strand starting at position 2184 SEQ ID NO: 2994
gggaauuaguuccugcuac

SEQ ID NO: 232635 - RNA, 19 nt, Artificial Sequence
  Description of Artificial Sequence: Synthetic oligonucleotide
  Antisense strand to SEQ ID NO: 232634
guagcaggaacuaauuccc

SEQ ID NO: 232636 - RNA, 19 nt, Artificial Sequence
  Description of Artificial Sequence: Synthetic oligonucleotide
  Sense strand starting at position 2238 SEQ ID NO: 2994
ccaaguagaucuccacagu

SEQ ID NO: 232637 - RNA, 19 nt, Artificial Sequence
  Description of Artificial Sequence: Synthetic oligonucleotide
  Antisense strand to SEQ ID NO: 232636
acuguggagaucuacuugg

SEQ ID NO: 232638 - RNA, 19 nt, Artificial Sequence
  Description of Artificial Sequence: Synthetic oligonucleotide
  Sense strand starting at position 2485 SEQ ID NO: 2994
ugcggcucagcugauaauu

SEQ ID NO: 232639 - RNA, 19 nt, Artificial Sequence
  Description of Artificial Sequence: Synthetic oligonucleotide
  Antisense strand to SEQ ID NO: 232638
aauuaucagcugagccgca

SEQ ID NO: 232640 - RNA, 19 nt, Artificial Sequence
  Description of Artificial Sequence: Synthetic oligonucleotide
  Sense strand starting at position 2997 SEQ ID NO: 2994
gagggugucugggaagaga

SEQ ID NO: 232641 - RNA, 19 nt, Artificial Sequence
  Description of Artificial Sequence: Synthetic oligonucleotide
  Antisense strand to SEQ ID NO: 232640
ucucuucccagacacccuc

SEQ ID NO: 232642 - RNA, 19 nt, Artificial Sequence
  Description of Artificial Sequence: Synthetic oligonucleotide
  Sense strand starting at position 3206 SEQ ID NO: 2994
gagacuuuagaccgcagua

SEQ ID NO: 232643 - RNA, 19 nt, Artificial Sequence
  Description of Artificial Sequence: Synthetic oligonucleotide
  Antisense strand to SEQ ID NO: 232642
uacugcggucuaaagucuc

SEQ ID NO: 232644 - RNA, 19 nt, Artificial Sequence
  Description of Artificial Sequence: Synthetic oligonucleotide
  Sense strand starting at position 3373 SEQ ID NO: 2994
agccgagaaacuugacuga

SEQ ID NO: 232645 - RNA, 19 nt, Artificial Sequence
  Description of Artificial Sequence: Synthetic oligonucleotide
  Antisense strand to SEQ ID NO: 232644
ucagucaaguuucucggcu

SEQ ID NO: 232646 - RNA, 19 nt, Artificial Sequence
  Description of Artificial Sequence: Synthetic oligonucleotide
  Sense strand starting at position 3380 SEQ ID NO: 2994
aaacuugacugagaggaau

SEQ ID NO: 232647 - RNA, 19 nt, Artificial Sequence
  Description of Artificial Sequence: Synthetic oligonucleotide
  Antisense strand to SEQ ID NO: 232646
auuccucucagucaaguuu

SEQ ID NO: 232648 - RNA, 19 nt, Artificial Sequence
  Description of Artificial Sequence: Synthetic oligonucleotide
  Sense strand starting at position 3410 SEQ ID NO: 2994
uuaaauagaucagaaugga

SEQ ID NO: 232649 - RNA, 19 nt, Artificial Sequence
  Description of Artificial Sequence: Synthetic oligonucleotide
  Antisense strand to SEQ ID NO: 232648
uccauucugaucuauuuaa

SEQ ID NO: 232650 - RNA, 19 nt, Artificial Sequence
  Description of Artificial Sequence: Synthetic oligonucleotide
  Sense strand starting at position 3507 SEQ ID NO: 2994
gagcgagucaggcgauuaa

SEQ ID NO: 232651 - RNA, 19 nt, Artificial Sequence
  Description of Artificial Sequence: Synthetic oligonucleotide
  Antisense strand to SEQ ID NO: 232650
uuaaucgccugacucgcuc

SEQ ID NO: 232652 - RNA, 19 nt, Artificial Sequence
  Description of Artificial Sequence: Synthetic oligonucleotide
  Sense strand starting at position 3603 SEQ ID NO: 2994
cauagugaguggguuucua

SEQ ID NO: 232653 - RNA, 19 nt, Artificial Sequence
  Description of Artificial Sequence: Synthetic oligonucleotide
  Antisense strand to SEQ ID NO: 232652
uagaaacccacucacuaug

SEQ ID NO: 232654 - RNA, 19 nt, Artificial Sequence
  Description of Artificial Sequence: Synthetic oligonucleotide
  Sense strand starting at position 3647 SEQ ID NO: 2994
ucgaauaacgaagguagua

SEQ ID NO: 232655 - RNA, 19 nt, Artificial Sequence
  Description of Artificial Sequence: Synthetic oligonucleotide
  Antisense strand to SEQ ID NO: 232654
uacuaccuucguuauucga

SEQ ID NO: 232656 - RNA, 19 nt, Artificial Sequence
  Description of Artificial Sequence: Synthetic oligonucleotide
  Sense strand starting at position 3826 SEQ ID NO: 2994
uuacguggugaggagauaa

SEQ ID NO: 232657 - RNA, 19 nt, Artificial Sequence
  Description of Artificial Sequence: Synthetic oligonucleotide
  Antisense strand to SEQ ID NO: 232656
uuaucuccucaccacguaa

SEQ ID NO: 232658 - RNA, 19 nt, Artificial Sequence
  Description of Artificial Sequence: Synthetic oligonucleotide
  Sense strand starting at position 3914 SEQ ID NO: 2994
ggagguuuagccuaagcau

SEQ ID NO: 232659 - RNA, 19 nt, Artificial Sequence
  Description of Artificial Sequence: Synthetic oligonucleotide
  Antisense strand to SEQ ID NO: 232658
augcuuaggcuaaaccucc

SEQ ID NO: 232660 - RNA, 19 nt, Artificial Sequence
  Description of Artificial Sequence: Synthetic oligonucleotide
  Sense strand starting at position 3981 SEQ ID NO: 2994
gagggaauguguuugugug

SEQ ID NO: 232661 - RNA, 19 nt, Artificial Sequence
  Description of Artificial Sequence: Synthetic oligonucleotide
  Antisense strand to SEQ ID NO: 232660
cacacaaacacauucccuc

SEQ ID NO: 232662 - RNA, 19 nt, Artificial Sequence
  Description of Artificial Sequence: Synthetic oligonucleotide
  Sense strand starting at position 3982 SEQ ID NO: 2994
agggaauguguuugugugu

SEQ ID NO: 232663 - RNA, 19 nt, Artificial Sequence
  Description of Artificial Sequence: Synthetic oligonucleotide
  Antisense strand to SEQ ID NO: 232662
acacacaaacacauucccu

SEQ ID NO: 232664 - RNA, 19 nt, Artificial Sequence
  Description of Artificial Sequence: Synthetic oligonucleotide
  Sense strand starting at position 3983 SEQ ID NO: 2994
gggaauguguuugugugua

SEQ ID NO: 232665 - RNA, 19 nt, Artificial Sequence
  Description of Artificial Sequence: Synthetic oligonucleotide
  Antisense strand to SEQ ID NO: 232664
uacacacaaacacauuccc

SEQ ID NO: 232666 - RNA, 19 nt, Artificial Sequence
  Description of Artificial Sequence: Synthetic oligonucleotide
  Sense strand starting at position 403 SEQ ID NO: 2995
gaagaagauugagacagau

SEQ ID NO: 232667 - RNA, 19 nt, Artificial Sequence
  Description of Artificial Sequence: Synthetic oligonucleotide
  Antisense strand to SEQ ID NO: 232666
aucugucucaaucuucuuc

SEQ ID NO: 232668 - RNA, 19 nt, Artificial Sequence
  Description of Artificial Sequence: Synthetic oligonucleotide
  Sense strand starting at position 471 SEQ ID NO: 2995
agggaucagcuaugucaaa

SEQ ID NO: 232669 - RNA, 19 nt, Artificial Sequence
  Description of Artificial Sequence: Synthetic oligonucleotide
  Antisense strand to SEQ ID NO: 232668
uuugacauagcugaucccu

SEQ ID NO: 232670 - RNA, 19 nt, Artificial Sequence
  Description of Artificial Sequence: Synthetic oligonucleotide
  Sense strand starting at position 472 SEQ ID NO: 2995
gggaucagcuaugucaaau

SEQ ID NO: 232671 - RNA, 19 nt, Artificial Sequence
  Description of Artificial Sequence: Synthetic oligonucleotide
  Antisense strand to SEQ ID NO: 232670
auuugacauagcugauccc

SEQ ID NO: 232672 - RNA, 19 nt, Artificial Sequence
  Description of Artificial Sequence: Synthetic oligonucleotide
  Sense strand starting at position 718 SEQ ID NO: 2995
augacaugucuguaugcuu

SEQ ID NO: 232673 - RNA, 19 nt, Artificial Sequence
  Description of Artificial Sequence: Synthetic oligonucleotide
  Antisense strand to SEQ ID NO: 232672
aagcauacagacaugucau

SEQ ID NO: 232674 - RNA, 19 nt, Artificial Sequence
  Description of Artificial Sequence: Synthetic oligonucleotide
  Sense strand starting at position 785 SEQ ID NO: 2995
agaguugagcuauaucuuu

SEQ ID NO: 232675 - RNA, 19 nt, Artificial Sequence
  Description of Artificial Sequence: Synthetic oligonucleotide
  Antisense strand to SEQ ID NO: 232674
aaagauauagcucaacucu

SEQ ID NO: 232676 - RNA, 19 nt, Artificial Sequence
  Description of Artificial Sequence: Synthetic oligonucleotide
  Sense strand starting at position 791 SEQ ID NO: 2995
gagcuauaucuuuggcuag

SEQ ID NO: 232677 - RNA, 19 nt, Artificial Sequence
  Description of Artificial Sequence: Synthetic oligonucleotide
  Antisense strand to SEQ ID NO: 232676
cuagccaaagauauagcuc

SEQ ID NO: 232678 - RNA, 19 nt, Artificial Sequence
  Description of Artificial Sequence: Synthetic oligonucleotide
  Sense strand starting at position 847 SEQ ID NO: 2995
uuggcuugucuaggacaga

SEQ ID NO: 232679 - RNA, 19 nt, Artificial Sequence
  Description of Artificial Sequence: Synthetic oligonucleotide
  Antisense strand to SEQ ID NO: 232678
ucuguccuagacaagccaa

SEQ ID NO: 232680 - RNA, 19 nt, Artificial Sequence
  Description of Artificial Sequence: Synthetic oligonucleotide
  Sense strand starting at position 907 SEQ ID NO: 2995
cugccauguccucacagua

SEQ ID NO: 232681 - RNA, 19 nt, Artificial Sequence
  Description of Artificial Sequence: Synthetic oligonucleotide
  Antisense strand to SEQ ID NO: 232680
uacugugaggacauggcag

SEQ ID NO: 232682 - RNA, 19 nt, Artificial Sequence
  Description of Artificial Sequence: Synthetic oligonucleotide
  Sense strand starting at position 969 SEQ ID NO: 2995
ggccacggauccucuauua

SEQ ID NO: 232683 - RNA, 19 nt, Artificial Sequence
  Description of Artificial Sequence: Synthetic oligonucleotide
  Antisense strand to SEQ ID NO: 232682
uaauagaggauccguggcc

SEQ ID NO: 232684 - RNA, 19 nt, Artificial Sequence
  Description of Artificial Sequence: Synthetic oligonucleotide
  Sense strand starting at position 1868 SEQ ID NO: 2995
uggucuuggagaggaugua

SEQ ID NO: 232685 - RNA, 19 nt, Artificial Sequence
  Description of Artificial Sequence: Synthetic oligonucleotide
  Antisense strand to SEQ ID NO: 232684
uacauccucuccaagacca

SEQ ID NO: 232686 - RNA, 19 nt, Artificial Sequence
  Description of Artificial Sequence: Synthetic oligonucleotide
  Sense strand starting at position 1880 SEQ ID NO: 2995
ggauguagagcgucucgua

SEQ ID NO: 232687 - RNA, 19 nt, Artificial Sequence
  Description of Artificial Sequence: Synthetic oligonucleotide
  Antisense strand to SEQ ID NO: 232686
uacgagacgcucuacaucc

SEQ ID NO: 232688 - RNA, 19 nt, Artificial Sequence
  Description of Artificial Sequence: Synthetic oligonucleotide
  Sense strand starting at position 2297 SEQ ID NO: 2995
ccuguaugugugcaagaga

SEQ ID NO: 232689 - RNA, 19 nt, Artificial Sequence
  Description of Artificial Sequence: Synthetic oligonucleotide
  Antisense strand to SEQ ID NO: 232688
ucucuugcacacauacagg

SEQ ID NO: 232690 - RNA, 19 nt, Artificial Sequence
  Description of Artificial Sequence: Synthetic oligonucleotide
  Sense strand starting at position 2421 SEQ ID NO: 2995
acgguuaaacuguagcaua

SEQ ID NO: 232691 - RNA, 19 nt, Artificial Sequence
  Description of Artificial Sequence: Synthetic oligonucleotide
  Antisense strand to SEQ ID NO: 232690
uaugcuacaguuuaaccgu

SEQ ID NO: 232692 - RNA, 19 nt, Artificial Sequence
  Description of Artificial Sequence: Synthetic oligonucleotide
  Sense strand starting at position 2512 SEQ ID NO: 2995
uauuauguugcaugaaaga

SEQ ID NO: 232693 - RNA, 19 nt, Artificial Sequence
  Description of Artificial Sequence: Synthetic oligonucleotide
  Antisense strand to SEQ ID NO: 232692
ucuuucaugcaacauaaua

SEQ ID NO: 232694 - RNA, 19 nt, Artificial Sequence
  Description of Artificial Sequence: Synthetic oligonucleotide
  Sense strand starting at position 2543 SEQ ID NO: 2995
gagugcaugcuguagaauu

SEQ ID NO: 232695 - RNA, 19 nt, Artificial Sequence
  Description of Artificial Sequence: Synthetic oligonucleotide
  Antisense strand to SEQ ID NO: 232694
aauucuacagcaugcacuc

SEQ ID NO: 232696 - RNA, 19 nt, Artificial Sequence
  Description of Artificial Sequence: Synthetic oligonucleotide
  Sense strand starting at position 2661 SEQ ID NO: 2995
cuuuaugugaugcggagaa

SEQ ID NO: 232697 - RNA, 19 nt, Artificial Sequence
  Description of Artificial Sequence: Synthetic oligonucleotide
  Antisense strand to SEQ ID NO: 232696
uucuccgcaucacauaaag

SEQ ID NO: 232698 - RNA, 19 nt, Artificial Sequence
  Description of Artificial Sequence: Synthetic oligonucleotide
  Sense strand starting at position 2663 SEQ ID NO: 2995
uuaugugaugcggagaaug

SEQ ID NO: 232699 - RNA, 19 nt, Artificial Sequence
  Description of Artificial Sequence: Synthetic oligonucleotide
  Antisense strand to SEQ ID NO: 232698
cauucuccgcaucacauaa

SEQ ID NO: 232700 - RNA, 19 nt, Artificial Sequence
  Description of Artificial Sequence: Synthetic oligonucleotide
  Sense strand starting at position 2665 SEQ ID NO: 2995
augugaugcggagaauguu

SEQ ID NO: 232701 - RNA, 19 nt, Artificial Sequence
  Description of Artificial Sequence: Synthetic oligonucleotide
  Antisense strand to SEQ ID NO: 232700
aacauucuccgcaucacau

SEQ ID NO: 232702 - RNA, 19 nt, Artificial Sequence
  Description of Artificial Sequence: Synthetic oligonucleotide
  Sense strand starting at position 2673 SEQ ID NO: 2995
cggagaauguucucuaucu

SEQ ID NO: 232703 - RNA, 19 nt, Artificial Sequence
  Description of Artificial Sequence: Synthetic oligonucleotide
  Antisense strand to SEQ ID NO: 232702
agauagagaacauucuccg

SEQ ID NO: 232704 - RNA, 19 nt, Artificial Sequence
  Description of Artificial Sequence: Synthetic oligonucleotide
  Sense strand starting at position 2674 SEQ ID NO: 2995
ggagaauguucucuaucug

SEQ ID NO: 232705 - RNA, 19 nt, Artificial Sequence
  Description of Artificial Sequence: Synthetic oligonucleotide
  Antisense strand to SEQ ID NO: 232704
cagauagagaacauucucc

SEQ ID NO: 232706 - RNA, 19 nt, Artificial Sequence
  Description of Artificial Sequence: Synthetic oligonucleotide
  Sense strand starting at position 2675 SEQ ID NO: 2995
gagaauguucucuaucugc

SEQ ID NO: 232707 - RNA, 19 nt, Artificial Sequence
  Description of Artificial Sequence: Synthetic oligonucleotide
  Antisense strand to SEQ ID NO: 232706
gcagauagagaacauucuc

SEQ ID NO: 232708 - RNA, 19 nt, Artificial Sequence
  Description of Artificial Sequence: Synthetic oligonucleotide
  Sense strand starting at position 2706 SEQ ID NO: 2995
uuauacaguuguguacaua

SEQ ID NO: 232709 - RNA, 19 nt, Artificial Sequence
  Description of Artificial Sequence: Synthetic oligonucleotide
  Antisense strand to SEQ ID NO: 232708
uauguacacaacuguauaa

SEQ ID NO: 232710 - RNA, 19 nt, Artificial Sequence
  Description of Artificial Sequence: Synthetic oligonucleotide
  Sense strand starting at position 2707 SEQ ID NO: 2995
uauacaguuguguacauau

SEQ ID NO: 232711 - RNA, 19 nt, Artificial Sequence
  Description of Artificial Sequence: Synthetic oligonucleotide
  Antisense strand to SEQ ID NO: 232710
auauguacacaacuguaua

SEQ ID NO: 232712 - RNA, 19 nt, Artificial Sequence
  Description of Artificial Sequence: Synthetic oligonucleotide
  Sense strand starting at position 2896 SEQ ID NO: 2995
guuuguucugucccgacuu

SEQ ID NO: 232713 - RNA, 19 nt, Artificial Sequence
  Description of Artificial Sequence: Synthetic oligonucleotide
  Antisense strand to SEQ ID NO: 232712
aagucgggacagaacaaac

SEQ ID NO: 232714 - RNA, 19 nt, Artificial Sequence
  Description of Artificial Sequence: Synthetic oligonucleotide
  Sense strand starting at position 3234 SEQ ID NO: 2995
cccugugaucaaggucaca

SEQ ID NO: 232715 - RNA, 19 nt, Artificial Sequence
  Description of Artificial Sequence: Synthetic oligonucleotide
  Antisense strand to SEQ ID NO: 232714
ugugaccuugaucacaggg

SEQ ID NO: 232716 - RNA, 19 nt, Artificial Sequence
  Description of Artificial Sequence: Synthetic oligonucleotide
  Sense strand starting at position 3270 SEQ ID NO: 2995
acaagccaguugucaucaa

SEQ ID NO: 232717 - RNA, 19 nt, Artificial Sequence
  Description of Artificial Sequence: Synthetic oligonucleotide
  Antisense strand to SEQ ID NO: 232716
uugaugacaacuggcuugu

SEQ ID NO: 232718 - RNA, 19 nt, Artificial Sequence
  Description of Artificial Sequence: Synthetic oligonucleotide
  Sense strand starting at position 3274 SEQ ID NO: 2995
gccaguugucaucaagggu

SEQ ID NO: 232719 - RNA, 19 nt, Artificial Sequence
  Description of Artificial Sequence: Synthetic oligonucleotide
  Antisense strand to SEQ ID NO: 232718
acccuugaugacaacuggc

SEQ ID NO: 232720 - RNA, 19 nt, Artificial Sequence
  Description of Artificial Sequence: Synthetic oligonucleotide
  Sense strand starting at position 3277 SEQ ID NO: 2995
aguugucaucaagggucuu

SEQ ID NO: 232721 - RNA, 19 nt, Artificial Sequence
  Description of Artificial Sequence: Synthetic oligonucleotide
  Antisense strand to SEQ ID NO: 232720
aagacccuugaugacaacu

SEQ ID NO: 232722 - RNA, 19 nt, Artificial Sequence
  Description of Artificial Sequence: Synthetic oligonucleotide
  Sense strand starting at position 3353 SEQ ID NO: 2995
agcuuuccugucuggauuu

SEQ ID NO: 232723 - RNA, 19 nt, Artificial Sequence
  Description of Artificial Sequence: Synthetic oligonucleotide
  Antisense strand to SEQ ID NO: 232722
aaauccagacaggaaagcu

SEQ ID NO: 232724 - RNA, 19 nt, Artificial Sequence
  Description of Artificial Sequence: Synthetic oligonucleotide
  Sense strand starting at position 3547 SEQ ID NO: 2995
uuguguugccuucuggcau

SEQ ID NO: 232725 - RNA, 19 nt, Artificial Sequence
  Description of Artificial Sequence: Synthetic oligonucleotide
  Antisense strand to SEQ ID NO: 232724
augccagaaggcaacacaa

SEQ ID NO: 232726 - RNA, 19 nt, Artificial Sequence
  Description of Artificial Sequence: Synthetic oligonucleotide
  Sense strand starting at position 3617 SEQ ID NO: 2995
aguccuccuccugguaaca

SEQ ID NO: 232727 - RNA, 19 nt, Artificial Sequence
  Description of Artificial Sequence: Synthetic oligonucleotide
  Antisense strand to SEQ ID NO: 232726
uguuaccaggaggaggacu

SEQ ID NO: 232728 - RNA, 19 nt, Artificial Sequence
  Description of Artificial Sequence: Synthetic oligonucleotide
  Sense strand starting at position 3702 SEQ ID NO: 2995
ugacauagaccuggcaaau

SEQ ID NO: 232729 - RNA, 19 nt, Artificial Sequence
  Description of Artificial Sequence: Synthetic oligonucleotide
  Antisense strand to SEQ ID NO: 232728
auuugccaggucuauguca

SEQ ID NO: 232730 - RNA, 19 nt, Artificial Sequence
  Description of Artificial Sequence: Synthetic oligonucleotide
  Sense strand starting at position 3771 SEQ ID NO: 2995
acuguucuggaaugacuga

SEQ ID NO: 232731 - RNA, 19 nt, Artificial Sequence
  Description of Artificial Sequence: Synthetic oligonucleotide
  Antisense strand to SEQ ID NO: 232730
ucagucauuccagaacagu

SEQ ID NO: 232732 - RNA, 19 nt, Artificial Sequence
  Description of Artificial Sequence: Synthetic oligonucleotide
  Sense strand starting at position 3788 SEQ ID NO: 2995
gagggaaagcauugucuuu

SEQ ID NO: 232733 - RNA, 19 nt, Artificial Sequence
  Description of Artificial Sequence: Synthetic oligonucleotide
  Antisense strand to SEQ ID NO: 232732
aaagacaaugcuuucccuc

SEQ ID NO: 232734 - RNA, 19 nt, Artificial Sequence
  Description of Artificial Sequence: Synthetic oligonucleotide
  Sense strand starting at position 3793 SEQ ID NO: 2995
aaagcauugucuuugggau

SEQ ID NO: 232735 - RNA, 19 nt, Artificial Sequence
  Description of Artificial Sequence: Synthetic oligonucleotide
  Antisense strand to SEQ ID NO: 232734
aucccaaagacaaugcuuu

SEQ ID NO: 232736 - RNA, 19 nt, Artificial Sequence
  Description of Artificial Sequence: Synthetic oligonucleotide
  Sense strand starting at position 3794 SEQ ID NO: 2995
aagcauugucuuugggauc

SEQ ID NO: 232737 - RNA, 19 nt, Artificial Sequence
  Description of Artificial Sequence: Synthetic oligonucleotide
  Antisense strand to SEQ ID NO: 232736
gaucccaaagacaaugcuu

SEQ ID NO: 232738 - RNA, 19 nt, Artificial Sequence
  Description of Artificial Sequence: Synthetic oligonucleotide
  Sense strand starting at position 3800 SEQ ID NO: 2995
ugucuuugggaucagguuu

SEQ ID NO: 232739 - RNA, 19 nt, Artificial Sequence
  Description of Artificial Sequence: Synthetic oligonucleotide
  Antisense strand to SEQ ID NO: 232738
aaaccugaucccaaagaca

SEQ ID NO: 232740 - RNA, 19 nt, Artificial Sequence
  Description of Artificial Sequence: Synthetic oligonucleotide
  Sense strand starting at position 3811 SEQ ID NO: 2995
ucagguuucuaagcugaug

SEQ ID NO: 232741 - RNA, 19 nt, Artificial Sequence
  Description of Artificial Sequence: Synthetic oligonucleotide
  Antisense strand to SEQ ID NO: 232740
caucagcuuagaaaccuga

SEQ ID NO: 232742 - RNA, 19 nt, Artificial Sequence
  Description of Artificial Sequence: Synthetic oligonucleotide
  Sense strand starting at position 3813 SEQ ID NO: 2995
agguuucuaagcugaugga

SEQ ID NO: 232743 - RNA, 19 nt, Artificial Sequence
  Description of Artificial Sequence: Synthetic oligonucleotide
  Antisense strand to SEQ ID NO: 232742
uccaucagcuuagaaaccu

SEQ ID NO: 232744 - RNA, 19 nt, Artificial Sequence
  Description of Artificial Sequence: Synthetic oligonucleotide
  Sense strand starting at position 3873 SEQ ID NO: 2995
ggagacaccugggaaugaa

SEQ ID NO: 232745 - RNA, 19 nt, Artificial Sequence
  Description of Artificial Sequence: Synthetic oligonucleotide
  Antisense strand to SEQ ID NO: 232744
uucauucccaggugucucc

SEQ ID NO: 232746 - RNA, 19 nt, Artificial Sequence
  Description of Artificial Sequence: Synthetic oligonucleotide
  Sense strand starting at position 63 SEQ ID NO: 2996
uccugaaaguucuugcaag

SEQ ID NO: 232747 - RNA, 19 nt, Artificial Sequence
  Description of Artificial Sequence: Synthetic oligonucleotide
  Antisense strand to SEQ ID NO: 232746
cuugcaagaacuuucagga

SEQ ID NO: 232748 - RNA, 19 nt, Artificial Sequence
  Description of Artificial Sequence: Synthetic oligonucleotide
  Sense strand starting at position 79 SEQ ID NO: 2996
aaggauuaacagugauagu

SEQ ID NO: 232749 - RNA, 19 nt, Artificial Sequence
  Description of Artificial Sequence: Synthetic oligonucleotide
  Antisense strand to SEQ ID NO: 232748
acuaucacuguuaauccuu

SEQ ID NO: 232750 - RNA, 19 nt, Artificial Sequence
  Description of Artificial Sequence: Synthetic oligonucleotide
  Sense strand starting at position 86 SEQ ID NO: 2996
aacagugauaguggguaaa

SEQ ID NO: 232751 - RNA, 19 nt, Artificial Sequence
  Description of Artificial Sequence: Synthetic oligonucleotide
  Antisense strand to SEQ ID NO: 232750
uuuacccacuaucacuguu

SEQ ID NO: 232752 - RNA, 19 nt, Artificial Sequence
  Description of Artificial Sequence: Synthetic oligonucleotide
  Sense strand starting at position 109 SEQ ID NO: 2996
cuagucuugcuacaucuga

SEQ ID NO: 232753 - RNA, 19 nt, Artificial Sequence
  Description of Artificial Sequence: Synthetic oligonucleotide
  Antisense strand to SEQ ID NO: 232752
ucagauguagcaagacuag

SEQ ID NO: 232754 - RNA, 19 nt, Artificial Sequence
  Description of Artificial Sequence: Synthetic oligonucleotide
  Sense strand starting at position 317 SEQ ID NO: 2996
gagaaaugguucuugcuau

SEQ ID NO: 232755 - RNA, 19 nt, Artificial Sequence
  Description of Artificial Sequence: Synthetic oligonucleotide
  Antisense strand to SEQ ID NO: 232754
auagcaagaaccauuucuc

SEQ ID NO: 232756 - RNA, 19 nt, Artificial Sequence
  Description of Artificial Sequence: Synthetic oligonucleotide
  Sense strand starting at position 478 SEQ ID NO: 2996
ccugaauacuuguuguaca

SEQ ID NO: 232757 - RNA, 19 nt, Artificial Sequence
  Description of Artificial Sequence: Synthetic oligonucleotide
  Antisense strand to SEQ ID NO: 232756
uguacaacaaguauucagg

SEQ ID NO: 232758 - RNA, 19 nt, Artificial Sequence
  Description of Artificial Sequence: Synthetic oligonucleotide
  Sense strand starting at position 485 SEQ ID NO: 2996
acuuguuguacaugggaac

SEQ ID NO: 232759 - RNA, 19 nt, Artificial Sequence
  Description of Artificial Sequence: Synthetic oligonucleotide
  Antisense strand to SEQ ID NO: 232758
guucccauguacaacaagu

SEQ ID NO: 232760 - RNA, 19 nt, Artificial Sequence
  Description of Artificial Sequence: Synthetic oligonucleotide
  Sense strand starting at position 520 SEQ ID NO: 2996
auuugcaauuugugacuua

SEQ ID NO: 232761 - RNA, 19 nt, Artificial Sequence
  Description of Artificial Sequence: Synthetic oligonucleotide
  Antisense strand to SEQ ID NO: 232760
uaagucacaaauugcaaau

SEQ ID NO: 232762 - RNA, 19 nt, Artificial Sequence
  Description of Artificial Sequence: Synthetic oligonucleotide
  Sense strand starting at position 589 SEQ ID NO: 2996
uguaucuuauagguaggua

SEQ ID NO: 232763 - RNA, 19 nt, Artificial Sequence
  Description of Artificial Sequence: Synthetic oligonucleotide
  Antisense strand to SEQ ID NO: 232762
uaccuaccuauaagauaca

SEQ ID NO: 232764 - RNA, 19 nt, Artificial Sequence
  Description of Artificial Sequence: Synthetic oligonucleotide
  Sense strand starting at position 590 SEQ ID NO: 2996
guaucuuauagguagguag

SEQ ID NO: 232765 - RNA, 19 nt, Artificial Sequence
  Description of Artificial Sequence: Synthetic oligonucleotide
  Antisense strand to SEQ ID NO: 232764
cuaccuaccuauaagauac

SEQ ID NO: 232766 - RNA, 19 nt, Artificial Sequence
  Description of Artificial Sequence: Synthetic oligonucleotide
  Sense strand starting at position 693 SEQ ID NO: 2996
cagucauaagaguaguguu

SEQ ID NO: 232767 - RNA, 19 nt, Artificial Sequence
  Description of Artificial Sequence: Synthetic oligonucleotide
  Antisense strand to SEQ ID NO: 232766
aacacuacucuuaugacug

SEQ ID NO: 232768 - RNA, 19 nt, Artificial Sequence
  Description of Artificial Sequence: Synthetic oligonucleotide
  Sense strand starting at position 791 SEQ ID NO: 2996
gugagugacaacuguaaac

SEQ ID NO: 232769 - RNA, 19 nt, Artificial Sequence
  Description of Artificial Sequence: Synthetic oligonucleotide
  Antisense strand to SEQ ID NO: 232768
guuuacaguugucacucac

SEQ ID NO: 232770 - RNA, 19 nt, Artificial Sequence
  Description of Artificial Sequence: Synthetic oligonucleotide
  Sense strand starting at position 889 SEQ ID NO: 2996
aggugaaugguguaggcuu

SEQ ID NO: 232771 - RNA, 19 nt, Artificial Sequence
  Description of Artificial Sequence: Synthetic oligonucleotide
  Antisense strand to SEQ ID NO: 232770
aagccuacaccauucaccu

SEQ ID NO: 232772 - RNA, 19 nt, Artificial Sequence
  Description of Artificial Sequence: Synthetic oligonucleotide
  Sense strand starting at position 936 SEQ ID NO: 2996
acaucaccauccuugaguu

SEQ ID NO: 232773 - RNA, 19 nt, Artificial Sequence
  Description of Artificial Sequence: Synthetic oligonucleotide
  Antisense strand to SEQ ID NO: 232772
aacucaaggauggugaugu

SEQ ID NO: 232774 - RNA, 19 nt, Artificial Sequence
  Description of Artificial Sequence: Synthetic oligonucleotide
  Sense strand starting at position 1044 SEQ ID NO: 2996
aggagagguuugagguaaa

SEQ ID NO: 232775 - RNA, 19 nt, Artificial Sequence
  Description of Artificial Sequence: Synthetic oligonucleotide
  Antisense strand to SEQ ID NO: 232774
uuuaccucaaaccucuccu

SEQ ID NO: 232776 - RNA, 19 nt, Artificial Sequence
  Description of Artificial Sequence: Synthetic oligonucleotide
  Sense strand starting at position 1101 SEQ ID NO: 2996
agacgagcuacucagcuau

SEQ ID NO: 232777 - RNA, 19 nt, Artificial Sequence
  Description of Artificial Sequence: Synthetic oligonucleotide
  Antisense strand to SEQ ID NO: 232776
auagcugaguagcucgucu

SEQ ID NO: 232778 - RNA, 19 nt, Artificial Sequence
  Description of Artificial Sequence: Synthetic oligonucleotide
  Sense strand starting at position 1191 SEQ ID NO: 2996
gucuguguucaacagaggu

SEQ ID NO: 232779 - RNA, 19 nt, Artificial Sequence
  Description of Artificial Sequence: Synthetic oligonucleotide
  Antisense strand to SEQ ID NO: 232778
accucuguugaacacagac

SEQ ID NO: 232780 - RNA, 19 nt, Artificial Sequence
  Description of Artificial Sequence: Synthetic oligonucleotide
  Sense strand starting at position 1207 SEQ ID NO: 2996
ggucuucuucuugaggguu

SEQ ID NO: 232781 - RNA, 19 nt, Artificial Sequence
  Description of Artificial Sequence: Synthetic oligonucleotide
  Antisense strand to SEQ ID NO: 232780
aacccucaagaagaagacc

SEQ ID NO: 232782 - RNA, 19 nt, Artificial Sequence
  Description of Artificial Sequence: Synthetic oligonucleotide
  Sense strand starting at position 1257 SEQ ID NO: 2996
gugagucaagagcaaguuu

SEQ ID NO: 232783 - RNA, 19 nt, Artificial Sequence
  Description of Artificial Sequence: Synthetic oligonucleotide
  Antisense strand to SEQ ID NO: 232782
aaacuugcucuugacucac

SEQ ID NO: 232784 - RNA, 19 nt, Artificial Sequence
  Description of Artificial Sequence: Synthetic oligonucleotide
  Sense strand starting at position 1447 SEQ ID NO: 2996
auuccuguaacgggaauga

SEQ ID NO: 232785 - RNA, 19 nt, Artificial Sequence
  Description of Artificial Sequence: Synthetic oligonucleotide
  Antisense strand to SEQ ID NO: 232784
ucauucccguuacaggaau

SEQ ID NO: 232786 - RNA, 19 nt, Artificial Sequence
  Description of Artificial Sequence: Synthetic oligonucleotide
  Sense strand starting at position 1650 SEQ ID NO: 2996
cuaucauucggagggauag

SEQ ID NO: 232787 - RNA, 19 nt, Artificial Sequence
  Description of Artificial Sequence: Synthetic oligonucleotide
  Antisense strand to SEQ ID NO: 232786
cuaucccuccgaaugauag

SEQ ID NO: 232788 - RNA, 19 nt, Artificial Sequence
  Description of Artificial Sequence: Synthetic oligonucleotide
  Sense strand starting at position 1966 SEQ ID NO: 2996
cuucuccucccgcgauuua

SEQ ID NO: 232789 - RNA, 19 nt, Artificial Sequence
  Description of Artificial Sequence: Synthetic oligonucleotide
  Antisense strand to SEQ ID NO: 232788
uaaaucgcgggaggagaag

SEQ ID NO: 232790 - RNA, 19 nt, Artificial Sequence
  Description of Artificial Sequence: Synthetic oligonucleotide
  Sense strand starting at position 1967 SEQ ID NO: 2996
uucuccucccgcgauuuaa

SEQ ID NO: 232791 - RNA, 19 nt, Artificial Sequence
  Description of Artificial Sequence: Synthetic oligonucleotide
  Antisense strand to SEQ ID NO: 232790
uuaaaucgcgggaggagaa

SEQ ID NO: 232792 - RNA, 19 nt, Artificial Sequence
  Description of Artificial Sequence: Synthetic oligonucleotide
  Sense strand starting at position 2765 SEQ ID NO: 2996
cugacuguauuaccauuau

SEQ ID NO: 232793 - RNA, 19 nt, Artificial Sequence
  Description of Artificial Sequence: Synthetic oligonucleotide
  Antisense strand to SEQ ID NO: 232792
auaaugguaauacagucag

SEQ ID NO: 232794 - RNA, 19 nt, Artificial Sequence
  Description of Artificial Sequence: Synthetic oligonucleotide
  Sense strand starting at position 2780 SEQ ID NO: 2996
uuauuaucuuauccaggga

SEQ ID NO: 232795 - RNA, 19 nt, Artificial Sequence
  Description of Artificial Sequence: Synthetic oligonucleotide
  Antisense strand to SEQ ID NO: 232794
ucccuggauaagauaauaa

SEQ ID NO: 232796 - RNA, 19 nt, Artificial Sequence
  Description of Artificial Sequence: Synthetic oligonucleotide
  Sense strand starting at position 2783 SEQ ID NO: 2996
uuaucuuauccagggauug

SEQ ID NO: 232797 - RNA, 19 nt, Artificial Sequence
  Description of Artificial Sequence: Synthetic oligonucleotide
  Antisense strand to SEQ ID NO: 232796
caaucccuggauaagauaa

SEQ ID NO: 232798 - RNA, 19 nt, Artificial Sequence
  Description of Artificial Sequence: Synthetic oligonucleotide
  Sense strand starting at position 3159 SEQ ID NO: 2996
gugucauuggucuaaggag

SEQ ID NO: 232799 - RNA, 19 nt, Artificial Sequence
  Description of Artificial Sequence: Synthetic oligonucleotide
  Antisense strand to SEQ ID NO: 232798
cuccuuagaccaaugacac

SEQ ID NO: 232800 - RNA, 19 nt, Artificial Sequence
  Description of Artificial Sequence: Synthetic oligonucleotide
  Sense strand starting at position 3205 SEQ ID NO: 2996
gucucaagaccguaucagu

SEQ ID NO: 232801 - RNA, 19 nt, Artificial Sequence
  Description of Artificial Sequence: Synthetic oligonucleotide
  Antisense strand to SEQ ID NO: 232800
acugauacggucuugagac

SEQ ID NO: 232802 - RNA, 19 nt, Artificial Sequence
  Description of Artificial Sequence: Synthetic oligonucleotide
  Sense strand starting at position 3214 SEQ ID NO: 2996
ccguaucaguuagcuauuu

SEQ ID NO: 232803 - RNA, 19 nt, Artificial Sequence
  Description of Artificial Sequence: Synthetic oligonucleotide
  Antisense strand to SEQ ID NO: 232802
aaauagcuaacugauacgg

SEQ ID NO: 232804 - RNA, 19 nt, Artificial Sequence
  Description of Artificial Sequence: Synthetic oligonucleotide
  Sense strand starting at position 3339 SEQ ID NO: 2996
ccuucuuugggagagguuu

SEQ ID NO: 232805 - RNA, 19 nt, Artificial Sequence
  Description of Artificial Sequence: Synthetic oligonucleotide
  Antisense strand to SEQ ID NO: 232804
aaaccucucccaaagaagg

SEQ ID NO: 232806 - RNA, 19 nt, Artificial Sequence
  Description of Artificial Sequence: Synthetic oligonucleotide
  Sense strand starting at position 3459 SEQ ID NO: 2996
gugcucacuguguagaaca

SEQ ID NO: 232807 - RNA, 19 nt, Artificial Sequence
  Description of Artificial Sequence: Synthetic oligonucleotide
  Antisense strand to SEQ ID NO: 232806
uguucuacacagugagcac

SEQ ID NO: 232808 - RNA, 19 nt, Artificial Sequence
  Description of Artificial Sequence: Synthetic oligonucleotide
  Sense strand starting at position 3461 SEQ ID NO: 2996
gcucacuguguagaacauu

SEQ ID NO: 232809 - RNA, 19 nt, Artificial Sequence
  Description of Artificial Sequence: Synthetic oligonucleotide
  Antisense strand to SEQ ID NO: 232808
aauguucuacacagugagc

SEQ ID NO: 232810 - RNA, 19 nt, Artificial Sequence
  Description of Artificial Sequence: Synthetic oligonucleotide
  Sense strand starting at position 3561 SEQ ID NO: 2996
gggagacaccugugucagu

SEQ ID NO: 232811 - RNA, 19 nt, Artificial Sequence
  Description of Artificial Sequence: Synthetic oligonucleotide
  Antisense strand to SEQ ID NO: 232810
acugacacaggugucuccc

SEQ ID NO: 232812 - RNA, 19 nt, Artificial Sequence
  Description of Artificial Sequence: Synthetic oligonucleotide
  Sense strand starting at position 3568 SEQ ID NO: 2996
accugugucagugagcuaa

SEQ ID NO: 232813 - RNA, 19 nt, Artificial Sequence
  Description of Artificial Sequence: Synthetic oligonucleotide
  Antisense strand to SEQ ID NO: 232812
uuagcucacugacacaggu

SEQ ID NO: 232814 - RNA, 19 nt, Artificial Sequence
  Description of Artificial Sequence: Synthetic oligonucleotide
  Sense strand starting at position 3620 SEQ ID NO: 2996
gguuaacuuccagagucua

SEQ ID NO: 232815 - RNA, 19 nt, Artificial Sequence
  Description of Artificial Sequence: Synthetic oligonucleotide
  Antisense strand to SEQ ID NO: 232814
uagacucuggaaguuaacc

SEQ ID NO: 232816 - RNA, 19 nt, Artificial Sequence
  Description of Artificial Sequence: Synthetic oligonucleotide
  Sense strand starting at position 3710 SEQ ID NO: 2996
uauggaagcugguccuaaa

SEQ ID NO: 232817 - RNA, 19 nt, Artificial Sequence
  Description of Artificial Sequence: Synthetic oligonucleotide
  Antisense strand to SEQ ID NO: 232816
uuuaggaccagcuuccaua

SEQ ID NO: 232818 - RNA, 19 nt, Artificial Sequence
  Description of Artificial Sequence: Synthetic oligonucleotide
  Sense strand starting at position 3793 SEQ ID NO: 2996
gugcaugugguaagguuau

SEQ ID NO: 232819 - RNA, 19 nt, Artificial Sequence
  Description of Artificial Sequence: Synthetic oligonucleotide
  Antisense strand to SEQ ID NO: 232818
auaaccuuaccacaugcac

SEQ ID NO: 232820 - RNA, 19 nt, Artificial Sequence
  Description of Artificial Sequence: Synthetic oligonucleotide
  Sense strand starting at position 3799 SEQ ID NO: 2996
gugguaagguuauugagga

SEQ ID NO: 232821 - RNA, 19 nt, Artificial Sequence
  Description of Artificial Sequence: Synthetic oligonucleotide
  Antisense strand to SEQ ID NO: 232820
uccucaauaaccuuaccac

SEQ ID NO: 232822 - RNA, 19 nt, Artificial Sequence
  Description of Artificial Sequence: Synthetic oligonucleotide
  Sense strand starting at position 3954 SEQ ID NO: 2996
uuaaauucguagguuugaa

SEQ ID NO: 232823 - RNA, 19 nt, Artificial Sequence
  Description of Artificial Sequence: Synthetic oligonucleotide
  Antisense strand to SEQ ID NO: 232822
uucaaaccuacgaauuuaa

SEQ ID NO: 232824 - RNA, 19 nt, Artificial Sequence
  Description of Artificial Sequence: Synthetic oligonucleotide
  Sense strand starting at position 3978 SEQ ID NO: 2996
agaguaugugcuuaaucua

SEQ ID NO: 232825 - RNA, 19 nt, Artificial Sequence
  Description of Artificial Sequence: Synthetic oligonucleotide
  Antisense strand to SEQ ID NO: 232824
uagauuaagcacauacucu

SEQ ID NO: 232826 - RNA, 19 nt, Artificial Sequence
  Description of Artificial Sequence: Synthetic oligonucleotide
  Sense strand starting at position 72 SEQ ID NO: 2997
ucauauguccuguaggaac

SEQ ID NO: 232827 - RNA, 19 nt, Artificial Sequence
  Description of Artificial Sequence: Synthetic oligonucleotide
  Antisense strand to SEQ ID NO: 232826
guuccuacaggacauauga

SEQ ID NO: 232828 - RNA, 19 nt, Artificial Sequence
  Description of Artificial Sequence: Synthetic oligonucleotide
  Sense strand starting at position 74 SEQ ID NO: 2997
auauguccuguaggaacua

SEQ ID NO: 232829 - RNA, 19 nt, Artificial Sequence
  Description of Artificial Sequence: Synthetic oligonucleotide
  Antisense strand to SEQ ID NO: 232828
uaguuccuacaggacauau

SEQ ID NO: 232830 - RNA, 19 nt, Artificial Sequence
  Description of Artificial Sequence: Synthetic oligonucleotide
  Sense strand starting at position 576 SEQ ID NO: 2997
ucucgaucuguugaccaga

SEQ ID NO: 232831 - RNA, 19 nt, Artificial Sequence
  Description of Artificial Sequence: Synthetic oligonucleotide
  Antisense strand to SEQ ID NO: 232830
ucuggucaacagaucgaga

SEQ ID NO: 232832 - RNA, 19 nt, Artificial Sequence
  Description of Artificial Sequence: Synthetic oligonucleotide
  Sense strand starting at position 578 SEQ ID NO: 2997
ucgaucuguugaccagacu

SEQ ID NO: 232833 - RNA, 19 nt, Artificial Sequence
  Description of Artificial Sequence: Synthetic oligonucleotide
  Antisense strand to SEQ ID NO: 232832
agucuggucaacagaucga

SEQ ID NO: 232834 - RNA, 19 nt, Artificial Sequence
  Description of Artificial Sequence: Synthetic oligonucleotide
  Sense strand starting at position 884 SEQ ID NO: 2997
gcugccagaucuuugauau

SEQ ID NO: 232835 - RNA, 19 nt, Artificial Sequence
  Description of Artificial Sequence: Synthetic oligonucleotide
  Antisense strand to SEQ ID NO: 232834
auaucaaagaucuggcagc

SEQ ID NO: 232836 - RNA, 19 nt, Artificial Sequence
  Description of Artificial Sequence: Synthetic oligonucleotide
  Sense strand starting at position 885 SEQ ID NO: 2997
cugccagaucuuugauauc

SEQ ID NO: 232837 - RNA, 19 nt, Artificial Sequence
  Description of Artificial Sequence: Synthetic oligonucleotide
  Antisense strand to SEQ ID NO: 232836
gauaucaaagaucuggcag

SEQ ID NO: 232838 - RNA, 19 nt, Artificial Sequence
  Description of Artificial Sequence: Synthetic oligonucleotide
  Sense strand starting at position 1027 SEQ ID NO: 2997
ucauuuaccucuggaauug

SEQ ID NO: 232839 - RNA, 19 nt, Artificial Sequence
  Description of Artificial Sequence: Synthetic oligonucleotide
  Antisense strand to SEQ ID NO: 232838
caauuccagagguaaauga

SEQ ID NO: 232840 - RNA, 19 nt, Artificial Sequence
  Description of Artificial Sequence: Synthetic oligonucleotide
  Sense strand starting at position 1037 SEQ ID NO: 2997
cuggaauugcugugaggag

SEQ ID NO: 232841 - RNA, 19 nt, Artificial Sequence
  Description of Artificial Sequence: Synthetic oligonucleotide
  Antisense strand to SEQ ID NO: 232840
cuccucacagcaauuccag

SEQ ID NO: 232842 - RNA, 19 nt, Artificial Sequence
  Description of Artificial Sequence: Synthetic oligonucleotide
  Sense strand starting at position 1054 SEQ ID NO: 2997
agcagacaucauuguacau

SEQ ID NO: 232843 - RNA, 19 nt, Artificial Sequence
  Description of Artificial Sequence: Synthetic oligonucleotide
  Antisense strand to SEQ ID NO: 232842
auguacaaugaugucugcu

SEQ ID NO: 232844 - RNA, 19 nt, Artificial Sequence
  Description of Artificial Sequence: Synthetic oligonucleotide
  Sense strand starting at position 1464 SEQ ID NO: 2997
aguuguacuaagggcuaua

SEQ ID NO: 232845 - RNA, 19 nt, Artificial Sequence
  Description of Artificial Sequence: Synthetic oligonucleotide
  Antisense strand to SEQ ID NO: 232844
uauagcccuuaguacaacu

SEQ ID NO: 232846 - RNA, 19 nt, Artificial Sequence
  Description of Artificial Sequence: Synthetic oligonucleotide
  Sense strand starting at position 1526 SEQ ID NO: 2997
gggacuuucucuuuaaacc

SEQ ID NO: 232847 - RNA, 19 nt, Artificial Sequence
  Description of Artificial Sequence: Synthetic oligonucleotide
  Antisense strand to SEQ ID NO: 232846
gguuuaaagagaaaguccc

SEQ ID NO: 232848 - RNA, 19 nt, Artificial Sequence
  Description of Artificial Sequence: Synthetic oligonucleotide
  Sense strand starting at position 1560 SEQ ID NO: 2997
gcuccaggucauggaagaa

SEQ ID NO: 232849 - RNA, 19 nt, Artificial Sequence
  Description of Artificial Sequence: Synthetic oligonucleotide
  Antisense strand to SEQ ID NO: 232848
uucuuccaugaccuggagc

SEQ ID NO: 232850 - RNA, 19 nt, Artificial Sequence
  Description of Artificial Sequence: Synthetic oligonucleotide
  Sense strand starting at position 2064 SEQ ID NO: 2997
ugguucuggagaggaauua

SEQ ID NO: 232851 - RNA, 19 nt, Artificial Sequence
  Description of Artificial Sequence: Synthetic oligonucleotide
  Antisense strand to SEQ ID NO: 232850
uaauuccucuccagaacca

SEQ ID NO: 232852 - RNA, 19 nt, Artificial Sequence
  Description of Artificial Sequence: Synthetic oligonucleotide
  Sense strand starting at position 2118 SEQ ID NO: 2997
ggugacugggccuguagaa

SEQ ID NO: 232853 - RNA, 19 nt, Artificial Sequence
  Description of Artificial Sequence: Synthetic oligonucleotide
  Antisense strand to SEQ ID NO: 232852
uucuacaggcccagucacc

SEQ ID NO: 232854 - RNA, 19 nt, Artificial Sequence
  Description of Artificial Sequence: Synthetic oligonucleotide
  Sense strand starting at position 2498 SEQ ID NO: 2997
cagacauaagguugauguu

SEQ ID NO: 232855 - RNA, 19 nt, Artificial Sequence
  Description of Artificial Sequence: Synthetic oligonucleotide
  Antisense strand to SEQ ID NO: 232854
aacaucaaccuuaugucug

SEQ ID NO: 232856 - RNA, 19 nt, Artificial Sequence
  Description of Artificial Sequence: Synthetic oligonucleotide
  Sense strand starting at position 2531 SEQ ID NO: 2997
gcaaguugucuggagccaa

SEQ ID NO: 232857 - RNA, 19 nt, Artificial Sequence
  Description of Artificial Sequence: Synthetic oligonucleotide
  Antisense strand to SEQ ID NO: 232856
uuggcuccagacaacuugc

SEQ ID NO: 232858 - RNA, 19 nt, Artificial Sequence
  Description of Artificial Sequence: Synthetic oligonucleotide
  Sense strand starting at position 2535 SEQ ID NO: 2997
guugucuggagccaaucau

SEQ ID NO: 232859 - RNA, 19 nt, Artificial Sequence
  Description of Artificial Sequence: Synthetic oligonucleotide
  Antisense strand to SEQ ID NO: 232858
augauuggcuccagacaac

SEQ ID NO: 232860 - RNA, 19 nt, Artificial Sequence
  Description of Artificial Sequence: Synthetic oligonucleotide
  Sense strand starting at position 2542 SEQ ID NO: 2997
ggagccaaucauugccaaa

SEQ ID NO: 232861 - RNA, 19 nt, Artificial Sequence
  Description of Artificial Sequence: Synthetic oligonucleotide
  Antisense strand to SEQ ID NO: 232860
uuuggcaaugauuggcucc

SEQ ID NO: 232862 - RNA, 19 nt, Artificial Sequence
  Description of Artificial Sequence: Synthetic oligonucleotide
  Sense strand starting at position 2544 SEQ ID NO: 2997
agccaaucauugccaaagu

SEQ ID NO: 232863 - RNA, 19 nt, Artificial Sequence
  Description of Artificial Sequence: Synthetic oligonucleotide
  Antisense strand to SEQ ID NO: 232862
acuuuggcaaugauuggcu

SEQ ID NO: 232864 - RNA, 19 nt, Artificial Sequence
  Description of Artificial Sequence: Synthetic oligonucleotide
  Sense strand starting at position 2649 SEQ ID NO: 2997
cagggaaaguucuuccuaa

SEQ ID NO: 232865 - RNA, 19 nt, Artificial Sequence
  Description of Artificial Sequence: Synthetic oligonucleotide
  Antisense strand to SEQ ID NO: 232864
uuaggaagaacuuucccug

SEQ ID NO: 232866 - RNA, 19 nt, Artificial Sequence
  Description of Artificial Sequence: Synthetic oligonucleotide
  Sense strand starting at position 2707 SEQ ID NO: 2997
acgagacccucuuugacaa

SEQ ID NO: 232867 - RNA, 19 nt, Artificial Sequence
  Description of Artificial Sequence: Synthetic oligonucleotide
  Antisense strand to SEQ ID NO: 232866
uugucaaagagggucucgu

SEQ ID NO: 232868 - RNA, 19 nt, Artificial Sequence
  Description of Artificial Sequence: Synthetic oligonucleotide
  Sense strand starting at position 2708 SEQ ID NO: 2997
cgagacccucuuugacaaa

SEQ ID NO: 232869 - RNA, 19 nt, Artificial Sequence
  Description of Artificial Sequence: Synthetic oligonucleotide
  Antisense strand to SEQ ID NO: 232868
uuugucaaagagggucucg

SEQ ID NO: 232870 - RNA, 19 nt, Artificial Sequence
  Description of Artificial Sequence: Synthetic oligonucleotide
  Sense strand starting at position 2740 SEQ ID NO: 2997
uugaauuaaugagcucaua

SEQ ID NO: 232871 - RNA, 19 nt, Artificial Sequence
  Description of Artificial Sequence: Synthetic oligonucleotide
  Antisense strand to SEQ ID NO: 232870
uaugagcucauuaauucaa

SEQ ID NO: 232872 - RNA, 19 nt, Artificial Sequence
  Description of Artificial Sequence: Synthetic oligonucleotide
  Sense strand starting at position 2752 SEQ ID NO: 2997
gcucauauggaaggucaaa

SEQ ID NO: 232873 - RNA, 19 nt, Artificial Sequence
  Description of Artificial Sequence: Synthetic oligonucleotide
  Antisense strand to SEQ ID NO: 232872
uuugaccuuccauaugagc

SEQ ID NO: 232874 - RNA, 19 nt, Artificial Sequence
  Description of Artificial Sequence: Synthetic oligonucleotide
  Sense strand starting at position 2815 SEQ ID NO: 2997
gccucugugcauuaagaug

SEQ ID NO: 232875 - RNA, 19 nt, Artificial Sequence
  Description of Artificial Sequence: Synthetic oligonucleotide
  Antisense strand to SEQ ID NO: 232874
caucuuaaugcacagaggc

SEQ ID NO: 232876 - RNA, 19 nt, Artificial Sequence
  Description of Artificial Sequence: Synthetic oligonucleotide
  Sense strand starting at position 2850 SEQ ID NO: 2997
ucuuauuguccacagcaag

SEQ ID NO: 232877 - RNA, 19 nt, Artificial Sequence
  Description of Artificial Sequence: Synthetic oligonucleotide
  Antisense strand to SEQ ID NO: 232876
cuugcuguggacaauaaga

SEQ ID NO: 232878 - RNA, 19 nt, Artificial Sequence
  Description of Artificial Sequence: Synthetic oligonucleotide
  Sense strand starting at position 2876 SEQ ID NO: 2997
aggcuuuaggguugaacau

SEQ ID NO: 232879 - RNA, 19 nt, Artificial Sequence
  Description of Artificial Sequence: Synthetic oligonucleotide
  Antisense strand to SEQ ID NO: 232878
auguucaacccuaaagccu

SEQ ID NO: 232880 - RNA, 19 nt, Artificial Sequence
  Description of Artificial Sequence: Synthetic oligonucleotide
  Sense strand starting at position 2883 SEQ ID NO: 2997
aggguugaacaucguauaa

SEQ ID NO: 232881 - RNA, 19 nt, Artificial Sequence
  Description of Artificial Sequence: Synthetic oligonucleotide
  Antisense strand to SEQ ID NO: 232880
uuauacgauguucaacccu

SEQ ID NO: 232882 - RNA, 19 nt, Artificial Sequence
  Description of Artificial Sequence: Synthetic oligonucleotide
  Sense strand starting at position 3287 SEQ ID NO: 2997
agaucuuugggagguuaag

SEQ ID NO: 232883 - RNA, 19 nt, Artificial Sequence
  Description of Artificial Sequence: Synthetic oligonucleotide
  Antisense strand to SEQ ID NO: 232882
cuuaaccucccaaagaucu

SEQ ID NO: 232884 - RNA, 19 nt, Artificial Sequence
  Description of Artificial Sequence: Synthetic oligonucleotide
  Sense strand starting at position 3615 SEQ ID NO: 2997
cgcagucuaagagaugaau

SEQ ID NO: 232885 - RNA, 19 nt, Artificial Sequence
  Description of Artificial Sequence: Synthetic oligonucleotide
  Antisense strand to SEQ ID NO: 232884
auucaucucuuagacugcg

SEQ ID NO: 232886 - RNA, 19 nt, Artificial Sequence
  Description of Artificial Sequence: Synthetic oligonucleotide
  Sense strand starting at position 3659 SEQ ID NO: 2997
cagugaucagggugcugau

SEQ ID NO: 232887 - RNA, 19 nt, Artificial Sequence
  Description of Artificial Sequence: Synthetic oligonucleotide
  Antisense strand to SEQ ID NO: 232886
aucagcacccugaucacug

SEQ ID NO: 232888 - RNA, 19 nt, Artificial Sequence
  Description of Artificial Sequence: Synthetic oligonucleotide
  Sense strand starting at position 3681 SEQ ID NO: 2997
uuucuagugcagcagauua

SEQ ID NO: 232889 - RNA, 19 nt, Artificial Sequence
  Description of Artificial Sequence: Synthetic oligonucleotide
  Antisense strand to SEQ ID NO: 232888
uaaucugcugcacuagaaa

SEQ ID NO: 232890 - RNA, 19 nt, Artificial Sequence
  Description of Artificial Sequence: Synthetic oligonucleotide
  Sense strand starting at position 3683 SEQ ID NO: 2997
ucuagugcagcagauuaaa

SEQ ID NO: 232891 - RNA, 19 nt, Artificial Sequence
  Description of Artificial Sequence: Synthetic oligonucleotide
  Antisense strand to SEQ ID NO: 232890
uuuaaucugcugcacuaga

SEQ ID NO: 232892 - RNA, 19 nt, Artificial Sequence
  Description of Artificial Sequence: Synthetic oligonucleotide
  Sense strand starting at position 3777 SEQ ID NO: 2997
caaaguaagcgugacacaa

SEQ ID NO: 232893 - RNA, 19 nt, Artificial Sequence
  Description of Artificial Sequence: Synthetic oligonucleotide
  Antisense strand to SEQ ID NO: 232892
uugugucacgcuuacuuug

SEQ ID NO: 232894 - RNA, 19 nt, Artificial Sequence
  Description of Artificial Sequence: Synthetic oligonucleotide
  Sense strand starting at position 3815 SEQ ID NO: 2997
gcugacagauuugacugua

SEQ ID NO: 232895 - RNA, 19 nt, Artificial Sequence
  Description of Artificial Sequence: Synthetic oligonucleotide
  Antisense strand to SEQ ID NO: 232894
uacagucaaaucugucagc

SEQ ID NO: 232896 - RNA, 19 nt, Artificial Sequence
  Description of Artificial Sequence: Synthetic oligonucleotide
  Sense strand starting at position 3852 SEQ ID NO: 2997
uguagaaauuaugccuuaa

SEQ ID NO: 232897 - RNA, 19 nt, Artificial Sequence
  Description of Artificial Sequence: Synthetic oligonucleotide
  Antisense strand to SEQ ID NO: 232896
uuaaggcauaauuucuaca

SEQ ID NO: 232898 - RNA, 19 nt, Artificial Sequence
  Description of Artificial Sequence: Synthetic oligonucleotide
  Sense strand starting at position 3864 SEQ ID NO: 2997
gccuuaaagcuagaagaca

SEQ ID NO: 232899 - RNA, 19 nt, Artificial Sequence
  Description of Artificial Sequence: Synthetic oligonucleotide
  Antisense strand to SEQ ID NO: 232898
ugucuucuagcuuuaaggc

SEQ ID NO: 232900 - RNA, 19 nt, Artificial Sequence
  Description of Artificial Sequence: Synthetic oligonucleotide
  Sense strand starting at position 3912 SEQ ID NO: 2997
auacuuaauguccaacagu

SEQ ID NO: 232901 - RNA, 19 nt, Artificial Sequence
  Description of Artificial Sequence: Synthetic oligonucleotide
  Antisense strand to SEQ ID NO: 232900
acuguuggacauuaaguau

SEQ ID NO: 232902 - RNA, 19 nt, Artificial Sequence
  Description of Artificial Sequence: Synthetic oligonucleotide
  Sense strand starting at position 3915 SEQ ID NO: 2997
cuuaauguccaacaguuua

SEQ ID NO: 232903 - RNA, 19 nt, Artificial Sequence
  Description of Artificial Sequence: Synthetic oligonucleotide
  Antisense strand to SEQ ID NO: 232902
uaaacuguuggacauuaag

SEQ ID NO: 232904 - RNA, 19 nt, Artificial Sequence
  Description of Artificial Sequence: Synthetic oligonucleotide
  Sense strand starting at position 3973 SEQ ID NO: 2997
ggaugacuaucccaaagga

SEQ ID NO: 232905 - RNA, 19 nt, Artificial Sequence
  Description of Artificial Sequence: Synthetic oligonucleotide
  Antisense strand to SEQ ID NO: 232904
uccuuugggauagucaucc

SEQ ID NO: 232906 - RNA, 19 nt, Artificial Sequence
  Description of Artificial Sequence: Synthetic oligonucleotide
  Sense strand starting at position 14 SEQ ID NO: 2998
gggagacgcugcuugaaga

SEQ ID NO: 232907 - RNA, 19 nt, Artificial Sequence
  Description of Artificial Sequence: Synthetic oligonucleotide
  Antisense strand to SEQ ID NO: 232906
ucuucaagcagcgucuccc

SEQ ID NO: 232908 - RNA, 19 nt, Artificial Sequence
  Description of Artificial Sequence: Synthetic oligonucleotide
  Sense strand starting at position 46 SEQ ID NO: 2998
aggguaauuuagcgacuac

SEQ ID NO: 232909 - RNA, 19 nt, Artificial Sequence
  Description of Artificial Sequence: Synthetic oligonucleotide
  Antisense strand to SEQ ID NO: 232908
guagucgcuaaauuacccu

SEQ ID NO: 232910 - RNA, 19 nt, Artificial Sequence
  Description of Artificial Sequence: Synthetic oligonucleotide
  Sense strand starting at position 79 SEQ ID NO: 2998
uggugaaccugggaaucaa

SEQ ID NO: 232911 - RNA, 19 nt, Artificial Sequence
  Description of Artificial Sequence: Synthetic oligonucleotide
  Antisense strand to SEQ ID NO: 232910
uugauucccagguucacca

SEQ ID NO: 232912 - RNA, 19 nt, Artificial Sequence
  Description of Artificial Sequence: Synthetic oligonucleotide
  Sense strand starting at position 97 SEQ ID NO: 2998
auugcaaucgucuggcaga

SEQ ID NO: 232913 - RNA, 19 nt, Artificial Sequence
  Description of Artificial Sequence: Synthetic oligonucleotide
  Antisense strand to SEQ ID NO: 232912
ucugccagacgauugcaau

SEQ ID NO: 232914 - RNA, 19 nt, Artificial Sequence
  Description of Artificial Sequence: Synthetic oligonucleotide
  Sense strand starting at position 100 SEQ ID NO: 2998
gcaaucgucuggcagaguu

SEQ ID NO: 232915 - RNA, 19 nt, Artificial Sequence
  Description of Artificial Sequence: Synthetic oligonucleotide
  Antisense strand to SEQ ID NO: 232914
aacucugccagacgauugc

SEQ ID NO: 232916 - RNA, 19 nt, Artificial Sequence
  Description of Artificial Sequence: Synthetic oligonucleotide
  Sense strand starting at position 110 SEQ ID NO: 2998
ggcagaguuggccagcaga

SEQ ID NO: 232917 - RNA, 19 nt, Artificial Sequence
  Description of Artificial Sequence: Synthetic oligonucleotide
  Antisense strand to SEQ ID NO: 232916
ucugcuggccaacucugcc

SEQ ID NO: 232918 - RNA, 19 nt, Artificial Sequence
  Description of Artificial Sequence: Synthetic oligonucleotide
  Sense strand starting at position 113 SEQ ID NO: 2998
agaguuggccagcagagau

SEQ ID NO: 232919 - RNA, 19 nt, Artificial Sequence
  Description of Artificial Sequence: Synthetic oligonucleotide
  Antisense strand to SEQ ID NO: 232918
aucucugcuggccaacucu

SEQ ID NO: 232920 - RNA, 19 nt, Artificial Sequence
  Description of Artificial Sequence: Synthetic oligonucleotide
  Sense strand starting at position 179 SEQ ID NO: 2998
agggucuagugauugggaa

SEQ ID NO: 232921 - RNA, 19 nt, Artificial Sequence
  Description of Artificial Sequence: Synthetic oligonucleotide
  Antisense strand to SEQ ID NO: 232920
uucccaaucacuagacccu

SEQ ID NO: 232922 - RNA, 19 nt, Artificial Sequence
  Description of Artificial Sequence: Synthetic oligonucleotide
  Sense strand starting at position 180 SEQ ID NO: 2998
gggucuagugauugggaag

SEQ ID NO: 232923 - RNA, 19 nt, Artificial Sequence
  Description of Artificial Sequence: Synthetic oligonucleotide
  Antisense strand to SEQ ID NO: 232922
cuucccaaucacuagaccc

SEQ ID NO: 232924 - RNA, 19 nt, Artificial Sequence
  Description of Artificial Sequence: Synthetic oligonucleotide
  Sense strand starting at position 192 SEQ ID NO: 2998
ugggaagcccgcuguguuu

SEQ ID NO: 232925 - RNA, 19 nt, Artificial Sequence
  Description of Artificial Sequence: Synthetic oligonucleotide
  Antisense strand to SEQ ID NO: 232924
aaacacagcgggcuuccca

SEQ ID NO: 232926 - RNA, 19 nt, Artificial Sequence
  Description of Artificial Sequence: Synthetic oligonucleotide
  Sense strand starting at position 422 SEQ ID NO: 2998
aagugacugucuucccaag

SEQ ID NO: 232927 - RNA, 19 nt, Artificial Sequence
  Description of Artificial Sequence: Synthetic oligonucleotide
  Antisense strand to SEQ ID NO: 232926
cuugggaagacagucacuu

SEQ ID NO: 232928 - RNA, 19 nt, Artificial Sequence
  Description of Artificial Sequence: Synthetic oligonucleotide
  Sense strand starting at position 1251 SEQ ID NO: 2998
cccgaaucuccggacacuu

SEQ ID NO: 232929 - RNA, 19 nt, Artificial Sequence
  Description of Artificial Sequence: Synthetic oligonucleotide
  Antisense strand to SEQ ID NO: 232928
aaguguccggagauucggg

SEQ ID NO: 232930 - RNA, 19 nt, Artificial Sequence
  Description of Artificial Sequence: Synthetic oligonucleotide
  Sense strand starting at position 1609 SEQ ID NO: 2998
gagaaacgcuuccagcuaa

SEQ ID NO: 232931 - RNA, 19 nt, Artificial Sequence
  Description of Artificial Sequence: Synthetic oligonucleotide
  Antisense strand to SEQ ID NO: 232930
uuagcuggaagcguuucuc

SEQ ID NO: 232932 - RNA, 19 nt, Artificial Sequence
  Description of Artificial Sequence: Synthetic oligonucleotide
  Sense strand starting at position 2139 SEQ ID NO: 2998
ccuuuaucucugcccgcau

SEQ ID NO: 232933 - RNA, 19 nt, Artificial Sequence
  Description of Artificial Sequence: Synthetic oligonucleotide
  Antisense strand to SEQ ID NO: 232932
augcgggcagagauaaagg

SEQ ID NO: 232934 - RNA, 19 nt, Artificial Sequence
  Description of Artificial Sequence: Synthetic oligonucleotide
  Sense strand starting at position 2186 SEQ ID NO: 2998
cucugcucuucccuagaga

SEQ ID NO: 232935 - RNA, 19 nt, Artificial Sequence
  Description of Artificial Sequence: Synthetic oligonucleotide
  Antisense strand to SEQ ID NO: 232934
ucucuagggaagagcagag

SEQ ID NO: 232936 - RNA, 19 nt, Artificial Sequence
  Description of Artificial Sequence: Synthetic oligonucleotide
  Sense strand starting at position 2342 SEQ ID NO: 2998
ccuucuaggucucucuuua

SEQ ID NO: 232937 - RNA, 19 nt, Artificial Sequence
  Description of Artificial Sequence: Synthetic oligonucleotide
  Antisense strand to SEQ ID NO: 232936
uaaagagagaccuagaagg

SEQ ID NO: 232938 - RNA, 19 nt, Artificial Sequence
  Description of Artificial Sequence: Synthetic oligonucleotide
  Sense strand starting at position 2482 SEQ ID NO: 2998
gcugaaggccucuaaagau

SEQ ID NO: 232939 - RNA, 19 nt, Artificial Sequence
  Description of Artificial Sequence: Synthetic oligonucleotide
  Antisense strand to SEQ ID NO: 232938
aucuuuagaggccuucagc

SEQ ID NO: 232940 - RNA, 19 nt, Artificial Sequence
  Description of Artificial Sequence: Synthetic oligonucleotide
  Sense strand starting at position 2491 SEQ ID NO: 2998
cucuaaagauguugagaau

SEQ ID NO: 232941 - RNA, 19 nt, Artificial Sequence
  Description of Artificial Sequence: Synthetic oligonucleotide
  Antisense strand to SEQ ID NO: 232940
auucucaacaucuuuagag

SEQ ID NO: 232942 - RNA, 19 nt, Artificial Sequence
  Description of Artificial Sequence: Synthetic oligonucleotide
  Sense strand starting at position 2502 SEQ ID NO: 2998
uugagaaucuguccuggcu

SEQ ID NO: 232943 - RNA, 19 nt, Artificial Sequence
  Description of Artificial Sequence: Synthetic oligonucleotide
  Antisense strand to SEQ ID NO: 232942
agccaggacagauucucaa

SEQ ID NO: 232944 - RNA, 19 nt, Artificial Sequence
  Description of Artificial Sequence: Synthetic oligonucleotide
  Sense strand starting at position 2504 SEQ ID NO: 2998
gagaaucuguccuggcuuu

SEQ ID NO: 232945 - RNA, 19 nt, Artificial Sequence
  Description of Artificial Sequence: Synthetic oligonucleotide
  Antisense strand to SEQ ID NO: 232944
aaagccaggacagauucuc

SEQ ID NO: 232946 - RNA, 19 nt, Artificial Sequence
  Description of Artificial Sequence: Synthetic oligonucleotide
  Sense strand starting at position 2634 SEQ ID NO: 2998
ucuggcuaucccugaacga

SEQ ID NO: 232947 - RNA, 19 nt, Artificial Sequence
  Description of Artificial Sequence: Synthetic oligonucleotide
  Antisense strand to SEQ ID NO: 232946
ucguucagggauagccaga

SEQ ID NO: 232948 - RNA, 19 nt, Artificial Sequence
  Description of Artificial Sequence: Synthetic oligonucleotide
  Sense strand starting at position 2679 SEQ ID NO: 2998
aggguugugcacuguacaa

SEQ ID NO: 232949 - RNA, 19 nt, Artificial Sequence
  Description of Artificial Sequence: Synthetic oligonucleotide
  Antisense strand to SEQ ID NO: 232948
uuguacagugcacaacccu

SEQ ID NO: 232950 - RNA, 19 nt, Artificial Sequence
  Description of Artificial Sequence: Synthetic oligonucleotide
  Sense strand starting at position 2771 SEQ ID NO: 2998
ccuggagucucucugggua

SEQ ID NO: 232951 - RNA, 19 nt, Artificial Sequence
  Description of Artificial Sequence: Synthetic oligonucleotide
  Antisense strand to SEQ ID NO: 232950
uacccagagagacuccagg

SEQ ID NO: 232952 - RNA, 19 nt, Artificial Sequence
  Description of Artificial Sequence: Synthetic oligonucleotide
  Sense strand starting at position 2775 SEQ ID NO: 2998
gagucucucuggguaccua

SEQ ID NO: 232953 - RNA, 19 nt, Artificial Sequence
  Description of Artificial Sequence: Synthetic oligonucleotide
  Antisense strand to SEQ ID NO: 232952
uagguacccagagagacuc

SEQ ID NO: 232954 - RNA, 19 nt, Artificial Sequence
  Description of Artificial Sequence: Synthetic oligonucleotide
  Sense strand starting at position 2826 SEQ ID NO: 2998
ggaggaugcuggcugaaga

SEQ ID NO: 232955 - RNA, 19 nt, Artificial Sequence
  Description of Artificial Sequence: Synthetic oligonucleotide
  Antisense strand to SEQ ID NO: 232954
ucuucagccagcauccucc

SEQ ID NO: 232956 - RNA, 19 nt, Artificial Sequence
  Description of Artificial Sequence: Synthetic oligonucleotide
  Sense strand starting at position 2827 SEQ ID NO: 2998
gaggaugcuggcugaagau

SEQ ID NO: 232957 - RNA, 19 nt, Artificial Sequence
  Description of Artificial Sequence: Synthetic oligonucleotide
  Antisense strand to SEQ ID NO: 232956
aucuucagccagcauccuc

SEQ ID NO: 232958 - RNA, 19 nt, Artificial Sequence
  Description of Artificial Sequence: Synthetic oligonucleotide
  Sense strand starting at position 2874 SEQ ID NO: 2998
gcagccuugcaguauggaa

SEQ ID NO: 232959 - RNA, 19 nt, Artificial Sequence
  Description of Artificial Sequence: Synthetic oligonucleotide
  Antisense strand to SEQ ID NO: 232958
uuccauacugcaaggcugc

SEQ ID NO: 232960 - RNA, 19 nt, Artificial Sequence
  Description of Artificial Sequence: Synthetic oligonucleotide
  Sense strand starting at position 2997 SEQ ID NO: 2998
ugggaugccugauugagga

SEQ ID NO: 232961 - RNA, 19 nt, Artificial Sequence
  Description of Artificial Sequence: Synthetic oligonucleotide
  Antisense strand to SEQ ID NO: 232960
uccucaaucaggcauccca

SEQ ID NO: 232962 - RNA, 19 nt, Artificial Sequence
  Description of Artificial Sequence: Synthetic oligonucleotide
  Sense strand starting at position 3018 SEQ ID NO: 2998
gcuggaaacuccuacuucu

SEQ ID NO: 232963 - RNA, 19 nt, Artificial Sequence
  Description of Artificial Sequence: Synthetic oligonucleotide
  Antisense strand to SEQ ID NO: 232962
agaaguaggaguuuccagc

SEQ ID NO: 232964 - RNA, 19 nt, Artificial Sequence
  Description of Artificial Sequence: Synthetic oligonucleotide
  Sense strand starting at position 3087 SEQ ID NO: 2998
guucaucuuugcucgugga

SEQ ID NO: 232965 - RNA, 19 nt, Artificial Sequence
  Description of Artificial Sequence: Synthetic oligonucleotide
  Antisense strand to SEQ ID NO: 232964
uccacgagcaaagaugaac

SEQ ID NO: 232966 - RNA, 19 nt, Artificial Sequence
  Description of Artificial Sequence: Synthetic oligonucleotide
  Sense strand starting at position 3176 SEQ ID NO: 2998
ggaggauccuagugggaca

SEQ ID NO: 232967 - RNA, 19 nt, Artificial Sequence
  Description of Artificial Sequence: Synthetic oligonucleotide
  Antisense strand to SEQ ID NO: 232966
ugucccacuaggauccucc

SEQ ID NO: 232968 - RNA, 19 nt, Artificial Sequence
  Description of Artificial Sequence: Synthetic oligonucleotide
  Sense strand starting at position 3250 SEQ ID NO: 2998
uuggaauguucccugugga

SEQ ID NO: 232969 - RNA, 19 nt, Artificial Sequence
  Description of Artificial Sequence: Synthetic oligonucleotide
  Antisense strand to SEQ ID NO: 232968
uccacagggaacauuccaa

SEQ ID NO: 232970 - RNA, 19 nt, Artificial Sequence
  Description of Artificial Sequence: Synthetic oligonucleotide
  Sense strand starting at position 3251 SEQ ID NO: 2998
uggaauguucccuguggac

SEQ ID NO: 232971 - RNA, 19 nt, Artificial Sequence
  Description of Artificial Sequence: Synthetic oligonucleotide
  Antisense strand to SEQ ID NO: 232970
guccacagggaacauucca

SEQ ID NO: 232972 - RNA, 19 nt, Artificial Sequence
  Description of Artificial Sequence: Synthetic oligonucleotide
  Sense strand starting at position 3253 SEQ ID NO: 2998
gaauguucccuguggacca

SEQ ID NO: 232973 - RNA, 19 nt, Artificial Sequence
  Description of Artificial Sequence: Synthetic oligonucleotide
  Antisense strand to SEQ ID NO: 232972
ugguccacagggaacauuc

SEQ ID NO: 232974 - RNA, 19 nt, Artificial Sequence
  Description of Artificial Sequence: Synthetic oligonucleotide
  Sense strand starting at position 3290 SEQ ID NO: 2998
aggugagggccuugaaguu

SEQ ID NO: 232975 - RNA, 19 nt, Artificial Sequence
  Description of Artificial Sequence: Synthetic oligonucleotide
  Antisense strand to SEQ ID NO: 232974
aacuucaaggcccucaccu

SEQ ID NO: 232976 - RNA, 19 nt, Artificial Sequence
  Description of Artificial Sequence: Synthetic oligonucleotide
  Sense strand starting at position 3504 SEQ ID NO: 2998
ccuagugaggucuacccaa

SEQ ID NO: 232977 - RNA, 19 nt, Artificial Sequence
  Description of Artificial Sequence: Synthetic oligonucleotide
  Antisense strand to SEQ ID NO: 232976
uuggguagaccucacuagg

SEQ ID NO: 232978 - RNA, 19 nt, Artificial Sequence
  Description of Artificial Sequence: Synthetic oligonucleotide
  Sense strand starting at position 3648 SEQ ID NO: 2998
ccaccugagucuugaucuu

SEQ ID NO: 232979 - RNA, 19 nt, Artificial Sequence
  Description of Artificial Sequence: Synthetic oligonucleotide
  Antisense strand to SEQ ID NO: 232978
aagaucaagacucaggugg

SEQ ID NO: 232980 - RNA, 19 nt, Artificial Sequence
  Description of Artificial Sequence: Synthetic oligonucleotide
  Sense strand starting at position 3708 SEQ ID NO: 2998
aggagaguccuuggcaguu

SEQ ID NO: 232981 - RNA, 19 nt, Artificial Sequence
  Description of Artificial Sequence: Synthetic oligonucleotide
  Antisense strand to SEQ ID NO: 232980
aacugccaaggacucuccu

SEQ ID NO: 232982 - RNA, 19 nt, Artificial Sequence
  Description of Artificial Sequence: Synthetic oligonucleotide
  Sense strand starting at position 3853 SEQ ID NO: 2998
ugcugauucuucccagcaa

SEQ ID NO: 232983 - RNA, 19 nt, Artificial Sequence
  Description of Artificial Sequence: Synthetic oligonucleotide
  Antisense strand to SEQ ID NO: 232982
uugcugggaagaaucagca

SEQ ID NO: 232984 - RNA, 19 nt, Artificial Sequence
  Description of Artificial Sequence: Synthetic oligonucleotide
  Sense strand starting at position 3854 SEQ ID NO: 2998
gcugauucuucccagcaac

SEQ ID NO: 232985 - RNA, 19 nt, Artificial Sequence
  Description of Artificial Sequence: Synthetic oligonucleotide
  Antisense strand to SEQ ID NO: 232984
guugcugggaagaaucagc

SEQ ID NO: 232986 - RNA, 19 nt, Artificial Sequence
  Description of Artificial Sequence: Synthetic oligonucleotide
  Sense strand starting at position 118 SEQ ID NO: 2999
ccugauaaaucuguuuguu

SEQ ID NO: 232987 - RNA, 19 nt, Artificial Sequence
  Description of Artificial Sequence: Synthetic oligonucleotide
  Antisense strand to SEQ ID NO: 232986
aacaaacagauuuaucagg

SEQ ID NO: 232988 - RNA, 19 nt, Artificial Sequence
  Description of Artificial Sequence: Synthetic oligonucleotide
  Sense strand starting at position 120 SEQ ID NO: 2999
ugauaaaucuguuuguuuc

SEQ ID NO: 232989 - RNA, 19 nt, Artificial Sequence
  Description of Artificial Sequence: Synthetic oligonucleotide
  Antisense strand to SEQ ID NO: 232988
gaaacaaacagauuuauca

SEQ ID NO: 232990 - RNA, 19 nt, Artificial Sequence
  Description of Artificial Sequence: Synthetic oligonucleotide
  Sense strand starting at position 784 SEQ ID NO: 2999
cucucccagcugugauaaa

SEQ ID NO: 232991 - RNA, 19 nt, Artificial Sequence
  Description of Artificial Sequence: Synthetic oligonucleotide
  Antisense strand to SEQ ID NO: 232990
uuuaucacagcugggagag

SEQ ID NO: 232992 - RNA, 19 nt, Artificial Sequence
  Description of Artificial Sequence: Synthetic oligonucleotide
  Sense strand starting at position 829 SEQ ID NO: 2999
uuaggugauucuguaauua

SEQ ID NO: 232993 - RNA, 19 nt, Artificial Sequence
  Description of Artificial Sequence: Synthetic oligonucleotide
  Antisense strand to SEQ ID NO: 232992
uaauuacagaaucaccuaa

SEQ ID NO: 232994 - RNA, 19 nt, Artificial Sequence
  Description of Artificial Sequence: Synthetic oligonucleotide
  Sense strand starting at position 892 SEQ ID NO: 2999
gaucguuaccaucaguaag

SEQ ID NO: 232995 - RNA, 19 nt, Artificial Sequence
  Description of Artificial Sequence: Synthetic oligonucleotide
  Antisense strand to SEQ ID NO: 232994
cuuacugaugguaacgauc

SEQ ID NO: 232996 - RNA, 19 nt, Artificial Sequence
  Description of Artificial Sequence: Synthetic oligonucleotide
  Sense strand starting at position 976 SEQ ID NO: 2999
agauuccugugcccuaaau

SEQ ID NO: 232997 - RNA, 19 nt, Artificial Sequence
  Description of Artificial Sequence: Synthetic oligonucleotide
  Antisense strand to SEQ ID NO: 232996
auuuagggcacaggaaucu

SEQ ID NO: 232998 - RNA, 19 nt, Artificial Sequence
  Description of Artificial Sequence: Synthetic oligonucleotide
  Sense strand starting at position 1010 SEQ ID NO: 2999
gguacuuaugcacaggcaa

SEQ ID NO: 232999 - RNA, 19 nt, Artificial Sequence
  Description of Artificial Sequence: Synthetic oligonucleotide
  Antisense strand to SEQ ID NO: 232998
uugccugugcauaaguacc

SEQ ID NO: 233000 - RNA, 19 nt, Artificial Sequence
  Description of Artificial Sequence: Synthetic oligonucleotide
  Sense strand starting at position 1036 SEQ ID NO: 2999
caccuagaacguuagacuu

SEQ ID NO: 233001 - RNA, 19 nt, Artificial Sequence
  Description of Artificial Sequence: Synthetic oligonucleotide
  Antisense strand to SEQ ID NO: 233000
aagucuaacguucuaggug

SEQ ID NO: 233002 - RNA, 19 nt, Artificial Sequence
  Description of Artificial Sequence: Synthetic oligonucleotide
  Sense strand starting at position 1076 SEQ ID NO: 2999
ucccacucaucagucagau

SEQ ID NO: 233003 - RNA, 19 nt, Artificial Sequence
  Description of Artificial Sequence: Synthetic oligonucleotide
  Antisense strand to SEQ ID NO: 233002
aucugacugaugaguggga

SEQ ID NO: 233004 - RNA, 19 nt, Artificial Sequence
  Description of Artificial Sequence: Synthetic oligonucleotide
  Sense strand starting at position 1098 SEQ ID NO: 2999
guuugcacauuucuuuaua

SEQ ID NO: 233005 - RNA, 19 nt, Artificial Sequence
  Description of Artificial Sequence: Synthetic oligonucleotide
  Antisense strand to SEQ ID NO: 233004
uauaaagaaaugugcaaac

SEQ ID NO: 233006 - RNA, 19 nt, Artificial Sequence
  Description of Artificial Sequence: Synthetic oligonucleotide
  Sense strand starting at position 1158 SEQ ID NO: 2999
ucucacauuugguacauau

SEQ ID NO: 233007 - RNA, 19 nt, Artificial Sequence
  Description of Artificial Sequence: Synthetic oligonucleotide
  Antisense strand to SEQ ID NO: 233006
auauguaccaaaugugaga

SEQ ID NO: 233008 - RNA, 19 nt, Artificial Sequence
  Description of Artificial Sequence: Synthetic oligonucleotide
  Sense strand starting at position 1239 SEQ ID NO: 2999
cguuguguccuaaguggga

SEQ ID NO: 233009 - RNA, 19 nt, Artificial Sequence
  Description of Artificial Sequence: Synthetic oligonucleotide
  Antisense strand to SEQ ID NO: 233008
ucccacuuaggacacaacg

SEQ ID NO: 233010 - RNA, 19 nt, Artificial Sequence
  Description of Artificial Sequence: Synthetic oligonucleotide
  Sense strand starting at position 1258 SEQ ID NO: 2999
gggacagugcccagucguu

SEQ ID NO: 233011 - RNA, 19 nt, Artificial Sequence
  Description of Artificial Sequence: Synthetic oligonucleotide
  Antisense strand to SEQ ID NO: 233010
aacgacugggcacuguccc

SEQ ID NO: 233012 - RNA, 19 nt, Artificial Sequence
  Description of Artificial Sequence: Synthetic oligonucleotide
  Sense strand starting at position 1309 SEQ ID NO: 2999
cucagcaggugcuuaauaa

SEQ ID NO: 233013 - RNA, 19 nt, Artificial Sequence
  Description of Artificial Sequence: Synthetic oligonucleotide
  Antisense strand to SEQ ID NO: 233012
uuauuaagcaccugcugag

SEQ ID NO: 233014 - RNA, 19 nt, Artificial Sequence
  Description of Artificial Sequence: Synthetic oligonucleotide
  Sense strand starting at position 1310 SEQ ID NO: 2999
ucagcaggugcuuaauaaa

SEQ ID NO: 233015 - RNA, 19 nt, Artificial Sequence
  Description of Artificial Sequence: Synthetic oligonucleotide
  Antisense strand to SEQ ID NO: 233014
uuuauuaagcaccugcuga

SEQ ID NO: 233016 - RNA, 19 nt, Artificial Sequence
  Description of Artificial Sequence: Synthetic oligonucleotide
  Sense strand starting at position 1324 SEQ ID NO: 2999
auaaaugcgacuugaguga

SEQ ID NO: 233017 - RNA, 19 nt, Artificial Sequence
  Description of Artificial Sequence: Synthetic oligonucleotide
  Antisense strand to SEQ ID NO: 233016
ucacucaagucgcauuuau

SEQ ID NO: 233018 - RNA, 19 nt, Artificial Sequence
  Description of Artificial Sequence: Synthetic oligonucleotide
  Sense strand starting at position 1328 SEQ ID NO: 2999
augcgacuugagugaauga

SEQ ID NO: 233019 - RNA, 19 nt, Artificial Sequence
  Description of Artificial Sequence: Synthetic oligonucleotide
  Antisense strand to SEQ ID NO: 233018
ucauucacucaagucgcau

SEQ ID NO: 233020 - RNA, 19 nt, Artificial Sequence
  Description of Artificial Sequence: Synthetic oligonucleotide
  Sense strand starting at position 1329 SEQ ID NO: 2999
ugcgacuugagugaaugaa

SEQ ID NO: 233021 - RNA, 19 nt, Artificial Sequence
  Description of Artificial Sequence: Synthetic oligonucleotide
  Antisense strand to SEQ ID NO: 233020
uucauucacucaagucgca

SEQ ID NO: 233022 - RNA, 19 nt, Artificial Sequence
  Description of Artificial Sequence: Synthetic oligonucleotide
  Sense strand starting at position 1409 SEQ ID NO: 2999
augggcgauucccuucuaa

SEQ ID NO: 233023 - RNA, 19 nt, Artificial Sequence
  Description of Artificial Sequence: Synthetic oligonucleotide
  Antisense strand to SEQ ID NO: 233022
uuagaagggaaucgcccau

SEQ ID NO: 233024 - RNA, 19 nt, Artificial Sequence
  Description of Artificial Sequence: Synthetic oligonucleotide
  Sense strand starting at position 1435 SEQ ID NO: 2999
gaggguuugguuugcagga

SEQ ID NO: 233025 - RNA, 19 nt, Artificial Sequence
  Description of Artificial Sequence: Synthetic oligonucleotide
  Antisense strand to SEQ ID NO: 233024
uccugcaaaccaaacccuc

SEQ ID NO: 233026 - RNA, 19 nt, Artificial Sequence
  Description of Artificial Sequence: Synthetic oligonucleotide
  Sense strand starting at position 2089 SEQ ID NO: 2999
uggccugagucuuccugga

SEQ ID NO: 233027 - RNA, 19 nt, Artificial Sequence
  Description of Artificial Sequence: Synthetic oligonucleotide
  Antisense strand to SEQ ID NO: 233026
uccaggaagacucaggcca

SEQ ID NO: 233028 - RNA, 19 nt, Artificial Sequence
  Description of Artificial Sequence: Synthetic oligonucleotide
  Sense strand starting at position 2093 SEQ ID NO: 2999
cugagucuuccuggaguug

SEQ ID NO: 233029 - RNA, 19 nt, Artificial Sequence
  Description of Artificial Sequence: Synthetic oligonucleotide
  Antisense strand to SEQ ID NO: 233028
caacuccaggaagacucag

SEQ ID NO: 233030 - RNA, 19 nt, Artificial Sequence
  Description of Artificial Sequence: Synthetic oligonucleotide
  Sense strand starting at position 2094 SEQ ID NO: 2999
ugagucuuccuggaguuga

SEQ ID NO: 233031 - RNA, 19 nt, Artificial Sequence
  Description of Artificial Sequence: Synthetic oligonucleotide
  Antisense strand to SEQ ID NO: 233030
ucaacuccaggaagacuca

SEQ ID NO: 233032 - RNA, 19 nt, Artificial Sequence
  Description of Artificial Sequence: Synthetic oligonucleotide
  Sense strand starting at position 2136 SEQ ID NO: 2999
gaccuuaacugccuugagu

SEQ ID NO: 233033 - RNA, 19 nt, Artificial Sequence
  Description of Artificial Sequence: Synthetic oligonucleotide
  Antisense strand to SEQ ID NO: 233032
acucaaggcaguuaagguc

SEQ ID NO: 233034 - RNA, 19 nt, Artificial Sequence
  Description of Artificial Sequence: Synthetic oligonucleotide
  Sense strand starting at position 2138 SEQ ID NO: 2999
ccuuaacugccuugaguca

SEQ ID NO: 233035 - RNA, 19 nt, Artificial Sequence
  Description of Artificial Sequence: Synthetic oligonucleotide
  Antisense strand to SEQ ID NO: 233034
ugacucaaggcaguuaagg

SEQ ID NO: 233036 - RNA, 19 nt, Artificial Sequence
  Description of Artificial Sequence: Synthetic oligonucleotide
  Sense strand starting at position 2149 SEQ ID NO: 2999
uugagucacuuccuauauu

SEQ ID NO: 233037 - RNA, 19 nt, Artificial Sequence
  Description of Artificial Sequence: Synthetic oligonucleotide
  Antisense strand to SEQ ID NO: 233036
aauauaggaagugacucaa

SEQ ID NO: 233038 - RNA, 19 nt, Artificial Sequence
  Description of Artificial Sequence: Synthetic oligonucleotide
  Sense strand starting at position 2179 SEQ ID NO: 2999
aggaauaacuucccuguua

SEQ ID NO: 233039 - RNA, 19 nt, Artificial Sequence
  Description of Artificial Sequence: Synthetic oligonucleotide
  Antisense strand to SEQ ID NO: 233038
uaacagggaaguuauuccu

SEQ ID NO: 233040 - RNA, 19 nt, Artificial Sequence
  Description of Artificial Sequence: Synthetic oligonucleotide
  Sense strand starting at position 2180 SEQ ID NO: 2999
ggaauaacuucccuguuag

SEQ ID NO: 233041 - RNA, 19 nt, Artificial Sequence
  Description of Artificial Sequence: Synthetic oligonucleotide
  Antisense strand to SEQ ID NO: 233040
cuaacagggaaguuauucc

SEQ ID NO: 233042 - RNA, 19 nt, Artificial Sequence
  Description of Artificial Sequence: Synthetic oligonucleotide
  Sense strand starting at position 2208 SEQ ID NO: 2999
uuagcaacuuggccuaaau

SEQ ID NO: 233043 - RNA, 19 nt, Artificial Sequence
  Description of Artificial Sequence: Synthetic oligonucleotide
  Antisense strand to SEQ ID NO: 233042
auuuaggccaaguugcuaa

SEQ ID NO: 233044 - RNA, 19 nt, Artificial Sequence
  Description of Artificial Sequence: Synthetic oligonucleotide
  Sense strand starting at position 2210 SEQ ID NO: 2999
agcaacuuggccuaaaugu

SEQ ID NO: 233045 - RNA, 19 nt, Artificial Sequence
  Description of Artificial Sequence: Synthetic oligonucleotide
  Antisense strand to SEQ ID NO: 233044
acauuuaggccaaguugcu

SEQ ID NO: 233046 - RNA, 19 nt, Artificial Sequence
  Description of Artificial Sequence: Synthetic oligonucleotide
  Sense strand starting at position 2340 SEQ ID NO: 2999
gccagagucaaugggaaau

SEQ ID NO: 233047 - RNA, 19 nt, Artificial Sequence
  Description of Artificial Sequence: Synthetic oligonucleotide
  Antisense strand to SEQ ID NO: 233046
auuucccauugacucuggc

SEQ ID NO: 233048 - RNA, 19 nt, Artificial Sequence
  Description of Artificial Sequence: Synthetic oligonucleotide
  Sense strand starting at position 2475 SEQ ID NO: 2999
uagagcaaugccuaauagu

SEQ ID NO: 233049 - RNA, 19 nt, Artificial Sequence
  Description of Artificial Sequence: Synthetic oligonucleotide
  Antisense strand to SEQ ID NO: 233048
acuauuaggcauugcucua

SEQ ID NO: 233050 - RNA, 19 nt, Artificial Sequence
  Description of Artificial Sequence: Synthetic oligonucleotide
  Sense strand starting at position 2492 SEQ ID NO: 2999
guagauacccuauguguau

SEQ ID NO: 233051 - RNA, 19 nt, Artificial Sequence
  Description of Artificial Sequence: Synthetic oligonucleotide
  Antisense strand to SEQ ID NO: 233050
auacacauaggguaucuac

SEQ ID NO: 233052 - RNA, 19 nt, Artificial Sequence
  Description of Artificial Sequence: Synthetic oligonucleotide
  Sense strand starting at position 2496 SEQ ID NO: 2999
auacccuauguguauguua

SEQ ID NO: 233053 - RNA, 19 nt, Artificial Sequence
  Description of Artificial Sequence: Synthetic oligonucleotide
  Antisense strand to SEQ ID NO: 233052
uaacauacacauaggguau

SEQ ID NO: 233054 - RNA, 19 nt, Artificial Sequence
  Description of Artificial Sequence: Synthetic oligonucleotide
  Sense strand starting at position 2498 SEQ ID NO: 2999
acccuauguguauguuaua

SEQ ID NO: 233055 - RNA, 19 nt, Artificial Sequence
  Description of Artificial Sequence: Synthetic oligonucleotide
  Antisense strand to SEQ ID NO: 233054
uauaacauacacauagggu

SEQ ID NO: 233056 - RNA, 19 nt, Artificial Sequence
  Description of Artificial Sequence: Synthetic oligonucleotide
  Sense strand starting at position 2499 SEQ ID NO: 2999
cccuauguguauguuauaa

SEQ ID NO: 233057 - RNA, 19 nt, Artificial Sequence
  Description of Artificial Sequence: Synthetic oligonucleotide
  Antisense strand to SEQ ID NO: 233056
uuauaacauacacauaggg

SEQ ID NO: 233058 - RNA, 19 nt, Artificial Sequence
  Description of Artificial Sequence: Synthetic oligonucleotide
  Sense strand starting at position 2550 SEQ ID NO: 2999
caaugucggagugauaaga

SEQ ID NO: 233059 - RNA, 19 nt, Artificial Sequence
  Description of Artificial Sequence: Synthetic oligonucleotide
  Antisense strand to SEQ ID NO: 233058
ucuuaucacuccgacauug

SEQ ID NO: 233060 - RNA, 19 nt, Artificial Sequence
  Description of Artificial Sequence: Synthetic oligonucleotide
  Sense strand starting at position 2561 SEQ ID NO: 2999
ugauaagaguaacaagaaa

SEQ ID NO: 233061 - RNA, 19 nt, Artificial Sequence
  Description of Artificial Sequence: Synthetic oligonucleotide
  Antisense strand to SEQ ID NO: 233060
uuucuuguuacucuuauca

SEQ ID NO: 233062 - RNA, 19 nt, Artificial Sequence
  Description of Artificial Sequence: Synthetic oligonucleotide
  Sense strand starting at position 2687 SEQ ID NO: 2999
gcugaaugccacugaucua

SEQ ID NO: 233063 - RNA, 19 nt, Artificial Sequence
  Description of Artificial Sequence: Synthetic oligonucleotide
  Antisense strand to SEQ ID NO: 233062
uagaucaguggcauucagc

SEQ ID NO: 233064 - RNA, 19 nt, Artificial Sequence
  Description of Artificial Sequence: Synthetic oligonucleotide
  Sense strand starting at position 2709 SEQ ID NO: 2999
acuuacagaugguuaagau

SEQ ID NO: 233065 - RNA, 19 nt, Artificial Sequence
  Description of Artificial Sequence: Synthetic oligonucleotide
  Antisense strand to SEQ ID NO: 233064
aucuuaaccaucuguaagu

SEQ ID NO: 233066 - RNA, 19 nt, Artificial Sequence
  Description of Artificial Sequence: Synthetic oligonucleotide
  Sense strand starting at position 73 SEQ ID NO: 3000
gugcguuuagugguuagaa

SEQ ID NO: 233067 - RNA, 19 nt, Artificial Sequence
  Description of Artificial Sequence: Synthetic oligonucleotide
  Antisense strand to SEQ ID NO: 233066
uucuaaccacuaaacgcac

SEQ ID NO: 233068 - RNA, 19 nt, Artificial Sequence
  Description of Artificial Sequence: Synthetic oligonucleotide
  Sense strand starting at position 160 SEQ ID NO: 3000
gaguuaaaguuacuuugau

SEQ ID NO: 233069 - RNA, 19 nt, Artificial Sequence
  Description of Artificial Sequence: Synthetic oligonucleotide
  Antisense strand to SEQ ID NO: 233068
aucaaaguaacuuuaacuc

SEQ ID NO: 233070 - RNA, 19 nt, Artificial Sequence
  Description of Artificial Sequence: Synthetic oligonucleotide
  Sense strand starting at position 161 SEQ ID NO: 3000
aguuaaaguuacuuugauc

SEQ ID NO: 233071 - RNA, 19 nt, Artificial Sequence
  Description of Artificial Sequence: Synthetic oligonucleotide
  Antisense strand to SEQ ID NO: 233070
gaucaaaguaacuuuaacu

SEQ ID NO: 233072 - RNA, 19 nt, Artificial Sequence
  Description of Artificial Sequence: Synthetic oligonucleotide
  Sense strand starting at position 221 SEQ ID NO: 3000
auauguauacacugucuau

SEQ ID NO: 233073 - RNA, 19 nt, Artificial Sequence
  Description of Artificial Sequence: Synthetic oligonucleotide
  Antisense strand to SEQ ID NO: 233072
auagacaguguauacauau

SEQ ID NO: 233074 - RNA, 19 nt, Artificial Sequence
  Description of Artificial Sequence: Synthetic oligonucleotide
  Sense strand starting at position 224 SEQ ID NO: 3000
uguauacacugucuaugau

SEQ ID NO: 233075 - RNA, 19 nt, Artificial Sequence
  Description of Artificial Sequence: Synthetic oligonucleotide
  Antisense strand to SEQ ID NO: 233074
aucauagacaguguauaca

SEQ ID NO: 233076 - RNA, 19 nt, Artificial Sequence
  Description of Artificial Sequence: Synthetic oligonucleotide
  Sense strand starting at position 288 SEQ ID NO: 3000
ccuguuucccaguggagaa

SEQ ID NO: 233077 - RNA, 19 nt, Artificial Sequence
  Description of Artificial Sequence: Synthetic oligonucleotide
  Antisense strand to SEQ ID NO: 233076
uucuccacugggaaacagg

SEQ ID NO: 233078 - RNA, 19 nt, Artificial Sequence
  Description of Artificial Sequence: Synthetic oligonucleotide
  Sense strand starting at position 289 SEQ ID NO: 3000
cuguuucccaguggagaaa

SEQ ID NO: 233079 - RNA, 19 nt, Artificial Sequence
  Description of Artificial Sequence: Synthetic oligonucleotide
  Antisense strand to SEQ ID NO: 233078
uuucuccacugggaaacag

SEQ ID NO: 233080 - RNA, 19 nt, Artificial Sequence
  Description of Artificial Sequence: Synthetic oligonucleotide
  Sense strand starting at position 317 SEQ ID NO: 3000
cuacgagauuaagugacuu

SEQ ID NO: 233081 - RNA, 19 nt, Artificial Sequence
  Description of Artificial Sequence: Synthetic oligonucleotide
  Antisense strand to SEQ ID NO: 233080
aagucacuuaaucucguag

SEQ ID NO: 233082 - RNA, 19 nt, Artificial Sequence
  Description of Artificial Sequence: Synthetic oligonucleotide
  Sense strand starting at position 355 SEQ ID NO: 3000
gagggacccggauguaaau

SEQ ID NO: 233083 - RNA, 19 nt, Artificial Sequence
  Description of Artificial Sequence: Synthetic oligonucleotide
  Antisense strand to SEQ ID NO: 233082
auuuacauccgggucccuc

SEQ ID NO: 233084 - RNA, 19 nt, Artificial Sequence
  Description of Artificial Sequence: Synthetic oligonucleotide
  Sense strand starting at position 577 SEQ ID NO: 3000
acacaauucuguguauuaa

SEQ ID NO: 233085 - RNA, 19 nt, Artificial Sequence
  Description of Artificial Sequence: Synthetic oligonucleotide
  Antisense strand to SEQ ID NO: 233084
uuaauacacagaauugugu

SEQ ID NO: 233086 - RNA, 19 nt, Artificial Sequence
  Description of Artificial Sequence: Synthetic oligonucleotide
  Sense strand starting at position 666 SEQ ID NO: 3000
augaaauguucuuugaguu

SEQ ID NO: 233087 - RNA, 19 nt, Artificial Sequence
  Description of Artificial Sequence: Synthetic oligonucleotide
  Antisense strand to SEQ ID NO: 233086
aacucaaagaacauuucau

SEQ ID NO: 233088 - RNA, 19 nt, Artificial Sequence
  Description of Artificial Sequence: Synthetic oligonucleotide
  Sense strand starting at position 667 SEQ ID NO: 3000
ugaaauguucuuugaguuu

SEQ ID NO: 233089 - RNA, 19 nt, Artificial Sequence
  Description of Artificial Sequence: Synthetic oligonucleotide
  Antisense strand to SEQ ID NO: 233088
aaacucaaagaacauuuca

SEQ ID NO: 233090 - RNA, 19 nt, Artificial Sequence
  Description of Artificial Sequence: Synthetic oligonucleotide
  Sense strand starting at position 727 SEQ ID NO: 3000
cuucuaagacuugaugcaa

SEQ ID NO: 233091 - RNA, 19 nt, Artificial Sequence
  Description of Artificial Sequence: Synthetic oligonucleotide
  Antisense strand to SEQ ID NO: 233090
uugcaucaagucuuagaag

SEQ ID NO: 233092 - RNA, 19 nt, Artificial Sequence
  Description of Artificial Sequence: Synthetic oligonucleotide
  Sense strand starting at position 867 SEQ ID NO: 3000
gugagauguauugggaguu

SEQ ID NO: 233093 - RNA, 19 nt, Artificial Sequence
  Description of Artificial Sequence: Synthetic oligonucleotide
  Antisense strand to SEQ ID NO: 233092
aacucccaauacaucucac

SEQ ID NO: 233094 - RNA, 19 nt, Artificial Sequence
  Description of Artificial Sequence: Synthetic oligonucleotide
  Sense strand starting at position 892 SEQ ID NO: 3000
ugaagacaguucuccugau

SEQ ID NO: 233095 - RNA, 19 nt, Artificial Sequence
  Description of Artificial Sequence: Synthetic oligonucleotide
  Antisense strand to SEQ ID NO: 233094
aucaggagaacugucuuca

SEQ ID NO: 233096 - RNA, 19 nt, Artificial Sequence
  Description of Artificial Sequence: Synthetic oligonucleotide
  Sense strand starting at position 893 SEQ ID NO: 3000
gaagacaguucuccugauu

SEQ ID NO: 233097 - RNA, 19 nt, Artificial Sequence
  Description of Artificial Sequence: Synthetic oligonucleotide
  Antisense strand to SEQ ID NO: 233096
aaucaggagaacugucuuc

SEQ ID NO: 233098 - RNA, 19 nt, Artificial Sequence
  Description of Artificial Sequence: Synthetic oligonucleotide
  Sense strand starting at position 963 SEQ ID NO: 3000
gggccuuaaguucagugau

SEQ ID NO: 233099 - RNA, 19 nt, Artificial Sequence
  Description of Artificial Sequence: Synthetic oligonucleotide
  Antisense strand to SEQ ID NO: 233098
aucacugaacuuaaggccc

SEQ ID NO: 233100 - RNA, 19 nt, Artificial Sequence
  Description of Artificial Sequence: Synthetic oligonucleotide
  Sense strand starting at position 976 SEQ ID NO: 3000
agugaugucuaaguacacu

SEQ ID NO: 233101 - RNA, 19 nt, Artificial Sequence
  Description of Artificial Sequence: Synthetic oligonucleotide
  Antisense strand to SEQ ID NO: 233100
aguguacuuagacaucacu

SEQ ID NO: 233102 - RNA, 19 nt, Artificial Sequence
  Description of Artificial Sequence: Synthetic oligonucleotide
  Sense strand starting at position 1153 SEQ ID NO: 3000
acgagugcgacuuaagaaa

SEQ ID NO: 233103 - RNA, 19 nt, Artificial Sequence
  Description of Artificial Sequence: Synthetic oligonucleotide
  Antisense strand to SEQ ID NO: 233102
uuucuuaagucgcacucgu

SEQ ID NO: 233104 - RNA, 19 nt, Artificial Sequence
  Description of Artificial Sequence: Synthetic oligonucleotide
  Sense strand starting at position 1971 SEQ ID NO: 3000
cgugucauuugaccauaua

SEQ ID NO: 233105 - RNA, 19 nt, Artificial Sequence
  Description of Artificial Sequence: Synthetic oligonucleotide
  Antisense strand to SEQ ID NO: 233104
uauauggucaaaugacacg

SEQ ID NO: 233106 - RNA, 19 nt, Artificial Sequence
  Description of Artificial Sequence: Synthetic oligonucleotide
  Sense strand starting at position 2145 SEQ ID NO: 3000
uugggagcacaguaguuau

SEQ ID NO: 233107 - RNA, 19 nt, Artificial Sequence
  Description of Artificial Sequence: Synthetic oligonucleotide
  Antisense strand to SEQ ID NO: 233106
auaacuacugugcucccaa

SEQ ID NO: 233108 - RNA, 19 nt, Artificial Sequence
  Description of Artificial Sequence: Synthetic oligonucleotide
  Sense strand starting at position 2323 SEQ ID NO: 3000
gucacuucucaggaggcau

SEQ ID NO: 233109 - RNA, 19 nt, Artificial Sequence
  Description of Artificial Sequence: Synthetic oligonucleotide
  Antisense strand to SEQ ID NO: 233108
augccuccugagaagugac

SEQ ID NO: 233110 - RNA, 19 nt, Artificial Sequence
  Description of Artificial Sequence: Synthetic oligonucleotide
  Sense strand starting at position 2348 SEQ ID NO: 3000
gggauauauuugcaaggug

SEQ ID NO: 233111 - RNA, 19 nt, Artificial Sequence
  Description of Artificial Sequence: Synthetic oligonucleotide
  Antisense strand to SEQ ID NO: 233110
caccuugcaaauauauccc

SEQ ID NO: 233112 - RNA, 19 nt, Artificial Sequence
  Description of Artificial Sequence: Synthetic oligonucleotide
  Sense strand starting at position 2845 SEQ ID NO: 3000
cgggaagaacuccgugauu

SEQ ID NO: 233113 - RNA, 19 nt, Artificial Sequence
  Description of Artificial Sequence: Synthetic oligonucleotide
  Antisense strand to SEQ ID NO: 233112
aaucacggaguucuucccg

SEQ ID NO: 233114 - RNA, 19 nt, Artificial Sequence
  Description of Artificial Sequence: Synthetic oligonucleotide
  Sense strand starting at position 2848 SEQ ID NO: 3000
gaagaacuccgugauugcu

SEQ ID NO: 233115 - RNA, 19 nt, Artificial Sequence
  Description of Artificial Sequence: Synthetic oligonucleotide
  Antisense strand to SEQ ID NO: 233114
agcaaucacggaguucuuc

SEQ ID NO: 233116 - RNA, 19 nt, Artificial Sequence
  Description of Artificial Sequence: Synthetic oligonucleotide
  Sense strand starting at position 3113 SEQ ID NO: 3000
ggaugugguagauggcaaa

SEQ ID NO: 233117 - RNA, 19 nt, Artificial Sequence
  Description of Artificial Sequence: Synthetic oligonucleotide
  Antisense strand to SEQ ID NO: 233116
uuugccaucuaccacaucc

SEQ ID NO: 233118 - RNA, 19 nt, Artificial Sequence
  Description of Artificial Sequence: Synthetic oligonucleotide
  Sense strand starting at position 3126 SEQ ID NO: 3000
ggcaaagccauguaaguau

SEQ ID NO: 233119 - RNA, 19 nt, Artificial Sequence
  Description of Artificial Sequence: Synthetic oligonucleotide
  Antisense strand to SEQ ID NO: 233118
auacuuacauggcuuugcc

SEQ ID NO: 233120 - RNA, 19 nt, Artificial Sequence
  Description of Artificial Sequence: Synthetic oligonucleotide
  Sense strand starting at position 3196 SEQ ID NO: 3000
aggacugagacuugccaua

SEQ ID NO: 233121 - RNA, 19 nt, Artificial Sequence
  Description of Artificial Sequence: Synthetic oligonucleotide
  Antisense strand to SEQ ID NO: 233120
uauggcaagucucaguccu

SEQ ID NO: 233122 - RNA, 19 nt, Artificial Sequence
  Description of Artificial Sequence: Synthetic oligonucleotide
  Sense strand starting at position 3225 SEQ ID NO: 3000
gaacuagaugugcggaaua

SEQ ID NO: 233123 - RNA, 19 nt, Artificial Sequence
  Description of Artificial Sequence: Synthetic oligonucleotide
  Antisense strand to SEQ ID NO: 233122
uauuccgcacaucuaguuc

SEQ ID NO: 233124 - RNA, 19 nt, Artificial Sequence
  Description of Artificial Sequence: Synthetic oligonucleotide
  Sense strand starting at position 3227 SEQ ID NO: 3000
acuagaugugcggaauaca

SEQ ID NO: 233125 - RNA, 19 nt, Artificial Sequence
  Description of Artificial Sequence: Synthetic oligonucleotide
  Antisense strand to SEQ ID NO: 233124
uguauuccgcacaucuagu

SEQ ID NO: 233126 - RNA, 19 nt, Artificial Sequence
  Description of Artificial Sequence: Synthetic oligonucleotide
  Sense strand starting at position 3284 SEQ ID NO: 3000
ggacgcuuuccugaagaac

SEQ ID NO: 233127 - RNA, 19 nt, Artificial Sequence
  Description of Artificial Sequence: Synthetic oligonucleotide
  Antisense strand to SEQ ID NO: 233126
guucuucaggaaagcgucc

SEQ ID NO: 233128 - RNA, 19 nt, Artificial Sequence
  Description of Artificial Sequence: Synthetic oligonucleotide
  Sense strand starting at position 3370 SEQ ID NO: 3000
agcaaaguuuguguagaaa

SEQ ID NO: 233129 - RNA, 19 nt, Artificial Sequence
  Description of Artificial Sequence: Synthetic oligonucleotide
  Antisense strand to SEQ ID NO: 233128
uuucuacacaaacuuugcu

SEQ ID NO: 233130 - RNA, 19 nt, Artificial Sequence
  Description of Artificial Sequence: Synthetic oligonucleotide
  Sense strand starting at position 3423 SEQ ID NO: 3000
uguugauaucguuacaaau

SEQ ID NO: 233131 - RNA, 19 nt, Artificial Sequence
  Description of Artificial Sequence: Synthetic oligonucleotide
  Antisense strand to SEQ ID NO: 233130
auuuguaacgauaucaaca

SEQ ID NO: 233132 - RNA, 19 nt, Artificial Sequence
  Description of Artificial Sequence: Synthetic oligonucleotide
  Sense strand starting at position 3443 SEQ ID NO: 3000
aggaaauggucuccuaguu

SEQ ID NO: 233133 - RNA, 19 nt, Artificial Sequence
  Description of Artificial Sequence: Synthetic oligonucleotide
  Antisense strand to SEQ ID NO: 233132
aacuaggagaccauuuccu

SEQ ID NO: 233134 - RNA, 19 nt, Artificial Sequence
  Description of Artificial Sequence: Synthetic oligonucleotide
  Sense strand starting at position 3456 SEQ ID NO: 3000
cuaguucucaaauggugag

SEQ ID NO: 233135 - RNA, 19 nt, Artificial Sequence
  Description of Artificial Sequence: Synthetic oligonucleotide
  Antisense strand to SEQ ID NO: 233134
cucaccauuugagaacuag

SEQ ID NO: 233136 - RNA, 19 nt, Artificial Sequence
  Description of Artificial Sequence: Synthetic oligonucleotide
  Sense strand starting at position 3462 SEQ ID NO: 3000
cucaaauggugagucuuaa

SEQ ID NO: 233137 - RNA, 19 nt, Artificial Sequence
  Description of Artificial Sequence: Synthetic oligonucleotide
  Antisense strand to SEQ ID NO: 233136
uuaagacucaccauuugag

SEQ ID NO: 233138 - RNA, 19 nt, Artificial Sequence
  Description of Artificial Sequence: Synthetic oligonucleotide
  Sense strand starting at position 3593 SEQ ID NO: 3000
gacuuacggguguaaucca

SEQ ID NO: 233139 - RNA, 19 nt, Artificial Sequence
  Description of Artificial Sequence: Synthetic oligonucleotide
  Antisense strand to SEQ ID NO: 233138
uggauuacacccguaaguc

SEQ ID NO: 233140 - RNA, 19 nt, Artificial Sequence
  Description of Artificial Sequence: Synthetic oligonucleotide
  Sense strand starting at position 3634 SEQ ID NO: 3000
uagaguuauuuaguucugu

SEQ ID NO: 233141 - RNA, 19 nt, Artificial Sequence
  Description of Artificial Sequence: Synthetic oligonucleotide
  Antisense strand to SEQ ID NO: 233140
acagaacuaaauaacucua

SEQ ID NO: 233142 - RNA, 19 nt, Artificial Sequence
  Description of Artificial Sequence: Synthetic oligonucleotide
  Sense strand starting at position 3635 SEQ ID NO: 3000
agaguuauuuaguucuguu

SEQ ID NO: 233143 - RNA, 19 nt, Artificial Sequence
  Description of Artificial Sequence: Synthetic oligonucleotide
  Antisense strand to SEQ ID NO: 233142
aacagaacuaaauaacucu

SEQ ID NO: 233144 - RNA, 19 nt, Artificial Sequence
  Description of Artificial Sequence: Synthetic oligonucleotide
  Sense strand starting at position 3795 SEQ ID NO: 3000
auucgauagggucaguaaa

SEQ ID NO: 233145 - RNA, 19 nt, Artificial Sequence
  Description of Artificial Sequence: Synthetic oligonucleotide
  Antisense strand to SEQ ID NO: 233144
uuuacugacccuaucgaau

SEQ ID NO: 233146 - RNA, 19 nt, Artificial Sequence
  Description of Artificial Sequence: Synthetic oligonucleotide
  Sense strand starting at position 54 SEQ ID NO: 3001
gaguuaaaguuacuuugau

SEQ ID NO: 233147 - RNA, 19 nt, Artificial Sequence
  Description of Artificial Sequence: Synthetic oligonucleotide
  Antisense strand to SEQ ID NO: 233146
aucaaaguaacuuuaacuc

SEQ ID NO: 233148 - RNA, 19 nt, Artificial Sequence
  Description of Artificial Sequence: Synthetic oligonucleotide
  Sense strand starting at position 55 SEQ ID NO: 3001
aguuaaaguuacuuugauc

SEQ ID NO: 233149 - RNA, 19 nt, Artificial Sequence
  Description of Artificial Sequence: Synthetic oligonucleotide
  Antisense strand to SEQ ID NO: 233148
gaucaaaguaacuuuaacu

SEQ ID NO: 233150 - RNA, 19 nt, Artificial Sequence
  Description of Artificial Sequence: Synthetic oligonucleotide
  Sense strand starting at position 115 SEQ ID NO: 3001
auauguauacacugucuau

SEQ ID NO: 233151 - RNA, 19 nt, Artificial Sequence
  Description of Artificial Sequence: Synthetic oligonucleotide
  Antisense strand to SEQ ID NO: 233150
auagacaguguauacauau

SEQ ID NO: 233152 - RNA, 19 nt, Artificial Sequence
  Description of Artificial Sequence: Synthetic oligonucleotide
  Sense strand starting at position 118 SEQ ID NO: 3001
uguauacacugucuaugau

SEQ ID NO: 233153 - RNA, 19 nt, Artificial Sequence
  Description of Artificial Sequence: Synthetic oligonucleotide
  Antisense strand to SEQ ID NO: 233152
aucauagacaguguauaca

SEQ ID NO: 233154 - RNA, 19 nt, Artificial Sequence
  Description of Artificial Sequence: Synthetic oligonucleotide
  Sense strand starting at position 182 SEQ ID NO: 3001
ccuguuucccaguggagaa

SEQ ID NO: 233155 - RNA, 19 nt, Artificial Sequence
  Description of Artificial Sequence: Synthetic oligonucleotide
  Antisense strand to SEQ ID NO: 233154
uucuccacugggaaacagg

SEQ ID NO: 233156 - RNA, 19 nt, Artificial Sequence
  Description of Artificial Sequence: Synthetic oligonucleotide
  Sense strand starting at position 183 SEQ ID NO: 3001
cuguuucccaguggagaaa

SEQ ID NO: 233157 - RNA, 19 nt, Artificial Sequence
  Description of Artificial Sequence: Synthetic oligonucleotide
  Antisense strand to SEQ ID NO: 233156
uuucuccacugggaaacag

SEQ ID NO: 233158 - RNA, 19 nt, Artificial Sequence
  Description of Artificial Sequence: Synthetic oligonucleotide
  Sense strand starting at position 211 SEQ ID NO: 3001
cuacgagauuaagugacuu

SEQ ID NO: 233159 - RNA, 19 nt, Artificial Sequence
  Description of Artificial Sequence: Synthetic oligonucleotide
  Antisense strand to SEQ ID NO: 233158
aagucacuuaaucucguag

SEQ ID NO: 233160 - RNA, 19 nt, Artificial Sequence
  Description of Artificial Sequence: Synthetic oligonucleotide
  Sense strand starting at position 249 SEQ ID NO: 3001
gagggacccggauguaaau

SEQ ID NO: 233161 - RNA, 19 nt, Artificial Sequence
  Description of Artificial Sequence: Synthetic oligonucleotide
  Antisense strand to SEQ ID NO: 233160
auuuacauccgggucccuc

SEQ ID NO: 233162 - RNA, 19 nt, Artificial Sequence
  Description of Artificial Sequence: Synthetic oligonucleotide
  Sense strand starting at position 471 SEQ ID NO: 3001
acacaauucuguguauuaa

SEQ ID NO: 233163 - RNA, 19 nt, Artificial Sequence
  Description of Artificial Sequence: Synthetic oligonucleotide
  Antisense strand to SEQ ID NO: 233162
uuaauacacagaauugugu

SEQ ID NO: 233164 - RNA, 19 nt, Artificial Sequence
  Description of Artificial Sequence: Synthetic oligonucleotide
  Sense strand starting at position 560 SEQ ID NO: 3001
augaaauguucuuugaguu

SEQ ID NO: 233165 - RNA, 19 nt, Artificial Sequence
  Description of Artificial Sequence: Synthetic oligonucleotide
  Antisense strand to SEQ ID NO: 233164
aacucaaagaacauuucau

SEQ ID NO: 233166 - RNA, 19 nt, Artificial Sequence
  Description of Artificial Sequence: Synthetic oligonucleotide
  Sense strand starting at position 561 SEQ ID NO: 3001
ugaaauguucuuugaguuu

SEQ ID NO: 233167 - RNA, 19 nt, Artificial Sequence
  Description of Artificial Sequence: Synthetic oligonucleotide
  Antisense strand to SEQ ID NO: 233166
aaacucaaagaacauuuca

SEQ ID NO: 233168 - RNA, 19 nt, Artificial Sequence
  Description of Artificial Sequence: Synthetic oligonucleotide
  Sense strand starting at position 621 SEQ ID NO: 3001
cuucuaagacuugaugcaa

SEQ ID NO: 233169 - RNA, 19 nt, Artificial Sequence
  Description of Artificial Sequence: Synthetic oligonucleotide
  Antisense strand to SEQ ID NO: 233168
uugcaucaagucuuagaag

SEQ ID NO: 233170 - RNA, 19 nt, Artificial Sequence
  Description of Artificial Sequence: Synthetic oligonucleotide
  Sense strand starting at position 761 SEQ ID NO: 3001
gugagauguauugggaguu

SEQ ID NO: 233171 - RNA, 19 nt, Artificial Sequence
  Description of Artificial Sequence: Synthetic oligonucleotide
  Antisense strand to SEQ ID NO: 233170
aacucccaauacaucucac

SEQ ID NO: 233172 - RNA, 19 nt, Artificial Sequence
  Description of Artificial Sequence: Synthetic oligonucleotide
  Sense strand starting at position 786 SEQ ID NO: 3001
ugaagacaguucuccugau

SEQ ID NO: 233173 - RNA, 19 nt, Artificial Sequence
  Description of Artificial Sequence: Synthetic oligonucleotide
  Antisense strand to SEQ ID NO: 233172
aucaggagaacugucuuca

SEQ ID NO: 233174 - RNA, 19 nt, Artificial Sequence
  Description of Artificial Sequence: Synthetic oligonucleotide
  Sense strand starting at position 787 SEQ ID NO: 3001
gaagacaguucuccugauu

SEQ ID NO: 233175 - RNA, 19 nt, Artificial Sequence
  Description of Artificial Sequence: Synthetic oligonucleotide
  Antisense strand to SEQ ID NO: 233174
aaucaggagaacugucuuc

SEQ ID NO: 233176 - RNA, 19 nt, Artificial Sequence
  Description of Artificial Sequence: Synthetic oligonucleotide
  Sense strand starting at position 857 SEQ ID NO: 3001
gggccuuaaguucagugau

SEQ ID NO: 233177 - RNA, 19 nt, Artificial Sequence
  Description of Artificial Sequence: Synthetic oligonucleotide
  Antisense strand to SEQ ID NO: 233176
aucacugaacuuaaggccc

SEQ ID NO: 233178 - RNA, 19 nt, Artificial Sequence
  Description of Artificial Sequence: Synthetic oligonucleotide
  Sense strand starting at position 870 SEQ ID NO: 3001
agugaugucuaaguacacu

SEQ ID NO: 233179 - RNA, 19 nt, Artificial Sequence
  Description of Artificial Sequence: Synthetic oligonucleotide
  Antisense strand to SEQ ID NO: 233178
aguguacuuagacaucacu

SEQ ID NO: 233180 - RNA, 19 nt, Artificial Sequence
  Description of Artificial Sequence: Synthetic oligonucleotide
  Sense strand starting at position 1047 SEQ ID NO: 3001
acgagugcgacuuaagaaa

SEQ ID NO: 233181 - RNA, 19 nt, Artificial Sequence
  Description of Artificial Sequence: Synthetic oligonucleotide
  Antisense strand to SEQ ID NO: 233180
uuucuuaagucgcacucgu

SEQ ID NO: 233182 - RNA, 19 nt, Artificial Sequence
  Description of Artificial Sequence: Synthetic oligonucleotide
  Sense strand starting at position 1865 SEQ ID NO: 3001
cgugucauuugaccauaua

SEQ ID NO: 233183 - RNA, 19 nt, Artificial Sequence
  Description of Artificial Sequence: Synthetic oligonucleotide
  Antisense strand to SEQ ID NO: 233182
uauauggucaaaugacacg

SEQ ID NO: 233184 - RNA, 19 nt, Artificial Sequence
  Description of Artificial Sequence: Synthetic oligonucleotide
  Sense strand starting at position 2039 SEQ ID NO: 3001
uugggagcacaguaguuau

SEQ ID NO: 233185 - RNA, 19 nt, Artificial Sequence
  Description of Artificial Sequence: Synthetic oligonucleotide
  Antisense strand to SEQ ID NO: 233184
auaacuacugugcucccaa

SEQ ID NO: 233186 - RNA, 19 nt, Artificial Sequence
  Description of Artificial Sequence: Synthetic oligonucleotide
  Sense strand starting at position 2217 SEQ ID NO: 3001
gucacuucucaggaggcau

SEQ ID NO: 233187 - RNA, 19 nt, Artificial Sequence
  Description of Artificial Sequence: Synthetic oligonucleotide
  Antisense strand to SEQ ID NO: 233186
augccuccugagaagugac

SEQ ID NO: 233188 - RNA, 19 nt, Artificial Sequence
  Description of Artificial Sequence: Synthetic oligonucleotide
  Sense strand starting at position 2242 SEQ ID NO: 3001
gggauauauuugcaaggug

SEQ ID NO: 233189 - RNA, 19 nt, Artificial Sequence
  Description of Artificial Sequence: Synthetic oligonucleotide
  Antisense strand to SEQ ID NO: 233188
caccuugcaaauauauccc

SEQ ID NO: 233190 - RNA, 19 nt, Artificial Sequence
  Description of Artificial Sequence: Synthetic oligonucleotide
  Sense strand starting at position 2739 SEQ ID NO: 3001
cgggaagaacuccgugauu

SEQ ID NO: 233191 - RNA, 19 nt, Artificial Sequence
  Description of Artificial Sequence: Synthetic oligonucleotide
  Antisense strand to SEQ ID NO: 233190
aaucacggaguucuucccg

SEQ ID NO: 233192 - RNA, 19 nt, Artificial Sequence
  Description of Artificial Sequence: Synthetic oligonucleotide
  Sense strand starting at position 2742 SEQ ID NO: 3001
gaagaacuccgugauugcu

SEQ ID NO: 233193 - RNA, 19 nt, Artificial Sequence
  Description of Artificial Sequence: Synthetic oligonucleotide
  Antisense strand to SEQ ID NO: 233192
agcaaucacggaguucuuc

SEQ ID NO: 233194 - RNA, 19 nt, Artificial Sequence
  Description of Artificial Sequence: Synthetic oligonucleotide
  Sense strand starting at position 3007 SEQ ID NO: 3001
ggaugugguagauggcaaa

SEQ ID NO: 233195 - RNA, 19 nt, Artificial Sequence
  Description of Artificial Sequence: Synthetic oligonucleotide
  Antisense strand to SEQ ID NO: 233194
uuugccaucuaccacaucc

SEQ ID NO: 233196 - RNA, 19 nt, Artificial Sequence
  Description of Artificial Sequence: Synthetic oligonucleotide
  Sense strand starting at position 3020 SEQ ID NO: 3001
ggcaaagccauguaaguau

SEQ ID NO: 233197 - RNA, 19 nt, Artificial Sequence
  Description of Artificial Sequence: Synthetic oligonucleotide
  Antisense strand to SEQ ID NO: 233196
auacuuacauggcuuugcc

SEQ ID NO: 233198 - RNA, 19 nt, Artificial Sequence
  Description of Artificial Sequence: Synthetic oligonucleotide
  Sense strand starting at position 3090 SEQ ID NO: 3001
aggacugagacuugccaua

SEQ ID NO: 233199 - RNA, 19 nt, Artificial Sequence
  Description of Artificial Sequence: Synthetic oligonucleotide
  Antisense strand to SEQ ID NO: 233198
uauggcaagucucaguccu

SEQ ID NO: 233200 - RNA, 19 nt, Artificial Sequence
  Description of Artificial Sequence: Synthetic oligonucleotide
  Sense strand starting at position 3119 SEQ ID NO: 3001
gaacuagaugugcggaaua

SEQ ID NO: 233201 - RNA, 19 nt, Artificial Sequence
  Description of Artificial Sequence: Synthetic oligonucleotide
  Antisense strand to SEQ ID NO: 233200
uauuccgcacaucuaguuc

SEQ ID NO: 233202 - RNA, 19 nt, Artificial Sequence
  Description of Artificial Sequence: Synthetic oligonucleotide
  Sense strand starting at position 3121 SEQ ID NO: 3001
acuagaugugcggaauaca

SEQ ID NO: 233203 - RNA, 19 nt, Artificial Sequence
  Description of Artificial Sequence: Synthetic oligonucleotide
  Antisense strand to SEQ ID NO: 233202
uguauuccgcacaucuagu

SEQ ID NO: 233204 - RNA, 19 nt, Artificial Sequence
  Description of Artificial Sequence: Synthetic oligonucleotide
  Sense strand starting at position 3178 SEQ ID NO: 3001
ggacgcuuuccugaagaac

SEQ ID NO: 233205 - RNA, 19 nt, Artificial Sequence
  Description of Artificial Sequence: Synthetic oligonucleotide
  Antisense strand to SEQ ID NO: 233204
guucuucaggaaagcgucc

SEQ ID NO: 233206 - RNA, 19 nt, Artificial Sequence
  Description of Artificial Sequence: Synthetic oligonucleotide
  Sense strand starting at position 3264 SEQ ID NO: 3001
agcaaaguuuguguagaaa

SEQ ID NO: 233207 - RNA, 19 nt, Artificial Sequence
  Description of Artificial Sequence: Synthetic oligonucleotide
  Antisense strand to SEQ ID NO: 233206
uuucuacacaaacuuugcu

SEQ ID NO: 233208 - RNA, 19 nt, Artificial Sequence
  Description of Artificial Sequence: Synthetic oligonucleotide
  Sense strand starting at position 3317 SEQ ID NO: 3001
uguugauaucguuacaaau

SEQ ID NO: 233209 - RNA, 19 nt, Artificial Sequence
  Description of Artificial Sequence: Synthetic oligonucleotide
  Antisense strand to SEQ ID NO: 233208
auuuguaacgauaucaaca

SEQ ID NO: 233210 - RNA, 19 nt, Artificial Sequence
  Description of Artificial Sequence: Synthetic oligonucleotide
  Sense strand starting at position 3337 SEQ ID NO: 3001
aggaaauggucuccuaguu

SEQ ID NO: 233211 - RNA, 19 nt, Artificial Sequence
  Description of Artificial Sequence: Synthetic oligonucleotide
  Antisense strand to SEQ ID NO: 233210
aacuaggagaccauuuccu

SEQ ID NO: 233212 - RNA, 19 nt, Artificial Sequence
  Description of Artificial Sequence: Synthetic oligonucleotide
  Sense strand starting at position 3350 SEQ ID NO: 3001
cuaguucucaaauggugag

SEQ ID NO: 233213 - RNA, 19 nt, Artificial Sequence
  Description of Artificial Sequence: Synthetic oligonucleotide
  Antisense strand to SEQ ID NO: 233212
cucaccauuugagaacuag

SEQ ID NO: 233214 - RNA, 19 nt, Artificial Sequence
  Description of Artificial Sequence: Synthetic oligonucleotide
  Sense strand starting at position 3356 SEQ ID NO: 3001
cucaaauggugagucuuaa

SEQ ID NO: 233215 - RNA, 19 nt, Artificial Sequence
  Description of Artificial Sequence: Synthetic oligonucleotide
  Antisense strand to SEQ ID NO: 233214
uuaagacucaccauuugag

SEQ ID NO: 233216 - RNA, 19 nt, Artificial Sequence
  Description of Artificial Sequence: Synthetic oligonucleotide
  Sense strand starting at position 3487 SEQ ID NO: 3001
gacuuacggguguaaucca

SEQ ID NO: 233217 - RNA, 19 nt, Artificial Sequence
  Description of Artificial Sequence: Synthetic oligonucleotide
  Antisense strand to SEQ ID NO: 233216
uggauuacacccguaaguc

SEQ ID NO: 233218 - RNA, 19 nt, Artificial Sequence
  Description of Artificial Sequence: Synthetic oligonucleotide
  Sense strand starting at position 3528 SEQ ID NO: 3001
uagaguuauuuaguucugu

SEQ ID NO: 233219 - RNA, 19 nt, Artificial Sequence
  Description of Artificial Sequence: Synthetic oligonucleotide
  Antisense strand to SEQ ID NO: 233218
acagaacuaaauaacucua

SEQ ID NO: 233220 - RNA, 19 nt, Artificial Sequence
  Description of Artificial Sequence: Synthetic oligonucleotide
  Sense strand starting at position 3529 SEQ ID NO: 3001
agaguuauuuaguucuguu

SEQ ID NO: 233221 - RNA, 19 nt, Artificial Sequence
  Description of Artificial Sequence: Synthetic oligonucleotide
  Antisense strand to SEQ ID NO: 233220
aacagaacuaaauaacucu

SEQ ID NO: 233222 - RNA, 19 nt, Artificial Sequence
  Description of Artificial Sequence: Synthetic oligonucleotide
  Sense strand starting at position 3689 SEQ ID NO: 3001
auucgauagggucaguaaa

SEQ ID NO: 233223 - RNA, 19 nt, Artificial Sequence
  Description of Artificial Sequence: Synthetic oligonucleotide
  Antisense strand to SEQ ID NO: 233222
uuuacugacccuaucgaau

SEQ ID NO: 233224 - RNA, 19 nt, Artificial Sequence
  Description of Artificial Sequence: Synthetic oligonucleotide
  Sense strand starting at position 3980 SEQ ID NO: 3001
gugauaaugugauuacaca

SEQ ID NO: 233225 - RNA, 19 nt, Artificial Sequence
  Description of Artificial Sequence: Synthetic oligonucleotide
  Antisense strand to SEQ ID NO: 233224
uguguaaucacauuaucac

SEQ ID NO: 233226 - RNA, 19 nt, Artificial Sequence
  Description of Artificial Sequence: Synthetic oligonucleotide
  Sense strand starting at position 175 SEQ ID NO: 3002
agagaucgguagaaagagu

SEQ ID NO: 233227 - RNA, 19 nt, Artificial Sequence
  Description of Artificial Sequence: Synthetic oligonucleotide
  Antisense strand to SEQ ID NO: 233226
acucuuucuaccgaucucu

SEQ ID NO: 233228 - RNA, 19 nt, Artificial Sequence
  Description of Artificial Sequence: Synthetic oligonucleotide
  Sense strand starting at position 203 SEQ ID NO: 3002
ugugcuuuaggucauggga

SEQ ID NO: 233229 - RNA, 19 nt, Artificial Sequence
  Description of Artificial Sequence: Synthetic oligonucleotide
  Antisense strand to SEQ ID NO: 233228
ucccaugaccuaaagcaca

SEQ ID NO: 233230 - RNA, 19 nt, Artificial Sequence
  Description of Artificial Sequence: Synthetic oligonucleotide
  Sense strand starting at position 206 SEQ ID NO: 3002
gcuuuaggucaugggaaug

SEQ ID NO: 233231 - RNA, 19 nt, Artificial Sequence
  Description of Artificial Sequence: Synthetic oligonucleotide
  Antisense strand to SEQ ID NO: 233230
cauucccaugaccuaaagc

SEQ ID NO: 233232 - RNA, 19 nt, Artificial Sequence
  Description of Artificial Sequence: Synthetic oligonucleotide
  Sense strand starting at position 429 SEQ ID NO: 3002
gccuccaaaguguaaucau

SEQ ID NO: 233233 - RNA, 19 nt, Artificial Sequence
  Description of Artificial Sequence: Synthetic oligonucleotide
  Antisense strand to SEQ ID NO: 233232
augauuacacuuuggaggc

SEQ ID NO: 233234 - RNA, 19 nt, Artificial Sequence
  Description of Artificial Sequence: Synthetic oligonucleotide
  Sense strand starting at position 452 SEQ ID NO: 3002
guggauuagucaccuacuc

SEQ ID NO: 233235 - RNA, 19 nt, Artificial Sequence
  Description of Artificial Sequence: Synthetic oligonucleotide
  Antisense strand to SEQ ID NO: 233234
gaguaggugacuaauccac

SEQ ID NO: 233236 - RNA, 19 nt, Artificial Sequence
  Description of Artificial Sequence: Synthetic oligonucleotide
  Sense strand starting at position 460 SEQ ID NO: 3002
gucaccuacucaguuaaau

SEQ ID NO: 233237 - RNA, 19 nt, Artificial Sequence
  Description of Artificial Sequence: Synthetic oligonucleotide
  Antisense strand to SEQ ID NO: 233236
auuuaacugaguaggugac

SEQ ID NO: 233238 - RNA, 19 nt, Artificial Sequence
  Description of Artificial Sequence: Synthetic oligonucleotide
  Sense strand starting at position 766 SEQ ID NO: 3002
agcauuaaucuguaaggca

SEQ ID NO: 233239 - RNA, 19 nt, Artificial Sequence
  Description of Artificial Sequence: Synthetic oligonucleotide
  Antisense strand to SEQ ID NO: 233238
ugccuuacagauuaaugcu

SEQ ID NO: 233240 - RNA, 19 nt, Artificial Sequence
  Description of Artificial Sequence: Synthetic oligonucleotide
  Sense strand starting at position 778 SEQ ID NO: 3002
uaaggcagguguuuauuaa

SEQ ID NO: 233241 - RNA, 19 nt, Artificial Sequence
  Description of Artificial Sequence: Synthetic oligonucleotide
  Antisense strand to SEQ ID NO: 233240
uuaauaaacaccugccuua

SEQ ID NO: 233242 - RNA, 19 nt, Artificial Sequence
  Description of Artificial Sequence: Synthetic oligonucleotide
  Sense strand starting at position 798 SEQ ID NO: 3002
acuaucuuuggacgucaga

SEQ ID NO: 233243 - RNA, 19 nt, Artificial Sequence
  Description of Artificial Sequence: Synthetic oligonucleotide
  Antisense strand to SEQ ID NO: 233242
ucugacguccaaagauagu

SEQ ID NO: 233244 - RNA, 19 nt, Artificial Sequence
  Description of Artificial Sequence: Synthetic oligonucleotide
  Sense strand starting at position 801 SEQ ID NO: 3002
aucuuuggacgucagaaua

SEQ ID NO: 233245 - RNA, 19 nt, Artificial Sequence
  Description of Artificial Sequence: Synthetic oligonucleotide
  Antisense strand to SEQ ID NO: 233244
uauucugacguccaaagau

SEQ ID NO: 233246 - RNA, 19 nt, Artificial Sequence
  Description of Artificial Sequence: Synthetic oligonucleotide
  Sense strand starting at position 872 SEQ ID NO: 3002
uugauaaagugucuuacau

SEQ ID NO: 233247 - RNA, 19 nt, Artificial Sequence
  Description of Artificial Sequence: Synthetic oligonucleotide
  Antisense strand to SEQ ID NO: 233246
auguaagacacuuuaucaa

SEQ ID NO: 233248 - RNA, 19 nt, Artificial Sequence
  Description of Artificial Sequence: Synthetic oligonucleotide
  Sense strand starting at position 896 SEQ ID NO: 3002
cuggcuagaggauguuuau

SEQ ID NO: 233249 - RNA, 19 nt, Artificial Sequence
  Description of Artificial Sequence: Synthetic oligonucleotide
  Antisense strand to SEQ ID NO: 233248
auaaacauccucuagccag

SEQ ID NO: 233250 - RNA, 19 nt, Artificial Sequence
  Description of Artificial Sequence: Synthetic oligonucleotide
  Sense strand starting at position 899 SEQ ID NO: 3002
gcuagaggauguuuauaua

SEQ ID NO: 233251 - RNA, 19 nt, Artificial Sequence
  Description of Artificial Sequence: Synthetic oligonucleotide
  Antisense strand to SEQ ID NO: 233250
uauauaaacauccucuagc

SEQ ID NO: 233252 - RNA, 19 nt, Artificial Sequence
  Description of Artificial Sequence: Synthetic oligonucleotide
  Sense strand starting at position 1103 SEQ ID NO: 3002
agucauguugcauaaacac

SEQ ID NO: 233253 - RNA, 19 nt, Artificial Sequence
  Description of Artificial Sequence: Synthetic oligonucleotide
  Antisense strand to SEQ ID NO: 233252
guguuuaugcaacaugacu

SEQ ID NO: 233254 - RNA, 19 nt, Artificial Sequence
  Description of Artificial Sequence: Synthetic oligonucleotide
  Sense strand starting at position 1125 SEQ ID NO: 3002
uucccagaguaaucagacu

SEQ ID NO: 233255 - RNA, 19 nt, Artificial Sequence
  Description of Artificial Sequence: Synthetic oligonucleotide
  Antisense strand to SEQ ID NO: 233254
agucugauuacucugggaa

SEQ ID NO: 233256 - RNA, 19 nt, Artificial Sequence
  Description of Artificial Sequence: Synthetic oligonucleotide
  Sense strand starting at position 1167 SEQ ID NO: 3002
ccaggcuuuccggaaauuc

SEQ ID NO: 233257 - RNA, 19 nt, Artificial Sequence
  Description of Artificial Sequence: Synthetic oligonucleotide
  Antisense strand to SEQ ID NO: 233256
gaauuuccggaaagccugg

SEQ ID NO: 233258 - RNA, 19 nt, Artificial Sequence
  Description of Artificial Sequence: Synthetic oligonucleotide
  Sense strand starting at position 1988 SEQ ID NO: 3002
gggaccucacuuugucaua

SEQ ID NO: 233259 - RNA, 19 nt, Artificial Sequence
  Description of Artificial Sequence: Synthetic oligonucleotide
  Antisense strand to SEQ ID NO: 233258
uaugacaaagugagguccc

SEQ ID NO: 233260 - RNA, 19 nt, Artificial Sequence
  Description of Artificial Sequence: Synthetic oligonucleotide
  Sense strand starting at position 2120 SEQ ID NO: 3002
accucugugagcugggaaa

SEQ ID NO: 233261 - RNA, 19 nt, Artificial Sequence
  Description of Artificial Sequence: Synthetic oligonucleotide
  Antisense strand to SEQ ID NO: 233260
uuucccagcucacagaggu

SEQ ID NO: 233262 - RNA, 19 nt, Artificial Sequence
  Description of Artificial Sequence: Synthetic oligonucleotide
  Sense strand starting at position 2184 SEQ ID NO: 3002
agggcauuugcuuggguga

SEQ ID NO: 233263 - RNA, 19 nt, Artificial Sequence
  Description of Artificial Sequence: Synthetic oligonucleotide
  Antisense strand to SEQ ID NO: 233262
ucacccaagcaaaugcccu

SEQ ID NO: 233264 - RNA, 19 nt, Artificial Sequence
  Description of Artificial Sequence: Synthetic oligonucleotide
  Sense strand starting at position 2265 SEQ ID NO: 3002
guggaauacauucgcagaa

SEQ ID NO: 233265 - RNA, 19 nt, Artificial Sequence
  Description of Artificial Sequence: Synthetic oligonucleotide
  Antisense strand to SEQ ID NO: 233264
uucugcgaauguauuccac

SEQ ID NO: 233266 - RNA, 19 nt, Artificial Sequence
  Description of Artificial Sequence: Synthetic oligonucleotide
  Sense strand starting at position 2269 SEQ ID NO: 3002
aauacauucgcagaaaguu

SEQ ID NO: 233267 - RNA, 19 nt, Artificial Sequence
  Description of Artificial Sequence: Synthetic oligonucleotide
  Antisense strand to SEQ ID NO: 233266
aacuuucugcgaauguauu

SEQ ID NO: 233268 - RNA, 19 nt, Artificial Sequence
  Description of Artificial Sequence: Synthetic oligonucleotide
  Sense strand starting at position 2307 SEQ ID NO: 3002
cugcucaugcaugauuaua

SEQ ID NO: 233269 - RNA, 19 nt, Artificial Sequence
  Description of Artificial Sequence: Synthetic oligonucleotide
  Antisense strand to SEQ ID NO: 233268
uauaaucaugcaugagcag

SEQ ID NO: 233270 - RNA, 19 nt, Artificial Sequence
  Description of Artificial Sequence: Synthetic oligonucleotide
  Sense strand starting at position 2309 SEQ ID NO: 3002
gcucaugcaugauuauaag

SEQ ID NO: 233271 - RNA, 19 nt, Artificial Sequence
  Description of Artificial Sequence: Synthetic oligonucleotide
  Antisense strand to SEQ ID NO: 233270
cuuauaaucaugcaugagc

SEQ ID NO: 233272 - RNA, 19 nt, Artificial Sequence
  Description of Artificial Sequence: Synthetic oligonucleotide
  Sense strand starting at position 2370 SEQ ID NO: 3002
agugaaaucuucccagagc

SEQ ID NO: 233273 - RNA, 19 nt, Artificial Sequence
  Description of Artificial Sequence: Synthetic oligonucleotide
  Antisense strand to SEQ ID NO: 233272
gcucugggaagauuucacu

SEQ ID NO: 233274 - RNA, 19 nt, Artificial Sequence
  Description of Artificial Sequence: Synthetic oligonucleotide
  Sense strand starting at position 2468 SEQ ID NO: 3002
acuuacgaguaugcugaaa

SEQ ID NO: 233275 - RNA, 19 nt, Artificial Sequence
  Description of Artificial Sequence: Synthetic oligonucleotide
  Antisense strand to SEQ ID NO: 233274
uuucagcauacucguaagu

SEQ ID NO: 233276 - RNA, 19 nt, Artificial Sequence
  Description of Artificial Sequence: Synthetic oligonucleotide
  Sense strand starting at position 2531 SEQ ID NO: 3002
uggcgacagcugucugcau

SEQ ID NO: 233277 - RNA, 19 nt, Artificial Sequence
  Description of Artificial Sequence: Synthetic oligonucleotide
  Antisense strand to SEQ ID NO: 233276
augcagacagcugucgcca

SEQ ID NO: 233278 - RNA, 19 nt, Artificial Sequence
  Description of Artificial Sequence: Synthetic oligonucleotide
  Sense strand starting at position 2699 SEQ ID NO: 3002
cugauuaaaugagaaauag

SEQ ID NO: 233279 - RNA, 19 nt, Artificial Sequence
  Description of Artificial Sequence: Synthetic oligonucleotide
  Antisense strand to SEQ ID NO: 233278
cuauuucucauuuaaucag

SEQ ID NO: 233280 - RNA, 19 nt, Artificial Sequence
  Description of Artificial Sequence: Synthetic oligonucleotide
  Sense strand starting at position 2737 SEQ ID NO: 3002
gaccaaucacaguggcuua

SEQ ID NO: 233281 - RNA, 19 nt, Artificial Sequence
  Description of Artificial Sequence: Synthetic oligonucleotide
  Antisense strand to SEQ ID NO: 233280
uaagccacugugauugguc

SEQ ID NO: 233282 - RNA, 19 nt, Artificial Sequence
  Description of Artificial Sequence: Synthetic oligonucleotide
  Sense strand starting at position 2919 SEQ ID NO: 3002
cgcugcaaccuuuagaaau

SEQ ID NO: 233283 - RNA, 19 nt, Artificial Sequence
  Description of Artificial Sequence: Synthetic oligonucleotide
  Antisense strand to SEQ ID NO: 233282
auuucuaaagguugcagcg

SEQ ID NO: 233284 - RNA, 19 nt, Artificial Sequence
  Description of Artificial Sequence: Synthetic oligonucleotide
  Sense strand starting at position 3278 SEQ ID NO: 3002
aguggucacccuugaggga

SEQ ID NO: 233285 - RNA, 19 nt, Artificial Sequence
  Description of Artificial Sequence: Synthetic oligonucleotide
  Antisense strand to SEQ ID NO: 233284
ucccucaagggugaccacu

SEQ ID NO: 233286 - RNA, 19 nt, Artificial Sequence
  Description of Artificial Sequence: Synthetic oligonucleotide
  Sense strand starting at position 3372 SEQ ID NO: 3002
aaggaugugccacaaaugu

SEQ ID NO: 233287 - RNA, 19 nt, Artificial Sequence
  Description of Artificial Sequence: Synthetic oligonucleotide
  Antisense strand to SEQ ID NO: 233286
acauuuguggcacauccuu

SEQ ID NO: 233288 - RNA, 19 nt, Artificial Sequence
  Description of Artificial Sequence: Synthetic oligonucleotide
  Sense strand starting at position 3395 SEQ ID NO: 3002
gguguugauggcuggagga

SEQ ID NO: 233289 - RNA, 19 nt, Artificial Sequence
  Description of Artificial Sequence: Synthetic oligonucleotide
  Antisense strand to SEQ ID NO: 233288
uccuccagccaucaacacc

SEQ ID NO: 233290 - RNA, 19 nt, Artificial Sequence
  Description of Artificial Sequence: Synthetic oligonucleotide
  Sense strand starting at position 3396 SEQ ID NO: 3002
guguugauggcuggaggaa

SEQ ID NO: 233291 - RNA, 19 nt, Artificial Sequence
  Description of Artificial Sequence: Synthetic oligonucleotide
  Antisense strand to SEQ ID NO: 233290
uuccuccagccaucaacac

SEQ ID NO: 233292 - RNA, 19 nt, Artificial Sequence
  Description of Artificial Sequence: Synthetic oligonucleotide
  Sense strand starting at position 3518 SEQ ID NO: 3002
cuuaguuuccgagacucag

SEQ ID NO: 233293 - RNA, 19 nt, Artificial Sequence
  Description of Artificial Sequence: Synthetic oligonucleotide
  Antisense strand to SEQ ID NO: 233292
cugagucucggaaacuaag

SEQ ID NO: 233294 - RNA, 19 nt, Artificial Sequence
  Description of Artificial Sequence: Synthetic oligonucleotide
  Sense strand starting at position 3550 SEQ ID NO: 3002
guguuucugcacuaaugaa

SEQ ID NO: 233295 - RNA, 19 nt, Artificial Sequence
  Description of Artificial Sequence: Synthetic oligonucleotide
  Antisense strand to SEQ ID NO: 233294
uucauuagugcagaaacac

SEQ ID NO: 233296 - RNA, 19 nt, Artificial Sequence
  Description of Artificial Sequence: Synthetic oligonucleotide
  Sense strand starting at position 3655 SEQ ID NO: 3002
ugccaauuccaaugaucug

SEQ ID NO: 233297 - RNA, 19 nt, Artificial Sequence
  Description of Artificial Sequence: Synthetic oligonucleotide
  Antisense strand to SEQ ID NO: 233296
cagaucauuggaauuggca

SEQ ID NO: 233298 - RNA, 19 nt, Artificial Sequence
  Description of Artificial Sequence: Synthetic oligonucleotide
  Sense strand starting at position 3687 SEQ ID NO: 3002
ugucaaauccucuaagugu

SEQ ID NO: 233299 - RNA, 19 nt, Artificial Sequence
  Description of Artificial Sequence: Synthetic oligonucleotide
  Antisense strand to SEQ ID NO: 233298
acacuuagaggauuugaca

SEQ ID NO: 233300 - RNA, 19 nt, Artificial Sequence
  Description of Artificial Sequence: Synthetic oligonucleotide
  Sense strand starting at position 3922 SEQ ID NO: 3002
gcauguucugaugauuauu

SEQ ID NO: 233301 - RNA, 19 nt, Artificial Sequence
  Description of Artificial Sequence: Synthetic oligonucleotide
  Antisense strand to SEQ ID NO: 233300
aauaaucaucagaacaugc

SEQ ID NO: 233302 - RNA, 19 nt, Artificial Sequence
  Description of Artificial Sequence: Synthetic oligonucleotide
  Sense strand starting at position 3981 SEQ ID NO: 3002
cugaucugacugugugaua

SEQ ID NO: 233303 - RNA, 19 nt, Artificial Sequence
  Description of Artificial Sequence: Synthetic oligonucleotide
  Antisense strand to SEQ ID NO: 233302
uaucacacagucagaucag

SEQ ID NO: 233304 - RNA, 19 nt, Artificial Sequence
  Description of Artificial Sequence: Synthetic oligonucleotide
  Sense strand starting at position 3982 SEQ ID NO: 3002
ugaucugacugugugauau

SEQ ID NO: 233305 - RNA, 19 nt, Artificial Sequence
  Description of Artificial Sequence: Synthetic oligonucleotide
  Antisense strand to SEQ ID NO: 233304
auaucacacagucagauca

SEQ ID NO: 233306 - RNA, 19 nt, Artificial Sequence
  Description of Artificial Sequence: Synthetic oligonucleotide
  Sense strand starting at position 10 SEQ ID NO: 3003
acaaccacucaguguauaa

SEQ ID NO: 233307 - RNA, 19 nt, Artificial Sequence
  Description of Artificial Sequence: Synthetic oligonucleotide
  Antisense strand to SEQ ID NO: 233306
uuauacacugagugguugu

SEQ ID NO: 233308 - RNA, 19 nt, Artificial Sequence
  Description of Artificial Sequence: Synthetic oligonucleotide
  Sense strand starting at position 198 SEQ ID NO: 3003
gaaagcaauuggguaacuu

SEQ ID NO: 233309 - RNA, 19 nt, Artificial Sequence
  Description of Artificial Sequence: Synthetic oligonucleotide
  Antisense strand to SEQ ID NO: 233308
aaguuacccaauugcuuuc

SEQ ID NO: 233310 - RNA, 19 nt, Artificial Sequence
  Description of Artificial Sequence: Synthetic oligonucleotide
  Sense strand starting at position 202 SEQ ID NO: 3003
gcaauuggguaacuuguau

SEQ ID NO: 233311 - RNA, 19 nt, Artificial Sequence
  Description of Artificial Sequence: Synthetic oligonucleotide
  Antisense strand to SEQ ID NO: 233310
auacaaguuacccaauugc

SEQ ID NO: 233312 - RNA, 19 nt, Artificial Sequence
  Description of Artificial Sequence: Synthetic oligonucleotide
  Sense strand starting at position 306 SEQ ID NO: 3003
uagaguuacaccgauaggu

SEQ ID NO: 233313 - RNA, 19 nt, Artificial Sequence
  Description of Artificial Sequence: Synthetic oligonucleotide
  Antisense strand to SEQ ID NO: 233312
accuaucgguguaacucua

SEQ ID NO: 233314 - RNA, 19 nt, Artificial Sequence
  Description of Artificial Sequence: Synthetic oligonucleotide
  Sense strand starting at position 308 SEQ ID NO: 3003
gaguuacaccgauagguac

SEQ ID NO: 233315 - RNA, 19 nt, Artificial Sequence
  Description of Artificial Sequence: Synthetic oligonucleotide
  Antisense strand to SEQ ID NO: 233314
guaccuaucgguguaacuc

SEQ ID NO: 233316 - RNA, 19 nt, Artificial Sequence
  Description of Artificial Sequence: Synthetic oligonucleotide
  Sense strand starting at position 458 SEQ ID NO: 3003
ugauaauguuaaguggaaa

SEQ ID NO: 233317 - RNA, 19 nt, Artificial Sequence
  Description of Artificial Sequence: Synthetic oligonucleotide
  Antisense strand to SEQ ID NO: 233316
uuuccacuuaacauuauca

SEQ ID NO: 233318 - RNA, 19 nt, Artificial Sequence
  Description of Artificial Sequence: Synthetic oligonucleotide
  Sense strand starting at position 586 SEQ ID NO: 3003
guuauaucuguguuguguc

SEQ ID NO: 233319 - RNA, 19 nt, Artificial Sequence
  Description of Artificial Sequence: Synthetic oligonucleotide
  Antisense strand to SEQ ID NO: 233318
gacacaacacagauauaac

SEQ ID NO: 233320 - RNA, 19 nt, Artificial Sequence
  Description of Artificial Sequence: Synthetic oligonucleotide
  Sense strand starting at position 639 SEQ ID NO: 3003
guguguuaaccuuaucauu

SEQ ID NO: 233321 - RNA, 19 nt, Artificial Sequence
  Description of Artificial Sequence: Synthetic oligonucleotide
  Antisense strand to SEQ ID NO: 233320
aaugauaagguuaacacac

SEQ ID NO: 233322 - RNA, 19 nt, Artificial Sequence
  Description of Artificial Sequence: Synthetic oligonucleotide
  Sense strand starting at position 641 SEQ ID NO: 3003
guguuaaccuuaucauuau

SEQ ID NO: 233323 - RNA, 19 nt, Artificial Sequence
  Description of Artificial Sequence: Synthetic oligonucleotide
  Antisense strand to SEQ ID NO: 233322
auaaugauaagguuaacac

SEQ ID NO: 233324 - RNA, 19 nt, Artificial Sequence
  Description of Artificial Sequence: Synthetic oligonucleotide
  Sense strand starting at position 666 SEQ ID NO: 3003
uaauaaagcuuauucgugu

SEQ ID NO: 233325 - RNA, 19 nt, Artificial Sequence
  Description of Artificial Sequence: Synthetic oligonucleotide
  Antisense strand to SEQ ID NO: 233324
acacgaauaagcuuuauua

SEQ ID NO: 233326 - RNA, 19 nt, Artificial Sequence
  Description of Artificial Sequence: Synthetic oligonucleotide
  Sense strand starting at position 667 SEQ ID NO: 3003
aauaaagcuuauucguguu

SEQ ID NO: 233327 - RNA, 19 nt, Artificial Sequence
  Description of Artificial Sequence: Synthetic oligonucleotide
  Antisense strand to SEQ ID NO: 233326
aacacgaauaagcuuuauu

SEQ ID NO: 233328 - RNA, 19 nt, Artificial Sequence
  Description of Artificial Sequence: Synthetic oligonucleotide
  Sense strand starting at position 798 SEQ ID NO: 3003
caggguucuguccaucaag

SEQ ID NO: 233329 - RNA, 19 nt, Artificial Sequence
  Description of Artificial Sequence: Synthetic oligonucleotide
  Antisense strand to SEQ ID NO: 233328
cuugauggacagaacccug

SEQ ID NO: 233330 - RNA, 19 nt, Artificial Sequence
  Description of Artificial Sequence: Synthetic oligonucleotide
  Sense strand starting at position 801 SEQ ID NO: 3003
gguucuguccaucaagagu

SEQ ID NO: 233331 - RNA, 19 nt, Artificial Sequence
  Description of Artificial Sequence: Synthetic oligonucleotide
  Antisense strand to SEQ ID NO: 233330
acucuugauggacagaacc

SEQ ID NO: 233332 - RNA, 19 nt, Artificial Sequence
  Description of Artificial Sequence: Synthetic oligonucleotide
  Sense strand starting at position 809 SEQ ID NO: 3003
ccaucaagagucuaguacu

SEQ ID NO: 233333 - RNA, 19 nt, Artificial Sequence
  Description of Artificial Sequence: Synthetic oligonucleotide
  Antisense strand to SEQ ID NO: 233332
aguacuagacucuugaugg

SEQ ID NO: 233334 - RNA, 19 nt, Artificial Sequence
  Description of Artificial Sequence: Synthetic oligonucleotide
  Sense strand starting at position 1100 SEQ ID NO: 3003
ggcugaguuucguuagaua

SEQ ID NO: 233335 - RNA, 19 nt, Artificial Sequence
  Description of Artificial Sequence: Synthetic oligonucleotide
  Antisense strand to SEQ ID NO: 233334
uaucuaacgaaacucagcc

SEQ ID NO: 233336 - RNA, 19 nt, Artificial Sequence
  Description of Artificial Sequence: Synthetic oligonucleotide
  Sense strand starting at position 1105 SEQ ID NO: 3003
aguuucguuagauaguaaa

SEQ ID NO: 233337 - RNA, 19 nt, Artificial Sequence
  Description of Artificial Sequence: Synthetic oligonucleotide
  Antisense strand to SEQ ID NO: 233336
uuuacuaucuaacgaaacu

SEQ ID NO: 233338 - RNA, 19 nt, Artificial Sequence
  Description of Artificial Sequence: Synthetic oligonucleotide
  Sense strand starting at position 1217 SEQ ID NO: 3003
gacagaguugagugggagu

SEQ ID NO: 233339 - RNA, 19 nt, Artificial Sequence
  Description of Artificial Sequence: Synthetic oligonucleotide
  Antisense strand to SEQ ID NO: 233338
acucccacucaacucuguc

SEQ ID NO: 233340 - RNA, 19 nt, Artificial Sequence
  Description of Artificial Sequence: Synthetic oligonucleotide
  Sense strand starting at position 1519 SEQ ID NO: 3003
gcacaaauccuggaggguu

SEQ ID NO: 233341 - RNA, 19 nt, Artificial Sequence
  Description of Artificial Sequence: Synthetic oligonucleotide
  Antisense strand to SEQ ID NO: 233340
aacccuccaggauuugugc

SEQ ID NO: 233342 - RNA, 19 nt, Artificial Sequence
  Description of Artificial Sequence: Synthetic oligonucleotide
  Sense strand starting at position 2324 SEQ ID NO: 3003
uggcuauguguauacagaa

SEQ ID NO: 233343 - RNA, 19 nt, Artificial Sequence
  Description of Artificial Sequence: Synthetic oligonucleotide
  Antisense strand to SEQ ID NO: 233342
uucuguauacacauagcca

SEQ ID NO: 233344 - RNA, 19 nt, Artificial Sequence
  Description of Artificial Sequence: Synthetic oligonucleotide
  Sense strand starting at position 2346 SEQ ID NO: 3003
ugugauggauauccacaaa

SEQ ID NO: 233345 - RNA, 19 nt, Artificial Sequence
  Description of Artificial Sequence: Synthetic oligonucleotide
  Antisense strand to SEQ ID NO: 233344
uuuguggauauccaucaca

SEQ ID NO: 233346 - RNA, 19 nt, Artificial Sequence
  Description of Artificial Sequence: Synthetic oligonucleotide
  Sense strand starting at position 2675 SEQ ID NO: 3003
cccaaacuuguuuaauagu

SEQ ID NO: 233347 - RNA, 19 nt, Artificial Sequence
  Description of Artificial Sequence: Synthetic oligonucleotide
  Antisense strand to SEQ ID NO: 233346
acuauuaaacaaguuuggg

SEQ ID NO: 233348 - RNA, 19 nt, Artificial Sequence
  Description of Artificial Sequence: Synthetic oligonucleotide
  Sense strand starting at position 2683 SEQ ID NO: 3003
uguuuaauaguagaguaca

SEQ ID NO: 233349 - RNA, 19 nt, Artificial Sequence
  Description of Artificial Sequence: Synthetic oligonucleotide
  Antisense strand to SEQ ID NO: 233348
uguacucuacuauuaaaca

SEQ ID NO: 233350 - RNA, 19 nt, Artificial Sequence
  Description of Artificial Sequence: Synthetic oligonucleotide
  Sense strand starting at position 2696 SEQ ID NO: 3003
aguacaauuuaguacucua

SEQ ID NO: 233351 - RNA, 19 nt, Artificial Sequence
  Description of Artificial Sequence: Synthetic oligonucleotide
  Antisense strand to SEQ ID NO: 233350
uagaguacuaaauuguacu

SEQ ID NO: 233352 - RNA, 19 nt, Artificial Sequence
  Description of Artificial Sequence: Synthetic oligonucleotide
  Sense strand starting at position 2740 SEQ ID NO: 3003
uugaguagauuacucauga

SEQ ID NO: 233353 - RNA, 19 nt, Artificial Sequence
  Description of Artificial Sequence: Synthetic oligonucleotide
  Antisense strand to SEQ ID NO: 233352
ucaugaguaaucuacucaa

SEQ ID NO: 233354 - RNA, 19 nt, Artificial Sequence
  Description of Artificial Sequence: Synthetic oligonucleotide
  Sense strand starting at position 2741 SEQ ID NO: 3003
ugaguagauuacucaugag

SEQ ID NO: 233355 - RNA, 19 nt, Artificial Sequence
  Description of Artificial Sequence: Synthetic oligonucleotide
  Antisense strand to SEQ ID NO: 233354
cucaugaguaaucuacuca

SEQ ID NO: 233356 - RNA, 19 nt, Artificial Sequence
  Description of Artificial Sequence: Synthetic oligonucleotide
  Sense strand starting at position 2757 SEQ ID NO: 3003
gagaguuuguuucucugga

SEQ ID NO: 233357 - RNA, 19 nt, Artificial Sequence
  Description of Artificial Sequence: Synthetic oligonucleotide
  Antisense strand to SEQ ID NO: 233356
uccagagaaacaaacucuc

SEQ ID NO: 233358 - RNA, 19 nt, Artificial Sequence
  Description of Artificial Sequence: Synthetic oligonucleotide
  Sense strand starting at position 2762 SEQ ID NO: 3003
uuuguuucucuggagguua

SEQ ID NO: 233359 - RNA, 19 nt, Artificial Sequence
  Description of Artificial Sequence: Synthetic oligonucleotide
  Antisense strand to SEQ ID NO: 233358
uaaccuccagagaaacaaa

SEQ ID NO: 233360 - RNA, 19 nt, Artificial Sequence
  Description of Artificial Sequence: Synthetic oligonucleotide
  Sense strand starting at position 2767 SEQ ID NO: 3003
uucucuggagguuaucaau

SEQ ID NO: 233361 - RNA, 19 nt, Artificial Sequence
  Description of Artificial Sequence: Synthetic oligonucleotide
  Antisense strand to SEQ ID NO: 233360
auugauaaccuccagagaa

SEQ ID NO: 233362 - RNA, 19 nt, Artificial Sequence
  Description of Artificial Sequence: Synthetic oligonucleotide
  Sense strand starting at position 2792 SEQ ID NO: 3003
ggaacauucugaucuugca

SEQ ID NO: 233363 - RNA, 19 nt, Artificial Sequence
  Description of Artificial Sequence: Synthetic oligonucleotide
  Antisense strand to SEQ ID NO: 233362
ugcaagaucagaauguucc

SEQ ID NO: 233364 - RNA, 19 nt, Artificial Sequence
  Description of Artificial Sequence: Synthetic oligonucleotide
  Sense strand starting at position 2946 SEQ ID NO: 3003
guuuguuaaguggguaaau

SEQ ID NO: 233365 - RNA, 19 nt, Artificial Sequence
  Description of Artificial Sequence: Synthetic oligonucleotide
  Antisense strand to SEQ ID NO: 233364
auuuacccacuuaacaaac

SEQ ID NO: 233366 - RNA, 19 nt, Artificial Sequence
  Description of Artificial Sequence: Synthetic oligonucleotide
  Sense strand starting at position 2947 SEQ ID NO: 3003
uuuguuaaguggguaaauu

SEQ ID NO: 233367 - RNA, 19 nt, Artificial Sequence
  Description of Artificial Sequence: Synthetic oligonucleotide
  Antisense strand to SEQ ID NO: 233366
aauuuacccacuuaacaaa

SEQ ID NO: 233368 - RNA, 19 nt, Artificial Sequence
  Description of Artificial Sequence: Synthetic oligonucleotide
  Sense strand starting at position 2948 SEQ ID NO: 3003
uuguuaaguggguaaauug

SEQ ID NO: 233369 - RNA, 19 nt, Artificial Sequence
  Description of Artificial Sequence: Synthetic oligonucleotide
  Antisense strand to SEQ ID NO: 233368
caauuuacccacuuaacaa

SEQ ID NO: 233370 - RNA, 19 nt, Artificial Sequence
  Description of Artificial Sequence: Synthetic oligonucleotide
  Sense strand starting at position 3100 SEQ ID NO: 3003
cuuugugucccuguguauu

SEQ ID NO: 233371 - RNA, 19 nt, Artificial Sequence
  Description of Artificial Sequence: Synthetic oligonucleotide
  Antisense strand to SEQ ID NO: 233370
aauacacagggacacaaag

SEQ ID NO: 233372 - RNA, 19 nt, Artificial Sequence
  Description of Artificial Sequence: Synthetic oligonucleotide
  Sense strand starting at position 3175 SEQ ID NO: 3003
uguguuaguucccuuacaa

SEQ ID NO: 233373 - RNA, 19 nt, Artificial Sequence
  Description of Artificial Sequence: Synthetic oligonucleotide
  Antisense strand to SEQ ID NO: 233372
uuguaagggaacuaacaca

SEQ ID NO: 233374 - RNA, 19 nt, Artificial Sequence
  Description of Artificial Sequence: Synthetic oligonucleotide
  Sense strand starting at position 3205 SEQ ID NO: 3003
agcugcauccauugaucua

SEQ ID NO: 233375 - RNA, 19 nt, Artificial Sequence
  Description of Artificial Sequence: Synthetic oligonucleotide
  Antisense strand to SEQ ID NO: 233374
uagaucaauggaugcagcu

SEQ ID NO: 233376 - RNA, 19 nt, Artificial Sequence
  Description of Artificial Sequence: Synthetic oligonucleotide
  Sense strand starting at position 3272 SEQ ID NO: 3003
uaaauacuccaguggguau

SEQ ID NO: 233377 - RNA, 19 nt, Artificial Sequence
  Description of Artificial Sequence: Synthetic oligonucleotide
  Antisense strand to SEQ ID NO: 233376
auacccacuggaguauuua

SEQ ID NO: 233378 - RNA, 19 nt, Artificial Sequence
  Description of Artificial Sequence: Synthetic oligonucleotide
  Sense strand starting at position 3345 SEQ ID NO: 3003
ggaaguaagcauugguacu

SEQ ID NO: 233379 - RNA, 19 nt, Artificial Sequence
  Description of Artificial Sequence: Synthetic oligonucleotide
  Antisense strand to SEQ ID NO: 233378
aguaccaaugcuuacuucc

SEQ ID NO: 233380 - RNA, 19 nt, Artificial Sequence
  Description of Artificial Sequence: Synthetic oligonucleotide
  Sense strand starting at position 3424 SEQ ID NO: 3003
uuucucuucugguuggaau

SEQ ID NO: 233381 - RNA, 19 nt, Artificial Sequence
  Description of Artificial Sequence: Synthetic oligonucleotide
  Antisense strand to SEQ ID NO: 233380
auuccaaccagaagagaaa

SEQ ID NO: 233382 - RNA, 19 nt, Artificial Sequence
  Description of Artificial Sequence: Synthetic oligonucleotide
  Sense strand starting at position 3728 SEQ ID NO: 3003
accuuaaucgccuggucaa

SEQ ID NO: 233383 - RNA, 19 nt, Artificial Sequence
  Description of Artificial Sequence: Synthetic oligonucleotide
  Antisense strand to SEQ ID NO: 233382
uugaccaggcgauuaaggu

SEQ ID NO: 233384 - RNA, 19 nt, Artificial Sequence
  Description of Artificial Sequence: Synthetic oligonucleotide
  Sense strand starting at position 3729 SEQ ID NO: 3003
ccuuaaucgccuggucaag

SEQ ID NO: 233385 - RNA, 19 nt, Artificial Sequence
  Description of Artificial Sequence: Synthetic oligonucleotide
  Antisense strand to SEQ ID NO: 233384
cuugaccaggcgauuaagg

SEQ ID NO: 233386 - RNA, 19 nt, Artificial Sequence
  Description of Artificial Sequence: Synthetic oligonucleotide
  Sense strand starting at position 165 SEQ ID NO: 3004
gugccugauuauuuaauuc

SEQ ID NO: 233387 - RNA, 19 nt, Artificial Sequence
  Description of Artificial Sequence: Synthetic oligonucleotide
  Antisense strand to SEQ ID NO: 233386
gaauuaaauaaucaggcac

SEQ ID NO: 233388 - RNA, 19 nt, Artificial Sequence
  Description of Artificial Sequence: Synthetic oligonucleotide
  Sense strand starting at position 409 SEQ ID NO: 3004
gucaaacugcauuaauaga

SEQ ID NO: 233389 - RNA, 19 nt, Artificial Sequence
  Description of Artificial Sequence: Synthetic oligonucleotide
  Antisense strand to SEQ ID NO: 233388
ucuauuaaugcaguuugac

SEQ ID NO: 233390 - RNA, 19 nt, Artificial Sequence
  Description of Artificial Sequence: Synthetic oligonucleotide
  Sense strand starting at position 649 SEQ ID NO: 3004
gugcaacuucuggaugaca

SEQ ID NO: 233391 - RNA, 19 nt, Artificial Sequence
  Description of Artificial Sequence: Synthetic oligonucleotide
  Antisense strand to SEQ ID NO: 233390
ugucauccagaaguugcac

SEQ ID NO: 233392 - RNA, 19 nt, Artificial Sequence
  Description of Artificial Sequence: Synthetic oligonucleotide
  Sense strand starting at position 848 SEQ ID NO: 3004
auuugucuuuccuauuuag

SEQ ID NO: 233393 - RNA, 19 nt, Artificial Sequence
  Description of Artificial Sequence: Synthetic oligonucleotide
  Antisense strand to SEQ ID NO: 233392
cuaaauaggaaagacaaau

SEQ ID NO: 233394 - RNA, 19 nt, Artificial Sequence
  Description of Artificial Sequence: Synthetic oligonucleotide
  Sense strand starting at position 952 SEQ ID NO: 3004
uuggauuucucacaagcag

SEQ ID NO: 233395 - RNA, 19 nt, Artificial Sequence
  Description of Artificial Sequence: Synthetic oligonucleotide
  Antisense strand to SEQ ID NO: 233394
cugcuugugagaaauccaa

SEQ ID NO: 233396 - RNA, 19 nt, Artificial Sequence
  Description of Artificial Sequence: Synthetic oligonucleotide
  Sense strand starting at position 1228 SEQ ID NO: 3004
guaauaggaucaguggauu

SEQ ID NO: 233397 - RNA, 19 nt, Artificial Sequence
  Description of Artificial Sequence: Synthetic oligonucleotide
  Antisense strand to SEQ ID NO: 233396
aauccacugauccuauuac

SEQ ID NO: 233398 - RNA, 19 nt, Artificial Sequence
  Description of Artificial Sequence: Synthetic oligonucleotide
  Sense strand starting at position 1234 SEQ ID NO: 3004
ggaucaguggauuguauau

SEQ ID NO: 233399 - RNA, 19 nt, Artificial Sequence
  Description of Artificial Sequence: Synthetic oligonucleotide
  Antisense strand to SEQ ID NO: 233398
auauacaauccacugaucc

SEQ ID NO: 233400 - RNA, 19 nt, Artificial Sequence
  Description of Artificial Sequence: Synthetic oligonucleotide
  Sense strand starting at position 1320 SEQ ID NO: 3004
ccuagaugaugugcuuaca

SEQ ID NO: 233401 - RNA, 19 nt, Artificial Sequence
  Description of Artificial Sequence: Synthetic oligonucleotide
  Antisense strand to SEQ ID NO: 233400
uguaagcacaucaucuagg

SEQ ID NO: 233402 - RNA, 19 nt, Artificial Sequence
  Description of Artificial Sequence: Synthetic oligonucleotide
  Sense strand starting at position 1452 SEQ ID NO: 3004
agaaguuaguucccgaaga

SEQ ID NO: 233403 - RNA, 19 nt, Artificial Sequence
  Description of Artificial Sequence: Synthetic oligonucleotide
  Antisense strand to SEQ ID NO: 233402
ucuucgggaacuaacuucu

SEQ ID NO: 233404 - RNA, 19 nt, Artificial Sequence
  Description of Artificial Sequence: Synthetic oligonucleotide
  Sense strand starting at position 1454 SEQ ID NO: 3004
aaguuaguucccgaagaaa

SEQ ID NO: 233405 - RNA, 19 nt, Artificial Sequence
  Description of Artificial Sequence: Synthetic oligonucleotide
  Antisense strand to SEQ ID NO: 233404
uuucuucgggaacuaacuu

SEQ ID NO: 233406 - RNA, 19 nt, Artificial Sequence
  Description of Artificial Sequence: Synthetic oligonucleotide
  Sense strand starting at position 1577 SEQ ID NO: 3004
gcgaacucuuaaucccaua

SEQ ID NO: 233407 - RNA, 19 nt, Artificial Sequence
  Description of Artificial Sequence: Synthetic oligonucleotide
  Antisense strand to SEQ ID NO: 233406
uaugggauuaagaguucgc

SEQ ID NO: 233408 - RNA, 19 nt, Artificial Sequence
  Description of Artificial Sequence: Synthetic oligonucleotide
  Sense strand starting at position 1599 SEQ ID NO: 3004
uuguuacaaugauuaagca

SEQ ID NO: 233409 - RNA, 19 nt, Artificial Sequence
  Description of Artificial Sequence: Synthetic oligonucleotide
  Antisense strand to SEQ ID NO: 233408
ugcuuaaucauuguaacaa

SEQ ID NO: 233410 - RNA, 19 nt, Artificial Sequence
  Description of Artificial Sequence: Synthetic oligonucleotide
  Sense strand starting at position 1673 SEQ ID NO: 3004
cagguuggcguacagaaua

SEQ ID NO: 233411 - RNA, 19 nt, Artificial Sequence
  Description of Artificial Sequence: Synthetic oligonucleotide
  Antisense strand to SEQ ID NO: 233410
uauucuguacgccaaccug

SEQ ID NO: 233412 - RNA, 19 nt, Artificial Sequence
  Description of Artificial Sequence: Synthetic oligonucleotide
  Sense strand starting at position 1713 SEQ ID NO: 3004
uaauguuuacggcacaacu

SEQ ID NO: 233413 - RNA, 19 nt, Artificial Sequence
  Description of Artificial Sequence: Synthetic oligonucleotide
  Antisense strand to SEQ ID NO: 233412
aguugugccguaaacauua

SEQ ID NO: 233414 - RNA, 19 nt, Artificial Sequence
  Description of Artificial Sequence: Synthetic oligonucleotide
  Sense strand starting at position 1746 SEQ ID NO: 3004
auuacaggucuuggaugua

SEQ ID NO: 233415 - RNA, 19 nt, Artificial Sequence
  Description of Artificial Sequence: Synthetic oligonucleotide
  Antisense strand to SEQ ID NO: 233414
uacauccaagaccuguaau

SEQ ID NO: 233416 - RNA, 19 nt, Artificial Sequence
  Description of Artificial Sequence: Synthetic oligonucleotide
  Sense strand starting at position 1866 SEQ ID NO: 3004
agcguagcaucgauccgau

SEQ ID NO: 233417 - RNA, 19 nt, Artificial Sequence
  Description of Artificial Sequence: Synthetic oligonucleotide
  Antisense strand to SEQ ID NO: 233416
aucggaucgaugcuacgcu

SEQ ID NO: 233418 - RNA, 19 nt, Artificial Sequence
  Description of Artificial Sequence: Synthetic oligonucleotide
  Sense strand starting at position 1885 SEQ ID NO: 3004
guguuugcugaugaaugga

SEQ ID NO: 233419 - RNA, 19 nt, Artificial Sequence
  Description of Artificial Sequence: Synthetic oligonucleotide
  Antisense strand to SEQ ID NO: 233418
uccauucaucagcaaacac

SEQ ID NO: 233420 - RNA, 19 nt, Artificial Sequence
  Description of Artificial Sequence: Synthetic oligonucleotide
  Sense strand starting at position 1901 SEQ ID NO: 3004
ggaagcuaggguuaaguga

SEQ ID NO: 233421 - RNA, 19 nt, Artificial Sequence
  Description of Artificial Sequence: Synthetic oligonucleotide
  Antisense strand to SEQ ID NO: 233420
ucacuuaacccuagcuucc

SEQ ID NO: 233422 - RNA, 19 nt, Artificial Sequence
  Description of Artificial Sequence: Synthetic oligonucleotide
  Sense strand starting at position 1914 SEQ ID NO: 3004
aagugaaggugccuaugau

SEQ ID NO: 233423 - RNA, 19 nt, Artificial Sequence
  Description of Artificial Sequence: Synthetic oligonucleotide
  Antisense strand to SEQ ID NO: 233422
aucauaggcaccuucacuu

SEQ ID NO: 233424 - RNA, 19 nt, Artificial Sequence
  Description of Artificial Sequence: Synthetic oligonucleotide
  Sense strand starting at position 1915 SEQ ID NO: 3004
agugaaggugccuaugauu

SEQ ID NO: 233425 - RNA, 19 nt, Artificial Sequence
  Description of Artificial Sequence: Synthetic oligonucleotide
  Antisense strand to SEQ ID NO: 233424
aaucauaggcaccuucacu

SEQ ID NO: 233426 - RNA, 19 nt, Artificial Sequence
  Description of Artificial Sequence: Synthetic oligonucleotide
  Sense strand starting at position 1923 SEQ ID NO: 3004
ugccuaugauuugaaauca

SEQ ID NO: 233427 - RNA, 19 nt, Artificial Sequence
  Description of Artificial Sequence: Synthetic oligonucleotide
  Antisense strand to SEQ ID NO: 233426
ugauuucaaaucauaggca

SEQ ID NO: 233428 - RNA, 19 nt, Artificial Sequence
  Description of Artificial Sequence: Synthetic oligonucleotide
  Sense strand starting at position 2776 SEQ ID NO: 3004
acgacuugaucugcuuaga

SEQ ID NO: 233429 - RNA, 19 nt, Artificial Sequence
  Description of Artificial Sequence: Synthetic oligonucleotide
  Antisense strand to SEQ ID NO: 233428
ucuaagcagaucaagucgu

SEQ ID NO: 233430 - RNA, 19 nt, Artificial Sequence
  Description of Artificial Sequence: Synthetic oligonucleotide
  Sense strand starting at position 3095 SEQ ID NO: 3004
gaaugaaaugugcaguuga

SEQ ID NO: 233431 - RNA, 19 nt, Artificial Sequence
  Description of Artificial Sequence: Synthetic oligonucleotide
  Antisense strand to SEQ ID NO: 233430
ucaacugcacauuucauuc

SEQ ID NO: 233432 - RNA, 19 nt, Artificial Sequence
  Description of Artificial Sequence: Synthetic oligonucleotide
  Sense strand starting at position 3152 SEQ ID NO: 3004
uugucuguugcugagauag

SEQ ID NO: 233433 - RNA, 19 nt, Artificial Sequence
  Description of Artificial Sequence: Synthetic oligonucleotide
  Antisense strand to SEQ ID NO: 233432
cuaucucagcaacagacaa

SEQ ID NO: 233434 - RNA, 19 nt, Artificial Sequence
  Description of Artificial Sequence: Synthetic oligonucleotide
  Sense strand starting at position 3223 SEQ ID NO: 3004
ucuuguuagauguaaaugu

SEQ ID NO: 233435 - RNA, 19 nt, Artificial Sequence
  Description of Artificial Sequence: Synthetic oligonucleotide
  Antisense strand to SEQ ID NO: 233434
acauuuacaucuaacaaga

SEQ ID NO: 233436 - RNA, 19 nt, Artificial Sequence
  Description of Artificial Sequence: Synthetic oligonucleotide
  Sense strand starting at position 3275 SEQ ID NO: 3004
ucaguugguuuacuaauca

SEQ ID NO: 233437 - RNA, 19 nt, Artificial Sequence
  Description of Artificial Sequence: Synthetic oligonucleotide
  Antisense strand to SEQ ID NO: 233436
ugauuaguaaaccaacuga

SEQ ID NO: 233438 - RNA, 19 nt, Artificial Sequence
  Description of Artificial Sequence: Synthetic oligonucleotide
  Sense strand starting at position 3342 SEQ ID NO: 3004
ucagacuucuaggcugaga

SEQ ID NO: 233439 - RNA, 19 nt, Artificial Sequence
  Description of Artificial Sequence: Synthetic oligonucleotide
  Antisense strand to SEQ ID NO: 233438
ucucagccuagaagucuga

SEQ ID NO: 233440 - RNA, 19 nt, Artificial Sequence
  Description of Artificial Sequence: Synthetic oligonucleotide
  Sense strand starting at position 3344 SEQ ID NO: 3004
agacuucuaggcugagagu

SEQ ID NO: 233441 - RNA, 19 nt, Artificial Sequence
  Description of Artificial Sequence: Synthetic oligonucleotide
  Antisense strand to SEQ ID NO: 233440
acucucagccuagaagucu

SEQ ID NO: 233442 - RNA, 19 nt, Artificial Sequence
  Description of Artificial Sequence: Synthetic oligonucleotide
  Sense strand starting at position 3345 SEQ ID NO: 3004
gacuucuaggcugagagua

SEQ ID NO: 233443 - RNA, 19 nt, Artificial Sequence
  Description of Artificial Sequence: Synthetic oligonucleotide
  Antisense strand to SEQ ID NO: 233442
uacucucagccuagaaguc

SEQ ID NO: 233444 - RNA, 19 nt, Artificial Sequence
  Description of Artificial Sequence: Synthetic oligonucleotide
  Sense strand starting at position 3437 SEQ ID NO: 3004
ucaugaugucuacgagaua

SEQ ID NO: 233445 - RNA, 19 nt, Artificial Sequence
  Description of Artificial Sequence: Synthetic oligonucleotide
  Antisense strand to SEQ ID NO: 233444
uaucucguagacaucauga

SEQ ID NO: 233446 - RNA, 19 nt, Artificial Sequence
  Description of Artificial Sequence: Synthetic oligonucleotide
  Sense strand starting at position 3463 SEQ ID NO: 3004
cggcaaaguucuuuaggaa

SEQ ID NO: 233447 - RNA, 19 nt, Artificial Sequence
  Description of Artificial Sequence: Synthetic oligonucleotide
  Antisense strand to SEQ ID NO: 233446
uuccuaaagaacuuugccg

SEQ ID NO: 233448 - RNA, 19 nt, Artificial Sequence
  Description of Artificial Sequence: Synthetic oligonucleotide
  Sense strand starting at position 3464 SEQ ID NO: 3004
ggcaaaguucuuuaggaau

SEQ ID NO: 233449 - RNA, 19 nt, Artificial Sequence
  Description of Artificial Sequence: Synthetic oligonucleotide
  Antisense strand to SEQ ID NO: 233448
auuccuaaagaacuuugcc

SEQ ID NO: 233450 - RNA, 19 nt, Artificial Sequence
  Description of Artificial Sequence: Synthetic oligonucleotide
  Sense strand starting at position 3500 SEQ ID NO: 3004
ugaauugggucauaauuuc

SEQ ID NO: 233451 - RNA, 19 nt, Artificial Sequence
  Description of Artificial Sequence: Synthetic oligonucleotide
  Antisense strand to SEQ ID NO: 233450
gaaauuaugacccaauuca

SEQ ID NO: 233452 - RNA, 19 nt, Artificial Sequence
  Description of Artificial Sequence: Synthetic oligonucleotide
  Sense strand starting at position 3507 SEQ ID NO: 3004
ggucauaauuucucuucgu

SEQ ID NO: 233453 - RNA, 19 nt, Artificial Sequence
  Description of Artificial Sequence: Synthetic oligonucleotide
  Antisense strand to SEQ ID NO: 233452
acgaagagaaauuaugacc

SEQ ID NO: 233454 - RNA, 19 nt, Artificial Sequence
  Description of Artificial Sequence: Synthetic oligonucleotide
  Sense strand starting at position 3508 SEQ ID NO: 3004
gucauaauuucucuucguu

SEQ ID NO: 233455 - RNA, 19 nt, Artificial Sequence
  Description of Artificial Sequence: Synthetic oligonucleotide
  Antisense strand to SEQ ID NO: 233454
aacgaagagaaauuaugac

SEQ ID NO: 233456 - RNA, 19 nt, Artificial Sequence
  Description of Artificial Sequence: Synthetic oligonucleotide
  Sense strand starting at position 3549 SEQ ID NO: 3004
gauaaauggugaguuuaua

SEQ ID NO: 233457 - RNA, 19 nt, Artificial Sequence
  Description of Artificial Sequence: Synthetic oligonucleotide
  Antisense strand to SEQ ID NO: 233456
uauaaacucaccauuuauc

SEQ ID NO: 233458 - RNA, 19 nt, Artificial Sequence
  Description of Artificial Sequence: Synthetic oligonucleotide
  Sense strand starting at position 3662 SEQ ID NO: 3004
aaauguuaccuuugaaggu

SEQ ID NO: 233459 - RNA, 19 nt, Artificial Sequence
  Description of Artificial Sequence: Synthetic oligonucleotide
  Antisense strand to SEQ ID NO: 233458
accuucaaagguaacauuu

SEQ ID NO: 233460 - RNA, 19 nt, Artificial Sequence
  Description of Artificial Sequence: Synthetic oligonucleotide
  Sense strand starting at position 3854 SEQ ID NO: 3004
ugauguucuuaccuuugaa

SEQ ID NO: 233461 - RNA, 19 nt, Artificial Sequence
  Description of Artificial Sequence: Synthetic oligonucleotide
  Antisense strand to SEQ ID NO: 233460
uucaaagguaagaacauca

SEQ ID NO: 233462 - RNA, 19 nt, Artificial Sequence
  Description of Artificial Sequence: Synthetic oligonucleotide
  Sense strand starting at position 3914 SEQ ID NO: 3004
caguuaaaucuaggcagau

SEQ ID NO: 233463 - RNA, 19 nt, Artificial Sequence
  Description of Artificial Sequence: Synthetic oligonucleotide
  Antisense strand to SEQ ID NO: 233462
aucugccuagauuuaacug

SEQ ID NO: 233464 - RNA, 19 nt, Artificial Sequence
  Description of Artificial Sequence: Synthetic oligonucleotide
  Sense strand starting at position 3915 SEQ ID NO: 3004
aguuaaaucuaggcagaug

SEQ ID NO: 233465 - RNA, 19 nt, Artificial Sequence
  Description of Artificial Sequence: Synthetic oligonucleotide
  Antisense strand to SEQ ID NO: 233464
caucugccuagauuuaacu

SEQ ID NO: 233466 - RNA, 19 nt, Artificial Sequence
  Description of Artificial Sequence: Synthetic oligonucleotide
  Sense strand starting at position 1 SEQ ID NO: 3005
guaagaguuugccagagga

SEQ ID NO: 233467 - RNA, 19 nt, Artificial Sequence
  Description of Artificial Sequence: Synthetic oligonucleotide
  Antisense strand to SEQ ID NO: 233466
uccucuggcaaacucuuac

SEQ ID NO: 233468 - RNA, 19 nt, Artificial Sequence
  Description of Artificial Sequence: Synthetic oligonucleotide
  Sense strand starting at position 5 SEQ ID NO: 3005
gaguuugccagaggaagug

SEQ ID NO: 233469 - RNA, 19 nt, Artificial Sequence
  Description of Artificial Sequence: Synthetic oligonucleotide
  Antisense strand to SEQ ID NO: 233468
cacuuccucuggcaaacuc

SEQ ID NO: 233470 - RNA, 19 nt, Artificial Sequence
  Description of Artificial Sequence: Synthetic oligonucleotide
  Sense strand starting at position 157 SEQ ID NO: 3005
gaacgagugguguguuuga

SEQ ID NO: 233471 - RNA, 19 nt, Artificial Sequence
  Description of Artificial Sequence: Synthetic oligonucleotide
  Antisense strand to SEQ ID NO: 233470
ucaaacacaccacucguuc

SEQ ID NO: 233472 - RNA, 19 nt, Artificial Sequence
  Description of Artificial Sequence: Synthetic oligonucleotide
  Sense strand starting at position 209 SEQ ID NO: 3005
aaaguuaguggugggcuua

SEQ ID NO: 233473 - RNA, 19 nt, Artificial Sequence
  Description of Artificial Sequence: Synthetic oligonucleotide
  Antisense strand to SEQ ID NO: 233472
uaagcccaccacuaacuuu

SEQ ID NO: 233474 - RNA, 19 nt, Artificial Sequence
  Description of Artificial Sequence: Synthetic oligonucleotide
  Sense strand starting at position 246 SEQ ID NO: 3005
gaagcucuaguguggaaga

SEQ ID NO: 233475 - RNA, 19 nt, Artificial Sequence
  Description of Artificial Sequence: Synthetic oligonucleotide
  Antisense strand to SEQ ID NO: 233474
ucuuccacacuagagcuuc

SEQ ID NO: 233476 - RNA, 19 nt, Artificial Sequence
  Description of Artificial Sequence: Synthetic oligonucleotide
  Sense strand starting at position 253 SEQ ID NO: 3005
uaguguggaagaugagaau

SEQ ID NO: 233477 - RNA, 19 nt, Artificial Sequence
  Description of Artificial Sequence: Synthetic oligonucleotide
  Antisense strand to SEQ ID NO: 233476
auucucaucuuccacacua

SEQ ID NO: 233478 - RNA, 19 nt, Artificial Sequence
  Description of Artificial Sequence: Synthetic oligonucleotide
  Sense strand starting at position 322 SEQ ID NO: 3005
acaucuucugccugaggga

SEQ ID NO: 233479 - RNA, 19 nt, Artificial Sequence
  Description of Artificial Sequence: Synthetic oligonucleotide
  Antisense strand to SEQ ID NO: 233478
ucccucaggcagaagaugu

SEQ ID NO: 233480 - RNA, 19 nt, Artificial Sequence
  Description of Artificial Sequence: Synthetic oligonucleotide
  Sense strand starting at position 791 SEQ ID NO: 3005
agaugcuuucugggaccca

SEQ ID NO: 233481 - RNA, 19 nt, Artificial Sequence
  Description of Artificial Sequence: Synthetic oligonucleotide
  Antisense strand to SEQ ID NO: 233480
ugggucccagaaagcaucu

SEQ ID NO: 233482 - RNA, 19 nt, Artificial Sequence
  Description of Artificial Sequence: Synthetic oligonucleotide
  Sense strand starting at position 816 SEQ ID NO: 3005
auguuuccugcgugggcaa

SEQ ID NO: 233483 - RNA, 19 nt, Artificial Sequence
  Description of Artificial Sequence: Synthetic oligonucleotide
  Antisense strand to SEQ ID NO: 233482
uugcccacgcaggaaacau

SEQ ID NO: 233484 - RNA, 19 nt, Artificial Sequence
  Description of Artificial Sequence: Synthetic oligonucleotide
  Sense strand starting at position 860 SEQ ID NO: 3005
ugaaguaguggcugggauu

SEQ ID NO: 233485 - RNA, 19 nt, Artificial Sequence
  Description of Artificial Sequence: Synthetic oligonucleotide
  Antisense strand to SEQ ID NO: 233484
aaucccagccacuacuuca

SEQ ID NO: 233486 - RNA, 19 nt, Artificial Sequence
  Description of Artificial Sequence: Synthetic oligonucleotide
  Sense strand starting at position 954 SEQ ID NO: 3005
ugauaugaaguuugcccau

SEQ ID NO: 233487 - RNA, 19 nt, Artificial Sequence
  Description of Artificial Sequence: Synthetic oligonucleotide
  Antisense strand to SEQ ID NO: 233486
augggcaaacuucauauca

SEQ ID NO: 233488 - RNA, 19 nt, Artificial Sequence
  Description of Artificial Sequence: Synthetic oligonucleotide
  Sense strand starting at position 956 SEQ ID NO: 3005
auaugaaguuugcccauca

SEQ ID NO: 233489 - RNA, 19 nt, Artificial Sequence
  Description of Artificial Sequence: Synthetic oligonucleotide
  Antisense strand to SEQ ID NO: 233488
ugaugggcaaacuucauau

SEQ ID NO: 233490 - RNA, 19 nt, Artificial Sequence
  Description of Artificial Sequence: Synthetic oligonucleotide
  Sense strand starting at position 1101 SEQ ID NO: 3005
gaggaucacuuaggagaga

SEQ ID NO: 233491 - RNA, 19 nt, Artificial Sequence
  Description of Artificial Sequence: Synthetic oligonucleotide
  Antisense strand to SEQ ID NO: 233490
ucucuccuaagugauccuc

SEQ ID NO: 233492 - RNA, 19 nt, Artificial Sequence
  Description of Artificial Sequence: Synthetic oligonucleotide
  Sense strand starting at position 1102 SEQ ID NO: 3005
aggaucacuuaggagagaa

SEQ ID NO: 233493 - RNA, 19 nt, Artificial Sequence
  Description of Artificial Sequence: Synthetic oligonucleotide
  Antisense strand to SEQ ID NO: 233492
uucucuccuaagugauccu

SEQ ID NO: 233494 - RNA, 19 nt, Artificial Sequence
  Description of Artificial Sequence: Synthetic oligonucleotide
  Sense strand starting at position 1657 SEQ ID NO: 3005
ggaggauggucuccuagac

SEQ ID NO: 233495 - RNA, 19 nt, Artificial Sequence
  Description of Artificial Sequence: Synthetic oligonucleotide
  Antisense strand to SEQ ID NO: 233494
gucuaggagaccauccucc

SEQ ID NO: 233496 - RNA, 19 nt, Artificial Sequence
  Description of Artificial Sequence: Synthetic oligonucleotide
  Sense strand starting at position 2198 SEQ ID NO: 3005
cgcgcauccguccaauaga

SEQ ID NO: 233497 - RNA, 19 nt, Artificial Sequence
  Description of Artificial Sequence: Synthetic oligonucleotide
  Antisense strand to SEQ ID NO: 233496
ucuauuggacggaugcgcg

SEQ ID NO: 233498 - RNA, 19 nt, Artificial Sequence
  Description of Artificial Sequence: Synthetic oligonucleotide
  Sense strand starting at position 2201 SEQ ID NO: 3005
gcauccguccaauagacau

SEQ ID NO: 233499 - RNA, 19 nt, Artificial Sequence
  Description of Artificial Sequence: Synthetic oligonucleotide
  Antisense strand to SEQ ID NO: 233498
augucuauuggacggaugc

SEQ ID NO: 233500 - RNA, 19 nt, Artificial Sequence
  Description of Artificial Sequence: Synthetic oligonucleotide
  Sense strand starting at position 2226 SEQ ID NO: 3005
agcaucuaaucuguaguaa

SEQ ID NO: 233501 - RNA, 19 nt, Artificial Sequence
  Description of Artificial Sequence: Synthetic oligonucleotide
  Antisense strand to SEQ ID NO: 233500
uuacuacagauuagaugcu

SEQ ID NO: 233502 - RNA, 19 nt, Artificial Sequence
  Description of Artificial Sequence: Synthetic oligonucleotide
  Sense strand starting at position 2227 SEQ ID NO: 3005
gcaucuaaucuguaguaag

SEQ ID NO: 233503 - RNA, 19 nt, Artificial Sequence
  Description of Artificial Sequence: Synthetic oligonucleotide
  Antisense strand to SEQ ID NO: 233502
cuuacuacagauuagaugc

SEQ ID NO: 233504 - RNA, 19 nt, Artificial Sequence
  Description of Artificial Sequence: Synthetic oligonucleotide
  Sense strand starting at position 2237 SEQ ID NO: 3005
uguaguaagcucugggaag

SEQ ID NO: 233505 - RNA, 19 nt, Artificial Sequence
  Description of Artificial Sequence: Synthetic oligonucleotide
  Antisense strand to SEQ ID NO: 233504
cuucccagagcuuacuaca

SEQ ID NO: 233506 - RNA, 19 nt, Artificial Sequence
  Description of Artificial Sequence: Synthetic oligonucleotide
  Sense strand starting at position 2308 SEQ ID NO: 3005
cggcgauuaaaccaucauu

SEQ ID NO: 233507 - RNA, 19 nt, Artificial Sequence
  Description of Artificial Sequence: Synthetic oligonucleotide
  Antisense strand to SEQ ID NO: 233506
aaugaugguuuaaucgccg

SEQ ID NO: 233508 - RNA, 19 nt, Artificial Sequence
  Description of Artificial Sequence: Synthetic oligonucleotide
  Sense strand starting at position 2542 SEQ ID NO: 3005
cuguguugcuaucuaauga

SEQ ID NO: 233509 - RNA, 19 nt, Artificial Sequence
  Description of Artificial Sequence: Synthetic oligonucleotide
  Antisense strand to SEQ ID NO: 233508
ucauuagauagcaacacag

SEQ ID NO: 233510 - RNA, 19 nt, Artificial Sequence
  Description of Artificial Sequence: Synthetic oligonucleotide
  Sense strand starting at position 2832 SEQ ID NO: 3005
ggcugucuuccagguacua

SEQ ID NO: 233511 - RNA, 19 nt, Artificial Sequence
  Description of Artificial Sequence: Synthetic oligonucleotide
  Antisense strand to SEQ ID NO: 233510
uaguaccuggaagacagcc

SEQ ID NO: 233512 - RNA, 19 nt, Artificial Sequence
  Description of Artificial Sequence: Synthetic oligonucleotide
  Sense strand starting at position 2879 SEQ ID NO: 3005
acugcauggagugauuagu

SEQ ID NO: 233513 - RNA, 19 nt, Artificial Sequence
  Description of Artificial Sequence: Synthetic oligonucleotide
  Antisense strand to SEQ ID NO: 233512
acuaaucacuccaugcagu

SEQ ID NO: 233514 - RNA, 19 nt, Artificial Sequence
  Description of Artificial Sequence: Synthetic oligonucleotide
  Sense strand starting at position 2890 SEQ ID NO: 3005
ugauuagugcuguggaaug

SEQ ID NO: 233515 - RNA, 19 nt, Artificial Sequence
  Description of Artificial Sequence: Synthetic oligonucleotide
  Antisense strand to SEQ ID NO: 233514
cauuccacagcacuaauca

SEQ ID NO: 233516 - RNA, 19 nt, Artificial Sequence
  Description of Artificial Sequence: Synthetic oligonucleotide
  Sense strand starting at position 2892 SEQ ID NO: 3005
auuagugcuguggaaugaa

SEQ ID NO: 233517 - RNA, 19 nt, Artificial Sequence
  Description of Artificial Sequence: Synthetic oligonucleotide
  Antisense strand to SEQ ID NO: 233516
uucauuccacagcacuaau

SEQ ID NO: 233518 - RNA, 19 nt, Artificial Sequence
  Description of Artificial Sequence: Synthetic oligonucleotide
  Sense strand starting at position 2895 SEQ ID NO: 3005
agugcuguggaaugaauga

SEQ ID NO: 233519 - RNA, 19 nt, Artificial Sequence
  Description of Artificial Sequence: Synthetic oligonucleotide
  Antisense strand to SEQ ID NO: 233518
ucauucauuccacagcacu

SEQ ID NO: 233520 - RNA, 19 nt, Artificial Sequence
  Description of Artificial Sequence: Synthetic oligonucleotide
  Sense strand starting at position 2927 SEQ ID NO: 3005
ugaauucuacuuugaguuc

SEQ ID NO: 233521 - RNA, 19 nt, Artificial Sequence
  Description of Artificial Sequence: Synthetic oligonucleotide
  Antisense strand to SEQ ID NO: 233520
gaacucaaaguagaauuca

SEQ ID NO: 233522 - RNA, 19 nt, Artificial Sequence
  Description of Artificial Sequence: Synthetic oligonucleotide
  Sense strand starting at position 2938 SEQ ID NO: 3005
uugaguuccuccuccacca

SEQ ID NO: 233523 - RNA, 19 nt, Artificial Sequence
  Description of Artificial Sequence: Synthetic oligonucleotide
  Antisense strand to SEQ ID NO: 233522
ugguggaggaggaacucaa

SEQ ID NO: 233524 - RNA, 19 nt, Artificial Sequence
  Description of Artificial Sequence: Synthetic oligonucleotide
  Sense strand starting at position 3571 SEQ ID NO: 3005
agauaugauucuccugagu

SEQ ID NO: 233525 - RNA, 19 nt, Artificial Sequence
  Description of Artificial Sequence: Synthetic oligonucleotide
  Antisense strand to SEQ ID NO: 233524
acucaggagaaucauaucu

SEQ ID NO: 233526 - RNA, 19 nt, Artificial Sequence
  Description of Artificial Sequence: Synthetic oligonucleotide
  Sense strand starting at position 3584 SEQ ID NO: 3005
cugaguggcacuggaagau

SEQ ID NO: 233527 - RNA, 19 nt, Artificial Sequence
  Description of Artificial Sequence: Synthetic oligonucleotide
  Antisense strand to SEQ ID NO: 233526
aucuuccagugccacucag

SEQ ID NO: 233528 - RNA, 19 nt, Artificial Sequence
  Description of Artificial Sequence: Synthetic oligonucleotide
  Sense strand starting at position 3621 SEQ ID NO: 3005
cuggcaaacugguccagaa

SEQ ID NO: 233529 - RNA, 19 nt, Artificial Sequence
  Description of Artificial Sequence: Synthetic oligonucleotide
  Antisense strand to SEQ ID NO: 233528
uucuggaccaguuugccag

SEQ ID NO: 233530 - RNA, 19 nt, Artificial Sequence
  Description of Artificial Sequence: Synthetic oligonucleotide
  Sense strand starting at position 3650 SEQ ID NO: 3005
ggguguucuuccuccauuu

SEQ ID NO: 233531 - RNA, 19 nt, Artificial Sequence
  Description of Artificial Sequence: Synthetic oligonucleotide
  Antisense strand to SEQ ID NO: 233530
aaauggaggaagaacaccc

SEQ ID NO: 233532 - RNA, 19 nt, Artificial Sequence
  Description of Artificial Sequence: Synthetic oligonucleotide
  Sense strand starting at position 3733 SEQ ID NO: 3005
cuggcuguguuguuaaaga

SEQ ID NO: 233533 - RNA, 19 nt, Artificial Sequence
  Description of Artificial Sequence: Synthetic oligonucleotide
  Antisense strand to SEQ ID NO: 233532
ucuuuaacaacacagccag

SEQ ID NO: 233534 - RNA, 19 nt, Artificial Sequence
  Description of Artificial Sequence: Synthetic oligonucleotide
  Sense strand starting at position 3750 SEQ ID NO: 3005
gaaagaugauugucgacug

SEQ ID NO: 233535 - RNA, 19 nt, Artificial Sequence
  Description of Artificial Sequence: Synthetic oligonucleotide
  Antisense strand to SEQ ID NO: 233534
cagucgacaaucaucuuuc

SEQ ID NO: 233536 - RNA, 19 nt, Artificial Sequence
  Description of Artificial Sequence: Synthetic oligonucleotide
  Sense strand starting at position 3776 SEQ ID NO: 3005
agggucaggaccuggaauu

SEQ ID NO: 233537 - RNA, 19 nt, Artificial Sequence
  Description of Artificial Sequence: Synthetic oligonucleotide
  Antisense strand to SEQ ID NO: 233536
aauuccagguccugacccu

SEQ ID NO: 233538 - RNA, 19 nt, Artificial Sequence
  Description of Artificial Sequence: Synthetic oligonucleotide
  Sense strand starting at position 3786 SEQ ID NO: 3005
ccuggaauuccucauaggu

SEQ ID NO: 233539 - RNA, 19 nt, Artificial Sequence
  Description of Artificial Sequence: Synthetic oligonucleotide
  Antisense strand to SEQ ID NO: 233538
accuaugaggaauuccagg

SEQ ID NO: 233540 - RNA, 19 nt, Artificial Sequence
  Description of Artificial Sequence: Synthetic oligonucleotide
  Sense strand starting at position 3788 SEQ ID NO: 3005
uggaauuccucauaggucu

SEQ ID NO: 233541 - RNA, 19 nt, Artificial Sequence
  Description of Artificial Sequence: Synthetic oligonucleotide
  Antisense strand to SEQ ID NO: 233540
agaccuaugaggaauucca

SEQ ID NO: 233542 - RNA, 19 nt, Artificial Sequence
  Description of Artificial Sequence: Synthetic oligonucleotide
  Sense strand starting at position 3794 SEQ ID NO: 3005
uccucauaggucugaagaa

SEQ ID NO: 233543 - RNA, 19 nt, Artificial Sequence
  Description of Artificial Sequence: Synthetic oligonucleotide
  Antisense strand to SEQ ID NO: 233542
uucuucagaccuaugagga

SEQ ID NO: 233544 - RNA, 19 nt, Artificial Sequence
  Description of Artificial Sequence: Synthetic oligonucleotide
  Sense strand starting at position 3937 SEQ ID NO: 3005
guguacagauaagaacauu

SEQ ID NO: 233545 - RNA, 19 nt, Artificial Sequence
  Description of Artificial Sequence: Synthetic oligonucleotide
  Antisense strand to SEQ ID NO: 233544
aauguucuuaucuguacac

SEQ ID NO: 233546 - RNA, 19 nt, Artificial Sequence
  Description of Artificial Sequence: Synthetic oligonucleotide
  Sense strand starting at position 10 SEQ ID NO: 3006
uguccucaaggcugauaca

SEQ ID NO: 233547 - RNA, 19 nt, Artificial Sequence
  Description of Artificial Sequence: Synthetic oligonucleotide
  Antisense strand to SEQ ID NO: 233546
uguaucagccuugaggaca

SEQ ID NO: 233548 - RNA, 19 nt, Artificial Sequence
  Description of Artificial Sequence: Synthetic oligonucleotide
  Sense strand starting at position 11 SEQ ID NO: 3006
guccucaaggcugauacau

SEQ ID NO: 233549 - RNA, 19 nt, Artificial Sequence
  Description of Artificial Sequence: Synthetic oligonucleotide
  Antisense strand to SEQ ID NO: 233548
auguaucagccuugaggac

SEQ ID NO: 233550 - RNA, 19 nt, Artificial Sequence
  Description of Artificial Sequence: Synthetic oligonucleotide
  Sense strand starting at position 278 SEQ ID NO: 3006
ccaucucuugucuauugua

SEQ ID NO: 233551 - RNA, 19 nt, Artificial Sequence
  Description of Artificial Sequence: Synthetic oligonucleotide
  Antisense strand to SEQ ID NO: 233550
uacaauagacaagagaugg

SEQ ID NO: 233552 - RNA, 19 nt, Artificial Sequence
  Description of Artificial Sequence: Synthetic oligonucleotide
  Sense strand starting at position 661 SEQ ID NO: 3006
uggaguccucucuaaccau

SEQ ID NO: 233553 - RNA, 19 nt, Artificial Sequence
  Description of Artificial Sequence: Synthetic oligonucleotide
  Antisense strand to SEQ ID NO: 233552
augguuagagaggacucca

SEQ ID NO: 233554 - RNA, 19 nt, Artificial Sequence
  Description of Artificial Sequence: Synthetic oligonucleotide
  Sense strand starting at position 717 SEQ ID NO: 3006
ggguguuugacucaaacuu

SEQ ID NO: 233555 - RNA, 19 nt, Artificial Sequence
  Description of Artificial Sequence: Synthetic oligonucleotide
  Antisense strand to SEQ ID NO: 233554
aaguuugagucaaacaccc

SEQ ID NO: 233556 - RNA, 19 nt, Artificial Sequence
  Description of Artificial Sequence: Synthetic oligonucleotide
  Sense strand starting at position 1098 SEQ ID NO: 3006
cuaucuuuacaggguaaag

SEQ ID NO: 233557 - RNA, 19 nt, Artificial Sequence
  Description of Artificial Sequence: Synthetic oligonucleotide
  Antisense strand to SEQ ID NO: 233556
cuuuacccuguaaagauag

SEQ ID NO: 233558 - RNA, 19 nt, Artificial Sequence
  Description of Artificial Sequence: Synthetic oligonucleotide
  Sense strand starting at position 1120 SEQ ID NO: 3006
agauucucccucugaguaa

SEQ ID NO: 233559 - RNA, 19 nt, Artificial Sequence
  Description of Artificial Sequence: Synthetic oligonucleotide
  Antisense strand to SEQ ID NO: 233558
uuacucagagggagaaucu

SEQ ID NO: 233560 - RNA, 19 nt, Artificial Sequence
  Description of Artificial Sequence: Synthetic oligonucleotide
  Sense strand starting at position 1259 SEQ ID NO: 3006
gcuucugaaggccagaauu

SEQ ID NO: 233561 - RNA, 19 nt, Artificial Sequence
  Description of Artificial Sequence: Synthetic oligonucleotide
  Antisense strand to SEQ ID NO: 233560
aauucuggccuucagaagc

SEQ ID NO: 233562 - RNA, 19 nt, Artificial Sequence
  Description of Artificial Sequence: Synthetic oligonucleotide
  Sense strand starting at position 1294 SEQ ID NO: 3006
uguauuccuccguaaagac

SEQ ID NO: 233563 - RNA, 19 nt, Artificial Sequence
  Description of Artificial Sequence: Synthetic oligonucleotide
  Antisense strand to SEQ ID NO: 233562
gucuuuacggaggaauaca

SEQ ID NO: 233564 - RNA, 19 nt, Artificial Sequence
  Description of Artificial Sequence: Synthetic oligonucleotide
  Sense strand starting at position 1408 SEQ ID NO: 3006
guguguggauguaucguau

SEQ ID NO: 233565 - RNA, 19 nt, Artificial Sequence
  Description of Artificial Sequence: Synthetic oligonucleotide
  Antisense strand to SEQ ID NO: 233564
auacgauacauccacacac

SEQ ID NO: 233566 - RNA, 19 nt, Artificial Sequence
  Description of Artificial Sequence: Synthetic oligonucleotide
  Sense strand starting at position 1645 SEQ ID NO: 3006
uccuaccugcaguagaauu

SEQ ID NO: 233567 - RNA, 19 nt, Artificial Sequence
  Description of Artificial Sequence: Synthetic oligonucleotide
  Antisense strand to SEQ ID NO: 233566
aauucuacugcagguagga

SEQ ID NO: 233568 - RNA, 19 nt, Artificial Sequence
  Description of Artificial Sequence: Synthetic oligonucleotide
  Sense strand starting at position 1658 SEQ ID NO: 3006
agaauuucgagccgucuuu

SEQ ID NO: 233569 - RNA, 19 nt, Artificial Sequence
  Description of Artificial Sequence: Synthetic oligonucleotide
  Antisense strand to SEQ ID NO: 233568
aaagacggcucgaaauucu

SEQ ID NO: 233570 - RNA, 19 nt, Artificial Sequence
  Description of Artificial Sequence: Synthetic oligonucleotide
  Sense strand starting at position 1679 SEQ ID NO: 3006
ccagguagccgucauaaug

SEQ ID NO: 233571 - RNA, 19 nt, Artificial Sequence
  Description of Artificial Sequence: Synthetic oligonucleotide
  Antisense strand to SEQ ID NO: 233570
cauuaugacggcuaccugg

SEQ ID NO: 233572 - RNA, 19 nt, Artificial Sequence
  Description of Artificial Sequence: Synthetic oligonucleotide
  Sense strand starting at position 1687 SEQ ID NO: 3006
ccgucauaaugggcauuua

SEQ ID NO: 233573 - RNA, 19 nt, Artificial Sequence
  Description of Artificial Sequence: Synthetic oligonucleotide
  Antisense strand to SEQ ID NO: 233572
uaaaugcccauuaugacgg

SEQ ID NO: 233574 - RNA, 19 nt, Artificial Sequence
  Description of Artificial Sequence: Synthetic oligonucleotide
  Sense strand starting at position 1793 SEQ ID NO: 3006
uuugucucugagcaguaaa

SEQ ID NO: 233575 - RNA, 19 nt, Artificial Sequence
  Description of Artificial Sequence: Synthetic oligonucleotide
  Antisense strand to SEQ ID NO: 233574
uuuacugcucagagacaaa

SEQ ID NO: 233576 - RNA, 19 nt, Artificial Sequence
  Description of Artificial Sequence: Synthetic oligonucleotide
  Sense strand starting at position 1957 SEQ ID NO: 3006
cguuguccugcgucacaaa

SEQ ID NO: 233577 - RNA, 19 nt, Artificial Sequence
  Description of Artificial Sequence: Synthetic oligonucleotide
  Antisense strand to SEQ ID NO: 233576
uuugugacgcaggacaacg

SEQ ID NO: 233578 - RNA, 19 nt, Artificial Sequence
  Description of Artificial Sequence: Synthetic oligonucleotide
  Sense strand starting at position 2052 SEQ ID NO: 3006
gcgguuaacgcuguuucua

SEQ ID NO: 233579 - RNA, 19 nt, Artificial Sequence
  Description of Artificial Sequence: Synthetic oligonucleotide
  Antisense strand to SEQ ID NO: 233578
uagaaacagcguuaaccgc

SEQ ID NO: 233580 - RNA, 19 nt, Artificial Sequence
  Description of Artificial Sequence: Synthetic oligonucleotide
  Sense strand starting at position 2053 SEQ ID NO: 3006
cgguuaacgcuguuucuag

SEQ ID NO: 233581 - RNA, 19 nt, Artificial Sequence
  Description of Artificial Sequence: Synthetic oligonucleotide
  Antisense strand to SEQ ID NO: 233580
cuagaaacagcguuaaccg

SEQ ID NO: 233582 - RNA, 19 nt, Artificial Sequence
  Description of Artificial Sequence: Synthetic oligonucleotide
  Sense strand starting at position 2087 SEQ ID NO: 3006
guccucagucuuuaagauc

SEQ ID NO: 233583 - RNA, 19 nt, Artificial Sequence
  Description of Artificial Sequence: Synthetic oligonucleotide
  Antisense strand to SEQ ID NO: 233582
gaucuuaaagacugaggac

SEQ ID NO: 233584 - RNA, 19 nt, Artificial Sequence
  Description of Artificial Sequence: Synthetic oligonucleotide
  Sense strand starting at position 2122 SEQ ID NO: 3006
ccgcuucuucucgcuaaac

SEQ ID NO: 233585 - RNA, 19 nt, Artificial Sequence
  Description of Artificial Sequence: Synthetic oligonucleotide
  Antisense strand to SEQ ID NO: 233584
guuuagcgagaagaagcgg

SEQ ID NO: 233586 - RNA, 19 nt, Artificial Sequence
  Description of Artificial Sequence: Synthetic oligonucleotide
  Sense strand starting at position 2174 SEQ ID NO: 3006
ggugacaacauucgcauuu

SEQ ID NO: 233587 - RNA, 19 nt, Artificial Sequence
  Description of Artificial Sequence: Synthetic oligonucleotide
  Antisense strand to SEQ ID NO: 233586
aaaugcgaauguugucacc

SEQ ID NO: 233588 - RNA, 19 nt, Artificial Sequence
  Description of Artificial Sequence: Synthetic oligonucleotide
  Sense strand starting at position 2238 SEQ ID NO: 3006
cguagagucagggaauaug

SEQ ID NO: 233589 - RNA, 19 nt, Artificial Sequence
  Description of Artificial Sequence: Synthetic oligonucleotide
  Antisense strand to SEQ ID NO: 233588
cauauucccugacucuacg

SEQ ID NO: 233590 - RNA, 19 nt, Artificial Sequence
  Description of Artificial Sequence: Synthetic oligonucleotide
  Sense strand starting at position 2246 SEQ ID NO: 3006
cagggaauaugguugucau

SEQ ID NO: 233591 - RNA, 19 nt, Artificial Sequence
  Description of Artificial Sequence: Synthetic oligonucleotide
  Antisense strand to SEQ ID NO: 233590
augacaaccauauucccug

SEQ ID NO: 233592 - RNA, 19 nt, Artificial Sequence
  Description of Artificial Sequence: Synthetic oligonucleotide
  Sense strand starting at position 2247 SEQ ID NO: 3006
agggaauaugguugucauu

SEQ ID NO: 233593 - RNA, 19 nt, Artificial Sequence
  Description of Artificial Sequence: Synthetic oligonucleotide
  Antisense strand to SEQ ID NO: 233592
aaugacaaccauauucccu

SEQ ID NO: 233594 - RNA, 19 nt, Artificial Sequence
  Description of Artificial Sequence: Synthetic oligonucleotide
  Sense strand starting at position 2642 SEQ ID NO: 3006
uguaccaucccaugggaua

SEQ ID NO: 233595 - RNA, 19 nt, Artificial Sequence
  Description of Artificial Sequence: Synthetic oligonucleotide
  Antisense strand to SEQ ID NO: 233594
uaucccaugggaugguaca

SEQ ID NO: 233596 - RNA, 19 nt, Artificial Sequence
  Description of Artificial Sequence: Synthetic oligonucleotide
  Sense strand starting at position 2649 SEQ ID NO: 3006
ucccaugggauacguaauu

SEQ ID NO: 233597 - RNA, 19 nt, Artificial Sequence
  Description of Artificial Sequence: Synthetic oligonucleotide
  Antisense strand to SEQ ID NO: 233596
aauuacguaucccauggga

SEQ ID NO: 233598 - RNA, 19 nt, Artificial Sequence
  Description of Artificial Sequence: Synthetic oligonucleotide
  Sense strand starting at position 2654 SEQ ID NO: 3006
ugggauacguaauugucca

SEQ ID NO: 233599 - RNA, 19 nt, Artificial Sequence
  Description of Artificial Sequence: Synthetic oligonucleotide
  Antisense strand to SEQ ID NO: 233598
uggacaauuacguauccca

SEQ ID NO: 233600 - RNA, 19 nt, Artificial Sequence
  Description of Artificial Sequence: Synthetic oligonucleotide
  Sense strand starting at position 2741 SEQ ID NO: 3006
uggucaaaucugugugaca

SEQ ID NO: 233601 - RNA, 19 nt, Artificial Sequence
  Description of Artificial Sequence: Synthetic oligonucleotide
  Antisense strand to SEQ ID NO: 233600
ugucacacagauuugacca

SEQ ID NO: 233602 - RNA, 19 nt, Artificial Sequence
  Description of Artificial Sequence: Synthetic oligonucleotide
  Sense strand starting at position 2742 SEQ ID NO: 3006
ggucaaaucugugugacaa

SEQ ID NO: 233603 - RNA, 19 nt, Artificial Sequence
  Description of Artificial Sequence: Synthetic oligonucleotide
  Antisense strand to SEQ ID NO: 233602
uugucacacagauuugacc

SEQ ID NO: 233604 - RNA, 19 nt, Artificial Sequence
  Description of Artificial Sequence: Synthetic oligonucleotide
  Sense strand starting at position 2743 SEQ ID NO: 3006
gucaaaucugugugacaac

SEQ ID NO: 233605 - RNA, 19 nt, Artificial Sequence
  Description of Artificial Sequence: Synthetic oligonucleotide
  Antisense strand to SEQ ID NO: 233604
guugucacacagauuugac

SEQ ID NO: 233606 - RNA, 19 nt, Artificial Sequence
  Description of Artificial Sequence: Synthetic oligonucleotide
  Sense strand starting at position 2848 SEQ ID NO: 3006
uggauccugucauugaacu

SEQ ID NO: 233607 - RNA, 19 nt, Artificial Sequence
  Description of Artificial Sequence: Synthetic oligonucleotide
  Antisense strand to SEQ ID NO: 233606
aguucaaugacaggaucca

SEQ ID NO: 233608 - RNA, 19 nt, Artificial Sequence
  Description of Artificial Sequence: Synthetic oligonucleotide
  Sense strand starting at position 2849 SEQ ID NO: 3006
ggauccugucauugaacua

SEQ ID NO: 233609 - RNA, 19 nt, Artificial Sequence
  Description of Artificial Sequence: Synthetic oligonucleotide
  Antisense strand to SEQ ID NO: 233608
uaguucaaugacaggaucc

SEQ ID NO: 233610 - RNA, 19 nt, Artificial Sequence
  Description of Artificial Sequence: Synthetic oligonucleotide
  Sense strand starting at position 2977 SEQ ID NO: 3006
ugcauucgccuggauuaag

SEQ ID NO: 233611 - RNA, 19 nt, Artificial Sequence
  Description of Artificial Sequence: Synthetic oligonucleotide
  Antisense strand to SEQ ID NO: 233610
cuuaauccaggcgaaugca

SEQ ID NO: 233612 - RNA, 19 nt, Artificial Sequence
  Description of Artificial Sequence: Synthetic oligonucleotide
  Sense strand starting at position 2989 SEQ ID NO: 3006
gauuaaguucugggaguag

SEQ ID NO: 233613 - RNA, 19 nt, Artificial Sequence
  Description of Artificial Sequence: Synthetic oligonucleotide
  Antisense strand to SEQ ID NO: 233612
cuacucccagaacuuaauc

SEQ ID NO: 233614 - RNA, 19 nt, Artificial Sequence
  Description of Artificial Sequence: Synthetic oligonucleotide
  Sense strand starting at position 3046 SEQ ID NO: 3006
agcacugagccugauugau

SEQ ID NO: 233615 - RNA, 19 nt, Artificial Sequence
  Description of Artificial Sequence: Synthetic oligonucleotide
  Antisense strand to SEQ ID NO: 233614
aucaaucaggcucagugcu

SEQ ID NO: 233616 - RNA, 19 nt, Artificial Sequence
  Description of Artificial Sequence: Synthetic oligonucleotide
  Sense strand starting at position 3048 SEQ ID NO: 3006
cacugagccugauugaugu

SEQ ID NO: 233617 - RNA, 19 nt, Artificial Sequence
  Description of Artificial Sequence: Synthetic oligonucleotide
  Antisense strand to SEQ ID NO: 233616
acaucaaucaggcucagug

SEQ ID NO: 233618 - RNA, 19 nt, Artificial Sequence
  Description of Artificial Sequence: Synthetic oligonucleotide
  Sense strand starting at position 3105 SEQ ID NO: 3006
auuacugucgauuaugcaa

SEQ ID NO: 233619 - RNA, 19 nt, Artificial Sequence
  Description of Artificial Sequence: Synthetic oligonucleotide
  Antisense strand to SEQ ID NO: 233618
uugcauaaucgacaguaau

SEQ ID NO: 233620 - RNA, 19 nt, Artificial Sequence
  Description of Artificial Sequence: Synthetic oligonucleotide
  Sense strand starting at position 3112 SEQ ID NO: 3006
ucgauuaugcaagaugaca

SEQ ID NO: 233621 - RNA, 19 nt, Artificial Sequence
  Description of Artificial Sequence: Synthetic oligonucleotide
  Antisense strand to SEQ ID NO: 233620
ugucaucuugcauaaucga

SEQ ID NO: 233622 - RNA, 19 nt, Artificial Sequence
  Description of Artificial Sequence: Synthetic oligonucleotide
  Sense strand starting at position 3321 SEQ ID NO: 3006
auugccuuccuaggagaua

SEQ ID NO: 233623 - RNA, 19 nt, Artificial Sequence
  Description of Artificial Sequence: Synthetic oligonucleotide
  Antisense strand to SEQ ID NO: 233622
uaucuccuaggaaggcaau

SEQ ID NO: 233624 - RNA, 19 nt, Artificial Sequence
  Description of Artificial Sequence: Synthetic oligonucleotide
  Sense strand starting at position 3324 SEQ ID NO: 3006
gccuuccuaggagauaauu

SEQ ID NO: 233625 - RNA, 19 nt, Artificial Sequence
  Description of Artificial Sequence: Synthetic oligonucleotide
  Antisense strand to SEQ ID NO: 233624
aauuaucuccuaggaaggc

SEQ ID NO: 233626 - RNA, 19 nt, Artificial Sequence
  Description of Artificial Sequence: Synthetic oligonucleotide
  Sense strand starting at position 153 SEQ ID NO: 3007
agagcucaguucucccaaa

SEQ ID NO: 233627 - RNA, 19 nt, Artificial Sequence
  Description of Artificial Sequence: Synthetic oligonucleotide
  Antisense strand to SEQ ID NO: 233626
uuugggagaacugagcucu

SEQ ID NO: 233628 - RNA, 19 nt, Artificial Sequence
  Description of Artificial Sequence: Synthetic oligonucleotide
  Sense strand starting at position 412 SEQ ID NO: 3007
ccuagucuuguggaguuua

SEQ ID NO: 233629 - RNA, 19 nt, Artificial Sequence
  Description of Artificial Sequence: Synthetic oligonucleotide
  Antisense strand to SEQ ID NO: 233628
uaaacuccacaagacuagg

SEQ ID NO: 233630 - RNA, 19 nt, Artificial Sequence
  Description of Artificial Sequence: Synthetic oligonucleotide
  Sense strand starting at position 449 SEQ ID NO: 3007
aagagaaguguccaagugu

SEQ ID NO: 233631 - RNA, 19 nt, Artificial Sequence
  Description of Artificial Sequence: Synthetic oligonucleotide
  Antisense strand to SEQ ID NO: 233630
acacuuggacacuucucuu

SEQ ID NO: 233632 - RNA, 19 nt, Artificial Sequence
  Description of Artificial Sequence: Synthetic oligonucleotide
  Sense strand starting at position 2169 SEQ ID NO: 3007
guaguuucucuccaaagug

SEQ ID NO: 233633 - RNA, 19 nt, Artificial Sequence
  Description of Artificial Sequence: Synthetic oligonucleotide
  Antisense strand to SEQ ID NO: 233632
cacuuuggagagaaacuac

SEQ ID NO: 233634 - RNA, 19 nt, Artificial Sequence
  Description of Artificial Sequence: Synthetic oligonucleotide
  Sense strand starting at position 2183 SEQ ID NO: 3007
aaguguccgcgcgcagaaa

SEQ ID NO: 233635 - RNA, 19 nt, Artificial Sequence
  Description of Artificial Sequence: Synthetic oligonucleotide
  Antisense strand to SEQ ID NO: 233634
uuucugcgcgcggacacuu

SEQ ID NO: 233636 - RNA, 19 nt, Artificial Sequence
  Description of Artificial Sequence: Synthetic oligonucleotide
  Sense strand starting at position 2259 SEQ ID NO: 3007
guagucucuggagauagca

SEQ ID NO: 233637 - RNA, 19 nt, Artificial Sequence
  Description of Artificial Sequence: Synthetic oligonucleotide
  Antisense strand to SEQ ID NO: 233636
ugcuaucuccagagacuac

SEQ ID NO: 233638 - RNA, 19 nt, Artificial Sequence
  Description of Artificial Sequence: Synthetic oligonucleotide
  Sense strand starting at position 2261 SEQ ID NO: 3007
agucucuggagauagcaua

SEQ ID NO: 233639 - RNA, 19 nt, Artificial Sequence
  Description of Artificial Sequence: Synthetic oligonucleotide
  Antisense strand to SEQ ID NO: 233638
uaugcuaucuccagagacu

SEQ ID NO: 233640 - RNA, 19 nt, Artificial Sequence
  Description of Artificial Sequence: Synthetic oligonucleotide
  Sense strand starting at position 2313 SEQ ID NO: 3007
gaauacuuacaucguguau

SEQ ID NO: 233641 - RNA, 19 nt, Artificial Sequence
  Description of Artificial Sequence: Synthetic oligonucleotide
  Antisense strand to SEQ ID NO: 233640
auacacgauguaaguauuc

SEQ ID NO: 233642 - RNA, 19 nt, Artificial Sequence
  Description of Artificial Sequence: Synthetic oligonucleotide
  Sense strand starting at position 2317 SEQ ID NO: 3007
acuuacaucguguauauca

SEQ ID NO: 233643 - RNA, 19 nt, Artificial Sequence
  Description of Artificial Sequence: Synthetic oligonucleotide
  Antisense strand to SEQ ID NO: 233642
ugauauacacgauguaagu

SEQ ID NO: 233644 - RNA, 19 nt, Artificial Sequence
  Description of Artificial Sequence: Synthetic oligonucleotide
  Sense strand starting at position 2328 SEQ ID NO: 3007
guauaucauguugacacuu

SEQ ID NO: 233645 - RNA, 19 nt, Artificial Sequence
  Description of Artificial Sequence: Synthetic oligonucleotide
  Antisense strand to SEQ ID NO: 233644
aagugucaacaugauauac

SEQ ID NO: 233646 - RNA, 19 nt, Artificial Sequence
  Description of Artificial Sequence: Synthetic oligonucleotide
  Sense strand starting at position 2550 SEQ ID NO: 3007
uuuggugugauugaaaugu

SEQ ID NO: 233647 - RNA, 19 nt, Artificial Sequence
  Description of Artificial Sequence: Synthetic oligonucleotide
  Antisense strand to SEQ ID NO: 233646
acauuucaaucacaccaaa

SEQ ID NO: 233648 - RNA, 19 nt, Artificial Sequence
  Description of Artificial Sequence: Synthetic oligonucleotide
  Sense strand starting at position 2663 SEQ ID NO: 3007
accuauuauguaugggaua

SEQ ID NO: 233649 - RNA, 19 nt, Artificial Sequence
  Description of Artificial Sequence: Synthetic oligonucleotide
  Antisense strand to SEQ ID NO: 233648
uaucccauacauaauaggu

SEQ ID NO: 233650 - RNA, 19 nt, Artificial Sequence
  Description of Artificial Sequence: Synthetic oligonucleotide
  Sense strand starting at position 2674 SEQ ID NO: 3007
augggauauuguguuccuu

SEQ ID NO: 233651 - RNA, 19 nt, Artificial Sequence
  Description of Artificial Sequence: Synthetic oligonucleotide
  Antisense strand to SEQ ID NO: 233650
aaggaacacaauaucccau

SEQ ID NO: 233652 - RNA, 19 nt, Artificial Sequence
  Description of Artificial Sequence: Synthetic oligonucleotide
  Sense strand starting at position 2722 SEQ ID NO: 3007
cuggaauacuugccaaucu

SEQ ID NO: 233653 - RNA, 19 nt, Artificial Sequence
  Description of Artificial Sequence: Synthetic oligonucleotide
  Antisense strand to SEQ ID NO: 233652
agauuggcaaguauuccag

SEQ ID NO: 233654 - RNA, 19 nt, Artificial Sequence
  Description of Artificial Sequence: Synthetic oligonucleotide
  Sense strand starting at position 2789 SEQ ID NO: 3007
augauagaguguucuggga

SEQ ID NO: 233655 - RNA, 19 nt, Artificial Sequence
  Description of Artificial Sequence: Synthetic oligonucleotide
  Antisense strand to SEQ ID NO: 233654
ucccagaacacucuaucau

SEQ ID NO: 233656 - RNA, 19 nt, Artificial Sequence
  Description of Artificial Sequence: Synthetic oligonucleotide
  Sense strand starting at position 2793 SEQ ID NO: 3007
uagaguguucugggagacu

SEQ ID NO: 233657 - RNA, 19 nt, Artificial Sequence
  Description of Artificial Sequence: Synthetic oligonucleotide
  Antisense strand to SEQ ID NO: 233656
agucucccagaacacucua

SEQ ID NO: 233658 - RNA, 19 nt, Artificial Sequence
  Description of Artificial Sequence: Synthetic oligonucleotide
  Sense strand starting at position 2933 SEQ ID NO: 3007
uucugaaaccucggaaaua

SEQ ID NO: 233659 - RNA, 19 nt, Artificial Sequence
  Description of Artificial Sequence: Synthetic oligonucleotide
  Antisense strand to SEQ ID NO: 233658
uauuuccgagguuucagaa

SEQ ID NO: 233660 - RNA, 19 nt, Artificial Sequence
  Description of Artificial Sequence: Synthetic oligonucleotide
  Sense strand starting at position 2974 SEQ ID NO: 3007
uagccaacugcucauguga

SEQ ID NO: 233661 - RNA, 19 nt, Artificial Sequence
  Description of Artificial Sequence: Synthetic oligonucleotide
  Antisense strand to SEQ ID NO: 233660
ucacaugagcaguuggcua

SEQ ID NO: 233662 - RNA, 19 nt, Artificial Sequence
  Description of Artificial Sequence: Synthetic oligonucleotide
  Sense strand starting at position 2999 SEQ ID NO: 3007
agggcauacaucugguuga

SEQ ID NO: 233663 - RNA, 19 nt, Artificial Sequence
  Description of Artificial Sequence: Synthetic oligonucleotide
  Antisense strand to SEQ ID NO: 233662
ucaaccagauguaugcccu

SEQ ID NO: 233664 - RNA, 19 nt, Artificial Sequence
  Description of Artificial Sequence: Synthetic oligonucleotide
  Sense strand starting at position 3002 SEQ ID NO: 3007
gcauacaucugguugacuu

SEQ ID NO: 233665 - RNA, 19 nt, Artificial Sequence
  Description of Artificial Sequence: Synthetic oligonucleotide
  Antisense strand to SEQ ID NO: 233664
aagucaaccagauguaugc

SEQ ID NO: 233666 - RNA, 19 nt, Artificial Sequence
  Description of Artificial Sequence: Synthetic oligonucleotide
  Sense strand starting at position 3041 SEQ ID NO: 3007
aguccuuucuuaguuuaaa

SEQ ID NO: 233667 - RNA, 19 nt, Artificial Sequence
  Description of Artificial Sequence: Synthetic oligonucleotide
  Antisense strand to SEQ ID NO: 233666
uuuaaacuaagaaaggacu

SEQ ID NO: 233668 - RNA, 19 nt, Artificial Sequence
  Description of Artificial Sequence: Synthetic oligonucleotide
  Sense strand starting at position 3042 SEQ ID NO: 3007
guccuuucuuaguuuaaag

SEQ ID NO: 233669 - RNA, 19 nt, Artificial Sequence
  Description of Artificial Sequence: Synthetic oligonucleotide
  Antisense strand to SEQ ID NO: 233668
cuuuaaacuaagaaaggac

SEQ ID NO: 233670 - RNA, 19 nt, Artificial Sequence
  Description of Artificial Sequence: Synthetic oligonucleotide
  Sense strand starting at position 3062 SEQ ID NO: 3007
aguguuucuuaauccuaga

SEQ ID NO: 233671 - RNA, 19 nt, Artificial Sequence
  Description of Artificial Sequence: Synthetic oligonucleotide
  Antisense strand to SEQ ID NO: 233670
ucuaggauuaagaaacacu

SEQ ID NO: 233672 - RNA, 19 nt, Artificial Sequence
  Description of Artificial Sequence: Synthetic oligonucleotide
  Sense strand starting at position 3067 SEQ ID NO: 3007
uucuuaauccuagaugugu

SEQ ID NO: 233673 - RNA, 19 nt, Artificial Sequence
  Description of Artificial Sequence: Synthetic oligonucleotide
  Antisense strand to SEQ ID NO: 233672
acacaucuaggauuaagaa

SEQ ID NO: 233674 - RNA, 19 nt, Artificial Sequence
  Description of Artificial Sequence: Synthetic oligonucleotide
  Sense strand starting at position 3073 SEQ ID NO: 3007
auccuagauguguaucaga

SEQ ID NO: 233675 - RNA, 19 nt, Artificial Sequence
  Description of Artificial Sequence: Synthetic oligonucleotide
  Antisense strand to SEQ ID NO: 233674
ucugauacacaucuaggau

SEQ ID NO: 233676 - RNA, 19 nt, Artificial Sequence
  Description of Artificial Sequence: Synthetic oligonucleotide
  Sense strand starting at position 3086 SEQ ID NO: 3007
aucagauucgcuugggaag

SEQ ID NO: 233677 - RNA, 19 nt, Artificial Sequence
  Description of Artificial Sequence: Synthetic oligonucleotide
  Antisense strand to SEQ ID NO: 233676
cuucccaagcgaaucugau

SEQ ID NO: 233678 - RNA, 19 nt, Artificial Sequence
  Description of Artificial Sequence: Synthetic oligonucleotide
  Sense strand starting at position 3214 SEQ ID NO: 3007
uugauaugcagguaagguu

SEQ ID NO: 233679 - RNA, 19 nt, Artificial Sequence
  Description of Artificial Sequence: Synthetic oligonucleotide
  Antisense strand to SEQ ID NO: 233678
aaccuuaccugcauaucaa

SEQ ID NO: 233680 - RNA, 19 nt, Artificial Sequence
  Description of Artificial Sequence: Synthetic oligonucleotide
  Sense strand starting at position 3255 SEQ ID NO: 3007
aguguuucuggacaaggua

SEQ ID NO: 233681 - RNA, 19 nt, Artificial Sequence
  Description of Artificial Sequence: Synthetic oligonucleotide
  Antisense strand to SEQ ID NO: 233680
uaccuuguccagaaacacu

SEQ ID NO: 233682 - RNA, 19 nt, Artificial Sequence
  Description of Artificial Sequence: Synthetic oligonucleotide
  Sense strand starting at position 3350 SEQ ID NO: 3007
agaacuauuuguggaauug

SEQ ID NO: 233683 - RNA, 19 nt, Artificial Sequence
  Description of Artificial Sequence: Synthetic oligonucleotide
  Antisense strand to SEQ ID NO: 233682
caauuccacaaauaguucu

SEQ ID NO: 233684 - RNA, 19 nt, Artificial Sequence
  Description of Artificial Sequence: Synthetic oligonucleotide
  Sense strand starting at position 3362 SEQ ID NO: 3007
ggaauugacaagugacuuu

SEQ ID NO: 233685 - RNA, 19 nt, Artificial Sequence
  Description of Artificial Sequence: Synthetic oligonucleotide
  Antisense strand to SEQ ID NO: 233684
aaagucacuugucaauucc

SEQ ID NO: 233686 - RNA, 19 nt, Artificial Sequence
  Description of Artificial Sequence: Synthetic oligonucleotide
  Sense strand starting at position 3412 SEQ ID NO: 3007
auacaucauguauguucua

SEQ ID NO: 233687 - RNA, 19 nt, Artificial Sequence
  Description of Artificial Sequence: Synthetic oligonucleotide
  Antisense strand to SEQ ID NO: 233686
uagaacauacaugauguau

SEQ ID NO: 233688 - RNA, 19 nt, Artificial Sequence
  Description of Artificial Sequence: Synthetic oligonucleotide
  Sense strand starting at position 3545 SEQ ID NO: 3007
auguguuacugaucugaga

SEQ ID NO: 233689 - RNA, 19 nt, Artificial Sequence
  Description of Artificial Sequence: Synthetic oligonucleotide
  Antisense strand to SEQ ID NO: 233688
ucucagaucaguaacacau

SEQ ID NO: 233690 - RNA, 19 nt, Artificial Sequence
  Description of Artificial Sequence: Synthetic oligonucleotide
  Sense strand starting at position 3547 SEQ ID NO: 3007
guguuacugaucugagaga

SEQ ID NO: 233691 - RNA, 19 nt, Artificial Sequence
  Description of Artificial Sequence: Synthetic oligonucleotide
  Antisense strand to SEQ ID NO: 233690
ucucucagaucaguaacac

SEQ ID NO: 233692 - RNA, 19 nt, Artificial Sequence
  Description of Artificial Sequence: Synthetic oligonucleotide
  Sense strand starting at position 3687 SEQ ID NO: 3007
agacauauacuuuggaucu

SEQ ID NO: 233693 - RNA, 19 nt, Artificial Sequence
  Description of Artificial Sequence: Synthetic oligonucleotide
  Antisense strand to SEQ ID NO: 233692
agauccaaaguauaugucu

SEQ ID NO: 233694 - RNA, 19 nt, Artificial Sequence
  Description of Artificial Sequence: Synthetic oligonucleotide
  Sense strand starting at position 3697 SEQ ID NO: 3007
uuuggaucugauugacuca

SEQ ID NO: 233695 - RNA, 19 nt, Artificial Sequence
  Description of Artificial Sequence: Synthetic oligonucleotide
  Antisense strand to SEQ ID NO: 233694
ugagucaaucagauccaaa

SEQ ID NO: 233696 - RNA, 19 nt, Artificial Sequence
  Description of Artificial Sequence: Synthetic oligonucleotide
  Sense strand starting at position 3817 SEQ ID NO: 3007
ggcuauauuucugccagua

SEQ ID NO: 233697 - RNA, 19 nt, Artificial Sequence
  Description of Artificial Sequence: Synthetic oligonucleotide
  Antisense strand to SEQ ID NO: 233696
uacuggcagaaauauagcc

SEQ ID NO: 233698 - RNA, 19 nt, Artificial Sequence
  Description of Artificial Sequence: Synthetic oligonucleotide
  Sense strand starting at position 3829 SEQ ID NO: 3007
gccaguaaccaagaccuuu

SEQ ID NO: 233699 - RNA, 19 nt, Artificial Sequence
  Description of Artificial Sequence: Synthetic oligonucleotide
  Antisense strand to SEQ ID NO: 233698
aaaggucuugguuacuggc

SEQ ID NO: 233700 - RNA, 19 nt, Artificial Sequence
  Description of Artificial Sequence: Synthetic oligonucleotide
  Sense strand starting at position 3919 SEQ ID NO: 3007
ugugcaaaucuaugaacca

SEQ ID NO: 233701 - RNA, 19 nt, Artificial Sequence
  Description of Artificial Sequence: Synthetic oligonucleotide
  Antisense strand to SEQ ID NO: 233700
ugguucauagauuugcaca

SEQ ID NO: 233702 - RNA, 19 nt, Artificial Sequence
  Description of Artificial Sequence: Synthetic oligonucleotide
  Sense strand starting at position 3979 SEQ ID NO: 3007
uuugguuguuauuugugau

SEQ ID NO: 233703 - RNA, 19 nt, Artificial Sequence
  Description of Artificial Sequence: Synthetic oligonucleotide
  Antisense strand to SEQ ID NO: 233702
aucacaaauaacaaccaaa

SEQ ID NO: 233704 - RNA, 19 nt, Artificial Sequence
  Description of Artificial Sequence: Synthetic oligonucleotide
  Sense strand starting at position 3980 SEQ ID NO: 3007
uugguuguuauuugugauu

SEQ ID NO: 233705 - RNA, 19 nt, Artificial Sequence
  Description of Artificial Sequence: Synthetic oligonucleotide
  Antisense strand to SEQ ID NO: 233704
aaucacaaauaacaaccaa

SEQ ID NO: 233706 - RNA, 19 nt, Artificial Sequence
  Description of Artificial Sequence: Synthetic oligonucleotide
  Sense strand starting at position 95 SEQ ID NO: 3008
gacaguuguuaauccuaug

SEQ ID NO: 233707 - RNA, 19 nt, Artificial Sequence
  Description of Artificial Sequence: Synthetic oligonucleotide
  Antisense strand to SEQ ID NO: 233706
cauaggauuaacaacuguc

SEQ ID NO: 233708 - RNA, 19 nt, Artificial Sequence
  Description of Artificial Sequence: Synthetic oligonucleotide
  Sense strand starting at position 143 SEQ ID NO: 3008
cugacagaguugcuauaau

SEQ ID NO: 233709 - RNA, 19 nt, Artificial Sequence
  Description of Artificial Sequence: Synthetic oligonucleotide
  Antisense strand to SEQ ID NO: 233708
auuauagcaacucugucag

SEQ ID NO: 233710 - RNA, 19 nt, Artificial Sequence
  Description of Artificial Sequence: Synthetic oligonucleotide
  Sense strand starting at position 196 SEQ ID NO: 3008
agaacuuugaaguggcuaa

SEQ ID NO: 233711 - RNA, 19 nt, Artificial Sequence
  Description of Artificial Sequence: Synthetic oligonucleotide
  Antisense strand to SEQ ID NO: 233710
uuagccacuucaaaguucu

SEQ ID NO: 233712 - RNA, 19 nt, Artificial Sequence
  Description of Artificial Sequence: Synthetic oligonucleotide
  Sense strand starting at position 222 SEQ ID NO: 3008
guguuaacugccgcugaca

SEQ ID NO: 233713 - RNA, 19 nt, Artificial Sequence
  Description of Artificial Sequence: Synthetic oligonucleotide
  Antisense strand to SEQ ID NO: 233712
ugucagcggcaguuaacac

SEQ ID NO: 233714 - RNA, 19 nt, Artificial Sequence
  Description of Artificial Sequence: Synthetic oligonucleotide
  Sense strand starting at position 225 SEQ ID NO: 3008
uuaacugccgcugacaaau

SEQ ID NO: 233715 - RNA, 19 nt, Artificial Sequence
  Description of Artificial Sequence: Synthetic oligonucleotide
  Antisense strand to SEQ ID NO: 233714
auuugucagcggcaguuaa

SEQ ID NO: 233716 - RNA, 19 nt, Artificial Sequence
  Description of Artificial Sequence: Synthetic oligonucleotide
  Sense strand starting at position 287 SEQ ID NO: 3008
cuaacaguuuaagauuuga

SEQ ID NO: 233717 - RNA, 19 nt, Artificial Sequence
  Description of Artificial Sequence: Synthetic oligonucleotide
  Antisense strand to SEQ ID NO: 233716
ucaaaucuuaaacuguuag

SEQ ID NO: 233718 - RNA, 19 nt, Artificial Sequence
  Description of Artificial Sequence: Synthetic oligonucleotide
  Sense strand starting at position 303 SEQ ID NO: 3008
ugagacugcuuucuaauaa

SEQ ID NO: 233719 - RNA, 19 nt, Artificial Sequence
  Description of Artificial Sequence: Synthetic oligonucleotide
  Antisense strand to SEQ ID NO: 233718
uuauuagaaagcagucuca

SEQ ID NO: 233720 - RNA, 19 nt, Artificial Sequence
  Description of Artificial Sequence: Synthetic oligonucleotide
  Sense strand starting at position 411 SEQ ID NO: 3008
agaagacucuaggaacuaa

SEQ ID NO: 233721 - RNA, 19 nt, Artificial Sequence
  Description of Artificial Sequence: Synthetic oligonucleotide
  Antisense strand to SEQ ID NO: 233720
uuaguuccuagagucuucu

SEQ ID NO: 233722 - RNA, 19 nt, Artificial Sequence
  Description of Artificial Sequence: Synthetic oligonucleotide
  Sense strand starting at position 422 SEQ ID NO: 3008
ggaacuaauuugggaaaga

SEQ ID NO: 233723 - RNA, 19 nt, Artificial Sequence
  Description of Artificial Sequence: Synthetic oligonucleotide
  Antisense strand to SEQ ID NO: 233722
ucuuucccaaauuaguucc

SEQ ID NO: 233724 - RNA, 19 nt, Artificial Sequence
  Description of Artificial Sequence: Synthetic oligonucleotide
  Sense strand starting at position 431 SEQ ID NO: 3008
uugggaaagauucguuucu

SEQ ID NO: 233725 - RNA, 19 nt, Artificial Sequence
  Description of Artificial Sequence: Synthetic oligonucleotide
  Antisense strand to SEQ ID NO: 233724
agaaacgaaucuuucccaa

SEQ ID NO: 233726 - RNA, 19 nt, Artificial Sequence
  Description of Artificial Sequence: Synthetic oligonucleotide
  Sense strand starting at position 432 SEQ ID NO: 3008
ugggaaagauucguuucuu

SEQ ID NO: 233727 - RNA, 19 nt, Artificial Sequence
  Description of Artificial Sequence: Synthetic oligonucleotide
  Antisense strand to SEQ ID NO: 233726
aagaaacgaaucuuuccca

SEQ ID NO: 233728 - RNA, 19 nt, Artificial Sequence
  Description of Artificial Sequence: Synthetic oligonucleotide
  Sense strand starting at position 433 SEQ ID NO: 3008
gggaaagauucguuucuuu

SEQ ID NO: 233729 - RNA, 19 nt, Artificial Sequence
  Description of Artificial Sequence: Synthetic oligonucleotide
  Antisense strand to SEQ ID NO: 233728
aaagaaacgaaucuuuccc

SEQ ID NO: 233730 - RNA, 19 nt, Artificial Sequence
  Description of Artificial Sequence: Synthetic oligonucleotide
  Sense strand starting at position 655 SEQ ID NO: 3008
cucggcuuccuccauaaca

SEQ ID NO: 233731 - RNA, 19 nt, Artificial Sequence
  Description of Artificial Sequence: Synthetic oligonucleotide
  Antisense strand to SEQ ID NO: 233730
uguuauggaggaagccgag

SEQ ID NO: 233732 - RNA, 19 nt, Artificial Sequence
  Description of Artificial Sequence: Synthetic oligonucleotide
  Sense strand starting at position 657 SEQ ID NO: 3008
cggcuuccuccauaacaag

SEQ ID NO: 233733 - RNA, 19 nt, Artificial Sequence
  Description of Artificial Sequence: Synthetic oligonucleotide
  Antisense strand to SEQ ID NO: 233732
cuuguuauggaggaagccg

SEQ ID NO: 233734 - RNA, 19 nt, Artificial Sequence
  Description of Artificial Sequence: Synthetic oligonucleotide
  Sense strand starting at position 1082 SEQ ID NO: 3008
ucuguucuuggugaaguau

SEQ ID NO: 233735 - RNA, 19 nt, Artificial Sequence
  Description of Artificial Sequence: Synthetic oligonucleotide
  Antisense strand to SEQ ID NO: 233734
auacuucaccaagaacaga

SEQ ID NO: 233736 - RNA, 19 nt, Artificial Sequence
  Description of Artificial Sequence: Synthetic oligonucleotide
  Sense strand starting at position 1111 SEQ ID NO: 3008
ccuaaagaggucugaacca

SEQ ID NO: 233737 - RNA, 19 nt, Artificial Sequence
  Description of Artificial Sequence: Synthetic oligonucleotide
  Antisense strand to SEQ ID NO: 233736
ugguucagaccucuuuagg

SEQ ID NO: 233738 - RNA, 19 nt, Artificial Sequence
  Description of Artificial Sequence: Synthetic oligonucleotide
  Sense strand starting at position 1138 SEQ ID NO: 3008
ucuuccaaguuaguuagaa

SEQ ID NO: 233739 - RNA, 19 nt, Artificial Sequence
  Description of Artificial Sequence: Synthetic oligonucleotide
  Antisense strand to SEQ ID NO: 233738
uucuaacuaacuuggaaga

SEQ ID NO: 233740 - RNA, 19 nt, Artificial Sequence
  Description of Artificial Sequence: Synthetic oligonucleotide
  Sense strand starting at position 1139 SEQ ID NO: 3008
cuuccaaguuaguuagaaa

SEQ ID NO: 233741 - RNA, 19 nt, Artificial Sequence
  Description of Artificial Sequence: Synthetic oligonucleotide
  Antisense strand to SEQ ID NO: 233740
uuucuaacuaacuuggaag

SEQ ID NO: 233742 - RNA, 19 nt, Artificial Sequence
  Description of Artificial Sequence: Synthetic oligonucleotide
  Sense strand starting at position 1309 SEQ ID NO: 3008
uuugguuaauuccuagaag

SEQ ID NO: 233743 - RNA, 19 nt, Artificial Sequence
  Description of Artificial Sequence: Synthetic oligonucleotide
  Antisense strand to SEQ ID NO: 233742
cuucuaggaauuaaccaaa

SEQ ID NO: 233744 - RNA, 19 nt, Artificial Sequence
  Description of Artificial Sequence: Synthetic oligonucleotide
  Sense strand starting at position 1341 SEQ ID NO: 3008
ugcagaauuuauuagaaca

SEQ ID NO: 233745 - RNA, 19 nt, Artificial Sequence
  Description of Artificial Sequence: Synthetic oligonucleotide
  Antisense strand to SEQ ID NO: 233744
uguucuaauaaauucugca

SEQ ID NO: 233746 - RNA, 19 nt, Artificial Sequence
  Description of Artificial Sequence: Synthetic oligonucleotide
  Sense strand starting at position 2263 SEQ ID NO: 3008
uuccuuugcggucaucaaa

SEQ ID NO: 233747 - RNA, 19 nt, Artificial Sequence
  Description of Artificial Sequence: Synthetic oligonucleotide
  Antisense strand to SEQ ID NO: 233746
uuugaugaccgcaaaggaa

SEQ ID NO: 233748 - RNA, 19 nt, Artificial Sequence
  Description of Artificial Sequence: Synthetic oligonucleotide
  Sense strand starting at position 2266 SEQ ID NO: 3008
cuuugcggucaucaaacuu

SEQ ID NO: 233749 - RNA, 19 nt, Artificial Sequence
  Description of Artificial Sequence: Synthetic oligonucleotide
  Antisense strand to SEQ ID NO: 233748
aaguuugaugaccgcaaag

SEQ ID NO: 233750 - RNA, 19 nt, Artificial Sequence
  Description of Artificial Sequence: Synthetic oligonucleotide
  Sense strand starting at position 2450 SEQ ID NO: 3008
gggaaucucugcuuauagg

SEQ ID NO: 233751 - RNA, 19 nt, Artificial Sequence
  Description of Artificial Sequence: Synthetic oligonucleotide
  Antisense strand to SEQ ID NO: 233750
ccuauaagcagagauuccc

SEQ ID NO: 233752 - RNA, 19 nt, Artificial Sequence
  Description of Artificial Sequence: Synthetic oligonucleotide
  Sense strand starting at position 2459 SEQ ID NO: 3008
ugcuuauaggaguguauuu

SEQ ID NO: 233753 - RNA, 19 nt, Artificial Sequence
  Description of Artificial Sequence: Synthetic oligonucleotide
  Antisense strand to SEQ ID NO: 233752
aaauacacuccuauaagca

SEQ ID NO: 233754 - RNA, 19 nt, Artificial Sequence
  Description of Artificial Sequence: Synthetic oligonucleotide
  Sense strand starting at position 2669 SEQ ID NO: 3008
ccugucuggcucugagaaa

SEQ ID NO: 233755 - RNA, 19 nt, Artificial Sequence
  Description of Artificial Sequence: Synthetic oligonucleotide
  Antisense strand to SEQ ID NO: 233754
uuucucagagccagacagg

SEQ ID NO: 233756 - RNA, 19 nt, Artificial Sequence
  Description of Artificial Sequence: Synthetic oligonucleotide
  Sense strand starting at position 2740 SEQ ID NO: 3008
cuacuaaguaccgggaguu

SEQ ID NO: 233757 - RNA, 19 nt, Artificial Sequence
  Description of Artificial Sequence: Synthetic oligonucleotide
  Antisense strand to SEQ ID NO: 233756
aacucccgguacuuaguag

SEQ ID NO: 233758 - RNA, 19 nt, Artificial Sequence
  Description of Artificial Sequence: Synthetic oligonucleotide
  Sense strand starting at position 2894 SEQ ID NO: 3008
aagugaaaucacugugaac

SEQ ID NO: 233759 - RNA, 19 nt, Artificial Sequence
  Description of Artificial Sequence: Synthetic oligonucleotide
  Antisense strand to SEQ ID NO: 233758
guucacagugauuucacuu

SEQ ID NO: 233760 - RNA, 19 nt, Artificial Sequence
  Description of Artificial Sequence: Synthetic oligonucleotide
  Sense strand starting at position 2896 SEQ ID NO: 3008
gugaaaucacugugaacaa

SEQ ID NO: 233761 - RNA, 19 nt, Artificial Sequence
  Description of Artificial Sequence: Synthetic oligonucleotide
  Antisense strand to SEQ ID NO: 233760
uuguucacagugauuucac

SEQ ID NO: 233762 - RNA, 19 nt, Artificial Sequence
  Description of Artificial Sequence: Synthetic oligonucleotide
  Sense strand starting at position 3194 SEQ ID NO: 3008
uguggaaaguucuccuuua

SEQ ID NO: 233763 - RNA, 19 nt, Artificial Sequence
  Description of Artificial Sequence: Synthetic oligonucleotide
  Antisense strand to SEQ ID NO: 233762
uaaaggagaacuuuccaca

SEQ ID NO: 233764 - RNA, 19 nt, Artificial Sequence
  Description of Artificial Sequence: Synthetic oligonucleotide
  Sense strand starting at position 3195 SEQ ID NO: 3008
guggaaaguucuccuuuaa

SEQ ID NO: 233765 - RNA, 19 nt, Artificial Sequence
  Description of Artificial Sequence: Synthetic oligonucleotide
  Antisense strand to SEQ ID NO: 233764
uuaaaggagaacuuuccac

SEQ ID NO: 233766 - RNA, 19 nt, Artificial Sequence
  Description of Artificial Sequence: Synthetic oligonucleotide
  Sense strand starting at position 3512 SEQ ID NO: 3008
caguaauugccacaggagu

SEQ ID NO: 233767 - RNA, 19 nt, Artificial Sequence
  Description of Artificial Sequence: Synthetic oligonucleotide
  Antisense strand to SEQ ID NO: 233766
acuccuguggcaauuacug

SEQ ID NO: 233768 - RNA, 19 nt, Artificial Sequence
  Description of Artificial Sequence: Synthetic oligonucleotide
  Sense strand starting at position 3514 SEQ ID NO: 3008
guaauugccacaggaguaa

SEQ ID NO: 233769 - RNA, 19 nt, Artificial Sequence
  Description of Artificial Sequence: Synthetic oligonucleotide
  Antisense strand to SEQ ID NO: 233768
uuacuccuguggcaauuac

SEQ ID NO: 233770 - RNA, 19 nt, Artificial Sequence
  Description of Artificial Sequence: Synthetic oligonucleotide
  Sense strand starting at position 3532 SEQ ID NO: 3008
auuagaacucuguguucua

SEQ ID NO: 233771 - RNA, 19 nt, Artificial Sequence
  Description of Artificial Sequence: Synthetic oligonucleotide
  Antisense strand to SEQ ID NO: 233770
uagaacacagaguucuaau

SEQ ID NO: 233772 - RNA, 19 nt, Artificial Sequence
  Description of Artificial Sequence: Synthetic oligonucleotide
  Sense strand starting at position 3533 SEQ ID NO: 3008
uuagaacucuguguucuau

SEQ ID NO: 233773 - RNA, 19 nt, Artificial Sequence
  Description of Artificial Sequence: Synthetic oligonucleotide
  Antisense strand to SEQ ID NO: 233772
auagaacacagaguucuaa

SEQ ID NO: 233774 - RNA, 19 nt, Artificial Sequence
  Description of Artificial Sequence: Synthetic oligonucleotide
  Sense strand starting at position 3535 SEQ ID NO: 3008
agaacucuguguucuauaa

SEQ ID NO: 233775 - RNA, 19 nt, Artificial Sequence
  Description of Artificial Sequence: Synthetic oligonucleotide
  Antisense strand to SEQ ID NO: 233774
uuauagaacacagaguucu

SEQ ID NO: 233776 - RNA, 19 nt, Artificial Sequence
  Description of Artificial Sequence: Synthetic oligonucleotide
  Sense strand starting at position 3741 SEQ ID NO: 3008
uuagaauccugucuggguu

SEQ ID NO: 233777 - RNA, 19 nt, Artificial Sequence
  Description of Artificial Sequence: Synthetic oligonucleotide
  Antisense strand to SEQ ID NO: 233776
aacccagacaggauucuaa

SEQ ID NO: 233778 - RNA, 19 nt, Artificial Sequence
  Description of Artificial Sequence: Synthetic oligonucleotide
  Sense strand starting at position 3742 SEQ ID NO: 3008
uagaauccugucuggguua

SEQ ID NO: 233779 - RNA, 19 nt, Artificial Sequence
  Description of Artificial Sequence: Synthetic oligonucleotide
  Antisense strand to SEQ ID NO: 233778
uaacccagacaggauucua

SEQ ID NO: 233780 - RNA, 19 nt, Artificial Sequence
  Description of Artificial Sequence: Synthetic oligonucleotide
  Sense strand starting at position 3744 SEQ ID NO: 3008
gaauccugucuggguuaga

SEQ ID NO: 233781 - RNA, 19 nt, Artificial Sequence
  Description of Artificial Sequence: Synthetic oligonucleotide
  Antisense strand to SEQ ID NO: 233780
ucuaacccagacaggauuc

SEQ ID NO: 233782 - RNA, 19 nt, Artificial Sequence
  Description of Artificial Sequence: Synthetic oligonucleotide
  Sense strand starting at position 3840 SEQ ID NO: 3008
uugguaaauuucugggaag

SEQ ID NO: 233783 - RNA, 19 nt, Artificial Sequence
  Description of Artificial Sequence: Synthetic oligonucleotide
  Antisense strand to SEQ ID NO: 233782
cuucccagaaauuuaccaa

SEQ ID NO: 233784 - RNA, 19 nt, Artificial Sequence
  Description of Artificial Sequence: Synthetic oligonucleotide
  Sense strand starting at position 3895 SEQ ID NO: 3008
uccggauguaagcaagaua

SEQ ID NO: 233785 - RNA, 19 nt, Artificial Sequence
  Description of Artificial Sequence: Synthetic oligonucleotide
  Antisense strand to SEQ ID NO: 233784
uaucuugcuuacauccgga

SEQ ID NO: 233786 - RNA, 19 nt, Artificial Sequence
  Description of Artificial Sequence: Synthetic oligonucleotide
  Sense strand starting at position 209 SEQ ID NO: 3009
ugugaugucaccugagaag

SEQ ID NO: 233787 - RNA, 19 nt, Artificial Sequence
  Description of Artificial Sequence: Synthetic oligonucleotide
  Antisense strand to SEQ ID NO: 233786
cuucucaggugacaucaca

SEQ ID NO: 233788 - RNA, 19 nt, Artificial Sequence
  Description of Artificial Sequence: Synthetic oligonucleotide
  Sense strand starting at position 318 SEQ ID NO: 3009
ucauaauguugcccuugga

SEQ ID NO: 233789 - RNA, 19 nt, Artificial Sequence
  Description of Artificial Sequence: Synthetic oligonucleotide
  Antisense strand to SEQ ID NO: 233788
uccaagggcaacauuauga

SEQ ID NO: 233790 - RNA, 19 nt, Artificial Sequence
  Description of Artificial Sequence: Synthetic oligonucleotide
  Sense strand starting at position 547 SEQ ID NO: 3009
cuggcaguacaaugaauua

SEQ ID NO: 233791 - RNA, 19 nt, Artificial Sequence
  Description of Artificial Sequence: Synthetic oligonucleotide
  Antisense strand to SEQ ID NO: 233790
uaauucauuguacugccag

SEQ ID NO: 233792 - RNA, 19 nt, Artificial Sequence
  Description of Artificial Sequence: Synthetic oligonucleotide
  Sense strand starting at position 671 SEQ ID NO: 3009
cugggcuugaacuguuuga

SEQ ID NO: 233793 - RNA, 19 nt, Artificial Sequence
  Description of Artificial Sequence: Synthetic oligonucleotide
  Antisense strand to SEQ ID NO: 233792
ucaaacaguucaagcccag

SEQ ID NO: 233794 - RNA, 19 nt, Artificial Sequence
  Description of Artificial Sequence: Synthetic oligonucleotide
  Sense strand starting at position 675 SEQ ID NO: 3009
gcuugaacuguuugaaggu

SEQ ID NO: 233795 - RNA, 19 nt, Artificial Sequence
  Description of Artificial Sequence: Synthetic oligonucleotide
  Antisense strand to SEQ ID NO: 233794
accuucaaacaguucaagc

SEQ ID NO: 233796 - RNA, 19 nt, Artificial Sequence
  Description of Artificial Sequence: Synthetic oligonucleotide
  Sense strand starting at position 699 SEQ ID NO: 3009
gucagaacccuugagaguu

SEQ ID NO: 233797 - RNA, 19 nt, Artificial Sequence
  Description of Artificial Sequence: Synthetic oligonucleotide
  Antisense strand to SEQ ID NO: 233796
aacucucaaggguucugac

SEQ ID NO: 233798 - RNA, 19 nt, Artificial Sequence
  Description of Artificial Sequence: Synthetic oligonucleotide
  Sense strand starting at position 1073 SEQ ID NO: 3009
gcagaagggugauucauac

SEQ ID NO: 233799 - RNA, 19 nt, Artificial Sequence
  Description of Artificial Sequence: Synthetic oligonucleotide
  Antisense strand to SEQ ID NO: 233798
guaugaaucacccuucugc

SEQ ID NO: 233800 - RNA, 19 nt, Artificial Sequence
  Description of Artificial Sequence: Synthetic oligonucleotide
  Sense strand starting at position 1086 SEQ ID NO: 3009
ucauacuugcugggaaaug

SEQ ID NO: 233801 - RNA, 19 nt, Artificial Sequence
  Description of Artificial Sequence: Synthetic oligonucleotide
  Antisense strand to SEQ ID NO: 233800
cauuucccagcaaguauga

SEQ ID NO: 233802 - RNA, 19 nt, Artificial Sequence
  Description of Artificial Sequence: Synthetic oligonucleotide
  Sense strand starting at position 1103 SEQ ID NO: 3009
uggaguagccaaugacgau

SEQ ID NO: 233803 - RNA, 19 nt, Artificial Sequence
  Description of Artificial Sequence: Synthetic oligonucleotide
  Antisense strand to SEQ ID NO: 233802
aucgucauuggcuacucca

SEQ ID NO: 233804 - RNA, 19 nt, Artificial Sequence
  Description of Artificial Sequence: Synthetic oligonucleotide
  Sense strand starting at position 1170 SEQ ID NO: 3009
gugagugaccgucacauuc

SEQ ID NO: 233805 - RNA, 19 nt, Artificial Sequence
  Description of Artificial Sequence: Synthetic oligonucleotide
  Antisense strand to SEQ ID NO: 233804
gaaugugacggucacucac

SEQ ID NO: 233806 - RNA, 19 nt, Artificial Sequence
  Description of Artificial Sequence: Synthetic oligonucleotide
  Sense strand starting at position 2285 SEQ ID NO: 3009
gggagauaauaauugcuuu

SEQ ID NO: 233807 - RNA, 19 nt, Artificial Sequence
  Description of Artificial Sequence: Synthetic oligonucleotide
  Antisense strand to SEQ ID NO: 233806
aaagcaauuauuaucuccc

SEQ ID NO: 233808 - RNA, 19 nt, Artificial Sequence
  Description of Artificial Sequence: Synthetic oligonucleotide
  Sense strand starting at position 2369 SEQ ID NO: 3009
uuccguucgcuuucucauu

SEQ ID NO: 233809 - RNA, 19 nt, Artificial Sequence
  Description of Artificial Sequence: Synthetic oligonucleotide
  Antisense strand to SEQ ID NO: 233808
aaugagaaagcgaacggaa

SEQ ID NO: 233810 - RNA, 19 nt, Artificial Sequence
  Description of Artificial Sequence: Synthetic oligonucleotide
  Sense strand starting at position 2431 SEQ ID NO: 3009
ugugucuggcauuauauua

SEQ ID NO: 233811 - RNA, 19 nt, Artificial Sequence
  Description of Artificial Sequence: Synthetic oligonucleotide
  Antisense strand to SEQ ID NO: 233810
uaauauaaugccagacaca

SEQ ID NO: 233812 - RNA, 19 nt, Artificial Sequence
  Description of Artificial Sequence: Synthetic oligonucleotide
  Sense strand starting at position 2455 SEQ ID NO: 3009
uggagauacagugauuguu

SEQ ID NO: 233813 - RNA, 19 nt, Artificial Sequence
  Description of Artificial Sequence: Synthetic oligonucleotide
  Antisense strand to SEQ ID NO: 233812
aacaaucacuguaucucca

SEQ ID NO: 233814 - RNA, 19 nt, Artificial Sequence
  Description of Artificial Sequence: Synthetic oligonucleotide
  Sense strand starting at position 2457 SEQ ID NO: 3009
gagauacagugauuguuaa

SEQ ID NO: 233815 - RNA, 19 nt, Artificial Sequence
  Description of Artificial Sequence: Synthetic oligonucleotide
  Antisense strand to SEQ ID NO: 233814
uuaacaaucacuguaucuc

SEQ ID NO: 233816 - RNA, 19 nt, Artificial Sequence
  Description of Artificial Sequence: Synthetic oligonucleotide
  Sense strand starting at position 2482 SEQ ID NO: 3009
ugggcuucucgggagaauc

SEQ ID NO: 233817 - RNA, 19 nt, Artificial Sequence
  Description of Artificial Sequence: Synthetic oligonucleotide
  Antisense strand to SEQ ID NO: 233816
gauucucccgagaagccca

SEQ ID NO: 233818 - RNA, 19 nt, Artificial Sequence
  Description of Artificial Sequence: Synthetic oligonucleotide
  Sense strand starting at position 2484 SEQ ID NO: 3009
ggcuucucgggagaaucaa

SEQ ID NO: 233819 - RNA, 19 nt, Artificial Sequence
  Description of Artificial Sequence: Synthetic oligonucleotide
  Antisense strand to SEQ ID NO: 233818
uugauucucccgagaagcc

SEQ ID NO: 233820 - RNA, 19 nt, Artificial Sequence
  Description of Artificial Sequence: Synthetic oligonucleotide
  Sense strand starting at position 2595 SEQ ID NO: 3009
uggagaaacugguuuaucu

SEQ ID NO: 233821 - RNA, 19 nt, Artificial Sequence
  Description of Artificial Sequence: Synthetic oligonucleotide
  Antisense strand to SEQ ID NO: 233820
agauaaaccaguuucucca

SEQ ID NO: 233822 - RNA, 19 nt, Artificial Sequence
  Description of Artificial Sequence: Synthetic oligonucleotide
  Sense strand starting at position 2597 SEQ ID NO: 3009
gagaaacugguuuaucugu

SEQ ID NO: 233823 - RNA, 19 nt, Artificial Sequence
  Description of Artificial Sequence: Synthetic oligonucleotide
  Antisense strand to SEQ ID NO: 233822
acagauaaaccaguuucuc

SEQ ID NO: 233824 - RNA, 19 nt, Artificial Sequence
  Description of Artificial Sequence: Synthetic oligonucleotide
  Sense strand starting at position 2649 SEQ ID NO: 3009
ugaaaucucacaggguugu

SEQ ID NO: 233825 - RNA, 19 nt, Artificial Sequence
  Description of Artificial Sequence: Synthetic oligonucleotide
  Antisense strand to SEQ ID NO: 233824
acaacccugugagauuuca

SEQ ID NO: 233826 - RNA, 19 nt, Artificial Sequence
  Description of Artificial Sequence: Synthetic oligonucleotide
  Sense strand starting at position 2650 SEQ ID NO: 3009
gaaaucucacaggguuguu

SEQ ID NO: 233827 - RNA, 19 nt, Artificial Sequence
  Description of Artificial Sequence: Synthetic oligonucleotide
  Antisense strand to SEQ ID NO: 233826
aacaacccugugagauuuc

SEQ ID NO: 233828 - RNA, 19 nt, Artificial Sequence
  Description of Artificial Sequence: Synthetic oligonucleotide
  Sense strand starting at position 2674 SEQ ID NO: 3009
gcucaaaugagacgggaaa

SEQ ID NO: 233829 - RNA, 19 nt, Artificial Sequence
  Description of Artificial Sequence: Synthetic oligonucleotide
  Antisense strand to SEQ ID NO: 233828
uuucccgucucauuugagc

SEQ ID NO: 233830 - RNA, 19 nt, Artificial Sequence
  Description of Artificial Sequence: Synthetic oligonucleotide
  Sense strand starting at position 2712 SEQ ID NO: 3009
acacuaugugacuggauga

SEQ ID NO: 233831 - RNA, 19 nt, Artificial Sequence
  Description of Artificial Sequence: Synthetic oligonucleotide
  Antisense strand to SEQ ID NO: 233830
ucauccagucacauagugu

SEQ ID NO: 233832 - RNA, 19 nt, Artificial Sequence
  Description of Artificial Sequence: Synthetic oligonucleotide
  Sense strand starting at position 2793 SEQ ID NO: 3009
auuauaucaugcuuugguu

SEQ ID NO: 233833 - RNA, 19 nt, Artificial Sequence
  Description of Artificial Sequence: Synthetic oligonucleotide
  Antisense strand to SEQ ID NO: 233832
aaccaaagcaugauauaau

SEQ ID NO: 233834 - RNA, 19 nt, Artificial Sequence
  Description of Artificial Sequence: Synthetic oligonucleotide
  Sense strand starting at position 2805 SEQ ID NO: 3009
uuugguugagcuugaaauc

SEQ ID NO: 233835 - RNA, 19 nt, Artificial Sequence
  Description of Artificial Sequence: Synthetic oligonucleotide
  Antisense strand to SEQ ID NO: 233834
gauuucaagcucaaccaaa

SEQ ID NO: 233836 - RNA, 19 nt, Artificial Sequence
  Description of Artificial Sequence: Synthetic oligonucleotide
  Sense strand starting at position 2806 SEQ ID NO: 3009
uugguugagcuugaaaucu

SEQ ID NO: 233837 - RNA, 19 nt, Artificial Sequence
  Description of Artificial Sequence: Synthetic oligonucleotide
  Antisense strand to SEQ ID NO: 233836
agauuucaagcucaaccaa

SEQ ID NO: 233838 - RNA, 19 nt, Artificial Sequence
  Description of Artificial Sequence: Synthetic oligonucleotide
  Sense strand starting at position 2864 SEQ ID NO: 3009
gugugaucuuaagcaacca

SEQ ID NO: 233839 - RNA, 19 nt, Artificial Sequence
  Description of Artificial Sequence: Synthetic oligonucleotide
  Antisense strand to SEQ ID NO: 233838
ugguugcuuaagaucacac

SEQ ID NO: 233840 - RNA, 19 nt, Artificial Sequence
  Description of Artificial Sequence: Synthetic oligonucleotide
  Sense strand starting at position 2953 SEQ ID NO: 3009
ugguguauccaaugagaua

SEQ ID NO: 233841 - RNA, 19 nt, Artificial Sequence
  Description of Artificial Sequence: Synthetic oligonucleotide
  Antisense strand to SEQ ID NO: 233840
uaucucauuggauacacca

SEQ ID NO: 233842 - RNA, 19 nt, Artificial Sequence
  Description of Artificial Sequence: Synthetic oligonucleotide
  Sense strand starting at position 3003 SEQ ID NO: 3009
auaaauguuggcuaacauu

SEQ ID NO: 233843 - RNA, 19 nt, Artificial Sequence
  Description of Artificial Sequence: Synthetic oligonucleotide
  Antisense strand to SEQ ID NO: 233842
aauguuagccaacauuuau

SEQ ID NO: 233844 - RNA, 19 nt, Artificial Sequence
  Description of Artificial Sequence: Synthetic oligonucleotide
  Sense strand starting at position 3009 SEQ ID NO: 3009
guuggcuaacauuguauuu

SEQ ID NO: 233845 - RNA, 19 nt, Artificial Sequence
  Description of Artificial Sequence: Synthetic oligonucleotide
  Antisense strand to SEQ ID NO: 233844
aaauacaauguuagccaac

SEQ ID NO: 233846 - RNA, 19 nt, Artificial Sequence
  Description of Artificial Sequence: Synthetic oligonucleotide
  Sense strand starting at position 3031 SEQ ID NO: 3009
gcagauucuuugguuucua

SEQ ID NO: 233847 - RNA, 19 nt, Artificial Sequence
  Description of Artificial Sequence: Synthetic oligonucleotide
  Antisense strand to SEQ ID NO: 233846
uagaaaccaaagaaucugc

SEQ ID NO: 233848 - RNA, 19 nt, Artificial Sequence
  Description of Artificial Sequence: Synthetic oligonucleotide
  Sense strand starting at position 3092 SEQ ID NO: 3009
uguaauauccaguacagug

SEQ ID NO: 233849 - RNA, 19 nt, Artificial Sequence
  Description of Artificial Sequence: Synthetic oligonucleotide
  Antisense strand to SEQ ID NO: 233848
cacuguacuggauauuaca

SEQ ID NO: 233850 - RNA, 19 nt, Artificial Sequence
  Description of Artificial Sequence: Synthetic oligonucleotide
  Sense strand starting at position 3328 SEQ ID NO: 3009
ccagguccucuguagaaga

SEQ ID NO: 233851 - RNA, 19 nt, Artificial Sequence
  Description of Artificial Sequence: Synthetic oligonucleotide
  Antisense strand to SEQ ID NO: 233850
ucuucuacagaggaccugg

SEQ ID NO: 233852 - RNA, 19 nt, Artificial Sequence
  Description of Artificial Sequence: Synthetic oligonucleotide
  Sense strand starting at position 3437 SEQ ID NO: 3009
agaggaagcccaggaguuu

SEQ ID NO: 233853 - RNA, 19 nt, Artificial Sequence
  Description of Artificial Sequence: Synthetic oligonucleotide
  Antisense strand to SEQ ID NO: 233852
aaacuccugggcuuccucu

SEQ ID NO: 233854 - RNA, 19 nt, Artificial Sequence
  Description of Artificial Sequence: Synthetic oligonucleotide
  Sense strand starting at position 3519 SEQ ID NO: 3009
gggugcuuggguuaaucau

SEQ ID NO: 233855 - RNA, 19 nt, Artificial Sequence
  Description of Artificial Sequence: Synthetic oligonucleotide
  Antisense strand to SEQ ID NO: 233854
augauuaacccaagcaccc

SEQ ID NO: 233856 - RNA, 19 nt, Artificial Sequence
  Description of Artificial Sequence: Synthetic oligonucleotide
  Sense strand starting at position 3569 SEQ ID NO: 3009
gaagcagagucauugugac

SEQ ID NO: 233857 - RNA, 19 nt, Artificial Sequence
  Description of Artificial Sequence: Synthetic oligonucleotide
  Antisense strand to SEQ ID NO: 233856
gucacaaugacucugcuuc

SEQ ID NO: 233858 - RNA, 19 nt, Artificial Sequence
  Description of Artificial Sequence: Synthetic oligonucleotide
  Sense strand starting at position 3575 SEQ ID NO: 3009
gagucauugugaccagagg

SEQ ID NO: 233859 - RNA, 19 nt, Artificial Sequence
  Description of Artificial Sequence: Synthetic oligonucleotide
  Antisense strand to SEQ ID NO: 233858
ccucuggucacaaugacuc

SEQ ID NO: 233860 - RNA, 19 nt, Artificial Sequence
  Description of Artificial Sequence: Synthetic oligonucleotide
  Sense strand starting at position 3733 SEQ ID NO: 3009
cugugcugauuccuagaau

SEQ ID NO: 233861 - RNA, 19 nt, Artificial Sequence
  Description of Artificial Sequence: Synthetic oligonucleotide
  Antisense strand to SEQ ID NO: 233860
auucuaggaaucagcacag

SEQ ID NO: 233862 - RNA, 19 nt, Artificial Sequence
  Description of Artificial Sequence: Synthetic oligonucleotide
  Sense strand starting at position 3736 SEQ ID NO: 3009
ugcugauuccuagaauuau

SEQ ID NO: 233863 - RNA, 19 nt, Artificial Sequence
  Description of Artificial Sequence: Synthetic oligonucleotide
  Antisense strand to SEQ ID NO: 233862
auaauucuaggaaucagca

SEQ ID NO: 233864 - RNA, 19 nt, Artificial Sequence
  Description of Artificial Sequence: Synthetic oligonucleotide
  Sense strand starting at position 3805 SEQ ID NO: 3009
uccugauguucuuucccua

SEQ ID NO: 233865 - RNA, 19 nt, Artificial Sequence
  Description of Artificial Sequence: Synthetic oligonucleotide
  Antisense strand to SEQ ID NO: 233864
uagggaaagaacaucagga

SEQ ID NO: 233866 - RNA, 19 nt, Artificial Sequence
  Description of Artificial Sequence: Synthetic oligonucleotide
  Sense strand starting at position 93 SEQ ID NO: 3010
uuguauugggccugcguua

SEQ ID NO: 233867 - RNA, 19 nt, Artificial Sequence
  Description of Artificial Sequence: Synthetic oligonucleotide
  Antisense strand to SEQ ID NO: 233866
uaacgcaggcccaauacaa

SEQ ID NO: 233868 - RNA, 19 nt, Artificial Sequence
  Description of Artificial Sequence: Synthetic oligonucleotide
  Sense strand starting at position 94 SEQ ID NO: 3010
uguauugggccugcguuaa

SEQ ID NO: 233869 - RNA, 19 nt, Artificial Sequence
  Description of Artificial Sequence: Synthetic oligonucleotide
  Antisense strand to SEQ ID NO: 233868
uuaacgcaggcccaauaca

SEQ ID NO: 233870 - RNA, 19 nt, Artificial Sequence
  Description of Artificial Sequence: Synthetic oligonucleotide
  Sense strand starting at position 192 SEQ ID NO: 3010
gcaccuuccugguauuuau

SEQ ID NO: 233871 - RNA, 19 nt, Artificial Sequence
  Description of Artificial Sequence: Synthetic oligonucleotide
  Antisense strand to SEQ ID NO: 233870
auaaauaccaggaaggugc

SEQ ID NO: 233872 - RNA, 19 nt, Artificial Sequence
  Description of Artificial Sequence: Synthetic oligonucleotide
  Sense strand starting at position 421 SEQ ID NO: 3010
guccgugauccuuacagaa

SEQ ID NO: 233873 - RNA, 19 nt, Artificial Sequence
  Description of Artificial Sequence: Synthetic oligonucleotide
  Antisense strand to SEQ ID NO: 233872
uucuguaaggaucacggac

SEQ ID NO: 233874 - RNA, 19 nt, Artificial Sequence
  Description of Artificial Sequence: Synthetic oligonucleotide
  Sense strand starting at position 423 SEQ ID NO: 3010
ccgugauccuuacagaaga

SEQ ID NO: 233875 - RNA, 19 nt, Artificial Sequence
  Description of Artificial Sequence: Synthetic oligonucleotide
  Antisense strand to SEQ ID NO: 233874
ucuucuguaaggaucacgg

SEQ ID NO: 233876 - RNA, 19 nt, Artificial Sequence
  Description of Artificial Sequence: Synthetic oligonucleotide
  Sense strand starting at position 623 SEQ ID NO: 3010
aguuaugacugauggagaa

SEQ ID NO: 233877 - RNA, 19 nt, Artificial Sequence
  Description of Artificial Sequence: Synthetic oligonucleotide
  Antisense strand to SEQ ID NO: 233876
uucuccaucagucauaacu

SEQ ID NO: 233878 - RNA, 19 nt, Artificial Sequence
  Description of Artificial Sequence: Synthetic oligonucleotide
  Sense strand starting at position 660 SEQ ID NO: 3010
ggcuuuccugaaggaauag

SEQ ID NO: 233879 - RNA, 19 nt, Artificial Sequence
  Description of Artificial Sequence: Synthetic oligonucleotide
  Antisense strand to SEQ ID NO: 233878
cuauuccuucaggaaagcc

SEQ ID NO: 233880 - RNA, 19 nt, Artificial Sequence
  Description of Artificial Sequence: Synthetic oligonucleotide
  Sense strand starting at position 791 SEQ ID NO: 3010
gggaguaguucuuggaagg

SEQ ID NO: 233881 - RNA, 19 nt, Artificial Sequence
  Description of Artificial Sequence: Synthetic oligonucleotide
  Antisense strand to SEQ ID NO: 233880
ccuuccaagaacuacuccc

SEQ ID NO: 233882 - RNA, 19 nt, Artificial Sequence
  Description of Artificial Sequence: Synthetic oligonucleotide
  Sense strand starting at position 792 SEQ ID NO: 3010
ggaguaguucuuggaagga

SEQ ID NO: 233883 - RNA, 19 nt, Artificial Sequence
  Description of Artificial Sequence: Synthetic oligonucleotide
  Antisense strand to SEQ ID NO: 233882
uccuuccaagaacuacucc

SEQ ID NO: 233884 - RNA, 19 nt, Artificial Sequence
  Description of Artificial Sequence: Synthetic oligonucleotide
  Sense strand starting at position 834 SEQ ID NO: 3010
ccuacaauuccaggagucu

SEQ ID NO: 233885 - RNA, 19 nt, Artificial Sequence
  Description of Artificial Sequence: Synthetic oligonucleotide
  Antisense strand to SEQ ID NO: 233884
agacuccuggaauuguagg

SEQ ID NO: 233886 - RNA, 19 nt, Artificial Sequence
  Description of Artificial Sequence: Synthetic oligonucleotide
  Sense strand starting at position 843 SEQ ID NO: 3010
ccaggagucuaucugggua

SEQ ID NO: 233887 - RNA, 19 nt, Artificial Sequence
  Description of Artificial Sequence: Synthetic oligonucleotide
  Antisense strand to SEQ ID NO: 233886
uacccagauagacuccugg

SEQ ID NO: 233888 - RNA, 19 nt, Artificial Sequence
  Description of Artificial Sequence: Synthetic oligonucleotide
  Sense strand starting at position 845 SEQ ID NO: 3010
aggagucuaucuggguaaa

SEQ ID NO: 233889 - RNA, 19 nt, Artificial Sequence
  Description of Artificial Sequence: Synthetic oligonucleotide
  Antisense strand to SEQ ID NO: 233888
uuuacccagauagacuccu

SEQ ID NO: 233890 - RNA, 19 nt, Artificial Sequence
  Description of Artificial Sequence: Synthetic oligonucleotide
  Sense strand starting at position 863 SEQ ID NO: 3010
aauauaacgugagaggaaa

SEQ ID NO: 233891 - RNA, 19 nt, Artificial Sequence
  Description of Artificial Sequence: Synthetic oligonucleotide
  Antisense strand to SEQ ID NO: 233890
uuuccucucacguuauauu

SEQ ID NO: 233892 - RNA, 19 nt, Artificial Sequence
  Description of Artificial Sequence: Synthetic oligonucleotide
  Sense strand starting at position 2031 SEQ ID NO: 3010
cgcucugcccgagaugagu

SEQ ID NO: 233893 - RNA, 19 nt, Artificial Sequence
  Description of Artificial Sequence: Synthetic oligonucleotide
  Antisense strand to SEQ ID NO: 233892
acucaucucgggcagagcg

SEQ ID NO: 233894 - RNA, 19 nt, Artificial Sequence
  Description of Artificial Sequence: Synthetic oligonucleotide
  Sense strand starting at position 2040 SEQ ID NO: 3010
cgagaugagucacuacaau

SEQ ID NO: 233895 - RNA, 19 nt, Artificial Sequence
  Description of Artificial Sequence: Synthetic oligonucleotide
  Antisense strand to SEQ ID NO: 233894
auuguagugacucaucucg

SEQ ID NO: 233896 - RNA, 19 nt, Artificial Sequence
  Description of Artificial Sequence: Synthetic oligonucleotide
  Sense strand starting at position 2414 SEQ ID NO: 3010
caaagauggucauuugcgu

SEQ ID NO: 233897 - RNA, 19 nt, Artificial Sequence
  Description of Artificial Sequence: Synthetic oligonucleotide
  Antisense strand to SEQ ID NO: 233896
acgcaaaugaccaucuuug

SEQ ID NO: 233898 - RNA, 19 nt, Artificial Sequence
  Description of Artificial Sequence: Synthetic oligonucleotide
  Sense strand starting at position 2889 SEQ ID NO: 3010
uacaguuaauucguuagga

SEQ ID NO: 233899 - RNA, 19 nt, Artificial Sequence
  Description of Artificial Sequence: Synthetic oligonucleotide
  Antisense strand to SEQ ID NO: 233898
uccuaacgaauuaacugua

SEQ ID NO: 233900 - RNA, 19 nt, Artificial Sequence
  Description of Artificial Sequence: Synthetic oligonucleotide
  Sense strand starting at position 2890 SEQ ID NO: 3010
acaguuaauucguuaggag

SEQ ID NO: 233901 - RNA, 19 nt, Artificial Sequence
  Description of Artificial Sequence: Synthetic oligonucleotide
  Antisense strand to SEQ ID NO: 233900
cuccuaacgaauuaacugu

SEQ ID NO: 233902 - RNA, 19 nt, Artificial Sequence
  Description of Artificial Sequence: Synthetic oligonucleotide
  Sense strand starting at position 2891 SEQ ID NO: 3010
caguuaauucguuaggagu

SEQ ID NO: 233903 - RNA, 19 nt, Artificial Sequence
  Description of Artificial Sequence: Synthetic oligonucleotide
  Antisense strand to SEQ ID NO: 233902
acuccuaacgaauuaacug

SEQ ID NO: 233904 - RNA, 19 nt, Artificial Sequence
  Description of Artificial Sequence: Synthetic oligonucleotide
  Sense strand starting at position 2971 SEQ ID NO: 3010
ggacgcaucuaauaagagu

SEQ ID NO: 233905 - RNA, 19 nt, Artificial Sequence
  Description of Artificial Sequence: Synthetic oligonucleotide
  Antisense strand to SEQ ID NO: 233904
acucuuauuagaugcgucc

SEQ ID NO: 233906 - RNA, 19 nt, Artificial Sequence
  Description of Artificial Sequence: Synthetic oligonucleotide
  Sense strand starting at position 2982 SEQ ID NO: 3010
auaagaguaaucgggcguu

SEQ ID NO: 233907 - RNA, 19 nt, Artificial Sequence
  Description of Artificial Sequence: Synthetic oligonucleotide
  Antisense strand to SEQ ID NO: 233906
aacgcccgauuacucuuau

SEQ ID NO: 233908 - RNA, 19 nt, Artificial Sequence
  Description of Artificial Sequence: Synthetic oligonucleotide
  Sense strand starting at position 2985 SEQ ID NO: 3010
agaguaaucgggcguuuau

SEQ ID NO: 233909 - RNA, 19 nt, Artificial Sequence
  Description of Artificial Sequence: Synthetic oligonucleotide
  Antisense strand to SEQ ID NO: 233908
auaaacgcccgauuacucu

SEQ ID NO: 233910 - RNA, 19 nt, Artificial Sequence
  Description of Artificial Sequence: Synthetic oligonucleotide
  Sense strand starting at position 2994 SEQ ID NO: 3010
gggcguuuauaagcaaacu

SEQ ID NO: 233911 - RNA, 19 nt, Artificial Sequence
  Description of Artificial Sequence: Synthetic oligonucleotide
  Antisense strand to SEQ ID NO: 233910
aguuugcuuauaaacgccc

SEQ ID NO: 233912 - RNA, 19 nt, Artificial Sequence
  Description of Artificial Sequence: Synthetic oligonucleotide
  Sense strand starting at position 3010 SEQ ID NO: 3010
acuccagacuguuacgaau

SEQ ID NO: 233913 - RNA, 19 nt, Artificial Sequence
  Description of Artificial Sequence: Synthetic oligonucleotide
  Antisense strand to SEQ ID NO: 233912
auucguaacagucuggagu

SEQ ID NO: 233914 - RNA, 19 nt, Artificial Sequence
  Description of Artificial Sequence: Synthetic oligonucleotide
  Sense strand starting at position 3013 SEQ ID NO: 3010
ccagacuguuacgaauuaa

SEQ ID NO: 233915 - RNA, 19 nt, Artificial Sequence
  Description of Artificial Sequence: Synthetic oligonucleotide
  Antisense strand to SEQ ID NO: 233914
uuaauucguaacagucugg

SEQ ID NO: 233916 - RNA, 19 nt, Artificial Sequence
  Description of Artificial Sequence: Synthetic oligonucleotide
  Sense strand starting at position 3225 SEQ ID NO: 3010
cugugagaucuuggacgaa

SEQ ID NO: 233917 - RNA, 19 nt, Artificial Sequence
  Description of Artificial Sequence: Synthetic oligonucleotide
  Antisense strand to SEQ ID NO: 233916
uucguccaagaucucacag

SEQ ID NO: 233918 - RNA, 19 nt, Artificial Sequence
  Description of Artificial Sequence: Synthetic oligonucleotide
  Sense strand starting at position 3228 SEQ ID NO: 3010
ugagaucuuggacgaauuc

SEQ ID NO: 233919 - RNA, 19 nt, Artificial Sequence
  Description of Artificial Sequence: Synthetic oligonucleotide
  Antisense strand to SEQ ID NO: 233918
gaauucguccaagaucuca

SEQ ID NO: 233920 - RNA, 19 nt, Artificial Sequence
  Description of Artificial Sequence: Synthetic oligonucleotide
  Sense strand starting at position 3237 SEQ ID NO: 3010
ggacgaauuccuuaaccuc

SEQ ID NO: 233921 - RNA, 19 nt, Artificial Sequence
  Description of Artificial Sequence: Synthetic oligonucleotide
  Antisense strand to SEQ ID NO: 233920
gagguuaaggaauucgucc

SEQ ID NO: 233922 - RNA, 19 nt, Artificial Sequence
  Description of Artificial Sequence: Synthetic oligonucleotide
  Sense strand starting at position 3275 SEQ ID NO: 3010
cuauaaagugaaggaguuu

SEQ ID NO: 233923 - RNA, 19 nt, Artificial Sequence
  Description of Artificial Sequence: Synthetic oligonucleotide
  Antisense strand to SEQ ID NO: 233922
aaacuccuucacuuuauag

SEQ ID NO: 233924 - RNA, 19 nt, Artificial Sequence
  Description of Artificial Sequence: Synthetic oligonucleotide
  Sense strand starting at position 3330 SEQ ID NO: 3010
uccaauccuuccgcugaga

SEQ ID NO: 233925 - RNA, 19 nt, Artificial Sequence
  Description of Artificial Sequence: Synthetic oligonucleotide
  Antisense strand to SEQ ID NO: 233924
ucucagcggaaggauugga

SEQ ID NO: 233926 - RNA, 19 nt, Artificial Sequence
  Description of Artificial Sequence: Synthetic oligonucleotide
  Sense strand starting at position 3332 SEQ ID NO: 3010
caauccuuccgcugagaug

SEQ ID NO: 233927 - RNA, 19 nt, Artificial Sequence
  Description of Artificial Sequence: Synthetic oligonucleotide
  Antisense strand to SEQ ID NO: 233926
caucucagcggaaggauug

SEQ ID NO: 233928 - RNA, 19 nt, Artificial Sequence
  Description of Artificial Sequence: Synthetic oligonucleotide
  Sense strand starting at position 3333 SEQ ID NO: 3010
aauccuuccgcugagauga

SEQ ID NO: 233929 - RNA, 19 nt, Artificial Sequence
  Description of Artificial Sequence: Synthetic oligonucleotide
  Antisense strand to SEQ ID NO: 233928
ucaucucagcggaaggauu

SEQ ID NO: 233930 - RNA, 19 nt, Artificial Sequence
  Description of Artificial Sequence: Synthetic oligonucleotide
  Sense strand starting at position 3356 SEQ ID NO: 3010
gugugugaauggagaagua

SEQ ID NO: 233931 - RNA, 19 nt, Artificial Sequence
  Description of Artificial Sequence: Synthetic oligonucleotide
  Antisense strand to SEQ ID NO: 233930
uacuucuccauucacacac

SEQ ID NO: 233932 - RNA, 19 nt, Artificial Sequence
  Description of Artificial Sequence: Synthetic oligonucleotide
  Sense strand starting at position 3380 SEQ ID NO: 3010
gcggaagucagggaacuua

SEQ ID NO: 233933 - RNA, 19 nt, Artificial Sequence
  Description of Artificial Sequence: Synthetic oligonucleotide
  Antisense strand to SEQ ID NO: 233932
uaaguucccugacuuccgc

SEQ ID NO: 233934 - RNA, 19 nt, Artificial Sequence
  Description of Artificial Sequence: Synthetic oligonucleotide
  Sense strand starting at position 3413 SEQ ID NO: 3010
gucuguguuagccucaguu

SEQ ID NO: 233935 - RNA, 19 nt, Artificial Sequence
  Description of Artificial Sequence: Synthetic oligonucleotide
  Antisense strand to SEQ ID NO: 233934
aacugaggcuaacacagac

SEQ ID NO: 233936 - RNA, 19 nt, Artificial Sequence
  Description of Artificial Sequence: Synthetic oligonucleotide
  Sense strand starting at position 3415 SEQ ID NO: 3010
cuguguuagccucaguuua

SEQ ID NO: 233937 - RNA, 19 nt, Artificial Sequence
  Description of Artificial Sequence: Synthetic oligonucleotide
  Antisense strand to SEQ ID NO: 233936
uaaacugaggcuaacacag

SEQ ID NO: 233938 - RNA, 19 nt, Artificial Sequence
  Description of Artificial Sequence: Synthetic oligonucleotide
  Sense strand starting at position 3490 SEQ ID NO: 3010
aauguuaagagguguugag

SEQ ID NO: 233939 - RNA, 19 nt, Artificial Sequence
  Description of Artificial Sequence: Synthetic oligonucleotide
  Antisense strand to SEQ ID NO: 233938
cucaacaccucuuaacauu

SEQ ID NO: 233940 - RNA, 19 nt, Artificial Sequence
  Description of Artificial Sequence: Synthetic oligonucleotide
  Sense strand starting at position 3506 SEQ ID NO: 3010
gagaguccauugcugacaa

SEQ ID NO: 233941 - RNA, 19 nt, Artificial Sequence
  Description of Artificial Sequence: Synthetic oligonucleotide
  Antisense strand to SEQ ID NO: 233940
uugucagcaauggacucuc

SEQ ID NO: 233942 - RNA, 19 nt, Artificial Sequence
  Description of Artificial Sequence: Synthetic oligonucleotide
  Sense strand starting at position 3508 SEQ ID NO: 3010
gaguccauugcugacaacu

SEQ ID NO: 233943 - RNA, 19 nt, Artificial Sequence
  Description of Artificial Sequence: Synthetic oligonucleotide
  Antisense strand to SEQ ID NO: 233942
aguugucagcaauggacuc

SEQ ID NO: 233944 - RNA, 19 nt, Artificial Sequence
  Description of Artificial Sequence: Synthetic oligonucleotide
  Sense strand starting at position 3635 SEQ ID NO: 3010
uauauaaagcgcuggcauu

SEQ ID NO: 233945 - RNA, 19 nt, Artificial Sequence
  Description of Artificial Sequence: Synthetic oligonucleotide
  Antisense strand to SEQ ID NO: 233944
aaugccagcgcuuuauaua

SEQ ID NO: 233946 - RNA, 19 nt, Artificial Sequence
  Description of Artificial Sequence: Synthetic oligonucleotide
  Sense strand starting at position 3870 SEQ ID NO: 3011
cuauaauuaugacaacgaa

SEQ ID NO: 233947 - RNA, 19 nt, Artificial Sequence
  Description of Artificial Sequence: Synthetic oligonucleotide
  Antisense strand to SEQ ID NO: 233946
uucguugucauaauuauag

SEQ ID NO: 233948 - RNA, 19 nt, Artificial Sequence
  Description of Artificial Sequence: Synthetic oligonucleotide
  Sense strand starting at position 3884 SEQ ID NO: 3011
acgaauguucagugagaaa

SEQ ID NO: 233949 - RNA, 19 nt, Artificial Sequence
  Description of Artificial Sequence: Synthetic oligonucleotide
  Antisense strand to SEQ ID NO: 233948
uuucucacugaacauucgu

SEQ ID NO: 233950 - RNA, 19 nt, Artificial Sequence
  Description of Artificial Sequence: Synthetic oligonucleotide
  Sense strand starting at position 18 SEQ ID NO: 3012
cuaucuggauauguauauu

SEQ ID NO: 233951 - RNA, 19 nt, Artificial Sequence
  Description of Artificial Sequence: Synthetic oligonucleotide
  Antisense strand to SEQ ID NO: 233950
aauauacauauccagauag

SEQ ID NO: 233952 - RNA, 19 nt, Artificial Sequence
  Description of Artificial Sequence: Synthetic oligonucleotide
  Sense strand starting at position 96 SEQ ID NO: 3012
gagugaagucuagagcagu

SEQ ID NO: 233953 - RNA, 19 nt, Artificial Sequence
  Description of Artificial Sequence: Synthetic oligonucleotide
  Antisense strand to SEQ ID NO: 233952
acugcucuagacuucacuc

SEQ ID NO: 233954 - RNA, 19 nt, Artificial Sequence
  Description of Artificial Sequence: Synthetic oligonucleotide
  Sense strand starting at position 99 SEQ ID NO: 3012
ugaagucuagagcaguuua

SEQ ID NO: 233955 - RNA, 19 nt, Artificial Sequence
  Description of Artificial Sequence: Synthetic oligonucleotide
  Antisense strand to SEQ ID NO: 233954
uaaacugcucuagacuuca

SEQ ID NO: 233956 - RNA, 19 nt, Artificial Sequence
  Description of Artificial Sequence: Synthetic oligonucleotide
  Sense strand starting at position 109 SEQ ID NO: 3012
agcaguuuacacgacaauu

SEQ ID NO: 233957 - RNA, 19 nt, Artificial Sequence
  Description of Artificial Sequence: Synthetic oligonucleotide
  Antisense strand to SEQ ID NO: 233956
aauugucguguaaacugcu

SEQ ID NO: 233958 - RNA, 19 nt, Artificial Sequence
  Description of Artificial Sequence: Synthetic oligonucleotide
  Sense strand starting at position 133 SEQ ID NO: 3012
gauaaucuugggugguaca

SEQ ID NO: 233959 - RNA, 19 nt, Artificial Sequence
  Description of Artificial Sequence: Synthetic oligonucleotide
  Antisense strand to SEQ ID NO: 233958
uguaccacccaagauuauc

SEQ ID NO: 233960 - RNA, 19 nt, Artificial Sequence
  Description of Artificial Sequence: Synthetic oligonucleotide
  Sense strand starting at position 165 SEQ ID NO: 3012
gaggaugcaucuucuagaa

SEQ ID NO: 233961 - RNA, 19 nt, Artificial Sequence
  Description of Artificial Sequence: Synthetic oligonucleotide
  Antisense strand to SEQ ID NO: 233960
uucuagaagaugcauccuc

SEQ ID NO: 233962 - RNA, 19 nt, Artificial Sequence
  Description of Artificial Sequence: Synthetic oligonucleotide
  Sense strand starting at position 251 SEQ ID NO: 3012
gucaaauugagauguagug

SEQ ID NO: 233963 - RNA, 19 nt, Artificial Sequence
  Description of Artificial Sequence: Synthetic oligonucleotide
  Antisense strand to SEQ ID NO: 233962
cacuacaucucaauuugac

SEQ ID NO: 233964 - RNA, 19 nt, Artificial Sequence
  Description of Artificial Sequence: Synthetic oligonucleotide
  Sense strand starting at position 378 SEQ ID NO: 3012
uuuguaucguauuuccauu

SEQ ID NO: 233965 - RNA, 19 nt, Artificial Sequence
  Description of Artificial Sequence: Synthetic oligonucleotide
  Antisense strand to SEQ ID NO: 233964
aauggaaauacgauacaaa

SEQ ID NO: 233966 - RNA, 19 nt, Artificial Sequence
  Description of Artificial Sequence: Synthetic oligonucleotide
  Sense strand starting at position 385 SEQ ID NO: 3012
cguauuuccauuggagagu

SEQ ID NO: 233967 - RNA, 19 nt, Artificial Sequence
  Description of Artificial Sequence: Synthetic oligonucleotide
  Antisense strand to SEQ ID NO: 233966
acucuccaauggaaauacg

SEQ ID NO: 233968 - RNA, 19 nt, Artificial Sequence
  Description of Artificial Sequence: Synthetic oligonucleotide
  Sense strand starting at position 436 SEQ ID NO: 3012
uucugagcuccagaauagu

SEQ ID NO: 233969 - RNA, 19 nt, Artificial Sequence
  Description of Artificial Sequence: Synthetic oligonucleotide
  Antisense strand to SEQ ID NO: 233968
acuauucuggagcucagaa

SEQ ID NO: 233970 - RNA, 19 nt, Artificial Sequence
  Description of Artificial Sequence: Synthetic oligonucleotide
  Sense strand starting at position 442 SEQ ID NO: 3012
gcuccagaauagucacaua

SEQ ID NO: 233971 - RNA, 19 nt, Artificial Sequence
  Description of Artificial Sequence: Synthetic oligonucleotide
  Antisense strand to SEQ ID NO: 233970
uaugugacuauucuggagc

SEQ ID NO: 233972 - RNA, 19 nt, Artificial Sequence
  Description of Artificial Sequence: Synthetic oligonucleotide
  Sense strand starting at position 474 SEQ ID NO: 3012
ccuggaucucuguaaugug

SEQ ID NO: 233973 - RNA, 19 nt, Artificial Sequence
  Description of Artificial Sequence: Synthetic oligonucleotide
  Antisense strand to SEQ ID NO: 233972
cacauuacagagauccagg

SEQ ID NO: 233974 - RNA, 19 nt, Artificial Sequence
  Description of Artificial Sequence: Synthetic oligonucleotide
  Sense strand starting at position 481 SEQ ID NO: 3012
cucuguaaugugcaacuaa

SEQ ID NO: 233975 - RNA, 19 nt, Artificial Sequence
  Description of Artificial Sequence: Synthetic oligonucleotide
  Antisense strand to SEQ ID NO: 233974
uuaguugcacauuacagag

SEQ ID NO: 233976 - RNA, 19 nt, Artificial Sequence
  Description of Artificial Sequence: Synthetic oligonucleotide
  Sense strand starting at position 577 SEQ ID NO: 3012
caaguaggauucucuguuu

SEQ ID NO: 233977 - RNA, 19 nt, Artificial Sequence
  Description of Artificial Sequence: Synthetic oligonucleotide
  Antisense strand to SEQ ID NO: 233976
aaacagagaauccuacuug

SEQ ID NO: 233978 - RNA, 19 nt, Artificial Sequence
  Description of Artificial Sequence: Synthetic oligonucleotide
  Sense strand starting at position 671 SEQ ID NO: 3012
uccucacuccaggagcaau

SEQ ID NO: 233979 - RNA, 19 nt, Artificial Sequence
  Description of Artificial Sequence: Synthetic oligonucleotide
  Antisense strand to SEQ ID NO: 233978
auugcuccuggagugagga

SEQ ID NO: 233980 - RNA, 19 nt, Artificial Sequence
  Description of Artificial Sequence: Synthetic oligonucleotide
  Sense strand starting at position 681 SEQ ID NO: 3012
aggagcaauugggcuuaga

SEQ ID NO: 233981 - RNA, 19 nt, Artificial Sequence
  Description of Artificial Sequence: Synthetic oligonucleotide
  Antisense strand to SEQ ID NO: 233980
ucuaagcccaauugcuccu

SEQ ID NO: 233982 - RNA, 19 nt, Artificial Sequence
  Description of Artificial Sequence: Synthetic oligonucleotide
  Sense strand starting at position 684 SEQ ID NO: 3012
agcaauugggcuuagacca

SEQ ID NO: 233983 - RNA, 19 nt, Artificial Sequence
  Description of Artificial Sequence: Synthetic oligonucleotide
  Antisense strand to SEQ ID NO: 233982
uggucuaagcccaauugcu

SEQ ID NO: 233984 - RNA, 19 nt, Artificial Sequence
  Description of Artificial Sequence: Synthetic oligonucleotide
  Sense strand starting at position 699 SEQ ID NO: 3012
accagaacgcagcaaauau

SEQ ID NO: 233985 - RNA, 19 nt, Artificial Sequence
  Description of Artificial Sequence: Synthetic oligonucleotide
  Antisense strand to SEQ ID NO: 233984
auauuugcugcguucuggu

SEQ ID NO: 233986 - RNA, 19 nt, Artificial Sequence
  Description of Artificial Sequence: Synthetic oligonucleotide
  Sense strand starting at position 949 SEQ ID NO: 3012
cgucuucugcgaaacguga

SEQ ID NO: 233987 - RNA, 19 nt, Artificial Sequence
  Description of Artificial Sequence: Synthetic oligonucleotide
  Antisense strand to SEQ ID NO: 233986
ucacguuucgcagaagacg

SEQ ID NO: 233988 - RNA, 19 nt, Artificial Sequence
  Description of Artificial Sequence: Synthetic oligonucleotide
  Sense strand starting at position 981 SEQ ID NO: 3012
ucacacggaucccuuuaua

SEQ ID NO: 233989 - RNA, 19 nt, Artificial Sequence
  Description of Artificial Sequence: Synthetic oligonucleotide
  Antisense strand to SEQ ID NO: 233988
uauaaagggauccguguga

SEQ ID NO: 233990 - RNA, 19 nt, Artificial Sequence
  Description of Artificial Sequence: Synthetic oligonucleotide
  Sense strand starting at position 1076 SEQ ID NO: 3012
ccuucuguucugggauaca

SEQ ID NO: 233991 - RNA, 19 nt, Artificial Sequence
  Description of Artificial Sequence: Synthetic oligonucleotide
  Antisense strand to SEQ ID NO: 233990
uguaucccagaacagaagg

SEQ ID NO: 233992 - RNA, 19 nt, Artificial Sequence
  Description of Artificial Sequence: Synthetic oligonucleotide
  Sense strand starting at position 1535 SEQ ID NO: 3012
uggcgaugagcgccgaaua

SEQ ID NO: 233993 - RNA, 19 nt, Artificial Sequence
  Description of Artificial Sequence: Synthetic oligonucleotide
  Antisense strand to SEQ ID NO: 233992
uauucggcgcucaucgcca

SEQ ID NO: 233994 - RNA, 19 nt, Artificial Sequence
  Description of Artificial Sequence: Synthetic oligonucleotide
  Sense strand starting at position 2571 SEQ ID NO: 3012
cgcggaauucacguccagu

SEQ ID NO: 233995 - RNA, 19 nt, Artificial Sequence
  Description of Artificial Sequence: Synthetic oligonucleotide
  Antisense strand to SEQ ID NO: 233994
acuggacgugaauuccgcg

SEQ ID NO: 233996 - RNA, 19 nt, Artificial Sequence
  Description of Artificial Sequence: Synthetic oligonucleotide
  Sense strand starting at position 2643 SEQ ID NO: 3012
ggguauacgguagagguua

SEQ ID NO: 233997 - RNA, 19 nt, Artificial Sequence
  Description of Artificial Sequence: Synthetic oligonucleotide
  Antisense strand to SEQ ID NO: 233996
uaaccucuaccguauaccc

SEQ ID NO: 233998 - RNA, 19 nt, Artificial Sequence
  Description of Artificial Sequence: Synthetic oligonucleotide
  Sense strand starting at position 2698 SEQ ID NO: 3012
ggauucugugauuggagga

SEQ ID NO: 233999 - RNA, 19 nt, Artificial Sequence
  Description of Artificial Sequence: Synthetic oligonucleotide
  Antisense strand to SEQ ID NO: 233998
uccuccaaucacagaaucc

SEQ ID NO: 234000 - RNA, 19 nt, Artificial Sequence
  Description of Artificial Sequence: Synthetic oligonucleotide
  Sense strand starting at position 2699 SEQ ID NO: 3012
gauucugugauuggaggaa

SEQ ID NO: 234001 - RNA, 19 nt, Artificial Sequence
  Description of Artificial Sequence: Synthetic oligonucleotide
  Antisense strand to SEQ ID NO: 234000
uuccuccaaucacagaauc

SEQ ID NO: 234002 - RNA, 19 nt, Artificial Sequence
  Description of Artificial Sequence: Synthetic oligonucleotide
  Sense strand starting at position 2716 SEQ ID NO: 3012
aacggaaaucaguguugag

SEQ ID NO: 234003 - RNA, 19 nt, Artificial Sequence
  Description of Artificial Sequence: Synthetic oligonucleotide
  Antisense strand to SEQ ID NO: 234002
cucaacacugauuuccguu

SEQ ID NO: 234004 - RNA, 19 nt, Artificial Sequence
  Description of Artificial Sequence: Synthetic oligonucleotide
  Sense strand starting at position 2759 SEQ ID NO: 3012
gcucacauucgggaagcau

SEQ ID NO: 234005 - RNA, 19 nt, Artificial Sequence
  Description of Artificial Sequence: Synthetic oligonucleotide
  Antisense strand to SEQ ID NO: 234004
augcuucccgaaugugagc

SEQ ID NO: 234006 - RNA, 19 nt, Artificial Sequence
  Description of Artificial Sequence: Synthetic oligonucleotide
  Sense strand starting at position 2767 SEQ ID NO: 3012
ucgggaagcauuuauucgu

SEQ ID NO: 234007 - RNA, 19 nt, Artificial Sequence
  Description of Artificial Sequence: Synthetic oligonucleotide
  Antisense strand to SEQ ID NO: 234006
acgaauaaaugcuucccga

SEQ ID NO: 234008 - RNA, 19 nt, Artificial Sequence
  Description of Artificial Sequence: Synthetic oligonucleotide
  Sense strand starting at position 2809 SEQ ID NO: 3012
uucguugugauuuguuauc

SEQ ID NO: 234009 - RNA, 19 nt, Artificial Sequence
  Description of Artificial Sequence: Synthetic oligonucleotide
  Antisense strand to SEQ ID NO: 234008
gauaacaaaucacaacgaa

SEQ ID NO: 234010 - RNA, 19 nt, Artificial Sequence
  Description of Artificial Sequence: Synthetic oligonucleotide
  Sense strand starting at position 2811 SEQ ID NO: 3012
cguugugauuuguuaucuu

SEQ ID NO: 234011 - RNA, 19 nt, Artificial Sequence
  Description of Artificial Sequence: Synthetic oligonucleotide
  Antisense strand to SEQ ID NO: 234010
aagauaacaaaucacaacg

SEQ ID NO: 234012 - RNA, 19 nt, Artificial Sequence
  Description of Artificial Sequence: Synthetic oligonucleotide
  Sense strand starting at position 2932 SEQ ID NO: 3012
gcaagaagcgcucauuuac

SEQ ID NO: 234013 - RNA, 19 nt, Artificial Sequence
  Description of Artificial Sequence: Synthetic oligonucleotide
  Antisense strand to SEQ ID NO: 234012
guaaaugagcgcuucuugc

SEQ ID NO: 234014 - RNA, 19 nt, Artificial Sequence
  Description of Artificial Sequence: Synthetic oligonucleotide
  Sense strand starting at position 3085 SEQ ID NO: 3012
ccucgauuggcuggaaaca

SEQ ID NO: 234015 - RNA, 19 nt, Artificial Sequence
  Description of Artificial Sequence: Synthetic oligonucleotide
  Antisense strand to SEQ ID NO: 234014
uguuuccagccaaucgagg

SEQ ID NO: 234016 - RNA, 19 nt, Artificial Sequence
  Description of Artificial Sequence: Synthetic oligonucleotide
  Sense strand starting at position 3086 SEQ ID NO: 3012
cucgauuggcuggaaacaa

SEQ ID NO: 234017 - RNA, 19 nt, Artificial Sequence
  Description of Artificial Sequence: Synthetic oligonucleotide
  Antisense strand to SEQ ID NO: 234016
uuguuuccagccaaucgag

SEQ ID NO: 234018 - RNA, 19 nt, Artificial Sequence
  Description of Artificial Sequence: Synthetic oligonucleotide
  Sense strand starting at position 3143 SEQ ID NO: 3012
cuaaauguguucuuaauac

SEQ ID NO: 234019 - RNA, 19 nt, Artificial Sequence
  Description of Artificial Sequence: Synthetic oligonucleotide
  Antisense strand to SEQ ID NO: 234018
guauuaagaacacauuuag

SEQ ID NO: 234020 - RNA, 19 nt, Artificial Sequence
  Description of Artificial Sequence: Synthetic oligonucleotide
  Sense strand starting at position 3152 SEQ ID NO: 3012
uucuuaauacgugacaggu

SEQ ID NO: 234021 - RNA, 19 nt, Artificial Sequence
  Description of Artificial Sequence: Synthetic oligonucleotide
  Antisense strand to SEQ ID NO: 234020
accugucacguauuaagaa

SEQ ID NO: 234022 - RNA, 19 nt, Artificial Sequence
  Description of Artificial Sequence: Synthetic oligonucleotide
  Sense strand starting at position 3422 SEQ ID NO: 3012
gucacuauuuagucgucuu

SEQ ID NO: 234023 - RNA, 19 nt, Artificial Sequence
  Description of Artificial Sequence: Synthetic oligonucleotide
  Antisense strand to SEQ ID NO: 234022
aagacgacuaaauagugac

SEQ ID NO: 234024 - RNA, 19 nt, Artificial Sequence
  Description of Artificial Sequence: Synthetic oligonucleotide
  Sense strand starting at position 3517 SEQ ID NO: 3012
aaagaauaguguuugucuu

SEQ ID NO: 234025 - RNA, 19 nt, Artificial Sequence
  Description of Artificial Sequence: Synthetic oligonucleotide
  Antisense strand to SEQ ID NO: 234024
aagacaaacacuauucuuu

SEQ ID NO: 234026 - RNA, 19 nt, Artificial Sequence
  Description of Artificial Sequence: Synthetic oligonucleotide
  Sense strand starting at position 3519 SEQ ID NO: 3012
agaauaguguuugucuuaa

SEQ ID NO: 234027 - RNA, 19 nt, Artificial Sequence
  Description of Artificial Sequence: Synthetic oligonucleotide
  Antisense strand to SEQ ID NO: 234026
uuaagacaaacacuauucu

SEQ ID NO: 234028 - RNA, 19 nt, Artificial Sequence
  Description of Artificial Sequence: Synthetic oligonucleotide
  Sense strand starting at position 3578 SEQ ID NO: 3012
uuuagauaagcccaguguu

SEQ ID NO: 234029 - RNA, 19 nt, Artificial Sequence
  Description of Artificial Sequence: Synthetic oligonucleotide
  Antisense strand to SEQ ID NO: 234028
aacacugggcuuaucuaaa

SEQ ID NO: 234030 - RNA, 19 nt, Artificial Sequence
  Description of Artificial Sequence: Synthetic oligonucleotide
  Sense strand starting at position 164 SEQ ID NO: 3013
guauguuuagaucacaauu

SEQ ID NO: 234031 - RNA, 19 nt, Artificial Sequence
  Description of Artificial Sequence: Synthetic oligonucleotide
  Antisense strand to SEQ ID NO: 234030
aauugugaucuaaacauac

SEQ ID NO: 234032 - RNA, 19 nt, Artificial Sequence
  Description of Artificial Sequence: Synthetic oligonucleotide
  Sense strand starting at position 250 SEQ ID NO: 3013
uucugauugcauuagaauc

SEQ ID NO: 234033 - RNA, 19 nt, Artificial Sequence
  Description of Artificial Sequence: Synthetic oligonucleotide
  Antisense strand to SEQ ID NO: 234032
gauucuaaugcaaucagaa

SEQ ID NO: 234034 - RNA, 19 nt, Artificial Sequence
  Description of Artificial Sequence: Synthetic oligonucleotide
  Sense strand starting at position 314 SEQ ID NO: 3013
uggcaaacuccauaaugca

SEQ ID NO: 234035 - RNA, 19 nt, Artificial Sequence
  Description of Artificial Sequence: Synthetic oligonucleotide
  Antisense strand to SEQ ID NO: 234034
ugcauuauggaguuugcca

SEQ ID NO: 234036 - RNA, 19 nt, Artificial Sequence
  Description of Artificial Sequence: Synthetic oligonucleotide
  Sense strand starting at position 356 SEQ ID NO: 3013
cuaugaugguaccuaauaa

SEQ ID NO: 234037 - RNA, 19 nt, Artificial Sequence
  Description of Artificial Sequence: Synthetic oligonucleotide
  Antisense strand to SEQ ID NO: 234036
uuauuagguaccaucauag

SEQ ID NO: 234038 - RNA, 19 nt, Artificial Sequence
  Description of Artificial Sequence: Synthetic oligonucleotide
  Sense strand starting at position 367 SEQ ID NO: 3013
ccuaauaaugcugagguuu

SEQ ID NO: 234039 - RNA, 19 nt, Artificial Sequence
  Description of Artificial Sequence: Synthetic oligonucleotide
  Antisense strand to SEQ ID NO: 234038
aaaccucagcauuauuagg

SEQ ID NO: 234040 - RNA, 19 nt, Artificial Sequence
  Description of Artificial Sequence: Synthetic oligonucleotide
  Sense strand starting at position 597 SEQ ID NO: 3013
ccgcuagcgcacucuauua

SEQ ID NO: 234041 - RNA, 19 nt, Artificial Sequence
  Description of Artificial Sequence: Synthetic oligonucleotide
  Antisense strand to SEQ ID NO: 234040
uaauagagugcgcuagcgg

SEQ ID NO: 234042 - RNA, 19 nt, Artificial Sequence
  Description of Artificial Sequence: Synthetic oligonucleotide
  Sense strand starting at position 729 SEQ ID NO: 3013
gaaagaaagucugugguca

SEQ ID NO: 234043 - RNA, 19 nt, Artificial Sequence
  Description of Artificial Sequence: Synthetic oligonucleotide
  Antisense strand to SEQ ID NO: 234042
ugaccacagacuuucuuuc

SEQ ID NO: 234044 - RNA, 19 nt, Artificial Sequence
  Description of Artificial Sequence: Synthetic oligonucleotide
  Sense strand starting at position 730 SEQ ID NO: 3013
aaagaaagucuguggucau

SEQ ID NO: 234045 - RNA, 19 nt, Artificial Sequence
  Description of Artificial Sequence: Synthetic oligonucleotide
  Antisense strand to SEQ ID NO: 234044
augaccacagacuuucuuu

SEQ ID NO: 234046 - RNA, 19 nt, Artificial Sequence
  Description of Artificial Sequence: Synthetic oligonucleotide
  Sense strand starting at position 825 SEQ ID NO: 3013
gcagaaauccagugcaaga

SEQ ID NO: 234047 - RNA, 19 nt, Artificial Sequence
  Description of Artificial Sequence: Synthetic oligonucleotide
  Antisense strand to SEQ ID NO: 234046
ucuugcacuggauuucugc

SEQ ID NO: 234048 - RNA, 19 nt, Artificial Sequence
  Description of Artificial Sequence: Synthetic oligonucleotide
  Sense strand starting at position 838 SEQ ID NO: 3013
gcaagaacacugcgagagu

SEQ ID NO: 234049 - RNA, 19 nt, Artificial Sequence
  Description of Artificial Sequence: Synthetic oligonucleotide
  Antisense strand to SEQ ID NO: 234048
acucucgcaguguucuugc

SEQ ID NO: 234050 - RNA, 19 nt, Artificial Sequence
  Description of Artificial Sequence: Synthetic oligonucleotide
  Sense strand starting at position 937 SEQ ID NO: 3013
gguggaguuaaguagugga

SEQ ID NO: 234051 - RNA, 19 nt, Artificial Sequence
  Description of Artificial Sequence: Synthetic oligonucleotide
  Antisense strand to SEQ ID NO: 234050
uccacuacuuaacuccacc

SEQ ID NO: 234052 - RNA, 19 nt, Artificial Sequence
  Description of Artificial Sequence: Synthetic oligonucleotide
  Sense strand starting at position 941 SEQ ID NO: 3013
gaguuaaguaguggaggau

SEQ ID NO: 234053 - RNA, 19 nt, Artificial Sequence
  Description of Artificial Sequence: Synthetic oligonucleotide
  Antisense strand to SEQ ID NO: 234052
auccuccacuacuuaacuc

SEQ ID NO: 234054 - RNA, 19 nt, Artificial Sequence
  Description of Artificial Sequence: Synthetic oligonucleotide
  Sense strand starting at position 977 SEQ ID NO: 3013
ggcugcuuuccgcuaacua

SEQ ID NO: 234055 - RNA, 19 nt, Artificial Sequence
  Description of Artificial Sequence: Synthetic oligonucleotide
  Antisense strand to SEQ ID NO: 234054
uaguuagcggaaagcagcc

SEQ ID NO: 234056 - RNA, 19 nt, Artificial Sequence
  Description of Artificial Sequence: Synthetic oligonucleotide
  Sense strand starting at position 1675 SEQ ID NO: 3013
gcgcaaauuccucacugga

SEQ ID NO: 234057 - RNA, 19 nt, Artificial Sequence
  Description of Artificial Sequence: Synthetic oligonucleotide
  Antisense strand to SEQ ID NO: 234056
uccagugaggaauuugcgc

SEQ ID NO: 234058 - RNA, 19 nt, Artificial Sequence
  Description of Artificial Sequence: Synthetic oligonucleotide
  Sense strand starting at position 1677 SEQ ID NO: 3013
gcaaauuccucacuggaca

SEQ ID NO: 234059 - RNA, 19 nt, Artificial Sequence
  Description of Artificial Sequence: Synthetic oligonucleotide
  Antisense strand to SEQ ID NO: 234058
uguccagugaggaauuugc

SEQ ID NO: 234060 - RNA, 19 nt, Artificial Sequence
  Description of Artificial Sequence: Synthetic oligonucleotide
  Sense strand starting at position 2572 SEQ ID NO: 3013
guuacucuggcuugacuga

SEQ ID NO: 234061 - RNA, 19 nt, Artificial Sequence
  Description of Artificial Sequence: Synthetic oligonucleotide
  Antisense strand to SEQ ID NO: 234060
ucagucaagccagaguaac

SEQ ID NO: 234062 - RNA, 19 nt, Artificial Sequence
  Description of Artificial Sequence: Synthetic oligonucleotide
  Sense strand starting at position 2577 SEQ ID NO: 3013
ucuggcuugacugaaaugu

SEQ ID NO: 234063 - RNA, 19 nt, Artificial Sequence
  Description of Artificial Sequence: Synthetic oligonucleotide
  Antisense strand to SEQ ID NO: 234062
acauuucagucaagccaga

SEQ ID NO: 234064 - RNA, 19 nt, Artificial Sequence
  Description of Artificial Sequence: Synthetic oligonucleotide
  Sense strand starting at position 2587 SEQ ID NO: 3013
cugaaauguucuguggaaa

SEQ ID NO: 234065 - RNA, 19 nt, Artificial Sequence
  Description of Artificial Sequence: Synthetic oligonucleotide
  Antisense strand to SEQ ID NO: 234064
uuuccacagaacauuucag

SEQ ID NO: 234066 - RNA, 19 nt, Artificial Sequence
  Description of Artificial Sequence: Synthetic oligonucleotide
  Sense strand starting at position 2588 SEQ ID NO: 3013
ugaaauguucuguggaaac

SEQ ID NO: 234067 - RNA, 19 nt, Artificial Sequence
  Description of Artificial Sequence: Synthetic oligonucleotide
  Antisense strand to SEQ ID NO: 234066
guuuccacagaacauuuca

SEQ ID NO: 234068 - RNA, 19 nt, Artificial Sequence
  Description of Artificial Sequence: Synthetic oligonucleotide
  Sense strand starting at position 2601 SEQ ID NO: 3013
ggaaacaagucacuguguu

SEQ ID NO: 234069 - RNA, 19 nt, Artificial Sequence
  Description of Artificial Sequence: Synthetic oligonucleotide
  Antisense strand to SEQ ID NO: 234068
aacacagugacuuguuucc

SEQ ID NO: 234070 - RNA, 19 nt, Artificial Sequence
  Description of Artificial Sequence: Synthetic oligonucleotide
  Sense strand starting at position 2602 SEQ ID NO: 3013
gaaacaagucacuguguuu

SEQ ID NO: 234071 - RNA, 19 nt, Artificial Sequence
  Description of Artificial Sequence: Synthetic oligonucleotide
  Antisense strand to SEQ ID NO: 234070
aaacacagugacuuguuuc

SEQ ID NO: 234072 - RNA, 19 nt, Artificial Sequence
  Description of Artificial Sequence: Synthetic oligonucleotide
  Sense strand starting at position 2613 SEQ ID NO: 3013
cuguguuugcaguagggaa

SEQ ID NO: 234073 - RNA, 19 nt, Artificial Sequence
  Description of Artificial Sequence: Synthetic oligonucleotide
  Antisense strand to SEQ ID NO: 234072
uucccuacugcaaacacag

SEQ ID NO: 234074 - RNA, 19 nt, Artificial Sequence
  Description of Artificial Sequence: Synthetic oligonucleotide
  Sense strand starting at position 2725 SEQ ID NO: 3013
auagcuuugccacacgaaa

SEQ ID NO: 234075 - RNA, 19 nt, Artificial Sequence
  Description of Artificial Sequence: Synthetic oligonucleotide
  Antisense strand to SEQ ID NO: 234074
uuucguguggcaaagcuau

SEQ ID NO: 234076 - RNA, 19 nt, Artificial Sequence
  Description of Artificial Sequence: Synthetic oligonucleotide
  Sense strand starting at position 2805 SEQ ID NO: 3013
gaauaucccguuuggguua

SEQ ID NO: 234077 - RNA, 19 nt, Artificial Sequence
  Description of Artificial Sequence: Synthetic oligonucleotide
  Antisense strand to SEQ ID NO: 234076
uaacccaaacgggauauuc

SEQ ID NO: 234078 - RNA, 19 nt, Artificial Sequence
  Description of Artificial Sequence: Synthetic oligonucleotide
  Sense strand starting at position 2810 SEQ ID NO: 3013
ucccguuuggguuauacuu

SEQ ID NO: 234079 - RNA, 19 nt, Artificial Sequence
  Description of Artificial Sequence: Synthetic oligonucleotide
  Antisense strand to SEQ ID NO: 234078
aaguauaacccaaacggga

SEQ ID NO: 234080 - RNA, 19 nt, Artificial Sequence
  Description of Artificial Sequence: Synthetic oligonucleotide
  Sense strand starting at position 2818 SEQ ID NO: 3013
ggguuauacuuccuguuug

SEQ ID NO: 234081 - RNA, 19 nt, Artificial Sequence
  Description of Artificial Sequence: Synthetic oligonucleotide
  Antisense strand to SEQ ID NO: 234080
caaacaggaaguauaaccc

SEQ ID NO: 234082 - RNA, 19 nt, Artificial Sequence
  Description of Artificial Sequence: Synthetic oligonucleotide
  Sense strand starting at position 2904 SEQ ID NO: 3013
gaggcuuagaaguggaaac

SEQ ID NO: 234083 - RNA, 19 nt, Artificial Sequence
  Description of Artificial Sequence: Synthetic oligonucleotide
  Antisense strand to SEQ ID NO: 234082
guuuccacuucuaagccuc

SEQ ID NO: 234084 - RNA, 19 nt, Artificial Sequence
  Description of Artificial Sequence: Synthetic oligonucleotide
  Sense strand starting at position 2905 SEQ ID NO: 3013
aggcuuagaaguggaaacu

SEQ ID NO: 234085 - RNA, 19 nt, Artificial Sequence
  Description of Artificial Sequence: Synthetic oligonucleotide
  Antisense strand to SEQ ID NO: 234084
aguuuccacuucuaagccu

SEQ ID NO: 234086 - RNA, 19 nt, Artificial Sequence
  Description of Artificial Sequence: Synthetic oligonucleotide
  Sense strand starting at position 2957 SEQ ID NO: 3013
acccgucaaagguaugaga

SEQ ID NO: 234087 - RNA, 19 nt, Artificial Sequence
  Description of Artificial Sequence: Synthetic oligonucleotide
  Antisense strand to SEQ ID NO: 234086
ucucauaccuuugacgggu

SEQ ID NO: 234088 - RNA, 19 nt, Artificial Sequence
  Description of Artificial Sequence: Synthetic oligonucleotide
  Sense strand starting at position 2959 SEQ ID NO: 3013
ccgucaaagguaugagaag

SEQ ID NO: 234089 - RNA, 19 nt, Artificial Sequence
  Description of Artificial Sequence: Synthetic oligonucleotide
  Antisense strand to SEQ ID NO: 234088
cuucucauaccuuugacgg

SEQ ID NO: 234090 - RNA, 19 nt, Artificial Sequence
  Description of Artificial Sequence: Synthetic oligonucleotide
  Sense strand starting at position 2997 SEQ ID NO: 3013
guuugcuacgaauaugauc

SEQ ID NO: 234091 - RNA, 19 nt, Artificial Sequence
  Description of Artificial Sequence: Synthetic oligonucleotide
  Antisense strand to SEQ ID NO: 234090
gaucauauucguagcaaac

SEQ ID NO: 234092 - RNA, 19 nt, Artificial Sequence
  Description of Artificial Sequence: Synthetic oligonucleotide
  Sense strand starting at position 3002 SEQ ID NO: 3013
cuacgaauaugauccugau

SEQ ID NO: 234093 - RNA, 19 nt, Artificial Sequence
  Description of Artificial Sequence: Synthetic oligonucleotide
  Antisense strand to SEQ ID NO: 234092
aucaggaucauauucguag

SEQ ID NO: 234094 - RNA, 19 nt, Artificial Sequence
  Description of Artificial Sequence: Synthetic oligonucleotide
  Sense strand starting at position 3084 SEQ ID NO: 3013
aaagguguugaguagacua

SEQ ID NO: 234095 - RNA, 19 nt, Artificial Sequence
  Description of Artificial Sequence: Synthetic oligonucleotide
  Antisense strand to SEQ ID NO: 234094
uagucuacucaacaccuuu

SEQ ID NO: 234096 - RNA, 19 nt, Artificial Sequence
  Description of Artificial Sequence: Synthetic oligonucleotide
  Sense strand starting at position 3086 SEQ ID NO: 3013
agguguugaguagacuaaa

SEQ ID NO: 234097 - RNA, 19 nt, Artificial Sequence
  Description of Artificial Sequence: Synthetic oligonucleotide
  Antisense strand to SEQ ID NO: 234096
uuuagucuacucaacaccu

SEQ ID NO: 234098 - RNA, 19 nt, Artificial Sequence
  Description of Artificial Sequence: Synthetic oligonucleotide
  Sense strand starting at position 3228 SEQ ID NO: 3013
ggcugauagcugcagaaga

SEQ ID NO: 234099 - RNA, 19 nt, Artificial Sequence
  Description of Artificial Sequence: Synthetic oligonucleotide
  Antisense strand to SEQ ID NO: 234098
ucuucugcagcuaucagcc

SEQ ID NO: 234100 - RNA, 19 nt, Artificial Sequence
  Description of Artificial Sequence: Synthetic oligonucleotide
  Sense strand starting at position 3230 SEQ ID NO: 3013
cugauagcugcagaagaau

SEQ ID NO: 234101 - RNA, 19 nt, Artificial Sequence
  Description of Artificial Sequence: Synthetic oligonucleotide
  Antisense strand to SEQ ID NO: 234100
auucuucugcagcuaucag

SEQ ID NO: 234102 - RNA, 19 nt, Artificial Sequence
  Description of Artificial Sequence: Synthetic oligonucleotide
  Sense strand starting at position 3292 SEQ ID NO: 3013
cgucauuccacagauggaa

SEQ ID NO: 234103 - RNA, 19 nt, Artificial Sequence
  Description of Artificial Sequence: Synthetic oligonucleotide
  Antisense strand to SEQ ID NO: 234102
uuccaucuguggaaugacg

SEQ ID NO: 234104 - RNA, 19 nt, Artificial Sequence
  Description of Artificial Sequence: Synthetic oligonucleotide
  Sense strand starting at position 3327 SEQ ID NO: 3013
cuuguuuagucaucuacca

SEQ ID NO: 234105 - RNA, 19 nt, Artificial Sequence
  Description of Artificial Sequence: Synthetic oligonucleotide
  Antisense strand to SEQ ID NO: 234104
ugguagaugacuaaacaag

SEQ ID NO: 234106 - RNA, 19 nt, Artificial Sequence
  Description of Artificial Sequence: Synthetic oligonucleotide
  Sense strand starting at position 3446 SEQ ID NO: 3013
ugugacuucucccuucgga

SEQ ID NO: 234107 - RNA, 19 nt, Artificial Sequence
  Description of Artificial Sequence: Synthetic oligonucleotide
  Antisense strand to SEQ ID NO: 234106
uccgaagggagaagucaca

SEQ ID NO: 234108 - RNA, 19 nt, Artificial Sequence
  Description of Artificial Sequence: Synthetic oligonucleotide
  Sense strand starting at position 3500 SEQ ID NO: 3013
aggaaauucuuggaacgag

SEQ ID NO: 234109 - RNA, 19 nt, Artificial Sequence
  Description of Artificial Sequence: Synthetic oligonucleotide
  Antisense strand to SEQ ID NO: 234108
cucguuccaagaauuuccu

SEQ ID NO: 234110 - RNA, 19 nt, Artificial Sequence
  Description of Artificial Sequence: Synthetic oligonucleotide
  Sense strand starting at position 34 SEQ ID NO: 3014
gaaaguugaugcccaagaa

SEQ ID NO: 234111 - RNA, 19 nt, Artificial Sequence
  Description of Artificial Sequence: Synthetic oligonucleotide
  Antisense strand to SEQ ID NO: 234110
uucuugggcaucaacuuuc

SEQ ID NO: 234112 - RNA, 19 nt, Artificial Sequence
  Description of Artificial Sequence: Synthetic oligonucleotide
  Sense strand starting at position 308 SEQ ID NO: 3014
acuugugauugacuccauu

SEQ ID NO: 234113 - RNA, 19 nt, Artificial Sequence
  Description of Artificial Sequence: Synthetic oligonucleotide
  Antisense strand to SEQ ID NO: 234112
aauggagucaaucacaagu

SEQ ID NO: 234114 - RNA, 19 nt, Artificial Sequence
  Description of Artificial Sequence: Synthetic oligonucleotide
  Sense strand starting at position 364 SEQ ID NO: 3014
gacugaaaugacugugguu

SEQ ID NO: 234115 - RNA, 19 nt, Artificial Sequence
  Description of Artificial Sequence: Synthetic oligonucleotide
  Antisense strand to SEQ ID NO: 234114
aaccacagucauuucaguc

SEQ ID NO: 234116 - RNA, 19 nt, Artificial Sequence
  Description of Artificial Sequence: Synthetic oligonucleotide
  Sense strand starting at position 473 SEQ ID NO: 3014
auaacauuacgugagugua

SEQ ID NO: 234117 - RNA, 19 nt, Artificial Sequence
  Description of Artificial Sequence: Synthetic oligonucleotide
  Antisense strand to SEQ ID NO: 234116
uacacucacguaauguuau

SEQ ID NO: 234118 - RNA, 19 nt, Artificial Sequence
  Description of Artificial Sequence: Synthetic oligonucleotide
  Sense strand starting at position 707 SEQ ID NO: 3014
ggugaagguaauugcucaa

SEQ ID NO: 234119 - RNA, 19 nt, Artificial Sequence
  Description of Artificial Sequence: Synthetic oligonucleotide
  Antisense strand to SEQ ID NO: 234118
uugagcaauuaccuucacc

SEQ ID NO: 234120 - RNA, 19 nt, Artificial Sequence
  Description of Artificial Sequence: Synthetic oligonucleotide
  Sense strand starting at position 726 SEQ ID NO: 3014
acuggaucuugagcaaaca

SEQ ID NO: 234121 - RNA, 19 nt, Artificial Sequence
  Description of Artificial Sequence: Synthetic oligonucleotide
  Antisense strand to SEQ ID NO: 234120
uguuugcucaagauccagu

SEQ ID NO: 234122 - RNA, 19 nt, Artificial Sequence
  Description of Artificial Sequence: Synthetic oligonucleotide
  Sense strand starting at position 755 SEQ ID NO: 3014
acaucugucgguuagagua

SEQ ID NO: 234123 - RNA, 19 nt, Artificial Sequence
  Description of Artificial Sequence: Synthetic oligonucleotide
  Antisense strand to SEQ ID NO: 234122
uacucuaaccgacagaugu

SEQ ID NO: 234124 - RNA, 19 nt, Artificial Sequence
  Description of Artificial Sequence: Synthetic oligonucleotide
  Sense strand starting at position 768 SEQ ID NO: 3014
agaguaagguuauugaaau

SEQ ID NO: 234125 - RNA, 19 nt, Artificial Sequence
  Description of Artificial Sequence: Synthetic oligonucleotide
  Antisense strand to SEQ ID NO: 234124
auuucaauaaccuuacucu

SEQ ID NO: 234126 - RNA, 19 nt, Artificial Sequence
  Description of Artificial Sequence: Synthetic oligonucleotide
  Sense strand starting at position 889 SEQ ID NO: 3014
gacugagauugccugagaa

SEQ ID NO: 234127 - RNA, 19 nt, Artificial Sequence
  Description of Artificial Sequence: Synthetic oligonucleotide
  Antisense strand to SEQ ID NO: 234126
uucucaggcaaucucaguc

SEQ ID NO: 234128 - RNA, 19 nt, Artificial Sequence
  Description of Artificial Sequence: Synthetic oligonucleotide
  Sense strand starting at position 899 SEQ ID NO: 3014
gccugagaaucagcaaaga

SEQ ID NO: 234129 - RNA, 19 nt, Artificial Sequence
  Description of Artificial Sequence: Synthetic oligonucleotide
  Antisense strand to SEQ ID NO: 234128
ucuuugcugauucucaggc

SEQ ID NO: 234130 - RNA, 19 nt, Artificial Sequence
  Description of Artificial Sequence: Synthetic oligonucleotide
  Sense strand starting at position 1004 SEQ ID NO: 3014
gaaggauuccuguggagua

SEQ ID NO: 234131 - RNA, 19 nt, Artificial Sequence
  Description of Artificial Sequence: Synthetic oligonucleotide
  Antisense strand to SEQ ID NO: 234130
uacuccacaggaauccuuc

SEQ ID NO: 234132 - RNA, 19 nt, Artificial Sequence
  Description of Artificial Sequence: Synthetic oligonucleotide
  Sense strand starting at position 1009 SEQ ID NO: 3014
auuccuguggaguagaagu

SEQ ID NO: 234133 - RNA, 19 nt, Artificial Sequence
  Description of Artificial Sequence: Synthetic oligonucleotide
  Antisense strand to SEQ ID NO: 234132
acuucuacuccacaggaau

SEQ ID NO: 234134 - RNA, 19 nt, Artificial Sequence
  Description of Artificial Sequence: Synthetic oligonucleotide
  Sense strand starting at position 1026 SEQ ID NO: 3014
gugugauggguuuggaaug

SEQ ID NO: 234135 - RNA, 19 nt, Artificial Sequence
  Description of Artificial Sequence: Synthetic oligonucleotide
  Antisense strand to SEQ ID NO: 234134
cauuccaaacccaucacac

SEQ ID NO: 234136 - RNA, 19 nt, Artificial Sequence
  Description of Artificial Sequence: Synthetic oligonucleotide
  Sense strand starting at position 1056 SEQ ID NO: 3014
uuagaaagaucgccuauug

SEQ ID NO: 234137 - RNA, 19 nt, Artificial Sequence
  Description of Artificial Sequence: Synthetic oligonucleotide
  Antisense strand to SEQ ID NO: 234136
caauaggcgaucuuucuaa

SEQ ID NO: 234138 - RNA, 19 nt, Artificial Sequence
  Description of Artificial Sequence: Synthetic oligonucleotide
  Sense strand starting at position 1094 SEQ ID NO: 3014
aucaguuuggaaggugaua

SEQ ID NO: 234139 - RNA, 19 nt, Artificial Sequence
  Description of Artificial Sequence: Synthetic oligonucleotide
  Antisense strand to SEQ ID NO: 234138
uaucaccuuccaaacugau

SEQ ID NO: 234140 - RNA, 19 nt, Artificial Sequence
  Description of Artificial Sequence: Synthetic oligonucleotide
  Sense strand starting at position 1178 SEQ ID NO: 3014
ggagcaguuaugggagaga

SEQ ID NO: 234141 - RNA, 19 nt, Artificial Sequence
  Description of Artificial Sequence: Synthetic oligonucleotide
  Antisense strand to SEQ ID NO: 234140
ucucucccauaacugcucc

SEQ ID NO: 234142 - RNA, 19 nt, Artificial Sequence
  Description of Artificial Sequence: Synthetic oligonucleotide
  Sense strand starting at position 1193 SEQ ID NO: 3014
gagauuaagugauccgaag

SEQ ID NO: 234143 - RNA, 19 nt, Artificial Sequence
  Description of Artificial Sequence: Synthetic oligonucleotide
  Antisense strand to SEQ ID NO: 234142
cuucggaucacuuaaucuc

SEQ ID NO: 234144 - RNA, 19 nt, Artificial Sequence
  Description of Artificial Sequence: Synthetic oligonucleotide
  Sense strand starting at position 1195 SEQ ID NO: 3014
gauuaagugauccgaagag

SEQ ID NO: 234145 - RNA, 19 nt, Artificial Sequence
  Description of Artificial Sequence: Synthetic oligonucleotide
  Antisense strand to SEQ ID NO: 234144
cucuucggaucacuuaauc

SEQ ID NO: 234146 - RNA, 19 nt, Artificial Sequence
  Description of Artificial Sequence: Synthetic oligonucleotide
  Sense strand starting at position 1320 SEQ ID NO: 3014
uaacgauggccucgggaga

SEQ ID NO: 234147 - RNA, 19 nt, Artificial Sequence
  Description of Artificial Sequence: Synthetic oligonucleotide
  Antisense strand to SEQ ID NO: 234146
ucucccgaggccaucguua

SEQ ID NO: 234148 - RNA, 19 nt, Artificial Sequence
  Description of Artificial Sequence: Synthetic oligonucleotide
  Sense strand starting at position 1410 SEQ ID NO: 3014
ugaugaguaugggcucaca

SEQ ID NO: 234149 - RNA, 19 nt, Artificial Sequence
  Description of Artificial Sequence: Synthetic oligonucleotide
  Antisense strand to SEQ ID NO: 234148
ugugagcccauacucauca

SEQ ID NO: 234150 - RNA, 19 nt, Artificial Sequence
  Description of Artificial Sequence: Synthetic oligonucleotide
  Sense strand starting at position 2057 SEQ ID NO: 3014
ucagacuucgcagaucagu

SEQ ID NO: 234151 - RNA, 19 nt, Artificial Sequence
  Description of Artificial Sequence: Synthetic oligonucleotide
  Antisense strand to SEQ ID NO: 234150
acugaucugcgaagucuga

SEQ ID NO: 234152 - RNA, 19 nt, Artificial Sequence
  Description of Artificial Sequence: Synthetic oligonucleotide
  Sense strand starting at position 2283 SEQ ID NO: 3014
gcaguaagaguuuacaagu

SEQ ID NO: 234153 - RNA, 19 nt, Artificial Sequence
  Description of Artificial Sequence: Synthetic oligonucleotide
  Antisense strand to SEQ ID NO: 234152
acuuguaaacucuuacugc

SEQ ID NO: 234154 - RNA, 19 nt, Artificial Sequence
  Description of Artificial Sequence: Synthetic oligonucleotide
  Sense strand starting at position 2481 SEQ ID NO: 3014
ugcucuucccgagaaugga

SEQ ID NO: 234155 - RNA, 19 nt, Artificial Sequence
  Description of Artificial Sequence: Synthetic oligonucleotide
  Antisense strand to SEQ ID NO: 234154
uccauucucgggaagagca

SEQ ID NO: 234156 - RNA, 19 nt, Artificial Sequence
  Description of Artificial Sequence: Synthetic oligonucleotide
  Sense strand starting at position 2718 SEQ ID NO: 3014
cccuccuuccuggagguau

SEQ ID NO: 234157 - RNA, 19 nt, Artificial Sequence
  Description of Artificial Sequence: Synthetic oligonucleotide
  Antisense strand to SEQ ID NO: 234156
auaccuccaggaaggaggg

SEQ ID NO: 234158 - RNA, 19 nt, Artificial Sequence
  Description of Artificial Sequence: Synthetic oligonucleotide
  Sense strand starting at position 2770 SEQ ID NO: 3014
aucacuggcucugcagaaa

SEQ ID NO: 234159 - RNA, 19 nt, Artificial Sequence
  Description of Artificial Sequence: Synthetic oligonucleotide
  Antisense strand to SEQ ID NO: 234158
uuucugcagagccagugau

SEQ ID NO: 234160 - RNA, 19 nt, Artificial Sequence
  Description of Artificial Sequence: Synthetic oligonucleotide
  Sense strand starting at position 3074 SEQ ID NO: 3014
auuagaacucuugagcuuu

SEQ ID NO: 234161 - RNA, 19 nt, Artificial Sequence
  Description of Artificial Sequence: Synthetic oligonucleotide
  Antisense strand to SEQ ID NO: 234160
aaagcucaagaguucuaau

SEQ ID NO: 234162 - RNA, 19 nt, Artificial Sequence
  Description of Artificial Sequence: Synthetic oligonucleotide
  Sense strand starting at position 3100 SEQ ID NO: 3014
aaggguuaacguggaaacu

SEQ ID NO: 234163 - RNA, 19 nt, Artificial Sequence
  Description of Artificial Sequence: Synthetic oligonucleotide
  Antisense strand to SEQ ID NO: 234162
aguuuccacguuaacccuu

SEQ ID NO: 234164 - RNA, 19 nt, Artificial Sequence
  Description of Artificial Sequence: Synthetic oligonucleotide
  Sense strand starting at position 3101 SEQ ID NO: 3014
aggguuaacguggaaacua

SEQ ID NO: 234165 - RNA, 19 nt, Artificial Sequence
  Description of Artificial Sequence: Synthetic oligonucleotide
  Antisense strand to SEQ ID NO: 234164
uaguuuccacguuaacccu

SEQ ID NO: 234166 - RNA, 19 nt, Artificial Sequence
  Description of Artificial Sequence: Synthetic oligonucleotide
  Sense strand starting at position 3200 SEQ ID NO: 3014
acaauucugcccgacacuu

SEQ ID NO: 234167 - RNA, 19 nt, Artificial Sequence
  Description of Artificial Sequence: Synthetic oligonucleotide
  Antisense strand to SEQ ID NO: 234166
aagugucgggcagaauugu

SEQ ID NO: 234168 - RNA, 19 nt, Artificial Sequence
  Description of Artificial Sequence: Synthetic oligonucleotide
  Sense strand starting at position 3283 SEQ ID NO: 3014
ccuuuccauccagaugagu

SEQ ID NO: 234169 - RNA, 19 nt, Artificial Sequence
  Description of Artificial Sequence: Synthetic oligonucleotide
  Antisense strand to SEQ ID NO: 234168
acucaucuggauggaaagg

SEQ ID NO: 234170 - RNA, 19 nt, Artificial Sequence
  Description of Artificial Sequence: Synthetic oligonucleotide
  Sense strand starting at position 3445 SEQ ID NO: 3014
augcccucucaaugggaaa

SEQ ID NO: 234171 - RNA, 19 nt, Artificial Sequence
  Description of Artificial Sequence: Synthetic oligonucleotide
  Antisense strand to SEQ ID NO: 234170
uuucccauugagagggcau

SEQ ID NO: 234172 - RNA, 19 nt, Artificial Sequence
  Description of Artificial Sequence: Synthetic oligonucleotide
  Sense strand starting at position 3476 SEQ ID NO: 3014
aggauugccgaaugucaga

SEQ ID NO: 234173 - RNA, 19 nt, Artificial Sequence
  Description of Artificial Sequence: Synthetic oligonucleotide
  Antisense strand to SEQ ID NO: 234172
ucugacauucggcaauccu

SEQ ID NO: 234174 - RNA, 19 nt, Artificial Sequence
  Description of Artificial Sequence: Synthetic oligonucleotide
  Sense strand starting at position 3679 SEQ ID NO: 3014
gugacuugacagcacuuau

SEQ ID NO: 234175 - RNA, 19 nt, Artificial Sequence
  Description of Artificial Sequence: Synthetic oligonucleotide
  Antisense strand to SEQ ID NO: 234174
auaagugcugucaagucac

SEQ ID NO: 234176 - RNA, 19 nt, Artificial Sequence
  Description of Artificial Sequence: Synthetic oligonucleotide
  Sense strand starting at position 3709 SEQ ID NO: 3014
gcuaacuugaguuauggaa

SEQ ID NO: 234177 - RNA, 19 nt, Artificial Sequence
  Description of Artificial Sequence: Synthetic oligonucleotide
  Antisense strand to SEQ ID NO: 234176
uuccauaacucaaguuagc

SEQ ID NO: 234178 - RNA, 19 nt, Artificial Sequence
  Description of Artificial Sequence: Synthetic oligonucleotide
  Sense strand starting at position 3783 SEQ ID NO: 3014
gaaggaaguuuguuccacu

SEQ ID NO: 234179 - RNA, 19 nt, Artificial Sequence
  Description of Artificial Sequence: Synthetic oligonucleotide
  Antisense strand to SEQ ID NO: 234178
aguggaacaaacuuccuuc

SEQ ID NO: 234180 - RNA, 19 nt, Artificial Sequence
  Description of Artificial Sequence: Synthetic oligonucleotide
  Sense strand starting at position 3784 SEQ ID NO: 3014
aaggaaguuuguuccacuu

SEQ ID NO: 234181 - RNA, 19 nt, Artificial Sequence
  Description of Artificial Sequence: Synthetic oligonucleotide
  Antisense strand to SEQ ID NO: 234180
aaguggaacaaacuuccuu

SEQ ID NO: 234182 - RNA, 19 nt, Artificial Sequence
  Description of Artificial Sequence: Synthetic oligonucleotide
  Sense strand starting at position 3837 SEQ ID NO: 3014
cagggagucaguuaguaua

SEQ ID NO: 234183 - RNA, 19 nt, Artificial Sequence
  Description of Artificial Sequence: Synthetic oligonucleotide
  Antisense strand to SEQ ID NO: 234182
uauacuaacugacucccug

SEQ ID NO: 234184 - RNA, 19 nt, Artificial Sequence
  Description of Artificial Sequence: Synthetic oligonucleotide
  Sense strand starting at position 3839 SEQ ID NO: 3014
gggagucaguuaguauaca

SEQ ID NO: 234185 - RNA, 19 nt, Artificial Sequence
  Description of Artificial Sequence: Synthetic oligonucleotide
  Antisense strand to SEQ ID NO: 234184
uguauacuaacugacuccc

SEQ ID NO: 234186 - RNA, 19 nt, Artificial Sequence
  Description of Artificial Sequence: Synthetic oligonucleotide
  Sense strand starting at position 3862 SEQ ID NO: 3014
uugccuggucuacaauuau

SEQ ID NO: 234187 - RNA, 19 nt, Artificial Sequence
  Description of Artificial Sequence: Synthetic oligonucleotide
  Antisense strand to SEQ ID NO: 234186
auaauuguagaccaggcaa

SEQ ID NO: 234188 - RNA, 19 nt, Artificial Sequence
  Description of Artificial Sequence: Synthetic oligonucleotide
  Sense strand starting at position 3880 SEQ ID NO: 3014
ucuagugucauguaagaga

SEQ ID NO: 234189 - RNA, 19 nt, Artificial Sequence
  Description of Artificial Sequence: Synthetic oligonucleotide
  Antisense strand to SEQ ID NO: 234188
ucucuuacaugacacuaga

SEQ ID NO: 234190 - RNA, 19 nt, Artificial Sequence
  Description of Artificial Sequence: Synthetic oligonucleotide
  Sense strand starting at position 327 SEQ ID NO: 3015
cacugaaagucacuuagga

SEQ ID NO: 234191 - RNA, 19 nt, Artificial Sequence
  Description of Artificial Sequence: Synthetic oligonucleotide
  Antisense strand to SEQ ID NO: 234190
uccuaagugacuuucagug

SEQ ID NO: 234192 - RNA, 19 nt, Artificial Sequence
  Description of Artificial Sequence: Synthetic oligonucleotide
  Sense strand starting at position 375 SEQ ID NO: 3015
uggccuucuccugugcuua

SEQ ID NO: 234193 - RNA, 19 nt, Artificial Sequence
  Description of Artificial Sequence: Synthetic oligonucleotide
  Antisense strand to SEQ ID NO: 234192
uaagcacaggagaaggcca

SEQ ID NO: 234194 - RNA, 19 nt, Artificial Sequence
  Description of Artificial Sequence: Synthetic oligonucleotide
  Sense strand starting at position 385 SEQ ID NO: 3015
cugugcuuauauuuaccua

SEQ ID NO: 234195 - RNA, 19 nt, Artificial Sequence
  Description of Artificial Sequence: Synthetic oligonucleotide
  Antisense strand to SEQ ID NO: 234194
uagguaaauauaagcacag

SEQ ID NO: 234196 - RNA, 19 nt, Artificial Sequence
  Description of Artificial Sequence: Synthetic oligonucleotide
  Sense strand starting at position 451 SEQ ID NO: 3015
ggaguagcugucuaaucug

SEQ ID NO: 234197 - RNA, 19 nt, Artificial Sequence
  Description of Artificial Sequence: Synthetic oligonucleotide
  Antisense strand to SEQ ID NO: 234196
cagauuagacagcuacucc

SEQ ID NO: 234198 - RNA, 19 nt, Artificial Sequence
  Description of Artificial Sequence: Synthetic oligonucleotide
  Sense strand starting at position 487 SEQ ID NO: 3015
cacagagcuggccaguuau

SEQ ID NO: 234199 - RNA, 19 nt, Artificial Sequence
  Description of Artificial Sequence: Synthetic oligonucleotide
  Antisense strand to SEQ ID NO: 234198
auaacuggccagcucugug

SEQ ID NO: 234200 - RNA, 19 nt, Artificial Sequence
  Description of Artificial Sequence: Synthetic oligonucleotide
  Sense strand starting at position 605 SEQ ID NO: 3015
cucauugucccugagugaa

SEQ ID NO: 234201 - RNA, 19 nt, Artificial Sequence
  Description of Artificial Sequence: Synthetic oligonucleotide
  Antisense strand to SEQ ID NO: 234200
uucacucagggacaaugag

SEQ ID NO: 234202 - RNA, 19 nt, Artificial Sequence
  Description of Artificial Sequence: Synthetic oligonucleotide
  Sense strand starting at position 724 SEQ ID NO: 3015
uuaagugacaaagguugaa

SEQ ID NO: 234203 - RNA, 19 nt, Artificial Sequence
  Description of Artificial Sequence: Synthetic oligonucleotide
  Antisense strand to SEQ ID NO: 234202
uucaaccuuugucacuuaa

SEQ ID NO: 234204 - RNA, 19 nt, Artificial Sequence
  Description of Artificial Sequence: Synthetic oligonucleotide
  Sense strand starting at position 882 SEQ ID NO: 3015
gucacaguggguugggaaa

SEQ ID NO: 234205 - RNA, 19 nt, Artificial Sequence
  Description of Artificial Sequence: Synthetic oligonucleotide
  Antisense strand to SEQ ID NO: 234204
uuucccaacccacugugac

SEQ ID NO: 234206 - RNA, 19 nt, Artificial Sequence
  Description of Artificial Sequence: Synthetic oligonucleotide
  Sense strand starting at position 920 SEQ ID NO: 3015
aacaguagacugugaguca

SEQ ID NO: 234207 - RNA, 19 nt, Artificial Sequence
  Description of Artificial Sequence: Synthetic oligonucleotide
  Antisense strand to SEQ ID NO: 234206
ugacucacagucuacuguu

SEQ ID NO: 234208 - RNA, 19 nt, Artificial Sequence
  Description of Artificial Sequence: Synthetic oligonucleotide
  Sense strand starting at position 969 SEQ ID NO: 3015
ucaacucaucacgagaguu

SEQ ID NO: 234209 - RNA, 19 nt, Artificial Sequence
  Description of Artificial Sequence: Synthetic oligonucleotide
  Antisense strand to SEQ ID NO: 234208
aacucucgugaugaguuga

SEQ ID NO: 234210 - RNA, 19 nt, Artificial Sequence
  Description of Artificial Sequence: Synthetic oligonucleotide
  Sense strand starting at position 1046 SEQ ID NO: 3015
guaggauggugucuaaauu

SEQ ID NO: 234211 - RNA, 19 nt, Artificial Sequence
  Description of Artificial Sequence: Synthetic oligonucleotide
  Antisense strand to SEQ ID NO: 234210
aauuuagacaccauccuac

SEQ ID NO: 234212 - RNA, 19 nt, Artificial Sequence
  Description of Artificial Sequence: Synthetic oligonucleotide
  Sense strand starting at position 1047 SEQ ID NO: 3015
uaggauggugucuaaauuc

SEQ ID NO: 234213 - RNA, 19 nt, Artificial Sequence
  Description of Artificial Sequence: Synthetic oligonucleotide
  Antisense strand to SEQ ID NO: 234212
gaauuuagacaccauccua

SEQ ID NO: 234214 - RNA, 19 nt, Artificial Sequence
  Description of Artificial Sequence: Synthetic oligonucleotide
  Sense strand starting at position 1319 SEQ ID NO: 3015
caguguccucgggagacau

SEQ ID NO: 234215 - RNA, 19 nt, Artificial Sequence
  Description of Artificial Sequence: Synthetic oligonucleotide
  Antisense strand to SEQ ID NO: 234214
augucucccgaggacacug

SEQ ID NO: 234216 - RNA, 19 nt, Artificial Sequence
  Description of Artificial Sequence: Synthetic oligonucleotide
  Sense strand starting at position 1330 SEQ ID NO: 3015
ggagacauaccuuguguau

SEQ ID NO: 234217 - RNA, 19 nt, Artificial Sequence
  Description of Artificial Sequence: Synthetic oligonucleotide
  Antisense strand to SEQ ID NO: 234216
auacacaagguaugucucc

SEQ ID NO: 234218 - RNA, 19 nt, Artificial Sequence
  Description of Artificial Sequence: Synthetic oligonucleotide
  Sense strand starting at position 1747 SEQ ID NO: 3015
ggcauuccucgggagguca

SEQ ID NO: 234219 - RNA, 19 nt, Artificial Sequence
  Description of Artificial Sequence: Synthetic oligonucleotide
  Antisense strand to SEQ ID NO: 234218
ugaccucccgaggaaugcc

SEQ ID NO: 234220 - RNA, 19 nt, Artificial Sequence
  Description of Artificial Sequence: Synthetic oligonucleotide
  Sense strand starting at position 1766 SEQ ID NO: 3015
gaaggaaucucugucaccu

SEQ ID NO: 234221 - RNA, 19 nt, Artificial Sequence
  Description of Artificial Sequence: Synthetic oligonucleotide
  Antisense strand to SEQ ID NO: 234220
aggugacagagauuccuuc

SEQ ID NO: 234222 - RNA, 19 nt, Artificial Sequence
  Description of Artificial Sequence: Synthetic oligonucleotide
  Sense strand starting at position 1808 SEQ ID NO: 3015
cuguuagagcagugacaga

SEQ ID NO: 234223 - RNA, 19 nt, Artificial Sequence
  Description of Artificial Sequence: Synthetic oligonucleotide
  Antisense strand to SEQ ID NO: 234222
ucugucacugcucuaacag

SEQ ID NO: 234224 - RNA, 19 nt, Artificial Sequence
  Description of Artificial Sequence: Synthetic oligonucleotide
  Sense strand starting at position 1878 SEQ ID NO: 3015
ggagcagggccauaauuau

SEQ ID NO: 234225 - RNA, 19 nt, Artificial Sequence
  Description of Artificial Sequence: Synthetic oligonucleotide
  Antisense strand to SEQ ID NO: 234224
auaauuauggcccugcucc

SEQ ID NO: 234226 - RNA, 19 nt, Artificial Sequence
  Description of Artificial Sequence: Synthetic oligonucleotide
  Sense strand starting at position 1993 SEQ ID NO: 3015
ugagaacugguagggucau

SEQ ID NO: 234227 - RNA, 19 nt, Artificial Sequence
  Description of Artificial Sequence: Synthetic oligonucleotide
  Antisense strand to SEQ ID NO: 234226
augacccuaccaguucuca

SEQ ID NO: 234228 - RNA, 19 nt, Artificial Sequence
  Description of Artificial Sequence: Synthetic oligonucleotide
  Sense strand starting at position 2137 SEQ ID NO: 3015
uaggcaugucuggaauagu

SEQ ID NO: 234229 - RNA, 19 nt, Artificial Sequence
  Description of Artificial Sequence: Synthetic oligonucleotide
  Antisense strand to SEQ ID NO: 234228
acuauuccagacaugccua

SEQ ID NO: 234230 - RNA, 19 nt, Artificial Sequence
  Description of Artificial Sequence: Synthetic oligonucleotide
  Sense strand starting at position 2210 SEQ ID NO: 3015
gagugacaugauugacuuu

SEQ ID NO: 234231 - RNA, 19 nt, Artificial Sequence
  Description of Artificial Sequence: Synthetic oligonucleotide
  Antisense strand to SEQ ID NO: 234230
aaagucaaucaugucacuc

SEQ ID NO: 234232 - RNA, 19 nt, Artificial Sequence
  Description of Artificial Sequence: Synthetic oligonucleotide
  Sense strand starting at position 2468 SEQ ID NO: 3015
guacuucugauaggguuau

SEQ ID NO: 234233 - RNA, 19 nt, Artificial Sequence
  Description of Artificial Sequence: Synthetic oligonucleotide
  Antisense strand to SEQ ID NO: 234232
auaacccuaucagaaguac

SEQ ID NO: 234234 - RNA, 19 nt, Artificial Sequence
  Description of Artificial Sequence: Synthetic oligonucleotide
  Sense strand starting at position 2472 SEQ ID NO: 3015
uucugauaggguuaucugu

SEQ ID NO: 234235 - RNA, 19 nt, Artificial Sequence
  Description of Artificial Sequence: Synthetic oligonucleotide
  Antisense strand to SEQ ID NO: 234234
acagauaacccuaucagaa

SEQ ID NO: 234236 - RNA, 19 nt, Artificial Sequence
  Description of Artificial Sequence: Synthetic oligonucleotide
  Sense strand starting at position 2474 SEQ ID NO: 3015
cugauaggguuaucuguag

SEQ ID NO: 234237 - RNA, 19 nt, Artificial Sequence
  Description of Artificial Sequence: Synthetic oligonucleotide
  Antisense strand to SEQ ID NO: 234236
cuacagauaacccuaucag

SEQ ID NO: 234238 - RNA, 19 nt, Artificial Sequence
  Description of Artificial Sequence: Synthetic oligonucleotide
  Sense strand starting at position 2491 SEQ ID NO: 3015
agcgauaauugacugaacu

SEQ ID NO: 234239 - RNA, 19 nt, Artificial Sequence
  Description of Artificial Sequence: Synthetic oligonucleotide
  Antisense strand to SEQ ID NO: 234238
aguucagucaauuaucgcu

SEQ ID NO: 234240 - RNA, 19 nt, Artificial Sequence
  Description of Artificial Sequence: Synthetic oligonucleotide
  Sense strand starting at position 2492 SEQ ID NO: 3015
gcgauaauugacugaacug

SEQ ID NO: 234241 - RNA, 19 nt, Artificial Sequence
  Description of Artificial Sequence: Synthetic oligonucleotide
  Antisense strand to SEQ ID NO: 234240
caguucagucaauuaucgc

SEQ ID NO: 234242 - RNA, 19 nt, Artificial Sequence
  Description of Artificial Sequence: Synthetic oligonucleotide
  Sense strand starting at position 2501 SEQ ID NO: 3015
gacugaacugagugaucua

SEQ ID NO: 234243 - RNA, 19 nt, Artificial Sequence
  Description of Artificial Sequence: Synthetic oligonucleotide
  Antisense strand to SEQ ID NO: 234242
uagaucacucaguucaguc

SEQ ID NO: 234244 - RNA, 19 nt, Artificial Sequence
  Description of Artificial Sequence: Synthetic oligonucleotide
  Sense strand starting at position 2634 SEQ ID NO: 3015
uggcaauuggcauaaauga

SEQ ID NO: 234245 - RNA, 19 nt, Artificial Sequence
  Description of Artificial Sequence: Synthetic oligonucleotide
  Antisense strand to SEQ ID NO: 234244
ucauuuaugccaauugcca

SEQ ID NO: 234246 - RNA, 19 nt, Artificial Sequence
  Description of Artificial Sequence: Synthetic oligonucleotide
  Sense strand starting at position 2822 SEQ ID NO: 3015
ggcagaauauucucuaaga

SEQ ID NO: 234247 - RNA, 19 nt, Artificial Sequence
  Description of Artificial Sequence: Synthetic oligonucleotide
  Antisense strand to SEQ ID NO: 234246
ucuuagagaauauucugcc

SEQ ID NO: 234248 - RNA, 19 nt, Artificial Sequence
  Description of Artificial Sequence: Synthetic oligonucleotide
  Sense strand starting at position 2823 SEQ ID NO: 3015
gcagaauauucucuaagau

SEQ ID NO: 234249 - RNA, 19 nt, Artificial Sequence
  Description of Artificial Sequence: Synthetic oligonucleotide
  Antisense strand to SEQ ID NO: 234248
aucuuagagaauauucugc

SEQ ID NO: 234250 - RNA, 19 nt, Artificial Sequence
  Description of Artificial Sequence: Synthetic oligonucleotide
  Sense strand starting at position 3070 SEQ ID NO: 3015
gagcaacugguuuauucua

SEQ ID NO: 234251 - RNA, 19 nt, Artificial Sequence
  Description of Artificial Sequence: Synthetic oligonucleotide
  Antisense strand to SEQ ID NO: 234250
uagaauaaaccaguugcuc

SEQ ID NO: 234252 - RNA, 19 nt, Artificial Sequence
  Description of Artificial Sequence: Synthetic oligonucleotide
  Sense strand starting at position 3078 SEQ ID NO: 3015
gguuuauucuaauucugga

SEQ ID NO: 234253 - RNA, 19 nt, Artificial Sequence
  Description of Artificial Sequence: Synthetic oligonucleotide
  Antisense strand to SEQ ID NO: 234252
uccagaauuagaauaaacc

SEQ ID NO: 234254 - RNA, 19 nt, Artificial Sequence
  Description of Artificial Sequence: Synthetic oligonucleotide
  Sense strand starting at position 3147 SEQ ID NO: 3015
ggcuaacaugaaugguuaa

SEQ ID NO: 234255 - RNA, 19 nt, Artificial Sequence
  Description of Artificial Sequence: Synthetic oligonucleotide
  Antisense strand to SEQ ID NO: 234254
uuaaccauucauguuagcc

SEQ ID NO: 234256 - RNA, 19 nt, Artificial Sequence
  Description of Artificial Sequence: Synthetic oligonucleotide
  Sense strand starting at position 3379 SEQ ID NO: 3015
uggagagcucuguaauuag

SEQ ID NO: 234257 - RNA, 19 nt, Artificial Sequence
  Description of Artificial Sequence: Synthetic oligonucleotide
  Antisense strand to SEQ ID NO: 234256
cuaauuacagagcucucca

SEQ ID NO: 234258 - RNA, 19 nt, Artificial Sequence
  Description of Artificial Sequence: Synthetic oligonucleotide
  Sense strand starting at position 3545 SEQ ID NO: 3015
gccaguccuguugcaucua

SEQ ID NO: 234259 - RNA, 19 nt, Artificial Sequence
  Description of Artificial Sequence: Synthetic oligonucleotide
  Antisense strand to SEQ ID NO: 234258
uagaugcaacaggacuggc

SEQ ID NO: 234260 - RNA, 19 nt, Artificial Sequence
  Description of Artificial Sequence: Synthetic oligonucleotide
  Sense strand starting at position 3603 SEQ ID NO: 3015
gcccaaggugaccauuaau

SEQ ID NO: 234261 - RNA, 19 nt, Artificial Sequence
  Description of Artificial Sequence: Synthetic oligonucleotide
  Antisense strand to SEQ ID NO: 234260
auuaauggucaccuugggc

SEQ ID NO: 234262 - RNA, 19 nt, Artificial Sequence
  Description of Artificial Sequence: Synthetic oligonucleotide
  Sense strand starting at position 3609 SEQ ID NO: 3015
ggugaccauuaaucugaau

SEQ ID NO: 234263 - RNA, 19 nt, Artificial Sequence
  Description of Artificial Sequence: Synthetic oligonucleotide
  Antisense strand to SEQ ID NO: 234262
auucagauuaauggucacc

SEQ ID NO: 234264 - RNA, 19 nt, Artificial Sequence
  Description of Artificial Sequence: Synthetic oligonucleotide
  Sense strand starting at position 3676 SEQ ID NO: 3015
auguaucuccaaggaauau

SEQ ID NO: 234265 - RNA, 19 nt, Artificial Sequence
  Description of Artificial Sequence: Synthetic oligonucleotide
  Antisense strand to SEQ ID NO: 234264
auauuccuuggagauacau

SEQ ID NO: 234266 - RNA, 19 nt, Artificial Sequence
  Description of Artificial Sequence: Synthetic oligonucleotide
  Sense strand starting at position 3846 SEQ ID NO: 3015
uagguauaccuguaguuua

SEQ ID NO: 234267 - RNA, 19 nt, Artificial Sequence
  Description of Artificial Sequence: Synthetic oligonucleotide
  Antisense strand to SEQ ID NO: 234266
uaaacuacagguauaccua

SEQ ID NO: 234268 - RNA, 19 nt, Artificial Sequence
  Description of Artificial Sequence: Synthetic oligonucleotide
  Sense strand starting at position 3942 SEQ ID NO: 3015
aaauccugagguugugaaa

SEQ ID NO: 234269 - RNA, 19 nt, Artificial Sequence
  Description of Artificial Sequence: Synthetic oligonucleotide
  Antisense strand to SEQ ID NO: 234268
uuucacaaccucaggauuu

SEQ ID NO: 234270 - RNA, 19 nt, Artificial Sequence
  Description of Artificial Sequence: Synthetic oligonucleotide
  Sense strand starting at position 37 SEQ ID NO: 3016
cagccugaacuguauaaga

SEQ ID NO: 234271 - RNA, 19 nt, Artificial Sequence
  Description of Artificial Sequence: Synthetic oligonucleotide
  Antisense strand to SEQ ID NO: 234270
ucuuauacaguucaggcug

SEQ ID NO: 234272 - RNA, 19 nt, Artificial Sequence
  Description of Artificial Sequence: Synthetic oligonucleotide
  Sense strand starting at position 39 SEQ ID NO: 3016
gccugaacuguauaagaca

SEQ ID NO: 234273 - RNA, 19 nt, Artificial Sequence
  Description of Artificial Sequence: Synthetic oligonucleotide
  Antisense strand to SEQ ID NO: 234272
ugucuuauacaguucaggc

SEQ ID NO: 234274 - RNA, 19 nt, Artificial Sequence
  Description of Artificial Sequence: Synthetic oligonucleotide
  Sense strand starting at position 50 SEQ ID NO: 3016
auaagacauuaagcaagua

SEQ ID NO: 234275 - RNA, 19 nt, Artificial Sequence
  Description of Artificial Sequence: Synthetic oligonucleotide
  Antisense strand to SEQ ID NO: 234274
uacuugcuuaaugucuuau

SEQ ID NO: 234276 - RNA, 19 nt, Artificial Sequence
  Description of Artificial Sequence: Synthetic oligonucleotide
  Sense strand starting at position 135 SEQ ID NO: 3016
uuagaauucuuucuuguag

SEQ ID NO: 234277 - RNA, 19 nt, Artificial Sequence
  Description of Artificial Sequence: Synthetic oligonucleotide
  Antisense strand to SEQ ID NO: 234276
cuacaagaaagaauucuaa

SEQ ID NO: 234278 - RNA, 19 nt, Artificial Sequence
  Description of Artificial Sequence: Synthetic oligonucleotide
  Sense strand starting at position 183 SEQ ID NO: 3016
agucaacaagaauguacua

SEQ ID NO: 234279 - RNA, 19 nt, Artificial Sequence
  Description of Artificial Sequence: Synthetic oligonucleotide
  Antisense strand to SEQ ID NO: 234278
uaguacauucuuguugacu

SEQ ID NO: 234280 - RNA, 19 nt, Artificial Sequence
  Description of Artificial Sequence: Synthetic oligonucleotide
  Sense strand starting at position 256 SEQ ID NO: 3016
ugugguguuaaggacuaaa

SEQ ID NO: 234281 - RNA, 19 nt, Artificial Sequence
  Description of Artificial Sequence: Synthetic oligonucleotide
  Antisense strand to SEQ ID NO: 234280
uuuaguccuuaacaccaca

SEQ ID NO: 234282 - RNA, 19 nt, Artificial Sequence
  Description of Artificial Sequence: Synthetic oligonucleotide
  Sense strand starting at position 329 SEQ ID NO: 3016
guuuguguaagugagauca

SEQ ID NO: 234283 - RNA, 19 nt, Artificial Sequence
  Description of Artificial Sequence: Synthetic oligonucleotide
  Antisense strand to SEQ ID NO: 234282
ugaucucacuuacacaaac

SEQ ID NO: 234284 - RNA, 19 nt, Artificial Sequence
  Description of Artificial Sequence: Synthetic oligonucleotide
  Sense strand starting at position 519 SEQ ID NO: 3016
guaggugugaaagacucaa

SEQ ID NO: 234285 - RNA, 19 nt, Artificial Sequence
  Description of Artificial Sequence: Synthetic oligonucleotide
  Antisense strand to SEQ ID NO: 234284
uugagucuuucacaccuac

SEQ ID NO: 234286 - RNA, 19 nt, Artificial Sequence
  Description of Artificial Sequence: Synthetic oligonucleotide
  Sense strand starting at position 601 SEQ ID NO: 3016
ggagucucuuccucauuga

SEQ ID NO: 234287 - RNA, 19 nt, Artificial Sequence
  Description of Artificial Sequence: Synthetic oligonucleotide
  Antisense strand to SEQ ID NO: 234286
ucaaugaggaagagacucc

SEQ ID NO: 234288 - RNA, 19 nt, Artificial Sequence
  Description of Artificial Sequence: Synthetic oligonucleotide
  Sense strand starting at position 744 SEQ ID NO: 3016
aauguuucccgugaagaga

SEQ ID NO: 234289 - RNA, 19 nt, Artificial Sequence
  Description of Artificial Sequence: Synthetic oligonucleotide
  Antisense strand to SEQ ID NO: 234288
ucucuucacgggaaacauu

SEQ ID NO: 234290 - RNA, 19 nt, Artificial Sequence
  Description of Artificial Sequence: Synthetic oligonucleotide
  Sense strand starting at position 757 SEQ ID NO: 3016
aagagaguuugguccaaga

SEQ ID NO: 234291 - RNA, 19 nt, Artificial Sequence
  Description of Artificial Sequence: Synthetic oligonucleotide
  Antisense strand to SEQ ID NO: 234290
ucuuggaccaaacucucuu

SEQ ID NO: 234292 - RNA, 19 nt, Artificial Sequence
  Description of Artificial Sequence: Synthetic oligonucleotide
  Sense strand starting at position 792 SEQ ID NO: 3016
cguaacauaucauuaaaug

SEQ ID NO: 234293 - RNA, 19 nt, Artificial Sequence
  Description of Artificial Sequence: Synthetic oligonucleotide
  Antisense strand to SEQ ID NO: 234292
cauuuaaugauauguuacg

SEQ ID NO: 234294 - RNA, 19 nt, Artificial Sequence
  Description of Artificial Sequence: Synthetic oligonucleotide
  Sense strand starting at position 810 SEQ ID NO: 3016
ggcagcuaucacuaauaac

SEQ ID NO: 234295 - RNA, 19 nt, Artificial Sequence
  Description of Artificial Sequence: Synthetic oligonucleotide
  Antisense strand to SEQ ID NO: 234294
guuauuagugauagcugcc

SEQ ID NO: 234296 - RNA, 19 nt, Artificial Sequence
  Description of Artificial Sequence: Synthetic oligonucleotide
  Sense strand starting at position 839 SEQ ID NO: 3016
cuaaacauguuucuaagua

SEQ ID NO: 234297 - RNA, 19 nt, Artificial Sequence
  Description of Artificial Sequence: Synthetic oligonucleotide
  Antisense strand to SEQ ID NO: 234296
uacuuagaaacauguuuag

SEQ ID NO: 234298 - RNA, 19 nt, Artificial Sequence
  Description of Artificial Sequence: Synthetic oligonucleotide
  Sense strand starting at position 846 SEQ ID NO: 3016
uguuucuaaguacaucaaa

SEQ ID NO: 234299 - RNA, 19 nt, Artificial Sequence
  Description of Artificial Sequence: Synthetic oligonucleotide
  Antisense strand to SEQ ID NO: 234298
uuugauguacuuagaaaca

SEQ ID NO: 234300 - RNA, 19 nt, Artificial Sequence
  Description of Artificial Sequence: Synthetic oligonucleotide
  Sense strand starting at position 1012 SEQ ID NO: 3016
acaauaccuucggucagau

SEQ ID NO: 234301 - RNA, 19 nt, Artificial Sequence
  Description of Artificial Sequence: Synthetic oligonucleotide
  Antisense strand to SEQ ID NO: 234300
aucugaccgaagguauugu

SEQ ID NO: 234302 - RNA, 19 nt, Artificial Sequence
  Description of Artificial Sequence: Synthetic oligonucleotide
  Sense strand starting at position 1047 SEQ ID NO: 3016
ccuguaaauguugaugcaa

SEQ ID NO: 234303 - RNA, 19 nt, Artificial Sequence
  Description of Artificial Sequence: Synthetic oligonucleotide
  Antisense strand to SEQ ID NO: 234302
uugcaucaacauuuacagg

SEQ ID NO: 234304 - RNA, 19 nt, Artificial Sequence
  Description of Artificial Sequence: Synthetic oligonucleotide
  Sense strand starting at position 2405 SEQ ID NO: 3016
gggccagucauugagcuaa

SEQ ID NO: 234305 - RNA, 19 nt, Artificial Sequence
  Description of Artificial Sequence: Synthetic oligonucleotide
  Antisense strand to SEQ ID NO: 234304
uuagcucaaugacuggccc

SEQ ID NO: 234306 - RNA, 19 nt, Artificial Sequence
  Description of Artificial Sequence: Synthetic oligonucleotide
  Sense strand starting at position 2434 SEQ ID NO: 3016
ggacacagccgugaguaaa

SEQ ID NO: 234307 - RNA, 19 nt, Artificial Sequence
  Description of Artificial Sequence: Synthetic oligonucleotide
  Antisense strand to SEQ ID NO: 234306
uuuacucacggcugugucc

SEQ ID NO: 234308 - RNA, 19 nt, Artificial Sequence
  Description of Artificial Sequence: Synthetic oligonucleotide
  Sense strand starting at position 2468 SEQ ID NO: 3016
guaagaagcuaacuagacu

SEQ ID NO: 234309 - RNA, 19 nt, Artificial Sequence
  Description of Artificial Sequence: Synthetic oligonucleotide
  Antisense strand to SEQ ID NO: 234308
agucuaguuagcuucuuac

SEQ ID NO: 234310 - RNA, 19 nt, Artificial Sequence
  Description of Artificial Sequence: Synthetic oligonucleotide
  Sense strand starting at position 2475 SEQ ID NO: 3016
gcuaacuagacugggagua

SEQ ID NO: 234311 - RNA, 19 nt, Artificial Sequence
  Description of Artificial Sequence: Synthetic oligonucleotide
  Antisense strand to SEQ ID NO: 234310
uacucccagucuaguuagc

SEQ ID NO: 234312 - RNA, 19 nt, Artificial Sequence
  Description of Artificial Sequence: Synthetic oligonucleotide
  Sense strand starting at position 2476 SEQ ID NO: 3016
cuaacuagacugggaguau

SEQ ID NO: 234313 - RNA, 19 nt, Artificial Sequence
  Description of Artificial Sequence: Synthetic oligonucleotide
  Antisense strand to SEQ ID NO: 234312
auacucccagucuaguuag

SEQ ID NO: 234314 - RNA, 19 nt, Artificial Sequence
  Description of Artificial Sequence: Synthetic oligonucleotide
  Sense strand starting at position 2489 SEQ ID NO: 3016
gaguauucugagggcagag

SEQ ID NO: 234315 - RNA, 19 nt, Artificial Sequence
  Description of Artificial Sequence: Synthetic oligonucleotide
  Antisense strand to SEQ ID NO: 234314
cucugcccucagaauacuc

SEQ ID NO: 234316 - RNA, 19 nt, Artificial Sequence
  Description of Artificial Sequence: Synthetic oligonucleotide
  Sense strand starting at position 2504 SEQ ID NO: 3016
agagacaguaugugucuaa

SEQ ID NO: 234317 - RNA, 19 nt, Artificial Sequence
  Description of Artificial Sequence: Synthetic oligonucleotide
  Antisense strand to SEQ ID NO: 234316
uuagacacauacugucucu

SEQ ID NO: 234318 - RNA, 19 nt, Artificial Sequence
  Description of Artificial Sequence: Synthetic oligonucleotide
  Sense strand starting at position 2508 SEQ ID NO: 3016
acaguaugugucuaaccca

SEQ ID NO: 234319 - RNA, 19 nt, Artificial Sequence
  Description of Artificial Sequence: Synthetic oligonucleotide
  Antisense strand to SEQ ID NO: 234318
uggguuagacacauacugu

SEQ ID NO: 234320 - RNA, 19 nt, Artificial Sequence
  Description of Artificial Sequence: Synthetic oligonucleotide
  Sense strand starting at position 2724 SEQ ID NO: 3016
gacugacaauugcuguuaa

SEQ ID NO: 234321 - RNA, 19 nt, Artificial Sequence
  Description of Artificial Sequence: Synthetic oligonucleotide
  Antisense strand to SEQ ID NO: 234320
uuaacagcaauugucaguc

SEQ ID NO: 234322 - RNA, 19 nt, Artificial Sequence
  Description of Artificial Sequence: Synthetic oligonucleotide
  Sense strand starting at position 2792 SEQ ID NO: 3016
guuguaauuccacacaugu

SEQ ID NO: 234323 - RNA, 19 nt, Artificial Sequence
  Description of Artificial Sequence: Synthetic oligonucleotide
  Antisense strand to SEQ ID NO: 234322
acauguguggaauuacaac

SEQ ID NO: 234324 - RNA, 19 nt, Artificial Sequence
  Description of Artificial Sequence: Synthetic oligonucleotide
  Sense strand starting at position 2802 SEQ ID NO: 3016
cacacaugugcuuaggacu

SEQ ID NO: 234325 - RNA, 19 nt, Artificial Sequence
  Description of Artificial Sequence: Synthetic oligonucleotide
  Antisense strand to SEQ ID NO: 234324
aguccuaagcacaugugug

SEQ ID NO: 234326 - RNA, 19 nt, Artificial Sequence
  Description of Artificial Sequence: Synthetic oligonucleotide
  Sense strand starting at position 2830 SEQ ID NO: 3016
gaaaucuaagcuugggaua

SEQ ID NO: 234327 - RNA, 19 nt, Artificial Sequence
  Description of Artificial Sequence: Synthetic oligonucleotide
  Antisense strand to SEQ ID NO: 234326
uaucccaagcuuagauuuc

SEQ ID NO: 234328 - RNA, 19 nt, Artificial Sequence
  Description of Artificial Sequence: Synthetic oligonucleotide
  Sense strand starting at position 3133 SEQ ID NO: 3016
ccgguuaagccgcuaauca

SEQ ID NO: 234329 - RNA, 19 nt, Artificial Sequence
  Description of Artificial Sequence: Synthetic oligonucleotide
  Antisense strand to SEQ ID NO: 234328
ugauuagcggcuuaaccgg

SEQ ID NO: 234330 - RNA, 19 nt, Artificial Sequence
  Description of Artificial Sequence: Synthetic oligonucleotide
  Sense strand starting at position 3310 SEQ ID NO: 3016
guguguaauggccucuguu

SEQ ID NO: 234331 - RNA, 19 nt, Artificial Sequence
  Description of Artificial Sequence: Synthetic oligonucleotide
  Antisense strand to SEQ ID NO: 234330
aacagaggccauuacacac

SEQ ID NO: 234332 - RNA, 19 nt, Artificial Sequence
  Description of Artificial Sequence: Synthetic oligonucleotide
  Sense strand starting at position 3402 SEQ ID NO: 3016
auuaccuuacagugaugga

SEQ ID NO: 234333 - RNA, 19 nt, Artificial Sequence
  Description of Artificial Sequence: Synthetic oligonucleotide
  Antisense strand to SEQ ID NO: 234332
uccaucacuguaagguaau

SEQ ID NO: 234334 - RNA, 19 nt, Artificial Sequence
  Description of Artificial Sequence: Synthetic oligonucleotide
  Sense strand starting at position 3407 SEQ ID NO: 3016
cuuacagugauggagguua

SEQ ID NO: 234335 - RNA, 19 nt, Artificial Sequence
  Description of Artificial Sequence: Synthetic oligonucleotide
  Antisense strand to SEQ ID NO: 234334
uaaccuccaucacuguaag

SEQ ID NO: 234336 - RNA, 19 nt, Artificial Sequence
  Description of Artificial Sequence: Synthetic oligonucleotide
  Sense strand starting at position 3412 SEQ ID NO: 3016
agugauggagguuaguaau

SEQ ID NO: 234337 - RNA, 19 nt, Artificial Sequence
  Description of Artificial Sequence: Synthetic oligonucleotide
  Antisense strand to SEQ ID NO: 234336
auuacuaaccuccaucacu

SEQ ID NO: 234338 - RNA, 19 nt, Artificial Sequence
  Description of Artificial Sequence: Synthetic oligonucleotide
  Sense strand starting at position 3418 SEQ ID NO: 3016
ggagguuaguaauccaaag

SEQ ID NO: 234339 - RNA, 19 nt, Artificial Sequence
  Description of Artificial Sequence: Synthetic oligonucleotide
  Antisense strand to SEQ ID NO: 234338
cuuuggauuacuaaccucc

SEQ ID NO: 234340 - RNA, 19 nt, Artificial Sequence
  Description of Artificial Sequence: Synthetic oligonucleotide
  Sense strand starting at position 3434 SEQ ID NO: 3016
aagagaaucucacugggca

SEQ ID NO: 234341 - RNA, 19 nt, Artificial Sequence
  Description of Artificial Sequence: Synthetic oligonucleotide
  Antisense strand to SEQ ID NO: 234340
ugcccagugagauucucuu

SEQ ID NO: 234342 - RNA, 19 nt, Artificial Sequence
  Description of Artificial Sequence: Synthetic oligonucleotide
  Sense strand starting at position 3438 SEQ ID NO: 3016
gaaucucacugggcagaaa

SEQ ID NO: 234343 - RNA, 19 nt, Artificial Sequence
  Description of Artificial Sequence: Synthetic oligonucleotide
  Antisense strand to SEQ ID NO: 234342
uuucugcccagugagauuc

SEQ ID NO: 234344 - RNA, 19 nt, Artificial Sequence
  Description of Artificial Sequence: Synthetic oligonucleotide
  Sense strand starting at position 3680 SEQ ID NO: 3016
aucuuaagaucagcugauu

SEQ ID NO: 234345 - RNA, 19 nt, Artificial Sequence
  Description of Artificial Sequence: Synthetic oligonucleotide
  Antisense strand to SEQ ID NO: 234344
aaucagcugaucuuaagau

SEQ ID NO: 234346 - RNA, 19 nt, Artificial Sequence
  Description of Artificial Sequence: Synthetic oligonucleotide
  Sense strand starting at position 3823 SEQ ID NO: 3016
uuuguccaucucugagaca

SEQ ID NO: 234347 - RNA, 19 nt, Artificial Sequence
  Description of Artificial Sequence: Synthetic oligonucleotide
  Antisense strand to SEQ ID NO: 234346
ugucucagagauggacaaa

SEQ ID NO: 234348 - RNA, 19 nt, Artificial Sequence
  Description of Artificial Sequence: Synthetic oligonucleotide
  Sense strand starting at position 3932 SEQ ID NO: 3016
cgugauucugcaucuuugu

SEQ ID NO: 234349 - RNA, 19 nt, Artificial Sequence
  Description of Artificial Sequence: Synthetic oligonucleotide
  Antisense strand to SEQ ID NO: 234348
acaaagaugcagaaucacg

SEQ ID NO: 234350 - RNA, 19 nt, Artificial Sequence
  Description of Artificial Sequence: Synthetic oligonucleotide
  Sense strand starting at position 123 SEQ ID NO: 3017
gcgaguucagguucugguu

SEQ ID NO: 234351 - RNA, 19 nt, Artificial Sequence
  Description of Artificial Sequence: Synthetic oligonucleotide
  Antisense strand to SEQ ID NO: 234350
aaccagaaccugaacucgc

SEQ ID NO: 234352 - RNA, 19 nt, Artificial Sequence
  Description of Artificial Sequence: Synthetic oligonucleotide
  Sense strand starting at position 534 SEQ ID NO: 3017
guuccaugucgaugaggaa

SEQ ID NO: 234353 - RNA, 19 nt, Artificial Sequence
  Description of Artificial Sequence: Synthetic oligonucleotide
  Antisense strand to SEQ ID NO: 234352
uuccucaucgacauggaac

SEQ ID NO: 234354 - RNA, 19 nt, Artificial Sequence
  Description of Artificial Sequence: Synthetic oligonucleotide
  Sense strand starting at position 707 SEQ ID NO: 3017
gggugugacuccuucagaa

SEQ ID NO: 234355 - RNA, 19 nt, Artificial Sequence
  Description of Artificial Sequence: Synthetic oligonucleotide
  Antisense strand to SEQ ID NO: 234354
uucugaaggagucacaccc

SEQ ID NO: 234356 - RNA, 19 nt, Artificial Sequence
  Description of Artificial Sequence: Synthetic oligonucleotide
  Sense strand starting at position 867 SEQ ID NO: 3017
gguuguaauccaugcagag

SEQ ID NO: 234357 - RNA, 19 nt, Artificial Sequence
  Description of Artificial Sequence: Synthetic oligonucleotide
  Antisense strand to SEQ ID NO: 234356
cucugcauggauuacaacc

SEQ ID NO: 234358 - RNA, 19 nt, Artificial Sequence
  Description of Artificial Sequence: Synthetic oligonucleotide
  Sense strand starting at position 869 SEQ ID NO: 3017
uuguaauccaugcagagga

SEQ ID NO: 234359 - RNA, 19 nt, Artificial Sequence
  Description of Artificial Sequence: Synthetic oligonucleotide
  Antisense strand to SEQ ID NO: 234358
uccucugcauggauuacaa

SEQ ID NO: 234360 - RNA, 19 nt, Artificial Sequence
  Description of Artificial Sequence: Synthetic oligonucleotide
  Sense strand starting at position 1026 SEQ ID NO: 3017
gguagucgggcagacagau

SEQ ID NO: 234361 - RNA, 19 nt, Artificial Sequence
  Description of Artificial Sequence: Synthetic oligonucleotide
  Antisense strand to SEQ ID NO: 234360
aucugucugcccgacuacc

SEQ ID NO: 234362 - RNA, 19 nt, Artificial Sequence
  Description of Artificial Sequence: Synthetic oligonucleotide
  Sense strand starting at position 1038 SEQ ID NO: 3017
gacagaugggcguguacau

SEQ ID NO: 234363 - RNA, 19 nt, Artificial Sequence
  Description of Artificial Sequence: Synthetic oligonucleotide
  Antisense strand to SEQ ID NO: 234362
auguacacgcccaucuguc

SEQ ID NO: 234364 - RNA, 19 nt, Artificial Sequence
  Description of Artificial Sequence: Synthetic oligonucleotide
  Sense strand starting at position 1209 SEQ ID NO: 3017
ccgugauuuccuggcacac

SEQ ID NO: 234365 - RNA, 19 nt, Artificial Sequence
  Description of Artificial Sequence: Synthetic oligonucleotide
  Antisense strand to SEQ ID NO: 234364
gugugccaggaaaucacgg

SEQ ID NO: 234366 - RNA, 19 nt, Artificial Sequence
  Description of Artificial Sequence: Synthetic oligonucleotide
  Sense strand starting at position 1470 SEQ ID NO: 3017
aagauaaacugcuucggga

SEQ ID NO: 234367 - RNA, 19 nt, Artificial Sequence
  Description of Artificial Sequence: Synthetic oligonucleotide
  Antisense strand to SEQ ID NO: 234366
ucccgaagcaguuuaucuu

SEQ ID NO: 234368 - RNA, 19 nt, Artificial Sequence
  Description of Artificial Sequence: Synthetic oligonucleotide
  Sense strand starting at position 1472 SEQ ID NO: 3017
gauaaacugcuucgggaag

SEQ ID NO: 234369 - RNA, 19 nt, Artificial Sequence
  Description of Artificial Sequence: Synthetic oligonucleotide
  Antisense strand to SEQ ID NO: 234368
cuucccgaagcaguuuauc

SEQ ID NO: 234370 - RNA, 19 nt, Artificial Sequence
  Description of Artificial Sequence: Synthetic oligonucleotide
  Sense strand starting at position 1646 SEQ ID NO: 3017
ccgcgagcugucuccaaau

SEQ ID NO: 234371 - RNA, 19 nt, Artificial Sequence
  Description of Artificial Sequence: Synthetic oligonucleotide
  Antisense strand to SEQ ID NO: 234370
auuuggagacagcucgcgg

SEQ ID NO: 234372 - RNA, 19 nt, Artificial Sequence
  Description of Artificial Sequence: Synthetic oligonucleotide
  Sense strand starting at position 1648 SEQ ID NO: 3017
gcgagcugucuccaaaucu

SEQ ID NO: 234373 - RNA, 19 nt, Artificial Sequence
  Description of Artificial Sequence: Synthetic oligonucleotide
  Antisense strand to SEQ ID NO: 234372
agauuuggagacagcucgc

SEQ ID NO: 234374 - RNA, 19 nt, Artificial Sequence
  Description of Artificial Sequence: Synthetic oligonucleotide
  Sense strand starting at position 1655 SEQ ID NO: 3017
gucuccaaaucucuuaagu

SEQ ID NO: 234375 - RNA, 19 nt, Artificial Sequence
  Description of Artificial Sequence: Synthetic oligonucleotide
  Antisense strand to SEQ ID NO: 234374
acuuaagagauuuggagac

SEQ ID NO: 234376 - RNA, 19 nt, Artificial Sequence
  Description of Artificial Sequence: Synthetic oligonucleotide
  Sense strand starting at position 1906 SEQ ID NO: 3017
gggucacuccgcugagaag

SEQ ID NO: 234377 - RNA, 19 nt, Artificial Sequence
  Description of Artificial Sequence: Synthetic oligonucleotide
  Antisense strand to SEQ ID NO: 234376
cuucucagcggagugaccc

SEQ ID NO: 234378 - RNA, 19 nt, Artificial Sequence
  Description of Artificial Sequence: Synthetic oligonucleotide
  Sense strand starting at position 2499 SEQ ID NO: 3017
cgggucaccugcuucuaau

SEQ ID NO: 234379 - RNA, 19 nt, Artificial Sequence
  Description of Artificial Sequence: Synthetic oligonucleotide
  Antisense strand to SEQ ID NO: 234378
auuagaagcaggugacccg

SEQ ID NO: 234380 - RNA, 19 nt, Artificial Sequence
  Description of Artificial Sequence: Synthetic oligonucleotide
  Sense strand starting at position 2813 SEQ ID NO: 3017
cuguaacuuccuggcuuau

SEQ ID NO: 234381 - RNA, 19 nt, Artificial Sequence
  Description of Artificial Sequence: Synthetic oligonucleotide
  Antisense strand to SEQ ID NO: 234380
auaagccaggaaguuacag

SEQ ID NO: 234382 - RNA, 19 nt, Artificial Sequence
  Description of Artificial Sequence: Synthetic oligonucleotide
  Sense strand starting at position 2868 SEQ ID NO: 3017
gcagcuaagcguccuuaca

SEQ ID NO: 234383 - RNA, 19 nt, Artificial Sequence
  Description of Artificial Sequence: Synthetic oligonucleotide
  Antisense strand to SEQ ID NO: 234382
uguaaggacgcuuagcugc

SEQ ID NO: 234384 - RNA, 19 nt, Artificial Sequence
  Description of Artificial Sequence: Synthetic oligonucleotide
  Sense strand starting at position 2870 SEQ ID NO: 3017
agcuaagcguccuuacaga

SEQ ID NO: 234385 - RNA, 19 nt, Artificial Sequence
  Description of Artificial Sequence: Synthetic oligonucleotide
  Antisense strand to SEQ ID NO: 234384
ucuguaaggacgcuuagcu

SEQ ID NO: 234386 - RNA, 19 nt, Artificial Sequence
  Description of Artificial Sequence: Synthetic oligonucleotide
  Sense strand starting at position 2907 SEQ ID NO: 3017
agaacugcucaaggaauca

SEQ ID NO: 234387 - RNA, 19 nt, Artificial Sequence
  Description of Artificial Sequence: Synthetic oligonucleotide
  Antisense strand to SEQ ID NO: 234386
ugauuccuugagcaguucu

SEQ ID NO: 234388 - RNA, 19 nt, Artificial Sequence
  Description of Artificial Sequence: Synthetic oligonucleotide
  Sense strand starting at position 2955 SEQ ID NO: 3017
cugucuuggaacuguguga

SEQ ID NO: 234389 - RNA, 19 nt, Artificial Sequence
  Description of Artificial Sequence: Synthetic oligonucleotide
  Antisense strand to SEQ ID NO: 234388
ucacacaguuccaagacag

SEQ ID NO: 234390 - RNA, 19 nt, Artificial Sequence
  Description of Artificial Sequence: Synthetic oligonucleotide
  Sense strand starting at position 2959 SEQ ID NO: 3017
cuuggaacugugugaaaga

SEQ ID NO: 234391 - RNA, 19 nt, Artificial Sequence
  Description of Artificial Sequence: Synthetic oligonucleotide
  Antisense strand to SEQ ID NO: 234390
ucuuucacacaguuccaag

SEQ ID NO: 234392 - RNA, 19 nt, Artificial Sequence
  Description of Artificial Sequence: Synthetic oligonucleotide
  Sense strand starting at position 2960 SEQ ID NO: 3017
uuggaacugugugaaagaa

SEQ ID NO: 234393 - RNA, 19 nt, Artificial Sequence
  Description of Artificial Sequence: Synthetic oligonucleotide
  Antisense strand to SEQ ID NO: 234392
uucuuucacacaguuccaa

SEQ ID NO: 234394 - RNA, 19 nt, Artificial Sequence
  Description of Artificial Sequence: Synthetic oligonucleotide
  Sense strand starting at position 3000 SEQ ID NO: 3017
uuuacugugugcccaacaa

SEQ ID NO: 234395 - RNA, 19 nt, Artificial Sequence
  Description of Artificial Sequence: Synthetic oligonucleotide
  Antisense strand to SEQ ID NO: 234394
uuguugggcacacaguaaa

SEQ ID NO: 234396 - RNA, 19 nt, Artificial Sequence
  Description of Artificial Sequence: Synthetic oligonucleotide
  Sense strand starting at position 3018 SEQ ID NO: 3017
aaguguuaaucgguuacau

SEQ ID NO: 234397 - RNA, 19 nt, Artificial Sequence
  Description of Artificial Sequence: Synthetic oligonucleotide
  Antisense strand to SEQ ID NO: 234396
auguaaccgauuaacacuu

SEQ ID NO: 234398 - RNA, 19 nt, Artificial Sequence
  Description of Artificial Sequence: Synthetic oligonucleotide
  Sense strand starting at position 3228 SEQ ID NO: 3017
gggcuuucaccauguaagg

SEQ ID NO: 234399 - RNA, 19 nt, Artificial Sequence
  Description of Artificial Sequence: Synthetic oligonucleotide
  Antisense strand to SEQ ID NO: 234398
ccuuacauggugaaagccc

SEQ ID NO: 234400 - RNA, 19 nt, Artificial Sequence
  Description of Artificial Sequence: Synthetic oligonucleotide
  Sense strand starting at position 3239 SEQ ID NO: 3017
auguaaggcuguucucgaa

SEQ ID NO: 234401 - RNA, 19 nt, Artificial Sequence
  Description of Artificial Sequence: Synthetic oligonucleotide
  Antisense strand to SEQ ID NO: 234400
uucgagaacagccuuacau

SEQ ID NO: 234402 - RNA, 19 nt, Artificial Sequence
  Description of Artificial Sequence: Synthetic oligonucleotide
  Sense strand starting at position 3667 SEQ ID NO: 3017
ggauuucuuucugccuuua

SEQ ID NO: 234403 - RNA, 19 nt, Artificial Sequence
  Description of Artificial Sequence: Synthetic oligonucleotide
  Antisense strand to SEQ ID NO: 234402
uaaaggcagaaagaaaucc

SEQ ID NO: 234404 - RNA, 19 nt, Artificial Sequence
  Description of Artificial Sequence: Synthetic oligonucleotide
  Sense strand starting at position 3672 SEQ ID NO: 3017
ucuuucugccuuuagaaga

SEQ ID NO: 234405 - RNA, 19 nt, Artificial Sequence
  Description of Artificial Sequence: Synthetic oligonucleotide
  Antisense strand to SEQ ID NO: 234404
ucuucuaaaggcagaaaga

SEQ ID NO: 234406 - RNA, 19 nt, Artificial Sequence
  Description of Artificial Sequence: Synthetic oligonucleotide
  Sense strand starting at position 3689 SEQ ID NO: 3017
gacccagaaagaugugagu

SEQ ID NO: 234407 - RNA, 19 nt, Artificial Sequence
  Description of Artificial Sequence: Synthetic oligonucleotide
  Antisense strand to SEQ ID NO: 234406
acucacaucuuucuggguc

SEQ ID NO: 234408 - RNA, 19 nt, Artificial Sequence
  Description of Artificial Sequence: Synthetic oligonucleotide
  Sense strand starting at position 3698 SEQ ID NO: 3017
agaugugaguccuuuauug

SEQ ID NO: 234409 - RNA, 19 nt, Artificial Sequence
  Description of Artificial Sequence: Synthetic oligonucleotide
  Antisense strand to SEQ ID NO: 234408
caauaaaggacucacaucu

SEQ ID NO: 234410 - RNA, 19 nt, Artificial Sequence
  Description of Artificial Sequence: Synthetic oligonucleotide
  Sense strand starting at position 3700 SEQ ID NO: 3017
augugaguccuuuauuggu

SEQ ID NO: 234411 - RNA, 19 nt, Artificial Sequence
  Description of Artificial Sequence: Synthetic oligonucleotide
  Antisense strand to SEQ ID NO: 234410
accaauaaaggacucacau

SEQ ID NO: 234412 - RNA, 19 nt, Artificial Sequence
  Description of Artificial Sequence: Synthetic oligonucleotide
  Sense strand starting at position 3706 SEQ ID NO: 3017
guccuuuauuggucgaggu

SEQ ID NO: 234413 - RNA, 19 nt, Artificial Sequence
  Description of Artificial Sequence: Synthetic oligonucleotide
  Antisense strand to SEQ ID NO: 234412
accucgaccaauaaaggac

SEQ ID NO: 234414 - RNA, 19 nt, Artificial Sequence
  Description of Artificial Sequence: Synthetic oligonucleotide
  Sense strand starting at position 3707 SEQ ID NO: 3017
uccuuuauuggucgagguu

SEQ ID NO: 234415 - RNA, 19 nt, Artificial Sequence
  Description of Artificial Sequence: Synthetic oligonucleotide
  Antisense strand to SEQ ID NO: 234414
aaccucgaccaauaaagga

SEQ ID NO: 234416 - RNA, 19 nt, Artificial Sequence
  Description of Artificial Sequence: Synthetic oligonucleotide
  Sense strand starting at position 3708 SEQ ID NO: 3017
ccuuuauuggucgagguuu

SEQ ID NO: 234417 - RNA, 19 nt, Artificial Sequence
  Description of Artificial Sequence: Synthetic oligonucleotide
  Antisense strand to SEQ ID NO: 234416
aaaccucgaccaauaaagg

SEQ ID NO: 234418 - RNA, 19 nt, Artificial Sequence
  Description of Artificial Sequence: Synthetic oligonucleotide
  Sense strand starting at position 3710 SEQ ID NO: 3017
uuuauuggucgagguuuau

SEQ ID NO: 234419 - RNA, 19 nt, Artificial Sequence
  Description of Artificial Sequence: Synthetic oligonucleotide
  Antisense strand to SEQ ID NO: 234418
auaaaccucgaccaauaaa

SEQ ID NO: 234420 - RNA, 19 nt, Artificial Sequence
  Description of Artificial Sequence: Synthetic oligonucleotide
  Sense strand starting at position 3724 SEQ ID NO: 3017
uuuauaaucccaggcaguu

SEQ ID NO: 234421 - RNA, 19 nt, Artificial Sequence
  Description of Artificial Sequence: Synthetic oligonucleotide
  Antisense strand to SEQ ID NO: 234420
aacugccugggauuauaaa

SEQ ID NO: 234422 - RNA, 19 nt, Artificial Sequence
  Description of Artificial Sequence: Synthetic oligonucleotide
  Sense strand starting at position 3917 SEQ ID NO: 3017
gcaauuaugcuacaaguuu

SEQ ID NO: 234423 - RNA, 19 nt, Artificial Sequence
  Description of Artificial Sequence: Synthetic oligonucleotide
  Antisense strand to SEQ ID NO: 234422
aaacuuguagcauaauugc

SEQ ID NO: 234424 - RNA, 19 nt, Artificial Sequence
  Description of Artificial Sequence: Synthetic oligonucleotide
  Sense strand starting at position 3963 SEQ ID NO: 3017
auguguuguaauuagauug

SEQ ID NO: 234425 - RNA, 19 nt, Artificial Sequence
  Description of Artificial Sequence: Synthetic oligonucleotide
  Antisense strand to SEQ ID NO: 234424
caaucuaauuacaacacau

SEQ ID NO: 234426 - RNA, 19 nt, Artificial Sequence
  Description of Artificial Sequence: Synthetic oligonucleotide
  Sense strand starting at position 3970 SEQ ID NO: 3017
guaauuagauuggaagacu

SEQ ID NO: 234427 - RNA, 19 nt, Artificial Sequence
  Description of Artificial Sequence: Synthetic oligonucleotide
  Antisense strand to SEQ ID NO: 234426
agucuuccaaucuaauuac

SEQ ID NO: 234428 - RNA, 19 nt, Artificial Sequence
  Description of Artificial Sequence: Synthetic oligonucleotide
  Sense strand starting at position 3979 SEQ ID NO: 3017
uuggaagacugagguauuu

SEQ ID NO: 234429 - RNA, 19 nt, Artificial Sequence
  Description of Artificial Sequence: Synthetic oligonucleotide
  Antisense strand to SEQ ID NO: 234428
aaauaccucagucuuccaa

SEQ ID NO: 234430 - RNA, 19 nt, Artificial Sequence
  Description of Artificial Sequence: Synthetic oligonucleotide
  Sense strand starting at position 2714 SEQ ID NO: 3018
gggagugagcgccgacuaa

SEQ ID NO: 234431 - RNA, 19 nt, Artificial Sequence
  Description of Artificial Sequence: Synthetic oligonucleotide
  Antisense strand to SEQ ID NO: 234430
uuagucggcgcucacuccc

SEQ ID NO: 234432 - RNA, 19 nt, Artificial Sequence
  Description of Artificial Sequence: Synthetic oligonucleotide
  Sense strand starting at position 3554 SEQ ID NO: 3018
gggugacucuagcgagguu

SEQ ID NO: 234433 - RNA, 19 nt, Artificial Sequence
  Description of Artificial Sequence: Synthetic oligonucleotide
  Antisense strand to SEQ ID NO: 234432
aaccucgcuagagucaccc

SEQ ID NO: 234434 - RNA, 19 nt, Artificial Sequence
  Description of Artificial Sequence: Synthetic oligonucleotide
  Sense strand starting at position 3555 SEQ ID NO: 3018
ggugacucuagcgagguuu

SEQ ID NO: 234435 - RNA, 19 nt, Artificial Sequence
  Description of Artificial Sequence: Synthetic oligonucleotide
  Antisense strand to SEQ ID NO: 234434
aaaccucgcuagagucacc

SEQ ID NO: 234436 - RNA, 19 nt, Artificial Sequence
  Description of Artificial Sequence: Synthetic oligonucleotide
  Sense strand starting at position 3597 SEQ ID NO: 3018
ggagacugguucuagaagu

SEQ ID NO: 234437 - RNA, 19 nt, Artificial Sequence
  Description of Artificial Sequence: Synthetic oligonucleotide
  Antisense strand to SEQ ID NO: 234436
acuucuagaaccagucucc

SEQ ID NO: 234438 - RNA, 19 nt, Artificial Sequence
  Description of Artificial Sequence: Synthetic oligonucleotide
  Sense strand starting at position 3633 SEQ ID NO: 3018
ccaggaacacucuguacga

SEQ ID NO: 234439 - RNA, 19 nt, Artificial Sequence
  Description of Artificial Sequence: Synthetic oligonucleotide
  Antisense strand to SEQ ID NO: 234438
ucguacagaguguuccugg

SEQ ID NO: 234440 - RNA, 19 nt, Artificial Sequence
  Description of Artificial Sequence: Synthetic oligonucleotide
  Sense strand starting at position 3694 SEQ ID NO: 3018
gcgugugcccuuucgggau

SEQ ID NO: 234441 - RNA, 19 nt, Artificial Sequence
  Description of Artificial Sequence: Synthetic oligonucleotide
  Antisense strand to SEQ ID NO: 234440
aucccgaaagggcacacgc

SEQ ID NO: 234442 - RNA, 19 nt, Artificial Sequence
  Description of Artificial Sequence: Synthetic oligonucleotide
  Sense strand starting at position 3711 SEQ ID NO: 3018
aucccaucuucguugcaga

SEQ ID NO: 234443 - RNA, 19 nt, Artificial Sequence
  Description of Artificial Sequence: Synthetic oligonucleotide
  Antisense strand to SEQ ID NO: 234442
ucugcaacgaagaugggau

SEQ ID NO: 234444 - RNA, 19 nt, Artificial Sequence
  Description of Artificial Sequence: Synthetic oligonucleotide
  Sense strand starting at position 3712 SEQ ID NO: 3018
ucccaucuucguugcagaa

SEQ ID NO: 234445 - RNA, 19 nt, Artificial Sequence
  Description of Artificial Sequence: Synthetic oligonucleotide
  Antisense strand to SEQ ID NO: 234444
uucugcaacgaagauggga

SEQ ID NO: 234446 - RNA, 19 nt, Artificial Sequence
  Description of Artificial Sequence: Synthetic oligonucleotide
  Sense strand starting at position 3750 SEQ ID NO: 3018
uuuagaaucugcguaggaa

SEQ ID NO: 234447 - RNA, 19 nt, Artificial Sequence
  Description of Artificial Sequence: Synthetic oligonucleotide
  Antisense strand to SEQ ID NO: 234446
uuccuacgcagauucuaaa

SEQ ID NO: 234448 - RNA, 19 nt, Artificial Sequence
  Description of Artificial Sequence: Synthetic oligonucleotide
  Sense strand starting at position 3751 SEQ ID NO: 3018
uuagaaucugcguaggaau

SEQ ID NO: 234449 - RNA, 19 nt, Artificial Sequence
  Description of Artificial Sequence: Synthetic oligonucleotide
  Antisense strand to SEQ ID NO: 234448
auuccuacgcagauucuaa

SEQ ID NO: 234450 - RNA, 19 nt, Artificial Sequence
  Description of Artificial Sequence: Synthetic oligonucleotide
  Sense strand starting at position 3754 SEQ ID NO: 3018
gaaucugcguaggaauguu

SEQ ID NO: 234451 - RNA, 19 nt, Artificial Sequence
  Description of Artificial Sequence: Synthetic oligonucleotide
  Antisense strand to SEQ ID NO: 234450
aacauuccuacgcagauuc

SEQ ID NO: 234452 - RNA, 19 nt, Artificial Sequence
  Description of Artificial Sequence: Synthetic oligonucleotide
  Sense strand starting at position 3772 SEQ ID NO: 3018
uuuaaugcgucuuagaaac

SEQ ID NO: 234453 - RNA, 19 nt, Artificial Sequence
  Description of Artificial Sequence: Synthetic oligonucleotide
  Antisense strand to SEQ ID NO: 234452
guuucuaagacgcauuaaa

SEQ ID NO: 234454 - RNA, 19 nt, Artificial Sequence
  Description of Artificial Sequence: Synthetic oligonucleotide
  Sense strand starting at position 3774 SEQ ID NO: 3018
uaaugcgucuuagaaacca

SEQ ID NO: 234455 - RNA, 19 nt, Artificial Sequence
  Description of Artificial Sequence: Synthetic oligonucleotide
  Antisense strand to SEQ ID NO: 234454
ugguuucuaagacgcauua

SEQ ID NO: 234456 - RNA, 19 nt, Artificial Sequence
  Description of Artificial Sequence: Synthetic oligonucleotide
  Sense strand starting at position 3872 SEQ ID NO: 3018
uuuguucucgguuaaaucu

SEQ ID NO: 234457 - RNA, 19 nt, Artificial Sequence
  Description of Artificial Sequence: Synthetic oligonucleotide
  Antisense strand to SEQ ID NO: 234456
agauuuaaccgagaacaaa

SEQ ID NO: 234458 - RNA, 19 nt, Artificial Sequence
  Description of Artificial Sequence: Synthetic oligonucleotide
  Sense strand starting at position 3879 SEQ ID NO: 3018
ucgguuaaaucuucgucuu

SEQ ID NO: 234459 - RNA, 19 nt, Artificial Sequence
  Description of Artificial Sequence: Synthetic oligonucleotide
  Antisense strand to SEQ ID NO: 234458
aagacgaagauuuaaccga

SEQ ID NO: 234460 - RNA, 19 nt, Artificial Sequence
  Description of Artificial Sequence: Synthetic oligonucleotide
  Sense strand starting at position 3880 SEQ ID NO: 3018
cgguuaaaucuucgucuug

SEQ ID NO: 234461 - RNA, 19 nt, Artificial Sequence
  Description of Artificial Sequence: Synthetic oligonucleotide
  Antisense strand to SEQ ID NO: 234460
caagacgaagauuuaaccg

SEQ ID NO: 234462 - RNA, 19 nt, Artificial Sequence
  Description of Artificial Sequence: Synthetic oligonucleotide
  Sense strand starting at position 3881 SEQ ID NO: 3018
gguuaaaucuucgucuuga

SEQ ID NO: 234463 - RNA, 19 nt, Artificial Sequence
  Description of Artificial Sequence: Synthetic oligonucleotide
  Antisense strand to SEQ ID NO: 234462
ucaagacgaagauuuaacc

SEQ ID NO: 234464 - RNA, 19 nt, Artificial Sequence
  Description of Artificial Sequence: Synthetic oligonucleotide
  Sense strand starting at position 3882 SEQ ID NO: 3018
guuaaaucuucgucuugag

SEQ ID NO: 234465 - RNA, 19 nt, Artificial Sequence
  Description of Artificial Sequence: Synthetic oligonucleotide
  Antisense strand to SEQ ID NO: 234464
cucaagacgaagauuuaac

SEQ ID NO: 234466 - RNA, 19 nt, Artificial Sequence
  Description of Artificial Sequence: Synthetic oligonucleotide
  Sense strand starting at position 3885 SEQ ID NO: 3018
aaaucuucgucuugagcca

SEQ ID NO: 234467 - RNA, 19 nt, Artificial Sequence
  Description of Artificial Sequence: Synthetic oligonucleotide
  Antisense strand to SEQ ID NO: 234466
uggcucaagacgaagauuu

SEQ ID NO: 234468 - RNA, 19 nt, Artificial Sequence
  Description of Artificial Sequence: Synthetic oligonucleotide
  Sense strand starting at position 154 SEQ ID NO: 3019
ccuacuuguguacagagaa

SEQ ID NO: 234469 - RNA, 19 nt, Artificial Sequence
  Description of Artificial Sequence: Synthetic oligonucleotide
  Antisense strand to SEQ ID NO: 234468
uucucuguacacaaguagg

SEQ ID NO: 234470 - RNA, 19 nt, Artificial Sequence
  Description of Artificial Sequence: Synthetic oligonucleotide
  Sense strand starting at position 188 SEQ ID NO: 3019
gagauuguucuaggguuag

SEQ ID NO: 234471 - RNA, 19 nt, Artificial Sequence
  Description of Artificial Sequence: Synthetic oligonucleotide
  Antisense strand to SEQ ID NO: 234470
cuaacccuagaacaaucuc

SEQ ID NO: 234472 - RNA, 19 nt, Artificial Sequence
  Description of Artificial Sequence: Synthetic oligonucleotide
  Sense strand starting at position 192 SEQ ID NO: 3019
uuguucuaggguuagaaau

SEQ ID NO: 234473 - RNA, 19 nt, Artificial Sequence
  Description of Artificial Sequence: Synthetic oligonucleotide
  Antisense strand to SEQ ID NO: 234472
auuucuaacccuagaacaa

SEQ ID NO: 234474 - RNA, 19 nt, Artificial Sequence
  Description of Artificial Sequence: Synthetic oligonucleotide
  Sense strand starting at position 234 SEQ ID NO: 3019
uugagaaguccuuaccuuu

SEQ ID NO: 234475 - RNA, 19 nt, Artificial Sequence
  Description of Artificial Sequence: Synthetic oligonucleotide
  Antisense strand to SEQ ID NO: 234474
aaagguaaggacuucucaa

SEQ ID NO: 234476 - RNA, 19 nt, Artificial Sequence
  Description of Artificial Sequence: Synthetic oligonucleotide
  Sense strand starting at position 256 SEQ ID NO: 3019
acagaagacuugucuacuc

SEQ ID NO: 234477 - RNA, 19 nt, Artificial Sequence
  Description of Artificial Sequence: Synthetic oligonucleotide
  Antisense strand to SEQ ID NO: 234476
gaguagacaagucuucugu

SEQ ID NO: 234478 - RNA, 19 nt, Artificial Sequence
  Description of Artificial Sequence: Synthetic oligonucleotide
  Sense strand starting at position 258 SEQ ID NO: 3019
agaagacuugucuacuccu

SEQ ID NO: 234479 - RNA, 19 nt, Artificial Sequence
  Description of Artificial Sequence: Synthetic oligonucleotide
  Antisense strand to SEQ ID NO: 234478
aggaguagacaagucuucu

SEQ ID NO: 234480 - RNA, 19 nt, Artificial Sequence
  Description of Artificial Sequence: Synthetic oligonucleotide
  Sense strand starting at position 276 SEQ ID NO: 3019
ucccucauucgugagauac

SEQ ID NO: 234481 - RNA, 19 nt, Artificial Sequence
  Description of Artificial Sequence: Synthetic oligonucleotide
  Antisense strand to SEQ ID NO: 234480
guaucucacgaaugaggga

SEQ ID NO: 234482 - RNA, 19 nt, Artificial Sequence
  Description of Artificial Sequence: Synthetic oligonucleotide
  Sense strand starting at position 407 SEQ ID NO: 3019
guaucaagucauuauauuc

SEQ ID NO: 234483 - RNA, 19 nt, Artificial Sequence
  Description of Artificial Sequence: Synthetic oligonucleotide
  Antisense strand to SEQ ID NO: 234482
gaauauaaugacuugauac

SEQ ID NO: 234484 - RNA, 19 nt, Artificial Sequence
  Description of Artificial Sequence: Synthetic oligonucleotide
  Sense strand starting at position 616 SEQ ID NO: 3019
agaugauaacccuguguaa

SEQ ID NO: 234485 - RNA, 19 nt, Artificial Sequence
  Description of Artificial Sequence: Synthetic oligonucleotide
  Antisense strand to SEQ ID NO: 234484
uuacacaggguuaucaucu

SEQ ID NO: 234486 - RNA, 19 nt, Artificial Sequence
  Description of Artificial Sequence: Synthetic oligonucleotide
  Sense strand starting at position 619 SEQ ID NO: 3019
ugauaacccuguguaauga

SEQ ID NO: 234487 - RNA, 19 nt, Artificial Sequence
  Description of Artificial Sequence: Synthetic oligonucleotide
  Antisense strand to SEQ ID NO: 234486
ucauuacacaggguuauca

SEQ ID NO: 234488 - RNA, 19 nt, Artificial Sequence
  Description of Artificial Sequence: Synthetic oligonucleotide
  Sense strand starting at position 620 SEQ ID NO: 3019
gauaacccuguguaaugau

SEQ ID NO: 234489 - RNA, 19 nt, Artificial Sequence
  Description of Artificial Sequence: Synthetic oligonucleotide
  Antisense strand to SEQ ID NO: 234488
aucauuacacaggguuauc

SEQ ID NO: 234490 - RNA, 19 nt, Artificial Sequence
  Description of Artificial Sequence: Synthetic oligonucleotide
  Sense strand starting at position 972 SEQ ID NO: 3019
gugguagccauuugguauu

SEQ ID NO: 234491 - RNA, 19 nt, Artificial Sequence
  Description of Artificial Sequence: Synthetic oligonucleotide
  Antisense strand to SEQ ID NO: 234490
aauaccaaauggcuaccac

SEQ ID NO: 234492 - RNA, 19 nt, Artificial Sequence
  Description of Artificial Sequence: Synthetic oligonucleotide
  Sense strand starting at position 999 SEQ ID NO: 3019
cugguuucccaugaacaug

SEQ ID NO: 234493 - RNA, 19 nt, Artificial Sequence
  Description of Artificial Sequence: Synthetic oligonucleotide
  Antisense strand to SEQ ID NO: 234492
cauguucaugggaaaccag

SEQ ID NO: 234494 - RNA, 19 nt, Artificial Sequence
  Description of Artificial Sequence: Synthetic oligonucleotide
  Sense strand starting at position 1117 SEQ ID NO: 3019
cacgcugcucauguaagua

SEQ ID NO: 234495 - RNA, 19 nt, Artificial Sequence
  Description of Artificial Sequence: Synthetic oligonucleotide
  Antisense strand to SEQ ID NO: 234494
uacuuacaugagcagcgug

SEQ ID NO: 234496 - RNA, 19 nt, Artificial Sequence
  Description of Artificial Sequence: Synthetic oligonucleotide
  Sense strand starting at position 1612 SEQ ID NO: 3019
ucugaaaugugaucauuau

SEQ ID NO: 234497 - RNA, 19 nt, Artificial Sequence
  Description of Artificial Sequence: Synthetic oligonucleotide
  Antisense strand to SEQ ID NO: 234496
auaaugaucacauuucaga

SEQ ID NO: 234498 - RNA, 19 nt, Artificial Sequence
  Description of Artificial Sequence: Synthetic oligonucleotide
  Sense strand starting at position 2003 SEQ ID NO: 3019
ccauuacugcaacauguga

SEQ ID NO: 234499 - RNA, 19 nt, Artificial Sequence
  Description of Artificial Sequence: Synthetic oligonucleotide
  Antisense strand to SEQ ID NO: 234498
ucacauguugcaguaaugg

SEQ ID NO: 234500 - RNA, 19 nt, Artificial Sequence
  Description of Artificial Sequence: Synthetic oligonucleotide
  Sense strand starting at position 2416 SEQ ID NO: 3019
augacagauuauguucuga

SEQ ID NO: 234501 - RNA, 19 nt, Artificial Sequence
  Description of Artificial Sequence: Synthetic oligonucleotide
  Antisense strand to SEQ ID NO: 234500
ucagaacauaaucugucau

SEQ ID NO: 234502 - RNA, 19 nt, Artificial Sequence
  Description of Artificial Sequence: Synthetic oligonucleotide
  Sense strand starting at position 2418 SEQ ID NO: 3019
gacagauuauguucugauc

SEQ ID NO: 234503 - RNA, 19 nt, Artificial Sequence
  Description of Artificial Sequence: Synthetic oligonucleotide
  Antisense strand to SEQ ID NO: 234502
gaucagaacauaaucuguc

SEQ ID NO: 234504 - RNA, 19 nt, Artificial Sequence
  Description of Artificial Sequence: Synthetic oligonucleotide
  Sense strand starting at position 2424 SEQ ID NO: 3019
uuauguucugaucacugau

SEQ ID NO: 234505 - RNA, 19 nt, Artificial Sequence
  Description of Artificial Sequence: Synthetic oligonucleotide
  Antisense strand to SEQ ID NO: 234504
aucagugaucagaacauaa

SEQ ID NO: 234506 - RNA, 19 nt, Artificial Sequence
  Description of Artificial Sequence: Synthetic oligonucleotide
  Sense strand starting at position 2503 SEQ ID NO: 3019
gggaaagaaauguguuguu

SEQ ID NO: 234507 - RNA, 19 nt, Artificial Sequence
  Description of Artificial Sequence: Synthetic oligonucleotide
  Antisense strand to SEQ ID NO: 234506
aacaacacauuucuuuccc

SEQ ID NO: 234508 - RNA, 19 nt, Artificial Sequence
  Description of Artificial Sequence: Synthetic oligonucleotide
  Sense strand starting at position 2551 SEQ ID NO: 3019
gaaagucauuuggauaaua

SEQ ID NO: 234509 - RNA, 19 nt, Artificial Sequence
  Description of Artificial Sequence: Synthetic oligonucleotide
  Antisense strand to SEQ ID NO: 234508
uauuauccaaaugacuuuc

SEQ ID NO: 234510 - RNA, 19 nt, Artificial Sequence
  Description of Artificial Sequence: Synthetic oligonucleotide
  Sense strand starting at position 2562 SEQ ID NO: 3019
ggauaauagaaauguguua

SEQ ID NO: 234511 - RNA, 19 nt, Artificial Sequence
  Description of Artificial Sequence: Synthetic oligonucleotide
  Antisense strand to SEQ ID NO: 234510
uaacacauuucuauuaucc

SEQ ID NO: 234512 - RNA, 19 nt, Artificial Sequence
  Description of Artificial Sequence: Synthetic oligonucleotide
  Sense strand starting at position 2700 SEQ ID NO: 3019
uugagaacagaguguuaaa

SEQ ID NO: 234513 - RNA, 19 nt, Artificial Sequence
  Description of Artificial Sequence: Synthetic oligonucleotide
  Antisense strand to SEQ ID NO: 234512
uuuaacacucuguucucaa

SEQ ID NO: 234514 - RNA, 19 nt, Artificial Sequence
  Description of Artificial Sequence: Synthetic oligonucleotide
  Sense strand starting at position 2789 SEQ ID NO: 3019
gucauagguccauaaucua

SEQ ID NO: 234515 - RNA, 19 nt, Artificial Sequence
  Description of Artificial Sequence: Synthetic oligonucleotide
  Antisense strand to SEQ ID NO: 234514
uagauuauggaccuaugac

SEQ ID NO: 234516 - RNA, 19 nt, Artificial Sequence
  Description of Artificial Sequence: Synthetic oligonucleotide
  Sense strand starting at position 2926 SEQ ID NO: 3019
aggcuauggaucuaaguca

SEQ ID NO: 234517 - RNA, 19 nt, Artificial Sequence
  Description of Artificial Sequence: Synthetic oligonucleotide
  Antisense strand to SEQ ID NO: 234516
ugacuuagauccauagccu

SEQ ID NO: 234518 - RNA, 19 nt, Artificial Sequence
  Description of Artificial Sequence: Synthetic oligonucleotide
  Sense strand starting at position 2943 SEQ ID NO: 3019
cagagagauguuggguuua

SEQ ID NO: 234519 - RNA, 19 nt, Artificial Sequence
  Description of Artificial Sequence: Synthetic oligonucleotide
  Antisense strand to SEQ ID NO: 234518
uaaacccaacaucucucug

SEQ ID NO: 234520 - RNA, 19 nt, Artificial Sequence
  Description of Artificial Sequence: Synthetic oligonucleotide
  Sense strand starting at position 2945 SEQ ID NO: 3019
gagagauguuggguuuaga

SEQ ID NO: 234521 - RNA, 19 nt, Artificial Sequence
  Description of Artificial Sequence: Synthetic oligonucleotide
  Antisense strand to SEQ ID NO: 234520
ucuaaacccaacaucucuc

SEQ ID NO: 234522 - RNA, 19 nt, Artificial Sequence
  Description of Artificial Sequence: Synthetic oligonucleotide
  Sense strand starting at position 2967 SEQ ID NO: 3019
cuggauugugucuaggauu

SEQ ID NO: 234523 - RNA, 19 nt, Artificial Sequence
  Description of Artificial Sequence: Synthetic oligonucleotide
  Antisense strand to SEQ ID NO: 234522
aauccuagacacaauccag

SEQ ID NO: 234524 - RNA, 19 nt, Artificial Sequence
  Description of Artificial Sequence: Synthetic oligonucleotide
  Sense strand starting at position 2975 SEQ ID NO: 3019
ugucuaggauuagugggaa

SEQ ID NO: 234525 - RNA, 19 nt, Artificial Sequence
  Description of Artificial Sequence: Synthetic oligonucleotide
  Antisense strand to SEQ ID NO: 234524
uucccacuaauccuagaca

SEQ ID NO: 234526 - RNA, 19 nt, Artificial Sequence
  Description of Artificial Sequence: Synthetic oligonucleotide
  Sense strand starting at position 3075 SEQ ID NO: 3019
cuuaccauggccuaaguaa

SEQ ID NO: 234527 - RNA, 19 nt, Artificial Sequence
  Description of Artificial Sequence: Synthetic oligonucleotide
  Antisense strand to SEQ ID NO: 234526
uuacuuaggccaugguaag

SEQ ID NO: 234528 - RNA, 19 nt, Artificial Sequence
  Description of Artificial Sequence: Synthetic oligonucleotide
  Sense strand starting at position 3209 SEQ ID NO: 3019
ugguaccuuaccuggaaga

SEQ ID NO: 234529 - RNA, 19 nt, Artificial Sequence
  Description of Artificial Sequence: Synthetic oligonucleotide
  Antisense strand to SEQ ID NO: 234528
ucuuccagguaagguacca

SEQ ID NO: 234530 - RNA, 19 nt, Artificial Sequence
  Description of Artificial Sequence: Synthetic oligonucleotide
  Sense strand starting at position 3210 SEQ ID NO: 3019
gguaccuuaccuggaagaa

SEQ ID NO: 234531 - RNA, 19 nt, Artificial Sequence
  Description of Artificial Sequence: Synthetic oligonucleotide
  Antisense strand to SEQ ID NO: 234530
uucuuccagguaagguacc

SEQ ID NO: 234532 - RNA, 19 nt, Artificial Sequence
  Description of Artificial Sequence: Synthetic oligonucleotide
  Sense strand starting at position 3230 SEQ ID NO: 3019
ugcauugacugaccauuaa

SEQ ID NO: 234533 - RNA, 19 nt, Artificial Sequence
  Description of Artificial Sequence: Synthetic oligonucleotide
  Antisense strand to SEQ ID NO: 234532
uuaauggucagucaaugca

SEQ ID NO: 234534 - RNA, 19 nt, Artificial Sequence
  Description of Artificial Sequence: Synthetic oligonucleotide
  Sense strand starting at position 3282 SEQ ID NO: 3019
uguguuccaccugagauca

SEQ ID NO: 234535 - RNA, 19 nt, Artificial Sequence
  Description of Artificial Sequence: Synthetic oligonucleotide
  Antisense strand to SEQ ID NO: 234534
ugaucucagguggaacaca

SEQ ID NO: 234536 - RNA, 19 nt, Artificial Sequence
  Description of Artificial Sequence: Synthetic oligonucleotide
  Sense strand starting at position 3418 SEQ ID NO: 3019
auccuugacuaauuagagu

SEQ ID NO: 234537 - RNA, 19 nt, Artificial Sequence
  Description of Artificial Sequence: Synthetic oligonucleotide
  Antisense strand to SEQ ID NO: 234536
acucuaauuagucaaggau

SEQ ID NO: 234538 - RNA, 19 nt, Artificial Sequence
  Description of Artificial Sequence: Synthetic oligonucleotide
  Sense strand starting at position 3426 SEQ ID NO: 3019
cuaauuagagucuaugcuu

SEQ ID NO: 234539 - RNA, 19 nt, Artificial Sequence
  Description of Artificial Sequence: Synthetic oligonucleotide
  Antisense strand to SEQ ID NO: 234538
aagcauagacucuaauuag

SEQ ID NO: 234540 - RNA, 19 nt, Artificial Sequence
  Description of Artificial Sequence: Synthetic oligonucleotide
  Sense strand starting at position 3495 SEQ ID NO: 3019
uuuaaugagccaugaggaa

SEQ ID NO: 234541 - RNA, 19 nt, Artificial Sequence
  Description of Artificial Sequence: Synthetic oligonucleotide
  Antisense strand to SEQ ID NO: 234540
uuccucauggcucauuaaa

SEQ ID NO: 234542 - RNA, 19 nt, Artificial Sequence
  Description of Artificial Sequence: Synthetic oligonucleotide
  Sense strand starting at position 3599 SEQ ID NO: 3019
cuuaaaucaggaugugaau

SEQ ID NO: 234543 - RNA, 19 nt, Artificial Sequence
  Description of Artificial Sequence: Synthetic oligonucleotide
  Antisense strand to SEQ ID NO: 234542
auucacauccugauuuaag

SEQ ID NO: 234544 - RNA, 19 nt, Artificial Sequence
  Description of Artificial Sequence: Synthetic oligonucleotide
  Sense strand starting at position 3605 SEQ ID NO: 3019
ucaggaugugaaugauauc

SEQ ID NO: 234545 - RNA, 19 nt, Artificial Sequence
  Description of Artificial Sequence: Synthetic oligonucleotide
  Antisense strand to SEQ ID NO: 234544
gauaucauucacauccuga

SEQ ID NO: 234546 - RNA, 19 nt, Artificial Sequence
  Description of Artificial Sequence: Synthetic oligonucleotide
  Sense strand starting at position 3821 SEQ ID NO: 3019
ugcuuauuccucguaguuc

SEQ ID NO: 234547 - RNA, 19 nt, Artificial Sequence
  Description of Artificial Sequence: Synthetic oligonucleotide
  Antisense strand to SEQ ID NO: 234546
gaacuacgaggaauaagca

SEQ ID NO: 234548 - RNA, 19 nt, Artificial Sequence
  Description of Artificial Sequence: Synthetic oligonucleotide
  Sense strand starting at position 658 SEQ ID NO: 3020
cuggcuaauucccuggaaa

SEQ ID NO: 234549 - RNA, 19 nt, Artificial Sequence
  Description of Artificial Sequence: Synthetic oligonucleotide
  Antisense strand to SEQ ID NO: 234548
uuuccagggaauuagccag

SEQ ID NO: 234550 - RNA, 19 nt, Artificial Sequence
  Description of Artificial Sequence: Synthetic oligonucleotide
  Sense strand starting at position 659 SEQ ID NO: 3020
uggcuaauucccuggaaag

SEQ ID NO: 234551 - RNA, 19 nt, Artificial Sequence
  Description of Artificial Sequence: Synthetic oligonucleotide
  Antisense strand to SEQ ID NO: 234550
cuuuccagggaauuagcca

SEQ ID NO: 234552 - RNA, 19 nt, Artificial Sequence
  Description of Artificial Sequence: Synthetic oligonucleotide
  Sense strand starting at position 660 SEQ ID NO: 3020
ggcuaauucccuggaaaga

SEQ ID NO: 234553 - RNA, 19 nt, Artificial Sequence
  Description of Artificial Sequence: Synthetic oligonucleotide
  Antisense strand to SEQ ID NO: 234552
ucuuuccagggaauuagcc

SEQ ID NO: 234554 - RNA, 19 nt, Artificial Sequence
  Description of Artificial Sequence: Synthetic oligonucleotide
  Sense strand starting at position 761 SEQ ID NO: 3020
cucggacuuggccagagaa

SEQ ID NO: 234555 - RNA, 19 nt, Artificial Sequence
  Description of Artificial Sequence: Synthetic oligonucleotide
  Antisense strand to SEQ ID NO: 234554
uucucuggccaaguccgag

SEQ ID NO: 234556 - RNA, 19 nt, Artificial Sequence
  Description of Artificial Sequence: Synthetic oligonucleotide
  Sense strand starting at position 884 SEQ ID NO: 3020
gcgagguuucgguccgguu

SEQ ID NO: 234557 - RNA, 19 nt, Artificial Sequence
  Description of Artificial Sequence: Synthetic oligonucleotide
  Antisense strand to SEQ ID NO: 234556
aaccggaccgaaaccucgc

SEQ ID NO: 234558 - RNA, 19 nt, Artificial Sequence
  Description of Artificial Sequence: Synthetic oligonucleotide
  Sense strand starting at position 885 SEQ ID NO: 3020
cgagguuucgguccgguuu

SEQ ID NO: 234559 - RNA, 19 nt, Artificial Sequence
  Description of Artificial Sequence: Synthetic oligonucleotide
  Antisense strand to SEQ ID NO: 234558
aaaccggaccgaaaccucg

SEQ ID NO: 234560 - RNA, 19 nt, Artificial Sequence
  Description of Artificial Sequence: Synthetic oligonucleotide
  Sense strand starting at position 939 SEQ ID NO: 3020
cagauuucucgcgguacag

SEQ ID NO: 234561 - RNA, 19 nt, Artificial Sequence
  Description of Artificial Sequence: Synthetic oligonucleotide
  Antisense strand to SEQ ID NO: 234560
cuguaccgcgagaaaucug

SEQ ID NO: 234562 - RNA, 19 nt, Artificial Sequence
  Description of Artificial Sequence: Synthetic oligonucleotide
  Sense strand starting at position 941 SEQ ID NO: 3020
gauuucucgcgguacagau

SEQ ID NO: 234563 - RNA, 19 nt, Artificial Sequence
  Description of Artificial Sequence: Synthetic oligonucleotide
  Antisense strand to SEQ ID NO: 234562
aucuguaccgcgagaaauc

SEQ ID NO: 234564 - RNA, 19 nt, Artificial Sequence
  Description of Artificial Sequence: Synthetic oligonucleotide
  Sense strand starting at position 1118 SEQ ID NO: 3020
cgggcuaaucuggguagau

SEQ ID NO: 234565 - RNA, 19 nt, Artificial Sequence
  Description of Artificial Sequence: Synthetic oligonucleotide
  Antisense strand to SEQ ID NO: 234564
aucuacccagauuagcccg

SEQ ID NO: 234566 - RNA, 19 nt, Artificial Sequence
  Description of Artificial Sequence: Synthetic oligonucleotide
  Sense strand starting at position 1119 SEQ ID NO: 3020
gggcuaaucuggguagauc

SEQ ID NO: 234567 - RNA, 19 nt, Artificial Sequence
  Description of Artificial Sequence: Synthetic oligonucleotide
  Antisense strand to SEQ ID NO: 234566
gaucuacccagauuagccc

SEQ ID NO: 234568 - RNA, 19 nt, Artificial Sequence
  Description of Artificial Sequence: Synthetic oligonucleotide
  Sense strand starting at position 2021 SEQ ID NO: 3020
aggucuuaugaguaaucca

SEQ ID NO: 234569 - RNA, 19 nt, Artificial Sequence
  Description of Artificial Sequence: Synthetic oligonucleotide
  Antisense strand to SEQ ID NO: 234568
uggauuacucauaagaccu

SEQ ID NO: 234570 - RNA, 19 nt, Artificial Sequence
  Description of Artificial Sequence: Synthetic oligonucleotide
  Sense strand starting at position 2024 SEQ ID NO: 3020
ucuuaugaguaauccagaa

SEQ ID NO: 234571 - RNA, 19 nt, Artificial Sequence
  Description of Artificial Sequence: Synthetic oligonucleotide
  Antisense strand to SEQ ID NO: 234570
uucuggauuacucauaaga

SEQ ID NO: 234572 - RNA, 19 nt, Artificial Sequence
  Description of Artificial Sequence: Synthetic oligonucleotide
  Sense strand starting at position 2028 SEQ ID NO: 3020
augaguaauccagaacgua

SEQ ID NO: 234573 - RNA, 19 nt, Artificial Sequence
  Description of Artificial Sequence: Synthetic oligonucleotide
  Antisense strand to SEQ ID NO: 234572
uacguucuggauuacucau

SEQ ID NO: 234574 - RNA, 19 nt, Artificial Sequence
  Description of Artificial Sequence: Synthetic oligonucleotide
  Sense strand starting at position 2131 SEQ ID NO: 3020
gccuuucugagcguuucuu

SEQ ID NO: 234575 - RNA, 19 nt, Artificial Sequence
  Description of Artificial Sequence: Synthetic oligonucleotide
  Antisense strand to SEQ ID NO: 234574
aagaaacgcucagaaaggc

SEQ ID NO: 234576 - RNA, 19 nt, Artificial Sequence
  Description of Artificial Sequence: Synthetic oligonucleotide
  Sense strand starting at position 2539 SEQ ID NO: 3020
ccuccugauuaaucacguu

SEQ ID NO: 234577 - RNA, 19 nt, Artificial Sequence
  Description of Artificial Sequence: Synthetic oligonucleotide
  Antisense strand to SEQ ID NO: 234576
aacgugauuaaucaggagg

SEQ ID NO: 234578 - RNA, 19 nt, Artificial Sequence
  Description of Artificial Sequence: Synthetic oligonucleotide
  Sense strand starting at position 2546 SEQ ID NO: 3020
auuaaucacguuugaaggu

SEQ ID NO: 234579 - RNA, 19 nt, Artificial Sequence
  Description of Artificial Sequence: Synthetic oligonucleotide
  Antisense strand to SEQ ID NO: 234578
accuucaaacgugauuaau

SEQ ID NO: 234580 - RNA, 19 nt, Artificial Sequence
  Description of Artificial Sequence: Synthetic oligonucleotide
  Sense strand starting at position 2685 SEQ ID NO: 3020
ggauucucccuuugcaaua

SEQ ID NO: 234581 - RNA, 19 nt, Artificial Sequence
  Description of Artificial Sequence: Synthetic oligonucleotide
  Antisense strand to SEQ ID NO: 234580
uauugcaaagggagaaucc

SEQ ID NO: 234582 - RNA, 19 nt, Artificial Sequence
  Description of Artificial Sequence: Synthetic oligonucleotide
  Sense strand starting at position 2697 SEQ ID NO: 3020
ugcaauauuuaggcguagu

SEQ ID NO: 234583 - RNA, 19 nt, Artificial Sequence
  Description of Artificial Sequence: Synthetic oligonucleotide
  Antisense strand to SEQ ID NO: 234582
acuacgccuaaauauugca

SEQ ID NO: 234584 - RNA, 19 nt, Artificial Sequence
  Description of Artificial Sequence: Synthetic oligonucleotide
  Sense strand starting at position 2698 SEQ ID NO: 3020
gcaauauuuaggcguaguu

SEQ ID NO: 234585 - RNA, 19 nt, Artificial Sequence
  Description of Artificial Sequence: Synthetic oligonucleotide
  Antisense strand to SEQ ID NO: 234584
aacuacgccuaaauauugc

SEQ ID NO: 234586 - RNA, 19 nt, Artificial Sequence
  Description of Artificial Sequence: Synthetic oligonucleotide
  Sense strand starting at position 2916 SEQ ID NO: 3020
ccgcccugucacuaguuua

SEQ ID NO: 234587 - RNA, 19 nt, Artificial Sequence
  Description of Artificial Sequence: Synthetic oligonucleotide
  Antisense strand to SEQ ID NO: 234586
uaaacuagugacagggcgg

SEQ ID NO: 234588 - RNA, 19 nt, Artificial Sequence
  Description of Artificial Sequence: Synthetic oligonucleotide
  Sense strand starting at position 2919 SEQ ID NO: 3020
cccugucacuaguuuaagu

SEQ ID NO: 234589 - RNA, 19 nt, Artificial Sequence
  Description of Artificial Sequence: Synthetic oligonucleotide
  Antisense strand to SEQ ID NO: 234588
acuuaaacuagugacaggg

SEQ ID NO: 234590 - RNA, 19 nt, Artificial Sequence
  Description of Artificial Sequence: Synthetic oligonucleotide
  Sense strand starting at position 3017 SEQ ID NO: 3020
ggcagugauuccuuuacug

SEQ ID NO: 234591 - RNA, 19 nt, Artificial Sequence
  Description of Artificial Sequence: Synthetic oligonucleotide
  Antisense strand to SEQ ID NO: 234590
caguaaaggaaucacugcc

SEQ ID NO: 234592 - RNA, 19 nt, Artificial Sequence
  Description of Artificial Sequence: Synthetic oligonucleotide
  Sense strand starting at position 3019 SEQ ID NO: 3020
cagugauuccuuuacuggu

SEQ ID NO: 234593 - RNA, 19 nt, Artificial Sequence
  Description of Artificial Sequence: Synthetic oligonucleotide
  Antisense strand to SEQ ID NO: 234592
accaguaaaggaaucacug

SEQ ID NO: 234594 - RNA, 19 nt, Artificial Sequence
  Description of Artificial Sequence: Synthetic oligonucleotide
  Sense strand starting at position 3021 SEQ ID NO: 3020
gugauuccuuuacugguau

SEQ ID NO: 234595 - RNA, 19 nt, Artificial Sequence
  Description of Artificial Sequence: Synthetic oligonucleotide
  Antisense strand to SEQ ID NO: 234594
auaccaguaaaggaaucac

SEQ ID NO: 234596 - RNA, 19 nt, Artificial Sequence
  Description of Artificial Sequence: Synthetic oligonucleotide
  Sense strand starting at position 3083 SEQ ID NO: 3020
ggguuauuuaugcgcacgu

SEQ ID NO: 234597 - RNA, 19 nt, Artificial Sequence
  Description of Artificial Sequence: Synthetic oligonucleotide
  Antisense strand to SEQ ID NO: 234596
acgugcgcauaaauaaccc

SEQ ID NO: 234598 - RNA, 19 nt, Artificial Sequence
  Description of Artificial Sequence: Synthetic oligonucleotide
  Sense strand starting at position 3085 SEQ ID NO: 3020
guuauuuaugcgcacgucu

SEQ ID NO: 234599 - RNA, 19 nt, Artificial Sequence
  Description of Artificial Sequence: Synthetic oligonucleotide
  Antisense strand to SEQ ID NO: 234598
agacgugcgcauaaauaac

SEQ ID NO: 234600 - RNA, 19 nt, Artificial Sequence
  Description of Artificial Sequence: Synthetic oligonucleotide
  Sense strand starting at position 3287 SEQ ID NO: 3020
ugaaauaaucgcguugccu

SEQ ID NO: 234601 - RNA, 19 nt, Artificial Sequence
  Description of Artificial Sequence: Synthetic oligonucleotide
  Antisense strand to SEQ ID NO: 234600
aggcaacgcgauuauuuca

SEQ ID NO: 234602 - RNA, 19 nt, Artificial Sequence
  Description of Artificial Sequence: Synthetic oligonucleotide
  Sense strand starting at position 3288 SEQ ID NO: 3020
gaaauaaucgcguugccuu

SEQ ID NO: 234603 - RNA, 19 nt, Artificial Sequence
  Description of Artificial Sequence: Synthetic oligonucleotide
  Antisense strand to SEQ ID NO: 234602
aaggcaacgcgauuauuuc

SEQ ID NO: 234604 - RNA, 19 nt, Artificial Sequence
  Description of Artificial Sequence: Synthetic oligonucleotide
  Sense strand starting at position 3460 SEQ ID NO: 3020
gucugcuccacguaggaaa

SEQ ID NO: 234605 - RNA, 19 nt, Artificial Sequence
  Description of Artificial Sequence: Synthetic oligonucleotide
  Antisense strand to SEQ ID NO: 234604
uuuccuacguggagcagac

SEQ ID NO: 234606 - RNA, 19 nt, Artificial Sequence
  Description of Artificial Sequence: Synthetic oligonucleotide
  Sense strand starting at position 3540 SEQ ID NO: 3020
ccaggugaagcucggaauu

SEQ ID NO: 234607 - RNA, 19 nt, Artificial Sequence
  Description of Artificial Sequence: Synthetic oligonucleotide
  Antisense strand to SEQ ID NO: 234606
aauuccgagcuucaccugg

SEQ ID NO: 234608 - RNA, 19 nt, Artificial Sequence
  Description of Artificial Sequence: Synthetic oligonucleotide
  Sense strand starting at position 3748 SEQ ID NO: 3020
acccgugauucccuggaaa

SEQ ID NO: 234609 - RNA, 19 nt, Artificial Sequence
  Description of Artificial Sequence: Synthetic oligonucleotide
  Antisense strand to SEQ ID NO: 234608
uuuccagggaaucacgggu

SEQ ID NO: 234610 - RNA, 19 nt, Artificial Sequence
  Description of Artificial Sequence: Synthetic oligonucleotide
  Sense strand starting at position 3750 SEQ ID NO: 3020
ccgugauucccuggaaagg

SEQ ID NO: 234611 - RNA, 19 nt, Artificial Sequence
  Description of Artificial Sequence: Synthetic oligonucleotide
  Antisense strand to SEQ ID NO: 234610
ccuuuccagggaaucacgg

SEQ ID NO: 234612 - RNA, 19 nt, Artificial Sequence
  Description of Artificial Sequence: Synthetic oligonucleotide
  Sense strand starting at position 3751 SEQ ID NO: 3020
cgugauucccuggaaagga

SEQ ID NO: 234613 - RNA, 19 nt, Artificial Sequence
  Description of Artificial Sequence: Synthetic oligonucleotide
  Antisense strand to SEQ ID NO: 234612
uccuuuccagggaaucacg

SEQ ID NO: 234614 - RNA, 19 nt, Artificial Sequence
  Description of Artificial Sequence: Synthetic oligonucleotide
  Sense strand starting at position 3764 SEQ ID NO: 3020
aaaggaagauucguuuacu

SEQ ID NO: 234615 - RNA, 19 nt, Artificial Sequence
  Description of Artificial Sequence: Synthetic oligonucleotide
  Antisense strand to SEQ ID NO: 234614
aguaaacgaaucuuccuuu

SEQ ID NO: 234616 - RNA, 19 nt, Artificial Sequence
  Description of Artificial Sequence: Synthetic oligonucleotide
  Sense strand starting at position 3765 SEQ ID NO: 3020
aaggaagauucguuuacuu

SEQ ID NO: 234617 - RNA, 19 nt, Artificial Sequence
  Description of Artificial Sequence: Synthetic oligonucleotide
  Antisense strand to SEQ ID NO: 234616
aaguaaacgaaucuuccuu

SEQ ID NO: 234618 - RNA, 19 nt, Artificial Sequence
  Description of Artificial Sequence: Synthetic oligonucleotide
  Sense strand starting at position 3783 SEQ ID NO: 3020
ucaccuguggcacgagauu

SEQ ID NO: 234619 - RNA, 19 nt, Artificial Sequence
  Description of Artificial Sequence: Synthetic oligonucleotide
  Antisense strand to SEQ ID NO: 234618
aaucucgugccacagguga

SEQ ID NO: 234620 - RNA, 19 nt, Artificial Sequence
  Description of Artificial Sequence: Synthetic oligonucleotide
  Sense strand starting at position 3792 SEQ ID NO: 3020
gcacgagauugagacauuu

SEQ ID NO: 234621 - RNA, 19 nt, Artificial Sequence
  Description of Artificial Sequence: Synthetic oligonucleotide
  Antisense strand to SEQ ID NO: 234620
aaaugucucaaucucgugc

SEQ ID NO: 234622 - RNA, 19 nt, Artificial Sequence
  Description of Artificial Sequence: Synthetic oligonucleotide
  Sense strand starting at position 3868 SEQ ID NO: 3020
gaaauaaucucguuggaga

SEQ ID NO: 234623 - RNA, 19 nt, Artificial Sequence
  Description of Artificial Sequence: Synthetic oligonucleotide
  Antisense strand to SEQ ID NO: 234622
ucuccaacgagauuauuuc

SEQ ID NO: 234624 - RNA, 19 nt, Artificial Sequence
  Description of Artificial Sequence: Synthetic oligonucleotide
  Sense strand starting at position 3869 SEQ ID NO: 3020
aaauaaucucguuggagaa

SEQ ID NO: 234625 - RNA, 19 nt, Artificial Sequence
  Description of Artificial Sequence: Synthetic oligonucleotide
  Antisense strand to SEQ ID NO: 234624
uucuccaacgagauuauuu

SEQ ID NO: 234626 - RNA, 19 nt, Artificial Sequence
  Description of Artificial Sequence: Synthetic oligonucleotide
  Sense strand starting at position 3870 SEQ ID NO: 3020
aauaaucucguuggagaag

SEQ ID NO: 234627 - RNA, 19 nt, Artificial Sequence
  Description of Artificial Sequence: Synthetic oligonucleotide
  Antisense strand to SEQ ID NO: 234626
cuucuccaacgagauuauu

SEQ ID NO: 234628 - RNA, 19 nt, Artificial Sequence
  Description of Artificial Sequence: Synthetic oligonucleotide
  Sense strand starting at position 39 SEQ ID NO: 3021
caauguucguccugcauau

SEQ ID NO: 234629 - RNA, 19 nt, Artificial Sequence
  Description of Artificial Sequence: Synthetic oligonucleotide
  Antisense strand to SEQ ID NO: 234628
auaugcaggacgaacauug

SEQ ID NO: 234630 - RNA, 19 nt, Artificial Sequence
  Description of Artificial Sequence: Synthetic oligonucleotide
  Sense strand starting at position 49 SEQ ID NO: 3021
ccugcauaugcggacugau

SEQ ID NO: 234631 - RNA, 19 nt, Artificial Sequence
  Description of Artificial Sequence: Synthetic oligonucleotide
  Antisense strand to SEQ ID NO: 234630
aucaguccgcauaugcagg

SEQ ID NO: 234632 - RNA, 19 nt, Artificial Sequence
  Description of Artificial Sequence: Synthetic oligonucleotide
  Sense strand starting at position 265 SEQ ID NO: 3021
aucuucucugaucaugagu

SEQ ID NO: 234633 - RNA, 19 nt, Artificial Sequence
  Description of Artificial Sequence: Synthetic oligonucleotide
  Antisense strand to SEQ ID NO: 234632
acucaugaucagagaagau

SEQ ID NO: 234634 - RNA, 19 nt, Artificial Sequence
  Description of Artificial Sequence: Synthetic oligonucleotide
  Sense strand starting at position 490 SEQ ID NO: 3021
ugggcagcuccuugaauca

SEQ ID NO: 234635 - RNA, 19 nt, Artificial Sequence
  Description of Artificial Sequence: Synthetic oligonucleotide
  Antisense strand to SEQ ID NO: 234634
ugauucaaggagcugccca

SEQ ID NO: 234636 - RNA, 19 nt, Artificial Sequence
  Description of Artificial Sequence: Synthetic oligonucleotide
  Sense strand starting at position 1134 SEQ ID NO: 3021
ggcagcuggucuuaaguca

SEQ ID NO: 234637 - RNA, 19 nt, Artificial Sequence
  Description of Artificial Sequence: Synthetic oligonucleotide
  Antisense strand to SEQ ID NO: 234636
ugacuuaagaccagcugcc

SEQ ID NO: 234638 - RNA, 19 nt, Artificial Sequence
  Description of Artificial Sequence: Synthetic oligonucleotide
  Sense strand starting at position 1734 SEQ ID NO: 3021
ccaagucacuuccuucgaa

SEQ ID NO: 234639 - RNA, 19 nt, Artificial Sequence
  Description of Artificial Sequence: Synthetic oligonucleotide
  Antisense strand to SEQ ID NO: 234638
uucgaaggaagugacuugg

SEQ ID NO: 234640 - RNA, 19 nt, Artificial Sequence
  Description of Artificial Sequence: Synthetic oligonucleotide
  Sense strand starting at position 1737 SEQ ID NO: 3021
agucacuuccuucgaaaga

SEQ ID NO: 234641 - RNA, 19 nt, Artificial Sequence
  Description of Artificial Sequence: Synthetic oligonucleotide
  Antisense strand to SEQ ID NO: 234640
ucuuucgaaggaagugacu

SEQ ID NO: 234642 - RNA, 19 nt, Artificial Sequence
  Description of Artificial Sequence: Synthetic oligonucleotide
  Sense strand starting at position 1738 SEQ ID NO: 3021
gucacuuccuucgaaagac

SEQ ID NO: 234643 - RNA, 19 nt, Artificial Sequence
  Description of Artificial Sequence: Synthetic oligonucleotide
  Antisense strand to SEQ ID NO: 234642
gucuuucgaaggaagugac

SEQ ID NO: 234644 - RNA, 19 nt, Artificial Sequence
  Description of Artificial Sequence: Synthetic oligonucleotide
  Sense strand starting at position 1772 SEQ ID NO: 3021
cuguccgucucucagaaua

SEQ ID NO: 234645 - RNA, 19 nt, Artificial Sequence
  Description of Artificial Sequence: Synthetic oligonucleotide
  Antisense strand to SEQ ID NO: 234644
uauucugagagacggacag

SEQ ID NO: 234646 - RNA, 19 nt, Artificial Sequence
  Description of Artificial Sequence: Synthetic oligonucleotide
  Sense strand starting at position 2085 SEQ ID NO: 3021
acuguucuguucucgggaa

SEQ ID NO: 234647 - RNA, 19 nt, Artificial Sequence
  Description of Artificial Sequence: Synthetic oligonucleotide
  Antisense strand to SEQ ID NO: 234646
uucccgagaacagaacagu

SEQ ID NO: 234648 - RNA, 19 nt, Artificial Sequence
  Description of Artificial Sequence: Synthetic oligonucleotide
  Sense strand starting at position 2087 SEQ ID NO: 3021
uguucuguucucgggaaga

SEQ ID NO: 234649 - RNA, 19 nt, Artificial Sequence
  Description of Artificial Sequence: Synthetic oligonucleotide
  Antisense strand to SEQ ID NO: 234648
ucuucccgagaacagaaca

SEQ ID NO: 234650 - RNA, 19 nt, Artificial Sequence
  Description of Artificial Sequence: Synthetic oligonucleotide
  Sense strand starting at position 2286 SEQ ID NO: 3021
ggcuucuggacucagaacu

SEQ ID NO: 234651 - RNA, 19 nt, Artificial Sequence
  Description of Artificial Sequence: Synthetic oligonucleotide
  Antisense strand to SEQ ID NO: 234650
aguucugaguccagaagcc

SEQ ID NO: 234652 - RNA, 19 nt, Artificial Sequence
  Description of Artificial Sequence: Synthetic oligonucleotide
  Sense strand starting at position 2361 SEQ ID NO: 3021
gaggaaagcucagcccaau

SEQ ID NO: 234653 - RNA, 19 nt, Artificial Sequence
  Description of Artificial Sequence: Synthetic oligonucleotide
  Antisense strand to SEQ ID NO: 234652
auugggcugagcuuuccuc

SEQ ID NO: 234654 - RNA, 19 nt, Artificial Sequence
  Description of Artificial Sequence: Synthetic oligonucleotide
  Sense strand starting at position 2583 SEQ ID NO: 3021
agauauuaauuccgagaca

SEQ ID NO: 234655 - RNA, 19 nt, Artificial Sequence
  Description of Artificial Sequence: Synthetic oligonucleotide
  Antisense strand to SEQ ID NO: 234654
ugucucggaauuaauaucu

SEQ ID NO: 234656 - RNA, 19 nt, Artificial Sequence
  Description of Artificial Sequence: Synthetic oligonucleotide
  Sense strand starting at position 2609 SEQ ID NO: 3021
agggaaaugcugcaacauu

SEQ ID NO: 234657 - RNA, 19 nt, Artificial Sequence
  Description of Artificial Sequence: Synthetic oligonucleotide
  Antisense strand to SEQ ID NO: 234656
aauguugcagcauuucccu

SEQ ID NO: 234658 - RNA, 19 nt, Artificial Sequence
  Description of Artificial Sequence: Synthetic oligonucleotide
  Sense strand starting at position 2662 SEQ ID NO: 3021
gcaaaugcuccucagagcu

SEQ ID NO: 234659 - RNA, 19 nt, Artificial Sequence
  Description of Artificial Sequence: Synthetic oligonucleotide
  Antisense strand to SEQ ID NO: 234658
agcucugaggagcauuugc

SEQ ID NO: 234660 - RNA, 19 nt, Artificial Sequence
  Description of Artificial Sequence: Synthetic oligonucleotide
  Sense strand starting at position 3251 SEQ ID NO: 3021
cagagacauccgugugggu

SEQ ID NO: 234661 - RNA, 19 nt, Artificial Sequence
  Description of Artificial Sequence: Synthetic oligonucleotide
  Antisense strand to SEQ ID NO: 234660
acccacacggaugucucug

SEQ ID NO: 234662 - RNA, 19 nt, Artificial Sequence
  Description of Artificial Sequence: Synthetic oligonucleotide
  Sense strand starting at position 3253 SEQ ID NO: 3021
gagacauccgugugggugu

SEQ ID NO: 234663 - RNA, 19 nt, Artificial Sequence
  Description of Artificial Sequence: Synthetic oligonucleotide
  Antisense strand to SEQ ID NO: 234662
acacccacacggaugucuc

SEQ ID NO: 234664 - RNA, 19 nt, Artificial Sequence
  Description of Artificial Sequence: Synthetic oligonucleotide
  Sense strand starting at position 3391 SEQ ID NO: 3021
uuggccgagccauguguua

SEQ ID NO: 234665 - RNA, 19 nt, Artificial Sequence
  Description of Artificial Sequence: Synthetic oligonucleotide
  Antisense strand to SEQ ID NO: 234664
uaacacauggcucggccaa

SEQ ID NO: 234666 - RNA, 19 nt, Artificial Sequence
  Description of Artificial Sequence: Synthetic oligonucleotide
  Sense strand starting at position 3393 SEQ ID NO: 3021
ggccgagccauguguuaca

SEQ ID NO: 234667 - RNA, 19 nt, Artificial Sequence
  Description of Artificial Sequence: Synthetic oligonucleotide
  Antisense strand to SEQ ID NO: 234666
uguaacacauggcucggcc

SEQ ID NO: 234668 - RNA, 19 nt, Artificial Sequence
  Description of Artificial Sequence: Synthetic oligonucleotide
  Sense strand starting at position 3853 SEQ ID NO: 3021
gcacacguuguuugucaga

SEQ ID NO: 234669 - RNA, 19 nt, Artificial Sequence
  Description of Artificial Sequence: Synthetic oligonucleotide
  Antisense strand to SEQ ID NO: 234668
ucugacaaacaacgugugc

SEQ ID NO: 234670 - RNA, 19 nt, Artificial Sequence
  Description of Artificial Sequence: Synthetic oligonucleotide
  Sense strand starting at position 3856 SEQ ID NO: 3021
cacguuguuugucagagca

SEQ ID NO: 234671 - RNA, 19 nt, Artificial Sequence
  Description of Artificial Sequence: Synthetic oligonucleotide
  Antisense strand to SEQ ID NO: 234670
ugcucugacaaacaacgug

SEQ ID NO: 234672 - RNA, 19 nt, Artificial Sequence
  Description of Artificial Sequence: Synthetic oligonucleotide
  Sense strand starting at position 3858 SEQ ID NO: 3021
cguuguuugucagagcaga

SEQ ID NO: 234673 - RNA, 19 nt, Artificial Sequence
  Description of Artificial Sequence: Synthetic oligonucleotide
  Antisense strand to SEQ ID NO: 234672
ucugcucugacaaacaacg

SEQ ID NO: 234674 - RNA, 19 nt, Artificial Sequence
  Description of Artificial Sequence: Synthetic oligonucleotide
  Sense strand starting at position 3942 SEQ ID NO: 3021
agcugcuucgaguaaggga

SEQ ID NO: 234675 - RNA, 19 nt, Artificial Sequence
  Description of Artificial Sequence: Synthetic oligonucleotide
  Antisense strand to SEQ ID NO: 234674
ucccuuacucgaagcagcu

SEQ ID NO: 234676 - RNA, 19 nt, Artificial Sequence
  Description of Artificial Sequence: Synthetic oligonucleotide
  Sense strand starting at position 273 SEQ ID NO: 3022
ggugguguucaacagaaag

SEQ ID NO: 234677 - RNA, 19 nt, Artificial Sequence
  Description of Artificial Sequence: Synthetic oligonucleotide
  Antisense strand to SEQ ID NO: 234676
cuuucuguugaacaccacc

SEQ ID NO: 234678 - RNA, 19 nt, Artificial Sequence
  Description of Artificial Sequence: Synthetic oligonucleotide
  Sense strand starting at position 318 SEQ ID NO: 3022
auugaaauuugcucucugu

SEQ ID NO: 234679 - RNA, 19 nt, Artificial Sequence
  Description of Artificial Sequence: Synthetic oligonucleotide
  Antisense strand to SEQ ID NO: 234678
acagagagcaaauuucaau

SEQ ID NO: 234680 - RNA, 19 nt, Artificial Sequence
  Description of Artificial Sequence: Synthetic oligonucleotide
  Sense strand starting at position 539 SEQ ID NO: 3022
uggucuggccaacauguaa

SEQ ID NO: 234681 - RNA, 19 nt, Artificial Sequence
  Description of Artificial Sequence: Synthetic oligonucleotide
  Antisense strand to SEQ ID NO: 234680
uuacauguuggccagacca

SEQ ID NO: 234682 - RNA, 19 nt, Artificial Sequence
  Description of Artificial Sequence: Synthetic oligonucleotide
  Sense strand starting at position 550 SEQ ID NO: 3022
acauguaaccaugagccaa

SEQ ID NO: 234683 - RNA, 19 nt, Artificial Sequence
  Description of Artificial Sequence: Synthetic oligonucleotide
  Antisense strand to SEQ ID NO: 234682
uuggcucaugguuacaugu

SEQ ID NO: 234684 - RNA, 19 nt, Artificial Sequence
  Description of Artificial Sequence: Synthetic oligonucleotide
  Sense strand starting at position 572 SEQ ID NO: 3022
acauaucuuacguaucgga

SEQ ID NO: 234685 - RNA, 19 nt, Artificial Sequence
  Description of Artificial Sequence: Synthetic oligonucleotide
  Antisense strand to SEQ ID NO: 234684
uccgauacguaagauaugu

SEQ ID NO: 234686 - RNA, 19 nt, Artificial Sequence
  Description of Artificial Sequence: Synthetic oligonucleotide
  Sense strand starting at position 576 SEQ ID NO: 3022
aucuuacguaucggaagaa

SEQ ID NO: 234687 - RNA, 19 nt, Artificial Sequence
  Description of Artificial Sequence: Synthetic oligonucleotide
  Antisense strand to SEQ ID NO: 234686
uucuuccgauacguaagau

SEQ ID NO: 234688 - RNA, 19 nt, Artificial Sequence
  Description of Artificial Sequence: Synthetic oligonucleotide
  Sense strand starting at position 816 SEQ ID NO: 3022
ugcaauuacugaguuaaag

SEQ ID NO: 234689 - RNA, 19 nt, Artificial Sequence
  Description of Artificial Sequence: Synthetic oligonucleotide
  Antisense strand to SEQ ID NO: 234688
cuuuaacucaguaauugca

SEQ ID NO: 234690 - RNA, 19 nt, Artificial Sequence
  Description of Artificial Sequence: Synthetic oligonucleotide
  Sense strand starting at position 881 SEQ ID NO: 3022
guuuaaugaggucaucgga

SEQ ID NO: 234691 - RNA, 19 nt, Artificial Sequence
  Description of Artificial Sequence: Synthetic oligonucleotide
  Antisense strand to SEQ ID NO: 234690
uccgaugaccucauuaaac

SEQ ID NO: 234692 - RNA, 19 nt, Artificial Sequence
  Description of Artificial Sequence: Synthetic oligonucleotide
  Sense strand starting at position 884 SEQ ID NO: 3022
uaaugaggucaucggauua

SEQ ID NO: 234693 - RNA, 19 nt, Artificial Sequence
  Description of Artificial Sequence: Synthetic oligonucleotide
  Antisense strand to SEQ ID NO: 234692
uaauccgaugaccucauua

SEQ ID NO: 234694 - RNA, 19 nt, Artificial Sequence
  Description of Artificial Sequence: Synthetic oligonucleotide
  Sense strand starting at position 900 SEQ ID NO: 3022
uuaauagaguugucaaaug

SEQ ID NO: 234695 - RNA, 19 nt, Artificial Sequence
  Description of Artificial Sequence: Synthetic oligonucleotide
  Antisense strand to SEQ ID NO: 234694
cauuugacaacucuauuaa

SEQ ID NO: 234696 - RNA, 19 nt, Artificial Sequence
  Description of Artificial Sequence: Synthetic oligonucleotide
  Sense strand starting at position 905 SEQ ID NO: 3022
agaguugucaaauguauua

SEQ ID NO: 234697 - RNA, 19 nt, Artificial Sequence
  Description of Artificial Sequence: Synthetic oligonucleotide
  Antisense strand to SEQ ID NO: 234696
uaauacauuugacaacucu

SEQ ID NO: 234698 - RNA, 19 nt, Artificial Sequence
  Description of Artificial Sequence: Synthetic oligonucleotide
  Sense strand starting at position 935 SEQ ID NO: 3022
auccuaauugcccauggau

SEQ ID NO: 234699 - RNA, 19 nt, Artificial Sequence
  Description of Artificial Sequence: Synthetic oligonucleotide
  Antisense strand to SEQ ID NO: 234698
auccaugggcaauuaggau

SEQ ID NO: 234700 - RNA, 19 nt, Artificial Sequence
  Description of Artificial Sequence: Synthetic oligonucleotide
  Sense strand starting at position 1032 SEQ ID NO: 3022
ccuaaaugguuauugggua

SEQ ID NO: 234701 - RNA, 19 nt, Artificial Sequence
  Description of Artificial Sequence: Synthetic oligonucleotide
  Antisense strand to SEQ ID NO: 234700
uacccaauaaccauuuagg

SEQ ID NO: 234702 - RNA, 19 nt, Artificial Sequence
  Description of Artificial Sequence: Synthetic oligonucleotide
  Sense strand starting at position 1262 SEQ ID NO: 3022
caaagaucgcuccaggauc

SEQ ID NO: 234703 - RNA, 19 nt, Artificial Sequence
  Description of Artificial Sequence: Synthetic oligonucleotide
  Antisense strand to SEQ ID NO: 234702
gauccuggagcgaucuuug

SEQ ID NO: 234704 - RNA, 19 nt, Artificial Sequence
  Description of Artificial Sequence: Synthetic oligonucleotide
  Sense strand starting at position 1289 SEQ ID NO: 3022
guaucauaccaucagcuga

SEQ ID NO: 234705 - RNA, 19 nt, Artificial Sequence
  Description of Artificial Sequence: Synthetic oligonucleotide
  Antisense strand to SEQ ID NO: 234704
ucagcugaugguaugauac

SEQ ID NO: 234706 - RNA, 19 nt, Artificial Sequence
  Description of Artificial Sequence: Synthetic oligonucleotide
  Sense strand starting at position 2076 SEQ ID NO: 3022
acucgaauccuggguugac

SEQ ID NO: 234707 - RNA, 19 nt, Artificial Sequence
  Description of Artificial Sequence: Synthetic oligonucleotide
  Antisense strand to SEQ ID NO: 234706
gucaacccaggauucgagu

SEQ ID NO: 234708 - RNA, 19 nt, Artificial Sequence
  Description of Artificial Sequence: Synthetic oligonucleotide
  Sense strand starting at position 2130 SEQ ID NO: 3022
uaaugagcuggucauuaau

SEQ ID NO: 234709 - RNA, 19 nt, Artificial Sequence
  Description of Artificial Sequence: Synthetic oligonucleotide
  Antisense strand to SEQ ID NO: 234708
auuaaugaccagcucauua

SEQ ID NO: 234710 - RNA, 19 nt, Artificial Sequence
  Description of Artificial Sequence: Synthetic oligonucleotide
  Sense strand starting at position 2153 SEQ ID NO: 3022
guggcuaucagacgaagaa

SEQ ID NO: 234711 - RNA, 19 nt, Artificial Sequence
  Description of Artificial Sequence: Synthetic oligonucleotide
  Antisense strand to SEQ ID NO: 234710
uucuucgucugauagccac

SEQ ID NO: 234712 - RNA, 19 nt, Artificial Sequence
  Description of Artificial Sequence: Synthetic oligonucleotide
  Sense strand starting at position 2605 SEQ ID NO: 3022
acaguaguagcuuagaaau

SEQ ID NO: 234713 - RNA, 19 nt, Artificial Sequence
  Description of Artificial Sequence: Synthetic oligonucleotide
  Antisense strand to SEQ ID NO: 234712
auuucuaagcuacuacugu

SEQ ID NO: 234714 - RNA, 19 nt, Artificial Sequence
  Description of Artificial Sequence: Synthetic oligonucleotide
  Sense strand starting at position 2611 SEQ ID NO: 3022
guagcuuagaaaugaggua

SEQ ID NO: 234715 - RNA, 19 nt, Artificial Sequence
  Description of Artificial Sequence: Synthetic oligonucleotide
  Antisense strand to SEQ ID NO: 234714
uaccucauuucuaagcuac

SEQ ID NO: 234716 - RNA, 19 nt, Artificial Sequence
  Description of Artificial Sequence: Synthetic oligonucleotide
  Sense strand starting at position 2700 SEQ ID NO: 3022
ggacaugguucuguuagag

SEQ ID NO: 234717 - RNA, 19 nt, Artificial Sequence
  Description of Artificial Sequence: Synthetic oligonucleotide
  Antisense strand to SEQ ID NO: 234716
cucuaacagaaccaugucc

SEQ ID NO: 234718 - RNA, 19 nt, Artificial Sequence
  Description of Artificial Sequence: Synthetic oligonucleotide
  Sense strand starting at position 2784 SEQ ID NO: 3022
gggucagguagauggauua

SEQ ID NO: 234719 - RNA, 19 nt, Artificial Sequence
  Description of Artificial Sequence: Synthetic oligonucleotide
  Antisense strand to SEQ ID NO: 234718
uaauccaucuaccugaccc

SEQ ID NO: 234720 - RNA, 19 nt, Artificial Sequence
  Description of Artificial Sequence: Synthetic oligonucleotide
  Sense strand starting at position 2897 SEQ ID NO: 3022
guccacaguuccuuuaaga

SEQ ID NO: 234721 - RNA, 19 nt, Artificial Sequence
  Description of Artificial Sequence: Synthetic oligonucleotide
  Antisense strand to SEQ ID NO: 234720
ucuuaaaggaacuguggac

SEQ ID NO: 234722 - RNA, 19 nt, Artificial Sequence
  Description of Artificial Sequence: Synthetic oligonucleotide
  Sense strand starting at position 2929 SEQ ID NO: 3022
acaaguauugauugagguc

SEQ ID NO: 234723 - RNA, 19 nt, Artificial Sequence
  Description of Artificial Sequence: Synthetic oligonucleotide
  Antisense strand to SEQ ID NO: 234722
gaccucaaucaauacuugu

SEQ ID NO: 234724 - RNA, 19 nt, Artificial Sequence
  Description of Artificial Sequence: Synthetic oligonucleotide
  Sense strand starting at position 2938 SEQ ID NO: 3022
gauugagguccuuguaaau

SEQ ID NO: 234725 - RNA, 19 nt, Artificial Sequence
  Description of Artificial Sequence: Synthetic oligonucleotide
  Antisense strand to SEQ ID NO: 234724
auuuacaaggaccucaauc

SEQ ID NO: 234726 - RNA, 19 nt, Artificial Sequence
  Description of Artificial Sequence: Synthetic oligonucleotide
  Sense strand starting at position 2951 SEQ ID NO: 3022
guaaaugccagguacugaa

SEQ ID NO: 234727 - RNA, 19 nt, Artificial Sequence
  Description of Artificial Sequence: Synthetic oligonucleotide
  Antisense strand to SEQ ID NO: 234726
uucaguaccuggcauuuac

SEQ ID NO: 234728 - RNA, 19 nt, Artificial Sequence
  Description of Artificial Sequence: Synthetic oligonucleotide
  Sense strand starting at position 3137 SEQ ID NO: 3022
ucuggaagucuagggugaa

SEQ ID NO: 234729 - RNA, 19 nt, Artificial Sequence
  Description of Artificial Sequence: Synthetic oligonucleotide
  Antisense strand to SEQ ID NO: 234728
uucacccuagacuuccaga

SEQ ID NO: 234730 - RNA, 19 nt, Artificial Sequence
  Description of Artificial Sequence: Synthetic oligonucleotide
  Sense strand starting at position 3140 SEQ ID NO: 3022
ggaagucuagggugaaacu

SEQ ID NO: 234731 - RNA, 19 nt, Artificial Sequence
  Description of Artificial Sequence: Synthetic oligonucleotide
  Antisense strand to SEQ ID NO: 234730
aguuucacccuagacuucc

SEQ ID NO: 234732 - RNA, 19 nt, Artificial Sequence
  Description of Artificial Sequence: Synthetic oligonucleotide
  Sense strand starting at position 3187 SEQ ID NO: 3022
guuauucuucugcagauua

SEQ ID NO: 234733 - RNA, 19 nt, Artificial Sequence
  Description of Artificial Sequence: Synthetic oligonucleotide
  Antisense strand to SEQ ID NO: 234732
uaaucugcagaagaauaac

SEQ ID NO: 234734 - RNA, 19 nt, Artificial Sequence
  Description of Artificial Sequence: Synthetic oligonucleotide
  Sense strand starting at position 3222 SEQ ID NO: 3022
gagaaauauugcucuaagg

SEQ ID NO: 234735 - RNA, 19 nt, Artificial Sequence
  Description of Artificial Sequence: Synthetic oligonucleotide
  Antisense strand to SEQ ID NO: 234734
ccuuagagcaauauuucuc

SEQ ID NO: 234736 - RNA, 19 nt, Artificial Sequence
  Description of Artificial Sequence: Synthetic oligonucleotide
  Sense strand starting at position 3237 SEQ ID NO: 3022
aaggcuugaugaguaaucu

SEQ ID NO: 234737 - RNA, 19 nt, Artificial Sequence
  Description of Artificial Sequence: Synthetic oligonucleotide
  Antisense strand to SEQ ID NO: 234736
agauuacucaucaagccuu

SEQ ID NO: 234738 - RNA, 19 nt, Artificial Sequence
  Description of Artificial Sequence: Synthetic oligonucleotide
  Sense strand starting at position 3241 SEQ ID NO: 3022
cuugaugaguaaucugaau

SEQ ID NO: 234739 - RNA, 19 nt, Artificial Sequence
  Description of Artificial Sequence: Synthetic oligonucleotide
  Antisense strand to SEQ ID NO: 234738
auucagauuacucaucaag

SEQ ID NO: 234740 - RNA, 19 nt, Artificial Sequence
  Description of Artificial Sequence: Synthetic oligonucleotide
  Sense strand starting at position 3368 SEQ ID NO: 3022
gcaacuuuagaggaguacu

SEQ ID NO: 234741 - RNA, 19 nt, Artificial Sequence
  Description of Artificial Sequence: Synthetic oligonucleotide
  Antisense strand to SEQ ID NO: 234740
aguacuccucuaaaguugc

SEQ ID NO: 234742 - RNA, 19 nt, Artificial Sequence
  Description of Artificial Sequence: Synthetic oligonucleotide
  Sense strand starting at position 3536 SEQ ID NO: 3022
ugaaaugcaucuuugauua

SEQ ID NO: 234743 - RNA, 19 nt, Artificial Sequence
  Description of Artificial Sequence: Synthetic oligonucleotide
  Antisense strand to SEQ ID NO: 234742
uaaucaaagaugcauuuca

SEQ ID NO: 234744 - RNA, 19 nt, Artificial Sequence
  Description of Artificial Sequence: Synthetic oligonucleotide
  Sense strand starting at position 3540 SEQ ID NO: 3022
augcaucuuugauuaggaa

SEQ ID NO: 234745 - RNA, 19 nt, Artificial Sequence
  Description of Artificial Sequence: Synthetic oligonucleotide
  Antisense strand to SEQ ID NO: 234744
uuccuaaucaaagaugcau

SEQ ID NO: 234746 - RNA, 19 nt, Artificial Sequence
  Description of Artificial Sequence: Synthetic oligonucleotide
  Sense strand starting at position 3571 SEQ ID NO: 3022
gggauuaugugccuggaau

SEQ ID NO: 234747 - RNA, 19 nt, Artificial Sequence
  Description of Artificial Sequence: Synthetic oligonucleotide
  Antisense strand to SEQ ID NO: 234746
auuccaggcacauaauccc

SEQ ID NO: 234748 - RNA, 19 nt, Artificial Sequence
  Description of Artificial Sequence: Synthetic oligonucleotide
  Sense strand starting at position 3572 SEQ ID NO: 3022
ggauuaugugccuggaauc

SEQ ID NO: 234749 - RNA, 19 nt, Artificial Sequence
  Description of Artificial Sequence: Synthetic oligonucleotide
  Antisense strand to SEQ ID NO: 234748
gauuccaggcacauaaucc

SEQ ID NO: 234750 - RNA, 19 nt, Artificial Sequence
  Description of Artificial Sequence: Synthetic oligonucleotide
  Sense strand starting at position 3573 SEQ ID NO: 3022
gauuaugugccuggaauca

SEQ ID NO: 234751 - RNA, 19 nt, Artificial Sequence
  Description of Artificial Sequence: Synthetic oligonucleotide
  Antisense strand to SEQ ID NO: 234750
ugauuccaggcacauaauc

SEQ ID NO: 234752 - RNA, 19 nt, Artificial Sequence
  Description of Artificial Sequence: Synthetic oligonucleotide
  Sense strand starting at position 3624 SEQ ID NO: 3022
cuucuucugucuguaauuu

SEQ ID NO: 234753 - RNA, 19 nt, Artificial Sequence
  Description of Artificial Sequence: Synthetic oligonucleotide
  Antisense strand to SEQ ID NO: 234752
aaauuacagacagaagaag

SEQ ID NO: 234754 - RNA, 19 nt, Artificial Sequence
  Description of Artificial Sequence: Synthetic oligonucleotide
  Sense strand starting at position 3929 SEQ ID NO: 3022
uagcaaggaugucuuagaa

SEQ ID NO: 234755 - RNA, 19 nt, Artificial Sequence
  Description of Artificial Sequence: Synthetic oligonucleotide
  Antisense strand to SEQ ID NO: 234754
uucuaagacauccuugcua

SEQ ID NO: 234756 - RNA, 19 nt, Artificial Sequence
  Description of Artificial Sequence: Synthetic oligonucleotide
  Sense strand starting at position 87 SEQ ID NO: 3024
gacugagacucugaggaaa

SEQ ID NO: 234757 - RNA, 19 nt, Artificial Sequence
  Description of Artificial Sequence: Synthetic oligonucleotide
  Antisense strand to SEQ ID NO: 234756
uuuccucagagucucaguc

SEQ ID NO: 234758 - RNA, 19 nt, Artificial Sequence
  Description of Artificial Sequence: Synthetic oligonucleotide
  Sense strand starting at position 174 SEQ ID NO: 3024
gugccuuuagccuugcgaa

SEQ ID NO: 234759 - RNA, 19 nt, Artificial Sequence
  Description of Artificial Sequence: Synthetic oligonucleotide
  Antisense strand to SEQ ID NO: 234758
uucgcaaggcuaaaggcac

SEQ ID NO: 234760 - RNA, 19 nt, Artificial Sequence
  Description of Artificial Sequence: Synthetic oligonucleotide
  Sense strand starting at position 266 SEQ ID NO: 3024
caaugaaugcaugguaguu

SEQ ID NO: 234761 - RNA, 19 nt, Artificial Sequence
  Description of Artificial Sequence: Synthetic oligonucleotide
  Antisense strand to SEQ ID NO: 234760
aacuaccaugcauucauug

SEQ ID NO: 234762 - RNA, 19 nt, Artificial Sequence
  Description of Artificial Sequence: Synthetic oligonucleotide
  Sense strand starting at position 364 SEQ ID NO: 3024
cgagguuaguuucccugaa

SEQ ID NO: 234763 - RNA, 19 nt, Artificial Sequence
  Description of Artificial Sequence: Synthetic oligonucleotide
  Antisense strand to SEQ ID NO: 234762
uucagggaaacuaaccucg

SEQ ID NO: 234764 - RNA, 19 nt, Artificial Sequence
  Description of Artificial Sequence: Synthetic oligonucleotide
  Sense strand starting at position 365 SEQ ID NO: 3024
gagguuaguuucccugaac

SEQ ID NO: 234765 - RNA, 19 nt, Artificial Sequence
  Description of Artificial Sequence: Synthetic oligonucleotide
  Antisense strand to SEQ ID NO: 234764
guucagggaaacuaaccuc

SEQ ID NO: 234766 - RNA, 19 nt, Artificial Sequence
  Description of Artificial Sequence: Synthetic oligonucleotide
  Sense strand starting at position 516 SEQ ID NO: 3024
gcagcuuucgcuguccaga

SEQ ID NO: 234767 - RNA, 19 nt, Artificial Sequence
  Description of Artificial Sequence: Synthetic oligonucleotide
  Antisense strand to SEQ ID NO: 234766
ucuggacagcgaaagcugc

SEQ ID NO: 234768 - RNA, 19 nt, Artificial Sequence
  Description of Artificial Sequence: Synthetic oligonucleotide
  Sense strand starting at position 706 SEQ ID NO: 3024
aucucugcaccuggagaua

SEQ ID NO: 234769 - RNA, 19 nt, Artificial Sequence
  Description of Artificial Sequence: Synthetic oligonucleotide
  Antisense strand to SEQ ID NO: 234768
uaucuccaggugcagagau

SEQ ID NO: 234770 - RNA, 19 nt, Artificial Sequence
  Description of Artificial Sequence: Synthetic oligonucleotide
  Sense strand starting at position 957 SEQ ID NO: 3024
agauacauggccggagagu

SEQ ID NO: 234771 - RNA, 19 nt, Artificial Sequence
  Description of Artificial Sequence: Synthetic oligonucleotide
  Antisense strand to SEQ ID NO: 234770
acucuccggccauguaucu

SEQ ID NO: 234772 - RNA, 19 nt, Artificial Sequence
  Description of Artificial Sequence: Synthetic oligonucleotide
  Sense strand starting at position 1126 SEQ ID NO: 3024
ccuggugucgggucgagua

SEQ ID NO: 234773 - RNA, 19 nt, Artificial Sequence
  Description of Artificial Sequence: Synthetic oligonucleotide
  Antisense strand to SEQ ID NO: 234772
uacucgacccgacaccagg

SEQ ID NO: 234774 - RNA, 19 nt, Artificial Sequence
  Description of Artificial Sequence: Synthetic oligonucleotide
  Sense strand starting at position 1175 SEQ ID NO: 3024
gcagcuggugcgagaaagu

SEQ ID NO: 234775 - RNA, 19 nt, Artificial Sequence
  Description of Artificial Sequence: Synthetic oligonucleotide
  Antisense strand to SEQ ID NO: 234774
acuuucucgcaccagcugc

SEQ ID NO: 234776 - RNA, 19 nt, Artificial Sequence
  Description of Artificial Sequence: Synthetic oligonucleotide
  Sense strand starting at position 1185 SEQ ID NO: 3024
cgagaaaguugucugggcu

SEQ ID NO: 234777 - RNA, 19 nt, Artificial Sequence
  Description of Artificial Sequence: Synthetic oligonucleotide
  Antisense strand to SEQ ID NO: 234776
agcccagacaacuuucucg

SEQ ID NO: 234778 - RNA, 19 nt, Artificial Sequence
  Description of Artificial Sequence: Synthetic oligonucleotide
  Sense strand starting at position 1189 SEQ ID NO: 3024
aaaguugucugggcuugga

SEQ ID NO: 234779 - RNA, 19 nt, Artificial Sequence
  Description of Artificial Sequence: Synthetic oligonucleotide
  Antisense strand to SEQ ID NO: 234778
uccaagcccagacaacuuu

SEQ ID NO: 234780 - RNA, 19 nt, Artificial Sequence
  Description of Artificial Sequence: Synthetic oligonucleotide
  Sense strand starting at position 2087 SEQ ID NO: 3024
gggcuaguaucauuuacgu

SEQ ID NO: 234781 - RNA, 19 nt, Artificial Sequence
  Description of Artificial Sequence: Synthetic oligonucleotide
  Antisense strand to SEQ ID NO: 234780
acguaaaugauacuagccc

SEQ ID NO: 234782 - RNA, 19 nt, Artificial Sequence
  Description of Artificial Sequence: Synthetic oligonucleotide
  Sense strand starting at position 2443 SEQ ID NO: 3024
ggcucuccagccgagagau

SEQ ID NO: 234783 - RNA, 19 nt, Artificial Sequence
  Description of Artificial Sequence: Synthetic oligonucleotide
  Antisense strand to SEQ ID NO: 234782
aucucucggcuggagagcc

SEQ ID NO: 234784 - RNA, 19 nt, Artificial Sequence
  Description of Artificial Sequence: Synthetic oligonucleotide
  Sense strand starting at position 2514 SEQ ID NO: 3024
ccucuuguugguuacagua

SEQ ID NO: 234785 - RNA, 19 nt, Artificial Sequence
  Description of Artificial Sequence: Synthetic oligonucleotide
  Antisense strand to SEQ ID NO: 234784
uacuguaaccaacaagagg

SEQ ID NO: 234786 - RNA, 19 nt, Artificial Sequence
  Description of Artificial Sequence: Synthetic oligonucleotide
  Sense strand starting at position 2547 SEQ ID NO: 3024
ggauccuaguguucugguu

SEQ ID NO: 234787 - RNA, 19 nt, Artificial Sequence
  Description of Artificial Sequence: Synthetic oligonucleotide
  Antisense strand to SEQ ID NO: 234786
aaccagaacacuaggaucc

SEQ ID NO: 234788 - RNA, 19 nt, Artificial Sequence
  Description of Artificial Sequence: Synthetic oligonucleotide
  Sense strand starting at position 2685 SEQ ID NO: 3024
caggcaaguagguaugaua

SEQ ID NO: 234789 - RNA, 19 nt, Artificial Sequence
  Description of Artificial Sequence: Synthetic oligonucleotide
  Antisense strand to SEQ ID NO: 234788
uaucauaccuacuugccug

SEQ ID NO: 234790 - RNA, 19 nt, Artificial Sequence
  Description of Artificial Sequence: Synthetic oligonucleotide
  Sense strand starting at position 2725 SEQ ID NO: 3024
aguaccuggacguaugaau

SEQ ID NO: 234791 - RNA, 19 nt, Artificial Sequence
  Description of Artificial Sequence: Synthetic oligonucleotide
  Antisense strand to SEQ ID NO: 234790
auucauacguccagguacu

SEQ ID NO: 234792 - RNA, 19 nt, Artificial Sequence
  Description of Artificial Sequence: Synthetic oligonucleotide
  Sense strand starting at position 2738 SEQ ID NO: 3024
augaaugucucaguuaaug

SEQ ID NO: 234793 - RNA, 19 nt, Artificial Sequence
  Description of Artificial Sequence: Synthetic oligonucleotide
  Antisense strand to SEQ ID NO: 234792
cauuaacugagacauucau

SEQ ID NO: 234794 - RNA, 19 nt, Artificial Sequence
  Description of Artificial Sequence: Synthetic oligonucleotide
  Sense strand starting at position 2834 SEQ ID NO: 3024
accuaagacgcagacauua

SEQ ID NO: 234795 - RNA, 19 nt, Artificial Sequence
  Description of Artificial Sequence: Synthetic oligonucleotide
  Antisense strand to SEQ ID NO: 234794
uaaugucugcgucuuaggu

SEQ ID NO: 234796 - RNA, 19 nt, Artificial Sequence
  Description of Artificial Sequence: Synthetic oligonucleotide
  Sense strand starting at position 2989 SEQ ID NO: 3024
gugucaguugucuuguuug

SEQ ID NO: 234797 - RNA, 19 nt, Artificial Sequence
  Description of Artificial Sequence: Synthetic oligonucleotide
  Antisense strand to SEQ ID NO: 234796
caaacaagacaacugacac

SEQ ID NO: 234798 - RNA, 19 nt, Artificial Sequence
  Description of Artificial Sequence: Synthetic oligonucleotide
  Sense strand starting at position 2991 SEQ ID NO: 3024
gucaguugucuuguuugua

SEQ ID NO: 234799 - RNA, 19 nt, Artificial Sequence
  Description of Artificial Sequence: Synthetic oligonucleotide
  Antisense strand to SEQ ID NO: 234798
uacaaacaagacaacugac

SEQ ID NO: 234800 - RNA, 19 nt, Artificial Sequence
  Description of Artificial Sequence: Synthetic oligonucleotide
  Sense strand starting at position 3158 SEQ ID NO: 3024
cuaguaugucaaugccauu

SEQ ID NO: 234801 - RNA, 19 nt, Artificial Sequence
  Description of Artificial Sequence: Synthetic oligonucleotide
  Antisense strand to SEQ ID NO: 234800
aauggcauugacauacuag

SEQ ID NO: 234802 - RNA, 19 nt, Artificial Sequence
  Description of Artificial Sequence: Synthetic oligonucleotide
  Sense strand starting at position 3229 SEQ ID NO: 3024
ucgugagucaaguaucauu

SEQ ID NO: 234803 - RNA, 19 nt, Artificial Sequence
  Description of Artificial Sequence: Synthetic oligonucleotide
  Antisense strand to SEQ ID NO: 234802
aaugauacuugacucacga

SEQ ID NO: 234804 - RNA, 19 nt, Artificial Sequence
  Description of Artificial Sequence: Synthetic oligonucleotide
  Sense strand starting at position 3232 SEQ ID NO: 3024
ugagucaaguaucauuuaa

SEQ ID NO: 234805 - RNA, 19 nt, Artificial Sequence
  Description of Artificial Sequence: Synthetic oligonucleotide
  Antisense strand to SEQ ID NO: 234804
uuaaaugauacuugacuca

SEQ ID NO: 234806 - RNA, 19 nt, Artificial Sequence
  Description of Artificial Sequence: Synthetic oligonucleotide
  Sense strand starting at position 3269 SEQ ID NO: 3024
guauuaaugucuccuccua

SEQ ID NO: 234807 - RNA, 19 nt, Artificial Sequence
  Description of Artificial Sequence: Synthetic oligonucleotide
  Antisense strand to SEQ ID NO: 234806
uaggaggagacauuaauac

SEQ ID NO: 234808 - RNA, 19 nt, Artificial Sequence
  Description of Artificial Sequence: Synthetic oligonucleotide
  Sense strand starting at position 3299 SEQ ID NO: 3024
cugcccuaccgucaauuau

SEQ ID NO: 234809 - RNA, 19 nt, Artificial Sequence
  Description of Artificial Sequence: Synthetic oligonucleotide
  Antisense strand to SEQ ID NO: 234808
auaauugacgguagggcag

SEQ ID NO: 234810 - RNA, 19 nt, Artificial Sequence
  Description of Artificial Sequence: Synthetic oligonucleotide
  Sense strand starting at position 3307 SEQ ID NO: 3024
ccgucaauuauggagcauu

SEQ ID NO: 234811 - RNA, 19 nt, Artificial Sequence
  Description of Artificial Sequence: Synthetic oligonucleotide
  Antisense strand to SEQ ID NO: 234810
aaugcuccauaauugacgg

SEQ ID NO: 234812 - RNA, 19 nt, Artificial Sequence
  Description of Artificial Sequence: Synthetic oligonucleotide
  Sense strand starting at position 3317 SEQ ID NO: 3024
uggagcauuuaccagagau

SEQ ID NO: 234813 - RNA, 19 nt, Artificial Sequence
  Description of Artificial Sequence: Synthetic oligonucleotide
  Antisense strand to SEQ ID NO: 234812
aucucugguaaaugcucca

SEQ ID NO: 234814 - RNA, 19 nt, Artificial Sequence
  Description of Artificial Sequence: Synthetic oligonucleotide
  Sense strand starting at position 3369 SEQ ID NO: 3024
cucauaacacucuggaaug

SEQ ID NO: 234815 - RNA, 19 nt, Artificial Sequence
  Description of Artificial Sequence: Synthetic oligonucleotide
  Antisense strand to SEQ ID NO: 234814
cauuccagaguguuaugag

SEQ ID NO: 234816 - RNA, 19 nt, Artificial Sequence
  Description of Artificial Sequence: Synthetic oligonucleotide
  Sense strand starting at position 3379 SEQ ID NO: 3024
ucuggaaugucucucuacu

SEQ ID NO: 234817 - RNA, 19 nt, Artificial Sequence
  Description of Artificial Sequence: Synthetic oligonucleotide
  Antisense strand to SEQ ID NO: 234816
aguagagagacauuccaga

SEQ ID NO: 234818 - RNA, 19 nt, Artificial Sequence
  Description of Artificial Sequence: Synthetic oligonucleotide
  Sense strand starting at position 3505 SEQ ID NO: 3024
gcuacuuacuaguccuaug

SEQ ID NO: 234819 - RNA, 19 nt, Artificial Sequence
  Description of Artificial Sequence: Synthetic oligonucleotide
  Antisense strand to SEQ ID NO: 234818
cauaggacuaguaaguagc

SEQ ID NO: 234820 - RNA, 19 nt, Artificial Sequence
  Description of Artificial Sequence: Synthetic oligonucleotide
  Sense strand starting at position 3608 SEQ ID NO: 3024
auauuuaacuuaggcagaa

SEQ ID NO: 234821 - RNA, 19 nt, Artificial Sequence
  Description of Artificial Sequence: Synthetic oligonucleotide
  Antisense strand to SEQ ID NO: 234820
uucugccuaaguuaaauau

SEQ ID NO: 234822 - RNA, 19 nt, Artificial Sequence
  Description of Artificial Sequence: Synthetic oligonucleotide
  Sense strand starting at position 3806 SEQ ID NO: 3024
uagcucaguuugguuuaga

SEQ ID NO: 234823 - RNA, 19 nt, Artificial Sequence
  Description of Artificial Sequence: Synthetic oligonucleotide
  Antisense strand to SEQ ID NO: 234822
ucuaaaccaaacugagcua

SEQ ID NO: 234824 - RNA, 19 nt, Artificial Sequence
  Description of Artificial Sequence: Synthetic oligonucleotide
  Sense strand starting at position 3807 SEQ ID NO: 3024
agcucaguuugguuuagag

SEQ ID NO: 234825 - RNA, 19 nt, Artificial Sequence
  Description of Artificial Sequence: Synthetic oligonucleotide
  Antisense strand to SEQ ID NO: 234824
cucuaaaccaaacugagcu

SEQ ID NO: 234826 - RNA, 19 nt, Artificial Sequence
  Description of Artificial Sequence: Synthetic oligonucleotide
  Sense strand starting at position 3809 SEQ ID NO: 3024
cucaguuugguuuagagau

SEQ ID NO: 234827 - RNA, 19 nt, Artificial Sequence
  Description of Artificial Sequence: Synthetic oligonucleotide
  Antisense strand to SEQ ID NO: 234826
aucucuaaaccaaacugag

SEQ ID NO: 234828 - RNA, 19 nt, Artificial Sequence
  Description of Artificial Sequence: Synthetic oligonucleotide
  Sense strand starting at position 3850 SEQ ID NO: 3024
ucugguguggcauacuuau

SEQ ID NO: 234829 - RNA, 19 nt, Artificial Sequence
  Description of Artificial Sequence: Synthetic oligonucleotide
  Antisense strand to SEQ ID NO: 234828
auaaguaugccacaccaga

SEQ ID NO: 234830 - RNA, 19 nt, Artificial Sequence
  Description of Artificial Sequence: Synthetic oligonucleotide
  Sense strand starting at position 3859 SEQ ID NO: 3024
gcauacuuauuagucuuga

SEQ ID NO: 234831 - RNA, 19 nt, Artificial Sequence
  Description of Artificial Sequence: Synthetic oligonucleotide
  Antisense strand to SEQ ID NO: 234830
ucaagacuaauaaguaugc

SEQ ID NO: 234832 - RNA, 19 nt, Artificial Sequence
  Description of Artificial Sequence: Synthetic oligonucleotide
  Sense strand starting at position 3884 SEQ ID NO: 3024
gggacucagcugcaauguu

SEQ ID NO: 234833 - RNA, 19 nt, Artificial Sequence
  Description of Artificial Sequence: Synthetic oligonucleotide
  Antisense strand to SEQ ID NO: 234832
aacauugcagcugaguccc

SEQ ID NO: 234834 - RNA, 19 nt, Artificial Sequence
  Description of Artificial Sequence: Synthetic oligonucleotide
  Sense strand starting at position 3944 SEQ ID NO: 3024
agcaguagucguaguugca

SEQ ID NO: 234835 - RNA, 19 nt, Artificial Sequence
  Description of Artificial Sequence: Synthetic oligonucleotide
  Antisense strand to SEQ ID NO: 234834
ugcaacuacgacuacugcu

SEQ ID NO: 234836 - RNA, 19 nt, Artificial Sequence
  Description of Artificial Sequence: Synthetic oligonucleotide
  Sense strand starting at position 111 SEQ ID NO: 3023
cuuuguguuacuggcagaa

SEQ ID NO: 234837 - RNA, 19 nt, Artificial Sequence
  Description of Artificial Sequence: Synthetic oligonucleotide
  Antisense strand to SEQ ID NO: 234836
uucugccaguaacacaaag

SEQ ID NO: 234838 - RNA, 19 nt, Artificial Sequence
  Description of Artificial Sequence: Synthetic oligonucleotide
  Sense strand starting at position 169 SEQ ID NO: 3023
uuuguaugugaccaaccua

SEQ ID NO: 234839 - RNA, 19 nt, Artificial Sequence
  Description of Artificial Sequence: Synthetic oligonucleotide
  Antisense strand to SEQ ID NO: 234838
uagguuggucacauacaaa

SEQ ID NO: 234840 - RNA, 19 nt, Artificial Sequence
  Description of Artificial Sequence: Synthetic oligonucleotide
  Sense strand starting at position 297 SEQ ID NO: 3023
agcucagaaggcugauuaa

SEQ ID NO: 234841 - RNA, 19 nt, Artificial Sequence
  Description of Artificial Sequence: Synthetic oligonucleotide
  Antisense strand to SEQ ID NO: 234840
uuaaucagccuucugagcu

SEQ ID NO: 234842 - RNA, 19 nt, Artificial Sequence
  Description of Artificial Sequence: Synthetic oligonucleotide
  Sense strand starting at position 300 SEQ ID NO: 3023
ucagaaggcugauuaauuc

SEQ ID NO: 234843 - RNA, 19 nt, Artificial Sequence
  Description of Artificial Sequence: Synthetic oligonucleotide
  Antisense strand to SEQ ID NO: 234842
gaauuaaucagccuucuga

SEQ ID NO: 234844 - RNA, 19 nt, Artificial Sequence
  Description of Artificial Sequence: Synthetic oligonucleotide
  Sense strand starting at position 605 SEQ ID NO: 3023
ugucuaaaguaaucuuuga

SEQ ID NO: 234845 - RNA, 19 nt, Artificial Sequence
  Description of Artificial Sequence: Synthetic oligonucleotide
  Antisense strand to SEQ ID NO: 234844
ucaaagauuacuuuagaca

SEQ ID NO: 234846 - RNA, 19 nt, Artificial Sequence
  Description of Artificial Sequence: Synthetic oligonucleotide
  Sense strand starting at position 649 SEQ ID NO: 3023
ugucuaaaguacucuuuga

SEQ ID NO: 234847 - RNA, 19 nt, Artificial Sequence
  Description of Artificial Sequence: Synthetic oligonucleotide
  Antisense strand to SEQ ID NO: 234846
ucaaagaguacuuuagaca

SEQ ID NO: 234848 - RNA, 19 nt, Artificial Sequence
  Description of Artificial Sequence: Synthetic oligonucleotide
  Sense strand starting at position 683 SEQ ID NO: 3023
uggaaaugcucuucuguuu

SEQ ID NO: 234849 - RNA, 19 nt, Artificial Sequence
  Description of Artificial Sequence: Synthetic oligonucleotide
  Antisense strand to SEQ ID NO: 234848
aaacagaagagcauuucca

SEQ ID NO: 234850 - RNA, 19 nt, Artificial Sequence
  Description of Artificial Sequence: Synthetic oligonucleotide
  Sense strand starting at position 970 SEQ ID NO: 3023
ugaguacucuuacauauuu

SEQ ID NO: 234851 - RNA, 19 nt, Artificial Sequence
  Description of Artificial Sequence: Synthetic oligonucleotide
  Antisense strand to SEQ ID NO: 234850
aaauauguaagaguacuca

SEQ ID NO: 234852 - RNA, 19 nt, Artificial Sequence
  Description of Artificial Sequence: Synthetic oligonucleotide
  Sense strand starting at position 1101 SEQ ID NO: 3023
auggcuuuacuugauaaau

SEQ ID NO: 234853 - RNA, 19 nt, Artificial Sequence
  Description of Artificial Sequence: Synthetic oligonucleotide
  Antisense strand to SEQ ID NO: 234852
auuuaucaaguaaagccau

SEQ ID NO: 234854 - RNA, 19 nt, Artificial Sequence
  Description of Artificial Sequence: Synthetic oligonucleotide
  Sense strand starting at position 1161 SEQ ID NO: 3023
cuuugaaacuggucccuca

SEQ ID NO: 234855 - RNA, 19 nt, Artificial Sequence
  Description of Artificial Sequence: Synthetic oligonucleotide
  Antisense strand to SEQ ID NO: 234854
ugagggaccaguuucaaag

SEQ ID NO: 234856 - RNA, 19 nt, Artificial Sequence
  Description of Artificial Sequence: Synthetic oligonucleotide
  Sense strand starting at position 1164 SEQ ID NO: 3023
ugaaacuggucccucaaga

SEQ ID NO: 234857 - RNA, 19 nt, Artificial Sequence
  Description of Artificial Sequence: Synthetic oligonucleotide
  Antisense strand to SEQ ID NO: 234856
ucuugagggaccaguuuca

SEQ ID NO: 234858 - RNA, 19 nt, Artificial Sequence
  Description of Artificial Sequence: Synthetic oligonucleotide
  Sense strand starting at position 1345 SEQ ID NO: 3023
ugcacaguucguuugcuaa

SEQ ID NO: 234859 - RNA, 19 nt, Artificial Sequence
  Description of Artificial Sequence: Synthetic oligonucleotide
  Antisense strand to SEQ ID NO: 234858
uuagcaaacgaacugugca

SEQ ID NO: 234860 - RNA, 19 nt, Artificial Sequence
  Description of Artificial Sequence: Synthetic oligonucleotide
  Sense strand starting at position 1522 SEQ ID NO: 3023
uagguugaacgguaucuua

SEQ ID NO: 234861 - RNA, 19 nt, Artificial Sequence
  Description of Artificial Sequence: Synthetic oligonucleotide
  Antisense strand to SEQ ID NO: 234860
uaagauaccguucaaccua

SEQ ID NO: 234862 - RNA, 19 nt, Artificial Sequence
  Description of Artificial Sequence: Synthetic oligonucleotide
  Sense strand starting at position 1534 SEQ ID NO: 3023
uaucuuagagguuagcuaa

SEQ ID NO: 234863 - RNA, 19 nt, Artificial Sequence
  Description of Artificial Sequence: Synthetic oligonucleotide
  Antisense strand to SEQ ID NO: 234862
uuagcuaaccucuaagaua

SEQ ID NO: 234864 - RNA, 19 nt, Artificial Sequence
  Description of Artificial Sequence: Synthetic oligonucleotide
  Sense strand starting at position 2164 SEQ ID NO: 3023
aagcuaguuggcuaacauu

SEQ ID NO: 234865 - RNA, 19 nt, Artificial Sequence
  Description of Artificial Sequence: Synthetic oligonucleotide
  Antisense strand to SEQ ID NO: 234864
aauguuagccaacuagcuu

SEQ ID NO: 234866 - RNA, 19 nt, Artificial Sequence
  Description of Artificial Sequence: Synthetic oligonucleotide
  Sense strand starting at position 2213 SEQ ID NO: 3023
cugccaggcccuugacaaa

SEQ ID NO: 234867 - RNA, 19 nt, Artificial Sequence
  Description of Artificial Sequence: Synthetic oligonucleotide
  Antisense strand to SEQ ID NO: 234866
uuugucaagggccuggcag

SEQ ID NO: 234868 - RNA, 19 nt, Artificial Sequence
  Description of Artificial Sequence: Synthetic oligonucleotide
  Sense strand starting at position 2234 SEQ ID NO: 3023
acuugauuccuuuaaguug

SEQ ID NO: 234869 - RNA, 19 nt, Artificial Sequence
  Description of Artificial Sequence: Synthetic oligonucleotide
  Antisense strand to SEQ ID NO: 234868
caacuuaaaggaaucaagu

SEQ ID NO: 234870 - RNA, 19 nt, Artificial Sequence
  Description of Artificial Sequence: Synthetic oligonucleotide
  Sense strand starting at position 2237 SEQ ID NO: 3023
ugauuccuuuaaguuguau

SEQ ID NO: 234871 - RNA, 19 nt, Artificial Sequence
  Description of Artificial Sequence: Synthetic oligonucleotide
  Antisense strand to SEQ ID NO: 234870
auacaacuuaaaggaauca

SEQ ID NO: 234872 - RNA, 19 nt, Artificial Sequence
  Description of Artificial Sequence: Synthetic oligonucleotide
  Sense strand starting at position 2291 SEQ ID NO: 3023
auagcuccagguugucaaa

SEQ ID NO: 234873 - RNA, 19 nt, Artificial Sequence
  Description of Artificial Sequence: Synthetic oligonucleotide
  Antisense strand to SEQ ID NO: 234872
uuugacaaccuggagcuau

SEQ ID NO: 234874 - RNA, 19 nt, Artificial Sequence
  Description of Artificial Sequence: Synthetic oligonucleotide
  Sense strand starting at position 2293 SEQ ID NO: 3023
agcuccagguugucaaaua

SEQ ID NO: 234875 - RNA, 19 nt, Artificial Sequence
  Description of Artificial Sequence: Synthetic oligonucleotide
  Antisense strand to SEQ ID NO: 234874
uauuugacaaccuggagcu

SEQ ID NO: 234876 - RNA, 19 nt, Artificial Sequence
  Description of Artificial Sequence: Synthetic oligonucleotide
  Sense strand starting at position 2312 SEQ ID NO: 3023
gugcaauucugacuuuacu

SEQ ID NO: 234877 - RNA, 19 nt, Artificial Sequence
  Description of Artificial Sequence: Synthetic oligonucleotide
  Antisense strand to SEQ ID NO: 234876
aguaaagucagaauugcac

SEQ ID NO: 234878 - RNA, 19 nt, Artificial Sequence
  Description of Artificial Sequence: Synthetic oligonucleotide
  Sense strand starting at position 2338 SEQ ID NO: 3023
aguacuucugacuagccaa

SEQ ID NO: 234879 - RNA, 19 nt, Artificial Sequence
  Description of Artificial Sequence: Synthetic oligonucleotide
  Antisense strand to SEQ ID NO: 234878
uuggcuagucagaaguacu

SEQ ID NO: 234880 - RNA, 19 nt, Artificial Sequence
  Description of Artificial Sequence: Synthetic oligonucleotide
  Sense strand starting at position 2496 SEQ ID NO: 3023
uguggauagaaaugccaaa

SEQ ID NO: 234881 - RNA, 19 nt, Artificial Sequence
  Description of Artificial Sequence: Synthetic oligonucleotide
  Antisense strand to SEQ ID NO: 234880
uuuggcauuucuauccaca

SEQ ID NO: 234882 - RNA, 19 nt, Artificial Sequence
  Description of Artificial Sequence: Synthetic oligonucleotide
  Sense strand starting at position 2522 SEQ ID NO: 3023
cucauuuguuaugaggauu

SEQ ID NO: 234883 - RNA, 19 nt, Artificial Sequence
  Description of Artificial Sequence: Synthetic oligonucleotide
  Antisense strand to SEQ ID NO: 234882
aauccucauaacaaaugag

SEQ ID NO: 234884 - RNA, 19 nt, Artificial Sequence
  Description of Artificial Sequence: Synthetic oligonucleotide
  Sense strand starting at position 2528 SEQ ID NO: 3023
uguuaugaggauuauguag

SEQ ID NO: 234885 - RNA, 19 nt, Artificial Sequence
  Description of Artificial Sequence: Synthetic oligonucleotide
  Antisense strand to SEQ ID NO: 234884
cuacauaauccucauaaca

SEQ ID NO: 234886 - RNA, 19 nt, Artificial Sequence
  Description of Artificial Sequence: Synthetic oligonucleotide
  Sense strand starting at position 2948 SEQ ID NO: 3023
guucucauauucuuaagua

SEQ ID NO: 234887 - RNA, 19 nt, Artificial Sequence
  Description of Artificial Sequence: Synthetic oligonucleotide
  Antisense strand to SEQ ID NO: 234886
uacuuaagaauaugagaac

SEQ ID NO: 234888 - RNA, 19 nt, Artificial Sequence
  Description of Artificial Sequence: Synthetic oligonucleotide
  Sense strand starting at position 2967 SEQ ID NO: 3023
gagcaauugcaagacacga

SEQ ID NO: 234889 - RNA, 19 nt, Artificial Sequence
  Description of Artificial Sequence: Synthetic oligonucleotide
  Antisense strand to SEQ ID NO: 234888
ucgugucuugcaauugcuc

SEQ ID NO: 234890 - RNA, 19 nt, Artificial Sequence
  Description of Artificial Sequence: Synthetic oligonucleotide
  Sense strand starting at position 2972 SEQ ID NO: 3023
auugcaagacacgaucaau

SEQ ID NO: 234891 - RNA, 19 nt, Artificial Sequence
  Description of Artificial Sequence: Synthetic oligonucleotide
  Antisense strand to SEQ ID NO: 234890
auugaucgugucuugcaau

SEQ ID NO: 234892 - RNA, 19 nt, Artificial Sequence
  Description of Artificial Sequence: Synthetic oligonucleotide
  Sense strand starting at position 3012 SEQ ID NO: 3023
ccagcugaucugcagagaa

SEQ ID NO: 234893 - RNA, 19 nt, Artificial Sequence
  Description of Artificial Sequence: Synthetic oligonucleotide
  Antisense strand to SEQ ID NO: 234892
uucucugcagaucagcugg

SEQ ID NO: 234894 - RNA, 19 nt, Artificial Sequence
  Description of Artificial Sequence: Synthetic oligonucleotide
  Sense strand starting at position 3038 SEQ ID NO: 3023
acaauaaauguguguuuag

SEQ ID NO: 234895 - RNA, 19 nt, Artificial Sequence
  Description of Artificial Sequence: Synthetic oligonucleotide
  Antisense strand to SEQ ID NO: 234894
cuaaacacacauuuauugu

SEQ ID NO: 234896 - RNA, 19 nt, Artificial Sequence
  Description of Artificial Sequence: Synthetic oligonucleotide
  Sense strand starting at position 3039 SEQ ID NO: 3023
caauaaauguguguuuaga

SEQ ID NO: 234897 - RNA, 19 nt, Artificial Sequence
  Description of Artificial Sequence: Synthetic oligonucleotide
  Antisense strand to SEQ ID NO: 234896
ucuaaacacacauuuauug

SEQ ID NO: 234898 - RNA, 19 nt, Artificial Sequence
  Description of Artificial Sequence: Synthetic oligonucleotide
  Sense strand starting at position 3047 SEQ ID NO: 3023
guguguuuagaauagauag

SEQ ID NO: 234899 - RNA, 19 nt, Artificial Sequence
  Description of Artificial Sequence: Synthetic oligonucleotide
  Antisense strand to SEQ ID NO: 234898
cuaucuauucuaaacacac

SEQ ID NO: 234900 - RNA, 19 nt, Artificial Sequence
  Description of Artificial Sequence: Synthetic oligonucleotide
  Sense strand starting at position 3049 SEQ ID NO: 3023
guguuuagaauagauagca

SEQ ID NO: 234901 - RNA, 19 nt, Artificial Sequence
  Description of Artificial Sequence: Synthetic oligonucleotide
  Antisense strand to SEQ ID NO: 234900
ugcuaucuauucuaaacac

SEQ ID NO: 234902 - RNA, 19 nt, Artificial Sequence
  Description of Artificial Sequence: Synthetic oligonucleotide
  Sense strand starting at position 3185 SEQ ID NO: 3023
guaaguguagaaugaauac

SEQ ID NO: 234903 - RNA, 19 nt, Artificial Sequence
  Description of Artificial Sequence: Synthetic oligonucleotide
  Antisense strand to SEQ ID NO: 234902
guauucauucuacacuuac

SEQ ID NO: 234904 - RNA, 19 nt, Artificial Sequence
  Description of Artificial Sequence: Synthetic oligonucleotide
  Sense strand starting at position 3261 SEQ ID NO: 3023
uuguuuaacuaccugguua

SEQ ID NO: 234905 - RNA, 19 nt, Artificial Sequence
  Description of Artificial Sequence: Synthetic oligonucleotide
  Antisense strand to SEQ ID NO: 234904
uaaccagguaguuaaacaa

SEQ ID NO: 234906 - RNA, 19 nt, Artificial Sequence
  Description of Artificial Sequence: Synthetic oligonucleotide
  Sense strand starting at position 3263 SEQ ID NO: 3023
guuuaacuaccugguuaac

SEQ ID NO: 234907 - RNA, 19 nt, Artificial Sequence
  Description of Artificial Sequence: Synthetic oligonucleotide
  Antisense strand to SEQ ID NO: 234906
guuaaccagguaguuaaac

SEQ ID NO: 234908 - RNA, 19 nt, Artificial Sequence
  Description of Artificial Sequence: Synthetic oligonucleotide
  Sense strand starting at position 3362 SEQ ID NO: 3023
aauguaagcuuauugaugu

SEQ ID NO: 234909 - RNA, 19 nt, Artificial Sequence
  Description of Artificial Sequence: Synthetic oligonucleotide
  Antisense strand to SEQ ID NO: 234908
acaucaauaagcuuacauu

SEQ ID NO: 234910 - RNA, 19 nt, Artificial Sequence
  Description of Artificial Sequence: Synthetic oligonucleotide
  Sense strand starting at position 3457 SEQ ID NO: 3023
ucauaaacguuugucucaa

SEQ ID NO: 234911 - RNA, 19 nt, Artificial Sequence
  Description of Artificial Sequence: Synthetic oligonucleotide
  Antisense strand to SEQ ID NO: 234910
uugagacaaacguuuauga

SEQ ID NO: 234912 - RNA, 19 nt, Artificial Sequence
  Description of Artificial Sequence: Synthetic oligonucleotide
  Sense strand starting at position 3548 SEQ ID NO: 3023
gaaauucuguugccuguua

SEQ ID NO: 234913 - RNA, 19 nt, Artificial Sequence
  Description of Artificial Sequence: Synthetic oligonucleotide
  Antisense strand to SEQ ID NO: 234912
uaacaggcaacagaauuuc

SEQ ID NO: 234914 - RNA, 19 nt, Artificial Sequence
  Description of Artificial Sequence: Synthetic oligonucleotide
  Sense strand starting at position 3959 SEQ ID NO: 3023
agucuuaagauaggguaga

SEQ ID NO: 234915 - RNA, 19 nt, Artificial Sequence
  Description of Artificial Sequence: Synthetic oligonucleotide
  Antisense strand to SEQ ID NO: 234914
ucuacccuaucuuaagacu

SEQ ID NO: 234916 - RNA, 19 nt, Artificial Sequence
  Description of Artificial Sequence: Synthetic oligonucleotide
  Sense strand starting at position 29 SEQ ID NO: 3026
gucauagauguacacauau

SEQ ID NO: 234917 - RNA, 19 nt, Artificial Sequence
  Description of Artificial Sequence: Synthetic oligonucleotide
  Antisense strand to SEQ ID NO: 234916
auauguguacaucuaugac

SEQ ID NO: 234918 - RNA, 19 nt, Artificial Sequence
  Description of Artificial Sequence: Synthetic oligonucleotide
  Sense strand starting at position 61 SEQ ID NO: 3026
agacacugccaagaaguuu

SEQ ID NO: 234919 - RNA, 19 nt, Artificial Sequence
  Description of Artificial Sequence: Synthetic oligonucleotide
  Antisense strand to SEQ ID NO: 234918
aaacuucuuggcagugucu

SEQ ID NO: 234920 - RNA, 19 nt, Artificial Sequence
  Description of Artificial Sequence: Synthetic oligonucleotide
  Sense strand starting at position 67 SEQ ID NO: 3026
ugccaagaaguuuaccaaa

SEQ ID NO: 234921 - RNA, 19 nt, Artificial Sequence
  Description of Artificial Sequence: Synthetic oligonucleotide
  Antisense strand to SEQ ID NO: 234920
uuugguaaacuucuuggca

SEQ ID NO: 234922 - RNA, 19 nt, Artificial Sequence
  Description of Artificial Sequence: Synthetic oligonucleotide
  Sense strand starting at position 172 SEQ ID NO: 3026
aguugaucugagcaaacga

SEQ ID NO: 234923 - RNA, 19 nt, Artificial Sequence
  Description of Artificial Sequence: Synthetic oligonucleotide
  Antisense strand to SEQ ID NO: 234922
ucguuugcucagaucaacu

SEQ ID NO: 234924 - RNA, 19 nt, Artificial Sequence
  Description of Artificial Sequence: Synthetic oligonucleotide
  Sense strand starting at position 233 SEQ ID NO: 3026
agggucaucuagguuuaca

SEQ ID NO: 234925 - RNA, 19 nt, Artificial Sequence
  Description of Artificial Sequence: Synthetic oligonucleotide
  Antisense strand to SEQ ID NO: 234924
uguaaaccuagaugacccu

SEQ ID NO: 234926 - RNA, 19 nt, Artificial Sequence
  Description of Artificial Sequence: Synthetic oligonucleotide
  Sense strand starting at position 611 SEQ ID NO: 3026
ugaggaguuguccaucagu

SEQ ID NO: 234927 - RNA, 19 nt, Artificial Sequence
  Description of Artificial Sequence: Synthetic oligonucleotide
  Antisense strand to SEQ ID NO: 234926
acugauggacaacuccuca

SEQ ID NO: 234928 - RNA, 19 nt, Artificial Sequence
  Description of Artificial Sequence: Synthetic oligonucleotide
  Sense strand starting at position 735 SEQ ID NO: 3026
gacguuggauaucuucuaa

SEQ ID NO: 234929 - RNA, 19 nt, Artificial Sequence
  Description of Artificial Sequence: Synthetic oligonucleotide
  Antisense strand to SEQ ID NO: 234928
uuagaagauauccaacguc

SEQ ID NO: 234930 - RNA, 19 nt, Artificial Sequence
  Description of Artificial Sequence: Synthetic oligonucleotide
  Sense strand starting at position 753 SEQ ID NO: 3026
aagucacuuccuggaguca

SEQ ID NO: 234931 - RNA, 19 nt, Artificial Sequence
  Description of Artificial Sequence: Synthetic oligonucleotide
  Antisense strand to SEQ ID NO: 234930
ugacuccaggaagugacuu

SEQ ID NO: 234932 - RNA, 19 nt, Artificial Sequence
  Description of Artificial Sequence: Synthetic oligonucleotide
  Sense strand starting at position 754 SEQ ID NO: 3026
agucacuuccuggagucau

SEQ ID NO: 234933 - RNA, 19 nt, Artificial Sequence
  Description of Artificial Sequence: Synthetic oligonucleotide
  Antisense strand to SEQ ID NO: 234932
augacuccaggaagugacu

SEQ ID NO: 234934 - RNA, 19 nt, Artificial Sequence
  Description of Artificial Sequence: Synthetic oligonucleotide
  Sense strand starting at position 833 SEQ ID NO: 3026
uuccucuuggaaggaaauu

SEQ ID NO: 234935 - RNA, 19 nt, Artificial Sequence
  Description of Artificial Sequence: Synthetic oligonucleotide
  Antisense strand to SEQ ID NO: 234934
aauuuccuuccaagaggaa

SEQ ID NO: 234936 - RNA, 19 nt, Artificial Sequence
  Description of Artificial Sequence: Synthetic oligonucleotide
  Sense strand starting at position 845 SEQ ID NO: 3026
ggaaauugcuuccuauagu

SEQ ID NO: 234937 - RNA, 19 nt, Artificial Sequence
  Description of Artificial Sequence: Synthetic oligonucleotide
  Antisense strand to SEQ ID NO: 234936
acuauaggaagcaauuucc

SEQ ID NO: 234938 - RNA, 19 nt, Artificial Sequence
  Description of Artificial Sequence: Synthetic oligonucleotide
  Sense strand starting at position 937 SEQ ID NO: 3026
cuuggagcagccuaggaau

SEQ ID NO: 234939 - RNA, 19 nt, Artificial Sequence
  Description of Artificial Sequence: Synthetic oligonucleotide
  Antisense strand to SEQ ID NO: 234938
auuccuaggcugcuccaag

SEQ ID NO: 234940 - RNA, 19 nt, Artificial Sequence
  Description of Artificial Sequence: Synthetic oligonucleotide
  Sense strand starting at position 1116 SEQ ID NO: 3026
ccgagucugccguuacagu

SEQ ID NO: 234941 - RNA, 19 nt, Artificial Sequence
  Description of Artificial Sequence: Synthetic oligonucleotide
  Antisense strand to SEQ ID NO: 234940
acuguaacggcagacucgg

SEQ ID NO: 234942 - RNA, 19 nt, Artificial Sequence
  Description of Artificial Sequence: Synthetic oligonucleotide
  Sense strand starting at position 1189 SEQ ID NO: 3026
ccaagcauggguuaaacuu

SEQ ID NO: 234943 - RNA, 19 nt, Artificial Sequence
  Description of Artificial Sequence: Synthetic oligonucleotide
  Antisense strand to SEQ ID NO: 234942
aaguuuaacccaugcuugg

SEQ ID NO: 234944 - RNA, 19 nt, Artificial Sequence
  Description of Artificial Sequence: Synthetic oligonucleotide
  Sense strand starting at position 1249 SEQ ID NO: 3026
gguggccuuccagagacaa

SEQ ID NO: 234945 - RNA, 19 nt, Artificial Sequence
  Description of Artificial Sequence: Synthetic oligonucleotide
  Antisense strand to SEQ ID NO: 234944
uugucucuggaaggccacc

SEQ ID NO: 234946 - RNA, 19 nt, Artificial Sequence
  Description of Artificial Sequence: Synthetic oligonucleotide
  Sense strand starting at position 1647 SEQ ID NO: 3026
cgcaguaaggaucaaauga

SEQ ID NO: 234947 - RNA, 19 nt, Artificial Sequence
  Description of Artificial Sequence: Synthetic oligonucleotide
  Antisense strand to SEQ ID NO: 234946
ucauuugauccuuacugcg

SEQ ID NO: 234948 - RNA, 19 nt, Artificial Sequence
  Description of Artificial Sequence: Synthetic oligonucleotide
  Sense strand starting at position 1675 SEQ ID NO: 3026
ggauauaaaugcuuuguaa

SEQ ID NO: 234949 - RNA, 19 nt, Artificial Sequence
  Description of Artificial Sequence: Synthetic oligonucleotide
  Antisense strand to SEQ ID NO: 234948
uuacaaagcauuuauaucc

SEQ ID NO: 234950 - RNA, 19 nt, Artificial Sequence
  Description of Artificial Sequence: Synthetic oligonucleotide
  Sense strand starting at position 2030 SEQ ID NO: 3026
gcgagagaugggcacauaa

SEQ ID NO: 234951 - RNA, 19 nt, Artificial Sequence
  Description of Artificial Sequence: Synthetic oligonucleotide
  Antisense strand to SEQ ID NO: 234950
uuaugugcccaucucucgc

SEQ ID NO: 234952 - RNA, 19 nt, Artificial Sequence
  Description of Artificial Sequence: Synthetic oligonucleotide
  Sense strand starting at position 2095 SEQ ID NO: 3026
ggacaucaaugauuacugu

SEQ ID NO: 234953 - RNA, 19 nt, Artificial Sequence
  Description of Artificial Sequence: Synthetic oligonucleotide
  Antisense strand to SEQ ID NO: 234952
acaguaaucauugaugucc

SEQ ID NO: 234954 - RNA, 19 nt, Artificial Sequence
  Description of Artificial Sequence: Synthetic oligonucleotide
  Sense strand starting at position 2105 SEQ ID NO: 3026
gauuacuguucucugagga

SEQ ID NO: 234955 - RNA, 19 nt, Artificial Sequence
  Description of Artificial Sequence: Synthetic oligonucleotide
  Antisense strand to SEQ ID NO: 234954
uccucagagaacaguaauc

SEQ ID NO: 234956 - RNA, 19 nt, Artificial Sequence
  Description of Artificial Sequence: Synthetic oligonucleotide
  Sense strand starting at position 2106 SEQ ID NO: 3026
auuacuguucucugaggaa

SEQ ID NO: 234957 - RNA, 19 nt, Artificial Sequence
  Description of Artificial Sequence: Synthetic oligonucleotide
  Antisense strand to SEQ ID NO: 234956
uuccucagagaacaguaau

SEQ ID NO: 234958 - RNA, 19 nt, Artificial Sequence
  Description of Artificial Sequence: Synthetic oligonucleotide
  Sense strand starting at position 2211 SEQ ID NO: 3026
caguuaaccucuuuggaga

SEQ ID NO: 234959 - RNA, 19 nt, Artificial Sequence
  Description of Artificial Sequence: Synthetic oligonucleotide
  Antisense strand to SEQ ID NO: 234958
ucuccaaagagguuaacug

SEQ ID NO: 234960 - RNA, 19 nt, Artificial Sequence
  Description of Artificial Sequence: Synthetic oligonucleotide
  Sense strand starting at position 2226 SEQ ID NO: 3026
gagagagcucgucaagaga

SEQ ID NO: 234961 - RNA, 19 nt, Artificial Sequence
  Description of Artificial Sequence: Synthetic oligonucleotide
  Antisense strand to SEQ ID NO: 234960
ucucuugacgagcucucuc

SEQ ID NO: 234962 - RNA, 19 nt, Artificial Sequence
  Description of Artificial Sequence: Synthetic oligonucleotide
  Sense strand starting at position 2253 SEQ ID NO: 3026
cuacuaguucuauagaugu

SEQ ID NO: 234963 - RNA, 19 nt, Artificial Sequence
  Description of Artificial Sequence: Synthetic oligonucleotide
  Antisense strand to SEQ ID NO: 234962
acaucuauagaacuaguag

SEQ ID NO: 234964 - RNA, 19 nt, Artificial Sequence
  Description of Artificial Sequence: Synthetic oligonucleotide
  Sense strand starting at position 2311 SEQ ID NO: 3026
uugcaagagcaggaucauu

SEQ ID NO: 234965 - RNA, 19 nt, Artificial Sequence
  Description of Artificial Sequence: Synthetic oligonucleotide
  Antisense strand to SEQ ID NO: 234964
aaugauccugcucuugcaa

SEQ ID NO: 234966 - RNA, 19 nt, Artificial Sequence
  Description of Artificial Sequence: Synthetic oligonucleotide
  Sense strand starting at position 2423 SEQ ID NO: 3026
cuugaaagaucucuguagu

SEQ ID NO: 234967 - RNA, 19 nt, Artificial Sequence
  Description of Artificial Sequence: Synthetic oligonucleotide
  Antisense strand to SEQ ID NO: 234966
acuacagagaucuuucaag

SEQ ID NO: 234968 - RNA, 19 nt, Artificial Sequence
  Description of Artificial Sequence: Synthetic oligonucleotide
  Sense strand starting at position 2424 SEQ ID NO: 3026
uugaaagaucucuguagug

SEQ ID NO: 234969 - RNA, 19 nt, Artificial Sequence
  Description of Artificial Sequence: Synthetic oligonucleotide
  Antisense strand to SEQ ID NO: 234968
cacuacagagaucuuucaa

SEQ ID NO: 234970 - RNA, 19 nt, Artificial Sequence
  Description of Artificial Sequence: Synthetic oligonucleotide
  Sense strand starting at position 2426 SEQ ID NO: 3026
gaaagaucucuguagugcu

SEQ ID NO: 234971 - RNA, 19 nt, Artificial Sequence
  Description of Artificial Sequence: Synthetic oligonucleotide
  Antisense strand to SEQ ID NO: 234970
agcacuacagagaucuuuc

SEQ ID NO: 234972 - RNA, 19 nt, Artificial Sequence
  Description of Artificial Sequence: Synthetic oligonucleotide
  Sense strand starting at position 2439 SEQ ID NO: 3026
agugcuuacaguuaagaag

SEQ ID NO: 234973 - RNA, 19 nt, Artificial Sequence
  Description of Artificial Sequence: Synthetic oligonucleotide
  Antisense strand to SEQ ID NO: 234972
cuucuuaacuguaagcacu

SEQ ID NO: 234974 - RNA, 19 nt, Artificial Sequence
  Description of Artificial Sequence: Synthetic oligonucleotide
  Sense strand starting at position 2497 SEQ ID NO: 3026
cucaucuugucuccaggaa

SEQ ID NO: 234975 - RNA, 19 nt, Artificial Sequence
  Description of Artificial Sequence: Synthetic oligonucleotide
  Antisense strand to SEQ ID NO: 234974
uuccuggagacaagaugag

SEQ ID NO: 234976 - RNA, 19 nt, Artificial Sequence
  Description of Artificial Sequence: Synthetic oligonucleotide
  Sense strand starting at position 2498 SEQ ID NO: 3026
ucaucuugucuccaggaaa

SEQ ID NO: 234977 - RNA, 19 nt, Artificial Sequence
  Description of Artificial Sequence: Synthetic oligonucleotide
  Antisense strand to SEQ ID NO: 234976
uuuccuggagacaagauga

SEQ ID NO: 234978 - RNA, 19 nt, Artificial Sequence
  Description of Artificial Sequence: Synthetic oligonucleotide
  Sense strand starting at position 2529 SEQ ID NO: 3026
aaggcuuuguacuugaaac

SEQ ID NO: 234979 - RNA, 19 nt, Artificial Sequence
  Description of Artificial Sequence: Synthetic oligonucleotide
  Antisense strand to SEQ ID NO: 234978
guuucaaguacaaagccuu

SEQ ID NO: 234980 - RNA, 19 nt, Artificial Sequence
  Description of Artificial Sequence: Synthetic oligonucleotide
  Sense strand starting at position 2531 SEQ ID NO: 3026
ggcuuuguacuugaaacca

SEQ ID NO: 234981 - RNA, 19 nt, Artificial Sequence
  Description of Artificial Sequence: Synthetic oligonucleotide
  Antisense strand to SEQ ID NO: 234980
ugguuucaaguacaaagcc

SEQ ID NO: 234982 - RNA, 19 nt, Artificial Sequence
  Description of Artificial Sequence: Synthetic oligonucleotide
  Sense strand starting at position 2568 SEQ ID NO: 3026
gggaucagauggcucugua

SEQ ID NO: 234983 - RNA, 19 nt, Artificial Sequence
  Description of Artificial Sequence: Synthetic oligonucleotide
  Antisense strand to SEQ ID NO: 234982
uacagagccaucugauccc

SEQ ID NO: 234984 - RNA, 19 nt, Artificial Sequence
  Description of Artificial Sequence: Synthetic oligonucleotide
  Sense strand starting at position 2599 SEQ ID NO: 3026
agggcuccugcugauagaa

SEQ ID NO: 234985 - RNA, 19 nt, Artificial Sequence
  Description of Artificial Sequence: Synthetic oligonucleotide
  Antisense strand to SEQ ID NO: 234984
uucuaucagcaggagcccu

SEQ ID NO: 234986 - RNA, 19 nt, Artificial Sequence
  Description of Artificial Sequence: Synthetic oligonucleotide
  Sense strand starting at position 3614 SEQ ID NO: 3026
cagcaugagucucugagga

SEQ ID NO: 234987 - RNA, 19 nt, Artificial Sequence
  Description of Artificial Sequence: Synthetic oligonucleotide
  Antisense strand to SEQ ID NO: 234986
uccucagagacucaugcug

SEQ ID NO: 234988 - RNA, 19 nt, Artificial Sequence
  Description of Artificial Sequence: Synthetic oligonucleotide
  Sense strand starting at position 3664 SEQ ID NO: 3026
aggauaaauacaggcaagu

SEQ ID NO: 234989 - RNA, 19 nt, Artificial Sequence
  Description of Artificial Sequence: Synthetic oligonucleotide
  Antisense strand to SEQ ID NO: 234988
acuugccuguauuuauccu

SEQ ID NO: 234990 - RNA, 19 nt, Artificial Sequence
  Description of Artificial Sequence: Synthetic oligonucleotide
  Sense strand starting at position 3880 SEQ ID NO: 3026
gggacuuugggaugcuaua

SEQ ID NO: 234991 - RNA, 19 nt, Artificial Sequence
  Description of Artificial Sequence: Synthetic oligonucleotide
  Antisense strand to SEQ ID NO: 234990
uauagcaucccaaaguccc

SEQ ID NO: 234992 - RNA, 19 nt, Artificial Sequence
  Description of Artificial Sequence: Synthetic oligonucleotide
  Sense strand starting at position 3893 SEQ ID NO: 3026
gcuauagaagagugacaaa

SEQ ID NO: 234993 - RNA, 19 nt, Artificial Sequence
  Description of Artificial Sequence: Synthetic oligonucleotide
  Antisense strand to SEQ ID NO: 234992
uuugucacucuucuauagc

SEQ ID NO: 234994 - RNA, 19 nt, Artificial Sequence
  Description of Artificial Sequence: Synthetic oligonucleotide
  Sense strand starting at position 3975 SEQ ID NO: 3026
ggugucugacaaugaauaa

SEQ ID NO: 234995 - RNA, 19 nt, Artificial Sequence
  Description of Artificial Sequence: Synthetic oligonucleotide
  Antisense strand to SEQ ID NO: 234994
uuauucauugucagacacc

SEQ ID NO: 234996 - RNA, 19 nt, Artificial Sequence
  Description of Artificial Sequence: Synthetic oligonucleotide
  Sense strand starting at position 29 SEQ ID NO: 3025
gacuuaagguacgugacuu

SEQ ID NO: 234997 - RNA, 19 nt, Artificial Sequence
  Description of Artificial Sequence: Synthetic oligonucleotide
  Antisense strand to SEQ ID NO: 234996
aagucacguaccuuaaguc

SEQ ID NO: 234998 - RNA, 19 nt, Artificial Sequence
  Description of Artificial Sequence: Synthetic oligonucleotide
  Sense strand starting at position 30 SEQ ID NO: 3025
acuuaagguacgugacuua

SEQ ID NO: 234999 - RNA, 19 nt, Artificial Sequence
  Description of Artificial Sequence: Synthetic oligonucleotide
  Antisense strand to SEQ ID NO: 234998
uaagucacguaccuuaagu

SEQ ID NO: 235000 - RNA, 19 nt, Artificial Sequence
  Description of Artificial Sequence: Synthetic oligonucleotide
  Sense strand starting at position 33 SEQ ID NO: 3025
uaagguacgugacuuaaag

SEQ ID NO: 235001 - RNA, 19 nt, Artificial Sequence
  Description of Artificial Sequence: Synthetic oligonucleotide
  Antisense strand to SEQ ID NO: 235000
cuuuaagucacguaccuua

SEQ ID NO: 235002 - RNA, 19 nt, Artificial Sequence
  Description of Artificial Sequence: Synthetic oligonucleotide
  Sense strand starting at position 155 SEQ ID NO: 3025
cccucuguacuguacuuaa

SEQ ID NO: 235003 - RNA, 19 nt, Artificial Sequence
  Description of Artificial Sequence: Synthetic oligonucleotide
  Antisense strand to SEQ ID NO: 235002
uuaaguacaguacagaggg

SEQ ID NO: 235004 - RNA, 19 nt, Artificial Sequence
  Description of Artificial Sequence: Synthetic oligonucleotide
  Sense strand starting at position 164 SEQ ID NO: 3025
cuguacuuaacuggugaga

SEQ ID NO: 235005 - RNA, 19 nt, Artificial Sequence
  Description of Artificial Sequence: Synthetic oligonucleotide
  Antisense strand to SEQ ID NO: 235004
ucucaccaguuaaguacag

SEQ ID NO: 235006 - RNA, 19 nt, Artificial Sequence
  Description of Artificial Sequence: Synthetic oligonucleotide
  Sense strand starting at position 344 SEQ ID NO: 3025
cgggccaaaucugugaaga

SEQ ID NO: 235007 - RNA, 19 nt, Artificial Sequence
  Description of Artificial Sequence: Synthetic oligonucleotide
  Antisense strand to SEQ ID NO: 235006
ucuucacagauuuggcccg

SEQ ID NO: 235008 - RNA, 19 nt, Artificial Sequence
  Description of Artificial Sequence: Synthetic oligonucleotide
  Sense strand starting at position 345 SEQ ID NO: 3025
gggccaaaucugugaagag

SEQ ID NO: 235009 - RNA, 19 nt, Artificial Sequence
  Description of Artificial Sequence: Synthetic oligonucleotide
  Antisense strand to SEQ ID NO: 235008
cucuucacagauuuggccc

SEQ ID NO: 235010 - RNA, 19 nt, Artificial Sequence
  Description of Artificial Sequence: Synthetic oligonucleotide
  Sense strand starting at position 518 SEQ ID NO: 3025
agguaagagugagccuaua

SEQ ID NO: 235011 - RNA, 19 nt, Artificial Sequence
  Description of Artificial Sequence: Synthetic oligonucleotide
  Antisense strand to SEQ ID NO: 235010
uauaggcucacucuuaccu

SEQ ID NO: 235012 - RNA, 19 nt, Artificial Sequence
  Description of Artificial Sequence: Synthetic oligonucleotide
  Sense strand starting at position 1074 SEQ ID NO: 3025
ccagaaacaucacauggua

SEQ ID NO: 235013 - RNA, 19 nt, Artificial Sequence
  Description of Artificial Sequence: Synthetic oligonucleotide
  Antisense strand to SEQ ID NO: 235012
uaccaugugauguuucugg

SEQ ID NO: 235014 - RNA, 19 nt, Artificial Sequence
  Description of Artificial Sequence: Synthetic oligonucleotide
  Sense strand starting at position 2301 SEQ ID NO: 3025
gaaagcugagcuggucuaa

SEQ ID NO: 235015 - RNA, 19 nt, Artificial Sequence
  Description of Artificial Sequence: Synthetic oligonucleotide
  Antisense strand to SEQ ID NO: 235014
uuagaccagcucagcuuuc

SEQ ID NO: 235016 - RNA, 19 nt, Artificial Sequence
  Description of Artificial Sequence: Synthetic oligonucleotide
  Sense strand starting at position 2354 SEQ ID NO: 3025
gcgcaauuaucucccauaa

SEQ ID NO: 235017 - RNA, 19 nt, Artificial Sequence
  Description of Artificial Sequence: Synthetic oligonucleotide
  Antisense strand to SEQ ID NO: 235016
uuaugggagauaauugcgc

SEQ ID NO: 235018 - RNA, 19 nt, Artificial Sequence
  Description of Artificial Sequence: Synthetic oligonucleotide
  Sense strand starting at position 2684 SEQ ID NO: 3025
gugagucuuggguaaguca

SEQ ID NO: 235019 - RNA, 19 nt, Artificial Sequence
  Description of Artificial Sequence: Synthetic oligonucleotide
  Antisense strand to SEQ ID NO: 235018
ugacuuacccaagacucac

SEQ ID NO: 235020 - RNA, 19 nt, Artificial Sequence
  Description of Artificial Sequence: Synthetic oligonucleotide
  Sense strand starting at position 2720 SEQ ID NO: 3025
uucgauuccucaucuguaa

SEQ ID NO: 235021 - RNA, 19 nt, Artificial Sequence
  Description of Artificial Sequence: Synthetic oligonucleotide
  Antisense strand to SEQ ID NO: 235020
uuacagaugaggaaucgaa

SEQ ID NO: 235022 - RNA, 19 nt, Artificial Sequence
  Description of Artificial Sequence: Synthetic oligonucleotide
  Sense strand starting at position 2801 SEQ ID NO: 3025
gcugguguuaucugaccac

SEQ ID NO: 235023 - RNA, 19 nt, Artificial Sequence
  Description of Artificial Sequence: Synthetic oligonucleotide
  Antisense strand to SEQ ID NO: 235022
guggucagauaacaccagc

SEQ ID NO: 235024 - RNA, 19 nt, Artificial Sequence
  Description of Artificial Sequence: Synthetic oligonucleotide
  Sense strand starting at position 2804 SEQ ID NO: 3025
gguguuaucugaccacuca

SEQ ID NO: 235025 - RNA, 19 nt, Artificial Sequence
  Description of Artificial Sequence: Synthetic oligonucleotide
  Antisense strand to SEQ ID NO: 235024
ugaguggucagauaacacc

SEQ ID NO: 235026 - RNA, 19 nt, Artificial Sequence
  Description of Artificial Sequence: Synthetic oligonucleotide
  Sense strand starting at position 2805 SEQ ID NO: 3025
guguuaucugaccacucaa

SEQ ID NO: 235027 - RNA, 19 nt, Artificial Sequence
  Description of Artificial Sequence: Synthetic oligonucleotide
  Antisense strand to SEQ ID NO: 235026
uugaguggucagauaacac

SEQ ID NO: 235028 - RNA, 19 nt, Artificial Sequence
  Description of Artificial Sequence: Synthetic oligonucleotide
  Sense strand starting at position 2828 SEQ ID NO: 3025
gggaaaccuugcucugucu

SEQ ID NO: 235029 - RNA, 19 nt, Artificial Sequence
  Description of Artificial Sequence: Synthetic oligonucleotide
  Antisense strand to SEQ ID NO: 235028
agacagagcaagguuuccc

SEQ ID NO: 235030 - RNA, 19 nt, Artificial Sequence
  Description of Artificial Sequence: Synthetic oligonucleotide
  Sense strand starting at position 3013 SEQ ID NO: 3025
aggugagacagcuguaaau

SEQ ID NO: 235031 - RNA, 19 nt, Artificial Sequence
  Description of Artificial Sequence: Synthetic oligonucleotide
  Antisense strand to SEQ ID NO: 235030
auuuacagcugucucaccu

SEQ ID NO: 235032 - RNA, 19 nt, Artificial Sequence
  Description of Artificial Sequence: Synthetic oligonucleotide
  Sense strand starting at position 3015 SEQ ID NO: 3025
gugagacagcuguaaauca

SEQ ID NO: 235033 - RNA, 19 nt, Artificial Sequence
  Description of Artificial Sequence: Synthetic oligonucleotide
  Antisense strand to SEQ ID NO: 235032
ugauuuacagcugucucac

SEQ ID NO: 235034 - RNA, 19 nt, Artificial Sequence
  Description of Artificial Sequence: Synthetic oligonucleotide
  Sense strand starting at position 3028 SEQ ID NO: 3025
aaaucagggcucuggaauu

SEQ ID NO: 235035 - RNA, 19 nt, Artificial Sequence
  Description of Artificial Sequence: Synthetic oligonucleotide
  Antisense strand to SEQ ID NO: 235034
aauuccagagcccugauuu

SEQ ID NO: 235036 - RNA, 19 nt, Artificial Sequence
  Description of Artificial Sequence: Synthetic oligonucleotide
  Sense strand starting at position 3161 SEQ ID NO: 3025
cucagagaguucuugacug

SEQ ID NO: 235037 - RNA, 19 nt, Artificial Sequence
  Description of Artificial Sequence: Synthetic oligonucleotide
  Antisense strand to SEQ ID NO: 235036
cagucaagaacucucugag

SEQ ID NO: 235038 - RNA, 19 nt, Artificial Sequence
  Description of Artificial Sequence: Synthetic oligonucleotide
  Sense strand starting at position 3165 SEQ ID NO: 3025
gagaguucuugacuggacu

SEQ ID NO: 235039 - RNA, 19 nt, Artificial Sequence
  Description of Artificial Sequence: Synthetic oligonucleotide
  Antisense strand to SEQ ID NO: 235038
aguccagucaagaacucuc

SEQ ID NO: 235040 - RNA, 19 nt, Artificial Sequence
  Description of Artificial Sequence: Synthetic oligonucleotide
  Sense strand starting at position 3167 SEQ ID NO: 3025
gaguucuugacuggacugu

SEQ ID NO: 235041 - RNA, 19 nt, Artificial Sequence
  Description of Artificial Sequence: Synthetic oligonucleotide
  Antisense strand to SEQ ID NO: 235040
acaguccagucaagaacuc

SEQ ID NO: 235042 - RNA, 19 nt, Artificial Sequence
  Description of Artificial Sequence: Synthetic oligonucleotide
  Sense strand starting at position 3205 SEQ ID NO: 3025
gggaaccgcaguugaaauu

SEQ ID NO: 235043 - RNA, 19 nt, Artificial Sequence
  Description of Artificial Sequence: Synthetic oligonucleotide
  Antisense strand to SEQ ID NO: 235042
aauuucaacugcgguuccc

SEQ ID NO: 235044 - RNA, 19 nt, Artificial Sequence
  Description of Artificial Sequence: Synthetic oligonucleotide
  Sense strand starting at position 3393 SEQ ID NO: 3025
ccagguagaugaucaucau

SEQ ID NO: 235045 - RNA, 19 nt, Artificial Sequence
  Description of Artificial Sequence: Synthetic oligonucleotide
  Antisense strand to SEQ ID NO: 235044
augaugaucaucuaccugg

SEQ ID NO: 235046 - RNA, 19 nt, Artificial Sequence
  Description of Artificial Sequence: Synthetic oligonucleotide
  Sense strand starting at position 3499 SEQ ID NO: 3025
gcaguuucgggccugcaaa

SEQ ID NO: 235047 - RNA, 19 nt, Artificial Sequence
  Description of Artificial Sequence: Synthetic oligonucleotide
  Antisense strand to SEQ ID NO: 235046
uuugcaggcccgaaacugc

SEQ ID NO: 235048 - RNA, 19 nt, Artificial Sequence
  Description of Artificial Sequence: Synthetic oligonucleotide
  Sense strand starting at position 3604 SEQ ID NO: 3025
cauugcucagcgcuuugua

SEQ ID NO: 235049 - RNA, 19 nt, Artificial Sequence
  Description of Artificial Sequence: Synthetic oligonucleotide
  Antisense strand to SEQ ID NO: 235048
uacaaagcgcugagcaaug

SEQ ID NO: 235050 - RNA, 19 nt, Artificial Sequence
  Description of Artificial Sequence: Synthetic oligonucleotide
  Sense strand starting at position 3605 SEQ ID NO: 3025
auugcucagcgcuuuguaa

SEQ ID NO: 235051 - RNA, 19 nt, Artificial Sequence
  Description of Artificial Sequence: Synthetic oligonucleotide
  Antisense strand to SEQ ID NO: 235050
uuacaaagcgcugagcaau

SEQ ID NO: 235052 - RNA, 19 nt, Artificial Sequence
  Description of Artificial Sequence: Synthetic oligonucleotide
  Sense strand starting at position 3606 SEQ ID NO: 3025
uugcucagcgcuuuguaau

SEQ ID NO: 235053 - RNA, 19 nt, Artificial Sequence
  Description of Artificial Sequence: Synthetic oligonucleotide
  Antisense strand to SEQ ID NO: 235052
auuacaaagcgcugagcaa

SEQ ID NO: 235054 - RNA, 19 nt, Artificial Sequence
  Description of Artificial Sequence: Synthetic oligonucleotide
  Sense strand starting at position 3617 SEQ ID NO: 3025
uuuguaaugccgcuucuga

SEQ ID NO: 235055 - RNA, 19 nt, Artificial Sequence
  Description of Artificial Sequence: Synthetic oligonucleotide
  Antisense strand to SEQ ID NO: 235054
ucagaagcggcauuacaaa

SEQ ID NO: 235056 - RNA, 19 nt, Artificial Sequence
  Description of Artificial Sequence: Synthetic oligonucleotide
  Sense strand starting at position 3619 SEQ ID NO: 3025
uguaaugccgcuucugagu

SEQ ID NO: 235057 - RNA, 19 nt, Artificial Sequence
  Description of Artificial Sequence: Synthetic oligonucleotide
  Antisense strand to SEQ ID NO: 235056
acucagaagcggcauuaca

SEQ ID NO: 235058 - RNA, 19 nt, Artificial Sequence
  Description of Artificial Sequence: Synthetic oligonucleotide
  Sense strand starting at position 3625 SEQ ID NO: 3025
gccgcuucugaguaacaga

SEQ ID NO: 235059 - RNA, 19 nt, Artificial Sequence
  Description of Artificial Sequence: Synthetic oligonucleotide
  Antisense strand to SEQ ID NO: 235058
ucuguuacucagaagcggc

SEQ ID NO: 235060 - RNA, 19 nt, Artificial Sequence
  Description of Artificial Sequence: Synthetic oligonucleotide
  Sense strand starting at position 3632 SEQ ID NO: 3025
cugaguaacagauggcaga

SEQ ID NO: 235061 - RNA, 19 nt, Artificial Sequence
  Description of Artificial Sequence: Synthetic oligonucleotide
  Antisense strand to SEQ ID NO: 235060
ucugccaucuguuacucag

SEQ ID NO: 235062 - RNA, 19 nt, Artificial Sequence
  Description of Artificial Sequence: Synthetic oligonucleotide
  Sense strand starting at position 3807 SEQ ID NO: 3025
gucucagagagugggaauu

SEQ ID NO: 235063 - RNA, 19 nt, Artificial Sequence
  Description of Artificial Sequence: Synthetic oligonucleotide
  Antisense strand to SEQ ID NO: 235062
aauucccacucucugagac

SEQ ID NO: 235064 - RNA, 19 nt, Artificial Sequence
  Description of Artificial Sequence: Synthetic oligonucleotide
  Sense strand starting at position 3820 SEQ ID NO: 3025
ggaauuuccuuccaggaau

SEQ ID NO: 235065 - RNA, 19 nt, Artificial Sequence
  Description of Artificial Sequence: Synthetic oligonucleotide
  Antisense strand to SEQ ID NO: 235064
auuccuggaaggaaauucc

SEQ ID NO: 235066 - RNA, 19 nt, Artificial Sequence
  Description of Artificial Sequence: Synthetic oligonucleotide
  Sense strand starting at position 3931 SEQ ID NO: 3025
ggugucauuagcugaucca

SEQ ID NO: 235067 - RNA, 19 nt, Artificial Sequence
  Description of Artificial Sequence: Synthetic oligonucleotide
  Antisense strand to SEQ ID NO: 235066
uggaucagcuaaugacacc

SEQ ID NO: 235068 - RNA, 19 nt, Artificial Sequence
  Description of Artificial Sequence: Synthetic oligonucleotide
  Sense strand starting at position 3932 SEQ ID NO: 3025
gugucauuagcugauccau

SEQ ID NO: 235069 - RNA, 19 nt, Artificial Sequence
  Description of Artificial Sequence: Synthetic oligonucleotide
  Antisense strand to SEQ ID NO: 235068
auggaucagcuaaugacac

SEQ ID NO: 235070 - RNA, 19 nt, Artificial Sequence
  Description of Artificial Sequence: Synthetic oligonucleotide
  Sense strand starting at position 3964 SEQ ID NO: 3025
cagauaucaguuuggguug

SEQ ID NO: 235071 - RNA, 19 nt, Artificial Sequence
  Description of Artificial Sequence: Synthetic oligonucleotide
  Antisense strand to SEQ ID NO: 235070
caacccaaacugauaucug

SEQ ID NO: 235072 - RNA, 19 nt, Artificial Sequence
  Description of Artificial Sequence: Synthetic oligonucleotide
  Sense strand starting at position 3967 SEQ ID NO: 3025
auaucaguuuggguuguca

SEQ ID NO: 235073 - RNA, 19 nt, Artificial Sequence
  Description of Artificial Sequence: Synthetic oligonucleotide
  Antisense strand to SEQ ID NO: 235072
ugacaacccaaacugauau

SEQ ID NO: 235074 - RNA, 19 nt, Artificial Sequence
  Description of Artificial Sequence: Synthetic oligonucleotide
  Sense strand starting at position 3969 SEQ ID NO: 3025
aucaguuuggguugucaaa

SEQ ID NO: 235075 - RNA, 19 nt, Artificial Sequence
  Description of Artificial Sequence: Synthetic oligonucleotide
  Antisense strand to SEQ ID NO: 235074
uuugacaacccaaacugau

SEQ ID NO: 235076 - RNA, 19 nt, Artificial Sequence
  Description of Artificial Sequence: Synthetic oligonucleotide
  Sense strand starting at position 35 SEQ ID NO: 3027
gguaacaucugccuaguaa

SEQ ID NO: 235077 - RNA, 19 nt, Artificial Sequence
  Description of Artificial Sequence: Synthetic oligonucleotide
  Antisense strand to SEQ ID NO: 235076
uuacuaggcagauguuacc

SEQ ID NO: 235078 - RNA, 19 nt, Artificial Sequence
  Description of Artificial Sequence: Synthetic oligonucleotide
  Sense strand starting at position 36 SEQ ID NO: 3027
guaacaucugccuaguaag

SEQ ID NO: 235079 - RNA, 19 nt, Artificial Sequence
  Description of Artificial Sequence: Synthetic oligonucleotide
  Antisense strand to SEQ ID NO: 235078
cuuacuaggcagauguuac

SEQ ID NO: 235080 - RNA, 19 nt, Artificial Sequence
  Description of Artificial Sequence: Synthetic oligonucleotide
  Sense strand starting at position 119 SEQ ID NO: 3027
gcacauuuguuucucugua

SEQ ID NO: 235081 - RNA, 19 nt, Artificial Sequence
  Description of Artificial Sequence: Synthetic oligonucleotide
  Antisense strand to SEQ ID NO: 235080
uacagagaaacaaaugugc

SEQ ID NO: 235082 - RNA, 19 nt, Artificial Sequence
  Description of Artificial Sequence: Synthetic oligonucleotide
  Sense strand starting at position 420 SEQ ID NO: 3027
aaagauugauucucgguac

SEQ ID NO: 235083 - RNA, 19 nt, Artificial Sequence
  Description of Artificial Sequence: Synthetic oligonucleotide
  Antisense strand to SEQ ID NO: 235082
guaccgagaaucaaucuuu

SEQ ID NO: 235084 - RNA, 19 nt, Artificial Sequence
  Description of Artificial Sequence: Synthetic oligonucleotide
  Sense strand starting at position 423 SEQ ID NO: 3027
gauugauucucgguacaaa

SEQ ID NO: 235085 - RNA, 19 nt, Artificial Sequence
  Description of Artificial Sequence: Synthetic oligonucleotide
  Antisense strand to SEQ ID NO: 235084
uuuguaccgagaaucaauc

SEQ ID NO: 235086 - RNA, 19 nt, Artificial Sequence
  Description of Artificial Sequence: Synthetic oligonucleotide
  Sense strand starting at position 424 SEQ ID NO: 3027
auugauucucgguacaaau

SEQ ID NO: 235087 - RNA, 19 nt, Artificial Sequence
  Description of Artificial Sequence: Synthetic oligonucleotide
  Antisense strand to SEQ ID NO: 235086
auuuguaccgagaaucaau

SEQ ID NO: 235088 - RNA, 19 nt, Artificial Sequence
  Description of Artificial Sequence: Synthetic oligonucleotide
  Sense strand starting at position 435 SEQ ID NO: 3027
guacaaauugcuuggaaag

SEQ ID NO: 235089 - RNA, 19 nt, Artificial Sequence
  Description of Artificial Sequence: Synthetic oligonucleotide
  Antisense strand to SEQ ID NO: 235088
cuuuccaagcaauuuguac

SEQ ID NO: 235090 - RNA, 19 nt, Artificial Sequence
  Description of Artificial Sequence: Synthetic oligonucleotide
  Sense strand starting at position 436 SEQ ID NO: 3027
uacaaauugcuuggaaagu

SEQ ID NO: 235091 - RNA, 19 nt, Artificial Sequence
  Description of Artificial Sequence: Synthetic oligonucleotide
  Antisense strand to SEQ ID NO: 235090
acuuuccaagcaauuugua

SEQ ID NO: 235092 - RNA, 19 nt, Artificial Sequence
  Description of Artificial Sequence: Synthetic oligonucleotide
  Sense strand starting at position 453 SEQ ID NO: 3027
guuuaacaugugcacuaga

SEQ ID NO: 235093 - RNA, 19 nt, Artificial Sequence
  Description of Artificial Sequence: Synthetic oligonucleotide
  Antisense strand to SEQ ID NO: 235092
ucuagugcacauguuaaac

SEQ ID NO: 235094 - RNA, 19 nt, Artificial Sequence
  Description of Artificial Sequence: Synthetic oligonucleotide
  Sense strand starting at position 680 SEQ ID NO: 3027
guguaacuucuauagcaag

SEQ ID NO: 235095 - RNA, 19 nt, Artificial Sequence
  Description of Artificial Sequence: Synthetic oligonucleotide
  Antisense strand to SEQ ID NO: 235094
cuugcuauagaaguuacac

SEQ ID NO: 235096 - RNA, 19 nt, Artificial Sequence
  Description of Artificial Sequence: Synthetic oligonucleotide
  Sense strand starting at position 719 SEQ ID NO: 3027
aucggaaauauugguaacu

SEQ ID NO: 235097 - RNA, 19 nt, Artificial Sequence
  Description of Artificial Sequence: Synthetic oligonucleotide
  Antisense strand to SEQ ID NO: 235096
aguuaccaauauuuccgau

SEQ ID NO: 235098 - RNA, 19 nt, Artificial Sequence
  Description of Artificial Sequence: Synthetic oligonucleotide
  Sense strand starting at position 756 SEQ ID NO: 3027
agaaauaguuucuuugaug

SEQ ID NO: 235099 - RNA, 19 nt, Artificial Sequence
  Description of Artificial Sequence: Synthetic oligonucleotide
  Antisense strand to SEQ ID NO: 235098
caucaaagaaacuauuucu

SEQ ID NO: 235100 - RNA, 19 nt, Artificial Sequence
  Description of Artificial Sequence: Synthetic oligonucleotide
  Sense strand starting at position 757 SEQ ID NO: 3027
gaaauaguuucuuugauga

SEQ ID NO: 235101 - RNA, 19 nt, Artificial Sequence
  Description of Artificial Sequence: Synthetic oligonucleotide
  Antisense strand to SEQ ID NO: 235100
ucaucaaagaaacuauuuc

SEQ ID NO: 235102 - RNA, 19 nt, Artificial Sequence
  Description of Artificial Sequence: Synthetic oligonucleotide
  Sense strand starting at position 764 SEQ ID NO: 3027
uuucuuugaugaguuggaa

SEQ ID NO: 235103 - RNA, 19 nt, Artificial Sequence
  Description of Artificial Sequence: Synthetic oligonucleotide
  Antisense strand to SEQ ID NO: 235102
uuccaacucaucaaagaaa

SEQ ID NO: 235104 - RNA, 19 nt, Artificial Sequence
  Description of Artificial Sequence: Synthetic oligonucleotide
  Sense strand starting at position 925 SEQ ID NO: 3027
uugaaccuuugagucauau

SEQ ID NO: 235105 - RNA, 19 nt, Artificial Sequence
  Description of Artificial Sequence: Synthetic oligonucleotide
  Antisense strand to SEQ ID NO: 235104
auaugacucaaagguucaa

SEQ ID NO: 235106 - RNA, 19 nt, Artificial Sequence
  Description of Artificial Sequence: Synthetic oligonucleotide
  Sense strand starting at position 936 SEQ ID NO: 3027
agucauaugccacaggcaa

SEQ ID NO: 235107 - RNA, 19 nt, Artificial Sequence
  Description of Artificial Sequence: Synthetic oligonucleotide
  Antisense strand to SEQ ID NO: 235106
uugccuguggcauaugacu

SEQ ID NO: 235108 - RNA, 19 nt, Artificial Sequence
  Description of Artificial Sequence: Synthetic oligonucleotide
  Sense strand starting at position 963 SEQ ID NO: 3027
cgcgauaugcagguccuua

SEQ ID NO: 235109 - RNA, 19 nt, Artificial Sequence
  Description of Artificial Sequence: Synthetic oligonucleotide
  Antisense strand to SEQ ID NO: 235108
uaaggaccugcauaucgcg

SEQ ID NO: 235110 - RNA, 19 nt, Artificial Sequence
  Description of Artificial Sequence: Synthetic oligonucleotide
  Sense strand starting at position 1213 SEQ ID NO: 3027
cgcgguuugcagccuagaa

SEQ ID NO: 235111 - RNA, 19 nt, Artificial Sequence
  Description of Artificial Sequence: Synthetic oligonucleotide
  Antisense strand to SEQ ID NO: 235110
uucuaggcugcaaaccgcg

SEQ ID NO: 235112 - RNA, 19 nt, Artificial Sequence
  Description of Artificial Sequence: Synthetic oligonucleotide
  Sense strand starting at position 1250 SEQ ID NO: 3027
uaggaaaguugccuggcaa

SEQ ID NO: 235113 - RNA, 19 nt, Artificial Sequence
  Description of Artificial Sequence: Synthetic oligonucleotide
  Antisense strand to SEQ ID NO: 235112
uugccaggcaacuuuccua

SEQ ID NO: 235114 - RNA, 19 nt, Artificial Sequence
  Description of Artificial Sequence: Synthetic oligonucleotide
  Sense strand starting at position 2427 SEQ ID NO: 3027
ccguguagucuugauuuca

SEQ ID NO: 235115 - RNA, 19 nt, Artificial Sequence
  Description of Artificial Sequence: Synthetic oligonucleotide
  Antisense strand to SEQ ID NO: 235114
ugaaaucaagacuacacgg

SEQ ID NO: 235116 - RNA, 19 nt, Artificial Sequence
  Description of Artificial Sequence: Synthetic oligonucleotide
  Sense strand starting at position 2471 SEQ ID NO: 3027
agugguuuccguuucugua

SEQ ID NO: 235117 - RNA, 19 nt, Artificial Sequence
  Description of Artificial Sequence: Synthetic oligonucleotide
  Antisense strand to SEQ ID NO: 235116
uacagaaacggaaaccacu

SEQ ID NO: 235118 - RNA, 19 nt, Artificial Sequence
  Description of Artificial Sequence: Synthetic oligonucleotide
  Sense strand starting at position 2525 SEQ ID NO: 3027
ggaggagucuucuuccaaa

SEQ ID NO: 235119 - RNA, 19 nt, Artificial Sequence
  Description of Artificial Sequence: Synthetic oligonucleotide
  Antisense strand to SEQ ID NO: 235118
uuuggaagaagacuccucc

SEQ ID NO: 235120 - RNA, 19 nt, Artificial Sequence
  Description of Artificial Sequence: Synthetic oligonucleotide
  Sense strand starting at position 2549 SEQ ID NO: 3027
gccuuugguauuuggcaga

SEQ ID NO: 235121 - RNA, 19 nt, Artificial Sequence
  Description of Artificial Sequence: Synthetic oligonucleotide
  Antisense strand to SEQ ID NO: 235120
ucugccaaauaccaaaggc

SEQ ID NO: 235122 - RNA, 19 nt, Artificial Sequence
  Description of Artificial Sequence: Synthetic oligonucleotide
  Sense strand starting at position 2562 SEQ ID NO: 3027
ggcagagccucgccaauuu

SEQ ID NO: 235123 - RNA, 19 nt, Artificial Sequence
  Description of Artificial Sequence: Synthetic oligonucleotide
  Antisense strand to SEQ ID NO: 235122
aaauuggcgaggcucugcc

SEQ ID NO: 235124 - RNA, 19 nt, Artificial Sequence
  Description of Artificial Sequence: Synthetic oligonucleotide
  Sense strand starting at position 3007 SEQ ID NO: 3027
uuuggugucguguuuaauc

SEQ ID NO: 235125 - RNA, 19 nt, Artificial Sequence
  Description of Artificial Sequence: Synthetic oligonucleotide
  Antisense strand to SEQ ID NO: 235124
gauuaaacacgacaccaaa

SEQ ID NO: 235126 - RNA, 19 nt, Artificial Sequence
  Description of Artificial Sequence: Synthetic oligonucleotide
  Sense strand starting at position 3018 SEQ ID NO: 3027
guuuaaucacaugguggua

SEQ ID NO: 235127 - RNA, 19 nt, Artificial Sequence
  Description of Artificial Sequence: Synthetic oligonucleotide
  Antisense strand to SEQ ID NO: 235126
uaccaccaugugauuaaac

SEQ ID NO: 235128 - RNA, 19 nt, Artificial Sequence
  Description of Artificial Sequence: Synthetic oligonucleotide
  Sense strand starting at position 3169 SEQ ID NO: 3027
acaaguguaucuuuaguau

SEQ ID NO: 235129 - RNA, 19 nt, Artificial Sequence
  Description of Artificial Sequence: Synthetic oligonucleotide
  Antisense strand to SEQ ID NO: 235128
auacuaaagauacacuugu

SEQ ID NO: 235130 - RNA, 19 nt, Artificial Sequence
  Description of Artificial Sequence: Synthetic oligonucleotide
  Sense strand starting at position 3236 SEQ ID NO: 3027
cuaggacaucuaugaguua

SEQ ID NO: 235131 - RNA, 19 nt, Artificial Sequence
  Description of Artificial Sequence: Synthetic oligonucleotide
  Antisense strand to SEQ ID NO: 235130
uaacucauagauguccuag

SEQ ID NO: 235132 - RNA, 19 nt, Artificial Sequence
  Description of Artificial Sequence: Synthetic oligonucleotide
  Sense strand starting at position 3241 SEQ ID NO: 3027
acaucuaugaguuaggguu

SEQ ID NO: 235133 - RNA, 19 nt, Artificial Sequence
  Description of Artificial Sequence: Synthetic oligonucleotide
  Antisense strand to SEQ ID NO: 235132
aacccuaacucauagaugu

SEQ ID NO: 235134 - RNA, 19 nt, Artificial Sequence
  Description of Artificial Sequence: Synthetic oligonucleotide
  Sense strand starting at position 3248 SEQ ID NO: 3027
ugaguuaggguuuaagacu

SEQ ID NO: 235135 - RNA, 19 nt, Artificial Sequence
  Description of Artificial Sequence: Synthetic oligonucleotide
  Antisense strand to SEQ ID NO: 235134
agucuuaaacccuaacuca

SEQ ID NO: 235136 - RNA, 19 nt, Artificial Sequence
  Description of Artificial Sequence: Synthetic oligonucleotide
  Sense strand starting at position 3266 SEQ ID NO: 3027
uuuaguaaacuagguaguu

SEQ ID NO: 235137 - RNA, 19 nt, Artificial Sequence
  Description of Artificial Sequence: Synthetic oligonucleotide
  Antisense strand to SEQ ID NO: 235136
aacuaccuaguuuacuaaa

SEQ ID NO: 235138 - RNA, 19 nt, Artificial Sequence
  Description of Artificial Sequence: Synthetic oligonucleotide
  Sense strand starting at position 3425 SEQ ID NO: 3027
ggagauacuuguguguauu

SEQ ID NO: 235139 - RNA, 19 nt, Artificial Sequence
  Description of Artificial Sequence: Synthetic oligonucleotide
  Antisense strand to SEQ ID NO: 235138
aauacacacaaguaucucc

SEQ ID NO: 235140 - RNA, 19 nt, Artificial Sequence
  Description of Artificial Sequence: Synthetic oligonucleotide
  Sense strand starting at position 3426 SEQ ID NO: 3027
gagauacuuguguguauug

SEQ ID NO: 235141 - RNA, 19 nt, Artificial Sequence
  Description of Artificial Sequence: Synthetic oligonucleotide
  Antisense strand to SEQ ID NO: 235140
caauacacacaaguaucuc

SEQ ID NO: 235142 - RNA, 19 nt, Artificial Sequence
  Description of Artificial Sequence: Synthetic oligonucleotide
  Sense strand starting at position 3427 SEQ ID NO: 3027
agauacuuguguguauuga

SEQ ID NO: 235143 - RNA, 19 nt, Artificial Sequence
  Description of Artificial Sequence: Synthetic oligonucleotide
  Antisense strand to SEQ ID NO: 235142
ucaauacacacaaguaucu

SEQ ID NO: 235144 - RNA, 19 nt, Artificial Sequence
  Description of Artificial Sequence: Synthetic oligonucleotide
  Sense strand starting at position 3428 SEQ ID NO: 3027
gauacuuguguguauugau

SEQ ID NO: 235145 - RNA, 19 nt, Artificial Sequence
  Description of Artificial Sequence: Synthetic oligonucleotide
  Antisense strand to SEQ ID NO: 235144
aucaauacacacaaguauc

SEQ ID NO: 235146 - RNA, 19 nt, Artificial Sequence
  Description of Artificial Sequence: Synthetic oligonucleotide
  Sense strand starting at position 3573 SEQ ID NO: 3027
uaauguuagucuuuggaaa

SEQ ID NO: 235147 - RNA, 19 nt, Artificial Sequence
  Description of Artificial Sequence: Synthetic oligonucleotide
  Antisense strand to SEQ ID NO: 235146
uuuccaaagacuaacauua

SEQ ID NO: 235148 - RNA, 19 nt, Artificial Sequence
  Description of Artificial Sequence: Synthetic oligonucleotide
  Sense strand starting at position 3593 SEQ ID NO: 3027
uuuguaagguauccuaaau

SEQ ID NO: 235149 - RNA, 19 nt, Artificial Sequence
  Description of Artificial Sequence: Synthetic oligonucleotide
  Antisense strand to SEQ ID NO: 235148
auuuaggauaccuuacaaa

SEQ ID NO: 235150 - RNA, 19 nt, Artificial Sequence
  Description of Artificial Sequence: Synthetic oligonucleotide
  Sense strand starting at position 3664 SEQ ID NO: 3027
agagccaaagauugucaga

SEQ ID NO: 235151 - RNA, 19 nt, Artificial Sequence
  Description of Artificial Sequence: Synthetic oligonucleotide
  Antisense strand to SEQ ID NO: 235150
ucugacaaucuuuggcucu

SEQ ID NO: 235152 - RNA, 19 nt, Artificial Sequence
  Description of Artificial Sequence: Synthetic oligonucleotide
  Sense strand starting at position 3775 SEQ ID NO: 3027
cugagaugcauugacagca

SEQ ID NO: 235153 - RNA, 19 nt, Artificial Sequence
  Description of Artificial Sequence: Synthetic oligonucleotide
  Antisense strand to SEQ ID NO: 235152
ugcugucaaugcaucucag

SEQ ID NO: 235154 - RNA, 19 nt, Artificial Sequence
  Description of Artificial Sequence: Synthetic oligonucleotide
  Sense strand starting at position 3780 SEQ ID NO: 3027
augcauugacagcaagacu

SEQ ID NO: 235155 - RNA, 19 nt, Artificial Sequence
  Description of Artificial Sequence: Synthetic oligonucleotide
  Antisense strand to SEQ ID NO: 235154
agucuugcugucaaugcau

SEQ ID NO: 235156 - RNA, 19 nt, Artificial Sequence
  Description of Artificial Sequence: Synthetic oligonucleotide
  Sense strand starting at position 79 SEQ ID NO: 3028
ggaccaaagucucagagaa

SEQ ID NO: 235157 - RNA, 19 nt, Artificial Sequence
  Description of Artificial Sequence: Synthetic oligonucleotide
  Antisense strand to SEQ ID NO: 235156
uucucugagacuuuggucc

SEQ ID NO: 235158 - RNA, 19 nt, Artificial Sequence
  Description of Artificial Sequence: Synthetic oligonucleotide
  Sense strand starting at position 81 SEQ ID NO: 3028
accaaagucucagagaaca

SEQ ID NO: 235159 - RNA, 19 nt, Artificial Sequence
  Description of Artificial Sequence: Synthetic oligonucleotide
  Antisense strand to SEQ ID NO: 235158
uguucucugagacuuuggu

SEQ ID NO: 235160 - RNA, 19 nt, Artificial Sequence
  Description of Artificial Sequence: Synthetic oligonucleotide
  Sense strand starting at position 135 SEQ ID NO: 3028
ucuguagcuggugaaauau

SEQ ID NO: 235161 - RNA, 19 nt, Artificial Sequence
  Description of Artificial Sequence: Synthetic oligonucleotide
  Antisense strand to SEQ ID NO: 235160
auauuucaccagcuacaga

SEQ ID NO: 235162 - RNA, 19 nt, Artificial Sequence
  Description of Artificial Sequence: Synthetic oligonucleotide
  Sense strand starting at position 144 SEQ ID NO: 3028
ggugaaauauuugaaugau

SEQ ID NO: 235163 - RNA, 19 nt, Artificial Sequence
  Description of Artificial Sequence: Synthetic oligonucleotide
  Antisense strand to SEQ ID NO: 235162
aucauucaaauauuucacc

SEQ ID NO: 235164 - RNA, 19 nt, Artificial Sequence
  Description of Artificial Sequence: Synthetic oligonucleotide
  Sense strand starting at position 180 SEQ ID NO: 3028
ucuuuaauucucuagguga

SEQ ID NO: 235165 - RNA, 19 nt, Artificial Sequence
  Description of Artificial Sequence: Synthetic oligonucleotide
  Antisense strand to SEQ ID NO: 235164
ucaccuagagaauuaaaga

SEQ ID NO: 235166 - RNA, 19 nt, Artificial Sequence
  Description of Artificial Sequence: Synthetic oligonucleotide
  Sense strand starting at position 183 SEQ ID NO: 3028
uuaauucucuaggugacca

SEQ ID NO: 235167 - RNA, 19 nt, Artificial Sequence
  Description of Artificial Sequence: Synthetic oligonucleotide
  Antisense strand to SEQ ID NO: 235166
uggucaccuagagaauuaa

SEQ ID NO: 235168 - RNA, 19 nt, Artificial Sequence
  Description of Artificial Sequence: Synthetic oligonucleotide
  Sense strand starting at position 2243 SEQ ID NO: 3028
guguuaugugagagcaugu

SEQ ID NO: 235169 - RNA, 19 nt, Artificial Sequence
  Description of Artificial Sequence: Synthetic oligonucleotide
  Antisense strand to SEQ ID NO: 235168
acaugcucucacauaacac

SEQ ID NO: 235170 - RNA, 19 nt, Artificial Sequence
  Description of Artificial Sequence: Synthetic oligonucleotide
  Sense strand starting at position 2252 SEQ ID NO: 3028
gagagcauguguguuuaaa

SEQ ID NO: 235171 - RNA, 19 nt, Artificial Sequence
  Description of Artificial Sequence: Synthetic oligonucleotide
  Antisense strand to SEQ ID NO: 235170
uuuaaacacacaugcucuc

SEQ ID NO: 235172 - RNA, 19 nt, Artificial Sequence
  Description of Artificial Sequence: Synthetic oligonucleotide
  Sense strand starting at position 2262 SEQ ID NO: 3028
guguuuaaacggcaauuaa

SEQ ID NO: 235173 - RNA, 19 nt, Artificial Sequence
  Description of Artificial Sequence: Synthetic oligonucleotide
  Antisense strand to SEQ ID NO: 235172
uuaauugccguuuaaacac

SEQ ID NO: 235174 - RNA, 19 nt, Artificial Sequence
  Description of Artificial Sequence: Synthetic oligonucleotide
  Sense strand starting at position 2378 SEQ ID NO: 3028
caaugcucugccugaggaa

SEQ ID NO: 235175 - RNA, 19 nt, Artificial Sequence
  Description of Artificial Sequence: Synthetic oligonucleotide
  Antisense strand to SEQ ID NO: 235174
uuccucaggcagagcauug

SEQ ID NO: 235176 - RNA, 19 nt, Artificial Sequence
  Description of Artificial Sequence: Synthetic oligonucleotide
  Sense strand starting at position 2379 SEQ ID NO: 3028
aaugcucugccugaggaau

SEQ ID NO: 235177 - RNA, 19 nt, Artificial Sequence
  Description of Artificial Sequence: Synthetic oligonucleotide
  Antisense strand to SEQ ID NO: 235176
auuccucaggcagagcauu

SEQ ID NO: 235178 - RNA, 19 nt, Artificial Sequence
  Description of Artificial Sequence: Synthetic oligonucleotide
  Sense strand starting at position 2390 SEQ ID NO: 3028
ugaggaauuuaucacugaa

SEQ ID NO: 235179 - RNA, 19 nt, Artificial Sequence
  Description of Artificial Sequence: Synthetic oligonucleotide
  Antisense strand to SEQ ID NO: 235178
uucagugauaaauuccuca

SEQ ID NO: 235180 - RNA, 19 nt, Artificial Sequence
  Description of Artificial Sequence: Synthetic oligonucleotide
  Sense strand starting at position 2454 SEQ ID NO: 3028
gguauauccucacuuccag

SEQ ID NO: 235181 - RNA, 19 nt, Artificial Sequence
  Description of Artificial Sequence: Synthetic oligonucleotide
  Antisense strand to SEQ ID NO: 235180
cuggaagugaggauauacc

SEQ ID NO: 235182 - RNA, 19 nt, Artificial Sequence
  Description of Artificial Sequence: Synthetic oligonucleotide
  Sense strand starting at position 2460 SEQ ID NO: 3028
uccucacuuccagagaugu

SEQ ID NO: 235183 - RNA, 19 nt, Artificial Sequence
  Description of Artificial Sequence: Synthetic oligonucleotide
  Antisense strand to SEQ ID NO: 235182
acaucucuggaagugagga

SEQ ID NO: 235184 - RNA, 19 nt, Artificial Sequence
  Description of Artificial Sequence: Synthetic oligonucleotide
  Sense strand starting at position 2468 SEQ ID NO: 3028
uccagagauguauauguuu

SEQ ID NO: 235185 - RNA, 19 nt, Artificial Sequence
  Description of Artificial Sequence: Synthetic oligonucleotide
  Antisense strand to SEQ ID NO: 235184
aaacauauacaucucugga

SEQ ID NO: 235186 - RNA, 19 nt, Artificial Sequence
  Description of Artificial Sequence: Synthetic oligonucleotide
  Sense strand starting at position 2891 SEQ ID NO: 3028
ucugacuucucagucucua

SEQ ID NO: 235187 - RNA, 19 nt, Artificial Sequence
  Description of Artificial Sequence: Synthetic oligonucleotide
  Antisense strand to SEQ ID NO: 235186
uagagacugagaagucaga

SEQ ID NO: 235188 - RNA, 19 nt, Artificial Sequence
  Description of Artificial Sequence: Synthetic oligonucleotide
  Sense strand starting at position 2926 SEQ ID NO: 3028
guuucuguuguuuaugagu

SEQ ID NO: 235189 - RNA, 19 nt, Artificial Sequence
  Description of Artificial Sequence: Synthetic oligonucleotide
  Antisense strand to SEQ ID NO: 235188
acucauaaacaacagaaac

SEQ ID NO: 235190 - RNA, 19 nt, Artificial Sequence
  Description of Artificial Sequence: Synthetic oligonucleotide
  Sense strand starting at position 2935 SEQ ID NO: 3028
guuuaugagucacuuaguc

SEQ ID NO: 235191 - RNA, 19 nt, Artificial Sequence
  Description of Artificial Sequence: Synthetic oligonucleotide
  Antisense strand to SEQ ID NO: 235190
gacuaagugacucauaaac

SEQ ID NO: 235192 - RNA, 19 nt, Artificial Sequence
  Description of Artificial Sequence: Synthetic oligonucleotide
  Sense strand starting at position 2940 SEQ ID NO: 3028
ugagucacuuagucuaugu

SEQ ID NO: 235193 - RNA, 19 nt, Artificial Sequence
  Description of Artificial Sequence: Synthetic oligonucleotide
  Antisense strand to SEQ ID NO: 235192
acauagacuaagugacuca

SEQ ID NO: 235194 - RNA, 19 nt, Artificial Sequence
  Description of Artificial Sequence: Synthetic oligonucleotide
  Sense strand starting at position 2942 SEQ ID NO: 3028
agucacuuagucuauguua

SEQ ID NO: 235195 - RNA, 19 nt, Artificial Sequence
  Description of Artificial Sequence: Synthetic oligonucleotide
  Antisense strand to SEQ ID NO: 235194
uaacauagacuaagugacu

SEQ ID NO: 235196 - RNA, 19 nt, Artificial Sequence
  Description of Artificial Sequence: Synthetic oligonucleotide
  Sense strand starting at position 2944 SEQ ID NO: 3028
ucacuuagucuauguuauu

SEQ ID NO: 235197 - RNA, 19 nt, Artificial Sequence
  Description of Artificial Sequence: Synthetic oligonucleotide
  Antisense strand to SEQ ID NO: 235196
aauaacauagacuaaguga

SEQ ID NO: 235198 - RNA, 19 nt, Artificial Sequence
  Description of Artificial Sequence: Synthetic oligonucleotide
  Sense strand starting at position 2950 SEQ ID NO: 3028
agucuauguuauucuucua

SEQ ID NO: 235199 - RNA, 19 nt, Artificial Sequence
  Description of Artificial Sequence: Synthetic oligonucleotide
  Antisense strand to SEQ ID NO: 235198
uagaagaauaacauagacu

SEQ ID NO: 235200 - RNA, 19 nt, Artificial Sequence
  Description of Artificial Sequence: Synthetic oligonucleotide
  Sense strand starting at position 2953 SEQ ID NO: 3028
cuauguuauucuucuauag

SEQ ID NO: 235201 - RNA, 19 nt, Artificial Sequence
  Description of Artificial Sequence: Synthetic oligonucleotide
  Antisense strand to SEQ ID NO: 235200
cuauagaagaauaacauag

SEQ ID NO: 235202 - RNA, 19 nt, Artificial Sequence
  Description of Artificial Sequence: Synthetic oligonucleotide
  Sense strand starting at position 3011 SEQ ID NO: 3028
guacuuaucucgucuuaaa

SEQ ID NO: 235203 - RNA, 19 nt, Artificial Sequence
  Description of Artificial Sequence: Synthetic oligonucleotide
  Antisense strand to SEQ ID NO: 235202
uuuaagacgagauaaguac

SEQ ID NO: 235204 - RNA, 19 nt, Artificial Sequence
  Description of Artificial Sequence: Synthetic oligonucleotide
  Sense strand starting at position 3022 SEQ ID NO: 3028
gucuuaaaccagcaagcaa

SEQ ID NO: 235205 - RNA, 19 nt, Artificial Sequence
  Description of Artificial Sequence: Synthetic oligonucleotide
  Antisense strand to SEQ ID NO: 235204
uugcuugcugguuuaagac

SEQ ID NO: 235206 - RNA, 19 nt, Artificial Sequence
  Description of Artificial Sequence: Synthetic oligonucleotide
  Sense strand starting at position 3078 SEQ ID NO: 3028
gagugaugcugguugacug

SEQ ID NO: 235207 - RNA, 19 nt, Artificial Sequence
  Description of Artificial Sequence: Synthetic oligonucleotide
  Antisense strand to SEQ ID NO: 235206
cagucaaccagcaucacuc

SEQ ID NO: 235208 - RNA, 19 nt, Artificial Sequence
  Description of Artificial Sequence: Synthetic oligonucleotide
  Sense strand starting at position 3163 SEQ ID NO: 3028
gucaauugaugagagagga

SEQ ID NO: 235209 - RNA, 19 nt, Artificial Sequence
  Description of Artificial Sequence: Synthetic oligonucleotide
  Antisense strand to SEQ ID NO: 235208
uccucucucaucaauugac

SEQ ID NO: 235210 - RNA, 19 nt, Artificial Sequence
  Description of Artificial Sequence: Synthetic oligonucleotide
  Sense strand starting at position 3187 SEQ ID NO: 3028
agaugacauuugggcugau

SEQ ID NO: 235211 - RNA, 19 nt, Artificial Sequence
  Description of Artificial Sequence: Synthetic oligonucleotide
  Antisense strand to SEQ ID NO: 235210
aucagcccaaaugucaucu

SEQ ID NO: 235212 - RNA, 19 nt, Artificial Sequence
  Description of Artificial Sequence: Synthetic oligonucleotide
  Sense strand starting at position 3308 SEQ ID NO: 3028
ugcagcuaaaguugagaaa

SEQ ID NO: 235213 - RNA, 19 nt, Artificial Sequence
  Description of Artificial Sequence: Synthetic oligonucleotide
  Antisense strand to SEQ ID NO: 235212
uuucucaacuuuagcugca

SEQ ID NO: 235214 - RNA, 19 nt, Artificial Sequence
  Description of Artificial Sequence: Synthetic oligonucleotide
  Sense strand starting at position 3499 SEQ ID NO: 3028
gcauuugacucagugcacu

SEQ ID NO: 235215 - RNA, 19 nt, Artificial Sequence
  Description of Artificial Sequence: Synthetic oligonucleotide
  Antisense strand to SEQ ID NO: 235214
agugcacugagucaaaugc

SEQ ID NO: 235216 - RNA, 19 nt, Artificial Sequence
  Description of Artificial Sequence: Synthetic oligonucleotide
  Sense strand starting at position 3616 SEQ ID NO: 3028
cuguuagugagcugggaca

SEQ ID NO: 235217 - RNA, 19 nt, Artificial Sequence
  Description of Artificial Sequence: Synthetic oligonucleotide
  Antisense strand to SEQ ID NO: 235216
ugucccagcucacuaacag

SEQ ID NO: 235218 - RNA, 19 nt, Artificial Sequence
  Description of Artificial Sequence: Synthetic oligonucleotide
  Sense strand starting at position 3646 SEQ ID NO: 3028
cugccuuuggacuagaacu

SEQ ID NO: 235219 - RNA, 19 nt, Artificial Sequence
  Description of Artificial Sequence: Synthetic oligonucleotide
  Antisense strand to SEQ ID NO: 235218
aguucuaguccaaaggcag

SEQ ID NO: 235220 - RNA, 19 nt, Artificial Sequence
  Description of Artificial Sequence: Synthetic oligonucleotide
  Sense strand starting at position 3662 SEQ ID NO: 3028
acuuuagauucucuggcuu

SEQ ID NO: 235221 - RNA, 19 nt, Artificial Sequence
  Description of Artificial Sequence: Synthetic oligonucleotide
  Antisense strand to SEQ ID NO: 235220
aagccagagaaucuaaagu

SEQ ID NO: 235222 - RNA, 19 nt, Artificial Sequence
  Description of Artificial Sequence: Synthetic oligonucleotide
  Sense strand starting at position 3753 SEQ ID NO: 3028
ucagacugagagugauguu

SEQ ID NO: 235223 - RNA, 19 nt, Artificial Sequence
  Description of Artificial Sequence: Synthetic oligonucleotide
  Antisense strand to SEQ ID NO: 235222
aacaucacucucagucuga

SEQ ID NO: 235224 - RNA, 19 nt, Artificial Sequence
  Description of Artificial Sequence: Synthetic oligonucleotide
  Sense strand starting at position 3792 SEQ ID NO: 3028
ggccuuuggacucagaaug

SEQ ID NO: 235225 - RNA, 19 nt, Artificial Sequence
  Description of Artificial Sequence: Synthetic oligonucleotide
  Antisense strand to SEQ ID NO: 235224
cauucugaguccaaaggcc

SEQ ID NO: 235226 - RNA, 19 nt, Artificial Sequence
  Description of Artificial Sequence: Synthetic oligonucleotide
  Sense strand starting at position 3804 SEQ ID NO: 3028
cagaaugugccauguuacu

SEQ ID NO: 235227 - RNA, 19 nt, Artificial Sequence
  Description of Artificial Sequence: Synthetic oligonucleotide
  Antisense strand to SEQ ID NO: 235226
aguaacauggcacauucug

SEQ ID NO: 235228 - RNA, 19 nt, Artificial Sequence
  Description of Artificial Sequence: Synthetic oligonucleotide
  Sense strand starting at position 3857 SEQ ID NO: 3028
gacugagguuucucagucu

SEQ ID NO: 235229 - RNA, 19 nt, Artificial Sequence
  Description of Artificial Sequence: Synthetic oligonucleotide
  Antisense strand to SEQ ID NO: 235228
agacugagaaaccucaguc

SEQ ID NO: 235230 - RNA, 19 nt, Artificial Sequence
  Description of Artificial Sequence: Synthetic oligonucleotide
  Sense strand starting at position 3860 SEQ ID NO: 3028
ugagguuucucagucucca

SEQ ID NO: 235231 - RNA, 19 nt, Artificial Sequence
  Description of Artificial Sequence: Synthetic oligonucleotide
  Antisense strand to SEQ ID NO: 235230
uggagacugagaaaccuca

SEQ ID NO: 235232 - RNA, 19 nt, Artificial Sequence
  Description of Artificial Sequence: Synthetic oligonucleotide
  Sense strand starting at position 3978 SEQ ID NO: 3028
ucuacaacuugugugacau

SEQ ID NO: 235233 - RNA, 19 nt, Artificial Sequence
  Description of Artificial Sequence: Synthetic oligonucleotide
  Antisense strand to SEQ ID NO: 235232
augucacacaaguuguaga

SEQ ID NO: 235234 - RNA, 19 nt, Artificial Sequence
  Description of Artificial Sequence: Synthetic oligonucleotide
  Sense strand starting at position 3979 SEQ ID NO: 3028
cuacaacuugugugacauu

SEQ ID NO: 235235 - RNA, 19 nt, Artificial Sequence
  Description of Artificial Sequence: Synthetic oligonucleotide
  Antisense strand to SEQ ID NO: 235234
aaugucacacaaguuguag

SEQ ID NO: 235236 - RNA, 19 nt, Artificial Sequence
  Description of Artificial Sequence: Synthetic oligonucleotide
  Sense strand starting at position 160 SEQ ID NO: 3029
agagcuguccuggguccua

SEQ ID NO: 235237 - RNA, 19 nt, Artificial Sequence
  Description of Artificial Sequence: Synthetic oligonucleotide
  Antisense strand to SEQ ID NO: 235236
uaggacccaggacagcucu

SEQ ID NO: 235238 - RNA, 19 nt, Artificial Sequence
  Description of Artificial Sequence: Synthetic oligonucleotide
  Sense strand starting at position 201 SEQ ID NO: 3029
ggcacacagcaguaaucau

SEQ ID NO: 235239 - RNA, 19 nt, Artificial Sequence
  Description of Artificial Sequence: Synthetic oligonucleotide
  Antisense strand to SEQ ID NO: 235238
augauuacugcugugugcc

SEQ ID NO: 235240 - RNA, 19 nt, Artificial Sequence
  Description of Artificial Sequence: Synthetic oligonucleotide
  Sense strand starting at position 208 SEQ ID NO: 3029
agcaguaaucauggcucau

SEQ ID NO: 235241 - RNA, 19 nt, Artificial Sequence
  Description of Artificial Sequence: Synthetic oligonucleotide
  Antisense strand to SEQ ID NO: 235240
augagccaugauuacugcu

SEQ ID NO: 235242 - RNA, 19 nt, Artificial Sequence
  Description of Artificial Sequence: Synthetic oligonucleotide
  Sense strand starting at position 210 SEQ ID NO: 3029
caguaaucauggcucauga

SEQ ID NO: 235243 - RNA, 19 nt, Artificial Sequence
  Description of Artificial Sequence: Synthetic oligonucleotide
  Antisense strand to SEQ ID NO: 235242
ucaugagccaugauuacug

SEQ ID NO: 235244 - RNA, 19 nt, Artificial Sequence
  Description of Artificial Sequence: Synthetic oligonucleotide
  Sense strand starting at position 261 SEQ ID NO: 3029
gacagaugcuugucaccca

SEQ ID NO: 235245 - RNA, 19 nt, Artificial Sequence
  Description of Artificial Sequence: Synthetic oligonucleotide
  Antisense strand to SEQ ID NO: 235244
ugggugacaagcaucuguc

SEQ ID NO: 235246 - RNA, 19 nt, Artificial Sequence
  Description of Artificial Sequence: Synthetic oligonucleotide
  Sense strand starting at position 262 SEQ ID NO: 3029
acagaugcuugucacccaa

SEQ ID NO: 235247 - RNA, 19 nt, Artificial Sequence
  Description of Artificial Sequence: Synthetic oligonucleotide
  Antisense strand to SEQ ID NO: 235246
uugggugacaagcaucugu

SEQ ID NO: 235248 - RNA, 19 nt, Artificial Sequence
  Description of Artificial Sequence: Synthetic oligonucleotide
  Sense strand starting at position 475 SEQ ID NO: 3029
ccauaaucuuuauugggca

SEQ ID NO: 235249 - RNA, 19 nt, Artificial Sequence
  Description of Artificial Sequence: Synthetic oligonucleotide
  Antisense strand to SEQ ID NO: 235248
ugcccaauaaagauuaugg

SEQ ID NO: 235250 - RNA, 19 nt, Artificial Sequence
  Description of Artificial Sequence: Synthetic oligonucleotide
  Sense strand starting at position 479 SEQ ID NO: 3029
aaucuuuauugggcaagga

SEQ ID NO: 235251 - RNA, 19 nt, Artificial Sequence
  Description of Artificial Sequence: Synthetic oligonucleotide
  Antisense strand to SEQ ID NO: 235250
uccuugcccaauaaagauu

SEQ ID NO: 235252 - RNA, 19 nt, Artificial Sequence
  Description of Artificial Sequence: Synthetic oligonucleotide
  Sense strand starting at position 493 SEQ ID NO: 3029
aaggaugccuggucucaag

SEQ ID NO: 235253 - RNA, 19 nt, Artificial Sequence
  Description of Artificial Sequence: Synthetic oligonucleotide
  Antisense strand to SEQ ID NO: 235252
cuugagaccaggcauccuu

SEQ ID NO: 235254 - RNA, 19 nt, Artificial Sequence
  Description of Artificial Sequence: Synthetic oligonucleotide
  Sense strand starting at position 2779 SEQ ID NO: 3029
agccgauagcccuguguca

SEQ ID NO: 235255 - RNA, 19 nt, Artificial Sequence
  Description of Artificial Sequence: Synthetic oligonucleotide
  Antisense strand to SEQ ID NO: 235254
ugacacagggcuaucggcu

SEQ ID NO: 235256 - RNA, 19 nt, Artificial Sequence
  Description of Artificial Sequence: Synthetic oligonucleotide
  Sense strand starting at position 2780 SEQ ID NO: 3029
gccgauagcccugugucau

SEQ ID NO: 235257 - RNA, 19 nt, Artificial Sequence
  Description of Artificial Sequence: Synthetic oligonucleotide
  Antisense strand to SEQ ID NO: 235256
augacacagggcuaucggc

SEQ ID NO: 235258 - RNA, 19 nt, Artificial Sequence
  Description of Artificial Sequence: Synthetic oligonucleotide
  Sense strand starting at position 2781 SEQ ID NO: 3029
ccgauagcccugugucaug

SEQ ID NO: 235259 - RNA, 19 nt, Artificial Sequence
  Description of Artificial Sequence: Synthetic oligonucleotide
  Antisense strand to SEQ ID NO: 235258
caugacacagggcuaucgg

SEQ ID NO: 235260 - RNA, 19 nt, Artificial Sequence
  Description of Artificial Sequence: Synthetic oligonucleotide
  Sense strand starting at position 2786 SEQ ID NO: 3029
agcccugugucauguaaac

SEQ ID NO: 235261 - RNA, 19 nt, Artificial Sequence
  Description of Artificial Sequence: Synthetic oligonucleotide
  Antisense strand to SEQ ID NO: 235260
guuuacaugacacagggcu

SEQ ID NO: 235262 - RNA, 19 nt, Artificial Sequence
  Description of Artificial Sequence: Synthetic oligonucleotide
  Sense strand starting at position 2842 SEQ ID NO: 3029
gcguccauucugcagauga

SEQ ID NO: 235263 - RNA, 19 nt, Artificial Sequence
  Description of Artificial Sequence: Synthetic oligonucleotide
  Antisense strand to SEQ ID NO: 235262
ucaucugcagaauggacgc

SEQ ID NO: 235264 - RNA, 19 nt, Artificial Sequence
  Description of Artificial Sequence: Synthetic oligonucleotide
  Sense strand starting at position 2895 SEQ ID NO: 3029
ggucuccucucggaucauu

SEQ ID NO: 235265 - RNA, 19 nt, Artificial Sequence
  Description of Artificial Sequence: Synthetic oligonucleotide
  Antisense strand to SEQ ID NO: 235264
aaugauccgagaggagacc

SEQ ID NO: 235266 - RNA, 19 nt, Artificial Sequence
  Description of Artificial Sequence: Synthetic oligonucleotide
  Sense strand starting at position 2903 SEQ ID NO: 3029
cucggaucauuacaagaac

SEQ ID NO: 235267 - RNA, 19 nt, Artificial Sequence
  Description of Artificial Sequence: Synthetic oligonucleotide
  Antisense strand to SEQ ID NO: 235266
guucuuguaaugauccgag

SEQ ID NO: 235268 - RNA, 19 nt, Artificial Sequence
  Description of Artificial Sequence: Synthetic oligonucleotide
  Sense strand starting at position 3412 SEQ ID NO: 3029
gcgcccucugcagguaauu

SEQ ID NO: 235269 - RNA, 19 nt, Artificial Sequence
  Description of Artificial Sequence: Synthetic oligonucleotide
  Antisense strand to SEQ ID NO: 235268
aauuaccugcagagggcgc

SEQ ID NO: 235270 - RNA, 19 nt, Artificial Sequence
  Description of Artificial Sequence: Synthetic oligonucleotide
  Sense strand starting at position 3449 SEQ ID NO: 3029
ggcugaucucgcggagcca

SEQ ID NO: 235271 - RNA, 19 nt, Artificial Sequence
  Description of Artificial Sequence: Synthetic oligonucleotide
  Antisense strand to SEQ ID NO: 235270
uggcuccgcgagaucagcc

SEQ ID NO: 235272 - RNA, 19 nt, Artificial Sequence
  Description of Artificial Sequence: Synthetic oligonucleotide
  Sense strand starting at position 3582 SEQ ID NO: 3029
gcuggaauuacauauguag

SEQ ID NO: 235273 - RNA, 19 nt, Artificial Sequence
  Description of Artificial Sequence: Synthetic oligonucleotide
  Antisense strand to SEQ ID NO: 235272
cuacauauguaauuccagc

SEQ ID NO: 235274 - RNA, 19 nt, Artificial Sequence
  Description of Artificial Sequence: Synthetic oligonucleotide
  Sense strand starting at position 3591 SEQ ID NO: 3029
acauauguagcugggauua

SEQ ID NO: 235275 - RNA, 19 nt, Artificial Sequence
  Description of Artificial Sequence: Synthetic oligonucleotide
  Antisense strand to SEQ ID NO: 235274
uaaucccagcuacauaugu

SEQ ID NO: 235276 - RNA, 19 nt, Artificial Sequence
  Description of Artificial Sequence: Synthetic oligonucleotide
  Sense strand starting at position 3796 SEQ ID NO: 3029
ccucucuucugaggugacu

SEQ ID NO: 235277 - RNA, 19 nt, Artificial Sequence
  Description of Artificial Sequence: Synthetic oligonucleotide
  Antisense strand to SEQ ID NO: 235276
agucaccucagaagagagg

SEQ ID NO: 235278 - RNA, 19 nt, Artificial Sequence
  Description of Artificial Sequence: Synthetic oligonucleotide
  Sense strand starting at position 3872 SEQ ID NO: 3029
accacuucucagcgagaag

SEQ ID NO: 235279 - RNA, 19 nt, Artificial Sequence
  Description of Artificial Sequence: Synthetic oligonucleotide
  Antisense strand to SEQ ID NO: 235278
cuucucgcugagaaguggu

SEQ ID NO: 235280 - RNA, 19 nt, Artificial Sequence
  Description of Artificial Sequence: Synthetic oligonucleotide
  Sense strand starting at position 3873 SEQ ID NO: 3029
ccacuucucagcgagaaga

SEQ ID NO: 235281 - RNA, 19 nt, Artificial Sequence
  Description of Artificial Sequence: Synthetic oligonucleotide
  Antisense strand to SEQ ID NO: 235280
ucuucucgcugagaagugg

SEQ ID NO: 235282 - RNA, 19 nt, Artificial Sequence
  Description of Artificial Sequence: Synthetic oligonucleotide
  Sense strand starting at position 3954 SEQ ID NO: 3029
gcagaaaugcuuugcucua

SEQ ID NO: 235283 - RNA, 19 nt, Artificial Sequence
  Description of Artificial Sequence: Synthetic oligonucleotide
  Antisense strand to SEQ ID NO: 235282
uagagcaaagcauuucugc

SEQ ID NO: 235284 - RNA, 19 nt, Artificial Sequence
  Description of Artificial Sequence: Synthetic oligonucleotide
  Sense strand starting at position 3956 SEQ ID NO: 3029
agaaaugcuuugcucuaag

SEQ ID NO: 235285 - RNA, 19 nt, Artificial Sequence
  Description of Artificial Sequence: Synthetic oligonucleotide
  Antisense strand to SEQ ID NO: 235284
cuuagagcaaagcauuucu

SEQ ID NO: 235286 - RNA, 19 nt, Artificial Sequence
  Description of Artificial Sequence: Synthetic oligonucleotide
  Sense strand starting at position 67 SEQ ID NO: 3030
acagcuggccucugaucaa

SEQ ID NO: 235287 - RNA, 19 nt, Artificial Sequence
  Description of Artificial Sequence: Synthetic oligonucleotide
  Antisense strand to SEQ ID NO: 235286
uugaucagaggccagcugu

SEQ ID NO: 235288 - RNA, 19 nt, Artificial Sequence
  Description of Artificial Sequence: Synthetic oligonucleotide
  Sense strand starting at position 70 SEQ ID NO: 3030
gcuggccucugaucaacua

SEQ ID NO: 235289 - RNA, 19 nt, Artificial Sequence
  Description of Artificial Sequence: Synthetic oligonucleotide
  Antisense strand to SEQ ID NO: 235288
uaguugaucagaggccagc

SEQ ID NO: 235290 - RNA, 19 nt, Artificial Sequence
  Description of Artificial Sequence: Synthetic oligonucleotide
  Sense strand starting at position 81 SEQ ID NO: 3030
aucaacuaucaguguggua

SEQ ID NO: 235291 - RNA, 19 nt, Artificial Sequence
  Description of Artificial Sequence: Synthetic oligonucleotide
  Antisense strand to SEQ ID NO: 235290
uaccacacugauaguugau

SEQ ID NO: 235292 - RNA, 19 nt, Artificial Sequence
  Description of Artificial Sequence: Synthetic oligonucleotide
  Sense strand starting at position 137 SEQ ID NO: 3030
ucugacuugccgugacaag

SEQ ID NO: 235293 - RNA, 19 nt, Artificial Sequence
  Description of Artificial Sequence: Synthetic oligonucleotide
  Antisense strand to SEQ ID NO: 235292
cuugucacggcaagucaga

SEQ ID NO: 235294 - RNA, 19 nt, Artificial Sequence
  Description of Artificial Sequence: Synthetic oligonucleotide
  Sense strand starting at position 138 SEQ ID NO: 3030
cugacuugccgugacaagu

SEQ ID NO: 235295 - RNA, 19 nt, Artificial Sequence
  Description of Artificial Sequence: Synthetic oligonucleotide
  Antisense strand to SEQ ID NO: 235294
acuugucacggcaagucag

SEQ ID NO: 235296 - RNA, 19 nt, Artificial Sequence
  Description of Artificial Sequence: Synthetic oligonucleotide
  Sense strand starting at position 148 SEQ ID NO: 3030
gugacaaguuccuuucccu

SEQ ID NO: 235297 - RNA, 19 nt, Artificial Sequence
  Description of Artificial Sequence: Synthetic oligonucleotide
  Antisense strand to SEQ ID NO: 235296
agggaaaggaacuugucac

SEQ ID NO: 235298 - RNA, 19 nt, Artificial Sequence
  Description of Artificial Sequence: Synthetic oligonucleotide
  Sense strand starting at position 2216 SEQ ID NO: 3030
gggugccaccagugaaaua

SEQ ID NO: 235299 - RNA, 19 nt, Artificial Sequence
  Description of Artificial Sequence: Synthetic oligonucleotide
  Antisense strand to SEQ ID NO: 235298
uauuucacugguggcaccc

SEQ ID NO: 235300 - RNA, 19 nt, Artificial Sequence
  Description of Artificial Sequence: Synthetic oligonucleotide
  Sense strand starting at position 2227 SEQ ID NO: 3030
gugaaauagacuggccagu

SEQ ID NO: 235301 - RNA, 19 nt, Artificial Sequence
  Description of Artificial Sequence: Synthetic oligonucleotide
  Antisense strand to SEQ ID NO: 235300
acuggccagucuauuucac

SEQ ID NO: 235302 - RNA, 19 nt, Artificial Sequence
  Description of Artificial Sequence: Synthetic oligonucleotide
  Sense strand starting at position 2233 SEQ ID NO: 3030
uagacuggccagugaaaua

SEQ ID NO: 235303 - RNA, 19 nt, Artificial Sequence
  Description of Artificial Sequence: Synthetic oligonucleotide
  Antisense strand to SEQ ID NO: 235302
uauuucacuggccagucua

SEQ ID NO: 235304 - RNA, 19 nt, Artificial Sequence
  Description of Artificial Sequence: Synthetic oligonucleotide
  Sense strand starting at position 2300 SEQ ID NO: 3030
ugagauggcucagggaaga

SEQ ID NO: 235305 - RNA, 19 nt, Artificial Sequence
  Description of Artificial Sequence: Synthetic oligonucleotide
  Antisense strand to SEQ ID NO: 235304
ucuucccugagccaucuca

SEQ ID NO: 235306 - RNA, 19 nt, Artificial Sequence
  Description of Artificial Sequence: Synthetic oligonucleotide
  Sense strand starting at position 2621 SEQ ID NO: 3030
ggaagaggccucugaagug

SEQ ID NO: 235307 - RNA, 19 nt, Artificial Sequence
  Description of Artificial Sequence: Synthetic oligonucleotide
  Antisense strand to SEQ ID NO: 235306
cacuucagaggccucuucc

SEQ ID NO: 235308 - RNA, 19 nt, Artificial Sequence
  Description of Artificial Sequence: Synthetic oligonucleotide
  Sense strand starting at position 2896 SEQ ID NO: 3030
aggaaagaucgauguaacc

SEQ ID NO: 235309 - RNA, 19 nt, Artificial Sequence
  Description of Artificial Sequence: Synthetic oligonucleotide
  Antisense strand to SEQ ID NO: 235308
gguuacaucgaucuuuccu

SEQ ID NO: 235310 - RNA, 19 nt, Artificial Sequence
  Description of Artificial Sequence: Synthetic oligonucleotide
  Sense strand starting at position 2963 SEQ ID NO: 3030
ggucauuacugcgggagga

SEQ ID NO: 235311 - RNA, 19 nt, Artificial Sequence
  Description of Artificial Sequence: Synthetic oligonucleotide
  Antisense strand to SEQ ID NO: 235310
uccucccgcaguaaugacc

SEQ ID NO: 235312 - RNA, 19 nt, Artificial Sequence
  Description of Artificial Sequence: Synthetic oligonucleotide
  Sense strand starting at position 2964 SEQ ID NO: 3030
gucauuacugcgggaggaa

SEQ ID NO: 235313 - RNA, 19 nt, Artificial Sequence
  Description of Artificial Sequence: Synthetic oligonucleotide
  Antisense strand to SEQ ID NO: 235312
uuccucccgcaguaaugac

SEQ ID NO: 235314 - RNA, 19 nt, Artificial Sequence
  Description of Artificial Sequence: Synthetic oligonucleotide
  Sense strand starting at position 3001 SEQ ID NO: 3030
gagugaugcucuggacccu

SEQ ID NO: 235315 - RNA, 19 nt, Artificial Sequence
  Description of Artificial Sequence: Synthetic oligonucleotide
  Antisense strand to SEQ ID NO: 235314
aggguccagagcaucacuc

SEQ ID NO: 235316 - RNA, 19 nt, Artificial Sequence
  Description of Artificial Sequence: Synthetic oligonucleotide
  Sense strand starting at position 3257 SEQ ID NO: 3030
caguaaagaacguggguaa

SEQ ID NO: 235317 - RNA, 19 nt, Artificial Sequence
  Description of Artificial Sequence: Synthetic oligonucleotide
  Antisense strand to SEQ ID NO: 235316
uuacccacguucuuuacug

SEQ ID NO: 235318 - RNA, 19 nt, Artificial Sequence
  Description of Artificial Sequence: Synthetic oligonucleotide
  Sense strand starting at position 3258 SEQ ID NO: 3030
aguaaagaacguggguaaa

SEQ ID NO: 235319 - RNA, 19 nt, Artificial Sequence
  Description of Artificial Sequence: Synthetic oligonucleotide
  Antisense strand to SEQ ID NO: 235318
uuuacccacguucuuuacu

SEQ ID NO: 235320 - RNA, 19 nt, Artificial Sequence
  Description of Artificial Sequence: Synthetic oligonucleotide
  Sense strand starting at position 3283 SEQ ID NO: 3030
ggcuuuggagugcgacaaa

SEQ ID NO: 235321 - RNA, 19 nt, Artificial Sequence
  Description of Artificial Sequence: Synthetic oligonucleotide
  Antisense strand to SEQ ID NO: 235320
uuugucgcacuccaaagcc

SEQ ID NO: 235322 - RNA, 19 nt, Artificial Sequence
  Description of Artificial Sequence: Synthetic oligonucleotide
  Sense strand starting at position 3286 SEQ ID NO: 3030
uuuggagugcgacaaaucu

SEQ ID NO: 235323 - RNA, 19 nt, Artificial Sequence
  Description of Artificial Sequence: Synthetic oligonucleotide
  Antisense strand to SEQ ID NO: 235322
agauuugucgcacuccaaa

SEQ ID NO: 235324 - RNA, 19 nt, Artificial Sequence
  Description of Artificial Sequence: Synthetic oligonucleotide
  Sense strand starting at position 3293 SEQ ID NO: 3030
ugcgacaaaucuggcugaa

SEQ ID NO: 235325 - RNA, 19 nt, Artificial Sequence
  Description of Artificial Sequence: Synthetic oligonucleotide
  Antisense strand to SEQ ID NO: 235324
uucagccagauuugucgca

SEQ ID NO: 235326 - RNA, 19 nt, Artificial Sequence
  Description of Artificial Sequence: Synthetic oligonucleotide
  Sense strand starting at position 3295 SEQ ID NO: 3030
cgacaaaucuggcugaauc

SEQ ID NO: 235327 - RNA, 19 nt, Artificial Sequence
  Description of Artificial Sequence: Synthetic oligonucleotide
  Antisense strand to SEQ ID NO: 235326
gauucagccagauuugucg

SEQ ID NO: 235328 - RNA, 19 nt, Artificial Sequence
  Description of Artificial Sequence: Synthetic oligonucleotide
  Sense strand starting at position 3468 SEQ ID NO: 3030
gcaccaugcucagggaaga

SEQ ID NO: 235329 - RNA, 19 nt, Artificial Sequence
  Description of Artificial Sequence: Synthetic oligonucleotide
  Antisense strand to SEQ ID NO: 235328
ucuucccugagcauggugc

SEQ ID NO: 235330 - RNA, 19 nt, Artificial Sequence
  Description of Artificial Sequence: Synthetic oligonucleotide
  Sense strand starting at position 3704 SEQ ID NO: 3030
gcccgagcgccauuauuaa

SEQ ID NO: 235331 - RNA, 19 nt, Artificial Sequence
  Description of Artificial Sequence: Synthetic oligonucleotide
  Antisense strand to SEQ ID NO: 235330
uuaauaauggcgcucgggc

SEQ ID NO: 235332 - RNA, 19 nt, Artificial Sequence
  Description of Artificial Sequence: Synthetic oligonucleotide
  Sense strand starting at position 210 SEQ ID NO: 3031
gguucuugcccguagacgu

SEQ ID NO: 235333 - RNA, 19 nt, Artificial Sequence
  Description of Artificial Sequence: Synthetic oligonucleotide
  Antisense strand to SEQ ID NO: 235332
acgucuacgggcaagaacc

SEQ ID NO: 235334 - RNA, 19 nt, Artificial Sequence
  Description of Artificial Sequence: Synthetic oligonucleotide
  Sense strand starting at position 311 SEQ ID NO: 3031
gucagauugucauccgagc

SEQ ID NO: 235335 - RNA, 19 nt, Artificial Sequence
  Description of Artificial Sequence: Synthetic oligonucleotide
  Antisense strand to SEQ ID NO: 235334
gcucggaugacaaucugac

SEQ ID NO: 235336 - RNA, 19 nt, Artificial Sequence
  Description of Artificial Sequence: Synthetic oligonucleotide
  Sense strand starting at position 317 SEQ ID NO: 3031
uugucauccgagcuguagu

SEQ ID NO: 235337 - RNA, 19 nt, Artificial Sequence
  Description of Artificial Sequence: Synthetic oligonucleotide
  Antisense strand to SEQ ID NO: 235336
acuacagcucggaugacaa

SEQ ID NO: 235338 - RNA, 19 nt, Artificial Sequence
  Description of Artificial Sequence: Synthetic oligonucleotide
  Sense strand starting at position 351 SEQ ID NO: 3031
gcgagaagcucuccuccuu

SEQ ID NO: 235339 - RNA, 19 nt, Artificial Sequence
  Description of Artificial Sequence: Synthetic oligonucleotide
  Antisense strand to SEQ ID NO: 235338
aaggaggagagcuucucgc

SEQ ID NO: 235340 - RNA, 19 nt, Artificial Sequence
  Description of Artificial Sequence: Synthetic oligonucleotide
  Sense strand starting at position 534 SEQ ID NO: 3031
agcggauugucuuucuaug

SEQ ID NO: 235341 - RNA, 19 nt, Artificial Sequence
  Description of Artificial Sequence: Synthetic oligonucleotide
  Antisense strand to SEQ ID NO: 235340
cauagaaagacaauccgcu

SEQ ID NO: 235342 - RNA, 19 nt, Artificial Sequence
  Description of Artificial Sequence: Synthetic oligonucleotide
  Sense strand starting at position 536 SEQ ID NO: 3031
cggauugucuuucuaugac

SEQ ID NO: 235343 - RNA, 19 nt, Artificial Sequence
  Description of Artificial Sequence: Synthetic oligonucleotide
  Antisense strand to SEQ ID NO: 235342
gucauagaaagacaauccg

SEQ ID NO: 235344 - RNA, 19 nt, Artificial Sequence
  Description of Artificial Sequence: Synthetic oligonucleotide
  Sense strand starting at position 539 SEQ ID NO: 3031
auugucuuucuaugacauu

SEQ ID NO: 235345 - RNA, 19 nt, Artificial Sequence
  Description of Artificial Sequence: Synthetic oligonucleotide
  Antisense strand to SEQ ID NO: 235344
aaugucauagaaagacaau

SEQ ID NO: 235346 - RNA, 19 nt, Artificial Sequence
  Description of Artificial Sequence: Synthetic oligonucleotide
  Sense strand starting at position 564 SEQ ID NO: 3031
uugugauuuccuggccuuu

SEQ ID NO: 235347 - RNA, 19 nt, Artificial Sequence
  Description of Artificial Sequence: Synthetic oligonucleotide
  Antisense strand to SEQ ID NO: 235346
aaaggccaggaaaucacaa

SEQ ID NO: 235348 - RNA, 19 nt, Artificial Sequence
  Description of Artificial Sequence: Synthetic oligonucleotide
  Sense strand starting at position 649 SEQ ID NO: 3031
gcccuuugcccagaaccau

SEQ ID NO: 235349 - RNA, 19 nt, Artificial Sequence
  Description of Artificial Sequence: Synthetic oligonucleotide
  Antisense strand to SEQ ID NO: 235348
augguucugggcaaagggc

SEQ ID NO: 235350 - RNA, 19 nt, Artificial Sequence
  Description of Artificial Sequence: Synthetic oligonucleotide
  Sense strand starting at position 737 SEQ ID NO: 3031
gcgcgaggcccaagagauu

SEQ ID NO: 235351 - RNA, 19 nt, Artificial Sequence
  Description of Artificial Sequence: Synthetic oligonucleotide
  Antisense strand to SEQ ID NO: 235350
aaucucuugggccucgcgc

SEQ ID NO: 235352 - RNA, 19 nt, Artificial Sequence
  Description of Artificial Sequence: Synthetic oligonucleotide
  Sense strand starting at position 746 SEQ ID NO: 3031
ccaagagauugcccgcuuu

SEQ ID NO: 235353 - RNA, 19 nt, Artificial Sequence
  Description of Artificial Sequence: Synthetic oligonucleotide
  Antisense strand to SEQ ID NO: 235352
aaagcgggcaaucucuugg

SEQ ID NO: 235354 - RNA, 19 nt, Artificial Sequence
  Description of Artificial Sequence: Synthetic oligonucleotide
  Sense strand starting at position 915 SEQ ID NO: 3031
gacagacaacguuggucaa

SEQ ID NO: 235355 - RNA, 19 nt, Artificial Sequence
  Description of Artificial Sequence: Synthetic oligonucleotide
  Antisense strand to SEQ ID NO: 235354
uugaccaacguugucuguc

SEQ ID NO: 235356 - RNA, 19 nt, Artificial Sequence
  Description of Artificial Sequence: Synthetic oligonucleotide
  Sense strand starting at position 916 SEQ ID NO: 3031
acagacaacguuggucaaa

SEQ ID NO: 235357 - RNA, 19 nt, Artificial Sequence
  Description of Artificial Sequence: Synthetic oligonucleotide
  Antisense strand to SEQ ID NO: 235356
uuugaccaacguugucugu

SEQ ID NO: 235358 - RNA, 19 nt, Artificial Sequence
  Description of Artificial Sequence: Synthetic oligonucleotide
  Sense strand starting at position 925 SEQ ID NO: 3031
guuggucaaagggauguuu

SEQ ID NO: 235359 - RNA, 19 nt, Artificial Sequence
  Description of Artificial Sequence: Synthetic oligonucleotide
  Antisense strand to SEQ ID NO: 235358
aaacaucccuuugaccaac

SEQ ID NO: 235360 - RNA, 19 nt, Artificial Sequence
  Description of Artificial Sequence: Synthetic oligonucleotide
  Sense strand starting at position 1009 SEQ ID NO: 3031
ccguuucucccagacaagu

SEQ ID NO: 235361 - RNA, 19 nt, Artificial Sequence
  Description of Artificial Sequence: Synthetic oligonucleotide
  Antisense strand to SEQ ID NO: 235360
acuugucugggagaaacgg

SEQ ID NO: 235362 - RNA, 19 nt, Artificial Sequence
  Description of Artificial Sequence: Synthetic oligonucleotide
  Sense strand starting at position 1171 SEQ ID NO: 3031
ccaaacgcaucgucagaua

SEQ ID NO: 235363 - RNA, 19 nt, Artificial Sequence
  Description of Artificial Sequence: Synthetic oligonucleotide
  Antisense strand to SEQ ID NO: 235362
uaucugacgaugcguuugg

SEQ ID NO: 235364 - RNA, 19 nt, Artificial Sequence
  Description of Artificial Sequence: Synthetic oligonucleotide
  Sense strand starting at position 1176 SEQ ID NO: 3031
cgcaucgucagauagauau

SEQ ID NO: 235365 - RNA, 19 nt, Artificial Sequence
  Description of Artificial Sequence: Synthetic oligonucleotide
  Antisense strand to SEQ ID NO: 235364
auaucuaucugacgaugcg

SEQ ID NO: 235366 - RNA, 19 nt, Artificial Sequence
  Description of Artificial Sequence: Synthetic oligonucleotide
  Sense strand starting at position 2730 SEQ ID NO: 3031
uacuguauuugccauggaa

SEQ ID NO: 235367 - RNA, 19 nt, Artificial Sequence
  Description of Artificial Sequence: Synthetic oligonucleotide
  Antisense strand to SEQ ID NO: 235366
uuccauggcaaauacagua

SEQ ID NO: 235368 - RNA, 19 nt, Artificial Sequence
  Description of Artificial Sequence: Synthetic oligonucleotide
  Sense strand starting at position 3134 SEQ ID NO: 3031
guugcugugccuccagauu

SEQ ID NO: 235369 - RNA, 19 nt, Artificial Sequence
  Description of Artificial Sequence: Synthetic oligonucleotide
  Antisense strand to SEQ ID NO: 235368
aaucuggaggcacagcaac

SEQ ID NO: 235370 - RNA, 19 nt, Artificial Sequence
  Description of Artificial Sequence: Synthetic oligonucleotide
  Sense strand starting at position 3140 SEQ ID NO: 3031
gugccuccagauuguauaa

SEQ ID NO: 235371 - RNA, 19 nt, Artificial Sequence
  Description of Artificial Sequence: Synthetic oligonucleotide
  Antisense strand to SEQ ID NO: 235370
uuauacaaucuggaggcac

SEQ ID NO: 235372 - RNA, 19 nt, Artificial Sequence
  Description of Artificial Sequence: Synthetic oligonucleotide
  Sense strand starting at position 3149 SEQ ID NO: 3031
gauuguauaacgugagauu

SEQ ID NO: 235373 - RNA, 19 nt, Artificial Sequence
  Description of Artificial Sequence: Synthetic oligonucleotide
  Antisense strand to SEQ ID NO: 235372
aaucucacguuauacaauc

SEQ ID NO: 235374 - RNA, 19 nt, Artificial Sequence
  Description of Artificial Sequence: Synthetic oligonucleotide
  Sense strand starting at position 3150 SEQ ID NO: 3031
auuguauaacgugagauua

SEQ ID NO: 235375 - RNA, 19 nt, Artificial Sequence
  Description of Artificial Sequence: Synthetic oligonucleotide
  Antisense strand to SEQ ID NO: 235374
uaaucucacguuauacaau

SEQ ID NO: 235376 - RNA, 19 nt, Artificial Sequence
  Description of Artificial Sequence: Synthetic oligonucleotide
  Sense strand starting at position 3158 SEQ ID NO: 3031
acgugagauuauccugaug

SEQ ID NO: 235377 - RNA, 19 nt, Artificial Sequence
  Description of Artificial Sequence: Synthetic oligonucleotide
  Antisense strand to SEQ ID NO: 235376
caucaggauaaucucacgu

SEQ ID NO: 235378 - RNA, 19 nt, Artificial Sequence
  Description of Artificial Sequence: Synthetic oligonucleotide
  Sense strand starting at position 3160 SEQ ID NO: 3031
gugagauuauccugaugaa

SEQ ID NO: 235379 - RNA, 19 nt, Artificial Sequence
  Description of Artificial Sequence: Synthetic oligonucleotide
  Antisense strand to SEQ ID NO: 235378
uucaucaggauaaucucac

SEQ ID NO: 235380 - RNA, 19 nt, Artificial Sequence
  Description of Artificial Sequence: Synthetic oligonucleotide
  Sense strand starting at position 3180 SEQ ID NO: 3031
gcuuuaugauguuugcuca

SEQ ID NO: 235381 - RNA, 19 nt, Artificial Sequence
  Description of Artificial Sequence: Synthetic oligonucleotide
  Antisense strand to SEQ ID NO: 235380
ugagcaaacaucauaaagc

SEQ ID NO: 235382 - RNA, 19 nt, Artificial Sequence
  Description of Artificial Sequence: Synthetic oligonucleotide
  Sense strand starting at position 3183 SEQ ID NO: 3031
uuaugauguuugcucaaau

SEQ ID NO: 235383 - RNA, 19 nt, Artificial Sequence
  Description of Artificial Sequence: Synthetic oligonucleotide
  Antisense strand to SEQ ID NO: 235382
auuugagcaaacaucauaa

SEQ ID NO: 235384 - RNA, 19 nt, Artificial Sequence
  Description of Artificial Sequence: Synthetic oligonucleotide
  Sense strand starting at position 3213 SEQ ID NO: 3031
uuuguaaauaggcgcuaau

SEQ ID NO: 235385 - RNA, 19 nt, Artificial Sequence
  Description of Artificial Sequence: Synthetic oligonucleotide
  Antisense strand to SEQ ID NO: 235384
auuagcgccuauuuacaaa

SEQ ID NO: 235386 - RNA, 19 nt, Artificial Sequence
  Description of Artificial Sequence: Synthetic oligonucleotide
  Sense strand starting at position 3216 SEQ ID NO: 3031
guaaauaggcgcuaauuaa

SEQ ID NO: 235387 - RNA, 19 nt, Artificial Sequence
  Description of Artificial Sequence: Synthetic oligonucleotide
  Antisense strand to SEQ ID NO: 235386
uuaauuagcgccuauuuac

SEQ ID NO: 235388 - RNA, 19 nt, Artificial Sequence
  Description of Artificial Sequence: Synthetic oligonucleotide
  Sense strand starting at position 3359 SEQ ID NO: 3031
cccuguucucgacaacggu

SEQ ID NO: 235389 - RNA, 19 nt, Artificial Sequence
  Description of Artificial Sequence: Synthetic oligonucleotide
  Antisense strand to SEQ ID NO: 235388
accguugucgagaacaggg

SEQ ID NO: 235390 - RNA, 19 nt, Artificial Sequence
  Description of Artificial Sequence: Synthetic oligonucleotide
  Sense strand starting at position 3362 SEQ ID NO: 3031
uguucucgacaacgguaaa

SEQ ID NO: 235391 - RNA, 19 nt, Artificial Sequence
  Description of Artificial Sequence: Synthetic oligonucleotide
  Antisense strand to SEQ ID NO: 235390
uuuaccguugucgagaaca

SEQ ID NO: 235392 - RNA, 19 nt, Artificial Sequence
  Description of Artificial Sequence: Synthetic oligonucleotide
  Sense strand starting at position 3390 SEQ ID NO: 3031
auuugaaaguaagggaauu

SEQ ID NO: 235393 - RNA, 19 nt, Artificial Sequence
  Description of Artificial Sequence: Synthetic oligonucleotide
  Antisense strand to SEQ ID NO: 235392
aauucccuuacuuucaaau

SEQ ID NO: 235394 - RNA, 19 nt, Artificial Sequence
  Description of Artificial Sequence: Synthetic oligonucleotide
  Sense strand starting at position 3496 SEQ ID NO: 3031
ggaaucacuucuugacaac

SEQ ID NO: 235395 - RNA, 19 nt, Artificial Sequence
  Description of Artificial Sequence: Synthetic oligonucleotide
  Antisense strand to SEQ ID NO: 235394
guugucaagaagugauucc

SEQ ID NO: 235396 - RNA, 19 nt, Artificial Sequence
  Description of Artificial Sequence: Synthetic oligonucleotide
  Sense strand starting at position 3638 SEQ ID NO: 3031
aaagaagggcauuguuagu

SEQ ID NO: 235397 - RNA, 19 nt, Artificial Sequence
  Description of Artificial Sequence: Synthetic oligonucleotide
  Antisense strand to SEQ ID NO: 235396
acuaacaaugcccuucuuu

SEQ ID NO: 235398 - RNA, 19 nt, Artificial Sequence
  Description of Artificial Sequence: Synthetic oligonucleotide
  Sense strand starting at position 3648 SEQ ID NO: 3031
auuguuaguucggucauua

SEQ ID NO: 235399 - RNA, 19 nt, Artificial Sequence
  Description of Artificial Sequence: Synthetic oligonucleotide
  Antisense strand to SEQ ID NO: 235398
uaaugaccgaacuaacaau

SEQ ID NO: 235400 - RNA, 19 nt, Artificial Sequence
  Description of Artificial Sequence: Synthetic oligonucleotide
  Sense strand starting at position 3700 SEQ ID NO: 3031
ggaguuggcccguguugga

SEQ ID NO: 235401 - RNA, 19 nt, Artificial Sequence
  Description of Artificial Sequence: Synthetic oligonucleotide
  Antisense strand to SEQ ID NO: 235400
uccaacacgggccaacucc

SEQ ID NO: 235402 - RNA, 19 nt, Artificial Sequence
  Description of Artificial Sequence: Synthetic oligonucleotide
  Sense strand starting at position 3710 SEQ ID NO: 3031
cguguuggacguguguuau

SEQ ID NO: 235403 - RNA, 19 nt, Artificial Sequence
  Description of Artificial Sequence: Synthetic oligonucleotide
  Antisense strand to SEQ ID NO: 235402
auaacacacguccaacacg

SEQ ID NO: 235404 - RNA, 19 nt, Artificial Sequence
  Description of Artificial Sequence: Synthetic oligonucleotide
  Sense strand starting at position 3713 SEQ ID NO: 3031
guuggacguguguuaugua

SEQ ID NO: 235405 - RNA, 19 nt, Artificial Sequence
  Description of Artificial Sequence: Synthetic oligonucleotide
  Antisense strand to SEQ ID NO: 235404
uacauaacacacguccaac

SEQ ID NO: 235406 - RNA, 19 nt, Artificial Sequence
  Description of Artificial Sequence: Synthetic oligonucleotide
  Sense strand starting at position 3718 SEQ ID NO: 3031
acguguguuauguaucacu

SEQ ID NO: 235407 - RNA, 19 nt, Artificial Sequence
  Description of Artificial Sequence: Synthetic oligonucleotide
  Antisense strand to SEQ ID NO: 235406
agugauacauaacacacgu

SEQ ID NO: 235408 - RNA, 19 nt, Artificial Sequence
  Description of Artificial Sequence: Synthetic oligonucleotide
  Sense strand starting at position 3723 SEQ ID NO: 3031
uguuauguaucacuuacaa

SEQ ID NO: 235409 - RNA, 19 nt, Artificial Sequence
  Description of Artificial Sequence: Synthetic oligonucleotide
  Antisense strand to SEQ ID NO: 235408
uuguaagugauacauaaca

SEQ ID NO: 235410 - RNA, 19 nt, Artificial Sequence
  Description of Artificial Sequence: Synthetic oligonucleotide
  Sense strand starting at position 3865 SEQ ID NO: 3031
gucuuaaucccagaucagc

SEQ ID NO: 235411 - RNA, 19 nt, Artificial Sequence
  Description of Artificial Sequence: Synthetic oligonucleotide
  Antisense strand to SEQ ID NO: 235410
gcugaucugggauuaagac

SEQ ID NO: 235412 - RNA, 19 nt, Artificial Sequence
  Description of Artificial Sequence: Synthetic oligonucleotide
  Sense strand starting at position 77 SEQ ID NO: 3032
augcaucuccuacagagau

SEQ ID NO: 235413 - RNA, 19 nt, Artificial Sequence
  Description of Artificial Sequence: Synthetic oligonucleotide
  Antisense strand to SEQ ID NO: 235412
aucucuguaggagaugcau

SEQ ID NO: 235414 - RNA, 19 nt, Artificial Sequence
  Description of Artificial Sequence: Synthetic oligonucleotide
  Sense strand starting at position 495 SEQ ID NO: 3032
cguggaacucuccaucaaa

SEQ ID NO: 235415 - RNA, 19 nt, Artificial Sequence
  Description of Artificial Sequence: Synthetic oligonucleotide
  Antisense strand to SEQ ID NO: 235414
uuugauggagaguuccacg

SEQ ID NO: 235416 - RNA, 19 nt, Artificial Sequence
  Description of Artificial Sequence: Synthetic oligonucleotide
  Sense strand starting at position 720 SEQ ID NO: 3032
cuugauuaaucuucgaagg

SEQ ID NO: 235417 - RNA, 19 nt, Artificial Sequence
  Description of Artificial Sequence: Synthetic oligonucleotide
  Antisense strand to SEQ ID NO: 235416
ccuucgaagauuaaucaag

SEQ ID NO: 235418 - RNA, 19 nt, Artificial Sequence
  Description of Artificial Sequence: Synthetic oligonucleotide
  Sense strand starting at position 836 SEQ ID NO: 3032
gcaagucuuaaggaaagca

SEQ ID NO: 235419 - RNA, 19 nt, Artificial Sequence
  Description of Artificial Sequence: Synthetic oligonucleotide
  Antisense strand to SEQ ID NO: 235418
ugcuuuccuuaagacuugc

SEQ ID NO: 235420 - RNA, 19 nt, Artificial Sequence
  Description of Artificial Sequence: Synthetic oligonucleotide
  Sense strand starting at position 866 SEQ ID NO: 3032
ggaacaaguauguguggaa

SEQ ID NO: 235421 - RNA, 19 nt, Artificial Sequence
  Description of Artificial Sequence: Synthetic oligonucleotide
  Antisense strand to SEQ ID NO: 235420
uuccacacauacuuguucc

SEQ ID NO: 235422 - RNA, 19 nt, Artificial Sequence
  Description of Artificial Sequence: Synthetic oligonucleotide
  Sense strand starting at position 1118 SEQ ID NO: 3032
accgcaauggaucaaacua

SEQ ID NO: 235423 - RNA, 19 nt, Artificial Sequence
  Description of Artificial Sequence: Synthetic oligonucleotide
  Antisense strand to SEQ ID NO: 235422
uaguuugauccauugcggu

SEQ ID NO: 235424 - RNA, 19 nt, Artificial Sequence
  Description of Artificial Sequence: Synthetic oligonucleotide
  Sense strand starting at position 1136 SEQ ID NO: 3032
acuguuaacucuguuaaca

SEQ ID NO: 235425 - RNA, 19 nt, Artificial Sequence
  Description of Artificial Sequence: Synthetic oligonucleotide
  Antisense strand to SEQ ID NO: 235424
uguuaacagaguuaacagu

SEQ ID NO: 235426 - RNA, 19 nt, Artificial Sequence
  Description of Artificial Sequence: Synthetic oligonucleotide
  Sense strand starting at position 1164 SEQ ID NO: 3032
gaucacugacaucgauacu

SEQ ID NO: 235427 - RNA, 19 nt, Artificial Sequence
  Description of Artificial Sequence: Synthetic oligonucleotide
  Antisense strand to SEQ ID NO: 235426
aguaucgaugucagugauc

SEQ ID NO: 235428 - RNA, 19 nt, Artificial Sequence
  Description of Artificial Sequence: Synthetic oligonucleotide
  Sense strand starting at position 1219 SEQ ID NO: 3032
ccaccaggacucuacgauu

SEQ ID NO: 235429 - RNA, 19 nt, Artificial Sequence
  Description of Artificial Sequence: Synthetic oligonucleotide
  Antisense strand to SEQ ID NO: 235428
aaucguagaguccuggugg

SEQ ID NO: 235430 - RNA, 19 nt, Artificial Sequence
  Description of Artificial Sequence: Synthetic oligonucleotide
  Sense strand starting at position 1230 SEQ ID NO: 3032
cuacgauuauaacuugcaa

SEQ ID NO: 235431 - RNA, 19 nt, Artificial Sequence
  Description of Artificial Sequence: Synthetic oligonucleotide
  Antisense strand to SEQ ID NO: 235430
uugcaaguuauaaucguag

SEQ ID NO: 235432 - RNA, 19 nt, Artificial Sequence
  Description of Artificial Sequence: Synthetic oligonucleotide
  Sense strand starting at position 1338 SEQ ID NO: 3032
uucguauaacaguaaagau

SEQ ID NO: 235433 - RNA, 19 nt, Artificial Sequence
  Description of Artificial Sequence: Synthetic oligonucleotide
  Antisense strand to SEQ ID NO: 235432
aucuuuacuguuauacgaa

SEQ ID NO: 235434 - RNA, 19 nt, Artificial Sequence
  Description of Artificial Sequence: Synthetic oligonucleotide
  Sense strand starting at position 1615 SEQ ID NO: 3032
aagucagcccaggaucaau

SEQ ID NO: 235435 - RNA, 19 nt, Artificial Sequence
  Description of Artificial Sequence: Synthetic oligonucleotide
  Antisense strand to SEQ ID NO: 235434
auugauccugggcugacuu

SEQ ID NO: 235436 - RNA, 19 nt, Artificial Sequence
  Description of Artificial Sequence: Synthetic oligonucleotide
  Sense strand starting at position 2157 SEQ ID NO: 3032
gcgcgcucuccuucuaaau

SEQ ID NO: 235437 - RNA, 19 nt, Artificial Sequence
  Description of Artificial Sequence: Synthetic oligonucleotide
  Antisense strand to SEQ ID NO: 235436
auuuagaaggagagcgcgc

SEQ ID NO: 235438 - RNA, 19 nt, Artificial Sequence
  Description of Artificial Sequence: Synthetic oligonucleotide
  Sense strand starting at position 2206 SEQ ID NO: 3032
uucccacucucuguggaaa

SEQ ID NO: 235439 - RNA, 19 nt, Artificial Sequence
  Description of Artificial Sequence: Synthetic oligonucleotide
  Antisense strand to SEQ ID NO: 235438
uuuccacagagagugggaa

SEQ ID NO: 235440 - RNA, 19 nt, Artificial Sequence
  Description of Artificial Sequence: Synthetic oligonucleotide
  Sense strand starting at position 2218 SEQ ID NO: 3032
guggaaaggucuucuacaa

SEQ ID NO: 235441 - RNA, 19 nt, Artificial Sequence
  Description of Artificial Sequence: Synthetic oligonucleotide
  Antisense strand to SEQ ID NO: 235440
uuguagaagaccuuuccac

SEQ ID NO: 235442 - RNA, 19 nt, Artificial Sequence
  Description of Artificial Sequence: Synthetic oligonucleotide
  Sense strand starting at position 2283 SEQ ID NO: 3032
gcaagucugugacuuauuu

SEQ ID NO: 235443 - RNA, 19 nt, Artificial Sequence
  Description of Artificial Sequence: Synthetic oligonucleotide
  Antisense strand to SEQ ID NO: 235442
aaauaagucacagacuugc

SEQ ID NO: 235444 - RNA, 19 nt, Artificial Sequence
  Description of Artificial Sequence: Synthetic oligonucleotide
  Sense strand starting at position 2491 SEQ ID NO: 3032
auugauucuguuugguaga

SEQ ID NO: 235445 - RNA, 19 nt, Artificial Sequence
  Description of Artificial Sequence: Synthetic oligonucleotide
  Antisense strand to SEQ ID NO: 235444
ucuaccaaacagaaucaau

SEQ ID NO: 235446 - RNA, 19 nt, Artificial Sequence
  Description of Artificial Sequence: Synthetic oligonucleotide
  Sense strand starting at position 2493 SEQ ID NO: 3032
ugauucuguuugguagaua

SEQ ID NO: 235447 - RNA, 19 nt, Artificial Sequence
  Description of Artificial Sequence: Synthetic oligonucleotide
  Antisense strand to SEQ ID NO: 235446
uaucuaccaaacagaauca

SEQ ID NO: 235448 - RNA, 19 nt, Artificial Sequence
  Description of Artificial Sequence: Synthetic oligonucleotide
  Sense strand starting at position 2496 SEQ ID NO: 3032
uucuguuugguagauaaau

SEQ ID NO: 235449 - RNA, 19 nt, Artificial Sequence
  Description of Artificial Sequence: Synthetic oligonucleotide
  Antisense strand to SEQ ID NO: 235448
auuuaucuaccaaacagaa

SEQ ID NO: 235450 - RNA, 19 nt, Artificial Sequence
  Description of Artificial Sequence: Synthetic oligonucleotide
  Sense strand starting at position 2548 SEQ ID NO: 3032
caggauaucuaguuaaagu

SEQ ID NO: 235451 - RNA, 19 nt, Artificial Sequence
  Description of Artificial Sequence: Synthetic oligonucleotide
  Antisense strand to SEQ ID NO: 235450
acuuuaacuagauauccug

SEQ ID NO: 235452 - RNA, 19 nt, Artificial Sequence
  Description of Artificial Sequence: Synthetic oligonucleotide
  Sense strand starting at position 2639 SEQ ID NO: 3032
cuuauuugcuguuuauaca

SEQ ID NO: 235453 - RNA, 19 nt, Artificial Sequence
  Description of Artificial Sequence: Synthetic oligonucleotide
  Antisense strand to SEQ ID NO: 235452
uguauaaacagcaaauaag

SEQ ID NO: 235454 - RNA, 19 nt, Artificial Sequence
  Description of Artificial Sequence: Synthetic oligonucleotide
  Sense strand starting at position 2669 SEQ ID NO: 3032
gacgguguccuguauauaa

SEQ ID NO: 235455 - RNA, 19 nt, Artificial Sequence
  Description of Artificial Sequence: Synthetic oligonucleotide
  Antisense strand to SEQ ID NO: 235454
uuauauacaggacaccguc

SEQ ID NO: 235456 - RNA, 19 nt, Artificial Sequence
  Description of Artificial Sequence: Synthetic oligonucleotide
  Sense strand starting at position 2704 SEQ ID NO: 3032
ggcaaacucuuguuaaaug

SEQ ID NO: 235457 - RNA, 19 nt, Artificial Sequence
  Description of Artificial Sequence: Synthetic oligonucleotide
  Antisense strand to SEQ ID NO: 235456
cauuuaacaagaguuugcc

SEQ ID NO: 235458 - RNA, 19 nt, Artificial Sequence
  Description of Artificial Sequence: Synthetic oligonucleotide
  Sense strand starting at position 2727 SEQ ID NO: 3032
auuacuuuggcuuauuaag

SEQ ID NO: 235459 - RNA, 19 nt, Artificial Sequence
  Description of Artificial Sequence: Synthetic oligonucleotide
  Antisense strand to SEQ ID NO: 235458
cuuaauaagccaaaguaau

SEQ ID NO: 235460 - RNA, 19 nt, Artificial Sequence
  Description of Artificial Sequence: Synthetic oligonucleotide
  Sense strand starting at position 2754 SEQ ID NO: 3032
auggacaagucugauuuau

SEQ ID NO: 235461 - RNA, 19 nt, Artificial Sequence
  Description of Artificial Sequence: Synthetic oligonucleotide
  Antisense strand to SEQ ID NO: 235460
auaaaucagacuuguccau

SEQ ID NO: 235462 - RNA, 19 nt, Artificial Sequence
  Description of Artificial Sequence: Synthetic oligonucleotide
  Sense strand starting at position 2871 SEQ ID NO: 3032
uugaguuaucucugaagaa

SEQ ID NO: 235463 - RNA, 19 nt, Artificial Sequence
  Description of Artificial Sequence: Synthetic oligonucleotide
  Antisense strand to SEQ ID NO: 235462
uucuucagagauaacucaa

SEQ ID NO: 235464 - RNA, 19 nt, Artificial Sequence
  Description of Artificial Sequence: Synthetic oligonucleotide
  Sense strand starting at position 2954 SEQ ID NO: 3032
ggaaaucagccuugcagag

SEQ ID NO: 235465 - RNA, 19 nt, Artificial Sequence
  Description of Artificial Sequence: Synthetic oligonucleotide
  Antisense strand to SEQ ID NO: 235464
cucugcaaggcugauuucc

SEQ ID NO: 235466 - RNA, 19 nt, Artificial Sequence
  Description of Artificial Sequence: Synthetic oligonucleotide
  Sense strand starting at position 2988 SEQ ID NO: 3032
ucagcuaugcuacagaaga

SEQ ID NO: 235467 - RNA, 19 nt, Artificial Sequence
  Description of Artificial Sequence: Synthetic oligonucleotide
  Antisense strand to SEQ ID NO: 235466
ucuucuguagcauagcuga

SEQ ID NO: 235468 - RNA, 19 nt, Artificial Sequence
  Description of Artificial Sequence: Synthetic oligonucleotide
  Sense strand starting at position 3008 SEQ ID NO: 3032
gauguuggaccuugugaaa

SEQ ID NO: 235469 - RNA, 19 nt, Artificial Sequence
  Description of Artificial Sequence: Synthetic oligonucleotide
  Antisense strand to SEQ ID NO: 235468
uuucacaagguccaacauc

SEQ ID NO: 235470 - RNA, 19 nt, Artificial Sequence
  Description of Artificial Sequence: Synthetic oligonucleotide
  Sense strand starting at position 3083 SEQ ID NO: 3032
uugggaaagugucuguaag

SEQ ID NO: 235471 - RNA, 19 nt, Artificial Sequence
  Description of Artificial Sequence: Synthetic oligonucleotide
  Antisense strand to SEQ ID NO: 235470
cuuacagacacuuucccaa

SEQ ID NO: 235472 - RNA, 19 nt, Artificial Sequence
  Description of Artificial Sequence: Synthetic oligonucleotide
  Sense strand starting at position 3129 SEQ ID NO: 3032
agccacuaagguuaaauua

SEQ ID NO: 235473 - RNA, 19 nt, Artificial Sequence
  Description of Artificial Sequence: Synthetic oligonucleotide
  Antisense strand to SEQ ID NO: 235472
uaauuuaaccuuaguggcu

SEQ ID NO: 235474 - RNA, 19 nt, Artificial Sequence
  Description of Artificial Sequence: Synthetic oligonucleotide
  Sense strand starting at position 3205 SEQ ID NO: 3032
auggcuuaugaagguauca

SEQ ID NO: 235475 - RNA, 19 nt, Artificial Sequence
  Description of Artificial Sequence: Synthetic oligonucleotide
  Antisense strand to SEQ ID NO: 235474
ugauaccuucauaagccau

SEQ ID NO: 235476 - RNA, 19 nt, Artificial Sequence
  Description of Artificial Sequence: Synthetic oligonucleotide
  Sense strand starting at position 3225 SEQ ID NO: 3032
augauaaagcgcuagaaag

SEQ ID NO: 235477 - RNA, 19 nt, Artificial Sequence
  Description of Artificial Sequence: Synthetic oligonucleotide
  Antisense strand to SEQ ID NO: 235476
cuuucuagcgcuuuaucau

SEQ ID NO: 235478 - RNA, 19 nt, Artificial Sequence
  Description of Artificial Sequence: Synthetic oligonucleotide
  Sense strand starting at position 3306 SEQ ID NO: 3032
aggauugaguguuuacauu

SEQ ID NO: 235479 - RNA, 19 nt, Artificial Sequence
  Description of Artificial Sequence: Synthetic oligonucleotide
  Antisense strand to SEQ ID NO: 235478
aauguaaacacucaauccu

SEQ ID NO: 235480 - RNA, 19 nt, Artificial Sequence
  Description of Artificial Sequence: Synthetic oligonucleotide
  Sense strand starting at position 3323 SEQ ID NO: 3032
uuuacaauguuagucugau

SEQ ID NO: 235481 - RNA, 19 nt, Artificial Sequence
  Description of Artificial Sequence: Synthetic oligonucleotide
  Antisense strand to SEQ ID NO: 235480
aucagacuaacauuguaaa

SEQ ID NO: 235482 - RNA, 19 nt, Artificial Sequence
  Description of Artificial Sequence: Synthetic oligonucleotide
  Sense strand starting at position 3324 SEQ ID NO: 3032
uuacaauguuagucugauu

SEQ ID NO: 235483 - RNA, 19 nt, Artificial Sequence
  Description of Artificial Sequence: Synthetic oligonucleotide
  Antisense strand to SEQ ID NO: 235482
aaucagacuaacauuguaa

SEQ ID NO: 235484 - RNA, 19 nt, Artificial Sequence
  Description of Artificial Sequence: Synthetic oligonucleotide
  Sense strand starting at position 3520 SEQ ID NO: 3032
ggacuuuccuaagcuugga

SEQ ID NO: 235485 - RNA, 19 nt, Artificial Sequence
  Description of Artificial Sequence: Synthetic oligonucleotide
  Antisense strand to SEQ ID NO: 235484
uccaagcuuaggaaagucc

SEQ ID NO: 235486 - RNA, 19 nt, Artificial Sequence
  Description of Artificial Sequence: Synthetic oligonucleotide
  Sense strand starting at position 3653 SEQ ID NO: 3032
gccuguugugcuuugagua

SEQ ID NO: 235487 - RNA, 19 nt, Artificial Sequence
  Description of Artificial Sequence: Synthetic oligonucleotide
  Antisense strand to SEQ ID NO: 235486
uacucaaagcacaacaggc

SEQ ID NO: 235488 - RNA, 19 nt, Artificial Sequence
  Description of Artificial Sequence: Synthetic oligonucleotide
  Sense strand starting at position 3658 SEQ ID NO: 3032
uugugcuuugaguaauaaa

SEQ ID NO: 235489 - RNA, 19 nt, Artificial Sequence
  Description of Artificial Sequence: Synthetic oligonucleotide
  Antisense strand to SEQ ID NO: 235488
uuuauuacucaaagcacaa

SEQ ID NO: 235490 - RNA, 19 nt, Artificial Sequence
  Description of Artificial Sequence: Synthetic oligonucleotide
  Sense strand starting at position 3748 SEQ ID NO: 3032
ugcuuauaacuaggguaaa

SEQ ID NO: 235491 - RNA, 19 nt, Artificial Sequence
  Description of Artificial Sequence: Synthetic oligonucleotide
  Antisense strand to SEQ ID NO: 235490
uuuacccuaguuauaagca

SEQ ID NO: 235492 - RNA, 19 nt, Artificial Sequence
  Description of Artificial Sequence: Synthetic oligonucleotide
  Sense strand starting at position 85 SEQ ID NO: 3033
auguuuccagcugaaagau

SEQ ID NO: 235493 - RNA, 19 nt, Artificial Sequence
  Description of Artificial Sequence: Synthetic oligonucleotide
  Antisense strand to SEQ ID NO: 235492
aucuuucagcuggaaacau

SEQ ID NO: 235494 - RNA, 19 nt, Artificial Sequence
  Description of Artificial Sequence: Synthetic oligonucleotide
  Sense strand starting at position 97 SEQ ID NO: 3033
gaaagauguggucauguua

SEQ ID NO: 235495 - RNA, 19 nt, Artificial Sequence
  Description of Artificial Sequence: Synthetic oligonucleotide
  Antisense strand to SEQ ID NO: 235494
uaacaugaccacaucuuuc

SEQ ID NO: 235496 - RNA, 19 nt, Artificial Sequence
  Description of Artificial Sequence: Synthetic oligonucleotide
  Sense strand starting at position 112 SEQ ID NO: 3033
guuaccaacuuguuauaac

SEQ ID NO: 235497 - RNA, 19 nt, Artificial Sequence
  Description of Artificial Sequence: Synthetic oligonucleotide
  Antisense strand to SEQ ID NO: 235496
guuauaacaaguugguaac

SEQ ID NO: 235498 - RNA, 19 nt, Artificial Sequence
  Description of Artificial Sequence: Synthetic oligonucleotide
  Sense strand starting at position 156 SEQ ID NO: 3033
agaaacaaugucugcuaga

SEQ ID NO: 235499 - RNA, 19 nt, Artificial Sequence
  Description of Artificial Sequence: Synthetic oligonucleotide
  Antisense strand to SEQ ID NO: 235498
ucuagcagacauuguuucu

SEQ ID NO: 235500 - RNA, 19 nt, Artificial Sequence
  Description of Artificial Sequence: Synthetic oligonucleotide
  Sense strand starting at position 638 SEQ ID NO: 3033
aauguuacagguugacauu

SEQ ID NO: 235501 - RNA, 19 nt, Artificial Sequence
  Description of Artificial Sequence: Synthetic oligonucleotide
  Antisense strand to SEQ ID NO: 235500
aaugucaaccuguaacauu

SEQ ID NO: 235502 - RNA, 19 nt, Artificial Sequence
  Description of Artificial Sequence: Synthetic oligonucleotide
  Sense strand starting at position 753 SEQ ID NO: 3033
caagucuuuggucacaaga

SEQ ID NO: 235503 - RNA, 19 nt, Artificial Sequence
  Description of Artificial Sequence: Synthetic oligonucleotide
  Antisense strand to SEQ ID NO: 235502
ucuugugaccaaagacuug

SEQ ID NO: 235504 - RNA, 19 nt, Artificial Sequence
  Description of Artificial Sequence: Synthetic oligonucleotide
  Sense strand starting at position 913 SEQ ID NO: 3033
ccuaucucaugguuaucau

SEQ ID NO: 235505 - RNA, 19 nt, Artificial Sequence
  Description of Artificial Sequence: Synthetic oligonucleotide
  Antisense strand to SEQ ID NO: 235504
augauaaccaugagauagg

SEQ ID NO: 235506 - RNA, 19 nt, Artificial Sequence
  Description of Artificial Sequence: Synthetic oligonucleotide
  Sense strand starting at position 916 SEQ ID NO: 3033
aucucaugguuaucaugaa

SEQ ID NO: 235507 - RNA, 19 nt, Artificial Sequence
  Description of Artificial Sequence: Synthetic oligonucleotide
  Antisense strand to SEQ ID NO: 235506
uucaugauaaccaugagau

SEQ ID NO: 235508 - RNA, 19 nt, Artificial Sequence
  Description of Artificial Sequence: Synthetic oligonucleotide
  Sense strand starting at position 920 SEQ ID NO: 3033
caugguuaucaugaagcuu

SEQ ID NO: 235509 - RNA, 19 nt, Artificial Sequence
  Description of Artificial Sequence: Synthetic oligonucleotide
  Antisense strand to SEQ ID NO: 235508
aagcuucaugauaaccaug

SEQ ID NO: 235510 - RNA, 19 nt, Artificial Sequence
  Description of Artificial Sequence: Synthetic oligonucleotide
  Sense strand starting at position 946 SEQ ID NO: 3033
ggaacugagugguuaggca

SEQ ID NO: 235511 - RNA, 19 nt, Artificial Sequence
  Description of Artificial Sequence: Synthetic oligonucleotide
  Antisense strand to SEQ ID NO: 235510
ugccuaaccacucaguucc

SEQ ID NO: 235512 - RNA, 19 nt, Artificial Sequence
  Description of Artificial Sequence: Synthetic oligonucleotide
  Sense strand starting at position 1073 SEQ ID NO: 3033
acucuuuggcaauguagaa

SEQ ID NO: 235513 - RNA, 19 nt, Artificial Sequence
  Description of Artificial Sequence: Synthetic oligonucleotide
  Antisense strand to SEQ ID NO: 235512
uucuacauugccaaagagu

SEQ ID NO: 235514 - RNA, 19 nt, Artificial Sequence
  Description of Artificial Sequence: Synthetic oligonucleotide
  Sense strand starting at position 1305 SEQ ID NO: 3033
uugagaucccuuggagcaa

SEQ ID NO: 235515 - RNA, 19 nt, Artificial Sequence
  Description of Artificial Sequence: Synthetic oligonucleotide
  Antisense strand to SEQ ID NO: 235514
uugcuccaagggaucucaa

SEQ ID NO: 235516 - RNA, 19 nt, Artificial Sequence
  Description of Artificial Sequence: Synthetic oligonucleotide
  Sense strand starting at position 1643 SEQ ID NO: 3033
uggcaauucguacacaaac

SEQ ID NO: 235517 - RNA, 19 nt, Artificial Sequence
  Description of Artificial Sequence: Synthetic oligonucleotide
  Antisense strand to SEQ ID NO: 235516
guuuguguacgaauugcca

SEQ ID NO: 235518 - RNA, 19 nt, Artificial Sequence
  Description of Artificial Sequence: Synthetic oligonucleotide
  Sense strand starting at position 2217 SEQ ID NO: 3033
ggaacauuggauugcagga

SEQ ID NO: 235519 - RNA, 19 nt, Artificial Sequence
  Description of Artificial Sequence: Synthetic oligonucleotide
  Antisense strand to SEQ ID NO: 235518
uccugcaauccaauguucc

SEQ ID NO: 235520 - RNA, 19 nt, Artificial Sequence
  Description of Artificial Sequence: Synthetic oligonucleotide
  Sense strand starting at position 2241 SEQ ID NO: 3033
cucucaguccuccaaaggu

SEQ ID NO: 235521 - RNA, 19 nt, Artificial Sequence
  Description of Artificial Sequence: Synthetic oligonucleotide
  Antisense strand to SEQ ID NO: 235520
accuuuggaggacugagag

SEQ ID NO: 235522 - RNA, 19 nt, Artificial Sequence
  Description of Artificial Sequence: Synthetic oligonucleotide
  Sense strand starting at position 2315 SEQ ID NO: 3033
aggcauuuguggccagcau

SEQ ID NO: 235523 - RNA, 19 nt, Artificial Sequence
  Description of Artificial Sequence: Synthetic oligonucleotide
  Antisense strand to SEQ ID NO: 235522
augcuggccacaaaugccu

SEQ ID NO: 235524 - RNA, 19 nt, Artificial Sequence
  Description of Artificial Sequence: Synthetic oligonucleotide
  Sense strand starting at position 2513 SEQ ID NO: 3033
ggaggagacucuguagagu

SEQ ID NO: 235525 - RNA, 19 nt, Artificial Sequence
  Description of Artificial Sequence: Synthetic oligonucleotide
  Antisense strand to SEQ ID NO: 235524
acucuacagagucuccucc

SEQ ID NO: 235526 - RNA, 19 nt, Artificial Sequence
  Description of Artificial Sequence: Synthetic oligonucleotide
  Sense strand starting at position 2775 SEQ ID NO: 3033
acaguauguaucgaguaaa

SEQ ID NO: 235527 - RNA, 19 nt, Artificial Sequence
  Description of Artificial Sequence: Synthetic oligonucleotide
  Antisense strand to SEQ ID NO: 235526
uuuacucgauacauacugu

SEQ ID NO: 235528 - RNA, 19 nt, Artificial Sequence
  Description of Artificial Sequence: Synthetic oligonucleotide
  Sense strand starting at position 2778 SEQ ID NO: 3033
guauguaucgaguaaaugg

SEQ ID NO: 235529 - RNA, 19 nt, Artificial Sequence
  Description of Artificial Sequence: Synthetic oligonucleotide
  Antisense strand to SEQ ID NO: 235528
ccauuuacucgauacauac

SEQ ID NO: 235530 - RNA, 19 nt, Artificial Sequence
  Description of Artificial Sequence: Synthetic oligonucleotide
  Sense strand starting at position 2788 SEQ ID NO: 3033
aguaaaugguagcugauua

SEQ ID NO: 235531 - RNA, 19 nt, Artificial Sequence
  Description of Artificial Sequence: Synthetic oligonucleotide
  Antisense strand to SEQ ID NO: 235530
uaaucagcuaccauuuacu

SEQ ID NO: 235532 - RNA, 19 nt, Artificial Sequence
  Description of Artificial Sequence: Synthetic oligonucleotide
  Sense strand starting at position 2798 SEQ ID NO: 3033
agcugauuauuacuaggua

SEQ ID NO: 235533 - RNA, 19 nt, Artificial Sequence
  Description of Artificial Sequence: Synthetic oligonucleotide
  Antisense strand to SEQ ID NO: 235532
uaccuaguaauaaucagcu

SEQ ID NO: 235534 - RNA, 19 nt, Artificial Sequence
  Description of Artificial Sequence: Synthetic oligonucleotide
  Sense strand starting at position 2918 SEQ ID NO: 3033
uggugugugaccuaagaug

SEQ ID NO: 235535 - RNA, 19 nt, Artificial Sequence
  Description of Artificial Sequence: Synthetic oligonucleotide
  Antisense strand to SEQ ID NO: 235534
caucuuaggucacacacca

SEQ ID NO: 235536 - RNA, 19 nt, Artificial Sequence
  Description of Artificial Sequence: Synthetic oligonucleotide
  Sense strand starting at position 3110 SEQ ID NO: 3033
uguuauuaaugguccagau

SEQ ID NO: 235537 - RNA, 19 nt, Artificial Sequence
  Description of Artificial Sequence: Synthetic oligonucleotide
  Antisense strand to SEQ ID NO: 235536
aucuggaccauuaauaaca

SEQ ID NO: 235538 - RNA, 19 nt, Artificial Sequence
  Description of Artificial Sequence: Synthetic oligonucleotide
  Sense strand starting at position 3151 SEQ ID NO: 3033
ccaaguuaagagcaacuua

SEQ ID NO: 235539 - RNA, 19 nt, Artificial Sequence
  Description of Artificial Sequence: Synthetic oligonucleotide
  Antisense strand to SEQ ID NO: 235538
uaaguugcucuuaacuugg

SEQ ID NO: 235540 - RNA, 19 nt, Artificial Sequence
  Description of Artificial Sequence: Synthetic oligonucleotide
  Sense strand starting at position 3220 SEQ ID NO: 3033
auagcagguuaacuagaua

SEQ ID NO: 235541 - RNA, 19 nt, Artificial Sequence
  Description of Artificial Sequence: Synthetic oligonucleotide
  Antisense strand to SEQ ID NO: 235540
uaucuaguuaaccugcuau

SEQ ID NO: 235542 - RNA, 19 nt, Artificial Sequence
  Description of Artificial Sequence: Synthetic oligonucleotide
  Sense strand starting at position 3223 SEQ ID NO: 3033
gcagguuaacuagauacua

SEQ ID NO: 235543 - RNA, 19 nt, Artificial Sequence
  Description of Artificial Sequence: Synthetic oligonucleotide
  Antisense strand to SEQ ID NO: 235542
uaguaucuaguuaaccugc

SEQ ID NO: 235544 - RNA, 19 nt, Artificial Sequence
  Description of Artificial Sequence: Synthetic oligonucleotide
  Sense strand starting at position 3291 SEQ ID NO: 3033
aguuacauuccaggaguuu

SEQ ID NO: 235545 - RNA, 19 nt, Artificial Sequence
  Description of Artificial Sequence: Synthetic oligonucleotide
  Antisense strand to SEQ ID NO: 235544
aaacuccuggaauguaacu

SEQ ID NO: 235546 - RNA, 19 nt, Artificial Sequence
  Description of Artificial Sequence: Synthetic oligonucleotide
  Sense strand starting at position 3292 SEQ ID NO: 3033
guuacauuccaggaguuug

SEQ ID NO: 235547 - RNA, 19 nt, Artificial Sequence
  Description of Artificial Sequence: Synthetic oligonucleotide
  Antisense strand to SEQ ID NO: 235546
caaacuccuggaauguaac

SEQ ID NO: 235548 - RNA, 19 nt, Artificial Sequence
  Description of Artificial Sequence: Synthetic oligonucleotide
  Sense strand starting at position 3303 SEQ ID NO: 3033
ggaguuuggcuacaucaau

SEQ ID NO: 235549 - RNA, 19 nt, Artificial Sequence
  Description of Artificial Sequence: Synthetic oligonucleotide
  Antisense strand to SEQ ID NO: 235548
auugauguagccaaacucc

SEQ ID NO: 235550 - RNA, 19 nt, Artificial Sequence
  Description of Artificial Sequence: Synthetic oligonucleotide
  Sense strand starting at position 3330 SEQ ID NO: 3033
aagaguugauguucucaca

SEQ ID NO: 235551 - RNA, 19 nt, Artificial Sequence
  Description of Artificial Sequence: Synthetic oligonucleotide
  Antisense strand to SEQ ID NO: 235550
ugugagaacaucaacucuu

SEQ ID NO: 235552 - RNA, 19 nt, Artificial Sequence
  Description of Artificial Sequence: Synthetic oligonucleotide
  Sense strand starting at position 3338 SEQ ID NO: 3033
auguucucacaguagaacu

SEQ ID NO: 235553 - RNA, 19 nt, Artificial Sequence
  Description of Artificial Sequence: Synthetic oligonucleotide
  Antisense strand to SEQ ID NO: 235552
aguucuacugugagaacau

SEQ ID NO: 235554 - RNA, 19 nt, Artificial Sequence
  Description of Artificial Sequence: Synthetic oligonucleotide
  Sense strand starting at position 3590 SEQ ID NO: 3033
guugucauuggacaggaau

SEQ ID NO: 235555 - RNA, 19 nt, Artificial Sequence
  Description of Artificial Sequence: Synthetic oligonucleotide
  Antisense strand to SEQ ID NO: 235554
auuccuguccaaugacaac

SEQ ID NO: 235556 - RNA, 19 nt, Artificial Sequence
  Description of Artificial Sequence: Synthetic oligonucleotide
  Sense strand starting at position 3632 SEQ ID NO: 3033
cagguauaauguucuugac

SEQ ID NO: 235557 - RNA, 19 nt, Artificial Sequence
  Description of Artificial Sequence: Synthetic oligonucleotide
  Antisense strand to SEQ ID NO: 235556
gucaagaacauuauaccug

SEQ ID NO: 235558 - RNA, 19 nt, Artificial Sequence
  Description of Artificial Sequence: Synthetic oligonucleotide
  Sense strand starting at position 3634 SEQ ID NO: 3033
gguauaauguucuugacca

SEQ ID NO: 235559 - RNA, 19 nt, Artificial Sequence
  Description of Artificial Sequence: Synthetic oligonucleotide
  Antisense strand to SEQ ID NO: 235558
uggucaagaacauuauacc

SEQ ID NO: 235560 - RNA, 19 nt, Artificial Sequence
  Description of Artificial Sequence: Synthetic oligonucleotide
  Sense strand starting at position 3716 SEQ ID NO: 3033
auaguaagugcugaaaucu

SEQ ID NO: 235561 - RNA, 19 nt, Artificial Sequence
  Description of Artificial Sequence: Synthetic oligonucleotide
  Antisense strand to SEQ ID NO: 235560
agauuucagcacuuacuau

SEQ ID NO: 235562 - RNA, 19 nt, Artificial Sequence
  Description of Artificial Sequence: Synthetic oligonucleotide
  Sense strand starting at position 3778 SEQ ID NO: 3033
uuaugaauugauugugagu

SEQ ID NO: 235563 - RNA, 19 nt, Artificial Sequence
  Description of Artificial Sequence: Synthetic oligonucleotide
  Antisense strand to SEQ ID NO: 235562
acucacaaucaauucauaa

SEQ ID NO: 235564 - RNA, 19 nt, Artificial Sequence
  Description of Artificial Sequence: Synthetic oligonucleotide
  Sense strand starting at position 3783 SEQ ID NO: 3033
aauugauugugaguacucu

SEQ ID NO: 235565 - RNA, 19 nt, Artificial Sequence
  Description of Artificial Sequence: Synthetic oligonucleotide
  Antisense strand to SEQ ID NO: 235564
agaguacucacaaucaauu

SEQ ID NO: 235566 - RNA, 19 nt, Artificial Sequence
  Description of Artificial Sequence: Synthetic oligonucleotide
  Sense strand starting at position 3787 SEQ ID NO: 3033
gauugugaguacucugaga

SEQ ID NO: 235567 - RNA, 19 nt, Artificial Sequence
  Description of Artificial Sequence: Synthetic oligonucleotide
  Antisense strand to SEQ ID NO: 235566
ucucagaguacucacaauc

SEQ ID NO: 235568 - RNA, 19 nt, Artificial Sequence
  Description of Artificial Sequence: Synthetic oligonucleotide
  Sense strand starting at position 3914 SEQ ID NO: 3033
cuaugaccuguuuaacgaa

SEQ ID NO: 235569 - RNA, 19 nt, Artificial Sequence
  Description of Artificial Sequence: Synthetic oligonucleotide
  Antisense strand to SEQ ID NO: 235568
uucguuaaacaggucauag

SEQ ID NO: 235570 - RNA, 19 nt, Artificial Sequence
  Description of Artificial Sequence: Synthetic oligonucleotide
  Sense strand starting at position 3921 SEQ ID NO: 3033
cuguuuaacgaauauguuu

SEQ ID NO: 235571 - RNA, 19 nt, Artificial Sequence
  Description of Artificial Sequence: Synthetic oligonucleotide
  Antisense strand to SEQ ID NO: 235570
aaacauauucguuaaacag

SEQ ID NO: 235572 - RNA, 19 nt, Artificial Sequence
  Description of Artificial Sequence: Synthetic oligonucleotide
  Sense strand starting at position 121 SEQ ID NO: 3034
gcucgaacuccugaucucu

SEQ ID NO: 235573 - RNA, 19 nt, Artificial Sequence
  Description of Artificial Sequence: Synthetic oligonucleotide
  Antisense strand to SEQ ID NO: 235572
agagaucaggaguucgagc

SEQ ID NO: 235574 - RNA, 19 nt, Artificial Sequence
  Description of Artificial Sequence: Synthetic oligonucleotide
  Sense strand starting at position 216 SEQ ID NO: 3034
uaagaaggguuaguuuauu

SEQ ID NO: 235575 - RNA, 19 nt, Artificial Sequence
  Description of Artificial Sequence: Synthetic oligonucleotide
  Antisense strand to SEQ ID NO: 235574
aauaaacuaacccuucuua

SEQ ID NO: 235576 - RNA, 19 nt, Artificial Sequence
  Description of Artificial Sequence: Synthetic oligonucleotide
  Sense strand starting at position 228 SEQ ID NO: 3034
guuuauuacuuguugagcu

SEQ ID NO: 235577 - RNA, 19 nt, Artificial Sequence
  Description of Artificial Sequence: Synthetic oligonucleotide
  Antisense strand to SEQ ID NO: 235576
agcucaacaaguaauaaac

SEQ ID NO: 235578 - RNA, 19 nt, Artificial Sequence
  Description of Artificial Sequence: Synthetic oligonucleotide
  Sense strand starting at position 306 SEQ ID NO: 3034
aaucauguaucugucagag

SEQ ID NO: 235579 - RNA, 19 nt, Artificial Sequence
  Description of Artificial Sequence: Synthetic oligonucleotide
  Antisense strand to SEQ ID NO: 235578
cucugacagauacaugauu

SEQ ID NO: 235580 - RNA, 19 nt, Artificial Sequence
  Description of Artificial Sequence: Synthetic oligonucleotide
  Sense strand starting at position 312 SEQ ID NO: 3034
guaucugucagaggcugua

SEQ ID NO: 235581 - RNA, 19 nt, Artificial Sequence
  Description of Artificial Sequence: Synthetic oligonucleotide
  Antisense strand to SEQ ID NO: 235580
uacagccucugacagauac

SEQ ID NO: 235582 - RNA, 19 nt, Artificial Sequence
  Description of Artificial Sequence: Synthetic oligonucleotide
  Sense strand starting at position 646 SEQ ID NO: 3034
ucccaaagaguuugagaac

SEQ ID NO: 235583 - RNA, 19 nt, Artificial Sequence
  Description of Artificial Sequence: Synthetic oligonucleotide
  Antisense strand to SEQ ID NO: 235582
guucucaaacucuuuggga

SEQ ID NO: 235584 - RNA, 19 nt, Artificial Sequence
  Description of Artificial Sequence: Synthetic oligonucleotide
  Sense strand starting at position 922 SEQ ID NO: 3034
gucgaguagugguuagaag

SEQ ID NO: 235585 - RNA, 19 nt, Artificial Sequence
  Description of Artificial Sequence: Synthetic oligonucleotide
  Antisense strand to SEQ ID NO: 235584
cuucuaaccacuacucgac

SEQ ID NO: 235586 - RNA, 19 nt, Artificial Sequence
  Description of Artificial Sequence: Synthetic oligonucleotide
  Sense strand starting at position 956 SEQ ID NO: 3034
gaggguaguugggaagaua

SEQ ID NO: 235587 - RNA, 19 nt, Artificial Sequence
  Description of Artificial Sequence: Synthetic oligonucleotide
  Antisense strand to SEQ ID NO: 235586
uaucuucccaacuacccuc

SEQ ID NO: 235588 - RNA, 19 nt, Artificial Sequence
  Description of Artificial Sequence: Synthetic oligonucleotide
  Sense strand starting at position 1292 SEQ ID NO: 3034
cguauuccucauuaagcua

SEQ ID NO: 235589 - RNA, 19 nt, Artificial Sequence
  Description of Artificial Sequence: Synthetic oligonucleotide
  Antisense strand to SEQ ID NO: 235588
uagcuuaaugaggaauacg

SEQ ID NO: 235590 - RNA, 19 nt, Artificial Sequence
  Description of Artificial Sequence: Synthetic oligonucleotide
  Sense strand starting at position 1457 SEQ ID NO: 3034
ugcuucuuuguguuguaua

SEQ ID NO: 235591 - RNA, 19 nt, Artificial Sequence
  Description of Artificial Sequence: Synthetic oligonucleotide
  Antisense strand to SEQ ID NO: 235590
uauacaacacaaagaagca

SEQ ID NO: 235592 - RNA, 19 nt, Artificial Sequence
  Description of Artificial Sequence: Synthetic oligonucleotide
  Sense strand starting at position 1542 SEQ ID NO: 3034
ccuagauuccuguacuacu

SEQ ID NO: 235593 - RNA, 19 nt, Artificial Sequence
  Description of Artificial Sequence: Synthetic oligonucleotide
  Antisense strand to SEQ ID NO: 235592
aguaguacaggaaucuagg

SEQ ID NO: 235594 - RNA, 19 nt, Artificial Sequence
  Description of Artificial Sequence: Synthetic oligonucleotide
  Sense strand starting at position 1550 SEQ ID NO: 3034
ccuguacuacucuggcuaa

SEQ ID NO: 235595 - RNA, 19 nt, Artificial Sequence
  Description of Artificial Sequence: Synthetic oligonucleotide
  Antisense strand to SEQ ID NO: 235594
uuagccagaguaguacagg

SEQ ID NO: 235596 - RNA, 19 nt, Artificial Sequence
  Description of Artificial Sequence: Synthetic oligonucleotide
  Sense strand starting at position 1553 SEQ ID NO: 3034
guacuacucuggcuaaaug

SEQ ID NO: 235597 - RNA, 19 nt, Artificial Sequence
  Description of Artificial Sequence: Synthetic oligonucleotide
  Antisense strand to SEQ ID NO: 235596
cauuuagccagaguaguac

SEQ ID NO: 235598 - RNA, 19 nt, Artificial Sequence
  Description of Artificial Sequence: Synthetic oligonucleotide
  Sense strand starting at position 1684 SEQ ID NO: 3034
cuuugauaacuguguuagu

SEQ ID NO: 235599 - RNA, 19 nt, Artificial Sequence
  Description of Artificial Sequence: Synthetic oligonucleotide
  Antisense strand to SEQ ID NO: 235598
acuaacacaguuaucaaag

SEQ ID NO: 235600 - RNA, 19 nt, Artificial Sequence
  Description of Artificial Sequence: Synthetic oligonucleotide
  Sense strand starting at position 1685 SEQ ID NO: 3034
uuugauaacuguguuaguu

SEQ ID NO: 235601 - RNA, 19 nt, Artificial Sequence
  Description of Artificial Sequence: Synthetic oligonucleotide
  Antisense strand to SEQ ID NO: 235600
aacuaacacaguuaucaaa

SEQ ID NO: 235602 - RNA, 19 nt, Artificial Sequence
  Description of Artificial Sequence: Synthetic oligonucleotide
  Sense strand starting at position 1697 SEQ ID NO: 3034
guuaguuauaacugaugga

SEQ ID NO: 235603 - RNA, 19 nt, Artificial Sequence
  Description of Artificial Sequence: Synthetic oligonucleotide
  Antisense strand to SEQ ID NO: 235602
uccaucaguuauaacuaac

SEQ ID NO: 235604 - RNA, 19 nt, Artificial Sequence
  Description of Artificial Sequence: Synthetic oligonucleotide
  Sense strand starting at position 1701 SEQ ID NO: 3034
guuauaacugauggaguca

SEQ ID NO: 235605 - RNA, 19 nt, Artificial Sequence
  Description of Artificial Sequence: Synthetic oligonucleotide
  Antisense strand to SEQ ID NO: 235604
ugacuccaucaguuauaac

SEQ ID NO: 235606 - RNA, 19 nt, Artificial Sequence
  Description of Artificial Sequence: Synthetic oligonucleotide
  Sense strand starting at position 1710 SEQ ID NO: 3034
gauggagucaacugauggu

SEQ ID NO: 235607 - RNA, 19 nt, Artificial Sequence
  Description of Artificial Sequence: Synthetic oligonucleotide
  Antisense strand to SEQ ID NO: 235606
accaucaguugacuccauc

SEQ ID NO: 235608 - RNA, 19 nt, Artificial Sequence
  Description of Artificial Sequence: Synthetic oligonucleotide
  Sense strand starting at position 1714 SEQ ID NO: 3034
gagucaacugauggugaaa

SEQ ID NO: 235609 - RNA, 19 nt, Artificial Sequence
  Description of Artificial Sequence: Synthetic oligonucleotide
  Antisense strand to SEQ ID NO: 235608
uuucaccaucaguugacuc

SEQ ID NO: 235610 - RNA, 19 nt, Artificial Sequence
  Description of Artificial Sequence: Synthetic oligonucleotide
  Sense strand starting at position 1804 SEQ ID NO: 3034
gggcaagugcucgagcuau

SEQ ID NO: 235611 - RNA, 19 nt, Artificial Sequence
  Description of Artificial Sequence: Synthetic oligonucleotide
  Antisense strand to SEQ ID NO: 235610
auagcucgagcacuugccc

SEQ ID NO: 235612 - RNA, 19 nt, Artificial Sequence
  Description of Artificial Sequence: Synthetic oligonucleotide
  Sense strand starting at position 1834 SEQ ID NO: 3034
cuaccuucuggauaagucu

SEQ ID NO: 235613 - RNA, 19 nt, Artificial Sequence
  Description of Artificial Sequence: Synthetic oligonucleotide
  Antisense strand to SEQ ID NO: 235612
agacuuauccagaagguag

SEQ ID NO: 235614 - RNA, 19 nt, Artificial Sequence
  Description of Artificial Sequence: Synthetic oligonucleotide
  Sense strand starting at position 1841 SEQ ID NO: 3034
cuggauaagucuuucugga

SEQ ID NO: 235615 - RNA, 19 nt, Artificial Sequence
  Description of Artificial Sequence: Synthetic oligonucleotide
  Antisense strand to SEQ ID NO: 235614
uccagaaagacuuauccag

SEQ ID NO: 235616 - RNA, 19 nt, Artificial Sequence
  Description of Artificial Sequence: Synthetic oligonucleotide
  Sense strand starting at position 1843 SEQ ID NO: 3034
ggauaagucuuucuggaua

SEQ ID NO: 235617 - RNA, 19 nt, Artificial Sequence
  Description of Artificial Sequence: Synthetic oligonucleotide
  Antisense strand to SEQ ID NO: 235616
uauccagaaagacuuaucc

SEQ ID NO: 235618 - RNA, 19 nt, Artificial Sequence
  Description of Artificial Sequence: Synthetic oligonucleotide
  Sense strand starting at position 1882 SEQ ID NO: 3034
ucggcagcaaguuauagaa

SEQ ID NO: 235619 - RNA, 19 nt, Artificial Sequence
  Description of Artificial Sequence: Synthetic oligonucleotide
  Antisense strand to SEQ ID NO: 235618
uucuauaacuugcugccga

SEQ ID NO: 235620 - RNA, 19 nt, Artificial Sequence
  Description of Artificial Sequence: Synthetic oligonucleotide
  Sense strand starting at position 2496 SEQ ID NO: 3034
acugacaccuuagagauuu

SEQ ID NO: 235621 - RNA, 19 nt, Artificial Sequence
  Description of Artificial Sequence: Synthetic oligonucleotide
  Antisense strand to SEQ ID NO: 235620
aaaucucuaaggugucagu

SEQ ID NO: 235622 - RNA, 19 nt, Artificial Sequence
  Description of Artificial Sequence: Synthetic oligonucleotide
  Sense strand starting at position 2518 SEQ ID NO: 3034
cggccuauccggucugagu

SEQ ID NO: 235623 - RNA, 19 nt, Artificial Sequence
  Description of Artificial Sequence: Synthetic oligonucleotide
  Antisense strand to SEQ ID NO: 235622
acucagaccggauaggccg

SEQ ID NO: 235624 - RNA, 19 nt, Artificial Sequence
  Description of Artificial Sequence: Synthetic oligonucleotide
  Sense strand starting at position 2557 SEQ ID NO: 3034
cgugcuguccuugugcaaa

SEQ ID NO: 235625 - RNA, 19 nt, Artificial Sequence
  Description of Artificial Sequence: Synthetic oligonucleotide
  Antisense strand to SEQ ID NO: 235624
uuugcacaaggacagcacg

SEQ ID NO: 235626 - RNA, 19 nt, Artificial Sequence
  Description of Artificial Sequence: Synthetic oligonucleotide
  Sense strand starting at position 2582 SEQ ID NO: 3034
ccagaaaucaagcguuaug

SEQ ID NO: 235627 - RNA, 19 nt, Artificial Sequence
  Description of Artificial Sequence: Synthetic oligonucleotide
  Antisense strand to SEQ ID NO: 235626
cauaacgcuugauuucugg

SEQ ID NO: 235628 - RNA, 19 nt, Artificial Sequence
  Description of Artificial Sequence: Synthetic oligonucleotide
  Sense strand starting at position 2585 SEQ ID NO: 3034
gaaaucaagcguuaugcuu

SEQ ID NO: 235629 - RNA, 19 nt, Artificial Sequence
  Description of Artificial Sequence: Synthetic oligonucleotide
  Antisense strand to SEQ ID NO: 235628
aagcauaacgcuugauuuc

SEQ ID NO: 235630 - RNA, 19 nt, Artificial Sequence
  Description of Artificial Sequence: Synthetic oligonucleotide
  Sense strand starting at position 2715 SEQ ID NO: 3034
aggagaugccuuugagaac

SEQ ID NO: 235631 - RNA, 19 nt, Artificial Sequence
  Description of Artificial Sequence: Synthetic oligonucleotide
  Antisense strand to SEQ ID NO: 235630
guucucaaaggcaucuccu

SEQ ID NO: 235632 - RNA, 19 nt, Artificial Sequence
  Description of Artificial Sequence: Synthetic oligonucleotide
  Sense strand starting at position 2737 SEQ ID NO: 3034
accauaaagucuguacaua

SEQ ID NO: 235633 - RNA, 19 nt, Artificial Sequence
  Description of Artificial Sequence: Synthetic oligonucleotide
  Antisense strand to SEQ ID NO: 235632
uauguacagacuuuauggu

SEQ ID NO: 235634 - RNA, 19 nt, Artificial Sequence
  Description of Artificial Sequence: Synthetic oligonucleotide
  Sense strand starting at position 2810 SEQ ID NO: 3034
ucaagagagccugguuaaa

SEQ ID NO: 235635 - RNA, 19 nt, Artificial Sequence
  Description of Artificial Sequence: Synthetic oligonucleotide
  Antisense strand to SEQ ID NO: 235634
uuuaaccaggcucucuuga

SEQ ID NO: 235636 - RNA, 19 nt, Artificial Sequence
  Description of Artificial Sequence: Synthetic oligonucleotide
  Sense strand starting at position 2812 SEQ ID NO: 3034
aagagagccugguuaaaug

SEQ ID NO: 235637 - RNA, 19 nt, Artificial Sequence
  Description of Artificial Sequence: Synthetic oligonucleotide
  Antisense strand to SEQ ID NO: 235636
cauuuaaccaggcucucuu

SEQ ID NO: 235638 - RNA, 19 nt, Artificial Sequence
  Description of Artificial Sequence: Synthetic oligonucleotide
  Sense strand starting at position 2875 SEQ ID NO: 3034
ugacgcaaauuuguucuau

SEQ ID NO: 235639 - RNA, 19 nt, Artificial Sequence
  Description of Artificial Sequence: Synthetic oligonucleotide
  Antisense strand to SEQ ID NO: 235638
auagaacaaauuugcguca

SEQ ID NO: 235640 - RNA, 19 nt, Artificial Sequence
  Description of Artificial Sequence: Synthetic oligonucleotide
  Sense strand starting at position 2877 SEQ ID NO: 3034
acgcaaauuuguucuauau

SEQ ID NO: 235641 - RNA, 19 nt, Artificial Sequence
  Description of Artificial Sequence: Synthetic oligonucleotide
  Antisense strand to SEQ ID NO: 235640
auauagaacaaauuugcgu

SEQ ID NO: 235642 - RNA, 19 nt, Artificial Sequence
  Description of Artificial Sequence: Synthetic oligonucleotide
  Sense strand starting at position 2915 SEQ ID NO: 3034
acuguaucuguaugguaga

SEQ ID NO: 235643 - RNA, 19 nt, Artificial Sequence
  Description of Artificial Sequence: Synthetic oligonucleotide
  Antisense strand to SEQ ID NO: 235642
ucuaccauacagauacagu

SEQ ID NO: 235644 - RNA, 19 nt, Artificial Sequence
  Description of Artificial Sequence: Synthetic oligonucleotide
  Sense strand starting at position 2965 SEQ ID NO: 3034
uguuaucaacuccauguuu

SEQ ID NO: 235645 - RNA, 19 nt, Artificial Sequence
  Description of Artificial Sequence: Synthetic oligonucleotide
  Antisense strand to SEQ ID NO: 235644
aaacauggaguugauaaca

SEQ ID NO: 235646 - RNA, 19 nt, Artificial Sequence
  Description of Artificial Sequence: Synthetic oligonucleotide
  Sense strand starting at position 2979 SEQ ID NO: 3034
uguuuaguggcgucauauu

SEQ ID NO: 235647 - RNA, 19 nt, Artificial Sequence
  Description of Artificial Sequence: Synthetic oligonucleotide
  Antisense strand to SEQ ID NO: 235646
aauaugacgccacuaaaca

SEQ ID NO: 235648 - RNA, 19 nt, Artificial Sequence
  Description of Artificial Sequence: Synthetic oligonucleotide
  Sense strand starting at position 3447 SEQ ID NO: 3034
cauagagagucuuuauguc

SEQ ID NO: 235649 - RNA, 19 nt, Artificial Sequence
  Description of Artificial Sequence: Synthetic oligonucleotide
  Antisense strand to SEQ ID NO: 235648
gacauaaagacucucuaug

SEQ ID NO: 235650 - RNA, 19 nt, Artificial Sequence
  Description of Artificial Sequence: Synthetic oligonucleotide
  Sense strand starting at position 3857 SEQ ID NO: 3034
caaucacggcccugucaaa

SEQ ID NO: 235651 - RNA, 19 nt, Artificial Sequence
  Description of Artificial Sequence: Synthetic oligonucleotide
  Antisense strand to SEQ ID NO: 235650
uuugacagggccgugauug

SEQ ID NO: 235652 - RNA, 19 nt, Artificial Sequence
  Description of Artificial Sequence: Synthetic oligonucleotide
  Sense strand starting at position 267 SEQ ID NO: 3035
ucccaaagaguuugagaac

SEQ ID NO: 235653 - RNA, 19 nt, Artificial Sequence
  Description of Artificial Sequence: Synthetic oligonucleotide
  Antisense strand to SEQ ID NO: 235652
guucucaaacucuuuggga

SEQ ID NO: 235654 - RNA, 19 nt, Artificial Sequence
  Description of Artificial Sequence: Synthetic oligonucleotide
  Sense strand starting at position 543 SEQ ID NO: 3035
gucgaguagugguuagaag

SEQ ID NO: 235655 - RNA, 19 nt, Artificial Sequence
  Description of Artificial Sequence: Synthetic oligonucleotide
  Antisense strand to SEQ ID NO: 235654
cuucuaaccacuacucgac

SEQ ID NO: 235656 - RNA, 19 nt, Artificial Sequence
  Description of Artificial Sequence: Synthetic oligonucleotide
  Sense strand starting at position 577 SEQ ID NO: 3035
gaggguaguugggaagaua

SEQ ID NO: 235657 - RNA, 19 nt, Artificial Sequence
  Description of Artificial Sequence: Synthetic oligonucleotide
  Antisense strand to SEQ ID NO: 235656
uaucuucccaacuacccuc

SEQ ID NO: 235658 - RNA, 19 nt, Artificial Sequence
  Description of Artificial Sequence: Synthetic oligonucleotide
  Sense strand starting at position 913 SEQ ID NO: 3035
cguauuccucauuaagcua

SEQ ID NO: 235659 - RNA, 19 nt, Artificial Sequence
  Description of Artificial Sequence: Synthetic oligonucleotide
  Antisense strand to SEQ ID NO: 235658
uagcuuaaugaggaauacg

SEQ ID NO: 235660 - RNA, 19 nt, Artificial Sequence
  Description of Artificial Sequence: Synthetic oligonucleotide
  Sense strand starting at position 1078 SEQ ID NO: 3035
ugcuucuuuguguuguaua

SEQ ID NO: 235661 - RNA, 19 nt, Artificial Sequence
  Description of Artificial Sequence: Synthetic oligonucleotide
  Antisense strand to SEQ ID NO: 235660
uauacaacacaaagaagca

SEQ ID NO: 235662 - RNA, 19 nt, Artificial Sequence
  Description of Artificial Sequence: Synthetic oligonucleotide
  Sense strand starting at position 1163 SEQ ID NO: 3035
ccuagauuccuguacuacu

SEQ ID NO: 235663 - RNA, 19 nt, Artificial Sequence
  Description of Artificial Sequence: Synthetic oligonucleotide
  Antisense strand to SEQ ID NO: 235662
aguaguacaggaaucuagg

SEQ ID NO: 235664 - RNA, 19 nt, Artificial Sequence
  Description of Artificial Sequence: Synthetic oligonucleotide
  Sense strand starting at position 1171 SEQ ID NO: 3035
ccuguacuacucuggcuaa

SEQ ID NO: 235665 - RNA, 19 nt, Artificial Sequence
  Description of Artificial Sequence: Synthetic oligonucleotide
  Antisense strand to SEQ ID NO: 235664
uuagccagaguaguacagg

SEQ ID NO: 235666 - RNA, 19 nt, Artificial Sequence
  Description of Artificial Sequence: Synthetic oligonucleotide
  Sense strand starting at position 1174 SEQ ID NO: 3035
guacuacucuggcuaaaug

SEQ ID NO: 235667 - RNA, 19 nt, Artificial Sequence
  Description of Artificial Sequence: Synthetic oligonucleotide
  Antisense strand to SEQ ID NO: 235666
cauuuagccagaguaguac

SEQ ID NO: 235668 - RNA, 19 nt, Artificial Sequence
  Description of Artificial Sequence: Synthetic oligonucleotide
  Sense strand starting at position 1305 SEQ ID NO: 3035
cuuugauaacuguguuagu

SEQ ID NO: 235669 - RNA, 19 nt, Artificial Sequence
  Description of Artificial Sequence: Synthetic oligonucleotide
  Antisense strand to SEQ ID NO: 235668
acuaacacaguuaucaaag

SEQ ID NO: 235670 - RNA, 19 nt, Artificial Sequence
  Description of Artificial Sequence: Synthetic oligonucleotide
  Sense strand starting at position 1306 SEQ ID NO: 3035
uuugauaacuguguuaguu

SEQ ID NO: 235671 - RNA, 19 nt, Artificial Sequence
  Description of Artificial Sequence: Synthetic oligonucleotide
  Antisense strand to SEQ ID NO: 235670
aacuaacacaguuaucaaa

SEQ ID NO: 235672 - RNA, 19 nt, Artificial Sequence
  Description of Artificial Sequence: Synthetic oligonucleotide
  Sense strand starting at position 1318 SEQ ID NO: 3035
guuaguuauaacugaugga

SEQ ID NO: 235673 - RNA, 19 nt, Artificial Sequence
  Description of Artificial Sequence: Synthetic oligonucleotide
  Antisense strand to SEQ ID NO: 235672
uccaucaguuauaacuaac

SEQ ID NO: 235674 - RNA, 19 nt, Artificial Sequence
  Description of Artificial Sequence: Synthetic oligonucleotide
  Sense strand starting at position 1322 SEQ ID NO: 3035
guuauaacugauggaguca

SEQ ID NO: 235675 - RNA, 19 nt, Artificial Sequence
  Description of Artificial Sequence: Synthetic oligonucleotide
  Antisense strand to SEQ ID NO: 235674
ugacuccaucaguuauaac

SEQ ID NO: 235676 - RNA, 19 nt, Artificial Sequence
  Description of Artificial Sequence: Synthetic oligonucleotide
  Sense strand starting at position 1331 SEQ ID NO: 3035
gauggagucaacugauggu

SEQ ID NO: 235677 - RNA, 19 nt, Artificial Sequence
  Description of Artificial Sequence: Synthetic oligonucleotide
  Antisense strand to SEQ ID NO: 235676
accaucaguugacuccauc

SEQ ID NO: 235678 - RNA, 19 nt, Artificial Sequence
  Description of Artificial Sequence: Synthetic oligonucleotide
  Sense strand starting at position 1335 SEQ ID NO: 3035
gagucaacugauggugaaa

SEQ ID NO: 235679 - RNA, 19 nt, Artificial Sequence
  Description of Artificial Sequence: Synthetic oligonucleotide
  Antisense strand to SEQ ID NO: 235678
uuucaccaucaguugacuc

SEQ ID NO: 235680 - RNA, 19 nt, Artificial Sequence
  Description of Artificial Sequence: Synthetic oligonucleotide
  Sense strand starting at position 1425 SEQ ID NO: 3035
gggcaagugcucgagcuau

SEQ ID NO: 235681 - RNA, 19 nt, Artificial Sequence
  Description of Artificial Sequence: Synthetic oligonucleotide
  Antisense strand to SEQ ID NO: 235680
auagcucgagcacuugccc

SEQ ID NO: 235682 - RNA, 19 nt, Artificial Sequence
  Description of Artificial Sequence: Synthetic oligonucleotide
  Sense strand starting at position 1455 SEQ ID NO: 3035
cuaccuucuggauaagucu

SEQ ID NO: 235683 - RNA, 19 nt, Artificial Sequence
  Description of Artificial Sequence: Synthetic oligonucleotide
  Antisense strand to SEQ ID NO: 235682
agacuuauccagaagguag

SEQ ID NO: 235684 - RNA, 19 nt, Artificial Sequence
  Description of Artificial Sequence: Synthetic oligonucleotide
  Sense strand starting at position 1462 SEQ ID NO: 3035
cuggauaagucuuucugga

SEQ ID NO: 235685 - RNA, 19 nt, Artificial Sequence
  Description of Artificial Sequence: Synthetic oligonucleotide
  Antisense strand to SEQ ID NO: 235684
uccagaaagacuuauccag

SEQ ID NO: 235686 - RNA, 19 nt, Artificial Sequence
  Description of Artificial Sequence: Synthetic oligonucleotide
  Sense strand starting at position 1464 SEQ ID NO: 3035
ggauaagucuuucuggaua

SEQ ID NO: 235687 - RNA, 19 nt, Artificial Sequence
  Description of Artificial Sequence: Synthetic oligonucleotide
  Antisense strand to SEQ ID NO: 235686
uauccagaaagacuuaucc

SEQ ID NO: 235688 - RNA, 19 nt, Artificial Sequence
  Description of Artificial Sequence: Synthetic oligonucleotide
  Sense strand starting at position 1503 SEQ ID NO: 3035
ucggcagcaaguuauagaa

SEQ ID NO: 235689 - RNA, 19 nt, Artificial Sequence
  Description of Artificial Sequence: Synthetic oligonucleotide
  Antisense strand to SEQ ID NO: 235688
uucuauaacuugcugccga

SEQ ID NO: 235690 - RNA, 19 nt, Artificial Sequence
  Description of Artificial Sequence: Synthetic oligonucleotide
  Sense strand starting at position 2117 SEQ ID NO: 3035
acugacaccuuagagauuu

SEQ ID NO: 235691 - RNA, 19 nt, Artificial Sequence
  Description of Artificial Sequence: Synthetic oligonucleotide
  Antisense strand to SEQ ID NO: 235690
aaaucucuaaggugucagu

SEQ ID NO: 235692 - RNA, 19 nt, Artificial Sequence
  Description of Artificial Sequence: Synthetic oligonucleotide
  Sense strand starting at position 2139 SEQ ID NO: 3035
cggccuauccggucugagu

SEQ ID NO: 235693 - RNA, 19 nt, Artificial Sequence
  Description of Artificial Sequence: Synthetic oligonucleotide
  Antisense strand to SEQ ID NO: 235692
acucagaccggauaggccg

SEQ ID NO: 235694 - RNA, 19 nt, Artificial Sequence
  Description of Artificial Sequence: Synthetic oligonucleotide
  Sense strand starting at position 2178 SEQ ID NO: 3035
cgugcuguccuugugcaaa

SEQ ID NO: 235695 - RNA, 19 nt, Artificial Sequence
  Description of Artificial Sequence: Synthetic oligonucleotide
  Antisense strand to SEQ ID NO: 235694
uuugcacaaggacagcacg

SEQ ID NO: 235696 - RNA, 19 nt, Artificial Sequence
  Description of Artificial Sequence: Synthetic oligonucleotide
  Sense strand starting at position 2203 SEQ ID NO: 3035
ccagaaaucaagcguuaug

SEQ ID NO: 235697 - RNA, 19 nt, Artificial Sequence
  Description of Artificial Sequence: Synthetic oligonucleotide
  Antisense strand to SEQ ID NO: 235696
cauaacgcuugauuucugg

SEQ ID NO: 235698 - RNA, 19 nt, Artificial Sequence
  Description of Artificial Sequence: Synthetic oligonucleotide
  Sense strand starting at position 2206 SEQ ID NO: 3035
gaaaucaagcguuaugcuu

SEQ ID NO: 235699 - RNA, 19 nt, Artificial Sequence
  Description of Artificial Sequence: Synthetic oligonucleotide
  Antisense strand to SEQ ID NO: 235698
aagcauaacgcuugauuuc

SEQ ID NO: 235700 - RNA, 19 nt, Artificial Sequence
  Description of Artificial Sequence: Synthetic oligonucleotide
  Sense strand starting at position 2336 SEQ ID NO: 3035
aggagaugccuuugagaac

SEQ ID NO: 235701 - RNA, 19 nt, Artificial Sequence
  Description of Artificial Sequence: Synthetic oligonucleotide
  Antisense strand to SEQ ID NO: 235700
guucucaaaggcaucuccu

SEQ ID NO: 235702 - RNA, 19 nt, Artificial Sequence
  Description of Artificial Sequence: Synthetic oligonucleotide
  Sense strand starting at position 2358 SEQ ID NO: 3035
accauaaagucuguacaua

SEQ ID NO: 235703 - RNA, 19 nt, Artificial Sequence
  Description of Artificial Sequence: Synthetic oligonucleotide
  Antisense strand to SEQ ID NO: 235702
uauguacagacuuuauggu

SEQ ID NO: 235704 - RNA, 19 nt, Artificial Sequence
  Description of Artificial Sequence: Synthetic oligonucleotide
  Sense strand starting at position 2431 SEQ ID NO: 3035
ucaagagagccugguuaaa

SEQ ID NO: 235705 - RNA, 19 nt, Artificial Sequence
  Description of Artificial Sequence: Synthetic oligonucleotide
  Antisense strand to SEQ ID NO: 235704
uuuaaccaggcucucuuga

SEQ ID NO: 235706 - RNA, 19 nt, Artificial Sequence
  Description of Artificial Sequence: Synthetic oligonucleotide
  Sense strand starting at position 2433 SEQ ID NO: 3035
aagagagccugguuaaaug

SEQ ID NO: 235707 - RNA, 19 nt, Artificial Sequence
  Description of Artificial Sequence: Synthetic oligonucleotide
  Antisense strand to SEQ ID NO: 235706
cauuuaaccaggcucucuu

SEQ ID NO: 235708 - RNA, 19 nt, Artificial Sequence
  Description of Artificial Sequence: Synthetic oligonucleotide
  Sense strand starting at position 2484 SEQ ID NO: 3035
aaagcuauugucugacgca

SEQ ID NO: 235709 - RNA, 19 nt, Artificial Sequence
  Description of Artificial Sequence: Synthetic oligonucleotide
  Antisense strand to SEQ ID NO: 235708
ugcgucagacaauagcuuu

SEQ ID NO: 235710 - RNA, 19 nt, Artificial Sequence
  Description of Artificial Sequence: Synthetic oligonucleotide
  Sense strand starting at position 2496 SEQ ID NO: 3035
ugacgcaaauuuguucuau

SEQ ID NO: 235711 - RNA, 19 nt, Artificial Sequence
  Description of Artificial Sequence: Synthetic oligonucleotide
  Antisense strand to SEQ ID NO: 235710
auagaacaaauuugcguca

SEQ ID NO: 235712 - RNA, 19 nt, Artificial Sequence
  Description of Artificial Sequence: Synthetic oligonucleotide
  Sense strand starting at position 2498 SEQ ID NO: 3035
acgcaaauuuguucuauau

SEQ ID NO: 235713 - RNA, 19 nt, Artificial Sequence
  Description of Artificial Sequence: Synthetic oligonucleotide
  Antisense strand to SEQ ID NO: 235712
auauagaacaaauuugcgu

SEQ ID NO: 235714 - RNA, 19 nt, Artificial Sequence
  Description of Artificial Sequence: Synthetic oligonucleotide
  Sense strand starting at position 2536 SEQ ID NO: 3035
acuguaucuguaugguaga

SEQ ID NO: 235715 - RNA, 19 nt, Artificial Sequence
  Description of Artificial Sequence: Synthetic oligonucleotide
  Antisense strand to SEQ ID NO: 235714
ucuaccauacagauacagu

SEQ ID NO: 235716 - RNA, 19 nt, Artificial Sequence
  Description of Artificial Sequence: Synthetic oligonucleotide
  Sense strand starting at position 2586 SEQ ID NO: 3035
uguuaucaacuccauguuu

SEQ ID NO: 235717 - RNA, 19 nt, Artificial Sequence
  Description of Artificial Sequence: Synthetic oligonucleotide
  Antisense strand to SEQ ID NO: 235716
aaacauggaguugauaaca

SEQ ID NO: 235718 - RNA, 19 nt, Artificial Sequence
  Description of Artificial Sequence: Synthetic oligonucleotide
  Sense strand starting at position 2600 SEQ ID NO: 3035
uguuuaguggcgucauauu

SEQ ID NO: 235719 - RNA, 19 nt, Artificial Sequence
  Description of Artificial Sequence: Synthetic oligonucleotide
  Antisense strand to SEQ ID NO: 235718
aauaugacgccacuaaaca

SEQ ID NO: 235720 - RNA, 19 nt, Artificial Sequence
  Description of Artificial Sequence: Synthetic oligonucleotide
  Sense strand starting at position 3068 SEQ ID NO: 3035
cauagagagucuuuauguc

SEQ ID NO: 235721 - RNA, 19 nt, Artificial Sequence
  Description of Artificial Sequence: Synthetic oligonucleotide
  Antisense strand to SEQ ID NO: 235720
gacauaaagacucucuaug

SEQ ID NO: 235722 - RNA, 19 nt, Artificial Sequence
  Description of Artificial Sequence: Synthetic oligonucleotide
  Sense strand starting at position 3478 SEQ ID NO: 3035
caaucacggcccugucaaa

SEQ ID NO: 235723 - RNA, 19 nt, Artificial Sequence
  Description of Artificial Sequence: Synthetic oligonucleotide
  Antisense strand to SEQ ID NO: 235722
uuugacagggccgugauug

SEQ ID NO: 235724 - RNA, 19 nt, Artificial Sequence
  Description of Artificial Sequence: Synthetic oligonucleotide
  Sense strand starting at position 3921 SEQ ID NO: 3035
agggacuacuuauaccaua

SEQ ID NO: 235725 - RNA, 19 nt, Artificial Sequence
  Description of Artificial Sequence: Synthetic oligonucleotide
  Antisense strand to SEQ ID NO: 235724
uaugguauaaguagucccu

SEQ ID NO: 235726 - RNA, 19 nt, Artificial Sequence
  Description of Artificial Sequence: Synthetic oligonucleotide
  Sense strand starting at position 3953 SEQ ID NO: 3035
cuuagaaguccagguguuu

SEQ ID NO: 235727 - RNA, 19 nt, Artificial Sequence
  Description of Artificial Sequence: Synthetic oligonucleotide
  Antisense strand to SEQ ID NO: 235726
aaacaccuggacuucuaag

SEQ ID NO: 235728 - RNA, 19 nt, Artificial Sequence
  Description of Artificial Sequence: Synthetic oligonucleotide
  Sense strand starting at position 3962 SEQ ID NO: 3035
ccagguguuucucccagau

SEQ ID NO: 235729 - RNA, 19 nt, Artificial Sequence
  Description of Artificial Sequence: Synthetic oligonucleotide
  Antisense strand to SEQ ID NO: 235728
aucugggagaaacaccugg

SEQ ID NO: 235730 - RNA, 19 nt, Artificial Sequence
  Description of Artificial Sequence: Synthetic oligonucleotide
  Sense strand starting at position 3966 SEQ ID NO: 3035
guguuucucccagauaucc

SEQ ID NO: 235731 - RNA, 19 nt, Artificial Sequence
  Description of Artificial Sequence: Synthetic oligonucleotide
  Antisense strand to SEQ ID NO: 235730
ggauaucugggagaaacac

SEQ ID NO: 235732 - RNA, 19 nt, Artificial Sequence
  Description of Artificial Sequence: Synthetic oligonucleotide
  Sense strand starting at position 67 SEQ ID NO: 3036
uguacauugaauggaugau

SEQ ID NO: 235733 - RNA, 19 nt, Artificial Sequence
  Description of Artificial Sequence: Synthetic oligonucleotide
  Antisense strand to SEQ ID NO: 235732
aucauccauucaauguaca

SEQ ID NO: 235734 - RNA, 19 nt, Artificial Sequence
  Description of Artificial Sequence: Synthetic oligonucleotide
  Sense strand starting at position 194 SEQ ID NO: 3036
uuggaaaccuugccauaua

SEQ ID NO: 235735 - RNA, 19 nt, Artificial Sequence
  Description of Artificial Sequence: Synthetic oligonucleotide
  Antisense strand to SEQ ID NO: 235734
uauauggcaagguuuccaa

SEQ ID NO: 235736 - RNA, 19 nt, Artificial Sequence
  Description of Artificial Sequence: Synthetic oligonucleotide
  Sense strand starting at position 246 SEQ ID NO: 3036
uguuauauccgugcuugca

SEQ ID NO: 235737 - RNA, 19 nt, Artificial Sequence
  Description of Artificial Sequence: Synthetic oligonucleotide
  Antisense strand to SEQ ID NO: 235736
ugcaagcacggauauaaca

SEQ ID NO: 235738 - RNA, 19 nt, Artificial Sequence
  Description of Artificial Sequence: Synthetic oligonucleotide
  Sense strand starting at position 247 SEQ ID NO: 3036
guuauauccgugcuugcag

SEQ ID NO: 235739 - RNA, 19 nt, Artificial Sequence
  Description of Artificial Sequence: Synthetic oligonucleotide
  Antisense strand to SEQ ID NO: 235738
cugcaagcacggauauaac

SEQ ID NO: 235740 - RNA, 19 nt, Artificial Sequence
  Description of Artificial Sequence: Synthetic oligonucleotide
  Sense strand starting at position 573 SEQ ID NO: 3036
cucacuuauuuguuuguga

SEQ ID NO: 235741 - RNA, 19 nt, Artificial Sequence
  Description of Artificial Sequence: Synthetic oligonucleotide
  Antisense strand to SEQ ID NO: 235740
ucacaaacaaauaagugag

SEQ ID NO: 235742 - RNA, 19 nt, Artificial Sequence
  Description of Artificial Sequence: Synthetic oligonucleotide
  Sense strand starting at position 624 SEQ ID NO: 3036
gaguuaauuguuugaauac

SEQ ID NO: 235743 - RNA, 19 nt, Artificial Sequence
  Description of Artificial Sequence: Synthetic oligonucleotide
  Antisense strand to SEQ ID NO: 235742
guauucaaacaauuaacuc

SEQ ID NO: 235744 - RNA, 19 nt, Artificial Sequence
  Description of Artificial Sequence: Synthetic oligonucleotide
  Sense strand starting at position 855 SEQ ID NO: 3036
agaagacauuauguucuau

SEQ ID NO: 235745 - RNA, 19 nt, Artificial Sequence
  Description of Artificial Sequence: Synthetic oligonucleotide
  Antisense strand to SEQ ID NO: 235744
auagaacauaaugucuucu

SEQ ID NO: 235746 - RNA, 19 nt, Artificial Sequence
  Description of Artificial Sequence: Synthetic oligonucleotide
  Sense strand starting at position 887 SEQ ID NO: 3036
ggcauuguaguccauauaa

SEQ ID NO: 235747 - RNA, 19 nt, Artificial Sequence
  Description of Artificial Sequence: Synthetic oligonucleotide
  Antisense strand to SEQ ID NO: 235746
uuauauggacuacaaugcc

SEQ ID NO: 235748 - RNA, 19 nt, Artificial Sequence
  Description of Artificial Sequence: Synthetic oligonucleotide
  Sense strand starting at position 1240 SEQ ID NO: 3036
uuugauagaugucugaaau

SEQ ID NO: 235749 - RNA, 19 nt, Artificial Sequence
  Description of Artificial Sequence: Synthetic oligonucleotide
  Antisense strand to SEQ ID NO: 235748
auuucagacaucuaucaaa

SEQ ID NO: 235750 - RNA, 19 nt, Artificial Sequence
  Description of Artificial Sequence: Synthetic oligonucleotide
  Sense strand starting at position 1241 SEQ ID NO: 3036
uugauagaugucugaaauu

SEQ ID NO: 235751 - RNA, 19 nt, Artificial Sequence
  Description of Artificial Sequence: Synthetic oligonucleotide
  Antisense strand to SEQ ID NO: 235750
aauuucagacaucuaucaa

SEQ ID NO: 235752 - RNA, 19 nt, Artificial Sequence
  Description of Artificial Sequence: Synthetic oligonucleotide
  Sense strand starting at position 1761 SEQ ID NO: 3036
uagugugcuguagaacaga

SEQ ID NO: 235753 - RNA, 19 nt, Artificial Sequence
  Description of Artificial Sequence: Synthetic oligonucleotide
  Antisense strand to SEQ ID NO: 235752
ucuguucuacagcacacua

SEQ ID NO: 235754 - RNA, 19 nt, Artificial Sequence
  Description of Artificial Sequence: Synthetic oligonucleotide
  Sense strand starting at position 1897 SEQ ID NO: 3036
cacagauauuacgcugaca

SEQ ID NO: 235755 - RNA, 19 nt, Artificial Sequence
  Description of Artificial Sequence: Synthetic oligonucleotide
  Antisense strand to SEQ ID NO: 235754
ugucagcguaauaucugug

SEQ ID NO: 235756 - RNA, 19 nt, Artificial Sequence
  Description of Artificial Sequence: Synthetic oligonucleotide
  Sense strand starting at position 1900 SEQ ID NO: 3036
agauauuacgcugacaaua

SEQ ID NO: 235757 - RNA, 19 nt, Artificial Sequence
  Description of Artificial Sequence: Synthetic oligonucleotide
  Antisense strand to SEQ ID NO: 235756
uauugucagcguaauaucu

SEQ ID NO: 235758 - RNA, 19 nt, Artificial Sequence
  Description of Artificial Sequence: Synthetic oligonucleotide
  Sense strand starting at position 1905 SEQ ID NO: 3036
uuacgcugacaauauaaau

SEQ ID NO: 235759 - RNA, 19 nt, Artificial Sequence
  Description of Artificial Sequence: Synthetic oligonucleotide
  Antisense strand to SEQ ID NO: 235758
auuuauauugucagcguaa

SEQ ID NO: 235760 - RNA, 19 nt, Artificial Sequence
  Description of Artificial Sequence: Synthetic oligonucleotide
  Sense strand starting at position 1998 SEQ ID NO: 3036
ugcuuauauugggugagag

SEQ ID NO: 235761 - RNA, 19 nt, Artificial Sequence
  Description of Artificial Sequence: Synthetic oligonucleotide
  Antisense strand to SEQ ID NO: 235760
cucucacccaauauaagca

SEQ ID NO: 235762 - RNA, 19 nt, Artificial Sequence
  Description of Artificial Sequence: Synthetic oligonucleotide
  Sense strand starting at position 1999 SEQ ID NO: 3036
gcuuauauugggugagaga

SEQ ID NO: 235763 - RNA, 19 nt, Artificial Sequence
  Description of Artificial Sequence: Synthetic oligonucleotide
  Antisense strand to SEQ ID NO: 235762
ucucucacccaauauaagc

SEQ ID NO: 235764 - RNA, 19 nt, Artificial Sequence
  Description of Artificial Sequence: Synthetic oligonucleotide
  Sense strand starting at position 2083 SEQ ID NO: 3036
gagagagcagcuuggaaau

SEQ ID NO: 235765 - RNA, 19 nt, Artificial Sequence
  Description of Artificial Sequence: Synthetic oligonucleotide
  Antisense strand to SEQ ID NO: 235764
auuuccaagcugcucucuc

SEQ ID NO: 235766 - RNA, 19 nt, Artificial Sequence
  Description of Artificial Sequence: Synthetic oligonucleotide
  Sense strand starting at position 2134 SEQ ID NO: 3036
acuuaaguucucuaaagug

SEQ ID NO: 235767 - RNA, 19 nt, Artificial Sequence
  Description of Artificial Sequence: Synthetic oligonucleotide
  Antisense strand to SEQ ID NO: 235766
cacuuuagagaacuuaagu

SEQ ID NO: 235768 - RNA, 19 nt, Artificial Sequence
  Description of Artificial Sequence: Synthetic oligonucleotide
  Sense strand starting at position 2254 SEQ ID NO: 3036
cuaccuagccaugaugaau

SEQ ID NO: 235769 - RNA, 19 nt, Artificial Sequence
  Description of Artificial Sequence: Synthetic oligonucleotide
  Antisense strand to SEQ ID NO: 235768
auucaucauggcuagguag

SEQ ID NO: 235770 - RNA, 19 nt, Artificial Sequence
  Description of Artificial Sequence: Synthetic oligonucleotide
  Sense strand starting at position 2368 SEQ ID NO: 3036
cguggaguuuauuuauguu

SEQ ID NO: 235771 - RNA, 19 nt, Artificial Sequence
  Description of Artificial Sequence: Synthetic oligonucleotide
  Antisense strand to SEQ ID NO: 235770
aacauaaauaaacuccacg

SEQ ID NO: 235772 - RNA, 19 nt, Artificial Sequence
  Description of Artificial Sequence: Synthetic oligonucleotide
  Sense strand starting at position 2507 SEQ ID NO: 3036
acaggaaauuaucugguau

SEQ ID NO: 235773 - RNA, 19 nt, Artificial Sequence
  Description of Artificial Sequence: Synthetic oligonucleotide
  Antisense strand to SEQ ID NO: 235772
auaccagauaauuuccugu

SEQ ID NO: 235774 - RNA, 19 nt, Artificial Sequence
  Description of Artificial Sequence: Synthetic oligonucleotide
  Sense strand starting at position 2672 SEQ ID NO: 3036
cuuuaaugaucugugacau

SEQ ID NO: 235775 - RNA, 19 nt, Artificial Sequence
  Description of Artificial Sequence: Synthetic oligonucleotide
  Antisense strand to SEQ ID NO: 235774
augucacagaucauuaaag

SEQ ID NO: 235776 - RNA, 19 nt, Artificial Sequence
  Description of Artificial Sequence: Synthetic oligonucleotide
  Sense strand starting at position 2673 SEQ ID NO: 3036
uuuaaugaucugugacauu

SEQ ID NO: 235777 - RNA, 19 nt, Artificial Sequence
  Description of Artificial Sequence: Synthetic oligonucleotide
  Antisense strand to SEQ ID NO: 235776
aaugucacagaucauuaaa

SEQ ID NO: 235778 - RNA, 19 nt, Artificial Sequence
  Description of Artificial Sequence: Synthetic oligonucleotide
  Sense strand starting at position 2676 SEQ ID NO: 3036
aaugaucugugacauuuag

SEQ ID NO: 235779 - RNA, 19 nt, Artificial Sequence
  Description of Artificial Sequence: Synthetic oligonucleotide
  Antisense strand to SEQ ID NO: 235778
cuaaaugucacagaucauu

SEQ ID NO: 235780 - RNA, 19 nt, Artificial Sequence
  Description of Artificial Sequence: Synthetic oligonucleotide
  Sense strand starting at position 2698 SEQ ID NO: 3036
aaaugauucuggucacugu

SEQ ID NO: 235781 - RNA, 19 nt, Artificial Sequence
  Description of Artificial Sequence: Synthetic oligonucleotide
  Antisense strand to SEQ ID NO: 235780
acagugaccagaaucauuu

SEQ ID NO: 235782 - RNA, 19 nt, Artificial Sequence
  Description of Artificial Sequence: Synthetic oligonucleotide
  Sense strand starting at position 2699 SEQ ID NO: 3036
aaugauucuggucacugua

SEQ ID NO: 235783 - RNA, 19 nt, Artificial Sequence
  Description of Artificial Sequence: Synthetic oligonucleotide
  Antisense strand to SEQ ID NO: 235782
uacagugaccagaaucauu

SEQ ID NO: 235784 - RNA, 19 nt, Artificial Sequence
  Description of Artificial Sequence: Synthetic oligonucleotide
  Sense strand starting at position 2842 SEQ ID NO: 3036
gugucucugccuccuuauu

SEQ ID NO: 235785 - RNA, 19 nt, Artificial Sequence
  Description of Artificial Sequence: Synthetic oligonucleotide
  Antisense strand to SEQ ID NO: 235784
aauaaggaggcagagacac

SEQ ID NO: 235786 - RNA, 19 nt, Artificial Sequence
  Description of Artificial Sequence: Synthetic oligonucleotide
  Sense strand starting at position 2986 SEQ ID NO: 3036
ugaugacuuguauggaggu

SEQ ID NO: 235787 - RNA, 19 nt, Artificial Sequence
  Description of Artificial Sequence: Synthetic oligonucleotide
  Antisense strand to SEQ ID NO: 235786
accuccauacaagucauca

SEQ ID NO: 235788 - RNA, 19 nt, Artificial Sequence
  Description of Artificial Sequence: Synthetic oligonucleotide
  Sense strand starting at position 3000 SEQ ID NO: 3036
gagguaaaucauugaggca

SEQ ID NO: 235789 - RNA, 19 nt, Artificial Sequence
  Description of Artificial Sequence: Synthetic oligonucleotide
  Antisense strand to SEQ ID NO: 235788
ugccucaaugauuuaccuc

SEQ ID NO: 235790 - RNA, 19 nt, Artificial Sequence
  Description of Artificial Sequence: Synthetic oligonucleotide
  Sense strand starting at position 3187 SEQ ID NO: 3036
caaaguguggucuaaggac

SEQ ID NO: 235791 - RNA, 19 nt, Artificial Sequence
  Description of Artificial Sequence: Synthetic oligonucleotide
  Antisense strand to SEQ ID NO: 235790
guccuuagaccacacuuug

SEQ ID NO: 235792 - RNA, 19 nt, Artificial Sequence
  Description of Artificial Sequence: Synthetic oligonucleotide
  Sense strand starting at position 3337 SEQ ID NO: 3036
acuuuaucuccucauuggu

SEQ ID NO: 235793 - RNA, 19 nt, Artificial Sequence
  Description of Artificial Sequence: Synthetic oligonucleotide
  Antisense strand to SEQ ID NO: 235792
accaaugaggagauaaagu

SEQ ID NO: 235794 - RNA, 19 nt, Artificial Sequence
  Description of Artificial Sequence: Synthetic oligonucleotide
  Sense strand starting at position 3444 SEQ ID NO: 3036
cggucuagagaguaauacu

SEQ ID NO: 235795 - RNA, 19 nt, Artificial Sequence
  Description of Artificial Sequence: Synthetic oligonucleotide
  Antisense strand to SEQ ID NO: 235794
aguauuacucucuagaccg

SEQ ID NO: 235796 - RNA, 19 nt, Artificial Sequence
  Description of Artificial Sequence: Synthetic oligonucleotide
  Sense strand starting at position 3470 SEQ ID NO: 3036
acgguaauagcuugaaaga

SEQ ID NO: 235797 - RNA, 19 nt, Artificial Sequence
  Description of Artificial Sequence: Synthetic oligonucleotide
  Antisense strand to SEQ ID NO: 235796
ucuuucaagcuauuaccgu

SEQ ID NO: 235798 - RNA, 19 nt, Artificial Sequence
  Description of Artificial Sequence: Synthetic oligonucleotide
  Sense strand starting at position 3471 SEQ ID NO: 3036
cgguaauagcuugaaagag

SEQ ID NO: 235799 - RNA, 19 nt, Artificial Sequence
  Description of Artificial Sequence: Synthetic oligonucleotide
  Antisense strand to SEQ ID NO: 235798
cucuuucaagcuauuaccg

SEQ ID NO: 235800 - RNA, 19 nt, Artificial Sequence
  Description of Artificial Sequence: Synthetic oligonucleotide
  Sense strand starting at position 3479 SEQ ID NO: 3036
gcuugaaagaguggauuga

SEQ ID NO: 235801 - RNA, 19 nt, Artificial Sequence
  Description of Artificial Sequence: Synthetic oligonucleotide
  Antisense strand to SEQ ID NO: 235800
ucaauccacucuuucaagc

SEQ ID NO: 235802 - RNA, 19 nt, Artificial Sequence
  Description of Artificial Sequence: Synthetic oligonucleotide
  Sense strand starting at position 3595 SEQ ID NO: 3036
cccauugucuauuugucua

SEQ ID NO: 235803 - RNA, 19 nt, Artificial Sequence
  Description of Artificial Sequence: Synthetic oligonucleotide
  Antisense strand to SEQ ID NO: 235802
uagacaaauagacaauggg

SEQ ID NO: 235804 - RNA, 19 nt, Artificial Sequence
  Description of Artificial Sequence: Synthetic oligonucleotide
  Sense strand starting at position 3605 SEQ ID NO: 3036
auuugucuauuugagcaga

SEQ ID NO: 235805 - RNA, 19 nt, Artificial Sequence
  Description of Artificial Sequence: Synthetic oligonucleotide
  Antisense strand to SEQ ID NO: 235804
ucugcucaaauagacaaau

SEQ ID NO: 235806 - RNA, 19 nt, Artificial Sequence
  Description of Artificial Sequence: Synthetic oligonucleotide
  Sense strand starting at position 3827 SEQ ID NO: 3036
agaagugacuaucccaagu

SEQ ID NO: 235807 - RNA, 19 nt, Artificial Sequence
  Description of Artificial Sequence: Synthetic oligonucleotide
  Antisense strand to SEQ ID NO: 235806
acuugggauagucacuucu

SEQ ID NO: 235808 - RNA, 19 nt, Artificial Sequence
  Description of Artificial Sequence: Synthetic oligonucleotide
  Sense strand starting at position 3909 SEQ ID NO: 3036
guaccauaaggguaagcau

SEQ ID NO: 235809 - RNA, 19 nt, Artificial Sequence
  Description of Artificial Sequence: Synthetic oligonucleotide
  Antisense strand to SEQ ID NO: 235808
augcuuacccuuaugguac

SEQ ID NO: 235810 - RNA, 19 nt, Artificial Sequence
  Description of Artificial Sequence: Synthetic oligonucleotide
  Sense strand starting at position 3918 SEQ ID NO: 3036
ggguaagcauucucaggau

SEQ ID NO: 235811 - RNA, 19 nt, Artificial Sequence
  Description of Artificial Sequence: Synthetic oligonucleotide
  Antisense strand to SEQ ID NO: 235810
auccugagaaugcuuaccc

SEQ ID NO: 235812 - RNA, 19 nt, Artificial Sequence
  Description of Artificial Sequence: Synthetic oligonucleotide
  Sense strand starting at position 263 SEQ ID NO: 3037
cugcuacuuggagaugauu

SEQ ID NO: 235813 - RNA, 19 nt, Artificial Sequence
  Description of Artificial Sequence: Synthetic oligonucleotide
  Antisense strand to SEQ ID NO: 235812
aaucaucuccaaguagcag

SEQ ID NO: 235814 - RNA, 19 nt, Artificial Sequence
  Description of Artificial Sequence: Synthetic oligonucleotide
  Sense strand starting at position 265 SEQ ID NO: 3037
gcuacuuggagaugauuag

SEQ ID NO: 235815 - RNA, 19 nt, Artificial Sequence
  Description of Artificial Sequence: Synthetic oligonucleotide
  Antisense strand to SEQ ID NO: 235814
cuaaucaucuccaaguagc

SEQ ID NO: 235816 - RNA, 19 nt, Artificial Sequence
  Description of Artificial Sequence: Synthetic oligonucleotide
  Sense strand starting at position 300 SEQ ID NO: 3037
uguagagacauuggcaaca

SEQ ID NO: 235817 - RNA, 19 nt, Artificial Sequence
  Description of Artificial Sequence: Synthetic oligonucleotide
  Antisense strand to SEQ ID NO: 235816
uguugccaaugucucuaca

SEQ ID NO: 235818 - RNA, 19 nt, Artificial Sequence
  Description of Artificial Sequence: Synthetic oligonucleotide
  Sense strand starting at position 350 SEQ ID NO: 3037
augggacuucauggugaca

SEQ ID NO: 235819 - RNA, 19 nt, Artificial Sequence
  Description of Artificial Sequence: Synthetic oligonucleotide
  Antisense strand to SEQ ID NO: 235818
ugucaccaugaagucccau

SEQ ID NO: 235820 - RNA, 19 nt, Artificial Sequence
  Description of Artificial Sequence: Synthetic oligonucleotide
  Sense strand starting at position 429 SEQ ID NO: 3037
cugggagcuuaguuaugau

SEQ ID NO: 235821 - RNA, 19 nt, Artificial Sequence
  Description of Artificial Sequence: Synthetic oligonucleotide
  Antisense strand to SEQ ID NO: 235820
aucauaacuaagcucccag

SEQ ID NO: 235822 - RNA, 19 nt, Artificial Sequence
  Description of Artificial Sequence: Synthetic oligonucleotide
  Sense strand starting at position 436 SEQ ID NO: 3037
cuuaguuaugaugaucuuu

SEQ ID NO: 235823 - RNA, 19 nt, Artificial Sequence
  Description of Artificial Sequence: Synthetic oligonucleotide
  Antisense strand to SEQ ID NO: 235822
aaagaucaucauaacuaag

SEQ ID NO: 235824 - RNA, 19 nt, Artificial Sequence
  Description of Artificial Sequence: Synthetic oligonucleotide
  Sense strand starting at position 441 SEQ ID NO: 3037
uuaugaugaucuuuauggu

SEQ ID NO: 235825 - RNA, 19 nt, Artificial Sequence
  Description of Artificial Sequence: Synthetic oligonucleotide
  Antisense strand to SEQ ID NO: 235824
accauaaagaucaucauaa

SEQ ID NO: 235826 - RNA, 19 nt, Artificial Sequence
  Description of Artificial Sequence: Synthetic oligonucleotide
  Sense strand starting at position 463 SEQ ID NO: 3037
gagggucaccuccagaagu

SEQ ID NO: 235827 - RNA, 19 nt, Artificial Sequence
  Description of Artificial Sequence: Synthetic oligonucleotide
  Antisense strand to SEQ ID NO: 235826
acuucuggaggugacccuc

SEQ ID NO: 235828 - RNA, 19 nt, Artificial Sequence
  Description of Artificial Sequence: Synthetic oligonucleotide
  Sense strand starting at position 883 SEQ ID NO: 3037
uuauuagcucaguguauuu

SEQ ID NO: 235829 - RNA, 19 nt, Artificial Sequence
  Description of Artificial Sequence: Synthetic oligonucleotide
  Antisense strand to SEQ ID NO: 235828
aaauacacugagcuaauaa

SEQ ID NO: 235830 - RNA, 19 nt, Artificial Sequence
  Description of Artificial Sequence: Synthetic oligonucleotide
  Sense strand starting at position 892 SEQ ID NO: 3037
caguguauuugagcaagcu

SEQ ID NO: 235831 - RNA, 19 nt, Artificial Sequence
  Description of Artificial Sequence: Synthetic oligonucleotide
  Antisense strand to SEQ ID NO: 235830
agcuugcucaaauacacug

SEQ ID NO: 235832 - RNA, 19 nt, Artificial Sequence
  Description of Artificial Sequence: Synthetic oligonucleotide
  Sense strand starting at position 992 SEQ ID NO: 3037
gaggguaauaggugugaaa

SEQ ID NO: 235833 - RNA, 19 nt, Artificial Sequence
  Description of Artificial Sequence: Synthetic oligonucleotide
  Antisense strand to SEQ ID NO: 235832
uuucacaccuauuacccuc

SEQ ID NO: 235834 - RNA, 19 nt, Artificial Sequence
  Description of Artificial Sequence: Synthetic oligonucleotide
  Sense strand starting at position 994 SEQ ID NO: 3037
ggguaauaggugugaaagu

SEQ ID NO: 235835 - RNA, 19 nt, Artificial Sequence
  Description of Artificial Sequence: Synthetic oligonucleotide
  Antisense strand to SEQ ID NO: 235834
acuuucacaccuauuaccc

SEQ ID NO: 235836 - RNA, 19 nt, Artificial Sequence
  Description of Artificial Sequence: Synthetic oligonucleotide
  Sense strand starting at position 1005 SEQ ID NO: 3037
gugaaaguagauugucaau

SEQ ID NO: 235837 - RNA, 19 nt, Artificial Sequence
  Description of Artificial Sequence: Synthetic oligonucleotide
  Antisense strand to SEQ ID NO: 235836
auugacaaucuacuuucac

SEQ ID NO: 235838 - RNA, 19 nt, Artificial Sequence
  Description of Artificial Sequence: Synthetic oligonucleotide
  Sense strand starting at position 1007 SEQ ID NO: 3037
gaaaguagauugucaauua

SEQ ID NO: 235839 - RNA, 19 nt, Artificial Sequence
  Description of Artificial Sequence: Synthetic oligonucleotide
  Antisense strand to SEQ ID NO: 235838
uaauugacaaucuacuuuc

SEQ ID NO: 235840 - RNA, 19 nt, Artificial Sequence
  Description of Artificial Sequence: Synthetic oligonucleotide
  Sense strand starting at position 1030 SEQ ID NO: 3037
guauuaagcagagaaguua

SEQ ID NO: 235841 - RNA, 19 nt, Artificial Sequence
  Description of Artificial Sequence: Synthetic oligonucleotide
  Antisense strand to SEQ ID NO: 235840
uaacuucucugcuuaauac

SEQ ID NO: 235842 - RNA, 19 nt, Artificial Sequence
  Description of Artificial Sequence: Synthetic oligonucleotide
  Sense strand starting at position 1272 SEQ ID NO: 3037
agagucucuguagggaaua

SEQ ID NO: 235843 - RNA, 19 nt, Artificial Sequence
  Description of Artificial Sequence: Synthetic oligonucleotide
  Antisense strand to SEQ ID NO: 235842
uauucccuacagagacucu

SEQ ID NO: 235844 - RNA, 19 nt, Artificial Sequence
  Description of Artificial Sequence: Synthetic oligonucleotide
  Sense strand starting at position 1343 SEQ ID NO: 3037
caggguuuccgauauuagg

SEQ ID NO: 235845 - RNA, 19 nt, Artificial Sequence
  Description of Artificial Sequence: Synthetic oligonucleotide
  Antisense strand to SEQ ID NO: 235844
ccuaauaucggaaacccug

SEQ ID NO: 235846 - RNA, 19 nt, Artificial Sequence
  Description of Artificial Sequence: Synthetic oligonucleotide
  Sense strand starting at position 1400 SEQ ID NO: 3037
gcauguuuauuuccagggu

SEQ ID NO: 235847 - RNA, 19 nt, Artificial Sequence
  Description of Artificial Sequence: Synthetic oligonucleotide
  Antisense strand to SEQ ID NO: 235846
acccuggaaauaaacaugc

SEQ ID NO: 235848 - RNA, 19 nt, Artificial Sequence
  Description of Artificial Sequence: Synthetic oligonucleotide
  Sense strand starting at position 2358 SEQ ID NO: 3037
ggcccauggcuugaucaca

SEQ ID NO: 235849 - RNA, 19 nt, Artificial Sequence
  Description of Artificial Sequence: Synthetic oligonucleotide
  Antisense strand to SEQ ID NO: 235848
ugugaucaagccaugggcc

SEQ ID NO: 235850 - RNA, 19 nt, Artificial Sequence
  Description of Artificial Sequence: Synthetic oligonucleotide
  Sense strand starting at position 2479 SEQ ID NO: 3037
uggauauuacagcgggaaa

SEQ ID NO: 235851 - RNA, 19 nt, Artificial Sequence
  Description of Artificial Sequence: Synthetic oligonucleotide
  Antisense strand to SEQ ID NO: 235850
uuucccgcuguaauaucca

SEQ ID NO: 235852 - RNA, 19 nt, Artificial Sequence
  Description of Artificial Sequence: Synthetic oligonucleotide
  Sense strand starting at position 2605 SEQ ID NO: 3037
gacaguaucucauuggaua

SEQ ID NO: 235853 - RNA, 19 nt, Artificial Sequence
  Description of Artificial Sequence: Synthetic oligonucleotide
  Antisense strand to SEQ ID NO: 235852
uauccaaugagauacuguc

SEQ ID NO: 235854 - RNA, 19 nt, Artificial Sequence
  Description of Artificial Sequence: Synthetic oligonucleotide
  Sense strand starting at position 2606 SEQ ID NO: 3037
acaguaucucauuggauac

SEQ ID NO: 235855 - RNA, 19 nt, Artificial Sequence
  Description of Artificial Sequence: Synthetic oligonucleotide
  Antisense strand to SEQ ID NO: 235854
guauccaaugagauacugu

SEQ ID NO: 235856 - RNA, 19 nt, Artificial Sequence
  Description of Artificial Sequence: Synthetic oligonucleotide
  Sense strand starting at position 2630 SEQ ID NO: 3037
cacuaagauguuggucaau

SEQ ID NO: 235857 - RNA, 19 nt, Artificial Sequence
  Description of Artificial Sequence: Synthetic oligonucleotide
  Antisense strand to SEQ ID NO: 235856
auugaccaacaucuuagug

SEQ ID NO: 235858 - RNA, 19 nt, Artificial Sequence
  Description of Artificial Sequence: Synthetic oligonucleotide
  Sense strand starting at position 2632 SEQ ID NO: 3037
cuaagauguuggucaauau

SEQ ID NO: 235859 - RNA, 19 nt, Artificial Sequence
  Description of Artificial Sequence: Synthetic oligonucleotide
  Antisense strand to SEQ ID NO: 235858
auauugaccaacaucuuag

SEQ ID NO: 235860 - RNA, 19 nt, Artificial Sequence
  Description of Artificial Sequence: Synthetic oligonucleotide
  Sense strand starting at position 2633 SEQ ID NO: 3037
uaagauguuggucaauauu

SEQ ID NO: 235861 - RNA, 19 nt, Artificial Sequence
  Description of Artificial Sequence: Synthetic oligonucleotide
  Antisense strand to SEQ ID NO: 235860
aauauugaccaacaucuua

SEQ ID NO: 235862 - RNA, 19 nt, Artificial Sequence
  Description of Artificial Sequence: Synthetic oligonucleotide
  Sense strand starting at position 2636 SEQ ID NO: 3037
gauguuggucaauauugac

SEQ ID NO: 235863 - RNA, 19 nt, Artificial Sequence
  Description of Artificial Sequence: Synthetic oligonucleotide
  Antisense strand to SEQ ID NO: 235862
gucaauauugaccaacauc

SEQ ID NO: 235864 - RNA, 19 nt, Artificial Sequence
  Description of Artificial Sequence: Synthetic oligonucleotide
  Sense strand starting at position 2678 SEQ ID NO: 3037
acaggcucagaguaguuua

SEQ ID NO: 235865 - RNA, 19 nt, Artificial Sequence
  Description of Artificial Sequence: Synthetic oligonucleotide
  Antisense strand to SEQ ID NO: 235864
uaaacuacucugagccugu

SEQ ID NO: 235866 - RNA, 19 nt, Artificial Sequence
  Description of Artificial Sequence: Synthetic oligonucleotide
  Sense strand starting at position 2786 SEQ ID NO: 3037
aauguaagggcuuacaugu

SEQ ID NO: 235867 - RNA, 19 nt, Artificial Sequence
  Description of Artificial Sequence: Synthetic oligonucleotide
  Antisense strand to SEQ ID NO: 235866
acauguaagcccuuacauu

SEQ ID NO: 235868 - RNA, 19 nt, Artificial Sequence
  Description of Artificial Sequence: Synthetic oligonucleotide
  Sense strand starting at position 2795 SEQ ID NO: 3037
gcuuacauguuauugaaca

SEQ ID NO: 235869 - RNA, 19 nt, Artificial Sequence
  Description of Artificial Sequence: Synthetic oligonucleotide
  Antisense strand to SEQ ID NO: 235868
uguucaauaacauguaagc

SEQ ID NO: 235870 - RNA, 19 nt, Artificial Sequence
  Description of Artificial Sequence: Synthetic oligonucleotide
  Sense strand starting at position 2833 SEQ ID NO: 3037
ggugcaaauuaaucuccau

SEQ ID NO: 235871 - RNA, 19 nt, Artificial Sequence
  Description of Artificial Sequence: Synthetic oligonucleotide
  Antisense strand to SEQ ID NO: 235870
auggagauuaauuugcacc

SEQ ID NO: 235872 - RNA, 19 nt, Artificial Sequence
  Description of Artificial Sequence: Synthetic oligonucleotide
  Sense strand starting at position 2939 SEQ ID NO: 3037
uugcuuuacaggugggaaa

SEQ ID NO: 235873 - RNA, 19 nt, Artificial Sequence
  Description of Artificial Sequence: Synthetic oligonucleotide
  Antisense strand to SEQ ID NO: 235872
uuucccaccuguaaagcaa

SEQ ID NO: 235874 - RNA, 19 nt, Artificial Sequence
  Description of Artificial Sequence: Synthetic oligonucleotide
  Sense strand starting at position 3065 SEQ ID NO: 3037
uaggucuuugcgcuuugau

SEQ ID NO: 235875 - RNA, 19 nt, Artificial Sequence
  Description of Artificial Sequence: Synthetic oligonucleotide
  Antisense strand to SEQ ID NO: 235874
aucaaagcgcaaagaccua

SEQ ID NO: 235876 - RNA, 19 nt, Artificial Sequence
  Description of Artificial Sequence: Synthetic oligonucleotide
  Sense strand starting at position 3066 SEQ ID NO: 3037
aggucuuugcgcuuugauu

SEQ ID NO: 235877 - RNA, 19 nt, Artificial Sequence
  Description of Artificial Sequence: Synthetic oligonucleotide
  Antisense strand to SEQ ID NO: 235876
aaucaaagcgcaaagaccu

SEQ ID NO: 235878 - RNA, 19 nt, Artificial Sequence
  Description of Artificial Sequence: Synthetic oligonucleotide
  Sense strand starting at position 3067 SEQ ID NO: 3037
ggucuuugcgcuuugauuc

SEQ ID NO: 235879 - RNA, 19 nt, Artificial Sequence
  Description of Artificial Sequence: Synthetic oligonucleotide
  Antisense strand to SEQ ID NO: 235878
gaaucaaagcgcaaagacc

SEQ ID NO: 235880 - RNA, 19 nt, Artificial Sequence
  Description of Artificial Sequence: Synthetic oligonucleotide
  Sense strand starting at position 3078 SEQ ID NO: 3037
uuugauucucccgagaagc

SEQ ID NO: 235881 - RNA, 19 nt, Artificial Sequence
  Description of Artificial Sequence: Synthetic oligonucleotide
  Antisense strand to SEQ ID NO: 235880
gcuucucgggagaaucaaa

SEQ ID NO: 235882 - RNA, 19 nt, Artificial Sequence
  Description of Artificial Sequence: Synthetic oligonucleotide
  Sense strand starting at position 3196 SEQ ID NO: 3037
ugagaaagcgaacggaauu

SEQ ID NO: 235883 - RNA, 19 nt, Artificial Sequence
  Description of Artificial Sequence: Synthetic oligonucleotide
  Antisense strand to SEQ ID NO: 235882
aauuccguucgcuuucuca

SEQ ID NO: 235884 - RNA, 19 nt, Artificial Sequence
  Description of Artificial Sequence: Synthetic oligonucleotide
  Sense strand starting at position 3215 SEQ ID NO: 3037
aaaugagauuaugaaugga

SEQ ID NO: 235885 - RNA, 19 nt, Artificial Sequence
  Description of Artificial Sequence: Synthetic oligonucleotide
  Antisense strand to SEQ ID NO: 235884
uccauucauaaucucauuu

SEQ ID NO: 235886 - RNA, 19 nt, Artificial Sequence
  Description of Artificial Sequence: Synthetic oligonucleotide
  Sense strand starting at position 3250 SEQ ID NO: 3037
ugacgcagucuacaaguaa

SEQ ID NO: 235887 - RNA, 19 nt, Artificial Sequence
  Description of Artificial Sequence: Synthetic oligonucleotide
  Antisense strand to SEQ ID NO: 235886
uuacuuguagacugcguca

SEQ ID NO: 235888 - RNA, 19 nt, Artificial Sequence
  Description of Artificial Sequence: Synthetic oligonucleotide
  Sense strand starting at position 3254 SEQ ID NO: 3037
gcagucuacaaguaaggga

SEQ ID NO: 235889 - RNA, 19 nt, Artificial Sequence
  Description of Artificial Sequence: Synthetic oligonucleotide
  Antisense strand to SEQ ID NO: 235888
ucccuuacuuguagacugc

SEQ ID NO: 235890 - RNA, 19 nt, Artificial Sequence
  Description of Artificial Sequence: Synthetic oligonucleotide
  Sense strand starting at position 3262 SEQ ID NO: 3037
caaguaagggauuguuaaa

SEQ ID NO: 235891 - RNA, 19 nt, Artificial Sequence
  Description of Artificial Sequence: Synthetic oligonucleotide
  Antisense strand to SEQ ID NO: 235890
uuuaacaaucccuuacuug

SEQ ID NO: 235892 - RNA, 19 nt, Artificial Sequence
  Description of Artificial Sequence: Synthetic oligonucleotide
  Sense strand starting at position 5 SEQ ID NO: 3038
agguaugcugacugucagu

SEQ ID NO: 235893 - RNA, 19 nt, Artificial Sequence
  Description of Artificial Sequence: Synthetic oligonucleotide
  Antisense strand to SEQ ID NO: 235892
acugacagucagcauaccu

SEQ ID NO: 235894 - RNA, 19 nt, Artificial Sequence
  Description of Artificial Sequence: Synthetic oligonucleotide
  Sense strand starting at position 68 SEQ ID NO: 3038
gcccuauucgccuuucuuu

SEQ ID NO: 235895 - RNA, 19 nt, Artificial Sequence
  Description of Artificial Sequence: Synthetic oligonucleotide
  Antisense strand to SEQ ID NO: 235894
aaagaaaggcgaauagggc

SEQ ID NO: 235896 - RNA, 19 nt, Artificial Sequence
  Description of Artificial Sequence: Synthetic oligonucleotide
  Sense strand starting at position 104 SEQ ID NO: 3038
cugggucucuggcuggaua

SEQ ID NO: 235897 - RNA, 19 nt, Artificial Sequence
  Description of Artificial Sequence: Synthetic oligonucleotide
  Antisense strand to SEQ ID NO: 235896
uauccagccagagacccag

SEQ ID NO: 235898 - RNA, 19 nt, Artificial Sequence
  Description of Artificial Sequence: Synthetic oligonucleotide
  Sense strand starting at position 106 SEQ ID NO: 3038
gggucucuggcuggauaga

SEQ ID NO: 235899 - RNA, 19 nt, Artificial Sequence
  Description of Artificial Sequence: Synthetic oligonucleotide
  Antisense strand to SEQ ID NO: 235898
ucuauccagccagagaccc

SEQ ID NO: 235900 - RNA, 19 nt, Artificial Sequence
  Description of Artificial Sequence: Synthetic oligonucleotide
  Sense strand starting at position 107 SEQ ID NO: 3038
ggucucuggcuggauagaa

SEQ ID NO: 235901 - RNA, 19 nt, Artificial Sequence
  Description of Artificial Sequence: Synthetic oligonucleotide
  Antisense strand to SEQ ID NO: 235900
uucuauccagccagagacc

SEQ ID NO: 235902 - RNA, 19 nt, Artificial Sequence
  Description of Artificial Sequence: Synthetic oligonucleotide
  Sense strand starting at position 121 SEQ ID NO: 3038
uagaauuaaggccgaaauu

SEQ ID NO: 235903 - RNA, 19 nt, Artificial Sequence
  Description of Artificial Sequence: Synthetic oligonucleotide
  Antisense strand to SEQ ID NO: 235902
aauuucggccuuaauucua

SEQ ID NO: 235904 - RNA, 19 nt, Artificial Sequence
  Description of Artificial Sequence: Synthetic oligonucleotide
  Sense strand starting at position 130 SEQ ID NO: 3038
ggccgaaauuacuugcauu

SEQ ID NO: 235905 - RNA, 19 nt, Artificial Sequence
  Description of Artificial Sequence: Synthetic oligonucleotide
  Antisense strand to SEQ ID NO: 235904
aaugcaaguaauuucggcc

SEQ ID NO: 235906 - RNA, 19 nt, Artificial Sequence
  Description of Artificial Sequence: Synthetic oligonucleotide
  Sense strand starting at position 140 SEQ ID NO: 3038
acuugcauuuccgccugaa

SEQ ID NO: 235907 - RNA, 19 nt, Artificial Sequence
  Description of Artificial Sequence: Synthetic oligonucleotide
  Antisense strand to SEQ ID NO: 235906
uucaggcggaaaugcaagu

SEQ ID NO: 235908 - RNA, 19 nt, Artificial Sequence
  Description of Artificial Sequence: Synthetic oligonucleotide
  Sense strand starting at position 143 SEQ ID NO: 3038
ugcauuuccgccugaaauu

SEQ ID NO: 235909 - RNA, 19 nt, Artificial Sequence
  Description of Artificial Sequence: Synthetic oligonucleotide
  Antisense strand to SEQ ID NO: 235908
aauuucaggcggaaaugca

SEQ ID NO: 235910 - RNA, 19 nt, Artificial Sequence
  Description of Artificial Sequence: Synthetic oligonucleotide
  Sense strand starting at position 152 SEQ ID NO: 3038
gccugaaauuagguaaauu

SEQ ID NO: 235911 - RNA, 19 nt, Artificial Sequence
  Description of Artificial Sequence: Synthetic oligonucleotide
  Antisense strand to SEQ ID NO: 235910
aauuuaccuaauuucaggc

SEQ ID NO: 235912 - RNA, 19 nt, Artificial Sequence
  Description of Artificial Sequence: Synthetic oligonucleotide
  Sense strand starting at position 172 SEQ ID NO: 3038
ucucuaucugucugcuuua

SEQ ID NO: 235913 - RNA, 19 nt, Artificial Sequence
  Description of Artificial Sequence: Synthetic oligonucleotide
  Antisense strand to SEQ ID NO: 235912
uaaagcagacagauagaga

SEQ ID NO: 235914 - RNA, 19 nt, Artificial Sequence
  Description of Artificial Sequence: Synthetic oligonucleotide
  Sense strand starting at position 175 SEQ ID NO: 3038
cuaucugucugcuuuaaug

SEQ ID NO: 235915 - RNA, 19 nt, Artificial Sequence
  Description of Artificial Sequence: Synthetic oligonucleotide
  Antisense strand to SEQ ID NO: 235914
cauuaaagcagacagauag

SEQ ID NO: 235916 - RNA, 19 nt, Artificial Sequence
  Description of Artificial Sequence: Synthetic oligonucleotide
  Sense strand starting at position 177 SEQ ID NO: 3038
aucugucugcuuuaaugau

SEQ ID NO: 235917 - RNA, 19 nt, Artificial Sequence
  Description of Artificial Sequence: Synthetic oligonucleotide
  Antisense strand to SEQ ID NO: 235916
aucauuaaagcagacagau

SEQ ID NO: 235918 - RNA, 19 nt, Artificial Sequence
  Description of Artificial Sequence: Synthetic oligonucleotide
  Sense strand starting at position 292 SEQ ID NO: 3038
gggugcuuagucuaagaga

SEQ ID NO: 235919 - RNA, 19 nt, Artificial Sequence
  Description of Artificial Sequence: Synthetic oligonucleotide
  Antisense strand to SEQ ID NO: 235918
ucucuuagacuaagcaccc

SEQ ID NO: 235920 - RNA, 19 nt, Artificial Sequence
  Description of Artificial Sequence: Synthetic oligonucleotide
  Sense strand starting at position 895 SEQ ID NO: 3038
cggcgaaguuucuuucuau

SEQ ID NO: 235921 - RNA, 19 nt, Artificial Sequence
  Description of Artificial Sequence: Synthetic oligonucleotide
  Antisense strand to SEQ ID NO: 235920
auagaaagaaacuucgccg

SEQ ID NO: 235922 - RNA, 19 nt, Artificial Sequence
  Description of Artificial Sequence: Synthetic oligonucleotide
  Sense strand starting at position 896 SEQ ID NO: 3038
ggcgaaguuucuuucuauc

SEQ ID NO: 235923 - RNA, 19 nt, Artificial Sequence
  Description of Artificial Sequence: Synthetic oligonucleotide
  Antisense strand to SEQ ID NO: 235922
gauagaaagaaacuucgcc

SEQ ID NO: 235924 - RNA, 19 nt, Artificial Sequence
  Description of Artificial Sequence: Synthetic oligonucleotide
  Sense strand starting at position 898 SEQ ID NO: 3038
cgaaguuucuuucuaucac

SEQ ID NO: 235925 - RNA, 19 nt, Artificial Sequence
  Description of Artificial Sequence: Synthetic oligonucleotide
  Antisense strand to SEQ ID NO: 235924
gugauagaaagaaacuucg

SEQ ID NO: 235926 - RNA, 19 nt, Artificial Sequence
  Description of Artificial Sequence: Synthetic oligonucleotide
  Sense strand starting at position 2214 SEQ ID NO: 3038
cuagaaagagcucgaaaug

SEQ ID NO: 235927 - RNA, 19 nt, Artificial Sequence
  Description of Artificial Sequence: Synthetic oligonucleotide
  Antisense strand to SEQ ID NO: 235926
cauuucgagcucuuucuag

SEQ ID NO: 235928 - RNA, 19 nt, Artificial Sequence
  Description of Artificial Sequence: Synthetic oligonucleotide
  Sense strand starting at position 2266 SEQ ID NO: 3038
gcgggagugcgcuaagagu

SEQ ID NO: 235929 - RNA, 19 nt, Artificial Sequence
  Description of Artificial Sequence: Synthetic oligonucleotide
  Antisense strand to SEQ ID NO: 235928
acucuuagcgcacucccgc

SEQ ID NO: 235930 - RNA, 19 nt, Artificial Sequence
  Description of Artificial Sequence: Synthetic oligonucleotide
  Sense strand starting at position 2268 SEQ ID NO: 3038
gggagugcgcuaagaguuu

SEQ ID NO: 235931 - RNA, 19 nt, Artificial Sequence
  Description of Artificial Sequence: Synthetic oligonucleotide
  Antisense strand to SEQ ID NO: 235930
aaacucuuagcgcacuccc

SEQ ID NO: 235932 - RNA, 19 nt, Artificial Sequence
  Description of Artificial Sequence: Synthetic oligonucleotide
  Sense strand starting at position 2898 SEQ ID NO: 3038
uccacugcuucgucccaaa

SEQ ID NO: 235933 - RNA, 19 nt, Artificial Sequence
  Description of Artificial Sequence: Synthetic oligonucleotide
  Antisense strand to SEQ ID NO: 235932
uuugggacgaagcagugga

SEQ ID NO: 235934 - RNA, 19 nt, Artificial Sequence
  Description of Artificial Sequence: Synthetic oligonucleotide
  Sense strand starting at position 2977 SEQ ID NO: 3038
ggcauugagccgcauaaca

SEQ ID NO: 235935 - RNA, 19 nt, Artificial Sequence
  Description of Artificial Sequence: Synthetic oligonucleotide
  Antisense strand to SEQ ID NO: 235934
uguuaugcggcucaaugcc

SEQ ID NO: 235936 - RNA, 19 nt, Artificial Sequence
  Description of Artificial Sequence: Synthetic oligonucleotide
  Sense strand starting at position 2987 SEQ ID NO: 3038
cgcauaacacucgagaaug

SEQ ID NO: 235937 - RNA, 19 nt, Artificial Sequence
  Description of Artificial Sequence: Synthetic oligonucleotide
  Antisense strand to SEQ ID NO: 235936
cauucucgaguguuaugcg

SEQ ID NO: 235938 - RNA, 19 nt, Artificial Sequence
  Description of Artificial Sequence: Synthetic oligonucleotide
  Sense strand starting at position 2989 SEQ ID NO: 3038
cauaacacucgagaauguu

SEQ ID NO: 235939 - RNA, 19 nt, Artificial Sequence
  Description of Artificial Sequence: Synthetic oligonucleotide
  Antisense strand to SEQ ID NO: 235938
aacauucucgaguguuaug

SEQ ID NO: 235940 - RNA, 19 nt, Artificial Sequence
  Description of Artificial Sequence: Synthetic oligonucleotide
  Sense strand starting at position 3000 SEQ ID NO: 3038
agaauguuugcggguggga

SEQ ID NO: 235941 - RNA, 19 nt, Artificial Sequence
  Description of Artificial Sequence: Synthetic oligonucleotide
  Antisense strand to SEQ ID NO: 235940
ucccacccgcaaacauucu

SEQ ID NO: 235942 - RNA, 19 nt, Artificial Sequence
  Description of Artificial Sequence: Synthetic oligonucleotide
  Sense strand starting at position 3002 SEQ ID NO: 3038
aauguuugcgggugggaga

SEQ ID NO: 235943 - RNA, 19 nt, Artificial Sequence
  Description of Artificial Sequence: Synthetic oligonucleotide
  Antisense strand to SEQ ID NO: 235942
ucucccacccgcaaacauu

SEQ ID NO: 235944 - RNA, 19 nt, Artificial Sequence
  Description of Artificial Sequence: Synthetic oligonucleotide
  Sense strand starting at position 3033 SEQ ID NO: 3038
gagguucaguccucgcaga

SEQ ID NO: 235945 - RNA, 19 nt, Artificial Sequence
  Description of Artificial Sequence: Synthetic oligonucleotide
  Antisense strand to SEQ ID NO: 235944
ucugcgaggacugaaccuc

SEQ ID NO: 235946 - RNA, 19 nt, Artificial Sequence
  Description of Artificial Sequence: Synthetic oligonucleotide
  Sense strand starting at position 3173 SEQ ID NO: 3038
ggaugaucgagcugggaua

SEQ ID NO: 235947 - RNA, 19 nt, Artificial Sequence
  Description of Artificial Sequence: Synthetic oligonucleotide
  Antisense strand to SEQ ID NO: 235946
uaucccagcucgaucaucc

SEQ ID NO: 235948 - RNA, 19 nt, Artificial Sequence
  Description of Artificial Sequence: Synthetic oligonucleotide
  Sense strand starting at position 3365 SEQ ID NO: 3038
ucggcuaagauuugugcaa

SEQ ID NO: 235949 - RNA, 19 nt, Artificial Sequence
  Description of Artificial Sequence: Synthetic oligonucleotide
  Antisense strand to SEQ ID NO: 235948
uugcacaaaucuuagccga

SEQ ID NO: 235950 - RNA, 19 nt, Artificial Sequence
  Description of Artificial Sequence: Synthetic oligonucleotide
  Sense strand starting at position 3366 SEQ ID NO: 3038
cggcuaagauuugugcaaa

SEQ ID NO: 235951 - RNA, 19 nt, Artificial Sequence
  Description of Artificial Sequence: Synthetic oligonucleotide
  Antisense strand to SEQ ID NO: 235950
uuugcacaaaucuuagccg

SEQ ID NO: 235952 - RNA, 19 nt, Artificial Sequence
  Description of Artificial Sequence: Synthetic oligonucleotide
  Sense strand starting at position 3367 SEQ ID NO: 3038
ggcuaagauuugugcaaac

SEQ ID NO: 235953 - RNA, 19 nt, Artificial Sequence
  Description of Artificial Sequence: Synthetic oligonucleotide
  Antisense strand to SEQ ID NO: 235952
guuugcacaaaucuuagcc

SEQ ID NO: 235954 - RNA, 19 nt, Artificial Sequence
  Description of Artificial Sequence: Synthetic oligonucleotide
  Sense strand starting at position 3496 SEQ ID NO: 3038
gugacaaacguuuguugau

SEQ ID NO: 235955 - RNA, 19 nt, Artificial Sequence
  Description of Artificial Sequence: Synthetic oligonucleotide
  Antisense strand to SEQ ID NO: 235954
aucaacaaacguuugucac

SEQ ID NO: 235956 - RNA, 19 nt, Artificial Sequence
  Description of Artificial Sequence: Synthetic oligonucleotide
  Sense strand starting at position 3497 SEQ ID NO: 3038
ugacaaacguuuguugauu

SEQ ID NO: 235957 - RNA, 19 nt, Artificial Sequence
  Description of Artificial Sequence: Synthetic oligonucleotide
  Antisense strand to SEQ ID NO: 235956
aaucaacaaacguuuguca

SEQ ID NO: 235958 - RNA, 19 nt, Artificial Sequence
  Description of Artificial Sequence: Synthetic oligonucleotide
  Sense strand starting at position 3498 SEQ ID NO: 3038
gacaaacguuuguugauua

SEQ ID NO: 235959 - RNA, 19 nt, Artificial Sequence
  Description of Artificial Sequence: Synthetic oligonucleotide
  Antisense strand to SEQ ID NO: 235958
uaaucaacaaacguuuguc

SEQ ID NO: 235960 - RNA, 19 nt, Artificial Sequence
  Description of Artificial Sequence: Synthetic oligonucleotide
  Sense strand starting at position 3503 SEQ ID NO: 3038
acguuuguugauuacauga

SEQ ID NO: 235961 - RNA, 19 nt, Artificial Sequence
  Description of Artificial Sequence: Synthetic oligonucleotide
  Antisense strand to SEQ ID NO: 235960
ucauguaaucaacaaacgu

SEQ ID NO: 235962 - RNA, 19 nt, Artificial Sequence
  Description of Artificial Sequence: Synthetic oligonucleotide
  Sense strand starting at position 3561 SEQ ID NO: 3038
ccuugcugucauuguggga

SEQ ID NO: 235963 - RNA, 19 nt, Artificial Sequence
  Description of Artificial Sequence: Synthetic oligonucleotide
  Antisense strand to SEQ ID NO: 235962
ucccacaaugacagcaagg

SEQ ID NO: 235964 - RNA, 19 nt, Artificial Sequence
  Description of Artificial Sequence: Synthetic oligonucleotide
  Sense strand starting at position 3628 SEQ ID NO: 3038
agcggauucucaccucauc

SEQ ID NO: 235965 - RNA, 19 nt, Artificial Sequence
  Description of Artificial Sequence: Synthetic oligonucleotide
  Antisense strand to SEQ ID NO: 235964
gaugaggugagaauccgcu

SEQ ID NO: 235966 - RNA, 19 nt, Artificial Sequence
  Description of Artificial Sequence: Synthetic oligonucleotide
  Sense strand starting at position 3829 SEQ ID NO: 3038
cuguaugugcuccaacuga

SEQ ID NO: 235967 - RNA, 19 nt, Artificial Sequence
  Description of Artificial Sequence: Synthetic oligonucleotide
  Antisense strand to SEQ ID NO: 235966
ucaguuggagcacauacag

SEQ ID NO: 235968 - RNA, 19 nt, Artificial Sequence
  Description of Artificial Sequence: Synthetic oligonucleotide
  Sense strand starting at position 3908 SEQ ID NO: 3038
auuuauccgucccucuauu

SEQ ID NO: 235969 - RNA, 19 nt, Artificial Sequence
  Description of Artificial Sequence: Synthetic oligonucleotide
  Antisense strand to SEQ ID NO: 235968
aauagagggacggauaaau

SEQ ID NO: 235970 - RNA, 19 nt, Artificial Sequence
  Description of Artificial Sequence: Synthetic oligonucleotide
  Sense strand starting at position 3970 SEQ ID NO: 3038
ugcauuguggauugagcaa

SEQ ID NO: 235971 - RNA, 19 nt, Artificial Sequence
  Description of Artificial Sequence: Synthetic oligonucleotide
  Antisense strand to SEQ ID NO: 235970
uugcucaauccacaaugca

SEQ ID NO: 235972 - RNA, 19 nt, Artificial Sequence
  Description of Artificial Sequence: Synthetic oligonucleotide
  Sense strand starting at position 580 SEQ ID NO: 3039
gaaguugccuggucugaua

SEQ ID NO: 235973 - RNA, 19 nt, Artificial Sequence
  Description of Artificial Sequence: Synthetic oligonucleotide
  Antisense strand to SEQ ID NO: 235972
uaucagaccaggcaacuuc

SEQ ID NO: 235974 - RNA, 19 nt, Artificial Sequence
  Description of Artificial Sequence: Synthetic oligonucleotide
  Sense strand starting at position 593 SEQ ID NO: 3039
cugauaagguaauccauag

SEQ ID NO: 235975 - RNA, 19 nt, Artificial Sequence
  Description of Artificial Sequence: Synthetic oligonucleotide
  Antisense strand to SEQ ID NO: 235974
cuauggauuaccuuaucag

SEQ ID NO: 235976 - RNA, 19 nt, Artificial Sequence
  Description of Artificial Sequence: Synthetic oligonucleotide
  Sense strand starting at position 600 SEQ ID NO: 3039
gguaauccauagucagaac

SEQ ID NO: 235977 - RNA, 19 nt, Artificial Sequence
  Description of Artificial Sequence: Synthetic oligonucleotide
  Antisense strand to SEQ ID NO: 235976
guucugacuauggauuacc

SEQ ID NO: 235978 - RNA, 19 nt, Artificial Sequence
  Description of Artificial Sequence: Synthetic oligonucleotide
  Sense strand starting at position 636 SEQ ID NO: 3039
gcaguuaaguucucauaug

SEQ ID NO: 235979 - RNA, 19 nt, Artificial Sequence
  Description of Artificial Sequence: Synthetic oligonucleotide
  Antisense strand to SEQ ID NO: 235978
cauaugagaacuuaacugc

SEQ ID NO: 235980 - RNA, 19 nt, Artificial Sequence
  Description of Artificial Sequence: Synthetic oligonucleotide
  Sense strand starting at position 667 SEQ ID NO: 3039
agugacucagccuguaaug

SEQ ID NO: 235981 - RNA, 19 nt, Artificial Sequence
  Description of Artificial Sequence: Synthetic oligonucleotide
  Antisense strand to SEQ ID NO: 235980
cauuacaggcugagucacu

SEQ ID NO: 235982 - RNA, 19 nt, Artificial Sequence
  Description of Artificial Sequence: Synthetic oligonucleotide
  Sense strand starting at position 707 SEQ ID NO: 3039
gugggcagauccuuggaga

SEQ ID NO: 235983 - RNA, 19 nt, Artificial Sequence
  Description of Artificial Sequence: Synthetic oligonucleotide
  Antisense strand to SEQ ID NO: 235982
ucuccaaggaucugcccac

SEQ ID NO: 235984 - RNA, 19 nt, Artificial Sequence
  Description of Artificial Sequence: Synthetic oligonucleotide
  Sense strand starting at position 708 SEQ ID NO: 3039
ugggcagauccuuggagau

SEQ ID NO: 235985 - RNA, 19 nt, Artificial Sequence
  Description of Artificial Sequence: Synthetic oligonucleotide
  Antisense strand to SEQ ID NO: 235984
aucuccaaggaucugccca

SEQ ID NO: 235986 - RNA, 19 nt, Artificial Sequence
  Description of Artificial Sequence: Synthetic oligonucleotide
  Sense strand starting at position 918 SEQ ID NO: 3039
acaguagaacccugucuca

SEQ ID NO: 235987 - RNA, 19 nt, Artificial Sequence
  Description of Artificial Sequence: Synthetic oligonucleotide
  Antisense strand to SEQ ID NO: 235986
ugagacaggguucuacugu

SEQ ID NO: 235988 - RNA, 19 nt, Artificial Sequence
  Description of Artificial Sequence: Synthetic oligonucleotide
  Sense strand starting at position 921 SEQ ID NO: 3039
guagaacccugucucaaac

SEQ ID NO: 235989 - RNA, 19 nt, Artificial Sequence
  Description of Artificial Sequence: Synthetic oligonucleotide
  Antisense strand to SEQ ID NO: 235988
guuugagacaggguucuac

SEQ ID NO: 235990 - RNA, 19 nt, Artificial Sequence
  Description of Artificial Sequence: Synthetic oligonucleotide
  Sense strand starting at position 994 SEQ ID NO: 3039
uucuuaguuugucuauaac

SEQ ID NO: 235991 - RNA, 19 nt, Artificial Sequence
  Description of Artificial Sequence: Synthetic oligonucleotide
  Antisense strand to SEQ ID NO: 235990
guuauagacaaacuaagaa

SEQ ID NO: 235992 - RNA, 19 nt, Artificial Sequence
  Description of Artificial Sequence: Synthetic oligonucleotide
  Sense strand starting at position 1055 SEQ ID NO: 3039
gaugcauacucacuuggca

SEQ ID NO: 235993 - RNA, 19 nt, Artificial Sequence
  Description of Artificial Sequence: Synthetic oligonucleotide
  Antisense strand to SEQ ID NO: 235992
ugccaagugaguaugcauc

SEQ ID NO: 235994 - RNA, 19 nt, Artificial Sequence
  Description of Artificial Sequence: Synthetic oligonucleotide
  Sense strand starting at position 1226 SEQ ID NO: 3039
accagugcugguuaauaua

SEQ ID NO: 235995 - RNA, 19 nt, Artificial Sequence
  Description of Artificial Sequence: Synthetic oligonucleotide
  Antisense strand to SEQ ID NO: 235994
uauauuaaccagcacuggu

SEQ ID NO: 235996 - RNA, 19 nt, Artificial Sequence
  Description of Artificial Sequence: Synthetic oligonucleotide
  Sense strand starting at position 1453 SEQ ID NO: 3039
auguacaauucggccuaaa

SEQ ID NO: 235997 - RNA, 19 nt, Artificial Sequence
  Description of Artificial Sequence: Synthetic oligonucleotide
  Antisense strand to SEQ ID NO: 235996
uuuaggccgaauuguacau

SEQ ID NO: 235998 - RNA, 19 nt, Artificial Sequence
  Description of Artificial Sequence: Synthetic oligonucleotide
  Sense strand starting at position 1758 SEQ ID NO: 3039
uuguuugaaggaugcacaa

SEQ ID NO: 235999 - RNA, 19 nt, Artificial Sequence
  Description of Artificial Sequence: Synthetic oligonucleotide
  Antisense strand to SEQ ID NO: 235998
uugugcauccuucaaacaa

SEQ ID NO: 236000 - RNA, 19 nt, Artificial Sequence
  Description of Artificial Sequence: Synthetic oligonucleotide
  Sense strand starting at position 1791 SEQ ID NO: 3039
gcuacagcucuagagcuua

SEQ ID NO: 236001 - RNA, 19 nt, Artificial Sequence
  Description of Artificial Sequence: Synthetic oligonucleotide
  Antisense strand to SEQ ID NO: 236000
uaagcucuagagcuguagc

SEQ ID NO: 236002 - RNA, 19 nt, Artificial Sequence
  Description of Artificial Sequence: Synthetic oligonucleotide
  Sense strand starting at position 1875 SEQ ID NO: 3039
acguuuaacccugacaaac

SEQ ID NO: 236003 - RNA, 19 nt, Artificial Sequence
  Description of Artificial Sequence: Synthetic oligonucleotide
  Antisense strand to SEQ ID NO: 236002
guuugucaggguuaaacgu

SEQ ID NO: 236004 - RNA, 19 nt, Artificial Sequence
  Description of Artificial Sequence: Synthetic oligonucleotide
  Sense strand starting at position 2085 SEQ ID NO: 3039
gcggacagagucuaagauu

SEQ ID NO: 236005 - RNA, 19 nt, Artificial Sequence
  Description of Artificial Sequence: Synthetic oligonucleotide
  Antisense strand to SEQ ID NO: 236004
aaucuuagacucuguccgc

SEQ ID NO: 236006 - RNA, 19 nt, Artificial Sequence
  Description of Artificial Sequence: Synthetic oligonucleotide
  Sense strand starting at position 2093 SEQ ID NO: 3039
agucuaagauuguucugua

SEQ ID NO: 236007 - RNA, 19 nt, Artificial Sequence
  Description of Artificial Sequence: Synthetic oligonucleotide
  Antisense strand to SEQ ID NO: 236006
uacagaacaaucuuagacu

SEQ ID NO: 236008 - RNA, 19 nt, Artificial Sequence
  Description of Artificial Sequence: Synthetic oligonucleotide
  Sense strand starting at position 2094 SEQ ID NO: 3039
gucuaagauuguucuguaa

SEQ ID NO: 236009 - RNA, 19 nt, Artificial Sequence
  Description of Artificial Sequence: Synthetic oligonucleotide
  Antisense strand to SEQ ID NO: 236008
uuacagaacaaucuuagac

SEQ ID NO: 236010 - RNA, 19 nt, Artificial Sequence
  Description of Artificial Sequence: Synthetic oligonucleotide
  Sense strand starting at position 2548 SEQ ID NO: 3039
gugccagguccucaaugau

SEQ ID NO: 236011 - RNA, 19 nt, Artificial Sequence
  Description of Artificial Sequence: Synthetic oligonucleotide
  Antisense strand to SEQ ID NO: 236010
aucauugaggaccuggcac

SEQ ID NO: 236012 - RNA, 19 nt, Artificial Sequence
  Description of Artificial Sequence: Synthetic oligonucleotide
  Sense strand starting at position 2551 SEQ ID NO: 3039
ccagguccucaaugauagu

SEQ ID NO: 236013 - RNA, 19 nt, Artificial Sequence
  Description of Artificial Sequence: Synthetic oligonucleotide
  Antisense strand to SEQ ID NO: 236012
acuaucauugaggaccugg

SEQ ID NO: 236014 - RNA, 19 nt, Artificial Sequence
  Description of Artificial Sequence: Synthetic oligonucleotide
  Sense strand starting at position 2582 SEQ ID NO: 3039
gcacuuucgccuuagaauc

SEQ ID NO: 236015 - RNA, 19 nt, Artificial Sequence
  Description of Artificial Sequence: Synthetic oligonucleotide
  Antisense strand to SEQ ID NO: 236014
gauucuaaggcgaaagugc

SEQ ID NO: 236016 - RNA, 19 nt, Artificial Sequence
  Description of Artificial Sequence: Synthetic oligonucleotide
  Sense strand starting at position 2627 SEQ ID NO: 3039
ccuaaagcucuaggaaugu

SEQ ID NO: 236017 - RNA, 19 nt, Artificial Sequence
  Description of Artificial Sequence: Synthetic oligonucleotide
  Antisense strand to SEQ ID NO: 236016
acauuccuagagcuuuagg

SEQ ID NO: 236018 - RNA, 19 nt, Artificial Sequence
  Description of Artificial Sequence: Synthetic oligonucleotide
  Sense strand starting at position 2712 SEQ ID NO: 3039
aggagagaguuguuggauc

SEQ ID NO: 236019 - RNA, 19 nt, Artificial Sequence
  Description of Artificial Sequence: Synthetic oligonucleotide
  Antisense strand to SEQ ID NO: 236018
gauccaacaacucucuccu

SEQ ID NO: 236020 - RNA, 19 nt, Artificial Sequence
  Description of Artificial Sequence: Synthetic oligonucleotide
  Sense strand starting at position 2857 SEQ ID NO: 3039
guguccacccuagauacaa

SEQ ID NO: 236021 - RNA, 19 nt, Artificial Sequence
  Description of Artificial Sequence: Synthetic oligonucleotide
  Antisense strand to SEQ ID NO: 236020
uuguaucuaggguggacac

SEQ ID NO: 236022 - RNA, 19 nt, Artificial Sequence
  Description of Artificial Sequence: Synthetic oligonucleotide
  Sense strand starting at position 2872 SEQ ID NO: 3039
acaauaguccuauguauga

SEQ ID NO: 236023 - RNA, 19 nt, Artificial Sequence
  Description of Artificial Sequence: Synthetic oligonucleotide
  Antisense strand to SEQ ID NO: 236022
ucauacauaggacuauugu

SEQ ID NO: 236024 - RNA, 19 nt, Artificial Sequence
  Description of Artificial Sequence: Synthetic oligonucleotide
  Sense strand starting at position 2909 SEQ ID NO: 3039
aaggguuuaugauaaagga

SEQ ID NO: 236025 - RNA, 19 nt, Artificial Sequence
  Description of Artificial Sequence: Synthetic oligonucleotide
  Antisense strand to SEQ ID NO: 236024
uccuuuaucauaaacccuu

SEQ ID NO: 236026 - RNA, 19 nt, Artificial Sequence
  Description of Artificial Sequence: Synthetic oligonucleotide
  Sense strand starting at position 2996 SEQ ID NO: 3039
cuuuguucuccagguauug

SEQ ID NO: 236027 - RNA, 19 nt, Artificial Sequence
  Description of Artificial Sequence: Synthetic oligonucleotide
  Antisense strand to SEQ ID NO: 236026
caauaccuggagaacaaag

SEQ ID NO: 236028 - RNA, 19 nt, Artificial Sequence
  Description of Artificial Sequence: Synthetic oligonucleotide
  Sense strand starting at position 3357 SEQ ID NO: 3039
ggcgguaaacguuauuaau

SEQ ID NO: 236029 - RNA, 19 nt, Artificial Sequence
  Description of Artificial Sequence: Synthetic oligonucleotide
  Antisense strand to SEQ ID NO: 236028
auuaauaacguuuaccgcc

SEQ ID NO: 236030 - RNA, 19 nt, Artificial Sequence
  Description of Artificial Sequence: Synthetic oligonucleotide
  Sense strand starting at position 3514 SEQ ID NO: 3039
agguauuucuuguuugcuu

SEQ ID NO: 236031 - RNA, 19 nt, Artificial Sequence
  Description of Artificial Sequence: Synthetic oligonucleotide
  Antisense strand to SEQ ID NO: 236030
aagcaaacaagaaauaccu

SEQ ID NO: 236032 - RNA, 19 nt, Artificial Sequence
  Description of Artificial Sequence: Synthetic oligonucleotide
  Sense strand starting at position 3532 SEQ ID NO: 3039
uggcuuguauaggcaauua

SEQ ID NO: 236033 - RNA, 19 nt, Artificial Sequence
  Description of Artificial Sequence: Synthetic oligonucleotide
  Antisense strand to SEQ ID NO: 236032
uaauugccuauacaagcca

SEQ ID NO: 236034 - RNA, 19 nt, Artificial Sequence
  Description of Artificial Sequence: Synthetic oligonucleotide
  Sense strand starting at position 3703 SEQ ID NO: 3039
acggauuucuggucacgca

SEQ ID NO: 236035 - RNA, 19 nt, Artificial Sequence
  Description of Artificial Sequence: Synthetic oligonucleotide
  Antisense strand to SEQ ID NO: 236034
ugcgugaccagaaauccgu

SEQ ID NO: 236036 - RNA, 19 nt, Artificial Sequence
  Description of Artificial Sequence: Synthetic oligonucleotide
  Sense strand starting at position 3728 SEQ ID NO: 3039
uggcuucuggcaugaucca

SEQ ID NO: 236037 - RNA, 19 nt, Artificial Sequence
  Description of Artificial Sequence: Synthetic oligonucleotide
  Antisense strand to SEQ ID NO: 236036
uggaucaugccagaagcca

SEQ ID NO: 236038 - RNA, 19 nt, Artificial Sequence
  Description of Artificial Sequence: Synthetic oligonucleotide
  Sense strand starting at position 3735 SEQ ID NO: 3039
uggcaugauccagaaucuu

SEQ ID NO: 236039 - RNA, 19 nt, Artificial Sequence
  Description of Artificial Sequence: Synthetic oligonucleotide
  Antisense strand to SEQ ID NO: 236038
aagauucuggaucaugcca

SEQ ID NO: 236040 - RNA, 19 nt, Artificial Sequence
  Description of Artificial Sequence: Synthetic oligonucleotide
  Sense strand starting at position 3785 SEQ ID NO: 3039
aacgcugaauuccuggaaa

SEQ ID NO: 236041 - RNA, 19 nt, Artificial Sequence
  Description of Artificial Sequence: Synthetic oligonucleotide
  Antisense strand to SEQ ID NO: 236040
uuuccaggaauucagcguu

SEQ ID NO: 236042 - RNA, 19 nt, Artificial Sequence
  Description of Artificial Sequence: Synthetic oligonucleotide
  Sense strand starting at position 3787 SEQ ID NO: 3039
cgcugaauuccuggaaaug

SEQ ID NO: 236043 - RNA, 19 nt, Artificial Sequence
  Description of Artificial Sequence: Synthetic oligonucleotide
  Antisense strand to SEQ ID NO: 236042
cauuuccaggaauucagcg

SEQ ID NO: 236044 - RNA, 19 nt, Artificial Sequence
  Description of Artificial Sequence: Synthetic oligonucleotide
  Sense strand starting at position 3788 SEQ ID NO: 3039
gcugaauuccuggaaaugu

SEQ ID NO: 236045 - RNA, 19 nt, Artificial Sequence
  Description of Artificial Sequence: Synthetic oligonucleotide
  Antisense strand to SEQ ID NO: 236044
acauuuccaggaauucagc

SEQ ID NO: 236046 - RNA, 19 nt, Artificial Sequence
  Description of Artificial Sequence: Synthetic oligonucleotide
  Sense strand starting at position 3903 SEQ ID NO: 3039
agauuuagguuccauauaa

SEQ ID NO: 236047 - RNA, 19 nt, Artificial Sequence
  Description of Artificial Sequence: Synthetic oligonucleotide
  Antisense strand to SEQ ID NO: 236046
uuauauggaaccuaaaucu

SEQ ID NO: 236048 - RNA, 19 nt, Artificial Sequence
  Description of Artificial Sequence: Synthetic oligonucleotide
  Sense strand starting at position 3980 SEQ ID NO: 3039
uugcaugauuggcugauua

SEQ ID NO: 236049 - RNA, 19 nt, Artificial Sequence
  Description of Artificial Sequence: Synthetic oligonucleotide
  Antisense strand to SEQ ID NO: 236048
uaaucagccaaucaugcaa

SEQ ID NO: 236050 - RNA, 19 nt, Artificial Sequence
  Description of Artificial Sequence: Synthetic oligonucleotide
  Sense strand starting at position 3982 SEQ ID NO: 3039
gcaugauuggcugauuaua

SEQ ID NO: 236051 - RNA, 19 nt, Artificial Sequence
  Description of Artificial Sequence: Synthetic oligonucleotide
  Antisense strand to SEQ ID NO: 236050
uauaaucagccaaucaugc

SEQ ID NO: 236052 - RNA, 19 nt, Artificial Sequence
  Description of Artificial Sequence: Synthetic oligonucleotide
  Sense strand starting at position 490 SEQ ID NO: 3041
uuuauaggugcuggagaua

SEQ ID NO: 236053 - RNA, 19 nt, Artificial Sequence
  Description of Artificial Sequence: Synthetic oligonucleotide
  Antisense strand to SEQ ID NO: 236052
uaucuccagcaccuauaaa

SEQ ID NO: 236054 - RNA, 19 nt, Artificial Sequence
  Description of Artificial Sequence: Synthetic oligonucleotide
  Sense strand starting at position 503 SEQ ID NO: 3041
gagauacaauaauggaaga

SEQ ID NO: 236055 - RNA, 19 nt, Artificial Sequence
  Description of Artificial Sequence: Synthetic oligonucleotide
  Antisense strand to SEQ ID NO: 236054
ucuuccauuauuguaucuc

SEQ ID NO: 236056 - RNA, 19 nt, Artificial Sequence
  Description of Artificial Sequence: Synthetic oligonucleotide
  Sense strand starting at position 979 SEQ ID NO: 3041
gggaaggguuguguaaaga

SEQ ID NO: 236057 - RNA, 19 nt, Artificial Sequence
  Description of Artificial Sequence: Synthetic oligonucleotide
  Antisense strand to SEQ ID NO: 236056
ucuuuacacaacccuuccc

SEQ ID NO: 236058 - RNA, 19 nt, Artificial Sequence
  Description of Artificial Sequence: Synthetic oligonucleotide
  Sense strand starting at position 1083 SEQ ID NO: 3041
ggguuuacacucuagguua

SEQ ID NO: 236059 - RNA, 19 nt, Artificial Sequence
  Description of Artificial Sequence: Synthetic oligonucleotide
  Antisense strand to SEQ ID NO: 236058
uaaccuagaguguaaaccc

SEQ ID NO: 236060 - RNA, 19 nt, Artificial Sequence
  Description of Artificial Sequence: Synthetic oligonucleotide
  Sense strand starting at position 1491 SEQ ID NO: 3041
ccguaagccagauggucaa

SEQ ID NO: 236061 - RNA, 19 nt, Artificial Sequence
  Description of Artificial Sequence: Synthetic oligonucleotide
  Antisense strand to SEQ ID NO: 236060
uugaccaucuggcuuacgg

SEQ ID NO: 236062 - RNA, 19 nt, Artificial Sequence
  Description of Artificial Sequence: Synthetic oligonucleotide
  Sense strand starting at position 1555 SEQ ID NO: 3041
gcgggacuuacccggacaa

SEQ ID NO: 236063 - RNA, 19 nt, Artificial Sequence
  Description of Artificial Sequence: Synthetic oligonucleotide
  Antisense strand to SEQ ID NO: 236062
uuguccggguaagucccgc

SEQ ID NO: 236064 - RNA, 19 nt, Artificial Sequence
  Description of Artificial Sequence: Synthetic oligonucleotide
  Sense strand starting at position 1792 SEQ ID NO: 3041
cgccucuuccgggaaguga

SEQ ID NO: 236065 - RNA, 19 nt, Artificial Sequence
  Description of Artificial Sequence: Synthetic oligonucleotide
  Antisense strand to SEQ ID NO: 236064
ucacuucccggaagaggcg

SEQ ID NO: 236066 - RNA, 19 nt, Artificial Sequence
  Description of Artificial Sequence: Synthetic oligonucleotide
  Sense strand starting at position 2249 SEQ ID NO: 3041
cgaucagguuccuuuggga

SEQ ID NO: 236067 - RNA, 19 nt, Artificial Sequence
  Description of Artificial Sequence: Synthetic oligonucleotide
  Antisense strand to SEQ ID NO: 236066
ucccaaaggaaccugaucg

SEQ ID NO: 236068 - RNA, 19 nt, Artificial Sequence
  Description of Artificial Sequence: Synthetic oligonucleotide
  Sense strand starting at position 2658 SEQ ID NO: 3041
cucuuagcaugagucugau

SEQ ID NO: 236069 - RNA, 19 nt, Artificial Sequence
  Description of Artificial Sequence: Synthetic oligonucleotide
  Antisense strand to SEQ ID NO: 236068
aucagacucaugcuaagag

SEQ ID NO: 236070 - RNA, 19 nt, Artificial Sequence
  Description of Artificial Sequence: Synthetic oligonucleotide
  Sense strand starting at position 2661 SEQ ID NO: 3041
uuagcaugagucugaugau

SEQ ID NO: 236071 - RNA, 19 nt, Artificial Sequence
  Description of Artificial Sequence: Synthetic oligonucleotide
  Antisense strand to SEQ ID NO: 236070
aucaucagacucaugcuaa

SEQ ID NO: 236072 - RNA, 19 nt, Artificial Sequence
  Description of Artificial Sequence: Synthetic oligonucleotide
  Sense strand starting at position 2689 SEQ ID NO: 3041
gcggcaacugguguguuua

SEQ ID NO: 236073 - RNA, 19 nt, Artificial Sequence
  Description of Artificial Sequence: Synthetic oligonucleotide
  Antisense strand to SEQ ID NO: 236072
uaaacacaccaguugccgc

SEQ ID NO: 236074 - RNA, 19 nt, Artificial Sequence
  Description of Artificial Sequence: Synthetic oligonucleotide
  Sense strand starting at position 2691 SEQ ID NO: 3041
ggcaacugguguguuuaaa

SEQ ID NO: 236075 - RNA, 19 nt, Artificial Sequence
  Description of Artificial Sequence: Synthetic oligonucleotide
  Antisense strand to SEQ ID NO: 236074
uuuaaacacaccaguugcc

SEQ ID NO: 236076 - RNA, 19 nt, Artificial Sequence
  Description of Artificial Sequence: Synthetic oligonucleotide
  Sense strand starting at position 2703 SEQ ID NO: 3041
guuuaaaggguguaugcaa

SEQ ID NO: 236077 - RNA, 19 nt, Artificial Sequence
  Description of Artificial Sequence: Synthetic oligonucleotide
  Antisense strand to SEQ ID NO: 236076
uugcauacacccuuuaaac

SEQ ID NO: 236078 - RNA, 19 nt, Artificial Sequence
  Description of Artificial Sequence: Synthetic oligonucleotide
  Sense strand starting at position 2711 SEQ ID NO: 3041
gguguaugcaaagaucacu

SEQ ID NO: 236079 - RNA, 19 nt, Artificial Sequence
  Description of Artificial Sequence: Synthetic oligonucleotide
  Antisense strand to SEQ ID NO: 236078
agugaucuuugcauacacc

SEQ ID NO: 236080 - RNA, 19 nt, Artificial Sequence
  Description of Artificial Sequence: Synthetic oligonucleotide
  Sense strand starting at position 2717 SEQ ID NO: 3041
ugcaaagaucacugaaauc

SEQ ID NO: 236081 - RNA, 19 nt, Artificial Sequence
  Description of Artificial Sequence: Synthetic oligonucleotide
  Antisense strand to SEQ ID NO: 236080
gauuucagugaucuuugca

SEQ ID NO: 236082 - RNA, 19 nt, Artificial Sequence
  Description of Artificial Sequence: Synthetic oligonucleotide
  Sense strand starting at position 2734 SEQ ID NO: 3041
ucggauuugucauuaaagc

SEQ ID NO: 236083 - RNA, 19 nt, Artificial Sequence
  Description of Artificial Sequence: Synthetic oligonucleotide
  Antisense strand to SEQ ID NO: 236082
gcuuuaaugacaaauccga

SEQ ID NO: 236084 - RNA, 19 nt, Artificial Sequence
  Description of Artificial Sequence: Synthetic oligonucleotide
  Sense strand starting at position 2918 SEQ ID NO: 3041
accaauaggguuugaggua

SEQ ID NO: 236085 - RNA, 19 nt, Artificial Sequence
  Description of Artificial Sequence: Synthetic oligonucleotide
  Antisense strand to SEQ ID NO: 236084
uaccucaaacccuauuggu

SEQ ID NO: 236086 - RNA, 19 nt, Artificial Sequence
  Description of Artificial Sequence: Synthetic oligonucleotide
  Sense strand starting at position 2923 SEQ ID NO: 3041
uaggguuugagguaauacu

SEQ ID NO: 236087 - RNA, 19 nt, Artificial Sequence
  Description of Artificial Sequence: Synthetic oligonucleotide
  Antisense strand to SEQ ID NO: 236086
aguauuaccucaaacccua

SEQ ID NO: 236088 - RNA, 19 nt, Artificial Sequence
  Description of Artificial Sequence: Synthetic oligonucleotide
  Sense strand starting at position 3002 SEQ ID NO: 3041
gcuuauuacucugcauaug

SEQ ID NO: 236089 - RNA, 19 nt, Artificial Sequence
  Description of Artificial Sequence: Synthetic oligonucleotide
  Antisense strand to SEQ ID NO: 236088
cauaugcagaguaauaagc

SEQ ID NO: 236090 - RNA, 19 nt, Artificial Sequence
  Description of Artificial Sequence: Synthetic oligonucleotide
  Sense strand starting at position 3003 SEQ ID NO: 3041
cuuauuacucugcauaugu

SEQ ID NO: 236091 - RNA, 19 nt, Artificial Sequence
  Description of Artificial Sequence: Synthetic oligonucleotide
  Antisense strand to SEQ ID NO: 236090
acauaugcagaguaauaag

SEQ ID NO: 236092 - RNA, 19 nt, Artificial Sequence
  Description of Artificial Sequence: Synthetic oligonucleotide
  Sense strand starting at position 3016 SEQ ID NO: 3041
auaugucacgaguaguaga

SEQ ID NO: 236093 - RNA, 19 nt, Artificial Sequence
  Description of Artificial Sequence: Synthetic oligonucleotide
  Antisense strand to SEQ ID NO: 236092
ucuacuacucgugacauau

SEQ ID NO: 236094 - RNA, 19 nt, Artificial Sequence
  Description of Artificial Sequence: Synthetic oligonucleotide
  Sense strand starting at position 3021 SEQ ID NO: 3041
ucacgaguaguagauuaaa

SEQ ID NO: 236095 - RNA, 19 nt, Artificial Sequence
  Description of Artificial Sequence: Synthetic oligonucleotide
  Antisense strand to SEQ ID NO: 236094
uuuaaucuacuacucguga

SEQ ID NO: 236096 - RNA, 19 nt, Artificial Sequence
  Description of Artificial Sequence: Synthetic oligonucleotide
  Sense strand starting at position 3198 SEQ ID NO: 3041
gagggaacauauuagaacu

SEQ ID NO: 236097 - RNA, 19 nt, Artificial Sequence
  Description of Artificial Sequence: Synthetic oligonucleotide
  Antisense strand to SEQ ID NO: 236096
aguucuaauauguucccuc

SEQ ID NO: 236098 - RNA, 19 nt, Artificial Sequence
  Description of Artificial Sequence: Synthetic oligonucleotide
  Sense strand starting at position 3233 SEQ ID NO: 3041
ucauuugauuucuacguga

SEQ ID NO: 236099 - RNA, 19 nt, Artificial Sequence
  Description of Artificial Sequence: Synthetic oligonucleotide
  Antisense strand to SEQ ID NO: 236098
ucacguagaaaucaaauga

SEQ ID NO: 236100 - RNA, 19 nt, Artificial Sequence
  Description of Artificial Sequence: Synthetic oligonucleotide
  Sense strand starting at position 3244 SEQ ID NO: 3041
cuacgugaaacauagggua

SEQ ID NO: 236101 - RNA, 19 nt, Artificial Sequence
  Description of Artificial Sequence: Synthetic oligonucleotide
  Antisense strand to SEQ ID NO: 236100
uacccuauguuucacguag

SEQ ID NO: 236102 - RNA, 19 nt, Artificial Sequence
  Description of Artificial Sequence: Synthetic oligonucleotide
  Sense strand starting at position 3246 SEQ ID NO: 3041
acgugaaacauaggguauu

SEQ ID NO: 236103 - RNA, 19 nt, Artificial Sequence
  Description of Artificial Sequence: Synthetic oligonucleotide
  Antisense strand to SEQ ID NO: 236102
aauacccuauguuucacgu

SEQ ID NO: 236104 - RNA, 19 nt, Artificial Sequence
  Description of Artificial Sequence: Synthetic oligonucleotide
  Sense strand starting at position 3326 SEQ ID NO: 3041
uuuggaggccacuaguaua

SEQ ID NO: 236105 - RNA, 19 nt, Artificial Sequence
  Description of Artificial Sequence: Synthetic oligonucleotide
  Antisense strand to SEQ ID NO: 236104
uauacuaguggccuccaaa

SEQ ID NO: 236106 - RNA, 19 nt, Artificial Sequence
  Description of Artificial Sequence: Synthetic oligonucleotide
  Sense strand starting at position 3380 SEQ ID NO: 3041
agaauugugugacucugag

SEQ ID NO: 236107 - RNA, 19 nt, Artificial Sequence
  Description of Artificial Sequence: Synthetic oligonucleotide
  Antisense strand to SEQ ID NO: 236106
cucagagucacacaauucu

SEQ ID NO: 236108 - RNA, 19 nt, Artificial Sequence
  Description of Artificial Sequence: Synthetic oligonucleotide
  Sense strand starting at position 3405 SEQ ID NO: 3041
gguaccaccucuuuaaguu

SEQ ID NO: 236109 - RNA, 19 nt, Artificial Sequence
  Description of Artificial Sequence: Synthetic oligonucleotide
  Antisense strand to SEQ ID NO: 236108
aacuuaaagaggugguacc

SEQ ID NO: 236110 - RNA, 19 nt, Artificial Sequence
  Description of Artificial Sequence: Synthetic oligonucleotide
  Sense strand starting at position 3406 SEQ ID NO: 3041
guaccaccucuuuaaguuu

SEQ ID NO: 236111 - RNA, 19 nt, Artificial Sequence
  Description of Artificial Sequence: Synthetic oligonucleotide
  Antisense strand to SEQ ID NO: 236110
aaacuuaaagaggugguac

SEQ ID NO: 236112 - RNA, 19 nt, Artificial Sequence
  Description of Artificial Sequence: Synthetic oligonucleotide
  Sense strand starting at position 3432 SEQ ID NO: 3041
ucuuaugcaaguuggaaga

SEQ ID NO: 236113 - RNA, 19 nt, Artificial Sequence
  Description of Artificial Sequence: Synthetic oligonucleotide
  Antisense strand to SEQ ID NO: 236112
ucuuccaacuugcauaaga

SEQ ID NO: 236114 - RNA, 19 nt, Artificial Sequence
  Description of Artificial Sequence: Synthetic oligonucleotide
  Sense strand starting at position 3716 SEQ ID NO: 3041
uuugguaucugagugagag

SEQ ID NO: 236115 - RNA, 19 nt, Artificial Sequence
  Description of Artificial Sequence: Synthetic oligonucleotide
  Antisense strand to SEQ ID NO: 236114
cucucacucagauaccaaa

SEQ ID NO: 236116 - RNA, 19 nt, Artificial Sequence
  Description of Artificial Sequence: Synthetic oligonucleotide
  Sense strand starting at position 3717 SEQ ID NO: 3041
uugguaucugagugagaga

SEQ ID NO: 236117 - RNA, 19 nt, Artificial Sequence
  Description of Artificial Sequence: Synthetic oligonucleotide
  Antisense strand to SEQ ID NO: 236116
ucucucacucagauaccaa

SEQ ID NO: 236118 - RNA, 19 nt, Artificial Sequence
  Description of Artificial Sequence: Synthetic oligonucleotide
  Sense strand starting at position 3820 SEQ ID NO: 3041
agagaaaguuauguaguua

SEQ ID NO: 236119 - RNA, 19 nt, Artificial Sequence
  Description of Artificial Sequence: Synthetic oligonucleotide
  Antisense strand to SEQ ID NO: 236118
uaacuacauaacuuucucu

SEQ ID NO: 236120 - RNA, 19 nt, Artificial Sequence
  Description of Artificial Sequence: Synthetic oligonucleotide
  Sense strand starting at position 3835 SEQ ID NO: 3041
guuauauaucgacaucugu

SEQ ID NO: 236121 - RNA, 19 nt, Artificial Sequence
  Description of Artificial Sequence: Synthetic oligonucleotide
  Antisense strand to SEQ ID NO: 236120
acagaugucgauauauaac

SEQ ID NO: 236122 - RNA, 19 nt, Artificial Sequence
  Description of Artificial Sequence: Synthetic oligonucleotide
  Sense strand starting at position 3852 SEQ ID NO: 3041
gucugcaauccguauaaac

SEQ ID NO: 236123 - RNA, 19 nt, Artificial Sequence
  Description of Artificial Sequence: Synthetic oligonucleotide
  Antisense strand to SEQ ID NO: 236122
guuuauacggauugcagac

SEQ ID NO: 236124 - RNA, 19 nt, Artificial Sequence
  Description of Artificial Sequence: Synthetic oligonucleotide
  Sense strand starting at position 3854 SEQ ID NO: 3041
cugcaauccguauaaacca

SEQ ID NO: 236125 - RNA, 19 nt, Artificial Sequence
  Description of Artificial Sequence: Synthetic oligonucleotide
  Antisense strand to SEQ ID NO: 236124
ugguuuauacggauugcag

SEQ ID NO: 236126 - RNA, 19 nt, Artificial Sequence
  Description of Artificial Sequence: Synthetic oligonucleotide
  Sense strand starting at position 3875 SEQ ID NO: 3041
uaguauugagccuggcaaa

SEQ ID NO: 236127 - RNA, 19 nt, Artificial Sequence
  Description of Artificial Sequence: Synthetic oligonucleotide
  Antisense strand to SEQ ID NO: 236126
uuugccaggcucaauacua

SEQ ID NO: 236128 - RNA, 19 nt, Artificial Sequence
  Description of Artificial Sequence: Synthetic oligonucleotide
  Sense strand starting at position 3903 SEQ ID NO: 3041
agucauguuaaagguauua

SEQ ID NO: 236129 - RNA, 19 nt, Artificial Sequence
  Description of Artificial Sequence: Synthetic oligonucleotide
  Antisense strand to SEQ ID NO: 236128
uaauaccuuuaacaugacu

SEQ ID NO: 236130 - RNA, 19 nt, Artificial Sequence
  Description of Artificial Sequence: Synthetic oligonucleotide
  Sense strand starting at position 3971 SEQ ID NO: 3041
uuuacugaaucuguagaau

SEQ ID NO: 236131 - RNA, 19 nt, Artificial Sequence
  Description of Artificial Sequence: Synthetic oligonucleotide
  Antisense strand to SEQ ID NO: 236130
auucuacagauucaguaaa

SEQ ID NO: 236132 - RNA, 19 nt, Artificial Sequence
  Description of Artificial Sequence: Synthetic oligonucleotide
  Sense strand starting at position 17 SEQ ID NO: 3040
gguauuaaaccagaugcau

SEQ ID NO: 236133 - RNA, 19 nt, Artificial Sequence
  Description of Artificial Sequence: Synthetic oligonucleotide
  Antisense strand to SEQ ID NO: 236132
augcaucugguuuaauacc

SEQ ID NO: 236134 - RNA, 19 nt, Artificial Sequence
  Description of Artificial Sequence: Synthetic oligonucleotide
  Sense strand starting at position 125 SEQ ID NO: 3040
cagaaaguauugcuuggua

SEQ ID NO: 236135 - RNA, 19 nt, Artificial Sequence
  Description of Artificial Sequence: Synthetic oligonucleotide
  Antisense strand to SEQ ID NO: 236134
uaccaagcaauacuuucug

SEQ ID NO: 236136 - RNA, 19 nt, Artificial Sequence
  Description of Artificial Sequence: Synthetic oligonucleotide
  Sense strand starting at position 127 SEQ ID NO: 3040
gaaaguauugcuugguaua

SEQ ID NO: 236137 - RNA, 19 nt, Artificial Sequence
  Description of Artificial Sequence: Synthetic oligonucleotide
  Antisense strand to SEQ ID NO: 236136
uauaccaagcaauacuuuc

SEQ ID NO: 236138 - RNA, 19 nt, Artificial Sequence
  Description of Artificial Sequence: Synthetic oligonucleotide
  Sense strand starting at position 128 SEQ ID NO: 3040
aaaguauugcuugguauaa

SEQ ID NO: 236139 - RNA, 19 nt, Artificial Sequence
  Description of Artificial Sequence: Synthetic oligonucleotide
  Antisense strand to SEQ ID NO: 236138
uuauaccaagcaauacuuu

SEQ ID NO: 236140 - RNA, 19 nt, Artificial Sequence
  Description of Artificial Sequence: Synthetic oligonucleotide
  Sense strand starting at position 129 SEQ ID NO: 3040
aaguauugcuugguauaau

SEQ ID NO: 236141 - RNA, 19 nt, Artificial Sequence
  Description of Artificial Sequence: Synthetic oligonucleotide
  Antisense strand to SEQ ID NO: 236140
auuauaccaagcaauacuu

SEQ ID NO: 236142 - RNA, 19 nt, Artificial Sequence
  Description of Artificial Sequence: Synthetic oligonucleotide
  Sense strand starting at position 132 SEQ ID NO: 3040
uauugcuugguauaauaga

SEQ ID NO: 236143 - RNA, 19 nt, Artificial Sequence
  Description of Artificial Sequence: Synthetic oligonucleotide
  Antisense strand to SEQ ID NO: 236142
ucuauuauaccaagcaaua

SEQ ID NO: 236144 - RNA, 19 nt, Artificial Sequence
  Description of Artificial Sequence: Synthetic oligonucleotide
  Sense strand starting at position 225 SEQ ID NO: 3040
accauauggugcccauaaa

SEQ ID NO: 236145 - RNA, 19 nt, Artificial Sequence
  Description of Artificial Sequence: Synthetic oligonucleotide
  Antisense strand to SEQ ID NO: 236144
uuuaugggcaccauauggu

SEQ ID NO: 236146 - RNA, 19 nt, Artificial Sequence
  Description of Artificial Sequence: Synthetic oligonucleotide
  Sense strand starting at position 226 SEQ ID NO: 3040
ccauauggugcccauaaau

SEQ ID NO: 236147 - RNA, 19 nt, Artificial Sequence
  Description of Artificial Sequence: Synthetic oligonucleotide
  Antisense strand to SEQ ID NO: 236146
auuuaugggcaccauaugg

SEQ ID NO: 236148 - RNA, 19 nt, Artificial Sequence
  Description of Artificial Sequence: Synthetic oligonucleotide
  Sense strand starting at position 727 SEQ ID NO: 3040
uuuauaggugcuggagaua

SEQ ID NO: 236149 - RNA, 19 nt, Artificial Sequence
  Description of Artificial Sequence: Synthetic oligonucleotide
  Antisense strand to SEQ ID NO: 236148
uaucuccagcaccuauaaa

SEQ ID NO: 236150 - RNA, 19 nt, Artificial Sequence
  Description of Artificial Sequence: Synthetic oligonucleotide
  Sense strand starting at position 740 SEQ ID NO: 3040
gagauacaauaauggaaga

SEQ ID NO: 236151 - RNA, 19 nt, Artificial Sequence
  Description of Artificial Sequence: Synthetic oligonucleotide
  Antisense strand to SEQ ID NO: 236150
ucuuccauuauuguaucuc

SEQ ID NO: 236152 - RNA, 19 nt, Artificial Sequence
  Description of Artificial Sequence: Synthetic oligonucleotide
  Sense strand starting at position 1216 SEQ ID NO: 3040
gggaaggguuguguaaaga

SEQ ID NO: 236153 - RNA, 19 nt, Artificial Sequence
  Description of Artificial Sequence: Synthetic oligonucleotide
  Antisense strand to SEQ ID NO: 236152
ucuuuacacaacccuuccc

SEQ ID NO: 236154 - RNA, 19 nt, Artificial Sequence
  Description of Artificial Sequence: Synthetic oligonucleotide
  Sense strand starting at position 1320 SEQ ID NO: 3040
ggguuuacacucuagguua

SEQ ID NO: 236155 - RNA, 19 nt, Artificial Sequence
  Description of Artificial Sequence: Synthetic oligonucleotide
  Antisense strand to SEQ ID NO: 236154
uaaccuagaguguaaaccc

SEQ ID NO: 236156 - RNA, 19 nt, Artificial Sequence
  Description of Artificial Sequence: Synthetic oligonucleotide
  Sense strand starting at position 1728 SEQ ID NO: 3040
ccguaagccagauggucaa

SEQ ID NO: 236157 - RNA, 19 nt, Artificial Sequence
  Description of Artificial Sequence: Synthetic oligonucleotide
  Antisense strand to SEQ ID NO: 236156
uugaccaucuggcuuacgg

SEQ ID NO: 236158 - RNA, 19 nt, Artificial Sequence
  Description of Artificial Sequence: Synthetic oligonucleotide
  Sense strand starting at position 1792 SEQ ID NO: 3040
gcgggacuuacccggacaa

SEQ ID NO: 236159 - RNA, 19 nt, Artificial Sequence
  Description of Artificial Sequence: Synthetic oligonucleotide
  Antisense strand to SEQ ID NO: 236158
uuguccggguaagucccgc

SEQ ID NO: 236160 - RNA, 19 nt, Artificial Sequence
  Description of Artificial Sequence: Synthetic oligonucleotide
  Sense strand starting at position 2029 SEQ ID NO: 3040
cgccucuuccgggaaguga

SEQ ID NO: 236161 - RNA, 19 nt, Artificial Sequence
  Description of Artificial Sequence: Synthetic oligonucleotide
  Antisense strand to SEQ ID NO: 236160
ucacuucccggaagaggcg

SEQ ID NO: 236162 - RNA, 19 nt, Artificial Sequence
  Description of Artificial Sequence: Synthetic oligonucleotide
  Sense strand starting at position 2486 SEQ ID NO: 3040
cgaucagguuccuuuggga

SEQ ID NO: 236163 - RNA, 19 nt, Artificial Sequence
  Description of Artificial Sequence: Synthetic oligonucleotide
  Antisense strand to SEQ ID NO: 236162
ucccaaaggaaccugaucg

SEQ ID NO: 236164 - RNA, 19 nt, Artificial Sequence
  Description of Artificial Sequence: Synthetic oligonucleotide
  Sense strand starting at position 2895 SEQ ID NO: 3040
cucuuagcaugagucugau

SEQ ID NO: 236165 - RNA, 19 nt, Artificial Sequence
  Description of Artificial Sequence: Synthetic oligonucleotide
  Antisense strand to SEQ ID NO: 236164
aucagacucaugcuaagag

SEQ ID NO: 236166 - RNA, 19 nt, Artificial Sequence
  Description of Artificial Sequence: Synthetic oligonucleotide
  Sense strand starting at position 2898 SEQ ID NO: 3040
uuagcaugagucugaugau

SEQ ID NO: 236167 - RNA, 19 nt, Artificial Sequence
  Description of Artificial Sequence: Synthetic oligonucleotide
  Antisense strand to SEQ ID NO: 236166
aucaucagacucaugcuaa

SEQ ID NO: 236168 - RNA, 19 nt, Artificial Sequence
  Description of Artificial Sequence: Synthetic oligonucleotide
  Sense strand starting at position 2926 SEQ ID NO: 3040
gcggcaacugguguguuua

SEQ ID NO: 236169 - RNA, 19 nt, Artificial Sequence
  Description of Artificial Sequence: Synthetic oligonucleotide
  Antisense strand to SEQ ID NO: 236168
uaaacacaccaguugccgc

SEQ ID NO: 236170 - RNA, 19 nt, Artificial Sequence
  Description of Artificial Sequence: Synthetic oligonucleotide
  Sense strand starting at position 2928 SEQ ID NO: 3040
ggcaacugguguguuuaaa

SEQ ID NO: 236171 - RNA, 19 nt, Artificial Sequence
  Description of Artificial Sequence: Synthetic oligonucleotide
  Antisense strand to SEQ ID NO: 236170
uuuaaacacaccaguugcc

SEQ ID NO: 236172 - RNA, 19 nt, Artificial Sequence
  Description of Artificial Sequence: Synthetic oligonucleotide
  Sense strand starting at position 2940 SEQ ID NO: 3040
guuuaaaggguguaugcaa

SEQ ID NO: 236173 - RNA, 19 nt, Artificial Sequence
  Description of Artificial Sequence: Synthetic oligonucleotide
  Antisense strand to SEQ ID NO: 236172
uugcauacacccuuuaaac

SEQ ID NO: 236174 - RNA, 19 nt, Artificial Sequence
  Description of Artificial Sequence: Synthetic oligonucleotide
  Sense strand starting at position 2948 SEQ ID NO: 3040
gguguaugcaaagaucacu

SEQ ID NO: 236175 - RNA, 19 nt, Artificial Sequence
  Description of Artificial Sequence: Synthetic oligonucleotide
  Antisense strand to SEQ ID NO: 236174
agugaucuuugcauacacc

SEQ ID NO: 236176 - RNA, 19 nt, Artificial Sequence
  Description of Artificial Sequence: Synthetic oligonucleotide
  Sense strand starting at position 2954 SEQ ID NO: 3040
ugcaaagaucacugaaauc

SEQ ID NO: 236177 - RNA, 19 nt, Artificial Sequence
  Description of Artificial Sequence: Synthetic oligonucleotide
  Antisense strand to SEQ ID NO: 236176
gauuucagugaucuuugca

SEQ ID NO: 236178 - RNA, 19 nt, Artificial Sequence
  Description of Artificial Sequence: Synthetic oligonucleotide
  Sense strand starting at position 2971 SEQ ID NO: 3040
ucggauuugucauuaaagc

SEQ ID NO: 236179 - RNA, 19 nt, Artificial Sequence
  Description of Artificial Sequence: Synthetic oligonucleotide
  Antisense strand to SEQ ID NO: 236178
gcuuuaaugacaaauccga

SEQ ID NO: 236180 - RNA, 19 nt, Artificial Sequence
  Description of Artificial Sequence: Synthetic oligonucleotide
  Sense strand starting at position 3155 SEQ ID NO: 3040
accaauaggguuugaggua

SEQ ID NO: 236181 - RNA, 19 nt, Artificial Sequence
  Description of Artificial Sequence: Synthetic oligonucleotide
  Antisense strand to SEQ ID NO: 236180
uaccucaaacccuauuggu

SEQ ID NO: 236182 - RNA, 19 nt, Artificial Sequence
  Description of Artificial Sequence: Synthetic oligonucleotide
  Sense strand starting at position 3160 SEQ ID NO: 3040
uaggguuugagguaauacu

SEQ ID NO: 236183 - RNA, 19 nt, Artificial Sequence
  Description of Artificial Sequence: Synthetic oligonucleotide
  Antisense strand to SEQ ID NO: 236182
aguauuaccucaaacccua

SEQ ID NO: 236184 - RNA, 19 nt, Artificial Sequence
  Description of Artificial Sequence: Synthetic oligonucleotide
  Sense strand starting at position 3240 SEQ ID NO: 3040
cuuauuacucugcauaugu

SEQ ID NO: 236185 - RNA, 19 nt, Artificial Sequence
  Description of Artificial Sequence: Synthetic oligonucleotide
  Antisense strand to SEQ ID NO: 236184
acauaugcagaguaauaag

SEQ ID NO: 236186 - RNA, 19 nt, Artificial Sequence
  Description of Artificial Sequence: Synthetic oligonucleotide
  Sense strand starting at position 3253 SEQ ID NO: 3040
auaugucacgaguaguaga

SEQ ID NO: 236187 - RNA, 19 nt, Artificial Sequence
  Description of Artificial Sequence: Synthetic oligonucleotide
  Antisense strand to SEQ ID NO: 236186
ucuacuacucgugacauau

SEQ ID NO: 236188 - RNA, 19 nt, Artificial Sequence
  Description of Artificial Sequence: Synthetic oligonucleotide
  Sense strand starting at position 3258 SEQ ID NO: 3040
ucacgaguaguagauuaaa

SEQ ID NO: 236189 - RNA, 19 nt, Artificial Sequence
  Description of Artificial Sequence: Synthetic oligonucleotide
  Antisense strand to SEQ ID NO: 236188
uuuaaucuacuacucguga

SEQ ID NO: 236190 - RNA, 19 nt, Artificial Sequence
  Description of Artificial Sequence: Synthetic oligonucleotide
  Sense strand starting at position 3435 SEQ ID NO: 3040
gagggaacauauuagaacu

SEQ ID NO: 236191 - RNA, 19 nt, Artificial Sequence
  Description of Artificial Sequence: Synthetic oligonucleotide
  Antisense strand to SEQ ID NO: 236190
aguucuaauauguucccuc

SEQ ID NO: 236192 - RNA, 19 nt, Artificial Sequence
  Description of Artificial Sequence: Synthetic oligonucleotide
  Sense strand starting at position 3470 SEQ ID NO: 3040
ucauuugauuucuacguga

SEQ ID NO: 236193 - RNA, 19 nt, Artificial Sequence
  Description of Artificial Sequence: Synthetic oligonucleotide
  Antisense strand to SEQ ID NO: 236192
ucacguagaaaucaaauga

SEQ ID NO: 236194 - RNA, 19 nt, Artificial Sequence
  Description of Artificial Sequence: Synthetic oligonucleotide
  Sense strand starting at position 3481 SEQ ID NO: 3040
cuacgugaaacauagggua

SEQ ID NO: 236195 - RNA, 19 nt, Artificial Sequence
  Description of Artificial Sequence: Synthetic oligonucleotide
  Antisense strand to SEQ ID NO: 236194
uacccuauguuucacguag

SEQ ID NO: 236196 - RNA, 19 nt, Artificial Sequence
  Description of Artificial Sequence: Synthetic oligonucleotide
  Sense strand starting at position 3483 SEQ ID NO: 3040
acgugaaacauaggguauu

SEQ ID NO: 236197 - RNA, 19 nt, Artificial Sequence
  Description of Artificial Sequence: Synthetic oligonucleotide
  Antisense strand to SEQ ID NO: 236196
aauacccuauguuucacgu

SEQ ID NO: 236198 - RNA, 19 nt, Artificial Sequence
  Description of Artificial Sequence: Synthetic oligonucleotide
  Sense strand starting at position 3563 SEQ ID NO: 3040
uuuggaggccacuaguaua

SEQ ID NO: 236199 - RNA, 19 nt, Artificial Sequence
  Description of Artificial Sequence: Synthetic oligonucleotide
  Antisense strand to SEQ ID NO: 236198
uauacuaguggccuccaaa

SEQ ID NO: 236200 - RNA, 19 nt, Artificial Sequence
  Description of Artificial Sequence: Synthetic oligonucleotide
  Sense strand starting at position 3617 SEQ ID NO: 3040
agaauugugugacucugag

SEQ ID NO: 236201 - RNA, 19 nt, Artificial Sequence
  Description of Artificial Sequence: Synthetic oligonucleotide
  Antisense strand to SEQ ID NO: 236200
cucagagucacacaauucu

SEQ ID NO: 236202 - RNA, 19 nt, Artificial Sequence
  Description of Artificial Sequence: Synthetic oligonucleotide
  Sense strand starting at position 3642 SEQ ID NO: 3040
gguaccaccucuuuaaguu

SEQ ID NO: 236203 - RNA, 19 nt, Artificial Sequence
  Description of Artificial Sequence: Synthetic oligonucleotide
  Antisense strand to SEQ ID NO: 236202
aacuuaaagaggugguacc

SEQ ID NO: 236204 - RNA, 19 nt, Artificial Sequence
  Description of Artificial Sequence: Synthetic oligonucleotide
  Sense strand starting at position 3643 SEQ ID NO: 3040
guaccaccucuuuaaguuu

SEQ ID NO: 236205 - RNA, 19 nt, Artificial Sequence
  Description of Artificial Sequence: Synthetic oligonucleotide
  Antisense strand to SEQ ID NO: 236204
aaacuuaaagaggugguac

SEQ ID NO: 236206 - RNA, 19 nt, Artificial Sequence
  Description of Artificial Sequence: Synthetic oligonucleotide
  Sense strand starting at position 3669 SEQ ID NO: 3040
ucuuaugcaaguuggaaga

SEQ ID NO: 236207 - RNA, 19 nt, Artificial Sequence
  Description of Artificial Sequence: Synthetic oligonucleotide
  Antisense strand to SEQ ID NO: 236206
ucuuccaacuugcauaaga

SEQ ID NO: 236208 - RNA, 19 nt, Artificial Sequence
  Description of Artificial Sequence: Synthetic oligonucleotide
  Sense strand starting at position 3953 SEQ ID NO: 3040
uuugguaucugagugagag

SEQ ID NO: 236209 - RNA, 19 nt, Artificial Sequence
  Description of Artificial Sequence: Synthetic oligonucleotide
  Antisense strand to SEQ ID NO: 236208
cucucacucagauaccaaa

SEQ ID NO: 236210 - RNA, 19 nt, Artificial Sequence
  Description of Artificial Sequence: Synthetic oligonucleotide
  Sense strand starting at position 3954 SEQ ID NO: 3040
uugguaucugagugagaga

SEQ ID NO: 236211 - RNA, 19 nt, Artificial Sequence
  Description of Artificial Sequence: Synthetic oligonucleotide
  Antisense strand to SEQ ID NO: 236210
ucucucacucagauaccaa

SEQ ID NO: 236212 - RNA, 19 nt, Artificial Sequence
  Description of Artificial Sequence: Synthetic oligonucleotide
  Sense strand starting at position 358 SEQ ID NO: 3042
aauguugaguacuugauga

SEQ ID NO: 236213 - RNA, 19 nt, Artificial Sequence
  Description of Artificial Sequence: Synthetic oligonucleotide
  Antisense strand to SEQ ID NO: 236212
ucaucaaguacucaacauu

SEQ ID NO: 236214 - RNA, 19 nt, Artificial Sequence
  Description of Artificial Sequence: Synthetic oligonucleotide
  Sense strand starting at position 424 SEQ ID NO: 3042
acuggagauugaccaguuu

SEQ ID NO: 236215 - RNA, 19 nt, Artificial Sequence
  Description of Artificial Sequence: Synthetic oligonucleotide
  Antisense strand to SEQ ID NO: 236214
aaacuggucaaucuccagu

SEQ ID NO: 236216 - RNA, 19 nt, Artificial Sequence
  Description of Artificial Sequence: Synthetic oligonucleotide
  Sense strand starting at position 430 SEQ ID NO: 3042
gauugaccaguuugcaaau

SEQ ID NO: 236217 - RNA, 19 nt, Artificial Sequence
  Description of Artificial Sequence: Synthetic oligonucleotide
  Antisense strand to SEQ ID NO: 236216
auuugcaaacuggucaauc

SEQ ID NO: 236218 - RNA, 19 nt, Artificial Sequence
  Description of Artificial Sequence: Synthetic oligonucleotide
  Sense strand starting at position 518 SEQ ID NO: 3042
ugaagucagcucuacucua

SEQ ID NO: 236219 - RNA, 19 nt, Artificial Sequence
  Description of Artificial Sequence: Synthetic oligonucleotide
  Antisense strand to SEQ ID NO: 236218
uagaguagagcugacuuca

SEQ ID NO: 236220 - RNA, 19 nt, Artificial Sequence
  Description of Artificial Sequence: Synthetic oligonucleotide
  Sense strand starting at position 692 SEQ ID NO: 3042
uguucaguuccuucgugua

SEQ ID NO: 236221 - RNA, 19 nt, Artificial Sequence
  Description of Artificial Sequence: Synthetic oligonucleotide
  Antisense strand to SEQ ID NO: 236220
uacacgaaggaacugaaca

SEQ ID NO: 236222 - RNA, 19 nt, Artificial Sequence
  Description of Artificial Sequence: Synthetic oligonucleotide
  Sense strand starting at position 795 SEQ ID NO: 3042
acuuucuuccagggauaaa

SEQ ID NO: 236223 - RNA, 19 nt, Artificial Sequence
  Description of Artificial Sequence: Synthetic oligonucleotide
  Antisense strand to SEQ ID NO: 236222
uuuaucccuggaagaaagu

SEQ ID NO: 236224 - RNA, 19 nt, Artificial Sequence
  Description of Artificial Sequence: Synthetic oligonucleotide
  Sense strand starting at position 900 SEQ ID NO: 3042
agucaugucagacacgauu

SEQ ID NO: 236225 - RNA, 19 nt, Artificial Sequence
  Description of Artificial Sequence: Synthetic oligonucleotide
  Antisense strand to SEQ ID NO: 236224
aaucgugucugacaugacu

SEQ ID NO: 236226 - RNA, 19 nt, Artificial Sequence
  Description of Artificial Sequence: Synthetic oligonucleotide
  Sense strand starting at position 908 SEQ ID NO: 3042
cagacacgauucucaaagu

SEQ ID NO: 236227 - RNA, 19 nt, Artificial Sequence
  Description of Artificial Sequence: Synthetic oligonucleotide
  Antisense strand to SEQ ID NO: 236226
acuuugagaaucgugucug

SEQ ID NO: 236228 - RNA, 19 nt, Artificial Sequence
  Description of Artificial Sequence: Synthetic oligonucleotide
  Sense strand starting at position 1084 SEQ ID NO: 3042
cauaguugguauucuaaag

SEQ ID NO: 236229 - RNA, 19 nt, Artificial Sequence
  Description of Artificial Sequence: Synthetic oligonucleotide
  Antisense strand to SEQ ID NO: 236228
cuuuagaauaccaacuaug

SEQ ID NO: 236230 - RNA, 19 nt, Artificial Sequence
  Description of Artificial Sequence: Synthetic oligonucleotide
  Sense strand starting at position 1105 SEQ ID NO: 3042
guauacauccaagguauaa

SEQ ID NO: 236231 - RNA, 19 nt, Artificial Sequence
  Description of Artificial Sequence: Synthetic oligonucleotide
  Antisense strand to SEQ ID NO: 236230
uuauaccuuggauguauac

SEQ ID NO: 236232 - RNA, 19 nt, Artificial Sequence
  Description of Artificial Sequence: Synthetic oligonucleotide
  Sense strand starting at position 1242 SEQ ID NO: 3042
ugaaccaaguuauugauua

SEQ ID NO: 236233 - RNA, 19 nt, Artificial Sequence
  Description of Artificial Sequence: Synthetic oligonucleotide
  Antisense strand to SEQ ID NO: 236232
uaaucaauaacuugguuca

SEQ ID NO: 236234 - RNA, 19 nt, Artificial Sequence
  Description of Artificial Sequence: Synthetic oligonucleotide
  Sense strand starting at position 1246 SEQ ID NO: 3042
ccaaguuauugauuagcaa

SEQ ID NO: 236235 - RNA, 19 nt, Artificial Sequence
  Description of Artificial Sequence: Synthetic oligonucleotide
  Antisense strand to SEQ ID NO: 236234
uugcuaaucaauaacuugg

SEQ ID NO: 236236 - RNA, 19 nt, Artificial Sequence
  Description of Artificial Sequence: Synthetic oligonucleotide
  Sense strand starting at position 1264 SEQ ID NO: 3042
augguuucuguugagacaa

SEQ ID NO: 236237 - RNA, 19 nt, Artificial Sequence
  Description of Artificial Sequence: Synthetic oligonucleotide
  Antisense strand to SEQ ID NO: 236236
uugucucaacagaaaccau

SEQ ID NO: 236238 - RNA, 19 nt, Artificial Sequence
  Description of Artificial Sequence: Synthetic oligonucleotide
  Sense strand starting at position 1812 SEQ ID NO: 3042
acacaugaugccggagaca

SEQ ID NO: 236239 - RNA, 19 nt, Artificial Sequence
  Description of Artificial Sequence: Synthetic oligonucleotide
  Antisense strand to SEQ ID NO: 236238
ugucuccggcaucaugugu

SEQ ID NO: 236240 - RNA, 19 nt, Artificial Sequence
  Description of Artificial Sequence: Synthetic oligonucleotide
  Sense strand starting at position 2635 SEQ ID NO: 3042
ugagccuggacguaagaaa

SEQ ID NO: 236241 - RNA, 19 nt, Artificial Sequence
  Description of Artificial Sequence: Synthetic oligonucleotide
  Antisense strand to SEQ ID NO: 236240
uuucuuacguccaggcuca

SEQ ID NO: 236242 - RNA, 19 nt, Artificial Sequence
  Description of Artificial Sequence: Synthetic oligonucleotide
  Sense strand starting at position 2692 SEQ ID NO: 3042
cuaggaauucccuagcuuu

SEQ ID NO: 236243 - RNA, 19 nt, Artificial Sequence
  Description of Artificial Sequence: Synthetic oligonucleotide
  Antisense strand to SEQ ID NO: 236242
aaagcuagggaauuccuag

SEQ ID NO: 236244 - RNA, 19 nt, Artificial Sequence
  Description of Artificial Sequence: Synthetic oligonucleotide
  Sense strand starting at position 2695 SEQ ID NO: 3042
ggaauucccuagcuuuaac

SEQ ID NO: 236245 - RNA, 19 nt, Artificial Sequence
  Description of Artificial Sequence: Synthetic oligonucleotide
  Antisense strand to SEQ ID NO: 236244
guuaaagcuagggaauucc

SEQ ID NO: 236246 - RNA, 19 nt, Artificial Sequence
  Description of Artificial Sequence: Synthetic oligonucleotide
  Sense strand starting at position 2789 SEQ ID NO: 3042
gagggaugauguuucugag

SEQ ID NO: 236247 - RNA, 19 nt, Artificial Sequence
  Description of Artificial Sequence: Synthetic oligonucleotide
  Antisense strand to SEQ ID NO: 236246
cucagaaacaucaucccuc

SEQ ID NO: 236248 - RNA, 19 nt, Artificial Sequence
  Description of Artificial Sequence: Synthetic oligonucleotide
  Sense strand starting at position 2845 SEQ ID NO: 3042
augguaucuuuagucaaau

SEQ ID NO: 236249 - RNA, 19 nt, Artificial Sequence
  Description of Artificial Sequence: Synthetic oligonucleotide
  Antisense strand to SEQ ID NO: 236248
auuugacuaaagauaccau

SEQ ID NO: 236250 - RNA, 19 nt, Artificial Sequence
  Description of Artificial Sequence: Synthetic oligonucleotide
  Sense strand starting at position 2846 SEQ ID NO: 3042
ugguaucuuuagucaaaug

SEQ ID NO: 236251 - RNA, 19 nt, Artificial Sequence
  Description of Artificial Sequence: Synthetic oligonucleotide
  Antisense strand to SEQ ID NO: 236250
cauuugacuaaagauacca

SEQ ID NO: 236252 - RNA, 19 nt, Artificial Sequence
  Description of Artificial Sequence: Synthetic oligonucleotide
  Sense strand starting at position 2847 SEQ ID NO: 3042
gguaucuuuagucaaaugu

SEQ ID NO: 236253 - RNA, 19 nt, Artificial Sequence
  Description of Artificial Sequence: Synthetic oligonucleotide
  Antisense strand to SEQ ID NO: 236252
acauuugacuaaagauacc

SEQ ID NO: 236254 - RNA, 19 nt, Artificial Sequence
  Description of Artificial Sequence: Synthetic oligonucleotide
  Sense strand starting at position 2851 SEQ ID NO: 3042
ucuuuagucaaauguggag

SEQ ID NO: 236255 - RNA, 19 nt, Artificial Sequence
  Description of Artificial Sequence: Synthetic oligonucleotide
  Antisense strand to SEQ ID NO: 236254
cuccacauuugacuaaaga

SEQ ID NO: 236256 - RNA, 19 nt, Artificial Sequence
  Description of Artificial Sequence: Synthetic oligonucleotide
  Sense strand starting at position 2855 SEQ ID NO: 3042
uagucaaauguggaguaau

SEQ ID NO: 236257 - RNA, 19 nt, Artificial Sequence
  Description of Artificial Sequence: Synthetic oligonucleotide
  Antisense strand to SEQ ID NO: 236256
auuacuccacauuugacua

SEQ ID NO: 236258 - RNA, 19 nt, Artificial Sequence
  Description of Artificial Sequence: Synthetic oligonucleotide
  Sense strand starting at position 2878 SEQ ID NO: 3042
acucuauaauggcucuaga

SEQ ID NO: 236259 - RNA, 19 nt, Artificial Sequence
  Description of Artificial Sequence: Synthetic oligonucleotide
  Antisense strand to SEQ ID NO: 236258
ucuagagccauuauagagu

SEQ ID NO: 236260 - RNA, 19 nt, Artificial Sequence
  Description of Artificial Sequence: Synthetic oligonucleotide
  Sense strand starting at position 2881 SEQ ID NO: 3042
cuauaauggcucuagagua

SEQ ID NO: 236261 - RNA, 19 nt, Artificial Sequence
  Description of Artificial Sequence: Synthetic oligonucleotide
  Antisense strand to SEQ ID NO: 236260
uacucuagagccauuauag

SEQ ID NO: 236262 - RNA, 19 nt, Artificial Sequence
  Description of Artificial Sequence: Synthetic oligonucleotide
  Sense strand starting at position 2927 SEQ ID NO: 3042
acagaauuccuggagugcu

SEQ ID NO: 236263 - RNA, 19 nt, Artificial Sequence
  Description of Artificial Sequence: Synthetic oligonucleotide
  Antisense strand to SEQ ID NO: 236262
agcacuccaggaauucugu

SEQ ID NO: 236264 - RNA, 19 nt, Artificial Sequence
  Description of Artificial Sequence: Synthetic oligonucleotide
  Sense strand starting at position 3052 SEQ ID NO: 3042
ccucaacugggccaagauu

SEQ ID NO: 236265 - RNA, 19 nt, Artificial Sequence
  Description of Artificial Sequence: Synthetic oligonucleotide
  Antisense strand to SEQ ID NO: 236264
aaucuuggcccaguugagg

SEQ ID NO: 236266 - RNA, 19 nt, Artificial Sequence
  Description of Artificial Sequence: Synthetic oligonucleotide
  Sense strand starting at position 3060 SEQ ID NO: 3042
gggccaagauucucaaauc

SEQ ID NO: 236267 - RNA, 19 nt, Artificial Sequence
  Description of Artificial Sequence: Synthetic oligonucleotide
  Antisense strand to SEQ ID NO: 236266
gauuugagaaucuuggccc

SEQ ID NO: 236268 - RNA, 19 nt, Artificial Sequence
  Description of Artificial Sequence: Synthetic oligonucleotide
  Sense strand starting at position 3090 SEQ ID NO: 3042
uugguuacucugcauagaa

SEQ ID NO: 236269 - RNA, 19 nt, Artificial Sequence
  Description of Artificial Sequence: Synthetic oligonucleotide
  Antisense strand to SEQ ID NO: 236268
uucuaugcagaguaaccaa

SEQ ID NO: 236270 - RNA, 19 nt, Artificial Sequence
  Description of Artificial Sequence: Synthetic oligonucleotide
  Sense strand starting at position 3092 SEQ ID NO: 3042
gguuacucugcauagaauc

SEQ ID NO: 236271 - RNA, 19 nt, Artificial Sequence
  Description of Artificial Sequence: Synthetic oligonucleotide
  Antisense strand to SEQ ID NO: 236270
gauucuaugcagaguaacc

SEQ ID NO: 236272 - RNA, 19 nt, Artificial Sequence
  Description of Artificial Sequence: Synthetic oligonucleotide
  Sense strand starting at position 3204 SEQ ID NO: 3042
uugagcuacucacuguaaa

SEQ ID NO: 236273 - RNA, 19 nt, Artificial Sequence
  Description of Artificial Sequence: Synthetic oligonucleotide
  Antisense strand to SEQ ID NO: 236272
uuuacagugaguagcucaa

SEQ ID NO: 236274 - RNA, 19 nt, Artificial Sequence
  Description of Artificial Sequence: Synthetic oligonucleotide
  Sense strand starting at position 3205 SEQ ID NO: 3042
ugagcuacucacuguaaag

SEQ ID NO: 236275 - RNA, 19 nt, Artificial Sequence
  Description of Artificial Sequence: Synthetic oligonucleotide
  Antisense strand to SEQ ID NO: 236274
cuuuacagugaguagcuca

SEQ ID NO: 236276 - RNA, 19 nt, Artificial Sequence
  Description of Artificial Sequence: Synthetic oligonucleotide
  Sense strand starting at position 3409 SEQ ID NO: 3042
uuauaugauuaagugagca

SEQ ID NO: 236277 - RNA, 19 nt, Artificial Sequence
  Description of Artificial Sequence: Synthetic oligonucleotide
  Antisense strand to SEQ ID NO: 236276
ugcucacuuaaucauauaa

SEQ ID NO: 236278 - RNA, 19 nt, Artificial Sequence
  Description of Artificial Sequence: Synthetic oligonucleotide
  Sense strand starting at position 3413 SEQ ID NO: 3042
augauuaagugagcauaag

SEQ ID NO: 236279 - RNA, 19 nt, Artificial Sequence
  Description of Artificial Sequence: Synthetic oligonucleotide
  Antisense strand to SEQ ID NO: 236278
cuuaugcucacuuaaucau

SEQ ID NO: 236280 - RNA, 19 nt, Artificial Sequence
  Description of Artificial Sequence: Synthetic oligonucleotide
  Sense strand starting at position 3501 SEQ ID NO: 3042
uuuaacuaagcagaguauu

SEQ ID NO: 236281 - RNA, 19 nt, Artificial Sequence
  Description of Artificial Sequence: Synthetic oligonucleotide
  Antisense strand to SEQ ID NO: 236280
aauacucugcuuaguuaaa

SEQ ID NO: 236282 - RNA, 19 nt, Artificial Sequence
  Description of Artificial Sequence: Synthetic oligonucleotide
  Sense strand starting at position 3686 SEQ ID NO: 3042
uaaggcucugguuagaacu

SEQ ID NO: 236283 - RNA, 19 nt, Artificial Sequence
  Description of Artificial Sequence: Synthetic oligonucleotide
  Antisense strand to SEQ ID NO: 236282
aguucuaaccagagccuua

SEQ ID NO: 236284 - RNA, 19 nt, Artificial Sequence
  Description of Artificial Sequence: Synthetic oligonucleotide
  Sense strand starting at position 3733 SEQ ID NO: 3042
gguuccaaugcuuaagcaa

SEQ ID NO: 236285 - RNA, 19 nt, Artificial Sequence
  Description of Artificial Sequence: Synthetic oligonucleotide
  Antisense strand to SEQ ID NO: 236284
uugcuuaagcauuggaacc

SEQ ID NO: 236286 - RNA, 19 nt, Artificial Sequence
  Description of Artificial Sequence: Synthetic oligonucleotide
  Sense strand starting at position 3776 SEQ ID NO: 3042
cugucaaugccacaaagaa

SEQ ID NO: 236287 - RNA, 19 nt, Artificial Sequence
  Description of Artificial Sequence: Synthetic oligonucleotide
  Antisense strand to SEQ ID NO: 236286
uucuuuguggcauugacag

SEQ ID NO: 236288 - RNA, 19 nt, Artificial Sequence
  Description of Artificial Sequence: Synthetic oligonucleotide
  Sense strand starting at position 3802 SEQ ID NO: 3042
gcaguacuaccagaguucu

SEQ ID NO: 236289 - RNA, 19 nt, Artificial Sequence
  Description of Artificial Sequence: Synthetic oligonucleotide
  Antisense strand to SEQ ID NO: 236288
agaacucugguaguacugc

SEQ ID NO: 236290 - RNA, 19 nt, Artificial Sequence
  Description of Artificial Sequence: Synthetic oligonucleotide
  Sense strand starting at position 3932 SEQ ID NO: 3042
ggaagauauuuaugaauca

SEQ ID NO: 236291 - RNA, 19 nt, Artificial Sequence
  Description of Artificial Sequence: Synthetic oligonucleotide
  Antisense strand to SEQ ID NO: 236290
ugauucauaaauaucuucc

SEQ ID NO: 236292 - RNA, 19 nt, Artificial Sequence
  Description of Artificial Sequence: Synthetic oligonucleotide
  Sense strand starting at position 201 SEQ ID NO: 3043
gaaagaaagugcucuggga

SEQ ID NO: 236293 - RNA, 19 nt, Artificial Sequence
  Description of Artificial Sequence: Synthetic oligonucleotide
  Antisense strand to SEQ ID NO: 236292
ucccagagcacuuucuuuc

SEQ ID NO: 236294 - RNA, 19 nt, Artificial Sequence
  Description of Artificial Sequence: Synthetic oligonucleotide
  Sense strand starting at position 203 SEQ ID NO: 3043
aagaaagugcucugggagu

SEQ ID NO: 236295 - RNA, 19 nt, Artificial Sequence
  Description of Artificial Sequence: Synthetic oligonucleotide
  Antisense strand to SEQ ID NO: 236294
acucccagagcacuuucuu

SEQ ID NO: 236296 - RNA, 19 nt, Artificial Sequence
  Description of Artificial Sequence: Synthetic oligonucleotide
  Sense strand starting at position 271 SEQ ID NO: 3043
ucgucaacacccugggaau

SEQ ID NO: 236297 - RNA, 19 nt, Artificial Sequence
  Description of Artificial Sequence: Synthetic oligonucleotide
  Antisense strand to SEQ ID NO: 236296
auucccaggguguugacga

SEQ ID NO: 236298 - RNA, 19 nt, Artificial Sequence
  Description of Artificial Sequence: Synthetic oligonucleotide
  Sense strand starting at position 272 SEQ ID NO: 3043
cgucaacacccugggaaua

SEQ ID NO: 236299 - RNA, 19 nt, Artificial Sequence
  Description of Artificial Sequence: Synthetic oligonucleotide
  Antisense strand to SEQ ID NO: 236298
uauucccaggguguugacg

SEQ ID NO: 236300 - RNA, 19 nt, Artificial Sequence
  Description of Artificial Sequence: Synthetic oligonucleotide
  Sense strand starting at position 273 SEQ ID NO: 3043
gucaacacccugggaauaa

SEQ ID NO: 236301 - RNA, 19 nt, Artificial Sequence
  Description of Artificial Sequence: Synthetic oligonucleotide
  Antisense strand to SEQ ID NO: 236300
uuauucccaggguguugac

SEQ ID NO: 236302 - RNA, 19 nt, Artificial Sequence
  Description of Artificial Sequence: Synthetic oligonucleotide
  Sense strand starting at position 274 SEQ ID NO: 3043
ucaacacccugggaauaaa

SEQ ID NO: 236303 - RNA, 19 nt, Artificial Sequence
  Description of Artificial Sequence: Synthetic oligonucleotide
  Antisense strand to SEQ ID NO: 236302
uuuauucccaggguguuga

SEQ ID NO: 236304 - RNA, 19 nt, Artificial Sequence
  Description of Artificial Sequence: Synthetic oligonucleotide
  Sense strand starting at position 318 SEQ ID NO: 3043
gccagcuugagauaaagca

SEQ ID NO: 236305 - RNA, 19 nt, Artificial Sequence
  Description of Artificial Sequence: Synthetic oligonucleotide
  Antisense strand to SEQ ID NO: 236304
ugcuuuaucucaagcuggc

SEQ ID NO: 236306 - RNA, 19 nt, Artificial Sequence
  Description of Artificial Sequence: Synthetic oligonucleotide
  Sense strand starting at position 326 SEQ ID NO: 3043
gagauaaagcaggguuucu

SEQ ID NO: 236307 - RNA, 19 nt, Artificial Sequence
  Description of Artificial Sequence: Synthetic oligonucleotide
  Antisense strand to SEQ ID NO: 236306
agaaacccugcuuuaucuc

SEQ ID NO: 236308 - RNA, 19 nt, Artificial Sequence
  Description of Artificial Sequence: Synthetic oligonucleotide
  Sense strand starting at position 392 SEQ ID NO: 3043
gggauuauccaaugcacua

SEQ ID NO: 236309 - RNA, 19 nt, Artificial Sequence
  Description of Artificial Sequence: Synthetic oligonucleotide
  Antisense strand to SEQ ID NO: 236308
uagugcauuggauaauccc

SEQ ID NO: 236310 - RNA, 19 nt, Artificial Sequence
  Description of Artificial Sequence: Synthetic oligonucleotide
  Sense strand starting at position 513 SEQ ID NO: 3043
aaaugucucccagggagca

SEQ ID NO: 236311 - RNA, 19 nt, Artificial Sequence
  Description of Artificial Sequence: Synthetic oligonucleotide
  Antisense strand to SEQ ID NO: 236310
ugcucccugggagacauuu

SEQ ID NO: 236312 - RNA, 19 nt, Artificial Sequence
  Description of Artificial Sequence: Synthetic oligonucleotide
  Sense strand starting at position 566 SEQ ID NO: 3043
ggacuaauaucucugcaca

SEQ ID NO: 236313 - RNA, 19 nt, Artificial Sequence
  Description of Artificial Sequence: Synthetic oligonucleotide
  Antisense strand to SEQ ID NO: 236312
ugugcagagauauuagucc

SEQ ID NO: 236314 - RNA, 19 nt, Artificial Sequence
  Description of Artificial Sequence: Synthetic oligonucleotide
  Sense strand starting at position 627 SEQ ID NO: 3043
agaagcucuugauuaggga

SEQ ID NO: 236315 - RNA, 19 nt, Artificial Sequence
  Description of Artificial Sequence: Synthetic oligonucleotide
  Antisense strand to SEQ ID NO: 236314
ucccuaaucaagagcuucu

SEQ ID NO: 236316 - RNA, 19 nt, Artificial Sequence
  Description of Artificial Sequence: Synthetic oligonucleotide
  Sense strand starting at position 692 SEQ ID NO: 3043
cugagucuucugggcaacu

SEQ ID NO: 236317 - RNA, 19 nt, Artificial Sequence
  Description of Artificial Sequence: Synthetic oligonucleotide
  Antisense strand to SEQ ID NO: 236316
aguugcccagaagacucag

SEQ ID NO: 236318 - RNA, 19 nt, Artificial Sequence
  Description of Artificial Sequence: Synthetic oligonucleotide
  Sense strand starting at position 693 SEQ ID NO: 3043
ugagucuucugggcaacuu

SEQ ID NO: 236319 - RNA, 19 nt, Artificial Sequence
  Description of Artificial Sequence: Synthetic oligonucleotide
  Antisense strand to SEQ ID NO: 236318
aaguugcccagaagacuca

SEQ ID NO: 236320 - RNA, 19 nt, Artificial Sequence
  Description of Artificial Sequence: Synthetic oligonucleotide
  Sense strand starting at position 761 SEQ ID NO: 3043
uagcauuucuagcugggua

SEQ ID NO: 236321 - RNA, 19 nt, Artificial Sequence
  Description of Artificial Sequence: Synthetic oligonucleotide
  Antisense strand to SEQ ID NO: 236320
uacccagcuagaaaugcua

SEQ ID NO: 236322 - RNA, 19 nt, Artificial Sequence
  Description of Artificial Sequence: Synthetic oligonucleotide
  Sense strand starting at position 1053 SEQ ID NO: 3043
gagcgaaaguccgucuaag

SEQ ID NO: 236323 - RNA, 19 nt, Artificial Sequence
  Description of Artificial Sequence: Synthetic oligonucleotide
  Antisense strand to SEQ ID NO: 236322
cuuagacggacuuucgcuc

SEQ ID NO: 236324 - RNA, 19 nt, Artificial Sequence
  Description of Artificial Sequence: Synthetic oligonucleotide
  Sense strand starting at position 1118 SEQ ID NO: 3043
ggagacaaagcagguuuaa

SEQ ID NO: 236325 - RNA, 19 nt, Artificial Sequence
  Description of Artificial Sequence: Synthetic oligonucleotide
  Antisense strand to SEQ ID NO: 236324
uuaaaccugcuuugucucc

SEQ ID NO: 236326 - RNA, 19 nt, Artificial Sequence
  Description of Artificial Sequence: Synthetic oligonucleotide
  Sense strand starting at position 1136 SEQ ID NO: 3043
auccuaaacuucgcaaaga

SEQ ID NO: 236327 - RNA, 19 nt, Artificial Sequence
  Description of Artificial Sequence: Synthetic oligonucleotide
  Antisense strand to SEQ ID NO: 236326
ucuuugcgaaguuuaggau

SEQ ID NO: 236328 - RNA, 19 nt, Artificial Sequence
  Description of Artificial Sequence: Synthetic oligonucleotide
  Sense strand starting at position 1197 SEQ ID NO: 3043
agcuaagucuacuugcaac

SEQ ID NO: 236329 - RNA, 19 nt, Artificial Sequence
  Description of Artificial Sequence: Synthetic oligonucleotide
  Antisense strand to SEQ ID NO: 236328
guugcaaguagacuuagcu

SEQ ID NO: 236330 - RNA, 19 nt, Artificial Sequence
  Description of Artificial Sequence: Synthetic oligonucleotide
  Sense strand starting at position 1357 SEQ ID NO: 3043
ggacaaaucuguccacuca

SEQ ID NO: 236331 - RNA, 19 nt, Artificial Sequence
  Description of Artificial Sequence: Synthetic oligonucleotide
  Antisense strand to SEQ ID NO: 236330
ugaguggacagauuugucc

SEQ ID NO: 236332 - RNA, 19 nt, Artificial Sequence
  Description of Artificial Sequence: Synthetic oligonucleotide
  Sense strand starting at position 1427 SEQ ID NO: 3043
ucagccuugucuuucugua

SEQ ID NO: 236333 - RNA, 19 nt, Artificial Sequence
  Description of Artificial Sequence: Synthetic oligonucleotide
  Antisense strand to SEQ ID NO: 236332
uacagaaagacaaggcuga

SEQ ID NO: 236334 - RNA, 19 nt, Artificial Sequence
  Description of Artificial Sequence: Synthetic oligonucleotide
  Sense strand starting at position 1432 SEQ ID NO: 3043
cuugucuuucuguacuuua

SEQ ID NO: 236335 - RNA, 19 nt, Artificial Sequence
  Description of Artificial Sequence: Synthetic oligonucleotide
  Antisense strand to SEQ ID NO: 236334
uaaaguacagaaagacaag

SEQ ID NO: 236336 - RNA, 19 nt, Artificial Sequence
  Description of Artificial Sequence: Synthetic oligonucleotide
  Sense strand starting at position 1549 SEQ ID NO: 3043
gggucggcucaaugagguu

SEQ ID NO: 236337 - RNA, 19 nt, Artificial Sequence
  Description of Artificial Sequence: Synthetic oligonucleotide
  Antisense strand to SEQ ID NO: 236336
aaccucauugagccgaccc

SEQ ID NO: 236338 - RNA, 19 nt, Artificial Sequence
  Description of Artificial Sequence: Synthetic oligonucleotide
  Sense strand starting at position 1558 SEQ ID NO: 3043
caaugagguugccucaaug

SEQ ID NO: 236339 - RNA, 19 nt, Artificial Sequence
  Description of Artificial Sequence: Synthetic oligonucleotide
  Antisense strand to SEQ ID NO: 236338
cauugaggcaaccucauug

SEQ ID NO: 236340 - RNA, 19 nt, Artificial Sequence
  Description of Artificial Sequence: Synthetic oligonucleotide
  Sense strand starting at position 1577 SEQ ID NO: 3043
aucugacuauaggaaacau

SEQ ID NO: 236341 - RNA, 19 nt, Artificial Sequence
  Description of Artificial Sequence: Synthetic oligonucleotide
  Antisense strand to SEQ ID NO: 236340
auguuuccuauagucagau

SEQ ID NO: 236342 - RNA, 19 nt, Artificial Sequence
  Description of Artificial Sequence: Synthetic oligonucleotide
  Sense strand starting at position 1668 SEQ ID NO: 3043
aguguucccgaaugucauc

SEQ ID NO: 236343 - RNA, 19 nt, Artificial Sequence
  Description of Artificial Sequence: Synthetic oligonucleotide
  Antisense strand to SEQ ID NO: 236342
gaugacauucgggaacacu

SEQ ID NO: 236344 - RNA, 19 nt, Artificial Sequence
  Description of Artificial Sequence: Synthetic oligonucleotide
  Sense strand starting at position 1673 SEQ ID NO: 3043
ucccgaaugucaucaucau

SEQ ID NO: 236345 - RNA, 19 nt, Artificial Sequence
  Description of Artificial Sequence: Synthetic oligonucleotide
  Antisense strand to SEQ ID NO: 236344
augaugaugacauucggga

SEQ ID NO: 236346 - RNA, 19 nt, Artificial Sequence
  Description of Artificial Sequence: Synthetic oligonucleotide
  Sense strand starting at position 1674 SEQ ID NO: 3043
cccgaaugucaucaucauu

SEQ ID NO: 236347 - RNA, 19 nt, Artificial Sequence
  Description of Artificial Sequence: Synthetic oligonucleotide
  Antisense strand to SEQ ID NO: 236346
aaugaugaugacauucggg

SEQ ID NO: 236348 - RNA, 19 nt, Artificial Sequence
  Description of Artificial Sequence: Synthetic oligonucleotide
  Sense strand starting at position 2014 SEQ ID NO: 3043
gcgccagcacugucguaaa

SEQ ID NO: 236349 - RNA, 19 nt, Artificial Sequence
  Description of Artificial Sequence: Synthetic oligonucleotide
  Antisense strand to SEQ ID NO: 236348
uuuacgacagugcuggcgc

SEQ ID NO: 236350 - RNA, 19 nt, Artificial Sequence
  Description of Artificial Sequence: Synthetic oligonucleotide
  Sense strand starting at position 2145 SEQ ID NO: 3043
guuagacucgccuguuaug

SEQ ID NO: 236351 - RNA, 19 nt, Artificial Sequence
  Description of Artificial Sequence: Synthetic oligonucleotide
  Antisense strand to SEQ ID NO: 236350
cauaacaggcgagucuaac

SEQ ID NO: 236352 - RNA, 19 nt, Artificial Sequence
  Description of Artificial Sequence: Synthetic oligonucleotide
  Sense strand starting at position 2334 SEQ ID NO: 3043
ugaggacgcgccuggaaau

SEQ ID NO: 236353 - RNA, 19 nt, Artificial Sequence
  Description of Artificial Sequence: Synthetic oligonucleotide
  Antisense strand to SEQ ID NO: 236352
auuuccaggcgcguccuca

SEQ ID NO: 236354 - RNA, 19 nt, Artificial Sequence
  Description of Artificial Sequence: Synthetic oligonucleotide
  Sense strand starting at position 2346 SEQ ID NO: 3043
uggaaauguugccuggguu

SEQ ID NO: 236355 - RNA, 19 nt, Artificial Sequence
  Description of Artificial Sequence: Synthetic oligonucleotide
  Antisense strand to SEQ ID NO: 236354
aacccaggcaacauuucca

SEQ ID NO: 236356 - RNA, 19 nt, Artificial Sequence
  Description of Artificial Sequence: Synthetic oligonucleotide
  Sense strand starting at position 2347 SEQ ID NO: 3043
ggaaauguugccuggguuu

SEQ ID NO: 236357 - RNA, 19 nt, Artificial Sequence
  Description of Artificial Sequence: Synthetic oligonucleotide
  Antisense strand to SEQ ID NO: 236356
aaacccaggcaacauuucc

SEQ ID NO: 236358 - RNA, 19 nt, Artificial Sequence
  Description of Artificial Sequence: Synthetic oligonucleotide
  Sense strand starting at position 2443 SEQ ID NO: 3043
cacugcucucgcuuguaau

SEQ ID NO: 236359 - RNA, 19 nt, Artificial Sequence
  Description of Artificial Sequence: Synthetic oligonucleotide
  Antisense strand to SEQ ID NO: 236358
auuacaagcgagagcagug

SEQ ID NO: 236360 - RNA, 19 nt, Artificial Sequence
  Description of Artificial Sequence: Synthetic oligonucleotide
  Sense strand starting at position 3150 SEQ ID NO: 3043
agggaagguucucagaggu

SEQ ID NO: 236361 - RNA, 19 nt, Artificial Sequence
  Description of Artificial Sequence: Synthetic oligonucleotide
  Antisense strand to SEQ ID NO: 236360
accucugagaaccuucccu

SEQ ID NO: 236362 - RNA, 19 nt, Artificial Sequence
  Description of Artificial Sequence: Synthetic oligonucleotide
  Sense strand starting at position 3154 SEQ ID NO: 3043
aagguucucagaggugagu

SEQ ID NO: 236363 - RNA, 19 nt, Artificial Sequence
  Description of Artificial Sequence: Synthetic oligonucleotide
  Antisense strand to SEQ ID NO: 236362
acucaccucugagaaccuu

SEQ ID NO: 236364 - RNA, 19 nt, Artificial Sequence
  Description of Artificial Sequence: Synthetic oligonucleotide
  Sense strand starting at position 3165 SEQ ID NO: 3043
aggugagucuggagcagaa

SEQ ID NO: 236365 - RNA, 19 nt, Artificial Sequence
  Description of Artificial Sequence: Synthetic oligonucleotide
  Antisense strand to SEQ ID NO: 236364
uucugcuccagacucaccu

SEQ ID NO: 236366 - RNA, 19 nt, Artificial Sequence
  Description of Artificial Sequence: Synthetic oligonucleotide
  Sense strand starting at position 3167 SEQ ID NO: 3043
gugagucuggagcagaauu

SEQ ID NO: 236367 - RNA, 19 nt, Artificial Sequence
  Description of Artificial Sequence: Synthetic oligonucleotide
  Antisense strand to SEQ ID NO: 236366
aauucugcuccagacucac

SEQ ID NO: 236368 - RNA, 19 nt, Artificial Sequence
  Description of Artificial Sequence: Synthetic oligonucleotide
  Sense strand starting at position 3312 SEQ ID NO: 3043
agcuuuguuuauguggauu

SEQ ID NO: 236369 - RNA, 19 nt, Artificial Sequence
  Description of Artificial Sequence: Synthetic oligonucleotide
  Antisense strand to SEQ ID NO: 236368
aauccacauaaacaaagcu

SEQ ID NO: 236370 - RNA, 19 nt, Artificial Sequence
  Description of Artificial Sequence: Synthetic oligonucleotide
  Sense strand starting at position 3344 SEQ ID NO: 3043
uuugccguauuagaaauuu

SEQ ID NO: 236371 - RNA, 19 nt, Artificial Sequence
  Description of Artificial Sequence: Synthetic oligonucleotide
  Antisense strand to SEQ ID NO: 236370
aaauuucuaauacggcaaa

SEQ ID NO: 236372 - RNA, 19 nt, Artificial Sequence
  Description of Artificial Sequence: Synthetic oligonucleotide
  Sense strand starting at position 145 SEQ ID NO: 3044
aguguuagcuucuccauga

SEQ ID NO: 236373 - RNA, 19 nt, Artificial Sequence
  Description of Artificial Sequence: Synthetic oligonucleotide
  Antisense strand to SEQ ID NO: 236372
ucauggagaagcuaacacu

SEQ ID NO: 236374 - RNA, 19 nt, Artificial Sequence
  Description of Artificial Sequence: Synthetic oligonucleotide
  Sense strand starting at position 146 SEQ ID NO: 3044
guguuagcuucuccaugag

SEQ ID NO: 236375 - RNA, 19 nt, Artificial Sequence
  Description of Artificial Sequence: Synthetic oligonucleotide
  Antisense strand to SEQ ID NO: 236374
cucauggagaagcuaacac

SEQ ID NO: 236376 - RNA, 19 nt, Artificial Sequence
  Description of Artificial Sequence: Synthetic oligonucleotide
  Sense strand starting at position 307 SEQ ID NO: 3044
aggaauuguuuggucuguu

SEQ ID NO: 236377 - RNA, 19 nt, Artificial Sequence
  Description of Artificial Sequence: Synthetic oligonucleotide
  Antisense strand to SEQ ID NO: 236376
aacagaccaaacaauuccu

SEQ ID NO: 236378 - RNA, 19 nt, Artificial Sequence
  Description of Artificial Sequence: Synthetic oligonucleotide
  Sense strand starting at position 308 SEQ ID NO: 3044
ggaauuguuuggucuguuu

SEQ ID NO: 236379 - RNA, 19 nt, Artificial Sequence
  Description of Artificial Sequence: Synthetic oligonucleotide
  Antisense strand to SEQ ID NO: 236378
aaacagaccaaacaauucc

SEQ ID NO: 236380 - RNA, 19 nt, Artificial Sequence
  Description of Artificial Sequence: Synthetic oligonucleotide
  Sense strand starting at position 334 SEQ ID NO: 3044
aguacuuaacaguguagua

SEQ ID NO: 236381 - RNA, 19 nt, Artificial Sequence
  Description of Artificial Sequence: Synthetic oligonucleotide
  Antisense strand to SEQ ID NO: 236380
uacuacacuguuaaguacu

SEQ ID NO: 236382 - RNA, 19 nt, Artificial Sequence
  Description of Artificial Sequence: Synthetic oligonucleotide
  Sense strand starting at position 346 SEQ ID NO: 3044
uguaguaagugcucaacag

SEQ ID NO: 236383 - RNA, 19 nt, Artificial Sequence
  Description of Artificial Sequence: Synthetic oligonucleotide
  Antisense strand to SEQ ID NO: 236382
cuguugagcacuuacuaca

SEQ ID NO: 236384 - RNA, 19 nt, Artificial Sequence
  Description of Artificial Sequence: Synthetic oligonucleotide
  Sense strand starting at position 350 SEQ ID NO: 3044
guaagugcucaacagggua

SEQ ID NO: 236385 - RNA, 19 nt, Artificial Sequence
  Description of Artificial Sequence: Synthetic oligonucleotide
  Antisense strand to SEQ ID NO: 236384
uacccuguugagcacuuac

SEQ ID NO: 236386 - RNA, 19 nt, Artificial Sequence
  Description of Artificial Sequence: Synthetic oligonucleotide
  Sense strand starting at position 515 SEQ ID NO: 3044
accaguguauuccuugaug

SEQ ID NO: 236387 - RNA, 19 nt, Artificial Sequence
  Description of Artificial Sequence: Synthetic oligonucleotide
  Antisense strand to SEQ ID NO: 236386
caucaaggaauacacuggu

SEQ ID NO: 236388 - RNA, 19 nt, Artificial Sequence
  Description of Artificial Sequence: Synthetic oligonucleotide
  Sense strand starting at position 517 SEQ ID NO: 3044
caguguauuccuugauguu

SEQ ID NO: 236389 - RNA, 19 nt, Artificial Sequence
  Description of Artificial Sequence: Synthetic oligonucleotide
  Antisense strand to SEQ ID NO: 236388
aacaucaaggaauacacug

SEQ ID NO: 236390 - RNA, 19 nt, Artificial Sequence
  Description of Artificial Sequence: Synthetic oligonucleotide
  Sense strand starting at position 518 SEQ ID NO: 3044
aguguauuccuugauguua

SEQ ID NO: 236391 - RNA, 19 nt, Artificial Sequence
  Description of Artificial Sequence: Synthetic oligonucleotide
  Antisense strand to SEQ ID NO: 236390
uaacaucaaggaauacacu

SEQ ID NO: 236392 - RNA, 19 nt, Artificial Sequence
  Description of Artificial Sequence: Synthetic oligonucleotide
  Sense strand starting at position 530 SEQ ID NO: 3044
gauguuaaauuucgaaaga

SEQ ID NO: 236393 - RNA, 19 nt, Artificial Sequence
  Description of Artificial Sequence: Synthetic oligonucleotide
  Antisense strand to SEQ ID NO: 236392
ucuuucgaaauuuaacauc

SEQ ID NO: 236394 - RNA, 19 nt, Artificial Sequence
  Description of Artificial Sequence: Synthetic oligonucleotide
  Sense strand starting at position 604 SEQ ID NO: 3044
ccucuucuguugucaacau

SEQ ID NO: 236395 - RNA, 19 nt, Artificial Sequence
  Description of Artificial Sequence: Synthetic oligonucleotide
  Antisense strand to SEQ ID NO: 236394
auguugacaacagaagagg

SEQ ID NO: 236396 - RNA, 19 nt, Artificial Sequence
  Description of Artificial Sequence: Synthetic oligonucleotide
  Sense strand starting at position 608 SEQ ID NO: 3044
uucuguugucaacaucuga

SEQ ID NO: 236397 - RNA, 19 nt, Artificial Sequence
  Description of Artificial Sequence: Synthetic oligonucleotide
  Antisense strand to SEQ ID NO: 236396
ucagauguugacaacagaa

SEQ ID NO: 236398 - RNA, 19 nt, Artificial Sequence
  Description of Artificial Sequence: Synthetic oligonucleotide
  Sense strand starting at position 612 SEQ ID NO: 3044
guugucaacaucugaugua

SEQ ID NO: 236399 - RNA, 19 nt, Artificial Sequence
  Description of Artificial Sequence: Synthetic oligonucleotide
  Antisense strand to SEQ ID NO: 236398
uacaucagauguugacaac

SEQ ID NO: 236400 - RNA, 19 nt, Artificial Sequence
  Description of Artificial Sequence: Synthetic oligonucleotide
  Sense strand starting at position 648 SEQ ID NO: 3044
ccaguuugagcacaucaga

SEQ ID NO: 236401 - RNA, 19 nt, Artificial Sequence
  Description of Artificial Sequence: Synthetic oligonucleotide
  Antisense strand to SEQ ID NO: 236400
ucugaugugcucaaacugg

SEQ ID NO: 236402 - RNA, 19 nt, Artificial Sequence
  Description of Artificial Sequence: Synthetic oligonucleotide
  Sense strand starting at position 883 SEQ ID NO: 3044
gcacaacauugggaaucaa

SEQ ID NO: 236403 - RNA, 19 nt, Artificial Sequence
  Description of Artificial Sequence: Synthetic oligonucleotide
  Antisense strand to SEQ ID NO: 236402
uugauucccaauguugugc

SEQ ID NO: 236404 - RNA, 19 nt, Artificial Sequence
  Description of Artificial Sequence: Synthetic oligonucleotide
  Sense strand starting at position 915 SEQ ID NO: 3044
caauguauguagcucuaga

SEQ ID NO: 236405 - RNA, 19 nt, Artificial Sequence
  Description of Artificial Sequence: Synthetic oligonucleotide
  Antisense strand to SEQ ID NO: 236404
ucuagagcuacauacauug

SEQ ID NO: 236406 - RNA, 19 nt, Artificial Sequence
  Description of Artificial Sequence: Synthetic oligonucleotide
  Sense strand starting at position 995 SEQ ID NO: 3044
uuaccuuucuuacagagag

SEQ ID NO: 236407 - RNA, 19 nt, Artificial Sequence
  Description of Artificial Sequence: Synthetic oligonucleotide
  Antisense strand to SEQ ID NO: 236406
cucucuguaagaaagguaa

SEQ ID NO: 236408 - RNA, 19 nt, Artificial Sequence
  Description of Artificial Sequence: Synthetic oligonucleotide
  Sense strand starting at position 1010 SEQ ID NO: 3044
agagacuacguguguuuaa

SEQ ID NO: 236409 - RNA, 19 nt, Artificial Sequence
  Description of Artificial Sequence: Synthetic oligonucleotide
  Antisense strand to SEQ ID NO: 236408
uuaaacacacguagucucu

SEQ ID NO: 236410 - RNA, 19 nt, Artificial Sequence
  Description of Artificial Sequence: Synthetic oligonucleotide
  Sense strand starting at position 1011 SEQ ID NO: 3044
gagacuacguguguuuaag

SEQ ID NO: 236411 - RNA, 19 nt, Artificial Sequence
  Description of Artificial Sequence: Synthetic oligonucleotide
  Antisense strand to SEQ ID NO: 236410
cuuaaacacacguagucuc

SEQ ID NO: 236412 - RNA, 19 nt, Artificial Sequence
  Description of Artificial Sequence: Synthetic oligonucleotide
  Sense strand starting at position 1023 SEQ ID NO: 3044
guuuaagugcuuugacuug

SEQ ID NO: 236413 - RNA, 19 nt, Artificial Sequence
  Description of Artificial Sequence: Synthetic oligonucleotide
  Antisense strand to SEQ ID NO: 236412
caagucaaagcacuuaaac

SEQ ID NO: 236414 - RNA, 19 nt, Artificial Sequence
  Description of Artificial Sequence: Synthetic oligonucleotide
  Sense strand starting at position 1028 SEQ ID NO: 3044
agugcuuugacuugcagga

SEQ ID NO: 236415 - RNA, 19 nt, Artificial Sequence
  Description of Artificial Sequence: Synthetic oligonucleotide
  Antisense strand to SEQ ID NO: 236414
uccugcaagucaaagcacu

SEQ ID NO: 236416 - RNA, 19 nt, Artificial Sequence
  Description of Artificial Sequence: Synthetic oligonucleotide
  Sense strand starting at position 1101 SEQ ID NO: 3044
cguuauugcuucccaaaca

SEQ ID NO: 236417 - RNA, 19 nt, Artificial Sequence
  Description of Artificial Sequence: Synthetic oligonucleotide
  Antisense strand to SEQ ID NO: 236416
uguuugggaagcaauaacg

SEQ ID NO: 236418 - RNA, 19 nt, Artificial Sequence
  Description of Artificial Sequence: Synthetic oligonucleotide
  Sense strand starting at position 1154 SEQ ID NO: 3044
cccuguucgcuugauuuau

SEQ ID NO: 236419 - RNA, 19 nt, Artificial Sequence
  Description of Artificial Sequence: Synthetic oligonucleotide
  Antisense strand to SEQ ID NO: 236418
auaaaucaagcgaacaggg

SEQ ID NO: 236420 - RNA, 19 nt, Artificial Sequence
  Description of Artificial Sequence: Synthetic oligonucleotide
  Sense strand starting at position 1156 SEQ ID NO: 3044
cuguucgcuugauuuaugu

SEQ ID NO: 236421 - RNA, 19 nt, Artificial Sequence
  Description of Artificial Sequence: Synthetic oligonucleotide
  Antisense strand to SEQ ID NO: 236420
acauaaaucaagcgaacag

SEQ ID NO: 236422 - RNA, 19 nt, Artificial Sequence
  Description of Artificial Sequence: Synthetic oligonucleotide
  Sense strand starting at position 1158 SEQ ID NO: 3044
guucgcuugauuuauguuu

SEQ ID NO: 236423 - RNA, 19 nt, Artificial Sequence
  Description of Artificial Sequence: Synthetic oligonucleotide
  Antisense strand to SEQ ID NO: 236422
aaacauaaaucaagcgaac

SEQ ID NO: 236424 - RNA, 19 nt, Artificial Sequence
  Description of Artificial Sequence: Synthetic oligonucleotide
  Sense strand starting at position 1205 SEQ ID NO: 3044
uuuggaaacugacacuuaa

SEQ ID NO: 236425 - RNA, 19 nt, Artificial Sequence
  Description of Artificial Sequence: Synthetic oligonucleotide
  Antisense strand to SEQ ID NO: 236424
uuaagugucaguuuccaaa

SEQ ID NO: 236426 - RNA, 19 nt, Artificial Sequence
  Description of Artificial Sequence: Synthetic oligonucleotide
  Sense strand starting at position 1212 SEQ ID NO: 3044
acugacacuuaaggauaau

SEQ ID NO: 236427 - RNA, 19 nt, Artificial Sequence
  Description of Artificial Sequence: Synthetic oligonucleotide
  Antisense strand to SEQ ID NO: 236426
auuauccuuaagugucagu

SEQ ID NO: 236428 - RNA, 19 nt, Artificial Sequence
  Description of Artificial Sequence: Synthetic oligonucleotide
  Sense strand starting at position 1372 SEQ ID NO: 3044
ggagucuccuccguccaga

SEQ ID NO: 236429 - RNA, 19 nt, Artificial Sequence
  Description of Artificial Sequence: Synthetic oligonucleotide
  Antisense strand to SEQ ID NO: 236428
ucuggacggaggagacucc

SEQ ID NO: 236430 - RNA, 19 nt, Artificial Sequence
  Description of Artificial Sequence: Synthetic oligonucleotide
  Sense strand starting at position 2133 SEQ ID NO: 3044
gcccgagacccggaugaaa

SEQ ID NO: 236431 - RNA, 19 nt, Artificial Sequence
  Description of Artificial Sequence: Synthetic oligonucleotide
  Antisense strand to SEQ ID NO: 236430
uuucauccgggucucgggc

SEQ ID NO: 236432 - RNA, 19 nt, Artificial Sequence
  Description of Artificial Sequence: Synthetic oligonucleotide
  Sense strand starting at position 2223 SEQ ID NO: 3044
ccuugaguugagugguguu

SEQ ID NO: 236433 - RNA, 19 nt, Artificial Sequence
  Description of Artificial Sequence: Synthetic oligonucleotide
  Antisense strand to SEQ ID NO: 236432
aacaccacucaacucaagg

SEQ ID NO: 236434 - RNA, 19 nt, Artificial Sequence
  Description of Artificial Sequence: Synthetic oligonucleotide
  Sense strand starting at position 2468 SEQ ID NO: 3044
ucugguagaacugggaauu

SEQ ID NO: 236435 - RNA, 19 nt, Artificial Sequence
  Description of Artificial Sequence: Synthetic oligonucleotide
  Antisense strand to SEQ ID NO: 236434
aauucccaguucuaccaga

SEQ ID NO: 236436 - RNA, 19 nt, Artificial Sequence
  Description of Artificial Sequence: Synthetic oligonucleotide
  Sense strand starting at position 2494 SEQ ID NO: 3044
gaguguuguacugggacag

SEQ ID NO: 236437 - RNA, 19 nt, Artificial Sequence
  Description of Artificial Sequence: Synthetic oligonucleotide
  Antisense strand to SEQ ID NO: 236436
cugucccaguacaacacuc

SEQ ID NO: 236438 - RNA, 19 nt, Artificial Sequence
  Description of Artificial Sequence: Synthetic oligonucleotide
  Sense strand starting at position 2683 SEQ ID NO: 3044
gggcguccuguguuugcua

SEQ ID NO: 236439 - RNA, 19 nt, Artificial Sequence
  Description of Artificial Sequence: Synthetic oligonucleotide
  Antisense strand to SEQ ID NO: 236438
uagcaaacacaggacgccc

SEQ ID NO: 236440 - RNA, 19 nt, Artificial Sequence
  Description of Artificial Sequence: Synthetic oligonucleotide
  Sense strand starting at position 2708 SEQ ID NO: 3044
gcaacucuauccuuaggca

SEQ ID NO: 236441 - RNA, 19 nt, Artificial Sequence
  Description of Artificial Sequence: Synthetic oligonucleotide
  Antisense strand to SEQ ID NO: 236440
ugccuaaggauagaguugc

SEQ ID NO: 236442 - RNA, 19 nt, Artificial Sequence
  Description of Artificial Sequence: Synthetic oligonucleotide
  Sense strand starting at position 2774 SEQ ID NO: 3044
uccugucagcuuuaaagau

SEQ ID NO: 236443 - RNA, 19 nt, Artificial Sequence
  Description of Artificial Sequence: Synthetic oligonucleotide
  Antisense strand to SEQ ID NO: 236442
aucuuuaaagcugacagga

SEQ ID NO: 236444 - RNA, 19 nt, Artificial Sequence
  Description of Artificial Sequence: Synthetic oligonucleotide
  Sense strand starting at position 3367 SEQ ID NO: 3044
cugagauugcggugagcca

SEQ ID NO: 236445 - RNA, 19 nt, Artificial Sequence
  Description of Artificial Sequence: Synthetic oligonucleotide
  Antisense strand to SEQ ID NO: 236444
uggcucaccgcaaucucag

SEQ ID NO: 236446 - RNA, 19 nt, Artificial Sequence
  Description of Artificial Sequence: Synthetic oligonucleotide
  Sense strand starting at position 3588 SEQ ID NO: 3044
uggcuucuguccuuuccua

SEQ ID NO: 236447 - RNA, 19 nt, Artificial Sequence
  Description of Artificial Sequence: Synthetic oligonucleotide
  Antisense strand to SEQ ID NO: 236446
uaggaaaggacagaagcca

SEQ ID NO: 236448 - RNA, 19 nt, Artificial Sequence
  Description of Artificial Sequence: Synthetic oligonucleotide
  Sense strand starting at position 3611 SEQ ID NO: 3044
ccuauugcuugcccuaaga

SEQ ID NO: 236449 - RNA, 19 nt, Artificial Sequence
  Description of Artificial Sequence: Synthetic oligonucleotide
  Antisense strand to SEQ ID NO: 236448
ucuuagggcaagcaauagg

SEQ ID NO: 236450 - RNA, 19 nt, Artificial Sequence
  Description of Artificial Sequence: Synthetic oligonucleotide
  Sense strand starting at position 3645 SEQ ID NO: 3044
gguugauaacuggagucuu

SEQ ID NO: 236451 - RNA, 19 nt, Artificial Sequence
  Description of Artificial Sequence: Synthetic oligonucleotide
  Antisense strand to SEQ ID NO: 236450
aagacuccaguuaucaacc

SEQ ID NO: 236452 - RNA, 19 nt, Artificial Sequence
  Description of Artificial Sequence: Synthetic oligonucleotide
  Sense strand starting at position 21 SEQ ID NO: 3045
aaauuuguacuguggcuua

SEQ ID NO: 236453 - RNA, 19 nt, Artificial Sequence
  Description of Artificial Sequence: Synthetic oligonucleotide
  Antisense strand to SEQ ID NO: 236452
uaagccacaguacaaauuu

SEQ ID NO: 236454 - RNA, 19 nt, Artificial Sequence
  Description of Artificial Sequence: Synthetic oligonucleotide
  Sense strand starting at position 294 SEQ ID NO: 3045
ugaauacuaugguuugaga

SEQ ID NO: 236455 - RNA, 19 nt, Artificial Sequence
  Description of Artificial Sequence: Synthetic oligonucleotide
  Antisense strand to SEQ ID NO: 236454
ucucaaaccauaguauuca

SEQ ID NO: 236456 - RNA, 19 nt, Artificial Sequence
  Description of Artificial Sequence: Synthetic oligonucleotide
  Sense strand starting at position 296 SEQ ID NO: 3045
aauacuaugguuugagaug

SEQ ID NO: 236457 - RNA, 19 nt, Artificial Sequence
  Description of Artificial Sequence: Synthetic oligonucleotide
  Antisense strand to SEQ ID NO: 236456
caucucaaaccauaguauu

SEQ ID NO: 236458 - RNA, 19 nt, Artificial Sequence
  Description of Artificial Sequence: Synthetic oligonucleotide
  Sense strand starting at position 302 SEQ ID NO: 3045
augguuugagauggcuaua

SEQ ID NO: 236459 - RNA, 19 nt, Artificial Sequence
  Description of Artificial Sequence: Synthetic oligonucleotide
  Antisense strand to SEQ ID NO: 236458
uauagccaucucaaaccau

SEQ ID NO: 236460 - RNA, 19 nt, Artificial Sequence
  Description of Artificial Sequence: Synthetic oligonucleotide
  Sense strand starting at position 305 SEQ ID NO: 3045
guuugagauggcuauaagu

SEQ ID NO: 236461 - RNA, 19 nt, Artificial Sequence
  Description of Artificial Sequence: Synthetic oligonucleotide
  Antisense strand to SEQ ID NO: 236460
acuuauagccaucucaaac

SEQ ID NO: 236462 - RNA, 19 nt, Artificial Sequence
  Description of Artificial Sequence: Synthetic oligonucleotide
  Sense strand starting at position 359 SEQ ID NO: 3045
uuuccuauuuaacauggga

SEQ ID NO: 236463 - RNA, 19 nt, Artificial Sequence
  Description of Artificial Sequence: Synthetic oligonucleotide
  Antisense strand to SEQ ID NO: 236462
ucccauguuaaauaggaaa

SEQ ID NO: 236464 - RNA, 19 nt, Artificial Sequence
  Description of Artificial Sequence: Synthetic oligonucleotide
  Sense strand starting at position 364 SEQ ID NO: 3045
uauuuaacaugggauguuu

SEQ ID NO: 236465 - RNA, 19 nt, Artificial Sequence
  Description of Artificial Sequence: Synthetic oligonucleotide
  Antisense strand to SEQ ID NO: 236464
aaacaucccauguuaaaua

SEQ ID NO: 236466 - RNA, 19 nt, Artificial Sequence
  Description of Artificial Sequence: Synthetic oligonucleotide
  Sense strand starting at position 420 SEQ ID NO: 3045
uuuccaaagcaauggauua

SEQ ID NO: 236467 - RNA, 19 nt, Artificial Sequence
  Description of Artificial Sequence: Synthetic oligonucleotide
  Antisense strand to SEQ ID NO: 236466
uaauccauugcuuuggaaa

SEQ ID NO: 236468 - RNA, 19 nt, Artificial Sequence
  Description of Artificial Sequence: Synthetic oligonucleotide
  Sense strand starting at position 530 SEQ ID NO: 3045
ccaggauacuugguuuaau

SEQ ID NO: 236469 - RNA, 19 nt, Artificial Sequence
  Description of Artificial Sequence: Synthetic oligonucleotide
  Antisense strand to SEQ ID NO: 236468
auuaaaccaaguauccugg

SEQ ID NO: 236470 - RNA, 19 nt, Artificial Sequence
  Description of Artificial Sequence: Synthetic oligonucleotide
  Sense strand starting at position 531 SEQ ID NO: 3045
caggauacuugguuuaauu

SEQ ID NO: 236471 - RNA, 19 nt, Artificial Sequence
  Description of Artificial Sequence: Synthetic oligonucleotide
  Antisense strand to SEQ ID NO: 236470
aauuaaaccaaguauccug

SEQ ID NO: 236472 - RNA, 19 nt, Artificial Sequence
  Description of Artificial Sequence: Synthetic oligonucleotide
  Sense strand starting at position 613 SEQ ID NO: 3045
cuggguaccuagucucauu

SEQ ID NO: 236473 - RNA, 19 nt, Artificial Sequence
  Description of Artificial Sequence: Synthetic oligonucleotide
  Antisense strand to SEQ ID NO: 236472
aaugagacuagguacccag

SEQ ID NO: 236474 - RNA, 19 nt, Artificial Sequence
  Description of Artificial Sequence: Synthetic oligonucleotide
  Sense strand starting at position 630 SEQ ID NO: 3045
uuuccuuugccugggacaa

SEQ ID NO: 236475 - RNA, 19 nt, Artificial Sequence
  Description of Artificial Sequence: Synthetic oligonucleotide
  Antisense strand to SEQ ID NO: 236474
uugucccaggcaaaggaaa

SEQ ID NO: 236476 - RNA, 19 nt, Artificial Sequence
  Description of Artificial Sequence: Synthetic oligonucleotide
  Sense strand starting at position 631 SEQ ID NO: 3045
uuccuuugccugggacaaa

SEQ ID NO: 236477 - RNA, 19 nt, Artificial Sequence
  Description of Artificial Sequence: Synthetic oligonucleotide
  Antisense strand to SEQ ID NO: 236476
uuugucccaggcaaaggaa

SEQ ID NO: 236478 - RNA, 19 nt, Artificial Sequence
  Description of Artificial Sequence: Synthetic oligonucleotide
  Sense strand starting at position 833 SEQ ID NO: 3045
aagugaguuggccaaacuu

SEQ ID NO: 236479 - RNA, 19 nt, Artificial Sequence
  Description of Artificial Sequence: Synthetic oligonucleotide
  Antisense strand to SEQ ID NO: 236478
aaguuuggccaacucacuu

SEQ ID NO: 236480 - RNA, 19 nt, Artificial Sequence
  Description of Artificial Sequence: Synthetic oligonucleotide
  Sense strand starting at position 949 SEQ ID NO: 3045
ccuaguucuagguagucau

SEQ ID NO: 236481 - RNA, 19 nt, Artificial Sequence
  Description of Artificial Sequence: Synthetic oligonucleotide
  Antisense strand to SEQ ID NO: 236480
augacuaccuagaacuagg

SEQ ID NO: 236482 - RNA, 19 nt, Artificial Sequence
  Description of Artificial Sequence: Synthetic oligonucleotide
  Sense strand starting at position 1376 SEQ ID NO: 3045
gagggaugaucggcacuuu

SEQ ID NO: 236483 - RNA, 19 nt, Artificial Sequence
  Description of Artificial Sequence: Synthetic oligonucleotide
  Antisense strand to SEQ ID NO: 236482
aaagugccgaucaucccuc

SEQ ID NO: 236484 - RNA, 19 nt, Artificial Sequence
  Description of Artificial Sequence: Synthetic oligonucleotide
  Sense strand starting at position 1485 SEQ ID NO: 3045
ucagacagcugucuaaucu

SEQ ID NO: 236485 - RNA, 19 nt, Artificial Sequence
  Description of Artificial Sequence: Synthetic oligonucleotide
  Antisense strand to SEQ ID NO: 236484
agauuagacagcugucuga

SEQ ID NO: 236486 - RNA, 19 nt, Artificial Sequence
  Description of Artificial Sequence: Synthetic oligonucleotide
  Sense strand starting at position 1747 SEQ ID NO: 3045
uguccauguguuugaagag

SEQ ID NO: 236487 - RNA, 19 nt, Artificial Sequence
  Description of Artificial Sequence: Synthetic oligonucleotide
  Antisense strand to SEQ ID NO: 236486
cucuucaaacacauggaca

SEQ ID NO: 236488 - RNA, 19 nt, Artificial Sequence
  Description of Artificial Sequence: Synthetic oligonucleotide
  Sense strand starting at position 2074 SEQ ID NO: 3045
ucagaauaucugcaugcuu

SEQ ID NO: 236489 - RNA, 19 nt, Artificial Sequence
  Description of Artificial Sequence: Synthetic oligonucleotide
  Antisense strand to SEQ ID NO: 236488
aagcaugcagauauucuga

SEQ ID NO: 236490 - RNA, 19 nt, Artificial Sequence
  Description of Artificial Sequence: Synthetic oligonucleotide
  Sense strand starting at position 2076 SEQ ID NO: 3045
agaauaucugcaugcuuag

SEQ ID NO: 236491 - RNA, 19 nt, Artificial Sequence
  Description of Artificial Sequence: Synthetic oligonucleotide
  Antisense strand to SEQ ID NO: 236490
cuaagcaugcagauauucu

SEQ ID NO: 236492 - RNA, 19 nt, Artificial Sequence
  Description of Artificial Sequence: Synthetic oligonucleotide
  Sense strand starting at position 2221 SEQ ID NO: 3045
gcuaacauugcucagauuc

SEQ ID NO: 236493 - RNA, 19 nt, Artificial Sequence
  Description of Artificial Sequence: Synthetic oligonucleotide
  Antisense strand to SEQ ID NO: 236492
gaaucugagcaauguuagc

SEQ ID NO: 236494 - RNA, 19 nt, Artificial Sequence
  Description of Artificial Sequence: Synthetic oligonucleotide
  Sense strand starting at position 2317 SEQ ID NO: 3045
cuccuauaggaauguagga

SEQ ID NO: 236495 - RNA, 19 nt, Artificial Sequence
  Description of Artificial Sequence: Synthetic oligonucleotide
  Antisense strand to SEQ ID NO: 236494
uccuacauuccuauaggag

SEQ ID NO: 236496 - RNA, 19 nt, Artificial Sequence
  Description of Artificial Sequence: Synthetic oligonucleotide
  Sense strand starting at position 2495 SEQ ID NO: 3045
ucugacaucuacuuaguua

SEQ ID NO: 236497 - RNA, 19 nt, Artificial Sequence
  Description of Artificial Sequence: Synthetic oligonucleotide
  Antisense strand to SEQ ID NO: 236496
uaacuaaguagaugucaga

SEQ ID NO: 236498 - RNA, 19 nt, Artificial Sequence
  Description of Artificial Sequence: Synthetic oligonucleotide
  Sense strand starting at position 2608 SEQ ID NO: 3045
ggucaccaguuucuuauau

SEQ ID NO: 236499 - RNA, 19 nt, Artificial Sequence
  Description of Artificial Sequence: Synthetic oligonucleotide
  Antisense strand to SEQ ID NO: 236498
auauaagaaacuggugacc

SEQ ID NO: 236500 - RNA, 19 nt, Artificial Sequence
  Description of Artificial Sequence: Synthetic oligonucleotide
  Sense strand starting at position 2661 SEQ ID NO: 3045
cuuucugaagugcauagau

SEQ ID NO: 236501 - RNA, 19 nt, Artificial Sequence
  Description of Artificial Sequence: Synthetic oligonucleotide
  Antisense strand to SEQ ID NO: 236500
aucuaugcacuucagaaag

SEQ ID NO: 236502 - RNA, 19 nt, Artificial Sequence
  Description of Artificial Sequence: Synthetic oligonucleotide
  Sense strand starting at position 2688 SEQ ID NO: 3045
cucuaucacgcuuggaaau

SEQ ID NO: 236503 - RNA, 19 nt, Artificial Sequence
  Description of Artificial Sequence: Synthetic oligonucleotide
  Antisense strand to SEQ ID NO: 236502
auuuccaagcgugauagag

SEQ ID NO: 236504 - RNA, 19 nt, Artificial Sequence
  Description of Artificial Sequence: Synthetic oligonucleotide
  Sense strand starting at position 2689 SEQ ID NO: 3045
ucuaucacgcuuggaaauu

SEQ ID NO: 236505 - RNA, 19 nt, Artificial Sequence
  Description of Artificial Sequence: Synthetic oligonucleotide
  Antisense strand to SEQ ID NO: 236504
aauuuccaagcgugauaga

SEQ ID NO: 236506 - RNA, 19 nt, Artificial Sequence
  Description of Artificial Sequence: Synthetic oligonucleotide
  Sense strand starting at position 2698 SEQ ID NO: 3045
cuuggaaauuucgcuggca

SEQ ID NO: 236507 - RNA, 19 nt, Artificial Sequence
  Description of Artificial Sequence: Synthetic oligonucleotide
  Antisense strand to SEQ ID NO: 236506
ugccagcgaaauuuccaag

SEQ ID NO: 236508 - RNA, 19 nt, Artificial Sequence
  Description of Artificial Sequence: Synthetic oligonucleotide
  Sense strand starting at position 2852 SEQ ID NO: 3045
agucaagauguguaugucu

SEQ ID NO: 236509 - RNA, 19 nt, Artificial Sequence
  Description of Artificial Sequence: Synthetic oligonucleotide
  Antisense strand to SEQ ID NO: 236508
agacauacacaucuugacu

SEQ ID NO: 236510 - RNA, 19 nt, Artificial Sequence
  Description of Artificial Sequence: Synthetic oligonucleotide
  Sense strand starting at position 3002 SEQ ID NO: 3045
gauagaacuuuccuagugu

SEQ ID NO: 236511 - RNA, 19 nt, Artificial Sequence
  Description of Artificial Sequence: Synthetic oligonucleotide
  Antisense strand to SEQ ID NO: 236510
acacuaggaaaguucuauc

SEQ ID NO: 236512 - RNA, 19 nt, Artificial Sequence
  Description of Artificial Sequence: Synthetic oligonucleotide
  Sense strand starting at position 3497 SEQ ID NO: 3045
agguaauaagccuggagua

SEQ ID NO: 236513 - RNA, 19 nt, Artificial Sequence
  Description of Artificial Sequence: Synthetic oligonucleotide
  Antisense strand to SEQ ID NO: 236512
uacuccaggcuuauuaccu

SEQ ID NO: 236514 - RNA, 19 nt, Artificial Sequence
  Description of Artificial Sequence: Synthetic oligonucleotide
  Sense strand starting at position 3498 SEQ ID NO: 3045
gguaauaagccuggaguaa

SEQ ID NO: 236515 - RNA, 19 nt, Artificial Sequence
  Description of Artificial Sequence: Synthetic oligonucleotide
  Antisense strand to SEQ ID NO: 236514
uuacuccaggcuuauuacc

SEQ ID NO: 236516 - RNA, 19 nt, Artificial Sequence
  Description of Artificial Sequence: Synthetic oligonucleotide
  Sense strand starting at position 3499 SEQ ID NO: 3045
guaauaagccuggaguaag

SEQ ID NO: 236517 - RNA, 19 nt, Artificial Sequence
  Description of Artificial Sequence: Synthetic oligonucleotide
  Antisense strand to SEQ ID NO: 236516
cuuacuccaggcuuauuac

SEQ ID NO: 236518 - RNA, 19 nt, Artificial Sequence
  Description of Artificial Sequence: Synthetic oligonucleotide
  Sense strand starting at position 3519 SEQ ID NO: 3045
ggcagacaugugugaagag

SEQ ID NO: 236519 - RNA, 19 nt, Artificial Sequence
  Description of Artificial Sequence: Synthetic oligonucleotide
  Antisense strand to SEQ ID NO: 236518
cucuucacacaugucugcc

SEQ ID NO: 236520 - RNA, 19 nt, Artificial Sequence
  Description of Artificial Sequence: Synthetic oligonucleotide
  Sense strand starting at position 3622 SEQ ID NO: 3045
guagucaucuugguacaca

SEQ ID NO: 236521 - RNA, 19 nt, Artificial Sequence
  Description of Artificial Sequence: Synthetic oligonucleotide
  Antisense strand to SEQ ID NO: 236520
uguguaccaagaugacuac

SEQ ID NO: 236522 - RNA, 19 nt, Artificial Sequence
  Description of Artificial Sequence: Synthetic oligonucleotide
  Sense strand starting at position 3710 SEQ ID NO: 3045
gugaaaugcuggucuggaa

SEQ ID NO: 236523 - RNA, 19 nt, Artificial Sequence
  Description of Artificial Sequence: Synthetic oligonucleotide
  Antisense strand to SEQ ID NO: 236522
uuccagaccagcauuucac

SEQ ID NO: 236524 - RNA, 19 nt, Artificial Sequence
  Description of Artificial Sequence: Synthetic oligonucleotide
  Sense strand starting at position 3722 SEQ ID NO: 3045
ucuggaagauguuccauga

SEQ ID NO: 236525 - RNA, 19 nt, Artificial Sequence
  Description of Artificial Sequence: Synthetic oligonucleotide
  Antisense strand to SEQ ID NO: 236524
ucauggaacaucuuccaga

SEQ ID NO: 236526 - RNA, 19 nt, Artificial Sequence
  Description of Artificial Sequence: Synthetic oligonucleotide
  Sense strand starting at position 3871 SEQ ID NO: 3045
gaguuccggguccaauaau

SEQ ID NO: 236527 - RNA, 19 nt, Artificial Sequence
  Description of Artificial Sequence: Synthetic oligonucleotide
  Antisense strand to SEQ ID NO: 236526
auuauuggacccggaacuc

SEQ ID NO: 236528 - RNA, 19 nt, Artificial Sequence
  Description of Artificial Sequence: Synthetic oligonucleotide
  Sense strand starting at position 3893 SEQ ID NO: 3045
cccuuuagagacugacaau

SEQ ID NO: 236529 - RNA, 19 nt, Artificial Sequence
  Description of Artificial Sequence: Synthetic oligonucleotide
  Antisense strand to SEQ ID NO: 236528
auugucagucucuaaaggg

SEQ ID NO: 236530 - RNA, 19 nt, Artificial Sequence
  Description of Artificial Sequence: Synthetic oligonucleotide
  Sense strand starting at position 3977 SEQ ID NO: 3045
uucucaucuuaguugacua

SEQ ID NO: 236531 - RNA, 19 nt, Artificial Sequence
  Description of Artificial Sequence: Synthetic oligonucleotide
  Antisense strand to SEQ ID NO: 236530
uagucaacuaagaugagaa

SEQ ID NO: 236532 - RNA, 19 nt, Artificial Sequence
  Description of Artificial Sequence: Synthetic oligonucleotide
  Sense strand starting at position 114 SEQ ID NO: 3046
auggaaauacucugguaug

SEQ ID NO: 236533 - RNA, 19 nt, Artificial Sequence
  Description of Artificial Sequence: Synthetic oligonucleotide
  Antisense strand to SEQ ID NO: 236532
cauaccagaguauuuccau

SEQ ID NO: 236534 - RNA, 19 nt, Artificial Sequence
  Description of Artificial Sequence: Synthetic oligonucleotide
  Sense strand starting at position 135 SEQ ID NO: 3046
ucacacuagcuuuggauaa

SEQ ID NO: 236535 - RNA, 19 nt, Artificial Sequence
  Description of Artificial Sequence: Synthetic oligonucleotide
  Antisense strand to SEQ ID NO: 236534
uuauccaaagcuaguguga

SEQ ID NO: 236536 - RNA, 19 nt, Artificial Sequence
  Description of Artificial Sequence: Synthetic oligonucleotide
  Sense strand starting at position 139 SEQ ID NO: 3046
acuagcuuuggauaacagu

SEQ ID NO: 236537 - RNA, 19 nt, Artificial Sequence
  Description of Artificial Sequence: Synthetic oligonucleotide
  Antisense strand to SEQ ID NO: 236536
acuguuauccaaagcuagu

SEQ ID NO: 236538 - RNA, 19 nt, Artificial Sequence
  Description of Artificial Sequence: Synthetic oligonucleotide
  Sense strand starting at position 145 SEQ ID NO: 3046
uuuggauaacaguggucaa

SEQ ID NO: 236539 - RNA, 19 nt, Artificial Sequence
  Description of Artificial Sequence: Synthetic oligonucleotide
  Antisense strand to SEQ ID NO: 236538
uugaccacuguuauccaaa

SEQ ID NO: 236540 - RNA, 19 nt, Artificial Sequence
  Description of Artificial Sequence: Synthetic oligonucleotide
  Sense strand starting at position 146 SEQ ID NO: 3046
uuggauaacaguggucaaa

SEQ ID NO: 236541 - RNA, 19 nt, Artificial Sequence
  Description of Artificial Sequence: Synthetic oligonucleotide
  Antisense strand to SEQ ID NO: 236540
uuugaccacuguuauccaa

SEQ ID NO: 236542 - RNA, 19 nt, Artificial Sequence
  Description of Artificial Sequence: Synthetic oligonucleotide
  Sense strand starting at position 148 SEQ ID NO: 3046
ggauaacaguggucaaauu

SEQ ID NO: 236543 - RNA, 19 nt, Artificial Sequence
  Description of Artificial Sequence: Synthetic oligonucleotide
  Antisense strand to SEQ ID NO: 236542
aauuugaccacuguuaucc

SEQ ID NO: 236544 - RNA, 19 nt, Artificial Sequence
  Description of Artificial Sequence: Synthetic oligonucleotide
  Sense strand starting at position 302 SEQ ID NO: 3046
aauagaaugcuugggagca

SEQ ID NO: 236545 - RNA, 19 nt, Artificial Sequence
  Description of Artificial Sequence: Synthetic oligonucleotide
  Antisense strand to SEQ ID NO: 236544
ugcucccaagcauucuauu

SEQ ID NO: 236546 - RNA, 19 nt, Artificial Sequence
  Description of Artificial Sequence: Synthetic oligonucleotide
  Sense strand starting at position 307 SEQ ID NO: 3046
aaugcuugggagcacaauu

SEQ ID NO: 236547 - RNA, 19 nt, Artificial Sequence
  Description of Artificial Sequence: Synthetic oligonucleotide
  Antisense strand to SEQ ID NO: 236546
aauugugcucccaagcauu

SEQ ID NO: 236548 - RNA, 19 nt, Artificial Sequence
  Description of Artificial Sequence: Synthetic oligonucleotide
  Sense strand starting at position 499 SEQ ID NO: 3046
uucugaacaucagugaacu

SEQ ID NO: 236549 - RNA, 19 nt, Artificial Sequence
  Description of Artificial Sequence: Synthetic oligonucleotide
  Antisense strand to SEQ ID NO: 236548
aguucacugauguucagaa

SEQ ID NO: 236550 - RNA, 19 nt, Artificial Sequence
  Description of Artificial Sequence: Synthetic oligonucleotide
  Sense strand starting at position 612 SEQ ID NO: 3046
aagaacugucagugggacu

SEQ ID NO: 236551 - RNA, 19 nt, Artificial Sequence
  Description of Artificial Sequence: Synthetic oligonucleotide
  Antisense strand to SEQ ID NO: 236550
agucccacugacaguucuu

SEQ ID NO: 236552 - RNA, 19 nt, Artificial Sequence
  Description of Artificial Sequence: Synthetic oligonucleotide
  Sense strand starting at position 613 SEQ ID NO: 3046
agaacugucagugggacuu

SEQ ID NO: 236553 - RNA, 19 nt, Artificial Sequence
  Description of Artificial Sequence: Synthetic oligonucleotide
  Antisense strand to SEQ ID NO: 236552
aagucccacugacaguucu

SEQ ID NO: 236554 - RNA, 19 nt, Artificial Sequence
  Description of Artificial Sequence: Synthetic oligonucleotide
  Sense strand starting at position 730 SEQ ID NO: 3046
agggauacaucuucucuua

SEQ ID NO: 236555 - RNA, 19 nt, Artificial Sequence
  Description of Artificial Sequence: Synthetic oligonucleotide
  Antisense strand to SEQ ID NO: 236554
uaagagaagauguaucccu

SEQ ID NO: 236556 - RNA, 19 nt, Artificial Sequence
  Description of Artificial Sequence: Synthetic oligonucleotide
  Sense strand starting at position 772 SEQ ID NO: 3046
augauacucccguauauuc

SEQ ID NO: 236557 - RNA, 19 nt, Artificial Sequence
  Description of Artificial Sequence: Synthetic oligonucleotide
  Antisense strand to SEQ ID NO: 236556
gaauauacgggaguaucau

SEQ ID NO: 236558 - RNA, 19 nt, Artificial Sequence
  Description of Artificial Sequence: Synthetic oligonucleotide
  Sense strand starting at position 789 SEQ ID NO: 3046
ucuaguuaaugagucuaaa

SEQ ID NO: 236559 - RNA, 19 nt, Artificial Sequence
  Description of Artificial Sequence: Synthetic oligonucleotide
  Antisense strand to SEQ ID NO: 236558
uuuagacucauuaacuaga

SEQ ID NO: 236560 - RNA, 19 nt, Artificial Sequence
  Description of Artificial Sequence: Synthetic oligonucleotide
  Sense strand starting at position 821 SEQ ID NO: 3046
caaguagucgaaggacuaa

SEQ ID NO: 236561 - RNA, 19 nt, Artificial Sequence
  Description of Artificial Sequence: Synthetic oligonucleotide
  Antisense strand to SEQ ID NO: 236560
uuaguccuucgacuacuug

SEQ ID NO: 236562 - RNA, 19 nt, Artificial Sequence
  Description of Artificial Sequence: Synthetic oligonucleotide
  Sense strand starting at position 843 SEQ ID NO: 3046
acuuuaaugguaugauuag

SEQ ID NO: 236563 - RNA, 19 nt, Artificial Sequence
  Description of Artificial Sequence: Synthetic oligonucleotide
  Antisense strand to SEQ ID NO: 236562
cuaaucauaccauuaaagu

SEQ ID NO: 236564 - RNA, 19 nt, Artificial Sequence
  Description of Artificial Sequence: Synthetic oligonucleotide
  Sense strand starting at position 994 SEQ ID NO: 3046
gagggagcucuuuaagcug

SEQ ID NO: 236565 - RNA, 19 nt, Artificial Sequence
  Description of Artificial Sequence: Synthetic oligonucleotide
  Antisense strand to SEQ ID NO: 236564
cagcuuaaagagcucccuc

SEQ ID NO: 236566 - RNA, 19 nt, Artificial Sequence
  Description of Artificial Sequence: Synthetic oligonucleotide
  Sense strand starting at position 1009 SEQ ID NO: 3046
gcugauagucuuuaacacu

SEQ ID NO: 236567 - RNA, 19 nt, Artificial Sequence
  Description of Artificial Sequence: Synthetic oligonucleotide
  Antisense strand to SEQ ID NO: 236566
aguguuaaagacuaucagc

SEQ ID NO: 236568 - RNA, 19 nt, Artificial Sequence
  Description of Artificial Sequence: Synthetic oligonucleotide
  Sense strand starting at position 1062 SEQ ID NO: 3046
uuagcagcugaaugagaau

SEQ ID NO: 236569 - RNA, 19 nt, Artificial Sequence
  Description of Artificial Sequence: Synthetic oligonucleotide
  Antisense strand to SEQ ID NO: 236568
auucucauucagcugcuaa

SEQ ID NO: 236570 - RNA, 19 nt, Artificial Sequence
  Description of Artificial Sequence: Synthetic oligonucleotide
  Sense strand starting at position 1105 SEQ ID NO: 3046
auuccauucuaggucagaa

SEQ ID NO: 236571 - RNA, 19 nt, Artificial Sequence
  Description of Artificial Sequence: Synthetic oligonucleotide
  Antisense strand to SEQ ID NO: 236570
uucugaccuagaauggaau

SEQ ID NO: 236572 - RNA, 19 nt, Artificial Sequence
  Description of Artificial Sequence: Synthetic oligonucleotide
  Sense strand starting at position 1185 SEQ ID NO: 3046
ggguggaguggccauagaa

SEQ ID NO: 236573 - RNA, 19 nt, Artificial Sequence
  Description of Artificial Sequence: Synthetic oligonucleotide
  Antisense strand to SEQ ID NO: 236572
uucuauggccacuccaccc

SEQ ID NO: 236574 - RNA, 19 nt, Artificial Sequence
  Description of Artificial Sequence: Synthetic oligonucleotide
  Sense strand starting at position 1224 SEQ ID NO: 3046
agaauuuagucauaaugag

SEQ ID NO: 236575 - RNA, 19 nt, Artificial Sequence
  Description of Artificial Sequence: Synthetic oligonucleotide
  Antisense strand to SEQ ID NO: 236574
cucauuaugacuaaauucu

SEQ ID NO: 236576 - RNA, 19 nt, Artificial Sequence
  Description of Artificial Sequence: Synthetic oligonucleotide
  Sense strand starting at position 1417 SEQ ID NO: 3046
gguuguugcaaugaauaga

SEQ ID NO: 236577 - RNA, 19 nt, Artificial Sequence
  Description of Artificial Sequence: Synthetic oligonucleotide
  Antisense strand to SEQ ID NO: 236576
ucuauucauugcaacaacc

SEQ ID NO: 236578 - RNA, 19 nt, Artificial Sequence
  Description of Artificial Sequence: Synthetic oligonucleotide
  Sense strand starting at position 1573 SEQ ID NO: 3046
gcccaaauucccuaugaag

SEQ ID NO: 236579 - RNA, 19 nt, Artificial Sequence
  Description of Artificial Sequence: Synthetic oligonucleotide
  Antisense strand to SEQ ID NO: 236578
cuucauagggaauuugggc

SEQ ID NO: 236580 - RNA, 19 nt, Artificial Sequence
  Description of Artificial Sequence: Synthetic oligonucleotide
  Sense strand starting at position 1777 SEQ ID NO: 3046
acaguaucugucuaagacu

SEQ ID NO: 236581 - RNA, 19 nt, Artificial Sequence
  Description of Artificial Sequence: Synthetic oligonucleotide
  Antisense strand to SEQ ID NO: 236580
agucuuagacagauacugu

SEQ ID NO: 236582 - RNA, 19 nt, Artificial Sequence
  Description of Artificial Sequence: Synthetic oligonucleotide
  Sense strand starting at position 1950 SEQ ID NO: 3046
uuuauaugggcuugaagau

SEQ ID NO: 236583 - RNA, 19 nt, Artificial Sequence
  Description of Artificial Sequence: Synthetic oligonucleotide
  Antisense strand to SEQ ID NO: 236582
aucuucaagcccauauaaa

SEQ ID NO: 236584 - RNA, 19 nt, Artificial Sequence
  Description of Artificial Sequence: Synthetic oligonucleotide
  Sense strand starting at position 2070 SEQ ID NO: 3046
accugauaucaaugaaguu

SEQ ID NO: 236585 - RNA, 19 nt, Artificial Sequence
  Description of Artificial Sequence: Synthetic oligonucleotide
  Antisense strand to SEQ ID NO: 236584
aacuucauugauaucaggu

SEQ ID NO: 236586 - RNA, 19 nt, Artificial Sequence
  Description of Artificial Sequence: Synthetic oligonucleotide
  Sense strand starting at position 2116 SEQ ID NO: 3046
uuggucacucuguaaauau

SEQ ID NO: 236587 - RNA, 19 nt, Artificial Sequence
  Description of Artificial Sequence: Synthetic oligonucleotide
  Antisense strand to SEQ ID NO: 236586
auauuuacagagugaccaa

SEQ ID NO: 236588 - RNA, 19 nt, Artificial Sequence
  Description of Artificial Sequence: Synthetic oligonucleotide
  Sense strand starting at position 2261 SEQ ID NO: 3046
aaggaagagugcuuccuua

SEQ ID NO: 236589 - RNA, 19 nt, Artificial Sequence
  Description of Artificial Sequence: Synthetic oligonucleotide
  Antisense strand to SEQ ID NO: 236588
uaaggaagcacucuuccuu

SEQ ID NO: 236590 - RNA, 19 nt, Artificial Sequence
  Description of Artificial Sequence: Synthetic oligonucleotide
  Sense strand starting at position 2437 SEQ ID NO: 3046
uagauuuggugucaauuuc

SEQ ID NO: 236591 - RNA, 19 nt, Artificial Sequence
  Description of Artificial Sequence: Synthetic oligonucleotide
  Antisense strand to SEQ ID NO: 236590
gaaauugacaccaaaucua

SEQ ID NO: 236592 - RNA, 19 nt, Artificial Sequence
  Description of Artificial Sequence: Synthetic oligonucleotide
  Sense strand starting at position 2558 SEQ ID NO: 3046
guuagagaccucuaguuau

SEQ ID NO: 236593 - RNA, 19 nt, Artificial Sequence
  Description of Artificial Sequence: Synthetic oligonucleotide
  Antisense strand to SEQ ID NO: 236592
auaacuagaggucucuaac

SEQ ID NO: 236594 - RNA, 19 nt, Artificial Sequence
  Description of Artificial Sequence: Synthetic oligonucleotide
  Sense strand starting at position 2561 SEQ ID NO: 3046
agagaccucuaguuaucuu

SEQ ID NO: 236595 - RNA, 19 nt, Artificial Sequence
  Description of Artificial Sequence: Synthetic oligonucleotide
  Antisense strand to SEQ ID NO: 236594
aagauaacuagaggucucu

SEQ ID NO: 236596 - RNA, 19 nt, Artificial Sequence
  Description of Artificial Sequence: Synthetic oligonucleotide
  Sense strand starting at position 2574 SEQ ID NO: 3046
uaucuugcagaguauuaag

SEQ ID NO: 236597 - RNA, 19 nt, Artificial Sequence
  Description of Artificial Sequence: Synthetic oligonucleotide
  Antisense strand to SEQ ID NO: 236596
cuuaauacucugcaagaua

SEQ ID NO: 236598 - RNA, 19 nt, Artificial Sequence
  Description of Artificial Sequence: Synthetic oligonucleotide
  Sense strand starting at position 2688 SEQ ID NO: 3046
agugucaggguauaaucau

SEQ ID NO: 236599 - RNA, 19 nt, Artificial Sequence
  Description of Artificial Sequence: Synthetic oligonucleotide
  Antisense strand to SEQ ID NO: 236598
augauuauacccugacacu

SEQ ID NO: 236600 - RNA, 19 nt, Artificial Sequence
  Description of Artificial Sequence: Synthetic oligonucleotide
  Sense strand starting at position 3171 SEQ ID NO: 3046
uguucuauagcugaaacaa

SEQ ID NO: 236601 - RNA, 19 nt, Artificial Sequence
  Description of Artificial Sequence: Synthetic oligonucleotide
  Antisense strand to SEQ ID NO: 236600
uuguuucagcuauagaaca

SEQ ID NO: 236602 - RNA, 19 nt, Artificial Sequence
  Description of Artificial Sequence: Synthetic oligonucleotide
  Sense strand starting at position 3512 SEQ ID NO: 3046
gguucuauagucuaauaau

SEQ ID NO: 236603 - RNA, 19 nt, Artificial Sequence
  Description of Artificial Sequence: Synthetic oligonucleotide
  Antisense strand to SEQ ID NO: 236602
auuauuagacuauagaacc

SEQ ID NO: 236604 - RNA, 19 nt, Artificial Sequence
  Description of Artificial Sequence: Synthetic oligonucleotide
  Sense strand starting at position 3532 SEQ ID NO: 3046
auuguugcuaguguuugua

SEQ ID NO: 236605 - RNA, 19 nt, Artificial Sequence
  Description of Artificial Sequence: Synthetic oligonucleotide
  Antisense strand to SEQ ID NO: 236604
uacaaacacuagcaacaau

SEQ ID NO: 236606 - RNA, 19 nt, Artificial Sequence
  Description of Artificial Sequence: Synthetic oligonucleotide
  Sense strand starting at position 3575 SEQ ID NO: 3046
uuccaaacacuucggauau

SEQ ID NO: 236607 - RNA, 19 nt, Artificial Sequence
  Description of Artificial Sequence: Synthetic oligonucleotide
  Antisense strand to SEQ ID NO: 236606
auauccgaaguguuuggaa

SEQ ID NO: 236608 - RNA, 19 nt, Artificial Sequence
  Description of Artificial Sequence: Synthetic oligonucleotide
  Sense strand starting at position 3682 SEQ ID NO: 3046
uuaaguaacucuuugagau

SEQ ID NO: 236609 - RNA, 19 nt, Artificial Sequence
  Description of Artificial Sequence: Synthetic oligonucleotide
  Antisense strand to SEQ ID NO: 236608
aucucaaagaguuacuuaa

SEQ ID NO: 236610 - RNA, 19 nt, Artificial Sequence
  Description of Artificial Sequence: Synthetic oligonucleotide
  Sense strand starting at position 3918 SEQ ID NO: 3046
gugcuuguaaacguuguua

SEQ ID NO: 236611 - RNA, 19 nt, Artificial Sequence
  Description of Artificial Sequence: Synthetic oligonucleotide
  Antisense strand to SEQ ID NO: 236610
uaacaacguuuacaagcac

SEQ ID NO: 236612 - RNA, 19 nt, Artificial Sequence
  Description of Artificial Sequence: Synthetic oligonucleotide
  Sense strand starting at position 25 SEQ ID NO: 3048
caauaaugucgaggaggug

SEQ ID NO: 236613 - RNA, 19 nt, Artificial Sequence
  Description of Artificial Sequence: Synthetic oligonucleotide
  Antisense strand to SEQ ID NO: 236612
caccuccucgacauuauug

SEQ ID NO: 236614 - RNA, 19 nt, Artificial Sequence
  Description of Artificial Sequence: Synthetic oligonucleotide
  Sense strand starting at position 50 SEQ ID NO: 3048
gccaauuguguaggaccua

SEQ ID NO: 236615 - RNA, 19 nt, Artificial Sequence
  Description of Artificial Sequence: Synthetic oligonucleotide
  Antisense strand to SEQ ID NO: 236614
uagguccuacacaauuggc

SEQ ID NO: 236616 - RNA, 19 nt, Artificial Sequence
  Description of Artificial Sequence: Synthetic oligonucleotide
  Sense strand starting at position 139 SEQ ID NO: 3048
augacaagaucugagaugu

SEQ ID NO: 236617 - RNA, 19 nt, Artificial Sequence
  Description of Artificial Sequence: Synthetic oligonucleotide
  Antisense strand to SEQ ID NO: 236616
acaucucagaucuugucau

SEQ ID NO: 236618 - RNA, 19 nt, Artificial Sequence
  Description of Artificial Sequence: Synthetic oligonucleotide
  Sense strand starting at position 150 SEQ ID NO: 3048
ugagauguaucuuuaaacu

SEQ ID NO: 236619 - RNA, 19 nt, Artificial Sequence
  Description of Artificial Sequence: Synthetic oligonucleotide
  Antisense strand to SEQ ID NO: 236618
aguuuaaagauacaucuca

SEQ ID NO: 236620 - RNA, 19 nt, Artificial Sequence
  Description of Artificial Sequence: Synthetic oligonucleotide
  Sense strand starting at position 193 SEQ ID NO: 3048
cuacucuacugagaacaga

SEQ ID NO: 236621 - RNA, 19 nt, Artificial Sequence
  Description of Artificial Sequence: Synthetic oligonucleotide
  Antisense strand to SEQ ID NO: 236620
ucuguucucaguagaguag

SEQ ID NO: 236622 - RNA, 19 nt, Artificial Sequence
  Description of Artificial Sequence: Synthetic oligonucleotide
  Sense strand starting at position 698 SEQ ID NO: 3048
agcuuuacggcacaaggau

SEQ ID NO: 236623 - RNA, 19 nt, Artificial Sequence
  Description of Artificial Sequence: Synthetic oligonucleotide
  Antisense strand to SEQ ID NO: 236622
auccuugugccguaaagcu

SEQ ID NO: 236624 - RNA, 19 nt, Artificial Sequence
  Description of Artificial Sequence: Synthetic oligonucleotide
  Sense strand starting at position 847 SEQ ID NO: 3048
acuugcuucuguguuaaau

SEQ ID NO: 236625 - RNA, 19 nt, Artificial Sequence
  Description of Artificial Sequence: Synthetic oligonucleotide
  Antisense strand to SEQ ID NO: 236624
auuuaacacagaagcaagu

SEQ ID NO: 236626 - RNA, 19 nt, Artificial Sequence
  Description of Artificial Sequence: Synthetic oligonucleotide
  Sense strand starting at position 856 SEQ ID NO: 3048
uguguuaaauccuuugucu

SEQ ID NO: 236627 - RNA, 19 nt, Artificial Sequence
  Description of Artificial Sequence: Synthetic oligonucleotide
  Antisense strand to SEQ ID NO: 236626
agacaaaggauuuaacaca

SEQ ID NO: 236628 - RNA, 19 nt, Artificial Sequence
  Description of Artificial Sequence: Synthetic oligonucleotide
  Sense strand starting at position 858 SEQ ID NO: 3048
uguuaaauccuuugucuca

SEQ ID NO: 236629 - RNA, 19 nt, Artificial Sequence
  Description of Artificial Sequence: Synthetic oligonucleotide
  Antisense strand to SEQ ID NO: 236628
ugagacaaaggauuuaaca

SEQ ID NO: 236630 - RNA, 19 nt, Artificial Sequence
  Description of Artificial Sequence: Synthetic oligonucleotide
  Sense strand starting at position 859 SEQ ID NO: 3048
guuaaauccuuugucucaa

SEQ ID NO: 236631 - RNA, 19 nt, Artificial Sequence
  Description of Artificial Sequence: Synthetic oligonucleotide
  Antisense strand to SEQ ID NO: 236630
uugagacaaaggauuuaac

SEQ ID NO: 236632 - RNA, 19 nt, Artificial Sequence
  Description of Artificial Sequence: Synthetic oligonucleotide
  Sense strand starting at position 1038 SEQ ID NO: 3048
gaauauagugcuggagaug

SEQ ID NO: 236633 - RNA, 19 nt, Artificial Sequence
  Description of Artificial Sequence: Synthetic oligonucleotide
  Antisense strand to SEQ ID NO: 236632
caucuccagcacuauauuc

SEQ ID NO: 236634 - RNA, 19 nt, Artificial Sequence
  Description of Artificial Sequence: Synthetic oligonucleotide
  Sense strand starting at position 1070 SEQ ID NO: 3048
ggcagaugggaguagucua

SEQ ID NO: 236635 - RNA, 19 nt, Artificial Sequence
  Description of Artificial Sequence: Synthetic oligonucleotide
  Antisense strand to SEQ ID NO: 236634
uagacuacucccaucugcc

SEQ ID NO: 236636 - RNA, 19 nt, Artificial Sequence
  Description of Artificial Sequence: Synthetic oligonucleotide
  Sense strand starting at position 1077 SEQ ID NO: 3048
gggaguagucuaggaacug

SEQ ID NO: 236637 - RNA, 19 nt, Artificial Sequence
  Description of Artificial Sequence: Synthetic oligonucleotide
  Antisense strand to SEQ ID NO: 236636
caguuccuagacuacuccc

SEQ ID NO: 236638 - RNA, 19 nt, Artificial Sequence
  Description of Artificial Sequence: Synthetic oligonucleotide
  Sense strand starting at position 1099 SEQ ID NO: 3048
aaggauaacugguucuauc

SEQ ID NO: 236639 - RNA, 19 nt, Artificial Sequence
  Description of Artificial Sequence: Synthetic oligonucleotide
  Antisense strand to SEQ ID NO: 236638
gauagaaccaguuauccuu

SEQ ID NO: 236640 - RNA, 19 nt, Artificial Sequence
  Description of Artificial Sequence: Synthetic oligonucleotide
  Sense strand starting at position 1156 SEQ ID NO: 3048
auguaagguccuggucuca

SEQ ID NO: 236641 - RNA, 19 nt, Artificial Sequence
  Description of Artificial Sequence: Synthetic oligonucleotide
  Antisense strand to SEQ ID NO: 236640
ugagaccaggaccuuacau

SEQ ID NO: 236642 - RNA, 19 nt, Artificial Sequence
  Description of Artificial Sequence: Synthetic oligonucleotide
  Sense strand starting at position 1190 SEQ ID NO: 3048
ucgcuagagcugccucauu

SEQ ID NO: 236643 - RNA, 19 nt, Artificial Sequence
  Description of Artificial Sequence: Synthetic oligonucleotide
  Antisense strand to SEQ ID NO: 236642
aaugaggcagcucuagcga

SEQ ID NO: 236644 - RNA, 19 nt, Artificial Sequence
  Description of Artificial Sequence: Synthetic oligonucleotide
  Sense strand starting at position 1280 SEQ ID NO: 3048
gcacauaacugagaaagga

SEQ ID NO: 236645 - RNA, 19 nt, Artificial Sequence
  Description of Artificial Sequence: Synthetic oligonucleotide
  Antisense strand to SEQ ID NO: 236644
uccuuucucaguuaugugc

SEQ ID NO: 236646 - RNA, 19 nt, Artificial Sequence
  Description of Artificial Sequence: Synthetic oligonucleotide
  Sense strand starting at position 1577 SEQ ID NO: 3048
cgcgguacccgaaaguagu

SEQ ID NO: 236647 - RNA, 19 nt, Artificial Sequence
  Description of Artificial Sequence: Synthetic oligonucleotide
  Antisense strand to SEQ ID NO: 236646
acuacuuucggguaccgcg

SEQ ID NO: 236648 - RNA, 19 nt, Artificial Sequence
  Description of Artificial Sequence: Synthetic oligonucleotide
  Sense strand starting at position 1670 SEQ ID NO: 3048
gaccgagugucugccuaua

SEQ ID NO: 236649 - RNA, 19 nt, Artificial Sequence
  Description of Artificial Sequence: Synthetic oligonucleotide
  Antisense strand to SEQ ID NO: 236648
uauaggcagacacucgguc

SEQ ID NO: 236650 - RNA, 19 nt, Artificial Sequence
  Description of Artificial Sequence: Synthetic oligonucleotide
  Sense strand starting at position 1672 SEQ ID NO: 3048
ccgagugucugccuauaaa

SEQ ID NO: 236651 - RNA, 19 nt, Artificial Sequence
  Description of Artificial Sequence: Synthetic oligonucleotide
  Antisense strand to SEQ ID NO: 236650
uuuauaggcagacacucgg

SEQ ID NO: 236652 - RNA, 19 nt, Artificial Sequence
  Description of Artificial Sequence: Synthetic oligonucleotide
  Sense strand starting at position 1981 SEQ ID NO: 3048
gaccgucacgugucggauu

SEQ ID NO: 236653 - RNA, 19 nt, Artificial Sequence
  Description of Artificial Sequence: Synthetic oligonucleotide
  Antisense strand to SEQ ID NO: 236652
aauccgacacgugacgguc

SEQ ID NO: 236654 - RNA, 19 nt, Artificial Sequence
  Description of Artificial Sequence: Synthetic oligonucleotide
  Sense strand starting at position 1992 SEQ ID NO: 3048
gucggauuccugggaggga

SEQ ID NO: 236655 - RNA, 19 nt, Artificial Sequence
  Description of Artificial Sequence: Synthetic oligonucleotide
  Antisense strand to SEQ ID NO: 236654
ucccucccaggaauccgac

SEQ ID NO: 236656 - RNA, 19 nt, Artificial Sequence
  Description of Artificial Sequence: Synthetic oligonucleotide
  Sense strand starting at position 2041 SEQ ID NO: 3048
ucaaguugccaggcguuua

SEQ ID NO: 236657 - RNA, 19 nt, Artificial Sequence
  Description of Artificial Sequence: Synthetic oligonucleotide
  Antisense strand to SEQ ID NO: 236656
uaaacgccuggcaacuuga

SEQ ID NO: 236658 - RNA, 19 nt, Artificial Sequence
  Description of Artificial Sequence: Synthetic oligonucleotide
  Sense strand starting at position 2094 SEQ ID NO: 3048
uuacucuacuaguuuguaa

SEQ ID NO: 236659 - RNA, 19 nt, Artificial Sequence
  Description of Artificial Sequence: Synthetic oligonucleotide
  Antisense strand to SEQ ID NO: 236658
uuacaaacuaguagaguaa

SEQ ID NO: 236660 - RNA, 19 nt, Artificial Sequence
  Description of Artificial Sequence: Synthetic oligonucleotide
  Sense strand starting at position 2567 SEQ ID NO: 3048
ccuauagaaucagaauuug

SEQ ID NO: 236661 - RNA, 19 nt, Artificial Sequence
  Description of Artificial Sequence: Synthetic oligonucleotide
  Antisense strand to SEQ ID NO: 236660
caaauucugauucuauagg

SEQ ID NO: 236662 - RNA, 19 nt, Artificial Sequence
  Description of Artificial Sequence: Synthetic oligonucleotide
  Sense strand starting at position 2626 SEQ ID NO: 3048
aauugagaagcauggcuuu

SEQ ID NO: 236663 - RNA, 19 nt, Artificial Sequence
  Description of Artificial Sequence: Synthetic oligonucleotide
  Antisense strand to SEQ ID NO: 236662
aaagccaugcuucucaauu

SEQ ID NO: 236664 - RNA, 19 nt, Artificial Sequence
  Description of Artificial Sequence: Synthetic oligonucleotide
  Sense strand starting at position 2629 SEQ ID NO: 3048
ugagaagcauggcuuuacu

SEQ ID NO: 236665 - RNA, 19 nt, Artificial Sequence
  Description of Artificial Sequence: Synthetic oligonucleotide
  Antisense strand to SEQ ID NO: 236664
aguaaagccaugcuucuca

SEQ ID NO: 236666 - RNA, 19 nt, Artificial Sequence
  Description of Artificial Sequence: Synthetic oligonucleotide
  Sense strand starting at position 2632 SEQ ID NO: 3048
gaagcauggcuuuacuuga

SEQ ID NO: 236667 - RNA, 19 nt, Artificial Sequence
  Description of Artificial Sequence: Synthetic oligonucleotide
  Antisense strand to SEQ ID NO: 236666
ucaaguaaagccaugcuuc

SEQ ID NO: 236668 - RNA, 19 nt, Artificial Sequence
  Description of Artificial Sequence: Synthetic oligonucleotide
  Sense strand starting at position 2715 SEQ ID NO: 3048
ggguauauaguagguuaaa

SEQ ID NO: 236669 - RNA, 19 nt, Artificial Sequence
  Description of Artificial Sequence: Synthetic oligonucleotide
  Antisense strand to SEQ ID NO: 236668
uuuaaccuacuauauaccc

SEQ ID NO: 236670 - RNA, 19 nt, Artificial Sequence
  Description of Artificial Sequence: Synthetic oligonucleotide
  Sense strand starting at position 2716 SEQ ID NO: 3048
gguauauaguagguuaaau

SEQ ID NO: 236671 - RNA, 19 nt, Artificial Sequence
  Description of Artificial Sequence: Synthetic oligonucleotide
  Antisense strand to SEQ ID NO: 236670
auuuaaccuacuauauacc

SEQ ID NO: 236672 - RNA, 19 nt, Artificial Sequence
  Description of Artificial Sequence: Synthetic oligonucleotide
  Sense strand starting at position 2724 SEQ ID NO: 3048
guagguuaaaucuggauga

SEQ ID NO: 236673 - RNA, 19 nt, Artificial Sequence
  Description of Artificial Sequence: Synthetic oligonucleotide
  Antisense strand to SEQ ID NO: 236672
ucauccagauuuaaccuac

SEQ ID NO: 236674 - RNA, 19 nt, Artificial Sequence
  Description of Artificial Sequence: Synthetic oligonucleotide
  Sense strand starting at position 2728 SEQ ID NO: 3048
guuaaaucuggaugaauca

SEQ ID NO: 236675 - RNA, 19 nt, Artificial Sequence
  Description of Artificial Sequence: Synthetic oligonucleotide
  Antisense strand to SEQ ID NO: 236674
ugauucauccagauuuaac

SEQ ID NO: 236676 - RNA, 19 nt, Artificial Sequence
  Description of Artificial Sequence: Synthetic oligonucleotide
  Sense strand starting at position 2851 SEQ ID NO: 3048
gaccucuuuccuggagagu

SEQ ID NO: 236677 - RNA, 19 nt, Artificial Sequence
  Description of Artificial Sequence: Synthetic oligonucleotide
  Antisense strand to SEQ ID NO: 236676
acucuccaggaaagagguc

SEQ ID NO: 236678 - RNA, 19 nt, Artificial Sequence
  Description of Artificial Sequence: Synthetic oligonucleotide
  Sense strand starting at position 3002 SEQ ID NO: 3048
cugugaauuuccguuccuu

SEQ ID NO: 236679 - RNA, 19 nt, Artificial Sequence
  Description of Artificial Sequence: Synthetic oligonucleotide
  Antisense strand to SEQ ID NO: 236678
aaggaacggaaauucacag

SEQ ID NO: 236680 - RNA, 19 nt, Artificial Sequence
  Description of Artificial Sequence: Synthetic oligonucleotide
  Sense strand starting at position 3047 SEQ ID NO: 3048
ugugaagaucaggguaaua

SEQ ID NO: 236681 - RNA, 19 nt, Artificial Sequence
  Description of Artificial Sequence: Synthetic oligonucleotide
  Antisense strand to SEQ ID NO: 236680
uauuacccugaucuucaca

SEQ ID NO: 236682 - RNA, 19 nt, Artificial Sequence
  Description of Artificial Sequence: Synthetic oligonucleotide
  Sense strand starting at position 3052 SEQ ID NO: 3048
agaucaggguaauaauaau

SEQ ID NO: 236683 - RNA, 19 nt, Artificial Sequence
  Description of Artificial Sequence: Synthetic oligonucleotide
  Antisense strand to SEQ ID NO: 236682
auuauuauuacccugaucu

SEQ ID NO: 236684 - RNA, 19 nt, Artificial Sequence
  Description of Artificial Sequence: Synthetic oligonucleotide
  Sense strand starting at position 3074 SEQ ID NO: 3048
gguuuauugacacguacug

SEQ ID NO: 236685 - RNA, 19 nt, Artificial Sequence
  Description of Artificial Sequence: Synthetic oligonucleotide
  Antisense strand to SEQ ID NO: 236684
caguacgugucaauaaacc

SEQ ID NO: 236686 - RNA, 19 nt, Artificial Sequence
  Description of Artificial Sequence: Synthetic oligonucleotide
  Sense strand starting at position 3088 SEQ ID NO: 3048
uacugaaggcuauguguca

SEQ ID NO: 236687 - RNA, 19 nt, Artificial Sequence
  Description of Artificial Sequence: Synthetic oligonucleotide
  Antisense strand to SEQ ID NO: 236686
ugacacauagccuucagua

SEQ ID NO: 236688 - RNA, 19 nt, Artificial Sequence
  Description of Artificial Sequence: Synthetic oligonucleotide
  Sense strand starting at position 3112 SEQ ID NO: 3048
uguauuaaacacuguacau

SEQ ID NO: 236689 - RNA, 19 nt, Artificial Sequence
  Description of Artificial Sequence: Synthetic oligonucleotide
  Antisense strand to SEQ ID NO: 236688
auguacaguguuuaauaca

SEQ ID NO: 236690 - RNA, 19 nt, Artificial Sequence
  Description of Artificial Sequence: Synthetic oligonucleotide
  Sense strand starting at position 3429 SEQ ID NO: 3048
gcucuuaaccacugagacu

SEQ ID NO: 236691 - RNA, 19 nt, Artificial Sequence
  Description of Artificial Sequence: Synthetic oligonucleotide
  Antisense strand to SEQ ID NO: 236690
agucucagugguuaagagc

SEQ ID NO: 236692 - RNA, 19 nt, Artificial Sequence
  Description of Artificial Sequence: Synthetic oligonucleotide
  Sense strand starting at position 183 SEQ ID NO: 3047
gaccgucacgugucggauu

SEQ ID NO: 236693 - RNA, 19 nt, Artificial Sequence
  Description of Artificial Sequence: Synthetic oligonucleotide
  Antisense strand to SEQ ID NO: 236692
aauccgacacgugacgguc

SEQ ID NO: 236694 - RNA, 19 nt, Artificial Sequence
  Description of Artificial Sequence: Synthetic oligonucleotide
  Sense strand starting at position 194 SEQ ID NO: 3047
gucggauuccugggaggga

SEQ ID NO: 236695 - RNA, 19 nt, Artificial Sequence
  Description of Artificial Sequence: Synthetic oligonucleotide
  Antisense strand to SEQ ID NO: 236694
ucccucccaggaauccgac

SEQ ID NO: 236696 - RNA, 19 nt, Artificial Sequence
  Description of Artificial Sequence: Synthetic oligonucleotide
  Sense strand starting at position 243 SEQ ID NO: 3047
ucaaguugccaggcguuua

SEQ ID NO: 236697 - RNA, 19 nt, Artificial Sequence
  Description of Artificial Sequence: Synthetic oligonucleotide
  Antisense strand to SEQ ID NO: 236696
uaaacgccuggcaacuuga

SEQ ID NO: 236698 - RNA, 19 nt, Artificial Sequence
  Description of Artificial Sequence: Synthetic oligonucleotide
  Sense strand starting at position 296 SEQ ID NO: 3047
uuacucuacuaguuuguaa

SEQ ID NO: 236699 - RNA, 19 nt, Artificial Sequence
  Description of Artificial Sequence: Synthetic oligonucleotide
  Antisense strand to SEQ ID NO: 236698
uuacaaacuaguagaguaa

SEQ ID NO: 236700 - RNA, 19 nt, Artificial Sequence
  Description of Artificial Sequence: Synthetic oligonucleotide
  Sense strand starting at position 769 SEQ ID NO: 3047
ccuauagaaucagaauuug

SEQ ID NO: 236701 - RNA, 19 nt, Artificial Sequence
  Description of Artificial Sequence: Synthetic oligonucleotide
  Antisense strand to SEQ ID NO: 236700
caaauucugauucuauagg

SEQ ID NO: 236702 - RNA, 19 nt, Artificial Sequence
  Description of Artificial Sequence: Synthetic oligonucleotide
  Sense strand starting at position 828 SEQ ID NO: 3047
aauugagaagcauggcuuu

SEQ ID NO: 236703 - RNA, 19 nt, Artificial Sequence
  Description of Artificial Sequence: Synthetic oligonucleotide
  Antisense strand to SEQ ID NO: 236702
aaagccaugcuucucaauu

SEQ ID NO: 236704 - RNA, 19 nt, Artificial Sequence
  Description of Artificial Sequence: Synthetic oligonucleotide
  Sense strand starting at position 831 SEQ ID NO: 3047
ugagaagcauggcuuuacu

SEQ ID NO: 236705 - RNA, 19 nt, Artificial Sequence
  Description of Artificial Sequence: Synthetic oligonucleotide
  Antisense strand to SEQ ID NO: 236704
aguaaagccaugcuucuca

SEQ ID NO: 236706 - RNA, 19 nt, Artificial Sequence
  Description of Artificial Sequence: Synthetic oligonucleotide
  Sense strand starting at position 834 SEQ ID NO: 3047
gaagcauggcuuuacuuga

SEQ ID NO: 236707 - RNA, 19 nt, Artificial Sequence
  Description of Artificial Sequence: Synthetic oligonucleotide
  Antisense strand to SEQ ID NO: 236706
ucaaguaaagccaugcuuc

SEQ ID NO: 236708 - RNA, 19 nt, Artificial Sequence
  Description of Artificial Sequence: Synthetic oligonucleotide
  Sense strand starting at position 917 SEQ ID NO: 3047
ggguauauaguagguuaaa

SEQ ID NO: 236709 - RNA, 19 nt, Artificial Sequence
  Description of Artificial Sequence: Synthetic oligonucleotide
  Antisense strand to SEQ ID NO: 236708
uuuaaccuacuauauaccc

SEQ ID NO: 236710 - RNA, 19 nt, Artificial Sequence
  Description of Artificial Sequence: Synthetic oligonucleotide
  Sense strand starting at position 918 SEQ ID NO: 3047
gguauauaguagguuaaau

SEQ ID NO: 236711 - RNA, 19 nt, Artificial Sequence
  Description of Artificial Sequence: Synthetic oligonucleotide
  Antisense strand to SEQ ID NO: 236710
auuuaaccuacuauauacc

SEQ ID NO: 236712 - RNA, 19 nt, Artificial Sequence
  Description of Artificial Sequence: Synthetic oligonucleotide
  Sense strand starting at position 926 SEQ ID NO: 3047
guagguuaaaucuggauga

SEQ ID NO: 236713 - RNA, 19 nt, Artificial Sequence
  Description of Artificial Sequence: Synthetic oligonucleotide
  Antisense strand to SEQ ID NO: 236712
ucauccagauuuaaccuac

SEQ ID NO: 236714 - RNA, 19 nt, Artificial Sequence
  Description of Artificial Sequence: Synthetic oligonucleotide
  Sense strand starting at position 930 SEQ ID NO: 3047
guuaaaucuggaugaauca

SEQ ID NO: 236715 - RNA, 19 nt, Artificial Sequence
  Description of Artificial Sequence: Synthetic oligonucleotide
  Antisense strand to SEQ ID NO: 236714
ugauucauccagauuuaac

SEQ ID NO: 236716 - RNA, 19 nt, Artificial Sequence
  Description of Artificial Sequence: Synthetic oligonucleotide
  Sense strand starting at position 1053 SEQ ID NO: 3047
gaccucuuuccuggagagu

SEQ ID NO: 236717 - RNA, 19 nt, Artificial Sequence
  Description of Artificial Sequence: Synthetic oligonucleotide
  Antisense strand to SEQ ID NO: 236716
acucuccaggaaagagguc

SEQ ID NO: 236718 - RNA, 19 nt, Artificial Sequence
  Description of Artificial Sequence: Synthetic oligonucleotide
  Sense strand starting at position 1204 SEQ ID NO: 3047
cugugaauuuccguuccuu

SEQ ID NO: 236719 - RNA, 19 nt, Artificial Sequence
  Description of Artificial Sequence: Synthetic oligonucleotide
  Antisense strand to SEQ ID NO: 236718
aaggaacggaaauucacag

SEQ ID NO: 236720 - RNA, 19 nt, Artificial Sequence
  Description of Artificial Sequence: Synthetic oligonucleotide
  Sense strand starting at position 1249 SEQ ID NO: 3047
ugugaagaucaggguaaua

SEQ ID NO: 236721 - RNA, 19 nt, Artificial Sequence
  Description of Artificial Sequence: Synthetic oligonucleotide
  Antisense strand to SEQ ID NO: 236720
uauuacccugaucuucaca

SEQ ID NO: 236722 - RNA, 19 nt, Artificial Sequence
  Description of Artificial Sequence: Synthetic oligonucleotide
  Sense strand starting at position 1314 SEQ ID NO: 3047
uguauuaaacacuguacau

SEQ ID NO: 236723 - RNA, 19 nt, Artificial Sequence
  Description of Artificial Sequence: Synthetic oligonucleotide
  Antisense strand to SEQ ID NO: 236722
auguacaguguuuaauaca

SEQ ID NO: 236724 - RNA, 19 nt, Artificial Sequence
  Description of Artificial Sequence: Synthetic oligonucleotide
  Sense strand starting at position 1631 SEQ ID NO: 3047
gcucuuaaccacugagacu

SEQ ID NO: 236725 - RNA, 19 nt, Artificial Sequence
  Description of Artificial Sequence: Synthetic oligonucleotide
  Antisense strand to SEQ ID NO: 236724
agucucagugguuaagagc

SEQ ID NO: 236726 - RNA, 19 nt, Artificial Sequence
  Description of Artificial Sequence: Synthetic oligonucleotide
  Sense strand starting at position 2661 SEQ ID NO: 3047
guguuuggaagucaguuaa

SEQ ID NO: 236727 - RNA, 19 nt, Artificial Sequence
  Description of Artificial Sequence: Synthetic oligonucleotide
  Antisense strand to SEQ ID NO: 236726
uuaacugacuuccaaacac

SEQ ID NO: 236728 - RNA, 19 nt, Artificial Sequence
  Description of Artificial Sequence: Synthetic oligonucleotide
  Sense strand starting at position 2672 SEQ ID NO: 3047
ucaguuaacuaguccucaa

SEQ ID NO: 236729 - RNA, 19 nt, Artificial Sequence
  Description of Artificial Sequence: Synthetic oligonucleotide
  Antisense strand to SEQ ID NO: 236728
uugaggacuaguuaacuga

SEQ ID NO: 236730 - RNA, 19 nt, Artificial Sequence
  Description of Artificial Sequence: Synthetic oligonucleotide
  Sense strand starting at position 2676 SEQ ID NO: 3047
uuaacuaguccucaaguuu

SEQ ID NO: 236731 - RNA, 19 nt, Artificial Sequence
  Description of Artificial Sequence: Synthetic oligonucleotide
  Antisense strand to SEQ ID NO: 236730
aaacuugaggacuaguuaa

SEQ ID NO: 236732 - RNA, 19 nt, Artificial Sequence
  Description of Artificial Sequence: Synthetic oligonucleotide
  Sense strand starting at position 2687 SEQ ID NO: 3047
ucaaguuuaugaucauuga

SEQ ID NO: 236733 - RNA, 19 nt, Artificial Sequence
  Description of Artificial Sequence: Synthetic oligonucleotide
  Antisense strand to SEQ ID NO: 236732
ucaaugaucauaaacuuga

SEQ ID NO: 236734 - RNA, 19 nt, Artificial Sequence
  Description of Artificial Sequence: Synthetic oligonucleotide
  Sense strand starting at position 2690 SEQ ID NO: 3047
aguuuaugaucauugaagg

SEQ ID NO: 236735 - RNA, 19 nt, Artificial Sequence
  Description of Artificial Sequence: Synthetic oligonucleotide
  Antisense strand to SEQ ID NO: 236734
ccuucaaugaucauaaacu

SEQ ID NO: 236736 - RNA, 19 nt, Artificial Sequence
  Description of Artificial Sequence: Synthetic oligonucleotide
  Sense strand starting at position 2691 SEQ ID NO: 3047
guuuaugaucauugaagga

SEQ ID NO: 236737 - RNA, 19 nt, Artificial Sequence
  Description of Artificial Sequence: Synthetic oligonucleotide
  Antisense strand to SEQ ID NO: 236736
uccuucaaugaucauaaac

SEQ ID NO: 236738 - RNA, 19 nt, Artificial Sequence
  Description of Artificial Sequence: Synthetic oligonucleotide
  Sense strand starting at position 2834 SEQ ID NO: 3047
ucgugugaccuugauaaac

SEQ ID NO: 236739 - RNA, 19 nt, Artificial Sequence
  Description of Artificial Sequence: Synthetic oligonucleotide
  Antisense strand to SEQ ID NO: 236738
guuuaucaaggucacacga

SEQ ID NO: 236740 - RNA, 19 nt, Artificial Sequence
  Description of Artificial Sequence: Synthetic oligonucleotide
  Sense strand starting at position 2869 SEQ ID NO: 3047
gcuuaauggagaugauuau

SEQ ID NO: 236741 - RNA, 19 nt, Artificial Sequence
  Description of Artificial Sequence: Synthetic oligonucleotide
  Antisense strand to SEQ ID NO: 236740
auaaucaucuccauuaagc

SEQ ID NO: 236742 - RNA, 19 nt, Artificial Sequence
  Description of Artificial Sequence: Synthetic oligonucleotide
  Sense strand starting at position 2957 SEQ ID NO: 3047
guugacaaguacuugauaa

SEQ ID NO: 236743 - RNA, 19 nt, Artificial Sequence
  Description of Artificial Sequence: Synthetic oligonucleotide
  Antisense strand to SEQ ID NO: 236742
uuaucaaguacuugucaac

SEQ ID NO: 236744 - RNA, 19 nt, Artificial Sequence
  Description of Artificial Sequence: Synthetic oligonucleotide
  Sense strand starting at position 3068 SEQ ID NO: 3047
gagcucacgguguaauauu

SEQ ID NO: 236745 - RNA, 19 nt, Artificial Sequence
  Description of Artificial Sequence: Synthetic oligonucleotide
  Antisense strand to SEQ ID NO: 236744
aauauuacaccgugagcuc

SEQ ID NO: 236746 - RNA, 19 nt, Artificial Sequence
  Description of Artificial Sequence: Synthetic oligonucleotide
  Sense strand starting at position 3453 SEQ ID NO: 3047
aaagacuccugguuaugga

SEQ ID NO: 236747 - RNA, 19 nt, Artificial Sequence
  Description of Artificial Sequence: Synthetic oligonucleotide
  Antisense strand to SEQ ID NO: 236746
uccauaaccaggagucuuu

SEQ ID NO: 236748 - RNA, 19 nt, Artificial Sequence
  Description of Artificial Sequence: Synthetic oligonucleotide
  Sense strand starting at position 3571 SEQ ID NO: 3047
guuugagguguguaucaug

SEQ ID NO: 236749 - RNA, 19 nt, Artificial Sequence
  Description of Artificial Sequence: Synthetic oligonucleotide
  Antisense strand to SEQ ID NO: 236748
caugauacacaccucaaac

SEQ ID NO: 236750 - RNA, 19 nt, Artificial Sequence
  Description of Artificial Sequence: Synthetic oligonucleotide
  Sense strand starting at position 3582 SEQ ID NO: 3047
guaucaugaaagggcugau

SEQ ID NO: 236751 - RNA, 19 nt, Artificial Sequence
  Description of Artificial Sequence: Synthetic oligonucleotide
  Antisense strand to SEQ ID NO: 236750
aucagcccuuucaugauac

SEQ ID NO: 236752 - RNA, 19 nt, Artificial Sequence
  Description of Artificial Sequence: Synthetic oligonucleotide
  Sense strand starting at position 3595 SEQ ID NO: 3047
gcugauaggcuuugacaua

SEQ ID NO: 236753 - RNA, 19 nt, Artificial Sequence
  Description of Artificial Sequence: Synthetic oligonucleotide
  Antisense strand to SEQ ID NO: 236752
uaugucaaagccuaucagc

SEQ ID NO: 236754 - RNA, 19 nt, Artificial Sequence
  Description of Artificial Sequence: Synthetic oligonucleotide
  Sense strand starting at position 3671 SEQ ID NO: 3047
acuuguguugcagagaggu

SEQ ID NO: 236755 - RNA, 19 nt, Artificial Sequence
  Description of Artificial Sequence: Synthetic oligonucleotide
  Antisense strand to SEQ ID NO: 236754
accucucugcaacacaagu

SEQ ID NO: 236756 - RNA, 19 nt, Artificial Sequence
  Description of Artificial Sequence: Synthetic oligonucleotide
  Sense strand starting at position 3803 SEQ ID NO: 3047
ggguuaugcccacagguca

SEQ ID NO: 236757 - RNA, 19 nt, Artificial Sequence
  Description of Artificial Sequence: Synthetic oligonucleotide
  Antisense strand to SEQ ID NO: 236756
ugaccugugggcauaaccc

SEQ ID NO: 236758 - RNA, 19 nt, Artificial Sequence
  Description of Artificial Sequence: Synthetic oligonucleotide
  Sense strand starting at position 3883 SEQ ID NO: 3047
ggucucuguucucccaaga

SEQ ID NO: 236759 - RNA, 19 nt, Artificial Sequence
  Description of Artificial Sequence: Synthetic oligonucleotide
  Antisense strand to SEQ ID NO: 236758
ucuugggagaacagagacc

SEQ ID NO: 236760 - RNA, 19 nt, Artificial Sequence
  Description of Artificial Sequence: Synthetic oligonucleotide
  Sense strand starting at position 3897 SEQ ID NO: 3047
caagaaacagccuguauga

SEQ ID NO: 236761 - RNA, 19 nt, Artificial Sequence
  Description of Artificial Sequence: Synthetic oligonucleotide
  Antisense strand to SEQ ID NO: 236760
ucauacaggcuguuucuug

SEQ ID NO: 236762 - RNA, 19 nt, Artificial Sequence
  Description of Artificial Sequence: Synthetic oligonucleotide
  Sense strand starting at position 3899 SEQ ID NO: 3047
agaaacagccuguaugauu

SEQ ID NO: 236763 - RNA, 19 nt, Artificial Sequence
  Description of Artificial Sequence: Synthetic oligonucleotide
  Antisense strand to SEQ ID NO: 236762
aaucauacaggcuguuucu

SEQ ID NO: 236764 - RNA, 19 nt, Artificial Sequence
  Description of Artificial Sequence: Synthetic oligonucleotide
  Sense strand starting at position 3937 SEQ ID NO: 3047
cagccuuccuguccagaga

SEQ ID NO: 236765 - RNA, 19 nt, Artificial Sequence
  Description of Artificial Sequence: Synthetic oligonucleotide
  Antisense strand to SEQ ID NO: 236764
ucucuggacaggaaggcug

SEQ ID NO: 236766 - RNA, 19 nt, Artificial Sequence
  Description of Artificial Sequence: Synthetic oligonucleotide
  Sense strand starting at position 3938 SEQ ID NO: 3047
agccuuccuguccagagau

SEQ ID NO: 236767 - RNA, 19 nt, Artificial Sequence
  Description of Artificial Sequence: Synthetic oligonucleotide
  Antisense strand to SEQ ID NO: 236766
aucucuggacaggaaggcu

SEQ ID NO: 236768 - RNA, 19 nt, Artificial Sequence
  Description of Artificial Sequence: Synthetic oligonucleotide
  Sense strand starting at position 3948 SEQ ID NO: 3047
uccagagaugcucauaggu

SEQ ID NO: 236769 - RNA, 19 nt, Artificial Sequence
  Description of Artificial Sequence: Synthetic oligonucleotide
  Antisense strand to SEQ ID NO: 236768
accuaugagcaucucugga

SEQ ID NO: 236770 - RNA, 19 nt, Artificial Sequence
  Description of Artificial Sequence: Synthetic oligonucleotide
  Sense strand starting at position 3964 SEQ ID NO: 3047
ggucacuucuacuucucua

SEQ ID NO: 236771 - RNA, 19 nt, Artificial Sequence
  Description of Artificial Sequence: Synthetic oligonucleotide
  Antisense strand to SEQ ID NO: 236770
uagagaaguagaagugacc

SEQ ID NO: 236772 - RNA, 19 nt, Artificial Sequence
  Description of Artificial Sequence: Synthetic oligonucleotide
  Sense strand starting at position 68 SEQ ID NO: 3049
ggugcuguacuccaaacuu

SEQ ID NO: 236773 - RNA, 19 nt, Artificial Sequence
  Description of Artificial Sequence: Synthetic oligonucleotide
  Antisense strand to SEQ ID NO: 236772
aaguuuggaguacagcacc

SEQ ID NO: 236774 - RNA, 19 nt, Artificial Sequence
  Description of Artificial Sequence: Synthetic oligonucleotide
  Sense strand starting at position 229 SEQ ID NO: 3049
cuaagucuguccucuacua

SEQ ID NO: 236775 - RNA, 19 nt, Artificial Sequence
  Description of Artificial Sequence: Synthetic oligonucleotide
  Antisense strand to SEQ ID NO: 236774
uaguagaggacagacuuag

SEQ ID NO: 236776 - RNA, 19 nt, Artificial Sequence
  Description of Artificial Sequence: Synthetic oligonucleotide
  Sense strand starting at position 249 SEQ ID NO: 3049
ugugacacaucaggaaauu

SEQ ID NO: 236777 - RNA, 19 nt, Artificial Sequence
  Description of Artificial Sequence: Synthetic oligonucleotide
  Antisense strand to SEQ ID NO: 236776
aauuuccugaugugucaca

SEQ ID NO: 236778 - RNA, 19 nt, Artificial Sequence
  Description of Artificial Sequence: Synthetic oligonucleotide
  Sense strand starting at position 1156 SEQ ID NO: 3049
ucuccauuccuccgagaca

SEQ ID NO: 236779 - RNA, 19 nt, Artificial Sequence
  Description of Artificial Sequence: Synthetic oligonucleotide
  Antisense strand to SEQ ID NO: 236778
ugucucggaggaauggaga

SEQ ID NO: 236780 - RNA, 19 nt, Artificial Sequence
  Description of Artificial Sequence: Synthetic oligonucleotide
  Sense strand starting at position 1175 SEQ ID NO: 3049
gaaauaguucuguggccuc

SEQ ID NO: 236781 - RNA, 19 nt, Artificial Sequence
  Description of Artificial Sequence: Synthetic oligonucleotide
  Antisense strand to SEQ ID NO: 236780
gaggccacagaacuauuuc

SEQ ID NO: 236782 - RNA, 19 nt, Artificial Sequence
  Description of Artificial Sequence: Synthetic oligonucleotide
  Sense strand starting at position 1279 SEQ ID NO: 3049
accagagagucuuucucuu

SEQ ID NO: 236783 - RNA, 19 nt, Artificial Sequence
  Description of Artificial Sequence: Synthetic oligonucleotide
  Antisense strand to SEQ ID NO: 236782
aagagaaagacucucuggu

SEQ ID NO: 236784 - RNA, 19 nt, Artificial Sequence
  Description of Artificial Sequence: Synthetic oligonucleotide
  Sense strand starting at position 1281 SEQ ID NO: 3049
cagagagucuuucucuuug

SEQ ID NO: 236785 - RNA, 19 nt, Artificial Sequence
  Description of Artificial Sequence: Synthetic oligonucleotide
  Antisense strand to SEQ ID NO: 236784
caaagagaaagacucucug

SEQ ID NO: 236786 - RNA, 19 nt, Artificial Sequence
  Description of Artificial Sequence: Synthetic oligonucleotide
  Sense strand starting at position 1462 SEQ ID NO: 3049
gcaagaaguucucugggca

SEQ ID NO: 236787 - RNA, 19 nt, Artificial Sequence
  Description of Artificial Sequence: Synthetic oligonucleotide
  Antisense strand to SEQ ID NO: 236786
ugcccagagaacuucuugc

SEQ ID NO: 236788 - RNA, 19 nt, Artificial Sequence
  Description of Artificial Sequence: Synthetic oligonucleotide
  Sense strand starting at position 1463 SEQ ID NO: 3049
caagaaguucucugggcac

SEQ ID NO: 236789 - RNA, 19 nt, Artificial Sequence
  Description of Artificial Sequence: Synthetic oligonucleotide
  Antisense strand to SEQ ID NO: 236788
gugcccagagaacuucuug

SEQ ID NO: 236790 - RNA, 19 nt, Artificial Sequence
  Description of Artificial Sequence: Synthetic oligonucleotide
  Sense strand starting at position 1465 SEQ ID NO: 3049
agaaguucucugggcacau

SEQ ID NO: 236791 - RNA, 19 nt, Artificial Sequence
  Description of Artificial Sequence: Synthetic oligonucleotide
  Antisense strand to SEQ ID NO: 236790
augugcccagagaacuucu

SEQ ID NO: 236792 - RNA, 19 nt, Artificial Sequence
  Description of Artificial Sequence: Synthetic oligonucleotide
  Sense strand starting at position 1466 SEQ ID NO: 3049
gaaguucucugggcacauu

SEQ ID NO: 236793 - RNA, 19 nt, Artificial Sequence
  Description of Artificial Sequence: Synthetic oligonucleotide
  Antisense strand to SEQ ID NO: 236792
aaugugcccagagaacuuc

SEQ ID NO: 236794 - RNA, 19 nt, Artificial Sequence
  Description of Artificial Sequence: Synthetic oligonucleotide
  Sense strand starting at position 1662 SEQ ID NO: 3049
cuucauggugccugggauu

SEQ ID NO: 236795 - RNA, 19 nt, Artificial Sequence
  Description of Artificial Sequence: Synthetic oligonucleotide
  Antisense strand to SEQ ID NO: 236794
aaucccaggcaccaugaag

SEQ ID NO: 236796 - RNA, 19 nt, Artificial Sequence
  Description of Artificial Sequence: Synthetic oligonucleotide
  Sense strand starting at position 1673 SEQ ID NO: 3049
cugggauuccugggagcag

SEQ ID NO: 236797 - RNA, 19 nt, Artificial Sequence
  Description of Artificial Sequence: Synthetic oligonucleotide
  Antisense strand to SEQ ID NO: 236796
cugcucccaggaaucccag

SEQ ID NO: 236798 - RNA, 19 nt, Artificial Sequence
  Description of Artificial Sequence: Synthetic oligonucleotide
  Sense strand starting at position 1674 SEQ ID NO: 3049
ugggauuccugggagcaga

SEQ ID NO: 236799 - RNA, 19 nt, Artificial Sequence
  Description of Artificial Sequence: Synthetic oligonucleotide
  Antisense strand to SEQ ID NO: 236798
ucugcucccaggaauccca

SEQ ID NO: 236800 - RNA, 19 nt, Artificial Sequence
  Description of Artificial Sequence: Synthetic oligonucleotide
  Sense strand starting at position 1744 SEQ ID NO: 3049
gggccaccacucuaauuaa

SEQ ID NO: 236801 - RNA, 19 nt, Artificial Sequence
  Description of Artificial Sequence: Synthetic oligonucleotide
  Antisense strand to SEQ ID NO: 236800
uuaauuagagugguggccc

SEQ ID NO: 236802 - RNA, 19 nt, Artificial Sequence
  Description of Artificial Sequence: Synthetic oligonucleotide
  Sense strand starting at position 1797 SEQ ID NO: 3049
ccuccaagugugcgaaaca

SEQ ID NO: 236803 - RNA, 19 nt, Artificial Sequence
  Description of Artificial Sequence: Synthetic oligonucleotide
  Antisense strand to SEQ ID NO: 236802
uguuucgcacacuuggagg

SEQ ID NO: 236804 - RNA, 19 nt, Artificial Sequence
  Description of Artificial Sequence: Synthetic oligonucleotide
  Sense strand starting at position 1816 SEQ ID NO: 3049
gaaaguaccuccuugggca

SEQ ID NO: 236805 - RNA, 19 nt, Artificial Sequence
  Description of Artificial Sequence: Synthetic oligonucleotide
  Antisense strand to SEQ ID NO: 236804
ugcccaaggagguacuuuc

SEQ ID NO: 236806 - RNA, 19 nt, Artificial Sequence
  Description of Artificial Sequence: Synthetic oligonucleotide
  Sense strand starting at position 2114 SEQ ID NO: 3049
cucuuauaauugggaagga

SEQ ID NO: 236807 - RNA, 19 nt, Artificial Sequence
  Description of Artificial Sequence: Synthetic oligonucleotide
  Antisense strand to SEQ ID NO: 236806
uccuucccaauuauaagag

SEQ ID NO: 236808 - RNA, 19 nt, Artificial Sequence
  Description of Artificial Sequence: Synthetic oligonucleotide
  Sense strand starting at position 2152 SEQ ID NO: 3049
aauuauuaguccugggauu

SEQ ID NO: 236809 - RNA, 19 nt, Artificial Sequence
  Description of Artificial Sequence: Synthetic oligonucleotide
  Antisense strand to SEQ ID NO: 236808
aaucccaggacuaauaauu

SEQ ID NO: 236810 - RNA, 19 nt, Artificial Sequence
  Description of Artificial Sequence: Synthetic oligonucleotide
  Sense strand starting at position 2153 SEQ ID NO: 3049
auuauuaguccugggauuc

SEQ ID NO: 236811 - RNA, 19 nt, Artificial Sequence
  Description of Artificial Sequence: Synthetic oligonucleotide
  Antisense strand to SEQ ID NO: 236810
gaaucccaggacuaauaau

SEQ ID NO: 236812 - RNA, 19 nt, Artificial Sequence
  Description of Artificial Sequence: Synthetic oligonucleotide
  Sense strand starting at position 2163 SEQ ID NO: 3049
cugggauucgucuggucuu

SEQ ID NO: 236813 - RNA, 19 nt, Artificial Sequence
  Description of Artificial Sequence: Synthetic oligonucleotide
  Antisense strand to SEQ ID NO: 236812
aagaccagacgaaucccag

SEQ ID NO: 236814 - RNA, 19 nt, Artificial Sequence
  Description of Artificial Sequence: Synthetic oligonucleotide
  Sense strand starting at position 2249 SEQ ID NO: 3049
guaacagguuccuacugau

SEQ ID NO: 236815 - RNA, 19 nt, Artificial Sequence
  Description of Artificial Sequence: Synthetic oligonucleotide
  Antisense strand to SEQ ID NO: 236814
aucaguaggaaccuguuac

SEQ ID NO: 236816 - RNA, 19 nt, Artificial Sequence
  Description of Artificial Sequence: Synthetic oligonucleotide
  Sense strand starting at position 2252 SEQ ID NO: 3049
acagguuccuacugauaug

SEQ ID NO: 236817 - RNA, 19 nt, Artificial Sequence
  Description of Artificial Sequence: Synthetic oligonucleotide
  Antisense strand to SEQ ID NO: 236816
cauaucaguaggaaccugu

SEQ ID NO: 236818 - RNA, 19 nt, Artificial Sequence
  Description of Artificial Sequence: Synthetic oligonucleotide
  Sense strand starting at position 2255 SEQ ID NO: 3049
gguuccuacugauaugagu

SEQ ID NO: 236819 - RNA, 19 nt, Artificial Sequence
  Description of Artificial Sequence: Synthetic oligonucleotide
  Antisense strand to SEQ ID NO: 236818
acucauaucaguaggaacc

SEQ ID NO: 236820 - RNA, 19 nt, Artificial Sequence
  Description of Artificial Sequence: Synthetic oligonucleotide
  Sense strand starting at position 2281 SEQ ID NO: 3049
agccucugaugagggaaau

SEQ ID NO: 236821 - RNA, 19 nt, Artificial Sequence
  Description of Artificial Sequence: Synthetic oligonucleotide
  Antisense strand to SEQ ID NO: 236820
auuucccucaucagaggcu

SEQ ID NO: 236822 - RNA, 19 nt, Artificial Sequence
  Description of Artificial Sequence: Synthetic oligonucleotide
  Sense strand starting at position 2282 SEQ ID NO: 3049
gccucugaugagggaaaua

SEQ ID NO: 236823 - RNA, 19 nt, Artificial Sequence
  Description of Artificial Sequence: Synthetic oligonucleotide
  Antisense strand to SEQ ID NO: 236822
uauuucccucaucagaggc

SEQ ID NO: 236824 - RNA, 19 nt, Artificial Sequence
  Description of Artificial Sequence: Synthetic oligonucleotide
  Sense strand starting at position 2313 SEQ ID NO: 3049
augaccucugucugugaau

SEQ ID NO: 236825 - RNA, 19 nt, Artificial Sequence
  Description of Artificial Sequence: Synthetic oligonucleotide
  Antisense strand to SEQ ID NO: 236824
auucacagacagaggucau

SEQ ID NO: 236826 - RNA, 19 nt, Artificial Sequence
  Description of Artificial Sequence: Synthetic oligonucleotide
  Sense strand starting at position 2314 SEQ ID NO: 3049
ugaccucugucugugaauc

SEQ ID NO: 236827 - RNA, 19 nt, Artificial Sequence
  Description of Artificial Sequence: Synthetic oligonucleotide
  Antisense strand to SEQ ID NO: 236826
gauucacagacagagguca

SEQ ID NO: 236828 - RNA, 19 nt, Artificial Sequence
  Description of Artificial Sequence: Synthetic oligonucleotide
  Sense strand starting at position 2315 SEQ ID NO: 3049
gaccucugucugugaauca

SEQ ID NO: 236829 - RNA, 19 nt, Artificial Sequence
  Description of Artificial Sequence: Synthetic oligonucleotide
  Antisense strand to SEQ ID NO: 236828
ugauucacagacagagguc

SEQ ID NO: 236830 - RNA, 19 nt, Artificial Sequence
  Description of Artificial Sequence: Synthetic oligonucleotide
  Sense strand starting at position 2550 SEQ ID NO: 3049
augccuggugcggaagaua

SEQ ID NO: 236831 - RNA, 19 nt, Artificial Sequence
  Description of Artificial Sequence: Synthetic oligonucleotide
  Antisense strand to SEQ ID NO: 236830
uaucuuccgcaccaggcau

SEQ ID NO: 236832 - RNA, 19 nt, Artificial Sequence
  Description of Artificial Sequence: Synthetic oligonucleotide
  Sense strand starting at position 2621 SEQ ID NO: 3049
uagauuuaaucucagugag

SEQ ID NO: 236833 - RNA, 19 nt, Artificial Sequence
  Description of Artificial Sequence: Synthetic oligonucleotide
  Antisense strand to SEQ ID NO: 236832
cucacugagauuaaaucua

SEQ ID NO: 236834 - RNA, 19 nt, Artificial Sequence
  Description of Artificial Sequence: Synthetic oligonucleotide
  Sense strand starting at position 2796 SEQ ID NO: 3049
gaggcuggcuucuuugagu

SEQ ID NO: 236835 - RNA, 19 nt, Artificial Sequence
  Description of Artificial Sequence: Synthetic oligonucleotide
  Antisense strand to SEQ ID NO: 236834
acucaaagaagccagccuc

SEQ ID NO: 236836 - RNA, 19 nt, Artificial Sequence
  Description of Artificial Sequence: Synthetic oligonucleotide
  Sense strand starting at position 2991 SEQ ID NO: 3049
gguggagcuggugaaacau

SEQ ID NO: 236837 - RNA, 19 nt, Artificial Sequence
  Description of Artificial Sequence: Synthetic oligonucleotide
  Antisense strand to SEQ ID NO: 236836
auguuucaccagcuccacc

SEQ ID NO: 236838 - RNA, 19 nt, Artificial Sequence
  Description of Artificial Sequence: Synthetic oligonucleotide
  Sense strand starting at position 2997 SEQ ID NO: 3049
gcuggugaaacauggacau

SEQ ID NO: 236839 - RNA, 19 nt, Artificial Sequence
  Description of Artificial Sequence: Synthetic oligonucleotide
  Antisense strand to SEQ ID NO: 236838
auguccauguuucaccagc

SEQ ID NO: 236840 - RNA, 19 nt, Artificial Sequence
  Description of Artificial Sequence: Synthetic oligonucleotide
  Sense strand starting at position 3170 SEQ ID NO: 3049
gccuuucuaucagaagaua

SEQ ID NO: 236841 - RNA, 19 nt, Artificial Sequence
  Description of Artificial Sequence: Synthetic oligonucleotide
  Antisense strand to SEQ ID NO: 236840
uaucuucugauagaaaggc

SEQ ID NO: 236842 - RNA, 19 nt, Artificial Sequence
  Description of Artificial Sequence: Synthetic oligonucleotide
  Sense strand starting at position 3182 SEQ ID NO: 3049
gaagauaaaucugaugguc

SEQ ID NO: 236843 - RNA, 19 nt, Artificial Sequence
  Description of Artificial Sequence: Synthetic oligonucleotide
  Antisense strand to SEQ ID NO: 236842
gaccaucagauuuaucuuc

SEQ ID NO: 236844 - RNA, 19 nt, Artificial Sequence
  Description of Artificial Sequence: Synthetic oligonucleotide
  Sense strand starting at position 3184 SEQ ID NO: 3049
agauaaaucugauggucac

SEQ ID NO: 236845 - RNA, 19 nt, Artificial Sequence
  Description of Artificial Sequence: Synthetic oligonucleotide
  Antisense strand to SEQ ID NO: 236844
gugaccaucagauuuaucu

SEQ ID NO: 236846 - RNA, 19 nt, Artificial Sequence
  Description of Artificial Sequence: Synthetic oligonucleotide
  Sense strand starting at position 3185 SEQ ID NO: 3049
gauaaaucugauggucaca

SEQ ID NO: 236847 - RNA, 19 nt, Artificial Sequence
  Description of Artificial Sequence: Synthetic oligonucleotide
  Antisense strand to SEQ ID NO: 236846
ugugaccaucagauuuauc

SEQ ID NO: 236848 - RNA, 19 nt, Artificial Sequence
  Description of Artificial Sequence: Synthetic oligonucleotide
  Sense strand starting at position 3332 SEQ ID NO: 3049
gugauucuccugcaauccu

SEQ ID NO: 236849 - RNA, 19 nt, Artificial Sequence
  Description of Artificial Sequence: Synthetic oligonucleotide
  Antisense strand to SEQ ID NO: 236848
aggauugcaggagaaucac

SEQ ID NO: 236850 - RNA, 19 nt, Artificial Sequence
  Description of Artificial Sequence: Synthetic oligonucleotide
  Sense strand starting at position 3709 SEQ ID NO: 3049
auuaguaggcccuauaacu

SEQ ID NO: 236851 - RNA, 19 nt, Artificial Sequence
  Description of Artificial Sequence: Synthetic oligonucleotide
  Antisense strand to SEQ ID NO: 236850
aguuauagggccuacuaau

SEQ ID NO: 236852 - RNA, 19 nt, Artificial Sequence
  Description of Artificial Sequence: Synthetic oligonucleotide
  Sense strand starting at position 211 SEQ ID NO: 3050
aggcgugagauugaaauua

SEQ ID NO: 236853 - RNA, 19 nt, Artificial Sequence
  Description of Artificial Sequence: Synthetic oligonucleotide
  Antisense strand to SEQ ID NO: 236852
uaauuucaaucucacgccu

SEQ ID NO: 236854 - RNA, 19 nt, Artificial Sequence
  Description of Artificial Sequence: Synthetic oligonucleotide
  Sense strand starting at position 356 SEQ ID NO: 3050
gaaagcagauccguaaauu

SEQ ID NO: 236855 - RNA, 19 nt, Artificial Sequence
  Description of Artificial Sequence: Synthetic oligonucleotide
  Antisense strand to SEQ ID NO: 236854
aauuuacggaucugcuuuc

SEQ ID NO: 236856 - RNA, 19 nt, Artificial Sequence
  Description of Artificial Sequence: Synthetic oligonucleotide
  Sense strand starting at position 431 SEQ ID NO: 3050
auaggagacugcuuugcau

SEQ ID NO: 236857 - RNA, 19 nt, Artificial Sequence
  Description of Artificial Sequence: Synthetic oligonucleotide
  Antisense strand to SEQ ID NO: 236856
augcaaagcagucuccuau

SEQ ID NO: 236858 - RNA, 19 nt, Artificial Sequence
  Description of Artificial Sequence: Synthetic oligonucleotide
  Sense strand starting at position 433 SEQ ID NO: 3050
aggagacugcuuugcauau

SEQ ID NO: 236859 - RNA, 19 nt, Artificial Sequence
  Description of Artificial Sequence: Synthetic oligonucleotide
  Antisense strand to SEQ ID NO: 236858
auaugcaaagcagucuccu

SEQ ID NO: 236860 - RNA, 19 nt, Artificial Sequence
  Description of Artificial Sequence: Synthetic oligonucleotide
  Sense strand starting at position 434 SEQ ID NO: 3050
ggagacugcuuugcauauu

SEQ ID NO: 236861 - RNA, 19 nt, Artificial Sequence
  Description of Artificial Sequence: Synthetic oligonucleotide
  Antisense strand to SEQ ID NO: 236860
aauaugcaaagcagucucc

SEQ ID NO: 236862 - RNA, 19 nt, Artificial Sequence
  Description of Artificial Sequence: Synthetic oligonucleotide
  Sense strand starting at position 442 SEQ ID NO: 3050
cuuugcauauuguuuaaga

SEQ ID NO: 236863 - RNA, 19 nt, Artificial Sequence
  Description of Artificial Sequence: Synthetic oligonucleotide
  Antisense strand to SEQ ID NO: 236862
ucuuaaacaauaugcaaag

SEQ ID NO: 236864 - RNA, 19 nt, Artificial Sequence
  Description of Artificial Sequence: Synthetic oligonucleotide
  Sense strand starting at position 789 SEQ ID NO: 3050
guagccacucccgaaauau

SEQ ID NO: 236865 - RNA, 19 nt, Artificial Sequence
  Description of Artificial Sequence: Synthetic oligonucleotide
  Antisense strand to SEQ ID NO: 236864
auauuucgggaguggcuac

SEQ ID NO: 236866 - RNA, 19 nt, Artificial Sequence
  Description of Artificial Sequence: Synthetic oligonucleotide
  Sense strand starting at position 894 SEQ ID NO: 3050
gcgacaagucaggaaggua

SEQ ID NO: 236867 - RNA, 19 nt, Artificial Sequence
  Description of Artificial Sequence: Synthetic oligonucleotide
  Antisense strand to SEQ ID NO: 236866
uaccuuccugacuugucgc

SEQ ID NO: 236868 - RNA, 19 nt, Artificial Sequence
  Description of Artificial Sequence: Synthetic oligonucleotide
  Sense strand starting at position 908 SEQ ID NO: 3050
agguaaaggcucugcugaa

SEQ ID NO: 236869 - RNA, 19 nt, Artificial Sequence
  Description of Artificial Sequence: Synthetic oligonucleotide
  Antisense strand to SEQ ID NO: 236868
uucagcagagccuuuaccu

SEQ ID NO: 236870 - RNA, 19 nt, Artificial Sequence
  Description of Artificial Sequence: Synthetic oligonucleotide
  Sense strand starting at position 909 SEQ ID NO: 3050
gguaaaggcucugcugaac

SEQ ID NO: 236871 - RNA, 19 nt, Artificial Sequence
  Description of Artificial Sequence: Synthetic oligonucleotide
  Antisense strand to SEQ ID NO: 236870
guucagcagagccuuuacc

SEQ ID NO: 236872 - RNA, 19 nt, Artificial Sequence
  Description of Artificial Sequence: Synthetic oligonucleotide
  Sense strand starting at position 937 SEQ ID NO: 3050
cuaaaugucacucggugga

SEQ ID NO: 236873 - RNA, 19 nt, Artificial Sequence
  Description of Artificial Sequence: Synthetic oligonucleotide
  Antisense strand to SEQ ID NO: 236872
uccaccgagugacauuuag

SEQ ID NO: 236874 - RNA, 19 nt, Artificial Sequence
  Description of Artificial Sequence: Synthetic oligonucleotide
  Sense strand starting at position 939 SEQ ID NO: 3050
aaaugucacucgguggaga

SEQ ID NO: 236875 - RNA, 19 nt, Artificial Sequence
  Description of Artificial Sequence: Synthetic oligonucleotide
  Antisense strand to SEQ ID NO: 236874
ucuccaccgagugacauuu

SEQ ID NO: 236876 - RNA, 19 nt, Artificial Sequence
  Description of Artificial Sequence: Synthetic oligonucleotide
  Sense strand starting at position 940 SEQ ID NO: 3050
aaugucacucgguggagau

SEQ ID NO: 236877 - RNA, 19 nt, Artificial Sequence
  Description of Artificial Sequence: Synthetic oligonucleotide
  Antisense strand to SEQ ID NO: 236876
aucuccaccgagugacauu

SEQ ID NO: 236878 - RNA, 19 nt, Artificial Sequence
  Description of Artificial Sequence: Synthetic oligonucleotide
  Sense strand starting at position 2104 SEQ ID NO: 3050
uggcgauuagggcagucaa

SEQ ID NO: 236879 - RNA, 19 nt, Artificial Sequence
  Description of Artificial Sequence: Synthetic oligonucleotide
  Antisense strand to SEQ ID NO: 236878
uugacugcccuaaucgcca

SEQ ID NO: 236880 - RNA, 19 nt, Artificial Sequence
  Description of Artificial Sequence: Synthetic oligonucleotide
  Sense strand starting at position 2117 SEQ ID NO: 3050
agucaaauuucucucggcu

SEQ ID NO: 236881 - RNA, 19 nt, Artificial Sequence
  Description of Artificial Sequence: Synthetic oligonucleotide
  Antisense strand to SEQ ID NO: 236880
agccgagagaaauuugacu

SEQ ID NO: 236882 - RNA, 19 nt, Artificial Sequence
  Description of Artificial Sequence: Synthetic oligonucleotide
  Sense strand starting at position 2186 SEQ ID NO: 3050
gucaaacugacgugugaag

SEQ ID NO: 236883 - RNA, 19 nt, Artificial Sequence
  Description of Artificial Sequence: Synthetic oligonucleotide
  Antisense strand to SEQ ID NO: 236882
cuucacacgucaguuugac

SEQ ID NO: 236884 - RNA, 19 nt, Artificial Sequence
  Description of Artificial Sequence: Synthetic oligonucleotide
  Sense strand starting at position 2349 SEQ ID NO: 3050
ggagacucaugggcgagau

SEQ ID NO: 236885 - RNA, 19 nt, Artificial Sequence
  Description of Artificial Sequence: Synthetic oligonucleotide
  Antisense strand to SEQ ID NO: 236884
aucucgcccaugagucucc

SEQ ID NO: 236886 - RNA, 19 nt, Artificial Sequence
  Description of Artificial Sequence: Synthetic oligonucleotide
  Sense strand starting at position 2538 SEQ ID NO: 3050
gcuugaaacuuuccaugau

SEQ ID NO: 236887 - RNA, 19 nt, Artificial Sequence
  Description of Artificial Sequence: Synthetic oligonucleotide
  Antisense strand to SEQ ID NO: 236886
aucauggaaaguuucaagc

SEQ ID NO: 236888 - RNA, 19 nt, Artificial Sequence
  Description of Artificial Sequence: Synthetic oligonucleotide
  Sense strand starting at position 2679 SEQ ID NO: 3050
gguugcggaauccagaaua

SEQ ID NO: 236889 - RNA, 19 nt, Artificial Sequence
  Description of Artificial Sequence: Synthetic oligonucleotide
  Antisense strand to SEQ ID NO: 236888
uauucuggauuccgcaacc

SEQ ID NO: 236890 - RNA, 19 nt, Artificial Sequence
  Description of Artificial Sequence: Synthetic oligonucleotide
  Sense strand starting at position 2689 SEQ ID NO: 3050
uccagaauacgacagcuuu

SEQ ID NO: 236891 - RNA, 19 nt, Artificial Sequence
  Description of Artificial Sequence: Synthetic oligonucleotide
  Antisense strand to SEQ ID NO: 236890
aaagcugucguauucugga

SEQ ID NO: 236892 - RNA, 19 nt, Artificial Sequence
  Description of Artificial Sequence: Synthetic oligonucleotide
  Sense strand starting at position 2729 SEQ ID NO: 3050
uuaaauguacaccgauacu

SEQ ID NO: 236893 - RNA, 19 nt, Artificial Sequence
  Description of Artificial Sequence: Synthetic oligonucleotide
  Antisense strand to SEQ ID NO: 236892
aguaucgguguacauuuaa

SEQ ID NO: 236894 - RNA, 19 nt, Artificial Sequence
  Description of Artificial Sequence: Synthetic oligonucleotide
  Sense strand starting at position 2781 SEQ ID NO: 3050
aacgcuauuugcuugaaag

SEQ ID NO: 236895 - RNA, 19 nt, Artificial Sequence
  Description of Artificial Sequence: Synthetic oligonucleotide
  Antisense strand to SEQ ID NO: 236894
cuuucaagcaaauagcguu

SEQ ID NO: 236896 - RNA, 19 nt, Artificial Sequence
  Description of Artificial Sequence: Synthetic oligonucleotide
  Sense strand starting at position 2782 SEQ ID NO: 3050
acgcuauuugcuugaaagc

SEQ ID NO: 236897 - RNA, 19 nt, Artificial Sequence
  Description of Artificial Sequence: Synthetic oligonucleotide
  Antisense strand to SEQ ID NO: 236896
gcuuucaagcaaauagcgu

SEQ ID NO: 236898 - RNA, 19 nt, Artificial Sequence
  Description of Artificial Sequence: Synthetic oligonucleotide
  Sense strand starting at position 2783 SEQ ID NO: 3050
cgcuauuugcuugaaagca

SEQ ID NO: 236899 - RNA, 19 nt, Artificial Sequence
  Description of Artificial Sequence: Synthetic oligonucleotide
  Antisense strand to SEQ ID NO: 236898
ugcuuucaagcaaauagcg

SEQ ID NO: 236900 - RNA, 19 nt, Artificial Sequence
  Description of Artificial Sequence: Synthetic oligonucleotide
  Sense strand starting at position 2848 SEQ ID NO: 3050
aauagaagcguuggaauac

SEQ ID NO: 236901 - RNA, 19 nt, Artificial Sequence
  Description of Artificial Sequence: Synthetic oligonucleotide
  Antisense strand to SEQ ID NO: 236900
guauuccaacgcuucuauu

SEQ ID NO: 236902 - RNA, 19 nt, Artificial Sequence
  Description of Artificial Sequence: Synthetic oligonucleotide
  Sense strand starting at position 2861 SEQ ID NO: 3050
gaauacggguucucuaagu

SEQ ID NO: 236903 - RNA, 19 nt, Artificial Sequence
  Description of Artificial Sequence: Synthetic oligonucleotide
  Antisense strand to SEQ ID NO: 236902
acuuagagaacccguauuc

SEQ ID NO: 236904 - RNA, 19 nt, Artificial Sequence
  Description of Artificial Sequence: Synthetic oligonucleotide
  Sense strand starting at position 2866 SEQ ID NO: 3050
cggguucucuaaguuauuu

SEQ ID NO: 236905 - RNA, 19 nt, Artificial Sequence
  Description of Artificial Sequence: Synthetic oligonucleotide
  Antisense strand to SEQ ID NO: 236904
aaauaacuuagagaacccg

SEQ ID NO: 236906 - RNA, 19 nt, Artificial Sequence
  Description of Artificial Sequence: Synthetic oligonucleotide
  Sense strand starting at position 2939 SEQ ID NO: 3050
cugauaaacugaguuauuc

SEQ ID NO: 236907 - RNA, 19 nt, Artificial Sequence
  Description of Artificial Sequence: Synthetic oligonucleotide
  Antisense strand to SEQ ID NO: 236906
gaauaacucaguuuaucag

SEQ ID NO: 236908 - RNA, 19 nt, Artificial Sequence
  Description of Artificial Sequence: Synthetic oligonucleotide
  Sense strand starting at position 2948 SEQ ID NO: 3050
ugaguuauucccugaggcu

SEQ ID NO: 236909 - RNA, 19 nt, Artificial Sequence
  Description of Artificial Sequence: Synthetic oligonucleotide
  Antisense strand to SEQ ID NO: 236908
agccucagggaauaacuca

SEQ ID NO: 236910 - RNA, 19 nt, Artificial Sequence
  Description of Artificial Sequence: Synthetic oligonucleotide
  Sense strand starting at position 2949 SEQ ID NO: 3050
gaguuauucccugaggcua

SEQ ID NO: 236911 - RNA, 19 nt, Artificial Sequence
  Description of Artificial Sequence: Synthetic oligonucleotide
  Antisense strand to SEQ ID NO: 236910
uagccucagggaauaacuc

SEQ ID NO: 236912 - RNA, 19 nt, Artificial Sequence
  Description of Artificial Sequence: Synthetic oligonucleotide
  Sense strand starting at position 3380 SEQ ID NO: 3050
acuagaaggguguauguca

SEQ ID NO: 236913 - RNA, 19 nt, Artificial Sequence
  Description of Artificial Sequence: Synthetic oligonucleotide
  Antisense strand to SEQ ID NO: 236912
ugacauacacccuucuagu

SEQ ID NO: 236914 - RNA, 19 nt, Artificial Sequence
  Description of Artificial Sequence: Synthetic oligonucleotide
  Sense strand starting at position 3400 SEQ ID NO: 3050
gugcaucauuaauugauaa

SEQ ID NO: 236915 - RNA, 19 nt, Artificial Sequence
  Description of Artificial Sequence: Synthetic oligonucleotide
  Antisense strand to SEQ ID NO: 236914
uuaucaauuaaugaugcac

SEQ ID NO: 236916 - RNA, 19 nt, Artificial Sequence
  Description of Artificial Sequence: Synthetic oligonucleotide
  Sense strand starting at position 3407 SEQ ID NO: 3050
auuaauugauaaccggauu

SEQ ID NO: 236917 - RNA, 19 nt, Artificial Sequence
  Description of Artificial Sequence: Synthetic oligonucleotide
  Antisense strand to SEQ ID NO: 236916
aauccgguuaucaauuaau

SEQ ID NO: 236918 - RNA, 19 nt, Artificial Sequence
  Description of Artificial Sequence: Synthetic oligonucleotide
  Sense strand starting at position 3470 SEQ ID NO: 3050
aggaaaucuggcuguaccu

SEQ ID NO: 236919 - RNA, 19 nt, Artificial Sequence
  Description of Artificial Sequence: Synthetic oligonucleotide
  Antisense strand to SEQ ID NO: 236918
agguacagccagauuuccu

SEQ ID NO: 236920 - RNA, 19 nt, Artificial Sequence
  Description of Artificial Sequence: Synthetic oligonucleotide
  Sense strand starting at position 3483 SEQ ID NO: 3050
guaccuacagguuauguga

SEQ ID NO: 236921 - RNA, 19 nt, Artificial Sequence
  Description of Artificial Sequence: Synthetic oligonucleotide
  Antisense strand to SEQ ID NO: 236920
ucacauaaccuguagguac

SEQ ID NO: 236922 - RNA, 19 nt, Artificial Sequence
  Description of Artificial Sequence: Synthetic oligonucleotide
  Sense strand starting at position 3499 SEQ ID NO: 3050
ugaccuuuggcauguuaca

SEQ ID NO: 236923 - RNA, 19 nt, Artificial Sequence
  Description of Artificial Sequence: Synthetic oligonucleotide
  Antisense strand to SEQ ID NO: 236922
uguaacaugccaaagguca

SEQ ID NO: 236924 - RNA, 19 nt, Artificial Sequence
  Description of Artificial Sequence: Synthetic oligonucleotide
  Sense strand starting at position 3738 SEQ ID NO: 3050
gaggaaagguaacaaauau

SEQ ID NO: 236925 - RNA, 19 nt, Artificial Sequence
  Description of Artificial Sequence: Synthetic oligonucleotide
  Antisense strand to SEQ ID NO: 236924
auauuuguuaccuuuccuc

SEQ ID NO: 236926 - RNA, 19 nt, Artificial Sequence
  Description of Artificial Sequence: Synthetic oligonucleotide
  Sense strand starting at position 3817 SEQ ID NO: 3050
agcugcaauuaguuaucaa

SEQ ID NO: 236927 - RNA, 19 nt, Artificial Sequence
  Description of Artificial Sequence: Synthetic oligonucleotide
  Antisense strand to SEQ ID NO: 236926
uugauaacuaauugcagcu

SEQ ID NO: 236928 - RNA, 19 nt, Artificial Sequence
  Description of Artificial Sequence: Synthetic oligonucleotide
  Sense strand starting at position 3916 SEQ ID NO: 3050
uucucugaguuucuuauga

SEQ ID NO: 236929 - RNA, 19 nt, Artificial Sequence
  Description of Artificial Sequence: Synthetic oligonucleotide
  Antisense strand to SEQ ID NO: 236928
ucauaagaaacucagagaa

SEQ ID NO: 236930 - RNA, 19 nt, Artificial Sequence
  Description of Artificial Sequence: Synthetic oligonucleotide
  Sense strand starting at position 3957 SEQ ID NO: 3050
guuuaaaggcuuuauaguu

SEQ ID NO: 236931 - RNA, 19 nt, Artificial Sequence
  Description of Artificial Sequence: Synthetic oligonucleotide
  Antisense strand to SEQ ID NO: 236930
aacuauaaagccuuuaaac

SEQ ID NO: 236932 - RNA, 19 nt, Artificial Sequence
  Description of Artificial Sequence: Synthetic oligonucleotide
  Sense strand starting at position 229 SEQ ID NO: 3051
uagugagacuccuuuagaa

SEQ ID NO: 236933 - RNA, 19 nt, Artificial Sequence
  Description of Artificial Sequence: Synthetic oligonucleotide
  Antisense strand to SEQ ID NO: 236932
uucuaaaggagucucacua

SEQ ID NO: 236934 - RNA, 19 nt, Artificial Sequence
  Description of Artificial Sequence: Synthetic oligonucleotide
  Sense strand starting at position 825 SEQ ID NO: 3051
accaaauuguuuguguaag

SEQ ID NO: 236935 - RNA, 19 nt, Artificial Sequence
  Description of Artificial Sequence: Synthetic oligonucleotide
  Antisense strand to SEQ ID NO: 236934
cuuacacaaacaauuuggu

SEQ ID NO: 236936 - RNA, 19 nt, Artificial Sequence
  Description of Artificial Sequence: Synthetic oligonucleotide
  Sense strand starting at position 874 SEQ ID NO: 3051
gucacaagucaauauucca

SEQ ID NO: 236937 - RNA, 19 nt, Artificial Sequence
  Description of Artificial Sequence: Synthetic oligonucleotide
  Antisense strand to SEQ ID NO: 236936
uggaauauugacuugugac

SEQ ID NO: 236938 - RNA, 19 nt, Artificial Sequence
  Description of Artificial Sequence: Synthetic oligonucleotide
  Sense strand starting at position 1010 SEQ ID NO: 3051
cucuguuccuaguuaggaa

SEQ ID NO: 236939 - RNA, 19 nt, Artificial Sequence
  Description of Artificial Sequence: Synthetic oligonucleotide
  Antisense strand to SEQ ID NO: 236938
uuccuaacuaggaacagag

SEQ ID NO: 236940 - RNA, 19 nt, Artificial Sequence
  Description of Artificial Sequence: Synthetic oligonucleotide
  Sense strand starting at position 1068 SEQ ID NO: 3051
caagaacuccugugugcaa

SEQ ID NO: 236941 - RNA, 19 nt, Artificial Sequence
  Description of Artificial Sequence: Synthetic oligonucleotide
  Antisense strand to SEQ ID NO: 236940
uugcacacaggaguucuug

SEQ ID NO: 236942 - RNA, 19 nt, Artificial Sequence
  Description of Artificial Sequence: Synthetic oligonucleotide
  Sense strand starting at position 1069 SEQ ID NO: 3051
aagaacuccugugugcaau

SEQ ID NO: 236943 - RNA, 19 nt, Artificial Sequence
  Description of Artificial Sequence: Synthetic oligonucleotide
  Antisense strand to SEQ ID NO: 236942
auugcacacaggaguucuu

SEQ ID NO: 236944 - RNA, 19 nt, Artificial Sequence
  Description of Artificial Sequence: Synthetic oligonucleotide
  Sense strand starting at position 1099 SEQ ID NO: 3051
cacugagugggcgacaaua

SEQ ID NO: 236945 - RNA, 19 nt, Artificial Sequence
  Description of Artificial Sequence: Synthetic oligonucleotide
  Antisense strand to SEQ ID NO: 236944
uauugucgcccacucagug

SEQ ID NO: 236946 - RNA, 19 nt, Artificial Sequence
  Description of Artificial Sequence: Synthetic oligonucleotide
  Sense strand starting at position 1110 SEQ ID NO: 3051
cgacaauaagagugccuau

SEQ ID NO: 236947 - RNA, 19 nt, Artificial Sequence
  Description of Artificial Sequence: Synthetic oligonucleotide
  Antisense strand to SEQ ID NO: 236946
auaggcacucuuauugucg

SEQ ID NO: 236948 - RNA, 19 nt, Artificial Sequence
  Description of Artificial Sequence: Synthetic oligonucleotide
  Sense strand starting at position 1139 SEQ ID NO: 3051
acauuuagugucuguacua

SEQ ID NO: 236949 - RNA, 19 nt, Artificial Sequence
  Description of Artificial Sequence: Synthetic oligonucleotide
  Antisense strand to SEQ ID NO: 236948
uaguacagacacuaaaugu

SEQ ID NO: 236950 - RNA, 19 nt, Artificial Sequence
  Description of Artificial Sequence: Synthetic oligonucleotide
  Sense strand starting at position 2184 SEQ ID NO: 3051
ggcguagacguaguguuaa

SEQ ID NO: 236951 - RNA, 19 nt, Artificial Sequence
  Description of Artificial Sequence: Synthetic oligonucleotide
  Antisense strand to SEQ ID NO: 236950
uuaacacuacgucuacgcc

SEQ ID NO: 236952 - RNA, 19 nt, Artificial Sequence
  Description of Artificial Sequence: Synthetic oligonucleotide
  Sense strand starting at position 2249 SEQ ID NO: 3051
gucacucauuguuucuaca

SEQ ID NO: 236953 - RNA, 19 nt, Artificial Sequence
  Description of Artificial Sequence: Synthetic oligonucleotide
  Antisense strand to SEQ ID NO: 236952
uguagaaacaaugagugac

SEQ ID NO: 236954 - RNA, 19 nt, Artificial Sequence
  Description of Artificial Sequence: Synthetic oligonucleotide
  Sense strand starting at position 2325 SEQ ID NO: 3051
gaagcuauuuggucuccuu

SEQ ID NO: 236955 - RNA, 19 nt, Artificial Sequence
  Description of Artificial Sequence: Synthetic oligonucleotide
  Antisense strand to SEQ ID NO: 236954
aaggagaccaaauagcuuc

SEQ ID NO: 236956 - RNA, 19 nt, Artificial Sequence
  Description of Artificial Sequence: Synthetic oligonucleotide
  Sense strand starting at position 2421 SEQ ID NO: 3051
ggcgauaugcuggauuccu

SEQ ID NO: 236957 - RNA, 19 nt, Artificial Sequence
  Description of Artificial Sequence: Synthetic oligonucleotide
  Antisense strand to SEQ ID NO: 236956
aggaauccagcauaucgcc

SEQ ID NO: 236958 - RNA, 19 nt, Artificial Sequence
  Description of Artificial Sequence: Synthetic oligonucleotide
  Sense strand starting at position 2466 SEQ ID NO: 3051
ugcuguagacgugaaugga

SEQ ID NO: 236959 - RNA, 19 nt, Artificial Sequence
  Description of Artificial Sequence: Synthetic oligonucleotide
  Antisense strand to SEQ ID NO: 236958
uccauucacgucuacagca

SEQ ID NO: 236960 - RNA, 19 nt, Artificial Sequence
  Description of Artificial Sequence: Synthetic oligonucleotide
  Sense strand starting at position 2479 SEQ ID NO: 3051
aauggaacccguuaaguua

SEQ ID NO: 236961 - RNA, 19 nt, Artificial Sequence
  Description of Artificial Sequence: Synthetic oligonucleotide
  Antisense strand to SEQ ID NO: 236960
uaacuuaacggguuccauu

SEQ ID NO: 236962 - RNA, 19 nt, Artificial Sequence
  Description of Artificial Sequence: Synthetic oligonucleotide
  Sense strand starting at position 2755 SEQ ID NO: 3051
cgaccacuagcuugaaauu

SEQ ID NO: 236963 - RNA, 19 nt, Artificial Sequence
  Description of Artificial Sequence: Synthetic oligonucleotide
  Antisense strand to SEQ ID NO: 236962
aauuucaagcuaguggucg

SEQ ID NO: 236964 - RNA, 19 nt, Artificial Sequence
  Description of Artificial Sequence: Synthetic oligonucleotide
  Sense strand starting at position 2810 SEQ ID NO: 3051
uuuauugagguguaaucaa

SEQ ID NO: 236965 - RNA, 19 nt, Artificial Sequence
  Description of Artificial Sequence: Synthetic oligonucleotide
  Antisense strand to SEQ ID NO: 236964
uugauuacaccucaauaaa

SEQ ID NO: 236966 - RNA, 19 nt, Artificial Sequence
  Description of Artificial Sequence: Synthetic oligonucleotide
  Sense strand starting at position 2915 SEQ ID NO: 3051
ggcaaucacugugcugaga

SEQ ID NO: 236967 - RNA, 19 nt, Artificial Sequence
  Description of Artificial Sequence: Synthetic oligonucleotide
  Antisense strand to SEQ ID NO: 236966
ucucagcacagugauugcc

SEQ ID NO: 236968 - RNA, 19 nt, Artificial Sequence
  Description of Artificial Sequence: Synthetic oligonucleotide
  Sense strand starting at position 2939 SEQ ID NO: 3051
guauaucauguccaugcau

SEQ ID NO: 236969 - RNA, 19 nt, Artificial Sequence
  Description of Artificial Sequence: Synthetic oligonucleotide
  Antisense strand to SEQ ID NO: 236968
augcauggacaugauauac

SEQ ID NO: 236970 - RNA, 19 nt, Artificial Sequence
  Description of Artificial Sequence: Synthetic oligonucleotide
  Sense strand starting at position 2950 SEQ ID NO: 3051
ccaugcauguccuuauaug

SEQ ID NO: 236971 - RNA, 19 nt, Artificial Sequence
  Description of Artificial Sequence: Synthetic oligonucleotide
  Antisense strand to SEQ ID NO: 236970
cauauaaggacaugcaugg

SEQ ID NO: 236972 - RNA, 19 nt, Artificial Sequence
  Description of Artificial Sequence: Synthetic oligonucleotide
  Sense strand starting at position 3090 SEQ ID NO: 3051
uuggucaaucgcuagauaa

SEQ ID NO: 236973 - RNA, 19 nt, Artificial Sequence
  Description of Artificial Sequence: Synthetic oligonucleotide
  Antisense strand to SEQ ID NO: 236972
uuaucuagcgauugaccaa

SEQ ID NO: 236974 - RNA, 19 nt, Artificial Sequence
  Description of Artificial Sequence: Synthetic oligonucleotide
  Sense strand starting at position 3092 SEQ ID NO: 3051
ggucaaucgcuagauaauu

SEQ ID NO: 236975 - RNA, 19 nt, Artificial Sequence
  Description of Artificial Sequence: Synthetic oligonucleotide
  Antisense strand to SEQ ID NO: 236974
aauuaucuagcgauugacc

SEQ ID NO: 236976 - RNA, 19 nt, Artificial Sequence
  Description of Artificial Sequence: Synthetic oligonucleotide
  Sense strand starting at position 3122 SEQ ID NO: 3051
uuguaugacugacccauau

SEQ ID NO: 236977 - RNA, 19 nt, Artificial Sequence
  Description of Artificial Sequence: Synthetic oligonucleotide
  Antisense strand to SEQ ID NO: 236976
auaugggucagucauacaa

SEQ ID NO: 236978 - RNA, 19 nt, Artificial Sequence
  Description of Artificial Sequence: Synthetic oligonucleotide
  Sense strand starting at position 3147 SEQ ID NO: 3051
uuacauuccuuagugagag

SEQ ID NO: 236979 - RNA, 19 nt, Artificial Sequence
  Description of Artificial Sequence: Synthetic oligonucleotide
  Antisense strand to SEQ ID NO: 236978
cucucacuaaggaauguaa

SEQ ID NO: 236980 - RNA, 19 nt, Artificial Sequence
  Description of Artificial Sequence: Synthetic oligonucleotide
  Sense strand starting at position 3153 SEQ ID NO: 3051
uccuuagugagagagguua

SEQ ID NO: 236981 - RNA, 19 nt, Artificial Sequence
  Description of Artificial Sequence: Synthetic oligonucleotide
  Antisense strand to SEQ ID NO: 236980
uaaccucucucacuaagga

SEQ ID NO: 236982 - RNA, 19 nt, Artificial Sequence
  Description of Artificial Sequence: Synthetic oligonucleotide
  Sense strand starting at position 3155 SEQ ID NO: 3051
cuuagugagagagguuauu

SEQ ID NO: 236983 - RNA, 19 nt, Artificial Sequence
  Description of Artificial Sequence: Synthetic oligonucleotide
  Antisense strand to SEQ ID NO: 236982
aauaaccucucucacuaag

SEQ ID NO: 236984 - RNA, 19 nt, Artificial Sequence
  Description of Artificial Sequence: Synthetic oligonucleotide
  Sense strand starting at position 3164 SEQ ID NO: 3051
agagguuauuucuacuuua

SEQ ID NO: 236985 - RNA, 19 nt, Artificial Sequence
  Description of Artificial Sequence: Synthetic oligonucleotide
  Antisense strand to SEQ ID NO: 236984
uaaaguagaaauaaccucu

SEQ ID NO: 236986 - RNA, 19 nt, Artificial Sequence
  Description of Artificial Sequence: Synthetic oligonucleotide
  Sense strand starting at position 3245 SEQ ID NO: 3051
gugaauuugcugcgaaauc

SEQ ID NO: 236987 - RNA, 19 nt, Artificial Sequence
  Description of Artificial Sequence: Synthetic oligonucleotide
  Antisense strand to SEQ ID NO: 236986
gauuucgcagcaaauucac

SEQ ID NO: 236988 - RNA, 19 nt, Artificial Sequence
  Description of Artificial Sequence: Synthetic oligonucleotide
  Sense strand starting at position 3254 SEQ ID NO: 3051
cugcgaaaucugcaacuuu

SEQ ID NO: 236989 - RNA, 19 nt, Artificial Sequence
  Description of Artificial Sequence: Synthetic oligonucleotide
  Antisense strand to SEQ ID NO: 236988
aaaguugcagauuucgcag

SEQ ID NO: 236990 - RNA, 19 nt, Artificial Sequence
  Description of Artificial Sequence: Synthetic oligonucleotide
  Sense strand starting at position 3287 SEQ ID NO: 3051
aauugcucucuggguugau

SEQ ID NO: 236991 - RNA, 19 nt, Artificial Sequence
  Description of Artificial Sequence: Synthetic oligonucleotide
  Antisense strand to SEQ ID NO: 236990
aucaacccagagagcaauu

SEQ ID NO: 236992 - RNA, 19 nt, Artificial Sequence
  Description of Artificial Sequence: Synthetic oligonucleotide
  Sense strand starting at position 3299 SEQ ID NO: 3051
gguugauugcaucaaggua

SEQ ID NO: 236993 - RNA, 19 nt, Artificial Sequence
  Description of Artificial Sequence: Synthetic oligonucleotide
  Antisense strand to SEQ ID NO: 236992
uaccuugaugcaaucaacc

SEQ ID NO: 236994 - RNA, 19 nt, Artificial Sequence
  Description of Artificial Sequence: Synthetic oligonucleotide
  Sense strand starting at position 3307 SEQ ID NO: 3051
gcaucaagguaccaauuua

SEQ ID NO: 236995 - RNA, 19 nt, Artificial Sequence
  Description of Artificial Sequence: Synthetic oligonucleotide
  Antisense strand to SEQ ID NO: 236994
uaaauugguaccuugaugc

SEQ ID NO: 236996 - RNA, 19 nt, Artificial Sequence
  Description of Artificial Sequence: Synthetic oligonucleotide
  Sense strand starting at position 3444 SEQ ID NO: 3051
ggagaauaauggcugcaga

SEQ ID NO: 236997 - RNA, 19 nt, Artificial Sequence
  Description of Artificial Sequence: Synthetic oligonucleotide
  Antisense strand to SEQ ID NO: 236996
ucugcagccauuauucucc

SEQ ID NO: 236998 - RNA, 19 nt, Artificial Sequence
  Description of Artificial Sequence: Synthetic oligonucleotide
  Sense strand starting at position 3461 SEQ ID NO: 3051
gagggaucagcuugcauac

SEQ ID NO: 236999 - RNA, 19 nt, Artificial Sequence
  Description of Artificial Sequence: Synthetic oligonucleotide
  Antisense strand to SEQ ID NO: 236998
guaugcaagcugaucccuc

SEQ ID NO: 237000 - RNA, 19 nt, Artificial Sequence
  Description of Artificial Sequence: Synthetic oligonucleotide
  Sense strand starting at position 3508 SEQ ID NO: 3051
agguguuucccauggagca

SEQ ID NO: 237001 - RNA, 19 nt, Artificial Sequence
  Description of Artificial Sequence: Synthetic oligonucleotide
  Antisense strand to SEQ ID NO: 237000
ugcuccaugggaaacaccu

SEQ ID NO: 237002 - RNA, 19 nt, Artificial Sequence
  Description of Artificial Sequence: Synthetic oligonucleotide
  Sense strand starting at position 3510 SEQ ID NO: 3051
guguuucccauggagcaga

SEQ ID NO: 237003 - RNA, 19 nt, Artificial Sequence
  Description of Artificial Sequence: Synthetic oligonucleotide
  Antisense strand to SEQ ID NO: 237002
ucugcuccaugggaaacac

SEQ ID NO: 237004 - RNA, 19 nt, Artificial Sequence
  Description of Artificial Sequence: Synthetic oligonucleotide
  Sense strand starting at position 3645 SEQ ID NO: 3051
acacauuugccuugccaga

SEQ ID NO: 237005 - RNA, 19 nt, Artificial Sequence
  Description of Artificial Sequence: Synthetic oligonucleotide
  Antisense strand to SEQ ID NO: 237004
ucuggcaaggcaaaugugu

SEQ ID NO: 237006 - RNA, 19 nt, Artificial Sequence
  Description of Artificial Sequence: Synthetic oligonucleotide
  Sense strand starting at position 3681 SEQ ID NO: 3051
gcgugaugagguugacaaa

SEQ ID NO: 237007 - RNA, 19 nt, Artificial Sequence
  Description of Artificial Sequence: Synthetic oligonucleotide
  Antisense strand to SEQ ID NO: 237006
uuugucaaccucaucacgc

SEQ ID NO: 237008 - RNA, 19 nt, Artificial Sequence
  Description of Artificial Sequence: Synthetic oligonucleotide
  Sense strand starting at position 3774 SEQ ID NO: 3051
agcaaugacagucagguaa

SEQ ID NO: 237009 - RNA, 19 nt, Artificial Sequence
  Description of Artificial Sequence: Synthetic oligonucleotide
  Antisense strand to SEQ ID NO: 237008
uuaccugacugucauugcu

SEQ ID NO: 237010 - RNA, 19 nt, Artificial Sequence
  Description of Artificial Sequence: Synthetic oligonucleotide
  Sense strand starting at position 3977 SEQ ID NO: 3051
guaaaucaagcuugcaauu

SEQ ID NO: 237011 - RNA, 19 nt, Artificial Sequence
  Description of Artificial Sequence: Synthetic oligonucleotide
  Antisense strand to SEQ ID NO: 237010
aauugcaagcuugauuuac

SEQ ID NO: 237012 - RNA, 19 nt, Artificial Sequence
  Description of Artificial Sequence: Synthetic oligonucleotide
  Sense strand starting at position 68 SEQ ID NO: 3052
uugagaucagcaugaggua

SEQ ID NO: 237013 - RNA, 19 nt, Artificial Sequence
  Description of Artificial Sequence: Synthetic oligonucleotide
  Antisense strand to SEQ ID NO: 237012
uaccucaugcugaucucaa

SEQ ID NO: 237014 - RNA, 19 nt, Artificial Sequence
  Description of Artificial Sequence: Synthetic oligonucleotide
  Sense strand starting at position 82 SEQ ID NO: 3052
agguaaggguaccauuuau

SEQ ID NO: 237015 - RNA, 19 nt, Artificial Sequence
  Description of Artificial Sequence: Synthetic oligonucleotide
  Antisense strand to SEQ ID NO: 237014
auaaaugguacccuuaccu

SEQ ID NO: 237016 - RNA, 19 nt, Artificial Sequence
  Description of Artificial Sequence: Synthetic oligonucleotide
  Sense strand starting at position 156 SEQ ID NO: 3052
ccaacaagguaggucuaau

SEQ ID NO: 237017 - RNA, 19 nt, Artificial Sequence
  Description of Artificial Sequence: Synthetic oligonucleotide
  Antisense strand to SEQ ID NO: 237016
auuagaccuaccuuguugg

SEQ ID NO: 237018 - RNA, 19 nt, Artificial Sequence
  Description of Artificial Sequence: Synthetic oligonucleotide
  Sense strand starting at position 214 SEQ ID NO: 3052
ggguguguuauuuguugca

SEQ ID NO: 237019 - RNA, 19 nt, Artificial Sequence
  Description of Artificial Sequence: Synthetic oligonucleotide
  Antisense strand to SEQ ID NO: 237018
ugcaacaaauaacacaccc

SEQ ID NO: 237020 - RNA, 19 nt, Artificial Sequence
  Description of Artificial Sequence: Synthetic oligonucleotide
  Sense strand starting at position 308 SEQ ID NO: 3052
gcaacaaugugaucaagga

SEQ ID NO: 237021 - RNA, 19 nt, Artificial Sequence
  Description of Artificial Sequence: Synthetic oligonucleotide
  Antisense strand to SEQ ID NO: 237020
uccuugaucacauuguugc

SEQ ID NO: 237022 - RNA, 19 nt, Artificial Sequence
  Description of Artificial Sequence: Synthetic oligonucleotide
  Sense strand starting at position 326 SEQ ID NO: 3052
auaugaauuugugcuuggu

SEQ ID NO: 237023 - RNA, 19 nt, Artificial Sequence
  Description of Artificial Sequence: Synthetic oligonucleotide
  Antisense strand to SEQ ID NO: 237022
accaagcacaaauucauau

SEQ ID NO: 237024 - RNA, 19 nt, Artificial Sequence
  Description of Artificial Sequence: Synthetic oligonucleotide
  Sense strand starting at position 328 SEQ ID NO: 3052
augaauuugugcuugguua

SEQ ID NO: 237025 - RNA, 19 nt, Artificial Sequence
  Description of Artificial Sequence: Synthetic oligonucleotide
  Antisense strand to SEQ ID NO: 237024
uaaccaagcacaaauucau

SEQ ID NO: 237026 - RNA, 19 nt, Artificial Sequence
  Description of Artificial Sequence: Synthetic oligonucleotide
  Sense strand starting at position 329 SEQ ID NO: 3052
ugaauuugugcuugguuau

SEQ ID NO: 237027 - RNA, 19 nt, Artificial Sequence
  Description of Artificial Sequence: Synthetic oligonucleotide
  Antisense strand to SEQ ID NO: 237026
auaaccaagcacaaauuca

SEQ ID NO: 237028 - RNA, 19 nt, Artificial Sequence
  Description of Artificial Sequence: Synthetic oligonucleotide
  Sense strand starting at position 330 SEQ ID NO: 3052
gaauuugugcuugguuauc

SEQ ID NO: 237029 - RNA, 19 nt, Artificial Sequence
  Description of Artificial Sequence: Synthetic oligonucleotide
  Antisense strand to SEQ ID NO: 237028
gauaaccaagcacaaauuc

SEQ ID NO: 237030 - RNA, 19 nt, Artificial Sequence
  Description of Artificial Sequence: Synthetic oligonucleotide
  Sense strand starting at position 332 SEQ ID NO: 3052
auuugugcuugguuaucau

SEQ ID NO: 237031 - RNA, 19 nt, Artificial Sequence
  Description of Artificial Sequence: Synthetic oligonucleotide
  Antisense strand to SEQ ID NO: 237030
augauaaccaagcacaaau

SEQ ID NO: 237032 - RNA, 19 nt, Artificial Sequence
  Description of Artificial Sequence: Synthetic oligonucleotide
  Sense strand starting at position 339 SEQ ID NO: 3052
cuugguuaucauuaagagu

SEQ ID NO: 237033 - RNA, 19 nt, Artificial Sequence
  Description of Artificial Sequence: Synthetic oligonucleotide
  Antisense strand to SEQ ID NO: 237032
acucuuaaugauaaccaag

SEQ ID NO: 237034 - RNA, 19 nt, Artificial Sequence
  Description of Artificial Sequence: Synthetic oligonucleotide
  Sense strand starting at position 382 SEQ ID NO: 3052
cuccaagauccuugccuga

SEQ ID NO: 237035 - RNA, 19 nt, Artificial Sequence
  Description of Artificial Sequence: Synthetic oligonucleotide
  Antisense strand to SEQ ID NO: 237034
ucaggcaaggaucuuggag

SEQ ID NO: 237036 - RNA, 19 nt, Artificial Sequence
  Description of Artificial Sequence: Synthetic oligonucleotide
  Sense strand starting at position 384 SEQ ID NO: 3052
ccaagauccuugccugauc

SEQ ID NO: 237037 - RNA, 19 nt, Artificial Sequence
  Description of Artificial Sequence: Synthetic oligonucleotide
  Antisense strand to SEQ ID NO: 237036
gaucaggcaaggaucuugg

SEQ ID NO: 237038 - RNA, 19 nt, Artificial Sequence
  Description of Artificial Sequence: Synthetic oligonucleotide
  Sense strand starting at position 387 SEQ ID NO: 3052
agauccuugccugaucuca

SEQ ID NO: 237039 - RNA, 19 nt, Artificial Sequence
  Description of Artificial Sequence: Synthetic oligonucleotide
  Antisense strand to SEQ ID NO: 237038
ugagaucaggcaaggaucu

SEQ ID NO: 237040 - RNA, 19 nt, Artificial Sequence
  Description of Artificial Sequence: Synthetic oligonucleotide
  Sense strand starting at position 428 SEQ ID NO: 3052
agugaaaucugagcaggaa

SEQ ID NO: 237041 - RNA, 19 nt, Artificial Sequence
  Description of Artificial Sequence: Synthetic oligonucleotide
  Antisense strand to SEQ ID NO: 237040
uuccugcucagauuucacu

SEQ ID NO: 237042 - RNA, 19 nt, Artificial Sequence
  Description of Artificial Sequence: Synthetic oligonucleotide
  Sense strand starting at position 522 SEQ ID NO: 3052
cauugucaucugugaauga

SEQ ID NO: 237043 - RNA, 19 nt, Artificial Sequence
  Description of Artificial Sequence: Synthetic oligonucleotide
  Antisense strand to SEQ ID NO: 237042
ucauucacagaugacaaug

SEQ ID NO: 237044 - RNA, 19 nt, Artificial Sequence
  Description of Artificial Sequence: Synthetic oligonucleotide
  Sense strand starting at position 526 SEQ ID NO: 3052
gucaucugugaaugauggu

SEQ ID NO: 237045 - RNA, 19 nt, Artificial Sequence
  Description of Artificial Sequence: Synthetic oligonucleotide
  Antisense strand to SEQ ID NO: 237044
accaucauucacagaugac

SEQ ID NO: 237046 - RNA, 19 nt, Artificial Sequence
  Description of Artificial Sequence: Synthetic oligonucleotide
  Sense strand starting at position 535 SEQ ID NO: 3052
gaaugaugguccuuggagu

SEQ ID NO: 237047 - RNA, 19 nt, Artificial Sequence
  Description of Artificial Sequence: Synthetic oligonucleotide
  Antisense strand to SEQ ID NO: 237046
acuccaaggaccaucauuc

SEQ ID NO: 237048 - RNA, 19 nt, Artificial Sequence
  Description of Artificial Sequence: Synthetic oligonucleotide
  Sense strand starting at position 536 SEQ ID NO: 3052
aaugaugguccuuggaguu

SEQ ID NO: 237049 - RNA, 19 nt, Artificial Sequence
  Description of Artificial Sequence: Synthetic oligonucleotide
  Antisense strand to SEQ ID NO: 237048
aacuccaaggaccaucauu

SEQ ID NO: 237050 - RNA, 19 nt, Artificial Sequence
  Description of Artificial Sequence: Synthetic oligonucleotide
  Sense strand starting at position 549 SEQ ID NO: 3052
ggaguuaugccugguggga

SEQ ID NO: 237051 - RNA, 19 nt, Artificial Sequence
  Description of Artificial Sequence: Synthetic oligonucleotide
  Antisense strand to SEQ ID NO: 237050
ucccaccaggcauaacucc

SEQ ID NO: 237052 - RNA, 19 nt, Artificial Sequence
  Description of Artificial Sequence: Synthetic oligonucleotide
  Sense strand starting at position 562 SEQ ID NO: 3052
gugggaagaguucaugguu

SEQ ID NO: 237053 - RNA, 19 nt, Artificial Sequence
  Description of Artificial Sequence: Synthetic oligonucleotide
  Antisense strand to SEQ ID NO: 237052
aaccaugaacucuucccac

SEQ ID NO: 237054 - RNA, 19 nt, Artificial Sequence
  Description of Artificial Sequence: Synthetic oligonucleotide
  Sense strand starting at position 568 SEQ ID NO: 3052
agaguucaugguugggaaa

SEQ ID NO: 237055 - RNA, 19 nt, Artificial Sequence
  Description of Artificial Sequence: Synthetic oligonucleotide
  Antisense strand to SEQ ID NO: 237054
uuucccaaccaugaacucu

SEQ ID NO: 237056 - RNA, 19 nt, Artificial Sequence
  Description of Artificial Sequence: Synthetic oligonucleotide
  Sense strand starting at position 987 SEQ ID NO: 3052
gcccucucccaagauguaa

SEQ ID NO: 237057 - RNA, 19 nt, Artificial Sequence
  Description of Artificial Sequence: Synthetic oligonucleotide
  Antisense strand to SEQ ID NO: 237056
uuacaucuugggagagggc

SEQ ID NO: 237058 - RNA, 19 nt, Artificial Sequence
  Description of Artificial Sequence: Synthetic oligonucleotide
  Sense strand starting at position 1348 SEQ ID NO: 3052
ggcagagacucccuucuca

SEQ ID NO: 237059 - RNA, 19 nt, Artificial Sequence
  Description of Artificial Sequence: Synthetic oligonucleotide
  Antisense strand to SEQ ID NO: 237058
ugagaagggagucucugcc

SEQ ID NO: 237060 - RNA, 19 nt, Artificial Sequence
  Description of Artificial Sequence: Synthetic oligonucleotide
  Sense strand starting at position 1477 SEQ ID NO: 3052
cugagugagccucagauau

SEQ ID NO: 237061 - RNA, 19 nt, Artificial Sequence
  Description of Artificial Sequence: Synthetic oligonucleotide
  Antisense strand to SEQ ID NO: 237060
auaucugaggcucacucag

SEQ ID NO: 237062 - RNA, 19 nt, Artificial Sequence
  Description of Artificial Sequence: Synthetic oligonucleotide
  Sense strand starting at position 1501 SEQ ID NO: 3052
uuaaauccugaacguaauc

SEQ ID NO: 237063 - RNA, 19 nt, Artificial Sequence
  Description of Artificial Sequence: Synthetic oligonucleotide
  Antisense strand to SEQ ID NO: 237062
gauuacguucaggauuuaa

SEQ ID NO: 237064 - RNA, 19 nt, Artificial Sequence
  Description of Artificial Sequence: Synthetic oligonucleotide
  Sense strand starting at position 1540 SEQ ID NO: 3052
ugaucugaauuugaagaac

SEQ ID NO: 237065 - RNA, 19 nt, Artificial Sequence
  Description of Artificial Sequence: Synthetic oligonucleotide
  Antisense strand to SEQ ID NO: 237064
guucuucaaauucagauca

SEQ ID NO: 237066 - RNA, 19 nt, Artificial Sequence
  Description of Artificial Sequence: Synthetic oligonucleotide
  Sense strand starting at position 1607 SEQ ID NO: 3052
cuaaccucuguauguugaa

SEQ ID NO: 237067 - RNA, 19 nt, Artificial Sequence
  Description of Artificial Sequence: Synthetic oligonucleotide
  Antisense strand to SEQ ID NO: 237066
uucaacauacagagguuag

SEQ ID NO: 237068 - RNA, 19 nt, Artificial Sequence
  Description of Artificial Sequence: Synthetic oligonucleotide
  Sense strand starting at position 1993 SEQ ID NO: 3052
ucgcaagucgcgagaacuc

SEQ ID NO: 237069 - RNA, 19 nt, Artificial Sequence
  Description of Artificial Sequence: Synthetic oligonucleotide
  Antisense strand to SEQ ID NO: 237068
gaguucucgcgacuugcga

SEQ ID NO: 237070 - RNA, 19 nt, Artificial Sequence
  Description of Artificial Sequence: Synthetic oligonucleotide
  Sense strand starting at position 2029 SEQ ID NO: 3052
ggaauuguagucugacccu

SEQ ID NO: 237071 - RNA, 19 nt, Artificial Sequence
  Description of Artificial Sequence: Synthetic oligonucleotide
  Antisense strand to SEQ ID NO: 237070
agggucagacuacaauucc

SEQ ID NO: 237072 - RNA, 19 nt, Artificial Sequence
  Description of Artificial Sequence: Synthetic oligonucleotide
  Sense strand starting at position 2032 SEQ ID NO: 3052
auuguagucugacccuuua

SEQ ID NO: 237073 - RNA, 19 nt, Artificial Sequence
  Description of Artificial Sequence: Synthetic oligonucleotide
  Antisense strand to SEQ ID NO: 237072
uaaagggucagacuacaau

SEQ ID NO: 237074 - RNA, 19 nt, Artificial Sequence
  Description of Artificial Sequence: Synthetic oligonucleotide
  Sense strand starting at position 2054 SEQ ID NO: 3052
gcuuucuaacuuuauggga

SEQ ID NO: 237075 - RNA, 19 nt, Artificial Sequence
  Description of Artificial Sequence: Synthetic oligonucleotide
  Antisense strand to SEQ ID NO: 237074
ucccauaaaguuagaaagc

SEQ ID NO: 237076 - RNA, 19 nt, Artificial Sequence
  Description of Artificial Sequence: Synthetic oligonucleotide
  Sense strand starting at position 2411 SEQ ID NO: 3052
gggcaacucuuaucaguuu

SEQ ID NO: 237077 - RNA, 19 nt, Artificial Sequence
  Description of Artificial Sequence: Synthetic oligonucleotide
  Antisense strand to SEQ ID NO: 237076
aaacugauaagaguugccc

SEQ ID NO: 237078 - RNA, 19 nt, Artificial Sequence
  Description of Artificial Sequence: Synthetic oligonucleotide
  Sense strand starting at position 2424 SEQ ID NO: 3052
caguuugacugucugaaau

SEQ ID NO: 237079 - RNA, 19 nt, Artificial Sequence
  Description of Artificial Sequence: Synthetic oligonucleotide
  Antisense strand to SEQ ID NO: 237078
auuucagacagucaaacug

SEQ ID NO: 237080 - RNA, 19 nt, Artificial Sequence
  Description of Artificial Sequence: Synthetic oligonucleotide
  Sense strand starting at position 2931 SEQ ID NO: 3052
gccagauuucugggcucag

SEQ ID NO: 237081 - RNA, 19 nt, Artificial Sequence
  Description of Artificial Sequence: Synthetic oligonucleotide
  Antisense strand to SEQ ID NO: 237080
cugagcccagaaaucuggc

SEQ ID NO: 237082 - RNA, 19 nt, Artificial Sequence
  Description of Artificial Sequence: Synthetic oligonucleotide
  Sense strand starting at position 3215 SEQ ID NO: 3052
gcuaauacccggcacuaaa

SEQ ID NO: 237083 - RNA, 19 nt, Artificial Sequence
  Description of Artificial Sequence: Synthetic oligonucleotide
  Antisense strand to SEQ ID NO: 237082
uuuagugccggguauuagc

SEQ ID NO: 237084 - RNA, 19 nt, Artificial Sequence
  Description of Artificial Sequence: Synthetic oligonucleotide
  Sense strand starting at position 3254 SEQ ID NO: 3052
cagugugacguugagcaaa

SEQ ID NO: 237085 - RNA, 19 nt, Artificial Sequence
  Description of Artificial Sequence: Synthetic oligonucleotide
  Antisense strand to SEQ ID NO: 237084
uuugcucaacgucacacug

SEQ ID NO: 237086 - RNA, 19 nt, Artificial Sequence
  Description of Artificial Sequence: Synthetic oligonucleotide
  Sense strand starting at position 3301 SEQ ID NO: 3052
ggcuguuaaagggacuuau

SEQ ID NO: 237087 - RNA, 19 nt, Artificial Sequence
  Description of Artificial Sequence: Synthetic oligonucleotide
  Antisense strand to SEQ ID NO: 237086
auaagucccuuuaacagcc

SEQ ID NO: 237088 - RNA, 19 nt, Artificial Sequence
  Description of Artificial Sequence: Synthetic oligonucleotide
  Sense strand starting at position 3311 SEQ ID NO: 3052
gggacuuaucccugccucu

SEQ ID NO: 237089 - RNA, 19 nt, Artificial Sequence
  Description of Artificial Sequence: Synthetic oligonucleotide
  Antisense strand to SEQ ID NO: 237088
agaggcagggauaaguccc

SEQ ID NO: 237090 - RNA, 19 nt, Artificial Sequence
  Description of Artificial Sequence: Synthetic oligonucleotide
  Sense strand starting at position 3361 SEQ ID NO: 3052
agagauaaggcgggcgaaa

SEQ ID NO: 237091 - RNA, 19 nt, Artificial Sequence
  Description of Artificial Sequence: Synthetic oligonucleotide
  Antisense strand to SEQ ID NO: 237090
uuucgcccgccuuaucucu

SEQ ID NO: 237092 - RNA, 19 nt, Artificial Sequence
  Description of Artificial Sequence: Synthetic oligonucleotide
  Sense strand starting at position 98 SEQ ID NO: 3053
uugagaucagcaugaggua

SEQ ID NO: 237093 - RNA, 19 nt, Artificial Sequence
  Description of Artificial Sequence: Synthetic oligonucleotide
  Antisense strand to SEQ ID NO: 237092
uaccucaugcugaucucaa

SEQ ID NO: 237094 - RNA, 19 nt, Artificial Sequence
  Description of Artificial Sequence: Synthetic oligonucleotide
  Sense strand starting at position 112 SEQ ID NO: 3053
agguaaggguaccauuuau

SEQ ID NO: 237095 - RNA, 19 nt, Artificial Sequence
  Description of Artificial Sequence: Synthetic oligonucleotide
  Antisense strand to SEQ ID NO: 237094
auaaaugguacccuuaccu

SEQ ID NO: 237096 - RNA, 19 nt, Artificial Sequence
  Description of Artificial Sequence: Synthetic oligonucleotide
  Sense strand starting at position 186 SEQ ID NO: 3053
ccaacaagguaggucuaau

SEQ ID NO: 237097 - RNA, 19 nt, Artificial Sequence
  Description of Artificial Sequence: Synthetic oligonucleotide
  Antisense strand to SEQ ID NO: 237096
auuagaccuaccuuguugg

SEQ ID NO: 237098 - RNA, 19 nt, Artificial Sequence
  Description of Artificial Sequence: Synthetic oligonucleotide
  Sense strand starting at position 244 SEQ ID NO: 3053
ggguguguuauuuguugca

SEQ ID NO: 237099 - RNA, 19 nt, Artificial Sequence
  Description of Artificial Sequence: Synthetic oligonucleotide
  Antisense strand to SEQ ID NO: 237098
ugcaacaaauaacacaccc

SEQ ID NO: 237100 - RNA, 19 nt, Artificial Sequence
  Description of Artificial Sequence: Synthetic oligonucleotide
  Sense strand starting at position 338 SEQ ID NO: 3053
gcaacaaugugaucaagga

SEQ ID NO: 237101 - RNA, 19 nt, Artificial Sequence
  Description of Artificial Sequence: Synthetic oligonucleotide
  Antisense strand to SEQ ID NO: 237100
uccuugaucacauuguugc

SEQ ID NO: 237102 - RNA, 19 nt, Artificial Sequence
  Description of Artificial Sequence: Synthetic oligonucleotide
  Sense strand starting at position 356 SEQ ID NO: 3053
auaugaauuugugcuuggu

SEQ ID NO: 237103 - RNA, 19 nt, Artificial Sequence
  Description of Artificial Sequence: Synthetic oligonucleotide
  Antisense strand to SEQ ID NO: 237102
accaagcacaaauucauau

SEQ ID NO: 237104 - RNA, 19 nt, Artificial Sequence
  Description of Artificial Sequence: Synthetic oligonucleotide
  Sense strand starting at position 358 SEQ ID NO: 3053
augaauuugugcuugguua

SEQ ID NO: 237105 - RNA, 19 nt, Artificial Sequence
  Description of Artificial Sequence: Synthetic oligonucleotide
  Antisense strand to SEQ ID NO: 237104
uaaccaagcacaaauucau

SEQ ID NO: 237106 - RNA, 19 nt, Artificial Sequence
  Description of Artificial Sequence: Synthetic oligonucleotide
  Sense strand starting at position 359 SEQ ID NO: 3053
ugaauuugugcuugguuau

SEQ ID NO: 237107 - RNA, 19 nt, Artificial Sequence
  Description of Artificial Sequence: Synthetic oligonucleotide
  Antisense strand to SEQ ID NO: 237106
auaaccaagcacaaauuca

SEQ ID NO: 237108 - RNA, 19 nt, Artificial Sequence
  Description of Artificial Sequence: Synthetic oligonucleotide
  Sense strand starting at position 360 SEQ ID NO: 3053
gaauuugugcuugguuauc

SEQ ID NO: 237109 - RNA, 19 nt, Artificial Sequence
  Description of Artificial Sequence: Synthetic oligonucleotide
  Antisense strand to SEQ ID NO: 237108
gauaaccaagcacaaauuc

SEQ ID NO: 237110 - RNA, 19 nt, Artificial Sequence
  Description of Artificial Sequence: Synthetic oligonucleotide
  Sense strand starting at position 362 SEQ ID NO: 3053
auuugugcuugguuaucau

SEQ ID NO: 237111 - RNA, 19 nt, Artificial Sequence
  Description of Artificial Sequence: Synthetic oligonucleotide
  Antisense strand to SEQ ID NO: 237110
augauaaccaagcacaaau

SEQ ID NO: 237112 - RNA, 19 nt, Artificial Sequence
  Description of Artificial Sequence: Synthetic oligonucleotide
  Sense strand starting at position 369 SEQ ID NO: 3053
cuugguuaucauuaagagu

SEQ ID NO: 237113 - RNA, 19 nt, Artificial Sequence
  Description of Artificial Sequence: Synthetic oligonucleotide
  Antisense strand to SEQ ID NO: 237112
acucuuaaugauaaccaag

SEQ ID NO: 237114 - RNA, 19 nt, Artificial Sequence
  Description of Artificial Sequence: Synthetic oligonucleotide
  Sense strand starting at position 412 SEQ ID NO: 3053
cuccaagauccuugccuga

SEQ ID NO: 237115 - RNA, 19 nt, Artificial Sequence
  Description of Artificial Sequence: Synthetic oligonucleotide
  Antisense strand to SEQ ID NO: 237114
ucaggcaaggaucuuggag

SEQ ID NO: 237116 - RNA, 19 nt, Artificial Sequence
  Description of Artificial Sequence: Synthetic oligonucleotide
  Sense strand starting at position 414 SEQ ID NO: 3053
ccaagauccuugccugauc

SEQ ID NO: 237117 - RNA, 19 nt, Artificial Sequence
  Description of Artificial Sequence: Synthetic oligonucleotide
  Antisense strand to SEQ ID NO: 237116
gaucaggcaaggaucuugg

SEQ ID NO: 237118 - RNA, 19 nt, Artificial Sequence
  Description of Artificial Sequence: Synthetic oligonucleotide
  Sense strand starting at position 417 SEQ ID NO: 3053
agauccuugccugaucuca

SEQ ID NO: 237119 - RNA, 19 nt, Artificial Sequence
  Description of Artificial Sequence: Synthetic oligonucleotide
  Antisense strand to SEQ ID NO: 237118
ugagaucaggcaaggaucu

SEQ ID NO: 237120 - RNA, 19 nt, Artificial Sequence
  Description of Artificial Sequence: Synthetic oligonucleotide
  Sense strand starting at position 458 SEQ ID NO: 3053
agugaaaucugagcaggaa

SEQ ID NO: 237121 - RNA, 19 nt, Artificial Sequence
  Description of Artificial Sequence: Synthetic oligonucleotide
  Antisense strand to SEQ ID NO: 237120
uuccugcucagauuucacu

SEQ ID NO: 237122 - RNA, 19 nt, Artificial Sequence
  Description of Artificial Sequence: Synthetic oligonucleotide
  Sense strand starting at position 552 SEQ ID NO: 3053
cauugucaucugugaauga

SEQ ID NO: 237123 - RNA, 19 nt, Artificial Sequence
  Description of Artificial Sequence: Synthetic oligonucleotide
  Antisense strand to SEQ ID NO: 237122
ucauucacagaugacaaug

SEQ ID NO: 237124 - RNA, 19 nt, Artificial Sequence
  Description of Artificial Sequence: Synthetic oligonucleotide
  Sense strand starting at position 556 SEQ ID NO: 3053
gucaucugugaaugauggu

SEQ ID NO: 237125 - RNA, 19 nt, Artificial Sequence
  Description of Artificial Sequence: Synthetic oligonucleotide
  Antisense strand to SEQ ID NO: 237124
accaucauucacagaugac

SEQ ID NO: 237126 - RNA, 19 nt, Artificial Sequence
  Description of Artificial Sequence: Synthetic oligonucleotide
  Sense strand starting at position 565 SEQ ID NO: 3053
gaaugaugguccuuggagu

SEQ ID NO: 237127 - RNA, 19 nt, Artificial Sequence
  Description of Artificial Sequence: Synthetic oligonucleotide
  Antisense strand to SEQ ID NO: 237126
acuccaaggaccaucauuc

SEQ ID NO: 237128 - RNA, 19 nt, Artificial Sequence
  Description of Artificial Sequence: Synthetic oligonucleotide
  Sense strand starting at position 566 SEQ ID NO: 3053
aaugaugguccuuggaguu

SEQ ID NO: 237129 - RNA, 19 nt, Artificial Sequence
  Description of Artificial Sequence: Synthetic oligonucleotide
  Antisense strand to SEQ ID NO: 237128
aacuccaaggaccaucauu

SEQ ID NO: 237130 - RNA, 19 nt, Artificial Sequence
  Description of Artificial Sequence: Synthetic oligonucleotide
  Sense strand starting at position 579 SEQ ID NO: 3053
ggaguuaugccugguggga

SEQ ID NO: 237131 - RNA, 19 nt, Artificial Sequence
  Description of Artificial Sequence: Synthetic oligonucleotide
  Antisense strand to SEQ ID NO: 237130
ucccaccaggcauaacucc

SEQ ID NO: 237132 - RNA, 19 nt, Artificial Sequence
  Description of Artificial Sequence: Synthetic oligonucleotide
  Sense strand starting at position 592 SEQ ID NO: 3053
gugggaagaguucaugguu

SEQ ID NO: 237133 - RNA, 19 nt, Artificial Sequence
  Description of Artificial Sequence: Synthetic oligonucleotide
  Antisense strand to SEQ ID NO: 237132
aaccaugaacucuucccac

SEQ ID NO: 237134 - RNA, 19 nt, Artificial Sequence
  Description of Artificial Sequence: Synthetic oligonucleotide
  Sense strand starting at position 598 SEQ ID NO: 3053
agaguucaugguugggaaa

SEQ ID NO: 237135 - RNA, 19 nt, Artificial Sequence
  Description of Artificial Sequence: Synthetic oligonucleotide
  Antisense strand to SEQ ID NO: 237134
uuucccaaccaugaacucu

SEQ ID NO: 237136 - RNA, 19 nt, Artificial Sequence
  Description of Artificial Sequence: Synthetic oligonucleotide
  Sense strand starting at position 1017 SEQ ID NO: 3053
gcccucucccaagauguaa

SEQ ID NO: 237137 - RNA, 19 nt, Artificial Sequence
  Description of Artificial Sequence: Synthetic oligonucleotide
  Antisense strand to SEQ ID NO: 237136
uuacaucuugggagagggc

SEQ ID NO: 237138 - RNA, 19 nt, Artificial Sequence
  Description of Artificial Sequence: Synthetic oligonucleotide
  Sense strand starting at position 1378 SEQ ID NO: 3053
ggcagagacucccuucuca

SEQ ID NO: 237139 - RNA, 19 nt, Artificial Sequence
  Description of Artificial Sequence: Synthetic oligonucleotide
  Antisense strand to SEQ ID NO: 237138
ugagaagggagucucugcc

SEQ ID NO: 237140 - RNA, 19 nt, Artificial Sequence
  Description of Artificial Sequence: Synthetic oligonucleotide
  Sense strand starting at position 1507 SEQ ID NO: 3053
cugagugagccucagauau

SEQ ID NO: 237141 - RNA, 19 nt, Artificial Sequence
  Description of Artificial Sequence: Synthetic oligonucleotide
  Antisense strand to SEQ ID NO: 237140
auaucugaggcucacucag

SEQ ID NO: 237142 - RNA, 19 nt, Artificial Sequence
  Description of Artificial Sequence: Synthetic oligonucleotide
  Sense strand starting at position 1531 SEQ ID NO: 3053
uuaaauccugaacguaauc

SEQ ID NO: 237143 - RNA, 19 nt, Artificial Sequence
  Description of Artificial Sequence: Synthetic oligonucleotide
  Antisense strand to SEQ ID NO: 237142
gauuacguucaggauuuaa

SEQ ID NO: 237144 - RNA, 19 nt, Artificial Sequence
  Description of Artificial Sequence: Synthetic oligonucleotide
  Sense strand starting at position 1570 SEQ ID NO: 3053
ugaucugaauuugaagaac

SEQ ID NO: 237145 - RNA, 19 nt, Artificial Sequence
  Description of Artificial Sequence: Synthetic oligonucleotide
  Antisense strand to SEQ ID NO: 237144
guucuucaaauucagauca

SEQ ID NO: 237146 - RNA, 19 nt, Artificial Sequence
  Description of Artificial Sequence: Synthetic oligonucleotide
  Sense strand starting at position 1637 SEQ ID NO: 3053
cuaaccucuguauguugaa

SEQ ID NO: 237147 - RNA, 19 nt, Artificial Sequence
  Description of Artificial Sequence: Synthetic oligonucleotide
  Antisense strand to SEQ ID NO: 237146
uucaacauacagagguuag

SEQ ID NO: 237148 - RNA, 19 nt, Artificial Sequence
  Description of Artificial Sequence: Synthetic oligonucleotide
  Sense strand starting at position 2023 SEQ ID NO: 3053
ucgcaagucgcgagaacuc

SEQ ID NO: 237149 - RNA, 19 nt, Artificial Sequence
  Description of Artificial Sequence: Synthetic oligonucleotide
  Antisense strand to SEQ ID NO: 237148
gaguucucgcgacuugcga

SEQ ID NO: 237150 - RNA, 19 nt, Artificial Sequence
  Description of Artificial Sequence: Synthetic oligonucleotide
  Sense strand starting at position 2059 SEQ ID NO: 3053
ggaauuguagucugacccu

SEQ ID NO: 237151 - RNA, 19 nt, Artificial Sequence
  Description of Artificial Sequence: Synthetic oligonucleotide
  Antisense strand to SEQ ID NO: 237150
agggucagacuacaauucc

SEQ ID NO: 237152 - RNA, 19 nt, Artificial Sequence
  Description of Artificial Sequence: Synthetic oligonucleotide
  Sense strand starting at position 2062 SEQ ID NO: 3053
auuguagucugacccuuua

SEQ ID NO: 237153 - RNA, 19 nt, Artificial Sequence
  Description of Artificial Sequence: Synthetic oligonucleotide
  Antisense strand to SEQ ID NO: 237152
uaaagggucagacuacaau

SEQ ID NO: 237154 - RNA, 19 nt, Artificial Sequence
  Description of Artificial Sequence: Synthetic oligonucleotide
  Sense strand starting at position 2084 SEQ ID NO: 3053
gcuuucuaacuuuauggga

SEQ ID NO: 237155 - RNA, 19 nt, Artificial Sequence
  Description of Artificial Sequence: Synthetic oligonucleotide
  Antisense strand to SEQ ID NO: 237154
ucccauaaaguuagaaagc

SEQ ID NO: 237156 - RNA, 19 nt, Artificial Sequence
  Description of Artificial Sequence: Synthetic oligonucleotide
  Sense strand starting at position 2441 SEQ ID NO: 3053
gggcaacucuuaucaguuu

SEQ ID NO: 237157 - RNA, 19 nt, Artificial Sequence
  Description of Artificial Sequence: Synthetic oligonucleotide
  Antisense strand to SEQ ID NO: 237156
aaacugauaagaguugccc

SEQ ID NO: 237158 - RNA, 19 nt, Artificial Sequence
  Description of Artificial Sequence: Synthetic oligonucleotide
  Sense strand starting at position 2454 SEQ ID NO: 3053
caguuugacugucugaaau

SEQ ID NO: 237159 - RNA, 19 nt, Artificial Sequence
  Description of Artificial Sequence: Synthetic oligonucleotide
  Antisense strand to SEQ ID NO: 237158
auuucagacagucaaacug

SEQ ID NO: 237160 - RNA, 19 nt, Artificial Sequence
  Description of Artificial Sequence: Synthetic oligonucleotide
  Sense strand starting at position 2961 SEQ ID NO: 3053
gccagauuucugggcucag

SEQ ID NO: 237161 - RNA, 19 nt, Artificial Sequence
  Description of Artificial Sequence: Synthetic oligonucleotide
  Antisense strand to SEQ ID NO: 237160
cugagcccagaaaucuggc

SEQ ID NO: 237162 - RNA, 19 nt, Artificial Sequence
  Description of Artificial Sequence: Synthetic oligonucleotide
  Sense strand starting at position 3245 SEQ ID NO: 3053
gcuaauacccggcacuaaa

SEQ ID NO: 237163 - RNA, 19 nt, Artificial Sequence
  Description of Artificial Sequence: Synthetic oligonucleotide
  Antisense strand to SEQ ID NO: 237162
uuuagugccggguauuagc

SEQ ID NO: 237164 - RNA, 19 nt, Artificial Sequence
  Description of Artificial Sequence: Synthetic oligonucleotide
  Sense strand starting at position 3284 SEQ ID NO: 3053
cagugugacguugagcaaa

SEQ ID NO: 237165 - RNA, 19 nt, Artificial Sequence
  Description of Artificial Sequence: Synthetic oligonucleotide
  Antisense strand to SEQ ID NO: 237164
uuugcucaacgucacacug

SEQ ID NO: 237166 - RNA, 19 nt, Artificial Sequence
  Description of Artificial Sequence: Synthetic oligonucleotide
  Sense strand starting at position 3331 SEQ ID NO: 3053
ggcuguuaaagggacuuau

SEQ ID NO: 237167 - RNA, 19 nt, Artificial Sequence
  Description of Artificial Sequence: Synthetic oligonucleotide
  Antisense strand to SEQ ID NO: 237166
auaagucccuuuaacagcc

SEQ ID NO: 237168 - RNA, 19 nt, Artificial Sequence
  Description of Artificial Sequence: Synthetic oligonucleotide
  Sense strand starting at position 3341 SEQ ID NO: 3053
gggacuuaucccugccucu

SEQ ID NO: 237169 - RNA, 19 nt, Artificial Sequence
  Description of Artificial Sequence: Synthetic oligonucleotide
  Antisense strand to SEQ ID NO: 237168
agaggcagggauaaguccc

SEQ ID NO: 237170 - RNA, 19 nt, Artificial Sequence
  Description of Artificial Sequence: Synthetic oligonucleotide
  Sense strand starting at position 3391 SEQ ID NO: 3053
agagauaaggcgggcgaaa

SEQ ID NO: 237171 - RNA, 19 nt, Artificial Sequence
  Description of Artificial Sequence: Synthetic oligonucleotide
  Antisense strand to SEQ ID NO: 237170
uuucgcccgccuuaucucu

SEQ ID NO: 237172 - RNA, 19 nt, Artificial Sequence
  Description of Artificial Sequence: Synthetic oligonucleotide
  Sense strand starting at position 16 SEQ ID NO: 3054
uacucugccgucugacuua

SEQ ID NO: 237173 - RNA, 19 nt, Artificial Sequence
  Description of Artificial Sequence: Synthetic oligonucleotide
  Antisense strand to SEQ ID NO: 237172
uaagucagacggcagagua

SEQ ID NO: 237174 - RNA, 19 nt, Artificial Sequence
  Description of Artificial Sequence: Synthetic oligonucleotide
  Sense strand starting at position 351 SEQ ID NO: 3054
cccuuaugauggucucuca

SEQ ID NO: 237175 - RNA, 19 nt, Artificial Sequence
  Description of Artificial Sequence: Synthetic oligonucleotide
  Antisense strand to SEQ ID NO: 237174
ugagagaccaucauaaggg

SEQ ID NO: 237176 - RNA, 19 nt, Artificial Sequence
  Description of Artificial Sequence: Synthetic oligonucleotide
  Sense strand starting at position 354 SEQ ID NO: 3054
uuaugauggucucucagac

SEQ ID NO: 237177 - RNA, 19 nt, Artificial Sequence
  Description of Artificial Sequence: Synthetic oligonucleotide
  Antisense strand to SEQ ID NO: 237176
gucugagagaccaucauaa

SEQ ID NO: 237178 - RNA, 19 nt, Artificial Sequence
  Description of Artificial Sequence: Synthetic oligonucleotide
  Sense strand starting at position 385 SEQ ID NO: 3054
cgugaaagugcccaggaaa

SEQ ID NO: 237179 - RNA, 19 nt, Artificial Sequence
  Description of Artificial Sequence: Synthetic oligonucleotide
  Antisense strand to SEQ ID NO: 237178
uuuccugggcacuuucacg

SEQ ID NO: 237180 - RNA, 19 nt, Artificial Sequence
  Description of Artificial Sequence: Synthetic oligonucleotide
  Sense strand starting at position 429 SEQ ID NO: 3054
gcaggaauguccgugaucu

SEQ ID NO: 237181 - RNA, 19 nt, Artificial Sequence
  Description of Artificial Sequence: Synthetic oligonucleotide
  Antisense strand to SEQ ID NO: 237180
agaucacggacauuccugc

SEQ ID NO: 237182 - RNA, 19 nt, Artificial Sequence
  Description of Artificial Sequence: Synthetic oligonucleotide
  Sense strand starting at position 430 SEQ ID NO: 3054
caggaauguccgugaucuc

SEQ ID NO: 237183 - RNA, 19 nt, Artificial Sequence
  Description of Artificial Sequence: Synthetic oligonucleotide
  Antisense strand to SEQ ID NO: 237182
gagaucacggacauuccug

SEQ ID NO: 237184 - RNA, 19 nt, Artificial Sequence
  Description of Artificial Sequence: Synthetic oligonucleotide
  Sense strand starting at position 431 SEQ ID NO: 3054
aggaauguccgugaucucu

SEQ ID NO: 237185 - RNA, 19 nt, Artificial Sequence
  Description of Artificial Sequence: Synthetic oligonucleotide
  Antisense strand to SEQ ID NO: 237184
agagaucacggacauuccu

SEQ ID NO: 237186 - RNA, 19 nt, Artificial Sequence
  Description of Artificial Sequence: Synthetic oligonucleotide
  Sense strand starting at position 680 SEQ ID NO: 3054
aggagucugccagauaccu

SEQ ID NO: 237187 - RNA, 19 nt, Artificial Sequence
  Description of Artificial Sequence: Synthetic oligonucleotide
  Antisense strand to SEQ ID NO: 237186
agguaucuggcagacuccu

SEQ ID NO: 237188 - RNA, 19 nt, Artificial Sequence
  Description of Artificial Sequence: Synthetic oligonucleotide
  Sense strand starting at position 730 SEQ ID NO: 3054
aaaccagcaucgucagaaa

SEQ ID NO: 237189 - RNA, 19 nt, Artificial Sequence
  Description of Artificial Sequence: Synthetic oligonucleotide
  Antisense strand to SEQ ID NO: 237188
uuucugacgaugcugguuu

SEQ ID NO: 237190 - RNA, 19 nt, Artificial Sequence
  Description of Artificial Sequence: Synthetic oligonucleotide
  Sense strand starting at position 1157 SEQ ID NO: 3054
acguguucucacguuccuu

SEQ ID NO: 237191 - RNA, 19 nt, Artificial Sequence
  Description of Artificial Sequence: Synthetic oligonucleotide
  Antisense strand to SEQ ID NO: 237190
aaggaacgugagaacacgu

SEQ ID NO: 237192 - RNA, 19 nt, Artificial Sequence
  Description of Artificial Sequence: Synthetic oligonucleotide
  Sense strand starting at position 1241 SEQ ID NO: 3054
ucgguuugucuagaaacuu

SEQ ID NO: 237193 - RNA, 19 nt, Artificial Sequence
  Description of Artificial Sequence: Synthetic oligonucleotide
  Antisense strand to SEQ ID NO: 237192
aaguuucuagacaaaccga

SEQ ID NO: 237194 - RNA, 19 nt, Artificial Sequence
  Description of Artificial Sequence: Synthetic oligonucleotide
  Sense strand starting at position 1571 SEQ ID NO: 3054
caguguggccaguagaguu

SEQ ID NO: 237195 - RNA, 19 nt, Artificial Sequence
  Description of Artificial Sequence: Synthetic oligonucleotide
  Antisense strand to SEQ ID NO: 237194
aacucuacuggccacacug

SEQ ID NO: 237196 - RNA, 19 nt, Artificial Sequence
  Description of Artificial Sequence: Synthetic oligonucleotide
  Sense strand starting at position 1999 SEQ ID NO: 3054
uacaaauaccaguguguga

SEQ ID NO: 237197 - RNA, 19 nt, Artificial Sequence
  Description of Artificial Sequence: Synthetic oligonucleotide
  Antisense strand to SEQ ID NO: 237196
ucacacacugguauuugua

SEQ ID NO: 237198 - RNA, 19 nt, Artificial Sequence
  Description of Artificial Sequence: Synthetic oligonucleotide
  Sense strand starting at position 2003 SEQ ID NO: 3054
aauaccagugugugaagaa

SEQ ID NO: 237199 - RNA, 19 nt, Artificial Sequence
  Description of Artificial Sequence: Synthetic oligonucleotide
  Antisense strand to SEQ ID NO: 237198
uucuucacacacugguauu

SEQ ID NO: 237200 - RNA, 19 nt, Artificial Sequence
  Description of Artificial Sequence: Synthetic oligonucleotide
  Sense strand starting at position 2157 SEQ ID NO: 3054
aaguacguuccagauauug

SEQ ID NO: 237201 - RNA, 19 nt, Artificial Sequence
  Description of Artificial Sequence: Synthetic oligonucleotide
  Antisense strand to SEQ ID NO: 237200
caauaucuggaacguacuu

SEQ ID NO: 237202 - RNA, 19 nt, Artificial Sequence
  Description of Artificial Sequence: Synthetic oligonucleotide
  Sense strand starting at position 2159 SEQ ID NO: 3054
guacguuccagauauugca

SEQ ID NO: 237203 - RNA, 19 nt, Artificial Sequence
  Description of Artificial Sequence: Synthetic oligonucleotide
  Antisense strand to SEQ ID NO: 237202
ugcaauaucuggaacguac

SEQ ID NO: 237204 - RNA, 19 nt, Artificial Sequence
  Description of Artificial Sequence: Synthetic oligonucleotide
  Sense strand starting at position 2197 SEQ ID NO: 3054
aaguauaagugagucaucu

SEQ ID NO: 237205 - RNA, 19 nt, Artificial Sequence
  Description of Artificial Sequence: Synthetic oligonucleotide
  Antisense strand to SEQ ID NO: 237204
agaugacucacuuauacuu

SEQ ID NO: 237206 - RNA, 19 nt, Artificial Sequence
  Description of Artificial Sequence: Synthetic oligonucleotide
  Sense strand starting at position 2199 SEQ ID NO: 3054
guauaagugagucaucuca

SEQ ID NO: 237207 - RNA, 19 nt, Artificial Sequence
  Description of Artificial Sequence: Synthetic oligonucleotide
  Antisense strand to SEQ ID NO: 237206
ugagaugacucacuuauac

SEQ ID NO: 237208 - RNA, 19 nt, Artificial Sequence
  Description of Artificial Sequence: Synthetic oligonucleotide
  Sense strand starting at position 2201 SEQ ID NO: 3054
auaagugagucaucucacu

SEQ ID NO: 237209 - RNA, 19 nt, Artificial Sequence
  Description of Artificial Sequence: Synthetic oligonucleotide
  Antisense strand to SEQ ID NO: 237208
agugagaugacucacuuau

SEQ ID NO: 237210 - RNA, 19 nt, Artificial Sequence
  Description of Artificial Sequence: Synthetic oligonucleotide
  Sense strand starting at position 2276 SEQ ID NO: 3054
uuuccacauuuguaaaugu

SEQ ID NO: 237211 - RNA, 19 nt, Artificial Sequence
  Description of Artificial Sequence: Synthetic oligonucleotide
  Antisense strand to SEQ ID NO: 237210
acauuuacaaauguggaaa

SEQ ID NO: 237212 - RNA, 19 nt, Artificial Sequence
  Description of Artificial Sequence: Synthetic oligonucleotide
  Sense strand starting at position 2387 SEQ ID NO: 3054
ugugguacuucggcuugaa

SEQ ID NO: 237213 - RNA, 19 nt, Artificial Sequence
  Description of Artificial Sequence: Synthetic oligonucleotide
  Antisense strand to SEQ ID NO: 237212
uucaagccgaaguaccaca

SEQ ID NO: 237214 - RNA, 19 nt, Artificial Sequence
  Description of Artificial Sequence: Synthetic oligonucleotide
  Sense strand starting at position 2390 SEQ ID NO: 3054
gguacuucggcuugaagag

SEQ ID NO: 237215 - RNA, 19 nt, Artificial Sequence
  Description of Artificial Sequence: Synthetic oligonucleotide
  Antisense strand to SEQ ID NO: 237214
cucuucaagccgaaguacc

SEQ ID NO: 237216 - RNA, 19 nt, Artificial Sequence
  Description of Artificial Sequence: Synthetic oligonucleotide
  Sense strand starting at position 2432 SEQ ID NO: 3054
gggcucacccaguagucaa

SEQ ID NO: 237217 - RNA, 19 nt, Artificial Sequence
  Description of Artificial Sequence: Synthetic oligonucleotide
  Antisense strand to SEQ ID NO: 237216
uugacuacugggugagccc

SEQ ID NO: 237218 - RNA, 19 nt, Artificial Sequence
  Description of Artificial Sequence: Synthetic oligonucleotide
  Sense strand starting at position 2442 SEQ ID NO: 3054
aguagucaaguugagugau

SEQ ID NO: 237219 - RNA, 19 nt, Artificial Sequence
  Description of Artificial Sequence: Synthetic oligonucleotide
  Antisense strand to SEQ ID NO: 237218
aucacucaacuugacuacu

SEQ ID NO: 237220 - RNA, 19 nt, Artificial Sequence
  Description of Artificial Sequence: Synthetic oligonucleotide
  Sense strand starting at position 2443 SEQ ID NO: 3054
guagucaaguugagugaug

SEQ ID NO: 237221 - RNA, 19 nt, Artificial Sequence
  Description of Artificial Sequence: Synthetic oligonucleotide
  Antisense strand to SEQ ID NO: 237220
caucacucaacuugacuac

SEQ ID NO: 237222 - RNA, 19 nt, Artificial Sequence
  Description of Artificial Sequence: Synthetic oligonucleotide
  Sense strand starting at position 2444 SEQ ID NO: 3054
uagucaaguugagugaugu

SEQ ID NO: 237223 - RNA, 19 nt, Artificial Sequence
  Description of Artificial Sequence: Synthetic oligonucleotide
  Antisense strand to SEQ ID NO: 237222
acaucacucaacuugacua

SEQ ID NO: 237224 - RNA, 19 nt, Artificial Sequence
  Description of Artificial Sequence: Synthetic oligonucleotide
  Sense strand starting at position 2445 SEQ ID NO: 3054
agucaaguugagugaugug

SEQ ID NO: 237225 - RNA, 19 nt, Artificial Sequence
  Description of Artificial Sequence: Synthetic oligonucleotide
  Antisense strand to SEQ ID NO: 237224
cacaucacucaacuugacu

SEQ ID NO: 237226 - RNA, 19 nt, Artificial Sequence
  Description of Artificial Sequence: Synthetic oligonucleotide
  Sense strand starting at position 2568 SEQ ID NO: 3054
agaggugguaccuguauag

SEQ ID NO: 237227 - RNA, 19 nt, Artificial Sequence
  Description of Artificial Sequence: Synthetic oligonucleotide
  Antisense strand to SEQ ID NO: 237226
cuauacagguaccaccucu

SEQ ID NO: 237228 - RNA, 19 nt, Artificial Sequence
  Description of Artificial Sequence: Synthetic oligonucleotide
  Sense strand starting at position 2572 SEQ ID NO: 3054
gugguaccuguauaggaaa

SEQ ID NO: 237229 - RNA, 19 nt, Artificial Sequence
  Description of Artificial Sequence: Synthetic oligonucleotide
  Antisense strand to SEQ ID NO: 237228
uuuccuauacagguaccac

SEQ ID NO: 237230 - RNA, 19 nt, Artificial Sequence
  Description of Artificial Sequence: Synthetic oligonucleotide
  Sense strand starting at position 2627 SEQ ID NO: 3054
ugaucugaacugugucaca

SEQ ID NO: 237231 - RNA, 19 nt, Artificial Sequence
  Description of Artificial Sequence: Synthetic oligonucleotide
  Antisense strand to SEQ ID NO: 237230
ugugacacaguucagauca

SEQ ID NO: 237232 - RNA, 19 nt, Artificial Sequence
  Description of Artificial Sequence: Synthetic oligonucleotide
  Sense strand starting at position 3086 SEQ ID NO: 3054
augggaaucguauaggcaa

SEQ ID NO: 237233 - RNA, 19 nt, Artificial Sequence
  Description of Artificial Sequence: Synthetic oligonucleotide
  Antisense strand to SEQ ID NO: 237232
uugccuauacgauucccau

SEQ ID NO: 237234 - RNA, 19 nt, Artificial Sequence
  Description of Artificial Sequence: Synthetic oligonucleotide
  Sense strand starting at position 3313 SEQ ID NO: 3054
agagaugggucuccauaug

SEQ ID NO: 237235 - RNA, 19 nt, Artificial Sequence
  Description of Artificial Sequence: Synthetic oligonucleotide
  Antisense strand to SEQ ID NO: 237234
cauauggagacccaucucu

SEQ ID NO: 237236 - RNA, 19 nt, Artificial Sequence
  Description of Artificial Sequence: Synthetic oligonucleotide
  Sense strand starting at position 3476 SEQ ID NO: 3054
guaccuauaugauuacaag

SEQ ID NO: 237237 - RNA, 19 nt, Artificial Sequence
  Description of Artificial Sequence: Synthetic oligonucleotide
  Antisense strand to SEQ ID NO: 237236
cuuguaaucauauagguac

SEQ ID NO: 237238 - RNA, 19 nt, Artificial Sequence
  Description of Artificial Sequence: Synthetic oligonucleotide
  Sense strand starting at position 3590 SEQ ID NO: 3054
gugagaaguugaguuugag

SEQ ID NO: 237239 - RNA, 19 nt, Artificial Sequence
  Description of Artificial Sequence: Synthetic oligonucleotide
  Antisense strand to SEQ ID NO: 237238
cucaaacucaacuucucac

SEQ ID NO: 237240 - RNA, 19 nt, Artificial Sequence
  Description of Artificial Sequence: Synthetic oligonucleotide
  Sense strand starting at position 3593 SEQ ID NO: 3054
agaaguugaguuugaggua

SEQ ID NO: 237241 - RNA, 19 nt, Artificial Sequence
  Description of Artificial Sequence: Synthetic oligonucleotide
  Antisense strand to SEQ ID NO: 237240
uaccucaaacucaacuucu

SEQ ID NO: 237242 - RNA, 19 nt, Artificial Sequence
  Description of Artificial Sequence: Synthetic oligonucleotide
  Sense strand starting at position 3598 SEQ ID NO: 3054
uugaguuugagguauugca

SEQ ID NO: 237243 - RNA, 19 nt, Artificial Sequence
  Description of Artificial Sequence: Synthetic oligonucleotide
  Antisense strand to SEQ ID NO: 237242
ugcaauaccucaaacucaa

SEQ ID NO: 237244 - RNA, 19 nt, Artificial Sequence
  Description of Artificial Sequence: Synthetic oligonucleotide
  Sense strand starting at position 3802 SEQ ID NO: 3054
aagggaauggucuguggau

SEQ ID NO: 237245 - RNA, 19 nt, Artificial Sequence
  Description of Artificial Sequence: Synthetic oligonucleotide
  Antisense strand to SEQ ID NO: 237244
auccacagaccauucccuu

SEQ ID NO: 237246 - RNA, 19 nt, Artificial Sequence
  Description of Artificial Sequence: Synthetic oligonucleotide
  Sense strand starting at position 3803 SEQ ID NO: 3054
agggaauggucuguggauu

SEQ ID NO: 237247 - RNA, 19 nt, Artificial Sequence
  Description of Artificial Sequence: Synthetic oligonucleotide
  Antisense strand to SEQ ID NO: 237246
aauccacagaccauucccu

SEQ ID NO: 237248 - RNA, 19 nt, Artificial Sequence
  Description of Artificial Sequence: Synthetic oligonucleotide
  Sense strand starting at position 3982 SEQ ID NO: 3054
cuuggucucaugugugaag

SEQ ID NO: 237249 - RNA, 19 nt, Artificial Sequence
  Description of Artificial Sequence: Synthetic oligonucleotide
  Antisense strand to SEQ ID NO: 237248
cuucacacaugagaccaag

SEQ ID NO: 237250 - RNA, 19 nt, Artificial Sequence
  Description of Artificial Sequence: Synthetic oligonucleotide
  Sense strand starting at position 3983 SEQ ID NO: 3054
uuggucucaugugugaaga

SEQ ID NO: 237251 - RNA, 19 nt, Artificial Sequence
  Description of Artificial Sequence: Synthetic oligonucleotide
  Antisense strand to SEQ ID NO: 237250
ucuucacacaugagaccaa

SEQ ID NO: 237252 - RNA, 19 nt, Artificial Sequence
  Description of Artificial Sequence: Synthetic oligonucleotide
  Sense strand starting at position 22 SEQ ID NO: 3055
gcuaauauugagugacacu

SEQ ID NO: 237253 - RNA, 19 nt, Artificial Sequence
  Description of Artificial Sequence: Synthetic oligonucleotide
  Antisense strand to SEQ ID NO: 237252
agugucacucaauauuagc

SEQ ID NO: 237254 - RNA, 19 nt, Artificial Sequence
  Description of Artificial Sequence: Synthetic oligonucleotide
  Sense strand starting at position 325 SEQ ID NO: 3055
ccucuuuaccacuguggau

SEQ ID NO: 237255 - RNA, 19 nt, Artificial Sequence
  Description of Artificial Sequence: Synthetic oligonucleotide
  Antisense strand to SEQ ID NO: 237254
auccacagugguaaagagg

SEQ ID NO: 237256 - RNA, 19 nt, Artificial Sequence
  Description of Artificial Sequence: Synthetic oligonucleotide
  Sense strand starting at position 2002 SEQ ID NO: 3055
gcgucaaccagguauuaug

SEQ ID NO: 237257 - RNA, 19 nt, Artificial Sequence
  Description of Artificial Sequence: Synthetic oligonucleotide
  Antisense strand to SEQ ID NO: 237256
cauaauaccugguugacgc

SEQ ID NO: 237258 - RNA, 19 nt, Artificial Sequence
  Description of Artificial Sequence: Synthetic oligonucleotide
  Sense strand starting at position 2009 SEQ ID NO: 3055
ccagguauuauguggauuc

SEQ ID NO: 237259 - RNA, 19 nt, Artificial Sequence
  Description of Artificial Sequence: Synthetic oligonucleotide
  Antisense strand to SEQ ID NO: 237258
gaauccacauaauaccugg

SEQ ID NO: 237260 - RNA, 19 nt, Artificial Sequence
  Description of Artificial Sequence: Synthetic oligonucleotide
  Sense strand starting at position 2019 SEQ ID NO: 3055
uguggauuccuaugugaug

SEQ ID NO: 237261 - RNA, 19 nt, Artificial Sequence
  Description of Artificial Sequence: Synthetic oligonucleotide
  Antisense strand to SEQ ID NO: 237260
caucacauaggaauccaca

SEQ ID NO: 237262 - RNA, 19 nt, Artificial Sequence
  Description of Artificial Sequence: Synthetic oligonucleotide
  Sense strand starting at position 2021 SEQ ID NO: 3055
uggauuccuaugugaugca

SEQ ID NO: 237263 - RNA, 19 nt, Artificial Sequence
  Description of Artificial Sequence: Synthetic oligonucleotide
  Antisense strand to SEQ ID NO: 237262
ugcaucacauaggaaucca

SEQ ID NO: 237264 - RNA, 19 nt, Artificial Sequence
  Description of Artificial Sequence: Synthetic oligonucleotide
  Sense strand starting at position 2049 SEQ ID NO: 3055
acgugcuaucgcccaugaa

SEQ ID NO: 237265 - RNA, 19 nt, Artificial Sequence
  Description of Artificial Sequence: Synthetic oligonucleotide
  Antisense strand to SEQ ID NO: 237264
uucaugggcgauagcacgu

SEQ ID NO: 237266 - RNA, 19 nt, Artificial Sequence
  Description of Artificial Sequence: Synthetic oligonucleotide
  Sense strand starting at position 2053 SEQ ID NO: 3055
gcuaucgcccaugaaguau

SEQ ID NO: 237267 - RNA, 19 nt, Artificial Sequence
  Description of Artificial Sequence: Synthetic oligonucleotide
  Antisense strand to SEQ ID NO: 237266
auacuucaugggcgauagc

SEQ ID NO: 237268 - RNA, 19 nt, Artificial Sequence
  Description of Artificial Sequence: Synthetic oligonucleotide
  Sense strand starting at position 2065 SEQ ID NO: 3055
gaaguauucuagcccaagg

SEQ ID NO: 237269 - RNA, 19 nt, Artificial Sequence
  Description of Artificial Sequence: Synthetic oligonucleotide
  Antisense strand to SEQ ID NO: 237268
ccuugggcuagaauacuuc

SEQ ID NO: 237270 - RNA, 19 nt, Artificial Sequence
  Description of Artificial Sequence: Synthetic oligonucleotide
  Sense strand starting at position 2110 SEQ ID NO: 3055
gaguuugauguuuacagga

SEQ ID NO: 237271 - RNA, 19 nt, Artificial Sequence
  Description of Artificial Sequence: Synthetic oligonucleotide
  Antisense strand to SEQ ID NO: 237270
uccuguaaacaucaaacuc

SEQ ID NO: 237272 - RNA, 19 nt, Artificial Sequence
  Description of Artificial Sequence: Synthetic oligonucleotide
  Sense strand starting at position 2231 SEQ ID NO: 3055
gucagaguccuaugaaagg

SEQ ID NO: 237273 - RNA, 19 nt, Artificial Sequence
  Description of Artificial Sequence: Synthetic oligonucleotide
  Antisense strand to SEQ ID NO: 237272
ccuuucauaggacucugac

SEQ ID NO: 237274 - RNA, 19 nt, Artificial Sequence
  Description of Artificial Sequence: Synthetic oligonucleotide
  Sense strand starting at position 2248 SEQ ID NO: 3055
gggccuaugccagauuaaa

SEQ ID NO: 237275 - RNA, 19 nt, Artificial Sequence
  Description of Artificial Sequence: Synthetic oligonucleotide
  Antisense strand to SEQ ID NO: 237274
uuuaaucuggcauaggccc

SEQ ID NO: 237276 - RNA, 19 nt, Artificial Sequence
  Description of Artificial Sequence: Synthetic oligonucleotide
  Sense strand starting at position 2326 SEQ ID NO: 3055
uggagaaauaagcguaaag

SEQ ID NO: 237277 - RNA, 19 nt, Artificial Sequence
  Description of Artificial Sequence: Synthetic oligonucleotide
  Antisense strand to SEQ ID NO: 237276
cuuuacgcuuauuucucca

SEQ ID NO: 237278 - RNA, 19 nt, Artificial Sequence
  Description of Artificial Sequence: Synthetic oligonucleotide
  Sense strand starting at position 2383 SEQ ID NO: 3055
ugaguauuagaagaguagu

SEQ ID NO: 237279 - RNA, 19 nt, Artificial Sequence
  Description of Artificial Sequence: Synthetic oligonucleotide
  Antisense strand to SEQ ID NO: 237278
acuacucuucuaauacuca

SEQ ID NO: 237280 - RNA, 19 nt, Artificial Sequence
  Description of Artificial Sequence: Synthetic oligonucleotide
  Sense strand starting at position 2386 SEQ ID NO: 3055
guauuagaagaguaguuau

SEQ ID NO: 237281 - RNA, 19 nt, Artificial Sequence
  Description of Artificial Sequence: Synthetic oligonucleotide
  Antisense strand to SEQ ID NO: 237280
auaacuacucuucuaauac

SEQ ID NO: 237282 - RNA, 19 nt, Artificial Sequence
  Description of Artificial Sequence: Synthetic oligonucleotide
  Sense strand starting at position 2454 SEQ ID NO: 3055
acgggaugugucuguagac

SEQ ID NO: 237283 - RNA, 19 nt, Artificial Sequence
  Description of Artificial Sequence: Synthetic oligonucleotide
  Antisense strand to SEQ ID NO: 237282
gucuacagacacaucccgu

SEQ ID NO: 237284 - RNA, 19 nt, Artificial Sequence
  Description of Artificial Sequence: Synthetic oligonucleotide
  Sense strand starting at position 2455 SEQ ID NO: 3055
cgggaugugucuguagaca

SEQ ID NO: 237285 - RNA, 19 nt, Artificial Sequence
  Description of Artificial Sequence: Synthetic oligonucleotide
  Antisense strand to SEQ ID NO: 237284
ugucuacagacacaucccg

SEQ ID NO: 237286 - RNA, 19 nt, Artificial Sequence
  Description of Artificial Sequence: Synthetic oligonucleotide
  Sense strand starting at position 2562 SEQ ID NO: 3055
ggugaucucugggugguga

SEQ ID NO: 237287 - RNA, 19 nt, Artificial Sequence
  Description of Artificial Sequence: Synthetic oligonucleotide
  Antisense strand to SEQ ID NO: 237286
ucaccacccagagaucacc

SEQ ID NO: 237288 - RNA, 19 nt, Artificial Sequence
  Description of Artificial Sequence: Synthetic oligonucleotide
  Sense strand starting at position 2617 SEQ ID NO: 3055
auucuaugaugcucaugaa

SEQ ID NO: 237289 - RNA, 19 nt, Artificial Sequence
  Description of Artificial Sequence: Synthetic oligonucleotide
  Antisense strand to SEQ ID NO: 237288
uucaugagcaucauagaau

SEQ ID NO: 237290 - RNA, 19 nt, Artificial Sequence
  Description of Artificial Sequence: Synthetic oligonucleotide
  Sense strand starting at position 2618 SEQ ID NO: 3055
uucuaugaugcucaugaag

SEQ ID NO: 237291 - RNA, 19 nt, Artificial Sequence
  Description of Artificial Sequence: Synthetic oligonucleotide
  Antisense strand to SEQ ID NO: 237290
cuucaugagcaucauagaa

SEQ ID NO: 237292 - RNA, 19 nt, Artificial Sequence
  Description of Artificial Sequence: Synthetic oligonucleotide
  Sense strand starting at position 2683 SEQ ID NO: 3055
cuuugcuaucgguaaguga

SEQ ID NO: 237293 - RNA, 19 nt, Artificial Sequence
  Description of Artificial Sequence: Synthetic oligonucleotide
  Antisense strand to SEQ ID NO: 237292
ucacuuaccgauagcaaag

SEQ ID NO: 237294 - RNA, 19 nt, Artificial Sequence
  Description of Artificial Sequence: Synthetic oligonucleotide
  Sense strand starting at position 2686 SEQ ID NO: 3055
ugcuaucgguaagugaaua

SEQ ID NO: 237295 - RNA, 19 nt, Artificial Sequence
  Description of Artificial Sequence: Synthetic oligonucleotide
  Antisense strand to SEQ ID NO: 237294
uauucacuuaccgauagca

SEQ ID NO: 237296 - RNA, 19 nt, Artificial Sequence
  Description of Artificial Sequence: Synthetic oligonucleotide
  Sense strand starting at position 2691 SEQ ID NO: 3055
ucgguaagugaauagcaga

SEQ ID NO: 237297 - RNA, 19 nt, Artificial Sequence
  Description of Artificial Sequence: Synthetic oligonucleotide
  Antisense strand to SEQ ID NO: 237296
ucugcuauucacuuaccga

SEQ ID NO: 237298 - RNA, 19 nt, Artificial Sequence
  Description of Artificial Sequence: Synthetic oligonucleotide
  Sense strand starting at position 2694 SEQ ID NO: 3055
guaagugaauagcagauuu

SEQ ID NO: 237299 - RNA, 19 nt, Artificial Sequence
  Description of Artificial Sequence: Synthetic oligonucleotide
  Antisense strand to SEQ ID NO: 237298
aaaucugcuauucacuuac

SEQ ID NO: 237300 - RNA, 19 nt, Artificial Sequence
  Description of Artificial Sequence: Synthetic oligonucleotide
  Sense strand starting at position 2758 SEQ ID NO: 3055
uuauuaggcuccucaagga

SEQ ID NO: 237301 - RNA, 19 nt, Artificial Sequence
  Description of Artificial Sequence: Synthetic oligonucleotide
  Antisense strand to SEQ ID NO: 237300
uccuugaggagccuaauaa

SEQ ID NO: 237302 - RNA, 19 nt, Artificial Sequence
  Description of Artificial Sequence: Synthetic oligonucleotide
  Sense strand starting at position 2789 SEQ ID NO: 3055
uggaguuggcucuauguuc

SEQ ID NO: 237303 - RNA, 19 nt, Artificial Sequence
  Description of Artificial Sequence: Synthetic oligonucleotide
  Antisense strand to SEQ ID NO: 237302
gaacauagagccaacucca

SEQ ID NO: 237304 - RNA, 19 nt, Artificial Sequence
  Description of Artificial Sequence: Synthetic oligonucleotide
  Sense strand starting at position 2796 SEQ ID NO: 3055
ggcucuauguucuugauau

SEQ ID NO: 237305 - RNA, 19 nt, Artificial Sequence
  Description of Artificial Sequence: Synthetic oligonucleotide
  Antisense strand to SEQ ID NO: 237304
auaucaagaacauagagcc

SEQ ID NO: 237306 - RNA, 19 nt, Artificial Sequence
  Description of Artificial Sequence: Synthetic oligonucleotide
  Sense strand starting at position 2800 SEQ ID NO: 3055
cuauguucuugauauuuac

SEQ ID NO: 237307 - RNA, 19 nt, Artificial Sequence
  Description of Artificial Sequence: Synthetic oligonucleotide
  Antisense strand to SEQ ID NO: 237306
guaaauaucaagaacauag

SEQ ID NO: 237308 - RNA, 19 nt, Artificial Sequence
  Description of Artificial Sequence: Synthetic oligonucleotide
  Sense strand starting at position 2807 SEQ ID NO: 3055
cuugauauuuaccagaaug

SEQ ID NO: 237309 - RNA, 19 nt, Artificial Sequence
  Description of Artificial Sequence: Synthetic oligonucleotide
  Antisense strand to SEQ ID NO: 237308
cauucugguaaauaucaag

SEQ ID NO: 237310 - RNA, 19 nt, Artificial Sequence
  Description of Artificial Sequence: Synthetic oligonucleotide
  Sense strand starting at position 2978 SEQ ID NO: 3055
aguugucucccauaugucu

SEQ ID NO: 237311 - RNA, 19 nt, Artificial Sequence
  Description of Artificial Sequence: Synthetic oligonucleotide
  Antisense strand to SEQ ID NO: 237310
agacauaugggagacaacu

SEQ ID NO: 237312 - RNA, 19 nt, Artificial Sequence
  Description of Artificial Sequence: Synthetic oligonucleotide
  Sense strand starting at position 3064 SEQ ID NO: 3055
uccuuagagcuguagugua

SEQ ID NO: 237313 - RNA, 19 nt, Artificial Sequence
  Description of Artificial Sequence: Synthetic oligonucleotide
  Antisense strand to SEQ ID NO: 237312
uacacuacagcucuaagga

SEQ ID NO: 237314 - RNA, 19 nt, Artificial Sequence
  Description of Artificial Sequence: Synthetic oligonucleotide
  Sense strand starting at position 3160 SEQ ID NO: 3055
gcuauucucuacuucugga

SEQ ID NO: 237315 - RNA, 19 nt, Artificial Sequence
  Description of Artificial Sequence: Synthetic oligonucleotide
  Antisense strand to SEQ ID NO: 237314
uccagaaguagagaauagc

SEQ ID NO: 237316 - RNA, 19 nt, Artificial Sequence
  Description of Artificial Sequence: Synthetic oligonucleotide
  Sense strand starting at position 3268 SEQ ID NO: 3055
ccuuaaggucagugugacu

SEQ ID NO: 237317 - RNA, 19 nt, Artificial Sequence
  Description of Artificial Sequence: Synthetic oligonucleotide
  Antisense strand to SEQ ID NO: 237316
agucacacugaccuuaagg

SEQ ID NO: 237318 - RNA, 19 nt, Artificial Sequence
  Description of Artificial Sequence: Synthetic oligonucleotide
  Sense strand starting at position 3574 SEQ ID NO: 3055
ucuugugaaaugggucuca

SEQ ID NO: 237319 - RNA, 19 nt, Artificial Sequence
  Description of Artificial Sequence: Synthetic oligonucleotide
  Antisense strand to SEQ ID NO: 237318
ugagacccauuucacaaga

SEQ ID NO: 237320 - RNA, 19 nt, Artificial Sequence
  Description of Artificial Sequence: Synthetic oligonucleotide
  Sense strand starting at position 3887 SEQ ID NO: 3055
caguuccugguugaguauu

SEQ ID NO: 237321 - RNA, 19 nt, Artificial Sequence
  Description of Artificial Sequence: Synthetic oligonucleotide
  Antisense strand to SEQ ID NO: 237320
aauacucaaccaggaacug

SEQ ID NO: 237322 - RNA, 19 nt, Artificial Sequence
  Description of Artificial Sequence: Synthetic oligonucleotide
  Sense strand starting at position 3914 SEQ ID NO: 3055
gguaguaguguuuauugau

SEQ ID NO: 237323 - RNA, 19 nt, Artificial Sequence
  Description of Artificial Sequence: Synthetic oligonucleotide
  Antisense strand to SEQ ID NO: 237322
aucaauaaacacuacuacc

SEQ ID NO: 237324 - RNA, 19 nt, Artificial Sequence
  Description of Artificial Sequence: Synthetic oligonucleotide
  Sense strand starting at position 3933 SEQ ID NO: 3055
uugaauugaauguguguaa

SEQ ID NO: 237325 - RNA, 19 nt, Artificial Sequence
  Description of Artificial Sequence: Synthetic oligonucleotide
  Antisense strand to SEQ ID NO: 237324
uuacacacauucaauucaa

SEQ ID NO: 237326 - RNA, 19 nt, Artificial Sequence
  Description of Artificial Sequence: Synthetic oligonucleotide
  Sense strand starting at position 3934 SEQ ID NO: 3055
ugaauugaauguguguaau

SEQ ID NO: 237327 - RNA, 19 nt, Artificial Sequence
  Description of Artificial Sequence: Synthetic oligonucleotide
  Antisense strand to SEQ ID NO: 237326
auuacacacauucaauuca

SEQ ID NO: 237328 - RNA, 19 nt, Artificial Sequence
  Description of Artificial Sequence: Synthetic oligonucleotide
  Sense strand starting at position 3936 SEQ ID NO: 3055
aauugaauguguguaauga

SEQ ID NO: 237329 - RNA, 19 nt, Artificial Sequence
  Description of Artificial Sequence: Synthetic oligonucleotide
  Antisense strand to SEQ ID NO: 237328
ucauuacacacauucaauu

SEQ ID NO: 237330 - RNA, 19 nt, Artificial Sequence
  Description of Artificial Sequence: Synthetic oligonucleotide
  Sense strand starting at position 3937 SEQ ID NO: 3055
auugaauguguguaaugaa

SEQ ID NO: 237331 - RNA, 19 nt, Artificial Sequence
  Description of Artificial Sequence: Synthetic oligonucleotide
  Antisense strand to SEQ ID NO: 237330
uucauuacacacauucaau

SEQ ID NO: 237332 - RNA, 19 nt, Artificial Sequence
  Description of Artificial Sequence: Synthetic oligonucleotide
  Sense strand starting at position 4 SEQ ID NO: 3056
uuaagaaugugucucaccu

SEQ ID NO: 237333 - RNA, 19 nt, Artificial Sequence
  Description of Artificial Sequence: Synthetic oligonucleotide
  Antisense strand to SEQ ID NO: 237332
aggugagacacauucuuaa

SEQ ID NO: 237334 - RNA, 19 nt, Artificial Sequence
  Description of Artificial Sequence: Synthetic oligonucleotide
  Sense strand starting at position 110 SEQ ID NO: 3056
gcuaauauugagugacacu

SEQ ID NO: 237335 - RNA, 19 nt, Artificial Sequence
  Description of Artificial Sequence: Synthetic oligonucleotide
  Antisense strand to SEQ ID NO: 237334
agugucacucaauauuagc

SEQ ID NO: 237336 - RNA, 19 nt, Artificial Sequence
  Description of Artificial Sequence: Synthetic oligonucleotide
  Sense strand starting at position 413 SEQ ID NO: 3056
ccucuuuaccacuguggau

SEQ ID NO: 237337 - RNA, 19 nt, Artificial Sequence
  Description of Artificial Sequence: Synthetic oligonucleotide
  Antisense strand to SEQ ID NO: 237336
auccacagugguaaagagg

SEQ ID NO: 237338 - RNA, 19 nt, Artificial Sequence
  Description of Artificial Sequence: Synthetic oligonucleotide
  Sense strand starting at position 2090 SEQ ID NO: 3056
gcgucaaccagguauuaug

SEQ ID NO: 237339 - RNA, 19 nt, Artificial Sequence
  Description of Artificial Sequence: Synthetic oligonucleotide
  Antisense strand to SEQ ID NO: 237338
cauaauaccugguugacgc

SEQ ID NO: 237340 - RNA, 19 nt, Artificial Sequence
  Description of Artificial Sequence: Synthetic oligonucleotide
  Sense strand starting at position 2097 SEQ ID NO: 3056
ccagguauuauguggauuc

SEQ ID NO: 237341 - RNA, 19 nt, Artificial Sequence
  Description of Artificial Sequence: Synthetic oligonucleotide
  Antisense strand to SEQ ID NO: 237340
gaauccacauaauaccugg

SEQ ID NO: 237342 - RNA, 19 nt, Artificial Sequence
  Description of Artificial Sequence: Synthetic oligonucleotide
  Sense strand starting at position 2107 SEQ ID NO: 3056
uguggauuccuaugugaug

SEQ ID NO: 237343 - RNA, 19 nt, Artificial Sequence
  Description of Artificial Sequence: Synthetic oligonucleotide
  Antisense strand to SEQ ID NO: 237342
caucacauaggaauccaca

SEQ ID NO: 237344 - RNA, 19 nt, Artificial Sequence
  Description of Artificial Sequence: Synthetic oligonucleotide
  Sense strand starting at position 2109 SEQ ID NO: 3056
uggauuccuaugugaugca

SEQ ID NO: 237345 - RNA, 19 nt, Artificial Sequence
  Description of Artificial Sequence: Synthetic oligonucleotide
  Antisense strand to SEQ ID NO: 237344
ugcaucacauaggaaucca

SEQ ID NO: 237346 - RNA, 19 nt, Artificial Sequence
  Description of Artificial Sequence: Synthetic oligonucleotide
  Sense strand starting at position 2137 SEQ ID NO: 3056
acgugcuaucgcccaugaa

SEQ ID NO: 237347 - RNA, 19 nt, Artificial Sequence
  Description of Artificial Sequence: Synthetic oligonucleotide
  Antisense strand to SEQ ID NO: 237346
uucaugggcgauagcacgu

SEQ ID NO: 237348 - RNA, 19 nt, Artificial Sequence
  Description of Artificial Sequence: Synthetic oligonucleotide
  Sense strand starting at position 2141 SEQ ID NO: 3056
gcuaucgcccaugaaguau

SEQ ID NO: 237349 - RNA, 19 nt, Artificial Sequence
  Description of Artificial Sequence: Synthetic oligonucleotide
  Antisense strand to SEQ ID NO: 237348
auacuucaugggcgauagc

SEQ ID NO: 237350 - RNA, 19 nt, Artificial Sequence
  Description of Artificial Sequence: Synthetic oligonucleotide
  Sense strand starting at position 2153 SEQ ID NO: 3056
gaaguauucuagcccaagg

SEQ ID NO: 237351 - RNA, 19 nt, Artificial Sequence
  Description of Artificial Sequence: Synthetic oligonucleotide
  Antisense strand to SEQ ID NO: 237350
ccuugggcuagaauacuuc

SEQ ID NO: 237352 - RNA, 19 nt, Artificial Sequence
  Description of Artificial Sequence: Synthetic oligonucleotide
  Sense strand starting at position 2198 SEQ ID NO: 3056
gaguuugauguuuacagga

SEQ ID NO: 237353 - RNA, 19 nt, Artificial Sequence
  Description of Artificial Sequence: Synthetic oligonucleotide
  Antisense strand to SEQ ID NO: 237352
uccuguaaacaucaaacuc

SEQ ID NO: 237354 - RNA, 19 nt, Artificial Sequence
  Description of Artificial Sequence: Synthetic oligonucleotide
  Sense strand starting at position 2319 SEQ ID NO: 3056
gucagaguccuaugaaagg

SEQ ID NO: 237355 - RNA, 19 nt, Artificial Sequence
  Description of Artificial Sequence: Synthetic oligonucleotide
  Antisense strand to SEQ ID NO: 237354
ccuuucauaggacucugac

SEQ ID NO: 237356 - RNA, 19 nt, Artificial Sequence
  Description of Artificial Sequence: Synthetic oligonucleotide
  Sense strand starting at position 2336 SEQ ID NO: 3056
gggccuaugccagauuaaa

SEQ ID NO: 237357 - RNA, 19 nt, Artificial Sequence
  Description of Artificial Sequence: Synthetic oligonucleotide
  Antisense strand to SEQ ID NO: 237356
uuuaaucuggcauaggccc

SEQ ID NO: 237358 - RNA, 19 nt, Artificial Sequence
  Description of Artificial Sequence: Synthetic oligonucleotide
  Sense strand starting at position 2414 SEQ ID NO: 3056
uggagaaauaagcguaaag

SEQ ID NO: 237359 - RNA, 19 nt, Artificial Sequence
  Description of Artificial Sequence: Synthetic oligonucleotide
  Antisense strand to SEQ ID NO: 237358
cuuuacgcuuauuucucca

SEQ ID NO: 237360 - RNA, 19 nt, Artificial Sequence
  Description of Artificial Sequence: Synthetic oligonucleotide
  Sense strand starting at position 2471 SEQ ID NO: 3056
ugaguauuagaagaguagu

SEQ ID NO: 237361 - RNA, 19 nt, Artificial Sequence
  Description of Artificial Sequence: Synthetic oligonucleotide
  Antisense strand to SEQ ID NO: 237360
acuacucuucuaauacuca

SEQ ID NO: 237362 - RNA, 19 nt, Artificial Sequence
  Description of Artificial Sequence: Synthetic oligonucleotide
  Sense strand starting at position 2474 SEQ ID NO: 3056
guauuagaagaguaguuau

SEQ ID NO: 237363 - RNA, 19 nt, Artificial Sequence
  Description of Artificial Sequence: Synthetic oligonucleotide
  Antisense strand to SEQ ID NO: 237362
auaacuacucuucuaauac

SEQ ID NO: 237364 - RNA, 19 nt, Artificial Sequence
  Description of Artificial Sequence: Synthetic oligonucleotide
  Sense strand starting at position 2542 SEQ ID NO: 3056
acgggaugugucuguagac

SEQ ID NO: 237365 - RNA, 19 nt, Artificial Sequence
  Description of Artificial Sequence: Synthetic oligonucleotide
  Antisense strand to SEQ ID NO: 237364
gucuacagacacaucccgu

SEQ ID NO: 237366 - RNA, 19 nt, Artificial Sequence
  Description of Artificial Sequence: Synthetic oligonucleotide
  Sense strand starting at position 2543 SEQ ID NO: 3056
cgggaugugucuguagaca

SEQ ID NO: 237367 - RNA, 19 nt, Artificial Sequence
  Description of Artificial Sequence: Synthetic oligonucleotide
  Antisense strand to SEQ ID NO: 237366
ugucuacagacacaucccg

SEQ ID NO: 237368 - RNA, 19 nt, Artificial Sequence
  Description of Artificial Sequence: Synthetic oligonucleotide
  Sense strand starting at position 2650 SEQ ID NO: 3056
ggugaucucugggugguga

SEQ ID NO: 237369 - RNA, 19 nt, Artificial Sequence
  Description of Artificial Sequence: Synthetic oligonucleotide
  Antisense strand to SEQ ID NO: 237368
ucaccacccagagaucacc

SEQ ID NO: 237370 - RNA, 19 nt, Artificial Sequence
  Description of Artificial Sequence: Synthetic oligonucleotide
  Sense strand starting at position 2705 SEQ ID NO: 3056
auucuaugaugcucaugaa

SEQ ID NO: 237371 - RNA, 19 nt, Artificial Sequence
  Description of Artificial Sequence: Synthetic oligonucleotide
  Antisense strand to SEQ ID NO: 237370
uucaugagcaucauagaau

SEQ ID NO: 237372 - RNA, 19 nt, Artificial Sequence
  Description of Artificial Sequence: Synthetic oligonucleotide
  Sense strand starting at position 2706 SEQ ID NO: 3056
uucuaugaugcucaugaag

SEQ ID NO: 237373 - RNA, 19 nt, Artificial Sequence
  Description of Artificial Sequence: Synthetic oligonucleotide
  Antisense strand to SEQ ID NO: 237372
cuucaugagcaucauagaa

SEQ ID NO: 237374 - RNA, 19 nt, Artificial Sequence
  Description of Artificial Sequence: Synthetic oligonucleotide
  Sense strand starting at position 2771 SEQ ID NO: 3056
cuuugcuaucgguaaguga

SEQ ID NO: 237375 - RNA, 19 nt, Artificial Sequence
  Description of Artificial Sequence: Synthetic oligonucleotide
  Antisense strand to SEQ ID NO: 237374
ucacuuaccgauagcaaag

SEQ ID NO: 237376 - RNA, 19 nt, Artificial Sequence
  Description of Artificial Sequence: Synthetic oligonucleotide
  Sense strand starting at position 2774 SEQ ID NO: 3056
ugcuaucgguaagugaaua

SEQ ID NO: 237377 - RNA, 19 nt, Artificial Sequence
  Description of Artificial Sequence: Synthetic oligonucleotide
  Antisense strand to SEQ ID NO: 237376
uauucacuuaccgauagca

SEQ ID NO: 237378 - RNA, 19 nt, Artificial Sequence
  Description of Artificial Sequence: Synthetic oligonucleotide
  Sense strand starting at position 2779 SEQ ID NO: 3056
ucgguaagugaauagcaga

SEQ ID NO: 237379 - RNA, 19 nt, Artificial Sequence
  Description of Artificial Sequence: Synthetic oligonucleotide
  Antisense strand to SEQ ID NO: 237378
ucugcuauucacuuaccga

SEQ ID NO: 237380 - RNA, 19 nt, Artificial Sequence
  Description of Artificial Sequence: Synthetic oligonucleotide
  Sense strand starting at position 2782 SEQ ID NO: 3056
guaagugaauagcagauuu

SEQ ID NO: 237381 - RNA, 19 nt, Artificial Sequence
  Description of Artificial Sequence: Synthetic oligonucleotide
  Antisense strand to SEQ ID NO: 237380
aaaucugcuauucacuuac

SEQ ID NO: 237382 - RNA, 19 nt, Artificial Sequence
  Description of Artificial Sequence: Synthetic oligonucleotide
  Sense strand starting at position 2846 SEQ ID NO: 3056
uuauuaggcuccucaagga

SEQ ID NO: 237383 - RNA, 19 nt, Artificial Sequence
  Description of Artificial Sequence: Synthetic oligonucleotide
  Antisense strand to SEQ ID NO: 237382
uccuugaggagccuaauaa

SEQ ID NO: 237384 - RNA, 19 nt, Artificial Sequence
  Description of Artificial Sequence: Synthetic oligonucleotide
  Sense strand starting at position 2877 SEQ ID NO: 3056
uggaguuggcucuauguuc

SEQ ID NO: 237385 - RNA, 19 nt, Artificial Sequence
  Description of Artificial Sequence: Synthetic oligonucleotide
  Antisense strand to SEQ ID NO: 237384
gaacauagagccaacucca

SEQ ID NO: 237386 - RNA, 19 nt, Artificial Sequence
  Description of Artificial Sequence: Synthetic oligonucleotide
  Sense strand starting at position 2884 SEQ ID NO: 3056
ggcucuauguucuugauau

SEQ ID NO: 237387 - RNA, 19 nt, Artificial Sequence
  Description of Artificial Sequence: Synthetic oligonucleotide
  Antisense strand to SEQ ID NO: 237386
auaucaagaacauagagcc

SEQ ID NO: 237388 - RNA, 19 nt, Artificial Sequence
  Description of Artificial Sequence: Synthetic oligonucleotide
  Sense strand starting at position 2888 SEQ ID NO: 3056
cuauguucuugauauuuac

SEQ ID NO: 237389 - RNA, 19 nt, Artificial Sequence
  Description of Artificial Sequence: Synthetic oligonucleotide
  Antisense strand to SEQ ID NO: 237388
guaaauaucaagaacauag

SEQ ID NO: 237390 - RNA, 19 nt, Artificial Sequence
  Description of Artificial Sequence: Synthetic oligonucleotide
  Sense strand starting at position 2895 SEQ ID NO: 3056
cuugauauuuaccagaaug

SEQ ID NO: 237391 - RNA, 19 nt, Artificial Sequence
  Description of Artificial Sequence: Synthetic oligonucleotide
  Antisense strand to SEQ ID NO: 237390
cauucugguaaauaucaag

SEQ ID NO: 237392 - RNA, 19 nt, Artificial Sequence
  Description of Artificial Sequence: Synthetic oligonucleotide
  Sense strand starting at position 2991 SEQ ID NO: 3056
ucauucugcuuggcaauua

SEQ ID NO: 237393 - RNA, 19 nt, Artificial Sequence
  Description of Artificial Sequence: Synthetic oligonucleotide
  Antisense strand to SEQ ID NO: 237392
uaauugccaagcagaauga

SEQ ID NO: 237394 - RNA, 19 nt, Artificial Sequence
  Description of Artificial Sequence: Synthetic oligonucleotide
  Sense strand starting at position 3066 SEQ ID NO: 3056
aguugucucccauaugucu

SEQ ID NO: 237395 - RNA, 19 nt, Artificial Sequence
  Description of Artificial Sequence: Synthetic oligonucleotide
  Antisense strand to SEQ ID NO: 237394
agacauaugggagacaacu

SEQ ID NO: 237396 - RNA, 19 nt, Artificial Sequence
  Description of Artificial Sequence: Synthetic oligonucleotide
  Sense strand starting at position 3152 SEQ ID NO: 3056
uccuuagagcuguagugua

SEQ ID NO: 237397 - RNA, 19 nt, Artificial Sequence
  Description of Artificial Sequence: Synthetic oligonucleotide
  Antisense strand to SEQ ID NO: 237396
uacacuacagcucuaagga

SEQ ID NO: 237398 - RNA, 19 nt, Artificial Sequence
  Description of Artificial Sequence: Synthetic oligonucleotide
  Sense strand starting at position 3193 SEQ ID NO: 3056
gcuuguuauucuccacaca

SEQ ID NO: 237399 - RNA, 19 nt, Artificial Sequence
  Description of Artificial Sequence: Synthetic oligonucleotide
  Antisense strand to SEQ ID NO: 237398
uguguggagaauaacaagc

SEQ ID NO: 237400 - RNA, 19 nt, Artificial Sequence
  Description of Artificial Sequence: Synthetic oligonucleotide
  Sense strand starting at position 3248 SEQ ID NO: 3056
gcuauucucuacuucugga

SEQ ID NO: 237401 - RNA, 19 nt, Artificial Sequence
  Description of Artificial Sequence: Synthetic oligonucleotide
  Antisense strand to SEQ ID NO: 237400
uccagaaguagagaauagc

SEQ ID NO: 237402 - RNA, 19 nt, Artificial Sequence
  Description of Artificial Sequence: Synthetic oligonucleotide
  Sense strand starting at position 3356 SEQ ID NO: 3056
ccuuaaggucagugugacu

SEQ ID NO: 237403 - RNA, 19 nt, Artificial Sequence
  Description of Artificial Sequence: Synthetic oligonucleotide
  Antisense strand to SEQ ID NO: 237402
agucacacugaccuuaagg

SEQ ID NO: 237404 - RNA, 19 nt, Artificial Sequence
  Description of Artificial Sequence: Synthetic oligonucleotide
  Sense strand starting at position 3662 SEQ ID NO: 3056
ucuugugaaaugggucuca

SEQ ID NO: 237405 - RNA, 19 nt, Artificial Sequence
  Description of Artificial Sequence: Synthetic oligonucleotide
  Antisense strand to SEQ ID NO: 237404
ugagacccauuucacaaga

SEQ ID NO: 237406 - RNA, 19 nt, Artificial Sequence
  Description of Artificial Sequence: Synthetic oligonucleotide
  Sense strand starting at position 3973 SEQ ID NO: 3056
cccaguuccugguugagua

SEQ ID NO: 237407 - RNA, 19 nt, Artificial Sequence
  Description of Artificial Sequence: Synthetic oligonucleotide
  Antisense strand to SEQ ID NO: 237406
uacucaaccaggaacuggg

SEQ ID NO: 237408 - RNA, 19 nt, Artificial Sequence
  Description of Artificial Sequence: Synthetic oligonucleotide
  Sense strand starting at position 3974 SEQ ID NO: 3056
ccaguuccugguugaguau

SEQ ID NO: 237409 - RNA, 19 nt, Artificial Sequence
  Description of Artificial Sequence: Synthetic oligonucleotide
  Antisense strand to SEQ ID NO: 237408
auacucaaccaggaacugg

SEQ ID NO: 237410 - RNA, 19 nt, Artificial Sequence
  Description of Artificial Sequence: Synthetic oligonucleotide
  Sense strand starting at position 3975 SEQ ID NO: 3056
caguuccugguugaguauu

SEQ ID NO: 237411 - RNA, 19 nt, Artificial Sequence
  Description of Artificial Sequence: Synthetic oligonucleotide
  Antisense strand to SEQ ID NO: 237410
aauacucaaccaggaacug

SEQ ID NO: 237412 - RNA, 19 nt, Artificial Sequence
  Description of Artificial Sequence: Synthetic oligonucleotide
  Sense strand starting at position 59 SEQ ID NO: 3057
auuaacguucuccacagaa

SEQ ID NO: 237413 - RNA, 19 nt, Artificial Sequence
  Description of Artificial Sequence: Synthetic oligonucleotide
  Antisense strand to SEQ ID NO: 237412
uucuguggagaacguuaau

SEQ ID NO: 237414 - RNA, 19 nt, Artificial Sequence
  Description of Artificial Sequence: Synthetic oligonucleotide
  Sense strand starting at position 61 SEQ ID NO: 3057
uaacguucuccacagaaga

SEQ ID NO: 237415 - RNA, 19 nt, Artificial Sequence
  Description of Artificial Sequence: Synthetic oligonucleotide
  Antisense strand to SEQ ID NO: 237414
ucuucuguggagaacguua

SEQ ID NO: 237416 - RNA, 19 nt, Artificial Sequence
  Description of Artificial Sequence: Synthetic oligonucleotide
  Sense strand starting at position 228 SEQ ID NO: 3057
ugaugagugggcuggucua

SEQ ID NO: 237417 - RNA, 19 nt, Artificial Sequence
  Description of Artificial Sequence: Synthetic oligonucleotide
  Antisense strand to SEQ ID NO: 237416
uagaccagcccacucauca

SEQ ID NO: 237418 - RNA, 19 nt, Artificial Sequence
  Description of Artificial Sequence: Synthetic oligonucleotide
  Sense strand starting at position 486 SEQ ID NO: 3057
gggacucaucucuguaugu

SEQ ID NO: 237419 - RNA, 19 nt, Artificial Sequence
  Description of Artificial Sequence: Synthetic oligonucleotide
  Antisense strand to SEQ ID NO: 237418
acauacagagaugaguccc

SEQ ID NO: 237420 - RNA, 19 nt, Artificial Sequence
  Description of Artificial Sequence: Synthetic oligonucleotide
  Sense strand starting at position 681 SEQ ID NO: 3057
acgggaggcucaucccaaa

SEQ ID NO: 237421 - RNA, 19 nt, Artificial Sequence
  Description of Artificial Sequence: Synthetic oligonucleotide
  Antisense strand to SEQ ID NO: 237420
uuugggaugagccucccgu

SEQ ID NO: 237422 - RNA, 19 nt, Artificial Sequence
  Description of Artificial Sequence: Synthetic oligonucleotide
  Sense strand starting at position 700 SEQ ID NO: 3057
ggcacucuguuaucuugaa

SEQ ID NO: 237423 - RNA, 19 nt, Artificial Sequence
  Description of Artificial Sequence: Synthetic oligonucleotide
  Antisense strand to SEQ ID NO: 237422
uucaagauaacagagugcc

SEQ ID NO: 237424 - RNA, 19 nt, Artificial Sequence
  Description of Artificial Sequence: Synthetic oligonucleotide
  Sense strand starting at position 701 SEQ ID NO: 3057
gcacucuguuaucuugaaa

SEQ ID NO: 237425 - RNA, 19 nt, Artificial Sequence
  Description of Artificial Sequence: Synthetic oligonucleotide
  Antisense strand to SEQ ID NO: 237424
uuucaagauaacagagugc

SEQ ID NO: 237426 - RNA, 19 nt, Artificial Sequence
  Description of Artificial Sequence: Synthetic oligonucleotide
  Sense strand starting at position 847 SEQ ID NO: 3057
cugugcuagcucuacggaa

SEQ ID NO: 237427 - RNA, 19 nt, Artificial Sequence
  Description of Artificial Sequence: Synthetic oligonucleotide
  Antisense strand to SEQ ID NO: 237426
uuccguagagcuagcacag

SEQ ID NO: 237428 - RNA, 19 nt, Artificial Sequence
  Description of Artificial Sequence: Synthetic oligonucleotide
  Sense strand starting at position 1395 SEQ ID NO: 3057
gcccuugaucaaggguaaa

SEQ ID NO: 237429 - RNA, 19 nt, Artificial Sequence
  Description of Artificial Sequence: Synthetic oligonucleotide
  Antisense strand to SEQ ID NO: 237428
uuuacccuugaucaagggc

SEQ ID NO: 237430 - RNA, 19 nt, Artificial Sequence
  Description of Artificial Sequence: Synthetic oligonucleotide
  Sense strand starting at position 1481 SEQ ID NO: 3057
cccggcucugcucaaacau

SEQ ID NO: 237431 - RNA, 19 nt, Artificial Sequence
  Description of Artificial Sequence: Synthetic oligonucleotide
  Antisense strand to SEQ ID NO: 237430
auguuugagcagagccggg

SEQ ID NO: 237432 - RNA, 19 nt, Artificial Sequence
  Description of Artificial Sequence: Synthetic oligonucleotide
  Sense strand starting at position 1707 SEQ ID NO: 3057
acucauucccgccacaaga

SEQ ID NO: 237433 - RNA, 19 nt, Artificial Sequence
  Description of Artificial Sequence: Synthetic oligonucleotide
  Antisense strand to SEQ ID NO: 237432
ucuuguggcgggaaugagu

SEQ ID NO: 237434 - RNA, 19 nt, Artificial Sequence
  Description of Artificial Sequence: Synthetic oligonucleotide
  Sense strand starting at position 2042 SEQ ID NO: 3057
cguacucugcgacacucaa

SEQ ID NO: 237435 - RNA, 19 nt, Artificial Sequence
  Description of Artificial Sequence: Synthetic oligonucleotide
  Antisense strand to SEQ ID NO: 237434
uugagugucgcagaguacg

SEQ ID NO: 237436 - RNA, 19 nt, Artificial Sequence
  Description of Artificial Sequence: Synthetic oligonucleotide
  Sense strand starting at position 2190 SEQ ID NO: 3057
gccagauucugauuaaaga

SEQ ID NO: 237437 - RNA, 19 nt, Artificial Sequence
  Description of Artificial Sequence: Synthetic oligonucleotide
  Antisense strand to SEQ ID NO: 237436
ucuuuaaucagaaucuggc

SEQ ID NO: 237438 - RNA, 19 nt, Artificial Sequence
  Description of Artificial Sequence: Synthetic oligonucleotide
  Sense strand starting at position 2207 SEQ ID NO: 3057
gaaguuaucccagggcuua

SEQ ID NO: 237439 - RNA, 19 nt, Artificial Sequence
  Description of Artificial Sequence: Synthetic oligonucleotide
  Antisense strand to SEQ ID NO: 237438
uaagcccugggauaacuuc

SEQ ID NO: 237440 - RNA, 19 nt, Artificial Sequence
  Description of Artificial Sequence: Synthetic oligonucleotide
  Sense strand starting at position 2208 SEQ ID NO: 3057
aaguuaucccagggcuuac

SEQ ID NO: 237441 - RNA, 19 nt, Artificial Sequence
  Description of Artificial Sequence: Synthetic oligonucleotide
  Antisense strand to SEQ ID NO: 237440
guaagcccugggauaacuu

SEQ ID NO: 237442 - RNA, 19 nt, Artificial Sequence
  Description of Artificial Sequence: Synthetic oligonucleotide
  Sense strand starting at position 2329 SEQ ID NO: 3057
caggccucccagugucauu

SEQ ID NO: 237443 - RNA, 19 nt, Artificial Sequence
  Description of Artificial Sequence: Synthetic oligonucleotide
  Antisense strand to SEQ ID NO: 237442
aaugacacugggaggccug

SEQ ID NO: 237444 - RNA, 19 nt, Artificial Sequence
  Description of Artificial Sequence: Synthetic oligonucleotide
  Sense strand starting at position 2334 SEQ ID NO: 3057
cucccagugucauuuccuu

SEQ ID NO: 237445 - RNA, 19 nt, Artificial Sequence
  Description of Artificial Sequence: Synthetic oligonucleotide
  Antisense strand to SEQ ID NO: 237444
aaggaaaugacacugggag

SEQ ID NO: 237446 - RNA, 19 nt, Artificial Sequence
  Description of Artificial Sequence: Synthetic oligonucleotide
  Sense strand starting at position 2341 SEQ ID NO: 3057
ugucauuuccuuuguuaau

SEQ ID NO: 237447 - RNA, 19 nt, Artificial Sequence
  Description of Artificial Sequence: Synthetic oligonucleotide
  Antisense strand to SEQ ID NO: 237446
auuaacaaaggaaaugaca

SEQ ID NO: 237448 - RNA, 19 nt, Artificial Sequence
  Description of Artificial Sequence: Synthetic oligonucleotide
  Sense strand starting at position 2342 SEQ ID NO: 3057
gucauuuccuuuguuaaug

SEQ ID NO: 237449 - RNA, 19 nt, Artificial Sequence
  Description of Artificial Sequence: Synthetic oligonucleotide
  Antisense strand to SEQ ID NO: 237448
cauuaacaaaggaaaugac

SEQ ID NO: 237450 - RNA, 19 nt, Artificial Sequence
  Description of Artificial Sequence: Synthetic oligonucleotide
  Sense strand starting at position 2343 SEQ ID NO: 3057
ucauuuccuuuguuaaugu

SEQ ID NO: 237451 - RNA, 19 nt, Artificial Sequence
  Description of Artificial Sequence: Synthetic oligonucleotide
  Antisense strand to SEQ ID NO: 237450
acauuaacaaaggaaauga

SEQ ID NO: 237452 - RNA, 19 nt, Artificial Sequence
  Description of Artificial Sequence: Synthetic oligonucleotide
  Sense strand starting at position 2356 SEQ ID NO: 3057
uaaugugaagccuagacca

SEQ ID NO: 237453 - RNA, 19 nt, Artificial Sequence
  Description of Artificial Sequence: Synthetic oligonucleotide
  Antisense strand to SEQ ID NO: 237452
uggucuaggcuucacauua

SEQ ID NO: 237454 - RNA, 19 nt, Artificial Sequence
  Description of Artificial Sequence: Synthetic oligonucleotide
  Sense strand starting at position 2434 SEQ ID NO: 3057
guguucauucgugugguua

SEQ ID NO: 237455 - RNA, 19 nt, Artificial Sequence
  Description of Artificial Sequence: Synthetic oligonucleotide
  Antisense strand to SEQ ID NO: 237454
uaaccacacgaaugaacac

SEQ ID NO: 237456 - RNA, 19 nt, Artificial Sequence
  Description of Artificial Sequence: Synthetic oligonucleotide
  Sense strand starting at position 2442 SEQ ID NO: 3057
ucgugugguuauuugauua

SEQ ID NO: 237457 - RNA, 19 nt, Artificial Sequence
  Description of Artificial Sequence: Synthetic oligonucleotide
  Antisense strand to SEQ ID NO: 237456
uaaucaaauaaccacacga

SEQ ID NO: 237458 - RNA, 19 nt, Artificial Sequence
  Description of Artificial Sequence: Synthetic oligonucleotide
  Sense strand starting at position 2483 SEQ ID NO: 3057
cuaagcuccgcguaaacaa

SEQ ID NO: 237459 - RNA, 19 nt, Artificial Sequence
  Description of Artificial Sequence: Synthetic oligonucleotide
  Antisense strand to SEQ ID NO: 237458
uuguuuacgcggagcuuag

SEQ ID NO: 237460 - RNA, 19 nt, Artificial Sequence
  Description of Artificial Sequence: Synthetic oligonucleotide
  Sense strand starting at position 2566 SEQ ID NO: 3057
ggaggcaagcaguauagaa

SEQ ID NO: 237461 - RNA, 19 nt, Artificial Sequence
  Description of Artificial Sequence: Synthetic oligonucleotide
  Antisense strand to SEQ ID NO: 237460
uucuauacugcuugccucc

SEQ ID NO: 237462 - RNA, 19 nt, Artificial Sequence
  Description of Artificial Sequence: Synthetic oligonucleotide
  Sense strand starting at position 2583 SEQ ID NO: 3057
aacagaugaacgugcgaau

SEQ ID NO: 237463 - RNA, 19 nt, Artificial Sequence
  Description of Artificial Sequence: Synthetic oligonucleotide
  Antisense strand to SEQ ID NO: 237462
auucgcacguucaucuguu

SEQ ID NO: 237464 - RNA, 19 nt, Artificial Sequence
  Description of Artificial Sequence: Synthetic oligonucleotide
  Sense strand starting at position 2682 SEQ ID NO: 3057
acacgugugccggagcaaa

SEQ ID NO: 237465 - RNA, 19 nt, Artificial Sequence
  Description of Artificial Sequence: Synthetic oligonucleotide
  Antisense strand to SEQ ID NO: 237464
uuugcuccggcacacgugu

SEQ ID NO: 237466 - RNA, 19 nt, Artificial Sequence
  Description of Artificial Sequence: Synthetic oligonucleotide
  Sense strand starting at position 2832 SEQ ID NO: 3057
gccauuucgugucuaucca

SEQ ID NO: 237467 - RNA, 19 nt, Artificial Sequence
  Description of Artificial Sequence: Synthetic oligonucleotide
  Antisense strand to SEQ ID NO: 237466
uggauagacacgaaauggc

SEQ ID NO: 237468 - RNA, 19 nt, Artificial Sequence
  Description of Artificial Sequence: Synthetic oligonucleotide
  Sense strand starting at position 3011 SEQ ID NO: 3057
ucacuucgaaguuguaagu

SEQ ID NO: 237469 - RNA, 19 nt, Artificial Sequence
  Description of Artificial Sequence: Synthetic oligonucleotide
  Antisense strand to SEQ ID NO: 237468
acuuacaacuucgaaguga

SEQ ID NO: 237470 - RNA, 19 nt, Artificial Sequence
  Description of Artificial Sequence: Synthetic oligonucleotide
  Sense strand starting at position 3073 SEQ ID NO: 3057
cucuuaguucugggaacac

SEQ ID NO: 237471 - RNA, 19 nt, Artificial Sequence
  Description of Artificial Sequence: Synthetic oligonucleotide
  Antisense strand to SEQ ID NO: 237470
guguucccagaacuaagag

SEQ ID NO: 237472 - RNA, 19 nt, Artificial Sequence
  Description of Artificial Sequence: Synthetic oligonucleotide
  Sense strand starting at position 3147 SEQ ID NO: 3057
aguucucaugcugagaagu

SEQ ID NO: 237473 - RNA, 19 nt, Artificial Sequence
  Description of Artificial Sequence: Synthetic oligonucleotide
  Antisense strand to SEQ ID NO: 237472
acuucucagcaugagaacu

SEQ ID NO: 237474 - RNA, 19 nt, Artificial Sequence
  Description of Artificial Sequence: Synthetic oligonucleotide
  Sense strand starting at position 3246 SEQ ID NO: 3057
gucagaugugcugcuucuu

SEQ ID NO: 237475 - RNA, 19 nt, Artificial Sequence
  Description of Artificial Sequence: Synthetic oligonucleotide
  Antisense strand to SEQ ID NO: 237474
aagaagcagcacaucugac

SEQ ID NO: 237476 - RNA, 19 nt, Artificial Sequence
  Description of Artificial Sequence: Synthetic oligonucleotide
  Sense strand starting at position 3251 SEQ ID NO: 3057
augugcugcuucuuuggaa

SEQ ID NO: 237477 - RNA, 19 nt, Artificial Sequence
  Description of Artificial Sequence: Synthetic oligonucleotide
  Antisense strand to SEQ ID NO: 237476
uuccaaagaagcagcacau

SEQ ID NO: 237478 - RNA, 19 nt, Artificial Sequence
  Description of Artificial Sequence: Synthetic oligonucleotide
  Sense strand starting at position 3258 SEQ ID NO: 3057
gcuucuuuggaagaaacgu

SEQ ID NO: 237479 - RNA, 19 nt, Artificial Sequence
  Description of Artificial Sequence: Synthetic oligonucleotide
  Antisense strand to SEQ ID NO: 237478
acguuucuuccaaagaagc

SEQ ID NO: 237480 - RNA, 19 nt, Artificial Sequence
  Description of Artificial Sequence: Synthetic oligonucleotide
  Sense strand starting at position 3296 SEQ ID NO: 3057
gguuguuugcugcaauuug

SEQ ID NO: 237481 - RNA, 19 nt, Artificial Sequence
  Description of Artificial Sequence: Synthetic oligonucleotide
  Antisense strand to SEQ ID NO: 237480
caaauugcagcaaacaacc

SEQ ID NO: 237482 - RNA, 19 nt, Artificial Sequence
  Description of Artificial Sequence: Synthetic oligonucleotide
  Sense strand starting at position 3546 SEQ ID NO: 3057
ggacucaugccagaaugca

SEQ ID NO: 237483 - RNA, 19 nt, Artificial Sequence
  Description of Artificial Sequence: Synthetic oligonucleotide
  Antisense strand to SEQ ID NO: 237482
ugcauucuggcaugagucc

SEQ ID NO: 237484 - RNA, 19 nt, Artificial Sequence
  Description of Artificial Sequence: Synthetic oligonucleotide
  Sense strand starting at position 3569 SEQ ID NO: 3057
ccagaauauccugaugcac

SEQ ID NO: 237485 - RNA, 19 nt, Artificial Sequence
  Description of Artificial Sequence: Synthetic oligonucleotide
  Antisense strand to SEQ ID NO: 237484
gugcaucaggauauucugg

SEQ ID NO: 237486 - RNA, 19 nt, Artificial Sequence
  Description of Artificial Sequence: Synthetic oligonucleotide
  Sense strand starting at position 3676 SEQ ID NO: 3057
uguauaucaccuggagaaa

SEQ ID NO: 237487 - RNA, 19 nt, Artificial Sequence
  Description of Artificial Sequence: Synthetic oligonucleotide
  Antisense strand to SEQ ID NO: 237486
uuucuccaggugauauaca

SEQ ID NO: 237488 - RNA, 19 nt, Artificial Sequence
  Description of Artificial Sequence: Synthetic oligonucleotide
  Sense strand starting at position 3695 SEQ ID NO: 3057
aggacuugagcuggcauua

SEQ ID NO: 237489 - RNA, 19 nt, Artificial Sequence
  Description of Artificial Sequence: Synthetic oligonucleotide
  Antisense strand to SEQ ID NO: 237488
uaaugccagcucaaguccu

SEQ ID NO: 237490 - RNA, 19 nt, Artificial Sequence
  Description of Artificial Sequence: Synthetic oligonucleotide
  Sense strand starting at position 3954 SEQ ID NO: 3057
gguugagggccuugauaga

SEQ ID NO: 237491 - RNA, 19 nt, Artificial Sequence
  Description of Artificial Sequence: Synthetic oligonucleotide
  Antisense strand to SEQ ID NO: 237490
ucuaucaaggcccucaacc

SEQ ID NO: 237492 - RNA, 19 nt, Artificial Sequence
  Description of Artificial Sequence: Synthetic oligonucleotide
  Sense strand starting at position 122 SEQ ID NO: 3058
uuccuaugucaacaaguca

SEQ ID NO: 237493 - RNA, 19 nt, Artificial Sequence
  Description of Artificial Sequence: Synthetic oligonucleotide
  Antisense strand to SEQ ID NO: 237492
ugacuuguugacauaggaa

SEQ ID NO: 237494 - RNA, 19 nt, Artificial Sequence
  Description of Artificial Sequence: Synthetic oligonucleotide
  Sense strand starting at position 210 SEQ ID NO: 3058
agucaaacauucuuguaac

SEQ ID NO: 237495 - RNA, 19 nt, Artificial Sequence
  Description of Artificial Sequence: Synthetic oligonucleotide
  Antisense strand to SEQ ID NO: 237494
guuacaagaauguuugacu

SEQ ID NO: 237496 - RNA, 19 nt, Artificial Sequence
  Description of Artificial Sequence: Synthetic oligonucleotide
  Sense strand starting at position 294 SEQ ID NO: 3058
agucuccuuccacagugaa

SEQ ID NO: 237497 - RNA, 19 nt, Artificial Sequence
  Description of Artificial Sequence: Synthetic oligonucleotide
  Antisense strand to SEQ ID NO: 237496
uucacuguggaaggagacu

SEQ ID NO: 237498 - RNA, 19 nt, Artificial Sequence
  Description of Artificial Sequence: Synthetic oligonucleotide
  Sense strand starting at position 314 SEQ ID NO: 3058
aggauuaaccuguguaacc

SEQ ID NO: 237499 - RNA, 19 nt, Artificial Sequence
  Description of Artificial Sequence: Synthetic oligonucleotide
  Antisense strand to SEQ ID NO: 237498
gguuacacagguuaauccu

SEQ ID NO: 237500 - RNA, 19 nt, Artificial Sequence
  Description of Artificial Sequence: Synthetic oligonucleotide
  Sense strand starting at position 315 SEQ ID NO: 3058
ggauuaaccuguguaacca

SEQ ID NO: 237501 - RNA, 19 nt, Artificial Sequence
  Description of Artificial Sequence: Synthetic oligonucleotide
  Antisense strand to SEQ ID NO: 237500
ugguuacacagguuaaucc

SEQ ID NO: 237502 - RNA, 19 nt, Artificial Sequence
  Description of Artificial Sequence: Synthetic oligonucleotide
  Sense strand starting at position 323 SEQ ID NO: 3058
cuguguaaccaacaggauu

SEQ ID NO: 237503 - RNA, 19 nt, Artificial Sequence
  Description of Artificial Sequence: Synthetic oligonucleotide
  Antisense strand to SEQ ID NO: 237502
aauccuguugguuacacag

SEQ ID NO: 237504 - RNA, 19 nt, Artificial Sequence
  Description of Artificial Sequence: Synthetic oligonucleotide
  Sense strand starting at position 345 SEQ ID NO: 3058
uggagaugauggaguugau

SEQ ID NO: 237505 - RNA, 19 nt, Artificial Sequence
  Description of Artificial Sequence: Synthetic oligonucleotide
  Antisense strand to SEQ ID NO: 237504
aucaacuccaucaucucca

SEQ ID NO: 237506 - RNA, 19 nt, Artificial Sequence
  Description of Artificial Sequence: Synthetic oligonucleotide
  Sense strand starting at position 388 SEQ ID NO: 3058
aggucauucuaacuuugaa

SEQ ID NO: 237507 - RNA, 19 nt, Artificial Sequence
  Description of Artificial Sequence: Synthetic oligonucleotide
  Antisense strand to SEQ ID NO: 237506
uucaaaguuagaaugaccu

SEQ ID NO: 237508 - RNA, 19 nt, Artificial Sequence
  Description of Artificial Sequence: Synthetic oligonucleotide
  Sense strand starting at position 404 SEQ ID NO: 3058
gaaguuagaugacucacuu

SEQ ID NO: 237509 - RNA, 19 nt, Artificial Sequence
  Description of Artificial Sequence: Synthetic oligonucleotide
  Antisense strand to SEQ ID NO: 237508
aagugagucaucuaacuuc

SEQ ID NO: 237510 - RNA, 19 nt, Artificial Sequence
  Description of Artificial Sequence: Synthetic oligonucleotide
  Sense strand starting at position 424 SEQ ID NO: 3058
aaggaagucaguggucaca

SEQ ID NO: 237511 - RNA, 19 nt, Artificial Sequence
  Description of Artificial Sequence: Synthetic oligonucleotide
  Antisense strand to SEQ ID NO: 237510
ugugaccacugacuuccuu

SEQ ID NO: 237512 - RNA, 19 nt, Artificial Sequence
  Description of Artificial Sequence: Synthetic oligonucleotide
  Sense strand starting at position 427 SEQ ID NO: 3058
gaagucaguggucacauaa

SEQ ID NO: 237513 - RNA, 19 nt, Artificial Sequence
  Description of Artificial Sequence: Synthetic oligonucleotide
  Antisense strand to SEQ ID NO: 237512
uuaugugaccacugacuuc

SEQ ID NO: 237514 - RNA, 19 nt, Artificial Sequence
  Description of Artificial Sequence: Synthetic oligonucleotide
  Sense strand starting at position 487 SEQ ID NO: 3058
ggaacugaguccuccuauu

SEQ ID NO: 237515 - RNA, 19 nt, Artificial Sequence
  Description of Artificial Sequence: Synthetic oligonucleotide
  Antisense strand to SEQ ID NO: 237514
aauaggaggacucaguucc

SEQ ID NO: 237516 - RNA, 19 nt, Artificial Sequence
  Description of Artificial Sequence: Synthetic oligonucleotide
  Sense strand starting at position 694 SEQ ID NO: 3058
ugauuacaguuaucuuaag

SEQ ID NO: 237517 - RNA, 19 nt, Artificial Sequence
  Description of Artificial Sequence: Synthetic oligonucleotide
  Antisense strand to SEQ ID NO: 237516
cuuaagauaacuguaauca

SEQ ID NO: 237518 - RNA, 19 nt, Artificial Sequence
  Description of Artificial Sequence: Synthetic oligonucleotide
  Sense strand starting at position 759 SEQ ID NO: 3058
aguagaaccuuaucaggca

SEQ ID NO: 237519 - RNA, 19 nt, Artificial Sequence
  Description of Artificial Sequence: Synthetic oligonucleotide
  Antisense strand to SEQ ID NO: 237518
ugccugauaagguucuacu

SEQ ID NO: 237520 - RNA, 19 nt, Artificial Sequence
  Description of Artificial Sequence: Synthetic oligonucleotide
  Sense strand starting at position 1469 SEQ ID NO: 3058
guagguaguacguaaagaa

SEQ ID NO: 237521 - RNA, 19 nt, Artificial Sequence
  Description of Artificial Sequence: Synthetic oligonucleotide
  Antisense strand to SEQ ID NO: 237520
uucuuuacguacuaccuac

SEQ ID NO: 237522 - RNA, 19 nt, Artificial Sequence
  Description of Artificial Sequence: Synthetic oligonucleotide
  Sense strand starting at position 1493 SEQ ID NO: 3058
ucaagauaacgcuaaguuu

SEQ ID NO: 237523 - RNA, 19 nt, Artificial Sequence
  Description of Artificial Sequence: Synthetic oligonucleotide
  Antisense strand to SEQ ID NO: 237522
aaacuuagcguuaucuuga

SEQ ID NO: 237524 - RNA, 19 nt, Artificial Sequence
  Description of Artificial Sequence: Synthetic oligonucleotide
  Sense strand starting at position 1528 SEQ ID NO: 3058
gaagaacggaguuaacguu

SEQ ID NO: 237525 - RNA, 19 nt, Artificial Sequence
  Description of Artificial Sequence: Synthetic oligonucleotide
  Antisense strand to SEQ ID NO: 237524
aacguuaacuccguucuuc

SEQ ID NO: 237526 - RNA, 19 nt, Artificial Sequence
  Description of Artificial Sequence: Synthetic oligonucleotide
  Sense strand starting at position 1796 SEQ ID NO: 3058
gugugauacgguagucaug

SEQ ID NO: 237527 - RNA, 19 nt, Artificial Sequence
  Description of Artificial Sequence: Synthetic oligonucleotide
  Antisense strand to SEQ ID NO: 237526
caugacuaccguaucacac

SEQ ID NO: 237528 - RNA, 19 nt, Artificial Sequence
  Description of Artificial Sequence: Synthetic oligonucleotide
  Sense strand starting at position 2263 SEQ ID NO: 3058
ugaguucguaaugaacauu

SEQ ID NO: 237529 - RNA, 19 nt, Artificial Sequence
  Description of Artificial Sequence: Synthetic oligonucleotide
  Antisense strand to SEQ ID NO: 237528
aauguucauuacgaacuca

SEQ ID NO: 237530 - RNA, 19 nt, Artificial Sequence
  Description of Artificial Sequence: Synthetic oligonucleotide
  Sense strand starting at position 2646 SEQ ID NO: 3058
agaggaggaugguugucaa

SEQ ID NO: 237531 - RNA, 19 nt, Artificial Sequence
  Description of Artificial Sequence: Synthetic oligonucleotide
  Antisense strand to SEQ ID NO: 237530
uugacaaccauccuccucu

SEQ ID NO: 237532 - RNA, 19 nt, Artificial Sequence
  Description of Artificial Sequence: Synthetic oligonucleotide
  Sense strand starting at position 2716 SEQ ID NO: 3058
ggguaaaugacauaugugu

SEQ ID NO: 237533 - RNA, 19 nt, Artificial Sequence
  Description of Artificial Sequence: Synthetic oligonucleotide
  Antisense strand to SEQ ID NO: 237532
acacauaugucauuuaccc

SEQ ID NO: 237534 - RNA, 19 nt, Artificial Sequence
  Description of Artificial Sequence: Synthetic oligonucleotide
  Sense strand starting at position 2914 SEQ ID NO: 3058
ugaaaugaguaguccuacu

SEQ ID NO: 237535 - RNA, 19 nt, Artificial Sequence
  Description of Artificial Sequence: Synthetic oligonucleotide
  Antisense strand to SEQ ID NO: 237534
aguaggacuacucauuuca

SEQ ID NO: 237536 - RNA, 19 nt, Artificial Sequence
  Description of Artificial Sequence: Synthetic oligonucleotide
  Sense strand starting at position 2933 SEQ ID NO: 3058
uuucuuagugaguauauuc

SEQ ID NO: 237537 - RNA, 19 nt, Artificial Sequence
  Description of Artificial Sequence: Synthetic oligonucleotide
  Antisense strand to SEQ ID NO: 237536
gaauauacucacuaagaaa

SEQ ID NO: 237538 - RNA, 19 nt, Artificial Sequence
  Description of Artificial Sequence: Synthetic oligonucleotide
  Sense strand starting at position 3068 SEQ ID NO: 3058
gaagaagcuuuggcucaaa

SEQ ID NO: 237539 - RNA, 19 nt, Artificial Sequence
  Description of Artificial Sequence: Synthetic oligonucleotide
  Antisense strand to SEQ ID NO: 237538
uuugagccaaagcuucuuc

SEQ ID NO: 237540 - RNA, 19 nt, Artificial Sequence
  Description of Artificial Sequence: Synthetic oligonucleotide
  Sense strand starting at position 3123 SEQ ID NO: 3058
gguugcgauuucuugauaa

SEQ ID NO: 237541 - RNA, 19 nt, Artificial Sequence
  Description of Artificial Sequence: Synthetic oligonucleotide
  Antisense strand to SEQ ID NO: 237540
uuaucaagaaaucgcaacc

SEQ ID NO: 237542 - RNA, 19 nt, Artificial Sequence
  Description of Artificial Sequence: Synthetic oligonucleotide
  Sense strand starting at position 3189 SEQ ID NO: 3058
uugcauuaacgugaagaga

SEQ ID NO: 237543 - RNA, 19 nt, Artificial Sequence
  Description of Artificial Sequence: Synthetic oligonucleotide
  Antisense strand to SEQ ID NO: 237542
ucucuucacguuaaugcaa

SEQ ID NO: 237544 - RNA, 19 nt, Artificial Sequence
  Description of Artificial Sequence: Synthetic oligonucleotide
  Sense strand starting at position 3200 SEQ ID NO: 3058
ugaagagauuaugugguca

SEQ ID NO: 237545 - RNA, 19 nt, Artificial Sequence
  Description of Artificial Sequence: Synthetic oligonucleotide
  Antisense strand to SEQ ID NO: 237544
ugaccacauaaucucuuca

SEQ ID NO: 237546 - RNA, 19 nt, Artificial Sequence
  Description of Artificial Sequence: Synthetic oligonucleotide
  Sense strand starting at position 3204 SEQ ID NO: 3058
gagauuauguggucaugau

SEQ ID NO: 237547 - RNA, 19 nt, Artificial Sequence
  Description of Artificial Sequence: Synthetic oligonucleotide
  Antisense strand to SEQ ID NO: 237546
aucaugaccacauaaucuc

SEQ ID NO: 237548 - RNA, 19 nt, Artificial Sequence
  Description of Artificial Sequence: Synthetic oligonucleotide
  Sense strand starting at position 3205 SEQ ID NO: 3058
agauuauguggucaugauu

SEQ ID NO: 237549 - RNA, 19 nt, Artificial Sequence
  Description of Artificial Sequence: Synthetic oligonucleotide
  Antisense strand to SEQ ID NO: 237548
aaucaugaccacauaaucu

SEQ ID NO: 237550 - RNA, 19 nt, Artificial Sequence
  Description of Artificial Sequence: Synthetic oligonucleotide
  Sense strand starting at position 3213 SEQ ID NO: 3058
uggucaugauucuuaagaa

SEQ ID NO: 237551 - RNA, 19 nt, Artificial Sequence
  Description of Artificial Sequence: Synthetic oligonucleotide
  Antisense strand to SEQ ID NO: 237550
uucuuaagaaucaugacca

SEQ ID NO: 237552 - RNA, 19 nt, Artificial Sequence
  Description of Artificial Sequence: Synthetic oligonucleotide
  Sense strand starting at position 3252 SEQ ID NO: 3058
agguuuaugggucacuuau

SEQ ID NO: 237553 - RNA, 19 nt, Artificial Sequence
  Description of Artificial Sequence: Synthetic oligonucleotide
  Antisense strand to SEQ ID NO: 237552
auaagugacccauaaaccu

SEQ ID NO: 237554 - RNA, 19 nt, Artificial Sequence
  Description of Artificial Sequence: Synthetic oligonucleotide
  Sense strand starting at position 3265 SEQ ID NO: 3058
acuuauggaacuugagagu

SEQ ID NO: 237555 - RNA, 19 nt, Artificial Sequence
  Description of Artificial Sequence: Synthetic oligonucleotide
  Antisense strand to SEQ ID NO: 237554
acucucaaguuccauaagu

SEQ ID NO: 237556 - RNA, 19 nt, Artificial Sequence
  Description of Artificial Sequence: Synthetic oligonucleotide
  Sense strand starting at position 3278 SEQ ID NO: 3058
gagaguauuacacgaaugg

SEQ ID NO: 237557 - RNA, 19 nt, Artificial Sequence
  Description of Artificial Sequence: Synthetic oligonucleotide
  Antisense strand to SEQ ID NO: 237556
ccauucguguaauacucuc

SEQ ID NO: 237558 - RNA, 19 nt, Artificial Sequence
  Description of Artificial Sequence: Synthetic oligonucleotide
  Sense strand starting at position 3282 SEQ ID NO: 3058
guauuacacgaaugggaaa

SEQ ID NO: 237559 - RNA, 19 nt, Artificial Sequence
  Description of Artificial Sequence: Synthetic oligonucleotide
  Antisense strand to SEQ ID NO: 237558
uuucccauucguguaauac

SEQ ID NO: 237560 - RNA, 19 nt, Artificial Sequence
  Description of Artificial Sequence: Synthetic oligonucleotide
  Sense strand starting at position 3371 SEQ ID NO: 3058
agcucauuguaacuggaga

SEQ ID NO: 237561 - RNA, 19 nt, Artificial Sequence
  Description of Artificial Sequence: Synthetic oligonucleotide
  Antisense strand to SEQ ID NO: 237560
ucuccaguuacaaugagcu

SEQ ID NO: 237562 - RNA, 19 nt, Artificial Sequence
  Description of Artificial Sequence: Synthetic oligonucleotide
  Sense strand starting at position 3482 SEQ ID NO: 3058
ucacuuaucucuuugagga

SEQ ID NO: 237563 - RNA, 19 nt, Artificial Sequence
  Description of Artificial Sequence: Synthetic oligonucleotide
  Antisense strand to SEQ ID NO: 237562
uccucaaagagauaaguga

SEQ ID NO: 237564 - RNA, 19 nt, Artificial Sequence
  Description of Artificial Sequence: Synthetic oligonucleotide
  Sense strand starting at position 3483 SEQ ID NO: 3058
cacuuaucucuuugaggag

SEQ ID NO: 237565 - RNA, 19 nt, Artificial Sequence
  Description of Artificial Sequence: Synthetic oligonucleotide
  Antisense strand to SEQ ID NO: 237564
cuccucaaagagauaagug

SEQ ID NO: 237566 - RNA, 19 nt, Artificial Sequence
  Description of Artificial Sequence: Synthetic oligonucleotide
  Sense strand starting at position 3543 SEQ ID NO: 3058
ccugcauagccuugauuug

SEQ ID NO: 237567 - RNA, 19 nt, Artificial Sequence
  Description of Artificial Sequence: Synthetic oligonucleotide
  Antisense strand to SEQ ID NO: 237566
caaaucaaggcuaugcagg

SEQ ID NO: 237568 - RNA, 19 nt, Artificial Sequence
  Description of Artificial Sequence: Synthetic oligonucleotide
  Sense strand starting at position 3549 SEQ ID NO: 3058
uagccuugauuugccgaga

SEQ ID NO: 237569 - RNA, 19 nt, Artificial Sequence
  Description of Artificial Sequence: Synthetic oligonucleotide
  Antisense strand to SEQ ID NO: 237568
ucucggcaaaucaaggcua

SEQ ID NO: 237570 - RNA, 19 nt, Artificial Sequence
  Description of Artificial Sequence: Synthetic oligonucleotide
  Sense strand starting at position 3740 SEQ ID NO: 3058
uucuacagauauucgauua

SEQ ID NO: 237571 - RNA, 19 nt, Artificial Sequence
  Description of Artificial Sequence: Synthetic oligonucleotide
  Antisense strand to SEQ ID NO: 237570
uaaucgaauaucuguagaa

SEQ ID NO: 237572 - RNA, 19 nt, Artificial Sequence
  Description of Artificial Sequence: Synthetic oligonucleotide
  Sense strand starting at position 1077 SEQ ID NO: 3059
agaggagucugggcagagu

SEQ ID NO: 237573 - RNA, 19 nt, Artificial Sequence
  Description of Artificial Sequence: Synthetic oligonucleotide
  Antisense strand to SEQ ID NO: 237572
acucugcccagacuccucu

SEQ ID NO: 237574 - RNA, 19 nt, Artificial Sequence
  Description of Artificial Sequence: Synthetic oligonucleotide
  Sense strand starting at position 1133 SEQ ID NO: 3059
ccgucauucccuggucuca

SEQ ID NO: 237575 - RNA, 19 nt, Artificial Sequence
  Description of Artificial Sequence: Synthetic oligonucleotide
  Antisense strand to SEQ ID NO: 237574
ugagaccagggaaugacgg

SEQ ID NO: 237576 - RNA, 19 nt, Artificial Sequence
  Description of Artificial Sequence: Synthetic oligonucleotide
  Sense strand starting at position 1543 SEQ ID NO: 3059
ucuuaagucccgugagacu

SEQ ID NO: 237577 - RNA, 19 nt, Artificial Sequence
  Description of Artificial Sequence: Synthetic oligonucleotide
  Antisense strand to SEQ ID NO: 237576
agucucacgggacuuaaga

SEQ ID NO: 237578 - RNA, 19 nt, Artificial Sequence
  Description of Artificial Sequence: Synthetic oligonucleotide
  Sense strand starting at position 1602 SEQ ID NO: 3059
cagcccuaaucggaaugau

SEQ ID NO: 237579 - RNA, 19 nt, Artificial Sequence
  Description of Artificial Sequence: Synthetic oligonucleotide
  Antisense strand to SEQ ID NO: 237578
aucauuccgauuagggcug

SEQ ID NO: 237580 - RNA, 19 nt, Artificial Sequence
  Description of Artificial Sequence: Synthetic oligonucleotide
  Sense strand starting at position 1746 SEQ ID NO: 3059
guaguagccucuccaggau

SEQ ID NO: 237581 - RNA, 19 nt, Artificial Sequence
  Description of Artificial Sequence: Synthetic oligonucleotide
  Antisense strand to SEQ ID NO: 237580
auccuggagaggcuacuac

SEQ ID NO: 237582 - RNA, 19 nt, Artificial Sequence
  Description of Artificial Sequence: Synthetic oligonucleotide
  Sense strand starting at position 1784 SEQ ID NO: 3059
gggaguagcuacucacaug

SEQ ID NO: 237583 - RNA, 19 nt, Artificial Sequence
  Description of Artificial Sequence: Synthetic oligonucleotide
  Antisense strand to SEQ ID NO: 237582
caugugaguagcuacuccc

SEQ ID NO: 237584 - RNA, 19 nt, Artificial Sequence
  Description of Artificial Sequence: Synthetic oligonucleotide
  Sense strand starting at position 1993 SEQ ID NO: 3059
uggguucucagagggauag

SEQ ID NO: 237585 - RNA, 19 nt, Artificial Sequence
  Description of Artificial Sequence: Synthetic oligonucleotide
  Antisense strand to SEQ ID NO: 237584
cuaucccucugagaaccca

SEQ ID NO: 237586 - RNA, 19 nt, Artificial Sequence
  Description of Artificial Sequence: Synthetic oligonucleotide
  Sense strand starting at position 2164 SEQ ID NO: 3059
cucggaguaaucugagaaa

SEQ ID NO: 237587 - RNA, 19 nt, Artificial Sequence
  Description of Artificial Sequence: Synthetic oligonucleotide
  Antisense strand to SEQ ID NO: 237586
uuucucagauuacuccgag

SEQ ID NO: 237588 - RNA, 19 nt, Artificial Sequence
  Description of Artificial Sequence: Synthetic oligonucleotide
  Sense strand starting at position 2167 SEQ ID NO: 3059
ggaguaaucugagaaaugc

SEQ ID NO: 237589 - RNA, 19 nt, Artificial Sequence
  Description of Artificial Sequence: Synthetic oligonucleotide
  Antisense strand to SEQ ID NO: 237588
gcauuucucagauuacucc

SEQ ID NO: 237590 - RNA, 19 nt, Artificial Sequence
  Description of Artificial Sequence: Synthetic oligonucleotide
  Sense strand starting at position 2178 SEQ ID NO: 3059
agaaaugcauuccaguuaa

SEQ ID NO: 237591 - RNA, 19 nt, Artificial Sequence
  Description of Artificial Sequence: Synthetic oligonucleotide
  Antisense strand to SEQ ID NO: 237590
uuaacuggaaugcauuucu

SEQ ID NO: 237592 - RNA, 19 nt, Artificial Sequence
  Description of Artificial Sequence: Synthetic oligonucleotide
  Sense strand starting at position 2302 SEQ ID NO: 3059
uccacacuuccguguguga

SEQ ID NO: 237593 - RNA, 19 nt, Artificial Sequence
  Description of Artificial Sequence: Synthetic oligonucleotide
  Antisense strand to SEQ ID NO: 237592
ucacacacggaagugugga

SEQ ID NO: 237594 - RNA, 19 nt, Artificial Sequence
  Description of Artificial Sequence: Synthetic oligonucleotide
  Sense strand starting at position 2304 SEQ ID NO: 3059
cacacuuccgugugugaug

SEQ ID NO: 237595 - RNA, 19 nt, Artificial Sequence
  Description of Artificial Sequence: Synthetic oligonucleotide
  Antisense strand to SEQ ID NO: 237594
caucacacacggaagugug

SEQ ID NO: 237596 - RNA, 19 nt, Artificial Sequence
  Description of Artificial Sequence: Synthetic oligonucleotide
  Sense strand starting at position 2404 SEQ ID NO: 3059
agacuugccuuccugaauc

SEQ ID NO: 237597 - RNA, 19 nt, Artificial Sequence
  Description of Artificial Sequence: Synthetic oligonucleotide
  Antisense strand to SEQ ID NO: 237596
gauucaggaaggcaagucu

SEQ ID NO: 237598 - RNA, 19 nt, Artificial Sequence
  Description of Artificial Sequence: Synthetic oligonucleotide
  Sense strand starting at position 2447 SEQ ID NO: 3059
acugcuuucugagucaagu

SEQ ID NO: 237599 - RNA, 19 nt, Artificial Sequence
  Description of Artificial Sequence: Synthetic oligonucleotide
  Antisense strand to SEQ ID NO: 237598
acuugacucagaaagcagu

SEQ ID NO: 237600 - RNA, 19 nt, Artificial Sequence
  Description of Artificial Sequence: Synthetic oligonucleotide
  Sense strand starting at position 2456 SEQ ID NO: 3059
ugagucaaguucugaacua

SEQ ID NO: 237601 - RNA, 19 nt, Artificial Sequence
  Description of Artificial Sequence: Synthetic oligonucleotide
  Antisense strand to SEQ ID NO: 237600
uaguucagaacuugacuca

SEQ ID NO: 237602 - RNA, 19 nt, Artificial Sequence
  Description of Artificial Sequence: Synthetic oligonucleotide
  Sense strand starting at position 2457 SEQ ID NO: 3059
gagucaaguucugaacuau

SEQ ID NO: 237603 - RNA, 19 nt, Artificial Sequence
  Description of Artificial Sequence: Synthetic oligonucleotide
  Antisense strand to SEQ ID NO: 237602
auaguucagaacuugacuc

SEQ ID NO: 237604 - RNA, 19 nt, Artificial Sequence
  Description of Artificial Sequence: Synthetic oligonucleotide
  Sense strand starting at position 2495 SEQ ID NO: 3059
ggaugugaccauggguaag

SEQ ID NO: 237605 - RNA, 19 nt, Artificial Sequence
  Description of Artificial Sequence: Synthetic oligonucleotide
  Antisense strand to SEQ ID NO: 237604
cuuacccauggucacaucc

SEQ ID NO: 237606 - RNA, 19 nt, Artificial Sequence
  Description of Artificial Sequence: Synthetic oligonucleotide
  Sense strand starting at position 2751 SEQ ID NO: 3059
gccagugaacuugggcaaa

SEQ ID NO: 237607 - RNA, 19 nt, Artificial Sequence
  Description of Artificial Sequence: Synthetic oligonucleotide
  Antisense strand to SEQ ID NO: 237606
uuugcccaaguucacuggc

SEQ ID NO: 237608 - RNA, 19 nt, Artificial Sequence
  Description of Artificial Sequence: Synthetic oligonucleotide
  Sense strand starting at position 2827 SEQ ID NO: 3059
cucaccuaucgugagacua

SEQ ID NO: 237609 - RNA, 19 nt, Artificial Sequence
  Description of Artificial Sequence: Synthetic oligonucleotide
  Antisense strand to SEQ ID NO: 237608
uagucucacgauaggugag

SEQ ID NO: 237610 - RNA, 19 nt, Artificial Sequence
  Description of Artificial Sequence: Synthetic oligonucleotide
  Sense strand starting at position 2829 SEQ ID NO: 3059
caccuaucgugagacuaaa

SEQ ID NO: 237611 - RNA, 19 nt, Artificial Sequence
  Description of Artificial Sequence: Synthetic oligonucleotide
  Antisense strand to SEQ ID NO: 237610
uuuagucucacgauaggug

SEQ ID NO: 237612 - RNA, 19 nt, Artificial Sequence
  Description of Artificial Sequence: Synthetic oligonucleotide
  Sense strand starting at position 2846 SEQ ID NO: 3059
aaugaagucccgugugaug

SEQ ID NO: 237613 - RNA, 19 nt, Artificial Sequence
  Description of Artificial Sequence: Synthetic oligonucleotide
  Antisense strand to SEQ ID NO: 237612
caucacacgggacuucauu

SEQ ID NO: 237614 - RNA, 19 nt, Artificial Sequence
  Description of Artificial Sequence: Synthetic oligonucleotide
  Sense strand starting at position 2908 SEQ ID NO: 3059
cagcgaucgcugggaacau

SEQ ID NO: 237615 - RNA, 19 nt, Artificial Sequence
  Description of Artificial Sequence: Synthetic oligonucleotide
  Antisense strand to SEQ ID NO: 237614
auguucccagcgaucgcug

SEQ ID NO: 237616 - RNA, 19 nt, Artificial Sequence
  Description of Artificial Sequence: Synthetic oligonucleotide
  Sense strand starting at position 2912 SEQ ID NO: 3059
gaucgcugggaacauuauu

SEQ ID NO: 237617 - RNA, 19 nt, Artificial Sequence
  Description of Artificial Sequence: Synthetic oligonucleotide
  Antisense strand to SEQ ID NO: 237616
aauaauguucccagcgauc

SEQ ID NO: 237618 - RNA, 19 nt, Artificial Sequence
  Description of Artificial Sequence: Synthetic oligonucleotide
  Sense strand starting at position 2918 SEQ ID NO: 3059
ugggaacauuauuaggauu

SEQ ID NO: 237619 - RNA, 19 nt, Artificial Sequence
  Description of Artificial Sequence: Synthetic oligonucleotide
  Antisense strand to SEQ ID NO: 237618
aauccuaauaauguuccca

SEQ ID NO: 237620 - RNA, 19 nt, Artificial Sequence
  Description of Artificial Sequence: Synthetic oligonucleotide
  Sense strand starting at position 2920 SEQ ID NO: 3059
ggaacauuauuaggauuuc

SEQ ID NO: 237621 - RNA, 19 nt, Artificial Sequence
  Description of Artificial Sequence: Synthetic oligonucleotide
  Antisense strand to SEQ ID NO: 237620
gaaauccuaauaauguucc

SEQ ID NO: 237622 - RNA, 19 nt, Artificial Sequence
  Description of Artificial Sequence: Synthetic oligonucleotide
  Sense strand starting at position 2964 SEQ ID NO: 3059
uaagacagaucugcugaga

SEQ ID NO: 237623 - RNA, 19 nt, Artificial Sequence
  Description of Artificial Sequence: Synthetic oligonucleotide
  Antisense strand to SEQ ID NO: 237622
ucucagcagaucugucuua

SEQ ID NO: 237624 - RNA, 19 nt, Artificial Sequence
  Description of Artificial Sequence: Synthetic oligonucleotide
  Sense strand starting at position 3173 SEQ ID NO: 3059
ucccuuaaggccugaaaug

SEQ ID NO: 237625 - RNA, 19 nt, Artificial Sequence
  Description of Artificial Sequence: Synthetic oligonucleotide
  Antisense strand to SEQ ID NO: 237624
cauuucaggccuuaaggga

SEQ ID NO: 237626 - RNA, 19 nt, Artificial Sequence
  Description of Artificial Sequence: Synthetic oligonucleotide
  Sense strand starting at position 3204 SEQ ID NO: 3059
cggaaauugcagcaggaaa

SEQ ID NO: 237627 - RNA, 19 nt, Artificial Sequence
  Description of Artificial Sequence: Synthetic oligonucleotide
  Antisense strand to SEQ ID NO: 237626
uuuccugcugcaauuuccg

SEQ ID NO: 237628 - RNA, 19 nt, Artificial Sequence
  Description of Artificial Sequence: Synthetic oligonucleotide
  Sense strand starting at position 3248 SEQ ID NO: 3059
gaaacacuugcuggcugaa

SEQ ID NO: 237629 - RNA, 19 nt, Artificial Sequence
  Description of Artificial Sequence: Synthetic oligonucleotide
  Antisense strand to SEQ ID NO: 237628
uucagccagcaaguguuuc

SEQ ID NO: 237630 - RNA, 19 nt, Artificial Sequence
  Description of Artificial Sequence: Synthetic oligonucleotide
  Sense strand starting at position 3250 SEQ ID NO: 3059
aacacuugcuggcugaaga

SEQ ID NO: 237631 - RNA, 19 nt, Artificial Sequence
  Description of Artificial Sequence: Synthetic oligonucleotide
  Antisense strand to SEQ ID NO: 237630
ucuucagccagcaaguguu

SEQ ID NO: 237632 - RNA, 19 nt, Artificial Sequence
  Description of Artificial Sequence: Synthetic oligonucleotide
  Sense strand starting at position 3390 SEQ ID NO: 3059
agggacuucuguugggaca

SEQ ID NO: 237633 - RNA, 19 nt, Artificial Sequence
  Description of Artificial Sequence: Synthetic oligonucleotide
  Antisense strand to SEQ ID NO: 237632
ugucccaacagaagucccu

SEQ ID NO: 237634 - RNA, 19 nt, Artificial Sequence
  Description of Artificial Sequence: Synthetic oligonucleotide
  Sense strand starting at position 3391 SEQ ID NO: 3059
gggacuucuguugggacaa

SEQ ID NO: 237635 - RNA, 19 nt, Artificial Sequence
  Description of Artificial Sequence: Synthetic oligonucleotide
  Antisense strand to SEQ ID NO: 237634
uugucccaacagaaguccc

SEQ ID NO: 237636 - RNA, 19 nt, Artificial Sequence
  Description of Artificial Sequence: Synthetic oligonucleotide
  Sense strand starting at position 3392 SEQ ID NO: 3059
ggacuucuguugggacaaa

SEQ ID NO: 237637 - RNA, 19 nt, Artificial Sequence
  Description of Artificial Sequence: Synthetic oligonucleotide
  Antisense strand to SEQ ID NO: 237636
uuugucccaacagaagucc

SEQ ID NO: 237638 - RNA, 19 nt, Artificial Sequence
  Description of Artificial Sequence: Synthetic oligonucleotide
  Sense strand starting at position 3574 SEQ ID NO: 3059
gugggacccuucugauaug

SEQ ID NO: 237639 - RNA, 19 nt, Artificial Sequence
  Description of Artificial Sequence: Synthetic oligonucleotide
  Antisense strand to SEQ ID NO: 237638
cauaucagaagggucccac

SEQ ID NO: 237640 - RNA, 19 nt, Artificial Sequence
  Description of Artificial Sequence: Synthetic oligonucleotide
  Sense strand starting at position 3577 SEQ ID NO: 3059
ggacccuucugauauguga

SEQ ID NO: 237641 - RNA, 19 nt, Artificial Sequence
  Description of Artificial Sequence: Synthetic oligonucleotide
  Antisense strand to SEQ ID NO: 237640
ucacauaucagaagggucc

SEQ ID NO: 237642 - RNA, 19 nt, Artificial Sequence
  Description of Artificial Sequence: Synthetic oligonucleotide
  Sense strand starting at position 3588 SEQ ID NO: 3059
auaugugacuuccaggaau

SEQ ID NO: 237643 - RNA, 19 nt, Artificial Sequence
  Description of Artificial Sequence: Synthetic oligonucleotide
  Antisense strand to SEQ ID NO: 237642
auuccuggaagucacauau

SEQ ID NO: 237644 - RNA, 19 nt, Artificial Sequence
  Description of Artificial Sequence: Synthetic oligonucleotide
  Sense strand starting at position 3590 SEQ ID NO: 3059
augugacuuccaggaauaa

SEQ ID NO: 237645 - RNA, 19 nt, Artificial Sequence
  Description of Artificial Sequence: Synthetic oligonucleotide
  Antisense strand to SEQ ID NO: 237644
uuauuccuggaagucacau

SEQ ID NO: 237646 - RNA, 19 nt, Artificial Sequence
  Description of Artificial Sequence: Synthetic oligonucleotide
  Sense strand starting at position 3669 SEQ ID NO: 3059
cucugcugcucugucuaaa

SEQ ID NO: 237647 - RNA, 19 nt, Artificial Sequence
  Description of Artificial Sequence: Synthetic oligonucleotide
  Antisense strand to SEQ ID NO: 237646
uuuagacagagcagcagag

SEQ ID NO: 237648 - RNA, 19 nt, Artificial Sequence
  Description of Artificial Sequence: Synthetic oligonucleotide
  Sense strand starting at position 3777 SEQ ID NO: 3059
cuuccuagaucaucuaguu

SEQ ID NO: 237649 - RNA, 19 nt, Artificial Sequence
  Description of Artificial Sequence: Synthetic oligonucleotide
  Antisense strand to SEQ ID NO: 237648
aacuagaugaucuaggaag

SEQ ID NO: 237650 - RNA, 19 nt, Artificial Sequence
  Description of Artificial Sequence: Synthetic oligonucleotide
  Sense strand starting at position 3793 SEQ ID NO: 3059
guuccugucuguuccauca

SEQ ID NO: 237651 - RNA, 19 nt, Artificial Sequence
  Description of Artificial Sequence: Synthetic oligonucleotide
  Antisense strand to SEQ ID NO: 237650
ugauggaacagacaggaac

SEQ ID NO: 237652 - RNA, 19 nt, Artificial Sequence
  Description of Artificial Sequence: Synthetic oligonucleotide
  Sense strand starting at position 27 SEQ ID NO: 3060
gaugccucuuuauguguga

SEQ ID NO: 237653 - RNA, 19 nt, Artificial Sequence
  Description of Artificial Sequence: Synthetic oligonucleotide
  Antisense strand to SEQ ID NO: 237652
ucacacauaaagaggcauc

SEQ ID NO: 237654 - RNA, 19 nt, Artificial Sequence
  Description of Artificial Sequence: Synthetic oligonucleotide
  Sense strand starting at position 29 SEQ ID NO: 3060
ugccucuuuaugugugagu

SEQ ID NO: 237655 - RNA, 19 nt, Artificial Sequence
  Description of Artificial Sequence: Synthetic oligonucleotide
  Antisense strand to SEQ ID NO: 237654
acucacacauaaagaggca

SEQ ID NO: 237656 - RNA, 19 nt, Artificial Sequence
  Description of Artificial Sequence: Synthetic oligonucleotide
  Sense strand starting at position 30 SEQ ID NO: 3060
gccucuuuaugugugagua

SEQ ID NO: 237657 - RNA, 19 nt, Artificial Sequence
  Description of Artificial Sequence: Synthetic oligonucleotide
  Antisense strand to SEQ ID NO: 237656
uacucacacauaaagaggc

SEQ ID NO: 237658 - RNA, 19 nt, Artificial Sequence
  Description of Artificial Sequence: Synthetic oligonucleotide
  Sense strand starting at position 31 SEQ ID NO: 3060
ccucuuuaugugugaguag

SEQ ID NO: 237659 - RNA, 19 nt, Artificial Sequence
  Description of Artificial Sequence: Synthetic oligonucleotide
  Antisense strand to SEQ ID NO: 237658
cuacucacacauaaagagg

SEQ ID NO: 237660 - RNA, 19 nt, Artificial Sequence
  Description of Artificial Sequence: Synthetic oligonucleotide
  Sense strand starting at position 32 SEQ ID NO: 3060
cucuuuaugugugaguaga

SEQ ID NO: 237661 - RNA, 19 nt, Artificial Sequence
  Description of Artificial Sequence: Synthetic oligonucleotide
  Antisense strand to SEQ ID NO: 237660
ucuacucacacauaaagag

SEQ ID NO: 237662 - RNA, 19 nt, Artificial Sequence
  Description of Artificial Sequence: Synthetic oligonucleotide
  Sense strand starting at position 488 SEQ ID NO: 3060
ggauccuucuugcucagaa

SEQ ID NO: 237663 - RNA, 19 nt, Artificial Sequence
  Description of Artificial Sequence: Synthetic oligonucleotide
  Antisense strand to SEQ ID NO: 237662
uucugagcaagaaggaucc

SEQ ID NO: 237664 - RNA, 19 nt, Artificial Sequence
  Description of Artificial Sequence: Synthetic oligonucleotide
  Sense strand starting at position 520 SEQ ID NO: 3060
gggcauuucugcgcugagu

SEQ ID NO: 237665 - RNA, 19 nt, Artificial Sequence
  Description of Artificial Sequence: Synthetic oligonucleotide
  Antisense strand to SEQ ID NO: 237664
acucagcgcagaaaugccc

SEQ ID NO: 237666 - RNA, 19 nt, Artificial Sequence
  Description of Artificial Sequence: Synthetic oligonucleotide
  Sense strand starting at position 601 SEQ ID NO: 3060
gcaggaaccuagucuguuu

SEQ ID NO: 237667 - RNA, 19 nt, Artificial Sequence
  Description of Artificial Sequence: Synthetic oligonucleotide
  Antisense strand to SEQ ID NO: 237666
aaacagacuagguuccugc

SEQ ID NO: 237668 - RNA, 19 nt, Artificial Sequence
  Description of Artificial Sequence: Synthetic oligonucleotide
  Sense strand starting at position 683 SEQ ID NO: 3060
ggugaagcuuggguuccaa

SEQ ID NO: 237669 - RNA, 19 nt, Artificial Sequence
  Description of Artificial Sequence: Synthetic oligonucleotide
  Antisense strand to SEQ ID NO: 237668
uuggaacccaagcuucacc

SEQ ID NO: 237670 - RNA, 19 nt, Artificial Sequence
  Description of Artificial Sequence: Synthetic oligonucleotide
  Sense strand starting at position 687 SEQ ID NO: 3060
aagcuuggguuccaagagu

SEQ ID NO: 237671 - RNA, 19 nt, Artificial Sequence
  Description of Artificial Sequence: Synthetic oligonucleotide
  Antisense strand to SEQ ID NO: 237670
acucuuggaacccaagcuu

SEQ ID NO: 237672 - RNA, 19 nt, Artificial Sequence
  Description of Artificial Sequence: Synthetic oligonucleotide
  Sense strand starting at position 696 SEQ ID NO: 3060
uuccaagaguuccuuagca

SEQ ID NO: 237673 - RNA, 19 nt, Artificial Sequence
  Description of Artificial Sequence: Synthetic oligonucleotide
  Antisense strand to SEQ ID NO: 237672
ugcuaaggaacucuuggaa

SEQ ID NO: 237674 - RNA, 19 nt, Artificial Sequence
  Description of Artificial Sequence: Synthetic oligonucleotide
  Sense strand starting at position 698 SEQ ID NO: 3060
ccaagaguuccuuagcaca

SEQ ID NO: 237675 - RNA, 19 nt, Artificial Sequence
  Description of Artificial Sequence: Synthetic oligonucleotide
  Antisense strand to SEQ ID NO: 237674
ugugcuaaggaacucuugg

SEQ ID NO: 237676 - RNA, 19 nt, Artificial Sequence
  Description of Artificial Sequence: Synthetic oligonucleotide
  Sense strand starting at position 943 SEQ ID NO: 3060
gcguacaaguucuucgaca

SEQ ID NO: 237677 - RNA, 19 nt, Artificial Sequence
  Description of Artificial Sequence: Synthetic oligonucleotide
  Antisense strand to SEQ ID NO: 237676
ugucgaagaacuuguacgc

SEQ ID NO: 237678 - RNA, 19 nt, Artificial Sequence
  Description of Artificial Sequence: Synthetic oligonucleotide
  Sense strand starting at position 948 SEQ ID NO: 3060
caaguucuucgacaggaau

SEQ ID NO: 237679 - RNA, 19 nt, Artificial Sequence
  Description of Artificial Sequence: Synthetic oligonucleotide
  Antisense strand to SEQ ID NO: 237678
auuccugucgaagaacuug

SEQ ID NO: 237680 - RNA, 19 nt, Artificial Sequence
  Description of Artificial Sequence: Synthetic oligonucleotide
  Sense strand starting at position 950 SEQ ID NO: 3060
aguucuucgacaggaaucu

SEQ ID NO: 237681 - RNA, 19 nt, Artificial Sequence
  Description of Artificial Sequence: Synthetic oligonucleotide
  Antisense strand to SEQ ID NO: 237680
agauuccugucgaagaacu

SEQ ID NO: 237682 - RNA, 19 nt, Artificial Sequence
  Description of Artificial Sequence: Synthetic oligonucleotide
  Sense strand starting at position 2682 SEQ ID NO: 3060
gcaggaaacucgccaagaa

SEQ ID NO: 237683 - RNA, 19 nt, Artificial Sequence
  Description of Artificial Sequence: Synthetic oligonucleotide
  Antisense strand to SEQ ID NO: 237682
uucuuggcgaguuuccugc

SEQ ID NO: 237684 - RNA, 19 nt, Artificial Sequence
  Description of Artificial Sequence: Synthetic oligonucleotide
  Sense strand starting at position 2733 SEQ ID NO: 3060
ggcaacagauggcuuaauu

SEQ ID NO: 237685 - RNA, 19 nt, Artificial Sequence
  Description of Artificial Sequence: Synthetic oligonucleotide
  Antisense strand to SEQ ID NO: 237684
aauuaagccaucuguugcc

SEQ ID NO: 237686 - RNA, 19 nt, Artificial Sequence
  Description of Artificial Sequence: Synthetic oligonucleotide
  Sense strand starting at position 2743 SEQ ID NO: 3060
ggcuuaauuguuggaccuu

SEQ ID NO: 237687 - RNA, 19 nt, Artificial Sequence
  Description of Artificial Sequence: Synthetic oligonucleotide
  Antisense strand to SEQ ID NO: 237686
aagguccaacaauuaagcc

SEQ ID NO: 237688 - RNA, 19 nt, Artificial Sequence
  Description of Artificial Sequence: Synthetic oligonucleotide
  Sense strand starting at position 2793 SEQ ID NO: 3060
uucuuuggaugcuggagaa

SEQ ID NO: 237689 - RNA, 19 nt, Artificial Sequence
  Description of Artificial Sequence: Synthetic oligonucleotide
  Antisense strand to SEQ ID NO: 237688
uucuccagcauccaaagaa

SEQ ID NO: 237690 - RNA, 19 nt, Artificial Sequence
  Description of Artificial Sequence: Synthetic oligonucleotide
  Sense strand starting at position 2945 SEQ ID NO: 3060
gcagaugccucuuugaaga

SEQ ID NO: 237691 - RNA, 19 nt, Artificial Sequence
  Description of Artificial Sequence: Synthetic oligonucleotide
  Antisense strand to SEQ ID NO: 237690
ucuucaaagaggcaucugc

SEQ ID NO: 237692 - RNA, 19 nt, Artificial Sequence
  Description of Artificial Sequence: Synthetic oligonucleotide
  Sense strand starting at position 2977 SEQ ID NO: 3060
gccugcaccuuguauggua

SEQ ID NO: 237693 - RNA, 19 nt, Artificial Sequence
  Description of Artificial Sequence: Synthetic oligonucleotide
  Antisense strand to SEQ ID NO: 237692
uaccauacaaggugcaggc

SEQ ID NO: 237694 - RNA, 19 nt, Artificial Sequence
  Description of Artificial Sequence: Synthetic oligonucleotide
  Sense strand starting at position 3128 SEQ ID NO: 3060
cccuguucuccacauggua

SEQ ID NO: 237695 - RNA, 19 nt, Artificial Sequence
  Description of Artificial Sequence: Synthetic oligonucleotide
  Antisense strand to SEQ ID NO: 237694
uaccauguggagaacaggg

SEQ ID NO: 237696 - RNA, 19 nt, Artificial Sequence
  Description of Artificial Sequence: Synthetic oligonucleotide
  Sense strand starting at position 3167 SEQ ID NO: 3060
gugccugagcugcagaauu

SEQ ID NO: 237697 - RNA, 19 nt, Artificial Sequence
  Description of Artificial Sequence: Synthetic oligonucleotide
  Antisense strand to SEQ ID NO: 237696
aauucugcagcucaggcac

SEQ ID NO: 237698 - RNA, 19 nt, Artificial Sequence
  Description of Artificial Sequence: Synthetic oligonucleotide
  Sense strand starting at position 3195 SEQ ID NO: 3060
cauagaggucaguauccuu

SEQ ID NO: 237699 - RNA, 19 nt, Artificial Sequence
  Description of Artificial Sequence: Synthetic oligonucleotide
  Antisense strand to SEQ ID NO: 237698
aaggauacugaccucuaug

SEQ ID NO: 237700 - RNA, 19 nt, Artificial Sequence
  Description of Artificial Sequence: Synthetic oligonucleotide
  Sense strand starting at position 3202 SEQ ID NO: 3060
gucaguauccuuggcagag

SEQ ID NO: 237701 - RNA, 19 nt, Artificial Sequence
  Description of Artificial Sequence: Synthetic oligonucleotide
  Antisense strand to SEQ ID NO: 237700
cucugccaaggauacugac

SEQ ID NO: 237702 - RNA, 19 nt, Artificial Sequence
  Description of Artificial Sequence: Synthetic oligonucleotide
  Sense strand starting at position 3203 SEQ ID NO: 3060
ucaguauccuuggcagaga

SEQ ID NO: 237703 - RNA, 19 nt, Artificial Sequence
  Description of Artificial Sequence: Synthetic oligonucleotide
  Antisense strand to SEQ ID NO: 237702
ucucugccaaggauacuga

SEQ ID NO: 237704 - RNA, 19 nt, Artificial Sequence
  Description of Artificial Sequence: Synthetic oligonucleotide
  Sense strand starting at position 3204 SEQ ID NO: 3060
caguauccuuggcagagaa

SEQ ID NO: 237705 - RNA, 19 nt, Artificial Sequence
  Description of Artificial Sequence: Synthetic oligonucleotide
  Antisense strand to SEQ ID NO: 237704
uucucugccaaggauacug

SEQ ID NO: 237706 - RNA, 19 nt, Artificial Sequence
  Description of Artificial Sequence: Synthetic oligonucleotide
  Sense strand starting at position 3244 SEQ ID NO: 3060
cagcaaggguguccugauu

SEQ ID NO: 237707 - RNA, 19 nt, Artificial Sequence
  Description of Artificial Sequence: Synthetic oligonucleotide
  Antisense strand to SEQ ID NO: 237706
aaucaggacacccuugcug

SEQ ID NO: 237708 - RNA, 19 nt, Artificial Sequence
  Description of Artificial Sequence: Synthetic oligonucleotide
  Sense strand starting at position 3459 SEQ ID NO: 3060
cugagucauugcuggagag

SEQ ID NO: 237709 - RNA, 19 nt, Artificial Sequence
  Description of Artificial Sequence: Synthetic oligonucleotide
  Antisense strand to SEQ ID NO: 237708
cucuccagcaaugacucag

SEQ ID NO: 237710 - RNA, 19 nt, Artificial Sequence
  Description of Artificial Sequence: Synthetic oligonucleotide
  Sense strand starting at position 3462 SEQ ID NO: 3060
agucauugcuggagaggga

SEQ ID NO: 237711 - RNA, 19 nt, Artificial Sequence
  Description of Artificial Sequence: Synthetic oligonucleotide
  Antisense strand to SEQ ID NO: 237710
ucccucuccagcaaugacu

SEQ ID NO: 237712 - RNA, 19 nt, Artificial Sequence
  Description of Artificial Sequence: Synthetic oligonucleotide
  Sense strand starting at position 3779 SEQ ID NO: 3060
gucuacgccuccucuuaau

SEQ ID NO: 237713 - RNA, 19 nt, Artificial Sequence
  Description of Artificial Sequence: Synthetic oligonucleotide
  Antisense strand to SEQ ID NO: 237712
auuaagaggaggcguagac

SEQ ID NO: 237714 - RNA, 19 nt, Artificial Sequence
  Description of Artificial Sequence: Synthetic oligonucleotide
  Sense strand starting at position 3790 SEQ ID NO: 3060
cucuuaaucugaccagguu

SEQ ID NO: 237715 - RNA, 19 nt, Artificial Sequence
  Description of Artificial Sequence: Synthetic oligonucleotide
  Antisense strand to SEQ ID NO: 237714
aaccuggucagauuaagag

SEQ ID NO: 237716 - RNA, 19 nt, Artificial Sequence
  Description of Artificial Sequence: Synthetic oligonucleotide
  Sense strand starting at position 3809 SEQ ID NO: 3060
ggguuauuccuccaggcaa

SEQ ID NO: 237717 - RNA, 19 nt, Artificial Sequence
  Description of Artificial Sequence: Synthetic oligonucleotide
  Antisense strand to SEQ ID NO: 237716
uugccuggaggaauaaccc

SEQ ID NO: 237718 - RNA, 19 nt, Artificial Sequence
  Description of Artificial Sequence: Synthetic oligonucleotide
  Sense strand starting at position 3811 SEQ ID NO: 3060
guuauuccuccaggcaagu

SEQ ID NO: 237719 - RNA, 19 nt, Artificial Sequence
  Description of Artificial Sequence: Synthetic oligonucleotide
  Antisense strand to SEQ ID NO: 237718
acuugccuggaggaauaac

SEQ ID NO: 237720 - RNA, 19 nt, Artificial Sequence
  Description of Artificial Sequence: Synthetic oligonucleotide
  Sense strand starting at position 28 SEQ ID NO: 3062
ggacuagaguggucaguag

SEQ ID NO: 237721 - RNA, 19 nt, Artificial Sequence
  Description of Artificial Sequence: Synthetic oligonucleotide
  Antisense strand to SEQ ID NO: 237720
cuacugaccacucuagucc

SEQ ID NO: 237722 - RNA, 19 nt, Artificial Sequence
  Description of Artificial Sequence: Synthetic oligonucleotide
  Sense strand starting at position 279 SEQ ID NO: 3062
ugugauuuggguugcccau

SEQ ID NO: 237723 - RNA, 19 nt, Artificial Sequence
  Description of Artificial Sequence: Synthetic oligonucleotide
  Antisense strand to SEQ ID NO: 237722
augggcaacccaaaucaca

SEQ ID NO: 237724 - RNA, 19 nt, Artificial Sequence
  Description of Artificial Sequence: Synthetic oligonucleotide
  Sense strand starting at position 312 SEQ ID NO: 3062
gcaagaauuuguguuugua

SEQ ID NO: 237725 - RNA, 19 nt, Artificial Sequence
  Description of Artificial Sequence: Synthetic oligonucleotide
  Antisense strand to SEQ ID NO: 237724
uacaaacacaaauucuugc

SEQ ID NO: 237726 - RNA, 19 nt, Artificial Sequence
  Description of Artificial Sequence: Synthetic oligonucleotide
  Sense strand starting at position 324 SEQ ID NO: 3062
guuuguaaauuacucugga

SEQ ID NO: 237727 - RNA, 19 nt, Artificial Sequence
  Description of Artificial Sequence: Synthetic oligonucleotide
  Antisense strand to SEQ ID NO: 237726
uccagaguaauuuacaaac

SEQ ID NO: 237728 - RNA, 19 nt, Artificial Sequence
  Description of Artificial Sequence: Synthetic oligonucleotide
  Sense strand starting at position 325 SEQ ID NO: 3062
uuuguaaauuacucuggaa

SEQ ID NO: 237729 - RNA, 19 nt, Artificial Sequence
  Description of Artificial Sequence: Synthetic oligonucleotide
  Antisense strand to SEQ ID NO: 237728
uuccagaguaauuuacaaa

SEQ ID NO: 237730 - RNA, 19 nt, Artificial Sequence
  Description of Artificial Sequence: Synthetic oligonucleotide
  Sense strand starting at position 327 SEQ ID NO: 3062
uguaaauuacucuggaacu

SEQ ID NO: 237731 - RNA, 19 nt, Artificial Sequence
  Description of Artificial Sequence: Synthetic oligonucleotide
  Antisense strand to SEQ ID NO: 237730
aguuccagaguaauuuaca

SEQ ID NO: 237732 - RNA, 19 nt, Artificial Sequence
  Description of Artificial Sequence: Synthetic oligonucleotide
  Sense strand starting at position 344 SEQ ID NO: 3062
cucuucugggagugaauau

SEQ ID NO: 237733 - RNA, 19 nt, Artificial Sequence
  Description of Artificial Sequence: Synthetic oligonucleotide
  Antisense strand to SEQ ID NO: 237732
auauucacucccagaagag

SEQ ID NO: 237734 - RNA, 19 nt, Artificial Sequence
  Description of Artificial Sequence: Synthetic oligonucleotide
  Sense strand starting at position 469 SEQ ID NO: 3062
gcugguagaaguuacuaca

SEQ ID NO: 237735 - RNA, 19 nt, Artificial Sequence
  Description of Artificial Sequence: Synthetic oligonucleotide
  Antisense strand to SEQ ID NO: 237734
uguaguaacuucuaccagc

SEQ ID NO: 237736 - RNA, 19 nt, Artificial Sequence
  Description of Artificial Sequence: Synthetic oligonucleotide
  Sense strand starting at position 2036 SEQ ID NO: 3062
ccagcuuacuuguuggaac

SEQ ID NO: 237737 - RNA, 19 nt, Artificial Sequence
  Description of Artificial Sequence: Synthetic oligonucleotide
  Antisense strand to SEQ ID NO: 237736
guuccaacaaguaagcugg

SEQ ID NO: 237738 - RNA, 19 nt, Artificial Sequence
  Description of Artificial Sequence: Synthetic oligonucleotide
  Sense strand starting at position 2300 SEQ ID NO: 3062
ccuuaaauaccgcagaauu

SEQ ID NO: 237739 - RNA, 19 nt, Artificial Sequence
  Description of Artificial Sequence: Synthetic oligonucleotide
  Antisense strand to SEQ ID NO: 237738
aauucugcgguauuuaagg

SEQ ID NO: 237740 - RNA, 19 nt, Artificial Sequence
  Description of Artificial Sequence: Synthetic oligonucleotide
  Sense strand starting at position 2311 SEQ ID NO: 3062
gcagaauuccuguaguuga

SEQ ID NO: 237741 - RNA, 19 nt, Artificial Sequence
  Description of Artificial Sequence: Synthetic oligonucleotide
  Antisense strand to SEQ ID NO: 237740
ucaacuacaggaauucugc

SEQ ID NO: 237742 - RNA, 19 nt, Artificial Sequence
  Description of Artificial Sequence: Synthetic oligonucleotide
  Sense strand starting at position 2328 SEQ ID NO: 3062
gacccagaggaaugcauau

SEQ ID NO: 237743 - RNA, 19 nt, Artificial Sequence
  Description of Artificial Sequence: Synthetic oligonucleotide
  Antisense strand to SEQ ID NO: 237742
auaugcauuccucuggguc

SEQ ID NO: 237744 - RNA, 19 nt, Artificial Sequence
  Description of Artificial Sequence: Synthetic oligonucleotide
  Sense strand starting at position 2510 SEQ ID NO: 3062
ucugcaaguccuuguauuu

SEQ ID NO: 237745 - RNA, 19 nt, Artificial Sequence
  Description of Artificial Sequence: Synthetic oligonucleotide
  Antisense strand to SEQ ID NO: 237744
aaauacaaggacuugcaga

SEQ ID NO: 237746 - RNA, 19 nt, Artificial Sequence
  Description of Artificial Sequence: Synthetic oligonucleotide
  Sense strand starting at position 2580 SEQ ID NO: 3062
cugagaacuugacagaaac

SEQ ID NO: 237747 - RNA, 19 nt, Artificial Sequence
  Description of Artificial Sequence: Synthetic oligonucleotide
  Antisense strand to SEQ ID NO: 237746
guuucugucaaguucucag

SEQ ID NO: 237748 - RNA, 19 nt, Artificial Sequence
  Description of Artificial Sequence: Synthetic oligonucleotide
  Sense strand starting at position 2600 SEQ ID NO: 3062
guacuccagugaccugauu

SEQ ID NO: 237749 - RNA, 19 nt, Artificial Sequence
  Description of Artificial Sequence: Synthetic oligonucleotide
  Antisense strand to SEQ ID NO: 237748
aaucaggucacuggaguac

SEQ ID NO: 237750 - RNA, 19 nt, Artificial Sequence
  Description of Artificial Sequence: Synthetic oligonucleotide
  Sense strand starting at position 2672 SEQ ID NO: 3062
aguucugaugcacauuaaa

SEQ ID NO: 237751 - RNA, 19 nt, Artificial Sequence
  Description of Artificial Sequence: Synthetic oligonucleotide
  Antisense strand to SEQ ID NO: 237750
uuuaaugugcaucagaacu

SEQ ID NO: 237752 - RNA, 19 nt, Artificial Sequence
  Description of Artificial Sequence: Synthetic oligonucleotide
  Sense strand starting at position 2691 SEQ ID NO: 3062
guuugagaaccacgguuua

SEQ ID NO: 237753 - RNA, 19 nt, Artificial Sequence
  Description of Artificial Sequence: Synthetic oligonucleotide
  Antisense strand to SEQ ID NO: 237752
uaaaccgugguucucaaac

SEQ ID NO: 237754 - RNA, 19 nt, Artificial Sequence
  Description of Artificial Sequence: Synthetic oligonucleotide
  Sense strand starting at position 2722 SEQ ID NO: 3062
guugaaucaugagcaacca

SEQ ID NO: 237755 - RNA, 19 nt, Artificial Sequence
  Description of Artificial Sequence: Synthetic oligonucleotide
  Antisense strand to SEQ ID NO: 237754
ugguugcucaugauucaac

SEQ ID NO: 237756 - RNA, 19 nt, Artificial Sequence
  Description of Artificial Sequence: Synthetic oligonucleotide
  Sense strand starting at position 2789 SEQ ID NO: 3062
agcaaugugagguaugcaa

SEQ ID NO: 237757 - RNA, 19 nt, Artificial Sequence
  Description of Artificial Sequence: Synthetic oligonucleotide
  Antisense strand to SEQ ID NO: 237756
uugcauaccucacauugcu

SEQ ID NO: 237758 - RNA, 19 nt, Artificial Sequence
  Description of Artificial Sequence: Synthetic oligonucleotide
  Sense strand starting at position 2869 SEQ ID NO: 3062
cucagaggcgauuguuuaa

SEQ ID NO: 237759 - RNA, 19 nt, Artificial Sequence
  Description of Artificial Sequence: Synthetic oligonucleotide
  Antisense strand to SEQ ID NO: 237758
uuaaacaaucgccucugag

SEQ ID NO: 237760 - RNA, 19 nt, Artificial Sequence
  Description of Artificial Sequence: Synthetic oligonucleotide
  Sense strand starting at position 2932 SEQ ID NO: 3062
ccuggaauuugugauacga

SEQ ID NO: 237761 - RNA, 19 nt, Artificial Sequence
  Description of Artificial Sequence: Synthetic oligonucleotide
  Antisense strand to SEQ ID NO: 237760
ucguaucacaaauuccagg

SEQ ID NO: 237762 - RNA, 19 nt, Artificial Sequence
  Description of Artificial Sequence: Synthetic oligonucleotide
  Sense strand starting at position 2934 SEQ ID NO: 3062
uggaauuugugauacgaag

SEQ ID NO: 237763 - RNA, 19 nt, Artificial Sequence
  Description of Artificial Sequence: Synthetic oligonucleotide
  Antisense strand to SEQ ID NO: 237762
cuucguaucacaaauucca

SEQ ID NO: 237764 - RNA, 19 nt, Artificial Sequence
  Description of Artificial Sequence: Synthetic oligonucleotide
  Sense strand starting at position 3352 SEQ ID NO: 3062
acuugugacugggcaacau

SEQ ID NO: 237765 - RNA, 19 nt, Artificial Sequence
  Description of Artificial Sequence: Synthetic oligonucleotide
  Antisense strand to SEQ ID NO: 237764
auguugcccagucacaagu

SEQ ID NO: 237766 - RNA, 19 nt, Artificial Sequence
  Description of Artificial Sequence: Synthetic oligonucleotide
  Sense strand starting at position 3367 SEQ ID NO: 3062
acaucaugagacugguuau

SEQ ID NO: 237767 - RNA, 19 nt, Artificial Sequence
  Description of Artificial Sequence: Synthetic oligonucleotide
  Antisense strand to SEQ ID NO: 237766
auaaccagucucaugaugu

SEQ ID NO: 237768 - RNA, 19 nt, Artificial Sequence
  Description of Artificial Sequence: Synthetic oligonucleotide
  Sense strand starting at position 3370 SEQ ID NO: 3062
ucaugagacugguuauauu

SEQ ID NO: 237769 - RNA, 19 nt, Artificial Sequence
  Description of Artificial Sequence: Synthetic oligonucleotide
  Antisense strand to SEQ ID NO: 237768
aauauaaccagucucauga

SEQ ID NO: 237770 - RNA, 19 nt, Artificial Sequence
  Description of Artificial Sequence: Synthetic oligonucleotide
  Sense strand starting at position 3387 SEQ ID NO: 3062
uuaaguaugccucaguucu

SEQ ID NO: 237771 - RNA, 19 nt, Artificial Sequence
  Description of Artificial Sequence: Synthetic oligonucleotide
  Antisense strand to SEQ ID NO: 237770
agaacugaggcauacuuaa

SEQ ID NO: 237772 - RNA, 19 nt, Artificial Sequence
  Description of Artificial Sequence: Synthetic oligonucleotide
  Sense strand starting at position 3471 SEQ ID NO: 3062
cuagaaaugcaacauguua

SEQ ID NO: 237773 - RNA, 19 nt, Artificial Sequence
  Description of Artificial Sequence: Synthetic oligonucleotide
  Antisense strand to SEQ ID NO: 237772
uaacauguugcauuucuag

SEQ ID NO: 237774 - RNA, 19 nt, Artificial Sequence
  Description of Artificial Sequence: Synthetic oligonucleotide
  Sense strand starting at position 3479 SEQ ID NO: 3062
gcaacauguuacccagaaa

SEQ ID NO: 237775 - RNA, 19 nt, Artificial Sequence
  Description of Artificial Sequence: Synthetic oligonucleotide
  Antisense strand to SEQ ID NO: 237774
uuucuggguaacauguugc

SEQ ID NO: 237776 - RNA, 19 nt, Artificial Sequence
  Description of Artificial Sequence: Synthetic oligonucleotide
  Sense strand starting at position 3499 SEQ ID NO: 3062
ggaauaaucugguugaguu

SEQ ID NO: 237777 - RNA, 19 nt, Artificial Sequence
  Description of Artificial Sequence: Synthetic oligonucleotide
  Antisense strand to SEQ ID NO: 237776
aacucaaccagauuauucc

SEQ ID NO: 237778 - RNA, 19 nt, Artificial Sequence
  Description of Artificial Sequence: Synthetic oligonucleotide
  Sense strand starting at position 3500 SEQ ID NO: 3062
gaauaaucugguugaguug

SEQ ID NO: 237779 - RNA, 19 nt, Artificial Sequence
  Description of Artificial Sequence: Synthetic oligonucleotide
  Antisense strand to SEQ ID NO: 237778
caacucaaccagauuauuc

SEQ ID NO: 237780 - RNA, 19 nt, Artificial Sequence
  Description of Artificial Sequence: Synthetic oligonucleotide
  Sense strand starting at position 3531 SEQ ID NO: 3062
ggauuuccuucucacugau

SEQ ID NO: 237781 - RNA, 19 nt, Artificial Sequence
  Description of Artificial Sequence: Synthetic oligonucleotide
  Antisense strand to SEQ ID NO: 237780
aucagugagaaggaaaucc

SEQ ID NO: 237782 - RNA, 19 nt, Artificial Sequence
  Description of Artificial Sequence: Synthetic oligonucleotide
  Sense strand starting at position 3545 SEQ ID NO: 3062
cugauuaucccagaucagu

SEQ ID NO: 237783 - RNA, 19 nt, Artificial Sequence
  Description of Artificial Sequence: Synthetic oligonucleotide
  Antisense strand to SEQ ID NO: 237782
acugaucugggauaaucag

SEQ ID NO: 237784 - RNA, 19 nt, Artificial Sequence
  Description of Artificial Sequence: Synthetic oligonucleotide
  Sense strand starting at position 3559 SEQ ID NO: 3062
ucaguucagugcuugggaa

SEQ ID NO: 237785 - RNA, 19 nt, Artificial Sequence
  Description of Artificial Sequence: Synthetic oligonucleotide
  Antisense strand to SEQ ID NO: 237784
uucccaagcacugaacuga

SEQ ID NO: 237786 - RNA, 19 nt, Artificial Sequence
  Description of Artificial Sequence: Synthetic oligonucleotide
  Sense strand starting at position 3561 SEQ ID NO: 3062
aguucagugcuugggaaau

SEQ ID NO: 237787 - RNA, 19 nt, Artificial Sequence
  Description of Artificial Sequence: Synthetic oligonucleotide
  Antisense strand to SEQ ID NO: 237786
auuucccaagcacugaacu

SEQ ID NO: 237788 - RNA, 19 nt, Artificial Sequence
  Description of Artificial Sequence: Synthetic oligonucleotide
  Sense strand starting at position 3615 SEQ ID NO: 3062
cuagcauagugccugaaua

SEQ ID NO: 237789 - RNA, 19 nt, Artificial Sequence
  Description of Artificial Sequence: Synthetic oligonucleotide
  Antisense strand to SEQ ID NO: 237788
uauucaggcacuaugcuag

SEQ ID NO: 237790 - RNA, 19 nt, Artificial Sequence
  Description of Artificial Sequence: Synthetic oligonucleotide
  Sense strand starting at position 3617 SEQ ID NO: 3062
agcauagugccugaauaua

SEQ ID NO: 237791 - RNA, 19 nt, Artificial Sequence
  Description of Artificial Sequence: Synthetic oligonucleotide
  Antisense strand to SEQ ID NO: 237790
uauauucaggcacuaugcu

SEQ ID NO: 237792 - RNA, 19 nt, Artificial Sequence
  Description of Artificial Sequence: Synthetic oligonucleotide
  Sense strand starting at position 3625 SEQ ID NO: 3062
gccugaauauaacugaugu

SEQ ID NO: 237793 - RNA, 19 nt, Artificial Sequence
  Description of Artificial Sequence: Synthetic oligonucleotide
  Antisense strand to SEQ ID NO: 237792
acaucaguuauauucaggc

SEQ ID NO: 237794 - RNA, 19 nt, Artificial Sequence
  Description of Artificial Sequence: Synthetic oligonucleotide
  Sense strand starting at position 3650 SEQ ID NO: 3062
guuucuugauuugaaauga

SEQ ID NO: 237795 - RNA, 19 nt, Artificial Sequence
  Description of Artificial Sequence: Synthetic oligonucleotide
  Antisense strand to SEQ ID NO: 237794
ucauuucaaaucaagaaac

SEQ ID NO: 237796 - RNA, 19 nt, Artificial Sequence
  Description of Artificial Sequence: Synthetic oligonucleotide
  Sense strand starting at position 3667 SEQ ID NO: 3062
gaaugcuuaggugagcgau

SEQ ID NO: 237797 - RNA, 19 nt, Artificial Sequence
  Description of Artificial Sequence: Synthetic oligonucleotide
  Antisense strand to SEQ ID NO: 237796
aucgcucaccuaagcauuc

SEQ ID NO: 237798 - RNA, 19 nt, Artificial Sequence
  Description of Artificial Sequence: Synthetic oligonucleotide
  Sense strand starting at position 3789 SEQ ID NO: 3062
gacagagucgauugaucaa

SEQ ID NO: 237799 - RNA, 19 nt, Artificial Sequence
  Description of Artificial Sequence: Synthetic oligonucleotide
  Antisense strand to SEQ ID NO: 237798
uugaucaaucgacucuguc

SEQ ID NO: 237800 - RNA, 19 nt, Artificial Sequence
  Description of Artificial Sequence: Synthetic oligonucleotide
  Sense strand starting at position 119 SEQ ID NO: 3061
gacaauugaggcugaguuu

SEQ ID NO: 237801 - RNA, 19 nt, Artificial Sequence
  Description of Artificial Sequence: Synthetic oligonucleotide
  Antisense strand to SEQ ID NO: 237800
aaacucagccucaauuguc

SEQ ID NO: 237802 - RNA, 19 nt, Artificial Sequence
  Description of Artificial Sequence: Synthetic oligonucleotide
  Sense strand starting at position 212 SEQ ID NO: 3061
ucagucgcucauugagaaa

SEQ ID NO: 237803 - RNA, 19 nt, Artificial Sequence
  Description of Artificial Sequence: Synthetic oligonucleotide
  Antisense strand to SEQ ID NO: 237802
uuucucaaugagcgacuga

SEQ ID NO: 237804 - RNA, 19 nt, Artificial Sequence
  Description of Artificial Sequence: Synthetic oligonucleotide
  Sense strand starting at position 390 SEQ ID NO: 3061
gaacuuacacgcuagagau

SEQ ID NO: 237805 - RNA, 19 nt, Artificial Sequence
  Description of Artificial Sequence: Synthetic oligonucleotide
  Antisense strand to SEQ ID NO: 237804
aucucuagcguguaaguuc

SEQ ID NO: 237806 - RNA, 19 nt, Artificial Sequence
  Description of Artificial Sequence: Synthetic oligonucleotide
  Sense strand starting at position 396 SEQ ID NO: 3061
acacgcuagagaugaaaga

SEQ ID NO: 237807 - RNA, 19 nt, Artificial Sequence
  Description of Artificial Sequence: Synthetic oligonucleotide
  Antisense strand to SEQ ID NO: 237806
ucuuucaucucuagcgugu

SEQ ID NO: 237808 - RNA, 19 nt, Artificial Sequence
  Description of Artificial Sequence: Synthetic oligonucleotide
  Sense strand starting at position 439 SEQ ID NO: 3061
gaguuauaauaguuugcca

SEQ ID NO: 237809 - RNA, 19 nt, Artificial Sequence
  Description of Artificial Sequence: Synthetic oligonucleotide
  Antisense strand to SEQ ID NO: 237808
uggcaaacuauuauaacuc

SEQ ID NO: 237810 - RNA, 19 nt, Artificial Sequence
  Description of Artificial Sequence: Synthetic oligonucleotide
  Sense strand starting at position 447 SEQ ID NO: 3061
auaguuugccaacaugagu

SEQ ID NO: 237811 - RNA, 19 nt, Artificial Sequence
  Description of Artificial Sequence: Synthetic oligonucleotide
  Antisense strand to SEQ ID NO: 237810
acucauguuggcaaacuau

SEQ ID NO: 237812 - RNA, 19 nt, Artificial Sequence
  Description of Artificial Sequence: Synthetic oligonucleotide
  Sense strand starting at position 460 SEQ ID NO: 3061
augaguuaugcacaauaau

SEQ ID NO: 237813 - RNA, 19 nt, Artificial Sequence
  Description of Artificial Sequence: Synthetic oligonucleotide
  Antisense strand to SEQ ID NO: 237812
auuauugugcauaacucau

SEQ ID NO: 237814 - RNA, 19 nt, Artificial Sequence
  Description of Artificial Sequence: Synthetic oligonucleotide
  Sense strand starting at position 603 SEQ ID NO: 3061
ugcaucuuugaaugaauca

SEQ ID NO: 237815 - RNA, 19 nt, Artificial Sequence
  Description of Artificial Sequence: Synthetic oligonucleotide
  Antisense strand to SEQ ID NO: 237814
ugauucauucaaagaugca

SEQ ID NO: 237816 - RNA, 19 nt, Artificial Sequence
  Description of Artificial Sequence: Synthetic oligonucleotide
  Sense strand starting at position 610 SEQ ID NO: 3061
uugaaugaaucacaaggga

SEQ ID NO: 237817 - RNA, 19 nt, Artificial Sequence
  Description of Artificial Sequence: Synthetic oligonucleotide
  Antisense strand to SEQ ID NO: 237816
ucccuugugauucauucaa

SEQ ID NO: 237818 - RNA, 19 nt, Artificial Sequence
  Description of Artificial Sequence: Synthetic oligonucleotide
  Sense strand starting at position 637 SEQ ID NO: 3061
gaagcagagcucuaaugcu

SEQ ID NO: 237819 - RNA, 19 nt, Artificial Sequence
  Description of Artificial Sequence: Synthetic oligonucleotide
  Antisense strand to SEQ ID NO: 237818
agcauuagagcucugcuuc

SEQ ID NO: 237820 - RNA, 19 nt, Artificial Sequence
  Description of Artificial Sequence: Synthetic oligonucleotide
  Sense strand starting at position 646 SEQ ID NO: 3061
cucuaaugcuguuuagaau

SEQ ID NO: 237821 - RNA, 19 nt, Artificial Sequence
  Description of Artificial Sequence: Synthetic oligonucleotide
  Antisense strand to SEQ ID NO: 237820
auucuaaacagcauuagag

SEQ ID NO: 237822 - RNA, 19 nt, Artificial Sequence
  Description of Artificial Sequence: Synthetic oligonucleotide
  Sense strand starting at position 647 SEQ ID NO: 3061
ucuaaugcuguuuagaauu

SEQ ID NO: 237823 - RNA, 19 nt, Artificial Sequence
  Description of Artificial Sequence: Synthetic oligonucleotide
  Antisense strand to SEQ ID NO: 237822
aauucuaaacagcauuaga

SEQ ID NO: 237824 - RNA, 19 nt, Artificial Sequence
  Description of Artificial Sequence: Synthetic oligonucleotide
  Sense strand starting at position 681 SEQ ID NO: 3061
gugacucuauaagcuauga

SEQ ID NO: 237825 - RNA, 19 nt, Artificial Sequence
  Description of Artificial Sequence: Synthetic oligonucleotide
  Antisense strand to SEQ ID NO: 237824
ucauagcuuauagagucac

SEQ ID NO: 237826 - RNA, 19 nt, Artificial Sequence
  Description of Artificial Sequence: Synthetic oligonucleotide
  Sense strand starting at position 685 SEQ ID NO: 3061
cucuauaagcuaugagaau

SEQ ID NO: 237827 - RNA, 19 nt, Artificial Sequence
  Description of Artificial Sequence: Synthetic oligonucleotide
  Antisense strand to SEQ ID NO: 237826
auucucauagcuuauagag

SEQ ID NO: 237828 - RNA, 19 nt, Artificial Sequence
  Description of Artificial Sequence: Synthetic oligonucleotide
  Sense strand starting at position 713 SEQ ID NO: 3061
caaugaauccauuguuggu

SEQ ID NO: 237829 - RNA, 19 nt, Artificial Sequence
  Description of Artificial Sequence: Synthetic oligonucleotide
  Antisense strand to SEQ ID NO: 237828
accaacaauggauucauug

SEQ ID NO: 237830 - RNA, 19 nt, Artificial Sequence
  Description of Artificial Sequence: Synthetic oligonucleotide
  Sense strand starting at position 719 SEQ ID NO: 3061
auccauuguugguucucaa

SEQ ID NO: 237831 - RNA, 19 nt, Artificial Sequence
  Description of Artificial Sequence: Synthetic oligonucleotide
  Antisense strand to SEQ ID NO: 237830
uugagaaccaacaauggau

SEQ ID NO: 237832 - RNA, 19 nt, Artificial Sequence
  Description of Artificial Sequence: Synthetic oligonucleotide
  Sense strand starting at position 808 SEQ ID NO: 3061
aagucaagggaguguugua

SEQ ID NO: 237833 - RNA, 19 nt, Artificial Sequence
  Description of Artificial Sequence: Synthetic oligonucleotide
  Antisense strand to SEQ ID NO: 237832
uacaacacucccuugacuu

SEQ ID NO: 237834 - RNA, 19 nt, Artificial Sequence
  Description of Artificial Sequence: Synthetic oligonucleotide
  Sense strand starting at position 917 SEQ ID NO: 3061
auggcauccagaugucaug

SEQ ID NO: 237835 - RNA, 19 nt, Artificial Sequence
  Description of Artificial Sequence: Synthetic oligonucleotide
  Antisense strand to SEQ ID NO: 237834
caugacaucuggaugccau

SEQ ID NO: 237836 - RNA, 19 nt, Artificial Sequence
  Description of Artificial Sequence: Synthetic oligonucleotide
  Sense strand starting at position 963 SEQ ID NO: 3061
ggacuagaguggucaguag

SEQ ID NO: 237837 - RNA, 19 nt, Artificial Sequence
  Description of Artificial Sequence: Synthetic oligonucleotide
  Antisense strand to SEQ ID NO: 237836
cuacugaccacucuagucc

SEQ ID NO: 237838 - RNA, 19 nt, Artificial Sequence
  Description of Artificial Sequence: Synthetic oligonucleotide
  Sense strand starting at position 1214 SEQ ID NO: 3061
ugugauuuggguugcccau

SEQ ID NO: 237839 - RNA, 19 nt, Artificial Sequence
  Description of Artificial Sequence: Synthetic oligonucleotide
  Antisense strand to SEQ ID NO: 237838
augggcaacccaaaucaca

SEQ ID NO: 237840 - RNA, 19 nt, Artificial Sequence
  Description of Artificial Sequence: Synthetic oligonucleotide
  Sense strand starting at position 1247 SEQ ID NO: 3061
gcaagaauuuguguuugua

SEQ ID NO: 237841 - RNA, 19 nt, Artificial Sequence
  Description of Artificial Sequence: Synthetic oligonucleotide
  Antisense strand to SEQ ID NO: 237840
uacaaacacaaauucuugc

SEQ ID NO: 237842 - RNA, 19 nt, Artificial Sequence
  Description of Artificial Sequence: Synthetic oligonucleotide
  Sense strand starting at position 1259 SEQ ID NO: 3061
guuuguaaauuacucugga

SEQ ID NO: 237843 - RNA, 19 nt, Artificial Sequence
  Description of Artificial Sequence: Synthetic oligonucleotide
  Antisense strand to SEQ ID NO: 237842
uccagaguaauuuacaaac

SEQ ID NO: 237844 - RNA, 19 nt, Artificial Sequence
  Description of Artificial Sequence: Synthetic oligonucleotide
  Sense strand starting at position 1260 SEQ ID NO: 3061
uuuguaaauuacucuggaa

SEQ ID NO: 237845 - RNA, 19 nt, Artificial Sequence
  Description of Artificial Sequence: Synthetic oligonucleotide
  Antisense strand to SEQ ID NO: 237844
uuccagaguaauuuacaaa

SEQ ID NO: 237846 - RNA, 19 nt, Artificial Sequence
  Description of Artificial Sequence: Synthetic oligonucleotide
  Sense strand starting at position 1262 SEQ ID NO: 3061
uguaaauuacucuggaacu

SEQ ID NO: 237847 - RNA, 19 nt, Artificial Sequence
  Description of Artificial Sequence: Synthetic oligonucleotide
  Antisense strand to SEQ ID NO: 237846
aguuccagaguaauuuaca

SEQ ID NO: 237848 - RNA, 19 nt, Artificial Sequence
  Description of Artificial Sequence: Synthetic oligonucleotide
  Sense strand starting at position 1279 SEQ ID NO: 3061
cucuucugggagugaauau

SEQ ID NO: 237849 - RNA, 19 nt, Artificial Sequence
  Description of Artificial Sequence: Synthetic oligonucleotide
  Antisense strand to SEQ ID NO: 237848
auauucacucccagaagag

SEQ ID NO: 237850 - RNA, 19 nt, Artificial Sequence
  Description of Artificial Sequence: Synthetic oligonucleotide
  Sense strand starting at position 1404 SEQ ID NO: 3061
gcugguagaaguuacuaca

SEQ ID NO: 237851 - RNA, 19 nt, Artificial Sequence
  Description of Artificial Sequence: Synthetic oligonucleotide
  Antisense strand to SEQ ID NO: 237850
uguaguaacuucuaccagc

SEQ ID NO: 237852 - RNA, 19 nt, Artificial Sequence
  Description of Artificial Sequence: Synthetic oligonucleotide
  Sense strand starting at position 2971 SEQ ID NO: 3061
ccagcuuacuuguuggaac

SEQ ID NO: 237853 - RNA, 19 nt, Artificial Sequence
  Description of Artificial Sequence: Synthetic oligonucleotide
  Antisense strand to SEQ ID NO: 237852
guuccaacaaguaagcugg

SEQ ID NO: 237854 - RNA, 19 nt, Artificial Sequence
  Description of Artificial Sequence: Synthetic oligonucleotide
  Sense strand starting at position 3235 SEQ ID NO: 3061
ccuuaaauaccgcagaauu

SEQ ID NO: 237855 - RNA, 19 nt, Artificial Sequence
  Description of Artificial Sequence: Synthetic oligonucleotide
  Antisense strand to SEQ ID NO: 237854
aauucugcgguauuuaagg

SEQ ID NO: 237856 - RNA, 19 nt, Artificial Sequence
  Description of Artificial Sequence: Synthetic oligonucleotide
  Sense strand starting at position 3246 SEQ ID NO: 3061
gcagaauuccuguaguuga

SEQ ID NO: 237857 - RNA, 19 nt, Artificial Sequence
  Description of Artificial Sequence: Synthetic oligonucleotide
  Antisense strand to SEQ ID NO: 237856
ucaacuacaggaauucugc

SEQ ID NO: 237858 - RNA, 19 nt, Artificial Sequence
  Description of Artificial Sequence: Synthetic oligonucleotide
  Sense strand starting at position 3263 SEQ ID NO: 3061
gacccagaggaaugcauau

SEQ ID NO: 237859 - RNA, 19 nt, Artificial Sequence
  Description of Artificial Sequence: Synthetic oligonucleotide
  Antisense strand to SEQ ID NO: 237858
auaugcauuccucuggguc

SEQ ID NO: 237860 - RNA, 19 nt, Artificial Sequence
  Description of Artificial Sequence: Synthetic oligonucleotide
  Sense strand starting at position 3445 SEQ ID NO: 3061
ucugcaaguccuuguauuu

SEQ ID NO: 237861 - RNA, 19 nt, Artificial Sequence
  Description of Artificial Sequence: Synthetic oligonucleotide
  Antisense strand to SEQ ID NO: 237860
aaauacaaggacuugcaga

SEQ ID NO: 237862 - RNA, 19 nt, Artificial Sequence
  Description of Artificial Sequence: Synthetic oligonucleotide
  Sense strand starting at position 3515 SEQ ID NO: 3061
cugagaacuugacagaaac

SEQ ID NO: 237863 - RNA, 19 nt, Artificial Sequence
  Description of Artificial Sequence: Synthetic oligonucleotide
  Antisense strand to SEQ ID NO: 237862
guuucugucaaguucucag

SEQ ID NO: 237864 - RNA, 19 nt, Artificial Sequence
  Description of Artificial Sequence: Synthetic oligonucleotide
  Sense strand starting at position 3535 SEQ ID NO: 3061
guacuccagugaccugauu

SEQ ID NO: 237865 - RNA, 19 nt, Artificial Sequence
  Description of Artificial Sequence: Synthetic oligonucleotide
  Antisense strand to SEQ ID NO: 237864
aaucaggucacuggaguac

SEQ ID NO: 237866 - RNA, 19 nt, Artificial Sequence
  Description of Artificial Sequence: Synthetic oligonucleotide
  Sense strand starting at position 3607 SEQ ID NO: 3061
aguucugaugcacauuaaa

SEQ ID NO: 237867 - RNA, 19 nt, Artificial Sequence
  Description of Artificial Sequence: Synthetic oligonucleotide
  Antisense strand to SEQ ID NO: 237866
uuuaaugugcaucagaacu

SEQ ID NO: 237868 - RNA, 19 nt, Artificial Sequence
  Description of Artificial Sequence: Synthetic oligonucleotide
  Sense strand starting at position 3626 SEQ ID NO: 3061
guuugagaaccacgguuua

SEQ ID NO: 237869 - RNA, 19 nt, Artificial Sequence
  Description of Artificial Sequence: Synthetic oligonucleotide
  Antisense strand to SEQ ID NO: 237868
uaaaccgugguucucaaac

SEQ ID NO: 237870 - RNA, 19 nt, Artificial Sequence
  Description of Artificial Sequence: Synthetic oligonucleotide
  Sense strand starting at position 3657 SEQ ID NO: 3061
guugaaucaugagcaacca

SEQ ID NO: 237871 - RNA, 19 nt, Artificial Sequence
  Description of Artificial Sequence: Synthetic oligonucleotide
  Antisense strand to SEQ ID NO: 237870
ugguugcucaugauucaac

SEQ ID NO: 237872 - RNA, 19 nt, Artificial Sequence
  Description of Artificial Sequence: Synthetic oligonucleotide
  Sense strand starting at position 3724 SEQ ID NO: 3061
agcaaugugagguaugcaa

SEQ ID NO: 237873 - RNA, 19 nt, Artificial Sequence
  Description of Artificial Sequence: Synthetic oligonucleotide
  Antisense strand to SEQ ID NO: 237872
uugcauaccucacauugcu

SEQ ID NO: 237874 - RNA, 19 nt, Artificial Sequence
  Description of Artificial Sequence: Synthetic oligonucleotide
  Sense strand starting at position 3804 SEQ ID NO: 3061
cucagaggcgauuguuuaa

SEQ ID NO: 237875 - RNA, 19 nt, Artificial Sequence
  Description of Artificial Sequence: Synthetic oligonucleotide
  Antisense strand to SEQ ID NO: 237874
uuaaacaaucgccucugag

SEQ ID NO: 237876 - RNA, 19 nt, Artificial Sequence
  Description of Artificial Sequence: Synthetic oligonucleotide
  Sense strand starting at position 3867 SEQ ID NO: 3061
ccuggaauuugugauacga

SEQ ID NO: 237877 - RNA, 19 nt, Artificial Sequence
  Description of Artificial Sequence: Synthetic oligonucleotide
  Antisense strand to SEQ ID NO: 237876
ucguaucacaaauuccagg

SEQ ID NO: 237878 - RNA, 19 nt, Artificial Sequence
  Description of Artificial Sequence: Synthetic oligonucleotide
  Sense strand starting at position 3869 SEQ ID NO: 3061
uggaauuugugauacgaag

SEQ ID NO: 237879 - RNA, 19 nt, Artificial Sequence
  Description of Artificial Sequence: Synthetic oligonucleotide
  Antisense strand to SEQ ID NO: 237878
cuucguaucacaaauucca

SEQ ID NO: 237880 - RNA, 19 nt, Artificial Sequence
  Description of Artificial Sequence: Synthetic oligonucleotide
  Sense strand starting at position 88 SEQ ID NO: 3063
gaggccuugucucuccaaa

SEQ ID NO: 237881 - RNA, 19 nt, Artificial Sequence
  Description of Artificial Sequence: Synthetic oligonucleotide
  Antisense strand to SEQ ID NO: 237880
uuuggagagacaaggccuc

SEQ ID NO: 237882 - RNA, 19 nt, Artificial Sequence
  Description of Artificial Sequence: Synthetic oligonucleotide
  Sense strand starting at position 90 SEQ ID NO: 3063
ggccuugucucuccaaaca

SEQ ID NO: 237883 - RNA, 19 nt, Artificial Sequence
  Description of Artificial Sequence: Synthetic oligonucleotide
  Antisense strand to SEQ ID NO: 237882
uguuuggagagacaaggcc

SEQ ID NO: 237884 - RNA, 19 nt, Artificial Sequence
  Description of Artificial Sequence: Synthetic oligonucleotide
  Sense strand starting at position 180 SEQ ID NO: 3063
ugcagugaccugugaauca

SEQ ID NO: 237885 - RNA, 19 nt, Artificial Sequence
  Description of Artificial Sequence: Synthetic oligonucleotide
  Antisense strand to SEQ ID NO: 237884
ugauucacaggucacugca

SEQ ID NO: 237886 - RNA, 19 nt, Artificial Sequence
  Description of Artificial Sequence: Synthetic oligonucleotide
  Sense strand starting at position 262 SEQ ID NO: 3063
accuaagcuguuuaggaau

SEQ ID NO: 237887 - RNA, 19 nt, Artificial Sequence
  Description of Artificial Sequence: Synthetic oligonucleotide
  Antisense strand to SEQ ID NO: 237886
auuccuaaacagcuuaggu

SEQ ID NO: 237888 - RNA, 19 nt, Artificial Sequence
  Description of Artificial Sequence: Synthetic oligonucleotide
  Sense strand starting at position 672 SEQ ID NO: 3063
caaguuauguuacugguuu

SEQ ID NO: 237889 - RNA, 19 nt, Artificial Sequence
  Description of Artificial Sequence: Synthetic oligonucleotide
  Antisense strand to SEQ ID NO: 237888
aaaccaguaacauaacuug

SEQ ID NO: 237890 - RNA, 19 nt, Artificial Sequence
  Description of Artificial Sequence: Synthetic oligonucleotide
  Sense strand starting at position 784 SEQ ID NO: 3063
ugagccucugcagagauau

SEQ ID NO: 237891 - RNA, 19 nt, Artificial Sequence
  Description of Artificial Sequence: Synthetic oligonucleotide
  Antisense strand to SEQ ID NO: 237890
auaucucugcagaggcuca

SEQ ID NO: 237892 - RNA, 19 nt, Artificial Sequence
  Description of Artificial Sequence: Synthetic oligonucleotide
  Sense strand starting at position 1121 SEQ ID NO: 3063
acaggcgugcaagaaauau

SEQ ID NO: 237893 - RNA, 19 nt, Artificial Sequence
  Description of Artificial Sequence: Synthetic oligonucleotide
  Antisense strand to SEQ ID NO: 237892
auauuucuugcacgccugu

SEQ ID NO: 237894 - RNA, 19 nt, Artificial Sequence
  Description of Artificial Sequence: Synthetic oligonucleotide
  Sense strand starting at position 1132 SEQ ID NO: 3063
agaaauauuuggcaaaucu

SEQ ID NO: 237895 - RNA, 19 nt, Artificial Sequence
  Description of Artificial Sequence: Synthetic oligonucleotide
  Antisense strand to SEQ ID NO: 237894
agauuugccaaauauuucu

SEQ ID NO: 237896 - RNA, 19 nt, Artificial Sequence
  Description of Artificial Sequence: Synthetic oligonucleotide
  Sense strand starting at position 1165 SEQ ID NO: 3063
gugcuagcacuguauuaau

SEQ ID NO: 237897 - RNA, 19 nt, Artificial Sequence
  Description of Artificial Sequence: Synthetic oligonucleotide
  Antisense strand to SEQ ID NO: 237896
auuaauacagugcuagcac

SEQ ID NO: 237898 - RNA, 19 nt, Artificial Sequence
  Description of Artificial Sequence: Synthetic oligonucleotide
  Sense strand starting at position 1198 SEQ ID NO: 3063
guaacuugccuccgagaaa

SEQ ID NO: 237899 - RNA, 19 nt, Artificial Sequence
  Description of Artificial Sequence: Synthetic oligonucleotide
  Antisense strand to SEQ ID NO: 237898
uuucucggaggcaaguuac

SEQ ID NO: 237900 - RNA, 19 nt, Artificial Sequence
  Description of Artificial Sequence: Synthetic oligonucleotide
  Sense strand starting at position 1637 SEQ ID NO: 3063
agagaaacuuccgcaaugu

SEQ ID NO: 237901 - RNA, 19 nt, Artificial Sequence
  Description of Artificial Sequence: Synthetic oligonucleotide
  Antisense strand to SEQ ID NO: 237900
acauugcggaaguuucucu

SEQ ID NO: 237902 - RNA, 19 nt, Artificial Sequence
  Description of Artificial Sequence: Synthetic oligonucleotide
  Sense strand starting at position 1638 SEQ ID NO: 3063
gagaaacuuccgcaauguu

SEQ ID NO: 237903 - RNA, 19 nt, Artificial Sequence
  Description of Artificial Sequence: Synthetic oligonucleotide
  Antisense strand to SEQ ID NO: 237902
aacauugcggaaguuucuc

SEQ ID NO: 237904 - RNA, 19 nt, Artificial Sequence
  Description of Artificial Sequence: Synthetic oligonucleotide
  Sense strand starting at position 2136 SEQ ID NO: 3063
cacauuguucccgcgaguu

SEQ ID NO: 237905 - RNA, 19 nt, Artificial Sequence
  Description of Artificial Sequence: Synthetic oligonucleotide
  Antisense strand to SEQ ID NO: 237904
aacucgcgggaacaaugug

SEQ ID NO: 237906 - RNA, 19 nt, Artificial Sequence
  Description of Artificial Sequence: Synthetic oligonucleotide
  Sense strand starting at position 2191 SEQ ID NO: 3063
ggcagucacccucagugaa

SEQ ID NO: 237907 - RNA, 19 nt, Artificial Sequence
  Description of Artificial Sequence: Synthetic oligonucleotide
  Antisense strand to SEQ ID NO: 237906
uucacugagggugacugcc

SEQ ID NO: 237908 - RNA, 19 nt, Artificial Sequence
  Description of Artificial Sequence: Synthetic oligonucleotide
  Sense strand starting at position 2194 SEQ ID NO: 3063
agucacccucagugaacua

SEQ ID NO: 237909 - RNA, 19 nt, Artificial Sequence
  Description of Artificial Sequence: Synthetic oligonucleotide
  Antisense strand to SEQ ID NO: 237908
uaguucacugagggugacu

SEQ ID NO: 237910 - RNA, 19 nt, Artificial Sequence
  Description of Artificial Sequence: Synthetic oligonucleotide
  Sense strand starting at position 2222 SEQ ID NO: 3063
cgugaccuucaggaugaau

SEQ ID NO: 237911 - RNA, 19 nt, Artificial Sequence
  Description of Artificial Sequence: Synthetic oligonucleotide
  Antisense strand to SEQ ID NO: 237910
auucauccugaaggucacg

SEQ ID NO: 237912 - RNA, 19 nt, Artificial Sequence
  Description of Artificial Sequence: Synthetic oligonucleotide
  Sense strand starting at position 2231 SEQ ID NO: 3063
caggaugaaugcuuggauu

SEQ ID NO: 237913 - RNA, 19 nt, Artificial Sequence
  Description of Artificial Sequence: Synthetic oligonucleotide
  Antisense strand to SEQ ID NO: 237912
aauccaagcauucauccug

SEQ ID NO: 237914 - RNA, 19 nt, Artificial Sequence
  Description of Artificial Sequence: Synthetic oligonucleotide
  Sense strand starting at position 2294 SEQ ID NO: 3063
cacugaaggucccucagaa

SEQ ID NO: 237915 - RNA, 19 nt, Artificial Sequence
  Description of Artificial Sequence: Synthetic oligonucleotide
  Antisense strand to SEQ ID NO: 237914
uucugagggaccuucagug

SEQ ID NO: 237916 - RNA, 19 nt, Artificial Sequence
  Description of Artificial Sequence: Synthetic oligonucleotide
  Sense strand starting at position 2316 SEQ ID NO: 3063
caggaaagaugaugaaaga

SEQ ID NO: 237917 - RNA, 19 nt, Artificial Sequence
  Description of Artificial Sequence: Synthetic oligonucleotide
  Antisense strand to SEQ ID NO: 237916
ucuuucaucaucuuuccug

SEQ ID NO: 237918 - RNA, 19 nt, Artificial Sequence
  Description of Artificial Sequence: Synthetic oligonucleotide
  Sense strand starting at position 2451 SEQ ID NO: 3063
gcuaguggugugagucaug

SEQ ID NO: 237919 - RNA, 19 nt, Artificial Sequence
  Description of Artificial Sequence: Synthetic oligonucleotide
  Antisense strand to SEQ ID NO: 237918
caugacucacaccacuagc

SEQ ID NO: 237920 - RNA, 19 nt, Artificial Sequence
  Description of Artificial Sequence: Synthetic oligonucleotide
  Sense strand starting at position 2460 SEQ ID NO: 3063
gugagucaugggcaaguca

SEQ ID NO: 237921 - RNA, 19 nt, Artificial Sequence
  Description of Artificial Sequence: Synthetic oligonucleotide
  Antisense strand to SEQ ID NO: 237920
ugacuugcccaugacucac

SEQ ID NO: 237922 - RNA, 19 nt, Artificial Sequence
  Description of Artificial Sequence: Synthetic oligonucleotide
  Sense strand starting at position 2532 SEQ ID NO: 3063
caggguuguagugaaugca

SEQ ID NO: 237923 - RNA, 19 nt, Artificial Sequence
  Description of Artificial Sequence: Synthetic oligonucleotide
  Antisense strand to SEQ ID NO: 237922
ugcauucacuacaacccug

SEQ ID NO: 237924 - RNA, 19 nt, Artificial Sequence
  Description of Artificial Sequence: Synthetic oligonucleotide
  Sense strand starting at position 2609 SEQ ID NO: 3063
uugcauaaugucuggaaca

SEQ ID NO: 237925 - RNA, 19 nt, Artificial Sequence
  Description of Artificial Sequence: Synthetic oligonucleotide
  Antisense strand to SEQ ID NO: 237924
uguuccagacauuaugcaa

SEQ ID NO: 237926 - RNA, 19 nt, Artificial Sequence
  Description of Artificial Sequence: Synthetic oligonucleotide
  Sense strand starting at position 2611 SEQ ID NO: 3063
gcauaaugucuggaacauu

SEQ ID NO: 237927 - RNA, 19 nt, Artificial Sequence
  Description of Artificial Sequence: Synthetic oligonucleotide
  Antisense strand to SEQ ID NO: 237926
aauguuccagacauuaugc

SEQ ID NO: 237928 - RNA, 19 nt, Artificial Sequence
  Description of Artificial Sequence: Synthetic oligonucleotide
  Sense strand starting at position 2625 SEQ ID NO: 3063
acauucuggugcucagaaa

SEQ ID NO: 237929 - RNA, 19 nt, Artificial Sequence
  Description of Artificial Sequence: Synthetic oligonucleotide
  Antisense strand to SEQ ID NO: 237928
uuucugagcaccagaaugu

SEQ ID NO: 237930 - RNA, 19 nt, Artificial Sequence
  Description of Artificial Sequence: Synthetic oligonucleotide
  Sense strand starting at position 2626 SEQ ID NO: 3063
cauucuggugcucagaaau

SEQ ID NO: 237931 - RNA, 19 nt, Artificial Sequence
  Description of Artificial Sequence: Synthetic oligonucleotide
  Antisense strand to SEQ ID NO: 237930
auuucugagcaccagaaug

SEQ ID NO: 237932 - RNA, 19 nt, Artificial Sequence
  Description of Artificial Sequence: Synthetic oligonucleotide
  Sense strand starting at position 2762 SEQ ID NO: 3063
accguaucauagucuaaua

SEQ ID NO: 237933 - RNA, 19 nt, Artificial Sequence
  Description of Artificial Sequence: Synthetic oligonucleotide
  Antisense strand to SEQ ID NO: 237932
uauuagacuaugauacggu

SEQ ID NO: 237934 - RNA, 19 nt, Artificial Sequence
  Description of Artificial Sequence: Synthetic oligonucleotide
  Sense strand starting at position 2764 SEQ ID NO: 3063
cguaucauagucuaauaaa

SEQ ID NO: 237935 - RNA, 19 nt, Artificial Sequence
  Description of Artificial Sequence: Synthetic oligonucleotide
  Antisense strand to SEQ ID NO: 237934
uuuauuagacuaugauacg

SEQ ID NO: 237936 - RNA, 19 nt, Artificial Sequence
  Description of Artificial Sequence: Synthetic oligonucleotide
  Sense strand starting at position 2844 SEQ ID NO: 3063
gcggaaaugacggaucuga

SEQ ID NO: 237937 - RNA, 19 nt, Artificial Sequence
  Description of Artificial Sequence: Synthetic oligonucleotide
  Antisense strand to SEQ ID NO: 237936
ucagauccgucauuuccgc

SEQ ID NO: 237938 - RNA, 19 nt, Artificial Sequence
  Description of Artificial Sequence: Synthetic oligonucleotide
  Sense strand starting at position 2936 SEQ ID NO: 3063
guuacuuguccaggcugaa

SEQ ID NO: 237939 - RNA, 19 nt, Artificial Sequence
  Description of Artificial Sequence: Synthetic oligonucleotide
  Antisense strand to SEQ ID NO: 237938
uucagccuggacaaguaac

SEQ ID NO: 237940 - RNA, 19 nt, Artificial Sequence
  Description of Artificial Sequence: Synthetic oligonucleotide
  Sense strand starting at position 3281 SEQ ID NO: 3063
ccagcuccuccaggagaaa

SEQ ID NO: 237941 - RNA, 19 nt, Artificial Sequence
  Description of Artificial Sequence: Synthetic oligonucleotide
  Antisense strand to SEQ ID NO: 237940
uuucuccuggaggagcugg

SEQ ID NO: 237942 - RNA, 19 nt, Artificial Sequence
  Description of Artificial Sequence: Synthetic oligonucleotide
  Sense strand starting at position 3359 SEQ ID NO: 3063
aagagagcuuaauaugaag

SEQ ID NO: 237943 - RNA, 19 nt, Artificial Sequence
  Description of Artificial Sequence: Synthetic oligonucleotide
  Antisense strand to SEQ ID NO: 237942
cuucauauuaagcucucuu

SEQ ID NO: 237944 - RNA, 19 nt, Artificial Sequence
  Description of Artificial Sequence: Synthetic oligonucleotide
  Sense strand starting at position 3416 SEQ ID NO: 3063
ugaauacuccuguggcauc

SEQ ID NO: 237945 - RNA, 19 nt, Artificial Sequence
  Description of Artificial Sequence: Synthetic oligonucleotide
  Antisense strand to SEQ ID NO: 237944
gaugccacaggaguauuca

SEQ ID NO: 237946 - RNA, 19 nt, Artificial Sequence
  Description of Artificial Sequence: Synthetic oligonucleotide
  Sense strand starting at position 3597 SEQ ID NO: 3063
agucauaaucagugccuaa

SEQ ID NO: 237947 - RNA, 19 nt, Artificial Sequence
  Description of Artificial Sequence: Synthetic oligonucleotide
  Antisense strand to SEQ ID NO: 237946
uuaggcacugauuaugacu

SEQ ID NO: 237948 - RNA, 19 nt, Artificial Sequence
  Description of Artificial Sequence: Synthetic oligonucleotide
  Sense strand starting at position 3738 SEQ ID NO: 3063
cuacauuaaccugguuaga

SEQ ID NO: 237949 - RNA, 19 nt, Artificial Sequence
  Description of Artificial Sequence: Synthetic oligonucleotide
  Antisense strand to SEQ ID NO: 237948
ucuaaccagguuaauguag

SEQ ID NO: 237950 - RNA, 19 nt, Artificial Sequence
  Description of Artificial Sequence: Synthetic oligonucleotide
  Sense strand starting at position 3765 SEQ ID NO: 3063
uggauuccagauugcuauu

SEQ ID NO: 237951 - RNA, 19 nt, Artificial Sequence
  Description of Artificial Sequence: Synthetic oligonucleotide
  Antisense strand to SEQ ID NO: 237950
aauagcaaucuggaaucca

SEQ ID NO: 237952 - RNA, 19 nt, Artificial Sequence
  Description of Artificial Sequence: Synthetic oligonucleotide
  Sense strand starting at position 3792 SEQ ID NO: 3063
uccaucaugauguguugga

SEQ ID NO: 237953 - RNA, 19 nt, Artificial Sequence
  Description of Artificial Sequence: Synthetic oligonucleotide
  Antisense strand to SEQ ID NO: 237952
uccaacacaucaugaugga

SEQ ID NO: 237954 - RNA, 19 nt, Artificial Sequence
  Description of Artificial Sequence: Synthetic oligonucleotide
  Sense strand starting at position 3796 SEQ ID NO: 3063
ucaugauguguuggaguga

SEQ ID NO: 237955 - RNA, 19 nt, Artificial Sequence
  Description of Artificial Sequence: Synthetic oligonucleotide
  Antisense strand to SEQ ID NO: 237954
ucacuccaacacaucauga

SEQ ID NO: 237956 - RNA, 19 nt, Artificial Sequence
  Description of Artificial Sequence: Synthetic oligonucleotide
  Sense strand starting at position 3801 SEQ ID NO: 3063
auguguuggagugaaggau

SEQ ID NO: 237957 - RNA, 19 nt, Artificial Sequence
  Description of Artificial Sequence: Synthetic oligonucleotide
  Antisense strand to SEQ ID NO: 237956
auccuucacuccaacacau

SEQ ID NO: 237958 - RNA, 19 nt, Artificial Sequence
  Description of Artificial Sequence: Synthetic oligonucleotide
  Sense strand starting at position 3845 SEQ ID NO: 3063
cuagauauuugguaaccag

SEQ ID NO: 237959 - RNA, 19 nt, Artificial Sequence
  Description of Artificial Sequence: Synthetic oligonucleotide
  Antisense strand to SEQ ID NO: 237958
cugguuaccaaauaucuag

SEQ ID NO: 237960 - RNA, 19 nt, Artificial Sequence
  Description of Artificial Sequence: Synthetic oligonucleotide
  Sense strand starting at position 299 SEQ ID NO: 3064
uggcaaugcagacaugauu

SEQ ID NO: 237961 - RNA, 19 nt, Artificial Sequence
  Description of Artificial Sequence: Synthetic oligonucleotide
  Antisense strand to SEQ ID NO: 237960
aaucaugucugcauugcca

SEQ ID NO: 237962 - RNA, 19 nt, Artificial Sequence
  Description of Artificial Sequence: Synthetic oligonucleotide
  Sense strand starting at position 436 SEQ ID NO: 3064
gaggccuugucucuccaaa

SEQ ID NO: 237963 - RNA, 19 nt, Artificial Sequence
  Description of Artificial Sequence: Synthetic oligonucleotide
  Antisense strand to SEQ ID NO: 237962
uuuggagagacaaggccuc

SEQ ID NO: 237964 - RNA, 19 nt, Artificial Sequence
  Description of Artificial Sequence: Synthetic oligonucleotide
  Sense strand starting at position 438 SEQ ID NO: 3064
ggccuugucucuccaaaca

SEQ ID NO: 237965 - RNA, 19 nt, Artificial Sequence
  Description of Artificial Sequence: Synthetic oligonucleotide
  Antisense strand to SEQ ID NO: 237964
uguuuggagagacaaggcc

SEQ ID NO: 237966 - RNA, 19 nt, Artificial Sequence
  Description of Artificial Sequence: Synthetic oligonucleotide
  Sense strand starting at position 528 SEQ ID NO: 3064
ugcagugaccugugaauca

SEQ ID NO: 237967 - RNA, 19 nt, Artificial Sequence
  Description of Artificial Sequence: Synthetic oligonucleotide
  Antisense strand to SEQ ID NO: 237966
ugauucacaggucacugca

SEQ ID NO: 237968 - RNA, 19 nt, Artificial Sequence
  Description of Artificial Sequence: Synthetic oligonucleotide
  Sense strand starting at position 610 SEQ ID NO: 3064
accuaagcuguuuaggaau

SEQ ID NO: 237969 - RNA, 19 nt, Artificial Sequence
  Description of Artificial Sequence: Synthetic oligonucleotide
  Antisense strand to SEQ ID NO: 237968
auuccuaaacagcuuaggu

SEQ ID NO: 237970 - RNA, 19 nt, Artificial Sequence
  Description of Artificial Sequence: Synthetic oligonucleotide
  Sense strand starting at position 1020 SEQ ID NO: 3064
caaguuauguuacugguuu

SEQ ID NO: 237971 - RNA, 19 nt, Artificial Sequence
  Description of Artificial Sequence: Synthetic oligonucleotide
  Antisense strand to SEQ ID NO: 237970
aaaccaguaacauaacuug

SEQ ID NO: 237972 - RNA, 19 nt, Artificial Sequence
  Description of Artificial Sequence: Synthetic oligonucleotide
  Sense strand starting at position 1132 SEQ ID NO: 3064
ugagccucugcagagauau

SEQ ID NO: 237973 - RNA, 19 nt, Artificial Sequence
  Description of Artificial Sequence: Synthetic oligonucleotide
  Antisense strand to SEQ ID NO: 237972
auaucucugcagaggcuca

SEQ ID NO: 237974 - RNA, 19 nt, Artificial Sequence
  Description of Artificial Sequence: Synthetic oligonucleotide
  Sense strand starting at position 1469 SEQ ID NO: 3064
acaggcgugcaagaaauau

SEQ ID NO: 237975 - RNA, 19 nt, Artificial Sequence
  Description of Artificial Sequence: Synthetic oligonucleotide
  Antisense strand to SEQ ID NO: 237974
auauuucuugcacgccugu

SEQ ID NO: 237976 - RNA, 19 nt, Artificial Sequence
  Description of Artificial Sequence: Synthetic oligonucleotide
  Sense strand starting at position 1480 SEQ ID NO: 3064
agaaauauuuggcaaaucu

SEQ ID NO: 237977 - RNA, 19 nt, Artificial Sequence
  Description of Artificial Sequence: Synthetic oligonucleotide
  Antisense strand to SEQ ID NO: 237976
agauuugccaaauauuucu

SEQ ID NO: 237978 - RNA, 19 nt, Artificial Sequence
  Description of Artificial Sequence: Synthetic oligonucleotide
  Sense strand starting at position 1513 SEQ ID NO: 3064
gugcuagcacuguauuaau

SEQ ID NO: 237979 - RNA, 19 nt, Artificial Sequence
  Description of Artificial Sequence: Synthetic oligonucleotide
  Antisense strand to SEQ ID NO: 237978
auuaauacagugcuagcac

SEQ ID NO: 237980 - RNA, 19 nt, Artificial Sequence
  Description of Artificial Sequence: Synthetic oligonucleotide
  Sense strand starting at position 1546 SEQ ID NO: 3064
guaacuugccuccgagaaa

SEQ ID NO: 237981 - RNA, 19 nt, Artificial Sequence
  Description of Artificial Sequence: Synthetic oligonucleotide
  Antisense strand to SEQ ID NO: 237980
uuucucggaggcaaguuac

SEQ ID NO: 237982 - RNA, 19 nt, Artificial Sequence
  Description of Artificial Sequence: Synthetic oligonucleotide
  Sense strand starting at position 1612 SEQ ID NO: 3064
ccgaguaugcccugaaggu

SEQ ID NO: 237983 - RNA, 19 nt, Artificial Sequence
  Description of Artificial Sequence: Synthetic oligonucleotide
  Antisense strand to SEQ ID NO: 237982
accuucagggcauacucgg

SEQ ID NO: 237984 - RNA, 19 nt, Artificial Sequence
  Description of Artificial Sequence: Synthetic oligonucleotide
  Sense strand starting at position 1985 SEQ ID NO: 3064
agagaaacuuccgcaaugu

SEQ ID NO: 237985 - RNA, 19 nt, Artificial Sequence
  Description of Artificial Sequence: Synthetic oligonucleotide
  Antisense strand to SEQ ID NO: 237984
acauugcggaaguuucucu

SEQ ID NO: 237986 - RNA, 19 nt, Artificial Sequence
  Description of Artificial Sequence: Synthetic oligonucleotide
  Sense strand starting at position 1986 SEQ ID NO: 3064
gagaaacuuccgcaauguu

SEQ ID NO: 237987 - RNA, 19 nt, Artificial Sequence
  Description of Artificial Sequence: Synthetic oligonucleotide
  Antisense strand to SEQ ID NO: 237986
aacauugcggaaguuucuc

SEQ ID NO: 237988 - RNA, 19 nt, Artificial Sequence
  Description of Artificial Sequence: Synthetic oligonucleotide
  Sense strand starting at position 2271 SEQ ID NO: 3064
cgaggagcaugccugucau

SEQ ID NO: 237989 - RNA, 19 nt, Artificial Sequence
  Description of Artificial Sequence: Synthetic oligonucleotide
  Antisense strand to SEQ ID NO: 237988
augacaggcaugcuccucg

SEQ ID NO: 237990 - RNA, 19 nt, Artificial Sequence
  Description of Artificial Sequence: Synthetic oligonucleotide
  Sense strand starting at position 2340 SEQ ID NO: 3064
gggcuuauucgguagccga

SEQ ID NO: 237991 - RNA, 19 nt, Artificial Sequence
  Description of Artificial Sequence: Synthetic oligonucleotide
  Antisense strand to SEQ ID NO: 237990
ucggcuaccgaauaagccc

SEQ ID NO: 237992 - RNA, 19 nt, Artificial Sequence
  Description of Artificial Sequence: Synthetic oligonucleotide
  Sense strand starting at position 2484 SEQ ID NO: 3064
cacauuguucccgcgaguu

SEQ ID NO: 237993 - RNA, 19 nt, Artificial Sequence
  Description of Artificial Sequence: Synthetic oligonucleotide
  Antisense strand to SEQ ID NO: 237992
aacucgcgggaacaaugug

SEQ ID NO: 237994 - RNA, 19 nt, Artificial Sequence
  Description of Artificial Sequence: Synthetic oligonucleotide
  Sense strand starting at position 2539 SEQ ID NO: 3064
ggcagucacccucagugaa

SEQ ID NO: 237995 - RNA, 19 nt, Artificial Sequence
  Description of Artificial Sequence: Synthetic oligonucleotide
  Antisense strand to SEQ ID NO: 237994
uucacugagggugacugcc

SEQ ID NO: 237996 - RNA, 19 nt, Artificial Sequence
  Description of Artificial Sequence: Synthetic oligonucleotide
  Sense strand starting at position 2542 SEQ ID NO: 3064
agucacccucagugaacua

SEQ ID NO: 237997 - RNA, 19 nt, Artificial Sequence
  Description of Artificial Sequence: Synthetic oligonucleotide
  Antisense strand to SEQ ID NO: 237996
uaguucacugagggugacu

SEQ ID NO: 237998 - RNA, 19 nt, Artificial Sequence
  Description of Artificial Sequence: Synthetic oligonucleotide
  Sense strand starting at position 2570 SEQ ID NO: 3064
cgugaccuucaggaugaau

SEQ ID NO: 237999 - RNA, 19 nt, Artificial Sequence
  Description of Artificial Sequence: Synthetic oligonucleotide
  Antisense strand to SEQ ID NO: 237998
auucauccugaaggucacg

SEQ ID NO: 238000 - RNA, 19 nt, Artificial Sequence
  Description of Artificial Sequence: Synthetic oligonucleotide
  Sense strand starting at position 2579 SEQ ID NO: 3064
caggaugaaugcuuggauu

SEQ ID NO: 238001 - RNA, 19 nt, Artificial Sequence
  Description of Artificial Sequence: Synthetic oligonucleotide
  Antisense strand to SEQ ID NO: 238000
aauccaagcauucauccug

SEQ ID NO: 238002 - RNA, 19 nt, Artificial Sequence
  Description of Artificial Sequence: Synthetic oligonucleotide
  Sense strand starting at position 2642 SEQ ID NO: 3064
cacugaaggucccucagaa

SEQ ID NO: 238003 - RNA, 19 nt, Artificial Sequence
  Description of Artificial Sequence: Synthetic oligonucleotide
  Antisense strand to SEQ ID NO: 238002
uucugagggaccuucagug

SEQ ID NO: 238004 - RNA, 19 nt, Artificial Sequence
  Description of Artificial Sequence: Synthetic oligonucleotide
  Sense strand starting at position 2654 SEQ ID NO: 3064
cucagaaacucaggaaaga

SEQ ID NO: 238005 - RNA, 19 nt, Artificial Sequence
  Description of Artificial Sequence: Synthetic oligonucleotide
  Antisense strand to SEQ ID NO: 238004
ucuuuccugaguuucugag

SEQ ID NO: 238006 - RNA, 19 nt, Artificial Sequence
  Description of Artificial Sequence: Synthetic oligonucleotide
  Sense strand starting at position 2664 SEQ ID NO: 3064
caggaaagaugaugaaaga

SEQ ID NO: 238007 - RNA, 19 nt, Artificial Sequence
  Description of Artificial Sequence: Synthetic oligonucleotide
  Antisense strand to SEQ ID NO: 238006
ucuuucaucaucuuuccug

SEQ ID NO: 238008 - RNA, 19 nt, Artificial Sequence
  Description of Artificial Sequence: Synthetic oligonucleotide
  Sense strand starting at position 2728 SEQ ID NO: 3064
gacccuuuguagcugcaaa

SEQ ID NO: 238009 - RNA, 19 nt, Artificial Sequence
  Description of Artificial Sequence: Synthetic oligonucleotide
  Antisense strand to SEQ ID NO: 238008
uuugcagcuacaaaggguc

SEQ ID NO: 238010 - RNA, 19 nt, Artificial Sequence
  Description of Artificial Sequence: Synthetic oligonucleotide
  Sense strand starting at position 2799 SEQ ID NO: 3064
gcuaguggugugagucaug

SEQ ID NO: 238011 - RNA, 19 nt, Artificial Sequence
  Description of Artificial Sequence: Synthetic oligonucleotide
  Antisense strand to SEQ ID NO: 238010
caugacucacaccacuagc

SEQ ID NO: 238012 - RNA, 19 nt, Artificial Sequence
  Description of Artificial Sequence: Synthetic oligonucleotide
  Sense strand starting at position 2808 SEQ ID NO: 3064
gugagucaugggcaaguca

SEQ ID NO: 238013 - RNA, 19 nt, Artificial Sequence
  Description of Artificial Sequence: Synthetic oligonucleotide
  Antisense strand to SEQ ID NO: 238012
ugacuugcccaugacucac

SEQ ID NO: 238014 - RNA, 19 nt, Artificial Sequence
  Description of Artificial Sequence: Synthetic oligonucleotide
  Sense strand starting at position 2880 SEQ ID NO: 3064
caggguuguagugaaugca

SEQ ID NO: 238015 - RNA, 19 nt, Artificial Sequence
  Description of Artificial Sequence: Synthetic oligonucleotide
  Antisense strand to SEQ ID NO: 238014
ugcauucacuacaacccug

SEQ ID NO: 238016 - RNA, 19 nt, Artificial Sequence
  Description of Artificial Sequence: Synthetic oligonucleotide
  Sense strand starting at position 2957 SEQ ID NO: 3064
uugcauaaugucuggaaca

SEQ ID NO: 238017 - RNA, 19 nt, Artificial Sequence
  Description of Artificial Sequence: Synthetic oligonucleotide
  Antisense strand to SEQ ID NO: 238016
uguuccagacauuaugcaa

SEQ ID NO: 238018 - RNA, 19 nt, Artificial Sequence
  Description of Artificial Sequence: Synthetic oligonucleotide
  Sense strand starting at position 2959 SEQ ID NO: 3064
gcauaaugucuggaacauu

SEQ ID NO: 238019 - RNA, 19 nt, Artificial Sequence
  Description of Artificial Sequence: Synthetic oligonucleotide
  Antisense strand to SEQ ID NO: 238018
aauguuccagacauuaugc

SEQ ID NO: 238020 - RNA, 19 nt, Artificial Sequence
  Description of Artificial Sequence: Synthetic oligonucleotide
  Sense strand starting at position 2973 SEQ ID NO: 3064
acauucuggugcucagaaa

SEQ ID NO: 238021 - RNA, 19 nt, Artificial Sequence
  Description of Artificial Sequence: Synthetic oligonucleotide
  Antisense strand to SEQ ID NO: 238020
uuucugagcaccagaaugu

SEQ ID NO: 238022 - RNA, 19 nt, Artificial Sequence
  Description of Artificial Sequence: Synthetic oligonucleotide
  Sense strand starting at position 2974 SEQ ID NO: 3064
cauucuggugcucagaaau

SEQ ID NO: 238023 - RNA, 19 nt, Artificial Sequence
  Description of Artificial Sequence: Synthetic oligonucleotide
  Antisense strand to SEQ ID NO: 238022
auuucugagcaccagaaug

SEQ ID NO: 238024 - RNA, 19 nt, Artificial Sequence
  Description of Artificial Sequence: Synthetic oligonucleotide
  Sense strand starting at position 3110 SEQ ID NO: 3064
accguaucauagucuaaua

SEQ ID NO: 238025 - RNA, 19 nt, Artificial Sequence
  Description of Artificial Sequence: Synthetic oligonucleotide
  Antisense strand to SEQ ID NO: 238024
uauuagacuaugauacggu

SEQ ID NO: 238026 - RNA, 19 nt, Artificial Sequence
  Description of Artificial Sequence: Synthetic oligonucleotide
  Sense strand starting at position 3112 SEQ ID NO: 3064
cguaucauagucuaauaaa

SEQ ID NO: 238027 - RNA, 19 nt, Artificial Sequence
  Description of Artificial Sequence: Synthetic oligonucleotide
  Antisense strand to SEQ ID NO: 238026
uuuauuagacuaugauacg

SEQ ID NO: 238028 - RNA, 19 nt, Artificial Sequence
  Description of Artificial Sequence: Synthetic oligonucleotide
  Sense strand starting at position 3192 SEQ ID NO: 3064
gcggaaaugacggaucuga

SEQ ID NO: 238029 - RNA, 19 nt, Artificial Sequence
  Description of Artificial Sequence: Synthetic oligonucleotide
  Antisense strand to SEQ ID NO: 238028
ucagauccgucauuuccgc

SEQ ID NO: 238030 - RNA, 19 nt, Artificial Sequence
  Description of Artificial Sequence: Synthetic oligonucleotide
  Sense strand starting at position 3284 SEQ ID NO: 3064
guuacuuguccaggcugaa

SEQ ID NO: 238031 - RNA, 19 nt, Artificial Sequence
  Description of Artificial Sequence: Synthetic oligonucleotide
  Antisense strand to SEQ ID NO: 238030
uucagccuggacaaguaac

SEQ ID NO: 238032 - RNA, 19 nt, Artificial Sequence
  Description of Artificial Sequence: Synthetic oligonucleotide
  Sense strand starting at position 3629 SEQ ID NO: 3064
ccagcuccuccaggagaaa

SEQ ID NO: 238033 - RNA, 19 nt, Artificial Sequence
  Description of Artificial Sequence: Synthetic oligonucleotide
  Antisense strand to SEQ ID NO: 238032
uuucuccuggaggagcugg

SEQ ID NO: 238034 - RNA, 19 nt, Artificial Sequence
  Description of Artificial Sequence: Synthetic oligonucleotide
  Sense strand starting at position 3707 SEQ ID NO: 3064
aagagagcuuaauaugaag

SEQ ID NO: 238035 - RNA, 19 nt, Artificial Sequence
  Description of Artificial Sequence: Synthetic oligonucleotide
  Antisense strand to SEQ ID NO: 238034
cuucauauuaagcucucuu

SEQ ID NO: 238036 - RNA, 19 nt, Artificial Sequence
  Description of Artificial Sequence: Synthetic oligonucleotide
  Sense strand starting at position 3764 SEQ ID NO: 3064
ugaauacuccuguggcauc

SEQ ID NO: 238037 - RNA, 19 nt, Artificial Sequence
  Description of Artificial Sequence: Synthetic oligonucleotide
  Antisense strand to SEQ ID NO: 238036
gaugccacaggaguauuca

SEQ ID NO: 238038 - RNA, 19 nt, Artificial Sequence
  Description of Artificial Sequence: Synthetic oligonucleotide
  Sense strand starting at position 3945 SEQ ID NO: 3064
agucauaaucagugccuaa

SEQ ID NO: 238039 - RNA, 19 nt, Artificial Sequence
  Description of Artificial Sequence: Synthetic oligonucleotide
  Antisense strand to SEQ ID NO: 238038
uuaggcacugauuaugacu

SEQ ID NO: 238040 - RNA, 19 nt, Artificial Sequence
  Description of Artificial Sequence: Synthetic oligonucleotide
  Sense strand starting at position 82 SEQ ID NO: 3066
uccuauuaagauggcauau

SEQ ID NO: 238041 - RNA, 19 nt, Artificial Sequence
  Description of Artificial Sequence: Synthetic oligonucleotide
  Antisense strand to SEQ ID NO: 238040
auaugccaucuuaauagga

SEQ ID NO: 238042 - RNA, 19 nt, Artificial Sequence
  Description of Artificial Sequence: Synthetic oligonucleotide
  Sense strand starting at position 378 SEQ ID NO: 3066
auuugcuggugccugauaa

SEQ ID NO: 238043 - RNA, 19 nt, Artificial Sequence
  Description of Artificial Sequence: Synthetic oligonucleotide
  Antisense strand to SEQ ID NO: 238042
uuaucaggcaccagcaaau

SEQ ID NO: 238044 - RNA, 19 nt, Artificial Sequence
  Description of Artificial Sequence: Synthetic oligonucleotide
  Sense strand starting at position 517 SEQ ID NO: 3066
acaugauuaucauucuggu

SEQ ID NO: 238045 - RNA, 19 nt, Artificial Sequence
  Description of Artificial Sequence: Synthetic oligonucleotide
  Antisense strand to SEQ ID NO: 238044
accagaaugauaaucaugu

SEQ ID NO: 238046 - RNA, 19 nt, Artificial Sequence
  Description of Artificial Sequence: Synthetic oligonucleotide
  Sense strand starting at position 532 SEQ ID NO: 3066
ugguuaacaugaucuguua

SEQ ID NO: 238047 - RNA, 19 nt, Artificial Sequence
  Description of Artificial Sequence: Synthetic oligonucleotide
  Antisense strand to SEQ ID NO: 238046
uaacagaucauguuaacca

SEQ ID NO: 238048 - RNA, 19 nt, Artificial Sequence
  Description of Artificial Sequence: Synthetic oligonucleotide
  Sense strand starting at position 670 SEQ ID NO: 3066
uaaucuagugucuggaaga

SEQ ID NO: 238049 - RNA, 19 nt, Artificial Sequence
  Description of Artificial Sequence: Synthetic oligonucleotide
  Antisense strand to SEQ ID NO: 238048
ucuuccagacacuagauua

SEQ ID NO: 238050 - RNA, 19 nt, Artificial Sequence
  Description of Artificial Sequence: Synthetic oligonucleotide
  Sense strand starting at position 677 SEQ ID NO: 3066
gugucuggaagauguacaa

SEQ ID NO: 238051 - RNA, 19 nt, Artificial Sequence
  Description of Artificial Sequence: Synthetic oligonucleotide
  Antisense strand to SEQ ID NO: 238050
uuguacaucuuccagacac

SEQ ID NO: 238052 - RNA, 19 nt, Artificial Sequence
  Description of Artificial Sequence: Synthetic oligonucleotide
  Sense strand starting at position 816 SEQ ID NO: 3066
guggauucuugggugaaug

SEQ ID NO: 238053 - RNA, 19 nt, Artificial Sequence
  Description of Artificial Sequence: Synthetic oligonucleotide
  Antisense strand to SEQ ID NO: 238052
cauucacccaagaauccac

SEQ ID NO: 238054 - RNA, 19 nt, Artificial Sequence
  Description of Artificial Sequence: Synthetic oligonucleotide
  Sense strand starting at position 817 SEQ ID NO: 3066
uggauucuugggugaauga

SEQ ID NO: 238055 - RNA, 19 nt, Artificial Sequence
  Description of Artificial Sequence: Synthetic oligonucleotide
  Antisense strand to SEQ ID NO: 238054
ucauucacccaagaaucca

SEQ ID NO: 238056 - RNA, 19 nt, Artificial Sequence
  Description of Artificial Sequence: Synthetic oligonucleotide
  Sense strand starting at position 832 SEQ ID NO: 3066
augagucugccuuaaguga

SEQ ID NO: 238057 - RNA, 19 nt, Artificial Sequence
  Description of Artificial Sequence: Synthetic oligonucleotide
  Antisense strand to SEQ ID NO: 238056
ucacuuaaggcagacucau

SEQ ID NO: 238058 - RNA, 19 nt, Artificial Sequence
  Description of Artificial Sequence: Synthetic oligonucleotide
  Sense strand starting at position 1218 SEQ ID NO: 3066
guaaucuaaagagggcaau

SEQ ID NO: 238059 - RNA, 19 nt, Artificial Sequence
  Description of Artificial Sequence: Synthetic oligonucleotide
  Antisense strand to SEQ ID NO: 238058
auugcccucuuuagauuac

SEQ ID NO: 238060 - RNA, 19 nt, Artificial Sequence
  Description of Artificial Sequence: Synthetic oligonucleotide
  Sense strand starting at position 1285 SEQ ID NO: 3066
gugagccuuccacaaauga

SEQ ID NO: 238061 - RNA, 19 nt, Artificial Sequence
  Description of Artificial Sequence: Synthetic oligonucleotide
  Antisense strand to SEQ ID NO: 238060
ucauuuguggaaggcucac

SEQ ID NO: 238062 - RNA, 19 nt, Artificial Sequence
  Description of Artificial Sequence: Synthetic oligonucleotide
  Sense strand starting at position 1296 SEQ ID NO: 3066
acaaaugauguuugacuau

SEQ ID NO: 238063 - RNA, 19 nt, Artificial Sequence
  Description of Artificial Sequence: Synthetic oligonucleotide
  Antisense strand to SEQ ID NO: 238062
auagucaaacaucauuugu

SEQ ID NO: 238064 - RNA, 19 nt, Artificial Sequence
  Description of Artificial Sequence: Synthetic oligonucleotide
  Sense strand starting at position 1445 SEQ ID NO: 3066
aggauuaaucagcagcugu

SEQ ID NO: 238065 - RNA, 19 nt, Artificial Sequence
  Description of Artificial Sequence: Synthetic oligonucleotide
  Antisense strand to SEQ ID NO: 238064
acagcugcugauuaauccu

SEQ ID NO: 238066 - RNA, 19 nt, Artificial Sequence
  Description of Artificial Sequence: Synthetic oligonucleotide
  Sense strand starting at position 1534 SEQ ID NO: 3066
uuuguaaacgaucaggagu

SEQ ID NO: 238067 - RNA, 19 nt, Artificial Sequence
  Description of Artificial Sequence: Synthetic oligonucleotide
  Antisense strand to SEQ ID NO: 238066
acuccugaucguuuacaaa

SEQ ID NO: 238068 - RNA, 19 nt, Artificial Sequence
  Description of Artificial Sequence: Synthetic oligonucleotide
  Sense strand starting at position 1625 SEQ ID NO: 3066
ucagguccacuguaaaugu

SEQ ID NO: 238069 - RNA, 19 nt, Artificial Sequence
  Description of Artificial Sequence: Synthetic oligonucleotide
  Antisense strand to SEQ ID NO: 238068
acauuuacaguggaccuga

SEQ ID NO: 238070 - RNA, 19 nt, Artificial Sequence
  Description of Artificial Sequence: Synthetic oligonucleotide
  Sense strand starting at position 1682 SEQ ID NO: 3066
uuaaauuucugugaggaga

SEQ ID NO: 238071 - RNA, 19 nt, Artificial Sequence
  Description of Artificial Sequence: Synthetic oligonucleotide
  Antisense strand to SEQ ID NO: 238070
ucuccucacagaaauuuaa

SEQ ID NO: 238072 - RNA, 19 nt, Artificial Sequence
  Description of Artificial Sequence: Synthetic oligonucleotide
  Sense strand starting at position 1684 SEQ ID NO: 3066
aaauuucugugaggagaga

SEQ ID NO: 238073 - RNA, 19 nt, Artificial Sequence
  Description of Artificial Sequence: Synthetic oligonucleotide
  Antisense strand to SEQ ID NO: 238072
ucucuccucacagaaauuu

SEQ ID NO: 238074 - RNA, 19 nt, Artificial Sequence
  Description of Artificial Sequence: Synthetic oligonucleotide
  Sense strand starting at position 1731 SEQ ID NO: 3066
ccgguuccagaaugaaaug

SEQ ID NO: 238075 - RNA, 19 nt, Artificial Sequence
  Description of Artificial Sequence: Synthetic oligonucleotide
  Antisense strand to SEQ ID NO: 238074
cauuucauucuggaaccgg

SEQ ID NO: 238076 - RNA, 19 nt, Artificial Sequence
  Description of Artificial Sequence: Synthetic oligonucleotide
  Sense strand starting at position 1801 SEQ ID NO: 3066
uugaaaugacaguguagag

SEQ ID NO: 238077 - RNA, 19 nt, Artificial Sequence
  Description of Artificial Sequence: Synthetic oligonucleotide
  Antisense strand to SEQ ID NO: 238076
cucuacacugucauuucaa

SEQ ID NO: 238078 - RNA, 19 nt, Artificial Sequence
  Description of Artificial Sequence: Synthetic oligonucleotide
  Sense strand starting at position 1813 SEQ ID NO: 3066
uguagagaagaaugauguu

SEQ ID NO: 238079 - RNA, 19 nt, Artificial Sequence
  Description of Artificial Sequence: Synthetic oligonucleotide
  Antisense strand to SEQ ID NO: 238078
aacaucauucuucucuaca

SEQ ID NO: 238080 - RNA, 19 nt, Artificial Sequence
  Description of Artificial Sequence: Synthetic oligonucleotide
  Sense strand starting at position 1883 SEQ ID NO: 3066
ucaugcaauccuggagaaa

SEQ ID NO: 238081 - RNA, 19 nt, Artificial Sequence
  Description of Artificial Sequence: Synthetic oligonucleotide
  Antisense strand to SEQ ID NO: 238080
uuucuccaggauugcauga

SEQ ID NO: 238082 - RNA, 19 nt, Artificial Sequence
  Description of Artificial Sequence: Synthetic oligonucleotide
  Sense strand starting at position 1992 SEQ ID NO: 3066
cuagcuguucugcugcaga

SEQ ID NO: 238083 - RNA, 19 nt, Artificial Sequence
  Description of Artificial Sequence: Synthetic oligonucleotide
  Antisense strand to SEQ ID NO: 238082
ucugcagcagaacagcuag

SEQ ID NO: 238084 - RNA, 19 nt, Artificial Sequence
  Description of Artificial Sequence: Synthetic oligonucleotide
  Sense strand starting at position 2081 SEQ ID NO: 3066
caaguuaaauuagcagaga

SEQ ID NO: 238085 - RNA, 19 nt, Artificial Sequence
  Description of Artificial Sequence: Synthetic oligonucleotide
  Antisense strand to SEQ ID NO: 238084
ucucugcuaauuuaacuug

SEQ ID NO: 238086 - RNA, 19 nt, Artificial Sequence
  Description of Artificial Sequence: Synthetic oligonucleotide
  Sense strand starting at position 2098 SEQ ID NO: 3066
gauggaauguucuucgaau

SEQ ID NO: 238087 - RNA, 19 nt, Artificial Sequence
  Description of Artificial Sequence: Synthetic oligonucleotide
  Antisense strand to SEQ ID NO: 238086
auucgaagaacauuccauc

SEQ ID NO: 238088 - RNA, 19 nt, Artificial Sequence
  Description of Artificial Sequence: Synthetic oligonucleotide
  Sense strand starting at position 2099 SEQ ID NO: 3066
auggaauguucuucgaaug

SEQ ID NO: 238089 - RNA, 19 nt, Artificial Sequence
  Description of Artificial Sequence: Synthetic oligonucleotide
  Antisense strand to SEQ ID NO: 238088
cauucgaagaacauuccau

SEQ ID NO: 238090 - RNA, 19 nt, Artificial Sequence
  Description of Artificial Sequence: Synthetic oligonucleotide
  Sense strand starting at position 2122 SEQ ID NO: 3066
guauaaggcucaucaggag

SEQ ID NO: 238091 - RNA, 19 nt, Artificial Sequence
  Description of Artificial Sequence: Synthetic oligonucleotide
  Antisense strand to SEQ ID NO: 238090
cuccugaugagccuuauac

SEQ ID NO: 238092 - RNA, 19 nt, Artificial Sequence
  Description of Artificial Sequence: Synthetic oligonucleotide
  Sense strand starting at position 2188 SEQ ID NO: 3066
ucacauauugguuaagugu

SEQ ID NO: 238093 - RNA, 19 nt, Artificial Sequence
  Description of Artificial Sequence: Synthetic oligonucleotide
  Antisense strand to SEQ ID NO: 238092
acacuuaaccaauauguga

SEQ ID NO: 238094 - RNA, 19 nt, Artificial Sequence
  Description of Artificial Sequence: Synthetic oligonucleotide
  Sense strand starting at position 2191 SEQ ID NO: 3066
cauauugguuaagugugaa

SEQ ID NO: 238095 - RNA, 19 nt, Artificial Sequence
  Description of Artificial Sequence: Synthetic oligonucleotide
  Antisense strand to SEQ ID NO: 238094
uucacacuuaaccaauaug

SEQ ID NO: 238096 - RNA, 19 nt, Artificial Sequence
  Description of Artificial Sequence: Synthetic oligonucleotide
  Sense strand starting at position 2834 SEQ ID NO: 3066
auuugugggccuggcagau

SEQ ID NO: 238097 - RNA, 19 nt, Artificial Sequence
  Description of Artificial Sequence: Synthetic oligonucleotide
  Antisense strand to SEQ ID NO: 238096
aucugccaggcccacaaau

SEQ ID NO: 238098 - RNA, 19 nt, Artificial Sequence
  Description of Artificial Sequence: Synthetic oligonucleotide
  Sense strand starting at position 3344 SEQ ID NO: 3066
ccugaaauugcacauuguu

SEQ ID NO: 238099 - RNA, 19 nt, Artificial Sequence
  Description of Artificial Sequence: Synthetic oligonucleotide
  Antisense strand to SEQ ID NO: 238098
aacaaugugcaauuucagg

SEQ ID NO: 238100 - RNA, 19 nt, Artificial Sequence
  Description of Artificial Sequence: Synthetic oligonucleotide
  Sense strand starting at position 3357 SEQ ID NO: 3066
auuguuaggccaugaaagg

SEQ ID NO: 238101 - RNA, 19 nt, Artificial Sequence
  Description of Artificial Sequence: Synthetic oligonucleotide
  Antisense strand to SEQ ID NO: 238100
ccuuucauggccuaacaau

SEQ ID NO: 238102 - RNA, 19 nt, Artificial Sequence
  Description of Artificial Sequence: Synthetic oligonucleotide
  Sense strand starting at position 3358 SEQ ID NO: 3066
uuguuaggccaugaaaggu

SEQ ID NO: 238103 - RNA, 19 nt, Artificial Sequence
  Description of Artificial Sequence: Synthetic oligonucleotide
  Antisense strand to SEQ ID NO: 238102
accuuucauggccuaacaa

SEQ ID NO: 238104 - RNA, 19 nt, Artificial Sequence
  Description of Artificial Sequence: Synthetic oligonucleotide
  Sense strand starting at position 3510 SEQ ID NO: 3066
gcccuauaagaauguauag

SEQ ID NO: 238105 - RNA, 19 nt, Artificial Sequence
  Description of Artificial Sequence: Synthetic oligonucleotide
  Antisense strand to SEQ ID NO: 238104
cuauacauucuuauagggc

SEQ ID NO: 238106 - RNA, 19 nt, Artificial Sequence
  Description of Artificial Sequence: Synthetic oligonucleotide
  Sense strand starting at position 3599 SEQ ID NO: 3066
aauagaugucgucagugaa

SEQ ID NO: 238107 - RNA, 19 nt, Artificial Sequence
  Description of Artificial Sequence: Synthetic oligonucleotide
  Antisense strand to SEQ ID NO: 238106
uucacugacgacaucuauu

SEQ ID NO: 238108 - RNA, 19 nt, Artificial Sequence
  Description of Artificial Sequence: Synthetic oligonucleotide
  Sense strand starting at position 3657 SEQ ID NO: 3066
gcguuagcaguauuaguau

SEQ ID NO: 238109 - RNA, 19 nt, Artificial Sequence
  Description of Artificial Sequence: Synthetic oligonucleotide
  Antisense strand to SEQ ID NO: 238108
auacuaauacugcuaacgc

SEQ ID NO: 238110 - RNA, 19 nt, Artificial Sequence
  Description of Artificial Sequence: Synthetic oligonucleotide
  Sense strand starting at position 3765 SEQ ID NO: 3066
guuacuuuacaugaguuua

SEQ ID NO: 238111 - RNA, 19 nt, Artificial Sequence
  Description of Artificial Sequence: Synthetic oligonucleotide
  Antisense strand to SEQ ID NO: 238110
uaaacucauguaaaguaac

SEQ ID NO: 238112 - RNA, 19 nt, Artificial Sequence
  Description of Artificial Sequence: Synthetic oligonucleotide
  Sense strand starting at position 3845 SEQ ID NO: 3066
gacauugaucaaggauugu

SEQ ID NO: 238113 - RNA, 19 nt, Artificial Sequence
  Description of Artificial Sequence: Synthetic oligonucleotide
  Antisense strand to SEQ ID NO: 238112
acaauccuugaucaauguc

SEQ ID NO: 238114 - RNA, 19 nt, Artificial Sequence
  Description of Artificial Sequence: Synthetic oligonucleotide
  Sense strand starting at position 3849 SEQ ID NO: 3066
uugaucaaggauuguccua

SEQ ID NO: 238115 - RNA, 19 nt, Artificial Sequence
  Description of Artificial Sequence: Synthetic oligonucleotide
  Antisense strand to SEQ ID NO: 238114
uaggacaauccuugaucaa

SEQ ID NO: 238116 - RNA, 19 nt, Artificial Sequence
  Description of Artificial Sequence: Synthetic oligonucleotide
  Sense strand starting at position 3851 SEQ ID NO: 3066
gaucaaggauuguccuaug

SEQ ID NO: 238117 - RNA, 19 nt, Artificial Sequence
  Description of Artificial Sequence: Synthetic oligonucleotide
  Antisense strand to SEQ ID NO: 238116
cauaggacaauccuugauc

SEQ ID NO: 238118 - RNA, 19 nt, Artificial Sequence
  Description of Artificial Sequence: Synthetic oligonucleotide
  Sense strand starting at position 3974 SEQ ID NO: 3066
cuuugaaauuagucuaaga

SEQ ID NO: 238119 - RNA, 19 nt, Artificial Sequence
  Description of Artificial Sequence: Synthetic oligonucleotide
  Antisense strand to SEQ ID NO: 238118
ucuuagacuaauuucaaag

SEQ ID NO: 238120 - RNA, 19 nt, Artificial Sequence
  Description of Artificial Sequence: Synthetic oligonucleotide
  Sense strand starting at position 580 SEQ ID NO: 3065
gccaacugggcucagagau

SEQ ID NO: 238121 - RNA, 19 nt, Artificial Sequence
  Description of Artificial Sequence: Synthetic oligonucleotide
  Antisense strand to SEQ ID NO: 238120
aucucugagcccaguuggc

SEQ ID NO: 238122 - RNA, 19 nt, Artificial Sequence
  Description of Artificial Sequence: Synthetic oligonucleotide
  Sense strand starting at position 606 SEQ ID NO: 3065
acacaaugccgcuaucaua

SEQ ID NO: 238123 - RNA, 19 nt, Artificial Sequence
  Description of Artificial Sequence: Synthetic oligonucleotide
  Antisense strand to SEQ ID NO: 238122
uaugauagcggcauugugu

SEQ ID NO: 238124 - RNA, 19 nt, Artificial Sequence
  Description of Artificial Sequence: Synthetic oligonucleotide
  Sense strand starting at position 768 SEQ ID NO: 3065
gugagaaagguuugggcga

SEQ ID NO: 238125 - RNA, 19 nt, Artificial Sequence
  Description of Artificial Sequence: Synthetic oligonucleotide
  Antisense strand to SEQ ID NO: 238124
ucgcccaaaccuuucucac

SEQ ID NO: 238126 - RNA, 19 nt, Artificial Sequence
  Description of Artificial Sequence: Synthetic oligonucleotide
  Sense strand starting at position 869 SEQ ID NO: 3065
ucauuaagguuagcauuau

SEQ ID NO: 238127 - RNA, 19 nt, Artificial Sequence
  Description of Artificial Sequence: Synthetic oligonucleotide
  Antisense strand to SEQ ID NO: 238126
auaaugcuaaccuuaauga

SEQ ID NO: 238128 - RNA, 19 nt, Artificial Sequence
  Description of Artificial Sequence: Synthetic oligonucleotide
  Sense strand starting at position 899 SEQ ID NO: 3065
cuugcaugacguuaaauag

SEQ ID NO: 238129 - RNA, 19 nt, Artificial Sequence
  Description of Artificial Sequence: Synthetic oligonucleotide
  Antisense strand to SEQ ID NO: 238128
cuauuuaacgucaugcaag

SEQ ID NO: 238130 - RNA, 19 nt, Artificial Sequence
  Description of Artificial Sequence: Synthetic oligonucleotide
  Sense strand starting at position 1009 SEQ ID NO: 3065
uuugucagugaucauucua

SEQ ID NO: 238131 - RNA, 19 nt, Artificial Sequence
  Description of Artificial Sequence: Synthetic oligonucleotide
  Antisense strand to SEQ ID NO: 238130
uagaaugaucacugacaaa

SEQ ID NO: 238132 - RNA, 19 nt, Artificial Sequence
  Description of Artificial Sequence: Synthetic oligonucleotide
  Sense strand starting at position 1174 SEQ ID NO: 3065
ugacuaucuuguguaaaug

SEQ ID NO: 238133 - RNA, 19 nt, Artificial Sequence
  Description of Artificial Sequence: Synthetic oligonucleotide
  Antisense strand to SEQ ID NO: 238132
cauuuacacaagauaguca

SEQ ID NO: 238134 - RNA, 19 nt, Artificial Sequence
  Description of Artificial Sequence: Synthetic oligonucleotide
  Sense strand starting at position 1217 SEQ ID NO: 3065
gguagucacauuggagauu

SEQ ID NO: 238135 - RNA, 19 nt, Artificial Sequence
  Description of Artificial Sequence: Synthetic oligonucleotide
  Antisense strand to SEQ ID NO: 238134
aaucuccaaugugacuacc

SEQ ID NO: 238136 - RNA, 19 nt, Artificial Sequence
  Description of Artificial Sequence: Synthetic oligonucleotide
  Sense strand starting at position 1245 SEQ ID NO: 3065
aggcccuuacuugguuaaa

SEQ ID NO: 238137 - RNA, 19 nt, Artificial Sequence
  Description of Artificial Sequence: Synthetic oligonucleotide
  Antisense strand to SEQ ID NO: 238136
uuuaaccaaguaagggccu

SEQ ID NO: 238138 - RNA, 19 nt, Artificial Sequence
  Description of Artificial Sequence: Synthetic oligonucleotide
  Sense strand starting at position 1473 SEQ ID NO: 3065
ugcagaaagugauucuuga

SEQ ID NO: 238139 - RNA, 19 nt, Artificial Sequence
  Description of Artificial Sequence: Synthetic oligonucleotide
  Antisense strand to SEQ ID NO: 238138
ucaagaaucacuuucugca

SEQ ID NO: 238140 - RNA, 19 nt, Artificial Sequence
  Description of Artificial Sequence: Synthetic oligonucleotide
  Sense strand starting at position 1492 SEQ ID NO: 3065
ggauacuuagugggaaagu

SEQ ID NO: 238141 - RNA, 19 nt, Artificial Sequence
  Description of Artificial Sequence: Synthetic oligonucleotide
  Antisense strand to SEQ ID NO: 238140
acuuucccacuaaguaucc

SEQ ID NO: 238142 - RNA, 19 nt, Artificial Sequence
  Description of Artificial Sequence: Synthetic oligonucleotide
  Sense strand starting at position 1506 SEQ ID NO: 3065
aaagucugcggaggacuua

SEQ ID NO: 238143 - RNA, 19 nt, Artificial Sequence
  Description of Artificial Sequence: Synthetic oligonucleotide
  Antisense strand to SEQ ID NO: 238142
uaaguccuccgcagacuuu

SEQ ID NO: 238144 - RNA, 19 nt, Artificial Sequence
  Description of Artificial Sequence: Synthetic oligonucleotide
  Sense strand starting at position 1518 SEQ ID NO: 3065
ggacuuaguucuccaucuu

SEQ ID NO: 238145 - RNA, 19 nt, Artificial Sequence
  Description of Artificial Sequence: Synthetic oligonucleotide
  Antisense strand to SEQ ID NO: 238144
aagauggagaacuaagucc

SEQ ID NO: 238146 - RNA, 19 nt, Artificial Sequence
  Description of Artificial Sequence: Synthetic oligonucleotide
  Sense strand starting at position 1555 SEQ ID NO: 3065
aguucuaauuaccuguaga

SEQ ID NO: 238147 - RNA, 19 nt, Artificial Sequence
  Description of Artificial Sequence: Synthetic oligonucleotide
  Antisense strand to SEQ ID NO: 238146
ucuacagguaauuagaacu

SEQ ID NO: 238148 - RNA, 19 nt, Artificial Sequence
  Description of Artificial Sequence: Synthetic oligonucleotide
  Sense strand starting at position 1839 SEQ ID NO: 3065
gaauccuugugguuuaaug

SEQ ID NO: 238149 - RNA, 19 nt, Artificial Sequence
  Description of Artificial Sequence: Synthetic oligonucleotide
  Antisense strand to SEQ ID NO: 238148
cauuaaaccacaaggauuc

SEQ ID NO: 238150 - RNA, 19 nt, Artificial Sequence
  Description of Artificial Sequence: Synthetic oligonucleotide
  Sense strand starting at position 1841 SEQ ID NO: 3065
auccuugugguuuaaugau

SEQ ID NO: 238151 - RNA, 19 nt, Artificial Sequence
  Description of Artificial Sequence: Synthetic oligonucleotide
  Antisense strand to SEQ ID NO: 238150
aucauuaaaccacaaggau

SEQ ID NO: 238152 - RNA, 19 nt, Artificial Sequence
  Description of Artificial Sequence: Synthetic oligonucleotide
  Sense strand starting at position 1854 SEQ ID NO: 3065
aaugauuucucugggagga

SEQ ID NO: 238153 - RNA, 19 nt, Artificial Sequence
  Description of Artificial Sequence: Synthetic oligonucleotide
  Antisense strand to SEQ ID NO: 238152
uccucccagagaaaucauu

SEQ ID NO: 238154 - RNA, 19 nt, Artificial Sequence
  Description of Artificial Sequence: Synthetic oligonucleotide
  Sense strand starting at position 1903 SEQ ID NO: 3065
aguauuuccucucuuugca

SEQ ID NO: 238155 - RNA, 19 nt, Artificial Sequence
  Description of Artificial Sequence: Synthetic oligonucleotide
  Antisense strand to SEQ ID NO: 238154
ugcaaagagaggaaauacu

SEQ ID NO: 238156 - RNA, 19 nt, Artificial Sequence
  Description of Artificial Sequence: Synthetic oligonucleotide
  Sense strand starting at position 1944 SEQ ID NO: 3065
uuaaguuauugcccuggaa

SEQ ID NO: 238157 - RNA, 19 nt, Artificial Sequence
  Description of Artificial Sequence: Synthetic oligonucleotide
  Antisense strand to SEQ ID NO: 238156
uuccagggcaauaacuuaa

SEQ ID NO: 238158 - RNA, 19 nt, Artificial Sequence
  Description of Artificial Sequence: Synthetic oligonucleotide
  Sense strand starting at position 1963 SEQ ID NO: 3065
aaggaaaugugguuugcca

SEQ ID NO: 238159 - RNA, 19 nt, Artificial Sequence
  Description of Artificial Sequence: Synthetic oligonucleotide
  Antisense strand to SEQ ID NO: 238158
uggcaaaccacauuuccuu

SEQ ID NO: 238160 - RNA, 19 nt, Artificial Sequence
  Description of Artificial Sequence: Synthetic oligonucleotide
  Sense strand starting at position 1970 SEQ ID NO: 3065
ugugguuugccagugguua

SEQ ID NO: 238161 - RNA, 19 nt, Artificial Sequence
  Description of Artificial Sequence: Synthetic oligonucleotide
  Antisense strand to SEQ ID NO: 238160
uaaccacuggcaaaccaca

SEQ ID NO: 238162 - RNA, 19 nt, Artificial Sequence
  Description of Artificial Sequence: Synthetic oligonucleotide
  Sense strand starting at position 2001 SEQ ID NO: 3065
guacaucaguuagucaaca

SEQ ID NO: 238163 - RNA, 19 nt, Artificial Sequence
  Description of Artificial Sequence: Synthetic oligonucleotide
  Antisense strand to SEQ ID NO: 238162
uguugacuaacugauguac

SEQ ID NO: 238164 - RNA, 19 nt, Artificial Sequence
  Description of Artificial Sequence: Synthetic oligonucleotide
  Sense strand starting at position 2035 SEQ ID NO: 3065
cauuguuggcccugauuua

SEQ ID NO: 238165 - RNA, 19 nt, Artificial Sequence
  Description of Artificial Sequence: Synthetic oligonucleotide
  Antisense strand to SEQ ID NO: 238164
uaaaucagggccaacaaug

SEQ ID NO: 238166 - RNA, 19 nt, Artificial Sequence
  Description of Artificial Sequence: Synthetic oligonucleotide
  Sense strand starting at position 2131 SEQ ID NO: 3065
agauaauuguggcuaugau

SEQ ID NO: 238167 - RNA, 19 nt, Artificial Sequence
  Description of Artificial Sequence: Synthetic oligonucleotide
  Antisense strand to SEQ ID NO: 238166
aucauagccacaauuaucu

SEQ ID NO: 238168 - RNA, 19 nt, Artificial Sequence
  Description of Artificial Sequence: Synthetic oligonucleotide
  Sense strand starting at position 2132 SEQ ID NO: 3065
gauaauuguggcuaugaug

SEQ ID NO: 238169 - RNA, 19 nt, Artificial Sequence
  Description of Artificial Sequence: Synthetic oligonucleotide
  Antisense strand to SEQ ID NO: 238168
caucauagccacaauuauc

SEQ ID NO: 238170 - RNA, 19 nt, Artificial Sequence
  Description of Artificial Sequence: Synthetic oligonucleotide
  Sense strand starting at position 2148 SEQ ID NO: 3065
auguaaguguaucuggauu

SEQ ID NO: 238171 - RNA, 19 nt, Artificial Sequence
  Description of Artificial Sequence: Synthetic oligonucleotide
  Antisense strand to SEQ ID NO: 238170
aauccagauacacuuacau

SEQ ID NO: 238172 - RNA, 19 nt, Artificial Sequence
  Description of Artificial Sequence: Synthetic oligonucleotide
  Sense strand starting at position 2389 SEQ ID NO: 3065
auuaucggcuccucaugaa

SEQ ID NO: 238173 - RNA, 19 nt, Artificial Sequence
  Description of Artificial Sequence: Synthetic oligonucleotide
  Antisense strand to SEQ ID NO: 238172
uucaugaggagccgauaau

SEQ ID NO: 238174 - RNA, 19 nt, Artificial Sequence
  Description of Artificial Sequence: Synthetic oligonucleotide
  Sense strand starting at position 2447 SEQ ID NO: 3065
cagggauacuguucgaggu

SEQ ID NO: 238175 - RNA, 19 nt, Artificial Sequence
  Description of Artificial Sequence: Synthetic oligonucleotide
  Antisense strand to SEQ ID NO: 238174
accucgaacaguaucccug

SEQ ID NO: 238176 - RNA, 19 nt, Artificial Sequence
  Description of Artificial Sequence: Synthetic oligonucleotide
  Sense strand starting at position 2626 SEQ ID NO: 3065
ccuauugaguuucuuccau

SEQ ID NO: 238177 - RNA, 19 nt, Artificial Sequence
  Description of Artificial Sequence: Synthetic oligonucleotide
  Antisense strand to SEQ ID NO: 238176
auggaagaaacucaauagg

SEQ ID NO: 238178 - RNA, 19 nt, Artificial Sequence
  Description of Artificial Sequence: Synthetic oligonucleotide
  Sense strand starting at position 2798 SEQ ID NO: 3065
ccuugcugagcuuaacuau

SEQ ID NO: 238179 - RNA, 19 nt, Artificial Sequence
  Description of Artificial Sequence: Synthetic oligonucleotide
  Antisense strand to SEQ ID NO: 238178
auaguuaagcucagcaagg

SEQ ID NO: 238180 - RNA, 19 nt, Artificial Sequence
  Description of Artificial Sequence: Synthetic oligonucleotide
  Sense strand starting at position 2804 SEQ ID NO: 3065
ugagcuuaacuauggaaug

SEQ ID NO: 238181 - RNA, 19 nt, Artificial Sequence
  Description of Artificial Sequence: Synthetic oligonucleotide
  Antisense strand to SEQ ID NO: 238180
cauuccauaguuaagcuca

SEQ ID NO: 238182 - RNA, 19 nt, Artificial Sequence
  Description of Artificial Sequence: Synthetic oligonucleotide
  Sense strand starting at position 2881 SEQ ID NO: 3065
ggacuacugucuguaggga

SEQ ID NO: 238183 - RNA, 19 nt, Artificial Sequence
  Description of Artificial Sequence: Synthetic oligonucleotide
  Antisense strand to SEQ ID NO: 238182
ucccuacagacaguagucc

SEQ ID NO: 238184 - RNA, 19 nt, Artificial Sequence
  Description of Artificial Sequence: Synthetic oligonucleotide
  Sense strand starting at position 2882 SEQ ID NO: 3065
gacuacugucuguagggaa

SEQ ID NO: 238185 - RNA, 19 nt, Artificial Sequence
  Description of Artificial Sequence: Synthetic oligonucleotide
  Antisense strand to SEQ ID NO: 238184
uucccuacagacaguaguc

SEQ ID NO: 238186 - RNA, 19 nt, Artificial Sequence
  Description of Artificial Sequence: Synthetic oligonucleotide
  Sense strand starting at position 2965 SEQ ID NO: 3065
uucucaagucaaugaugaa

SEQ ID NO: 238187 - RNA, 19 nt, Artificial Sequence
  Description of Artificial Sequence: Synthetic oligonucleotide
  Antisense strand to SEQ ID NO: 238186
uucaucauugacuugagaa

SEQ ID NO: 238188 - RNA, 19 nt, Artificial Sequence
  Description of Artificial Sequence: Synthetic oligonucleotide
  Sense strand starting at position 2999 SEQ ID NO: 3065
agagaccucuuguugguuu

SEQ ID NO: 238189 - RNA, 19 nt, Artificial Sequence
  Description of Artificial Sequence: Synthetic oligonucleotide
  Antisense strand to SEQ ID NO: 238188
aaaccaacaagaggucucu

SEQ ID NO: 238190 - RNA, 19 nt, Artificial Sequence
  Description of Artificial Sequence: Synthetic oligonucleotide
  Sense strand starting at position 3028 SEQ ID NO: 3065
ugugaacaauuacugugau

SEQ ID NO: 238191 - RNA, 19 nt, Artificial Sequence
  Description of Artificial Sequence: Synthetic oligonucleotide
  Antisense strand to SEQ ID NO: 238190
aucacaguaauuguucaca

SEQ ID NO: 238192 - RNA, 19 nt, Artificial Sequence
  Description of Artificial Sequence: Synthetic oligonucleotide
  Sense strand starting at position 3236 SEQ ID NO: 3065
augcuuucucuugagauua

SEQ ID NO: 238193 - RNA, 19 nt, Artificial Sequence
  Description of Artificial Sequence: Synthetic oligonucleotide
  Antisense strand to SEQ ID NO: 238192
uaaucucaagagaaagcau

SEQ ID NO: 238194 - RNA, 19 nt, Artificial Sequence
  Description of Artificial Sequence: Synthetic oligonucleotide
  Sense strand starting at position 3244 SEQ ID NO: 3065
ucuugagauuaaguugaua

SEQ ID NO: 238195 - RNA, 19 nt, Artificial Sequence
  Description of Artificial Sequence: Synthetic oligonucleotide
  Antisense strand to SEQ ID NO: 238194
uaucaacuuaaucucaaga

SEQ ID NO: 238196 - RNA, 19 nt, Artificial Sequence
  Description of Artificial Sequence: Synthetic oligonucleotide
  Sense strand starting at position 3255 SEQ ID NO: 3065
aguugauaauggcuccaaa

SEQ ID NO: 238197 - RNA, 19 nt, Artificial Sequence
  Description of Artificial Sequence: Synthetic oligonucleotide
  Antisense strand to SEQ ID NO: 238196
uuuggagccauuaucaacu

SEQ ID NO: 238198 - RNA, 19 nt, Artificial Sequence
  Description of Artificial Sequence: Synthetic oligonucleotide
  Sense strand starting at position 3294 SEQ ID NO: 3065
uucccauugugaucuacau

SEQ ID NO: 238199 - RNA, 19 nt, Artificial Sequence
  Description of Artificial Sequence: Synthetic oligonucleotide
  Antisense strand to SEQ ID NO: 238198
auguagaucacaaugggaa

SEQ ID NO: 238200 - RNA, 19 nt, Artificial Sequence
  Description of Artificial Sequence: Synthetic oligonucleotide
  Sense strand starting at position 270 SEQ ID NO: 3067
aggccucuccgcuagagaa

SEQ ID NO: 238201 - RNA, 19 nt, Artificial Sequence
  Description of Artificial Sequence: Synthetic oligonucleotide
  Antisense strand to SEQ ID NO: 238200
uucucuagcggagaggccu

SEQ ID NO: 238202 - RNA, 19 nt, Artificial Sequence
  Description of Artificial Sequence: Synthetic oligonucleotide
  Sense strand starting at position 503 SEQ ID NO: 3067
ugacucugucccuggaaca

SEQ ID NO: 238203 - RNA, 19 nt, Artificial Sequence
  Description of Artificial Sequence: Synthetic oligonucleotide
  Antisense strand to SEQ ID NO: 238202
uguuccagggacagaguca

SEQ ID NO: 238204 - RNA, 19 nt, Artificial Sequence
  Description of Artificial Sequence: Synthetic oligonucleotide
  Sense strand starting at position 626 SEQ ID NO: 3067
aggagucaaguguacacau

SEQ ID NO: 238205 - RNA, 19 nt, Artificial Sequence
  Description of Artificial Sequence: Synthetic oligonucleotide
  Antisense strand to SEQ ID NO: 238204
auguguacacuugacuccu

SEQ ID NO: 238206 - RNA, 19 nt, Artificial Sequence
  Description of Artificial Sequence: Synthetic oligonucleotide
  Sense strand starting at position 737 SEQ ID NO: 3067
cugggaagucaacaugcuu

SEQ ID NO: 238207 - RNA, 19 nt, Artificial Sequence
  Description of Artificial Sequence: Synthetic oligonucleotide
  Antisense strand to SEQ ID NO: 238206
aagcauguugacuucccag

SEQ ID NO: 238208 - RNA, 19 nt, Artificial Sequence
  Description of Artificial Sequence: Synthetic oligonucleotide
  Sense strand starting at position 757 SEQ ID NO: 3067
guuuaauuccuuccugcgu

SEQ ID NO: 238209 - RNA, 19 nt, Artificial Sequence
  Description of Artificial Sequence: Synthetic oligonucleotide
  Antisense strand to SEQ ID NO: 238208
acgcaggaaggaauuaaac

SEQ ID NO: 238210 - RNA, 19 nt, Artificial Sequence
  Description of Artificial Sequence: Synthetic oligonucleotide
  Sense strand starting at position 788 SEQ ID NO: 3067
gggccucuaggcuaauuga

SEQ ID NO: 238211 - RNA, 19 nt, Artificial Sequence
  Description of Artificial Sequence: Synthetic oligonucleotide
  Antisense strand to SEQ ID NO: 238210
ucaauuagccuagaggccc

SEQ ID NO: 238212 - RNA, 19 nt, Artificial Sequence
  Description of Artificial Sequence: Synthetic oligonucleotide
  Sense strand starting at position 791 SEQ ID NO: 3067
ccucuaggcuaauugaaau

SEQ ID NO: 238213 - RNA, 19 nt, Artificial Sequence
  Description of Artificial Sequence: Synthetic oligonucleotide
  Antisense strand to SEQ ID NO: 238212
auuucaauuagccuagagg

SEQ ID NO: 238214 - RNA, 19 nt, Artificial Sequence
  Description of Artificial Sequence: Synthetic oligonucleotide
  Sense strand starting at position 875 SEQ ID NO: 3067
uuuauuccuucuguaggau

SEQ ID NO: 238215 - RNA, 19 nt, Artificial Sequence
  Description of Artificial Sequence: Synthetic oligonucleotide
  Antisense strand to SEQ ID NO: 238214
auccuacagaaggaauaaa

SEQ ID NO: 238216 - RNA, 19 nt, Artificial Sequence
  Description of Artificial Sequence: Synthetic oligonucleotide
  Sense strand starting at position 876 SEQ ID NO: 3067
uuauuccuucuguaggauu

SEQ ID NO: 238217 - RNA, 19 nt, Artificial Sequence
  Description of Artificial Sequence: Synthetic oligonucleotide
  Antisense strand to SEQ ID NO: 238216
aauccuacagaaggaauaa

SEQ ID NO: 238218 - RNA, 19 nt, Artificial Sequence
  Description of Artificial Sequence: Synthetic oligonucleotide
  Sense strand starting at position 936 SEQ ID NO: 3067
uugguuccuguacauuauu

SEQ ID NO: 238219 - RNA, 19 nt, Artificial Sequence
  Description of Artificial Sequence: Synthetic oligonucleotide
  Antisense strand to SEQ ID NO: 238218
aauaauguacaggaaccaa

SEQ ID NO: 238220 - RNA, 19 nt, Artificial Sequence
  Description of Artificial Sequence: Synthetic oligonucleotide
  Sense strand starting at position 1026 SEQ ID NO: 3067
cggccaaagcuagaagaua

SEQ ID NO: 238221 - RNA, 19 nt, Artificial Sequence
  Description of Artificial Sequence: Synthetic oligonucleotide
  Antisense strand to SEQ ID NO: 238220
uaucuucuagcuuuggccg

SEQ ID NO: 238222 - RNA, 19 nt, Artificial Sequence
  Description of Artificial Sequence: Synthetic oligonucleotide
  Sense strand starting at position 1124 SEQ ID NO: 3067
guccuuccuccaggaaaua

SEQ ID NO: 238223 - RNA, 19 nt, Artificial Sequence
  Description of Artificial Sequence: Synthetic oligonucleotide
  Antisense strand to SEQ ID NO: 238222
uauuuccuggaggaaggac

SEQ ID NO: 238224 - RNA, 19 nt, Artificial Sequence
  Description of Artificial Sequence: Synthetic oligonucleotide
  Sense strand starting at position 1226 SEQ ID NO: 3067
uugauauagauacgaguau

SEQ ID NO: 238225 - RNA, 19 nt, Artificial Sequence
  Description of Artificial Sequence: Synthetic oligonucleotide
  Antisense strand to SEQ ID NO: 238224
auacucguaucuauaucaa

SEQ ID NO: 238226 - RNA, 19 nt, Artificial Sequence
  Description of Artificial Sequence: Synthetic oligonucleotide
  Sense strand starting at position 1232 SEQ ID NO: 3067
uagauacgaguauggauaa

SEQ ID NO: 238227 - RNA, 19 nt, Artificial Sequence
  Description of Artificial Sequence: Synthetic oligonucleotide
  Antisense strand to SEQ ID NO: 238226
uuauccauacucguaucua

SEQ ID NO: 238228 - RNA, 19 nt, Artificial Sequence
  Description of Artificial Sequence: Synthetic oligonucleotide
  Sense strand starting at position 1243 SEQ ID NO: 3067
auggauaagacgugaguau

SEQ ID NO: 238229 - RNA, 19 nt, Artificial Sequence
  Description of Artificial Sequence: Synthetic oligonucleotide
  Antisense strand to SEQ ID NO: 238228
auacucacgucuuauccau

SEQ ID NO: 238230 - RNA, 19 nt, Artificial Sequence
  Description of Artificial Sequence: Synthetic oligonucleotide
  Sense strand starting at position 1244 SEQ ID NO: 3067
uggauaagacgugaguaua

SEQ ID NO: 238231 - RNA, 19 nt, Artificial Sequence
  Description of Artificial Sequence: Synthetic oligonucleotide
  Antisense strand to SEQ ID NO: 238230
uauacucacgucuuaucca

SEQ ID NO: 238232 - RNA, 19 nt, Artificial Sequence
  Description of Artificial Sequence: Synthetic oligonucleotide
  Sense strand starting at position 1255 SEQ ID NO: 3067
ugaguauaagcuggucaca

SEQ ID NO: 238233 - RNA, 19 nt, Artificial Sequence
  Description of Artificial Sequence: Synthetic oligonucleotide
  Antisense strand to SEQ ID NO: 238232
ugugaccagcuuauacuca

SEQ ID NO: 238234 - RNA, 19 nt, Artificial Sequence
  Description of Artificial Sequence: Synthetic oligonucleotide
  Sense strand starting at position 1257 SEQ ID NO: 3067
aguauaagcuggucacaau

SEQ ID NO: 238235 - RNA, 19 nt, Artificial Sequence
  Description of Artificial Sequence: Synthetic oligonucleotide
  Antisense strand to SEQ ID NO: 238234
auugugaccagcuuauacu

SEQ ID NO: 238236 - RNA, 19 nt, Artificial Sequence
  Description of Artificial Sequence: Synthetic oligonucleotide
  Sense strand starting at position 1471 SEQ ID NO: 3067
ggcuuagugacauauagac

SEQ ID NO: 238237 - RNA, 19 nt, Artificial Sequence
  Description of Artificial Sequence: Synthetic oligonucleotide
  Antisense strand to SEQ ID NO: 238236
gucuauaugucacuaagcc

SEQ ID NO: 238238 - RNA, 19 nt, Artificial Sequence
  Description of Artificial Sequence: Synthetic oligonucleotide
  Sense strand starting at position 1498 SEQ ID NO: 3067
agauauagcuaucuauuga

SEQ ID NO: 238239 - RNA, 19 nt, Artificial Sequence
  Description of Artificial Sequence: Synthetic oligonucleotide
  Antisense strand to SEQ ID NO: 238238
ucaauagauagcuauaucu

SEQ ID NO: 238240 - RNA, 19 nt, Artificial Sequence
  Description of Artificial Sequence: Synthetic oligonucleotide
  Sense strand starting at position 1549 SEQ ID NO: 3067
ucugaugucuuuccucaga

SEQ ID NO: 238241 - RNA, 19 nt, Artificial Sequence
  Description of Artificial Sequence: Synthetic oligonucleotide
  Antisense strand to SEQ ID NO: 238240
ucugaggaaagacaucaga

SEQ ID NO: 238242 - RNA, 19 nt, Artificial Sequence
  Description of Artificial Sequence: Synthetic oligonucleotide
  Sense strand starting at position 1551 SEQ ID NO: 3067
ugaugucuuuccucagauu

SEQ ID NO: 238243 - RNA, 19 nt, Artificial Sequence
  Description of Artificial Sequence: Synthetic oligonucleotide
  Antisense strand to SEQ ID NO: 238242
aaucugaggaaagacauca

SEQ ID NO: 238244 - RNA, 19 nt, Artificial Sequence
  Description of Artificial Sequence: Synthetic oligonucleotide
  Sense strand starting at position 1647 SEQ ID NO: 3067
augagacuuuauccaaagu

SEQ ID NO: 238245 - RNA, 19 nt, Artificial Sequence
  Description of Artificial Sequence: Synthetic oligonucleotide
  Antisense strand to SEQ ID NO: 238244
acuuuggauaaagucucau

SEQ ID NO: 238246 - RNA, 19 nt, Artificial Sequence
  Description of Artificial Sequence: Synthetic oligonucleotide
  Sense strand starting at position 1672 SEQ ID NO: 3067
gguaucauaugaguuuaca

SEQ ID NO: 238247 - RNA, 19 nt, Artificial Sequence
  Description of Artificial Sequence: Synthetic oligonucleotide
  Antisense strand to SEQ ID NO: 238246
uguaaacucauaugauacc

SEQ ID NO: 238248 - RNA, 19 nt, Artificial Sequence
  Description of Artificial Sequence: Synthetic oligonucleotide
  Sense strand starting at position 1680 SEQ ID NO: 3067
augaguuuacagggacuca

SEQ ID NO: 238249 - RNA, 19 nt, Artificial Sequence
  Description of Artificial Sequence: Synthetic oligonucleotide
  Antisense strand to SEQ ID NO: 238248
ugagucccuguaaacucau

SEQ ID NO: 238250 - RNA, 19 nt, Artificial Sequence
  Description of Artificial Sequence: Synthetic oligonucleotide
  Sense strand starting at position 2135 SEQ ID NO: 3067
cugugacucugagugaaau

SEQ ID NO: 238251 - RNA, 19 nt, Artificial Sequence
  Description of Artificial Sequence: Synthetic oligonucleotide
  Antisense strand to SEQ ID NO: 238250
auuucacucagagucacag

SEQ ID NO: 238252 - RNA, 19 nt, Artificial Sequence
  Description of Artificial Sequence: Synthetic oligonucleotide
  Sense strand starting at position 2136 SEQ ID NO: 3067
ugugacucugagugaaaug

SEQ ID NO: 238253 - RNA, 19 nt, Artificial Sequence
  Description of Artificial Sequence: Synthetic oligonucleotide
  Antisense strand to SEQ ID NO: 238252
cauuucacucagagucaca

SEQ ID NO: 238254 - RNA, 19 nt, Artificial Sequence
  Description of Artificial Sequence: Synthetic oligonucleotide
  Sense strand starting at position 2285 SEQ ID NO: 3067
gcaacaugucuauaagcca

SEQ ID NO: 238255 - RNA, 19 nt, Artificial Sequence
  Description of Artificial Sequence: Synthetic oligonucleotide
  Antisense strand to SEQ ID NO: 238254
uggcuuauagacauguugc

SEQ ID NO: 238256 - RNA, 19 nt, Artificial Sequence
  Description of Artificial Sequence: Synthetic oligonucleotide
  Sense strand starting at position 2307 SEQ ID NO: 3067
ucagucauguucccaagga

SEQ ID NO: 238257 - RNA, 19 nt, Artificial Sequence
  Description of Artificial Sequence: Synthetic oligonucleotide
  Antisense strand to SEQ ID NO: 238256
uccuugggaacaugacuga

SEQ ID NO: 238258 - RNA, 19 nt, Artificial Sequence
  Description of Artificial Sequence: Synthetic oligonucleotide
  Sense strand starting at position 2330 SEQ ID NO: 3067
ggaaaucuggauuguucug

SEQ ID NO: 238259 - RNA, 19 nt, Artificial Sequence
  Description of Artificial Sequence: Synthetic oligonucleotide
  Antisense strand to SEQ ID NO: 238258
cagaacaauccagauuucc

SEQ ID NO: 238260 - RNA, 19 nt, Artificial Sequence
  Description of Artificial Sequence: Synthetic oligonucleotide
  Sense strand starting at position 2332 SEQ ID NO: 3067
aaaucuggauuguucugaa

SEQ ID NO: 238261 - RNA, 19 nt, Artificial Sequence
  Description of Artificial Sequence: Synthetic oligonucleotide
  Antisense strand to SEQ ID NO: 238260
uucagaacaauccagauuu

SEQ ID NO: 238262 - RNA, 19 nt, Artificial Sequence
  Description of Artificial Sequence: Synthetic oligonucleotide
  Sense strand starting at position 3032 SEQ ID NO: 3067
uuaaguuuggccuaagaag

SEQ ID NO: 238263 - RNA, 19 nt, Artificial Sequence
  Description of Artificial Sequence: Synthetic oligonucleotide
  Antisense strand to SEQ ID NO: 238262
cuucuuaggccaaacuuaa

SEQ ID NO: 238264 - RNA, 19 nt, Artificial Sequence
  Description of Artificial Sequence: Synthetic oligonucleotide
  Sense strand starting at position 3066 SEQ ID NO: 3067
aaaggaaguuucuucuagu

SEQ ID NO: 238265 - RNA, 19 nt, Artificial Sequence
  Description of Artificial Sequence: Synthetic oligonucleotide
  Antisense strand to SEQ ID NO: 238264
acuagaagaaacuuccuuu

SEQ ID NO: 238266 - RNA, 19 nt, Artificial Sequence
  Description of Artificial Sequence: Synthetic oligonucleotide
  Sense strand starting at position 3067 SEQ ID NO: 3067
aaggaaguuucuucuaguu

SEQ ID NO: 238267 - RNA, 19 nt, Artificial Sequence
  Description of Artificial Sequence: Synthetic oligonucleotide
  Antisense strand to SEQ ID NO: 238266
aacuagaagaaacuuccuu

SEQ ID NO: 238268 - RNA, 19 nt, Artificial Sequence
  Description of Artificial Sequence: Synthetic oligonucleotide
  Sense strand starting at position 3642 SEQ ID NO: 3067
ggcagaauuguuugugaua

SEQ ID NO: 238269 - RNA, 19 nt, Artificial Sequence
  Description of Artificial Sequence: Synthetic oligonucleotide
  Antisense strand to SEQ ID NO: 238268
uaucacaaacaauucugcc

SEQ ID NO: 238270 - RNA, 19 nt, Artificial Sequence
  Description of Artificial Sequence: Synthetic oligonucleotide
  Sense strand starting at position 3657 SEQ ID NO: 3067
gauagcaaaugaguugauu

SEQ ID NO: 238271 - RNA, 19 nt, Artificial Sequence
  Description of Artificial Sequence: Synthetic oligonucleotide
  Antisense strand to SEQ ID NO: 238270
aaucaacucauuugcuauc

SEQ ID NO: 238272 - RNA, 19 nt, Artificial Sequence
  Description of Artificial Sequence: Synthetic oligonucleotide
  Sense strand starting at position 3711 SEQ ID NO: 3067
auauaaaucuugggauuuc

SEQ ID NO: 238273 - RNA, 19 nt, Artificial Sequence
  Description of Artificial Sequence: Synthetic oligonucleotide
  Antisense strand to SEQ ID NO: 238272
gaaaucccaagauuuauau

SEQ ID NO: 238274 - RNA, 19 nt, Artificial Sequence
  Description of Artificial Sequence: Synthetic oligonucleotide
  Sense strand starting at position 3891 SEQ ID NO: 3067
cuagaauauuucuggaaga

SEQ ID NO: 238275 - RNA, 19 nt, Artificial Sequence
  Description of Artificial Sequence: Synthetic oligonucleotide
  Antisense strand to SEQ ID NO: 238274
ucuuccagaaauauucuag

SEQ ID NO: 238276 - RNA, 19 nt, Artificial Sequence
  Description of Artificial Sequence: Synthetic oligonucleotide
  Sense strand starting at position 3915 SEQ ID NO: 3067
ucagaaauuugacaauagu

SEQ ID NO: 238277 - RNA, 19 nt, Artificial Sequence
  Description of Artificial Sequence: Synthetic oligonucleotide
  Antisense strand to SEQ ID NO: 238276
acuauugucaaauuucuga

SEQ ID NO: 238278 - RNA, 19 nt, Artificial Sequence
  Description of Artificial Sequence: Synthetic oligonucleotide
  Sense strand starting at position 3971 SEQ ID NO: 3067
gucugugugcuguuucaua

SEQ ID NO: 238279 - RNA, 19 nt, Artificial Sequence
  Description of Artificial Sequence: Synthetic oligonucleotide
  Antisense strand to SEQ ID NO: 238278
uaugaaacagcacacagac

SEQ ID NO: 238280 - RNA, 19 nt, Artificial Sequence
  Description of Artificial Sequence: Synthetic oligonucleotide
  Sense strand starting at position 217 SEQ ID NO: 3068
aggccucuccgcuagagaa

SEQ ID NO: 238281 - RNA, 19 nt, Artificial Sequence
  Description of Artificial Sequence: Synthetic oligonucleotide
  Antisense strand to SEQ ID NO: 238280
uucucuagcggagaggccu

SEQ ID NO: 238282 - RNA, 19 nt, Artificial Sequence
  Description of Artificial Sequence: Synthetic oligonucleotide
  Sense strand starting at position 450 SEQ ID NO: 3068
ugacucugucccuggaaca

SEQ ID NO: 238283 - RNA, 19 nt, Artificial Sequence
  Description of Artificial Sequence: Synthetic oligonucleotide
  Antisense strand to SEQ ID NO: 238282
uguuccagggacagaguca

SEQ ID NO: 238284 - RNA, 19 nt, Artificial Sequence
  Description of Artificial Sequence: Synthetic oligonucleotide
  Sense strand starting at position 573 SEQ ID NO: 3068
aggagucaaguguacacau

SEQ ID NO: 238285 - RNA, 19 nt, Artificial Sequence
  Description of Artificial Sequence: Synthetic oligonucleotide
  Antisense strand to SEQ ID NO: 238284
auguguacacuugacuccu

SEQ ID NO: 238286 - RNA, 19 nt, Artificial Sequence
  Description of Artificial Sequence: Synthetic oligonucleotide
  Sense strand starting at position 684 SEQ ID NO: 3068
cugggaagucaacaugcuu

SEQ ID NO: 238287 - RNA, 19 nt, Artificial Sequence
  Description of Artificial Sequence: Synthetic oligonucleotide
  Antisense strand to SEQ ID NO: 238286
aagcauguugacuucccag

SEQ ID NO: 238288 - RNA, 19 nt, Artificial Sequence
  Description of Artificial Sequence: Synthetic oligonucleotide
  Sense strand starting at position 704 SEQ ID NO: 3068
guuuaauuccuuccugcgu

SEQ ID NO: 238289 - RNA, 19 nt, Artificial Sequence
  Description of Artificial Sequence: Synthetic oligonucleotide
  Antisense strand to SEQ ID NO: 238288
acgcaggaaggaauuaaac

SEQ ID NO: 238290 - RNA, 19 nt, Artificial Sequence
  Description of Artificial Sequence: Synthetic oligonucleotide
  Sense strand starting at position 735 SEQ ID NO: 3068
gggccucuaggcuaauuga

SEQ ID NO: 238291 - RNA, 19 nt, Artificial Sequence
  Description of Artificial Sequence: Synthetic oligonucleotide
  Antisense strand to SEQ ID NO: 238290
ucaauuagccuagaggccc

SEQ ID NO: 238292 - RNA, 19 nt, Artificial Sequence
  Description of Artificial Sequence: Synthetic oligonucleotide
  Sense strand starting at position 738 SEQ ID NO: 3068
ccucuaggcuaauugaaau

SEQ ID NO: 238293 - RNA, 19 nt, Artificial Sequence
  Description of Artificial Sequence: Synthetic oligonucleotide
  Antisense strand to SEQ ID NO: 238292
auuucaauuagccuagagg

SEQ ID NO: 238294 - RNA, 19 nt, Artificial Sequence
  Description of Artificial Sequence: Synthetic oligonucleotide
  Sense strand starting at position 822 SEQ ID NO: 3068
uuuauuccuucuguaggau

SEQ ID NO: 238295 - RNA, 19 nt, Artificial Sequence
  Description of Artificial Sequence: Synthetic oligonucleotide
  Antisense strand to SEQ ID NO: 238294
auccuacagaaggaauaaa

SEQ ID NO: 238296 - RNA, 19 nt, Artificial Sequence
  Description of Artificial Sequence: Synthetic oligonucleotide
  Sense strand starting at position 823 SEQ ID NO: 3068
uuauuccuucuguaggauu

SEQ ID NO: 238297 - RNA, 19 nt, Artificial Sequence
  Description of Artificial Sequence: Synthetic oligonucleotide
  Antisense strand to SEQ ID NO: 238296
aauccuacagaaggaauaa

SEQ ID NO: 238298 - RNA, 19 nt, Artificial Sequence
  Description of Artificial Sequence: Synthetic oligonucleotide
  Sense strand starting at position 883 SEQ ID NO: 3068
uugguuccuguacauuauu

SEQ ID NO: 238299 - RNA, 19 nt, Artificial Sequence
  Description of Artificial Sequence: Synthetic oligonucleotide
  Antisense strand to SEQ ID NO: 238298
aauaauguacaggaaccaa

SEQ ID NO: 238300 - RNA, 19 nt, Artificial Sequence
  Description of Artificial Sequence: Synthetic oligonucleotide
  Sense strand starting at position 973 SEQ ID NO: 3068
cggccaaagcuagaagaua

SEQ ID NO: 238301 - RNA, 19 nt, Artificial Sequence
  Description of Artificial Sequence: Synthetic oligonucleotide
  Antisense strand to SEQ ID NO: 238300
uaucuucuagcuuuggccg

SEQ ID NO: 238302 - RNA, 19 nt, Artificial Sequence
  Description of Artificial Sequence: Synthetic oligonucleotide
  Sense strand starting at position 1071 SEQ ID NO: 3068
guccuuccuccaggaaaua

SEQ ID NO: 238303 - RNA, 19 nt, Artificial Sequence
  Description of Artificial Sequence: Synthetic oligonucleotide
  Antisense strand to SEQ ID NO: 238302
uauuuccuggaggaaggac

SEQ ID NO: 238304 - RNA, 19 nt, Artificial Sequence
  Description of Artificial Sequence: Synthetic oligonucleotide
  Sense strand starting at position 1173 SEQ ID NO: 3068
uugauauagauacgaguau

SEQ ID NO: 238305 - RNA, 19 nt, Artificial Sequence
  Description of Artificial Sequence: Synthetic oligonucleotide
  Antisense strand to SEQ ID NO: 238304
auacucguaucuauaucaa

SEQ ID NO: 238306 - RNA, 19 nt, Artificial Sequence
  Description of Artificial Sequence: Synthetic oligonucleotide
  Sense strand starting at position 1179 SEQ ID NO: 3068
uagauacgaguauggauaa

SEQ ID NO: 238307 - RNA, 19 nt, Artificial Sequence
  Description of Artificial Sequence: Synthetic oligonucleotide
  Antisense strand to SEQ ID NO: 238306
uuauccauacucguaucua

SEQ ID NO: 238308 - RNA, 19 nt, Artificial Sequence
  Description of Artificial Sequence: Synthetic oligonucleotide
  Sense strand starting at position 1190 SEQ ID NO: 3068
auggauaagacgugaguau

SEQ ID NO: 238309 - RNA, 19 nt, Artificial Sequence
  Description of Artificial Sequence: Synthetic oligonucleotide
  Antisense strand to SEQ ID NO: 238308
auacucacgucuuauccau

SEQ ID NO: 238310 - RNA, 19 nt, Artificial Sequence
  Description of Artificial Sequence: Synthetic oligonucleotide
  Sense strand starting at position 1191 SEQ ID NO: 3068
uggauaagacgugaguaua

SEQ ID NO: 238311 - RNA, 19 nt, Artificial Sequence
  Description of Artificial Sequence: Synthetic oligonucleotide
  Antisense strand to SEQ ID NO: 238310
uauacucacgucuuaucca

SEQ ID NO: 238312 - RNA, 19 nt, Artificial Sequence
  Description of Artificial Sequence: Synthetic oligonucleotide
  Sense strand starting at position 1202 SEQ ID NO: 3068
ugaguauaagcuggucaca

SEQ ID NO: 238313 - RNA, 19 nt, Artificial Sequence
  Description of Artificial Sequence: Synthetic oligonucleotide
  Antisense strand to SEQ ID NO: 238312
ugugaccagcuuauacuca

SEQ ID NO: 238314 - RNA, 19 nt, Artificial Sequence
  Description of Artificial Sequence: Synthetic oligonucleotide
  Sense strand starting at position 1204 SEQ ID NO: 3068
aguauaagcuggucacaau

SEQ ID NO: 238315 - RNA, 19 nt, Artificial Sequence
  Description of Artificial Sequence: Synthetic oligonucleotide
  Antisense strand to SEQ ID NO: 238314
auugugaccagcuuauacu

SEQ ID NO: 238316 - RNA, 19 nt, Artificial Sequence
  Description of Artificial Sequence: Synthetic oligonucleotide
  Sense strand starting at position 1418 SEQ ID NO: 3068
ggcuuagugacauauagac

SEQ ID NO: 238317 - RNA, 19 nt, Artificial Sequence
  Description of Artificial Sequence: Synthetic oligonucleotide
  Antisense strand to SEQ ID NO: 238316
gucuauaugucacuaagcc

SEQ ID NO: 238318 - RNA, 19 nt, Artificial Sequence
  Description of Artificial Sequence: Synthetic oligonucleotide
  Sense strand starting at position 1445 SEQ ID NO: 3068
agauauagcuaucuauuga

SEQ ID NO: 238319 - RNA, 19 nt, Artificial Sequence
  Description of Artificial Sequence: Synthetic oligonucleotide
  Antisense strand to SEQ ID NO: 238318
ucaauagauagcuauaucu

SEQ ID NO: 238320 - RNA, 19 nt, Artificial Sequence
  Description of Artificial Sequence: Synthetic oligonucleotide
  Sense strand starting at position 1496 SEQ ID NO: 3068
ucugaugucuuuccucaga

SEQ ID NO: 238321 - RNA, 19 nt, Artificial Sequence
  Description of Artificial Sequence: Synthetic oligonucleotide
  Antisense strand to SEQ ID NO: 238320
ucugaggaaagacaucaga

SEQ ID NO: 238322 - RNA, 19 nt, Artificial Sequence
  Description of Artificial Sequence: Synthetic oligonucleotide
  Sense strand starting at position 1498 SEQ ID NO: 3068
ugaugucuuuccucagauu

SEQ ID NO: 238323 - RNA, 19 nt, Artificial Sequence
  Description of Artificial Sequence: Synthetic oligonucleotide
  Antisense strand to SEQ ID NO: 238322
aaucugaggaaagacauca

SEQ ID NO: 238324 - RNA, 19 nt, Artificial Sequence
  Description of Artificial Sequence: Synthetic oligonucleotide
  Sense strand starting at position 1594 SEQ ID NO: 3068
augagacuuuauccaaagu

SEQ ID NO: 238325 - RNA, 19 nt, Artificial Sequence
  Description of Artificial Sequence: Synthetic oligonucleotide
  Antisense strand to SEQ ID NO: 238324
acuuuggauaaagucucau

SEQ ID NO: 238326 - RNA, 19 nt, Artificial Sequence
  Description of Artificial Sequence: Synthetic oligonucleotide
  Sense strand starting at position 1619 SEQ ID NO: 3068
gguaucauaugaguuuaca

SEQ ID NO: 238327 - RNA, 19 nt, Artificial Sequence
  Description of Artificial Sequence: Synthetic oligonucleotide
  Antisense strand to SEQ ID NO: 238326
uguaaacucauaugauacc

SEQ ID NO: 238328 - RNA, 19 nt, Artificial Sequence
  Description of Artificial Sequence: Synthetic oligonucleotide
  Sense strand starting at position 1627 SEQ ID NO: 3068
augaguuuacagggacuca

SEQ ID NO: 238329 - RNA, 19 nt, Artificial Sequence
  Description of Artificial Sequence: Synthetic oligonucleotide
  Antisense strand to SEQ ID NO: 238328
ugagucccuguaaacucau

SEQ ID NO: 238330 - RNA, 19 nt, Artificial Sequence
  Description of Artificial Sequence: Synthetic oligonucleotide
  Sense strand starting at position 2082 SEQ ID NO: 3068
cugugacucugagugaaau

SEQ ID NO: 238331 - RNA, 19 nt, Artificial Sequence
  Description of Artificial Sequence: Synthetic oligonucleotide
  Antisense strand to SEQ ID NO: 238330
auuucacucagagucacag

SEQ ID NO: 238332 - RNA, 19 nt, Artificial Sequence
  Description of Artificial Sequence: Synthetic oligonucleotide
  Sense strand starting at position 2083 SEQ ID NO: 3068
ugugacucugagugaaaug

SEQ ID NO: 238333 - RNA, 19 nt, Artificial Sequence
  Description of Artificial Sequence: Synthetic oligonucleotide
  Antisense strand to SEQ ID NO: 238332
cauuucacucagagucaca

SEQ ID NO: 238334 - RNA, 19 nt, Artificial Sequence
  Description of Artificial Sequence: Synthetic oligonucleotide
  Sense strand starting at position 2232 SEQ ID NO: 3068
gcaacaugucuauaagcca

SEQ ID NO: 238335 - RNA, 19 nt, Artificial Sequence
  Description of Artificial Sequence: Synthetic oligonucleotide
  Antisense strand to SEQ ID NO: 238334
uggcuuauagacauguugc

SEQ ID NO: 238336 - RNA, 19 nt, Artificial Sequence
  Description of Artificial Sequence: Synthetic oligonucleotide
  Sense strand starting at position 2254 SEQ ID NO: 3068
ucagucauguucccaagga

SEQ ID NO: 238337 - RNA, 19 nt, Artificial Sequence
  Description of Artificial Sequence: Synthetic oligonucleotide
  Antisense strand to SEQ ID NO: 238336
uccuugggaacaugacuga

SEQ ID NO: 238338 - RNA, 19 nt, Artificial Sequence
  Description of Artificial Sequence: Synthetic oligonucleotide
  Sense strand starting at position 2277 SEQ ID NO: 3068
ggaaaucuggauuguucug

SEQ ID NO: 238339 - RNA, 19 nt, Artificial Sequence
  Description of Artificial Sequence: Synthetic oligonucleotide
  Antisense strand to SEQ ID NO: 238338
cagaacaauccagauuucc

SEQ ID NO: 238340 - RNA, 19 nt, Artificial Sequence
  Description of Artificial Sequence: Synthetic oligonucleotide
  Sense strand starting at position 2279 SEQ ID NO: 3068
aaaucuggauuguucugaa

SEQ ID NO: 238341 - RNA, 19 nt, Artificial Sequence
  Description of Artificial Sequence: Synthetic oligonucleotide
  Antisense strand to SEQ ID NO: 238340
uucagaacaauccagauuu

SEQ ID NO: 238342 - RNA, 19 nt, Artificial Sequence
  Description of Artificial Sequence: Synthetic oligonucleotide
  Sense strand starting at position 2979 SEQ ID NO: 3068
uuaaguuuggccuaagaag

SEQ ID NO: 238343 - RNA, 19 nt, Artificial Sequence
  Description of Artificial Sequence: Synthetic oligonucleotide
  Antisense strand to SEQ ID NO: 238342
cuucuuaggccaaacuuaa

SEQ ID NO: 238344 - RNA, 19 nt, Artificial Sequence
  Description of Artificial Sequence: Synthetic oligonucleotide
  Sense strand starting at position 3013 SEQ ID NO: 3068
aaaggaaguuucuucuagu

SEQ ID NO: 238345 - RNA, 19 nt, Artificial Sequence
  Description of Artificial Sequence: Synthetic oligonucleotide
  Antisense strand to SEQ ID NO: 238344
acuagaagaaacuuccuuu

SEQ ID NO: 238346 - RNA, 19 nt, Artificial Sequence
  Description of Artificial Sequence: Synthetic oligonucleotide
  Sense strand starting at position 3014 SEQ ID NO: 3068
aaggaaguuucuucuaguu

SEQ ID NO: 238347 - RNA, 19 nt, Artificial Sequence
  Description of Artificial Sequence: Synthetic oligonucleotide
  Antisense strand to SEQ ID NO: 238346
aacuagaagaaacuuccuu

SEQ ID NO: 238348 - RNA, 19 nt, Artificial Sequence
  Description of Artificial Sequence: Synthetic oligonucleotide
  Sense strand starting at position 3589 SEQ ID NO: 3068
ggcagaauuguuugugaua

SEQ ID NO: 238349 - RNA, 19 nt, Artificial Sequence
  Description of Artificial Sequence: Synthetic oligonucleotide
  Antisense strand to SEQ ID NO: 238348
uaucacaaacaauucugcc

SEQ ID NO: 238350 - RNA, 19 nt, Artificial Sequence
  Description of Artificial Sequence: Synthetic oligonucleotide
  Sense strand starting at position 3604 SEQ ID NO: 3068
gauagcaaaugaguugauu

SEQ ID NO: 238351 - RNA, 19 nt, Artificial Sequence
  Description of Artificial Sequence: Synthetic oligonucleotide
  Antisense strand to SEQ ID NO: 238350
aaucaacucauuugcuauc

SEQ ID NO: 238352 - RNA, 19 nt, Artificial Sequence
  Description of Artificial Sequence: Synthetic oligonucleotide
  Sense strand starting at position 3658 SEQ ID NO: 3068
auauaaaucuugggauuuc

SEQ ID NO: 238353 - RNA, 19 nt, Artificial Sequence
  Description of Artificial Sequence: Synthetic oligonucleotide
  Antisense strand to SEQ ID NO: 238352
gaaaucccaagauuuauau

SEQ ID NO: 238354 - RNA, 19 nt, Artificial Sequence
  Description of Artificial Sequence: Synthetic oligonucleotide
  Sense strand starting at position 3838 SEQ ID NO: 3068
cuagaauauuucuggaaga

SEQ ID NO: 238355 - RNA, 19 nt, Artificial Sequence
  Description of Artificial Sequence: Synthetic oligonucleotide
  Antisense strand to SEQ ID NO: 238354
ucuuccagaaauauucuag

SEQ ID NO: 238356 - RNA, 19 nt, Artificial Sequence
  Description of Artificial Sequence: Synthetic oligonucleotide
  Sense strand starting at position 3862 SEQ ID NO: 3068
ucagaaauuugacaauagu

SEQ ID NO: 238357 - RNA, 19 nt, Artificial Sequence
  Description of Artificial Sequence: Synthetic oligonucleotide
  Antisense strand to SEQ ID NO: 238356
acuauugucaaauuucuga

SEQ ID NO: 238358 - RNA, 19 nt, Artificial Sequence
  Description of Artificial Sequence: Synthetic oligonucleotide
  Sense strand starting at position 3918 SEQ ID NO: 3068
gucugugugcuguuucaua

SEQ ID NO: 238359 - RNA, 19 nt, Artificial Sequence
  Description of Artificial Sequence: Synthetic oligonucleotide
  Antisense strand to SEQ ID NO: 238358
uaugaaacagcacacagac

SEQ ID NO: 238360 - RNA, 19 nt, Artificial Sequence
  Description of Artificial Sequence: Synthetic oligonucleotide
  Sense strand starting at position 18 SEQ ID NO: 3069
gggagaagcuuauuaucua

SEQ ID NO: 238361 - RNA, 19 nt, Artificial Sequence
  Description of Artificial Sequence: Synthetic oligonucleotide
  Antisense strand to SEQ ID NO: 238360
uagauaauaagcuucuccc

SEQ ID NO: 238362 - RNA, 19 nt, Artificial Sequence
  Description of Artificial Sequence: Synthetic oligonucleotide
  Sense strand starting at position 92 SEQ ID NO: 3069
ggagauuagacauguagua

SEQ ID NO: 238363 - RNA, 19 nt, Artificial Sequence
  Description of Artificial Sequence: Synthetic oligonucleotide
  Antisense strand to SEQ ID NO: 238362
uacuacaugucuaaucucc

SEQ ID NO: 238364 - RNA, 19 nt, Artificial Sequence
  Description of Artificial Sequence: Synthetic oligonucleotide
  Sense strand starting at position 148 SEQ ID NO: 3069
auaguuguuaaacgaauga

SEQ ID NO: 238365 - RNA, 19 nt, Artificial Sequence
  Description of Artificial Sequence: Synthetic oligonucleotide
  Antisense strand to SEQ ID NO: 238364
ucauucguuuaacaacuau

SEQ ID NO: 238366 - RNA, 19 nt, Artificial Sequence
  Description of Artificial Sequence: Synthetic oligonucleotide
  Sense strand starting at position 217 SEQ ID NO: 3069
cugaaaggcucccugaagu

SEQ ID NO: 238367 - RNA, 19 nt, Artificial Sequence
  Description of Artificial Sequence: Synthetic oligonucleotide
  Antisense strand to SEQ ID NO: 238366
acuucagggagccuuucag

SEQ ID NO: 238368 - RNA, 19 nt, Artificial Sequence
  Description of Artificial Sequence: Synthetic oligonucleotide
  Sense strand starting at position 236 SEQ ID NO: 3069
agugguuucccauaacaca

SEQ ID NO: 238369 - RNA, 19 nt, Artificial Sequence
  Description of Artificial Sequence: Synthetic oligonucleotide
  Antisense strand to SEQ ID NO: 238368
uguguuaugggaaaccacu

SEQ ID NO: 238370 - RNA, 19 nt, Artificial Sequence
  Description of Artificial Sequence: Synthetic oligonucleotide
  Sense strand starting at position 368 SEQ ID NO: 3069
guugauaauguaugugaag

SEQ ID NO: 238371 - RNA, 19 nt, Artificial Sequence
  Description of Artificial Sequence: Synthetic oligonucleotide
  Antisense strand to SEQ ID NO: 238370
cuucacauacauuaucaac

SEQ ID NO: 238372 - RNA, 19 nt, Artificial Sequence
  Description of Artificial Sequence: Synthetic oligonucleotide
  Sense strand starting at position 369 SEQ ID NO: 3069
uugauaauguaugugaagu

SEQ ID NO: 238373 - RNA, 19 nt, Artificial Sequence
  Description of Artificial Sequence: Synthetic oligonucleotide
  Antisense strand to SEQ ID NO: 238372
acuucacauacauuaucaa

SEQ ID NO: 238374 - RNA, 19 nt, Artificial Sequence
  Description of Artificial Sequence: Synthetic oligonucleotide
  Sense strand starting at position 441 SEQ ID NO: 3069
aguagauacucacuagcca

SEQ ID NO: 238375 - RNA, 19 nt, Artificial Sequence
  Description of Artificial Sequence: Synthetic oligonucleotide
  Antisense strand to SEQ ID NO: 238374
uggcuagugaguaucuacu

SEQ ID NO: 238376 - RNA, 19 nt, Artificial Sequence
  Description of Artificial Sequence: Synthetic oligonucleotide
  Sense strand starting at position 442 SEQ ID NO: 3069
guagauacucacuagccau

SEQ ID NO: 238377 - RNA, 19 nt, Artificial Sequence
  Description of Artificial Sequence: Synthetic oligonucleotide
  Antisense strand to SEQ ID NO: 238376
auggcuagugaguaucuac

SEQ ID NO: 238378 - RNA, 19 nt, Artificial Sequence
  Description of Artificial Sequence: Synthetic oligonucleotide
  Sense strand starting at position 498 SEQ ID NO: 3069
uuaacugggcuccaguuau

SEQ ID NO: 238379 - RNA, 19 nt, Artificial Sequence
  Description of Artificial Sequence: Synthetic oligonucleotide
  Antisense strand to SEQ ID NO: 238378
auaacuggagcccaguuaa

SEQ ID NO: 238380 - RNA, 19 nt, Artificial Sequence
  Description of Artificial Sequence: Synthetic oligonucleotide
  Sense strand starting at position 606 SEQ ID NO: 3069
uuuggaacgguuugauaga

SEQ ID NO: 238381 - RNA, 19 nt, Artificial Sequence
  Description of Artificial Sequence: Synthetic oligonucleotide
  Antisense strand to SEQ ID NO: 238380
ucuaucaaaccguuccaaa

SEQ ID NO: 238382 - RNA, 19 nt, Artificial Sequence
  Description of Artificial Sequence: Synthetic oligonucleotide
  Sense strand starting at position 2034 SEQ ID NO: 3069
gcgggcuuucgagcacaua

SEQ ID NO: 238383 - RNA, 19 nt, Artificial Sequence
  Description of Artificial Sequence: Synthetic oligonucleotide
  Antisense strand to SEQ ID NO: 238382
uaugugcucgaaagcccgc

SEQ ID NO: 238384 - RNA, 19 nt, Artificial Sequence
  Description of Artificial Sequence: Synthetic oligonucleotide
  Sense strand starting at position 2037 SEQ ID NO: 3069
ggcuuucgagcacauacaa

SEQ ID NO: 238385 - RNA, 19 nt, Artificial Sequence
  Description of Artificial Sequence: Synthetic oligonucleotide
  Antisense strand to SEQ ID NO: 238384
uuguaugugcucgaaagcc

SEQ ID NO: 238386 - RNA, 19 nt, Artificial Sequence
  Description of Artificial Sequence: Synthetic oligonucleotide
  Sense strand starting at position 2128 SEQ ID NO: 3069
uguguaugaaacugaaagu

SEQ ID NO: 238387 - RNA, 19 nt, Artificial Sequence
  Description of Artificial Sequence: Synthetic oligonucleotide
  Antisense strand to SEQ ID NO: 238386
acuuucaguuucauacaca

SEQ ID NO: 238388 - RNA, 19 nt, Artificial Sequence
  Description of Artificial Sequence: Synthetic oligonucleotide
  Sense strand starting at position 2299 SEQ ID NO: 3069
ucgaccaagccugaaauau

SEQ ID NO: 238389 - RNA, 19 nt, Artificial Sequence
  Description of Artificial Sequence: Synthetic oligonucleotide
  Antisense strand to SEQ ID NO: 238388
auauuucaggcuuggucga

SEQ ID NO: 238390 - RNA, 19 nt, Artificial Sequence
  Description of Artificial Sequence: Synthetic oligonucleotide
  Sense strand starting at position 2308 SEQ ID NO: 3069
ccugaaauaugggcuuuaa

SEQ ID NO: 238391 - RNA, 19 nt, Artificial Sequence
  Description of Artificial Sequence: Synthetic oligonucleotide
  Antisense strand to SEQ ID NO: 238390
uuaaagcccauauuucagg

SEQ ID NO: 238392 - RNA, 19 nt, Artificial Sequence
  Description of Artificial Sequence: Synthetic oligonucleotide
  Sense strand starting at position 2417 SEQ ID NO: 3069
cuuaaaugugcgcucuguu

SEQ ID NO: 238393 - RNA, 19 nt, Artificial Sequence
  Description of Artificial Sequence: Synthetic oligonucleotide
  Antisense strand to SEQ ID NO: 238392
aacagagcgcacauuuaag

SEQ ID NO: 238394 - RNA, 19 nt, Artificial Sequence
  Description of Artificial Sequence: Synthetic oligonucleotide
  Sense strand starting at position 2427 SEQ ID NO: 3069
cgcucuguucguuuaugga

SEQ ID NO: 238395 - RNA, 19 nt, Artificial Sequence
  Description of Artificial Sequence: Synthetic oligonucleotide
  Antisense strand to SEQ ID NO: 238394
uccauaaacgaacagagcg

SEQ ID NO: 238396 - RNA, 19 nt, Artificial Sequence
  Description of Artificial Sequence: Synthetic oligonucleotide
  Sense strand starting at position 2459 SEQ ID NO: 3069
cgugucucgccauuagaau

SEQ ID NO: 238397 - RNA, 19 nt, Artificial Sequence
  Description of Artificial Sequence: Synthetic oligonucleotide
  Antisense strand to SEQ ID NO: 238396
auucuaauggcgagacacg

SEQ ID NO: 238398 - RNA, 19 nt, Artificial Sequence
  Description of Artificial Sequence: Synthetic oligonucleotide
  Sense strand starting at position 2465 SEQ ID NO: 3069
ucgccauuagaauauaaug

SEQ ID NO: 238399 - RNA, 19 nt, Artificial Sequence
  Description of Artificial Sequence: Synthetic oligonucleotide
  Antisense strand to SEQ ID NO: 238398
cauuauauucuaauggcga

SEQ ID NO: 238400 - RNA, 19 nt, Artificial Sequence
  Description of Artificial Sequence: Synthetic oligonucleotide
  Sense strand starting at position 2481 SEQ ID NO: 3069
augcccaacucauuagagu

SEQ ID NO: 238401 - RNA, 19 nt, Artificial Sequence
  Description of Artificial Sequence: Synthetic oligonucleotide
  Antisense strand to SEQ ID NO: 238400
acucuaaugaguugggcau

SEQ ID NO: 238402 - RNA, 19 nt, Artificial Sequence
  Description of Artificial Sequence: Synthetic oligonucleotide
  Sense strand starting at position 2482 SEQ ID NO: 3069
ugcccaacucauuagaguu

SEQ ID NO: 238403 - RNA, 19 nt, Artificial Sequence
  Description of Artificial Sequence: Synthetic oligonucleotide
  Antisense strand to SEQ ID NO: 238402
aacucuaaugaguugggca

SEQ ID NO: 238404 - RNA, 19 nt, Artificial Sequence
  Description of Artificial Sequence: Synthetic oligonucleotide
  Sense strand starting at position 2602 SEQ ID NO: 3069
uuuguuuaacucgaguuaa

SEQ ID NO: 238405 - RNA, 19 nt, Artificial Sequence
  Description of Artificial Sequence: Synthetic oligonucleotide
  Antisense strand to SEQ ID NO: 238404
uuaacucgaguuaaacaaa

SEQ ID NO: 238406 - RNA, 19 nt, Artificial Sequence
  Description of Artificial Sequence: Synthetic oligonucleotide
  Sense strand starting at position 2630 SEQ ID NO: 3069
aagcaaggguccuuagaag

SEQ ID NO: 238407 - RNA, 19 nt, Artificial Sequence
  Description of Artificial Sequence: Synthetic oligonucleotide
  Antisense strand to SEQ ID NO: 238406
cuucuaaggacccuugcuu

SEQ ID NO: 238408 - RNA, 19 nt, Artificial Sequence
  Description of Artificial Sequence: Synthetic oligonucleotide
  Sense strand starting at position 2707 SEQ ID NO: 3069
ggugaugacuugucuuaac

SEQ ID NO: 238409 - RNA, 19 nt, Artificial Sequence
  Description of Artificial Sequence: Synthetic oligonucleotide
  Antisense strand to SEQ ID NO: 238408
guuaagacaagucaucacc

SEQ ID NO: 238410 - RNA, 19 nt, Artificial Sequence
  Description of Artificial Sequence: Synthetic oligonucleotide
  Sense strand starting at position 2799 SEQ ID NO: 3069
gcuguuaacccagauaccu

SEQ ID NO: 238411 - RNA, 19 nt, Artificial Sequence
  Description of Artificial Sequence: Synthetic oligonucleotide
  Antisense strand to SEQ ID NO: 238410
agguaucuggguuaacagc

SEQ ID NO: 238412 - RNA, 19 nt, Artificial Sequence
  Description of Artificial Sequence: Synthetic oligonucleotide
  Sense strand starting at position 2855 SEQ ID NO: 3069
uguucugcaggguaaauau

SEQ ID NO: 238413 - RNA, 19 nt, Artificial Sequence
  Description of Artificial Sequence: Synthetic oligonucleotide
  Antisense strand to SEQ ID NO: 238412
auauuuacccugcagaaca

SEQ ID NO: 238414 - RNA, 19 nt, Artificial Sequence
  Description of Artificial Sequence: Synthetic oligonucleotide
  Sense strand starting at position 2944 SEQ ID NO: 3069
gggagcaguguuuauaaua

SEQ ID NO: 238415 - RNA, 19 nt, Artificial Sequence
  Description of Artificial Sequence: Synthetic oligonucleotide
  Antisense strand to SEQ ID NO: 238414
uauuauaaacacugcuccc

SEQ ID NO: 238416 - RNA, 19 nt, Artificial Sequence
  Description of Artificial Sequence: Synthetic oligonucleotide
  Sense strand starting at position 3105 SEQ ID NO: 3069
gcagaugacuuccuaucau

SEQ ID NO: 238417 - RNA, 19 nt, Artificial Sequence
  Description of Artificial Sequence: Synthetic oligonucleotide
  Antisense strand to SEQ ID NO: 238416
augauaggaagucaucugc

SEQ ID NO: 238418 - RNA, 19 nt, Artificial Sequence
  Description of Artificial Sequence: Synthetic oligonucleotide
  Sense strand starting at position 3140 SEQ ID NO: 3069
cgauuuagcaagcguccaa

SEQ ID NO: 238419 - RNA, 19 nt, Artificial Sequence
  Description of Artificial Sequence: Synthetic oligonucleotide
  Antisense strand to SEQ ID NO: 238418
uuggacgcuugcuaaaucg

SEQ ID NO: 238420 - RNA, 19 nt, Artificial Sequence
  Description of Artificial Sequence: Synthetic oligonucleotide
  Sense strand starting at position 3286 SEQ ID NO: 3069
uuaugaauccagugguauc

SEQ ID NO: 238421 - RNA, 19 nt, Artificial Sequence
  Description of Artificial Sequence: Synthetic oligonucleotide
  Antisense strand to SEQ ID NO: 238420
gauaccacuggauucauaa

SEQ ID NO: 238422 - RNA, 19 nt, Artificial Sequence
  Description of Artificial Sequence: Synthetic oligonucleotide
  Sense strand starting at position 3480 SEQ ID NO: 3069
uuuguauucccucauguga

SEQ ID NO: 238423 - RNA, 19 nt, Artificial Sequence
  Description of Artificial Sequence: Synthetic oligonucleotide
  Antisense strand to SEQ ID NO: 238422
ucacaugagggaauacaaa

SEQ ID NO: 238424 - RNA, 19 nt, Artificial Sequence
  Description of Artificial Sequence: Synthetic oligonucleotide
  Sense strand starting at position 3499 SEQ ID NO: 3069
ugcuuuauaagagggaugu

SEQ ID NO: 238425 - RNA, 19 nt, Artificial Sequence
  Description of Artificial Sequence: Synthetic oligonucleotide
  Antisense strand to SEQ ID NO: 238424
acaucccucuuauaaagca

SEQ ID NO: 238426 - RNA, 19 nt, Artificial Sequence
  Description of Artificial Sequence: Synthetic oligonucleotide
  Sense strand starting at position 3500 SEQ ID NO: 3069
gcuuuauaagagggaugua

SEQ ID NO: 238427 - RNA, 19 nt, Artificial Sequence
  Description of Artificial Sequence: Synthetic oligonucleotide
  Antisense strand to SEQ ID NO: 238426
uacaucccucuuauaaagc

SEQ ID NO: 238428 - RNA, 19 nt, Artificial Sequence
  Description of Artificial Sequence: Synthetic oligonucleotide
  Sense strand starting at position 3578 SEQ ID NO: 3069
uuaucuucccuagagguau

SEQ ID NO: 238429 - RNA, 19 nt, Artificial Sequence
  Description of Artificial Sequence: Synthetic oligonucleotide
  Antisense strand to SEQ ID NO: 238428
auaccucuagggaagauaa

SEQ ID NO: 238430 - RNA, 19 nt, Artificial Sequence
  Description of Artificial Sequence: Synthetic oligonucleotide
  Sense strand starting at position 3740 SEQ ID NO: 3069
guguuauguauugacacuu

SEQ ID NO: 238431 - RNA, 19 nt, Artificial Sequence
  Description of Artificial Sequence: Synthetic oligonucleotide
  Antisense strand to SEQ ID NO: 238430
aagugucaauacauaacac

SEQ ID NO: 238432 - RNA, 19 nt, Artificial Sequence
  Description of Artificial Sequence: Synthetic oligonucleotide
  Sense strand starting at position 3757 SEQ ID NO: 3069
uugcauucgcuauuguguu

SEQ ID NO: 238433 - RNA, 19 nt, Artificial Sequence
  Description of Artificial Sequence: Synthetic oligonucleotide
  Antisense strand to SEQ ID NO: 238432
aacacaauagcgaaugcaa

SEQ ID NO: 238434 - RNA, 19 nt, Artificial Sequence
  Description of Artificial Sequence: Synthetic oligonucleotide
  Sense strand starting at position 3789 SEQ ID NO: 3069
guauuaaacaguuaguuga

SEQ ID NO: 238435 - RNA, 19 nt, Artificial Sequence
  Description of Artificial Sequence: Synthetic oligonucleotide
  Antisense strand to SEQ ID NO: 238434
ucaacuaacuguuuaauac

SEQ ID NO: 238436 - RNA, 19 nt, Artificial Sequence
  Description of Artificial Sequence: Synthetic oligonucleotide
  Sense strand starting at position 3797 SEQ ID NO: 3069
caguuaguugacuauuagu

SEQ ID NO: 238437 - RNA, 19 nt, Artificial Sequence
  Description of Artificial Sequence: Synthetic oligonucleotide
  Antisense strand to SEQ ID NO: 238436
acuaauagucaacuaacug

SEQ ID NO: 238438 - RNA, 19 nt, Artificial Sequence
  Description of Artificial Sequence: Synthetic oligonucleotide
  Sense strand starting at position 3802 SEQ ID NO: 3069
aguugacuauuaguugaau

SEQ ID NO: 238439 - RNA, 19 nt, Artificial Sequence
  Description of Artificial Sequence: Synthetic oligonucleotide
  Antisense strand to SEQ ID NO: 238438
auucaacuaauagucaacu

SEQ ID NO: 238440 - RNA, 19 nt, Artificial Sequence
  Description of Artificial Sequence: Synthetic oligonucleotide
  Sense strand starting at position 90 SEQ ID NO: 3070
uccauuauuugagguucuu

SEQ ID NO: 238441 - RNA, 19 nt, Artificial Sequence
  Description of Artificial Sequence: Synthetic oligonucleotide
  Antisense strand to SEQ ID NO: 238440
aagaaccucaaauaaugga

SEQ ID NO: 238442 - RNA, 19 nt, Artificial Sequence
  Description of Artificial Sequence: Synthetic oligonucleotide
  Sense strand starting at position 103 SEQ ID NO: 3070
guucuuugacucuggaaau

SEQ ID NO: 238443 - RNA, 19 nt, Artificial Sequence
  Description of Artificial Sequence: Synthetic oligonucleotide
  Antisense strand to SEQ ID NO: 238442
auuuccagagucaaagaac

SEQ ID NO: 238444 - RNA, 19 nt, Artificial Sequence
  Description of Artificial Sequence: Synthetic oligonucleotide
  Sense strand starting at position 115 SEQ ID NO: 3070
uggaaauucucugcagccu

SEQ ID NO: 238445 - RNA, 19 nt, Artificial Sequence
  Description of Artificial Sequence: Synthetic oligonucleotide
  Antisense strand to SEQ ID NO: 238444
aggcugcagagaauuucca

SEQ ID NO: 238446 - RNA, 19 nt, Artificial Sequence
  Description of Artificial Sequence: Synthetic oligonucleotide
  Sense strand starting at position 116 SEQ ID NO: 3070
ggaaauucucugcagccua

SEQ ID NO: 238447 - RNA, 19 nt, Artificial Sequence
  Description of Artificial Sequence: Synthetic oligonucleotide
  Antisense strand to SEQ ID NO: 238446
uaggcugcagagaauuucc

SEQ ID NO: 238448 - RNA, 19 nt, Artificial Sequence
  Description of Artificial Sequence: Synthetic oligonucleotide
  Sense strand starting at position 204 SEQ ID NO: 3070
uuugaagccuagcucuaaa

SEQ ID NO: 238449 - RNA, 19 nt, Artificial Sequence
  Description of Artificial Sequence: Synthetic oligonucleotide
  Antisense strand to SEQ ID NO: 238448
uuuagagcuaggcuucaaa

SEQ ID NO: 238450 - RNA, 19 nt, Artificial Sequence
  Description of Artificial Sequence: Synthetic oligonucleotide
  Sense strand starting at position 234 SEQ ID NO: 3070
aguggcuucuacuuaagaa

SEQ ID NO: 238451 - RNA, 19 nt, Artificial Sequence
  Description of Artificial Sequence: Synthetic oligonucleotide
  Antisense strand to SEQ ID NO: 238450
uucuuaaguagaagccacu

SEQ ID NO: 238452 - RNA, 19 nt, Artificial Sequence
  Description of Artificial Sequence: Synthetic oligonucleotide
  Sense strand starting at position 244 SEQ ID NO: 3070
acuuaagaauucucgagga

SEQ ID NO: 238453 - RNA, 19 nt, Artificial Sequence
  Description of Artificial Sequence: Synthetic oligonucleotide
  Antisense strand to SEQ ID NO: 238452
uccucgagaauucuuaagu

SEQ ID NO: 238454 - RNA, 19 nt, Artificial Sequence
  Description of Artificial Sequence: Synthetic oligonucleotide
  Sense strand starting at position 322 SEQ ID NO: 3070
cuguaagguuagguuauca

SEQ ID NO: 238455 - RNA, 19 nt, Artificial Sequence
  Description of Artificial Sequence: Synthetic oligonucleotide
  Antisense strand to SEQ ID NO: 238454
ugauaaccuaaccuuacag

SEQ ID NO: 238456 - RNA, 19 nt, Artificial Sequence
  Description of Artificial Sequence: Synthetic oligonucleotide
  Sense strand starting at position 327 SEQ ID NO: 3070
agguuagguuaucauuuac

SEQ ID NO: 238457 - RNA, 19 nt, Artificial Sequence
  Description of Artificial Sequence: Synthetic oligonucleotide
  Antisense strand to SEQ ID NO: 238456
guaaaugauaaccuaaccu

SEQ ID NO: 238458 - RNA, 19 nt, Artificial Sequence
  Description of Artificial Sequence: Synthetic oligonucleotide
  Sense strand starting at position 340 SEQ ID NO: 3070
auuuaccuuuauugugaga

SEQ ID NO: 238459 - RNA, 19 nt, Artificial Sequence
  Description of Artificial Sequence: Synthetic oligonucleotide
  Antisense strand to SEQ ID NO: 238458
ucucacaauaaagguaaau

SEQ ID NO: 238460 - RNA, 19 nt, Artificial Sequence
  Description of Artificial Sequence: Synthetic oligonucleotide
  Sense strand starting at position 357 SEQ ID NO: 3070
gaguguaacccuugcacac

SEQ ID NO: 238461 - RNA, 19 nt, Artificial Sequence
  Description of Artificial Sequence: Synthetic oligonucleotide
  Antisense strand to SEQ ID NO: 238460
gugugcaaggguuacacuc

SEQ ID NO: 238462 - RNA, 19 nt, Artificial Sequence
  Description of Artificial Sequence: Synthetic oligonucleotide
  Sense strand starting at position 388 SEQ ID NO: 3070
gugguaucuccaugacacu

SEQ ID NO: 238463 - RNA, 19 nt, Artificial Sequence
  Description of Artificial Sequence: Synthetic oligonucleotide
  Antisense strand to SEQ ID NO: 238462
agugucauggagauaccac

SEQ ID NO: 238464 - RNA, 19 nt, Artificial Sequence
  Description of Artificial Sequence: Synthetic oligonucleotide
  Sense strand starting at position 541 SEQ ID NO: 3070
ggcuucuguguguugguca

SEQ ID NO: 238465 - RNA, 19 nt, Artificial Sequence
  Description of Artificial Sequence: Synthetic oligonucleotide
  Antisense strand to SEQ ID NO: 238464
ugaccaacacacagaagcc

SEQ ID NO: 238466 - RNA, 19 nt, Artificial Sequence
  Description of Artificial Sequence: Synthetic oligonucleotide
  Sense strand starting at position 548 SEQ ID NO: 3070
guguguuggucagcaagga

SEQ ID NO: 238467 - RNA, 19 nt, Artificial Sequence
  Description of Artificial Sequence: Synthetic oligonucleotide
  Antisense strand to SEQ ID NO: 238466
uccuugcugaccaacacac

SEQ ID NO: 238468 - RNA, 19 nt, Artificial Sequence
  Description of Artificial Sequence: Synthetic oligonucleotide
  Sense strand starting at position 549 SEQ ID NO: 3070
uguguuggucagcaaggau

SEQ ID NO: 238469 - RNA, 19 nt, Artificial Sequence
  Description of Artificial Sequence: Synthetic oligonucleotide
  Antisense strand to SEQ ID NO: 238468
auccuugcugaccaacaca

SEQ ID NO: 238470 - RNA, 19 nt, Artificial Sequence
  Description of Artificial Sequence: Synthetic oligonucleotide
  Sense strand starting at position 668 SEQ ID NO: 3070
uccguuuccaaguaggauu

SEQ ID NO: 238471 - RNA, 19 nt, Artificial Sequence
  Description of Artificial Sequence: Synthetic oligonucleotide
  Antisense strand to SEQ ID NO: 238470
aauccuacuuggaaacgga

SEQ ID NO: 238472 - RNA, 19 nt, Artificial Sequence
  Description of Artificial Sequence: Synthetic oligonucleotide
  Sense strand starting at position 689 SEQ ID NO: 3070
agugucauaagagagcuuu

SEQ ID NO: 238473 - RNA, 19 nt, Artificial Sequence
  Description of Artificial Sequence: Synthetic oligonucleotide
  Antisense strand to SEQ ID NO: 238472
aaagcucucuuaugacacu

SEQ ID NO: 238474 - RNA, 19 nt, Artificial Sequence
  Description of Artificial Sequence: Synthetic oligonucleotide
  Sense strand starting at position 2010 SEQ ID NO: 3070
accacuccucuguagagau

SEQ ID NO: 238475 - RNA, 19 nt, Artificial Sequence
  Description of Artificial Sequence: Synthetic oligonucleotide
  Antisense strand to SEQ ID NO: 238474
aucucuacagaggaguggu

SEQ ID NO: 238476 - RNA, 19 nt, Artificial Sequence
  Description of Artificial Sequence: Synthetic oligonucleotide
  Sense strand starting at position 2053 SEQ ID NO: 3070
augacugcuuaauaaagau

SEQ ID NO: 238477 - RNA, 19 nt, Artificial Sequence
  Description of Artificial Sequence: Synthetic oligonucleotide
  Antisense strand to SEQ ID NO: 238476
aucuuuauuaagcagucau

SEQ ID NO: 238478 - RNA, 19 nt, Artificial Sequence
  Description of Artificial Sequence: Synthetic oligonucleotide
  Sense strand starting at position 2142 SEQ ID NO: 3070
augugcguggguagacaua

SEQ ID NO: 238479 - RNA, 19 nt, Artificial Sequence
  Description of Artificial Sequence: Synthetic oligonucleotide
  Antisense strand to SEQ ID NO: 238478
uaugucuacccacgcacau

SEQ ID NO: 238480 - RNA, 19 nt, Artificial Sequence
  Description of Artificial Sequence: Synthetic oligonucleotide
  Sense strand starting at position 2255 SEQ ID NO: 3070
gggagugugcaauggauuc

SEQ ID NO: 238481 - RNA, 19 nt, Artificial Sequence
  Description of Artificial Sequence: Synthetic oligonucleotide
  Antisense strand to SEQ ID NO: 238480
gaauccauugcacacuccc

SEQ ID NO: 238482 - RNA, 19 nt, Artificial Sequence
  Description of Artificial Sequence: Synthetic oligonucleotide
  Sense strand starting at position 2318 SEQ ID NO: 3070
ggagcagcugucuggaacu

SEQ ID NO: 238483 - RNA, 19 nt, Artificial Sequence
  Description of Artificial Sequence: Synthetic oligonucleotide
  Antisense strand to SEQ ID NO: 238482
aguuccagacagcugcucc

SEQ ID NO: 238484 - RNA, 19 nt, Artificial Sequence
  Description of Artificial Sequence: Synthetic oligonucleotide
  Sense strand starting at position 2347 SEQ ID NO: 3070
ggcuguagaccuggucuga

SEQ ID NO: 238485 - RNA, 19 nt, Artificial Sequence
  Description of Artificial Sequence: Synthetic oligonucleotide
  Antisense strand to SEQ ID NO: 238484
ucagaccaggucuacagcc

SEQ ID NO: 238486 - RNA, 19 nt, Artificial Sequence
  Description of Artificial Sequence: Synthetic oligonucleotide
  Sense strand starting at position 2374 SEQ ID NO: 3070
gagcuagaggcucagcaaa

SEQ ID NO: 238487 - RNA, 19 nt, Artificial Sequence
  Description of Artificial Sequence: Synthetic oligonucleotide
  Antisense strand to SEQ ID NO: 238486
uuugcugagccucuagcuc

SEQ ID NO: 238488 - RNA, 19 nt, Artificial Sequence
  Description of Artificial Sequence: Synthetic oligonucleotide
  Sense strand starting at position 2376 SEQ ID NO: 3070
gcuagaggcucagcaaauu

SEQ ID NO: 238489 - RNA, 19 nt, Artificial Sequence
  Description of Artificial Sequence: Synthetic oligonucleotide
  Antisense strand to SEQ ID NO: 238488
aauuugcugagccucuagc

SEQ ID NO: 238490 - RNA, 19 nt, Artificial Sequence
  Description of Artificial Sequence: Synthetic oligonucleotide
  Sense strand starting at position 2432 SEQ ID NO: 3070
cucacagagccuuggguau

SEQ ID NO: 238491 - RNA, 19 nt, Artificial Sequence
  Description of Artificial Sequence: Synthetic oligonucleotide
  Antisense strand to SEQ ID NO: 238490
auacccaaggcucugugag

SEQ ID NO: 238492 - RNA, 19 nt, Artificial Sequence
  Description of Artificial Sequence: Synthetic oligonucleotide
  Sense strand starting at position 2445 SEQ ID NO: 3070
ggguauggucuccagcuca

SEQ ID NO: 238493 - RNA, 19 nt, Artificial Sequence
  Description of Artificial Sequence: Synthetic oligonucleotide
  Antisense strand to SEQ ID NO: 238492
ugagcuggagaccauaccc

SEQ ID NO: 238494 - RNA, 19 nt, Artificial Sequence
  Description of Artificial Sequence: Synthetic oligonucleotide
  Sense strand starting at position 2513 SEQ ID NO: 3070
cagggcuccaugugaguau

SEQ ID NO: 238495 - RNA, 19 nt, Artificial Sequence
  Description of Artificial Sequence: Synthetic oligonucleotide
  Antisense strand to SEQ ID NO: 238494
auacucacauggagcccug

SEQ ID NO: 238496 - RNA, 19 nt, Artificial Sequence
  Description of Artificial Sequence: Synthetic oligonucleotide
  Sense strand starting at position 2895 SEQ ID NO: 3070
cagugcauagccugaagua

SEQ ID NO: 238497 - RNA, 19 nt, Artificial Sequence
  Description of Artificial Sequence: Synthetic oligonucleotide
  Antisense strand to SEQ ID NO: 238496
uacuucaggcuaugcacug

SEQ ID NO: 238498 - RNA, 19 nt, Artificial Sequence
  Description of Artificial Sequence: Synthetic oligonucleotide
  Sense strand starting at position 2896 SEQ ID NO: 3070
agugcauagccugaaguaa

SEQ ID NO: 238499 - RNA, 19 nt, Artificial Sequence
  Description of Artificial Sequence: Synthetic oligonucleotide
  Antisense strand to SEQ ID NO: 238498
uuacuucaggcuaugcacu

SEQ ID NO: 238500 - RNA, 19 nt, Artificial Sequence
  Description of Artificial Sequence: Synthetic oligonucleotide
  Sense strand starting at position 2910 SEQ ID NO: 3070
aguaaaugcugagucaaug

SEQ ID NO: 238501 - RNA, 19 nt, Artificial Sequence
  Description of Artificial Sequence: Synthetic oligonucleotide
  Antisense strand to SEQ ID NO: 238500
cauugacucagcauuuacu

SEQ ID NO: 238502 - RNA, 19 nt, Artificial Sequence
  Description of Artificial Sequence: Synthetic oligonucleotide
  Sense strand starting at position 2974 SEQ ID NO: 3070
cccacagaucccugucauc

SEQ ID NO: 238503 - RNA, 19 nt, Artificial Sequence
  Description of Artificial Sequence: Synthetic oligonucleotide
  Antisense strand to SEQ ID NO: 238502
gaugacagggaucuguggg

SEQ ID NO: 238504 - RNA, 19 nt, Artificial Sequence
  Description of Artificial Sequence: Synthetic oligonucleotide
  Sense strand starting at position 3058 SEQ ID NO: 3070
cuggcagacugcuccagaa

SEQ ID NO: 238505 - RNA, 19 nt, Artificial Sequence
  Description of Artificial Sequence: Synthetic oligonucleotide
  Antisense strand to SEQ ID NO: 238504
uucuggagcagucugccag

SEQ ID NO: 238506 - RNA, 19 nt, Artificial Sequence
  Description of Artificial Sequence: Synthetic oligonucleotide
  Sense strand starting at position 3135 SEQ ID NO: 3070
ucagacucugggugugaga

SEQ ID NO: 238507 - RNA, 19 nt, Artificial Sequence
  Description of Artificial Sequence: Synthetic oligonucleotide
  Antisense strand to SEQ ID NO: 238506
ucucacacccagagucuga

SEQ ID NO: 238508 - RNA, 19 nt, Artificial Sequence
  Description of Artificial Sequence: Synthetic oligonucleotide
  Sense strand starting at position 3484 SEQ ID NO: 3070
ggccgauuacgguacagaa

SEQ ID NO: 238509 - RNA, 19 nt, Artificial Sequence
  Description of Artificial Sequence: Synthetic oligonucleotide
  Antisense strand to SEQ ID NO: 238508
uucuguaccguaaucggcc

SEQ ID NO: 238510 - RNA, 19 nt, Artificial Sequence
  Description of Artificial Sequence: Synthetic oligonucleotide
  Sense strand starting at position 3800 SEQ ID NO: 3070
ugcagauucccugggagag

SEQ ID NO: 238511 - RNA, 19 nt, Artificial Sequence
  Description of Artificial Sequence: Synthetic oligonucleotide
  Antisense strand to SEQ ID NO: 238510
cucucccagggaaucugca

SEQ ID NO: 238512 - RNA, 19 nt, Artificial Sequence
  Description of Artificial Sequence: Synthetic oligonucleotide
  Sense strand starting at position 3816 SEQ ID NO: 3070
gagggaaacucguuaaaug

SEQ ID NO: 238513 - RNA, 19 nt, Artificial Sequence
  Description of Artificial Sequence: Synthetic oligonucleotide
  Antisense strand to SEQ ID NO: 238512
cauuuaacgaguuucccuc

SEQ ID NO: 238514 - RNA, 19 nt, Artificial Sequence
  Description of Artificial Sequence: Synthetic oligonucleotide
  Sense strand starting at position 3924 SEQ ID NO: 3070
cgaaacucccaaggugaaa

SEQ ID NO: 238515 - RNA, 19 nt, Artificial Sequence
  Description of Artificial Sequence: Synthetic oligonucleotide
  Antisense strand to SEQ ID NO: 238514
uuucaccuugggaguuucg

SEQ ID NO: 238516 - RNA, 19 nt, Artificial Sequence
  Description of Artificial Sequence: Synthetic oligonucleotide
  Sense strand starting at position 3977 SEQ ID NO: 3070
ugagaaucaucuuaggaau

SEQ ID NO: 238517 - RNA, 19 nt, Artificial Sequence
  Description of Artificial Sequence: Synthetic oligonucleotide
  Antisense strand to SEQ ID NO: 238516
auuccuaagaugauucuca

SEQ ID NO: 238518 - RNA, 19 nt, Artificial Sequence
  Description of Artificial Sequence: Synthetic oligonucleotide
  Sense strand starting at position 3979 SEQ ID NO: 3070
agaaucaucuuaggaauua

SEQ ID NO: 238519 - RNA, 19 nt, Artificial Sequence
  Description of Artificial Sequence: Synthetic oligonucleotide
  Antisense strand to SEQ ID NO: 238518
uaauuccuaagaugauucu

SEQ ID NO: 238520 - RNA, 19 nt, Artificial Sequence
  Description of Artificial Sequence: Synthetic oligonucleotide
  Sense strand starting at position 14 SEQ ID NO: 3071
agggaugggaugcgucaua

SEQ ID NO: 238521 - RNA, 19 nt, Artificial Sequence
  Description of Artificial Sequence: Synthetic oligonucleotide
  Antisense strand to SEQ ID NO: 238520
uaugacgcaucccaucccu

SEQ ID NO: 238522 - RNA, 19 nt, Artificial Sequence
  Description of Artificial Sequence: Synthetic oligonucleotide
  Sense strand starting at position 92 SEQ ID NO: 3071
gauaguaaaugguuaacag

SEQ ID NO: 238523 - RNA, 19 nt, Artificial Sequence
  Description of Artificial Sequence: Synthetic oligonucleotide
  Antisense strand to SEQ ID NO: 238522
cuguuaaccauuuacuauc

SEQ ID NO: 238524 - RNA, 19 nt, Artificial Sequence
  Description of Artificial Sequence: Synthetic oligonucleotide
  Sense strand starting at position 93 SEQ ID NO: 3071
auaguaaaugguuaacagu

SEQ ID NO: 238525 - RNA, 19 nt, Artificial Sequence
  Description of Artificial Sequence: Synthetic oligonucleotide
  Antisense strand to SEQ ID NO: 238524
acuguuaaccauuuacuau

SEQ ID NO: 238526 - RNA, 19 nt, Artificial Sequence
  Description of Artificial Sequence: Synthetic oligonucleotide
  Sense strand starting at position 156 SEQ ID NO: 3071
uguagcaauguccaagauu

SEQ ID NO: 238527 - RNA, 19 nt, Artificial Sequence
  Description of Artificial Sequence: Synthetic oligonucleotide
  Antisense strand to SEQ ID NO: 238526
aaucuuggacauugcuaca

SEQ ID NO: 238528 - RNA, 19 nt, Artificial Sequence
  Description of Artificial Sequence: Synthetic oligonucleotide
  Sense strand starting at position 159 SEQ ID NO: 3071
agcaauguccaagauuaac

SEQ ID NO: 238529 - RNA, 19 nt, Artificial Sequence
  Description of Artificial Sequence: Synthetic oligonucleotide
  Antisense strand to SEQ ID NO: 238528
guuaaucuuggacauugcu

SEQ ID NO: 238530 - RNA, 19 nt, Artificial Sequence
  Description of Artificial Sequence: Synthetic oligonucleotide
  Sense strand starting at position 659 SEQ ID NO: 3071
ggaagauaauaugcuuucu

SEQ ID NO: 238531 - RNA, 19 nt, Artificial Sequence
  Description of Artificial Sequence: Synthetic oligonucleotide
  Antisense strand to SEQ ID NO: 238530
agaaagcauauuaucuucc

SEQ ID NO: 238532 - RNA, 19 nt, Artificial Sequence
  Description of Artificial Sequence: Synthetic oligonucleotide
  Sense strand starting at position 863 SEQ ID NO: 3071
acauuuggcuuagaucaca

SEQ ID NO: 238533 - RNA, 19 nt, Artificial Sequence
  Description of Artificial Sequence: Synthetic oligonucleotide
  Antisense strand to SEQ ID NO: 238532
ugugaucuaagccaaaugu

SEQ ID NO: 238534 - RNA, 19 nt, Artificial Sequence
  Description of Artificial Sequence: Synthetic oligonucleotide
  Sense strand starting at position 866 SEQ ID NO: 3071
uuuggcuuagaucacauaa

SEQ ID NO: 238535 - RNA, 19 nt, Artificial Sequence
  Description of Artificial Sequence: Synthetic oligonucleotide
  Antisense strand to SEQ ID NO: 238534
uuaugugaucuaagccaaa

SEQ ID NO: 238536 - RNA, 19 nt, Artificial Sequence
  Description of Artificial Sequence: Synthetic oligonucleotide
  Sense strand starting at position 1004 SEQ ID NO: 3071
ccuuuaucccgugggauaa

SEQ ID NO: 238537 - RNA, 19 nt, Artificial Sequence
  Description of Artificial Sequence: Synthetic oligonucleotide
  Antisense strand to SEQ ID NO: 238536
uuaucccacgggauaaagg

SEQ ID NO: 238538 - RNA, 19 nt, Artificial Sequence
  Description of Artificial Sequence: Synthetic oligonucleotide
  Sense strand starting at position 1005 SEQ ID NO: 3071
cuuuaucccgugggauaag

SEQ ID NO: 238539 - RNA, 19 nt, Artificial Sequence
  Description of Artificial Sequence: Synthetic oligonucleotide
  Antisense strand to SEQ ID NO: 238538
cuuaucccacgggauaaag

SEQ ID NO: 238540 - RNA, 19 nt, Artificial Sequence
  Description of Artificial Sequence: Synthetic oligonucleotide
  Sense strand starting at position 1014 SEQ ID NO: 3071
gugggauaaguguaauaca

SEQ ID NO: 238541 - RNA, 19 nt, Artificial Sequence
  Description of Artificial Sequence: Synthetic oligonucleotide
  Antisense strand to SEQ ID NO: 238540
uguauuacacuuaucccac

SEQ ID NO: 238542 - RNA, 19 nt, Artificial Sequence
  Description of Artificial Sequence: Synthetic oligonucleotide
  Sense strand starting at position 1038 SEQ ID NO: 3071
guacuauuagagcacucuu

SEQ ID NO: 238543 - RNA, 19 nt, Artificial Sequence
  Description of Artificial Sequence: Synthetic oligonucleotide
  Antisense strand to SEQ ID NO: 238542
aagagugcucuaauaguac

SEQ ID NO: 238544 - RNA, 19 nt, Artificial Sequence
  Description of Artificial Sequence: Synthetic oligonucleotide
  Sense strand starting at position 1206 SEQ ID NO: 3071
gagaguuccuaaccgaaua

SEQ ID NO: 238545 - RNA, 19 nt, Artificial Sequence
  Description of Artificial Sequence: Synthetic oligonucleotide
  Antisense strand to SEQ ID NO: 238544
uauucgguuaggaacucuc

SEQ ID NO: 238546 - RNA, 19 nt, Artificial Sequence
  Description of Artificial Sequence: Synthetic oligonucleotide
  Sense strand starting at position 1353 SEQ ID NO: 3071
acgucaugguaacuaacau

SEQ ID NO: 238547 - RNA, 19 nt, Artificial Sequence
  Description of Artificial Sequence: Synthetic oligonucleotide
  Antisense strand to SEQ ID NO: 238546
auguuaguuaccaugacgu

SEQ ID NO: 238548 - RNA, 19 nt, Artificial Sequence
  Description of Artificial Sequence: Synthetic oligonucleotide
  Sense strand starting at position 1452 SEQ ID NO: 3071
gaggguacccucgggauaa

SEQ ID NO: 238549 - RNA, 19 nt, Artificial Sequence
  Description of Artificial Sequence: Synthetic oligonucleotide
  Antisense strand to SEQ ID NO: 238548
uuaucccgaggguacccuc

SEQ ID NO: 238550 - RNA, 19 nt, Artificial Sequence
  Description of Artificial Sequence: Synthetic oligonucleotide
  Sense strand starting at position 1473 SEQ ID NO: 3071
ggaagagucuaagaaagac

SEQ ID NO: 238551 - RNA, 19 nt, Artificial Sequence
  Description of Artificial Sequence: Synthetic oligonucleotide
  Antisense strand to SEQ ID NO: 238550
gucuuucuuagacucuucc

SEQ ID NO: 238552 - RNA, 19 nt, Artificial Sequence
  Description of Artificial Sequence: Synthetic oligonucleotide
  Sense strand starting at position 2415 SEQ ID NO: 3071
ucgugugaucugccaguuu

SEQ ID NO: 238553 - RNA, 19 nt, Artificial Sequence
  Description of Artificial Sequence: Synthetic oligonucleotide
  Antisense strand to SEQ ID NO: 238552
aaacuggcagaucacacga

SEQ ID NO: 238554 - RNA, 19 nt, Artificial Sequence
  Description of Artificial Sequence: Synthetic oligonucleotide
  Sense strand starting at position 2842 SEQ ID NO: 3071
cggguagagcuagauagua

SEQ ID NO: 238555 - RNA, 19 nt, Artificial Sequence
  Description of Artificial Sequence: Synthetic oligonucleotide
  Antisense strand to SEQ ID NO: 238554
uacuaucuagcucuacccg

SEQ ID NO: 238556 - RNA, 19 nt, Artificial Sequence
  Description of Artificial Sequence: Synthetic oligonucleotide
  Sense strand starting at position 2844 SEQ ID NO: 3071
gguagagcuagauaguaca

SEQ ID NO: 238557 - RNA, 19 nt, Artificial Sequence
  Description of Artificial Sequence: Synthetic oligonucleotide
  Antisense strand to SEQ ID NO: 238556
uguacuaucuagcucuacc

SEQ ID NO: 238558 - RNA, 19 nt, Artificial Sequence
  Description of Artificial Sequence: Synthetic oligonucleotide
  Sense strand starting at position 2847 SEQ ID NO: 3071
agagcuagauaguacauuu

SEQ ID NO: 238559 - RNA, 19 nt, Artificial Sequence
  Description of Artificial Sequence: Synthetic oligonucleotide
  Antisense strand to SEQ ID NO: 238558
aaauguacuaucuagcucu

SEQ ID NO: 238560 - RNA, 19 nt, Artificial Sequence
  Description of Artificial Sequence: Synthetic oligonucleotide
  Sense strand starting at position 2883 SEQ ID NO: 3071
uagauaggcuuucugaugu

SEQ ID NO: 238561 - RNA, 19 nt, Artificial Sequence
  Description of Artificial Sequence: Synthetic oligonucleotide
  Antisense strand to SEQ ID NO: 238560
acaucagaaagccuaucua

SEQ ID NO: 238562 - RNA, 19 nt, Artificial Sequence
  Description of Artificial Sequence: Synthetic oligonucleotide
  Sense strand starting at position 2949 SEQ ID NO: 3071
gccaaauuccagcgaaaca

SEQ ID NO: 238563 - RNA, 19 nt, Artificial Sequence
  Description of Artificial Sequence: Synthetic oligonucleotide
  Antisense strand to SEQ ID NO: 238562
uguuucgcuggaauuuggc

SEQ ID NO: 238564 - RNA, 19 nt, Artificial Sequence
  Description of Artificial Sequence: Synthetic oligonucleotide
  Sense strand starting at position 3126 SEQ ID NO: 3071
gacucaaaguccuccugga

SEQ ID NO: 238565 - RNA, 19 nt, Artificial Sequence
  Description of Artificial Sequence: Synthetic oligonucleotide
  Antisense strand to SEQ ID NO: 238564
uccaggaggacuuugaguc

SEQ ID NO: 238566 - RNA, 19 nt, Artificial Sequence
  Description of Artificial Sequence: Synthetic oligonucleotide
  Sense strand starting at position 3443 SEQ ID NO: 3071
auggcaauuuccgugucuu

SEQ ID NO: 238567 - RNA, 19 nt, Artificial Sequence
  Description of Artificial Sequence: Synthetic oligonucleotide
  Antisense strand to SEQ ID NO: 238566
aagacacggaaauugccau

SEQ ID NO: 238568 - RNA, 19 nt, Artificial Sequence
  Description of Artificial Sequence: Synthetic oligonucleotide
  Sense strand starting at position 3444 SEQ ID NO: 3071
uggcaauuuccgugucuuc

SEQ ID NO: 238569 - RNA, 19 nt, Artificial Sequence
  Description of Artificial Sequence: Synthetic oligonucleotide
  Antisense strand to SEQ ID NO: 238568
gaagacacggaaauugcca

SEQ ID NO: 238570 - RNA, 19 nt, Artificial Sequence
  Description of Artificial Sequence: Synthetic oligonucleotide
  Sense strand starting at position 3474 SEQ ID NO: 3071
gccaucuuagugcaaagau

SEQ ID NO: 238571 - RNA, 19 nt, Artificial Sequence
  Description of Artificial Sequence: Synthetic oligonucleotide
  Antisense strand to SEQ ID NO: 238570
aucuuugcacuaagauggc

SEQ ID NO: 238572 - RNA, 19 nt, Artificial Sequence
  Description of Artificial Sequence: Synthetic oligonucleotide
  Sense strand starting at position 3497 SEQ ID NO: 3071
aauuguguggcuuauuaag

SEQ ID NO: 238573 - RNA, 19 nt, Artificial Sequence
  Description of Artificial Sequence: Synthetic oligonucleotide
  Antisense strand to SEQ ID NO: 238572
cuuaauaagccacacaauu

SEQ ID NO: 238574 - RNA, 19 nt, Artificial Sequence
  Description of Artificial Sequence: Synthetic oligonucleotide
  Sense strand starting at position 3499 SEQ ID NO: 3071
uuguguggcuuauuaagaa

SEQ ID NO: 238575 - RNA, 19 nt, Artificial Sequence
  Description of Artificial Sequence: Synthetic oligonucleotide
  Antisense strand to SEQ ID NO: 238574
uucuuaauaagccacacaa

SEQ ID NO: 238576 - RNA, 19 nt, Artificial Sequence
  Description of Artificial Sequence: Synthetic oligonucleotide
  Sense strand starting at position 3528 SEQ ID NO: 3071
aagcuaaggguagguuaaa

SEQ ID NO: 238577 - RNA, 19 nt, Artificial Sequence
  Description of Artificial Sequence: Synthetic oligonucleotide
  Antisense strand to SEQ ID NO: 238576
uuuaaccuacccuuagcuu

SEQ ID NO: 238578 - RNA, 19 nt, Artificial Sequence
  Description of Artificial Sequence: Synthetic oligonucleotide
  Sense strand starting at position 3607 SEQ ID NO: 3071
gcuccaguucucuuugcuu

SEQ ID NO: 238579 - RNA, 19 nt, Artificial Sequence
  Description of Artificial Sequence: Synthetic oligonucleotide
  Antisense strand to SEQ ID NO: 238578
aagcaaagagaacuggagc

SEQ ID NO: 238580 - RNA, 19 nt, Artificial Sequence
  Description of Artificial Sequence: Synthetic oligonucleotide
  Sense strand starting at position 3777 SEQ ID NO: 3071
cuuauugagcauugacuau

SEQ ID NO: 238581 - RNA, 19 nt, Artificial Sequence
  Description of Artificial Sequence: Synthetic oligonucleotide
  Antisense strand to SEQ ID NO: 238580
auagucaaugcucaauaag

SEQ ID NO: 238582 - RNA, 19 nt, Artificial Sequence
  Description of Artificial Sequence: Synthetic oligonucleotide
  Sense strand starting at position 3876 SEQ ID NO: 3071
auccuuuggccacaguaaa

SEQ ID NO: 238583 - RNA, 19 nt, Artificial Sequence
  Description of Artificial Sequence: Synthetic oligonucleotide
  Antisense strand to SEQ ID NO: 238582
uuuacuguggccaaaggau

SEQ ID NO: 238584 - RNA, 19 nt, Artificial Sequence
  Description of Artificial Sequence: Synthetic oligonucleotide
  Sense strand starting at position 3924 SEQ ID NO: 3071
augucagaaugaucacacu

SEQ ID NO: 238585 - RNA, 19 nt, Artificial Sequence
  Description of Artificial Sequence: Synthetic oligonucleotide
  Antisense strand to SEQ ID NO: 238584
agugugaucauucugacau

SEQ ID NO: 238586 - RNA, 19 nt, Artificial Sequence
  Description of Artificial Sequence: Synthetic oligonucleotide
  Sense strand starting at position 3939 SEQ ID NO: 3071
cacuauuugugggugugua

SEQ ID NO: 238587 - RNA, 19 nt, Artificial Sequence
  Description of Artificial Sequence: Synthetic oligonucleotide
  Antisense strand to SEQ ID NO: 238586
uacacacccacaaauagug

SEQ ID NO: 238588 - RNA, 19 nt, Artificial Sequence
  Description of Artificial Sequence: Synthetic oligonucleotide
  Sense strand starting at position 3940 SEQ ID NO: 3071
acuauuuguggguguguaa

SEQ ID NO: 238589 - RNA, 19 nt, Artificial Sequence
  Description of Artificial Sequence: Synthetic oligonucleotide
  Antisense strand to SEQ ID NO: 238588
uuacacacccacaaauagu

SEQ ID NO: 238590 - RNA, 19 nt, Artificial Sequence
  Description of Artificial Sequence: Synthetic oligonucleotide
  Sense strand starting at position 3947 SEQ ID NO: 3071
guggguguguaaucuggaa

SEQ ID NO: 238591 - RNA, 19 nt, Artificial Sequence
  Description of Artificial Sequence: Synthetic oligonucleotide
  Antisense strand to SEQ ID NO: 238590
uuccagauuacacacccac

SEQ ID NO: 238592 - RNA, 19 nt, Artificial Sequence
  Description of Artificial Sequence: Synthetic oligonucleotide
  Sense strand starting at position 3951 SEQ ID NO: 3071
guguguaaucuggaagcug

SEQ ID NO: 238593 - RNA, 19 nt, Artificial Sequence
  Description of Artificial Sequence: Synthetic oligonucleotide
  Antisense strand to SEQ ID NO: 238592
cagcuuccagauuacacac

SEQ ID NO: 238594 - RNA, 19 nt, Artificial Sequence
  Description of Artificial Sequence: Synthetic oligonucleotide
  Sense strand starting at position 3963 SEQ ID NO: 3071
gaagcuguaccaugauuag

SEQ ID NO: 238595 - RNA, 19 nt, Artificial Sequence
  Description of Artificial Sequence: Synthetic oligonucleotide
  Antisense strand to SEQ ID NO: 238594
cuaaucaugguacagcuuc

SEQ ID NO: 238596 - RNA, 19 nt, Artificial Sequence
  Description of Artificial Sequence: Synthetic oligonucleotide
  Sense strand starting at position 3969 SEQ ID NO: 3071
guaccaugauuaguugaaa

SEQ ID NO: 238597 - RNA, 19 nt, Artificial Sequence
  Description of Artificial Sequence: Synthetic oligonucleotide
  Antisense strand to SEQ ID NO: 238596
uuucaacuaaucaugguac

SEQ ID NO: 238598 - RNA, 19 nt, Artificial Sequence
  Description of Artificial Sequence: Synthetic oligonucleotide
  Sense strand starting at position 3970 SEQ ID NO: 3071
uaccaugauuaguugaaag

SEQ ID NO: 238599 - RNA, 19 nt, Artificial Sequence
  Description of Artificial Sequence: Synthetic oligonucleotide
  Antisense strand to SEQ ID NO: 238598
cuuucaacuaaucauggua

SEQ ID NO: 238600 - RNA, 19 nt, Artificial Sequence
  Description of Artificial Sequence: Synthetic oligonucleotide
  Sense strand starting at position 18 SEQ ID NO: 3072
ugagggugucguguugcau

SEQ ID NO: 238601 - RNA, 19 nt, Artificial Sequence
  Description of Artificial Sequence: Synthetic oligonucleotide
  Antisense strand to SEQ ID NO: 238600
augcaacacgacacccuca

SEQ ID NO: 238602 - RNA, 19 nt, Artificial Sequence
  Description of Artificial Sequence: Synthetic oligonucleotide
  Sense strand starting at position 19 SEQ ID NO: 3072
gagggugucguguugcaug

SEQ ID NO: 238603 - RNA, 19 nt, Artificial Sequence
  Description of Artificial Sequence: Synthetic oligonucleotide
  Antisense strand to SEQ ID NO: 238602
caugcaacacgacacccuc

SEQ ID NO: 238604 - RNA, 19 nt, Artificial Sequence
  Description of Artificial Sequence: Synthetic oligonucleotide
  Sense strand starting at position 392 SEQ ID NO: 3072
cugccugugcuggcucaaa

SEQ ID NO: 238605 - RNA, 19 nt, Artificial Sequence
  Description of Artificial Sequence: Synthetic oligonucleotide
  Antisense strand to SEQ ID NO: 238604
uuugagccagcacaggcag

SEQ ID NO: 238606 - RNA, 19 nt, Artificial Sequence
  Description of Artificial Sequence: Synthetic oligonucleotide
  Sense strand starting at position 445 SEQ ID NO: 3072
aaggcugagugucugcuaa

SEQ ID NO: 238607 - RNA, 19 nt, Artificial Sequence
  Description of Artificial Sequence: Synthetic oligonucleotide
  Antisense strand to SEQ ID NO: 238606
uuagcagacacucagccuu

SEQ ID NO: 238608 - RNA, 19 nt, Artificial Sequence
  Description of Artificial Sequence: Synthetic oligonucleotide
  Sense strand starting at position 447 SEQ ID NO: 3072
ggcugagugucugcuaacu

SEQ ID NO: 238609 - RNA, 19 nt, Artificial Sequence
  Description of Artificial Sequence: Synthetic oligonucleotide
  Antisense strand to SEQ ID NO: 238608
aguuagcagacacucagcc

SEQ ID NO: 238610 - RNA, 19 nt, Artificial Sequence
  Description of Artificial Sequence: Synthetic oligonucleotide
  Sense strand starting at position 457 SEQ ID NO: 3072
cugcuaacuugucuuaggu

SEQ ID NO: 238611 - RNA, 19 nt, Artificial Sequence
  Description of Artificial Sequence: Synthetic oligonucleotide
  Antisense strand to SEQ ID NO: 238610
accuaagacaaguuagcag

SEQ ID NO: 238612 - RNA, 19 nt, Artificial Sequence
  Description of Artificial Sequence: Synthetic oligonucleotide
  Sense strand starting at position 575 SEQ ID NO: 3072
cagaguuugccauggaguu

SEQ ID NO: 238613 - RNA, 19 nt, Artificial Sequence
  Description of Artificial Sequence: Synthetic oligonucleotide
  Antisense strand to SEQ ID NO: 238612
aacuccauggcaaacucug

SEQ ID NO: 238614 - RNA, 19 nt, Artificial Sequence
  Description of Artificial Sequence: Synthetic oligonucleotide
  Sense strand starting at position 577 SEQ ID NO: 3072
gaguuugccauggaguugu

SEQ ID NO: 238615 - RNA, 19 nt, Artificial Sequence
  Description of Artificial Sequence: Synthetic oligonucleotide
  Antisense strand to SEQ ID NO: 238614
acaacuccauggcaaacuc

SEQ ID NO: 238616 - RNA, 19 nt, Artificial Sequence
  Description of Artificial Sequence: Synthetic oligonucleotide
  Sense strand starting at position 715 SEQ ID NO: 3072
cagaguguuacugggcuca

SEQ ID NO: 238617 - RNA, 19 nt, Artificial Sequence
  Description of Artificial Sequence: Synthetic oligonucleotide
  Antisense strand to SEQ ID NO: 238616
ugagcccaguaacacucug

SEQ ID NO: 238618 - RNA, 19 nt, Artificial Sequence
  Description of Artificial Sequence: Synthetic oligonucleotide
  Sense strand starting at position 757 SEQ ID NO: 3072
ggcauaucucauggcacca

SEQ ID NO: 238619 - RNA, 19 nt, Artificial Sequence
  Description of Artificial Sequence: Synthetic oligonucleotide
  Antisense strand to SEQ ID NO: 238618
uggugccaugagauaugcc

SEQ ID NO: 238620 - RNA, 19 nt, Artificial Sequence
  Description of Artificial Sequence: Synthetic oligonucleotide
  Sense strand starting at position 926 SEQ ID NO: 3072
ugagguuucuucucccuuu

SEQ ID NO: 238621 - RNA, 19 nt, Artificial Sequence
  Description of Artificial Sequence: Synthetic oligonucleotide
  Antisense strand to SEQ ID NO: 238620
aaagggagaagaaaccuca

SEQ ID NO: 238622 - RNA, 19 nt, Artificial Sequence
  Description of Artificial Sequence: Synthetic oligonucleotide
  Sense strand starting at position 978 SEQ ID NO: 3072
guugcaguuuggucugaga

SEQ ID NO: 238623 - RNA, 19 nt, Artificial Sequence
  Description of Artificial Sequence: Synthetic oligonucleotide
  Antisense strand to SEQ ID NO: 238622
ucucagaccaaacugcaac

SEQ ID NO: 238624 - RNA, 19 nt, Artificial Sequence
  Description of Artificial Sequence: Synthetic oligonucleotide
  Sense strand starting at position 1014 SEQ ID NO: 3072
ucuguugcccuuuagaaac

SEQ ID NO: 238625 - RNA, 19 nt, Artificial Sequence
  Description of Artificial Sequence: Synthetic oligonucleotide
  Antisense strand to SEQ ID NO: 238624
guuucuaaagggcaacaga

SEQ ID NO: 238626 - RNA, 19 nt, Artificial Sequence
  Description of Artificial Sequence: Synthetic oligonucleotide
  Sense strand starting at position 1062 SEQ ID NO: 3072
ucacgacucacuggucaga

SEQ ID NO: 238627 - RNA, 19 nt, Artificial Sequence
  Description of Artificial Sequence: Synthetic oligonucleotide
  Antisense strand to SEQ ID NO: 238626
ucugaccagugagucguga

SEQ ID NO: 238628 - RNA, 19 nt, Artificial Sequence
  Description of Artificial Sequence: Synthetic oligonucleotide
  Sense strand starting at position 1091 SEQ ID NO: 3072
gccgguguccguaagagga

SEQ ID NO: 238629 - RNA, 19 nt, Artificial Sequence
  Description of Artificial Sequence: Synthetic oligonucleotide
  Antisense strand to SEQ ID NO: 238628
uccucuuacggacaccggc

SEQ ID NO: 238630 - RNA, 19 nt, Artificial Sequence
  Description of Artificial Sequence: Synthetic oligonucleotide
  Sense strand starting at position 1171 SEQ ID NO: 3072
gcaucuaggacaggucaua

SEQ ID NO: 238631 - RNA, 19 nt, Artificial Sequence
  Description of Artificial Sequence: Synthetic oligonucleotide
  Antisense strand to SEQ ID NO: 238630
uaugaccuguccuagaugc

SEQ ID NO: 238632 - RNA, 19 nt, Artificial Sequence
  Description of Artificial Sequence: Synthetic oligonucleotide
  Sense strand starting at position 1266 SEQ ID NO: 3072
ggcaguuuccuuugcauua

SEQ ID NO: 238633 - RNA, 19 nt, Artificial Sequence
  Description of Artificial Sequence: Synthetic oligonucleotide
  Antisense strand to SEQ ID NO: 238632
uaaugcaaaggaaacugcc

SEQ ID NO: 238634 - RNA, 19 nt, Artificial Sequence
  Description of Artificial Sequence: Synthetic oligonucleotide
  Sense strand starting at position 1480 SEQ ID NO: 3072
cuucgaugcacaggucaga

SEQ ID NO: 238635 - RNA, 19 nt, Artificial Sequence
  Description of Artificial Sequence: Synthetic oligonucleotide
  Antisense strand to SEQ ID NO: 238634
ucugaccugugcaucgaag

SEQ ID NO: 238636 - RNA, 19 nt, Artificial Sequence
  Description of Artificial Sequence: Synthetic oligonucleotide
  Sense strand starting at position 1562 SEQ ID NO: 3072
gaguguuuccucugcuuag

SEQ ID NO: 238637 - RNA, 19 nt, Artificial Sequence
  Description of Artificial Sequence: Synthetic oligonucleotide
  Antisense strand to SEQ ID NO: 238636
cuaagcagaggaaacacuc

SEQ ID NO: 238638 - RNA, 19 nt, Artificial Sequence
  Description of Artificial Sequence: Synthetic oligonucleotide
  Sense strand starting at position 2130 SEQ ID NO: 3072
agucuugcucacggaguga

SEQ ID NO: 238639 - RNA, 19 nt, Artificial Sequence
  Description of Artificial Sequence: Synthetic oligonucleotide
  Antisense strand to SEQ ID NO: 238638
ucacuccgugagcaagacu

SEQ ID NO: 238640 - RNA, 19 nt, Artificial Sequence
  Description of Artificial Sequence: Synthetic oligonucleotide
  Sense strand starting at position 2153 SEQ ID NO: 3072
cgacucuuugaggacacuu

SEQ ID NO: 238641 - RNA, 19 nt, Artificial Sequence
  Description of Artificial Sequence: Synthetic oligonucleotide
  Antisense strand to SEQ ID NO: 238640
aaguguccucaaagagucg

SEQ ID NO: 238642 - RNA, 19 nt, Artificial Sequence
  Description of Artificial Sequence: Synthetic oligonucleotide
  Sense strand starting at position 2184 SEQ ID NO: 3072
uuguguccugcccuguaua

SEQ ID NO: 238643 - RNA, 19 nt, Artificial Sequence
  Description of Artificial Sequence: Synthetic oligonucleotide
  Antisense strand to SEQ ID NO: 238642
uauacagggcaggacacaa

SEQ ID NO: 238644 - RNA, 19 nt, Artificial Sequence
  Description of Artificial Sequence: Synthetic oligonucleotide
  Sense strand starting at position 2185 SEQ ID NO: 3072
uguguccugcccuguauaa

SEQ ID NO: 238645 - RNA, 19 nt, Artificial Sequence
  Description of Artificial Sequence: Synthetic oligonucleotide
  Antisense strand to SEQ ID NO: 238644
uuauacagggcaggacaca

SEQ ID NO: 238646 - RNA, 19 nt, Artificial Sequence
  Description of Artificial Sequence: Synthetic oligonucleotide
  Sense strand starting at position 2187 SEQ ID NO: 3072
uguccugcccuguauaaug

SEQ ID NO: 238647 - RNA, 19 nt, Artificial Sequence
  Description of Artificial Sequence: Synthetic oligonucleotide
  Antisense strand to SEQ ID NO: 238646
cauuauacagggcaggaca

SEQ ID NO: 238648 - RNA, 19 nt, Artificial Sequence
  Description of Artificial Sequence: Synthetic oligonucleotide
  Sense strand starting at position 2225 SEQ ID NO: 3072
agaauaaaucauggccuuu

SEQ ID NO: 238649 - RNA, 19 nt, Artificial Sequence
  Description of Artificial Sequence: Synthetic oligonucleotide
  Antisense strand to SEQ ID NO: 238648
aaaggccaugauuuauucu

SEQ ID NO: 238650 - RNA, 19 nt, Artificial Sequence
  Description of Artificial Sequence: Synthetic oligonucleotide
  Sense strand starting at position 2240 SEQ ID NO: 3072
cuuuaucuggagcgaggaa

SEQ ID NO: 238651 - RNA, 19 nt, Artificial Sequence
  Description of Artificial Sequence: Synthetic oligonucleotide
  Antisense strand to SEQ ID NO: 238650
uuccucgcuccagauaaag

SEQ ID NO: 238652 - RNA, 19 nt, Artificial Sequence
  Description of Artificial Sequence: Synthetic oligonucleotide
  Sense strand starting at position 2286 SEQ ID NO: 3072
cuguccuguccgugaggau

SEQ ID NO: 238653 - RNA, 19 nt, Artificial Sequence
  Description of Artificial Sequence: Synthetic oligonucleotide
  Antisense strand to SEQ ID NO: 238652
auccucacggacaggacag

SEQ ID NO: 238654 - RNA, 19 nt, Artificial Sequence
  Description of Artificial Sequence: Synthetic oligonucleotide
  Sense strand starting at position 2441 SEQ ID NO: 3072
gccucugagacugagugaa

SEQ ID NO: 238655 - RNA, 19 nt, Artificial Sequence
  Description of Artificial Sequence: Synthetic oligonucleotide
  Antisense strand to SEQ ID NO: 238654
uucacucagucucagaggc

SEQ ID NO: 238656 - RNA, 19 nt, Artificial Sequence
  Description of Artificial Sequence: Synthetic oligonucleotide
  Sense strand starting at position 2575 SEQ ID NO: 3072
guauguauguggcuagcau

SEQ ID NO: 238657 - RNA, 19 nt, Artificial Sequence
  Description of Artificial Sequence: Synthetic oligonucleotide
  Antisense strand to SEQ ID NO: 238656
augcuagccacauacauac

SEQ ID NO: 238658 - RNA, 19 nt, Artificial Sequence
  Description of Artificial Sequence: Synthetic oligonucleotide
  Sense strand starting at position 2606 SEQ ID NO: 3072
gucuuaaauuugucucuuc

SEQ ID NO: 238659 - RNA, 19 nt, Artificial Sequence
  Description of Artificial Sequence: Synthetic oligonucleotide
  Antisense strand to SEQ ID NO: 238658
gaagagacaaauuuaagac

SEQ ID NO: 238660 - RNA, 19 nt, Artificial Sequence
  Description of Artificial Sequence: Synthetic oligonucleotide
  Sense strand starting at position 2888 SEQ ID NO: 3072
gugaucuggucuguugaga

SEQ ID NO: 238661 - RNA, 19 nt, Artificial Sequence
  Description of Artificial Sequence: Synthetic oligonucleotide
  Antisense strand to SEQ ID NO: 238660
ucucaacagaccagaucac

SEQ ID NO: 238662 - RNA, 19 nt, Artificial Sequence
  Description of Artificial Sequence: Synthetic oligonucleotide
  Sense strand starting at position 2950 SEQ ID NO: 3072
caguuugucuggccugaga

SEQ ID NO: 238663 - RNA, 19 nt, Artificial Sequence
  Description of Artificial Sequence: Synthetic oligonucleotide
  Antisense strand to SEQ ID NO: 238662
ucucaggccagacaaacug

SEQ ID NO: 238664 - RNA, 19 nt, Artificial Sequence
  Description of Artificial Sequence: Synthetic oligonucleotide
  Sense strand starting at position 3157 SEQ ID NO: 3072
gggcauugaccguggugau

SEQ ID NO: 238665 - RNA, 19 nt, Artificial Sequence
  Description of Artificial Sequence: Synthetic oligonucleotide
  Antisense strand to SEQ ID NO: 238664
aucaccacggucaaugccc

SEQ ID NO: 238666 - RNA, 19 nt, Artificial Sequence
  Description of Artificial Sequence: Synthetic oligonucleotide
  Sense strand starting at position 3193 SEQ ID NO: 3072
agcugauuccugcaucuuu

SEQ ID NO: 238667 - RNA, 19 nt, Artificial Sequence
  Description of Artificial Sequence: Synthetic oligonucleotide
  Antisense strand to SEQ ID NO: 238666
aaagaugcaggaaucagcu

SEQ ID NO: 238668 - RNA, 19 nt, Artificial Sequence
  Description of Artificial Sequence: Synthetic oligonucleotide
  Sense strand starting at position 3218 SEQ ID NO: 3072
gaaauaauuccucgugggu

SEQ ID NO: 238669 - RNA, 19 nt, Artificial Sequence
  Description of Artificial Sequence: Synthetic oligonucleotide
  Antisense strand to SEQ ID NO: 238668
acccacgaggaauuauuuc

SEQ ID NO: 238670 - RNA, 19 nt, Artificial Sequence
  Description of Artificial Sequence: Synthetic oligonucleotide
  Sense strand starting at position 3221 SEQ ID NO: 3072
auaauuccucguggguuga

SEQ ID NO: 238671 - RNA, 19 nt, Artificial Sequence
  Description of Artificial Sequence: Synthetic oligonucleotide
  Antisense strand to SEQ ID NO: 238670
ucaacccacgaggaauuau

SEQ ID NO: 238672 - RNA, 19 nt, Artificial Sequence
  Description of Artificial Sequence: Synthetic oligonucleotide
  Sense strand starting at position 3234 SEQ ID NO: 3072
gguugaguguuguccugac

SEQ ID NO: 238673 - RNA, 19 nt, Artificial Sequence
  Description of Artificial Sequence: Synthetic oligonucleotide
  Antisense strand to SEQ ID NO: 238672
gucaggacaacacucaacc

SEQ ID NO: 238674 - RNA, 19 nt, Artificial Sequence
  Description of Artificial Sequence: Synthetic oligonucleotide
  Sense strand starting at position 3559 SEQ ID NO: 3072
uccucucuuguagagucau

SEQ ID NO: 238675 - RNA, 19 nt, Artificial Sequence
  Description of Artificial Sequence: Synthetic oligonucleotide
  Antisense strand to SEQ ID NO: 238674
augacucuacaagagagga

SEQ ID NO: 238676 - RNA, 19 nt, Artificial Sequence
  Description of Artificial Sequence: Synthetic oligonucleotide
  Sense strand starting at position 3587 SEQ ID NO: 3072
gaggcauucggucagcuga

SEQ ID NO: 238677 - RNA, 19 nt, Artificial Sequence
  Description of Artificial Sequence: Synthetic oligonucleotide
  Antisense strand to SEQ ID NO: 238676
ucagcugaccgaaugccuc

SEQ ID NO: 238678 - RNA, 19 nt, Artificial Sequence
  Description of Artificial Sequence: Synthetic oligonucleotide
  Sense strand starting at position 3870 SEQ ID NO: 3072
ggaucuugggucugcgauu

SEQ ID NO: 238679 - RNA, 19 nt, Artificial Sequence
  Description of Artificial Sequence: Synthetic oligonucleotide
  Antisense strand to SEQ ID NO: 238678
aaucgcagacccaagaucc

SEQ ID NO: 238680 - RNA, 19 nt, Artificial Sequence
  Description of Artificial Sequence: Synthetic oligonucleotide
  Sense strand starting at position 69 SEQ ID NO: 3073
uguggugaucugugcuugu

SEQ ID NO: 238681 - RNA, 19 nt, Artificial Sequence
  Description of Artificial Sequence: Synthetic oligonucleotide
  Antisense strand to SEQ ID NO: 238680
acaagcacagaucaccaca

SEQ ID NO: 238682 - RNA, 19 nt, Artificial Sequence
  Description of Artificial Sequence: Synthetic oligonucleotide
  Sense strand starting at position 72 SEQ ID NO: 3073
ggugaucugugcuuguagu

SEQ ID NO: 238683 - RNA, 19 nt, Artificial Sequence
  Description of Artificial Sequence: Synthetic oligonucleotide
  Antisense strand to SEQ ID NO: 238682
acuacaagcacagaucacc

SEQ ID NO: 238684 - RNA, 19 nt, Artificial Sequence
  Description of Artificial Sequence: Synthetic oligonucleotide
  Sense strand starting at position 73 SEQ ID NO: 3073
gugaucugugcuuguaguc

SEQ ID NO: 238685 - RNA, 19 nt, Artificial Sequence
  Description of Artificial Sequence: Synthetic oligonucleotide
  Antisense strand to SEQ ID NO: 238684
gacuacaagcacagaucac

SEQ ID NO: 238686 - RNA, 19 nt, Artificial Sequence
  Description of Artificial Sequence: Synthetic oligonucleotide
  Sense strand starting at position 156 SEQ ID NO: 3073
cugaaauccugccacugga

SEQ ID NO: 238687 - RNA, 19 nt, Artificial Sequence
  Description of Artificial Sequence: Synthetic oligonucleotide
  Antisense strand to SEQ ID NO: 238686
uccaguggcaggauuucag

SEQ ID NO: 238688 - RNA, 19 nt, Artificial Sequence
  Description of Artificial Sequence: Synthetic oligonucleotide
  Sense strand starting at position 242 SEQ ID NO: 3073
uaaguaaauggauggguau

SEQ ID NO: 238689 - RNA, 19 nt, Artificial Sequence
  Description of Artificial Sequence: Synthetic oligonucleotide
  Antisense strand to SEQ ID NO: 238688
auacccauccauuuacuua

SEQ ID NO: 238690 - RNA, 19 nt, Artificial Sequence
  Description of Artificial Sequence: Synthetic oligonucleotide
  Sense strand starting at position 280 SEQ ID NO: 3073
auaugucaguccuccucau

SEQ ID NO: 238691 - RNA, 19 nt, Artificial Sequence
  Description of Artificial Sequence: Synthetic oligonucleotide
  Antisense strand to SEQ ID NO: 238690
augaggaggacugacauau

SEQ ID NO: 238692 - RNA, 19 nt, Artificial Sequence
  Description of Artificial Sequence: Synthetic oligonucleotide
  Sense strand starting at position 292 SEQ ID NO: 3073
uccucauagucaucuaugu

SEQ ID NO: 238693 - RNA, 19 nt, Artificial Sequence
  Description of Artificial Sequence: Synthetic oligonucleotide
  Antisense strand to SEQ ID NO: 238692
acauagaugacuaugagga

SEQ ID NO: 238694 - RNA, 19 nt, Artificial Sequence
  Description of Artificial Sequence: Synthetic oligonucleotide
  Sense strand starting at position 297 SEQ ID NO: 3073
auagucaucuaugugauca

SEQ ID NO: 238695 - RNA, 19 nt, Artificial Sequence
  Description of Artificial Sequence: Synthetic oligonucleotide
  Antisense strand to SEQ ID NO: 238694
ugaucacauagaugacuau

SEQ ID NO: 238696 - RNA, 19 nt, Artificial Sequence
  Description of Artificial Sequence: Synthetic oligonucleotide
  Sense strand starting at position 299 SEQ ID NO: 3073
agucaucuaugugaucaau

SEQ ID NO: 238697 - RNA, 19 nt, Artificial Sequence
  Description of Artificial Sequence: Synthetic oligonucleotide
  Antisense strand to SEQ ID NO: 238696
auugaucacauagaugacu

SEQ ID NO: 238698 - RNA, 19 nt, Artificial Sequence
  Description of Artificial Sequence: Synthetic oligonucleotide
  Sense strand starting at position 359 SEQ ID NO: 3073
cuggguauaugucaacacu

SEQ ID NO: 238699 - RNA, 19 nt, Artificial Sequence
  Description of Artificial Sequence: Synthetic oligonucleotide
  Antisense strand to SEQ ID NO: 238698
aguguugacauauacccag

SEQ ID NO: 238700 - RNA, 19 nt, Artificial Sequence
  Description of Artificial Sequence: Synthetic oligonucleotide
  Sense strand starting at position 444 SEQ ID NO: 3073
uuuaguugguccucuacuu

SEQ ID NO: 238701 - RNA, 19 nt, Artificial Sequence
  Description of Artificial Sequence: Synthetic oligonucleotide
  Antisense strand to SEQ ID NO: 238700
aaguagaggaccaacuaaa

SEQ ID NO: 238702 - RNA, 19 nt, Artificial Sequence
  Description of Artificial Sequence: Synthetic oligonucleotide
  Sense strand starting at position 510 SEQ ID NO: 3073
uauguuaggcccugcuuua

SEQ ID NO: 238703 - RNA, 19 nt, Artificial Sequence
  Description of Artificial Sequence: Synthetic oligonucleotide
  Antisense strand to SEQ ID NO: 238702
uaaagcagggccuaacaua

SEQ ID NO: 238704 - RNA, 19 nt, Artificial Sequence
  Description of Artificial Sequence: Synthetic oligonucleotide
  Sense strand starting at position 752 SEQ ID NO: 3073
cucaccuguucuucuauga

SEQ ID NO: 238705 - RNA, 19 nt, Artificial Sequence
  Description of Artificial Sequence: Synthetic oligonucleotide
  Antisense strand to SEQ ID NO: 238704
ucauagaagaacaggugag

SEQ ID NO: 238706 - RNA, 19 nt, Artificial Sequence
  Description of Artificial Sequence: Synthetic oligonucleotide
  Sense strand starting at position 774 SEQ ID NO: 3073
cccugucugagucaaugga

SEQ ID NO: 238707 - RNA, 19 nt, Artificial Sequence
  Description of Artificial Sequence: Synthetic oligonucleotide
  Antisense strand to SEQ ID NO: 238706
uccauugacucagacaggg

SEQ ID NO: 238708 - RNA, 19 nt, Artificial Sequence
  Description of Artificial Sequence: Synthetic oligonucleotide
  Sense strand starting at position 778 SEQ ID NO: 3073
gucugagucaauggauuac

SEQ ID NO: 238709 - RNA, 19 nt, Artificial Sequence
  Description of Artificial Sequence: Synthetic oligonucleotide
  Antisense strand to SEQ ID NO: 238708
guaauccauugacucagac

SEQ ID NO: 238710 - RNA, 19 nt, Artificial Sequence
  Description of Artificial Sequence: Synthetic oligonucleotide
  Sense strand starting at position 789 SEQ ID NO: 3073
uggauuaccuuugugcaga

SEQ ID NO: 238711 - RNA, 19 nt, Artificial Sequence
  Description of Artificial Sequence: Synthetic oligonucleotide
  Antisense strand to SEQ ID NO: 238710
ucugcacaaagguaaucca

SEQ ID NO: 238712 - RNA, 19 nt, Artificial Sequence
  Description of Artificial Sequence: Synthetic oligonucleotide
  Sense strand starting at position 1162 SEQ ID NO: 3073
ugagccuugaccuggguaa

SEQ ID NO: 238713 - RNA, 19 nt, Artificial Sequence
  Description of Artificial Sequence: Synthetic oligonucleotide
  Antisense strand to SEQ ID NO: 238712
uuacccaggucaaggcuca

SEQ ID NO: 238714 - RNA, 19 nt, Artificial Sequence
  Description of Artificial Sequence: Synthetic oligonucleotide
  Sense strand starting at position 1186 SEQ ID NO: 3073
acugcauaugcccgacuaa

SEQ ID NO: 238715 - RNA, 19 nt, Artificial Sequence
  Description of Artificial Sequence: Synthetic oligonucleotide
  Antisense strand to SEQ ID NO: 238714
uuagucgggcauaugcagu

SEQ ID NO: 238716 - RNA, 19 nt, Artificial Sequence
  Description of Artificial Sequence: Synthetic oligonucleotide
  Sense strand starting at position 1187 SEQ ID NO: 3073
cugcauaugcccgacuaaa

SEQ ID NO: 238717 - RNA, 19 nt, Artificial Sequence
  Description of Artificial Sequence: Synthetic oligonucleotide
  Antisense strand to SEQ ID NO: 238716
uuuagucgggcauaugcag

SEQ ID NO: 238718 - RNA, 19 nt, Artificial Sequence
  Description of Artificial Sequence: Synthetic oligonucleotide
  Sense strand starting at position 1219 SEQ ID NO: 3073
gugccauguucccugggau

SEQ ID NO: 238719 - RNA, 19 nt, Artificial Sequence
  Description of Artificial Sequence: Synthetic oligonucleotide
  Antisense strand to SEQ ID NO: 238718
aucccagggaacauggcac

SEQ ID NO: 238720 - RNA, 19 nt, Artificial Sequence
  Description of Artificial Sequence: Synthetic oligonucleotide
  Sense strand starting at position 1220 SEQ ID NO: 3073
ugccauguucccugggauc

SEQ ID NO: 238721 - RNA, 19 nt, Artificial Sequence
  Description of Artificial Sequence: Synthetic oligonucleotide
  Antisense strand to SEQ ID NO: 238720
gaucccagggaacauggca

SEQ ID NO: 238722 - RNA, 19 nt, Artificial Sequence
  Description of Artificial Sequence: Synthetic oligonucleotide
  Sense strand starting at position 1599 SEQ ID NO: 3073
cuagcuuaagucuggcaaa

SEQ ID NO: 238723 - RNA, 19 nt, Artificial Sequence
  Description of Artificial Sequence: Synthetic oligonucleotide
  Antisense strand to SEQ ID NO: 238722
uuugccagacuuaagcuag

SEQ ID NO: 238724 - RNA, 19 nt, Artificial Sequence
  Description of Artificial Sequence: Synthetic oligonucleotide
  Sense strand starting at position 1683 SEQ ID NO: 3073
aggcgcaaccaugaagaaa

SEQ ID NO: 238725 - RNA, 19 nt, Artificial Sequence
  Description of Artificial Sequence: Synthetic oligonucleotide
  Antisense strand to SEQ ID NO: 238724
uuucuucaugguugcgccu

SEQ ID NO: 238726 - RNA, 19 nt, Artificial Sequence
  Description of Artificial Sequence: Synthetic oligonucleotide
  Sense strand starting at position 2034 SEQ ID NO: 3073
ggugcucucaugggacaca

SEQ ID NO: 238727 - RNA, 19 nt, Artificial Sequence
  Description of Artificial Sequence: Synthetic oligonucleotide
  Antisense strand to SEQ ID NO: 238726
ugugucccaugagagcacc

SEQ ID NO: 238728 - RNA, 19 nt, Artificial Sequence
  Description of Artificial Sequence: Synthetic oligonucleotide
  Sense strand starting at position 2209 SEQ ID NO: 3073
ucaagcauuccggagaguu

SEQ ID NO: 238729 - RNA, 19 nt, Artificial Sequence
  Description of Artificial Sequence: Synthetic oligonucleotide
  Antisense strand to SEQ ID NO: 238728
aacucuccggaaugcuuga

SEQ ID NO: 238730 - RNA, 19 nt, Artificial Sequence
  Description of Artificial Sequence: Synthetic oligonucleotide
  Sense strand starting at position 2211 SEQ ID NO: 3073
aagcauuccggagaguucu

SEQ ID NO: 238731 - RNA, 19 nt, Artificial Sequence
  Description of Artificial Sequence: Synthetic oligonucleotide
  Antisense strand to SEQ ID NO: 238730
agaacucuccggaaugcuu

SEQ ID NO: 238732 - RNA, 19 nt, Artificial Sequence
  Description of Artificial Sequence: Synthetic oligonucleotide
  Sense strand starting at position 2219 SEQ ID NO: 3073
cggagaguucugggugccu

SEQ ID NO: 238733 - RNA, 19 nt, Artificial Sequence
  Description of Artificial Sequence: Synthetic oligonucleotide
  Antisense strand to SEQ ID NO: 238732
aggcacccagaacucuccg

SEQ ID NO: 238734 - RNA, 19 nt, Artificial Sequence
  Description of Artificial Sequence: Synthetic oligonucleotide
  Sense strand starting at position 2283 SEQ ID NO: 3073
gcucucauuugcuaggaca

SEQ ID NO: 238735 - RNA, 19 nt, Artificial Sequence
  Description of Artificial Sequence: Synthetic oligonucleotide
  Antisense strand to SEQ ID NO: 238734
uguccuagcaaaugagagc

SEQ ID NO: 238736 - RNA, 19 nt, Artificial Sequence
  Description of Artificial Sequence: Synthetic oligonucleotide
  Sense strand starting at position 2467 SEQ ID NO: 3073
ugggaugagugcccacaua

SEQ ID NO: 238737 - RNA, 19 nt, Artificial Sequence
  Description of Artificial Sequence: Synthetic oligonucleotide
  Antisense strand to SEQ ID NO: 238736
uaugugggcacucauccca

SEQ ID NO: 238738 - RNA, 19 nt, Artificial Sequence
  Description of Artificial Sequence: Synthetic oligonucleotide
  Sense strand starting at position 2662 SEQ ID NO: 3073
aggcuauggugcuuuguua

SEQ ID NO: 238739 - RNA, 19 nt, Artificial Sequence
  Description of Artificial Sequence: Synthetic oligonucleotide
  Antisense strand to SEQ ID NO: 238738
uaacaaagcaccauagccu

SEQ ID NO: 238740 - RNA, 19 nt, Artificial Sequence
  Description of Artificial Sequence: Synthetic oligonucleotide
  Sense strand starting at position 2986 SEQ ID NO: 3073
ggagguggugcugauuaca

SEQ ID NO: 238741 - RNA, 19 nt, Artificial Sequence
  Description of Artificial Sequence: Synthetic oligonucleotide
  Antisense strand to SEQ ID NO: 238740
uguaaucagcaccaccucc

SEQ ID NO: 238742 - RNA, 19 nt, Artificial Sequence
  Description of Artificial Sequence: Synthetic oligonucleotide
  Sense strand starting at position 2997 SEQ ID NO: 3073
ugauuacaagcuugcugau

SEQ ID NO: 238743 - RNA, 19 nt, Artificial Sequence
  Description of Artificial Sequence: Synthetic oligonucleotide
  Antisense strand to SEQ ID NO: 238742
aucagcaagcuuguaauca

SEQ ID NO: 238744 - RNA, 19 nt, Artificial Sequence
  Description of Artificial Sequence: Synthetic oligonucleotide
  Sense strand starting at position 3052 SEQ ID NO: 3073
gacugaggguuucuagaug

SEQ ID NO: 238745 - RNA, 19 nt, Artificial Sequence
  Description of Artificial Sequence: Synthetic oligonucleotide
  Antisense strand to SEQ ID NO: 238744
caucuagaaacccucaguc

SEQ ID NO: 238746 - RNA, 19 nt, Artificial Sequence
  Description of Artificial Sequence: Synthetic oligonucleotide
  Sense strand starting at position 3155 SEQ ID NO: 3073
agagaaaugucacugggug

SEQ ID NO: 238747 - RNA, 19 nt, Artificial Sequence
  Description of Artificial Sequence: Synthetic oligonucleotide
  Antisense strand to SEQ ID NO: 238746
cacccagugacauuucucu

SEQ ID NO: 238748 - RNA, 19 nt, Artificial Sequence
  Description of Artificial Sequence: Synthetic oligonucleotide
  Sense strand starting at position 3299 SEQ ID NO: 3073
agguguucccaggguuaug

SEQ ID NO: 238749 - RNA, 19 nt, Artificial Sequence
  Description of Artificial Sequence: Synthetic oligonucleotide
  Antisense strand to SEQ ID NO: 238748
cauaacccugggaacaccu

SEQ ID NO: 238750 - RNA, 19 nt, Artificial Sequence
  Description of Artificial Sequence: Synthetic oligonucleotide
  Sense strand starting at position 3782 SEQ ID NO: 3073
aguugugaaacugguucca

SEQ ID NO: 238751 - RNA, 19 nt, Artificial Sequence
  Description of Artificial Sequence: Synthetic oligonucleotide
  Antisense strand to SEQ ID NO: 238750
uggaaccaguuucacaacu

SEQ ID NO: 238752 - RNA, 19 nt, Artificial Sequence
  Description of Artificial Sequence: Synthetic oligonucleotide
  Sense strand starting at position 3784 SEQ ID NO: 3073
uugugaaacugguuccagu

SEQ ID NO: 238753 - RNA, 19 nt, Artificial Sequence
  Description of Artificial Sequence: Synthetic oligonucleotide
  Antisense strand to SEQ ID NO: 238752
acuggaaccaguuucacaa

SEQ ID NO: 238754 - RNA, 19 nt, Artificial Sequence
  Description of Artificial Sequence: Synthetic oligonucleotide
  Sense strand starting at position 3797 SEQ ID NO: 3073
uccaguguccagugggaaa

SEQ ID NO: 238755 - RNA, 19 nt, Artificial Sequence
  Description of Artificial Sequence: Synthetic oligonucleotide
  Antisense strand to SEQ ID NO: 238754
uuucccacuggacacugga

SEQ ID NO: 238756 - RNA, 19 nt, Artificial Sequence
  Description of Artificial Sequence: Synthetic oligonucleotide
  Sense strand starting at position 3843 SEQ ID NO: 3073
ccagcugcuguuugaugaa

SEQ ID NO: 238757 - RNA, 19 nt, Artificial Sequence
  Description of Artificial Sequence: Synthetic oligonucleotide
  Antisense strand to SEQ ID NO: 238756
uucaucaaacagcagcugg

SEQ ID NO: 238758 - RNA, 19 nt, Artificial Sequence
  Description of Artificial Sequence: Synthetic oligonucleotide
  Sense strand starting at position 3935 SEQ ID NO: 3073
gcuggaguuuggagaaguu

SEQ ID NO: 238759 - RNA, 19 nt, Artificial Sequence
  Description of Artificial Sequence: Synthetic oligonucleotide
  Antisense strand to SEQ ID NO: 238758
aacuucuccaaacuccagc

SEQ ID NO: 238760 - RNA, 19 nt, Artificial Sequence
  Description of Artificial Sequence: Synthetic oligonucleotide
  Sense strand starting at position 97 SEQ ID NO: 3074
gccugucuuccucgacaga

SEQ ID NO: 238761 - RNA, 19 nt, Artificial Sequence
  Description of Artificial Sequence: Synthetic oligonucleotide
  Antisense strand to SEQ ID NO: 238760
ucugucgaggaagacaggc

SEQ ID NO: 238762 - RNA, 19 nt, Artificial Sequence
  Description of Artificial Sequence: Synthetic oligonucleotide
  Sense strand starting at position 292 SEQ ID NO: 3074
cccuuugauucugcacuga

SEQ ID NO: 238763 - RNA, 19 nt, Artificial Sequence
  Description of Artificial Sequence: Synthetic oligonucleotide
  Antisense strand to SEQ ID NO: 238762
ucagugcagaaucaaaggg

SEQ ID NO: 238764 - RNA, 19 nt, Artificial Sequence
  Description of Artificial Sequence: Synthetic oligonucleotide
  Sense strand starting at position 297 SEQ ID NO: 3074
ugauucugcacugagugau

SEQ ID NO: 238765 - RNA, 19 nt, Artificial Sequence
  Description of Artificial Sequence: Synthetic oligonucleotide
  Antisense strand to SEQ ID NO: 238764
aucacucagugcagaauca

SEQ ID NO: 238766 - RNA, 19 nt, Artificial Sequence
  Description of Artificial Sequence: Synthetic oligonucleotide
  Sense strand starting at position 1989 SEQ ID NO: 3074
acacauuuguucuggaaac

SEQ ID NO: 238767 - RNA, 19 nt, Artificial Sequence
  Description of Artificial Sequence: Synthetic oligonucleotide
  Antisense strand to SEQ ID NO: 238766
guuuccagaacaaaugugu

SEQ ID NO: 238768 - RNA, 19 nt, Artificial Sequence
  Description of Artificial Sequence: Synthetic oligonucleotide
  Sense strand starting at position 2087 SEQ ID NO: 3074
ccugucaucucggaaaccu

SEQ ID NO: 238769 - RNA, 19 nt, Artificial Sequence
  Description of Artificial Sequence: Synthetic oligonucleotide
  Antisense strand to SEQ ID NO: 238768
agguuuccgagaugacagg

SEQ ID NO: 238770 - RNA, 19 nt, Artificial Sequence
  Description of Artificial Sequence: Synthetic oligonucleotide
  Sense strand starting at position 2398 SEQ ID NO: 3074
cccuaucuggucuagaaua

SEQ ID NO: 238771 - RNA, 19 nt, Artificial Sequence
  Description of Artificial Sequence: Synthetic oligonucleotide
  Antisense strand to SEQ ID NO: 238770
uauucuagaccagauaggg

SEQ ID NO: 238772 - RNA, 19 nt, Artificial Sequence
  Description of Artificial Sequence: Synthetic oligonucleotide
  Sense strand starting at position 2400 SEQ ID NO: 3074
cuaucuggucuagaauauu

SEQ ID NO: 238773 - RNA, 19 nt, Artificial Sequence
  Description of Artificial Sequence: Synthetic oligonucleotide
  Antisense strand to SEQ ID NO: 238772
aauauucuagaccagauag

SEQ ID NO: 238774 - RNA, 19 nt, Artificial Sequence
  Description of Artificial Sequence: Synthetic oligonucleotide
  Sense strand starting at position 2441 SEQ ID NO: 3074
gcggacaucuuccuucuga

SEQ ID NO: 238775 - RNA, 19 nt, Artificial Sequence
  Description of Artificial Sequence: Synthetic oligonucleotide
  Antisense strand to SEQ ID NO: 238774
ucagaaggaagauguccgc

SEQ ID NO: 238776 - RNA, 19 nt, Artificial Sequence
  Description of Artificial Sequence: Synthetic oligonucleotide
  Sense strand starting at position 2647 SEQ ID NO: 3074
ccacuuuacagcgguggaa

SEQ ID NO: 238777 - RNA, 19 nt, Artificial Sequence
  Description of Artificial Sequence: Synthetic oligonucleotide
  Antisense strand to SEQ ID NO: 238776
uuccaccgcuguaaagugg

SEQ ID NO: 238778 - RNA, 19 nt, Artificial Sequence
  Description of Artificial Sequence: Synthetic oligonucleotide
  Sense strand starting at position 2954 SEQ ID NO: 3074
ggccaugauguucauugga

SEQ ID NO: 238779 - RNA, 19 nt, Artificial Sequence
  Description of Artificial Sequence: Synthetic oligonucleotide
  Antisense strand to SEQ ID NO: 238778
uccaaugaacaucauggcc

SEQ ID NO: 238780 - RNA, 19 nt, Artificial Sequence
  Description of Artificial Sequence: Synthetic oligonucleotide
  Sense strand starting at position 3413 SEQ ID NO: 3074
ggauucuucugggcugugu

SEQ ID NO: 238781 - RNA, 19 nt, Artificial Sequence
  Description of Artificial Sequence: Synthetic oligonucleotide
  Antisense strand to SEQ ID NO: 238780
acacagcccagaagaaucc

SEQ ID NO: 238782 - RNA, 19 nt, Artificial Sequence
  Description of Artificial Sequence: Synthetic oligonucleotide
  Sense strand starting at position 3463 SEQ ID NO: 3074
cucugacugucucugggaa

SEQ ID NO: 238783 - RNA, 19 nt, Artificial Sequence
  Description of Artificial Sequence: Synthetic oligonucleotide
  Antisense strand to SEQ ID NO: 238782
uucccagagacagucagag

SEQ ID NO: 238784 - RNA, 19 nt, Artificial Sequence
  Description of Artificial Sequence: Synthetic oligonucleotide
  Sense strand starting at position 3666 SEQ ID NO: 3074
gagcgcuguuucucuccua

SEQ ID NO: 238785 - RNA, 19 nt, Artificial Sequence
  Description of Artificial Sequence: Synthetic oligonucleotide
  Antisense strand to SEQ ID NO: 238784
uaggagagaaacagcgcuc

SEQ ID NO: 238786 - RNA, 19 nt, Artificial Sequence
  Description of Artificial Sequence: Synthetic oligonucleotide
  Sense strand starting at position 104 SEQ ID NO: 3075
gagcucccaugucuuaaga

SEQ ID NO: 238787 - RNA, 19 nt, Artificial Sequence
  Description of Artificial Sequence: Synthetic oligonucleotide
  Antisense strand to SEQ ID NO: 238786
ucuuaagacaugggagcuc

SEQ ID NO: 238788 - RNA, 19 nt, Artificial Sequence
  Description of Artificial Sequence: Synthetic oligonucleotide
  Sense strand starting at position 113 SEQ ID NO: 3075
ugucuuaagauugggucga

SEQ ID NO: 238789 - RNA, 19 nt, Artificial Sequence
  Description of Artificial Sequence: Synthetic oligonucleotide
  Antisense strand to SEQ ID NO: 238788
ucgacccaaucuuaagaca

SEQ ID NO: 238790 - RNA, 19 nt, Artificial Sequence
  Description of Artificial Sequence: Synthetic oligonucleotide
  Sense strand starting at position 117 SEQ ID NO: 3075
uuaagauugggucgaagag

SEQ ID NO: 238791 - RNA, 19 nt, Artificial Sequence
  Description of Artificial Sequence: Synthetic oligonucleotide
  Antisense strand to SEQ ID NO: 238790
cucuucgacccaaucuuaa

SEQ ID NO: 238792 - RNA, 19 nt, Artificial Sequence
  Description of Artificial Sequence: Synthetic oligonucleotide
  Sense strand starting at position 181 SEQ ID NO: 3075
gccugcuuucuccaaagga

SEQ ID NO: 238793 - RNA, 19 nt, Artificial Sequence
  Description of Artificial Sequence: Synthetic oligonucleotide
  Antisense strand to SEQ ID NO: 238792
uccuuuggagaaagcaggc

SEQ ID NO: 238794 - RNA, 19 nt, Artificial Sequence
  Description of Artificial Sequence: Synthetic oligonucleotide
  Sense strand starting at position 261 SEQ ID NO: 3075
auaagacgguucccuguau

SEQ ID NO: 238795 - RNA, 19 nt, Artificial Sequence
  Description of Artificial Sequence: Synthetic oligonucleotide
  Antisense strand to SEQ ID NO: 238794
auacagggaaccgucuuau

SEQ ID NO: 238796 - RNA, 19 nt, Artificial Sequence
  Description of Artificial Sequence: Synthetic oligonucleotide
  Sense strand starting at position 272 SEQ ID NO: 3075
cccuguaucucugcagaac

SEQ ID NO: 238797 - RNA, 19 nt, Artificial Sequence
  Description of Artificial Sequence: Synthetic oligonucleotide
  Antisense strand to SEQ ID NO: 238796
guucugcagagauacaggg

SEQ ID NO: 238798 - RNA, 19 nt, Artificial Sequence
  Description of Artificial Sequence: Synthetic oligonucleotide
  Sense strand starting at position 273 SEQ ID NO: 3075
ccuguaucucugcagaacu

SEQ ID NO: 238799 - RNA, 19 nt, Artificial Sequence
  Description of Artificial Sequence: Synthetic oligonucleotide
  Antisense strand to SEQ ID NO: 238798
aguucugcagagauacagg

SEQ ID NO: 238800 - RNA, 19 nt, Artificial Sequence
  Description of Artificial Sequence: Synthetic oligonucleotide
  Sense strand starting at position 326 SEQ ID NO: 3075
uuaccuaauuuguccguca

SEQ ID NO: 238801 - RNA, 19 nt, Artificial Sequence
  Description of Artificial Sequence: Synthetic oligonucleotide
  Antisense strand to SEQ ID NO: 238800
ugacggacaaauuagguaa

SEQ ID NO: 238802 - RNA, 19 nt, Artificial Sequence
  Description of Artificial Sequence: Synthetic oligonucleotide
  Sense strand starting at position 328 SEQ ID NO: 3075
accuaauuuguccgucaua

SEQ ID NO: 238803 - RNA, 19 nt, Artificial Sequence
  Description of Artificial Sequence: Synthetic oligonucleotide
  Antisense strand to SEQ ID NO: 238802
uaugacggacaaauuaggu

SEQ ID NO: 238804 - RNA, 19 nt, Artificial Sequence
  Description of Artificial Sequence: Synthetic oligonucleotide
  Sense strand starting at position 329 SEQ ID NO: 3075
ccuaauuuguccgucauau

SEQ ID NO: 238805 - RNA, 19 nt, Artificial Sequence
  Description of Artificial Sequence: Synthetic oligonucleotide
  Antisense strand to SEQ ID NO: 238804
auaugacggacaaauuagg

SEQ ID NO: 238806 - RNA, 19 nt, Artificial Sequence
  Description of Artificial Sequence: Synthetic oligonucleotide
  Sense strand starting at position 338 SEQ ID NO: 3075
uccgucauauucucuagua

SEQ ID NO: 238807 - RNA, 19 nt, Artificial Sequence
  Description of Artificial Sequence: Synthetic oligonucleotide
  Antisense strand to SEQ ID NO: 238806
uacuagagaauaugacgga

SEQ ID NO: 238808 - RNA, 19 nt, Artificial Sequence
  Description of Artificial Sequence: Synthetic oligonucleotide
  Sense strand starting at position 339 SEQ ID NO: 3075
ccgucauauucucuaguau

SEQ ID NO: 238809 - RNA, 19 nt, Artificial Sequence
  Description of Artificial Sequence: Synthetic oligonucleotide
  Antisense strand to SEQ ID NO: 238808
auacuagagaauaugacgg

SEQ ID NO: 238810 - RNA, 19 nt, Artificial Sequence
  Description of Artificial Sequence: Synthetic oligonucleotide
  Sense strand starting at position 340 SEQ ID NO: 3075
cgucauauucucuaguauu

SEQ ID NO: 238811 - RNA, 19 nt, Artificial Sequence
  Description of Artificial Sequence: Synthetic oligonucleotide
  Antisense strand to SEQ ID NO: 238810
aauacuagagaauaugacg

SEQ ID NO: 238812 - RNA, 19 nt, Artificial Sequence
  Description of Artificial Sequence: Synthetic oligonucleotide
  Sense strand starting at position 571 SEQ ID NO: 3075
gcaauucuagggcaagacu

SEQ ID NO: 238813 - RNA, 19 nt, Artificial Sequence
  Description of Artificial Sequence: Synthetic oligonucleotide
  Antisense strand to SEQ ID NO: 238812
agucuugcccuagaauugc

SEQ ID NO: 238814 - RNA, 19 nt, Artificial Sequence
  Description of Artificial Sequence: Synthetic oligonucleotide
  Sense strand starting at position 668 SEQ ID NO: 3075
aggacucacucaggaagau

SEQ ID NO: 238815 - RNA, 19 nt, Artificial Sequence
  Description of Artificial Sequence: Synthetic oligonucleotide
  Antisense strand to SEQ ID NO: 238814
aucuuccugagugaguccu

SEQ ID NO: 238816 - RNA, 19 nt, Artificial Sequence
  Description of Artificial Sequence: Synthetic oligonucleotide
  Sense strand starting at position 1986 SEQ ID NO: 3075
gucagcgauuaaucauuaa

SEQ ID NO: 238817 - RNA, 19 nt, Artificial Sequence
  Description of Artificial Sequence: Synthetic oligonucleotide
  Antisense strand to SEQ ID NO: 238816
uuaaugauuaaucgcugac

SEQ ID NO: 238818 - RNA, 19 nt, Artificial Sequence
  Description of Artificial Sequence: Synthetic oligonucleotide
  Sense strand starting at position 1989 SEQ ID NO: 3075
agcgauuaaucauuaacca

SEQ ID NO: 238819 - RNA, 19 nt, Artificial Sequence
  Description of Artificial Sequence: Synthetic oligonucleotide
  Antisense strand to SEQ ID NO: 238818
ugguuaaugauuaaucgcu

SEQ ID NO: 238820 - RNA, 19 nt, Artificial Sequence
  Description of Artificial Sequence: Synthetic oligonucleotide
  Sense strand starting at position 1990 SEQ ID NO: 3075
gcgauuaaucauuaaccac

SEQ ID NO: 238821 - RNA, 19 nt, Artificial Sequence
  Description of Artificial Sequence: Synthetic oligonucleotide
  Antisense strand to SEQ ID NO: 238820
gugguuaaugauuaaucgc

SEQ ID NO: 238822 - RNA, 19 nt, Artificial Sequence
  Description of Artificial Sequence: Synthetic oligonucleotide
  Sense strand starting at position 2055 SEQ ID NO: 3075
ggguuugacucagcacaua

SEQ ID NO: 238823 - RNA, 19 nt, Artificial Sequence
  Description of Artificial Sequence: Synthetic oligonucleotide
  Antisense strand to SEQ ID NO: 238822
uaugugcugagucaaaccc

SEQ ID NO: 238824 - RNA, 19 nt, Artificial Sequence
  Description of Artificial Sequence: Synthetic oligonucleotide
  Sense strand starting at position 2072 SEQ ID NO: 3075
uaggcacggucccugaaau

SEQ ID NO: 238825 - RNA, 19 nt, Artificial Sequence
  Description of Artificial Sequence: Synthetic oligonucleotide
  Antisense strand to SEQ ID NO: 238824
auuucagggaccgugccua

SEQ ID NO: 238826 - RNA, 19 nt, Artificial Sequence
  Description of Artificial Sequence: Synthetic oligonucleotide
  Sense strand starting at position 2695 SEQ ID NO: 3075
ggagcugugccuagaacgu

SEQ ID NO: 238827 - RNA, 19 nt, Artificial Sequence
  Description of Artificial Sequence: Synthetic oligonucleotide
  Antisense strand to SEQ ID NO: 238826
acguucuaggcacagcucc

SEQ ID NO: 238828 - RNA, 19 nt, Artificial Sequence
  Description of Artificial Sequence: Synthetic oligonucleotide
  Sense strand starting at position 2742 SEQ ID NO: 3075
ugacaaggccgucauguaa

SEQ ID NO: 238829 - RNA, 19 nt, Artificial Sequence
  Description of Artificial Sequence: Synthetic oligonucleotide
  Antisense strand to SEQ ID NO: 238828
uuacaugacggccuuguca

SEQ ID NO: 238830 - RNA, 19 nt, Artificial Sequence
  Description of Artificial Sequence: Synthetic oligonucleotide
  Sense strand starting at position 2864 SEQ ID NO: 3075
uuaugcguucuaggauguu

SEQ ID NO: 238831 - RNA, 19 nt, Artificial Sequence
  Description of Artificial Sequence: Synthetic oligonucleotide
  Antisense strand to SEQ ID NO: 238830
aacauccuagaacgcauaa

SEQ ID NO: 238832 - RNA, 19 nt, Artificial Sequence
  Description of Artificial Sequence: Synthetic oligonucleotide
  Sense strand starting at position 2913 SEQ ID NO: 3075
agccaaaugucuccagaca

SEQ ID NO: 238833 - RNA, 19 nt, Artificial Sequence
  Description of Artificial Sequence: Synthetic oligonucleotide
  Antisense strand to SEQ ID NO: 238832
ugucuggagacauuuggcu

SEQ ID NO: 238834 - RNA, 19 nt, Artificial Sequence
  Description of Artificial Sequence: Synthetic oligonucleotide
  Sense strand starting at position 2914 SEQ ID NO: 3075
gccaaaugucuccagacau

SEQ ID NO: 238835 - RNA, 19 nt, Artificial Sequence
  Description of Artificial Sequence: Synthetic oligonucleotide
  Antisense strand to SEQ ID NO: 238834
augucuggagacauuuggc

SEQ ID NO: 238836 - RNA, 19 nt, Artificial Sequence
  Description of Artificial Sequence: Synthetic oligonucleotide
  Sense strand starting at position 2970 SEQ ID NO: 3075
gucagaaccucugccucaa

SEQ ID NO: 238837 - RNA, 19 nt, Artificial Sequence
  Description of Artificial Sequence: Synthetic oligonucleotide
  Antisense strand to SEQ ID NO: 238836
uugaggcagagguucugac

SEQ ID NO: 238838 - RNA, 19 nt, Artificial Sequence
  Description of Artificial Sequence: Synthetic oligonucleotide
  Sense strand starting at position 3158 SEQ ID NO: 3075
gagugagagcaaggucuua

SEQ ID NO: 238839 - RNA, 19 nt, Artificial Sequence
  Description of Artificial Sequence: Synthetic oligonucleotide
  Antisense strand to SEQ ID NO: 238838
uaagaccuugcucucacuc

SEQ ID NO: 238840 - RNA, 19 nt, Artificial Sequence
  Description of Artificial Sequence: Synthetic oligonucleotide
  Sense strand starting at position 3171 SEQ ID NO: 3075
gucuuacucagauguggaa

SEQ ID NO: 238841 - RNA, 19 nt, Artificial Sequence
  Description of Artificial Sequence: Synthetic oligonucleotide
  Antisense strand to SEQ ID NO: 238840
uuccacaucugaguaagac

SEQ ID NO: 238842 - RNA, 19 nt, Artificial Sequence
  Description of Artificial Sequence: Synthetic oligonucleotide
  Sense strand starting at position 3174 SEQ ID NO: 3075
uuacucagauguggaauau

SEQ ID NO: 238843 - RNA, 19 nt, Artificial Sequence
  Description of Artificial Sequence: Synthetic oligonucleotide
  Antisense strand to SEQ ID NO: 238842
auauuccacaucugaguaa

SEQ ID NO: 238844 - RNA, 19 nt, Artificial Sequence
  Description of Artificial Sequence: Synthetic oligonucleotide
  Sense strand starting at position 3338 SEQ ID NO: 3075
uguugcaauguagauugaa

SEQ ID NO: 238845 - RNA, 19 nt, Artificial Sequence
  Description of Artificial Sequence: Synthetic oligonucleotide
  Antisense strand to SEQ ID NO: 238844
uucaaucuacauugcaaca

SEQ ID NO: 238846 - RNA, 19 nt, Artificial Sequence
  Description of Artificial Sequence: Synthetic oligonucleotide
  Sense strand starting at position 3429 SEQ ID NO: 3075
uuugcuugacugugguaau

SEQ ID NO: 238847 - RNA, 19 nt, Artificial Sequence
  Description of Artificial Sequence: Synthetic oligonucleotide
  Antisense strand to SEQ ID NO: 238846
auuaccacagucaagcaaa

SEQ ID NO: 238848 - RNA, 19 nt, Artificial Sequence
  Description of Artificial Sequence: Synthetic oligonucleotide
  Sense strand starting at position 3509 SEQ ID NO: 3075
aaugguuagugacagacuu

SEQ ID NO: 238849 - RNA, 19 nt, Artificial Sequence
  Description of Artificial Sequence: Synthetic oligonucleotide
  Antisense strand to SEQ ID NO: 238848
aagucugucacuaaccauu

SEQ ID NO: 238850 - RNA, 19 nt, Artificial Sequence
  Description of Artificial Sequence: Synthetic oligonucleotide
  Sense strand starting at position 3517 SEQ ID NO: 3075
gugacagacuuggaaauua

SEQ ID NO: 238851 - RNA, 19 nt, Artificial Sequence
  Description of Artificial Sequence: Synthetic oligonucleotide
  Antisense strand to SEQ ID NO: 238850
uaauuuccaagucugucac

SEQ ID NO: 238852 - RNA, 19 nt, Artificial Sequence
  Description of Artificial Sequence: Synthetic oligonucleotide
  Sense strand starting at position 3555 SEQ ID NO: 3075
cugaguuuguacuccuaau

SEQ ID NO: 238853 - RNA, 19 nt, Artificial Sequence
  Description of Artificial Sequence: Synthetic oligonucleotide
  Antisense strand to SEQ ID NO: 238852
auuaggaguacaaacucag

SEQ ID NO: 238854 - RNA, 19 nt, Artificial Sequence
  Description of Artificial Sequence: Synthetic oligonucleotide
  Sense strand starting at position 3565 SEQ ID NO: 3075
acuccuaauucugggaaug

SEQ ID NO: 238855 - RNA, 19 nt, Artificial Sequence
  Description of Artificial Sequence: Synthetic oligonucleotide
  Antisense strand to SEQ ID NO: 238854
cauucccagaauuaggagu

SEQ ID NO: 238856 - RNA, 19 nt, Artificial Sequence
  Description of Artificial Sequence: Synthetic oligonucleotide
  Sense strand starting at position 3567 SEQ ID NO: 3075
uccuaauucugggaaugca

SEQ ID NO: 238857 - RNA, 19 nt, Artificial Sequence
  Description of Artificial Sequence: Synthetic oligonucleotide
  Antisense strand to SEQ ID NO: 238856
ugcauucccagaauuagga

SEQ ID NO: 238858 - RNA, 19 nt, Artificial Sequence
  Description of Artificial Sequence: Synthetic oligonucleotide
  Sense strand starting at position 3583 SEQ ID NO: 3075
gcaguaggugcuuaggaaa

SEQ ID NO: 238859 - RNA, 19 nt, Artificial Sequence
  Description of Artificial Sequence: Synthetic oligonucleotide
  Antisense strand to SEQ ID NO: 238858
uuuccuaagcaccuacugc

SEQ ID NO: 238860 - RNA, 19 nt, Artificial Sequence
  Description of Artificial Sequence: Synthetic oligonucleotide
  Sense strand starting at position 3624 SEQ ID NO: 3075
gaaacaugggacuguacuu

SEQ ID NO: 238861 - RNA, 19 nt, Artificial Sequence
  Description of Artificial Sequence: Synthetic oligonucleotide
  Antisense strand to SEQ ID NO: 238860
aaguacagucccauguuuc

SEQ ID NO: 238862 - RNA, 19 nt, Artificial Sequence
  Description of Artificial Sequence: Synthetic oligonucleotide
  Sense strand starting at position 3969 SEQ ID NO: 3075
uggagcuauugucugauga

SEQ ID NO: 238863 - RNA, 19 nt, Artificial Sequence
  Description of Artificial Sequence: Synthetic oligonucleotide
  Antisense strand to SEQ ID NO: 238862
ucaucagacaauagcucca

SEQ ID NO: 238864 - RNA, 19 nt, Artificial Sequence
  Description of Artificial Sequence: Synthetic oligonucleotide
  Sense strand starting at position 3970 SEQ ID NO: 3075
ggagcuauugucugaugac

SEQ ID NO: 238865 - RNA, 19 nt, Artificial Sequence
  Description of Artificial Sequence: Synthetic oligonucleotide
  Antisense strand to SEQ ID NO: 238864
gucaucagacaauagcucc

SEQ ID NO: 238866 - RNA, 19 nt, Artificial Sequence
  Description of Artificial Sequence: Synthetic oligonucleotide
  Sense strand starting at position 213 SEQ ID NO: 3076
gauacuuaggcaugggaag

SEQ ID NO: 238867 - RNA, 19 nt, Artificial Sequence
  Description of Artificial Sequence: Synthetic oligonucleotide
  Antisense strand to SEQ ID NO: 238866
cuucccaugccuaaguauc

SEQ ID NO: 238868 - RNA, 19 nt, Artificial Sequence
  Description of Artificial Sequence: Synthetic oligonucleotide
  Sense strand starting at position 2021 SEQ ID NO: 3076
gggagaaauguccgucuuu

SEQ ID NO: 238869 - RNA, 19 nt, Artificial Sequence
  Description of Artificial Sequence: Synthetic oligonucleotide
  Antisense strand to SEQ ID NO: 238868
aaagacggacauuucuccc

SEQ ID NO: 238870 - RNA, 19 nt, Artificial Sequence
  Description of Artificial Sequence: Synthetic oligonucleotide
  Sense strand starting at position 2022 SEQ ID NO: 3076
ggagaaauguccgucuuug

SEQ ID NO: 238871 - RNA, 19 nt, Artificial Sequence
  Description of Artificial Sequence: Synthetic oligonucleotide
  Antisense strand to SEQ ID NO: 238870
caaagacggacauuucucc

SEQ ID NO: 238872 - RNA, 19 nt, Artificial Sequence
  Description of Artificial Sequence: Synthetic oligonucleotide
  Sense strand starting at position 2079 SEQ ID NO: 3076
cuaagcaucucuguggaga

SEQ ID NO: 238873 - RNA, 19 nt, Artificial Sequence
  Description of Artificial Sequence: Synthetic oligonucleotide
  Antisense strand to SEQ ID NO: 238872
ucuccacagagaugcuuag

SEQ ID NO: 238874 - RNA, 19 nt, Artificial Sequence
  Description of Artificial Sequence: Synthetic oligonucleotide
  Sense strand starting at position 2168 SEQ ID NO: 3076
ggguuagaguuuccaaacg

SEQ ID NO: 238875 - RNA, 19 nt, Artificial Sequence
  Description of Artificial Sequence: Synthetic oligonucleotide
  Antisense strand to SEQ ID NO: 238874
cguuuggaaacucuaaccc

SEQ ID NO: 238876 - RNA, 19 nt, Artificial Sequence
  Description of Artificial Sequence: Synthetic oligonucleotide
  Sense strand starting at position 2178 SEQ ID NO: 3076
uuccaaacgcguugaagaa

SEQ ID NO: 238877 - RNA, 19 nt, Artificial Sequence
  Description of Artificial Sequence: Synthetic oligonucleotide
  Antisense strand to SEQ ID NO: 238876
uucuucaacgcguuuggaa

SEQ ID NO: 238878 - RNA, 19 nt, Artificial Sequence
  Description of Artificial Sequence: Synthetic oligonucleotide
  Sense strand starting at position 2179 SEQ ID NO: 3076
uccaaacgcguugaagaaa

SEQ ID NO: 238879 - RNA, 19 nt, Artificial Sequence
  Description of Artificial Sequence: Synthetic oligonucleotide
  Antisense strand to SEQ ID NO: 238878
uuucuucaacgcguuugga

SEQ ID NO: 238880 - RNA, 19 nt, Artificial Sequence
  Description of Artificial Sequence: Synthetic oligonucleotide
  Sense strand starting at position 2211 SEQ ID NO: 3076
cuuuacagguguuucuaaa

SEQ ID NO: 238881 - RNA, 19 nt, Artificial Sequence
  Description of Artificial Sequence: Synthetic oligonucleotide
  Antisense strand to SEQ ID NO: 238880
uuuagaaacaccuguaaag

SEQ ID NO: 238882 - RNA, 19 nt, Artificial Sequence
  Description of Artificial Sequence: Synthetic oligonucleotide
  Sense strand starting at position 2233 SEQ ID NO: 3076
guuuauuuaccacguggga

SEQ ID NO: 238883 - RNA, 19 nt, Artificial Sequence
  Description of Artificial Sequence: Synthetic oligonucleotide
  Antisense strand to SEQ ID NO: 238882
ucccacgugguaaauaaac

SEQ ID NO: 238884 - RNA, 19 nt, Artificial Sequence
  Description of Artificial Sequence: Synthetic oligonucleotide
  Sense strand starting at position 2247 SEQ ID NO: 3076
ugggacaaagcuugauauu

SEQ ID NO: 238885 - RNA, 19 nt, Artificial Sequence
  Description of Artificial Sequence: Synthetic oligonucleotide
  Antisense strand to SEQ ID NO: 238884
aauaucaagcuuuguccca

SEQ ID NO: 238886 - RNA, 19 nt, Artificial Sequence
  Description of Artificial Sequence: Synthetic oligonucleotide
  Sense strand starting at position 2267 SEQ ID NO: 3076
acaaauacugucugagucu

SEQ ID NO: 238887 - RNA, 19 nt, Artificial Sequence
  Description of Artificial Sequence: Synthetic oligonucleotide
  Antisense strand to SEQ ID NO: 238886
agacucagacaguauuugu

SEQ ID NO: 238888 - RNA, 19 nt, Artificial Sequence
  Description of Artificial Sequence: Synthetic oligonucleotide
  Sense strand starting at position 2335 SEQ ID NO: 3076
ggaaguacacuuuguaguu

SEQ ID NO: 238889 - RNA, 19 nt, Artificial Sequence
  Description of Artificial Sequence: Synthetic oligonucleotide
  Antisense strand to SEQ ID NO: 238888
aacuacaaaguguacuucc

SEQ ID NO: 238890 - RNA, 19 nt, Artificial Sequence
  Description of Artificial Sequence: Synthetic oligonucleotide
  Sense strand starting at position 2336 SEQ ID NO: 3076
gaaguacacuuuguaguua

SEQ ID NO: 238891 - RNA, 19 nt, Artificial Sequence
  Description of Artificial Sequence: Synthetic oligonucleotide
  Antisense strand to SEQ ID NO: 238890
uaacuacaaaguguacuuc

SEQ ID NO: 238892 - RNA, 19 nt, Artificial Sequence
  Description of Artificial Sequence: Synthetic oligonucleotide
  Sense strand starting at position 2348 SEQ ID NO: 3076
guaguuaguguuuauguaa

SEQ ID NO: 238893 - RNA, 19 nt, Artificial Sequence
  Description of Artificial Sequence: Synthetic oligonucleotide
  Antisense strand to SEQ ID NO: 238892
uuacauaaacacuaacuac

SEQ ID NO: 238894 - RNA, 19 nt, Artificial Sequence
  Description of Artificial Sequence: Synthetic oligonucleotide
  Sense strand starting at position 2393 SEQ ID NO: 3076
gaaugaagccuuggucuag

SEQ ID NO: 238895 - RNA, 19 nt, Artificial Sequence
  Description of Artificial Sequence: Synthetic oligonucleotide
  Antisense strand to SEQ ID NO: 238894
cuagaccaaggcuucauuc

SEQ ID NO: 238896 - RNA, 19 nt, Artificial Sequence
  Description of Artificial Sequence: Synthetic oligonucleotide
  Sense strand starting at position 2397 SEQ ID NO: 3076
gaagccuuggucuagccaa

SEQ ID NO: 238897 - RNA, 19 nt, Artificial Sequence
  Description of Artificial Sequence: Synthetic oligonucleotide
  Antisense strand to SEQ ID NO: 238896
uuggcuagaccaaggcuuc

SEQ ID NO: 238898 - RNA, 19 nt, Artificial Sequence
  Description of Artificial Sequence: Synthetic oligonucleotide
  Sense strand starting at position 2411 SEQ ID NO: 3076
gccaacuaacguuagaauc

SEQ ID NO: 238899 - RNA, 19 nt, Artificial Sequence
  Description of Artificial Sequence: Synthetic oligonucleotide
  Antisense strand to SEQ ID NO: 238898
gauucuaacguuaguuggc

SEQ ID NO: 238900 - RNA, 19 nt, Artificial Sequence
  Description of Artificial Sequence: Synthetic oligonucleotide
  Sense strand starting at position 2532 SEQ ID NO: 3076
gaugcuuguugaguagaug

SEQ ID NO: 238901 - RNA, 19 nt, Artificial Sequence
  Description of Artificial Sequence: Synthetic oligonucleotide
  Antisense strand to SEQ ID NO: 238900
caucuacucaacaagcauc

SEQ ID NO: 238902 - RNA, 19 nt, Artificial Sequence
  Description of Artificial Sequence: Synthetic oligonucleotide
  Sense strand starting at position 2533 SEQ ID NO: 3076
augcuuguugaguagauga

SEQ ID NO: 238903 - RNA, 19 nt, Artificial Sequence
  Description of Artificial Sequence: Synthetic oligonucleotide
  Antisense strand to SEQ ID NO: 238902
ucaucuacucaacaagcau

SEQ ID NO: 238904 - RNA, 19 nt, Artificial Sequence
  Description of Artificial Sequence: Synthetic oligonucleotide
  Sense strand starting at position 2535 SEQ ID NO: 3076
gcuuguugaguagaugaau

SEQ ID NO: 238905 - RNA, 19 nt, Artificial Sequence
  Description of Artificial Sequence: Synthetic oligonucleotide
  Antisense strand to SEQ ID NO: 238904
auucaucuacucaacaagc

SEQ ID NO: 238906 - RNA, 19 nt, Artificial Sequence
  Description of Artificial Sequence: Synthetic oligonucleotide
  Sense strand starting at position 2552 SEQ ID NO: 3076
auaagugauaguugaugcu

SEQ ID NO: 238907 - RNA, 19 nt, Artificial Sequence
  Description of Artificial Sequence: Synthetic oligonucleotide
  Antisense strand to SEQ ID NO: 238906
agcaucaacuaucacuuau

SEQ ID NO: 238908 - RNA, 19 nt, Artificial Sequence
  Description of Artificial Sequence: Synthetic oligonucleotide
  Sense strand starting at position 2833 SEQ ID NO: 3076
aagaaauuguaagucuguu

SEQ ID NO: 238909 - RNA, 19 nt, Artificial Sequence
  Description of Artificial Sequence: Synthetic oligonucleotide
  Antisense strand to SEQ ID NO: 238908
aacagacuuacaauuucuu

SEQ ID NO: 238910 - RNA, 19 nt, Artificial Sequence
  Description of Artificial Sequence: Synthetic oligonucleotide
  Sense strand starting at position 2880 SEQ ID NO: 3076
ucacauggauaaguguaaa

SEQ ID NO: 238911 - RNA, 19 nt, Artificial Sequence
  Description of Artificial Sequence: Synthetic oligonucleotide
  Antisense strand to SEQ ID NO: 238910
uuuacacuuauccauguga

SEQ ID NO: 238912 - RNA, 19 nt, Artificial Sequence
  Description of Artificial Sequence: Synthetic oligonucleotide
  Sense strand starting at position 2967 SEQ ID NO: 3076
ugguaacaucuuggauaac

SEQ ID NO: 238913 - RNA, 19 nt, Artificial Sequence
  Description of Artificial Sequence: Synthetic oligonucleotide
  Antisense strand to SEQ ID NO: 238912
guuauccaagauguuacca

SEQ ID NO: 238914 - RNA, 19 nt, Artificial Sequence
  Description of Artificial Sequence: Synthetic oligonucleotide
  Sense strand starting at position 3283 SEQ ID NO: 3076
gcugucgugagcuaagaag

SEQ ID NO: 238915 - RNA, 19 nt, Artificial Sequence
  Description of Artificial Sequence: Synthetic oligonucleotide
  Antisense strand to SEQ ID NO: 238914
cuucuuagcucacgacagc

SEQ ID NO: 238916 - RNA, 19 nt, Artificial Sequence
  Description of Artificial Sequence: Synthetic oligonucleotide
  Sense strand starting at position 3534 SEQ ID NO: 3076
uggacaucuggcuguugga

SEQ ID NO: 238917 - RNA, 19 nt, Artificial Sequence
  Description of Artificial Sequence: Synthetic oligonucleotide
  Antisense strand to SEQ ID NO: 238916
uccaacagccagaugucca

SEQ ID NO: 238918 - RNA, 19 nt, Artificial Sequence
  Description of Artificial Sequence: Synthetic oligonucleotide
  Sense strand starting at position 3550 SEQ ID NO: 3076
ggaugcaccucuucuugua

SEQ ID NO: 238919 - RNA, 19 nt, Artificial Sequence
  Description of Artificial Sequence: Synthetic oligonucleotide
  Antisense strand to SEQ ID NO: 238918
uacaagaagaggugcaucc

SEQ ID NO: 238920 - RNA, 19 nt, Artificial Sequence
  Description of Artificial Sequence: Synthetic oligonucleotide
  Sense strand starting at position 3581 SEQ ID NO: 3076
uuucuaaauuccuuguggu

SEQ ID NO: 238921 - RNA, 19 nt, Artificial Sequence
  Description of Artificial Sequence: Synthetic oligonucleotide
  Antisense strand to SEQ ID NO: 238920
accacaaggaauuuagaaa

SEQ ID NO: 238922 - RNA, 19 nt, Artificial Sequence
  Description of Artificial Sequence: Synthetic oligonucleotide
  Sense strand starting at position 3582 SEQ ID NO: 3076
uucuaaauuccuugugguc

SEQ ID NO: 238923 - RNA, 19 nt, Artificial Sequence
  Description of Artificial Sequence: Synthetic oligonucleotide
  Antisense strand to SEQ ID NO: 238922
gaccacaaggaauuuagaa

SEQ ID NO: 238924 - RNA, 19 nt, Artificial Sequence
  Description of Artificial Sequence: Synthetic oligonucleotide
  Sense strand starting at position 3624 SEQ ID NO: 3076
agaggaaugugggcaaugu

SEQ ID NO: 238925 - RNA, 19 nt, Artificial Sequence
  Description of Artificial Sequence: Synthetic oligonucleotide
  Antisense strand to SEQ ID NO: 238924
acauugcccacauuccucu

SEQ ID NO: 238926 - RNA, 19 nt, Artificial Sequence
  Description of Artificial Sequence: Synthetic oligonucleotide
  Sense strand starting at position 3625 SEQ ID NO: 3076
gaggaaugugggcaaugua

SEQ ID NO: 238927 - RNA, 19 nt, Artificial Sequence
  Description of Artificial Sequence: Synthetic oligonucleotide
  Antisense strand to SEQ ID NO: 238926
uacauugcccacauuccuc

SEQ ID NO: 238928 - RNA, 19 nt, Artificial Sequence
  Description of Artificial Sequence: Synthetic oligonucleotide
  Sense strand starting at position 3628 SEQ ID NO: 3076
gaaugugggcaauguaaga

SEQ ID NO: 238929 - RNA, 19 nt, Artificial Sequence
  Description of Artificial Sequence: Synthetic oligonucleotide
  Antisense strand to SEQ ID NO: 238928
ucuuacauugcccacauuc

SEQ ID NO: 238930 - RNA, 19 nt, Artificial Sequence
  Description of Artificial Sequence: Synthetic oligonucleotide
  Sense strand starting at position 3689 SEQ ID NO: 3076
cagugucuuggugaugcua

SEQ ID NO: 238931 - RNA, 19 nt, Artificial Sequence
  Description of Artificial Sequence: Synthetic oligonucleotide
  Antisense strand to SEQ ID NO: 238930
uagcaucaccaagacacug

SEQ ID NO: 238932 - RNA, 19 nt, Artificial Sequence
  Description of Artificial Sequence: Synthetic oligonucleotide
  Sense strand starting at position 3822 SEQ ID NO: 3076
agaaaccugguguguuaau

SEQ ID NO: 238933 - RNA, 19 nt, Artificial Sequence
  Description of Artificial Sequence: Synthetic oligonucleotide
  Antisense strand to SEQ ID NO: 238932
auuaacacaccagguuucu

SEQ ID NO: 238934 - RNA, 19 nt, Artificial Sequence
  Description of Artificial Sequence: Synthetic oligonucleotide
  Sense strand starting at position 3823 SEQ ID NO: 3076
gaaaccugguguguuaauu

SEQ ID NO: 238935 - RNA, 19 nt, Artificial Sequence
  Description of Artificial Sequence: Synthetic oligonucleotide
  Antisense strand to SEQ ID NO: 238934
aauuaacacaccagguuuc

SEQ ID NO: 238936 - RNA, 19 nt, Artificial Sequence
  Description of Artificial Sequence: Synthetic oligonucleotide
  Sense strand starting at position 3848 SEQ ID NO: 3076
ugggaauuaucucucauuc

SEQ ID NO: 238937 - RNA, 19 nt, Artificial Sequence
  Description of Artificial Sequence: Synthetic oligonucleotide
  Antisense strand to SEQ ID NO: 238936
gaaugagagauaauuccca

SEQ ID NO: 238938 - RNA, 19 nt, Artificial Sequence
  Description of Artificial Sequence: Synthetic oligonucleotide
  Sense strand starting at position 3903 SEQ ID NO: 3076
ugaucugugaaauggaggu

SEQ ID NO: 238939 - RNA, 19 nt, Artificial Sequence
  Description of Artificial Sequence: Synthetic oligonucleotide
  Antisense strand to SEQ ID NO: 238938
accuccauuucacagauca

SEQ ID NO: 238940 - RNA, 19 nt, Artificial Sequence
  Description of Artificial Sequence: Synthetic oligonucleotide
  Sense strand starting at position 3907 SEQ ID NO: 3076
cugugaaauggagguaauu

SEQ ID NO: 238941 - RNA, 19 nt, Artificial Sequence
  Description of Artificial Sequence: Synthetic oligonucleotide
  Antisense strand to SEQ ID NO: 238940
aauuaccuccauuucacag

SEQ ID NO: 238942 - RNA, 19 nt, Artificial Sequence
  Description of Artificial Sequence: Synthetic oligonucleotide
  Sense strand starting at position 3934 SEQ ID NO: 3076
accuccagaguugguaaau

SEQ ID NO: 238943 - RNA, 19 nt, Artificial Sequence
  Description of Artificial Sequence: Synthetic oligonucleotide
  Antisense strand to SEQ ID NO: 238942
auuuaccaacucuggaggu

SEQ ID NO: 238944 - RNA, 19 nt, Artificial Sequence
  Description of Artificial Sequence: Synthetic oligonucleotide
  Sense strand starting at position 3935 SEQ ID NO: 3076
ccuccagaguugguaaaua

SEQ ID NO: 238945 - RNA, 19 nt, Artificial Sequence
  Description of Artificial Sequence: Synthetic oligonucleotide
  Antisense strand to SEQ ID NO: 238944
uauuuaccaacucuggagg

SEQ ID NO: 238946 - RNA, 19 nt, Artificial Sequence
  Description of Artificial Sequence: Synthetic oligonucleotide
  Sense strand starting at position 30 SEQ ID NO: 3077
gaggguugcaacugagaag

SEQ ID NO: 238947 - RNA, 19 nt, Artificial Sequence
  Description of Artificial Sequence: Synthetic oligonucleotide
  Antisense strand to SEQ ID NO: 238946
cuucucaguugcaacccuc

SEQ ID NO: 238948 - RNA, 19 nt, Artificial Sequence
  Description of Artificial Sequence: Synthetic oligonucleotide
  Sense strand starting at position 71 SEQ ID NO: 3077
ggcuguuaucugcacagag

SEQ ID NO: 238949 - RNA, 19 nt, Artificial Sequence
  Description of Artificial Sequence: Synthetic oligonucleotide
  Antisense strand to SEQ ID NO: 238948
cucugugcagauaacagcc

SEQ ID NO: 238950 - RNA, 19 nt, Artificial Sequence
  Description of Artificial Sequence: Synthetic oligonucleotide
  Sense strand starting at position 73 SEQ ID NO: 3077
cuguuaucugcacagagca

SEQ ID NO: 238951 - RNA, 19 nt, Artificial Sequence
  Description of Artificial Sequence: Synthetic oligonucleotide
  Antisense strand to SEQ ID NO: 238950
ugcucugugcagauaacag

SEQ ID NO: 238952 - RNA, 19 nt, Artificial Sequence
  Description of Artificial Sequence: Synthetic oligonucleotide
  Sense strand starting at position 442 SEQ ID NO: 3077
ugcucagugaucuacgaug

SEQ ID NO: 238953 - RNA, 19 nt, Artificial Sequence
  Description of Artificial Sequence: Synthetic oligonucleotide
  Antisense strand to SEQ ID NO: 238952
caucguagaucacugagca

SEQ ID NO: 238954 - RNA, 19 nt, Artificial Sequence
  Description of Artificial Sequence: Synthetic oligonucleotide
  Sense strand starting at position 447 SEQ ID NO: 3077
agugaucuacgaugggaac

SEQ ID NO: 238955 - RNA, 19 nt, Artificial Sequence
  Description of Artificial Sequence: Synthetic oligonucleotide
  Antisense strand to SEQ ID NO: 238954
guucccaucguagaucacu

SEQ ID NO: 238956 - RNA, 19 nt, Artificial Sequence
  Description of Artificial Sequence: Synthetic oligonucleotide
  Sense strand starting at position 466 SEQ ID NO: 3077
ucaggacacuccuaggaga

SEQ ID NO: 238957 - RNA, 19 nt, Artificial Sequence
  Description of Artificial Sequence: Synthetic oligonucleotide
  Antisense strand to SEQ ID NO: 238956
ucuccuaggaguguccuga

SEQ ID NO: 238958 - RNA, 19 nt, Artificial Sequence
  Description of Artificial Sequence: Synthetic oligonucleotide
  Sense strand starting at position 477 SEQ ID NO: 3077
cuaggagauugcccuaauu

SEQ ID NO: 238959 - RNA, 19 nt, Artificial Sequence
  Description of Artificial Sequence: Synthetic oligonucleotide
  Antisense strand to SEQ ID NO: 238958
aauuagggcaaucuccuag

SEQ ID NO: 238960 - RNA, 19 nt, Artificial Sequence
  Description of Artificial Sequence: Synthetic oligonucleotide
  Sense strand starting at position 579 SEQ ID NO: 3077
uggaacucauguucugagu

SEQ ID NO: 238961 - RNA, 19 nt, Artificial Sequence
  Description of Artificial Sequence: Synthetic oligonucleotide
  Antisense strand to SEQ ID NO: 238960
acucagaacaugaguucca

SEQ ID NO: 238962 - RNA, 19 nt, Artificial Sequence
  Description of Artificial Sequence: Synthetic oligonucleotide
  Sense strand starting at position 812 SEQ ID NO: 3077
cugagugggugccuugaaa

SEQ ID NO: 238963 - RNA, 19 nt, Artificial Sequence
  Description of Artificial Sequence: Synthetic oligonucleotide
  Antisense strand to SEQ ID NO: 238962
uuucaaggcacccacucag

SEQ ID NO: 238964 - RNA, 19 nt, Artificial Sequence
  Description of Artificial Sequence: Synthetic oligonucleotide
  Sense strand starting at position 929 SEQ ID NO: 3077
uacaguuugucguugggaa

SEQ ID NO: 238965 - RNA, 19 nt, Artificial Sequence
  Description of Artificial Sequence: Synthetic oligonucleotide
  Antisense strand to SEQ ID NO: 238964
uucccaacgacaaacugua

SEQ ID NO: 238966 - RNA, 19 nt, Artificial Sequence
  Description of Artificial Sequence: Synthetic oligonucleotide
  Sense strand starting at position 930 SEQ ID NO: 3077
acaguuugucguugggaag

SEQ ID NO: 238967 - RNA, 19 nt, Artificial Sequence
  Description of Artificial Sequence: Synthetic oligonucleotide
  Antisense strand to SEQ ID NO: 238966
cuucccaacgacaaacugu

SEQ ID NO: 238968 - RNA, 19 nt, Artificial Sequence
  Description of Artificial Sequence: Synthetic oligonucleotide
  Sense strand starting at position 948 SEQ ID NO: 3077
ggucuuauugcaugaaaga

SEQ ID NO: 238969 - RNA, 19 nt, Artificial Sequence
  Description of Artificial Sequence: Synthetic oligonucleotide
  Antisense strand to SEQ ID NO: 238968
ucuuucaugcaauaagacc

SEQ ID NO: 238970 - RNA, 19 nt, Artificial Sequence
  Description of Artificial Sequence: Synthetic oligonucleotide
  Sense strand starting at position 949 SEQ ID NO: 3077
gucuuauugcaugaaagag

SEQ ID NO: 238971 - RNA, 19 nt, Artificial Sequence
  Description of Artificial Sequence: Synthetic oligonucleotide
  Antisense strand to SEQ ID NO: 238970
cucuuucaugcaauaagac

SEQ ID NO: 238972 - RNA, 19 nt, Artificial Sequence
  Description of Artificial Sequence: Synthetic oligonucleotide
  Sense strand starting at position 1168 SEQ ID NO: 3077
cagacauguccugacuuug

SEQ ID NO: 238973 - RNA, 19 nt, Artificial Sequence
  Description of Artificial Sequence: Synthetic oligonucleotide
  Antisense strand to SEQ ID NO: 238972
caaagucaggacaugucug

SEQ ID NO: 238974 - RNA, 19 nt, Artificial Sequence
  Description of Artificial Sequence: Synthetic oligonucleotide
  Sense strand starting at position 1176 SEQ ID NO: 3077
uccugacuuuguguucuca

SEQ ID NO: 238975 - RNA, 19 nt, Artificial Sequence
  Description of Artificial Sequence: Synthetic oligonucleotide
  Antisense strand to SEQ ID NO: 238974
ugagaacacaaagucagga

SEQ ID NO: 238976 - RNA, 19 nt, Artificial Sequence
  Description of Artificial Sequence: Synthetic oligonucleotide
  Sense strand starting at position 1178 SEQ ID NO: 3077
cugacuuuguguucucacu

SEQ ID NO: 238977 - RNA, 19 nt, Artificial Sequence
  Description of Artificial Sequence: Synthetic oligonucleotide
  Antisense strand to SEQ ID NO: 238976
agugagaacacaaagucag

SEQ ID NO: 238978 - RNA, 19 nt, Artificial Sequence
  Description of Artificial Sequence: Synthetic oligonucleotide
  Sense strand starting at position 1270 SEQ ID NO: 3077
cuuggcuaggguuagagaa

SEQ ID NO: 238979 - RNA, 19 nt, Artificial Sequence
  Description of Artificial Sequence: Synthetic oligonucleotide
  Antisense strand to SEQ ID NO: 238978
uucucuaacccuagccaag

SEQ ID NO: 238980 - RNA, 19 nt, Artificial Sequence
  Description of Artificial Sequence: Synthetic oligonucleotide
  Sense strand starting at position 1293 SEQ ID NO: 3077
gcagcuauaauguaggaua

SEQ ID NO: 238981 - RNA, 19 nt, Artificial Sequence
  Description of Artificial Sequence: Synthetic oligonucleotide
  Antisense strand to SEQ ID NO: 238980
uauccuacauuauagcugc

SEQ ID NO: 238982 - RNA, 19 nt, Artificial Sequence
  Description of Artificial Sequence: Synthetic oligonucleotide
  Sense strand starting at position 1319 SEQ ID NO: 3077
gggcuuuccucuccaucau

SEQ ID NO: 238983 - RNA, 19 nt, Artificial Sequence
  Description of Artificial Sequence: Synthetic oligonucleotide
  Antisense strand to SEQ ID NO: 238982
augauggagaggaaagccc

SEQ ID NO: 238984 - RNA, 19 nt, Artificial Sequence
  Description of Artificial Sequence: Synthetic oligonucleotide
  Sense strand starting at position 1359 SEQ ID NO: 3077
ugaggaagaaaccguguau

SEQ ID NO: 238985 - RNA, 19 nt, Artificial Sequence
  Description of Artificial Sequence: Synthetic oligonucleotide
  Antisense strand to SEQ ID NO: 238984
auacacgguuucuuccuca

SEQ ID NO: 238986 - RNA, 19 nt, Artificial Sequence
  Description of Artificial Sequence: Synthetic oligonucleotide
  Sense strand starting at position 1491 SEQ ID NO: 3077
gcaggaugaucccugagag

SEQ ID NO: 238987 - RNA, 19 nt, Artificial Sequence
  Description of Artificial Sequence: Synthetic oligonucleotide
  Antisense strand to SEQ ID NO: 238986
cucucagggaucauccugc

SEQ ID NO: 238988 - RNA, 19 nt, Artificial Sequence
  Description of Artificial Sequence: Synthetic oligonucleotide
  Sense strand starting at position 1492 SEQ ID NO: 3077
caggaugaucccugagagu

SEQ ID NO: 238989 - RNA, 19 nt, Artificial Sequence
  Description of Artificial Sequence: Synthetic oligonucleotide
  Antisense strand to SEQ ID NO: 238988
acucucagggaucauccug

SEQ ID NO: 238990 - RNA, 19 nt, Artificial Sequence
  Description of Artificial Sequence: Synthetic oligonucleotide
  Sense strand starting at position 1526 SEQ ID NO: 3077
cuuggugguuucccaacaa

SEQ ID NO: 238991 - RNA, 19 nt, Artificial Sequence
  Description of Artificial Sequence: Synthetic oligonucleotide
  Antisense strand to SEQ ID NO: 238990
uuguugggaaaccaccaag

SEQ ID NO: 238992 - RNA, 19 nt, Artificial Sequence
  Description of Artificial Sequence: Synthetic oligonucleotide
  Sense strand starting at position 1530 SEQ ID NO: 3077
gugguuucccaacaagauu

SEQ ID NO: 238993 - RNA, 19 nt, Artificial Sequence
  Description of Artificial Sequence: Synthetic oligonucleotide
  Antisense strand to SEQ ID NO: 238992
aaucuuguugggaaaccac

SEQ ID NO: 238994 - RNA, 19 nt, Artificial Sequence
  Description of Artificial Sequence: Synthetic oligonucleotide
  Sense strand starting at position 1667 SEQ ID NO: 3077
gucagaucaggaggaaguu

SEQ ID NO: 238995 - RNA, 19 nt, Artificial Sequence
  Description of Artificial Sequence: Synthetic oligonucleotide
  Antisense strand to SEQ ID NO: 238994
aacuuccuccugaucugac

SEQ ID NO: 238996 - RNA, 19 nt, Artificial Sequence
  Description of Artificial Sequence: Synthetic oligonucleotide
  Sense strand starting at position 1682 SEQ ID NO: 3077
aguugaggguucguagaaa

SEQ ID NO: 238997 - RNA, 19 nt, Artificial Sequence
  Description of Artificial Sequence: Synthetic oligonucleotide
  Antisense strand to SEQ ID NO: 238996
uuucuacgaacccucaacu

SEQ ID NO: 238998 - RNA, 19 nt, Artificial Sequence
  Description of Artificial Sequence: Synthetic oligonucleotide
  Sense strand starting at position 1857 SEQ ID NO: 3077
aggagaguuaccugcaguc

SEQ ID NO: 238999 - RNA, 19 nt, Artificial Sequence
  Description of Artificial Sequence: Synthetic oligonucleotide
  Antisense strand to SEQ ID NO: 238998
gacugcagguaacucuccu

SEQ ID NO: 239000 - RNA, 19 nt, Artificial Sequence
  Description of Artificial Sequence: Synthetic oligonucleotide
  Sense strand starting at position 1859 SEQ ID NO: 3077
gagaguuaccugcagucca

SEQ ID NO: 239001 - RNA, 19 nt, Artificial Sequence
  Description of Artificial Sequence: Synthetic oligonucleotide
  Antisense strand to SEQ ID NO: 239000
uggacugcagguaacucuc

SEQ ID NO: 239002 - RNA, 19 nt, Artificial Sequence
  Description of Artificial Sequence: Synthetic oligonucleotide
  Sense strand starting at position 1967 SEQ ID NO: 3077
agggcugagagaugucauu

SEQ ID NO: 239003 - RNA, 19 nt, Artificial Sequence
  Description of Artificial Sequence: Synthetic oligonucleotide
  Antisense strand to SEQ ID NO: 239002
aaugacaucucucagcccu

SEQ ID NO: 239004 - RNA, 19 nt, Artificial Sequence
  Description of Artificial Sequence: Synthetic oligonucleotide
  Sense strand starting at position 2048 SEQ ID NO: 3077
acuuccuugugagugaaau

SEQ ID NO: 239005 - RNA, 19 nt, Artificial Sequence
  Description of Artificial Sequence: Synthetic oligonucleotide
  Antisense strand to SEQ ID NO: 239004
auuucacucacaaggaagu

SEQ ID NO: 239006 - RNA, 19 nt, Artificial Sequence
  Description of Artificial Sequence: Synthetic oligonucleotide
  Sense strand starting at position 2049 SEQ ID NO: 3077
cuuccuugugagugaaaua

SEQ ID NO: 239007 - RNA, 19 nt, Artificial Sequence
  Description of Artificial Sequence: Synthetic oligonucleotide
  Antisense strand to SEQ ID NO: 239006
uauuucacucacaaggaag

SEQ ID NO: 239008 - RNA, 19 nt, Artificial Sequence
  Description of Artificial Sequence: Synthetic oligonucleotide
  Sense strand starting at position 2180 SEQ ID NO: 3077
ggagcaguuuccaggagga

SEQ ID NO: 239009 - RNA, 19 nt, Artificial Sequence
  Description of Artificial Sequence: Synthetic oligonucleotide
  Antisense strand to SEQ ID NO: 239008
uccuccuggaaacugcucc

SEQ ID NO: 239010 - RNA, 19 nt, Artificial Sequence
  Description of Artificial Sequence: Synthetic oligonucleotide
  Sense strand starting at position 2470 SEQ ID NO: 3077
gguggugcuauuuaguacu

SEQ ID NO: 239011 - RNA, 19 nt, Artificial Sequence
  Description of Artificial Sequence: Synthetic oligonucleotide
  Antisense strand to SEQ ID NO: 239010
aguacuaaauagcaccacc

SEQ ID NO: 239012 - RNA, 19 nt, Artificial Sequence
  Description of Artificial Sequence: Synthetic oligonucleotide
  Sense strand starting at position 2534 SEQ ID NO: 3077
acugcaugugugucugcaa

SEQ ID NO: 239013 - RNA, 19 nt, Artificial Sequence
  Description of Artificial Sequence: Synthetic oligonucleotide
  Antisense strand to SEQ ID NO: 239012
uugcagacacacaugcagu

SEQ ID NO: 239014 - RNA, 19 nt, Artificial Sequence
  Description of Artificial Sequence: Synthetic oligonucleotide
  Sense strand starting at position 2541 SEQ ID NO: 3077
gugugucugcaagaauggu

SEQ ID NO: 239015 - RNA, 19 nt, Artificial Sequence
  Description of Artificial Sequence: Synthetic oligonucleotide
  Antisense strand to SEQ ID NO: 239014
accauucuugcagacacac

SEQ ID NO: 239016 - RNA, 19 nt, Artificial Sequence
  Description of Artificial Sequence: Synthetic oligonucleotide
  Sense strand starting at position 2765 SEQ ID NO: 3077
caggaaagucugggcugaa

SEQ ID NO: 239017 - RNA, 19 nt, Artificial Sequence
  Description of Artificial Sequence: Synthetic oligonucleotide
  Antisense strand to SEQ ID NO: 239016
uucagcccagacuuuccug

SEQ ID NO: 239018 - RNA, 19 nt, Artificial Sequence
  Description of Artificial Sequence: Synthetic oligonucleotide
  Sense strand starting at position 2766 SEQ ID NO: 3077
aggaaagucugggcugaaa

SEQ ID NO: 239019 - RNA, 19 nt, Artificial Sequence
  Description of Artificial Sequence: Synthetic oligonucleotide
  Antisense strand to SEQ ID NO: 239018
uuucagcccagacuuuccu

SEQ ID NO: 239020 - RNA, 19 nt, Artificial Sequence
  Description of Artificial Sequence: Synthetic oligonucleotide
  Sense strand starting at position 2768 SEQ ID NO: 3077
gaaagucugggcugaaacu

SEQ ID NO: 239021 - RNA, 19 nt, Artificial Sequence
  Description of Artificial Sequence: Synthetic oligonucleotide
  Antisense strand to SEQ ID NO: 239020
aguuucagcccagacuuuc

SEQ ID NO: 239022 - RNA, 19 nt, Artificial Sequence
  Description of Artificial Sequence: Synthetic oligonucleotide
  Sense strand starting at position 3942 SEQ ID NO: 3077
cuguuaaguuucuuccaga

SEQ ID NO: 239023 - RNA, 19 nt, Artificial Sequence
  Description of Artificial Sequence: Synthetic oligonucleotide
  Antisense strand to SEQ ID NO: 239022
ucuggaagaaacuuaacag

SEQ ID NO: 239024 - RNA, 19 nt, Artificial Sequence
  Description of Artificial Sequence: Synthetic oligonucleotide
  Sense strand starting at position 3943 SEQ ID NO: 3077
uguuaaguuucuuccagag

SEQ ID NO: 239025 - RNA, 19 nt, Artificial Sequence
  Description of Artificial Sequence: Synthetic oligonucleotide
  Antisense strand to SEQ ID NO: 239024
cucuggaagaaacuuaaca

SEQ ID NO: 239026 - RNA, 19 nt, Artificial Sequence
  Description of Artificial Sequence: Synthetic oligonucleotide
  Sense strand starting at position 59 SEQ ID NO: 3078
aagagagguuaucuaaagu

SEQ ID NO: 239027 - RNA, 19 nt, Artificial Sequence
  Description of Artificial Sequence: Synthetic oligonucleotide
  Antisense strand to SEQ ID NO: 239026
acuuuagauaaccucucuu

SEQ ID NO: 239028 - RNA, 19 nt, Artificial Sequence
  Description of Artificial Sequence: Synthetic oligonucleotide
  Sense strand starting at position 65 SEQ ID NO: 3078
gguuaucuaaaguggugga

SEQ ID NO: 239029 - RNA, 19 nt, Artificial Sequence
  Description of Artificial Sequence: Synthetic oligonucleotide
  Antisense strand to SEQ ID NO: 239028
uccaccacuuuagauaacc

SEQ ID NO: 239030 - RNA, 19 nt, Artificial Sequence
  Description of Artificial Sequence: Synthetic oligonucleotide
  Sense strand starting at position 66 SEQ ID NO: 3078
guuaucuaaagugguggaa

SEQ ID NO: 239031 - RNA, 19 nt, Artificial Sequence
  Description of Artificial Sequence: Synthetic oligonucleotide
  Antisense strand to SEQ ID NO: 239030
uuccaccacuuuagauaac

SEQ ID NO: 239032 - RNA, 19 nt, Artificial Sequence
  Description of Artificial Sequence: Synthetic oligonucleotide
  Sense strand starting at position 69 SEQ ID NO: 3078
aucuaaagugguggaacau

SEQ ID NO: 239033 - RNA, 19 nt, Artificial Sequence
  Description of Artificial Sequence: Synthetic oligonucleotide
  Antisense strand to SEQ ID NO: 239032
auguuccaccacuuuagau

SEQ ID NO: 239034 - RNA, 19 nt, Artificial Sequence
  Description of Artificial Sequence: Synthetic oligonucleotide
  Sense strand starting at position 180 SEQ ID NO: 3078
agaaguauuaagugguuau

SEQ ID NO: 239035 - RNA, 19 nt, Artificial Sequence
  Description of Artificial Sequence: Synthetic oligonucleotide
  Antisense strand to SEQ ID NO: 239034
auaaccacuuaauacuucu

SEQ ID NO: 239036 - RNA, 19 nt, Artificial Sequence
  Description of Artificial Sequence: Synthetic oligonucleotide
  Sense strand starting at position 183 SEQ ID NO: 3078
aguauuaagugguuauuac

SEQ ID NO: 239037 - RNA, 19 nt, Artificial Sequence
  Description of Artificial Sequence: Synthetic oligonucleotide
  Antisense strand to SEQ ID NO: 239036
guaauaaccacuuaauacu

SEQ ID NO: 239038 - RNA, 19 nt, Artificial Sequence
  Description of Artificial Sequence: Synthetic oligonucleotide
  Sense strand starting at position 184 SEQ ID NO: 3078
guauuaagugguuauuaca

SEQ ID NO: 239039 - RNA, 19 nt, Artificial Sequence
  Description of Artificial Sequence: Synthetic oligonucleotide
  Antisense strand to SEQ ID NO: 239038
uguaauaaccacuuaauac

SEQ ID NO: 239040 - RNA, 19 nt, Artificial Sequence
  Description of Artificial Sequence: Synthetic oligonucleotide
  Sense strand starting at position 209 SEQ ID NO: 3078
gcaccuauucuagaggcuu

SEQ ID NO: 239041 - RNA, 19 nt, Artificial Sequence
  Description of Artificial Sequence: Synthetic oligonucleotide
  Antisense strand to SEQ ID NO: 239040
aagccucuagaauaggugc

SEQ ID NO: 239042 - RNA, 19 nt, Artificial Sequence
  Description of Artificial Sequence: Synthetic oligonucleotide
  Sense strand starting at position 344 SEQ ID NO: 3078
aucuacaucuauguagaua

SEQ ID NO: 239043 - RNA, 19 nt, Artificial Sequence
  Description of Artificial Sequence: Synthetic oligonucleotide
  Antisense strand to SEQ ID NO: 239042
uaucuacauagauguagau

SEQ ID NO: 239044 - RNA, 19 nt, Artificial Sequence
  Description of Artificial Sequence: Synthetic oligonucleotide
  Sense strand starting at position 610 SEQ ID NO: 3078
guaguaacuccugagacuu

SEQ ID NO: 239045 - RNA, 19 nt, Artificial Sequence
  Description of Artificial Sequence: Synthetic oligonucleotide
  Antisense strand to SEQ ID NO: 239044
aagucucaggaguuacuac

SEQ ID NO: 239046 - RNA, 19 nt, Artificial Sequence
  Description of Artificial Sequence: Synthetic oligonucleotide
  Sense strand starting at position 638 SEQ ID NO: 3078
ggaggcugugaccauaauu

SEQ ID NO: 239047 - RNA, 19 nt, Artificial Sequence
  Description of Artificial Sequence: Synthetic oligonucleotide
  Antisense strand to SEQ ID NO: 239046
aauuauggucacagccucc

SEQ ID NO: 239048 - RNA, 19 nt, Artificial Sequence
  Description of Artificial Sequence: Synthetic oligonucleotide
  Sense strand starting at position 646 SEQ ID NO: 3078
ugaccauaauuuggaauga

SEQ ID NO: 239049 - RNA, 19 nt, Artificial Sequence
  Description of Artificial Sequence: Synthetic oligonucleotide
  Antisense strand to SEQ ID NO: 239048
ucauuccaaauuaugguca

SEQ ID NO: 239050 - RNA, 19 nt, Artificial Sequence
  Description of Artificial Sequence: Synthetic oligonucleotide
  Sense strand starting at position 755 SEQ ID NO: 3078
uguuauuugcaaugcaaac

SEQ ID NO: 239051 - RNA, 19 nt, Artificial Sequence
  Description of Artificial Sequence: Synthetic oligonucleotide
  Antisense strand to SEQ ID NO: 239050
guuugcauugcaaauaaca

SEQ ID NO: 239052 - RNA, 19 nt, Artificial Sequence
  Description of Artificial Sequence: Synthetic oligonucleotide
  Sense strand starting at position 789 SEQ ID NO: 3078
caucucugggacggagaau

SEQ ID NO: 239053 - RNA, 19 nt, Artificial Sequence
  Description of Artificial Sequence: Synthetic oligonucleotide
  Antisense strand to SEQ ID NO: 239052
auucuccgucccagagaug

SEQ ID NO: 239054 - RNA, 19 nt, Artificial Sequence
  Description of Artificial Sequence: Synthetic oligonucleotide
  Sense strand starting at position 802 SEQ ID NO: 3078
gagaauagguuauagaaga

SEQ ID NO: 239055 - RNA, 19 nt, Artificial Sequence
  Description of Artificial Sequence: Synthetic oligonucleotide
  Antisense strand to SEQ ID NO: 239054
ucuucuauaaccuauucuc

SEQ ID NO: 239056 - RNA, 19 nt, Artificial Sequence
  Description of Artificial Sequence: Synthetic oligonucleotide
  Sense strand starting at position 809 SEQ ID NO: 3078
gguuauagaagaugugauu

SEQ ID NO: 239057 - RNA, 19 nt, Artificial Sequence
  Description of Artificial Sequence: Synthetic oligonucleotide
  Antisense strand to SEQ ID NO: 239056
aaucacaucuucuauaacc

SEQ ID NO: 239058 - RNA, 19 nt, Artificial Sequence
  Description of Artificial Sequence: Synthetic oligonucleotide
  Sense strand starting at position 878 SEQ ID NO: 3078
gcauauuagcugcaguaag

SEQ ID NO: 239059 - RNA, 19 nt, Artificial Sequence
  Description of Artificial Sequence: Synthetic oligonucleotide
  Antisense strand to SEQ ID NO: 239058
cuuacugcagcuaauaugc

SEQ ID NO: 239060 - RNA, 19 nt, Artificial Sequence
  Description of Artificial Sequence: Synthetic oligonucleotide
  Sense strand starting at position 979 SEQ ID NO: 3078
uaauuugaguggcaaugau

SEQ ID NO: 239061 - RNA, 19 nt, Artificial Sequence
  Description of Artificial Sequence: Synthetic oligonucleotide
  Antisense strand to SEQ ID NO: 239060
aucauugccacucaaauua

SEQ ID NO: 239062 - RNA, 19 nt, Artificial Sequence
  Description of Artificial Sequence: Synthetic oligonucleotide
  Sense strand starting at position 1013 SEQ ID NO: 3078
gugaacagccucugauaua

SEQ ID NO: 239063 - RNA, 19 nt, Artificial Sequence
  Description of Artificial Sequence: Synthetic oligonucleotide
  Antisense strand to SEQ ID NO: 239062
uauaucagaggcuguucac

SEQ ID NO: 239064 - RNA, 19 nt, Artificial Sequence
  Description of Artificial Sequence: Synthetic oligonucleotide
  Sense strand starting at position 1141 SEQ ID NO: 3078
aaugucuuagguuagcauu

SEQ ID NO: 239065 - RNA, 19 nt, Artificial Sequence
  Description of Artificial Sequence: Synthetic oligonucleotide
  Antisense strand to SEQ ID NO: 239064
aaugcuaaccuaagacauu

SEQ ID NO: 239066 - RNA, 19 nt, Artificial Sequence
  Description of Artificial Sequence: Synthetic oligonucleotide
  Sense strand starting at position 1182 SEQ ID NO: 3078
gagcaagguucuguauuau

SEQ ID NO: 239067 - RNA, 19 nt, Artificial Sequence
  Description of Artificial Sequence: Synthetic oligonucleotide
  Antisense strand to SEQ ID NO: 239066
auaauacagaaccuugcuc

SEQ ID NO: 239068 - RNA, 19 nt, Artificial Sequence
  Description of Artificial Sequence: Synthetic oligonucleotide
  Sense strand starting at position 1194 SEQ ID NO: 3078
guauuauugugauucccau

SEQ ID NO: 239069 - RNA, 19 nt, Artificial Sequence
  Description of Artificial Sequence: Synthetic oligonucleotide
  Antisense strand to SEQ ID NO: 239068
augggaaucacaauaauac

SEQ ID NO: 239070 - RNA, 19 nt, Artificial Sequence
  Description of Artificial Sequence: Synthetic oligonucleotide
  Sense strand starting at position 1201 SEQ ID NO: 3078
ugugauucccauuguauuu

SEQ ID NO: 239071 - RNA, 19 nt, Artificial Sequence
  Description of Artificial Sequence: Synthetic oligonucleotide
  Antisense strand to SEQ ID NO: 239070
aaauacaaugggaaucaca

SEQ ID NO: 239072 - RNA, 19 nt, Artificial Sequence
  Description of Artificial Sequence: Synthetic oligonucleotide
  Sense strand starting at position 1352 SEQ ID NO: 3078
gucauuugaugggagggau

SEQ ID NO: 239073 - RNA, 19 nt, Artificial Sequence
  Description of Artificial Sequence: Synthetic oligonucleotide
  Antisense strand to SEQ ID NO: 239072
aucccucccaucaaaugac

SEQ ID NO: 239074 - RNA, 19 nt, Artificial Sequence
  Description of Artificial Sequence: Synthetic oligonucleotide
  Sense strand starting at position 2642 SEQ ID NO: 3078
aucauagugcaauguacaa

SEQ ID NO: 239075 - RNA, 19 nt, Artificial Sequence
  Description of Artificial Sequence: Synthetic oligonucleotide
  Antisense strand to SEQ ID NO: 239074
uuguacauugcacuaugau

SEQ ID NO: 239076 - RNA, 19 nt, Artificial Sequence
  Description of Artificial Sequence: Synthetic oligonucleotide
  Sense strand starting at position 2796 SEQ ID NO: 3078
ucugcuaugauggguacaa

SEQ ID NO: 239077 - RNA, 19 nt, Artificial Sequence
  Description of Artificial Sequence: Synthetic oligonucleotide
  Antisense strand to SEQ ID NO: 239076
uuguacccaucauagcaga

SEQ ID NO: 239078 - RNA, 19 nt, Artificial Sequence
  Description of Artificial Sequence: Synthetic oligonucleotide
  Sense strand starting at position 2797 SEQ ID NO: 3078
cugcuaugauggguacaaa

SEQ ID NO: 239079 - RNA, 19 nt, Artificial Sequence
  Description of Artificial Sequence: Synthetic oligonucleotide
  Antisense strand to SEQ ID NO: 239078
uuuguacccaucauagcag

SEQ ID NO: 239080 - RNA, 19 nt, Artificial Sequence
  Description of Artificial Sequence: Synthetic oligonucleotide
  Sense strand starting at position 2906 SEQ ID NO: 3078
aacagagaauguuauuuga

SEQ ID NO: 239081 - RNA, 19 nt, Artificial Sequence
  Description of Artificial Sequence: Synthetic oligonucleotide
  Antisense strand to SEQ ID NO: 239080
ucaaauaacauucucuguu

SEQ ID NO: 239082 - RNA, 19 nt, Artificial Sequence
  Description of Artificial Sequence: Synthetic oligonucleotide
  Sense strand starting at position 2941 SEQ ID NO: 3078
ucacucugguuaccagaaa

SEQ ID NO: 239083 - RNA, 19 nt, Artificial Sequence
  Description of Artificial Sequence: Synthetic oligonucleotide
  Antisense strand to SEQ ID NO: 239082
uuucugguaaccagaguga

SEQ ID NO: 239084 - RNA, 19 nt, Artificial Sequence
  Description of Artificial Sequence: Synthetic oligonucleotide
  Sense strand starting at position 3162 SEQ ID NO: 3078
caguccaggaguugaguau

SEQ ID NO: 239085 - RNA, 19 nt, Artificial Sequence
  Description of Artificial Sequence: Synthetic oligonucleotide
  Antisense strand to SEQ ID NO: 239084
auacucaacuccuggacug

SEQ ID NO: 239086 - RNA, 19 nt, Artificial Sequence
  Description of Artificial Sequence: Synthetic oligonucleotide
  Sense strand starting at position 3169 SEQ ID NO: 3078
ggaguugaguaugccauca

SEQ ID NO: 239087 - RNA, 19 nt, Artificial Sequence
  Description of Artificial Sequence: Synthetic oligonucleotide
  Antisense strand to SEQ ID NO: 239086
ugauggcauacucaacucc

SEQ ID NO: 239088 - RNA, 19 nt, Artificial Sequence
  Description of Artificial Sequence: Synthetic oligonucleotide
  Sense strand starting at position 3174 SEQ ID NO: 3078
ugaguaugccaucagaauu

SEQ ID NO: 239089 - RNA, 19 nt, Artificial Sequence
  Description of Artificial Sequence: Synthetic oligonucleotide
  Antisense strand to SEQ ID NO: 239088
aauucugauggcauacuca

SEQ ID NO: 239090 - RNA, 19 nt, Artificial Sequence
  Description of Artificial Sequence: Synthetic oligonucleotide
  Sense strand starting at position 3185 SEQ ID NO: 3078
ucagaauucuguuuagaaa

SEQ ID NO: 239091 - RNA, 19 nt, Artificial Sequence
  Description of Artificial Sequence: Synthetic oligonucleotide
  Antisense strand to SEQ ID NO: 239090
uuucuaaacagaauucuga

SEQ ID NO: 239092 - RNA, 19 nt, Artificial Sequence
  Description of Artificial Sequence: Synthetic oligonucleotide
  Sense strand starting at position 3263 SEQ ID NO: 3078
gcaguuccaguauauguua

SEQ ID NO: 239093 - RNA, 19 nt, Artificial Sequence
  Description of Artificial Sequence: Synthetic oligonucleotide
  Antisense strand to SEQ ID NO: 239092
uaacauauacuggaacugc

SEQ ID NO: 239094 - RNA, 19 nt, Artificial Sequence
  Description of Artificial Sequence: Synthetic oligonucleotide
  Sense strand starting at position 3427 SEQ ID NO: 3078
uggcuauaugaauggagau

SEQ ID NO: 239095 - RNA, 19 nt, Artificial Sequence
  Description of Artificial Sequence: Synthetic oligonucleotide
  Antisense strand to SEQ ID NO: 239094
aucuccauucauauagcca

SEQ ID NO: 239096 - RNA, 19 nt, Artificial Sequence
  Description of Artificial Sequence: Synthetic oligonucleotide
  Sense strand starting at position 3428 SEQ ID NO: 3078
ggcuauaugaauggagauu

SEQ ID NO: 239097 - RNA, 19 nt, Artificial Sequence
  Description of Artificial Sequence: Synthetic oligonucleotide
  Antisense strand to SEQ ID NO: 239096
aaucuccauucauauagcc

SEQ ID NO: 239098 - RNA, 19 nt, Artificial Sequence
  Description of Artificial Sequence: Synthetic oligonucleotide
  Sense strand starting at position 3480 SEQ ID NO: 3078
guuauaccuaccggagaaa

SEQ ID NO: 239099 - RNA, 19 nt, Artificial Sequence
  Description of Artificial Sequence: Synthetic oligonucleotide
  Antisense strand to SEQ ID NO: 239098
uuucuccgguagguauaac

SEQ ID NO: 239100 - RNA, 19 nt, Artificial Sequence
  Description of Artificial Sequence: Synthetic oligonucleotide
  Sense strand starting at position 3637 SEQ ID NO: 3078
uccacaagugagcgaaauu

SEQ ID NO: 239101 - RNA, 19 nt, Artificial Sequence
  Description of Artificial Sequence: Synthetic oligonucleotide
  Antisense strand to SEQ ID NO: 239100
aauuucgcucacuugugga

SEQ ID NO: 239102 - RNA, 19 nt, Artificial Sequence
  Description of Artificial Sequence: Synthetic oligonucleotide
  Sense strand starting at position 3723 SEQ ID NO: 3078
ucaugaauuggcuaucaau

SEQ ID NO: 239103 - RNA, 19 nt, Artificial Sequence
  Description of Artificial Sequence: Synthetic oligonucleotide
  Antisense strand to SEQ ID NO: 239102
auugauagccaauucauga

SEQ ID NO: 239104 - RNA, 19 nt, Artificial Sequence
  Description of Artificial Sequence: Synthetic oligonucleotide
  Sense strand starting at position 3798 SEQ ID NO: 3078
acaugugcacuuugaggaa

SEQ ID NO: 239105 - RNA, 19 nt, Artificial Sequence
  Description of Artificial Sequence: Synthetic oligonucleotide
  Antisense strand to SEQ ID NO: 239104
uuccucaaagugcacaugu

SEQ ID NO: 239106 - RNA, 19 nt, Artificial Sequence
  Description of Artificial Sequence: Synthetic oligonucleotide
  Sense strand starting at position 59 SEQ ID NO: 3078
aagagagguuaucuaaagu

SEQ ID NO: 239107 - RNA, 19 nt, Artificial Sequence
  Description of Artificial Sequence: Synthetic oligonucleotide
  Antisense strand to SEQ ID NO: 239106
acuuuagauaaccucucuu

SEQ ID NO: 239108 - RNA, 19 nt, Artificial Sequence
  Description of Artificial Sequence: Synthetic oligonucleotide
  Sense strand starting at position 65 SEQ ID NO: 3078
gguuaucuaaaguggugga

SEQ ID NO: 239109 - RNA, 19 nt, Artificial Sequence
  Description of Artificial Sequence: Synthetic oligonucleotide
  Antisense strand to SEQ ID NO: 239108
uccaccacuuuagauaacc

SEQ ID NO: 239110 - RNA, 19 nt, Artificial Sequence
  Description of Artificial Sequence: Synthetic oligonucleotide
  Sense strand starting at position 66 SEQ ID NO: 3078
guuaucuaaagugguggaa

SEQ ID NO: 239111 - RNA, 19 nt, Artificial Sequence
  Description of Artificial Sequence: Synthetic oligonucleotide
  Antisense strand to SEQ ID NO: 239110
uuccaccacuuuagauaac

SEQ ID NO: 239112 - RNA, 19 nt, Artificial Sequence
  Description of Artificial Sequence: Synthetic oligonucleotide
  Sense strand starting at position 69 SEQ ID NO: 3078
aucuaaagugguggaacau

SEQ ID NO: 239113 - RNA, 19 nt, Artificial Sequence
  Description of Artificial Sequence: Synthetic oligonucleotide
  Antisense strand to SEQ ID NO: 239112
auguuccaccacuuuagau

SEQ ID NO: 239114 - RNA, 19 nt, Artificial Sequence
  Description of Artificial Sequence: Synthetic oligonucleotide
  Sense strand starting at position 180 SEQ ID NO: 3078
agaaguauuaagugguuau

SEQ ID NO: 239115 - RNA, 19 nt, Artificial Sequence
  Description of Artificial Sequence: Synthetic oligonucleotide
  Antisense strand to SEQ ID NO: 239114
auaaccacuuaauacuucu

SEQ ID NO: 239116 - RNA, 19 nt, Artificial Sequence
  Description of Artificial Sequence: Synthetic oligonucleotide
  Sense strand starting at position 183 SEQ ID NO: 3078
aguauuaagugguuauuac

SEQ ID NO: 239117 - RNA, 19 nt, Artificial Sequence
  Description of Artificial Sequence: Synthetic oligonucleotide
  Antisense strand to SEQ ID NO: 239116
guaauaaccacuuaauacu

SEQ ID NO: 239118 - RNA, 19 nt, Artificial Sequence
  Description of Artificial Sequence: Synthetic oligonucleotide
  Sense strand starting at position 184 SEQ ID NO: 3078
guauuaagugguuauuaca

SEQ ID NO: 239119 - RNA, 19 nt, Artificial Sequence
  Description of Artificial Sequence: Synthetic oligonucleotide
  Antisense strand to SEQ ID NO: 239118
uguaauaaccacuuaauac

SEQ ID NO: 239120 - RNA, 19 nt, Artificial Sequence
  Description of Artificial Sequence: Synthetic oligonucleotide
  Sense strand starting at position 209 SEQ ID NO: 3078
gcaccuauucuagaggcuu

SEQ ID NO: 239121 - RNA, 19 nt, Artificial Sequence
  Description of Artificial Sequence: Synthetic oligonucleotide
  Antisense strand to SEQ ID NO: 239120
aagccucuagaauaggugc

SEQ ID NO: 239122 - RNA, 19 nt, Artificial Sequence
  Description of Artificial Sequence: Synthetic oligonucleotide
  Sense strand starting at position 344 SEQ ID NO: 3078
aucuacaucuauguagaua

SEQ ID NO: 239123 - RNA, 19 nt, Artificial Sequence
  Description of Artificial Sequence: Synthetic oligonucleotide
  Antisense strand to SEQ ID NO: 239122
uaucuacauagauguagau

SEQ ID NO: 239124 - RNA, 19 nt, Artificial Sequence
  Description of Artificial Sequence: Synthetic oligonucleotide
  Sense strand starting at position 610 SEQ ID NO: 3078
guaguaacuccugagacuu

SEQ ID NO: 239125 - RNA, 19 nt, Artificial Sequence
  Description of Artificial Sequence: Synthetic oligonucleotide
  Antisense strand to SEQ ID NO: 239124
aagucucaggaguuacuac

SEQ ID NO: 239126 - RNA, 19 nt, Artificial Sequence
  Description of Artificial Sequence: Synthetic oligonucleotide
  Sense strand starting at position 638 SEQ ID NO: 3078
ggaggcugugaccauaauu

SEQ ID NO: 239127 - RNA, 19 nt, Artificial Sequence
  Description of Artificial Sequence: Synthetic oligonucleotide
  Antisense strand to SEQ ID NO: 239126
aauuauggucacagccucc

SEQ ID NO: 239128 - RNA, 19 nt, Artificial Sequence
  Description of Artificial Sequence: Synthetic oligonucleotide
  Sense strand starting at position 646 SEQ ID NO: 3078
ugaccauaauuuggaauga

SEQ ID NO: 239129 - RNA, 19 nt, Artificial Sequence
  Description of Artificial Sequence: Synthetic oligonucleotide
  Antisense strand to SEQ ID NO: 239128
ucauuccaaauuaugguca

SEQ ID NO: 239130 - RNA, 19 nt, Artificial Sequence
  Description of Artificial Sequence: Synthetic oligonucleotide
  Sense strand starting at position 755 SEQ ID NO: 3078
uguuauuugcaaugcaaac

SEQ ID NO: 239131 - RNA, 19 nt, Artificial Sequence
  Description of Artificial Sequence: Synthetic oligonucleotide
  Antisense strand to SEQ ID NO: 239130
guuugcauugcaaauaaca

SEQ ID NO: 239132 - RNA, 19 nt, Artificial Sequence
  Description of Artificial Sequence: Synthetic oligonucleotide
  Sense strand starting at position 789 SEQ ID NO: 3078
caucucugggacggagaau

SEQ ID NO: 239133 - RNA, 19 nt, Artificial Sequence
  Description of Artificial Sequence: Synthetic oligonucleotide
  Antisense strand to SEQ ID NO: 239132
auucuccgucccagagaug

SEQ ID NO: 239134 - RNA, 19 nt, Artificial Sequence
  Description of Artificial Sequence: Synthetic oligonucleotide
  Sense strand starting at position 802 SEQ ID NO: 3078
gagaauagguuauagaaga

SEQ ID NO: 239135 - RNA, 19 nt, Artificial Sequence
  Description of Artificial Sequence: Synthetic oligonucleotide
  Antisense strand to SEQ ID NO: 239134
ucuucuauaaccuauucuc

SEQ ID NO: 239136 - RNA, 19 nt, Artificial Sequence
  Description of Artificial Sequence: Synthetic oligonucleotide
  Sense strand starting at position 809 SEQ ID NO: 3078
gguuauagaagaugugauu

SEQ ID NO: 239137 - RNA, 19 nt, Artificial Sequence
  Description of Artificial Sequence: Synthetic oligonucleotide
  Antisense strand to SEQ ID NO: 239136
aaucacaucuucuauaacc

SEQ ID NO: 239138 - RNA, 19 nt, Artificial Sequence
  Description of Artificial Sequence: Synthetic oligonucleotide
  Sense strand starting at position 878 SEQ ID NO: 3078
gcauauuagcugcaguaag

SEQ ID NO: 239139 - RNA, 19 nt, Artificial Sequence
  Description of Artificial Sequence: Synthetic oligonucleotide
  Antisense strand to SEQ ID NO: 239138
cuuacugcagcuaauaugc

SEQ ID NO: 239140 - RNA, 19 nt, Artificial Sequence
  Description of Artificial Sequence: Synthetic oligonucleotide
  Sense strand starting at position 979 SEQ ID NO: 3078
uaauuugaguggcaaugau

SEQ ID NO: 239141 - RNA, 19 nt, Artificial Sequence
  Description of Artificial Sequence: Synthetic oligonucleotide
  Antisense strand to SEQ ID NO: 239140
aucauugccacucaaauua

SEQ ID NO: 239142 - RNA, 19 nt, Artificial Sequence
  Description of Artificial Sequence: Synthetic oligonucleotide
  Sense strand starting at position 1013 SEQ ID NO: 3078
gugaacagccucugauaua

SEQ ID NO: 239143 - RNA, 19 nt, Artificial Sequence
  Description of Artificial Sequence: Synthetic oligonucleotide
  Antisense strand to SEQ ID NO: 239142
uauaucagaggcuguucac

SEQ ID NO: 239144 - RNA, 19 nt, Artificial Sequence
  Description of Artificial Sequence: Synthetic oligonucleotide
  Sense strand starting at position 1141 SEQ ID NO: 3078
aaugucuuagguuagcauu

SEQ ID NO: 239145 - RNA, 19 nt, Artificial Sequence
  Description of Artificial Sequence: Synthetic oligonucleotide
  Antisense strand to SEQ ID NO: 239144
aaugcuaaccuaagacauu

SEQ ID NO: 239146 - RNA, 19 nt, Artificial Sequence
  Description of Artificial Sequence: Synthetic oligonucleotide
  Sense strand starting at position 1182 SEQ ID NO: 3078
gagcaagguucuguauuau

SEQ ID NO: 239147 - RNA, 19 nt, Artificial Sequence
  Description of Artificial Sequence: Synthetic oligonucleotide
  Antisense strand to SEQ ID NO: 239146
auaauacagaaccuugcuc

SEQ ID NO: 239148 - RNA, 19 nt, Artificial Sequence
  Description of Artificial Sequence: Synthetic oligonucleotide
  Sense strand starting at position 1194 SEQ ID NO: 3078
guauuauugugauucccau

SEQ ID NO: 239149 - RNA, 19 nt, Artificial Sequence
  Description of Artificial Sequence: Synthetic oligonucleotide
  Antisense strand to SEQ ID NO: 239148
augggaaucacaauaauac

SEQ ID NO: 239150 - RNA, 19 nt, Artificial Sequence
  Description of Artificial Sequence: Synthetic oligonucleotide
  Sense strand starting at position 1201 SEQ ID NO: 3078
ugugauucccauuguauuu

SEQ ID NO: 239151 - RNA, 19 nt, Artificial Sequence
  Description of Artificial Sequence: Synthetic oligonucleotide
  Antisense strand to SEQ ID NO: 239150
aaauacaaugggaaucaca

SEQ ID NO: 239152 - RNA, 19 nt, Artificial Sequence
  Description of Artificial Sequence: Synthetic oligonucleotide
  Sense strand starting at position 1352 SEQ ID NO: 3078
gucauuugaugggagggau

SEQ ID NO: 239153 - RNA, 19 nt, Artificial Sequence
  Description of Artificial Sequence: Synthetic oligonucleotide
  Antisense strand to SEQ ID NO: 239152
aucccucccaucaaaugac

SEQ ID NO: 239154 - RNA, 19 nt, Artificial Sequence
  Description of Artificial Sequence: Synthetic oligonucleotide
  Sense strand starting at position 2642 SEQ ID NO: 3078
aucauagugcaauguacaa

SEQ ID NO: 239155 - RNA, 19 nt, Artificial Sequence
  Description of Artificial Sequence: Synthetic oligonucleotide
  Antisense strand to SEQ ID NO: 239154
uuguacauugcacuaugau

SEQ ID NO: 239156 - RNA, 19 nt, Artificial Sequence
  Description of Artificial Sequence: Synthetic oligonucleotide
  Sense strand starting at position 2796 SEQ ID NO: 3078
ucugcuaugauggguacaa

SEQ ID NO: 239157 - RNA, 19 nt, Artificial Sequence
  Description of Artificial Sequence: Synthetic oligonucleotide
  Antisense strand to SEQ ID NO: 239156
uuguacccaucauagcaga

SEQ ID NO: 239158 - RNA, 19 nt, Artificial Sequence
  Description of Artificial Sequence: Synthetic oligonucleotide
  Sense strand starting at position 2797 SEQ ID NO: 3078
cugcuaugauggguacaaa

SEQ ID NO: 239159 - RNA, 19 nt, Artificial Sequence
  Description of Artificial Sequence: Synthetic oligonucleotide
  Antisense strand to SEQ ID NO: 239158
uuuguacccaucauagcag

SEQ ID NO: 239160 - RNA, 19 nt, Artificial Sequence
  Description of Artificial Sequence: Synthetic oligonucleotide
  Sense strand starting at position 2906 SEQ ID NO: 3078
aacagagaauguuauuuga

SEQ ID NO: 239161 - RNA, 19 nt, Artificial Sequence
  Description of Artificial Sequence: Synthetic oligonucleotide
  Antisense strand to SEQ ID NO: 239160
ucaaauaacauucucuguu

SEQ ID NO: 239162 - RNA, 19 nt, Artificial Sequence
  Description of Artificial Sequence: Synthetic oligonucleotide
  Sense strand starting at position 2941 SEQ ID NO: 3078
ucacucugguuaccagaaa

SEQ ID NO: 239163 - RNA, 19 nt, Artificial Sequence
  Description of Artificial Sequence: Synthetic oligonucleotide
  Antisense strand to SEQ ID NO: 239162
uuucugguaaccagaguga

SEQ ID NO: 239164 - RNA, 19 nt, Artificial Sequence
  Description of Artificial Sequence: Synthetic oligonucleotide
  Sense strand starting at position 3162 SEQ ID NO: 3078
caguccaggaguugaguau

SEQ ID NO: 239165 - RNA, 19 nt, Artificial Sequence
  Description of Artificial Sequence: Synthetic oligonucleotide
  Antisense strand to SEQ ID NO: 239164
auacucaacuccuggacug

SEQ ID NO: 239166 - RNA, 19 nt, Artificial Sequence
  Description of Artificial Sequence: Synthetic oligonucleotide
  Sense strand starting at position 3169 SEQ ID NO: 3078
ggaguugaguaugccauca

SEQ ID NO: 239167 - RNA, 19 nt, Artificial Sequence
  Description of Artificial Sequence: Synthetic oligonucleotide
  Antisense strand to SEQ ID NO: 239166
ugauggcauacucaacucc

SEQ ID NO: 239168 - RNA, 19 nt, Artificial Sequence
  Description of Artificial Sequence: Synthetic oligonucleotide
  Sense strand starting at position 3174 SEQ ID NO: 3078
ugaguaugccaucagaauu

SEQ ID NO: 239169 - RNA, 19 nt, Artificial Sequence
  Description of Artificial Sequence: Synthetic oligonucleotide
  Antisense strand to SEQ ID NO: 239168
aauucugauggcauacuca

SEQ ID NO: 239170 - RNA, 19 nt, Artificial Sequence
  Description of Artificial Sequence: Synthetic oligonucleotide
  Sense strand starting at position 3185 SEQ ID NO: 3078
ucagaauucuguuuagaaa

SEQ ID NO: 239171 - RNA, 19 nt, Artificial Sequence
  Description of Artificial Sequence: Synthetic oligonucleotide
  Antisense strand to SEQ ID NO: 239170
uuucuaaacagaauucuga

SEQ ID NO: 239172 - RNA, 19 nt, Artificial Sequence
  Description of Artificial Sequence: Synthetic oligonucleotide
  Sense strand starting at position 3263 SEQ ID NO: 3078
gcaguuccaguauauguua

SEQ ID NO: 239173 - RNA, 19 nt, Artificial Sequence
  Description of Artificial Sequence: Synthetic oligonucleotide
  Antisense strand to SEQ ID NO: 239172
uaacauauacuggaacugc

SEQ ID NO: 239174 - RNA, 19 nt, Artificial Sequence
  Description of Artificial Sequence: Synthetic oligonucleotide
  Sense strand starting at position 3427 SEQ ID NO: 3078
uggcuauaugaauggagau

SEQ ID NO: 239175 - RNA, 19 nt, Artificial Sequence
  Description of Artificial Sequence: Synthetic oligonucleotide
  Antisense strand to SEQ ID NO: 239174
aucuccauucauauagcca

SEQ ID NO: 239176 - RNA, 19 nt, Artificial Sequence
  Description of Artificial Sequence: Synthetic oligonucleotide
  Sense strand starting at position 3428 SEQ ID NO: 3078
ggcuauaugaauggagauu

SEQ ID NO: 239177 - RNA, 19 nt, Artificial Sequence
  Description of Artificial Sequence: Synthetic oligonucleotide
  Antisense strand to SEQ ID NO: 239176
aaucuccauucauauagcc

SEQ ID NO: 239178 - RNA, 19 nt, Artificial Sequence
  Description of Artificial Sequence: Synthetic oligonucleotide
  Sense strand starting at position 3480 SEQ ID NO: 3078
guuauaccuaccggagaaa

SEQ ID NO: 239179 - RNA, 19 nt, Artificial Sequence
  Description of Artificial Sequence: Synthetic oligonucleotide
  Antisense strand to SEQ ID NO: 239178
uuucuccgguagguauaac

SEQ ID NO: 239180 - RNA, 19 nt, Artificial Sequence
  Description of Artificial Sequence: Synthetic oligonucleotide
  Sense strand starting at position 3637 SEQ ID NO: 3078
uccacaagugagcgaaauu

SEQ ID NO: 239181 - RNA, 19 nt, Artificial Sequence
  Description of Artificial Sequence: Synthetic oligonucleotide
  Antisense strand to SEQ ID NO: 239180
aauuucgcucacuugugga

SEQ ID NO: 239182 - RNA, 19 nt, Artificial Sequence
  Description of Artificial Sequence: Synthetic oligonucleotide
  Sense strand starting at position 3723 SEQ ID NO: 3078
ucaugaauuggcuaucaau

SEQ ID NO: 239183 - RNA, 19 nt, Artificial Sequence
  Description of Artificial Sequence: Synthetic oligonucleotide
  Antisense strand to SEQ ID NO: 239182
auugauagccaauucauga

SEQ ID NO: 239184 - RNA, 19 nt, Artificial Sequence
  Description of Artificial Sequence: Synthetic oligonucleotide
  Sense strand starting at position 3798 SEQ ID NO: 3078
acaugugcacuuugaggaa

SEQ ID NO: 239185 - RNA, 19 nt, Artificial Sequence
  Description of Artificial Sequence: Synthetic oligonucleotide
  Antisense strand to SEQ ID NO: 239184
uuccucaaagugcacaugu

SEQ ID NO: 239186 - RNA, 19 nt, Artificial Sequence
  Description of Artificial Sequence: Synthetic oligonucleotide
  Sense strand starting at position 70 SEQ ID NO: 3079
ugugacaaggcucauauua

SEQ ID NO: 239187 - RNA, 19 nt, Artificial Sequence
  Description of Artificial Sequence: Synthetic oligonucleotide
  Antisense strand to SEQ ID NO: 239186
uaauaugagccuugucaca

SEQ ID NO: 239188 - RNA, 19 nt, Artificial Sequence
  Description of Artificial Sequence: Synthetic oligonucleotide
  Sense strand starting at position 354 SEQ ID NO: 3079
gaagucauacauuguuaug

SEQ ID NO: 239189 - RNA, 19 nt, Artificial Sequence
  Description of Artificial Sequence: Synthetic oligonucleotide
  Antisense strand to SEQ ID NO: 239188
cauaacaauguaugacuuc

SEQ ID NO: 239190 - RNA, 19 nt, Artificial Sequence
  Description of Artificial Sequence: Synthetic oligonucleotide
  Sense strand starting at position 368 SEQ ID NO: 3079
uuaugcauccaugauauug

SEQ ID NO: 239191 - RNA, 19 nt, Artificial Sequence
  Description of Artificial Sequence: Synthetic oligonucleotide
  Antisense strand to SEQ ID NO: 239190
caauaucauggaugcauaa

SEQ ID NO: 239192 - RNA, 19 nt, Artificial Sequence
  Description of Artificial Sequence: Synthetic oligonucleotide
  Sense strand starting at position 775 SEQ ID NO: 3079
ugcugaaugcuauggagau

SEQ ID NO: 239193 - RNA, 19 nt, Artificial Sequence
  Description of Artificial Sequence: Synthetic oligonucleotide
  Antisense strand to SEQ ID NO: 239192
aucuccauagcauucagca

SEQ ID NO: 239194 - RNA, 19 nt, Artificial Sequence
  Description of Artificial Sequence: Synthetic oligonucleotide
  Sense strand starting at position 782 SEQ ID NO: 3079
ugcuauggagauugggaaa

SEQ ID NO: 239195 - RNA, 19 nt, Artificial Sequence
  Description of Artificial Sequence: Synthetic oligonucleotide
  Antisense strand to SEQ ID NO: 239194
uuucccaaucuccauagca

SEQ ID NO: 239196 - RNA, 19 nt, Artificial Sequence
  Description of Artificial Sequence: Synthetic oligonucleotide
  Sense strand starting at position 888 SEQ ID NO: 3079
cucuaugugggaggugaau

SEQ ID NO: 239197 - RNA, 19 nt, Artificial Sequence
  Description of Artificial Sequence: Synthetic oligonucleotide
  Antisense strand to SEQ ID NO: 239196
auucaccucccacauagag

SEQ ID NO: 239198 - RNA, 19 nt, Artificial Sequence
  Description of Artificial Sequence: Synthetic oligonucleotide
  Sense strand starting at position 945 SEQ ID NO: 3079
aauagaguuuacuuuguga

SEQ ID NO: 239199 - RNA, 19 nt, Artificial Sequence
  Description of Artificial Sequence: Synthetic oligonucleotide
  Antisense strand to SEQ ID NO: 239198
ucacaaaguaaacucuauu

SEQ ID NO: 239200 - RNA, 19 nt, Artificial Sequence
  Description of Artificial Sequence: Synthetic oligonucleotide
  Sense strand starting at position 947 SEQ ID NO: 3079
uagaguuuacuuugugaaa

SEQ ID NO: 239201 - RNA, 19 nt, Artificial Sequence
  Description of Artificial Sequence: Synthetic oligonucleotide
  Antisense strand to SEQ ID NO: 239200
uuucacaaaguaaacucua

SEQ ID NO: 239202 - RNA, 19 nt, Artificial Sequence
  Description of Artificial Sequence: Synthetic oligonucleotide
  Sense strand starting at position 1051 SEQ ID NO: 3079
gagagcucucaaugaaacg

SEQ ID NO: 239203 - RNA, 19 nt, Artificial Sequence
  Description of Artificial Sequence: Synthetic oligonucleotide
  Antisense strand to SEQ ID NO: 239202
cguuucauugagagcucuc

SEQ ID NO: 239204 - RNA, 19 nt, Artificial Sequence
  Description of Artificial Sequence: Synthetic oligonucleotide
  Sense strand starting at position 1056 SEQ ID NO: 3079
cucucaaugaaacggugau

SEQ ID NO: 239205 - RNA, 19 nt, Artificial Sequence
  Description of Artificial Sequence: Synthetic oligonucleotide
  Antisense strand to SEQ ID NO: 239204
aucaccguuucauugagag

SEQ ID NO: 239206 - RNA, 19 nt, Artificial Sequence
  Description of Artificial Sequence: Synthetic oligonucleotide
  Sense strand starting at position 1060 SEQ ID NO: 3079
caaugaaacggugaugcua

SEQ ID NO: 239207 - RNA, 19 nt, Artificial Sequence
  Description of Artificial Sequence: Synthetic oligonucleotide
  Antisense strand to SEQ ID NO: 239206
uagcaucaccguuucauug

SEQ ID NO: 239208 - RNA, 19 nt, Artificial Sequence
  Description of Artificial Sequence: Synthetic oligonucleotide
  Sense strand starting at position 1086 SEQ ID NO: 3079
ggcgcugugagaucgcaau

SEQ ID NO: 239209 - RNA, 19 nt, Artificial Sequence
  Description of Artificial Sequence: Synthetic oligonucleotide
  Antisense strand to SEQ ID NO: 239208
auugcgaucucacagcgcc

SEQ ID NO: 239210 - RNA, 19 nt, Artificial Sequence
  Description of Artificial Sequence: Synthetic oligonucleotide
  Sense strand starting at position 1088 SEQ ID NO: 3079
cgcugugagaucgcaaugu

SEQ ID NO: 239211 - RNA, 19 nt, Artificial Sequence
  Description of Artificial Sequence: Synthetic oligonucleotide
  Antisense strand to SEQ ID NO: 239210
acauugcgaucucacagcg

SEQ ID NO: 239212 - RNA, 19 nt, Artificial Sequence
  Description of Artificial Sequence: Synthetic oligonucleotide
  Sense strand starting at position 1098 SEQ ID NO: 3079
ucgcaauguccugcugauc

SEQ ID NO: 239213 - RNA, 19 nt, Artificial Sequence
  Description of Artificial Sequence: Synthetic oligonucleotide
  Antisense strand to SEQ ID NO: 239212
gaucagcaggacauugcga

SEQ ID NO: 239214 - RNA, 19 nt, Artificial Sequence
  Description of Artificial Sequence: Synthetic oligonucleotide
  Sense strand starting at position 2021 SEQ ID NO: 3079
gccaucugagaucaccuaa

SEQ ID NO: 239215 - RNA, 19 nt, Artificial Sequence
  Description of Artificial Sequence: Synthetic oligonucleotide
  Antisense strand to SEQ ID NO: 239214
uuaggugaucucagauggc

SEQ ID NO: 239216 - RNA, 19 nt, Artificial Sequence
  Description of Artificial Sequence: Synthetic oligonucleotide
  Sense strand starting at position 2176 SEQ ID NO: 3079
ggaguccaaucauuauaga

SEQ ID NO: 239217 - RNA, 19 nt, Artificial Sequence
  Description of Artificial Sequence: Synthetic oligonucleotide
  Antisense strand to SEQ ID NO: 239216
ucuauaaugauuggacucc

SEQ ID NO: 239218 - RNA, 19 nt, Artificial Sequence
  Description of Artificial Sequence: Synthetic oligonucleotide
  Sense strand starting at position 2210 SEQ ID NO: 3079
ugagaauucucaguaaagc

SEQ ID NO: 239219 - RNA, 19 nt, Artificial Sequence
  Description of Artificial Sequence: Synthetic oligonucleotide
  Antisense strand to SEQ ID NO: 239218
gcuuuacugagaauucuca

SEQ ID NO: 239220 - RNA, 19 nt, Artificial Sequence
  Description of Artificial Sequence: Synthetic oligonucleotide
  Sense strand starting at position 2218 SEQ ID NO: 3079
cucaguaaagcaugaguaa

SEQ ID NO: 239221 - RNA, 19 nt, Artificial Sequence
  Description of Artificial Sequence: Synthetic oligonucleotide
  Antisense strand to SEQ ID NO: 239220
uuacucaugcuuuacugag

SEQ ID NO: 239222 - RNA, 19 nt, Artificial Sequence
  Description of Artificial Sequence: Synthetic oligonucleotide
  Sense strand starting at position 2237 SEQ ID NO: 3079
accugaaggugucuggaau

SEQ ID NO: 239223 - RNA, 19 nt, Artificial Sequence
  Description of Artificial Sequence: Synthetic oligonucleotide
  Antisense strand to SEQ ID NO: 239222
auuccagacaccuucaggu

SEQ ID NO: 239224 - RNA, 19 nt, Artificial Sequence
  Description of Artificial Sequence: Synthetic oligonucleotide
  Sense strand starting at position 2238 SEQ ID NO: 3079
ccugaaggugucuggaauu

SEQ ID NO: 239225 - RNA, 19 nt, Artificial Sequence
  Description of Artificial Sequence: Synthetic oligonucleotide
  Antisense strand to SEQ ID NO: 239224
aauuccagacaccuucagg

SEQ ID NO: 239226 - RNA, 19 nt, Artificial Sequence
  Description of Artificial Sequence: Synthetic oligonucleotide
  Sense strand starting at position 2481 SEQ ID NO: 3079
aacccagacuguucgaaau

SEQ ID NO: 239227 - RNA, 19 nt, Artificial Sequence
  Description of Artificial Sequence: Synthetic oligonucleotide
  Antisense strand to SEQ ID NO: 239226
auuucgaacagucuggguu

SEQ ID NO: 239228 - RNA, 19 nt, Artificial Sequence
  Description of Artificial Sequence: Synthetic oligonucleotide
  Sense strand starting at position 2545 SEQ ID NO: 3079
cucugaaaugcugggugau

SEQ ID NO: 239229 - RNA, 19 nt, Artificial Sequence
  Description of Artificial Sequence: Synthetic oligonucleotide
  Antisense strand to SEQ ID NO: 239228
aucacccagcauuucagag

SEQ ID NO: 239230 - RNA, 19 nt, Artificial Sequence
  Description of Artificial Sequence: Synthetic oligonucleotide
  Sense strand starting at position 2546 SEQ ID NO: 3079
ucugaaaugcugggugauc

SEQ ID NO: 239231 - RNA, 19 nt, Artificial Sequence
  Description of Artificial Sequence: Synthetic oligonucleotide
  Antisense strand to SEQ ID NO: 239230
gaucacccagcauuucaga

SEQ ID NO: 239232 - RNA, 19 nt, Artificial Sequence
  Description of Artificial Sequence: Synthetic oligonucleotide
  Sense strand starting at position 2582 SEQ ID NO: 3079
guaagugugcccgucccua

SEQ ID NO: 239233 - RNA, 19 nt, Artificial Sequence
  Description of Artificial Sequence: Synthetic oligonucleotide
  Antisense strand to SEQ ID NO: 239232
uagggacgggcacacuuac

SEQ ID NO: 239234 - RNA, 19 nt, Artificial Sequence
  Description of Artificial Sequence: Synthetic oligonucleotide
  Sense strand starting at position 2598 SEQ ID NO: 3079
cuaugcaccguugaggauu

SEQ ID NO: 239235 - RNA, 19 nt, Artificial Sequence
  Description of Artificial Sequence: Synthetic oligonucleotide
  Antisense strand to SEQ ID NO: 239234
aauccucaacggugcauag

SEQ ID NO: 239236 - RNA, 19 nt, Artificial Sequence
  Description of Artificial Sequence: Synthetic oligonucleotide
  Sense strand starting at position 2933 SEQ ID NO: 3079
ccagaagugaccuggguca

SEQ ID NO: 239237 - RNA, 19 nt, Artificial Sequence
  Description of Artificial Sequence: Synthetic oligonucleotide
  Antisense strand to SEQ ID NO: 239236
ugacccaggucacuucugg

SEQ ID NO: 239238 - RNA, 19 nt, Artificial Sequence
  Description of Artificial Sequence: Synthetic oligonucleotide
  Sense strand starting at position 2935 SEQ ID NO: 3079
agaagugaccugggucaca

SEQ ID NO: 239239 - RNA, 19 nt, Artificial Sequence
  Description of Artificial Sequence: Synthetic oligonucleotide
  Antisense strand to SEQ ID NO: 239238
ugugacccaggucacuucu

SEQ ID NO: 239240 - RNA, 19 nt, Artificial Sequence
  Description of Artificial Sequence: Synthetic oligonucleotide
  Sense strand starting at position 2956 SEQ ID NO: 3079
gggugugaucucugggauc

SEQ ID NO: 239241 - RNA, 19 nt, Artificial Sequence
  Description of Artificial Sequence: Synthetic oligonucleotide
  Antisense strand to SEQ ID NO: 239240
gaucccagagaucacaccc

SEQ ID NO: 239242 - RNA, 19 nt, Artificial Sequence
  Description of Artificial Sequence: Synthetic oligonucleotide
  Sense strand starting at position 3024 SEQ ID NO: 3079
guccauggacugugagaaa

SEQ ID NO: 239243 - RNA, 19 nt, Artificial Sequence
  Description of Artificial Sequence: Synthetic oligonucleotide
  Antisense strand to SEQ ID NO: 239242
uuucucacaguccauggac

SEQ ID NO: 239244 - RNA, 19 nt, Artificial Sequence
  Description of Artificial Sequence: Synthetic oligonucleotide
  Sense strand starting at position 3362 SEQ ID NO: 3079
ugauucucuuucucaggaa

SEQ ID NO: 239245 - RNA, 19 nt, Artificial Sequence
  Description of Artificial Sequence: Synthetic oligonucleotide
  Antisense strand to SEQ ID NO: 239244
uuccugagaaagagaauca

SEQ ID NO: 239246 - RNA, 19 nt, Artificial Sequence
  Description of Artificial Sequence: Synthetic oligonucleotide
  Sense strand starting at position 3473 SEQ ID NO: 3079
gauucuaugccugaguuua

SEQ ID NO: 239247 - RNA, 19 nt, Artificial Sequence
  Description of Artificial Sequence: Synthetic oligonucleotide
  Antisense strand to SEQ ID NO: 239246
uaaacucaggcauagaauc

SEQ ID NO: 239248 - RNA, 19 nt, Artificial Sequence
  Description of Artificial Sequence: Synthetic oligonucleotide
  Sense strand starting at position 3544 SEQ ID NO: 3079
acaaaugagguauguaguu

SEQ ID NO: 239249 - RNA, 19 nt, Artificial Sequence
  Description of Artificial Sequence: Synthetic oligonucleotide
  Antisense strand to SEQ ID NO: 239248
aacuacauaccucauuugu

SEQ ID NO: 239250 - RNA, 19 nt, Artificial Sequence
  Description of Artificial Sequence: Synthetic oligonucleotide
  Sense strand starting at position 3554 SEQ ID NO: 3079
uauguaguugcagacaacu

SEQ ID NO: 239251 - RNA, 19 nt, Artificial Sequence
  Description of Artificial Sequence: Synthetic oligonucleotide
  Antisense strand to SEQ ID NO: 239250
aguugucugcaacuacaua

SEQ ID NO: 239252 - RNA, 19 nt, Artificial Sequence
  Description of Artificial Sequence: Synthetic oligonucleotide
  Sense strand starting at position 3666 SEQ ID NO: 3079
agaauaauauaguugagca

SEQ ID NO: 239253 - RNA, 19 nt, Artificial Sequence
  Description of Artificial Sequence: Synthetic oligonucleotide
  Antisense strand to SEQ ID NO: 239252
ugcucaacuauauuauucu

SEQ ID NO: 239254 - RNA, 19 nt, Artificial Sequence
  Description of Artificial Sequence: Synthetic oligonucleotide
  Sense strand starting at position 3673 SEQ ID NO: 3079
uauaguugagcacaugaau

SEQ ID NO: 239255 - RNA, 19 nt, Artificial Sequence
  Description of Artificial Sequence: Synthetic oligonucleotide
  Antisense strand to SEQ ID NO: 239254
auucaugugcucaacuaua

SEQ ID NO: 239256 - RNA, 19 nt, Artificial Sequence
  Description of Artificial Sequence: Synthetic oligonucleotide
  Sense strand starting at position 3684 SEQ ID NO: 3079
acaugaauuaguggcugaa

SEQ ID NO: 239257 - RNA, 19 nt, Artificial Sequence
  Description of Artificial Sequence: Synthetic oligonucleotide
  Antisense strand to SEQ ID NO: 239256
uucagccacuaauucaugu

SEQ ID NO: 239258 - RNA, 19 nt, Artificial Sequence
  Description of Artificial Sequence: Synthetic oligonucleotide
  Sense strand starting at position 3686 SEQ ID NO: 3079
augaauuaguggcugaagu

SEQ ID NO: 239259 - RNA, 19 nt, Artificial Sequence
  Description of Artificial Sequence: Synthetic oligonucleotide
  Antisense strand to SEQ ID NO: 239258
acuucagccacuaauucau

SEQ ID NO: 239260 - RNA, 19 nt, Artificial Sequence
  Description of Artificial Sequence: Synthetic oligonucleotide
  Sense strand starting at position 3688 SEQ ID NO: 3079
gaauuaguggcugaaguuu

SEQ ID NO: 239261 - RNA, 19 nt, Artificial Sequence
  Description of Artificial Sequence: Synthetic oligonucleotide
  Antisense strand to SEQ ID NO: 239260
aaacuucagccacuaauuc

SEQ ID NO: 239262 - RNA, 19 nt, Artificial Sequence
  Description of Artificial Sequence: Synthetic oligonucleotide
  Sense strand starting at position 3880 SEQ ID NO: 3079
auagguggaaucuguauau

SEQ ID NO: 239263 - RNA, 19 nt, Artificial Sequence
  Description of Artificial Sequence: Synthetic oligonucleotide
  Antisense strand to SEQ ID NO: 239262
auauacagauuccaccuau

SEQ ID NO: 239264 - RNA, 19 nt, Artificial Sequence
  Description of Artificial Sequence: Synthetic oligonucleotide
  Sense strand starting at position 3884 SEQ ID NO: 3079
guggaaucuguauaugucu

SEQ ID NO: 239265 - RNA, 19 nt, Artificial Sequence
  Description of Artificial Sequence: Synthetic oligonucleotide
  Antisense strand to SEQ ID NO: 239264
agacauauacagauuccac

SEQ ID NO: 239266 - RNA, 19 nt, Artificial Sequence
  Description of Artificial Sequence: Synthetic oligonucleotide
  Sense strand starting at position 17 SEQ ID NO: 3080
gguggucucccaggaccau

SEQ ID NO: 239267 - RNA, 19 nt, Artificial Sequence
  Description of Artificial Sequence: Synthetic oligonucleotide
  Antisense strand to SEQ ID NO: 239266
augguccugggagaccacc

SEQ ID NO: 239268 - RNA, 19 nt, Artificial Sequence
  Description of Artificial Sequence: Synthetic oligonucleotide
  Sense strand starting at position 154 SEQ ID NO: 3080
agaguuuauuuacaaggua

SEQ ID NO: 239269 - RNA, 19 nt, Artificial Sequence
  Description of Artificial Sequence: Synthetic oligonucleotide
  Antisense strand to SEQ ID NO: 239268
uaccuuguaaauaaacucu

SEQ ID NO: 239270 - RNA, 19 nt, Artificial Sequence
  Description of Artificial Sequence: Synthetic oligonucleotide
  Sense strand starting at position 574 SEQ ID NO: 3080
agaguaaaguccuuuccuu

SEQ ID NO: 239271 - RNA, 19 nt, Artificial Sequence
  Description of Artificial Sequence: Synthetic oligonucleotide
  Antisense strand to SEQ ID NO: 239270
aaggaaaggacuuuacucu

SEQ ID NO: 239272 - RNA, 19 nt, Artificial Sequence
  Description of Artificial Sequence: Synthetic oligonucleotide
  Sense strand starting at position 620 SEQ ID NO: 3080
cauuuagauuaugguauga

SEQ ID NO: 239273 - RNA, 19 nt, Artificial Sequence
  Description of Artificial Sequence: Synthetic oligonucleotide
  Antisense strand to SEQ ID NO: 239272
ucauaccauaaucuaaaug

SEQ ID NO: 239274 - RNA, 19 nt, Artificial Sequence
  Description of Artificial Sequence: Synthetic oligonucleotide
  Sense strand starting at position 773 SEQ ID NO: 3080
aagggaugccauuagcuaa

SEQ ID NO: 239275 - RNA, 19 nt, Artificial Sequence
  Description of Artificial Sequence: Synthetic oligonucleotide
  Antisense strand to SEQ ID NO: 239274
uuagcuaauggcaucccuu

SEQ ID NO: 239276 - RNA, 19 nt, Artificial Sequence
  Description of Artificial Sequence: Synthetic oligonucleotide
  Sense strand starting at position 909 SEQ ID NO: 3080
ucagauacgccagacaagu

SEQ ID NO: 239277 - RNA, 19 nt, Artificial Sequence
  Description of Artificial Sequence: Synthetic oligonucleotide
  Antisense strand to SEQ ID NO: 239276
acuugucuggcguaucuga

SEQ ID NO: 239278 - RNA, 19 nt, Artificial Sequence
  Description of Artificial Sequence: Synthetic oligonucleotide
  Sense strand starting at position 970 SEQ ID NO: 3080
gugaaauccugucuacaga

SEQ ID NO: 239279 - RNA, 19 nt, Artificial Sequence
  Description of Artificial Sequence: Synthetic oligonucleotide
  Antisense strand to SEQ ID NO: 239278
ucuguagacaggauuucac

SEQ ID NO: 239280 - RNA, 19 nt, Artificial Sequence
  Description of Artificial Sequence: Synthetic oligonucleotide
  Sense strand starting at position 1068 SEQ ID NO: 3080
accgaaagcucuucugaua

SEQ ID NO: 239281 - RNA, 19 nt, Artificial Sequence
  Description of Artificial Sequence: Synthetic oligonucleotide
  Antisense strand to SEQ ID NO: 239280
uaucagaagagcuuucggu

SEQ ID NO: 239282 - RNA, 19 nt, Artificial Sequence
  Description of Artificial Sequence: Synthetic oligonucleotide
  Sense strand starting at position 1543 SEQ ID NO: 3080
acugaagagcugugcagaa

SEQ ID NO: 239283 - RNA, 19 nt, Artificial Sequence
  Description of Artificial Sequence: Synthetic oligonucleotide
  Antisense strand to SEQ ID NO: 239282
uucugcacagcucuucagu

SEQ ID NO: 239284 - RNA, 19 nt, Artificial Sequence
  Description of Artificial Sequence: Synthetic oligonucleotide
  Sense strand starting at position 2007 SEQ ID NO: 3080
accuuugcacuuugaggua

SEQ ID NO: 239285 - RNA, 19 nt, Artificial Sequence
  Description of Artificial Sequence: Synthetic oligonucleotide
  Antisense strand to SEQ ID NO: 239284
uaccucaaagugcaaaggu

SEQ ID NO: 239286 - RNA, 19 nt, Artificial Sequence
  Description of Artificial Sequence: Synthetic oligonucleotide
  Sense strand starting at position 2031 SEQ ID NO: 3080
ccaucucuacugcaguauu

SEQ ID NO: 239287 - RNA, 19 nt, Artificial Sequence
  Description of Artificial Sequence: Synthetic oligonucleotide
  Antisense strand to SEQ ID NO: 239286
aauacugcaguagagaugg

SEQ ID NO: 239288 - RNA, 19 nt, Artificial Sequence
  Description of Artificial Sequence: Synthetic oligonucleotide
  Sense strand starting at position 2124 SEQ ID NO: 3080
ugugucauugaugaaguuu

SEQ ID NO: 239289 - RNA, 19 nt, Artificial Sequence
  Description of Artificial Sequence: Synthetic oligonucleotide
  Antisense strand to SEQ ID NO: 239288
aaacuucaucaaugacaca

SEQ ID NO: 239290 - RNA, 19 nt, Artificial Sequence
  Description of Artificial Sequence: Synthetic oligonucleotide
  Sense strand starting at position 2202 SEQ ID NO: 3080
ucuugcauggugcaauaau

SEQ ID NO: 239291 - RNA, 19 nt, Artificial Sequence
  Description of Artificial Sequence: Synthetic oligonucleotide
  Antisense strand to SEQ ID NO: 239290
auuauugcaccaugcaaga

SEQ ID NO: 239292 - RNA, 19 nt, Artificial Sequence
  Description of Artificial Sequence: Synthetic oligonucleotide
  Sense strand starting at position 2247 SEQ ID NO: 3080
aguagaauugauuaugugu

SEQ ID NO: 239293 - RNA, 19 nt, Artificial Sequence
  Description of Artificial Sequence: Synthetic oligonucleotide
  Antisense strand to SEQ ID NO: 239292
acacauaaucaauucuacu

SEQ ID NO: 239294 - RNA, 19 nt, Artificial Sequence
  Description of Artificial Sequence: Synthetic oligonucleotide
  Sense strand starting at position 2266 SEQ ID NO: 3080
uuacauuucugccugcaag

SEQ ID NO: 239295 - RNA, 19 nt, Artificial Sequence
  Description of Artificial Sequence: Synthetic oligonucleotide
  Antisense strand to SEQ ID NO: 239294
cuugcaggcagaaauguaa

SEQ ID NO: 239296 - RNA, 19 nt, Artificial Sequence
  Description of Artificial Sequence: Synthetic oligonucleotide
  Sense strand starting at position 2329 SEQ ID NO: 3080
ugcagauucuaguuuagaa

SEQ ID NO: 239297 - RNA, 19 nt, Artificial Sequence
  Description of Artificial Sequence: Synthetic oligonucleotide
  Antisense strand to SEQ ID NO: 239296
uucuaaacuagaaucugca

SEQ ID NO: 239298 - RNA, 19 nt, Artificial Sequence
  Description of Artificial Sequence: Synthetic oligonucleotide
  Sense strand starting at position 2756 SEQ ID NO: 3080
gauaauguaguagaguauu

SEQ ID NO: 239299 - RNA, 19 nt, Artificial Sequence
  Description of Artificial Sequence: Synthetic oligonucleotide
  Antisense strand to SEQ ID NO: 239298
aauacucuacuacauuauc

SEQ ID NO: 239300 - RNA, 19 nt, Artificial Sequence
  Description of Artificial Sequence: Synthetic oligonucleotide
  Sense strand starting at position 2823 SEQ ID NO: 3080
caagaugagugaucucuuu

SEQ ID NO: 239301 - RNA, 19 nt, Artificial Sequence
  Description of Artificial Sequence: Synthetic oligonucleotide
  Antisense strand to SEQ ID NO: 239300
aaagagaucacucaucuug

SEQ ID NO: 239302 - RNA, 19 nt, Artificial Sequence
  Description of Artificial Sequence: Synthetic oligonucleotide
  Sense strand starting at position 2873 SEQ ID NO: 3080
uguguuauucgccugcauu

SEQ ID NO: 239303 - RNA, 19 nt, Artificial Sequence
  Description of Artificial Sequence: Synthetic oligonucleotide
  Antisense strand to SEQ ID NO: 239302
aaugcaggcgaauaacaca

SEQ ID NO: 239304 - RNA, 19 nt, Artificial Sequence
  Description of Artificial Sequence: Synthetic oligonucleotide
  Sense strand starting at position 2875 SEQ ID NO: 3080
uguuauucgccugcauuga

SEQ ID NO: 239305 - RNA, 19 nt, Artificial Sequence
  Description of Artificial Sequence: Synthetic oligonucleotide
  Antisense strand to SEQ ID NO: 239304
ucaaugcaggcgaauaaca

SEQ ID NO: 239306 - RNA, 19 nt, Artificial Sequence
  Description of Artificial Sequence: Synthetic oligonucleotide
  Sense strand starting at position 2950 SEQ ID NO: 3080
gaauaauugggaugugcaa

SEQ ID NO: 239307 - RNA, 19 nt, Artificial Sequence
  Description of Artificial Sequence: Synthetic oligonucleotide
  Antisense strand to SEQ ID NO: 239306
uugcacaucccaauuauuc

SEQ ID NO: 239308 - RNA, 19 nt, Artificial Sequence
  Description of Artificial Sequence: Synthetic oligonucleotide
  Sense strand starting at position 3036 SEQ ID NO: 3080
cucccauuaguuuggaguu

SEQ ID NO: 239309 - RNA, 19 nt, Artificial Sequence
  Description of Artificial Sequence: Synthetic oligonucleotide
  Antisense strand to SEQ ID NO: 239308
aacuccaaacuaaugggag

SEQ ID NO: 239310 - RNA, 19 nt, Artificial Sequence
  Description of Artificial Sequence: Synthetic oligonucleotide
  Sense strand starting at position 3108 SEQ ID NO: 3080
guaucuacuggcuauguga

SEQ ID NO: 239311 - RNA, 19 nt, Artificial Sequence
  Description of Artificial Sequence: Synthetic oligonucleotide
  Antisense strand to SEQ ID NO: 239310
ucacauagccaguagauac

SEQ ID NO: 239312 - RNA, 19 nt, Artificial Sequence
  Description of Artificial Sequence: Synthetic oligonucleotide
  Sense strand starting at position 3116 SEQ ID NO: 3080
uggcuaugugacugacuua

SEQ ID NO: 239313 - RNA, 19 nt, Artificial Sequence
  Description of Artificial Sequence: Synthetic oligonucleotide
  Antisense strand to SEQ ID NO: 239312
uaagucagucacauagcca

SEQ ID NO: 239314 - RNA, 19 nt, Artificial Sequence
  Description of Artificial Sequence: Synthetic oligonucleotide
  Sense strand starting at position 3117 SEQ ID NO: 3080
ggcuaugugacugacuuaa

SEQ ID NO: 239315 - RNA, 19 nt, Artificial Sequence
  Description of Artificial Sequence: Synthetic oligonucleotide
  Antisense strand to SEQ ID NO: 239314
uuaagucagucacauagcc

SEQ ID NO: 239316 - RNA, 19 nt, Artificial Sequence
  Description of Artificial Sequence: Synthetic oligonucleotide
  Sense strand starting at position 3119 SEQ ID NO: 3080
cuaugugacugacuuaacu

SEQ ID NO: 239317 - RNA, 19 nt, Artificial Sequence
  Description of Artificial Sequence: Synthetic oligonucleotide
  Antisense strand to SEQ ID NO: 239316
aguuaagucagucacauag

SEQ ID NO: 239318 - RNA, 19 nt, Artificial Sequence
  Description of Artificial Sequence: Synthetic oligonucleotide
  Sense strand starting at position 3183 SEQ ID NO: 3080
cuaucauaagguuguugga

SEQ ID NO: 239319 - RNA, 19 nt, Artificial Sequence
  Description of Artificial Sequence: Synthetic oligonucleotide
  Antisense strand to SEQ ID NO: 239318
uccaacaaccuuaugauag

SEQ ID NO: 239320 - RNA, 19 nt, Artificial Sequence
  Description of Artificial Sequence: Synthetic oligonucleotide
  Sense strand starting at position 3272 SEQ ID NO: 3080
ggauaucuuuaagcaguau

SEQ ID NO: 239321 - RNA, 19 nt, Artificial Sequence
  Description of Artificial Sequence: Synthetic oligonucleotide
  Antisense strand to SEQ ID NO: 239320
auacugcuuaaagauaucc

SEQ ID NO: 239322 - RNA, 19 nt, Artificial Sequence
  Description of Artificial Sequence: Synthetic oligonucleotide
  Sense strand starting at position 3281 SEQ ID NO: 3080
uaagcaguaucaucacgau

SEQ ID NO: 239323 - RNA, 19 nt, Artificial Sequence
  Description of Artificial Sequence: Synthetic oligonucleotide
  Antisense strand to SEQ ID NO: 239322
aucgugaugauacugcuua

SEQ ID NO: 239324 - RNA, 19 nt, Artificial Sequence
  Description of Artificial Sequence: Synthetic oligonucleotide
  Sense strand starting at position 3285 SEQ ID NO: 3080
caguaucaucacgaugaca

SEQ ID NO: 239325 - RNA, 19 nt, Artificial Sequence
  Description of Artificial Sequence: Synthetic oligonucleotide
  Antisense strand to SEQ ID NO: 239324
ugucaucgugaugauacug

SEQ ID NO: 239326 - RNA, 19 nt, Artificial Sequence
  Description of Artificial Sequence: Synthetic oligonucleotide
  Sense strand starting at position 3287 SEQ ID NO: 3080
guaucaucacgaugacaau

SEQ ID NO: 239327 - RNA, 19 nt, Artificial Sequence
  Description of Artificial Sequence: Synthetic oligonucleotide
  Antisense strand to SEQ ID NO: 239326
auugucaucgugaugauac

SEQ ID NO: 239328 - RNA, 19 nt, Artificial Sequence
  Description of Artificial Sequence: Synthetic oligonucleotide
  Sense strand starting at position 3327 SEQ ID NO: 3080
gggcuuaaaccuggauaac

SEQ ID NO: 239329 - RNA, 19 nt, Artificial Sequence
  Description of Artificial Sequence: Synthetic oligonucleotide
  Antisense strand to SEQ ID NO: 239328
guuauccagguuuaagccc

SEQ ID NO: 239330 - RNA, 19 nt, Artificial Sequence
  Description of Artificial Sequence: Synthetic oligonucleotide
  Sense strand starting at position 3383 SEQ ID NO: 3080
cacacaucgcugggaagau

SEQ ID NO: 239331 - RNA, 19 nt, Artificial Sequence
  Description of Artificial Sequence: Synthetic oligonucleotide
  Antisense strand to SEQ ID NO: 239330
aucuucccagcgaugugug

SEQ ID NO: 239332 - RNA, 19 nt, Artificial Sequence
  Description of Artificial Sequence: Synthetic oligonucleotide
  Sense strand starting at position 3446 SEQ ID NO: 3080
augucucacuggcuacaaa

SEQ ID NO: 239333 - RNA, 19 nt, Artificial Sequence
  Description of Artificial Sequence: Synthetic oligonucleotide
  Antisense strand to SEQ ID NO: 239332
uuuguagccagugagacau

SEQ ID NO: 239334 - RNA, 19 nt, Artificial Sequence
  Description of Artificial Sequence: Synthetic oligonucleotide
  Sense strand starting at position 3466 SEQ ID NO: 3080
caaugagucugauuacgac

SEQ ID NO: 239335 - RNA, 19 nt, Artificial Sequence
  Description of Artificial Sequence: Synthetic oligonucleotide
  Antisense strand to SEQ ID NO: 239334
gucguaaucagacucauug

SEQ ID NO: 239336 - RNA, 19 nt, Artificial Sequence
  Description of Artificial Sequence: Synthetic oligonucleotide
  Sense strand starting at position 3502 SEQ ID NO: 3080
cagcaaacuuguuuaggua

SEQ ID NO: 239337 - RNA, 19 nt, Artificial Sequence
  Description of Artificial Sequence: Synthetic oligonucleotide
  Antisense strand to SEQ ID NO: 239336
uaccuaaacaaguuugcug

SEQ ID NO: 239338 - RNA, 19 nt, Artificial Sequence
  Description of Artificial Sequence: Synthetic oligonucleotide
  Sense strand starting at position 3503 SEQ ID NO: 3080
agcaaacuuguuuagguau

SEQ ID NO: 239339 - RNA, 19 nt, Artificial Sequence
  Description of Artificial Sequence: Synthetic oligonucleotide
  Antisense strand to SEQ ID NO: 239338
auaccuaaacaaguuugcu

SEQ ID NO: 239340 - RNA, 19 nt, Artificial Sequence
  Description of Artificial Sequence: Synthetic oligonucleotide
  Sense strand starting at position 3506 SEQ ID NO: 3080
aaacuuguuuagguaugau

SEQ ID NO: 239341 - RNA, 19 nt, Artificial Sequence
  Description of Artificial Sequence: Synthetic oligonucleotide
  Antisense strand to SEQ ID NO: 239340
aucauaccuaaacaaguuu

SEQ ID NO: 239342 - RNA, 19 nt, Artificial Sequence
  Description of Artificial Sequence: Synthetic oligonucleotide
  Sense strand starting at position 3711 SEQ ID NO: 3080
agaagcaagcccugaucaa

SEQ ID NO: 239343 - RNA, 19 nt, Artificial Sequence
  Description of Artificial Sequence: Synthetic oligonucleotide
  Antisense strand to SEQ ID NO: 239342
uugaucagggcuugcuucu

SEQ ID NO: 239344 - RNA, 19 nt, Artificial Sequence
  Description of Artificial Sequence: Synthetic oligonucleotide
  Sense strand starting at position 3867 SEQ ID NO: 3080
aaauaagugccaugagagu

SEQ ID NO: 239345 - RNA, 19 nt, Artificial Sequence
  Description of Artificial Sequence: Synthetic oligonucleotide
  Antisense strand to SEQ ID NO: 239344
acucucauggcacuuauuu

SEQ ID NO: 239346 - RNA, 19 nt, Artificial Sequence
  Description of Artificial Sequence: Synthetic oligonucleotide
  Sense strand starting at position 196 SEQ ID NO: 3082
cugcuaagguguuugaaau

SEQ ID NO: 239347 - RNA, 19 nt, Artificial Sequence
  Description of Artificial Sequence: Synthetic oligonucleotide
  Antisense strand to SEQ ID NO: 239346
auuucaaacaccuuagcag

SEQ ID NO: 239348 - RNA, 19 nt, Artificial Sequence
  Description of Artificial Sequence: Synthetic oligonucleotide
  Sense strand starting at position 197 SEQ ID NO: 3082
ugcuaagguguuugaaauu

SEQ ID NO: 239349 - RNA, 19 nt, Artificial Sequence
  Description of Artificial Sequence: Synthetic oligonucleotide
  Antisense strand to SEQ ID NO: 239348
aauuucaaacaccuuagca

SEQ ID NO: 239350 - RNA, 19 nt, Artificial Sequence
  Description of Artificial Sequence: Synthetic oligonucleotide
  Sense strand starting at position 209 SEQ ID NO: 3082
ugaaauuaaccacgucaag

SEQ ID NO: 239351 - RNA, 19 nt, Artificial Sequence
  Description of Artificial Sequence: Synthetic oligonucleotide
  Antisense strand to SEQ ID NO: 239350
cuugacgugguuaauuuca

SEQ ID NO: 239352 - RNA, 19 nt, Artificial Sequence
  Description of Artificial Sequence: Synthetic oligonucleotide
  Sense strand starting at position 254 SEQ ID NO: 3082
ugaggcuguguuugagauu

SEQ ID NO: 239353 - RNA, 19 nt, Artificial Sequence
  Description of Artificial Sequence: Synthetic oligonucleotide
  Antisense strand to SEQ ID NO: 239352
aaucucaaacacagccuca

SEQ ID NO: 239354 - RNA, 19 nt, Artificial Sequence
  Description of Artificial Sequence: Synthetic oligonucleotide
  Sense strand starting at position 619 SEQ ID NO: 3082
ggccauggucuggagucaa

SEQ ID NO: 239355 - RNA, 19 nt, Artificial Sequence
  Description of Artificial Sequence: Synthetic oligonucleotide
  Antisense strand to SEQ ID NO: 239354
uugacuccagaccauggcc

SEQ ID NO: 239356 - RNA, 19 nt, Artificial Sequence
  Description of Artificial Sequence: Synthetic oligonucleotide
  Sense strand starting at position 631 SEQ ID NO: 3082
gagucaagucuauaagagc

SEQ ID NO: 239357 - RNA, 19 nt, Artificial Sequence
  Description of Artificial Sequence: Synthetic oligonucleotide
  Antisense strand to SEQ ID NO: 239356
gcucuuauagacuugacuc

SEQ ID NO: 239358 - RNA, 19 nt, Artificial Sequence
  Description of Artificial Sequence: Synthetic oligonucleotide
  Sense strand starting at position 968 SEQ ID NO: 3082
gaagcauggugacuuacuu

SEQ ID NO: 239359 - RNA, 19 nt, Artificial Sequence
  Description of Artificial Sequence: Synthetic oligonucleotide
  Antisense strand to SEQ ID NO: 239358
aaguaagucaccaugcuuc

SEQ ID NO: 239360 - RNA, 19 nt, Artificial Sequence
  Description of Artificial Sequence: Synthetic oligonucleotide
  Sense strand starting at position 992 SEQ ID NO: 3082
gaguccaaaguuugagaaa

SEQ ID NO: 239361 - RNA, 19 nt, Artificial Sequence
  Description of Artificial Sequence: Synthetic oligonucleotide
  Antisense strand to SEQ ID NO: 239360
uuucucaaacuuuggacuc

SEQ ID NO: 239362 - RNA, 19 nt, Artificial Sequence
  Description of Artificial Sequence: Synthetic oligonucleotide
  Sense strand starting at position 1159 SEQ ID NO: 3082
gcaggauggucuccuauaa

SEQ ID NO: 239363 - RNA, 19 nt, Artificial Sequence
  Description of Artificial Sequence: Synthetic oligonucleotide
  Antisense strand to SEQ ID NO: 239362
uuauaggagaccauccugc

SEQ ID NO: 239364 - RNA, 19 nt, Artificial Sequence
  Description of Artificial Sequence: Synthetic oligonucleotide
  Sense strand starting at position 1172 SEQ ID NO: 3082
cuauaaacucuuugacggu

SEQ ID NO: 239365 - RNA, 19 nt, Artificial Sequence
  Description of Artificial Sequence: Synthetic oligonucleotide
  Antisense strand to SEQ ID NO: 239364
accgucaaagaguuuauag

SEQ ID NO: 239366 - RNA, 19 nt, Artificial Sequence
  Description of Artificial Sequence: Synthetic oligonucleotide
  Sense strand starting at position 1266 SEQ ID NO: 3082
agguguuacugaagggaga

SEQ ID NO: 239367 - RNA, 19 nt, Artificial Sequence
  Description of Artificial Sequence: Synthetic oligonucleotide
  Antisense strand to SEQ ID NO: 239366
ucucccuucaguaacaccu

SEQ ID NO: 239368 - RNA, 19 nt, Artificial Sequence
  Description of Artificial Sequence: Synthetic oligonucleotide
  Sense strand starting at position 1267 SEQ ID NO: 3082
gguguuacugaagggagaa

SEQ ID NO: 239369 - RNA, 19 nt, Artificial Sequence
  Description of Artificial Sequence: Synthetic oligonucleotide
  Antisense strand to SEQ ID NO: 239368
uucucccuucaguaacacc

SEQ ID NO: 239370 - RNA, 19 nt, Artificial Sequence
  Description of Artificial Sequence: Synthetic oligonucleotide
  Sense strand starting at position 1268 SEQ ID NO: 3082
guguuacugaagggagaaa

SEQ ID NO: 239371 - RNA, 19 nt, Artificial Sequence
  Description of Artificial Sequence: Synthetic oligonucleotide
  Antisense strand to SEQ ID NO: 239370
uuucucccuucaguaacac

SEQ ID NO: 239372 - RNA, 19 nt, Artificial Sequence
  Description of Artificial Sequence: Synthetic oligonucleotide
  Sense strand starting at position 1300 SEQ ID NO: 3082
ggcgacuggugucuaauuu

SEQ ID NO: 239373 - RNA, 19 nt, Artificial Sequence
  Description of Artificial Sequence: Synthetic oligonucleotide
  Antisense strand to SEQ ID NO: 239372
aaauuagacaccagucgcc

SEQ ID NO: 239374 - RNA, 19 nt, Artificial Sequence
  Description of Artificial Sequence: Synthetic oligonucleotide
  Sense strand starting at position 1304 SEQ ID NO: 3082
acuggugucuaauuuguuu

SEQ ID NO: 239375 - RNA, 19 nt, Artificial Sequence
  Description of Artificial Sequence: Synthetic oligonucleotide
  Antisense strand to SEQ ID NO: 239374
aaacaaauuagacaccagu

SEQ ID NO: 239376 - RNA, 19 nt, Artificial Sequence
  Description of Artificial Sequence: Synthetic oligonucleotide
  Sense strand starting at position 1376 SEQ ID NO: 3082
ucuacaucugugcacagaa

SEQ ID NO: 239377 - RNA, 19 nt, Artificial Sequence
  Description of Artificial Sequence: Synthetic oligonucleotide
  Antisense strand to SEQ ID NO: 239376
uucugugcacagauguaga

SEQ ID NO: 239378 - RNA, 19 nt, Artificial Sequence
  Description of Artificial Sequence: Synthetic oligonucleotide
  Sense strand starting at position 1396 SEQ ID NO: 3082
gucagagaguguuucuuug

SEQ ID NO: 239379 - RNA, 19 nt, Artificial Sequence
  Description of Artificial Sequence: Synthetic oligonucleotide
  Antisense strand to SEQ ID NO: 239378
caaagaaacacucucugac

SEQ ID NO: 239380 - RNA, 19 nt, Artificial Sequence
  Description of Artificial Sequence: Synthetic oligonucleotide
  Sense strand starting at position 1398 SEQ ID NO: 3082
cagagaguguuucuuugga

SEQ ID NO: 239381 - RNA, 19 nt, Artificial Sequence
  Description of Artificial Sequence: Synthetic oligonucleotide
  Antisense strand to SEQ ID NO: 239380
uccaaagaaacacucucug

SEQ ID NO: 239382 - RNA, 19 nt, Artificial Sequence
  Description of Artificial Sequence: Synthetic oligonucleotide
  Sense strand starting at position 1400 SEQ ID NO: 3082
gagaguguuucuuuggaga

SEQ ID NO: 239383 - RNA, 19 nt, Artificial Sequence
  Description of Artificial Sequence: Synthetic oligonucleotide
  Antisense strand to SEQ ID NO: 239382
ucuccaaagaaacacucuc

SEQ ID NO: 239384 - RNA, 19 nt, Artificial Sequence
  Description of Artificial Sequence: Synthetic oligonucleotide
  Sense strand starting at position 1405 SEQ ID NO: 3082
uguuucuuuggagaauauc

SEQ ID NO: 239385 - RNA, 19 nt, Artificial Sequence
  Description of Artificial Sequence: Synthetic oligonucleotide
  Antisense strand to SEQ ID NO: 239384
gauauucuccaaagaaaca

SEQ ID NO: 239386 - RNA, 19 nt, Artificial Sequence
  Description of Artificial Sequence: Synthetic oligonucleotide
  Sense strand starting at position 1413 SEQ ID NO: 3082
uggagaauaucuuuaagug

SEQ ID NO: 239387 - RNA, 19 nt, Artificial Sequence
  Description of Artificial Sequence: Synthetic oligonucleotide
  Antisense strand to SEQ ID NO: 239386
cacuuaaagauauucucca

SEQ ID NO: 239388 - RNA, 19 nt, Artificial Sequence
  Description of Artificial Sequence: Synthetic oligonucleotide
  Sense strand starting at position 1414 SEQ ID NO: 3082
ggagaauaucuuuaagugc

SEQ ID NO: 239389 - RNA, 19 nt, Artificial Sequence
  Description of Artificial Sequence: Synthetic oligonucleotide
  Antisense strand to SEQ ID NO: 239388
gcacuuaaagauauucucc

SEQ ID NO: 239390 - RNA, 19 nt, Artificial Sequence
  Description of Artificial Sequence: Synthetic oligonucleotide
  Sense strand starting at position 1469 SEQ ID NO: 3082
cuccgauugcaguaagaac

SEQ ID NO: 239391 - RNA, 19 nt, Artificial Sequence
  Description of Artificial Sequence: Synthetic oligonucleotide
  Antisense strand to SEQ ID NO: 239390
guucuuacugcaaucggag

SEQ ID NO: 239392 - RNA, 19 nt, Artificial Sequence
  Description of Artificial Sequence: Synthetic oligonucleotide
  Sense strand starting at position 1630 SEQ ID NO: 3082
cugcaaucccuuuggauau

SEQ ID NO: 239393 - RNA, 19 nt, Artificial Sequence
  Description of Artificial Sequence: Synthetic oligonucleotide
  Antisense strand to SEQ ID NO: 239392
auauccaaagggauugcag

SEQ ID NO: 239394 - RNA, 19 nt, Artificial Sequence
  Description of Artificial Sequence: Synthetic oligonucleotide
  Sense strand starting at position 1689 SEQ ID NO: 3082
ggacuugucucgguuuacu

SEQ ID NO: 239395 - RNA, 19 nt, Artificial Sequence
  Description of Artificial Sequence: Synthetic oligonucleotide
  Antisense strand to SEQ ID NO: 239394
aguaaaccgagacaagucc

SEQ ID NO: 239396 - RNA, 19 nt, Artificial Sequence
  Description of Artificial Sequence: Synthetic oligonucleotide
  Sense strand starting at position 1765 SEQ ID NO: 3082
gccacagcugucuucguaa

SEQ ID NO: 239397 - RNA, 19 nt, Artificial Sequence
  Description of Artificial Sequence: Synthetic oligonucleotide
  Antisense strand to SEQ ID NO: 239396
uuacgaagacagcuguggc

SEQ ID NO: 239398 - RNA, 19 nt, Artificial Sequence
  Description of Artificial Sequence: Synthetic oligonucleotide
  Sense strand starting at position 1772 SEQ ID NO: 3082
cugucuucguaagucaaca

SEQ ID NO: 239399 - RNA, 19 nt, Artificial Sequence
  Description of Artificial Sequence: Synthetic oligonucleotide
  Antisense strand to SEQ ID NO: 239398
uguugacuuacgaagacag

SEQ ID NO: 239400 - RNA, 19 nt, Artificial Sequence
  Description of Artificial Sequence: Synthetic oligonucleotide
  Sense strand starting at position 1812 SEQ ID NO: 3082
gcaggugcucgcuugcaaa

SEQ ID NO: 239401 - RNA, 19 nt, Artificial Sequence
  Description of Artificial Sequence: Synthetic oligonucleotide
  Antisense strand to SEQ ID NO: 239400
uuugcaagcgagcaccugc

SEQ ID NO: 239402 - RNA, 19 nt, Artificial Sequence
  Description of Artificial Sequence: Synthetic oligonucleotide
  Sense strand starting at position 2104 SEQ ID NO: 3082
gcuaguaucugcucccaga

SEQ ID NO: 239403 - RNA, 19 nt, Artificial Sequence
  Description of Artificial Sequence: Synthetic oligonucleotide
  Antisense strand to SEQ ID NO: 239402
ucugggagcagauacuagc

SEQ ID NO: 239404 - RNA, 19 nt, Artificial Sequence
  Description of Artificial Sequence: Synthetic oligonucleotide
  Sense strand starting at position 2239 SEQ ID NO: 3082
ucuucuuagcccugaagug

SEQ ID NO: 239405 - RNA, 19 nt, Artificial Sequence
  Description of Artificial Sequence: Synthetic oligonucleotide
  Antisense strand to SEQ ID NO: 239404
cacuucagggcuaagaaga

SEQ ID NO: 239406 - RNA, 19 nt, Artificial Sequence
  Description of Artificial Sequence: Synthetic oligonucleotide
  Sense strand starting at position 2414 SEQ ID NO: 3082
ggcuuugugguggaagaca

SEQ ID NO: 239407 - RNA, 19 nt, Artificial Sequence
  Description of Artificial Sequence: Synthetic oligonucleotide
  Antisense strand to SEQ ID NO: 239406
ugucuuccaccacaaagcc

SEQ ID NO: 239408 - RNA, 19 nt, Artificial Sequence
  Description of Artificial Sequence: Synthetic oligonucleotide
  Sense strand starting at position 2524 SEQ ID NO: 3082
cugugaauaccauggaaca

SEQ ID NO: 239409 - RNA, 19 nt, Artificial Sequence
  Description of Artificial Sequence: Synthetic oligonucleotide
  Antisense strand to SEQ ID NO: 239408
uguuccaugguauucacag

SEQ ID NO: 239410 - RNA, 19 nt, Artificial Sequence
  Description of Artificial Sequence: Synthetic oligonucleotide
  Sense strand starting at position 2525 SEQ ID NO: 3082
ugugaauaccauggaacau

SEQ ID NO: 239411 - RNA, 19 nt, Artificial Sequence
  Description of Artificial Sequence: Synthetic oligonucleotide
  Antisense strand to SEQ ID NO: 239410
auguuccaugguauucaca

SEQ ID NO: 239412 - RNA, 19 nt, Artificial Sequence
  Description of Artificial Sequence: Synthetic oligonucleotide
  Sense strand starting at position 2599 SEQ ID NO: 3082
gcuauuggcugggcacaau

SEQ ID NO: 239413 - RNA, 19 nt, Artificial Sequence
  Description of Artificial Sequence: Synthetic oligonucleotide
  Antisense strand to SEQ ID NO: 239412
auugugcccagccaauagc

SEQ ID NO: 239414 - RNA, 19 nt, Artificial Sequence
  Description of Artificial Sequence: Synthetic oligonucleotide
  Sense strand starting at position 2875 SEQ ID NO: 3082
acccuaucauaagagaaga

SEQ ID NO: 239415 - RNA, 19 nt, Artificial Sequence
  Description of Artificial Sequence: Synthetic oligonucleotide
  Antisense strand to SEQ ID NO: 239414
ucuucucuuaugauagggu

SEQ ID NO: 239416 - RNA, 19 nt, Artificial Sequence
  Description of Artificial Sequence: Synthetic oligonucleotide
  Sense strand starting at position 3494 SEQ ID NO: 3082
uuucucuucuugcuaggau

SEQ ID NO: 239417 - RNA, 19 nt, Artificial Sequence
  Description of Artificial Sequence: Synthetic oligonucleotide
  Antisense strand to SEQ ID NO: 239416
auccuagcaagaagagaaa

SEQ ID NO: 239418 - RNA, 19 nt, Artificial Sequence
  Description of Artificial Sequence: Synthetic oligonucleotide
  Sense strand starting at position 3503 SEQ ID NO: 3082
uugcuaggaucacuaacuu

SEQ ID NO: 239419 - RNA, 19 nt, Artificial Sequence
  Description of Artificial Sequence: Synthetic oligonucleotide
  Antisense strand to SEQ ID NO: 239418
aaguuagugauccuagcaa

SEQ ID NO: 239420 - RNA, 19 nt, Artificial Sequence
  Description of Artificial Sequence: Synthetic oligonucleotide
  Sense strand starting at position 3583 SEQ ID NO: 3082
agguuaaagagguggauua

SEQ ID NO: 239421 - RNA, 19 nt, Artificial Sequence
  Description of Artificial Sequence: Synthetic oligonucleotide
  Antisense strand to SEQ ID NO: 239420
uaauccaccucuuuaaccu

SEQ ID NO: 239422 - RNA, 19 nt, Artificial Sequence
  Description of Artificial Sequence: Synthetic oligonucleotide
  Sense strand starting at position 3594 SEQ ID NO: 3082
guggauuacuccucuuggu

SEQ ID NO: 239423 - RNA, 19 nt, Artificial Sequence
  Description of Artificial Sequence: Synthetic oligonucleotide
  Antisense strand to SEQ ID NO: 239422
accaagaggaguaauccac

SEQ ID NO: 239424 - RNA, 19 nt, Artificial Sequence
  Description of Artificial Sequence: Synthetic oligonucleotide
  Sense strand starting at position 3720 SEQ ID NO: 3082
ggcagugccucccuagaaa

SEQ ID NO: 239425 - RNA, 19 nt, Artificial Sequence
  Description of Artificial Sequence: Synthetic oligonucleotide
  Antisense strand to SEQ ID NO: 239424
uuucuagggaggcacugcc

SEQ ID NO: 239426 - RNA, 19 nt, Artificial Sequence
  Description of Artificial Sequence: Synthetic oligonucleotide
  Sense strand starting at position 167 SEQ ID NO: 3081
aaaguuugcccacagguga

SEQ ID NO: 239427 - RNA, 19 nt, Artificial Sequence
  Description of Artificial Sequence: Synthetic oligonucleotide
  Antisense strand to SEQ ID NO: 239426
ucaccugugggcaaacuuu

SEQ ID NO: 239428 - RNA, 19 nt, Artificial Sequence
  Description of Artificial Sequence: Synthetic oligonucleotide
  Sense strand starting at position 372 SEQ ID NO: 3081
gucccagcuacucgguaua

SEQ ID NO: 239429 - RNA, 19 nt, Artificial Sequence
  Description of Artificial Sequence: Synthetic oligonucleotide
  Antisense strand to SEQ ID NO: 239428
uauaccgaguagcugggac

SEQ ID NO: 239430 - RNA, 19 nt, Artificial Sequence
  Description of Artificial Sequence: Synthetic oligonucleotide
  Sense strand starting at position 627 SEQ ID NO: 3081
ugaggcaccucugucuaaa

SEQ ID NO: 239431 - RNA, 19 nt, Artificial Sequence
  Description of Artificial Sequence: Synthetic oligonucleotide
  Antisense strand to SEQ ID NO: 239430
uuuagacagaggugccuca

SEQ ID NO: 239432 - RNA, 19 nt, Artificial Sequence
  Description of Artificial Sequence: Synthetic oligonucleotide
  Sense strand starting at position 630 SEQ ID NO: 3081
ggcaccucugucuaaauga

SEQ ID NO: 239433 - RNA, 19 nt, Artificial Sequence
  Description of Artificial Sequence: Synthetic oligonucleotide
  Antisense strand to SEQ ID NO: 239432
ucauuuagacagaggugcc

SEQ ID NO: 239434 - RNA, 19 nt, Artificial Sequence
  Description of Artificial Sequence: Synthetic oligonucleotide
  Sense strand starting at position 997 SEQ ID NO: 3081
acucauagagaaggucuua

SEQ ID NO: 239435 - RNA, 19 nt, Artificial Sequence
  Description of Artificial Sequence: Synthetic oligonucleotide
  Antisense strand to SEQ ID NO: 239434
uaagaccuucucuaugagu

SEQ ID NO: 239436 - RNA, 19 nt, Artificial Sequence
  Description of Artificial Sequence: Synthetic oligonucleotide
  Sense strand starting at position 1002 SEQ ID NO: 3081
uagagaaggucuuacaggu

SEQ ID NO: 239437 - RNA, 19 nt, Artificial Sequence
  Description of Artificial Sequence: Synthetic oligonucleotide
  Antisense strand to SEQ ID NO: 239436
accuguaagaccuucucua

SEQ ID NO: 239438 - RNA, 19 nt, Artificial Sequence
  Description of Artificial Sequence: Synthetic oligonucleotide
  Sense strand starting at position 1338 SEQ ID NO: 3081
guuccaguuuccucucuaa

SEQ ID NO: 239439 - RNA, 19 nt, Artificial Sequence
  Description of Artificial Sequence: Synthetic oligonucleotide
  Antisense strand to SEQ ID NO: 239438
uuagagaggaaacuggaac

SEQ ID NO: 239440 - RNA, 19 nt, Artificial Sequence
  Description of Artificial Sequence: Synthetic oligonucleotide
  Sense strand starting at position 1361 SEQ ID NO: 3081
ggaauuaacugcccauaau

SEQ ID NO: 239441 - RNA, 19 nt, Artificial Sequence
  Description of Artificial Sequence: Synthetic oligonucleotide
  Antisense strand to SEQ ID NO: 239440
auuaugggcaguuaauucc

SEQ ID NO: 239442 - RNA, 19 nt, Artificial Sequence
  Description of Artificial Sequence: Synthetic oligonucleotide
  Sense strand starting at position 1417 SEQ ID NO: 3081
gucuuaagcuugccuuaau

SEQ ID NO: 239443 - RNA, 19 nt, Artificial Sequence
  Description of Artificial Sequence: Synthetic oligonucleotide
  Antisense strand to SEQ ID NO: 239442
auuaaggcaagcuuaagac

SEQ ID NO: 239444 - RNA, 19 nt, Artificial Sequence
  Description of Artificial Sequence: Synthetic oligonucleotide
  Sense strand starting at position 1443 SEQ ID NO: 3081
acuaucacagaguaguuua

SEQ ID NO: 239445 - RNA, 19 nt, Artificial Sequence
  Description of Artificial Sequence: Synthetic oligonucleotide
  Antisense strand to SEQ ID NO: 239444
uaaacuacucugugauagu

SEQ ID NO: 239446 - RNA, 19 nt, Artificial Sequence
  Description of Artificial Sequence: Synthetic oligonucleotide
  Sense strand starting at position 1450 SEQ ID NO: 3081
cagaguaguuuauccaaug

SEQ ID NO: 239447 - RNA, 19 nt, Artificial Sequence
  Description of Artificial Sequence: Synthetic oligonucleotide
  Antisense strand to SEQ ID NO: 239446
cauuggauaaacuacucug

SEQ ID NO: 239448 - RNA, 19 nt, Artificial Sequence
  Description of Artificial Sequence: Synthetic oligonucleotide
  Sense strand starting at position 1515 SEQ ID NO: 3081
gugccucucugagcagaua

SEQ ID NO: 239449 - RNA, 19 nt, Artificial Sequence
  Description of Artificial Sequence: Synthetic oligonucleotide
  Antisense strand to SEQ ID NO: 239448
uaucugcucagagaggcac

SEQ ID NO: 239450 - RNA, 19 nt, Artificial Sequence
  Description of Artificial Sequence: Synthetic oligonucleotide
  Sense strand starting at position 1516 SEQ ID NO: 3081
ugccucucugagcagauaa

SEQ ID NO: 239451 - RNA, 19 nt, Artificial Sequence
  Description of Artificial Sequence: Synthetic oligonucleotide
  Antisense strand to SEQ ID NO: 239450
uuaucugcucagagaggca

SEQ ID NO: 239452 - RNA, 19 nt, Artificial Sequence
  Description of Artificial Sequence: Synthetic oligonucleotide
  Sense strand starting at position 1518 SEQ ID NO: 3081
ccucucugagcagauaaua

SEQ ID NO: 239453 - RNA, 19 nt, Artificial Sequence
  Description of Artificial Sequence: Synthetic oligonucleotide
  Antisense strand to SEQ ID NO: 239452
uauuaucugcucagagagg

SEQ ID NO: 239454 - RNA, 19 nt, Artificial Sequence
  Description of Artificial Sequence: Synthetic oligonucleotide
  Sense strand starting at position 1987 SEQ ID NO: 3081
cgcuuugauucuuucucca

SEQ ID NO: 239455 - RNA, 19 nt, Artificial Sequence
  Description of Artificial Sequence: Synthetic oligonucleotide
  Antisense strand to SEQ ID NO: 239454
uggagaaagaaucaaagcg

SEQ ID NO: 239456 - RNA, 19 nt, Artificial Sequence
  Description of Artificial Sequence: Synthetic oligonucleotide
  Sense strand starting at position 2162 SEQ ID NO: 3081
gggagugugucagugucua

SEQ ID NO: 239457 - RNA, 19 nt, Artificial Sequence
  Description of Artificial Sequence: Synthetic oligonucleotide
  Antisense strand to SEQ ID NO: 239456
uagacacugacacacuccc

SEQ ID NO: 239458 - RNA, 19 nt, Artificial Sequence
  Description of Artificial Sequence: Synthetic oligonucleotide
  Sense strand starting at position 2192 SEQ ID NO: 3081
gggacugaguugcuaaaug

SEQ ID NO: 239459 - RNA, 19 nt, Artificial Sequence
  Description of Artificial Sequence: Synthetic oligonucleotide
  Antisense strand to SEQ ID NO: 239458
cauuuagcaacucaguccc

SEQ ID NO: 239460 - RNA, 19 nt, Artificial Sequence
  Description of Artificial Sequence: Synthetic oligonucleotide
  Sense strand starting at position 2267 SEQ ID NO: 3081
caguuucuuacgggagagu

SEQ ID NO: 239461 - RNA, 19 nt, Artificial Sequence
  Description of Artificial Sequence: Synthetic oligonucleotide
  Antisense strand to SEQ ID NO: 239460
acucucccguaagaaacug

SEQ ID NO: 239462 - RNA, 19 nt, Artificial Sequence
  Description of Artificial Sequence: Synthetic oligonucleotide
  Sense strand starting at position 2452 SEQ ID NO: 3081
cagcuucuggccuguucua

SEQ ID NO: 239463 - RNA, 19 nt, Artificial Sequence
  Description of Artificial Sequence: Synthetic oligonucleotide
  Antisense strand to SEQ ID NO: 239462
uagaacaggccagaagcug

SEQ ID NO: 239464 - RNA, 19 nt, Artificial Sequence
  Description of Artificial Sequence: Synthetic oligonucleotide
  Sense strand starting at position 2468 SEQ ID NO: 3081
cuaugccugcccugugaga

SEQ ID NO: 239465 - RNA, 19 nt, Artificial Sequence
  Description of Artificial Sequence: Synthetic oligonucleotide
  Antisense strand to SEQ ID NO: 239464
ucucacagggcaggcauag

SEQ ID NO: 239466 - RNA, 19 nt, Artificial Sequence
  Description of Artificial Sequence: Synthetic oligonucleotide
  Sense strand starting at position 2556 SEQ ID NO: 3081
auuggauccuuggcagaaa

SEQ ID NO: 239467 - RNA, 19 nt, Artificial Sequence
  Description of Artificial Sequence: Synthetic oligonucleotide
  Antisense strand to SEQ ID NO: 239466
uuucugccaaggauccaau

SEQ ID NO: 239468 - RNA, 19 nt, Artificial Sequence
  Description of Artificial Sequence: Synthetic oligonucleotide
  Sense strand starting at position 2588 SEQ ID NO: 3081
cuuguugcuaagggugaaa

SEQ ID NO: 239469 - RNA, 19 nt, Artificial Sequence
  Description of Artificial Sequence: Synthetic oligonucleotide
  Antisense strand to SEQ ID NO: 239468
uuucacccuuagcaacaag

SEQ ID NO: 239470 - RNA, 19 nt, Artificial Sequence
  Description of Artificial Sequence: Synthetic oligonucleotide
  Sense strand starting at position 2659 SEQ ID NO: 3081
gcaggucagcaguguaaug

SEQ ID NO: 239471 - RNA, 19 nt, Artificial Sequence
  Description of Artificial Sequence: Synthetic oligonucleotide
  Antisense strand to SEQ ID NO: 239470
cauuacacugcugaccugc

SEQ ID NO: 239472 - RNA, 19 nt, Artificial Sequence
  Description of Artificial Sequence: Synthetic oligonucleotide
  Sense strand starting at position 2769 SEQ ID NO: 3081
aaggcucagucaucaaagu

SEQ ID NO: 239473 - RNA, 19 nt, Artificial Sequence
  Description of Artificial Sequence: Synthetic oligonucleotide
  Antisense strand to SEQ ID NO: 239472
acuuugaugacugagccuu

SEQ ID NO: 239474 - RNA, 19 nt, Artificial Sequence
  Description of Artificial Sequence: Synthetic oligonucleotide
  Sense strand starting at position 2770 SEQ ID NO: 3081
aggcucagucaucaaaguu

SEQ ID NO: 239475 - RNA, 19 nt, Artificial Sequence
  Description of Artificial Sequence: Synthetic oligonucleotide
  Antisense strand to SEQ ID NO: 239474
aacuuugaugacugagccu

SEQ ID NO: 239476 - RNA, 19 nt, Artificial Sequence
  Description of Artificial Sequence: Synthetic oligonucleotide
  Sense strand starting at position 2967 SEQ ID NO: 3081
cugcuaagguguuugaaau

SEQ ID NO: 239477 - RNA, 19 nt, Artificial Sequence
  Description of Artificial Sequence: Synthetic oligonucleotide
  Antisense strand to SEQ ID NO: 239476
auuucaaacaccuuagcag

SEQ ID NO: 239478 - RNA, 19 nt, Artificial Sequence
  Description of Artificial Sequence: Synthetic oligonucleotide
  Sense strand starting at position 2968 SEQ ID NO: 3081
ugcuaagguguuugaaauu

SEQ ID NO: 239479 - RNA, 19 nt, Artificial Sequence
  Description of Artificial Sequence: Synthetic oligonucleotide
  Antisense strand to SEQ ID NO: 239478
aauuucaaacaccuuagca

SEQ ID NO: 239480 - RNA, 19 nt, Artificial Sequence
  Description of Artificial Sequence: Synthetic oligonucleotide
  Sense strand starting at position 2980 SEQ ID NO: 3081
ugaaauuaaccacgucaag

SEQ ID NO: 239481 - RNA, 19 nt, Artificial Sequence
  Description of Artificial Sequence: Synthetic oligonucleotide
  Antisense strand to SEQ ID NO: 239480
cuugacgugguuaauuuca

SEQ ID NO: 239482 - RNA, 19 nt, Artificial Sequence
  Description of Artificial Sequence: Synthetic oligonucleotide
  Sense strand starting at position 3019 SEQ ID NO: 3081
ggcugaugaggcuguguuu

SEQ ID NO: 239483 - RNA, 19 nt, Artificial Sequence
  Description of Artificial Sequence: Synthetic oligonucleotide
  Antisense strand to SEQ ID NO: 239482
aaacacagccucaucagcc

SEQ ID NO: 239484 - RNA, 19 nt, Artificial Sequence
  Description of Artificial Sequence: Synthetic oligonucleotide
  Sense strand starting at position 3025 SEQ ID NO: 3081
ugaggcuguguuugagauu

SEQ ID NO: 239485 - RNA, 19 nt, Artificial Sequence
  Description of Artificial Sequence: Synthetic oligonucleotide
  Antisense strand to SEQ ID NO: 239484
aaucucaaacacagccuca

SEQ ID NO: 239486 - RNA, 19 nt, Artificial Sequence
  Description of Artificial Sequence: Synthetic oligonucleotide
  Sense strand starting at position 3036 SEQ ID NO: 3081
uugagauuccugcggcuuc

SEQ ID NO: 239487 - RNA, 19 nt, Artificial Sequence
  Description of Artificial Sequence: Synthetic oligonucleotide
  Antisense strand to SEQ ID NO: 239486
gaagccgcaggaaucucaa

SEQ ID NO: 239488 - RNA, 19 nt, Artificial Sequence
  Description of Artificial Sequence: Synthetic oligonucleotide
  Sense strand starting at position 3060 SEQ ID NO: 3081
gaaggcuucuaggaggaua

SEQ ID NO: 239489 - RNA, 19 nt, Artificial Sequence
  Description of Artificial Sequence: Synthetic oligonucleotide
  Antisense strand to SEQ ID NO: 239488
uauccuccuagaagccuuc

SEQ ID NO: 239490 - RNA, 19 nt, Artificial Sequence
  Description of Artificial Sequence: Synthetic oligonucleotide
  Sense strand starting at position 3334 SEQ ID NO: 3081
agccucaagcggugugaua

SEQ ID NO: 239491 - RNA, 19 nt, Artificial Sequence
  Description of Artificial Sequence: Synthetic oligonucleotide
  Antisense strand to SEQ ID NO: 239490
uaucacaccgcuugaggcu

SEQ ID NO: 239492 - RNA, 19 nt, Artificial Sequence
  Description of Artificial Sequence: Synthetic oligonucleotide
  Sense strand starting at position 3390 SEQ ID NO: 3081
ggccauggucuggagucaa

SEQ ID NO: 239493 - RNA, 19 nt, Artificial Sequence
  Description of Artificial Sequence: Synthetic oligonucleotide
  Antisense strand to SEQ ID NO: 239492
uugacuccagaccauggcc

SEQ ID NO: 239494 - RNA, 19 nt, Artificial Sequence
  Description of Artificial Sequence: Synthetic oligonucleotide
  Sense strand starting at position 3402 SEQ ID NO: 3081
gagucaagucuauaagagc

SEQ ID NO: 239495 - RNA, 19 nt, Artificial Sequence
  Description of Artificial Sequence: Synthetic oligonucleotide
  Antisense strand to SEQ ID NO: 239494
gcucuuauagacuugacuc

SEQ ID NO: 239496 - RNA, 19 nt, Artificial Sequence
  Description of Artificial Sequence: Synthetic oligonucleotide
  Sense strand starting at position 3739 SEQ ID NO: 3081
gaagcauggugacuuacuu

SEQ ID NO: 239497 - RNA, 19 nt, Artificial Sequence
  Description of Artificial Sequence: Synthetic oligonucleotide
  Antisense strand to SEQ ID NO: 239496
aaguaagucaccaugcuuc

SEQ ID NO: 239498 - RNA, 19 nt, Artificial Sequence
  Description of Artificial Sequence: Synthetic oligonucleotide
  Sense strand starting at position 3763 SEQ ID NO: 3081
gaguccaaaguuugagaaa

SEQ ID NO: 239499 - RNA, 19 nt, Artificial Sequence
  Description of Artificial Sequence: Synthetic oligonucleotide
  Antisense strand to SEQ ID NO: 239498
uuucucaaacuuuggacuc

SEQ ID NO: 239500 - RNA, 19 nt, Artificial Sequence
  Description of Artificial Sequence: Synthetic oligonucleotide
  Sense strand starting at position 3867 SEQ ID NO: 3081
gcuccaguaauguggcaau

SEQ ID NO: 239501 - RNA, 19 nt, Artificial Sequence
  Description of Artificial Sequence: Synthetic oligonucleotide
  Antisense strand to SEQ ID NO: 239500
auugccacauuacuggagc

SEQ ID NO: 239502 - RNA, 19 nt, Artificial Sequence
  Description of Artificial Sequence: Synthetic oligonucleotide
  Sense strand starting at position 3930 SEQ ID NO: 3081
gcaggauggucuccuauaa

SEQ ID NO: 239503 - RNA, 19 nt, Artificial Sequence
  Description of Artificial Sequence: Synthetic oligonucleotide
  Antisense strand to SEQ ID NO: 239502
uuauaggagaccauccugc

SEQ ID NO: 239504 - RNA, 19 nt, Artificial Sequence
  Description of Artificial Sequence: Synthetic oligonucleotide
  Sense strand starting at position 3943 SEQ ID NO: 3081
cuauaaacucuuugacggu

SEQ ID NO: 239505 - RNA, 19 nt, Artificial Sequence
  Description of Artificial Sequence: Synthetic oligonucleotide
  Antisense strand to SEQ ID NO: 239504
accgucaaagaguuuauag

SEQ ID NO: 239506 - RNA, 19 nt, Artificial Sequence
  Description of Artificial Sequence: Synthetic oligonucleotide
  Sense strand starting at position 28 SEQ ID NO: 3083
ccaacaauguauccucagu

SEQ ID NO: 239507 - RNA, 19 nt, Artificial Sequence
  Description of Artificial Sequence: Synthetic oligonucleotide
  Antisense strand to SEQ ID NO: 239506
acugaggauacauuguugg

SEQ ID NO: 239508 - RNA, 19 nt, Artificial Sequence
  Description of Artificial Sequence: Synthetic oligonucleotide
  Sense strand starting at position 98 SEQ ID NO: 3083
aacguuacauuugguaaga

SEQ ID NO: 239509 - RNA, 19 nt, Artificial Sequence
  Description of Artificial Sequence: Synthetic oligonucleotide
  Antisense strand to SEQ ID NO: 239508
ucuuaccaaauguaacguu

SEQ ID NO: 239510 - RNA, 19 nt, Artificial Sequence
  Description of Artificial Sequence: Synthetic oligonucleotide
  Sense strand starting at position 100 SEQ ID NO: 3083
cguuacauuugguaagaaa

SEQ ID NO: 239511 - RNA, 19 nt, Artificial Sequence
  Description of Artificial Sequence: Synthetic oligonucleotide
  Antisense strand to SEQ ID NO: 239510
uuucuuaccaaauguaacg

SEQ ID NO: 239512 - RNA, 19 nt, Artificial Sequence
  Description of Artificial Sequence: Synthetic oligonucleotide
  Sense strand starting at position 116 SEQ ID NO: 3083
aaagucuugaggugguaua

SEQ ID NO: 239513 - RNA, 19 nt, Artificial Sequence
  Description of Artificial Sequence: Synthetic oligonucleotide
  Antisense strand to SEQ ID NO: 239512
uauaccaccucaagacuuu

SEQ ID NO: 239514 - RNA, 19 nt, Artificial Sequence
  Description of Artificial Sequence: Synthetic oligonucleotide
  Sense strand starting at position 198 SEQ ID NO: 3083
ggagaagauugcuuacaca

SEQ ID NO: 239515 - RNA, 19 nt, Artificial Sequence
  Description of Artificial Sequence: Synthetic oligonucleotide
  Antisense strand to SEQ ID NO: 239514
uguguaagcaaucuucucc

SEQ ID NO: 239516 - RNA, 19 nt, Artificial Sequence
  Description of Artificial Sequence: Synthetic oligonucleotide
  Sense strand starting at position 252 SEQ ID NO: 3083
aguggcauucccugagcca

SEQ ID NO: 239517 - RNA, 19 nt, Artificial Sequence
  Description of Artificial Sequence: Synthetic oligonucleotide
  Antisense strand to SEQ ID NO: 239516
uggcucagggaaugccacu

SEQ ID NO: 239518 - RNA, 19 nt, Artificial Sequence
  Description of Artificial Sequence: Synthetic oligonucleotide
  Sense strand starting at position 253 SEQ ID NO: 3083
guggcauucccugagccau

SEQ ID NO: 239519 - RNA, 19 nt, Artificial Sequence
  Description of Artificial Sequence: Synthetic oligonucleotide
  Antisense strand to SEQ ID NO: 239518
auggcucagggaaugccac

SEQ ID NO: 239520 - RNA, 19 nt, Artificial Sequence
  Description of Artificial Sequence: Synthetic oligonucleotide
  Sense strand starting at position 326 SEQ ID NO: 3083
auguacugcuaagcuauaa

SEQ ID NO: 239521 - RNA, 19 nt, Artificial Sequence
  Description of Artificial Sequence: Synthetic oligonucleotide
  Antisense strand to SEQ ID NO: 239520
uuauagcuuagcaguacau

SEQ ID NO: 239522 - RNA, 19 nt, Artificial Sequence
  Description of Artificial Sequence: Synthetic oligonucleotide
  Sense strand starting at position 352 SEQ ID NO: 3083
cguaauagcuacuuccaga

SEQ ID NO: 239523 - RNA, 19 nt, Artificial Sequence
  Description of Artificial Sequence: Synthetic oligonucleotide
  Antisense strand to SEQ ID NO: 239522
ucuggaaguagcuauuacg

SEQ ID NO: 239524 - RNA, 19 nt, Artificial Sequence
  Description of Artificial Sequence: Synthetic oligonucleotide
  Sense strand starting at position 476 SEQ ID NO: 3083
aagaaauggcuuuauguuu

SEQ ID NO: 239525 - RNA, 19 nt, Artificial Sequence
  Description of Artificial Sequence: Synthetic oligonucleotide
  Antisense strand to SEQ ID NO: 239524
aaacauaaagccauuucuu

SEQ ID NO: 239526 - RNA, 19 nt, Artificial Sequence
  Description of Artificial Sequence: Synthetic oligonucleotide
  Sense strand starting at position 481 SEQ ID NO: 3083
auggcuuuauguuuggaau

SEQ ID NO: 239527 - RNA, 19 nt, Artificial Sequence
  Description of Artificial Sequence: Synthetic oligonucleotide
  Antisense strand to SEQ ID NO: 239526
auuccaaacauaaagccau

SEQ ID NO: 239528 - RNA, 19 nt, Artificial Sequence
  Description of Artificial Sequence: Synthetic oligonucleotide
  Sense strand starting at position 482 SEQ ID NO: 3083
uggcuuuauguuuggaauc

SEQ ID NO: 239529 - RNA, 19 nt, Artificial Sequence
  Description of Artificial Sequence: Synthetic oligonucleotide
  Antisense strand to SEQ ID NO: 239528
gauuccaaacauaaagcca

SEQ ID NO: 239530 - RNA, 19 nt, Artificial Sequence
  Description of Artificial Sequence: Synthetic oligonucleotide
  Sense strand starting at position 493 SEQ ID NO: 3083
uuggaaucacccugaaggu

SEQ ID NO: 239531 - RNA, 19 nt, Artificial Sequence
  Description of Artificial Sequence: Synthetic oligonucleotide
  Antisense strand to SEQ ID NO: 239530
accuucagggugauuccaa

SEQ ID NO: 239532 - RNA, 19 nt, Artificial Sequence
  Description of Artificial Sequence: Synthetic oligonucleotide
  Sense strand starting at position 571 SEQ ID NO: 3083
ucuaaacuauacgucaaga

SEQ ID NO: 239533 - RNA, 19 nt, Artificial Sequence
  Description of Artificial Sequence: Synthetic oligonucleotide
  Antisense strand to SEQ ID NO: 239532
ucuugacguauaguuuaga

SEQ ID NO: 239534 - RNA, 19 nt, Artificial Sequence
  Description of Artificial Sequence: Synthetic oligonucleotide
  Sense strand starting at position 679 SEQ ID NO: 3083
ucaggugagccuuaaacuc

SEQ ID NO: 239535 - RNA, 19 nt, Artificial Sequence
  Description of Artificial Sequence: Synthetic oligonucleotide
  Antisense strand to SEQ ID NO: 239534
gaguuuaaggcucaccuga

SEQ ID NO: 239536 - RNA, 19 nt, Artificial Sequence
  Description of Artificial Sequence: Synthetic oligonucleotide
  Sense strand starting at position 699 SEQ ID NO: 3083
gcgucugcgaucucucaga

SEQ ID NO: 239537 - RNA, 19 nt, Artificial Sequence
  Description of Artificial Sequence: Synthetic oligonucleotide
  Antisense strand to SEQ ID NO: 239536
ucugagagaucgcagacgc

SEQ ID NO: 239538 - RNA, 19 nt, Artificial Sequence
  Description of Artificial Sequence: Synthetic oligonucleotide
  Sense strand starting at position 1055 SEQ ID NO: 3083
ccucacauuugucgaaaua

SEQ ID NO: 239539 - RNA, 19 nt, Artificial Sequence
  Description of Artificial Sequence: Synthetic oligonucleotide
  Antisense strand to SEQ ID NO: 239538
uauuucgacaaaugugagg

SEQ ID NO: 239540 - RNA, 19 nt, Artificial Sequence
  Description of Artificial Sequence: Synthetic oligonucleotide
  Sense strand starting at position 1116 SEQ ID NO: 3083
aguacuuucucguuuaaca

SEQ ID NO: 239541 - RNA, 19 nt, Artificial Sequence
  Description of Artificial Sequence: Synthetic oligonucleotide
  Antisense strand to SEQ ID NO: 239540
uguuaaacgagaaaguacu

SEQ ID NO: 239542 - RNA, 19 nt, Artificial Sequence
  Description of Artificial Sequence: Synthetic oligonucleotide
  Sense strand starting at position 1125 SEQ ID NO: 3083
ucguuuaacacccggauuu

SEQ ID NO: 239543 - RNA, 19 nt, Artificial Sequence
  Description of Artificial Sequence: Synthetic oligonucleotide
  Antisense strand to SEQ ID NO: 239542
aaauccggguguuaaacga

SEQ ID NO: 239544 - RNA, 19 nt, Artificial Sequence
  Description of Artificial Sequence: Synthetic oligonucleotide
  Sense strand starting at position 1158 SEQ ID NO: 3083
cuugauucucucgagcacu

SEQ ID NO: 239545 - RNA, 19 nt, Artificial Sequence
  Description of Artificial Sequence: Synthetic oligonucleotide
  Antisense strand to SEQ ID NO: 239544
agugcucgagagaaucaag

SEQ ID NO: 239546 - RNA, 19 nt, Artificial Sequence
  Description of Artificial Sequence: Synthetic oligonucleotide
  Sense strand starting at position 1182 SEQ ID NO: 3083
cacgguaaucuguaauuac

SEQ ID NO: 239547 - RNA, 19 nt, Artificial Sequence
  Description of Artificial Sequence: Synthetic oligonucleotide
  Antisense strand to SEQ ID NO: 239546
guaauuacagauuaccgug

SEQ ID NO: 239548 - RNA, 19 nt, Artificial Sequence
  Description of Artificial Sequence: Synthetic oligonucleotide
  Sense strand starting at position 1185 SEQ ID NO: 3083
gguaaucuguaauuaccau

SEQ ID NO: 239549 - RNA, 19 nt, Artificial Sequence
  Description of Artificial Sequence: Synthetic oligonucleotide
  Antisense strand to SEQ ID NO: 239548
augguaauuacagauuacc

SEQ ID NO: 239550 - RNA, 19 nt, Artificial Sequence
  Description of Artificial Sequence: Synthetic oligonucleotide
  Sense strand starting at position 2081 SEQ ID NO: 3083
uccugauuggucggcgaga

SEQ ID NO: 239551 - RNA, 19 nt, Artificial Sequence
  Description of Artificial Sequence: Synthetic oligonucleotide
  Antisense strand to SEQ ID NO: 239550
ucucgccgaccaaucagga

SEQ ID NO: 239552 - RNA, 19 nt, Artificial Sequence
  Description of Artificial Sequence: Synthetic oligonucleotide
  Sense strand starting at position 2082 SEQ ID NO: 3083
ccugauuggucggcgagaa

SEQ ID NO: 239553 - RNA, 19 nt, Artificial Sequence
  Description of Artificial Sequence: Synthetic oligonucleotide
  Antisense strand to SEQ ID NO: 239552
uucucgccgaccaaucagg

SEQ ID NO: 239554 - RNA, 19 nt, Artificial Sequence
  Description of Artificial Sequence: Synthetic oligonucleotide
  Sense strand starting at position 2083 SEQ ID NO: 3083
cugauuggucggcgagaag

SEQ ID NO: 239555 - RNA, 19 nt, Artificial Sequence
  Description of Artificial Sequence: Synthetic oligonucleotide
  Antisense strand to SEQ ID NO: 239554
cuucucgccgaccaaucag

SEQ ID NO: 239556 - RNA, 19 nt, Artificial Sequence
  Description of Artificial Sequence: Synthetic oligonucleotide
  Sense strand starting at position 2084 SEQ ID NO: 3083
ugauuggucggcgagaaga

SEQ ID NO: 239557 - RNA, 19 nt, Artificial Sequence
  Description of Artificial Sequence: Synthetic oligonucleotide
  Antisense strand to SEQ ID NO: 239556
ucuucucgccgaccaauca

SEQ ID NO: 239558 - RNA, 19 nt, Artificial Sequence
  Description of Artificial Sequence: Synthetic oligonucleotide
  Sense strand starting at position 2631 SEQ ID NO: 3083
aggauuucuugcccucgca

SEQ ID NO: 239559 - RNA, 19 nt, Artificial Sequence
  Description of Artificial Sequence: Synthetic oligonucleotide
  Antisense strand to SEQ ID NO: 239558
ugcgagggcaagaaauccu

SEQ ID NO: 239560 - RNA, 19 nt, Artificial Sequence
  Description of Artificial Sequence: Synthetic oligonucleotide
  Sense strand starting at position 3044 SEQ ID NO: 3083
ggcuuucaggcuugaagga

SEQ ID NO: 239561 - RNA, 19 nt, Artificial Sequence
  Description of Artificial Sequence: Synthetic oligonucleotide
  Antisense strand to SEQ ID NO: 239560
uccuucaagccugaaagcc

SEQ ID NO: 239562 - RNA, 19 nt, Artificial Sequence
  Description of Artificial Sequence: Synthetic oligonucleotide
  Sense strand starting at position 3163 SEQ ID NO: 3083
gggagcugcggucagagau

SEQ ID NO: 239563 - RNA, 19 nt, Artificial Sequence
  Description of Artificial Sequence: Synthetic oligonucleotide
  Antisense strand to SEQ ID NO: 239562
aucucugaccgcagcuccc

SEQ ID NO: 239564 - RNA, 19 nt, Artificial Sequence
  Description of Artificial Sequence: Synthetic oligonucleotide
  Sense strand starting at position 3166 SEQ ID NO: 3083
agcugcggucagagauagu

SEQ ID NO: 239565 - RNA, 19 nt, Artificial Sequence
  Description of Artificial Sequence: Synthetic oligonucleotide
  Antisense strand to SEQ ID NO: 239564
acuaucucugaccgcagcu

SEQ ID NO: 239566 - RNA, 19 nt, Artificial Sequence
  Description of Artificial Sequence: Synthetic oligonucleotide
  Sense strand starting at position 3290 SEQ ID NO: 3083
gugacagggucucacauuu

SEQ ID NO: 239567 - RNA, 19 nt, Artificial Sequence
  Description of Artificial Sequence: Synthetic oligonucleotide
  Antisense strand to SEQ ID NO: 239566
aaaugugagacccugucac

SEQ ID NO: 239568 - RNA, 19 nt, Artificial Sequence
  Description of Artificial Sequence: Synthetic oligonucleotide
  Sense strand starting at position 3350 SEQ ID NO: 3083
aggccauugccaugaugca

SEQ ID NO: 239569 - RNA, 19 nt, Artificial Sequence
  Description of Artificial Sequence: Synthetic oligonucleotide
  Antisense strand to SEQ ID NO: 239568
ugcaucauggcaauggccu

SEQ ID NO: 239570 - RNA, 19 nt, Artificial Sequence
  Description of Artificial Sequence: Synthetic oligonucleotide
  Sense strand starting at position 3404 SEQ ID NO: 3083
ccgaauucuggauaugcuu

SEQ ID NO: 239571 - RNA, 19 nt, Artificial Sequence
  Description of Artificial Sequence: Synthetic oligonucleotide
  Antisense strand to SEQ ID NO: 239570
aagcauauccagaauucgg

SEQ ID NO: 239572 - RNA, 19 nt, Artificial Sequence
  Description of Artificial Sequence: Synthetic oligonucleotide
  Sense strand starting at position 3411 SEQ ID NO: 3083
cuggauaugcuuugaaggu

SEQ ID NO: 239573 - RNA, 19 nt, Artificial Sequence
  Description of Artificial Sequence: Synthetic oligonucleotide
  Antisense strand to SEQ ID NO: 239572
accuucaaagcauauccag

SEQ ID NO: 239574 - RNA, 19 nt, Artificial Sequence
  Description of Artificial Sequence: Synthetic oligonucleotide
  Sense strand starting at position 3434 SEQ ID NO: 3083
ccagcaggauugucugaaa

SEQ ID NO: 239575 - RNA, 19 nt, Artificial Sequence
  Description of Artificial Sequence: Synthetic oligonucleotide
  Antisense strand to SEQ ID NO: 239574
uuucagacaauccugcugg

SEQ ID NO: 239576 - RNA, 19 nt, Artificial Sequence
  Description of Artificial Sequence: Synthetic oligonucleotide
  Sense strand starting at position 3602 SEQ ID NO: 3083
ugcuaagcucaagauguau

SEQ ID NO: 239577 - RNA, 19 nt, Artificial Sequence
  Description of Artificial Sequence: Synthetic oligonucleotide
  Antisense strand to SEQ ID NO: 239576
auacaucuugagcuuagca

SEQ ID NO: 239578 - RNA, 19 nt, Artificial Sequence
  Description of Artificial Sequence: Synthetic oligonucleotide
  Sense strand starting at position 3608 SEQ ID NO: 3083
gcucaagauguaugggaga

SEQ ID NO: 239579 - RNA, 19 nt, Artificial Sequence
  Description of Artificial Sequence: Synthetic oligonucleotide
  Antisense strand to SEQ ID NO: 239578
ucucccauacaucuugagc

SEQ ID NO: 239580 - RNA, 19 nt, Artificial Sequence
  Description of Artificial Sequence: Synthetic oligonucleotide
  Sense strand starting at position 3611 SEQ ID NO: 3083
caagauguaugggagauaa

SEQ ID NO: 239581 - RNA, 19 nt, Artificial Sequence
  Description of Artificial Sequence: Synthetic oligonucleotide
  Antisense strand to SEQ ID NO: 239580
uuaucucccauacaucuug

SEQ ID NO: 239582 - RNA, 19 nt, Artificial Sequence
  Description of Artificial Sequence: Synthetic oligonucleotide
  Sense strand starting at position 3676 SEQ ID NO: 3083
gggagaagucugggcugaa

SEQ ID NO: 239583 - RNA, 19 nt, Artificial Sequence
  Description of Artificial Sequence: Synthetic oligonucleotide
  Antisense strand to SEQ ID NO: 239582
uucagcccagacuucuccc

SEQ ID NO: 239584 - RNA, 19 nt, Artificial Sequence
  Description of Artificial Sequence: Synthetic oligonucleotide
  Sense strand starting at position 3677 SEQ ID NO: 3083
ggagaagucugggcugaag

SEQ ID NO: 239585 - RNA, 19 nt, Artificial Sequence
  Description of Artificial Sequence: Synthetic oligonucleotide
  Antisense strand to SEQ ID NO: 239584
cuucagcccagacuucucc

SEQ ID NO: 239586 - RNA, 19 nt, Artificial Sequence
  Description of Artificial Sequence: Synthetic oligonucleotide
  Sense strand starting at position 289 SEQ ID NO: 3086
uuaauaauguuguuccaca

SEQ ID NO: 239587 - RNA, 19 nt, Artificial Sequence
  Description of Artificial Sequence: Synthetic oligonucleotide
  Antisense strand to SEQ ID NO: 239586
uguggaacaacauuauuaa

SEQ ID NO: 239588 - RNA, 19 nt, Artificial Sequence
  Description of Artificial Sequence: Synthetic oligonucleotide
  Sense strand starting at position 368 SEQ ID NO: 3086
aguaauggcuacuuaaauu

SEQ ID NO: 239589 - RNA, 19 nt, Artificial Sequence
  Description of Artificial Sequence: Synthetic oligonucleotide
  Antisense strand to SEQ ID NO: 239588
aauuuaaguagccauuacu

SEQ ID NO: 239590 - RNA, 19 nt, Artificial Sequence
  Description of Artificial Sequence: Synthetic oligonucleotide
  Sense strand starting at position 540 SEQ ID NO: 3086
guggucguccucagaugga

SEQ ID NO: 239591 - RNA, 19 nt, Artificial Sequence
  Description of Artificial Sequence: Synthetic oligonucleotide
  Antisense strand to SEQ ID NO: 239590
uccaucugaggacgaccac

SEQ ID NO: 239592 - RNA, 19 nt, Artificial Sequence
  Description of Artificial Sequence: Synthetic oligonucleotide
  Sense strand starting at position 563 SEQ ID NO: 3086
gcaugaauccuaggaucaa

SEQ ID NO: 239593 - RNA, 19 nt, Artificial Sequence
  Description of Artificial Sequence: Synthetic oligonucleotide
  Antisense strand to SEQ ID NO: 239592
uugauccuaggauucaugc

SEQ ID NO: 239594 - RNA, 19 nt, Artificial Sequence
  Description of Artificial Sequence: Synthetic oligonucleotide
  Sense strand starting at position 897 SEQ ID NO: 3086
aguggauauacauaugugu

SEQ ID NO: 239595 - RNA, 19 nt, Artificial Sequence
  Description of Artificial Sequence: Synthetic oligonucleotide
  Antisense strand to SEQ ID NO: 239594
acacauauguauauccacu

SEQ ID NO: 239596 - RNA, 19 nt, Artificial Sequence
  Description of Artificial Sequence: Synthetic oligonucleotide
  Sense strand starting at position 1048 SEQ ID NO: 3086
ggagacuucugcucuaaua

SEQ ID NO: 239597 - RNA, 19 nt, Artificial Sequence
  Description of Artificial Sequence: Synthetic oligonucleotide
  Antisense strand to SEQ ID NO: 239596
uauuagagcagaagucucc

SEQ ID NO: 239598 - RNA, 19 nt, Artificial Sequence
  Description of Artificial Sequence: Synthetic oligonucleotide
  Sense strand starting at position 1050 SEQ ID NO: 3086
agacuucugcucuaauaag

SEQ ID NO: 239599 - RNA, 19 nt, Artificial Sequence
  Description of Artificial Sequence: Synthetic oligonucleotide
  Antisense strand to SEQ ID NO: 239598
cuuauuagagcagaagucu

SEQ ID NO: 239600 - RNA, 19 nt, Artificial Sequence
  Description of Artificial Sequence: Synthetic oligonucleotide
  Sense strand starting at position 1068 SEQ ID NO: 3086
gguaguguucaauaaguuc

SEQ ID NO: 239601 - RNA, 19 nt, Artificial Sequence
  Description of Artificial Sequence: Synthetic oligonucleotide
  Antisense strand to SEQ ID NO: 239600
gaacuuauugaacacuacc

SEQ ID NO: 239602 - RNA, 19 nt, Artificial Sequence
  Description of Artificial Sequence: Synthetic oligonucleotide
  Sense strand starting at position 1111 SEQ ID NO: 3086
agugguagccauuaauccu

SEQ ID NO: 239603 - RNA, 19 nt, Artificial Sequence
  Description of Artificial Sequence: Synthetic oligonucleotide
  Antisense strand to SEQ ID NO: 239602
aggauuaauggcuaccacu

SEQ ID NO: 239604 - RNA, 19 nt, Artificial Sequence
  Description of Artificial Sequence: Synthetic oligonucleotide
  Sense strand starting at position 1207 SEQ ID NO: 3086
gacagaauauaagcaguuu

SEQ ID NO: 239605 - RNA, 19 nt, Artificial Sequence
  Description of Artificial Sequence: Synthetic oligonucleotide
  Antisense strand to SEQ ID NO: 239604
aaacugcuuauauucuguc

SEQ ID NO: 239606 - RNA, 19 nt, Artificial Sequence
  Description of Artificial Sequence: Synthetic oligonucleotide
  Sense strand starting at position 1241 SEQ ID NO: 3086
acuugaucacaucguagau

SEQ ID NO: 239607 - RNA, 19 nt, Artificial Sequence
  Description of Artificial Sequence: Synthetic oligonucleotide
  Antisense strand to SEQ ID NO: 239606
aucuacgaugugaucaagu

SEQ ID NO: 239608 - RNA, 19 nt, Artificial Sequence
  Description of Artificial Sequence: Synthetic oligonucleotide
  Sense strand starting at position 1245 SEQ ID NO: 3086
gaucacaucguagauaucu

SEQ ID NO: 239609 - RNA, 19 nt, Artificial Sequence
  Description of Artificial Sequence: Synthetic oligonucleotide
  Antisense strand to SEQ ID NO: 239608
agauaucuacgaugugauc

SEQ ID NO: 239610 - RNA, 19 nt, Artificial Sequence
  Description of Artificial Sequence: Synthetic oligonucleotide
  Sense strand starting at position 1301 SEQ ID NO: 3086
aaugcuaagguguauuaaa

SEQ ID NO: 239611 - RNA, 19 nt, Artificial Sequence
  Description of Artificial Sequence: Synthetic oligonucleotide
  Antisense strand to SEQ ID NO: 239610
uuuaauacaccuuagcauu

SEQ ID NO: 239612 - RNA, 19 nt, Artificial Sequence
  Description of Artificial Sequence: Synthetic oligonucleotide
  Sense strand starting at position 1384 SEQ ID NO: 3086
agugaugaaaugugauaua

SEQ ID NO: 239613 - RNA, 19 nt, Artificial Sequence
  Description of Artificial Sequence: Synthetic oligonucleotide
  Antisense strand to SEQ ID NO: 239612
uauaucacauuucaucacu

SEQ ID NO: 239614 - RNA, 19 nt, Artificial Sequence
  Description of Artificial Sequence: Synthetic oligonucleotide
  Sense strand starting at position 1518 SEQ ID NO: 3086
aguacauaucaugauguuu

SEQ ID NO: 239615 - RNA, 19 nt, Artificial Sequence
  Description of Artificial Sequence: Synthetic oligonucleotide
  Antisense strand to SEQ ID NO: 239614
aaacaucaugauauguacu

SEQ ID NO: 239616 - RNA, 19 nt, Artificial Sequence
  Description of Artificial Sequence: Synthetic oligonucleotide
  Sense strand starting at position 1553 SEQ ID NO: 3086
acgaguuaucugcaaauua

SEQ ID NO: 239617 - RNA, 19 nt, Artificial Sequence
  Description of Artificial Sequence: Synthetic oligonucleotide
  Antisense strand to SEQ ID NO: 239616
uaauuugcagauaacucgu

SEQ ID NO: 239618 - RNA, 19 nt, Artificial Sequence
  Description of Artificial Sequence: Synthetic oligonucleotide
  Sense strand starting at position 1583 SEQ ID NO: 3086
ggaggcaguacauguagau

SEQ ID NO: 239619 - RNA, 19 nt, Artificial Sequence
  Description of Artificial Sequence: Synthetic oligonucleotide
  Antisense strand to SEQ ID NO: 239618
aucuacauguacugccucc

SEQ ID NO: 239620 - RNA, 19 nt, Artificial Sequence
  Description of Artificial Sequence: Synthetic oligonucleotide
  Sense strand starting at position 1592 SEQ ID NO: 3086
acauguagaugcuccuaua

SEQ ID NO: 239621 - RNA, 19 nt, Artificial Sequence
  Description of Artificial Sequence: Synthetic oligonucleotide
  Antisense strand to SEQ ID NO: 239620
uauaggagcaucuacaugu

SEQ ID NO: 239622 - RNA, 19 nt, Artificial Sequence
  Description of Artificial Sequence: Synthetic oligonucleotide
  Sense strand starting at position 1732 SEQ ID NO: 3086
gagugaaauguacagguuu

SEQ ID NO: 239623 - RNA, 19 nt, Artificial Sequence
  Description of Artificial Sequence: Synthetic oligonucleotide
  Antisense strand to SEQ ID NO: 239622
aaaccuguacauuucacuc

SEQ ID NO: 239624 - RNA, 19 nt, Artificial Sequence
  Description of Artificial Sequence: Synthetic oligonucleotide
  Sense strand starting at position 1734 SEQ ID NO: 3086
gugaaauguacagguuuga

SEQ ID NO: 239625 - RNA, 19 nt, Artificial Sequence
  Description of Artificial Sequence: Synthetic oligonucleotide
  Antisense strand to SEQ ID NO: 239624
ucaaaccuguacauuucac

SEQ ID NO: 239626 - RNA, 19 nt, Artificial Sequence
  Description of Artificial Sequence: Synthetic oligonucleotide
  Sense strand starting at position 1738 SEQ ID NO: 3086
aauguacagguuugaacua

SEQ ID NO: 239627 - RNA, 19 nt, Artificial Sequence
  Description of Artificial Sequence: Synthetic oligonucleotide
  Antisense strand to SEQ ID NO: 239626
uaguucaaaccuguacauu

SEQ ID NO: 239628 - RNA, 19 nt, Artificial Sequence
  Description of Artificial Sequence: Synthetic oligonucleotide
  Sense strand starting at position 1754 SEQ ID NO: 3086
cuagcauuuacgugagcau

SEQ ID NO: 239629 - RNA, 19 nt, Artificial Sequence
  Description of Artificial Sequence: Synthetic oligonucleotide
  Antisense strand to SEQ ID NO: 239628
augcucacguaaaugcuag

SEQ ID NO: 239630 - RNA, 19 nt, Artificial Sequence
  Description of Artificial Sequence: Synthetic oligonucleotide
  Sense strand starting at position 1755 SEQ ID NO: 3086
uagcauuuacgugagcauu

SEQ ID NO: 239631 - RNA, 19 nt, Artificial Sequence
  Description of Artificial Sequence: Synthetic oligonucleotide
  Antisense strand to SEQ ID NO: 239630
aaugcucacguaaaugcua

SEQ ID NO: 239632 - RNA, 19 nt, Artificial Sequence
  Description of Artificial Sequence: Synthetic oligonucleotide
  Sense strand starting at position 1875 SEQ ID NO: 3086
acggaaauuuguucugcuu

SEQ ID NO: 239633 - RNA, 19 nt, Artificial Sequence
  Description of Artificial Sequence: Synthetic oligonucleotide
  Antisense strand to SEQ ID NO: 239632
aagcagaacaaauuuccgu

SEQ ID NO: 239634 - RNA, 19 nt, Artificial Sequence
  Description of Artificial Sequence: Synthetic oligonucleotide
  Sense strand starting at position 1878 SEQ ID NO: 3086
gaaauuuguucugcuuguu

SEQ ID NO: 239635 - RNA, 19 nt, Artificial Sequence
  Description of Artificial Sequence: Synthetic oligonucleotide
  Antisense strand to SEQ ID NO: 239634
aacaagcagaacaaauuuc

SEQ ID NO: 239636 - RNA, 19 nt, Artificial Sequence
  Description of Artificial Sequence: Synthetic oligonucleotide
  Sense strand starting at position 1975 SEQ ID NO: 3086
ucccuauggucuucuugaa

SEQ ID NO: 239637 - RNA, 19 nt, Artificial Sequence
  Description of Artificial Sequence: Synthetic oligonucleotide
  Antisense strand to SEQ ID NO: 239636
uucaagaagaccauaggga

SEQ ID NO: 239638 - RNA, 19 nt, Artificial Sequence
  Description of Artificial Sequence: Synthetic oligonucleotide
  Sense strand starting at position 2039 SEQ ID NO: 3086
gggagaagcugguauuuaa

SEQ ID NO: 239639 - RNA, 19 nt, Artificial Sequence
  Description of Artificial Sequence: Synthetic oligonucleotide
  Antisense strand to SEQ ID NO: 239638
uuaaauaccagcuucuccc

SEQ ID NO: 239640 - RNA, 19 nt, Artificial Sequence
  Description of Artificial Sequence: Synthetic oligonucleotide
  Sense strand starting at position 2077 SEQ ID NO: 3086
uggcauauagcacauuaaa

SEQ ID NO: 239641 - RNA, 19 nt, Artificial Sequence
  Description of Artificial Sequence: Synthetic oligonucleotide
  Antisense strand to SEQ ID NO: 239640
uuuaaugugcuauaugcca

SEQ ID NO: 239642 - RNA, 19 nt, Artificial Sequence
  Description of Artificial Sequence: Synthetic oligonucleotide
  Sense strand starting at position 2232 SEQ ID NO: 3086
ggaauauacuaguugccca

SEQ ID NO: 239643 - RNA, 19 nt, Artificial Sequence
  Description of Artificial Sequence: Synthetic oligonucleotide
  Antisense strand to SEQ ID NO: 239642
ugggcaacuaguauauucc

SEQ ID NO: 239644 - RNA, 19 nt, Artificial Sequence
  Description of Artificial Sequence: Synthetic oligonucleotide
  Sense strand starting at position 2278 SEQ ID NO: 3086
aguggucaccuugauacua

SEQ ID NO: 239645 - RNA, 19 nt, Artificial Sequence
  Description of Artificial Sequence: Synthetic oligonucleotide
  Antisense strand to SEQ ID NO: 239644
uaguaucaaggugaccacu

SEQ ID NO: 239646 - RNA, 19 nt, Artificial Sequence
  Description of Artificial Sequence: Synthetic oligonucleotide
  Sense strand starting at position 2364 SEQ ID NO: 3086
gagugaguacuuggaagca

SEQ ID NO: 239647 - RNA, 19 nt, Artificial Sequence
  Description of Artificial Sequence: Synthetic oligonucleotide
  Antisense strand to SEQ ID NO: 239646
ugcuuccaaguacucacuc

SEQ ID NO: 239648 - RNA, 19 nt, Artificial Sequence
  Description of Artificial Sequence: Synthetic oligonucleotide
  Sense strand starting at position 2386 SEQ ID NO: 3086
guaauagggccucacuguu

SEQ ID NO: 239649 - RNA, 19 nt, Artificial Sequence
  Description of Artificial Sequence: Synthetic oligonucleotide
  Antisense strand to SEQ ID NO: 239648
aacagugaggcccuauuac

SEQ ID NO: 239650 - RNA, 19 nt, Artificial Sequence
  Description of Artificial Sequence: Synthetic oligonucleotide
  Sense strand starting at position 2430 SEQ ID NO: 3086
caggguuuccuuuguagaa

SEQ ID NO: 239651 - RNA, 19 nt, Artificial Sequence
  Description of Artificial Sequence: Synthetic oligonucleotide
  Antisense strand to SEQ ID NO: 239650
uucuacaaaggaaacccug

SEQ ID NO: 239652 - RNA, 19 nt, Artificial Sequence
  Description of Artificial Sequence: Synthetic oligonucleotide
  Sense strand starting at position 2431 SEQ ID NO: 3086
aggguuuccuuuguagaag

SEQ ID NO: 239653 - RNA, 19 nt, Artificial Sequence
  Description of Artificial Sequence: Synthetic oligonucleotide
  Antisense strand to SEQ ID NO: 239652
cuucuacaaaggaaacccu

SEQ ID NO: 239654 - RNA, 19 nt, Artificial Sequence
  Description of Artificial Sequence: Synthetic oligonucleotide
  Sense strand starting at position 2462 SEQ ID NO: 3086
aaguguuugcuagaagaug

SEQ ID NO: 239655 - RNA, 19 nt, Artificial Sequence
  Description of Artificial Sequence: Synthetic oligonucleotide
  Antisense strand to SEQ ID NO: 239654
caucuucuagcaaacacuu

SEQ ID NO: 239656 - RNA, 19 nt, Artificial Sequence
  Description of Artificial Sequence: Synthetic oligonucleotide
  Sense strand starting at position 2914 SEQ ID NO: 3086
acgaaagaauacccgaauu

SEQ ID NO: 239657 - RNA, 19 nt, Artificial Sequence
  Description of Artificial Sequence: Synthetic oligonucleotide
  Antisense strand to SEQ ID NO: 239656
aauucggguauucuuucgu

SEQ ID NO: 239658 - RNA, 19 nt, Artificial Sequence
  Description of Artificial Sequence: Synthetic oligonucleotide
  Sense strand starting at position 3327 SEQ ID NO: 3086
aagugauagcugugacaua

SEQ ID NO: 239659 - RNA, 19 nt, Artificial Sequence
  Description of Artificial Sequence: Synthetic oligonucleotide
  Antisense strand to SEQ ID NO: 239658
uaugucacagcuaucacuu

SEQ ID NO: 239660 - RNA, 19 nt, Artificial Sequence
  Description of Artificial Sequence: Synthetic oligonucleotide
  Sense strand starting at position 3537 SEQ ID NO: 3086
cuaauaaugcauugauaag

SEQ ID NO: 239661 - RNA, 19 nt, Artificial Sequence
  Description of Artificial Sequence: Synthetic oligonucleotide
  Antisense strand to SEQ ID NO: 239660
cuuaucaaugcauuauuag

SEQ ID NO: 239662 - RNA, 19 nt, Artificial Sequence
  Description of Artificial Sequence: Synthetic oligonucleotide
  Sense strand starting at position 3578 SEQ ID NO: 3086
ugaaaccaacgcuaugaau

SEQ ID NO: 239663 - RNA, 19 nt, Artificial Sequence
  Description of Artificial Sequence: Synthetic oligonucleotide
  Antisense strand to SEQ ID NO: 239662
auucauagcguugguuuca

SEQ ID NO: 239664 - RNA, 19 nt, Artificial Sequence
  Description of Artificial Sequence: Synthetic oligonucleotide
  Sense strand starting at position 3781 SEQ ID NO: 3086
gcaauaugccagugauuua

SEQ ID NO: 239665 - RNA, 19 nt, Artificial Sequence
  Description of Artificial Sequence: Synthetic oligonucleotide
  Antisense strand to SEQ ID NO: 239664
uaaaucacuggcauauugc

SEQ ID NO: 239666 - RNA, 19 nt, Artificial Sequence
  Description of Artificial Sequence: Synthetic oligonucleotide
  Sense strand starting at position 3 SEQ ID NO: 3087
guuaaaugucuauaacuug

SEQ ID NO: 239667 - RNA, 19 nt, Artificial Sequence
  Description of Artificial Sequence: Synthetic oligonucleotide
  Antisense strand to SEQ ID NO: 239666
caaguuauagacauuuaac

SEQ ID NO: 239668 - RNA, 19 nt, Artificial Sequence
  Description of Artificial Sequence: Synthetic oligonucleotide
  Sense strand starting at position 10 SEQ ID NO: 3087
gucuauaacuuggcugaca

SEQ ID NO: 239669 - RNA, 19 nt, Artificial Sequence
  Description of Artificial Sequence: Synthetic oligonucleotide
  Antisense strand to SEQ ID NO: 239668
ugucagccaaguuauagac

SEQ ID NO: 239670 - RNA, 19 nt, Artificial Sequence
  Description of Artificial Sequence: Synthetic oligonucleotide
  Sense strand starting at position 11 SEQ ID NO: 3087
ucuauaacuuggcugacaa

SEQ ID NO: 239671 - RNA, 19 nt, Artificial Sequence
  Description of Artificial Sequence: Synthetic oligonucleotide
  Antisense strand to SEQ ID NO: 239670
uugucagccaaguuauaga

SEQ ID NO: 239672 - RNA, 19 nt, Artificial Sequence
  Description of Artificial Sequence: Synthetic oligonucleotide
  Sense strand starting at position 12 SEQ ID NO: 3087
cuauaacuuggcugacaac

SEQ ID NO: 239673 - RNA, 19 nt, Artificial Sequence
  Description of Artificial Sequence: Synthetic oligonucleotide
  Antisense strand to SEQ ID NO: 239672
guugucagccaaguuauag

SEQ ID NO: 239674 - RNA, 19 nt, Artificial Sequence
  Description of Artificial Sequence: Synthetic oligonucleotide
  Sense strand starting at position 42 SEQ ID NO: 3087
augagagcuguccacaacu

SEQ ID NO: 239675 - RNA, 19 nt, Artificial Sequence
  Description of Artificial Sequence: Synthetic oligonucleotide
  Antisense strand to SEQ ID NO: 239674
aguuguggacagcucucau

SEQ ID NO: 239676 - RNA, 19 nt, Artificial Sequence
  Description of Artificial Sequence: Synthetic oligonucleotide
  Sense strand starting at position 44 SEQ ID NO: 3087
gagagcuguccacaacucu

SEQ ID NO: 239677 - RNA, 19 nt, Artificial Sequence
  Description of Artificial Sequence: Synthetic oligonucleotide
  Antisense strand to SEQ ID NO: 239676
agaguuguggacagcucuc

SEQ ID NO: 239678 - RNA, 19 nt, Artificial Sequence
  Description of Artificial Sequence: Synthetic oligonucleotide
  Sense strand starting at position 382 SEQ ID NO: 3087
ggcuaaugcagagauaccu

SEQ ID NO: 239679 - RNA, 19 nt, Artificial Sequence
  Description of Artificial Sequence: Synthetic oligonucleotide
  Antisense strand to SEQ ID NO: 239678
agguaucucugcauuagcc

SEQ ID NO: 239680 - RNA, 19 nt, Artificial Sequence
  Description of Artificial Sequence: Synthetic oligonucleotide
  Sense strand starting at position 388 SEQ ID NO: 3087
ugcagagauaccuguaaga

SEQ ID NO: 239681 - RNA, 19 nt, Artificial Sequence
  Description of Artificial Sequence: Synthetic oligonucleotide
  Antisense strand to SEQ ID NO: 239680
ucuuacagguaucucugca

SEQ ID NO: 239682 - RNA, 19 nt, Artificial Sequence
  Description of Artificial Sequence: Synthetic oligonucleotide
  Sense strand starting at position 475 SEQ ID NO: 3087
agcugauucggaugaucua

SEQ ID NO: 239683 - RNA, 19 nt, Artificial Sequence
  Description of Artificial Sequence: Synthetic oligonucleotide
  Antisense strand to SEQ ID NO: 239682
uagaucauccgaaucagcu

SEQ ID NO: 239684 - RNA, 19 nt, Artificial Sequence
  Description of Artificial Sequence: Synthetic oligonucleotide
  Sense strand starting at position 499 SEQ ID NO: 3087
gcucuuggauauuccaaga

SEQ ID NO: 239685 - RNA, 19 nt, Artificial Sequence
  Description of Artificial Sequence: Synthetic oligonucleotide
  Antisense strand to SEQ ID NO: 239684
ucuuggaauauccaagagc

SEQ ID NO: 239686 - RNA, 19 nt, Artificial Sequence
  Description of Artificial Sequence: Synthetic oligonucleotide
  Sense strand starting at position 660 SEQ ID NO: 3087
ucagauuagagguguuuaa

SEQ ID NO: 239687 - RNA, 19 nt, Artificial Sequence
  Description of Artificial Sequence: Synthetic oligonucleotide
  Antisense strand to SEQ ID NO: 239686
uuaaacaccucuaaucuga

SEQ ID NO: 239688 - RNA, 19 nt, Artificial Sequence
  Description of Artificial Sequence: Synthetic oligonucleotide
  Sense strand starting at position 664 SEQ ID NO: 3087
auuagagguguuuaaccuu

SEQ ID NO: 239689 - RNA, 19 nt, Artificial Sequence
  Description of Artificial Sequence: Synthetic oligonucleotide
  Antisense strand to SEQ ID NO: 239688
aagguuaaacaccucuaau

SEQ ID NO: 239690 - RNA, 19 nt, Artificial Sequence
  Description of Artificial Sequence: Synthetic oligonucleotide
  Sense strand starting at position 707 SEQ ID NO: 3087
cuaugcacuccugaaugau

SEQ ID NO: 239691 - RNA, 19 nt, Artificial Sequence
  Description of Artificial Sequence: Synthetic oligonucleotide
  Antisense strand to SEQ ID NO: 239690
aucauucaggagugcauag

SEQ ID NO: 239692 - RNA, 19 nt, Artificial Sequence
  Description of Artificial Sequence: Synthetic oligonucleotide
  Sense strand starting at position 710 SEQ ID NO: 3087
ugcacuccugaaugauaua

SEQ ID NO: 239693 - RNA, 19 nt, Artificial Sequence
  Description of Artificial Sequence: Synthetic oligonucleotide
  Antisense strand to SEQ ID NO: 239692
uauaucauucaggagugca

SEQ ID NO: 239694 - RNA, 19 nt, Artificial Sequence
  Description of Artificial Sequence: Synthetic oligonucleotide
  Sense strand starting at position 769 SEQ ID NO: 3087
gaaggucaauaguuuguca

SEQ ID NO: 239695 - RNA, 19 nt, Artificial Sequence
  Description of Artificial Sequence: Synthetic oligonucleotide
  Antisense strand to SEQ ID NO: 239694
ugacaaacuauugaccuuc

SEQ ID NO: 239696 - RNA, 19 nt, Artificial Sequence
  Description of Artificial Sequence: Synthetic oligonucleotide
  Sense strand starting at position 771 SEQ ID NO: 3087
aggucaauaguuugucaga

SEQ ID NO: 239697 - RNA, 19 nt, Artificial Sequence
  Description of Artificial Sequence: Synthetic oligonucleotide
  Antisense strand to SEQ ID NO: 239696
ucugacaaacuauugaccu

SEQ ID NO: 239698 - RNA, 19 nt, Artificial Sequence
  Description of Artificial Sequence: Synthetic oligonucleotide
  Sense strand starting at position 864 SEQ ID NO: 3087
uuggaaugcauauggauga

SEQ ID NO: 239699 - RNA, 19 nt, Artificial Sequence
  Description of Artificial Sequence: Synthetic oligonucleotide
  Antisense strand to SEQ ID NO: 239698
ucauccauaugcauuccaa

SEQ ID NO: 239700 - RNA, 19 nt, Artificial Sequence
  Description of Artificial Sequence: Synthetic oligonucleotide
  Sense strand starting at position 969 SEQ ID NO: 3087
agagcaauacaucagguuu

SEQ ID NO: 239701 - RNA, 19 nt, Artificial Sequence
  Description of Artificial Sequence: Synthetic oligonucleotide
  Antisense strand to SEQ ID NO: 239700
aaaccugauguauugcucu

SEQ ID NO: 239702 - RNA, 19 nt, Artificial Sequence
  Description of Artificial Sequence: Synthetic oligonucleotide
  Sense strand starting at position 1207 SEQ ID NO: 3087
cuguucuguguauauuaaa

SEQ ID NO: 239703 - RNA, 19 nt, Artificial Sequence
  Description of Artificial Sequence: Synthetic oligonucleotide
  Antisense strand to SEQ ID NO: 239702
uuuaauauacacagaacag

SEQ ID NO: 239704 - RNA, 19 nt, Artificial Sequence
  Description of Artificial Sequence: Synthetic oligonucleotide
  Sense strand starting at position 1333 SEQ ID NO: 3087
uaggaaauguggcucccaa

SEQ ID NO: 239705 - RNA, 19 nt, Artificial Sequence
  Description of Artificial Sequence: Synthetic oligonucleotide
  Antisense strand to SEQ ID NO: 239704
uugggagccacauuuccua

SEQ ID NO: 239706 - RNA, 19 nt, Artificial Sequence
  Description of Artificial Sequence: Synthetic oligonucleotide
  Sense strand starting at position 1428 SEQ ID NO: 3087
gagucagaauaggcuacau

SEQ ID NO: 239707 - RNA, 19 nt, Artificial Sequence
  Description of Artificial Sequence: Synthetic oligonucleotide
  Antisense strand to SEQ ID NO: 239706
auguagccuauucugacuc

SEQ ID NO: 239708 - RNA, 19 nt, Artificial Sequence
  Description of Artificial Sequence: Synthetic oligonucleotide
  Sense strand starting at position 1430 SEQ ID NO: 3087
gucagaauaggcuacauca

SEQ ID NO: 239709 - RNA, 19 nt, Artificial Sequence
  Description of Artificial Sequence: Synthetic oligonucleotide
  Antisense strand to SEQ ID NO: 239708
ugauguagccuauucugac

SEQ ID NO: 239710 - RNA, 19 nt, Artificial Sequence
  Description of Artificial Sequence: Synthetic oligonucleotide
  Sense strand starting at position 1930 SEQ ID NO: 3087
ccaaucucagaguauguca

SEQ ID NO: 239711 - RNA, 19 nt, Artificial Sequence
  Description of Artificial Sequence: Synthetic oligonucleotide
  Antisense strand to SEQ ID NO: 239710
ugacauacucugagauugg

SEQ ID NO: 239712 - RNA, 19 nt, Artificial Sequence
  Description of Artificial Sequence: Synthetic oligonucleotide
  Sense strand starting at position 2023 SEQ ID NO: 3087
cagaguagcuauucuagaa

SEQ ID NO: 239713 - RNA, 19 nt, Artificial Sequence
  Description of Artificial Sequence: Synthetic oligonucleotide
  Antisense strand to SEQ ID NO: 239712
uucuagaauagcuacucug

SEQ ID NO: 239714 - RNA, 19 nt, Artificial Sequence
  Description of Artificial Sequence: Synthetic oligonucleotide
  Sense strand starting at position 2027 SEQ ID NO: 3087
guagcuauucuagaagaca

SEQ ID NO: 239715 - RNA, 19 nt, Artificial Sequence
  Description of Artificial Sequence: Synthetic oligonucleotide
  Antisense strand to SEQ ID NO: 239714
ugucuucuagaauagcuac

SEQ ID NO: 239716 - RNA, 19 nt, Artificial Sequence
  Description of Artificial Sequence: Synthetic oligonucleotide
  Sense strand starting at position 2030 SEQ ID NO: 3087
gcuauucuagaagacagua

SEQ ID NO: 239717 - RNA, 19 nt, Artificial Sequence
  Description of Artificial Sequence: Synthetic oligonucleotide
  Antisense strand to SEQ ID NO: 239716
uacugucuucuagaauagc

SEQ ID NO: 239718 - RNA, 19 nt, Artificial Sequence
  Description of Artificial Sequence: Synthetic oligonucleotide
  Sense strand starting at position 2120 SEQ ID NO: 3087
cugcuuguagaauauaaac

SEQ ID NO: 239719 - RNA, 19 nt, Artificial Sequence
  Description of Artificial Sequence: Synthetic oligonucleotide
  Antisense strand to SEQ ID NO: 239718
guuuauauucuacaagcag

SEQ ID NO: 239720 - RNA, 19 nt, Artificial Sequence
  Description of Artificial Sequence: Synthetic oligonucleotide
  Sense strand starting at position 2425 SEQ ID NO: 3087
guuggucugagugaucaac

SEQ ID NO: 239721 - RNA, 19 nt, Artificial Sequence
  Description of Artificial Sequence: Synthetic oligonucleotide
  Antisense strand to SEQ ID NO: 239720
guugaucacucagaccaac

SEQ ID NO: 239722 - RNA, 19 nt, Artificial Sequence
  Description of Artificial Sequence: Synthetic oligonucleotide
  Sense strand starting at position 2427 SEQ ID NO: 3087
uggucugagugaucaacag

SEQ ID NO: 239723 - RNA, 19 nt, Artificial Sequence
  Description of Artificial Sequence: Synthetic oligonucleotide
  Antisense strand to SEQ ID NO: 239722
cuguugaucacucagacca

SEQ ID NO: 239724 - RNA, 19 nt, Artificial Sequence
  Description of Artificial Sequence: Synthetic oligonucleotide
  Sense strand starting at position 2610 SEQ ID NO: 3087
acauaacagccaugugaga

SEQ ID NO: 239725 - RNA, 19 nt, Artificial Sequence
  Description of Artificial Sequence: Synthetic oligonucleotide
  Antisense strand to SEQ ID NO: 239724
ucucacauggcuguuaugu

SEQ ID NO: 239726 - RNA, 19 nt, Artificial Sequence
  Description of Artificial Sequence: Synthetic oligonucleotide
  Sense strand starting at position 2612 SEQ ID NO: 3087
auaacagccaugugagaga

SEQ ID NO: 239727 - RNA, 19 nt, Artificial Sequence
  Description of Artificial Sequence: Synthetic oligonucleotide
  Antisense strand to SEQ ID NO: 239726
ucucucacauggcuguuau

SEQ ID NO: 239728 - RNA, 19 nt, Artificial Sequence
  Description of Artificial Sequence: Synthetic oligonucleotide
  Sense strand starting at position 2697 SEQ ID NO: 3087
uugauugcagcuuaugaaa

SEQ ID NO: 239729 - RNA, 19 nt, Artificial Sequence
  Description of Artificial Sequence: Synthetic oligonucleotide
  Antisense strand to SEQ ID NO: 239728
uuucauaagcugcaaucaa

SEQ ID NO: 239730 - RNA, 19 nt, Artificial Sequence
  Description of Artificial Sequence: Synthetic oligonucleotide
  Sense strand starting at position 2887 SEQ ID NO: 3087
ugagcaaaucaaggaagua

SEQ ID NO: 239731 - RNA, 19 nt, Artificial Sequence
  Description of Artificial Sequence: Synthetic oligonucleotide
  Antisense strand to SEQ ID NO: 239730
uacuuccuugauuugcuca

SEQ ID NO: 239732 - RNA, 19 nt, Artificial Sequence
  Description of Artificial Sequence: Synthetic oligonucleotide
  Sense strand starting at position 2963 SEQ ID NO: 3087
cuauguagauaugcuacua

SEQ ID NO: 239733 - RNA, 19 nt, Artificial Sequence
  Description of Artificial Sequence: Synthetic oligonucleotide
  Antisense strand to SEQ ID NO: 239732
uaguagcauaucuacauag

SEQ ID NO: 239734 - RNA, 19 nt, Artificial Sequence
  Description of Artificial Sequence: Synthetic oligonucleotide
  Sense strand starting at position 3106 SEQ ID NO: 3087
uuggcacuucugcaaauua

SEQ ID NO: 239735 - RNA, 19 nt, Artificial Sequence
  Description of Artificial Sequence: Synthetic oligonucleotide
  Antisense strand to SEQ ID NO: 239734
uaauuugcagaagugccaa

SEQ ID NO: 239736 - RNA, 19 nt, Artificial Sequence
  Description of Artificial Sequence: Synthetic oligonucleotide
  Sense strand starting at position 3120 SEQ ID NO: 3087
aauuaaguagcaugugaua

SEQ ID NO: 239737 - RNA, 19 nt, Artificial Sequence
  Description of Artificial Sequence: Synthetic oligonucleotide
  Antisense strand to SEQ ID NO: 239736
uaucacaugcuacuuaauu

SEQ ID NO: 239738 - RNA, 19 nt, Artificial Sequence
  Description of Artificial Sequence: Synthetic oligonucleotide
  Sense strand starting at position 3747 SEQ ID NO: 3087
aggcuauucgaauauucua

SEQ ID NO: 239739 - RNA, 19 nt, Artificial Sequence
  Description of Artificial Sequence: Synthetic oligonucleotide
  Antisense strand to SEQ ID NO: 239738
uagaauauucgaauagccu

SEQ ID NO: 239740 - RNA, 19 nt, Artificial Sequence
  Description of Artificial Sequence: Synthetic oligonucleotide
  Sense strand starting at position 3775 SEQ ID NO: 3087
ggccuaacugcuuagacaa

SEQ ID NO: 239741 - RNA, 19 nt, Artificial Sequence
  Description of Artificial Sequence: Synthetic oligonucleotide
  Antisense strand to SEQ ID NO: 239740
uugucuaagcaguuaggcc

SEQ ID NO: 239742 - RNA, 19 nt, Artificial Sequence
  Description of Artificial Sequence: Synthetic oligonucleotide
  Sense strand starting at position 3804 SEQ ID NO: 3087
agauauacgcacuguuaaa

SEQ ID NO: 239743 - RNA, 19 nt, Artificial Sequence
  Description of Artificial Sequence: Synthetic oligonucleotide
  Antisense strand to SEQ ID NO: 239742
uuuaacagugcguauaucu

SEQ ID NO: 239744 - RNA, 19 nt, Artificial Sequence
  Description of Artificial Sequence: Synthetic oligonucleotide
  Sense strand starting at position 3965 SEQ ID NO: 3087
acaaguguauaaccucuua

SEQ ID NO: 239745 - RNA, 19 nt, Artificial Sequence
  Description of Artificial Sequence: Synthetic oligonucleotide
  Antisense strand to SEQ ID NO: 239744
uaagagguuauacacuugu

SEQ ID NO: 239746 - RNA, 19 nt, Artificial Sequence
  Description of Artificial Sequence: Synthetic oligonucleotide
  Sense strand starting at position 16 SEQ ID NO: 3084
ucuuauuagggcuaggacu

SEQ ID NO: 239747 - RNA, 19 nt, Artificial Sequence
  Description of Artificial Sequence: Synthetic oligonucleotide
  Antisense strand to SEQ ID NO: 239746
aguccuagcccuaauaaga

SEQ ID NO: 239748 - RNA, 19 nt, Artificial Sequence
  Description of Artificial Sequence: Synthetic oligonucleotide
  Sense strand starting at position 18 SEQ ID NO: 3084
uuauuagggcuaggacuau

SEQ ID NO: 239749 - RNA, 19 nt, Artificial Sequence
  Description of Artificial Sequence: Synthetic oligonucleotide
  Antisense strand to SEQ ID NO: 239748
auaguccuagcccuaauaa

SEQ ID NO: 239750 - RNA, 19 nt, Artificial Sequence
  Description of Artificial Sequence: Synthetic oligonucleotide
  Sense strand starting at position 186 SEQ ID NO: 3084
acaugcuuacaauggaaau

SEQ ID NO: 239751 - RNA, 19 nt, Artificial Sequence
  Description of Artificial Sequence: Synthetic oligonucleotide
  Antisense strand to SEQ ID NO: 239750
auuuccauuguaagcaugu

SEQ ID NO: 239752 - RNA, 19 nt, Artificial Sequence
  Description of Artificial Sequence: Synthetic oligonucleotide
  Sense strand starting at position 196 SEQ ID NO: 3084
aauggaaauugaguauguu

SEQ ID NO: 239753 - RNA, 19 nt, Artificial Sequence
  Description of Artificial Sequence: Synthetic oligonucleotide
  Antisense strand to SEQ ID NO: 239752
aacauacucaauuuccauu

SEQ ID NO: 239754 - RNA, 19 nt, Artificial Sequence
  Description of Artificial Sequence: Synthetic oligonucleotide
  Sense strand starting at position 352 SEQ ID NO: 3084
ggauaaaccuugucacuuu

SEQ ID NO: 239755 - RNA, 19 nt, Artificial Sequence
  Description of Artificial Sequence: Synthetic oligonucleotide
  Antisense strand to SEQ ID NO: 239754
aaagugacaagguuuaucc

SEQ ID NO: 239756 - RNA, 19 nt, Artificial Sequence
  Description of Artificial Sequence: Synthetic oligonucleotide
  Sense strand starting at position 535 SEQ ID NO: 3084
gccagacuggaguauauau

SEQ ID NO: 239757 - RNA, 19 nt, Artificial Sequence
  Description of Artificial Sequence: Synthetic oligonucleotide
  Antisense strand to SEQ ID NO: 239756
auauauacuccagucuggc

SEQ ID NO: 239758 - RNA, 19 nt, Artificial Sequence
  Description of Artificial Sequence: Synthetic oligonucleotide
  Sense strand starting at position 616 SEQ ID NO: 3084
gaccaaauagucgacucua

SEQ ID NO: 239759 - RNA, 19 nt, Artificial Sequence
  Description of Artificial Sequence: Synthetic oligonucleotide
  Antisense strand to SEQ ID NO: 239758
uagagucgacuauuugguc

SEQ ID NO: 239760 - RNA, 19 nt, Artificial Sequence
  Description of Artificial Sequence: Synthetic oligonucleotide
  Sense strand starting at position 649 SEQ ID NO: 3084
auuaacauugagugcauaa

SEQ ID NO: 239761 - RNA, 19 nt, Artificial Sequence
  Description of Artificial Sequence: Synthetic oligonucleotide
  Antisense strand to SEQ ID NO: 239760
uuaugcacucaauguuaau

SEQ ID NO: 239762 - RNA, 19 nt, Artificial Sequence
  Description of Artificial Sequence: Synthetic oligonucleotide
  Sense strand starting at position 738 SEQ ID NO: 3084
augcauguaguauacagau

SEQ ID NO: 239763 - RNA, 19 nt, Artificial Sequence
  Description of Artificial Sequence: Synthetic oligonucleotide
  Antisense strand to SEQ ID NO: 239762
aucuguauacuacaugcau

SEQ ID NO: 239764 - RNA, 19 nt, Artificial Sequence
  Description of Artificial Sequence: Synthetic oligonucleotide
  Sense strand starting at position 933 SEQ ID NO: 3084
uguagcuguacugaaagau

SEQ ID NO: 239765 - RNA, 19 nt, Artificial Sequence
  Description of Artificial Sequence: Synthetic oligonucleotide
  Antisense strand to SEQ ID NO: 239764
aucuuucaguacagcuaca

SEQ ID NO: 239766 - RNA, 19 nt, Artificial Sequence
  Description of Artificial Sequence: Synthetic oligonucleotide
  Sense strand starting at position 949 SEQ ID NO: 3084
gauauuauaugggucucaa

SEQ ID NO: 239767 - RNA, 19 nt, Artificial Sequence
  Description of Artificial Sequence: Synthetic oligonucleotide
  Antisense strand to SEQ ID NO: 239766
uugagacccauauaauauc

SEQ ID NO: 239768 - RNA, 19 nt, Artificial Sequence
  Description of Artificial Sequence: Synthetic oligonucleotide
  Sense strand starting at position 978 SEQ ID NO: 3084
gggcaaaucucaguaacaa

SEQ ID NO: 239769 - RNA, 19 nt, Artificial Sequence
  Description of Artificial Sequence: Synthetic oligonucleotide
  Antisense strand to SEQ ID NO: 239768
uuguuacugagauuugccc

SEQ ID NO: 239770 - RNA, 19 nt, Artificial Sequence
  Description of Artificial Sequence: Synthetic oligonucleotide
  Sense strand starting at position 1164 SEQ ID NO: 3084
auaucaucucuccagguau

SEQ ID NO: 239771 - RNA, 19 nt, Artificial Sequence
  Description of Artificial Sequence: Synthetic oligonucleotide
  Antisense strand to SEQ ID NO: 239770
auaccuggagagaugauau

SEQ ID NO: 239772 - RNA, 19 nt, Artificial Sequence
  Description of Artificial Sequence: Synthetic oligonucleotide
  Sense strand starting at position 1370 SEQ ID NO: 3084
aauguuugagcugaccauu

SEQ ID NO: 239773 - RNA, 19 nt, Artificial Sequence
  Description of Artificial Sequence: Synthetic oligonucleotide
  Antisense strand to SEQ ID NO: 239772
aauggucagcucaaacauu

SEQ ID NO: 239774 - RNA, 19 nt, Artificial Sequence
  Description of Artificial Sequence: Synthetic oligonucleotide
  Sense strand starting at position 1373 SEQ ID NO: 3084
guuugagcugaccauuaag

SEQ ID NO: 239775 - RNA, 19 nt, Artificial Sequence
  Description of Artificial Sequence: Synthetic oligonucleotide
  Antisense strand to SEQ ID NO: 239774
cuuaauggucagcucaaac

SEQ ID NO: 239776 - RNA, 19 nt, Artificial Sequence
  Description of Artificial Sequence: Synthetic oligonucleotide
  Sense strand starting at position 1480 SEQ ID NO: 3084
uuuacaugccaauggagaa

SEQ ID NO: 239777 - RNA, 19 nt, Artificial Sequence
  Description of Artificial Sequence: Synthetic oligonucleotide
  Antisense strand to SEQ ID NO: 239776
uucuccauuggcauguaaa

SEQ ID NO: 239778 - RNA, 19 nt, Artificial Sequence
  Description of Artificial Sequence: Synthetic oligonucleotide
  Sense strand starting at position 1515 SEQ ID NO: 3084
ugaccuaaugucugaacuu

SEQ ID NO: 239779 - RNA, 19 nt, Artificial Sequence
  Description of Artificial Sequence: Synthetic oligonucleotide
  Antisense strand to SEQ ID NO: 239778
aaguucagacauuagguca

SEQ ID NO: 239780 - RNA, 19 nt, Artificial Sequence
  Description of Artificial Sequence: Synthetic oligonucleotide
  Sense strand starting at position 1647 SEQ ID NO: 3084
gcgcuauuucuuuauaauc

SEQ ID NO: 239781 - RNA, 19 nt, Artificial Sequence
  Description of Artificial Sequence: Synthetic oligonucleotide
  Antisense strand to SEQ ID NO: 239780
gauuauaaagaaauagcgc

SEQ ID NO: 239782 - RNA, 19 nt, Artificial Sequence
  Description of Artificial Sequence: Synthetic oligonucleotide
  Sense strand starting at position 1726 SEQ ID NO: 3084
uccuaucaaccagaagugu

SEQ ID NO: 239783 - RNA, 19 nt, Artificial Sequence
  Description of Artificial Sequence: Synthetic oligonucleotide
  Antisense strand to SEQ ID NO: 239782
acacuucugguugauagga

SEQ ID NO: 239784 - RNA, 19 nt, Artificial Sequence
  Description of Artificial Sequence: Synthetic oligonucleotide
  Sense strand starting at position 2179 SEQ ID NO: 3084
agagacuuauagcuauaua

SEQ ID NO: 239785 - RNA, 19 nt, Artificial Sequence
  Description of Artificial Sequence: Synthetic oligonucleotide
  Antisense strand to SEQ ID NO: 239784
uauauagcuauaagucucu

SEQ ID NO: 239786 - RNA, 19 nt, Artificial Sequence
  Description of Artificial Sequence: Synthetic oligonucleotide
  Sense strand starting at position 2337 SEQ ID NO: 3084
ggaaauaaagcugguucca

SEQ ID NO: 239787 - RNA, 19 nt, Artificial Sequence
  Description of Artificial Sequence: Synthetic oligonucleotide
  Antisense strand to SEQ ID NO: 239786
uggaaccagcuuuauuucc

SEQ ID NO: 239788 - RNA, 19 nt, Artificial Sequence
  Description of Artificial Sequence: Synthetic oligonucleotide
  Sense strand starting at position 2384 SEQ ID NO: 3084
gguaguuauacucaagcag

SEQ ID NO: 239789 - RNA, 19 nt, Artificial Sequence
  Description of Artificial Sequence: Synthetic oligonucleotide
  Antisense strand to SEQ ID NO: 239788
cugcuugaguauaacuacc

SEQ ID NO: 239790 - RNA, 19 nt, Artificial Sequence
  Description of Artificial Sequence: Synthetic oligonucleotide
  Sense strand starting at position 2402 SEQ ID NO: 3084
guuggauaaucaguggauu

SEQ ID NO: 239791 - RNA, 19 nt, Artificial Sequence
  Description of Artificial Sequence: Synthetic oligonucleotide
  Antisense strand to SEQ ID NO: 239790
aauccacugauuauccaac

SEQ ID NO: 239792 - RNA, 19 nt, Artificial Sequence
  Description of Artificial Sequence: Synthetic oligonucleotide
  Sense strand starting at position 2403 SEQ ID NO: 3084
uuggauaaucaguggauuc

SEQ ID NO: 239793 - RNA, 19 nt, Artificial Sequence
  Description of Artificial Sequence: Synthetic oligonucleotide
  Antisense strand to SEQ ID NO: 239792
gaauccacugauuauccaa

SEQ ID NO: 239794 - RNA, 19 nt, Artificial Sequence
  Description of Artificial Sequence: Synthetic oligonucleotide
  Sense strand starting at position 2625 SEQ ID NO: 3084
cccugaaagcuuuaucuug

SEQ ID NO: 239795 - RNA, 19 nt, Artificial Sequence
  Description of Artificial Sequence: Synthetic oligonucleotide
  Antisense strand to SEQ ID NO: 239794
caagauaaagcuuucaggg

SEQ ID NO: 239796 - RNA, 19 nt, Artificial Sequence
  Description of Artificial Sequence: Synthetic oligonucleotide
  Sense strand starting at position 3055 SEQ ID NO: 3084
gcucucauccuagaggaug

SEQ ID NO: 239797 - RNA, 19 nt, Artificial Sequence
  Description of Artificial Sequence: Synthetic oligonucleotide
  Antisense strand to SEQ ID NO: 239796
cauccucuaggaugagagc

SEQ ID NO: 239798 - RNA, 19 nt, Artificial Sequence
  Description of Artificial Sequence: Synthetic oligonucleotide
  Sense strand starting at position 3269 SEQ ID NO: 3084
ggcaccauuccugacuaau

SEQ ID NO: 239799 - RNA, 19 nt, Artificial Sequence
  Description of Artificial Sequence: Synthetic oligonucleotide
  Antisense strand to SEQ ID NO: 239798
auuagucaggaauggugcc

SEQ ID NO: 239800 - RNA, 19 nt, Artificial Sequence
  Description of Artificial Sequence: Synthetic oligonucleotide
  Sense strand starting at position 3524 SEQ ID NO: 3084
ccaaaugaugcugagguca

SEQ ID NO: 239801 - RNA, 19 nt, Artificial Sequence
  Description of Artificial Sequence: Synthetic oligonucleotide
  Antisense strand to SEQ ID NO: 239800
ugaccucagcaucauuugg

SEQ ID NO: 239802 - RNA, 19 nt, Artificial Sequence
  Description of Artificial Sequence: Synthetic oligonucleotide
  Sense strand starting at position 3541 SEQ ID NO: 3084
caaacugugguuuauuaag

SEQ ID NO: 239803 - RNA, 19 nt, Artificial Sequence
  Description of Artificial Sequence: Synthetic oligonucleotide
  Antisense strand to SEQ ID NO: 239802
cuuaauaaaccacaguuug

SEQ ID NO: 239804 - RNA, 19 nt, Artificial Sequence
  Description of Artificial Sequence: Synthetic oligonucleotide
  Sense strand starting at position 3549 SEQ ID NO: 3084
gguuuauuaagcugaaaga

SEQ ID NO: 239805 - RNA, 19 nt, Artificial Sequence
  Description of Artificial Sequence: Synthetic oligonucleotide
  Antisense strand to SEQ ID NO: 239804
ucuuucagcuuaauaaacc

SEQ ID NO: 239806 - RNA, 19 nt, Artificial Sequence
  Description of Artificial Sequence: Synthetic oligonucleotide
  Sense strand starting at position 3566 SEQ ID NO: 3084
gaauauauuguauggacau

SEQ ID NO: 239807 - RNA, 19 nt, Artificial Sequence
  Description of Artificial Sequence: Synthetic oligonucleotide
  Antisense strand to SEQ ID NO: 239806
auguccauacaauauauuc

SEQ ID NO: 239808 - RNA, 19 nt, Artificial Sequence
  Description of Artificial Sequence: Synthetic oligonucleotide
  Sense strand starting at position 3572 SEQ ID NO: 3084
auuguauggacaugaaguu

SEQ ID NO: 239809 - RNA, 19 nt, Artificial Sequence
  Description of Artificial Sequence: Synthetic oligonucleotide
  Antisense strand to SEQ ID NO: 239808
aacuucauguccauacaau

SEQ ID NO: 239810 - RNA, 19 nt, Artificial Sequence
  Description of Artificial Sequence: Synthetic oligonucleotide
  Sense strand starting at position 3588 SEQ ID NO: 3084
guuuaaugaggauguuuag

SEQ ID NO: 239811 - RNA, 19 nt, Artificial Sequence
  Description of Artificial Sequence: Synthetic oligonucleotide
  Antisense strand to SEQ ID NO: 239810
cuaaacauccucauuaaac

SEQ ID NO: 239812 - RNA, 19 nt, Artificial Sequence
  Description of Artificial Sequence: Synthetic oligonucleotide
  Sense strand starting at position 3591 SEQ ID NO: 3084
uaaugaggauguuuaggua

SEQ ID NO: 239813 - RNA, 19 nt, Artificial Sequence
  Description of Artificial Sequence: Synthetic oligonucleotide
  Antisense strand to SEQ ID NO: 239812
uaccuaaacauccucauua

SEQ ID NO: 239814 - RNA, 19 nt, Artificial Sequence
  Description of Artificial Sequence: Synthetic oligonucleotide
  Sense strand starting at position 3595 SEQ ID NO: 3084
gaggauguuuagguaacga

SEQ ID NO: 239815 - RNA, 19 nt, Artificial Sequence
  Description of Artificial Sequence: Synthetic oligonucleotide
  Antisense strand to SEQ ID NO: 239814
ucguuaccuaaacauccuc

SEQ ID NO: 239816 - RNA, 19 nt, Artificial Sequence
  Description of Artificial Sequence: Synthetic oligonucleotide
  Sense strand starting at position 3739 SEQ ID NO: 3084
uaagguugaugaguaaacu

SEQ ID NO: 239817 - RNA, 19 nt, Artificial Sequence
  Description of Artificial Sequence: Synthetic oligonucleotide
  Antisense strand to SEQ ID NO: 239816
aguuuacucaucaaccuua

SEQ ID NO: 239818 - RNA, 19 nt, Artificial Sequence
  Description of Artificial Sequence: Synthetic oligonucleotide
  Sense strand starting at position 3787 SEQ ID NO: 3084
ugucauuuaucagugcaau

SEQ ID NO: 239819 - RNA, 19 nt, Artificial Sequence
  Description of Artificial Sequence: Synthetic oligonucleotide
  Antisense strand to SEQ ID NO: 239818
auugcacugauaaaugaca

SEQ ID NO: 239820 - RNA, 19 nt, Artificial Sequence
  Description of Artificial Sequence: Synthetic oligonucleotide
  Sense strand starting at position 3788 SEQ ID NO: 3084
gucauuuaucagugcaaug

SEQ ID NO: 239821 - RNA, 19 nt, Artificial Sequence
  Description of Artificial Sequence: Synthetic oligonucleotide
  Antisense strand to SEQ ID NO: 239820
cauugcacugauaaaugac

SEQ ID NO: 239822 - RNA, 19 nt, Artificial Sequence
  Description of Artificial Sequence: Synthetic oligonucleotide
  Sense strand starting at position 3799 SEQ ID NO: 3084
gugcaaugugauuaauaau

SEQ ID NO: 239823 - RNA, 19 nt, Artificial Sequence
  Description of Artificial Sequence: Synthetic oligonucleotide
  Antisense strand to SEQ ID NO: 239822
auuauuaaucacauugcac

SEQ ID NO: 239824 - RNA, 19 nt, Artificial Sequence
  Description of Artificial Sequence: Synthetic oligonucleotide
  Sense strand starting at position 3901 SEQ ID NO: 3084
uaauguauacagggacauu

SEQ ID NO: 239825 - RNA, 19 nt, Artificial Sequence
  Description of Artificial Sequence: Synthetic oligonucleotide
  Antisense strand to SEQ ID NO: 239824
aaugucccuguauacauua

SEQ ID NO: 239826 - RNA, 19 nt, Artificial Sequence
  Description of Artificial Sequence: Synthetic oligonucleotide
  Sense strand starting at position 6 SEQ ID NO: 3085
gcaagauaauugcuaauuc

SEQ ID NO: 239827 - RNA, 19 nt, Artificial Sequence
  Description of Artificial Sequence: Synthetic oligonucleotide
  Antisense strand to SEQ ID NO: 239826
gaauuagcaauuaucuugc

SEQ ID NO: 239828 - RNA, 19 nt, Artificial Sequence
  Description of Artificial Sequence: Synthetic oligonucleotide
  Sense strand starting at position 97 SEQ ID NO: 3085
uuaaucuaauggguccaaa

SEQ ID NO: 239829 - RNA, 19 nt, Artificial Sequence
  Description of Artificial Sequence: Synthetic oligonucleotide
  Antisense strand to SEQ ID NO: 239828
uuuggacccauuagauuaa

SEQ ID NO: 239830 - RNA, 19 nt, Artificial Sequence
  Description of Artificial Sequence: Synthetic oligonucleotide
  Sense strand starting at position 209 SEQ ID NO: 3085
guacaagaggucugaauua

SEQ ID NO: 239831 - RNA, 19 nt, Artificial Sequence
  Description of Artificial Sequence: Synthetic oligonucleotide
  Antisense strand to SEQ ID NO: 239830
uaauucagaccucuuguac

SEQ ID NO: 239832 - RNA, 19 nt, Artificial Sequence
  Description of Artificial Sequence: Synthetic oligonucleotide
  Sense strand starting at position 221 SEQ ID NO: 3085
ugaauuaccuaguuaagug

SEQ ID NO: 239833 - RNA, 19 nt, Artificial Sequence
  Description of Artificial Sequence: Synthetic oligonucleotide
  Antisense strand to SEQ ID NO: 239832
cacuuaacuagguaauuca

SEQ ID NO: 239834 - RNA, 19 nt, Artificial Sequence
  Description of Artificial Sequence: Synthetic oligonucleotide
  Sense strand starting at position 288 SEQ ID NO: 3085
ucaagaaacugucuucgau

SEQ ID NO: 239835 - RNA, 19 nt, Artificial Sequence
  Description of Artificial Sequence: Synthetic oligonucleotide
  Antisense strand to SEQ ID NO: 239834
aucgaagacaguuucuuga

SEQ ID NO: 239836 - RNA, 19 nt, Artificial Sequence
  Description of Artificial Sequence: Synthetic oligonucleotide
  Sense strand starting at position 290 SEQ ID NO: 3085
aagaaacugucuucgauuc

SEQ ID NO: 239837 - RNA, 19 nt, Artificial Sequence
  Description of Artificial Sequence: Synthetic oligonucleotide
  Antisense strand to SEQ ID NO: 239836
gaaucgaagacaguuucuu

SEQ ID NO: 239838 - RNA, 19 nt, Artificial Sequence
  Description of Artificial Sequence: Synthetic oligonucleotide
  Sense strand starting at position 297 SEQ ID NO: 3085
ugucuucgauucuuaauuu

SEQ ID NO: 239839 - RNA, 19 nt, Artificial Sequence
  Description of Artificial Sequence: Synthetic oligonucleotide
  Antisense strand to SEQ ID NO: 239838
aaauuaagaaucgaagaca

SEQ ID NO: 239840 - RNA, 19 nt, Artificial Sequence
  Description of Artificial Sequence: Synthetic oligonucleotide
  Sense strand starting at position 345 SEQ ID NO: 3085
uguuaauguuccuuaaaca

SEQ ID NO: 239841 - RNA, 19 nt, Artificial Sequence
  Description of Artificial Sequence: Synthetic oligonucleotide
  Antisense strand to SEQ ID NO: 239840
uguuuaaggaacauuaaca

SEQ ID NO: 239842 - RNA, 19 nt, Artificial Sequence
  Description of Artificial Sequence: Synthetic oligonucleotide
  Sense strand starting at position 346 SEQ ID NO: 3085
guuaauguuccuuaaacau

SEQ ID NO: 239843 - RNA, 19 nt, Artificial Sequence
  Description of Artificial Sequence: Synthetic oligonucleotide
  Antisense strand to SEQ ID NO: 239842
auguuuaaggaacauuaac

SEQ ID NO: 239844 - RNA, 19 nt, Artificial Sequence
  Description of Artificial Sequence: Synthetic oligonucleotide
  Sense strand starting at position 372 SEQ ID NO: 3085
ucuguauuucugugaugca

SEQ ID NO: 239845 - RNA, 19 nt, Artificial Sequence
  Description of Artificial Sequence: Synthetic oligonucleotide
  Antisense strand to SEQ ID NO: 239844
ugcaucacagaaauacaga

SEQ ID NO: 239846 - RNA, 19 nt, Artificial Sequence
  Description of Artificial Sequence: Synthetic oligonucleotide
  Sense strand starting at position 379 SEQ ID NO: 3085
uucugugaugcauaagauu

SEQ ID NO: 239847 - RNA, 19 nt, Artificial Sequence
  Description of Artificial Sequence: Synthetic oligonucleotide
  Antisense strand to SEQ ID NO: 239846
aaucuuaugcaucacagaa

SEQ ID NO: 239848 - RNA, 19 nt, Artificial Sequence
  Description of Artificial Sequence: Synthetic oligonucleotide
  Sense strand starting at position 448 SEQ ID NO: 3085
uugcaaacuggugauguua

SEQ ID NO: 239849 - RNA, 19 nt, Artificial Sequence
  Description of Artificial Sequence: Synthetic oligonucleotide
  Antisense strand to SEQ ID NO: 239848
uaacaucaccaguuugcaa

SEQ ID NO: 239850 - RNA, 19 nt, Artificial Sequence
  Description of Artificial Sequence: Synthetic oligonucleotide
  Sense strand starting at position 542 SEQ ID NO: 3085
aaagaaaguuucgugauuc

SEQ ID NO: 239851 - RNA, 19 nt, Artificial Sequence
  Description of Artificial Sequence: Synthetic oligonucleotide
  Antisense strand to SEQ ID NO: 239850
gaaucacgaaacuuucuuu

SEQ ID NO: 239852 - RNA, 19 nt, Artificial Sequence
  Description of Artificial Sequence: Synthetic oligonucleotide
  Sense strand starting at position 679 SEQ ID NO: 3085
ccuggaacgcacuaauuaa

SEQ ID NO: 239853 - RNA, 19 nt, Artificial Sequence
  Description of Artificial Sequence: Synthetic oligonucleotide
  Antisense strand to SEQ ID NO: 239852
uuaauuagugcguuccagg

SEQ ID NO: 239854 - RNA, 19 nt, Artificial Sequence
  Description of Artificial Sequence: Synthetic oligonucleotide
  Sense strand starting at position 761 SEQ ID NO: 3085
gguuaaacacguuaauaga

SEQ ID NO: 239855 - RNA, 19 nt, Artificial Sequence
  Description of Artificial Sequence: Synthetic oligonucleotide
  Antisense strand to SEQ ID NO: 239854
ucuauuaacguguuuaacc

SEQ ID NO: 239856 - RNA, 19 nt, Artificial Sequence
  Description of Artificial Sequence: Synthetic oligonucleotide
  Sense strand starting at position 782 SEQ ID NO: 3085
ccaauagaauggcucuauu

SEQ ID NO: 239857 - RNA, 19 nt, Artificial Sequence
  Description of Artificial Sequence: Synthetic oligonucleotide
  Antisense strand to SEQ ID NO: 239856
aauagagccauucuauugg

SEQ ID NO: 239858 - RNA, 19 nt, Artificial Sequence
  Description of Artificial Sequence: Synthetic oligonucleotide
  Sense strand starting at position 975 SEQ ID NO: 3085
cugcgauacagguggaaga

SEQ ID NO: 239859 - RNA, 19 nt, Artificial Sequence
  Description of Artificial Sequence: Synthetic oligonucleotide
  Antisense strand to SEQ ID NO: 239858
ucuuccaccuguaucgcag

SEQ ID NO: 239860 - RNA, 19 nt, Artificial Sequence
  Description of Artificial Sequence: Synthetic oligonucleotide
  Sense strand starting at position 1034 SEQ ID NO: 3085
gccucaaggcauuaacuua

SEQ ID NO: 239861 - RNA, 19 nt, Artificial Sequence
  Description of Artificial Sequence: Synthetic oligonucleotide
  Antisense strand to SEQ ID NO: 239860
uaaguuaaugccuugaggc

SEQ ID NO: 239862 - RNA, 19 nt, Artificial Sequence
  Description of Artificial Sequence: Synthetic oligonucleotide
  Sense strand starting at position 1102 SEQ ID NO: 3085
guuguaugugcgagagaag

SEQ ID NO: 239863 - RNA, 19 nt, Artificial Sequence
  Description of Artificial Sequence: Synthetic oligonucleotide
  Antisense strand to SEQ ID NO: 239862
cuucucucgcacauacaac

SEQ ID NO: 239864 - RNA, 19 nt, Artificial Sequence
  Description of Artificial Sequence: Synthetic oligonucleotide
  Sense strand starting at position 1189 SEQ ID NO: 3085
aucuuuccaccuggacaga

SEQ ID NO: 239865 - RNA, 19 nt, Artificial Sequence
  Description of Artificial Sequence: Synthetic oligonucleotide
  Antisense strand to SEQ ID NO: 239864
ucuguccagguggaaagau

SEQ ID NO: 239866 - RNA, 19 nt, Artificial Sequence
  Description of Artificial Sequence: Synthetic oligonucleotide
  Sense strand starting at position 1246 SEQ ID NO: 3085
gugcuuaauccucagacga

SEQ ID NO: 239867 - RNA, 19 nt, Artificial Sequence
  Description of Artificial Sequence: Synthetic oligonucleotide
  Antisense strand to SEQ ID NO: 239866
ucgucugaggauuaagcac

SEQ ID NO: 239868 - RNA, 19 nt, Artificial Sequence
  Description of Artificial Sequence: Synthetic oligonucleotide
  Sense strand starting at position 1371 SEQ ID NO: 3085
gaagcuuuccgucaggaag

SEQ ID NO: 239869 - RNA, 19 nt, Artificial Sequence
  Description of Artificial Sequence: Synthetic oligonucleotide
  Antisense strand to SEQ ID NO: 239868
cuuccugacggaaagcuuc

SEQ ID NO: 239870 - RNA, 19 nt, Artificial Sequence
  Description of Artificial Sequence: Synthetic oligonucleotide
  Sense strand starting at position 2322 SEQ ID NO: 3085
uguucuaagcucgcauagu

SEQ ID NO: 239871 - RNA, 19 nt, Artificial Sequence
  Description of Artificial Sequence: Synthetic oligonucleotide
  Antisense strand to SEQ ID NO: 239870
acuaugcgagcuuagaaca

SEQ ID NO: 239872 - RNA, 19 nt, Artificial Sequence
  Description of Artificial Sequence: Synthetic oligonucleotide
  Sense strand starting at position 2689 SEQ ID NO: 3085
ugcauauucgcggucccau

SEQ ID NO: 239873 - RNA, 19 nt, Artificial Sequence
  Description of Artificial Sequence: Synthetic oligonucleotide
  Antisense strand to SEQ ID NO: 239872
augggaccgcgaauaugca

SEQ ID NO: 239874 - RNA, 19 nt, Artificial Sequence
  Description of Artificial Sequence: Synthetic oligonucleotide
  Sense strand starting at position 2690 SEQ ID NO: 3085
gcauauucgcggucccauu

SEQ ID NO: 239875 - RNA, 19 nt, Artificial Sequence
  Description of Artificial Sequence: Synthetic oligonucleotide
  Antisense strand to SEQ ID NO: 239874
aaugggaccgcgaauaugc

SEQ ID NO: 239876 - RNA, 19 nt, Artificial Sequence
  Description of Artificial Sequence: Synthetic oligonucleotide
  Sense strand starting at position 2719 SEQ ID NO: 3085
gagucacauugaguaauua

SEQ ID NO: 239877 - RNA, 19 nt, Artificial Sequence
  Description of Artificial Sequence: Synthetic oligonucleotide
  Antisense strand to SEQ ID NO: 239876
uaauuacucaaugugacuc

SEQ ID NO: 239878 - RNA, 19 nt, Artificial Sequence
  Description of Artificial Sequence: Synthetic oligonucleotide
  Sense strand starting at position 2970 SEQ ID NO: 3085
uguucuugacuguaaagug

SEQ ID NO: 239879 - RNA, 19 nt, Artificial Sequence
  Description of Artificial Sequence: Synthetic oligonucleotide
  Antisense strand to SEQ ID NO: 239878
cacuuuacagucaagaaca

SEQ ID NO: 239880 - RNA, 19 nt, Artificial Sequence
  Description of Artificial Sequence: Synthetic oligonucleotide
  Sense strand starting at position 3022 SEQ ID NO: 3085
aguaaaggauccuuucuaa

SEQ ID NO: 239881 - RNA, 19 nt, Artificial Sequence
  Description of Artificial Sequence: Synthetic oligonucleotide
  Antisense strand to SEQ ID NO: 239880
uuagaaaggauccuuuacu

SEQ ID NO: 239882 - RNA, 19 nt, Artificial Sequence
  Description of Artificial Sequence: Synthetic oligonucleotide
  Sense strand starting at position 3065 SEQ ID NO: 3085
gagguuguagguuaaauga

SEQ ID NO: 239883 - RNA, 19 nt, Artificial Sequence
  Description of Artificial Sequence: Synthetic oligonucleotide
  Antisense strand to SEQ ID NO: 239882
ucauuuaaccuacaaccuc

SEQ ID NO: 239884 - RNA, 19 nt, Artificial Sequence
  Description of Artificial Sequence: Synthetic oligonucleotide
  Sense strand starting at position 3075 SEQ ID NO: 3085
guuaaaugacucuggugaa

SEQ ID NO: 239885 - RNA, 19 nt, Artificial Sequence
  Description of Artificial Sequence: Synthetic oligonucleotide
  Antisense strand to SEQ ID NO: 239884
uucaccagagucauuuaac

SEQ ID NO: 239886 - RNA, 19 nt, Artificial Sequence
  Description of Artificial Sequence: Synthetic oligonucleotide
  Sense strand starting at position 3171 SEQ ID NO: 3085
ggcugugauguggaaauga

SEQ ID NO: 239887 - RNA, 19 nt, Artificial Sequence
  Description of Artificial Sequence: Synthetic oligonucleotide
  Antisense strand to SEQ ID NO: 239886
ucauuuccacaucacagcc

SEQ ID NO: 239888 - RNA, 19 nt, Artificial Sequence
  Description of Artificial Sequence: Synthetic oligonucleotide
  Sense strand starting at position 3255 SEQ ID NO: 3085
uaaguuaugugaguaaaca

SEQ ID NO: 239889 - RNA, 19 nt, Artificial Sequence
  Description of Artificial Sequence: Synthetic oligonucleotide
  Antisense strand to SEQ ID NO: 239888
uguuuacucacauaacuua

SEQ ID NO: 239890 - RNA, 19 nt, Artificial Sequence
  Description of Artificial Sequence: Synthetic oligonucleotide
  Sense strand starting at position 3256 SEQ ID NO: 3085
aaguuaugugaguaaacau

SEQ ID NO: 239891 - RNA, 19 nt, Artificial Sequence
  Description of Artificial Sequence: Synthetic oligonucleotide
  Antisense strand to SEQ ID NO: 239890
auguuuacucacauaacuu

SEQ ID NO: 239892 - RNA, 19 nt, Artificial Sequence
  Description of Artificial Sequence: Synthetic oligonucleotide
  Sense strand starting at position 3286 SEQ ID NO: 3085
aauugaagcgucgaaacua

SEQ ID NO: 239893 - RNA, 19 nt, Artificial Sequence
  Description of Artificial Sequence: Synthetic oligonucleotide
  Antisense strand to SEQ ID NO: 239892
uaguuucgacgcuucaauu

SEQ ID NO: 239894 - RNA, 19 nt, Artificial Sequence
  Description of Artificial Sequence: Synthetic oligonucleotide
  Sense strand starting at position 3466 SEQ ID NO: 3085
gaaagugaguguucugacu

SEQ ID NO: 239895 - RNA, 19 nt, Artificial Sequence
  Description of Artificial Sequence: Synthetic oligonucleotide
  Antisense strand to SEQ ID NO: 239894
agucagaacacucacuuuc

SEQ ID NO: 239896 - RNA, 19 nt, Artificial Sequence
  Description of Artificial Sequence: Synthetic oligonucleotide
  Sense strand starting at position 3472 SEQ ID NO: 3085
gaguguucugacuacacau

SEQ ID NO: 239897 - RNA, 19 nt, Artificial Sequence
  Description of Artificial Sequence: Synthetic oligonucleotide
  Antisense strand to SEQ ID NO: 239896
auguguagucagaacacuc

SEQ ID NO: 239898 - RNA, 19 nt, Artificial Sequence
  Description of Artificial Sequence: Synthetic oligonucleotide
  Sense strand starting at position 3474 SEQ ID NO: 3085
guguucugacuacacauga

SEQ ID NO: 239899 - RNA, 19 nt, Artificial Sequence
  Description of Artificial Sequence: Synthetic oligonucleotide
  Antisense strand to SEQ ID NO: 239898
ucauguguagucagaacac

SEQ ID NO: 239900 - RNA, 19 nt, Artificial Sequence
  Description of Artificial Sequence: Synthetic oligonucleotide
  Sense strand starting at position 3660 SEQ ID NO: 3085
gaugguaugaaauguaugu

SEQ ID NO: 239901 - RNA, 19 nt, Artificial Sequence
  Description of Artificial Sequence: Synthetic oligonucleotide
  Antisense strand to SEQ ID NO: 239900
acauacauuucauaccauc

SEQ ID NO: 239902 - RNA, 19 nt, Artificial Sequence
  Description of Artificial Sequence: Synthetic oligonucleotide
  Sense strand starting at position 3713 SEQ ID NO: 3085
auaagaagcugcucaacuu

SEQ ID NO: 239903 - RNA, 19 nt, Artificial Sequence
  Description of Artificial Sequence: Synthetic oligonucleotide
  Antisense strand to SEQ ID NO: 239902
aaguugagcagcuucuuau

SEQ ID NO: 239904 - RNA, 19 nt, Artificial Sequence
  Description of Artificial Sequence: Synthetic oligonucleotide
  Sense strand starting at position 3966 SEQ ID NO: 3085
ggguaaguuguuuacccaa

SEQ ID NO: 239905 - RNA, 19 nt, Artificial Sequence
  Description of Artificial Sequence: Synthetic oligonucleotide
  Antisense strand to SEQ ID NO: 239904
uuggguaaacaacuuaccc

SEQ ID NO: 239906 - RNA, 19 nt, Artificial Sequence
  Description of Artificial Sequence: Synthetic oligonucleotide
  Sense strand starting at position 56 SEQ ID NO: 3088
augcuaugugcugacaaua

SEQ ID NO: 239907 - RNA, 19 nt, Artificial Sequence
  Description of Artificial Sequence: Synthetic oligonucleotide
  Antisense strand to SEQ ID NO: 239906
uauugucagcacauagcau

SEQ ID NO: 239908 - RNA, 19 nt, Artificial Sequence
  Description of Artificial Sequence: Synthetic oligonucleotide
  Sense strand starting at position 85 SEQ ID NO: 3088
ggaaguuccaccggcaaga

SEQ ID NO: 239909 - RNA, 19 nt, Artificial Sequence
  Description of Artificial Sequence: Synthetic oligonucleotide
  Antisense strand to SEQ ID NO: 239908
ucuugccgguggaacuucc

SEQ ID NO: 239910 - RNA, 19 nt, Artificial Sequence
  Description of Artificial Sequence: Synthetic oligonucleotide
  Sense strand starting at position 813 SEQ ID NO: 3088
acgcuuaacaccgaaggaa

SEQ ID NO: 239911 - RNA, 19 nt, Artificial Sequence
  Description of Artificial Sequence: Synthetic oligonucleotide
  Antisense strand to SEQ ID NO: 239910
uuccuucgguguuaagcgu

SEQ ID NO: 239912 - RNA, 19 nt, Artificial Sequence
  Description of Artificial Sequence: Synthetic oligonucleotide
  Sense strand starting at position 976 SEQ ID NO: 3088
cuaugucuaguccaucuua

SEQ ID NO: 239913 - RNA, 19 nt, Artificial Sequence
  Description of Artificial Sequence: Synthetic oligonucleotide
  Antisense strand to SEQ ID NO: 239912
uaagauggacuagacauag

SEQ ID NO: 239914 - RNA, 19 nt, Artificial Sequence
  Description of Artificial Sequence: Synthetic oligonucleotide
  Sense strand starting at position 1039 SEQ ID NO: 3088
ucagauaaauuggcauaca

SEQ ID NO: 239915 - RNA, 19 nt, Artificial Sequence
  Description of Artificial Sequence: Synthetic oligonucleotide
  Antisense strand to SEQ ID NO: 239914
uguaugccaauuuaucuga

SEQ ID NO: 239916 - RNA, 19 nt, Artificial Sequence
  Description of Artificial Sequence: Synthetic oligonucleotide
  Sense strand starting at position 1158 SEQ ID NO: 3088
gcuguuauacugcauauau

SEQ ID NO: 239917 - RNA, 19 nt, Artificial Sequence
  Description of Artificial Sequence: Synthetic oligonucleotide
  Antisense strand to SEQ ID NO: 239916
auauaugcaguauaacagc

SEQ ID NO: 239918 - RNA, 19 nt, Artificial Sequence
  Description of Artificial Sequence: Synthetic oligonucleotide
  Sense strand starting at position 1304 SEQ ID NO: 3088
uaagauugauggucuccua

SEQ ID NO: 239919 - RNA, 19 nt, Artificial Sequence
  Description of Artificial Sequence: Synthetic oligonucleotide
  Antisense strand to SEQ ID NO: 239918
uaggagaccaucaaucuua

SEQ ID NO: 239920 - RNA, 19 nt, Artificial Sequence
  Description of Artificial Sequence: Synthetic oligonucleotide
  Sense strand starting at position 1307 SEQ ID NO: 3088
gauugauggucuccuaagu

SEQ ID NO: 239921 - RNA, 19 nt, Artificial Sequence
  Description of Artificial Sequence: Synthetic oligonucleotide
  Antisense strand to SEQ ID NO: 239920
acuuaggagaccaucaauc

SEQ ID NO: 239922 - RNA, 19 nt, Artificial Sequence
  Description of Artificial Sequence: Synthetic oligonucleotide
  Sense strand starting at position 1338 SEQ ID NO: 3088
agaaauucucacugugcaa

SEQ ID NO: 239923 - RNA, 19 nt, Artificial Sequence
  Description of Artificial Sequence: Synthetic oligonucleotide
  Antisense strand to SEQ ID NO: 239922
uugcacagugagaauuucu

SEQ ID NO: 239924 - RNA, 19 nt, Artificial Sequence
  Description of Artificial Sequence: Synthetic oligonucleotide
  Sense strand starting at position 1355 SEQ ID NO: 3088
aaauuaaguguccguuaga

SEQ ID NO: 239925 - RNA, 19 nt, Artificial Sequence
  Description of Artificial Sequence: Synthetic oligonucleotide
  Antisense strand to SEQ ID NO: 239924
ucuaacggacacuuaauuu

SEQ ID NO: 239926 - RNA, 19 nt, Artificial Sequence
  Description of Artificial Sequence: Synthetic oligonucleotide
  Sense strand starting at position 1356 SEQ ID NO: 3088
aauuaaguguccguuagag

SEQ ID NO: 239927 - RNA, 19 nt, Artificial Sequence
  Description of Artificial Sequence: Synthetic oligonucleotide
  Antisense strand to SEQ ID NO: 239926
cucuaacggacacuuaauu

SEQ ID NO: 239928 - RNA, 19 nt, Artificial Sequence
  Description of Artificial Sequence: Synthetic oligonucleotide
  Sense strand starting at position 1358 SEQ ID NO: 3088
uuaaguguccguuagaggu

SEQ ID NO: 239929 - RNA, 19 nt, Artificial Sequence
  Description of Artificial Sequence: Synthetic oligonucleotide
  Antisense strand to SEQ ID NO: 239928
accucuaacggacacuuaa

SEQ ID NO: 239930 - RNA, 19 nt, Artificial Sequence
  Description of Artificial Sequence: Synthetic oligonucleotide
  Sense strand starting at position 1379 SEQ ID NO: 3088
gaggguaauguagguugua

SEQ ID NO: 239931 - RNA, 19 nt, Artificial Sequence
  Description of Artificial Sequence: Synthetic oligonucleotide
  Antisense strand to SEQ ID NO: 239930
uacaaccuacauuacccuc

SEQ ID NO: 239932 - RNA, 19 nt, Artificial Sequence
  Description of Artificial Sequence: Synthetic oligonucleotide
  Sense strand starting at position 1507 SEQ ID NO: 3088
auaauacagcuuggaauua

SEQ ID NO: 239933 - RNA, 19 nt, Artificial Sequence
  Description of Artificial Sequence: Synthetic oligonucleotide
  Antisense strand to SEQ ID NO: 239932
uaauuccaagcuguauuau

SEQ ID NO: 239934 - RNA, 19 nt, Artificial Sequence
  Description of Artificial Sequence: Synthetic oligonucleotide
  Sense strand starting at position 1524 SEQ ID NO: 3088
uaacaauguccacgguaaa

SEQ ID NO: 239935 - RNA, 19 nt, Artificial Sequence
  Description of Artificial Sequence: Synthetic oligonucleotide
  Antisense strand to SEQ ID NO: 239934
uuuaccguggacauuguua

SEQ ID NO: 239936 - RNA, 19 nt, Artificial Sequence
  Description of Artificial Sequence: Synthetic oligonucleotide
  Sense strand starting at position 1776 SEQ ID NO: 3088
uuaugacaaucuguaaagu

SEQ ID NO: 239937 - RNA, 19 nt, Artificial Sequence
  Description of Artificial Sequence: Synthetic oligonucleotide
  Antisense strand to SEQ ID NO: 239936
acuuuacagauugucauaa

SEQ ID NO: 239938 - RNA, 19 nt, Artificial Sequence
  Description of Artificial Sequence: Synthetic oligonucleotide
  Sense strand starting at position 2035 SEQ ID NO: 3088
ggcagaagagaacguuaau

SEQ ID NO: 239939 - RNA, 19 nt, Artificial Sequence
  Description of Artificial Sequence: Synthetic oligonucleotide
  Antisense strand to SEQ ID NO: 239938
auuaacguucucuucugcc

SEQ ID NO: 239940 - RNA, 19 nt, Artificial Sequence
  Description of Artificial Sequence: Synthetic oligonucleotide
  Sense strand starting at position 2181 SEQ ID NO: 3088
uuccucaauccgugaaaga

SEQ ID NO: 239941 - RNA, 19 nt, Artificial Sequence
  Description of Artificial Sequence: Synthetic oligonucleotide
  Antisense strand to SEQ ID NO: 239940
ucuuucacggauugaggaa

SEQ ID NO: 239942 - RNA, 19 nt, Artificial Sequence
  Description of Artificial Sequence: Synthetic oligonucleotide
  Sense strand starting at position 2182 SEQ ID NO: 3088
uccucaauccgugaaagau

SEQ ID NO: 239943 - RNA, 19 nt, Artificial Sequence
  Description of Artificial Sequence: Synthetic oligonucleotide
  Antisense strand to SEQ ID NO: 239942
aucuuucacggauugagga

SEQ ID NO: 239944 - RNA, 19 nt, Artificial Sequence
  Description of Artificial Sequence: Synthetic oligonucleotide
  Sense strand starting at position 2289 SEQ ID NO: 3088
auaucuguccucugcauuu

SEQ ID NO: 239945 - RNA, 19 nt, Artificial Sequence
  Description of Artificial Sequence: Synthetic oligonucleotide
  Antisense strand to SEQ ID NO: 239944
aaaugcagaggacagauau

SEQ ID NO: 239946 - RNA, 19 nt, Artificial Sequence
  Description of Artificial Sequence: Synthetic oligonucleotide
  Sense strand starting at position 2493 SEQ ID NO: 3088
gaggauggagccuagcauu

SEQ ID NO: 239947 - RNA, 19 nt, Artificial Sequence
  Description of Artificial Sequence: Synthetic oligonucleotide
  Antisense strand to SEQ ID NO: 239946
aaugcuaggcuccauccuc

SEQ ID NO: 239948 - RNA, 19 nt, Artificial Sequence
  Description of Artificial Sequence: Synthetic oligonucleotide
  Sense strand starting at position 2738 SEQ ID NO: 3088
uuucuuaguuaggcagaaa

SEQ ID NO: 239949 - RNA, 19 nt, Artificial Sequence
  Description of Artificial Sequence: Synthetic oligonucleotide
  Antisense strand to SEQ ID NO: 239948
uuucugccuaacuaagaaa

SEQ ID NO: 239950 - RNA, 19 nt, Artificial Sequence
  Description of Artificial Sequence: Synthetic oligonucleotide
  Sense strand starting at position 2741 SEQ ID NO: 3088
cuuaguuaggcagaaauca

SEQ ID NO: 239951 - RNA, 19 nt, Artificial Sequence
  Description of Artificial Sequence: Synthetic oligonucleotide
  Antisense strand to SEQ ID NO: 239950
ugauuucugccuaacuaag

SEQ ID NO: 239952 - RNA, 19 nt, Artificial Sequence
  Description of Artificial Sequence: Synthetic oligonucleotide
  Sense strand starting at position 2749 SEQ ID NO: 3088
ggcagaaaucaccagcugu

SEQ ID NO: 239953 - RNA, 19 nt, Artificial Sequence
  Description of Artificial Sequence: Synthetic oligonucleotide
  Antisense strand to SEQ ID NO: 239952
acagcuggugauuucugcc

SEQ ID NO: 239954 - RNA, 19 nt, Artificial Sequence
  Description of Artificial Sequence: Synthetic oligonucleotide
  Sense strand starting at position 3262 SEQ ID NO: 3088
accagauggauacguuauu

SEQ ID NO: 239955 - RNA, 19 nt, Artificial Sequence
  Description of Artificial Sequence: Synthetic oligonucleotide
  Antisense strand to SEQ ID NO: 239954
aauaacguauccaucuggu

SEQ ID NO: 239956 - RNA, 19 nt, Artificial Sequence
  Description of Artificial Sequence: Synthetic oligonucleotide
  Sense strand starting at position 3377 SEQ ID NO: 3088
augugauuugccuggguca

SEQ ID NO: 239957 - RNA, 19 nt, Artificial Sequence
  Description of Artificial Sequence: Synthetic oligonucleotide
  Antisense strand to SEQ ID NO: 239956
ugacccaggcaaaucacau

SEQ ID NO: 239958 - RNA, 19 nt, Artificial Sequence
  Description of Artificial Sequence: Synthetic oligonucleotide
  Sense strand starting at position 3396 SEQ ID NO: 3088
gguaccuuaugguuuguga

SEQ ID NO: 239959 - RNA, 19 nt, Artificial Sequence
  Description of Artificial Sequence: Synthetic oligonucleotide
  Antisense strand to SEQ ID NO: 239958
ucacaaaccauaagguacc

SEQ ID NO: 239960 - RNA, 19 nt, Artificial Sequence
  Description of Artificial Sequence: Synthetic oligonucleotide
  Sense strand starting at position 3422 SEQ ID NO: 3088
guagcugauuuauaugaua

SEQ ID NO: 239961 - RNA, 19 nt, Artificial Sequence
  Description of Artificial Sequence: Synthetic oligonucleotide
  Antisense strand to SEQ ID NO: 239960
uaucauauaaaucagcuac

SEQ ID NO: 239962 - RNA, 19 nt, Artificial Sequence
  Description of Artificial Sequence: Synthetic oligonucleotide
  Sense strand starting at position 3542 SEQ ID NO: 3088
gcaauuuacuaccaggagu

SEQ ID NO: 239963 - RNA, 19 nt, Artificial Sequence
  Description of Artificial Sequence: Synthetic oligonucleotide
  Antisense strand to SEQ ID NO: 239962
acuccugguaguaaauugc

SEQ ID NO: 239964 - RNA, 19 nt, Artificial Sequence
  Description of Artificial Sequence: Synthetic oligonucleotide
  Sense strand starting at position 3606 SEQ ID NO: 3088
agucauugauuccuacuga

SEQ ID NO: 239965 - RNA, 19 nt, Artificial Sequence
  Description of Artificial Sequence: Synthetic oligonucleotide
  Antisense strand to SEQ ID NO: 239964
ucaguaggaaucaaugacu

SEQ ID NO: 239966 - RNA, 19 nt, Artificial Sequence
  Description of Artificial Sequence: Synthetic oligonucleotide
  Sense strand starting at position 3723 SEQ ID NO: 3088
uuucuaaaugcuuaggauu

SEQ ID NO: 239967 - RNA, 19 nt, Artificial Sequence
  Description of Artificial Sequence: Synthetic oligonucleotide
  Antisense strand to SEQ ID NO: 239966
aauccuaagcauuuagaaa

SEQ ID NO: 239968 - RNA, 19 nt, Artificial Sequence
  Description of Artificial Sequence: Synthetic oligonucleotide
  Sense strand starting at position 3729 SEQ ID NO: 3088
aaugcuuaggauugguaau

SEQ ID NO: 239969 - RNA, 19 nt, Artificial Sequence
  Description of Artificial Sequence: Synthetic oligonucleotide
  Antisense strand to SEQ ID NO: 239968
auuaccaauccuaagcauu

SEQ ID NO: 239970 - RNA, 19 nt, Artificial Sequence
  Description of Artificial Sequence: Synthetic oligonucleotide
  Sense strand starting at position 3731 SEQ ID NO: 3088
ugcuuaggauugguaauca

SEQ ID NO: 239971 - RNA, 19 nt, Artificial Sequence
  Description of Artificial Sequence: Synthetic oligonucleotide
  Antisense strand to SEQ ID NO: 239970
ugauuaccaauccuaagca

SEQ ID NO: 239972 - RNA, 19 nt, Artificial Sequence
  Description of Artificial Sequence: Synthetic oligonucleotide
  Sense strand starting at position 3735 SEQ ID NO: 3088
uaggauugguaaucaccua

SEQ ID NO: 239973 - RNA, 19 nt, Artificial Sequence
  Description of Artificial Sequence: Synthetic oligonucleotide
  Antisense strand to SEQ ID NO: 239972
uaggugauuaccaauccua

SEQ ID NO: 239974 - RNA, 19 nt, Artificial Sequence
  Description of Artificial Sequence: Synthetic oligonucleotide
  Sense strand starting at position 3846 SEQ ID NO: 3088
ggaucuugguacccauaaa

SEQ ID NO: 239975 - RNA, 19 nt, Artificial Sequence
  Description of Artificial Sequence: Synthetic oligonucleotide
  Antisense strand to SEQ ID NO: 239974
uuuauggguaccaagaucc

SEQ ID NO: 239976 - RNA, 19 nt, Artificial Sequence
  Description of Artificial Sequence: Synthetic oligonucleotide
  Sense strand starting at position 3886 SEQ ID NO: 3088
uguuauuucuuaguacagu

SEQ ID NO: 239977 - RNA, 19 nt, Artificial Sequence
  Description of Artificial Sequence: Synthetic oligonucleotide
  Antisense strand to SEQ ID NO: 239976
acuguacuaagaaauaaca

SEQ ID NO: 239978 - RNA, 19 nt, Artificial Sequence
  Description of Artificial Sequence: Synthetic oligonucleotide
  Sense strand starting at position 3895 SEQ ID NO: 3088
uuaguacagucaguauacu

SEQ ID NO: 239979 - RNA, 19 nt, Artificial Sequence
  Description of Artificial Sequence: Synthetic oligonucleotide
  Antisense strand to SEQ ID NO: 239978
aguauacugacuguacuaa

SEQ ID NO: 239980 - RNA, 19 nt, Artificial Sequence
  Description of Artificial Sequence: Synthetic oligonucleotide
  Sense strand starting at position 3921 SEQ ID NO: 3088
uggagaggcuauguaaugu

SEQ ID NO: 239981 - RNA, 19 nt, Artificial Sequence
  Description of Artificial Sequence: Synthetic oligonucleotide
  Antisense strand to SEQ ID NO: 239980
acauuacauagccucucca

SEQ ID NO: 239982 - RNA, 19 nt, Artificial Sequence
  Description of Artificial Sequence: Synthetic oligonucleotide
  Sense strand starting at position 3930 SEQ ID NO: 3088
uauguaauguuagcagaga

SEQ ID NO: 239983 - RNA, 19 nt, Artificial Sequence
  Description of Artificial Sequence: Synthetic oligonucleotide
  Antisense strand to SEQ ID NO: 239982
ucucugcuaacauuacaua

SEQ ID NO: 239984 - RNA, 19 nt, Artificial Sequence
  Description of Artificial Sequence: Synthetic oligonucleotide
  Sense strand starting at position 3944 SEQ ID NO: 3088
agagaaaugucagcaaauu

SEQ ID NO: 239985 - RNA, 19 nt, Artificial Sequence
  Description of Artificial Sequence: Synthetic oligonucleotide
  Antisense strand to SEQ ID NO: 239984
aauuugcugacauuucucu

SEQ ID NO: 239986 - RNA, 19 nt, Artificial Sequence
  Description of Artificial Sequence: Synthetic oligonucleotide
  Sense strand starting at position 42 SEQ ID NO: 3089
uuaucauaccguuacugau

SEQ ID NO: 239987 - RNA, 19 nt, Artificial Sequence
  Description of Artificial Sequence: Synthetic oligonucleotide
  Antisense strand to SEQ ID NO: 239986
aucaguaacgguaugauaa

SEQ ID NO: 239988 - RNA, 19 nt, Artificial Sequence
  Description of Artificial Sequence: Synthetic oligonucleotide
  Sense strand starting at position 177 SEQ ID NO: 3089
uuaugaauugccuguacau

SEQ ID NO: 239989 - RNA, 19 nt, Artificial Sequence
  Description of Artificial Sequence: Synthetic oligonucleotide
  Antisense strand to SEQ ID NO: 239988
auguacaggcaauucauaa

SEQ ID NO: 239990 - RNA, 19 nt, Artificial Sequence
  Description of Artificial Sequence: Synthetic oligonucleotide
  Sense strand starting at position 179 SEQ ID NO: 3089
augaauugccuguacauau

SEQ ID NO: 239991 - RNA, 19 nt, Artificial Sequence
  Description of Artificial Sequence: Synthetic oligonucleotide
  Antisense strand to SEQ ID NO: 239990
auauguacaggcaauucau

SEQ ID NO: 239992 - RNA, 19 nt, Artificial Sequence
  Description of Artificial Sequence: Synthetic oligonucleotide
  Sense strand starting at position 524 SEQ ID NO: 3089
gcaggauguaaugguacaa

SEQ ID NO: 239993 - RNA, 19 nt, Artificial Sequence
  Description of Artificial Sequence: Synthetic oligonucleotide
  Antisense strand to SEQ ID NO: 239992
uuguaccauuacauccugc

SEQ ID NO: 239994 - RNA, 19 nt, Artificial Sequence
  Description of Artificial Sequence: Synthetic oligonucleotide
  Sense strand starting at position 693 SEQ ID NO: 3089
gcaccuuaaguaugaaauu

SEQ ID NO: 239995 - RNA, 19 nt, Artificial Sequence
  Description of Artificial Sequence: Synthetic oligonucleotide
  Antisense strand to SEQ ID NO: 239994
aauuucauacuuaaggugc

SEQ ID NO: 239996 - RNA, 19 nt, Artificial Sequence
  Description of Artificial Sequence: Synthetic oligonucleotide
  Sense strand starting at position 747 SEQ ID NO: 3089
ccuaaaguguuccuagggu

SEQ ID NO: 239997 - RNA, 19 nt, Artificial Sequence
  Description of Artificial Sequence: Synthetic oligonucleotide
  Antisense strand to SEQ ID NO: 239996
acccuaggaacacuuuagg

SEQ ID NO: 239998 - RNA, 19 nt, Artificial Sequence
  Description of Artificial Sequence: Synthetic oligonucleotide
  Sense strand starting at position 772 SEQ ID NO: 3089
ggcgguaugcaagaugauu

SEQ ID NO: 239999 - RNA, 19 nt, Artificial Sequence
  Description of Artificial Sequence: Synthetic oligonucleotide
  Antisense strand to SEQ ID NO: 239998
aaucaucuugcauaccgcc

SEQ ID NO: 240000 - RNA, 19 nt, Artificial Sequence
  Description of Artificial Sequence: Synthetic oligonucleotide
  Sense strand starting at position 852 SEQ ID NO: 3089
uuauaaguagcccaugaaa

SEQ ID NO: 240001 - RNA, 19 nt, Artificial Sequence
  Description of Artificial Sequence: Synthetic oligonucleotide
  Antisense strand to SEQ ID NO: 240000
uuucaugggcuacuuauaa

SEQ ID NO: 240002 - RNA, 19 nt, Artificial Sequence
  Description of Artificial Sequence: Synthetic oligonucleotide
  Sense strand starting at position 885 SEQ ID NO: 3089
uauauugcuuaggucgaga

SEQ ID NO: 240003 - RNA, 19 nt, Artificial Sequence
  Description of Artificial Sequence: Synthetic oligonucleotide
  Antisense strand to SEQ ID NO: 240002
ucucgaccuaagcaauaua

SEQ ID NO: 240004 - RNA, 19 nt, Artificial Sequence
  Description of Artificial Sequence: Synthetic oligonucleotide
  Sense strand starting at position 887 SEQ ID NO: 3089
uauugcuuaggucgagacu

SEQ ID NO: 240005 - RNA, 19 nt, Artificial Sequence
  Description of Artificial Sequence: Synthetic oligonucleotide
  Antisense strand to SEQ ID NO: 240004
agucucgaccuaagcaaua

SEQ ID NO: 240006 - RNA, 19 nt, Artificial Sequence
  Description of Artificial Sequence: Synthetic oligonucleotide
  Sense strand starting at position 888 SEQ ID NO: 3089
auugcuuaggucgagacua

SEQ ID NO: 240007 - RNA, 19 nt, Artificial Sequence
  Description of Artificial Sequence: Synthetic oligonucleotide
  Antisense strand to SEQ ID NO: 240006
uagucucgaccuaagcaau

SEQ ID NO: 240008 - RNA, 19 nt, Artificial Sequence
  Description of Artificial Sequence: Synthetic oligonucleotide
  Sense strand starting at position 890 SEQ ID NO: 3089
ugcuuaggucgagacuaau

SEQ ID NO: 240009 - RNA, 19 nt, Artificial Sequence
  Description of Artificial Sequence: Synthetic oligonucleotide
  Antisense strand to SEQ ID NO: 240008
auuagucucgaccuaagca

SEQ ID NO: 240010 - RNA, 19 nt, Artificial Sequence
  Description of Artificial Sequence: Synthetic oligonucleotide
  Sense strand starting at position 961 SEQ ID NO: 3089
uaguacaauugauaagaga

SEQ ID NO: 240011 - RNA, 19 nt, Artificial Sequence
  Description of Artificial Sequence: Synthetic oligonucleotide
  Antisense strand to SEQ ID NO: 240010
ucucuuaucaauuguacua

SEQ ID NO: 240012 - RNA, 19 nt, Artificial Sequence
  Description of Artificial Sequence: Synthetic oligonucleotide
  Sense strand starting at position 1032 SEQ ID NO: 3089
aacaaagagguuuguccau

SEQ ID NO: 240013 - RNA, 19 nt, Artificial Sequence
  Description of Artificial Sequence: Synthetic oligonucleotide
  Antisense strand to SEQ ID NO: 240012
auggacaaaccucuuuguu

SEQ ID NO: 240014 - RNA, 19 nt, Artificial Sequence
  Description of Artificial Sequence: Synthetic oligonucleotide
  Sense strand starting at position 1034 SEQ ID NO: 3089
caaagagguuuguccauac

SEQ ID NO: 240015 - RNA, 19 nt, Artificial Sequence
  Description of Artificial Sequence: Synthetic oligonucleotide
  Antisense strand to SEQ ID NO: 240014
guauggacaaaccucuuug

SEQ ID NO: 240016 - RNA, 19 nt, Artificial Sequence
  Description of Artificial Sequence: Synthetic oligonucleotide
  Sense strand starting at position 1038 SEQ ID NO: 3089
gagguuuguccauacccua

SEQ ID NO: 240017 - RNA, 19 nt, Artificial Sequence
  Description of Artificial Sequence: Synthetic oligonucleotide
  Antisense strand to SEQ ID NO: 240016
uaggguauggacaaaccuc

SEQ ID NO: 240018 - RNA, 19 nt, Artificial Sequence
  Description of Artificial Sequence: Synthetic oligonucleotide
  Sense strand starting at position 1389 SEQ ID NO: 3089
guagguucgccgaguucga

SEQ ID NO: 240019 - RNA, 19 nt, Artificial Sequence
  Description of Artificial Sequence: Synthetic oligonucleotide
  Antisense strand to SEQ ID NO: 240018
ucgaacucggcgaaccuac

SEQ ID NO: 240020 - RNA, 19 nt, Artificial Sequence
  Description of Artificial Sequence: Synthetic oligonucleotide
  Sense strand starting at position 1609 SEQ ID NO: 3089
ccaggaguuuguucccaau

SEQ ID NO: 240021 - RNA, 19 nt, Artificial Sequence
  Description of Artificial Sequence: Synthetic oligonucleotide
  Antisense strand to SEQ ID NO: 240020
auugggaacaaacuccugg

SEQ ID NO: 240022 - RNA, 19 nt, Artificial Sequence
  Description of Artificial Sequence: Synthetic oligonucleotide
  Sense strand starting at position 1611 SEQ ID NO: 3089
aggaguuuguucccaauau

SEQ ID NO: 240023 - RNA, 19 nt, Artificial Sequence
  Description of Artificial Sequence: Synthetic oligonucleotide
  Antisense strand to SEQ ID NO: 240022
auauugggaacaaacuccu

SEQ ID NO: 240024 - RNA, 19 nt, Artificial Sequence
  Description of Artificial Sequence: Synthetic oligonucleotide
  Sense strand starting at position 1615 SEQ ID NO: 3089
guuuguucccaauaucuua

SEQ ID NO: 240025 - RNA, 19 nt, Artificial Sequence
  Description of Artificial Sequence: Synthetic oligonucleotide
  Antisense strand to SEQ ID NO: 240024
uaagauauugggaacaaac

SEQ ID NO: 240026 - RNA, 19 nt, Artificial Sequence
  Description of Artificial Sequence: Synthetic oligonucleotide
  Sense strand starting at position 1628 SEQ ID NO: 3089
aucuuagugcuauggcaaa

SEQ ID NO: 240027 - RNA, 19 nt, Artificial Sequence
  Description of Artificial Sequence: Synthetic oligonucleotide
  Antisense strand to SEQ ID NO: 240026
uuugccauagcacuaagau

SEQ ID NO: 240028 - RNA, 19 nt, Artificial Sequence
  Description of Artificial Sequence: Synthetic oligonucleotide
  Sense strand starting at position 1721 SEQ ID NO: 3089
ccggaagucuaaguucgaa

SEQ ID NO: 240029 - RNA, 19 nt, Artificial Sequence
  Description of Artificial Sequence: Synthetic oligonucleotide
  Antisense strand to SEQ ID NO: 240028
uucgaacuuagacuuccgg

SEQ ID NO: 240030 - RNA, 19 nt, Artificial Sequence
  Description of Artificial Sequence: Synthetic oligonucleotide
  Sense strand starting at position 1724 SEQ ID NO: 3089
gaagucuaaguucgaagau

SEQ ID NO: 240031 - RNA, 19 nt, Artificial Sequence
  Description of Artificial Sequence: Synthetic oligonucleotide
  Antisense strand to SEQ ID NO: 240030
aucuucgaacuuagacuuc

SEQ ID NO: 240032 - RNA, 19 nt, Artificial Sequence
  Description of Artificial Sequence: Synthetic oligonucleotide
  Sense strand starting at position 1762 SEQ ID NO: 3089
cggucuuaugacgaaaucu

SEQ ID NO: 240033 - RNA, 19 nt, Artificial Sequence
  Description of Artificial Sequence: Synthetic oligonucleotide
  Antisense strand to SEQ ID NO: 240032
agauuucgucauaagaccg

SEQ ID NO: 240034 - RNA, 19 nt, Artificial Sequence
  Description of Artificial Sequence: Synthetic oligonucleotide
  Sense strand starting at position 1771 SEQ ID NO: 3089
gacgaaaucuuguuagcug

SEQ ID NO: 240035 - RNA, 19 nt, Artificial Sequence
  Description of Artificial Sequence: Synthetic oligonucleotide
  Antisense strand to SEQ ID NO: 240034
cagcuaacaagauuucguc

SEQ ID NO: 240036 - RNA, 19 nt, Artificial Sequence
  Description of Artificial Sequence: Synthetic oligonucleotide
  Sense strand starting at position 2240 SEQ ID NO: 3089
ggauucugccaguagugaa

SEQ ID NO: 240037 - RNA, 19 nt, Artificial Sequence
  Description of Artificial Sequence: Synthetic oligonucleotide
  Antisense strand to SEQ ID NO: 240036
uucacuacuggcagaaucc

SEQ ID NO: 240038 - RNA, 19 nt, Artificial Sequence
  Description of Artificial Sequence: Synthetic oligonucleotide
  Sense strand starting at position 2261 SEQ ID NO: 3089
cagggaugggcccgagaga

SEQ ID NO: 240039 - RNA, 19 nt, Artificial Sequence
  Description of Artificial Sequence: Synthetic oligonucleotide
  Antisense strand to SEQ ID NO: 240038
ucucucgggcccaucccug

SEQ ID NO: 240040 - RNA, 19 nt, Artificial Sequence
  Description of Artificial Sequence: Synthetic oligonucleotide
  Sense strand starting at position 2272 SEQ ID NO: 3089
ccgagagagcuuggaaaga

SEQ ID NO: 240041 - RNA, 19 nt, Artificial Sequence
  Description of Artificial Sequence: Synthetic oligonucleotide
  Antisense strand to SEQ ID NO: 240040
ucuuuccaagcucucucgg

SEQ ID NO: 240042 - RNA, 19 nt, Artificial Sequence
  Description of Artificial Sequence: Synthetic oligonucleotide
  Sense strand starting at position 2323 SEQ ID NO: 3089
gcaugacuuuggcugggua

SEQ ID NO: 240043 - RNA, 19 nt, Artificial Sequence
  Description of Artificial Sequence: Synthetic oligonucleotide
  Antisense strand to SEQ ID NO: 240042
uacccagccaaagucaugc

SEQ ID NO: 240044 - RNA, 19 nt, Artificial Sequence
  Description of Artificial Sequence: Synthetic oligonucleotide
  Sense strand starting at position 2865 SEQ ID NO: 3089
agguguaagucacugaguu

SEQ ID NO: 240045 - RNA, 19 nt, Artificial Sequence
  Description of Artificial Sequence: Synthetic oligonucleotide
  Antisense strand to SEQ ID NO: 240044
aacucagugacuuacaccu

SEQ ID NO: 240046 - RNA, 19 nt, Artificial Sequence
  Description of Artificial Sequence: Synthetic oligonucleotide
  Sense strand starting at position 2866 SEQ ID NO: 3089
gguguaagucacugaguuu

SEQ ID NO: 240047 - RNA, 19 nt, Artificial Sequence
  Description of Artificial Sequence: Synthetic oligonucleotide
  Antisense strand to SEQ ID NO: 240046
aaacucagugacuuacacc

SEQ ID NO: 240048 - RNA, 19 nt, Artificial Sequence
  Description of Artificial Sequence: Synthetic oligonucleotide
  Sense strand starting at position 2867 SEQ ID NO: 3089
guguaagucacugaguuug

SEQ ID NO: 240049 - RNA, 19 nt, Artificial Sequence
  Description of Artificial Sequence: Synthetic oligonucleotide
  Antisense strand to SEQ ID NO: 240048
caaacucagugacuuacac

SEQ ID NO: 240050 - RNA, 19 nt, Artificial Sequence
  Description of Artificial Sequence: Synthetic oligonucleotide
  Sense strand starting at position 2879 SEQ ID NO: 3089
gaguuuggccauuauucca

SEQ ID NO: 240051 - RNA, 19 nt, Artificial Sequence
  Description of Artificial Sequence: Synthetic oligonucleotide
  Antisense strand to SEQ ID NO: 240050
uggaauaauggccaaacuc

SEQ ID NO: 240052 - RNA, 19 nt, Artificial Sequence
  Description of Artificial Sequence: Synthetic oligonucleotide
  Sense strand starting at position 2928 SEQ ID NO: 3089
ugcuauaacuaguuagcau

SEQ ID NO: 240053 - RNA, 19 nt, Artificial Sequence
  Description of Artificial Sequence: Synthetic oligonucleotide
  Antisense strand to SEQ ID NO: 240052
augcuaacuaguuauagca

SEQ ID NO: 240054 - RNA, 19 nt, Artificial Sequence
  Description of Artificial Sequence: Synthetic oligonucleotide
  Sense strand starting at position 2969 SEQ ID NO: 3089
acuagugccuuguugauau

SEQ ID NO: 240055 - RNA, 19 nt, Artificial Sequence
  Description of Artificial Sequence: Synthetic oligonucleotide
  Antisense strand to SEQ ID NO: 240054
auaucaacaaggcacuagu

SEQ ID NO: 240056 - RNA, 19 nt, Artificial Sequence
  Description of Artificial Sequence: Synthetic oligonucleotide
  Sense strand starting at position 2989 SEQ ID NO: 3089
gaugcauauuuacaugguu

SEQ ID NO: 240057 - RNA, 19 nt, Artificial Sequence
  Description of Artificial Sequence: Synthetic oligonucleotide
  Antisense strand to SEQ ID NO: 240056
aaccauguaaauaugcauc

SEQ ID NO: 240058 - RNA, 19 nt, Artificial Sequence
  Description of Artificial Sequence: Synthetic oligonucleotide
  Sense strand starting at position 3080 SEQ ID NO: 3089
ucaaauguguaacuauaug

SEQ ID NO: 240059 - RNA, 19 nt, Artificial Sequence
  Description of Artificial Sequence: Synthetic oligonucleotide
  Antisense strand to SEQ ID NO: 240058
cauauaguuacacauuuga

SEQ ID NO: 240060 - RNA, 19 nt, Artificial Sequence
  Description of Artificial Sequence: Synthetic oligonucleotide
  Sense strand starting at position 3088 SEQ ID NO: 3089
guaacuauauggguaggau

SEQ ID NO: 240061 - RNA, 19 nt, Artificial Sequence
  Description of Artificial Sequence: Synthetic oligonucleotide
  Antisense strand to SEQ ID NO: 240060
auccuacccauauaguuac

SEQ ID NO: 240062 - RNA, 19 nt, Artificial Sequence
  Description of Artificial Sequence: Synthetic oligonucleotide
  Sense strand starting at position 3101 SEQ ID NO: 3089
uaggauaauuucuagaagu

SEQ ID NO: 240063 - RNA, 19 nt, Artificial Sequence
  Description of Artificial Sequence: Synthetic oligonucleotide
  Antisense strand to SEQ ID NO: 240062
acuucuagaaauuauccua

SEQ ID NO: 240064 - RNA, 19 nt, Artificial Sequence
  Description of Artificial Sequence: Synthetic oligonucleotide
  Sense strand starting at position 3541 SEQ ID NO: 3089
uguugauccucugcuuaau

SEQ ID NO: 240065 - RNA, 19 nt, Artificial Sequence
  Description of Artificial Sequence: Synthetic oligonucleotide
  Antisense strand to SEQ ID NO: 240064
auuaagcagaggaucaaca

SEQ ID NO: 240066 - RNA, 19 nt, Artificial Sequence
  Description of Artificial Sequence: Synthetic oligonucleotide
  Sense strand starting at position 35 SEQ ID NO: 3090
ugacaucuuugucuuggga

SEQ ID NO: 240067 - RNA, 19 nt, Artificial Sequence
  Description of Artificial Sequence: Synthetic oligonucleotide
  Antisense strand to SEQ ID NO: 240066
ucccaagacaaagauguca

SEQ ID NO: 240068 - RNA, 19 nt, Artificial Sequence
  Description of Artificial Sequence: Synthetic oligonucleotide
  Sense strand starting at position 59 SEQ ID NO: 3090
uagaguuaauuccugauga

SEQ ID NO: 240069 - RNA, 19 nt, Artificial Sequence
  Description of Artificial Sequence: Synthetic oligonucleotide
  Antisense strand to SEQ ID NO: 240068
ucaucaggaauuaacucua

SEQ ID NO: 240070 - RNA, 19 nt, Artificial Sequence
  Description of Artificial Sequence: Synthetic oligonucleotide
  Sense strand starting at position 85 SEQ ID NO: 3090
acuucagagucaucgggau

SEQ ID NO: 240071 - RNA, 19 nt, Artificial Sequence
  Description of Artificial Sequence: Synthetic oligonucleotide
  Antisense strand to SEQ ID NO: 240070
aucccgaugacucugaagu

SEQ ID NO: 240072 - RNA, 19 nt, Artificial Sequence
  Description of Artificial Sequence: Synthetic oligonucleotide
  Sense strand starting at position 130 SEQ ID NO: 3090
uccugaagacucugugauu

SEQ ID NO: 240073 - RNA, 19 nt, Artificial Sequence
  Description of Artificial Sequence: Synthetic oligonucleotide
  Antisense strand to SEQ ID NO: 240072
aaucacagagucuucagga

SEQ ID NO: 240074 - RNA, 19 nt, Artificial Sequence
  Description of Artificial Sequence: Synthetic oligonucleotide
  Sense strand starting at position 135 SEQ ID NO: 3090
aagacucugugauugcaaa

SEQ ID NO: 240075 - RNA, 19 nt, Artificial Sequence
  Description of Artificial Sequence: Synthetic oligonucleotide
  Antisense strand to SEQ ID NO: 240074
uuugcaaucacagagucuu

SEQ ID NO: 240076 - RNA, 19 nt, Artificial Sequence
  Description of Artificial Sequence: Synthetic oligonucleotide
  Sense strand starting at position 136 SEQ ID NO: 3090
agacucugugauugcaaau

SEQ ID NO: 240077 - RNA, 19 nt, Artificial Sequence
  Description of Artificial Sequence: Synthetic oligonucleotide
  Antisense strand to SEQ ID NO: 240076
auuugcaaucacagagucu

SEQ ID NO: 240078 - RNA, 19 nt, Artificial Sequence
  Description of Artificial Sequence: Synthetic oligonucleotide
  Sense strand starting at position 304 SEQ ID NO: 3090
aaacuugagcugugaacac

SEQ ID NO: 240079 - RNA, 19 nt, Artificial Sequence
  Description of Artificial Sequence: Synthetic oligonucleotide
  Antisense strand to SEQ ID NO: 240078
guguucacagcucaaguuu

SEQ ID NO: 240080 - RNA, 19 nt, Artificial Sequence
  Description of Artificial Sequence: Synthetic oligonucleotide
  Sense strand starting at position 801 SEQ ID NO: 3090
ucgcaugaauuauuaaaga

SEQ ID NO: 240081 - RNA, 19 nt, Artificial Sequence
  Description of Artificial Sequence: Synthetic oligonucleotide
  Antisense strand to SEQ ID NO: 240080
ucuuuaauaauucaugcga

SEQ ID NO: 240082 - RNA, 19 nt, Artificial Sequence
  Description of Artificial Sequence: Synthetic oligonucleotide
  Sense strand starting at position 1164 SEQ ID NO: 3090
ucucuugcacuugaaguaa

SEQ ID NO: 240083 - RNA, 19 nt, Artificial Sequence
  Description of Artificial Sequence: Synthetic oligonucleotide
  Antisense strand to SEQ ID NO: 240082
uuacuucaagugcaagaga

SEQ ID NO: 240084 - RNA, 19 nt, Artificial Sequence
  Description of Artificial Sequence: Synthetic oligonucleotide
  Sense strand starting at position 1237 SEQ ID NO: 3090
gggugaagauuaucuucuu

SEQ ID NO: 240085 - RNA, 19 nt, Artificial Sequence
  Description of Artificial Sequence: Synthetic oligonucleotide
  Antisense strand to SEQ ID NO: 240084
aagaagauaaucuucaccc

SEQ ID NO: 240086 - RNA, 19 nt, Artificial Sequence
  Description of Artificial Sequence: Synthetic oligonucleotide
  Sense strand starting at position 1238 SEQ ID NO: 3090
ggugaagauuaucuucuua

SEQ ID NO: 240087 - RNA, 19 nt, Artificial Sequence
  Description of Artificial Sequence: Synthetic oligonucleotide
  Antisense strand to SEQ ID NO: 240086
uaagaagauaaucuucacc

SEQ ID NO: 240088 - RNA, 19 nt, Artificial Sequence
  Description of Artificial Sequence: Synthetic oligonucleotide
  Sense strand starting at position 1245 SEQ ID NO: 3090
auuaucuucuuaucggaca

SEQ ID NO: 240089 - RNA, 19 nt, Artificial Sequence
  Description of Artificial Sequence: Synthetic oligonucleotide
  Antisense strand to SEQ ID NO: 240088
uguccgauaagaagauaau

SEQ ID NO: 240090 - RNA, 19 nt, Artificial Sequence
  Description of Artificial Sequence: Synthetic oligonucleotide
  Sense strand starting at position 1250 SEQ ID NO: 3090
cuucuuaucggacaauacu

SEQ ID NO: 240091 - RNA, 19 nt, Artificial Sequence
  Description of Artificial Sequence: Synthetic oligonucleotide
  Antisense strand to SEQ ID NO: 240090
aguauuguccgauaagaag

SEQ ID NO: 240092 - RNA, 19 nt, Artificial Sequence
  Description of Artificial Sequence: Synthetic oligonucleotide
  Sense strand starting at position 1570 SEQ ID NO: 3090
gagcuuagcacagggauga

SEQ ID NO: 240093 - RNA, 19 nt, Artificial Sequence
  Description of Artificial Sequence: Synthetic oligonucleotide
  Antisense strand to SEQ ID NO: 240092
ucaucccugugcuaagcuc

SEQ ID NO: 240094 - RNA, 19 nt, Artificial Sequence
  Description of Artificial Sequence: Synthetic oligonucleotide
  Sense strand starting at position 1620 SEQ ID NO: 3090
gaagaagcugcugaaaguu

SEQ ID NO: 240095 - RNA, 19 nt, Artificial Sequence
  Description of Artificial Sequence: Synthetic oligonucleotide
  Antisense strand to SEQ ID NO: 240094
aacuuucagcagcuucuuc

SEQ ID NO: 240096 - RNA, 19 nt, Artificial Sequence
  Description of Artificial Sequence: Synthetic oligonucleotide
  Sense strand starting at position 1777 SEQ ID NO: 3090
guucgaacuccucaaagga

SEQ ID NO: 240097 - RNA, 19 nt, Artificial Sequence
  Description of Artificial Sequence: Synthetic oligonucleotide
  Antisense strand to SEQ ID NO: 240096
uccuuugaggaguucgaac

SEQ ID NO: 240098 - RNA, 19 nt, Artificial Sequence
  Description of Artificial Sequence: Synthetic oligonucleotide
  Sense strand starting at position 1816 SEQ ID NO: 3090
cgaugaguuccggacugaa

SEQ ID NO: 240099 - RNA, 19 nt, Artificial Sequence
  Description of Artificial Sequence: Synthetic oligonucleotide
  Antisense strand to SEQ ID NO: 240098
uucaguccggaacucaucg

SEQ ID NO: 240100 - RNA, 19 nt, Artificial Sequence
  Description of Artificial Sequence: Synthetic oligonucleotide
  Sense strand starting at position 2013 SEQ ID NO: 3090
cagaccgggacguauaaau

SEQ ID NO: 240101 - RNA, 19 nt, Artificial Sequence
  Description of Artificial Sequence: Synthetic oligonucleotide
  Antisense strand to SEQ ID NO: 240100
auuuauacgucccggucug

SEQ ID NO: 240102 - RNA, 19 nt, Artificial Sequence
  Description of Artificial Sequence: Synthetic oligonucleotide
  Sense strand starting at position 2077 SEQ ID NO: 3090
cucguugaagguuauuaga

SEQ ID NO: 240103 - RNA, 19 nt, Artificial Sequence
  Description of Artificial Sequence: Synthetic oligonucleotide
  Antisense strand to SEQ ID NO: 240102
ucuaauaaccuucaacgag

SEQ ID NO: 240104 - RNA, 19 nt, Artificial Sequence
  Description of Artificial Sequence: Synthetic oligonucleotide
  Sense strand starting at position 2504 SEQ ID NO: 3090
uucugaagguucuuuaaau

SEQ ID NO: 240105 - RNA, 19 nt, Artificial Sequence
  Description of Artificial Sequence: Synthetic oligonucleotide
  Antisense strand to SEQ ID NO: 240104
auuuaaagaaccuucagaa

SEQ ID NO: 240106 - RNA, 19 nt, Artificial Sequence
  Description of Artificial Sequence: Synthetic oligonucleotide
  Sense strand starting at position 2505 SEQ ID NO: 3090
ucugaagguucuuuaaauu

SEQ ID NO: 240107 - RNA, 19 nt, Artificial Sequence
  Description of Artificial Sequence: Synthetic oligonucleotide
  Antisense strand to SEQ ID NO: 240106
aauuuaaagaaccuucaga

SEQ ID NO: 240108 - RNA, 19 nt, Artificial Sequence
  Description of Artificial Sequence: Synthetic oligonucleotide
  Sense strand starting at position 2842 SEQ ID NO: 3090
uugauaugguuacuacaca

SEQ ID NO: 240109 - RNA, 19 nt, Artificial Sequence
  Description of Artificial Sequence: Synthetic oligonucleotide
  Antisense strand to SEQ ID NO: 240108
uguguaguaaccauaucaa

SEQ ID NO: 240110 - RNA, 19 nt, Artificial Sequence
  Description of Artificial Sequence: Synthetic oligonucleotide
  Sense strand starting at position 2950 SEQ ID NO: 3090
aguggauguuauuccuaac

SEQ ID NO: 240111 - RNA, 19 nt, Artificial Sequence
  Description of Artificial Sequence: Synthetic oligonucleotide
  Antisense strand to SEQ ID NO: 240110
guuaggaauaacauccacu

SEQ ID NO: 240112 - RNA, 19 nt, Artificial Sequence
  Description of Artificial Sequence: Synthetic oligonucleotide
  Sense strand starting at position 3147 SEQ ID NO: 3090
uagagacacuagcuguaaa

SEQ ID NO: 240113 - RNA, 19 nt, Artificial Sequence
  Description of Artificial Sequence: Synthetic oligonucleotide
  Antisense strand to SEQ ID NO: 240112
uuuacagcuagugucucua

SEQ ID NO: 240114 - RNA, 19 nt, Artificial Sequence
  Description of Artificial Sequence: Synthetic oligonucleotide
  Sense strand starting at position 3150 SEQ ID NO: 3090
agacacuagcuguaaauau

SEQ ID NO: 240115 - RNA, 19 nt, Artificial Sequence
  Description of Artificial Sequence: Synthetic oligonucleotide
  Antisense strand to SEQ ID NO: 240114
auauuuacagcuagugucu

SEQ ID NO: 240116 - RNA, 19 nt, Artificial Sequence
  Description of Artificial Sequence: Synthetic oligonucleotide
  Sense strand starting at position 3160 SEQ ID NO: 3090
uguaaauaucuuggcaaca

SEQ ID NO: 240117 - RNA, 19 nt, Artificial Sequence
  Description of Artificial Sequence: Synthetic oligonucleotide
  Antisense strand to SEQ ID NO: 240116
uguugccaagauauuuaca

SEQ ID NO: 240118 - RNA, 19 nt, Artificial Sequence
  Description of Artificial Sequence: Synthetic oligonucleotide
  Sense strand starting at position 3161 SEQ ID NO: 3090
guaaauaucuuggcaacag

SEQ ID NO: 240119 - RNA, 19 nt, Artificial Sequence
  Description of Artificial Sequence: Synthetic oligonucleotide
  Antisense strand to SEQ ID NO: 240118
cuguugccaagauauuuac

SEQ ID NO: 240120 - RNA, 19 nt, Artificial Sequence
  Description of Artificial Sequence: Synthetic oligonucleotide
  Sense strand starting at position 3185 SEQ ID NO: 3090
acugaugcaucauuguaaa

SEQ ID NO: 240121 - RNA, 19 nt, Artificial Sequence
  Description of Artificial Sequence: Synthetic oligonucleotide
  Antisense strand to SEQ ID NO: 240120
uuuacaaugaugcaucagu

SEQ ID NO: 240122 - RNA, 19 nt, Artificial Sequence
  Description of Artificial Sequence: Synthetic oligonucleotide
  Sense strand starting at position 3216 SEQ ID NO: 3090
gccuaauaauuugugcuga

SEQ ID NO: 240123 - RNA, 19 nt, Artificial Sequence
  Description of Artificial Sequence: Synthetic oligonucleotide
  Antisense strand to SEQ ID NO: 240122
ucagcacaaauuauuaggc

SEQ ID NO: 240124 - RNA, 19 nt, Artificial Sequence
  Description of Artificial Sequence: Synthetic oligonucleotide
  Sense strand starting at position 3263 SEQ ID NO: 3090
aauugaaagugccuuugga

SEQ ID NO: 240125 - RNA, 19 nt, Artificial Sequence
  Description of Artificial Sequence: Synthetic oligonucleotide
  Antisense strand to SEQ ID NO: 240124
uccaaaggcacuuucaauu

SEQ ID NO: 240126 - RNA, 19 nt, Artificial Sequence
  Description of Artificial Sequence: Synthetic oligonucleotide
  Sense strand starting at position 3375 SEQ ID NO: 3090
uaugacaauccuggugaga

SEQ ID NO: 240127 - RNA, 19 nt, Artificial Sequence
  Description of Artificial Sequence: Synthetic oligonucleotide
  Antisense strand to SEQ ID NO: 240126
ucucaccaggauugucaua

SEQ ID NO: 240128 - RNA, 19 nt, Artificial Sequence
  Description of Artificial Sequence: Synthetic oligonucleotide
  Sense strand starting at position 3442 SEQ ID NO: 3090
aggacugccaagugagaaa

SEQ ID NO: 240129 - RNA, 19 nt, Artificial Sequence
  Description of Artificial Sequence: Synthetic oligonucleotide
  Antisense strand to SEQ ID NO: 240128
uuucucacuuggcaguccu

SEQ ID NO: 240130 - RNA, 19 nt, Artificial Sequence
  Description of Artificial Sequence: Synthetic oligonucleotide
  Sense strand starting at position 3514 SEQ ID NO: 3090
agaguccuaccuggguaua

SEQ ID NO: 240131 - RNA, 19 nt, Artificial Sequence
  Description of Artificial Sequence: Synthetic oligonucleotide
  Antisense strand to SEQ ID NO: 240130
uauacccagguaggacucu

SEQ ID NO: 240132 - RNA, 19 nt, Artificial Sequence
  Description of Artificial Sequence: Synthetic oligonucleotide
  Sense strand starting at position 3515 SEQ ID NO: 3090
gaguccuaccuggguauaa

SEQ ID NO: 240133 - RNA, 19 nt, Artificial Sequence
  Description of Artificial Sequence: Synthetic oligonucleotide
  Antisense strand to SEQ ID NO: 240132
uuauacccagguaggacuc

SEQ ID NO: 240134 - RNA, 19 nt, Artificial Sequence
  Description of Artificial Sequence: Synthetic oligonucleotide
  Sense strand starting at position 3516 SEQ ID NO: 3090
aguccuaccuggguauaaa

SEQ ID NO: 240135 - RNA, 19 nt, Artificial Sequence
  Description of Artificial Sequence: Synthetic oligonucleotide
  Antisense strand to SEQ ID NO: 240134
uuuauacccagguaggacu

SEQ ID NO: 240136 - RNA, 19 nt, Artificial Sequence
  Description of Artificial Sequence: Synthetic oligonucleotide
  Sense strand starting at position 3550 SEQ ID NO: 3090
aggguagaguguguuaaag

SEQ ID NO: 240137 - RNA, 19 nt, Artificial Sequence
  Description of Artificial Sequence: Synthetic oligonucleotide
  Antisense strand to SEQ ID NO: 240136
cuuuaacacacucuacccu

SEQ ID NO: 240138 - RNA, 19 nt, Artificial Sequence
  Description of Artificial Sequence: Synthetic oligonucleotide
  Sense strand starting at position 3701 SEQ ID NO: 3090
aagggaugguuaccuguaa

SEQ ID NO: 240139 - RNA, 19 nt, Artificial Sequence
  Description of Artificial Sequence: Synthetic oligonucleotide
  Antisense strand to SEQ ID NO: 240138
uuacagguaaccaucccuu

SEQ ID NO: 240140 - RNA, 19 nt, Artificial Sequence
  Description of Artificial Sequence: Synthetic oligonucleotide
  Sense strand starting at position 3751 SEQ ID NO: 3090
agacuaucuugucuuauug

SEQ ID NO: 240141 - RNA, 19 nt, Artificial Sequence
  Description of Artificial Sequence: Synthetic oligonucleotide
  Antisense strand to SEQ ID NO: 240140
caauaagacaagauagucu

SEQ ID NO: 240142 - RNA, 19 nt, Artificial Sequence
  Description of Artificial Sequence: Synthetic oligonucleotide
  Sense strand starting at position 3769 SEQ ID NO: 3090
gcuggcuaucuggaauaug

SEQ ID NO: 240143 - RNA, 19 nt, Artificial Sequence
  Description of Artificial Sequence: Synthetic oligonucleotide
  Antisense strand to SEQ ID NO: 240142
cauauuccagauagccagc

SEQ ID NO: 240144 - RNA, 19 nt, Artificial Sequence
  Description of Artificial Sequence: Synthetic oligonucleotide
  Sense strand starting at position 3968 SEQ ID NO: 3090
guugcaacauaucuugaaa

SEQ ID NO: 240145 - RNA, 19 nt, Artificial Sequence
  Description of Artificial Sequence: Synthetic oligonucleotide
  Antisense strand to SEQ ID NO: 240144
uuucaagauauguugcaac

SEQ ID NO: 240146 - RNA, 19 nt, Artificial Sequence
  Description of Artificial Sequence: Synthetic oligonucleotide
  Sense strand starting at position 232 SEQ ID NO: 3091
cugcuaguccuagaaauca

SEQ ID NO: 240147 - RNA, 19 nt, Artificial Sequence
  Description of Artificial Sequence: Synthetic oligonucleotide
  Antisense strand to SEQ ID NO: 240146
ugauuucuaggacuagcag

SEQ ID NO: 240148 - RNA, 19 nt, Artificial Sequence
  Description of Artificial Sequence: Synthetic oligonucleotide
  Sense strand starting at position 257 SEQ ID NO: 3091
acuugaacauucuccguaa

SEQ ID NO: 240149 - RNA, 19 nt, Artificial Sequence
  Description of Artificial Sequence: Synthetic oligonucleotide
  Antisense strand to SEQ ID NO: 240148
uuacggagaauguucaagu

SEQ ID NO: 240150 - RNA, 19 nt, Artificial Sequence
  Description of Artificial Sequence: Synthetic oligonucleotide
  Sense strand starting at position 259 SEQ ID NO: 3091
uugaacauucuccguaacu

SEQ ID NO: 240151 - RNA, 19 nt, Artificial Sequence
  Description of Artificial Sequence: Synthetic oligonucleotide
  Antisense strand to SEQ ID NO: 240150
aguuacggagaauguucaa

SEQ ID NO: 240152 - RNA, 19 nt, Artificial Sequence
  Description of Artificial Sequence: Synthetic oligonucleotide
  Sense strand starting at position 260 SEQ ID NO: 3091
ugaacauucuccguaacuu

SEQ ID NO: 240153 - RNA, 19 nt, Artificial Sequence
  Description of Artificial Sequence: Synthetic oligonucleotide
  Antisense strand to SEQ ID NO: 240152
aaguuacggagaauguuca

SEQ ID NO: 240154 - RNA, 19 nt, Artificial Sequence
  Description of Artificial Sequence: Synthetic oligonucleotide
  Sense strand starting at position 367 SEQ ID NO: 3091
gucaaacuugcagauugaa

SEQ ID NO: 240155 - RNA, 19 nt, Artificial Sequence
  Description of Artificial Sequence: Synthetic oligonucleotide
  Antisense strand to SEQ ID NO: 240154
uucaaucugcaaguuugac

SEQ ID NO: 240156 - RNA, 19 nt, Artificial Sequence
  Description of Artificial Sequence: Synthetic oligonucleotide
  Sense strand starting at position 375 SEQ ID NO: 3091
ugcagauugaaauagugca

SEQ ID NO: 240157 - RNA, 19 nt, Artificial Sequence
  Description of Artificial Sequence: Synthetic oligonucleotide
  Antisense strand to SEQ ID NO: 240156
ugcacuauuucaaucugca

SEQ ID NO: 240158 - RNA, 19 nt, Artificial Sequence
  Description of Artificial Sequence: Synthetic oligonucleotide
  Sense strand starting at position 380 SEQ ID NO: 3091
auugaaauagugcauguaa

SEQ ID NO: 240159 - RNA, 19 nt, Artificial Sequence
  Description of Artificial Sequence: Synthetic oligonucleotide
  Antisense strand to SEQ ID NO: 240158
uuacaugcacuauuucaau

SEQ ID NO: 240160 - RNA, 19 nt, Artificial Sequence
  Description of Artificial Sequence: Synthetic oligonucleotide
  Sense strand starting at position 1284 SEQ ID NO: 3091
ccuuuagugcuggacgacu

SEQ ID NO: 240161 - RNA, 19 nt, Artificial Sequence
  Description of Artificial Sequence: Synthetic oligonucleotide
  Antisense strand to SEQ ID NO: 240160
agucguccagcacuaaagg

SEQ ID NO: 240162 - RNA, 19 nt, Artificial Sequence
  Description of Artificial Sequence: Synthetic oligonucleotide
  Sense strand starting at position 1295 SEQ ID NO: 3091
ggacgacucccugagcauu

SEQ ID NO: 240163 - RNA, 19 nt, Artificial Sequence
  Description of Artificial Sequence: Synthetic oligonucleotide
  Antisense strand to SEQ ID NO: 240162
aaugcucagggagucgucc

SEQ ID NO: 240164 - RNA, 19 nt, Artificial Sequence
  Description of Artificial Sequence: Synthetic oligonucleotide
  Sense strand starting at position 1309 SEQ ID NO: 3091
gcauuuagcuguccuaauu

SEQ ID NO: 240165 - RNA, 19 nt, Artificial Sequence
  Description of Artificial Sequence: Synthetic oligonucleotide
  Antisense strand to SEQ ID NO: 240164
aauuaggacagcuaaaugc

SEQ ID NO: 240166 - RNA, 19 nt, Artificial Sequence
  Description of Artificial Sequence: Synthetic oligonucleotide
  Sense strand starting at position 1488 SEQ ID NO: 3091
agauaaaucuccguaccuc

SEQ ID NO: 240167 - RNA, 19 nt, Artificial Sequence
  Description of Artificial Sequence: Synthetic oligonucleotide
  Antisense strand to SEQ ID NO: 240166
gagguacggagauuuaucu

SEQ ID NO: 240168 - RNA, 19 nt, Artificial Sequence
  Description of Artificial Sequence: Synthetic oligonucleotide
  Sense strand starting at position 1497 SEQ ID NO: 3091
uccguaccucacugagaga

SEQ ID NO: 240169 - RNA, 19 nt, Artificial Sequence
  Description of Artificial Sequence: Synthetic oligonucleotide
  Antisense strand to SEQ ID NO: 240168
ucucucagugagguacgga

SEQ ID NO: 240170 - RNA, 19 nt, Artificial Sequence
  Description of Artificial Sequence: Synthetic oligonucleotide
  Sense strand starting at position 2267 SEQ ID NO: 3091
agccuuuaucaagaaagca

SEQ ID NO: 240171 - RNA, 19 nt, Artificial Sequence
  Description of Artificial Sequence: Synthetic oligonucleotide
  Antisense strand to SEQ ID NO: 240170
ugcuuucuugauaaaggcu

SEQ ID NO: 240172 - RNA, 19 nt, Artificial Sequence
  Description of Artificial Sequence: Synthetic oligonucleotide
  Sense strand starting at position 2336 SEQ ID NO: 3091
auugguuuguccucauuug

SEQ ID NO: 240173 - RNA, 19 nt, Artificial Sequence
  Description of Artificial Sequence: Synthetic oligonucleotide
  Antisense strand to SEQ ID NO: 240172
caaaugaggacaaaccaau

SEQ ID NO: 240174 - RNA, 19 nt, Artificial Sequence
  Description of Artificial Sequence: Synthetic oligonucleotide
  Sense strand starting at position 2337 SEQ ID NO: 3091
uugguuuguccucauuugu

SEQ ID NO: 240175 - RNA, 19 nt, Artificial Sequence
  Description of Artificial Sequence: Synthetic oligonucleotide
  Antisense strand to SEQ ID NO: 240174
acaaaugaggacaaaccaa

SEQ ID NO: 240176 - RNA, 19 nt, Artificial Sequence
  Description of Artificial Sequence: Synthetic oligonucleotide
  Sense strand starting at position 2366 SEQ ID NO: 3091
ggccuuaaucucuggacuu

SEQ ID NO: 240177 - RNA, 19 nt, Artificial Sequence
  Description of Artificial Sequence: Synthetic oligonucleotide
  Antisense strand to SEQ ID NO: 240176
aaguccagagauuaaggcc

SEQ ID NO: 240178 - RNA, 19 nt, Artificial Sequence
  Description of Artificial Sequence: Synthetic oligonucleotide
  Sense strand starting at position 2379 SEQ ID NO: 3091
ggacuuuguuaugccuuaa

SEQ ID NO: 240179 - RNA, 19 nt, Artificial Sequence
  Description of Artificial Sequence: Synthetic oligonucleotide
  Antisense strand to SEQ ID NO: 240178
uuaaggcauaacaaagucc

SEQ ID NO: 240180 - RNA, 19 nt, Artificial Sequence
  Description of Artificial Sequence: Synthetic oligonucleotide
  Sense strand starting at position 2464 SEQ ID NO: 3091
ucagauguuuaccucggaa

SEQ ID NO: 240181 - RNA, 19 nt, Artificial Sequence
  Description of Artificial Sequence: Synthetic oligonucleotide
  Antisense strand to SEQ ID NO: 240180
uuccgagguaaacaucuga

SEQ ID NO: 240182 - RNA, 19 nt, Artificial Sequence
  Description of Artificial Sequence: Synthetic oligonucleotide
  Sense strand starting at position 2466 SEQ ID NO: 3091
agauguuuaccucggaauu

SEQ ID NO: 240183 - RNA, 19 nt, Artificial Sequence
  Description of Artificial Sequence: Synthetic oligonucleotide
  Antisense strand to SEQ ID NO: 240182
aauuccgagguaaacaucu

SEQ ID NO: 240184 - RNA, 19 nt, Artificial Sequence
  Description of Artificial Sequence: Synthetic oligonucleotide
  Sense strand starting at position 2467 SEQ ID NO: 3091
gauguuuaccucggaauua

SEQ ID NO: 240185 - RNA, 19 nt, Artificial Sequence
  Description of Artificial Sequence: Synthetic oligonucleotide
  Antisense strand to SEQ ID NO: 240184
uaauuccgagguaaacauc

SEQ ID NO: 240186 - RNA, 19 nt, Artificial Sequence
  Description of Artificial Sequence: Synthetic oligonucleotide
  Sense strand starting at position 2494 SEQ ID NO: 3091
uguauaggauuugagagaa

SEQ ID NO: 240187 - RNA, 19 nt, Artificial Sequence
  Description of Artificial Sequence: Synthetic oligonucleotide
  Antisense strand to SEQ ID NO: 240186
uucucucaaauccuauaca

SEQ ID NO: 240188 - RNA, 19 nt, Artificial Sequence
  Description of Artificial Sequence: Synthetic oligonucleotide
  Sense strand starting at position 2529 SEQ ID NO: 3091
cuuacugaccuuugguaaa

SEQ ID NO: 240189 - RNA, 19 nt, Artificial Sequence
  Description of Artificial Sequence: Synthetic oligonucleotide
  Antisense strand to SEQ ID NO: 240188
uuuaccaaaggucaguaag

SEQ ID NO: 240190 - RNA, 19 nt, Artificial Sequence
  Description of Artificial Sequence: Synthetic oligonucleotide
  Sense strand starting at position 2531 SEQ ID NO: 3091
uacugaccuuugguaaagu

SEQ ID NO: 240191 - RNA, 19 nt, Artificial Sequence
  Description of Artificial Sequence: Synthetic oligonucleotide
  Antisense strand to SEQ ID NO: 240190
acuuuaccaaaggucagua

SEQ ID NO: 240192 - RNA, 19 nt, Artificial Sequence
  Description of Artificial Sequence: Synthetic oligonucleotide
  Sense strand starting at position 2545 SEQ ID NO: 3091
aaaguucugcgugggaaag

SEQ ID NO: 240193 - RNA, 19 nt, Artificial Sequence
  Description of Artificial Sequence: Synthetic oligonucleotide
  Antisense strand to SEQ ID NO: 240192
cuuucccacgcagaacuuu

SEQ ID NO: 240194 - RNA, 19 nt, Artificial Sequence
  Description of Artificial Sequence: Synthetic oligonucleotide
  Sense strand starting at position 2571 SEQ ID NO: 3091
gaaggaguauccuuauaua

SEQ ID NO: 240195 - RNA, 19 nt, Artificial Sequence
  Description of Artificial Sequence: Synthetic oligonucleotide
  Antisense strand to SEQ ID NO: 240194
uauauaaggauacuccuuc

SEQ ID NO: 240196 - RNA, 19 nt, Artificial Sequence
  Description of Artificial Sequence: Synthetic oligonucleotide
  Sense strand starting at position 2824 SEQ ID NO: 3091
ggaauucuauaaucuagcu

SEQ ID NO: 240197 - RNA, 19 nt, Artificial Sequence
  Description of Artificial Sequence: Synthetic oligonucleotide
  Antisense strand to SEQ ID NO: 240196
agcuagauuauagaauucc

SEQ ID NO: 240198 - RNA, 19 nt, Artificial Sequence
  Description of Artificial Sequence: Synthetic oligonucleotide
  Sense strand starting at position 2882 SEQ ID NO: 3091
uugugauaggcgcagagaa

SEQ ID NO: 240199 - RNA, 19 nt, Artificial Sequence
  Description of Artificial Sequence: Synthetic oligonucleotide
  Antisense strand to SEQ ID NO: 240198
uucucugcgccuaucacaa

SEQ ID NO: 240200 - RNA, 19 nt, Artificial Sequence
  Description of Artificial Sequence: Synthetic oligonucleotide
  Sense strand starting at position 3064 SEQ ID NO: 3091
uggaaacuauguuuacaga

SEQ ID NO: 240201 - RNA, 19 nt, Artificial Sequence
  Description of Artificial Sequence: Synthetic oligonucleotide
  Antisense strand to SEQ ID NO: 240200
ucuguaaacauaguuucca

SEQ ID NO: 240202 - RNA, 19 nt, Artificial Sequence
  Description of Artificial Sequence: Synthetic oligonucleotide
  Sense strand starting at position 3136 SEQ ID NO: 3091
agggcucuuaagugacuuu

SEQ ID NO: 240203 - RNA, 19 nt, Artificial Sequence
  Description of Artificial Sequence: Synthetic oligonucleotide
  Antisense strand to SEQ ID NO: 240202
aaagucacuuaagagcccu

SEQ ID NO: 240204 - RNA, 19 nt, Artificial Sequence
  Description of Artificial Sequence: Synthetic oligonucleotide
  Sense strand starting at position 3383 SEQ ID NO: 3091
uuuagaugaucacuuggua

SEQ ID NO: 240205 - RNA, 19 nt, Artificial Sequence
  Description of Artificial Sequence: Synthetic oligonucleotide
  Antisense strand to SEQ ID NO: 240204
uaccaagugaucaucuaaa

SEQ ID NO: 240206 - RNA, 19 nt, Artificial Sequence
  Description of Artificial Sequence: Synthetic oligonucleotide
  Sense strand starting at position 3386 SEQ ID NO: 3091
agaugaucacuugguauca

SEQ ID NO: 240207 - RNA, 19 nt, Artificial Sequence
  Description of Artificial Sequence: Synthetic oligonucleotide
  Antisense strand to SEQ ID NO: 240206
ugauaccaagugaucaucu

SEQ ID NO: 240208 - RNA, 19 nt, Artificial Sequence
  Description of Artificial Sequence: Synthetic oligonucleotide
  Sense strand starting at position 3387 SEQ ID NO: 3091
gaugaucacuugguaucaa

SEQ ID NO: 240209 - RNA, 19 nt, Artificial Sequence
  Description of Artificial Sequence: Synthetic oligonucleotide
  Antisense strand to SEQ ID NO: 240208
uugauaccaagugaucauc

SEQ ID NO: 240210 - RNA, 19 nt, Artificial Sequence
  Description of Artificial Sequence: Synthetic oligonucleotide
  Sense strand starting at position 3423 SEQ ID NO: 3091
aacaaaugguaguccagua

SEQ ID NO: 240211 - RNA, 19 nt, Artificial Sequence
  Description of Artificial Sequence: Synthetic oligonucleotide
  Antisense strand to SEQ ID NO: 240210
uacuggacuaccauuuguu

SEQ ID NO: 240212 - RNA, 19 nt, Artificial Sequence
  Description of Artificial Sequence: Synthetic oligonucleotide
  Sense strand starting at position 3435 SEQ ID NO: 3091
uccaguauuuaggaauaag

SEQ ID NO: 240213 - RNA, 19 nt, Artificial Sequence
  Description of Artificial Sequence: Synthetic oligonucleotide
  Antisense strand to SEQ ID NO: 240212
cuuauuccuaaauacugga

SEQ ID NO: 240214 - RNA, 19 nt, Artificial Sequence
  Description of Artificial Sequence: Synthetic oligonucleotide
  Sense strand starting at position 3470 SEQ ID NO: 3091
acgaauccaugcuuacauu

SEQ ID NO: 240215 - RNA, 19 nt, Artificial Sequence
  Description of Artificial Sequence: Synthetic oligonucleotide
  Antisense strand to SEQ ID NO: 240214
aauguaagcauggauucgu

SEQ ID NO: 240216 - RNA, 19 nt, Artificial Sequence
  Description of Artificial Sequence: Synthetic oligonucleotide
  Sense strand starting at position 3471 SEQ ID NO: 3091
cgaauccaugcuuacauua

SEQ ID NO: 240217 - RNA, 19 nt, Artificial Sequence
  Description of Artificial Sequence: Synthetic oligonucleotide
  Antisense strand to SEQ ID NO: 240216
uaauguaagcauggauucg

SEQ ID NO: 240218 - RNA, 19 nt, Artificial Sequence
  Description of Artificial Sequence: Synthetic oligonucleotide
  Sense strand starting at position 3724 SEQ ID NO: 3091
gcauguacuuauuucucau

SEQ ID NO: 240219 - RNA, 19 nt, Artificial Sequence
  Description of Artificial Sequence: Synthetic oligonucleotide
  Antisense strand to SEQ ID NO: 240218
augagaaauaaguacaugc

SEQ ID NO: 240220 - RNA, 19 nt, Artificial Sequence
  Description of Artificial Sequence: Synthetic oligonucleotide
  Sense strand starting at position 3840 SEQ ID NO: 3091
ccauguucucagggaugag

SEQ ID NO: 240221 - RNA, 19 nt, Artificial Sequence
  Description of Artificial Sequence: Synthetic oligonucleotide
  Antisense strand to SEQ ID NO: 240220
cucaucccugagaacaugg

SEQ ID NO: 240222 - RNA, 19 nt, Artificial Sequence
  Description of Artificial Sequence: Synthetic oligonucleotide
  Sense strand starting at position 3928 SEQ ID NO: 3091
aucauagccucuuuagaga

SEQ ID NO: 240223 - RNA, 19 nt, Artificial Sequence
  Description of Artificial Sequence: Synthetic oligonucleotide
  Antisense strand to SEQ ID NO: 240222
ucucuaaagaggcuaugau

SEQ ID NO: 240224 - RNA, 19 nt, Artificial Sequence
  Description of Artificial Sequence: Synthetic oligonucleotide
  Sense strand starting at position 3942 SEQ ID NO: 3091
agagaucugucuuuccuau

SEQ ID NO: 240225 - RNA, 19 nt, Artificial Sequence
  Description of Artificial Sequence: Synthetic oligonucleotide
  Antisense strand to SEQ ID NO: 240224
auaggaaagacagaucucu

SEQ ID NO: 240226 - RNA, 19 nt, Artificial Sequence
  Description of Artificial Sequence: Synthetic oligonucleotide
  Sense strand starting at position 10 SEQ ID NO: 3092
cugaguuagcagcaagaaa

SEQ ID NO: 240227 - RNA, 19 nt, Artificial Sequence
  Description of Artificial Sequence: Synthetic oligonucleotide
  Antisense strand to SEQ ID NO: 240226
uuucuugcugcuaacucag

SEQ ID NO: 240228 - RNA, 19 nt, Artificial Sequence
  Description of Artificial Sequence: Synthetic oligonucleotide
  Sense strand starting at position 89 SEQ ID NO: 3092
cgaagucuaauguggaaug

SEQ ID NO: 240229 - RNA, 19 nt, Artificial Sequence
  Description of Artificial Sequence: Synthetic oligonucleotide
  Antisense strand to SEQ ID NO: 240228
cauuccacauuagacuucg

SEQ ID NO: 240230 - RNA, 19 nt, Artificial Sequence
  Description of Artificial Sequence: Synthetic oligonucleotide
  Sense strand starting at position 272 SEQ ID NO: 3092
ccuccucagugacugaauu

SEQ ID NO: 240231 - RNA, 19 nt, Artificial Sequence
  Description of Artificial Sequence: Synthetic oligonucleotide
  Antisense strand to SEQ ID NO: 240230
aauucagucacugaggagg

SEQ ID NO: 240232 - RNA, 19 nt, Artificial Sequence
  Description of Artificial Sequence: Synthetic oligonucleotide
  Sense strand starting at position 821 SEQ ID NO: 3092
aagguaucauugucacaug

SEQ ID NO: 240233 - RNA, 19 nt, Artificial Sequence
  Description of Artificial Sequence: Synthetic oligonucleotide
  Antisense strand to SEQ ID NO: 240232
caugugacaaugauaccuu

SEQ ID NO: 240234 - RNA, 19 nt, Artificial Sequence
  Description of Artificial Sequence: Synthetic oligonucleotide
  Sense strand starting at position 847 SEQ ID NO: 3092
caggguaucuccucucuga

SEQ ID NO: 240235 - RNA, 19 nt, Artificial Sequence
  Description of Artificial Sequence: Synthetic oligonucleotide
  Antisense strand to SEQ ID NO: 240234
ucagagaggagauacccug

SEQ ID NO: 240236 - RNA, 19 nt, Artificial Sequence
  Description of Artificial Sequence: Synthetic oligonucleotide
  Sense strand starting at position 851 SEQ ID NO: 3092
guaucuccucucugacaga

SEQ ID NO: 240237 - RNA, 19 nt, Artificial Sequence
  Description of Artificial Sequence: Synthetic oligonucleotide
  Antisense strand to SEQ ID NO: 240236
ucugucagagaggagauac

SEQ ID NO: 240238 - RNA, 19 nt, Artificial Sequence
  Description of Artificial Sequence: Synthetic oligonucleotide
  Sense strand starting at position 898 SEQ ID NO: 3092
ggguaagagggauguacau

SEQ ID NO: 240239 - RNA, 19 nt, Artificial Sequence
  Description of Artificial Sequence: Synthetic oligonucleotide
  Antisense strand to SEQ ID NO: 240238
auguacaucccucuuaccc

SEQ ID NO: 240240 - RNA, 19 nt, Artificial Sequence
  Description of Artificial Sequence: Synthetic oligonucleotide
  Sense strand starting at position 1185 SEQ ID NO: 3092
uggaguugccuggaguuca

SEQ ID NO: 240241 - RNA, 19 nt, Artificial Sequence
  Description of Artificial Sequence: Synthetic oligonucleotide
  Antisense strand to SEQ ID NO: 240240
ugaacuccaggcaacucca

SEQ ID NO: 240242 - RNA, 19 nt, Artificial Sequence
  Description of Artificial Sequence: Synthetic oligonucleotide
  Sense strand starting at position 1242 SEQ ID NO: 3092
acagaagcaacuugugaug

SEQ ID NO: 240243 - RNA, 19 nt, Artificial Sequence
  Description of Artificial Sequence: Synthetic oligonucleotide
  Antisense strand to SEQ ID NO: 240242
caucacaaguugcuucugu

SEQ ID NO: 240244 - RNA, 19 nt, Artificial Sequence
  Description of Artificial Sequence: Synthetic oligonucleotide
  Sense strand starting at position 1271 SEQ ID NO: 3092
ccuaacuguucuuuaggga

SEQ ID NO: 240245 - RNA, 19 nt, Artificial Sequence
  Description of Artificial Sequence: Synthetic oligonucleotide
  Antisense strand to SEQ ID NO: 240244
ucccuaaagaacaguuagg

SEQ ID NO: 240246 - RNA, 19 nt, Artificial Sequence
  Description of Artificial Sequence: Synthetic oligonucleotide
  Sense strand starting at position 2013 SEQ ID NO: 3092
agagguugugguugagaau

SEQ ID NO: 240247 - RNA, 19 nt, Artificial Sequence
  Description of Artificial Sequence: Synthetic oligonucleotide
  Antisense strand to SEQ ID NO: 240246
auucucaaccacaaccucu

SEQ ID NO: 240248 - RNA, 19 nt, Artificial Sequence
  Description of Artificial Sequence: Synthetic oligonucleotide
  Sense strand starting at position 2014 SEQ ID NO: 3092
gagguugugguugagaauu

SEQ ID NO: 240249 - RNA, 19 nt, Artificial Sequence
  Description of Artificial Sequence: Synthetic oligonucleotide
  Antisense strand to SEQ ID NO: 240248
aauucucaaccacaaccuc

SEQ ID NO: 240250 - RNA, 19 nt, Artificial Sequence
  Description of Artificial Sequence: Synthetic oligonucleotide
  Sense strand starting at position 2109 SEQ ID NO: 3092
agggcagaccuguguugaa

SEQ ID NO: 240251 - RNA, 19 nt, Artificial Sequence
  Description of Artificial Sequence: Synthetic oligonucleotide
  Antisense strand to SEQ ID NO: 240250
uucaacacaggucugcccu

SEQ ID NO: 240252 - RNA, 19 nt, Artificial Sequence
  Description of Artificial Sequence: Synthetic oligonucleotide
  Sense strand starting at position 2113 SEQ ID NO: 3092
cagaccuguguugaaaucu

SEQ ID NO: 240253 - RNA, 19 nt, Artificial Sequence
  Description of Artificial Sequence: Synthetic oligonucleotide
  Antisense strand to SEQ ID NO: 240252
agauuucaacacaggucug

SEQ ID NO: 240254 - RNA, 19 nt, Artificial Sequence
  Description of Artificial Sequence: Synthetic oligonucleotide
  Sense strand starting at position 2194 SEQ ID NO: 3092
uggagagagucccugucuu

SEQ ID NO: 240255 - RNA, 19 nt, Artificial Sequence
  Description of Artificial Sequence: Synthetic oligonucleotide
  Antisense strand to SEQ ID NO: 240254
aagacagggacucucucca

SEQ ID NO: 240256 - RNA, 19 nt, Artificial Sequence
  Description of Artificial Sequence: Synthetic oligonucleotide
  Sense strand starting at position 2225 SEQ ID NO: 3092
gggcccuguacucauggau

SEQ ID NO: 240257 - RNA, 19 nt, Artificial Sequence
  Description of Artificial Sequence: Synthetic oligonucleotide
  Antisense strand to SEQ ID NO: 240256
auccaugaguacagggccc

SEQ ID NO: 240258 - RNA, 19 nt, Artificial Sequence
  Description of Artificial Sequence: Synthetic oligonucleotide
  Sense strand starting at position 2243 SEQ ID NO: 3092
ugggcuguugagcaaagau

SEQ ID NO: 240259 - RNA, 19 nt, Artificial Sequence
  Description of Artificial Sequence: Synthetic oligonucleotide
  Antisense strand to SEQ ID NO: 240258
aucuuugcucaacagccca

SEQ ID NO: 240260 - RNA, 19 nt, Artificial Sequence
  Description of Artificial Sequence: Synthetic oligonucleotide
  Sense strand starting at position 2284 SEQ ID NO: 3092
cuggacaagagucgugauu

SEQ ID NO: 240261 - RNA, 19 nt, Artificial Sequence
  Description of Artificial Sequence: Synthetic oligonucleotide
  Antisense strand to SEQ ID NO: 240260
aaucacgacucuuguccag

SEQ ID NO: 240262 - RNA, 19 nt, Artificial Sequence
  Description of Artificial Sequence: Synthetic oligonucleotide
  Sense strand starting at position 2293 SEQ ID NO: 3092
agucgugauuuguucccau

SEQ ID NO: 240263 - RNA, 19 nt, Artificial Sequence
  Description of Artificial Sequence: Synthetic oligonucleotide
  Antisense strand to SEQ ID NO: 240262
augggaacaaaucacgacu

SEQ ID NO: 240264 - RNA, 19 nt, Artificial Sequence
  Description of Artificial Sequence: Synthetic oligonucleotide
  Sense strand starting at position 2398 SEQ ID NO: 3092
auaccuuuguugguuaaau

SEQ ID NO: 240265 - RNA, 19 nt, Artificial Sequence
  Description of Artificial Sequence: Synthetic oligonucleotide
  Antisense strand to SEQ ID NO: 240264
auuuaaccaacaaagguau

SEQ ID NO: 240266 - RNA, 19 nt, Artificial Sequence
  Description of Artificial Sequence: Synthetic oligonucleotide
  Sense strand starting at position 2399 SEQ ID NO: 3092
uaccuuuguugguuaaaug

SEQ ID NO: 240267 - RNA, 19 nt, Artificial Sequence
  Description of Artificial Sequence: Synthetic oligonucleotide
  Antisense strand to SEQ ID NO: 240266
cauuuaaccaacaaaggua

SEQ ID NO: 240268 - RNA, 19 nt, Artificial Sequence
  Description of Artificial Sequence: Synthetic oligonucleotide
  Sense strand starting at position 2406 SEQ ID NO: 3092
guugguuaaaugcagucaa

SEQ ID NO: 240269 - RNA, 19 nt, Artificial Sequence
  Description of Artificial Sequence: Synthetic oligonucleotide
  Antisense strand to SEQ ID NO: 240268
uugacugcauuuaaccaac

SEQ ID NO: 240270 - RNA, 19 nt, Artificial Sequence
  Description of Artificial Sequence: Synthetic oligonucleotide
  Sense strand starting at position 2535 SEQ ID NO: 3092
ugugcuucuccugugugau

SEQ ID NO: 240271 - RNA, 19 nt, Artificial Sequence
  Description of Artificial Sequence: Synthetic oligonucleotide
  Antisense strand to SEQ ID NO: 240270
aucacacaggagaagcaca

SEQ ID NO: 240272 - RNA, 19 nt, Artificial Sequence
  Description of Artificial Sequence: Synthetic oligonucleotide
  Sense strand starting at position 2713 SEQ ID NO: 3092
gacugucaucugcauugaa

SEQ ID NO: 240273 - RNA, 19 nt, Artificial Sequence
  Description of Artificial Sequence: Synthetic oligonucleotide
  Antisense strand to SEQ ID NO: 240272
uucaaugcagaugacaguc

SEQ ID NO: 240274 - RNA, 19 nt, Artificial Sequence
  Description of Artificial Sequence: Synthetic oligonucleotide
  Sense strand starting at position 3028 SEQ ID NO: 3092
uacagaggcagugauugua

SEQ ID NO: 240275 - RNA, 19 nt, Artificial Sequence
  Description of Artificial Sequence: Synthetic oligonucleotide
  Antisense strand to SEQ ID NO: 240274
uacaaucacugccucugua

SEQ ID NO: 240276 - RNA, 19 nt, Artificial Sequence
  Description of Artificial Sequence: Synthetic oligonucleotide
  Sense strand starting at position 3031 SEQ ID NO: 3092
agaggcagugauuguagaa

SEQ ID NO: 240277 - RNA, 19 nt, Artificial Sequence
  Description of Artificial Sequence: Synthetic oligonucleotide
  Antisense strand to SEQ ID NO: 240276
uucuacaaucacugccucu

SEQ ID NO: 240278 - RNA, 19 nt, Artificial Sequence
  Description of Artificial Sequence: Synthetic oligonucleotide
  Sense strand starting at position 3044 SEQ ID NO: 3092
guagaaucacagugggaac

SEQ ID NO: 240279 - RNA, 19 nt, Artificial Sequence
  Description of Artificial Sequence: Synthetic oligonucleotide
  Antisense strand to SEQ ID NO: 240278
guucccacugugauucuac

SEQ ID NO: 240280 - RNA, 19 nt, Artificial Sequence
  Description of Artificial Sequence: Synthetic oligonucleotide
  Sense strand starting at position 3410 SEQ ID NO: 3092
acccgugauuacuuuaaca

SEQ ID NO: 240281 - RNA, 19 nt, Artificial Sequence
  Description of Artificial Sequence: Synthetic oligonucleotide
  Antisense strand to SEQ ID NO: 240280
uguuaaaguaaucacgggu

SEQ ID NO: 240282 - RNA, 19 nt, Artificial Sequence
  Description of Artificial Sequence: Synthetic oligonucleotide
  Sense strand starting at position 3412 SEQ ID NO: 3092
ccgugauuacuuuaacagu

SEQ ID NO: 240283 - RNA, 19 nt, Artificial Sequence
  Description of Artificial Sequence: Synthetic oligonucleotide
  Antisense strand to SEQ ID NO: 240282
acuguuaaaguaaucacgg

SEQ ID NO: 240284 - RNA, 19 nt, Artificial Sequence
  Description of Artificial Sequence: Synthetic oligonucleotide
  Sense strand starting at position 3487 SEQ ID NO: 3092
cuccucuguccugagagaa

SEQ ID NO: 240285 - RNA, 19 nt, Artificial Sequence
  Description of Artificial Sequence: Synthetic oligonucleotide
  Antisense strand to SEQ ID NO: 240284
uucucucaggacagaggag

SEQ ID NO: 240286 - RNA, 19 nt, Artificial Sequence
  Description of Artificial Sequence: Synthetic oligonucleotide
  Sense strand starting at position 3574 SEQ ID NO: 3092
cggacaagucauuagguca

SEQ ID NO: 240287 - RNA, 19 nt, Artificial Sequence
  Description of Artificial Sequence: Synthetic oligonucleotide
  Antisense strand to SEQ ID NO: 240286
ugaccuaaugacuuguccg

SEQ ID NO: 240288 - RNA, 19 nt, Artificial Sequence
  Description of Artificial Sequence: Synthetic oligonucleotide
  Sense strand starting at position 3579 SEQ ID NO: 3092
aagucauuaggucauugca

SEQ ID NO: 240289 - RNA, 19 nt, Artificial Sequence
  Description of Artificial Sequence: Synthetic oligonucleotide
  Antisense strand to SEQ ID NO: 240288
ugcaaugaccuaaugacuu

SEQ ID NO: 240290 - RNA, 19 nt, Artificial Sequence
  Description of Artificial Sequence: Synthetic oligonucleotide
  Sense strand starting at position 3642 SEQ ID NO: 3092
uggccuuagacguaaucau

SEQ ID NO: 240291 - RNA, 19 nt, Artificial Sequence
  Description of Artificial Sequence: Synthetic oligonucleotide
  Antisense strand to SEQ ID NO: 240290
augauuacgucuaaggcca

SEQ ID NO: 240292 - RNA, 19 nt, Artificial Sequence
  Description of Artificial Sequence: Synthetic oligonucleotide
  Sense strand starting at position 3651 SEQ ID NO: 3092
acguaaucauaagagauuu

SEQ ID NO: 240293 - RNA, 19 nt, Artificial Sequence
  Description of Artificial Sequence: Synthetic oligonucleotide
  Antisense strand to SEQ ID NO: 240292
aaaucucuuaugauuacgu

SEQ ID NO: 240294 - RNA, 19 nt, Artificial Sequence
  Description of Artificial Sequence: Synthetic oligonucleotide
  Sense strand starting at position 3681 SEQ ID NO: 3092
uaggguaagacagguugaa

SEQ ID NO: 240295 - RNA, 19 nt, Artificial Sequence
  Description of Artificial Sequence: Synthetic oligonucleotide
  Antisense strand to SEQ ID NO: 240294
uucaaccugucuuacccua

SEQ ID NO: 240296 - RNA, 19 nt, Artificial Sequence
  Description of Artificial Sequence: Synthetic oligonucleotide
  Sense strand starting at position 3713 SEQ ID NO: 3092
ugcagagaauuccuuacag

SEQ ID NO: 240297 - RNA, 19 nt, Artificial Sequence
  Description of Artificial Sequence: Synthetic oligonucleotide
  Antisense strand to SEQ ID NO: 240296
cuguaaggaauucucugca

SEQ ID NO: 240298 - RNA, 19 nt, Artificial Sequence
  Description of Artificial Sequence: Synthetic oligonucleotide
  Sense strand starting at position 3815 SEQ ID NO: 3092
cgaaguagcauuuguuaca

SEQ ID NO: 240299 - RNA, 19 nt, Artificial Sequence
  Description of Artificial Sequence: Synthetic oligonucleotide
  Antisense strand to SEQ ID NO: 240298
uguaacaaaugcuacuucg

SEQ ID NO: 240300 - RNA, 19 nt, Artificial Sequence
  Description of Artificial Sequence: Synthetic oligonucleotide
  Sense strand starting at position 3854 SEQ ID NO: 3092
ccagccaucacuggaggau

SEQ ID NO: 240301 - RNA, 19 nt, Artificial Sequence
  Description of Artificial Sequence: Synthetic oligonucleotide
  Antisense strand to SEQ ID NO: 240300
auccuccagugauggcugg

SEQ ID NO: 240302 - RNA, 19 nt, Artificial Sequence
  Description of Artificial Sequence: Synthetic oligonucleotide
  Sense strand starting at position 3912 SEQ ID NO: 3092
gaacucaaucuggguuagu

SEQ ID NO: 240303 - RNA, 19 nt, Artificial Sequence
  Description of Artificial Sequence: Synthetic oligonucleotide
  Antisense strand to SEQ ID NO: 240302
acuaacccagauugaguuc

SEQ ID NO: 240304 - RNA, 19 nt, Artificial Sequence
  Description of Artificial Sequence: Synthetic oligonucleotide
  Sense strand starting at position 3913 SEQ ID NO: 3092
aacucaaucuggguuaguu

SEQ ID NO: 240305 - RNA, 19 nt, Artificial Sequence
  Description of Artificial Sequence: Synthetic oligonucleotide
  Antisense strand to SEQ ID NO: 240304
aacuaacccagauugaguu

SEQ ID NO: 240306 - RNA, 19 nt, Artificial Sequence
  Description of Artificial Sequence: Synthetic oligonucleotide
  Sense strand starting at position 252 SEQ ID NO: 3093
agauguaauuuagguacau

SEQ ID NO: 240307 - RNA, 19 nt, Artificial Sequence
  Description of Artificial Sequence: Synthetic oligonucleotide
  Antisense strand to SEQ ID NO: 240306
auguaccuaaauuacaucu

SEQ ID NO: 240308 - RNA, 19 nt, Artificial Sequence
  Description of Artificial Sequence: Synthetic oligonucleotide
  Sense strand starting at position 490 SEQ ID NO: 3093
ggguccuugagauguaguu

SEQ ID NO: 240309 - RNA, 19 nt, Artificial Sequence
  Description of Artificial Sequence: Synthetic oligonucleotide
  Antisense strand to SEQ ID NO: 240308
aacuacaucucaaggaccc

SEQ ID NO: 240310 - RNA, 19 nt, Artificial Sequence
  Description of Artificial Sequence: Synthetic oligonucleotide
  Sense strand starting at position 492 SEQ ID NO: 3093
guccuugagauguaguuag

SEQ ID NO: 240311 - RNA, 19 nt, Artificial Sequence
  Description of Artificial Sequence: Synthetic oligonucleotide
  Antisense strand to SEQ ID NO: 240310
cuaacuacaucucaaggac

SEQ ID NO: 240312 - RNA, 19 nt, Artificial Sequence
  Description of Artificial Sequence: Synthetic oligonucleotide
  Sense strand starting at position 496 SEQ ID NO: 3093
uugagauguaguuagguua

SEQ ID NO: 240313 - RNA, 19 nt, Artificial Sequence
  Description of Artificial Sequence: Synthetic oligonucleotide
  Antisense strand to SEQ ID NO: 240312
uaaccuaacuacaucucaa

SEQ ID NO: 240314 - RNA, 19 nt, Artificial Sequence
  Description of Artificial Sequence: Synthetic oligonucleotide
  Sense strand starting at position 499 SEQ ID NO: 3093
agauguaguuagguuagga

SEQ ID NO: 240315 - RNA, 19 nt, Artificial Sequence
  Description of Artificial Sequence: Synthetic oligonucleotide
  Antisense strand to SEQ ID NO: 240314
uccuaaccuaacuacaucu

SEQ ID NO: 240316 - RNA, 19 nt, Artificial Sequence
  Description of Artificial Sequence: Synthetic oligonucleotide
  Sense strand starting at position 825 SEQ ID NO: 3093
gggcaacaacagugauaga

SEQ ID NO: 240317 - RNA, 19 nt, Artificial Sequence
  Description of Artificial Sequence: Synthetic oligonucleotide
  Antisense strand to SEQ ID NO: 240316
ucuaucacuguuguugccc

SEQ ID NO: 240318 - RNA, 19 nt, Artificial Sequence
  Description of Artificial Sequence: Synthetic oligonucleotide
  Sense strand starting at position 865 SEQ ID NO: 3093
gacuguuggccauguggua

SEQ ID NO: 240319 - RNA, 19 nt, Artificial Sequence
  Description of Artificial Sequence: Synthetic oligonucleotide
  Antisense strand to SEQ ID NO: 240318
uaccacauggccaacaguc

SEQ ID NO: 240320 - RNA, 19 nt, Artificial Sequence
  Description of Artificial Sequence: Synthetic oligonucleotide
  Sense strand starting at position 877 SEQ ID NO: 3093
ugugguauugcaugguaac

SEQ ID NO: 240321 - RNA, 19 nt, Artificial Sequence
  Description of Artificial Sequence: Synthetic oligonucleotide
  Antisense strand to SEQ ID NO: 240320
guuaccaugcaauaccaca

SEQ ID NO: 240322 - RNA, 19 nt, Artificial Sequence
  Description of Artificial Sequence: Synthetic oligonucleotide
  Sense strand starting at position 1209 SEQ ID NO: 3093
gccugagaggucugccuga

SEQ ID NO: 240323 - RNA, 19 nt, Artificial Sequence
  Description of Artificial Sequence: Synthetic oligonucleotide
  Antisense strand to SEQ ID NO: 240322
ucaggcagaccucucaggc

SEQ ID NO: 240324 - RNA, 19 nt, Artificial Sequence
  Description of Artificial Sequence: Synthetic oligonucleotide
  Sense strand starting at position 1477 SEQ ID NO: 3093
gugcauuucugccuugaaa

SEQ ID NO: 240325 - RNA, 19 nt, Artificial Sequence
  Description of Artificial Sequence: Synthetic oligonucleotide
  Antisense strand to SEQ ID NO: 240324
uuucaaggcagaaaugcac

SEQ ID NO: 240326 - RNA, 19 nt, Artificial Sequence
  Description of Artificial Sequence: Synthetic oligonucleotide
  Sense strand starting at position 1548 SEQ ID NO: 3093
guuggagaauuguuucuca

SEQ ID NO: 240327 - RNA, 19 nt, Artificial Sequence
  Description of Artificial Sequence: Synthetic oligonucleotide
  Antisense strand to SEQ ID NO: 240326
ugagaaacaauucuccaac

SEQ ID NO: 240328 - RNA, 19 nt, Artificial Sequence
  Description of Artificial Sequence: Synthetic oligonucleotide
  Sense strand starting at position 1588 SEQ ID NO: 3093
ccugucaugucaucuccua

SEQ ID NO: 240329 - RNA, 19 nt, Artificial Sequence
  Description of Artificial Sequence: Synthetic oligonucleotide
  Antisense strand to SEQ ID NO: 240328
uaggagaugacaugacagg

SEQ ID NO: 240330 - RNA, 19 nt, Artificial Sequence
  Description of Artificial Sequence: Synthetic oligonucleotide
  Sense strand starting at position 1835 SEQ ID NO: 3093
gcuggacucacaugagcuu

SEQ ID NO: 240331 - RNA, 19 nt, Artificial Sequence
  Description of Artificial Sequence: Synthetic oligonucleotide
  Antisense strand to SEQ ID NO: 240330
aagcucaugugaguccagc

SEQ ID NO: 240332 - RNA, 19 nt, Artificial Sequence
  Description of Artificial Sequence: Synthetic oligonucleotide
  Sense strand starting at position 2343 SEQ ID NO: 3093
agggaagguucccagaaau

SEQ ID NO: 240333 - RNA, 19 nt, Artificial Sequence
  Description of Artificial Sequence: Synthetic oligonucleotide
  Antisense strand to SEQ ID NO: 240332
auuucugggaaccuucccu

SEQ ID NO: 240334 - RNA, 19 nt, Artificial Sequence
  Description of Artificial Sequence: Synthetic oligonucleotide
  Sense strand starting at position 2415 SEQ ID NO: 3093
uggcgcugggcucaagauu

SEQ ID NO: 240335 - RNA, 19 nt, Artificial Sequence
  Description of Artificial Sequence: Synthetic oligonucleotide
  Antisense strand to SEQ ID NO: 240334
aaucuugagcccagcgcca

SEQ ID NO: 240336 - RNA, 19 nt, Artificial Sequence
  Description of Artificial Sequence: Synthetic oligonucleotide
  Sense strand starting at position 2422 SEQ ID NO: 3093
gggcucaagauuuggcuuu

SEQ ID NO: 240337 - RNA, 19 nt, Artificial Sequence
  Description of Artificial Sequence: Synthetic oligonucleotide
  Antisense strand to SEQ ID NO: 240336
aaagccaaaucuugagccc

SEQ ID NO: 240338 - RNA, 19 nt, Artificial Sequence
  Description of Artificial Sequence: Synthetic oligonucleotide
  Sense strand starting at position 2738 SEQ ID NO: 3093
ggaacauacucaguucgca

SEQ ID NO: 240339 - RNA, 19 nt, Artificial Sequence
  Description of Artificial Sequence: Synthetic oligonucleotide
  Antisense strand to SEQ ID NO: 240338
ugcgaacugaguauguucc

SEQ ID NO: 240340 - RNA, 19 nt, Artificial Sequence
  Description of Artificial Sequence: Synthetic oligonucleotide
  Sense strand starting at position 2801 SEQ ID NO: 3093
uguccuagcccucgggaau

SEQ ID NO: 240341 - RNA, 19 nt, Artificial Sequence
  Description of Artificial Sequence: Synthetic oligonucleotide
  Antisense strand to SEQ ID NO: 240340
auucccgagggcuaggaca

SEQ ID NO: 240342 - RNA, 19 nt, Artificial Sequence
  Description of Artificial Sequence: Synthetic oligonucleotide
  Sense strand starting at position 2944 SEQ ID NO: 3093
gauggagaagccugucuuu

SEQ ID NO: 240343 - RNA, 19 nt, Artificial Sequence
  Description of Artificial Sequence: Synthetic oligonucleotide
  Antisense strand to SEQ ID NO: 240342
aaagacaggcuucuccauc

SEQ ID NO: 240344 - RNA, 19 nt, Artificial Sequence
  Description of Artificial Sequence: Synthetic oligonucleotide
  Sense strand starting at position 2947 SEQ ID NO: 3093
ggagaagccugucuuucug

SEQ ID NO: 240345 - RNA, 19 nt, Artificial Sequence
  Description of Artificial Sequence: Synthetic oligonucleotide
  Antisense strand to SEQ ID NO: 240344
cagaaagacaggcuucucc

SEQ ID NO: 240346 - RNA, 19 nt, Artificial Sequence
  Description of Artificial Sequence: Synthetic oligonucleotide
  Sense strand starting at position 2956 SEQ ID NO: 3093
ugucuuucugcaggacuca

SEQ ID NO: 240347 - RNA, 19 nt, Artificial Sequence
  Description of Artificial Sequence: Synthetic oligonucleotide
  Antisense strand to SEQ ID NO: 240346
ugaguccugcagaaagaca

SEQ ID NO: 240348 - RNA, 19 nt, Artificial Sequence
  Description of Artificial Sequence: Synthetic oligonucleotide
  Sense strand starting at position 2972 SEQ ID NO: 3093
ucagaacuuucuuaggaag

SEQ ID NO: 240349 - RNA, 19 nt, Artificial Sequence
  Description of Artificial Sequence: Synthetic oligonucleotide
  Antisense strand to SEQ ID NO: 240348
cuuccuaagaaaguucuga

SEQ ID NO: 240350 - RNA, 19 nt, Artificial Sequence
  Description of Artificial Sequence: Synthetic oligonucleotide
  Sense strand starting at position 3421 SEQ ID NO: 3093
gaggaucugagauguguua

SEQ ID NO: 240351 - RNA, 19 nt, Artificial Sequence
  Description of Artificial Sequence: Synthetic oligonucleotide
  Antisense strand to SEQ ID NO: 240350
uaacacaucucagauccuc

SEQ ID NO: 240352 - RNA, 19 nt, Artificial Sequence
  Description of Artificial Sequence: Synthetic oligonucleotide
  Sense strand starting at position 3423 SEQ ID NO: 3093
ggaucugagauguguuaag

SEQ ID NO: 240353 - RNA, 19 nt, Artificial Sequence
  Description of Artificial Sequence: Synthetic oligonucleotide
  Antisense strand to SEQ ID NO: 240352
cuuaacacaucucagaucc

SEQ ID NO: 240354 - RNA, 19 nt, Artificial Sequence
  Description of Artificial Sequence: Synthetic oligonucleotide
  Sense strand starting at position 3446 SEQ ID NO: 3093
cuuugaguguuaguuaaau

SEQ ID NO: 240355 - RNA, 19 nt, Artificial Sequence
  Description of Artificial Sequence: Synthetic oligonucleotide
  Antisense strand to SEQ ID NO: 240354
auuuaacuaacacucaaag

SEQ ID NO: 240356 - RNA, 19 nt, Artificial Sequence
  Description of Artificial Sequence: Synthetic oligonucleotide
  Sense strand starting at position 3536 SEQ ID NO: 3093
cccaacagauguuccguua

SEQ ID NO: 240357 - RNA, 19 nt, Artificial Sequence
  Description of Artificial Sequence: Synthetic oligonucleotide
  Antisense strand to SEQ ID NO: 240356
uaacggaacaucuguuggg

SEQ ID NO: 240358 - RNA, 19 nt, Artificial Sequence
  Description of Artificial Sequence: Synthetic oligonucleotide
  Sense strand starting at position 3539 SEQ ID NO: 3093
aacagauguuccguuacca

SEQ ID NO: 240359 - RNA, 19 nt, Artificial Sequence
  Description of Artificial Sequence: Synthetic oligonucleotide
  Antisense strand to SEQ ID NO: 240358
ugguaacggaacaucuguu

SEQ ID NO: 240360 - RNA, 19 nt, Artificial Sequence
  Description of Artificial Sequence: Synthetic oligonucleotide
  Sense strand starting at position 3543 SEQ ID NO: 3093
gauguuccguuaccauagu

SEQ ID NO: 240361 - RNA, 19 nt, Artificial Sequence
  Description of Artificial Sequence: Synthetic oligonucleotide
  Antisense strand to SEQ ID NO: 240360
acuaugguaacggaacauc

SEQ ID NO: 240362 - RNA, 19 nt, Artificial Sequence
  Description of Artificial Sequence: Synthetic oligonucleotide
  Sense strand starting at position 3573 SEQ ID NO: 3093
aaugauagguacucuguau

SEQ ID NO: 240363 - RNA, 19 nt, Artificial Sequence
  Description of Artificial Sequence: Synthetic oligonucleotide
  Antisense strand to SEQ ID NO: 240362
auacagaguaccuaucauu

SEQ ID NO: 240364 - RNA, 19 nt, Artificial Sequence
  Description of Artificial Sequence: Synthetic oligonucleotide
  Sense strand starting at position 3651 SEQ ID NO: 3093
cugaaauaucccgaguaac

SEQ ID NO: 240365 - RNA, 19 nt, Artificial Sequence
  Description of Artificial Sequence: Synthetic oligonucleotide
  Antisense strand to SEQ ID NO: 240364
guuacucgggauauuucag

SEQ ID NO: 240366 - RNA, 19 nt, Artificial Sequence
  Description of Artificial Sequence: Synthetic oligonucleotide
  Sense strand starting at position 3662 SEQ ID NO: 3093
cgaguaacccucuacacaa

SEQ ID NO: 240367 - RNA, 19 nt, Artificial Sequence
  Description of Artificial Sequence: Synthetic oligonucleotide
  Antisense strand to SEQ ID NO: 240366
uuguguagaggguuacucg

SEQ ID NO: 240368 - RNA, 19 nt, Artificial Sequence
  Description of Artificial Sequence: Synthetic oligonucleotide
  Sense strand starting at position 3689 SEQ ID NO: 3093
acugcuauguuaucacuau

SEQ ID NO: 240369 - RNA, 19 nt, Artificial Sequence
  Description of Artificial Sequence: Synthetic oligonucleotide
  Antisense strand to SEQ ID NO: 240368
auagugauaacauagcagu

SEQ ID NO: 240370 - RNA, 19 nt, Artificial Sequence
  Description of Artificial Sequence: Synthetic oligonucleotide
  Sense strand starting at position 3721 SEQ ID NO: 3093
ugauuugugcuguguagag

SEQ ID NO: 240371 - RNA, 19 nt, Artificial Sequence
  Description of Artificial Sequence: Synthetic oligonucleotide
  Antisense strand to SEQ ID NO: 240370
cucuacacagcacaaauca

SEQ ID NO: 240372 - RNA, 19 nt, Artificial Sequence
  Description of Artificial Sequence: Synthetic oligonucleotide
  Sense strand starting at position 3746 SEQ ID NO: 3093
ccacgucuggucuacugaa

SEQ ID NO: 240373 - RNA, 19 nt, Artificial Sequence
  Description of Artificial Sequence: Synthetic oligonucleotide
  Antisense strand to SEQ ID NO: 240372
uucaguagaccagacgugg

SEQ ID NO: 240374 - RNA, 19 nt, Artificial Sequence
  Description of Artificial Sequence: Synthetic oligonucleotide
  Sense strand starting at position 3816 SEQ ID NO: 3093
gacaguugcuauguuguga

SEQ ID NO: 240375 - RNA, 19 nt, Artificial Sequence
  Description of Artificial Sequence: Synthetic oligonucleotide
  Antisense strand to SEQ ID NO: 240374
ucacaacauagcaacuguc

SEQ ID NO: 240376 - RNA, 19 nt, Artificial Sequence
  Description of Artificial Sequence: Synthetic oligonucleotide
  Sense strand starting at position 3824 SEQ ID NO: 3093
cuauguugugaguauucug

SEQ ID NO: 240377 - RNA, 19 nt, Artificial Sequence
  Description of Artificial Sequence: Synthetic oligonucleotide
  Antisense strand to SEQ ID NO: 240376
cagaauacucacaacauag

SEQ ID NO: 240378 - RNA, 19 nt, Artificial Sequence
  Description of Artificial Sequence: Synthetic oligonucleotide
  Sense strand starting at position 3844 SEQ ID NO: 3093
cauuguugaguuggaacca

SEQ ID NO: 240379 - RNA, 19 nt, Artificial Sequence
  Description of Artificial Sequence: Synthetic oligonucleotide
  Antisense strand to SEQ ID NO: 240378
ugguuccaacucaacaaug

SEQ ID NO: 240380 - RNA, 19 nt, Artificial Sequence
  Description of Artificial Sequence: Synthetic oligonucleotide
  Sense strand starting at position 3853 SEQ ID NO: 3093
guuggaaccaucuggaauc

SEQ ID NO: 240381 - RNA, 19 nt, Artificial Sequence
  Description of Artificial Sequence: Synthetic oligonucleotide
  Antisense strand to SEQ ID NO: 240380
gauuccagaugguuccaac

SEQ ID NO: 240382 - RNA, 19 nt, Artificial Sequence
  Description of Artificial Sequence: Synthetic oligonucleotide
  Sense strand starting at position 3953 SEQ ID NO: 3093
ggagcucaucugcacuaaa

SEQ ID NO: 240383 - RNA, 19 nt, Artificial Sequence
  Description of Artificial Sequence: Synthetic oligonucleotide
  Antisense strand to SEQ ID NO: 240382
uuuagugcagaugagcucc

SEQ ID NO: 240384 - RNA, 19 nt, Artificial Sequence
  Description of Artificial Sequence: Synthetic oligonucleotide
  Sense strand starting at position 3956 SEQ ID NO: 3093
gcucaucugcacuaaagga

SEQ ID NO: 240385 - RNA, 19 nt, Artificial Sequence
  Description of Artificial Sequence: Synthetic oligonucleotide
  Antisense strand to SEQ ID NO: 240384
uccuuuagugcagaugagc

SEQ ID NO: 240386 - RNA, 19 nt, Artificial Sequence
  Description of Artificial Sequence: Synthetic oligonucleotide
  Sense strand starting at position 504 SEQ ID NO: 3094
gcugccgauccauaagaaa

SEQ ID NO: 240387 - RNA, 19 nt, Artificial Sequence
  Description of Artificial Sequence: Synthetic oligonucleotide
  Antisense strand to SEQ ID NO: 240386
uuucuuauggaucggcagc

SEQ ID NO: 240388 - RNA, 19 nt, Artificial Sequence
  Description of Artificial Sequence: Synthetic oligonucleotide
  Sense strand starting at position 628 SEQ ID NO: 3094
gaaggcuaaccguagguaa

SEQ ID NO: 240389 - RNA, 19 nt, Artificial Sequence
  Description of Artificial Sequence: Synthetic oligonucleotide
  Antisense strand to SEQ ID NO: 240388
uuaccuacgguuagccuuc

SEQ ID NO: 240390 - RNA, 19 nt, Artificial Sequence
  Description of Artificial Sequence: Synthetic oligonucleotide
  Sense strand starting at position 643 SEQ ID NO: 3094
guaagcauaugaguaguaa

SEQ ID NO: 240391 - RNA, 19 nt, Artificial Sequence
  Description of Artificial Sequence: Synthetic oligonucleotide
  Antisense strand to SEQ ID NO: 240390
uuacuacucauaugcuuac

SEQ ID NO: 240392 - RNA, 19 nt, Artificial Sequence
  Description of Artificial Sequence: Synthetic oligonucleotide
  Sense strand starting at position 644 SEQ ID NO: 3094
uaagcauaugaguaguaag

SEQ ID NO: 240393 - RNA, 19 nt, Artificial Sequence
  Description of Artificial Sequence: Synthetic oligonucleotide
  Antisense strand to SEQ ID NO: 240392
cuuacuacucauaugcuua

SEQ ID NO: 240394 - RNA, 19 nt, Artificial Sequence
  Description of Artificial Sequence: Synthetic oligonucleotide
  Sense strand starting at position 655 SEQ ID NO: 3094
guaguaagacaauggguga

SEQ ID NO: 240395 - RNA, 19 nt, Artificial Sequence
  Description of Artificial Sequence: Synthetic oligonucleotide
  Antisense strand to SEQ ID NO: 240394
ucacccauugucuuacuac

SEQ ID NO: 240396 - RNA, 19 nt, Artificial Sequence
  Description of Artificial Sequence: Synthetic oligonucleotide
  Sense strand starting at position 662 SEQ ID NO: 3094
gacaaugggugauucguuu

SEQ ID NO: 240397 - RNA, 19 nt, Artificial Sequence
  Description of Artificial Sequence: Synthetic oligonucleotide
  Antisense strand to SEQ ID NO: 240396
aaacgaaucacccauuguc

SEQ ID NO: 240398 - RNA, 19 nt, Artificial Sequence
  Description of Artificial Sequence: Synthetic oligonucleotide
  Sense strand starting at position 723 SEQ ID NO: 3094
cuauaaugugcuuauguua

SEQ ID NO: 240399 - RNA, 19 nt, Artificial Sequence
  Description of Artificial Sequence: Synthetic oligonucleotide
  Antisense strand to SEQ ID NO: 240398
uaacauaagcacauuauag

SEQ ID NO: 240400 - RNA, 19 nt, Artificial Sequence
  Description of Artificial Sequence: Synthetic oligonucleotide
  Sense strand starting at position 1130 SEQ ID NO: 3094
cguucucagaacgaucuaa

SEQ ID NO: 240401 - RNA, 19 nt, Artificial Sequence
  Description of Artificial Sequence: Synthetic oligonucleotide
  Antisense strand to SEQ ID NO: 240400
uuagaucguucugagaacg

SEQ ID NO: 240402 - RNA, 19 nt, Artificial Sequence
  Description of Artificial Sequence: Synthetic oligonucleotide
  Sense strand starting at position 1156 SEQ ID NO: 3094
uugcuuaagguagagguau

SEQ ID NO: 240403 - RNA, 19 nt, Artificial Sequence
  Description of Artificial Sequence: Synthetic oligonucleotide
  Antisense strand to SEQ ID NO: 240402
auaccucuaccuuaagcaa

SEQ ID NO: 240404 - RNA, 19 nt, Artificial Sequence
  Description of Artificial Sequence: Synthetic oligonucleotide
  Sense strand starting at position 1158 SEQ ID NO: 3094
gcuuaagguagagguauua

SEQ ID NO: 240405 - RNA, 19 nt, Artificial Sequence
  Description of Artificial Sequence: Synthetic oligonucleotide
  Antisense strand to SEQ ID NO: 240404
uaauaccucuaccuuaagc

SEQ ID NO: 240406 - RNA, 19 nt, Artificial Sequence
  Description of Artificial Sequence: Synthetic oligonucleotide
  Sense strand starting at position 1191 SEQ ID NO: 3094
ugugucuuccaguaaguug

SEQ ID NO: 240407 - RNA, 19 nt, Artificial Sequence
  Description of Artificial Sequence: Synthetic oligonucleotide
  Antisense strand to SEQ ID NO: 240406
caacuuacuggaagacaca

SEQ ID NO: 240408 - RNA, 19 nt, Artificial Sequence
  Description of Artificial Sequence: Synthetic oligonucleotide
  Sense strand starting at position 1211 SEQ ID NO: 3094
agaacuucccgcugaaauu

SEQ ID NO: 240409 - RNA, 19 nt, Artificial Sequence
  Description of Artificial Sequence: Synthetic oligonucleotide
  Antisense strand to SEQ ID NO: 240408
aauuucagcgggaaguucu

SEQ ID NO: 240410 - RNA, 19 nt, Artificial Sequence
  Description of Artificial Sequence: Synthetic oligonucleotide
  Sense strand starting at position 1272 SEQ ID NO: 3094
aguugagcucccuacuuga

SEQ ID NO: 240411 - RNA, 19 nt, Artificial Sequence
  Description of Artificial Sequence: Synthetic oligonucleotide
  Antisense strand to SEQ ID NO: 240410
ucaaguagggagcucaacu

SEQ ID NO: 240412 - RNA, 19 nt, Artificial Sequence
  Description of Artificial Sequence: Synthetic oligonucleotide
  Sense strand starting at position 1342 SEQ ID NO: 3094
agugaucugcaaggcugau

SEQ ID NO: 240413 - RNA, 19 nt, Artificial Sequence
  Description of Artificial Sequence: Synthetic oligonucleotide
  Antisense strand to SEQ ID NO: 240412
aucagccuugcagaucacu

SEQ ID NO: 240414 - RNA, 19 nt, Artificial Sequence
  Description of Artificial Sequence: Synthetic oligonucleotide
  Sense strand starting at position 1346 SEQ ID NO: 3094
aucugcaaggcugauuaau

SEQ ID NO: 240415 - RNA, 19 nt, Artificial Sequence
  Description of Artificial Sequence: Synthetic oligonucleotide
  Antisense strand to SEQ ID NO: 240414
auuaaucagccuugcagau

SEQ ID NO: 240416 - RNA, 19 nt, Artificial Sequence
  Description of Artificial Sequence: Synthetic oligonucleotide
  Sense strand starting at position 1961 SEQ ID NO: 3094
uggagcacugccugacuaa

SEQ ID NO: 240417 - RNA, 19 nt, Artificial Sequence
  Description of Artificial Sequence: Synthetic oligonucleotide
  Antisense strand to SEQ ID NO: 240416
uuagucaggcagugcucca

SEQ ID NO: 240418 - RNA, 19 nt, Artificial Sequence
  Description of Artificial Sequence: Synthetic oligonucleotide
  Sense strand starting at position 1962 SEQ ID NO: 3094
ggagcacugccugacuaaa

SEQ ID NO: 240419 - RNA, 19 nt, Artificial Sequence
  Description of Artificial Sequence: Synthetic oligonucleotide
  Antisense strand to SEQ ID NO: 240418
uuuagucaggcagugcucc

SEQ ID NO: 240420 - RNA, 19 nt, Artificial Sequence
  Description of Artificial Sequence: Synthetic oligonucleotide
  Sense strand starting at position 2463 SEQ ID NO: 3094
gcugaaguucgggacagua

SEQ ID NO: 240421 - RNA, 19 nt, Artificial Sequence
  Description of Artificial Sequence: Synthetic oligonucleotide
  Antisense strand to SEQ ID NO: 240420
uacugucccgaacuucagc

SEQ ID NO: 240422 - RNA, 19 nt, Artificial Sequence
  Description of Artificial Sequence: Synthetic oligonucleotide
  Sense strand starting at position 2465 SEQ ID NO: 3094
ugaaguucgggacaguagu

SEQ ID NO: 240423 - RNA, 19 nt, Artificial Sequence
  Description of Artificial Sequence: Synthetic oligonucleotide
  Antisense strand to SEQ ID NO: 240422
acuacugucccgaacuuca

SEQ ID NO: 240424 - RNA, 19 nt, Artificial Sequence
  Description of Artificial Sequence: Synthetic oligonucleotide
  Sense strand starting at position 2485 SEQ ID NO: 3094
ucaccugcgcccuaauuua

SEQ ID NO: 240425 - RNA, 19 nt, Artificial Sequence
  Description of Artificial Sequence: Synthetic oligonucleotide
  Antisense strand to SEQ ID NO: 240424
uaaauuagggcgcagguga

SEQ ID NO: 240426 - RNA, 19 nt, Artificial Sequence
  Description of Artificial Sequence: Synthetic oligonucleotide
  Sense strand starting at position 2575 SEQ ID NO: 3094
ggcgucggccuuaauguaa

SEQ ID NO: 240427 - RNA, 19 nt, Artificial Sequence
  Description of Artificial Sequence: Synthetic oligonucleotide
  Antisense strand to SEQ ID NO: 240426
uuacauuaaggccgacgcc

SEQ ID NO: 240428 - RNA, 19 nt, Artificial Sequence
  Description of Artificial Sequence: Synthetic oligonucleotide
  Sense strand starting at position 2677 SEQ ID NO: 3094
auggguuugcccgauuucu

SEQ ID NO: 240429 - RNA, 19 nt, Artificial Sequence
  Description of Artificial Sequence: Synthetic oligonucleotide
  Antisense strand to SEQ ID NO: 240428
agaaaucgggcaaacccau

SEQ ID NO: 240430 - RNA, 19 nt, Artificial Sequence
  Description of Artificial Sequence: Synthetic oligonucleotide
  Sense strand starting at position 2771 SEQ ID NO: 3094
ggcuccguuauccagauaa

SEQ ID NO: 240431 - RNA, 19 nt, Artificial Sequence
  Description of Artificial Sequence: Synthetic oligonucleotide
  Antisense strand to SEQ ID NO: 240430
uuaucuggauaacggagcc

SEQ ID NO: 240432 - RNA, 19 nt, Artificial Sequence
  Description of Artificial Sequence: Synthetic oligonucleotide
  Sense strand starting at position 2773 SEQ ID NO: 3094
cuccguuauccagauaauc

SEQ ID NO: 240433 - RNA, 19 nt, Artificial Sequence
  Description of Artificial Sequence: Synthetic oligonucleotide
  Antisense strand to SEQ ID NO: 240432
gauuaucuggauaacggag

SEQ ID NO: 240434 - RNA, 19 nt, Artificial Sequence
  Description of Artificial Sequence: Synthetic oligonucleotide
  Sense strand starting at position 2809 SEQ ID NO: 3094
uuccgaucuggaugauuau

SEQ ID NO: 240435 - RNA, 19 nt, Artificial Sequence
  Description of Artificial Sequence: Synthetic oligonucleotide
  Antisense strand to SEQ ID NO: 240434
auaaucauccagaucggaa

SEQ ID NO: 240436 - RNA, 19 nt, Artificial Sequence
  Description of Artificial Sequence: Synthetic oligonucleotide
  Sense strand starting at position 2812 SEQ ID NO: 3094
cgaucuggaugauuaucua

SEQ ID NO: 240437 - RNA, 19 nt, Artificial Sequence
  Description of Artificial Sequence: Synthetic oligonucleotide
  Antisense strand to SEQ ID NO: 240436
uagauaaucauccagaucg

SEQ ID NO: 240438 - RNA, 19 nt, Artificial Sequence
  Description of Artificial Sequence: Synthetic oligonucleotide
  Sense strand starting at position 2815 SEQ ID NO: 3094
ucuggaugauuaucuaucu

SEQ ID NO: 240439 - RNA, 19 nt, Artificial Sequence
  Description of Artificial Sequence: Synthetic oligonucleotide
  Antisense strand to SEQ ID NO: 240438
agauagauaaucauccaga

SEQ ID NO: 240440 - RNA, 19 nt, Artificial Sequence
  Description of Artificial Sequence: Synthetic oligonucleotide
  Sense strand starting at position 2852 SEQ ID NO: 3094
ucacuuaagcggugaagaa

SEQ ID NO: 240441 - RNA, 19 nt, Artificial Sequence
  Description of Artificial Sequence: Synthetic oligonucleotide
  Antisense strand to SEQ ID NO: 240440
uucuucaccgcuuaaguga

SEQ ID NO: 240442 - RNA, 19 nt, Artificial Sequence
  Description of Artificial Sequence: Synthetic oligonucleotide
  Sense strand starting at position 2853 SEQ ID NO: 3094
cacuuaagcggugaagaaa

SEQ ID NO: 240443 - RNA, 19 nt, Artificial Sequence
  Description of Artificial Sequence: Synthetic oligonucleotide
  Antisense strand to SEQ ID NO: 240442
uuucuucaccgcuuaagug

SEQ ID NO: 240444 - RNA, 19 nt, Artificial Sequence
  Description of Artificial Sequence: Synthetic oligonucleotide
  Sense strand starting at position 3087 SEQ ID NO: 3094
uuguuuaguccucacauuc

SEQ ID NO: 240445 - RNA, 19 nt, Artificial Sequence
  Description of Artificial Sequence: Synthetic oligonucleotide
  Antisense strand to SEQ ID NO: 240444
gaaugugaggacuaaacaa

SEQ ID NO: 240446 - RNA, 19 nt, Artificial Sequence
  Description of Artificial Sequence: Synthetic oligonucleotide
  Sense strand starting at position 3193 SEQ ID NO: 3094
cagacauaagucugagucu

SEQ ID NO: 240447 - RNA, 19 nt, Artificial Sequence
  Description of Artificial Sequence: Synthetic oligonucleotide
  Antisense strand to SEQ ID NO: 240446
agacucagacuuaugucug

SEQ ID NO: 240448 - RNA, 19 nt, Artificial Sequence
  Description of Artificial Sequence: Synthetic oligonucleotide
  Sense strand starting at position 3260 SEQ ID NO: 3094
cgaaguuaagacugaaaug

SEQ ID NO: 240449 - RNA, 19 nt, Artificial Sequence
  Description of Artificial Sequence: Synthetic oligonucleotide
  Antisense strand to SEQ ID NO: 240448
cauuucagucuuaacuucg

SEQ ID NO: 240450 - RNA, 19 nt, Artificial Sequence
  Description of Artificial Sequence: Synthetic oligonucleotide
  Sense strand starting at position 3298 SEQ ID NO: 3094
gagguuucuguuuaaagcu

SEQ ID NO: 240451 - RNA, 19 nt, Artificial Sequence
  Description of Artificial Sequence: Synthetic oligonucleotide
  Antisense strand to SEQ ID NO: 240450
agcuuuaaacagaaaccuc

SEQ ID NO: 240452 - RNA, 19 nt, Artificial Sequence
  Description of Artificial Sequence: Synthetic oligonucleotide
  Sense strand starting at position 3328 SEQ ID NO: 3094
gugagugcucaucauguga

SEQ ID NO: 240453 - RNA, 19 nt, Artificial Sequence
  Description of Artificial Sequence: Synthetic oligonucleotide
  Antisense strand to SEQ ID NO: 240452
ucacaugaugagcacucac

SEQ ID NO: 240454 - RNA, 19 nt, Artificial Sequence
  Description of Artificial Sequence: Synthetic oligonucleotide
  Sense strand starting at position 3336 SEQ ID NO: 3094
ucaucaugugagcacuuua

SEQ ID NO: 240455 - RNA, 19 nt, Artificial Sequence
  Description of Artificial Sequence: Synthetic oligonucleotide
  Antisense strand to SEQ ID NO: 240454
uaaagugcucacaugauga

SEQ ID NO: 240456 - RNA, 19 nt, Artificial Sequence
  Description of Artificial Sequence: Synthetic oligonucleotide
  Sense strand starting at position 3344 SEQ ID NO: 3094
ugagcacuuuaagcagaaa

SEQ ID NO: 240457 - RNA, 19 nt, Artificial Sequence
  Description of Artificial Sequence: Synthetic oligonucleotide
  Antisense strand to SEQ ID NO: 240456
uuucugcuuaaagugcuca

SEQ ID NO: 240458 - RNA, 19 nt, Artificial Sequence
  Description of Artificial Sequence: Synthetic oligonucleotide
  Sense strand starting at position 3498 SEQ ID NO: 3094
uuaggucagaagugguaaa

SEQ ID NO: 240459 - RNA, 19 nt, Artificial Sequence
  Description of Artificial Sequence: Synthetic oligonucleotide
  Antisense strand to SEQ ID NO: 240458
uuuaccacuucugaccuaa

SEQ ID NO: 240460 - RNA, 19 nt, Artificial Sequence
  Description of Artificial Sequence: Synthetic oligonucleotide
  Sense strand starting at position 3499 SEQ ID NO: 3094
uaggucagaagugguaaau

SEQ ID NO: 240461 - RNA, 19 nt, Artificial Sequence
  Description of Artificial Sequence: Synthetic oligonucleotide
  Antisense strand to SEQ ID NO: 240460
auuuaccacuucugaccua

SEQ ID NO: 240462 - RNA, 19 nt, Artificial Sequence
  Description of Artificial Sequence: Synthetic oligonucleotide
  Sense strand starting at position 3530 SEQ ID NO: 3094
guuaaagguccagacagua

SEQ ID NO: 240463 - RNA, 19 nt, Artificial Sequence
  Description of Artificial Sequence: Synthetic oligonucleotide
  Antisense strand to SEQ ID NO: 240462
uacugucuggaccuuuaac

SEQ ID NO: 240464 - RNA, 19 nt, Artificial Sequence
  Description of Artificial Sequence: Synthetic oligonucleotide
  Sense strand starting at position 3961 SEQ ID NO: 3094
guguguuguaguuugccaa

SEQ ID NO: 240465 - RNA, 19 nt, Artificial Sequence
  Description of Artificial Sequence: Synthetic oligonucleotide
  Antisense strand to SEQ ID NO: 240464
uuggcaaacuacaacacac

SEQ ID NO: 240466 - RNA, 19 nt, Artificial Sequence
  Description of Artificial Sequence: Synthetic oligonucleotide
  Sense strand starting at position 16 SEQ ID NO: 3095
gagccaaaugagugaucua

SEQ ID NO: 240467 - RNA, 19 nt, Artificial Sequence
  Description of Artificial Sequence: Synthetic oligonucleotide
  Antisense strand to SEQ ID NO: 240466
uagaucacucauuuggcuc

SEQ ID NO: 240468 - RNA, 19 nt, Artificial Sequence
  Description of Artificial Sequence: Synthetic oligonucleotide
  Sense strand starting at position 543 SEQ ID NO: 3095
caguuagguguugaagaaa

SEQ ID NO: 240469 - RNA, 19 nt, Artificial Sequence
  Description of Artificial Sequence: Synthetic oligonucleotide
  Antisense strand to SEQ ID NO: 240468
uuucuucaacaccuaacug

SEQ ID NO: 240470 - RNA, 19 nt, Artificial Sequence
  Description of Artificial Sequence: Synthetic oligonucleotide
  Sense strand starting at position 546 SEQ ID NO: 3095
uuagguguugaagaaagca

SEQ ID NO: 240471 - RNA, 19 nt, Artificial Sequence
  Description of Artificial Sequence: Synthetic oligonucleotide
  Antisense strand to SEQ ID NO: 240470
ugcuuucuucaacaccuaa

SEQ ID NO: 240472 - RNA, 19 nt, Artificial Sequence
  Description of Artificial Sequence: Synthetic oligonucleotide
  Sense strand starting at position 637 SEQ ID NO: 3095
uucagaaguggucagguca

SEQ ID NO: 240473 - RNA, 19 nt, Artificial Sequence
  Description of Artificial Sequence: Synthetic oligonucleotide
  Antisense strand to SEQ ID NO: 240472
ugaccugaccacuucugaa

SEQ ID NO: 240474 - RNA, 19 nt, Artificial Sequence
  Description of Artificial Sequence: Synthetic oligonucleotide
  Sense strand starting at position 657 SEQ ID NO: 3095
ccaguuucugcuuaaagug

SEQ ID NO: 240475 - RNA, 19 nt, Artificial Sequence
  Description of Artificial Sequence: Synthetic oligonucleotide
  Antisense strand to SEQ ID NO: 240474
cacuuuaagcagaaacugg

SEQ ID NO: 240476 - RNA, 19 nt, Artificial Sequence
  Description of Artificial Sequence: Synthetic oligonucleotide
  Sense strand starting at position 666 SEQ ID NO: 3095
gcuuaaagugcucacauga

SEQ ID NO: 240477 - RNA, 19 nt, Artificial Sequence
  Description of Artificial Sequence: Synthetic oligonucleotide
  Antisense strand to SEQ ID NO: 240476
ucaugugagcacuuuaagc

SEQ ID NO: 240478 - RNA, 19 nt, Artificial Sequence
  Description of Artificial Sequence: Synthetic oligonucleotide
  Sense strand starting at position 684 SEQ ID NO: 3095
augagcacucacuaugcaa

SEQ ID NO: 240479 - RNA, 19 nt, Artificial Sequence
  Description of Artificial Sequence: Synthetic oligonucleotide
  Antisense strand to SEQ ID NO: 240478
uugcauagugagugcucau

SEQ ID NO: 240480 - RNA, 19 nt, Artificial Sequence
  Description of Artificial Sequence: Synthetic oligonucleotide
  Sense strand starting at position 790 SEQ ID NO: 3095
gcugucagucuggcgagua

SEQ ID NO: 240481 - RNA, 19 nt, Artificial Sequence
  Description of Artificial Sequence: Synthetic oligonucleotide
  Antisense strand to SEQ ID NO: 240480
uacucgccagacugacagc

SEQ ID NO: 240482 - RNA, 19 nt, Artificial Sequence
  Description of Artificial Sequence: Synthetic oligonucleotide
  Sense strand starting at position 793 SEQ ID NO: 3095
gucagucuggcgaguagug

SEQ ID NO: 240483 - RNA, 19 nt, Artificial Sequence
  Description of Artificial Sequence: Synthetic oligonucleotide
  Antisense strand to SEQ ID NO: 240482
cacuacucgccagacugac

SEQ ID NO: 240484 - RNA, 19 nt, Artificial Sequence
  Description of Artificial Sequence: Synthetic oligonucleotide
  Sense strand starting at position 816 SEQ ID NO: 3095
ucagacuuaugucugaaug

SEQ ID NO: 240485 - RNA, 19 nt, Artificial Sequence
  Description of Artificial Sequence: Synthetic oligonucleotide
  Antisense strand to SEQ ID NO: 240484
cauucagacauaagucuga

SEQ ID NO: 240486 - RNA, 19 nt, Artificial Sequence
  Description of Artificial Sequence: Synthetic oligonucleotide
  Sense strand starting at position 1042 SEQ ID NO: 3095
gcuaccaugcaaugaagaa

SEQ ID NO: 240487 - RNA, 19 nt, Artificial Sequence
  Description of Artificial Sequence: Synthetic oligonucleotide
  Antisense strand to SEQ ID NO: 240486
uucuucauugcaugguagc

SEQ ID NO: 240488 - RNA, 19 nt, Artificial Sequence
  Description of Artificial Sequence: Synthetic oligonucleotide
  Sense strand starting at position 1088 SEQ ID NO: 3095
gcuccagucuuauuucuac

SEQ ID NO: 240489 - RNA, 19 nt, Artificial Sequence
  Description of Artificial Sequence: Synthetic oligonucleotide
  Antisense strand to SEQ ID NO: 240488
guagaaauaagacuggagc

SEQ ID NO: 240490 - RNA, 19 nt, Artificial Sequence
  Description of Artificial Sequence: Synthetic oligonucleotide
  Sense strand starting at position 1107 SEQ ID NO: 3095
uacauauggccauggguaa

SEQ ID NO: 240491 - RNA, 19 nt, Artificial Sequence
  Description of Artificial Sequence: Synthetic oligonucleotide
  Antisense strand to SEQ ID NO: 240490
uuacccauggccauaugua

SEQ ID NO: 240492 - RNA, 19 nt, Artificial Sequence
  Description of Artificial Sequence: Synthetic oligonucleotide
  Sense strand starting at position 1108 SEQ ID NO: 3095
acauauggccauggguaaa

SEQ ID NO: 240493 - RNA, 19 nt, Artificial Sequence
  Description of Artificial Sequence: Synthetic oligonucleotide
  Antisense strand to SEQ ID NO: 240492
uuuacccauggccauaugu

SEQ ID NO: 240494 - RNA, 19 nt, Artificial Sequence
  Description of Artificial Sequence: Synthetic oligonucleotide
  Sense strand starting at position 1310 SEQ ID NO: 3095
agucuuauucuuuacagca

SEQ ID NO: 240495 - RNA, 19 nt, Artificial Sequence
  Description of Artificial Sequence: Synthetic oligonucleotide
  Antisense strand to SEQ ID NO: 240494
ugcuguaaagaauaagacu

SEQ ID NO: 240496 - RNA, 19 nt, Artificial Sequence
  Description of Artificial Sequence: Synthetic oligonucleotide
  Sense strand starting at position 1495 SEQ ID NO: 3095
cccagacuucguuaacuug

SEQ ID NO: 240497 - RNA, 19 nt, Artificial Sequence
  Description of Artificial Sequence: Synthetic oligonucleotide
  Antisense strand to SEQ ID NO: 240496
caaguuaacgaagucuggg

SEQ ID NO: 240498 - RNA, 19 nt, Artificial Sequence
  Description of Artificial Sequence: Synthetic oligonucleotide
  Sense strand starting at position 1606 SEQ ID NO: 3095
cgaccuuguccgaggaguu

SEQ ID NO: 240499 - RNA, 19 nt, Artificial Sequence
  Description of Artificial Sequence: Synthetic oligonucleotide
  Antisense strand to SEQ ID NO: 240498
aacuccucggacaaggucg

SEQ ID NO: 240500 - RNA, 19 nt, Artificial Sequence
  Description of Artificial Sequence: Synthetic oligonucleotide
  Sense strand starting at position 1706 SEQ ID NO: 3095
gaaucucgccuuugggaaa

SEQ ID NO: 240501 - RNA, 19 nt, Artificial Sequence
  Description of Artificial Sequence: Synthetic oligonucleotide
  Antisense strand to SEQ ID NO: 240500
uuucccaaaggcgagauuc

SEQ ID NO: 240502 - RNA, 19 nt, Artificial Sequence
  Description of Artificial Sequence: Synthetic oligonucleotide
  Sense strand starting at position 2533 SEQ ID NO: 3095
uccggaguuccaggagaau

SEQ ID NO: 240503 - RNA, 19 nt, Artificial Sequence
  Description of Artificial Sequence: Synthetic oligonucleotide
  Antisense strand to SEQ ID NO: 240502
auucuccuggaacuccgga

SEQ ID NO: 240504 - RNA, 19 nt, Artificial Sequence
  Description of Artificial Sequence: Synthetic oligonucleotide
  Sense strand starting at position 2636 SEQ ID NO: 3095
caacaagcgcugucuugua

SEQ ID NO: 240505 - RNA, 19 nt, Artificial Sequence
  Description of Artificial Sequence: Synthetic oligonucleotide
  Antisense strand to SEQ ID NO: 240504
uacaagacagcgcuuguug

SEQ ID NO: 240506 - RNA, 19 nt, Artificial Sequence
  Description of Artificial Sequence: Synthetic oligonucleotide
  Sense strand starting at position 2645 SEQ ID NO: 3095
cugucuuguaugggauuaa

SEQ ID NO: 240507 - RNA, 19 nt, Artificial Sequence
  Description of Artificial Sequence: Synthetic oligonucleotide
  Antisense strand to SEQ ID NO: 240506
uuaaucccauacaagacag

SEQ ID NO: 240508 - RNA, 19 nt, Artificial Sequence
  Description of Artificial Sequence: Synthetic oligonucleotide
  Sense strand starting at position 2659 SEQ ID NO: 3095
auuaaucagccuugcagau

SEQ ID NO: 240509 - RNA, 19 nt, Artificial Sequence
  Description of Artificial Sequence: Synthetic oligonucleotide
  Antisense strand to SEQ ID NO: 240508
aucugcaaggcugauuaau

SEQ ID NO: 240510 - RNA, 19 nt, Artificial Sequence
  Description of Artificial Sequence: Synthetic oligonucleotide
  Sense strand starting at position 2802 SEQ ID NO: 3095
cgggaaguucugcaacuua

SEQ ID NO: 240511 - RNA, 19 nt, Artificial Sequence
  Description of Artificial Sequence: Synthetic oligonucleotide
  Antisense strand to SEQ ID NO: 240510
uaaguugcagaacuucccg

SEQ ID NO: 240512 - RNA, 19 nt, Artificial Sequence
  Description of Artificial Sequence: Synthetic oligonucleotide
  Sense strand starting at position 2871 SEQ ID NO: 3095
aauguuagaucguucugag

SEQ ID NO: 240513 - RNA, 19 nt, Artificial Sequence
  Description of Artificial Sequence: Synthetic oligonucleotide
  Antisense strand to SEQ ID NO: 240512
cucagaacgaucuaacauu

SEQ ID NO: 240514 - RNA, 19 nt, Artificial Sequence
  Description of Artificial Sequence: Synthetic oligonucleotide
  Sense strand starting at position 2901 SEQ ID NO: 3095
aucugaugauucccaguca

SEQ ID NO: 240515 - RNA, 19 nt, Artificial Sequence
  Description of Artificial Sequence: Synthetic oligonucleotide
  Antisense strand to SEQ ID NO: 240514
ugacugggaaucaucagau

SEQ ID NO: 240516 - RNA, 19 nt, Artificial Sequence
  Description of Artificial Sequence: Synthetic oligonucleotide
  Sense strand starting at position 3007 SEQ ID NO: 3095
aucccaaaucuguaaaguc

SEQ ID NO: 240517 - RNA, 19 nt, Artificial Sequence
  Description of Artificial Sequence: Synthetic oligonucleotide
  Antisense strand to SEQ ID NO: 240516
gacuuuacagauuugggau

SEQ ID NO: 240518 - RNA, 19 nt, Artificial Sequence
  Description of Artificial Sequence: Synthetic oligonucleotide
  Sense strand starting at position 3158 SEQ ID NO: 3095
uuagacaaguagcugaaau

SEQ ID NO: 240519 - RNA, 19 nt, Artificial Sequence
  Description of Artificial Sequence: Synthetic oligonucleotide
  Antisense strand to SEQ ID NO: 240518
auuucagcuacuugucuaa

SEQ ID NO: 240520 - RNA, 19 nt, Artificial Sequence
  Description of Artificial Sequence: Synthetic oligonucleotide
  Sense strand starting at position 3169 SEQ ID NO: 3095
gcugaaaucccuuacugua

SEQ ID NO: 240521 - RNA, 19 nt, Artificial Sequence
  Description of Artificial Sequence: Synthetic oligonucleotide
  Antisense strand to SEQ ID NO: 240520
uacaguaagggauuucagc

SEQ ID NO: 240522 - RNA, 19 nt, Artificial Sequence
  Description of Artificial Sequence: Synthetic oligonucleotide
  Sense strand starting at position 3311 SEQ ID NO: 3095
ugcuguaaggauugaggaa

SEQ ID NO: 240523 - RNA, 19 nt, Artificial Sequence
  Description of Artificial Sequence: Synthetic oligonucleotide
  Antisense strand to SEQ ID NO: 240522
uuccucaauccuuacagca

SEQ ID NO: 240524 - RNA, 19 nt, Artificial Sequence
  Description of Artificial Sequence: Synthetic oligonucleotide
  Sense strand starting at position 3346 SEQ ID NO: 3095
cgaaucacccauugucuua

SEQ ID NO: 240525 - RNA, 19 nt, Artificial Sequence
  Description of Artificial Sequence: Synthetic oligonucleotide
  Antisense strand to SEQ ID NO: 240524
uaagacaaugggugauucg

SEQ ID NO: 240526 - RNA, 19 nt, Artificial Sequence
  Description of Artificial Sequence: Synthetic oligonucleotide
  Sense strand starting at position 3357 SEQ ID NO: 3095
uugucuuacuacucauaug

SEQ ID NO: 240527 - RNA, 19 nt, Artificial Sequence
  Description of Artificial Sequence: Synthetic oligonucleotide
  Antisense strand to SEQ ID NO: 240526
cauaugaguaguaagacaa

SEQ ID NO: 240528 - RNA, 19 nt, Artificial Sequence
  Description of Artificial Sequence: Synthetic oligonucleotide
  Sense strand starting at position 3382 SEQ ID NO: 3095
uacgguuagccuucgguua

SEQ ID NO: 240529 - RNA, 19 nt, Artificial Sequence
  Description of Artificial Sequence: Synthetic oligonucleotide
  Antisense strand to SEQ ID NO: 240528
uaaccgaaggcuaaccgua

SEQ ID NO: 240530 - RNA, 19 nt, Artificial Sequence
  Description of Artificial Sequence: Synthetic oligonucleotide
  Sense strand starting at position 3386 SEQ ID NO: 3095
guuagccuucgguuauguu

SEQ ID NO: 240531 - RNA, 19 nt, Artificial Sequence
  Description of Artificial Sequence: Synthetic oligonucleotide
  Antisense strand to SEQ ID NO: 240530
aacauaaccgaaggcuaac

SEQ ID NO: 240532 - RNA, 19 nt, Artificial Sequence
  Description of Artificial Sequence: Synthetic oligonucleotide
  Sense strand starting at position 3396 SEQ ID NO: 3095
gguuauguuuccuuacagg

SEQ ID NO: 240533 - RNA, 19 nt, Artificial Sequence
  Description of Artificial Sequence: Synthetic oligonucleotide
  Antisense strand to SEQ ID NO: 240532
ccuguaaggaaacauaacc

SEQ ID NO: 240534 - RNA, 19 nt, Artificial Sequence
  Description of Artificial Sequence: Synthetic oligonucleotide
  Sense strand starting at position 3494 SEQ ID NO: 3095
gaagguauuucuuauggau

SEQ ID NO: 240535 - RNA, 19 nt, Artificial Sequence
  Description of Artificial Sequence: Synthetic oligonucleotide
  Antisense strand to SEQ ID NO: 240534
auccauaagaaauaccuuc

SEQ ID NO: 240536 - RNA, 19 nt, Artificial Sequence
  Description of Artificial Sequence: Synthetic oligonucleotide
  Sense strand starting at position 3627 SEQ ID NO: 3095
augaaugauugagaugaug

SEQ ID NO: 240537 - RNA, 19 nt, Artificial Sequence
  Description of Artificial Sequence: Synthetic oligonucleotide
  Antisense strand to SEQ ID NO: 240536
caucaucucaaucauucau

SEQ ID NO: 240538 - RNA, 19 nt, Artificial Sequence
  Description of Artificial Sequence: Synthetic oligonucleotide
  Sense strand starting at position 3645 SEQ ID NO: 3095
ggauuuccuuugcaugaga

SEQ ID NO: 240539 - RNA, 19 nt, Artificial Sequence
  Description of Artificial Sequence: Synthetic oligonucleotide
  Antisense strand to SEQ ID NO: 240538
ucucaugcaaaggaaaucc

SEQ ID NO: 240540 - RNA, 19 nt, Artificial Sequence
  Description of Artificial Sequence: Synthetic oligonucleotide
  Sense strand starting at position 3648 SEQ ID NO: 3095
uuuccuuugcaugagaagu

SEQ ID NO: 240541 - RNA, 19 nt, Artificial Sequence
  Description of Artificial Sequence: Synthetic oligonucleotide
  Antisense strand to SEQ ID NO: 240540
acuucucaugcaaaggaaa

SEQ ID NO: 240542 - RNA, 19 nt, Artificial Sequence
  Description of Artificial Sequence: Synthetic oligonucleotide
  Sense strand starting at position 3659 SEQ ID NO: 3095
ugagaaguagcaugacaga

SEQ ID NO: 240543 - RNA, 19 nt, Artificial Sequence
  Description of Artificial Sequence: Synthetic oligonucleotide
  Antisense strand to SEQ ID NO: 240542
ucugucaugcuacuucuca

SEQ ID NO: 240544 - RNA, 19 nt, Artificial Sequence
  Description of Artificial Sequence: Synthetic oligonucleotide
  Sense strand starting at position 3664 SEQ ID NO: 3095
aguagcaugacagagcaau

SEQ ID NO: 240545 - RNA, 19 nt, Artificial Sequence
  Description of Artificial Sequence: Synthetic oligonucleotide
  Antisense strand to SEQ ID NO: 240544
auugcucugucaugcuacu

SEQ ID NO: 240546 - RNA, 19 nt, Artificial Sequence
  Description of Artificial Sequence: Synthetic oligonucleotide
  Sense strand starting at position 9 SEQ ID NO: 3096
ggauaucauccuggccaac

SEQ ID NO: 240547 - RNA, 19 nt, Artificial Sequence
  Description of Artificial Sequence: Synthetic oligonucleotide
  Antisense strand to SEQ ID NO: 240546
guuggccaggaugauaucc

SEQ ID NO: 240548 - RNA, 19 nt, Artificial Sequence
  Description of Artificial Sequence: Synthetic oligonucleotide
  Sense strand starting at position 265 SEQ ID NO: 3096
guacaaugaugugcuauaa

SEQ ID NO: 240549 - RNA, 19 nt, Artificial Sequence
  Description of Artificial Sequence: Synthetic oligonucleotide
  Antisense strand to SEQ ID NO: 240548
uuauagcacaucauuguac

SEQ ID NO: 240550 - RNA, 19 nt, Artificial Sequence
  Description of Artificial Sequence: Synthetic oligonucleotide
  Sense strand starting at position 333 SEQ ID NO: 3096
agcaguacagauuaauagu

SEQ ID NO: 240551 - RNA, 19 nt, Artificial Sequence
  Description of Artificial Sequence: Synthetic oligonucleotide
  Antisense strand to SEQ ID NO: 240550
acuauuaaucuguacugcu

SEQ ID NO: 240552 - RNA, 19 nt, Artificial Sequence
  Description of Artificial Sequence: Synthetic oligonucleotide
  Sense strand starting at position 341 SEQ ID NO: 3096
agauuaauagucuggagug

SEQ ID NO: 240553 - RNA, 19 nt, Artificial Sequence
  Description of Artificial Sequence: Synthetic oligonucleotide
  Antisense strand to SEQ ID NO: 240552
cacuccagacuauuaaucu

SEQ ID NO: 240554 - RNA, 19 nt, Artificial Sequence
  Description of Artificial Sequence: Synthetic oligonucleotide
  Sense strand starting at position 346 SEQ ID NO: 3096
aauagucuggagugagaau

SEQ ID NO: 240555 - RNA, 19 nt, Artificial Sequence
  Description of Artificial Sequence: Synthetic oligonucleotide
  Antisense strand to SEQ ID NO: 240554
auucucacuccagacuauu

SEQ ID NO: 240556 - RNA, 19 nt, Artificial Sequence
  Description of Artificial Sequence: Synthetic oligonucleotide
  Sense strand starting at position 355 SEQ ID NO: 3096
gagugagaauuccuggauu

SEQ ID NO: 240557 - RNA, 19 nt, Artificial Sequence
  Description of Artificial Sequence: Synthetic oligonucleotide
  Antisense strand to SEQ ID NO: 240556
aauccaggaauucucacuc

SEQ ID NO: 240558 - RNA, 19 nt, Artificial Sequence
  Description of Artificial Sequence: Synthetic oligonucleotide
  Sense strand starting at position 357 SEQ ID NO: 3096
gugagaauuccuggauucu

SEQ ID NO: 240559 - RNA, 19 nt, Artificial Sequence
  Description of Artificial Sequence: Synthetic oligonucleotide
  Antisense strand to SEQ ID NO: 240558
agaauccaggaauucucac

SEQ ID NO: 240560 - RNA, 19 nt, Artificial Sequence
  Description of Artificial Sequence: Synthetic oligonucleotide
  Sense strand starting at position 400 SEQ ID NO: 3096
uaguaagcucagggaacua

SEQ ID NO: 240561 - RNA, 19 nt, Artificial Sequence
  Description of Artificial Sequence: Synthetic oligonucleotide
  Antisense strand to SEQ ID NO: 240560
uaguucccugagcuuacua

SEQ ID NO: 240562 - RNA, 19 nt, Artificial Sequence
  Description of Artificial Sequence: Synthetic oligonucleotide
  Sense strand starting at position 468 SEQ ID NO: 3096
agaauuuacuucgaggaau

SEQ ID NO: 240563 - RNA, 19 nt, Artificial Sequence
  Description of Artificial Sequence: Synthetic oligonucleotide
  Antisense strand to SEQ ID NO: 240562
auuccucgaaguaaauucu

SEQ ID NO: 240564 - RNA, 19 nt, Artificial Sequence
  Description of Artificial Sequence: Synthetic oligonucleotide
  Sense strand starting at position 476 SEQ ID NO: 3096
cuucgaggaauguaagcaa

SEQ ID NO: 240565 - RNA, 19 nt, Artificial Sequence
  Description of Artificial Sequence: Synthetic oligonucleotide
  Antisense strand to SEQ ID NO: 240564
uugcuuacauuccucgaag

SEQ ID NO: 240566 - RNA, 19 nt, Artificial Sequence
  Description of Artificial Sequence: Synthetic oligonucleotide
  Sense strand starting at position 479 SEQ ID NO: 3096
cgaggaauguaagcaacaa

SEQ ID NO: 240567 - RNA, 19 nt, Artificial Sequence
  Description of Artificial Sequence: Synthetic oligonucleotide
  Antisense strand to SEQ ID NO: 240566
uuguugcuuacauuccucg

SEQ ID NO: 240568 - RNA, 19 nt, Artificial Sequence
  Description of Artificial Sequence: Synthetic oligonucleotide
  Sense strand starting at position 532 SEQ ID NO: 3096
ugcacaauucuauaaguag

SEQ ID NO: 240569 - RNA, 19 nt, Artificial Sequence
  Description of Artificial Sequence: Synthetic oligonucleotide
  Antisense strand to SEQ ID NO: 240568
cuacuuauagaauugugca

SEQ ID NO: 240570 - RNA, 19 nt, Artificial Sequence
  Description of Artificial Sequence: Synthetic oligonucleotide
  Sense strand starting at position 535 SEQ ID NO: 3096
acaauucuauaaguaggua

SEQ ID NO: 240571 - RNA, 19 nt, Artificial Sequence
  Description of Artificial Sequence: Synthetic oligonucleotide
  Antisense strand to SEQ ID NO: 240570
uaccuacuuauagaauugu

SEQ ID NO: 240572 - RNA, 19 nt, Artificial Sequence
  Description of Artificial Sequence: Synthetic oligonucleotide
  Sense strand starting at position 740 SEQ ID NO: 3096
aucuguagagcucacacaa

SEQ ID NO: 240573 - RNA, 19 nt, Artificial Sequence
  Description of Artificial Sequence: Synthetic oligonucleotide
  Antisense strand to SEQ ID NO: 240572
uugugugagcucuacagau

SEQ ID NO: 240574 - RNA, 19 nt, Artificial Sequence
  Description of Artificial Sequence: Synthetic oligonucleotide
  Sense strand starting at position 803 SEQ ID NO: 3096
uagagagacuaugaggaau

SEQ ID NO: 240575 - RNA, 19 nt, Artificial Sequence
  Description of Artificial Sequence: Synthetic oligonucleotide
  Antisense strand to SEQ ID NO: 240574
auuccucauagucucucua

SEQ ID NO: 240576 - RNA, 19 nt, Artificial Sequence
  Description of Artificial Sequence: Synthetic oligonucleotide
  Sense strand starting at position 814 SEQ ID NO: 3096
ugaggaaugcccuguaaag

SEQ ID NO: 240577 - RNA, 19 nt, Artificial Sequence
  Description of Artificial Sequence: Synthetic oligonucleotide
  Antisense strand to SEQ ID NO: 240576
cuuuacagggcauuccuca

SEQ ID NO: 240578 - RNA, 19 nt, Artificial Sequence
  Description of Artificial Sequence: Synthetic oligonucleotide
  Sense strand starting at position 1079 SEQ ID NO: 3096
ggaagcugcccggaacuau

SEQ ID NO: 240579 - RNA, 19 nt, Artificial Sequence
  Description of Artificial Sequence: Synthetic oligonucleotide
  Antisense strand to SEQ ID NO: 240578
auaguuccgggcagcuucc

SEQ ID NO: 240580 - RNA, 19 nt, Artificial Sequence
  Description of Artificial Sequence: Synthetic oligonucleotide
  Sense strand starting at position 1257 SEQ ID NO: 3096
cuugaagggucucuagaau

SEQ ID NO: 240581 - RNA, 19 nt, Artificial Sequence
  Description of Artificial Sequence: Synthetic oligonucleotide
  Antisense strand to SEQ ID NO: 240580
auucuagagacccuucaag

SEQ ID NO: 240582 - RNA, 19 nt, Artificial Sequence
  Description of Artificial Sequence: Synthetic oligonucleotide
  Sense strand starting at position 1333 SEQ ID NO: 3096
ggaacaaagucuuucucaa

SEQ ID NO: 240583 - RNA, 19 nt, Artificial Sequence
  Description of Artificial Sequence: Synthetic oligonucleotide
  Antisense strand to SEQ ID NO: 240582
uugagaaagacuuuguucc

SEQ ID NO: 240584 - RNA, 19 nt, Artificial Sequence
  Description of Artificial Sequence: Synthetic oligonucleotide
  Sense strand starting at position 1360 SEQ ID NO: 3096
uaaauacgauccucggaau

SEQ ID NO: 240585 - RNA, 19 nt, Artificial Sequence
  Description of Artificial Sequence: Synthetic oligonucleotide
  Antisense strand to SEQ ID NO: 240584
auuccgaggaucguauuua

SEQ ID NO: 240586 - RNA, 19 nt, Artificial Sequence
  Description of Artificial Sequence: Synthetic oligonucleotide
  Sense strand starting at position 1361 SEQ ID NO: 3096
aaauacgauccucggaaua

SEQ ID NO: 240587 - RNA, 19 nt, Artificial Sequence
  Description of Artificial Sequence: Synthetic oligonucleotide
  Antisense strand to SEQ ID NO: 240586
uauuccgaggaucguauuu

SEQ ID NO: 240588 - RNA, 19 nt, Artificial Sequence
  Description of Artificial Sequence: Synthetic oligonucleotide
  Sense strand starting at position 1366 SEQ ID NO: 3096
cgauccucggaauacuaaa

SEQ ID NO: 240589 - RNA, 19 nt, Artificial Sequence
  Description of Artificial Sequence: Synthetic oligonucleotide
  Antisense strand to SEQ ID NO: 240588
uuuaguauuccgaggaucg

SEQ ID NO: 240590 - RNA, 19 nt, Artificial Sequence
  Description of Artificial Sequence: Synthetic oligonucleotide
  Sense strand starting at position 1374 SEQ ID NO: 3096
ggaauacuaaagugugaca

SEQ ID NO: 240591 - RNA, 19 nt, Artificial Sequence
  Description of Artificial Sequence: Synthetic oligonucleotide
  Antisense strand to SEQ ID NO: 240590
ugucacacuuuaguauucc

SEQ ID NO: 240592 - RNA, 19 nt, Artificial Sequence
  Description of Artificial Sequence: Synthetic oligonucleotide
  Sense strand starting at position 1376 SEQ ID NO: 3096
aauacuaaagugugacaga

SEQ ID NO: 240593 - RNA, 19 nt, Artificial Sequence
  Description of Artificial Sequence: Synthetic oligonucleotide
  Antisense strand to SEQ ID NO: 240592
ucugucacacuuuaguauu

SEQ ID NO: 240594 - RNA, 19 nt, Artificial Sequence
  Description of Artificial Sequence: Synthetic oligonucleotide
  Sense strand starting at position 1411 SEQ ID NO: 3096
gaagucagucgagauccaa

SEQ ID NO: 240595 - RNA, 19 nt, Artificial Sequence
  Description of Artificial Sequence: Synthetic oligonucleotide
  Antisense strand to SEQ ID NO: 240594
uuggaucucgacugacuuc

SEQ ID NO: 240596 - RNA, 19 nt, Artificial Sequence
  Description of Artificial Sequence: Synthetic oligonucleotide
  Sense strand starting at position 1469 SEQ ID NO: 3096
cucagaaguugacuguagu

SEQ ID NO: 240597 - RNA, 19 nt, Artificial Sequence
  Description of Artificial Sequence: Synthetic oligonucleotide
  Antisense strand to SEQ ID NO: 240596
acuacagucaacuucugag

SEQ ID NO: 240598 - RNA, 19 nt, Artificial Sequence
  Description of Artificial Sequence: Synthetic oligonucleotide
  Sense strand starting at position 2035 SEQ ID NO: 3096
acguuagccaauuaaagga

SEQ ID NO: 240599 - RNA, 19 nt, Artificial Sequence
  Description of Artificial Sequence: Synthetic oligonucleotide
  Antisense strand to SEQ ID NO: 240598
uccuuuaauuggcuaacgu

SEQ ID NO: 240600 - RNA, 19 nt, Artificial Sequence
  Description of Artificial Sequence: Synthetic oligonucleotide
  Sense strand starting at position 2096 SEQ ID NO: 3096
gggcuaacgccgagaaguc

SEQ ID NO: 240601 - RNA, 19 nt, Artificial Sequence
  Description of Artificial Sequence: Synthetic oligonucleotide
  Antisense strand to SEQ ID NO: 240600
gacuucucggcguuagccc

SEQ ID NO: 240602 - RNA, 19 nt, Artificial Sequence
  Description of Artificial Sequence: Synthetic oligonucleotide
  Sense strand starting at position 2211 SEQ ID NO: 3096
gcucucuggcccuaggaaa

SEQ ID NO: 240603 - RNA, 19 nt, Artificial Sequence
  Description of Artificial Sequence: Synthetic oligonucleotide
  Antisense strand to SEQ ID NO: 240602
uuuccuagggccagagagc

SEQ ID NO: 240604 - RNA, 19 nt, Artificial Sequence
  Description of Artificial Sequence: Synthetic oligonucleotide
  Sense strand starting at position 2391 SEQ ID NO: 3096
aaauguagagguugaguuu

SEQ ID NO: 240605 - RNA, 19 nt, Artificial Sequence
  Description of Artificial Sequence: Synthetic oligonucleotide
  Antisense strand to SEQ ID NO: 240604
aaacucaaccucuacauuu

SEQ ID NO: 240606 - RNA, 19 nt, Artificial Sequence
  Description of Artificial Sequence: Synthetic oligonucleotide
  Sense strand starting at position 2500 SEQ ID NO: 3096
uaacguauacaguaugaua

SEQ ID NO: 240607 - RNA, 19 nt, Artificial Sequence
  Description of Artificial Sequence: Synthetic oligonucleotide
  Antisense strand to SEQ ID NO: 240606
uaucauacuguauacguua

SEQ ID NO: 240608 - RNA, 19 nt, Artificial Sequence
  Description of Artificial Sequence: Synthetic oligonucleotide
  Sense strand starting at position 2502 SEQ ID NO: 3096
acguauacaguaugauauu

SEQ ID NO: 240609 - RNA, 19 nt, Artificial Sequence
  Description of Artificial Sequence: Synthetic oligonucleotide
  Antisense strand to SEQ ID NO: 240608
aauaucauacuguauacgu

SEQ ID NO: 240610 - RNA, 19 nt, Artificial Sequence
  Description of Artificial Sequence: Synthetic oligonucleotide
  Sense strand starting at position 2982 SEQ ID NO: 3096
uaggccuuguuaguauuua

SEQ ID NO: 240611 - RNA, 19 nt, Artificial Sequence
  Description of Artificial Sequence: Synthetic oligonucleotide
  Antisense strand to SEQ ID NO: 240610
uaaauacuaacaaggccua

SEQ ID NO: 240612 - RNA, 19 nt, Artificial Sequence
  Description of Artificial Sequence: Synthetic oligonucleotide
  Sense strand starting at position 2994 SEQ ID NO: 3096
guauuuaguagcuguagga

SEQ ID NO: 240613 - RNA, 19 nt, Artificial Sequence
  Description of Artificial Sequence: Synthetic oligonucleotide
  Antisense strand to SEQ ID NO: 240612
uccuacagcuacuaaauac

SEQ ID NO: 240614 - RNA, 19 nt, Artificial Sequence
  Description of Artificial Sequence: Synthetic oligonucleotide
  Sense strand starting at position 3062 SEQ ID NO: 3096
ccacaauguuggcuauaca

SEQ ID NO: 240615 - RNA, 19 nt, Artificial Sequence
  Description of Artificial Sequence: Synthetic oligonucleotide
  Antisense strand to SEQ ID NO: 240614
uguauagccaacauugugg

SEQ ID NO: 240616 - RNA, 19 nt, Artificial Sequence
  Description of Artificial Sequence: Synthetic oligonucleotide
  Sense strand starting at position 3070 SEQ ID NO: 3096
uuggcuauacaccagaauu

SEQ ID NO: 240617 - RNA, 19 nt, Artificial Sequence
  Description of Artificial Sequence: Synthetic oligonucleotide
  Antisense strand to SEQ ID NO: 240616
aauucugguguauagccaa

SEQ ID NO: 240618 - RNA, 19 nt, Artificial Sequence
  Description of Artificial Sequence: Synthetic oligonucleotide
  Sense strand starting at position 3276 SEQ ID NO: 3096
agauacucagcccaguauu

SEQ ID NO: 240619 - RNA, 19 nt, Artificial Sequence
  Description of Artificial Sequence: Synthetic oligonucleotide
  Antisense strand to SEQ ID NO: 240618
aauacugggcugaguaucu

SEQ ID NO: 240620 - RNA, 19 nt, Artificial Sequence
  Description of Artificial Sequence: Synthetic oligonucleotide
  Sense strand starting at position 3312 SEQ ID NO: 3096
agagauggcuuuccugaag

SEQ ID NO: 240621 - RNA, 19 nt, Artificial Sequence
  Description of Artificial Sequence: Synthetic oligonucleotide
  Antisense strand to SEQ ID NO: 240620
cuucaggaaagccaucucu

SEQ ID NO: 240622 - RNA, 19 nt, Artificial Sequence
  Description of Artificial Sequence: Synthetic oligonucleotide
  Sense strand starting at position 3351 SEQ ID NO: 3096
ugagaaugcccagauccuu

SEQ ID NO: 240623 - RNA, 19 nt, Artificial Sequence
  Description of Artificial Sequence: Synthetic oligonucleotide
  Antisense strand to SEQ ID NO: 240622
aaggaucugggcauucuca

SEQ ID NO: 240624 - RNA, 19 nt, Artificial Sequence
  Description of Artificial Sequence: Synthetic oligonucleotide
  Sense strand starting at position 3647 SEQ ID NO: 3096
gauuacagucgugauccca

SEQ ID NO: 240625 - RNA, 19 nt, Artificial Sequence
  Description of Artificial Sequence: Synthetic oligonucleotide
  Antisense strand to SEQ ID NO: 240624
ugggaucacgacuguaauc

SEQ ID NO: 240626 - RNA, 19 nt, Artificial Sequence
  Description of Artificial Sequence: Synthetic oligonucleotide
  Sense strand starting at position 161 SEQ ID NO: 3097
guagaauaucugggaaagc

SEQ ID NO: 240627 - RNA, 19 nt, Artificial Sequence
  Description of Artificial Sequence: Synthetic oligonucleotide
  Antisense strand to SEQ ID NO: 240626
gcuuucccagauauucuac

SEQ ID NO: 240628 - RNA, 19 nt, Artificial Sequence
  Description of Artificial Sequence: Synthetic oligonucleotide
  Sense strand starting at position 170 SEQ ID NO: 3097
cugggaaagcccgaucagu

SEQ ID NO: 240629 - RNA, 19 nt, Artificial Sequence
  Description of Artificial Sequence: Synthetic oligonucleotide
  Antisense strand to SEQ ID NO: 240628
acugaucgggcuuucccag

SEQ ID NO: 240630 - RNA, 19 nt, Artificial Sequence
  Description of Artificial Sequence: Synthetic oligonucleotide
  Sense strand starting at position 344 SEQ ID NO: 3097
uugccauaguuacugcaaa

SEQ ID NO: 240631 - RNA, 19 nt, Artificial Sequence
  Description of Artificial Sequence: Synthetic oligonucleotide
  Antisense strand to SEQ ID NO: 240630
uuugcaguaacuauggcaa

SEQ ID NO: 240632 - RNA, 19 nt, Artificial Sequence
  Description of Artificial Sequence: Synthetic oligonucleotide
  Sense strand starting at position 396 SEQ ID NO: 3097
uguaguguauauuugugua

SEQ ID NO: 240633 - RNA, 19 nt, Artificial Sequence
  Description of Artificial Sequence: Synthetic oligonucleotide
  Antisense strand to SEQ ID NO: 240632
uacacaaauauacacuaca

SEQ ID NO: 240634 - RNA, 19 nt, Artificial Sequence
  Description of Artificial Sequence: Synthetic oligonucleotide
  Sense strand starting at position 491 SEQ ID NO: 3097
uggcuagguccugaaacca

SEQ ID NO: 240635 - RNA, 19 nt, Artificial Sequence
  Description of Artificial Sequence: Synthetic oligonucleotide
  Antisense strand to SEQ ID NO: 240634
ugguuucaggaccuagcca

SEQ ID NO: 240636 - RNA, 19 nt, Artificial Sequence
  Description of Artificial Sequence: Synthetic oligonucleotide
  Sense strand starting at position 578 SEQ ID NO: 3097
ggcaaccacgaucauauua

SEQ ID NO: 240637 - RNA, 19 nt, Artificial Sequence
  Description of Artificial Sequence: Synthetic oligonucleotide
  Antisense strand to SEQ ID NO: 240636
uaauaugaucgugguugcc

SEQ ID NO: 240638 - RNA, 19 nt, Artificial Sequence
  Description of Artificial Sequence: Synthetic oligonucleotide
  Sense strand starting at position 702 SEQ ID NO: 3097
uuaacugcuucggugauuu

SEQ ID NO: 240639 - RNA, 19 nt, Artificial Sequence
  Description of Artificial Sequence: Synthetic oligonucleotide
  Antisense strand to SEQ ID NO: 240638
aaaucaccgaagcaguuaa

SEQ ID NO: 240640 - RNA, 19 nt, Artificial Sequence
  Description of Artificial Sequence: Synthetic oligonucleotide
  Sense strand starting at position 713 SEQ ID NO: 3097
ggugauuugugggaauaaa

SEQ ID NO: 240641 - RNA, 19 nt, Artificial Sequence
  Description of Artificial Sequence: Synthetic oligonucleotide
  Antisense strand to SEQ ID NO: 240640
uuuauucccacaaaucacc

SEQ ID NO: 240642 - RNA, 19 nt, Artificial Sequence
  Description of Artificial Sequence: Synthetic oligonucleotide
  Sense strand starting at position 825 SEQ ID NO: 3097
gcaauuagguaggucucua

SEQ ID NO: 240643 - RNA, 19 nt, Artificial Sequence
  Description of Artificial Sequence: Synthetic oligonucleotide
  Antisense strand to SEQ ID NO: 240642
uagagaccuaccuaauugc

SEQ ID NO: 240644 - RNA, 19 nt, Artificial Sequence
  Description of Artificial Sequence: Synthetic oligonucleotide
  Sense strand starting at position 829 SEQ ID NO: 3097
uuagguaggucucuacagu

SEQ ID NO: 240645 - RNA, 19 nt, Artificial Sequence
  Description of Artificial Sequence: Synthetic oligonucleotide
  Antisense strand to SEQ ID NO: 240644
acuguagagaccuaccuaa

SEQ ID NO: 240646 - RNA, 19 nt, Artificial Sequence
  Description of Artificial Sequence: Synthetic oligonucleotide
  Sense strand starting at position 866 SEQ ID NO: 3097
ugaagaaagucauuaguuu

SEQ ID NO: 240647 - RNA, 19 nt, Artificial Sequence
  Description of Artificial Sequence: Synthetic oligonucleotide
  Antisense strand to SEQ ID NO: 240646
aaacuaaugacuuucuuca

SEQ ID NO: 240648 - RNA, 19 nt, Artificial Sequence
  Description of Artificial Sequence: Synthetic oligonucleotide
  Sense strand starting at position 898 SEQ ID NO: 3097
guuuaauuucugcaacgcu

SEQ ID NO: 240649 - RNA, 19 nt, Artificial Sequence
  Description of Artificial Sequence: Synthetic oligonucleotide
  Antisense strand to SEQ ID NO: 240648
agcguugcagaaauuaaac

SEQ ID NO: 240650 - RNA, 19 nt, Artificial Sequence
  Description of Artificial Sequence: Synthetic oligonucleotide
  Sense strand starting at position 906 SEQ ID NO: 3097
ucugcaacgcuuuauuuga

SEQ ID NO: 240651 - RNA, 19 nt, Artificial Sequence
  Description of Artificial Sequence: Synthetic oligonucleotide
  Antisense strand to SEQ ID NO: 240650
ucaaauaaagcguugcaga

SEQ ID NO: 240652 - RNA, 19 nt, Artificial Sequence
  Description of Artificial Sequence: Synthetic oligonucleotide
  Sense strand starting at position 908 SEQ ID NO: 3097
ugcaacgcuuuauuugaaa

SEQ ID NO: 240653 - RNA, 19 nt, Artificial Sequence
  Description of Artificial Sequence: Synthetic oligonucleotide
  Antisense strand to SEQ ID NO: 240652
uuucaaauaaagcguugca

SEQ ID NO: 240654 - RNA, 19 nt, Artificial Sequence
  Description of Artificial Sequence: Synthetic oligonucleotide
  Sense strand starting at position 1004 SEQ ID NO: 3097
uuugaugugcauuaaauga

SEQ ID NO: 240655 - RNA, 19 nt, Artificial Sequence
  Description of Artificial Sequence: Synthetic oligonucleotide
  Antisense strand to SEQ ID NO: 240654
ucauuuaaugcacaucaaa

SEQ ID NO: 240656 - RNA, 19 nt, Artificial Sequence
  Description of Artificial Sequence: Synthetic oligonucleotide
  Sense strand starting at position 1011 SEQ ID NO: 3097
ugcauuaaaugaguacacu

SEQ ID NO: 240657 - RNA, 19 nt, Artificial Sequence
  Description of Artificial Sequence: Synthetic oligonucleotide
  Antisense strand to SEQ ID NO: 240656
aguguacucauuuaaugca

SEQ ID NO: 240658 - RNA, 19 nt, Artificial Sequence
  Description of Artificial Sequence: Synthetic oligonucleotide
  Sense strand starting at position 1065 SEQ ID NO: 3097
ggucuccuccuauaacagu

SEQ ID NO: 240659 - RNA, 19 nt, Artificial Sequence
  Description of Artificial Sequence: Synthetic oligonucleotide
  Antisense strand to SEQ ID NO: 240658
acuguuauaggaggagacc

SEQ ID NO: 240660 - RNA, 19 nt, Artificial Sequence
  Description of Artificial Sequence: Synthetic oligonucleotide
  Sense strand starting at position 1071 SEQ ID NO: 3097
cuccuauaacagugucaaa

SEQ ID NO: 240661 - RNA, 19 nt, Artificial Sequence
  Description of Artificial Sequence: Synthetic oligonucleotide
  Antisense strand to SEQ ID NO: 240660
uuugacacuguuauaggag

SEQ ID NO: 240662 - RNA, 19 nt, Artificial Sequence
  Description of Artificial Sequence: Synthetic oligonucleotide
  Sense strand starting at position 1099 SEQ ID NO: 3097
gcucaauguaaauacgaga

SEQ ID NO: 240663 - RNA, 19 nt, Artificial Sequence
  Description of Artificial Sequence: Synthetic oligonucleotide
  Antisense strand to SEQ ID NO: 240662
ucucguauuuacauugagc

SEQ ID NO: 240664 - RNA, 19 nt, Artificial Sequence
  Description of Artificial Sequence: Synthetic oligonucleotide
  Sense strand starting at position 1127 SEQ ID NO: 3097
uaugauuccgugguguguu

SEQ ID NO: 240665 - RNA, 19 nt, Artificial Sequence
  Description of Artificial Sequence: Synthetic oligonucleotide
  Antisense strand to SEQ ID NO: 240664
aacacaccacggaaucaua

SEQ ID NO: 240666 - RNA, 19 nt, Artificial Sequence
  Description of Artificial Sequence: Synthetic oligonucleotide
  Sense strand starting at position 2201 SEQ ID NO: 3097
uaaugaagagcucgucaau

SEQ ID NO: 240667 - RNA, 19 nt, Artificial Sequence
  Description of Artificial Sequence: Synthetic oligonucleotide
  Antisense strand to SEQ ID NO: 240666
auugacgagcucuucauua

SEQ ID NO: 240668 - RNA, 19 nt, Artificial Sequence
  Description of Artificial Sequence: Synthetic oligonucleotide
  Sense strand starting at position 2204 SEQ ID NO: 3097
ugaagagcucgucaauuac

SEQ ID NO: 240669 - RNA, 19 nt, Artificial Sequence
  Description of Artificial Sequence: Synthetic oligonucleotide
  Antisense strand to SEQ ID NO: 240668
guaauugacgagcucuuca

SEQ ID NO: 240670 - RNA, 19 nt, Artificial Sequence
  Description of Artificial Sequence: Synthetic oligonucleotide
  Sense strand starting at position 2481 SEQ ID NO: 3097
ggugcuucgcgguugagga

SEQ ID NO: 240671 - RNA, 19 nt, Artificial Sequence
  Description of Artificial Sequence: Synthetic oligonucleotide
  Antisense strand to SEQ ID NO: 240670
uccucaaccgcgaagcacc

SEQ ID NO: 240672 - RNA, 19 nt, Artificial Sequence
  Description of Artificial Sequence: Synthetic oligonucleotide
  Sense strand starting at position 2597 SEQ ID NO: 3097
gcaugucugcgagccuaau

SEQ ID NO: 240673 - RNA, 19 nt, Artificial Sequence
  Description of Artificial Sequence: Synthetic oligonucleotide
  Antisense strand to SEQ ID NO: 240672
auuaggcucgcagacaugc

SEQ ID NO: 240674 - RNA, 19 nt, Artificial Sequence
  Description of Artificial Sequence: Synthetic oligonucleotide
  Sense strand starting at position 2608 SEQ ID NO: 3097
agccuaauucgcgcuuaga

SEQ ID NO: 240675 - RNA, 19 nt, Artificial Sequence
  Description of Artificial Sequence: Synthetic oligonucleotide
  Antisense strand to SEQ ID NO: 240674
ucuaagcgcgaauuaggcu

SEQ ID NO: 240676 - RNA, 19 nt, Artificial Sequence
  Description of Artificial Sequence: Synthetic oligonucleotide
  Sense strand starting at position 2609 SEQ ID NO: 3097
gccuaauucgcgcuuagag

SEQ ID NO: 240677 - RNA, 19 nt, Artificial Sequence
  Description of Artificial Sequence: Synthetic oligonucleotide
  Antisense strand to SEQ ID NO: 240676
cucuaagcgcgaauuaggc

SEQ ID NO: 240678 - RNA, 19 nt, Artificial Sequence
  Description of Artificial Sequence: Synthetic oligonucleotide
  Sense strand starting at position 3096 SEQ ID NO: 3097
gguggugauguuuccguuu

SEQ ID NO: 240679 - RNA, 19 nt, Artificial Sequence
  Description of Artificial Sequence: Synthetic oligonucleotide
  Antisense strand to SEQ ID NO: 240678
aaacggaaacaucaccacc

SEQ ID NO: 240680 - RNA, 19 nt, Artificial Sequence
  Description of Artificial Sequence: Synthetic oligonucleotide
  Sense strand starting at position 3111 SEQ ID NO: 3097
guuucuuuccaacaggagu

SEQ ID NO: 240681 - RNA, 19 nt, Artificial Sequence
  Description of Artificial Sequence: Synthetic oligonucleotide
  Antisense strand to SEQ ID NO: 240680
acuccuguuggaaagaaac

SEQ ID NO: 240682 - RNA, 19 nt, Artificial Sequence
  Description of Artificial Sequence: Synthetic oligonucleotide
  Sense strand starting at position 3353 SEQ ID NO: 3097
gaaacuaguuauguggaua

SEQ ID NO: 240683 - RNA, 19 nt, Artificial Sequence
  Description of Artificial Sequence: Synthetic oligonucleotide
  Antisense strand to SEQ ID NO: 240682
uauccacauaacuaguuuc

SEQ ID NO: 240684 - RNA, 19 nt, Artificial Sequence
  Description of Artificial Sequence: Synthetic oligonucleotide
  Sense strand starting at position 3438 SEQ ID NO: 3097
aaacuuuggucauugcaag

SEQ ID NO: 240685 - RNA, 19 nt, Artificial Sequence
  Description of Artificial Sequence: Synthetic oligonucleotide
  Antisense strand to SEQ ID NO: 240684
cuugcaaugaccaaaguuu

SEQ ID NO: 240686 - RNA, 19 nt, Artificial Sequence
  Description of Artificial Sequence: Synthetic oligonucleotide
  Sense strand starting at position 3439 SEQ ID NO: 3097
aacuuuggucauugcaaga

SEQ ID NO: 240687 - RNA, 19 nt, Artificial Sequence
  Description of Artificial Sequence: Synthetic oligonucleotide
  Antisense strand to SEQ ID NO: 240686
ucuugcaaugaccaaaguu

SEQ ID NO: 240688 - RNA, 19 nt, Artificial Sequence
  Description of Artificial Sequence: Synthetic oligonucleotide
  Sense strand starting at position 3452 SEQ ID NO: 3097
gcaagaaaugcuuaggcua

SEQ ID NO: 240689 - RNA, 19 nt, Artificial Sequence
  Description of Artificial Sequence: Synthetic oligonucleotide
  Antisense strand to SEQ ID NO: 240688
uagccuaagcauuucuugc

SEQ ID NO: 240690 - RNA, 19 nt, Artificial Sequence
  Description of Artificial Sequence: Synthetic oligonucleotide
  Sense strand starting at position 3465 SEQ ID NO: 3097
aggcuaaacuuagaaggaa

SEQ ID NO: 240691 - RNA, 19 nt, Artificial Sequence
  Description of Artificial Sequence: Synthetic oligonucleotide
  Antisense strand to SEQ ID NO: 240690
uuccuucuaaguuuagccu

SEQ ID NO: 240692 - RNA, 19 nt, Artificial Sequence
  Description of Artificial Sequence: Synthetic oligonucleotide
  Sense strand starting at position 3487 SEQ ID NO: 3097
aauggugaauuagagaacu

SEQ ID NO: 240693 - RNA, 19 nt, Artificial Sequence
  Description of Artificial Sequence: Synthetic oligonucleotide
  Antisense strand to SEQ ID NO: 240692
aguucucuaauucaccauu

SEQ ID NO: 240694 - RNA, 19 nt, Artificial Sequence
  Description of Artificial Sequence: Synthetic oligonucleotide
  Sense strand starting at position 3552 SEQ ID NO: 3097
uggagacuuggcugcugau

SEQ ID NO: 240695 - RNA, 19 nt, Artificial Sequence
  Description of Artificial Sequence: Synthetic oligonucleotide
  Antisense strand to SEQ ID NO: 240694
aucagcagccaagucucca

SEQ ID NO: 240696 - RNA, 19 nt, Artificial Sequence
  Description of Artificial Sequence: Synthetic oligonucleotide
  Sense strand starting at position 3643 SEQ ID NO: 3097
ucaguaucauuugacagga

SEQ ID NO: 240697 - RNA, 19 nt, Artificial Sequence
  Description of Artificial Sequence: Synthetic oligonucleotide
  Antisense strand to SEQ ID NO: 240696
uccugucaaaugauacuga

SEQ ID NO: 240698 - RNA, 19 nt, Artificial Sequence
  Description of Artificial Sequence: Synthetic oligonucleotide
  Sense strand starting at position 3645 SEQ ID NO: 3097
aguaucauuugacaggauu

SEQ ID NO: 240699 - RNA, 19 nt, Artificial Sequence
  Description of Artificial Sequence: Synthetic oligonucleotide
  Antisense strand to SEQ ID NO: 240698
aauccugucaaaugauacu

SEQ ID NO: 240700 - RNA, 19 nt, Artificial Sequence
  Description of Artificial Sequence: Synthetic oligonucleotide
  Sense strand starting at position 3767 SEQ ID NO: 3097
aaacgagcucugggaucua

SEQ ID NO: 240701 - RNA, 19 nt, Artificial Sequence
  Description of Artificial Sequence: Synthetic oligonucleotide
  Antisense strand to SEQ ID NO: 240700
uagaucccagagcucguuu

SEQ ID NO: 240702 - RNA, 19 nt, Artificial Sequence
  Description of Artificial Sequence: Synthetic oligonucleotide
  Sense strand starting at position 3778 SEQ ID NO: 3097
gggaucuaaugcuugcaga

SEQ ID NO: 240703 - RNA, 19 nt, Artificial Sequence
  Description of Artificial Sequence: Synthetic oligonucleotide
  Antisense strand to SEQ ID NO: 240702
ucugcaagcauuagauccc

SEQ ID NO: 240704 - RNA, 19 nt, Artificial Sequence
  Description of Artificial Sequence: Synthetic oligonucleotide
  Sense strand starting at position 3779 SEQ ID NO: 3097
ggaucuaaugcuugcagag

SEQ ID NO: 240705 - RNA, 19 nt, Artificial Sequence
  Description of Artificial Sequence: Synthetic oligonucleotide
  Antisense strand to SEQ ID NO: 240704
cucugcaagcauuagaucc

SEQ ID NO: 240706 - RNA, 19 nt, Artificial Sequence
  Description of Artificial Sequence: Synthetic oligonucleotide
  Sense strand starting at position 42 SEQ ID NO: 3098
gcuaacaucggguaucuca

SEQ ID NO: 240707 - RNA, 19 nt, Artificial Sequence
  Description of Artificial Sequence: Synthetic oligonucleotide
  Antisense strand to SEQ ID NO: 240706
ugagauacccgauguuagc

SEQ ID NO: 240708 - RNA, 19 nt, Artificial Sequence
  Description of Artificial Sequence: Synthetic oligonucleotide
  Sense strand starting at position 57 SEQ ID NO: 3098
cucagauucucacuggauc

SEQ ID NO: 240709 - RNA, 19 nt, Artificial Sequence
  Description of Artificial Sequence: Synthetic oligonucleotide
  Antisense strand to SEQ ID NO: 240708
gauccagugagaaucugag

SEQ ID NO: 240710 - RNA, 19 nt, Artificial Sequence
  Description of Artificial Sequence: Synthetic oligonucleotide
  Sense strand starting at position 58 SEQ ID NO: 3098
ucagauucucacuggaucu

SEQ ID NO: 240711 - RNA, 19 nt, Artificial Sequence
  Description of Artificial Sequence: Synthetic oligonucleotide
  Antisense strand to SEQ ID NO: 240710
agauccagugagaaucuga

SEQ ID NO: 240712 - RNA, 19 nt, Artificial Sequence
  Description of Artificial Sequence: Synthetic oligonucleotide
  Sense strand starting at position 246 SEQ ID NO: 3098
ccuuucuggccauggagaa

SEQ ID NO: 240713 - RNA, 19 nt, Artificial Sequence
  Description of Artificial Sequence: Synthetic oligonucleotide
  Antisense strand to SEQ ID NO: 240712
uucuccauggccagaaagg

SEQ ID NO: 240714 - RNA, 19 nt, Artificial Sequence
  Description of Artificial Sequence: Synthetic oligonucleotide
  Sense strand starting at position 495 SEQ ID NO: 3098
ggucacaucucagaauuua

SEQ ID NO: 240715 - RNA, 19 nt, Artificial Sequence
  Description of Artificial Sequence: Synthetic oligonucleotide
  Antisense strand to SEQ ID NO: 240714
uaaauucugagaugugacc

SEQ ID NO: 240716 - RNA, 19 nt, Artificial Sequence
  Description of Artificial Sequence: Synthetic oligonucleotide
  Sense strand starting at position 574 SEQ ID NO: 3098
cccuaauacguguagagca

SEQ ID NO: 240717 - RNA, 19 nt, Artificial Sequence
  Description of Artificial Sequence: Synthetic oligonucleotide
  Antisense strand to SEQ ID NO: 240716
ugcucuacacguauuaggg

SEQ ID NO: 240718 - RNA, 19 nt, Artificial Sequence
  Description of Artificial Sequence: Synthetic oligonucleotide
  Sense strand starting at position 576 SEQ ID NO: 3098
cuaauacguguagagcaaa

SEQ ID NO: 240719 - RNA, 19 nt, Artificial Sequence
  Description of Artificial Sequence: Synthetic oligonucleotide
  Antisense strand to SEQ ID NO: 240718
uuugcucuacacguauuag

SEQ ID NO: 240720 - RNA, 19 nt, Artificial Sequence
  Description of Artificial Sequence: Synthetic oligonucleotide
  Sense strand starting at position 728 SEQ ID NO: 3098
ggaaguaauuaaguugauu

SEQ ID NO: 240721 - RNA, 19 nt, Artificial Sequence
  Description of Artificial Sequence: Synthetic oligonucleotide
  Antisense strand to SEQ ID NO: 240720
aaucaacuuaauuacuucc

SEQ ID NO: 240722 - RNA, 19 nt, Artificial Sequence
  Description of Artificial Sequence: Synthetic oligonucleotide
  Sense strand starting at position 737 SEQ ID NO: 3098
uaaguugauucccuuguga

SEQ ID NO: 240723 - RNA, 19 nt, Artificial Sequence
  Description of Artificial Sequence: Synthetic oligonucleotide
  Antisense strand to SEQ ID NO: 240722
ucacaagggaaucaacuua

SEQ ID NO: 240724 - RNA, 19 nt, Artificial Sequence
  Description of Artificial Sequence: Synthetic oligonucleotide
  Sense strand starting at position 739 SEQ ID NO: 3098
aguugauucccuugugaua

SEQ ID NO: 240725 - RNA, 19 nt, Artificial Sequence
  Description of Artificial Sequence: Synthetic oligonucleotide
  Antisense strand to SEQ ID NO: 240724
uaucacaagggaaucaacu

SEQ ID NO: 240726 - RNA, 19 nt, Artificial Sequence
  Description of Artificial Sequence: Synthetic oligonucleotide
  Sense strand starting at position 782 SEQ ID NO: 3098
gggcaacagucuucgaaga

SEQ ID NO: 240727 - RNA, 19 nt, Artificial Sequence
  Description of Artificial Sequence: Synthetic oligonucleotide
  Antisense strand to SEQ ID NO: 240726
ucuucgaagacuguugccc

SEQ ID NO: 240728 - RNA, 19 nt, Artificial Sequence
  Description of Artificial Sequence: Synthetic oligonucleotide
  Sense strand starting at position 844 SEQ ID NO: 3098
guuaaugagacccgcaagu

SEQ ID NO: 240729 - RNA, 19 nt, Artificial Sequence
  Description of Artificial Sequence: Synthetic oligonucleotide
  Antisense strand to SEQ ID NO: 240728
acuugcgggucucauuaac

SEQ ID NO: 240730 - RNA, 19 nt, Artificial Sequence
  Description of Artificial Sequence: Synthetic oligonucleotide
  Sense strand starting at position 914 SEQ ID NO: 3098
ggcugaaacccagacuucu

SEQ ID NO: 240731 - RNA, 19 nt, Artificial Sequence
  Description of Artificial Sequence: Synthetic oligonucleotide
  Antisense strand to SEQ ID NO: 240730
agaagucuggguuucagcc

SEQ ID NO: 240732 - RNA, 19 nt, Artificial Sequence
  Description of Artificial Sequence: Synthetic oligonucleotide
  Sense strand starting at position 1117 SEQ ID NO: 3098
ggaggaacuuucgcagaug

SEQ ID NO: 240733 - RNA, 19 nt, Artificial Sequence
  Description of Artificial Sequence: Synthetic oligonucleotide
  Antisense strand to SEQ ID NO: 240732
caucugcgaaaguuccucc

SEQ ID NO: 240734 - RNA, 19 nt, Artificial Sequence
  Description of Artificial Sequence: Synthetic oligonucleotide
  Sense strand starting at position 1120 SEQ ID NO: 3098
ggaacuuucgcagaugcca

SEQ ID NO: 240735 - RNA, 19 nt, Artificial Sequence
  Description of Artificial Sequence: Synthetic oligonucleotide
  Antisense strand to SEQ ID NO: 240734
uggcaucugcgaaaguucc

SEQ ID NO: 240736 - RNA, 19 nt, Artificial Sequence
  Description of Artificial Sequence: Synthetic oligonucleotide
  Sense strand starting at position 2179 SEQ ID NO: 3098
ugccgaggaguugggaaau

SEQ ID NO: 240737 - RNA, 19 nt, Artificial Sequence
  Description of Artificial Sequence: Synthetic oligonucleotide
  Antisense strand to SEQ ID NO: 240736
auuucccaacuccucggca

SEQ ID NO: 240738 - RNA, 19 nt, Artificial Sequence
  Description of Artificial Sequence: Synthetic oligonucleotide
  Sense strand starting at position 2492 SEQ ID NO: 3098
acccgauuccuuggcaauc

SEQ ID NO: 240739 - RNA, 19 nt, Artificial Sequence
  Description of Artificial Sequence: Synthetic oligonucleotide
  Antisense strand to SEQ ID NO: 240738
gauugccaaggaaucgggu

SEQ ID NO: 240740 - RNA, 19 nt, Artificial Sequence
  Description of Artificial Sequence: Synthetic oligonucleotide
  Sense strand starting at position 2493 SEQ ID NO: 3098
cccgauuccuuggcaauca

SEQ ID NO: 240741 - RNA, 19 nt, Artificial Sequence
  Description of Artificial Sequence: Synthetic oligonucleotide
  Antisense strand to SEQ ID NO: 240740
ugauugccaaggaaucggg

SEQ ID NO: 240742 - RNA, 19 nt, Artificial Sequence
  Description of Artificial Sequence: Synthetic oligonucleotide
  Sense strand starting at position 2547 SEQ ID NO: 3098
cuuuaaagcguguauuacu

SEQ ID NO: 240743 - RNA, 19 nt, Artificial Sequence
  Description of Artificial Sequence: Synthetic oligonucleotide
  Antisense strand to SEQ ID NO: 240742
aguaauacacgcuuuaaag

SEQ ID NO: 240744 - RNA, 19 nt, Artificial Sequence
  Description of Artificial Sequence: Synthetic oligonucleotide
  Sense strand starting at position 2685 SEQ ID NO: 3098
ccgggaaggacuugucacu

SEQ ID NO: 240745 - RNA, 19 nt, Artificial Sequence
  Description of Artificial Sequence: Synthetic oligonucleotide
  Antisense strand to SEQ ID NO: 240744
agugacaaguccuucccgg

SEQ ID NO: 240746 - RNA, 19 nt, Artificial Sequence
  Description of Artificial Sequence: Synthetic oligonucleotide
  Sense strand starting at position 2696 SEQ ID NO: 3098
uugucacuucugcauccau

SEQ ID NO: 240747 - RNA, 19 nt, Artificial Sequence
  Description of Artificial Sequence: Synthetic oligonucleotide
  Antisense strand to SEQ ID NO: 240746
auggaugcagaagugacaa

SEQ ID NO: 240748 - RNA, 19 nt, Artificial Sequence
  Description of Artificial Sequence: Synthetic oligonucleotide
  Sense strand starting at position 2715 SEQ ID NO: 3098
uguguuuacuaagugauaa

SEQ ID NO: 240749 - RNA, 19 nt, Artificial Sequence
  Description of Artificial Sequence: Synthetic oligonucleotide
  Antisense strand to SEQ ID NO: 240748
uuaucacuuaguaaacaca

SEQ ID NO: 240750 - RNA, 19 nt, Artificial Sequence
  Description of Artificial Sequence: Synthetic oligonucleotide
  Sense strand starting at position 2767 SEQ ID NO: 3098
ucgagcaaucuguagagau

SEQ ID NO: 240751 - RNA, 19 nt, Artificial Sequence
  Description of Artificial Sequence: Synthetic oligonucleotide
  Antisense strand to SEQ ID NO: 240750
aucucuacagauugcucga

SEQ ID NO: 240752 - RNA, 19 nt, Artificial Sequence
  Description of Artificial Sequence: Synthetic oligonucleotide
  Sense strand starting at position 2771 SEQ ID NO: 3098
gcaaucuguagagauguca

SEQ ID NO: 240753 - RNA, 19 nt, Artificial Sequence
  Description of Artificial Sequence: Synthetic oligonucleotide
  Antisense strand to SEQ ID NO: 240752
ugacaucucuacagauugc

SEQ ID NO: 240754 - RNA, 19 nt, Artificial Sequence
  Description of Artificial Sequence: Synthetic oligonucleotide
  Sense strand starting at position 3104 SEQ ID NO: 3098
augacaauggcuugcauua

SEQ ID NO: 240755 - RNA, 19 nt, Artificial Sequence
  Description of Artificial Sequence: Synthetic oligonucleotide
  Antisense strand to SEQ ID NO: 240754
uaaugcaagccauugucau

SEQ ID NO: 240756 - RNA, 19 nt, Artificial Sequence
  Description of Artificial Sequence: Synthetic oligonucleotide
  Sense strand starting at position 3115 SEQ ID NO: 3098
uugcauuauggugggcaua

SEQ ID NO: 240757 - RNA, 19 nt, Artificial Sequence
  Description of Artificial Sequence: Synthetic oligonucleotide
  Antisense strand to SEQ ID NO: 240756
uaugcccaccauaaugcaa

SEQ ID NO: 240758 - RNA, 19 nt, Artificial Sequence
  Description of Artificial Sequence: Synthetic oligonucleotide
  Sense strand starting at position 3116 SEQ ID NO: 3098
ugcauuauggugggcauaa

SEQ ID NO: 240759 - RNA, 19 nt, Artificial Sequence
  Description of Artificial Sequence: Synthetic oligonucleotide
  Antisense strand to SEQ ID NO: 240758
uuaugcccaccauaaugca

SEQ ID NO: 240760 - RNA, 19 nt, Artificial Sequence
  Description of Artificial Sequence: Synthetic oligonucleotide
  Sense strand starting at position 3117 SEQ ID NO: 3098
gcauuauggugggcauaau

SEQ ID NO: 240761 - RNA, 19 nt, Artificial Sequence
  Description of Artificial Sequence: Synthetic oligonucleotide
  Antisense strand to SEQ ID NO: 240760
auuaugcccaccauaaugc

SEQ ID NO: 240762 - RNA, 19 nt, Artificial Sequence
  Description of Artificial Sequence: Synthetic oligonucleotide
  Sense strand starting at position 3181 SEQ ID NO: 3098
ccaagaaguuccuuauuga

SEQ ID NO: 240763 - RNA, 19 nt, Artificial Sequence
  Description of Artificial Sequence: Synthetic oligonucleotide
  Antisense strand to SEQ ID NO: 240762
ucaauaaggaacuucuugg

SEQ ID NO: 240764 - RNA, 19 nt, Artificial Sequence
  Description of Artificial Sequence: Synthetic oligonucleotide
  Sense strand starting at position 3184 SEQ ID NO: 3098
agaaguuccuuauugacca

SEQ ID NO: 240765 - RNA, 19 nt, Artificial Sequence
  Description of Artificial Sequence: Synthetic oligonucleotide
  Antisense strand to SEQ ID NO: 240764
uggucaauaaggaacuucu

SEQ ID NO: 240766 - RNA, 19 nt, Artificial Sequence
  Description of Artificial Sequence: Synthetic oligonucleotide
  Sense strand starting at position 3188 SEQ ID NO: 3098
guuccuuauugaccagaag

SEQ ID NO: 240767 - RNA, 19 nt, Artificial Sequence
  Description of Artificial Sequence: Synthetic oligonucleotide
  Antisense strand to SEQ ID NO: 240766
cuucuggucaauaaggaac

SEQ ID NO: 240768 - RNA, 19 nt, Artificial Sequence
  Description of Artificial Sequence: Synthetic oligonucleotide
  Sense strand starting at position 3234 SEQ ID NO: 3098
acagguucuuggccugagu

SEQ ID NO: 240769 - RNA, 19 nt, Artificial Sequence
  Description of Artificial Sequence: Synthetic oligonucleotide
  Antisense strand to SEQ ID NO: 240768
acucaggccaagaaccugu

SEQ ID NO: 240770 - RNA, 19 nt, Artificial Sequence
  Description of Artificial Sequence: Synthetic oligonucleotide
  Sense strand starting at position 3236 SEQ ID NO: 3098
agguucuuggccugaguga

SEQ ID NO: 240771 - RNA, 19 nt, Artificial Sequence
  Description of Artificial Sequence: Synthetic oligonucleotide
  Antisense strand to SEQ ID NO: 240770
ucacucaggccaagaaccu

SEQ ID NO: 240772 - RNA, 19 nt, Artificial Sequence
  Description of Artificial Sequence: Synthetic oligonucleotide
  Sense strand starting at position 3396 SEQ ID NO: 3098
gcagaaauaccaugcacuu

SEQ ID NO: 240773 - RNA, 19 nt, Artificial Sequence
  Description of Artificial Sequence: Synthetic oligonucleotide
  Antisense strand to SEQ ID NO: 240772
aagugcaugguauuucugc

SEQ ID NO: 240774 - RNA, 19 nt, Artificial Sequence
  Description of Artificial Sequence: Synthetic oligonucleotide
  Sense strand starting at position 3794 SEQ ID NO: 3098
accguaaagaguuaguuua

SEQ ID NO: 240775 - RNA, 19 nt, Artificial Sequence
  Description of Artificial Sequence: Synthetic oligonucleotide
  Antisense strand to SEQ ID NO: 240774
uaaacuaacucuuuacggu

SEQ ID NO: 240776 - RNA, 19 nt, Artificial Sequence
  Description of Artificial Sequence: Synthetic oligonucleotide
  Sense strand starting at position 3796 SEQ ID NO: 3098
cguaaagaguuaguuuaaa

SEQ ID NO: 240777 - RNA, 19 nt, Artificial Sequence
  Description of Artificial Sequence: Synthetic oligonucleotide
  Antisense strand to SEQ ID NO: 240776
uuuaaacuaacucuuuacg

SEQ ID NO: 240778 - RNA, 19 nt, Artificial Sequence
  Description of Artificial Sequence: Synthetic oligonucleotide
  Sense strand starting at position 3862 SEQ ID NO: 3098
cuaauaaccguccagaaug

SEQ ID NO: 240779 - RNA, 19 nt, Artificial Sequence
  Description of Artificial Sequence: Synthetic oligonucleotide
  Antisense strand to SEQ ID NO: 240778
cauucuggacgguuauuag

SEQ ID NO: 240780 - RNA, 19 nt, Artificial Sequence
  Description of Artificial Sequence: Synthetic oligonucleotide
  Sense strand starting at position 3921 SEQ ID NO: 3098
ggcuuagcacacugaaacu

SEQ ID NO: 240781 - RNA, 19 nt, Artificial Sequence
  Description of Artificial Sequence: Synthetic oligonucleotide
  Antisense strand to SEQ ID NO: 240780
aguuucagugugcuaagcc

SEQ ID NO: 240782 - RNA, 19 nt, Artificial Sequence
  Description of Artificial Sequence: Synthetic oligonucleotide
  Sense strand starting at position 3940 SEQ ID NO: 3098
aauaaauaguucguagaag

SEQ ID NO: 240783 - RNA, 19 nt, Artificial Sequence
  Description of Artificial Sequence: Synthetic oligonucleotide
  Antisense strand to SEQ ID NO: 240782
cuucuacgaacuauuuauu

SEQ ID NO: 240784 - RNA, 19 nt, Artificial Sequence
  Description of Artificial Sequence: Synthetic oligonucleotide
  Sense strand starting at position 3965 SEQ ID NO: 3098
uuagaaauuccauggcuag

SEQ ID NO: 240785 - RNA, 19 nt, Artificial Sequence
  Description of Artificial Sequence: Synthetic oligonucleotide
  Antisense strand to SEQ ID NO: 240784
cuagccauggaauuucuaa

SEQ ID NO: 240786 - RNA, 19 nt, Artificial Sequence
  Description of Artificial Sequence: Synthetic oligonucleotide
  Sense strand starting at position 141 SEQ ID NO: 3099
ggacgugauauaggucaac

SEQ ID NO: 240787 - RNA, 19 nt, Artificial Sequence
  Description of Artificial Sequence: Synthetic oligonucleotide
  Antisense strand to SEQ ID NO: 240786
guugaccuauaucacgucc

SEQ ID NO: 240788 - RNA, 19 nt, Artificial Sequence
  Description of Artificial Sequence: Synthetic oligonucleotide
  Sense strand starting at position 144 SEQ ID NO: 3099
cgugauauaggucaacuau

SEQ ID NO: 240789 - RNA, 19 nt, Artificial Sequence
  Description of Artificial Sequence: Synthetic oligonucleotide
  Antisense strand to SEQ ID NO: 240788
auaguugaccuauaucacg

SEQ ID NO: 240790 - RNA, 19 nt, Artificial Sequence
  Description of Artificial Sequence: Synthetic oligonucleotide
  Sense strand starting at position 155 SEQ ID NO: 3099
ucaacuauaucuuugaggu

SEQ ID NO: 240791 - RNA, 19 nt, Artificial Sequence
  Description of Artificial Sequence: Synthetic oligonucleotide
  Antisense strand to SEQ ID NO: 240790
accucaaagauauaguuga

SEQ ID NO: 240792 - RNA, 19 nt, Artificial Sequence
  Description of Artificial Sequence: Synthetic oligonucleotide
  Sense strand starting at position 156 SEQ ID NO: 3099
caacuauaucuuugaggug

SEQ ID NO: 240793 - RNA, 19 nt, Artificial Sequence
  Description of Artificial Sequence: Synthetic oligonucleotide
  Antisense strand to SEQ ID NO: 240792
caccucaaagauauaguug

SEQ ID NO: 240794 - RNA, 19 nt, Artificial Sequence
  Description of Artificial Sequence: Synthetic oligonucleotide
  Sense strand starting at position 224 SEQ ID NO: 3099
cugauaagaugagcuaagu

SEQ ID NO: 240795 - RNA, 19 nt, Artificial Sequence
  Description of Artificial Sequence: Synthetic oligonucleotide
  Antisense strand to SEQ ID NO: 240794
acuuagcucaucuuaucag

SEQ ID NO: 240796 - RNA, 19 nt, Artificial Sequence
  Description of Artificial Sequence: Synthetic oligonucleotide
  Sense strand starting at position 287 SEQ ID NO: 3099
aggaaaguuuaauccucau

SEQ ID NO: 240797 - RNA, 19 nt, Artificial Sequence
  Description of Artificial Sequence: Synthetic oligonucleotide
  Antisense strand to SEQ ID NO: 240796
augaggauuaaacuuuccu

SEQ ID NO: 240798 - RNA, 19 nt, Artificial Sequence
  Description of Artificial Sequence: Synthetic oligonucleotide
  Sense strand starting at position 330 SEQ ID NO: 3099
aacgcugucccugagacuu

SEQ ID NO: 240799 - RNA, 19 nt, Artificial Sequence
  Description of Artificial Sequence: Synthetic oligonucleotide
  Antisense strand to SEQ ID NO: 240798
aagucucagggacagcguu

SEQ ID NO: 240800 - RNA, 19 nt, Artificial Sequence
  Description of Artificial Sequence: Synthetic oligonucleotide
  Sense strand starting at position 388 SEQ ID NO: 3099
acuugauagguugauguuu

SEQ ID NO: 240801 - RNA, 19 nt, Artificial Sequence
  Description of Artificial Sequence: Synthetic oligonucleotide
  Antisense strand to SEQ ID NO: 240800
aaacaucaaccuaucaagu

SEQ ID NO: 240802 - RNA, 19 nt, Artificial Sequence
  Description of Artificial Sequence: Synthetic oligonucleotide
  Sense strand starting at position 415 SEQ ID NO: 3099
gagauucgguaauccaaau

SEQ ID NO: 240803 - RNA, 19 nt, Artificial Sequence
  Description of Artificial Sequence: Synthetic oligonucleotide
  Antisense strand to SEQ ID NO: 240802
auuuggauuaccgaaucuc

SEQ ID NO: 240804 - RNA, 19 nt, Artificial Sequence
  Description of Artificial Sequence: Synthetic oligonucleotide
  Sense strand starting at position 421 SEQ ID NO: 3099
cgguaauccaaaugaugga

SEQ ID NO: 240805 - RNA, 19 nt, Artificial Sequence
  Description of Artificial Sequence: Synthetic oligonucleotide
  Antisense strand to SEQ ID NO: 240804
uccaucauuuggauuaccg

SEQ ID NO: 240806 - RNA, 19 nt, Artificial Sequence
  Description of Artificial Sequence: Synthetic oligonucleotide
  Sense strand starting at position 496 SEQ ID NO: 3099
cuaauaucauguguacuua

SEQ ID NO: 240807 - RNA, 19 nt, Artificial Sequence
  Description of Artificial Sequence: Synthetic oligonucleotide
  Antisense strand to SEQ ID NO: 240806
uaaguacacaugauauuag

SEQ ID NO: 240808 - RNA, 19 nt, Artificial Sequence
  Description of Artificial Sequence: Synthetic oligonucleotide
  Sense strand starting at position 758 SEQ ID NO: 3099
augugaagucauugauuga

SEQ ID NO: 240809 - RNA, 19 nt, Artificial Sequence
  Description of Artificial Sequence: Synthetic oligonucleotide
  Antisense strand to SEQ ID NO: 240808
ucaaucaaugacuucacau

SEQ ID NO: 240810 - RNA, 19 nt, Artificial Sequence
  Description of Artificial Sequence: Synthetic oligonucleotide
  Sense strand starting at position 759 SEQ ID NO: 3099
ugugaagucauugauugag

SEQ ID NO: 240811 - RNA, 19 nt, Artificial Sequence
  Description of Artificial Sequence: Synthetic oligonucleotide
  Antisense strand to SEQ ID NO: 240810
cucaaucaaugacuucaca

SEQ ID NO: 240812 - RNA, 19 nt, Artificial Sequence
  Description of Artificial Sequence: Synthetic oligonucleotide
  Sense strand starting at position 784 SEQ ID NO: 3099
ggguauagguagcuaugaa

SEQ ID NO: 240813 - RNA, 19 nt, Artificial Sequence
  Description of Artificial Sequence: Synthetic oligonucleotide
  Antisense strand to SEQ ID NO: 240812
uucauagcuaccuauaccc

SEQ ID NO: 240814 - RNA, 19 nt, Artificial Sequence
  Description of Artificial Sequence: Synthetic oligonucleotide
  Sense strand starting at position 785 SEQ ID NO: 3099
gguauagguagcuaugaau

SEQ ID NO: 240815 - RNA, 19 nt, Artificial Sequence
  Description of Artificial Sequence: Synthetic oligonucleotide
  Antisense strand to SEQ ID NO: 240814
auucauagcuaccuauacc

SEQ ID NO: 240816 - RNA, 19 nt, Artificial Sequence
  Description of Artificial Sequence: Synthetic oligonucleotide
  Sense strand starting at position 838 SEQ ID NO: 3099
cgucauguuccuuaagauu

SEQ ID NO: 240817 - RNA, 19 nt, Artificial Sequence
  Description of Artificial Sequence: Synthetic oligonucleotide
  Antisense strand to SEQ ID NO: 240816
aaucuuaaggaacaugacg

SEQ ID NO: 240818 - RNA, 19 nt, Artificial Sequence
  Description of Artificial Sequence: Synthetic oligonucleotide
  Sense strand starting at position 844 SEQ ID NO: 3099
guuccuuaagauuacgacu

SEQ ID NO: 240819 - RNA, 19 nt, Artificial Sequence
  Description of Artificial Sequence: Synthetic oligonucleotide
  Antisense strand to SEQ ID NO: 240818
agucguaaucuuaaggaac

SEQ ID NO: 240820 - RNA, 19 nt, Artificial Sequence
  Description of Artificial Sequence: Synthetic oligonucleotide
  Sense strand starting at position 1137 SEQ ID NO: 3099
caggaaguguuuccucuaa

SEQ ID NO: 240821 - RNA, 19 nt, Artificial Sequence
  Description of Artificial Sequence: Synthetic oligonucleotide
  Antisense strand to SEQ ID NO: 240820
uuagaggaaacacuuccug

SEQ ID NO: 240822 - RNA, 19 nt, Artificial Sequence
  Description of Artificial Sequence: Synthetic oligonucleotide
  Sense strand starting at position 2558 SEQ ID NO: 3099
cgggaauuccucugcacug

SEQ ID NO: 240823 - RNA, 19 nt, Artificial Sequence
  Description of Artificial Sequence: Synthetic oligonucleotide
  Antisense strand to SEQ ID NO: 240822
cagugcagaggaauucccg

SEQ ID NO: 240824 - RNA, 19 nt, Artificial Sequence
  Description of Artificial Sequence: Synthetic oligonucleotide
  Sense strand starting at position 2559 SEQ ID NO: 3099
gggaauuccucugcacugu

SEQ ID NO: 240825 - RNA, 19 nt, Artificial Sequence
  Description of Artificial Sequence: Synthetic oligonucleotide
  Antisense strand to SEQ ID NO: 240824
acagugcagaggaauuccc

SEQ ID NO: 240826 - RNA, 19 nt, Artificial Sequence
  Description of Artificial Sequence: Synthetic oligonucleotide
  Sense strand starting at position 2647 SEQ ID NO: 3099
cagguuuaggcccgacaaa

SEQ ID NO: 240827 - RNA, 19 nt, Artificial Sequence
  Description of Artificial Sequence: Synthetic oligonucleotide
  Antisense strand to SEQ ID NO: 240826
uuugucgggccuaaaccug

SEQ ID NO: 240828 - RNA, 19 nt, Artificial Sequence
  Description of Artificial Sequence: Synthetic oligonucleotide
  Sense strand starting at position 3185 SEQ ID NO: 3099
ugggauuccgcccaaauua

SEQ ID NO: 240829 - RNA, 19 nt, Artificial Sequence
  Description of Artificial Sequence: Synthetic oligonucleotide
  Antisense strand to SEQ ID NO: 240828
uaauuugggcggaauccca

SEQ ID NO: 240830 - RNA, 19 nt, Artificial Sequence
  Description of Artificial Sequence: Synthetic oligonucleotide
  Sense strand starting at position 3219 SEQ ID NO: 3099
ggcuuagguguuuaccuga

SEQ ID NO: 240831 - RNA, 19 nt, Artificial Sequence
  Description of Artificial Sequence: Synthetic oligonucleotide
  Antisense strand to SEQ ID NO: 240830
ucagguaaacaccuaagcc

SEQ ID NO: 240832 - RNA, 19 nt, Artificial Sequence
  Description of Artificial Sequence: Synthetic oligonucleotide
  Sense strand starting at position 3224 SEQ ID NO: 3099
agguguuuaccugauguuc

SEQ ID NO: 240833 - RNA, 19 nt, Artificial Sequence
  Description of Artificial Sequence: Synthetic oligonucleotide
  Antisense strand to SEQ ID NO: 240832
gaacaucagguaaacaccu

SEQ ID NO: 240834 - RNA, 19 nt, Artificial Sequence
  Description of Artificial Sequence: Synthetic oligonucleotide
  Sense strand starting at position 3233 SEQ ID NO: 3099
ccugauguuccagauggua

SEQ ID NO: 240835 - RNA, 19 nt, Artificial Sequence
  Description of Artificial Sequence: Synthetic oligonucleotide
  Antisense strand to SEQ ID NO: 240834
uaccaucuggaacaucagg

SEQ ID NO: 240836 - RNA, 19 nt, Artificial Sequence
  Description of Artificial Sequence: Synthetic oligonucleotide
  Sense strand starting at position 3235 SEQ ID NO: 3099
ugauguuccagaugguauu

SEQ ID NO: 240837 - RNA, 19 nt, Artificial Sequence
  Description of Artificial Sequence: Synthetic oligonucleotide
  Antisense strand to SEQ ID NO: 240836
aauaccaucuggaacauca

SEQ ID NO: 240838 - RNA, 19 nt, Artificial Sequence
  Description of Artificial Sequence: Synthetic oligonucleotide
  Sense strand starting at position 3249 SEQ ID NO: 3099
guauuuguccaguggacua

SEQ ID NO: 240839 - RNA, 19 nt, Artificial Sequence
  Description of Artificial Sequence: Synthetic oligonucleotide
  Antisense strand to SEQ ID NO: 240838
uaguccacuggacaaauac

SEQ ID NO: 240840 - RNA, 19 nt, Artificial Sequence
  Description of Artificial Sequence: Synthetic oligonucleotide
  Sense strand starting at position 3292 SEQ ID NO: 3099
uguugucacccauacucau

SEQ ID NO: 240841 - RNA, 19 nt, Artificial Sequence
  Description of Artificial Sequence: Synthetic oligonucleotide
  Antisense strand to SEQ ID NO: 240840
augaguaugggugacaaca

SEQ ID NO: 240842 - RNA, 19 nt, Artificial Sequence
  Description of Artificial Sequence: Synthetic oligonucleotide
  Sense strand starting at position 3364 SEQ ID NO: 3099
agugccugccgauauauuu

SEQ ID NO: 240843 - RNA, 19 nt, Artificial Sequence
  Description of Artificial Sequence: Synthetic oligonucleotide
  Antisense strand to SEQ ID NO: 240842
aaauauaucggcaggcacu

SEQ ID NO: 240844 - RNA, 19 nt, Artificial Sequence
  Description of Artificial Sequence: Synthetic oligonucleotide
  Sense strand starting at position 3395 SEQ ID NO: 3099
uaguucugccgucauaaag

SEQ ID NO: 240845 - RNA, 19 nt, Artificial Sequence
  Description of Artificial Sequence: Synthetic oligonucleotide
  Antisense strand to SEQ ID NO: 240844
cuuuaugacggcagaacua

SEQ ID NO: 240846 - RNA, 19 nt, Artificial Sequence
  Description of Artificial Sequence: Synthetic oligonucleotide
  Sense strand starting at position 3433 SEQ ID NO: 3099
ggucaugaaagcugauucu

SEQ ID NO: 240847 - RNA, 19 nt, Artificial Sequence
  Description of Artificial Sequence: Synthetic oligonucleotide
  Antisense strand to SEQ ID NO: 240846
agaaucagcuuucaugacc

SEQ ID NO: 240848 - RNA, 19 nt, Artificial Sequence
  Description of Artificial Sequence: Synthetic oligonucleotide
  Sense strand starting at position 3450 SEQ ID NO: 3099
cuugauacuucugauuuga

SEQ ID NO: 240849 - RNA, 19 nt, Artificial Sequence
  Description of Artificial Sequence: Synthetic oligonucleotide
  Antisense strand to SEQ ID NO: 240848
ucaaaucagaaguaucaag

SEQ ID NO: 240850 - RNA, 19 nt, Artificial Sequence
  Description of Artificial Sequence: Synthetic oligonucleotide
  Sense strand starting at position 3530 SEQ ID NO: 3099
auccuaacucaugaugugu

SEQ ID NO: 240851 - RNA, 19 nt, Artificial Sequence
  Description of Artificial Sequence: Synthetic oligonucleotide
  Antisense strand to SEQ ID NO: 240850
acacaucaugaguuaggau

SEQ ID NO: 240852 - RNA, 19 nt, Artificial Sequence
  Description of Artificial Sequence: Synthetic oligonucleotide
  Sense strand starting at position 3556 SEQ ID NO: 3099
uguauaaucuuggcauuga

SEQ ID NO: 240853 - RNA, 19 nt, Artificial Sequence
  Description of Artificial Sequence: Synthetic oligonucleotide
  Antisense strand to SEQ ID NO: 240852
ucaaugccaagauuauaca

SEQ ID NO: 240854 - RNA, 19 nt, Artificial Sequence
  Description of Artificial Sequence: Synthetic oligonucleotide
  Sense strand starting at position 3575 SEQ ID NO: 3099
ucucauuagcuauaaaggu

SEQ ID NO: 240855 - RNA, 19 nt, Artificial Sequence
  Description of Artificial Sequence: Synthetic oligonucleotide
  Antisense strand to SEQ ID NO: 240854
accuuuauagcuaaugaga

SEQ ID NO: 240856 - RNA, 19 nt, Artificial Sequence
  Description of Artificial Sequence: Synthetic oligonucleotide
  Sense strand starting at position 3584 SEQ ID NO: 3099
cuauaaagguuguccugau

SEQ ID NO: 240857 - RNA, 19 nt, Artificial Sequence
  Description of Artificial Sequence: Synthetic oligonucleotide
  Antisense strand to SEQ ID NO: 240856
aucaggacaaccuuuauag

SEQ ID NO: 240858 - RNA, 19 nt, Artificial Sequence
  Description of Artificial Sequence: Synthetic oligonucleotide
  Sense strand starting at position 3585 SEQ ID NO: 3099
uauaaagguuguccugauu

SEQ ID NO: 240859 - RNA, 19 nt, Artificial Sequence
  Description of Artificial Sequence: Synthetic oligonucleotide
  Antisense strand to SEQ ID NO: 240858
aaucaggacaaccuuuaua

SEQ ID NO: 240860 - RNA, 19 nt, Artificial Sequence
  Description of Artificial Sequence: Synthetic oligonucleotide
  Sense strand starting at position 3739 SEQ ID NO: 3099
aggguuucccucuaucauu

SEQ ID NO: 240861 - RNA, 19 nt, Artificial Sequence
  Description of Artificial Sequence: Synthetic oligonucleotide
  Antisense strand to SEQ ID NO: 240860
aaugauagagggaaacccu

SEQ ID NO: 240862 - RNA, 19 nt, Artificial Sequence
  Description of Artificial Sequence: Synthetic oligonucleotide
  Sense strand starting at position 3910 SEQ ID NO: 3099
uuguauugucuguucuguu

SEQ ID NO: 240863 - RNA, 19 nt, Artificial Sequence
  Description of Artificial Sequence: Synthetic oligonucleotide
  Antisense strand to SEQ ID NO: 240862
aacagaacagacaauacaa

SEQ ID NO: 240864 - RNA, 19 nt, Artificial Sequence
  Description of Artificial Sequence: Synthetic oligonucleotide
  Sense strand starting at position 3970 SEQ ID NO: 3099
aggaguguuauguggguau

SEQ ID NO: 240865 - RNA, 19 nt, Artificial Sequence
  Description of Artificial Sequence: Synthetic oligonucleotide
  Antisense strand to SEQ ID NO: 240864
auacccacauaacacuccu

SEQ ID NO: 240866 - RNA, 19 nt, Artificial Sequence
  Description of Artificial Sequence: Synthetic oligonucleotide
  Sense strand starting at position 90 SEQ ID NO: 3100
ugaaucaauguugggaacu

SEQ ID NO: 240867 - RNA, 19 nt, Artificial Sequence
  Description of Artificial Sequence: Synthetic oligonucleotide
  Antisense strand to SEQ ID NO: 240866
aguucccaacauugauuca

SEQ ID NO: 240868 - RNA, 19 nt, Artificial Sequence
  Description of Artificial Sequence: Synthetic oligonucleotide
  Sense strand starting at position 157 SEQ ID NO: 3100
ucaugauggccauaacgaa

SEQ ID NO: 240869 - RNA, 19 nt, Artificial Sequence
  Description of Artificial Sequence: Synthetic oligonucleotide
  Antisense strand to SEQ ID NO: 240868
uucguuauggccaucauga

SEQ ID NO: 240870 - RNA, 19 nt, Artificial Sequence
  Description of Artificial Sequence: Synthetic oligonucleotide
  Sense strand starting at position 212 SEQ ID NO: 3100
cgcuuaaaggcgcucuuaa

SEQ ID NO: 240871 - RNA, 19 nt, Artificial Sequence
  Description of Artificial Sequence: Synthetic oligonucleotide
  Antisense strand to SEQ ID NO: 240870
uuaagagcgccuuuaagcg

SEQ ID NO: 240872 - RNA, 19 nt, Artificial Sequence
  Description of Artificial Sequence: Synthetic oligonucleotide
  Sense strand starting at position 348 SEQ ID NO: 3100
uagcuaaucgaauaucugu

SEQ ID NO: 240873 - RNA, 19 nt, Artificial Sequence
  Description of Artificial Sequence: Synthetic oligonucleotide
  Antisense strand to SEQ ID NO: 240872
acagauauucgauuagcua

SEQ ID NO: 240874 - RNA, 19 nt, Artificial Sequence
  Description of Artificial Sequence: Synthetic oligonucleotide
  Sense strand starting at position 647 SEQ ID NO: 3100
gcagcauagagagaucacu

SEQ ID NO: 240875 - RNA, 19 nt, Artificial Sequence
  Description of Artificial Sequence: Synthetic oligonucleotide
  Antisense strand to SEQ ID NO: 240874
agugaucucucuaugcugc

SEQ ID NO: 240876 - RNA, 19 nt, Artificial Sequence
  Description of Artificial Sequence: Synthetic oligonucleotide
  Sense strand starting at position 670 SEQ ID NO: 3100
acgggugacgaugauaaau

SEQ ID NO: 240877 - RNA, 19 nt, Artificial Sequence
  Description of Artificial Sequence: Synthetic oligonucleotide
  Antisense strand to SEQ ID NO: 240876
auuuaucaucgucacccgu

SEQ ID NO: 240878 - RNA, 19 nt, Artificial Sequence
  Description of Artificial Sequence: Synthetic oligonucleotide
  Sense strand starting at position 672 SEQ ID NO: 3100
gggugacgaugauaaauuu

SEQ ID NO: 240879 - RNA, 19 nt, Artificial Sequence
  Description of Artificial Sequence: Synthetic oligonucleotide
  Antisense strand to SEQ ID NO: 240878
aaauuuaucaucgucaccc

SEQ ID NO: 240880 - RNA, 19 nt, Artificial Sequence
  Description of Artificial Sequence: Synthetic oligonucleotide
  Sense strand starting at position 829 SEQ ID NO: 3100
ucucaaguuccauaaguga

SEQ ID NO: 240881 - RNA, 19 nt, Artificial Sequence
  Description of Artificial Sequence: Synthetic oligonucleotide
  Antisense strand to SEQ ID NO: 240880
ucacuuauggaacuugaga

SEQ ID NO: 240882 - RNA, 19 nt, Artificial Sequence
  Description of Artificial Sequence: Synthetic oligonucleotide
  Sense strand starting at position 911 SEQ ID NO: 3100
cguuaaugcaacugggaaa

SEQ ID NO: 240883 - RNA, 19 nt, Artificial Sequence
  Description of Artificial Sequence: Synthetic oligonucleotide
  Antisense strand to SEQ ID NO: 240882
uuucccaguugcauuaacg

SEQ ID NO: 240884 - RNA, 19 nt, Artificial Sequence
  Description of Artificial Sequence: Synthetic oligonucleotide
  Sense strand starting at position 1061 SEQ ID NO: 3100
ggcuaacuccauuacggaa

SEQ ID NO: 240885 - RNA, 19 nt, Artificial Sequence
  Description of Artificial Sequence: Synthetic oligonucleotide
  Antisense strand to SEQ ID NO: 240884
uuccguaauggaguuagcc

SEQ ID NO: 240886 - RNA, 19 nt, Artificial Sequence
  Description of Artificial Sequence: Synthetic oligonucleotide
  Sense strand starting at position 1208 SEQ ID NO: 3100
acucaacuucuuugaggca

SEQ ID NO: 240887 - RNA, 19 nt, Artificial Sequence
  Description of Artificial Sequence: Synthetic oligonucleotide
  Antisense strand to SEQ ID NO: 240886
ugccucaaagaaguugagu

SEQ ID NO: 240888 - RNA, 19 nt, Artificial Sequence
  Description of Artificial Sequence: Synthetic oligonucleotide
  Sense strand starting at position 1389 SEQ ID NO: 3100
uuacccguucuauaaauga

SEQ ID NO: 240889 - RNA, 19 nt, Artificial Sequence
  Description of Artificial Sequence: Synthetic oligonucleotide
  Antisense strand to SEQ ID NO: 240888
ucauuuauagaacggguaa

SEQ ID NO: 240890 - RNA, 19 nt, Artificial Sequence
  Description of Artificial Sequence: Synthetic oligonucleotide
  Sense strand starting at position 1565 SEQ ID NO: 3100
gcaggucuccaagacucuu

SEQ ID NO: 240891 - RNA, 19 nt, Artificial Sequence
  Description of Artificial Sequence: Synthetic oligonucleotide
  Antisense strand to SEQ ID NO: 240890
aagagucuuggagaccugc

SEQ ID NO: 240892 - RNA, 19 nt, Artificial Sequence
  Description of Artificial Sequence: Synthetic oligonucleotide
  Sense strand starting at position 1617 SEQ ID NO: 3100
ggccgaagcgucagugaca

SEQ ID NO: 240893 - RNA, 19 nt, Artificial Sequence
  Description of Artificial Sequence: Synthetic oligonucleotide
  Antisense strand to SEQ ID NO: 240892
ugucacugacgcuucggcc

SEQ ID NO: 240894 - RNA, 19 nt, Artificial Sequence
  Description of Artificial Sequence: Synthetic oligonucleotide
  Sense strand starting at position 1926 SEQ ID NO: 3100
ccucguagucuggaaggga

SEQ ID NO: 240895 - RNA, 19 nt, Artificial Sequence
  Description of Artificial Sequence: Synthetic oligonucleotide
  Antisense strand to SEQ ID NO: 240894
ucccuuccagacuacgagg

SEQ ID NO: 240896 - RNA, 19 nt, Artificial Sequence
  Description of Artificial Sequence: Synthetic oligonucleotide
  Sense strand starting at position 2218 SEQ ID NO: 3100
agagcugucagguaagaga

SEQ ID NO: 240897 - RNA, 19 nt, Artificial Sequence
  Description of Artificial Sequence: Synthetic oligonucleotide
  Antisense strand to SEQ ID NO: 240896
ucucuuaccugacagcucu

SEQ ID NO: 240898 - RNA, 19 nt, Artificial Sequence
  Description of Artificial Sequence: Synthetic oligonucleotide
  Sense strand starting at position 2295 SEQ ID NO: 3100
ccaugacuaccguaucaca

SEQ ID NO: 240899 - RNA, 19 nt, Artificial Sequence
  Description of Artificial Sequence: Synthetic oligonucleotide
  Antisense strand to SEQ ID NO: 240898
ugugauacgguagucaugg

SEQ ID NO: 240900 - RNA, 19 nt, Artificial Sequence
  Description of Artificial Sequence: Synthetic oligonucleotide
  Sense strand starting at position 2459 SEQ ID NO: 3100
ucuccacuuguauauguaa

SEQ ID NO: 240901 - RNA, 19 nt, Artificial Sequence
  Description of Artificial Sequence: Synthetic oligonucleotide
  Antisense strand to SEQ ID NO: 240900
uuacauauacaaguggaga

SEQ ID NO: 240902 - RNA, 19 nt, Artificial Sequence
  Description of Artificial Sequence: Synthetic oligonucleotide
  Sense strand starting at position 2760 SEQ ID NO: 3100
uaugcuuaucuuugaugga

SEQ ID NO: 240903 - RNA, 19 nt, Artificial Sequence
  Description of Artificial Sequence: Synthetic oligonucleotide
  Antisense strand to SEQ ID NO: 240902
uccaucaaagauaagcaua

SEQ ID NO: 240904 - RNA, 19 nt, Artificial Sequence
  Description of Artificial Sequence: Synthetic oligonucleotide
  Sense strand starting at position 2764 SEQ ID NO: 3100
cuuaucuuugauggaaaug

SEQ ID NO: 240905 - RNA, 19 nt, Artificial Sequence
  Description of Artificial Sequence: Synthetic oligonucleotide
  Antisense strand to SEQ ID NO: 240904
cauuuccaucaaagauaag

SEQ ID NO: 240906 - RNA, 19 nt, Artificial Sequence
  Description of Artificial Sequence: Synthetic oligonucleotide
  Sense strand starting at position 2911 SEQ ID NO: 3100
cacuaugacccggauucuu

SEQ ID NO: 240907 - RNA, 19 nt, Artificial Sequence
  Description of Artificial Sequence: Synthetic oligonucleotide
  Antisense strand to SEQ ID NO: 240906
aagaauccgggucauagug

SEQ ID NO: 240908 - RNA, 19 nt, Artificial Sequence
  Description of Artificial Sequence: Synthetic oligonucleotide
  Sense strand starting at position 3015 SEQ ID NO: 3100
ggugguuaaaugugauaaa

SEQ ID NO: 240909 - RNA, 19 nt, Artificial Sequence
  Description of Artificial Sequence: Synthetic oligonucleotide
  Antisense strand to SEQ ID NO: 240908
uuuaucacauuuaaccacc

SEQ ID NO: 240910 - RNA, 19 nt, Artificial Sequence
  Description of Artificial Sequence: Synthetic oligonucleotide
  Sense strand starting at position 3037 SEQ ID NO: 3100
gugugauauacuggguaag

SEQ ID NO: 240911 - RNA, 19 nt, Artificial Sequence
  Description of Artificial Sequence: Synthetic oligonucleotide
  Antisense strand to SEQ ID NO: 240910
cuuacccaguauaucacac

SEQ ID NO: 240912 - RNA, 19 nt, Artificial Sequence
  Description of Artificial Sequence: Synthetic oligonucleotide
  Sense strand starting at position 3039 SEQ ID NO: 3100
gugauauacuggguaagug

SEQ ID NO: 240913 - RNA, 19 nt, Artificial Sequence
  Description of Artificial Sequence: Synthetic oligonucleotide
  Antisense strand to SEQ ID NO: 240912
cacuuacccaguauaucac

SEQ ID NO: 240914 - RNA, 19 nt, Artificial Sequence
  Description of Artificial Sequence: Synthetic oligonucleotide
  Sense strand starting at position 3040 SEQ ID NO: 3100
ugauauacuggguaagugu

SEQ ID NO: 240915 - RNA, 19 nt, Artificial Sequence
  Description of Artificial Sequence: Synthetic oligonucleotide
  Antisense strand to SEQ ID NO: 240914
acacuuacccaguauauca

SEQ ID NO: 240916 - RNA, 19 nt, Artificial Sequence
  Description of Artificial Sequence: Synthetic oligonucleotide
  Sense strand starting at position 3111 SEQ ID NO: 3100
agaggaagcgggugaauua

SEQ ID NO: 240917 - RNA, 19 nt, Artificial Sequence
  Description of Artificial Sequence: Synthetic oligonucleotide
  Antisense strand to SEQ ID NO: 240916
uaauucacccgcuuccucu

SEQ ID NO: 240918 - RNA, 19 nt, Artificial Sequence
  Description of Artificial Sequence: Synthetic oligonucleotide
  Sense strand starting at position 3118 SEQ ID NO: 3100
gcgggugaauuaccauaaa

SEQ ID NO: 240919 - RNA, 19 nt, Artificial Sequence
  Description of Artificial Sequence: Synthetic oligonucleotide
  Antisense strand to SEQ ID NO: 240918
uuuaugguaauucacccgc

SEQ ID NO: 240920 - RNA, 19 nt, Artificial Sequence
  Description of Artificial Sequence: Synthetic oligonucleotide
  Sense strand starting at position 3121 SEQ ID NO: 3100
ggugaauuaccauaaaugc

SEQ ID NO: 240921 - RNA, 19 nt, Artificial Sequence
  Description of Artificial Sequence: Synthetic oligonucleotide
  Antisense strand to SEQ ID NO: 240920
gcauuuaugguaauucacc

SEQ ID NO: 240922 - RNA, 19 nt, Artificial Sequence
  Description of Artificial Sequence: Synthetic oligonucleotide
  Sense strand starting at position 3263 SEQ ID NO: 3100
acagaauagugacuauucu

SEQ ID NO: 240923 - RNA, 19 nt, Artificial Sequence
  Description of Artificial Sequence: Synthetic oligonucleotide
  Antisense strand to SEQ ID NO: 240922
agaauagucacuauucugu

SEQ ID NO: 240924 - RNA, 19 nt, Artificial Sequence
  Description of Artificial Sequence: Synthetic oligonucleotide
  Sense strand starting at position 3293 SEQ ID NO: 3100
gagaguugcaacuggauag

SEQ ID NO: 240925 - RNA, 19 nt, Artificial Sequence
  Description of Artificial Sequence: Synthetic oligonucleotide
  Antisense strand to SEQ ID NO: 240924
cuauccaguugcaacucuc

SEQ ID NO: 240926 - RNA, 19 nt, Artificial Sequence
  Description of Artificial Sequence: Synthetic oligonucleotide
  Sense strand starting at position 3342 SEQ ID NO: 3100
agguucuacuuccugauaa

SEQ ID NO: 240927 - RNA, 19 nt, Artificial Sequence
  Description of Artificial Sequence: Synthetic oligonucleotide
  Antisense strand to SEQ ID NO: 240926
uuaucaggaaguagaaccu

SEQ ID NO: 240928 - RNA, 19 nt, Artificial Sequence
  Description of Artificial Sequence: Synthetic oligonucleotide
  Sense strand starting at position 3388 SEQ ID NO: 3100
aauguagcagcuuaagaua

SEQ ID NO: 240929 - RNA, 19 nt, Artificial Sequence
  Description of Artificial Sequence: Synthetic oligonucleotide
  Antisense strand to SEQ ID NO: 240928
uaucuuaagcugcuacauu

SEQ ID NO: 240930 - RNA, 19 nt, Artificial Sequence
  Description of Artificial Sequence: Synthetic oligonucleotide
  Sense strand starting at position 3396 SEQ ID NO: 3100
agcuuaagauaacuguaau

SEQ ID NO: 240931 - RNA, 19 nt, Artificial Sequence
  Description of Artificial Sequence: Synthetic oligonucleotide
  Antisense strand to SEQ ID NO: 240930
auuacaguuaucuuaagcu

SEQ ID NO: 240932 - RNA, 19 nt, Artificial Sequence
  Description of Artificial Sequence: Synthetic oligonucleotide
  Sense strand starting at position 3516 SEQ ID NO: 3100
ggcugagucauuugaaggc

SEQ ID NO: 240933 - RNA, 19 nt, Artificial Sequence
  Description of Artificial Sequence: Synthetic oligonucleotide
  Antisense strand to SEQ ID NO: 240932
gccuucaaaugacucagcc

SEQ ID NO: 240934 - RNA, 19 nt, Artificial Sequence
  Description of Artificial Sequence: Synthetic oligonucleotide
  Sense strand starting at position 3549 SEQ ID NO: 3100
agaauccauuuccaaggua

SEQ ID NO: 240935 - RNA, 19 nt, Artificial Sequence
  Description of Artificial Sequence: Synthetic oligonucleotide
  Antisense strand to SEQ ID NO: 240934
uaccuuggaaauggauucu

SEQ ID NO: 240936 - RNA, 19 nt, Artificial Sequence
  Description of Artificial Sequence: Synthetic oligonucleotide
  Sense strand starting at position 3631 SEQ ID NO: 3100
ugaccuucuccauagagcu

SEQ ID NO: 240937 - RNA, 19 nt, Artificial Sequence
  Description of Artificial Sequence: Synthetic oligonucleotide
  Antisense strand to SEQ ID NO: 240936
agcucuauggagaagguca

SEQ ID NO: 240938 - RNA, 19 nt, Artificial Sequence
  Description of Artificial Sequence: Synthetic oligonucleotide
  Sense strand starting at position 3645 SEQ ID NO: 3100
gagcuucuugaguauccuu

SEQ ID NO: 240939 - RNA, 19 nt, Artificial Sequence
  Description of Artificial Sequence: Synthetic oligonucleotide
  Antisense strand to SEQ ID NO: 240938
aaggauacucaagaagcuc

SEQ ID NO: 240940 - RNA, 19 nt, Artificial Sequence
  Description of Artificial Sequence: Synthetic oligonucleotide
  Sense strand starting at position 3661 SEQ ID NO: 3100
cuuauuaugugaccacuga

SEQ ID NO: 240941 - RNA, 19 nt, Artificial Sequence
  Description of Artificial Sequence: Synthetic oligonucleotide
  Antisense strand to SEQ ID NO: 240940
ucaguggucacauaauaag

SEQ ID NO: 240942 - RNA, 19 nt, Artificial Sequence
  Description of Artificial Sequence: Synthetic oligonucleotide
  Sense strand starting at position 3686 SEQ ID NO: 3100
ucaagugagucaucuaacu

SEQ ID NO: 240943 - RNA, 19 nt, Artificial Sequence
  Description of Artificial Sequence: Synthetic oligonucleotide
  Antisense strand to SEQ ID NO: 240942
aguuagaugacucacuuga

SEQ ID NO: 240944 - RNA, 19 nt, Artificial Sequence
  Description of Artificial Sequence: Synthetic oligonucleotide
  Sense strand starting at position 3719 SEQ ID NO: 3100
accuaagagcugcaguuau

SEQ ID NO: 240945 - RNA, 19 nt, Artificial Sequence
  Description of Artificial Sequence: Synthetic oligonucleotide
  Antisense strand to SEQ ID NO: 240944
auaacugcagcucuuaggu

SEQ ID NO: 240946 - RNA, 19 nt, Artificial Sequence
  Description of Artificial Sequence: Synthetic oligonucleotide
  Sense strand starting at position 47 SEQ ID NO: 3101
auugauguguaggcacaua

SEQ ID NO: 240947 - RNA, 19 nt, Artificial Sequence
  Description of Artificial Sequence: Synthetic oligonucleotide
  Antisense strand to SEQ ID NO: 240946
uaugugccuacacaucaau

SEQ ID NO: 240948 - RNA, 19 nt, Artificial Sequence
  Description of Artificial Sequence: Synthetic oligonucleotide
  Sense strand starting at position 172 SEQ ID NO: 3101
uugccuuuggcugaaauca

SEQ ID NO: 240949 - RNA, 19 nt, Artificial Sequence
  Description of Artificial Sequence: Synthetic oligonucleotide
  Antisense strand to SEQ ID NO: 240948
ugauuucagccaaaggcaa

SEQ ID NO: 240950 - RNA, 19 nt, Artificial Sequence
  Description of Artificial Sequence: Synthetic oligonucleotide
  Sense strand starting at position 242 SEQ ID NO: 3101
gaucacauugcccaaguga

SEQ ID NO: 240951 - RNA, 19 nt, Artificial Sequence
  Description of Artificial Sequence: Synthetic oligonucleotide
  Antisense strand to SEQ ID NO: 240950
ucacuugggcaaugugauc

SEQ ID NO: 240952 - RNA, 19 nt, Artificial Sequence
  Description of Artificial Sequence: Synthetic oligonucleotide
  Sense strand starting at position 306 SEQ ID NO: 3101
ggucaaacauugcucauaa

SEQ ID NO: 240953 - RNA, 19 nt, Artificial Sequence
  Description of Artificial Sequence: Synthetic oligonucleotide
  Antisense strand to SEQ ID NO: 240952
uuaugagcaauguuugacc

SEQ ID NO: 240954 - RNA, 19 nt, Artificial Sequence
  Description of Artificial Sequence: Synthetic oligonucleotide
  Sense strand starting at position 419 SEQ ID NO: 3101
gguugcaaucuacacaaca

SEQ ID NO: 240955 - RNA, 19 nt, Artificial Sequence
  Description of Artificial Sequence: Synthetic oligonucleotide
  Antisense strand to SEQ ID NO: 240954
uguuguguagauugcaacc

SEQ ID NO: 240956 - RNA, 19 nt, Artificial Sequence
  Description of Artificial Sequence: Synthetic oligonucleotide
  Sense strand starting at position 476 SEQ ID NO: 3101
ccagcugguuuaucucaaa

SEQ ID NO: 240957 - RNA, 19 nt, Artificial Sequence
  Description of Artificial Sequence: Synthetic oligonucleotide
  Antisense strand to SEQ ID NO: 240956
uuugagauaaaccagcugg

SEQ ID NO: 240958 - RNA, 19 nt, Artificial Sequence
  Description of Artificial Sequence: Synthetic oligonucleotide
  Sense strand starting at position 562 SEQ ID NO: 3101
gcccaauaccgugauagag

SEQ ID NO: 240959 - RNA, 19 nt, Artificial Sequence
  Description of Artificial Sequence: Synthetic oligonucleotide
  Antisense strand to SEQ ID NO: 240958
cucuaucacgguauugggc

SEQ ID NO: 240960 - RNA, 19 nt, Artificial Sequence
  Description of Artificial Sequence: Synthetic oligonucleotide
  Sense strand starting at position 596 SEQ ID NO: 3101
augucuuagacugggaaau

SEQ ID NO: 240961 - RNA, 19 nt, Artificial Sequence
  Description of Artificial Sequence: Synthetic oligonucleotide
  Antisense strand to SEQ ID NO: 240960
auuucccagucuaagacau

SEQ ID NO: 240962 - RNA, 19 nt, Artificial Sequence
  Description of Artificial Sequence: Synthetic oligonucleotide
  Sense strand starting at position 597 SEQ ID NO: 3101
ugucuuagacugggaaauc

SEQ ID NO: 240963 - RNA, 19 nt, Artificial Sequence
  Description of Artificial Sequence: Synthetic oligonucleotide
  Antisense strand to SEQ ID NO: 240962
gauuucccagucuaagaca

SEQ ID NO: 240964 - RNA, 19 nt, Artificial Sequence
  Description of Artificial Sequence: Synthetic oligonucleotide
  Sense strand starting at position 801 SEQ ID NO: 3101
ccagaagcagcacgauuau

SEQ ID NO: 240965 - RNA, 19 nt, Artificial Sequence
  Description of Artificial Sequence: Synthetic oligonucleotide
  Antisense strand to SEQ ID NO: 240964
auaaucgugcugcuucugg

SEQ ID NO: 240966 - RNA, 19 nt, Artificial Sequence
  Description of Artificial Sequence: Synthetic oligonucleotide
  Sense strand starting at position 947 SEQ ID NO: 3101
aauuaaagcugguuagacu

SEQ ID NO: 240967 - RNA, 19 nt, Artificial Sequence
  Description of Artificial Sequence: Synthetic oligonucleotide
  Antisense strand to SEQ ID NO: 240966
agucuaaccagcuuuaauu

SEQ ID NO: 240968 - RNA, 19 nt, Artificial Sequence
  Description of Artificial Sequence: Synthetic oligonucleotide
  Sense strand starting at position 958 SEQ ID NO: 3101
guuagacugcuggauagua

SEQ ID NO: 240969 - RNA, 19 nt, Artificial Sequence
  Description of Artificial Sequence: Synthetic oligonucleotide
  Antisense strand to SEQ ID NO: 240968
uacuauccagcagucuaac

SEQ ID NO: 240970 - RNA, 19 nt, Artificial Sequence
  Description of Artificial Sequence: Synthetic oligonucleotide
  Sense strand starting at position 983 SEQ ID NO: 3101
cagugucuccuuuaagaga

SEQ ID NO: 240971 - RNA, 19 nt, Artificial Sequence
  Description of Artificial Sequence: Synthetic oligonucleotide
  Antisense strand to SEQ ID NO: 240970
ucucuuaaaggagacacug

SEQ ID NO: 240972 - RNA, 19 nt, Artificial Sequence
  Description of Artificial Sequence: Synthetic oligonucleotide
  Sense strand starting at position 1044 SEQ ID NO: 3101
cuaauagugaaguggauaa

SEQ ID NO: 240973 - RNA, 19 nt, Artificial Sequence
  Description of Artificial Sequence: Synthetic oligonucleotide
  Antisense strand to SEQ ID NO: 240972
uuauccacuucacuauuag

SEQ ID NO: 240974 - RNA, 19 nt, Artificial Sequence
  Description of Artificial Sequence: Synthetic oligonucleotide
  Sense strand starting at position 1055 SEQ ID NO: 3101
guggauaauuucugaagaa

SEQ ID NO: 240975 - RNA, 19 nt, Artificial Sequence
  Description of Artificial Sequence: Synthetic oligonucleotide
  Antisense strand to SEQ ID NO: 240974
uucuucagaaauuauccac

SEQ ID NO: 240976 - RNA, 19 nt, Artificial Sequence
  Description of Artificial Sequence: Synthetic oligonucleotide
  Sense strand starting at position 1056 SEQ ID NO: 3101
uggauaauuucugaagaau

SEQ ID NO: 240977 - RNA, 19 nt, Artificial Sequence
  Description of Artificial Sequence: Synthetic oligonucleotide
  Antisense strand to SEQ ID NO: 240976
auucuucagaaauuaucca

SEQ ID NO: 240978 - RNA, 19 nt, Artificial Sequence
  Description of Artificial Sequence: Synthetic oligonucleotide
  Sense strand starting at position 1270 SEQ ID NO: 3101
aucuuucuuucuuuguaga

SEQ ID NO: 240979 - RNA, 19 nt, Artificial Sequence
  Description of Artificial Sequence: Synthetic oligonucleotide
  Antisense strand to SEQ ID NO: 240978
ucuacaaagaaagaaagau

SEQ ID NO: 240980 - RNA, 19 nt, Artificial Sequence
  Description of Artificial Sequence: Synthetic oligonucleotide
  Sense strand starting at position 1329 SEQ ID NO: 3101
cagccaucuguugggaaga

SEQ ID NO: 240981 - RNA, 19 nt, Artificial Sequence
  Description of Artificial Sequence: Synthetic oligonucleotide
  Antisense strand to SEQ ID NO: 240980
ucuucccaacagauggcug

SEQ ID NO: 240982 - RNA, 19 nt, Artificial Sequence
  Description of Artificial Sequence: Synthetic oligonucleotide
  Sense strand starting at position 1762 SEQ ID NO: 3101
cuguaaagauguucucuaa

SEQ ID NO: 240983 - RNA, 19 nt, Artificial Sequence
  Description of Artificial Sequence: Synthetic oligonucleotide
  Antisense strand to SEQ ID NO: 240982
uuagagaacaucuuuacag

SEQ ID NO: 240984 - RNA, 19 nt, Artificial Sequence
  Description of Artificial Sequence: Synthetic oligonucleotide
  Sense strand starting at position 1815 SEQ ID NO: 3101
gcugcuaauagugaagaca

SEQ ID NO: 240985 - RNA, 19 nt, Artificial Sequence
  Description of Artificial Sequence: Synthetic oligonucleotide
  Antisense strand to SEQ ID NO: 240984
ugucuucacuauuagcagc

SEQ ID NO: 240986 - RNA, 19 nt, Artificial Sequence
  Description of Artificial Sequence: Synthetic oligonucleotide
  Sense strand starting at position 1873 SEQ ID NO: 3101
ggaaacgucuacgucuaaa

SEQ ID NO: 240987 - RNA, 19 nt, Artificial Sequence
  Description of Artificial Sequence: Synthetic oligonucleotide
  Antisense strand to SEQ ID NO: 240986
uuuagacguagacguuucc

SEQ ID NO: 240988 - RNA, 19 nt, Artificial Sequence
  Description of Artificial Sequence: Synthetic oligonucleotide
  Sense strand starting at position 1876 SEQ ID NO: 3101
aacgucuacgucuaaaucu

SEQ ID NO: 240989 - RNA, 19 nt, Artificial Sequence
  Description of Artificial Sequence: Synthetic oligonucleotide
  Antisense strand to SEQ ID NO: 240988
agauuuagacguagacguu

SEQ ID NO: 240990 - RNA, 19 nt, Artificial Sequence
  Description of Artificial Sequence: Synthetic oligonucleotide
  Sense strand starting at position 2011 SEQ ID NO: 3101
gucccaguuucccuggaga

SEQ ID NO: 240991 - RNA, 19 nt, Artificial Sequence
  Description of Artificial Sequence: Synthetic oligonucleotide
  Antisense strand to SEQ ID NO: 240990
ucuccagggaaacugggac

SEQ ID NO: 240992 - RNA, 19 nt, Artificial Sequence
  Description of Artificial Sequence: Synthetic oligonucleotide
  Sense strand starting at position 2013 SEQ ID NO: 3101
cccaguuucccuggagaac

SEQ ID NO: 240993 - RNA, 19 nt, Artificial Sequence
  Description of Artificial Sequence: Synthetic oligonucleotide
  Antisense strand to SEQ ID NO: 240992
guucuccagggaaacuggg

SEQ ID NO: 240994 - RNA, 19 nt, Artificial Sequence
  Description of Artificial Sequence: Synthetic oligonucleotide
  Sense strand starting at position 2065 SEQ ID NO: 3101
cgaaauggcaaaugaauga

SEQ ID NO: 240995 - RNA, 19 nt, Artificial Sequence
  Description of Artificial Sequence: Synthetic oligonucleotide
  Antisense strand to SEQ ID NO: 240994
ucauucauuugccauuucg

SEQ ID NO: 240996 - RNA, 19 nt, Artificial Sequence
  Description of Artificial Sequence: Synthetic oligonucleotide
  Sense strand starting at position 3050 SEQ ID NO: 3101
gcgggaccucccugaggaa

SEQ ID NO: 240997 - RNA, 19 nt, Artificial Sequence
  Description of Artificial Sequence: Synthetic oligonucleotide
  Antisense strand to SEQ ID NO: 240996
uuccucagggaggucccgc

SEQ ID NO: 240998 - RNA, 19 nt, Artificial Sequence
  Description of Artificial Sequence: Synthetic oligonucleotide
  Sense strand starting at position 3135 SEQ ID NO: 3101
guugcucuccuucugcgaa

SEQ ID NO: 240999 - RNA, 19 nt, Artificial Sequence
  Description of Artificial Sequence: Synthetic oligonucleotide
  Antisense strand to SEQ ID NO: 240998
uucgcagaaggagagcaac

SEQ ID NO: 241000 - RNA, 19 nt, Artificial Sequence
  Description of Artificial Sequence: Synthetic oligonucleotide
  Sense strand starting at position 3260 SEQ ID NO: 3101
gagugucaugccucgguuu

SEQ ID NO: 241001 - RNA, 19 nt, Artificial Sequence
  Description of Artificial Sequence: Synthetic oligonucleotide
  Antisense strand to SEQ ID NO: 241000
aaaccgaggcaugacacuc

SEQ ID NO: 241002 - RNA, 19 nt, Artificial Sequence
  Description of Artificial Sequence: Synthetic oligonucleotide
  Sense strand starting at position 3324 SEQ ID NO: 3101
ggguguggucacgaugaaa

SEQ ID NO: 241003 - RNA, 19 nt, Artificial Sequence
  Description of Artificial Sequence: Synthetic oligonucleotide
  Antisense strand to SEQ ID NO: 241002
uuucaucgugaccacaccc

SEQ ID NO: 241004 - RNA, 19 nt, Artificial Sequence
  Description of Artificial Sequence: Synthetic oligonucleotide
  Sense strand starting at position 3353 SEQ ID NO: 3101
uugaaagcguucccagaua

SEQ ID NO: 241005 - RNA, 19 nt, Artificial Sequence
  Description of Artificial Sequence: Synthetic oligonucleotide
  Antisense strand to SEQ ID NO: 241004
uaucugggaacgcuuucaa

SEQ ID NO: 241006 - RNA, 19 nt, Artificial Sequence
  Description of Artificial Sequence: Synthetic oligonucleotide
  Sense strand starting at position 3365 SEQ ID NO: 3101
ccagauacuuugccuaaag

SEQ ID NO: 241007 - RNA, 19 nt, Artificial Sequence
  Description of Artificial Sequence: Synthetic oligonucleotide
  Antisense strand to SEQ ID NO: 241006
cuuuaggcaaaguaucugg

SEQ ID NO: 241008 - RNA, 19 nt, Artificial Sequence
  Description of Artificial Sequence: Synthetic oligonucleotide
  Sense strand starting at position 3429 SEQ ID NO: 3101
uguuuacuucuauagcauc

SEQ ID NO: 241009 - RNA, 19 nt, Artificial Sequence
  Description of Artificial Sequence: Synthetic oligonucleotide
  Antisense strand to SEQ ID NO: 241008
gaugcuauagaaguaaaca

SEQ ID NO: 241010 - RNA, 19 nt, Artificial Sequence
  Description of Artificial Sequence: Synthetic oligonucleotide
  Sense strand starting at position 3532 SEQ ID NO: 3101
uguccagauuuagggaaga

SEQ ID NO: 241011 - RNA, 19 nt, Artificial Sequence
  Description of Artificial Sequence: Synthetic oligonucleotide
  Antisense strand to SEQ ID NO: 241010
ucuucccuaaaucuggaca

SEQ ID NO: 241012 - RNA, 19 nt, Artificial Sequence
  Description of Artificial Sequence: Synthetic oligonucleotide
  Sense strand starting at position 3606 SEQ ID NO: 3101
gauagccauuccuuuggga

SEQ ID NO: 241013 - RNA, 19 nt, Artificial Sequence
  Description of Artificial Sequence: Synthetic oligonucleotide
  Antisense strand to SEQ ID NO: 241012
ucccaaaggaauggcuauc

SEQ ID NO: 241014 - RNA, 19 nt, Artificial Sequence
  Description of Artificial Sequence: Synthetic oligonucleotide
  Sense strand starting at position 3608 SEQ ID NO: 3101
uagccauuccuuugggacu

SEQ ID NO: 241015 - RNA, 19 nt, Artificial Sequence
  Description of Artificial Sequence: Synthetic oligonucleotide
  Antisense strand to SEQ ID NO: 241014
agucccaaaggaauggcua

SEQ ID NO: 241016 - RNA, 19 nt, Artificial Sequence
  Description of Artificial Sequence: Synthetic oligonucleotide
  Sense strand starting at position 3681 SEQ ID NO: 3101
ucauuauuccuaugggaac

SEQ ID NO: 241017 - RNA, 19 nt, Artificial Sequence
  Description of Artificial Sequence: Synthetic oligonucleotide
  Antisense strand to SEQ ID NO: 241016
guucccauaggaauaauga

SEQ ID NO: 241018 - RNA, 19 nt, Artificial Sequence
  Description of Artificial Sequence: Synthetic oligonucleotide
  Sense strand starting at position 3842 SEQ ID NO: 3101
uagggcuuuggauguauua

SEQ ID NO: 241019 - RNA, 19 nt, Artificial Sequence
  Description of Artificial Sequence: Synthetic oligonucleotide
  Antisense strand to SEQ ID NO: 241018
uaauacauccaaagcccua

SEQ ID NO: 241020 - RNA, 19 nt, Artificial Sequence
  Description of Artificial Sequence: Synthetic oligonucleotide
  Sense strand starting at position 3844 SEQ ID NO: 3101
gggcuuuggauguauuacu

SEQ ID NO: 241021 - RNA, 19 nt, Artificial Sequence
  Description of Artificial Sequence: Synthetic oligonucleotide
  Antisense strand to SEQ ID NO: 241020
aguaauacauccaaagccc

SEQ ID NO: 241022 - RNA, 19 nt, Artificial Sequence
  Description of Artificial Sequence: Synthetic oligonucleotide
  Sense strand starting at position 3849 SEQ ID NO: 3101
uuggauguauuacugcaga

SEQ ID NO: 241023 - RNA, 19 nt, Artificial Sequence
  Description of Artificial Sequence: Synthetic oligonucleotide
  Antisense strand to SEQ ID NO: 241022
ucugcaguaauacauccaa

SEQ ID NO: 241024 - RNA, 19 nt, Artificial Sequence
  Description of Artificial Sequence: Synthetic oligonucleotide
  Sense strand starting at position 3904 SEQ ID NO: 3101
aggauauaagccuacggua

SEQ ID NO: 241025 - RNA, 19 nt, Artificial Sequence
  Description of Artificial Sequence: Synthetic oligonucleotide
  Antisense strand to SEQ ID NO: 241024
uaccguaggcuuauauccu

SEQ ID NO: 241026 - RNA, 19 nt, Artificial Sequence
  Description of Artificial Sequence: Synthetic oligonucleotide
  Sense strand starting at position 19 SEQ ID NO: 3102
ugcucacucugcugagaaa

SEQ ID NO: 241027 - RNA, 19 nt, Artificial Sequence
  Description of Artificial Sequence: Synthetic oligonucleotide
  Antisense strand to SEQ ID NO: 241026
uuucucagcagagugagca

SEQ ID NO: 241028 - RNA, 19 nt, Artificial Sequence
  Description of Artificial Sequence: Synthetic oligonucleotide
  Sense strand starting at position 20 SEQ ID NO: 3102
gcucacucugcugagaaag

SEQ ID NO: 241029 - RNA, 19 nt, Artificial Sequence
  Description of Artificial Sequence: Synthetic oligonucleotide
  Antisense strand to SEQ ID NO: 241028
cuuucucagcagagugagc

SEQ ID NO: 241030 - RNA, 19 nt, Artificial Sequence
  Description of Artificial Sequence: Synthetic oligonucleotide
  Sense strand starting at position 78 SEQ ID NO: 3102
gggaaaugugcuuaguuua

SEQ ID NO: 241031 - RNA, 19 nt, Artificial Sequence
  Description of Artificial Sequence: Synthetic oligonucleotide
  Antisense strand to SEQ ID NO: 241030
uaaacuaagcacauuuccc

SEQ ID NO: 241032 - RNA, 19 nt, Artificial Sequence
  Description of Artificial Sequence: Synthetic oligonucleotide
  Sense strand starting at position 81 SEQ ID NO: 3102
aaaugugcuuaguuuagca

SEQ ID NO: 241033 - RNA, 19 nt, Artificial Sequence
  Description of Artificial Sequence: Synthetic oligonucleotide
  Antisense strand to SEQ ID NO: 241032
ugcuaaacuaagcacauuu

SEQ ID NO: 241034 - RNA, 19 nt, Artificial Sequence
  Description of Artificial Sequence: Synthetic oligonucleotide
  Sense strand starting at position 85 SEQ ID NO: 3102
gugcuuaguuuagcauuua

SEQ ID NO: 241035 - RNA, 19 nt, Artificial Sequence
  Description of Artificial Sequence: Synthetic oligonucleotide
  Antisense strand to SEQ ID NO: 241034
uaaaugcuaaacuaagcac

SEQ ID NO: 241036 - RNA, 19 nt, Artificial Sequence
  Description of Artificial Sequence: Synthetic oligonucleotide
  Sense strand starting at position 184 SEQ ID NO: 3102
ugucacauuugaugucaau

SEQ ID NO: 241037 - RNA, 19 nt, Artificial Sequence
  Description of Artificial Sequence: Synthetic oligonucleotide
  Antisense strand to SEQ ID NO: 241036
auugacaucaaaugugaca

SEQ ID NO: 241038 - RNA, 19 nt, Artificial Sequence
  Description of Artificial Sequence: Synthetic oligonucleotide
  Sense strand starting at position 187 SEQ ID NO: 3102
cacauuugaugucaaugga

SEQ ID NO: 241039 - RNA, 19 nt, Artificial Sequence
  Description of Artificial Sequence: Synthetic oligonucleotide
  Antisense strand to SEQ ID NO: 241038
uccauugacaucaaaugug

SEQ ID NO: 241040 - RNA, 19 nt, Artificial Sequence
  Description of Artificial Sequence: Synthetic oligonucleotide
  Sense strand starting at position 214 SEQ ID NO: 3102
acucaagugugcuacaaac

SEQ ID NO: 241041 - RNA, 19 nt, Artificial Sequence
  Description of Artificial Sequence: Synthetic oligonucleotide
  Antisense strand to SEQ ID NO: 241040
guuuguagcacacuugagu

SEQ ID NO: 241042 - RNA, 19 nt, Artificial Sequence
  Description of Artificial Sequence: Synthetic oligonucleotide
  Sense strand starting at position 216 SEQ ID NO: 3102
ucaagugugcuacaaacaa

SEQ ID NO: 241043 - RNA, 19 nt, Artificial Sequence
  Description of Artificial Sequence: Synthetic oligonucleotide
  Antisense strand to SEQ ID NO: 241042
uuguuuguagcacacuuga

SEQ ID NO: 241044 - RNA, 19 nt, Artificial Sequence
  Description of Artificial Sequence: Synthetic oligonucleotide
  Sense strand starting at position 2477 SEQ ID NO: 3102
gaguuucuuccggacucgu

SEQ ID NO: 241045 - RNA, 19 nt, Artificial Sequence
  Description of Artificial Sequence: Synthetic oligonucleotide
  Antisense strand to SEQ ID NO: 241044
acgaguccggaagaaacuc

SEQ ID NO: 241046 - RNA, 19 nt, Artificial Sequence
  Description of Artificial Sequence: Synthetic oligonucleotide
  Sense strand starting at position 2755 SEQ ID NO: 3102
gccgucugguccuguaacu

SEQ ID NO: 241047 - RNA, 19 nt, Artificial Sequence
  Description of Artificial Sequence: Synthetic oligonucleotide
  Antisense strand to SEQ ID NO: 241046
aguuacaggaccagacggc

SEQ ID NO: 241048 - RNA, 19 nt, Artificial Sequence
  Description of Artificial Sequence: Synthetic oligonucleotide
  Sense strand starting at position 2769 SEQ ID NO: 3102
uaacuugaugcccgugaca

SEQ ID NO: 241049 - RNA, 19 nt, Artificial Sequence
  Description of Artificial Sequence: Synthetic oligonucleotide
  Antisense strand to SEQ ID NO: 241048
ugucacgggcaucaaguua

SEQ ID NO: 241050 - RNA, 19 nt, Artificial Sequence
  Description of Artificial Sequence: Synthetic oligonucleotide
  Sense strand starting at position 2772 SEQ ID NO: 3102
cuugaugcccgugacaguu

SEQ ID NO: 241051 - RNA, 19 nt, Artificial Sequence
  Description of Artificial Sequence: Synthetic oligonucleotide
  Antisense strand to SEQ ID NO: 241050
aacugucacgggcaucaag

SEQ ID NO: 241052 - RNA, 19 nt, Artificial Sequence
  Description of Artificial Sequence: Synthetic oligonucleotide
  Sense strand starting at position 2800 SEQ ID NO: 3102
ggccgcuucggcggagaaa

SEQ ID NO: 241053 - RNA, 19 nt, Artificial Sequence
  Description of Artificial Sequence: Synthetic oligonucleotide
  Antisense strand to SEQ ID NO: 241052
uuucuccgccgaagcggcc

SEQ ID NO: 241054 - RNA, 19 nt, Artificial Sequence
  Description of Artificial Sequence: Synthetic oligonucleotide
  Sense strand starting at position 3512 SEQ ID NO: 3102
cugggugaguuuggugaga

SEQ ID NO: 241055 - RNA, 19 nt, Artificial Sequence
  Description of Artificial Sequence: Synthetic oligonucleotide
  Antisense strand to SEQ ID NO: 241054
ucucaccaaacucacccag

SEQ ID NO: 241056 - RNA, 19 nt, Artificial Sequence
  Description of Artificial Sequence: Synthetic oligonucleotide
  Sense strand starting at position 3515 SEQ ID NO: 3102
ggugaguuuggugagaggu

SEQ ID NO: 241057 - RNA, 19 nt, Artificial Sequence
  Description of Artificial Sequence: Synthetic oligonucleotide
  Antisense strand to SEQ ID NO: 241056
accucucaccaaacucacc

SEQ ID NO: 241058 - RNA, 19 nt, Artificial Sequence
  Description of Artificial Sequence: Synthetic oligonucleotide
  Sense strand starting at position 3517 SEQ ID NO: 3102
ugaguuuggugagagguuu

SEQ ID NO: 241059 - RNA, 19 nt, Artificial Sequence
  Description of Artificial Sequence: Synthetic oligonucleotide
  Antisense strand to SEQ ID NO: 241058
aaaccucucaccaaacuca

SEQ ID NO: 241060 - RNA, 19 nt, Artificial Sequence
  Description of Artificial Sequence: Synthetic oligonucleotide
  Sense strand starting at position 3616 SEQ ID NO: 3102
gcucuugguugcucuauga

SEQ ID NO: 241061 - RNA, 19 nt, Artificial Sequence
  Description of Artificial Sequence: Synthetic oligonucleotide
  Antisense strand to SEQ ID NO: 241060
ucauagagcaaccaagagc

SEQ ID NO: 241062 - RNA, 19 nt, Artificial Sequence
  Description of Artificial Sequence: Synthetic oligonucleotide
  Sense strand starting at position 3667 SEQ ID NO: 3102
cacucaccugggugugaaa

SEQ ID NO: 241063 - RNA, 19 nt, Artificial Sequence
  Description of Artificial Sequence: Synthetic oligonucleotide
  Antisense strand to SEQ ID NO: 241062
uuucacacccaggugagug

SEQ ID NO: 241064 - RNA, 19 nt, Artificial Sequence
  Description of Artificial Sequence: Synthetic oligonucleotide
  Sense strand starting at position 3678 SEQ ID NO: 3102
gugugaaacuaccgcuuua

SEQ ID NO: 241065 - RNA, 19 nt, Artificial Sequence
  Description of Artificial Sequence: Synthetic oligonucleotide
  Antisense strand to SEQ ID NO: 241064
uaaagcgguaguuucacac

SEQ ID NO: 241066 - RNA, 19 nt, Artificial Sequence
  Description of Artificial Sequence: Synthetic oligonucleotide
  Sense strand starting at position 3748 SEQ ID NO: 3102
agugguggaucccaaggaa

SEQ ID NO: 241067 - RNA, 19 nt, Artificial Sequence
  Description of Artificial Sequence: Synthetic oligonucleotide
  Antisense strand to SEQ ID NO: 241066
uuccuugggauccaccacu

SEQ ID NO: 241068 - RNA, 19 nt, Artificial Sequence
  Description of Artificial Sequence: Synthetic oligonucleotide
  Sense strand starting at position 3767 SEQ ID NO: 3102
guggauuauuagccuguga

SEQ ID NO: 241069 - RNA, 19 nt, Artificial Sequence
  Description of Artificial Sequence: Synthetic oligonucleotide
  Antisense strand to SEQ ID NO: 241068
ucacaggcuaauaauccac

SEQ ID NO: 241070 - RNA, 19 nt, Artificial Sequence
  Description of Artificial Sequence: Synthetic oligonucleotide
  Sense strand starting at position 3769 SEQ ID NO: 3102
ggauuauuagccugugacu

SEQ ID NO: 241071 - RNA, 19 nt, Artificial Sequence
  Description of Artificial Sequence: Synthetic oligonucleotide
  Antisense strand to SEQ ID NO: 241070
agucacaggcuaauaaucc

SEQ ID NO: 241072 - RNA, 19 nt, Artificial Sequence
  Description of Artificial Sequence: Synthetic oligonucleotide
  Sense strand starting at position 3861 SEQ ID NO: 3102
uuuccacuacuucgagaaa

SEQ ID NO: 241073 - RNA, 19 nt, Artificial Sequence
  Description of Artificial Sequence: Synthetic oligonucleotide
  Antisense strand to SEQ ID NO: 241072
uuucucgaaguaguggaaa

SEQ ID NO: 241074 - RNA, 19 nt, Artificial Sequence
  Description of Artificial Sequence: Synthetic oligonucleotide
  Sense strand starting at position 3862 SEQ ID NO: 3102
uuccacuacuucgagaaac

SEQ ID NO: 241075 - RNA, 19 nt, Artificial Sequence
  Description of Artificial Sequence: Synthetic oligonucleotide
  Antisense strand to SEQ ID NO: 241074
guuucucgaaguaguggaa

SEQ ID NO: 241076 - RNA, 19 nt, Artificial Sequence
  Description of Artificial Sequence: Synthetic oligonucleotide
  Sense strand starting at position 3874 SEQ ID NO: 3102
gagaaacugugauagggaa

SEQ ID NO: 241077 - RNA, 19 nt, Artificial Sequence
  Description of Artificial Sequence: Synthetic oligonucleotide
  Antisense strand to SEQ ID NO: 241076
uucccuaucacaguuucuc

SEQ ID NO: 241078 - RNA, 19 nt, Artificial Sequence
  Description of Artificial Sequence: Synthetic oligonucleotide
  Sense strand starting at position 3903 SEQ ID NO: 3102
acugauauuuccuguacuc

SEQ ID NO: 241079 - RNA, 19 nt, Artificial Sequence
  Description of Artificial Sequence: Synthetic oligonucleotide
  Antisense strand to SEQ ID NO: 241078
gaguacaggaaauaucagu

SEQ ID NO: 241080 - RNA, 19 nt, Artificial Sequence
  Description of Artificial Sequence: Synthetic oligonucleotide
  Sense strand starting at position 123 SEQ ID NO: 3103
gaggguugugaccagcauu

SEQ ID NO: 241081 - RNA, 19 nt, Artificial Sequence
  Description of Artificial Sequence: Synthetic oligonucleotide
  Antisense strand to SEQ ID NO: 241080
aaugcuggucacaacccuc

SEQ ID NO: 241082 - RNA, 19 nt, Artificial Sequence
  Description of Artificial Sequence: Synthetic oligonucleotide
  Sense strand starting at position 126 SEQ ID NO: 3103
gguugugaccagcauuaga

SEQ ID NO: 241083 - RNA, 19 nt, Artificial Sequence
  Description of Artificial Sequence: Synthetic oligonucleotide
  Antisense strand to SEQ ID NO: 241082
ucuaaugcuggucacaacc

SEQ ID NO: 241084 - RNA, 19 nt, Artificial Sequence
  Description of Artificial Sequence: Synthetic oligonucleotide
  Sense strand starting at position 189 SEQ ID NO: 3103
acagaugauuugggaacca

SEQ ID NO: 241085 - RNA, 19 nt, Artificial Sequence
  Description of Artificial Sequence: Synthetic oligonucleotide
  Antisense strand to SEQ ID NO: 241084
ugguucccaaaucaucugu

SEQ ID NO: 241086 - RNA, 19 nt, Artificial Sequence
  Description of Artificial Sequence: Synthetic oligonucleotide
  Sense strand starting at position 404 SEQ ID NO: 3103
acaguuguggguuagggua

SEQ ID NO: 241087 - RNA, 19 nt, Artificial Sequence
  Description of Artificial Sequence: Synthetic oligonucleotide
  Antisense strand to SEQ ID NO: 241086
uacccuaacccacaacugu

SEQ ID NO: 241088 - RNA, 19 nt, Artificial Sequence
  Description of Artificial Sequence: Synthetic oligonucleotide
  Sense strand starting at position 445 SEQ ID NO: 3103
cucugcuuucuaggauaau

SEQ ID NO: 241089 - RNA, 19 nt, Artificial Sequence
  Description of Artificial Sequence: Synthetic oligonucleotide
  Antisense strand to SEQ ID NO: 241088
auuauccuagaaagcagag

SEQ ID NO: 241090 - RNA, 19 nt, Artificial Sequence
  Description of Artificial Sequence: Synthetic oligonucleotide
  Sense strand starting at position 623 SEQ ID NO: 3103
acaaacaugucuuuccagu

SEQ ID NO: 241091 - RNA, 19 nt, Artificial Sequence
  Description of Artificial Sequence: Synthetic oligonucleotide
  Antisense strand to SEQ ID NO: 241090
acuggaaagacauguuugu

SEQ ID NO: 241092 - RNA, 19 nt, Artificial Sequence
  Description of Artificial Sequence: Synthetic oligonucleotide
  Sense strand starting at position 689 SEQ ID NO: 3103
aacgauuacguguacugau

SEQ ID NO: 241093 - RNA, 19 nt, Artificial Sequence
  Description of Artificial Sequence: Synthetic oligonucleotide
  Antisense strand to SEQ ID NO: 241092
aucaguacacguaaucguu

SEQ ID NO: 241094 - RNA, 19 nt, Artificial Sequence
  Description of Artificial Sequence: Synthetic oligonucleotide
  Sense strand starting at position 819 SEQ ID NO: 3103
gagaauuaggucuguggau

SEQ ID NO: 241095 - RNA, 19 nt, Artificial Sequence
  Description of Artificial Sequence: Synthetic oligonucleotide
  Antisense strand to SEQ ID NO: 241094
auccacagaccuaauucuc

SEQ ID NO: 241096 - RNA, 19 nt, Artificial Sequence
  Description of Artificial Sequence: Synthetic oligonucleotide
  Sense strand starting at position 820 SEQ ID NO: 3103
agaauuaggucuguggaua

SEQ ID NO: 241097 - RNA, 19 nt, Artificial Sequence
  Description of Artificial Sequence: Synthetic oligonucleotide
  Antisense strand to SEQ ID NO: 241096
uauccacagaccuaauucu

SEQ ID NO: 241098 - RNA, 19 nt, Artificial Sequence
  Description of Artificial Sequence: Synthetic oligonucleotide
  Sense strand starting at position 821 SEQ ID NO: 3103
gaauuaggucuguggauac

SEQ ID NO: 241099 - RNA, 19 nt, Artificial Sequence
  Description of Artificial Sequence: Synthetic oligonucleotide
  Antisense strand to SEQ ID NO: 241098
guauccacagaccuaauuc

SEQ ID NO: 241100 - RNA, 19 nt, Artificial Sequence
  Description of Artificial Sequence: Synthetic oligonucleotide
  Sense strand starting at position 1137 SEQ ID NO: 3103
guuaaacaauguuugcaaa

SEQ ID NO: 241101 - RNA, 19 nt, Artificial Sequence
  Description of Artificial Sequence: Synthetic oligonucleotide
  Antisense strand to SEQ ID NO: 241100
uuugcaaacauuguuuaac

SEQ ID NO: 241102 - RNA, 19 nt, Artificial Sequence
  Description of Artificial Sequence: Synthetic oligonucleotide
  Sense strand starting at position 1186 SEQ ID NO: 3103
ucaacacuagccugaaagu

SEQ ID NO: 241103 - RNA, 19 nt, Artificial Sequence
  Description of Artificial Sequence: Synthetic oligonucleotide
  Antisense strand to SEQ ID NO: 241102
acuuucaggcuaguguuga

SEQ ID NO: 241104 - RNA, 19 nt, Artificial Sequence
  Description of Artificial Sequence: Synthetic oligonucleotide
  Sense strand starting at position 1738 SEQ ID NO: 3103
gagaaucucccggaccguu

SEQ ID NO: 241105 - RNA, 19 nt, Artificial Sequence
  Description of Artificial Sequence: Synthetic oligonucleotide
  Antisense strand to SEQ ID NO: 241104
aacgguccgggagauucuc

SEQ ID NO: 241106 - RNA, 19 nt, Artificial Sequence
  Description of Artificial Sequence: Synthetic oligonucleotide
  Sense strand starting at position 1808 SEQ ID NO: 3103
gaugacaaguccuccagga

SEQ ID NO: 241107 - RNA, 19 nt, Artificial Sequence
  Description of Artificial Sequence: Synthetic oligonucleotide
  Antisense strand to SEQ ID NO: 241106
uccuggaggacuugucauc

SEQ ID NO: 241108 - RNA, 19 nt, Artificial Sequence
  Description of Artificial Sequence: Synthetic oligonucleotide
  Sense strand starting at position 1988 SEQ ID NO: 3103
gcggauucgcaggaaagga

SEQ ID NO: 241109 - RNA, 19 nt, Artificial Sequence
  Description of Artificial Sequence: Synthetic oligonucleotide
  Antisense strand to SEQ ID NO: 241108
uccuuuccugcgaauccgc

SEQ ID NO: 241110 - RNA, 19 nt, Artificial Sequence
  Description of Artificial Sequence: Synthetic oligonucleotide
  Sense strand starting at position 2137 SEQ ID NO: 3103
cuuaguauucuuugagacu

SEQ ID NO: 241111 - RNA, 19 nt, Artificial Sequence
  Description of Artificial Sequence: Synthetic oligonucleotide
  Antisense strand to SEQ ID NO: 241110
agucucaaagaauacuaag

SEQ ID NO: 241112 - RNA, 19 nt, Artificial Sequence
  Description of Artificial Sequence: Synthetic oligonucleotide
  Sense strand starting at position 2176 SEQ ID NO: 3103
gauaaaggacaucgaugua

SEQ ID NO: 241113 - RNA, 19 nt, Artificial Sequence
  Description of Artificial Sequence: Synthetic oligonucleotide
  Antisense strand to SEQ ID NO: 241112
uacaucgauguccuuuauc

SEQ ID NO: 241114 - RNA, 19 nt, Artificial Sequence
  Description of Artificial Sequence: Synthetic oligonucleotide
  Sense strand starting at position 2179 SEQ ID NO: 3103
aaaggacaucgauguaguu

SEQ ID NO: 241115 - RNA, 19 nt, Artificial Sequence
  Description of Artificial Sequence: Synthetic oligonucleotide
  Antisense strand to SEQ ID NO: 241114
aacuacaucgauguccuuu

SEQ ID NO: 241116 - RNA, 19 nt, Artificial Sequence
  Description of Artificial Sequence: Synthetic oligonucleotide
  Sense strand starting at position 2181 SEQ ID NO: 3103
aggacaucgauguaguuua

SEQ ID NO: 241117 - RNA, 19 nt, Artificial Sequence
  Description of Artificial Sequence: Synthetic oligonucleotide
  Antisense strand to SEQ ID NO: 241116
uaaacuacaucgauguccu

SEQ ID NO: 241118 - RNA, 19 nt, Artificial Sequence
  Description of Artificial Sequence: Synthetic oligonucleotide
  Sense strand starting at position 2220 SEQ ID NO: 3103
gccgaauuccuuuaauauu

SEQ ID NO: 241119 - RNA, 19 nt, Artificial Sequence
  Description of Artificial Sequence: Synthetic oligonucleotide
  Antisense strand to SEQ ID NO: 241118
aauauuaaaggaauucggc

SEQ ID NO: 241120 - RNA, 19 nt, Artificial Sequence
  Description of Artificial Sequence: Synthetic oligonucleotide
  Sense strand starting at position 2302 SEQ ID NO: 3103
acacaagaguugucugauu

SEQ ID NO: 241121 - RNA, 19 nt, Artificial Sequence
  Description of Artificial Sequence: Synthetic oligonucleotide
  Antisense strand to SEQ ID NO: 241120
aaucagacaacucuugugu

SEQ ID NO: 241122 - RNA, 19 nt, Artificial Sequence
  Description of Artificial Sequence: Synthetic oligonucleotide
  Sense strand starting at position 2304 SEQ ID NO: 3103
acaagaguugucugauuaa

SEQ ID NO: 241123 - RNA, 19 nt, Artificial Sequence
  Description of Artificial Sequence: Synthetic oligonucleotide
  Antisense strand to SEQ ID NO: 241122
uuaaucagacaacucuugu

SEQ ID NO: 241124 - RNA, 19 nt, Artificial Sequence
  Description of Artificial Sequence: Synthetic oligonucleotide
  Sense strand starting at position 2307 SEQ ID NO: 3103
agaguugucugauuaagac

SEQ ID NO: 241125 - RNA, 19 nt, Artificial Sequence
  Description of Artificial Sequence: Synthetic oligonucleotide
  Antisense strand to SEQ ID NO: 241124
gucuuaaucagacaacucu

SEQ ID NO: 241126 - RNA, 19 nt, Artificial Sequence
  Description of Artificial Sequence: Synthetic oligonucleotide
  Sense strand starting at position 2362 SEQ ID NO: 3103
cuguuaucaguggaagcau

SEQ ID NO: 241127 - RNA, 19 nt, Artificial Sequence
  Description of Artificial Sequence: Synthetic oligonucleotide
  Antisense strand to SEQ ID NO: 241126
augcuuccacugauaacag

SEQ ID NO: 241128 - RNA, 19 nt, Artificial Sequence
  Description of Artificial Sequence: Synthetic oligonucleotide
  Sense strand starting at position 2371 SEQ ID NO: 3103
guggaagcauaauuacauu

SEQ ID NO: 241129 - RNA, 19 nt, Artificial Sequence
  Description of Artificial Sequence: Synthetic oligonucleotide
  Antisense strand to SEQ ID NO: 241128
aauguaauuaugcuuccac

SEQ ID NO: 241130 - RNA, 19 nt, Artificial Sequence
  Description of Artificial Sequence: Synthetic oligonucleotide
  Sense strand starting at position 2530 SEQ ID NO: 3103
ugacacauuuaucagaaag

SEQ ID NO: 241131 - RNA, 19 nt, Artificial Sequence
  Description of Artificial Sequence: Synthetic oligonucleotide
  Antisense strand to SEQ ID NO: 241130
cuuucugauaaauguguca

SEQ ID NO: 241132 - RNA, 19 nt, Artificial Sequence
  Description of Artificial Sequence: Synthetic oligonucleotide
  Sense strand starting at position 2551 SEQ ID NO: 3103
gaaauccggugacaaauuu

SEQ ID NO: 241133 - RNA, 19 nt, Artificial Sequence
  Description of Artificial Sequence: Synthetic oligonucleotide
  Antisense strand to SEQ ID NO: 241132
aaauuugucaccggauuuc

SEQ ID NO: 241134 - RNA, 19 nt, Artificial Sequence
  Description of Artificial Sequence: Synthetic oligonucleotide
  Sense strand starting at position 2653 SEQ ID NO: 3103
uugcuaaccuaggucaaau

SEQ ID NO: 241135 - RNA, 19 nt, Artificial Sequence
  Description of Artificial Sequence: Synthetic oligonucleotide
  Antisense strand to SEQ ID NO: 241134
auuugaccuagguuagcaa

SEQ ID NO: 241136 - RNA, 19 nt, Artificial Sequence
  Description of Artificial Sequence: Synthetic oligonucleotide
  Sense strand starting at position 2831 SEQ ID NO: 3103
uagcaugguuuacuggaaa

SEQ ID NO: 241137 - RNA, 19 nt, Artificial Sequence
  Description of Artificial Sequence: Synthetic oligonucleotide
  Antisense strand to SEQ ID NO: 241136
uuuccaguaaaccaugcua

SEQ ID NO: 241138 - RNA, 19 nt, Artificial Sequence
  Description of Artificial Sequence: Synthetic oligonucleotide
  Sense strand starting at position 2866 SEQ ID NO: 3103
guuagucagacugagauuc

SEQ ID NO: 241139 - RNA, 19 nt, Artificial Sequence
  Description of Artificial Sequence: Synthetic oligonucleotide
  Antisense strand to SEQ ID NO: 241138
gaaucucagucugacuaac

SEQ ID NO: 241140 - RNA, 19 nt, Artificial Sequence
  Description of Artificial Sequence: Synthetic oligonucleotide
  Sense strand starting at position 3021 SEQ ID NO: 3103
acacuaggccugcaaauua

SEQ ID NO: 241141 - RNA, 19 nt, Artificial Sequence
  Description of Artificial Sequence: Synthetic oligonucleotide
  Antisense strand to SEQ ID NO: 241140
uaauuugcaggccuagugu

SEQ ID NO: 241142 - RNA, 19 nt, Artificial Sequence
  Description of Artificial Sequence: Synthetic oligonucleotide
  Sense strand starting at position 3068 SEQ ID NO: 3103
auaguuuaaugaccuugaa

SEQ ID NO: 241143 - RNA, 19 nt, Artificial Sequence
  Description of Artificial Sequence: Synthetic oligonucleotide
  Antisense strand to SEQ ID NO: 241142
uucaaggucauuaaacuau

SEQ ID NO: 241144 - RNA, 19 nt, Artificial Sequence
  Description of Artificial Sequence: Synthetic oligonucleotide
  Sense strand starting at position 3071 SEQ ID NO: 3103
guuuaaugaccuugaacaa

SEQ ID NO: 241145 - RNA, 19 nt, Artificial Sequence
  Description of Artificial Sequence: Synthetic oligonucleotide
  Antisense strand to SEQ ID NO: 241144
uuguucaaggucauuaaac

SEQ ID NO: 241146 - RNA, 19 nt, Artificial Sequence
  Description of Artificial Sequence: Synthetic oligonucleotide
  Sense strand starting at position 3129 SEQ ID NO: 3103
aauggaugugcugaugauu

SEQ ID NO: 241147 - RNA, 19 nt, Artificial Sequence
  Description of Artificial Sequence: Synthetic oligonucleotide
  Antisense strand to SEQ ID NO: 241146
aaucaucagcacauccauu

SEQ ID NO: 241148 - RNA, 19 nt, Artificial Sequence
  Description of Artificial Sequence: Synthetic oligonucleotide
  Sense strand starting at position 3132 SEQ ID NO: 3103
ggaugugcugaugauuaga

SEQ ID NO: 241149 - RNA, 19 nt, Artificial Sequence
  Description of Artificial Sequence: Synthetic oligonucleotide
  Antisense strand to SEQ ID NO: 241148
ucuaaucaucagcacaucc

SEQ ID NO: 241150 - RNA, 19 nt, Artificial Sequence
  Description of Artificial Sequence: Synthetic oligonucleotide
  Sense strand starting at position 3141 SEQ ID NO: 3103
gaugauuagagguguuugu

SEQ ID NO: 241151 - RNA, 19 nt, Artificial Sequence
  Description of Artificial Sequence: Synthetic oligonucleotide
  Antisense strand to SEQ ID NO: 241150
acaaacaccucuaaucauc

SEQ ID NO: 241152 - RNA, 19 nt, Artificial Sequence
  Description of Artificial Sequence: Synthetic oligonucleotide
  Sense strand starting at position 3151 SEQ ID NO: 3103
gguguuugugaagauccau

SEQ ID NO: 241153 - RNA, 19 nt, Artificial Sequence
  Description of Artificial Sequence: Synthetic oligonucleotide
  Antisense strand to SEQ ID NO: 241152
auggaucuucacaaacacc

SEQ ID NO: 241154 - RNA, 19 nt, Artificial Sequence
  Description of Artificial Sequence: Synthetic oligonucleotide
  Sense strand starting at position 3201 SEQ ID NO: 3103
aggacuucguagguaucaa

SEQ ID NO: 241155 - RNA, 19 nt, Artificial Sequence
  Description of Artificial Sequence: Synthetic oligonucleotide
  Antisense strand to SEQ ID NO: 241154
uugauaccuacgaaguccu

SEQ ID NO: 241156 - RNA, 19 nt, Artificial Sequence
  Description of Artificial Sequence: Synthetic oligonucleotide
  Sense strand starting at position 3202 SEQ ID NO: 3103
ggacuucguagguaucaag

SEQ ID NO: 241157 - RNA, 19 nt, Artificial Sequence
  Description of Artificial Sequence: Synthetic oligonucleotide
  Antisense strand to SEQ ID NO: 241156
cuugauaccuacgaagucc

SEQ ID NO: 241158 - RNA, 19 nt, Artificial Sequence
  Description of Artificial Sequence: Synthetic oligonucleotide
  Sense strand starting at position 3414 SEQ ID NO: 3103
augugcucaccacauagau

SEQ ID NO: 241159 - RNA, 19 nt, Artificial Sequence
  Description of Artificial Sequence: Synthetic oligonucleotide
  Antisense strand to SEQ ID NO: 241158
aucuauguggugagcacau

SEQ ID NO: 241160 - RNA, 19 nt, Artificial Sequence
  Description of Artificial Sequence: Synthetic oligonucleotide
  Sense strand starting at position 82 SEQ ID NO: 3104
uuacauaauccugaacgcu

SEQ ID NO: 241161 - RNA, 19 nt, Artificial Sequence
  Description of Artificial Sequence: Synthetic oligonucleotide
  Antisense strand to SEQ ID NO: 241160
agcguucaggauuauguaa

SEQ ID NO: 241162 - RNA, 19 nt, Artificial Sequence
  Description of Artificial Sequence: Synthetic oligonucleotide
  Sense strand starting at position 192 SEQ ID NO: 3104
gcgauuguuccucuuugua

SEQ ID NO: 241163 - RNA, 19 nt, Artificial Sequence
  Description of Artificial Sequence: Synthetic oligonucleotide
  Antisense strand to SEQ ID NO: 241162
uacaaagaggaacaaucgc

SEQ ID NO: 241164 - RNA, 19 nt, Artificial Sequence
  Description of Artificial Sequence: Synthetic oligonucleotide
  Sense strand starting at position 328 SEQ ID NO: 3104
gacagcgacuguccuuaaa

SEQ ID NO: 241165 - RNA, 19 nt, Artificial Sequence
  Description of Artificial Sequence: Synthetic oligonucleotide
  Antisense strand to SEQ ID NO: 241164
uuuaaggacagucgcuguc

SEQ ID NO: 241166 - RNA, 19 nt, Artificial Sequence
  Description of Artificial Sequence: Synthetic oligonucleotide
  Sense strand starting at position 421 SEQ ID NO: 3104
cugaaugaaugcuuucuaa

SEQ ID NO: 241167 - RNA, 19 nt, Artificial Sequence
  Description of Artificial Sequence: Synthetic oligonucleotide
  Antisense strand to SEQ ID NO: 241166
uuagaaagcauucauucag

SEQ ID NO: 241168 - RNA, 19 nt, Artificial Sequence
  Description of Artificial Sequence: Synthetic oligonucleotide
  Sense strand starting at position 431 SEQ ID NO: 3104
gcuuucuaagggcaaucua

SEQ ID NO: 241169 - RNA, 19 nt, Artificial Sequence
  Description of Artificial Sequence: Synthetic oligonucleotide
  Antisense strand to SEQ ID NO: 241168
uagauugcccuuagaaagc

SEQ ID NO: 241170 - RNA, 19 nt, Artificial Sequence
  Description of Artificial Sequence: Synthetic oligonucleotide
  Sense strand starting at position 438 SEQ ID NO: 3104
aagggcaaucuacauguua

SEQ ID NO: 241171 - RNA, 19 nt, Artificial Sequence
  Description of Artificial Sequence: Synthetic oligonucleotide
  Antisense strand to SEQ ID NO: 241170
uaacauguagauugcccuu

SEQ ID NO: 241172 - RNA, 19 nt, Artificial Sequence
  Description of Artificial Sequence: Synthetic oligonucleotide
  Sense strand starting at position 525 SEQ ID NO: 3104
ccaagaugugucuggauug

SEQ ID NO: 241173 - RNA, 19 nt, Artificial Sequence
  Description of Artificial Sequence: Synthetic oligonucleotide
  Antisense strand to SEQ ID NO: 241172
caauccagacacaucuugg

SEQ ID NO: 241174 - RNA, 19 nt, Artificial Sequence
  Description of Artificial Sequence: Synthetic oligonucleotide
  Sense strand starting at position 544 SEQ ID NO: 3104
gcuauaaaggcagaaaggu

SEQ ID NO: 241175 - RNA, 19 nt, Artificial Sequence
  Description of Artificial Sequence: Synthetic oligonucleotide
  Antisense strand to SEQ ID NO: 241174
accuuucugccuuuauagc

SEQ ID NO: 241176 - RNA, 19 nt, Artificial Sequence
  Description of Artificial Sequence: Synthetic oligonucleotide
  Sense strand starting at position 553 SEQ ID NO: 3104
gcagaaagguaggauuucu

SEQ ID NO: 241177 - RNA, 19 nt, Artificial Sequence
  Description of Artificial Sequence: Synthetic oligonucleotide
  Antisense strand to SEQ ID NO: 241176
agaaauccuaccuuucugc

SEQ ID NO: 241178 - RNA, 19 nt, Artificial Sequence
  Description of Artificial Sequence: Synthetic oligonucleotide
  Sense strand starting at position 610 SEQ ID NO: 3104
cguuuaaugcaacauagaa

SEQ ID NO: 241179 - RNA, 19 nt, Artificial Sequence
  Description of Artificial Sequence: Synthetic oligonucleotide
  Antisense strand to SEQ ID NO: 241178
uucuauguugcauuaaacg

SEQ ID NO: 241180 - RNA, 19 nt, Artificial Sequence
  Description of Artificial Sequence: Synthetic oligonucleotide
  Sense strand starting at position 624 SEQ ID NO: 3104
uagaacuugcucugagguu

SEQ ID NO: 241181 - RNA, 19 nt, Artificial Sequence
  Description of Artificial Sequence: Synthetic oligonucleotide
  Antisense strand to SEQ ID NO: 241180
aaccucagagcaaguucua

SEQ ID NO: 241182 - RNA, 19 nt, Artificial Sequence
  Description of Artificial Sequence: Synthetic oligonucleotide
  Sense strand starting at position 653 SEQ ID NO: 3104
aagugauacugaguuaguu

SEQ ID NO: 241183 - RNA, 19 nt, Artificial Sequence
  Description of Artificial Sequence: Synthetic oligonucleotide
  Antisense strand to SEQ ID NO: 241182
aacuaacucaguaucacuu

SEQ ID NO: 241184 - RNA, 19 nt, Artificial Sequence
  Description of Artificial Sequence: Synthetic oligonucleotide
  Sense strand starting at position 655 SEQ ID NO: 3104
gugauacugaguuaguuau

SEQ ID NO: 241185 - RNA, 19 nt, Artificial Sequence
  Description of Artificial Sequence: Synthetic oligonucleotide
  Antisense strand to SEQ ID NO: 241184
auaacuaacucaguaucac

SEQ ID NO: 241186 - RNA, 19 nt, Artificial Sequence
  Description of Artificial Sequence: Synthetic oligonucleotide
  Sense strand starting at position 657 SEQ ID NO: 3104
gauacugaguuaguuauaa

SEQ ID NO: 241187 - RNA, 19 nt, Artificial Sequence
  Description of Artificial Sequence: Synthetic oligonucleotide
  Antisense strand to SEQ ID NO: 241186
uuauaacuaacucaguauc

SEQ ID NO: 241188 - RNA, 19 nt, Artificial Sequence
  Description of Artificial Sequence: Synthetic oligonucleotide
  Sense strand starting at position 753 SEQ ID NO: 3104
guccguuuacauuaacuau

SEQ ID NO: 241189 - RNA, 19 nt, Artificial Sequence
  Description of Artificial Sequence: Synthetic oligonucleotide
  Antisense strand to SEQ ID NO: 241188
auaguuaauguaaacggac

SEQ ID NO: 241190 - RNA, 19 nt, Artificial Sequence
  Description of Artificial Sequence: Synthetic oligonucleotide
  Sense strand starting at position 852 SEQ ID NO: 3104
aacaauagucaaugugagu

SEQ ID NO: 241191 - RNA, 19 nt, Artificial Sequence
  Description of Artificial Sequence: Synthetic oligonucleotide
  Antisense strand to SEQ ID NO: 241190
acucacauugacuauuguu

SEQ ID NO: 241192 - RNA, 19 nt, Artificial Sequence
  Description of Artificial Sequence: Synthetic oligonucleotide
  Sense strand starting at position 910 SEQ ID NO: 3104
gggauuguacgugacuguu

SEQ ID NO: 241193 - RNA, 19 nt, Artificial Sequence
  Description of Artificial Sequence: Synthetic oligonucleotide
  Antisense strand to SEQ ID NO: 241192
aacagucacguacaauccc

SEQ ID NO: 241194 - RNA, 19 nt, Artificial Sequence
  Description of Artificial Sequence: Synthetic oligonucleotide
  Sense strand starting at position 1165 SEQ ID NO: 3104
guuccuauuaguuagguga

SEQ ID NO: 241195 - RNA, 19 nt, Artificial Sequence
  Description of Artificial Sequence: Synthetic oligonucleotide
  Antisense strand to SEQ ID NO: 241194
ucaccuaacuaauaggaac

SEQ ID NO: 241196 - RNA, 19 nt, Artificial Sequence
  Description of Artificial Sequence: Synthetic oligonucleotide
  Sense strand starting at position 1168 SEQ ID NO: 3104
ccuauuaguuaggugaaca

SEQ ID NO: 241197 - RNA, 19 nt, Artificial Sequence
  Description of Artificial Sequence: Synthetic oligonucleotide
  Antisense strand to SEQ ID NO: 241196
uguucaccuaacuaauagg

SEQ ID NO: 241198 - RNA, 19 nt, Artificial Sequence
  Description of Artificial Sequence: Synthetic oligonucleotide
  Sense strand starting at position 1173 SEQ ID NO: 3104
uaguuaggugaacaauguu

SEQ ID NO: 241199 - RNA, 19 nt, Artificial Sequence
  Description of Artificial Sequence: Synthetic oligonucleotide
  Antisense strand to SEQ ID NO: 241198
aacauuguucaccuaacua

SEQ ID NO: 241200 - RNA, 19 nt, Artificial Sequence
  Description of Artificial Sequence: Synthetic oligonucleotide
  Sense strand starting at position 2237 SEQ ID NO: 3104
gugggaugcgugucaucuc

SEQ ID NO: 241201 - RNA, 19 nt, Artificial Sequence
  Description of Artificial Sequence: Synthetic oligonucleotide
  Antisense strand to SEQ ID NO: 241200
gagaugacacgcaucccac

SEQ ID NO: 241202 - RNA, 19 nt, Artificial Sequence
  Description of Artificial Sequence: Synthetic oligonucleotide
  Sense strand starting at position 2286 SEQ ID NO: 3104
uggagauuucugcgugacu

SEQ ID NO: 241203 - RNA, 19 nt, Artificial Sequence
  Description of Artificial Sequence: Synthetic oligonucleotide
  Antisense strand to SEQ ID NO: 241202
agucacgcagaaaucucca

SEQ ID NO: 241204 - RNA, 19 nt, Artificial Sequence
  Description of Artificial Sequence: Synthetic oligonucleotide
  Sense strand starting at position 2287 SEQ ID NO: 3104
ggagauuucugcgugacuu

SEQ ID NO: 241205 - RNA, 19 nt, Artificial Sequence
  Description of Artificial Sequence: Synthetic oligonucleotide
  Antisense strand to SEQ ID NO: 241204
aagucacgcagaaaucucc

SEQ ID NO: 241206 - RNA, 19 nt, Artificial Sequence
  Description of Artificial Sequence: Synthetic oligonucleotide
  Sense strand starting at position 2288 SEQ ID NO: 3104
gagauuucugcgugacuug

SEQ ID NO: 241207 - RNA, 19 nt, Artificial Sequence
  Description of Artificial Sequence: Synthetic oligonucleotide
  Antisense strand to SEQ ID NO: 241206
caagucacgcagaaaucuc

SEQ ID NO: 241208 - RNA, 19 nt, Artificial Sequence
  Description of Artificial Sequence: Synthetic oligonucleotide
  Sense strand starting at position 2479 SEQ ID NO: 3104
auuuaaagaugcugacaaa

SEQ ID NO: 241209 - RNA, 19 nt, Artificial Sequence
  Description of Artificial Sequence: Synthetic oligonucleotide
  Antisense strand to SEQ ID NO: 241208
uuugucagcaucuuuaaau

SEQ ID NO: 241210 - RNA, 19 nt, Artificial Sequence
  Description of Artificial Sequence: Synthetic oligonucleotide
  Sense strand starting at position 2491 SEQ ID NO: 3104
ugacaaaugcgauacacau

SEQ ID NO: 241211 - RNA, 19 nt, Artificial Sequence
  Description of Artificial Sequence: Synthetic oligonucleotide
  Antisense strand to SEQ ID NO: 241210
auguguaucgcauuuguca

SEQ ID NO: 241212 - RNA, 19 nt, Artificial Sequence
  Description of Artificial Sequence: Synthetic oligonucleotide
  Sense strand starting at position 2723 SEQ ID NO: 3104
ugcugauaugauuaccaua

SEQ ID NO: 241213 - RNA, 19 nt, Artificial Sequence
  Description of Artificial Sequence: Synthetic oligonucleotide
  Antisense strand to SEQ ID NO: 241212
uaugguaaucauaucagca

SEQ ID NO: 241214 - RNA, 19 nt, Artificial Sequence
  Description of Artificial Sequence: Synthetic oligonucleotide
  Sense strand starting at position 2725 SEQ ID NO: 3104
cugauaugauuaccauagu

SEQ ID NO: 241215 - RNA, 19 nt, Artificial Sequence
  Description of Artificial Sequence: Synthetic oligonucleotide
  Antisense strand to SEQ ID NO: 241214
acuaugguaaucauaucag

SEQ ID NO: 241216 - RNA, 19 nt, Artificial Sequence
  Description of Artificial Sequence: Synthetic oligonucleotide
  Sense strand starting at position 2733 SEQ ID NO: 3104
auuaccauaguaugugauu

SEQ ID NO: 241217 - RNA, 19 nt, Artificial Sequence
  Description of Artificial Sequence: Synthetic oligonucleotide
  Antisense strand to SEQ ID NO: 241216
aaucacauacuaugguaau

SEQ ID NO: 241218 - RNA, 19 nt, Artificial Sequence
  Description of Artificial Sequence: Synthetic oligonucleotide
  Sense strand starting at position 3010 SEQ ID NO: 3104
cagccuauucugggaugau

SEQ ID NO: 241219 - RNA, 19 nt, Artificial Sequence
  Description of Artificial Sequence: Synthetic oligonucleotide
  Antisense strand to SEQ ID NO: 241218
aucaucccagaauaggcug

SEQ ID NO: 241220 - RNA, 19 nt, Artificial Sequence
  Description of Artificial Sequence: Synthetic oligonucleotide
  Sense strand starting at position 3087 SEQ ID NO: 3104
gugacugauccagguggga

SEQ ID NO: 241221 - RNA, 19 nt, Artificial Sequence
  Description of Artificial Sequence: Synthetic oligonucleotide
  Antisense strand to SEQ ID NO: 241220
ucccaccuggaucagucac

SEQ ID NO: 241222 - RNA, 19 nt, Artificial Sequence
  Description of Artificial Sequence: Synthetic oligonucleotide
  Sense strand starting at position 3089 SEQ ID NO: 3104
gacugauccaggugggaac

SEQ ID NO: 241223 - RNA, 19 nt, Artificial Sequence
  Description of Artificial Sequence: Synthetic oligonucleotide
  Antisense strand to SEQ ID NO: 241222
guucccaccuggaucaguc

SEQ ID NO: 241224 - RNA, 19 nt, Artificial Sequence
  Description of Artificial Sequence: Synthetic oligonucleotide
  Sense strand starting at position 3106 SEQ ID NO: 3104
acaggaaggcuguaucauu

SEQ ID NO: 241225 - RNA, 19 nt, Artificial Sequence
  Description of Artificial Sequence: Synthetic oligonucleotide
  Antisense strand to SEQ ID NO: 241224
aaugauacagccuuccugu

SEQ ID NO: 241226 - RNA, 19 nt, Artificial Sequence
  Description of Artificial Sequence: Synthetic oligonucleotide
  Sense strand starting at position 3168 SEQ ID NO: 3104
cucucaauuccacggaauu

SEQ ID NO: 241227 - RNA, 19 nt, Artificial Sequence
  Description of Artificial Sequence: Synthetic oligonucleotide
  Antisense strand to SEQ ID NO: 241226
aauuccguggaauugagag

SEQ ID NO: 241228 - RNA, 19 nt, Artificial Sequence
  Description of Artificial Sequence: Synthetic oligonucleotide
  Sense strand starting at position 3480 SEQ ID NO: 3104
augauugacucuuccauug

SEQ ID NO: 241229 - RNA, 19 nt, Artificial Sequence
  Description of Artificial Sequence: Synthetic oligonucleotide
  Antisense strand to SEQ ID NO: 241228
caauggaagagucaaucau

SEQ ID NO: 241230 - RNA, 19 nt, Artificial Sequence
  Description of Artificial Sequence: Synthetic oligonucleotide
  Sense strand starting at position 3490 SEQ ID NO: 3104
cuuccauuguuaccagaua

SEQ ID NO: 241231 - RNA, 19 nt, Artificial Sequence
  Description of Artificial Sequence: Synthetic oligonucleotide
  Antisense strand to SEQ ID NO: 241230
uaucugguaacaauggaag

SEQ ID NO: 241232 - RNA, 19 nt, Artificial Sequence
  Description of Artificial Sequence: Synthetic oligonucleotide
  Sense strand starting at position 3503 SEQ ID NO: 3104
cagauagaguuguccaggu

SEQ ID NO: 241233 - RNA, 19 nt, Artificial Sequence
  Description of Artificial Sequence: Synthetic oligonucleotide
  Antisense strand to SEQ ID NO: 241232
accuggacaacucuaucug

SEQ ID NO: 241234 - RNA, 19 nt, Artificial Sequence
  Description of Artificial Sequence: Synthetic oligonucleotide
  Sense strand starting at position 3837 SEQ ID NO: 3104
ggaaacuucuuucuuguua

SEQ ID NO: 241235 - RNA, 19 nt, Artificial Sequence
  Description of Artificial Sequence: Synthetic oligonucleotide
  Antisense strand to SEQ ID NO: 241234
uaacaagaaagaaguuucc

SEQ ID NO: 241236 - RNA, 19 nt, Artificial Sequence
  Description of Artificial Sequence: Synthetic oligonucleotide
  Sense strand starting at position 3849 SEQ ID NO: 3104
cuuguuaucacgggaguga

SEQ ID NO: 241237 - RNA, 19 nt, Artificial Sequence
  Description of Artificial Sequence: Synthetic oligonucleotide
  Antisense strand to SEQ ID NO: 241236
ucacucccgugauaacaag

SEQ ID NO: 241238 - RNA, 19 nt, Artificial Sequence
  Description of Artificial Sequence: Synthetic oligonucleotide
  Sense strand starting at position 3850 SEQ ID NO: 3104
uuguuaucacgggagugaa

SEQ ID NO: 241239 - RNA, 19 nt, Artificial Sequence
  Description of Artificial Sequence: Synthetic oligonucleotide
  Antisense strand to SEQ ID NO: 241238
uucacucccgugauaacaa

SEQ ID NO: 241240 - RNA, 19 nt, Artificial Sequence
  Description of Artificial Sequence: Synthetic oligonucleotide
  Sense strand starting at position 2128 SEQ ID NO: 3105
uacagaugugcucagcaaa

SEQ ID NO: 241241 - RNA, 19 nt, Artificial Sequence
  Description of Artificial Sequence: Synthetic oligonucleotide
  Antisense strand to SEQ ID NO: 241240
uuugcugagcacaucugua

SEQ ID NO: 241242 - RNA, 19 nt, Artificial Sequence
  Description of Artificial Sequence: Synthetic oligonucleotide
  Sense strand starting at position 2233 SEQ ID NO: 3105
uugucauagucaucauaau

SEQ ID NO: 241243 - RNA, 19 nt, Artificial Sequence
  Description of Artificial Sequence: Synthetic oligonucleotide
  Antisense strand to SEQ ID NO: 241242
auuaugaugacuaugacaa

SEQ ID NO: 241244 - RNA, 19 nt, Artificial Sequence
  Description of Artificial Sequence: Synthetic oligonucleotide
  Sense strand starting at position 2234 SEQ ID NO: 3105
ugucauagucaucauaaug

SEQ ID NO: 241245 - RNA, 19 nt, Artificial Sequence
  Description of Artificial Sequence: Synthetic oligonucleotide
  Antisense strand to SEQ ID NO: 241244
cauuaugaugacuaugaca

SEQ ID NO: 241246 - RNA, 19 nt, Artificial Sequence
  Description of Artificial Sequence: Synthetic oligonucleotide
  Sense strand starting at position 2306 SEQ ID NO: 3105
uccuucucucagggauguu

SEQ ID NO: 241247 - RNA, 19 nt, Artificial Sequence
  Description of Artificial Sequence: Synthetic oligonucleotide
  Antisense strand to SEQ ID NO: 241246
aacaucccugagagaagga

SEQ ID NO: 241248 - RNA, 19 nt, Artificial Sequence
  Description of Artificial Sequence: Synthetic oligonucleotide
  Sense strand starting at position 2315 SEQ ID NO: 3105
cagggauguugaggacagu

SEQ ID NO: 241249 - RNA, 19 nt, Artificial Sequence
  Description of Artificial Sequence: Synthetic oligonucleotide
  Antisense strand to SEQ ID NO: 241248
acuguccucaacaucccug

SEQ ID NO: 241250 - RNA, 19 nt, Artificial Sequence
  Description of Artificial Sequence: Synthetic oligonucleotide
  Sense strand starting at position 2396 SEQ ID NO: 3105
gaggguuucuggcuaaccu

SEQ ID NO: 241251 - RNA, 19 nt, Artificial Sequence
  Description of Artificial Sequence: Synthetic oligonucleotide
  Antisense strand to SEQ ID NO: 241250
agguuagccagaaacccuc

SEQ ID NO: 241252 - RNA, 19 nt, Artificial Sequence
  Description of Artificial Sequence: Synthetic oligonucleotide
  Sense strand starting at position 2435 SEQ ID NO: 3105
cccuguuugcucuauuggu

SEQ ID NO: 241253 - RNA, 19 nt, Artificial Sequence
  Description of Artificial Sequence: Synthetic oligonucleotide
  Antisense strand to SEQ ID NO: 241252
accaauagagcaaacaggg

SEQ ID NO: 241254 - RNA, 19 nt, Artificial Sequence
  Description of Artificial Sequence: Synthetic oligonucleotide
  Sense strand starting at position 2440 SEQ ID NO: 3105
uuugcucuauugguaaaug

SEQ ID NO: 241255 - RNA, 19 nt, Artificial Sequence
  Description of Artificial Sequence: Synthetic oligonucleotide
  Antisense strand to SEQ ID NO: 241254
cauuuaccaauagagcaaa

SEQ ID NO: 241256 - RNA, 19 nt, Artificial Sequence
  Description of Artificial Sequence: Synthetic oligonucleotide
  Sense strand starting at position 2544 SEQ ID NO: 3105
ccaugacuguuauaucaua

SEQ ID NO: 241257 - RNA, 19 nt, Artificial Sequence
  Description of Artificial Sequence: Synthetic oligonucleotide
  Antisense strand to SEQ ID NO: 241256
uaugauauaacagucaugg

SEQ ID NO: 241258 - RNA, 19 nt, Artificial Sequence
  Description of Artificial Sequence: Synthetic oligonucleotide
  Sense strand starting at position 2549 SEQ ID NO: 3105
acuguuauaucauaugcau

SEQ ID NO: 241259 - RNA, 19 nt, Artificial Sequence
  Description of Artificial Sequence: Synthetic oligonucleotide
  Antisense strand to SEQ ID NO: 241258
augcauaugauauaacagu

SEQ ID NO: 241260 - RNA, 19 nt, Artificial Sequence
  Description of Artificial Sequence: Synthetic oligonucleotide
  Sense strand starting at position 2555 SEQ ID NO: 3105
auaucauaugcaugcugau

SEQ ID NO: 241261 - RNA, 19 nt, Artificial Sequence
  Description of Artificial Sequence: Synthetic oligonucleotide
  Antisense strand to SEQ ID NO: 241260
aucagcaugcauaugauau

SEQ ID NO: 241262 - RNA, 19 nt, Artificial Sequence
  Description of Artificial Sequence: Synthetic oligonucleotide
  Sense strand starting at position 2568 SEQ ID NO: 3105
gcugaugacucaccauagu

SEQ ID NO: 241263 - RNA, 19 nt, Artificial Sequence
  Description of Artificial Sequence: Synthetic oligonucleotide
  Antisense strand to SEQ ID NO: 241262
acuauggugagucaucagc

SEQ ID NO: 241264 - RNA, 19 nt, Artificial Sequence
  Description of Artificial Sequence: Synthetic oligonucleotide
  Sense strand starting at position 2598 SEQ ID NO: 3105
gagguccucuccuggaguu

SEQ ID NO: 241265 - RNA, 19 nt, Artificial Sequence
  Description of Artificial Sequence: Synthetic oligonucleotide
  Antisense strand to SEQ ID NO: 241264
aacuccaggagaggaccuc

SEQ ID NO: 241266 - RNA, 19 nt, Artificial Sequence
  Description of Artificial Sequence: Synthetic oligonucleotide
  Sense strand starting at position 2608 SEQ ID NO: 3105
ccuggaguugcaggcuuau

SEQ ID NO: 241267 - RNA, 19 nt, Artificial Sequence
  Description of Artificial Sequence: Synthetic oligonucleotide
  Antisense strand to SEQ ID NO: 241266
auaagccugcaacuccagg

SEQ ID NO: 241268 - RNA, 19 nt, Artificial Sequence
  Description of Artificial Sequence: Synthetic oligonucleotide
  Sense strand starting at position 2619 SEQ ID NO: 3105
aggcuuauuucuccagcuu

SEQ ID NO: 241269 - RNA, 19 nt, Artificial Sequence
  Description of Artificial Sequence: Synthetic oligonucleotide
  Antisense strand to SEQ ID NO: 241268
aagcuggagaaauaagccu

SEQ ID NO: 241270 - RNA, 19 nt, Artificial Sequence
  Description of Artificial Sequence: Synthetic oligonucleotide
  Sense strand starting at position 2653 SEQ ID NO: 3105
cacugaagugacuagcaua

SEQ ID NO: 241271 - RNA, 19 nt, Artificial Sequence
  Description of Artificial Sequence: Synthetic oligonucleotide
  Antisense strand to SEQ ID NO: 241270
uaugcuagucacuucagug

SEQ ID NO: 241272 - RNA, 19 nt, Artificial Sequence
  Description of Artificial Sequence: Synthetic oligonucleotide
  Sense strand starting at position 2656 SEQ ID NO: 3105
ugaagugacuagcauauca

SEQ ID NO: 241273 - RNA, 19 nt, Artificial Sequence
  Description of Artificial Sequence: Synthetic oligonucleotide
  Antisense strand to SEQ ID NO: 241272
ugauaugcuagucacuuca

SEQ ID NO: 241274 - RNA, 19 nt, Artificial Sequence
  Description of Artificial Sequence: Synthetic oligonucleotide
  Sense strand starting at position 2729 SEQ ID NO: 3105
ccaguugucucagcaaaug

SEQ ID NO: 241275 - RNA, 19 nt, Artificial Sequence
  Description of Artificial Sequence: Synthetic oligonucleotide
  Antisense strand to SEQ ID NO: 241274
cauuugcugagacaacugg

SEQ ID NO: 241276 - RNA, 19 nt, Artificial Sequence
  Description of Artificial Sequence: Synthetic oligonucleotide
  Sense strand starting at position 2759 SEQ ID NO: 3105
cacccuaacucgucuucga

SEQ ID NO: 241277 - RNA, 19 nt, Artificial Sequence
  Description of Artificial Sequence: Synthetic oligonucleotide
  Antisense strand to SEQ ID NO: 241276
ucgaagacgaguuagggug

SEQ ID NO: 241278 - RNA, 19 nt, Artificial Sequence
  Description of Artificial Sequence: Synthetic oligonucleotide
  Sense strand starting at position 2849 SEQ ID NO: 3105
ccgugcaucugaccacuua

SEQ ID NO: 241279 - RNA, 19 nt, Artificial Sequence
  Description of Artificial Sequence: Synthetic oligonucleotide
  Antisense strand to SEQ ID NO: 241278
uaaguggucagaugcacgg

SEQ ID NO: 241280 - RNA, 19 nt, Artificial Sequence
  Description of Artificial Sequence: Synthetic oligonucleotide
  Sense strand starting at position 2850 SEQ ID NO: 3105
cgugcaucugaccacuuau

SEQ ID NO: 241281 - RNA, 19 nt, Artificial Sequence
  Description of Artificial Sequence: Synthetic oligonucleotide
  Antisense strand to SEQ ID NO: 241280
auaaguggucagaugcacg

SEQ ID NO: 241282 - RNA, 19 nt, Artificial Sequence
  Description of Artificial Sequence: Synthetic oligonucleotide
  Sense strand starting at position 2879 SEQ ID NO: 3105
uuagacaccuccugagauc

SEQ ID NO: 241283 - RNA, 19 nt, Artificial Sequence
  Description of Artificial Sequence: Synthetic oligonucleotide
  Antisense strand to SEQ ID NO: 241282
gaucucaggaggugucuaa

SEQ ID NO: 241284 - RNA, 19 nt, Artificial Sequence
  Description of Artificial Sequence: Synthetic oligonucleotide
  Sense strand starting at position 3100 SEQ ID NO: 3105
uggacuuagccugggaaga

SEQ ID NO: 241285 - RNA, 19 nt, Artificial Sequence
  Description of Artificial Sequence: Synthetic oligonucleotide
  Antisense strand to SEQ ID NO: 241284
ucuucccaggcuaagucca

SEQ ID NO: 241286 - RNA, 19 nt, Artificial Sequence
  Description of Artificial Sequence: Synthetic oligonucleotide
  Sense strand starting at position 3101 SEQ ID NO: 3105
ggacuuagccugggaagau

SEQ ID NO: 241287 - RNA, 19 nt, Artificial Sequence
  Description of Artificial Sequence: Synthetic oligonucleotide
  Antisense strand to SEQ ID NO: 241286
aucuucccaggcuaagucc

SEQ ID NO: 241288 - RNA, 19 nt, Artificial Sequence
  Description of Artificial Sequence: Synthetic oligonucleotide
  Sense strand starting at position 3102 SEQ ID NO: 3105
gacuuagccugggaagauu

SEQ ID NO: 241289 - RNA, 19 nt, Artificial Sequence
  Description of Artificial Sequence: Synthetic oligonucleotide
  Antisense strand to SEQ ID NO: 241288
aaucuucccaggcuaaguc

SEQ ID NO: 241290 - RNA, 19 nt, Artificial Sequence
  Description of Artificial Sequence: Synthetic oligonucleotide
  Sense strand starting at position 3485 SEQ ID NO: 3105
cuuauauugaaguggcagu

SEQ ID NO: 241291 - RNA, 19 nt, Artificial Sequence
  Description of Artificial Sequence: Synthetic oligonucleotide
  Antisense strand to SEQ ID NO: 241290
acugccacuucaauauaag

SEQ ID NO: 241292 - RNA, 19 nt, Artificial Sequence
  Description of Artificial Sequence: Synthetic oligonucleotide
  Sense strand starting at position 3677 SEQ ID NO: 3105
guuguugagucauugccau

SEQ ID NO: 241293 - RNA, 19 nt, Artificial Sequence
  Description of Artificial Sequence: Synthetic oligonucleotide
  Antisense strand to SEQ ID NO: 241292
auggcaaugacucaacaac

SEQ ID NO: 241294 - RNA, 19 nt, Artificial Sequence
  Description of Artificial Sequence: Synthetic oligonucleotide
  Sense strand starting at position 3703 SEQ ID NO: 3105
ggcagugacuucuaggugu

SEQ ID NO: 241295 - RNA, 19 nt, Artificial Sequence
  Description of Artificial Sequence: Synthetic oligonucleotide
  Antisense strand to SEQ ID NO: 241294
acaccuagaagucacugcc

SEQ ID NO: 241296 - RNA, 19 nt, Artificial Sequence
  Description of Artificial Sequence: Synthetic oligonucleotide
  Sense strand starting at position 3707 SEQ ID NO: 3105
gugacuucuagguguuaaa

SEQ ID NO: 241297 - RNA, 19 nt, Artificial Sequence
  Description of Artificial Sequence: Synthetic oligonucleotide
  Antisense strand to SEQ ID NO: 241296
uuuaacaccuagaagucac

SEQ ID NO: 241298 - RNA, 19 nt, Artificial Sequence
  Description of Artificial Sequence: Synthetic oligonucleotide
  Sense strand starting at position 3710 SEQ ID NO: 3105
acuucuagguguuaaaucu

SEQ ID NO: 241299 - RNA, 19 nt, Artificial Sequence
  Description of Artificial Sequence: Synthetic oligonucleotide
  Antisense strand to SEQ ID NO: 241298
agauuuaacaccuagaagu

SEQ ID NO: 241300 - RNA, 19 nt, Artificial Sequence
  Description of Artificial Sequence: Synthetic oligonucleotide
  Sense strand starting at position 3716 SEQ ID NO: 3105
agguguuaaaucuggaacu

SEQ ID NO: 241301 - RNA, 19 nt, Artificial Sequence
  Description of Artificial Sequence: Synthetic oligonucleotide
  Antisense strand to SEQ ID NO: 241300
aguuccagauuuaacaccu

SEQ ID NO: 241302 - RNA, 19 nt, Artificial Sequence
  Description of Artificial Sequence: Synthetic oligonucleotide
  Sense strand starting at position 3717 SEQ ID NO: 3105
gguguuaaaucuggaacuc

SEQ ID NO: 241303 - RNA, 19 nt, Artificial Sequence
  Description of Artificial Sequence: Synthetic oligonucleotide
  Antisense strand to SEQ ID NO: 241302
gaguuccagauuuaacacc

SEQ ID NO: 241304 - RNA, 19 nt, Artificial Sequence
  Description of Artificial Sequence: Synthetic oligonucleotide
  Sense strand starting at position 3718 SEQ ID NO: 3105
guguuaaaucuggaacucu

SEQ ID NO: 241305 - RNA, 19 nt, Artificial Sequence
  Description of Artificial Sequence: Synthetic oligonucleotide
  Antisense strand to SEQ ID NO: 241304
agaguuccagauuuaacac

SEQ ID NO: 241306 - RNA, 19 nt, Artificial Sequence
  Description of Artificial Sequence: Synthetic oligonucleotide
  Sense strand starting at position 3743 SEQ ID NO: 3105
gagucuggucccgagucuu

SEQ ID NO: 241307 - RNA, 19 nt, Artificial Sequence
  Description of Artificial Sequence: Synthetic oligonucleotide
  Antisense strand to SEQ ID NO: 241306
aagacucgggaccagacuc

SEQ ID NO: 241308 - RNA, 19 nt, Artificial Sequence
  Description of Artificial Sequence: Synthetic oligonucleotide
  Sense strand starting at position 3803 SEQ ID NO: 3105
caggcuuuccuugaccagu

SEQ ID NO: 241309 - RNA, 19 nt, Artificial Sequence
  Description of Artificial Sequence: Synthetic oligonucleotide
  Antisense strand to SEQ ID NO: 241308
acuggucaaggaaagccug

SEQ ID NO: 241310 - RNA, 19 nt, Artificial Sequence
  Description of Artificial Sequence: Synthetic oligonucleotide
  Sense strand starting at position 3806 SEQ ID NO: 3105
gcuuuccuugaccaguuua

SEQ ID NO: 241311 - RNA, 19 nt, Artificial Sequence
  Description of Artificial Sequence: Synthetic oligonucleotide
  Antisense strand to SEQ ID NO: 241310
uaaacuggucaaggaaagc

SEQ ID NO: 241312 - RNA, 19 nt, Artificial Sequence
  Description of Artificial Sequence: Synthetic oligonucleotide
  Sense strand starting at position 3856 SEQ ID NO: 3105
ggcccuaguugauuuccua

SEQ ID NO: 241313 - RNA, 19 nt, Artificial Sequence
  Description of Artificial Sequence: Synthetic oligonucleotide
  Antisense strand to SEQ ID NO: 241312
uaggaaaucaacuagggcc

SEQ ID NO: 241314 - RNA, 19 nt, Artificial Sequence
  Description of Artificial Sequence: Synthetic oligonucleotide
  Sense strand starting at position 3901 SEQ ID NO: 3105
cucaauagaugauaagcua

SEQ ID NO: 241315 - RNA, 19 nt, Artificial Sequence
  Description of Artificial Sequence: Synthetic oligonucleotide
  Antisense strand to SEQ ID NO: 241314
uagcuuaucaucuauugag

SEQ ID NO: 241316 - RNA, 19 nt, Artificial Sequence
  Description of Artificial Sequence: Synthetic oligonucleotide
  Sense strand starting at position 3929 SEQ ID NO: 3105
agggucugugucugucauu

SEQ ID NO: 241317 - RNA, 19 nt, Artificial Sequence
  Description of Artificial Sequence: Synthetic oligonucleotide
  Antisense strand to SEQ ID NO: 241316
aaugacagacacagacccu

SEQ ID NO: 241318 - RNA, 19 nt, Artificial Sequence
  Description of Artificial Sequence: Synthetic oligonucleotide
  Sense strand starting at position 3951 SEQ ID NO: 3105
ucaaguuugcagugccuaa

SEQ ID NO: 241319 - RNA, 19 nt, Artificial Sequence
  Description of Artificial Sequence: Synthetic oligonucleotide
  Antisense strand to SEQ ID NO: 241318
uuaggcacugcaaacuuga

SEQ ID NO: 241320 - RNA, 19 nt, Artificial Sequence
  Description of Artificial Sequence: Synthetic oligonucleotide
  Sense strand starting at position 399 SEQ ID NO: 3106
aacuguguauggcugaaga

SEQ ID NO: 241321 - RNA, 19 nt, Artificial Sequence
  Description of Artificial Sequence: Synthetic oligonucleotide
  Antisense strand to SEQ ID NO: 241320
ucuucagccauacacaguu

SEQ ID NO: 241322 - RNA, 19 nt, Artificial Sequence
  Description of Artificial Sequence: Synthetic oligonucleotide
  Sense strand starting at position 401 SEQ ID NO: 3106
cuguguauggcugaagaaa

SEQ ID NO: 241323 - RNA, 19 nt, Artificial Sequence
  Description of Artificial Sequence: Synthetic oligonucleotide
  Antisense strand to SEQ ID NO: 241322
uuucuucagccauacacag

SEQ ID NO: 241324 - RNA, 19 nt, Artificial Sequence
  Description of Artificial Sequence: Synthetic oligonucleotide
  Sense strand starting at position 428 SEQ ID NO: 3106
ucugguaagcuacagacau

SEQ ID NO: 241325 - RNA, 19 nt, Artificial Sequence
  Description of Artificial Sequence: Synthetic oligonucleotide
  Antisense strand to SEQ ID NO: 241324
augucuguagcuuaccaga

SEQ ID NO: 241326 - RNA, 19 nt, Artificial Sequence
  Description of Artificial Sequence: Synthetic oligonucleotide
  Sense strand starting at position 542 SEQ ID NO: 3106
auuaguuccuagguaagaa

SEQ ID NO: 241327 - RNA, 19 nt, Artificial Sequence
  Description of Artificial Sequence: Synthetic oligonucleotide
  Antisense strand to SEQ ID NO: 241326
uucuuaccuaggaacuaau

SEQ ID NO: 241328 - RNA, 19 nt, Artificial Sequence
  Description of Artificial Sequence: Synthetic oligonucleotide
  Sense strand starting at position 554 SEQ ID NO: 3106
guaagaaguucucuauauu

SEQ ID NO: 241329 - RNA, 19 nt, Artificial Sequence
  Description of Artificial Sequence: Synthetic oligonucleotide
  Antisense strand to SEQ ID NO: 241328
aauauagagaacuucuuac

SEQ ID NO: 241330 - RNA, 19 nt, Artificial Sequence
  Description of Artificial Sequence: Synthetic oligonucleotide
  Sense strand starting at position 573 SEQ ID NO: 3106
ugcuauuugcuuugauguu

SEQ ID NO: 241331 - RNA, 19 nt, Artificial Sequence
  Description of Artificial Sequence: Synthetic oligonucleotide
  Antisense strand to SEQ ID NO: 241330
aacaucaaagcaaauagca

SEQ ID NO: 241332 - RNA, 19 nt, Artificial Sequence
  Description of Artificial Sequence: Synthetic oligonucleotide
  Sense strand starting at position 832 SEQ ID NO: 3106
agucauuucuucccaguuu

SEQ ID NO: 241333 - RNA, 19 nt, Artificial Sequence
  Description of Artificial Sequence: Synthetic oligonucleotide
  Antisense strand to SEQ ID NO: 241332
aaacugggaagaaaugacu

SEQ ID NO: 241334 - RNA, 19 nt, Artificial Sequence
  Description of Artificial Sequence: Synthetic oligonucleotide
  Sense strand starting at position 864 SEQ ID NO: 3106
ccugaaguagaaugaguua

SEQ ID NO: 241335 - RNA, 19 nt, Artificial Sequence
  Description of Artificial Sequence: Synthetic oligonucleotide
  Antisense strand to SEQ ID NO: 241334
uaacucauucuacuucagg

SEQ ID NO: 241336 - RNA, 19 nt, Artificial Sequence
  Description of Artificial Sequence: Synthetic oligonucleotide
  Sense strand starting at position 869 SEQ ID NO: 3106
aguagaaugaguuacagca

SEQ ID NO: 241337 - RNA, 19 nt, Artificial Sequence
  Description of Artificial Sequence: Synthetic oligonucleotide
  Antisense strand to SEQ ID NO: 241336
ugcuguaacucauucuacu

SEQ ID NO: 241338 - RNA, 19 nt, Artificial Sequence
  Description of Artificial Sequence: Synthetic oligonucleotide
  Sense strand starting at position 913 SEQ ID NO: 3106
uuaucuuuagcauguggaa

SEQ ID NO: 241339 - RNA, 19 nt, Artificial Sequence
  Description of Artificial Sequence: Synthetic oligonucleotide
  Antisense strand to SEQ ID NO: 241338
uuccacaugcuaaagauaa

SEQ ID NO: 241340 - RNA, 19 nt, Artificial Sequence
  Description of Artificial Sequence: Synthetic oligonucleotide
  Sense strand starting at position 928 SEQ ID NO: 3106
ggaaucuguuacucucaua

SEQ ID NO: 241341 - RNA, 19 nt, Artificial Sequence
  Description of Artificial Sequence: Synthetic oligonucleotide
  Antisense strand to SEQ ID NO: 241340
uaugagaguaacagauucc

SEQ ID NO: 241342 - RNA, 19 nt, Artificial Sequence
  Description of Artificial Sequence: Synthetic oligonucleotide
  Sense strand starting at position 1062 SEQ ID NO: 3106
aggaacacauugcuaauau

SEQ ID NO: 241343 - RNA, 19 nt, Artificial Sequence
  Description of Artificial Sequence: Synthetic oligonucleotide
  Antisense strand to SEQ ID NO: 241342
auauuagcaauguguuccu

SEQ ID NO: 241344 - RNA, 19 nt, Artificial Sequence
  Description of Artificial Sequence: Synthetic oligonucleotide
  Sense strand starting at position 1072 SEQ ID NO: 3106
ugcuaauauuaagcugaaa

SEQ ID NO: 241345 - RNA, 19 nt, Artificial Sequence
  Description of Artificial Sequence: Synthetic oligonucleotide
  Antisense strand to SEQ ID NO: 241344
uuucagcuuaauauuagca

SEQ ID NO: 241346 - RNA, 19 nt, Artificial Sequence
  Description of Artificial Sequence: Synthetic oligonucleotide
  Sense strand starting at position 1178 SEQ ID NO: 3106
cucaauccucagggcaaau

SEQ ID NO: 241347 - RNA, 19 nt, Artificial Sequence
  Description of Artificial Sequence: Synthetic oligonucleotide
  Antisense strand to SEQ ID NO: 241346
auuugcccugaggauugag

SEQ ID NO: 241348 - RNA, 19 nt, Artificial Sequence
  Description of Artificial Sequence: Synthetic oligonucleotide
  Sense strand starting at position 1371 SEQ ID NO: 3106
cucuaugcagcuggaaaua

SEQ ID NO: 241349 - RNA, 19 nt, Artificial Sequence
  Description of Artificial Sequence: Synthetic oligonucleotide
  Antisense strand to SEQ ID NO: 241348
uauuuccagcugcauagag

SEQ ID NO: 241350 - RNA, 19 nt, Artificial Sequence
  Description of Artificial Sequence: Synthetic oligonucleotide
  Sense strand starting at position 2108 SEQ ID NO: 3106
guaaguuccaagugggaaa

SEQ ID NO: 241351 - RNA, 19 nt, Artificial Sequence
  Description of Artificial Sequence: Synthetic oligonucleotide
  Antisense strand to SEQ ID NO: 241350
uuucccacuuggaacuuac

SEQ ID NO: 241352 - RNA, 19 nt, Artificial Sequence
  Description of Artificial Sequence: Synthetic oligonucleotide
  Sense strand starting at position 2120 SEQ ID NO: 3106
ugggaaagugacuguucga

SEQ ID NO: 241353 - RNA, 19 nt, Artificial Sequence
  Description of Artificial Sequence: Synthetic oligonucleotide
  Antisense strand to SEQ ID NO: 241352
ucgaacagucacuuuccca

SEQ ID NO: 241354 - RNA, 19 nt, Artificial Sequence
  Description of Artificial Sequence: Synthetic oligonucleotide
  Sense strand starting at position 2127 SEQ ID NO: 3106
gugacuguucgaaguggca

SEQ ID NO: 241355 - RNA, 19 nt, Artificial Sequence
  Description of Artificial Sequence: Synthetic oligonucleotide
  Antisense strand to SEQ ID NO: 241354
ugccacuucgaacagucac

SEQ ID NO: 241356 - RNA, 19 nt, Artificial Sequence
  Description of Artificial Sequence: Synthetic oligonucleotide
  Sense strand starting at position 2180 SEQ ID NO: 3106
cucagaaaucuacagcagu

SEQ ID NO: 241357 - RNA, 19 nt, Artificial Sequence
  Description of Artificial Sequence: Synthetic oligonucleotide
  Antisense strand to SEQ ID NO: 241356
acugcuguagauuucugag

SEQ ID NO: 241358 - RNA, 19 nt, Artificial Sequence
  Description of Artificial Sequence: Synthetic oligonucleotide
  Sense strand starting at position 2211 SEQ ID NO: 3106
ggaagacugucaucugccu

SEQ ID NO: 241359 - RNA, 19 nt, Artificial Sequence
  Description of Artificial Sequence: Synthetic oligonucleotide
  Antisense strand to SEQ ID NO: 241358
aggcagaugacagucuucc

SEQ ID NO: 241360 - RNA, 19 nt, Artificial Sequence
  Description of Artificial Sequence: Synthetic oligonucleotide
  Sense strand starting at position 2422 SEQ ID NO: 3106
aagagaagucuuggagcaa

SEQ ID NO: 241361 - RNA, 19 nt, Artificial Sequence
  Description of Artificial Sequence: Synthetic oligonucleotide
  Antisense strand to SEQ ID NO: 241360
uugcuccaagacuucucuu

SEQ ID NO: 241362 - RNA, 19 nt, Artificial Sequence
  Description of Artificial Sequence: Synthetic oligonucleotide
  Sense strand starting at position 2499 SEQ ID NO: 3106
acacgacgaggucauagau

SEQ ID NO: 241363 - RNA, 19 nt, Artificial Sequence
  Description of Artificial Sequence: Synthetic oligonucleotide
  Antisense strand to SEQ ID NO: 241362
aucuaugaccucgucgugu

SEQ ID NO: 241364 - RNA, 19 nt, Artificial Sequence
  Description of Artificial Sequence: Synthetic oligonucleotide
  Sense strand starting at position 2622 SEQ ID NO: 3106
uuaagaaggucauccuuua

SEQ ID NO: 241365 - RNA, 19 nt, Artificial Sequence
  Description of Artificial Sequence: Synthetic oligonucleotide
  Antisense strand to SEQ ID NO: 241364
uaaaggaugaccuucuuaa

SEQ ID NO: 241366 - RNA, 19 nt, Artificial Sequence
  Description of Artificial Sequence: Synthetic oligonucleotide
  Sense strand starting at position 2640 SEQ ID NO: 3106
aucuaauauuggguuguua

SEQ ID NO: 241367 - RNA, 19 nt, Artificial Sequence
  Description of Artificial Sequence: Synthetic oligonucleotide
  Antisense strand to SEQ ID NO: 241366
uaacaacccaauauuagau

SEQ ID NO: 241368 - RNA, 19 nt, Artificial Sequence
  Description of Artificial Sequence: Synthetic oligonucleotide
  Sense strand starting at position 2642 SEQ ID NO: 3106
cuaauauuggguuguuaau

SEQ ID NO: 241369 - RNA, 19 nt, Artificial Sequence
  Description of Artificial Sequence: Synthetic oligonucleotide
  Antisense strand to SEQ ID NO: 241368
auuaacaacccaauauuag

SEQ ID NO: 241370 - RNA, 19 nt, Artificial Sequence
  Description of Artificial Sequence: Synthetic oligonucleotide
  Sense strand starting at position 2721 SEQ ID NO: 3106
uuagaaauaugucugcuua

SEQ ID NO: 241371 - RNA, 19 nt, Artificial Sequence
  Description of Artificial Sequence: Synthetic oligonucleotide
  Antisense strand to SEQ ID NO: 241370
uaagcagacauauuucuaa

SEQ ID NO: 241372 - RNA, 19 nt, Artificial Sequence
  Description of Artificial Sequence: Synthetic oligonucleotide
  Sense strand starting at position 2723 SEQ ID NO: 3106
agaaauaugucugcuuaaa

SEQ ID NO: 241373 - RNA, 19 nt, Artificial Sequence
  Description of Artificial Sequence: Synthetic oligonucleotide
  Antisense strand to SEQ ID NO: 241372
uuuaagcagacauauuucu

SEQ ID NO: 241374 - RNA, 19 nt, Artificial Sequence
  Description of Artificial Sequence: Synthetic oligonucleotide
  Sense strand starting at position 3126 SEQ ID NO: 3106
uguucucacuauucuuaga

SEQ ID NO: 241375 - RNA, 19 nt, Artificial Sequence
  Description of Artificial Sequence: Synthetic oligonucleotide
  Antisense strand to SEQ ID NO: 241374
ucuaagaauagugagaaca

SEQ ID NO: 241376 - RNA, 19 nt, Artificial Sequence
  Description of Artificial Sequence: Synthetic oligonucleotide
  Sense strand starting at position 3186 SEQ ID NO: 3106
ggcagauugccauggauga

SEQ ID NO: 241377 - RNA, 19 nt, Artificial Sequence
  Description of Artificial Sequence: Synthetic oligonucleotide
  Antisense strand to SEQ ID NO: 241376
ucauccauggcaaucugcc

SEQ ID NO: 241378 - RNA, 19 nt, Artificial Sequence
  Description of Artificial Sequence: Synthetic oligonucleotide
  Sense strand starting at position 3187 SEQ ID NO: 3106
gcagauugccauggaugac

SEQ ID NO: 241379 - RNA, 19 nt, Artificial Sequence
  Description of Artificial Sequence: Synthetic oligonucleotide
  Antisense strand to SEQ ID NO: 241378
gucauccauggcaaucugc

SEQ ID NO: 241380 - RNA, 19 nt, Artificial Sequence
  Description of Artificial Sequence: Synthetic oligonucleotide
  Sense strand starting at position 3197 SEQ ID NO: 3106
auggaugacucugcccuua

SEQ ID NO: 241381 - RNA, 19 nt, Artificial Sequence
  Description of Artificial Sequence: Synthetic oligonucleotide
  Antisense strand to SEQ ID NO: 241380
uaagggcagagucauccau

SEQ ID NO: 241382 - RNA, 19 nt, Artificial Sequence
  Description of Artificial Sequence: Synthetic oligonucleotide
  Sense strand starting at position 3199 SEQ ID NO: 3106
ggaugacucugcccuuaau

SEQ ID NO: 241383 - RNA, 19 nt, Artificial Sequence
  Description of Artificial Sequence: Synthetic oligonucleotide
  Antisense strand to SEQ ID NO: 241382
auuaagggcagagucaucc

SEQ ID NO: 241384 - RNA, 19 nt, Artificial Sequence
  Description of Artificial Sequence: Synthetic oligonucleotide
  Sense strand starting at position 3202 SEQ ID NO: 3106
ugacucugcccuuaaugaa

SEQ ID NO: 241385 - RNA, 19 nt, Artificial Sequence
  Description of Artificial Sequence: Synthetic oligonucleotide
  Antisense strand to SEQ ID NO: 241384
uucauuaagggcagaguca

SEQ ID NO: 241386 - RNA, 19 nt, Artificial Sequence
  Description of Artificial Sequence: Synthetic oligonucleotide
  Sense strand starting at position 3224 SEQ ID NO: 3106
ucugacuuuggcugaaaca

SEQ ID NO: 241387 - RNA, 19 nt, Artificial Sequence
  Description of Artificial Sequence: Synthetic oligonucleotide
  Antisense strand to SEQ ID NO: 241386
uguuucagccaaagucaga

SEQ ID NO: 241388 - RNA, 19 nt, Artificial Sequence
  Description of Artificial Sequence: Synthetic oligonucleotide
  Sense strand starting at position 3225 SEQ ID NO: 3106
cugacuuuggcugaaacau

SEQ ID NO: 241389 - RNA, 19 nt, Artificial Sequence
  Description of Artificial Sequence: Synthetic oligonucleotide
  Antisense strand to SEQ ID NO: 241388
auguuucagccaaagucag

SEQ ID NO: 241390 - RNA, 19 nt, Artificial Sequence
  Description of Artificial Sequence: Synthetic oligonucleotide
  Sense strand starting at position 3555 SEQ ID NO: 3106
uuggccaagcccugauuua

SEQ ID NO: 241391 - RNA, 19 nt, Artificial Sequence
  Description of Artificial Sequence: Synthetic oligonucleotide
  Antisense strand to SEQ ID NO: 241390
uaaaucagggcuuggccaa

SEQ ID NO: 241392 - RNA, 19 nt, Artificial Sequence
  Description of Artificial Sequence: Synthetic oligonucleotide
  Sense strand starting at position 3657 SEQ ID NO: 3106
ucagaugggcucugacaaa

SEQ ID NO: 241393 - RNA, 19 nt, Artificial Sequence
  Description of Artificial Sequence: Synthetic oligonucleotide
  Antisense strand to SEQ ID NO: 241392
uuugucagagcccaucuga

SEQ ID NO: 241394 - RNA, 19 nt, Artificial Sequence
  Description of Artificial Sequence: Synthetic oligonucleotide
  Sense strand starting at position 3841 SEQ ID NO: 3106
ugcuauucugcugaggaau

SEQ ID NO: 241395 - RNA, 19 nt, Artificial Sequence
  Description of Artificial Sequence: Synthetic oligonucleotide
  Antisense strand to SEQ ID NO: 241394
auuccucagcagaauagca

SEQ ID NO: 241396 - RNA, 19 nt, Artificial Sequence
  Description of Artificial Sequence: Synthetic oligonucleotide
  Sense strand starting at position 3867 SEQ ID NO: 3106
acaugacuuucucuuggaa

SEQ ID NO: 241397 - RNA, 19 nt, Artificial Sequence
  Description of Artificial Sequence: Synthetic oligonucleotide
  Antisense strand to SEQ ID NO: 241396
uuccaagagaaagucaugu

SEQ ID NO: 241398 - RNA, 19 nt, Artificial Sequence
  Description of Artificial Sequence: Synthetic oligonucleotide
  Sense strand starting at position 3912 SEQ ID NO: 3106
gaaacuuggucuucugaga

SEQ ID NO: 241399 - RNA, 19 nt, Artificial Sequence
  Description of Artificial Sequence: Synthetic oligonucleotide
  Antisense strand to SEQ ID NO: 241398
ucucagaagaccaaguuuc

SEQ ID NO: 241400 - RNA, 19 nt, Artificial Sequence
  Description of Artificial Sequence: Synthetic oligonucleotide
  Sense strand starting at position 352 SEQ ID NO: 3107
auaacccauguuuguuaua

SEQ ID NO: 241401 - RNA, 19 nt, Artificial Sequence
  Description of Artificial Sequence: Synthetic oligonucleotide
  Antisense strand to SEQ ID NO: 241400
uauaacaaacauggguuau

SEQ ID NO: 241402 - RNA, 19 nt, Artificial Sequence
  Description of Artificial Sequence: Synthetic oligonucleotide
  Sense strand starting at position 439 SEQ ID NO: 3107
uuaggaaugguauguauug

SEQ ID NO: 241403 - RNA, 19 nt, Artificial Sequence
  Description of Artificial Sequence: Synthetic oligonucleotide
  Antisense strand to SEQ ID NO: 241402
caauacauaccauuccuaa

SEQ ID NO: 241404 - RNA, 19 nt, Artificial Sequence
  Description of Artificial Sequence: Synthetic oligonucleotide
  Sense strand starting at position 451 SEQ ID NO: 3107
uguauugucugacuauaag

SEQ ID NO: 241405 - RNA, 19 nt, Artificial Sequence
  Description of Artificial Sequence: Synthetic oligonucleotide
  Antisense strand to SEQ ID NO: 241404
cuuauagucagacaauaca

SEQ ID NO: 241406 - RNA, 19 nt, Artificial Sequence
  Description of Artificial Sequence: Synthetic oligonucleotide
  Sense strand starting at position 460 SEQ ID NO: 3107
ugacuauaagaacggagua

SEQ ID NO: 241407 - RNA, 19 nt, Artificial Sequence
  Description of Artificial Sequence: Synthetic oligonucleotide
  Antisense strand to SEQ ID NO: 241406
uacuccguucuuauaguca

SEQ ID NO: 241408 - RNA, 19 nt, Artificial Sequence
  Description of Artificial Sequence: Synthetic oligonucleotide
  Sense strand starting at position 576 SEQ ID NO: 3107
uaaugcaugcauuaagguu

SEQ ID NO: 241409 - RNA, 19 nt, Artificial Sequence
  Description of Artificial Sequence: Synthetic oligonucleotide
  Antisense strand to SEQ ID NO: 241408
aaccuuaaugcaugcauua

SEQ ID NO: 241410 - RNA, 19 nt, Artificial Sequence
  Description of Artificial Sequence: Synthetic oligonucleotide
  Sense strand starting at position 653 SEQ ID NO: 3107
gucuccuagagguagagau

SEQ ID NO: 241411 - RNA, 19 nt, Artificial Sequence
  Description of Artificial Sequence: Synthetic oligonucleotide
  Antisense strand to SEQ ID NO: 241410
aucucuaccucuaggagac

SEQ ID NO: 241412 - RNA, 19 nt, Artificial Sequence
  Description of Artificial Sequence: Synthetic oligonucleotide
  Sense strand starting at position 685 SEQ ID NO: 3107
augugaagagauugucaca

SEQ ID NO: 241413 - RNA, 19 nt, Artificial Sequence
  Description of Artificial Sequence: Synthetic oligonucleotide
  Antisense strand to SEQ ID NO: 241412
ugugacaaucucuucacau

SEQ ID NO: 241414 - RNA, 19 nt, Artificial Sequence
  Description of Artificial Sequence: Synthetic oligonucleotide
  Sense strand starting at position 716 SEQ ID NO: 3107
acguuaauagccuaaagca

SEQ ID NO: 241415 - RNA, 19 nt, Artificial Sequence
  Description of Artificial Sequence: Synthetic oligonucleotide
  Antisense strand to SEQ ID NO: 241414
ugcuuuaggcuauuaacgu

SEQ ID NO: 241416 - RNA, 19 nt, Artificial Sequence
  Description of Artificial Sequence: Synthetic oligonucleotide
  Sense strand starting at position 758 SEQ ID NO: 3107
ucaagucuuggauaaaugu

SEQ ID NO: 241417 - RNA, 19 nt, Artificial Sequence
  Description of Artificial Sequence: Synthetic oligonucleotide
  Antisense strand to SEQ ID NO: 241416
acauuuauccaagacuuga

SEQ ID NO: 241418 - RNA, 19 nt, Artificial Sequence
  Description of Artificial Sequence: Synthetic oligonucleotide
  Sense strand starting at position 764 SEQ ID NO: 3107
cuuggauaaauguauucga

SEQ ID NO: 241419 - RNA, 19 nt, Artificial Sequence
  Description of Artificial Sequence: Synthetic oligonucleotide
  Antisense strand to SEQ ID NO: 241418
ucgaauacauuuauccaag

SEQ ID NO: 241420 - RNA, 19 nt, Artificial Sequence
  Description of Artificial Sequence: Synthetic oligonucleotide
  Sense strand starting at position 767 SEQ ID NO: 3107
ggauaaauguauucgauug

SEQ ID NO: 241421 - RNA, 19 nt, Artificial Sequence
  Description of Artificial Sequence: Synthetic oligonucleotide
  Antisense strand to SEQ ID NO: 241420
caaucgaauacauuuaucc

SEQ ID NO: 241422 - RNA, 19 nt, Artificial Sequence
  Description of Artificial Sequence: Synthetic oligonucleotide
  Sense strand starting at position 772 SEQ ID NO: 3107
aauguauucgauugacaau

SEQ ID NO: 241423 - RNA, 19 nt, Artificial Sequence
  Description of Artificial Sequence: Synthetic oligonucleotide
  Antisense strand to SEQ ID NO: 241422
auugucaaucgaauacauu

SEQ ID NO: 241424 - RNA, 19 nt, Artificial Sequence
  Description of Artificial Sequence: Synthetic oligonucleotide
  Sense strand starting at position 860 SEQ ID NO: 3107
guugcaguccucuaaauaa

SEQ ID NO: 241425 - RNA, 19 nt, Artificial Sequence
  Description of Artificial Sequence: Synthetic oligonucleotide
  Antisense strand to SEQ ID NO: 241424
uuauuuagaggacugcaac

SEQ ID NO: 241426 - RNA, 19 nt, Artificial Sequence
  Description of Artificial Sequence: Synthetic oligonucleotide
  Sense strand starting at position 1085 SEQ ID NO: 3107
guuuaagaaguguaaugua

SEQ ID NO: 241427 - RNA, 19 nt, Artificial Sequence
  Description of Artificial Sequence: Synthetic oligonucleotide
  Antisense strand to SEQ ID NO: 241426
uacauuacacuucuuaaac

SEQ ID NO: 241428 - RNA, 19 nt, Artificial Sequence
  Description of Artificial Sequence: Synthetic oligonucleotide
  Sense strand starting at position 1090 SEQ ID NO: 3107
agaaguguaauguaaguac

SEQ ID NO: 241429 - RNA, 19 nt, Artificial Sequence
  Description of Artificial Sequence: Synthetic oligonucleotide
  Antisense strand to SEQ ID NO: 241428
guacuuacauuacacuucu

SEQ ID NO: 241430 - RNA, 19 nt, Artificial Sequence
  Description of Artificial Sequence: Synthetic oligonucleotide
  Sense strand starting at position 1094 SEQ ID NO: 3107
guguaauguaaguacuuua

SEQ ID NO: 241431 - RNA, 19 nt, Artificial Sequence
  Description of Artificial Sequence: Synthetic oligonucleotide
  Antisense strand to SEQ ID NO: 241430
uaaaguacuuacauuacac

SEQ ID NO: 241432 - RNA, 19 nt, Artificial Sequence
  Description of Artificial Sequence: Synthetic oligonucleotide
  Sense strand starting at position 1099 SEQ ID NO: 3107
auguaaguacuuuagcaaa

SEQ ID NO: 241433 - RNA, 19 nt, Artificial Sequence
  Description of Artificial Sequence: Synthetic oligonucleotide
  Antisense strand to SEQ ID NO: 241432
uuugcuaaaguacuuacau

SEQ ID NO: 241434 - RNA, 19 nt, Artificial Sequence
  Description of Artificial Sequence: Synthetic oligonucleotide
  Sense strand starting at position 1208 SEQ ID NO: 3107
cgacuucucgcggagagga

SEQ ID NO: 241435 - RNA, 19 nt, Artificial Sequence
  Description of Artificial Sequence: Synthetic oligonucleotide
  Antisense strand to SEQ ID NO: 241434
uccucuccgcgagaagucg

SEQ ID NO: 241436 - RNA, 19 nt, Artificial Sequence
  Description of Artificial Sequence: Synthetic oligonucleotide
  Sense strand starting at position 1252 SEQ ID NO: 3107
ggcagaacuucagcgaaag

SEQ ID NO: 241437 - RNA, 19 nt, Artificial Sequence
  Description of Artificial Sequence: Synthetic oligonucleotide
  Antisense strand to SEQ ID NO: 241436
cuuucgcugaaguucugcc

SEQ ID NO: 241438 - RNA, 19 nt, Artificial Sequence
  Description of Artificial Sequence: Synthetic oligonucleotide
  Sense strand starting at position 2233 SEQ ID NO: 3107
gcgcgucaccagagagaaa

SEQ ID NO: 241439 - RNA, 19 nt, Artificial Sequence
  Description of Artificial Sequence: Synthetic oligonucleotide
  Antisense strand to SEQ ID NO: 241438
uuucucucuggugacgcgc

SEQ ID NO: 241440 - RNA, 19 nt, Artificial Sequence
  Description of Artificial Sequence: Synthetic oligonucleotide
  Sense strand starting at position 2296 SEQ ID NO: 3107
ggccucuaguucuccauuu

SEQ ID NO: 241441 - RNA, 19 nt, Artificial Sequence
  Description of Artificial Sequence: Synthetic oligonucleotide
  Antisense strand to SEQ ID NO: 241440
aaauggagaacuagaggcc

SEQ ID NO: 241442 - RNA, 19 nt, Artificial Sequence
  Description of Artificial Sequence: Synthetic oligonucleotide
  Sense strand starting at position 2328 SEQ ID NO: 3107
auuccugugcccgaaauaa

SEQ ID NO: 241443 - RNA, 19 nt, Artificial Sequence
  Description of Artificial Sequence: Synthetic oligonucleotide
  Antisense strand to SEQ ID NO: 241442
uuauuucgggcacaggaau

SEQ ID NO: 241444 - RNA, 19 nt, Artificial Sequence
  Description of Artificial Sequence: Synthetic oligonucleotide
  Sense strand starting at position 2370 SEQ ID NO: 3107
auuuaaagguugcaagaaa

SEQ ID NO: 241445 - RNA, 19 nt, Artificial Sequence
  Description of Artificial Sequence: Synthetic oligonucleotide
  Antisense strand to SEQ ID NO: 241444
uuucuugcaaccuuuaaau

SEQ ID NO: 241446 - RNA, 19 nt, Artificial Sequence
  Description of Artificial Sequence: Synthetic oligonucleotide
  Sense strand starting at position 2537 SEQ ID NO: 3107
gcggcugacauacagaauu

SEQ ID NO: 241447 - RNA, 19 nt, Artificial Sequence
  Description of Artificial Sequence: Synthetic oligonucleotide
  Antisense strand to SEQ ID NO: 241446
aauucuguaugucagccgc

SEQ ID NO: 241448 - RNA, 19 nt, Artificial Sequence
  Description of Artificial Sequence: Synthetic oligonucleotide
  Sense strand starting at position 2599 SEQ ID NO: 3107
auuaguuacugaucucaag

SEQ ID NO: 241449 - RNA, 19 nt, Artificial Sequence
  Description of Artificial Sequence: Synthetic oligonucleotide
  Antisense strand to SEQ ID NO: 241448
cuugagaucaguaacuaau

SEQ ID NO: 241450 - RNA, 19 nt, Artificial Sequence
  Description of Artificial Sequence: Synthetic oligonucleotide
  Sense strand starting at position 2683 SEQ ID NO: 3107
guuguagcugacggaauuu

SEQ ID NO: 241451 - RNA, 19 nt, Artificial Sequence
  Description of Artificial Sequence: Synthetic oligonucleotide
  Antisense strand to SEQ ID NO: 241450
aaauuccgucagcuacaac

SEQ ID NO: 241452 - RNA, 19 nt, Artificial Sequence
  Description of Artificial Sequence: Synthetic oligonucleotide
  Sense strand starting at position 2767 SEQ ID NO: 3107
gaaugauuguuaccguaau

SEQ ID NO: 241453 - RNA, 19 nt, Artificial Sequence
  Description of Artificial Sequence: Synthetic oligonucleotide
  Antisense strand to SEQ ID NO: 241452
auuacgguaacaaucauuc

SEQ ID NO: 241454 - RNA, 19 nt, Artificial Sequence
  Description of Artificial Sequence: Synthetic oligonucleotide
  Sense strand starting at position 2778 SEQ ID NO: 3107
accguaaugcucuagagag

SEQ ID NO: 241455 - RNA, 19 nt, Artificial Sequence
  Description of Artificial Sequence: Synthetic oligonucleotide
  Antisense strand to SEQ ID NO: 241454
cucucuagagcauuacggu

SEQ ID NO: 241456 - RNA, 19 nt, Artificial Sequence
  Description of Artificial Sequence: Synthetic oligonucleotide
  Sense strand starting at position 2884 SEQ ID NO: 3107
gggauuaggucaucuucua

SEQ ID NO: 241457 - RNA, 19 nt, Artificial Sequence
  Description of Artificial Sequence: Synthetic oligonucleotide
  Antisense strand to SEQ ID NO: 241456
uagaagaugaccuaauccc

SEQ ID NO: 241458 - RNA, 19 nt, Artificial Sequence
  Description of Artificial Sequence: Synthetic oligonucleotide
  Sense strand starting at position 3053 SEQ ID NO: 3107
acuggcucucccuaggaaa

SEQ ID NO: 241459 - RNA, 19 nt, Artificial Sequence
  Description of Artificial Sequence: Synthetic oligonucleotide
  Antisense strand to SEQ ID NO: 241458
uuuccuagggagagccagu

SEQ ID NO: 241460 - RNA, 19 nt, Artificial Sequence
  Description of Artificial Sequence: Synthetic oligonucleotide
  Sense strand starting at position 3364 SEQ ID NO: 3107
ccugauggccagcaauaga

SEQ ID NO: 241461 - RNA, 19 nt, Artificial Sequence
  Description of Artificial Sequence: Synthetic oligonucleotide
  Antisense strand to SEQ ID NO: 241460
ucuauugcuggccaucagg

SEQ ID NO: 241462 - RNA, 19 nt, Artificial Sequence
  Description of Artificial Sequence: Synthetic oligonucleotide
  Sense strand starting at position 3412 SEQ ID NO: 3107
agcgucuauuuaguguuaa

SEQ ID NO: 241463 - RNA, 19 nt, Artificial Sequence
  Description of Artificial Sequence: Synthetic oligonucleotide
  Antisense strand to SEQ ID NO: 241462
uuaacacuaaauagacgcu

SEQ ID NO: 241464 - RNA, 19 nt, Artificial Sequence
  Description of Artificial Sequence: Synthetic oligonucleotide
  Sense strand starting at position 3441 SEQ ID NO: 3107
gucuaauuacugugaaaua

SEQ ID NO: 241465 - RNA, 19 nt, Artificial Sequence
  Description of Artificial Sequence: Synthetic oligonucleotide
  Antisense strand to SEQ ID NO: 241464
uauuucacaguaauuagac

SEQ ID NO: 241466 - RNA, 19 nt, Artificial Sequence
  Description of Artificial Sequence: Synthetic oligonucleotide
  Sense strand starting at position 3453 SEQ ID NO: 3107
ugaaauaguccugguaacu

SEQ ID NO: 241467 - RNA, 19 nt, Artificial Sequence
  Description of Artificial Sequence: Synthetic oligonucleotide
  Antisense strand to SEQ ID NO: 241466
aguuaccaggacuauuuca

SEQ ID NO: 241468 - RNA, 19 nt, Artificial Sequence
  Description of Artificial Sequence: Synthetic oligonucleotide
  Sense strand starting at position 3531 SEQ ID NO: 3107
acaccagaguacucuauga

SEQ ID NO: 241469 - RNA, 19 nt, Artificial Sequence
  Description of Artificial Sequence: Synthetic oligonucleotide
  Antisense strand to SEQ ID NO: 241468
ucauagaguacucuggugu

SEQ ID NO: 241470 - RNA, 19 nt, Artificial Sequence
  Description of Artificial Sequence: Synthetic oligonucleotide
  Sense strand starting at position 3535 SEQ ID NO: 3107
cagaguacucuaugagaca

SEQ ID NO: 241471 - RNA, 19 nt, Artificial Sequence
  Description of Artificial Sequence: Synthetic oligonucleotide
  Antisense strand to SEQ ID NO: 241470
ugucucauagaguacucug

SEQ ID NO: 241472 - RNA, 19 nt, Artificial Sequence
  Description of Artificial Sequence: Synthetic oligonucleotide
  Sense strand starting at position 3550 SEQ ID NO: 3107
gacauuacauaggugauca

SEQ ID NO: 241473 - RNA, 19 nt, Artificial Sequence
  Description of Artificial Sequence: Synthetic oligonucleotide
  Antisense strand to SEQ ID NO: 241472
ugaucaccuauguaauguc

SEQ ID NO: 241474 - RNA, 19 nt, Artificial Sequence
  Description of Artificial Sequence: Synthetic oligonucleotide
  Sense strand starting at position 3680 SEQ ID NO: 3107
auguuaaaucgcgaaacaa

SEQ ID NO: 241475 - RNA, 19 nt, Artificial Sequence
  Description of Artificial Sequence: Synthetic oligonucleotide
  Antisense strand to SEQ ID NO: 241474
uuguuucgcgauuuaacau

SEQ ID NO: 241476 - RNA, 19 nt, Artificial Sequence
  Description of Artificial Sequence: Synthetic oligonucleotide
  Sense strand starting at position 3713 SEQ ID NO: 3107
cuaaguucucuccaggaac

SEQ ID NO: 241477 - RNA, 19 nt, Artificial Sequence
  Description of Artificial Sequence: Synthetic oligonucleotide
  Antisense strand to SEQ ID NO: 241476
guuccuggagagaacuuag

SEQ ID NO: 241478 - RNA, 19 nt, Artificial Sequence
  Description of Artificial Sequence: Synthetic oligonucleotide
  Sense strand starting at position 3771 SEQ ID NO: 3107
ccuauuguauugguccaga

SEQ ID NO: 241479 - RNA, 19 nt, Artificial Sequence
  Description of Artificial Sequence: Synthetic oligonucleotide
  Antisense strand to SEQ ID NO: 241478
ucuggaccaauacaauagg

SEQ ID NO: 241480 - RNA, 19 nt, Artificial Sequence
  Description of Artificial Sequence: Synthetic oligonucleotide
  Sense strand starting at position 42 SEQ ID NO: 3108
cagaguuggcuuugaacug

SEQ ID NO: 241481 - RNA, 19 nt, Artificial Sequence
  Description of Artificial Sequence: Synthetic oligonucleotide
  Antisense strand to SEQ ID NO: 241480
caguucaaagccaacucug

SEQ ID NO: 241482 - RNA, 19 nt, Artificial Sequence
  Description of Artificial Sequence: Synthetic oligonucleotide
  Sense strand starting at position 121 SEQ ID NO: 3108
ucaaauagcucggcacaaa

SEQ ID NO: 241483 - RNA, 19 nt, Artificial Sequence
  Description of Artificial Sequence: Synthetic oligonucleotide
  Antisense strand to SEQ ID NO: 241482
uuugugccgagcuauuuga

SEQ ID NO: 241484 - RNA, 19 nt, Artificial Sequence
  Description of Artificial Sequence: Synthetic oligonucleotide
  Sense strand starting at position 161 SEQ ID NO: 3108
ccguaacaagacugagaga

SEQ ID NO: 241485 - RNA, 19 nt, Artificial Sequence
  Description of Artificial Sequence: Synthetic oligonucleotide
  Antisense strand to SEQ ID NO: 241484
ucucucagucuuguuacgg

SEQ ID NO: 241486 - RNA, 19 nt, Artificial Sequence
  Description of Artificial Sequence: Synthetic oligonucleotide
  Sense strand starting at position 360 SEQ ID NO: 3108
guaggauauauguguacag

SEQ ID NO: 241487 - RNA, 19 nt, Artificial Sequence
  Description of Artificial Sequence: Synthetic oligonucleotide
  Antisense strand to SEQ ID NO: 241486
cuguacacauauauccuac

SEQ ID NO: 241488 - RNA, 19 nt, Artificial Sequence
  Description of Artificial Sequence: Synthetic oligonucleotide
  Sense strand starting at position 361 SEQ ID NO: 3108
uaggauauauguguacagu

SEQ ID NO: 241489 - RNA, 19 nt, Artificial Sequence
  Description of Artificial Sequence: Synthetic oligonucleotide
  Antisense strand to SEQ ID NO: 241488
acuguacacauauauccua

SEQ ID NO: 241490 - RNA, 19 nt, Artificial Sequence
  Description of Artificial Sequence: Synthetic oligonucleotide
  Sense strand starting at position 362 SEQ ID NO: 3108
aggauauauguguacaguu

SEQ ID NO: 241491 - RNA, 19 nt, Artificial Sequence
  Description of Artificial Sequence: Synthetic oligonucleotide
  Antisense strand to SEQ ID NO: 241490
aacuguacacauauauccu

SEQ ID NO: 241492 - RNA, 19 nt, Artificial Sequence
  Description of Artificial Sequence: Synthetic oligonucleotide
  Sense strand starting at position 534 SEQ ID NO: 3108
aacuacuugcuguggacaa

SEQ ID NO: 241493 - RNA, 19 nt, Artificial Sequence
  Description of Artificial Sequence: Synthetic oligonucleotide
  Antisense strand to SEQ ID NO: 241492
uuguccacagcaaguaguu

SEQ ID NO: 241494 - RNA, 19 nt, Artificial Sequence
  Description of Artificial Sequence: Synthetic oligonucleotide
  Sense strand starting at position 580 SEQ ID NO: 3108
uaacauuucugguaagaga

SEQ ID NO: 241495 - RNA, 19 nt, Artificial Sequence
  Description of Artificial Sequence: Synthetic oligonucleotide
  Antisense strand to SEQ ID NO: 241494
ucucuuaccagaaauguua

SEQ ID NO: 241496 - RNA, 19 nt, Artificial Sequence
  Description of Artificial Sequence: Synthetic oligonucleotide
  Sense strand starting at position 594 SEQ ID NO: 3108
agagaaagaccuggcucua

SEQ ID NO: 241497 - RNA, 19 nt, Artificial Sequence
  Description of Artificial Sequence: Synthetic oligonucleotide
  Antisense strand to SEQ ID NO: 241496
uagagccaggucuuucucu

SEQ ID NO: 241498 - RNA, 19 nt, Artificial Sequence
  Description of Artificial Sequence: Synthetic oligonucleotide
  Sense strand starting at position 610 SEQ ID NO: 3108
cuaggaauguguguuuaau

SEQ ID NO: 241499 - RNA, 19 nt, Artificial Sequence
  Description of Artificial Sequence: Synthetic oligonucleotide
  Antisense strand to SEQ ID NO: 241498
auuaaacacacauuccuag

SEQ ID NO: 241500 - RNA, 19 nt, Artificial Sequence
  Description of Artificial Sequence: Synthetic oligonucleotide
  Sense strand starting at position 669 SEQ ID NO: 3108
ggaauaaauuaccaaugaa

SEQ ID NO: 241501 - RNA, 19 nt, Artificial Sequence
  Description of Artificial Sequence: Synthetic oligonucleotide
  Antisense strand to SEQ ID NO: 241500
uucauugguaauuuauucc

SEQ ID NO: 241502 - RNA, 19 nt, Artificial Sequence
  Description of Artificial Sequence: Synthetic oligonucleotide
  Sense strand starting at position 760 SEQ ID NO: 3108
aaguguuguaaccgaagag

SEQ ID NO: 241503 - RNA, 19 nt, Artificial Sequence
  Description of Artificial Sequence: Synthetic oligonucleotide
  Antisense strand to SEQ ID NO: 241502
cucuucgguuacaacacuu

SEQ ID NO: 241504 - RNA, 19 nt, Artificial Sequence
  Description of Artificial Sequence: Synthetic oligonucleotide
  Sense strand starting at position 764 SEQ ID NO: 3108
guuguaaccgaagagguaa

SEQ ID NO: 241505 - RNA, 19 nt, Artificial Sequence
  Description of Artificial Sequence: Synthetic oligonucleotide
  Antisense strand to SEQ ID NO: 241504
uuaccucuucgguuacaac

SEQ ID NO: 241506 - RNA, 19 nt, Artificial Sequence
  Description of Artificial Sequence: Synthetic oligonucleotide
  Sense strand starting at position 784 SEQ ID NO: 3108
aaguguacugaguaaucca

SEQ ID NO: 241507 - RNA, 19 nt, Artificial Sequence
  Description of Artificial Sequence: Synthetic oligonucleotide
  Antisense strand to SEQ ID NO: 241506
uggauuacucaguacacuu

SEQ ID NO: 241508 - RNA, 19 nt, Artificial Sequence
  Description of Artificial Sequence: Synthetic oligonucleotide
  Sense strand starting at position 787 SEQ ID NO: 3108
uguacugaguaauccacaa

SEQ ID NO: 241509 - RNA, 19 nt, Artificial Sequence
  Description of Artificial Sequence: Synthetic oligonucleotide
  Antisense strand to SEQ ID NO: 241508
uuguggauuacucaguaca

SEQ ID NO: 241510 - RNA, 19 nt, Artificial Sequence
  Description of Artificial Sequence: Synthetic oligonucleotide
  Sense strand starting at position 949 SEQ ID NO: 3108
gagagagcucccgguagaa

SEQ ID NO: 241511 - RNA, 19 nt, Artificial Sequence
  Description of Artificial Sequence: Synthetic oligonucleotide
  Antisense strand to SEQ ID NO: 241510
uucuaccgggagcucucuc

SEQ ID NO: 241512 - RNA, 19 nt, Artificial Sequence
  Description of Artificial Sequence: Synthetic oligonucleotide
  Sense strand starting at position 1395 SEQ ID NO: 3108
uuguuaccggcugagagaa

SEQ ID NO: 241513 - RNA, 19 nt, Artificial Sequence
  Description of Artificial Sequence: Synthetic oligonucleotide
  Antisense strand to SEQ ID NO: 241512
uucucucagccgguaacaa

SEQ ID NO: 241514 - RNA, 19 nt, Artificial Sequence
  Description of Artificial Sequence: Synthetic oligonucleotide
  Sense strand starting at position 2440 SEQ ID NO: 3108
acggcuuggagccaugaga

SEQ ID NO: 241515 - RNA, 19 nt, Artificial Sequence
  Description of Artificial Sequence: Synthetic oligonucleotide
  Antisense strand to SEQ ID NO: 241514
ucucauggcuccaagccgu

SEQ ID NO: 241516 - RNA, 19 nt, Artificial Sequence
  Description of Artificial Sequence: Synthetic oligonucleotide
  Sense strand starting at position 2448 SEQ ID NO: 3108
gagccaugagaauggucuu

SEQ ID NO: 241517 - RNA, 19 nt, Artificial Sequence
  Description of Artificial Sequence: Synthetic oligonucleotide
  Antisense strand to SEQ ID NO: 241516
aagaccauucucauggcuc

SEQ ID NO: 241518 - RNA, 19 nt, Artificial Sequence
  Description of Artificial Sequence: Synthetic oligonucleotide
  Sense strand starting at position 2449 SEQ ID NO: 3108
agccaugagaauggucuuu

SEQ ID NO: 241519 - RNA, 19 nt, Artificial Sequence
  Description of Artificial Sequence: Synthetic oligonucleotide
  Antisense strand to SEQ ID NO: 241518
aaagaccauucucauggcu

SEQ ID NO: 241520 - RNA, 19 nt, Artificial Sequence
  Description of Artificial Sequence: Synthetic oligonucleotide
  Sense strand starting at position 2454 SEQ ID NO: 3108
ugagaauggucuuuccacu

SEQ ID NO: 241521 - RNA, 19 nt, Artificial Sequence
  Description of Artificial Sequence: Synthetic oligonucleotide
  Antisense strand to SEQ ID NO: 241520
aguggaaagaccauucuca

SEQ ID NO: 241522 - RNA, 19 nt, Artificial Sequence
  Description of Artificial Sequence: Synthetic oligonucleotide
  Sense strand starting at position 2539 SEQ ID NO: 3108
gcugucagcauugacugaa

SEQ ID NO: 241523 - RNA, 19 nt, Artificial Sequence
  Description of Artificial Sequence: Synthetic oligonucleotide
  Antisense strand to SEQ ID NO: 241522
uucagucaaugcugacagc

SEQ ID NO: 241524 - RNA, 19 nt, Artificial Sequence
  Description of Artificial Sequence: Synthetic oligonucleotide
  Sense strand starting at position 2733 SEQ ID NO: 3108
uucucuucuggacaaugua

SEQ ID NO: 241525 - RNA, 19 nt, Artificial Sequence
  Description of Artificial Sequence: Synthetic oligonucleotide
  Antisense strand to SEQ ID NO: 241524
uacauuguccagaagagaa

SEQ ID NO: 241526 - RNA, 19 nt, Artificial Sequence
  Description of Artificial Sequence: Synthetic oligonucleotide
  Sense strand starting at position 2827 SEQ ID NO: 3108
ugugguguccugagggcuu

SEQ ID NO: 241527 - RNA, 19 nt, Artificial Sequence
  Description of Artificial Sequence: Synthetic oligonucleotide
  Antisense strand to SEQ ID NO: 241526
aagcccucaggacaccaca

SEQ ID NO: 241528 - RNA, 19 nt, Artificial Sequence
  Description of Artificial Sequence: Synthetic oligonucleotide
  Sense strand starting at position 2942 SEQ ID NO: 3108
acaggaacugugugcaauu

SEQ ID NO: 241529 - RNA, 19 nt, Artificial Sequence
  Description of Artificial Sequence: Synthetic oligonucleotide
  Antisense strand to SEQ ID NO: 241528
aauugcacacaguuccugu

SEQ ID NO: 241530 - RNA, 19 nt, Artificial Sequence
  Description of Artificial Sequence: Synthetic oligonucleotide
  Sense strand starting at position 2973 SEQ ID NO: 3108
agcccaguuccugugcgau

SEQ ID NO: 241531 - RNA, 19 nt, Artificial Sequence
  Description of Artificial Sequence: Synthetic oligonucleotide
  Antisense strand to SEQ ID NO: 241530
aucgcacaggaacugggcu

SEQ ID NO: 241532 - RNA, 19 nt, Artificial Sequence
  Description of Artificial Sequence: Synthetic oligonucleotide
  Sense strand starting at position 3025 SEQ ID NO: 3108
augaguaguccuugggaaa

SEQ ID NO: 241533 - RNA, 19 nt, Artificial Sequence
  Description of Artificial Sequence: Synthetic oligonucleotide
  Antisense strand to SEQ ID NO: 241532
uuucccaaggacuacucau

SEQ ID NO: 241534 - RNA, 19 nt, Artificial Sequence
  Description of Artificial Sequence: Synthetic oligonucleotide
  Sense strand starting at position 3026 SEQ ID NO: 3108
ugaguaguccuugggaaau

SEQ ID NO: 241535 - RNA, 19 nt, Artificial Sequence
  Description of Artificial Sequence: Synthetic oligonucleotide
  Antisense strand to SEQ ID NO: 241534
auuucccaaggacuacuca

SEQ ID NO: 241536 - RNA, 19 nt, Artificial Sequence
  Description of Artificial Sequence: Synthetic oligonucleotide
  Sense strand starting at position 3199 SEQ ID NO: 3108
cuuuccuaagaguguagau

SEQ ID NO: 241537 - RNA, 19 nt, Artificial Sequence
  Description of Artificial Sequence: Synthetic oligonucleotide
  Antisense strand to SEQ ID NO: 241536
aucuacacucuuaggaaag

SEQ ID NO: 241538 - RNA, 19 nt, Artificial Sequence
  Description of Artificial Sequence: Synthetic oligonucleotide
  Sense strand starting at position 3233 SEQ ID NO: 3108
ccuaguucucuccaaaguu

SEQ ID NO: 241539 - RNA, 19 nt, Artificial Sequence
  Description of Artificial Sequence: Synthetic oligonucleotide
  Antisense strand to SEQ ID NO: 241538
aacuuuggagagaacuagg

SEQ ID NO: 241540 - RNA, 19 nt, Artificial Sequence
  Description of Artificial Sequence: Synthetic oligonucleotide
  Sense strand starting at position 3287 SEQ ID NO: 3108
cugagagugcuuuaacaua

SEQ ID NO: 241541 - RNA, 19 nt, Artificial Sequence
  Description of Artificial Sequence: Synthetic oligonucleotide
  Antisense strand to SEQ ID NO: 241540
uauguuaaagcacucucag

SEQ ID NO: 241542 - RNA, 19 nt, Artificial Sequence
  Description of Artificial Sequence: Synthetic oligonucleotide
  Sense strand starting at position 3342 SEQ ID NO: 3108
uuuggaaucuaauugcaag

SEQ ID NO: 241543 - RNA, 19 nt, Artificial Sequence
  Description of Artificial Sequence: Synthetic oligonucleotide
  Antisense strand to SEQ ID NO: 241542
cuugcaauuagauuccaaa

SEQ ID NO: 241544 - RNA, 19 nt, Artificial Sequence
  Description of Artificial Sequence: Synthetic oligonucleotide
  Sense strand starting at position 3403 SEQ ID NO: 3108
gcagguauacauugacaaa

SEQ ID NO: 241545 - RNA, 19 nt, Artificial Sequence
  Description of Artificial Sequence: Synthetic oligonucleotide
  Antisense strand to SEQ ID NO: 241544
uuugucaauguauaccugc

SEQ ID NO: 241546 - RNA, 19 nt, Artificial Sequence
  Description of Artificial Sequence: Synthetic oligonucleotide
  Sense strand starting at position 3537 SEQ ID NO: 3108
ucugcaaugguuugggaaa

SEQ ID NO: 241547 - RNA, 19 nt, Artificial Sequence
  Description of Artificial Sequence: Synthetic oligonucleotide
  Antisense strand to SEQ ID NO: 241546
uuucccaaaccauugcaga

SEQ ID NO: 241548 - RNA, 19 nt, Artificial Sequence
  Description of Artificial Sequence: Synthetic oligonucleotide
  Sense strand starting at position 3571 SEQ ID NO: 3108
gggaaacaaugauacaauu

SEQ ID NO: 241549 - RNA, 19 nt, Artificial Sequence
  Description of Artificial Sequence: Synthetic oligonucleotide
  Antisense strand to SEQ ID NO: 241548
aauuguaucauuguuuccc

SEQ ID NO: 241550 - RNA, 19 nt, Artificial Sequence
  Description of Artificial Sequence: Synthetic oligonucleotide
  Sense strand starting at position 3744 SEQ ID NO: 3108
auagcagucucaguaucaa

SEQ ID NO: 241551 - RNA, 19 nt, Artificial Sequence
  Description of Artificial Sequence: Synthetic oligonucleotide
  Antisense strand to SEQ ID NO: 241550
uugauacugagacugcuau

SEQ ID NO: 241552 - RNA, 19 nt, Artificial Sequence
  Description of Artificial Sequence: Synthetic oligonucleotide
  Sense strand starting at position 3928 SEQ ID NO: 3108
augugaaauaauugagugu

SEQ ID NO: 241553 - RNA, 19 nt, Artificial Sequence
  Description of Artificial Sequence: Synthetic oligonucleotide
  Antisense strand to SEQ ID NO: 241552
acacucaauuauuucacau

SEQ ID NO: 241554 - RNA, 19 nt, Artificial Sequence
  Description of Artificial Sequence: Synthetic oligonucleotide
  Sense strand starting at position 3931 SEQ ID NO: 3108
ugaaauaauugagugugau

SEQ ID NO: 241555 - RNA, 19 nt, Artificial Sequence
  Description of Artificial Sequence: Synthetic oligonucleotide
  Antisense strand to SEQ ID NO: 241554
aucacacucaauuauuuca

SEQ ID NO: 241556 - RNA, 19 nt, Artificial Sequence
  Description of Artificial Sequence: Synthetic oligonucleotide
  Sense strand starting at position 3932 SEQ ID NO: 3108
gaaauaauugagugugaug

SEQ ID NO: 241557 - RNA, 19 nt, Artificial Sequence
  Description of Artificial Sequence: Synthetic oligonucleotide
  Antisense strand to SEQ ID NO: 241556
caucacacucaauuauuuc

SEQ ID NO: 241558 - RNA, 19 nt, Artificial Sequence
  Description of Artificial Sequence: Synthetic oligonucleotide
  Sense strand starting at position 3971 SEQ ID NO: 3108
uguuaaguaugagcaacua

SEQ ID NO: 241559 - RNA, 19 nt, Artificial Sequence
  Description of Artificial Sequence: Synthetic oligonucleotide
  Antisense strand to SEQ ID NO: 241558
uaguugcucauacuuaaca

SEQ ID NO: 241560 - RNA, 19 nt, Artificial Sequence
  Description of Artificial Sequence: Synthetic oligonucleotide
  Sense strand starting at position 763 SEQ ID NO: 3109
gcgaguuugccugcaacgu

SEQ ID NO: 241561 - RNA, 19 nt, Artificial Sequence
  Description of Artificial Sequence: Synthetic oligonucleotide
  Antisense strand to SEQ ID NO: 241560
acguugcaggcaaacucgc

SEQ ID NO: 241562 - RNA, 19 nt, Artificial Sequence
  Description of Artificial Sequence: Synthetic oligonucleotide
  Sense strand starting at position 833 SEQ ID NO: 3109
aguggagcuaguuagaauc

SEQ ID NO: 241563 - RNA, 19 nt, Artificial Sequence
  Description of Artificial Sequence: Synthetic oligonucleotide
  Antisense strand to SEQ ID NO: 241562
gauucuaacuagcuccacu

SEQ ID NO: 241564 - RNA, 19 nt, Artificial Sequence
  Description of Artificial Sequence: Synthetic oligonucleotide
  Sense strand starting at position 835 SEQ ID NO: 3109
uggagcuaguuagaaucaa

SEQ ID NO: 241565 - RNA, 19 nt, Artificial Sequence
  Description of Artificial Sequence: Synthetic oligonucleotide
  Antisense strand to SEQ ID NO: 241564
uugauucuaacuagcucca

SEQ ID NO: 241566 - RNA, 19 nt, Artificial Sequence
  Description of Artificial Sequence: Synthetic oligonucleotide
  Sense strand starting at position 887 SEQ ID NO: 3109
cagaauuuguaccaggaga

SEQ ID NO: 241567 - RNA, 19 nt, Artificial Sequence
  Description of Artificial Sequence: Synthetic oligonucleotide
  Antisense strand to SEQ ID NO: 241566
ucuccugguacaaauucug

SEQ ID NO: 241568 - RNA, 19 nt, Artificial Sequence
  Description of Artificial Sequence: Synthetic oligonucleotide
  Sense strand starting at position 901 SEQ ID NO: 3109
ggagaaguuccacggagag

SEQ ID NO: 241569 - RNA, 19 nt, Artificial Sequence
  Description of Artificial Sequence: Synthetic oligonucleotide
  Antisense strand to SEQ ID NO: 241568
cucuccguggaacuucucc

SEQ ID NO: 241570 - RNA, 19 nt, Artificial Sequence
  Description of Artificial Sequence: Synthetic oligonucleotide
  Sense strand starting at position 958 SEQ ID NO: 3109
cgaaucuguacucgaggca

SEQ ID NO: 241571 - RNA, 19 nt, Artificial Sequence
  Description of Artificial Sequence: Synthetic oligonucleotide
  Antisense strand to SEQ ID NO: 241570
ugccucgaguacagauucg

SEQ ID NO: 241572 - RNA, 19 nt, Artificial Sequence
  Description of Artificial Sequence: Synthetic oligonucleotide
  Sense strand starting at position 973 SEQ ID NO: 3109
ggcagacuccauggaauuc

SEQ ID NO: 241573 - RNA, 19 nt, Artificial Sequence
  Description of Artificial Sequence: Synthetic oligonucleotide
  Antisense strand to SEQ ID NO: 241572
gaauuccauggagucugcc

SEQ ID NO: 241574 - RNA, 19 nt, Artificial Sequence
  Description of Artificial Sequence: Synthetic oligonucleotide
  Sense strand starting at position 983 SEQ ID NO: 3109
auggaauucgcccgggaac

SEQ ID NO: 241575 - RNA, 19 nt, Artificial Sequence
  Description of Artificial Sequence: Synthetic oligonucleotide
  Antisense strand to SEQ ID NO: 241574
guucccgggcgaauuccau

SEQ ID NO: 241576 - RNA, 19 nt, Artificial Sequence
  Description of Artificial Sequence: Synthetic oligonucleotide
  Sense strand starting at position 1119 SEQ ID NO: 3109
ggacuuaccuuucuuagag

SEQ ID NO: 241577 - RNA, 19 nt, Artificial Sequence
  Description of Artificial Sequence: Synthetic oligonucleotide
  Antisense strand to SEQ ID NO: 241576
cucuaagaaagguaagucc

SEQ ID NO: 241578 - RNA, 19 nt, Artificial Sequence
  Description of Artificial Sequence: Synthetic oligonucleotide
  Sense strand starting at position 2147 SEQ ID NO: 3109
ccugcucucggacagguau

SEQ ID NO: 241579 - RNA, 19 nt, Artificial Sequence
  Description of Artificial Sequence: Synthetic oligonucleotide
  Antisense strand to SEQ ID NO: 241578
auaccuguccgagagcagg

SEQ ID NO: 241580 - RNA, 19 nt, Artificial Sequence
  Description of Artificial Sequence: Synthetic oligonucleotide
  Sense strand starting at position 2654 SEQ ID NO: 3109
gauaaaguuucugccuugu

SEQ ID NO: 241581 - RNA, 19 nt, Artificial Sequence
  Description of Artificial Sequence: Synthetic oligonucleotide
  Antisense strand to SEQ ID NO: 241580
acaaggcagaaacuuuauc

SEQ ID NO: 241582 - RNA, 19 nt, Artificial Sequence
  Description of Artificial Sequence: Synthetic oligonucleotide
  Sense strand starting at position 2735 SEQ ID NO: 3109
guggaacacuccuuaugcu

SEQ ID NO: 241583 - RNA, 19 nt, Artificial Sequence
  Description of Artificial Sequence: Synthetic oligonucleotide
  Antisense strand to SEQ ID NO: 241582
agcauaaggaguguuccac

SEQ ID NO: 241584 - RNA, 19 nt, Artificial Sequence
  Description of Artificial Sequence: Synthetic oligonucleotide
  Sense strand starting at position 2750 SEQ ID NO: 3109
ugcuccuuucugggagacu

SEQ ID NO: 241585 - RNA, 19 nt, Artificial Sequence
  Description of Artificial Sequence: Synthetic oligonucleotide
  Antisense strand to SEQ ID NO: 241584
agucucccagaaaggagca

SEQ ID NO: 241586 - RNA, 19 nt, Artificial Sequence
  Description of Artificial Sequence: Synthetic oligonucleotide
  Sense strand starting at position 2785 SEQ ID NO: 3109
cggcgcuugcuuucacuga

SEQ ID NO: 241587 - RNA, 19 nt, Artificial Sequence
  Description of Artificial Sequence: Synthetic oligonucleotide
  Antisense strand to SEQ ID NO: 241586
ucagugaaagcaagcgccg

SEQ ID NO: 241588 - RNA, 19 nt, Artificial Sequence
  Description of Artificial Sequence: Synthetic oligonucleotide
  Sense strand starting at position 2844 SEQ ID NO: 3109
ugagaucucagagguuuag

SEQ ID NO: 241589 - RNA, 19 nt, Artificial Sequence
  Description of Artificial Sequence: Synthetic oligonucleotide
  Antisense strand to SEQ ID NO: 241588
cuaaaccucugagaucuca

SEQ ID NO: 241590 - RNA, 19 nt, Artificial Sequence
  Description of Artificial Sequence: Synthetic oligonucleotide
  Sense strand starting at position 2865 SEQ ID NO: 3109
ggacuuguaccucgaagca

SEQ ID NO: 241591 - RNA, 19 nt, Artificial Sequence
  Description of Artificial Sequence: Synthetic oligonucleotide
  Antisense strand to SEQ ID NO: 241590
ugcuucgagguacaagucc

SEQ ID NO: 241592 - RNA, 19 nt, Artificial Sequence
  Description of Artificial Sequence: Synthetic oligonucleotide
  Sense strand starting at position 2884 SEQ ID NO: 3109
auuagagcuucugcuccau

SEQ ID NO: 241593 - RNA, 19 nt, Artificial Sequence
  Description of Artificial Sequence: Synthetic oligonucleotide
  Antisense strand to SEQ ID NO: 241592
auggagcagaagcucuaau

SEQ ID NO: 241594 - RNA, 19 nt, Artificial Sequence
  Description of Artificial Sequence: Synthetic oligonucleotide
  Sense strand starting at position 2888 SEQ ID NO: 3109
gagcuucugcuccaucaga

SEQ ID NO: 241595 - RNA, 19 nt, Artificial Sequence
  Description of Artificial Sequence: Synthetic oligonucleotide
  Antisense strand to SEQ ID NO: 241594
ucugauggagcagaagcuc

SEQ ID NO: 241596 - RNA, 19 nt, Artificial Sequence
  Description of Artificial Sequence: Synthetic oligonucleotide
  Sense strand starting at position 2919 SEQ ID NO: 3109
cgucucuugugagugaaau

SEQ ID NO: 241597 - RNA, 19 nt, Artificial Sequence
  Description of Artificial Sequence: Synthetic oligonucleotide
  Antisense strand to SEQ ID NO: 241596
auuucacucacaagagacg

SEQ ID NO: 241598 - RNA, 19 nt, Artificial Sequence
  Description of Artificial Sequence: Synthetic oligonucleotide
  Sense strand starting at position 2920 SEQ ID NO: 3109
gucucuugugagugaaauc

SEQ ID NO: 241599 - RNA, 19 nt, Artificial Sequence
  Description of Artificial Sequence: Synthetic oligonucleotide
  Antisense strand to SEQ ID NO: 241598
gauuucacucacaagagac

SEQ ID NO: 241600 - RNA, 19 nt, Artificial Sequence
  Description of Artificial Sequence: Synthetic oligonucleotide
  Sense strand starting at position 2940 SEQ ID NO: 3109
gagggcucacaauguuaau

SEQ ID NO: 241601 - RNA, 19 nt, Artificial Sequence
  Description of Artificial Sequence: Synthetic oligonucleotide
  Antisense strand to SEQ ID NO: 241600
auuaacauugugagcccuc

SEQ ID NO: 241602 - RNA, 19 nt, Artificial Sequence
  Description of Artificial Sequence: Synthetic oligonucleotide
  Sense strand starting at position 2963 SEQ ID NO: 3109
ucacgucuuucccuugaua

SEQ ID NO: 241603 - RNA, 19 nt, Artificial Sequence
  Description of Artificial Sequence: Synthetic oligonucleotide
  Antisense strand to SEQ ID NO: 241602
uaucaagggaaagacguga

SEQ ID NO: 241604 - RNA, 19 nt, Artificial Sequence
  Description of Artificial Sequence: Synthetic oligonucleotide
  Sense strand starting at position 2965 SEQ ID NO: 3109
acgucuuucccuugauaau

SEQ ID NO: 241605 - RNA, 19 nt, Artificial Sequence
  Description of Artificial Sequence: Synthetic oligonucleotide
  Antisense strand to SEQ ID NO: 241604
auuaucaagggaaagacgu

SEQ ID NO: 241606 - RNA, 19 nt, Artificial Sequence
  Description of Artificial Sequence: Synthetic oligonucleotide
  Sense strand starting at position 2966 SEQ ID NO: 3109
cgucuuucccuugauaaua

SEQ ID NO: 241607 - RNA, 19 nt, Artificial Sequence
  Description of Artificial Sequence: Synthetic oligonucleotide
  Antisense strand to SEQ ID NO: 241606
uauuaucaagggaaagacg

SEQ ID NO: 241608 - RNA, 19 nt, Artificial Sequence
  Description of Artificial Sequence: Synthetic oligonucleotide
  Sense strand starting at position 2989 SEQ ID NO: 3109
uuuguuuacugaguguaga

SEQ ID NO: 241609 - RNA, 19 nt, Artificial Sequence
  Description of Artificial Sequence: Synthetic oligonucleotide
  Antisense strand to SEQ ID NO: 241608
ucuacacucaguaaacaaa

SEQ ID NO: 241610 - RNA, 19 nt, Artificial Sequence
  Description of Artificial Sequence: Synthetic oligonucleotide
  Sense strand starting at position 2990 SEQ ID NO: 3109
uuguuuacugaguguagag

SEQ ID NO: 241611 - RNA, 19 nt, Artificial Sequence
  Description of Artificial Sequence: Synthetic oligonucleotide
  Antisense strand to SEQ ID NO: 241610
cucuacacucaguaaacaa

SEQ ID NO: 241612 - RNA, 19 nt, Artificial Sequence
  Description of Artificial Sequence: Synthetic oligonucleotide
  Sense strand starting at position 3024 SEQ ID NO: 3109
gugcaauugccacaggaaa

SEQ ID NO: 241613 - RNA, 19 nt, Artificial Sequence
  Description of Artificial Sequence: Synthetic oligonucleotide
  Antisense strand to SEQ ID NO: 241612
uuuccuguggcaauugcac

SEQ ID NO: 241614 - RNA, 19 nt, Artificial Sequence
  Description of Artificial Sequence: Synthetic oligonucleotide
  Sense strand starting at position 3188 SEQ ID NO: 3109
gaaagagggugguuuccua

SEQ ID NO: 241615 - RNA, 19 nt, Artificial Sequence
  Description of Artificial Sequence: Synthetic oligonucleotide
  Antisense strand to SEQ ID NO: 241614
uaggaaaccacccucuuuc

SEQ ID NO: 241616 - RNA, 19 nt, Artificial Sequence
  Description of Artificial Sequence: Synthetic oligonucleotide
  Sense strand starting at position 3325 SEQ ID NO: 3109
cugauugacuugucauaaa

SEQ ID NO: 241617 - RNA, 19 nt, Artificial Sequence
  Description of Artificial Sequence: Synthetic oligonucleotide
  Antisense strand to SEQ ID NO: 241616
uuuaugacaagucaaucag

SEQ ID NO: 241618 - RNA, 19 nt, Artificial Sequence
  Description of Artificial Sequence: Synthetic oligonucleotide
  Sense strand starting at position 3354 SEQ ID NO: 3109
agcuguuguugccuaaauu

SEQ ID NO: 241619 - RNA, 19 nt, Artificial Sequence
  Description of Artificial Sequence: Synthetic oligonucleotide
  Antisense strand to SEQ ID NO: 241618
aauuuaggcaacaacagcu

SEQ ID NO: 241620 - RNA, 19 nt, Artificial Sequence
  Description of Artificial Sequence: Synthetic oligonucleotide
  Sense strand starting at position 3355 SEQ ID NO: 3109
gcuguuguugccuaaauuu

SEQ ID NO: 241621 - RNA, 19 nt, Artificial Sequence
  Description of Artificial Sequence: Synthetic oligonucleotide
  Antisense strand to SEQ ID NO: 241620
aaauuuaggcaacaacagc

SEQ ID NO: 241622 - RNA, 19 nt, Artificial Sequence
  Description of Artificial Sequence: Synthetic oligonucleotide
  Sense strand starting at position 3392 SEQ ID NO: 3109
uagaauaggcgccaucaca

SEQ ID NO: 241623 - RNA, 19 nt, Artificial Sequence
  Description of Artificial Sequence: Synthetic oligonucleotide
  Antisense strand to SEQ ID NO: 241622
ugugauggcgccuauucua

SEQ ID NO: 241624 - RNA, 19 nt, Artificial Sequence
  Description of Artificial Sequence: Synthetic oligonucleotide
  Sense strand starting at position 3547 SEQ ID NO: 3109
gguggaugccuaggaauca

SEQ ID NO: 241625 - RNA, 19 nt, Artificial Sequence
  Description of Artificial Sequence: Synthetic oligonucleotide
  Antisense strand to SEQ ID NO: 241624
ugauuccuaggcauccacc

SEQ ID NO: 241626 - RNA, 19 nt, Artificial Sequence
  Description of Artificial Sequence: Synthetic oligonucleotide
  Sense strand starting at position 3573 SEQ ID NO: 3109
guuaaagaggucugugguu

SEQ ID NO: 241627 - RNA, 19 nt, Artificial Sequence
  Description of Artificial Sequence: Synthetic oligonucleotide
  Antisense strand to SEQ ID NO: 241626
aaccacagaccucuuuaac

SEQ ID NO: 241628 - RNA, 19 nt, Artificial Sequence
  Description of Artificial Sequence: Synthetic oligonucleotide
  Sense strand starting at position 3600 SEQ ID NO: 3109
gcuggaguucuugaguuug

SEQ ID NO: 241629 - RNA, 19 nt, Artificial Sequence
  Description of Artificial Sequence: Synthetic oligonucleotide
  Antisense strand to SEQ ID NO: 241628
caaacucaagaacuccagc

SEQ ID NO: 241630 - RNA, 19 nt, Artificial Sequence
  Description of Artificial Sequence: Synthetic oligonucleotide
  Sense strand starting at position 3602 SEQ ID NO: 3109
uggaguucuugaguuugau

SEQ ID NO: 241631 - RNA, 19 nt, Artificial Sequence
  Description of Artificial Sequence: Synthetic oligonucleotide
  Antisense strand to SEQ ID NO: 241630
aucaaacucaagaacucca

SEQ ID NO: 241632 - RNA, 19 nt, Artificial Sequence
  Description of Artificial Sequence: Synthetic oligonucleotide
  Sense strand starting at position 3608 SEQ ID NO: 3109
ucuugaguuugauuggaaa

SEQ ID NO: 241633 - RNA, 19 nt, Artificial Sequence
  Description of Artificial Sequence: Synthetic oligonucleotide
  Antisense strand to SEQ ID NO: 241632
uuuccaaucaaacucaaga

SEQ ID NO: 241634 - RNA, 19 nt, Artificial Sequence
  Description of Artificial Sequence: Synthetic oligonucleotide
  Sense strand starting at position 3610 SEQ ID NO: 3109
uugaguuugauuggaaaug

SEQ ID NO: 241635 - RNA, 19 nt, Artificial Sequence
  Description of Artificial Sequence: Synthetic oligonucleotide
  Antisense strand to SEQ ID NO: 241634
cauuuccaaucaaacucaa

SEQ ID NO: 241636 - RNA, 19 nt, Artificial Sequence
  Description of Artificial Sequence: Synthetic oligonucleotide
  Sense strand starting at position 3626 SEQ ID NO: 3109
auggaauaccugugcugaa

SEQ ID NO: 241637 - RNA, 19 nt, Artificial Sequence
  Description of Artificial Sequence: Synthetic oligonucleotide
  Antisense strand to SEQ ID NO: 241636
uucagcacagguauuccau

SEQ ID NO: 241638 - RNA, 19 nt, Artificial Sequence
  Description of Artificial Sequence: Synthetic oligonucleotide
  Sense strand starting at position 3627 SEQ ID NO: 3109
uggaauaccugugcugaaa

SEQ ID NO: 241639 - RNA, 19 nt, Artificial Sequence
  Description of Artificial Sequence: Synthetic oligonucleotide
  Antisense strand to SEQ ID NO: 241638
uuucagcacagguauucca

SEQ ID NO: 241640 - RNA, 19 nt, Artificial Sequence
  Description of Artificial Sequence: Synthetic oligonucleotide
  Sense strand starting at position 280 SEQ ID NO: 3110
cuccuaggcagucaggaau

SEQ ID NO: 241641 - RNA, 19 nt, Artificial Sequence
  Description of Artificial Sequence: Synthetic oligonucleotide
  Antisense strand to SEQ ID NO: 241640
auuccugacugccuaggag

SEQ ID NO: 241642 - RNA, 19 nt, Artificial Sequence
  Description of Artificial Sequence: Synthetic oligonucleotide
  Sense strand starting at position 298 SEQ ID NO: 3110
uccugacagucagguuuau

SEQ ID NO: 241643 - RNA, 19 nt, Artificial Sequence
  Description of Artificial Sequence: Synthetic oligonucleotide
  Antisense strand to SEQ ID NO: 241642
auaaaccugacugucagga

SEQ ID NO: 241644 - RNA, 19 nt, Artificial Sequence
  Description of Artificial Sequence: Synthetic oligonucleotide
  Sense strand starting at position 302 SEQ ID NO: 3110
gacagucagguuuauaggu

SEQ ID NO: 241645 - RNA, 19 nt, Artificial Sequence
  Description of Artificial Sequence: Synthetic oligonucleotide
  Antisense strand to SEQ ID NO: 241644
accuauaaaccugacuguc

SEQ ID NO: 241646 - RNA, 19 nt, Artificial Sequence
  Description of Artificial Sequence: Synthetic oligonucleotide
  Sense strand starting at position 811 SEQ ID NO: 3110
acaugaucauugggcucaa

SEQ ID NO: 241647 - RNA, 19 nt, Artificial Sequence
  Description of Artificial Sequence: Synthetic oligonucleotide
  Antisense strand to SEQ ID NO: 241646
uugagcccaaugaucaugu

SEQ ID NO: 241648 - RNA, 19 nt, Artificial Sequence
  Description of Artificial Sequence: Synthetic oligonucleotide
  Sense strand starting at position 815 SEQ ID NO: 3110
gaucauugggcucaaggca

SEQ ID NO: 241649 - RNA, 19 nt, Artificial Sequence
  Description of Artificial Sequence: Synthetic oligonucleotide
  Antisense strand to SEQ ID NO: 241648
ugccuugagcccaaugauc

SEQ ID NO: 241650 - RNA, 19 nt, Artificial Sequence
  Description of Artificial Sequence: Synthetic oligonucleotide
  Sense strand starting at position 868 SEQ ID NO: 3110
ggcucuguggucguguuua

SEQ ID NO: 241651 - RNA, 19 nt, Artificial Sequence
  Description of Artificial Sequence: Synthetic oligonucleotide
  Antisense strand to SEQ ID NO: 241650
uaaacacgaccacagagcc

SEQ ID NO: 241652 - RNA, 19 nt, Artificial Sequence
  Description of Artificial Sequence: Synthetic oligonucleotide
  Sense strand starting at position 923 SEQ ID NO: 3110
ucaggucuagcucaggaaa

SEQ ID NO: 241653 - RNA, 19 nt, Artificial Sequence
  Description of Artificial Sequence: Synthetic oligonucleotide
  Antisense strand to SEQ ID NO: 241652
uuuccugagcuagaccuga

SEQ ID NO: 241654 - RNA, 19 nt, Artificial Sequence
  Description of Artificial Sequence: Synthetic oligonucleotide
  Sense strand starting at position 1031 SEQ ID NO: 3110
gggacuaucucagggcuga

SEQ ID NO: 241655 - RNA, 19 nt, Artificial Sequence
  Description of Artificial Sequence: Synthetic oligonucleotide
  Antisense strand to SEQ ID NO: 241654
ucagcccugagauaguccc

SEQ ID NO: 241656 - RNA, 19 nt, Artificial Sequence
  Description of Artificial Sequence: Synthetic oligonucleotide
  Sense strand starting at position 1163 SEQ ID NO: 3110
gguggcaacucugcucaua

SEQ ID NO: 241657 - RNA, 19 nt, Artificial Sequence
  Description of Artificial Sequence: Synthetic oligonucleotide
  Antisense strand to SEQ ID NO: 241656
uaugagcagaguugccacc

SEQ ID NO: 241658 - RNA, 19 nt, Artificial Sequence
  Description of Artificial Sequence: Synthetic oligonucleotide
  Sense strand starting at position 2000 SEQ ID NO: 3110
cguguaauuguggaugccu

SEQ ID NO: 241659 - RNA, 19 nt, Artificial Sequence
  Description of Artificial Sequence: Synthetic oligonucleotide
  Antisense strand to SEQ ID NO: 241658
aggcauccacaauuacacg

SEQ ID NO: 241660 - RNA, 19 nt, Artificial Sequence
  Description of Artificial Sequence: Synthetic oligonucleotide
  Sense strand starting at position 2282 SEQ ID NO: 3110
gaaggaaagucucagcucu

SEQ ID NO: 241661 - RNA, 19 nt, Artificial Sequence
  Description of Artificial Sequence: Synthetic oligonucleotide
  Antisense strand to SEQ ID NO: 241660
agagcugagacuuuccuuc

SEQ ID NO: 241662 - RNA, 19 nt, Artificial Sequence
  Description of Artificial Sequence: Synthetic oligonucleotide
  Sense strand starting at position 2284 SEQ ID NO: 3110
aggaaagucucagcucuag

SEQ ID NO: 241663 - RNA, 19 nt, Artificial Sequence
  Description of Artificial Sequence: Synthetic oligonucleotide
  Antisense strand to SEQ ID NO: 241662
cuagagcugagacuuuccu

SEQ ID NO: 241664 - RNA, 19 nt, Artificial Sequence
  Description of Artificial Sequence: Synthetic oligonucleotide
  Sense strand starting at position 2436 SEQ ID NO: 3110
ggcgcaggcugguuaauuu

SEQ ID NO: 241665 - RNA, 19 nt, Artificial Sequence
  Description of Artificial Sequence: Synthetic oligonucleotide
  Antisense strand to SEQ ID NO: 241664
aaauuaaccagccugcgcc

SEQ ID NO: 241666 - RNA, 19 nt, Artificial Sequence
  Description of Artificial Sequence: Synthetic oligonucleotide
  Sense strand starting at position 2790 SEQ ID NO: 3110
agacaauucuuugccagca

SEQ ID NO: 241667 - RNA, 19 nt, Artificial Sequence
  Description of Artificial Sequence: Synthetic oligonucleotide
  Antisense strand to SEQ ID NO: 241666
ugcuggcaaagaauugucu

SEQ ID NO: 241668 - RNA, 19 nt, Artificial Sequence
  Description of Artificial Sequence: Synthetic oligonucleotide
  Sense strand starting at position 3064 SEQ ID NO: 3110
aagcacugguuucugacaa

SEQ ID NO: 241669 - RNA, 19 nt, Artificial Sequence
  Description of Artificial Sequence: Synthetic oligonucleotide
  Antisense strand to SEQ ID NO: 241668
uugucagaaaccagugcuu

SEQ ID NO: 241670 - RNA, 19 nt, Artificial Sequence
  Description of Artificial Sequence: Synthetic oligonucleotide
  Sense strand starting at position 3126 SEQ ID NO: 3110
gaagaaucagggcgaucaa

SEQ ID NO: 241671 - RNA, 19 nt, Artificial Sequence
  Description of Artificial Sequence: Synthetic oligonucleotide
  Antisense strand to SEQ ID NO: 241670
uugaucgcccugauucuuc

SEQ ID NO: 241672 - RNA, 19 nt, Artificial Sequence
  Description of Artificial Sequence: Synthetic oligonucleotide
  Sense strand starting at position 3182 SEQ ID NO: 3110
uuucuugcuucugaagguu

SEQ ID NO: 241673 - RNA, 19 nt, Artificial Sequence
  Description of Artificial Sequence: Synthetic oligonucleotide
  Antisense strand to SEQ ID NO: 241672
aaccuucagaagcaagaaa

SEQ ID NO: 241674 - RNA, 19 nt, Artificial Sequence
  Description of Artificial Sequence: Synthetic oligonucleotide
  Sense strand starting at position 3205 SEQ ID NO: 3110
aagaguuaugcccgcuguu

SEQ ID NO: 241675 - RNA, 19 nt, Artificial Sequence
  Description of Artificial Sequence: Synthetic oligonucleotide
  Antisense strand to SEQ ID NO: 241674
aacagcgggcauaacucuu

SEQ ID NO: 241676 - RNA, 19 nt, Artificial Sequence
  Description of Artificial Sequence: Synthetic oligonucleotide
  Sense strand starting at position 3231 SEQ ID NO: 3110
acgggaagauacuuuauua

SEQ ID NO: 241677 - RNA, 19 nt, Artificial Sequence
  Description of Artificial Sequence: Synthetic oligonucleotide
  Antisense strand to SEQ ID NO: 241676
uaauaaaguaucuucccgu

SEQ ID NO: 241678 - RNA, 19 nt, Artificial Sequence
  Description of Artificial Sequence: Synthetic oligonucleotide
  Sense strand starting at position 3298 SEQ ID NO: 3110
ccauaauggcguucgcuuu

SEQ ID NO: 241679 - RNA, 19 nt, Artificial Sequence
  Description of Artificial Sequence: Synthetic oligonucleotide
  Antisense strand to SEQ ID NO: 241678
aaagcgaacgccauuaugg

SEQ ID NO: 241680 - RNA, 19 nt, Artificial Sequence
  Description of Artificial Sequence: Synthetic oligonucleotide
  Sense strand starting at position 3299 SEQ ID NO: 3110
cauaauggcguucgcuuua

SEQ ID NO: 241681 - RNA, 19 nt, Artificial Sequence
  Description of Artificial Sequence: Synthetic oligonucleotide
  Antisense strand to SEQ ID NO: 241680
uaaagcgaacgccauuaug

SEQ ID NO: 241682 - RNA, 19 nt, Artificial Sequence
  Description of Artificial Sequence: Synthetic oligonucleotide
  Sense strand starting at position 3302 SEQ ID NO: 3110
aauggcguucgcuuuauga

SEQ ID NO: 241683 - RNA, 19 nt, Artificial Sequence
  Description of Artificial Sequence: Synthetic oligonucleotide
  Antisense strand to SEQ ID NO: 241682
ucauaaagcgaacgccauu

SEQ ID NO: 241684 - RNA, 19 nt, Artificial Sequence
  Description of Artificial Sequence: Synthetic oligonucleotide
  Sense strand starting at position 3304 SEQ ID NO: 3110
uggcguucgcuuuaugaau

SEQ ID NO: 241685 - RNA, 19 nt, Artificial Sequence
  Description of Artificial Sequence: Synthetic oligonucleotide
  Antisense strand to SEQ ID NO: 241684
auucauaaagcgaacgcca

SEQ ID NO: 241686 - RNA, 19 nt, Artificial Sequence
  Description of Artificial Sequence: Synthetic oligonucleotide
  Sense strand starting at position 3306 SEQ ID NO: 3110
gcguucgcuuuaugaauua

SEQ ID NO: 241687 - RNA, 19 nt, Artificial Sequence
  Description of Artificial Sequence: Synthetic oligonucleotide
  Antisense strand to SEQ ID NO: 241686
uaauucauaaagcgaacgc

SEQ ID NO: 241688 - RNA, 19 nt, Artificial Sequence
  Description of Artificial Sequence: Synthetic oligonucleotide
  Sense strand starting at position 3419 SEQ ID NO: 3110
uuugucagaaguugaguuu

SEQ ID NO: 241689 - RNA, 19 nt, Artificial Sequence
  Description of Artificial Sequence: Synthetic oligonucleotide
  Antisense strand to SEQ ID NO: 241688
aaacucaacuucugacaaa

SEQ ID NO: 241690 - RNA, 19 nt, Artificial Sequence
  Description of Artificial Sequence: Synthetic oligonucleotide
  Sense strand starting at position 3470 SEQ ID NO: 3110
caaggcuuugcuuggguaa

SEQ ID NO: 241691 - RNA, 19 nt, Artificial Sequence
  Description of Artificial Sequence: Synthetic oligonucleotide
  Antisense strand to SEQ ID NO: 241690
uuacccaagcaaagccuug

SEQ ID NO: 241692 - RNA, 19 nt, Artificial Sequence
  Description of Artificial Sequence: Synthetic oligonucleotide
  Sense strand starting at position 3503 SEQ ID NO: 3110
gugggaaucuuaguucucu

SEQ ID NO: 241693 - RNA, 19 nt, Artificial Sequence
  Description of Artificial Sequence: Synthetic oligonucleotide
  Antisense strand to SEQ ID NO: 241692
agagaacuaagauucccac

SEQ ID NO: 241694 - RNA, 19 nt, Artificial Sequence
  Description of Artificial Sequence: Synthetic oligonucleotide
  Sense strand starting at position 3522 SEQ ID NO: 3110
guuuccuuuggugagggaa

SEQ ID NO: 241695 - RNA, 19 nt, Artificial Sequence
  Description of Artificial Sequence: Synthetic oligonucleotide
  Antisense strand to SEQ ID NO: 241694
uucccucaccaaaggaaac

SEQ ID NO: 241696 - RNA, 19 nt, Artificial Sequence
  Description of Artificial Sequence: Synthetic oligonucleotide
  Sense strand starting at position 3534 SEQ ID NO: 3110
gagggaaacuucuaugaag

SEQ ID NO: 241697 - RNA, 19 nt, Artificial Sequence
  Description of Artificial Sequence: Synthetic oligonucleotide
  Antisense strand to SEQ ID NO: 241696
cuucauagaaguuucccuc

SEQ ID NO: 241698 - RNA, 19 nt, Artificial Sequence
  Description of Artificial Sequence: Synthetic oligonucleotide
  Sense strand starting at position 3567 SEQ ID NO: 3110
gguugugguccggcucauu

SEQ ID NO: 241699 - RNA, 19 nt, Artificial Sequence
  Description of Artificial Sequence: Synthetic oligonucleotide
  Antisense strand to SEQ ID NO: 241698
aaugagccggaccacaacc

SEQ ID NO: 241700 - RNA, 19 nt, Artificial Sequence
  Description of Artificial Sequence: Synthetic oligonucleotide
  Sense strand starting at position 3570 SEQ ID NO: 3110
ugugguccggcucauuaaa

SEQ ID NO: 241701 - RNA, 19 nt, Artificial Sequence
  Description of Artificial Sequence: Synthetic oligonucleotide
  Antisense strand to SEQ ID NO: 241700
uuuaaugagccggaccaca

SEQ ID NO: 241702 - RNA, 19 nt, Artificial Sequence
  Description of Artificial Sequence: Synthetic oligonucleotide
  Sense strand starting at position 3572 SEQ ID NO: 3110
ugguccggcucauuaaaga

SEQ ID NO: 241703 - RNA, 19 nt, Artificial Sequence
  Description of Artificial Sequence: Synthetic oligonucleotide
  Antisense strand to SEQ ID NO: 241702
ucuuuaaugagccggacca

SEQ ID NO: 241704 - RNA, 19 nt, Artificial Sequence
  Description of Artificial Sequence: Synthetic oligonucleotide
  Sense strand starting at position 3761 SEQ ID NO: 3110
aaagacuugcccugaguga

SEQ ID NO: 241705 - RNA, 19 nt, Artificial Sequence
  Description of Artificial Sequence: Synthetic oligonucleotide
  Antisense strand to SEQ ID NO: 241704
ucacucagggcaagucuuu

SEQ ID NO: 241706 - RNA, 19 nt, Artificial Sequence
  Description of Artificial Sequence: Synthetic oligonucleotide
  Sense strand starting at position 3960 SEQ ID NO: 3110
gacugaacuuguggguaaa

SEQ ID NO: 241707 - RNA, 19 nt, Artificial Sequence
  Description of Artificial Sequence: Synthetic oligonucleotide
  Antisense strand to SEQ ID NO: 241706
uuuacccacaaguucaguc

SEQ ID NO: 241708 - RNA, 19 nt, Artificial Sequence
  Description of Artificial Sequence: Synthetic oligonucleotide
  Sense strand starting at position 3961 SEQ ID NO: 3110
acugaacuuguggguaaau

SEQ ID NO: 241709 - RNA, 19 nt, Artificial Sequence
  Description of Artificial Sequence: Synthetic oligonucleotide
  Antisense strand to SEQ ID NO: 241708
auuuacccacaaguucagu

SEQ ID NO: 241710 - RNA, 19 nt, Artificial Sequence
  Description of Artificial Sequence: Synthetic oligonucleotide
  Sense strand starting at position 3962 SEQ ID NO: 3110
cugaacuuguggguaaauu

SEQ ID NO: 241711 - RNA, 19 nt, Artificial Sequence
  Description of Artificial Sequence: Synthetic oligonucleotide
  Antisense strand to SEQ ID NO: 241710
aauuuacccacaaguucag

SEQ ID NO: 241712 - RNA, 19 nt, Artificial Sequence
  Description of Artificial Sequence: Synthetic oligonucleotide
  Sense strand starting at position 3963 SEQ ID NO: 3110
ugaacuuguggguaaauug

SEQ ID NO: 241713 - RNA, 19 nt, Artificial Sequence
  Description of Artificial Sequence: Synthetic oligonucleotide
  Antisense strand to SEQ ID NO: 241712
caauuuacccacaaguuca

SEQ ID NO: 241714 - RNA, 19 nt, Artificial Sequence
  Description of Artificial Sequence: Synthetic oligonucleotide
  Sense strand starting at position 3971 SEQ ID NO: 3110
uggguaaauuggguuucca

SEQ ID NO: 241715 - RNA, 19 nt, Artificial Sequence
  Description of Artificial Sequence: Synthetic oligonucleotide
  Antisense strand to SEQ ID NO: 241714
uggaaacccaauuuaccca

SEQ ID NO: 241716 - RNA, 19 nt, Artificial Sequence
  Description of Artificial Sequence: Synthetic oligonucleotide
  Sense strand starting at position 814 SEQ ID NO: 3111
cagcuagcggcuuggauaa

SEQ ID NO: 241717 - RNA, 19 nt, Artificial Sequence
  Description of Artificial Sequence: Synthetic oligonucleotide
  Antisense strand to SEQ ID NO: 241716
uuauccaagccgcuagcug

SEQ ID NO: 241718 - RNA, 19 nt, Artificial Sequence
  Description of Artificial Sequence: Synthetic oligonucleotide
  Sense strand starting at position 893 SEQ ID NO: 3111
gcaggaggcuccgguguau

SEQ ID NO: 241719 - RNA, 19 nt, Artificial Sequence
  Description of Artificial Sequence: Synthetic oligonucleotide
  Antisense strand to SEQ ID NO: 241718
auacaccggagccuccugc

SEQ ID NO: 241720 - RNA, 19 nt, Artificial Sequence
  Description of Artificial Sequence: Synthetic oligonucleotide
  Sense strand starting at position 915 SEQ ID NO: 3111
cucacacuggcuugaaauc

SEQ ID NO: 241721 - RNA, 19 nt, Artificial Sequence
  Description of Artificial Sequence: Synthetic oligonucleotide
  Antisense strand to SEQ ID NO: 241720
gauuucaagccagugugag

SEQ ID NO: 241722 - RNA, 19 nt, Artificial Sequence
  Description of Artificial Sequence: Synthetic oligonucleotide
  Sense strand starting at position 948 SEQ ID NO: 3111
ccuccaugguaucuagcaa

SEQ ID NO: 241723 - RNA, 19 nt, Artificial Sequence
  Description of Artificial Sequence: Synthetic oligonucleotide
  Antisense strand to SEQ ID NO: 241722
uugcuagauaccauggagg

SEQ ID NO: 241724 - RNA, 19 nt, Artificial Sequence
  Description of Artificial Sequence: Synthetic oligonucleotide
  Sense strand starting at position 1002 SEQ ID NO: 3111
cuauuaauguccuccucga

SEQ ID NO: 241725 - RNA, 19 nt, Artificial Sequence
  Description of Artificial Sequence: Synthetic oligonucleotide
  Antisense strand to SEQ ID NO: 241724
ucgaggaggacauuaauag

SEQ ID NO: 241726 - RNA, 19 nt, Artificial Sequence
  Description of Artificial Sequence: Synthetic oligonucleotide
  Sense strand starting at position 1079 SEQ ID NO: 3111
caggaaaucuuauaggaug

SEQ ID NO: 241727 - RNA, 19 nt, Artificial Sequence
  Description of Artificial Sequence: Synthetic oligonucleotide
  Antisense strand to SEQ ID NO: 241726
cauccuauaagauuuccug

SEQ ID NO: 241728 - RNA, 19 nt, Artificial Sequence
  Description of Artificial Sequence: Synthetic oligonucleotide
  Sense strand starting at position 1097 SEQ ID NO: 3111
guauaaaccucuucgaaug

SEQ ID NO: 241729 - RNA, 19 nt, Artificial Sequence
  Description of Artificial Sequence: Synthetic oligonucleotide
  Antisense strand to SEQ ID NO: 241728
cauucgaagagguuuauac

SEQ ID NO: 241730 - RNA, 19 nt, Artificial Sequence
  Description of Artificial Sequence: Synthetic oligonucleotide
  Sense strand starting at position 1105 SEQ ID NO: 3111
cucuucgaaugcuuauaaa

SEQ ID NO: 241731 - RNA, 19 nt, Artificial Sequence
  Description of Artificial Sequence: Synthetic oligonucleotide
  Antisense strand to SEQ ID NO: 241730
uuuauaagcauucgaagag

SEQ ID NO: 241732 - RNA, 19 nt, Artificial Sequence
  Description of Artificial Sequence: Synthetic oligonucleotide
  Sense strand starting at position 1108 SEQ ID NO: 3111
uucgaaugcuuauaaagua

SEQ ID NO: 241733 - RNA, 19 nt, Artificial Sequence
  Description of Artificial Sequence: Synthetic oligonucleotide
  Antisense strand to SEQ ID NO: 241732
uacuuuauaagcauucgaa

SEQ ID NO: 241734 - RNA, 19 nt, Artificial Sequence
  Description of Artificial Sequence: Synthetic oligonucleotide
  Sense strand starting at position 1985 SEQ ID NO: 3111
ucgucaaagucguucauga

SEQ ID NO: 241735 - RNA, 19 nt, Artificial Sequence
  Description of Artificial Sequence: Synthetic oligonucleotide
  Antisense strand to SEQ ID NO: 241734
ucaugaacgacuuugacga

SEQ ID NO: 241736 - RNA, 19 nt, Artificial Sequence
  Description of Artificial Sequence: Synthetic oligonucleotide
  Sense strand starting at position 2056 SEQ ID NO: 3111
ugagccaucgauugcacaa

SEQ ID NO: 241737 - RNA, 19 nt, Artificial Sequence
  Description of Artificial Sequence: Synthetic oligonucleotide
  Antisense strand to SEQ ID NO: 241736
uugugcaaucgauggcuca

SEQ ID NO: 241738 - RNA, 19 nt, Artificial Sequence
  Description of Artificial Sequence: Synthetic oligonucleotide
  Sense strand starting at position 2136 SEQ ID NO: 3111
uugauugauucugguggua

SEQ ID NO: 241739 - RNA, 19 nt, Artificial Sequence
  Description of Artificial Sequence: Synthetic oligonucleotide
  Antisense strand to SEQ ID NO: 241738
uaccaccagaaucaaucaa

SEQ ID NO: 241740 - RNA, 19 nt, Artificial Sequence
  Description of Artificial Sequence: Synthetic oligonucleotide
  Sense strand starting at position 2138 SEQ ID NO: 3111
gauugauucuggugguaau

SEQ ID NO: 241741 - RNA, 19 nt, Artificial Sequence
  Description of Artificial Sequence: Synthetic oligonucleotide
  Antisense strand to SEQ ID NO: 241740
auuaccaccagaaucaauc

SEQ ID NO: 241742 - RNA, 19 nt, Artificial Sequence
  Description of Artificial Sequence: Synthetic oligonucleotide
  Sense strand starting at position 2139 SEQ ID NO: 3111
auugauucuggugguaauu

SEQ ID NO: 241743 - RNA, 19 nt, Artificial Sequence
  Description of Artificial Sequence: Synthetic oligonucleotide
  Antisense strand to SEQ ID NO: 241742
aauuaccaccagaaucaau

SEQ ID NO: 241744 - RNA, 19 nt, Artificial Sequence
  Description of Artificial Sequence: Synthetic oligonucleotide
  Sense strand starting at position 2141 SEQ ID NO: 3111
ugauucuggugguaauuau

SEQ ID NO: 241745 - RNA, 19 nt, Artificial Sequence
  Description of Artificial Sequence: Synthetic oligonucleotide
  Antisense strand to SEQ ID NO: 241744
auaauuaccaccagaauca

SEQ ID NO: 241746 - RNA, 19 nt, Artificial Sequence
  Description of Artificial Sequence: Synthetic oligonucleotide
  Sense strand starting at position 2150 SEQ ID NO: 3111
ugguaauuaugucacguga

SEQ ID NO: 241747 - RNA, 19 nt, Artificial Sequence
  Description of Artificial Sequence: Synthetic oligonucleotide
  Antisense strand to SEQ ID NO: 241746
ucacgugacauaauuacca

SEQ ID NO: 241748 - RNA, 19 nt, Artificial Sequence
  Description of Artificial Sequence: Synthetic oligonucleotide
  Sense strand starting at position 2152 SEQ ID NO: 3111
guaauuaugucacgugacg

SEQ ID NO: 241749 - RNA, 19 nt, Artificial Sequence
  Description of Artificial Sequence: Synthetic oligonucleotide
  Antisense strand to SEQ ID NO: 241748
cgucacgugacauaauuac

SEQ ID NO: 241750 - RNA, 19 nt, Artificial Sequence
  Description of Artificial Sequence: Synthetic oligonucleotide
  Sense strand starting at position 2177 SEQ ID NO: 3111
agagaaauguccuuauauc

SEQ ID NO: 241751 - RNA, 19 nt, Artificial Sequence
  Description of Artificial Sequence: Synthetic oligonucleotide
  Antisense strand to SEQ ID NO: 241750
gauauaaggacauuucucu

SEQ ID NO: 241752 - RNA, 19 nt, Artificial Sequence
  Description of Artificial Sequence: Synthetic oligonucleotide
  Sense strand starting at position 2667 SEQ ID NO: 3111
gggaguaauuucgccacuc

SEQ ID NO: 241753 - RNA, 19 nt, Artificial Sequence
  Description of Artificial Sequence: Synthetic oligonucleotide
  Antisense strand to SEQ ID NO: 241752
gaguggcgaaauuacuccc

SEQ ID NO: 241754 - RNA, 19 nt, Artificial Sequence
  Description of Artificial Sequence: Synthetic oligonucleotide
  Sense strand starting at position 2668 SEQ ID NO: 3111
ggaguaauuucgccacucu

SEQ ID NO: 241755 - RNA, 19 nt, Artificial Sequence
  Description of Artificial Sequence: Synthetic oligonucleotide
  Antisense strand to SEQ ID NO: 241754
agaguggcgaaauuacucc

SEQ ID NO: 241756 - RNA, 19 nt, Artificial Sequence
  Description of Artificial Sequence: Synthetic oligonucleotide
  Sense strand starting at position 2740 SEQ ID NO: 3111
uggagugacuuggcucuuu

SEQ ID NO: 241757 - RNA, 19 nt, Artificial Sequence
  Description of Artificial Sequence: Synthetic oligonucleotide
  Antisense strand to SEQ ID NO: 241756
aaagagccaagucacucca

SEQ ID NO: 241758 - RNA, 19 nt, Artificial Sequence
  Description of Artificial Sequence: Synthetic oligonucleotide
  Sense strand starting at position 2779 SEQ ID NO: 3111
gcgagugcuggccucggaa

SEQ ID NO: 241759 - RNA, 19 nt, Artificial Sequence
  Description of Artificial Sequence: Synthetic oligonucleotide
  Antisense strand to SEQ ID NO: 241758
uuccgaggccagcacucgc

SEQ ID NO: 241760 - RNA, 19 nt, Artificial Sequence
  Description of Artificial Sequence: Synthetic oligonucleotide
  Sense strand starting at position 3057 SEQ ID NO: 3111
uccucuaagcuguguguca

SEQ ID NO: 241761 - RNA, 19 nt, Artificial Sequence
  Description of Artificial Sequence: Synthetic oligonucleotide
  Antisense strand to SEQ ID NO: 241760
ugacacacagcuuagagga

SEQ ID NO: 241762 - RNA, 19 nt, Artificial Sequence
  Description of Artificial Sequence: Synthetic oligonucleotide
  Sense strand starting at position 3307 SEQ ID NO: 3111
ggguguccgccuuauaccu

SEQ ID NO: 241763 - RNA, 19 nt, Artificial Sequence
  Description of Artificial Sequence: Synthetic oligonucleotide
  Antisense strand to SEQ ID NO: 241762
agguauaaggcggacaccc

SEQ ID NO: 241764 - RNA, 19 nt, Artificial Sequence
  Description of Artificial Sequence: Synthetic oligonucleotide
  Sense strand starting at position 3434 SEQ ID NO: 3111
caagauagguugucucucu

SEQ ID NO: 241765 - RNA, 19 nt, Artificial Sequence
  Description of Artificial Sequence: Synthetic oligonucleotide
  Antisense strand to SEQ ID NO: 241764
agagagacaaccuaucuug

SEQ ID NO: 241766 - RNA, 19 nt, Artificial Sequence
  Description of Artificial Sequence: Synthetic oligonucleotide
  Sense strand starting at position 3435 SEQ ID NO: 3111
aagauagguugucucucua

SEQ ID NO: 241767 - RNA, 19 nt, Artificial Sequence
  Description of Artificial Sequence: Synthetic oligonucleotide
  Antisense strand to SEQ ID NO: 241766
uagagagacaaccuaucuu

SEQ ID NO: 241768 - RNA, 19 nt, Artificial Sequence
  Description of Artificial Sequence: Synthetic oligonucleotide
  Sense strand starting at position 3870 SEQ ID NO: 3111
ggcggguggucugagcuaa

SEQ ID NO: 241769 - RNA, 19 nt, Artificial Sequence
  Description of Artificial Sequence: Synthetic oligonucleotide
  Antisense strand to SEQ ID NO: 241768
uuagcucagaccacccgcc

SEQ ID NO: 241770 - RNA, 19 nt, Artificial Sequence
  Description of Artificial Sequence: Synthetic oligonucleotide
  Sense strand starting at position 3871 SEQ ID NO: 3111
gcggguggucugagcuaau

SEQ ID NO: 241771 - RNA, 19 nt, Artificial Sequence
  Description of Artificial Sequence: Synthetic oligonucleotide
  Antisense strand to SEQ ID NO: 241770
auuagcucagaccacccgc

SEQ ID NO: 241772 - RNA, 19 nt, Artificial Sequence
  Description of Artificial Sequence: Synthetic oligonucleotide
  Sense strand starting at position 3874 SEQ ID NO: 3111
gguggucugagcuaauauc

SEQ ID NO: 241773 - RNA, 19 nt, Artificial Sequence
  Description of Artificial Sequence: Synthetic oligonucleotide
  Antisense strand to SEQ ID NO: 241772
gauauuagcucagaccacc

SEQ ID NO: 241774 - RNA, 19 nt, Artificial Sequence
  Description of Artificial Sequence: Synthetic oligonucleotide
  Sense strand starting at position 265 SEQ ID NO: 3112
gccagucuugucuggagau

SEQ ID NO: 241775 - RNA, 19 nt, Artificial Sequence
  Description of Artificial Sequence: Synthetic oligonucleotide
  Antisense strand to SEQ ID NO: 241774
aucuccagacaagacuggc

SEQ ID NO: 241776 - RNA, 19 nt, Artificial Sequence
  Description of Artificial Sequence: Synthetic oligonucleotide
  Sense strand starting at position 389 SEQ ID NO: 3112
ucgagauaucuccaaguuu

SEQ ID NO: 241777 - RNA, 19 nt, Artificial Sequence
  Description of Artificial Sequence: Synthetic oligonucleotide
  Antisense strand to SEQ ID NO: 241776
aaacuuggagauaucucga

SEQ ID NO: 241778 - RNA, 19 nt, Artificial Sequence
  Description of Artificial Sequence: Synthetic oligonucleotide
  Sense strand starting at position 444 SEQ ID NO: 3112
ccucccaaagucugaagau

SEQ ID NO: 241779 - RNA, 19 nt, Artificial Sequence
  Description of Artificial Sequence: Synthetic oligonucleotide
  Antisense strand to SEQ ID NO: 241778
aucuucagacuuugggagg

SEQ ID NO: 241780 - RNA, 19 nt, Artificial Sequence
  Description of Artificial Sequence: Synthetic oligonucleotide
  Sense strand starting at position 457 SEQ ID NO: 3112
gaagaucuaguguggcuuu

SEQ ID NO: 241781 - RNA, 19 nt, Artificial Sequence
  Description of Artificial Sequence: Synthetic oligonucleotide
  Antisense strand to SEQ ID NO: 241780
aaagccacacuagaucuuc

SEQ ID NO: 241782 - RNA, 19 nt, Artificial Sequence
  Description of Artificial Sequence: Synthetic oligonucleotide
  Sense strand starting at position 530 SEQ ID NO: 3112
uuccuuucuccagagugaa

SEQ ID NO: 241783 - RNA, 19 nt, Artificial Sequence
  Description of Artificial Sequence: Synthetic oligonucleotide
  Antisense strand to SEQ ID NO: 241782
uucacucuggagaaaggaa

SEQ ID NO: 241784 - RNA, 19 nt, Artificial Sequence
  Description of Artificial Sequence: Synthetic oligonucleotide
  Sense strand starting at position 533 SEQ ID NO: 3112
cuuucuccagagugaagau

SEQ ID NO: 241785 - RNA, 19 nt, Artificial Sequence
  Description of Artificial Sequence: Synthetic oligonucleotide
  Antisense strand to SEQ ID NO: 241784
aucuucacucuggagaaag

SEQ ID NO: 241786 - RNA, 19 nt, Artificial Sequence
  Description of Artificial Sequence: Synthetic oligonucleotide
  Sense strand starting at position 577 SEQ ID NO: 3112
gcugcagagaccuaauugu

SEQ ID NO: 241787 - RNA, 19 nt, Artificial Sequence
  Description of Artificial Sequence: Synthetic oligonucleotide
  Antisense strand to SEQ ID NO: 241786
acaauuaggucucugcagc

SEQ ID NO: 241788 - RNA, 19 nt, Artificial Sequence
  Description of Artificial Sequence: Synthetic oligonucleotide
  Sense strand starting at position 586 SEQ ID NO: 3112
accuaauuguacccacagu

SEQ ID NO: 241789 - RNA, 19 nt, Artificial Sequence
  Description of Artificial Sequence: Synthetic oligonucleotide
  Antisense strand to SEQ ID NO: 241788
acuguggguacaauuaggu

SEQ ID NO: 241790 - RNA, 19 nt, Artificial Sequence
  Description of Artificial Sequence: Synthetic oligonucleotide
  Sense strand starting at position 643 SEQ ID NO: 3112
uaacuaggcgacugcuaua

SEQ ID NO: 241791 - RNA, 19 nt, Artificial Sequence
  Description of Artificial Sequence: Synthetic oligonucleotide
  Antisense strand to SEQ ID NO: 241790
uauagcagucgccuaguua

SEQ ID NO: 241792 - RNA, 19 nt, Artificial Sequence
  Description of Artificial Sequence: Synthetic oligonucleotide
  Sense strand starting at position 694 SEQ ID NO: 3112
gaacgaauuggguggaaac

SEQ ID NO: 241793 - RNA, 19 nt, Artificial Sequence
  Description of Artificial Sequence: Synthetic oligonucleotide
  Antisense strand to SEQ ID NO: 241792
guuuccacccaauucguuc

SEQ ID NO: 241794 - RNA, 19 nt, Artificial Sequence
  Description of Artificial Sequence: Synthetic oligonucleotide
  Sense strand starting at position 892 SEQ ID NO: 3112
acuggccuggucuguaaau

SEQ ID NO: 241795 - RNA, 19 nt, Artificial Sequence
  Description of Artificial Sequence: Synthetic oligonucleotide
  Antisense strand to SEQ ID NO: 241794
auuuacagaccaggccagu

SEQ ID NO: 241796 - RNA, 19 nt, Artificial Sequence
  Description of Artificial Sequence: Synthetic oligonucleotide
  Sense strand starting at position 894 SEQ ID NO: 3112
uggccuggucuguaaaucu

SEQ ID NO: 241797 - RNA, 19 nt, Artificial Sequence
  Description of Artificial Sequence: Synthetic oligonucleotide
  Antisense strand to SEQ ID NO: 241796
agauuuacagaccaggcca

SEQ ID NO: 241798 - RNA, 19 nt, Artificial Sequence
  Description of Artificial Sequence: Synthetic oligonucleotide
  Sense strand starting at position 2027 SEQ ID NO: 3112
ucgcaacaguauuuaguua

SEQ ID NO: 241799 - RNA, 19 nt, Artificial Sequence
  Description of Artificial Sequence: Synthetic oligonucleotide
  Antisense strand to SEQ ID NO: 241798
uaacuaaauacuguugcga

SEQ ID NO: 241800 - RNA, 19 nt, Artificial Sequence
  Description of Artificial Sequence: Synthetic oligonucleotide
  Sense strand starting at position 2038 SEQ ID NO: 3112
uuuaguuacaaccgggaau

SEQ ID NO: 241801 - RNA, 19 nt, Artificial Sequence
  Description of Artificial Sequence: Synthetic oligonucleotide
  Antisense strand to SEQ ID NO: 241800
auucccgguuguaacuaaa

SEQ ID NO: 241802 - RNA, 19 nt, Artificial Sequence
  Description of Artificial Sequence: Synthetic oligonucleotide
  Sense strand starting at position 2039 SEQ ID NO: 3112
uuaguuacaaccgggaaua

SEQ ID NO: 241803 - RNA, 19 nt, Artificial Sequence
  Description of Artificial Sequence: Synthetic oligonucleotide
  Antisense strand to SEQ ID NO: 241802
uauucccgguuguaacuaa

SEQ ID NO: 241804 - RNA, 19 nt, Artificial Sequence
  Description of Artificial Sequence: Synthetic oligonucleotide
  Sense strand starting at position 2040 SEQ ID NO: 3112
uaguuacaaccgggaauaa

SEQ ID NO: 241805 - RNA, 19 nt, Artificial Sequence
  Description of Artificial Sequence: Synthetic oligonucleotide
  Antisense strand to SEQ ID NO: 241804
uuauucccgguuguaacua

SEQ ID NO: 241806 - RNA, 19 nt, Artificial Sequence
  Description of Artificial Sequence: Synthetic oligonucleotide
  Sense strand starting at position 2170 SEQ ID NO: 3112
ugauaacacccgcaauguu

SEQ ID NO: 241807 - RNA, 19 nt, Artificial Sequence
  Description of Artificial Sequence: Synthetic oligonucleotide
  Antisense strand to SEQ ID NO: 241806
aacauugcggguguuauca

SEQ ID NO: 241808 - RNA, 19 nt, Artificial Sequence
  Description of Artificial Sequence: Synthetic oligonucleotide
  Sense strand starting at position 2179 SEQ ID NO: 3112
ccgcaauguucgauggcga

SEQ ID NO: 241809 - RNA, 19 nt, Artificial Sequence
  Description of Artificial Sequence: Synthetic oligonucleotide
  Antisense strand to SEQ ID NO: 241808
ucgccaucgaacauugcgg

SEQ ID NO: 241810 - RNA, 19 nt, Artificial Sequence
  Description of Artificial Sequence: Synthetic oligonucleotide
  Sense strand starting at position 2322 SEQ ID NO: 3112
ggacucuucuuggucguga

SEQ ID NO: 241811 - RNA, 19 nt, Artificial Sequence
  Description of Artificial Sequence: Synthetic oligonucleotide
  Antisense strand to SEQ ID NO: 241810
ucacgaccaagaagagucc

SEQ ID NO: 241812 - RNA, 19 nt, Artificial Sequence
  Description of Artificial Sequence: Synthetic oligonucleotide
  Sense strand starting at position 2334 SEQ ID NO: 3112
gucgugauuggcuuugcga

SEQ ID NO: 241813 - RNA, 19 nt, Artificial Sequence
  Description of Artificial Sequence: Synthetic oligonucleotide
  Antisense strand to SEQ ID NO: 241812
ucgcaaagccaaucacgac

SEQ ID NO: 241814 - RNA, 19 nt, Artificial Sequence
  Description of Artificial Sequence: Synthetic oligonucleotide
  Sense strand starting at position 2335 SEQ ID NO: 3112
ucgugauuggcuuugcgau

SEQ ID NO: 241815 - RNA, 19 nt, Artificial Sequence
  Description of Artificial Sequence: Synthetic oligonucleotide
  Antisense strand to SEQ ID NO: 241814
aucgcaaagccaaucacga

SEQ ID NO: 241816 - RNA, 19 nt, Artificial Sequence
  Description of Artificial Sequence: Synthetic oligonucleotide
  Sense strand starting at position 2341 SEQ ID NO: 3112
uuggcuuugcgauucguuu

SEQ ID NO: 241817 - RNA, 19 nt, Artificial Sequence
  Description of Artificial Sequence: Synthetic oligonucleotide
  Antisense strand to SEQ ID NO: 241816
aaacgaaucgcaaagccaa

SEQ ID NO: 241818 - RNA, 19 nt, Artificial Sequence
  Description of Artificial Sequence: Synthetic oligonucleotide
  Sense strand starting at position 2385 SEQ ID NO: 3112
gcuucuaccggcuuuaagu

SEQ ID NO: 241819 - RNA, 19 nt, Artificial Sequence
  Description of Artificial Sequence: Synthetic oligonucleotide
  Antisense strand to SEQ ID NO: 241818
acuuaaagccgguagaagc

SEQ ID NO: 241820 - RNA, 19 nt, Artificial Sequence
  Description of Artificial Sequence: Synthetic oligonucleotide
  Sense strand starting at position 2483 SEQ ID NO: 3112
gucccuuggccugagcaau

SEQ ID NO: 241821 - RNA, 19 nt, Artificial Sequence
  Description of Artificial Sequence: Synthetic oligonucleotide
  Antisense strand to SEQ ID NO: 241820
auugcucaggccaagggac

SEQ ID NO: 241822 - RNA, 19 nt, Artificial Sequence
  Description of Artificial Sequence: Synthetic oligonucleotide
  Sense strand starting at position 2527 SEQ ID NO: 3112
cagagaggguuucuccaga

SEQ ID NO: 241823 - RNA, 19 nt, Artificial Sequence
  Description of Artificial Sequence: Synthetic oligonucleotide
  Antisense strand to SEQ ID NO: 241822
ucuggagaaacccucucug

SEQ ID NO: 241824 - RNA, 19 nt, Artificial Sequence
  Description of Artificial Sequence: Synthetic oligonucleotide
  Sense strand starting at position 2544 SEQ ID NO: 3112
gagaccucugccugaggau

SEQ ID NO: 241825 - RNA, 19 nt, Artificial Sequence
  Description of Artificial Sequence: Synthetic oligonucleotide
  Antisense strand to SEQ ID NO: 241824
auccucaggcagaggucuc

SEQ ID NO: 241826 - RNA, 19 nt, Artificial Sequence
  Description of Artificial Sequence: Synthetic oligonucleotide
  Sense strand starting at position 2666 SEQ ID NO: 3112
cacuauuucugguuugugu

SEQ ID NO: 241827 - RNA, 19 nt, Artificial Sequence
  Description of Artificial Sequence: Synthetic oligonucleotide
  Antisense strand to SEQ ID NO: 241826
acacaaaccagaaauagug

SEQ ID NO: 241828 - RNA, 19 nt, Artificial Sequence
  Description of Artificial Sequence: Synthetic oligonucleotide
  Sense strand starting at position 2691 SEQ ID NO: 3112
ggcuaagaacucugaucau

SEQ ID NO: 241829 - RNA, 19 nt, Artificial Sequence
  Description of Artificial Sequence: Synthetic oligonucleotide
  Antisense strand to SEQ ID NO: 241828
augaucagaguucuuagcc

SEQ ID NO: 241830 - RNA, 19 nt, Artificial Sequence
  Description of Artificial Sequence: Synthetic oligonucleotide
  Sense strand starting at position 2697 SEQ ID NO: 3112
gaacucugaucauagggaa

SEQ ID NO: 241831 - RNA, 19 nt, Artificial Sequence
  Description of Artificial Sequence: Synthetic oligonucleotide
  Antisense strand to SEQ ID NO: 241830
uucccuaugaucagaguuc

SEQ ID NO: 241832 - RNA, 19 nt, Artificial Sequence
  Description of Artificial Sequence: Synthetic oligonucleotide
  Sense strand starting at position 2735 SEQ ID NO: 3112
gagaauguccgccagggaa

SEQ ID NO: 241833 - RNA, 19 nt, Artificial Sequence
  Description of Artificial Sequence: Synthetic oligonucleotide
  Antisense strand to SEQ ID NO: 241832
uucccuggcggacauucuc

SEQ ID NO: 241834 - RNA, 19 nt, Artificial Sequence
  Description of Artificial Sequence: Synthetic oligonucleotide
  Sense strand starting at position 3016 SEQ ID NO: 3112
aguucacgggucugacaaa

SEQ ID NO: 241835 - RNA, 19 nt, Artificial Sequence
  Description of Artificial Sequence: Synthetic oligonucleotide
  Antisense strand to SEQ ID NO: 241834
uuugucagacccgugaacu

SEQ ID NO: 241836 - RNA, 19 nt, Artificial Sequence
  Description of Artificial Sequence: Synthetic oligonucleotide
  Sense strand starting at position 3302 SEQ ID NO: 3112
ccacuuuauugugugaguu

SEQ ID NO: 241837 - RNA, 19 nt, Artificial Sequence
  Description of Artificial Sequence: Synthetic oligonucleotide
  Antisense strand to SEQ ID NO: 241836
aacucacacaauaaagugg

SEQ ID NO: 241838 - RNA, 19 nt, Artificial Sequence
  Description of Artificial Sequence: Synthetic oligonucleotide
  Sense strand starting at position 3303 SEQ ID NO: 3112
cacuuuauugugugaguua

SEQ ID NO: 241839 - RNA, 19 nt, Artificial Sequence
  Description of Artificial Sequence: Synthetic oligonucleotide
  Antisense strand to SEQ ID NO: 241838
uaacucacacaauaaagug

SEQ ID NO: 241840 - RNA, 19 nt, Artificial Sequence
  Description of Artificial Sequence: Synthetic oligonucleotide
  Sense strand starting at position 3314 SEQ ID NO: 3112
gugaguuauggcgaccaau

SEQ ID NO: 241841 - RNA, 19 nt, Artificial Sequence
  Description of Artificial Sequence: Synthetic oligonucleotide
  Antisense strand to SEQ ID NO: 241840
auuggucgccauaacucac

SEQ ID NO: 241842 - RNA, 19 nt, Artificial Sequence
  Description of Artificial Sequence: Synthetic oligonucleotide
  Sense strand starting at position 3440 SEQ ID NO: 3112
cagagaguuuccuuaggag

SEQ ID NO: 241843 - RNA, 19 nt, Artificial Sequence
  Description of Artificial Sequence: Synthetic oligonucleotide
  Antisense strand to SEQ ID NO: 241842
cuccuaaggaaacucucug

SEQ ID NO: 241844 - RNA, 19 nt, Artificial Sequence
  Description of Artificial Sequence: Synthetic oligonucleotide
  Sense strand starting at position 3616 SEQ ID NO: 3112
uucguuacucccgaaagcu

SEQ ID NO: 241845 - RNA, 19 nt, Artificial Sequence
  Description of Artificial Sequence: Synthetic oligonucleotide
  Antisense strand to SEQ ID NO: 241844
agcuuucgggaguaacgaa

SEQ ID NO: 241846 - RNA, 19 nt, Artificial Sequence
  Description of Artificial Sequence: Synthetic oligonucleotide
  Sense strand starting at position 3680 SEQ ID NO: 3112
gacgauuccucguuauuuc

SEQ ID NO: 241847 - RNA, 19 nt, Artificial Sequence
  Description of Artificial Sequence: Synthetic oligonucleotide
  Antisense strand to SEQ ID NO: 241846
gaaauaacgaggaaucguc

SEQ ID NO: 241848 - RNA, 19 nt, Artificial Sequence
  Description of Artificial Sequence: Synthetic oligonucleotide
  Sense strand starting at position 3819 SEQ ID NO: 3112
cuccauugcuccuuggaca

SEQ ID NO: 241849 - RNA, 19 nt, Artificial Sequence
  Description of Artificial Sequence: Synthetic oligonucleotide
  Antisense strand to SEQ ID NO: 241848
uguccaaggagcaauggag

SEQ ID NO: 241850 - RNA, 19 nt, Artificial Sequence
  Description of Artificial Sequence: Synthetic oligonucleotide
  Sense strand starting at position 3856 SEQ ID NO: 3112
ccggguuuaugacuuucga

SEQ ID NO: 241851 - RNA, 19 nt, Artificial Sequence
  Description of Artificial Sequence: Synthetic oligonucleotide
  Antisense strand to SEQ ID NO: 241850
ucgaaagucauaaacccgg

SEQ ID NO: 241852 - RNA, 19 nt, Artificial Sequence
  Description of Artificial Sequence: Synthetic oligonucleotide
  Sense strand starting at position 3957 SEQ ID NO: 3112
uuggcuggugauuaagaga

SEQ ID NO: 241853 - RNA, 19 nt, Artificial Sequence
  Description of Artificial Sequence: Synthetic oligonucleotide
  Antisense strand to SEQ ID NO: 241852
ucucuuaaucaccagccaa

SEQ ID NO: 241854 - RNA, 19 nt, Artificial Sequence
  Description of Artificial Sequence: Synthetic oligonucleotide
  Sense strand starting at position 455 SEQ ID NO: 3113
caugcuguuuggucuuuau

SEQ ID NO: 241855 - RNA, 19 nt, Artificial Sequence
  Description of Artificial Sequence: Synthetic oligonucleotide
  Antisense strand to SEQ ID NO: 241854
auaaagaccaaacagcaug

SEQ ID NO: 241856 - RNA, 19 nt, Artificial Sequence
  Description of Artificial Sequence: Synthetic oligonucleotide
  Sense strand starting at position 458 SEQ ID NO: 3113
gcuguuuggucuuuauuau

SEQ ID NO: 241857 - RNA, 19 nt, Artificial Sequence
  Description of Artificial Sequence: Synthetic oligonucleotide
  Antisense strand to SEQ ID NO: 241856
auaauaaagaccaaacagc

SEQ ID NO: 241858 - RNA, 19 nt, Artificial Sequence
  Description of Artificial Sequence: Synthetic oligonucleotide
  Sense strand starting at position 459 SEQ ID NO: 3113
cuguuuggucuuuauuaug

SEQ ID NO: 241859 - RNA, 19 nt, Artificial Sequence
  Description of Artificial Sequence: Synthetic oligonucleotide
  Antisense strand to SEQ ID NO: 241858
cauaauaaagaccaaacag

SEQ ID NO: 241860 - RNA, 19 nt, Artificial Sequence
  Description of Artificial Sequence: Synthetic oligonucleotide
  Sense strand starting at position 465 SEQ ID NO: 3113
ggucuuuauuauguacaua

SEQ ID NO: 241861 - RNA, 19 nt, Artificial Sequence
  Description of Artificial Sequence: Synthetic oligonucleotide
  Antisense strand to SEQ ID NO: 241860
uauguacauaauaaagacc

SEQ ID NO: 241862 - RNA, 19 nt, Artificial Sequence
  Description of Artificial Sequence: Synthetic oligonucleotide
  Sense strand starting at position 561 SEQ ID NO: 3113
uucucaaaccggcaucuua

SEQ ID NO: 241863 - RNA, 19 nt, Artificial Sequence
  Description of Artificial Sequence: Synthetic oligonucleotide
  Antisense strand to SEQ ID NO: 241862
uaagaugccgguuugagaa

SEQ ID NO: 241864 - RNA, 19 nt, Artificial Sequence
  Description of Artificial Sequence: Synthetic oligonucleotide
  Sense strand starting at position 603 SEQ ID NO: 3113
gguuauugggcacguucau

SEQ ID NO: 241865 - RNA, 19 nt, Artificial Sequence
  Description of Artificial Sequence: Synthetic oligonucleotide
  Antisense strand to SEQ ID NO: 241864
augaacgugcccaauaacc

SEQ ID NO: 241866 - RNA, 19 nt, Artificial Sequence
  Description of Artificial Sequence: Synthetic oligonucleotide
  Sense strand starting at position 621 SEQ ID NO: 3113
ugaggacaguuucugcaaa

SEQ ID NO: 241867 - RNA, 19 nt, Artificial Sequence
  Description of Artificial Sequence: Synthetic oligonucleotide
  Antisense strand to SEQ ID NO: 241866
uuugcagaaacuguccuca

SEQ ID NO: 241868 - RNA, 19 nt, Artificial Sequence
  Description of Artificial Sequence: Synthetic oligonucleotide
  Sense strand starting at position 623 SEQ ID NO: 3113
aggacaguuucugcaaaug

SEQ ID NO: 241869 - RNA, 19 nt, Artificial Sequence
  Description of Artificial Sequence: Synthetic oligonucleotide
  Antisense strand to SEQ ID NO: 241868
cauuugcagaaacuguccu

SEQ ID NO: 241870 - RNA, 19 nt, Artificial Sequence
  Description of Artificial Sequence: Synthetic oligonucleotide
  Sense strand starting at position 635 SEQ ID NO: 3113
gcaaaugucgguuguauaa

SEQ ID NO: 241871 - RNA, 19 nt, Artificial Sequence
  Description of Artificial Sequence: Synthetic oligonucleotide
  Antisense strand to SEQ ID NO: 241870
uuauacaaccgacauuugc

SEQ ID NO: 241872 - RNA, 19 nt, Artificial Sequence
  Description of Artificial Sequence: Synthetic oligonucleotide
  Sense strand starting at position 729 SEQ ID NO: 3113
aggaguucgugagcuugau

SEQ ID NO: 241873 - RNA, 19 nt, Artificial Sequence
  Description of Artificial Sequence: Synthetic oligonucleotide
  Antisense strand to SEQ ID NO: 241872
aucaagcucacgaacuccu

SEQ ID NO: 241874 - RNA, 19 nt, Artificial Sequence
  Description of Artificial Sequence: Synthetic oligonucleotide
  Sense strand starting at position 733 SEQ ID NO: 3113
guucgugagcuugaucuaa

SEQ ID NO: 241875 - RNA, 19 nt, Artificial Sequence
  Description of Artificial Sequence: Synthetic oligonucleotide
  Antisense strand to SEQ ID NO: 241874
uuagaucaagcucacgaac

SEQ ID NO: 241876 - RNA, 19 nt, Artificial Sequence
  Description of Artificial Sequence: Synthetic oligonucleotide
  Sense strand starting at position 735 SEQ ID NO: 3113
ucgugagcuugaucuaaca

SEQ ID NO: 241877 - RNA, 19 nt, Artificial Sequence
  Description of Artificial Sequence: Synthetic oligonucleotide
  Antisense strand to SEQ ID NO: 241876
uguuagaucaagcucacga

SEQ ID NO: 241878 - RNA, 19 nt, Artificial Sequence
  Description of Artificial Sequence: Synthetic oligonucleotide
  Sense strand starting at position 737 SEQ ID NO: 3113
gugagcuugaucuaacaag

SEQ ID NO: 241879 - RNA, 19 nt, Artificial Sequence
  Description of Artificial Sequence: Synthetic oligonucleotide
  Antisense strand to SEQ ID NO: 241878
cuuguuagaucaagcucac

SEQ ID NO: 241880 - RNA, 19 nt, Artificial Sequence
  Description of Artificial Sequence: Synthetic oligonucleotide
  Sense strand starting at position 809 SEQ ID NO: 3113
cugucagguuucuuaggaa

SEQ ID NO: 241881 - RNA, 19 nt, Artificial Sequence
  Description of Artificial Sequence: Synthetic oligonucleotide
  Antisense strand to SEQ ID NO: 241880
uuccuaagaaaccugacag

SEQ ID NO: 241882 - RNA, 19 nt, Artificial Sequence
  Description of Artificial Sequence: Synthetic oligonucleotide
  Sense strand starting at position 880 SEQ ID NO: 3113
cucucaacuuuaggagaaa

SEQ ID NO: 241883 - RNA, 19 nt, Artificial Sequence
  Description of Artificial Sequence: Synthetic oligonucleotide
  Antisense strand to SEQ ID NO: 241882
uuucuccuaaaguugagag

SEQ ID NO: 241884 - RNA, 19 nt, Artificial Sequence
  Description of Artificial Sequence: Synthetic oligonucleotide
  Sense strand starting at position 936 SEQ ID NO: 3113
gacggaggcaguugaaauc

SEQ ID NO: 241885 - RNA, 19 nt, Artificial Sequence
  Description of Artificial Sequence: Synthetic oligonucleotide
  Antisense strand to SEQ ID NO: 241884
gauuucaacugccuccguc

SEQ ID NO: 241886 - RNA, 19 nt, Artificial Sequence
  Description of Artificial Sequence: Synthetic oligonucleotide
  Sense strand starting at position 2507 SEQ ID NO: 3113
cagagaugaucagaaugau

SEQ ID NO: 241887 - RNA, 19 nt, Artificial Sequence
  Description of Artificial Sequence: Synthetic oligonucleotide
  Antisense strand to SEQ ID NO: 241886
aucauucugaucaucucug

SEQ ID NO: 241888 - RNA, 19 nt, Artificial Sequence
  Description of Artificial Sequence: Synthetic oligonucleotide
  Sense strand starting at position 2513 SEQ ID NO: 3113
ugaucagaaugaugugaaa

SEQ ID NO: 241889 - RNA, 19 nt, Artificial Sequence
  Description of Artificial Sequence: Synthetic oligonucleotide
  Antisense strand to SEQ ID NO: 241888
uuucacaucauucugauca

SEQ ID NO: 241890 - RNA, 19 nt, Artificial Sequence
  Description of Artificial Sequence: Synthetic oligonucleotide
  Sense strand starting at position 2555 SEQ ID NO: 3113
ugcugaaucccucaguuag

SEQ ID NO: 241891 - RNA, 19 nt, Artificial Sequence
  Description of Artificial Sequence: Synthetic oligonucleotide
  Antisense strand to SEQ ID NO: 241890
cuaacugagggauucagca

SEQ ID NO: 241892 - RNA, 19 nt, Artificial Sequence
  Description of Artificial Sequence: Synthetic oligonucleotide
  Sense strand starting at position 2587 SEQ ID NO: 3113
cccaaauccgagugagcua

SEQ ID NO: 241893 - RNA, 19 nt, Artificial Sequence
  Description of Artificial Sequence: Synthetic oligonucleotide
  Antisense strand to SEQ ID NO: 241892
uagcucacucggauuuggg

SEQ ID NO: 241894 - RNA, 19 nt, Artificial Sequence
  Description of Artificial Sequence: Synthetic oligonucleotide
  Sense strand starting at position 2588 SEQ ID NO: 3113
ccaaauccgagugagcuaa

SEQ ID NO: 241895 - RNA, 19 nt, Artificial Sequence
  Description of Artificial Sequence: Synthetic oligonucleotide
  Antisense strand to SEQ ID NO: 241894
uuagcucacucggauuugg

SEQ ID NO: 241896 - RNA, 19 nt, Artificial Sequence
  Description of Artificial Sequence: Synthetic oligonucleotide
  Sense strand starting at position 2590 SEQ ID NO: 3113
aaauccgagugagcuaauu

SEQ ID NO: 241897 - RNA, 19 nt, Artificial Sequence
  Description of Artificial Sequence: Synthetic oligonucleotide
  Antisense strand to SEQ ID NO: 241896
aauuagcucacucggauuu

SEQ ID NO: 241898 - RNA, 19 nt, Artificial Sequence
  Description of Artificial Sequence: Synthetic oligonucleotide
  Sense strand starting at position 2689 SEQ ID NO: 3113
cacgcuguccguucggaaa

SEQ ID NO: 241899 - RNA, 19 nt, Artificial Sequence
  Description of Artificial Sequence: Synthetic oligonucleotide
  Antisense strand to SEQ ID NO: 241898
uuuccgaacggacagcgug

SEQ ID NO: 241900 - RNA, 19 nt, Artificial Sequence
  Description of Artificial Sequence: Synthetic oligonucleotide
  Sense strand starting at position 2781 SEQ ID NO: 3113
cugacaaucugucccagaa

SEQ ID NO: 241901 - RNA, 19 nt, Artificial Sequence
  Description of Artificial Sequence: Synthetic oligonucleotide
  Antisense strand to SEQ ID NO: 241900
uucugggacagauugucag

SEQ ID NO: 241902 - RNA, 19 nt, Artificial Sequence
  Description of Artificial Sequence: Synthetic oligonucleotide
  Sense strand starting at position 2783 SEQ ID NO: 3113
gacaaucugucccagaaag

SEQ ID NO: 241903 - RNA, 19 nt, Artificial Sequence
  Description of Artificial Sequence: Synthetic oligonucleotide
  Antisense strand to SEQ ID NO: 241902
cuuucugggacagauuguc

SEQ ID NO: 241904 - RNA, 19 nt, Artificial Sequence
  Description of Artificial Sequence: Synthetic oligonucleotide
  Sense strand starting at position 2960 SEQ ID NO: 3113
gugaaacuucugugucucu

SEQ ID NO: 241905 - RNA, 19 nt, Artificial Sequence
  Description of Artificial Sequence: Synthetic oligonucleotide
  Antisense strand to SEQ ID NO: 241904
agagacacagaaguuucac

SEQ ID NO: 241906 - RNA, 19 nt, Artificial Sequence
  Description of Artificial Sequence: Synthetic oligonucleotide
  Sense strand starting at position 3094 SEQ ID NO: 3113
agcugucaacugcagagaa

SEQ ID NO: 241907 - RNA, 19 nt, Artificial Sequence
  Description of Artificial Sequence: Synthetic oligonucleotide
  Antisense strand to SEQ ID NO: 241906
uucucugcaguugacagcu

SEQ ID NO: 241908 - RNA, 19 nt, Artificial Sequence
  Description of Artificial Sequence: Synthetic oligonucleotide
  Sense strand starting at position 3179 SEQ ID NO: 3113
agagaaacggucugacuuc

SEQ ID NO: 241909 - RNA, 19 nt, Artificial Sequence
  Description of Artificial Sequence: Synthetic oligonucleotide
  Antisense strand to SEQ ID NO: 241908
gaagucagaccguuucucu

SEQ ID NO: 241910 - RNA, 19 nt, Artificial Sequence
  Description of Artificial Sequence: Synthetic oligonucleotide
  Sense strand starting at position 3372 SEQ ID NO: 3113
agaguccugcugugacuuu

SEQ ID NO: 241911 - RNA, 19 nt, Artificial Sequence
  Description of Artificial Sequence: Synthetic oligonucleotide
  Antisense strand to SEQ ID NO: 241910
aaagucacagcaggacucu

SEQ ID NO: 241912 - RNA, 19 nt, Artificial Sequence
  Description of Artificial Sequence: Synthetic oligonucleotide
  Sense strand starting at position 3397 SEQ ID NO: 3113
cugccuuaggaacaauauu

SEQ ID NO: 241913 - RNA, 19 nt, Artificial Sequence
  Description of Artificial Sequence: Synthetic oligonucleotide
  Antisense strand to SEQ ID NO: 241912
aauauuguuccuaaggcag

SEQ ID NO: 241914 - RNA, 19 nt, Artificial Sequence
  Description of Artificial Sequence: Synthetic oligonucleotide
  Sense strand starting at position 3405 SEQ ID NO: 3113
ggaacaauauuagauccaa

SEQ ID NO: 241915 - RNA, 19 nt, Artificial Sequence
  Description of Artificial Sequence: Synthetic oligonucleotide
  Antisense strand to SEQ ID NO: 241914
uuggaucuaauauuguucc

SEQ ID NO: 241916 - RNA, 19 nt, Artificial Sequence
  Description of Artificial Sequence: Synthetic oligonucleotide
  Sense strand starting at position 3526 SEQ ID NO: 3113
uaagccugugauuggugaa

SEQ ID NO: 241917 - RNA, 19 nt, Artificial Sequence
  Description of Artificial Sequence: Synthetic oligonucleotide
  Antisense strand to SEQ ID NO: 241916
uucaccaaucacaggcuua

SEQ ID NO: 241918 - RNA, 19 nt, Artificial Sequence
  Description of Artificial Sequence: Synthetic oligonucleotide
  Sense strand starting at position 3539 SEQ ID NO: 3113
ggugaaagcuugucaccca

SEQ ID NO: 241919 - RNA, 19 nt, Artificial Sequence
  Description of Artificial Sequence: Synthetic oligonucleotide
  Antisense strand to SEQ ID NO: 241918
ugggugacaagcuuucacc

SEQ ID NO: 241920 - RNA, 19 nt, Artificial Sequence
  Description of Artificial Sequence: Synthetic oligonucleotide
  Sense strand starting at position 3767 SEQ ID NO: 3113
uuugaaguucuagacaugu

SEQ ID NO: 241921 - RNA, 19 nt, Artificial Sequence
  Description of Artificial Sequence: Synthetic oligonucleotide
  Antisense strand to SEQ ID NO: 241920
acaugucuagaacuucaaa

SEQ ID NO: 241922 - RNA, 19 nt, Artificial Sequence
  Description of Artificial Sequence: Synthetic oligonucleotide
  Sense strand starting at position 3824 SEQ ID NO: 3113
aggaaaucauagggaauag

SEQ ID NO: 241923 - RNA, 19 nt, Artificial Sequence
  Description of Artificial Sequence: Synthetic oligonucleotide
  Antisense strand to SEQ ID NO: 241922
cuauucccuaugauuuccu

SEQ ID NO: 241924 - RNA, 19 nt, Artificial Sequence
  Description of Artificial Sequence: Synthetic oligonucleotide
  Sense strand starting at position 3836 SEQ ID NO: 3113
ggaauagaaguuugcugau

SEQ ID NO: 241925 - RNA, 19 nt, Artificial Sequence
  Description of Artificial Sequence: Synthetic oligonucleotide
  Antisense strand to SEQ ID NO: 241924
aucagcaaacuucuauucc

SEQ ID NO: 241926 - RNA, 19 nt, Artificial Sequence
  Description of Artificial Sequence: Synthetic oligonucleotide
  Sense strand starting at position 3838 SEQ ID NO: 3113
aauagaaguuugcugauga

SEQ ID NO: 241927 - RNA, 19 nt, Artificial Sequence
  Description of Artificial Sequence: Synthetic oligonucleotide
  Antisense strand to SEQ ID NO: 241926
ucaucagcaaacuucuauu

SEQ ID NO: 241928 - RNA, 19 nt, Artificial Sequence
  Description of Artificial Sequence: Synthetic oligonucleotide
  Sense strand starting at position 3944 SEQ ID NO: 3113
gcgacaggauugcuaacuu

SEQ ID NO: 241929 - RNA, 19 nt, Artificial Sequence
  Description of Artificial Sequence: Synthetic oligonucleotide
  Antisense strand to SEQ ID NO: 241928
aaguuagcaauccugucgc

SEQ ID NO: 241930 - RNA, 19 nt, Artificial Sequence
  Description of Artificial Sequence: Synthetic oligonucleotide
  Sense strand starting at position 3974 SEQ ID NO: 3113
uuggcugggucuuuaugaa

SEQ ID NO: 241931 - RNA, 19 nt, Artificial Sequence
  Description of Artificial Sequence: Synthetic oligonucleotide
  Antisense strand to SEQ ID NO: 241930
uucauaaagacccagccaa

SEQ ID NO: 241932 - RNA, 19 nt, Artificial Sequence
  Description of Artificial Sequence: Synthetic oligonucleotide
  Sense strand starting at position 3978 SEQ ID NO: 3113
cugggucuuuaugaaacaa

SEQ ID NO: 241933 - RNA, 19 nt, Artificial Sequence
  Description of Artificial Sequence: Synthetic oligonucleotide
  Antisense strand to SEQ ID NO: 241932
uuguuucauaaagacccag

SEQ ID NO: 241934 - RNA, 19 nt, Artificial Sequence
  Description of Artificial Sequence: Synthetic oligonucleotide
  Sense strand starting at position 10 SEQ ID NO: 3114
gcuguccuuacuggaaaug

SEQ ID NO: 241935 - RNA, 19 nt, Artificial Sequence
  Description of Artificial Sequence: Synthetic oligonucleotide
  Antisense strand to SEQ ID NO: 241934
cauuuccaguaaggacagc

SEQ ID NO: 241936 - RNA, 19 nt, Artificial Sequence
  Description of Artificial Sequence: Synthetic oligonucleotide
  Sense strand starting at position 148 SEQ ID NO: 3114
gugaacucugcuugaaccu

SEQ ID NO: 241937 - RNA, 19 nt, Artificial Sequence
  Description of Artificial Sequence: Synthetic oligonucleotide
  Antisense strand to SEQ ID NO: 241936
agguucaagcagaguucac

SEQ ID NO: 241938 - RNA, 19 nt, Artificial Sequence
  Description of Artificial Sequence: Synthetic oligonucleotide
  Sense strand starting at position 149 SEQ ID NO: 3114
ugaacucugcuugaaccua

SEQ ID NO: 241939 - RNA, 19 nt, Artificial Sequence
  Description of Artificial Sequence: Synthetic oligonucleotide
  Antisense strand to SEQ ID NO: 241938
uagguucaagcagaguuca

SEQ ID NO: 241940 - RNA, 19 nt, Artificial Sequence
  Description of Artificial Sequence: Synthetic oligonucleotide
  Sense strand starting at position 172 SEQ ID NO: 3114
gcaggaacgggucauaaau

SEQ ID NO: 241941 - RNA, 19 nt, Artificial Sequence
  Description of Artificial Sequence: Synthetic oligonucleotide
  Antisense strand to SEQ ID NO: 241940
auuuaugacccguuccugc

SEQ ID NO: 241942 - RNA, 19 nt, Artificial Sequence
  Description of Artificial Sequence: Synthetic oligonucleotide
  Sense strand starting at position 875 SEQ ID NO: 3114
ggcaguaaacgcuucggua

SEQ ID NO: 241943 - RNA, 19 nt, Artificial Sequence
  Description of Artificial Sequence: Synthetic oligonucleotide
  Antisense strand to SEQ ID NO: 241942
uaccgaagcguuuacugcc

SEQ ID NO: 241944 - RNA, 19 nt, Artificial Sequence
  Description of Artificial Sequence: Synthetic oligonucleotide
  Sense strand starting at position 876 SEQ ID NO: 3114
gcaguaaacgcuucgguaa

SEQ ID NO: 241945 - RNA, 19 nt, Artificial Sequence
  Description of Artificial Sequence: Synthetic oligonucleotide
  Antisense strand to SEQ ID NO: 241944
uuaccgaagcguuuacugc

SEQ ID NO: 241946 - RNA, 19 nt, Artificial Sequence
  Description of Artificial Sequence: Synthetic oligonucleotide
  Sense strand starting at position 1268 SEQ ID NO: 3114
gcugcaaucgucguaaauc

SEQ ID NO: 241947 - RNA, 19 nt, Artificial Sequence
  Description of Artificial Sequence: Synthetic oligonucleotide
  Antisense strand to SEQ ID NO: 241946
gauuuacgacgauugcagc

SEQ ID NO: 241948 - RNA, 19 nt, Artificial Sequence
  Description of Artificial Sequence: Synthetic oligonucleotide
  Sense strand starting at position 1519 SEQ ID NO: 3114
uugcuacuucgggauucga

SEQ ID NO: 241949 - RNA, 19 nt, Artificial Sequence
  Description of Artificial Sequence: Synthetic oligonucleotide
  Antisense strand to SEQ ID NO: 241948
ucgaaucccgaaguagcaa

SEQ ID NO: 241950 - RNA, 19 nt, Artificial Sequence
  Description of Artificial Sequence: Synthetic oligonucleotide
  Sense strand starting at position 1550 SEQ ID NO: 3114
uuggguuugcucgaaagga

SEQ ID NO: 241951 - RNA, 19 nt, Artificial Sequence
  Description of Artificial Sequence: Synthetic oligonucleotide
  Antisense strand to SEQ ID NO: 241950
uccuuucgagcaaacccaa

SEQ ID NO: 241952 - RNA, 19 nt, Artificial Sequence
  Description of Artificial Sequence: Synthetic oligonucleotide
  Sense strand starting at position 1551 SEQ ID NO: 3114
uggguuugcucgaaaggag

SEQ ID NO: 241953 - RNA, 19 nt, Artificial Sequence
  Description of Artificial Sequence: Synthetic oligonucleotide
  Antisense strand to SEQ ID NO: 241952
cuccuuucgagcaaaccca

SEQ ID NO: 241954 - RNA, 19 nt, Artificial Sequence
  Description of Artificial Sequence: Synthetic oligonucleotide
  Sense strand starting at position 1563 SEQ ID NO: 3114
aaaggagacuucuuuacgu

SEQ ID NO: 241955 - RNA, 19 nt, Artificial Sequence
  Description of Artificial Sequence: Synthetic oligonucleotide
  Antisense strand to SEQ ID NO: 241954
acguaaagaagucuccuuu

SEQ ID NO: 241956 - RNA, 19 nt, Artificial Sequence
  Description of Artificial Sequence: Synthetic oligonucleotide
  Sense strand starting at position 1565 SEQ ID NO: 3114
aggagacuucuuuacguuc

SEQ ID NO: 241957 - RNA, 19 nt, Artificial Sequence
  Description of Artificial Sequence: Synthetic oligonucleotide
  Antisense strand to SEQ ID NO: 241956
gaacguaaagaagucuccu

SEQ ID NO: 241958 - RNA, 19 nt, Artificial Sequence
  Description of Artificial Sequence: Synthetic oligonucleotide
  Sense strand starting at position 1587 SEQ ID NO: 3114
ccaaguucucccgaucucu

SEQ ID NO: 241959 - RNA, 19 nt, Artificial Sequence
  Description of Artificial Sequence: Synthetic oligonucleotide
  Antisense strand to SEQ ID NO: 241958
agagaucgggagaacuugg

SEQ ID NO: 241960 - RNA, 19 nt, Artificial Sequence
  Description of Artificial Sequence: Synthetic oligonucleotide
  Sense strand starting at position 1687 SEQ ID NO: 3114
uguaaugcacccuguauuu

SEQ ID NO: 241961 - RNA, 19 nt, Artificial Sequence
  Description of Artificial Sequence: Synthetic oligonucleotide
  Antisense strand to SEQ ID NO: 241960
aaauacagggugcauuaca

SEQ ID NO: 241962 - RNA, 19 nt, Artificial Sequence
  Description of Artificial Sequence: Synthetic oligonucleotide
  Sense strand starting at position 1723 SEQ ID NO: 3114
ccauuaaagcgccauaaau

SEQ ID NO: 241963 - RNA, 19 nt, Artificial Sequence
  Description of Artificial Sequence: Synthetic oligonucleotide
  Antisense strand to SEQ ID NO: 241962
auuuauggcgcuuuaaugg

SEQ ID NO: 241964 - RNA, 19 nt, Artificial Sequence
  Description of Artificial Sequence: Synthetic oligonucleotide
  Sense strand starting at position 1817 SEQ ID NO: 3114
guucuaugucuugauguau

SEQ ID NO: 241965 - RNA, 19 nt, Artificial Sequence
  Description of Artificial Sequence: Synthetic oligonucleotide
  Antisense strand to SEQ ID NO: 241964
auacaucaagacauagaac

SEQ ID NO: 241966 - RNA, 19 nt, Artificial Sequence
  Description of Artificial Sequence: Synthetic oligonucleotide
  Sense strand starting at position 1853 SEQ ID NO: 3114
ccuugaguugcagagggaa

SEQ ID NO: 241967 - RNA, 19 nt, Artificial Sequence
  Description of Artificial Sequence: Synthetic oligonucleotide
  Antisense strand to SEQ ID NO: 241966
uucccucugcaacucaagg

SEQ ID NO: 241968 - RNA, 19 nt, Artificial Sequence
  Description of Artificial Sequence: Synthetic oligonucleotide
  Sense strand starting at position 1855 SEQ ID NO: 3114
uugaguugcagagggaaau

SEQ ID NO: 241969 - RNA, 19 nt, Artificial Sequence
  Description of Artificial Sequence: Synthetic oligonucleotide
  Antisense strand to SEQ ID NO: 241968
auuucccucugcaacucaa

SEQ ID NO: 241970 - RNA, 19 nt, Artificial Sequence
  Description of Artificial Sequence: Synthetic oligonucleotide
  Sense strand starting at position 1987 SEQ ID NO: 3114
gauaucuguggaggcgaau

SEQ ID NO: 241971 - RNA, 19 nt, Artificial Sequence
  Description of Artificial Sequence: Synthetic oligonucleotide
  Antisense strand to SEQ ID NO: 241970
auucgccuccacagauauc

SEQ ID NO: 241972 - RNA, 19 nt, Artificial Sequence
  Description of Artificial Sequence: Synthetic oligonucleotide
  Sense strand starting at position 2079 SEQ ID NO: 3114
ccacuugaaggacgucaua

SEQ ID NO: 241973 - RNA, 19 nt, Artificial Sequence
  Description of Artificial Sequence: Synthetic oligonucleotide
  Antisense strand to SEQ ID NO: 241972
uaugacguccuucaagugg

SEQ ID NO: 241974 - RNA, 19 nt, Artificial Sequence
  Description of Artificial Sequence: Synthetic oligonucleotide
  Sense strand starting at position 2096 SEQ ID NO: 3114
uagucaaugugacuauugu

SEQ ID NO: 241975 - RNA, 19 nt, Artificial Sequence
  Description of Artificial Sequence: Synthetic oligonucleotide
  Antisense strand to SEQ ID NO: 241974
acaauagucacauugacua

SEQ ID NO: 241976 - RNA, 19 nt, Artificial Sequence
  Description of Artificial Sequence: Synthetic oligonucleotide
  Sense strand starting at position 2097 SEQ ID NO: 3114
agucaaugugacuauugua

SEQ ID NO: 241977 - RNA, 19 nt, Artificial Sequence
  Description of Artificial Sequence: Synthetic oligonucleotide
  Antisense strand to SEQ ID NO: 241976
uacaauagucacauugacu

SEQ ID NO: 241978 - RNA, 19 nt, Artificial Sequence
  Description of Artificial Sequence: Synthetic oligonucleotide
  Sense strand starting at position 2104 SEQ ID NO: 3114
gugacuauuguauauggua

SEQ ID NO: 241979 - RNA, 19 nt, Artificial Sequence
  Description of Artificial Sequence: Synthetic oligonucleotide
  Antisense strand to SEQ ID NO: 241978
uaccauauacaauagucac

SEQ ID NO: 241980 - RNA, 19 nt, Artificial Sequence
  Description of Artificial Sequence: Synthetic oligonucleotide
  Sense strand starting at position 2490 SEQ ID NO: 3114
uacagagccucagugaaga

SEQ ID NO: 241981 - RNA, 19 nt, Artificial Sequence
  Description of Artificial Sequence: Synthetic oligonucleotide
  Antisense strand to SEQ ID NO: 241980
ucuucacugaggcucugua

SEQ ID NO: 241982 - RNA, 19 nt, Artificial Sequence
  Description of Artificial Sequence: Synthetic oligonucleotide
  Sense strand starting at position 2515 SEQ ID NO: 3114
gggcgcuaguuccugauuu

SEQ ID NO: 241983 - RNA, 19 nt, Artificial Sequence
  Description of Artificial Sequence: Synthetic oligonucleotide
  Antisense strand to SEQ ID NO: 241982
aaaucaggaacuagcgccc

SEQ ID NO: 241984 - RNA, 19 nt, Artificial Sequence
  Description of Artificial Sequence: Synthetic oligonucleotide
  Sense strand starting at position 2517 SEQ ID NO: 3114
gcgcuaguuccugauuuau

SEQ ID NO: 241985 - RNA, 19 nt, Artificial Sequence
  Description of Artificial Sequence: Synthetic oligonucleotide
  Antisense strand to SEQ ID NO: 241984
auaaaucaggaacuagcgc

SEQ ID NO: 241986 - RNA, 19 nt, Artificial Sequence
  Description of Artificial Sequence: Synthetic oligonucleotide
  Sense strand starting at position 2519 SEQ ID NO: 3114
gcuaguuccugauuuauac

SEQ ID NO: 241987 - RNA, 19 nt, Artificial Sequence
  Description of Artificial Sequence: Synthetic oligonucleotide
  Antisense strand to SEQ ID NO: 241986
guauaaaucaggaacuagc

SEQ ID NO: 241988 - RNA, 19 nt, Artificial Sequence
  Description of Artificial Sequence: Synthetic oligonucleotide
  Sense strand starting at position 2523 SEQ ID NO: 3114
guuccugauuuauacauua

SEQ ID NO: 241989 - RNA, 19 nt, Artificial Sequence
  Description of Artificial Sequence: Synthetic oligonucleotide
  Antisense strand to SEQ ID NO: 241988
uaauguauaaaucaggaac

SEQ ID NO: 241990 - RNA, 19 nt, Artificial Sequence
  Description of Artificial Sequence: Synthetic oligonucleotide
  Sense strand starting at position 2548 SEQ ID NO: 3114
ucagaugcuuucccugagu

SEQ ID NO: 241991 - RNA, 19 nt, Artificial Sequence
  Description of Artificial Sequence: Synthetic oligonucleotide
  Antisense strand to SEQ ID NO: 241990
acucagggaaagcaucuga

SEQ ID NO: 241992 - RNA, 19 nt, Artificial Sequence
  Description of Artificial Sequence: Synthetic oligonucleotide
  Sense strand starting at position 2624 SEQ ID NO: 3114
ucaggaucagacugcaaau

SEQ ID NO: 241993 - RNA, 19 nt, Artificial Sequence
  Description of Artificial Sequence: Synthetic oligonucleotide
  Antisense strand to SEQ ID NO: 241992
auuugcagucugauccuga

SEQ ID NO: 241994 - RNA, 19 nt, Artificial Sequence
  Description of Artificial Sequence: Synthetic oligonucleotide
  Sense strand starting at position 2635 SEQ ID NO: 3114
cugcaaaucgccuaagaaa

SEQ ID NO: 241995 - RNA, 19 nt, Artificial Sequence
  Description of Artificial Sequence: Synthetic oligonucleotide
  Antisense strand to SEQ ID NO: 241994
uuucuuaggcgauuugcag

SEQ ID NO: 241996 - RNA, 19 nt, Artificial Sequence
  Description of Artificial Sequence: Synthetic oligonucleotide
  Sense strand starting at position 2781 SEQ ID NO: 3114
gugcaauuugucgacucag

SEQ ID NO: 241997 - RNA, 19 nt, Artificial Sequence
  Description of Artificial Sequence: Synthetic oligonucleotide
  Antisense strand to SEQ ID NO: 241996
cugagucgacaaauugcac

SEQ ID NO: 241998 - RNA, 19 nt, Artificial Sequence
  Description of Artificial Sequence: Synthetic oligonucleotide
  Sense strand starting at position 2802 SEQ ID NO: 3114
guuugcgagcacuaaacua

SEQ ID NO: 241999 - RNA, 19 nt, Artificial Sequence
  Description of Artificial Sequence: Synthetic oligonucleotide
  Antisense strand to SEQ ID NO: 241998
uaguuuagugcucgcaaac

SEQ ID NO: 242000 - RNA, 19 nt, Artificial Sequence
  Description of Artificial Sequence: Synthetic oligonucleotide
  Sense strand starting at position 2824 SEQ ID NO: 3114
ccgggaaagccucacacaa

SEQ ID NO: 242001 - RNA, 19 nt, Artificial Sequence
  Description of Artificial Sequence: Synthetic oligonucleotide
  Antisense strand to SEQ ID NO: 242000
uugugugaggcuuucccgg

SEQ ID NO: 242002 - RNA, 19 nt, Artificial Sequence
  Description of Artificial Sequence: Synthetic oligonucleotide
  Sense strand starting at position 3176 SEQ ID NO: 3114
ucaacuuucgccgcuugau

SEQ ID NO: 242003 - RNA, 19 nt, Artificial Sequence
  Description of Artificial Sequence: Synthetic oligonucleotide
  Antisense strand to SEQ ID NO: 242002
aucaagcggcgaaaguuga

SEQ ID NO: 242004 - RNA, 19 nt, Artificial Sequence
  Description of Artificial Sequence: Synthetic oligonucleotide
  Sense strand starting at position 3177 SEQ ID NO: 3114
caacuuucgccgcuugauu

SEQ ID NO: 242005 - RNA, 19 nt, Artificial Sequence
  Description of Artificial Sequence: Synthetic oligonucleotide
  Antisense strand to SEQ ID NO: 242004
aaucaagcggcgaaaguug

SEQ ID NO: 242006 - RNA, 19 nt, Artificial Sequence
  Description of Artificial Sequence: Synthetic oligonucleotide
  Sense strand starting at position 3587 SEQ ID NO: 3114
gugcucuuucuggagccaa

SEQ ID NO: 242007 - RNA, 19 nt, Artificial Sequence
  Description of Artificial Sequence: Synthetic oligonucleotide
  Antisense strand to SEQ ID NO: 242006
uuggcuccagaaagagcac

SEQ ID NO: 242008 - RNA, 19 nt, Artificial Sequence
  Description of Artificial Sequence: Synthetic oligonucleotide
  Sense strand starting at position 3733 SEQ ID NO: 3114
ggagccuugguagggauua

SEQ ID NO: 242009 - RNA, 19 nt, Artificial Sequence
  Description of Artificial Sequence: Synthetic oligonucleotide
  Antisense strand to SEQ ID NO: 242008
uaaucccuaccaaggcucc

SEQ ID NO: 242010 - RNA, 19 nt, Artificial Sequence
  Description of Artificial Sequence: Synthetic oligonucleotide
  Sense strand starting at position 3735 SEQ ID NO: 3114
agccuugguagggauuauu

SEQ ID NO: 242011 - RNA, 19 nt, Artificial Sequence
  Description of Artificial Sequence: Synthetic oligonucleotide
  Antisense strand to SEQ ID NO: 242010
aauaaucccuaccaaggcu

SEQ ID NO: 242012 - RNA, 19 nt, Artificial Sequence
  Description of Artificial Sequence: Synthetic oligonucleotide
  Sense strand starting at position 3770 SEQ ID NO: 3114
guuauaagugaaugcucca

SEQ ID NO: 242013 - RNA, 19 nt, Artificial Sequence
  Description of Artificial Sequence: Synthetic oligonucleotide
  Antisense strand to SEQ ID NO: 242012
uggagcauucacuuauaac

SEQ ID NO: 242014 - RNA, 19 nt, Artificial Sequence
  Description of Artificial Sequence: Synthetic oligonucleotide
  Sense strand starting at position 1202 SEQ ID NO: 3115
gaguaauugcggcgcccau

SEQ ID NO: 242015 - RNA, 19 nt, Artificial Sequence
  Description of Artificial Sequence: Synthetic oligonucleotide
  Antisense strand to SEQ ID NO: 242014
augggcgccgcaauuacuc

SEQ ID NO: 242016 - RNA, 19 nt, Artificial Sequence
  Description of Artificial Sequence: Synthetic oligonucleotide
  Sense strand starting at position 1985 SEQ ID NO: 3115
ccugccagauauuaaugua

SEQ ID NO: 242017 - RNA, 19 nt, Artificial Sequence
  Description of Artificial Sequence: Synthetic oligonucleotide
  Antisense strand to SEQ ID NO: 242016
uacauuaauaucuggcagg

SEQ ID NO: 242018 - RNA, 19 nt, Artificial Sequence
  Description of Artificial Sequence: Synthetic oligonucleotide
  Sense strand starting at position 1988 SEQ ID NO: 3115
gccagauauuaauguaguu

SEQ ID NO: 242019 - RNA, 19 nt, Artificial Sequence
  Description of Artificial Sequence: Synthetic oligonucleotide
  Antisense strand to SEQ ID NO: 242018
aacuacauuaauaucuggc

SEQ ID NO: 242020 - RNA, 19 nt, Artificial Sequence
  Description of Artificial Sequence: Synthetic oligonucleotide
  Sense strand starting at position 1993 SEQ ID NO: 3115
auauuaauguaguuccagu

SEQ ID NO: 242021 - RNA, 19 nt, Artificial Sequence
  Description of Artificial Sequence: Synthetic oligonucleotide
  Antisense strand to SEQ ID NO: 242020
acuggaacuacauuaauau

SEQ ID NO: 242022 - RNA, 19 nt, Artificial Sequence
  Description of Artificial Sequence: Synthetic oligonucleotide
  Sense strand starting at position 2373 SEQ ID NO: 3115
augaguaaccgccaugcuu

SEQ ID NO: 242023 - RNA, 19 nt, Artificial Sequence
  Description of Artificial Sequence: Synthetic oligonucleotide
  Antisense strand to SEQ ID NO: 242022
aagcauggcgguuacucau

SEQ ID NO: 242024 - RNA, 19 nt, Artificial Sequence
  Description of Artificial Sequence: Synthetic oligonucleotide
  Sense strand starting at position 2799 SEQ ID NO: 3115
aggauacucuguuuaaagg

SEQ ID NO: 242025 - RNA, 19 nt, Artificial Sequence
  Description of Artificial Sequence: Synthetic oligonucleotide
  Antisense strand to SEQ ID NO: 242024
ccuuuaaacagaguauccu

SEQ ID NO: 242026 - RNA, 19 nt, Artificial Sequence
  Description of Artificial Sequence: Synthetic oligonucleotide
  Sense strand starting at position 2800 SEQ ID NO: 3115
ggauacucuguuuaaaggu

SEQ ID NO: 242027 - RNA, 19 nt, Artificial Sequence
  Description of Artificial Sequence: Synthetic oligonucleotide
  Antisense strand to SEQ ID NO: 242026
accuuuaaacagaguaucc

SEQ ID NO: 242028 - RNA, 19 nt, Artificial Sequence
  Description of Artificial Sequence: Synthetic oligonucleotide
  Sense strand starting at position 2809 SEQ ID NO: 3115
guuuaaaggugaggagcuu

SEQ ID NO: 242029 - RNA, 19 nt, Artificial Sequence
  Description of Artificial Sequence: Synthetic oligonucleotide
  Antisense strand to SEQ ID NO: 242028
aagcuccucaccuuuaaac

SEQ ID NO: 242030 - RNA, 19 nt, Artificial Sequence
  Description of Artificial Sequence: Synthetic oligonucleotide
  Sense strand starting at position 2873 SEQ ID NO: 3115
ccuggaguccaagguaaua

SEQ ID NO: 242031 - RNA, 19 nt, Artificial Sequence
  Description of Artificial Sequence: Synthetic oligonucleotide
  Antisense strand to SEQ ID NO: 242030
uauuaccuuggacuccagg

SEQ ID NO: 242032 - RNA, 19 nt, Artificial Sequence
  Description of Artificial Sequence: Synthetic oligonucleotide
  Sense strand starting at position 2942 SEQ ID NO: 3115
gcacuuuggucucuggcua

SEQ ID NO: 242033 - RNA, 19 nt, Artificial Sequence
  Description of Artificial Sequence: Synthetic oligonucleotide
  Antisense strand to SEQ ID NO: 242032
uagccagagaccaaagugc

SEQ ID NO: 242034 - RNA, 19 nt, Artificial Sequence
  Description of Artificial Sequence: Synthetic oligonucleotide
  Sense strand starting at position 2953 SEQ ID NO: 3115
ucuggcuauuccgaagaaa

SEQ ID NO: 242035 - RNA, 19 nt, Artificial Sequence
  Description of Artificial Sequence: Synthetic oligonucleotide
  Antisense strand to SEQ ID NO: 242034
uuucuucggaauagccaga

SEQ ID NO: 242036 - RNA, 19 nt, Artificial Sequence
  Description of Artificial Sequence: Synthetic oligonucleotide
  Sense strand starting at position 2956 SEQ ID NO: 3115
ggcuauuccgaagaaacgu

SEQ ID NO: 242037 - RNA, 19 nt, Artificial Sequence
  Description of Artificial Sequence: Synthetic oligonucleotide
  Antisense strand to SEQ ID NO: 242036
acguuucuucggaauagcc

SEQ ID NO: 242038 - RNA, 19 nt, Artificial Sequence
  Description of Artificial Sequence: Synthetic oligonucleotide
  Sense strand starting at position 2962 SEQ ID NO: 3115
uccgaagaaacgugaaguu

SEQ ID NO: 242039 - RNA, 19 nt, Artificial Sequence
  Description of Artificial Sequence: Synthetic oligonucleotide
  Antisense strand to SEQ ID NO: 242038
aacuucacguuucuucgga

SEQ ID NO: 242040 - RNA, 19 nt, Artificial Sequence
  Description of Artificial Sequence: Synthetic oligonucleotide
  Sense strand starting at position 3164 SEQ ID NO: 3115
cgcacuuucugagacaguu

SEQ ID NO: 242041 - RNA, 19 nt, Artificial Sequence
  Description of Artificial Sequence: Synthetic oligonucleotide
  Antisense strand to SEQ ID NO: 242040
aacugucucagaaagugcg

SEQ ID NO: 242042 - RNA, 19 nt, Artificial Sequence
  Description of Artificial Sequence: Synthetic oligonucleotide
  Sense strand starting at position 3215 SEQ ID NO: 3115
agcaaugaguucccucauu

SEQ ID NO: 242043 - RNA, 19 nt, Artificial Sequence
  Description of Artificial Sequence: Synthetic oligonucleotide
  Antisense strand to SEQ ID NO: 242042
aaugagggaacucauugcu

SEQ ID NO: 242044 - RNA, 19 nt, Artificial Sequence
  Description of Artificial Sequence: Synthetic oligonucleotide
  Sense strand starting at position 3452 SEQ ID NO: 3115
gggaauauccugugucuac

SEQ ID NO: 242045 - RNA, 19 nt, Artificial Sequence
  Description of Artificial Sequence: Synthetic oligonucleotide
  Antisense strand to SEQ ID NO: 242044
guagacacaggauauuccc

SEQ ID NO: 242046 - RNA, 19 nt, Artificial Sequence
  Description of Artificial Sequence: Synthetic oligonucleotide
  Sense strand starting at position 3453 SEQ ID NO: 3115
ggaauauccugugucuacu

SEQ ID NO: 242047 - RNA, 19 nt, Artificial Sequence
  Description of Artificial Sequence: Synthetic oligonucleotide
  Antisense strand to SEQ ID NO: 242046
aguagacacaggauauucc

SEQ ID NO: 242048 - RNA, 19 nt, Artificial Sequence
  Description of Artificial Sequence: Synthetic oligonucleotide
  Sense strand starting at position 3496 SEQ ID NO: 3115
cagguugucugccaaagcu

SEQ ID NO: 242049 - RNA, 19 nt, Artificial Sequence
  Description of Artificial Sequence: Synthetic oligonucleotide
  Antisense strand to SEQ ID NO: 242048
agcuuuggcagacaaccug

SEQ ID NO: 242050 - RNA, 19 nt, Artificial Sequence
  Description of Artificial Sequence: Synthetic oligonucleotide
  Sense strand starting at position 3522 SEQ ID NO: 3115
caagaagucgcgcauuuac

SEQ ID NO: 242051 - RNA, 19 nt, Artificial Sequence
  Description of Artificial Sequence: Synthetic oligonucleotide
  Antisense strand to SEQ ID NO: 242050
guaaaugcgcgacuucuug

SEQ ID NO: 242052 - RNA, 19 nt, Artificial Sequence
  Description of Artificial Sequence: Synthetic oligonucleotide
  Sense strand starting at position 3792 SEQ ID NO: 3115
cagugcuugucccucaguu

SEQ ID NO: 242053 - RNA, 19 nt, Artificial Sequence
  Description of Artificial Sequence: Synthetic oligonucleotide
  Antisense strand to SEQ ID NO: 242052
aacugagggacaagcacug

SEQ ID NO: 242054 - RNA, 19 nt, Artificial Sequence
  Description of Artificial Sequence: Synthetic oligonucleotide
  Sense strand starting at position 3905 SEQ ID NO: 3115
guaggcugaagguguuaga

SEQ ID NO: 242055 - RNA, 19 nt, Artificial Sequence
  Description of Artificial Sequence: Synthetic oligonucleotide
  Antisense strand to SEQ ID NO: 242054
ucuaacaccuucagccuac

SEQ ID NO: 242056 - RNA, 19 nt, Artificial Sequence
  Description of Artificial Sequence: Synthetic oligonucleotide
  Sense strand starting at position 3908 SEQ ID NO: 3115
ggcugaagguguuagauuu

SEQ ID NO: 242057 - RNA, 19 nt, Artificial Sequence
  Description of Artificial Sequence: Synthetic oligonucleotide
  Antisense strand to SEQ ID NO: 242056
aaaucuaacaccuucagcc

SEQ ID NO: 242058 - RNA, 19 nt, Artificial Sequence
  Description of Artificial Sequence: Synthetic oligonucleotide
  Sense strand starting at position 494 SEQ ID NO: 3117
gcucuuuagcuccgauaua

SEQ ID NO: 242059 - RNA, 19 nt, Artificial Sequence
  Description of Artificial Sequence: Synthetic oligonucleotide
  Antisense strand to SEQ ID NO: 242058
uauaucggagcuaaagagc

SEQ ID NO: 242060 - RNA, 19 nt, Artificial Sequence
  Description of Artificial Sequence: Synthetic oligonucleotide
  Sense strand starting at position 569 SEQ ID NO: 3117
ccaucaucuuuacaugguu

SEQ ID NO: 242061 - RNA, 19 nt, Artificial Sequence
  Description of Artificial Sequence: Synthetic oligonucleotide
  Antisense strand to SEQ ID NO: 242060
aaccauguaaagaugaugg

SEQ ID NO: 242062 - RNA, 19 nt, Artificial Sequence
  Description of Artificial Sequence: Synthetic oligonucleotide
  Sense strand starting at position 686 SEQ ID NO: 3117
gccagaacgugagaugaaa

SEQ ID NO: 242063 - RNA, 19 nt, Artificial Sequence
  Description of Artificial Sequence: Synthetic oligonucleotide
  Antisense strand to SEQ ID NO: 242062
uuucaucucacguucuggc

SEQ ID NO: 242064 - RNA, 19 nt, Artificial Sequence
  Description of Artificial Sequence: Synthetic oligonucleotide
  Sense strand starting at position 2345 SEQ ID NO: 3117
ggcauaucgaagugguuua

SEQ ID NO: 242065 - RNA, 19 nt, Artificial Sequence
  Description of Artificial Sequence: Synthetic oligonucleotide
  Antisense strand to SEQ ID NO: 242064
uaaaccacuucgauaugcc

SEQ ID NO: 242066 - RNA, 19 nt, Artificial Sequence
  Description of Artificial Sequence: Synthetic oligonucleotide
  Sense strand starting at position 2346 SEQ ID NO: 3117
gcauaucgaagugguuuaa

SEQ ID NO: 242067 - RNA, 19 nt, Artificial Sequence
  Description of Artificial Sequence: Synthetic oligonucleotide
  Antisense strand to SEQ ID NO: 242066
uuaaaccacuucgauaugc

SEQ ID NO: 242068 - RNA, 19 nt, Artificial Sequence
  Description of Artificial Sequence: Synthetic oligonucleotide
  Sense strand starting at position 2350 SEQ ID NO: 3117
aucgaagugguuuaauuaa

SEQ ID NO: 242069 - RNA, 19 nt, Artificial Sequence
  Description of Artificial Sequence: Synthetic oligonucleotide
  Antisense strand to SEQ ID NO: 242068
uuaauuaaaccacuucgau

SEQ ID NO: 242070 - RNA, 19 nt, Artificial Sequence
  Description of Artificial Sequence: Synthetic oligonucleotide
  Sense strand starting at position 2388 SEQ ID NO: 3117
agauccuggcguuaucaaa

SEQ ID NO: 242071 - RNA, 19 nt, Artificial Sequence
  Description of Artificial Sequence: Synthetic oligonucleotide
  Antisense strand to SEQ ID NO: 242070
uuugauaacgccaggaucu

SEQ ID NO: 242072 - RNA, 19 nt, Artificial Sequence
  Description of Artificial Sequence: Synthetic oligonucleotide
  Sense strand starting at position 2445 SEQ ID NO: 3117
guggaaaugagauguacau

SEQ ID NO: 242073 - RNA, 19 nt, Artificial Sequence
  Description of Artificial Sequence: Synthetic oligonucleotide
  Antisense strand to SEQ ID NO: 242072
auguacaucucauuuccac

SEQ ID NO: 242074 - RNA, 19 nt, Artificial Sequence
  Description of Artificial Sequence: Synthetic oligonucleotide
  Sense strand starting at position 2493 SEQ ID NO: 3117
aggcucucagguuaauuga

SEQ ID NO: 242075 - RNA, 19 nt, Artificial Sequence
  Description of Artificial Sequence: Synthetic oligonucleotide
  Antisense strand to SEQ ID NO: 242074
ucaauuaaccugagagccu

SEQ ID NO: 242076 - RNA, 19 nt, Artificial Sequence
  Description of Artificial Sequence: Synthetic oligonucleotide
  Sense strand starting at position 2496 SEQ ID NO: 3117
cucucagguuaauugauau

SEQ ID NO: 242077 - RNA, 19 nt, Artificial Sequence
  Description of Artificial Sequence: Synthetic oligonucleotide
  Antisense strand to SEQ ID NO: 242076
auaucaauuaaccugagag

SEQ ID NO: 242078 - RNA, 19 nt, Artificial Sequence
  Description of Artificial Sequence: Synthetic oligonucleotide
  Sense strand starting at position 2519 SEQ ID NO: 3117
uggaaaucaugcccaugaa

SEQ ID NO: 242079 - RNA, 19 nt, Artificial Sequence
  Description of Artificial Sequence: Synthetic oligonucleotide
  Antisense strand to SEQ ID NO: 242078
uucaugggcaugauuucca

SEQ ID NO: 242080 - RNA, 19 nt, Artificial Sequence
  Description of Artificial Sequence: Synthetic oligonucleotide
  Sense strand starting at position 2612 SEQ ID NO: 3117
gcauuaggcuugcugagag

SEQ ID NO: 242081 - RNA, 19 nt, Artificial Sequence
  Description of Artificial Sequence: Synthetic oligonucleotide
  Antisense strand to SEQ ID NO: 242080
cucucagcaagccuaaugc

SEQ ID NO: 242082 - RNA, 19 nt, Artificial Sequence
  Description of Artificial Sequence: Synthetic oligonucleotide
  Sense strand starting at position 2653 SEQ ID NO: 3117
aacguucugaggcgggaaa

SEQ ID NO: 242083 - RNA, 19 nt, Artificial Sequence
  Description of Artificial Sequence: Synthetic oligonucleotide
  Antisense strand to SEQ ID NO: 242082
uuucccgccucagaacguu

SEQ ID NO: 242084 - RNA, 19 nt, Artificial Sequence
  Description of Artificial Sequence: Synthetic oligonucleotide
  Sense strand starting at position 2691 SEQ ID NO: 3117
ggugacauuuccucgggca

SEQ ID NO: 242085 - RNA, 19 nt, Artificial Sequence
  Description of Artificial Sequence: Synthetic oligonucleotide
  Antisense strand to SEQ ID NO: 242084
ugcccgaggaaaugucacc

SEQ ID NO: 242086 - RNA, 19 nt, Artificial Sequence
  Description of Artificial Sequence: Synthetic oligonucleotide
  Sense strand starting at position 2692 SEQ ID NO: 3117
gugacauuuccucgggcag

SEQ ID NO: 242087 - RNA, 19 nt, Artificial Sequence
  Description of Artificial Sequence: Synthetic oligonucleotide
  Antisense strand to SEQ ID NO: 242086
cugcccgaggaaaugucac

SEQ ID NO: 242088 - RNA, 19 nt, Artificial Sequence
  Description of Artificial Sequence: Synthetic oligonucleotide
  Sense strand starting at position 2694 SEQ ID NO: 3117
gacauuuccucgggcagga

SEQ ID NO: 242089 - RNA, 19 nt, Artificial Sequence
  Description of Artificial Sequence: Synthetic oligonucleotide
  Antisense strand to SEQ ID NO: 242088
uccugcccgaggaaauguc

SEQ ID NO: 242090 - RNA, 19 nt, Artificial Sequence
  Description of Artificial Sequence: Synthetic oligonucleotide
  Sense strand starting at position 2891 SEQ ID NO: 3117
ccgccaagccugugaaauu

SEQ ID NO: 242091 - RNA, 19 nt, Artificial Sequence
  Description of Artificial Sequence: Synthetic oligonucleotide
  Antisense strand to SEQ ID NO: 242090
aauuucacaggcuuggcgg

SEQ ID NO: 242092 - RNA, 19 nt, Artificial Sequence
  Description of Artificial Sequence: Synthetic oligonucleotide
  Sense strand starting at position 2930 SEQ ID NO: 3117
gccucaaaguuacgaauuu

SEQ ID NO: 242093 - RNA, 19 nt, Artificial Sequence
  Description of Artificial Sequence: Synthetic oligonucleotide
  Antisense strand to SEQ ID NO: 242092
aaauucguaacuuugaggc

SEQ ID NO: 242094 - RNA, 19 nt, Artificial Sequence
  Description of Artificial Sequence: Synthetic oligonucleotide
  Sense strand starting at position 2978 SEQ ID NO: 3117
ccuaguuugugagcagaga

SEQ ID NO: 242095 - RNA, 19 nt, Artificial Sequence
  Description of Artificial Sequence: Synthetic oligonucleotide
  Antisense strand to SEQ ID NO: 242094
ucucugcucacaaacuagg

SEQ ID NO: 242096 - RNA, 19 nt, Artificial Sequence
  Description of Artificial Sequence: Synthetic oligonucleotide
  Sense strand starting at position 2979 SEQ ID NO: 3117
cuaguuugugagcagagau

SEQ ID NO: 242097 - RNA, 19 nt, Artificial Sequence
  Description of Artificial Sequence: Synthetic oligonucleotide
  Antisense strand to SEQ ID NO: 242096
aucucugcucacaaacuag

SEQ ID NO: 242098 - RNA, 19 nt, Artificial Sequence
  Description of Artificial Sequence: Synthetic oligonucleotide
  Sense strand starting at position 3022 SEQ ID NO: 3117
ggcccagucgagugugaau

SEQ ID NO: 242099 - RNA, 19 nt, Artificial Sequence
  Description of Artificial Sequence: Synthetic oligonucleotide
  Antisense strand to SEQ ID NO: 242098
auucacacucgacugggcc

SEQ ID NO: 242100 - RNA, 19 nt, Artificial Sequence
  Description of Artificial Sequence: Synthetic oligonucleotide
  Sense strand starting at position 3029 SEQ ID NO: 3117
ucgagugugaaucgacaaa

SEQ ID NO: 242101 - RNA, 19 nt, Artificial Sequence
  Description of Artificial Sequence: Synthetic oligonucleotide
  Antisense strand to SEQ ID NO: 242100
uuugucgauucacacucga

SEQ ID NO: 242102 - RNA, 19 nt, Artificial Sequence
  Description of Artificial Sequence: Synthetic oligonucleotide
  Sense strand starting at position 3214 SEQ ID NO: 3117
gggcucuuugggugacuga

SEQ ID NO: 242103 - RNA, 19 nt, Artificial Sequence
  Description of Artificial Sequence: Synthetic oligonucleotide
  Antisense strand to SEQ ID NO: 242102
ucagucacccaaagagccc

SEQ ID NO: 242104 - RNA, 19 nt, Artificial Sequence
  Description of Artificial Sequence: Synthetic oligonucleotide
  Sense strand starting at position 3237 SEQ ID NO: 3117
cguuuccuucgggauaggu

SEQ ID NO: 242105 - RNA, 19 nt, Artificial Sequence
  Description of Artificial Sequence: Synthetic oligonucleotide
  Antisense strand to SEQ ID NO: 242104
accuaucccgaaggaaacg

SEQ ID NO: 242106 - RNA, 19 nt, Artificial Sequence
  Description of Artificial Sequence: Synthetic oligonucleotide
  Sense strand starting at position 3276 SEQ ID NO: 3117
ggcccacagccuuggaaau

SEQ ID NO: 242107 - RNA, 19 nt, Artificial Sequence
  Description of Artificial Sequence: Synthetic oligonucleotide
  Antisense strand to SEQ ID NO: 242106
auuuccaaggcugugggcc

SEQ ID NO: 242108 - RNA, 19 nt, Artificial Sequence
  Description of Artificial Sequence: Synthetic oligonucleotide
  Sense strand starting at position 3334 SEQ ID NO: 3117
gccggcuuuccacaccaaa

SEQ ID NO: 242109 - RNA, 19 nt, Artificial Sequence
  Description of Artificial Sequence: Synthetic oligonucleotide
  Antisense strand to SEQ ID NO: 242108
uuugguguggaaagccggc

SEQ ID NO: 242110 - RNA, 19 nt, Artificial Sequence
  Description of Artificial Sequence: Synthetic oligonucleotide
  Sense strand starting at position 3370 SEQ ID NO: 3117
cccagacggccucagagau

SEQ ID NO: 242111 - RNA, 19 nt, Artificial Sequence
  Description of Artificial Sequence: Synthetic oligonucleotide
  Antisense strand to SEQ ID NO: 242110
aucucugaggccgucuggg

SEQ ID NO: 242112 - RNA, 19 nt, Artificial Sequence
  Description of Artificial Sequence: Synthetic oligonucleotide
  Sense strand starting at position 3524 SEQ ID NO: 3117
cagacauagcaaggugaua

SEQ ID NO: 242113 - RNA, 19 nt, Artificial Sequence
  Description of Artificial Sequence: Synthetic oligonucleotide
  Antisense strand to SEQ ID NO: 242112
uaucaccuugcuaugucug

SEQ ID NO: 242114 - RNA, 19 nt, Artificial Sequence
  Description of Artificial Sequence: Synthetic oligonucleotide
  Sense strand starting at position 3536 SEQ ID NO: 3117
ggugauaauguccgacuca

SEQ ID NO: 242115 - RNA, 19 nt, Artificial Sequence
  Description of Artificial Sequence: Synthetic oligonucleotide
  Antisense strand to SEQ ID NO: 242114
ugagucggacauuaucacc

SEQ ID NO: 242116 - RNA, 19 nt, Artificial Sequence
  Description of Artificial Sequence: Synthetic oligonucleotide
  Sense strand starting at position 3580 SEQ ID NO: 3117
agguaaaggaaucguuaau

SEQ ID NO: 242117 - RNA, 19 nt, Artificial Sequence
  Description of Artificial Sequence: Synthetic oligonucleotide
  Antisense strand to SEQ ID NO: 242116
auuaacgauuccuuuaccu

SEQ ID NO: 242118 - RNA, 19 nt, Artificial Sequence
  Description of Artificial Sequence: Synthetic oligonucleotide
  Sense strand starting at position 3592 SEQ ID NO: 3117
cguuaaugaaucuggagau

SEQ ID NO: 242119 - RNA, 19 nt, Artificial Sequence
  Description of Artificial Sequence: Synthetic oligonucleotide
  Antisense strand to SEQ ID NO: 242118
aucuccagauucauuaacg

SEQ ID NO: 242120 - RNA, 19 nt, Artificial Sequence
  Description of Artificial Sequence: Synthetic oligonucleotide
  Sense strand starting at position 3593 SEQ ID NO: 3117
guuaaugaaucuggagaug

SEQ ID NO: 242121 - RNA, 19 nt, Artificial Sequence
  Description of Artificial Sequence: Synthetic oligonucleotide
  Antisense strand to SEQ ID NO: 242120
caucuccagauucauuaac

SEQ ID NO: 242122 - RNA, 19 nt, Artificial Sequence
  Description of Artificial Sequence: Synthetic oligonucleotide
  Sense strand starting at position 3609 SEQ ID NO: 3117
augacagaggcaugcuuua

SEQ ID NO: 242123 - RNA, 19 nt, Artificial Sequence
  Description of Artificial Sequence: Synthetic oligonucleotide
  Antisense strand to SEQ ID NO: 242122
uaaagcaugccucugucau

SEQ ID NO: 242124 - RNA, 19 nt, Artificial Sequence
  Description of Artificial Sequence: Synthetic oligonucleotide
  Sense strand starting at position 3766 SEQ ID NO: 3117
aggcgaacgaauugauucu

SEQ ID NO: 242125 - RNA, 19 nt, Artificial Sequence
  Description of Artificial Sequence: Synthetic oligonucleotide
  Antisense strand to SEQ ID NO: 242124
agaaucaauucguucgccu

SEQ ID NO: 242126 - RNA, 19 nt, Artificial Sequence
  Description of Artificial Sequence: Synthetic oligonucleotide
  Sense strand starting at position 3772 SEQ ID NO: 3117
acgaauugauucugacaau

SEQ ID NO: 242127 - RNA, 19 nt, Artificial Sequence
  Description of Artificial Sequence: Synthetic oligonucleotide
  Antisense strand to SEQ ID NO: 242126
auugucagaaucaauucgu

SEQ ID NO: 242128 - RNA, 19 nt, Artificial Sequence
  Description of Artificial Sequence: Synthetic oligonucleotide
  Sense strand starting at position 3773 SEQ ID NO: 3117
cgaauugauucugacaauu

SEQ ID NO: 242129 - RNA, 19 nt, Artificial Sequence
  Description of Artificial Sequence: Synthetic oligonucleotide
  Antisense strand to SEQ ID NO: 242128
aauugucagaaucaauucg

SEQ ID NO: 242130 - RNA, 19 nt, Artificial Sequence
  Description of Artificial Sequence: Synthetic oligonucleotide
  Sense strand starting at position 3842 SEQ ID NO: 3117
ucaauaaagccuuggagcu

SEQ ID NO: 242131 - RNA, 19 nt, Artificial Sequence
  Description of Artificial Sequence: Synthetic oligonucleotide
  Antisense strand to SEQ ID NO: 242130
agcuccaaggcuuuauuga

SEQ ID NO: 242132 - RNA, 19 nt, Artificial Sequence
  Description of Artificial Sequence: Synthetic oligonucleotide
  Sense strand starting at position 3854 SEQ ID NO: 3117
uggagcuaccuuuguaauu

SEQ ID NO: 242133 - RNA, 19 nt, Artificial Sequence
  Description of Artificial Sequence: Synthetic oligonucleotide
  Antisense strand to SEQ ID NO: 242132
aauuacaaagguagcucca

SEQ ID NO: 242134 - RNA, 19 nt, Artificial Sequence
  Description of Artificial Sequence: Synthetic oligonucleotide
  Sense strand starting at position 3855 SEQ ID NO: 3117
ggagcuaccuuuguaauug

SEQ ID NO: 242135 - RNA, 19 nt, Artificial Sequence
  Description of Artificial Sequence: Synthetic oligonucleotide
  Antisense strand to SEQ ID NO: 242134
caauuacaaagguagcucc

SEQ ID NO: 242136 - RNA, 19 nt, Artificial Sequence
  Description of Artificial Sequence: Synthetic oligonucleotide
  Sense strand starting at position 3928 SEQ ID NO: 3117
guguuugaacccuggauaa

SEQ ID NO: 242137 - RNA, 19 nt, Artificial Sequence
  Description of Artificial Sequence: Synthetic oligonucleotide
  Antisense strand to SEQ ID NO: 242136
uuauccaggguucaaacac

SEQ ID NO: 242138 - RNA, 19 nt, Artificial Sequence
  Description of Artificial Sequence: Synthetic oligonucleotide
  Sense strand starting at position 540 SEQ ID NO: 3116
gcucuuuagcuccgauaua

SEQ ID NO: 242139 - RNA, 19 nt, Artificial Sequence
  Description of Artificial Sequence: Synthetic oligonucleotide
  Antisense strand to SEQ ID NO: 242138
uauaucggagcuaaagagc

SEQ ID NO: 242140 - RNA, 19 nt, Artificial Sequence
  Description of Artificial Sequence: Synthetic oligonucleotide
  Sense strand starting at position 615 SEQ ID NO: 3116
ccaucaucuuuacaugguu

SEQ ID NO: 242141 - RNA, 19 nt, Artificial Sequence
  Description of Artificial Sequence: Synthetic oligonucleotide
  Antisense strand to SEQ ID NO: 242140
aaccauguaaagaugaugg

SEQ ID NO: 242142 - RNA, 19 nt, Artificial Sequence
  Description of Artificial Sequence: Synthetic oligonucleotide
  Sense strand starting at position 732 SEQ ID NO: 3116
gccagaacgugagaugaaa

SEQ ID NO: 242143 - RNA, 19 nt, Artificial Sequence
  Description of Artificial Sequence: Synthetic oligonucleotide
  Antisense strand to SEQ ID NO: 242142
uuucaucucacguucuggc

SEQ ID NO: 242144 - RNA, 19 nt, Artificial Sequence
  Description of Artificial Sequence: Synthetic oligonucleotide
  Sense strand starting at position 2391 SEQ ID NO: 3116
ggcauaucgaagugguuua

SEQ ID NO: 242145 - RNA, 19 nt, Artificial Sequence
  Description of Artificial Sequence: Synthetic oligonucleotide
  Antisense strand to SEQ ID NO: 242144
uaaaccacuucgauaugcc

SEQ ID NO: 242146 - RNA, 19 nt, Artificial Sequence
  Description of Artificial Sequence: Synthetic oligonucleotide
  Sense strand starting at position 2392 SEQ ID NO: 3116
gcauaucgaagugguuuaa

SEQ ID NO: 242147 - RNA, 19 nt, Artificial Sequence
  Description of Artificial Sequence: Synthetic oligonucleotide
  Antisense strand to SEQ ID NO: 242146
uuaaaccacuucgauaugc

SEQ ID NO: 242148 - RNA, 19 nt, Artificial Sequence
  Description of Artificial Sequence: Synthetic oligonucleotide
  Sense strand starting at position 2396 SEQ ID NO: 3116
aucgaagugguuuaauuaa

SEQ ID NO: 242149 - RNA, 19 nt, Artificial Sequence
  Description of Artificial Sequence: Synthetic oligonucleotide
  Antisense strand to SEQ ID NO: 242148
uuaauuaaaccacuucgau

SEQ ID NO: 242150 - RNA, 19 nt, Artificial Sequence
  Description of Artificial Sequence: Synthetic oligonucleotide
  Sense strand starting at position 2434 SEQ ID NO: 3116
agauccuggcguuaucaaa

SEQ ID NO: 242151 - RNA, 19 nt, Artificial Sequence
  Description of Artificial Sequence: Synthetic oligonucleotide
  Antisense strand to SEQ ID NO: 242150
uuugauaacgccaggaucu

SEQ ID NO: 242152 - RNA, 19 nt, Artificial Sequence
  Description of Artificial Sequence: Synthetic oligonucleotide
  Sense strand starting at position 2491 SEQ ID NO: 3116
guggaaaugagauguacau

SEQ ID NO: 242153 - RNA, 19 nt, Artificial Sequence
  Description of Artificial Sequence: Synthetic oligonucleotide
  Antisense strand to SEQ ID NO: 242152
auguacaucucauuuccac

SEQ ID NO: 242154 - RNA, 19 nt, Artificial Sequence
  Description of Artificial Sequence: Synthetic oligonucleotide
  Sense strand starting at position 2539 SEQ ID NO: 3116
aggcucucagguuaauuga

SEQ ID NO: 242155 - RNA, 19 nt, Artificial Sequence
  Description of Artificial Sequence: Synthetic oligonucleotide
  Antisense strand to SEQ ID NO: 242154
ucaauuaaccugagagccu

SEQ ID NO: 242156 - RNA, 19 nt, Artificial Sequence
  Description of Artificial Sequence: Synthetic oligonucleotide
  Sense strand starting at position 2542 SEQ ID NO: 3116
cucucagguuaauugauau

SEQ ID NO: 242157 - RNA, 19 nt, Artificial Sequence
  Description of Artificial Sequence: Synthetic oligonucleotide
  Antisense strand to SEQ ID NO: 242156
auaucaauuaaccugagag

SEQ ID NO: 242158 - RNA, 19 nt, Artificial Sequence
  Description of Artificial Sequence: Synthetic oligonucleotide
  Sense strand starting at position 2565 SEQ ID NO: 3116
uggaaaucaugcccaugaa

SEQ ID NO: 242159 - RNA, 19 nt, Artificial Sequence
  Description of Artificial Sequence: Synthetic oligonucleotide
  Antisense strand to SEQ ID NO: 242158
uucaugggcaugauuucca

SEQ ID NO: 242160 - RNA, 19 nt, Artificial Sequence
  Description of Artificial Sequence: Synthetic oligonucleotide
  Sense strand starting at position 2658 SEQ ID NO: 3116
gcauuaggcuugcugagag

SEQ ID NO: 242161 - RNA, 19 nt, Artificial Sequence
  Description of Artificial Sequence: Synthetic oligonucleotide
  Antisense strand to SEQ ID NO: 242160
cucucagcaagccuaaugc

SEQ ID NO: 242162 - RNA, 19 nt, Artificial Sequence
  Description of Artificial Sequence: Synthetic oligonucleotide
  Sense strand starting at position 2699 SEQ ID NO: 3116
aacguucugaggcgggaaa

SEQ ID NO: 242163 - RNA, 19 nt, Artificial Sequence
  Description of Artificial Sequence: Synthetic oligonucleotide
  Antisense strand to SEQ ID NO: 242162
uuucccgccucagaacguu

SEQ ID NO: 242164 - RNA, 19 nt, Artificial Sequence
  Description of Artificial Sequence: Synthetic oligonucleotide
  Sense strand starting at position 2737 SEQ ID NO: 3116
ggugacauuuccucgggca

SEQ ID NO: 242165 - RNA, 19 nt, Artificial Sequence
  Description of Artificial Sequence: Synthetic oligonucleotide
  Antisense strand to SEQ ID NO: 242164
ugcccgaggaaaugucacc

SEQ ID NO: 242166 - RNA, 19 nt, Artificial Sequence
  Description of Artificial Sequence: Synthetic oligonucleotide
  Sense strand starting at position 2738 SEQ ID NO: 3116
gugacauuuccucgggcag

SEQ ID NO: 242167 - RNA, 19 nt, Artificial Sequence
  Description of Artificial Sequence: Synthetic oligonucleotide
  Antisense strand to SEQ ID NO: 242166
cugcccgaggaaaugucac

SEQ ID NO: 242168 - RNA, 19 nt, Artificial Sequence
  Description of Artificial Sequence: Synthetic oligonucleotide
  Sense strand starting at position 2740 SEQ ID NO: 3116
gacauuuccucgggcagga

SEQ ID NO: 242169 - RNA, 19 nt, Artificial Sequence
  Description of Artificial Sequence: Synthetic oligonucleotide
  Antisense strand to SEQ ID NO: 242168
uccugcccgaggaaauguc

SEQ ID NO: 242170 - RNA, 19 nt, Artificial Sequence
  Description of Artificial Sequence: Synthetic oligonucleotide
  Sense strand starting at position 2937 SEQ ID NO: 3116
ccgccaagccugugaaauu

SEQ ID NO: 242171 - RNA, 19 nt, Artificial Sequence
  Description of Artificial Sequence: Synthetic oligonucleotide
  Antisense strand to SEQ ID NO: 242170
aauuucacaggcuuggcgg

SEQ ID NO: 242172 - RNA, 19 nt, Artificial Sequence
  Description of Artificial Sequence: Synthetic oligonucleotide
  Sense strand starting at position 2976 SEQ ID NO: 3116
gccucaaaguuacgaauuu

SEQ ID NO: 242173 - RNA, 19 nt, Artificial Sequence
  Description of Artificial Sequence: Synthetic oligonucleotide
  Antisense strand to SEQ ID NO: 242172
aaauucguaacuuugaggc

SEQ ID NO: 242174 - RNA, 19 nt, Artificial Sequence
  Description of Artificial Sequence: Synthetic oligonucleotide
  Sense strand starting at position 3024 SEQ ID NO: 3116
ccuaguuugugagcagaga

SEQ ID NO: 242175 - RNA, 19 nt, Artificial Sequence
  Description of Artificial Sequence: Synthetic oligonucleotide
  Antisense strand to SEQ ID NO: 242174
ucucugcucacaaacuagg

SEQ ID NO: 242176 - RNA, 19 nt, Artificial Sequence
  Description of Artificial Sequence: Synthetic oligonucleotide
  Sense strand starting at position 3025 SEQ ID NO: 3116
cuaguuugugagcagagau

SEQ ID NO: 242177 - RNA, 19 nt, Artificial Sequence
  Description of Artificial Sequence: Synthetic oligonucleotide
  Antisense strand to SEQ ID NO: 242176
aucucugcucacaaacuag

SEQ ID NO: 242178 - RNA, 19 nt, Artificial Sequence
  Description of Artificial Sequence: Synthetic oligonucleotide
  Sense strand starting at position 3068 SEQ ID NO: 3116
ggcccagucgagugugaau

SEQ ID NO: 242179 - RNA, 19 nt, Artificial Sequence
  Description of Artificial Sequence: Synthetic oligonucleotide
  Antisense strand to SEQ ID NO: 242178
auucacacucgacugggcc

SEQ ID NO: 242180 - RNA, 19 nt, Artificial Sequence
  Description of Artificial Sequence: Synthetic oligonucleotide
  Sense strand starting at position 3075 SEQ ID NO: 3116
ucgagugugaaucgacaaa

SEQ ID NO: 242181 - RNA, 19 nt, Artificial Sequence
  Description of Artificial Sequence: Synthetic oligonucleotide
  Antisense strand to SEQ ID NO: 242180
uuugucgauucacacucga

SEQ ID NO: 242182 - RNA, 19 nt, Artificial Sequence
  Description of Artificial Sequence: Synthetic oligonucleotide
  Sense strand starting at position 3260 SEQ ID NO: 3116
gggcucuuugggugacuga

SEQ ID NO: 242183 - RNA, 19 nt, Artificial Sequence
  Description of Artificial Sequence: Synthetic oligonucleotide
  Antisense strand to SEQ ID NO: 242182
ucagucacccaaagagccc

SEQ ID NO: 242184 - RNA, 19 nt, Artificial Sequence
  Description of Artificial Sequence: Synthetic oligonucleotide
  Sense strand starting at position 3283 SEQ ID NO: 3116
cguuuccuucgggauaggu

SEQ ID NO: 242185 - RNA, 19 nt, Artificial Sequence
  Description of Artificial Sequence: Synthetic oligonucleotide
  Antisense strand to SEQ ID NO: 242184
accuaucccgaaggaaacg

SEQ ID NO: 242186 - RNA, 19 nt, Artificial Sequence
  Description of Artificial Sequence: Synthetic oligonucleotide
  Sense strand starting at position 3322 SEQ ID NO: 3116
ggcccacagccuuggaaau

SEQ ID NO: 242187 - RNA, 19 nt, Artificial Sequence
  Description of Artificial Sequence: Synthetic oligonucleotide
  Antisense strand to SEQ ID NO: 242186
auuuccaaggcugugggcc

SEQ ID NO: 242188 - RNA, 19 nt, Artificial Sequence
  Description of Artificial Sequence: Synthetic oligonucleotide
  Sense strand starting at position 3380 SEQ ID NO: 3116
gccggcuuuccacaccaaa

SEQ ID NO: 242189 - RNA, 19 nt, Artificial Sequence
  Description of Artificial Sequence: Synthetic oligonucleotide
  Antisense strand to SEQ ID NO: 242188
uuugguguggaaagccggc

SEQ ID NO: 242190 - RNA, 19 nt, Artificial Sequence
  Description of Artificial Sequence: Synthetic oligonucleotide
  Sense strand starting at position 3416 SEQ ID NO: 3116
cccagacggccucagagau

SEQ ID NO: 242191 - RNA, 19 nt, Artificial Sequence
  Description of Artificial Sequence: Synthetic oligonucleotide
  Antisense strand to SEQ ID NO: 242190
aucucugaggccgucuggg

SEQ ID NO: 242192 - RNA, 19 nt, Artificial Sequence
  Description of Artificial Sequence: Synthetic oligonucleotide
  Sense strand starting at position 3570 SEQ ID NO: 3116
cagacauagcaaggugaua

SEQ ID NO: 242193 - RNA, 19 nt, Artificial Sequence
  Description of Artificial Sequence: Synthetic oligonucleotide
  Antisense strand to SEQ ID NO: 242192
uaucaccuugcuaugucug

SEQ ID NO: 242194 - RNA, 19 nt, Artificial Sequence
  Description of Artificial Sequence: Synthetic oligonucleotide
  Sense strand starting at position 3582 SEQ ID NO: 3116
ggugauaauguccgacuca

SEQ ID NO: 242195 - RNA, 19 nt, Artificial Sequence
  Description of Artificial Sequence: Synthetic oligonucleotide
  Antisense strand to SEQ ID NO: 242194
ugagucggacauuaucacc

SEQ ID NO: 242196 - RNA, 19 nt, Artificial Sequence
  Description of Artificial Sequence: Synthetic oligonucleotide
  Sense strand starting at position 3626 SEQ ID NO: 3116
agguaaaggaaucguuaau

SEQ ID NO: 242197 - RNA, 19 nt, Artificial Sequence
  Description of Artificial Sequence: Synthetic oligonucleotide
  Antisense strand to SEQ ID NO: 242196
auuaacgauuccuuuaccu

SEQ ID NO: 242198 - RNA, 19 nt, Artificial Sequence
  Description of Artificial Sequence: Synthetic oligonucleotide
  Sense strand starting at position 3638 SEQ ID NO: 3116
cguuaaugaaucuggagau

SEQ ID NO: 242199 - RNA, 19 nt, Artificial Sequence
  Description of Artificial Sequence: Synthetic oligonucleotide
  Antisense strand to SEQ ID NO: 242198
aucuccagauucauuaacg

SEQ ID NO: 242200 - RNA, 19 nt, Artificial Sequence
  Description of Artificial Sequence: Synthetic oligonucleotide
  Sense strand starting at position 3639 SEQ ID NO: 3116
guuaaugaaucuggagaug

SEQ ID NO: 242201 - RNA, 19 nt, Artificial Sequence
  Description of Artificial Sequence: Synthetic oligonucleotide
  Antisense strand to SEQ ID NO: 242200
caucuccagauucauuaac

SEQ ID NO: 242202 - RNA, 19 nt, Artificial Sequence
  Description of Artificial Sequence: Synthetic oligonucleotide
  Sense strand starting at position 3655 SEQ ID NO: 3116
augacagaggcaugcuuua

SEQ ID NO: 242203 - RNA, 19 nt, Artificial Sequence
  Description of Artificial Sequence: Synthetic oligonucleotide
  Antisense strand to SEQ ID NO: 242202
uaaagcaugccucugucau

SEQ ID NO: 242204 - RNA, 19 nt, Artificial Sequence
  Description of Artificial Sequence: Synthetic oligonucleotide
  Sense strand starting at position 3812 SEQ ID NO: 3116
aggcgaacgaauugauucu

SEQ ID NO: 242205 - RNA, 19 nt, Artificial Sequence
  Description of Artificial Sequence: Synthetic oligonucleotide
  Antisense strand to SEQ ID NO: 242204
agaaucaauucguucgccu

SEQ ID NO: 242206 - RNA, 19 nt, Artificial Sequence
  Description of Artificial Sequence: Synthetic oligonucleotide
  Sense strand starting at position 3818 SEQ ID NO: 3116
acgaauugauucugacaau

SEQ ID NO: 242207 - RNA, 19 nt, Artificial Sequence
  Description of Artificial Sequence: Synthetic oligonucleotide
  Antisense strand to SEQ ID NO: 242206
auugucagaaucaauucgu

SEQ ID NO: 242208 - RNA, 19 nt, Artificial Sequence
  Description of Artificial Sequence: Synthetic oligonucleotide
  Sense strand starting at position 3819 SEQ ID NO: 3116
cgaauugauucugacaauu

SEQ ID NO: 242209 - RNA, 19 nt, Artificial Sequence
  Description of Artificial Sequence: Synthetic oligonucleotide
  Antisense strand to SEQ ID NO: 242208
aauugucagaaucaauucg

SEQ ID NO: 242210 - RNA, 19 nt, Artificial Sequence
  Description of Artificial Sequence: Synthetic oligonucleotide
  Sense strand starting at position 3888 SEQ ID NO: 3116
ucaauaaagccuuggagcu

SEQ ID NO: 242211 - RNA, 19 nt, Artificial Sequence
  Description of Artificial Sequence: Synthetic oligonucleotide
  Antisense strand to SEQ ID NO: 242210
agcuccaaggcuuuauuga

SEQ ID NO: 242212 - RNA, 19 nt, Artificial Sequence
  Description of Artificial Sequence: Synthetic oligonucleotide
  Sense strand starting at position 3900 SEQ ID NO: 3116
uggagcuaccuuuguaauu

SEQ ID NO: 242213 - RNA, 19 nt, Artificial Sequence
  Description of Artificial Sequence: Synthetic oligonucleotide
  Antisense strand to SEQ ID NO: 242212
aauuacaaagguagcucca

SEQ ID NO: 242214 - RNA, 19 nt, Artificial Sequence
  Description of Artificial Sequence: Synthetic oligonucleotide
  Sense strand starting at position 3901 SEQ ID NO: 3116
ggagcuaccuuuguaauug

SEQ ID NO: 242215 - RNA, 19 nt, Artificial Sequence
  Description of Artificial Sequence: Synthetic oligonucleotide
  Antisense strand to SEQ ID NO: 242214
caauuacaaagguagcucc

SEQ ID NO: 242216 - RNA, 19 nt, Artificial Sequence
  Description of Artificial Sequence: Synthetic oligonucleotide
  Sense strand starting at position 3974 SEQ ID NO: 3116
guguuugaacccuggauaa

SEQ ID NO: 242217 - RNA, 19 nt, Artificial Sequence
  Description of Artificial Sequence: Synthetic oligonucleotide
  Antisense strand to SEQ ID NO: 242216
uuauccaggguucaaacac

SEQ ID NO: 242218 - RNA, 19 nt, Artificial Sequence
  Description of Artificial Sequence: Synthetic oligonucleotide
  Sense strand starting at position 910 SEQ ID NO: 3118
cucuguuuaccguacuaac

SEQ ID NO: 242219 - RNA, 19 nt, Artificial Sequence
  Description of Artificial Sequence: Synthetic oligonucleotide
  Antisense strand to SEQ ID NO: 242218
guuaguacgguaaacagag

SEQ ID NO: 242220 - RNA, 19 nt, Artificial Sequence
  Description of Artificial Sequence: Synthetic oligonucleotide
  Sense strand starting at position 970 SEQ ID NO: 3118
gaugcauguuguucgccua

SEQ ID NO: 242221 - RNA, 19 nt, Artificial Sequence
  Description of Artificial Sequence: Synthetic oligonucleotide
  Antisense strand to SEQ ID NO: 242220
uaggcgaacaacaugcauc

SEQ ID NO: 242222 - RNA, 19 nt, Artificial Sequence
  Description of Artificial Sequence: Synthetic oligonucleotide
  Sense strand starting at position 1093 SEQ ID NO: 3118
gcacuuacuugggucaagu

SEQ ID NO: 242223 - RNA, 19 nt, Artificial Sequence
  Description of Artificial Sequence: Synthetic oligonucleotide
  Antisense strand to SEQ ID NO: 242222
acuugacccaaguaagugc

SEQ ID NO: 242224 - RNA, 19 nt, Artificial Sequence
  Description of Artificial Sequence: Synthetic oligonucleotide
  Sense strand starting at position 2002 SEQ ID NO: 3118
cggcccacgugaucauauu

SEQ ID NO: 242225 - RNA, 19 nt, Artificial Sequence
  Description of Artificial Sequence: Synthetic oligonucleotide
  Antisense strand to SEQ ID NO: 242224
aauaugaucacgugggccg

SEQ ID NO: 242226 - RNA, 19 nt, Artificial Sequence
  Description of Artificial Sequence: Synthetic oligonucleotide
  Sense strand starting at position 2020 SEQ ID NO: 3118
uuaccaauaccgggaguaa

SEQ ID NO: 242227 - RNA, 19 nt, Artificial Sequence
  Description of Artificial Sequence: Synthetic oligonucleotide
  Antisense strand to SEQ ID NO: 242226
uuacucccgguauugguaa

SEQ ID NO: 242228 - RNA, 19 nt, Artificial Sequence
  Description of Artificial Sequence: Synthetic oligonucleotide
  Sense strand starting at position 2034 SEQ ID NO: 3118
aguaaaucaguccgcuaaa

SEQ ID NO: 242229 - RNA, 19 nt, Artificial Sequence
  Description of Artificial Sequence: Synthetic oligonucleotide
  Antisense strand to SEQ ID NO: 242228
uuuagcggacugauuuacu

SEQ ID NO: 242230 - RNA, 19 nt, Artificial Sequence
  Description of Artificial Sequence: Synthetic oligonucleotide
  Sense strand starting at position 2035 SEQ ID NO: 3118
guaaaucaguccgcuaaac

SEQ ID NO: 242231 - RNA, 19 nt, Artificial Sequence
  Description of Artificial Sequence: Synthetic oligonucleotide
  Antisense strand to SEQ ID NO: 242230
guuuagcggacugauuuac

SEQ ID NO: 242232 - RNA, 19 nt, Artificial Sequence
  Description of Artificial Sequence: Synthetic oligonucleotide
  Sense strand starting at position 2037 SEQ ID NO: 3118
aaaucaguccgcuaaacug

SEQ ID NO: 242233 - RNA, 19 nt, Artificial Sequence
  Description of Artificial Sequence: Synthetic oligonucleotide
  Antisense strand to SEQ ID NO: 242232
caguuuagcggacugauuu

SEQ ID NO: 242234 - RNA, 19 nt, Artificial Sequence
  Description of Artificial Sequence: Synthetic oligonucleotide
  Sense strand starting at position 2215 SEQ ID NO: 3118
ggacuauuuguucgcuucu

SEQ ID NO: 242235 - RNA, 19 nt, Artificial Sequence
  Description of Artificial Sequence: Synthetic oligonucleotide
  Antisense strand to SEQ ID NO: 242234
agaagcgaacaaauagucc

SEQ ID NO: 242236 - RNA, 19 nt, Artificial Sequence
  Description of Artificial Sequence: Synthetic oligonucleotide
  Sense strand starting at position 2216 SEQ ID NO: 3118
gacuauuuguucgcuucuu

SEQ ID NO: 242237 - RNA, 19 nt, Artificial Sequence
  Description of Artificial Sequence: Synthetic oligonucleotide
  Antisense strand to SEQ ID NO: 242236
aagaagcgaacaaauaguc

SEQ ID NO: 242238 - RNA, 19 nt, Artificial Sequence
  Description of Artificial Sequence: Synthetic oligonucleotide
  Sense strand starting at position 2467 SEQ ID NO: 3118
cagcuugucguguuguuua

SEQ ID NO: 242239 - RNA, 19 nt, Artificial Sequence
  Description of Artificial Sequence: Synthetic oligonucleotide
  Antisense strand to SEQ ID NO: 242238
uaaacaacacgacaagcug

SEQ ID NO: 242240 - RNA, 19 nt, Artificial Sequence
  Description of Artificial Sequence: Synthetic oligonucleotide
  Sense strand starting at position 2469 SEQ ID NO: 3118
gcuugucguguuguuuaaa

SEQ ID NO: 242241 - RNA, 19 nt, Artificial Sequence
  Description of Artificial Sequence: Synthetic oligonucleotide
  Antisense strand to SEQ ID NO: 242240
uuuaaacaacacgacaagc

SEQ ID NO: 242242 - RNA, 19 nt, Artificial Sequence
  Description of Artificial Sequence: Synthetic oligonucleotide
  Sense strand starting at position 2492 SEQ ID NO: 3118
guggaagaccucuguaaug

SEQ ID NO: 242243 - RNA, 19 nt, Artificial Sequence
  Description of Artificial Sequence: Synthetic oligonucleotide
  Antisense strand to SEQ ID NO: 242242
cauuacagaggucuuccac

SEQ ID NO: 242244 - RNA, 19 nt, Artificial Sequence
  Description of Artificial Sequence: Synthetic oligonucleotide
  Sense strand starting at position 2497 SEQ ID NO: 3118
agaccucuguaaugauauu

SEQ ID NO: 242245 - RNA, 19 nt, Artificial Sequence
  Description of Artificial Sequence: Synthetic oligonucleotide
  Antisense strand to SEQ ID NO: 242244
aauaucauuacagaggucu

SEQ ID NO: 242246 - RNA, 19 nt, Artificial Sequence
  Description of Artificial Sequence: Synthetic oligonucleotide
  Sense strand starting at position 2538 SEQ ID NO: 3118
ugagguguauuugauuaua

SEQ ID NO: 242247 - RNA, 19 nt, Artificial Sequence
  Description of Artificial Sequence: Synthetic oligonucleotide
  Antisense strand to SEQ ID NO: 242246
uauaaucaaauacaccuca

SEQ ID NO: 242248 - RNA, 19 nt, Artificial Sequence
  Description of Artificial Sequence: Synthetic oligonucleotide
  Sense strand starting at position 2554 SEQ ID NO: 3118
auagauuaaugugucccua

SEQ ID NO: 242249 - RNA, 19 nt, Artificial Sequence
  Description of Artificial Sequence: Synthetic oligonucleotide
  Antisense strand to SEQ ID NO: 242248
uagggacacauuaaucuau

SEQ ID NO: 242250 - RNA, 19 nt, Artificial Sequence
  Description of Artificial Sequence: Synthetic oligonucleotide
  Sense strand starting at position 2556 SEQ ID NO: 3118
agauuaaugugucccuaau

SEQ ID NO: 242251 - RNA, 19 nt, Artificial Sequence
  Description of Artificial Sequence: Synthetic oligonucleotide
  Antisense strand to SEQ ID NO: 242250
auuagggacacauuaaucu

SEQ ID NO: 242252 - RNA, 19 nt, Artificial Sequence
  Description of Artificial Sequence: Synthetic oligonucleotide
  Sense strand starting at position 2794 SEQ ID NO: 3118
cuucgucuucuccgaugau

SEQ ID NO: 242253 - RNA, 19 nt, Artificial Sequence
  Description of Artificial Sequence: Synthetic oligonucleotide
  Antisense strand to SEQ ID NO: 242252
aucaucggagaagacgaag

SEQ ID NO: 242254 - RNA, 19 nt, Artificial Sequence
  Description of Artificial Sequence: Synthetic oligonucleotide
  Sense strand starting at position 2797 SEQ ID NO: 3118
cgucuucuccgaugaugcu

SEQ ID NO: 242255 - RNA, 19 nt, Artificial Sequence
  Description of Artificial Sequence: Synthetic oligonucleotide
  Antisense strand to SEQ ID NO: 242254
agcaucaucggagaagacg

SEQ ID NO: 242256 - RNA, 19 nt, Artificial Sequence
  Description of Artificial Sequence: Synthetic oligonucleotide
  Sense strand starting at position 2992 SEQ ID NO: 3118
uggcuagguccuugggaca

SEQ ID NO: 242257 - RNA, 19 nt, Artificial Sequence
  Description of Artificial Sequence: Synthetic oligonucleotide
  Antisense strand to SEQ ID NO: 242256
ugucccaaggaccuagcca

SEQ ID NO: 242258 - RNA, 19 nt, Artificial Sequence
  Description of Artificial Sequence: Synthetic oligonucleotide
  Sense strand starting at position 3053 SEQ ID NO: 3118
agccuugaaucugagggaa

SEQ ID NO: 242259 - RNA, 19 nt, Artificial Sequence
  Description of Artificial Sequence: Synthetic oligonucleotide
  Antisense strand to SEQ ID NO: 242258
uucccucagauucaaggcu

SEQ ID NO: 242260 - RNA, 19 nt, Artificial Sequence
  Description of Artificial Sequence: Synthetic oligonucleotide
  Sense strand starting at position 3055 SEQ ID NO: 3118
ccuugaaucugagggaaau

SEQ ID NO: 242261 - RNA, 19 nt, Artificial Sequence
  Description of Artificial Sequence: Synthetic oligonucleotide
  Antisense strand to SEQ ID NO: 242260
auuucccucagauucaagg

SEQ ID NO: 242262 - RNA, 19 nt, Artificial Sequence
  Description of Artificial Sequence: Synthetic oligonucleotide
  Sense strand starting at position 3068 SEQ ID NO: 3118
ggaaaugcccauugucacu

SEQ ID NO: 242263 - RNA, 19 nt, Artificial Sequence
  Description of Artificial Sequence: Synthetic oligonucleotide
  Antisense strand to SEQ ID NO: 242262
agugacaaugggcauuucc

SEQ ID NO: 242264 - RNA, 19 nt, Artificial Sequence
  Description of Artificial Sequence: Synthetic oligonucleotide
  Sense strand starting at position 3162 SEQ ID NO: 3118
gggcauauuccuugcucua

SEQ ID NO: 242265 - RNA, 19 nt, Artificial Sequence
  Description of Artificial Sequence: Synthetic oligonucleotide
  Antisense strand to SEQ ID NO: 242264
uagagcaaggaauaugccc

SEQ ID NO: 242266 - RNA, 19 nt, Artificial Sequence
  Description of Artificial Sequence: Synthetic oligonucleotide
  Sense strand starting at position 3239 SEQ ID NO: 3118
gcggguaaauggcuauuua

SEQ ID NO: 242267 - RNA, 19 nt, Artificial Sequence
  Description of Artificial Sequence: Synthetic oligonucleotide
  Antisense strand to SEQ ID NO: 242266
uaaauagccauuuacccgc

SEQ ID NO: 242268 - RNA, 19 nt, Artificial Sequence
  Description of Artificial Sequence: Synthetic oligonucleotide
  Sense strand starting at position 3249 SEQ ID NO: 3118
ggcuauuuauggccugauu

SEQ ID NO: 242269 - RNA, 19 nt, Artificial Sequence
  Description of Artificial Sequence: Synthetic oligonucleotide
  Antisense strand to SEQ ID NO: 242268
aaucaggccauaaauagcc

SEQ ID NO: 242270 - RNA, 19 nt, Artificial Sequence
  Description of Artificial Sequence: Synthetic oligonucleotide
  Sense strand starting at position 3258 SEQ ID NO: 3118
uggccugauugauuaccuu

SEQ ID NO: 242271 - RNA, 19 nt, Artificial Sequence
  Description of Artificial Sequence: Synthetic oligonucleotide
  Antisense strand to SEQ ID NO: 242270
aagguaaucaaucaggcca

SEQ ID NO: 242272 - RNA, 19 nt, Artificial Sequence
  Description of Artificial Sequence: Synthetic oligonucleotide
  Sense strand starting at position 3278 SEQ ID NO: 3118
gccaauagcuuucugauuu

SEQ ID NO: 242273 - RNA, 19 nt, Artificial Sequence
  Description of Artificial Sequence: Synthetic oligonucleotide
  Antisense strand to SEQ ID NO: 242272
aaaucagaaagcuauuggc

SEQ ID NO: 242274 - RNA, 19 nt, Artificial Sequence
  Description of Artificial Sequence: Synthetic oligonucleotide
  Sense strand starting at position 3329 SEQ ID NO: 3118
caggcuuuccucggauaca

SEQ ID NO: 242275 - RNA, 19 nt, Artificial Sequence
  Description of Artificial Sequence: Synthetic oligonucleotide
  Antisense strand to SEQ ID NO: 242274
uguauccgaggaaagccug

SEQ ID NO: 242276 - RNA, 19 nt, Artificial Sequence
  Description of Artificial Sequence: Synthetic oligonucleotide
  Sense strand starting at position 3330 SEQ ID NO: 3118
aggcuuuccucggauacau

SEQ ID NO: 242277 - RNA, 19 nt, Artificial Sequence
  Description of Artificial Sequence: Synthetic oligonucleotide
  Antisense strand to SEQ ID NO: 242276
auguauccgaggaaagccu

SEQ ID NO: 242278 - RNA, 19 nt, Artificial Sequence
  Description of Artificial Sequence: Synthetic oligonucleotide
  Sense strand starting at position 3350 SEQ ID NO: 3118
gcccgcuaucaacagcuaa

SEQ ID NO: 242279 - RNA, 19 nt, Artificial Sequence
  Description of Artificial Sequence: Synthetic oligonucleotide
  Antisense strand to SEQ ID NO: 242278
uuagcuguugauagcgggc

SEQ ID NO: 242280 - RNA, 19 nt, Artificial Sequence
  Description of Artificial Sequence: Synthetic oligonucleotide
  Sense strand starting at position 3377 SEQ ID NO: 3118
cccacaugaucggagaaac

SEQ ID NO: 242281 - RNA, 19 nt, Artificial Sequence
  Description of Artificial Sequence: Synthetic oligonucleotide
  Antisense strand to SEQ ID NO: 242280
guuucuccgaucauguggg

SEQ ID NO: 242282 - RNA, 19 nt, Artificial Sequence
  Description of Artificial Sequence: Synthetic oligonucleotide
  Sense strand starting at position 3522 SEQ ID NO: 3118
agaguucugucuuggaaug

SEQ ID NO: 242283 - RNA, 19 nt, Artificial Sequence
  Description of Artificial Sequence: Synthetic oligonucleotide
  Antisense strand to SEQ ID NO: 242282
cauuccaagacagaacucu

SEQ ID NO: 242284 - RNA, 19 nt, Artificial Sequence
  Description of Artificial Sequence: Synthetic oligonucleotide
  Sense strand starting at position 3523 SEQ ID NO: 3118
gaguucugucuuggaaugu

SEQ ID NO: 242285 - RNA, 19 nt, Artificial Sequence
  Description of Artificial Sequence: Synthetic oligonucleotide
  Antisense strand to SEQ ID NO: 242284
acauuccaagacagaacuc

SEQ ID NO: 242286 - RNA, 19 nt, Artificial Sequence
  Description of Artificial Sequence: Synthetic oligonucleotide
  Sense strand starting at position 3532 SEQ ID NO: 3118
cuuggaauguuccugguuu

SEQ ID NO: 242287 - RNA, 19 nt, Artificial Sequence
  Description of Artificial Sequence: Synthetic oligonucleotide
  Antisense strand to SEQ ID NO: 242286
aaaccaggaacauuccaag

SEQ ID NO: 242288 - RNA, 19 nt, Artificial Sequence
  Description of Artificial Sequence: Synthetic oligonucleotide
  Sense strand starting at position 3616 SEQ ID NO: 3118
accuaaauggaucguucuu

SEQ ID NO: 242289 - RNA, 19 nt, Artificial Sequence
  Description of Artificial Sequence: Synthetic oligonucleotide
  Antisense strand to SEQ ID NO: 242288
aagaacgauccauuuaggu

SEQ ID NO: 242290 - RNA, 19 nt, Artificial Sequence
  Description of Artificial Sequence: Synthetic oligonucleotide
  Sense strand starting at position 3621 SEQ ID NO: 3118
aauggaucguucuuaggga

SEQ ID NO: 242291 - RNA, 19 nt, Artificial Sequence
  Description of Artificial Sequence: Synthetic oligonucleotide
  Antisense strand to SEQ ID NO: 242290
ucccuaagaacgauccauu

SEQ ID NO: 242292 - RNA, 19 nt, Artificial Sequence
  Description of Artificial Sequence: Synthetic oligonucleotide
  Sense strand starting at position 3622 SEQ ID NO: 3118
auggaucguucuuagggaa

SEQ ID NO: 242293 - RNA, 19 nt, Artificial Sequence
  Description of Artificial Sequence: Synthetic oligonucleotide
  Antisense strand to SEQ ID NO: 242292
uucccuaagaacgauccau

SEQ ID NO: 242294 - RNA, 19 nt, Artificial Sequence
  Description of Artificial Sequence: Synthetic oligonucleotide
  Sense strand starting at position 3625 SEQ ID NO: 3118
gaucguucuuagggaaaca

SEQ ID NO: 242295 - RNA, 19 nt, Artificial Sequence
  Description of Artificial Sequence: Synthetic oligonucleotide
  Antisense strand to SEQ ID NO: 242294
uguuucccuaagaacgauc

SEQ ID NO: 242296 - RNA, 19 nt, Artificial Sequence
  Description of Artificial Sequence: Synthetic oligonucleotide
  Sense strand starting at position 3626 SEQ ID NO: 3118
aucguucuuagggaaacau

SEQ ID NO: 242297 - RNA, 19 nt, Artificial Sequence
  Description of Artificial Sequence: Synthetic oligonucleotide
  Antisense strand to SEQ ID NO: 242296
auguuucccuaagaacgau

SEQ ID NO: 242298 - RNA, 19 nt, Artificial Sequence
  Description of Artificial Sequence: Synthetic oligonucleotide
  Sense strand starting at position 81 SEQ ID NO: 3122
gugagaucuuggcucccuu

SEQ ID NO: 242299 - RNA, 19 nt, Artificial Sequence
  Description of Artificial Sequence: Synthetic oligonucleotide
  Antisense strand to SEQ ID NO: 242298
aagggagccaagaucucac

SEQ ID NO: 242300 - RNA, 19 nt, Artificial Sequence
  Description of Artificial Sequence: Synthetic oligonucleotide
  Sense strand starting at position 88 SEQ ID NO: 3122
cuuggcucccuugguuaaa

SEQ ID NO: 242301 - RNA, 19 nt, Artificial Sequence
  Description of Artificial Sequence: Synthetic oligonucleotide
  Antisense strand to SEQ ID NO: 242300
uuuaaccaagggagccaag

SEQ ID NO: 242302 - RNA, 19 nt, Artificial Sequence
  Description of Artificial Sequence: Synthetic oligonucleotide
  Sense strand starting at position 241 SEQ ID NO: 3122
cagagagugagucguggua

SEQ ID NO: 242303 - RNA, 19 nt, Artificial Sequence
  Description of Artificial Sequence: Synthetic oligonucleotide
  Antisense strand to SEQ ID NO: 242302
uaccacgacucacucucug

SEQ ID NO: 242304 - RNA, 19 nt, Artificial Sequence
  Description of Artificial Sequence: Synthetic oligonucleotide
  Sense strand starting at position 243 SEQ ID NO: 3122
gagagugagucgugguaag

SEQ ID NO: 242305 - RNA, 19 nt, Artificial Sequence
  Description of Artificial Sequence: Synthetic oligonucleotide
  Antisense strand to SEQ ID NO: 242304
cuuaccacgacucacucuc

SEQ ID NO: 242306 - RNA, 19 nt, Artificial Sequence
  Description of Artificial Sequence: Synthetic oligonucleotide
  Sense strand starting at position 244 SEQ ID NO: 3122
agagugagucgugguaaga

SEQ ID NO: 242307 - RNA, 19 nt, Artificial Sequence
  Description of Artificial Sequence: Synthetic oligonucleotide
  Antisense strand to SEQ ID NO: 242306
ucuuaccacgacucacucu

SEQ ID NO: 242308 - RNA, 19 nt, Artificial Sequence
  Description of Artificial Sequence: Synthetic oligonucleotide
  Sense strand starting at position 322 SEQ ID NO: 3122
uuuaaauuaagguguggga

SEQ ID NO: 242309 - RNA, 19 nt, Artificial Sequence
  Description of Artificial Sequence: Synthetic oligonucleotide
  Antisense strand to SEQ ID NO: 242308
ucccacaccuuaauuuaaa

SEQ ID NO: 242310 - RNA, 19 nt, Artificial Sequence
  Description of Artificial Sequence: Synthetic oligonucleotide
  Sense strand starting at position 324 SEQ ID NO: 3122
uaaauuaaggugugggacu

SEQ ID NO: 242311 - RNA, 19 nt, Artificial Sequence
  Description of Artificial Sequence: Synthetic oligonucleotide
  Antisense strand to SEQ ID NO: 242310
agucccacaccuuaauuua

SEQ ID NO: 242312 - RNA, 19 nt, Artificial Sequence
  Description of Artificial Sequence: Synthetic oligonucleotide
  Sense strand starting at position 325 SEQ ID NO: 3122
aaauuaaggugugggacua

SEQ ID NO: 242313 - RNA, 19 nt, Artificial Sequence
  Description of Artificial Sequence: Synthetic oligonucleotide
  Antisense strand to SEQ ID NO: 242312
uagucccacaccuuaauuu

SEQ ID NO: 242314 - RNA, 19 nt, Artificial Sequence
  Description of Artificial Sequence: Synthetic oligonucleotide
  Sense strand starting at position 347 SEQ ID NO: 3122
ggaggugucccauguggca

SEQ ID NO: 242315 - RNA, 19 nt, Artificial Sequence
  Description of Artificial Sequence: Synthetic oligonucleotide
  Antisense strand to SEQ ID NO: 242314
ugccacaugggacaccucc

SEQ ID NO: 242316 - RNA, 19 nt, Artificial Sequence
  Description of Artificial Sequence: Synthetic oligonucleotide
  Sense strand starting at position 470 SEQ ID NO: 3122
auccuccucugguggaauu

SEQ ID NO: 242317 - RNA, 19 nt, Artificial Sequence
  Description of Artificial Sequence: Synthetic oligonucleotide
  Antisense strand to SEQ ID NO: 242316
aauuccaccagaggaggau

SEQ ID NO: 242318 - RNA, 19 nt, Artificial Sequence
  Description of Artificial Sequence: Synthetic oligonucleotide
  Sense strand starting at position 806 SEQ ID NO: 3122
agcuaaacuuucucgaauc

SEQ ID NO: 242319 - RNA, 19 nt, Artificial Sequence
  Description of Artificial Sequence: Synthetic oligonucleotide
  Antisense strand to SEQ ID NO: 242318
gauucgagaaaguuuagcu

SEQ ID NO: 242320 - RNA, 19 nt, Artificial Sequence
  Description of Artificial Sequence: Synthetic oligonucleotide
  Sense strand starting at position 807 SEQ ID NO: 3122
gcuaaacuuucucgaaucu

SEQ ID NO: 242321 - RNA, 19 nt, Artificial Sequence
  Description of Artificial Sequence: Synthetic oligonucleotide
  Antisense strand to SEQ ID NO: 242320
agauucgagaaaguuuagc

SEQ ID NO: 242322 - RNA, 19 nt, Artificial Sequence
  Description of Artificial Sequence: Synthetic oligonucleotide
  Sense strand starting at position 826 SEQ ID NO: 3122
cagugcuucgcgguuaagu

SEQ ID NO: 242323 - RNA, 19 nt, Artificial Sequence
  Description of Artificial Sequence: Synthetic oligonucleotide
  Antisense strand to SEQ ID NO: 242322
acuuaaccgcgaagcacug

SEQ ID NO: 242324 - RNA, 19 nt, Artificial Sequence
  Description of Artificial Sequence: Synthetic oligonucleotide
  Sense strand starting at position 827 SEQ ID NO: 3122
agugcuucgcgguuaaguu

SEQ ID NO: 242325 - RNA, 19 nt, Artificial Sequence
  Description of Artificial Sequence: Synthetic oligonucleotide
  Antisense strand to SEQ ID NO: 242324
aacuuaaccgcgaagcacu

SEQ ID NO: 242326 - RNA, 19 nt, Artificial Sequence
  Description of Artificial Sequence: Synthetic oligonucleotide
  Sense strand starting at position 828 SEQ ID NO: 3122
gugcuucgcgguuaaguua

SEQ ID NO: 242327 - RNA, 19 nt, Artificial Sequence
  Description of Artificial Sequence: Synthetic oligonucleotide
  Antisense strand to SEQ ID NO: 242326
uaacuuaaccgcgaagcac

SEQ ID NO: 242328 - RNA, 19 nt, Artificial Sequence
  Description of Artificial Sequence: Synthetic oligonucleotide
  Sense strand starting at position 930 SEQ ID NO: 3122
aggagacgcuaauccaauu

SEQ ID NO: 242329 - RNA, 19 nt, Artificial Sequence
  Description of Artificial Sequence: Synthetic oligonucleotide
  Antisense strand to SEQ ID NO: 242328
aauuggauuagcgucuccu

SEQ ID NO: 242330 - RNA, 19 nt, Artificial Sequence
  Description of Artificial Sequence: Synthetic oligonucleotide
  Sense strand starting at position 2308 SEQ ID NO: 3122
cuggccugcugguauagaa

SEQ ID NO: 242331 - RNA, 19 nt, Artificial Sequence
  Description of Artificial Sequence: Synthetic oligonucleotide
  Antisense strand to SEQ ID NO: 242330
uucuauaccagcaggccag

SEQ ID NO: 242332 - RNA, 19 nt, Artificial Sequence
  Description of Artificial Sequence: Synthetic oligonucleotide
  Sense strand starting at position 2565 SEQ ID NO: 3122
gccguuuaggcgaguccau

SEQ ID NO: 242333 - RNA, 19 nt, Artificial Sequence
  Description of Artificial Sequence: Synthetic oligonucleotide
  Antisense strand to SEQ ID NO: 242332
auggacucgccuaaacggc

SEQ ID NO: 242334 - RNA, 19 nt, Artificial Sequence
  Description of Artificial Sequence: Synthetic oligonucleotide
  Sense strand starting at position 2566 SEQ ID NO: 3122
ccguuuaggcgaguccauu

SEQ ID NO: 242335 - RNA, 19 nt, Artificial Sequence
  Description of Artificial Sequence: Synthetic oligonucleotide
  Antisense strand to SEQ ID NO: 242334
aauggacucgccuaaacgg

SEQ ID NO: 242336 - RNA, 19 nt, Artificial Sequence
  Description of Artificial Sequence: Synthetic oligonucleotide
  Sense strand starting at position 2911 SEQ ID NO: 3122
aucguaugaggcugagaca

SEQ ID NO: 242337 - RNA, 19 nt, Artificial Sequence
  Description of Artificial Sequence: Synthetic oligonucleotide
  Antisense strand to SEQ ID NO: 242336
ugucucagccucauacgau

SEQ ID NO: 242338 - RNA, 19 nt, Artificial Sequence
  Description of Artificial Sequence: Synthetic oligonucleotide
  Sense strand starting at position 2912 SEQ ID NO: 3122
ucguaugaggcugagacaa

SEQ ID NO: 242339 - RNA, 19 nt, Artificial Sequence
  Description of Artificial Sequence: Synthetic oligonucleotide
  Antisense strand to SEQ ID NO: 242338
uugucucagccucauacga

SEQ ID NO: 242340 - RNA, 19 nt, Artificial Sequence
  Description of Artificial Sequence: Synthetic oligonucleotide
  Sense strand starting at position 3104 SEQ ID NO: 3122
auucuuacuuggcucugaa

SEQ ID NO: 242341 - RNA, 19 nt, Artificial Sequence
  Description of Artificial Sequence: Synthetic oligonucleotide
  Antisense strand to SEQ ID NO: 242340
uucagagccaaguaagaau

SEQ ID NO: 242342 - RNA, 19 nt, Artificial Sequence
  Description of Artificial Sequence: Synthetic oligonucleotide
  Sense strand starting at position 3134 SEQ ID NO: 3122
aaagcuagaccucgaggaa

SEQ ID NO: 242343 - RNA, 19 nt, Artificial Sequence
  Description of Artificial Sequence: Synthetic oligonucleotide
  Antisense strand to SEQ ID NO: 242342
uuccucgaggucuagcuuu

SEQ ID NO: 242344 - RNA, 19 nt, Artificial Sequence
  Description of Artificial Sequence: Synthetic oligonucleotide
  Sense strand starting at position 3137 SEQ ID NO: 3122
gcuagaccucgaggaaguu

SEQ ID NO: 242345 - RNA, 19 nt, Artificial Sequence
  Description of Artificial Sequence: Synthetic oligonucleotide
  Antisense strand to SEQ ID NO: 242344
aacuuccucgaggucuagc

SEQ ID NO: 242346 - RNA, 19 nt, Artificial Sequence
  Description of Artificial Sequence: Synthetic oligonucleotide
  Sense strand starting at position 3167 SEQ ID NO: 3122
gggcccuacagugaagauu

SEQ ID NO: 242347 - RNA, 19 nt, Artificial Sequence
  Description of Artificial Sequence: Synthetic oligonucleotide
  Antisense strand to SEQ ID NO: 242346
aaucuucacuguagggccc

SEQ ID NO: 242348 - RNA, 19 nt, Artificial Sequence
  Description of Artificial Sequence: Synthetic oligonucleotide
  Sense strand starting at position 3175 SEQ ID NO: 3122
cagugaagauuacaugaag

SEQ ID NO: 242349 - RNA, 19 nt, Artificial Sequence
  Description of Artificial Sequence: Synthetic oligonucleotide
  Antisense strand to SEQ ID NO: 242348
cuucauguaaucuucacug

SEQ ID NO: 242350 - RNA, 19 nt, Artificial Sequence
  Description of Artificial Sequence: Synthetic oligonucleotide
  Sense strand starting at position 3213 SEQ ID NO: 3122
gagugcaccgacugaugaa

SEQ ID NO: 242351 - RNA, 19 nt, Artificial Sequence
  Description of Artificial Sequence: Synthetic oligonucleotide
  Antisense strand to SEQ ID NO: 242350
uucaucagucggugcacuc

SEQ ID NO: 242352 - RNA, 19 nt, Artificial Sequence
  Description of Artificial Sequence: Synthetic oligonucleotide
  Sense strand starting at position 3445 SEQ ID NO: 3122
agcuguggucuucaugagu

SEQ ID NO: 242353 - RNA, 19 nt, Artificial Sequence
  Description of Artificial Sequence: Synthetic oligonucleotide
  Antisense strand to SEQ ID NO: 242352
acucaugaagaccacagcu

SEQ ID NO: 242354 - RNA, 19 nt, Artificial Sequence
  Description of Artificial Sequence: Synthetic oligonucleotide
  Sense strand starting at position 3448 SEQ ID NO: 3122
uguggucuucaugaguguu

SEQ ID NO: 242355 - RNA, 19 nt, Artificial Sequence
  Description of Artificial Sequence: Synthetic oligonucleotide
  Antisense strand to SEQ ID NO: 242354
aacacucaugaagaccaca

SEQ ID NO: 242356 - RNA, 19 nt, Artificial Sequence
  Description of Artificial Sequence: Synthetic oligonucleotide
  Sense strand starting at position 3454 SEQ ID NO: 3122
cuucaugaguguuucggaa

SEQ ID NO: 242357 - RNA, 19 nt, Artificial Sequence
  Description of Artificial Sequence: Synthetic oligonucleotide
  Antisense strand to SEQ ID NO: 242356
uuccgaaacacucaugaag

SEQ ID NO: 242358 - RNA, 19 nt, Artificial Sequence
  Description of Artificial Sequence: Synthetic oligonucleotide
  Sense strand starting at position 3458 SEQ ID NO: 3122
augaguguuucggaaguaa

SEQ ID NO: 242359 - RNA, 19 nt, Artificial Sequence
  Description of Artificial Sequence: Synthetic oligonucleotide
  Antisense strand to SEQ ID NO: 242358
uuacuuccgaaacacucau

SEQ ID NO: 242360 - RNA, 19 nt, Artificial Sequence
  Description of Artificial Sequence: Synthetic oligonucleotide
  Sense strand starting at position 3462 SEQ ID NO: 3122
guguuucggaaguaaacaa

SEQ ID NO: 242361 - RNA, 19 nt, Artificial Sequence
  Description of Artificial Sequence: Synthetic oligonucleotide
  Antisense strand to SEQ ID NO: 242360
uuguuuacuuccgaaacac

SEQ ID NO: 242362 - RNA, 19 nt, Artificial Sequence
  Description of Artificial Sequence: Synthetic oligonucleotide
  Sense strand starting at position 3486 SEQ ID NO: 3122
guuugaugaacacguagaa

SEQ ID NO: 242363 - RNA, 19 nt, Artificial Sequence
  Description of Artificial Sequence: Synthetic oligonucleotide
  Antisense strand to SEQ ID NO: 242362
uucuacguguucaucaaac

SEQ ID NO: 242364 - RNA, 19 nt, Artificial Sequence
  Description of Artificial Sequence: Synthetic oligonucleotide
  Sense strand starting at position 3527 SEQ ID NO: 3122
gcagauuucucccaagcac

SEQ ID NO: 242365 - RNA, 19 nt, Artificial Sequence
  Description of Artificial Sequence: Synthetic oligonucleotide
  Antisense strand to SEQ ID NO: 242364
gugcuugggagaaaucugc

SEQ ID NO: 242366 - RNA, 19 nt, Artificial Sequence
  Description of Artificial Sequence: Synthetic oligonucleotide
  Sense strand starting at position 3560 SEQ ID NO: 3122
ggcaaagucuguccacaga

SEQ ID NO: 242367 - RNA, 19 nt, Artificial Sequence
  Description of Artificial Sequence: Synthetic oligonucleotide
  Antisense strand to SEQ ID NO: 242366
ucuguggacagacuuugcc

SEQ ID NO: 242368 - RNA, 19 nt, Artificial Sequence
  Description of Artificial Sequence: Synthetic oligonucleotide
  Sense strand starting at position 3826 SEQ ID NO: 3122
cgcagaugcuuccucuguu

SEQ ID NO: 242369 - RNA, 19 nt, Artificial Sequence
  Description of Artificial Sequence: Synthetic oligonucleotide
  Antisense strand to SEQ ID NO: 242368
aacagaggaagcaucugcg

SEQ ID NO: 242370 - RNA, 19 nt, Artificial Sequence
  Description of Artificial Sequence: Synthetic oligonucleotide
  Sense strand starting at position 3827 SEQ ID NO: 3122
gcagaugcuuccucuguuu

SEQ ID NO: 242371 - RNA, 19 nt, Artificial Sequence
  Description of Artificial Sequence: Synthetic oligonucleotide
  Antisense strand to SEQ ID NO: 242370
aaacagaggaagcaucugc

SEQ ID NO: 242372 - RNA, 19 nt, Artificial Sequence
  Description of Artificial Sequence: Synthetic oligonucleotide
  Sense strand starting at position 3877 SEQ ID NO: 3122
gaccucuuauuccaggagu

SEQ ID NO: 242373 - RNA, 19 nt, Artificial Sequence
  Description of Artificial Sequence: Synthetic oligonucleotide
  Antisense strand to SEQ ID NO: 242372
acuccuggaauaagagguc

SEQ ID NO: 242374 - RNA, 19 nt, Artificial Sequence
  Description of Artificial Sequence: Synthetic oligonucleotide
  Sense strand starting at position 3879 SEQ ID NO: 3122
ccucuuauuccaggagugu

SEQ ID NO: 242375 - RNA, 19 nt, Artificial Sequence
  Description of Artificial Sequence: Synthetic oligonucleotide
  Antisense strand to SEQ ID NO: 242374
acacuccuggaauaagagg

SEQ ID NO: 242376 - RNA, 19 nt, Artificial Sequence
  Description of Artificial Sequence: Synthetic oligonucleotide
  Sense strand starting at position 3880 SEQ ID NO: 3122
cucuuauuccaggagugua

SEQ ID NO: 242377 - RNA, 19 nt, Artificial Sequence
  Description of Artificial Sequence: Synthetic oligonucleotide
  Antisense strand to SEQ ID NO: 242376
uacacuccuggaauaagag

SEQ ID NO: 242378 - RNA, 19 nt, Artificial Sequence
  Description of Artificial Sequence: Synthetic oligonucleotide
  Sense strand starting at position 5 SEQ ID NO: 3123
ugggucauuggcuggaguu

SEQ ID NO: 242379 - RNA, 19 nt, Artificial Sequence
  Description of Artificial Sequence: Synthetic oligonucleotide
  Antisense strand to SEQ ID NO: 242378
aacuccagccaaugaccca

SEQ ID NO: 242380 - RNA, 19 nt, Artificial Sequence
  Description of Artificial Sequence: Synthetic oligonucleotide
  Sense strand starting at position 6 SEQ ID NO: 3123
gggucauuggcuggaguuu

SEQ ID NO: 242381 - RNA, 19 nt, Artificial Sequence
  Description of Artificial Sequence: Synthetic oligonucleotide
  Antisense strand to SEQ ID NO: 242380
aaacuccagccaaugaccc

SEQ ID NO: 242382 - RNA, 19 nt, Artificial Sequence
  Description of Artificial Sequence: Synthetic oligonucleotide
  Sense strand starting at position 15 SEQ ID NO: 3123
gcuggaguuugggcaaauc

SEQ ID NO: 242383 - RNA, 19 nt, Artificial Sequence
  Description of Artificial Sequence: Synthetic oligonucleotide
  Antisense strand to SEQ ID NO: 242382
gauuugcccaaacuccagc

SEQ ID NO: 242384 - RNA, 19 nt, Artificial Sequence
  Description of Artificial Sequence: Synthetic oligonucleotide
  Sense strand starting at position 24 SEQ ID NO: 3123
ugggcaaaucucuguucuu

SEQ ID NO: 242385 - RNA, 19 nt, Artificial Sequence
  Description of Artificial Sequence: Synthetic oligonucleotide
  Antisense strand to SEQ ID NO: 242384
aagaacagagauuugccca

SEQ ID NO: 242386 - RNA, 19 nt, Artificial Sequence
  Description of Artificial Sequence: Synthetic oligonucleotide
  Sense strand starting at position 25 SEQ ID NO: 3123
gggcaaaucucuguucuuc

SEQ ID NO: 242387 - RNA, 19 nt, Artificial Sequence
  Description of Artificial Sequence: Synthetic oligonucleotide
  Antisense strand to SEQ ID NO: 242386
gaagaacagagauuugccc

SEQ ID NO: 242388 - RNA, 19 nt, Artificial Sequence
  Description of Artificial Sequence: Synthetic oligonucleotide
  Sense strand starting at position 61 SEQ ID NO: 3123
cugguuucuccacagauca

SEQ ID NO: 242389 - RNA, 19 nt, Artificial Sequence
  Description of Artificial Sequence: Synthetic oligonucleotide
  Antisense strand to SEQ ID NO: 242388
ugaucuguggagaaaccag

SEQ ID NO: 242390 - RNA, 19 nt, Artificial Sequence
  Description of Artificial Sequence: Synthetic oligonucleotide
  Sense strand starting at position 126 SEQ ID NO: 3123
guuaucacacauugacauu

SEQ ID NO: 242391 - RNA, 19 nt, Artificial Sequence
  Description of Artificial Sequence: Synthetic oligonucleotide
  Antisense strand to SEQ ID NO: 242390
aaugucaaugugugauaac

SEQ ID NO: 242392 - RNA, 19 nt, Artificial Sequence
  Description of Artificial Sequence: Synthetic oligonucleotide
  Sense strand starting at position 285 SEQ ID NO: 3123
accucaagagcucaguaau

SEQ ID NO: 242393 - RNA, 19 nt, Artificial Sequence
  Description of Artificial Sequence: Synthetic oligonucleotide
  Antisense strand to SEQ ID NO: 242392
auuacugagcucuugaggu

SEQ ID NO: 242394 - RNA, 19 nt, Artificial Sequence
  Description of Artificial Sequence: Synthetic oligonucleotide
  Sense strand starting at position 288 SEQ ID NO: 3123
ucaagagcucaguaauuac

SEQ ID NO: 242395 - RNA, 19 nt, Artificial Sequence
  Description of Artificial Sequence: Synthetic oligonucleotide
  Antisense strand to SEQ ID NO: 242394
guaauuacugagcucuuga

SEQ ID NO: 242396 - RNA, 19 nt, Artificial Sequence
  Description of Artificial Sequence: Synthetic oligonucleotide
  Sense strand starting at position 351 SEQ ID NO: 3123
acuggcuugcuugagacaa

SEQ ID NO: 242397 - RNA, 19 nt, Artificial Sequence
  Description of Artificial Sequence: Synthetic oligonucleotide
  Antisense strand to SEQ ID NO: 242396
uugucucaagcaagccagu

SEQ ID NO: 242398 - RNA, 19 nt, Artificial Sequence
  Description of Artificial Sequence: Synthetic oligonucleotide
  Sense strand starting at position 429 SEQ ID NO: 3123
ucugucuucugagcugaga

SEQ ID NO: 242399 - RNA, 19 nt, Artificial Sequence
  Description of Artificial Sequence: Synthetic oligonucleotide
  Antisense strand to SEQ ID NO: 242398
ucucagcucagaagacaga

SEQ ID NO: 242400 - RNA, 19 nt, Artificial Sequence
  Description of Artificial Sequence: Synthetic oligonucleotide
  Sense strand starting at position 431 SEQ ID NO: 3123
ugucuucugagcugagaaa

SEQ ID NO: 242401 - RNA, 19 nt, Artificial Sequence
  Description of Artificial Sequence: Synthetic oligonucleotide
  Antisense strand to SEQ ID NO: 242400
uuucucagcucagaagaca

SEQ ID NO: 242402 - RNA, 19 nt, Artificial Sequence
  Description of Artificial Sequence: Synthetic oligonucleotide
  Sense strand starting at position 432 SEQ ID NO: 3123
gucuucugagcugagaaag

SEQ ID NO: 242403 - RNA, 19 nt, Artificial Sequence
  Description of Artificial Sequence: Synthetic oligonucleotide
  Antisense strand to SEQ ID NO: 242402
cuuucucagcucagaagac

SEQ ID NO: 242404 - RNA, 19 nt, Artificial Sequence
  Description of Artificial Sequence: Synthetic oligonucleotide
  Sense strand starting at position 481 SEQ ID NO: 3123
ggaaccugauuaugaggaa

SEQ ID NO: 242405 - RNA, 19 nt, Artificial Sequence
  Description of Artificial Sequence: Synthetic oligonucleotide
  Antisense strand to SEQ ID NO: 242404
uuccucauaaucagguucc

SEQ ID NO: 242406 - RNA, 19 nt, Artificial Sequence
  Description of Artificial Sequence: Synthetic oligonucleotide
  Sense strand starting at position 482 SEQ ID NO: 3123
gaaccugauuaugaggaaa

SEQ ID NO: 242407 - RNA, 19 nt, Artificial Sequence
  Description of Artificial Sequence: Synthetic oligonucleotide
  Antisense strand to SEQ ID NO: 242406
uuuccucauaaucagguuc

SEQ ID NO: 242408 - RNA, 19 nt, Artificial Sequence
  Description of Artificial Sequence: Synthetic oligonucleotide
  Sense strand starting at position 484 SEQ ID NO: 3123
accugauuaugaggaaaga

SEQ ID NO: 242409 - RNA, 19 nt, Artificial Sequence
  Description of Artificial Sequence: Synthetic oligonucleotide
  Antisense strand to SEQ ID NO: 242408
ucuuuccucauaaucaggu

SEQ ID NO: 242410 - RNA, 19 nt, Artificial Sequence
  Description of Artificial Sequence: Synthetic oligonucleotide
  Sense strand starting at position 592 SEQ ID NO: 3123
gucacuaagucaggaugaa

SEQ ID NO: 242411 - RNA, 19 nt, Artificial Sequence
  Description of Artificial Sequence: Synthetic oligonucleotide
  Antisense strand to SEQ ID NO: 242410
uucauccugacuuagugac

SEQ ID NO: 242412 - RNA, 19 nt, Artificial Sequence
  Description of Artificial Sequence: Synthetic oligonucleotide
  Sense strand starting at position 877 SEQ ID NO: 3123
gugagaucuuggcucccuu

SEQ ID NO: 242413 - RNA, 19 nt, Artificial Sequence
  Description of Artificial Sequence: Synthetic oligonucleotide
  Antisense strand to SEQ ID NO: 242412
aagggagccaagaucucac

SEQ ID NO: 242414 - RNA, 19 nt, Artificial Sequence
  Description of Artificial Sequence: Synthetic oligonucleotide
  Sense strand starting at position 884 SEQ ID NO: 3123
cuuggcucccuugguuaaa

SEQ ID NO: 242415 - RNA, 19 nt, Artificial Sequence
  Description of Artificial Sequence: Synthetic oligonucleotide
  Antisense strand to SEQ ID NO: 242414
uuuaaccaagggagccaag

SEQ ID NO: 242416 - RNA, 19 nt, Artificial Sequence
  Description of Artificial Sequence: Synthetic oligonucleotide
  Sense strand starting at position 1037 SEQ ID NO: 3123
cagagagugagucguggua

SEQ ID NO: 242417 - RNA, 19 nt, Artificial Sequence
  Description of Artificial Sequence: Synthetic oligonucleotide
  Antisense strand to SEQ ID NO: 242416
uaccacgacucacucucug

SEQ ID NO: 242418 - RNA, 19 nt, Artificial Sequence
  Description of Artificial Sequence: Synthetic oligonucleotide
  Sense strand starting at position 1040 SEQ ID NO: 3123
agagugagucgugguaaga

SEQ ID NO: 242419 - RNA, 19 nt, Artificial Sequence
  Description of Artificial Sequence: Synthetic oligonucleotide
  Antisense strand to SEQ ID NO: 242418
ucuuaccacgacucacucu

SEQ ID NO: 242420 - RNA, 19 nt, Artificial Sequence
  Description of Artificial Sequence: Synthetic oligonucleotide
  Sense strand starting at position 1118 SEQ ID NO: 3123
uuuaaauuaagguguggga

SEQ ID NO: 242421 - RNA, 19 nt, Artificial Sequence
  Description of Artificial Sequence: Synthetic oligonucleotide
  Antisense strand to SEQ ID NO: 242420
ucccacaccuuaauuuaaa

SEQ ID NO: 242422 - RNA, 19 nt, Artificial Sequence
  Description of Artificial Sequence: Synthetic oligonucleotide
  Sense strand starting at position 1120 SEQ ID NO: 3123
uaaauuaaggugugggacu

SEQ ID NO: 242423 - RNA, 19 nt, Artificial Sequence
  Description of Artificial Sequence: Synthetic oligonucleotide
  Antisense strand to SEQ ID NO: 242422
agucccacaccuuaauuua

SEQ ID NO: 242424 - RNA, 19 nt, Artificial Sequence
  Description of Artificial Sequence: Synthetic oligonucleotide
  Sense strand starting at position 1121 SEQ ID NO: 3123
aaauuaaggugugggacua

SEQ ID NO: 242425 - RNA, 19 nt, Artificial Sequence
  Description of Artificial Sequence: Synthetic oligonucleotide
  Antisense strand to SEQ ID NO: 242424
uagucccacaccuuaauuu

SEQ ID NO: 242426 - RNA, 19 nt, Artificial Sequence
  Description of Artificial Sequence: Synthetic oligonucleotide
  Sense strand starting at position 1143 SEQ ID NO: 3123
ggaggugucccauguggca

SEQ ID NO: 242427 - RNA, 19 nt, Artificial Sequence
  Description of Artificial Sequence: Synthetic oligonucleotide
  Antisense strand to SEQ ID NO: 242426
ugccacaugggacaccucc

SEQ ID NO: 242428 - RNA, 19 nt, Artificial Sequence
  Description of Artificial Sequence: Synthetic oligonucleotide
  Sense strand starting at position 1266 SEQ ID NO: 3123
auccuccucugguggaauu

SEQ ID NO: 242429 - RNA, 19 nt, Artificial Sequence
  Description of Artificial Sequence: Synthetic oligonucleotide
  Antisense strand to SEQ ID NO: 242428
aauuccaccagaggaggau

SEQ ID NO: 242430 - RNA, 19 nt, Artificial Sequence
  Description of Artificial Sequence: Synthetic oligonucleotide
  Sense strand starting at position 1602 SEQ ID NO: 3123
agcuaaacuuucucgaauc

SEQ ID NO: 242431 - RNA, 19 nt, Artificial Sequence
  Description of Artificial Sequence: Synthetic oligonucleotide
  Antisense strand to SEQ ID NO: 242430
gauucgagaaaguuuagcu

SEQ ID NO: 242432 - RNA, 19 nt, Artificial Sequence
  Description of Artificial Sequence: Synthetic oligonucleotide
  Sense strand starting at position 1622 SEQ ID NO: 3123
cagugcuucgcgguuaagu

SEQ ID NO: 242433 - RNA, 19 nt, Artificial Sequence
  Description of Artificial Sequence: Synthetic oligonucleotide
  Antisense strand to SEQ ID NO: 242432
acuuaaccgcgaagcacug

SEQ ID NO: 242434 - RNA, 19 nt, Artificial Sequence
  Description of Artificial Sequence: Synthetic oligonucleotide
  Sense strand starting at position 1623 SEQ ID NO: 3123
agugcuucgcgguuaaguu

SEQ ID NO: 242435 - RNA, 19 nt, Artificial Sequence
  Description of Artificial Sequence: Synthetic oligonucleotide
  Antisense strand to SEQ ID NO: 242434
aacuuaaccgcgaagcacu

SEQ ID NO: 242436 - RNA, 19 nt, Artificial Sequence
  Description of Artificial Sequence: Synthetic oligonucleotide
  Sense strand starting at position 1624 SEQ ID NO: 3123
gugcuucgcgguuaaguua

SEQ ID NO: 242437 - RNA, 19 nt, Artificial Sequence
  Description of Artificial Sequence: Synthetic oligonucleotide
  Antisense strand to SEQ ID NO: 242436
uaacuuaaccgcgaagcac

SEQ ID NO: 242438 - RNA, 19 nt, Artificial Sequence
  Description of Artificial Sequence: Synthetic oligonucleotide
  Sense strand starting at position 1726 SEQ ID NO: 3123
aggagacgcuaauccaauu

SEQ ID NO: 242439 - RNA, 19 nt, Artificial Sequence
  Description of Artificial Sequence: Synthetic oligonucleotide
  Antisense strand to SEQ ID NO: 242438
aauuggauuagcgucuccu

SEQ ID NO: 242440 - RNA, 19 nt, Artificial Sequence
  Description of Artificial Sequence: Synthetic oligonucleotide
  Sense strand starting at position 3361 SEQ ID NO: 3123
gccguuuaggcgaguccau

SEQ ID NO: 242441 - RNA, 19 nt, Artificial Sequence
  Description of Artificial Sequence: Synthetic oligonucleotide
  Antisense strand to SEQ ID NO: 242440
auggacucgccuaaacggc

SEQ ID NO: 242442 - RNA, 19 nt, Artificial Sequence
  Description of Artificial Sequence: Synthetic oligonucleotide
  Sense strand starting at position 3362 SEQ ID NO: 3123
ccguuuaggcgaguccauu

SEQ ID NO: 242443 - RNA, 19 nt, Artificial Sequence
  Description of Artificial Sequence: Synthetic oligonucleotide
  Antisense strand to SEQ ID NO: 242442
aauggacucgccuaaacgg

SEQ ID NO: 242444 - RNA, 19 nt, Artificial Sequence
  Description of Artificial Sequence: Synthetic oligonucleotide
  Sense strand starting at position 3707 SEQ ID NO: 3123
aucguaugaggcugagaca

SEQ ID NO: 242445 - RNA, 19 nt, Artificial Sequence
  Description of Artificial Sequence: Synthetic oligonucleotide
  Antisense strand to SEQ ID NO: 242444
ugucucagccucauacgau

SEQ ID NO: 242446 - RNA, 19 nt, Artificial Sequence
  Description of Artificial Sequence: Synthetic oligonucleotide
  Sense strand starting at position 3708 SEQ ID NO: 3123
ucguaugaggcugagacaa

SEQ ID NO: 242447 - RNA, 19 nt, Artificial Sequence
  Description of Artificial Sequence: Synthetic oligonucleotide
  Antisense strand to SEQ ID NO: 242446
uugucucagccucauacga

SEQ ID NO: 242448 - RNA, 19 nt, Artificial Sequence
  Description of Artificial Sequence: Synthetic oligonucleotide
  Sense strand starting at position 3900 SEQ ID NO: 3123
auucuuacuuggcucugaa

SEQ ID NO: 242449 - RNA, 19 nt, Artificial Sequence
  Description of Artificial Sequence: Synthetic oligonucleotide
  Antisense strand to SEQ ID NO: 242448
uucagagccaaguaagaau

SEQ ID NO: 242450 - RNA, 19 nt, Artificial Sequence
  Description of Artificial Sequence: Synthetic oligonucleotide
  Sense strand starting at position 3930 SEQ ID NO: 3123
aaagcuagaccucgaggaa

SEQ ID NO: 242451 - RNA, 19 nt, Artificial Sequence
  Description of Artificial Sequence: Synthetic oligonucleotide
  Antisense strand to SEQ ID NO: 242450
uuccucgaggucuagcuuu

SEQ ID NO: 242452 - RNA, 19 nt, Artificial Sequence
  Description of Artificial Sequence: Synthetic oligonucleotide
  Sense strand starting at position 3933 SEQ ID NO: 3123
gcuagaccucgaggaaguu

SEQ ID NO: 242453 - RNA, 19 nt, Artificial Sequence
  Description of Artificial Sequence: Synthetic oligonucleotide
  Antisense strand to SEQ ID NO: 242452
aacuuccucgaggucuagc

SEQ ID NO: 242454 - RNA, 19 nt, Artificial Sequence
  Description of Artificial Sequence: Synthetic oligonucleotide
  Sense strand starting at position 3963 SEQ ID NO: 3123
gggcccuacagugaagauu

SEQ ID NO: 242455 - RNA, 19 nt, Artificial Sequence
  Description of Artificial Sequence: Synthetic oligonucleotide
  Antisense strand to SEQ ID NO: 242454
aaucuucacuguagggccc

SEQ ID NO: 242456 - RNA, 19 nt, Artificial Sequence
  Description of Artificial Sequence: Synthetic oligonucleotide
  Sense strand starting at position 3971 SEQ ID NO: 3123
cagugaagauuacaugaag

SEQ ID NO: 242457 - RNA, 19 nt, Artificial Sequence
  Description of Artificial Sequence: Synthetic oligonucleotide
  Antisense strand to SEQ ID NO: 242456
cuucauguaaucuucacug

SEQ ID NO: 242458 - RNA, 19 nt, Artificial Sequence
  Description of Artificial Sequence: Synthetic oligonucleotide
  Sense strand starting at position 191 SEQ ID NO: 3119
aggagugcucccugugaag

SEQ ID NO: 242459 - RNA, 19 nt, Artificial Sequence
  Description of Artificial Sequence: Synthetic oligonucleotide
  Antisense strand to SEQ ID NO: 242458
cuucacagggagcacuccu

SEQ ID NO: 242460 - RNA, 19 nt, Artificial Sequence
  Description of Artificial Sequence: Synthetic oligonucleotide
  Sense strand starting at position 391 SEQ ID NO: 3119
guugauggcggcuuguuua

SEQ ID NO: 242461 - RNA, 19 nt, Artificial Sequence
  Description of Artificial Sequence: Synthetic oligonucleotide
  Antisense strand to SEQ ID NO: 242460
uaaacaagccgccaucaac

SEQ ID NO: 242462 - RNA, 19 nt, Artificial Sequence
  Description of Artificial Sequence: Synthetic oligonucleotide
  Sense strand starting at position 602 SEQ ID NO: 3119
cagcgcuuggccguggaaa

SEQ ID NO: 242463 - RNA, 19 nt, Artificial Sequence
  Description of Artificial Sequence: Synthetic oligonucleotide
  Antisense strand to SEQ ID NO: 242462
uuuccacggccaagcgcug

SEQ ID NO: 242464 - RNA, 19 nt, Artificial Sequence
  Description of Artificial Sequence: Synthetic oligonucleotide
  Sense strand starting at position 675 SEQ ID NO: 3119
ccagcaagguuuccugagu

SEQ ID NO: 242465 - RNA, 19 nt, Artificial Sequence
  Description of Artificial Sequence: Synthetic oligonucleotide
  Antisense strand to SEQ ID NO: 242464
acucaggaaaccuugcugg

SEQ ID NO: 242466 - RNA, 19 nt, Artificial Sequence
  Description of Artificial Sequence: Synthetic oligonucleotide
  Sense strand starting at position 691 SEQ ID NO: 3119
agugucuccuggguucaga

SEQ ID NO: 242467 - RNA, 19 nt, Artificial Sequence
  Description of Artificial Sequence: Synthetic oligonucleotide
  Antisense strand to SEQ ID NO: 242466
ucugaacccaggagacacu

SEQ ID NO: 242468 - RNA, 19 nt, Artificial Sequence
  Description of Artificial Sequence: Synthetic oligonucleotide
  Sense strand starting at position 710 SEQ ID NO: 3119
aacgguguccugugggaca

SEQ ID NO: 242469 - RNA, 19 nt, Artificial Sequence
  Description of Artificial Sequence: Synthetic oligonucleotide
  Antisense strand to SEQ ID NO: 242468
ugucccacaggacaccguu

SEQ ID NO: 242470 - RNA, 19 nt, Artificial Sequence
  Description of Artificial Sequence: Synthetic oligonucleotide
  Sense strand starting at position 1044 SEQ ID NO: 3119
acuugcaaggcuuagagaa

SEQ ID NO: 242471 - RNA, 19 nt, Artificial Sequence
  Description of Artificial Sequence: Synthetic oligonucleotide
  Antisense strand to SEQ ID NO: 242470
uucucuaagccuugcaagu

SEQ ID NO: 242472 - RNA, 19 nt, Artificial Sequence
  Description of Artificial Sequence: Synthetic oligonucleotide
  Sense strand starting at position 1368 SEQ ID NO: 3119
gugaguuaacguggacuga

SEQ ID NO: 242473 - RNA, 19 nt, Artificial Sequence
  Description of Artificial Sequence: Synthetic oligonucleotide
  Antisense strand to SEQ ID NO: 242472
ucaguccacguuaacucac

SEQ ID NO: 242474 - RNA, 19 nt, Artificial Sequence
  Description of Artificial Sequence: Synthetic oligonucleotide
  Sense strand starting at position 1427 SEQ ID NO: 3119
uuacuaccuccagauguga

SEQ ID NO: 242475 - RNA, 19 nt, Artificial Sequence
  Description of Artificial Sequence: Synthetic oligonucleotide
  Antisense strand to SEQ ID NO: 242474
ucacaucuggagguaguaa

SEQ ID NO: 242476 - RNA, 19 nt, Artificial Sequence
  Description of Artificial Sequence: Synthetic oligonucleotide
  Sense strand starting at position 1462 SEQ ID NO: 3119
ggacuuugaagaggucaug

SEQ ID NO: 242477 - RNA, 19 nt, Artificial Sequence
  Description of Artificial Sequence: Synthetic oligonucleotide
  Antisense strand to SEQ ID NO: 242476
caugaccucuucaaagucc

SEQ ID NO: 242478 - RNA, 19 nt, Artificial Sequence
  Description of Artificial Sequence: Synthetic oligonucleotide
  Sense strand starting at position 1560 SEQ ID NO: 3119
gagggauggccgugugaga

SEQ ID NO: 242479 - RNA, 19 nt, Artificial Sequence
  Description of Artificial Sequence: Synthetic oligonucleotide
  Antisense strand to SEQ ID NO: 242478
ucucacacggccaucccuc

SEQ ID NO: 242480 - RNA, 19 nt, Artificial Sequence
  Description of Artificial Sequence: Synthetic oligonucleotide
  Sense strand starting at position 1853 SEQ ID NO: 3119
auaagcauucugggaauug

SEQ ID NO: 242481 - RNA, 19 nt, Artificial Sequence
  Description of Artificial Sequence: Synthetic oligonucleotide
  Antisense strand to SEQ ID NO: 242480
caauucccagaaugcuuau

SEQ ID NO: 242482 - RNA, 19 nt, Artificial Sequence
  Description of Artificial Sequence: Synthetic oligonucleotide
  Sense strand starting at position 2128 SEQ ID NO: 3119
accauuugugcagguguca

SEQ ID NO: 242483 - RNA, 19 nt, Artificial Sequence
  Description of Artificial Sequence: Synthetic oligonucleotide
  Antisense strand to SEQ ID NO: 242482
ugacaccugcacaaauggu

SEQ ID NO: 242484 - RNA, 19 nt, Artificial Sequence
  Description of Artificial Sequence: Synthetic oligonucleotide
  Sense strand starting at position 2200 SEQ ID NO: 3119
ggaaacuuacccugcucga

SEQ ID NO: 242485 - RNA, 19 nt, Artificial Sequence
  Description of Artificial Sequence: Synthetic oligonucleotide
  Antisense strand to SEQ ID NO: 242484
ucgagcaggguaaguuucc

SEQ ID NO: 242486 - RNA, 19 nt, Artificial Sequence
  Description of Artificial Sequence: Synthetic oligonucleotide
  Sense strand starting at position 2268 SEQ ID NO: 3119
gcugucucuucuuuagaaa

SEQ ID NO: 242487 - RNA, 19 nt, Artificial Sequence
  Description of Artificial Sequence: Synthetic oligonucleotide
  Antisense strand to SEQ ID NO: 242486
uuucuaaagaagagacagc

SEQ ID NO: 242488 - RNA, 19 nt, Artificial Sequence
  Description of Artificial Sequence: Synthetic oligonucleotide
  Sense strand starting at position 2330 SEQ ID NO: 3119
cucaaagcacuuuguagaa

SEQ ID NO: 242489 - RNA, 19 nt, Artificial Sequence
  Description of Artificial Sequence: Synthetic oligonucleotide
  Antisense strand to SEQ ID NO: 242488
uucuacaaagugcuuugag

SEQ ID NO: 242490 - RNA, 19 nt, Artificial Sequence
  Description of Artificial Sequence: Synthetic oligonucleotide
  Sense strand starting at position 2340 SEQ ID NO: 3119
uuuguagaaccaugaacuu

SEQ ID NO: 242491 - RNA, 19 nt, Artificial Sequence
  Description of Artificial Sequence: Synthetic oligonucleotide
  Antisense strand to SEQ ID NO: 242490
aaguucaugguucuacaaa

SEQ ID NO: 242492 - RNA, 19 nt, Artificial Sequence
  Description of Artificial Sequence: Synthetic oligonucleotide
  Sense strand starting at position 2426 SEQ ID NO: 3119
cugggauccacgggucaga

SEQ ID NO: 242493 - RNA, 19 nt, Artificial Sequence
  Description of Artificial Sequence: Synthetic oligonucleotide
  Antisense strand to SEQ ID NO: 242492
ucugacccguggaucccag

SEQ ID NO: 242494 - RNA, 19 nt, Artificial Sequence
  Description of Artificial Sequence: Synthetic oligonucleotide
  Sense strand starting at position 2494 SEQ ID NO: 3119
cccggugucacugcuguaa

SEQ ID NO: 242495 - RNA, 19 nt, Artificial Sequence
  Description of Artificial Sequence: Synthetic oligonucleotide
  Antisense strand to SEQ ID NO: 242494
uuacagcagugacaccggg

SEQ ID NO: 242496 - RNA, 19 nt, Artificial Sequence
  Description of Artificial Sequence: Synthetic oligonucleotide
  Sense strand starting at position 2498 SEQ ID NO: 3119
gugucacugcuguaacaaa

SEQ ID NO: 242497 - RNA, 19 nt, Artificial Sequence
  Description of Artificial Sequence: Synthetic oligonucleotide
  Antisense strand to SEQ ID NO: 242496
uuuguuacagcagugacac

SEQ ID NO: 242498 - RNA, 19 nt, Artificial Sequence
  Description of Artificial Sequence: Synthetic oligonucleotide
  Sense strand starting at position 2555 SEQ ID NO: 3119
acaguucugucuguggaca

SEQ ID NO: 242499 - RNA, 19 nt, Artificial Sequence
  Description of Artificial Sequence: Synthetic oligonucleotide
  Antisense strand to SEQ ID NO: 242498
uguccacagacagaacugu

SEQ ID NO: 242500 - RNA, 19 nt, Artificial Sequence
  Description of Artificial Sequence: Synthetic oligonucleotide
  Sense strand starting at position 2720 SEQ ID NO: 3119
cugcgucuucuuccagagu

SEQ ID NO: 242501 - RNA, 19 nt, Artificial Sequence
  Description of Artificial Sequence: Synthetic oligonucleotide
  Antisense strand to SEQ ID NO: 242500
acucuggaagaagacgcag

SEQ ID NO: 242502 - RNA, 19 nt, Artificial Sequence
  Description of Artificial Sequence: Synthetic oligonucleotide
  Sense strand starting at position 2766 SEQ ID NO: 3119
gggacagguuccuuacuuu

SEQ ID NO: 242503 - RNA, 19 nt, Artificial Sequence
  Description of Artificial Sequence: Synthetic oligonucleotide
  Antisense strand to SEQ ID NO: 242502
aaaguaaggaaccuguccc

SEQ ID NO: 242504 - RNA, 19 nt, Artificial Sequence
  Description of Artificial Sequence: Synthetic oligonucleotide
  Sense strand starting at position 2805 SEQ ID NO: 3119
gugacuacacccugguaau

SEQ ID NO: 242505 - RNA, 19 nt, Artificial Sequence
  Description of Artificial Sequence: Synthetic oligonucleotide
  Antisense strand to SEQ ID NO: 242504
auuaccaggguguagucac

SEQ ID NO: 242506 - RNA, 19 nt, Artificial Sequence
  Description of Artificial Sequence: Synthetic oligonucleotide
  Sense strand starting at position 2806 SEQ ID NO: 3119
ugacuacacccugguaauc

SEQ ID NO: 242507 - RNA, 19 nt, Artificial Sequence
  Description of Artificial Sequence: Synthetic oligonucleotide
  Antisense strand to SEQ ID NO: 242506
gauuaccaggguguaguca

SEQ ID NO: 242508 - RNA, 19 nt, Artificial Sequence
  Description of Artificial Sequence: Synthetic oligonucleotide
  Sense strand starting at position 2815 SEQ ID NO: 3119
ccugguaauccaggauacu

SEQ ID NO: 242509 - RNA, 19 nt, Artificial Sequence
  Description of Artificial Sequence: Synthetic oligonucleotide
  Antisense strand to SEQ ID NO: 242508
aguauccuggauuaccagg

SEQ ID NO: 242510 - RNA, 19 nt, Artificial Sequence
  Description of Artificial Sequence: Synthetic oligonucleotide
  Sense strand starting at position 2912 SEQ ID NO: 3119
gggauucggaugugagcau

SEQ ID NO: 242511 - RNA, 19 nt, Artificial Sequence
  Description of Artificial Sequence: Synthetic oligonucleotide
  Antisense strand to SEQ ID NO: 242510
augcucacauccgaauccc

SEQ ID NO: 242512 - RNA, 19 nt, Artificial Sequence
  Description of Artificial Sequence: Synthetic oligonucleotide
  Sense strand starting at position 2943 SEQ ID NO: 3119
aguuaucccgccuaucaca

SEQ ID NO: 242513 - RNA, 19 nt, Artificial Sequence
  Description of Artificial Sequence: Synthetic oligonucleotide
  Antisense strand to SEQ ID NO: 242512
ugugauaggcgggauaacu

SEQ ID NO: 242514 - RNA, 19 nt, Artificial Sequence
  Description of Artificial Sequence: Synthetic oligonucleotide
  Sense strand starting at position 2951 SEQ ID NO: 3119
cgccuaucacaagacuguu

SEQ ID NO: 242515 - RNA, 19 nt, Artificial Sequence
  Description of Artificial Sequence: Synthetic oligonucleotide
  Antisense strand to SEQ ID NO: 242514
aacagucuugugauaggcg

SEQ ID NO: 242516 - RNA, 19 nt, Artificial Sequence
  Description of Artificial Sequence: Synthetic oligonucleotide
  Sense strand starting at position 2994 SEQ ID NO: 3119
agcaaugagucucuaaauu

SEQ ID NO: 242517 - RNA, 19 nt, Artificial Sequence
  Description of Artificial Sequence: Synthetic oligonucleotide
  Antisense strand to SEQ ID NO: 242516
aauuuagagacucauugcu

SEQ ID NO: 242518 - RNA, 19 nt, Artificial Sequence
  Description of Artificial Sequence: Synthetic oligonucleotide
  Sense strand starting at position 3004 SEQ ID NO: 3119
cucuaaauucuaggugcau

SEQ ID NO: 242519 - RNA, 19 nt, Artificial Sequence
  Description of Artificial Sequence: Synthetic oligonucleotide
  Antisense strand to SEQ ID NO: 242518
augcaccuagaauuuagag

SEQ ID NO: 242520 - RNA, 19 nt, Artificial Sequence
  Description of Artificial Sequence: Synthetic oligonucleotide
  Sense strand starting at position 3005 SEQ ID NO: 3119
ucuaaauucuaggugcaua

SEQ ID NO: 242521 - RNA, 19 nt, Artificial Sequence
  Description of Artificial Sequence: Synthetic oligonucleotide
  Antisense strand to SEQ ID NO: 242520
uaugcaccuagaauuuaga

SEQ ID NO: 242522 - RNA, 19 nt, Artificial Sequence
  Description of Artificial Sequence: Synthetic oligonucleotide
  Sense strand starting at position 3281 SEQ ID NO: 3119
aggaaccuguauucuaauu

SEQ ID NO: 242523 - RNA, 19 nt, Artificial Sequence
  Description of Artificial Sequence: Synthetic oligonucleotide
  Antisense strand to SEQ ID NO: 242522
aauuagaauacagguuccu

SEQ ID NO: 242524 - RNA, 19 nt, Artificial Sequence
  Description of Artificial Sequence: Synthetic oligonucleotide
  Sense strand starting at position 3357 SEQ ID NO: 3119
ggaaguauuagucaggguu

SEQ ID NO: 242525 - RNA, 19 nt, Artificial Sequence
  Description of Artificial Sequence: Synthetic oligonucleotide
  Antisense strand to SEQ ID NO: 242524
aacccugacuaauacuucc

SEQ ID NO: 242526 - RNA, 19 nt, Artificial Sequence
  Description of Artificial Sequence: Synthetic oligonucleotide
  Sense strand starting at position 3446 SEQ ID NO: 3119
uguuauuauggaggcugaa

SEQ ID NO: 242527 - RNA, 19 nt, Artificial Sequence
  Description of Artificial Sequence: Synthetic oligonucleotide
  Antisense strand to SEQ ID NO: 242526
uucagccuccauaauaaca

SEQ ID NO: 242528 - RNA, 19 nt, Artificial Sequence
  Description of Artificial Sequence: Synthetic oligonucleotide
  Sense strand starting at position 3636 SEQ ID NO: 3119
cuagcuggguucucaauga

SEQ ID NO: 242529 - RNA, 19 nt, Artificial Sequence
  Description of Artificial Sequence: Synthetic oligonucleotide
  Antisense strand to SEQ ID NO: 242528
ucauugagaacccagcuag

SEQ ID NO: 242530 - RNA, 19 nt, Artificial Sequence
  Description of Artificial Sequence: Synthetic oligonucleotide
  Sense strand starting at position 3644 SEQ ID NO: 3119
guucucaaugauuggauga

SEQ ID NO: 242531 - RNA, 19 nt, Artificial Sequence
  Description of Artificial Sequence: Synthetic oligonucleotide
  Antisense strand to SEQ ID NO: 242530
ucauccaaucauugagaac

SEQ ID NO: 242532 - RNA, 19 nt, Artificial Sequence
  Description of Artificial Sequence: Synthetic oligonucleotide
  Sense strand starting at position 3680 SEQ ID NO: 3119
gagggcagauccuuacuca

SEQ ID NO: 242533 - RNA, 19 nt, Artificial Sequence
  Description of Artificial Sequence: Synthetic oligonucleotide
  Antisense strand to SEQ ID NO: 242532
ugaguaaggaucugcccuc

SEQ ID NO: 242534 - RNA, 19 nt, Artificial Sequence
  Description of Artificial Sequence: Synthetic oligonucleotide
  Sense strand starting at position 3808 SEQ ID NO: 3119
ucacauaggucagcaaaca

SEQ ID NO: 242535 - RNA, 19 nt, Artificial Sequence
  Description of Artificial Sequence: Synthetic oligonucleotide
  Antisense strand to SEQ ID NO: 242534
uguuugcugaccuauguga

SEQ ID NO: 242536 - RNA, 19 nt, Artificial Sequence
  Description of Artificial Sequence: Synthetic oligonucleotide
  Sense strand starting at position 3913 SEQ ID NO: 3119
gcuguuaacccucagacaa

SEQ ID NO: 242537 - RNA, 19 nt, Artificial Sequence
  Description of Artificial Sequence: Synthetic oligonucleotide
  Antisense strand to SEQ ID NO: 242536
uugucugaggguuaacagc

SEQ ID NO: 242538 - RNA, 19 nt, Artificial Sequence
  Description of Artificial Sequence: Synthetic oligonucleotide
  Sense strand starting at position 255 SEQ ID NO: 3120
gggcuuguauggguuggaa

SEQ ID NO: 242539 - RNA, 19 nt, Artificial Sequence
  Description of Artificial Sequence: Synthetic oligonucleotide
  Antisense strand to SEQ ID NO: 242538
uuccaacccauacaagccc

SEQ ID NO: 242540 - RNA, 19 nt, Artificial Sequence
  Description of Artificial Sequence: Synthetic oligonucleotide
  Sense strand starting at position 257 SEQ ID NO: 3120
gcuuguauggguuggaaca

SEQ ID NO: 242541 - RNA, 19 nt, Artificial Sequence
  Description of Artificial Sequence: Synthetic oligonucleotide
  Antisense strand to SEQ ID NO: 242540
uguuccaacccauacaagc

SEQ ID NO: 242542 - RNA, 19 nt, Artificial Sequence
  Description of Artificial Sequence: Synthetic oligonucleotide
  Sense strand starting at position 258 SEQ ID NO: 3120
cuuguauggguuggaacaa

SEQ ID NO: 242543 - RNA, 19 nt, Artificial Sequence
  Description of Artificial Sequence: Synthetic oligonucleotide
  Antisense strand to SEQ ID NO: 242542
uuguuccaacccauacaag

SEQ ID NO: 242544 - RNA, 19 nt, Artificial Sequence
  Description of Artificial Sequence: Synthetic oligonucleotide
  Sense strand starting at position 259 SEQ ID NO: 3120
uuguauggguuggaacaaa

SEQ ID NO: 242545 - RNA, 19 nt, Artificial Sequence
  Description of Artificial Sequence: Synthetic oligonucleotide
  Antisense strand to SEQ ID NO: 242544
uuuguuccaacccauacaa

SEQ ID NO: 242546 - RNA, 19 nt, Artificial Sequence
  Description of Artificial Sequence: Synthetic oligonucleotide
  Sense strand starting at position 434 SEQ ID NO: 3120
cgggaauucgauuggaaga

SEQ ID NO: 242547 - RNA, 19 nt, Artificial Sequence
  Description of Artificial Sequence: Synthetic oligonucleotide
  Antisense strand to SEQ ID NO: 242546
ucuuccaaucgaauucccg

SEQ ID NO: 242548 - RNA, 19 nt, Artificial Sequence
  Description of Artificial Sequence: Synthetic oligonucleotide
  Sense strand starting at position 436 SEQ ID NO: 3120
ggaauucgauuggaagaag

SEQ ID NO: 242549 - RNA, 19 nt, Artificial Sequence
  Description of Artificial Sequence: Synthetic oligonucleotide
  Antisense strand to SEQ ID NO: 242548
cuucuuccaaucgaauucc

SEQ ID NO: 242550 - RNA, 19 nt, Artificial Sequence
  Description of Artificial Sequence: Synthetic oligonucleotide
  Sense strand starting at position 613 SEQ ID NO: 3120
ggccaaauacaguaucuau

SEQ ID NO: 242551 - RNA, 19 nt, Artificial Sequence
  Description of Artificial Sequence: Synthetic oligonucleotide
  Antisense strand to SEQ ID NO: 242550
auagauacuguauuuggcc

SEQ ID NO: 242552 - RNA, 19 nt, Artificial Sequence
  Description of Artificial Sequence: Synthetic oligonucleotide
  Sense strand starting at position 692 SEQ ID NO: 3120
gcgccugcacauugagaua

SEQ ID NO: 242553 - RNA, 19 nt, Artificial Sequence
  Description of Artificial Sequence: Synthetic oligonucleotide
  Antisense strand to SEQ ID NO: 242552
uaucucaaugugcaggcgc

SEQ ID NO: 242554 - RNA, 19 nt, Artificial Sequence
  Description of Artificial Sequence: Synthetic oligonucleotide
  Sense strand starting at position 938 SEQ ID NO: 3120
ggugacaguuuccaaugga

SEQ ID NO: 242555 - RNA, 19 nt, Artificial Sequence
  Description of Artificial Sequence: Synthetic oligonucleotide
  Antisense strand to SEQ ID NO: 242554
uccauuggaaacugucacc

SEQ ID NO: 242556 - RNA, 19 nt, Artificial Sequence
  Description of Artificial Sequence: Synthetic oligonucleotide
  Sense strand starting at position 941 SEQ ID NO: 3120
gacaguuuccaauggacaa

SEQ ID NO: 242557 - RNA, 19 nt, Artificial Sequence
  Description of Artificial Sequence: Synthetic oligonucleotide
  Antisense strand to SEQ ID NO: 242556
uuguccauuggaaacuguc

SEQ ID NO: 242558 - RNA, 19 nt, Artificial Sequence
  Description of Artificial Sequence: Synthetic oligonucleotide
  Sense strand starting at position 1009 SEQ ID NO: 3120
cucucaguucucugcuaca

SEQ ID NO: 242559 - RNA, 19 nt, Artificial Sequence
  Description of Artificial Sequence: Synthetic oligonucleotide
  Antisense strand to SEQ ID NO: 242558
uguagcagagaacugagag

SEQ ID NO: 242560 - RNA, 19 nt, Artificial Sequence
  Description of Artificial Sequence: Synthetic oligonucleotide
  Sense strand starting at position 1012 SEQ ID NO: 3120
ucaguucucugcuacauuu

SEQ ID NO: 242561 - RNA, 19 nt, Artificial Sequence
  Description of Artificial Sequence: Synthetic oligonucleotide
  Antisense strand to SEQ ID NO: 242560
aaauguagcagagaacuga

SEQ ID NO: 242562 - RNA, 19 nt, Artificial Sequence
  Description of Artificial Sequence: Synthetic oligonucleotide
  Sense strand starting at position 1106 SEQ ID NO: 3120
ugggacaggugcucacaaa

SEQ ID NO: 242563 - RNA, 19 nt, Artificial Sequence
  Description of Artificial Sequence: Synthetic oligonucleotide
  Antisense strand to SEQ ID NO: 242562
uuugugagcaccuguccca

SEQ ID NO: 242564 - RNA, 19 nt, Artificial Sequence
  Description of Artificial Sequence: Synthetic oligonucleotide
  Sense strand starting at position 1445 SEQ ID NO: 3120
ggcaucaugugacucacau

SEQ ID NO: 242565 - RNA, 19 nt, Artificial Sequence
  Description of Artificial Sequence: Synthetic oligonucleotide
  Antisense strand to SEQ ID NO: 242564
augugagucacaugaugcc

SEQ ID NO: 242566 - RNA, 19 nt, Artificial Sequence
  Description of Artificial Sequence: Synthetic oligonucleotide
  Sense strand starting at position 2107 SEQ ID NO: 3120
ugcacugagcucgaggaaa

SEQ ID NO: 242567 - RNA, 19 nt, Artificial Sequence
  Description of Artificial Sequence: Synthetic oligonucleotide
  Antisense strand to SEQ ID NO: 242566
uuuccucgagcucagugca

SEQ ID NO: 242568 - RNA, 19 nt, Artificial Sequence
  Description of Artificial Sequence: Synthetic oligonucleotide
  Sense strand starting at position 2109 SEQ ID NO: 3120
cacugagcucgaggaaaga

SEQ ID NO: 242569 - RNA, 19 nt, Artificial Sequence
  Description of Artificial Sequence: Synthetic oligonucleotide
  Antisense strand to SEQ ID NO: 242568
ucuuuccucgagcucagug

SEQ ID NO: 242570 - RNA, 19 nt, Artificial Sequence
  Description of Artificial Sequence: Synthetic oligonucleotide
  Sense strand starting at position 2171 SEQ ID NO: 3120
cuugacuuacucugugauu

SEQ ID NO: 242571 - RNA, 19 nt, Artificial Sequence
  Description of Artificial Sequence: Synthetic oligonucleotide
  Antisense strand to SEQ ID NO: 242570
aaucacagaguaagucaag

SEQ ID NO: 242572 - RNA, 19 nt, Artificial Sequence
  Description of Artificial Sequence: Synthetic oligonucleotide
  Sense strand starting at position 2172 SEQ ID NO: 3120
uugacuuacucugugauua

SEQ ID NO: 242573 - RNA, 19 nt, Artificial Sequence
  Description of Artificial Sequence: Synthetic oligonucleotide
  Antisense strand to SEQ ID NO: 242572
uaaucacagaguaagucaa

SEQ ID NO: 242574 - RNA, 19 nt, Artificial Sequence
  Description of Artificial Sequence: Synthetic oligonucleotide
  Sense strand starting at position 2173 SEQ ID NO: 3120
ugacuuacucugugauuaa

SEQ ID NO: 242575 - RNA, 19 nt, Artificial Sequence
  Description of Artificial Sequence: Synthetic oligonucleotide
  Antisense strand to SEQ ID NO: 242574
uuaaucacagaguaaguca

SEQ ID NO: 242576 - RNA, 19 nt, Artificial Sequence
  Description of Artificial Sequence: Synthetic oligonucleotide
  Sense strand starting at position 2251 SEQ ID NO: 3120
ggagcucuggccgagugaa

SEQ ID NO: 242577 - RNA, 19 nt, Artificial Sequence
  Description of Artificial Sequence: Synthetic oligonucleotide
  Antisense strand to SEQ ID NO: 242576
uucacucggccagagcucc

SEQ ID NO: 242578 - RNA, 19 nt, Artificial Sequence
  Description of Artificial Sequence: Synthetic oligonucleotide
  Sense strand starting at position 2558 SEQ ID NO: 3120
auacauguguaugcgcaua

SEQ ID NO: 242579 - RNA, 19 nt, Artificial Sequence
  Description of Artificial Sequence: Synthetic oligonucleotide
  Antisense strand to SEQ ID NO: 242578
uaugcgcauacacauguau

SEQ ID NO: 242580 - RNA, 19 nt, Artificial Sequence
  Description of Artificial Sequence: Synthetic oligonucleotide
  Sense strand starting at position 2619 SEQ ID NO: 3120
cauggaaagcuuuggaacu

SEQ ID NO: 242581 - RNA, 19 nt, Artificial Sequence
  Description of Artificial Sequence: Synthetic oligonucleotide
  Antisense strand to SEQ ID NO: 242580
aguuccaaagcuuuccaug

SEQ ID NO: 242582 - RNA, 19 nt, Artificial Sequence
  Description of Artificial Sequence: Synthetic oligonucleotide
  Sense strand starting at position 2960 SEQ ID NO: 3120
uaaggcuuuccaugggagu

SEQ ID NO: 242583 - RNA, 19 nt, Artificial Sequence
  Description of Artificial Sequence: Synthetic oligonucleotide
  Antisense strand to SEQ ID NO: 242582
acucccauggaaagccuua

SEQ ID NO: 242584 - RNA, 19 nt, Artificial Sequence
  Description of Artificial Sequence: Synthetic oligonucleotide
  Sense strand starting at position 2981 SEQ ID NO: 3120
gggucaugggacugugaua

SEQ ID NO: 242585 - RNA, 19 nt, Artificial Sequence
  Description of Artificial Sequence: Synthetic oligonucleotide
  Antisense strand to SEQ ID NO: 242584
uaucacagucccaugaccc

SEQ ID NO: 242586 - RNA, 19 nt, Artificial Sequence
  Description of Artificial Sequence: Synthetic oligonucleotide
  Sense strand starting at position 3015 SEQ ID NO: 3120
ucuggcacuuucgacaaau

SEQ ID NO: 242587 - RNA, 19 nt, Artificial Sequence
  Description of Artificial Sequence: Synthetic oligonucleotide
  Antisense strand to SEQ ID NO: 242586
auuugucgaaagugccaga

SEQ ID NO: 242588 - RNA, 19 nt, Artificial Sequence
  Description of Artificial Sequence: Synthetic oligonucleotide
  Sense strand starting at position 3073 SEQ ID NO: 3120
gugggaugacagugauugu

SEQ ID NO: 242589 - RNA, 19 nt, Artificial Sequence
  Description of Artificial Sequence: Synthetic oligonucleotide
  Antisense strand to SEQ ID NO: 242588
acaaucacugucaucccac

SEQ ID NO: 242590 - RNA, 19 nt, Artificial Sequence
  Description of Artificial Sequence: Synthetic oligonucleotide
  Sense strand starting at position 3074 SEQ ID NO: 3120
ugggaugacagugauuguu

SEQ ID NO: 242591 - RNA, 19 nt, Artificial Sequence
  Description of Artificial Sequence: Synthetic oligonucleotide
  Antisense strand to SEQ ID NO: 242590
aacaaucacugucauccca

SEQ ID NO: 242592 - RNA, 19 nt, Artificial Sequence
  Description of Artificial Sequence: Synthetic oligonucleotide
  Sense strand starting at position 3076 SEQ ID NO: 3120
ggaugacagugauuguugu

SEQ ID NO: 242593 - RNA, 19 nt, Artificial Sequence
  Description of Artificial Sequence: Synthetic oligonucleotide
  Antisense strand to SEQ ID NO: 242592
acaacaaucacugucaucc

SEQ ID NO: 242594 - RNA, 19 nt, Artificial Sequence
  Description of Artificial Sequence: Synthetic oligonucleotide
  Sense strand starting at position 3077 SEQ ID NO: 3120
gaugacagugauuguuguu

SEQ ID NO: 242595 - RNA, 19 nt, Artificial Sequence
  Description of Artificial Sequence: Synthetic oligonucleotide
  Antisense strand to SEQ ID NO: 242594
aacaacaaucacugucauc

SEQ ID NO: 242596 - RNA, 19 nt, Artificial Sequence
  Description of Artificial Sequence: Synthetic oligonucleotide
  Sense strand starting at position 3082 SEQ ID NO: 3120
cagugauuguuguugcuau

SEQ ID NO: 242597 - RNA, 19 nt, Artificial Sequence
  Description of Artificial Sequence: Synthetic oligonucleotide
  Antisense strand to SEQ ID NO: 242596
auagcaacaacaaucacug

SEQ ID NO: 242598 - RNA, 19 nt, Artificial Sequence
  Description of Artificial Sequence: Synthetic oligonucleotide
  Sense strand starting at position 3130 SEQ ID NO: 3120
uucugaaauguaugaauug

SEQ ID NO: 242599 - RNA, 19 nt, Artificial Sequence
  Description of Artificial Sequence: Synthetic oligonucleotide
  Antisense strand to SEQ ID NO: 242598
caauucauacauuucagaa

SEQ ID NO: 242600 - RNA, 19 nt, Artificial Sequence
  Description of Artificial Sequence: Synthetic oligonucleotide
  Sense strand starting at position 3137 SEQ ID NO: 3120
auguaugaauuggagauua

SEQ ID NO: 242601 - RNA, 19 nt, Artificial Sequence
  Description of Artificial Sequence: Synthetic oligonucleotide
  Antisense strand to SEQ ID NO: 242600
uaaucuccaauucauacau

SEQ ID NO: 242602 - RNA, 19 nt, Artificial Sequence
  Description of Artificial Sequence: Synthetic oligonucleotide
  Sense strand starting at position 3428 SEQ ID NO: 3120
ccgcccgucaucuguauau

SEQ ID NO: 242603 - RNA, 19 nt, Artificial Sequence
  Description of Artificial Sequence: Synthetic oligonucleotide
  Antisense strand to SEQ ID NO: 242602
auauacagaugacgggcgg

SEQ ID NO: 242604 - RNA, 19 nt, Artificial Sequence
  Description of Artificial Sequence: Synthetic oligonucleotide
  Sense strand starting at position 3430 SEQ ID NO: 3120
gcccgucaucuguauauua

SEQ ID NO: 242605 - RNA, 19 nt, Artificial Sequence
  Description of Artificial Sequence: Synthetic oligonucleotide
  Antisense strand to SEQ ID NO: 242604
uaauauacagaugacgggc

SEQ ID NO: 242606 - RNA, 19 nt, Artificial Sequence
  Description of Artificial Sequence: Synthetic oligonucleotide
  Sense strand starting at position 3432 SEQ ID NO: 3120
ccgucaucuguauauuaaa

SEQ ID NO: 242607 - RNA, 19 nt, Artificial Sequence
  Description of Artificial Sequence: Synthetic oligonucleotide
  Antisense strand to SEQ ID NO: 242606
uuuaauauacagaugacgg

SEQ ID NO: 242608 - RNA, 19 nt, Artificial Sequence
  Description of Artificial Sequence: Synthetic oligonucleotide
  Sense strand starting at position 3761 SEQ ID NO: 3120
aaacaaggucacuguauga

SEQ ID NO: 242609 - RNA, 19 nt, Artificial Sequence
  Description of Artificial Sequence: Synthetic oligonucleotide
  Antisense strand to SEQ ID NO: 242608
ucauacagugaccuuguuu

SEQ ID NO: 242610 - RNA, 19 nt, Artificial Sequence
  Description of Artificial Sequence: Synthetic oligonucleotide
  Sense strand starting at position 3804 SEQ ID NO: 3120
cccagcauccuuggaucua

SEQ ID NO: 242611 - RNA, 19 nt, Artificial Sequence
  Description of Artificial Sequence: Synthetic oligonucleotide
  Antisense strand to SEQ ID NO: 242610
uagauccaaggaugcuggg

SEQ ID NO: 242612 - RNA, 19 nt, Artificial Sequence
  Description of Artificial Sequence: Synthetic oligonucleotide
  Sense strand starting at position 3815 SEQ ID NO: 3120
uggaucuagcagugaaaua

SEQ ID NO: 242613 - RNA, 19 nt, Artificial Sequence
  Description of Artificial Sequence: Synthetic oligonucleotide
  Antisense strand to SEQ ID NO: 242612
uauuucacugcuagaucca

SEQ ID NO: 242614 - RNA, 19 nt, Artificial Sequence
  Description of Artificial Sequence: Synthetic oligonucleotide
  Sense strand starting at position 3826 SEQ ID NO: 3120
gugaaauaguuggugccuu

SEQ ID NO: 242615 - RNA, 19 nt, Artificial Sequence
  Description of Artificial Sequence: Synthetic oligonucleotide
  Antisense strand to SEQ ID NO: 242614
aaggcaccaacuauuucac

SEQ ID NO: 242616 - RNA, 19 nt, Artificial Sequence
  Description of Artificial Sequence: Synthetic oligonucleotide
  Sense strand starting at position 3897 SEQ ID NO: 3120
cagagcuccuaguggagaa

SEQ ID NO: 242617 - RNA, 19 nt, Artificial Sequence
  Description of Artificial Sequence: Synthetic oligonucleotide
  Antisense strand to SEQ ID NO: 242616
uucuccacuaggagcucug

SEQ ID NO: 242618 - RNA, 19 nt, Artificial Sequence
  Description of Artificial Sequence: Synthetic oligonucleotide
  Sense strand starting at position 6 SEQ ID NO: 3121
gcaccacaucuuugggauu

SEQ ID NO: 242619 - RNA, 19 nt, Artificial Sequence
  Description of Artificial Sequence: Synthetic oligonucleotide
  Antisense strand to SEQ ID NO: 242618
aaucccaaagauguggugc

SEQ ID NO: 242620 - RNA, 19 nt, Artificial Sequence
  Description of Artificial Sequence: Synthetic oligonucleotide
  Sense strand starting at position 341 SEQ ID NO: 3121
gggcuuguauggguuggaa

SEQ ID NO: 242621 - RNA, 19 nt, Artificial Sequence
  Description of Artificial Sequence: Synthetic oligonucleotide
  Antisense strand to SEQ ID NO: 242620
uuccaacccauacaagccc

SEQ ID NO: 242622 - RNA, 19 nt, Artificial Sequence
  Description of Artificial Sequence: Synthetic oligonucleotide
  Sense strand starting at position 343 SEQ ID NO: 3121
gcuuguauggguuggaaca

SEQ ID NO: 242623 - RNA, 19 nt, Artificial Sequence
  Description of Artificial Sequence: Synthetic oligonucleotide
  Antisense strand to SEQ ID NO: 242622
uguuccaacccauacaagc

SEQ ID NO: 242624 - RNA, 19 nt, Artificial Sequence
  Description of Artificial Sequence: Synthetic oligonucleotide
  Sense strand starting at position 344 SEQ ID NO: 3121
cuuguauggguuggaacaa

SEQ ID NO: 242625 - RNA, 19 nt, Artificial Sequence
  Description of Artificial Sequence: Synthetic oligonucleotide
  Antisense strand to SEQ ID NO: 242624
uuguuccaacccauacaag

SEQ ID NO: 242626 - RNA, 19 nt, Artificial Sequence
  Description of Artificial Sequence: Synthetic oligonucleotide
  Sense strand starting at position 345 SEQ ID NO: 3121
uuguauggguuggaacaaa

SEQ ID NO: 242627 - RNA, 19 nt, Artificial Sequence
  Description of Artificial Sequence: Synthetic oligonucleotide
  Antisense strand to SEQ ID NO: 242626
uuuguuccaacccauacaa

SEQ ID NO: 242628 - RNA, 19 nt, Artificial Sequence
  Description of Artificial Sequence: Synthetic oligonucleotide
  Sense strand starting at position 520 SEQ ID NO: 3121
cgggaauucgauuggaaga

SEQ ID NO: 242629 - RNA, 19 nt, Artificial Sequence
  Description of Artificial Sequence: Synthetic oligonucleotide
  Antisense strand to SEQ ID NO: 242628
ucuuccaaucgaauucccg

SEQ ID NO: 242630 - RNA, 19 nt, Artificial Sequence
  Description of Artificial Sequence: Synthetic oligonucleotide
  Sense strand starting at position 522 SEQ ID NO: 3121
ggaauucgauuggaagaag

SEQ ID NO: 242631 - RNA, 19 nt, Artificial Sequence
  Description of Artificial Sequence: Synthetic oligonucleotide
  Antisense strand to SEQ ID NO: 242630
cuucuuccaaucgaauucc

SEQ ID NO: 242632 - RNA, 19 nt, Artificial Sequence
  Description of Artificial Sequence: Synthetic oligonucleotide
  Sense strand starting at position 699 SEQ ID NO: 3121
ggccaaauacaguaucuau

SEQ ID NO: 242633 - RNA, 19 nt, Artificial Sequence
  Description of Artificial Sequence: Synthetic oligonucleotide
  Antisense strand to SEQ ID NO: 242632
auagauacuguauuuggcc

SEQ ID NO: 242634 - RNA, 19 nt, Artificial Sequence
  Description of Artificial Sequence: Synthetic oligonucleotide
  Sense strand starting at position 778 SEQ ID NO: 3121
gcgccugcacauugagaua

SEQ ID NO: 242635 - RNA, 19 nt, Artificial Sequence
  Description of Artificial Sequence: Synthetic oligonucleotide
  Antisense strand to SEQ ID NO: 242634
uaucucaaugugcaggcgc

SEQ ID NO: 242636 - RNA, 19 nt, Artificial Sequence
  Description of Artificial Sequence: Synthetic oligonucleotide
  Sense strand starting at position 1024 SEQ ID NO: 3121
ggugacaguuuccaaugga

SEQ ID NO: 242637 - RNA, 19 nt, Artificial Sequence
  Description of Artificial Sequence: Synthetic oligonucleotide
  Antisense strand to SEQ ID NO: 242636
uccauuggaaacugucacc

SEQ ID NO: 242638 - RNA, 19 nt, Artificial Sequence
  Description of Artificial Sequence: Synthetic oligonucleotide
  Sense strand starting at position 1027 SEQ ID NO: 3121
gacaguuuccaauggacaa

SEQ ID NO: 242639 - RNA, 19 nt, Artificial Sequence
  Description of Artificial Sequence: Synthetic oligonucleotide
  Antisense strand to SEQ ID NO: 242638
uuguccauuggaaacuguc

SEQ ID NO: 242640 - RNA, 19 nt, Artificial Sequence
  Description of Artificial Sequence: Synthetic oligonucleotide
  Sense strand starting at position 1095 SEQ ID NO: 3121
cucucaguucucugcuaca

SEQ ID NO: 242641 - RNA, 19 nt, Artificial Sequence
  Description of Artificial Sequence: Synthetic oligonucleotide
  Antisense strand to SEQ ID NO: 242640
uguagcagagaacugagag

SEQ ID NO: 242642 - RNA, 19 nt, Artificial Sequence
  Description of Artificial Sequence: Synthetic oligonucleotide
  Sense strand starting at position 1098 SEQ ID NO: 3121
ucaguucucugcuacauuu

SEQ ID NO: 242643 - RNA, 19 nt, Artificial Sequence
  Description of Artificial Sequence: Synthetic oligonucleotide
  Antisense strand to SEQ ID NO: 242642
aaauguagcagagaacuga

SEQ ID NO: 242644 - RNA, 19 nt, Artificial Sequence
  Description of Artificial Sequence: Synthetic oligonucleotide
  Sense strand starting at position 1192 SEQ ID NO: 3121
ugggacaggugcucacaaa

SEQ ID NO: 242645 - RNA, 19 nt, Artificial Sequence
  Description of Artificial Sequence: Synthetic oligonucleotide
  Antisense strand to SEQ ID NO: 242644
uuugugagcaccuguccca

SEQ ID NO: 242646 - RNA, 19 nt, Artificial Sequence
  Description of Artificial Sequence: Synthetic oligonucleotide
  Sense strand starting at position 1531 SEQ ID NO: 3121
ggcaucaugugacucacau

SEQ ID NO: 242647 - RNA, 19 nt, Artificial Sequence
  Description of Artificial Sequence: Synthetic oligonucleotide
  Antisense strand to SEQ ID NO: 242646
augugagucacaugaugcc

SEQ ID NO: 242648 - RNA, 19 nt, Artificial Sequence
  Description of Artificial Sequence: Synthetic oligonucleotide
  Sense strand starting at position 2193 SEQ ID NO: 3121
ugcacugagcucgaggaaa

SEQ ID NO: 242649 - RNA, 19 nt, Artificial Sequence
  Description of Artificial Sequence: Synthetic oligonucleotide
  Antisense strand to SEQ ID NO: 242648
uuuccucgagcucagugca

SEQ ID NO: 242650 - RNA, 19 nt, Artificial Sequence
  Description of Artificial Sequence: Synthetic oligonucleotide
  Sense strand starting at position 2195 SEQ ID NO: 3121
cacugagcucgaggaaaga

SEQ ID NO: 242651 - RNA, 19 nt, Artificial Sequence
  Description of Artificial Sequence: Synthetic oligonucleotide
  Antisense strand to SEQ ID NO: 242650
ucuuuccucgagcucagug

SEQ ID NO: 242652 - RNA, 19 nt, Artificial Sequence
  Description of Artificial Sequence: Synthetic oligonucleotide
  Sense strand starting at position 2257 SEQ ID NO: 3121
cuugacuuacucugugauu

SEQ ID NO: 242653 - RNA, 19 nt, Artificial Sequence
  Description of Artificial Sequence: Synthetic oligonucleotide
  Antisense strand to SEQ ID NO: 242652
aaucacagaguaagucaag

SEQ ID NO: 242654 - RNA, 19 nt, Artificial Sequence
  Description of Artificial Sequence: Synthetic oligonucleotide
  Sense strand starting at position 2258 SEQ ID NO: 3121
uugacuuacucugugauua

SEQ ID NO: 242655 - RNA, 19 nt, Artificial Sequence
  Description of Artificial Sequence: Synthetic oligonucleotide
  Antisense strand to SEQ ID NO: 242654
uaaucacagaguaagucaa

SEQ ID NO: 242656 - RNA, 19 nt, Artificial Sequence
  Description of Artificial Sequence: Synthetic oligonucleotide
  Sense strand starting at position 2259 SEQ ID NO: 3121
ugacuuacucugugauuaa

SEQ ID NO: 242657 - RNA, 19 nt, Artificial Sequence
  Description of Artificial Sequence: Synthetic oligonucleotide
  Antisense strand to SEQ ID NO: 242656
uuaaucacagaguaaguca

SEQ ID NO: 242658 - RNA, 19 nt, Artificial Sequence
  Description of Artificial Sequence: Synthetic oligonucleotide
  Sense strand starting at position 2337 SEQ ID NO: 3121
ggagcucuggccgagugaa

SEQ ID NO: 242659 - RNA, 19 nt, Artificial Sequence
  Description of Artificial Sequence: Synthetic oligonucleotide
  Antisense strand to SEQ ID NO: 242658
uucacucggccagagcucc

SEQ ID NO: 242660 - RNA, 19 nt, Artificial Sequence
  Description of Artificial Sequence: Synthetic oligonucleotide
  Sense strand starting at position 2644 SEQ ID NO: 3121
auacauguguaugcgcaua

SEQ ID NO: 242661 - RNA, 19 nt, Artificial Sequence
  Description of Artificial Sequence: Synthetic oligonucleotide
  Antisense strand to SEQ ID NO: 242660
uaugcgcauacacauguau

SEQ ID NO: 242662 - RNA, 19 nt, Artificial Sequence
  Description of Artificial Sequence: Synthetic oligonucleotide
  Sense strand starting at position 2705 SEQ ID NO: 3121
cauggaaagcuuuggaacu

SEQ ID NO: 242663 - RNA, 19 nt, Artificial Sequence
  Description of Artificial Sequence: Synthetic oligonucleotide
  Antisense strand to SEQ ID NO: 242662
aguuccaaagcuuuccaug

SEQ ID NO: 242664 - RNA, 19 nt, Artificial Sequence
  Description of Artificial Sequence: Synthetic oligonucleotide
  Sense strand starting at position 3046 SEQ ID NO: 3121
uaaggcuuuccaugggagu

SEQ ID NO: 242665 - RNA, 19 nt, Artificial Sequence
  Description of Artificial Sequence: Synthetic oligonucleotide
  Antisense strand to SEQ ID NO: 242664
acucccauggaaagccuua

SEQ ID NO: 242666 - RNA, 19 nt, Artificial Sequence
  Description of Artificial Sequence: Synthetic oligonucleotide
  Sense strand starting at position 3067 SEQ ID NO: 3121
gggucaugggacugugaua

SEQ ID NO: 242667 - RNA, 19 nt, Artificial Sequence
  Description of Artificial Sequence: Synthetic oligonucleotide
  Antisense strand to SEQ ID NO: 242666
uaucacagucccaugaccc

SEQ ID NO: 242668 - RNA, 19 nt, Artificial Sequence
  Description of Artificial Sequence: Synthetic oligonucleotide
  Sense strand starting at position 3159 SEQ ID NO: 3121
gugggaugacagugauugu

SEQ ID NO: 242669 - RNA, 19 nt, Artificial Sequence
  Description of Artificial Sequence: Synthetic oligonucleotide
  Antisense strand to SEQ ID NO: 242668
acaaucacugucaucccac

SEQ ID NO: 242670 - RNA, 19 nt, Artificial Sequence
  Description of Artificial Sequence: Synthetic oligonucleotide
  Sense strand starting at position 3160 SEQ ID NO: 3121
ugggaugacagugauuguu

SEQ ID NO: 242671 - RNA, 19 nt, Artificial Sequence
  Description of Artificial Sequence: Synthetic oligonucleotide
  Antisense strand to SEQ ID NO: 242670
aacaaucacugucauccca

SEQ ID NO: 242672 - RNA, 19 nt, Artificial Sequence
  Description of Artificial Sequence: Synthetic oligonucleotide
  Sense strand starting at position 3162 SEQ ID NO: 3121
ggaugacagugauuguugu

SEQ ID NO: 242673 - RNA, 19 nt, Artificial Sequence
  Description of Artificial Sequence: Synthetic oligonucleotide
  Antisense strand to SEQ ID NO: 242672
acaacaaucacugucaucc

SEQ ID NO: 242674 - RNA, 19 nt, Artificial Sequence
  Description of Artificial Sequence: Synthetic oligonucleotide
  Sense strand starting at position 3163 SEQ ID NO: 3121
gaugacagugauuguuguu

SEQ ID NO: 242675 - RNA, 19 nt, Artificial Sequence
  Description of Artificial Sequence: Synthetic oligonucleotide
  Antisense strand to SEQ ID NO: 242674
aacaacaaucacugucauc

SEQ ID NO: 242676 - RNA, 19 nt, Artificial Sequence
  Description of Artificial Sequence: Synthetic oligonucleotide
  Sense strand starting at position 3168 SEQ ID NO: 3121
cagugauuguuguugcuau

SEQ ID NO: 242677 - RNA, 19 nt, Artificial Sequence
  Description of Artificial Sequence: Synthetic oligonucleotide
  Antisense strand to SEQ ID NO: 242676
auagcaacaacaaucacug

SEQ ID NO: 242678 - RNA, 19 nt, Artificial Sequence
  Description of Artificial Sequence: Synthetic oligonucleotide
  Sense strand starting at position 3216 SEQ ID NO: 3121
uucugaaauguaugaauug

SEQ ID NO: 242679 - RNA, 19 nt, Artificial Sequence
  Description of Artificial Sequence: Synthetic oligonucleotide
  Antisense strand to SEQ ID NO: 242678
caauucauacauuucagaa

SEQ ID NO: 242680 - RNA, 19 nt, Artificial Sequence
  Description of Artificial Sequence: Synthetic oligonucleotide
  Sense strand starting at position 3223 SEQ ID NO: 3121
auguaugaauuggagauua

SEQ ID NO: 242681 - RNA, 19 nt, Artificial Sequence
  Description of Artificial Sequence: Synthetic oligonucleotide
  Antisense strand to SEQ ID NO: 242680
uaaucuccaauucauacau

SEQ ID NO: 242682 - RNA, 19 nt, Artificial Sequence
  Description of Artificial Sequence: Synthetic oligonucleotide
  Sense strand starting at position 3514 SEQ ID NO: 3121
ccgcccgucaucuguauau

SEQ ID NO: 242683 - RNA, 19 nt, Artificial Sequence
  Description of Artificial Sequence: Synthetic oligonucleotide
  Antisense strand to SEQ ID NO: 242682
auauacagaugacgggcgg

SEQ ID NO: 242684 - RNA, 19 nt, Artificial Sequence
  Description of Artificial Sequence: Synthetic oligonucleotide
  Sense strand starting at position 3516 SEQ ID NO: 3121
gcccgucaucuguauauua

SEQ ID NO: 242685 - RNA, 19 nt, Artificial Sequence
  Description of Artificial Sequence: Synthetic oligonucleotide
  Antisense strand to SEQ ID NO: 242684
uaauauacagaugacgggc

SEQ ID NO: 242686 - RNA, 19 nt, Artificial Sequence
  Description of Artificial Sequence: Synthetic oligonucleotide
  Sense strand starting at position 3518 SEQ ID NO: 3121
ccgucaucuguauauuaaa

SEQ ID NO: 242687 - RNA, 19 nt, Artificial Sequence
  Description of Artificial Sequence: Synthetic oligonucleotide
  Antisense strand to SEQ ID NO: 242686
uuuaauauacagaugacgg

SEQ ID NO: 242688 - RNA, 19 nt, Artificial Sequence
  Description of Artificial Sequence: Synthetic oligonucleotide
  Sense strand starting at position 3847 SEQ ID NO: 3121
aaacaaggucacuguauga

SEQ ID NO: 242689 - RNA, 19 nt, Artificial Sequence
  Description of Artificial Sequence: Synthetic oligonucleotide
  Antisense strand to SEQ ID NO: 242688
ucauacagugaccuuguuu

SEQ ID NO: 242690 - RNA, 19 nt, Artificial Sequence
  Description of Artificial Sequence: Synthetic oligonucleotide
  Sense strand starting at position 3890 SEQ ID NO: 3121
cccagcauccuuggaucua

SEQ ID NO: 242691 - RNA, 19 nt, Artificial Sequence
  Description of Artificial Sequence: Synthetic oligonucleotide
  Antisense strand to SEQ ID NO: 242690
uagauccaaggaugcuggg

SEQ ID NO: 242692 - RNA, 19 nt, Artificial Sequence
  Description of Artificial Sequence: Synthetic oligonucleotide
  Sense strand starting at position 3901 SEQ ID NO: 3121
uggaucuagcagugaaaua

SEQ ID NO: 242693 - RNA, 19 nt, Artificial Sequence
  Description of Artificial Sequence: Synthetic oligonucleotide
  Antisense strand to SEQ ID NO: 242692
uauuucacugcuagaucca

SEQ ID NO: 242694 - RNA, 19 nt, Artificial Sequence
  Description of Artificial Sequence: Synthetic oligonucleotide
  Sense strand starting at position 3912 SEQ ID NO: 3121
gugaaauaguuggugccuu

SEQ ID NO: 242695 - RNA, 19 nt, Artificial Sequence
  Description of Artificial Sequence: Synthetic oligonucleotide
  Antisense strand to SEQ ID NO: 242694
aaggcaccaacuauuucac

SEQ ID NO: 242696 - RNA, 19 nt, Artificial Sequence
  Description of Artificial Sequence: Synthetic oligonucleotide
  Sense strand starting at position 3983 SEQ ID NO: 3121
cagagcuccuaguggagaa

SEQ ID NO: 242697 - RNA, 19 nt, Artificial Sequence
  Description of Artificial Sequence: Synthetic oligonucleotide
  Antisense strand to SEQ ID NO: 242696
uucuccacuaggagcucug

SEQ ID NO: 242698 - RNA, 19 nt, Artificial Sequence
  Description of Artificial Sequence: Synthetic oligonucleotide
  Sense strand starting at position 285 SEQ ID NO: 3124
ucagaaagaugccucuuua

SEQ ID NO: 242699 - RNA, 19 nt, Artificial Sequence
  Description of Artificial Sequence: Synthetic oligonucleotide
  Antisense strand to SEQ ID NO: 242698
uaaagaggcaucuuucuga

SEQ ID NO: 242700 - RNA, 19 nt, Artificial Sequence
  Description of Artificial Sequence: Synthetic oligonucleotide
  Sense strand starting at position 376 SEQ ID NO: 3124
auguaucaucccugacaug

SEQ ID NO: 242701 - RNA, 19 nt, Artificial Sequence
  Description of Artificial Sequence: Synthetic oligonucleotide
  Antisense strand to SEQ ID NO: 242700
caugucagggaugauacau

SEQ ID NO: 242702 - RNA, 19 nt, Artificial Sequence
  Description of Artificial Sequence: Synthetic oligonucleotide
  Sense strand starting at position 377 SEQ ID NO: 3124
uguaucaucccugacaugu

SEQ ID NO: 242703 - RNA, 19 nt, Artificial Sequence
  Description of Artificial Sequence: Synthetic oligonucleotide
  Antisense strand to SEQ ID NO: 242702
acaugucagggaugauaca

SEQ ID NO: 242704 - RNA, 19 nt, Artificial Sequence
  Description of Artificial Sequence: Synthetic oligonucleotide
  Sense strand starting at position 424 SEQ ID NO: 3124
ucauuaaagcucuacgaga

SEQ ID NO: 242705 - RNA, 19 nt, Artificial Sequence
  Description of Artificial Sequence: Synthetic oligonucleotide
  Antisense strand to SEQ ID NO: 242704
ucucguagagcuuuaauga

SEQ ID NO: 242706 - RNA, 19 nt, Artificial Sequence
  Description of Artificial Sequence: Synthetic oligonucleotide
  Sense strand starting at position 437 SEQ ID NO: 3124
acgagagggacuuguuugu

SEQ ID NO: 242707 - RNA, 19 nt, Artificial Sequence
  Description of Artificial Sequence: Synthetic oligonucleotide
  Antisense strand to SEQ ID NO: 242706
acaaacaagucccucucgu

SEQ ID NO: 242708 - RNA, 19 nt, Artificial Sequence
  Description of Artificial Sequence: Synthetic oligonucleotide
  Sense strand starting at position 443 SEQ ID NO: 3124
gggacuuguuugucuccua

SEQ ID NO: 242709 - RNA, 19 nt, Artificial Sequence
  Description of Artificial Sequence: Synthetic oligonucleotide
  Antisense strand to SEQ ID NO: 242708
uaggagacaaacaaguccc

SEQ ID NO: 242710 - RNA, 19 nt, Artificial Sequence
  Description of Artificial Sequence: Synthetic oligonucleotide
  Sense strand starting at position 446 SEQ ID NO: 3124
acuuguuugucuccuagaa

SEQ ID NO: 242711 - RNA, 19 nt, Artificial Sequence
  Description of Artificial Sequence: Synthetic oligonucleotide
  Antisense strand to SEQ ID NO: 242710
uucuaggagacaaacaagu

SEQ ID NO: 242712 - RNA, 19 nt, Artificial Sequence
  Description of Artificial Sequence: Synthetic oligonucleotide
  Sense strand starting at position 450 SEQ ID NO: 3124
guuugucuccuagaacuag

SEQ ID NO: 242713 - RNA, 19 nt, Artificial Sequence
  Description of Artificial Sequence: Synthetic oligonucleotide
  Antisense strand to SEQ ID NO: 242712
cuaguucuaggagacaaac

SEQ ID NO: 242714 - RNA, 19 nt, Artificial Sequence
  Description of Artificial Sequence: Synthetic oligonucleotide
  Sense strand starting at position 488 SEQ ID NO: 3124
gaaggcucucgauaaacac

SEQ ID NO: 242715 - RNA, 19 nt, Artificial Sequence
  Description of Artificial Sequence: Synthetic oligonucleotide
  Antisense strand to SEQ ID NO: 242714
guguuuaucgagagccuuc

SEQ ID NO: 242716 - RNA, 19 nt, Artificial Sequence
  Description of Artificial Sequence: Synthetic oligonucleotide
  Sense strand starting at position 536 SEQ ID NO: 3124
guggcaaugacauguggga

SEQ ID NO: 242717 - RNA, 19 nt, Artificial Sequence
  Description of Artificial Sequence: Synthetic oligonucleotide
  Antisense strand to SEQ ID NO: 242716
ucccacaugucauugccac

SEQ ID NO: 242718 - RNA, 19 nt, Artificial Sequence
  Description of Artificial Sequence: Synthetic oligonucleotide
  Sense strand starting at position 640 SEQ ID NO: 3124
aggcaagauccuugggugu

SEQ ID NO: 242719 - RNA, 19 nt, Artificial Sequence
  Description of Artificial Sequence: Synthetic oligonucleotide
  Antisense strand to SEQ ID NO: 242718
acacccaaggaucuugccu

SEQ ID NO: 242720 - RNA, 19 nt, Artificial Sequence
  Description of Artificial Sequence: Synthetic oligonucleotide
  Sense strand starting at position 945 SEQ ID NO: 3124
cucuucugcccaugaagau

SEQ ID NO: 242721 - RNA, 19 nt, Artificial Sequence
  Description of Artificial Sequence: Synthetic oligonucleotide
  Antisense strand to SEQ ID NO: 242720
aucuucaugggcagaagag

SEQ ID NO: 242722 - RNA, 19 nt, Artificial Sequence
  Description of Artificial Sequence: Synthetic oligonucleotide
  Sense strand starting at position 946 SEQ ID NO: 3124
ucuucugcccaugaagaua

SEQ ID NO: 242723 - RNA, 19 nt, Artificial Sequence
  Description of Artificial Sequence: Synthetic oligonucleotide
  Antisense strand to SEQ ID NO: 242722
uaucuucaugggcagaaga

SEQ ID NO: 242724 - RNA, 19 nt, Artificial Sequence
  Description of Artificial Sequence: Synthetic oligonucleotide
  Sense strand starting at position 1036 SEQ ID NO: 3124
cuuucuagaccugaaguca

SEQ ID NO: 242725 - RNA, 19 nt, Artificial Sequence
  Description of Artificial Sequence: Synthetic oligonucleotide
  Antisense strand to SEQ ID NO: 242724
ugacuucaggucuagaaag

SEQ ID NO: 242726 - RNA, 19 nt, Artificial Sequence
  Description of Artificial Sequence: Synthetic oligonucleotide
  Sense strand starting at position 1083 SEQ ID NO: 3124
ucaacaguuggcuggguaa

SEQ ID NO: 242727 - RNA, 19 nt, Artificial Sequence
  Description of Artificial Sequence: Synthetic oligonucleotide
  Antisense strand to SEQ ID NO: 242726
uuacccagccaacuguuga

SEQ ID NO: 242728 - RNA, 19 nt, Artificial Sequence
  Description of Artificial Sequence: Synthetic oligonucleotide
  Sense strand starting at position 1085 SEQ ID NO: 3124
aacaguuggcuggguaaca

SEQ ID NO: 242729 - RNA, 19 nt, Artificial Sequence
  Description of Artificial Sequence: Synthetic oligonucleotide
  Antisense strand to SEQ ID NO: 242728
uguuacccagccaacuguu

SEQ ID NO: 242730 - RNA, 19 nt, Artificial Sequence
  Description of Artificial Sequence: Synthetic oligonucleotide
  Sense strand starting at position 1125 SEQ ID NO: 3124
ggcaucuuagccuaagacu

SEQ ID NO: 242731 - RNA, 19 nt, Artificial Sequence
  Description of Artificial Sequence: Synthetic oligonucleotide
  Antisense strand to SEQ ID NO: 242730
agucuuaggcuaagaugcc

SEQ ID NO: 242732 - RNA, 19 nt, Artificial Sequence
  Description of Artificial Sequence: Synthetic oligonucleotide
  Sense strand starting at position 1133 SEQ ID NO: 3124
agccuaagacuuuguguag

SEQ ID NO: 242733 - RNA, 19 nt, Artificial Sequence
  Description of Artificial Sequence: Synthetic oligonucleotide
  Antisense strand to SEQ ID NO: 242732
cuacacaaagucuuaggcu

SEQ ID NO: 242734 - RNA, 19 nt, Artificial Sequence
  Description of Artificial Sequence: Synthetic oligonucleotide
  Sense strand starting at position 1136 SEQ ID NO: 3124
cuaagacuuuguguaggga

SEQ ID NO: 242735 - RNA, 19 nt, Artificial Sequence
  Description of Artificial Sequence: Synthetic oligonucleotide
  Antisense strand to SEQ ID NO: 242734
ucccuacacaaagucuuag

SEQ ID NO: 242736 - RNA, 19 nt, Artificial Sequence
  Description of Artificial Sequence: Synthetic oligonucleotide
  Sense strand starting at position 1339 SEQ ID NO: 3124
guaacuugcgcucuccuga

SEQ ID NO: 242737 - RNA, 19 nt, Artificial Sequence
  Description of Artificial Sequence: Synthetic oligonucleotide
  Antisense strand to SEQ ID NO: 242736
ucaggagagcgcaaguuac

SEQ ID NO: 242738 - RNA, 19 nt, Artificial Sequence
  Description of Artificial Sequence: Synthetic oligonucleotide
  Sense strand starting at position 2268 SEQ ID NO: 3124
aaguuuagccguuagagag

SEQ ID NO: 242739 - RNA, 19 nt, Artificial Sequence
  Description of Artificial Sequence: Synthetic oligonucleotide
  Antisense strand to SEQ ID NO: 242738
cucucuaacggcuaaacuu

SEQ ID NO: 242740 - RNA, 19 nt, Artificial Sequence
  Description of Artificial Sequence: Synthetic oligonucleotide
  Sense strand starting at position 2363 SEQ ID NO: 3124
ccgaucggucaacaaauau

SEQ ID NO: 242741 - RNA, 19 nt, Artificial Sequence
  Description of Artificial Sequence: Synthetic oligonucleotide
  Antisense strand to SEQ ID NO: 242740
auauuuguugaccgaucgg

SEQ ID NO: 242742 - RNA, 19 nt, Artificial Sequence
  Description of Artificial Sequence: Synthetic oligonucleotide
  Sense strand starting at position 2798 SEQ ID NO: 3124
aaagcugagucugcaaaca

SEQ ID NO: 242743 - RNA, 19 nt, Artificial Sequence
  Description of Artificial Sequence: Synthetic oligonucleotide
  Antisense strand to SEQ ID NO: 242742
uguuugcagacucagcuuu

SEQ ID NO: 242744 - RNA, 19 nt, Artificial Sequence
  Description of Artificial Sequence: Synthetic oligonucleotide
  Sense strand starting at position 2893 SEQ ID NO: 3124
agaagcugggcuuaacuau

SEQ ID NO: 242745 - RNA, 19 nt, Artificial Sequence
  Description of Artificial Sequence: Synthetic oligonucleotide
  Antisense strand to SEQ ID NO: 242744
auaguuaagcccagcuucu

SEQ ID NO: 242746 - RNA, 19 nt, Artificial Sequence
  Description of Artificial Sequence: Synthetic oligonucleotide
  Sense strand starting at position 3078 SEQ ID NO: 3124
cggacauugauaugccuua

SEQ ID NO: 242747 - RNA, 19 nt, Artificial Sequence
  Description of Artificial Sequence: Synthetic oligonucleotide
  Antisense strand to SEQ ID NO: 242746
uaaggcauaucaauguccg

SEQ ID NO: 242748 - RNA, 19 nt, Artificial Sequence
  Description of Artificial Sequence: Synthetic oligonucleotide
  Sense strand starting at position 3079 SEQ ID NO: 3124
ggacauugauaugccuuau

SEQ ID NO: 242749 - RNA, 19 nt, Artificial Sequence
  Description of Artificial Sequence: Synthetic oligonucleotide
  Antisense strand to SEQ ID NO: 242748
auaaggcauaucaaugucc

SEQ ID NO: 242750 - RNA, 19 nt, Artificial Sequence
  Description of Artificial Sequence: Synthetic oligonucleotide
  Sense strand starting at position 3097 SEQ ID NO: 3124
uuauuugucucagauuugu

SEQ ID NO: 242751 - RNA, 19 nt, Artificial Sequence
  Description of Artificial Sequence: Synthetic oligonucleotide
  Antisense strand to SEQ ID NO: 242750
acaaaucugagacaaauaa

SEQ ID NO: 242752 - RNA, 19 nt, Artificial Sequence
  Description of Artificial Sequence: Synthetic oligonucleotide
  Sense strand starting at position 3107 SEQ ID NO: 3124
cagauuuguuuauaggcaa

SEQ ID NO: 242753 - RNA, 19 nt, Artificial Sequence
  Description of Artificial Sequence: Synthetic oligonucleotide
  Antisense strand to SEQ ID NO: 242752
uugccuauaaacaaaucug

SEQ ID NO: 242754 - RNA, 19 nt, Artificial Sequence
  Description of Artificial Sequence: Synthetic oligonucleotide
  Sense strand starting at position 3111 SEQ ID NO: 3124
uuuguuuauaggcaagaug

SEQ ID NO: 242755 - RNA, 19 nt, Artificial Sequence
  Description of Artificial Sequence: Synthetic oligonucleotide
  Antisense strand to SEQ ID NO: 242754
caucuugccuauaaacaaa

SEQ ID NO: 242756 - RNA, 19 nt, Artificial Sequence
  Description of Artificial Sequence: Synthetic oligonucleotide
  Sense strand starting at position 3191 SEQ ID NO: 3124
agugaagagcugggaugau

SEQ ID NO: 242757 - RNA, 19 nt, Artificial Sequence
  Description of Artificial Sequence: Synthetic oligonucleotide
  Antisense strand to SEQ ID NO: 242756
aucaucccagcucuucacu

SEQ ID NO: 242758 - RNA, 19 nt, Artificial Sequence
  Description of Artificial Sequence: Synthetic oligonucleotide
  Sense strand starting at position 3275 SEQ ID NO: 3124
gcaaaugguccuccguguu

SEQ ID NO: 242759 - RNA, 19 nt, Artificial Sequence
  Description of Artificial Sequence: Synthetic oligonucleotide
  Antisense strand to SEQ ID NO: 242758
aacacggaggaccauuugc

SEQ ID NO: 242760 - RNA, 19 nt, Artificial Sequence
  Description of Artificial Sequence: Synthetic oligonucleotide
  Sense strand starting at position 3371 SEQ ID NO: 3124
ccaggagucugaguguagu

SEQ ID NO: 242761 - RNA, 19 nt, Artificial Sequence
  Description of Artificial Sequence: Synthetic oligonucleotide
  Antisense strand to SEQ ID NO: 242760
acuacacucagacuccugg

SEQ ID NO: 242762 - RNA, 19 nt, Artificial Sequence
  Description of Artificial Sequence: Synthetic oligonucleotide
  Sense strand starting at position 3476 SEQ ID NO: 3124
ggacuucuuugcccuccua

SEQ ID NO: 242763 - RNA, 19 nt, Artificial Sequence
  Description of Artificial Sequence: Synthetic oligonucleotide
  Antisense strand to SEQ ID NO: 242762
uaggagggcaaagaagucc

SEQ ID NO: 242764 - RNA, 19 nt, Artificial Sequence
  Description of Artificial Sequence: Synthetic oligonucleotide
  Sense strand starting at position 3571 SEQ ID NO: 3124
uagaauagauuagaaggaa

SEQ ID NO: 242765 - RNA, 19 nt, Artificial Sequence
  Description of Artificial Sequence: Synthetic oligonucleotide
  Antisense strand to SEQ ID NO: 242764
uuccuucuaaucuauucua

SEQ ID NO: 242766 - RNA, 19 nt, Artificial Sequence
  Description of Artificial Sequence: Synthetic oligonucleotide
  Sense strand starting at position 3585 SEQ ID NO: 3124
aggaaugucacgugcaaag

SEQ ID NO: 242767 - RNA, 19 nt, Artificial Sequence
  Description of Artificial Sequence: Synthetic oligonucleotide
  Antisense strand to SEQ ID NO: 242766
cuuugcacgugacauuccu

SEQ ID NO: 242768 - RNA, 19 nt, Artificial Sequence
  Description of Artificial Sequence: Synthetic oligonucleotide
  Sense strand starting at position 3782 SEQ ID NO: 3124
gagcauguugaagguauga

SEQ ID NO: 242769 - RNA, 19 nt, Artificial Sequence
  Description of Artificial Sequence: Synthetic oligonucleotide
  Antisense strand to SEQ ID NO: 242768
ucauaccuucaacaugcuc

SEQ ID NO: 242770 - RNA, 19 nt, Artificial Sequence
  Description of Artificial Sequence: Synthetic oligonucleotide
  Sense strand starting at position 3784 SEQ ID NO: 3124
gcauguugaagguaugaag

SEQ ID NO: 242771 - RNA, 19 nt, Artificial Sequence
  Description of Artificial Sequence: Synthetic oligonucleotide
  Antisense strand to SEQ ID NO: 242770
cuucauaccuucaacaugc

SEQ ID NO: 242772 - RNA, 19 nt, Artificial Sequence
  Description of Artificial Sequence: Synthetic oligonucleotide
  Sense strand starting at position 3914 SEQ ID NO: 3124
uuggucaagacuugggaau

SEQ ID NO: 242773 - RNA, 19 nt, Artificial Sequence
  Description of Artificial Sequence: Synthetic oligonucleotide
  Antisense strand to SEQ ID NO: 242772
auucccaagucuugaccaa

SEQ ID NO: 242774 - RNA, 19 nt, Artificial Sequence
  Description of Artificial Sequence: Synthetic oligonucleotide
  Sense strand starting at position 3925 SEQ ID NO: 3124
uugggaauccaaugggugu

SEQ ID NO: 242775 - RNA, 19 nt, Artificial Sequence
  Description of Artificial Sequence: Synthetic oligonucleotide
  Antisense strand to SEQ ID NO: 242774
acacccauuggauucccaa

SEQ ID NO: 242776 - RNA, 19 nt, Artificial Sequence
  Description of Artificial Sequence: Synthetic oligonucleotide
  Sense strand starting at position 3981 SEQ ID NO: 3124
uugugaguggcuggacauu

SEQ ID NO: 242777 - RNA, 19 nt, Artificial Sequence
  Description of Artificial Sequence: Synthetic oligonucleotide
  Antisense strand to SEQ ID NO: 242776
aauguccagccacucacaa

SEQ ID NO: 242778 - RNA, 19 nt, Artificial Sequence
  Description of Artificial Sequence: Synthetic oligonucleotide
  Sense strand starting at position 39 SEQ ID NO: 3125
uguagaauguggcuguaag

SEQ ID NO: 242779 - RNA, 19 nt, Artificial Sequence
  Description of Artificial Sequence: Synthetic oligonucleotide
  Antisense strand to SEQ ID NO: 242778
cuuacagccacauucuaca

SEQ ID NO: 242780 - RNA, 19 nt, Artificial Sequence
  Description of Artificial Sequence: Synthetic oligonucleotide
  Sense strand starting at position 40 SEQ ID NO: 3125
guagaauguggcuguaaga

SEQ ID NO: 242781 - RNA, 19 nt, Artificial Sequence
  Description of Artificial Sequence: Synthetic oligonucleotide
  Antisense strand to SEQ ID NO: 242780
ucuuacagccacauucuac

SEQ ID NO: 242782 - RNA, 19 nt, Artificial Sequence
  Description of Artificial Sequence: Synthetic oligonucleotide
  Sense strand starting at position 789 SEQ ID NO: 3125
caagccugugccuggaaga

SEQ ID NO: 242783 - RNA, 19 nt, Artificial Sequence
  Description of Artificial Sequence: Synthetic oligonucleotide
  Antisense strand to SEQ ID NO: 242782
ucuuccaggcacaggcuug

SEQ ID NO: 242784 - RNA, 19 nt, Artificial Sequence
  Description of Artificial Sequence: Synthetic oligonucleotide
  Sense strand starting at position 790 SEQ ID NO: 3125
aagccugugccuggaagaa

SEQ ID NO: 242785 - RNA, 19 nt, Artificial Sequence
  Description of Artificial Sequence: Synthetic oligonucleotide
  Antisense strand to SEQ ID NO: 242784
uucuuccaggcacaggcuu

SEQ ID NO: 242786 - RNA, 19 nt, Artificial Sequence
  Description of Artificial Sequence: Synthetic oligonucleotide
  Sense strand starting at position 1759 SEQ ID NO: 3125
aguaguacuucuucucgua

SEQ ID NO: 242787 - RNA, 19 nt, Artificial Sequence
  Description of Artificial Sequence: Synthetic oligonucleotide
  Antisense strand to SEQ ID NO: 242786
uacgagaagaaguacuacu

SEQ ID NO: 242788 - RNA, 19 nt, Artificial Sequence
  Description of Artificial Sequence: Synthetic oligonucleotide
  Sense strand starting at position 2486 SEQ ID NO: 3125
ggaagugauuccgcccuca

SEQ ID NO: 242789 - RNA, 19 nt, Artificial Sequence
  Description of Artificial Sequence: Synthetic oligonucleotide
  Antisense strand to SEQ ID NO: 242788
ugagggcggaaucacuucc

SEQ ID NO: 242790 - RNA, 19 nt, Artificial Sequence
  Description of Artificial Sequence: Synthetic oligonucleotide
  Sense strand starting at position 2664 SEQ ID NO: 3125
gaggaaaggccuugaccuu

SEQ ID NO: 242791 - RNA, 19 nt, Artificial Sequence
  Description of Artificial Sequence: Synthetic oligonucleotide
  Antisense strand to SEQ ID NO: 242790
aaggucaaggccuuuccuc

SEQ ID NO: 242792 - RNA, 19 nt, Artificial Sequence
  Description of Artificial Sequence: Synthetic oligonucleotide
  Sense strand starting at position 2698 SEQ ID NO: 3125
gaaguuagacgcuagccua

SEQ ID NO: 242793 - RNA, 19 nt, Artificial Sequence
  Description of Artificial Sequence: Synthetic oligonucleotide
  Antisense strand to SEQ ID NO: 242792
uaggcuagcgucuaacuuc

SEQ ID NO: 242794 - RNA, 19 nt, Artificial Sequence
  Description of Artificial Sequence: Synthetic oligonucleotide
  Sense strand starting at position 2856 SEQ ID NO: 3125
aagagauguugggcugucu

SEQ ID NO: 242795 - RNA, 19 nt, Artificial Sequence
  Description of Artificial Sequence: Synthetic oligonucleotide
  Antisense strand to SEQ ID NO: 242794
agacagcccaacaucucuu

SEQ ID NO: 242796 - RNA, 19 nt, Artificial Sequence
  Description of Artificial Sequence: Synthetic oligonucleotide
  Sense strand starting at position 2899 SEQ ID NO: 3125
uggcuuccuccuuguuuga

SEQ ID NO: 242797 - RNA, 19 nt, Artificial Sequence
  Description of Artificial Sequence: Synthetic oligonucleotide
  Antisense strand to SEQ ID NO: 242796
ucaaacaaggaggaagcca

SEQ ID NO: 242798 - RNA, 19 nt, Artificial Sequence
  Description of Artificial Sequence: Synthetic oligonucleotide
  Sense strand starting at position 2901 SEQ ID NO: 3125
gcuuccuccuuguuugaaa

SEQ ID NO: 242799 - RNA, 19 nt, Artificial Sequence
  Description of Artificial Sequence: Synthetic oligonucleotide
  Antisense strand to SEQ ID NO: 242798
uuucaaacaaggaggaagc

SEQ ID NO: 242800 - RNA, 19 nt, Artificial Sequence
  Description of Artificial Sequence: Synthetic oligonucleotide
  Sense strand starting at position 2989 SEQ ID NO: 3125
uugagccaauucuuaagaa

SEQ ID NO: 242801 - RNA, 19 nt, Artificial Sequence
  Description of Artificial Sequence: Synthetic oligonucleotide
  Antisense strand to SEQ ID NO: 242800
uucuuaagaauuggcucaa

SEQ ID NO: 242802 - RNA, 19 nt, Artificial Sequence
  Description of Artificial Sequence: Synthetic oligonucleotide
  Sense strand starting at position 2990 SEQ ID NO: 3125
ugagccaauucuuaagaau

SEQ ID NO: 242803 - RNA, 19 nt, Artificial Sequence
  Description of Artificial Sequence: Synthetic oligonucleotide
  Antisense strand to SEQ ID NO: 242802
auucuuaagaauuggcuca

SEQ ID NO: 242804 - RNA, 19 nt, Artificial Sequence
  Description of Artificial Sequence: Synthetic oligonucleotide
  Sense strand starting at position 2993 SEQ ID NO: 3125
gccaauucuuaagaaucgu

SEQ ID NO: 242805 - RNA, 19 nt, Artificial Sequence
  Description of Artificial Sequence: Synthetic oligonucleotide
  Antisense strand to SEQ ID NO: 242804
acgauucuuaagaauuggc

SEQ ID NO: 242806 - RNA, 19 nt, Artificial Sequence
  Description of Artificial Sequence: Synthetic oligonucleotide
  Sense strand starting at position 2997 SEQ ID NO: 3125
auucuuaagaaucgugagu

SEQ ID NO: 242807 - RNA, 19 nt, Artificial Sequence
  Description of Artificial Sequence: Synthetic oligonucleotide
  Antisense strand to SEQ ID NO: 242806
acucacgauucuuaagaau

SEQ ID NO: 242808 - RNA, 19 nt, Artificial Sequence
  Description of Artificial Sequence: Synthetic oligonucleotide
  Sense strand starting at position 3010 SEQ ID NO: 3125
gugagugcccaccaaauau

SEQ ID NO: 242809 - RNA, 19 nt, Artificial Sequence
  Description of Artificial Sequence: Synthetic oligonucleotide
  Antisense strand to SEQ ID NO: 242808
auauuuggugggcacucac

SEQ ID NO: 242810 - RNA, 19 nt, Artificial Sequence
  Description of Artificial Sequence: Synthetic oligonucleotide
  Sense strand starting at position 3314 SEQ ID NO: 3125
gcccuaguguguugguuca

SEQ ID NO: 242811 - RNA, 19 nt, Artificial Sequence
  Description of Artificial Sequence: Synthetic oligonucleotide
  Antisense strand to SEQ ID NO: 242810
ugaaccaacacacuagggc

SEQ ID NO: 242812 - RNA, 19 nt, Artificial Sequence
  Description of Artificial Sequence: Synthetic oligonucleotide
  Sense strand starting at position 3437 SEQ ID NO: 3125
ccugccuuccguucuguua

SEQ ID NO: 242813 - RNA, 19 nt, Artificial Sequence
  Description of Artificial Sequence: Synthetic oligonucleotide
  Antisense strand to SEQ ID NO: 242812
uaacagaacggaaggcagg

SEQ ID NO: 242814 - RNA, 19 nt, Artificial Sequence
  Description of Artificial Sequence: Synthetic oligonucleotide
  Sense strand starting at position 3492 SEQ ID NO: 3125
caguaaagcuguuaaacgu

SEQ ID NO: 242815 - RNA, 19 nt, Artificial Sequence
  Description of Artificial Sequence: Synthetic oligonucleotide
  Antisense strand to SEQ ID NO: 242814
acguuuaacagcuuuacug

SEQ ID NO: 242816 - RNA, 19 nt, Artificial Sequence
  Description of Artificial Sequence: Synthetic oligonucleotide
  Sense strand starting at position 3498 SEQ ID NO: 3125
agcuguuaaacguagacaa

SEQ ID NO: 242817 - RNA, 19 nt, Artificial Sequence
  Description of Artificial Sequence: Synthetic oligonucleotide
  Antisense strand to SEQ ID NO: 242816
uugucuacguuuaacagcu

SEQ ID NO: 242818 - RNA, 19 nt, Artificial Sequence
  Description of Artificial Sequence: Synthetic oligonucleotide
  Sense strand starting at position 3500 SEQ ID NO: 3125
cuguuaaacguagacaaca

SEQ ID NO: 242819 - RNA, 19 nt, Artificial Sequence
  Description of Artificial Sequence: Synthetic oligonucleotide
  Antisense strand to SEQ ID NO: 242818
uguugucuacguuuaacag

SEQ ID NO: 242820 - RNA, 19 nt, Artificial Sequence
  Description of Artificial Sequence: Synthetic oligonucleotide
  Sense strand starting at position 3619 SEQ ID NO: 3125
aagaauauccgcuguggac

SEQ ID NO: 242821 - RNA, 19 nt, Artificial Sequence
  Description of Artificial Sequence: Synthetic oligonucleotide
  Antisense strand to SEQ ID NO: 242820
guccacagcggauauucuu

SEQ ID NO: 242822 - RNA, 19 nt, Artificial Sequence
  Description of Artificial Sequence: Synthetic oligonucleotide
  Sense strand starting at position 3784 SEQ ID NO: 3125
uggacaagcuucuccagaa

SEQ ID NO: 242823 - RNA, 19 nt, Artificial Sequence
  Description of Artificial Sequence: Synthetic oligonucleotide
  Antisense strand to SEQ ID NO: 242822
uucuggagaagcuugucca

SEQ ID NO: 242824 - RNA, 19 nt, Artificial Sequence
  Description of Artificial Sequence: Synthetic oligonucleotide
  Sense strand starting at position 3785 SEQ ID NO: 3125
ggacaagcuucuccagaag

SEQ ID NO: 242825 - RNA, 19 nt, Artificial Sequence
  Description of Artificial Sequence: Synthetic oligonucleotide
  Antisense strand to SEQ ID NO: 242824
cuucuggagaagcuugucc

SEQ ID NO: 242826 - RNA, 19 nt, Artificial Sequence
  Description of Artificial Sequence: Synthetic oligonucleotide
  Sense strand starting at position 3788 SEQ ID NO: 3125
caagcuucuccagaaguga

SEQ ID NO: 242827 - RNA, 19 nt, Artificial Sequence
  Description of Artificial Sequence: Synthetic oligonucleotide
  Antisense strand to SEQ ID NO: 242826
ucacuucuggagaagcuug

SEQ ID NO: 242828 - RNA, 19 nt, Artificial Sequence
  Description of Artificial Sequence: Synthetic oligonucleotide
  Sense strand starting at position 3799 SEQ ID NO: 3125
agaagugacucauuccuau

SEQ ID NO: 242829 - RNA, 19 nt, Artificial Sequence
  Description of Artificial Sequence: Synthetic oligonucleotide
  Antisense strand to SEQ ID NO: 242828
auaggaaugagucacuucu

SEQ ID NO: 242830 - RNA, 19 nt, Artificial Sequence
  Description of Artificial Sequence: Synthetic oligonucleotide
  Sense strand starting at position 3803 SEQ ID NO: 3125
gugacucauuccuauagga

SEQ ID NO: 242831 - RNA, 19 nt, Artificial Sequence
  Description of Artificial Sequence: Synthetic oligonucleotide
  Antisense strand to SEQ ID NO: 242830
uccuauaggaaugagucac

SEQ ID NO: 242832 - RNA, 19 nt, Artificial Sequence
  Description of Artificial Sequence: Synthetic oligonucleotide
  Sense strand starting at position 3971 SEQ ID NO: 3125
agauguccuuacccagaua

SEQ ID NO: 242833 - RNA, 19 nt, Artificial Sequence
  Description of Artificial Sequence: Synthetic oligonucleotide
  Antisense strand to SEQ ID NO: 242832
uaucuggguaaggacaucu

SEQ ID NO: 242834 - RNA, 19 nt, Artificial Sequence
  Description of Artificial Sequence: Synthetic oligonucleotide
  Sense strand starting at position 8 SEQ ID NO: 3126
guuguuggaucacuugaua

SEQ ID NO: 242835 - RNA, 19 nt, Artificial Sequence
  Description of Artificial Sequence: Synthetic oligonucleotide
  Antisense strand to SEQ ID NO: 242834
uaucaagugauccaacaac

SEQ ID NO: 242836 - RNA, 19 nt, Artificial Sequence
  Description of Artificial Sequence: Synthetic oligonucleotide
  Sense strand starting at position 11 SEQ ID NO: 3126
guuggaucacuugauaucu

SEQ ID NO: 242837 - RNA, 19 nt, Artificial Sequence
  Description of Artificial Sequence: Synthetic oligonucleotide
  Antisense strand to SEQ ID NO: 242836
agauaucaagugauccaac

SEQ ID NO: 242838 - RNA, 19 nt, Artificial Sequence
  Description of Artificial Sequence: Synthetic oligonucleotide
  Sense strand starting at position 123 SEQ ID NO: 3126
uuaaauaugcuuuggaaca

SEQ ID NO: 242839 - RNA, 19 nt, Artificial Sequence
  Description of Artificial Sequence: Synthetic oligonucleotide
  Antisense strand to SEQ ID NO: 242838
uguuccaaagcauauuuaa

SEQ ID NO: 242840 - RNA, 19 nt, Artificial Sequence
  Description of Artificial Sequence: Synthetic oligonucleotide
  Sense strand starting at position 199 SEQ ID NO: 3126
ggaagcuacugucuaauga

SEQ ID NO: 242841 - RNA, 19 nt, Artificial Sequence
  Description of Artificial Sequence: Synthetic oligonucleotide
  Antisense strand to SEQ ID NO: 242840
ucauuagacaguagcuucc

SEQ ID NO: 242842 - RNA, 19 nt, Artificial Sequence
  Description of Artificial Sequence: Synthetic oligonucleotide
  Sense strand starting at position 206 SEQ ID NO: 3126
acugucuaaugaguacaaa

SEQ ID NO: 242843 - RNA, 19 nt, Artificial Sequence
  Description of Artificial Sequence: Synthetic oligonucleotide
  Antisense strand to SEQ ID NO: 242842
uuuguacucauuagacagu

SEQ ID NO: 242844 - RNA, 19 nt, Artificial Sequence
  Description of Artificial Sequence: Synthetic oligonucleotide
  Sense strand starting at position 209 SEQ ID NO: 3126
gucuaaugaguacaaaguu

SEQ ID NO: 242845 - RNA, 19 nt, Artificial Sequence
  Description of Artificial Sequence: Synthetic oligonucleotide
  Antisense strand to SEQ ID NO: 242844
aacuuuguacucauuagac

SEQ ID NO: 242846 - RNA, 19 nt, Artificial Sequence
  Description of Artificial Sequence: Synthetic oligonucleotide
  Sense strand starting at position 425 SEQ ID NO: 3126
cuacacuuggcaugaacua

SEQ ID NO: 242847 - RNA, 19 nt, Artificial Sequence
  Description of Artificial Sequence: Synthetic oligonucleotide
  Antisense strand to SEQ ID NO: 242846
uaguucaugccaaguguag

SEQ ID NO: 242848 - RNA, 19 nt, Artificial Sequence
  Description of Artificial Sequence: Synthetic oligonucleotide
  Sense strand starting at position 478 SEQ ID NO: 3126
gaaauucuaccucgaguuu

SEQ ID NO: 242849 - RNA, 19 nt, Artificial Sequence
  Description of Artificial Sequence: Synthetic oligonucleotide
  Antisense strand to SEQ ID NO: 242848
aaacucgagguagaauuuc

SEQ ID NO: 242850 - RNA, 19 nt, Artificial Sequence
  Description of Artificial Sequence: Synthetic oligonucleotide
  Sense strand starting at position 484 SEQ ID NO: 3126
cuaccucgaguuuaagaau

SEQ ID NO: 242851 - RNA, 19 nt, Artificial Sequence
  Description of Artificial Sequence: Synthetic oligonucleotide
  Antisense strand to SEQ ID NO: 242850
auucuuaaacucgagguag

SEQ ID NO: 242852 - RNA, 19 nt, Artificial Sequence
  Description of Artificial Sequence: Synthetic oligonucleotide
  Sense strand starting at position 504 SEQ ID NO: 3126
caccuugagcuguaaguua

SEQ ID NO: 242853 - RNA, 19 nt, Artificial Sequence
  Description of Artificial Sequence: Synthetic oligonucleotide
  Antisense strand to SEQ ID NO: 242852
uaacuuacagcucaaggug

SEQ ID NO: 242854 - RNA, 19 nt, Artificial Sequence
  Description of Artificial Sequence: Synthetic oligonucleotide
  Sense strand starting at position 515 SEQ ID NO: 3126
guaaguuacuaccugauua

SEQ ID NO: 242855 - RNA, 19 nt, Artificial Sequence
  Description of Artificial Sequence: Synthetic oligonucleotide
  Antisense strand to SEQ ID NO: 242854
uaaucagguaguaacuuac

SEQ ID NO: 242856 - RNA, 19 nt, Artificial Sequence
  Description of Artificial Sequence: Synthetic oligonucleotide
  Sense strand starting at position 519 SEQ ID NO: 3126
guuacuaccugauuacauc

SEQ ID NO: 242857 - RNA, 19 nt, Artificial Sequence
  Description of Artificial Sequence: Synthetic oligonucleotide
  Antisense strand to SEQ ID NO: 242856
gauguaaucagguaguaac

SEQ ID NO: 242858 - RNA, 19 nt, Artificial Sequence
  Description of Artificial Sequence: Synthetic oligonucleotide
  Sense strand starting at position 669 SEQ ID NO: 3126
gaaaguacuguugaauagu

SEQ ID NO: 242859 - RNA, 19 nt, Artificial Sequence
  Description of Artificial Sequence: Synthetic oligonucleotide
  Antisense strand to SEQ ID NO: 242858
acuauucaacaguacuuuc

SEQ ID NO: 242860 - RNA, 19 nt, Artificial Sequence
  Description of Artificial Sequence: Synthetic oligonucleotide
  Sense strand starting at position 691 SEQ ID NO: 3126
gugcgacuauuugugagua

SEQ ID NO: 242861 - RNA, 19 nt, Artificial Sequence
  Description of Artificial Sequence: Synthetic oligonucleotide
  Antisense strand to SEQ ID NO: 242860
uacucacaaauagucgcac

SEQ ID NO: 242862 - RNA, 19 nt, Artificial Sequence
  Description of Artificial Sequence: Synthetic oligonucleotide
  Sense strand starting at position 896 SEQ ID NO: 3126
gucucaucuggcgaaagac

SEQ ID NO: 242863 - RNA, 19 nt, Artificial Sequence
  Description of Artificial Sequence: Synthetic oligonucleotide
  Antisense strand to SEQ ID NO: 242862
gucuuucgccagaugagac

SEQ ID NO: 242864 - RNA, 19 nt, Artificial Sequence
  Description of Artificial Sequence: Synthetic oligonucleotide
  Sense strand starting at position 905 SEQ ID NO: 3126
ggcgaaagacuguggguaa

SEQ ID NO: 242865 - RNA, 19 nt, Artificial Sequence
  Description of Artificial Sequence: Synthetic oligonucleotide
  Antisense strand to SEQ ID NO: 242864
uuacccacagucuuucgcc

SEQ ID NO: 242866 - RNA, 19 nt, Artificial Sequence
  Description of Artificial Sequence: Synthetic oligonucleotide
  Sense strand starting at position 1360 SEQ ID NO: 3126
agcaaagugucuccaugga

SEQ ID NO: 242867 - RNA, 19 nt, Artificial Sequence
  Description of Artificial Sequence: Synthetic oligonucleotide
  Antisense strand to SEQ ID NO: 242866
uccauggagacacuuugcu

SEQ ID NO: 242868 - RNA, 19 nt, Artificial Sequence
  Description of Artificial Sequence: Synthetic oligonucleotide
  Sense strand starting at position 1604 SEQ ID NO: 3126
gggccuaagugguuacaau

SEQ ID NO: 242869 - RNA, 19 nt, Artificial Sequence
  Description of Artificial Sequence: Synthetic oligonucleotide
  Antisense strand to SEQ ID NO: 242868
auuguaaccacuuaggccc

SEQ ID NO: 242870 - RNA, 19 nt, Artificial Sequence
  Description of Artificial Sequence: Synthetic oligonucleotide
  Sense strand starting at position 1605 SEQ ID NO: 3126
ggccuaagugguuacaauc

SEQ ID NO: 242871 - RNA, 19 nt, Artificial Sequence
  Description of Artificial Sequence: Synthetic oligonucleotide
  Antisense strand to SEQ ID NO: 242870
gauuguaaccacuuaggcc

SEQ ID NO: 242872 - RNA, 19 nt, Artificial Sequence
  Description of Artificial Sequence: Synthetic oligonucleotide
  Sense strand starting at position 2783 SEQ ID NO: 3126
gggccuuuguggaugugua

SEQ ID NO: 242873 - RNA, 19 nt, Artificial Sequence
  Description of Artificial Sequence: Synthetic oligonucleotide
  Antisense strand to SEQ ID NO: 242872
uacacauccacaaaggccc

SEQ ID NO: 242874 - RNA, 19 nt, Artificial Sequence
  Description of Artificial Sequence: Synthetic oligonucleotide
  Sense strand starting at position 2787 SEQ ID NO: 3126
cuuuguggauguguaauau

SEQ ID NO: 242875 - RNA, 19 nt, Artificial Sequence
  Description of Artificial Sequence: Synthetic oligonucleotide
  Antisense strand to SEQ ID NO: 242874
auauuacacauccacaaag

SEQ ID NO: 242876 - RNA, 19 nt, Artificial Sequence
  Description of Artificial Sequence: Synthetic oligonucleotide
  Sense strand starting at position 2797 SEQ ID NO: 3126
guguaauaucuuggguaaa

SEQ ID NO: 242877 - RNA, 19 nt, Artificial Sequence
  Description of Artificial Sequence: Synthetic oligonucleotide
  Antisense strand to SEQ ID NO: 242876
uuuacccaagauauuacac

SEQ ID NO: 242878 - RNA, 19 nt, Artificial Sequence
  Description of Artificial Sequence: Synthetic oligonucleotide
  Sense strand starting at position 2841 SEQ ID NO: 3126
gacccagcguuuccugaaa

SEQ ID NO: 242879 - RNA, 19 nt, Artificial Sequence
  Description of Artificial Sequence: Synthetic oligonucleotide
  Antisense strand to SEQ ID NO: 242878
uuucaggaaacgcuggguc

SEQ ID NO: 242880 - RNA, 19 nt, Artificial Sequence
  Description of Artificial Sequence: Synthetic oligonucleotide
  Sense strand starting at position 2917 SEQ ID NO: 3126
ccuuaaagcuggucugguu

SEQ ID NO: 242881 - RNA, 19 nt, Artificial Sequence
  Description of Artificial Sequence: Synthetic oligonucleotide
  Antisense strand to SEQ ID NO: 242880
aaccagaccagcuuuaagg

SEQ ID NO: 242882 - RNA, 19 nt, Artificial Sequence
  Description of Artificial Sequence: Synthetic oligonucleotide
  Sense strand starting at position 2968 SEQ ID NO: 3126
gacguaaggaaucgggaau

SEQ ID NO: 242883 - RNA, 19 nt, Artificial Sequence
  Description of Artificial Sequence: Synthetic oligonucleotide
  Antisense strand to SEQ ID NO: 242882
auucccgauuccuuacguc

SEQ ID NO: 242884 - RNA, 19 nt, Artificial Sequence
  Description of Artificial Sequence: Synthetic oligonucleotide
  Sense strand starting at position 2969 SEQ ID NO: 3126
acguaaggaaucgggaauu

SEQ ID NO: 242885 - RNA, 19 nt, Artificial Sequence
  Description of Artificial Sequence: Synthetic oligonucleotide
  Antisense strand to SEQ ID NO: 242884
aauucccgauuccuuacgu

SEQ ID NO: 242886 - RNA, 19 nt, Artificial Sequence
  Description of Artificial Sequence: Synthetic oligonucleotide
  Sense strand starting at position 2991 SEQ ID NO: 3126
cuuggaauauugguuagua

SEQ ID NO: 242887 - RNA, 19 nt, Artificial Sequence
  Description of Artificial Sequence: Synthetic oligonucleotide
  Antisense strand to SEQ ID NO: 242886
uacuaaccaauauuccaag

SEQ ID NO: 242888 - RNA, 19 nt, Artificial Sequence
  Description of Artificial Sequence: Synthetic oligonucleotide
  Sense strand starting at position 2992 SEQ ID NO: 3126
uuggaauauugguuaguac

SEQ ID NO: 242889 - RNA, 19 nt, Artificial Sequence
  Description of Artificial Sequence: Synthetic oligonucleotide
  Antisense strand to SEQ ID NO: 242888
guacuaaccaauauuccaa

SEQ ID NO: 242890 - RNA, 19 nt, Artificial Sequence
  Description of Artificial Sequence: Synthetic oligonucleotide
  Sense strand starting at position 2995 SEQ ID NO: 3126
gaauauugguuaguacauu

SEQ ID NO: 242891 - RNA, 19 nt, Artificial Sequence
  Description of Artificial Sequence: Synthetic oligonucleotide
  Antisense strand to SEQ ID NO: 242890
aauguacuaaccaauauuc

SEQ ID NO: 242892 - RNA, 19 nt, Artificial Sequence
  Description of Artificial Sequence: Synthetic oligonucleotide
  Sense strand starting at position 3029 SEQ ID NO: 3126
aacgaauaagcugagguuu

SEQ ID NO: 242893 - RNA, 19 nt, Artificial Sequence
  Description of Artificial Sequence: Synthetic oligonucleotide
  Antisense strand to SEQ ID NO: 242892
aaaccucagcuuauucguu

SEQ ID NO: 242894 - RNA, 19 nt, Artificial Sequence
  Description of Artificial Sequence: Synthetic oligonucleotide
  Sense strand starting at position 3037 SEQ ID NO: 3126
agcugagguuugguguuaa

SEQ ID NO: 242895 - RNA, 19 nt, Artificial Sequence
  Description of Artificial Sequence: Synthetic oligonucleotide
  Antisense strand to SEQ ID NO: 242894
uuaacaccaaaccucagcu

SEQ ID NO: 242896 - RNA, 19 nt, Artificial Sequence
  Description of Artificial Sequence: Synthetic oligonucleotide
  Sense strand starting at position 3071 SEQ ID NO: 3126
cguguugagauguauagca

SEQ ID NO: 242897 - RNA, 19 nt, Artificial Sequence
  Description of Artificial Sequence: Synthetic oligonucleotide
  Antisense strand to SEQ ID NO: 242896
ugcuauacaucucaacacg

SEQ ID NO: 242898 - RNA, 19 nt, Artificial Sequence
  Description of Artificial Sequence: Synthetic oligonucleotide
  Sense strand starting at position 3093 SEQ ID NO: 3126
uggcguugccuguugauaa

SEQ ID NO: 242899 - RNA, 19 nt, Artificial Sequence
  Description of Artificial Sequence: Synthetic oligonucleotide
  Antisense strand to SEQ ID NO: 242898
uuaucaacaggcaacgcca

SEQ ID NO: 242900 - RNA, 19 nt, Artificial Sequence
  Description of Artificial Sequence: Synthetic oligonucleotide
  Sense strand starting at position 3400 SEQ ID NO: 3126
ucgcuuauuaaguagaguu

SEQ ID NO: 242901 - RNA, 19 nt, Artificial Sequence
  Description of Artificial Sequence: Synthetic oligonucleotide
  Antisense strand to SEQ ID NO: 242900
aacucuacuuaauaagcga

SEQ ID NO: 242902 - RNA, 19 nt, Artificial Sequence
  Description of Artificial Sequence: Synthetic oligonucleotide
  Sense strand starting at position 3402 SEQ ID NO: 3126
gcuuauuaaguagaguuua

SEQ ID NO: 242903 - RNA, 19 nt, Artificial Sequence
  Description of Artificial Sequence: Synthetic oligonucleotide
  Antisense strand to SEQ ID NO: 242902
uaaacucuacuuaauaagc

SEQ ID NO: 242904 - RNA, 19 nt, Artificial Sequence
  Description of Artificial Sequence: Synthetic oligonucleotide
  Sense strand starting at position 3438 SEQ ID NO: 3126
uuaacugcuuugguucuaa

SEQ ID NO: 242905 - RNA, 19 nt, Artificial Sequence
  Description of Artificial Sequence: Synthetic oligonucleotide
  Antisense strand to SEQ ID NO: 242904
uuagaaccaaagcaguuaa

SEQ ID NO: 242906 - RNA, 19 nt, Artificial Sequence
  Description of Artificial Sequence: Synthetic oligonucleotide
  Sense strand starting at position 3450 SEQ ID NO: 3126
guucuaaucuguuucuuaa

SEQ ID NO: 242907 - RNA, 19 nt, Artificial Sequence
  Description of Artificial Sequence: Synthetic oligonucleotide
  Antisense strand to SEQ ID NO: 242906
uuaagaaacagauuagaac

SEQ ID NO: 242908 - RNA, 19 nt, Artificial Sequence
  Description of Artificial Sequence: Synthetic oligonucleotide
  Sense strand starting at position 3471 SEQ ID NO: 3126
ggaaaugacuaauauaaag

SEQ ID NO: 242909 - RNA, 19 nt, Artificial Sequence
  Description of Artificial Sequence: Synthetic oligonucleotide
  Antisense strand to SEQ ID NO: 242908
cuuuauauuagucauuucc

SEQ ID NO: 242910 - RNA, 19 nt, Artificial Sequence
  Description of Artificial Sequence: Synthetic oligonucleotide
  Sense strand starting at position 3499 SEQ ID NO: 3126
uuauaugaccaaugcuaug

SEQ ID NO: 242911 - RNA, 19 nt, Artificial Sequence
  Description of Artificial Sequence: Synthetic oligonucleotide
  Antisense strand to SEQ ID NO: 242910
cauagcauuggucauauaa

SEQ ID NO: 242912 - RNA, 19 nt, Artificial Sequence
  Description of Artificial Sequence: Synthetic oligonucleotide
  Sense strand starting at position 3897 SEQ ID NO: 3126
gugugaucaguguuugccu

SEQ ID NO: 242913 - RNA, 19 nt, Artificial Sequence
  Description of Artificial Sequence: Synthetic oligonucleotide
  Antisense strand to SEQ ID NO: 242912
aggcaaacacugaucacac

SEQ ID NO: 242914 - RNA, 19 nt, Artificial Sequence
  Description of Artificial Sequence: Synthetic oligonucleotide
  Sense strand starting at position 67 SEQ ID NO: 3127
cuacacuuggcaugaacua

SEQ ID NO: 242915 - RNA, 19 nt, Artificial Sequence
  Description of Artificial Sequence: Synthetic oligonucleotide
  Antisense strand to SEQ ID NO: 242914
uaguucaugccaaguguag

SEQ ID NO: 242916 - RNA, 19 nt, Artificial Sequence
  Description of Artificial Sequence: Synthetic oligonucleotide
  Sense strand starting at position 120 SEQ ID NO: 3127
gaaauucuaccucgaguuu

SEQ ID NO: 242917 - RNA, 19 nt, Artificial Sequence
  Description of Artificial Sequence: Synthetic oligonucleotide
  Antisense strand to SEQ ID NO: 242916
aaacucgagguagaauuuc

SEQ ID NO: 242918 - RNA, 19 nt, Artificial Sequence
  Description of Artificial Sequence: Synthetic oligonucleotide
  Sense strand starting at position 126 SEQ ID NO: 3127
cuaccucgaguuuaagaau

SEQ ID NO: 242919 - RNA, 19 nt, Artificial Sequence
  Description of Artificial Sequence: Synthetic oligonucleotide
  Antisense strand to SEQ ID NO: 242918
auucuuaaacucgagguag

SEQ ID NO: 242920 - RNA, 19 nt, Artificial Sequence
  Description of Artificial Sequence: Synthetic oligonucleotide
  Sense strand starting at position 146 SEQ ID NO: 3127
caccuugagcuguaaguua

SEQ ID NO: 242921 - RNA, 19 nt, Artificial Sequence
  Description of Artificial Sequence: Synthetic oligonucleotide
  Antisense strand to SEQ ID NO: 242920
uaacuuacagcucaaggug

SEQ ID NO: 242922 - RNA, 19 nt, Artificial Sequence
  Description of Artificial Sequence: Synthetic oligonucleotide
  Sense strand starting at position 157 SEQ ID NO: 3127
guaaguuacuaccugauua

SEQ ID NO: 242923 - RNA, 19 nt, Artificial Sequence
  Description of Artificial Sequence: Synthetic oligonucleotide
  Antisense strand to SEQ ID NO: 242922
uaaucagguaguaacuuac

SEQ ID NO: 242924 - RNA, 19 nt, Artificial Sequence
  Description of Artificial Sequence: Synthetic oligonucleotide
  Sense strand starting at position 161 SEQ ID NO: 3127
guuacuaccugauuacauc

SEQ ID NO: 242925 - RNA, 19 nt, Artificial Sequence
  Description of Artificial Sequence: Synthetic oligonucleotide
  Antisense strand to SEQ ID NO: 242924
gauguaaucagguaguaac

SEQ ID NO: 242926 - RNA, 19 nt, Artificial Sequence
  Description of Artificial Sequence: Synthetic oligonucleotide
  Sense strand starting at position 311 SEQ ID NO: 3127
gaaaguacuguugaauagu

SEQ ID NO: 242927 - RNA, 19 nt, Artificial Sequence
  Description of Artificial Sequence: Synthetic oligonucleotide
  Antisense strand to SEQ ID NO: 242926
acuauucaacaguacuuuc

SEQ ID NO: 242928 - RNA, 19 nt, Artificial Sequence
  Description of Artificial Sequence: Synthetic oligonucleotide
  Sense strand starting at position 322 SEQ ID NO: 3127
ugaauaguucagugcgacu

SEQ ID NO: 242929 - RNA, 19 nt, Artificial Sequence
  Description of Artificial Sequence: Synthetic oligonucleotide
  Antisense strand to SEQ ID NO: 242928
agucgcacugaacuauuca

SEQ ID NO: 242930 - RNA, 19 nt, Artificial Sequence
  Description of Artificial Sequence: Synthetic oligonucleotide
  Sense strand starting at position 333 SEQ ID NO: 3127
gugcgacuauuugugagua

SEQ ID NO: 242931 - RNA, 19 nt, Artificial Sequence
  Description of Artificial Sequence: Synthetic oligonucleotide
  Antisense strand to SEQ ID NO: 242930
uacucacaaauagucgcac

SEQ ID NO: 242932 - RNA, 19 nt, Artificial Sequence
  Description of Artificial Sequence: Synthetic oligonucleotide
  Sense strand starting at position 538 SEQ ID NO: 3127
gucucaucuggcgaaagac

SEQ ID NO: 242933 - RNA, 19 nt, Artificial Sequence
  Description of Artificial Sequence: Synthetic oligonucleotide
  Antisense strand to SEQ ID NO: 242932
gucuuucgccagaugagac

SEQ ID NO: 242934 - RNA, 19 nt, Artificial Sequence
  Description of Artificial Sequence: Synthetic oligonucleotide
  Sense strand starting at position 547 SEQ ID NO: 3127
ggcgaaagacuguggguaa

SEQ ID NO: 242935 - RNA, 19 nt, Artificial Sequence
  Description of Artificial Sequence: Synthetic oligonucleotide
  Antisense strand to SEQ ID NO: 242934
uuacccacagucuuucgcc

SEQ ID NO: 242936 - RNA, 19 nt, Artificial Sequence
  Description of Artificial Sequence: Synthetic oligonucleotide
  Sense strand starting at position 973 SEQ ID NO: 3127
aguauuccugacggugcaa

SEQ ID NO: 242937 - RNA, 19 nt, Artificial Sequence
  Description of Artificial Sequence: Synthetic oligonucleotide
  Antisense strand to SEQ ID NO: 242936
uugcaccgucaggaauacu

SEQ ID NO: 242938 - RNA, 19 nt, Artificial Sequence
  Description of Artificial Sequence: Synthetic oligonucleotide
  Sense strand starting at position 1002 SEQ ID NO: 3127
agcaaagugucuccaugga

SEQ ID NO: 242939 - RNA, 19 nt, Artificial Sequence
  Description of Artificial Sequence: Synthetic oligonucleotide
  Antisense strand to SEQ ID NO: 242938
uccauggagacacuuugcu

SEQ ID NO: 242940 - RNA, 19 nt, Artificial Sequence
  Description of Artificial Sequence: Synthetic oligonucleotide
  Sense strand starting at position 1246 SEQ ID NO: 3127
gggccuaagugguuacaau

SEQ ID NO: 242941 - RNA, 19 nt, Artificial Sequence
  Description of Artificial Sequence: Synthetic oligonucleotide
  Antisense strand to SEQ ID NO: 242940
auuguaaccacuuaggccc

SEQ ID NO: 242942 - RNA, 19 nt, Artificial Sequence
  Description of Artificial Sequence: Synthetic oligonucleotide
  Sense strand starting at position 1247 SEQ ID NO: 3127
ggccuaagugguuacaauc

SEQ ID NO: 242943 - RNA, 19 nt, Artificial Sequence
  Description of Artificial Sequence: Synthetic oligonucleotide
  Antisense strand to SEQ ID NO: 242942
gauuguaaccacuuaggcc

SEQ ID NO: 242944 - RNA, 19 nt, Artificial Sequence
  Description of Artificial Sequence: Synthetic oligonucleotide
  Sense strand starting at position 2425 SEQ ID NO: 3127
gggccuuuguggaugugua

SEQ ID NO: 242945 - RNA, 19 nt, Artificial Sequence
  Description of Artificial Sequence: Synthetic oligonucleotide
  Antisense strand to SEQ ID NO: 242944
uacacauccacaaaggccc

SEQ ID NO: 242946 - RNA, 19 nt, Artificial Sequence
  Description of Artificial Sequence: Synthetic oligonucleotide
  Sense strand starting at position 2429 SEQ ID NO: 3127
cuuuguggauguguaauau

SEQ ID NO: 242947 - RNA, 19 nt, Artificial Sequence
  Description of Artificial Sequence: Synthetic oligonucleotide
  Antisense strand to SEQ ID NO: 242946
auauuacacauccacaaag

SEQ ID NO: 242948 - RNA, 19 nt, Artificial Sequence
  Description of Artificial Sequence: Synthetic oligonucleotide
  Sense strand starting at position 2439 SEQ ID NO: 3127
guguaauaucuuggguaaa

SEQ ID NO: 242949 - RNA, 19 nt, Artificial Sequence
  Description of Artificial Sequence: Synthetic oligonucleotide
  Antisense strand to SEQ ID NO: 242948
uuuacccaagauauuacac

SEQ ID NO: 242950 - RNA, 19 nt, Artificial Sequence
  Description of Artificial Sequence: Synthetic oligonucleotide
  Sense strand starting at position 2483 SEQ ID NO: 3127
gacccagcguuuccugaaa

SEQ ID NO: 242951 - RNA, 19 nt, Artificial Sequence
  Description of Artificial Sequence: Synthetic oligonucleotide
  Antisense strand to SEQ ID NO: 242950
uuucaggaaacgcuggguc

SEQ ID NO: 242952 - RNA, 19 nt, Artificial Sequence
  Description of Artificial Sequence: Synthetic oligonucleotide
  Sense strand starting at position 2559 SEQ ID NO: 3127
ccuuaaagcuggucugguu

SEQ ID NO: 242953 - RNA, 19 nt, Artificial Sequence
  Description of Artificial Sequence: Synthetic oligonucleotide
  Antisense strand to SEQ ID NO: 242952
aaccagaccagcuuuaagg

SEQ ID NO: 242954 - RNA, 19 nt, Artificial Sequence
  Description of Artificial Sequence: Synthetic oligonucleotide
  Sense strand starting at position 2610 SEQ ID NO: 3127
gacguaaggaaucgggaau

SEQ ID NO: 242955 - RNA, 19 nt, Artificial Sequence
  Description of Artificial Sequence: Synthetic oligonucleotide
  Antisense strand to SEQ ID NO: 242954
auucccgauuccuuacguc

SEQ ID NO: 242956 - RNA, 19 nt, Artificial Sequence
  Description of Artificial Sequence: Synthetic oligonucleotide
  Sense strand starting at position 2611 SEQ ID NO: 3127
acguaaggaaucgggaauu

SEQ ID NO: 242957 - RNA, 19 nt, Artificial Sequence
  Description of Artificial Sequence: Synthetic oligonucleotide
  Antisense strand to SEQ ID NO: 242956
aauucccgauuccuuacgu

SEQ ID NO: 242958 - RNA, 19 nt, Artificial Sequence
  Description of Artificial Sequence: Synthetic oligonucleotide
  Sense strand starting at position 2633 SEQ ID NO: 3127
cuuggaauauugguuagua

SEQ ID NO: 242959 - RNA, 19 nt, Artificial Sequence
  Description of Artificial Sequence: Synthetic oligonucleotide
  Antisense strand to SEQ ID NO: 242958
uacuaaccaauauuccaag

SEQ ID NO: 242960 - RNA, 19 nt, Artificial Sequence
  Description of Artificial Sequence: Synthetic oligonucleotide
  Sense strand starting at position 2634 SEQ ID NO: 3127
uuggaauauugguuaguac

SEQ ID NO: 242961 - RNA, 19 nt, Artificial Sequence
  Description of Artificial Sequence: Synthetic oligonucleotide
  Antisense strand to SEQ ID NO: 242960
guacuaaccaauauuccaa

SEQ ID NO: 242962 - RNA, 19 nt, Artificial Sequence
  Description of Artificial Sequence: Synthetic oligonucleotide
  Sense strand starting at position 2637 SEQ ID NO: 3127
gaauauugguuaguacauu

SEQ ID NO: 242963 - RNA, 19 nt, Artificial Sequence
  Description of Artificial Sequence: Synthetic oligonucleotide
  Antisense strand to SEQ ID NO: 242962
aauguacuaaccaauauuc

SEQ ID NO: 242964 - RNA, 19 nt, Artificial Sequence
  Description of Artificial Sequence: Synthetic oligonucleotide
  Sense strand starting at position 2671 SEQ ID NO: 3127
aacgaauaagcugagguuu

SEQ ID NO: 242965 - RNA, 19 nt, Artificial Sequence
  Description of Artificial Sequence: Synthetic oligonucleotide
  Antisense strand to SEQ ID NO: 242964
aaaccucagcuuauucguu

SEQ ID NO: 242966 - RNA, 19 nt, Artificial Sequence
  Description of Artificial Sequence: Synthetic oligonucleotide
  Sense strand starting at position 2679 SEQ ID NO: 3127
agcugagguuugguguuaa

SEQ ID NO: 242967 - RNA, 19 nt, Artificial Sequence
  Description of Artificial Sequence: Synthetic oligonucleotide
  Antisense strand to SEQ ID NO: 242966
uuaacaccaaaccucagcu

SEQ ID NO: 242968 - RNA, 19 nt, Artificial Sequence
  Description of Artificial Sequence: Synthetic oligonucleotide
  Sense strand starting at position 2713 SEQ ID NO: 3127
cguguugagauguauagca

SEQ ID NO: 242969 - RNA, 19 nt, Artificial Sequence
  Description of Artificial Sequence: Synthetic oligonucleotide
  Antisense strand to SEQ ID NO: 242968
ugcuauacaucucaacacg

SEQ ID NO: 242970 - RNA, 19 nt, Artificial Sequence
  Description of Artificial Sequence: Synthetic oligonucleotide
  Sense strand starting at position 2735 SEQ ID NO: 3127
uggcguugccuguugauaa

SEQ ID NO: 242971 - RNA, 19 nt, Artificial Sequence
  Description of Artificial Sequence: Synthetic oligonucleotide
  Antisense strand to SEQ ID NO: 242970
uuaucaacaggcaacgcca

SEQ ID NO: 242972 - RNA, 19 nt, Artificial Sequence
  Description of Artificial Sequence: Synthetic oligonucleotide
  Sense strand starting at position 3042 SEQ ID NO: 3127
ucgcuuauuaaguagaguu

SEQ ID NO: 242973 - RNA, 19 nt, Artificial Sequence
  Description of Artificial Sequence: Synthetic oligonucleotide
  Antisense strand to SEQ ID NO: 242972
aacucuacuuaauaagcga

SEQ ID NO: 242974 - RNA, 19 nt, Artificial Sequence
  Description of Artificial Sequence: Synthetic oligonucleotide
  Sense strand starting at position 3044 SEQ ID NO: 3127
gcuuauuaaguagaguuua

SEQ ID NO: 242975 - RNA, 19 nt, Artificial Sequence
  Description of Artificial Sequence: Synthetic oligonucleotide
  Antisense strand to SEQ ID NO: 242974
uaaacucuacuuaauaagc

SEQ ID NO: 242976 - RNA, 19 nt, Artificial Sequence
  Description of Artificial Sequence: Synthetic oligonucleotide
  Sense strand starting at position 3080 SEQ ID NO: 3127
uuaacugcuuugguucuaa

SEQ ID NO: 242977 - RNA, 19 nt, Artificial Sequence
  Description of Artificial Sequence: Synthetic oligonucleotide
  Antisense strand to SEQ ID NO: 242976
uuagaaccaaagcaguuaa

SEQ ID NO: 242978 - RNA, 19 nt, Artificial Sequence
  Description of Artificial Sequence: Synthetic oligonucleotide
  Sense strand starting at position 3092 SEQ ID NO: 3127
guucuaaucuguuucuuaa

SEQ ID NO: 242979 - RNA, 19 nt, Artificial Sequence
  Description of Artificial Sequence: Synthetic oligonucleotide
  Antisense strand to SEQ ID NO: 242978
uuaagaaacagauuagaac

SEQ ID NO: 242980 - RNA, 19 nt, Artificial Sequence
  Description of Artificial Sequence: Synthetic oligonucleotide
  Sense strand starting at position 3113 SEQ ID NO: 3127
ggaaaugacuaauauaaag

SEQ ID NO: 242981 - RNA, 19 nt, Artificial Sequence
  Description of Artificial Sequence: Synthetic oligonucleotide
  Antisense strand to SEQ ID NO: 242980
cuuuauauuagucauuucc

SEQ ID NO: 242982 - RNA, 19 nt, Artificial Sequence
  Description of Artificial Sequence: Synthetic oligonucleotide
  Sense strand starting at position 3141 SEQ ID NO: 3127
uuauaugaccaaugcuaug

SEQ ID NO: 242983 - RNA, 19 nt, Artificial Sequence
  Description of Artificial Sequence: Synthetic oligonucleotide
  Antisense strand to SEQ ID NO: 242982
cauagcauuggucauauaa

SEQ ID NO: 242984 - RNA, 19 nt, Artificial Sequence
  Description of Artificial Sequence: Synthetic oligonucleotide
  Sense strand starting at position 3539 SEQ ID NO: 3127
gugugaucaguguuugccu

SEQ ID NO: 242985 - RNA, 19 nt, Artificial Sequence
  Description of Artificial Sequence: Synthetic oligonucleotide
  Antisense strand to SEQ ID NO: 242984
aggcaaacacugaucacac

SEQ ID NO: 242986 - RNA, 19 nt, Artificial Sequence
  Description of Artificial Sequence: Synthetic oligonucleotide
  Sense strand starting at position 3787 SEQ ID NO: 3127
cuuggacuguucguuuaac

SEQ ID NO: 242987 - RNA, 19 nt, Artificial Sequence
  Description of Artificial Sequence: Synthetic oligonucleotide
  Antisense strand to SEQ ID NO: 242986
guuaaacgaacaguccaag

SEQ ID NO: 242988 - RNA, 19 nt, Artificial Sequence
  Description of Artificial Sequence: Synthetic oligonucleotide
  Sense strand starting at position 3842 SEQ ID NO: 3127
ugguauaccugguuguaua

SEQ ID NO: 242989 - RNA, 19 nt, Artificial Sequence
  Description of Artificial Sequence: Synthetic oligonucleotide
  Antisense strand to SEQ ID NO: 242988
uauacaaccagguauacca

SEQ ID NO: 242990 - RNA, 19 nt, Artificial Sequence
  Description of Artificial Sequence: Synthetic oligonucleotide
  Sense strand starting at position 3843 SEQ ID NO: 3127
gguauaccugguuguauac

SEQ ID NO: 242991 - RNA, 19 nt, Artificial Sequence
  Description of Artificial Sequence: Synthetic oligonucleotide
  Antisense strand to SEQ ID NO: 242990
guauacaaccagguauacc

SEQ ID NO: 242992 - RNA, 19 nt, Artificial Sequence
  Description of Artificial Sequence: Synthetic oligonucleotide
  Sense strand starting at position 3879 SEQ ID NO: 3127
uggucagucuuguccaauc

SEQ ID NO: 242993 - RNA, 19 nt, Artificial Sequence
  Description of Artificial Sequence: Synthetic oligonucleotide
  Antisense strand to SEQ ID NO: 242992
gauuggacaagacugacca

SEQ ID NO: 242994 - RNA, 19 nt, Artificial Sequence
  Description of Artificial Sequence: Synthetic oligonucleotide
  Sense strand starting at position 58 SEQ ID NO: 3128
gaauccugagcucaaacga

SEQ ID NO: 242995 - RNA, 19 nt, Artificial Sequence
  Description of Artificial Sequence: Synthetic oligonucleotide
  Antisense strand to SEQ ID NO: 242994
ucguuugagcucaggauuc

SEQ ID NO: 242996 - RNA, 19 nt, Artificial Sequence
  Description of Artificial Sequence: Synthetic oligonucleotide
  Sense strand starting at position 168 SEQ ID NO: 3128
ggcaaacacugaucacacu

SEQ ID NO: 242997 - RNA, 19 nt, Artificial Sequence
  Description of Artificial Sequence: Synthetic oligonucleotide
  Antisense strand to SEQ ID NO: 242996
agugugaucaguguuugcc

SEQ ID NO: 242998 - RNA, 19 nt, Artificial Sequence
  Description of Artificial Sequence: Synthetic oligonucleotide
  Sense strand starting at position 511 SEQ ID NO: 3128
cggccuauugaggacaauu

SEQ ID NO: 242999 - RNA, 19 nt, Artificial Sequence
  Description of Artificial Sequence: Synthetic oligonucleotide
  Antisense strand to SEQ ID NO: 242998
aauuguccucaauaggccg

SEQ ID NO: 243000 - RNA, 19 nt, Artificial Sequence
  Description of Artificial Sequence: Synthetic oligonucleotide
  Sense strand starting at position 561 SEQ ID NO: 3128
gcaucauagcauuggucau

SEQ ID NO: 243001 - RNA, 19 nt, Artificial Sequence
  Description of Artificial Sequence: Synthetic oligonucleotide
  Antisense strand to SEQ ID NO: 243000
augaccaaugcuaugaugc

SEQ ID NO: 243002 - RNA, 19 nt, Artificial Sequence
  Description of Artificial Sequence: Synthetic oligonucleotide
  Sense strand starting at position 563 SEQ ID NO: 3128
aucauagcauuggucauau

SEQ ID NO: 243003 - RNA, 19 nt, Artificial Sequence
  Description of Artificial Sequence: Synthetic oligonucleotide
  Antisense strand to SEQ ID NO: 243002
auaugaccaaugcuaugau

SEQ ID NO: 243004 - RNA, 19 nt, Artificial Sequence
  Description of Artificial Sequence: Synthetic oligonucleotide
  Sense strand starting at position 636 SEQ ID NO: 3128
agcaguuaaugaucuugaa

SEQ ID NO: 243005 - RNA, 19 nt, Artificial Sequence
  Description of Artificial Sequence: Synthetic oligonucleotide
  Antisense strand to SEQ ID NO: 243004
uucaagaucauuaacugcu

SEQ ID NO: 243006 - RNA, 19 nt, Artificial Sequence
  Description of Artificial Sequence: Synthetic oligonucleotide
  Sense strand starting at position 1037 SEQ ID NO: 3128
accucagcuuauucguuaa

SEQ ID NO: 243007 - RNA, 19 nt, Artificial Sequence
  Description of Artificial Sequence: Synthetic oligonucleotide
  Antisense strand to SEQ ID NO: 243006
uuaacgaauaagcugaggu

SEQ ID NO: 243008 - RNA, 19 nt, Artificial Sequence
  Description of Artificial Sequence: Synthetic oligonucleotide
  Sense strand starting at position 1040 SEQ ID NO: 3128
ucagcuuauucguuaagga

SEQ ID NO: 243009 - RNA, 19 nt, Artificial Sequence
  Description of Artificial Sequence: Synthetic oligonucleotide
  Antisense strand to SEQ ID NO: 243008
uccuuaacgaauaagcuga

SEQ ID NO: 243010 - RNA, 19 nt, Artificial Sequence
  Description of Artificial Sequence: Synthetic oligonucleotide
  Sense strand starting at position 1041 SEQ ID NO: 3128
cagcuuauucguuaaggaa

SEQ ID NO: 243011 - RNA, 19 nt, Artificial Sequence
  Description of Artificial Sequence: Synthetic oligonucleotide
  Antisense strand to SEQ ID NO: 243010
uuccuuaacgaauaagcug

SEQ ID NO: 243012 - RNA, 19 nt, Artificial Sequence
  Description of Artificial Sequence: Synthetic oligonucleotide
  Sense strand starting at position 1059 SEQ ID NO: 3128
agcgcauuugaauguacua

SEQ ID NO: 243013 - RNA, 19 nt, Artificial Sequence
  Description of Artificial Sequence: Synthetic oligonucleotide
  Antisense strand to SEQ ID NO: 243012
uaguacauucaaaugcgcu

SEQ ID NO: 243014 - RNA, 19 nt, Artificial Sequence
  Description of Artificial Sequence: Synthetic oligonucleotide
  Sense strand starting at position 1090 SEQ ID NO: 3128
aguuuaauucccgauuccu

SEQ ID NO: 243015 - RNA, 19 nt, Artificial Sequence
  Description of Artificial Sequence: Synthetic oligonucleotide
  Antisense strand to SEQ ID NO: 243014
aggaaucgggaauuaaacu

SEQ ID NO: 243016 - RNA, 19 nt, Artificial Sequence
  Description of Artificial Sequence: Synthetic oligonucleotide
  Sense strand starting at position 1163 SEQ ID NO: 3128
aggucaaccuuaguuuauu

SEQ ID NO: 243017 - RNA, 19 nt, Artificial Sequence
  Description of Artificial Sequence: Synthetic oligonucleotide
  Antisense strand to SEQ ID NO: 243016
aauaaacuaagguugaccu

SEQ ID NO: 243018 - RNA, 19 nt, Artificial Sequence
  Description of Artificial Sequence: Synthetic oligonucleotide
  Sense strand starting at position 1174 SEQ ID NO: 3128
aguuuauuccaaggucaaa

SEQ ID NO: 243019 - RNA, 19 nt, Artificial Sequence
  Description of Artificial Sequence: Synthetic oligonucleotide
  Antisense strand to SEQ ID NO: 243018
uuugaccuuggaauaaacu

SEQ ID NO: 243020 - RNA, 19 nt, Artificial Sequence
  Description of Artificial Sequence: Synthetic oligonucleotide
  Sense strand starting at position 2522 SEQ ID NO: 3128
ggugguguacgugagggaa

SEQ ID NO: 243021 - RNA, 19 nt, Artificial Sequence
  Description of Artificial Sequence: Synthetic oligonucleotide
  Antisense strand to SEQ ID NO: 243020
uucccucacguacaccacc

SEQ ID NO: 243022 - RNA, 19 nt, Artificial Sequence
  Description of Artificial Sequence: Synthetic oligonucleotide
  Sense strand starting at position 2857 SEQ ID NO: 3128
gugaaagauuaacucguuu

SEQ ID NO: 243023 - RNA, 19 nt, Artificial Sequence
  Description of Artificial Sequence: Synthetic oligonucleotide
  Antisense strand to SEQ ID NO: 243022
aaacgaguuaaucuuucac

SEQ ID NO: 243024 - RNA, 19 nt, Artificial Sequence
  Description of Artificial Sequence: Synthetic oligonucleotide
  Sense strand starting at position 3113 SEQ ID NO: 3128
gguaguucugaugaucuuu

SEQ ID NO: 243025 - RNA, 19 nt, Artificial Sequence
  Description of Artificial Sequence: Synthetic oligonucleotide
  Antisense strand to SEQ ID NO: 243024
aaagaucaucagaacuacc

SEQ ID NO: 243026 - RNA, 19 nt, Artificial Sequence
  Description of Artificial Sequence: Synthetic oligonucleotide
  Sense strand starting at position 3144 SEQ ID NO: 3128
ccagaaaugcuucgguuac

SEQ ID NO: 243027 - RNA, 19 nt, Artificial Sequence
  Description of Artificial Sequence: Synthetic oligonucleotide
  Antisense strand to SEQ ID NO: 243026
guaaccgaagcauuucugg

SEQ ID NO: 243028 - RNA, 19 nt, Artificial Sequence
  Description of Artificial Sequence: Synthetic oligonucleotide
  Sense strand starting at position 3164 SEQ ID NO: 3128
cacagucuuucgccagaug

SEQ ID NO: 243029 - RNA, 19 nt, Artificial Sequence
  Description of Artificial Sequence: Synthetic oligonucleotide
  Antisense strand to SEQ ID NO: 243028
caucuggcgaaagacugug

SEQ ID NO: 243030 - RNA, 19 nt, Artificial Sequence
  Description of Artificial Sequence: Synthetic oligonucleotide
  Sense strand starting at position 3165 SEQ ID NO: 3128
acagucuuucgccagauga

SEQ ID NO: 243031 - RNA, 19 nt, Artificial Sequence
  Description of Artificial Sequence: Synthetic oligonucleotide
  Antisense strand to SEQ ID NO: 243030
ucaucuggcgaaagacugu

SEQ ID NO: 243032 - RNA, 19 nt, Artificial Sequence
  Description of Artificial Sequence: Synthetic oligonucleotide
  Sense strand starting at position 3167 SEQ ID NO: 3128
agucuuucgccagaugaga

SEQ ID NO: 243033 - RNA, 19 nt, Artificial Sequence
  Description of Artificial Sequence: Synthetic oligonucleotide
  Antisense strand to SEQ ID NO: 243032
ucucaucuggcgaaagacu

SEQ ID NO: 243034 - RNA, 19 nt, Artificial Sequence
  Description of Artificial Sequence: Synthetic oligonucleotide
  Sense strand starting at position 3428 SEQ ID NO: 3128
gagaacucaguuuacaugu

SEQ ID NO: 243035 - RNA, 19 nt, Artificial Sequence
  Description of Artificial Sequence: Synthetic oligonucleotide
  Antisense strand to SEQ ID NO: 243034
acauguaaacugaguucuc

SEQ ID NO: 243036 - RNA, 19 nt, Artificial Sequence
  Description of Artificial Sequence: Synthetic oligonucleotide
  Sense strand starting at position 3455 SEQ ID NO: 3128
ugaaguauugguuagccuu

SEQ ID NO: 243037 - RNA, 19 nt, Artificial Sequence
  Description of Artificial Sequence: Synthetic oligonucleotide
  Antisense strand to SEQ ID NO: 243036
aaggcuaaccaauacuuca

SEQ ID NO: 243038 - RNA, 19 nt, Artificial Sequence
  Description of Artificial Sequence: Synthetic oligonucleotide
  Sense strand starting at position 3532 SEQ ID NO: 3128
uuguucaaugugugaugua

SEQ ID NO: 243039 - RNA, 19 nt, Artificial Sequence
  Description of Artificial Sequence: Synthetic oligonucleotide
  Antisense strand to SEQ ID NO: 243038
uacaucacacauugaacaa

SEQ ID NO: 243040 - RNA, 19 nt, Artificial Sequence
  Description of Artificial Sequence: Synthetic oligonucleotide
  Sense strand starting at position 3541 SEQ ID NO: 3128
gugugauguaaucagguag

SEQ ID NO: 243041 - RNA, 19 nt, Artificial Sequence
  Description of Artificial Sequence: Synthetic oligonucleotide
  Antisense strand to SEQ ID NO: 243040
cuaccugauuacaucacac

SEQ ID NO: 243042 - RNA, 19 nt, Artificial Sequence
  Description of Artificial Sequence: Synthetic oligonucleotide
  Sense strand starting at position 3572 SEQ ID NO: 3128
caagguggauucuuaaacu

SEQ ID NO: 243043 - RNA, 19 nt, Artificial Sequence
  Description of Artificial Sequence: Synthetic oligonucleotide
  Antisense strand to SEQ ID NO: 243042
aguuuaagaauccaccuug

SEQ ID NO: 243044 - RNA, 19 nt, Artificial Sequence
  Description of Artificial Sequence: Synthetic oligonucleotide
  Sense strand starting at position 3582 SEQ ID NO: 3128
ucuuaaacucgagguagaa

SEQ ID NO: 243045 - RNA, 19 nt, Artificial Sequence
  Description of Artificial Sequence: Synthetic oligonucleotide
  Antisense strand to SEQ ID NO: 243044
uucuaccucgaguuuaaga

SEQ ID NO: 243046 - RNA, 19 nt, Artificial Sequence
  Description of Artificial Sequence: Synthetic oligonucleotide
  Sense strand starting at position 3594 SEQ ID NO: 3128
gguagaauuucgcuggcuu

SEQ ID NO: 243047 - RNA, 19 nt, Artificial Sequence
  Description of Artificial Sequence: Synthetic oligonucleotide
  Antisense strand to SEQ ID NO: 243046
aagccagcgaaauucuacc

SEQ ID NO: 243048 - RNA, 19 nt, Artificial Sequence
  Description of Artificial Sequence: Synthetic oligonucleotide
  Sense strand starting at position 3595 SEQ ID NO: 3128
guagaauuucgcuggcuua

SEQ ID NO: 243049 - RNA, 19 nt, Artificial Sequence
  Description of Artificial Sequence: Synthetic oligonucleotide
  Antisense strand to SEQ ID NO: 243048
uaagccagcgaaauucuac

SEQ ID NO: 243050 - RNA, 19 nt, Artificial Sequence
  Description of Artificial Sequence: Synthetic oligonucleotide
  Sense strand starting at position 3596 SEQ ID NO: 3128
uagaauuucgcuggcuuaa

SEQ ID NO: 243051 - RNA, 19 nt, Artificial Sequence
  Description of Artificial Sequence: Synthetic oligonucleotide
  Antisense strand to SEQ ID NO: 243050
uuaagccagcgaaauucua

SEQ ID NO: 243052 - RNA, 19 nt, Artificial Sequence
  Description of Artificial Sequence: Synthetic oligonucleotide
  Sense strand starting at position 3598 SEQ ID NO: 3128
gaauuucgcuggcuuaagu

SEQ ID NO: 243053 - RNA, 19 nt, Artificial Sequence
  Description of Artificial Sequence: Synthetic oligonucleotide
  Antisense strand to SEQ ID NO: 243052
acuuaagccagcgaaauuc

SEQ ID NO: 243054 - RNA, 19 nt, Artificial Sequence
  Description of Artificial Sequence: Synthetic oligonucleotide
  Sense strand starting at position 3622 SEQ ID NO: 3128
uuuggauccuuucccagua

SEQ ID NO: 243055 - RNA, 19 nt, Artificial Sequence
  Description of Artificial Sequence: Synthetic oligonucleotide
  Antisense strand to SEQ ID NO: 243054
uacugggaaaggauccaaa

SEQ ID NO: 243056 - RNA, 19 nt, Artificial Sequence
  Description of Artificial Sequence: Synthetic oligonucleotide
  Sense strand starting at position 3660 SEQ ID NO: 3128
agaagaguuuaacuuaucu

SEQ ID NO: 243057 - RNA, 19 nt, Artificial Sequence
  Description of Artificial Sequence: Synthetic oligonucleotide
  Antisense strand to SEQ ID NO: 243056
agauaaguuaaacucuucu

SEQ ID NO: 243058 - RNA, 19 nt, Artificial Sequence
  Description of Artificial Sequence: Synthetic oligonucleotide
  Sense strand starting at position 3690 SEQ ID NO: 3128
uuagguaugugcuuguaga

SEQ ID NO: 243059 - RNA, 19 nt, Artificial Sequence
  Description of Artificial Sequence: Synthetic oligonucleotide
  Antisense strand to SEQ ID NO: 243058
ucuacaagcacauaccuaa

SEQ ID NO: 243060 - RNA, 19 nt, Artificial Sequence
  Description of Artificial Sequence: Synthetic oligonucleotide
  Sense strand starting at position 3691 SEQ ID NO: 3128
uagguaugugcuuguagau

SEQ ID NO: 243061 - RNA, 19 nt, Artificial Sequence
  Description of Artificial Sequence: Synthetic oligonucleotide
  Antisense strand to SEQ ID NO: 243060
aucuacaagcacauaccua

SEQ ID NO: 243062 - RNA, 19 nt, Artificial Sequence
  Description of Artificial Sequence: Synthetic oligonucleotide
  Sense strand starting at position 3697 SEQ ID NO: 3128
ugugcuuguagaugcuaaa

SEQ ID NO: 243063 - RNA, 19 nt, Artificial Sequence
  Description of Artificial Sequence: Synthetic oligonucleotide
  Antisense strand to SEQ ID NO: 243062
uuuagcaucuacaagcaca

SEQ ID NO: 243064 - RNA, 19 nt, Artificial Sequence
  Description of Artificial Sequence: Synthetic oligonucleotide
  Sense strand starting at position 3793 SEQ ID NO: 3128
cauuuauguugugcaguca

SEQ ID NO: 243065 - RNA, 19 nt, Artificial Sequence
  Description of Artificial Sequence: Synthetic oligonucleotide
  Antisense strand to SEQ ID NO: 243064
ugacugcacaacauaaaug

SEQ ID NO: 243066 - RNA, 19 nt, Artificial Sequence
  Description of Artificial Sequence: Synthetic oligonucleotide
  Sense strand starting at position 3794 SEQ ID NO: 3128
auuuauguugugcagucau

SEQ ID NO: 243067 - RNA, 19 nt, Artificial Sequence
  Description of Artificial Sequence: Synthetic oligonucleotide
  Antisense strand to SEQ ID NO: 243066
augacugcacaacauaaau

SEQ ID NO: 243068 - RNA, 19 nt, Artificial Sequence
  Description of Artificial Sequence: Synthetic oligonucleotide
  Sense strand starting at position 3853 SEQ ID NO: 3128
guaacuuuguacucauuag

SEQ ID NO: 243069 - RNA, 19 nt, Artificial Sequence
  Description of Artificial Sequence: Synthetic oligonucleotide
  Antisense strand to SEQ ID NO: 243068
cuaaugaguacaaaguuac

SEQ ID NO: 243070 - RNA, 19 nt, Artificial Sequence
  Description of Artificial Sequence: Synthetic oligonucleotide
  Sense strand starting at position 3857 SEQ ID NO: 3128
cuuuguacucauuagacag

SEQ ID NO: 243071 - RNA, 19 nt, Artificial Sequence
  Description of Artificial Sequence: Synthetic oligonucleotide
  Antisense strand to SEQ ID NO: 243070
cugucuaaugaguacaaag

SEQ ID NO: 243072 - RNA, 19 nt, Artificial Sequence
  Description of Artificial Sequence: Synthetic oligonucleotide
  Sense strand starting at position 3931 SEQ ID NO: 3128
gcuguucucuuguuccaaa

SEQ ID NO: 243073 - RNA, 19 nt, Artificial Sequence
  Description of Artificial Sequence: Synthetic oligonucleotide
  Antisense strand to SEQ ID NO: 243072
uuuggaacaagagaacagc

SEQ ID NO: 243074 - RNA, 19 nt, Artificial Sequence
  Description of Artificial Sequence: Synthetic oligonucleotide
  Sense strand starting at position 58 SEQ ID NO: 3128
gaauccugagcucaaacga

SEQ ID NO: 243075 - RNA, 19 nt, Artificial Sequence
  Description of Artificial Sequence: Synthetic oligonucleotide
  Antisense strand to SEQ ID NO: 243074
ucguuugagcucaggauuc

SEQ ID NO: 243076 - RNA, 19 nt, Artificial Sequence
  Description of Artificial Sequence: Synthetic oligonucleotide
  Sense strand starting at position 168 SEQ ID NO: 3128
ggcaaacacugaucacacu

SEQ ID NO: 243077 - RNA, 19 nt, Artificial Sequence
  Description of Artificial Sequence: Synthetic oligonucleotide
  Antisense strand to SEQ ID NO: 243076
agugugaucaguguuugcc

SEQ ID NO: 243078 - RNA, 19 nt, Artificial Sequence
  Description of Artificial Sequence: Synthetic oligonucleotide
  Sense strand starting at position 511 SEQ ID NO: 3128
cggccuauugaggacaauu

SEQ ID NO: 243079 - RNA, 19 nt, Artificial Sequence
  Description of Artificial Sequence: Synthetic oligonucleotide
  Antisense strand to SEQ ID NO: 243078
aauuguccucaauaggccg

SEQ ID NO: 243080 - RNA, 19 nt, Artificial Sequence
  Description of Artificial Sequence: Synthetic oligonucleotide
  Sense strand starting at position 561 SEQ ID NO: 3128
gcaucauagcauuggucau

SEQ ID NO: 243081 - RNA, 19 nt, Artificial Sequence
  Description of Artificial Sequence: Synthetic oligonucleotide
  Antisense strand to SEQ ID NO: 243080
augaccaaugcuaugaugc

SEQ ID NO: 243082 - RNA, 19 nt, Artificial Sequence
  Description of Artificial Sequence: Synthetic oligonucleotide
  Sense strand starting at position 563 SEQ ID NO: 3128
aucauagcauuggucauau

SEQ ID NO: 243083 - RNA, 19 nt, Artificial Sequence
  Description of Artificial Sequence: Synthetic oligonucleotide
  Antisense strand to SEQ ID NO: 243082
auaugaccaaugcuaugau

SEQ ID NO: 243084 - RNA, 19 nt, Artificial Sequence
  Description of Artificial Sequence: Synthetic oligonucleotide
  Sense strand starting at position 636 SEQ ID NO: 3128
agcaguuaaugaucuugaa

SEQ ID NO: 243085 - RNA, 19 nt, Artificial Sequence
  Description of Artificial Sequence: Synthetic oligonucleotide
  Antisense strand to SEQ ID NO: 243084
uucaagaucauuaacugcu

SEQ ID NO: 243086 - RNA, 19 nt, Artificial Sequence
  Description of Artificial Sequence: Synthetic oligonucleotide
  Sense strand starting at position 1037 SEQ ID NO: 3128
accucagcuuauucguuaa

SEQ ID NO: 243087 - RNA, 19 nt, Artificial Sequence
  Description of Artificial Sequence: Synthetic oligonucleotide
  Antisense strand to SEQ ID NO: 243086
uuaacgaauaagcugaggu

SEQ ID NO: 243088 - RNA, 19 nt, Artificial Sequence
  Description of Artificial Sequence: Synthetic oligonucleotide
  Sense strand starting at position 1040 SEQ ID NO: 3128
ucagcuuauucguuaagga

SEQ ID NO: 243089 - RNA, 19 nt, Artificial Sequence
  Description of Artificial Sequence: Synthetic oligonucleotide
  Antisense strand to SEQ ID NO: 243088
uccuuaacgaauaagcuga

SEQ ID NO: 243090 - RNA, 19 nt, Artificial Sequence
  Description of Artificial Sequence: Synthetic oligonucleotide
  Sense strand starting at position 1041 SEQ ID NO: 3128
cagcuuauucguuaaggaa

SEQ ID NO: 243091 - RNA, 19 nt, Artificial Sequence
  Description of Artificial Sequence: Synthetic oligonucleotide
  Antisense strand to SEQ ID NO: 243090
uuccuuaacgaauaagcug

SEQ ID NO: 243092 - RNA, 19 nt, Artificial Sequence
  Description of Artificial Sequence: Synthetic oligonucleotide
  Sense strand starting at position 1059 SEQ ID NO: 3128
agcgcauuugaauguacua

SEQ ID NO: 243093 - RNA, 19 nt, Artificial Sequence
  Description of Artificial Sequence: Synthetic oligonucleotide
  Antisense strand to SEQ ID NO: 243092
uaguacauucaaaugcgcu

SEQ ID NO: 243094 - RNA, 19 nt, Artificial Sequence
  Description of Artificial Sequence: Synthetic oligonucleotide
  Sense strand starting at position 1090 SEQ ID NO: 3128
aguuuaauucccgauuccu

SEQ ID NO: 243095 - RNA, 19 nt, Artificial Sequence
  Description of Artificial Sequence: Synthetic oligonucleotide
  Antisense strand to SEQ ID NO: 243094
aggaaucgggaauuaaacu

SEQ ID NO: 243096 - RNA, 19 nt, Artificial Sequence
  Description of Artificial Sequence: Synthetic oligonucleotide
  Sense strand starting at position 1163 SEQ ID NO: 3128
aggucaaccuuaguuuauu

SEQ ID NO: 243097 - RNA, 19 nt, Artificial Sequence
  Description of Artificial Sequence: Synthetic oligonucleotide
  Antisense strand to SEQ ID NO: 243096
aauaaacuaagguugaccu

SEQ ID NO: 243098 - RNA, 19 nt, Artificial Sequence
  Description of Artificial Sequence: Synthetic oligonucleotide
  Sense strand starting at position 1174 SEQ ID NO: 3128
aguuuauuccaaggucaaa

SEQ ID NO: 243099 - RNA, 19 nt, Artificial Sequence
  Description of Artificial Sequence: Synthetic oligonucleotide
  Antisense strand to SEQ ID NO: 243098
uuugaccuuggaauaaacu

SEQ ID NO: 243100 - RNA, 19 nt, Artificial Sequence
  Description of Artificial Sequence: Synthetic oligonucleotide
  Sense strand starting at position 2522 SEQ ID NO: 3128
ggugguguacgugagggaa

SEQ ID NO: 243101 - RNA, 19 nt, Artificial Sequence
  Description of Artificial Sequence: Synthetic oligonucleotide
  Antisense strand to SEQ ID NO: 243100
uucccucacguacaccacc

SEQ ID NO: 243102 - RNA, 19 nt, Artificial Sequence
  Description of Artificial Sequence: Synthetic oligonucleotide
  Sense strand starting at position 2857 SEQ ID NO: 3128
gugaaagauuaacucguuu

SEQ ID NO: 243103 - RNA, 19 nt, Artificial Sequence
  Description of Artificial Sequence: Synthetic oligonucleotide
  Antisense strand to SEQ ID NO: 243102
aaacgaguuaaucuuucac

SEQ ID NO: 243104 - RNA, 19 nt, Artificial Sequence
  Description of Artificial Sequence: Synthetic oligonucleotide
  Sense strand starting at position 3113 SEQ ID NO: 3128
gguaguucugaugaucuuu

SEQ ID NO: 243105 - RNA, 19 nt, Artificial Sequence
  Description of Artificial Sequence: Synthetic oligonucleotide
  Antisense strand to SEQ ID NO: 243104
aaagaucaucagaacuacc

SEQ ID NO: 243106 - RNA, 19 nt, Artificial Sequence
  Description of Artificial Sequence: Synthetic oligonucleotide
  Sense strand starting at position 3144 SEQ ID NO: 3128
ccagaaaugcuucgguuac

SEQ ID NO: 243107 - RNA, 19 nt, Artificial Sequence
  Description of Artificial Sequence: Synthetic oligonucleotide
  Antisense strand to SEQ ID NO: 243106
guaaccgaagcauuucugg

SEQ ID NO: 243108 - RNA, 19 nt, Artificial Sequence
  Description of Artificial Sequence: Synthetic oligonucleotide
  Sense strand starting at position 3164 SEQ ID NO: 3128
cacagucuuucgccagaug

SEQ ID NO: 243109 - RNA, 19 nt, Artificial Sequence
  Description of Artificial Sequence: Synthetic oligonucleotide
  Antisense strand to SEQ ID NO: 243108
caucuggcgaaagacugug

SEQ ID NO: 243110 - RNA, 19 nt, Artificial Sequence
  Description of Artificial Sequence: Synthetic oligonucleotide
  Sense strand starting at position 3165 SEQ ID NO: 3128
acagucuuucgccagauga

SEQ ID NO: 243111 - RNA, 19 nt, Artificial Sequence
  Description of Artificial Sequence: Synthetic oligonucleotide
  Antisense strand to SEQ ID NO: 243110
ucaucuggcgaaagacugu

SEQ ID NO: 243112 - RNA, 19 nt, Artificial Sequence
  Description of Artificial Sequence: Synthetic oligonucleotide
  Sense strand starting at position 3167 SEQ ID NO: 3128
agucuuucgccagaugaga

SEQ ID NO: 243113 - RNA, 19 nt, Artificial Sequence
  Description of Artificial Sequence: Synthetic oligonucleotide
  Antisense strand to SEQ ID NO: 243112
ucucaucuggcgaaagacu

SEQ ID NO: 243114 - RNA, 19 nt, Artificial Sequence
  Description of Artificial Sequence: Synthetic oligonucleotide
  Sense strand starting at position 3428 SEQ ID NO: 3128
gagaacucaguuuacaugu

SEQ ID NO: 243115 - RNA, 19 nt, Artificial Sequence
  Description of Artificial Sequence: Synthetic oligonucleotide
  Antisense strand to SEQ ID NO: 243114
acauguaaacugaguucuc

SEQ ID NO: 243116 - RNA, 19 nt, Artificial Sequence
  Description of Artificial Sequence: Synthetic oligonucleotide
  Sense strand starting at position 3455 SEQ ID NO: 3128
ugaaguauugguuagccuu

SEQ ID NO: 243117 - RNA, 19 nt, Artificial Sequence
  Description of Artificial Sequence: Synthetic oligonucleotide
  Antisense strand to SEQ ID NO: 243116
aaggcuaaccaauacuuca

SEQ ID NO: 243118 - RNA, 19 nt, Artificial Sequence
  Description of Artificial Sequence: Synthetic oligonucleotide
  Sense strand starting at position 3532 SEQ ID NO: 3128
uuguucaaugugugaugua

SEQ ID NO: 243119 - RNA, 19 nt, Artificial Sequence
  Description of Artificial Sequence: Synthetic oligonucleotide
  Antisense strand to SEQ ID NO: 243118
uacaucacacauugaacaa

SEQ ID NO: 243120 - RNA, 19 nt, Artificial Sequence
  Description of Artificial Sequence: Synthetic oligonucleotide
  Sense strand starting at position 3541 SEQ ID NO: 3128
gugugauguaaucagguag

SEQ ID NO: 243121 - RNA, 19 nt, Artificial Sequence
  Description of Artificial Sequence: Synthetic oligonucleotide
  Antisense strand to SEQ ID NO: 243120
cuaccugauuacaucacac

SEQ ID NO: 243122 - RNA, 19 nt, Artificial Sequence
  Description of Artificial Sequence: Synthetic oligonucleotide
  Sense strand starting at position 3572 SEQ ID NO: 3128
caagguggauucuuaaacu

SEQ ID NO: 243123 - RNA, 19 nt, Artificial Sequence
  Description of Artificial Sequence: Synthetic oligonucleotide
  Antisense strand to SEQ ID NO: 243122
aguuuaagaauccaccuug

SEQ ID NO: 243124 - RNA, 19 nt, Artificial Sequence
  Description of Artificial Sequence: Synthetic oligonucleotide
  Sense strand starting at position 3582 SEQ ID NO: 3128
ucuuaaacucgagguagaa

SEQ ID NO: 243125 - RNA, 19 nt, Artificial Sequence
  Description of Artificial Sequence: Synthetic oligonucleotide
  Antisense strand to SEQ ID NO: 243124
uucuaccucgaguuuaaga

SEQ ID NO: 243126 - RNA, 19 nt, Artificial Sequence
  Description of Artificial Sequence: Synthetic oligonucleotide
  Sense strand starting at position 3594 SEQ ID NO: 3128
gguagaauuucgcuggcuu

SEQ ID NO: 243127 - RNA, 19 nt, Artificial Sequence
  Description of Artificial Sequence: Synthetic oligonucleotide
  Antisense strand to SEQ ID NO: 243126
aagccagcgaaauucuacc

SEQ ID NO: 243128 - RNA, 19 nt, Artificial Sequence
  Description of Artificial Sequence: Synthetic oligonucleotide
  Sense strand starting at position 3595 SEQ ID NO: 3128
guagaauuucgcuggcuua

SEQ ID NO: 243129 - RNA, 19 nt, Artificial Sequence
  Description of Artificial Sequence: Synthetic oligonucleotide
  Antisense strand to SEQ ID NO: 243128
uaagccagcgaaauucuac

SEQ ID NO: 243130 - RNA, 19 nt, Artificial Sequence
  Description of Artificial Sequence: Synthetic oligonucleotide
  Sense strand starting at position 3596 SEQ ID NO: 3128
uagaauuucgcuggcuuaa

SEQ ID NO: 243131 - RNA, 19 nt, Artificial Sequence
  Description of Artificial Sequence: Synthetic oligonucleotide
  Antisense strand to SEQ ID NO: 243130
uuaagccagcgaaauucua

SEQ ID NO: 243132 - RNA, 19 nt, Artificial Sequence
  Description of Artificial Sequence: Synthetic oligonucleotide
  Sense strand starting at position 3598 SEQ ID NO: 3128
gaauuucgcuggcuuaagu

SEQ ID NO: 243133 - RNA, 19 nt, Artificial Sequence
  Description of Artificial Sequence: Synthetic oligonucleotide
  Antisense strand to SEQ ID NO: 243132
acuuaagccagcgaaauuc

SEQ ID NO: 243134 - RNA, 19 nt, Artificial Sequence
  Description of Artificial Sequence: Synthetic oligonucleotide
  Sense strand starting at position 3622 SEQ ID NO: 3128
uuuggauccuuucccagua

SEQ ID NO: 243135 - RNA, 19 nt, Artificial Sequence
  Description of Artificial Sequence: Synthetic oligonucleotide
  Antisense strand to SEQ ID NO: 243134
uacugggaaaggauccaaa

SEQ ID NO: 243136 - RNA, 19 nt, Artificial Sequence
  Description of Artificial Sequence: Synthetic oligonucleotide
  Sense strand starting at position 3660 SEQ ID NO: 3128
agaagaguuuaacuuaucu

SEQ ID NO: 243137 - RNA, 19 nt, Artificial Sequence
  Description of Artificial Sequence: Synthetic oligonucleotide
  Antisense strand to SEQ ID NO: 243136
agauaaguuaaacucuucu

SEQ ID NO: 243138 - RNA, 19 nt, Artificial Sequence
  Description of Artificial Sequence: Synthetic oligonucleotide
  Sense strand starting at position 3690 SEQ ID NO: 3128
uuagguaugugcuuguaga

SEQ ID NO: 243139 - RNA, 19 nt, Artificial Sequence
  Description of Artificial Sequence: Synthetic oligonucleotide
  Antisense strand to SEQ ID NO: 243138
ucuacaagcacauaccuaa

SEQ ID NO: 243140 - RNA, 19 nt, Artificial Sequence
  Description of Artificial Sequence: Synthetic oligonucleotide
  Sense strand starting at position 3691 SEQ ID NO: 3128
uagguaugugcuuguagau

SEQ ID NO: 243141 - RNA, 19 nt, Artificial Sequence
  Description of Artificial Sequence: Synthetic oligonucleotide
  Antisense strand to SEQ ID NO: 243140
aucuacaagcacauaccua

SEQ ID NO: 243142 - RNA, 19 nt, Artificial Sequence
  Description of Artificial Sequence: Synthetic oligonucleotide
  Sense strand starting at position 3697 SEQ ID NO: 3128
ugugcuuguagaugcuaaa

SEQ ID NO: 243143 - RNA, 19 nt, Artificial Sequence
  Description of Artificial Sequence: Synthetic oligonucleotide
  Antisense strand to SEQ ID NO: 243142
uuuagcaucuacaagcaca

SEQ ID NO: 243144 - RNA, 19 nt, Artificial Sequence
  Description of Artificial Sequence: Synthetic oligonucleotide
  Sense strand starting at position 3793 SEQ ID NO: 3128
cauuuauguugugcaguca

SEQ ID NO: 243145 - RNA, 19 nt, Artificial Sequence
  Description of Artificial Sequence: Synthetic oligonucleotide
  Antisense strand to SEQ ID NO: 243144
ugacugcacaacauaaaug

SEQ ID NO: 243146 - RNA, 19 nt, Artificial Sequence
  Description of Artificial Sequence: Synthetic oligonucleotide
  Sense strand starting at position 3794 SEQ ID NO: 3128
auuuauguugugcagucau

SEQ ID NO: 243147 - RNA, 19 nt, Artificial Sequence
  Description of Artificial Sequence: Synthetic oligonucleotide
  Antisense strand to SEQ ID NO: 243146
augacugcacaacauaaau

SEQ ID NO: 243148 - RNA, 19 nt, Artificial Sequence
  Description of Artificial Sequence: Synthetic oligonucleotide
  Sense strand starting at position 3853 SEQ ID NO: 3128
guaacuuuguacucauuag

SEQ ID NO: 243149 - RNA, 19 nt, Artificial Sequence
  Description of Artificial Sequence: Synthetic oligonucleotide
  Antisense strand to SEQ ID NO: 243148
cuaaugaguacaaaguuac

SEQ ID NO: 243150 - RNA, 19 nt, Artificial Sequence
  Description of Artificial Sequence: Synthetic oligonucleotide
  Sense strand starting at position 3857 SEQ ID NO: 3128
cuuuguacucauuagacag

SEQ ID NO: 243151 - RNA, 19 nt, Artificial Sequence
  Description of Artificial Sequence: Synthetic oligonucleotide
  Antisense strand to SEQ ID NO: 243150
cugucuaaugaguacaaag

SEQ ID NO: 243152 - RNA, 19 nt, Artificial Sequence
  Description of Artificial Sequence: Synthetic oligonucleotide
  Sense strand starting at position 3931 SEQ ID NO: 3128
gcuguucucuuguuccaaa

SEQ ID NO: 243153 - RNA, 19 nt, Artificial Sequence
  Description of Artificial Sequence: Synthetic oligonucleotide
  Antisense strand to SEQ ID NO: 243152
uuuggaacaagagaacagc

SEQ ID NO: 243154 - RNA, 19 nt, Artificial Sequence
  Description of Artificial Sequence: Synthetic oligonucleotide
  Sense strand starting at position 167 SEQ ID NO: 3129
uguuuacuugccguaucuu

SEQ ID NO: 243155 - RNA, 19 nt, Artificial Sequence
  Description of Artificial Sequence: Synthetic oligonucleotide
  Antisense strand to SEQ ID NO: 243154
aagauacggcaaguaaaca

SEQ ID NO: 243156 - RNA, 19 nt, Artificial Sequence
  Description of Artificial Sequence: Synthetic oligonucleotide
  Sense strand starting at position 225 SEQ ID NO: 3129
agauuaaaugaguguccau

SEQ ID NO: 243157 - RNA, 19 nt, Artificial Sequence
  Description of Artificial Sequence: Synthetic oligonucleotide
  Antisense strand to SEQ ID NO: 243156
auggacacucauuuaaucu

SEQ ID NO: 243158 - RNA, 19 nt, Artificial Sequence
  Description of Artificial Sequence: Synthetic oligonucleotide
  Sense strand starting at position 307 SEQ ID NO: 3129
cauuauugucaagagggca

SEQ ID NO: 243159 - RNA, 19 nt, Artificial Sequence
  Description of Artificial Sequence: Synthetic oligonucleotide
  Antisense strand to SEQ ID NO: 243158
ugcccucuugacaauaaug

SEQ ID NO: 243160 - RNA, 19 nt, Artificial Sequence
  Description of Artificial Sequence: Synthetic oligonucleotide
  Sense strand starting at position 445 SEQ ID NO: 3129
accaauuguggguauuauc

SEQ ID NO: 243161 - RNA, 19 nt, Artificial Sequence
  Description of Artificial Sequence: Synthetic oligonucleotide
  Antisense strand to SEQ ID NO: 243160
gauaauacccacaauuggu

SEQ ID NO: 243162 - RNA, 19 nt, Artificial Sequence
  Description of Artificial Sequence: Synthetic oligonucleotide
  Sense strand starting at position 453 SEQ ID NO: 3129
uggguauuaucaccaugag

SEQ ID NO: 243163 - RNA, 19 nt, Artificial Sequence
  Description of Artificial Sequence: Synthetic oligonucleotide
  Antisense strand to SEQ ID NO: 243162
cucauggugauaauaccca

SEQ ID NO: 243164 - RNA, 19 nt, Artificial Sequence
  Description of Artificial Sequence: Synthetic oligonucleotide
  Sense strand starting at position 454 SEQ ID NO: 3129
ggguauuaucaccaugagu

SEQ ID NO: 243165 - RNA, 19 nt, Artificial Sequence
  Description of Artificial Sequence: Synthetic oligonucleotide
  Antisense strand to SEQ ID NO: 243164
acucauggugauaauaccc

SEQ ID NO: 243166 - RNA, 19 nt, Artificial Sequence
  Description of Artificial Sequence: Synthetic oligonucleotide
  Sense strand starting at position 600 SEQ ID NO: 3129
aaaugugcucaggaauugu

SEQ ID NO: 243167 - RNA, 19 nt, Artificial Sequence
  Description of Artificial Sequence: Synthetic oligonucleotide
  Antisense strand to SEQ ID NO: 243166
acaauuccugagcacauuu

SEQ ID NO: 243168 - RNA, 19 nt, Artificial Sequence
  Description of Artificial Sequence: Synthetic oligonucleotide
  Sense strand starting at position 844 SEQ ID NO: 3129
uagguaagauauccaagua

SEQ ID NO: 243169 - RNA, 19 nt, Artificial Sequence
  Description of Artificial Sequence: Synthetic oligonucleotide
  Antisense strand to SEQ ID NO: 243168
uacuuggauaucuuaccua

SEQ ID NO: 243170 - RNA, 19 nt, Artificial Sequence
  Description of Artificial Sequence: Synthetic oligonucleotide
  Sense strand starting at position 889 SEQ ID NO: 3129
uaggaaagcucagugaaag

SEQ ID NO: 243171 - RNA, 19 nt, Artificial Sequence
  Description of Artificial Sequence: Synthetic oligonucleotide
  Antisense strand to SEQ ID NO: 243170
cuuucacugagcuuuccua

SEQ ID NO: 243172 - RNA, 19 nt, Artificial Sequence
  Description of Artificial Sequence: Synthetic oligonucleotide
  Sense strand starting at position 976 SEQ ID NO: 3129
guaguuguagagucguguu

SEQ ID NO: 243173 - RNA, 19 nt, Artificial Sequence
  Description of Artificial Sequence: Synthetic oligonucleotide
  Antisense strand to SEQ ID NO: 243172
aacacgacucuacaacuac

SEQ ID NO: 243174 - RNA, 19 nt, Artificial Sequence
  Description of Artificial Sequence: Synthetic oligonucleotide
  Sense strand starting at position 1114 SEQ ID NO: 3129
uguugugcauuugugacaa

SEQ ID NO: 243175 - RNA, 19 nt, Artificial Sequence
  Description of Artificial Sequence: Synthetic oligonucleotide
  Antisense strand to SEQ ID NO: 243174
uugucacaaaugcacaaca

SEQ ID NO: 243176 - RNA, 19 nt, Artificial Sequence
  Description of Artificial Sequence: Synthetic oligonucleotide
  Sense strand starting at position 1388 SEQ ID NO: 3129
ggauccuuauauguaauua

SEQ ID NO: 243177 - RNA, 19 nt, Artificial Sequence
  Description of Artificial Sequence: Synthetic oligonucleotide
  Antisense strand to SEQ ID NO: 243176
uaauuacauauaaggaucc

SEQ ID NO: 243178 - RNA, 19 nt, Artificial Sequence
  Description of Artificial Sequence: Synthetic oligonucleotide
  Sense strand starting at position 1484 SEQ ID NO: 3129
aagguauuacuaggaucca

SEQ ID NO: 243179 - RNA, 19 nt, Artificial Sequence
  Description of Artificial Sequence: Synthetic oligonucleotide
  Antisense strand to SEQ ID NO: 243178
uggauccuaguaauaccuu

SEQ ID NO: 243180 - RNA, 19 nt, Artificial Sequence
  Description of Artificial Sequence: Synthetic oligonucleotide
  Sense strand starting at position 1636 SEQ ID NO: 3129
cccaguugccuugagaaga

SEQ ID NO: 243181 - RNA, 19 nt, Artificial Sequence
  Description of Artificial Sequence: Synthetic oligonucleotide
  Antisense strand to SEQ ID NO: 243180
ucuucucaaggcaacuggg

SEQ ID NO: 243182 - RNA, 19 nt, Artificial Sequence
  Description of Artificial Sequence: Synthetic oligonucleotide
  Sense strand starting at position 1828 SEQ ID NO: 3129
agauuaauuccauaugugu

SEQ ID NO: 243183 - RNA, 19 nt, Artificial Sequence
  Description of Artificial Sequence: Synthetic oligonucleotide
  Antisense strand to SEQ ID NO: 243182
acacauauggaauuaaucu

SEQ ID NO: 243184 - RNA, 19 nt, Artificial Sequence
  Description of Artificial Sequence: Synthetic oligonucleotide
  Sense strand starting at position 1977 SEQ ID NO: 3129
gguugaaagcagugaaaca

SEQ ID NO: 243185 - RNA, 19 nt, Artificial Sequence
  Description of Artificial Sequence: Synthetic oligonucleotide
  Antisense strand to SEQ ID NO: 243184
uguuucacugcuuucaacc

SEQ ID NO: 243186 - RNA, 19 nt, Artificial Sequence
  Description of Artificial Sequence: Synthetic oligonucleotide
  Sense strand starting at position 1991 SEQ ID NO: 3129
aaacaaauacguuguauag

SEQ ID NO: 243187 - RNA, 19 nt, Artificial Sequence
  Description of Artificial Sequence: Synthetic oligonucleotide
  Antisense strand to SEQ ID NO: 243186
cuauacaacguauuuguuu

SEQ ID NO: 243188 - RNA, 19 nt, Artificial Sequence
  Description of Artificial Sequence: Synthetic oligonucleotide
  Sense strand starting at position 2000 SEQ ID NO: 3129
cguuguauagcugcaagca

SEQ ID NO: 243189 - RNA, 19 nt, Artificial Sequence
  Description of Artificial Sequence: Synthetic oligonucleotide
  Antisense strand to SEQ ID NO: 243188
ugcuugcagcuauacaacg

SEQ ID NO: 243190 - RNA, 19 nt, Artificial Sequence
  Description of Artificial Sequence: Synthetic oligonucleotide
  Sense strand starting at position 2392 SEQ ID NO: 3129
ccauuaauuugcucugguu

SEQ ID NO: 243191 - RNA, 19 nt, Artificial Sequence
  Description of Artificial Sequence: Synthetic oligonucleotide
  Antisense strand to SEQ ID NO: 243190
aaccagagcaaauuaaugg

SEQ ID NO: 243192 - RNA, 19 nt, Artificial Sequence
  Description of Artificial Sequence: Synthetic oligonucleotide
  Sense strand starting at position 2498 SEQ ID NO: 3129
aacagaugaucucuggguu

SEQ ID NO: 243193 - RNA, 19 nt, Artificial Sequence
  Description of Artificial Sequence: Synthetic oligonucleotide
  Antisense strand to SEQ ID NO: 243192
aacccagagaucaucuguu

SEQ ID NO: 243194 - RNA, 19 nt, Artificial Sequence
  Description of Artificial Sequence: Synthetic oligonucleotide
  Sense strand starting at position 2499 SEQ ID NO: 3129
acagaugaucucuggguuu

SEQ ID NO: 243195 - RNA, 19 nt, Artificial Sequence
  Description of Artificial Sequence: Synthetic oligonucleotide
  Antisense strand to SEQ ID NO: 243194
aaacccagagaucaucugu

SEQ ID NO: 243196 - RNA, 19 nt, Artificial Sequence
  Description of Artificial Sequence: Synthetic oligonucleotide
  Sense strand starting at position 2501 SEQ ID NO: 3129
agaugaucucuggguuuag

SEQ ID NO: 243197 - RNA, 19 nt, Artificial Sequence
  Description of Artificial Sequence: Synthetic oligonucleotide
  Antisense strand to SEQ ID NO: 243196
cuaaacccagagaucaucu

SEQ ID NO: 243198 - RNA, 19 nt, Artificial Sequence
  Description of Artificial Sequence: Synthetic oligonucleotide
  Sense strand starting at position 2505 SEQ ID NO: 3129
gaucucuggguuuaggagu

SEQ ID NO: 243199 - RNA, 19 nt, Artificial Sequence
  Description of Artificial Sequence: Synthetic oligonucleotide
  Antisense strand to SEQ ID NO: 243198
acuccuaaacccagagauc

SEQ ID NO: 243200 - RNA, 19 nt, Artificial Sequence
  Description of Artificial Sequence: Synthetic oligonucleotide
  Sense strand starting at position 2546 SEQ ID NO: 3129
uagacuuuacguuggagaa

SEQ ID NO: 243201 - RNA, 19 nt, Artificial Sequence
  Description of Artificial Sequence: Synthetic oligonucleotide
  Antisense strand to SEQ ID NO: 243200
uucuccaacguaaagucua

SEQ ID NO: 243202 - RNA, 19 nt, Artificial Sequence
  Description of Artificial Sequence: Synthetic oligonucleotide
  Sense strand starting at position 2547 SEQ ID NO: 3129
agacuuuacguuggagaaa

SEQ ID NO: 243203 - RNA, 19 nt, Artificial Sequence
  Description of Artificial Sequence: Synthetic oligonucleotide
  Antisense strand to SEQ ID NO: 243202
uuucuccaacguaaagucu

SEQ ID NO: 243204 - RNA, 19 nt, Artificial Sequence
  Description of Artificial Sequence: Synthetic oligonucleotide
  Sense strand starting at position 2654 SEQ ID NO: 3129
auaagacuagcuuaguauu

SEQ ID NO: 243205 - RNA, 19 nt, Artificial Sequence
  Description of Artificial Sequence: Synthetic oligonucleotide
  Antisense strand to SEQ ID NO: 243204
aauacuaagcuagucuuau

SEQ ID NO: 243206 - RNA, 19 nt, Artificial Sequence
  Description of Artificial Sequence: Synthetic oligonucleotide
  Sense strand starting at position 2668 SEQ ID NO: 3129
guauuagaaccucagcauu

SEQ ID NO: 243207 - RNA, 19 nt, Artificial Sequence
  Description of Artificial Sequence: Synthetic oligonucleotide
  Antisense strand to SEQ ID NO: 243206
aaugcugagguucuaauac

SEQ ID NO: 243208 - RNA, 19 nt, Artificial Sequence
  Description of Artificial Sequence: Synthetic oligonucleotide
  Sense strand starting at position 2740 SEQ ID NO: 3129
cuuauaaaucagugaugac

SEQ ID NO: 243209 - RNA, 19 nt, Artificial Sequence
  Description of Artificial Sequence: Synthetic oligonucleotide
  Antisense strand to SEQ ID NO: 243208
gucaucacugauuuauaag

SEQ ID NO: 243210 - RNA, 19 nt, Artificial Sequence
  Description of Artificial Sequence: Synthetic oligonucleotide
  Sense strand starting at position 2802 SEQ ID NO: 3129
uguugaauguuauuggaaa

SEQ ID NO: 243211 - RNA, 19 nt, Artificial Sequence
  Description of Artificial Sequence: Synthetic oligonucleotide
  Antisense strand to SEQ ID NO: 243210
uuuccaauaacauucaaca

SEQ ID NO: 243212 - RNA, 19 nt, Artificial Sequence
  Description of Artificial Sequence: Synthetic oligonucleotide
  Sense strand starting at position 3315 SEQ ID NO: 3129
augagaucuugucuccaag

SEQ ID NO: 243213 - RNA, 19 nt, Artificial Sequence
  Description of Artificial Sequence: Synthetic oligonucleotide
  Antisense strand to SEQ ID NO: 243212
cuuggagacaagaucucau

SEQ ID NO: 243214 - RNA, 19 nt, Artificial Sequence
  Description of Artificial Sequence: Synthetic oligonucleotide
  Sense strand starting at position 3317 SEQ ID NO: 3129
gagaucuugucuccaagau

SEQ ID NO: 243215 - RNA, 19 nt, Artificial Sequence
  Description of Artificial Sequence: Synthetic oligonucleotide
  Antisense strand to SEQ ID NO: 243214
aucuuggagacaagaucuc

SEQ ID NO: 243216 - RNA, 19 nt, Artificial Sequence
  Description of Artificial Sequence: Synthetic oligonucleotide
  Sense strand starting at position 3318 SEQ ID NO: 3129
agaucuugucuccaagauu

SEQ ID NO: 243217 - RNA, 19 nt, Artificial Sequence
  Description of Artificial Sequence: Synthetic oligonucleotide
  Antisense strand to SEQ ID NO: 243216
aaucuuggagacaagaucu

SEQ ID NO: 243218 - RNA, 19 nt, Artificial Sequence
  Description of Artificial Sequence: Synthetic oligonucleotide
  Sense strand starting at position 3500 SEQ ID NO: 3129
agccuuuauugauuuguuu

SEQ ID NO: 243219 - RNA, 19 nt, Artificial Sequence
  Description of Artificial Sequence: Synthetic oligonucleotide
  Antisense strand to SEQ ID NO: 243218
aaacaaaucaauaaaggcu

SEQ ID NO: 243220 - RNA, 19 nt, Artificial Sequence
  Description of Artificial Sequence: Synthetic oligonucleotide
  Sense strand starting at position 3631 SEQ ID NO: 3129
aaaguaagauugguacucu

SEQ ID NO: 243221 - RNA, 19 nt, Artificial Sequence
  Description of Artificial Sequence: Synthetic oligonucleotide
  Antisense strand to SEQ ID NO: 243220
agaguaccaaucuuacuuu

SEQ ID NO: 243222 - RNA, 19 nt, Artificial Sequence
  Description of Artificial Sequence: Synthetic oligonucleotide
  Sense strand starting at position 3635 SEQ ID NO: 3129
uaagauugguacucugauu

SEQ ID NO: 243223 - RNA, 19 nt, Artificial Sequence
  Description of Artificial Sequence: Synthetic oligonucleotide
  Antisense strand to SEQ ID NO: 243222
aaucagaguaccaaucuua

SEQ ID NO: 243224 - RNA, 19 nt, Artificial Sequence
  Description of Artificial Sequence: Synthetic oligonucleotide
  Sense strand starting at position 3678 SEQ ID NO: 3129
cuguuuaaugucuaaggaa

SEQ ID NO: 243225 - RNA, 19 nt, Artificial Sequence
  Description of Artificial Sequence: Synthetic oligonucleotide
  Antisense strand to SEQ ID NO: 243224
uuccuuagacauuaaacag

SEQ ID NO: 243226 - RNA, 19 nt, Artificial Sequence
  Description of Artificial Sequence: Synthetic oligonucleotide
  Sense strand starting at position 3694 SEQ ID NO: 3129
gaacguaacuaguuagaac

SEQ ID NO: 243227 - RNA, 19 nt, Artificial Sequence
  Description of Artificial Sequence: Synthetic oligonucleotide
  Antisense strand to SEQ ID NO: 243226
guucuaacuaguuacguuc

SEQ ID NO: 243228 - RNA, 19 nt, Artificial Sequence
  Description of Artificial Sequence: Synthetic oligonucleotide
  Sense strand starting at position 3714 SEQ ID NO: 3129
gcuacuuauuuggcaaucu

SEQ ID NO: 243229 - RNA, 19 nt, Artificial Sequence
  Description of Artificial Sequence: Synthetic oligonucleotide
  Antisense strand to SEQ ID NO: 243228
agauugccaaauaaguagc

SEQ ID NO: 243230 - RNA, 19 nt, Artificial Sequence
  Description of Artificial Sequence: Synthetic oligonucleotide
  Sense strand starting at position 3726 SEQ ID NO: 3129
gcaaucucaaguuauggga

SEQ ID NO: 243231 - RNA, 19 nt, Artificial Sequence
  Description of Artificial Sequence: Synthetic oligonucleotide
  Antisense strand to SEQ ID NO: 243230
ucccauaacuugagauugc

SEQ ID NO: 243232 - RNA, 19 nt, Artificial Sequence
  Description of Artificial Sequence: Synthetic oligonucleotide
  Sense strand starting at position 3852 SEQ ID NO: 3129
gcacuuuaaguagaaagua

SEQ ID NO: 243233 - RNA, 19 nt, Artificial Sequence
  Description of Artificial Sequence: Synthetic oligonucleotide
  Antisense strand to SEQ ID NO: 243232
uacuuucuacuuaaagugc

SEQ ID NO: 243234 - RNA, 19 nt, Artificial Sequence
  Description of Artificial Sequence: Synthetic oligonucleotide
  Sense strand starting at position 1 SEQ ID NO: 3130
cagggauucuuggaaggaa

SEQ ID NO: 243235 - RNA, 19 nt, Artificial Sequence
  Description of Artificial Sequence: Synthetic oligonucleotide
  Antisense strand to SEQ ID NO: 243234
uuccuuccaagaaucccug

SEQ ID NO: 243236 - RNA, 19 nt, Artificial Sequence
  Description of Artificial Sequence: Synthetic oligonucleotide
  Sense strand starting at position 169 SEQ ID NO: 3130
augaauaaguggccacauu

SEQ ID NO: 243237 - RNA, 19 nt, Artificial Sequence
  Description of Artificial Sequence: Synthetic oligonucleotide
  Antisense strand to SEQ ID NO: 243236
aauguggccacuuauucau

SEQ ID NO: 243238 - RNA, 19 nt, Artificial Sequence
  Description of Artificial Sequence: Synthetic oligonucleotide
  Sense strand starting at position 515 SEQ ID NO: 3130
agagaccugucaucugaag

SEQ ID NO: 243239 - RNA, 19 nt, Artificial Sequence
  Description of Artificial Sequence: Synthetic oligonucleotide
  Antisense strand to SEQ ID NO: 243238
cuucagaugacaggucucu

SEQ ID NO: 243240 - RNA, 19 nt, Artificial Sequence
  Description of Artificial Sequence: Synthetic oligonucleotide
  Sense strand starting at position 521 SEQ ID NO: 3130
cugucaucugaagaugcga

SEQ ID NO: 243241 - RNA, 19 nt, Artificial Sequence
  Description of Artificial Sequence: Synthetic oligonucleotide
  Antisense strand to SEQ ID NO: 243240
ucgcaucuucagaugacag

SEQ ID NO: 243242 - RNA, 19 nt, Artificial Sequence
  Description of Artificial Sequence: Synthetic oligonucleotide
  Sense strand starting at position 529 SEQ ID NO: 3130
ugaagaugcgagcaaauaa

SEQ ID NO: 243243 - RNA, 19 nt, Artificial Sequence
  Description of Artificial Sequence: Synthetic oligonucleotide
  Antisense strand to SEQ ID NO: 243242
uuauuugcucgcaucuuca

SEQ ID NO: 243244 - RNA, 19 nt, Artificial Sequence
  Description of Artificial Sequence: Synthetic oligonucleotide
  Sense strand starting at position 778 SEQ ID NO: 3130
aagaaagggugccugaaau

SEQ ID NO: 243245 - RNA, 19 nt, Artificial Sequence
  Description of Artificial Sequence: Synthetic oligonucleotide
  Antisense strand to SEQ ID NO: 243244
auuucaggcacccuuucuu

SEQ ID NO: 243246 - RNA, 19 nt, Artificial Sequence
  Description of Artificial Sequence: Synthetic oligonucleotide
  Sense strand starting at position 2558 SEQ ID NO: 3130
aagagauucugugcuucca

SEQ ID NO: 243247 - RNA, 19 nt, Artificial Sequence
  Description of Artificial Sequence: Synthetic oligonucleotide
  Antisense strand to SEQ ID NO: 243246
uggaagcacagaaucucuu

SEQ ID NO: 243248 - RNA, 19 nt, Artificial Sequence
  Description of Artificial Sequence: Synthetic oligonucleotide
  Sense strand starting at position 2598 SEQ ID NO: 3130
ugcugcuauucccugagga

SEQ ID NO: 243249 - RNA, 19 nt, Artificial Sequence
  Description of Artificial Sequence: Synthetic oligonucleotide
  Antisense strand to SEQ ID NO: 243248
uccucagggaauagcagca

SEQ ID NO: 243250 - RNA, 19 nt, Artificial Sequence
  Description of Artificial Sequence: Synthetic oligonucleotide
  Sense strand starting at position 2599 SEQ ID NO: 3130
gcugcuauucccugaggaa

SEQ ID NO: 243251 - RNA, 19 nt, Artificial Sequence
  Description of Artificial Sequence: Synthetic oligonucleotide
  Antisense strand to SEQ ID NO: 243250
uuccucagggaauagcagc

SEQ ID NO: 243252 - RNA, 19 nt, Artificial Sequence
  Description of Artificial Sequence: Synthetic oligonucleotide
  Sense strand starting at position 2600 SEQ ID NO: 3130
cugcuauucccugaggaag

SEQ ID NO: 243253 - RNA, 19 nt, Artificial Sequence
  Description of Artificial Sequence: Synthetic oligonucleotide
  Antisense strand to SEQ ID NO: 243252
cuuccucagggaauagcag

SEQ ID NO: 243254 - RNA, 19 nt, Artificial Sequence
  Description of Artificial Sequence: Synthetic oligonucleotide
  Sense strand starting at position 2602 SEQ ID NO: 3130
gcuauucccugaggaagag

SEQ ID NO: 243255 - RNA, 19 nt, Artificial Sequence
  Description of Artificial Sequence: Synthetic oligonucleotide
  Antisense strand to SEQ ID NO: 243254
cucuuccucagggaauagc

SEQ ID NO: 243256 - RNA, 19 nt, Artificial Sequence
  Description of Artificial Sequence: Synthetic oligonucleotide
  Sense strand starting at position 2656 SEQ ID NO: 3130
guggguuuagcacagguau

SEQ ID NO: 243257 - RNA, 19 nt, Artificial Sequence
  Description of Artificial Sequence: Synthetic oligonucleotide
  Antisense strand to SEQ ID NO: 243256
auaccugugcuaaacccac

SEQ ID NO: 243258 - RNA, 19 nt, Artificial Sequence
  Description of Artificial Sequence: Synthetic oligonucleotide
  Sense strand starting at position 2701 SEQ ID NO: 3130
gcuugugggcccuugaguu

SEQ ID NO: 243259 - RNA, 19 nt, Artificial Sequence
  Description of Artificial Sequence: Synthetic oligonucleotide
  Antisense strand to SEQ ID NO: 243258
aacucaagggcccacaagc

SEQ ID NO: 243260 - RNA, 19 nt, Artificial Sequence
  Description of Artificial Sequence: Synthetic oligonucleotide
  Sense strand starting at position 2812 SEQ ID NO: 3130
ucaauuaugugcuuguaga

SEQ ID NO: 243261 - RNA, 19 nt, Artificial Sequence
  Description of Artificial Sequence: Synthetic oligonucleotide
  Antisense strand to SEQ ID NO: 243260
ucuacaagcacauaauuga

SEQ ID NO: 243262 - RNA, 19 nt, Artificial Sequence
  Description of Artificial Sequence: Synthetic oligonucleotide
  Sense strand starting at position 2813 SEQ ID NO: 3130
caauuaugugcuuguagag

SEQ ID NO: 243263 - RNA, 19 nt, Artificial Sequence
  Description of Artificial Sequence: Synthetic oligonucleotide
  Antisense strand to SEQ ID NO: 243262
cucuacaagcacauaauug

SEQ ID NO: 243264 - RNA, 19 nt, Artificial Sequence
  Description of Artificial Sequence: Synthetic oligonucleotide
  Sense strand starting at position 2822 SEQ ID NO: 3130
gcuuguagaguuugacagu

SEQ ID NO: 243265 - RNA, 19 nt, Artificial Sequence
  Description of Artificial Sequence: Synthetic oligonucleotide
  Antisense strand to SEQ ID NO: 243264
acugucaaacucuacaagc

SEQ ID NO: 243266 - RNA, 19 nt, Artificial Sequence
  Description of Artificial Sequence: Synthetic oligonucleotide
  Sense strand starting at position 2823 SEQ ID NO: 3130
cuuguagaguuugacaguu

SEQ ID NO: 243267 - RNA, 19 nt, Artificial Sequence
  Description of Artificial Sequence: Synthetic oligonucleotide
  Antisense strand to SEQ ID NO: 243266
aacugucaaacucuacaag

SEQ ID NO: 243268 - RNA, 19 nt, Artificial Sequence
  Description of Artificial Sequence: Synthetic oligonucleotide
  Sense strand starting at position 2831 SEQ ID NO: 3130
guuugacaguugccuguua

SEQ ID NO: 243269 - RNA, 19 nt, Artificial Sequence
  Description of Artificial Sequence: Synthetic oligonucleotide
  Antisense strand to SEQ ID NO: 243268
uaacaggcaacugucaaac

SEQ ID NO: 243270 - RNA, 19 nt, Artificial Sequence
  Description of Artificial Sequence: Synthetic oligonucleotide
  Sense strand starting at position 2833 SEQ ID NO: 3130
uugacaguugccuguuaua

SEQ ID NO: 243271 - RNA, 19 nt, Artificial Sequence
  Description of Artificial Sequence: Synthetic oligonucleotide
  Antisense strand to SEQ ID NO: 243270
uauaacaggcaacugucaa

SEQ ID NO: 243272 - RNA, 19 nt, Artificial Sequence
  Description of Artificial Sequence: Synthetic oligonucleotide
  Sense strand starting at position 2845 SEQ ID NO: 3130
uguuauaaggcagguguga

SEQ ID NO: 243273 - RNA, 19 nt, Artificial Sequence
  Description of Artificial Sequence: Synthetic oligonucleotide
  Antisense strand to SEQ ID NO: 243272
ucacaccugccuuauaaca

SEQ ID NO: 243274 - RNA, 19 nt, Artificial Sequence
  Description of Artificial Sequence: Synthetic oligonucleotide
  Sense strand starting at position 2910 SEQ ID NO: 3130
cuucuaguuccuggccauu

SEQ ID NO: 243275 - RNA, 19 nt, Artificial Sequence
  Description of Artificial Sequence: Synthetic oligonucleotide
  Antisense strand to SEQ ID NO: 243274
aauggccaggaacuagaag

SEQ ID NO: 243276 - RNA, 19 nt, Artificial Sequence
  Description of Artificial Sequence: Synthetic oligonucleotide
  Sense strand starting at position 2932 SEQ ID NO: 3130
uauccaagaugugguacaa

SEQ ID NO: 243277 - RNA, 19 nt, Artificial Sequence
  Description of Artificial Sequence: Synthetic oligonucleotide
  Antisense strand to SEQ ID NO: 243276
uuguaccacaucuuggaua

SEQ ID NO: 243278 - RNA, 19 nt, Artificial Sequence
  Description of Artificial Sequence: Synthetic oligonucleotide
  Sense strand starting at position 2996 SEQ ID NO: 3130
guguguugaacagggaauc

SEQ ID NO: 243279 - RNA, 19 nt, Artificial Sequence
  Description of Artificial Sequence: Synthetic oligonucleotide
  Antisense strand to SEQ ID NO: 243278
gauucccuguucaacacac

SEQ ID NO: 243280 - RNA, 19 nt, Artificial Sequence
  Description of Artificial Sequence: Synthetic oligonucleotide
  Sense strand starting at position 3052 SEQ ID NO: 3130
uggcuuaggccucaucuca

SEQ ID NO: 243281 - RNA, 19 nt, Artificial Sequence
  Description of Artificial Sequence: Synthetic oligonucleotide
  Antisense strand to SEQ ID NO: 243280
ugagaugaggccuaagcca

SEQ ID NO: 243282 - RNA, 19 nt, Artificial Sequence
  Description of Artificial Sequence: Synthetic oligonucleotide
  Sense strand starting at position 3143 SEQ ID NO: 3130
cgguguaucaaguaaggua

SEQ ID NO: 243283 - RNA, 19 nt, Artificial Sequence
  Description of Artificial Sequence: Synthetic oligonucleotide
  Antisense strand to SEQ ID NO: 243282
uaccuuacuugauacaccg

SEQ ID NO: 243284 - RNA, 19 nt, Artificial Sequence
  Description of Artificial Sequence: Synthetic oligonucleotide
  Sense strand starting at position 3146 SEQ ID NO: 3130
uguaucaaguaagguauua

SEQ ID NO: 243285 - RNA, 19 nt, Artificial Sequence
  Description of Artificial Sequence: Synthetic oligonucleotide
  Antisense strand to SEQ ID NO: 243284
uaauaccuuacuugauaca

SEQ ID NO: 243286 - RNA, 19 nt, Artificial Sequence
  Description of Artificial Sequence: Synthetic oligonucleotide
  Sense strand starting at position 3151 SEQ ID NO: 3130
caaguaagguauuaacugu

SEQ ID NO: 243287 - RNA, 19 nt, Artificial Sequence
  Description of Artificial Sequence: Synthetic oligonucleotide
  Antisense strand to SEQ ID NO: 243286
acaguuaauaccuuacuug

SEQ ID NO: 243288 - RNA, 19 nt, Artificial Sequence
  Description of Artificial Sequence: Synthetic oligonucleotide
  Sense strand starting at position 3158 SEQ ID NO: 3130
gguauuaacuguccucaca

SEQ ID NO: 243289 - RNA, 19 nt, Artificial Sequence
  Description of Artificial Sequence: Synthetic oligonucleotide
  Antisense strand to SEQ ID NO: 243288
ugugaggacaguuaauacc

SEQ ID NO: 243290 - RNA, 19 nt, Artificial Sequence
  Description of Artificial Sequence: Synthetic oligonucleotide
  Sense strand starting at position 3201 SEQ ID NO: 3130
ccucaaggucaaggaauua

SEQ ID NO: 243291 - RNA, 19 nt, Artificial Sequence
  Description of Artificial Sequence: Synthetic oligonucleotide
  Antisense strand to SEQ ID NO: 243290
uaauuccuugaccuugagg

SEQ ID NO: 243292 - RNA, 19 nt, Artificial Sequence
  Description of Artificial Sequence: Synthetic oligonucleotide
  Sense strand starting at position 3241 SEQ ID NO: 3130
uguagaucuuuauaucaag

SEQ ID NO: 243293 - RNA, 19 nt, Artificial Sequence
  Description of Artificial Sequence: Synthetic oligonucleotide
  Antisense strand to SEQ ID NO: 243292
cuugauauaaagaucuaca

SEQ ID NO: 243294 - RNA, 19 nt, Artificial Sequence
  Description of Artificial Sequence: Synthetic oligonucleotide
  Sense strand starting at position 3244 SEQ ID NO: 3130
agaucuuuauaucaagguu

SEQ ID NO: 243295 - RNA, 19 nt, Artificial Sequence
  Description of Artificial Sequence: Synthetic oligonucleotide
  Antisense strand to SEQ ID NO: 243294
aaccuugauauaaagaucu

SEQ ID NO: 243296 - RNA, 19 nt, Artificial Sequence
  Description of Artificial Sequence: Synthetic oligonucleotide
  Sense strand starting at position 3445 SEQ ID NO: 3130
guuugcacuccguguacaa

SEQ ID NO: 243297 - RNA, 19 nt, Artificial Sequence
  Description of Artificial Sequence: Synthetic oligonucleotide
  Antisense strand to SEQ ID NO: 243296
uuguacacggagugcaaac

SEQ ID NO: 243298 - RNA, 19 nt, Artificial Sequence
  Description of Artificial Sequence: Synthetic oligonucleotide
  Sense strand starting at position 3527 SEQ ID NO: 3130
gcuugagaucuugacacuu

SEQ ID NO: 243299 - RNA, 19 nt, Artificial Sequence
  Description of Artificial Sequence: Synthetic oligonucleotide
  Antisense strand to SEQ ID NO: 243298
aagugucaagaucucaagc

SEQ ID NO: 243300 - RNA, 19 nt, Artificial Sequence
  Description of Artificial Sequence: Synthetic oligonucleotide
  Sense strand starting at position 3667 SEQ ID NO: 3130
ucagguauguggucucuau

SEQ ID NO: 243301 - RNA, 19 nt, Artificial Sequence
  Description of Artificial Sequence: Synthetic oligonucleotide
  Antisense strand to SEQ ID NO: 243300
auagagaccacauaccuga

SEQ ID NO: 243302 - RNA, 19 nt, Artificial Sequence
  Description of Artificial Sequence: Synthetic oligonucleotide
  Sense strand starting at position 3671 SEQ ID NO: 3130
guauguggucucuauacau

SEQ ID NO: 243303 - RNA, 19 nt, Artificial Sequence
  Description of Artificial Sequence: Synthetic oligonucleotide
  Antisense strand to SEQ ID NO: 243302
auguauagagaccacauac

SEQ ID NO: 243304 - RNA, 19 nt, Artificial Sequence
  Description of Artificial Sequence: Synthetic oligonucleotide
  Sense strand starting at position 3734 SEQ ID NO: 3130
cccuauuucugugcuaguu

SEQ ID NO: 243305 - RNA, 19 nt, Artificial Sequence
  Description of Artificial Sequence: Synthetic oligonucleotide
  Antisense strand to SEQ ID NO: 243304
aacuagcacagaaauaggg

SEQ ID NO: 243306 - RNA, 19 nt, Artificial Sequence
  Description of Artificial Sequence: Synthetic oligonucleotide
  Sense strand starting at position 3736 SEQ ID NO: 3130
cuauuucugugcuaguuag

SEQ ID NO: 243307 - RNA, 19 nt, Artificial Sequence
  Description of Artificial Sequence: Synthetic oligonucleotide
  Antisense strand to SEQ ID NO: 243306
cuaacuagcacagaaauag

SEQ ID NO: 243308 - RNA, 19 nt, Artificial Sequence
  Description of Artificial Sequence: Synthetic oligonucleotide
  Sense strand starting at position 3844 SEQ ID NO: 3130
uccuucuccugaugugcaa

SEQ ID NO: 243309 - RNA, 19 nt, Artificial Sequence
  Description of Artificial Sequence: Synthetic oligonucleotide
  Antisense strand to SEQ ID NO: 243308
uugcacaucaggagaagga

SEQ ID NO: 243310 - RNA, 19 nt, Artificial Sequence
  Description of Artificial Sequence: Synthetic oligonucleotide
  Sense strand starting at position 3911 SEQ ID NO: 3130
uugggugucauccagagag

SEQ ID NO: 243311 - RNA, 19 nt, Artificial Sequence
  Description of Artificial Sequence: Synthetic oligonucleotide
  Antisense strand to SEQ ID NO: 243310
cucucuggaugacacccaa

SEQ ID NO: 243312 - RNA, 19 nt, Artificial Sequence
  Description of Artificial Sequence: Synthetic oligonucleotide
  Sense strand starting at position 3921 SEQ ID NO: 3130
uccagagagaccuggguau

SEQ ID NO: 243313 - RNA, 19 nt, Artificial Sequence
  Description of Artificial Sequence: Synthetic oligonucleotide
  Antisense strand to SEQ ID NO: 243312
auacccaggucucucugga

SEQ ID NO: 243314 - RNA, 19 nt, Artificial Sequence
  Description of Artificial Sequence: Synthetic oligonucleotide
  Sense strand starting at position 97 SEQ ID NO: 3131
aacaaagugcgguagaauu

SEQ ID NO: 243315 - RNA, 19 nt, Artificial Sequence
  Description of Artificial Sequence: Synthetic oligonucleotide
  Antisense strand to SEQ ID NO: 243314
aauucuaccgcacuuuguu

SEQ ID NO: 243316 - RNA, 19 nt, Artificial Sequence
  Description of Artificial Sequence: Synthetic oligonucleotide
  Sense strand starting at position 116 SEQ ID NO: 3131
gugacaaggugagucuuaa

SEQ ID NO: 243317 - RNA, 19 nt, Artificial Sequence
  Description of Artificial Sequence: Synthetic oligonucleotide
  Antisense strand to SEQ ID NO: 243316
uuaagacucaccuugucac

SEQ ID NO: 243318 - RNA, 19 nt, Artificial Sequence
  Description of Artificial Sequence: Synthetic oligonucleotide
  Sense strand starting at position 128 SEQ ID NO: 3131
gucuuaagucauggcagca

SEQ ID NO: 243319 - RNA, 19 nt, Artificial Sequence
  Description of Artificial Sequence: Synthetic oligonucleotide
  Antisense strand to SEQ ID NO: 243318
ugcugccaugacuuaagac

SEQ ID NO: 243320 - RNA, 19 nt, Artificial Sequence
  Description of Artificial Sequence: Synthetic oligonucleotide
  Sense strand starting at position 251 SEQ ID NO: 3131
ggaagaggccuuggccauu

SEQ ID NO: 243321 - RNA, 19 nt, Artificial Sequence
  Description of Artificial Sequence: Synthetic oligonucleotide
  Antisense strand to SEQ ID NO: 243320
aauggccaaggccucuucc

SEQ ID NO: 243322 - RNA, 19 nt, Artificial Sequence
  Description of Artificial Sequence: Synthetic oligonucleotide
  Sense strand starting at position 269 SEQ ID NO: 3131
uuccuugauuugucugagu

SEQ ID NO: 243323 - RNA, 19 nt, Artificial Sequence
  Description of Artificial Sequence: Synthetic oligonucleotide
  Antisense strand to SEQ ID NO: 243322
acucagacaaaucaaggaa

SEQ ID NO: 243324 - RNA, 19 nt, Artificial Sequence
  Description of Artificial Sequence: Synthetic oligonucleotide
  Sense strand starting at position 271 SEQ ID NO: 3131
ccuugauuugucugagucu

SEQ ID NO: 243325 - RNA, 19 nt, Artificial Sequence
  Description of Artificial Sequence: Synthetic oligonucleotide
  Antisense strand to SEQ ID NO: 243324
agacucagacaaaucaagg

SEQ ID NO: 243326 - RNA, 19 nt, Artificial Sequence
  Description of Artificial Sequence: Synthetic oligonucleotide
  Sense strand starting at position 272 SEQ ID NO: 3131
cuugauuugucugagucua

SEQ ID NO: 243327 - RNA, 19 nt, Artificial Sequence
  Description of Artificial Sequence: Synthetic oligonucleotide
  Antisense strand to SEQ ID NO: 243326
uagacucagacaaaucaag

SEQ ID NO: 243328 - RNA, 19 nt, Artificial Sequence
  Description of Artificial Sequence: Synthetic oligonucleotide
  Sense strand starting at position 317 SEQ ID NO: 3131
auaucuaauuggucagacu

SEQ ID NO: 243329 - RNA, 19 nt, Artificial Sequence
  Description of Artificial Sequence: Synthetic oligonucleotide
  Antisense strand to SEQ ID NO: 243328
agucugaccaauuagauau

SEQ ID NO: 243330 - RNA, 19 nt, Artificial Sequence
  Description of Artificial Sequence: Synthetic oligonucleotide
  Sense strand starting at position 326 SEQ ID NO: 3131
uggucagacugagugaaga

SEQ ID NO: 243331 - RNA, 19 nt, Artificial Sequence
  Description of Artificial Sequence: Synthetic oligonucleotide
  Antisense strand to SEQ ID NO: 243330
ucuucacucagucugacca

SEQ ID NO: 243332 - RNA, 19 nt, Artificial Sequence
  Description of Artificial Sequence: Synthetic oligonucleotide
  Sense strand starting at position 328 SEQ ID NO: 3131
gucagacugagugaagagu

SEQ ID NO: 243333 - RNA, 19 nt, Artificial Sequence
  Description of Artificial Sequence: Synthetic oligonucleotide
  Antisense strand to SEQ ID NO: 243332
acucuucacucagucugac

SEQ ID NO: 243334 - RNA, 19 nt, Artificial Sequence
  Description of Artificial Sequence: Synthetic oligonucleotide
  Sense strand starting at position 334 SEQ ID NO: 3131
cugagugaagaguaaaugu

SEQ ID NO: 243335 - RNA, 19 nt, Artificial Sequence
  Description of Artificial Sequence: Synthetic oligonucleotide
  Antisense strand to SEQ ID NO: 243334
acauuuacucuucacucag

SEQ ID NO: 243336 - RNA, 19 nt, Artificial Sequence
  Description of Artificial Sequence: Synthetic oligonucleotide
  Sense strand starting at position 445 SEQ ID NO: 3131
acggaucccuaagacauuu

SEQ ID NO: 243337 - RNA, 19 nt, Artificial Sequence
  Description of Artificial Sequence: Synthetic oligonucleotide
  Antisense strand to SEQ ID NO: 243336
aaaugucuuagggauccgu

SEQ ID NO: 243338 - RNA, 19 nt, Artificial Sequence
  Description of Artificial Sequence: Synthetic oligonucleotide
  Sense strand starting at position 614 SEQ ID NO: 3131
ggcaguucugauuggcaac

SEQ ID NO: 243339 - RNA, 19 nt, Artificial Sequence
  Description of Artificial Sequence: Synthetic oligonucleotide
  Antisense strand to SEQ ID NO: 243338
guugccaaucagaacugcc

SEQ ID NO: 243340 - RNA, 19 nt, Artificial Sequence
  Description of Artificial Sequence: Synthetic oligonucleotide
  Sense strand starting at position 615 SEQ ID NO: 3131
gcaguucugauuggcaacu

SEQ ID NO: 243341 - RNA, 19 nt, Artificial Sequence
  Description of Artificial Sequence: Synthetic oligonucleotide
  Antisense strand to SEQ ID NO: 243340
aguugccaaucagaacugc

SEQ ID NO: 243342 - RNA, 19 nt, Artificial Sequence
  Description of Artificial Sequence: Synthetic oligonucleotide
  Sense strand starting at position 1258 SEQ ID NO: 3131
gcaaguccugucugagaag

SEQ ID NO: 243343 - RNA, 19 nt, Artificial Sequence
  Description of Artificial Sequence: Synthetic oligonucleotide
  Antisense strand to SEQ ID NO: 243342
cuucucagacaggacuugc

SEQ ID NO: 243344 - RNA, 19 nt, Artificial Sequence
  Description of Artificial Sequence: Synthetic oligonucleotide
  Sense strand starting at position 1259 SEQ ID NO: 3131
caaguccugucugagaaga

SEQ ID NO: 243345 - RNA, 19 nt, Artificial Sequence
  Description of Artificial Sequence: Synthetic oligonucleotide
  Antisense strand to SEQ ID NO: 243344
ucuucucagacaggacuug

SEQ ID NO: 243346 - RNA, 19 nt, Artificial Sequence
  Description of Artificial Sequence: Synthetic oligonucleotide
  Sense strand starting at position 1357 SEQ ID NO: 3131
gugagaugaucuuggauga

SEQ ID NO: 243347 - RNA, 19 nt, Artificial Sequence
  Description of Artificial Sequence: Synthetic oligonucleotide
  Antisense strand to SEQ ID NO: 243346
ucauccaagaucaucucac

SEQ ID NO: 243348 - RNA, 19 nt, Artificial Sequence
  Description of Artificial Sequence: Synthetic oligonucleotide
  Sense strand starting at position 2111 SEQ ID NO: 3131
uggaguccguuugcaagaa

SEQ ID NO: 243349 - RNA, 19 nt, Artificial Sequence
  Description of Artificial Sequence: Synthetic oligonucleotide
  Antisense strand to SEQ ID NO: 243348
uucuugcaaacggacucca

SEQ ID NO: 243350 - RNA, 19 nt, Artificial Sequence
  Description of Artificial Sequence: Synthetic oligonucleotide
  Sense strand starting at position 2641 SEQ ID NO: 3131
accucaacugugcaaugaa

SEQ ID NO: 243351 - RNA, 19 nt, Artificial Sequence
  Description of Artificial Sequence: Synthetic oligonucleotide
  Antisense strand to SEQ ID NO: 243350
uucauugcacaguugaggu

SEQ ID NO: 243352 - RNA, 19 nt, Artificial Sequence
  Description of Artificial Sequence: Synthetic oligonucleotide
  Sense strand starting at position 2644 SEQ ID NO: 3131
ucaacugugcaaugaaguu

SEQ ID NO: 243353 - RNA, 19 nt, Artificial Sequence
  Description of Artificial Sequence: Synthetic oligonucleotide
  Antisense strand to SEQ ID NO: 243352
aacuucauugcacaguuga

SEQ ID NO: 243354 - RNA, 19 nt, Artificial Sequence
  Description of Artificial Sequence: Synthetic oligonucleotide
  Sense strand starting at position 2701 SEQ ID NO: 3131
cuugaaaucacggagcugu

SEQ ID NO: 243355 - RNA, 19 nt, Artificial Sequence
  Description of Artificial Sequence: Synthetic oligonucleotide
  Antisense strand to SEQ ID NO: 243354
acagcuccgugauuucaag

SEQ ID NO: 243356 - RNA, 19 nt, Artificial Sequence
  Description of Artificial Sequence: Synthetic oligonucleotide
  Sense strand starting at position 2711 SEQ ID NO: 3131
cggagcuguagaugaguaa

SEQ ID NO: 243357 - RNA, 19 nt, Artificial Sequence
  Description of Artificial Sequence: Synthetic oligonucleotide
  Antisense strand to SEQ ID NO: 243356
uuacucaucuacagcuccg

SEQ ID NO: 243358 - RNA, 19 nt, Artificial Sequence
  Description of Artificial Sequence: Synthetic oligonucleotide
  Sense strand starting at position 2715 SEQ ID NO: 3131
gcuguagaugaguaacaga

SEQ ID NO: 243359 - RNA, 19 nt, Artificial Sequence
  Description of Artificial Sequence: Synthetic oligonucleotide
  Antisense strand to SEQ ID NO: 243358
ucuguuacucaucuacagc

SEQ ID NO: 243360 - RNA, 19 nt, Artificial Sequence
  Description of Artificial Sequence: Synthetic oligonucleotide
  Sense strand starting at position 2787 SEQ ID NO: 3131
gggcguagagcaugacuuu

SEQ ID NO: 243361 - RNA, 19 nt, Artificial Sequence
  Description of Artificial Sequence: Synthetic oligonucleotide
  Antisense strand to SEQ ID NO: 243360
aaagucaugcucuacgccc

SEQ ID NO: 243362 - RNA, 19 nt, Artificial Sequence
  Description of Artificial Sequence: Synthetic oligonucleotide
  Sense strand starting at position 2796 SEQ ID NO: 3131
gcaugacuuucuuuagguu

SEQ ID NO: 243363 - RNA, 19 nt, Artificial Sequence
  Description of Artificial Sequence: Synthetic oligonucleotide
  Antisense strand to SEQ ID NO: 243362
aaccuaaagaaagucaugc

SEQ ID NO: 243364 - RNA, 19 nt, Artificial Sequence
  Description of Artificial Sequence: Synthetic oligonucleotide
  Sense strand starting at position 2819 SEQ ID NO: 3131
gucccaagcucgcuuggau

SEQ ID NO: 243365 - RNA, 19 nt, Artificial Sequence
  Description of Artificial Sequence: Synthetic oligonucleotide
  Antisense strand to SEQ ID NO: 243364
auccaagcgagcuugggac

SEQ ID NO: 243366 - RNA, 19 nt, Artificial Sequence
  Description of Artificial Sequence: Synthetic oligonucleotide
  Sense strand starting at position 2948 SEQ ID NO: 3131
acgugauucccacggguag

SEQ ID NO: 243367 - RNA, 19 nt, Artificial Sequence
  Description of Artificial Sequence: Synthetic oligonucleotide
  Antisense strand to SEQ ID NO: 243366
cuacccgugggaaucacgu

SEQ ID NO: 243368 - RNA, 19 nt, Artificial Sequence
  Description of Artificial Sequence: Synthetic oligonucleotide
  Sense strand starting at position 3067 SEQ ID NO: 3131
aggucuguuccaggaauca

SEQ ID NO: 243369 - RNA, 19 nt, Artificial Sequence
  Description of Artificial Sequence: Synthetic oligonucleotide
  Antisense strand to SEQ ID NO: 243368
ugauuccuggaacagaccu

SEQ ID NO: 243370 - RNA, 19 nt, Artificial Sequence
  Description of Artificial Sequence: Synthetic oligonucleotide
  Sense strand starting at position 3103 SEQ ID NO: 3131
ggaggugguugcaggaauu

SEQ ID NO: 243371 - RNA, 19 nt, Artificial Sequence
  Description of Artificial Sequence: Synthetic oligonucleotide
  Antisense strand to SEQ ID NO: 243370
aauuccugcaaccaccucc

SEQ ID NO: 243372 - RNA, 19 nt, Artificial Sequence
  Description of Artificial Sequence: Synthetic oligonucleotide
  Sense strand starting at position 3250 SEQ ID NO: 3131
gguugcuaucggcagaucu

SEQ ID NO: 243373 - RNA, 19 nt, Artificial Sequence
  Description of Artificial Sequence: Synthetic oligonucleotide
  Antisense strand to SEQ ID NO: 243372
agaucugccgauagcaacc

SEQ ID NO: 243374 - RNA, 19 nt, Artificial Sequence
  Description of Artificial Sequence: Synthetic oligonucleotide
  Sense strand starting at position 3258 SEQ ID NO: 3131
ucggcagaucuugaugguu

SEQ ID NO: 243375 - RNA, 19 nt, Artificial Sequence
  Description of Artificial Sequence: Synthetic oligonucleotide
  Antisense strand to SEQ ID NO: 243374
aaccaucaagaucugccga

SEQ ID NO: 243376 - RNA, 19 nt, Artificial Sequence
  Description of Artificial Sequence: Synthetic oligonucleotide
  Sense strand starting at position 3330 SEQ ID NO: 3131
augggcaguugaucuagua

SEQ ID NO: 243377 - RNA, 19 nt, Artificial Sequence
  Description of Artificial Sequence: Synthetic oligonucleotide
  Antisense strand to SEQ ID NO: 243376
uacuagaucaacugcccau

SEQ ID NO: 243378 - RNA, 19 nt, Artificial Sequence
  Description of Artificial Sequence: Synthetic oligonucleotide
  Sense strand starting at position 3342 SEQ ID NO: 3131
ucuaguaguuaguucuaga

SEQ ID NO: 243379 - RNA, 19 nt, Artificial Sequence
  Description of Artificial Sequence: Synthetic oligonucleotide
  Antisense strand to SEQ ID NO: 243378
ucuagaacuaacuacuaga

SEQ ID NO: 243380 - RNA, 19 nt, Artificial Sequence
  Description of Artificial Sequence: Synthetic oligonucleotide
  Sense strand starting at position 3353 SEQ ID NO: 3131
guucuagaauaauggacaa

SEQ ID NO: 243381 - RNA, 19 nt, Artificial Sequence
  Description of Artificial Sequence: Synthetic oligonucleotide
  Antisense strand to SEQ ID NO: 243380
uuguccauuauucuagaac

SEQ ID NO: 243382 - RNA, 19 nt, Artificial Sequence
  Description of Artificial Sequence: Synthetic oligonucleotide
  Sense strand starting at position 3377 SEQ ID NO: 3131
uuagcaauuuagcaguauu

SEQ ID NO: 243383 - RNA, 19 nt, Artificial Sequence
  Description of Artificial Sequence: Synthetic oligonucleotide
  Antisense strand to SEQ ID NO: 243382
aauacugcuaaauugcuaa

SEQ ID NO: 243384 - RNA, 19 nt, Artificial Sequence
  Description of Artificial Sequence: Synthetic oligonucleotide
  Sense strand starting at position 3644 SEQ ID NO: 3131
acaagacuguuagaauuaa

SEQ ID NO: 243385 - RNA, 19 nt, Artificial Sequence
  Description of Artificial Sequence: Synthetic oligonucleotide
  Antisense strand to SEQ ID NO: 243384
uuaauucuaacagucuugu

SEQ ID NO: 243386 - RNA, 19 nt, Artificial Sequence
  Description of Artificial Sequence: Synthetic oligonucleotide
  Sense strand starting at position 3752 SEQ ID NO: 3131
uguggucccagauaagagu

SEQ ID NO: 243387 - RNA, 19 nt, Artificial Sequence
  Description of Artificial Sequence: Synthetic oligonucleotide
  Antisense strand to SEQ ID NO: 243386
acucuuaucugggaccaca

SEQ ID NO: 243388 - RNA, 19 nt, Artificial Sequence
  Description of Artificial Sequence: Synthetic oligonucleotide
  Sense strand starting at position 3906 SEQ ID NO: 3131
aggucauggugggacugau

SEQ ID NO: 243389 - RNA, 19 nt, Artificial Sequence
  Description of Artificial Sequence: Synthetic oligonucleotide
  Antisense strand to SEQ ID NO: 243388
aucagucccaccaugaccu

SEQ ID NO: 243390 - RNA, 19 nt, Artificial Sequence
  Description of Artificial Sequence: Synthetic oligonucleotide
  Sense strand starting at position 3916 SEQ ID NO: 3131
gggacugauuaccaugaaa

SEQ ID NO: 243391 - RNA, 19 nt, Artificial Sequence
  Description of Artificial Sequence: Synthetic oligonucleotide
  Antisense strand to SEQ ID NO: 243390
uuucaugguaaucaguccc

SEQ ID NO: 243392 - RNA, 19 nt, Artificial Sequence
  Description of Artificial Sequence: Synthetic oligonucleotide
  Sense strand starting at position 3963 SEQ ID NO: 3131
cgugcagugcuuccugaca

SEQ ID NO: 243393 - RNA, 19 nt, Artificial Sequence
  Description of Artificial Sequence: Synthetic oligonucleotide
  Antisense strand to SEQ ID NO: 243392
ugucaggaagcacugcacg

SEQ ID NO: 243394 - RNA, 19 nt, Artificial Sequence
  Description of Artificial Sequence: Synthetic oligonucleotide
  Sense strand starting at position 193 SEQ ID NO: 3134
agaugaagugacuaugcuu

SEQ ID NO: 243395 - RNA, 19 nt, Artificial Sequence
  Description of Artificial Sequence: Synthetic oligonucleotide
  Antisense strand to SEQ ID NO: 243394
aagcauagucacuucaucu

SEQ ID NO: 243396 - RNA, 19 nt, Artificial Sequence
  Description of Artificial Sequence: Synthetic oligonucleotide
  Sense strand starting at position 196 SEQ ID NO: 3134
ugaagugacuaugcuugau

SEQ ID NO: 243397 - RNA, 19 nt, Artificial Sequence
  Description of Artificial Sequence: Synthetic oligonucleotide
  Antisense strand to SEQ ID NO: 243396
aucaagcauagucacuuca

SEQ ID NO: 243398 - RNA, 19 nt, Artificial Sequence
  Description of Artificial Sequence: Synthetic oligonucleotide
  Sense strand starting at position 198 SEQ ID NO: 3134
aagugacuaugcuugauua

SEQ ID NO: 243399 - RNA, 19 nt, Artificial Sequence
  Description of Artificial Sequence: Synthetic oligonucleotide
  Antisense strand to SEQ ID NO: 243398
uaaucaagcauagucacuu

SEQ ID NO: 243400 - RNA, 19 nt, Artificial Sequence
  Description of Artificial Sequence: Synthetic oligonucleotide
  Sense strand starting at position 200 SEQ ID NO: 3134
gugacuaugcuugauuauu

SEQ ID NO: 243401 - RNA, 19 nt, Artificial Sequence
  Description of Artificial Sequence: Synthetic oligonucleotide
  Antisense strand to SEQ ID NO: 243400
aauaaucaagcauagucac

SEQ ID NO: 243402 - RNA, 19 nt, Artificial Sequence
  Description of Artificial Sequence: Synthetic oligonucleotide
  Sense strand starting at position 306 SEQ ID NO: 3134
gggagaaaguucuugauuc

SEQ ID NO: 243403 - RNA, 19 nt, Artificial Sequence
  Description of Artificial Sequence: Synthetic oligonucleotide
  Antisense strand to SEQ ID NO: 243402
gaaucaagaacuuucuccc

SEQ ID NO: 243404 - RNA, 19 nt, Artificial Sequence
  Description of Artificial Sequence: Synthetic oligonucleotide
  Sense strand starting at position 340 SEQ ID NO: 3134
uggccagauuuacacugaa

SEQ ID NO: 243405 - RNA, 19 nt, Artificial Sequence
  Description of Artificial Sequence: Synthetic oligonucleotide
  Antisense strand to SEQ ID NO: 243404
uucaguguaaaucuggcca

SEQ ID NO: 243406 - RNA, 19 nt, Artificial Sequence
  Description of Artificial Sequence: Synthetic oligonucleotide
  Sense strand starting at position 419 SEQ ID NO: 3134
uucccacuucuaugggaau

SEQ ID NO: 243407 - RNA, 19 nt, Artificial Sequence
  Description of Artificial Sequence: Synthetic oligonucleotide
  Antisense strand to SEQ ID NO: 243406
auucccauagaagugggaa

SEQ ID NO: 243408 - RNA, 19 nt, Artificial Sequence
  Description of Artificial Sequence: Synthetic oligonucleotide
  Sense strand starting at position 588 SEQ ID NO: 3134
uuggcaaugagguaaguuu

SEQ ID NO: 243409 - RNA, 19 nt, Artificial Sequence
  Description of Artificial Sequence: Synthetic oligonucleotide
  Antisense strand to SEQ ID NO: 243408
aaacuuaccucauugccaa

SEQ ID NO: 243410 - RNA, 19 nt, Artificial Sequence
  Description of Artificial Sequence: Synthetic oligonucleotide
  Sense strand starting at position 636 SEQ ID NO: 3134
agaccaguuuaauuagacu

SEQ ID NO: 243411 - RNA, 19 nt, Artificial Sequence
  Description of Artificial Sequence: Synthetic oligonucleotide
  Antisense strand to SEQ ID NO: 243410
agucuaauuaaacuggucu

SEQ ID NO: 243412 - RNA, 19 nt, Artificial Sequence
  Description of Artificial Sequence: Synthetic oligonucleotide
  Sense strand starting at position 727 SEQ ID NO: 3134
aagaguuagcuuuaauuag

SEQ ID NO: 243413 - RNA, 19 nt, Artificial Sequence
  Description of Artificial Sequence: Synthetic oligonucleotide
  Antisense strand to SEQ ID NO: 243412
cuaauuaaagcuaacucuu

SEQ ID NO: 243414 - RNA, 19 nt, Artificial Sequence
  Description of Artificial Sequence: Synthetic oligonucleotide
  Sense strand starting at position 1309 SEQ ID NO: 3134
augaguauauggucucaac

SEQ ID NO: 243415 - RNA, 19 nt, Artificial Sequence
  Description of Artificial Sequence: Synthetic oligonucleotide
  Antisense strand to SEQ ID NO: 243414
guugagaccauauacucau

SEQ ID NO: 243416 - RNA, 19 nt, Artificial Sequence
  Description of Artificial Sequence: Synthetic oligonucleotide
  Sense strand starting at position 1459 SEQ ID NO: 3134
cagagcucugauugacaga

SEQ ID NO: 243417 - RNA, 19 nt, Artificial Sequence
  Description of Artificial Sequence: Synthetic oligonucleotide
  Antisense strand to SEQ ID NO: 243416
ucugucaaucagagcucug

SEQ ID NO: 243418 - RNA, 19 nt, Artificial Sequence
  Description of Artificial Sequence: Synthetic oligonucleotide
  Sense strand starting at position 1566 SEQ ID NO: 3134
cccaaauaauggcugguua

SEQ ID NO: 243419 - RNA, 19 nt, Artificial Sequence
  Description of Artificial Sequence: Synthetic oligonucleotide
  Antisense strand to SEQ ID NO: 243418
uaaccagccauuauuuggg

SEQ ID NO: 243420 - RNA, 19 nt, Artificial Sequence
  Description of Artificial Sequence: Synthetic oligonucleotide
  Sense strand starting at position 1567 SEQ ID NO: 3134
ccaaauaauggcugguuau

SEQ ID NO: 243421 - RNA, 19 nt, Artificial Sequence
  Description of Artificial Sequence: Synthetic oligonucleotide
  Antisense strand to SEQ ID NO: 243420
auaaccagccauuauuugg

SEQ ID NO: 243422 - RNA, 19 nt, Artificial Sequence
  Description of Artificial Sequence: Synthetic oligonucleotide
  Sense strand starting at position 1568 SEQ ID NO: 3134
caaauaauggcugguuaua

SEQ ID NO: 243423 - RNA, 19 nt, Artificial Sequence
  Description of Artificial Sequence: Synthetic oligonucleotide
  Antisense strand to SEQ ID NO: 243422
uauaaccagccauuauuug

SEQ ID NO: 243424 - RNA, 19 nt, Artificial Sequence
  Description of Artificial Sequence: Synthetic oligonucleotide
  Sense strand starting at position 1570 SEQ ID NO: 3134
aauaauggcugguuauaug

SEQ ID NO: 243425 - RNA, 19 nt, Artificial Sequence
  Description of Artificial Sequence: Synthetic oligonucleotide
  Antisense strand to SEQ ID NO: 243424
cauauaaccagccauuauu

SEQ ID NO: 243426 - RNA, 19 nt, Artificial Sequence
  Description of Artificial Sequence: Synthetic oligonucleotide
  Sense strand starting at position 1580 SEQ ID NO: 3134
gguuauaugcaauacauag

SEQ ID NO: 243427 - RNA, 19 nt, Artificial Sequence
  Description of Artificial Sequence: Synthetic oligonucleotide
  Antisense strand to SEQ ID NO: 243426
cuauguauugcauauaacc

SEQ ID NO: 243428 - RNA, 19 nt, Artificial Sequence
  Description of Artificial Sequence: Synthetic oligonucleotide
  Sense strand starting at position 1718 SEQ ID NO: 3134
gcauucuucugacuacuga

SEQ ID NO: 243429 - RNA, 19 nt, Artificial Sequence
  Description of Artificial Sequence: Synthetic oligonucleotide
  Antisense strand to SEQ ID NO: 243428
ucaguagucagaagaaugc

SEQ ID NO: 243430 - RNA, 19 nt, Artificial Sequence
  Description of Artificial Sequence: Synthetic oligonucleotide
  Sense strand starting at position 1725 SEQ ID NO: 3134
ucugacuacugacugauua

SEQ ID NO: 243431 - RNA, 19 nt, Artificial Sequence
  Description of Artificial Sequence: Synthetic oligonucleotide
  Antisense strand to SEQ ID NO: 243430
uaaucagucaguagucaga

SEQ ID NO: 243432 - RNA, 19 nt, Artificial Sequence
  Description of Artificial Sequence: Synthetic oligonucleotide
  Sense strand starting at position 1726 SEQ ID NO: 3134
cugacuacugacugauuau

SEQ ID NO: 243433 - RNA, 19 nt, Artificial Sequence
  Description of Artificial Sequence: Synthetic oligonucleotide
  Antisense strand to SEQ ID NO: 243432
auaaucagucaguagucag

SEQ ID NO: 243434 - RNA, 19 nt, Artificial Sequence
  Description of Artificial Sequence: Synthetic oligonucleotide
  Sense strand starting at position 1735 SEQ ID NO: 3134
gacugauuaucuucugguc

SEQ ID NO: 243435 - RNA, 19 nt, Artificial Sequence
  Description of Artificial Sequence: Synthetic oligonucleotide
  Antisense strand to SEQ ID NO: 243434
gaccagaagauaaucaguc

SEQ ID NO: 243436 - RNA, 19 nt, Artificial Sequence
  Description of Artificial Sequence: Synthetic oligonucleotide
  Sense strand starting at position 2290 SEQ ID NO: 3134
cagaauaaugugggcucaa

SEQ ID NO: 243437 - RNA, 19 nt, Artificial Sequence
  Description of Artificial Sequence: Synthetic oligonucleotide
  Antisense strand to SEQ ID NO: 243436
uugagcccacauuauucug

SEQ ID NO: 243438 - RNA, 19 nt, Artificial Sequence
  Description of Artificial Sequence: Synthetic oligonucleotide
  Sense strand starting at position 2291 SEQ ID NO: 3134
agaauaaugugggcucaag

SEQ ID NO: 243439 - RNA, 19 nt, Artificial Sequence
  Description of Artificial Sequence: Synthetic oligonucleotide
  Antisense strand to SEQ ID NO: 243438
cuugagcccacauuauucu

SEQ ID NO: 243440 - RNA, 19 nt, Artificial Sequence
  Description of Artificial Sequence: Synthetic oligonucleotide
  Sense strand starting at position 2376 SEQ ID NO: 3134
auauuaauguucucaguca

SEQ ID NO: 243441 - RNA, 19 nt, Artificial Sequence
  Description of Artificial Sequence: Synthetic oligonucleotide
  Antisense strand to SEQ ID NO: 243440
ugacugagaacauuaauau

SEQ ID NO: 243442 - RNA, 19 nt, Artificial Sequence
  Description of Artificial Sequence: Synthetic oligonucleotide
  Sense strand starting at position 2411 SEQ ID NO: 3134
cuuuauauggucuaaaugu

SEQ ID NO: 243443 - RNA, 19 nt, Artificial Sequence
  Description of Artificial Sequence: Synthetic oligonucleotide
  Antisense strand to SEQ ID NO: 243442
acauuuagaccauauaaag

SEQ ID NO: 243444 - RNA, 19 nt, Artificial Sequence
  Description of Artificial Sequence: Synthetic oligonucleotide
  Sense strand starting at position 2648 SEQ ID NO: 3134
uaguaucaguuccuuagga

SEQ ID NO: 243445 - RNA, 19 nt, Artificial Sequence
  Description of Artificial Sequence: Synthetic oligonucleotide
  Antisense strand to SEQ ID NO: 243444
uccuaaggaacugauacua

SEQ ID NO: 243446 - RNA, 19 nt, Artificial Sequence
  Description of Artificial Sequence: Synthetic oligonucleotide
  Sense strand starting at position 2649 SEQ ID NO: 3134
aguaucaguuccuuaggaa

SEQ ID NO: 243447 - RNA, 19 nt, Artificial Sequence
  Description of Artificial Sequence: Synthetic oligonucleotide
  Antisense strand to SEQ ID NO: 243446
uuccuaaggaacugauacu

SEQ ID NO: 243448 - RNA, 19 nt, Artificial Sequence
  Description of Artificial Sequence: Synthetic oligonucleotide
  Sense strand starting at position 2650 SEQ ID NO: 3134
guaucaguuccuuaggaaa

SEQ ID NO: 243449 - RNA, 19 nt, Artificial Sequence
  Description of Artificial Sequence: Synthetic oligonucleotide
  Antisense strand to SEQ ID NO: 243448
uuuccuaaggaacugauac

SEQ ID NO: 243450 - RNA, 19 nt, Artificial Sequence
  Description of Artificial Sequence: Synthetic oligonucleotide
  Sense strand starting at position 2769 SEQ ID NO: 3134
uuuaguguccaauaaauca

SEQ ID NO: 243451 - RNA, 19 nt, Artificial Sequence
  Description of Artificial Sequence: Synthetic oligonucleotide
  Antisense strand to SEQ ID NO: 243450
ugauuuauuggacacuaaa

SEQ ID NO: 243452 - RNA, 19 nt, Artificial Sequence
  Description of Artificial Sequence: Synthetic oligonucleotide
  Sense strand starting at position 3219 SEQ ID NO: 3134
caagguuaacauggcuaua

SEQ ID NO: 243453 - RNA, 19 nt, Artificial Sequence
  Description of Artificial Sequence: Synthetic oligonucleotide
  Antisense strand to SEQ ID NO: 243452
uauagccauguuaaccuug

SEQ ID NO: 243454 - RNA, 19 nt, Artificial Sequence
  Description of Artificial Sequence: Synthetic oligonucleotide
  Sense strand starting at position 3221 SEQ ID NO: 3134
agguuaacauggcuauaua

SEQ ID NO: 243455 - RNA, 19 nt, Artificial Sequence
  Description of Artificial Sequence: Synthetic oligonucleotide
  Antisense strand to SEQ ID NO: 243454
uauauagccauguuaaccu

SEQ ID NO: 243456 - RNA, 19 nt, Artificial Sequence
  Description of Artificial Sequence: Synthetic oligonucleotide
  Sense strand starting at position 3222 SEQ ID NO: 3134
gguuaacauggcuauauaa

SEQ ID NO: 243457 - RNA, 19 nt, Artificial Sequence
  Description of Artificial Sequence: Synthetic oligonucleotide
  Antisense strand to SEQ ID NO: 243456
uuauauagccauguuaacc

SEQ ID NO: 243458 - RNA, 19 nt, Artificial Sequence
  Description of Artificial Sequence: Synthetic oligonucleotide
  Sense strand starting at position 3371 SEQ ID NO: 3134
ugugacucauucguuauuu

SEQ ID NO: 243459 - RNA, 19 nt, Artificial Sequence
  Description of Artificial Sequence: Synthetic oligonucleotide
  Antisense strand to SEQ ID NO: 243458
aaauaacgaaugagucaca

SEQ ID NO: 243460 - RNA, 19 nt, Artificial Sequence
  Description of Artificial Sequence: Synthetic oligonucleotide
  Sense strand starting at position 3372 SEQ ID NO: 3134
gugacucauucguuauuuc

SEQ ID NO: 243461 - RNA, 19 nt, Artificial Sequence
  Description of Artificial Sequence: Synthetic oligonucleotide
  Antisense strand to SEQ ID NO: 243460
gaaauaacgaaugagucac

SEQ ID NO: 243462 - RNA, 19 nt, Artificial Sequence
  Description of Artificial Sequence: Synthetic oligonucleotide
  Sense strand starting at position 3381 SEQ ID NO: 3134
ucguuauuuccaggcacau

SEQ ID NO: 243463 - RNA, 19 nt, Artificial Sequence
  Description of Artificial Sequence: Synthetic oligonucleotide
  Antisense strand to SEQ ID NO: 243462
augugccuggaaauaacga

SEQ ID NO: 243464 - RNA, 19 nt, Artificial Sequence
  Description of Artificial Sequence: Synthetic oligonucleotide
  Sense strand starting at position 3393 SEQ ID NO: 3134
ggcacaucgauacaugcua

SEQ ID NO: 243465 - RNA, 19 nt, Artificial Sequence
  Description of Artificial Sequence: Synthetic oligonucleotide
  Antisense strand to SEQ ID NO: 243464
uagcauguaucgaugugcc

SEQ ID NO: 243466 - RNA, 19 nt, Artificial Sequence
  Description of Artificial Sequence: Synthetic oligonucleotide
  Sense strand starting at position 3903 SEQ ID NO: 3134
ccagauagccucuagauua

SEQ ID NO: 243467 - RNA, 19 nt, Artificial Sequence
  Description of Artificial Sequence: Synthetic oligonucleotide
  Antisense strand to SEQ ID NO: 243466
uaaucuagaggcuaucugg

SEQ ID NO: 243468 - RNA, 19 nt, Artificial Sequence
  Description of Artificial Sequence: Synthetic oligonucleotide
  Sense strand starting at position 3916 SEQ ID NO: 3134
agauuauuauccuuuggau

SEQ ID NO: 243469 - RNA, 19 nt, Artificial Sequence
  Description of Artificial Sequence: Synthetic oligonucleotide
  Antisense strand to SEQ ID NO: 243468
auccaaaggauaauaaucu

SEQ ID NO: 243470 - RNA, 19 nt, Artificial Sequence
  Description of Artificial Sequence: Synthetic oligonucleotide
  Sense strand starting at position 3942 SEQ ID NO: 3134
cauauuccugggcaguaua

SEQ ID NO: 243471 - RNA, 19 nt, Artificial Sequence
  Description of Artificial Sequence: Synthetic oligonucleotide
  Antisense strand to SEQ ID NO: 243470
uauacugcccaggaauaug

SEQ ID NO: 243472 - RNA, 19 nt, Artificial Sequence
  Description of Artificial Sequence: Synthetic oligonucleotide
  Sense strand starting at position 3945 SEQ ID NO: 3134
auuccugggcaguauauau

SEQ ID NO: 243473 - RNA, 19 nt, Artificial Sequence
  Description of Artificial Sequence: Synthetic oligonucleotide
  Antisense strand to SEQ ID NO: 243472
auauauacugcccaggaau

SEQ ID NO: 243474 - RNA, 19 nt, Artificial Sequence
  Description of Artificial Sequence: Synthetic oligonucleotide
  Sense strand starting at position 52 SEQ ID NO: 3133
gauguugaguaccugauaa

SEQ ID NO: 243475 - RNA, 19 nt, Artificial Sequence
  Description of Artificial Sequence: Synthetic oligonucleotide
  Antisense strand to SEQ ID NO: 243474
uuaucagguacucaacauc

SEQ ID NO: 243476 - RNA, 19 nt, Artificial Sequence
  Description of Artificial Sequence: Synthetic oligonucleotide
  Sense strand starting at position 166 SEQ ID NO: 3133
guuaaugucggccucugua

SEQ ID NO: 243477 - RNA, 19 nt, Artificial Sequence
  Description of Artificial Sequence: Synthetic oligonucleotide
  Antisense strand to SEQ ID NO: 243476
uacagaggccgacauuaac

SEQ ID NO: 243478 - RNA, 19 nt, Artificial Sequence
  Description of Artificial Sequence: Synthetic oligonucleotide
  Sense strand starting at position 191 SEQ ID NO: 3133
gauauuguguuacuuuagu

SEQ ID NO: 243479 - RNA, 19 nt, Artificial Sequence
  Description of Artificial Sequence: Synthetic oligonucleotide
  Antisense strand to SEQ ID NO: 243478
acuaaaguaacacaauauc

SEQ ID NO: 243480 - RNA, 19 nt, Artificial Sequence
  Description of Artificial Sequence: Synthetic oligonucleotide
  Sense strand starting at position 298 SEQ ID NO: 3133
guuacaugcaagugaguca

SEQ ID NO: 243481 - RNA, 19 nt, Artificial Sequence
  Description of Artificial Sequence: Synthetic oligonucleotide
  Antisense strand to SEQ ID NO: 243480
ugacucacuugcauguaac

SEQ ID NO: 243482 - RNA, 19 nt, Artificial Sequence
  Description of Artificial Sequence: Synthetic oligonucleotide
  Sense strand starting at position 301 SEQ ID NO: 3133
acaugcaagugagucaaua

SEQ ID NO: 243483 - RNA, 19 nt, Artificial Sequence
  Description of Artificial Sequence: Synthetic oligonucleotide
  Antisense strand to SEQ ID NO: 243482
uauugacucacuugcaugu

SEQ ID NO: 243484 - RNA, 19 nt, Artificial Sequence
  Description of Artificial Sequence: Synthetic oligonucleotide
  Sense strand starting at position 455 SEQ ID NO: 3133
ggaagaggguaauaagaau

SEQ ID NO: 243485 - RNA, 19 nt, Artificial Sequence
  Description of Artificial Sequence: Synthetic oligonucleotide
  Antisense strand to SEQ ID NO: 243484
auucuuauuacccucuucc

SEQ ID NO: 243486 - RNA, 19 nt, Artificial Sequence
  Description of Artificial Sequence: Synthetic oligonucleotide
  Sense strand starting at position 671 SEQ ID NO: 3133
caaguuuggcaguauagua

SEQ ID NO: 243487 - RNA, 19 nt, Artificial Sequence
  Description of Artificial Sequence: Synthetic oligonucleotide
  Antisense strand to SEQ ID NO: 243486
uacuauacugccaaacuug

SEQ ID NO: 243488 - RNA, 19 nt, Artificial Sequence
  Description of Artificial Sequence: Synthetic oligonucleotide
  Sense strand starting at position 727 SEQ ID NO: 3133
uuugauaucugguccuagu

SEQ ID NO: 243489 - RNA, 19 nt, Artificial Sequence
  Description of Artificial Sequence: Synthetic oligonucleotide
  Antisense strand to SEQ ID NO: 243488
acuaggaccagauaucaaa

SEQ ID NO: 243490 - RNA, 19 nt, Artificial Sequence
  Description of Artificial Sequence: Synthetic oligonucleotide
  Sense strand starting at position 1054 SEQ ID NO: 3133
auaccauucggagauguuu

SEQ ID NO: 243491 - RNA, 19 nt, Artificial Sequence
  Description of Artificial Sequence: Synthetic oligonucleotide
  Antisense strand to SEQ ID NO: 243490
aaacaucuccgaaugguau

SEQ ID NO: 243492 - RNA, 19 nt, Artificial Sequence
  Description of Artificial Sequence: Synthetic oligonucleotide
  Sense strand starting at position 1063 SEQ ID NO: 3133
ggagauguuuacucggcca

SEQ ID NO: 243493 - RNA, 19 nt, Artificial Sequence
  Description of Artificial Sequence: Synthetic oligonucleotide
  Antisense strand to SEQ ID NO: 243492
uggccgaguaaacaucucc

SEQ ID NO: 243494 - RNA, 19 nt, Artificial Sequence
  Description of Artificial Sequence: Synthetic oligonucleotide
  Sense strand starting at position 1068 SEQ ID NO: 3133
uguuuacucggccaguaaa

SEQ ID NO: 243495 - RNA, 19 nt, Artificial Sequence
  Description of Artificial Sequence: Synthetic oligonucleotide
  Antisense strand to SEQ ID NO: 243494
uuuacuggccgaguaaaca

SEQ ID NO: 243496 - RNA, 19 nt, Artificial Sequence
  Description of Artificial Sequence: Synthetic oligonucleotide
  Sense strand starting at position 1075 SEQ ID NO: 3133
ucggccaguaaauguauaa

SEQ ID NO: 243497 - RNA, 19 nt, Artificial Sequence
  Description of Artificial Sequence: Synthetic oligonucleotide
  Antisense strand to SEQ ID NO: 243496
uuauacauuuacuggccga

SEQ ID NO: 243498 - RNA, 19 nt, Artificial Sequence
  Description of Artificial Sequence: Synthetic oligonucleotide
  Sense strand starting at position 1118 SEQ ID NO: 3133
accuguggcuauuccauaa

SEQ ID NO: 243499 - RNA, 19 nt, Artificial Sequence
  Description of Artificial Sequence: Synthetic oligonucleotide
  Antisense strand to SEQ ID NO: 243498
uuauggaauagccacaggu

SEQ ID NO: 243500 - RNA, 19 nt, Artificial Sequence
  Description of Artificial Sequence: Synthetic oligonucleotide
  Sense strand starting at position 1122 SEQ ID NO: 3133
guggcuauuccauaaauac

SEQ ID NO: 243501 - RNA, 19 nt, Artificial Sequence
  Description of Artificial Sequence: Synthetic oligonucleotide
  Antisense strand to SEQ ID NO: 243500
guauuuauggaauagccac

SEQ ID NO: 243502 - RNA, 19 nt, Artificial Sequence
  Description of Artificial Sequence: Synthetic oligonucleotide
  Sense strand starting at position 1176 SEQ ID NO: 3133
guacgucgccugagucaga

SEQ ID NO: 243503 - RNA, 19 nt, Artificial Sequence
  Description of Artificial Sequence: Synthetic oligonucleotide
  Antisense strand to SEQ ID NO: 243502
ucugacucaggcgacguac

SEQ ID NO: 243504 - RNA, 19 nt, Artificial Sequence
  Description of Artificial Sequence: Synthetic oligonucleotide
  Sense strand starting at position 1304 SEQ ID NO: 3133
ugcugugugcaucaagauc

SEQ ID NO: 243505 - RNA, 19 nt, Artificial Sequence
  Description of Artificial Sequence: Synthetic oligonucleotide
  Antisense strand to SEQ ID NO: 243504
gaucuugaugcacacagca

SEQ ID NO: 243506 - RNA, 19 nt, Artificial Sequence
  Description of Artificial Sequence: Synthetic oligonucleotide
  Sense strand starting at position 1310 SEQ ID NO: 3133
gugcaucaagaucaucuau

SEQ ID NO: 243507 - RNA, 19 nt, Artificial Sequence
  Description of Artificial Sequence: Synthetic oligonucleotide
  Antisense strand to SEQ ID NO: 243506
auagaugaucuugaugcac

SEQ ID NO: 243508 - RNA, 19 nt, Artificial Sequence
  Description of Artificial Sequence: Synthetic oligonucleotide
  Sense strand starting at position 1414 SEQ ID NO: 3133
cuccgucuuccuuagagca

SEQ ID NO: 243509 - RNA, 19 nt, Artificial Sequence
  Description of Artificial Sequence: Synthetic oligonucleotide
  Antisense strand to SEQ ID NO: 243508
ugcucuaaggaagacggag

SEQ ID NO: 243510 - RNA, 19 nt, Artificial Sequence
  Description of Artificial Sequence: Synthetic oligonucleotide
  Sense strand starting at position 1422 SEQ ID NO: 3133
uccuuagagcaucagguau

SEQ ID NO: 243511 - RNA, 19 nt, Artificial Sequence
  Description of Artificial Sequence: Synthetic oligonucleotide
  Antisense strand to SEQ ID NO: 243510
auaccugaugcucuaagga

SEQ ID NO: 243512 - RNA, 19 nt, Artificial Sequence
  Description of Artificial Sequence: Synthetic oligonucleotide
  Sense strand starting at position 1433 SEQ ID NO: 3133
ucagguaucugaccacuga

SEQ ID NO: 243513 - RNA, 19 nt, Artificial Sequence
  Description of Artificial Sequence: Synthetic oligonucleotide
  Antisense strand to SEQ ID NO: 243512
ucaguggucagauaccuga

SEQ ID NO: 243514 - RNA, 19 nt, Artificial Sequence
  Description of Artificial Sequence: Synthetic oligonucleotide
  Sense strand starting at position 1437 SEQ ID NO: 3133
guaucugaccacugacauc

SEQ ID NO: 243515 - RNA, 19 nt, Artificial Sequence
  Description of Artificial Sequence: Synthetic oligonucleotide
  Antisense strand to SEQ ID NO: 243514
gaugucaguggucagauac

SEQ ID NO: 243516 - RNA, 19 nt, Artificial Sequence
  Description of Artificial Sequence: Synthetic oligonucleotide
  Sense strand starting at position 1616 SEQ ID NO: 3133
auccaucgguugccaauua

SEQ ID NO: 243517 - RNA, 19 nt, Artificial Sequence
  Description of Artificial Sequence: Synthetic oligonucleotide
  Antisense strand to SEQ ID NO: 243516
uaauuggcaaccgauggau

SEQ ID NO: 243518 - RNA, 19 nt, Artificial Sequence
  Description of Artificial Sequence: Synthetic oligonucleotide
  Sense strand starting at position 1624 SEQ ID NO: 3133
guugccaauuaguuucuaa

SEQ ID NO: 243519 - RNA, 19 nt, Artificial Sequence
  Description of Artificial Sequence: Synthetic oligonucleotide
  Antisense strand to SEQ ID NO: 243518
uuagaaacuaauuggcaac

SEQ ID NO: 243520 - RNA, 19 nt, Artificial Sequence
  Description of Artificial Sequence: Synthetic oligonucleotide
  Sense strand starting at position 2409 SEQ ID NO: 3133
cggucugcucuugaaugaa

SEQ ID NO: 243521 - RNA, 19 nt, Artificial Sequence
  Description of Artificial Sequence: Synthetic oligonucleotide
  Antisense strand to SEQ ID NO: 243520
uucauucaagagcagaccg

SEQ ID NO: 243522 - RNA, 19 nt, Artificial Sequence
  Description of Artificial Sequence: Synthetic oligonucleotide
  Sense strand starting at position 2664 SEQ ID NO: 3133
guucgcccgcuguauuuaa

SEQ ID NO: 243523 - RNA, 19 nt, Artificial Sequence
  Description of Artificial Sequence: Synthetic oligonucleotide
  Antisense strand to SEQ ID NO: 243522
uuaaauacagcgggcgaac

SEQ ID NO: 243524 - RNA, 19 nt, Artificial Sequence
  Description of Artificial Sequence: Synthetic oligonucleotide
  Sense strand starting at position 2677 SEQ ID NO: 3133
auuuaacucccguguuaaa

SEQ ID NO: 243525 - RNA, 19 nt, Artificial Sequence
  Description of Artificial Sequence: Synthetic oligonucleotide
  Antisense strand to SEQ ID NO: 243524
uuuaacacgggaguuaaau

SEQ ID NO: 243526 - RNA, 19 nt, Artificial Sequence
  Description of Artificial Sequence: Synthetic oligonucleotide
  Sense strand starting at position 2688 SEQ ID NO: 3133
guguuaaagguuuaaagag

SEQ ID NO: 243527 - RNA, 19 nt, Artificial Sequence
  Description of Artificial Sequence: Synthetic oligonucleotide
  Antisense strand to SEQ ID NO: 243526
cucuuuaaaccuuuaacac

SEQ ID NO: 243528 - RNA, 19 nt, Artificial Sequence
  Description of Artificial Sequence: Synthetic oligonucleotide
  Sense strand starting at position 2845 SEQ ID NO: 3133
auuuacuacuaguaggaga

SEQ ID NO: 243529 - RNA, 19 nt, Artificial Sequence
  Description of Artificial Sequence: Synthetic oligonucleotide
  Antisense strand to SEQ ID NO: 243528
ucuccuacuaguaguaaau

SEQ ID NO: 243530 - RNA, 19 nt, Artificial Sequence
  Description of Artificial Sequence: Synthetic oligonucleotide
  Sense strand starting at position 2847 SEQ ID NO: 3133
uuacuacuaguaggagaua

SEQ ID NO: 243531 - RNA, 19 nt, Artificial Sequence
  Description of Artificial Sequence: Synthetic oligonucleotide
  Antisense strand to SEQ ID NO: 243530
uaucuccuacuaguaguaa

SEQ ID NO: 243532 - RNA, 19 nt, Artificial Sequence
  Description of Artificial Sequence: Synthetic oligonucleotide
  Sense strand starting at position 2989 SEQ ID NO: 3133
agguuaacacucgagguga

SEQ ID NO: 243533 - RNA, 19 nt, Artificial Sequence
  Description of Artificial Sequence: Synthetic oligonucleotide
  Antisense strand to SEQ ID NO: 243532
ucaccucgaguguuaaccu

SEQ ID NO: 243534 - RNA, 19 nt, Artificial Sequence
  Description of Artificial Sequence: Synthetic oligonucleotide
  Sense strand starting at position 2991 SEQ ID NO: 3133
guuaacacucgaggugaua

SEQ ID NO: 243535 - RNA, 19 nt, Artificial Sequence
  Description of Artificial Sequence: Synthetic oligonucleotide
  Antisense strand to SEQ ID NO: 243534
uaucaccucgaguguuaac

SEQ ID NO: 243536 - RNA, 19 nt, Artificial Sequence
  Description of Artificial Sequence: Synthetic oligonucleotide
  Sense strand starting at position 3429 SEQ ID NO: 3133
caagcuacagaggguuaau

SEQ ID NO: 243537 - RNA, 19 nt, Artificial Sequence
  Description of Artificial Sequence: Synthetic oligonucleotide
  Antisense strand to SEQ ID NO: 243536
auuaacccucuguagcuug

SEQ ID NO: 243538 - RNA, 19 nt, Artificial Sequence
  Description of Artificial Sequence: Synthetic oligonucleotide
  Sense strand starting at position 3438 SEQ ID NO: 3133
gaggguuaauuuggacuga

SEQ ID NO: 243539 - RNA, 19 nt, Artificial Sequence
  Description of Artificial Sequence: Synthetic oligonucleotide
  Antisense strand to SEQ ID NO: 243538
ucaguccaaauuaacccuc

SEQ ID NO: 243540 - RNA, 19 nt, Artificial Sequence
  Description of Artificial Sequence: Synthetic oligonucleotide
  Sense strand starting at position 3439 SEQ ID NO: 3133
aggguuaauuuggacugaa

SEQ ID NO: 243541 - RNA, 19 nt, Artificial Sequence
  Description of Artificial Sequence: Synthetic oligonucleotide
  Antisense strand to SEQ ID NO: 243540
uucaguccaaauuaacccu

SEQ ID NO: 243542 - RNA, 19 nt, Artificial Sequence
  Description of Artificial Sequence: Synthetic oligonucleotide
  Sense strand starting at position 3518 SEQ ID NO: 3133
accugagauuaugugcaaa

SEQ ID NO: 243543 - RNA, 19 nt, Artificial Sequence
  Description of Artificial Sequence: Synthetic oligonucleotide
  Antisense strand to SEQ ID NO: 243542
uuugcacauaaucucaggu

SEQ ID NO: 243544 - RNA, 19 nt, Artificial Sequence
  Description of Artificial Sequence: Synthetic oligonucleotide
  Sense strand starting at position 3559 SEQ ID NO: 3133
gucuacagcuuuccucaga

SEQ ID NO: 243545 - RNA, 19 nt, Artificial Sequence
  Description of Artificial Sequence: Synthetic oligonucleotide
  Antisense strand to SEQ ID NO: 243544
ucugaggaaagcuguagac

SEQ ID NO: 243546 - RNA, 19 nt, Artificial Sequence
  Description of Artificial Sequence: Synthetic oligonucleotide
  Sense strand starting at position 3567 SEQ ID NO: 3133
cuuuccucagaaggguaaa

SEQ ID NO: 243547 - RNA, 19 nt, Artificial Sequence
  Description of Artificial Sequence: Synthetic oligonucleotide
  Antisense strand to SEQ ID NO: 243546
uuuacccuucugaggaaag

SEQ ID NO: 243548 - RNA, 19 nt, Artificial Sequence
  Description of Artificial Sequence: Synthetic oligonucleotide
  Sense strand starting at position 3597 SEQ ID NO: 3133
ggcaaacaugagugauuga

SEQ ID NO: 243549 - RNA, 19 nt, Artificial Sequence
  Description of Artificial Sequence: Synthetic oligonucleotide
  Antisense strand to SEQ ID NO: 243548
ucaaucacucauguuugcc

SEQ ID NO: 243550 - RNA, 19 nt, Artificial Sequence
  Description of Artificial Sequence: Synthetic oligonucleotide
  Sense strand starting at position 3626 SEQ ID NO: 3133
ugggauggcuuuccugaau

SEQ ID NO: 243551 - RNA, 19 nt, Artificial Sequence
  Description of Artificial Sequence: Synthetic oligonucleotide
  Antisense strand to SEQ ID NO: 243550
auucaggaaagccauccca

SEQ ID NO: 243552 - RNA, 19 nt, Artificial Sequence
  Description of Artificial Sequence: Synthetic oligonucleotide
  Sense strand starting at position 3801 SEQ ID NO: 3133
cuagguccugaaugaaugu

SEQ ID NO: 243553 - RNA, 19 nt, Artificial Sequence
  Description of Artificial Sequence: Synthetic oligonucleotide
  Antisense strand to SEQ ID NO: 243552
acauucauucaggaccuag

SEQ ID NO: 243554 - RNA, 19 nt, Artificial Sequence
  Description of Artificial Sequence: Synthetic oligonucleotide
  Sense strand starting at position 158 SEQ ID NO: 3132
caaguuuggcaguauagua

SEQ ID NO: 243555 - RNA, 19 nt, Artificial Sequence
  Description of Artificial Sequence: Synthetic oligonucleotide
  Antisense strand to SEQ ID NO: 243554
uacuauacugccaaacuug

SEQ ID NO: 243556 - RNA, 19 nt, Artificial Sequence
  Description of Artificial Sequence: Synthetic oligonucleotide
  Sense strand starting at position 214 SEQ ID NO: 3132
uuugauaucugguccuagu

SEQ ID NO: 243557 - RNA, 19 nt, Artificial Sequence
  Description of Artificial Sequence: Synthetic oligonucleotide
  Antisense strand to SEQ ID NO: 243556
acuaggaccagauaucaaa

SEQ ID NO: 243558 - RNA, 19 nt, Artificial Sequence
  Description of Artificial Sequence: Synthetic oligonucleotide
  Sense strand starting at position 541 SEQ ID NO: 3132
auaccauucggagauguuu

SEQ ID NO: 243559 - RNA, 19 nt, Artificial Sequence
  Description of Artificial Sequence: Synthetic oligonucleotide
  Antisense strand to SEQ ID NO: 243558
aaacaucuccgaaugguau

SEQ ID NO: 243560 - RNA, 19 nt, Artificial Sequence
  Description of Artificial Sequence: Synthetic oligonucleotide
  Sense strand starting at position 550 SEQ ID NO: 3132
ggagauguuuacucggcca

SEQ ID NO: 243561 - RNA, 19 nt, Artificial Sequence
  Description of Artificial Sequence: Synthetic oligonucleotide
  Antisense strand to SEQ ID NO: 243560
uggccgaguaaacaucucc

SEQ ID NO: 243562 - RNA, 19 nt, Artificial Sequence
  Description of Artificial Sequence: Synthetic oligonucleotide
  Sense strand starting at position 555 SEQ ID NO: 3132
uguuuacucggccaguaaa

SEQ ID NO: 243563 - RNA, 19 nt, Artificial Sequence
  Description of Artificial Sequence: Synthetic oligonucleotide
  Antisense strand to SEQ ID NO: 243562
uuuacuggccgaguaaaca

SEQ ID NO: 243564 - RNA, 19 nt, Artificial Sequence
  Description of Artificial Sequence: Synthetic oligonucleotide
  Sense strand starting at position 562 SEQ ID NO: 3132
ucggccaguaaauguauaa

SEQ ID NO: 243565 - RNA, 19 nt, Artificial Sequence
  Description of Artificial Sequence: Synthetic oligonucleotide
  Antisense strand to SEQ ID NO: 243564
uuauacauuuacuggccga

SEQ ID NO: 243566 - RNA, 19 nt, Artificial Sequence
  Description of Artificial Sequence: Synthetic oligonucleotide
  Sense strand starting at position 605 SEQ ID NO: 3132
accuguggcuauuccauaa

SEQ ID NO: 243567 - RNA, 19 nt, Artificial Sequence
  Description of Artificial Sequence: Synthetic oligonucleotide
  Antisense strand to SEQ ID NO: 243566
uuauggaauagccacaggu

SEQ ID NO: 243568 - RNA, 19 nt, Artificial Sequence
  Description of Artificial Sequence: Synthetic oligonucleotide
  Sense strand starting at position 609 SEQ ID NO: 3132
guggcuauuccauaaauac

SEQ ID NO: 243569 - RNA, 19 nt, Artificial Sequence
  Description of Artificial Sequence: Synthetic oligonucleotide
  Antisense strand to SEQ ID NO: 243568
guauuuauggaauagccac

SEQ ID NO: 243570 - RNA, 19 nt, Artificial Sequence
  Description of Artificial Sequence: Synthetic oligonucleotide
  Sense strand starting at position 663 SEQ ID NO: 3132
guacgucgccugagucaga

SEQ ID NO: 243571 - RNA, 19 nt, Artificial Sequence
  Description of Artificial Sequence: Synthetic oligonucleotide
  Antisense strand to SEQ ID NO: 243570
ucugacucaggcgacguac

SEQ ID NO: 243572 - RNA, 19 nt, Artificial Sequence
  Description of Artificial Sequence: Synthetic oligonucleotide
  Sense strand starting at position 791 SEQ ID NO: 3132
ugcugugugcaucaagauc

SEQ ID NO: 243573 - RNA, 19 nt, Artificial Sequence
  Description of Artificial Sequence: Synthetic oligonucleotide
  Antisense strand to SEQ ID NO: 243572
gaucuugaugcacacagca

SEQ ID NO: 243574 - RNA, 19 nt, Artificial Sequence
  Description of Artificial Sequence: Synthetic oligonucleotide
  Sense strand starting at position 797 SEQ ID NO: 3132
gugcaucaagaucaucuau

SEQ ID NO: 243575 - RNA, 19 nt, Artificial Sequence
  Description of Artificial Sequence: Synthetic oligonucleotide
  Antisense strand to SEQ ID NO: 243574
auagaugaucuugaugcac

SEQ ID NO: 243576 - RNA, 19 nt, Artificial Sequence
  Description of Artificial Sequence: Synthetic oligonucleotide
  Sense strand starting at position 901 SEQ ID NO: 3132
cuccgucuuccuuagagca

SEQ ID NO: 243577 - RNA, 19 nt, Artificial Sequence
  Description of Artificial Sequence: Synthetic oligonucleotide
  Antisense strand to SEQ ID NO: 243576
ugcucuaaggaagacggag

SEQ ID NO: 243578 - RNA, 19 nt, Artificial Sequence
  Description of Artificial Sequence: Synthetic oligonucleotide
  Sense strand starting at position 909 SEQ ID NO: 3132
uccuuagagcaucagguau

SEQ ID NO: 243579 - RNA, 19 nt, Artificial Sequence
  Description of Artificial Sequence: Synthetic oligonucleotide
  Antisense strand to SEQ ID NO: 243578
auaccugaugcucuaagga

SEQ ID NO: 243580 - RNA, 19 nt, Artificial Sequence
  Description of Artificial Sequence: Synthetic oligonucleotide
  Sense strand starting at position 920 SEQ ID NO: 3132
ucagguaucugaccacuga

SEQ ID NO: 243581 - RNA, 19 nt, Artificial Sequence
  Description of Artificial Sequence: Synthetic oligonucleotide
  Antisense strand to SEQ ID NO: 243580
ucaguggucagauaccuga

SEQ ID NO: 243582 - RNA, 19 nt, Artificial Sequence
  Description of Artificial Sequence: Synthetic oligonucleotide
  Sense strand starting at position 924 SEQ ID NO: 3132
guaucugaccacugacauc

SEQ ID NO: 243583 - RNA, 19 nt, Artificial Sequence
  Description of Artificial Sequence: Synthetic oligonucleotide
  Antisense strand to SEQ ID NO: 243582
gaugucaguggucagauac

SEQ ID NO: 243584 - RNA, 19 nt, Artificial Sequence
  Description of Artificial Sequence: Synthetic oligonucleotide
  Sense strand starting at position 1111 SEQ ID NO: 3132
guugccaauuaguuucuaa

SEQ ID NO: 243585 - RNA, 19 nt, Artificial Sequence
  Description of Artificial Sequence: Synthetic oligonucleotide
  Antisense strand to SEQ ID NO: 243584
uuagaaacuaauuggcaac

SEQ ID NO: 243586 - RNA, 19 nt, Artificial Sequence
  Description of Artificial Sequence: Synthetic oligonucleotide
  Sense strand starting at position 1896 SEQ ID NO: 3132
cggucugcucuugaaugaa

SEQ ID NO: 243587 - RNA, 19 nt, Artificial Sequence
  Description of Artificial Sequence: Synthetic oligonucleotide
  Antisense strand to SEQ ID NO: 243586
uucauucaagagcagaccg

SEQ ID NO: 243588 - RNA, 19 nt, Artificial Sequence
  Description of Artificial Sequence: Synthetic oligonucleotide
  Sense strand starting at position 2151 SEQ ID NO: 3132
guucgcccgcuguauuuaa

SEQ ID NO: 243589 - RNA, 19 nt, Artificial Sequence
  Description of Artificial Sequence: Synthetic oligonucleotide
  Antisense strand to SEQ ID NO: 243588
uuaaauacagcgggcgaac

SEQ ID NO: 243590 - RNA, 19 nt, Artificial Sequence
  Description of Artificial Sequence: Synthetic oligonucleotide
  Sense strand starting at position 2164 SEQ ID NO: 3132
auuuaacucccguguuaaa

SEQ ID NO: 243591 - RNA, 19 nt, Artificial Sequence
  Description of Artificial Sequence: Synthetic oligonucleotide
  Antisense strand to SEQ ID NO: 243590
uuuaacacgggaguuaaau

SEQ ID NO: 243592 - RNA, 19 nt, Artificial Sequence
  Description of Artificial Sequence: Synthetic oligonucleotide
  Sense strand starting at position 2175 SEQ ID NO: 3132
guguuaaagguuuaaagag

SEQ ID NO: 243593 - RNA, 19 nt, Artificial Sequence
  Description of Artificial Sequence: Synthetic oligonucleotide
  Antisense strand to SEQ ID NO: 243592
cucuuuaaaccuuuaacac

SEQ ID NO: 243594 - RNA, 19 nt, Artificial Sequence
  Description of Artificial Sequence: Synthetic oligonucleotide
  Sense strand starting at position 2332 SEQ ID NO: 3132
auuuacuacuaguaggaga

SEQ ID NO: 243595 - RNA, 19 nt, Artificial Sequence
  Description of Artificial Sequence: Synthetic oligonucleotide
  Antisense strand to SEQ ID NO: 243594
ucuccuacuaguaguaaau

SEQ ID NO: 243596 - RNA, 19 nt, Artificial Sequence
  Description of Artificial Sequence: Synthetic oligonucleotide
  Sense strand starting at position 2334 SEQ ID NO: 3132
uuacuacuaguaggagaua

SEQ ID NO: 243597 - RNA, 19 nt, Artificial Sequence
  Description of Artificial Sequence: Synthetic oligonucleotide
  Antisense strand to SEQ ID NO: 243596
uaucuccuacuaguaguaa

SEQ ID NO: 243598 - RNA, 19 nt, Artificial Sequence
  Description of Artificial Sequence: Synthetic oligonucleotide
  Sense strand starting at position 2476 SEQ ID NO: 3132
agguuaacacucgagguga

SEQ ID NO: 243599 - RNA, 19 nt, Artificial Sequence
  Description of Artificial Sequence: Synthetic oligonucleotide
  Antisense strand to SEQ ID NO: 243598
ucaccucgaguguuaaccu

SEQ ID NO: 243600 - RNA, 19 nt, Artificial Sequence
  Description of Artificial Sequence: Synthetic oligonucleotide
  Sense strand starting at position 2478 SEQ ID NO: 3132
guuaacacucgaggugaua

SEQ ID NO: 243601 - RNA, 19 nt, Artificial Sequence
  Description of Artificial Sequence: Synthetic oligonucleotide
  Antisense strand to SEQ ID NO: 243600
uaucaccucgaguguuaac

SEQ ID NO: 243602 - RNA, 19 nt, Artificial Sequence
  Description of Artificial Sequence: Synthetic oligonucleotide
  Sense strand starting at position 2916 SEQ ID NO: 3132
caagcuacagaggguuaau

SEQ ID NO: 243603 - RNA, 19 nt, Artificial Sequence
  Description of Artificial Sequence: Synthetic oligonucleotide
  Antisense strand to SEQ ID NO: 243602
auuaacccucuguagcuug

SEQ ID NO: 243604 - RNA, 19 nt, Artificial Sequence
  Description of Artificial Sequence: Synthetic oligonucleotide
  Sense strand starting at position 2925 SEQ ID NO: 3132
gaggguuaauuuggacuga

SEQ ID NO: 243605 - RNA, 19 nt, Artificial Sequence
  Description of Artificial Sequence: Synthetic oligonucleotide
  Antisense strand to SEQ ID NO: 243604
ucaguccaaauuaacccuc

SEQ ID NO: 243606 - RNA, 19 nt, Artificial Sequence
  Description of Artificial Sequence: Synthetic oligonucleotide
  Sense strand starting at position 2926 SEQ ID NO: 3132
aggguuaauuuggacugaa

SEQ ID NO: 243607 - RNA, 19 nt, Artificial Sequence
  Description of Artificial Sequence: Synthetic oligonucleotide
  Antisense strand to SEQ ID NO: 243606
uucaguccaaauuaacccu

SEQ ID NO: 243608 - RNA, 19 nt, Artificial Sequence
  Description of Artificial Sequence: Synthetic oligonucleotide
  Sense strand starting at position 3005 SEQ ID NO: 3132
accugagauuaugugcaaa

SEQ ID NO: 243609 - RNA, 19 nt, Artificial Sequence
  Description of Artificial Sequence: Synthetic oligonucleotide
  Antisense strand to SEQ ID NO: 243608
uuugcacauaaucucaggu

SEQ ID NO: 243610 - RNA, 19 nt, Artificial Sequence
  Description of Artificial Sequence: Synthetic oligonucleotide
  Sense strand starting at position 3046 SEQ ID NO: 3132
gucuacagcuuuccucaga

SEQ ID NO: 243611 - RNA, 19 nt, Artificial Sequence
  Description of Artificial Sequence: Synthetic oligonucleotide
  Antisense strand to SEQ ID NO: 243610
ucugaggaaagcuguagac

SEQ ID NO: 243612 - RNA, 19 nt, Artificial Sequence
  Description of Artificial Sequence: Synthetic oligonucleotide
  Sense strand starting at position 3054 SEQ ID NO: 3132
cuuuccucagaaggguaaa

SEQ ID NO: 243613 - RNA, 19 nt, Artificial Sequence
  Description of Artificial Sequence: Synthetic oligonucleotide
  Antisense strand to SEQ ID NO: 243612
uuuacccuucugaggaaag

SEQ ID NO: 243614 - RNA, 19 nt, Artificial Sequence
  Description of Artificial Sequence: Synthetic oligonucleotide
  Sense strand starting at position 3084 SEQ ID NO: 3132
ggcaaacaugagugauuga

SEQ ID NO: 243615 - RNA, 19 nt, Artificial Sequence
  Description of Artificial Sequence: Synthetic oligonucleotide
  Antisense strand to SEQ ID NO: 243614
ucaaucacucauguuugcc

SEQ ID NO: 243616 - RNA, 19 nt, Artificial Sequence
  Description of Artificial Sequence: Synthetic oligonucleotide
  Sense strand starting at position 3113 SEQ ID NO: 3132
ugggauggcuuuccugaau

SEQ ID NO: 243617 - RNA, 19 nt, Artificial Sequence
  Description of Artificial Sequence: Synthetic oligonucleotide
  Antisense strand to SEQ ID NO: 243616
auucaggaaagccauccca

SEQ ID NO: 243618 - RNA, 19 nt, Artificial Sequence
  Description of Artificial Sequence: Synthetic oligonucleotide
  Sense strand starting at position 3288 SEQ ID NO: 3132
cuagguccugaaugaaugu

SEQ ID NO: 243619 - RNA, 19 nt, Artificial Sequence
  Description of Artificial Sequence: Synthetic oligonucleotide
  Antisense strand to SEQ ID NO: 243618
acauucauucaggaccuag

SEQ ID NO: 243620 - RNA, 19 nt, Artificial Sequence
  Description of Artificial Sequence: Synthetic oligonucleotide
  Sense strand starting at position 3549 SEQ ID NO: 3132
caaucugaggccgacuaaa

SEQ ID NO: 243621 - RNA, 19 nt, Artificial Sequence
  Description of Artificial Sequence: Synthetic oligonucleotide
  Antisense strand to SEQ ID NO: 243620
uuuagucggccucagauug

SEQ ID NO: 243622 - RNA, 19 nt, Artificial Sequence
  Description of Artificial Sequence: Synthetic oligonucleotide
  Sense strand starting at position 3682 SEQ ID NO: 3132
aaugaaguguaguauuuac

SEQ ID NO: 243623 - RNA, 19 nt, Artificial Sequence
  Description of Artificial Sequence: Synthetic oligonucleotide
  Antisense strand to SEQ ID NO: 243622
guaaauacuacacuucauu

SEQ ID NO: 243624 - RNA, 19 nt, Artificial Sequence
  Description of Artificial Sequence: Synthetic oligonucleotide
  Sense strand starting at position 3812 SEQ ID NO: 3132
ggagucaagucucucauau

SEQ ID NO: 243625 - RNA, 19 nt, Artificial Sequence
  Description of Artificial Sequence: Synthetic oligonucleotide
  Antisense strand to SEQ ID NO: 243624
auaugagagacuugacucc

SEQ ID NO: 243626 - RNA, 19 nt, Artificial Sequence
  Description of Artificial Sequence: Synthetic oligonucleotide
  Sense strand starting at position 3845 SEQ ID NO: 3132
uggaaugaauucuuucuuu

SEQ ID NO: 243627 - RNA, 19 nt, Artificial Sequence
  Description of Artificial Sequence: Synthetic oligonucleotide
  Antisense strand to SEQ ID NO: 243626
aaagaaagaauucauucca

SEQ ID NO: 243628 - RNA, 19 nt, Artificial Sequence
  Description of Artificial Sequence: Synthetic oligonucleotide
  Sense strand starting at position 3859 SEQ ID NO: 3132
ucuuuagcuguuggauaca

SEQ ID NO: 243629 - RNA, 19 nt, Artificial Sequence
  Description of Artificial Sequence: Synthetic oligonucleotide
  Antisense strand to SEQ ID NO: 243628
uguauccaacagcuaaaga

SEQ ID NO: 243630 - RNA, 19 nt, Artificial Sequence
  Description of Artificial Sequence: Synthetic oligonucleotide
  Sense strand starting at position 3870 SEQ ID NO: 3132
uggauacaauguuuaaaug

SEQ ID NO: 243631 - RNA, 19 nt, Artificial Sequence
  Description of Artificial Sequence: Synthetic oligonucleotide
  Antisense strand to SEQ ID NO: 243630
cauuuaaacauuguaucca

SEQ ID NO: 243632 - RNA, 19 nt, Artificial Sequence
  Description of Artificial Sequence: Synthetic oligonucleotide
  Sense strand starting at position 3958 SEQ ID NO: 3132
agcacuuguggucaggagu

SEQ ID NO: 243633 - RNA, 19 nt, Artificial Sequence
  Description of Artificial Sequence: Synthetic oligonucleotide
  Antisense strand to SEQ ID NO: 243632
acuccugaccacaagugcu

SEQ ID NO: 243634 - RNA, 19 nt, Artificial Sequence
  Description of Artificial Sequence: Synthetic oligonucleotide
  Sense strand starting at position 47 SEQ ID NO: 3135
agaauugacaccgaugcua

SEQ ID NO: 243635 - RNA, 19 nt, Artificial Sequence
  Description of Artificial Sequence: Synthetic oligonucleotide
  Antisense strand to SEQ ID NO: 243634
uagcaucggugucaauucu

SEQ ID NO: 243636 - RNA, 19 nt, Artificial Sequence
  Description of Artificial Sequence: Synthetic oligonucleotide
  Sense strand starting at position 104 SEQ ID NO: 3135
cccaaauugguuuggccua

SEQ ID NO: 243637 - RNA, 19 nt, Artificial Sequence
  Description of Artificial Sequence: Synthetic oligonucleotide
  Antisense strand to SEQ ID NO: 243636
uaggccaaaccaauuuggg

SEQ ID NO: 243638 - RNA, 19 nt, Artificial Sequence
  Description of Artificial Sequence: Synthetic oligonucleotide
  Sense strand starting at position 109 SEQ ID NO: 3135
auugguuuggccuaguuga

SEQ ID NO: 243639 - RNA, 19 nt, Artificial Sequence
  Description of Artificial Sequence: Synthetic oligonucleotide
  Antisense strand to SEQ ID NO: 243638
ucaacuaggccaaaccaau

SEQ ID NO: 243640 - RNA, 19 nt, Artificial Sequence
  Description of Artificial Sequence: Synthetic oligonucleotide
  Sense strand starting at position 168 SEQ ID NO: 3135
accaacguucuuggaagaa

SEQ ID NO: 243641 - RNA, 19 nt, Artificial Sequence
  Description of Artificial Sequence: Synthetic oligonucleotide
  Antisense strand to SEQ ID NO: 243640
uucuuccaagaacguuggu

SEQ ID NO: 243642 - RNA, 19 nt, Artificial Sequence
  Description of Artificial Sequence: Synthetic oligonucleotide
  Sense strand starting at position 172 SEQ ID NO: 3135
acguucuuggaagaauauc

SEQ ID NO: 243643 - RNA, 19 nt, Artificial Sequence
  Description of Artificial Sequence: Synthetic oligonucleotide
  Antisense strand to SEQ ID NO: 243642
gauauucuuccaagaacgu

SEQ ID NO: 243644 - RNA, 19 nt, Artificial Sequence
  Description of Artificial Sequence: Synthetic oligonucleotide
  Sense strand starting at position 271 SEQ ID NO: 3135
accaguuggucaucuugga

SEQ ID NO: 243645 - RNA, 19 nt, Artificial Sequence
  Description of Artificial Sequence: Synthetic oligonucleotide
  Antisense strand to SEQ ID NO: 243644
uccaagaugaccaacuggu

SEQ ID NO: 243646 - RNA, 19 nt, Artificial Sequence
  Description of Artificial Sequence: Synthetic oligonucleotide
  Sense strand starting at position 275 SEQ ID NO: 3135
guuggucaucuuggaccaa

SEQ ID NO: 243647 - RNA, 19 nt, Artificial Sequence
  Description of Artificial Sequence: Synthetic oligonucleotide
  Antisense strand to SEQ ID NO: 243646
uugguccaagaugaccaac

SEQ ID NO: 243648 - RNA, 19 nt, Artificial Sequence
  Description of Artificial Sequence: Synthetic oligonucleotide
  Sense strand starting at position 406 SEQ ID NO: 3135
uauggaacguucuucccua

SEQ ID NO: 243649 - RNA, 19 nt, Artificial Sequence
  Description of Artificial Sequence: Synthetic oligonucleotide
  Antisense strand to SEQ ID NO: 243648
uagggaagaacguuccaua

SEQ ID NO: 243650 - RNA, 19 nt, Artificial Sequence
  Description of Artificial Sequence: Synthetic oligonucleotide
  Sense strand starting at position 462 SEQ ID NO: 3135
cuugaaaucuccgcucaag

SEQ ID NO: 243651 - RNA, 19 nt, Artificial Sequence
  Description of Artificial Sequence: Synthetic oligonucleotide
  Antisense strand to SEQ ID NO: 243650
cuugagcggagauuucaag

SEQ ID NO: 243652 - RNA, 19 nt, Artificial Sequence
  Description of Artificial Sequence: Synthetic oligonucleotide
  Sense strand starting at position 482 SEQ ID NO: 3135
gccacuugcacaggaaaga

SEQ ID NO: 243653 - RNA, 19 nt, Artificial Sequence
  Description of Artificial Sequence: Synthetic oligonucleotide
  Antisense strand to SEQ ID NO: 243652
ucuuuccugugcaaguggc

SEQ ID NO: 243654 - RNA, 19 nt, Artificial Sequence
  Description of Artificial Sequence: Synthetic oligonucleotide
  Sense strand starting at position 735 SEQ ID NO: 3135
ugcucaaugcuacaugagu

SEQ ID NO: 243655 - RNA, 19 nt, Artificial Sequence
  Description of Artificial Sequence: Synthetic oligonucleotide
  Antisense strand to SEQ ID NO: 243654
acucauguagcauugagca

SEQ ID NO: 243656 - RNA, 19 nt, Artificial Sequence
  Description of Artificial Sequence: Synthetic oligonucleotide
  Sense strand starting at position 1129 SEQ ID NO: 3135
uagggcucagugugaaaga

SEQ ID NO: 243657 - RNA, 19 nt, Artificial Sequence
  Description of Artificial Sequence: Synthetic oligonucleotide
  Antisense strand to SEQ ID NO: 243656
ucuuucacacugagcccua

SEQ ID NO: 243658 - RNA, 19 nt, Artificial Sequence
  Description of Artificial Sequence: Synthetic oligonucleotide
  Sense strand starting at position 1186 SEQ ID NO: 3135
agcagaaacacguguauua

SEQ ID NO: 243659 - RNA, 19 nt, Artificial Sequence
  Description of Artificial Sequence: Synthetic oligonucleotide
  Antisense strand to SEQ ID NO: 243658
uaauacacguguuucugcu

SEQ ID NO: 243660 - RNA, 19 nt, Artificial Sequence
  Description of Artificial Sequence: Synthetic oligonucleotide
  Sense strand starting at position 1188 SEQ ID NO: 3135
cagaaacacguguauuaac

SEQ ID NO: 243661 - RNA, 19 nt, Artificial Sequence
  Description of Artificial Sequence: Synthetic oligonucleotide
  Antisense strand to SEQ ID NO: 243660
guuaauacacguguuucug

SEQ ID NO: 243662 - RNA, 19 nt, Artificial Sequence
  Description of Artificial Sequence: Synthetic oligonucleotide
  Sense strand starting at position 1237 SEQ ID NO: 3135
ccauauagagucugcuaua

SEQ ID NO: 243663 - RNA, 19 nt, Artificial Sequence
  Description of Artificial Sequence: Synthetic oligonucleotide
  Antisense strand to SEQ ID NO: 243662
uauagcagacucuauaugg

SEQ ID NO: 243664 - RNA, 19 nt, Artificial Sequence
  Description of Artificial Sequence: Synthetic oligonucleotide
  Sense strand starting at position 1358 SEQ ID NO: 3135
uagggugaacucugauacu

SEQ ID NO: 243665 - RNA, 19 nt, Artificial Sequence
  Description of Artificial Sequence: Synthetic oligonucleotide
  Antisense strand to SEQ ID NO: 243664
aguaucagaguucacccua

SEQ ID NO: 243666 - RNA, 19 nt, Artificial Sequence
  Description of Artificial Sequence: Synthetic oligonucleotide
  Sense strand starting at position 1367 SEQ ID NO: 3135
cucugauacuuagugucaa

SEQ ID NO: 243667 - RNA, 19 nt, Artificial Sequence
  Description of Artificial Sequence: Synthetic oligonucleotide
  Antisense strand to SEQ ID NO: 243666
uugacacuaaguaucagag

SEQ ID NO: 243668 - RNA, 19 nt, Artificial Sequence
  Description of Artificial Sequence: Synthetic oligonucleotide
  Sense strand starting at position 1504 SEQ ID NO: 3135
guccaaaugccagagcuau

SEQ ID NO: 243669 - RNA, 19 nt, Artificial Sequence
  Description of Artificial Sequence: Synthetic oligonucleotide
  Antisense strand to SEQ ID NO: 243668
auagcucuggcauuuggac

SEQ ID NO: 243670 - RNA, 19 nt, Artificial Sequence
  Description of Artificial Sequence: Synthetic oligonucleotide
  Sense strand starting at position 1636 SEQ ID NO: 3135
auuuaauggucugaugaaa

SEQ ID NO: 243671 - RNA, 19 nt, Artificial Sequence
  Description of Artificial Sequence: Synthetic oligonucleotide
  Antisense strand to SEQ ID NO: 243670
uuucaucagaccauuaaau

SEQ ID NO: 243672 - RNA, 19 nt, Artificial Sequence
  Description of Artificial Sequence: Synthetic oligonucleotide
  Sense strand starting at position 1740 SEQ ID NO: 3135
uggccauauccugaaacua

SEQ ID NO: 243673 - RNA, 19 nt, Artificial Sequence
  Description of Artificial Sequence: Synthetic oligonucleotide
  Antisense strand to SEQ ID NO: 243672
uaguuucaggauauggcca

SEQ ID NO: 243674 - RNA, 19 nt, Artificial Sequence
  Description of Artificial Sequence: Synthetic oligonucleotide
  Sense strand starting at position 2048 SEQ ID NO: 3135
uguagugucacgcuuacca

SEQ ID NO: 243675 - RNA, 19 nt, Artificial Sequence
  Description of Artificial Sequence: Synthetic oligonucleotide
  Antisense strand to SEQ ID NO: 243674
ugguaagcgugacacuaca

SEQ ID NO: 243676 - RNA, 19 nt, Artificial Sequence
  Description of Artificial Sequence: Synthetic oligonucleotide
  Sense strand starting at position 2102 SEQ ID NO: 3135
ggcuauaugaaaggcauua

SEQ ID NO: 243677 - RNA, 19 nt, Artificial Sequence
  Description of Artificial Sequence: Synthetic oligonucleotide
  Antisense strand to SEQ ID NO: 243676
uaaugccuuucauauagcc

SEQ ID NO: 243678 - RNA, 19 nt, Artificial Sequence
  Description of Artificial Sequence: Synthetic oligonucleotide
  Sense strand starting at position 2114 SEQ ID NO: 3135
ggcauuauugcuuaugaca

SEQ ID NO: 243679 - RNA, 19 nt, Artificial Sequence
  Description of Artificial Sequence: Synthetic oligonucleotide
  Antisense strand to SEQ ID NO: 243678
ugucauaagcaauaaugcc

SEQ ID NO: 243680 - RNA, 19 nt, Artificial Sequence
  Description of Artificial Sequence: Synthetic oligonucleotide
  Sense strand starting at position 2122 SEQ ID NO: 3135
ugcuuaugacaugaguuaa

SEQ ID NO: 243681 - RNA, 19 nt, Artificial Sequence
  Description of Artificial Sequence: Synthetic oligonucleotide
  Antisense strand to SEQ ID NO: 243680
uuaacucaugucauaagca

SEQ ID NO: 243682 - RNA, 19 nt, Artificial Sequence
  Description of Artificial Sequence: Synthetic oligonucleotide
  Sense strand starting at position 2137 SEQ ID NO: 3135
uuaaacaaugcauggauua

SEQ ID NO: 243683 - RNA, 19 nt, Artificial Sequence
  Description of Artificial Sequence: Synthetic oligonucleotide
  Antisense strand to SEQ ID NO: 243682
uaauccaugcauuguuuaa

SEQ ID NO: 243684 - RNA, 19 nt, Artificial Sequence
  Description of Artificial Sequence: Synthetic oligonucleotide
  Sense strand starting at position 2215 SEQ ID NO: 3135
uaaagagauuaugccugua

SEQ ID NO: 243685 - RNA, 19 nt, Artificial Sequence
  Description of Artificial Sequence: Synthetic oligonucleotide
  Antisense strand to SEQ ID NO: 243684
uacaggcauaaucucuuua

SEQ ID NO: 243686 - RNA, 19 nt, Artificial Sequence
  Description of Artificial Sequence: Synthetic oligonucleotide
  Sense strand starting at position 2217 SEQ ID NO: 3135
aagagauuaugccuguauu

SEQ ID NO: 243687 - RNA, 19 nt, Artificial Sequence
  Description of Artificial Sequence: Synthetic oligonucleotide
  Antisense strand to SEQ ID NO: 243686
aauacaggcauaaucucuu

SEQ ID NO: 243688 - RNA, 19 nt, Artificial Sequence
  Description of Artificial Sequence: Synthetic oligonucleotide
  Sense strand starting at position 2344 SEQ ID NO: 3135
cuaggugcuccagagauaa

SEQ ID NO: 243689 - RNA, 19 nt, Artificial Sequence
  Description of Artificial Sequence: Synthetic oligonucleotide
  Antisense strand to SEQ ID NO: 243688
uuaucucuggagcaccuag

SEQ ID NO: 243690 - RNA, 19 nt, Artificial Sequence
  Description of Artificial Sequence: Synthetic oligonucleotide
  Sense strand starting at position 2441 SEQ ID NO: 3135
auaggaaucugagaaauga

SEQ ID NO: 243691 - RNA, 19 nt, Artificial Sequence
  Description of Artificial Sequence: Synthetic oligonucleotide
  Antisense strand to SEQ ID NO: 243690
ucauuucucagauuccuau

SEQ ID NO: 243692 - RNA, 19 nt, Artificial Sequence
  Description of Artificial Sequence: Synthetic oligonucleotide
  Sense strand starting at position 2844 SEQ ID NO: 3135
aaugguuacuguuuguaua

SEQ ID NO: 243693 - RNA, 19 nt, Artificial Sequence
  Description of Artificial Sequence: Synthetic oligonucleotide
  Antisense strand to SEQ ID NO: 243692
uauacaaacaguaaccauu

SEQ ID NO: 243694 - RNA, 19 nt, Artificial Sequence
  Description of Artificial Sequence: Synthetic oligonucleotide
  Sense strand starting at position 3011 SEQ ID NO: 3135
gugucagugcuaugauuua

SEQ ID NO: 243695 - RNA, 19 nt, Artificial Sequence
  Description of Artificial Sequence: Synthetic oligonucleotide
  Antisense strand to SEQ ID NO: 243694
uaaaucauagcacugacac

SEQ ID NO: 243696 - RNA, 19 nt, Artificial Sequence
  Description of Artificial Sequence: Synthetic oligonucleotide
  Sense strand starting at position 3028 SEQ ID NO: 3135
uagagagucuggcuccaga

SEQ ID NO: 243697 - RNA, 19 nt, Artificial Sequence
  Description of Artificial Sequence: Synthetic oligonucleotide
  Antisense strand to SEQ ID NO: 243696
ucuggagccagacucucua

SEQ ID NO: 243698 - RNA, 19 nt, Artificial Sequence
  Description of Artificial Sequence: Synthetic oligonucleotide
  Sense strand starting at position 3154 SEQ ID NO: 3135
ucccuuagccugcagaaau

SEQ ID NO: 243699 - RNA, 19 nt, Artificial Sequence
  Description of Artificial Sequence: Synthetic oligonucleotide
  Antisense strand to SEQ ID NO: 243698
auuucugcaggcuaaggga

SEQ ID NO: 243700 - RNA, 19 nt, Artificial Sequence
  Description of Artificial Sequence: Synthetic oligonucleotide
  Sense strand starting at position 3678 SEQ ID NO: 3135
ucauaaguucuagagcuca

SEQ ID NO: 243701 - RNA, 19 nt, Artificial Sequence
  Description of Artificial Sequence: Synthetic oligonucleotide
  Antisense strand to SEQ ID NO: 243700
ugagcucuagaacuuauga

SEQ ID NO: 243702 - RNA, 19 nt, Artificial Sequence
  Description of Artificial Sequence: Synthetic oligonucleotide
  Sense strand starting at position 3696 SEQ ID NO: 3135
agggcuguugcacagagaa

SEQ ID NO: 243703 - RNA, 19 nt, Artificial Sequence
  Description of Artificial Sequence: Synthetic oligonucleotide
  Antisense strand to SEQ ID NO: 243702
uucucugugcaacagcccu

SEQ ID NO: 243704 - RNA, 19 nt, Artificial Sequence
  Description of Artificial Sequence: Synthetic oligonucleotide
  Sense strand starting at position 3820 SEQ ID NO: 3135
gagggagagucuguuacuu

SEQ ID NO: 243705 - RNA, 19 nt, Artificial Sequence
  Description of Artificial Sequence: Synthetic oligonucleotide
  Antisense strand to SEQ ID NO: 243704
aaguaacagacucucccuc

SEQ ID NO: 243706 - RNA, 19 nt, Artificial Sequence
  Description of Artificial Sequence: Synthetic oligonucleotide
  Sense strand starting at position 3824 SEQ ID NO: 3135
gagagucuguuacuuauuc

SEQ ID NO: 243707 - RNA, 19 nt, Artificial Sequence
  Description of Artificial Sequence: Synthetic oligonucleotide
  Antisense strand to SEQ ID NO: 243706
gaauaaguaacagacucuc

SEQ ID NO: 243708 - RNA, 19 nt, Artificial Sequence
  Description of Artificial Sequence: Synthetic oligonucleotide
  Sense strand starting at position 3825 SEQ ID NO: 3135
agagucuguuacuuauucu

SEQ ID NO: 243709 - RNA, 19 nt, Artificial Sequence
  Description of Artificial Sequence: Synthetic oligonucleotide
  Antisense strand to SEQ ID NO: 243708
agaauaaguaacagacucu

SEQ ID NO: 243710 - RNA, 19 nt, Artificial Sequence
  Description of Artificial Sequence: Synthetic oligonucleotide
  Sense strand starting at position 3881 SEQ ID NO: 3135
cagucauuugcccggaguc

SEQ ID NO: 243711 - RNA, 19 nt, Artificial Sequence
  Description of Artificial Sequence: Synthetic oligonucleotide
  Antisense strand to SEQ ID NO: 243710
gacuccgggcaaaugacug

SEQ ID NO: 243712 - RNA, 19 nt, Artificial Sequence
  Description of Artificial Sequence: Synthetic oligonucleotide
  Sense strand starting at position 3882 SEQ ID NO: 3135
agucauuugcccggaguca

SEQ ID NO: 243713 - RNA, 19 nt, Artificial Sequence
  Description of Artificial Sequence: Synthetic oligonucleotide
  Antisense strand to SEQ ID NO: 243712
ugacuccgggcaaaugacu

SEQ ID NO: 243714 - RNA, 19 nt, Artificial Sequence
  Description of Artificial Sequence: Synthetic oligonucleotide
  Sense strand starting at position 314 SEQ ID NO: 3136
gggagaaaggcauguuuaa

SEQ ID NO: 243715 - RNA, 19 nt, Artificial Sequence
  Description of Artificial Sequence: Synthetic oligonucleotide
  Antisense strand to SEQ ID NO: 243714
uuaaacaugccuuucuccc

SEQ ID NO: 243716 - RNA, 19 nt, Artificial Sequence
  Description of Artificial Sequence: Synthetic oligonucleotide
  Sense strand starting at position 323 SEQ ID NO: 3136
gcauguuuaagagaaugua

SEQ ID NO: 243717 - RNA, 19 nt, Artificial Sequence
  Description of Artificial Sequence: Synthetic oligonucleotide
  Antisense strand to SEQ ID NO: 243716
uacauucucuuaaacaugc

SEQ ID NO: 243718 - RNA, 19 nt, Artificial Sequence
  Description of Artificial Sequence: Synthetic oligonucleotide
  Sense strand starting at position 554 SEQ ID NO: 3136
gccagucugcuucucguaa

SEQ ID NO: 243719 - RNA, 19 nt, Artificial Sequence
  Description of Artificial Sequence: Synthetic oligonucleotide
  Antisense strand to SEQ ID NO: 243718
uuacgagaagcagacuggc

SEQ ID NO: 243720 - RNA, 19 nt, Artificial Sequence
  Description of Artificial Sequence: Synthetic oligonucleotide
  Sense strand starting at position 707 SEQ ID NO: 3136
gaggaucacuauggaauuu

SEQ ID NO: 243721 - RNA, 19 nt, Artificial Sequence
  Description of Artificial Sequence: Synthetic oligonucleotide
  Antisense strand to SEQ ID NO: 243720
aaauuccauagugauccuc

SEQ ID NO: 243722 - RNA, 19 nt, Artificial Sequence
  Description of Artificial Sequence: Synthetic oligonucleotide
  Sense strand starting at position 730 SEQ ID NO: 3136
cgguaagauuaauuacagu

SEQ ID NO: 243723 - RNA, 19 nt, Artificial Sequence
  Description of Artificial Sequence: Synthetic oligonucleotide
  Antisense strand to SEQ ID NO: 243722
acuguaauuaaucuuaccg

SEQ ID NO: 243724 - RNA, 19 nt, Artificial Sequence
  Description of Artificial Sequence: Synthetic oligonucleotide
  Sense strand starting at position 736 SEQ ID NO: 3136
gauuaauuacaguggaggu

SEQ ID NO: 243725 - RNA, 19 nt, Artificial Sequence
  Description of Artificial Sequence: Synthetic oligonucleotide
  Antisense strand to SEQ ID NO: 243724
accuccacuguaauuaauc

SEQ ID NO: 243726 - RNA, 19 nt, Artificial Sequence
  Description of Artificial Sequence: Synthetic oligonucleotide
  Sense strand starting at position 751 SEQ ID NO: 3136
agguuaguaccucauagua

SEQ ID NO: 243727 - RNA, 19 nt, Artificial Sequence
  Description of Artificial Sequence: Synthetic oligonucleotide
  Antisense strand to SEQ ID NO: 243726
uacuaugagguacuaaccu

SEQ ID NO: 243728 - RNA, 19 nt, Artificial Sequence
  Description of Artificial Sequence: Synthetic oligonucleotide
  Sense strand starting at position 772 SEQ ID NO: 3136
agaggacucguaggaagau

SEQ ID NO: 243729 - RNA, 19 nt, Artificial Sequence
  Description of Artificial Sequence: Synthetic oligonucleotide
  Antisense strand to SEQ ID NO: 243728
aucuuccuacgaguccucu

SEQ ID NO: 243730 - RNA, 19 nt, Artificial Sequence
  Description of Artificial Sequence: Synthetic oligonucleotide
  Sense strand starting at position 782 SEQ ID NO: 3136
uaggaagauccagggcauu

SEQ ID NO: 243731 - RNA, 19 nt, Artificial Sequence
  Description of Artificial Sequence: Synthetic oligonucleotide
  Antisense strand to SEQ ID NO: 243730
aaugcccuggaucuuccua

SEQ ID NO: 243732 - RNA, 19 nt, Artificial Sequence
  Description of Artificial Sequence: Synthetic oligonucleotide
  Sense strand starting at position 835 SEQ ID NO: 3136
gccgccuucguaguaaguu

SEQ ID NO: 243733 - RNA, 19 nt, Artificial Sequence
  Description of Artificial Sequence: Synthetic oligonucleotide
  Antisense strand to SEQ ID NO: 243732
aacuuacuacgaaggcggc

SEQ ID NO: 243734 - RNA, 19 nt, Artificial Sequence
  Description of Artificial Sequence: Synthetic oligonucleotide
  Sense strand starting at position 887 SEQ ID NO: 3136
ugugaucucgagcacccaa

SEQ ID NO: 243735 - RNA, 19 nt, Artificial Sequence
  Description of Artificial Sequence: Synthetic oligonucleotide
  Antisense strand to SEQ ID NO: 243734
uugggugcucgagaucaca

SEQ ID NO: 243736 - RNA, 19 nt, Artificial Sequence
  Description of Artificial Sequence: Synthetic oligonucleotide
  Sense strand starting at position 923 SEQ ID NO: 3136
ugucuagugagacaaugua

SEQ ID NO: 243737 - RNA, 19 nt, Artificial Sequence
  Description of Artificial Sequence: Synthetic oligonucleotide
  Antisense strand to SEQ ID NO: 243736
uacauugucucacuagaca

SEQ ID NO: 243738 - RNA, 19 nt, Artificial Sequence
  Description of Artificial Sequence: Synthetic oligonucleotide
  Sense strand starting at position 935 SEQ ID NO: 3136
caauguaguacggguaaca

SEQ ID NO: 243739 - RNA, 19 nt, Artificial Sequence
  Description of Artificial Sequence: Synthetic oligonucleotide
  Antisense strand to SEQ ID NO: 243738
uguuacccguacuacauug

SEQ ID NO: 243740 - RNA, 19 nt, Artificial Sequence
  Description of Artificial Sequence: Synthetic oligonucleotide
  Sense strand starting at position 946 SEQ ID NO: 3136
ggguaacaccgcgaaguaa

SEQ ID NO: 243741 - RNA, 19 nt, Artificial Sequence
  Description of Artificial Sequence: Synthetic oligonucleotide
  Antisense strand to SEQ ID NO: 243740
uuacuucgcgguguuaccc

SEQ ID NO: 243742 - RNA, 19 nt, Artificial Sequence
  Description of Artificial Sequence: Synthetic oligonucleotide
  Sense strand starting at position 1155 SEQ ID NO: 3136
ggauaaagaguacgagguu

SEQ ID NO: 243743 - RNA, 19 nt, Artificial Sequence
  Description of Artificial Sequence: Synthetic oligonucleotide
  Antisense strand to SEQ ID NO: 243742
aaccucguacucuuuaucc

SEQ ID NO: 243744 - RNA, 19 nt, Artificial Sequence
  Description of Artificial Sequence: Synthetic oligonucleotide
  Sense strand starting at position 1169 SEQ ID NO: 3136
agguuaagacaauguuaag

SEQ ID NO: 243745 - RNA, 19 nt, Artificial Sequence
  Description of Artificial Sequence: Synthetic oligonucleotide
  Antisense strand to SEQ ID NO: 243744
cuuaacauugucuuaaccu

SEQ ID NO: 243746 - RNA, 19 nt, Artificial Sequence
  Description of Artificial Sequence: Synthetic oligonucleotide
  Sense strand starting at position 1246 SEQ ID NO: 3136
auuaaacacguuuauggua

SEQ ID NO: 243747 - RNA, 19 nt, Artificial Sequence
  Description of Artificial Sequence: Synthetic oligonucleotide
  Antisense strand to SEQ ID NO: 243746
uaccauaaacguguuuaau

SEQ ID NO: 243748 - RNA, 19 nt, Artificial Sequence
  Description of Artificial Sequence: Synthetic oligonucleotide
  Sense strand starting at position 1336 SEQ ID NO: 3136
acagcagauucugaagaaa

SEQ ID NO: 243749 - RNA, 19 nt, Artificial Sequence
  Description of Artificial Sequence: Synthetic oligonucleotide
  Antisense strand to SEQ ID NO: 243748
uuucuucagaaucugcugu

SEQ ID NO: 243750 - RNA, 19 nt, Artificial Sequence
  Description of Artificial Sequence: Synthetic oligonucleotide
  Sense strand starting at position 1359 SEQ ID NO: 3136
aguuaaauagcucauacga

SEQ ID NO: 243751 - RNA, 19 nt, Artificial Sequence
  Description of Artificial Sequence: Synthetic oligonucleotide
  Antisense strand to SEQ ID NO: 243750
ucguaugagcuauuuaacu

SEQ ID NO: 243752 - RNA, 19 nt, Artificial Sequence
  Description of Artificial Sequence: Synthetic oligonucleotide
  Sense strand starting at position 2562 SEQ ID NO: 3136
uuagguugucacugaagag

SEQ ID NO: 243753 - RNA, 19 nt, Artificial Sequence
  Description of Artificial Sequence: Synthetic oligonucleotide
  Antisense strand to SEQ ID NO: 243752
cucuucagugacaaccuaa

SEQ ID NO: 243754 - RNA, 19 nt, Artificial Sequence
  Description of Artificial Sequence: Synthetic oligonucleotide
  Sense strand starting at position 2563 SEQ ID NO: 3136
uagguugucacugaagagu

SEQ ID NO: 243755 - RNA, 19 nt, Artificial Sequence
  Description of Artificial Sequence: Synthetic oligonucleotide
  Antisense strand to SEQ ID NO: 243754
acucuucagugacaaccua

SEQ ID NO: 243756 - RNA, 19 nt, Artificial Sequence
  Description of Artificial Sequence: Synthetic oligonucleotide
  Sense strand starting at position 2576 SEQ ID NO: 3136
aagagucacguuuguagag

SEQ ID NO: 243757 - RNA, 19 nt, Artificial Sequence
  Description of Artificial Sequence: Synthetic oligonucleotide
  Antisense strand to SEQ ID NO: 243756
cucuacaaacgugacucuu

SEQ ID NO: 243758 - RNA, 19 nt, Artificial Sequence
  Description of Artificial Sequence: Synthetic oligonucleotide
  Sense strand starting at position 2704 SEQ ID NO: 3136
gaggcauuacuguaaacuc

SEQ ID NO: 243759 - RNA, 19 nt, Artificial Sequence
  Description of Artificial Sequence: Synthetic oligonucleotide
  Antisense strand to SEQ ID NO: 243758
gaguuuacaguaaugccuc

SEQ ID NO: 243760 - RNA, 19 nt, Artificial Sequence
  Description of Artificial Sequence: Synthetic oligonucleotide
  Sense strand starting at position 2825 SEQ ID NO: 3136
ggcuauuauaaugaucgua

SEQ ID NO: 243761 - RNA, 19 nt, Artificial Sequence
  Description of Artificial Sequence: Synthetic oligonucleotide
  Antisense strand to SEQ ID NO: 243760
uacgaucauuauaauagcc

SEQ ID NO: 243762 - RNA, 19 nt, Artificial Sequence
  Description of Artificial Sequence: Synthetic oligonucleotide
  Sense strand starting at position 2838 SEQ ID NO: 3136
aucguauuaaucggaaaua

SEQ ID NO: 243763 - RNA, 19 nt, Artificial Sequence
  Description of Artificial Sequence: Synthetic oligonucleotide
  Antisense strand to SEQ ID NO: 243762
uauuuccgauuaauacgau

SEQ ID NO: 243764 - RNA, 19 nt, Artificial Sequence
  Description of Artificial Sequence: Synthetic oligonucleotide
  Sense strand starting at position 2850 SEQ ID NO: 3136
ggaaauaauuaggagaauu

SEQ ID NO: 243765 - RNA, 19 nt, Artificial Sequence
  Description of Artificial Sequence: Synthetic oligonucleotide
  Antisense strand to SEQ ID NO: 243764
aauucuccuaauuauuucc

SEQ ID NO: 243766 - RNA, 19 nt, Artificial Sequence
  Description of Artificial Sequence: Synthetic oligonucleotide
  Sense strand starting at position 2938 SEQ ID NO: 3136
ggcaaaguaaugugauuaa

SEQ ID NO: 243767 - RNA, 19 nt, Artificial Sequence
  Description of Artificial Sequence: Synthetic oligonucleotide
  Antisense strand to SEQ ID NO: 243766
uuaaucacauuacuuugcc

SEQ ID NO: 243768 - RNA, 19 nt, Artificial Sequence
  Description of Artificial Sequence: Synthetic oligonucleotide
  Sense strand starting at position 2949 SEQ ID NO: 3136
gugauuaauuaugcacuaa

SEQ ID NO: 243769 - RNA, 19 nt, Artificial Sequence
  Description of Artificial Sequence: Synthetic oligonucleotide
  Antisense strand to SEQ ID NO: 243768
uuagugcauaauuaaucac

SEQ ID NO: 243770 - RNA, 19 nt, Artificial Sequence
  Description of Artificial Sequence: Synthetic oligonucleotide
  Sense strand starting at position 3005 SEQ ID NO: 3136
guuccaaagcuuugugaca

SEQ ID NO: 243771 - RNA, 19 nt, Artificial Sequence
  Description of Artificial Sequence: Synthetic oligonucleotide
  Antisense strand to SEQ ID NO: 243770
ugucacaaagcuuuggaac

SEQ ID NO: 243772 - RNA, 19 nt, Artificial Sequence
  Description of Artificial Sequence: Synthetic oligonucleotide
  Sense strand starting at position 3012 SEQ ID NO: 3136
agcuuugugacagauaggu

SEQ ID NO: 243773 - RNA, 19 nt, Artificial Sequence
  Description of Artificial Sequence: Synthetic oligonucleotide
  Antisense strand to SEQ ID NO: 243772
accuaucugucacaaagcu

SEQ ID NO: 243774 - RNA, 19 nt, Artificial Sequence
  Description of Artificial Sequence: Synthetic oligonucleotide
  Sense strand starting at position 3031 SEQ ID NO: 3136
ggcccuagccauugauaga

SEQ ID NO: 243775 - RNA, 19 nt, Artificial Sequence
  Description of Artificial Sequence: Synthetic oligonucleotide
  Antisense strand to SEQ ID NO: 243774
ucuaucaauggcuagggcc

SEQ ID NO: 243776 - RNA, 19 nt, Artificial Sequence
  Description of Artificial Sequence: Synthetic oligonucleotide
  Sense strand starting at position 3082 SEQ ID NO: 3136
ucauaugagguuuggaauc

SEQ ID NO: 243777 - RNA, 19 nt, Artificial Sequence
  Description of Artificial Sequence: Synthetic oligonucleotide
  Antisense strand to SEQ ID NO: 243776
gauuccaaaccucauauga

SEQ ID NO: 243778 - RNA, 19 nt, Artificial Sequence
  Description of Artificial Sequence: Synthetic oligonucleotide
  Sense strand starting at position 3199 SEQ ID NO: 3136
guuugcagcuauuuacuua

SEQ ID NO: 243779 - RNA, 19 nt, Artificial Sequence
  Description of Artificial Sequence: Synthetic oligonucleotide
  Antisense strand to SEQ ID NO: 243778
uaaguaaauagcugcaaac

SEQ ID NO: 243780 - RNA, 19 nt, Artificial Sequence
  Description of Artificial Sequence: Synthetic oligonucleotide
  Sense strand starting at position 3238 SEQ ID NO: 3136
auuguagcuuaucuagaau

SEQ ID NO: 243781 - RNA, 19 nt, Artificial Sequence
  Description of Artificial Sequence: Synthetic oligonucleotide
  Antisense strand to SEQ ID NO: 243780
auucuagauaagcuacaau

SEQ ID NO: 243782 - RNA, 19 nt, Artificial Sequence
  Description of Artificial Sequence: Synthetic oligonucleotide
  Sense strand starting at position 3241 SEQ ID NO: 3136
guagcuuaucuagaauucu

SEQ ID NO: 243783 - RNA, 19 nt, Artificial Sequence
  Description of Artificial Sequence: Synthetic oligonucleotide
  Antisense strand to SEQ ID NO: 243782
agaauucuagauaagcuac

SEQ ID NO: 243784 - RNA, 19 nt, Artificial Sequence
  Description of Artificial Sequence: Synthetic oligonucleotide
  Sense strand starting at position 3620 SEQ ID NO: 3136
gagguaaacuguuuccugu

SEQ ID NO: 243785 - RNA, 19 nt, Artificial Sequence
  Description of Artificial Sequence: Synthetic oligonucleotide
  Antisense strand to SEQ ID NO: 243784
acaggaaacaguuuaccuc

SEQ ID NO: 243786 - RNA, 19 nt, Artificial Sequence
  Description of Artificial Sequence: Synthetic oligonucleotide
  Sense strand starting at position 3727 SEQ ID NO: 3136
uucugauauuaagucugga

SEQ ID NO: 243787 - RNA, 19 nt, Artificial Sequence
  Description of Artificial Sequence: Synthetic oligonucleotide
  Antisense strand to SEQ ID NO: 243786
uccagacuuaauaucagaa

SEQ ID NO: 243788 - RNA, 19 nt, Artificial Sequence
  Description of Artificial Sequence: Synthetic oligonucleotide
  Sense strand starting at position 3730 SEQ ID NO: 3136
ugauauuaagucuggaagu

SEQ ID NO: 243789 - RNA, 19 nt, Artificial Sequence
  Description of Artificial Sequence: Synthetic oligonucleotide
  Antisense strand to SEQ ID NO: 243788
acuuccagacuuaauauca

SEQ ID NO: 243790 - RNA, 19 nt, Artificial Sequence
  Description of Artificial Sequence: Synthetic oligonucleotide
  Sense strand starting at position 3747 SEQ ID NO: 3136
gugauuuacuauccgaguc

SEQ ID NO: 243791 - RNA, 19 nt, Artificial Sequence
  Description of Artificial Sequence: Synthetic oligonucleotide
  Antisense strand to SEQ ID NO: 243790
gacucggauaguaaaucac

SEQ ID NO: 243792 - RNA, 19 nt, Artificial Sequence
  Description of Artificial Sequence: Synthetic oligonucleotide
  Sense strand starting at position 3798 SEQ ID NO: 3136
ugugcauguguuucuguca

SEQ ID NO: 243793 - RNA, 19 nt, Artificial Sequence
  Description of Artificial Sequence: Synthetic oligonucleotide
  Antisense strand to SEQ ID NO: 243792
ugacagaaacacaugcaca

SEQ ID NO: 243794 - RNA, 19 nt, Artificial Sequence
  Description of Artificial Sequence: Synthetic oligonucleotide
  Sense strand starting at position 42 SEQ ID NO: 3138
ggguaagcugcuagugagu

SEQ ID NO: 243795 - RNA, 19 nt, Artificial Sequence
  Description of Artificial Sequence: Synthetic oligonucleotide
  Antisense strand to SEQ ID NO: 243794
acucacuagcagcuuaccc

SEQ ID NO: 243796 - RNA, 19 nt, Artificial Sequence
  Description of Artificial Sequence: Synthetic oligonucleotide
  Sense strand starting at position 77 SEQ ID NO: 3138
ugcauuguccuaggaagac

SEQ ID NO: 243797 - RNA, 19 nt, Artificial Sequence
  Description of Artificial Sequence: Synthetic oligonucleotide
  Antisense strand to SEQ ID NO: 243796
gucuuccuaggacaaugca

SEQ ID NO: 243798 - RNA, 19 nt, Artificial Sequence
  Description of Artificial Sequence: Synthetic oligonucleotide
  Sense strand starting at position 425 SEQ ID NO: 3138
auguaaugauuaguagaca

SEQ ID NO: 243799 - RNA, 19 nt, Artificial Sequence
  Description of Artificial Sequence: Synthetic oligonucleotide
  Antisense strand to SEQ ID NO: 243798
ugucuacuaaucauuacau

SEQ ID NO: 243800 - RNA, 19 nt, Artificial Sequence
  Description of Artificial Sequence: Synthetic oligonucleotide
  Sense strand starting at position 458 SEQ ID NO: 3138
cuugacaagccuggaugua

SEQ ID NO: 243801 - RNA, 19 nt, Artificial Sequence
  Description of Artificial Sequence: Synthetic oligonucleotide
  Antisense strand to SEQ ID NO: 243800
uacauccaggcuugucaag

SEQ ID NO: 243802 - RNA, 19 nt, Artificial Sequence
  Description of Artificial Sequence: Synthetic oligonucleotide
  Sense strand starting at position 459 SEQ ID NO: 3138
uugacaagccuggauguau

SEQ ID NO: 243803 - RNA, 19 nt, Artificial Sequence
  Description of Artificial Sequence: Synthetic oligonucleotide
  Antisense strand to SEQ ID NO: 243802
auacauccaggcuugucaa

SEQ ID NO: 243804 - RNA, 19 nt, Artificial Sequence
  Description of Artificial Sequence: Synthetic oligonucleotide
  Sense strand starting at position 511 SEQ ID NO: 3138
uucgcaauucuagaauucu

SEQ ID NO: 243805 - RNA, 19 nt, Artificial Sequence
  Description of Artificial Sequence: Synthetic oligonucleotide
  Antisense strand to SEQ ID NO: 243804
agaauucuagaauugcgaa

SEQ ID NO: 243806 - RNA, 19 nt, Artificial Sequence
  Description of Artificial Sequence: Synthetic oligonucleotide
  Sense strand starting at position 531 SEQ ID NO: 3138
cuuacuaguguuuaggaga

SEQ ID NO: 243807 - RNA, 19 nt, Artificial Sequence
  Description of Artificial Sequence: Synthetic oligonucleotide
  Antisense strand to SEQ ID NO: 243806
ucuccuaaacacuaguaag

SEQ ID NO: 243808 - RNA, 19 nt, Artificial Sequence
  Description of Artificial Sequence: Synthetic oligonucleotide
  Sense strand starting at position 596 SEQ ID NO: 3138
aacagaaugguguggauga

SEQ ID NO: 243809 - RNA, 19 nt, Artificial Sequence
  Description of Artificial Sequence: Synthetic oligonucleotide
  Antisense strand to SEQ ID NO: 243808
ucauccacaccauucuguu

SEQ ID NO: 243810 - RNA, 19 nt, Artificial Sequence
  Description of Artificial Sequence: Synthetic oligonucleotide
  Sense strand starting at position 598 SEQ ID NO: 3138
cagaaugguguggaugagu

SEQ ID NO: 243811 - RNA, 19 nt, Artificial Sequence
  Description of Artificial Sequence: Synthetic oligonucleotide
  Antisense strand to SEQ ID NO: 243810
acucauccacaccauucug

SEQ ID NO: 243812 - RNA, 19 nt, Artificial Sequence
  Description of Artificial Sequence: Synthetic oligonucleotide
  Sense strand starting at position 601 SEQ ID NO: 3138
aaugguguggaugagucaa

SEQ ID NO: 243813 - RNA, 19 nt, Artificial Sequence
  Description of Artificial Sequence: Synthetic oligonucleotide
  Antisense strand to SEQ ID NO: 243812
uugacucauccacaccauu

SEQ ID NO: 243814 - RNA, 19 nt, Artificial Sequence
  Description of Artificial Sequence: Synthetic oligonucleotide
  Sense strand starting at position 603 SEQ ID NO: 3138
ugguguggaugagucaauu

SEQ ID NO: 243815 - RNA, 19 nt, Artificial Sequence
  Description of Artificial Sequence: Synthetic oligonucleotide
  Antisense strand to SEQ ID NO: 243814
aauugacucauccacacca

SEQ ID NO: 243816 - RNA, 19 nt, Artificial Sequence
  Description of Artificial Sequence: Synthetic oligonucleotide
  Sense strand starting at position 743 SEQ ID NO: 3138
gaacuuaucugguuccuga

SEQ ID NO: 243817 - RNA, 19 nt, Artificial Sequence
  Description of Artificial Sequence: Synthetic oligonucleotide
  Antisense strand to SEQ ID NO: 243816
ucaggaaccagauaaguuc

SEQ ID NO: 243818 - RNA, 19 nt, Artificial Sequence
  Description of Artificial Sequence: Synthetic oligonucleotide
  Sense strand starting at position 746 SEQ ID NO: 3138
cuuaucugguuccugauaa

SEQ ID NO: 243819 - RNA, 19 nt, Artificial Sequence
  Description of Artificial Sequence: Synthetic oligonucleotide
  Antisense strand to SEQ ID NO: 243818
uuaucaggaaccagauaag

SEQ ID NO: 243820 - RNA, 19 nt, Artificial Sequence
  Description of Artificial Sequence: Synthetic oligonucleotide
  Sense strand starting at position 775 SEQ ID NO: 3138
uggccaugucccuauauag

SEQ ID NO: 243821 - RNA, 19 nt, Artificial Sequence
  Description of Artificial Sequence: Synthetic oligonucleotide
  Antisense strand to SEQ ID NO: 243820
cuauauagggacauggcca

SEQ ID NO: 243822 - RNA, 19 nt, Artificial Sequence
  Description of Artificial Sequence: Synthetic oligonucleotide
  Sense strand starting at position 784 SEQ ID NO: 3138
cccuauauaguaugaugca

SEQ ID NO: 243823 - RNA, 19 nt, Artificial Sequence
  Description of Artificial Sequence: Synthetic oligonucleotide
  Antisense strand to SEQ ID NO: 243822
ugcaucauacuauauaggg

SEQ ID NO: 243824 - RNA, 19 nt, Artificial Sequence
  Description of Artificial Sequence: Synthetic oligonucleotide
  Sense strand starting at position 804 SEQ ID NO: 3138
cagucaugacauggcaauu

SEQ ID NO: 243825 - RNA, 19 nt, Artificial Sequence
  Description of Artificial Sequence: Synthetic oligonucleotide
  Antisense strand to SEQ ID NO: 243824
aauugccaugucaugacug

SEQ ID NO: 243826 - RNA, 19 nt, Artificial Sequence
  Description of Artificial Sequence: Synthetic oligonucleotide
  Sense strand starting at position 821 SEQ ID NO: 3138
uuuauucuugauggcaaau

SEQ ID NO: 243827 - RNA, 19 nt, Artificial Sequence
  Description of Artificial Sequence: Synthetic oligonucleotide
  Antisense strand to SEQ ID NO: 243826
auuugccaucaagaauaaa

SEQ ID NO: 243828 - RNA, 19 nt, Artificial Sequence
  Description of Artificial Sequence: Synthetic oligonucleotide
  Sense strand starting at position 1045 SEQ ID NO: 3138
uuguuacuaccauguggaa

SEQ ID NO: 243829 - RNA, 19 nt, Artificial Sequence
  Description of Artificial Sequence: Synthetic oligonucleotide
  Antisense strand to SEQ ID NO: 243828
uuccacaugguaguaacaa

SEQ ID NO: 243830 - RNA, 19 nt, Artificial Sequence
  Description of Artificial Sequence: Synthetic oligonucleotide
  Sense strand starting at position 1057 SEQ ID NO: 3138
uguggaacauaauuguauu

SEQ ID NO: 243831 - RNA, 19 nt, Artificial Sequence
  Description of Artificial Sequence: Synthetic oligonucleotide
  Antisense strand to SEQ ID NO: 243830
aauacaauuauguuccaca

SEQ ID NO: 243832 - RNA, 19 nt, Artificial Sequence
  Description of Artificial Sequence: Synthetic oligonucleotide
  Sense strand starting at position 1060 SEQ ID NO: 3138
ggaacauaauuguauuucu

SEQ ID NO: 243833 - RNA, 19 nt, Artificial Sequence
  Description of Artificial Sequence: Synthetic oligonucleotide
  Antisense strand to SEQ ID NO: 243832
agaaauacaauuauguucc

SEQ ID NO: 243834 - RNA, 19 nt, Artificial Sequence
  Description of Artificial Sequence: Synthetic oligonucleotide
  Sense strand starting at position 1082 SEQ ID NO: 3138
ggaucugauuuccauggga

SEQ ID NO: 243835 - RNA, 19 nt, Artificial Sequence
  Description of Artificial Sequence: Synthetic oligonucleotide
  Antisense strand to SEQ ID NO: 243834
ucccauggaaaucagaucc

SEQ ID NO: 243836 - RNA, 19 nt, Artificial Sequence
  Description of Artificial Sequence: Synthetic oligonucleotide
  Sense strand starting at position 1285 SEQ ID NO: 3138
aauacagaguaguuuaaug

SEQ ID NO: 243837 - RNA, 19 nt, Artificial Sequence
  Description of Artificial Sequence: Synthetic oligonucleotide
  Antisense strand to SEQ ID NO: 243836
cauuaaacuacucuguauu

SEQ ID NO: 243838 - RNA, 19 nt, Artificial Sequence
  Description of Artificial Sequence: Synthetic oligonucleotide
  Sense strand starting at position 1451 SEQ ID NO: 3138
uggaauucguuguuggaaa

SEQ ID NO: 243839 - RNA, 19 nt, Artificial Sequence
  Description of Artificial Sequence: Synthetic oligonucleotide
  Antisense strand to SEQ ID NO: 243838
uuuccaacaacgaauucca

SEQ ID NO: 243840 - RNA, 19 nt, Artificial Sequence
  Description of Artificial Sequence: Synthetic oligonucleotide
  Sense strand starting at position 1453 SEQ ID NO: 3138
gaauucguuguuggaaaua

SEQ ID NO: 243841 - RNA, 19 nt, Artificial Sequence
  Description of Artificial Sequence: Synthetic oligonucleotide
  Antisense strand to SEQ ID NO: 243840
uauuuccaacaacgaauuc

SEQ ID NO: 243842 - RNA, 19 nt, Artificial Sequence
  Description of Artificial Sequence: Synthetic oligonucleotide
  Sense strand starting at position 1579 SEQ ID NO: 3138
ucaccuugacagugaauag

SEQ ID NO: 243843 - RNA, 19 nt, Artificial Sequence
  Description of Artificial Sequence: Synthetic oligonucleotide
  Antisense strand to SEQ ID NO: 243842
cuauucacugucaagguga

SEQ ID NO: 243844 - RNA, 19 nt, Artificial Sequence
  Description of Artificial Sequence: Synthetic oligonucleotide
  Sense strand starting at position 1620 SEQ ID NO: 3138
cccagucuugcagacucaa

SEQ ID NO: 243845 - RNA, 19 nt, Artificial Sequence
  Description of Artificial Sequence: Synthetic oligonucleotide
  Antisense strand to SEQ ID NO: 243844
uugagucugcaagacuggg

SEQ ID NO: 243846 - RNA, 19 nt, Artificial Sequence
  Description of Artificial Sequence: Synthetic oligonucleotide
  Sense strand starting at position 1632 SEQ ID NO: 3138
gacucaacugaauguaguu

SEQ ID NO: 243847 - RNA, 19 nt, Artificial Sequence
  Description of Artificial Sequence: Synthetic oligonucleotide
  Antisense strand to SEQ ID NO: 243846
aacuacauucaguugaguc

SEQ ID NO: 243848 - RNA, 19 nt, Artificial Sequence
  Description of Artificial Sequence: Synthetic oligonucleotide
  Sense strand starting at position 1838 SEQ ID NO: 3138
acaauuuaucucugcgugu

SEQ ID NO: 243849 - RNA, 19 nt, Artificial Sequence
  Description of Artificial Sequence: Synthetic oligonucleotide
  Antisense strand to SEQ ID NO: 243848
acacgcagagauaaauugu

SEQ ID NO: 243850 - RNA, 19 nt, Artificial Sequence
  Description of Artificial Sequence: Synthetic oligonucleotide
  Sense strand starting at position 1949 SEQ ID NO: 3138
gcaagagggcugcaaucaa

SEQ ID NO: 243851 - RNA, 19 nt, Artificial Sequence
  Description of Artificial Sequence: Synthetic oligonucleotide
  Antisense strand to SEQ ID NO: 243850
uugauugcagcccucuugc

SEQ ID NO: 243852 - RNA, 19 nt, Artificial Sequence
  Description of Artificial Sequence: Synthetic oligonucleotide
  Sense strand starting at position 2289 SEQ ID NO: 3138
cuuagucuucuacaugcau

SEQ ID NO: 243853 - RNA, 19 nt, Artificial Sequence
  Description of Artificial Sequence: Synthetic oligonucleotide
  Antisense strand to SEQ ID NO: 243852
augcauguagaagacuaag

SEQ ID NO: 243854 - RNA, 19 nt, Artificial Sequence
  Description of Artificial Sequence: Synthetic oligonucleotide
  Sense strand starting at position 2484 SEQ ID NO: 3138
cuggauuuguucccuucuu

SEQ ID NO: 243855 - RNA, 19 nt, Artificial Sequence
  Description of Artificial Sequence: Synthetic oligonucleotide
  Antisense strand to SEQ ID NO: 243854
aagaagggaacaaauccag

SEQ ID NO: 243856 - RNA, 19 nt, Artificial Sequence
  Description of Artificial Sequence: Synthetic oligonucleotide
  Sense strand starting at position 2485 SEQ ID NO: 3138
uggauuuguucccuucuuu

SEQ ID NO: 243857 - RNA, 19 nt, Artificial Sequence
  Description of Artificial Sequence: Synthetic oligonucleotide
  Antisense strand to SEQ ID NO: 243856
aaagaagggaacaaaucca

SEQ ID NO: 243858 - RNA, 19 nt, Artificial Sequence
  Description of Artificial Sequence: Synthetic oligonucleotide
  Sense strand starting at position 2631 SEQ ID NO: 3138
guuaccugccgggaugaua

SEQ ID NO: 243859 - RNA, 19 nt, Artificial Sequence
  Description of Artificial Sequence: Synthetic oligonucleotide
  Antisense strand to SEQ ID NO: 243858
uaucaucccggcagguaac

SEQ ID NO: 243860 - RNA, 19 nt, Artificial Sequence
  Description of Artificial Sequence: Synthetic oligonucleotide
  Sense strand starting at position 2746 SEQ ID NO: 3138
ugaaguagacucugcagaa

SEQ ID NO: 243861 - RNA, 19 nt, Artificial Sequence
  Description of Artificial Sequence: Synthetic oligonucleotide
  Antisense strand to SEQ ID NO: 243860
uucugcagagucuacuuca

SEQ ID NO: 243862 - RNA, 19 nt, Artificial Sequence
  Description of Artificial Sequence: Synthetic oligonucleotide
  Sense strand starting at position 2747 SEQ ID NO: 3138
gaaguagacucugcagaaa

SEQ ID NO: 243863 - RNA, 19 nt, Artificial Sequence
  Description of Artificial Sequence: Synthetic oligonucleotide
  Antisense strand to SEQ ID NO: 243862
uuucugcagagucuacuuc

SEQ ID NO: 243864 - RNA, 19 nt, Artificial Sequence
  Description of Artificial Sequence: Synthetic oligonucleotide
  Sense strand starting at position 2919 SEQ ID NO: 3138
gggcguggccacagucaaa

SEQ ID NO: 243865 - RNA, 19 nt, Artificial Sequence
  Description of Artificial Sequence: Synthetic oligonucleotide
  Antisense strand to SEQ ID NO: 243864
uuugacuguggccacgccc

SEQ ID NO: 243866 - RNA, 19 nt, Artificial Sequence
  Description of Artificial Sequence: Synthetic oligonucleotide
  Sense strand starting at position 3222 SEQ ID NO: 3138
guaccuuuggcugaagaaa

SEQ ID NO: 243867 - RNA, 19 nt, Artificial Sequence
  Description of Artificial Sequence: Synthetic oligonucleotide
  Antisense strand to SEQ ID NO: 243866
uuucuucagccaaagguac

SEQ ID NO: 243868 - RNA, 19 nt, Artificial Sequence
  Description of Artificial Sequence: Synthetic oligonucleotide
  Sense strand starting at position 3335 SEQ ID NO: 3138
augucuaggucuuuagaaa

SEQ ID NO: 243869 - RNA, 19 nt, Artificial Sequence
  Description of Artificial Sequence: Synthetic oligonucleotide
  Antisense strand to SEQ ID NO: 243868
uuucuaaagaccuagacau

SEQ ID NO: 243870 - RNA, 19 nt, Artificial Sequence
  Description of Artificial Sequence: Synthetic oligonucleotide
  Sense strand starting at position 3336 SEQ ID NO: 3138
ugucuaggucuuuagaaac

SEQ ID NO: 243871 - RNA, 19 nt, Artificial Sequence
  Description of Artificial Sequence: Synthetic oligonucleotide
  Antisense strand to SEQ ID NO: 243870
guuucuaaagaccuagaca

SEQ ID NO: 243872 - RNA, 19 nt, Artificial Sequence
  Description of Artificial Sequence: Synthetic oligonucleotide
  Sense strand starting at position 3361 SEQ ID NO: 3138
gauuguuugcauuagaaga

SEQ ID NO: 243873 - RNA, 19 nt, Artificial Sequence
  Description of Artificial Sequence: Synthetic oligonucleotide
  Antisense strand to SEQ ID NO: 243872
ucuucuaaugcaaacaauc

SEQ ID NO: 243874 - RNA, 19 nt, Artificial Sequence
  Description of Artificial Sequence: Synthetic oligonucleotide
  Sense strand starting at position 270 SEQ ID NO: 3137
auguaaugauuaguagaca

SEQ ID NO: 243875 - RNA, 19 nt, Artificial Sequence
  Description of Artificial Sequence: Synthetic oligonucleotide
  Antisense strand to SEQ ID NO: 243874
ugucuacuaaucauuacau

SEQ ID NO: 243876 - RNA, 19 nt, Artificial Sequence
  Description of Artificial Sequence: Synthetic oligonucleotide
  Sense strand starting at position 303 SEQ ID NO: 3137
cuugacaagccuggaugua

SEQ ID NO: 243877 - RNA, 19 nt, Artificial Sequence
  Description of Artificial Sequence: Synthetic oligonucleotide
  Antisense strand to SEQ ID NO: 243876
uacauccaggcuugucaag

SEQ ID NO: 243878 - RNA, 19 nt, Artificial Sequence
  Description of Artificial Sequence: Synthetic oligonucleotide
  Sense strand starting at position 304 SEQ ID NO: 3137
uugacaagccuggauguau

SEQ ID NO: 243879 - RNA, 19 nt, Artificial Sequence
  Description of Artificial Sequence: Synthetic oligonucleotide
  Antisense strand to SEQ ID NO: 243878
auacauccaggcuugucaa

SEQ ID NO: 243880 - RNA, 19 nt, Artificial Sequence
  Description of Artificial Sequence: Synthetic oligonucleotide
  Sense strand starting at position 356 SEQ ID NO: 3137
uucgcaauucuagaauucu

SEQ ID NO: 243881 - RNA, 19 nt, Artificial Sequence
  Description of Artificial Sequence: Synthetic oligonucleotide
  Antisense strand to SEQ ID NO: 243880
agaauucuagaauugcgaa

SEQ ID NO: 243882 - RNA, 19 nt, Artificial Sequence
  Description of Artificial Sequence: Synthetic oligonucleotide
  Sense strand starting at position 376 SEQ ID NO: 3137
cuuacuaguguuuaggaga

SEQ ID NO: 243883 - RNA, 19 nt, Artificial Sequence
  Description of Artificial Sequence: Synthetic oligonucleotide
  Antisense strand to SEQ ID NO: 243882
ucuccuaaacacuaguaag

SEQ ID NO: 243884 - RNA, 19 nt, Artificial Sequence
  Description of Artificial Sequence: Synthetic oligonucleotide
  Sense strand starting at position 441 SEQ ID NO: 3137
aacagaaugguguggauga

SEQ ID NO: 243885 - RNA, 19 nt, Artificial Sequence
  Description of Artificial Sequence: Synthetic oligonucleotide
  Antisense strand to SEQ ID NO: 243884
ucauccacaccauucuguu

SEQ ID NO: 243886 - RNA, 19 nt, Artificial Sequence
  Description of Artificial Sequence: Synthetic oligonucleotide
  Sense strand starting at position 443 SEQ ID NO: 3137
cagaaugguguggaugagu

SEQ ID NO: 243887 - RNA, 19 nt, Artificial Sequence
  Description of Artificial Sequence: Synthetic oligonucleotide
  Antisense strand to SEQ ID NO: 243886
acucauccacaccauucug

SEQ ID NO: 243888 - RNA, 19 nt, Artificial Sequence
  Description of Artificial Sequence: Synthetic oligonucleotide
  Sense strand starting at position 446 SEQ ID NO: 3137
aaugguguggaugagucaa

SEQ ID NO: 243889 - RNA, 19 nt, Artificial Sequence
  Description of Artificial Sequence: Synthetic oligonucleotide
  Antisense strand to SEQ ID NO: 243888
uugacucauccacaccauu

SEQ ID NO: 243890 - RNA, 19 nt, Artificial Sequence
  Description of Artificial Sequence: Synthetic oligonucleotide
  Sense strand starting at position 448 SEQ ID NO: 3137
ugguguggaugagucaauu

SEQ ID NO: 243891 - RNA, 19 nt, Artificial Sequence
  Description of Artificial Sequence: Synthetic oligonucleotide
  Antisense strand to SEQ ID NO: 243890
aauugacucauccacacca

SEQ ID NO: 243892 - RNA, 19 nt, Artificial Sequence
  Description of Artificial Sequence: Synthetic oligonucleotide
  Sense strand starting at position 588 SEQ ID NO: 3137
gaacuuaucugguuccuga

SEQ ID NO: 243893 - RNA, 19 nt, Artificial Sequence
  Description of Artificial Sequence: Synthetic oligonucleotide
  Antisense strand to SEQ ID NO: 243892
ucaggaaccagauaaguuc

SEQ ID NO: 243894 - RNA, 19 nt, Artificial Sequence
  Description of Artificial Sequence: Synthetic oligonucleotide
  Sense strand starting at position 591 SEQ ID NO: 3137
cuuaucugguuccugauaa

SEQ ID NO: 243895 - RNA, 19 nt, Artificial Sequence
  Description of Artificial Sequence: Synthetic oligonucleotide
  Antisense strand to SEQ ID NO: 243894
uuaucaggaaccagauaag

SEQ ID NO: 243896 - RNA, 19 nt, Artificial Sequence
  Description of Artificial Sequence: Synthetic oligonucleotide
  Sense strand starting at position 620 SEQ ID NO: 3137
uggccaugucccuauauag

SEQ ID NO: 243897 - RNA, 19 nt, Artificial Sequence
  Description of Artificial Sequence: Synthetic oligonucleotide
  Antisense strand to SEQ ID NO: 243896
cuauauagggacauggcca

SEQ ID NO: 243898 - RNA, 19 nt, Artificial Sequence
  Description of Artificial Sequence: Synthetic oligonucleotide
  Sense strand starting at position 629 SEQ ID NO: 3137
cccuauauaguaugaugca

SEQ ID NO: 243899 - RNA, 19 nt, Artificial Sequence
  Description of Artificial Sequence: Synthetic oligonucleotide
  Antisense strand to SEQ ID NO: 243898
ugcaucauacuauauaggg

SEQ ID NO: 243900 - RNA, 19 nt, Artificial Sequence
  Description of Artificial Sequence: Synthetic oligonucleotide
  Sense strand starting at position 649 SEQ ID NO: 3137
cagucaugacauggcaauu

SEQ ID NO: 243901 - RNA, 19 nt, Artificial Sequence
  Description of Artificial Sequence: Synthetic oligonucleotide
  Antisense strand to SEQ ID NO: 243900
aauugccaugucaugacug

SEQ ID NO: 243902 - RNA, 19 nt, Artificial Sequence
  Description of Artificial Sequence: Synthetic oligonucleotide
  Sense strand starting at position 666 SEQ ID NO: 3137
uuuauucuugauggcaaau

SEQ ID NO: 243903 - RNA, 19 nt, Artificial Sequence
  Description of Artificial Sequence: Synthetic oligonucleotide
  Antisense strand to SEQ ID NO: 243902
auuugccaucaagaauaaa

SEQ ID NO: 243904 - RNA, 19 nt, Artificial Sequence
  Description of Artificial Sequence: Synthetic oligonucleotide
  Sense strand starting at position 890 SEQ ID NO: 3137
uuguuacuaccauguggaa

SEQ ID NO: 243905 - RNA, 19 nt, Artificial Sequence
  Description of Artificial Sequence: Synthetic oligonucleotide
  Antisense strand to SEQ ID NO: 243904
uuccacaugguaguaacaa

SEQ ID NO: 243906 - RNA, 19 nt, Artificial Sequence
  Description of Artificial Sequence: Synthetic oligonucleotide
  Sense strand starting at position 902 SEQ ID NO: 3137
uguggaacauaauuguauu

SEQ ID NO: 243907 - RNA, 19 nt, Artificial Sequence
  Description of Artificial Sequence: Synthetic oligonucleotide
  Antisense strand to SEQ ID NO: 243906
aauacaauuauguuccaca

SEQ ID NO: 243908 - RNA, 19 nt, Artificial Sequence
  Description of Artificial Sequence: Synthetic oligonucleotide
  Sense strand starting at position 905 SEQ ID NO: 3137
ggaacauaauuguauuucu

SEQ ID NO: 243909 - RNA, 19 nt, Artificial Sequence
  Description of Artificial Sequence: Synthetic oligonucleotide
  Antisense strand to SEQ ID NO: 243908
agaaauacaauuauguucc

SEQ ID NO: 243910 - RNA, 19 nt, Artificial Sequence
  Description of Artificial Sequence: Synthetic oligonucleotide
  Sense strand starting at position 927 SEQ ID NO: 3137
ggaucugauuuccauggga

SEQ ID NO: 243911 - RNA, 19 nt, Artificial Sequence
  Description of Artificial Sequence: Synthetic oligonucleotide
  Antisense strand to SEQ ID NO: 243910
ucccauggaaaucagaucc

SEQ ID NO: 243912 - RNA, 19 nt, Artificial Sequence
  Description of Artificial Sequence: Synthetic oligonucleotide
  Sense strand starting at position 1130 SEQ ID NO: 3137
aauacagaguaguuuaaug

SEQ ID NO: 243913 - RNA, 19 nt, Artificial Sequence
  Description of Artificial Sequence: Synthetic oligonucleotide
  Antisense strand to SEQ ID NO: 243912
cauuaaacuacucuguauu

SEQ ID NO: 243914 - RNA, 19 nt, Artificial Sequence
  Description of Artificial Sequence: Synthetic oligonucleotide
  Sense strand starting at position 1296 SEQ ID NO: 3137
uggaauucguuguuggaaa

SEQ ID NO: 243915 - RNA, 19 nt, Artificial Sequence
  Description of Artificial Sequence: Synthetic oligonucleotide
  Antisense strand to SEQ ID NO: 243914
uuuccaacaacgaauucca

SEQ ID NO: 243916 - RNA, 19 nt, Artificial Sequence
  Description of Artificial Sequence: Synthetic oligonucleotide
  Sense strand starting at position 1298 SEQ ID NO: 3137
gaauucguuguuggaaaua

SEQ ID NO: 243917 - RNA, 19 nt, Artificial Sequence
  Description of Artificial Sequence: Synthetic oligonucleotide
  Antisense strand to SEQ ID NO: 243916
uauuuccaacaacgaauuc

SEQ ID NO: 243918 - RNA, 19 nt, Artificial Sequence
  Description of Artificial Sequence: Synthetic oligonucleotide
  Sense strand starting at position 1424 SEQ ID NO: 3137
ucaccuugacagugaauag

SEQ ID NO: 243919 - RNA, 19 nt, Artificial Sequence
  Description of Artificial Sequence: Synthetic oligonucleotide
  Antisense strand to SEQ ID NO: 243918
cuauucacugucaagguga

SEQ ID NO: 243920 - RNA, 19 nt, Artificial Sequence
  Description of Artificial Sequence: Synthetic oligonucleotide
  Sense strand starting at position 1465 SEQ ID NO: 3137
cccagucuugcagacucaa

SEQ ID NO: 243921 - RNA, 19 nt, Artificial Sequence
  Description of Artificial Sequence: Synthetic oligonucleotide
  Antisense strand to SEQ ID NO: 243920
uugagucugcaagacuggg

SEQ ID NO: 243922 - RNA, 19 nt, Artificial Sequence
  Description of Artificial Sequence: Synthetic oligonucleotide
  Sense strand starting at position 1477 SEQ ID NO: 3137
gacucaacugaauguaguu

SEQ ID NO: 243923 - RNA, 19 nt, Artificial Sequence
  Description of Artificial Sequence: Synthetic oligonucleotide
  Antisense strand to SEQ ID NO: 243922
aacuacauucaguugaguc

SEQ ID NO: 243924 - RNA, 19 nt, Artificial Sequence
  Description of Artificial Sequence: Synthetic oligonucleotide
  Sense strand starting at position 1683 SEQ ID NO: 3137
acaauuuaucucugcgugu

SEQ ID NO: 243925 - RNA, 19 nt, Artificial Sequence
  Description of Artificial Sequence: Synthetic oligonucleotide
  Antisense strand to SEQ ID NO: 243924
acacgcagagauaaauugu

SEQ ID NO: 243926 - RNA, 19 nt, Artificial Sequence
  Description of Artificial Sequence: Synthetic oligonucleotide
  Sense strand starting at position 1794 SEQ ID NO: 3137
gcaagagggcugcaaucaa

SEQ ID NO: 243927 - RNA, 19 nt, Artificial Sequence
  Description of Artificial Sequence: Synthetic oligonucleotide
  Antisense strand to SEQ ID NO: 243926
uugauugcagcccucuugc

SEQ ID NO: 243928 - RNA, 19 nt, Artificial Sequence
  Description of Artificial Sequence: Synthetic oligonucleotide
  Sense strand starting at position 2134 SEQ ID NO: 3137
cuuagucuucuacaugcau

SEQ ID NO: 243929 - RNA, 19 nt, Artificial Sequence
  Description of Artificial Sequence: Synthetic oligonucleotide
  Antisense strand to SEQ ID NO: 243928
augcauguagaagacuaag

SEQ ID NO: 243930 - RNA, 19 nt, Artificial Sequence
  Description of Artificial Sequence: Synthetic oligonucleotide
  Sense strand starting at position 2329 SEQ ID NO: 3137
cuggauuuguucccuucuu

SEQ ID NO: 243931 - RNA, 19 nt, Artificial Sequence
  Description of Artificial Sequence: Synthetic oligonucleotide
  Antisense strand to SEQ ID NO: 243930
aagaagggaacaaauccag

SEQ ID NO: 243932 - RNA, 19 nt, Artificial Sequence
  Description of Artificial Sequence: Synthetic oligonucleotide
  Sense strand starting at position 2330 SEQ ID NO: 3137
uggauuuguucccuucuuu

SEQ ID NO: 243933 - RNA, 19 nt, Artificial Sequence
  Description of Artificial Sequence: Synthetic oligonucleotide
  Antisense strand to SEQ ID NO: 243932
aaagaagggaacaaaucca

SEQ ID NO: 243934 - RNA, 19 nt, Artificial Sequence
  Description of Artificial Sequence: Synthetic oligonucleotide
  Sense strand starting at position 2476 SEQ ID NO: 3137
guuaccugccgggaugaua

SEQ ID NO: 243935 - RNA, 19 nt, Artificial Sequence
  Description of Artificial Sequence: Synthetic oligonucleotide
  Antisense strand to SEQ ID NO: 243934
uaucaucccggcagguaac

SEQ ID NO: 243936 - RNA, 19 nt, Artificial Sequence
  Description of Artificial Sequence: Synthetic oligonucleotide
  Sense strand starting at position 2487 SEQ ID NO: 3137
ggaugauaugcuggcgaag

SEQ ID NO: 243937 - RNA, 19 nt, Artificial Sequence
  Description of Artificial Sequence: Synthetic oligonucleotide
  Antisense strand to SEQ ID NO: 243936
cuucgccagcauaucaucc

SEQ ID NO: 243938 - RNA, 19 nt, Artificial Sequence
  Description of Artificial Sequence: Synthetic oligonucleotide
  Sense strand starting at position 2490 SEQ ID NO: 3137
ugauaugcuggcgaagagu

SEQ ID NO: 243939 - RNA, 19 nt, Artificial Sequence
  Description of Artificial Sequence: Synthetic oligonucleotide
  Antisense strand to SEQ ID NO: 243938
acucuucgccagcauauca

SEQ ID NO: 243940 - RNA, 19 nt, Artificial Sequence
  Description of Artificial Sequence: Synthetic oligonucleotide
  Sense strand starting at position 2591 SEQ ID NO: 3137
ugaaguagacucugcagaa

SEQ ID NO: 243941 - RNA, 19 nt, Artificial Sequence
  Description of Artificial Sequence: Synthetic oligonucleotide
  Antisense strand to SEQ ID NO: 243940
uucugcagagucuacuuca

SEQ ID NO: 243942 - RNA, 19 nt, Artificial Sequence
  Description of Artificial Sequence: Synthetic oligonucleotide
  Sense strand starting at position 2592 SEQ ID NO: 3137
gaaguagacucugcagaaa

SEQ ID NO: 243943 - RNA, 19 nt, Artificial Sequence
  Description of Artificial Sequence: Synthetic oligonucleotide
  Antisense strand to SEQ ID NO: 243942
uuucugcagagucuacuuc

SEQ ID NO: 243944 - RNA, 19 nt, Artificial Sequence
  Description of Artificial Sequence: Synthetic oligonucleotide
  Sense strand starting at position 2764 SEQ ID NO: 3137
gggcguggccacagucaaa

SEQ ID NO: 243945 - RNA, 19 nt, Artificial Sequence
  Description of Artificial Sequence: Synthetic oligonucleotide
  Antisense strand to SEQ ID NO: 243944
uuugacuguggccacgccc

SEQ ID NO: 243946 - RNA, 19 nt, Artificial Sequence
  Description of Artificial Sequence: Synthetic oligonucleotide
  Sense strand starting at position 3067 SEQ ID NO: 3137
guaccuuuggcugaagaaa

SEQ ID NO: 243947 - RNA, 19 nt, Artificial Sequence
  Description of Artificial Sequence: Synthetic oligonucleotide
  Antisense strand to SEQ ID NO: 243946
uuucuucagccaaagguac

SEQ ID NO: 243948 - RNA, 19 nt, Artificial Sequence
  Description of Artificial Sequence: Synthetic oligonucleotide
  Sense strand starting at position 3180 SEQ ID NO: 3137
augucuaggucuuuagaaa

SEQ ID NO: 243949 - RNA, 19 nt, Artificial Sequence
  Description of Artificial Sequence: Synthetic oligonucleotide
  Antisense strand to SEQ ID NO: 243948
uuucuaaagaccuagacau

SEQ ID NO: 243950 - RNA, 19 nt, Artificial Sequence
  Description of Artificial Sequence: Synthetic oligonucleotide
  Sense strand starting at position 3181 SEQ ID NO: 3137
ugucuaggucuuuagaaac

SEQ ID NO: 243951 - RNA, 19 nt, Artificial Sequence
  Description of Artificial Sequence: Synthetic oligonucleotide
  Antisense strand to SEQ ID NO: 243950
guuucuaaagaccuagaca

SEQ ID NO: 243952 - RNA, 19 nt, Artificial Sequence
  Description of Artificial Sequence: Synthetic oligonucleotide
  Sense strand starting at position 3206 SEQ ID NO: 3137
gauuguuugcauuagaaga

SEQ ID NO: 243953 - RNA, 19 nt, Artificial Sequence
  Description of Artificial Sequence: Synthetic oligonucleotide
  Antisense strand to SEQ ID NO: 243952
ucuucuaaugcaaacaauc

SEQ ID NO: 243954 - RNA, 19 nt, Artificial Sequence
  Description of Artificial Sequence: Synthetic oligonucleotide
  Sense strand starting at position 84 SEQ ID NO: 3139
cuguacucucugcaguaau

SEQ ID NO: 243955 - RNA, 19 nt, Artificial Sequence
  Description of Artificial Sequence: Synthetic oligonucleotide
  Antisense strand to SEQ ID NO: 243954
auuacugcagagaguacag

SEQ ID NO: 243956 - RNA, 19 nt, Artificial Sequence
  Description of Artificial Sequence: Synthetic oligonucleotide
  Sense strand starting at position 205 SEQ ID NO: 3139
uuguuacuaccauguggaa

SEQ ID NO: 243957 - RNA, 19 nt, Artificial Sequence
  Description of Artificial Sequence: Synthetic oligonucleotide
  Antisense strand to SEQ ID NO: 243956
uuccacaugguaguaacaa

SEQ ID NO: 243958 - RNA, 19 nt, Artificial Sequence
  Description of Artificial Sequence: Synthetic oligonucleotide
  Sense strand starting at position 217 SEQ ID NO: 3139
uguggaacauaauuguauu

SEQ ID NO: 243959 - RNA, 19 nt, Artificial Sequence
  Description of Artificial Sequence: Synthetic oligonucleotide
  Antisense strand to SEQ ID NO: 243958
aauacaauuauguuccaca

SEQ ID NO: 243960 - RNA, 19 nt, Artificial Sequence
  Description of Artificial Sequence: Synthetic oligonucleotide
  Sense strand starting at position 220 SEQ ID NO: 3139
ggaacauaauuguauuucu

SEQ ID NO: 243961 - RNA, 19 nt, Artificial Sequence
  Description of Artificial Sequence: Synthetic oligonucleotide
  Antisense strand to SEQ ID NO: 243960
agaaauacaauuauguucc

SEQ ID NO: 243962 - RNA, 19 nt, Artificial Sequence
  Description of Artificial Sequence: Synthetic oligonucleotide
  Sense strand starting at position 242 SEQ ID NO: 3139
ggaucugauuuccauggga

SEQ ID NO: 243963 - RNA, 19 nt, Artificial Sequence
  Description of Artificial Sequence: Synthetic oligonucleotide
  Antisense strand to SEQ ID NO: 243962
ucccauggaaaucagaucc

SEQ ID NO: 243964 - RNA, 19 nt, Artificial Sequence
  Description of Artificial Sequence: Synthetic oligonucleotide
  Sense strand starting at position 445 SEQ ID NO: 3139
aauacagaguaguuuaaug

SEQ ID NO: 243965 - RNA, 19 nt, Artificial Sequence
  Description of Artificial Sequence: Synthetic oligonucleotide
  Antisense strand to SEQ ID NO: 243964
cauuaaacuacucuguauu

SEQ ID NO: 243966 - RNA, 19 nt, Artificial Sequence
  Description of Artificial Sequence: Synthetic oligonucleotide
  Sense strand starting at position 542 SEQ ID NO: 3139
acaauaauuucugggcaaa

SEQ ID NO: 243967 - RNA, 19 nt, Artificial Sequence
  Description of Artificial Sequence: Synthetic oligonucleotide
  Antisense strand to SEQ ID NO: 243966
uuugcccagaaauuauugu

SEQ ID NO: 243968 - RNA, 19 nt, Artificial Sequence
  Description of Artificial Sequence: Synthetic oligonucleotide
  Sense strand starting at position 611 SEQ ID NO: 3139
uggaauucguuguuggaaa

SEQ ID NO: 243969 - RNA, 19 nt, Artificial Sequence
  Description of Artificial Sequence: Synthetic oligonucleotide
  Antisense strand to SEQ ID NO: 243968
uuuccaacaacgaauucca

SEQ ID NO: 243970 - RNA, 19 nt, Artificial Sequence
  Description of Artificial Sequence: Synthetic oligonucleotide
  Sense strand starting at position 613 SEQ ID NO: 3139
gaauucguuguuggaaaua

SEQ ID NO: 243971 - RNA, 19 nt, Artificial Sequence
  Description of Artificial Sequence: Synthetic oligonucleotide
  Antisense strand to SEQ ID NO: 243970
uauuuccaacaacgaauuc

SEQ ID NO: 243972 - RNA, 19 nt, Artificial Sequence
  Description of Artificial Sequence: Synthetic oligonucleotide
  Sense strand starting at position 739 SEQ ID NO: 3139
ucaccuugacagugaauag

SEQ ID NO: 243973 - RNA, 19 nt, Artificial Sequence
  Description of Artificial Sequence: Synthetic oligonucleotide
  Antisense strand to SEQ ID NO: 243972
cuauucacugucaagguga

SEQ ID NO: 243974 - RNA, 19 nt, Artificial Sequence
  Description of Artificial Sequence: Synthetic oligonucleotide
  Sense strand starting at position 780 SEQ ID NO: 3139
cccagucuugcagacucaa

SEQ ID NO: 243975 - RNA, 19 nt, Artificial Sequence
  Description of Artificial Sequence: Synthetic oligonucleotide
  Antisense strand to SEQ ID NO: 243974
uugagucugcaagacuggg

SEQ ID NO: 243976 - RNA, 19 nt, Artificial Sequence
  Description of Artificial Sequence: Synthetic oligonucleotide
  Sense strand starting at position 792 SEQ ID NO: 3139
gacucaacugaauguaguu

SEQ ID NO: 243977 - RNA, 19 nt, Artificial Sequence
  Description of Artificial Sequence: Synthetic oligonucleotide
  Antisense strand to SEQ ID NO: 243976
aacuacauucaguugaguc

SEQ ID NO: 243978 - RNA, 19 nt, Artificial Sequence
  Description of Artificial Sequence: Synthetic oligonucleotide
  Sense strand starting at position 903 SEQ ID NO: 3139
guuuauccgguuuaaagua

SEQ ID NO: 243979 - RNA, 19 nt, Artificial Sequence
  Description of Artificial Sequence: Synthetic oligonucleotide
  Antisense strand to SEQ ID NO: 243978
uacuuuaaaccggauaaac

SEQ ID NO: 243980 - RNA, 19 nt, Artificial Sequence
  Description of Artificial Sequence: Synthetic oligonucleotide
  Sense strand starting at position 930 SEQ ID NO: 3139
aguguacucggugggacaa

SEQ ID NO: 243981 - RNA, 19 nt, Artificial Sequence
  Description of Artificial Sequence: Synthetic oligonucleotide
  Antisense strand to SEQ ID NO: 243980
uugucccaccgaguacacu

SEQ ID NO: 243982 - RNA, 19 nt, Artificial Sequence
  Description of Artificial Sequence: Synthetic oligonucleotide
  Sense strand starting at position 931 SEQ ID NO: 3139
guguacucggugggacaaa

SEQ ID NO: 243983 - RNA, 19 nt, Artificial Sequence
  Description of Artificial Sequence: Synthetic oligonucleotide
  Antisense strand to SEQ ID NO: 243982
uuugucccaccgaguacac

SEQ ID NO: 243984 - RNA, 19 nt, Artificial Sequence
  Description of Artificial Sequence: Synthetic oligonucleotide
  Sense strand starting at position 998 SEQ ID NO: 3139
acaauuuaucucugcgugu

SEQ ID NO: 243985 - RNA, 19 nt, Artificial Sequence
  Description of Artificial Sequence: Synthetic oligonucleotide
  Antisense strand to SEQ ID NO: 243984
acacgcagagauaaauugu

SEQ ID NO: 243986 - RNA, 19 nt, Artificial Sequence
  Description of Artificial Sequence: Synthetic oligonucleotide
  Sense strand starting at position 1109 SEQ ID NO: 3139
gcaagagggcugcaaucaa

SEQ ID NO: 243987 - RNA, 19 nt, Artificial Sequence
  Description of Artificial Sequence: Synthetic oligonucleotide
  Antisense strand to SEQ ID NO: 243986
uugauugcagcccucuugc

SEQ ID NO: 243988 - RNA, 19 nt, Artificial Sequence
  Description of Artificial Sequence: Synthetic oligonucleotide
  Sense strand starting at position 1449 SEQ ID NO: 3139
cuuagucuucuacaugcau

SEQ ID NO: 243989 - RNA, 19 nt, Artificial Sequence
  Description of Artificial Sequence: Synthetic oligonucleotide
  Antisense strand to SEQ ID NO: 243988
augcauguagaagacuaag

SEQ ID NO: 243990 - RNA, 19 nt, Artificial Sequence
  Description of Artificial Sequence: Synthetic oligonucleotide
  Sense strand starting at position 1644 SEQ ID NO: 3139
cuggauuuguucccuucuu

SEQ ID NO: 243991 - RNA, 19 nt, Artificial Sequence
  Description of Artificial Sequence: Synthetic oligonucleotide
  Antisense strand to SEQ ID NO: 243990
aagaagggaacaaauccag

SEQ ID NO: 243992 - RNA, 19 nt, Artificial Sequence
  Description of Artificial Sequence: Synthetic oligonucleotide
  Sense strand starting at position 1645 SEQ ID NO: 3139
uggauuuguucccuucuuu

SEQ ID NO: 243993 - RNA, 19 nt, Artificial Sequence
  Description of Artificial Sequence: Synthetic oligonucleotide
  Antisense strand to SEQ ID NO: 243992
aaagaagggaacaaaucca

SEQ ID NO: 243994 - RNA, 19 nt, Artificial Sequence
  Description of Artificial Sequence: Synthetic oligonucleotide
  Sense strand starting at position 1791 SEQ ID NO: 3139
guuaccugccgggaugaua

SEQ ID NO: 243995 - RNA, 19 nt, Artificial Sequence
  Description of Artificial Sequence: Synthetic oligonucleotide
  Antisense strand to SEQ ID NO: 243994
uaucaucccggcagguaac

SEQ ID NO: 243996 - RNA, 19 nt, Artificial Sequence
  Description of Artificial Sequence: Synthetic oligonucleotide
  Sense strand starting at position 1802 SEQ ID NO: 3139
ggaugauaugcuggcgaag

SEQ ID NO: 243997 - RNA, 19 nt, Artificial Sequence
  Description of Artificial Sequence: Synthetic oligonucleotide
  Antisense strand to SEQ ID NO: 243996
cuucgccagcauaucaucc

SEQ ID NO: 243998 - RNA, 19 nt, Artificial Sequence
  Description of Artificial Sequence: Synthetic oligonucleotide
  Sense strand starting at position 1805 SEQ ID NO: 3139
ugauaugcuggcgaagagu

SEQ ID NO: 243999 - RNA, 19 nt, Artificial Sequence
  Description of Artificial Sequence: Synthetic oligonucleotide
  Antisense strand to SEQ ID NO: 243998
acucuucgccagcauauca

SEQ ID NO: 244000 - RNA, 19 nt, Artificial Sequence
  Description of Artificial Sequence: Synthetic oligonucleotide
  Sense strand starting at position 1906 SEQ ID NO: 3139
ugaaguagacucugcagaa

SEQ ID NO: 244001 - RNA, 19 nt, Artificial Sequence
  Description of Artificial Sequence: Synthetic oligonucleotide
  Antisense strand to SEQ ID NO: 244000
uucugcagagucuacuuca

SEQ ID NO: 244002 - RNA, 19 nt, Artificial Sequence
  Description of Artificial Sequence: Synthetic oligonucleotide
  Sense strand starting at position 1907 SEQ ID NO: 3139
gaaguagacucugcagaaa

SEQ ID NO: 244003 - RNA, 19 nt, Artificial Sequence
  Description of Artificial Sequence: Synthetic oligonucleotide
  Antisense strand to SEQ ID NO: 244002
uuucugcagagucuacuuc

SEQ ID NO: 244004 - RNA, 19 nt, Artificial Sequence
  Description of Artificial Sequence: Synthetic oligonucleotide
  Sense strand starting at position 2079 SEQ ID NO: 3139
gggcguggccacagucaaa

SEQ ID NO: 244005 - RNA, 19 nt, Artificial Sequence
  Description of Artificial Sequence: Synthetic oligonucleotide
  Antisense strand to SEQ ID NO: 244004
uuugacuguggccacgccc

SEQ ID NO: 244006 - RNA, 19 nt, Artificial Sequence
  Description of Artificial Sequence: Synthetic oligonucleotide
  Sense strand starting at position 2382 SEQ ID NO: 3139
guaccuuuggcugaagaaa

SEQ ID NO: 244007 - RNA, 19 nt, Artificial Sequence
  Description of Artificial Sequence: Synthetic oligonucleotide
  Antisense strand to SEQ ID NO: 244006
uuucuucagccaaagguac

SEQ ID NO: 244008 - RNA, 19 nt, Artificial Sequence
  Description of Artificial Sequence: Synthetic oligonucleotide
  Sense strand starting at position 2491 SEQ ID NO: 3139
accuaugucuaggucuuua

SEQ ID NO: 244009 - RNA, 19 nt, Artificial Sequence
  Description of Artificial Sequence: Synthetic oligonucleotide
  Antisense strand to SEQ ID NO: 244008
uaaagaccuagacauaggu

SEQ ID NO: 244010 - RNA, 19 nt, Artificial Sequence
  Description of Artificial Sequence: Synthetic oligonucleotide
  Sense strand starting at position 2495 SEQ ID NO: 3139
augucuaggucuuuagaaa

SEQ ID NO: 244011 - RNA, 19 nt, Artificial Sequence
  Description of Artificial Sequence: Synthetic oligonucleotide
  Antisense strand to SEQ ID NO: 244010
uuucuaaagaccuagacau

SEQ ID NO: 244012 - RNA, 19 nt, Artificial Sequence
  Description of Artificial Sequence: Synthetic oligonucleotide
  Sense strand starting at position 2496 SEQ ID NO: 3139
ugucuaggucuuuagaaac

SEQ ID NO: 244013 - RNA, 19 nt, Artificial Sequence
  Description of Artificial Sequence: Synthetic oligonucleotide
  Antisense strand to SEQ ID NO: 244012
guuucuaaagaccuagaca

SEQ ID NO: 244014 - RNA, 19 nt, Artificial Sequence
  Description of Artificial Sequence: Synthetic oligonucleotide
  Sense strand starting at position 2517 SEQ ID NO: 3139
cauugauuguuugcauuag

SEQ ID NO: 244015 - RNA, 19 nt, Artificial Sequence
  Description of Artificial Sequence: Synthetic oligonucleotide
  Antisense strand to SEQ ID NO: 244014
cuaaugcaaacaaucaaug

SEQ ID NO: 244016 - RNA, 19 nt, Artificial Sequence
  Description of Artificial Sequence: Synthetic oligonucleotide
  Sense strand starting at position 2521 SEQ ID NO: 3139
gauuguuugcauuagaaga

SEQ ID NO: 244017 - RNA, 19 nt, Artificial Sequence
  Description of Artificial Sequence: Synthetic oligonucleotide
  Antisense strand to SEQ ID NO: 244016
ucuucuaaugcaaacaauc

SEQ ID NO: 244018 - RNA, 19 nt, Artificial Sequence
  Description of Artificial Sequence: Synthetic oligonucleotide
  Sense strand starting at position 3411 SEQ ID NO: 3139
aguacauuauucuuugaag

SEQ ID NO: 244019 - RNA, 19 nt, Artificial Sequence
  Description of Artificial Sequence: Synthetic oligonucleotide
  Antisense strand to SEQ ID NO: 244018
cuucaaagaauaauguacu

SEQ ID NO: 244020 - RNA, 19 nt, Artificial Sequence
  Description of Artificial Sequence: Synthetic oligonucleotide
  Sense strand starting at position 3412 SEQ ID NO: 3139
guacauuauucuuugaaga

SEQ ID NO: 244021 - RNA, 19 nt, Artificial Sequence
  Description of Artificial Sequence: Synthetic oligonucleotide
  Antisense strand to SEQ ID NO: 244020
ucuucaaagaauaauguac

SEQ ID NO: 244022 - RNA, 19 nt, Artificial Sequence
  Description of Artificial Sequence: Synthetic oligonucleotide
  Sense strand starting at position 3427 SEQ ID NO: 3139
aagauaaacugaucuacgu

SEQ ID NO: 244023 - RNA, 19 nt, Artificial Sequence
  Description of Artificial Sequence: Synthetic oligonucleotide
  Antisense strand to SEQ ID NO: 244022
acguagaucaguuuaucuu

SEQ ID NO: 244024 - RNA, 19 nt, Artificial Sequence
  Description of Artificial Sequence: Synthetic oligonucleotide
  Sense strand starting at position 3431 SEQ ID NO: 3139
uaaacugaucuacguggua

SEQ ID NO: 244025 - RNA, 19 nt, Artificial Sequence
  Description of Artificial Sequence: Synthetic oligonucleotide
  Antisense strand to SEQ ID NO: 244024
uaccacguagaucaguuua

SEQ ID NO: 244026 - RNA, 19 nt, Artificial Sequence
  Description of Artificial Sequence: Synthetic oligonucleotide
  Sense strand starting at position 3434 SEQ ID NO: 3139
acugaucuacgugguacua

SEQ ID NO: 244027 - RNA, 19 nt, Artificial Sequence
  Description of Artificial Sequence: Synthetic oligonucleotide
  Antisense strand to SEQ ID NO: 244026
uaguaccacguagaucagu

SEQ ID NO: 244028 - RNA, 19 nt, Artificial Sequence
  Description of Artificial Sequence: Synthetic oligonucleotide
  Sense strand starting at position 3472 SEQ ID NO: 3139
accagagggcacugguauu

SEQ ID NO: 244029 - RNA, 19 nt, Artificial Sequence
  Description of Artificial Sequence: Synthetic oligonucleotide
  Antisense strand to SEQ ID NO: 244028
aauaccagugcccucuggu

SEQ ID NO: 244030 - RNA, 19 nt, Artificial Sequence
  Description of Artificial Sequence: Synthetic oligonucleotide
  Sense strand starting at position 3538 SEQ ID NO: 3139
ugagguggcuuaagggaua

SEQ ID NO: 244031 - RNA, 19 nt, Artificial Sequence
  Description of Artificial Sequence: Synthetic oligonucleotide
  Antisense strand to SEQ ID NO: 244030
uaucccuuaagccaccuca

SEQ ID NO: 244032 - RNA, 19 nt, Artificial Sequence
  Description of Artificial Sequence: Synthetic oligonucleotide
  Sense strand starting at position 3587 SEQ ID NO: 3139
acuguuuagagagguauau

SEQ ID NO: 244033 - RNA, 19 nt, Artificial Sequence
  Description of Artificial Sequence: Synthetic oligonucleotide
  Antisense strand to SEQ ID NO: 244032
auauaccucucuaaacagu

SEQ ID NO: 244034 - RNA, 19 nt, Artificial Sequence
  Description of Artificial Sequence: Synthetic oligonucleotide
  Sense strand starting at position 9 SEQ ID NO: 3140
auggcuuuauuugucuaca

SEQ ID NO: 244035 - RNA, 19 nt, Artificial Sequence
  Description of Artificial Sequence: Synthetic oligonucleotide
  Antisense strand to SEQ ID NO: 244034
uguagacaaauaaagccau

SEQ ID NO: 244036 - RNA, 19 nt, Artificial Sequence
  Description of Artificial Sequence: Synthetic oligonucleotide
  Sense strand starting at position 10 SEQ ID NO: 3140
uggcuuuauuugucuacau

SEQ ID NO: 244037 - RNA, 19 nt, Artificial Sequence
  Description of Artificial Sequence: Synthetic oligonucleotide
  Antisense strand to SEQ ID NO: 244036
auguagacaaauaaagcca

SEQ ID NO: 244038 - RNA, 19 nt, Artificial Sequence
  Description of Artificial Sequence: Synthetic oligonucleotide
  Sense strand starting at position 11 SEQ ID NO: 3140
ggcuuuauuugucuacaug

SEQ ID NO: 244039 - RNA, 19 nt, Artificial Sequence
  Description of Artificial Sequence: Synthetic oligonucleotide
  Antisense strand to SEQ ID NO: 244038
cauguagacaaauaaagcc

SEQ ID NO: 244040 - RNA, 19 nt, Artificial Sequence
  Description of Artificial Sequence: Synthetic oligonucleotide
  Sense strand starting at position 12 SEQ ID NO: 3140
gcuuuauuugucuacaugu

SEQ ID NO: 244041 - RNA, 19 nt, Artificial Sequence
  Description of Artificial Sequence: Synthetic oligonucleotide
  Antisense strand to SEQ ID NO: 244040
acauguagacaaauaaagc

SEQ ID NO: 244042 - RNA, 19 nt, Artificial Sequence
  Description of Artificial Sequence: Synthetic oligonucleotide
  Sense strand starting at position 147 SEQ ID NO: 3140
auguaaagucaucaguaaa

SEQ ID NO: 244043 - RNA, 19 nt, Artificial Sequence
  Description of Artificial Sequence: Synthetic oligonucleotide
  Antisense strand to SEQ ID NO: 244042
uuuacugaugacuuuacau

SEQ ID NO: 244044 - RNA, 19 nt, Artificial Sequence
  Description of Artificial Sequence: Synthetic oligonucleotide
  Sense strand starting at position 386 SEQ ID NO: 3140
uguaauguagggcaaagau

SEQ ID NO: 244045 - RNA, 19 nt, Artificial Sequence
  Description of Artificial Sequence: Synthetic oligonucleotide
  Antisense strand to SEQ ID NO: 244044
aucuuugcccuacauuaca

SEQ ID NO: 244046 - RNA, 19 nt, Artificial Sequence
  Description of Artificial Sequence: Synthetic oligonucleotide
  Sense strand starting at position 497 SEQ ID NO: 3140
agccacaagcaauauguaa

SEQ ID NO: 244047 - RNA, 19 nt, Artificial Sequence
  Description of Artificial Sequence: Synthetic oligonucleotide
  Antisense strand to SEQ ID NO: 244046
uuacauauugcuuguggcu

SEQ ID NO: 244048 - RNA, 19 nt, Artificial Sequence
  Description of Artificial Sequence: Synthetic oligonucleotide
  Sense strand starting at position 906 SEQ ID NO: 3140
guuaauacacauuacgauu

SEQ ID NO: 244049 - RNA, 19 nt, Artificial Sequence
  Description of Artificial Sequence: Synthetic oligonucleotide
  Antisense strand to SEQ ID NO: 244048
aaucguaauguguauuaac

SEQ ID NO: 244050 - RNA, 19 nt, Artificial Sequence
  Description of Artificial Sequence: Synthetic oligonucleotide
  Sense strand starting at position 1194 SEQ ID NO: 3140
ccaagacgucucuaacuag

SEQ ID NO: 244051 - RNA, 19 nt, Artificial Sequence
  Description of Artificial Sequence: Synthetic oligonucleotide
  Antisense strand to SEQ ID NO: 244050
cuaguuagagacgucuugg

SEQ ID NO: 244052 - RNA, 19 nt, Artificial Sequence
  Description of Artificial Sequence: Synthetic oligonucleotide
  Sense strand starting at position 1197 SEQ ID NO: 3140
agacgucucuaacuagaag

SEQ ID NO: 244053 - RNA, 19 nt, Artificial Sequence
  Description of Artificial Sequence: Synthetic oligonucleotide
  Antisense strand to SEQ ID NO: 244052
cuucuaguuagagacgucu

SEQ ID NO: 244054 - RNA, 19 nt, Artificial Sequence
  Description of Artificial Sequence: Synthetic oligonucleotide
  Sense strand starting at position 1554 SEQ ID NO: 3140
agaugagauagcggaaauu

SEQ ID NO: 244055 - RNA, 19 nt, Artificial Sequence
  Description of Artificial Sequence: Synthetic oligonucleotide
  Antisense strand to SEQ ID NO: 244054
aauuuccgcuaucucaucu

SEQ ID NO: 244056 - RNA, 19 nt, Artificial Sequence
  Description of Artificial Sequence: Synthetic oligonucleotide
  Sense strand starting at position 2005 SEQ ID NO: 3140
uucucaggacuuuguaaac

SEQ ID NO: 244057 - RNA, 19 nt, Artificial Sequence
  Description of Artificial Sequence: Synthetic oligonucleotide
  Antisense strand to SEQ ID NO: 244056
guuuacaaaguccugagaa

SEQ ID NO: 244058 - RNA, 19 nt, Artificial Sequence
  Description of Artificial Sequence: Synthetic oligonucleotide
  Sense strand starting at position 2041 SEQ ID NO: 3140
gagggaguuuccucaggga

SEQ ID NO: 244059 - RNA, 19 nt, Artificial Sequence
  Description of Artificial Sequence: Synthetic oligonucleotide
  Antisense strand to SEQ ID NO: 244058
ucccugaggaaacucccuc

SEQ ID NO: 244060 - RNA, 19 nt, Artificial Sequence
  Description of Artificial Sequence: Synthetic oligonucleotide
  Sense strand starting at position 2090 SEQ ID NO: 3140
agaggaggccuuugguuaa

SEQ ID NO: 244061 - RNA, 19 nt, Artificial Sequence
  Description of Artificial Sequence: Synthetic oligonucleotide
  Antisense strand to SEQ ID NO: 244060
uuaaccaaaggccuccucu

SEQ ID NO: 244062 - RNA, 19 nt, Artificial Sequence
  Description of Artificial Sequence: Synthetic oligonucleotide
  Sense strand starting at position 2156 SEQ ID NO: 3140
agaccaacgcucuagcaaa

SEQ ID NO: 244063 - RNA, 19 nt, Artificial Sequence
  Description of Artificial Sequence: Synthetic oligonucleotide
  Antisense strand to SEQ ID NO: 244062
uuugcuagagcguuggucu

SEQ ID NO: 244064 - RNA, 19 nt, Artificial Sequence
  Description of Artificial Sequence: Synthetic oligonucleotide
  Sense strand starting at position 2219 SEQ ID NO: 3140
acaauaagguccuuuguag

SEQ ID NO: 244065 - RNA, 19 nt, Artificial Sequence
  Description of Artificial Sequence: Synthetic oligonucleotide
  Antisense strand to SEQ ID NO: 244064
cuacaaaggaccuuauugu

SEQ ID NO: 244066 - RNA, 19 nt, Artificial Sequence
  Description of Artificial Sequence: Synthetic oligonucleotide
  Sense strand starting at position 2315 SEQ ID NO: 3140
ggacgugaacagggaguua

SEQ ID NO: 244067 - RNA, 19 nt, Artificial Sequence
  Description of Artificial Sequence: Synthetic oligonucleotide
  Antisense strand to SEQ ID NO: 244066
uaacucccuguucacgucc

SEQ ID NO: 244068 - RNA, 19 nt, Artificial Sequence
  Description of Artificial Sequence: Synthetic oligonucleotide
  Sense strand starting at position 2408 SEQ ID NO: 3140
agaagacaucuuugcagag

SEQ ID NO: 244069 - RNA, 19 nt, Artificial Sequence
  Description of Artificial Sequence: Synthetic oligonucleotide
  Antisense strand to SEQ ID NO: 244068
cucugcaaagaugucuucu

SEQ ID NO: 244070 - RNA, 19 nt, Artificial Sequence
  Description of Artificial Sequence: Synthetic oligonucleotide
  Sense strand starting at position 2409 SEQ ID NO: 3140
gaagacaucuuugcagaga

SEQ ID NO: 244071 - RNA, 19 nt, Artificial Sequence
  Description of Artificial Sequence: Synthetic oligonucleotide
  Antisense strand to SEQ ID NO: 244070
ucucugcaaagaugucuuc

SEQ ID NO: 244072 - RNA, 19 nt, Artificial Sequence
  Description of Artificial Sequence: Synthetic oligonucleotide
  Sense strand starting at position 2412 SEQ ID NO: 3140
gacaucuuugcagagaugu

SEQ ID NO: 244073 - RNA, 19 nt, Artificial Sequence
  Description of Artificial Sequence: Synthetic oligonucleotide
  Antisense strand to SEQ ID NO: 244072
acaucucugcaaagauguc

SEQ ID NO: 244074 - RNA, 19 nt, Artificial Sequence
  Description of Artificial Sequence: Synthetic oligonucleotide
  Sense strand starting at position 2418 SEQ ID NO: 3140
uuugcagagauguggagaa

SEQ ID NO: 244075 - RNA, 19 nt, Artificial Sequence
  Description of Artificial Sequence: Synthetic oligonucleotide
  Antisense strand to SEQ ID NO: 244074
uucuccacaucucugcaaa

SEQ ID NO: 244076 - RNA, 19 nt, Artificial Sequence
  Description of Artificial Sequence: Synthetic oligonucleotide
  Sense strand starting at position 2492 SEQ ID NO: 3140
uaacuuguuucccugggaa

SEQ ID NO: 244077 - RNA, 19 nt, Artificial Sequence
  Description of Artificial Sequence: Synthetic oligonucleotide
  Antisense strand to SEQ ID NO: 244076
uucccagggaaacaaguua

SEQ ID NO: 244078 - RNA, 19 nt, Artificial Sequence
  Description of Artificial Sequence: Synthetic oligonucleotide
  Sense strand starting at position 2573 SEQ ID NO: 3140
gauugcugguauuuaugca

SEQ ID NO: 244079 - RNA, 19 nt, Artificial Sequence
  Description of Artificial Sequence: Synthetic oligonucleotide
  Antisense strand to SEQ ID NO: 244078
ugcauaaauaccagcaauc

SEQ ID NO: 244080 - RNA, 19 nt, Artificial Sequence
  Description of Artificial Sequence: Synthetic oligonucleotide
  Sense strand starting at position 2605 SEQ ID NO: 3140
ccugguaacagauguggau

SEQ ID NO: 244081 - RNA, 19 nt, Artificial Sequence
  Description of Artificial Sequence: Synthetic oligonucleotide
  Antisense strand to SEQ ID NO: 244080
auccacaucuguuaccagg

SEQ ID NO: 244082 - RNA, 19 nt, Artificial Sequence
  Description of Artificial Sequence: Synthetic oligonucleotide
  Sense strand starting at position 2821 SEQ ID NO: 3140
cuaggaacuuaauuagcaa

SEQ ID NO: 244083 - RNA, 19 nt, Artificial Sequence
  Description of Artificial Sequence: Synthetic oligonucleotide
  Antisense strand to SEQ ID NO: 244082
uugcuaauuaaguuccuag

SEQ ID NO: 244084 - RNA, 19 nt, Artificial Sequence
  Description of Artificial Sequence: Synthetic oligonucleotide
  Sense strand starting at position 2824 SEQ ID NO: 3140
ggaacuuaauuagcaacua

SEQ ID NO: 244085 - RNA, 19 nt, Artificial Sequence
  Description of Artificial Sequence: Synthetic oligonucleotide
  Antisense strand to SEQ ID NO: 244084
uaguugcuaauuaaguucc

SEQ ID NO: 244086 - RNA, 19 nt, Artificial Sequence
  Description of Artificial Sequence: Synthetic oligonucleotide
  Sense strand starting at position 2943 SEQ ID NO: 3140
acauaaaugugaguccuua

SEQ ID NO: 244087 - RNA, 19 nt, Artificial Sequence
  Description of Artificial Sequence: Synthetic oligonucleotide
  Antisense strand to SEQ ID NO: 244086
uaaggacucacauuuaugu

SEQ ID NO: 244088 - RNA, 19 nt, Artificial Sequence
  Description of Artificial Sequence: Synthetic oligonucleotide
  Sense strand starting at position 2963 SEQ ID NO: 3140
gguuacuacucauucugaa

SEQ ID NO: 244089 - RNA, 19 nt, Artificial Sequence
  Description of Artificial Sequence: Synthetic oligonucleotide
  Antisense strand to SEQ ID NO: 244088
uucagaaugaguaguaacc

SEQ ID NO: 244090 - RNA, 19 nt, Artificial Sequence
  Description of Artificial Sequence: Synthetic oligonucleotide
  Sense strand starting at position 3036 SEQ ID NO: 3140
agaaucucaugguccagaa

SEQ ID NO: 244091 - RNA, 19 nt, Artificial Sequence
  Description of Artificial Sequence: Synthetic oligonucleotide
  Antisense strand to SEQ ID NO: 244090
uucuggaccaugagauucu

SEQ ID NO: 244092 - RNA, 19 nt, Artificial Sequence
  Description of Artificial Sequence: Synthetic oligonucleotide
  Sense strand starting at position 3040 SEQ ID NO: 3140
ucucaugguccagaauuau

SEQ ID NO: 244093 - RNA, 19 nt, Artificial Sequence
  Description of Artificial Sequence: Synthetic oligonucleotide
  Antisense strand to SEQ ID NO: 244092
auaauucuggaccaugaga

SEQ ID NO: 244094 - RNA, 19 nt, Artificial Sequence
  Description of Artificial Sequence: Synthetic oligonucleotide
  Sense strand starting at position 3076 SEQ ID NO: 3140
cauuuagguuaucaaagag

SEQ ID NO: 244095 - RNA, 19 nt, Artificial Sequence
  Description of Artificial Sequence: Synthetic oligonucleotide
  Antisense strand to SEQ ID NO: 244094
cucuuugauaaccuaaaug

SEQ ID NO: 244096 - RNA, 19 nt, Artificial Sequence
  Description of Artificial Sequence: Synthetic oligonucleotide
  Sense strand starting at position 3165 SEQ ID NO: 3140
uagugcuuugaacaggaua

SEQ ID NO: 244097 - RNA, 19 nt, Artificial Sequence
  Description of Artificial Sequence: Synthetic oligonucleotide
  Antisense strand to SEQ ID NO: 244096
uauccuguucaaagcacua

SEQ ID NO: 244098 - RNA, 19 nt, Artificial Sequence
  Description of Artificial Sequence: Synthetic oligonucleotide
  Sense strand starting at position 3194 SEQ ID NO: 3140
agagucuuggugaguguuu

SEQ ID NO: 244099 - RNA, 19 nt, Artificial Sequence
  Description of Artificial Sequence: Synthetic oligonucleotide
  Antisense strand to SEQ ID NO: 244098
aaacacucaccaagacucu

SEQ ID NO: 244100 - RNA, 19 nt, Artificial Sequence
  Description of Artificial Sequence: Synthetic oligonucleotide
  Sense strand starting at position 3235 SEQ ID NO: 3140
aaaugagcacuuuauggua

SEQ ID NO: 244101 - RNA, 19 nt, Artificial Sequence
  Description of Artificial Sequence: Synthetic oligonucleotide
  Antisense strand to SEQ ID NO: 244100
uaccauaaagugcucauuu

SEQ ID NO: 244102 - RNA, 19 nt, Artificial Sequence
  Description of Artificial Sequence: Synthetic oligonucleotide
  Sense strand starting at position 3385 SEQ ID NO: 3140
gaugacaucucuccuggga

SEQ ID NO: 244103 - RNA, 19 nt, Artificial Sequence
  Description of Artificial Sequence: Synthetic oligonucleotide
  Antisense strand to SEQ ID NO: 244102
ucccaggagagaugucauc

SEQ ID NO: 244104 - RNA, 19 nt, Artificial Sequence
  Description of Artificial Sequence: Synthetic oligonucleotide
  Sense strand starting at position 3394 SEQ ID NO: 3140
ucuccugggaguuguauuu

SEQ ID NO: 244105 - RNA, 19 nt, Artificial Sequence
  Description of Artificial Sequence: Synthetic oligonucleotide
  Antisense strand to SEQ ID NO: 244104
aaauacaacucccaggaga

SEQ ID NO: 244106 - RNA, 19 nt, Artificial Sequence
  Description of Artificial Sequence: Synthetic oligonucleotide
  Sense strand starting at position 3438 SEQ ID NO: 3140
uguuaaauacacugaaagu

SEQ ID NO: 244107 - RNA, 19 nt, Artificial Sequence
  Description of Artificial Sequence: Synthetic oligonucleotide
  Antisense strand to SEQ ID NO: 244106
acuuucaguguauuuaaca

SEQ ID NO: 244108 - RNA, 19 nt, Artificial Sequence
  Description of Artificial Sequence: Synthetic oligonucleotide
  Sense strand starting at position 3557 SEQ ID NO: 3140
augaccuuguacccagaua

SEQ ID NO: 244109 - RNA, 19 nt, Artificial Sequence
  Description of Artificial Sequence: Synthetic oligonucleotide
  Antisense strand to SEQ ID NO: 244108
uaucuggguacaaggucau

SEQ ID NO: 244110 - RNA, 19 nt, Artificial Sequence
  Description of Artificial Sequence: Synthetic oligonucleotide
  Sense strand starting at position 3858 SEQ ID NO: 3140
auuguugcucuggaagaga

SEQ ID NO: 244111 - RNA, 19 nt, Artificial Sequence
  Description of Artificial Sequence: Synthetic oligonucleotide
  Antisense strand to SEQ ID NO: 244110
ucucuuccagagcaacaau

SEQ ID NO: 244112 - RNA, 19 nt, Artificial Sequence
  Description of Artificial Sequence: Synthetic oligonucleotide
  Sense strand starting at position 3878 SEQ ID NO: 3140
aggaucaaauguuugguau

SEQ ID NO: 244113 - RNA, 19 nt, Artificial Sequence
  Description of Artificial Sequence: Synthetic oligonucleotide
  Antisense strand to SEQ ID NO: 244112
auaccaaacauuugauccu

SEQ ID NO: 244114 - RNA, 19 nt, Artificial Sequence
  Description of Artificial Sequence: Synthetic oligonucleotide
  Sense strand starting at position 30 SEQ ID NO: 3141
ucccaaagagcuugguuua

SEQ ID NO: 244115 - RNA, 19 nt, Artificial Sequence
  Description of Artificial Sequence: Synthetic oligonucleotide
  Antisense strand to SEQ ID NO: 244114
uaaaccaagcucuuuggga

SEQ ID NO: 244116 - RNA, 19 nt, Artificial Sequence
  Description of Artificial Sequence: Synthetic oligonucleotide
  Sense strand starting at position 33 SEQ ID NO: 3141
caaagagcuugguuuacag

SEQ ID NO: 244117 - RNA, 19 nt, Artificial Sequence
  Description of Artificial Sequence: Synthetic oligonucleotide
  Antisense strand to SEQ ID NO: 244116
cuguaaaccaagcucuuug

SEQ ID NO: 244118 - RNA, 19 nt, Artificial Sequence
  Description of Artificial Sequence: Synthetic oligonucleotide
  Sense strand starting at position 70 SEQ ID NO: 3141
ggccuagaaccaugauuaa

SEQ ID NO: 244119 - RNA, 19 nt, Artificial Sequence
  Description of Artificial Sequence: Synthetic oligonucleotide
  Antisense strand to SEQ ID NO: 244118
uuaaucaugguucuaggcc

SEQ ID NO: 244120 - RNA, 19 nt, Artificial Sequence
  Description of Artificial Sequence: Synthetic oligonucleotide
  Sense strand starting at position 653 SEQ ID NO: 3141
uguagaggucuuggaaucu

SEQ ID NO: 244121 - RNA, 19 nt, Artificial Sequence
  Description of Artificial Sequence: Synthetic oligonucleotide
  Antisense strand to SEQ ID NO: 244120
agauuccaagaccucuaca

SEQ ID NO: 244122 - RNA, 19 nt, Artificial Sequence
  Description of Artificial Sequence: Synthetic oligonucleotide
  Sense strand starting at position 1240 SEQ ID NO: 3141
aguagugguugaccugaaa

SEQ ID NO: 244123 - RNA, 19 nt, Artificial Sequence
  Description of Artificial Sequence: Synthetic oligonucleotide
  Antisense strand to SEQ ID NO: 244122
uuucaggucaaccacuacu

SEQ ID NO: 244124 - RNA, 19 nt, Artificial Sequence
  Description of Artificial Sequence: Synthetic oligonucleotide
  Sense strand starting at position 1294 SEQ ID NO: 3141
gaaaguagugguggagcua

SEQ ID NO: 244125 - RNA, 19 nt, Artificial Sequence
  Description of Artificial Sequence: Synthetic oligonucleotide
  Antisense strand to SEQ ID NO: 244124
uagcuccaccacuacuuuc

SEQ ID NO: 244126 - RNA, 19 nt, Artificial Sequence
  Description of Artificial Sequence: Synthetic oligonucleotide
  Sense strand starting at position 1478 SEQ ID NO: 3141
gcauacucgcugcuuacau

SEQ ID NO: 244127 - RNA, 19 nt, Artificial Sequence
  Description of Artificial Sequence: Synthetic oligonucleotide
  Antisense strand to SEQ ID NO: 244126
auguaagcagcgaguaugc

SEQ ID NO: 244128 - RNA, 19 nt, Artificial Sequence
  Description of Artificial Sequence: Synthetic oligonucleotide
  Sense strand starting at position 1673 SEQ ID NO: 3141
gauccagaucaucgcuaua

SEQ ID NO: 244129 - RNA, 19 nt, Artificial Sequence
  Description of Artificial Sequence: Synthetic oligonucleotide
  Antisense strand to SEQ ID NO: 244128
uauagcgaugaucuggauc

SEQ ID NO: 244130 - RNA, 19 nt, Artificial Sequence
  Description of Artificial Sequence: Synthetic oligonucleotide
  Sense strand starting at position 2048 SEQ ID NO: 3141
ucaugaauguucuccuuga

SEQ ID NO: 244131 - RNA, 19 nt, Artificial Sequence
  Description of Artificial Sequence: Synthetic oligonucleotide
  Antisense strand to SEQ ID NO: 244130
ucaaggagaacauucauga

SEQ ID NO: 244132 - RNA, 19 nt, Artificial Sequence
  Description of Artificial Sequence: Synthetic oligonucleotide
  Sense strand starting at position 2253 SEQ ID NO: 3141
acggaauuguacccaaaua

SEQ ID NO: 244133 - RNA, 19 nt, Artificial Sequence
  Description of Artificial Sequence: Synthetic oligonucleotide
  Antisense strand to SEQ ID NO: 244132
uauuuggguacaauuccgu

SEQ ID NO: 244134 - RNA, 19 nt, Artificial Sequence
  Description of Artificial Sequence: Synthetic oligonucleotide
  Sense strand starting at position 2299 SEQ ID NO: 3141
ggcuaauaacgauagcuaa

SEQ ID NO: 244135 - RNA, 19 nt, Artificial Sequence
  Description of Artificial Sequence: Synthetic oligonucleotide
  Antisense strand to SEQ ID NO: 244134
uuagcuaucguuauuagcc

SEQ ID NO: 244136 - RNA, 19 nt, Artificial Sequence
  Description of Artificial Sequence: Synthetic oligonucleotide
  Sense strand starting at position 2307 SEQ ID NO: 3141
acgauagcuaacgaugaau

SEQ ID NO: 244137 - RNA, 19 nt, Artificial Sequence
  Description of Artificial Sequence: Synthetic oligonucleotide
  Antisense strand to SEQ ID NO: 244136
auucaucguuagcuaucgu

SEQ ID NO: 244138 - RNA, 19 nt, Artificial Sequence
  Description of Artificial Sequence: Synthetic oligonucleotide
  Sense strand starting at position 2316 SEQ ID NO: 3141
aacgaugaauacucaguau

SEQ ID NO: 244139 - RNA, 19 nt, Artificial Sequence
  Description of Artificial Sequence: Synthetic oligonucleotide
  Antisense strand to SEQ ID NO: 244138
auacugaguauucaucguu

SEQ ID NO: 244140 - RNA, 19 nt, Artificial Sequence
  Description of Artificial Sequence: Synthetic oligonucleotide
  Sense strand starting at position 2319 SEQ ID NO: 3141
gaugaauacucaguaugug

SEQ ID NO: 244141 - RNA, 19 nt, Artificial Sequence
  Description of Artificial Sequence: Synthetic oligonucleotide
  Antisense strand to SEQ ID NO: 244140
cacauacugaguauucauc

SEQ ID NO: 244142 - RNA, 19 nt, Artificial Sequence
  Description of Artificial Sequence: Synthetic oligonucleotide
  Sense strand starting at position 2320 SEQ ID NO: 3141
augaauacucaguaugugu

SEQ ID NO: 244143 - RNA, 19 nt, Artificial Sequence
  Description of Artificial Sequence: Synthetic oligonucleotide
  Antisense strand to SEQ ID NO: 244142
acacauacugaguauucau

SEQ ID NO: 244144 - RNA, 19 nt, Artificial Sequence
  Description of Artificial Sequence: Synthetic oligonucleotide
  Sense strand starting at position 2342 SEQ ID NO: 3141
ccagguacuguguaaagua

SEQ ID NO: 244145 - RNA, 19 nt, Artificial Sequence
  Description of Artificial Sequence: Synthetic oligonucleotide
  Antisense strand to SEQ ID NO: 244144
uacuuuacacaguaccugg

SEQ ID NO: 244146 - RNA, 19 nt, Artificial Sequence
  Description of Artificial Sequence: Synthetic oligonucleotide
  Sense strand starting at position 2407 SEQ ID NO: 3141
gggauagcguuauuauuag

SEQ ID NO: 244147 - RNA, 19 nt, Artificial Sequence
  Description of Artificial Sequence: Synthetic oligonucleotide
  Antisense strand to SEQ ID NO: 244146
cuaauaauaacgcuauccc

SEQ ID NO: 244148 - RNA, 19 nt, Artificial Sequence
  Description of Artificial Sequence: Synthetic oligonucleotide
  Sense strand starting at position 2507 SEQ ID NO: 3141
cagaguuaguagcuuuaaa

SEQ ID NO: 244149 - RNA, 19 nt, Artificial Sequence
  Description of Artificial Sequence: Synthetic oligonucleotide
  Antisense strand to SEQ ID NO: 244148
uuuaaagcuacuaacucug

SEQ ID NO: 244150 - RNA, 19 nt, Artificial Sequence
  Description of Artificial Sequence: Synthetic oligonucleotide
  Sense strand starting at position 2656 SEQ ID NO: 3141
gccaaagaaacguaaggua

SEQ ID NO: 244151 - RNA, 19 nt, Artificial Sequence
  Description of Artificial Sequence: Synthetic oligonucleotide
  Antisense strand to SEQ ID NO: 244150
uaccuuacguuucuuuggc

SEQ ID NO: 244152 - RNA, 19 nt, Artificial Sequence
  Description of Artificial Sequence: Synthetic oligonucleotide
  Sense strand starting at position 2681 SEQ ID NO: 3141
uuccuaauuggguaauggu

SEQ ID NO: 244153 - RNA, 19 nt, Artificial Sequence
  Description of Artificial Sequence: Synthetic oligonucleotide
  Antisense strand to SEQ ID NO: 244152
accauuacccaauuaggaa

SEQ ID NO: 244154 - RNA, 19 nt, Artificial Sequence
  Description of Artificial Sequence: Synthetic oligonucleotide
  Sense strand starting at position 2688 SEQ ID NO: 3141
uuggguaaugguggguuaa

SEQ ID NO: 244155 - RNA, 19 nt, Artificial Sequence
  Description of Artificial Sequence: Synthetic oligonucleotide
  Antisense strand to SEQ ID NO: 244154
uuaacccaccauuacccaa

SEQ ID NO: 244156 - RNA, 19 nt, Artificial Sequence
  Description of Artificial Sequence: Synthetic oligonucleotide
  Sense strand starting at position 2689 SEQ ID NO: 3141
uggguaaugguggguuaaa

SEQ ID NO: 244157 - RNA, 19 nt, Artificial Sequence
  Description of Artificial Sequence: Synthetic oligonucleotide
  Antisense strand to SEQ ID NO: 244156
uuuaacccaccauuaccca

SEQ ID NO: 244158 - RNA, 19 nt, Artificial Sequence
  Description of Artificial Sequence: Synthetic oligonucleotide
  Sense strand starting at position 2690 SEQ ID NO: 3141
ggguaaugguggguuaaag

SEQ ID NO: 244159 - RNA, 19 nt, Artificial Sequence
  Description of Artificial Sequence: Synthetic oligonucleotide
  Antisense strand to SEQ ID NO: 244158
cuuuaacccaccauuaccc

SEQ ID NO: 244160 - RNA, 19 nt, Artificial Sequence
  Description of Artificial Sequence: Synthetic oligonucleotide
  Sense strand starting at position 3109 SEQ ID NO: 3141
ggguuagagauugguuaag

SEQ ID NO: 244161 - RNA, 19 nt, Artificial Sequence
  Description of Artificial Sequence: Synthetic oligonucleotide
  Antisense strand to SEQ ID NO: 244160
cuuaaccaaucucuaaccc

SEQ ID NO: 244162 - RNA, 19 nt, Artificial Sequence
  Description of Artificial Sequence: Synthetic oligonucleotide
  Sense strand starting at position 3111 SEQ ID NO: 3141
guuagagauugguuaagua

SEQ ID NO: 244163 - RNA, 19 nt, Artificial Sequence
  Description of Artificial Sequence: Synthetic oligonucleotide
  Antisense strand to SEQ ID NO: 244162
uacuuaaccaaucucuaac

SEQ ID NO: 244164 - RNA, 19 nt, Artificial Sequence
  Description of Artificial Sequence: Synthetic oligonucleotide
  Sense strand starting at position 3135 SEQ ID NO: 3141
gagacugacuuguugaucu

SEQ ID NO: 244165 - RNA, 19 nt, Artificial Sequence
  Description of Artificial Sequence: Synthetic oligonucleotide
  Antisense strand to SEQ ID NO: 244164
agaucaacaagucagucuc

SEQ ID NO: 244166 - RNA, 19 nt, Artificial Sequence
  Description of Artificial Sequence: Synthetic oligonucleotide
  Sense strand starting at position 3137 SEQ ID NO: 3141
gacugacuuguugaucuuu

SEQ ID NO: 244167 - RNA, 19 nt, Artificial Sequence
  Description of Artificial Sequence: Synthetic oligonucleotide
  Antisense strand to SEQ ID NO: 244166
aaagaucaacaagucaguc

SEQ ID NO: 244168 - RNA, 19 nt, Artificial Sequence
  Description of Artificial Sequence: Synthetic oligonucleotide
  Sense strand starting at position 3142 SEQ ID NO: 3141
acuuguugaucuuuggagu

SEQ ID NO: 244169 - RNA, 19 nt, Artificial Sequence
  Description of Artificial Sequence: Synthetic oligonucleotide
  Antisense strand to SEQ ID NO: 244168
acuccaaagaucaacaagu

SEQ ID NO: 244170 - RNA, 19 nt, Artificial Sequence
  Description of Artificial Sequence: Synthetic oligonucleotide
  Sense strand starting at position 3155 SEQ ID NO: 3141
uggagucccguucagaauu

SEQ ID NO: 244171 - RNA, 19 nt, Artificial Sequence
  Description of Artificial Sequence: Synthetic oligonucleotide
  Antisense strand to SEQ ID NO: 244170
aauucugaacgggacucca

SEQ ID NO: 244172 - RNA, 19 nt, Artificial Sequence
  Description of Artificial Sequence: Synthetic oligonucleotide
  Sense strand starting at position 3226 SEQ ID NO: 3141
ucauaagccugcucugaaa

SEQ ID NO: 244173 - RNA, 19 nt, Artificial Sequence
  Description of Artificial Sequence: Synthetic oligonucleotide
  Antisense strand to SEQ ID NO: 244172
uuucagagcaggcuuauga

SEQ ID NO: 244174 - RNA, 19 nt, Artificial Sequence
  Description of Artificial Sequence: Synthetic oligonucleotide
  Sense strand starting at position 3228 SEQ ID NO: 3141
auaagccugcucugaaaug

SEQ ID NO: 244175 - RNA, 19 nt, Artificial Sequence
  Description of Artificial Sequence: Synthetic oligonucleotide
  Antisense strand to SEQ ID NO: 244174
cauuucagagcaggcuuau

SEQ ID NO: 244176 - RNA, 19 nt, Artificial Sequence
  Description of Artificial Sequence: Synthetic oligonucleotide
  Sense strand starting at position 3255 SEQ ID NO: 3141
uugggaagaucuguaacuc

SEQ ID NO: 244177 - RNA, 19 nt, Artificial Sequence
  Description of Artificial Sequence: Synthetic oligonucleotide
  Antisense strand to SEQ ID NO: 244176
gaguuacagaucuucccaa

SEQ ID NO: 244178 - RNA, 19 nt, Artificial Sequence
  Description of Artificial Sequence: Synthetic oligonucleotide
  Sense strand starting at position 3263 SEQ ID NO: 3141
aucuguaacucuccaggaa

SEQ ID NO: 244179 - RNA, 19 nt, Artificial Sequence
  Description of Artificial Sequence: Synthetic oligonucleotide
  Antisense strand to SEQ ID NO: 244178
uuccuggagaguuacagau

SEQ ID NO: 244180 - RNA, 19 nt, Artificial Sequence
  Description of Artificial Sequence: Synthetic oligonucleotide
  Sense strand starting at position 3267 SEQ ID NO: 3141
guaacucuccaggaagugu

SEQ ID NO: 244181 - RNA, 19 nt, Artificial Sequence
  Description of Artificial Sequence: Synthetic oligonucleotide
  Antisense strand to SEQ ID NO: 244180
acacuuccuggagaguuac

SEQ ID NO: 244182 - RNA, 19 nt, Artificial Sequence
  Description of Artificial Sequence: Synthetic oligonucleotide
  Sense strand starting at position 3437 SEQ ID NO: 3141
ggccucagagcucaaauga

SEQ ID NO: 244183 - RNA, 19 nt, Artificial Sequence
  Description of Artificial Sequence: Synthetic oligonucleotide
  Antisense strand to SEQ ID NO: 244182
ucauuugagcucugaggcc

SEQ ID NO: 244184 - RNA, 19 nt, Artificial Sequence
  Description of Artificial Sequence: Synthetic oligonucleotide
  Sense strand starting at position 3498 SEQ ID NO: 3141
ucagaauccuccucuggau

SEQ ID NO: 244185 - RNA, 19 nt, Artificial Sequence
  Description of Artificial Sequence: Synthetic oligonucleotide
  Antisense strand to SEQ ID NO: 244184
auccagaggaggauucuga

SEQ ID NO: 244186 - RNA, 19 nt, Artificial Sequence
  Description of Artificial Sequence: Synthetic oligonucleotide
  Sense strand starting at position 3500 SEQ ID NO: 3141
agaauccuccucuggauau

SEQ ID NO: 244187 - RNA, 19 nt, Artificial Sequence
  Description of Artificial Sequence: Synthetic oligonucleotide
  Antisense strand to SEQ ID NO: 244186
auauccagaggaggauucu

SEQ ID NO: 244188 - RNA, 19 nt, Artificial Sequence
  Description of Artificial Sequence: Synthetic oligonucleotide
  Sense strand starting at position 3519 SEQ ID NO: 3141
gguggcagagcaugaauau

SEQ ID NO: 244189 - RNA, 19 nt, Artificial Sequence
  Description of Artificial Sequence: Synthetic oligonucleotide
  Antisense strand to SEQ ID NO: 244188
auauucaugcucugccacc

SEQ ID NO: 244190 - RNA, 19 nt, Artificial Sequence
  Description of Artificial Sequence: Synthetic oligonucleotide
  Sense strand starting at position 3520 SEQ ID NO: 3141
guggcagagcaugaauaua

SEQ ID NO: 244191 - RNA, 19 nt, Artificial Sequence
  Description of Artificial Sequence: Synthetic oligonucleotide
  Antisense strand to SEQ ID NO: 244190
uauauucaugcucugccac

SEQ ID NO: 244192 - RNA, 19 nt, Artificial Sequence
  Description of Artificial Sequence: Synthetic oligonucleotide
  Sense strand starting at position 3564 SEQ ID NO: 3141
acugacuuugacugacuaa

SEQ ID NO: 244193 - RNA, 19 nt, Artificial Sequence
  Description of Artificial Sequence: Synthetic oligonucleotide
  Antisense strand to SEQ ID NO: 244192
uuagucagucaaagucagu

SEQ ID NO: 244194 - RNA, 19 nt, Artificial Sequence
  Description of Artificial Sequence: Synthetic oligonucleotide
  Sense strand starting at position 163 SEQ ID NO: 3142
cucuguacuccagagcaaa

SEQ ID NO: 244195 - RNA, 19 nt, Artificial Sequence
  Description of Artificial Sequence: Synthetic oligonucleotide
  Antisense strand to SEQ ID NO: 244194
uuugcucuggaguacagag

SEQ ID NO: 244196 - RNA, 19 nt, Artificial Sequence
  Description of Artificial Sequence: Synthetic oligonucleotide
  Sense strand starting at position 226 SEQ ID NO: 3142
uuccauucucaaggagaac

SEQ ID NO: 244197 - RNA, 19 nt, Artificial Sequence
  Description of Artificial Sequence: Synthetic oligonucleotide
  Antisense strand to SEQ ID NO: 244196
guucuccuugagaauggaa

SEQ ID NO: 244198 - RNA, 19 nt, Artificial Sequence
  Description of Artificial Sequence: Synthetic oligonucleotide
  Sense strand starting at position 529 SEQ ID NO: 3142
cugguugugucccucaaau

SEQ ID NO: 244199 - RNA, 19 nt, Artificial Sequence
  Description of Artificial Sequence: Synthetic oligonucleotide
  Antisense strand to SEQ ID NO: 244198
auuugagggacacaaccag

SEQ ID NO: 244200 - RNA, 19 nt, Artificial Sequence
  Description of Artificial Sequence: Synthetic oligonucleotide
  Sense strand starting at position 531 SEQ ID NO: 3142
gguugugucccucaaauaa

SEQ ID NO: 244201 - RNA, 19 nt, Artificial Sequence
  Description of Artificial Sequence: Synthetic oligonucleotide
  Antisense strand to SEQ ID NO: 244200
uuauuugagggacacaacc

SEQ ID NO: 244202 - RNA, 19 nt, Artificial Sequence
  Description of Artificial Sequence: Synthetic oligonucleotide
  Sense strand starting at position 609 SEQ ID NO: 3142
aggaaagggucccucaauu

SEQ ID NO: 244203 - RNA, 19 nt, Artificial Sequence
  Description of Artificial Sequence: Synthetic oligonucleotide
  Antisense strand to SEQ ID NO: 244202
aauugagggacccuuuccu

SEQ ID NO: 244204 - RNA, 19 nt, Artificial Sequence
  Description of Artificial Sequence: Synthetic oligonucleotide
  Sense strand starting at position 736 SEQ ID NO: 3142
cggcgaucgggcuuaaguu

SEQ ID NO: 244205 - RNA, 19 nt, Artificial Sequence
  Description of Artificial Sequence: Synthetic oligonucleotide
  Antisense strand to SEQ ID NO: 244204
aacuuaagcccgaucgccg

SEQ ID NO: 244206 - RNA, 19 nt, Artificial Sequence
  Description of Artificial Sequence: Synthetic oligonucleotide
  Sense strand starting at position 737 SEQ ID NO: 3142
ggcgaucgggcuuaaguua

SEQ ID NO: 244207 - RNA, 19 nt, Artificial Sequence
  Description of Artificial Sequence: Synthetic oligonucleotide
  Antisense strand to SEQ ID NO: 244206
uaacuuaagcccgaucgcc

SEQ ID NO: 244208 - RNA, 19 nt, Artificial Sequence
  Description of Artificial Sequence: Synthetic oligonucleotide
  Sense strand starting at position 838 SEQ ID NO: 3142
gcucguucccuauggagaa

SEQ ID NO: 244209 - RNA, 19 nt, Artificial Sequence
  Description of Artificial Sequence: Synthetic oligonucleotide
  Antisense strand to SEQ ID NO: 244208
uucuccauagggaacgagc

SEQ ID NO: 244210 - RNA, 19 nt, Artificial Sequence
  Description of Artificial Sequence: Synthetic oligonucleotide
  Sense strand starting at position 840 SEQ ID NO: 3142
ucguucccuauggagaaau

SEQ ID NO: 244211 - RNA, 19 nt, Artificial Sequence
  Description of Artificial Sequence: Synthetic oligonucleotide
  Antisense strand to SEQ ID NO: 244210
auuucuccauagggaacga

SEQ ID NO: 244212 - RNA, 19 nt, Artificial Sequence
  Description of Artificial Sequence: Synthetic oligonucleotide
  Sense strand starting at position 889 SEQ ID NO: 3142
cgacucauccuacaaagua

SEQ ID NO: 244213 - RNA, 19 nt, Artificial Sequence
  Description of Artificial Sequence: Synthetic oligonucleotide
  Antisense strand to SEQ ID NO: 244212
uacuuuguaggaugagucg

SEQ ID NO: 244214 - RNA, 19 nt, Artificial Sequence
  Description of Artificial Sequence: Synthetic oligonucleotide
  Sense strand starting at position 1154 SEQ ID NO: 3142
auagaagucuggguccguu

SEQ ID NO: 244215 - RNA, 19 nt, Artificial Sequence
  Description of Artificial Sequence: Synthetic oligonucleotide
  Antisense strand to SEQ ID NO: 244214
aacggacccagacuucuau

SEQ ID NO: 244216 - RNA, 19 nt, Artificial Sequence
  Description of Artificial Sequence: Synthetic oligonucleotide
  Sense strand starting at position 2187 SEQ ID NO: 3142
gcacucuucuggccugacu

SEQ ID NO: 244217 - RNA, 19 nt, Artificial Sequence
  Description of Artificial Sequence: Synthetic oligonucleotide
  Antisense strand to SEQ ID NO: 244216
agucaggccagaagagugc

SEQ ID NO: 244218 - RNA, 19 nt, Artificial Sequence
  Description of Artificial Sequence: Synthetic oligonucleotide
  Sense strand starting at position 2189 SEQ ID NO: 3142
acucuucuggccugacuau

SEQ ID NO: 244219 - RNA, 19 nt, Artificial Sequence
  Description of Artificial Sequence: Synthetic oligonucleotide
  Antisense strand to SEQ ID NO: 244218
auagucaggccagaagagu

SEQ ID NO: 244220 - RNA, 19 nt, Artificial Sequence
  Description of Artificial Sequence: Synthetic oligonucleotide
  Sense strand starting at position 2202 SEQ ID NO: 3142
gacuaugacuccugaagga

SEQ ID NO: 244221 - RNA, 19 nt, Artificial Sequence
  Description of Artificial Sequence: Synthetic oligonucleotide
  Antisense strand to SEQ ID NO: 244220
uccuucaggagucauaguc

SEQ ID NO: 244222 - RNA, 19 nt, Artificial Sequence
  Description of Artificial Sequence: Synthetic oligonucleotide
  Sense strand starting at position 2295 SEQ ID NO: 3142
aguucaguucgcgaggacu

SEQ ID NO: 244223 - RNA, 19 nt, Artificial Sequence
  Description of Artificial Sequence: Synthetic oligonucleotide
  Antisense strand to SEQ ID NO: 244222
aguccucgcgaacugaacu

SEQ ID NO: 244224 - RNA, 19 nt, Artificial Sequence
  Description of Artificial Sequence: Synthetic oligonucleotide
  Sense strand starting at position 2545 SEQ ID NO: 3142
ggucuuagugacuauugca

SEQ ID NO: 244225 - RNA, 19 nt, Artificial Sequence
  Description of Artificial Sequence: Synthetic oligonucleotide
  Antisense strand to SEQ ID NO: 244224
ugcaauagucacuaagacc

SEQ ID NO: 244226 - RNA, 19 nt, Artificial Sequence
  Description of Artificial Sequence: Synthetic oligonucleotide
  Sense strand starting at position 2575 SEQ ID NO: 3142
cugggagcucgugacuaca

SEQ ID NO: 244227 - RNA, 19 nt, Artificial Sequence
  Description of Artificial Sequence: Synthetic oligonucleotide
  Antisense strand to SEQ ID NO: 244226
uguagucacgagcucccag

SEQ ID NO: 244228 - RNA, 19 nt, Artificial Sequence
  Description of Artificial Sequence: Synthetic oligonucleotide
  Sense strand starting at position 2712 SEQ ID NO: 3142
gcacuuguugcaggacaga

SEQ ID NO: 244229 - RNA, 19 nt, Artificial Sequence
  Description of Artificial Sequence: Synthetic oligonucleotide
  Antisense strand to SEQ ID NO: 244228
ucuguccugcaacaagugc

SEQ ID NO: 244230 - RNA, 19 nt, Artificial Sequence
  Description of Artificial Sequence: Synthetic oligonucleotide
  Sense strand starting at position 2770 SEQ ID NO: 3142
aucagcucuccagguguga

SEQ ID NO: 244231 - RNA, 19 nt, Artificial Sequence
  Description of Artificial Sequence: Synthetic oligonucleotide
  Antisense strand to SEQ ID NO: 244230
ucacaccuggagagcugau

SEQ ID NO: 244232 - RNA, 19 nt, Artificial Sequence
  Description of Artificial Sequence: Synthetic oligonucleotide
  Sense strand starting at position 2880 SEQ ID NO: 3142
ugagucaucuacccaagcu

SEQ ID NO: 244233 - RNA, 19 nt, Artificial Sequence
  Description of Artificial Sequence: Synthetic oligonucleotide
  Antisense strand to SEQ ID NO: 244232
agcuuggguagaugacuca

SEQ ID NO: 244234 - RNA, 19 nt, Artificial Sequence
  Description of Artificial Sequence: Synthetic oligonucleotide
  Sense strand starting at position 2980 SEQ ID NO: 3142
cagagagauuccuugggug

SEQ ID NO: 244235 - RNA, 19 nt, Artificial Sequence
  Description of Artificial Sequence: Synthetic oligonucleotide
  Antisense strand to SEQ ID NO: 244234
cacccaaggaaucucucug

SEQ ID NO: 244236 - RNA, 19 nt, Artificial Sequence
  Description of Artificial Sequence: Synthetic oligonucleotide
  Sense strand starting at position 2982 SEQ ID NO: 3142
gagagauuccuugggugac

SEQ ID NO: 244237 - RNA, 19 nt, Artificial Sequence
  Description of Artificial Sequence: Synthetic oligonucleotide
  Antisense strand to SEQ ID NO: 244236
gucacccaaggaaucucuc

SEQ ID NO: 244238 - RNA, 19 nt, Artificial Sequence
  Description of Artificial Sequence: Synthetic oligonucleotide
  Sense strand starting at position 3157 SEQ ID NO: 3142
cucugaaggugaccuagau

SEQ ID NO: 244239 - RNA, 19 nt, Artificial Sequence
  Description of Artificial Sequence: Synthetic oligonucleotide
  Antisense strand to SEQ ID NO: 244238
aucuaggucaccuucagag

SEQ ID NO: 244240 - RNA, 19 nt, Artificial Sequence
  Description of Artificial Sequence: Synthetic oligonucleotide
  Sense strand starting at position 3186 SEQ ID NO: 3142
aggcaaguaccuggucuua

SEQ ID NO: 244241 - RNA, 19 nt, Artificial Sequence
  Description of Artificial Sequence: Synthetic oligonucleotide
  Antisense strand to SEQ ID NO: 244240
uaagaccagguacuugccu

SEQ ID NO: 244242 - RNA, 19 nt, Artificial Sequence
  Description of Artificial Sequence: Synthetic oligonucleotide
  Sense strand starting at position 3188 SEQ ID NO: 3142
gcaaguaccuggucuuaag

SEQ ID NO: 244243 - RNA, 19 nt, Artificial Sequence
  Description of Artificial Sequence: Synthetic oligonucleotide
  Antisense strand to SEQ ID NO: 244242
cuuaagaccagguacuugc

SEQ ID NO: 244244 - RNA, 19 nt, Artificial Sequence
  Description of Artificial Sequence: Synthetic oligonucleotide
  Sense strand starting at position 3216 SEQ ID NO: 3142
ugggaagaguuaucgggaa

SEQ ID NO: 244245 - RNA, 19 nt, Artificial Sequence
  Description of Artificial Sequence: Synthetic oligonucleotide
  Antisense strand to SEQ ID NO: 244244
uucccgauaacucuuccca

SEQ ID NO: 244246 - RNA, 19 nt, Artificial Sequence
  Description of Artificial Sequence: Synthetic oligonucleotide
  Sense strand starting at position 3229 SEQ ID NO: 3142
cgggaaagacuuugguaag

SEQ ID NO: 244247 - RNA, 19 nt, Artificial Sequence
  Description of Artificial Sequence: Synthetic oligonucleotide
  Antisense strand to SEQ ID NO: 244246
cuuaccaaagucuuucccg

SEQ ID NO: 244248 - RNA, 19 nt, Artificial Sequence
  Description of Artificial Sequence: Synthetic oligonucleotide
  Sense strand starting at position 3230 SEQ ID NO: 3142
gggaaagacuuugguaaga

SEQ ID NO: 244249 - RNA, 19 nt, Artificial Sequence
  Description of Artificial Sequence: Synthetic oligonucleotide
  Antisense strand to SEQ ID NO: 244248
ucuuaccaaagucuuuccc

SEQ ID NO: 244250 - RNA, 19 nt, Artificial Sequence
  Description of Artificial Sequence: Synthetic oligonucleotide
  Sense strand starting at position 3232 SEQ ID NO: 3142
gaaagacuuugguaagaua

SEQ ID NO: 244251 - RNA, 19 nt, Artificial Sequence
  Description of Artificial Sequence: Synthetic oligonucleotide
  Antisense strand to SEQ ID NO: 244250
uaucuuaccaaagucuuuc

SEQ ID NO: 244252 - RNA, 19 nt, Artificial Sequence
  Description of Artificial Sequence: Synthetic oligonucleotide
  Sense strand starting at position 3273 SEQ ID NO: 3142
aucagaggcuuugaagaaa

SEQ ID NO: 244253 - RNA, 19 nt, Artificial Sequence
  Description of Artificial Sequence: Synthetic oligonucleotide
  Antisense strand to SEQ ID NO: 244252
uuucuucaaagccucugau

SEQ ID NO: 244254 - RNA, 19 nt, Artificial Sequence
  Description of Artificial Sequence: Synthetic oligonucleotide
  Sense strand starting at position 3313 SEQ ID NO: 3142
ugauguggugguugaggaa

SEQ ID NO: 244255 - RNA, 19 nt, Artificial Sequence
  Description of Artificial Sequence: Synthetic oligonucleotide
  Antisense strand to SEQ ID NO: 244254
uuccucaaccaccacauca

SEQ ID NO: 244256 - RNA, 19 nt, Artificial Sequence
  Description of Artificial Sequence: Synthetic oligonucleotide
  Sense strand starting at position 3335 SEQ ID NO: 3142
ggaguuucuugggugaguc

SEQ ID NO: 244257 - RNA, 19 nt, Artificial Sequence
  Description of Artificial Sequence: Synthetic oligonucleotide
  Antisense strand to SEQ ID NO: 244256
gacucacccaagaaacucc

SEQ ID NO: 244258 - RNA, 19 nt, Artificial Sequence
  Description of Artificial Sequence: Synthetic oligonucleotide
  Sense strand starting at position 3347 SEQ ID NO: 3142
gugagucggagcugaaauu

SEQ ID NO: 244259 - RNA, 19 nt, Artificial Sequence
  Description of Artificial Sequence: Synthetic oligonucleotide
  Antisense strand to SEQ ID NO: 244258
aauuucagcuccgacucac

SEQ ID NO: 244260 - RNA, 19 nt, Artificial Sequence
  Description of Artificial Sequence: Synthetic oligonucleotide
  Sense strand starting at position 3371 SEQ ID NO: 3142
uuguaauucuaccagagga

SEQ ID NO: 244261 - RNA, 19 nt, Artificial Sequence
  Description of Artificial Sequence: Synthetic oligonucleotide
  Antisense strand to SEQ ID NO: 244260
uccucugguagaauuacaa

SEQ ID NO: 244262 - RNA, 19 nt, Artificial Sequence
  Description of Artificial Sequence: Synthetic oligonucleotide
  Sense strand starting at position 3897 SEQ ID NO: 3142
aggaaauccaguugacugu

SEQ ID NO: 244263 - RNA, 19 nt, Artificial Sequence
  Description of Artificial Sequence: Synthetic oligonucleotide
  Antisense strand to SEQ ID NO: 244262
acagucaacuggauuuccu

SEQ ID NO: 244264 - RNA, 19 nt, Artificial Sequence
  Description of Artificial Sequence: Synthetic oligonucleotide
  Sense strand starting at position 3915 SEQ ID NO: 3142
uggcgcuuuggcuuaauau

SEQ ID NO: 244265 - RNA, 19 nt, Artificial Sequence
  Description of Artificial Sequence: Synthetic oligonucleotide
  Antisense strand to SEQ ID NO: 244264
auauuaagccaaagcgcca

SEQ ID NO: 244266 - RNA, 19 nt, Artificial Sequence
  Description of Artificial Sequence: Synthetic oligonucleotide
  Sense strand starting at position 3916 SEQ ID NO: 3142
ggcgcuuuggcuuaauaug

SEQ ID NO: 244267 - RNA, 19 nt, Artificial Sequence
  Description of Artificial Sequence: Synthetic oligonucleotide
  Antisense strand to SEQ ID NO: 244266
cauauuaagccaaagcgcc

SEQ ID NO: 244268 - RNA, 19 nt, Artificial Sequence
  Description of Artificial Sequence: Synthetic oligonucleotide
  Sense strand starting at position 3925 SEQ ID NO: 3142
gcuuaauaugcugggcagu

SEQ ID NO: 244269 - RNA, 19 nt, Artificial Sequence
  Description of Artificial Sequence: Synthetic oligonucleotide
  Antisense strand to SEQ ID NO: 244268
acugcccagcauauuaagc

SEQ ID NO: 244270 - RNA, 19 nt, Artificial Sequence
  Description of Artificial Sequence: Synthetic oligonucleotide
  Sense strand starting at position 3926 SEQ ID NO: 3142
cuuaauaugcugggcagua

SEQ ID NO: 244271 - RNA, 19 nt, Artificial Sequence
  Description of Artificial Sequence: Synthetic oligonucleotide
  Antisense strand to SEQ ID NO: 244270
uacugcccagcauauuaag

SEQ ID NO: 244272 - RNA, 19 nt, Artificial Sequence
  Description of Artificial Sequence: Synthetic oligonucleotide
  Sense strand starting at position 3927 SEQ ID NO: 3142
uuaauaugcugggcaguaa

SEQ ID NO: 244273 - RNA, 19 nt, Artificial Sequence
  Description of Artificial Sequence: Synthetic oligonucleotide
  Antisense strand to SEQ ID NO: 244272
uuacugcccagcauauuaa

SEQ ID NO: 244274 - RNA, 19 nt, Artificial Sequence
  Description of Artificial Sequence: Synthetic oligonucleotide
  Sense strand starting at position 405 SEQ ID NO: 3143
ggaauuagcucagaagaua

SEQ ID NO: 244275 - RNA, 19 nt, Artificial Sequence
  Description of Artificial Sequence: Synthetic oligonucleotide
  Antisense strand to SEQ ID NO: 244274
uaucuucugagcuaauucc

SEQ ID NO: 244276 - RNA, 19 nt, Artificial Sequence
  Description of Artificial Sequence: Synthetic oligonucleotide
  Sense strand starting at position 588 SEQ ID NO: 3143
uggaccuugugaccgaaua

SEQ ID NO: 244277 - RNA, 19 nt, Artificial Sequence
  Description of Artificial Sequence: Synthetic oligonucleotide
  Antisense strand to SEQ ID NO: 244276
uauucggucacaaggucca

SEQ ID NO: 244278 - RNA, 19 nt, Artificial Sequence
  Description of Artificial Sequence: Synthetic oligonucleotide
  Sense strand starting at position 589 SEQ ID NO: 3143
ggaccuugugaccgaauaa

SEQ ID NO: 244279 - RNA, 19 nt, Artificial Sequence
  Description of Artificial Sequence: Synthetic oligonucleotide
  Antisense strand to SEQ ID NO: 244278
uuauucggucacaaggucc

SEQ ID NO: 244280 - RNA, 19 nt, Artificial Sequence
  Description of Artificial Sequence: Synthetic oligonucleotide
  Sense strand starting at position 613 SEQ ID NO: 3143
cagaaucaguauucggaca

SEQ ID NO: 244281 - RNA, 19 nt, Artificial Sequence
  Description of Artificial Sequence: Synthetic oligonucleotide
  Antisense strand to SEQ ID NO: 244280
uguccgaauacugauucug

SEQ ID NO: 244282 - RNA, 19 nt, Artificial Sequence
  Description of Artificial Sequence: Synthetic oligonucleotide
  Sense strand starting at position 618 SEQ ID NO: 3143
ucaguauucggacagagua

SEQ ID NO: 244283 - RNA, 19 nt, Artificial Sequence
  Description of Artificial Sequence: Synthetic oligonucleotide
  Antisense strand to SEQ ID NO: 244282
uacucuguccgaauacuga

SEQ ID NO: 244284 - RNA, 19 nt, Artificial Sequence
  Description of Artificial Sequence: Synthetic oligonucleotide
  Sense strand starting at position 679 SEQ ID NO: 3143
gagcgaaagcugggauaga

SEQ ID NO: 244285 - RNA, 19 nt, Artificial Sequence
  Description of Artificial Sequence: Synthetic oligonucleotide
  Antisense strand to SEQ ID NO: 244284
ucuaucccagcuuucgcuc

SEQ ID NO: 244286 - RNA, 19 nt, Artificial Sequence
  Description of Artificial Sequence: Synthetic oligonucleotide
  Sense strand starting at position 689 SEQ ID NO: 3143
ugggauagacucggcuaga

SEQ ID NO: 244287 - RNA, 19 nt, Artificial Sequence
  Description of Artificial Sequence: Synthetic oligonucleotide
  Antisense strand to SEQ ID NO: 244286
ucuagccgagucuauccca

SEQ ID NO: 244288 - RNA, 19 nt, Artificial Sequence
  Description of Artificial Sequence: Synthetic oligonucleotide
  Sense strand starting at position 1269 SEQ ID NO: 3143
gcgagagugcagggauaaa

SEQ ID NO: 244289 - RNA, 19 nt, Artificial Sequence
  Description of Artificial Sequence: Synthetic oligonucleotide
  Antisense strand to SEQ ID NO: 244288
uuuaucccugcacucucgc

SEQ ID NO: 244290 - RNA, 19 nt, Artificial Sequence
  Description of Artificial Sequence: Synthetic oligonucleotide
  Sense strand starting at position 1517 SEQ ID NO: 3143
gccugagcgggucagaauu

SEQ ID NO: 244291 - RNA, 19 nt, Artificial Sequence
  Description of Artificial Sequence: Synthetic oligonucleotide
  Antisense strand to SEQ ID NO: 244290
aauucugacccgcucaggc

SEQ ID NO: 244292 - RNA, 19 nt, Artificial Sequence
  Description of Artificial Sequence: Synthetic oligonucleotide
  Sense strand starting at position 1842 SEQ ID NO: 3143
gccaccuccucuucgaaau

SEQ ID NO: 244293 - RNA, 19 nt, Artificial Sequence
  Description of Artificial Sequence: Synthetic oligonucleotide
  Antisense strand to SEQ ID NO: 244292
auuucgaagaggagguggc

SEQ ID NO: 244294 - RNA, 19 nt, Artificial Sequence
  Description of Artificial Sequence: Synthetic oligonucleotide
  Sense strand starting at position 1854 SEQ ID NO: 3143
ucgaaauucgcagguucua

SEQ ID NO: 244295 - RNA, 19 nt, Artificial Sequence
  Description of Artificial Sequence: Synthetic oligonucleotide
  Antisense strand to SEQ ID NO: 244294
uagaaccugcgaauuucga

SEQ ID NO: 244296 - RNA, 19 nt, Artificial Sequence
  Description of Artificial Sequence: Synthetic oligonucleotide
  Sense strand starting at position 2107 SEQ ID NO: 3143
ggagcuuugcaguacaaac

SEQ ID NO: 244297 - RNA, 19 nt, Artificial Sequence
  Description of Artificial Sequence: Synthetic oligonucleotide
  Antisense strand to SEQ ID NO: 244296
guuuguacugcaaagcucc

SEQ ID NO: 244298 - RNA, 19 nt, Artificial Sequence
  Description of Artificial Sequence: Synthetic oligonucleotide
  Sense strand starting at position 2304 SEQ ID NO: 3143
gacagaguucuucggagca

SEQ ID NO: 244299 - RNA, 19 nt, Artificial Sequence
  Description of Artificial Sequence: Synthetic oligonucleotide
  Antisense strand to SEQ ID NO: 244298
ugcuccgaagaacucuguc

SEQ ID NO: 244300 - RNA, 19 nt, Artificial Sequence
  Description of Artificial Sequence: Synthetic oligonucleotide
  Sense strand starting at position 2424 SEQ ID NO: 3143
cuggauauaccgugcccaa

SEQ ID NO: 244301 - RNA, 19 nt, Artificial Sequence
  Description of Artificial Sequence: Synthetic oligonucleotide
  Antisense strand to SEQ ID NO: 244300
uugggcacgguauauccag

SEQ ID NO: 244302 - RNA, 19 nt, Artificial Sequence
  Description of Artificial Sequence: Synthetic oligonucleotide
  Sense strand starting at position 2427 SEQ ID NO: 3143
gauauaccgugcccaagaa

SEQ ID NO: 244303 - RNA, 19 nt, Artificial Sequence
  Description of Artificial Sequence: Synthetic oligonucleotide
  Antisense strand to SEQ ID NO: 244302
uucuugggcacgguauauc

SEQ ID NO: 244304 - RNA, 19 nt, Artificial Sequence
  Description of Artificial Sequence: Synthetic oligonucleotide
  Sense strand starting at position 2547 SEQ ID NO: 3143
gaugucuggugagcuaaau

SEQ ID NO: 244305 - RNA, 19 nt, Artificial Sequence
  Description of Artificial Sequence: Synthetic oligonucleotide
  Antisense strand to SEQ ID NO: 244304
auuuagcucaccagacauc

SEQ ID NO: 244306 - RNA, 19 nt, Artificial Sequence
  Description of Artificial Sequence: Synthetic oligonucleotide
  Sense strand starting at position 2736 SEQ ID NO: 3143
uguuguguaucugcaggaa

SEQ ID NO: 244307 - RNA, 19 nt, Artificial Sequence
  Description of Artificial Sequence: Synthetic oligonucleotide
  Antisense strand to SEQ ID NO: 244306
uuccugcagauacacaaca

SEQ ID NO: 244308 - RNA, 19 nt, Artificial Sequence
  Description of Artificial Sequence: Synthetic oligonucleotide
  Sense strand starting at position 2740 SEQ ID NO: 3143
guguaucugcaggaaugga

SEQ ID NO: 244309 - RNA, 19 nt, Artificial Sequence
  Description of Artificial Sequence: Synthetic oligonucleotide
  Antisense strand to SEQ ID NO: 244308
uccauuccugcagauacac

SEQ ID NO: 244310 - RNA, 19 nt, Artificial Sequence
  Description of Artificial Sequence: Synthetic oligonucleotide
  Sense strand starting at position 2813 SEQ ID NO: 3143
aggaaaugcuaagucugaa

SEQ ID NO: 244311 - RNA, 19 nt, Artificial Sequence
  Description of Artificial Sequence: Synthetic oligonucleotide
  Antisense strand to SEQ ID NO: 244310
uucagacuuagcauuuccu

SEQ ID NO: 244312 - RNA, 19 nt, Artificial Sequence
  Description of Artificial Sequence: Synthetic oligonucleotide
  Sense strand starting at position 2846 SEQ ID NO: 3143
gccuaaaguguccuugugu

SEQ ID NO: 244313 - RNA, 19 nt, Artificial Sequence
  Description of Artificial Sequence: Synthetic oligonucleotide
  Antisense strand to SEQ ID NO: 244312
acacaaggacacuuuaggc

SEQ ID NO: 244314 - RNA, 19 nt, Artificial Sequence
  Description of Artificial Sequence: Synthetic oligonucleotide
  Sense strand starting at position 2888 SEQ ID NO: 3143
gguggauuggagugacacu

SEQ ID NO: 244315 - RNA, 19 nt, Artificial Sequence
  Description of Artificial Sequence: Synthetic oligonucleotide
  Antisense strand to SEQ ID NO: 244314
agugucacuccaauccacc

SEQ ID NO: 244316 - RNA, 19 nt, Artificial Sequence
  Description of Artificial Sequence: Synthetic oligonucleotide
  Sense strand starting at position 2889 SEQ ID NO: 3143
guggauuggagugacacuu

SEQ ID NO: 244317 - RNA, 19 nt, Artificial Sequence
  Description of Artificial Sequence: Synthetic oligonucleotide
  Antisense strand to SEQ ID NO: 244316
aagugucacuccaauccac

SEQ ID NO: 244318 - RNA, 19 nt, Artificial Sequence
  Description of Artificial Sequence: Synthetic oligonucleotide
  Sense strand starting at position 2915 SEQ ID NO: 3143
ugucacuuugcagagguau

SEQ ID NO: 244319 - RNA, 19 nt, Artificial Sequence
  Description of Artificial Sequence: Synthetic oligonucleotide
  Antisense strand to SEQ ID NO: 244318
auaccucugcaaagugaca

SEQ ID NO: 244320 - RNA, 19 nt, Artificial Sequence
  Description of Artificial Sequence: Synthetic oligonucleotide
  Sense strand starting at position 3027 SEQ ID NO: 3143
aggcacaucccaggaauau

SEQ ID NO: 244321 - RNA, 19 nt, Artificial Sequence
  Description of Artificial Sequence: Synthetic oligonucleotide
  Antisense strand to SEQ ID NO: 244320
auauuccugggaugugccu

SEQ ID NO: 244322 - RNA, 19 nt, Artificial Sequence
  Description of Artificial Sequence: Synthetic oligonucleotide
  Sense strand starting at position 3036 SEQ ID NO: 3143
ccaggaauaugagcugaca

SEQ ID NO: 244323 - RNA, 19 nt, Artificial Sequence
  Description of Artificial Sequence: Synthetic oligonucleotide
  Antisense strand to SEQ ID NO: 244322
ugucagcucauauuccugg

SEQ ID NO: 244324 - RNA, 19 nt, Artificial Sequence
  Description of Artificial Sequence: Synthetic oligonucleotide
  Sense strand starting at position 3175 SEQ ID NO: 3143
uucugaaauugaccugagu

SEQ ID NO: 244325 - RNA, 19 nt, Artificial Sequence
  Description of Artificial Sequence: Synthetic oligonucleotide
  Antisense strand to SEQ ID NO: 244324
acucaggucaauuucagaa

SEQ ID NO: 244326 - RNA, 19 nt, Artificial Sequence
  Description of Artificial Sequence: Synthetic oligonucleotide
  Sense strand starting at position 3177 SEQ ID NO: 3143
cugaaauugaccugaguga

SEQ ID NO: 244327 - RNA, 19 nt, Artificial Sequence
  Description of Artificial Sequence: Synthetic oligonucleotide
  Antisense strand to SEQ ID NO: 244326
ucacucaggucaauuucag

SEQ ID NO: 244328 - RNA, 19 nt, Artificial Sequence
  Description of Artificial Sequence: Synthetic oligonucleotide
  Sense strand starting at position 3287 SEQ ID NO: 3143
ugugcuuccucccuugaga

SEQ ID NO: 244329 - RNA, 19 nt, Artificial Sequence
  Description of Artificial Sequence: Synthetic oligonucleotide
  Antisense strand to SEQ ID NO: 244328
ucucaagggaggaagcaca

SEQ ID NO: 244330 - RNA, 19 nt, Artificial Sequence
  Description of Artificial Sequence: Synthetic oligonucleotide
  Sense strand starting at position 3289 SEQ ID NO: 3143
ugcuuccucccuugagaag

SEQ ID NO: 244331 - RNA, 19 nt, Artificial Sequence
  Description of Artificial Sequence: Synthetic oligonucleotide
  Antisense strand to SEQ ID NO: 244330
cuucucaagggaggaagca

SEQ ID NO: 244332 - RNA, 19 nt, Artificial Sequence
  Description of Artificial Sequence: Synthetic oligonucleotide
  Sense strand starting at position 3290 SEQ ID NO: 3143
gcuuccucccuugagaagu

SEQ ID NO: 244333 - RNA, 19 nt, Artificial Sequence
  Description of Artificial Sequence: Synthetic oligonucleotide
  Antisense strand to SEQ ID NO: 244332
acuucucaagggaggaagc

SEQ ID NO: 244334 - RNA, 19 nt, Artificial Sequence
  Description of Artificial Sequence: Synthetic oligonucleotide
  Sense strand starting at position 3312 SEQ ID NO: 3143
cuaacuuuccuuuggagaa

SEQ ID NO: 244335 - RNA, 19 nt, Artificial Sequence
  Description of Artificial Sequence: Synthetic oligonucleotide
  Antisense strand to SEQ ID NO: 244334
uucuccaaaggaaaguuag

SEQ ID NO: 244336 - RNA, 19 nt, Artificial Sequence
  Description of Artificial Sequence: Synthetic oligonucleotide
  Sense strand starting at position 3346 SEQ ID NO: 3143
gaaguuugccacuagacug

SEQ ID NO: 244337 - RNA, 19 nt, Artificial Sequence
  Description of Artificial Sequence: Synthetic oligonucleotide
  Antisense strand to SEQ ID NO: 244336
cagucuaguggcaaacuuc

SEQ ID NO: 244338 - RNA, 19 nt, Artificial Sequence
  Description of Artificial Sequence: Synthetic oligonucleotide
  Sense strand starting at position 3490 SEQ ID NO: 3143
ucacuuaucuauuugccga

SEQ ID NO: 244339 - RNA, 19 nt, Artificial Sequence
  Description of Artificial Sequence: Synthetic oligonucleotide
  Antisense strand to SEQ ID NO: 244338
ucggcaaauagauaaguga

SEQ ID NO: 244340 - RNA, 19 nt, Artificial Sequence
  Description of Artificial Sequence: Synthetic oligonucleotide
  Sense strand starting at position 3526 SEQ ID NO: 3143
aagguuaacgucuaaaguu

SEQ ID NO: 244341 - RNA, 19 nt, Artificial Sequence
  Description of Artificial Sequence: Synthetic oligonucleotide
  Antisense strand to SEQ ID NO: 244340
aacuuuagacguuaaccuu

SEQ ID NO: 244342 - RNA, 19 nt, Artificial Sequence
  Description of Artificial Sequence: Synthetic oligonucleotide
  Sense strand starting at position 3600 SEQ ID NO: 3143
aggagcauuguguguaaug

SEQ ID NO: 244343 - RNA, 19 nt, Artificial Sequence
  Description of Artificial Sequence: Synthetic oligonucleotide
  Antisense strand to SEQ ID NO: 244342
cauuacacacaaugcuccu

SEQ ID NO: 244344 - RNA, 19 nt, Artificial Sequence
  Description of Artificial Sequence: Synthetic oligonucleotide
  Sense strand starting at position 3601 SEQ ID NO: 3143
ggagcauuguguguaauga

SEQ ID NO: 244345 - RNA, 19 nt, Artificial Sequence
  Description of Artificial Sequence: Synthetic oligonucleotide
  Antisense strand to SEQ ID NO: 244344
ucauuacacacaaugcucc

SEQ ID NO: 244346 - RNA, 19 nt, Artificial Sequence
  Description of Artificial Sequence: Synthetic oligonucleotide
  Sense strand starting at position 3602 SEQ ID NO: 3143
gagcauuguguguaaugau

SEQ ID NO: 244347 - RNA, 19 nt, Artificial Sequence
  Description of Artificial Sequence: Synthetic oligonucleotide
  Antisense strand to SEQ ID NO: 244346
aucauuacacacaaugcuc

SEQ ID NO: 244348 - RNA, 19 nt, Artificial Sequence
  Description of Artificial Sequence: Synthetic oligonucleotide
  Sense strand starting at position 3736 SEQ ID NO: 3143
agggaaaucauguguuauu

SEQ ID NO: 244349 - RNA, 19 nt, Artificial Sequence
  Description of Artificial Sequence: Synthetic oligonucleotide
  Antisense strand to SEQ ID NO: 244348
aauaacacaugauuucccu

SEQ ID NO: 244350 - RNA, 19 nt, Artificial Sequence
  Description of Artificial Sequence: Synthetic oligonucleotide
  Sense strand starting at position 3754 SEQ ID NO: 3143
uuugucauuugugucaagu

SEQ ID NO: 244351 - RNA, 19 nt, Artificial Sequence
  Description of Artificial Sequence: Synthetic oligonucleotide
  Antisense strand to SEQ ID NO: 244350
acuugacacaaaugacaaa

SEQ ID NO: 244352 - RNA, 19 nt, Artificial Sequence
  Description of Artificial Sequence: Synthetic oligonucleotide
  Sense strand starting at position 3792 SEQ ID NO: 3143
gcagaaugugugcaguaug

SEQ ID NO: 244353 - RNA, 19 nt, Artificial Sequence
  Description of Artificial Sequence: Synthetic oligonucleotide
  Antisense strand to SEQ ID NO: 244352
cauacugcacacauucugc

SEQ ID NO: 244354 - RNA, 19 nt, Artificial Sequence
  Description of Artificial Sequence: Synthetic oligonucleotide
  Sense strand starting at position 21 SEQ ID NO: 3144
uucugaucucagggagcca

SEQ ID NO: 244355 - RNA, 19 nt, Artificial Sequence
  Description of Artificial Sequence: Synthetic oligonucleotide
  Antisense strand to SEQ ID NO: 244354
uggcucccugagaucagaa

SEQ ID NO: 244356 - RNA, 19 nt, Artificial Sequence
  Description of Artificial Sequence: Synthetic oligonucleotide
  Sense strand starting at position 162 SEQ ID NO: 3144
agcugacucugagaagaag

SEQ ID NO: 244357 - RNA, 19 nt, Artificial Sequence
  Description of Artificial Sequence: Synthetic oligonucleotide
  Antisense strand to SEQ ID NO: 244356
cuucuucucagagucagcu

SEQ ID NO: 244358 - RNA, 19 nt, Artificial Sequence
  Description of Artificial Sequence: Synthetic oligonucleotide
  Sense strand starting at position 234 SEQ ID NO: 3144
cugagacucugagauucga

SEQ ID NO: 244359 - RNA, 19 nt, Artificial Sequence
  Description of Artificial Sequence: Synthetic oligonucleotide
  Antisense strand to SEQ ID NO: 244358
ucgaaucucagagucucag

SEQ ID NO: 244360 - RNA, 19 nt, Artificial Sequence
  Description of Artificial Sequence: Synthetic oligonucleotide
  Sense strand starting at position 431 SEQ ID NO: 3144
ccgcuugcuccuucguaga

SEQ ID NO: 244361 - RNA, 19 nt, Artificial Sequence
  Description of Artificial Sequence: Synthetic oligonucleotide
  Antisense strand to SEQ ID NO: 244360
ucuacgaaggagcaagcgg

SEQ ID NO: 244362 - RNA, 19 nt, Artificial Sequence
  Description of Artificial Sequence: Synthetic oligonucleotide
  Sense strand starting at position 551 SEQ ID NO: 3144
gggcgugcgcugucaauga

SEQ ID NO: 244363 - RNA, 19 nt, Artificial Sequence
  Description of Artificial Sequence: Synthetic oligonucleotide
  Antisense strand to SEQ ID NO: 244362
ucauugacagcgcacgccc

SEQ ID NO: 244364 - RNA, 19 nt, Artificial Sequence
  Description of Artificial Sequence: Synthetic oligonucleotide
  Sense strand starting at position 553 SEQ ID NO: 3144
gcgugcgcugucaaugauu

SEQ ID NO: 244365 - RNA, 19 nt, Artificial Sequence
  Description of Artificial Sequence: Synthetic oligonucleotide
  Antisense strand to SEQ ID NO: 244364
aaucauugacagcgcacgc

SEQ ID NO: 244366 - RNA, 19 nt, Artificial Sequence
  Description of Artificial Sequence: Synthetic oligonucleotide
  Sense strand starting at position 585 SEQ ID NO: 3144
cccggauccuuaucugcau

SEQ ID NO: 244367 - RNA, 19 nt, Artificial Sequence
  Description of Artificial Sequence: Synthetic oligonucleotide
  Antisense strand to SEQ ID NO: 244366
augcagauaaggauccggg

SEQ ID NO: 244368 - RNA, 19 nt, Artificial Sequence
  Description of Artificial Sequence: Synthetic oligonucleotide
  Sense strand starting at position 816 SEQ ID NO: 3144
gaaggaauuugcgccucua

SEQ ID NO: 244369 - RNA, 19 nt, Artificial Sequence
  Description of Artificial Sequence: Synthetic oligonucleotide
  Antisense strand to SEQ ID NO: 244368
uagaggcgcaaauuccuuc

SEQ ID NO: 244370 - RNA, 19 nt, Artificial Sequence
  Description of Artificial Sequence: Synthetic oligonucleotide
  Sense strand starting at position 1540 SEQ ID NO: 3144
gugccagccagucgagaaa

SEQ ID NO: 244371 - RNA, 19 nt, Artificial Sequence
  Description of Artificial Sequence: Synthetic oligonucleotide
  Antisense strand to SEQ ID NO: 244370
uuucucgacuggcuggcac

SEQ ID NO: 244372 - RNA, 19 nt, Artificial Sequence
  Description of Artificial Sequence: Synthetic oligonucleotide
  Sense strand starting at position 1662 SEQ ID NO: 3144
guguucuccucguccuuga

SEQ ID NO: 244373 - RNA, 19 nt, Artificial Sequence
  Description of Artificial Sequence: Synthetic oligonucleotide
  Antisense strand to SEQ ID NO: 244372
ucaaggacgaggagaacac

SEQ ID NO: 244374 - RNA, 19 nt, Artificial Sequence
  Description of Artificial Sequence: Synthetic oligonucleotide
  Sense strand starting at position 1665 SEQ ID NO: 3144
uucuccucguccuugaaga

SEQ ID NO: 244375 - RNA, 19 nt, Artificial Sequence
  Description of Artificial Sequence: Synthetic oligonucleotide
  Antisense strand to SEQ ID NO: 244374
ucuucaaggacgaggagaa

SEQ ID NO: 244376 - RNA, 19 nt, Artificial Sequence
  Description of Artificial Sequence: Synthetic oligonucleotide
  Sense strand starting at position 1666 SEQ ID NO: 3144
ucuccucguccuugaagau

SEQ ID NO: 244377 - RNA, 19 nt, Artificial Sequence
  Description of Artificial Sequence: Synthetic oligonucleotide
  Antisense strand to SEQ ID NO: 244376
aucuucaaggacgaggaga

SEQ ID NO: 244378 - RNA, 19 nt, Artificial Sequence
  Description of Artificial Sequence: Synthetic oligonucleotide
  Sense strand starting at position 1678 SEQ ID NO: 3144
ugaagaugaugucuggauu

SEQ ID NO: 244379 - RNA, 19 nt, Artificial Sequence
  Description of Artificial Sequence: Synthetic oligonucleotide
  Antisense strand to SEQ ID NO: 244378
aauccagacaucaucuuca

SEQ ID NO: 244380 - RNA, 19 nt, Artificial Sequence
  Description of Artificial Sequence: Synthetic oligonucleotide
  Sense strand starting at position 1679 SEQ ID NO: 3144
gaagaugaugucuggauug

SEQ ID NO: 244381 - RNA, 19 nt, Artificial Sequence
  Description of Artificial Sequence: Synthetic oligonucleotide
  Antisense strand to SEQ ID NO: 244380
caauccagacaucaucuuc

SEQ ID NO: 244382 - RNA, 19 nt, Artificial Sequence
  Description of Artificial Sequence: Synthetic oligonucleotide
  Sense strand starting at position 1681 SEQ ID NO: 3144
agaugaugucuggauugua

SEQ ID NO: 244383 - RNA, 19 nt, Artificial Sequence
  Description of Artificial Sequence: Synthetic oligonucleotide
  Antisense strand to SEQ ID NO: 244382
uacaauccagacaucaucu

SEQ ID NO: 244384 - RNA, 19 nt, Artificial Sequence
  Description of Artificial Sequence: Synthetic oligonucleotide
  Sense strand starting at position 1684 SEQ ID NO: 3144
ugaugucuggauuguaauu

SEQ ID NO: 244385 - RNA, 19 nt, Artificial Sequence
  Description of Artificial Sequence: Synthetic oligonucleotide
  Antisense strand to SEQ ID NO: 244384
aauuacaauccagacauca

SEQ ID NO: 244386 - RNA, 19 nt, Artificial Sequence
  Description of Artificial Sequence: Synthetic oligonucleotide
  Sense strand starting at position 2947 SEQ ID NO: 3144
ccugccugucggugucaaa

SEQ ID NO: 244387 - RNA, 19 nt, Artificial Sequence
  Description of Artificial Sequence: Synthetic oligonucleotide
  Antisense strand to SEQ ID NO: 244386
uuugacaccgacaggcagg

SEQ ID NO: 244388 - RNA, 19 nt, Artificial Sequence
  Description of Artificial Sequence: Synthetic oligonucleotide
  Sense strand starting at position 3026 SEQ ID NO: 3144
uguugaaagugacaauaug

SEQ ID NO: 244389 - RNA, 19 nt, Artificial Sequence
  Description of Artificial Sequence: Synthetic oligonucleotide
  Antisense strand to SEQ ID NO: 244388
cauauugucacuuucaaca

SEQ ID NO: 244390 - RNA, 19 nt, Artificial Sequence
  Description of Artificial Sequence: Synthetic oligonucleotide
  Sense strand starting at position 3049 SEQ ID NO: 3144
ugcaaagggauaggucaau

SEQ ID NO: 244391 - RNA, 19 nt, Artificial Sequence
  Description of Artificial Sequence: Synthetic oligonucleotide
  Antisense strand to SEQ ID NO: 244390
auugaccuaucccuuugca

SEQ ID NO: 244392 - RNA, 19 nt, Artificial Sequence
  Description of Artificial Sequence: Synthetic oligonucleotide
  Sense strand starting at position 3090 SEQ ID NO: 3144
uggugacgucaacagaaua

SEQ ID NO: 244393 - RNA, 19 nt, Artificial Sequence
  Description of Artificial Sequence: Synthetic oligonucleotide
  Antisense strand to SEQ ID NO: 244392
uauucuguugacgucacca

SEQ ID NO: 244394 - RNA, 19 nt, Artificial Sequence
  Description of Artificial Sequence: Synthetic oligonucleotide
  Sense strand starting at position 3118 SEQ ID NO: 3144
cccgacugaccauguuaaa

SEQ ID NO: 244395 - RNA, 19 nt, Artificial Sequence
  Description of Artificial Sequence: Synthetic oligonucleotide
  Antisense strand to SEQ ID NO: 244394
uuuaacauggucagucggg

SEQ ID NO: 244396 - RNA, 19 nt, Artificial Sequence
  Description of Artificial Sequence: Synthetic oligonucleotide
  Sense strand starting at position 3220 SEQ ID NO: 3144
uugguucuauauuacacau

SEQ ID NO: 244397 - RNA, 19 nt, Artificial Sequence
  Description of Artificial Sequence: Synthetic oligonucleotide
  Antisense strand to SEQ ID NO: 244396
auguguaauauagaaccaa

SEQ ID NO: 244398 - RNA, 19 nt, Artificial Sequence
  Description of Artificial Sequence: Synthetic oligonucleotide
  Sense strand starting at position 3274 SEQ ID NO: 3144
acgugaacauguguuaugu

SEQ ID NO: 244399 - RNA, 19 nt, Artificial Sequence
  Description of Artificial Sequence: Synthetic oligonucleotide
  Antisense strand to SEQ ID NO: 244398
acauaacacauguucacgu

SEQ ID NO: 244400 - RNA, 19 nt, Artificial Sequence
  Description of Artificial Sequence: Synthetic oligonucleotide
  Sense strand starting at position 3300 SEQ ID NO: 3144
uaugacauucgagaaagcu

SEQ ID NO: 244401 - RNA, 19 nt, Artificial Sequence
  Description of Artificial Sequence: Synthetic oligonucleotide
  Antisense strand to SEQ ID NO: 244400
agcuuucucgaaugucaua

SEQ ID NO: 244402 - RNA, 19 nt, Artificial Sequence
  Description of Artificial Sequence: Synthetic oligonucleotide
  Sense strand starting at position 3306 SEQ ID NO: 3144
auucgagaaagcugaauga

SEQ ID NO: 244403 - RNA, 19 nt, Artificial Sequence
  Description of Artificial Sequence: Synthetic oligonucleotide
  Antisense strand to SEQ ID NO: 244402
ucauucagcuuucucgaau

SEQ ID NO: 244404 - RNA, 19 nt, Artificial Sequence
  Description of Artificial Sequence: Synthetic oligonucleotide
  Sense strand starting at position 3349 SEQ ID NO: 3144
aguaaaggcaaguguguua

SEQ ID NO: 244405 - RNA, 19 nt, Artificial Sequence
  Description of Artificial Sequence: Synthetic oligonucleotide
  Antisense strand to SEQ ID NO: 244404
uaacacacuugccuuuacu

SEQ ID NO: 244406 - RNA, 19 nt, Artificial Sequence
  Description of Artificial Sequence: Synthetic oligonucleotide
  Sense strand starting at position 3404 SEQ ID NO: 3144
acuauaugauuugacugua

SEQ ID NO: 244407 - RNA, 19 nt, Artificial Sequence
  Description of Artificial Sequence: Synthetic oligonucleotide
  Antisense strand to SEQ ID NO: 244406
uacagucaaaucauauagu

SEQ ID NO: 244408 - RNA, 19 nt, Artificial Sequence
  Description of Artificial Sequence: Synthetic oligonucleotide
  Sense strand starting at position 3412 SEQ ID NO: 3144
auuugacuguaauagauuc

SEQ ID NO: 244409 - RNA, 19 nt, Artificial Sequence
  Description of Artificial Sequence: Synthetic oligonucleotide
  Antisense strand to SEQ ID NO: 244408
gaaucuauuacagucaaau

SEQ ID NO: 244410 - RNA, 19 nt, Artificial Sequence
  Description of Artificial Sequence: Synthetic oligonucleotide
  Sense strand starting at position 3526 SEQ ID NO: 3144
ugguacuuauauuccugaa

SEQ ID NO: 244411 - RNA, 19 nt, Artificial Sequence
  Description of Artificial Sequence: Synthetic oligonucleotide
  Antisense strand to SEQ ID NO: 244410
uucaggaauauaaguacca

SEQ ID NO: 244412 - RNA, 19 nt, Artificial Sequence
  Description of Artificial Sequence: Synthetic oligonucleotide
  Sense strand starting at position 3538 SEQ ID NO: 3144
uccugaacaugguaguuau

SEQ ID NO: 244413 - RNA, 19 nt, Artificial Sequence
  Description of Artificial Sequence: Synthetic oligonucleotide
  Antisense strand to SEQ ID NO: 244412
auaacuaccauguucagga

SEQ ID NO: 244414 - RNA, 19 nt, Artificial Sequence
  Description of Artificial Sequence: Synthetic oligonucleotide
  Sense strand starting at position 3545 SEQ ID NO: 3144
caugguaguuauuagauau

SEQ ID NO: 244415 - RNA, 19 nt, Artificial Sequence
  Description of Artificial Sequence: Synthetic oligonucleotide
  Antisense strand to SEQ ID NO: 244414
auaucuaauaacuaccaug

SEQ ID NO: 244416 - RNA, 19 nt, Artificial Sequence
  Description of Artificial Sequence: Synthetic oligonucleotide
  Sense strand starting at position 3567 SEQ ID NO: 3144
uguacuaugucuucuacuu

SEQ ID NO: 244417 - RNA, 19 nt, Artificial Sequence
  Description of Artificial Sequence: Synthetic oligonucleotide
  Antisense strand to SEQ ID NO: 244416
aaguagaagacauaguaca

SEQ ID NO: 244418 - RNA, 19 nt, Artificial Sequence
  Description of Artificial Sequence: Synthetic oligonucleotide
  Sense strand starting at position 3611 SEQ ID NO: 3144
ggccaaaggagcuauuacu

SEQ ID NO: 244419 - RNA, 19 nt, Artificial Sequence
  Description of Artificial Sequence: Synthetic oligonucleotide
  Antisense strand to SEQ ID NO: 244418
aguaauagcuccuuuggcc

SEQ ID NO: 244420 - RNA, 19 nt, Artificial Sequence
  Description of Artificial Sequence: Synthetic oligonucleotide
  Sense strand starting at position 3643 SEQ ID NO: 3144
gaaugaagauauugaaguu

SEQ ID NO: 244421 - RNA, 19 nt, Artificial Sequence
  Description of Artificial Sequence: Synthetic oligonucleotide
  Antisense strand to SEQ ID NO: 244420
aacuucaauaucuucauuc

SEQ ID NO: 244422 - RNA, 19 nt, Artificial Sequence
  Description of Artificial Sequence: Synthetic oligonucleotide
  Sense strand starting at position 3862 SEQ ID NO: 3144
aggauuggaugagacucaa

SEQ ID NO: 244423 - RNA, 19 nt, Artificial Sequence
  Description of Artificial Sequence: Synthetic oligonucleotide
  Antisense strand to SEQ ID NO: 244422
uugagucucauccaauccu

SEQ ID NO: 244424 - RNA, 19 nt, Artificial Sequence
  Description of Artificial Sequence: Synthetic oligonucleotide
  Sense strand starting at position 3874 SEQ ID NO: 3144
gacucaagagagugcuuaa

SEQ ID NO: 244425 - RNA, 19 nt, Artificial Sequence
  Description of Artificial Sequence: Synthetic oligonucleotide
  Antisense strand to SEQ ID NO: 244424
uuaagcacucucuugaguc

SEQ ID NO: 244426 - RNA, 19 nt, Artificial Sequence
  Description of Artificial Sequence: Synthetic oligonucleotide
  Sense strand starting at position 3877 SEQ ID NO: 3144
ucaagagagugcuuaaucu

SEQ ID NO: 244427 - RNA, 19 nt, Artificial Sequence
  Description of Artificial Sequence: Synthetic oligonucleotide
  Antisense strand to SEQ ID NO: 244426
agauuaagcacucucuuga

SEQ ID NO: 244428 - RNA, 19 nt, Artificial Sequence
  Description of Artificial Sequence: Synthetic oligonucleotide
  Sense strand starting at position 3881 SEQ ID NO: 3144
gagagugcuuaaucuaagc

SEQ ID NO: 244429 - RNA, 19 nt, Artificial Sequence
  Description of Artificial Sequence: Synthetic oligonucleotide
  Antisense strand to SEQ ID NO: 244428
gcuuagauuaagcacucuc

SEQ ID NO: 244430 - RNA, 19 nt, Artificial Sequence
  Description of Artificial Sequence: Synthetic oligonucleotide
  Sense strand starting at position 3892 SEQ ID NO: 3144
aucuaagcgcuugauauua

SEQ ID NO: 244431 - RNA, 19 nt, Artificial Sequence
  Description of Artificial Sequence: Synthetic oligonucleotide
  Antisense strand to SEQ ID NO: 244430
uaauaucaagcgcuuagau

SEQ ID NO: 244432 - RNA, 19 nt, Artificial Sequence
  Description of Artificial Sequence: Synthetic oligonucleotide
  Sense strand starting at position 3965 SEQ ID NO: 3144
uggaguggugccugcaaug

SEQ ID NO: 244433 - RNA, 19 nt, Artificial Sequence
  Description of Artificial Sequence: Synthetic oligonucleotide
  Antisense strand to SEQ ID NO: 244432
cauugcaggcaccacucca

SEQ ID NO: 244434 - RNA, 19 nt, Artificial Sequence
  Description of Artificial Sequence: Synthetic oligonucleotide
  Sense strand starting at position 10 SEQ ID NO: 3146
aaaguaggaaaguguugaa

SEQ ID NO: 244435 - RNA, 19 nt, Artificial Sequence
  Description of Artificial Sequence: Synthetic oligonucleotide
  Antisense strand to SEQ ID NO: 244434
uucaacacuuuccuacuuu

SEQ ID NO: 244436 - RNA, 19 nt, Artificial Sequence
  Description of Artificial Sequence: Synthetic oligonucleotide
  Sense strand starting at position 56 SEQ ID NO: 3146
cuacuuaacuuaguauguu

SEQ ID NO: 244437 - RNA, 19 nt, Artificial Sequence
  Description of Artificial Sequence: Synthetic oligonucleotide
  Antisense strand to SEQ ID NO: 244436
aacauacuaaguuaaguag

SEQ ID NO: 244438 - RNA, 19 nt, Artificial Sequence
  Description of Artificial Sequence: Synthetic oligonucleotide
  Sense strand starting at position 254 SEQ ID NO: 3146
auacuuacacguuauauag

SEQ ID NO: 244439 - RNA, 19 nt, Artificial Sequence
  Description of Artificial Sequence: Synthetic oligonucleotide
  Antisense strand to SEQ ID NO: 244438
cuauauaacguguaaguau

SEQ ID NO: 244440 - RNA, 19 nt, Artificial Sequence
  Description of Artificial Sequence: Synthetic oligonucleotide
  Sense strand starting at position 286 SEQ ID NO: 3146
cuguuuccauagucaaagu

SEQ ID NO: 244441 - RNA, 19 nt, Artificial Sequence
  Description of Artificial Sequence: Synthetic oligonucleotide
  Antisense strand to SEQ ID NO: 244440
acuuugacuauggaaacag

SEQ ID NO: 244442 - RNA, 19 nt, Artificial Sequence
  Description of Artificial Sequence: Synthetic oligonucleotide
  Sense strand starting at position 480 SEQ ID NO: 3146
uucugcaaaugaucugauu

SEQ ID NO: 244443 - RNA, 19 nt, Artificial Sequence
  Description of Artificial Sequence: Synthetic oligonucleotide
  Antisense strand to SEQ ID NO: 244442
aaucagaucauuugcagaa

SEQ ID NO: 244444 - RNA, 19 nt, Artificial Sequence
  Description of Artificial Sequence: Synthetic oligonucleotide
  Sense strand starting at position 493 SEQ ID NO: 3146
cugauuccugcuggagaua

SEQ ID NO: 244445 - RNA, 19 nt, Artificial Sequence
  Description of Artificial Sequence: Synthetic oligonucleotide
  Antisense strand to SEQ ID NO: 244444
uaucuccagcaggaaucag

SEQ ID NO: 244446 - RNA, 19 nt, Artificial Sequence
  Description of Artificial Sequence: Synthetic oligonucleotide
  Sense strand starting at position 506 SEQ ID NO: 3146
gagauaggauaggaaagau

SEQ ID NO: 244447 - RNA, 19 nt, Artificial Sequence
  Description of Artificial Sequence: Synthetic oligonucleotide
  Antisense strand to SEQ ID NO: 244446
aucuuuccuauccuaucuc

SEQ ID NO: 244448 - RNA, 19 nt, Artificial Sequence
  Description of Artificial Sequence: Synthetic oligonucleotide
  Sense strand starting at position 519 SEQ ID NO: 3146
aaagauaagugugcuguga

SEQ ID NO: 244449 - RNA, 19 nt, Artificial Sequence
  Description of Artificial Sequence: Synthetic oligonucleotide
  Antisense strand to SEQ ID NO: 244448
ucacagcacacuuaucuuu

SEQ ID NO: 244450 - RNA, 19 nt, Artificial Sequence
  Description of Artificial Sequence: Synthetic oligonucleotide
  Sense strand starting at position 523 SEQ ID NO: 3146
auaagugugcugugagaug

SEQ ID NO: 244451 - RNA, 19 nt, Artificial Sequence
  Description of Artificial Sequence: Synthetic oligonucleotide
  Antisense strand to SEQ ID NO: 244450
caucucacagcacacuuau

SEQ ID NO: 244452 - RNA, 19 nt, Artificial Sequence
  Description of Artificial Sequence: Synthetic oligonucleotide
  Sense strand starting at position 556 SEQ ID NO: 3146
gggaaugacucucuuaauc

SEQ ID NO: 244453 - RNA, 19 nt, Artificial Sequence
  Description of Artificial Sequence: Synthetic oligonucleotide
  Antisense strand to SEQ ID NO: 244452
gauuaagagagucauuccc

SEQ ID NO: 244454 - RNA, 19 nt, Artificial Sequence
  Description of Artificial Sequence: Synthetic oligonucleotide
  Sense strand starting at position 621 SEQ ID NO: 3146
gucagcuuuaacugggauu

SEQ ID NO: 244455 - RNA, 19 nt, Artificial Sequence
  Description of Artificial Sequence: Synthetic oligonucleotide
  Antisense strand to SEQ ID NO: 244454
aaucccaguuaaagcugac

SEQ ID NO: 244456 - RNA, 19 nt, Artificial Sequence
  Description of Artificial Sequence: Synthetic oligonucleotide
  Sense strand starting at position 624 SEQ ID NO: 3146
agcuuuaacugggauuuaa

SEQ ID NO: 244457 - RNA, 19 nt, Artificial Sequence
  Description of Artificial Sequence: Synthetic oligonucleotide
  Antisense strand to SEQ ID NO: 244456
uuaaaucccaguuaaagcu

SEQ ID NO: 244458 - RNA, 19 nt, Artificial Sequence
  Description of Artificial Sequence: Synthetic oligonucleotide
  Sense strand starting at position 698 SEQ ID NO: 3146
guauacagauagcucuauu

SEQ ID NO: 244459 - RNA, 19 nt, Artificial Sequence
  Description of Artificial Sequence: Synthetic oligonucleotide
  Antisense strand to SEQ ID NO: 244458
aauagagcuaucuguauac

SEQ ID NO: 244460 - RNA, 19 nt, Artificial Sequence
  Description of Artificial Sequence: Synthetic oligonucleotide
  Sense strand starting at position 819 SEQ ID NO: 3146
cuugaagauuucuacagca

SEQ ID NO: 244461 - RNA, 19 nt, Artificial Sequence
  Description of Artificial Sequence: Synthetic oligonucleotide
  Antisense strand to SEQ ID NO: 244460
ugcuguagaaaucuucaag

SEQ ID NO: 244462 - RNA, 19 nt, Artificial Sequence
  Description of Artificial Sequence: Synthetic oligonucleotide
  Sense strand starting at position 985 SEQ ID NO: 3146
auaaacuuugguugugcua

SEQ ID NO: 244463 - RNA, 19 nt, Artificial Sequence
  Description of Artificial Sequence: Synthetic oligonucleotide
  Antisense strand to SEQ ID NO: 244462
uagcacaaccaaaguuuau

SEQ ID NO: 244464 - RNA, 19 nt, Artificial Sequence
  Description of Artificial Sequence: Synthetic oligonucleotide
  Sense strand starting at position 992 SEQ ID NO: 3146
uugguugugcuagagagaa

SEQ ID NO: 244465 - RNA, 19 nt, Artificial Sequence
  Description of Artificial Sequence: Synthetic oligonucleotide
  Antisense strand to SEQ ID NO: 244464
uucucucuagcacaaccaa

SEQ ID NO: 244466 - RNA, 19 nt, Artificial Sequence
  Description of Artificial Sequence: Synthetic oligonucleotide
  Sense strand starting at position 994 SEQ ID NO: 3146
gguugugcuagagagaauc

SEQ ID NO: 244467 - RNA, 19 nt, Artificial Sequence
  Description of Artificial Sequence: Synthetic oligonucleotide
  Antisense strand to SEQ ID NO: 244466
gauucucucuagcacaacc

SEQ ID NO: 244468 - RNA, 19 nt, Artificial Sequence
  Description of Artificial Sequence: Synthetic oligonucleotide
  Sense strand starting at position 996 SEQ ID NO: 3146
uugugcuagagagaaucau

SEQ ID NO: 244469 - RNA, 19 nt, Artificial Sequence
  Description of Artificial Sequence: Synthetic oligonucleotide
  Antisense strand to SEQ ID NO: 244468
augauucucucuagcacaa

SEQ ID NO: 244470 - RNA, 19 nt, Artificial Sequence
  Description of Artificial Sequence: Synthetic oligonucleotide
  Sense strand starting at position 1035 SEQ ID NO: 3146
gggcaauuauucucaugca

SEQ ID NO: 244471 - RNA, 19 nt, Artificial Sequence
  Description of Artificial Sequence: Synthetic oligonucleotide
  Antisense strand to SEQ ID NO: 244470
ugcaugagaauaauugccc

SEQ ID NO: 244472 - RNA, 19 nt, Artificial Sequence
  Description of Artificial Sequence: Synthetic oligonucleotide
  Sense strand starting at position 1091 SEQ ID NO: 3146
aaguaaacuguaugagaug

SEQ ID NO: 244473 - RNA, 19 nt, Artificial Sequence
  Description of Artificial Sequence: Synthetic oligonucleotide
  Antisense strand to SEQ ID NO: 244472
caucucauacaguuuacuu

SEQ ID NO: 244474 - RNA, 19 nt, Artificial Sequence
  Description of Artificial Sequence: Synthetic oligonucleotide
  Sense strand starting at position 1144 SEQ ID NO: 3146
ucgauaaucuaacuguauu

SEQ ID NO: 244475 - RNA, 19 nt, Artificial Sequence
  Description of Artificial Sequence: Synthetic oligonucleotide
  Antisense strand to SEQ ID NO: 244474
aauacaguuagauuaucga

SEQ ID NO: 244476 - RNA, 19 nt, Artificial Sequence
  Description of Artificial Sequence: Synthetic oligonucleotide
  Sense strand starting at position 1304 SEQ ID NO: 3146
uguauugaucgccaaguau

SEQ ID NO: 244477 - RNA, 19 nt, Artificial Sequence
  Description of Artificial Sequence: Synthetic oligonucleotide
  Antisense strand to SEQ ID NO: 244476
auacuuggcgaucaauaca

SEQ ID NO: 244478 - RNA, 19 nt, Artificial Sequence
  Description of Artificial Sequence: Synthetic oligonucleotide
  Sense strand starting at position 1480 SEQ ID NO: 3146
auggaauaaucagaucaaa

SEQ ID NO: 244479 - RNA, 19 nt, Artificial Sequence
  Description of Artificial Sequence: Synthetic oligonucleotide
  Antisense strand to SEQ ID NO: 244478
uuugaucugauuauuccau

SEQ ID NO: 244480 - RNA, 19 nt, Artificial Sequence
  Description of Artificial Sequence: Synthetic oligonucleotide
  Sense strand starting at position 1539 SEQ ID NO: 3146
gcuguacuguuaucacauu

SEQ ID NO: 244481 - RNA, 19 nt, Artificial Sequence
  Description of Artificial Sequence: Synthetic oligonucleotide
  Antisense strand to SEQ ID NO: 244480
aaugugauaacaguacagc

SEQ ID NO: 244482 - RNA, 19 nt, Artificial Sequence
  Description of Artificial Sequence: Synthetic oligonucleotide
  Sense strand starting at position 1614 SEQ ID NO: 3146
aggagcaguuucuucggau

SEQ ID NO: 244483 - RNA, 19 nt, Artificial Sequence
  Description of Artificial Sequence: Synthetic oligonucleotide
  Antisense strand to SEQ ID NO: 244482
auccgaagaaacugcuccu

SEQ ID NO: 244484 - RNA, 19 nt, Artificial Sequence
  Description of Artificial Sequence: Synthetic oligonucleotide
  Sense strand starting at position 1615 SEQ ID NO: 3146
ggagcaguuucuucggaua

SEQ ID NO: 244485 - RNA, 19 nt, Artificial Sequence
  Description of Artificial Sequence: Synthetic oligonucleotide
  Antisense strand to SEQ ID NO: 244484
uauccgaagaaacugcucc

SEQ ID NO: 244486 - RNA, 19 nt, Artificial Sequence
  Description of Artificial Sequence: Synthetic oligonucleotide
  Sense strand starting at position 1904 SEQ ID NO: 3146
caaugucgggcugaagaua

SEQ ID NO: 244487 - RNA, 19 nt, Artificial Sequence
  Description of Artificial Sequence: Synthetic oligonucleotide
  Antisense strand to SEQ ID NO: 244486
uaucuucagcccgacauug

SEQ ID NO: 244488 - RNA, 19 nt, Artificial Sequence
  Description of Artificial Sequence: Synthetic oligonucleotide
  Sense strand starting at position 2033 SEQ ID NO: 3146
gcacuuuacagguggguca

SEQ ID NO: 244489 - RNA, 19 nt, Artificial Sequence
  Description of Artificial Sequence: Synthetic oligonucleotide
  Antisense strand to SEQ ID NO: 244488
ugacccaccuguaaagugc

SEQ ID NO: 244490 - RNA, 19 nt, Artificial Sequence
  Description of Artificial Sequence: Synthetic oligonucleotide
  Sense strand starting at position 2069 SEQ ID NO: 3146
gcaaacagaucggcugaua

SEQ ID NO: 244491 - RNA, 19 nt, Artificial Sequence
  Description of Artificial Sequence: Synthetic oligonucleotide
  Antisense strand to SEQ ID NO: 244490
uaucagccgaucuguuugc

SEQ ID NO: 244492 - RNA, 19 nt, Artificial Sequence
  Description of Artificial Sequence: Synthetic oligonucleotide
  Sense strand starting at position 2180 SEQ ID NO: 3146
gucccuuagggauggucua

SEQ ID NO: 244493 - RNA, 19 nt, Artificial Sequence
  Description of Artificial Sequence: Synthetic oligonucleotide
  Antisense strand to SEQ ID NO: 244492
uagaccaucccuaagggac

SEQ ID NO: 244494 - RNA, 19 nt, Artificial Sequence
  Description of Artificial Sequence: Synthetic oligonucleotide
  Sense strand starting at position 2264 SEQ ID NO: 3146
agaggucagucagugcuau

SEQ ID NO: 244495 - RNA, 19 nt, Artificial Sequence
  Description of Artificial Sequence: Synthetic oligonucleotide
  Antisense strand to SEQ ID NO: 244494
auagcacugacugaccucu

SEQ ID NO: 244496 - RNA, 19 nt, Artificial Sequence
  Description of Artificial Sequence: Synthetic oligonucleotide
  Sense strand starting at position 2265 SEQ ID NO: 3146
gaggucagucagugcuaua

SEQ ID NO: 244497 - RNA, 19 nt, Artificial Sequence
  Description of Artificial Sequence: Synthetic oligonucleotide
  Antisense strand to SEQ ID NO: 244496
uauagcacugacugaccuc

SEQ ID NO: 244498 - RNA, 19 nt, Artificial Sequence
  Description of Artificial Sequence: Synthetic oligonucleotide
  Sense strand starting at position 2282 SEQ ID NO: 3146
uagcaaugcgauuaacaag

SEQ ID NO: 244499 - RNA, 19 nt, Artificial Sequence
  Description of Artificial Sequence: Synthetic oligonucleotide
  Antisense strand to SEQ ID NO: 244498
cuuguuaaucgcauugcua

SEQ ID NO: 244500 - RNA, 19 nt, Artificial Sequence
  Description of Artificial Sequence: Synthetic oligonucleotide
  Sense strand starting at position 2314 SEQ ID NO: 3146
uccaccgguuccuuaagaa

SEQ ID NO: 244501 - RNA, 19 nt, Artificial Sequence
  Description of Artificial Sequence: Synthetic oligonucleotide
  Antisense strand to SEQ ID NO: 244500
uucuuaaggaaccggugga

SEQ ID NO: 244502 - RNA, 19 nt, Artificial Sequence
  Description of Artificial Sequence: Synthetic oligonucleotide
  Sense strand starting at position 2495 SEQ ID NO: 3146
cucuuucgcccauacuaga

SEQ ID NO: 244503 - RNA, 19 nt, Artificial Sequence
  Description of Artificial Sequence: Synthetic oligonucleotide
  Antisense strand to SEQ ID NO: 244502
ucuaguaugggcgaaagag

SEQ ID NO: 244504 - RNA, 19 nt, Artificial Sequence
  Description of Artificial Sequence: Synthetic oligonucleotide
  Sense strand starting at position 2807 SEQ ID NO: 3146
cccugagcguccuuuacaa

SEQ ID NO: 244505 - RNA, 19 nt, Artificial Sequence
  Description of Artificial Sequence: Synthetic oligonucleotide
  Antisense strand to SEQ ID NO: 244504
uuguaaaggacgcucaggg

SEQ ID NO: 244506 - RNA, 19 nt, Artificial Sequence
  Description of Artificial Sequence: Synthetic oligonucleotide
  Sense strand starting at position 3014 SEQ ID NO: 3146
aucuaugaaucagaagaca

SEQ ID NO: 244507 - RNA, 19 nt, Artificial Sequence
  Description of Artificial Sequence: Synthetic oligonucleotide
  Antisense strand to SEQ ID NO: 244506
ugucuucugauucauagau

SEQ ID NO: 244508 - RNA, 19 nt, Artificial Sequence
  Description of Artificial Sequence: Synthetic oligonucleotide
  Sense strand starting at position 3209 SEQ ID NO: 3146
ggcaguggaucuguagcua

SEQ ID NO: 244509 - RNA, 19 nt, Artificial Sequence
  Description of Artificial Sequence: Synthetic oligonucleotide
  Antisense strand to SEQ ID NO: 244508
uagcuacagauccacugcc

SEQ ID NO: 244510 - RNA, 19 nt, Artificial Sequence
  Description of Artificial Sequence: Synthetic oligonucleotide
  Sense strand starting at position 3580 SEQ ID NO: 3146
gcgcgcucggcaaucgauu

SEQ ID NO: 244511 - RNA, 19 nt, Artificial Sequence
  Description of Artificial Sequence: Synthetic oligonucleotide
  Antisense strand to SEQ ID NO: 244510
aaucgauugccgagcgcgc

SEQ ID NO: 244512 - RNA, 19 nt, Artificial Sequence
  Description of Artificial Sequence: Synthetic oligonucleotide
  Sense strand starting at position 3586 SEQ ID NO: 3146
ucggcaaucgauuacagga

SEQ ID NO: 244513 - RNA, 19 nt, Artificial Sequence
  Description of Artificial Sequence: Synthetic oligonucleotide
  Antisense strand to SEQ ID NO: 244512
uccuguaaucgauugccga

SEQ ID NO: 244514 - RNA, 19 nt, Artificial Sequence
  Description of Artificial Sequence: Synthetic oligonucleotide
  Sense strand starting at position 29 SEQ ID NO: 3145
uguauugaucgccaaguau

SEQ ID NO: 244515 - RNA, 19 nt, Artificial Sequence
  Description of Artificial Sequence: Synthetic oligonucleotide
  Antisense strand to SEQ ID NO: 244514
auacuuggcgaucaauaca

SEQ ID NO: 244516 - RNA, 19 nt, Artificial Sequence
  Description of Artificial Sequence: Synthetic oligonucleotide
  Sense strand starting at position 205 SEQ ID NO: 3145
auggaauaaucagaucaaa

SEQ ID NO: 244517 - RNA, 19 nt, Artificial Sequence
  Description of Artificial Sequence: Synthetic oligonucleotide
  Antisense strand to SEQ ID NO: 244516
uuugaucugauuauuccau

SEQ ID NO: 244518 - RNA, 19 nt, Artificial Sequence
  Description of Artificial Sequence: Synthetic oligonucleotide
  Sense strand starting at position 339 SEQ ID NO: 3145
aggagcaguuucuucggau

SEQ ID NO: 244519 - RNA, 19 nt, Artificial Sequence
  Description of Artificial Sequence: Synthetic oligonucleotide
  Antisense strand to SEQ ID NO: 244518
auccgaagaaacugcuccu

SEQ ID NO: 244520 - RNA, 19 nt, Artificial Sequence
  Description of Artificial Sequence: Synthetic oligonucleotide
  Sense strand starting at position 340 SEQ ID NO: 3145
ggagcaguuucuucggaua

SEQ ID NO: 244521 - RNA, 19 nt, Artificial Sequence
  Description of Artificial Sequence: Synthetic oligonucleotide
  Antisense strand to SEQ ID NO: 244520
uauccgaagaaacugcucc

SEQ ID NO: 244522 - RNA, 19 nt, Artificial Sequence
  Description of Artificial Sequence: Synthetic oligonucleotide
  Sense strand starting at position 629 SEQ ID NO: 3145
caaugucgggcugaagaua

SEQ ID NO: 244523 - RNA, 19 nt, Artificial Sequence
  Description of Artificial Sequence: Synthetic oligonucleotide
  Antisense strand to SEQ ID NO: 244522
uaucuucagcccgacauug

SEQ ID NO: 244524 - RNA, 19 nt, Artificial Sequence
  Description of Artificial Sequence: Synthetic oligonucleotide
  Sense strand starting at position 758 SEQ ID NO: 3145
gcacuuuacagguggguca

SEQ ID NO: 244525 - RNA, 19 nt, Artificial Sequence
  Description of Artificial Sequence: Synthetic oligonucleotide
  Antisense strand to SEQ ID NO: 244524
ugacccaccuguaaagugc

SEQ ID NO: 244526 - RNA, 19 nt, Artificial Sequence
  Description of Artificial Sequence: Synthetic oligonucleotide
  Sense strand starting at position 794 SEQ ID NO: 3145
gcaaacagaucggcugaua

SEQ ID NO: 244527 - RNA, 19 nt, Artificial Sequence
  Description of Artificial Sequence: Synthetic oligonucleotide
  Antisense strand to SEQ ID NO: 244526
uaucagccgaucuguuugc

SEQ ID NO: 244528 - RNA, 19 nt, Artificial Sequence
  Description of Artificial Sequence: Synthetic oligonucleotide
  Sense strand starting at position 905 SEQ ID NO: 3145
gucccuuagggauggucua

SEQ ID NO: 244529 - RNA, 19 nt, Artificial Sequence
  Description of Artificial Sequence: Synthetic oligonucleotide
  Antisense strand to SEQ ID NO: 244528
uagaccaucccuaagggac

SEQ ID NO: 244530 - RNA, 19 nt, Artificial Sequence
  Description of Artificial Sequence: Synthetic oligonucleotide
  Sense strand starting at position 1007 SEQ ID NO: 3145
uagcaaugcgauuaacaag

SEQ ID NO: 244531 - RNA, 19 nt, Artificial Sequence
  Description of Artificial Sequence: Synthetic oligonucleotide
  Antisense strand to SEQ ID NO: 244530
cuuguuaaucgcauugcua

SEQ ID NO: 244532 - RNA, 19 nt, Artificial Sequence
  Description of Artificial Sequence: Synthetic oligonucleotide
  Sense strand starting at position 1039 SEQ ID NO: 3145
uccaccgguuccuuaagaa

SEQ ID NO: 244533 - RNA, 19 nt, Artificial Sequence
  Description of Artificial Sequence: Synthetic oligonucleotide
  Antisense strand to SEQ ID NO: 244532
uucuuaaggaaccggugga

SEQ ID NO: 244534 - RNA, 19 nt, Artificial Sequence
  Description of Artificial Sequence: Synthetic oligonucleotide
  Sense strand starting at position 1220 SEQ ID NO: 3145
cucuuucgcccauacuaga

SEQ ID NO: 244535 - RNA, 19 nt, Artificial Sequence
  Description of Artificial Sequence: Synthetic oligonucleotide
  Antisense strand to SEQ ID NO: 244534
ucuaguaugggcgaaagag

SEQ ID NO: 244536 - RNA, 19 nt, Artificial Sequence
  Description of Artificial Sequence: Synthetic oligonucleotide
  Sense strand starting at position 1739 SEQ ID NO: 3145
aucuaugaaucagaagaca

SEQ ID NO: 244537 - RNA, 19 nt, Artificial Sequence
  Description of Artificial Sequence: Synthetic oligonucleotide
  Antisense strand to SEQ ID NO: 244536
ugucuucugauucauagau

SEQ ID NO: 244538 - RNA, 19 nt, Artificial Sequence
  Description of Artificial Sequence: Synthetic oligonucleotide
  Sense strand starting at position 2305 SEQ ID NO: 3145
gcgcgcucggcaaucgauu

SEQ ID NO: 244539 - RNA, 19 nt, Artificial Sequence
  Description of Artificial Sequence: Synthetic oligonucleotide
  Antisense strand to SEQ ID NO: 244538
aaucgauugccgagcgcgc

SEQ ID NO: 244540 - RNA, 19 nt, Artificial Sequence
  Description of Artificial Sequence: Synthetic oligonucleotide
  Sense strand starting at position 2311 SEQ ID NO: 3145
ucggcaaucgauuacagga

SEQ ID NO: 244541 - RNA, 19 nt, Artificial Sequence
  Description of Artificial Sequence: Synthetic oligonucleotide
  Antisense strand to SEQ ID NO: 244540
uccuguaaucgauugccga

SEQ ID NO: 244542 - RNA, 19 nt, Artificial Sequence
  Description of Artificial Sequence: Synthetic oligonucleotide
  Sense strand starting at position 2791 SEQ ID NO: 3145
ggaauagacugagaaagac

SEQ ID NO: 244543 - RNA, 19 nt, Artificial Sequence
  Description of Artificial Sequence: Synthetic oligonucleotide
  Antisense strand to SEQ ID NO: 244542
gucuuucucagucuauucc

SEQ ID NO: 244544 - RNA, 19 nt, Artificial Sequence
  Description of Artificial Sequence: Synthetic oligonucleotide
  Sense strand starting at position 2812 SEQ ID NO: 3145
ucaugucugagaugaagcu

SEQ ID NO: 244545 - RNA, 19 nt, Artificial Sequence
  Description of Artificial Sequence: Synthetic oligonucleotide
  Antisense strand to SEQ ID NO: 244544
agcuucaucucagacauga

SEQ ID NO: 244546 - RNA, 19 nt, Artificial Sequence
  Description of Artificial Sequence: Synthetic oligonucleotide
  Sense strand starting at position 2845 SEQ ID NO: 3145
uugaaagugcuuuaacagu

SEQ ID NO: 244547 - RNA, 19 nt, Artificial Sequence
  Description of Artificial Sequence: Synthetic oligonucleotide
  Antisense strand to SEQ ID NO: 244546
acuguuaaagcacuuucaa

SEQ ID NO: 244548 - RNA, 19 nt, Artificial Sequence
  Description of Artificial Sequence: Synthetic oligonucleotide
  Sense strand starting at position 2913 SEQ ID NO: 3145
gugccacgucuuccaaagu

SEQ ID NO: 244549 - RNA, 19 nt, Artificial Sequence
  Description of Artificial Sequence: Synthetic oligonucleotide
  Antisense strand to SEQ ID NO: 244548
acuuuggaagacguggcac

SEQ ID NO: 244550 - RNA, 19 nt, Artificial Sequence
  Description of Artificial Sequence: Synthetic oligonucleotide
  Sense strand starting at position 2965 SEQ ID NO: 3145
cuugaaguguuaccuauca

SEQ ID NO: 244551 - RNA, 19 nt, Artificial Sequence
  Description of Artificial Sequence: Synthetic oligonucleotide
  Antisense strand to SEQ ID NO: 244550
ugauagguaacacuucaag

SEQ ID NO: 244552 - RNA, 19 nt, Artificial Sequence
  Description of Artificial Sequence: Synthetic oligonucleotide
  Sense strand starting at position 2997 SEQ ID NO: 3145
cuuguuuauuuggaaagaa

SEQ ID NO: 244553 - RNA, 19 nt, Artificial Sequence
  Description of Artificial Sequence: Synthetic oligonucleotide
  Antisense strand to SEQ ID NO: 244552
uucuuuccaaauaaacaag

SEQ ID NO: 244554 - RNA, 19 nt, Artificial Sequence
  Description of Artificial Sequence: Synthetic oligonucleotide
  Sense strand starting at position 3073 SEQ ID NO: 3145
uuaguaucuuuccugacca

SEQ ID NO: 244555 - RNA, 19 nt, Artificial Sequence
  Description of Artificial Sequence: Synthetic oligonucleotide
  Antisense strand to SEQ ID NO: 244554
uggucaggaaagauacuaa

SEQ ID NO: 244556 - RNA, 19 nt, Artificial Sequence
  Description of Artificial Sequence: Synthetic oligonucleotide
  Sense strand starting at position 3163 SEQ ID NO: 3145
ugaacuguguagucuggau

SEQ ID NO: 244557 - RNA, 19 nt, Artificial Sequence
  Description of Artificial Sequence: Synthetic oligonucleotide
  Antisense strand to SEQ ID NO: 244556
auccagacuacacaguuca

SEQ ID NO: 244558 - RNA, 19 nt, Artificial Sequence
  Description of Artificial Sequence: Synthetic oligonucleotide
  Sense strand starting at position 3172 SEQ ID NO: 3145
uagucuggauggcugaaau

SEQ ID NO: 244559 - RNA, 19 nt, Artificial Sequence
  Description of Artificial Sequence: Synthetic oligonucleotide
  Antisense strand to SEQ ID NO: 244558
auuucagccauccagacua

SEQ ID NO: 244560 - RNA, 19 nt, Artificial Sequence
  Description of Artificial Sequence: Synthetic oligonucleotide
  Sense strand starting at position 3222 SEQ ID NO: 3145
aacgguguuccugagaaac

SEQ ID NO: 244561 - RNA, 19 nt, Artificial Sequence
  Description of Artificial Sequence: Synthetic oligonucleotide
  Antisense strand to SEQ ID NO: 244560
guuucucaggaacaccguu

SEQ ID NO: 244562 - RNA, 19 nt, Artificial Sequence
  Description of Artificial Sequence: Synthetic oligonucleotide
  Sense strand starting at position 3316 SEQ ID NO: 3145
cccagaaauaguuguugag

SEQ ID NO: 244563 - RNA, 19 nt, Artificial Sequence
  Description of Artificial Sequence: Synthetic oligonucleotide
  Antisense strand to SEQ ID NO: 244562
cucaacaacuauuucuggg

SEQ ID NO: 244564 - RNA, 19 nt, Artificial Sequence
  Description of Artificial Sequence: Synthetic oligonucleotide
  Sense strand starting at position 3318 SEQ ID NO: 3145
cagaaauaguuguugaggu

SEQ ID NO: 244565 - RNA, 19 nt, Artificial Sequence
  Description of Artificial Sequence: Synthetic oligonucleotide
  Antisense strand to SEQ ID NO: 244564
accucaacaacuauuucug

SEQ ID NO: 244566 - RNA, 19 nt, Artificial Sequence
  Description of Artificial Sequence: Synthetic oligonucleotide
  Sense strand starting at position 3320 SEQ ID NO: 3145
gaaauaguuguugagguuu

SEQ ID NO: 244567 - RNA, 19 nt, Artificial Sequence
  Description of Artificial Sequence: Synthetic oligonucleotide
  Antisense strand to SEQ ID NO: 244566
aaaccucaacaacuauuuc

SEQ ID NO: 244568 - RNA, 19 nt, Artificial Sequence
  Description of Artificial Sequence: Synthetic oligonucleotide
  Sense strand starting at position 3377 SEQ ID NO: 3145
agucaucaacaguaccuua

SEQ ID NO: 244569 - RNA, 19 nt, Artificial Sequence
  Description of Artificial Sequence: Synthetic oligonucleotide
  Antisense strand to SEQ ID NO: 244568
uaagguacuguugaugacu

SEQ ID NO: 244570 - RNA, 19 nt, Artificial Sequence
  Description of Artificial Sequence: Synthetic oligonucleotide
  Sense strand starting at position 3495 SEQ ID NO: 3145
auauaacuugugugauacu

SEQ ID NO: 244571 - RNA, 19 nt, Artificial Sequence
  Description of Artificial Sequence: Synthetic oligonucleotide
  Antisense strand to SEQ ID NO: 244570
aguaucacacaaguuauau

SEQ ID NO: 244572 - RNA, 19 nt, Artificial Sequence
  Description of Artificial Sequence: Synthetic oligonucleotide
  Sense strand starting at position 3619 SEQ ID NO: 3145
gauagugugguacagcaaa

SEQ ID NO: 244573 - RNA, 19 nt, Artificial Sequence
  Description of Artificial Sequence: Synthetic oligonucleotide
  Antisense strand to SEQ ID NO: 244572
uuugcuguaccacacuauc

SEQ ID NO: 244574 - RNA, 19 nt, Artificial Sequence
  Description of Artificial Sequence: Synthetic oligonucleotide
  Sense strand starting at position 3662 SEQ ID NO: 3145
gagaaauuauuugggcuca

SEQ ID NO: 244575 - RNA, 19 nt, Artificial Sequence
  Description of Artificial Sequence: Synthetic oligonucleotide
  Antisense strand to SEQ ID NO: 244574
ugagcccaaauaauuucuc

SEQ ID NO: 244576 - RNA, 19 nt, Artificial Sequence
  Description of Artificial Sequence: Synthetic oligonucleotide
  Sense strand starting at position 3678 SEQ ID NO: 3145
ucaggcuugcaauaacauu

SEQ ID NO: 244577 - RNA, 19 nt, Artificial Sequence
  Description of Artificial Sequence: Synthetic oligonucleotide
  Antisense strand to SEQ ID NO: 244576
aauguuauugcaagccuga

SEQ ID NO: 244578 - RNA, 19 nt, Artificial Sequence
  Description of Artificial Sequence: Synthetic oligonucleotide
  Sense strand starting at position 3721 SEQ ID NO: 3145
guuccugugaguuauauau

SEQ ID NO: 244579 - RNA, 19 nt, Artificial Sequence
  Description of Artificial Sequence: Synthetic oligonucleotide
  Antisense strand to SEQ ID NO: 244578
auauauaacucacaggaac

SEQ ID NO: 244580 - RNA, 19 nt, Artificial Sequence
  Description of Artificial Sequence: Synthetic oligonucleotide
  Sense strand starting at position 3818 SEQ ID NO: 3145
accaguaagucacucuaau

SEQ ID NO: 244581 - RNA, 19 nt, Artificial Sequence
  Description of Artificial Sequence: Synthetic oligonucleotide
  Antisense strand to SEQ ID NO: 244580
auuagagugacuuacuggu

SEQ ID NO: 244582 - RNA, 19 nt, Artificial Sequence
  Description of Artificial Sequence: Synthetic oligonucleotide
  Sense strand starting at position 3885 SEQ ID NO: 3145
cuguaugucguuuauaaua

SEQ ID NO: 244583 - RNA, 19 nt, Artificial Sequence
  Description of Artificial Sequence: Synthetic oligonucleotide
  Antisense strand to SEQ ID NO: 244582
uauuauaaacgacauacag

SEQ ID NO: 244584 - RNA, 19 nt, Artificial Sequence
  Description of Artificial Sequence: Synthetic oligonucleotide
  Sense strand starting at position 3905 SEQ ID NO: 3145
guaaaugcacaauauguaa

SEQ ID NO: 244585 - RNA, 19 nt, Artificial Sequence
  Description of Artificial Sequence: Synthetic oligonucleotide
  Antisense strand to SEQ ID NO: 244584
uuacauauugugcauuuac

SEQ ID NO: 244586 - RNA, 19 nt, Artificial Sequence
  Description of Artificial Sequence: Synthetic oligonucleotide
  Sense strand starting at position 3930 SEQ ID NO: 3145
acauaaguucucgaaauug

SEQ ID NO: 244587 - RNA, 19 nt, Artificial Sequence
  Description of Artificial Sequence: Synthetic oligonucleotide
  Antisense strand to SEQ ID NO: 244586
caauuucgagaacuuaugu

SEQ ID NO: 244588 - RNA, 19 nt, Artificial Sequence
  Description of Artificial Sequence: Synthetic oligonucleotide
  Sense strand starting at position 3947 SEQ ID NO: 3145
ugucauaaguccuuccuaa

SEQ ID NO: 244589 - RNA, 19 nt, Artificial Sequence
  Description of Artificial Sequence: Synthetic oligonucleotide
  Antisense strand to SEQ ID NO: 244588
uuaggaaggacuuaugaca

SEQ ID NO: 244590 - RNA, 19 nt, Artificial Sequence
  Description of Artificial Sequence: Synthetic oligonucleotide
  Sense strand starting at position 3971 SEQ ID NO: 3145
gaaccuaaguguuuaggua

SEQ ID NO: 244591 - RNA, 19 nt, Artificial Sequence
  Description of Artificial Sequence: Synthetic oligonucleotide
  Antisense strand to SEQ ID NO: 244590
uaccuaaacacuuagguuc

SEQ ID NO: 244592 - RNA, 19 nt, Artificial Sequence
  Description of Artificial Sequence: Synthetic oligonucleotide
  Sense strand starting at position 3972 SEQ ID NO: 3145
aaccuaaguguuuagguau

SEQ ID NO: 244593 - RNA, 19 nt, Artificial Sequence
  Description of Artificial Sequence: Synthetic oligonucleotide
  Antisense strand to SEQ ID NO: 244592
auaccuaaacacuuagguu

SEQ ID NO: 244594 - RNA, 19 nt, Artificial Sequence
  Description of Artificial Sequence: Synthetic oligonucleotide
  Sense strand starting at position 10 SEQ ID NO: 3147
ugggucccacccugagaaa

SEQ ID NO: 244595 - RNA, 19 nt, Artificial Sequence
  Description of Artificial Sequence: Synthetic oligonucleotide
  Antisense strand to SEQ ID NO: 244594
uuucucagggugggaccca

SEQ ID NO: 244596 - RNA, 19 nt, Artificial Sequence
  Description of Artificial Sequence: Synthetic oligonucleotide
  Sense strand starting at position 21 SEQ ID NO: 3147
cugagaaacugaccuuucu

SEQ ID NO: 244597 - RNA, 19 nt, Artificial Sequence
  Description of Artificial Sequence: Synthetic oligonucleotide
  Antisense strand to SEQ ID NO: 244596
agaaaggucaguuucucag

SEQ ID NO: 244598 - RNA, 19 nt, Artificial Sequence
  Description of Artificial Sequence: Synthetic oligonucleotide
  Sense strand starting at position 103 SEQ ID NO: 3147
ugaggaaccugagauuuga

SEQ ID NO: 244599 - RNA, 19 nt, Artificial Sequence
  Description of Artificial Sequence: Synthetic oligonucleotide
  Antisense strand to SEQ ID NO: 244598
ucaaaucucagguuccuca

SEQ ID NO: 244600 - RNA, 19 nt, Artificial Sequence
  Description of Artificial Sequence: Synthetic oligonucleotide
  Sense strand starting at position 223 SEQ ID NO: 3147
cgagcaacuccugagacaa

SEQ ID NO: 244601 - RNA, 19 nt, Artificial Sequence
  Description of Artificial Sequence: Synthetic oligonucleotide
  Antisense strand to SEQ ID NO: 244600
uugucucaggaguugcucg

SEQ ID NO: 244602 - RNA, 19 nt, Artificial Sequence
  Description of Artificial Sequence: Synthetic oligonucleotide
  Sense strand starting at position 295 SEQ ID NO: 3147
uacaguguuccaugcauag

SEQ ID NO: 244603 - RNA, 19 nt, Artificial Sequence
  Description of Artificial Sequence: Synthetic oligonucleotide
  Antisense strand to SEQ ID NO: 244602
cuaugcauggaacacugua

SEQ ID NO: 244604 - RNA, 19 nt, Artificial Sequence
  Description of Artificial Sequence: Synthetic oligonucleotide
  Sense strand starting at position 319 SEQ ID NO: 3147
uuacucagccugugagaug

SEQ ID NO: 244605 - RNA, 19 nt, Artificial Sequence
  Description of Artificial Sequence: Synthetic oligonucleotide
  Antisense strand to SEQ ID NO: 244604
caucucacaggcugaguaa

SEQ ID NO: 244606 - RNA, 19 nt, Artificial Sequence
  Description of Artificial Sequence: Synthetic oligonucleotide
  Sense strand starting at position 423 SEQ ID NO: 3147
aauaauuuguguggaaucu

SEQ ID NO: 244607 - RNA, 19 nt, Artificial Sequence
  Description of Artificial Sequence: Synthetic oligonucleotide
  Antisense strand to SEQ ID NO: 244606
agauuccacacaaauuauu

SEQ ID NO: 244608 - RNA, 19 nt, Artificial Sequence
  Description of Artificial Sequence: Synthetic oligonucleotide
  Sense strand starting at position 478 SEQ ID NO: 3147
ccucauaguccuugucaca

SEQ ID NO: 244609 - RNA, 19 nt, Artificial Sequence
  Description of Artificial Sequence: Synthetic oligonucleotide
  Antisense strand to SEQ ID NO: 244608
ugugacaaggacuaugagg

SEQ ID NO: 244610 - RNA, 19 nt, Artificial Sequence
  Description of Artificial Sequence: Synthetic oligonucleotide
  Sense strand starting at position 485 SEQ ID NO: 3147
guccuugucacacaagugu

SEQ ID NO: 244611 - RNA, 19 nt, Artificial Sequence
  Description of Artificial Sequence: Synthetic oligonucleotide
  Antisense strand to SEQ ID NO: 244610
acacuugugugacaaggac

SEQ ID NO: 244612 - RNA, 19 nt, Artificial Sequence
  Description of Artificial Sequence: Synthetic oligonucleotide
  Sense strand starting at position 494 SEQ ID NO: 3147
acacaagugucuguuguua

SEQ ID NO: 244613 - RNA, 19 nt, Artificial Sequence
  Description of Artificial Sequence: Synthetic oligonucleotide
  Antisense strand to SEQ ID NO: 244612
uaacaacagacacuugugu

SEQ ID NO: 244614 - RNA, 19 nt, Artificial Sequence
  Description of Artificial Sequence: Synthetic oligonucleotide
  Sense strand starting at position 505 SEQ ID NO: 3147
uguuguuagccuuaugcuu

SEQ ID NO: 244615 - RNA, 19 nt, Artificial Sequence
  Description of Artificial Sequence: Synthetic oligonucleotide
  Antisense strand to SEQ ID NO: 244614
aagcauaaggcuaacaaca

SEQ ID NO: 244616 - RNA, 19 nt, Artificial Sequence
  Description of Artificial Sequence: Synthetic oligonucleotide
  Sense strand starting at position 611 SEQ ID NO: 3147
cucaguauuugccuucuca

SEQ ID NO: 244617 - RNA, 19 nt, Artificial Sequence
  Description of Artificial Sequence: Synthetic oligonucleotide
  Antisense strand to SEQ ID NO: 244616
ugagaaggcaaauacugag

SEQ ID NO: 244618 - RNA, 19 nt, Artificial Sequence
  Description of Artificial Sequence: Synthetic oligonucleotide
  Sense strand starting at position 661 SEQ ID NO: 3147
ggcacaugccuauguccaa

SEQ ID NO: 244619 - RNA, 19 nt, Artificial Sequence
  Description of Artificial Sequence: Synthetic oligonucleotide
  Antisense strand to SEQ ID NO: 244618
uuggacauaggcaugugcc

SEQ ID NO: 244620 - RNA, 19 nt, Artificial Sequence
  Description of Artificial Sequence: Synthetic oligonucleotide
  Sense strand starting at position 1095 SEQ ID NO: 3147
ucagccuuuggauguauau

SEQ ID NO: 244621 - RNA, 19 nt, Artificial Sequence
  Description of Artificial Sequence: Synthetic oligonucleotide
  Antisense strand to SEQ ID NO: 244620
auauacauccaaaggcuga

SEQ ID NO: 244622 - RNA, 19 nt, Artificial Sequence
  Description of Artificial Sequence: Synthetic oligonucleotide
  Sense strand starting at position 1263 SEQ ID NO: 3147
gggucuugagaaugaagca

SEQ ID NO: 244623 - RNA, 19 nt, Artificial Sequence
  Description of Artificial Sequence: Synthetic oligonucleotide
  Antisense strand to SEQ ID NO: 244622
ugcuucauucucaagaccc

SEQ ID NO: 244624 - RNA, 19 nt, Artificial Sequence
  Description of Artificial Sequence: Synthetic oligonucleotide
  Sense strand starting at position 1318 SEQ ID NO: 3147
cucuguaucuggcugcaau

SEQ ID NO: 244625 - RNA, 19 nt, Artificial Sequence
  Description of Artificial Sequence: Synthetic oligonucleotide
  Antisense strand to SEQ ID NO: 244624
auugcagccagauacagag

SEQ ID NO: 244626 - RNA, 19 nt, Artificial Sequence
  Description of Artificial Sequence: Synthetic oligonucleotide
  Sense strand starting at position 1319 SEQ ID NO: 3147
ucuguaucuggcugcaauu

SEQ ID NO: 244627 - RNA, 19 nt, Artificial Sequence
  Description of Artificial Sequence: Synthetic oligonucleotide
  Antisense strand to SEQ ID NO: 244626
aauugcagccagauacaga

SEQ ID NO: 244628 - RNA, 19 nt, Artificial Sequence
  Description of Artificial Sequence: Synthetic oligonucleotide
  Sense strand starting at position 1354 SEQ ID NO: 3147
gucugauaacugcgaugca

SEQ ID NO: 244629 - RNA, 19 nt, Artificial Sequence
  Description of Artificial Sequence: Synthetic oligonucleotide
  Antisense strand to SEQ ID NO: 244628
ugcaucgcaguuaucagac

SEQ ID NO: 244630 - RNA, 19 nt, Artificial Sequence
  Description of Artificial Sequence: Synthetic oligonucleotide
  Sense strand starting at position 1414 SEQ ID NO: 3147
agacaaaggcucuggaauc

SEQ ID NO: 244631 - RNA, 19 nt, Artificial Sequence
  Description of Artificial Sequence: Synthetic oligonucleotide
  Antisense strand to SEQ ID NO: 244630
gauuccagagccuuugucu

SEQ ID NO: 244632 - RNA, 19 nt, Artificial Sequence
  Description of Artificial Sequence: Synthetic oligonucleotide
  Sense strand starting at position 1463 SEQ ID NO: 3147
acuacuuaguagcuggaua

SEQ ID NO: 244633 - RNA, 19 nt, Artificial Sequence
  Description of Artificial Sequence: Synthetic oligonucleotide
  Antisense strand to SEQ ID NO: 244632
uauccagcuacuaaguagu

SEQ ID NO: 244634 - RNA, 19 nt, Artificial Sequence
  Description of Artificial Sequence: Synthetic oligonucleotide
  Sense strand starting at position 1475 SEQ ID NO: 3147
cuggauacucuuggguaaa

SEQ ID NO: 244635 - RNA, 19 nt, Artificial Sequence
  Description of Artificial Sequence: Synthetic oligonucleotide
  Antisense strand to SEQ ID NO: 244634
uuuacccaagaguauccag

SEQ ID NO: 244636 - RNA, 19 nt, Artificial Sequence
  Description of Artificial Sequence: Synthetic oligonucleotide
  Sense strand starting at position 1477 SEQ ID NO: 3147
ggauacucuuggguaaaug

SEQ ID NO: 244637 - RNA, 19 nt, Artificial Sequence
  Description of Artificial Sequence: Synthetic oligonucleotide
  Antisense strand to SEQ ID NO: 244636
cauuuacccaagaguaucc

SEQ ID NO: 244638 - RNA, 19 nt, Artificial Sequence
  Description of Artificial Sequence: Synthetic oligonucleotide
  Sense strand starting at position 1723 SEQ ID NO: 3147
acaggaugcugucucauca

SEQ ID NO: 244639 - RNA, 19 nt, Artificial Sequence
  Description of Artificial Sequence: Synthetic oligonucleotide
  Antisense strand to SEQ ID NO: 244638
ugaugagacagcauccugu

SEQ ID NO: 244640 - RNA, 19 nt, Artificial Sequence
  Description of Artificial Sequence: Synthetic oligonucleotide
  Sense strand starting at position 2014 SEQ ID NO: 3147
gugaaagagaggugugauu

SEQ ID NO: 244641 - RNA, 19 nt, Artificial Sequence
  Description of Artificial Sequence: Synthetic oligonucleotide
  Antisense strand to SEQ ID NO: 244640
aaucacaccucucuuucac

SEQ ID NO: 244642 - RNA, 19 nt, Artificial Sequence
  Description of Artificial Sequence: Synthetic oligonucleotide
  Sense strand starting at position 2248 SEQ ID NO: 3147
ggcguagaauccucccuga

SEQ ID NO: 244643 - RNA, 19 nt, Artificial Sequence
  Description of Artificial Sequence: Synthetic oligonucleotide
  Antisense strand to SEQ ID NO: 244642
ucagggaggauucuacgcc

SEQ ID NO: 244644 - RNA, 19 nt, Artificial Sequence
  Description of Artificial Sequence: Synthetic oligonucleotide
  Sense strand starting at position 2251 SEQ ID NO: 3147
guagaauccucccugacuc

SEQ ID NO: 244645 - RNA, 19 nt, Artificial Sequence
  Description of Artificial Sequence: Synthetic oligonucleotide
  Antisense strand to SEQ ID NO: 244644
gagucagggaggauucuac

SEQ ID NO: 244646 - RNA, 19 nt, Artificial Sequence
  Description of Artificial Sequence: Synthetic oligonucleotide
  Sense strand starting at position 2353 SEQ ID NO: 3147
cguggaguuaccggagcua

SEQ ID NO: 244647 - RNA, 19 nt, Artificial Sequence
  Description of Artificial Sequence: Synthetic oligonucleotide
  Antisense strand to SEQ ID NO: 244646
uagcuccgguaacuccacg

SEQ ID NO: 244648 - RNA, 19 nt, Artificial Sequence
  Description of Artificial Sequence: Synthetic oligonucleotide
  Sense strand starting at position 2736 SEQ ID NO: 3147
uuugcuuucccagaaggau

SEQ ID NO: 244649 - RNA, 19 nt, Artificial Sequence
  Description of Artificial Sequence: Synthetic oligonucleotide
  Antisense strand to SEQ ID NO: 244648
auccuucugggaaagcaaa

SEQ ID NO: 244650 - RNA, 19 nt, Artificial Sequence
  Description of Artificial Sequence: Synthetic oligonucleotide
  Sense strand starting at position 2786 SEQ ID NO: 3147
ggugcaauuguugaaguuu

SEQ ID NO: 244651 - RNA, 19 nt, Artificial Sequence
  Description of Artificial Sequence: Synthetic oligonucleotide
  Antisense strand to SEQ ID NO: 244650
aaacuucaacaauugcacc

SEQ ID NO: 244652 - RNA, 19 nt, Artificial Sequence
  Description of Artificial Sequence: Synthetic oligonucleotide
  Sense strand starting at position 2829 SEQ ID NO: 3147
gggaauguguguuucuaga

SEQ ID NO: 244653 - RNA, 19 nt, Artificial Sequence
  Description of Artificial Sequence: Synthetic oligonucleotide
  Antisense strand to SEQ ID NO: 244652
ucuagaaacacacauuccc

SEQ ID NO: 244654 - RNA, 19 nt, Artificial Sequence
  Description of Artificial Sequence: Synthetic oligonucleotide
  Sense strand starting at position 2831 SEQ ID NO: 3147
gaauguguguuucuagauu

SEQ ID NO: 244655 - RNA, 19 nt, Artificial Sequence
  Description of Artificial Sequence: Synthetic oligonucleotide
  Antisense strand to SEQ ID NO: 244654
aaucuagaaacacacauuc

SEQ ID NO: 244656 - RNA, 19 nt, Artificial Sequence
  Description of Artificial Sequence: Synthetic oligonucleotide
  Sense strand starting at position 3153 SEQ ID NO: 3147
uuccuaagauuaguaauga

SEQ ID NO: 244657 - RNA, 19 nt, Artificial Sequence
  Description of Artificial Sequence: Synthetic oligonucleotide
  Antisense strand to SEQ ID NO: 244656
ucauuacuaaucuuaggaa

SEQ ID NO: 244658 - RNA, 19 nt, Artificial Sequence
  Description of Artificial Sequence: Synthetic oligonucleotide
  Sense strand starting at position 3154 SEQ ID NO: 3147
uccuaagauuaguaaugag

SEQ ID NO: 244659 - RNA, 19 nt, Artificial Sequence
  Description of Artificial Sequence: Synthetic oligonucleotide
  Antisense strand to SEQ ID NO: 244658
cucauuacuaaucuuagga

SEQ ID NO: 244660 - RNA, 19 nt, Artificial Sequence
  Description of Artificial Sequence: Synthetic oligonucleotide
  Sense strand starting at position 3196 SEQ ID NO: 3147
ggacaacugcuuugcaaca

SEQ ID NO: 244661 - RNA, 19 nt, Artificial Sequence
  Description of Artificial Sequence: Synthetic oligonucleotide
  Antisense strand to SEQ ID NO: 244660
uguugcaaagcaguugucc

SEQ ID NO: 244662 - RNA, 19 nt, Artificial Sequence
  Description of Artificial Sequence: Synthetic oligonucleotide
  Sense strand starting at position 3201 SEQ ID NO: 3147
acugcuuugcaacaaguga

SEQ ID NO: 244663 - RNA, 19 nt, Artificial Sequence
  Description of Artificial Sequence: Synthetic oligonucleotide
  Antisense strand to SEQ ID NO: 244662
ucacuuguugcaaagcagu

SEQ ID NO: 244664 - RNA, 19 nt, Artificial Sequence
  Description of Artificial Sequence: Synthetic oligonucleotide
  Sense strand starting at position 3355 SEQ ID NO: 3147
uuaucaagaucauggaaua

SEQ ID NO: 244665 - RNA, 19 nt, Artificial Sequence
  Description of Artificial Sequence: Synthetic oligonucleotide
  Antisense strand to SEQ ID NO: 244664
uauuccaugaucuugauaa

SEQ ID NO: 244666 - RNA, 19 nt, Artificial Sequence
  Description of Artificial Sequence: Synthetic oligonucleotide
  Sense strand starting at position 3560 SEQ ID NO: 3147
agggauauaccacguuuac

SEQ ID NO: 244667 - RNA, 19 nt, Artificial Sequence
  Description of Artificial Sequence: Synthetic oligonucleotide
  Antisense strand to SEQ ID NO: 244666
guaaacgugguauaucccu

SEQ ID NO: 244668 - RNA, 19 nt, Artificial Sequence
  Description of Artificial Sequence: Synthetic oligonucleotide
  Sense strand starting at position 3571 SEQ ID NO: 3147
acguuuacggauuggaaga

SEQ ID NO: 244669 - RNA, 19 nt, Artificial Sequence
  Description of Artificial Sequence: Synthetic oligonucleotide
  Antisense strand to SEQ ID NO: 244668
ucuuccaauccguaaacgu

SEQ ID NO: 244670 - RNA, 19 nt, Artificial Sequence
  Description of Artificial Sequence: Synthetic oligonucleotide
  Sense strand starting at position 3697 SEQ ID NO: 3147
uuaagaagcuguuucuaaa

SEQ ID NO: 244671 - RNA, 19 nt, Artificial Sequence
  Description of Artificial Sequence: Synthetic oligonucleotide
  Antisense strand to SEQ ID NO: 244670
uuuagaaacagcuucuuaa

SEQ ID NO: 244672 - RNA, 19 nt, Artificial Sequence
  Description of Artificial Sequence: Synthetic oligonucleotide
  Sense strand starting at position 3730 SEQ ID NO: 3147
gcaaauaaucuaggauugu

SEQ ID NO: 244673 - RNA, 19 nt, Artificial Sequence
  Description of Artificial Sequence: Synthetic oligonucleotide
  Antisense strand to SEQ ID NO: 244672
acaauccuagauuauuugc

SEQ ID NO: 244674 - RNA, 19 nt, Artificial Sequence
  Description of Artificial Sequence: Synthetic oligonucleotide
  Sense strand starting at position 16 SEQ ID NO: 3148
aaaugucuggacuguauca

SEQ ID NO: 244675 - RNA, 19 nt, Artificial Sequence
  Description of Artificial Sequence: Synthetic oligonucleotide
  Antisense strand to SEQ ID NO: 244674
ugauacaguccagacauuu

SEQ ID NO: 244676 - RNA, 19 nt, Artificial Sequence
  Description of Artificial Sequence: Synthetic oligonucleotide
  Sense strand starting at position 131 SEQ ID NO: 3148
aagaucagaugguugcuaa

SEQ ID NO: 244677 - RNA, 19 nt, Artificial Sequence
  Description of Artificial Sequence: Synthetic oligonucleotide
  Antisense strand to SEQ ID NO: 244676
uuagcaaccaucugaucuu

SEQ ID NO: 244678 - RNA, 19 nt, Artificial Sequence
  Description of Artificial Sequence: Synthetic oligonucleotide
  Sense strand starting at position 134 SEQ ID NO: 3148
aucagaugguugcuaagau

SEQ ID NO: 244679 - RNA, 19 nt, Artificial Sequence
  Description of Artificial Sequence: Synthetic oligonucleotide
  Antisense strand to SEQ ID NO: 244678
aucuuagcaaccaucugau

SEQ ID NO: 244680 - RNA, 19 nt, Artificial Sequence
  Description of Artificial Sequence: Synthetic oligonucleotide
  Sense strand starting at position 170 SEQ ID NO: 3148
cccgcaauuuaugucuaaa

SEQ ID NO: 244681 - RNA, 19 nt, Artificial Sequence
  Description of Artificial Sequence: Synthetic oligonucleotide
  Antisense strand to SEQ ID NO: 244680
uuuagacauaaauugcggg

SEQ ID NO: 244682 - RNA, 19 nt, Artificial Sequence
  Description of Artificial Sequence: Synthetic oligonucleotide
  Sense strand starting at position 267 SEQ ID NO: 3148
gacagauacugccuacuga

SEQ ID NO: 244683 - RNA, 19 nt, Artificial Sequence
  Description of Artificial Sequence: Synthetic oligonucleotide
  Antisense strand to SEQ ID NO: 244682
ucaguaggcaguaucuguc

SEQ ID NO: 244684 - RNA, 19 nt, Artificial Sequence
  Description of Artificial Sequence: Synthetic oligonucleotide
  Sense strand starting at position 268 SEQ ID NO: 3148
acagauacugccuacugau

SEQ ID NO: 244685 - RNA, 19 nt, Artificial Sequence
  Description of Artificial Sequence: Synthetic oligonucleotide
  Antisense strand to SEQ ID NO: 244684
aucaguaggcaguaucugu

SEQ ID NO: 244686 - RNA, 19 nt, Artificial Sequence
  Description of Artificial Sequence: Synthetic oligonucleotide
  Sense strand starting at position 344 SEQ ID NO: 3148
cagcuaucacucugggaca

SEQ ID NO: 244687 - RNA, 19 nt, Artificial Sequence
  Description of Artificial Sequence: Synthetic oligonucleotide
  Antisense strand to SEQ ID NO: 244686
ugucccagagugauagcug

SEQ ID NO: 244688 - RNA, 19 nt, Artificial Sequence
  Description of Artificial Sequence: Synthetic oligonucleotide
  Sense strand starting at position 427 SEQ ID NO: 3148
gggcuuccugaggacuuau

SEQ ID NO: 244689 - RNA, 19 nt, Artificial Sequence
  Description of Artificial Sequence: Synthetic oligonucleotide
  Antisense strand to SEQ ID NO: 244688
auaaguccucaggaagccc

SEQ ID NO: 244690 - RNA, 19 nt, Artificial Sequence
  Description of Artificial Sequence: Synthetic oligonucleotide
  Sense strand starting at position 653 SEQ ID NO: 3148
ucauuuaugugggacaaca

SEQ ID NO: 244691 - RNA, 19 nt, Artificial Sequence
  Description of Artificial Sequence: Synthetic oligonucleotide
  Antisense strand to SEQ ID NO: 244690
uguugucccacauaaauga

SEQ ID NO: 244692 - RNA, 19 nt, Artificial Sequence
  Description of Artificial Sequence: Synthetic oligonucleotide
  Sense strand starting at position 717 SEQ ID NO: 3148
ccaucuaaugucuaaguga

SEQ ID NO: 244693 - RNA, 19 nt, Artificial Sequence
  Description of Artificial Sequence: Synthetic oligonucleotide
  Antisense strand to SEQ ID NO: 244692
ucacuuagacauuagaugg

SEQ ID NO: 244694 - RNA, 19 nt, Artificial Sequence
  Description of Artificial Sequence: Synthetic oligonucleotide
  Sense strand starting at position 1225 SEQ ID NO: 3148
cugucucuggcagaaauaa

SEQ ID NO: 244695 - RNA, 19 nt, Artificial Sequence
  Description of Artificial Sequence: Synthetic oligonucleotide
  Antisense strand to SEQ ID NO: 244694
uuauuucugccagagacag

SEQ ID NO: 244696 - RNA, 19 nt, Artificial Sequence
  Description of Artificial Sequence: Synthetic oligonucleotide
  Sense strand starting at position 1521 SEQ ID NO: 3148
aguaccugccaucaaagau

SEQ ID NO: 244697 - RNA, 19 nt, Artificial Sequence
  Description of Artificial Sequence: Synthetic oligonucleotide
  Antisense strand to SEQ ID NO: 244696
aucuuugauggcagguacu

SEQ ID NO: 244698 - RNA, 19 nt, Artificial Sequence
  Description of Artificial Sequence: Synthetic oligonucleotide
  Sense strand starting at position 1536 SEQ ID NO: 3148
agauguuacaguuaaguuu

SEQ ID NO: 244699 - RNA, 19 nt, Artificial Sequence
  Description of Artificial Sequence: Synthetic oligonucleotide
  Antisense strand to SEQ ID NO: 244698
aaacuuaacuguaacaucu

SEQ ID NO: 244700 - RNA, 19 nt, Artificial Sequence
  Description of Artificial Sequence: Synthetic oligonucleotide
  Sense strand starting at position 1570 SEQ ID NO: 3148
uuuggcaaauaucuugaau

SEQ ID NO: 244701 - RNA, 19 nt, Artificial Sequence
  Description of Artificial Sequence: Synthetic oligonucleotide
  Antisense strand to SEQ ID NO: 244700
auucaagauauuugccaaa

SEQ ID NO: 244702 - RNA, 19 nt, Artificial Sequence
  Description of Artificial Sequence: Synthetic oligonucleotide
  Sense strand starting at position 1573 SEQ ID NO: 3148
ggcaaauaucuugaaucuc

SEQ ID NO: 244703 - RNA, 19 nt, Artificial Sequence
  Description of Artificial Sequence: Synthetic oligonucleotide
  Antisense strand to SEQ ID NO: 244702
gagauucaagauauuugcc

SEQ ID NO: 244704 - RNA, 19 nt, Artificial Sequence
  Description of Artificial Sequence: Synthetic oligonucleotide
  Sense strand starting at position 1666 SEQ ID NO: 3148
agugaagacuccguauaua

SEQ ID NO: 244705 - RNA, 19 nt, Artificial Sequence
  Description of Artificial Sequence: Synthetic oligonucleotide
  Antisense strand to SEQ ID NO: 244704
uauauacggagucuucacu

SEQ ID NO: 244706 - RNA, 19 nt, Artificial Sequence
  Description of Artificial Sequence: Synthetic oligonucleotide
  Sense strand starting at position 1675 SEQ ID NO: 3148
uccguauauauggagaugu

SEQ ID NO: 244707 - RNA, 19 nt, Artificial Sequence
  Description of Artificial Sequence: Synthetic oligonucleotide
  Antisense strand to SEQ ID NO: 244706
acaucuccauauauacgga

SEQ ID NO: 244708 - RNA, 19 nt, Artificial Sequence
  Description of Artificial Sequence: Synthetic oligonucleotide
  Sense strand starting at position 1677 SEQ ID NO: 3148
cguauauauggagauguaa

SEQ ID NO: 244709 - RNA, 19 nt, Artificial Sequence
  Description of Artificial Sequence: Synthetic oligonucleotide
  Antisense strand to SEQ ID NO: 244708
uuacaucuccauauauacg

SEQ ID NO: 244710 - RNA, 19 nt, Artificial Sequence
  Description of Artificial Sequence: Synthetic oligonucleotide
  Sense strand starting at position 2081 SEQ ID NO: 3148
uguaaaugaccauggacau

SEQ ID NO: 244711 - RNA, 19 nt, Artificial Sequence
  Description of Artificial Sequence: Synthetic oligonucleotide
  Antisense strand to SEQ ID NO: 244710
auguccauggucauuuaca

SEQ ID NO: 244712 - RNA, 19 nt, Artificial Sequence
  Description of Artificial Sequence: Synthetic oligonucleotide
  Sense strand starting at position 2082 SEQ ID NO: 3148
guaaaugaccauggacauu

SEQ ID NO: 244713 - RNA, 19 nt, Artificial Sequence
  Description of Artificial Sequence: Synthetic oligonucleotide
  Antisense strand to SEQ ID NO: 244712
aauguccauggucauuuac

SEQ ID NO: 244714 - RNA, 19 nt, Artificial Sequence
  Description of Artificial Sequence: Synthetic oligonucleotide
  Sense strand starting at position 2099 SEQ ID NO: 3148
uugugaaauggauggucau

SEQ ID NO: 244715 - RNA, 19 nt, Artificial Sequence
  Description of Artificial Sequence: Synthetic oligonucleotide
  Antisense strand to SEQ ID NO: 244714
augaccauccauuucacaa

SEQ ID NO: 244716 - RNA, 19 nt, Artificial Sequence
  Description of Artificial Sequence: Synthetic oligonucleotide
  Sense strand starting at position 2100 SEQ ID NO: 3148
ugugaaauggauggucaua

SEQ ID NO: 244717 - RNA, 19 nt, Artificial Sequence
  Description of Artificial Sequence: Synthetic oligonucleotide
  Antisense strand to SEQ ID NO: 244716
uaugaccauccauuucaca

SEQ ID NO: 244718 - RNA, 19 nt, Artificial Sequence
  Description of Artificial Sequence: Synthetic oligonucleotide
  Sense strand starting at position 2151 SEQ ID NO: 3148
uaggaagugcucugaagaa

SEQ ID NO: 244719 - RNA, 19 nt, Artificial Sequence
  Description of Artificial Sequence: Synthetic oligonucleotide
  Antisense strand to SEQ ID NO: 244718
uucuucagagcacuuccua

SEQ ID NO: 244720 - RNA, 19 nt, Artificial Sequence
  Description of Artificial Sequence: Synthetic oligonucleotide
  Sense strand starting at position 2226 SEQ ID NO: 3148
ggguuuaguugaaagagug

SEQ ID NO: 244721 - RNA, 19 nt, Artificial Sequence
  Description of Artificial Sequence: Synthetic oligonucleotide
  Antisense strand to SEQ ID NO: 244720
cacucuuucaacuaaaccc

SEQ ID NO: 244722 - RNA, 19 nt, Artificial Sequence
  Description of Artificial Sequence: Synthetic oligonucleotide
  Sense strand starting at position 2250 SEQ ID NO: 3148
gcugguuuccuuuacagga

SEQ ID NO: 244723 - RNA, 19 nt, Artificial Sequence
  Description of Artificial Sequence: Synthetic oligonucleotide
  Antisense strand to SEQ ID NO: 244722
uccuguaaaggaaaccagc

SEQ ID NO: 244724 - RNA, 19 nt, Artificial Sequence
  Description of Artificial Sequence: Synthetic oligonucleotide
  Sense strand starting at position 2350 SEQ ID NO: 3148
aagugugaccuuugagaua

SEQ ID NO: 244725 - RNA, 19 nt, Artificial Sequence
  Description of Artificial Sequence: Synthetic oligonucleotide
  Antisense strand to SEQ ID NO: 244724
uaucucaaaggucacacuu

SEQ ID NO: 244726 - RNA, 19 nt, Artificial Sequence
  Description of Artificial Sequence: Synthetic oligonucleotide
  Sense strand starting at position 2609 SEQ ID NO: 3148
agaccacaauaguuguaau

SEQ ID NO: 244727 - RNA, 19 nt, Artificial Sequence
  Description of Artificial Sequence: Synthetic oligonucleotide
  Antisense strand to SEQ ID NO: 244726
auuacaacuauuguggucu

SEQ ID NO: 244728 - RNA, 19 nt, Artificial Sequence
  Description of Artificial Sequence: Synthetic oligonucleotide
  Sense strand starting at position 2640 SEQ ID NO: 3148
gaaaccaucuuggugaagu

SEQ ID NO: 244729 - RNA, 19 nt, Artificial Sequence
  Description of Artificial Sequence: Synthetic oligonucleotide
  Antisense strand to SEQ ID NO: 244728
acuucaccaagaugguuuc

SEQ ID NO: 244730 - RNA, 19 nt, Artificial Sequence
  Description of Artificial Sequence: Synthetic oligonucleotide
  Sense strand starting at position 2663 SEQ ID NO: 3148
auaacauccuccgucaaga

SEQ ID NO: 244731 - RNA, 19 nt, Artificial Sequence
  Description of Artificial Sequence: Synthetic oligonucleotide
  Antisense strand to SEQ ID NO: 244730
ucuugacggaggauguuau

SEQ ID NO: 244732 - RNA, 19 nt, Artificial Sequence
  Description of Artificial Sequence: Synthetic oligonucleotide
  Sense strand starting at position 2665 SEQ ID NO: 3148
aacauccuccgucaagagu

SEQ ID NO: 244733 - RNA, 19 nt, Artificial Sequence
  Description of Artificial Sequence: Synthetic oligonucleotide
  Antisense strand to SEQ ID NO: 244732
acucuugacggaggauguu

SEQ ID NO: 244734 - RNA, 19 nt, Artificial Sequence
  Description of Artificial Sequence: Synthetic oligonucleotide
  Sense strand starting at position 2679 SEQ ID NO: 3148
agagucuaguauucuaaua

SEQ ID NO: 244735 - RNA, 19 nt, Artificial Sequence
  Description of Artificial Sequence: Synthetic oligonucleotide
  Antisense strand to SEQ ID NO: 244734
uauuagaauacuagacucu

SEQ ID NO: 244736 - RNA, 19 nt, Artificial Sequence
  Description of Artificial Sequence: Synthetic oligonucleotide
  Sense strand starting at position 2813 SEQ ID NO: 3148
aaguguuuaccugagguga

SEQ ID NO: 244737 - RNA, 19 nt, Artificial Sequence
  Description of Artificial Sequence: Synthetic oligonucleotide
  Antisense strand to SEQ ID NO: 244736
ucaccucagguaaacacuu

SEQ ID NO: 244738 - RNA, 19 nt, Artificial Sequence
  Description of Artificial Sequence: Synthetic oligonucleotide
  Sense strand starting at position 2902 SEQ ID NO: 3148
ucaugagucuaccuaggau

SEQ ID NO: 244739 - RNA, 19 nt, Artificial Sequence
  Description of Artificial Sequence: Synthetic oligonucleotide
  Antisense strand to SEQ ID NO: 244738
auccuagguagacucauga

SEQ ID NO: 244740 - RNA, 19 nt, Artificial Sequence
  Description of Artificial Sequence: Synthetic oligonucleotide
  Sense strand starting at position 3288 SEQ ID NO: 3148
ccagguaauuucuaagaaa

SEQ ID NO: 244741 - RNA, 19 nt, Artificial Sequence
  Description of Artificial Sequence: Synthetic oligonucleotide
  Antisense strand to SEQ ID NO: 244740
uuucuuagaaauuaccugg

SEQ ID NO: 244742 - RNA, 19 nt, Artificial Sequence
  Description of Artificial Sequence: Synthetic oligonucleotide
  Sense strand starting at position 3521 SEQ ID NO: 3148
gugccaaaccaucaugaga

SEQ ID NO: 244743 - RNA, 19 nt, Artificial Sequence
  Description of Artificial Sequence: Synthetic oligonucleotide
  Antisense strand to SEQ ID NO: 244742
ucucaugaugguuuggcac

SEQ ID NO: 244744 - RNA, 19 nt, Artificial Sequence
  Description of Artificial Sequence: Synthetic oligonucleotide
  Sense strand starting at position 3600 SEQ ID NO: 3148
aauuuaacgugagauuugu

SEQ ID NO: 244745 - RNA, 19 nt, Artificial Sequence
  Description of Artificial Sequence: Synthetic oligonucleotide
  Antisense strand to SEQ ID NO: 244744
acaaaucucacguuaaauu

SEQ ID NO: 244746 - RNA, 19 nt, Artificial Sequence
  Description of Artificial Sequence: Synthetic oligonucleotide
  Sense strand starting at position 3646 SEQ ID NO: 3148
gcuauuuaguugccuccua

SEQ ID NO: 244747 - RNA, 19 nt, Artificial Sequence
  Description of Artificial Sequence: Synthetic oligonucleotide
  Antisense strand to SEQ ID NO: 244746
uaggaggcaacuaaauagc

SEQ ID NO: 244748 - RNA, 19 nt, Artificial Sequence
  Description of Artificial Sequence: Synthetic oligonucleotide
  Sense strand starting at position 3681 SEQ ID NO: 3148
uuuaauagaguuugaacag

SEQ ID NO: 244749 - RNA, 19 nt, Artificial Sequence
  Description of Artificial Sequence: Synthetic oligonucleotide
  Antisense strand to SEQ ID NO: 244748
cuguucaaacucuauuaaa

SEQ ID NO: 244750 - RNA, 19 nt, Artificial Sequence
  Description of Artificial Sequence: Synthetic oligonucleotide
  Sense strand starting at position 3687 SEQ ID NO: 3148
agaguuugaacagggcuua

SEQ ID NO: 244751 - RNA, 19 nt, Artificial Sequence
  Description of Artificial Sequence: Synthetic oligonucleotide
  Antisense strand to SEQ ID NO: 244750
uaagcccuguucaaacucu

SEQ ID NO: 244752 - RNA, 19 nt, Artificial Sequence
  Description of Artificial Sequence: Synthetic oligonucleotide
  Sense strand starting at position 3716 SEQ ID NO: 3148
aaagucuugcuguagacau

SEQ ID NO: 244753 - RNA, 19 nt, Artificial Sequence
  Description of Artificial Sequence: Synthetic oligonucleotide
  Antisense strand to SEQ ID NO: 244752
augucuacagcaagacuuu

SEQ ID NO: 244754 - RNA, 19 nt, Artificial Sequence
  Description of Artificial Sequence: Synthetic oligonucleotide
  Sense strand starting at position 138 SEQ ID NO: 3149
guaaucucaguuuaacaug

SEQ ID NO: 244755 - RNA, 19 nt, Artificial Sequence
  Description of Artificial Sequence: Synthetic oligonucleotide
  Antisense strand to SEQ ID NO: 244754
cauguuaaacugagauuac

SEQ ID NO: 244756 - RNA, 19 nt, Artificial Sequence
  Description of Artificial Sequence: Synthetic oligonucleotide
  Sense strand starting at position 321 SEQ ID NO: 3149
auuccuuaccuguaacagu

SEQ ID NO: 244757 - RNA, 19 nt, Artificial Sequence
  Description of Artificial Sequence: Synthetic oligonucleotide
  Antisense strand to SEQ ID NO: 244756
acuguuacagguaaggaau

SEQ ID NO: 244758 - RNA, 19 nt, Artificial Sequence
  Description of Artificial Sequence: Synthetic oligonucleotide
  Sense strand starting at position 376 SEQ ID NO: 3149
ucuugacuucugcaacaga

SEQ ID NO: 244759 - RNA, 19 nt, Artificial Sequence
  Description of Artificial Sequence: Synthetic oligonucleotide
  Antisense strand to SEQ ID NO: 244758
ucuguugcagaagucaaga

SEQ ID NO: 244760 - RNA, 19 nt, Artificial Sequence
  Description of Artificial Sequence: Synthetic oligonucleotide
  Sense strand starting at position 482 SEQ ID NO: 3149
uugaaugacuuaguccaca

SEQ ID NO: 244761 - RNA, 19 nt, Artificial Sequence
  Description of Artificial Sequence: Synthetic oligonucleotide
  Antisense strand to SEQ ID NO: 244760
uguggacuaagucauucaa

SEQ ID NO: 244762 - RNA, 19 nt, Artificial Sequence
  Description of Artificial Sequence: Synthetic oligonucleotide
  Sense strand starting at position 549 SEQ ID NO: 3149
accugucuccuuuauuaga

SEQ ID NO: 244763 - RNA, 19 nt, Artificial Sequence
  Description of Artificial Sequence: Synthetic oligonucleotide
  Antisense strand to SEQ ID NO: 244762
ucuaauaaaggagacaggu

SEQ ID NO: 244764 - RNA, 19 nt, Artificial Sequence
  Description of Artificial Sequence: Synthetic oligonucleotide
  Sense strand starting at position 701 SEQ ID NO: 3149
gccuuacacagagguaaga

SEQ ID NO: 244765 - RNA, 19 nt, Artificial Sequence
  Description of Artificial Sequence: Synthetic oligonucleotide
  Antisense strand to SEQ ID NO: 244764
ucuuaccucuguguaaggc

SEQ ID NO: 244766 - RNA, 19 nt, Artificial Sequence
  Description of Artificial Sequence: Synthetic oligonucleotide
  Sense strand starting at position 722 SEQ ID NO: 3149
gagacagaguuggaaauuu

SEQ ID NO: 244767 - RNA, 19 nt, Artificial Sequence
  Description of Artificial Sequence: Synthetic oligonucleotide
  Antisense strand to SEQ ID NO: 244766
aaauuuccaacucugucuc

SEQ ID NO: 244768 - RNA, 19 nt, Artificial Sequence
  Description of Artificial Sequence: Synthetic oligonucleotide
  Sense strand starting at position 767 SEQ ID NO: 3149
aguagagauucccucccau

SEQ ID NO: 244769 - RNA, 19 nt, Artificial Sequence
  Description of Artificial Sequence: Synthetic oligonucleotide
  Antisense strand to SEQ ID NO: 244768
augggagggaaucucuacu

SEQ ID NO: 244770 - RNA, 19 nt, Artificial Sequence
  Description of Artificial Sequence: Synthetic oligonucleotide
  Sense strand starting at position 888 SEQ ID NO: 3149
ucugaaaucugacuguaau

SEQ ID NO: 244771 - RNA, 19 nt, Artificial Sequence
  Description of Artificial Sequence: Synthetic oligonucleotide
  Antisense strand to SEQ ID NO: 244770
auuacagucagauuucaga

SEQ ID NO: 244772 - RNA, 19 nt, Artificial Sequence
  Description of Artificial Sequence: Synthetic oligonucleotide
  Sense strand starting at position 1016 SEQ ID NO: 3149
auacuuuaauagccagaga

SEQ ID NO: 244773 - RNA, 19 nt, Artificial Sequence
  Description of Artificial Sequence: Synthetic oligonucleotide
  Antisense strand to SEQ ID NO: 244772
ucucuggcuauuaaaguau

SEQ ID NO: 244774 - RNA, 19 nt, Artificial Sequence
  Description of Artificial Sequence: Synthetic oligonucleotide
  Sense strand starting at position 1019 SEQ ID NO: 3149
cuuuaauagccagagaugu

SEQ ID NO: 244775 - RNA, 19 nt, Artificial Sequence
  Description of Artificial Sequence: Synthetic oligonucleotide
  Antisense strand to SEQ ID NO: 244774
acaucucuggcuauuaaag

SEQ ID NO: 244776 - RNA, 19 nt, Artificial Sequence
  Description of Artificial Sequence: Synthetic oligonucleotide
  Sense strand starting at position 1040 SEQ ID NO: 3149
ggacaauaccuuugcugac

SEQ ID NO: 244777 - RNA, 19 nt, Artificial Sequence
  Description of Artificial Sequence: Synthetic oligonucleotide
  Antisense strand to SEQ ID NO: 244776
gucagcaaagguauugucc

SEQ ID NO: 244778 - RNA, 19 nt, Artificial Sequence
  Description of Artificial Sequence: Synthetic oligonucleotide
  Sense strand starting at position 1256 SEQ ID NO: 3149
gauggcauagcugauauua

SEQ ID NO: 244779 - RNA, 19 nt, Artificial Sequence
  Description of Artificial Sequence: Synthetic oligonucleotide
  Antisense strand to SEQ ID NO: 244778
uaauaucagcuaugccauc

SEQ ID NO: 244780 - RNA, 19 nt, Artificial Sequence
  Description of Artificial Sequence: Synthetic oligonucleotide
  Sense strand starting at position 1284 SEQ ID NO: 3149
gcagauauuccagaaguua

SEQ ID NO: 244781 - RNA, 19 nt, Artificial Sequence
  Description of Artificial Sequence: Synthetic oligonucleotide
  Antisense strand to SEQ ID NO: 244780
uaacuucuggaauaucugc

SEQ ID NO: 244782 - RNA, 19 nt, Artificial Sequence
  Description of Artificial Sequence: Synthetic oligonucleotide
  Sense strand starting at position 1344 SEQ ID NO: 3149
acaaacauguagucuuaga

SEQ ID NO: 244783 - RNA, 19 nt, Artificial Sequence
  Description of Artificial Sequence: Synthetic oligonucleotide
  Antisense strand to SEQ ID NO: 244782
ucuaagacuacauguuugu

SEQ ID NO: 244784 - RNA, 19 nt, Artificial Sequence
  Description of Artificial Sequence: Synthetic oligonucleotide
  Sense strand starting at position 1432 SEQ ID NO: 3149
gggcuagauuuggagagga

SEQ ID NO: 244785 - RNA, 19 nt, Artificial Sequence
  Description of Artificial Sequence: Synthetic oligonucleotide
  Antisense strand to SEQ ID NO: 244784
uccucuccaaaucuagccc

SEQ ID NO: 244786 - RNA, 19 nt, Artificial Sequence
  Description of Artificial Sequence: Synthetic oligonucleotide
  Sense strand starting at position 1487 SEQ ID NO: 3149
uuguguucuggcugaauuu

SEQ ID NO: 244787 - RNA, 19 nt, Artificial Sequence
  Description of Artificial Sequence: Synthetic oligonucleotide
  Antisense strand to SEQ ID NO: 244786
aaauucagccagaacacaa

SEQ ID NO: 244788 - RNA, 19 nt, Artificial Sequence
  Description of Artificial Sequence: Synthetic oligonucleotide
  Sense strand starting at position 1519 SEQ ID NO: 3149
cagggugaauuggcagaau

SEQ ID NO: 244789 - RNA, 19 nt, Artificial Sequence
  Description of Artificial Sequence: Synthetic oligonucleotide
  Antisense strand to SEQ ID NO: 244788
auucugccaauucacccug

SEQ ID NO: 244790 - RNA, 19 nt, Artificial Sequence
  Description of Artificial Sequence: Synthetic oligonucleotide
  Sense strand starting at position 1590 SEQ ID NO: 3149
agggaaguuugcuugauua

SEQ ID NO: 244791 - RNA, 19 nt, Artificial Sequence
  Description of Artificial Sequence: Synthetic oligonucleotide
  Antisense strand to SEQ ID NO: 244790
uaaucaagcaaacuucccu

SEQ ID NO: 244792 - RNA, 19 nt, Artificial Sequence
  Description of Artificial Sequence: Synthetic oligonucleotide
  Sense strand starting at position 1592 SEQ ID NO: 3149
ggaaguuugcuugauuaag

SEQ ID NO: 244793 - RNA, 19 nt, Artificial Sequence
  Description of Artificial Sequence: Synthetic oligonucleotide
  Antisense strand to SEQ ID NO: 244792
cuuaaucaagcaaacuucc

SEQ ID NO: 244794 - RNA, 19 nt, Artificial Sequence
  Description of Artificial Sequence: Synthetic oligonucleotide
  Sense strand starting at position 1609 SEQ ID NO: 3149
aggcauaaaucaccucaga

SEQ ID NO: 244795 - RNA, 19 nt, Artificial Sequence
  Description of Artificial Sequence: Synthetic oligonucleotide
  Antisense strand to SEQ ID NO: 244794
ucugaggugauuuaugccu

SEQ ID NO: 244796 - RNA, 19 nt, Artificial Sequence
  Description of Artificial Sequence: Synthetic oligonucleotide
  Sense strand starting at position 1667 SEQ ID NO: 3149
agagaacagugguauuuga

SEQ ID NO: 244797 - RNA, 19 nt, Artificial Sequence
  Description of Artificial Sequence: Synthetic oligonucleotide
  Antisense strand to SEQ ID NO: 244796
ucaaauaccacuguucucu

SEQ ID NO: 244798 - RNA, 19 nt, Artificial Sequence
  Description of Artificial Sequence: Synthetic oligonucleotide
  Sense strand starting at position 1825 SEQ ID NO: 3149
ccuggucuucuguaggaua

SEQ ID NO: 244799 - RNA, 19 nt, Artificial Sequence
  Description of Artificial Sequence: Synthetic oligonucleotide
  Antisense strand to SEQ ID NO: 244798
uauccuacagaagaccagg

SEQ ID NO: 244800 - RNA, 19 nt, Artificial Sequence
  Description of Artificial Sequence: Synthetic oligonucleotide
  Sense strand starting at position 1854 SEQ ID NO: 3149
gugucuucuguagaagaag

SEQ ID NO: 244801 - RNA, 19 nt, Artificial Sequence
  Description of Artificial Sequence: Synthetic oligonucleotide
  Antisense strand to SEQ ID NO: 244800
cuucuucuacagaagacac

SEQ ID NO: 244802 - RNA, 19 nt, Artificial Sequence
  Description of Artificial Sequence: Synthetic oligonucleotide
  Sense strand starting at position 2067 SEQ ID NO: 3149
accagacucuuagcaaaug

SEQ ID NO: 244803 - RNA, 19 nt, Artificial Sequence
  Description of Artificial Sequence: Synthetic oligonucleotide
  Antisense strand to SEQ ID NO: 244802
cauuugcuaagagucuggu

SEQ ID NO: 244804 - RNA, 19 nt, Artificial Sequence
  Description of Artificial Sequence: Synthetic oligonucleotide
  Sense strand starting at position 2105 SEQ ID NO: 3149
uggaguuuaagccauguau

SEQ ID NO: 244805 - RNA, 19 nt, Artificial Sequence
  Description of Artificial Sequence: Synthetic oligonucleotide
  Antisense strand to SEQ ID NO: 244804
auacauggcuuaaacucca

SEQ ID NO: 244806 - RNA, 19 nt, Artificial Sequence
  Description of Artificial Sequence: Synthetic oligonucleotide
  Sense strand starting at position 2136 SEQ ID NO: 3149
ggaaaugaacuagguguga

SEQ ID NO: 244807 - RNA, 19 nt, Artificial Sequence
  Description of Artificial Sequence: Synthetic oligonucleotide
  Antisense strand to SEQ ID NO: 244806
ucacaccuaguucauuucc

SEQ ID NO: 244808 - RNA, 19 nt, Artificial Sequence
  Description of Artificial Sequence: Synthetic oligonucleotide
  Sense strand starting at position 2302 SEQ ID NO: 3149
gcagcuugugugaguugga

SEQ ID NO: 244809 - RNA, 19 nt, Artificial Sequence
  Description of Artificial Sequence: Synthetic oligonucleotide
  Antisense strand to SEQ ID NO: 244808
uccaacucacacaagcugc

SEQ ID NO: 244810 - RNA, 19 nt, Artificial Sequence
  Description of Artificial Sequence: Synthetic oligonucleotide
  Sense strand starting at position 2309 SEQ ID NO: 3149
gugugaguuggauaaagua

SEQ ID NO: 244811 - RNA, 19 nt, Artificial Sequence
  Description of Artificial Sequence: Synthetic oligonucleotide
  Antisense strand to SEQ ID NO: 244810
uacuuuauccaacucacac

SEQ ID NO: 244812 - RNA, 19 nt, Artificial Sequence
  Description of Artificial Sequence: Synthetic oligonucleotide
  Sense strand starting at position 2783 SEQ ID NO: 3149
cuguauagucaucauuaua

SEQ ID NO: 244813 - RNA, 19 nt, Artificial Sequence
  Description of Artificial Sequence: Synthetic oligonucleotide
  Antisense strand to SEQ ID NO: 244812
uauaaugaugacuauacag

SEQ ID NO: 244814 - RNA, 19 nt, Artificial Sequence
  Description of Artificial Sequence: Synthetic oligonucleotide
  Sense strand starting at position 2937 SEQ ID NO: 3149
ucucuuugguaauccagga

SEQ ID NO: 244815 - RNA, 19 nt, Artificial Sequence
  Description of Artificial Sequence: Synthetic oligonucleotide
  Antisense strand to SEQ ID NO: 244814
uccuggauuaccaaagaga

SEQ ID NO: 244816 - RNA, 19 nt, Artificial Sequence
  Description of Artificial Sequence: Synthetic oligonucleotide
  Sense strand starting at position 3076 SEQ ID NO: 3149
cagcuaacuuggguuagaa

SEQ ID NO: 244817 - RNA, 19 nt, Artificial Sequence
  Description of Artificial Sequence: Synthetic oligonucleotide
  Antisense strand to SEQ ID NO: 244816
uucuaacccaaguuagcug

SEQ ID NO: 244818 - RNA, 19 nt, Artificial Sequence
  Description of Artificial Sequence: Synthetic oligonucleotide
  Sense strand starting at position 3078 SEQ ID NO: 3149
gcuaacuuggguuagaaua

SEQ ID NO: 244819 - RNA, 19 nt, Artificial Sequence
  Description of Artificial Sequence: Synthetic oligonucleotide
  Antisense strand to SEQ ID NO: 244818
uauucuaacccaaguuagc

SEQ ID NO: 244820 - RNA, 19 nt, Artificial Sequence
  Description of Artificial Sequence: Synthetic oligonucleotide
  Sense strand starting at position 3514 SEQ ID NO: 3149
ucagauaugcaaggugaga

SEQ ID NO: 244821 - RNA, 19 nt, Artificial Sequence
  Description of Artificial Sequence: Synthetic oligonucleotide
  Antisense strand to SEQ ID NO: 244820
ucucaccuugcauaucuga

SEQ ID NO: 244822 - RNA, 19 nt, Artificial Sequence
  Description of Artificial Sequence: Synthetic oligonucleotide
  Sense strand starting at position 3586 SEQ ID NO: 3149
uccaaagaaucacugugau

SEQ ID NO: 244823 - RNA, 19 nt, Artificial Sequence
  Description of Artificial Sequence: Synthetic oligonucleotide
  Antisense strand to SEQ ID NO: 244822
aucacagugauucuuugga

SEQ ID NO: 244824 - RNA, 19 nt, Artificial Sequence
  Description of Artificial Sequence: Synthetic oligonucleotide
  Sense strand starting at position 3598 SEQ ID NO: 3149
cugugaugcguuucaugug

SEQ ID NO: 244825 - RNA, 19 nt, Artificial Sequence
  Description of Artificial Sequence: Synthetic oligonucleotide
  Antisense strand to SEQ ID NO: 244824
cacaugaaacgcaucacag

SEQ ID NO: 244826 - RNA, 19 nt, Artificial Sequence
  Description of Artificial Sequence: Synthetic oligonucleotide
  Sense strand starting at position 3667 SEQ ID NO: 3149
cuacaagaauuagcugaua

SEQ ID NO: 244827 - RNA, 19 nt, Artificial Sequence
  Description of Artificial Sequence: Synthetic oligonucleotide
  Antisense strand to SEQ ID NO: 244826
uaucagcuaauucuuguag

SEQ ID NO: 244828 - RNA, 19 nt, Artificial Sequence
  Description of Artificial Sequence: Synthetic oligonucleotide
  Sense strand starting at position 3749 SEQ ID NO: 3149
ugaugaaaccagugcuuga

SEQ ID NO: 244829 - RNA, 19 nt, Artificial Sequence
  Description of Artificial Sequence: Synthetic oligonucleotide
  Antisense strand to SEQ ID NO: 244828
ucaagcacugguuucauca

SEQ ID NO: 244830 - RNA, 19 nt, Artificial Sequence
  Description of Artificial Sequence: Synthetic oligonucleotide
  Sense strand starting at position 3860 SEQ ID NO: 3149
uaaagaucauccuuagggu

SEQ ID NO: 244831 - RNA, 19 nt, Artificial Sequence
  Description of Artificial Sequence: Synthetic oligonucleotide
  Antisense strand to SEQ ID NO: 244830
acccuaaggaugaucuuua

SEQ ID NO: 244832 - RNA, 19 nt, Artificial Sequence
  Description of Artificial Sequence: Synthetic oligonucleotide
  Sense strand starting at position 3910 SEQ ID NO: 3149
acucuaggauccuuguuaa

SEQ ID NO: 244833 - RNA, 19 nt, Artificial Sequence
  Description of Artificial Sequence: Synthetic oligonucleotide
  Antisense strand to SEQ ID NO: 244832
uuaacaaggauccuagagu

SEQ ID NO: 244834 - RNA, 19 nt, Artificial Sequence
  Description of Artificial Sequence: Synthetic oligonucleotide
  Sense strand starting at position 59 SEQ ID NO: 3150
gcuacugagcaucauauaa

SEQ ID NO: 244835 - RNA, 19 nt, Artificial Sequence
  Description of Artificial Sequence: Synthetic oligonucleotide
  Antisense strand to SEQ ID NO: 244834
uuauaugaugcucaguagc

SEQ ID NO: 244836 - RNA, 19 nt, Artificial Sequence
  Description of Artificial Sequence: Synthetic oligonucleotide
  Sense strand starting at position 94 SEQ ID NO: 3150
ggaauauaacauggcucuu

SEQ ID NO: 244837 - RNA, 19 nt, Artificial Sequence
  Description of Artificial Sequence: Synthetic oligonucleotide
  Antisense strand to SEQ ID NO: 244836
aagagccauguuauauucc

SEQ ID NO: 244838 - RNA, 19 nt, Artificial Sequence
  Description of Artificial Sequence: Synthetic oligonucleotide
  Sense strand starting at position 266 SEQ ID NO: 3150
augacuugucaaggucaaa

SEQ ID NO: 244839 - RNA, 19 nt, Artificial Sequence
  Description of Artificial Sequence: Synthetic oligonucleotide
  Antisense strand to SEQ ID NO: 244838
uuugaccuugacaagucau

SEQ ID NO: 244840 - RNA, 19 nt, Artificial Sequence
  Description of Artificial Sequence: Synthetic oligonucleotide
  Sense strand starting at position 409 SEQ ID NO: 3150
guuaguucucaagaucauc

SEQ ID NO: 244841 - RNA, 19 nt, Artificial Sequence
  Description of Artificial Sequence: Synthetic oligonucleotide
  Antisense strand to SEQ ID NO: 244840
gaugaucuugagaacuaac

SEQ ID NO: 244842 - RNA, 19 nt, Artificial Sequence
  Description of Artificial Sequence: Synthetic oligonucleotide
  Sense strand starting at position 445 SEQ ID NO: 3150
aacucaagugauuggcaua

SEQ ID NO: 244843 - RNA, 19 nt, Artificial Sequence
  Description of Artificial Sequence: Synthetic oligonucleotide
  Antisense strand to SEQ ID NO: 244842
uaugccaaucacuugaguu

SEQ ID NO: 244844 - RNA, 19 nt, Artificial Sequence
  Description of Artificial Sequence: Synthetic oligonucleotide
  Sense strand starting at position 516 SEQ ID NO: 3150
gucuuccuacuaugaaaug

SEQ ID NO: 244845 - RNA, 19 nt, Artificial Sequence
  Description of Artificial Sequence: Synthetic oligonucleotide
  Antisense strand to SEQ ID NO: 244844
cauuucauaguaggaagac

SEQ ID NO: 244846 - RNA, 19 nt, Artificial Sequence
  Description of Artificial Sequence: Synthetic oligonucleotide
  Sense strand starting at position 599 SEQ ID NO: 3150
agugacuguggugauauga

SEQ ID NO: 244847 - RNA, 19 nt, Artificial Sequence
  Description of Artificial Sequence: Synthetic oligonucleotide
  Antisense strand to SEQ ID NO: 244846
ucauaucaccacagucacu

SEQ ID NO: 244848 - RNA, 19 nt, Artificial Sequence
  Description of Artificial Sequence: Synthetic oligonucleotide
  Sense strand starting at position 609 SEQ ID NO: 3150
gugauaugaugaccaagug

SEQ ID NO: 244849 - RNA, 19 nt, Artificial Sequence
  Description of Artificial Sequence: Synthetic oligonucleotide
  Antisense strand to SEQ ID NO: 244848
cacuuggucaucauaucac

SEQ ID NO: 244850 - RNA, 19 nt, Artificial Sequence
  Description of Artificial Sequence: Synthetic oligonucleotide
  Sense strand starting at position 655 SEQ ID NO: 3150
gucucacuggaagagguua

SEQ ID NO: 244851 - RNA, 19 nt, Artificial Sequence
  Description of Artificial Sequence: Synthetic oligonucleotide
  Antisense strand to SEQ ID NO: 244850
uaaccucuuccagugagac

SEQ ID NO: 244852 - RNA, 19 nt, Artificial Sequence
  Description of Artificial Sequence: Synthetic oligonucleotide
  Sense strand starting at position 668 SEQ ID NO: 3150
agguuaaagucuuucuaaa

SEQ ID NO: 244853 - RNA, 19 nt, Artificial Sequence
  Description of Artificial Sequence: Synthetic oligonucleotide
  Antisense strand to SEQ ID NO: 244852
uuuagaaagacuuuaaccu

SEQ ID NO: 244854 - RNA, 19 nt, Artificial Sequence
  Description of Artificial Sequence: Synthetic oligonucleotide
  Sense strand starting at position 1233 SEQ ID NO: 3150
gcuggagggacuuguaaug

SEQ ID NO: 244855 - RNA, 19 nt, Artificial Sequence
  Description of Artificial Sequence: Synthetic oligonucleotide
  Antisense strand to SEQ ID NO: 244854
cauuacaagucccuccagc

SEQ ID NO: 244856 - RNA, 19 nt, Artificial Sequence
  Description of Artificial Sequence: Synthetic oligonucleotide
  Sense strand starting at position 1240 SEQ ID NO: 3150
ggacuuguaaugggaaagu

SEQ ID NO: 244857 - RNA, 19 nt, Artificial Sequence
  Description of Artificial Sequence: Synthetic oligonucleotide
  Antisense strand to SEQ ID NO: 244856
acuuucccauuacaagucc

SEQ ID NO: 244858 - RNA, 19 nt, Artificial Sequence
  Description of Artificial Sequence: Synthetic oligonucleotide
  Sense strand starting at position 1249 SEQ ID NO: 3150
augggaaaguagucuuuaa

SEQ ID NO: 244859 - RNA, 19 nt, Artificial Sequence
  Description of Artificial Sequence: Synthetic oligonucleotide
  Antisense strand to SEQ ID NO: 244858
uuaaagacuacuuucccau

SEQ ID NO: 244860 - RNA, 19 nt, Artificial Sequence
  Description of Artificial Sequence: Synthetic oligonucleotide
  Sense strand starting at position 1362 SEQ ID NO: 3150
aggagaccugcucauguua

SEQ ID NO: 244861 - RNA, 19 nt, Artificial Sequence
  Description of Artificial Sequence: Synthetic oligonucleotide
  Antisense strand to SEQ ID NO: 244860
uaacaugagcaggucuccu

SEQ ID NO: 244862 - RNA, 19 nt, Artificial Sequence
  Description of Artificial Sequence: Synthetic oligonucleotide
  Sense strand starting at position 1542 SEQ ID NO: 3150
auggcagucaugcaaagaa

SEQ ID NO: 244863 - RNA, 19 nt, Artificial Sequence
  Description of Artificial Sequence: Synthetic oligonucleotide
  Antisense strand to SEQ ID NO: 244862
uucuuugcaugacugccau

SEQ ID NO: 244864 - RNA, 19 nt, Artificial Sequence
  Description of Artificial Sequence: Synthetic oligonucleotide
  Sense strand starting at position 1560 SEQ ID NO: 3150
aaugaucucugaguaaaug

SEQ ID NO: 244865 - RNA, 19 nt, Artificial Sequence
  Description of Artificial Sequence: Synthetic oligonucleotide
  Antisense strand to SEQ ID NO: 244864
cauuuacucagagaucauu

SEQ ID NO: 244866 - RNA, 19 nt, Artificial Sequence
  Description of Artificial Sequence: Synthetic oligonucleotide
  Sense strand starting at position 1599 SEQ ID NO: 3150
guccuuugggucuagagaa

SEQ ID NO: 244867 - RNA, 19 nt, Artificial Sequence
  Description of Artificial Sequence: Synthetic oligonucleotide
  Antisense strand to SEQ ID NO: 244866
uucucuagacccaaaggac

SEQ ID NO: 244868 - RNA, 19 nt, Artificial Sequence
  Description of Artificial Sequence: Synthetic oligonucleotide
  Sense strand starting at position 1709 SEQ ID NO: 3150
uuagauaagcaguauccau

SEQ ID NO: 244869 - RNA, 19 nt, Artificial Sequence
  Description of Artificial Sequence: Synthetic oligonucleotide
  Antisense strand to SEQ ID NO: 244868
auggauacugcuuaucuaa

SEQ ID NO: 244870 - RNA, 19 nt, Artificial Sequence
  Description of Artificial Sequence: Synthetic oligonucleotide
  Sense strand starting at position 1881 SEQ ID NO: 3150
cagagagacucccuuagca

SEQ ID NO: 244871 - RNA, 19 nt, Artificial Sequence
  Description of Artificial Sequence: Synthetic oligonucleotide
  Antisense strand to SEQ ID NO: 244870
ugcuaagggagucucucug

SEQ ID NO: 244872 - RNA, 19 nt, Artificial Sequence
  Description of Artificial Sequence: Synthetic oligonucleotide
  Sense strand starting at position 1921 SEQ ID NO: 3150
agucauacuugagcaauga

SEQ ID NO: 244873 - RNA, 19 nt, Artificial Sequence
  Description of Artificial Sequence: Synthetic oligonucleotide
  Antisense strand to SEQ ID NO: 244872
ucauugcucaaguaugacu

SEQ ID NO: 244874 - RNA, 19 nt, Artificial Sequence
  Description of Artificial Sequence: Synthetic oligonucleotide
  Sense strand starting at position 1922 SEQ ID NO: 3150
gucauacuugagcaaugaa

SEQ ID NO: 244875 - RNA, 19 nt, Artificial Sequence
  Description of Artificial Sequence: Synthetic oligonucleotide
  Antisense strand to SEQ ID NO: 244874
uucauugcucaaguaugac

SEQ ID NO: 244876 - RNA, 19 nt, Artificial Sequence
  Description of Artificial Sequence: Synthetic oligonucleotide
  Sense strand starting at position 1925 SEQ ID NO: 3150
auacuugagcaaugaagau

SEQ ID NO: 244877 - RNA, 19 nt, Artificial Sequence
  Description of Artificial Sequence: Synthetic oligonucleotide
  Antisense strand to SEQ ID NO: 244876
aucuucauugcucaaguau

SEQ ID NO: 244878 - RNA, 19 nt, Artificial Sequence
  Description of Artificial Sequence: Synthetic oligonucleotide
  Sense strand starting at position 1974 SEQ ID NO: 3150
gugccuugugccucgaaga

SEQ ID NO: 244879 - RNA, 19 nt, Artificial Sequence
  Description of Artificial Sequence: Synthetic oligonucleotide
  Antisense strand to SEQ ID NO: 244878
ucuucgaggcacaaggcac

SEQ ID NO: 244880 - RNA, 19 nt, Artificial Sequence
  Description of Artificial Sequence: Synthetic oligonucleotide
  Sense strand starting at position 2114 SEQ ID NO: 3150
agaguauugguggaagcuu

SEQ ID NO: 244881 - RNA, 19 nt, Artificial Sequence
  Description of Artificial Sequence: Synthetic oligonucleotide
  Antisense strand to SEQ ID NO: 244880
aagcuuccaccaauacucu

SEQ ID NO: 244882 - RNA, 19 nt, Artificial Sequence
  Description of Artificial Sequence: Synthetic oligonucleotide
  Sense strand starting at position 2155 SEQ ID NO: 3150
cugagauaauucucugguu

SEQ ID NO: 244883 - RNA, 19 nt, Artificial Sequence
  Description of Artificial Sequence: Synthetic oligonucleotide
  Antisense strand to SEQ ID NO: 244882
aaccagagaauuaucucag

SEQ ID NO: 244884 - RNA, 19 nt, Artificial Sequence
  Description of Artificial Sequence: Synthetic oligonucleotide
  Sense strand starting at position 2156 SEQ ID NO: 3150
ugagauaauucucugguuc

SEQ ID NO: 244885 - RNA, 19 nt, Artificial Sequence
  Description of Artificial Sequence: Synthetic oligonucleotide
  Antisense strand to SEQ ID NO: 244884
gaaccagagaauuaucuca

SEQ ID NO: 244886 - RNA, 19 nt, Artificial Sequence
  Description of Artificial Sequence: Synthetic oligonucleotide
  Sense strand starting at position 2263 SEQ ID NO: 3150
aguugauguccacauuaaa

SEQ ID NO: 244887 - RNA, 19 nt, Artificial Sequence
  Description of Artificial Sequence: Synthetic oligonucleotide
  Antisense strand to SEQ ID NO: 244886
uuuaauguggacaucaacu

SEQ ID NO: 244888 - RNA, 19 nt, Artificial Sequence
  Description of Artificial Sequence: Synthetic oligonucleotide
  Sense strand starting at position 2297 SEQ ID NO: 3150
acguuagaagaauguuuaa

SEQ ID NO: 244889 - RNA, 19 nt, Artificial Sequence
  Description of Artificial Sequence: Synthetic oligonucleotide
  Antisense strand to SEQ ID NO: 244888
uuaaacauucuucuaacgu

SEQ ID NO: 244890 - RNA, 19 nt, Artificial Sequence
  Description of Artificial Sequence: Synthetic oligonucleotide
  Sense strand starting at position 2318 SEQ ID NO: 3150
uuaguauaugugggacaaa

SEQ ID NO: 244891 - RNA, 19 nt, Artificial Sequence
  Description of Artificial Sequence: Synthetic oligonucleotide
  Antisense strand to SEQ ID NO: 244890
uuugucccacauauacuaa

SEQ ID NO: 244892 - RNA, 19 nt, Artificial Sequence
  Description of Artificial Sequence: Synthetic oligonucleotide
  Sense strand starting at position 2389 SEQ ID NO: 3150
uguacuuaaguuuaggaau

SEQ ID NO: 244893 - RNA, 19 nt, Artificial Sequence
  Description of Artificial Sequence: Synthetic oligonucleotide
  Antisense strand to SEQ ID NO: 244892
auuccuaaacuuaaguaca

SEQ ID NO: 244894 - RNA, 19 nt, Artificial Sequence
  Description of Artificial Sequence: Synthetic oligonucleotide
  Sense strand starting at position 2670 SEQ ID NO: 3150
agccaaucucauggaugaa

SEQ ID NO: 244895 - RNA, 19 nt, Artificial Sequence
  Description of Artificial Sequence: Synthetic oligonucleotide
  Antisense strand to SEQ ID NO: 244894
uucauccaugagauuggcu

SEQ ID NO: 244896 - RNA, 19 nt, Artificial Sequence
  Description of Artificial Sequence: Synthetic oligonucleotide
  Sense strand starting at position 2747 SEQ ID NO: 3150
ggaauauuguuucuguaag

SEQ ID NO: 244897 - RNA, 19 nt, Artificial Sequence
  Description of Artificial Sequence: Synthetic oligonucleotide
  Antisense strand to SEQ ID NO: 244896
cuuacagaaacaauauucc

SEQ ID NO: 244898 - RNA, 19 nt, Artificial Sequence
  Description of Artificial Sequence: Synthetic oligonucleotide
  Sense strand starting at position 2777 SEQ ID NO: 3150
gagacucuaucucuuggua

SEQ ID NO: 244899 - RNA, 19 nt, Artificial Sequence
  Description of Artificial Sequence: Synthetic oligonucleotide
  Antisense strand to SEQ ID NO: 244898
uaccaagagauagagucuc

SEQ ID NO: 244900 - RNA, 19 nt, Artificial Sequence
  Description of Artificial Sequence: Synthetic oligonucleotide
  Sense strand starting at position 2950 SEQ ID NO: 3150
uugacaggucugcaucaua

SEQ ID NO: 244901 - RNA, 19 nt, Artificial Sequence
  Description of Artificial Sequence: Synthetic oligonucleotide
  Antisense strand to SEQ ID NO: 244900
uaugaugcagaccugucaa

SEQ ID NO: 244902 - RNA, 19 nt, Artificial Sequence
  Description of Artificial Sequence: Synthetic oligonucleotide
  Sense strand starting at position 2953 SEQ ID NO: 3150
acaggucugcaucauaaca

SEQ ID NO: 244903 - RNA, 19 nt, Artificial Sequence
  Description of Artificial Sequence: Synthetic oligonucleotide
  Antisense strand to SEQ ID NO: 244902
uguuaugaugcagaccugu

SEQ ID NO: 244904 - RNA, 19 nt, Artificial Sequence
  Description of Artificial Sequence: Synthetic oligonucleotide
  Sense strand starting at position 3310 SEQ ID NO: 3150
cugguuccuccaggaaacu

SEQ ID NO: 244905 - RNA, 19 nt, Artificial Sequence
  Description of Artificial Sequence: Synthetic oligonucleotide
  Antisense strand to SEQ ID NO: 244904
aguuuccuggaggaaccag

SEQ ID NO: 244906 - RNA, 19 nt, Artificial Sequence
  Description of Artificial Sequence: Synthetic oligonucleotide
  Sense strand starting at position 3457 SEQ ID NO: 3150
gcucgcucugcauuaucca

SEQ ID NO: 244907 - RNA, 19 nt, Artificial Sequence
  Description of Artificial Sequence: Synthetic oligonucleotide
  Antisense strand to SEQ ID NO: 244906
uggauaaugcagagcgagc

SEQ ID NO: 244908 - RNA, 19 nt, Artificial Sequence
  Description of Artificial Sequence: Synthetic oligonucleotide
  Sense strand starting at position 3466 SEQ ID NO: 3150
gcauuauccaagggaguga

SEQ ID NO: 244909 - RNA, 19 nt, Artificial Sequence
  Description of Artificial Sequence: Synthetic oligonucleotide
  Antisense strand to SEQ ID NO: 244908
ucacucccuuggauaaugc

SEQ ID NO: 244910 - RNA, 19 nt, Artificial Sequence
  Description of Artificial Sequence: Synthetic oligonucleotide
  Sense strand starting at position 3518 SEQ ID NO: 3150
uagguucuacugugggaaa

SEQ ID NO: 244911 - RNA, 19 nt, Artificial Sequence
  Description of Artificial Sequence: Synthetic oligonucleotide
  Antisense strand to SEQ ID NO: 244910
uuucccacaguagaaccua

SEQ ID NO: 244912 - RNA, 19 nt, Artificial Sequence
  Description of Artificial Sequence: Synthetic oligonucleotide
  Sense strand starting at position 3680 SEQ ID NO: 3150
guuaguuuccugugaauuu

SEQ ID NO: 244913 - RNA, 19 nt, Artificial Sequence
  Description of Artificial Sequence: Synthetic oligonucleotide
  Antisense strand to SEQ ID NO: 244912
aaauucacaggaaacuaac

SEQ ID NO: 244914 - RNA, 19 nt, Artificial Sequence
  Description of Artificial Sequence: Synthetic oligonucleotide
  Sense strand starting at position 3 SEQ ID NO: 3152
cacaguaucuaugugggau

SEQ ID NO: 244915 - RNA, 19 nt, Artificial Sequence
  Description of Artificial Sequence: Synthetic oligonucleotide
  Antisense strand to SEQ ID NO: 244914
aucccacauagauacugug

SEQ ID NO: 244916 - RNA, 19 nt, Artificial Sequence
  Description of Artificial Sequence: Synthetic oligonucleotide
  Sense strand starting at position 4 SEQ ID NO: 3152
acaguaucuaugugggaug

SEQ ID NO: 244917 - RNA, 19 nt, Artificial Sequence
  Description of Artificial Sequence: Synthetic oligonucleotide
  Antisense strand to SEQ ID NO: 244916
caucccacauagauacugu

SEQ ID NO: 244918 - RNA, 19 nt, Artificial Sequence
  Description of Artificial Sequence: Synthetic oligonucleotide
  Sense strand starting at position 21 SEQ ID NO: 3152
uguucuguccaagaccaau

SEQ ID NO: 244919 - RNA, 19 nt, Artificial Sequence
  Description of Artificial Sequence: Synthetic oligonucleotide
  Antisense strand to SEQ ID NO: 244918
auuggucuuggacagaaca

SEQ ID NO: 244920 - RNA, 19 nt, Artificial Sequence
  Description of Artificial Sequence: Synthetic oligonucleotide
  Sense strand starting at position 259 SEQ ID NO: 3152
ugauuaucuugggcuaaug

SEQ ID NO: 244921 - RNA, 19 nt, Artificial Sequence
  Description of Artificial Sequence: Synthetic oligonucleotide
  Antisense strand to SEQ ID NO: 244920
cauuagcccaagauaauca

SEQ ID NO: 244922 - RNA, 19 nt, Artificial Sequence
  Description of Artificial Sequence: Synthetic oligonucleotide
  Sense strand starting at position 505 SEQ ID NO: 3152
ugacucagugucuaacuua

SEQ ID NO: 244923 - RNA, 19 nt, Artificial Sequence
  Description of Artificial Sequence: Synthetic oligonucleotide
  Antisense strand to SEQ ID NO: 244922
uaaguuagacacugaguca

SEQ ID NO: 244924 - RNA, 19 nt, Artificial Sequence
  Description of Artificial Sequence: Synthetic oligonucleotide
  Sense strand starting at position 679 SEQ ID NO: 3152
ugcccagcucuagaaucua

SEQ ID NO: 244925 - RNA, 19 nt, Artificial Sequence
  Description of Artificial Sequence: Synthetic oligonucleotide
  Antisense strand to SEQ ID NO: 244924
uagauucuagagcugggca

SEQ ID NO: 244926 - RNA, 19 nt, Artificial Sequence
  Description of Artificial Sequence: Synthetic oligonucleotide
  Sense strand starting at position 779 SEQ ID NO: 3152
accuccuggcgacauaauu

SEQ ID NO: 244927 - RNA, 19 nt, Artificial Sequence
  Description of Artificial Sequence: Synthetic oligonucleotide
  Antisense strand to SEQ ID NO: 244926
aauuaugucgccaggaggu

SEQ ID NO: 244928 - RNA, 19 nt, Artificial Sequence
  Description of Artificial Sequence: Synthetic oligonucleotide
  Sense strand starting at position 911 SEQ ID NO: 3152
gagauaguaucaguauaga

SEQ ID NO: 244929 - RNA, 19 nt, Artificial Sequence
  Description of Artificial Sequence: Synthetic oligonucleotide
  Antisense strand to SEQ ID NO: 244928
ucuauacugauacuaucuc

SEQ ID NO: 244930 - RNA, 19 nt, Artificial Sequence
  Description of Artificial Sequence: Synthetic oligonucleotide
  Sense strand starting at position 955 SEQ ID NO: 3152
auuaauuaccaguguagag

SEQ ID NO: 244931 - RNA, 19 nt, Artificial Sequence
  Description of Artificial Sequence: Synthetic oligonucleotide
  Antisense strand to SEQ ID NO: 244930
cucuacacugguaauuaau

SEQ ID NO: 244932 - RNA, 19 nt, Artificial Sequence
  Description of Artificial Sequence: Synthetic oligonucleotide
  Sense strand starting at position 957 SEQ ID NO: 3152
uaauuaccaguguagaguu

SEQ ID NO: 244933 - RNA, 19 nt, Artificial Sequence
  Description of Artificial Sequence: Synthetic oligonucleotide
  Antisense strand to SEQ ID NO: 244932
aacucuacacugguaauua

SEQ ID NO: 244934 - RNA, 19 nt, Artificial Sequence
  Description of Artificial Sequence: Synthetic oligonucleotide
  Sense strand starting at position 970 SEQ ID NO: 3152
agaguuacagcuuagacau

SEQ ID NO: 244935 - RNA, 19 nt, Artificial Sequence
  Description of Artificial Sequence: Synthetic oligonucleotide
  Antisense strand to SEQ ID NO: 244934
augucuaagcuguaacucu

SEQ ID NO: 244936 - RNA, 19 nt, Artificial Sequence
  Description of Artificial Sequence: Synthetic oligonucleotide
  Sense strand starting at position 1043 SEQ ID NO: 3152
ggauuagauuaugugguua

SEQ ID NO: 244937 - RNA, 19 nt, Artificial Sequence
  Description of Artificial Sequence: Synthetic oligonucleotide
  Antisense strand to SEQ ID NO: 244936
uaaccacauaaucuaaucc

SEQ ID NO: 244938 - RNA, 19 nt, Artificial Sequence
  Description of Artificial Sequence: Synthetic oligonucleotide
  Sense strand starting at position 1047 SEQ ID NO: 3152
uagauuaugugguuaugaa

SEQ ID NO: 244939 - RNA, 19 nt, Artificial Sequence
  Description of Artificial Sequence: Synthetic oligonucleotide
  Antisense strand to SEQ ID NO: 244938
uucauaaccacauaaucua

SEQ ID NO: 244940 - RNA, 19 nt, Artificial Sequence
  Description of Artificial Sequence: Synthetic oligonucleotide
  Sense strand starting at position 1059 SEQ ID NO: 3152
uuaugaagguucuuucuag

SEQ ID NO: 244941 - RNA, 19 nt, Artificial Sequence
  Description of Artificial Sequence: Synthetic oligonucleotide
  Antisense strand to SEQ ID NO: 244940
cuagaaagaaccuucauaa

SEQ ID NO: 244942 - RNA, 19 nt, Artificial Sequence
  Description of Artificial Sequence: Synthetic oligonucleotide
  Sense strand starting at position 1224 SEQ ID NO: 3152
ucuugaagucaugaagcau

SEQ ID NO: 244943 - RNA, 19 nt, Artificial Sequence
  Description of Artificial Sequence: Synthetic oligonucleotide
  Antisense strand to SEQ ID NO: 244942
augcuucaugacuucaaga

SEQ ID NO: 244944 - RNA, 19 nt, Artificial Sequence
  Description of Artificial Sequence: Synthetic oligonucleotide
  Sense strand starting at position 1345 SEQ ID NO: 3152
ggcugaguccuagaccuag

SEQ ID NO: 244945 - RNA, 19 nt, Artificial Sequence
  Description of Artificial Sequence: Synthetic oligonucleotide
  Antisense strand to SEQ ID NO: 244944
cuaggucuaggacucagcc

SEQ ID NO: 244946 - RNA, 19 nt, Artificial Sequence
  Description of Artificial Sequence: Synthetic oligonucleotide
  Sense strand starting at position 1699 SEQ ID NO: 3152
ugagauuacuuucuaaagu

SEQ ID NO: 244947 - RNA, 19 nt, Artificial Sequence
  Description of Artificial Sequence: Synthetic oligonucleotide
  Antisense strand to SEQ ID NO: 244946
acuuuagaaaguaaucuca

SEQ ID NO: 244948 - RNA, 19 nt, Artificial Sequence
  Description of Artificial Sequence: Synthetic oligonucleotide
  Sense strand starting at position 1827 SEQ ID NO: 3152
gggacuaccuuguuaccua

SEQ ID NO: 244949 - RNA, 19 nt, Artificial Sequence
  Description of Artificial Sequence: Synthetic oligonucleotide
  Antisense strand to SEQ ID NO: 244948
uagguaacaagguaguccc

SEQ ID NO: 244950 - RNA, 19 nt, Artificial Sequence
  Description of Artificial Sequence: Synthetic oligonucleotide
  Sense strand starting at position 1831 SEQ ID NO: 3152
cuaccuuguuaccuagaca

SEQ ID NO: 244951 - RNA, 19 nt, Artificial Sequence
  Description of Artificial Sequence: Synthetic oligonucleotide
  Antisense strand to SEQ ID NO: 244950
ugucuagguaacaagguag

SEQ ID NO: 244952 - RNA, 19 nt, Artificial Sequence
  Description of Artificial Sequence: Synthetic oligonucleotide
  Sense strand starting at position 1928 SEQ ID NO: 3152
agagaauauugccugucca

SEQ ID NO: 244953 - RNA, 19 nt, Artificial Sequence
  Description of Artificial Sequence: Synthetic oligonucleotide
  Antisense strand to SEQ ID NO: 244952
uggacaggcaauauucucu

SEQ ID NO: 244954 - RNA, 19 nt, Artificial Sequence
  Description of Artificial Sequence: Synthetic oligonucleotide
  Sense strand starting at position 2012 SEQ ID NO: 3152
gggcauugcgcuguguuua

SEQ ID NO: 244955 - RNA, 19 nt, Artificial Sequence
  Description of Artificial Sequence: Synthetic oligonucleotide
  Antisense strand to SEQ ID NO: 244954
uaaacacagcgcaaugccc

SEQ ID NO: 244956 - RNA, 19 nt, Artificial Sequence
  Description of Artificial Sequence: Synthetic oligonucleotide
  Sense strand starting at position 2094 SEQ ID NO: 3152
gaagaagagccugggcauu

SEQ ID NO: 244957 - RNA, 19 nt, Artificial Sequence
  Description of Artificial Sequence: Synthetic oligonucleotide
  Antisense strand to SEQ ID NO: 244956
aaugcccaggcucuucuuc

SEQ ID NO: 244958 - RNA, 19 nt, Artificial Sequence
  Description of Artificial Sequence: Synthetic oligonucleotide
  Sense strand starting at position 2123 SEQ ID NO: 3152
uuugguacagcaugaauaa

SEQ ID NO: 244959 - RNA, 19 nt, Artificial Sequence
  Description of Artificial Sequence: Synthetic oligonucleotide
  Antisense strand to SEQ ID NO: 244958
uuauucaugcuguaccaaa

SEQ ID NO: 244960 - RNA, 19 nt, Artificial Sequence
  Description of Artificial Sequence: Synthetic oligonucleotide
  Sense strand starting at position 2124 SEQ ID NO: 3152
uugguacagcaugaauaau

SEQ ID NO: 244961 - RNA, 19 nt, Artificial Sequence
  Description of Artificial Sequence: Synthetic oligonucleotide
  Antisense strand to SEQ ID NO: 244960
auuauucaugcuguaccaa

SEQ ID NO: 244962 - RNA, 19 nt, Artificial Sequence
  Description of Artificial Sequence: Synthetic oligonucleotide
  Sense strand starting at position 2183 SEQ ID NO: 3152
gagagucauccauaaagcc

SEQ ID NO: 244963 - RNA, 19 nt, Artificial Sequence
  Description of Artificial Sequence: Synthetic oligonucleotide
  Antisense strand to SEQ ID NO: 244962
ggcuuuauggaugacucuc

SEQ ID NO: 244964 - RNA, 19 nt, Artificial Sequence
  Description of Artificial Sequence: Synthetic oligonucleotide
  Sense strand starting at position 2263 SEQ ID NO: 3152
uggguuugcagccagauaa

SEQ ID NO: 244965 - RNA, 19 nt, Artificial Sequence
  Description of Artificial Sequence: Synthetic oligonucleotide
  Antisense strand to SEQ ID NO: 244964
uuaucuggcugcaaaccca

SEQ ID NO: 244966 - RNA, 19 nt, Artificial Sequence
  Description of Artificial Sequence: Synthetic oligonucleotide
  Sense strand starting at position 2354 SEQ ID NO: 3152
gagaaaguaugucuggcaa

SEQ ID NO: 244967 - RNA, 19 nt, Artificial Sequence
  Description of Artificial Sequence: Synthetic oligonucleotide
  Antisense strand to SEQ ID NO: 244966
uugccagacauacuuucuc

SEQ ID NO: 244968 - RNA, 19 nt, Artificial Sequence
  Description of Artificial Sequence: Synthetic oligonucleotide
  Sense strand starting at position 2612 SEQ ID NO: 3152
cauggacugcuaggaaaua

SEQ ID NO: 244969 - RNA, 19 nt, Artificial Sequence
  Description of Artificial Sequence: Synthetic oligonucleotide
  Antisense strand to SEQ ID NO: 244968
uauuuccuagcaguccaug

SEQ ID NO: 244970 - RNA, 19 nt, Artificial Sequence
  Description of Artificial Sequence: Synthetic oligonucleotide
  Sense strand starting at position 2665 SEQ ID NO: 3152
ucaggucucuaauugacau

SEQ ID NO: 244971 - RNA, 19 nt, Artificial Sequence
  Description of Artificial Sequence: Synthetic oligonucleotide
  Antisense strand to SEQ ID NO: 244970
augucaauuagagaccuga

SEQ ID NO: 244972 - RNA, 19 nt, Artificial Sequence
  Description of Artificial Sequence: Synthetic oligonucleotide
  Sense strand starting at position 2893 SEQ ID NO: 3152
ggagaagcuuagguguaau

SEQ ID NO: 244973 - RNA, 19 nt, Artificial Sequence
  Description of Artificial Sequence: Synthetic oligonucleotide
  Antisense strand to SEQ ID NO: 244972
auuacaccuaagcuucucc

SEQ ID NO: 244974 - RNA, 19 nt, Artificial Sequence
  Description of Artificial Sequence: Synthetic oligonucleotide
  Sense strand starting at position 2947 SEQ ID NO: 3152
ccucuuuggucauuugcaa

SEQ ID NO: 244975 - RNA, 19 nt, Artificial Sequence
  Description of Artificial Sequence: Synthetic oligonucleotide
  Antisense strand to SEQ ID NO: 244974
uugcaaaugaccaaagagg

SEQ ID NO: 244976 - RNA, 19 nt, Artificial Sequence
  Description of Artificial Sequence: Synthetic oligonucleotide
  Sense strand starting at position 2992 SEQ ID NO: 3152
gugggauaggugggucuaa

SEQ ID NO: 244977 - RNA, 19 nt, Artificial Sequence
  Description of Artificial Sequence: Synthetic oligonucleotide
  Antisense strand to SEQ ID NO: 244976
uuagacccaccuaucccac

SEQ ID NO: 244978 - RNA, 19 nt, Artificial Sequence
  Description of Artificial Sequence: Synthetic oligonucleotide
  Sense strand starting at position 3122 SEQ ID NO: 3152
cuucuaugggaaggcuuaa

SEQ ID NO: 244979 - RNA, 19 nt, Artificial Sequence
  Description of Artificial Sequence: Synthetic oligonucleotide
  Antisense strand to SEQ ID NO: 244978
uuaagccuucccauagaag

SEQ ID NO: 244980 - RNA, 19 nt, Artificial Sequence
  Description of Artificial Sequence: Synthetic oligonucleotide
  Sense strand starting at position 3134 SEQ ID NO: 3152
ggcuuaaagcaugaguuac

SEQ ID NO: 244981 - RNA, 19 nt, Artificial Sequence
  Description of Artificial Sequence: Synthetic oligonucleotide
  Antisense strand to SEQ ID NO: 244980
guaacucaugcuuuaagcc

SEQ ID NO: 244982 - RNA, 19 nt, Artificial Sequence
  Description of Artificial Sequence: Synthetic oligonucleotide
  Sense strand starting at position 3136 SEQ ID NO: 3152
cuuaaagcaugaguuacua

SEQ ID NO: 244983 - RNA, 19 nt, Artificial Sequence
  Description of Artificial Sequence: Synthetic oligonucleotide
  Antisense strand to SEQ ID NO: 244982
uaguaacucaugcuuuaag

SEQ ID NO: 244984 - RNA, 19 nt, Artificial Sequence
  Description of Artificial Sequence: Synthetic oligonucleotide
  Sense strand starting at position 3164 SEQ ID NO: 3152
accaaugaguguuuaccca

SEQ ID NO: 244985 - RNA, 19 nt, Artificial Sequence
  Description of Artificial Sequence: Synthetic oligonucleotide
  Antisense strand to SEQ ID NO: 244984
uggguaaacacucauuggu

SEQ ID NO: 244986 - RNA, 19 nt, Artificial Sequence
  Description of Artificial Sequence: Synthetic oligonucleotide
  Sense strand starting at position 3703 SEQ ID NO: 3152
auuggagaaaucugugcua

SEQ ID NO: 244987 - RNA, 19 nt, Artificial Sequence
  Description of Artificial Sequence: Synthetic oligonucleotide
  Antisense strand to SEQ ID NO: 244986
uagcacagauuucuccaau

SEQ ID NO: 244988 - RNA, 19 nt, Artificial Sequence
  Description of Artificial Sequence: Synthetic oligonucleotide
  Sense strand starting at position 3705 SEQ ID NO: 3152
uggagaaaucugugcuaug

SEQ ID NO: 244989 - RNA, 19 nt, Artificial Sequence
  Description of Artificial Sequence: Synthetic oligonucleotide
  Antisense strand to SEQ ID NO: 244988
cauagcacagauuucucca

SEQ ID NO: 244990 - RNA, 19 nt, Artificial Sequence
  Description of Artificial Sequence: Synthetic oligonucleotide
  Sense strand starting at position 3706 SEQ ID NO: 3152
ggagaaaucugugcuaugg

SEQ ID NO: 244991 - RNA, 19 nt, Artificial Sequence
  Description of Artificial Sequence: Synthetic oligonucleotide
  Antisense strand to SEQ ID NO: 244990
ccauagcacagauuucucc

SEQ ID NO: 244992 - RNA, 19 nt, Artificial Sequence
  Description of Artificial Sequence: Synthetic oligonucleotide
  Sense strand starting at position 3730 SEQ ID NO: 3152
cugagaaauugguuaauua

SEQ ID NO: 244993 - RNA, 19 nt, Artificial Sequence
  Description of Artificial Sequence: Synthetic oligonucleotide
  Antisense strand to SEQ ID NO: 244992
uaauuaaccaauuucucag

SEQ ID NO: 244994 - RNA, 19 nt, Artificial Sequence
  Description of Artificial Sequence: Synthetic oligonucleotide
  Sense strand starting at position 305 SEQ ID NO: 3151
ugagaaauuucuuagugag

SEQ ID NO: 244995 - RNA, 19 nt, Artificial Sequence
  Description of Artificial Sequence: Synthetic oligonucleotide
  Antisense strand to SEQ ID NO: 244994
cucacuaagaaauuucuca

SEQ ID NO: 244996 - RNA, 19 nt, Artificial Sequence
  Description of Artificial Sequence: Synthetic oligonucleotide
  Sense strand starting at position 315 SEQ ID NO: 3151
cuuagugaggcucagauga

SEQ ID NO: 244997 - RNA, 19 nt, Artificial Sequence
  Description of Artificial Sequence: Synthetic oligonucleotide
  Antisense strand to SEQ ID NO: 244996
ucaucugagccucacuaag

SEQ ID NO: 244998 - RNA, 19 nt, Artificial Sequence
  Description of Artificial Sequence: Synthetic oligonucleotide
  Sense strand starting at position 345 SEQ ID NO: 3151
aguggaccuuaucuuaaau

SEQ ID NO: 244999 - RNA, 19 nt, Artificial Sequence
  Description of Artificial Sequence: Synthetic oligonucleotide
  Antisense strand to SEQ ID NO: 244998
auuuaagauaagguccacu

SEQ ID NO: 245000 - RNA, 19 nt, Artificial Sequence
  Description of Artificial Sequence: Synthetic oligonucleotide
  Sense strand starting at position 394 SEQ ID NO: 3151
guuuauucucuuuaguaca

SEQ ID NO: 245001 - RNA, 19 nt, Artificial Sequence
  Description of Artificial Sequence: Synthetic oligonucleotide
  Antisense strand to SEQ ID NO: 245000
uguacuaaagagaauaaac

SEQ ID NO: 245002 - RNA, 19 nt, Artificial Sequence
  Description of Artificial Sequence: Synthetic oligonucleotide
  Sense strand starting at position 396 SEQ ID NO: 3151
uuauucucuuuaguacaga

SEQ ID NO: 245003 - RNA, 19 nt, Artificial Sequence
  Description of Artificial Sequence: Synthetic oligonucleotide
  Antisense strand to SEQ ID NO: 245002
ucuguacuaaagagaauaa

SEQ ID NO: 245004 - RNA, 19 nt, Artificial Sequence
  Description of Artificial Sequence: Synthetic oligonucleotide
  Sense strand starting at position 399 SEQ ID NO: 3151
uucucuuuaguacagagau

SEQ ID NO: 245005 - RNA, 19 nt, Artificial Sequence
  Description of Artificial Sequence: Synthetic oligonucleotide
  Antisense strand to SEQ ID NO: 245004
aucucuguacuaaagagaa

SEQ ID NO: 245006 - RNA, 19 nt, Artificial Sequence
  Description of Artificial Sequence: Synthetic oligonucleotide
  Sense strand starting at position 407 SEQ ID NO: 3151
aguacagagauugagugua

SEQ ID NO: 245007 - RNA, 19 nt, Artificial Sequence
  Description of Artificial Sequence: Synthetic oligonucleotide
  Antisense strand to SEQ ID NO: 245006
uacacucaaucucuguacu

SEQ ID NO: 245008 - RNA, 19 nt, Artificial Sequence
  Description of Artificial Sequence: Synthetic oligonucleotide
  Sense strand starting at position 409 SEQ ID NO: 3151
uacagagauugaguguaua

SEQ ID NO: 245009 - RNA, 19 nt, Artificial Sequence
  Description of Artificial Sequence: Synthetic oligonucleotide
  Antisense strand to SEQ ID NO: 245008
uauacacucaaucucugua

SEQ ID NO: 245010 - RNA, 19 nt, Artificial Sequence
  Description of Artificial Sequence: Synthetic oligonucleotide
  Sense strand starting at position 427 SEQ ID NO: 3151
acugaagugugauuugcuu

SEQ ID NO: 245011 - RNA, 19 nt, Artificial Sequence
  Description of Artificial Sequence: Synthetic oligonucleotide
  Antisense strand to SEQ ID NO: 245010
aagcaaaucacacuucagu

SEQ ID NO: 245012 - RNA, 19 nt, Artificial Sequence
  Description of Artificial Sequence: Synthetic oligonucleotide
  Sense strand starting at position 467 SEQ ID NO: 3151
aaagucaugcaggguauua

SEQ ID NO: 245013 - RNA, 19 nt, Artificial Sequence
  Description of Artificial Sequence: Synthetic oligonucleotide
  Antisense strand to SEQ ID NO: 245012
uaauacccugcaugacuuu

SEQ ID NO: 245014 - RNA, 19 nt, Artificial Sequence
  Description of Artificial Sequence: Synthetic oligonucleotide
  Sense strand starting at position 623 SEQ ID NO: 3151
cgauaauacccuuagcuaa

SEQ ID NO: 245015 - RNA, 19 nt, Artificial Sequence
  Description of Artificial Sequence: Synthetic oligonucleotide
  Antisense strand to SEQ ID NO: 245014
uuagcuaaggguauuaucg

SEQ ID NO: 245016 - RNA, 19 nt, Artificial Sequence
  Description of Artificial Sequence: Synthetic oligonucleotide
  Sense strand starting at position 636 SEQ ID NO: 3151
agcuaaugacuguacauau

SEQ ID NO: 245017 - RNA, 19 nt, Artificial Sequence
  Description of Artificial Sequence: Synthetic oligonucleotide
  Antisense strand to SEQ ID NO: 245016
auauguacagucauuagcu

SEQ ID NO: 245018 - RNA, 19 nt, Artificial Sequence
  Description of Artificial Sequence: Synthetic oligonucleotide
  Sense strand starting at position 805 SEQ ID NO: 3151
cccugaagugcugacaucu

SEQ ID NO: 245019 - RNA, 19 nt, Artificial Sequence
  Description of Artificial Sequence: Synthetic oligonucleotide
  Antisense strand to SEQ ID NO: 245018
agaugucagcacuucaggg

SEQ ID NO: 245020 - RNA, 19 nt, Artificial Sequence
  Description of Artificial Sequence: Synthetic oligonucleotide
  Sense strand starting at position 818 SEQ ID NO: 3151
acaucugcuuugucauuua

SEQ ID NO: 245021 - RNA, 19 nt, Artificial Sequence
  Description of Artificial Sequence: Synthetic oligonucleotide
  Antisense strand to SEQ ID NO: 245020
uaaaugacaaagcagaugu

SEQ ID NO: 245022 - RNA, 19 nt, Artificial Sequence
  Description of Artificial Sequence: Synthetic oligonucleotide
  Sense strand starting at position 821 SEQ ID NO: 3151
ucugcuuugucauuuaugu

SEQ ID NO: 245023 - RNA, 19 nt, Artificial Sequence
  Description of Artificial Sequence: Synthetic oligonucleotide
  Antisense strand to SEQ ID NO: 245022
acauaaaugacaaagcaga

SEQ ID NO: 245024 - RNA, 19 nt, Artificial Sequence
  Description of Artificial Sequence: Synthetic oligonucleotide
  Sense strand starting at position 830 SEQ ID NO: 3151
ucauuuaugugcuuccuau

SEQ ID NO: 245025 - RNA, 19 nt, Artificial Sequence
  Description of Artificial Sequence: Synthetic oligonucleotide
  Antisense strand to SEQ ID NO: 245024
auaggaagcacauaaauga

SEQ ID NO: 245026 - RNA, 19 nt, Artificial Sequence
  Description of Artificial Sequence: Synthetic oligonucleotide
  Sense strand starting at position 908 SEQ ID NO: 3151
ccaccuuguccaggacaca

SEQ ID NO: 245027 - RNA, 19 nt, Artificial Sequence
  Description of Artificial Sequence: Synthetic oligonucleotide
  Antisense strand to SEQ ID NO: 245026
uguguccuggacaaggugg

SEQ ID NO: 245028 - RNA, 19 nt, Artificial Sequence
  Description of Artificial Sequence: Synthetic oligonucleotide
  Sense strand starting at position 970 SEQ ID NO: 3151
aucccagaguccucuuuga

SEQ ID NO: 245029 - RNA, 19 nt, Artificial Sequence
  Description of Artificial Sequence: Synthetic oligonucleotide
  Antisense strand to SEQ ID NO: 245028
ucaaagaggacucugggau

SEQ ID NO: 245030 - RNA, 19 nt, Artificial Sequence
  Description of Artificial Sequence: Synthetic oligonucleotide
  Sense strand starting at position 1086 SEQ ID NO: 3151
gaugaaauguaaguaagug

SEQ ID NO: 245031 - RNA, 19 nt, Artificial Sequence
  Description of Artificial Sequence: Synthetic oligonucleotide
  Antisense strand to SEQ ID NO: 245030
cacuuacuuacauuucauc

SEQ ID NO: 245032 - RNA, 19 nt, Artificial Sequence
  Description of Artificial Sequence: Synthetic oligonucleotide
  Sense strand starting at position 1087 SEQ ID NO: 3151
augaaauguaaguaagugu

SEQ ID NO: 245033 - RNA, 19 nt, Artificial Sequence
  Description of Artificial Sequence: Synthetic oligonucleotide
  Antisense strand to SEQ ID NO: 245032
acacuuacuuacauuucau

SEQ ID NO: 245034 - RNA, 19 nt, Artificial Sequence
  Description of Artificial Sequence: Synthetic oligonucleotide
  Sense strand starting at position 1376 SEQ ID NO: 3151
cuugcagacguucaggaaa

SEQ ID NO: 245035 - RNA, 19 nt, Artificial Sequence
  Description of Artificial Sequence: Synthetic oligonucleotide
  Antisense strand to SEQ ID NO: 245034
uuuccugaacgucugcaag

SEQ ID NO: 245036 - RNA, 19 nt, Artificial Sequence
  Description of Artificial Sequence: Synthetic oligonucleotide
  Sense strand starting at position 2152 SEQ ID NO: 3151
auuccuagugacuagaagu

SEQ ID NO: 245037 - RNA, 19 nt, Artificial Sequence
  Description of Artificial Sequence: Synthetic oligonucleotide
  Antisense strand to SEQ ID NO: 245036
acuucuagucacuaggaau

SEQ ID NO: 245038 - RNA, 19 nt, Artificial Sequence
  Description of Artificial Sequence: Synthetic oligonucleotide
  Sense strand starting at position 2306 SEQ ID NO: 3151
ggguuauccuguccuagag

SEQ ID NO: 245039 - RNA, 19 nt, Artificial Sequence
  Description of Artificial Sequence: Synthetic oligonucleotide
  Antisense strand to SEQ ID NO: 245038
cucuaggacaggauaaccc

SEQ ID NO: 245040 - RNA, 19 nt, Artificial Sequence
  Description of Artificial Sequence: Synthetic oligonucleotide
  Sense strand starting at position 2361 SEQ ID NO: 3151
uccagaauuuagcauggaa

SEQ ID NO: 245041 - RNA, 19 nt, Artificial Sequence
  Description of Artificial Sequence: Synthetic oligonucleotide
  Antisense strand to SEQ ID NO: 245040
uuccaugcuaaauucugga

SEQ ID NO: 245042 - RNA, 19 nt, Artificial Sequence
  Description of Artificial Sequence: Synthetic oligonucleotide
  Sense strand starting at position 2402 SEQ ID NO: 3151
guuggaaauuagcucagga

SEQ ID NO: 245043 - RNA, 19 nt, Artificial Sequence
  Description of Artificial Sequence: Synthetic oligonucleotide
  Antisense strand to SEQ ID NO: 245042
uccugagcuaauuuccaac

SEQ ID NO: 245044 - RNA, 19 nt, Artificial Sequence
  Description of Artificial Sequence: Synthetic oligonucleotide
  Sense strand starting at position 2417 SEQ ID NO: 3151
aggaaaguaacgcaaguau

SEQ ID NO: 245045 - RNA, 19 nt, Artificial Sequence
  Description of Artificial Sequence: Synthetic oligonucleotide
  Antisense strand to SEQ ID NO: 245044
auacuugcguuacuuuccu

SEQ ID NO: 245046 - RNA, 19 nt, Artificial Sequence
  Description of Artificial Sequence: Synthetic oligonucleotide
  Sense strand starting at position 2447 SEQ ID NO: 3151
agguuuaccgaguagaucu

SEQ ID NO: 245047 - RNA, 19 nt, Artificial Sequence
  Description of Artificial Sequence: Synthetic oligonucleotide
  Antisense strand to SEQ ID NO: 245046
agaucuacucgguaaaccu

SEQ ID NO: 245048 - RNA, 19 nt, Artificial Sequence
  Description of Artificial Sequence: Synthetic oligonucleotide
  Sense strand starting at position 2792 SEQ ID NO: 3151
gggacuaacaagugcaaau

SEQ ID NO: 245049 - RNA, 19 nt, Artificial Sequence
  Description of Artificial Sequence: Synthetic oligonucleotide
  Antisense strand to SEQ ID NO: 245048
auuugcacuuguuaguccc

SEQ ID NO: 245050 - RNA, 19 nt, Artificial Sequence
  Description of Artificial Sequence: Synthetic oligonucleotide
  Sense strand starting at position 2803 SEQ ID NO: 3151
gugcaaauucuggagggau

SEQ ID NO: 245051 - RNA, 19 nt, Artificial Sequence
  Description of Artificial Sequence: Synthetic oligonucleotide
  Antisense strand to SEQ ID NO: 245050
aucccuccagaauuugcac

SEQ ID NO: 245052 - RNA, 19 nt, Artificial Sequence
  Description of Artificial Sequence: Synthetic oligonucleotide
  Sense strand starting at position 2805 SEQ ID NO: 3151
gcaaauucuggagggaugu

SEQ ID NO: 245053 - RNA, 19 nt, Artificial Sequence
  Description of Artificial Sequence: Synthetic oligonucleotide
  Antisense strand to SEQ ID NO: 245052
acaucccuccagaauuugc

SEQ ID NO: 245054 - RNA, 19 nt, Artificial Sequence
  Description of Artificial Sequence: Synthetic oligonucleotide
  Sense strand starting at position 2806 SEQ ID NO: 3151
caaauucuggagggauguu

SEQ ID NO: 245055 - RNA, 19 nt, Artificial Sequence
  Description of Artificial Sequence: Synthetic oligonucleotide
  Antisense strand to SEQ ID NO: 245054
aacaucccuccagaauuug

SEQ ID NO: 245056 - RNA, 19 nt, Artificial Sequence
  Description of Artificial Sequence: Synthetic oligonucleotide
  Sense strand starting at position 2988 SEQ ID NO: 3151
guaauagguaauuggcuaa

SEQ ID NO: 245057 - RNA, 19 nt, Artificial Sequence
  Description of Artificial Sequence: Synthetic oligonucleotide
  Antisense strand to SEQ ID NO: 245056
uuagccaauuaccuauuac

SEQ ID NO: 245058 - RNA, 19 nt, Artificial Sequence
  Description of Artificial Sequence: Synthetic oligonucleotide
  Sense strand starting at position 2991 SEQ ID NO: 3151
auagguaauuggcuaagaa

SEQ ID NO: 245059 - RNA, 19 nt, Artificial Sequence
  Description of Artificial Sequence: Synthetic oligonucleotide
  Antisense strand to SEQ ID NO: 245058
uucuuagccaauuaccuau

SEQ ID NO: 245060 - RNA, 19 nt, Artificial Sequence
  Description of Artificial Sequence: Synthetic oligonucleotide
  Sense strand starting at position 3042 SEQ ID NO: 3151
guguuuguuaaagaugaua

SEQ ID NO: 245061 - RNA, 19 nt, Artificial Sequence
  Description of Artificial Sequence: Synthetic oligonucleotide
  Antisense strand to SEQ ID NO: 245060
uaucaucuuuaacaaacac

SEQ ID NO: 245062 - RNA, 19 nt, Artificial Sequence
  Description of Artificial Sequence: Synthetic oligonucleotide
  Sense strand starting at position 3191 SEQ ID NO: 3151
cguguuguugcaccacuua

SEQ ID NO: 245063 - RNA, 19 nt, Artificial Sequence
  Description of Artificial Sequence: Synthetic oligonucleotide
  Antisense strand to SEQ ID NO: 245062
uaaguggugcaacaacacg

SEQ ID NO: 245064 - RNA, 19 nt, Artificial Sequence
  Description of Artificial Sequence: Synthetic oligonucleotide
  Sense strand starting at position 3208 SEQ ID NO: 3151
uaccuauggcuuuaugagu

SEQ ID NO: 245065 - RNA, 19 nt, Artificial Sequence
  Description of Artificial Sequence: Synthetic oligonucleotide
  Antisense strand to SEQ ID NO: 245064
acucauaaagccauaggua

SEQ ID NO: 245066 - RNA, 19 nt, Artificial Sequence
  Description of Artificial Sequence: Synthetic oligonucleotide
  Sense strand starting at position 3276 SEQ ID NO: 3151
uguaguaucaaguaaguuu

SEQ ID NO: 245067 - RNA, 19 nt, Artificial Sequence
  Description of Artificial Sequence: Synthetic oligonucleotide
  Antisense strand to SEQ ID NO: 245066
aaacuuacuugauacuaca

SEQ ID NO: 245068 - RNA, 19 nt, Artificial Sequence
  Description of Artificial Sequence: Synthetic oligonucleotide
  Sense strand starting at position 3382 SEQ ID NO: 3151
uuacuauuuccugggccga

SEQ ID NO: 245069 - RNA, 19 nt, Artificial Sequence
  Description of Artificial Sequence: Synthetic oligonucleotide
  Antisense strand to SEQ ID NO: 245068
ucggcccaggaaauaguaa

SEQ ID NO: 245070 - RNA, 19 nt, Artificial Sequence
  Description of Artificial Sequence: Synthetic oligonucleotide
  Sense strand starting at position 3424 SEQ ID NO: 3151
gagugauuccagcaaucag

SEQ ID NO: 245071 - RNA, 19 nt, Artificial Sequence
  Description of Artificial Sequence: Synthetic oligonucleotide
  Antisense strand to SEQ ID NO: 245070
cugauugcuggaaucacuc

SEQ ID NO: 245072 - RNA, 19 nt, Artificial Sequence
  Description of Artificial Sequence: Synthetic oligonucleotide
  Sense strand starting at position 3871 SEQ ID NO: 3151
gcucaaagagcuggaagaa

SEQ ID NO: 245073 - RNA, 19 nt, Artificial Sequence
  Description of Artificial Sequence: Synthetic oligonucleotide
  Antisense strand to SEQ ID NO: 245072
uucuuccagcucuuugagc

SEQ ID NO: 245074 - RNA, 19 nt, Artificial Sequence
  Description of Artificial Sequence: Synthetic oligonucleotide
  Sense strand starting at position 12 SEQ ID NO: 3154
uuggcuuagcaauauuauu

SEQ ID NO: 245075 - RNA, 19 nt, Artificial Sequence
  Description of Artificial Sequence: Synthetic oligonucleotide
  Antisense strand to SEQ ID NO: 245074
aauaauauugcuaagccaa

SEQ ID NO: 245076 - RNA, 19 nt, Artificial Sequence
  Description of Artificial Sequence: Synthetic oligonucleotide
  Sense strand starting at position 46 SEQ ID NO: 3154
acagauaauugcccaagua

SEQ ID NO: 245077 - RNA, 19 nt, Artificial Sequence
  Description of Artificial Sequence: Synthetic oligonucleotide
  Antisense strand to SEQ ID NO: 245076
uacuugggcaauuaucugu

SEQ ID NO: 245078 - RNA, 19 nt, Artificial Sequence
  Description of Artificial Sequence: Synthetic oligonucleotide
  Sense strand starting at position 58 SEQ ID NO: 3154
ccaaguaaacagugcuaua

SEQ ID NO: 245079 - RNA, 19 nt, Artificial Sequence
  Description of Artificial Sequence: Synthetic oligonucleotide
  Antisense strand to SEQ ID NO: 245078
uauagcacuguuuacuugg

SEQ ID NO: 245080 - RNA, 19 nt, Artificial Sequence
  Description of Artificial Sequence: Synthetic oligonucleotide
  Sense strand starting at position 74 SEQ ID NO: 3154
auauguaaaguguacgaau

SEQ ID NO: 245081 - RNA, 19 nt, Artificial Sequence
  Description of Artificial Sequence: Synthetic oligonucleotide
  Antisense strand to SEQ ID NO: 245080
auucguacacuuuacauau

SEQ ID NO: 245082 - RNA, 19 nt, Artificial Sequence
  Description of Artificial Sequence: Synthetic oligonucleotide
  Sense strand starting at position 462 SEQ ID NO: 3154
cccauuguggaggauguau

SEQ ID NO: 245083 - RNA, 19 nt, Artificial Sequence
  Description of Artificial Sequence: Synthetic oligonucleotide
  Antisense strand to SEQ ID NO: 245082
auacauccuccacaauggg

SEQ ID NO: 245084 - RNA, 19 nt, Artificial Sequence
  Description of Artificial Sequence: Synthetic oligonucleotide
  Sense strand starting at position 617 SEQ ID NO: 3154
cucacaagagguuguaaag

SEQ ID NO: 245085 - RNA, 19 nt, Artificial Sequence
  Description of Artificial Sequence: Synthetic oligonucleotide
  Antisense strand to SEQ ID NO: 245084
cuuuacaaccucuugugag

SEQ ID NO: 245086 - RNA, 19 nt, Artificial Sequence
  Description of Artificial Sequence: Synthetic oligonucleotide
  Sense strand starting at position 787 SEQ ID NO: 3154
aguuacaugagaugguaaa

SEQ ID NO: 245087 - RNA, 19 nt, Artificial Sequence
  Description of Artificial Sequence: Synthetic oligonucleotide
  Antisense strand to SEQ ID NO: 245086
uuuaccaucucauguaacu

SEQ ID NO: 245088 - RNA, 19 nt, Artificial Sequence
  Description of Artificial Sequence: Synthetic oligonucleotide
  Sense strand starting at position 788 SEQ ID NO: 3154
guuacaugagaugguaaau

SEQ ID NO: 245089 - RNA, 19 nt, Artificial Sequence
  Description of Artificial Sequence: Synthetic oligonucleotide
  Antisense strand to SEQ ID NO: 245088
auuuaccaucucauguaac

SEQ ID NO: 245090 - RNA, 19 nt, Artificial Sequence
  Description of Artificial Sequence: Synthetic oligonucleotide
  Sense strand starting at position 966 SEQ ID NO: 3154
ucaagaaaguaugcccuau

SEQ ID NO: 245091 - RNA, 19 nt, Artificial Sequence
  Description of Artificial Sequence: Synthetic oligonucleotide
  Antisense strand to SEQ ID NO: 245090
auagggcauacuuucuuga

SEQ ID NO: 245092 - RNA, 19 nt, Artificial Sequence
  Description of Artificial Sequence: Synthetic oligonucleotide
  Sense strand starting at position 1032 SEQ ID NO: 3154
aguguuaaggaaugauaug

SEQ ID NO: 245093 - RNA, 19 nt, Artificial Sequence
  Description of Artificial Sequence: Synthetic oligonucleotide
  Antisense strand to SEQ ID NO: 245092
cauaucauuccuuaacacu

SEQ ID NO: 245094 - RNA, 19 nt, Artificial Sequence
  Description of Artificial Sequence: Synthetic oligonucleotide
  Sense strand starting at position 1033 SEQ ID NO: 3154
guguuaaggaaugauaugu

SEQ ID NO: 245095 - RNA, 19 nt, Artificial Sequence
  Description of Artificial Sequence: Synthetic oligonucleotide
  Antisense strand to SEQ ID NO: 245094
acauaucauuccuuaacac

SEQ ID NO: 245096 - RNA, 19 nt, Artificial Sequence
  Description of Artificial Sequence: Synthetic oligonucleotide
  Sense strand starting at position 1038 SEQ ID NO: 3154
aaggaaugauaugugugau

SEQ ID NO: 245097 - RNA, 19 nt, Artificial Sequence
  Description of Artificial Sequence: Synthetic oligonucleotide
  Antisense strand to SEQ ID NO: 245096
aucacacauaucauuccuu

SEQ ID NO: 245098 - RNA, 19 nt, Artificial Sequence
  Description of Artificial Sequence: Synthetic oligonucleotide
  Sense strand starting at position 1039 SEQ ID NO: 3154
aggaaugauaugugugaua

SEQ ID NO: 245099 - RNA, 19 nt, Artificial Sequence
  Description of Artificial Sequence: Synthetic oligonucleotide
  Antisense strand to SEQ ID NO: 245098
uaucacacauaucauuccu

SEQ ID NO: 245100 - RNA, 19 nt, Artificial Sequence
  Description of Artificial Sequence: Synthetic oligonucleotide
  Sense strand starting at position 1041 SEQ ID NO: 3154
gaaugauaugugugauauc

SEQ ID NO: 245101 - RNA, 19 nt, Artificial Sequence
  Description of Artificial Sequence: Synthetic oligonucleotide
  Antisense strand to SEQ ID NO: 245100
gauaucacacauaucauuc

SEQ ID NO: 245102 - RNA, 19 nt, Artificial Sequence
  Description of Artificial Sequence: Synthetic oligonucleotide
  Sense strand starting at position 1078 SEQ ID NO: 3154
ggcaaauugagcuacagau

SEQ ID NO: 245103 - RNA, 19 nt, Artificial Sequence
  Description of Artificial Sequence: Synthetic oligonucleotide
  Antisense strand to SEQ ID NO: 245102
aucuguagcucaauuugcc

SEQ ID NO: 245104 - RNA, 19 nt, Artificial Sequence
  Description of Artificial Sequence: Synthetic oligonucleotide
  Sense strand starting at position 1414 SEQ ID NO: 3154
gugucuuaaucucuagaag

SEQ ID NO: 245105 - RNA, 19 nt, Artificial Sequence
  Description of Artificial Sequence: Synthetic oligonucleotide
  Antisense strand to SEQ ID NO: 245104
cuucuagagauuaagacac

SEQ ID NO: 245106 - RNA, 19 nt, Artificial Sequence
  Description of Artificial Sequence: Synthetic oligonucleotide
  Sense strand starting at position 1517 SEQ ID NO: 3154
uaaagacagccaugguaua

SEQ ID NO: 245107 - RNA, 19 nt, Artificial Sequence
  Description of Artificial Sequence: Synthetic oligonucleotide
  Antisense strand to SEQ ID NO: 245106
uauaccauggcugucuuua

SEQ ID NO: 245108 - RNA, 19 nt, Artificial Sequence
  Description of Artificial Sequence: Synthetic oligonucleotide
  Sense strand starting at position 1518 SEQ ID NO: 3154
aaagacagccaugguauau

SEQ ID NO: 245109 - RNA, 19 nt, Artificial Sequence
  Description of Artificial Sequence: Synthetic oligonucleotide
  Antisense strand to SEQ ID NO: 245108
auauaccauggcugucuuu

SEQ ID NO: 245110 - RNA, 19 nt, Artificial Sequence
  Description of Artificial Sequence: Synthetic oligonucleotide
  Sense strand starting at position 2165 SEQ ID NO: 3154
uccaguuugcaguaaugaa

SEQ ID NO: 245111 - RNA, 19 nt, Artificial Sequence
  Description of Artificial Sequence: Synthetic oligonucleotide
  Antisense strand to SEQ ID NO: 245110
uucauuacugcaaacugga

SEQ ID NO: 245112 - RNA, 19 nt, Artificial Sequence
  Description of Artificial Sequence: Synthetic oligonucleotide
  Sense strand starting at position 2286 SEQ ID NO: 3154
guuguugacaauuauuguu

SEQ ID NO: 245113 - RNA, 19 nt, Artificial Sequence
  Description of Artificial Sequence: Synthetic oligonucleotide
  Antisense strand to SEQ ID NO: 245112
aacaauaauugucaacaac

SEQ ID NO: 245114 - RNA, 19 nt, Artificial Sequence
  Description of Artificial Sequence: Synthetic oligonucleotide
  Sense strand starting at position 2291 SEQ ID NO: 3154
ugacaauuauuguugguca

SEQ ID NO: 245115 - RNA, 19 nt, Artificial Sequence
  Description of Artificial Sequence: Synthetic oligonucleotide
  Antisense strand to SEQ ID NO: 245114
ugaccaacaauaauuguca

SEQ ID NO: 245116 - RNA, 19 nt, Artificial Sequence
  Description of Artificial Sequence: Synthetic oligonucleotide
  Sense strand starting at position 2304 SEQ ID NO: 3154
uggucaucaggccagcaau

SEQ ID NO: 245117 - RNA, 19 nt, Artificial Sequence
  Description of Artificial Sequence: Synthetic oligonucleotide
  Antisense strand to SEQ ID NO: 245116
auugcuggccugaugacca

SEQ ID NO: 245118 - RNA, 19 nt, Artificial Sequence
  Description of Artificial Sequence: Synthetic oligonucleotide
  Sense strand starting at position 2319 SEQ ID NO: 3154
caauucuucugagugaagu

SEQ ID NO: 245119 - RNA, 19 nt, Artificial Sequence
  Description of Artificial Sequence: Synthetic oligonucleotide
  Antisense strand to SEQ ID NO: 245118
acuucacucagaagaauug

SEQ ID NO: 245120 - RNA, 19 nt, Artificial Sequence
  Description of Artificial Sequence: Synthetic oligonucleotide
  Sense strand starting at position 2325 SEQ ID NO: 3154
uucugagugaaguguugaa

SEQ ID NO: 245121 - RNA, 19 nt, Artificial Sequence
  Description of Artificial Sequence: Synthetic oligonucleotide
  Antisense strand to SEQ ID NO: 245120
uucaacacuucacucagaa

SEQ ID NO: 245122 - RNA, 19 nt, Artificial Sequence
  Description of Artificial Sequence: Synthetic oligonucleotide
  Sense strand starting at position 2353 SEQ ID NO: 3154
gccucagagcuacacagau

SEQ ID NO: 245123 - RNA, 19 nt, Artificial Sequence
  Description of Artificial Sequence: Synthetic oligonucleotide
  Antisense strand to SEQ ID NO: 245122
aucuguguagcucugaggc

SEQ ID NO: 245124 - RNA, 19 nt, Artificial Sequence
  Description of Artificial Sequence: Synthetic oligonucleotide
  Sense strand starting at position 2370 SEQ ID NO: 3154
auguauggcuuccugaaag

SEQ ID NO: 245125 - RNA, 19 nt, Artificial Sequence
  Description of Artificial Sequence: Synthetic oligonucleotide
  Antisense strand to SEQ ID NO: 245124
cuuucaggaagccauacau

SEQ ID NO: 245126 - RNA, 19 nt, Artificial Sequence
  Description of Artificial Sequence: Synthetic oligonucleotide
  Sense strand starting at position 2499 SEQ ID NO: 3154
gagguaauguccucuugaa

SEQ ID NO: 245127 - RNA, 19 nt, Artificial Sequence
  Description of Artificial Sequence: Synthetic oligonucleotide
  Antisense strand to SEQ ID NO: 245126
uucaagaggacauuaccuc

SEQ ID NO: 245128 - RNA, 19 nt, Artificial Sequence
  Description of Artificial Sequence: Synthetic oligonucleotide
  Sense strand starting at position 2809 SEQ ID NO: 3154
gccagugggagguaugaga

SEQ ID NO: 245129 - RNA, 19 nt, Artificial Sequence
  Description of Artificial Sequence: Synthetic oligonucleotide
  Antisense strand to SEQ ID NO: 245128
ucucauaccucccacuggc

SEQ ID NO: 245130 - RNA, 19 nt, Artificial Sequence
  Description of Artificial Sequence: Synthetic oligonucleotide
  Sense strand starting at position 2957 SEQ ID NO: 3154
cagguuucuucuguggaag

SEQ ID NO: 245131 - RNA, 19 nt, Artificial Sequence
  Description of Artificial Sequence: Synthetic oligonucleotide
  Antisense strand to SEQ ID NO: 245130
cuuccacagaagaaaccug

SEQ ID NO: 245132 - RNA, 19 nt, Artificial Sequence
  Description of Artificial Sequence: Synthetic oligonucleotide
  Sense strand starting at position 3032 SEQ ID NO: 3154
ggucacacaucuccaguaa

SEQ ID NO: 245133 - RNA, 19 nt, Artificial Sequence
  Description of Artificial Sequence: Synthetic oligonucleotide
  Antisense strand to SEQ ID NO: 245132
uuacuggagaugugugacc

SEQ ID NO: 245134 - RNA, 19 nt, Artificial Sequence
  Description of Artificial Sequence: Synthetic oligonucleotide
  Sense strand starting at position 3347 SEQ ID NO: 3154
ugccauaaaccagagaguu

SEQ ID NO: 245135 - RNA, 19 nt, Artificial Sequence
  Description of Artificial Sequence: Synthetic oligonucleotide
  Antisense strand to SEQ ID NO: 245134
aacucucugguuuauggca

SEQ ID NO: 245136 - RNA, 19 nt, Artificial Sequence
  Description of Artificial Sequence: Synthetic oligonucleotide
  Sense strand starting at position 3360 SEQ ID NO: 3154
agaguuccuguucaaggga

SEQ ID NO: 245137 - RNA, 19 nt, Artificial Sequence
  Description of Artificial Sequence: Synthetic oligonucleotide
  Antisense strand to SEQ ID NO: 245136
ucccuugaacaggaacucu

SEQ ID NO: 245138 - RNA, 19 nt, Artificial Sequence
  Description of Artificial Sequence: Synthetic oligonucleotide
  Sense strand starting at position 3373 SEQ ID NO: 3154
aagggaaguacacguuuga

SEQ ID NO: 245139 - RNA, 19 nt, Artificial Sequence
  Description of Artificial Sequence: Synthetic oligonucleotide
  Antisense strand to SEQ ID NO: 245138
ucaaacguguacuucccuu

SEQ ID NO: 245140 - RNA, 19 nt, Artificial Sequence
  Description of Artificial Sequence: Synthetic oligonucleotide
  Sense strand starting at position 3377 SEQ ID NO: 3154
gaaguacacguuugaacca

SEQ ID NO: 245141 - RNA, 19 nt, Artificial Sequence
  Description of Artificial Sequence: Synthetic oligonucleotide
  Antisense strand to SEQ ID NO: 245140
ugguucaaacguguacuuc

SEQ ID NO: 245142 - RNA, 19 nt, Artificial Sequence
  Description of Artificial Sequence: Synthetic oligonucleotide
  Sense strand starting at position 3478 SEQ ID NO: 3154
cgaggaaauuguguugauu

SEQ ID NO: 245143 - RNA, 19 nt, Artificial Sequence
  Description of Artificial Sequence: Synthetic oligonucleotide
  Antisense strand to SEQ ID NO: 245142
aaucaacacaauuuccucg

SEQ ID NO: 245144 - RNA, 19 nt, Artificial Sequence
  Description of Artificial Sequence: Synthetic oligonucleotide
  Sense strand starting at position 3489 SEQ ID NO: 3154
uguugauuuccaggcucca

SEQ ID NO: 245145 - RNA, 19 nt, Artificial Sequence
  Description of Artificial Sequence: Synthetic oligonucleotide
  Antisense strand to SEQ ID NO: 245144
uggagccuggaaaucaaca

SEQ ID NO: 245146 - RNA, 19 nt, Artificial Sequence
  Description of Artificial Sequence: Synthetic oligonucleotide
  Sense strand starting at position 3514 SEQ ID NO: 3154
gacuguaaaccuuggauug

SEQ ID NO: 245147 - RNA, 19 nt, Artificial Sequence
  Description of Artificial Sequence: Synthetic oligonucleotide
  Antisense strand to SEQ ID NO: 245146
caauccaagguuuacaguc

SEQ ID NO: 245148 - RNA, 19 nt, Artificial Sequence
  Description of Artificial Sequence: Synthetic oligonucleotide
  Sense strand starting at position 3515 SEQ ID NO: 3154
acuguaaaccuuggauuga

SEQ ID NO: 245149 - RNA, 19 nt, Artificial Sequence
  Description of Artificial Sequence: Synthetic oligonucleotide
  Antisense strand to SEQ ID NO: 245148
ucaauccaagguuuacagu

SEQ ID NO: 245150 - RNA, 19 nt, Artificial Sequence
  Description of Artificial Sequence: Synthetic oligonucleotide
  Sense strand starting at position 3670 SEQ ID NO: 3154
uggaaaguuccugggcuau

SEQ ID NO: 245151 - RNA, 19 nt, Artificial Sequence
  Description of Artificial Sequence: Synthetic oligonucleotide
  Antisense strand to SEQ ID NO: 245150
auagcccaggaacuuucca

SEQ ID NO: 245152 - RNA, 19 nt, Artificial Sequence
  Description of Artificial Sequence: Synthetic oligonucleotide
  Sense strand starting at position 3682 SEQ ID NO: 3154
gggcuauuccuacaaagca

SEQ ID NO: 245153 - RNA, 19 nt, Artificial Sequence
  Description of Artificial Sequence: Synthetic oligonucleotide
  Antisense strand to SEQ ID NO: 245152
ugcuuuguaggaauagccc

SEQ ID NO: 245154 - RNA, 19 nt, Artificial Sequence
  Description of Artificial Sequence: Synthetic oligonucleotide
  Sense strand starting at position 88 SEQ ID NO: 3153
gcugacauccuaugucuua

SEQ ID NO: 245155 - RNA, 19 nt, Artificial Sequence
  Description of Artificial Sequence: Synthetic oligonucleotide
  Antisense strand to SEQ ID NO: 245154
uaagacauaggaugucagc

SEQ ID NO: 245156 - RNA, 19 nt, Artificial Sequence
  Description of Artificial Sequence: Synthetic oligonucleotide
  Sense strand starting at position 111 SEQ ID NO: 3153
gaagacucauguccauaag

SEQ ID NO: 245157 - RNA, 19 nt, Artificial Sequence
  Description of Artificial Sequence: Synthetic oligonucleotide
  Antisense strand to SEQ ID NO: 245156
cuuauggacaugagucuuc

SEQ ID NO: 245158 - RNA, 19 nt, Artificial Sequence
  Description of Artificial Sequence: Synthetic oligonucleotide
  Sense strand starting at position 548 SEQ ID NO: 3153
ggcucuaccuuucugucua

SEQ ID NO: 245159 - RNA, 19 nt, Artificial Sequence
  Description of Artificial Sequence: Synthetic oligonucleotide
  Antisense strand to SEQ ID NO: 245158
uagacagaaagguagagcc

SEQ ID NO: 245160 - RNA, 19 nt, Artificial Sequence
  Description of Artificial Sequence: Synthetic oligonucleotide
  Sense strand starting at position 552 SEQ ID NO: 3153
cuaccuuucugucuagcau

SEQ ID NO: 245161 - RNA, 19 nt, Artificial Sequence
  Description of Artificial Sequence: Synthetic oligonucleotide
  Antisense strand to SEQ ID NO: 245160
augcuagacagaaagguag

SEQ ID NO: 245162 - RNA, 19 nt, Artificial Sequence
  Description of Artificial Sequence: Synthetic oligonucleotide
  Sense strand starting at position 571 SEQ ID NO: 3153
aaacguuaacaucggauau

SEQ ID NO: 245163 - RNA, 19 nt, Artificial Sequence
  Description of Artificial Sequence: Synthetic oligonucleotide
  Antisense strand to SEQ ID NO: 245162
auauccgauguuaacguuu

SEQ ID NO: 245164 - RNA, 19 nt, Artificial Sequence
  Description of Artificial Sequence: Synthetic oligonucleotide
  Sense strand starting at position 664 SEQ ID NO: 3153
ugccaauagccgcuuggua

SEQ ID NO: 245165 - RNA, 19 nt, Artificial Sequence
  Description of Artificial Sequence: Synthetic oligonucleotide
  Antisense strand to SEQ ID NO: 245164
uaccaagcggcuauuggca

SEQ ID NO: 245166 - RNA, 19 nt, Artificial Sequence
  Description of Artificial Sequence: Synthetic oligonucleotide
  Sense strand starting at position 665 SEQ ID NO: 3153
gccaauagccgcuugguaa

SEQ ID NO: 245167 - RNA, 19 nt, Artificial Sequence
  Description of Artificial Sequence: Synthetic oligonucleotide
  Antisense strand to SEQ ID NO: 245166
uuaccaagcggcuauuggc

SEQ ID NO: 245168 - RNA, 19 nt, Artificial Sequence
  Description of Artificial Sequence: Synthetic oligonucleotide
  Sense strand starting at position 666 SEQ ID NO: 3153
ccaauagccgcuugguaaa

SEQ ID NO: 245169 - RNA, 19 nt, Artificial Sequence
  Description of Artificial Sequence: Synthetic oligonucleotide
  Antisense strand to SEQ ID NO: 245168
uuuaccaagcggcuauugg

SEQ ID NO: 245170 - RNA, 19 nt, Artificial Sequence
  Description of Artificial Sequence: Synthetic oligonucleotide
  Sense strand starting at position 738 SEQ ID NO: 3153
gcucaucaauagucaugga

SEQ ID NO: 245171 - RNA, 19 nt, Artificial Sequence
  Description of Artificial Sequence: Synthetic oligonucleotide
  Antisense strand to SEQ ID NO: 245170
uccaugacuauugaugagc

SEQ ID NO: 245172 - RNA, 19 nt, Artificial Sequence
  Description of Artificial Sequence: Synthetic oligonucleotide
  Sense strand starting at position 819 SEQ ID NO: 3153
aucacauucccgugacgaa

SEQ ID NO: 245173 - RNA, 19 nt, Artificial Sequence
  Description of Artificial Sequence: Synthetic oligonucleotide
  Antisense strand to SEQ ID NO: 245172
uucgucacgggaaugugau

SEQ ID NO: 245174 - RNA, 19 nt, Artificial Sequence
  Description of Artificial Sequence: Synthetic oligonucleotide
  Sense strand starting at position 820 SEQ ID NO: 3153
ucacauucccgugacgaau

SEQ ID NO: 245175 - RNA, 19 nt, Artificial Sequence
  Description of Artificial Sequence: Synthetic oligonucleotide
  Antisense strand to SEQ ID NO: 245174
auucgucacgggaauguga

SEQ ID NO: 245176 - RNA, 19 nt, Artificial Sequence
  Description of Artificial Sequence: Synthetic oligonucleotide
  Sense strand starting at position 884 SEQ ID NO: 3153
uugccucaguuccuagaau

SEQ ID NO: 245177 - RNA, 19 nt, Artificial Sequence
  Description of Artificial Sequence: Synthetic oligonucleotide
  Antisense strand to SEQ ID NO: 245176
auucuaggaacugaggcaa

SEQ ID NO: 245178 - RNA, 19 nt, Artificial Sequence
  Description of Artificial Sequence: Synthetic oligonucleotide
  Sense strand starting at position 917 SEQ ID NO: 3153
caggaauguggccaucuga

SEQ ID NO: 245179 - RNA, 19 nt, Artificial Sequence
  Description of Artificial Sequence: Synthetic oligonucleotide
  Antisense strand to SEQ ID NO: 245178
ucagauggccacauuccug

SEQ ID NO: 245180 - RNA, 19 nt, Artificial Sequence
  Description of Artificial Sequence: Synthetic oligonucleotide
  Sense strand starting at position 1127 SEQ ID NO: 3153
ccaacaaguuggucaccua

SEQ ID NO: 245181 - RNA, 19 nt, Artificial Sequence
  Description of Artificial Sequence: Synthetic oligonucleotide
  Antisense strand to SEQ ID NO: 245180
uaggugaccaacuuguugg

SEQ ID NO: 245182 - RNA, 19 nt, Artificial Sequence
  Description of Artificial Sequence: Synthetic oligonucleotide
  Sense strand starting at position 1130 SEQ ID NO: 3153
acaaguuggucaccuaaac

SEQ ID NO: 245183 - RNA, 19 nt, Artificial Sequence
  Description of Artificial Sequence: Synthetic oligonucleotide
  Antisense strand to SEQ ID NO: 245182
guuuaggugaccaacuugu

SEQ ID NO: 245184 - RNA, 19 nt, Artificial Sequence
  Description of Artificial Sequence: Synthetic oligonucleotide
  Sense strand starting at position 1228 SEQ ID NO: 3153
cugucaagggcuuauaaac

SEQ ID NO: 245185 - RNA, 19 nt, Artificial Sequence
  Description of Artificial Sequence: Synthetic oligonucleotide
  Antisense strand to SEQ ID NO: 245184
guuuauaagcccuugacag

SEQ ID NO: 245186 - RNA, 19 nt, Artificial Sequence
  Description of Artificial Sequence: Synthetic oligonucleotide
  Sense strand starting at position 1235 SEQ ID NO: 3153
gggcuuauaaacuguaaag

SEQ ID NO: 245187 - RNA, 19 nt, Artificial Sequence
  Description of Artificial Sequence: Synthetic oligonucleotide
  Antisense strand to SEQ ID NO: 245186
cuuuacaguuuauaagccc

SEQ ID NO: 245188 - RNA, 19 nt, Artificial Sequence
  Description of Artificial Sequence: Synthetic oligonucleotide
  Sense strand starting at position 1237 SEQ ID NO: 3153
gcuuauaaacuguaaagug

SEQ ID NO: 245189 - RNA, 19 nt, Artificial Sequence
  Description of Artificial Sequence: Synthetic oligonucleotide
  Antisense strand to SEQ ID NO: 245188
cacuuuacaguuuauaagc

SEQ ID NO: 245190 - RNA, 19 nt, Artificial Sequence
  Description of Artificial Sequence: Synthetic oligonucleotide
  Sense strand starting at position 1270 SEQ ID NO: 3153
uguaaauaaugagugucuu

SEQ ID NO: 245191 - RNA, 19 nt, Artificial Sequence
  Description of Artificial Sequence: Synthetic oligonucleotide
  Antisense strand to SEQ ID NO: 245190
aagacacucauuauuuaca

SEQ ID NO: 245192 - RNA, 19 nt, Artificial Sequence
  Description of Artificial Sequence: Synthetic oligonucleotide
  Sense strand starting at position 1271 SEQ ID NO: 3153
guaaauaaugagugucuuc

SEQ ID NO: 245193 - RNA, 19 nt, Artificial Sequence
  Description of Artificial Sequence: Synthetic oligonucleotide
  Antisense strand to SEQ ID NO: 245192
gaagacacucauuauuuac

SEQ ID NO: 245194 - RNA, 19 nt, Artificial Sequence
  Description of Artificial Sequence: Synthetic oligonucleotide
  Sense strand starting at position 1382 SEQ ID NO: 3153
gcccuuaccuuguuaagga

SEQ ID NO: 245195 - RNA, 19 nt, Artificial Sequence
  Description of Artificial Sequence: Synthetic oligonucleotide
  Antisense strand to SEQ ID NO: 245194
uccuuaacaagguaagggc

SEQ ID NO: 245196 - RNA, 19 nt, Artificial Sequence
  Description of Artificial Sequence: Synthetic oligonucleotide
  Sense strand starting at position 1435 SEQ ID NO: 3153
cgcuccugaaccuguagaa

SEQ ID NO: 245197 - RNA, 19 nt, Artificial Sequence
  Description of Artificial Sequence: Synthetic oligonucleotide
  Antisense strand to SEQ ID NO: 245196
uucuacagguucaggagcg

SEQ ID NO: 245198 - RNA, 19 nt, Artificial Sequence
  Description of Artificial Sequence: Synthetic oligonucleotide
  Sense strand starting at position 1559 SEQ ID NO: 3153
cguuaacucuugcuccaca

SEQ ID NO: 245199 - RNA, 19 nt, Artificial Sequence
  Description of Artificial Sequence: Synthetic oligonucleotide
  Antisense strand to SEQ ID NO: 245198
uguggagcaagaguuaacg

SEQ ID NO: 245200 - RNA, 19 nt, Artificial Sequence
  Description of Artificial Sequence: Synthetic oligonucleotide
  Sense strand starting at position 2295 SEQ ID NO: 3153
ccacuagaguuaguugaga

SEQ ID NO: 245201 - RNA, 19 nt, Artificial Sequence
  Description of Artificial Sequence: Synthetic oligonucleotide
  Antisense strand to SEQ ID NO: 245200
ucucaacuaacucuagugg

SEQ ID NO: 245202 - RNA, 19 nt, Artificial Sequence
  Description of Artificial Sequence: Synthetic oligonucleotide
  Sense strand starting at position 2297 SEQ ID NO: 3153
acuagaguuaguugagaca

SEQ ID NO: 245203 - RNA, 19 nt, Artificial Sequence
  Description of Artificial Sequence: Synthetic oligonucleotide
  Antisense strand to SEQ ID NO: 245202
ugucucaacuaacucuagu

SEQ ID NO: 245204 - RNA, 19 nt, Artificial Sequence
  Description of Artificial Sequence: Synthetic oligonucleotide
  Sense strand starting at position 2371 SEQ ID NO: 3153
ccgcgaauugaguuggcga

SEQ ID NO: 245205 - RNA, 19 nt, Artificial Sequence
  Description of Artificial Sequence: Synthetic oligonucleotide
  Antisense strand to SEQ ID NO: 245204
ucgccaacucaauucgcgg

SEQ ID NO: 245206 - RNA, 19 nt, Artificial Sequence
  Description of Artificial Sequence: Synthetic oligonucleotide
  Sense strand starting at position 2397 SEQ ID NO: 3153
gcaucagaucccgaagcaa

SEQ ID NO: 245207 - RNA, 19 nt, Artificial Sequence
  Description of Artificial Sequence: Synthetic oligonucleotide
  Antisense strand to SEQ ID NO: 245206
uugcuucgggaucugaugc

SEQ ID NO: 245208 - RNA, 19 nt, Artificial Sequence
  Description of Artificial Sequence: Synthetic oligonucleotide
  Sense strand starting at position 2469 SEQ ID NO: 3153
acuggcuuugugcacuaau

SEQ ID NO: 245209 - RNA, 19 nt, Artificial Sequence
  Description of Artificial Sequence: Synthetic oligonucleotide
  Antisense strand to SEQ ID NO: 245208
auuagugcacaaagccagu

SEQ ID NO: 245210 - RNA, 19 nt, Artificial Sequence
  Description of Artificial Sequence: Synthetic oligonucleotide
  Sense strand starting at position 2472 SEQ ID NO: 3153
ggcuuugugcacuaauuuc

SEQ ID NO: 245211 - RNA, 19 nt, Artificial Sequence
  Description of Artificial Sequence: Synthetic oligonucleotide
  Antisense strand to SEQ ID NO: 245210
gaaauuagugcacaaagcc

SEQ ID NO: 245212 - RNA, 19 nt, Artificial Sequence
  Description of Artificial Sequence: Synthetic oligonucleotide
  Sense strand starting at position 2478 SEQ ID NO: 3153
gugcacuaauuucuuugua

SEQ ID NO: 245213 - RNA, 19 nt, Artificial Sequence
  Description of Artificial Sequence: Synthetic oligonucleotide
  Antisense strand to SEQ ID NO: 245212
uacaaagaaauuagugcac

SEQ ID NO: 245214 - RNA, 19 nt, Artificial Sequence
  Description of Artificial Sequence: Synthetic oligonucleotide
  Sense strand starting at position 2540 SEQ ID NO: 3153
aucucauggagugguugaa

SEQ ID NO: 245215 - RNA, 19 nt, Artificial Sequence
  Description of Artificial Sequence: Synthetic oligonucleotide
  Antisense strand to SEQ ID NO: 245214
uucaaccacuccaugagau

SEQ ID NO: 245216 - RNA, 19 nt, Artificial Sequence
  Description of Artificial Sequence: Synthetic oligonucleotide
  Sense strand starting at position 2626 SEQ ID NO: 3153
acgcguuaucugcugguuu

SEQ ID NO: 245217 - RNA, 19 nt, Artificial Sequence
  Description of Artificial Sequence: Synthetic oligonucleotide
  Antisense strand to SEQ ID NO: 245216
aaaccagcagauaacgcgu

SEQ ID NO: 245218 - RNA, 19 nt, Artificial Sequence
  Description of Artificial Sequence: Synthetic oligonucleotide
  Sense strand starting at position 2774 SEQ ID NO: 3153
ucacuuugccaaugagaau

SEQ ID NO: 245219 - RNA, 19 nt, Artificial Sequence
  Description of Artificial Sequence: Synthetic oligonucleotide
  Antisense strand to SEQ ID NO: 245218
auucucauuggcaaaguga

SEQ ID NO: 245220 - RNA, 19 nt, Artificial Sequence
  Description of Artificial Sequence: Synthetic oligonucleotide
  Sense strand starting at position 2977 SEQ ID NO: 3153
ggaggucuucaugggccau

SEQ ID NO: 245221 - RNA, 19 nt, Artificial Sequence
  Description of Artificial Sequence: Synthetic oligonucleotide
  Antisense strand to SEQ ID NO: 245220
auggcccaugaagaccucc

SEQ ID NO: 245222 - RNA, 19 nt, Artificial Sequence
  Description of Artificial Sequence: Synthetic oligonucleotide
  Sense strand starting at position 2991 SEQ ID NO: 3153
gccauccuccaagaagagu

SEQ ID NO: 245223 - RNA, 19 nt, Artificial Sequence
  Description of Artificial Sequence: Synthetic oligonucleotide
  Antisense strand to SEQ ID NO: 245222
acucuucuuggaggauggc

SEQ ID NO: 245224 - RNA, 19 nt, Artificial Sequence
  Description of Artificial Sequence: Synthetic oligonucleotide
  Sense strand starting at position 3329 SEQ ID NO: 3153
aggccagugacguagcauu

SEQ ID NO: 245225 - RNA, 19 nt, Artificial Sequence
  Description of Artificial Sequence: Synthetic oligonucleotide
  Antisense strand to SEQ ID NO: 245224
aaugcuacgucacuggccu

SEQ ID NO: 245226 - RNA, 19 nt, Artificial Sequence
  Description of Artificial Sequence: Synthetic oligonucleotide
  Sense strand starting at position 3517 SEQ ID NO: 3153
agguaauuccagugcagcu

SEQ ID NO: 245227 - RNA, 19 nt, Artificial Sequence
  Description of Artificial Sequence: Synthetic oligonucleotide
  Antisense strand to SEQ ID NO: 245226
agcugcacuggaauuaccu

SEQ ID NO: 245228 - RNA, 19 nt, Artificial Sequence
  Description of Artificial Sequence: Synthetic oligonucleotide
  Sense strand starting at position 3546 SEQ ID NO: 3153
gcaguuguuccucuaagcu

SEQ ID NO: 245229 - RNA, 19 nt, Artificial Sequence
  Description of Artificial Sequence: Synthetic oligonucleotide
  Antisense strand to SEQ ID NO: 245228
agcuuagaggaacaacugc

SEQ ID NO: 245230 - RNA, 19 nt, Artificial Sequence
  Description of Artificial Sequence: Synthetic oligonucleotide
  Sense strand starting at position 3583 SEQ ID NO: 3153
cugugaauccuccaacuga

SEQ ID NO: 245231 - RNA, 19 nt, Artificial Sequence
  Description of Artificial Sequence: Synthetic oligonucleotide
  Antisense strand to SEQ ID NO: 245230
ucaguuggaggauucacag

SEQ ID NO: 245232 - RNA, 19 nt, Artificial Sequence
  Description of Artificial Sequence: Synthetic oligonucleotide
  Sense strand starting at position 3743 SEQ ID NO: 3153
gcaguuuacaaguagaaag

SEQ ID NO: 245233 - RNA, 19 nt, Artificial Sequence
  Description of Artificial Sequence: Synthetic oligonucleotide
  Antisense strand to SEQ ID NO: 245232
cuuucuacuuguaaacugc

SEQ ID NO: 245234 - RNA, 19 nt, Artificial Sequence
  Description of Artificial Sequence: Synthetic oligonucleotide
  Sense strand starting at position 34 SEQ ID NO: 3155
aagaucuuacagcagaguu

SEQ ID NO: 245235 - RNA, 19 nt, Artificial Sequence
  Description of Artificial Sequence: Synthetic oligonucleotide
  Antisense strand to SEQ ID NO: 245234
aacucugcuguaagaucuu

SEQ ID NO: 245236 - RNA, 19 nt, Artificial Sequence
  Description of Artificial Sequence: Synthetic oligonucleotide
  Sense strand starting at position 151 SEQ ID NO: 3155
aacugugugccaugauuua

SEQ ID NO: 245237 - RNA, 19 nt, Artificial Sequence
  Description of Artificial Sequence: Synthetic oligonucleotide
  Antisense strand to SEQ ID NO: 245236
uaaaucauggcacacaguu

SEQ ID NO: 245238 - RNA, 19 nt, Artificial Sequence
  Description of Artificial Sequence: Synthetic oligonucleotide
  Sense strand starting at position 343 SEQ ID NO: 3155
ucaggcaacuuuccugauu

SEQ ID NO: 245239 - RNA, 19 nt, Artificial Sequence
  Description of Artificial Sequence: Synthetic oligonucleotide
  Antisense strand to SEQ ID NO: 245238
aaucaggaaaguugccuga

SEQ ID NO: 245240 - RNA, 19 nt, Artificial Sequence
  Description of Artificial Sequence: Synthetic oligonucleotide
  Sense strand starting at position 432 SEQ ID NO: 3155
accuuaaguccugagugcu

SEQ ID NO: 245241 - RNA, 19 nt, Artificial Sequence
  Description of Artificial Sequence: Synthetic oligonucleotide
  Antisense strand to SEQ ID NO: 245240
agcacucaggacuuaaggu

SEQ ID NO: 245242 - RNA, 19 nt, Artificial Sequence
  Description of Artificial Sequence: Synthetic oligonucleotide
  Sense strand starting at position 440 SEQ ID NO: 3155
uccugagugcuugauacua

SEQ ID NO: 245243 - RNA, 19 nt, Artificial Sequence
  Description of Artificial Sequence: Synthetic oligonucleotide
  Antisense strand to SEQ ID NO: 245242
uaguaucaagcacucagga

SEQ ID NO: 245244 - RNA, 19 nt, Artificial Sequence
  Description of Artificial Sequence: Synthetic oligonucleotide
  Sense strand starting at position 448 SEQ ID NO: 3155
gcuugauacuacuuggauu

SEQ ID NO: 245245 - RNA, 19 nt, Artificial Sequence
  Description of Artificial Sequence: Synthetic oligonucleotide
  Antisense strand to SEQ ID NO: 245244
aauccaaguaguaucaagc

SEQ ID NO: 245246 - RNA, 19 nt, Artificial Sequence
  Description of Artificial Sequence: Synthetic oligonucleotide
  Sense strand starting at position 647 SEQ ID NO: 3155
ccgagagccaggcauuaga

SEQ ID NO: 245247 - RNA, 19 nt, Artificial Sequence
  Description of Artificial Sequence: Synthetic oligonucleotide
  Antisense strand to SEQ ID NO: 245246
ucuaaugccuggcucucgg

SEQ ID NO: 245248 - RNA, 19 nt, Artificial Sequence
  Description of Artificial Sequence: Synthetic oligonucleotide
  Sense strand starting at position 664 SEQ ID NO: 3155
gagaauccacagugacuuu

SEQ ID NO: 245249 - RNA, 19 nt, Artificial Sequence
  Description of Artificial Sequence: Synthetic oligonucleotide
  Antisense strand to SEQ ID NO: 245248
aaagucacuguggauucuc

SEQ ID NO: 245250 - RNA, 19 nt, Artificial Sequence
  Description of Artificial Sequence: Synthetic oligonucleotide
  Sense strand starting at position 788 SEQ ID NO: 3155
cucagugguccgcuaucuu

SEQ ID NO: 245251 - RNA, 19 nt, Artificial Sequence
  Description of Artificial Sequence: Synthetic oligonucleotide
  Antisense strand to SEQ ID NO: 245250
aagauagcggaccacugag

SEQ ID NO: 245252 - RNA, 19 nt, Artificial Sequence
  Description of Artificial Sequence: Synthetic oligonucleotide
  Sense strand starting at position 828 SEQ ID NO: 3155
uuacuuguggccuagaauc

SEQ ID NO: 245253 - RNA, 19 nt, Artificial Sequence
  Description of Artificial Sequence: Synthetic oligonucleotide
  Antisense strand to SEQ ID NO: 245252
gauucuaggccacaaguaa

SEQ ID NO: 245254 - RNA, 19 nt, Artificial Sequence
  Description of Artificial Sequence: Synthetic oligonucleotide
  Sense strand starting at position 830 SEQ ID NO: 3155
acuuguggccuagaaucau

SEQ ID NO: 245255 - RNA, 19 nt, Artificial Sequence
  Description of Artificial Sequence: Synthetic oligonucleotide
  Antisense strand to SEQ ID NO: 245254
augauucuaggccacaagu

SEQ ID NO: 245256 - RNA, 19 nt, Artificial Sequence
  Description of Artificial Sequence: Synthetic oligonucleotide
  Sense strand starting at position 988 SEQ ID NO: 3155
guuccugaggucuggagaa

SEQ ID NO: 245257 - RNA, 19 nt, Artificial Sequence
  Description of Artificial Sequence: Synthetic oligonucleotide
  Antisense strand to SEQ ID NO: 245256
uucuccagaccucaggaac

SEQ ID NO: 245258 - RNA, 19 nt, Artificial Sequence
  Description of Artificial Sequence: Synthetic oligonucleotide
  Sense strand starting at position 1021 SEQ ID NO: 3155
cugagccuccaccagaaau

SEQ ID NO: 245259 - RNA, 19 nt, Artificial Sequence
  Description of Artificial Sequence: Synthetic oligonucleotide
  Antisense strand to SEQ ID NO: 245258
auuucugguggaggcucag

SEQ ID NO: 245260 - RNA, 19 nt, Artificial Sequence
  Description of Artificial Sequence: Synthetic oligonucleotide
  Sense strand starting at position 2032 SEQ ID NO: 3155
aguacaugaucacccagau

SEQ ID NO: 245261 - RNA, 19 nt, Artificial Sequence
  Description of Artificial Sequence: Synthetic oligonucleotide
  Antisense strand to SEQ ID NO: 245260
aucugggugaucauguacu

SEQ ID NO: 245262 - RNA, 19 nt, Artificial Sequence
  Description of Artificial Sequence: Synthetic oligonucleotide
  Sense strand starting at position 2063 SEQ ID NO: 3155
aaggaaacgccgcauaagu

SEQ ID NO: 245263 - RNA, 19 nt, Artificial Sequence
  Description of Artificial Sequence: Synthetic oligonucleotide
  Antisense strand to SEQ ID NO: 245262
acuuaugcggcguuuccuu

SEQ ID NO: 245264 - RNA, 19 nt, Artificial Sequence
  Description of Artificial Sequence: Synthetic oligonucleotide
  Sense strand starting at position 2073 SEQ ID NO: 3155
cgcauaaguuucccuauuu

SEQ ID NO: 245265 - RNA, 19 nt, Artificial Sequence
  Description of Artificial Sequence: Synthetic oligonucleotide
  Antisense strand to SEQ ID NO: 245264
aaauagggaaacuuaugcg

SEQ ID NO: 245266 - RNA, 19 nt, Artificial Sequence
  Description of Artificial Sequence: Synthetic oligonucleotide
  Sense strand starting at position 2197 SEQ ID NO: 3155
aucuuuagccaguggaaga

SEQ ID NO: 245267 - RNA, 19 nt, Artificial Sequence
  Description of Artificial Sequence: Synthetic oligonucleotide
  Antisense strand to SEQ ID NO: 245266
ucuuccacuggcuaaagau

SEQ ID NO: 245268 - RNA, 19 nt, Artificial Sequence
  Description of Artificial Sequence: Synthetic oligonucleotide
  Sense strand starting at position 2302 SEQ ID NO: 3155
uuaacuguuaagugaagga

SEQ ID NO: 245269 - RNA, 19 nt, Artificial Sequence
  Description of Artificial Sequence: Synthetic oligonucleotide
  Antisense strand to SEQ ID NO: 245268
uccuucacuuaacaguuaa

SEQ ID NO: 245270 - RNA, 19 nt, Artificial Sequence
  Description of Artificial Sequence: Synthetic oligonucleotide
  Sense strand starting at position 2350 SEQ ID NO: 3155
gauuguggaguuugcagaa

SEQ ID NO: 245271 - RNA, 19 nt, Artificial Sequence
  Description of Artificial Sequence: Synthetic oligonucleotide
  Antisense strand to SEQ ID NO: 245270
uucugcaaacuccacaauc

SEQ ID NO: 245272 - RNA, 19 nt, Artificial Sequence
  Description of Artificial Sequence: Synthetic oligonucleotide
  Sense strand starting at position 2359 SEQ ID NO: 3155
guuugcagaacugaauagu

SEQ ID NO: 245273 - RNA, 19 nt, Artificial Sequence
  Description of Artificial Sequence: Synthetic oligonucleotide
  Antisense strand to SEQ ID NO: 245272
acuauucaguucugcaaac

SEQ ID NO: 245274 - RNA, 19 nt, Artificial Sequence
  Description of Artificial Sequence: Synthetic oligonucleotide
  Sense strand starting at position 2370 SEQ ID NO: 3155
ugaauaguuugucuucuga

SEQ ID NO: 245275 - RNA, 19 nt, Artificial Sequence
  Description of Artificial Sequence: Synthetic oligonucleotide
  Antisense strand to SEQ ID NO: 245274
ucagaagacaaacuauuca

SEQ ID NO: 245276 - RNA, 19 nt, Artificial Sequence
  Description of Artificial Sequence: Synthetic oligonucleotide
  Sense strand starting at position 2380 SEQ ID NO: 3155
gucuucugaaagugggaau

SEQ ID NO: 245277 - RNA, 19 nt, Artificial Sequence
  Description of Artificial Sequence: Synthetic oligonucleotide
  Antisense strand to SEQ ID NO: 245276
auucccacuuucagaagac

SEQ ID NO: 245278 - RNA, 19 nt, Artificial Sequence
  Description of Artificial Sequence: Synthetic oligonucleotide
  Sense strand starting at position 2719 SEQ ID NO: 3155
cguuuaggaagagguguaa

SEQ ID NO: 245279 - RNA, 19 nt, Artificial Sequence
  Description of Artificial Sequence: Synthetic oligonucleotide
  Antisense strand to SEQ ID NO: 245278
uuacaccucuuccuaaacg

SEQ ID NO: 245280 - RNA, 19 nt, Artificial Sequence
  Description of Artificial Sequence: Synthetic oligonucleotide
  Sense strand starting at position 2748 SEQ ID NO: 3155
cuuuguuggugguuggaaa

SEQ ID NO: 245281 - RNA, 19 nt, Artificial Sequence
  Description of Artificial Sequence: Synthetic oligonucleotide
  Antisense strand to SEQ ID NO: 245280
uuuccaaccaccaacaaag

SEQ ID NO: 245282 - RNA, 19 nt, Artificial Sequence
  Description of Artificial Sequence: Synthetic oligonucleotide
  Sense strand starting at position 2918 SEQ ID NO: 3155
acaaauggcuaagucagaa

SEQ ID NO: 245283 - RNA, 19 nt, Artificial Sequence
  Description of Artificial Sequence: Synthetic oligonucleotide
  Antisense strand to SEQ ID NO: 245282
uucugacuuagccauuugu

SEQ ID NO: 245284 - RNA, 19 nt, Artificial Sequence
  Description of Artificial Sequence: Synthetic oligonucleotide
  Sense strand starting at position 2977 SEQ ID NO: 3155
augguaacucucgaaaguc

SEQ ID NO: 245285 - RNA, 19 nt, Artificial Sequence
  Description of Artificial Sequence: Synthetic oligonucleotide
  Antisense strand to SEQ ID NO: 245284
gacuuucgagaguuaccau

SEQ ID NO: 245286 - RNA, 19 nt, Artificial Sequence
  Description of Artificial Sequence: Synthetic oligonucleotide
  Sense strand starting at position 3032 SEQ ID NO: 3155
caauguuagagcuagguag

SEQ ID NO: 245287 - RNA, 19 nt, Artificial Sequence
  Description of Artificial Sequence: Synthetic oligonucleotide
  Antisense strand to SEQ ID NO: 245286
cuaccuagcucuaacauug

SEQ ID NO: 245288 - RNA, 19 nt, Artificial Sequence
  Description of Artificial Sequence: Synthetic oligonucleotide
  Sense strand starting at position 3034 SEQ ID NO: 3155
auguuagagcuagguagaa

SEQ ID NO: 245289 - RNA, 19 nt, Artificial Sequence
  Description of Artificial Sequence: Synthetic oligonucleotide
  Antisense strand to SEQ ID NO: 245288
uucuaccuagcucuaacau

SEQ ID NO: 245290 - RNA, 19 nt, Artificial Sequence
  Description of Artificial Sequence: Synthetic oligonucleotide
  Sense strand starting at position 3133 SEQ ID NO: 3155
gugaguaagcuguauugau

SEQ ID NO: 245291 - RNA, 19 nt, Artificial Sequence
  Description of Artificial Sequence: Synthetic oligonucleotide
  Antisense strand to SEQ ID NO: 245290
aucaauacagcuuacucac

SEQ ID NO: 245292 - RNA, 19 nt, Artificial Sequence
  Description of Artificial Sequence: Synthetic oligonucleotide
  Sense strand starting at position 3151 SEQ ID NO: 3155
uuuaaugguguguauaacu

SEQ ID NO: 245293 - RNA, 19 nt, Artificial Sequence
  Description of Artificial Sequence: Synthetic oligonucleotide
  Antisense strand to SEQ ID NO: 245292
aguuauacacaccauuaaa

SEQ ID NO: 245294 - RNA, 19 nt, Artificial Sequence
  Description of Artificial Sequence: Synthetic oligonucleotide
  Sense strand starting at position 3196 SEQ ID NO: 3155
cuguuuggaaacugugaau

SEQ ID NO: 245295 - RNA, 19 nt, Artificial Sequence
  Description of Artificial Sequence: Synthetic oligonucleotide
  Antisense strand to SEQ ID NO: 245294
auucacaguuuccaaacag

SEQ ID NO: 245296 - RNA, 19 nt, Artificial Sequence
  Description of Artificial Sequence: Synthetic oligonucleotide
  Sense strand starting at position 3231 SEQ ID NO: 3155
uguugagcaaaggguaaau

SEQ ID NO: 245297 - RNA, 19 nt, Artificial Sequence
  Description of Artificial Sequence: Synthetic oligonucleotide
  Antisense strand to SEQ ID NO: 245296
auuuacccuuugcucaaca

SEQ ID NO: 245298 - RNA, 19 nt, Artificial Sequence
  Description of Artificial Sequence: Synthetic oligonucleotide
  Sense strand starting at position 3371 SEQ ID NO: 3155
guaaguuucaaggguggga

SEQ ID NO: 245299 - RNA, 19 nt, Artificial Sequence
  Description of Artificial Sequence: Synthetic oligonucleotide
  Antisense strand to SEQ ID NO: 245298
ucccacccuugaaacuuac

SEQ ID NO: 245300 - RNA, 19 nt, Artificial Sequence
  Description of Artificial Sequence: Synthetic oligonucleotide
  Sense strand starting at position 3374 SEQ ID NO: 3155
aguuucaagggugggaauu

SEQ ID NO: 245301 - RNA, 19 nt, Artificial Sequence
  Description of Artificial Sequence: Synthetic oligonucleotide
  Antisense strand to SEQ ID NO: 245300
aauucccacccuugaaacu

SEQ ID NO: 245302 - RNA, 19 nt, Artificial Sequence
  Description of Artificial Sequence: Synthetic oligonucleotide
  Sense strand starting at position 3619 SEQ ID NO: 3155
gaguuaacugcugaucuug

SEQ ID NO: 245303 - RNA, 19 nt, Artificial Sequence
  Description of Artificial Sequence: Synthetic oligonucleotide
  Antisense strand to SEQ ID NO: 245302
caagaucagcaguuaacuc

SEQ ID NO: 245304 - RNA, 19 nt, Artificial Sequence
  Description of Artificial Sequence: Synthetic oligonucleotide
  Sense strand starting at position 3629 SEQ ID NO: 3155
cugaucuugugaucuauaa

SEQ ID NO: 245305 - RNA, 19 nt, Artificial Sequence
  Description of Artificial Sequence: Synthetic oligonucleotide
  Antisense strand to SEQ ID NO: 245304
uuauagaucacaagaucag

SEQ ID NO: 245306 - RNA, 19 nt, Artificial Sequence
  Description of Artificial Sequence: Synthetic oligonucleotide
  Sense strand starting at position 3911 SEQ ID NO: 3155
acagaauguucuguaccau

SEQ ID NO: 245307 - RNA, 19 nt, Artificial Sequence
  Description of Artificial Sequence: Synthetic oligonucleotide
  Antisense strand to SEQ ID NO: 245306
augguacagaacauucugu

SEQ ID NO: 245308 - RNA, 19 nt, Artificial Sequence
  Description of Artificial Sequence: Synthetic oligonucleotide
  Sense strand starting at position 3942 SEQ ID NO: 3155
ugagguuugaggugaaagu

SEQ ID NO: 245309 - RNA, 19 nt, Artificial Sequence
  Description of Artificial Sequence: Synthetic oligonucleotide
  Antisense strand to SEQ ID NO: 245308
acuuucaccucaaaccuca

SEQ ID NO: 245310 - RNA, 19 nt, Artificial Sequence
  Description of Artificial Sequence: Synthetic oligonucleotide
  Sense strand starting at position 3955 SEQ ID NO: 3155
gaaagucacccaggauguu

SEQ ID NO: 245311 - RNA, 19 nt, Artificial Sequence
  Description of Artificial Sequence: Synthetic oligonucleotide
  Antisense strand to SEQ ID NO: 245310
aacauccugggugacuuuc

SEQ ID NO: 245312 - RNA, 19 nt, Artificial Sequence
  Description of Artificial Sequence: Synthetic oligonucleotide
  Sense strand starting at position 3964 SEQ ID NO: 3155
ccaggauguuuauugcaaa

SEQ ID NO: 245313 - RNA, 19 nt, Artificial Sequence
  Description of Artificial Sequence: Synthetic oligonucleotide
  Antisense strand to SEQ ID NO: 245312
uuugcaauaaacauccugg

SEQ ID NO: 245314 - RNA, 19 nt, Artificial Sequence
  Description of Artificial Sequence: Synthetic oligonucleotide
  Sense strand starting at position 215 SEQ ID NO: 3156
gucugacaucauuaagugu

SEQ ID NO: 245315 - RNA, 19 nt, Artificial Sequence
  Description of Artificial Sequence: Synthetic oligonucleotide
  Antisense strand to SEQ ID NO: 245314
acacuuaaugaugucagac

SEQ ID NO: 245316 - RNA, 19 nt, Artificial Sequence
  Description of Artificial Sequence: Synthetic oligonucleotide
  Sense strand starting at position 218 SEQ ID NO: 3156
ugacaucauuaaguguuga

SEQ ID NO: 245317 - RNA, 19 nt, Artificial Sequence
  Description of Artificial Sequence: Synthetic oligonucleotide
  Antisense strand to SEQ ID NO: 245316
ucaacacuuaaugauguca

SEQ ID NO: 245318 - RNA, 19 nt, Artificial Sequence
  Description of Artificial Sequence: Synthetic oligonucleotide
  Sense strand starting at position 242 SEQ ID NO: 3156
ggcugaguaaugcacuaaa

SEQ ID NO: 245319 - RNA, 19 nt, Artificial Sequence
  Description of Artificial Sequence: Synthetic oligonucleotide
  Antisense strand to SEQ ID NO: 245318
uuuagugcauuacucagcc

SEQ ID NO: 245320 - RNA, 19 nt, Artificial Sequence
  Description of Artificial Sequence: Synthetic oligonucleotide
  Sense strand starting at position 245 SEQ ID NO: 3156
ugaguaaugcacuaaacac

SEQ ID NO: 245321 - RNA, 19 nt, Artificial Sequence
  Description of Artificial Sequence: Synthetic oligonucleotide
  Antisense strand to SEQ ID NO: 245320
guguuuagugcauuacuca

SEQ ID NO: 245322 - RNA, 19 nt, Artificial Sequence
  Description of Artificial Sequence: Synthetic oligonucleotide
  Sense strand starting at position 327 SEQ ID NO: 3156
accucuuuguaagcaagaa

SEQ ID NO: 245323 - RNA, 19 nt, Artificial Sequence
  Description of Artificial Sequence: Synthetic oligonucleotide
  Antisense strand to SEQ ID NO: 245322
uucuugcuuacaaagaggu

SEQ ID NO: 245324 - RNA, 19 nt, Artificial Sequence
  Description of Artificial Sequence: Synthetic oligonucleotide
  Sense strand starting at position 365 SEQ ID NO: 3156
agaugaguugcuuaagguc

SEQ ID NO: 245325 - RNA, 19 nt, Artificial Sequence
  Description of Artificial Sequence: Synthetic oligonucleotide
  Antisense strand to SEQ ID NO: 245324
gaccuuaagcaacucaucu

SEQ ID NO: 245326 - RNA, 19 nt, Artificial Sequence
  Description of Artificial Sequence: Synthetic oligonucleotide
  Sense strand starting at position 396 SEQ ID NO: 3156
aguguaagagcagggauua

SEQ ID NO: 245327 - RNA, 19 nt, Artificial Sequence
  Description of Artificial Sequence: Synthetic oligonucleotide
  Antisense strand to SEQ ID NO: 245326
uaaucccugcucuuacacu

SEQ ID NO: 245328 - RNA, 19 nt, Artificial Sequence
  Description of Artificial Sequence: Synthetic oligonucleotide
  Sense strand starting at position 397 SEQ ID NO: 3156
guguaagagcagggauuaa

SEQ ID NO: 245329 - RNA, 19 nt, Artificial Sequence
  Description of Artificial Sequence: Synthetic oligonucleotide
  Antisense strand to SEQ ID NO: 245328
uuaaucccugcucuuacac

SEQ ID NO: 245330 - RNA, 19 nt, Artificial Sequence
  Description of Artificial Sequence: Synthetic oligonucleotide
  Sense strand starting at position 415 SEQ ID NO: 3156
aaugcagaucugcauuagu

SEQ ID NO: 245331 - RNA, 19 nt, Artificial Sequence
  Description of Artificial Sequence: Synthetic oligonucleotide
  Antisense strand to SEQ ID NO: 245330
acuaaugcagaucugcauu

SEQ ID NO: 245332 - RNA, 19 nt, Artificial Sequence
  Description of Artificial Sequence: Synthetic oligonucleotide
  Sense strand starting at position 477 SEQ ID NO: 3156
uuagaugauuauguccaca

SEQ ID NO: 245333 - RNA, 19 nt, Artificial Sequence
  Description of Artificial Sequence: Synthetic oligonucleotide
  Antisense strand to SEQ ID NO: 245332
uguggacauaaucaucuaa

SEQ ID NO: 245334 - RNA, 19 nt, Artificial Sequence
  Description of Artificial Sequence: Synthetic oligonucleotide
  Sense strand starting at position 479 SEQ ID NO: 3156
agaugauuauguccacaau

SEQ ID NO: 245335 - RNA, 19 nt, Artificial Sequence
  Description of Artificial Sequence: Synthetic oligonucleotide
  Antisense strand to SEQ ID NO: 245334
auuguggacauaaucaucu

SEQ ID NO: 245336 - RNA, 19 nt, Artificial Sequence
  Description of Artificial Sequence: Synthetic oligonucleotide
  Sense strand starting at position 482 SEQ ID NO: 3156
ugauuauguccacaauggu

SEQ ID NO: 245337 - RNA, 19 nt, Artificial Sequence
  Description of Artificial Sequence: Synthetic oligonucleotide
  Antisense strand to SEQ ID NO: 245336
accauuguggacauaauca

SEQ ID NO: 245338 - RNA, 19 nt, Artificial Sequence
  Description of Artificial Sequence: Synthetic oligonucleotide
  Sense strand starting at position 506 SEQ ID NO: 3156
ggaacaauggcaugugaau

SEQ ID NO: 245339 - RNA, 19 nt, Artificial Sequence
  Description of Artificial Sequence: Synthetic oligonucleotide
  Antisense strand to SEQ ID NO: 245338
auucacaugccauuguucc

SEQ ID NO: 245340 - RNA, 19 nt, Artificial Sequence
  Description of Artificial Sequence: Synthetic oligonucleotide
  Sense strand starting at position 523 SEQ ID NO: 3156
auaguuuggccucaggauc

SEQ ID NO: 245341 - RNA, 19 nt, Artificial Sequence
  Description of Artificial Sequence: Synthetic oligonucleotide
  Antisense strand to SEQ ID NO: 245340
gauccugaggccaaacuau

SEQ ID NO: 245342 - RNA, 19 nt, Artificial Sequence
  Description of Artificial Sequence: Synthetic oligonucleotide
  Sense strand starting at position 553 SEQ ID NO: 3156
cuguuauagccagacagaa

SEQ ID NO: 245343 - RNA, 19 nt, Artificial Sequence
  Description of Artificial Sequence: Synthetic oligonucleotide
  Antisense strand to SEQ ID NO: 245342
uucugucuggcuauaacag

SEQ ID NO: 245344 - RNA, 19 nt, Artificial Sequence
  Description of Artificial Sequence: Synthetic oligonucleotide
  Sense strand starting at position 578 SEQ ID NO: 3156
cuccgauuuccuuaugccu

SEQ ID NO: 245345 - RNA, 19 nt, Artificial Sequence
  Description of Artificial Sequence: Synthetic oligonucleotide
  Antisense strand to SEQ ID NO: 245344
aggcauaaggaaaucggag

SEQ ID NO: 245346 - RNA, 19 nt, Artificial Sequence
  Description of Artificial Sequence: Synthetic oligonucleotide
  Sense strand starting at position 584 SEQ ID NO: 3156
uuuccuuaugccuggaaga

SEQ ID NO: 245347 - RNA, 19 nt, Artificial Sequence
  Description of Artificial Sequence: Synthetic oligonucleotide
  Antisense strand to SEQ ID NO: 245346
ucuuccaggcauaaggaaa

SEQ ID NO: 245348 - RNA, 19 nt, Artificial Sequence
  Description of Artificial Sequence: Synthetic oligonucleotide
  Sense strand starting at position 585 SEQ ID NO: 3156
uuccuuaugccuggaagaa

SEQ ID NO: 245349 - RNA, 19 nt, Artificial Sequence
  Description of Artificial Sequence: Synthetic oligonucleotide
  Antisense strand to SEQ ID NO: 245348
uucuuccaggcauaaggaa

SEQ ID NO: 245350 - RNA, 19 nt, Artificial Sequence
  Description of Artificial Sequence: Synthetic oligonucleotide
  Sense strand starting at position 842 SEQ ID NO: 3156
ucauguccguucucuauuu

SEQ ID NO: 245351 - RNA, 19 nt, Artificial Sequence
  Description of Artificial Sequence: Synthetic oligonucleotide
  Antisense strand to SEQ ID NO: 245350
aaauagagaacggacauga

SEQ ID NO: 245352 - RNA, 19 nt, Artificial Sequence
  Description of Artificial Sequence: Synthetic oligonucleotide
  Sense strand starting at position 945 SEQ ID NO: 3156
aucuccaucugaguagauu

SEQ ID NO: 245353 - RNA, 19 nt, Artificial Sequence
  Description of Artificial Sequence: Synthetic oligonucleotide
  Antisense strand to SEQ ID NO: 245352
aaucuacucagauggagau

SEQ ID NO: 245354 - RNA, 19 nt, Artificial Sequence
  Description of Artificial Sequence: Synthetic oligonucleotide
  Sense strand starting at position 946 SEQ ID NO: 3156
ucuccaucugaguagauua

SEQ ID NO: 245355 - RNA, 19 nt, Artificial Sequence
  Description of Artificial Sequence: Synthetic oligonucleotide
  Antisense strand to SEQ ID NO: 245354
uaaucuacucagauggaga

SEQ ID NO: 245356 - RNA, 19 nt, Artificial Sequence
  Description of Artificial Sequence: Synthetic oligonucleotide
  Sense strand starting at position 956 SEQ ID NO: 3156
aguagauuacacugcugga

SEQ ID NO: 245357 - RNA, 19 nt, Artificial Sequence
  Description of Artificial Sequence: Synthetic oligonucleotide
  Antisense strand to SEQ ID NO: 245356
uccagcaguguaaucuacu

SEQ ID NO: 245358 - RNA, 19 nt, Artificial Sequence
  Description of Artificial Sequence: Synthetic oligonucleotide
  Sense strand starting at position 1348 SEQ ID NO: 3156
cugucauugagugaauguu

SEQ ID NO: 245359 - RNA, 19 nt, Artificial Sequence
  Description of Artificial Sequence: Synthetic oligonucleotide
  Antisense strand to SEQ ID NO: 245358
aacauucacucaaugacag

SEQ ID NO: 245360 - RNA, 19 nt, Artificial Sequence
  Description of Artificial Sequence: Synthetic oligonucleotide
  Sense strand starting at position 2064 SEQ ID NO: 3156
cgaugaucacacuguuaac

SEQ ID NO: 245361 - RNA, 19 nt, Artificial Sequence
  Description of Artificial Sequence: Synthetic oligonucleotide
  Antisense strand to SEQ ID NO: 245360
guuaacagugugaucaucg

SEQ ID NO: 245362 - RNA, 19 nt, Artificial Sequence
  Description of Artificial Sequence: Synthetic oligonucleotide
  Sense strand starting at position 2163 SEQ ID NO: 3156
cucuauagauaguuacauu

SEQ ID NO: 245363 - RNA, 19 nt, Artificial Sequence
  Description of Artificial Sequence: Synthetic oligonucleotide
  Antisense strand to SEQ ID NO: 245362
aauguaacuaucuauagag

SEQ ID NO: 245364 - RNA, 19 nt, Artificial Sequence
  Description of Artificial Sequence: Synthetic oligonucleotide
  Sense strand starting at position 2249 SEQ ID NO: 3156
gguggcaggucacucauuu

SEQ ID NO: 245365 - RNA, 19 nt, Artificial Sequence
  Description of Artificial Sequence: Synthetic oligonucleotide
  Antisense strand to SEQ ID NO: 245364
aaaugagugaccugccacc

SEQ ID NO: 245366 - RNA, 19 nt, Artificial Sequence
  Description of Artificial Sequence: Synthetic oligonucleotide
  Sense strand starting at position 2275 SEQ ID NO: 3156
cgcgaguugguaguuguaa

SEQ ID NO: 245367 - RNA, 19 nt, Artificial Sequence
  Description of Artificial Sequence: Synthetic oligonucleotide
  Antisense strand to SEQ ID NO: 245366
uuacaacuaccaacucgcg

SEQ ID NO: 245368 - RNA, 19 nt, Artificial Sequence
  Description of Artificial Sequence: Synthetic oligonucleotide
  Sense strand starting at position 2288 SEQ ID NO: 3156
uuguaacuucccuauaguc

SEQ ID NO: 245369 - RNA, 19 nt, Artificial Sequence
  Description of Artificial Sequence: Synthetic oligonucleotide
  Antisense strand to SEQ ID NO: 245368
gacuauagggaaguuacaa

SEQ ID NO: 245370 - RNA, 19 nt, Artificial Sequence
  Description of Artificial Sequence: Synthetic oligonucleotide
  Sense strand starting at position 2324 SEQ ID NO: 3156
guacccauuucugcagcaa

SEQ ID NO: 245371 - RNA, 19 nt, Artificial Sequence
  Description of Artificial Sequence: Synthetic oligonucleotide
  Antisense strand to SEQ ID NO: 245370
uugcugcagaaauggguac

SEQ ID NO: 245372 - RNA, 19 nt, Artificial Sequence
  Description of Artificial Sequence: Synthetic oligonucleotide
  Sense strand starting at position 2502 SEQ ID NO: 3156
acaucucgugugcuuaagu

SEQ ID NO: 245373 - RNA, 19 nt, Artificial Sequence
  Description of Artificial Sequence: Synthetic oligonucleotide
  Antisense strand to SEQ ID NO: 245372
acuuaagcacacgagaugu

SEQ ID NO: 245374 - RNA, 19 nt, Artificial Sequence
  Description of Artificial Sequence: Synthetic oligonucleotide
  Sense strand starting at position 2541 SEQ ID NO: 3156
aguaauuugguaugugcua

SEQ ID NO: 245375 - RNA, 19 nt, Artificial Sequence
  Description of Artificial Sequence: Synthetic oligonucleotide
  Antisense strand to SEQ ID NO: 245374
uagcacauaccaaauuacu

SEQ ID NO: 245376 - RNA, 19 nt, Artificial Sequence
  Description of Artificial Sequence: Synthetic oligonucleotide
  Sense strand starting at position 2542 SEQ ID NO: 3156
guaauuugguaugugcuau

SEQ ID NO: 245377 - RNA, 19 nt, Artificial Sequence
  Description of Artificial Sequence: Synthetic oligonucleotide
  Antisense strand to SEQ ID NO: 245376
auagcacauaccaaauuac

SEQ ID NO: 245378 - RNA, 19 nt, Artificial Sequence
  Description of Artificial Sequence: Synthetic oligonucleotide
  Sense strand starting at position 2907 SEQ ID NO: 3156
ugggcaaauucucuaaccu

SEQ ID NO: 245379 - RNA, 19 nt, Artificial Sequence
  Description of Artificial Sequence: Synthetic oligonucleotide
  Antisense strand to SEQ ID NO: 245378
agguuagagaauuugccca

SEQ ID NO: 245380 - RNA, 19 nt, Artificial Sequence
  Description of Artificial Sequence: Synthetic oligonucleotide
  Sense strand starting at position 2908 SEQ ID NO: 3156
gggcaaauucucuaaccuc

SEQ ID NO: 245381 - RNA, 19 nt, Artificial Sequence
  Description of Artificial Sequence: Synthetic oligonucleotide
  Antisense strand to SEQ ID NO: 245380
gagguuagagaauuugccc

SEQ ID NO: 245382 - RNA, 19 nt, Artificial Sequence
  Description of Artificial Sequence: Synthetic oligonucleotide
  Sense strand starting at position 2974 SEQ ID NO: 3156
ggaggaugcuauccauauu

SEQ ID NO: 245383 - RNA, 19 nt, Artificial Sequence
  Description of Artificial Sequence: Synthetic oligonucleotide
  Antisense strand to SEQ ID NO: 245382
aauauggauagcauccucc

SEQ ID NO: 245384 - RNA, 19 nt, Artificial Sequence
  Description of Artificial Sequence: Synthetic oligonucleotide
  Sense strand starting at position 2977 SEQ ID NO: 3156
ggaugcuauccauauugau

SEQ ID NO: 245385 - RNA, 19 nt, Artificial Sequence
  Description of Artificial Sequence: Synthetic oligonucleotide
  Antisense strand to SEQ ID NO: 245384
aucaauauggauagcaucc

SEQ ID NO: 245386 - RNA, 19 nt, Artificial Sequence
  Description of Artificial Sequence: Synthetic oligonucleotide
  Sense strand starting at position 3396 SEQ ID NO: 3156
uguuuaugucaagagacua

SEQ ID NO: 245387 - RNA, 19 nt, Artificial Sequence
  Description of Artificial Sequence: Synthetic oligonucleotide
  Antisense strand to SEQ ID NO: 245386
uagucucuugacauaaaca

SEQ ID NO: 245388 - RNA, 19 nt, Artificial Sequence
  Description of Artificial Sequence: Synthetic oligonucleotide
  Sense strand starting at position 3685 SEQ ID NO: 3156
augguagacucauuugcgu

SEQ ID NO: 245389 - RNA, 19 nt, Artificial Sequence
  Description of Artificial Sequence: Synthetic oligonucleotide
  Antisense strand to SEQ ID NO: 245388
acgcaaaugagucuaccau

SEQ ID NO: 245390 - RNA, 19 nt, Artificial Sequence
  Description of Artificial Sequence: Synthetic oligonucleotide
  Sense strand starting at position 3687 SEQ ID NO: 3156
gguagacucauuugcguac

SEQ ID NO: 245391 - RNA, 19 nt, Artificial Sequence
  Description of Artificial Sequence: Synthetic oligonucleotide
  Antisense strand to SEQ ID NO: 245390
guacgcaaaugagucuacc

SEQ ID NO: 245392 - RNA, 19 nt, Artificial Sequence
  Description of Artificial Sequence: Synthetic oligonucleotide
  Sense strand starting at position 3700 SEQ ID NO: 3156
gcguacuacgcagucuuua

SEQ ID NO: 245393 - RNA, 19 nt, Artificial Sequence
  Description of Artificial Sequence: Synthetic oligonucleotide
  Antisense strand to SEQ ID NO: 245392
uaaagacugcguaguacgc

SEQ ID NO: 245394 - RNA, 19 nt, Artificial Sequence
  Description of Artificial Sequence: Synthetic oligonucleotide
  Sense strand starting at position 32 SEQ ID NO: 3157
accugauaguauuccuaga

SEQ ID NO: 245395 - RNA, 19 nt, Artificial Sequence
  Description of Artificial Sequence: Synthetic oligonucleotide
  Antisense strand to SEQ ID NO: 245394
ucuaggaauacuaucaggu

SEQ ID NO: 245396 - RNA, 19 nt, Artificial Sequence
  Description of Artificial Sequence: Synthetic oligonucleotide
  Sense strand starting at position 34 SEQ ID NO: 3157
cugauaguauuccuagaag

SEQ ID NO: 245397 - RNA, 19 nt, Artificial Sequence
  Description of Artificial Sequence: Synthetic oligonucleotide
  Antisense strand to SEQ ID NO: 245396
cuucuaggaauacuaucag

SEQ ID NO: 245398 - RNA, 19 nt, Artificial Sequence
  Description of Artificial Sequence: Synthetic oligonucleotide
  Sense strand starting at position 37 SEQ ID NO: 3157
auaguauuccuagaaguuu

SEQ ID NO: 245399 - RNA, 19 nt, Artificial Sequence
  Description of Artificial Sequence: Synthetic oligonucleotide
  Antisense strand to SEQ ID NO: 245398
aaacuucuaggaauacuau

SEQ ID NO: 245400 - RNA, 19 nt, Artificial Sequence
  Description of Artificial Sequence: Synthetic oligonucleotide
  Sense strand starting at position 89 SEQ ID NO: 3157
auuuaacuguuccagaaag

SEQ ID NO: 245401 - RNA, 19 nt, Artificial Sequence
  Description of Artificial Sequence: Synthetic oligonucleotide
  Antisense strand to SEQ ID NO: 245400
cuuucuggaacaguuaaau

SEQ ID NO: 245402 - RNA, 19 nt, Artificial Sequence
  Description of Artificial Sequence: Synthetic oligonucleotide
  Sense strand starting at position 184 SEQ ID NO: 3157
gggagccuucugcauaaua

SEQ ID NO: 245403 - RNA, 19 nt, Artificial Sequence
  Description of Artificial Sequence: Synthetic oligonucleotide
  Antisense strand to SEQ ID NO: 245402
uauuaugcagaaggcuccc

SEQ ID NO: 245404 - RNA, 19 nt, Artificial Sequence
  Description of Artificial Sequence: Synthetic oligonucleotide
  Sense strand starting at position 524 SEQ ID NO: 3157
cugugauaccuugggaaag

SEQ ID NO: 245405 - RNA, 19 nt, Artificial Sequence
  Description of Artificial Sequence: Synthetic oligonucleotide
  Antisense strand to SEQ ID NO: 245404
cuuucccaagguaucacag

SEQ ID NO: 245406 - RNA, 19 nt, Artificial Sequence
  Description of Artificial Sequence: Synthetic oligonucleotide
  Sense strand starting at position 579 SEQ ID NO: 3157
ugaauuaauuuggagcuaa

SEQ ID NO: 245407 - RNA, 19 nt, Artificial Sequence
  Description of Artificial Sequence: Synthetic oligonucleotide
  Antisense strand to SEQ ID NO: 245406
uuagcuccaaauuaauuca

SEQ ID NO: 245408 - RNA, 19 nt, Artificial Sequence
  Description of Artificial Sequence: Synthetic oligonucleotide
  Sense strand starting at position 650 SEQ ID NO: 3157
ugugucagucaauaaacau

SEQ ID NO: 245409 - RNA, 19 nt, Artificial Sequence
  Description of Artificial Sequence: Synthetic oligonucleotide
  Antisense strand to SEQ ID NO: 245408
auguuuauugacugacaca

SEQ ID NO: 245410 - RNA, 19 nt, Artificial Sequence
  Description of Artificial Sequence: Synthetic oligonucleotide
  Sense strand starting at position 755 SEQ ID NO: 3157
agaauuucuucugauagau

SEQ ID NO: 245411 - RNA, 19 nt, Artificial Sequence
  Description of Artificial Sequence: Synthetic oligonucleotide
  Antisense strand to SEQ ID NO: 245410
aucuaucagaagaaauucu

SEQ ID NO: 245412 - RNA, 19 nt, Artificial Sequence
  Description of Artificial Sequence: Synthetic oligonucleotide
  Sense strand starting at position 765 SEQ ID NO: 3157
cugauagauuuguaaugaa

SEQ ID NO: 245413 - RNA, 19 nt, Artificial Sequence
  Description of Artificial Sequence: Synthetic oligonucleotide
  Antisense strand to SEQ ID NO: 245412
uucauuacaaaucuaucag

SEQ ID NO: 245414 - RNA, 19 nt, Artificial Sequence
  Description of Artificial Sequence: Synthetic oligonucleotide
  Sense strand starting at position 860 SEQ ID NO: 3157
agguaaauguucuugaaau

SEQ ID NO: 245415 - RNA, 19 nt, Artificial Sequence
  Description of Artificial Sequence: Synthetic oligonucleotide
  Antisense strand to SEQ ID NO: 245414
auuucaagaacauuuaccu

SEQ ID NO: 245416 - RNA, 19 nt, Artificial Sequence
  Description of Artificial Sequence: Synthetic oligonucleotide
  Sense strand starting at position 902 SEQ ID NO: 3157
uuauacuuagaaggcaaua

SEQ ID NO: 245417 - RNA, 19 nt, Artificial Sequence
  Description of Artificial Sequence: Synthetic oligonucleotide
  Antisense strand to SEQ ID NO: 245416
uauugccuucuaaguauaa

SEQ ID NO: 245418 - RNA, 19 nt, Artificial Sequence
  Description of Artificial Sequence: Synthetic oligonucleotide
  Sense strand starting at position 1241 SEQ ID NO: 3157
agugcaaagagauguaaca

SEQ ID NO: 245419 - RNA, 19 nt, Artificial Sequence
  Description of Artificial Sequence: Synthetic oligonucleotide
  Antisense strand to SEQ ID NO: 245418
uguuacaucucuuugcacu

SEQ ID NO: 245420 - RNA, 19 nt, Artificial Sequence
  Description of Artificial Sequence: Synthetic oligonucleotide
  Sense strand starting at position 1381 SEQ ID NO: 3157
ucaugagaauguccugaaa

SEQ ID NO: 245421 - RNA, 19 nt, Artificial Sequence
  Description of Artificial Sequence: Synthetic oligonucleotide
  Antisense strand to SEQ ID NO: 245420
uuucaggacauucucauga

SEQ ID NO: 245422 - RNA, 19 nt, Artificial Sequence
  Description of Artificial Sequence: Synthetic oligonucleotide
  Sense strand starting at position 1562 SEQ ID NO: 3157
gcaaguagucaucacaaag

SEQ ID NO: 245423 - RNA, 19 nt, Artificial Sequence
  Description of Artificial Sequence: Synthetic oligonucleotide
  Antisense strand to SEQ ID NO: 245422
cuuugugaugacuacuugc

SEQ ID NO: 245424 - RNA, 19 nt, Artificial Sequence
  Description of Artificial Sequence: Synthetic oligonucleotide
  Sense strand starting at position 1580 SEQ ID NO: 3157
gcaacuaaggaguagcaaa

SEQ ID NO: 245425 - RNA, 19 nt, Artificial Sequence
  Description of Artificial Sequence: Synthetic oligonucleotide
  Antisense strand to SEQ ID NO: 245424
uuugcuacuccuuaguugc

SEQ ID NO: 245426 - RNA, 19 nt, Artificial Sequence
  Description of Artificial Sequence: Synthetic oligonucleotide
  Sense strand starting at position 1702 SEQ ID NO: 3157
gcuuucuaagaguaguuga

SEQ ID NO: 245427 - RNA, 19 nt, Artificial Sequence
  Description of Artificial Sequence: Synthetic oligonucleotide
  Antisense strand to SEQ ID NO: 245426
ucaacuacucuuagaaagc

SEQ ID NO: 245428 - RNA, 19 nt, Artificial Sequence
  Description of Artificial Sequence: Synthetic oligonucleotide
  Sense strand starting at position 1710 SEQ ID NO: 3157
agaguaguugaaggucuau

SEQ ID NO: 245429 - RNA, 19 nt, Artificial Sequence
  Description of Artificial Sequence: Synthetic oligonucleotide
  Antisense strand to SEQ ID NO: 245428
auagaccuucaacuacucu

SEQ ID NO: 245430 - RNA, 19 nt, Artificial Sequence
  Description of Artificial Sequence: Synthetic oligonucleotide
  Sense strand starting at position 1716 SEQ ID NO: 3157
guugaaggucuaugaauaa

SEQ ID NO: 245431 - RNA, 19 nt, Artificial Sequence
  Description of Artificial Sequence: Synthetic oligonucleotide
  Antisense strand to SEQ ID NO: 245430
uuauucauagaccuucaac

SEQ ID NO: 245432 - RNA, 19 nt, Artificial Sequence
  Description of Artificial Sequence: Synthetic oligonucleotide
  Sense strand starting at position 1899 SEQ ID NO: 3157
guaauugaugcuuacccaa

SEQ ID NO: 245433 - RNA, 19 nt, Artificial Sequence
  Description of Artificial Sequence: Synthetic oligonucleotide
  Antisense strand to SEQ ID NO: 245432
uuggguaagcaucaauuac

SEQ ID NO: 245434 - RNA, 19 nt, Artificial Sequence
  Description of Artificial Sequence: Synthetic oligonucleotide
  Sense strand starting at position 2047 SEQ ID NO: 3157
aaauuugauuuguggccaa

SEQ ID NO: 245435 - RNA, 19 nt, Artificial Sequence
  Description of Artificial Sequence: Synthetic oligonucleotide
  Antisense strand to SEQ ID NO: 245434
uuggccacaaaucaaauuu

SEQ ID NO: 245436 - RNA, 19 nt, Artificial Sequence
  Description of Artificial Sequence: Synthetic oligonucleotide
  Sense strand starting at position 2059 SEQ ID NO: 3157
uggccaaaucuaugacuug

SEQ ID NO: 245437 - RNA, 19 nt, Artificial Sequence
  Description of Artificial Sequence: Synthetic oligonucleotide
  Antisense strand to SEQ ID NO: 245436
caagucauagauuuggcca

SEQ ID NO: 245438 - RNA, 19 nt, Artificial Sequence
  Description of Artificial Sequence: Synthetic oligonucleotide
  Sense strand starting at position 2153 SEQ ID NO: 3157
ugaguaaucccuugagagg

SEQ ID NO: 245439 - RNA, 19 nt, Artificial Sequence
  Description of Artificial Sequence: Synthetic oligonucleotide
  Antisense strand to SEQ ID NO: 245438
ccucucaagggauuacuca

SEQ ID NO: 245440 - RNA, 19 nt, Artificial Sequence
  Description of Artificial Sequence: Synthetic oligonucleotide
  Sense strand starting at position 2207 SEQ ID NO: 3157
acuucucaggcugauuaau

SEQ ID NO: 245441 - RNA, 19 nt, Artificial Sequence
  Description of Artificial Sequence: Synthetic oligonucleotide
  Antisense strand to SEQ ID NO: 245440
auuaaucagccugagaagu

SEQ ID NO: 245442 - RNA, 19 nt, Artificial Sequence
  Description of Artificial Sequence: Synthetic oligonucleotide
  Sense strand starting at position 2209 SEQ ID NO: 3157
uucucaggcugauuaauaa

SEQ ID NO: 245443 - RNA, 19 nt, Artificial Sequence
  Description of Artificial Sequence: Synthetic oligonucleotide
  Antisense strand to SEQ ID NO: 245442
uuauuaaucagccugagaa

SEQ ID NO: 245444 - RNA, 19 nt, Artificial Sequence
  Description of Artificial Sequence: Synthetic oligonucleotide
  Sense strand starting at position 2446 SEQ ID NO: 3157
uuagaaauucucugucuag

SEQ ID NO: 245445 - RNA, 19 nt, Artificial Sequence
  Description of Artificial Sequence: Synthetic oligonucleotide
  Antisense strand to SEQ ID NO: 245444
cuagacagagaauuucuaa

SEQ ID NO: 245446 - RNA, 19 nt, Artificial Sequence
  Description of Artificial Sequence: Synthetic oligonucleotide
  Sense strand starting at position 2447 SEQ ID NO: 3157
uagaaauucucugucuagg

SEQ ID NO: 245447 - RNA, 19 nt, Artificial Sequence
  Description of Artificial Sequence: Synthetic oligonucleotide
  Antisense strand to SEQ ID NO: 245446
ccuagacagagaauuucua

SEQ ID NO: 245448 - RNA, 19 nt, Artificial Sequence
  Description of Artificial Sequence: Synthetic oligonucleotide
  Sense strand starting at position 2612 SEQ ID NO: 3157
cuaagaagcuucccucaag

SEQ ID NO: 245449 - RNA, 19 nt, Artificial Sequence
  Description of Artificial Sequence: Synthetic oligonucleotide
  Antisense strand to SEQ ID NO: 245448
cuugagggaagcuucuuag

SEQ ID NO: 245450 - RNA, 19 nt, Artificial Sequence
  Description of Artificial Sequence: Synthetic oligonucleotide
  Sense strand starting at position 2720 SEQ ID NO: 3157
uugcgaugacccuaucaug

SEQ ID NO: 245451 - RNA, 19 nt, Artificial Sequence
  Description of Artificial Sequence: Synthetic oligonucleotide
  Antisense strand to SEQ ID NO: 245450
caugauagggucaucgcaa

SEQ ID NO: 245452 - RNA, 19 nt, Artificial Sequence
  Description of Artificial Sequence: Synthetic oligonucleotide
  Sense strand starting at position 2746 SEQ ID NO: 3157
ucaaccuacguuuauaagu

SEQ ID NO: 245453 - RNA, 19 nt, Artificial Sequence
  Description of Artificial Sequence: Synthetic oligonucleotide
  Antisense strand to SEQ ID NO: 245452
acuuauaaacguagguuga

SEQ ID NO: 245454 - RNA, 19 nt, Artificial Sequence
  Description of Artificial Sequence: Synthetic oligonucleotide
  Sense strand starting at position 3115 SEQ ID NO: 3157
aagggagaguuaucaguac

SEQ ID NO: 245455 - RNA, 19 nt, Artificial Sequence
  Description of Artificial Sequence: Synthetic oligonucleotide
  Antisense strand to SEQ ID NO: 245454
guacugauaacucucccuu

SEQ ID NO: 245456 - RNA, 19 nt, Artificial Sequence
  Description of Artificial Sequence: Synthetic oligonucleotide
  Sense strand starting at position 3293 SEQ ID NO: 3157
ccguaaauuagaggaauua

SEQ ID NO: 245457 - RNA, 19 nt, Artificial Sequence
  Description of Artificial Sequence: Synthetic oligonucleotide
  Antisense strand to SEQ ID NO: 245456
uaauuccucuaauuuacgg

SEQ ID NO: 245458 - RNA, 19 nt, Artificial Sequence
  Description of Artificial Sequence: Synthetic oligonucleotide
  Sense strand starting at position 3304 SEQ ID NO: 3157
aggaauuaggucugcacau

SEQ ID NO: 245459 - RNA, 19 nt, Artificial Sequence
  Description of Artificial Sequence: Synthetic oligonucleotide
  Antisense strand to SEQ ID NO: 245458
augugcagaccuaauuccu

SEQ ID NO: 245460 - RNA, 19 nt, Artificial Sequence
  Description of Artificial Sequence: Synthetic oligonucleotide
  Sense strand starting at position 3305 SEQ ID NO: 3157
ggaauuaggucugcacauu

SEQ ID NO: 245461 - RNA, 19 nt, Artificial Sequence
  Description of Artificial Sequence: Synthetic oligonucleotide
  Antisense strand to SEQ ID NO: 245460
aaugugcagaccuaauucc

SEQ ID NO: 245462 - RNA, 19 nt, Artificial Sequence
  Description of Artificial Sequence: Synthetic oligonucleotide
  Sense strand starting at position 3306 SEQ ID NO: 3157
gaauuaggucugcacauua

SEQ ID NO: 245463 - RNA, 19 nt, Artificial Sequence
  Description of Artificial Sequence: Synthetic oligonucleotide
  Antisense strand to SEQ ID NO: 245462
uaaugugcagaccuaauuc

SEQ ID NO: 245464 - RNA, 19 nt, Artificial Sequence
  Description of Artificial Sequence: Synthetic oligonucleotide
  Sense strand starting at position 3311 SEQ ID NO: 3157
aggucugcacauuauuauu

SEQ ID NO: 245465 - RNA, 19 nt, Artificial Sequence
  Description of Artificial Sequence: Synthetic oligonucleotide
  Antisense strand to SEQ ID NO: 245464
aauaauaaugugcagaccu

SEQ ID NO: 245466 - RNA, 19 nt, Artificial Sequence
  Description of Artificial Sequence: Synthetic oligonucleotide
  Sense strand starting at position 3617 SEQ ID NO: 3157
gaaauucugcaggaguauu

SEQ ID NO: 245467 - RNA, 19 nt, Artificial Sequence
  Description of Artificial Sequence: Synthetic oligonucleotide
  Antisense strand to SEQ ID NO: 245466
aauacuccugcagaauuuc

SEQ ID NO: 245468 - RNA, 19 nt, Artificial Sequence
  Description of Artificial Sequence: Synthetic oligonucleotide
  Sense strand starting at position 3771 SEQ ID NO: 3157
ggauaagacuguuuaagua

SEQ ID NO: 245469 - RNA, 19 nt, Artificial Sequence
  Description of Artificial Sequence: Synthetic oligonucleotide
  Antisense strand to SEQ ID NO: 245468
uacuuaaacagucuuaucc

SEQ ID NO: 245470 - RNA, 19 nt, Artificial Sequence
  Description of Artificial Sequence: Synthetic oligonucleotide
  Sense strand starting at position 3900 SEQ ID NO: 3157
accagagauuaggcuggua

SEQ ID NO: 245471 - RNA, 19 nt, Artificial Sequence
  Description of Artificial Sequence: Synthetic oligonucleotide
  Antisense strand to SEQ ID NO: 245470
uaccagccuaaucucuggu

SEQ ID NO: 245472 - RNA, 19 nt, Artificial Sequence
  Description of Artificial Sequence: Synthetic oligonucleotide
  Sense strand starting at position 3903 SEQ ID NO: 3157
agagauuaggcugguaaag

SEQ ID NO: 245473 - RNA, 19 nt, Artificial Sequence
  Description of Artificial Sequence: Synthetic oligonucleotide
  Antisense strand to SEQ ID NO: 245472
cuuuaccagccuaaucucu

SEQ ID NO: 245474 - RNA, 19 nt, Artificial Sequence
  Description of Artificial Sequence: Synthetic oligonucleotide
  Sense strand starting at position 15 SEQ ID NO: 3158
ggaguuucuugagucugga

SEQ ID NO: 245475 - RNA, 19 nt, Artificial Sequence
  Description of Artificial Sequence: Synthetic oligonucleotide
  Antisense strand to SEQ ID NO: 245474
uccagacucaagaaacucc

SEQ ID NO: 245476 - RNA, 19 nt, Artificial Sequence
  Description of Artificial Sequence: Synthetic oligonucleotide
  Sense strand starting at position 46 SEQ ID NO: 3158
auagccugcugauuauaaa

SEQ ID NO: 245477 - RNA, 19 nt, Artificial Sequence
  Description of Artificial Sequence: Synthetic oligonucleotide
  Antisense strand to SEQ ID NO: 245476
uuuauaaucagcaggcuau

SEQ ID NO: 245478 - RNA, 19 nt, Artificial Sequence
  Description of Artificial Sequence: Synthetic oligonucleotide
  Sense strand starting at position 71 SEQ ID NO: 3158
uuccaaguucuuuaaaugu

SEQ ID NO: 245479 - RNA, 19 nt, Artificial Sequence
  Description of Artificial Sequence: Synthetic oligonucleotide
  Antisense strand to SEQ ID NO: 245478
acauuuaaagaacuuggaa

SEQ ID NO: 245480 - RNA, 19 nt, Artificial Sequence
  Description of Artificial Sequence: Synthetic oligonucleotide
  Sense strand starting at position 195 SEQ ID NO: 3158
agaguucuuuacucuguac

SEQ ID NO: 245481 - RNA, 19 nt, Artificial Sequence
  Description of Artificial Sequence: Synthetic oligonucleotide
  Antisense strand to SEQ ID NO: 245480
guacagaguaaagaacucu

SEQ ID NO: 245482 - RNA, 19 nt, Artificial Sequence
  Description of Artificial Sequence: Synthetic oligonucleotide
  Sense strand starting at position 209 SEQ ID NO: 3158
uguacucaccuacagagua

SEQ ID NO: 245483 - RNA, 19 nt, Artificial Sequence
  Description of Artificial Sequence: Synthetic oligonucleotide
  Antisense strand to SEQ ID NO: 245482
uacucuguaggugaguaca

SEQ ID NO: 245484 - RNA, 19 nt, Artificial Sequence
  Description of Artificial Sequence: Synthetic oligonucleotide
  Sense strand starting at position 276 SEQ ID NO: 3158
uuacucugucuugaguaaa

SEQ ID NO: 245485 - RNA, 19 nt, Artificial Sequence
  Description of Artificial Sequence: Synthetic oligonucleotide
  Antisense strand to SEQ ID NO: 245484
uuuacucaagacagaguaa

SEQ ID NO: 245486 - RNA, 19 nt, Artificial Sequence
  Description of Artificial Sequence: Synthetic oligonucleotide
  Sense strand starting at position 689 SEQ ID NO: 3158
agaaauuuguucuauugac

SEQ ID NO: 245487 - RNA, 19 nt, Artificial Sequence
  Description of Artificial Sequence: Synthetic oligonucleotide
  Antisense strand to SEQ ID NO: 245486
gucaauagaacaaauuucu

SEQ ID NO: 245488 - RNA, 19 nt, Artificial Sequence
  Description of Artificial Sequence: Synthetic oligonucleotide
  Sense strand starting at position 774 SEQ ID NO: 3158
ccauuugagcauuguuacu

SEQ ID NO: 245489 - RNA, 19 nt, Artificial Sequence
  Description of Artificial Sequence: Synthetic oligonucleotide
  Antisense strand to SEQ ID NO: 245488
aguaacaaugcucaaaugg

SEQ ID NO: 245490 - RNA, 19 nt, Artificial Sequence
  Description of Artificial Sequence: Synthetic oligonucleotide
  Sense strand starting at position 2051 SEQ ID NO: 3158
uaggaaguggcuugaaagu

SEQ ID NO: 245491 - RNA, 19 nt, Artificial Sequence
  Description of Artificial Sequence: Synthetic oligonucleotide
  Antisense strand to SEQ ID NO: 245490
acuuucaagccacuuccua

SEQ ID NO: 245492 - RNA, 19 nt, Artificial Sequence
  Description of Artificial Sequence: Synthetic oligonucleotide
  Sense strand starting at position 2064 SEQ ID NO: 3158
gaaagucuuugagccugau

SEQ ID NO: 245493 - RNA, 19 nt, Artificial Sequence
  Description of Artificial Sequence: Synthetic oligonucleotide
  Antisense strand to SEQ ID NO: 245492
aucaggcucaaagacuuuc

SEQ ID NO: 245494 - RNA, 19 nt, Artificial Sequence
  Description of Artificial Sequence: Synthetic oligonucleotide
  Sense strand starting at position 2273 SEQ ID NO: 3158
gccugagucgugcucauua

SEQ ID NO: 245495 - RNA, 19 nt, Artificial Sequence
  Description of Artificial Sequence: Synthetic oligonucleotide
  Antisense strand to SEQ ID NO: 245494
uaaugagcacgacucaggc

SEQ ID NO: 245496 - RNA, 19 nt, Artificial Sequence
  Description of Artificial Sequence: Synthetic oligonucleotide
  Sense strand starting at position 2338 SEQ ID NO: 3158
ugaagacuguuccugucua

SEQ ID NO: 245497 - RNA, 19 nt, Artificial Sequence
  Description of Artificial Sequence: Synthetic oligonucleotide
  Antisense strand to SEQ ID NO: 245496
uagacaggaacagucuuca

SEQ ID NO: 245498 - RNA, 19 nt, Artificial Sequence
  Description of Artificial Sequence: Synthetic oligonucleotide
  Sense strand starting at position 2362 SEQ ID NO: 3158
ucccgauaaggugauguca

SEQ ID NO: 245499 - RNA, 19 nt, Artificial Sequence
  Description of Artificial Sequence: Synthetic oligonucleotide
  Antisense strand to SEQ ID NO: 245498
ugacaucaccuuaucggga

SEQ ID NO: 245500 - RNA, 19 nt, Artificial Sequence
  Description of Artificial Sequence: Synthetic oligonucleotide
  Sense strand starting at position 2477 SEQ ID NO: 3158
auagauuacuggucaagcu

SEQ ID NO: 245501 - RNA, 19 nt, Artificial Sequence
  Description of Artificial Sequence: Synthetic oligonucleotide
  Antisense strand to SEQ ID NO: 245500
agcuugaccaguaaucuau

SEQ ID NO: 245502 - RNA, 19 nt, Artificial Sequence
  Description of Artificial Sequence: Synthetic oligonucleotide
  Sense strand starting at position 2498 SEQ ID NO: 3158
ucccaacggucuuugaaag

SEQ ID NO: 245503 - RNA, 19 nt, Artificial Sequence
  Description of Artificial Sequence: Synthetic oligonucleotide
  Antisense strand to SEQ ID NO: 245502
cuuucaaagaccguuggga

SEQ ID NO: 245504 - RNA, 19 nt, Artificial Sequence
  Description of Artificial Sequence: Synthetic oligonucleotide
  Sense strand starting at position 2499 SEQ ID NO: 3158
cccaacggucuuugaaaga

SEQ ID NO: 245505 - RNA, 19 nt, Artificial Sequence
  Description of Artificial Sequence: Synthetic oligonucleotide
  Antisense strand to SEQ ID NO: 245504
ucuuucaaagaccguuggg

SEQ ID NO: 245506 - RNA, 19 nt, Artificial Sequence
  Description of Artificial Sequence: Synthetic oligonucleotide
  Sense strand starting at position 2577 SEQ ID NO: 3158
caaagcuuccugugauagg

SEQ ID NO: 245507 - RNA, 19 nt, Artificial Sequence
  Description of Artificial Sequence: Synthetic oligonucleotide
  Antisense strand to SEQ ID NO: 245506
ccuaucacaggaagcuuug

SEQ ID NO: 245508 - RNA, 19 nt, Artificial Sequence
  Description of Artificial Sequence: Synthetic oligonucleotide
  Sense strand starting at position 2831 SEQ ID NO: 3158
ggcauuguucuacauagau

SEQ ID NO: 245509 - RNA, 19 nt, Artificial Sequence
  Description of Artificial Sequence: Synthetic oligonucleotide
  Antisense strand to SEQ ID NO: 245508
aucuauguagaacaaugcc

SEQ ID NO: 245510 - RNA, 19 nt, Artificial Sequence
  Description of Artificial Sequence: Synthetic oligonucleotide
  Sense strand starting at position 2846 SEQ ID NO: 3158
agaugcagaucucuuugau

SEQ ID NO: 245511 - RNA, 19 nt, Artificial Sequence
  Description of Artificial Sequence: Synthetic oligonucleotide
  Antisense strand to SEQ ID NO: 245510
aucaaagagaucugcaucu

SEQ ID NO: 245512 - RNA, 19 nt, Artificial Sequence
  Description of Artificial Sequence: Synthetic oligonucleotide
  Sense strand starting at position 2861 SEQ ID NO: 3158
ugaugucuggcuuacuaga

SEQ ID NO: 245513 - RNA, 19 nt, Artificial Sequence
  Description of Artificial Sequence: Synthetic oligonucleotide
  Antisense strand to SEQ ID NO: 245512
ucuaguaagccagacauca

SEQ ID NO: 245514 - RNA, 19 nt, Artificial Sequence
  Description of Artificial Sequence: Synthetic oligonucleotide
  Sense strand starting at position 2882 SEQ ID NO: 3158
augacuggauucucauacu

SEQ ID NO: 245515 - RNA, 19 nt, Artificial Sequence
  Description of Artificial Sequence: Synthetic oligonucleotide
  Antisense strand to SEQ ID NO: 245514
aguaugagaauccagucau

SEQ ID NO: 245516 - RNA, 19 nt, Artificial Sequence
  Description of Artificial Sequence: Synthetic oligonucleotide
  Sense strand starting at position 2967 SEQ ID NO: 3158
augagagaaugagaauaaa

SEQ ID NO: 245517 - RNA, 19 nt, Artificial Sequence
  Description of Artificial Sequence: Synthetic oligonucleotide
  Antisense strand to SEQ ID NO: 245516
uuuauucucauucucucau

SEQ ID NO: 245518 - RNA, 19 nt, Artificial Sequence
  Description of Artificial Sequence: Synthetic oligonucleotide
  Sense strand starting at position 3148 SEQ ID NO: 3158
gagguuccucuguauaugu

SEQ ID NO: 245519 - RNA, 19 nt, Artificial Sequence
  Description of Artificial Sequence: Synthetic oligonucleotide
  Antisense strand to SEQ ID NO: 245518
acauauacagaggaaccuc

SEQ ID NO: 245520 - RNA, 19 nt, Artificial Sequence
  Description of Artificial Sequence: Synthetic oligonucleotide
  Sense strand starting at position 3150 SEQ ID NO: 3158
gguuccucuguauauguau

SEQ ID NO: 245521 - RNA, 19 nt, Artificial Sequence
  Description of Artificial Sequence: Synthetic oligonucleotide
  Antisense strand to SEQ ID NO: 245520
auacauauacagaggaacc

SEQ ID NO: 245522 - RNA, 19 nt, Artificial Sequence
  Description of Artificial Sequence: Synthetic oligonucleotide
  Sense strand starting at position 3324 SEQ ID NO: 3158
agaugcauuuguguccuau

SEQ ID NO: 245523 - RNA, 19 nt, Artificial Sequence
  Description of Artificial Sequence: Synthetic oligonucleotide
  Antisense strand to SEQ ID NO: 245522
auaggacacaaaugcaucu

SEQ ID NO: 245524 - RNA, 19 nt, Artificial Sequence
  Description of Artificial Sequence: Synthetic oligonucleotide
  Sense strand starting at position 3326 SEQ ID NO: 3158
augcauuuguguccuaucu

SEQ ID NO: 245525 - RNA, 19 nt, Artificial Sequence
  Description of Artificial Sequence: Synthetic oligonucleotide
  Antisense strand to SEQ ID NO: 245524
agauaggacacaaaugcau

SEQ ID NO: 245526 - RNA, 19 nt, Artificial Sequence
  Description of Artificial Sequence: Synthetic oligonucleotide
  Sense strand starting at position 3352 SEQ ID NO: 3158
uagccugaggacuaguaua

SEQ ID NO: 245527 - RNA, 19 nt, Artificial Sequence
  Description of Artificial Sequence: Synthetic oligonucleotide
  Antisense strand to SEQ ID NO: 245526
uauacuaguccucaggcua

SEQ ID NO: 245528 - RNA, 19 nt, Artificial Sequence
  Description of Artificial Sequence: Synthetic oligonucleotide
  Sense strand starting at position 3377 SEQ ID NO: 3158
aaguuuaauggguauuguu

SEQ ID NO: 245529 - RNA, 19 nt, Artificial Sequence
  Description of Artificial Sequence: Synthetic oligonucleotide
  Antisense strand to SEQ ID NO: 245528
aacaauacccauuaaacuu

SEQ ID NO: 245530 - RNA, 19 nt, Artificial Sequence
  Description of Artificial Sequence: Synthetic oligonucleotide
  Sense strand starting at position 3485 SEQ ID NO: 3158
uucugagaaucugaaauuu

SEQ ID NO: 245531 - RNA, 19 nt, Artificial Sequence
  Description of Artificial Sequence: Synthetic oligonucleotide
  Antisense strand to SEQ ID NO: 245530
aaauuucagauucucagaa

SEQ ID NO: 245532 - RNA, 19 nt, Artificial Sequence
  Description of Artificial Sequence: Synthetic oligonucleotide
  Sense strand starting at position 3511 SEQ ID NO: 3158
ugggauggucucuaugcca

SEQ ID NO: 245533 - RNA, 19 nt, Artificial Sequence
  Description of Artificial Sequence: Synthetic oligonucleotide
  Antisense strand to SEQ ID NO: 245532
uggcauagagaccauccca

SEQ ID NO: 245534 - RNA, 19 nt, Artificial Sequence
  Description of Artificial Sequence: Synthetic oligonucleotide
  Sense strand starting at position 3514 SEQ ID NO: 3158
gauggucucuaugccaaau

SEQ ID NO: 245535 - RNA, 19 nt, Artificial Sequence
  Description of Artificial Sequence: Synthetic oligonucleotide
  Antisense strand to SEQ ID NO: 245534
auuuggcauagagaccauc

SEQ ID NO: 245536 - RNA, 19 nt, Artificial Sequence
  Description of Artificial Sequence: Synthetic oligonucleotide
  Sense strand starting at position 3527 SEQ ID NO: 3158
ccaaauguguuuccugaua

SEQ ID NO: 245537 - RNA, 19 nt, Artificial Sequence
  Description of Artificial Sequence: Synthetic oligonucleotide
  Antisense strand to SEQ ID NO: 245536
uaucaggaaacacauuugg

SEQ ID NO: 245538 - RNA, 19 nt, Artificial Sequence
  Description of Artificial Sequence: Synthetic oligonucleotide
  Sense strand starting at position 3535 SEQ ID NO: 3158
guuuccugauacguggaaa

SEQ ID NO: 245539 - RNA, 19 nt, Artificial Sequence
  Description of Artificial Sequence: Synthetic oligonucleotide
  Antisense strand to SEQ ID NO: 245538
uuuccacguaucaggaaac

SEQ ID NO: 245540 - RNA, 19 nt, Artificial Sequence
  Description of Artificial Sequence: Synthetic oligonucleotide
  Sense strand starting at position 3579 SEQ ID NO: 3158
acugauuccggguauugua

SEQ ID NO: 245541 - RNA, 19 nt, Artificial Sequence
  Description of Artificial Sequence: Synthetic oligonucleotide
  Antisense strand to SEQ ID NO: 245540
uacaauacccggaaucagu

SEQ ID NO: 245542 - RNA, 19 nt, Artificial Sequence
  Description of Artificial Sequence: Synthetic oligonucleotide
  Sense strand starting at position 3642 SEQ ID NO: 3158
gguucucaauuaccuugaa

SEQ ID NO: 245543 - RNA, 19 nt, Artificial Sequence
  Description of Artificial Sequence: Synthetic oligonucleotide
  Antisense strand to SEQ ID NO: 245542
uucaagguaauugagaacc

SEQ ID NO: 245544 - RNA, 19 nt, Artificial Sequence
  Description of Artificial Sequence: Synthetic oligonucleotide
  Sense strand starting at position 3803 SEQ ID NO: 3158
auugcagaaucauugggua

SEQ ID NO: 245545 - RNA, 19 nt, Artificial Sequence
  Description of Artificial Sequence: Synthetic oligonucleotide
  Antisense strand to SEQ ID NO: 245544
uacccaaugauucugcaau

SEQ ID NO: 245546 - RNA, 19 nt, Artificial Sequence
  Description of Artificial Sequence: Synthetic oligonucleotide
  Sense strand starting at position 3807 SEQ ID NO: 3158
cagaaucauuggguaggua

SEQ ID NO: 245547 - RNA, 19 nt, Artificial Sequence
  Description of Artificial Sequence: Synthetic oligonucleotide
  Antisense strand to SEQ ID NO: 245546
uaccuacccaaugauucug

SEQ ID NO: 245548 - RNA, 19 nt, Artificial Sequence
  Description of Artificial Sequence: Synthetic oligonucleotide
  Sense strand starting at position 3819 SEQ ID NO: 3158
guagguacauccucaauug

SEQ ID NO: 245549 - RNA, 19 nt, Artificial Sequence
  Description of Artificial Sequence: Synthetic oligonucleotide
  Antisense strand to SEQ ID NO: 245548
caauugaggauguaccuac

SEQ ID NO: 245550 - RNA, 19 nt, Artificial Sequence
  Description of Artificial Sequence: Synthetic oligonucleotide
  Sense strand starting at position 3864 SEQ ID NO: 3158
auagcuauguccuuuagag

SEQ ID NO: 245551 - RNA, 19 nt, Artificial Sequence
  Description of Artificial Sequence: Synthetic oligonucleotide
  Antisense strand to SEQ ID NO: 245550
cucuaaaggacauagcuau

SEQ ID NO: 245552 - RNA, 19 nt, Artificial Sequence
  Description of Artificial Sequence: Synthetic oligonucleotide
  Sense strand starting at position 3866 SEQ ID NO: 3158
agcuauguccuuuagagga

SEQ ID NO: 245553 - RNA, 19 nt, Artificial Sequence
  Description of Artificial Sequence: Synthetic oligonucleotide
  Antisense strand to SEQ ID NO: 245552
uccucuaaaggacauagcu

SEQ ID NO: 245554 - RNA, 19 nt, Artificial Sequence
  Description of Artificial Sequence: Synthetic oligonucleotide
  Sense strand starting at position 45 SEQ ID NO: 3159
ccauacuccuggccuuaga

SEQ ID NO: 245555 - RNA, 19 nt, Artificial Sequence
  Description of Artificial Sequence: Synthetic oligonucleotide
  Antisense strand to SEQ ID NO: 245554
ucuaaggccaggaguaugg

SEQ ID NO: 245556 - RNA, 19 nt, Artificial Sequence
  Description of Artificial Sequence: Synthetic oligonucleotide
  Sense strand starting at position 53 SEQ ID NO: 3159
cuggccuuagauggagaau

SEQ ID NO: 245557 - RNA, 19 nt, Artificial Sequence
  Description of Artificial Sequence: Synthetic oligonucleotide
  Antisense strand to SEQ ID NO: 245556
auucuccaucuaaggccag

SEQ ID NO: 245558 - RNA, 19 nt, Artificial Sequence
  Description of Artificial Sequence: Synthetic oligonucleotide
  Sense strand starting at position 64 SEQ ID NO: 3159
uggagaaugugguuccucu

SEQ ID NO: 245559 - RNA, 19 nt, Artificial Sequence
  Description of Artificial Sequence: Synthetic oligonucleotide
  Antisense strand to SEQ ID NO: 245558
agaggaaccacauucucca

SEQ ID NO: 245560 - RNA, 19 nt, Artificial Sequence
  Description of Artificial Sequence: Synthetic oligonucleotide
  Sense strand starting at position 243 SEQ ID NO: 3159
auugguaucugguucuaag

SEQ ID NO: 245561 - RNA, 19 nt, Artificial Sequence
  Description of Artificial Sequence: Synthetic oligonucleotide
  Antisense strand to SEQ ID NO: 245560
cuuagaaccagauaccaau

SEQ ID NO: 245562 - RNA, 19 nt, Artificial Sequence
  Description of Artificial Sequence: Synthetic oligonucleotide
  Sense strand starting at position 253 SEQ ID NO: 3159
gguucuaagagugguucca

SEQ ID NO: 245563 - RNA, 19 nt, Artificial Sequence
  Description of Artificial Sequence: Synthetic oligonucleotide
  Antisense strand to SEQ ID NO: 245562
uggaaccacucuuagaacc

SEQ ID NO: 245564 - RNA, 19 nt, Artificial Sequence
  Description of Artificial Sequence: Synthetic oligonucleotide
  Sense strand starting at position 384 SEQ ID NO: 3159
ggaauaacugcuugugguu

SEQ ID NO: 245565 - RNA, 19 nt, Artificial Sequence
  Description of Artificial Sequence: Synthetic oligonucleotide
  Antisense strand to SEQ ID NO: 245564
aaccacaagcaguuauucc

SEQ ID NO: 245566 - RNA, 19 nt, Artificial Sequence
  Description of Artificial Sequence: Synthetic oligonucleotide
  Sense strand starting at position 389 SEQ ID NO: 3159
aacugcuugugguugacaa

SEQ ID NO: 245567 - RNA, 19 nt, Artificial Sequence
  Description of Artificial Sequence: Synthetic oligonucleotide
  Antisense strand to SEQ ID NO: 245566
uugucaaccacaagcaguu

SEQ ID NO: 245568 - RNA, 19 nt, Artificial Sequence
  Description of Artificial Sequence: Synthetic oligonucleotide
  Sense strand starting at position 390 SEQ ID NO: 3159
acugcuugugguugacaaa

SEQ ID NO: 245569 - RNA, 19 nt, Artificial Sequence
  Description of Artificial Sequence: Synthetic oligonucleotide
  Antisense strand to SEQ ID NO: 245568
uuugucaaccacaagcagu

SEQ ID NO: 245570 - RNA, 19 nt, Artificial Sequence
  Description of Artificial Sequence: Synthetic oligonucleotide
  Sense strand starting at position 458 SEQ ID NO: 3159
aguguagugguuugaagac

SEQ ID NO: 245571 - RNA, 19 nt, Artificial Sequence
  Description of Artificial Sequence: Synthetic oligonucleotide
  Antisense strand to SEQ ID NO: 245570
gucuucaaaccacuacacu

SEQ ID NO: 245572 - RNA, 19 nt, Artificial Sequence
  Description of Artificial Sequence: Synthetic oligonucleotide
  Sense strand starting at position 474 SEQ ID NO: 3159
gacagaaugucugcaguca

SEQ ID NO: 245573 - RNA, 19 nt, Artificial Sequence
  Description of Artificial Sequence: Synthetic oligonucleotide
  Antisense strand to SEQ ID NO: 245572
ugacugcagacauucuguc

SEQ ID NO: 245574 - RNA, 19 nt, Artificial Sequence
  Description of Artificial Sequence: Synthetic oligonucleotide
  Sense strand starting at position 475 SEQ ID NO: 3159
acagaaugucugcagucaa

SEQ ID NO: 245575 - RNA, 19 nt, Artificial Sequence
  Description of Artificial Sequence: Synthetic oligonucleotide
  Antisense strand to SEQ ID NO: 245574
uugacugcagacauucugu

SEQ ID NO: 245576 - RNA, 19 nt, Artificial Sequence
  Description of Artificial Sequence: Synthetic oligonucleotide
  Sense strand starting at position 601 SEQ ID NO: 3159
ggguuauugagaggguuca

SEQ ID NO: 245577 - RNA, 19 nt, Artificial Sequence
  Description of Artificial Sequence: Synthetic oligonucleotide
  Antisense strand to SEQ ID NO: 245576
ugaacccucucaauaaccc

SEQ ID NO: 245578 - RNA, 19 nt, Artificial Sequence
  Description of Artificial Sequence: Synthetic oligonucleotide
  Sense strand starting at position 611 SEQ ID NO: 3159
gaggguucagugggauaaa

SEQ ID NO: 245579 - RNA, 19 nt, Artificial Sequence
  Description of Artificial Sequence: Synthetic oligonucleotide
  Antisense strand to SEQ ID NO: 245578
uuuaucccacugaacccuc

SEQ ID NO: 245580 - RNA, 19 nt, Artificial Sequence
  Description of Artificial Sequence: Synthetic oligonucleotide
  Sense strand starting at position 678 SEQ ID NO: 3159
ccauuaagagcugacacuu

SEQ ID NO: 245581 - RNA, 19 nt, Artificial Sequence
  Description of Artificial Sequence: Synthetic oligonucleotide
  Antisense strand to SEQ ID NO: 245580
aagugucagcucuuaaugg

SEQ ID NO: 245582 - RNA, 19 nt, Artificial Sequence
  Description of Artificial Sequence: Synthetic oligonucleotide
  Sense strand starting at position 700 SEQ ID NO: 3159
cugugcuuacuacaagcua

SEQ ID NO: 245583 - RNA, 19 nt, Artificial Sequence
  Description of Artificial Sequence: Synthetic oligonucleotide
  Antisense strand to SEQ ID NO: 245582
uagcuuguaguaagcacag

SEQ ID NO: 245584 - RNA, 19 nt, Artificial Sequence
  Description of Artificial Sequence: Synthetic oligonucleotide
  Sense strand starting at position 716 SEQ ID NO: 3159
cuaagaguuguccagcuuc

SEQ ID NO: 245585 - RNA, 19 nt, Artificial Sequence
  Description of Artificial Sequence: Synthetic oligonucleotide
  Antisense strand to SEQ ID NO: 245584
gaagcuggacaacucuuag

SEQ ID NO: 245586 - RNA, 19 nt, Artificial Sequence
  Description of Artificial Sequence: Synthetic oligonucleotide
  Sense strand starting at position 790 SEQ ID NO: 3159
aggagaauggccugcucau

SEQ ID NO: 245587 - RNA, 19 nt, Artificial Sequence
  Description of Artificial Sequence: Synthetic oligonucleotide
  Antisense strand to SEQ ID NO: 245586
augagcaggccauucuccu

SEQ ID NO: 245588 - RNA, 19 nt, Artificial Sequence
  Description of Artificial Sequence: Synthetic oligonucleotide
  Sense strand starting at position 1281 SEQ ID NO: 3159
uuuauugucugguuuaauc

SEQ ID NO: 245589 - RNA, 19 nt, Artificial Sequence
  Description of Artificial Sequence: Synthetic oligonucleotide
  Antisense strand to SEQ ID NO: 245588
gauuaaaccagacaauaaa

SEQ ID NO: 245590 - RNA, 19 nt, Artificial Sequence
  Description of Artificial Sequence: Synthetic oligonucleotide
  Sense strand starting at position 1350 SEQ ID NO: 3159
agaaguucuggccaccuga

SEQ ID NO: 245591 - RNA, 19 nt, Artificial Sequence
  Description of Artificial Sequence: Synthetic oligonucleotide
  Antisense strand to SEQ ID NO: 245590
ucagguggccagaacuucu

SEQ ID NO: 245592 - RNA, 19 nt, Artificial Sequence
  Description of Artificial Sequence: Synthetic oligonucleotide
  Sense strand starting at position 1468 SEQ ID NO: 3159
ggcucagugccacauucua

SEQ ID NO: 245593 - RNA, 19 nt, Artificial Sequence
  Description of Artificial Sequence: Synthetic oligonucleotide
  Antisense strand to SEQ ID NO: 245592
uagaauguggcacugagcc

SEQ ID NO: 245594 - RNA, 19 nt, Artificial Sequence
  Description of Artificial Sequence: Synthetic oligonucleotide
  Sense strand starting at position 1486 SEQ ID NO: 3159
auuaguauuucucauugag

SEQ ID NO: 245595 - RNA, 19 nt, Artificial Sequence
  Description of Artificial Sequence: Synthetic oligonucleotide
  Antisense strand to SEQ ID NO: 245594
cucaaugagaaauacuaau

SEQ ID NO: 245596 - RNA, 19 nt, Artificial Sequence
  Description of Artificial Sequence: Synthetic oligonucleotide
  Sense strand starting at position 1489 SEQ ID NO: 3159
aguauuucucauugagcuc

SEQ ID NO: 245597 - RNA, 19 nt, Artificial Sequence
  Description of Artificial Sequence: Synthetic oligonucleotide
  Antisense strand to SEQ ID NO: 245596
gagcucaaugagaaauacu

SEQ ID NO: 245598 - RNA, 19 nt, Artificial Sequence
  Description of Artificial Sequence: Synthetic oligonucleotide
  Sense strand starting at position 2168 SEQ ID NO: 3159
uucuuaucugcguaagaug

SEQ ID NO: 245599 - RNA, 19 nt, Artificial Sequence
  Description of Artificial Sequence: Synthetic oligonucleotide
  Antisense strand to SEQ ID NO: 245598
caucuuacgcagauaagaa

SEQ ID NO: 245600 - RNA, 19 nt, Artificial Sequence
  Description of Artificial Sequence: Synthetic oligonucleotide
  Sense strand starting at position 2279 SEQ ID NO: 3159
aacauauguguuggcuuaa

SEQ ID NO: 245601 - RNA, 19 nt, Artificial Sequence
  Description of Artificial Sequence: Synthetic oligonucleotide
  Antisense strand to SEQ ID NO: 245600
uuaagccaacacauauguu

SEQ ID NO: 245602 - RNA, 19 nt, Artificial Sequence
  Description of Artificial Sequence: Synthetic oligonucleotide
  Sense strand starting at position 2280 SEQ ID NO: 3159
acauauguguuggcuuaau

SEQ ID NO: 245603 - RNA, 19 nt, Artificial Sequence
  Description of Artificial Sequence: Synthetic oligonucleotide
  Antisense strand to SEQ ID NO: 245602
auuaagccaacacauaugu

SEQ ID NO: 245604 - RNA, 19 nt, Artificial Sequence
  Description of Artificial Sequence: Synthetic oligonucleotide
  Sense strand starting at position 2411 SEQ ID NO: 3159
ggcauauugcuauagggaa

SEQ ID NO: 245605 - RNA, 19 nt, Artificial Sequence
  Description of Artificial Sequence: Synthetic oligonucleotide
  Antisense strand to SEQ ID NO: 245604
uucccuauagcaauaugcc

SEQ ID NO: 245606 - RNA, 19 nt, Artificial Sequence
  Description of Artificial Sequence: Synthetic oligonucleotide
  Sense strand starting at position 3225 SEQ ID NO: 3159
ugcagaagggcucauaauu

SEQ ID NO: 245607 - RNA, 19 nt, Artificial Sequence
  Description of Artificial Sequence: Synthetic oligonucleotide
  Antisense strand to SEQ ID NO: 245606
aauuaugagcccuucugca

SEQ ID NO: 245608 - RNA, 19 nt, Artificial Sequence
  Description of Artificial Sequence: Synthetic oligonucleotide
  Sense strand starting at position 3465 SEQ ID NO: 3159
uuggcucaccaagauguaa

SEQ ID NO: 245609 - RNA, 19 nt, Artificial Sequence
  Description of Artificial Sequence: Synthetic oligonucleotide
  Antisense strand to SEQ ID NO: 245608
uuacaucuuggugagccaa

SEQ ID NO: 245610 - RNA, 19 nt, Artificial Sequence
  Description of Artificial Sequence: Synthetic oligonucleotide
  Sense strand starting at position 3467 SEQ ID NO: 3159
ggcucaccaagauguaaug

SEQ ID NO: 245611 - RNA, 19 nt, Artificial Sequence
  Description of Artificial Sequence: Synthetic oligonucleotide
  Antisense strand to SEQ ID NO: 245610
cauuacaucuuggugagcc

SEQ ID NO: 245612 - RNA, 19 nt, Artificial Sequence
  Description of Artificial Sequence: Synthetic oligonucleotide
  Sense strand starting at position 3496 SEQ ID NO: 3159
uaagguuuggcuggaaauu

SEQ ID NO: 245613 - RNA, 19 nt, Artificial Sequence
  Description of Artificial Sequence: Synthetic oligonucleotide
  Antisense strand to SEQ ID NO: 245612
aauuuccagccaaaccuua

SEQ ID NO: 245614 - RNA, 19 nt, Artificial Sequence
  Description of Artificial Sequence: Synthetic oligonucleotide
  Sense strand starting at position 3577 SEQ ID NO: 3159
ccuggaaacuucguaaaug

SEQ ID NO: 245615 - RNA, 19 nt, Artificial Sequence
  Description of Artificial Sequence: Synthetic oligonucleotide
  Antisense strand to SEQ ID NO: 245614
cauuuacgaaguuuccagg

SEQ ID NO: 245616 - RNA, 19 nt, Artificial Sequence
  Description of Artificial Sequence: Synthetic oligonucleotide
  Sense strand starting at position 3601 SEQ ID NO: 3159
uuuguaaaccuagaaaguu

SEQ ID NO: 245617 - RNA, 19 nt, Artificial Sequence
  Description of Artificial Sequence: Synthetic oligonucleotide
  Antisense strand to SEQ ID NO: 245616
aacuuucuagguuuacaaa

SEQ ID NO: 245618 - RNA, 19 nt, Artificial Sequence
  Description of Artificial Sequence: Synthetic oligonucleotide
  Sense strand starting at position 3646 SEQ ID NO: 3159
ccaggauagccugaugugu

SEQ ID NO: 245619 - RNA, 19 nt, Artificial Sequence
  Description of Artificial Sequence: Synthetic oligonucleotide
  Antisense strand to SEQ ID NO: 245618
acacaucaggcuauccugg

SEQ ID NO: 245620 - RNA, 19 nt, Artificial Sequence
  Description of Artificial Sequence: Synthetic oligonucleotide
  Sense strand starting at position 3756 SEQ ID NO: 3159
gaacuauagcugugggauc

SEQ ID NO: 245621 - RNA, 19 nt, Artificial Sequence
  Description of Artificial Sequence: Synthetic oligonucleotide
  Antisense strand to SEQ ID NO: 245620
gaucccacagcuauaguuc

SEQ ID NO: 245622 - RNA, 19 nt, Artificial Sequence
  Description of Artificial Sequence: Synthetic oligonucleotide
  Sense strand starting at position 3767 SEQ ID NO: 3159
gugggauccugggccacau

SEQ ID NO: 245623 - RNA, 19 nt, Artificial Sequence
  Description of Artificial Sequence: Synthetic oligonucleotide
  Antisense strand to SEQ ID NO: 245622
auguggcccaggaucccac

SEQ ID NO: 245624 - RNA, 19 nt, Artificial Sequence
  Description of Artificial Sequence: Synthetic oligonucleotide
  Sense strand starting at position 3791 SEQ ID NO: 3159
aaaugagaguaagauaaga

SEQ ID NO: 245625 - RNA, 19 nt, Artificial Sequence
  Description of Artificial Sequence: Synthetic oligonucleotide
  Antisense strand to SEQ ID NO: 245624
ucuuaucuuacucucauuu

SEQ ID NO: 245626 - RNA, 19 nt, Artificial Sequence
  Description of Artificial Sequence: Synthetic oligonucleotide
  Sense strand starting at position 3834 SEQ ID NO: 3159
ugugaagacugggcuaaca

SEQ ID NO: 245627 - RNA, 19 nt, Artificial Sequence
  Description of Artificial Sequence: Synthetic oligonucleotide
  Antisense strand to SEQ ID NO: 245626
uguuagcccagucuucaca

SEQ ID NO: 245628 - RNA, 19 nt, Artificial Sequence
  Description of Artificial Sequence: Synthetic oligonucleotide
  Sense strand starting at position 3889 SEQ ID NO: 3159
aguauuagccauuacuauc

SEQ ID NO: 245629 - RNA, 19 nt, Artificial Sequence
  Description of Artificial Sequence: Synthetic oligonucleotide
  Antisense strand to SEQ ID NO: 245628
gauaguaauggcuaauacu

SEQ ID NO: 245630 - RNA, 19 nt, Artificial Sequence
  Description of Artificial Sequence: Synthetic oligonucleotide
  Sense strand starting at position 3911 SEQ ID NO: 3159
ggaaauagauuggauuucu

SEQ ID NO: 245631 - RNA, 19 nt, Artificial Sequence
  Description of Artificial Sequence: Synthetic oligonucleotide
  Antisense strand to SEQ ID NO: 245630
agaaauccaaucuauuucc

SEQ ID NO: 245632 - RNA, 19 nt, Artificial Sequence
  Description of Artificial Sequence: Synthetic oligonucleotide
  Sense strand starting at position 3946 SEQ ID NO: 3159
ggccuagcuggucaugaga

SEQ ID NO: 245633 - RNA, 19 nt, Artificial Sequence
  Description of Artificial Sequence: Synthetic oligonucleotide
  Antisense strand to SEQ ID NO: 245632
ucucaugaccagcuaggcc

SEQ ID NO: 245634 - RNA, 19 nt, Artificial Sequence
  Description of Artificial Sequence: Synthetic oligonucleotide
  Sense strand starting at position 122 SEQ ID NO: 3160
acggcaugcauggaugaga

SEQ ID NO: 245635 - RNA, 19 nt, Artificial Sequence
  Description of Artificial Sequence: Synthetic oligonucleotide
  Antisense strand to SEQ ID NO: 245634
ucucauccaugcaugccgu

SEQ ID NO: 245636 - RNA, 19 nt, Artificial Sequence
  Description of Artificial Sequence: Synthetic oligonucleotide
  Sense strand starting at position 145 SEQ ID NO: 3160
ugaggcugacaaugguuaa

SEQ ID NO: 245637 - RNA, 19 nt, Artificial Sequence
  Description of Artificial Sequence: Synthetic oligonucleotide
  Antisense strand to SEQ ID NO: 245636
uuaaccauugucagccuca

SEQ ID NO: 245638 - RNA, 19 nt, Artificial Sequence
  Description of Artificial Sequence: Synthetic oligonucleotide
  Sense strand starting at position 299 SEQ ID NO: 3160
aagaacuuucugggaugca

SEQ ID NO: 245639 - RNA, 19 nt, Artificial Sequence
  Description of Artificial Sequence: Synthetic oligonucleotide
  Antisense strand to SEQ ID NO: 245638
ugcaucccagaaaguucuu

SEQ ID NO: 245640 - RNA, 19 nt, Artificial Sequence
  Description of Artificial Sequence: Synthetic oligonucleotide
  Sense strand starting at position 549 SEQ ID NO: 3160
ccagaagggucuuucccua

SEQ ID NO: 245641 - RNA, 19 nt, Artificial Sequence
  Description of Artificial Sequence: Synthetic oligonucleotide
  Antisense strand to SEQ ID NO: 245640
uagggaaagacccuucugg

SEQ ID NO: 245642 - RNA, 19 nt, Artificial Sequence
  Description of Artificial Sequence: Synthetic oligonucleotide
  Sense strand starting at position 556 SEQ ID NO: 3160
ggucuuucccuagagccuu

SEQ ID NO: 245643 - RNA, 19 nt, Artificial Sequence
  Description of Artificial Sequence: Synthetic oligonucleotide
  Antisense strand to SEQ ID NO: 245642
aaggcucuagggaaagacc

SEQ ID NO: 245644 - RNA, 19 nt, Artificial Sequence
  Description of Artificial Sequence: Synthetic oligonucleotide
  Sense strand starting at position 662 SEQ ID NO: 3160
accugauucugggucccaa

SEQ ID NO: 245645 - RNA, 19 nt, Artificial Sequence
  Description of Artificial Sequence: Synthetic oligonucleotide
  Antisense strand to SEQ ID NO: 245644
uugggacccagaaucaggu

SEQ ID NO: 245646 - RNA, 19 nt, Artificial Sequence
  Description of Artificial Sequence: Synthetic oligonucleotide
  Sense strand starting at position 681 SEQ ID NO: 3160
uccuuucuucuugguaaag

SEQ ID NO: 245647 - RNA, 19 nt, Artificial Sequence
  Description of Artificial Sequence: Synthetic oligonucleotide
  Antisense strand to SEQ ID NO: 245646
cuuuaccaagaagaaagga

SEQ ID NO: 245648 - RNA, 19 nt, Artificial Sequence
  Description of Artificial Sequence: Synthetic oligonucleotide
  Sense strand starting at position 719 SEQ ID NO: 3160
aggacucaaagcugugaga

SEQ ID NO: 245649 - RNA, 19 nt, Artificial Sequence
  Description of Artificial Sequence: Synthetic oligonucleotide
  Antisense strand to SEQ ID NO: 245648
ucucacagcuuugaguccu

SEQ ID NO: 245650 - RNA, 19 nt, Artificial Sequence
  Description of Artificial Sequence: Synthetic oligonucleotide
  Sense strand starting at position 728 SEQ ID NO: 3160
agcugugagacguaauaaa

SEQ ID NO: 245651 - RNA, 19 nt, Artificial Sequence
  Description of Artificial Sequence: Synthetic oligonucleotide
  Antisense strand to SEQ ID NO: 245650
uuuauuacgucucacagcu

SEQ ID NO: 245652 - RNA, 19 nt, Artificial Sequence
  Description of Artificial Sequence: Synthetic oligonucleotide
  Sense strand starting at position 904 SEQ ID NO: 3160
ccuguuugugauuauccua

SEQ ID NO: 245653 - RNA, 19 nt, Artificial Sequence
  Description of Artificial Sequence: Synthetic oligonucleotide
  Antisense strand to SEQ ID NO: 245652
uaggauaaucacaaacagg

SEQ ID NO: 245654 - RNA, 19 nt, Artificial Sequence
  Description of Artificial Sequence: Synthetic oligonucleotide
  Sense strand starting at position 912 SEQ ID NO: 3160
ugauuauccuaguuucuag

SEQ ID NO: 245655 - RNA, 19 nt, Artificial Sequence
  Description of Artificial Sequence: Synthetic oligonucleotide
  Antisense strand to SEQ ID NO: 245654
cuagaaacuaggauaauca

SEQ ID NO: 245656 - RNA, 19 nt, Artificial Sequence
  Description of Artificial Sequence: Synthetic oligonucleotide
  Sense strand starting at position 915 SEQ ID NO: 3160
uuauccuaguuucuagauu

SEQ ID NO: 245657 - RNA, 19 nt, Artificial Sequence
  Description of Artificial Sequence: Synthetic oligonucleotide
  Antisense strand to SEQ ID NO: 245656
aaucuagaaacuaggauaa

SEQ ID NO: 245658 - RNA, 19 nt, Artificial Sequence
  Description of Artificial Sequence: Synthetic oligonucleotide
  Sense strand starting at position 978 SEQ ID NO: 3160
ggaggaucuccuggagcuu

SEQ ID NO: 245659 - RNA, 19 nt, Artificial Sequence
  Description of Artificial Sequence: Synthetic oligonucleotide
  Antisense strand to SEQ ID NO: 245658
aagcuccaggagauccucc

SEQ ID NO: 245660 - RNA, 19 nt, Artificial Sequence
  Description of Artificial Sequence: Synthetic oligonucleotide
  Sense strand starting at position 991 SEQ ID NO: 3160
gagcuucuagcugaucaga

SEQ ID NO: 245661 - RNA, 19 nt, Artificial Sequence
  Description of Artificial Sequence: Synthetic oligonucleotide
  Antisense strand to SEQ ID NO: 245660
ucugaucagcuagaagcuc

SEQ ID NO: 245662 - RNA, 19 nt, Artificial Sequence
  Description of Artificial Sequence: Synthetic oligonucleotide
  Sense strand starting at position 1056 SEQ ID NO: 3160
gggagagacuugucacuca

SEQ ID NO: 245663 - RNA, 19 nt, Artificial Sequence
  Description of Artificial Sequence: Synthetic oligonucleotide
  Antisense strand to SEQ ID NO: 245662
ugagugacaagucucuccc

SEQ ID NO: 245664 - RNA, 19 nt, Artificial Sequence
  Description of Artificial Sequence: Synthetic oligonucleotide
  Sense strand starting at position 1059 SEQ ID NO: 3160
agagacuugucacucauac

SEQ ID NO: 245665 - RNA, 19 nt, Artificial Sequence
  Description of Artificial Sequence: Synthetic oligonucleotide
  Antisense strand to SEQ ID NO: 245664
guaugagugacaagucucu

SEQ ID NO: 245666 - RNA, 19 nt, Artificial Sequence
  Description of Artificial Sequence: Synthetic oligonucleotide
  Sense strand starting at position 1195 SEQ ID NO: 3160
gcaguccugucauuucuau

SEQ ID NO: 245667 - RNA, 19 nt, Artificial Sequence
  Description of Artificial Sequence: Synthetic oligonucleotide
  Antisense strand to SEQ ID NO: 245666
auagaaaugacaggacugc

SEQ ID NO: 245668 - RNA, 19 nt, Artificial Sequence
  Description of Artificial Sequence: Synthetic oligonucleotide
  Sense strand starting at position 1228 SEQ ID NO: 3160
uacaauagugauggucuca

SEQ ID NO: 245669 - RNA, 19 nt, Artificial Sequence
  Description of Artificial Sequence: Synthetic oligonucleotide
  Antisense strand to SEQ ID NO: 245668
ugagaccaucacuauugua

SEQ ID NO: 245670 - RNA, 19 nt, Artificial Sequence
  Description of Artificial Sequence: Synthetic oligonucleotide
  Sense strand starting at position 1288 SEQ ID NO: 3160
cuuuacaaugcacggaaua

SEQ ID NO: 245671 - RNA, 19 nt, Artificial Sequence
  Description of Artificial Sequence: Synthetic oligonucleotide
  Antisense strand to SEQ ID NO: 245670
uauuccgugcauuguaaag

SEQ ID NO: 245672 - RNA, 19 nt, Artificial Sequence
  Description of Artificial Sequence: Synthetic oligonucleotide
  Sense strand starting at position 1314 SEQ ID NO: 3160
gcuauuaucugugcauuua

SEQ ID NO: 245673 - RNA, 19 nt, Artificial Sequence
  Description of Artificial Sequence: Synthetic oligonucleotide
  Antisense strand to SEQ ID NO: 245672
uaaaugcacagauaauagc

SEQ ID NO: 245674 - RNA, 19 nt, Artificial Sequence
  Description of Artificial Sequence: Synthetic oligonucleotide
  Sense strand starting at position 1362 SEQ ID NO: 3160
aggaguuaucgugacucuc

SEQ ID NO: 245675 - RNA, 19 nt, Artificial Sequence
  Description of Artificial Sequence: Synthetic oligonucleotide
  Antisense strand to SEQ ID NO: 245674
gagagucacgauaacuccu

SEQ ID NO: 245676 - RNA, 19 nt, Artificial Sequence
  Description of Artificial Sequence: Synthetic oligonucleotide
  Sense strand starting at position 1565 SEQ ID NO: 3160
aucuauuacucacuggguu

SEQ ID NO: 245677 - RNA, 19 nt, Artificial Sequence
  Description of Artificial Sequence: Synthetic oligonucleotide
  Antisense strand to SEQ ID NO: 245676
aacccagugaguaauagau

SEQ ID NO: 245678 - RNA, 19 nt, Artificial Sequence
  Description of Artificial Sequence: Synthetic oligonucleotide
  Sense strand starting at position 1581 SEQ ID NO: 3160
guuccugagucucugggaa

SEQ ID NO: 245679 - RNA, 19 nt, Artificial Sequence
  Description of Artificial Sequence: Synthetic oligonucleotide
  Antisense strand to SEQ ID NO: 245678
uucccagagacucaggaac

SEQ ID NO: 245680 - RNA, 19 nt, Artificial Sequence
  Description of Artificial Sequence: Synthetic oligonucleotide
  Sense strand starting at position 1625 SEQ ID NO: 3160
auccacaucugggauauuu

SEQ ID NO: 245681 - RNA, 19 nt, Artificial Sequence
  Description of Artificial Sequence: Synthetic oligonucleotide
  Antisense strand to SEQ ID NO: 245680
aaauaucccagauguggau

SEQ ID NO: 245682 - RNA, 19 nt, Artificial Sequence
  Description of Artificial Sequence: Synthetic oligonucleotide
  Sense strand starting at position 2078 SEQ ID NO: 3160
aagagaaacccuugcuguu

SEQ ID NO: 245683 - RNA, 19 nt, Artificial Sequence
  Description of Artificial Sequence: Synthetic oligonucleotide
  Antisense strand to SEQ ID NO: 245682
aacagcaaggguuucucuu

SEQ ID NO: 245684 - RNA, 19 nt, Artificial Sequence
  Description of Artificial Sequence: Synthetic oligonucleotide
  Sense strand starting at position 2201 SEQ ID NO: 3160
cauugaguuccugggaaga

SEQ ID NO: 245685 - RNA, 19 nt, Artificial Sequence
  Description of Artificial Sequence: Synthetic oligonucleotide
  Antisense strand to SEQ ID NO: 245684
ucuucccaggaacucaaug

SEQ ID NO: 245686 - RNA, 19 nt, Artificial Sequence
  Description of Artificial Sequence: Synthetic oligonucleotide
  Sense strand starting at position 2404 SEQ ID NO: 3160
cggaccauagauuggcaaa

SEQ ID NO: 245687 - RNA, 19 nt, Artificial Sequence
  Description of Artificial Sequence: Synthetic oligonucleotide
  Antisense strand to SEQ ID NO: 245686
uuugccaaucuaugguccg

SEQ ID NO: 245688 - RNA, 19 nt, Artificial Sequence
  Description of Artificial Sequence: Synthetic oligonucleotide
  Sense strand starting at position 2425 SEQ ID NO: 3160
uucuguaaaggacgagaua

SEQ ID NO: 245689 - RNA, 19 nt, Artificial Sequence
  Description of Artificial Sequence: Synthetic oligonucleotide
  Antisense strand to SEQ ID NO: 245688
uaucucguccuuuacagaa

SEQ ID NO: 245690 - RNA, 19 nt, Artificial Sequence
  Description of Artificial Sequence: Synthetic oligonucleotide
  Sense strand starting at position 2507 SEQ ID NO: 3160
guuggcaauccauaaauca

SEQ ID NO: 245691 - RNA, 19 nt, Artificial Sequence
  Description of Artificial Sequence: Synthetic oligonucleotide
  Antisense strand to SEQ ID NO: 245690
ugauuuauggauugccaac

SEQ ID NO: 245692 - RNA, 19 nt, Artificial Sequence
  Description of Artificial Sequence: Synthetic oligonucleotide
  Sense strand starting at position 2578 SEQ ID NO: 3160
ccggauuuggccugagucu

SEQ ID NO: 245693 - RNA, 19 nt, Artificial Sequence
  Description of Artificial Sequence: Synthetic oligonucleotide
  Antisense strand to SEQ ID NO: 245692
agacucaggccaaauccgg

SEQ ID NO: 245694 - RNA, 19 nt, Artificial Sequence
  Description of Artificial Sequence: Synthetic oligonucleotide
  Sense strand starting at position 2611 SEQ ID NO: 3160
uaaagugaguccuucugag

SEQ ID NO: 245695 - RNA, 19 nt, Artificial Sequence
  Description of Artificial Sequence: Synthetic oligonucleotide
  Antisense strand to SEQ ID NO: 245694
cucagaaggacucacuuua

SEQ ID NO: 245696 - RNA, 19 nt, Artificial Sequence
  Description of Artificial Sequence: Synthetic oligonucleotide
  Sense strand starting at position 2817 SEQ ID NO: 3160
gaaugagggugaucauguc

SEQ ID NO: 245697 - RNA, 19 nt, Artificial Sequence
  Description of Artificial Sequence: Synthetic oligonucleotide
  Antisense strand to SEQ ID NO: 245696
gacaugaucacccucauuc

SEQ ID NO: 245698 - RNA, 19 nt, Artificial Sequence
  Description of Artificial Sequence: Synthetic oligonucleotide
  Sense strand starting at position 3051 SEQ ID NO: 3160
gcaugaucuacaggaugga

SEQ ID NO: 245699 - RNA, 19 nt, Artificial Sequence
  Description of Artificial Sequence: Synthetic oligonucleotide
  Antisense strand to SEQ ID NO: 245698
uccauccuguagaucaugc

SEQ ID NO: 245700 - RNA, 19 nt, Artificial Sequence
  Description of Artificial Sequence: Synthetic oligonucleotide
  Sense strand starting at position 3231 SEQ ID NO: 3160
cagagaaauccaggucuuc

SEQ ID NO: 245701 - RNA, 19 nt, Artificial Sequence
  Description of Artificial Sequence: Synthetic oligonucleotide
  Antisense strand to SEQ ID NO: 245700
gaagaccuggauuucucug

SEQ ID NO: 245702 - RNA, 19 nt, Artificial Sequence
  Description of Artificial Sequence: Synthetic oligonucleotide
  Sense strand starting at position 3851 SEQ ID NO: 3160
gcaguugaucuugaugagu

SEQ ID NO: 245703 - RNA, 19 nt, Artificial Sequence
  Description of Artificial Sequence: Synthetic oligonucleotide
  Antisense strand to SEQ ID NO: 245702
acucaucaagaucaacugc

SEQ ID NO: 245704 - RNA, 19 nt, Artificial Sequence
  Description of Artificial Sequence: Synthetic oligonucleotide
  Sense strand starting at position 3854 SEQ ID NO: 3160
guugaucuugaugagucua

SEQ ID NO: 245705 - RNA, 19 nt, Artificial Sequence
  Description of Artificial Sequence: Synthetic oligonucleotide
  Antisense strand to SEQ ID NO: 245704
uagacucaucaagaucaac

SEQ ID NO: 245706 - RNA, 19 nt, Artificial Sequence
  Description of Artificial Sequence: Synthetic oligonucleotide
  Sense strand starting at position 3856 SEQ ID NO: 3160
ugaucuugaugagucuauu

SEQ ID NO: 245707 - RNA, 19 nt, Artificial Sequence
  Description of Artificial Sequence: Synthetic oligonucleotide
  Antisense strand to SEQ ID NO: 245706
aauagacucaucaagauca

SEQ ID NO: 245708 - RNA, 19 nt, Artificial Sequence
  Description of Artificial Sequence: Synthetic oligonucleotide
  Sense strand starting at position 3939 SEQ ID NO: 3160
aacacuuuguguccagaga

SEQ ID NO: 245709 - RNA, 19 nt, Artificial Sequence
  Description of Artificial Sequence: Synthetic oligonucleotide
  Antisense strand to SEQ ID NO: 245708
ucucuggacacaaaguguu

SEQ ID NO: 245710 - RNA, 19 nt, Artificial Sequence
  Description of Artificial Sequence: Synthetic oligonucleotide
  Sense strand starting at position 3940 SEQ ID NO: 3160
acacuuuguguccagagag

SEQ ID NO: 245711 - RNA, 19 nt, Artificial Sequence
  Description of Artificial Sequence: Synthetic oligonucleotide
  Antisense strand to SEQ ID NO: 245710
cucucuggacacaaagugu

SEQ ID NO: 245712 - RNA, 19 nt, Artificial Sequence
  Description of Artificial Sequence: Synthetic oligonucleotide
  Sense strand starting at position 3973 SEQ ID NO: 3160
gaggaagacuaugaaugaa

SEQ ID NO: 245713 - RNA, 19 nt, Artificial Sequence
  Description of Artificial Sequence: Synthetic oligonucleotide
  Antisense strand to SEQ ID NO: 245712
uucauucauagucuuccuc

SEQ ID NO: 245714 - RNA, 19 nt, Artificial Sequence
  Description of Artificial Sequence: Synthetic oligonucleotide
  Sense strand starting at position 209 SEQ ID NO: 3161
uuaagauuaugguugaaac

SEQ ID NO: 245715 - RNA, 19 nt, Artificial Sequence
  Description of Artificial Sequence: Synthetic oligonucleotide
  Antisense strand to SEQ ID NO: 245714
guuucaaccauaaucuuaa

SEQ ID NO: 245716 - RNA, 19 nt, Artificial Sequence
  Description of Artificial Sequence: Synthetic oligonucleotide
  Sense strand starting at position 210 SEQ ID NO: 3161
uaagauuaugguugaaacu

SEQ ID NO: 245717 - RNA, 19 nt, Artificial Sequence
  Description of Artificial Sequence: Synthetic oligonucleotide
  Antisense strand to SEQ ID NO: 245716
aguuucaaccauaaucuua

SEQ ID NO: 245718 - RNA, 19 nt, Artificial Sequence
  Description of Artificial Sequence: Synthetic oligonucleotide
  Sense strand starting at position 272 SEQ ID NO: 3161
auguguugacaugaaaguu

SEQ ID NO: 245719 - RNA, 19 nt, Artificial Sequence
  Description of Artificial Sequence: Synthetic oligonucleotide
  Antisense strand to SEQ ID NO: 245718
aacuuucaugucaacacau

SEQ ID NO: 245720 - RNA, 19 nt, Artificial Sequence
  Description of Artificial Sequence: Synthetic oligonucleotide
  Sense strand starting at position 306 SEQ ID NO: 3161
cauugauugggccauuauu

SEQ ID NO: 245721 - RNA, 19 nt, Artificial Sequence
  Description of Artificial Sequence: Synthetic oligonucleotide
  Antisense strand to SEQ ID NO: 245720
aauaauggcccaaucaaug

SEQ ID NO: 245722 - RNA, 19 nt, Artificial Sequence
  Description of Artificial Sequence: Synthetic oligonucleotide
  Sense strand starting at position 462 SEQ ID NO: 3161
gggucuguccuguauaaua

SEQ ID NO: 245723 - RNA, 19 nt, Artificial Sequence
  Description of Artificial Sequence: Synthetic oligonucleotide
  Antisense strand to SEQ ID NO: 245722
uauuauacaggacagaccc

SEQ ID NO: 245724 - RNA, 19 nt, Artificial Sequence
  Description of Artificial Sequence: Synthetic oligonucleotide
  Sense strand starting at position 464 SEQ ID NO: 3161
gucuguccuguauaauaau

SEQ ID NO: 245725 - RNA, 19 nt, Artificial Sequence
  Description of Artificial Sequence: Synthetic oligonucleotide
  Antisense strand to SEQ ID NO: 245724
auuauuauacaggacagac

SEQ ID NO: 245726 - RNA, 19 nt, Artificial Sequence
  Description of Artificial Sequence: Synthetic oligonucleotide
  Sense strand starting at position 505 SEQ ID NO: 3161
ugucaucuacccgauaaau

SEQ ID NO: 245727 - RNA, 19 nt, Artificial Sequence
  Description of Artificial Sequence: Synthetic oligonucleotide
  Antisense strand to SEQ ID NO: 245726
auuuaucggguagaugaca

SEQ ID NO: 245728 - RNA, 19 nt, Artificial Sequence
  Description of Artificial Sequence: Synthetic oligonucleotide
  Sense strand starting at position 578 SEQ ID NO: 3161
gacaaaugucccuggagca

SEQ ID NO: 245729 - RNA, 19 nt, Artificial Sequence
  Description of Artificial Sequence: Synthetic oligonucleotide
  Antisense strand to SEQ ID NO: 245728
ugcuccagggacauuuguc

SEQ ID NO: 245730 - RNA, 19 nt, Artificial Sequence
  Description of Artificial Sequence: Synthetic oligonucleotide
  Sense strand starting at position 579 SEQ ID NO: 3161
acaaaugucccuggagcaa

SEQ ID NO: 245731 - RNA, 19 nt, Artificial Sequence
  Description of Artificial Sequence: Synthetic oligonucleotide
  Antisense strand to SEQ ID NO: 245730
uugcuccagggacauuugu

SEQ ID NO: 245732 - RNA, 19 nt, Artificial Sequence
  Description of Artificial Sequence: Synthetic oligonucleotide
  Sense strand starting at position 701 SEQ ID NO: 3161
agaggccugcuauaauuau

SEQ ID NO: 245733 - RNA, 19 nt, Artificial Sequence
  Description of Artificial Sequence: Synthetic oligonucleotide
  Antisense strand to SEQ ID NO: 245732
auaauuauagcaggccucu

SEQ ID NO: 245734 - RNA, 19 nt, Artificial Sequence
  Description of Artificial Sequence: Synthetic oligonucleotide
  Sense strand starting at position 840 SEQ ID NO: 3161
ugugauaauuaacugcuaa

SEQ ID NO: 245735 - RNA, 19 nt, Artificial Sequence
  Description of Artificial Sequence: Synthetic oligonucleotide
  Antisense strand to SEQ ID NO: 245734
uuagcaguuaauuaucaca

SEQ ID NO: 245736 - RNA, 19 nt, Artificial Sequence
  Description of Artificial Sequence: Synthetic oligonucleotide
  Sense strand starting at position 1082 SEQ ID NO: 3161
ccugaaaucugaguuucca

SEQ ID NO: 245737 - RNA, 19 nt, Artificial Sequence
  Description of Artificial Sequence: Synthetic oligonucleotide
  Antisense strand to SEQ ID NO: 245736
uggaaacucagauuucagg

SEQ ID NO: 245738 - RNA, 19 nt, Artificial Sequence
  Description of Artificial Sequence: Synthetic oligonucleotide
  Sense strand starting at position 1264 SEQ ID NO: 3161
aggcaauagugacugggaa

SEQ ID NO: 245739 - RNA, 19 nt, Artificial Sequence
  Description of Artificial Sequence: Synthetic oligonucleotide
  Antisense strand to SEQ ID NO: 245738
uucccagucacuauugccu

SEQ ID NO: 245740 - RNA, 19 nt, Artificial Sequence
  Description of Artificial Sequence: Synthetic oligonucleotide
  Sense strand starting at position 1266 SEQ ID NO: 3161
gcaauagugacugggaaca

SEQ ID NO: 245741 - RNA, 19 nt, Artificial Sequence
  Description of Artificial Sequence: Synthetic oligonucleotide
  Antisense strand to SEQ ID NO: 245740
uguucccagucacuauugc

SEQ ID NO: 245742 - RNA, 19 nt, Artificial Sequence
  Description of Artificial Sequence: Synthetic oligonucleotide
  Sense strand starting at position 1276 SEQ ID NO: 3161
cugggaacacgaugugaaa

SEQ ID NO: 245743 - RNA, 19 nt, Artificial Sequence
  Description of Artificial Sequence: Synthetic oligonucleotide
  Antisense strand to SEQ ID NO: 245742
uuucacaucguguucccag

SEQ ID NO: 245744 - RNA, 19 nt, Artificial Sequence
  Description of Artificial Sequence: Synthetic oligonucleotide
  Sense strand starting at position 1308 SEQ ID NO: 3161
ugccauuuccaggguggua

SEQ ID NO: 245745 - RNA, 19 nt, Artificial Sequence
  Description of Artificial Sequence: Synthetic oligonucleotide
  Antisense strand to SEQ ID NO: 245744
uaccacccuggaaauggca

SEQ ID NO: 245746 - RNA, 19 nt, Artificial Sequence
  Description of Artificial Sequence: Synthetic oligonucleotide
  Sense strand starting at position 1481 SEQ ID NO: 3161
cugguccucccauagauua

SEQ ID NO: 245747 - RNA, 19 nt, Artificial Sequence
  Description of Artificial Sequence: Synthetic oligonucleotide
  Antisense strand to SEQ ID NO: 245746
uaaucuaugggaggaccag

SEQ ID NO: 245748 - RNA, 19 nt, Artificial Sequence
  Description of Artificial Sequence: Synthetic oligonucleotide
  Sense strand starting at position 1523 SEQ ID NO: 3161
ccuugaaguuucucagaau

SEQ ID NO: 245749 - RNA, 19 nt, Artificial Sequence
  Description of Artificial Sequence: Synthetic oligonucleotide
  Antisense strand to SEQ ID NO: 245748
auucugagaaacuucaagg

SEQ ID NO: 245750 - RNA, 19 nt, Artificial Sequence
  Description of Artificial Sequence: Synthetic oligonucleotide
  Sense strand starting at position 1777 SEQ ID NO: 3161
gcuacucaccuggagacau

SEQ ID NO: 245751 - RNA, 19 nt, Artificial Sequence
  Description of Artificial Sequence: Synthetic oligonucleotide
  Antisense strand to SEQ ID NO: 245750
augucuccaggugaguagc

SEQ ID NO: 245752 - RNA, 19 nt, Artificial Sequence
  Description of Artificial Sequence: Synthetic oligonucleotide
  Sense strand starting at position 1976 SEQ ID NO: 3161
ccacgaggaucuuuaccuu

SEQ ID NO: 245753 - RNA, 19 nt, Artificial Sequence
  Description of Artificial Sequence: Synthetic oligonucleotide
  Antisense strand to SEQ ID NO: 245752
aagguaaagauccucgugg

SEQ ID NO: 245754 - RNA, 19 nt, Artificial Sequence
  Description of Artificial Sequence: Synthetic oligonucleotide
  Sense strand starting at position 2093 SEQ ID NO: 3161
aguuuaacccugggucaga

SEQ ID NO: 245755 - RNA, 19 nt, Artificial Sequence
  Description of Artificial Sequence: Synthetic oligonucleotide
  Antisense strand to SEQ ID NO: 245754
ucugacccaggguuaaacu

SEQ ID NO: 245756 - RNA, 19 nt, Artificial Sequence
  Description of Artificial Sequence: Synthetic oligonucleotide
  Sense strand starting at position 2340 SEQ ID NO: 3161
cacugauaaucuguuacga

SEQ ID NO: 245757 - RNA, 19 nt, Artificial Sequence
  Description of Artificial Sequence: Synthetic oligonucleotide
  Antisense strand to SEQ ID NO: 245756
ucguaacagauuaucagug

SEQ ID NO: 245758 - RNA, 19 nt, Artificial Sequence
  Description of Artificial Sequence: Synthetic oligonucleotide
  Sense strand starting at position 2463 SEQ ID NO: 3161
gaaguucugccucacuaag

SEQ ID NO: 245759 - RNA, 19 nt, Artificial Sequence
  Description of Artificial Sequence: Synthetic oligonucleotide
  Antisense strand to SEQ ID NO: 245758
cuuagugaggcagaacuuc

SEQ ID NO: 245760 - RNA, 19 nt, Artificial Sequence
  Description of Artificial Sequence: Synthetic oligonucleotide
  Sense strand starting at position 2537 SEQ ID NO: 3161
gugacucuuuaugugaaca

SEQ ID NO: 245761 - RNA, 19 nt, Artificial Sequence
  Description of Artificial Sequence: Synthetic oligonucleotide
  Antisense strand to SEQ ID NO: 245760
uguucacauaaagagucac

SEQ ID NO: 245762 - RNA, 19 nt, Artificial Sequence
  Description of Artificial Sequence: Synthetic oligonucleotide
  Sense strand starting at position 2669 SEQ ID NO: 3161
gucaaugacucaucucuga

SEQ ID NO: 245763 - RNA, 19 nt, Artificial Sequence
  Description of Artificial Sequence: Synthetic oligonucleotide
  Antisense strand to SEQ ID NO: 245762
ucagagaugagucauugac

SEQ ID NO: 245764 - RNA, 19 nt, Artificial Sequence
  Description of Artificial Sequence: Synthetic oligonucleotide
  Sense strand starting at position 2809 SEQ ID NO: 3161
ggaacuauauucuugguca

SEQ ID NO: 245765 - RNA, 19 nt, Artificial Sequence
  Description of Artificial Sequence: Synthetic oligonucleotide
  Antisense strand to SEQ ID NO: 245764
ugaccaagaauauaguucc

SEQ ID NO: 245766 - RNA, 19 nt, Artificial Sequence
  Description of Artificial Sequence: Synthetic oligonucleotide
  Sense strand starting at position 2893 SEQ ID NO: 3161
cugcuucuccauggaagaa

SEQ ID NO: 245767 - RNA, 19 nt, Artificial Sequence
  Description of Artificial Sequence: Synthetic oligonucleotide
  Antisense strand to SEQ ID NO: 245766
uucuuccauggagaagcag

SEQ ID NO: 245768 - RNA, 19 nt, Artificial Sequence
  Description of Artificial Sequence: Synthetic oligonucleotide
  Sense strand starting at position 2913 SEQ ID NO: 3161
ggaguauuacuguagcaaa

SEQ ID NO: 245769 - RNA, 19 nt, Artificial Sequence
  Description of Artificial Sequence: Synthetic oligonucleotide
  Antisense strand to SEQ ID NO: 245768
uuugcuacaguaauacucc

SEQ ID NO: 245770 - RNA, 19 nt, Artificial Sequence
  Description of Artificial Sequence: Synthetic oligonucleotide
  Sense strand starting at position 2970 SEQ ID NO: 3161
agaucacuaucucuaguau

SEQ ID NO: 245771 - RNA, 19 nt, Artificial Sequence
  Description of Artificial Sequence: Synthetic oligonucleotide
  Antisense strand to SEQ ID NO: 245770
auacuagagauagugaucu

SEQ ID NO: 245772 - RNA, 19 nt, Artificial Sequence
  Description of Artificial Sequence: Synthetic oligonucleotide
  Sense strand starting at position 3013 SEQ ID NO: 3161
gugucaauuugacugguuu

SEQ ID NO: 245773 - RNA, 19 nt, Artificial Sequence
  Description of Artificial Sequence: Synthetic oligonucleotide
  Antisense strand to SEQ ID NO: 245772
aaaccagucaaauugacac

SEQ ID NO: 245774 - RNA, 19 nt, Artificial Sequence
  Description of Artificial Sequence: Synthetic oligonucleotide
  Sense strand starting at position 3091 SEQ ID NO: 3161
caaagaagauuggugugua

SEQ ID NO: 245775 - RNA, 19 nt, Artificial Sequence
  Description of Artificial Sequence: Synthetic oligonucleotide
  Antisense strand to SEQ ID NO: 245774
uacacaccaaucuucuuug

SEQ ID NO: 245776 - RNA, 19 nt, Artificial Sequence
  Description of Artificial Sequence: Synthetic oligonucleotide
  Sense strand starting at position 3096 SEQ ID NO: 3161
aagauugguguguaaguca

SEQ ID NO: 245777 - RNA, 19 nt, Artificial Sequence
  Description of Artificial Sequence: Synthetic oligonucleotide
  Antisense strand to SEQ ID NO: 245776
ugacuuacacaccaaucuu

SEQ ID NO: 245778 - RNA, 19 nt, Artificial Sequence
  Description of Artificial Sequence: Synthetic oligonucleotide
  Sense strand starting at position 3145 SEQ ID NO: 3161
guaggugggauccauccaa

SEQ ID NO: 245779 - RNA, 19 nt, Artificial Sequence
  Description of Artificial Sequence: Synthetic oligonucleotide
  Antisense strand to SEQ ID NO: 245778
uuggauggaucccaccuac

SEQ ID NO: 245780 - RNA, 19 nt, Artificial Sequence
  Description of Artificial Sequence: Synthetic oligonucleotide
  Sense strand starting at position 3242 SEQ ID NO: 3161
ccugccuuuggacauuaua

SEQ ID NO: 245781 - RNA, 19 nt, Artificial Sequence
  Description of Artificial Sequence: Synthetic oligonucleotide
  Antisense strand to SEQ ID NO: 245780
uauaauguccaaaggcagg

SEQ ID NO: 245782 - RNA, 19 nt, Artificial Sequence
  Description of Artificial Sequence: Synthetic oligonucleotide
  Sense strand starting at position 3245 SEQ ID NO: 3161
gccuuuggacauuauaacu

SEQ ID NO: 245783 - RNA, 19 nt, Artificial Sequence
  Description of Artificial Sequence: Synthetic oligonucleotide
  Antisense strand to SEQ ID NO: 245782
aguuauaauguccaaaggc

SEQ ID NO: 245784 - RNA, 19 nt, Artificial Sequence
  Description of Artificial Sequence: Synthetic oligonucleotide
  Sense strand starting at position 3371 SEQ ID NO: 3161
acuugaacugagcauguua

SEQ ID NO: 245785 - RNA, 19 nt, Artificial Sequence
  Description of Artificial Sequence: Synthetic oligonucleotide
  Antisense strand to SEQ ID NO: 245784
uaacaugcucaguucaagu

SEQ ID NO: 245786 - RNA, 19 nt, Artificial Sequence
  Description of Artificial Sequence: Synthetic oligonucleotide
  Sense strand starting at position 3418 SEQ ID NO: 3161
guggucugucaugggauuu

SEQ ID NO: 245787 - RNA, 19 nt, Artificial Sequence
  Description of Artificial Sequence: Synthetic oligonucleotide
  Antisense strand to SEQ ID NO: 245786
aaaucccaugacagaccac

SEQ ID NO: 245788 - RNA, 19 nt, Artificial Sequence
  Description of Artificial Sequence: Synthetic oligonucleotide
  Sense strand starting at position 3594 SEQ ID NO: 3161
gguguuugaacaggaucua

SEQ ID NO: 245789 - RNA, 19 nt, Artificial Sequence
  Description of Artificial Sequence: Synthetic oligonucleotide
  Antisense strand to SEQ ID NO: 245788
uagauccuguucaaacacc

SEQ ID NO: 245790 - RNA, 19 nt, Artificial Sequence
  Description of Artificial Sequence: Synthetic oligonucleotide
  Sense strand starting at position 3737 SEQ ID NO: 3161
ggugaaaucauugauggcu

SEQ ID NO: 245791 - RNA, 19 nt, Artificial Sequence
  Description of Artificial Sequence: Synthetic oligonucleotide
  Antisense strand to SEQ ID NO: 245790
agccaucaaugauuucacc

SEQ ID NO: 245792 - RNA, 19 nt, Artificial Sequence
  Description of Artificial Sequence: Synthetic oligonucleotide
  Sense strand starting at position 3793 SEQ ID NO: 3161
agcaguuuacaauggauaa

SEQ ID NO: 245793 - RNA, 19 nt, Artificial Sequence
  Description of Artificial Sequence: Synthetic oligonucleotide
  Antisense strand to SEQ ID NO: 245792
uuauccauuguaaacugcu

SEQ ID NO: 245794 - RNA, 19 nt, Artificial Sequence
  Description of Artificial Sequence: Synthetic oligonucleotide
  Sense strand starting at position 343 SEQ ID NO: 3162
cuggguuuauuuccaguuu

SEQ ID NO: 245795 - RNA, 19 nt, Artificial Sequence
  Description of Artificial Sequence: Synthetic oligonucleotide
  Antisense strand to SEQ ID NO: 245794
aaacuggaaauaaacccag

SEQ ID NO: 245796 - RNA, 19 nt, Artificial Sequence
  Description of Artificial Sequence: Synthetic oligonucleotide
  Sense strand starting at position 365 SEQ ID NO: 3162
gcuggagagcaauggucaa

SEQ ID NO: 245797 - RNA, 19 nt, Artificial Sequence
  Description of Artificial Sequence: Synthetic oligonucleotide
  Antisense strand to SEQ ID NO: 245796
uugaccauugcucuccagc

SEQ ID NO: 245798 - RNA, 19 nt, Artificial Sequence
  Description of Artificial Sequence: Synthetic oligonucleotide
  Sense strand starting at position 504 SEQ ID NO: 3162
gggacucagucagcagaaa

SEQ ID NO: 245799 - RNA, 19 nt, Artificial Sequence
  Description of Artificial Sequence: Synthetic oligonucleotide
  Antisense strand to SEQ ID NO: 245798
uuucugcugacugaguccc

SEQ ID NO: 245800 - RNA, 19 nt, Artificial Sequence
  Description of Artificial Sequence: Synthetic oligonucleotide
  Sense strand starting at position 518 SEQ ID NO: 3162
agaaacugugggugugaca

SEQ ID NO: 245801 - RNA, 19 nt, Artificial Sequence
  Description of Artificial Sequence: Synthetic oligonucleotide
  Antisense strand to SEQ ID NO: 245800
ugucacacccacaguuucu

SEQ ID NO: 245802 - RNA, 19 nt, Artificial Sequence
  Description of Artificial Sequence: Synthetic oligonucleotide
  Sense strand starting at position 775 SEQ ID NO: 3162
cauccaggguuucucgaaa

SEQ ID NO: 245803 - RNA, 19 nt, Artificial Sequence
  Description of Artificial Sequence: Synthetic oligonucleotide
  Antisense strand to SEQ ID NO: 245802
uuucgagaaacccuggaug

SEQ ID NO: 245804 - RNA, 19 nt, Artificial Sequence
  Description of Artificial Sequence: Synthetic oligonucleotide
  Sense strand starting at position 780 SEQ ID NO: 3162
aggguuucucgaaagcgcu

SEQ ID NO: 245805 - RNA, 19 nt, Artificial Sequence
  Description of Artificial Sequence: Synthetic oligonucleotide
  Antisense strand to SEQ ID NO: 245804
agcgcuuucgagaaacccu

SEQ ID NO: 245806 - RNA, 19 nt, Artificial Sequence
  Description of Artificial Sequence: Synthetic oligonucleotide
  Sense strand starting at position 781 SEQ ID NO: 3162
ggguuucucgaaagcgcua

SEQ ID NO: 245807 - RNA, 19 nt, Artificial Sequence
  Description of Artificial Sequence: Synthetic oligonucleotide
  Antisense strand to SEQ ID NO: 245806
uagcgcuuucgagaaaccc

SEQ ID NO: 245808 - RNA, 19 nt, Artificial Sequence
  Description of Artificial Sequence: Synthetic oligonucleotide
  Sense strand starting at position 981 SEQ ID NO: 3162
gugauaaauuccguccaac

SEQ ID NO: 245809 - RNA, 19 nt, Artificial Sequence
  Description of Artificial Sequence: Synthetic oligonucleotide
  Antisense strand to SEQ ID NO: 245808
guuggacggaauuuaucac

SEQ ID NO: 245810 - RNA, 19 nt, Artificial Sequence
  Description of Artificial Sequence: Synthetic oligonucleotide
  Sense strand starting at position 1383 SEQ ID NO: 3162
gguuucuauuaucuucuua

SEQ ID NO: 245811 - RNA, 19 nt, Artificial Sequence
  Description of Artificial Sequence: Synthetic oligonucleotide
  Antisense strand to SEQ ID NO: 245810
uaagaagauaauagaaacc

SEQ ID NO: 245812 - RNA, 19 nt, Artificial Sequence
  Description of Artificial Sequence: Synthetic oligonucleotide
  Sense strand starting at position 1519 SEQ ID NO: 3162
gggugugaauuaguaugaa

SEQ ID NO: 245813 - RNA, 19 nt, Artificial Sequence
  Description of Artificial Sequence: Synthetic oligonucleotide
  Antisense strand to SEQ ID NO: 245812
uucauacuaauucacaccc

SEQ ID NO: 245814 - RNA, 19 nt, Artificial Sequence
  Description of Artificial Sequence: Synthetic oligonucleotide
  Sense strand starting at position 1522 SEQ ID NO: 3162
ugugaauuaguaugaaguc

SEQ ID NO: 245815 - RNA, 19 nt, Artificial Sequence
  Description of Artificial Sequence: Synthetic oligonucleotide
  Antisense strand to SEQ ID NO: 245814
gacuucauacuaauucaca

SEQ ID NO: 245816 - RNA, 19 nt, Artificial Sequence
  Description of Artificial Sequence: Synthetic oligonucleotide
  Sense strand starting at position 1535 SEQ ID NO: 3162
gaagucaagcugcaagagu

SEQ ID NO: 245817 - RNA, 19 nt, Artificial Sequence
  Description of Artificial Sequence: Synthetic oligonucleotide
  Antisense strand to SEQ ID NO: 245816
acucuugcagcuugacuuc

SEQ ID NO: 245818 - RNA, 19 nt, Artificial Sequence
  Description of Artificial Sequence: Synthetic oligonucleotide
  Sense strand starting at position 1561 SEQ ID NO: 3162
ccagguccaucucuuacua

SEQ ID NO: 245819 - RNA, 19 nt, Artificial Sequence
  Description of Artificial Sequence: Synthetic oligonucleotide
  Antisense strand to SEQ ID NO: 245818
uaguaagagauggaccugg

SEQ ID NO: 245820 - RNA, 19 nt, Artificial Sequence
  Description of Artificial Sequence: Synthetic oligonucleotide
  Sense strand starting at position 1638 SEQ ID NO: 3162
ugggaauaagcauagcacu

SEQ ID NO: 245821 - RNA, 19 nt, Artificial Sequence
  Description of Artificial Sequence: Synthetic oligonucleotide
  Antisense strand to SEQ ID NO: 245820
agugcuaugcuuauuccca

SEQ ID NO: 245822 - RNA, 19 nt, Artificial Sequence
  Description of Artificial Sequence: Synthetic oligonucleotide
  Sense strand starting at position 1724 SEQ ID NO: 3162
cagagugaauguguaacaa

SEQ ID NO: 245823 - RNA, 19 nt, Artificial Sequence
  Description of Artificial Sequence: Synthetic oligonucleotide
  Antisense strand to SEQ ID NO: 245822
uuguuacacauucacucug

SEQ ID NO: 245824 - RNA, 19 nt, Artificial Sequence
  Description of Artificial Sequence: Synthetic oligonucleotide
  Sense strand starting at position 1879 SEQ ID NO: 3162
augaaccagucuuagauuu

SEQ ID NO: 245825 - RNA, 19 nt, Artificial Sequence
  Description of Artificial Sequence: Synthetic oligonucleotide
  Antisense strand to SEQ ID NO: 245824
aaaucuaagacugguucau

SEQ ID NO: 245826 - RNA, 19 nt, Artificial Sequence
  Description of Artificial Sequence: Synthetic oligonucleotide
  Sense strand starting at position 1914 SEQ ID NO: 3162
ggccuuugccguguucuua

SEQ ID NO: 245827 - RNA, 19 nt, Artificial Sequence
  Description of Artificial Sequence: Synthetic oligonucleotide
  Antisense strand to SEQ ID NO: 245826
uaagaacacggcaaaggcc

SEQ ID NO: 245828 - RNA, 19 nt, Artificial Sequence
  Description of Artificial Sequence: Synthetic oligonucleotide
  Sense strand starting at position 1915 SEQ ID NO: 3162
gccuuugccguguucuuaa

SEQ ID NO: 245829 - RNA, 19 nt, Artificial Sequence
  Description of Artificial Sequence: Synthetic oligonucleotide
  Antisense strand to SEQ ID NO: 245828
uuaagaacacggcaaaggc

SEQ ID NO: 245830 - RNA, 19 nt, Artificial Sequence
  Description of Artificial Sequence: Synthetic oligonucleotide
  Sense strand starting at position 2176 SEQ ID NO: 3162
cuccuuucuccugguggga

SEQ ID NO: 245831 - RNA, 19 nt, Artificial Sequence
  Description of Artificial Sequence: Synthetic oligonucleotide
  Antisense strand to SEQ ID NO: 245830
ucccaccaggagaaaggag

SEQ ID NO: 245832 - RNA, 19 nt, Artificial Sequence
  Description of Artificial Sequence: Synthetic oligonucleotide
  Sense strand starting at position 2289 SEQ ID NO: 3162
ggauucucagcgugauuuc

SEQ ID NO: 245833 - RNA, 19 nt, Artificial Sequence
  Description of Artificial Sequence: Synthetic oligonucleotide
  Antisense strand to SEQ ID NO: 245832
gaaaucacgcugagaaucc

SEQ ID NO: 245834 - RNA, 19 nt, Artificial Sequence
  Description of Artificial Sequence: Synthetic oligonucleotide
  Sense strand starting at position 2373 SEQ ID NO: 3162
cauugugggaagugcuaua

SEQ ID NO: 245835 - RNA, 19 nt, Artificial Sequence
  Description of Artificial Sequence: Synthetic oligonucleotide
  Antisense strand to SEQ ID NO: 245834
uauagcacuucccacaaug

SEQ ID NO: 245836 - RNA, 19 nt, Artificial Sequence
  Description of Artificial Sequence: Synthetic oligonucleotide
  Sense strand starting at position 2380 SEQ ID NO: 3162
ggaagugcuauagaauucu

SEQ ID NO: 245837 - RNA, 19 nt, Artificial Sequence
  Description of Artificial Sequence: Synthetic oligonucleotide
  Antisense strand to SEQ ID NO: 245836
agaauucuauagcacuucc

SEQ ID NO: 245838 - RNA, 19 nt, Artificial Sequence
  Description of Artificial Sequence: Synthetic oligonucleotide
  Sense strand starting at position 2408 SEQ ID NO: 3162
gugggcaccaagugaauau

SEQ ID NO: 245839 - RNA, 19 nt, Artificial Sequence
  Description of Artificial Sequence: Synthetic oligonucleotide
  Antisense strand to SEQ ID NO: 245838
auauucacuuggugcccac

SEQ ID NO: 245840 - RNA, 19 nt, Artificial Sequence
  Description of Artificial Sequence: Synthetic oligonucleotide
  Sense strand starting at position 2412 SEQ ID NO: 3162
gcaccaagugaauaucagu

SEQ ID NO: 245841 - RNA, 19 nt, Artificial Sequence
  Description of Artificial Sequence: Synthetic oligonucleotide
  Antisense strand to SEQ ID NO: 245840
acugauauucacuuggugc

SEQ ID NO: 245842 - RNA, 19 nt, Artificial Sequence
  Description of Artificial Sequence: Synthetic oligonucleotide
  Sense strand starting at position 2501 SEQ ID NO: 3162
auucucauauaggugaaua

SEQ ID NO: 245843 - RNA, 19 nt, Artificial Sequence
  Description of Artificial Sequence: Synthetic oligonucleotide
  Antisense strand to SEQ ID NO: 245842
uauucaccuauaugagaau

SEQ ID NO: 245844 - RNA, 19 nt, Artificial Sequence
  Description of Artificial Sequence: Synthetic oligonucleotide
  Sense strand starting at position 2561 SEQ ID NO: 3162
aucuaccuccaggguuauu

SEQ ID NO: 245845 - RNA, 19 nt, Artificial Sequence
  Description of Artificial Sequence: Synthetic oligonucleotide
  Antisense strand to SEQ ID NO: 245844
aauaacccuggagguagau

SEQ ID NO: 245846 - RNA, 19 nt, Artificial Sequence
  Description of Artificial Sequence: Synthetic oligonucleotide
  Sense strand starting at position 2639 SEQ ID NO: 3162
ugacacuuuccagggcaua

SEQ ID NO: 245847 - RNA, 19 nt, Artificial Sequence
  Description of Artificial Sequence: Synthetic oligonucleotide
  Antisense strand to SEQ ID NO: 245846
uaugcccuggaaaguguca

SEQ ID NO: 245848 - RNA, 19 nt, Artificial Sequence
  Description of Artificial Sequence: Synthetic oligonucleotide
  Sense strand starting at position 2640 SEQ ID NO: 3162
gacacuuuccagggcauau

SEQ ID NO: 245849 - RNA, 19 nt, Artificial Sequence
  Description of Artificial Sequence: Synthetic oligonucleotide
  Antisense strand to SEQ ID NO: 245848
auaugcccuggaaaguguc

SEQ ID NO: 245850 - RNA, 19 nt, Artificial Sequence
  Description of Artificial Sequence: Synthetic oligonucleotide
  Sense strand starting at position 2674 SEQ ID NO: 3162
cugagauguuugcugagaa

SEQ ID NO: 245851 - RNA, 19 nt, Artificial Sequence
  Description of Artificial Sequence: Synthetic oligonucleotide
  Antisense strand to SEQ ID NO: 245850
uucucagcaaacaucucag

SEQ ID NO: 245852 - RNA, 19 nt, Artificial Sequence
  Description of Artificial Sequence: Synthetic oligonucleotide
  Sense strand starting at position 2758 SEQ ID NO: 3162
gaugucaaacuguauuagu

SEQ ID NO: 245853 - RNA, 19 nt, Artificial Sequence
  Description of Artificial Sequence: Synthetic oligonucleotide
  Antisense strand to SEQ ID NO: 245852
acuaauacaguuugacauc

SEQ ID NO: 245854 - RNA, 19 nt, Artificial Sequence
  Description of Artificial Sequence: Synthetic oligonucleotide
  Sense strand starting at position 2886 SEQ ID NO: 3162
cagggugucugauuagguu

SEQ ID NO: 245855 - RNA, 19 nt, Artificial Sequence
  Description of Artificial Sequence: Synthetic oligonucleotide
  Antisense strand to SEQ ID NO: 245854
aaccuaaucagacacccug

SEQ ID NO: 245856 - RNA, 19 nt, Artificial Sequence
  Description of Artificial Sequence: Synthetic oligonucleotide
  Sense strand starting at position 2892 SEQ ID NO: 3162
gucugauuagguuguagga

SEQ ID NO: 245857 - RNA, 19 nt, Artificial Sequence
  Description of Artificial Sequence: Synthetic oligonucleotide
  Antisense strand to SEQ ID NO: 245856
uccuacaaccuaaucagac

SEQ ID NO: 245858 - RNA, 19 nt, Artificial Sequence
  Description of Artificial Sequence: Synthetic oligonucleotide
  Sense strand starting at position 2901 SEQ ID NO: 3162
gguuguaggaaagauguca

SEQ ID NO: 245859 - RNA, 19 nt, Artificial Sequence
  Description of Artificial Sequence: Synthetic oligonucleotide
  Antisense strand to SEQ ID NO: 245858
ugacaucuuuccuacaacc

SEQ ID NO: 245860 - RNA, 19 nt, Artificial Sequence
  Description of Artificial Sequence: Synthetic oligonucleotide
  Sense strand starting at position 2953 SEQ ID NO: 3162
gacugaaggaucuguuugu

SEQ ID NO: 245861 - RNA, 19 nt, Artificial Sequence
  Description of Artificial Sequence: Synthetic oligonucleotide
  Antisense strand to SEQ ID NO: 245860
acaaacagauccuucaguc

SEQ ID NO: 245862 - RNA, 19 nt, Artificial Sequence
  Description of Artificial Sequence: Synthetic oligonucleotide
  Sense strand starting at position 2954 SEQ ID NO: 3162
acugaaggaucuguuugua

SEQ ID NO: 245863 - RNA, 19 nt, Artificial Sequence
  Description of Artificial Sequence: Synthetic oligonucleotide
  Antisense strand to SEQ ID NO: 245862
uacaaacagauccuucagu

SEQ ID NO: 245864 - RNA, 19 nt, Artificial Sequence
  Description of Artificial Sequence: Synthetic oligonucleotide
  Sense strand starting at position 2957 SEQ ID NO: 3162
gaaggaucuguuuguaaga

SEQ ID NO: 245865 - RNA, 19 nt, Artificial Sequence
  Description of Artificial Sequence: Synthetic oligonucleotide
  Antisense strand to SEQ ID NO: 245864
ucuuacaaacagauccuuc

SEQ ID NO: 245866 - RNA, 19 nt, Artificial Sequence
  Description of Artificial Sequence: Synthetic oligonucleotide
  Sense strand starting at position 2958 SEQ ID NO: 3162
aaggaucuguuuguaagau

SEQ ID NO: 245867 - RNA, 19 nt, Artificial Sequence
  Description of Artificial Sequence: Synthetic oligonucleotide
  Antisense strand to SEQ ID NO: 245866
aucuuacaaacagauccuu

SEQ ID NO: 245868 - RNA, 19 nt, Artificial Sequence
  Description of Artificial Sequence: Synthetic oligonucleotide
  Sense strand starting at position 2968 SEQ ID NO: 3162
uuguaagauugcucacuca

SEQ ID NO: 245869 - RNA, 19 nt, Artificial Sequence
  Description of Artificial Sequence: Synthetic oligonucleotide
  Antisense strand to SEQ ID NO: 245868
ugagugagcaaucuuacaa

SEQ ID NO: 245870 - RNA, 19 nt, Artificial Sequence
  Description of Artificial Sequence: Synthetic oligonucleotide
  Sense strand starting at position 3040 SEQ ID NO: 3162
gcuugaauauccuuauuag

SEQ ID NO: 245871 - RNA, 19 nt, Artificial Sequence
  Description of Artificial Sequence: Synthetic oligonucleotide
  Antisense strand to SEQ ID NO: 245870
cuaauaaggauauucaagc

SEQ ID NO: 245872 - RNA, 19 nt, Artificial Sequence
  Description of Artificial Sequence: Synthetic oligonucleotide
  Sense strand starting at position 3076 SEQ ID NO: 3162
ccaggugaguguucuaaga

SEQ ID NO: 245873 - RNA, 19 nt, Artificial Sequence
  Description of Artificial Sequence: Synthetic oligonucleotide
  Antisense strand to SEQ ID NO: 245872
ucuuagaacacucaccugg

SEQ ID NO: 245874 - RNA, 19 nt, Artificial Sequence
  Description of Artificial Sequence: Synthetic oligonucleotide
  Sense strand starting at position 107 SEQ ID NO: 3163
agagcugaagaguguaauc

SEQ ID NO: 245875 - RNA, 19 nt, Artificial Sequence
  Description of Artificial Sequence: Synthetic oligonucleotide
  Antisense strand to SEQ ID NO: 245874
gauuacacucuucagcucu

SEQ ID NO: 245876 - RNA, 19 nt, Artificial Sequence
  Description of Artificial Sequence: Synthetic oligonucleotide
  Sense strand starting at position 112 SEQ ID NO: 3163
ugaagaguguaaucccaac

SEQ ID NO: 245877 - RNA, 19 nt, Artificial Sequence
  Description of Artificial Sequence: Synthetic oligonucleotide
  Antisense strand to SEQ ID NO: 245876
guugggauuacacucuuca

SEQ ID NO: 245878 - RNA, 19 nt, Artificial Sequence
  Description of Artificial Sequence: Synthetic oligonucleotide
  Sense strand starting at position 203 SEQ ID NO: 3163
ccuaguaaaugagcaaaca

SEQ ID NO: 245879 - RNA, 19 nt, Artificial Sequence
  Description of Artificial Sequence: Synthetic oligonucleotide
  Antisense strand to SEQ ID NO: 245878
uguuugcucauuuacuagg

SEQ ID NO: 245880 - RNA, 19 nt, Artificial Sequence
  Description of Artificial Sequence: Synthetic oligonucleotide
  Sense strand starting at position 243 SEQ ID NO: 3163
gaguaugcucuugagauuc

SEQ ID NO: 245881 - RNA, 19 nt, Artificial Sequence
  Description of Artificial Sequence: Synthetic oligonucleotide
  Antisense strand to SEQ ID NO: 245880
gaaucucaagagcauacuc

SEQ ID NO: 245882 - RNA, 19 nt, Artificial Sequence
  Description of Artificial Sequence: Synthetic oligonucleotide
  Sense strand starting at position 325 SEQ ID NO: 3163
uggagagcuuggucccuuu

SEQ ID NO: 245883 - RNA, 19 nt, Artificial Sequence
  Description of Artificial Sequence: Synthetic oligonucleotide
  Antisense strand to SEQ ID NO: 245882
aaagggaccaagcucucca

SEQ ID NO: 245884 - RNA, 19 nt, Artificial Sequence
  Description of Artificial Sequence: Synthetic oligonucleotide
  Sense strand starting at position 357 SEQ ID NO: 3163
caaugugaugcugaaaccu

SEQ ID NO: 245885 - RNA, 19 nt, Artificial Sequence
  Description of Artificial Sequence: Synthetic oligonucleotide
  Antisense strand to SEQ ID NO: 245884
agguuucagcaucacauug

SEQ ID NO: 245886 - RNA, 19 nt, Artificial Sequence
  Description of Artificial Sequence: Synthetic oligonucleotide
  Sense strand starting at position 564 SEQ ID NO: 3163
cccaauuaggugugaaauu

SEQ ID NO: 245887 - RNA, 19 nt, Artificial Sequence
  Description of Artificial Sequence: Synthetic oligonucleotide
  Antisense strand to SEQ ID NO: 245886
aauuucacaccuaauuggg

SEQ ID NO: 245888 - RNA, 19 nt, Artificial Sequence
  Description of Artificial Sequence: Synthetic oligonucleotide
  Sense strand starting at position 1005 SEQ ID NO: 3163
aagggaagucacugguuua

SEQ ID NO: 245889 - RNA, 19 nt, Artificial Sequence
  Description of Artificial Sequence: Synthetic oligonucleotide
  Antisense strand to SEQ ID NO: 245888
uaaaccagugacuucccuu

SEQ ID NO: 245890 - RNA, 19 nt, Artificial Sequence
  Description of Artificial Sequence: Synthetic oligonucleotide
  Sense strand starting at position 1006 SEQ ID NO: 3163
agggaagucacugguuuaa

SEQ ID NO: 245891 - RNA, 19 nt, Artificial Sequence
  Description of Artificial Sequence: Synthetic oligonucleotide
  Antisense strand to SEQ ID NO: 245890
uuaaaccagugacuucccu

SEQ ID NO: 245892 - RNA, 19 nt, Artificial Sequence
  Description of Artificial Sequence: Synthetic oligonucleotide
  Sense strand starting at position 1008 SEQ ID NO: 3163
ggaagucacugguuuaaga

SEQ ID NO: 245893 - RNA, 19 nt, Artificial Sequence
  Description of Artificial Sequence: Synthetic oligonucleotide
  Antisense strand to SEQ ID NO: 245892
ucuuaaaccagugacuucc

SEQ ID NO: 245894 - RNA, 19 nt, Artificial Sequence
  Description of Artificial Sequence: Synthetic oligonucleotide
  Sense strand starting at position 1015 SEQ ID NO: 3163
acugguuuaagagggcaaa

SEQ ID NO: 245895 - RNA, 19 nt, Artificial Sequence
  Description of Artificial Sequence: Synthetic oligonucleotide
  Antisense strand to SEQ ID NO: 245894
uuugcccucuuaaaccagu

SEQ ID NO: 245896 - RNA, 19 nt, Artificial Sequence
  Description of Artificial Sequence: Synthetic oligonucleotide
  Sense strand starting at position 1137 SEQ ID NO: 3163
ggagcuggaucagugacua

SEQ ID NO: 245897 - RNA, 19 nt, Artificial Sequence
  Description of Artificial Sequence: Synthetic oligonucleotide
  Antisense strand to SEQ ID NO: 245896
uagucacugauccagcucc

SEQ ID NO: 245898 - RNA, 19 nt, Artificial Sequence
  Description of Artificial Sequence: Synthetic oligonucleotide
  Sense strand starting at position 1436 SEQ ID NO: 3163
agauguuuccaagaccuuc

SEQ ID NO: 245899 - RNA, 19 nt, Artificial Sequence
  Description of Artificial Sequence: Synthetic oligonucleotide
  Antisense strand to SEQ ID NO: 245898
gaaggucuuggaaacaucu

SEQ ID NO: 245900 - RNA, 19 nt, Artificial Sequence
  Description of Artificial Sequence: Synthetic oligonucleotide
  Sense strand starting at position 1932 SEQ ID NO: 3163
uugacuauaccuggcaaga

SEQ ID NO: 245901 - RNA, 19 nt, Artificial Sequence
  Description of Artificial Sequence: Synthetic oligonucleotide
  Antisense strand to SEQ ID NO: 245900
ucuugccagguauagucaa

SEQ ID NO: 245902 - RNA, 19 nt, Artificial Sequence
  Description of Artificial Sequence: Synthetic oligonucleotide
  Sense strand starting at position 2004 SEQ ID NO: 3163
aggucagugauggguucua

SEQ ID NO: 245903 - RNA, 19 nt, Artificial Sequence
  Description of Artificial Sequence: Synthetic oligonucleotide
  Antisense strand to SEQ ID NO: 245902
uagaacccaucacugaccu

SEQ ID NO: 245904 - RNA, 19 nt, Artificial Sequence
  Description of Artificial Sequence: Synthetic oligonucleotide
  Sense strand starting at position 2033 SEQ ID NO: 3163
gaucauuuaucuggaugag

SEQ ID NO: 245905 - RNA, 19 nt, Artificial Sequence
  Description of Artificial Sequence: Synthetic oligonucleotide
  Antisense strand to SEQ ID NO: 245904
cucauccagauaaaugauc

SEQ ID NO: 245906 - RNA, 19 nt, Artificial Sequence
  Description of Artificial Sequence: Synthetic oligonucleotide
  Sense strand starting at position 2081 SEQ ID NO: 3163
gggcaugagaaacguauga

SEQ ID NO: 245907 - RNA, 19 nt, Artificial Sequence
  Description of Artificial Sequence: Synthetic oligonucleotide
  Antisense strand to SEQ ID NO: 245906
ucauacguuucucaugccc

SEQ ID NO: 245908 - RNA, 19 nt, Artificial Sequence
  Description of Artificial Sequence: Synthetic oligonucleotide
  Sense strand starting at position 2083 SEQ ID NO: 3163
gcaugagaaacguaugaca

SEQ ID NO: 245909 - RNA, 19 nt, Artificial Sequence
  Description of Artificial Sequence: Synthetic oligonucleotide
  Antisense strand to SEQ ID NO: 245908
ugucauacguuucucaugc

SEQ ID NO: 245910 - RNA, 19 nt, Artificial Sequence
  Description of Artificial Sequence: Synthetic oligonucleotide
  Sense strand starting at position 2085 SEQ ID NO: 3163
augagaaacguaugacaug

SEQ ID NO: 245911 - RNA, 19 nt, Artificial Sequence
  Description of Artificial Sequence: Synthetic oligonucleotide
  Antisense strand to SEQ ID NO: 245910
caugucauacguuucucau

SEQ ID NO: 245912 - RNA, 19 nt, Artificial Sequence
  Description of Artificial Sequence: Synthetic oligonucleotide
  Sense strand starting at position 2198 SEQ ID NO: 3163
gaaauaaguguugagccaa

SEQ ID NO: 245913 - RNA, 19 nt, Artificial Sequence
  Description of Artificial Sequence: Synthetic oligonucleotide
  Antisense strand to SEQ ID NO: 245912
uuggcucaacacuuauuuc

SEQ ID NO: 245914 - RNA, 19 nt, Artificial Sequence
  Description of Artificial Sequence: Synthetic oligonucleotide
  Sense strand starting at position 2253 SEQ ID NO: 3163
gacagauccuagguuucuc

SEQ ID NO: 245915 - RNA, 19 nt, Artificial Sequence
  Description of Artificial Sequence: Synthetic oligonucleotide
  Antisense strand to SEQ ID NO: 245914
gagaaaccuaggaucuguc

SEQ ID NO: 245916 - RNA, 19 nt, Artificial Sequence
  Description of Artificial Sequence: Synthetic oligonucleotide
  Sense strand starting at position 2286 SEQ ID NO: 3163
aagggaauuucccagaguu

SEQ ID NO: 245917 - RNA, 19 nt, Artificial Sequence
  Description of Artificial Sequence: Synthetic oligonucleotide
  Antisense strand to SEQ ID NO: 245916
aacucugggaaauucccuu

SEQ ID NO: 245918 - RNA, 19 nt, Artificial Sequence
  Description of Artificial Sequence: Synthetic oligonucleotide
  Sense strand starting at position 2312 SEQ ID NO: 3163
ccugucaugucauucuaga

SEQ ID NO: 245919 - RNA, 19 nt, Artificial Sequence
  Description of Artificial Sequence: Synthetic oligonucleotide
  Antisense strand to SEQ ID NO: 245918
ucuagaaugacaugacagg

SEQ ID NO: 245920 - RNA, 19 nt, Artificial Sequence
  Description of Artificial Sequence: Synthetic oligonucleotide
  Sense strand starting at position 2669 SEQ ID NO: 3163
ggcagcgauuucucccaaa

SEQ ID NO: 245921 - RNA, 19 nt, Artificial Sequence
  Description of Artificial Sequence: Synthetic oligonucleotide
  Antisense strand to SEQ ID NO: 245920
uuugggagaaaucgcugcc

SEQ ID NO: 245922 - RNA, 19 nt, Artificial Sequence
  Description of Artificial Sequence: Synthetic oligonucleotide
  Sense strand starting at position 2730 SEQ ID NO: 3163
gguuccugaucagugguaa

SEQ ID NO: 245923 - RNA, 19 nt, Artificial Sequence
  Description of Artificial Sequence: Synthetic oligonucleotide
  Antisense strand to SEQ ID NO: 245922
uuaccacugaucaggaacc

SEQ ID NO: 245924 - RNA, 19 nt, Artificial Sequence
  Description of Artificial Sequence: Synthetic oligonucleotide
  Sense strand starting at position 2731 SEQ ID NO: 3163
guuccugaucagugguaau

SEQ ID NO: 245925 - RNA, 19 nt, Artificial Sequence
  Description of Artificial Sequence: Synthetic oligonucleotide
  Antisense strand to SEQ ID NO: 245924
auuaccacugaucaggaac

SEQ ID NO: 245926 - RNA, 19 nt, Artificial Sequence
  Description of Artificial Sequence: Synthetic oligonucleotide
  Sense strand starting at position 2809 SEQ ID NO: 3163
uuuacugagguauaaguua

SEQ ID NO: 245927 - RNA, 19 nt, Artificial Sequence
  Description of Artificial Sequence: Synthetic oligonucleotide
  Antisense strand to SEQ ID NO: 245926
uaacuuauaccucaguaaa

SEQ ID NO: 245928 - RNA, 19 nt, Artificial Sequence
  Description of Artificial Sequence: Synthetic oligonucleotide
  Sense strand starting at position 2831 SEQ ID NO: 3163
acuagagugaagugaguuu

SEQ ID NO: 245929 - RNA, 19 nt, Artificial Sequence
  Description of Artificial Sequence: Synthetic oligonucleotide
  Antisense strand to SEQ ID NO: 245928
aaacucacuucacucuagu

SEQ ID NO: 245930 - RNA, 19 nt, Artificial Sequence
  Description of Artificial Sequence: Synthetic oligonucleotide
  Sense strand starting at position 2969 SEQ ID NO: 3163
ugcaaagagucuccugacu

SEQ ID NO: 245931 - RNA, 19 nt, Artificial Sequence
  Description of Artificial Sequence: Synthetic oligonucleotide
  Antisense strand to SEQ ID NO: 245930
agucaggagacucuuugca

SEQ ID NO: 245932 - RNA, 19 nt, Artificial Sequence
  Description of Artificial Sequence: Synthetic oligonucleotide
  Sense strand starting at position 3016 SEQ ID NO: 3163
ccuuucuggccuuggaaga

SEQ ID NO: 245933 - RNA, 19 nt, Artificial Sequence
  Description of Artificial Sequence: Synthetic oligonucleotide
  Antisense strand to SEQ ID NO: 245932
ucuuccaaggccagaaagg

SEQ ID NO: 245934 - RNA, 19 nt, Artificial Sequence
  Description of Artificial Sequence: Synthetic oligonucleotide
  Sense strand starting at position 3017 SEQ ID NO: 3163
cuuucuggccuuggaagaa

SEQ ID NO: 245935 - RNA, 19 nt, Artificial Sequence
  Description of Artificial Sequence: Synthetic oligonucleotide
  Antisense strand to SEQ ID NO: 245934
uucuuccaaggccagaaag

SEQ ID NO: 245936 - RNA, 19 nt, Artificial Sequence
  Description of Artificial Sequence: Synthetic oligonucleotide
  Sense strand starting at position 3099 SEQ ID NO: 3163
uaggaaagagugugguaau

SEQ ID NO: 245937 - RNA, 19 nt, Artificial Sequence
  Description of Artificial Sequence: Synthetic oligonucleotide
  Antisense strand to SEQ ID NO: 245936
auuaccacacucuuuccua

SEQ ID NO: 245938 - RNA, 19 nt, Artificial Sequence
  Description of Artificial Sequence: Synthetic oligonucleotide
  Sense strand starting at position 3306 SEQ ID NO: 3163
cugggaucccucugaaagc

SEQ ID NO: 245939 - RNA, 19 nt, Artificial Sequence
  Description of Artificial Sequence: Synthetic oligonucleotide
  Antisense strand to SEQ ID NO: 245938
gcuuucagagggaucccag

SEQ ID NO: 245940 - RNA, 19 nt, Artificial Sequence
  Description of Artificial Sequence: Synthetic oligonucleotide
  Sense strand starting at position 3371 SEQ ID NO: 3163
acuagauacacguguguug

SEQ ID NO: 245941 - RNA, 19 nt, Artificial Sequence
  Description of Artificial Sequence: Synthetic oligonucleotide
  Antisense strand to SEQ ID NO: 245940
caacacacguguaucuagu

SEQ ID NO: 245942 - RNA, 19 nt, Artificial Sequence
  Description of Artificial Sequence: Synthetic oligonucleotide
  Sense strand starting at position 3407 SEQ ID NO: 3163
aagggauugcugugguauc

SEQ ID NO: 245943 - RNA, 19 nt, Artificial Sequence
  Description of Artificial Sequence: Synthetic oligonucleotide
  Antisense strand to SEQ ID NO: 245942
gauaccacagcaaucccuu

SEQ ID NO: 245944 - RNA, 19 nt, Artificial Sequence
  Description of Artificial Sequence: Synthetic oligonucleotide
  Sense strand starting at position 3509 SEQ ID NO: 3163
ccagauaugagucggaggu

SEQ ID NO: 245945 - RNA, 19 nt, Artificial Sequence
  Description of Artificial Sequence: Synthetic oligonucleotide
  Antisense strand to SEQ ID NO: 245944
accuccgacucauaucugg

SEQ ID NO: 245946 - RNA, 19 nt, Artificial Sequence
  Description of Artificial Sequence: Synthetic oligonucleotide
  Sense strand starting at position 3568 SEQ ID NO: 3163
gagaguacagucuggucaa

SEQ ID NO: 245947 - RNA, 19 nt, Artificial Sequence
  Description of Artificial Sequence: Synthetic oligonucleotide
  Antisense strand to SEQ ID NO: 245946
uugaccagacuguacucuc

SEQ ID NO: 245948 - RNA, 19 nt, Artificial Sequence
  Description of Artificial Sequence: Synthetic oligonucleotide
  Sense strand starting at position 3862 SEQ ID NO: 3163
uccugaagucccuaguuua

SEQ ID NO: 245949 - RNA, 19 nt, Artificial Sequence
  Description of Artificial Sequence: Synthetic oligonucleotide
  Antisense strand to SEQ ID NO: 245948
uaaacuagggacuucagga

SEQ ID NO: 245950 - RNA, 19 nt, Artificial Sequence
  Description of Artificial Sequence: Synthetic oligonucleotide
  Sense strand starting at position 3865 SEQ ID NO: 3163
ugaagucccuaguuuaacu

SEQ ID NO: 245951 - RNA, 19 nt, Artificial Sequence
  Description of Artificial Sequence: Synthetic oligonucleotide
  Antisense strand to SEQ ID NO: 245950
aguuaaacuagggacuuca

SEQ ID NO: 245952 - RNA, 19 nt, Artificial Sequence
  Description of Artificial Sequence: Synthetic oligonucleotide
  Sense strand starting at position 3876 SEQ ID NO: 3163
guuuaacuguuagugugaa

SEQ ID NO: 245953 - RNA, 19 nt, Artificial Sequence
  Description of Artificial Sequence: Synthetic oligonucleotide
  Antisense strand to SEQ ID NO: 245952
uucacacuaacaguuaaac

SEQ ID NO: 245954 - RNA, 19 nt, Artificial Sequence
  Description of Artificial Sequence: Synthetic oligonucleotide
  Sense strand starting at position 256 SEQ ID NO: 3165
ggucauauauuccuuacua

SEQ ID NO: 245955 - RNA, 19 nt, Artificial Sequence
  Description of Artificial Sequence: Synthetic oligonucleotide
  Antisense strand to SEQ ID NO: 245954
uaguaaggaauauaugacc

SEQ ID NO: 245956 - RNA, 19 nt, Artificial Sequence
  Description of Artificial Sequence: Synthetic oligonucleotide
  Sense strand starting at position 264 SEQ ID NO: 3165
auuccuuacuaagugagga

SEQ ID NO: 245957 - RNA, 19 nt, Artificial Sequence
  Description of Artificial Sequence: Synthetic oligonucleotide
  Antisense strand to SEQ ID NO: 245956
uccucacuuaguaaggaau

SEQ ID NO: 245958 - RNA, 19 nt, Artificial Sequence
  Description of Artificial Sequence: Synthetic oligonucleotide
  Sense strand starting at position 277 SEQ ID NO: 3165
ugaggaguuucuuuaaauu

SEQ ID NO: 245959 - RNA, 19 nt, Artificial Sequence
  Description of Artificial Sequence: Synthetic oligonucleotide
  Antisense strand to SEQ ID NO: 245958
aauuuaaagaaacuccuca

SEQ ID NO: 245960 - RNA, 19 nt, Artificial Sequence
  Description of Artificial Sequence: Synthetic oligonucleotide
  Sense strand starting at position 343 SEQ ID NO: 3165
ucaguugauuuccuggcau

SEQ ID NO: 245961 - RNA, 19 nt, Artificial Sequence
  Description of Artificial Sequence: Synthetic oligonucleotide
  Antisense strand to SEQ ID NO: 245960
augccaggaaaucaacuga

SEQ ID NO: 245962 - RNA, 19 nt, Artificial Sequence
  Description of Artificial Sequence: Synthetic oligonucleotide
  Sense strand starting at position 385 SEQ ID NO: 3165
uaaaguggguuucuccaaa

SEQ ID NO: 245963 - RNA, 19 nt, Artificial Sequence
  Description of Artificial Sequence: Synthetic oligonucleotide
  Antisense strand to SEQ ID NO: 245962
uuuggagaaacccacuuua

SEQ ID NO: 245964 - RNA, 19 nt, Artificial Sequence
  Description of Artificial Sequence: Synthetic oligonucleotide
  Sense strand starting at position 489 SEQ ID NO: 3165
accucagagucacucauau

SEQ ID NO: 245965 - RNA, 19 nt, Artificial Sequence
  Description of Artificial Sequence: Synthetic oligonucleotide
  Antisense strand to SEQ ID NO: 245964
auaugagugacucugaggu

SEQ ID NO: 245966 - RNA, 19 nt, Artificial Sequence
  Description of Artificial Sequence: Synthetic oligonucleotide
  Sense strand starting at position 526 SEQ ID NO: 3165
ucucuuaugagaggaugua

SEQ ID NO: 245967 - RNA, 19 nt, Artificial Sequence
  Description of Artificial Sequence: Synthetic oligonucleotide
  Antisense strand to SEQ ID NO: 245966
uacauccucucauaagaga

SEQ ID NO: 245968 - RNA, 19 nt, Artificial Sequence
  Description of Artificial Sequence: Synthetic oligonucleotide
  Sense strand starting at position 548 SEQ ID NO: 3165
agcagaauucccugcauuu

SEQ ID NO: 245969 - RNA, 19 nt, Artificial Sequence
  Description of Artificial Sequence: Synthetic oligonucleotide
  Antisense strand to SEQ ID NO: 245968
aaaugcagggaauucugcu

SEQ ID NO: 245970 - RNA, 19 nt, Artificial Sequence
  Description of Artificial Sequence: Synthetic oligonucleotide
  Sense strand starting at position 614 SEQ ID NO: 3165
gugggacuccucuaaucga

SEQ ID NO: 245971 - RNA, 19 nt, Artificial Sequence
  Description of Artificial Sequence: Synthetic oligonucleotide
  Antisense strand to SEQ ID NO: 245970
ucgauuagaggagucccac

SEQ ID NO: 245972 - RNA, 19 nt, Artificial Sequence
  Description of Artificial Sequence: Synthetic oligonucleotide
  Sense strand starting at position 651 SEQ ID NO: 3165
ugggaagugcuuuauuaga

SEQ ID NO: 245973 - RNA, 19 nt, Artificial Sequence
  Description of Artificial Sequence: Synthetic oligonucleotide
  Antisense strand to SEQ ID NO: 245972
ucuaauaaagcacuuccca

SEQ ID NO: 245974 - RNA, 19 nt, Artificial Sequence
  Description of Artificial Sequence: Synthetic oligonucleotide
  Sense strand starting at position 659 SEQ ID NO: 3165
gcuuuauuagacugagaga

SEQ ID NO: 245975 - RNA, 19 nt, Artificial Sequence
  Description of Artificial Sequence: Synthetic oligonucleotide
  Antisense strand to SEQ ID NO: 245974
ucucucagucuaauaaagc

SEQ ID NO: 245976 - RNA, 19 nt, Artificial Sequence
  Description of Artificial Sequence: Synthetic oligonucleotide
  Sense strand starting at position 697 SEQ ID NO: 3165
uguuguaaagcccagaaca

SEQ ID NO: 245977 - RNA, 19 nt, Artificial Sequence
  Description of Artificial Sequence: Synthetic oligonucleotide
  Antisense strand to SEQ ID NO: 245976
uguucugggcuuuacaaca

SEQ ID NO: 245978 - RNA, 19 nt, Artificial Sequence
  Description of Artificial Sequence: Synthetic oligonucleotide
  Sense strand starting at position 1109 SEQ ID NO: 3165
cgggucuauccagaacuca

SEQ ID NO: 245979 - RNA, 19 nt, Artificial Sequence
  Description of Artificial Sequence: Synthetic oligonucleotide
  Antisense strand to SEQ ID NO: 245978
ugaguucuggauagacccg

SEQ ID NO: 245980 - RNA, 19 nt, Artificial Sequence
  Description of Artificial Sequence: Synthetic oligonucleotide
  Sense strand starting at position 1593 SEQ ID NO: 3165
gaagcuucuggagacaguu

SEQ ID NO: 245981 - RNA, 19 nt, Artificial Sequence
  Description of Artificial Sequence: Synthetic oligonucleotide
  Antisense strand to SEQ ID NO: 245980
aacugucuccagaagcuuc

SEQ ID NO: 245982 - RNA, 19 nt, Artificial Sequence
  Description of Artificial Sequence: Synthetic oligonucleotide
  Sense strand starting at position 1628 SEQ ID NO: 3165
gaagaacuuccuugaggcu

SEQ ID NO: 245983 - RNA, 19 nt, Artificial Sequence
  Description of Artificial Sequence: Synthetic oligonucleotide
  Antisense strand to SEQ ID NO: 245982
agccucaaggaaguucuuc

SEQ ID NO: 245984 - RNA, 19 nt, Artificial Sequence
  Description of Artificial Sequence: Synthetic oligonucleotide
  Sense strand starting at position 1993 SEQ ID NO: 3165
ggacucuccugcuuaggga

SEQ ID NO: 245985 - RNA, 19 nt, Artificial Sequence
  Description of Artificial Sequence: Synthetic oligonucleotide
  Antisense strand to SEQ ID NO: 245984
ucccuaagcaggagagucc

SEQ ID NO: 245986 - RNA, 19 nt, Artificial Sequence
  Description of Artificial Sequence: Synthetic oligonucleotide
  Sense strand starting at position 1994 SEQ ID NO: 3165
gacucuccugcuuagggaa

SEQ ID NO: 245987 - RNA, 19 nt, Artificial Sequence
  Description of Artificial Sequence: Synthetic oligonucleotide
  Antisense strand to SEQ ID NO: 245986
uucccuaagcaggagaguc

SEQ ID NO: 245988 - RNA, 19 nt, Artificial Sequence
  Description of Artificial Sequence: Synthetic oligonucleotide
  Sense strand starting at position 2090 SEQ ID NO: 3165
uucugagugcaucaucaga

SEQ ID NO: 245989 - RNA, 19 nt, Artificial Sequence
  Description of Artificial Sequence: Synthetic oligonucleotide
  Antisense strand to SEQ ID NO: 245988
ucugaugaugcacucagaa

SEQ ID NO: 245990 - RNA, 19 nt, Artificial Sequence
  Description of Artificial Sequence: Synthetic oligonucleotide
  Sense strand starting at position 2092 SEQ ID NO: 3165
cugagugcaucaucagaaa

SEQ ID NO: 245991 - RNA, 19 nt, Artificial Sequence
  Description of Artificial Sequence: Synthetic oligonucleotide
  Antisense strand to SEQ ID NO: 245990
uuucugaugaugcacucag

SEQ ID NO: 245992 - RNA, 19 nt, Artificial Sequence
  Description of Artificial Sequence: Synthetic oligonucleotide
  Sense strand starting at position 2275 SEQ ID NO: 3165
gcuguauaguauuuaacug

SEQ ID NO: 245993 - RNA, 19 nt, Artificial Sequence
  Description of Artificial Sequence: Synthetic oligonucleotide
  Antisense strand to SEQ ID NO: 245992
caguuaaauacuauacagc

SEQ ID NO: 245994 - RNA, 19 nt, Artificial Sequence
  Description of Artificial Sequence: Synthetic oligonucleotide
  Sense strand starting at position 2290 SEQ ID NO: 3165
acuguaucacuguaacauu

SEQ ID NO: 245995 - RNA, 19 nt, Artificial Sequence
  Description of Artificial Sequence: Synthetic oligonucleotide
  Antisense strand to SEQ ID NO: 245994
aauguuacagugauacagu

SEQ ID NO: 245996 - RNA, 19 nt, Artificial Sequence
  Description of Artificial Sequence: Synthetic oligonucleotide
  Sense strand starting at position 2415 SEQ ID NO: 3165
ucauguaucugguuauuuc

SEQ ID NO: 245997 - RNA, 19 nt, Artificial Sequence
  Description of Artificial Sequence: Synthetic oligonucleotide
  Antisense strand to SEQ ID NO: 245996
gaaauaaccagauacauga

SEQ ID NO: 245998 - RNA, 19 nt, Artificial Sequence
  Description of Artificial Sequence: Synthetic oligonucleotide
  Sense strand starting at position 2419 SEQ ID NO: 3165
guaucugguuauuucuuua

SEQ ID NO: 245999 - RNA, 19 nt, Artificial Sequence
  Description of Artificial Sequence: Synthetic oligonucleotide
  Antisense strand to SEQ ID NO: 245998
uaaagaaauaaccagauac

SEQ ID NO: 246000 - RNA, 19 nt, Artificial Sequence
  Description of Artificial Sequence: Synthetic oligonucleotide
  Sense strand starting at position 2461 SEQ ID NO: 3165
aucuauaauucuguaagug

SEQ ID NO: 246001 - RNA, 19 nt, Artificial Sequence
  Description of Artificial Sequence: Synthetic oligonucleotide
  Antisense strand to SEQ ID NO: 246000
cacuuacagaauuauagau

SEQ ID NO: 246002 - RNA, 19 nt, Artificial Sequence
  Description of Artificial Sequence: Synthetic oligonucleotide
  Sense strand starting at position 2462 SEQ ID NO: 3165
ucuauaauucuguaaguga

SEQ ID NO: 246003 - RNA, 19 nt, Artificial Sequence
  Description of Artificial Sequence: Synthetic oligonucleotide
  Antisense strand to SEQ ID NO: 246002
ucacuuacagaauuauaga

SEQ ID NO: 246004 - RNA, 19 nt, Artificial Sequence
  Description of Artificial Sequence: Synthetic oligonucleotide
  Sense strand starting at position 2465 SEQ ID NO: 3165
auaauucuguaagugaucu

SEQ ID NO: 246005 - RNA, 19 nt, Artificial Sequence
  Description of Artificial Sequence: Synthetic oligonucleotide
  Antisense strand to SEQ ID NO: 246004
agaucacuuacagaauuau

SEQ ID NO: 246006 - RNA, 19 nt, Artificial Sequence
  Description of Artificial Sequence: Synthetic oligonucleotide
  Sense strand starting at position 2560 SEQ ID NO: 3165
cugugauggaucugaaaua

SEQ ID NO: 246007 - RNA, 19 nt, Artificial Sequence
  Description of Artificial Sequence: Synthetic oligonucleotide
  Antisense strand to SEQ ID NO: 246006
uauuucagauccaucacag

SEQ ID NO: 246008 - RNA, 19 nt, Artificial Sequence
  Description of Artificial Sequence: Synthetic oligonucleotide
  Sense strand starting at position 2760 SEQ ID NO: 3165
uacauauguguacauguua

SEQ ID NO: 246009 - RNA, 19 nt, Artificial Sequence
  Description of Artificial Sequence: Synthetic oligonucleotide
  Antisense strand to SEQ ID NO: 246008
uaacauguacacauaugua

SEQ ID NO: 246010 - RNA, 19 nt, Artificial Sequence
  Description of Artificial Sequence: Synthetic oligonucleotide
  Sense strand starting at position 3246 SEQ ID NO: 3165
augaaacuaugacugugua

SEQ ID NO: 246011 - RNA, 19 nt, Artificial Sequence
  Description of Artificial Sequence: Synthetic oligonucleotide
  Antisense strand to SEQ ID NO: 246010
uacacagucauaguuucau

SEQ ID NO: 246012 - RNA, 19 nt, Artificial Sequence
  Description of Artificial Sequence: Synthetic oligonucleotide
  Sense strand starting at position 3247 SEQ ID NO: 3165
ugaaacuaugacuguguau

SEQ ID NO: 246013 - RNA, 19 nt, Artificial Sequence
  Description of Artificial Sequence: Synthetic oligonucleotide
  Antisense strand to SEQ ID NO: 246012
auacacagucauaguuuca

SEQ ID NO: 246014 - RNA, 19 nt, Artificial Sequence
  Description of Artificial Sequence: Synthetic oligonucleotide
  Sense strand starting at position 3309 SEQ ID NO: 3165
acaauaaguucucucugga

SEQ ID NO: 246015 - RNA, 19 nt, Artificial Sequence
  Description of Artificial Sequence: Synthetic oligonucleotide
  Antisense strand to SEQ ID NO: 246014
uccagagagaacuuauugu

SEQ ID NO: 246016 - RNA, 19 nt, Artificial Sequence
  Description of Artificial Sequence: Synthetic oligonucleotide
  Sense strand starting at position 3356 SEQ ID NO: 3165
ggucucagacucugugaaa

SEQ ID NO: 246017 - RNA, 19 nt, Artificial Sequence
  Description of Artificial Sequence: Synthetic oligonucleotide
  Antisense strand to SEQ ID NO: 246016
uuucacagagucugagacc

SEQ ID NO: 246018 - RNA, 19 nt, Artificial Sequence
  Description of Artificial Sequence: Synthetic oligonucleotide
  Sense strand starting at position 3367 SEQ ID NO: 3165
cugugaaauuagccaugaa

SEQ ID NO: 246019 - RNA, 19 nt, Artificial Sequence
  Description of Artificial Sequence: Synthetic oligonucleotide
  Antisense strand to SEQ ID NO: 246018
uucauggcuaauuucacag

SEQ ID NO: 246020 - RNA, 19 nt, Artificial Sequence
  Description of Artificial Sequence: Synthetic oligonucleotide
  Sense strand starting at position 3370 SEQ ID NO: 3165
ugaaauuagccaugaacua

SEQ ID NO: 246021 - RNA, 19 nt, Artificial Sequence
  Description of Artificial Sequence: Synthetic oligonucleotide
  Antisense strand to SEQ ID NO: 246020
uaguucauggcuaauuuca

SEQ ID NO: 246022 - RNA, 19 nt, Artificial Sequence
  Description of Artificial Sequence: Synthetic oligonucleotide
  Sense strand starting at position 3411 SEQ ID NO: 3165
auuauuccugucugauaga

SEQ ID NO: 246023 - RNA, 19 nt, Artificial Sequence
  Description of Artificial Sequence: Synthetic oligonucleotide
  Antisense strand to SEQ ID NO: 246022
ucuaucagacaggaauaau

SEQ ID NO: 246024 - RNA, 19 nt, Artificial Sequence
  Description of Artificial Sequence: Synthetic oligonucleotide
  Sense strand starting at position 3623 SEQ ID NO: 3165
acacaugcucacuauaugu

SEQ ID NO: 246025 - RNA, 19 nt, Artificial Sequence
  Description of Artificial Sequence: Synthetic oligonucleotide
  Antisense strand to SEQ ID NO: 246024
acauauagugagcaugugu

SEQ ID NO: 246026 - RNA, 19 nt, Artificial Sequence
  Description of Artificial Sequence: Synthetic oligonucleotide
  Sense strand starting at position 3633 SEQ ID NO: 3165
acuauauguguguaugaga

SEQ ID NO: 246027 - RNA, 19 nt, Artificial Sequence
  Description of Artificial Sequence: Synthetic oligonucleotide
  Antisense strand to SEQ ID NO: 246026
ucucauacacacauauagu

SEQ ID NO: 246028 - RNA, 19 nt, Artificial Sequence
  Description of Artificial Sequence: Synthetic oligonucleotide
  Sense strand starting at position 3743 SEQ ID NO: 3165
guccauaaauucuuggaaa

SEQ ID NO: 246029 - RNA, 19 nt, Artificial Sequence
  Description of Artificial Sequence: Synthetic oligonucleotide
  Antisense strand to SEQ ID NO: 246028
uuuccaagaauuuauggac

SEQ ID NO: 246030 - RNA, 19 nt, Artificial Sequence
  Description of Artificial Sequence: Synthetic oligonucleotide
  Sense strand starting at position 3765 SEQ ID NO: 3165
caucuuuaagaaggugaua

SEQ ID NO: 246031 - RNA, 19 nt, Artificial Sequence
  Description of Artificial Sequence: Synthetic oligonucleotide
  Antisense strand to SEQ ID NO: 246030
uaucaccuucuuaaagaug

SEQ ID NO: 246032 - RNA, 19 nt, Artificial Sequence
  Description of Artificial Sequence: Synthetic oligonucleotide
  Sense strand starting at position 3767 SEQ ID NO: 3165
ucuuuaagaaggugauaug

SEQ ID NO: 246033 - RNA, 19 nt, Artificial Sequence
  Description of Artificial Sequence: Synthetic oligonucleotide
  Antisense strand to SEQ ID NO: 246032
cauaucaccuucuuaaaga

SEQ ID NO: 246034 - RNA, 19 nt, Artificial Sequence
  Description of Artificial Sequence: Synthetic oligonucleotide
  Sense strand starting at position 143 SEQ ID NO: 3164
aggaaagugggucauguuu

SEQ ID NO: 246035 - RNA, 19 nt, Artificial Sequence
  Description of Artificial Sequence: Synthetic oligonucleotide
  Antisense strand to SEQ ID NO: 246034
aaacaugacccacuuuccu

SEQ ID NO: 246036 - RNA, 19 nt, Artificial Sequence
  Description of Artificial Sequence: Synthetic oligonucleotide
  Sense strand starting at position 366 SEQ ID NO: 3164
ccuacugugccagaaguaa

SEQ ID NO: 246037 - RNA, 19 nt, Artificial Sequence
  Description of Artificial Sequence: Synthetic oligonucleotide
  Antisense strand to SEQ ID NO: 246036
uuacuucuggcacaguagg

SEQ ID NO: 246038 - RNA, 19 nt, Artificial Sequence
  Description of Artificial Sequence: Synthetic oligonucleotide
  Sense strand starting at position 726 SEQ ID NO: 3164
ggucauauauuccuuacua

SEQ ID NO: 246039 - RNA, 19 nt, Artificial Sequence
  Description of Artificial Sequence: Synthetic oligonucleotide
  Antisense strand to SEQ ID NO: 246038
uaguaaggaauauaugacc

SEQ ID NO: 246040 - RNA, 19 nt, Artificial Sequence
  Description of Artificial Sequence: Synthetic oligonucleotide
  Sense strand starting at position 734 SEQ ID NO: 3164
auuccuuacuaagugagga

SEQ ID NO: 246041 - RNA, 19 nt, Artificial Sequence
  Description of Artificial Sequence: Synthetic oligonucleotide
  Antisense strand to SEQ ID NO: 246040
uccucacuuaguaaggaau

SEQ ID NO: 246042 - RNA, 19 nt, Artificial Sequence
  Description of Artificial Sequence: Synthetic oligonucleotide
  Sense strand starting at position 747 SEQ ID NO: 3164
ugaggaguuucuuuaaauu

SEQ ID NO: 246043 - RNA, 19 nt, Artificial Sequence
  Description of Artificial Sequence: Synthetic oligonucleotide
  Antisense strand to SEQ ID NO: 246042
aauuuaaagaaacuccuca

SEQ ID NO: 246044 - RNA, 19 nt, Artificial Sequence
  Description of Artificial Sequence: Synthetic oligonucleotide
  Sense strand starting at position 813 SEQ ID NO: 3164
ucaguugauuuccuggcau

SEQ ID NO: 246045 - RNA, 19 nt, Artificial Sequence
  Description of Artificial Sequence: Synthetic oligonucleotide
  Antisense strand to SEQ ID NO: 246044
augccaggaaaucaacuga

SEQ ID NO: 246046 - RNA, 19 nt, Artificial Sequence
  Description of Artificial Sequence: Synthetic oligonucleotide
  Sense strand starting at position 855 SEQ ID NO: 3164
uaaaguggguuucuccaaa

SEQ ID NO: 246047 - RNA, 19 nt, Artificial Sequence
  Description of Artificial Sequence: Synthetic oligonucleotide
  Antisense strand to SEQ ID NO: 246046
uuuggagaaacccacuuua

SEQ ID NO: 246048 - RNA, 19 nt, Artificial Sequence
  Description of Artificial Sequence: Synthetic oligonucleotide
  Sense strand starting at position 959 SEQ ID NO: 3164
accucagagucacucauau

SEQ ID NO: 246049 - RNA, 19 nt, Artificial Sequence
  Description of Artificial Sequence: Synthetic oligonucleotide
  Antisense strand to SEQ ID NO: 246048
auaugagugacucugaggu

SEQ ID NO: 246050 - RNA, 19 nt, Artificial Sequence
  Description of Artificial Sequence: Synthetic oligonucleotide
  Sense strand starting at position 996 SEQ ID NO: 3164
ucucuuaugagaggaugua

SEQ ID NO: 246051 - RNA, 19 nt, Artificial Sequence
  Description of Artificial Sequence: Synthetic oligonucleotide
  Antisense strand to SEQ ID NO: 246050
uacauccucucauaagaga

SEQ ID NO: 246052 - RNA, 19 nt, Artificial Sequence
  Description of Artificial Sequence: Synthetic oligonucleotide
  Sense strand starting at position 1018 SEQ ID NO: 3164
agcagaauucccugcauuu

SEQ ID NO: 246053 - RNA, 19 nt, Artificial Sequence
  Description of Artificial Sequence: Synthetic oligonucleotide
  Antisense strand to SEQ ID NO: 246052
aaaugcagggaauucugcu

SEQ ID NO: 246054 - RNA, 19 nt, Artificial Sequence
  Description of Artificial Sequence: Synthetic oligonucleotide
  Sense strand starting at position 1084 SEQ ID NO: 3164
gugggacuccucuaaucga

SEQ ID NO: 246055 - RNA, 19 nt, Artificial Sequence
  Description of Artificial Sequence: Synthetic oligonucleotide
  Antisense strand to SEQ ID NO: 246054
ucgauuagaggagucccac

SEQ ID NO: 246056 - RNA, 19 nt, Artificial Sequence
  Description of Artificial Sequence: Synthetic oligonucleotide
  Sense strand starting at position 1121 SEQ ID NO: 3164
ugggaagugcuuuauuaga

SEQ ID NO: 246057 - RNA, 19 nt, Artificial Sequence
  Description of Artificial Sequence: Synthetic oligonucleotide
  Antisense strand to SEQ ID NO: 246056
ucuaauaaagcacuuccca

SEQ ID NO: 246058 - RNA, 19 nt, Artificial Sequence
  Description of Artificial Sequence: Synthetic oligonucleotide
  Sense strand starting at position 1129 SEQ ID NO: 3164
gcuuuauuagacugagaga

SEQ ID NO: 246059 - RNA, 19 nt, Artificial Sequence
  Description of Artificial Sequence: Synthetic oligonucleotide
  Antisense strand to SEQ ID NO: 246058
ucucucagucuaauaaagc

SEQ ID NO: 246060 - RNA, 19 nt, Artificial Sequence
  Description of Artificial Sequence: Synthetic oligonucleotide
  Sense strand starting at position 1167 SEQ ID NO: 3164
uguuguaaagcccagaaca

SEQ ID NO: 246061 - RNA, 19 nt, Artificial Sequence
  Description of Artificial Sequence: Synthetic oligonucleotide
  Antisense strand to SEQ ID NO: 246060
uguucugggcuuuacaaca

SEQ ID NO: 246062 - RNA, 19 nt, Artificial Sequence
  Description of Artificial Sequence: Synthetic oligonucleotide
  Sense strand starting at position 1579 SEQ ID NO: 3164
cgggucuauccagaacuca

SEQ ID NO: 246063 - RNA, 19 nt, Artificial Sequence
  Description of Artificial Sequence: Synthetic oligonucleotide
  Antisense strand to SEQ ID NO: 246062
ugaguucuggauagacccg

SEQ ID NO: 246064 - RNA, 19 nt, Artificial Sequence
  Description of Artificial Sequence: Synthetic oligonucleotide
  Sense strand starting at position 2063 SEQ ID NO: 3164
gaagcuucuggagacaguu

SEQ ID NO: 246065 - RNA, 19 nt, Artificial Sequence
  Description of Artificial Sequence: Synthetic oligonucleotide
  Antisense strand to SEQ ID NO: 246064
aacugucuccagaagcuuc

SEQ ID NO: 246066 - RNA, 19 nt, Artificial Sequence
  Description of Artificial Sequence: Synthetic oligonucleotide
  Sense strand starting at position 2098 SEQ ID NO: 3164
gaagaacuuccuugaggcu

SEQ ID NO: 246067 - RNA, 19 nt, Artificial Sequence
  Description of Artificial Sequence: Synthetic oligonucleotide
  Antisense strand to SEQ ID NO: 246066
agccucaaggaaguucuuc

SEQ ID NO: 246068 - RNA, 19 nt, Artificial Sequence
  Description of Artificial Sequence: Synthetic oligonucleotide
  Sense strand starting at position 2463 SEQ ID NO: 3164
ggacucuccugcuuaggga

SEQ ID NO: 246069 - RNA, 19 nt, Artificial Sequence
  Description of Artificial Sequence: Synthetic oligonucleotide
  Antisense strand to SEQ ID NO: 246068
ucccuaagcaggagagucc

SEQ ID NO: 246070 - RNA, 19 nt, Artificial Sequence
  Description of Artificial Sequence: Synthetic oligonucleotide
  Sense strand starting at position 2464 SEQ ID NO: 3164
gacucuccugcuuagggaa

SEQ ID NO: 246071 - RNA, 19 nt, Artificial Sequence
  Description of Artificial Sequence: Synthetic oligonucleotide
  Antisense strand to SEQ ID NO: 246070
uucccuaagcaggagaguc

SEQ ID NO: 246072 - RNA, 19 nt, Artificial Sequence
  Description of Artificial Sequence: Synthetic oligonucleotide
  Sense strand starting at position 2560 SEQ ID NO: 3164
uucugagugcaucaucaga

SEQ ID NO: 246073 - RNA, 19 nt, Artificial Sequence
  Description of Artificial Sequence: Synthetic oligonucleotide
  Antisense strand to SEQ ID NO: 246072
ucugaugaugcacucagaa

SEQ ID NO: 246074 - RNA, 19 nt, Artificial Sequence
  Description of Artificial Sequence: Synthetic oligonucleotide
  Sense strand starting at position 2562 SEQ ID NO: 3164
cugagugcaucaucagaaa

SEQ ID NO: 246075 - RNA, 19 nt, Artificial Sequence
  Description of Artificial Sequence: Synthetic oligonucleotide
  Antisense strand to SEQ ID NO: 246074
uuucugaugaugcacucag

SEQ ID NO: 246076 - RNA, 19 nt, Artificial Sequence
  Description of Artificial Sequence: Synthetic oligonucleotide
  Sense strand starting at position 2739 SEQ ID NO: 3164
ucaauagcuguauaguauu

SEQ ID NO: 246077 - RNA, 19 nt, Artificial Sequence
  Description of Artificial Sequence: Synthetic oligonucleotide
  Antisense strand to SEQ ID NO: 246076
aauacuauacagcuauuga

SEQ ID NO: 246078 - RNA, 19 nt, Artificial Sequence
  Description of Artificial Sequence: Synthetic oligonucleotide
  Sense strand starting at position 2745 SEQ ID NO: 3164
gcuguauaguauuuaacug

SEQ ID NO: 246079 - RNA, 19 nt, Artificial Sequence
  Description of Artificial Sequence: Synthetic oligonucleotide
  Antisense strand to SEQ ID NO: 246078
caguuaaauacuauacagc

SEQ ID NO: 246080 - RNA, 19 nt, Artificial Sequence
  Description of Artificial Sequence: Synthetic oligonucleotide
  Sense strand starting at position 2760 SEQ ID NO: 3164
acuguaucacuguaacauu

SEQ ID NO: 246081 - RNA, 19 nt, Artificial Sequence
  Description of Artificial Sequence: Synthetic oligonucleotide
  Antisense strand to SEQ ID NO: 246080
aauguuacagugauacagu

SEQ ID NO: 246082 - RNA, 19 nt, Artificial Sequence
  Description of Artificial Sequence: Synthetic oligonucleotide
  Sense strand starting at position 2885 SEQ ID NO: 3164
ucauguaucugguuauuuc

SEQ ID NO: 246083 - RNA, 19 nt, Artificial Sequence
  Description of Artificial Sequence: Synthetic oligonucleotide
  Antisense strand to SEQ ID NO: 246082
gaaauaaccagauacauga

SEQ ID NO: 246084 - RNA, 19 nt, Artificial Sequence
  Description of Artificial Sequence: Synthetic oligonucleotide
  Sense strand starting at position 2889 SEQ ID NO: 3164
guaucugguuauuucuuua

SEQ ID NO: 246085 - RNA, 19 nt, Artificial Sequence
  Description of Artificial Sequence: Synthetic oligonucleotide
  Antisense strand to SEQ ID NO: 246084
uaaagaaauaaccagauac

SEQ ID NO: 246086 - RNA, 19 nt, Artificial Sequence
  Description of Artificial Sequence: Synthetic oligonucleotide
  Sense strand starting at position 2931 SEQ ID NO: 3164
aucuauaauucuguaagug

SEQ ID NO: 246087 - RNA, 19 nt, Artificial Sequence
  Description of Artificial Sequence: Synthetic oligonucleotide
  Antisense strand to SEQ ID NO: 246086
cacuuacagaauuauagau

SEQ ID NO: 246088 - RNA, 19 nt, Artificial Sequence
  Description of Artificial Sequence: Synthetic oligonucleotide
  Sense strand starting at position 2932 SEQ ID NO: 3164
ucuauaauucuguaaguga

SEQ ID NO: 246089 - RNA, 19 nt, Artificial Sequence
  Description of Artificial Sequence: Synthetic oligonucleotide
  Antisense strand to SEQ ID NO: 246088
ucacuuacagaauuauaga

SEQ ID NO: 246090 - RNA, 19 nt, Artificial Sequence
  Description of Artificial Sequence: Synthetic oligonucleotide
  Sense strand starting at position 2935 SEQ ID NO: 3164
auaauucuguaagugaucu

SEQ ID NO: 246091 - RNA, 19 nt, Artificial Sequence
  Description of Artificial Sequence: Synthetic oligonucleotide
  Antisense strand to SEQ ID NO: 246090
agaucacuuacagaauuau

SEQ ID NO: 246092 - RNA, 19 nt, Artificial Sequence
  Description of Artificial Sequence: Synthetic oligonucleotide
  Sense strand starting at position 3030 SEQ ID NO: 3164
cugugauggaucugaaaua

SEQ ID NO: 246093 - RNA, 19 nt, Artificial Sequence
  Description of Artificial Sequence: Synthetic oligonucleotide
  Antisense strand to SEQ ID NO: 246092
uauuucagauccaucacag

SEQ ID NO: 246094 - RNA, 19 nt, Artificial Sequence
  Description of Artificial Sequence: Synthetic oligonucleotide
  Sense strand starting at position 3230 SEQ ID NO: 3164
uacauauguguacauguua

SEQ ID NO: 246095 - RNA, 19 nt, Artificial Sequence
  Description of Artificial Sequence: Synthetic oligonucleotide
  Antisense strand to SEQ ID NO: 246094
uaacauguacacauaugua

SEQ ID NO: 246096 - RNA, 19 nt, Artificial Sequence
  Description of Artificial Sequence: Synthetic oligonucleotide
  Sense strand starting at position 3716 SEQ ID NO: 3164
augaaacuaugacugugua

SEQ ID NO: 246097 - RNA, 19 nt, Artificial Sequence
  Description of Artificial Sequence: Synthetic oligonucleotide
  Antisense strand to SEQ ID NO: 246096
uacacagucauaguuucau

SEQ ID NO: 246098 - RNA, 19 nt, Artificial Sequence
  Description of Artificial Sequence: Synthetic oligonucleotide
  Sense strand starting at position 3717 SEQ ID NO: 3164
ugaaacuaugacuguguau

SEQ ID NO: 246099 - RNA, 19 nt, Artificial Sequence
  Description of Artificial Sequence: Synthetic oligonucleotide
  Antisense strand to SEQ ID NO: 246098
auacacagucauaguuuca

SEQ ID NO: 246100 - RNA, 19 nt, Artificial Sequence
  Description of Artificial Sequence: Synthetic oligonucleotide
  Sense strand starting at position 3779 SEQ ID NO: 3164
acaauaaguucucucugga

SEQ ID NO: 246101 - RNA, 19 nt, Artificial Sequence
  Description of Artificial Sequence: Synthetic oligonucleotide
  Antisense strand to SEQ ID NO: 246100
uccagagagaacuuauugu

SEQ ID NO: 246102 - RNA, 19 nt, Artificial Sequence
  Description of Artificial Sequence: Synthetic oligonucleotide
  Sense strand starting at position 3782 SEQ ID NO: 3164
auaaguucucucuggaccu

SEQ ID NO: 246103 - RNA, 19 nt, Artificial Sequence
  Description of Artificial Sequence: Synthetic oligonucleotide
  Antisense strand to SEQ ID NO: 246102
agguccagagagaacuuau

SEQ ID NO: 246104 - RNA, 19 nt, Artificial Sequence
  Description of Artificial Sequence: Synthetic oligonucleotide
  Sense strand starting at position 3826 SEQ ID NO: 3164
ggucucagacucugugaaa

SEQ ID NO: 246105 - RNA, 19 nt, Artificial Sequence
  Description of Artificial Sequence: Synthetic oligonucleotide
  Antisense strand to SEQ ID NO: 246104
uuucacagagucugagacc

SEQ ID NO: 246106 - RNA, 19 nt, Artificial Sequence
  Description of Artificial Sequence: Synthetic oligonucleotide
  Sense strand starting at position 3827 SEQ ID NO: 3164
gucucagacucugugaaau

SEQ ID NO: 246107 - RNA, 19 nt, Artificial Sequence
  Description of Artificial Sequence: Synthetic oligonucleotide
  Antisense strand to SEQ ID NO: 246106
auuucacagagucugagac

SEQ ID NO: 246108 - RNA, 19 nt, Artificial Sequence
  Description of Artificial Sequence: Synthetic oligonucleotide
  Sense strand starting at position 3837 SEQ ID NO: 3164
cugugaaauuagccaugaa

SEQ ID NO: 246109 - RNA, 19 nt, Artificial Sequence
  Description of Artificial Sequence: Synthetic oligonucleotide
  Antisense strand to SEQ ID NO: 246108
uucauggcuaauuucacag

SEQ ID NO: 246110 - RNA, 19 nt, Artificial Sequence
  Description of Artificial Sequence: Synthetic oligonucleotide
  Sense strand starting at position 3840 SEQ ID NO: 3164
ugaaauuagccaugaacua

SEQ ID NO: 246111 - RNA, 19 nt, Artificial Sequence
  Description of Artificial Sequence: Synthetic oligonucleotide
  Antisense strand to SEQ ID NO: 246110
uaguucauggcuaauuuca

SEQ ID NO: 246112 - RNA, 19 nt, Artificial Sequence
  Description of Artificial Sequence: Synthetic oligonucleotide
  Sense strand starting at position 3881 SEQ ID NO: 3164
auuauuccugucugauaga

SEQ ID NO: 246113 - RNA, 19 nt, Artificial Sequence
  Description of Artificial Sequence: Synthetic oligonucleotide
  Antisense strand to SEQ ID NO: 246112
ucuaucagacaggaauaau

SEQ ID NO: 246114 - RNA, 19 nt, Artificial Sequence
  Description of Artificial Sequence: Synthetic oligonucleotide
  Sense strand starting at position 109 SEQ ID NO: 3166
gggaauguguauuccuaac

SEQ ID NO: 246115 - RNA, 19 nt, Artificial Sequence
  Description of Artificial Sequence: Synthetic oligonucleotide
  Antisense strand to SEQ ID NO: 246114
guuaggaauacacauuccc

SEQ ID NO: 246116 - RNA, 19 nt, Artificial Sequence
  Description of Artificial Sequence: Synthetic oligonucleotide
  Sense strand starting at position 432 SEQ ID NO: 3166
acuagugaggcucaguauu

SEQ ID NO: 246117 - RNA, 19 nt, Artificial Sequence
  Description of Artificial Sequence: Synthetic oligonucleotide
  Antisense strand to SEQ ID NO: 246116
aauacugagccucacuagu

SEQ ID NO: 246118 - RNA, 19 nt, Artificial Sequence
  Description of Artificial Sequence: Synthetic oligonucleotide
  Sense strand starting at position 493 SEQ ID NO: 3166
uccugacucuguccugaga

SEQ ID NO: 246119 - RNA, 19 nt, Artificial Sequence
  Description of Artificial Sequence: Synthetic oligonucleotide
  Antisense strand to SEQ ID NO: 246118
ucucaggacagagucagga

SEQ ID NO: 246120 - RNA, 19 nt, Artificial Sequence
  Description of Artificial Sequence: Synthetic oligonucleotide
  Sense strand starting at position 546 SEQ ID NO: 3166
gcagacagacguuauagua

SEQ ID NO: 246121 - RNA, 19 nt, Artificial Sequence
  Description of Artificial Sequence: Synthetic oligonucleotide
  Antisense strand to SEQ ID NO: 246120
uacuauaacgucugucugc

SEQ ID NO: 246122 - RNA, 19 nt, Artificial Sequence
  Description of Artificial Sequence: Synthetic oligonucleotide
  Sense strand starting at position 831 SEQ ID NO: 3166
cuuggcuauggucagaaga

SEQ ID NO: 246123 - RNA, 19 nt, Artificial Sequence
  Description of Artificial Sequence: Synthetic oligonucleotide
  Antisense strand to SEQ ID NO: 246122
ucuucugaccauagccaag

SEQ ID NO: 246124 - RNA, 19 nt, Artificial Sequence
  Description of Artificial Sequence: Synthetic oligonucleotide
  Sense strand starting at position 932 SEQ ID NO: 3166
ucaucuuucccagaguuau

SEQ ID NO: 246125 - RNA, 19 nt, Artificial Sequence
  Description of Artificial Sequence: Synthetic oligonucleotide
  Antisense strand to SEQ ID NO: 246124
auaacucugggaaagauga

SEQ ID NO: 246126 - RNA, 19 nt, Artificial Sequence
  Description of Artificial Sequence: Synthetic oligonucleotide
  Sense strand starting at position 938 SEQ ID NO: 3166
uucccagaguuaucuccua

SEQ ID NO: 246127 - RNA, 19 nt, Artificial Sequence
  Description of Artificial Sequence: Synthetic oligonucleotide
  Antisense strand to SEQ ID NO: 246126
uaggagauaacucugggaa

SEQ ID NO: 246128 - RNA, 19 nt, Artificial Sequence
  Description of Artificial Sequence: Synthetic oligonucleotide
  Sense strand starting at position 959 SEQ ID NO: 3166
gggauuugcuuccacaaag

SEQ ID NO: 246129 - RNA, 19 nt, Artificial Sequence
  Description of Artificial Sequence: Synthetic oligonucleotide
  Antisense strand to SEQ ID NO: 246128
cuuuguggaagcaaauccc

SEQ ID NO: 246130 - RNA, 19 nt, Artificial Sequence
  Description of Artificial Sequence: Synthetic oligonucleotide
  Sense strand starting at position 1205 SEQ ID NO: 3166
gcauaugcaauucggauuu

SEQ ID NO: 246131 - RNA, 19 nt, Artificial Sequence
  Description of Artificial Sequence: Synthetic oligonucleotide
  Antisense strand to SEQ ID NO: 246130
aaauccgaauugcauaugc

SEQ ID NO: 246132 - RNA, 19 nt, Artificial Sequence
  Description of Artificial Sequence: Synthetic oligonucleotide
  Sense strand starting at position 1267 SEQ ID NO: 3166
uguguaugugcugagaaau

SEQ ID NO: 246133 - RNA, 19 nt, Artificial Sequence
  Description of Artificial Sequence: Synthetic oligonucleotide
  Antisense strand to SEQ ID NO: 246132
auuucucagcacauacaca

SEQ ID NO: 246134 - RNA, 19 nt, Artificial Sequence
  Description of Artificial Sequence: Synthetic oligonucleotide
  Sense strand starting at position 1284 SEQ ID NO: 3166
auacuagagcagcaugaua

SEQ ID NO: 246135 - RNA, 19 nt, Artificial Sequence
  Description of Artificial Sequence: Synthetic oligonucleotide
  Antisense strand to SEQ ID NO: 246134
uaucaugcugcucuaguau

SEQ ID NO: 246136 - RNA, 19 nt, Artificial Sequence
  Description of Artificial Sequence: Synthetic oligonucleotide
  Sense strand starting at position 1466 SEQ ID NO: 3166
aaauguguuccucauggaa

SEQ ID NO: 246137 - RNA, 19 nt, Artificial Sequence
  Description of Artificial Sequence: Synthetic oligonucleotide
  Antisense strand to SEQ ID NO: 246136
uuccaugaggaacacauuu

SEQ ID NO: 246138 - RNA, 19 nt, Artificial Sequence
  Description of Artificial Sequence: Synthetic oligonucleotide
  Sense strand starting at position 1727 SEQ ID NO: 3166
ucucuugucuaguuauuug

SEQ ID NO: 246139 - RNA, 19 nt, Artificial Sequence
  Description of Artificial Sequence: Synthetic oligonucleotide
  Antisense strand to SEQ ID NO: 246138
caaauaacuagacaagaga

SEQ ID NO: 246140 - RNA, 19 nt, Artificial Sequence
  Description of Artificial Sequence: Synthetic oligonucleotide
  Sense strand starting at position 1756 SEQ ID NO: 3166
uuugaaagcucacuuacug

SEQ ID NO: 246141 - RNA, 19 nt, Artificial Sequence
  Description of Artificial Sequence: Synthetic oligonucleotide
  Antisense strand to SEQ ID NO: 246140
caguaagugagcuuucaaa

SEQ ID NO: 246142 - RNA, 19 nt, Artificial Sequence
  Description of Artificial Sequence: Synthetic oligonucleotide
  Sense strand starting at position 1819 SEQ ID NO: 3166
aaaguucugcucuaggaau

SEQ ID NO: 246143 - RNA, 19 nt, Artificial Sequence
  Description of Artificial Sequence: Synthetic oligonucleotide
  Antisense strand to SEQ ID NO: 246142
auuccuagagcagaacuuu

SEQ ID NO: 246144 - RNA, 19 nt, Artificial Sequence
  Description of Artificial Sequence: Synthetic oligonucleotide
  Sense strand starting at position 1852 SEQ ID NO: 3166
gagguagauuucuacaaga

SEQ ID NO: 246145 - RNA, 19 nt, Artificial Sequence
  Description of Artificial Sequence: Synthetic oligonucleotide
  Antisense strand to SEQ ID NO: 246144
ucuuguagaaaucuaccuc

SEQ ID NO: 246146 - RNA, 19 nt, Artificial Sequence
  Description of Artificial Sequence: Synthetic oligonucleotide
  Sense strand starting at position 2071 SEQ ID NO: 3166
gucucuagugcugaacaga

SEQ ID NO: 246147 - RNA, 19 nt, Artificial Sequence
  Description of Artificial Sequence: Synthetic oligonucleotide
  Antisense strand to SEQ ID NO: 246146
ucuguucagcacuagagac

SEQ ID NO: 246148 - RNA, 19 nt, Artificial Sequence
  Description of Artificial Sequence: Synthetic oligonucleotide
  Sense strand starting at position 2418 SEQ ID NO: 3166
cuacaauagcaugguuaac

SEQ ID NO: 246149 - RNA, 19 nt, Artificial Sequence
  Description of Artificial Sequence: Synthetic oligonucleotide
  Antisense strand to SEQ ID NO: 246148
guuaaccaugcuauuguag

SEQ ID NO: 246150 - RNA, 19 nt, Artificial Sequence
  Description of Artificial Sequence: Synthetic oligonucleotide
  Sense strand starting at position 2420 SEQ ID NO: 3166
acaauagcaugguuaacua

SEQ ID NO: 246151 - RNA, 19 nt, Artificial Sequence
  Description of Artificial Sequence: Synthetic oligonucleotide
  Antisense strand to SEQ ID NO: 246150
uaguuaaccaugcuauugu

SEQ ID NO: 246152 - RNA, 19 nt, Artificial Sequence
  Description of Artificial Sequence: Synthetic oligonucleotide
  Sense strand starting at position 2428 SEQ ID NO: 3166
augguuaacuaguugagag

SEQ ID NO: 246153 - RNA, 19 nt, Artificial Sequence
  Description of Artificial Sequence: Synthetic oligonucleotide
  Antisense strand to SEQ ID NO: 246152
cucucaacuaguuaaccau

SEQ ID NO: 246154 - RNA, 19 nt, Artificial Sequence
  Description of Artificial Sequence: Synthetic oligonucleotide
  Sense strand starting at position 2429 SEQ ID NO: 3166
ugguuaacuaguugagaga

SEQ ID NO: 246155 - RNA, 19 nt, Artificial Sequence
  Description of Artificial Sequence: Synthetic oligonucleotide
  Antisense strand to SEQ ID NO: 246154
ucucucaacuaguuaacca

SEQ ID NO: 246156 - RNA, 19 nt, Artificial Sequence
  Description of Artificial Sequence: Synthetic oligonucleotide
  Sense strand starting at position 2622 SEQ ID NO: 3166
guaggauugacucacguga

SEQ ID NO: 246157 - RNA, 19 nt, Artificial Sequence
  Description of Artificial Sequence: Synthetic oligonucleotide
  Antisense strand to SEQ ID NO: 246156
ucacgugagucaauccuac

SEQ ID NO: 246158 - RNA, 19 nt, Artificial Sequence
  Description of Artificial Sequence: Synthetic oligonucleotide
  Sense strand starting at position 2704 SEQ ID NO: 3166
ucaguugaccgagagcuuu

SEQ ID NO: 246159 - RNA, 19 nt, Artificial Sequence
  Description of Artificial Sequence: Synthetic oligonucleotide
  Antisense strand to SEQ ID NO: 246158
aaagcucucggucaacuga

SEQ ID NO: 246160 - RNA, 19 nt, Artificial Sequence
  Description of Artificial Sequence: Synthetic oligonucleotide
  Sense strand starting at position 2880 SEQ ID NO: 3166
aagguuuaggagugagaca

SEQ ID NO: 246161 - RNA, 19 nt, Artificial Sequence
  Description of Artificial Sequence: Synthetic oligonucleotide
  Antisense strand to SEQ ID NO: 246160
ugucucacuccuaaaccuu

SEQ ID NO: 246162 - RNA, 19 nt, Artificial Sequence
  Description of Artificial Sequence: Synthetic oligonucleotide
  Sense strand starting at position 2993 SEQ ID NO: 3166
gcugaugggucuuuaggaa

SEQ ID NO: 246163 - RNA, 19 nt, Artificial Sequence
  Description of Artificial Sequence: Synthetic oligonucleotide
  Antisense strand to SEQ ID NO: 246162
uuccuaaagacccaucagc

SEQ ID NO: 246164 - RNA, 19 nt, Artificial Sequence
  Description of Artificial Sequence: Synthetic oligonucleotide
  Sense strand starting at position 3013 SEQ ID NO: 3166
agggauaucugcuauuuga

SEQ ID NO: 246165 - RNA, 19 nt, Artificial Sequence
  Description of Artificial Sequence: Synthetic oligonucleotide
  Antisense strand to SEQ ID NO: 246164
ucaaauagcagauaucccu

SEQ ID NO: 246166 - RNA, 19 nt, Artificial Sequence
  Description of Artificial Sequence: Synthetic oligonucleotide
  Sense strand starting at position 3050 SEQ ID NO: 3166
uuggcaguaucccugaaua

SEQ ID NO: 246167 - RNA, 19 nt, Artificial Sequence
  Description of Artificial Sequence: Synthetic oligonucleotide
  Antisense strand to SEQ ID NO: 246166
uauucagggauacugccaa

SEQ ID NO: 246168 - RNA, 19 nt, Artificial Sequence
  Description of Artificial Sequence: Synthetic oligonucleotide
  Sense strand starting at position 3052 SEQ ID NO: 3166
ggcaguaucccugaauaca

SEQ ID NO: 246169 - RNA, 19 nt, Artificial Sequence
  Description of Artificial Sequence: Synthetic oligonucleotide
  Antisense strand to SEQ ID NO: 246168
uguauucagggauacugcc

SEQ ID NO: 246170 - RNA, 19 nt, Artificial Sequence
  Description of Artificial Sequence: Synthetic oligonucleotide
  Sense strand starting at position 3126 SEQ ID NO: 3166
aggcgcuugacagagaauu

SEQ ID NO: 246171 - RNA, 19 nt, Artificial Sequence
  Description of Artificial Sequence: Synthetic oligonucleotide
  Antisense strand to SEQ ID NO: 246170
aauucucugucaagcgccu

SEQ ID NO: 246172 - RNA, 19 nt, Artificial Sequence
  Description of Artificial Sequence: Synthetic oligonucleotide
  Sense strand starting at position 3164 SEQ ID NO: 3166
gcaagagaugucuggcaga

SEQ ID NO: 246173 - RNA, 19 nt, Artificial Sequence
  Description of Artificial Sequence: Synthetic oligonucleotide
  Antisense strand to SEQ ID NO: 246172
ucugccagacaucucuugc

SEQ ID NO: 246174 - RNA, 19 nt, Artificial Sequence
  Description of Artificial Sequence: Synthetic oligonucleotide
  Sense strand starting at position 3169 SEQ ID NO: 3166
agaugucuggcagaaacgu

SEQ ID NO: 246175 - RNA, 19 nt, Artificial Sequence
  Description of Artificial Sequence: Synthetic oligonucleotide
  Antisense strand to SEQ ID NO: 246174
acguuucugccagacaucu

SEQ ID NO: 246176 - RNA, 19 nt, Artificial Sequence
  Description of Artificial Sequence: Synthetic oligonucleotide
  Sense strand starting at position 3175 SEQ ID NO: 3166
cuggcagaaacguagguau

SEQ ID NO: 246177 - RNA, 19 nt, Artificial Sequence
  Description of Artificial Sequence: Synthetic oligonucleotide
  Antisense strand to SEQ ID NO: 246176
auaccuacguuucugccag

SEQ ID NO: 246178 - RNA, 19 nt, Artificial Sequence
  Description of Artificial Sequence: Synthetic oligonucleotide
  Sense strand starting at position 3182 SEQ ID NO: 3166
aaacguagguauccaaaga

SEQ ID NO: 246179 - RNA, 19 nt, Artificial Sequence
  Description of Artificial Sequence: Synthetic oligonucleotide
  Antisense strand to SEQ ID NO: 246178
ucuuuggauaccuacguuu

SEQ ID NO: 246180 - RNA, 19 nt, Artificial Sequence
  Description of Artificial Sequence: Synthetic oligonucleotide
  Sense strand starting at position 3306 SEQ ID NO: 3166
agauaaaugcagggagcuu

SEQ ID NO: 246181 - RNA, 19 nt, Artificial Sequence
  Description of Artificial Sequence: Synthetic oligonucleotide
  Antisense strand to SEQ ID NO: 246180
aagcucccugcauuuaucu

SEQ ID NO: 246182 - RNA, 19 nt, Artificial Sequence
  Description of Artificial Sequence: Synthetic oligonucleotide
  Sense strand starting at position 3585 SEQ ID NO: 3166
gcaggucucagagaucaua

SEQ ID NO: 246183 - RNA, 19 nt, Artificial Sequence
  Description of Artificial Sequence: Synthetic oligonucleotide
  Antisense strand to SEQ ID NO: 246182
uaugaucucugagaccugc

SEQ ID NO: 246184 - RNA, 19 nt, Artificial Sequence
  Description of Artificial Sequence: Synthetic oligonucleotide
  Sense strand starting at position 3648 SEQ ID NO: 3166
ucuagauggccagaugcua

SEQ ID NO: 246185 - RNA, 19 nt, Artificial Sequence
  Description of Artificial Sequence: Synthetic oligonucleotide
  Antisense strand to SEQ ID NO: 246184
uagcaucuggccaucuaga

SEQ ID NO: 246186 - RNA, 19 nt, Artificial Sequence
  Description of Artificial Sequence: Synthetic oligonucleotide
  Sense strand starting at position 3799 SEQ ID NO: 3166
ccuuuacuugaaggagcua

SEQ ID NO: 246187 - RNA, 19 nt, Artificial Sequence
  Description of Artificial Sequence: Synthetic oligonucleotide
  Antisense strand to SEQ ID NO: 246186
uagcuccuucaaguaaagg

SEQ ID NO: 246188 - RNA, 19 nt, Artificial Sequence
  Description of Artificial Sequence: Synthetic oligonucleotide
  Sense strand starting at position 3905 SEQ ID NO: 3166
cucaguuaucagugaucac

SEQ ID NO: 246189 - RNA, 19 nt, Artificial Sequence
  Description of Artificial Sequence: Synthetic oligonucleotide
  Antisense strand to SEQ ID NO: 246188
gugaucacugauaacugag

SEQ ID NO: 246190 - RNA, 19 nt, Artificial Sequence
  Description of Artificial Sequence: Synthetic oligonucleotide
  Sense strand starting at position 3908 SEQ ID NO: 3166
aguuaucagugaucacuca

SEQ ID NO: 246191 - RNA, 19 nt, Artificial Sequence
  Description of Artificial Sequence: Synthetic oligonucleotide
  Antisense strand to SEQ ID NO: 246190
ugagugaucacugauaacu

SEQ ID NO: 246192 - RNA, 19 nt, Artificial Sequence
  Description of Artificial Sequence: Synthetic oligonucleotide
  Sense strand starting at position 3909 SEQ ID NO: 3166
guuaucagugaucacucau

SEQ ID NO: 246193 - RNA, 19 nt, Artificial Sequence
  Description of Artificial Sequence: Synthetic oligonucleotide
  Antisense strand to SEQ ID NO: 246192
augagugaucacugauaac

SEQ ID NO: 246194 - RNA, 19 nt, Artificial Sequence
  Description of Artificial Sequence: Synthetic oligonucleotide
  Sense strand starting at position 218 SEQ ID NO: 3167
uucuaucuugcugggacaa

SEQ ID NO: 246195 - RNA, 19 nt, Artificial Sequence
  Description of Artificial Sequence: Synthetic oligonucleotide
  Antisense strand to SEQ ID NO: 246194
uugucccagcaagauagaa

SEQ ID NO: 246196 - RNA, 19 nt, Artificial Sequence
  Description of Artificial Sequence: Synthetic oligonucleotide
  Sense strand starting at position 266 SEQ ID NO: 3167
guuccagauuuggacagau

SEQ ID NO: 246197 - RNA, 19 nt, Artificial Sequence
  Description of Artificial Sequence: Synthetic oligonucleotide
  Antisense strand to SEQ ID NO: 246196
aucuguccaaaucuggaac

SEQ ID NO: 246198 - RNA, 19 nt, Artificial Sequence
  Description of Artificial Sequence: Synthetic oligonucleotide
  Sense strand starting at position 323 SEQ ID NO: 3167
guuacuaagucucuccaaa

SEQ ID NO: 246199 - RNA, 19 nt, Artificial Sequence
  Description of Artificial Sequence: Synthetic oligonucleotide
  Antisense strand to SEQ ID NO: 246198
uuuggagagacuuaguaac

SEQ ID NO: 246200 - RNA, 19 nt, Artificial Sequence
  Description of Artificial Sequence: Synthetic oligonucleotide
  Sense strand starting at position 376 SEQ ID NO: 3167
gcagcaccuacuugagaga

SEQ ID NO: 246201 - RNA, 19 nt, Artificial Sequence
  Description of Artificial Sequence: Synthetic oligonucleotide
  Antisense strand to SEQ ID NO: 246200
ucucucaaguaggugcugc

SEQ ID NO: 246202 - RNA, 19 nt, Artificial Sequence
  Description of Artificial Sequence: Synthetic oligonucleotide
  Sense strand starting at position 431 SEQ ID NO: 3167
agcacuuagccugagcaaa

SEQ ID NO: 246203 - RNA, 19 nt, Artificial Sequence
  Description of Artificial Sequence: Synthetic oligonucleotide
  Antisense strand to SEQ ID NO: 246202
uuugcucaggcuaagugcu

SEQ ID NO: 246204 - RNA, 19 nt, Artificial Sequence
  Description of Artificial Sequence: Synthetic oligonucleotide
  Sense strand starting at position 881 SEQ ID NO: 3167
ucaggcacuuguuugauaa

SEQ ID NO: 246205 - RNA, 19 nt, Artificial Sequence
  Description of Artificial Sequence: Synthetic oligonucleotide
  Antisense strand to SEQ ID NO: 246204
uuaucaaacaagugccuga

SEQ ID NO: 246206 - RNA, 19 nt, Artificial Sequence
  Description of Artificial Sequence: Synthetic oligonucleotide
  Sense strand starting at position 882 SEQ ID NO: 3167
caggcacuuguuugauaaa

SEQ ID NO: 246207 - RNA, 19 nt, Artificial Sequence
  Description of Artificial Sequence: Synthetic oligonucleotide
  Antisense strand to SEQ ID NO: 246206
uuuaucaaacaagugccug

SEQ ID NO: 246208 - RNA, 19 nt, Artificial Sequence
  Description of Artificial Sequence: Synthetic oligonucleotide
  Sense strand starting at position 1008 SEQ ID NO: 3167
cuauaauauggguaucugu

SEQ ID NO: 246209 - RNA, 19 nt, Artificial Sequence
  Description of Artificial Sequence: Synthetic oligonucleotide
  Antisense strand to SEQ ID NO: 246208
acagauacccauauuauag

SEQ ID NO: 246210 - RNA, 19 nt, Artificial Sequence
  Description of Artificial Sequence: Synthetic oligonucleotide
  Sense strand starting at position 1101 SEQ ID NO: 3167
cuggguuucucacuguaga

SEQ ID NO: 246211 - RNA, 19 nt, Artificial Sequence
  Description of Artificial Sequence: Synthetic oligonucleotide
  Antisense strand to SEQ ID NO: 246210
ucuacagugagaaacccag

SEQ ID NO: 246212 - RNA, 19 nt, Artificial Sequence
  Description of Artificial Sequence: Synthetic oligonucleotide
  Sense strand starting at position 1102 SEQ ID NO: 3167
uggguuucucacuguagaa

SEQ ID NO: 246213 - RNA, 19 nt, Artificial Sequence
  Description of Artificial Sequence: Synthetic oligonucleotide
  Antisense strand to SEQ ID NO: 246212
uucuacagugagaaaccca

SEQ ID NO: 246214 - RNA, 19 nt, Artificial Sequence
  Description of Artificial Sequence: Synthetic oligonucleotide
  Sense strand starting at position 1104 SEQ ID NO: 3167
gguuucucacuguagaaug

SEQ ID NO: 246215 - RNA, 19 nt, Artificial Sequence
  Description of Artificial Sequence: Synthetic oligonucleotide
  Antisense strand to SEQ ID NO: 246214
cauucuacagugagaaacc

SEQ ID NO: 246216 - RNA, 19 nt, Artificial Sequence
  Description of Artificial Sequence: Synthetic oligonucleotide
  Sense strand starting at position 1397 SEQ ID NO: 3167
ggacacucucagugucuau

SEQ ID NO: 246217 - RNA, 19 nt, Artificial Sequence
  Description of Artificial Sequence: Synthetic oligonucleotide
  Antisense strand to SEQ ID NO: 246216
auagacacugagagugucc

SEQ ID NO: 246218 - RNA, 19 nt, Artificial Sequence
  Description of Artificial Sequence: Synthetic oligonucleotide
  Sense strand starting at position 1401 SEQ ID NO: 3167
acucucagugucuauggaa

SEQ ID NO: 246219 - RNA, 19 nt, Artificial Sequence
  Description of Artificial Sequence: Synthetic oligonucleotide
  Antisense strand to SEQ ID NO: 246218
uuccauagacacugagagu

SEQ ID NO: 246220 - RNA, 19 nt, Artificial Sequence
  Description of Artificial Sequence: Synthetic oligonucleotide
  Sense strand starting at position 1437 SEQ ID NO: 3167
gcaagauccuaaguaacuc

SEQ ID NO: 246221 - RNA, 19 nt, Artificial Sequence
  Description of Artificial Sequence: Synthetic oligonucleotide
  Antisense strand to SEQ ID NO: 246220
gaguuacuuaggaucuugc

SEQ ID NO: 246222 - RNA, 19 nt, Artificial Sequence
  Description of Artificial Sequence: Synthetic oligonucleotide
  Sense strand starting at position 1473 SEQ ID NO: 3167
agaugagauccaugguuau

SEQ ID NO: 246223 - RNA, 19 nt, Artificial Sequence
  Description of Artificial Sequence: Synthetic oligonucleotide
  Antisense strand to SEQ ID NO: 246222
auaaccauggaucucaucu

SEQ ID NO: 246224 - RNA, 19 nt, Artificial Sequence
  Description of Artificial Sequence: Synthetic oligonucleotide
  Sense strand starting at position 1593 SEQ ID NO: 3167
cuagcugaacucuaagcuu

SEQ ID NO: 246225 - RNA, 19 nt, Artificial Sequence
  Description of Artificial Sequence: Synthetic oligonucleotide
  Antisense strand to SEQ ID NO: 246224
aagcuuagaguucagcuag

SEQ ID NO: 246226 - RNA, 19 nt, Artificial Sequence
  Description of Artificial Sequence: Synthetic oligonucleotide
  Sense strand starting at position 1623 SEQ ID NO: 3167
acacuuuaaugugcaagaa

SEQ ID NO: 246227 - RNA, 19 nt, Artificial Sequence
  Description of Artificial Sequence: Synthetic oligonucleotide
  Antisense strand to SEQ ID NO: 246226
uucuugcacauuaaagugu

SEQ ID NO: 246228 - RNA, 19 nt, Artificial Sequence
  Description of Artificial Sequence: Synthetic oligonucleotide
  Sense strand starting at position 1627 SEQ ID NO: 3167
uuuaaugugcaagaaauca

SEQ ID NO: 246229 - RNA, 19 nt, Artificial Sequence
  Description of Artificial Sequence: Synthetic oligonucleotide
  Antisense strand to SEQ ID NO: 246228
ugauuucuugcacauuaaa

SEQ ID NO: 246230 - RNA, 19 nt, Artificial Sequence
  Description of Artificial Sequence: Synthetic oligonucleotide
  Sense strand starting at position 1859 SEQ ID NO: 3167
caguuaguccagggugaga

SEQ ID NO: 246231 - RNA, 19 nt, Artificial Sequence
  Description of Artificial Sequence: Synthetic oligonucleotide
  Antisense strand to SEQ ID NO: 246230
ucucacccuggacuaacug

SEQ ID NO: 246232 - RNA, 19 nt, Artificial Sequence
  Description of Artificial Sequence: Synthetic oligonucleotide
  Sense strand starting at position 2188 SEQ ID NO: 3167
gcuuuagggcacuaguaac

SEQ ID NO: 246233 - RNA, 19 nt, Artificial Sequence
  Description of Artificial Sequence: Synthetic oligonucleotide
  Antisense strand to SEQ ID NO: 246232
guuacuagugcccuaaagc

SEQ ID NO: 246234 - RNA, 19 nt, Artificial Sequence
  Description of Artificial Sequence: Synthetic oligonucleotide
  Sense strand starting at position 2331 SEQ ID NO: 3167
gggaauguguauuccuaac

SEQ ID NO: 246235 - RNA, 19 nt, Artificial Sequence
  Description of Artificial Sequence: Synthetic oligonucleotide
  Antisense strand to SEQ ID NO: 246234
guuaggaauacacauuccc

SEQ ID NO: 246236 - RNA, 19 nt, Artificial Sequence
  Description of Artificial Sequence: Synthetic oligonucleotide
  Sense strand starting at position 2654 SEQ ID NO: 3167
acuagugaggcucaguauu

SEQ ID NO: 246237 - RNA, 19 nt, Artificial Sequence
  Description of Artificial Sequence: Synthetic oligonucleotide
  Antisense strand to SEQ ID NO: 246236
aauacugagccucacuagu

SEQ ID NO: 246238 - RNA, 19 nt, Artificial Sequence
  Description of Artificial Sequence: Synthetic oligonucleotide
  Sense strand starting at position 2715 SEQ ID NO: 3167
uccugacucuguccugaga

SEQ ID NO: 246239 - RNA, 19 nt, Artificial Sequence
  Description of Artificial Sequence: Synthetic oligonucleotide
  Antisense strand to SEQ ID NO: 246238
ucucaggacagagucagga

SEQ ID NO: 246240 - RNA, 19 nt, Artificial Sequence
  Description of Artificial Sequence: Synthetic oligonucleotide
  Sense strand starting at position 2768 SEQ ID NO: 3167
gcagacagacguuauagua

SEQ ID NO: 246241 - RNA, 19 nt, Artificial Sequence
  Description of Artificial Sequence: Synthetic oligonucleotide
  Antisense strand to SEQ ID NO: 246240
uacuauaacgucugucugc

SEQ ID NO: 246242 - RNA, 19 nt, Artificial Sequence
  Description of Artificial Sequence: Synthetic oligonucleotide
  Sense strand starting at position 2776 SEQ ID NO: 3167
acguuauaguaccuuuaaa

SEQ ID NO: 246243 - RNA, 19 nt, Artificial Sequence
  Description of Artificial Sequence: Synthetic oligonucleotide
  Antisense strand to SEQ ID NO: 246242
uuuaaagguacuauaacgu

SEQ ID NO: 246244 - RNA, 19 nt, Artificial Sequence
  Description of Artificial Sequence: Synthetic oligonucleotide
  Sense strand starting at position 2882 SEQ ID NO: 3167
uguuaacaguuuccuauua

SEQ ID NO: 246245 - RNA, 19 nt, Artificial Sequence
  Description of Artificial Sequence: Synthetic oligonucleotide
  Antisense strand to SEQ ID NO: 246244
uaauaggaaacuguuaaca

SEQ ID NO: 246246 - RNA, 19 nt, Artificial Sequence
  Description of Artificial Sequence: Synthetic oligonucleotide
  Sense strand starting at position 3053 SEQ ID NO: 3167
cuuggcuauggucagaaga

SEQ ID NO: 246247 - RNA, 19 nt, Artificial Sequence
  Description of Artificial Sequence: Synthetic oligonucleotide
  Antisense strand to SEQ ID NO: 246246
ucuucugaccauagccaag

SEQ ID NO: 246248 - RNA, 19 nt, Artificial Sequence
  Description of Artificial Sequence: Synthetic oligonucleotide
  Sense strand starting at position 3154 SEQ ID NO: 3167
ucaucuuucccagaguuau

SEQ ID NO: 246249 - RNA, 19 nt, Artificial Sequence
  Description of Artificial Sequence: Synthetic oligonucleotide
  Antisense strand to SEQ ID NO: 246248
auaacucugggaaagauga

SEQ ID NO: 246250 - RNA, 19 nt, Artificial Sequence
  Description of Artificial Sequence: Synthetic oligonucleotide
  Sense strand starting at position 3160 SEQ ID NO: 3167
uucccagaguuaucuccua

SEQ ID NO: 246251 - RNA, 19 nt, Artificial Sequence
  Description of Artificial Sequence: Synthetic oligonucleotide
  Antisense strand to SEQ ID NO: 246250
uaggagauaacucugggaa

SEQ ID NO: 246252 - RNA, 19 nt, Artificial Sequence
  Description of Artificial Sequence: Synthetic oligonucleotide
  Sense strand starting at position 3181 SEQ ID NO: 3167
gggauuugcuuccacaaag

SEQ ID NO: 246253 - RNA, 19 nt, Artificial Sequence
  Description of Artificial Sequence: Synthetic oligonucleotide
  Antisense strand to SEQ ID NO: 246252
cuuuguggaagcaaauccc

SEQ ID NO: 246254 - RNA, 19 nt, Artificial Sequence
  Description of Artificial Sequence: Synthetic oligonucleotide
  Sense strand starting at position 3427 SEQ ID NO: 3167
gcauaugcaauucggauuu

SEQ ID NO: 246255 - RNA, 19 nt, Artificial Sequence
  Description of Artificial Sequence: Synthetic oligonucleotide
  Antisense strand to SEQ ID NO: 246254
aaauccgaauugcauaugc

SEQ ID NO: 246256 - RNA, 19 nt, Artificial Sequence
  Description of Artificial Sequence: Synthetic oligonucleotide
  Sense strand starting at position 3489 SEQ ID NO: 3167
uguguaugugcugagaaau

SEQ ID NO: 246257 - RNA, 19 nt, Artificial Sequence
  Description of Artificial Sequence: Synthetic oligonucleotide
  Antisense strand to SEQ ID NO: 246256
auuucucagcacauacaca

SEQ ID NO: 246258 - RNA, 19 nt, Artificial Sequence
  Description of Artificial Sequence: Synthetic oligonucleotide
  Sense strand starting at position 3506 SEQ ID NO: 3167
auacuagagcagcaugaua

SEQ ID NO: 246259 - RNA, 19 nt, Artificial Sequence
  Description of Artificial Sequence: Synthetic oligonucleotide
  Antisense strand to SEQ ID NO: 246258
uaucaugcugcucuaguau

SEQ ID NO: 246260 - RNA, 19 nt, Artificial Sequence
  Description of Artificial Sequence: Synthetic oligonucleotide
  Sense strand starting at position 3508 SEQ ID NO: 3167
acuagagcagcaugauagu

SEQ ID NO: 246261 - RNA, 19 nt, Artificial Sequence
  Description of Artificial Sequence: Synthetic oligonucleotide
  Antisense strand to SEQ ID NO: 246260
acuaucaugcugcucuagu

SEQ ID NO: 246262 - RNA, 19 nt, Artificial Sequence
  Description of Artificial Sequence: Synthetic oligonucleotide
  Sense strand starting at position 3634 SEQ ID NO: 3167
agacaaucauuugggucaa

SEQ ID NO: 246263 - RNA, 19 nt, Artificial Sequence
  Description of Artificial Sequence: Synthetic oligonucleotide
  Antisense strand to SEQ ID NO: 246262
uugacccaaaugauugucu

SEQ ID NO: 246264 - RNA, 19 nt, Artificial Sequence
  Description of Artificial Sequence: Synthetic oligonucleotide
  Sense strand starting at position 3635 SEQ ID NO: 3167
gacaaucauuugggucaaa

SEQ ID NO: 246265 - RNA, 19 nt, Artificial Sequence
  Description of Artificial Sequence: Synthetic oligonucleotide
  Antisense strand to SEQ ID NO: 246264
uuugacccaaaugauuguc

SEQ ID NO: 246266 - RNA, 19 nt, Artificial Sequence
  Description of Artificial Sequence: Synthetic oligonucleotide
  Sense strand starting at position 3688 SEQ ID NO: 3167
aaauguguuccucauggaa

SEQ ID NO: 246267 - RNA, 19 nt, Artificial Sequence
  Description of Artificial Sequence: Synthetic oligonucleotide
  Antisense strand to SEQ ID NO: 246266
uuccaugaggaacacauuu

SEQ ID NO: 246268 - RNA, 19 nt, Artificial Sequence
  Description of Artificial Sequence: Synthetic oligonucleotide
  Sense strand starting at position 3691 SEQ ID NO: 3167
uguguuccucauggaauac

SEQ ID NO: 246269 - RNA, 19 nt, Artificial Sequence
  Description of Artificial Sequence: Synthetic oligonucleotide
  Antisense strand to SEQ ID NO: 246268
guauuccaugaggaacaca

SEQ ID NO: 246270 - RNA, 19 nt, Artificial Sequence
  Description of Artificial Sequence: Synthetic oligonucleotide
  Sense strand starting at position 3949 SEQ ID NO: 3167
ucucuugucuaguuauuug

SEQ ID NO: 246271 - RNA, 19 nt, Artificial Sequence
  Description of Artificial Sequence: Synthetic oligonucleotide
  Antisense strand to SEQ ID NO: 246270
caaauaacuagacaagaga

SEQ ID NO: 246272 - RNA, 19 nt, Artificial Sequence
  Description of Artificial Sequence: Synthetic oligonucleotide
  Sense strand starting at position 3978 SEQ ID NO: 3167
uuugaaagcucacuuacug

SEQ ID NO: 246273 - RNA, 19 nt, Artificial Sequence
  Description of Artificial Sequence: Synthetic oligonucleotide
  Antisense strand to SEQ ID NO: 246272
caguaagugagcuuucaaa

SEQ ID NO: 246274 - RNA, 19 nt, Artificial Sequence
  Description of Artificial Sequence: Synthetic oligonucleotide
  Sense strand starting at position 225 SEQ ID NO: 3168
cugagaugcucuguaccau

SEQ ID NO: 246275 - RNA, 19 nt, Artificial Sequence
  Description of Artificial Sequence: Synthetic oligonucleotide
  Antisense strand to SEQ ID NO: 246274
augguacagagcaucucag

SEQ ID NO: 246276 - RNA, 19 nt, Artificial Sequence
  Description of Artificial Sequence: Synthetic oligonucleotide
  Sense strand starting at position 565 SEQ ID NO: 3168
cgcccagaauuacugcaaa

SEQ ID NO: 246277 - RNA, 19 nt, Artificial Sequence
  Description of Artificial Sequence: Synthetic oligonucleotide
  Antisense strand to SEQ ID NO: 246276
uuugcaguaauucugggcg

SEQ ID NO: 246278 - RNA, 19 nt, Artificial Sequence
  Description of Artificial Sequence: Synthetic oligonucleotide
  Sense strand starting at position 590 SEQ ID NO: 3168
gccugaacauccuuggaag

SEQ ID NO: 246279 - RNA, 19 nt, Artificial Sequence
  Description of Artificial Sequence: Synthetic oligonucleotide
  Antisense strand to SEQ ID NO: 246278
cuuccaaggauguucaggc

SEQ ID NO: 246280 - RNA, 19 nt, Artificial Sequence
  Description of Artificial Sequence: Synthetic oligonucleotide
  Sense strand starting at position 661 SEQ ID NO: 3168
ccucaagaguccucagcau

SEQ ID NO: 246281 - RNA, 19 nt, Artificial Sequence
  Description of Artificial Sequence: Synthetic oligonucleotide
  Antisense strand to SEQ ID NO: 246280
augcugaggacucuugagg

SEQ ID NO: 246282 - RNA, 19 nt, Artificial Sequence
  Description of Artificial Sequence: Synthetic oligonucleotide
  Sense strand starting at position 838 SEQ ID NO: 3168
gggauuuaguaacagauuc

SEQ ID NO: 246283 - RNA, 19 nt, Artificial Sequence
  Description of Artificial Sequence: Synthetic oligonucleotide
  Antisense strand to SEQ ID NO: 246282
gaaucuguuacuaaauccc

SEQ ID NO: 246284 - RNA, 19 nt, Artificial Sequence
  Description of Artificial Sequence: Synthetic oligonucleotide
  Sense strand starting at position 905 SEQ ID NO: 3168
uggaaaucugaacgucuua

SEQ ID NO: 246285 - RNA, 19 nt, Artificial Sequence
  Description of Artificial Sequence: Synthetic oligonucleotide
  Antisense strand to SEQ ID NO: 246284
uaagacguucagauuucca

SEQ ID NO: 246286 - RNA, 19 nt, Artificial Sequence
  Description of Artificial Sequence: Synthetic oligonucleotide
  Sense strand starting at position 959 SEQ ID NO: 3168
guaauaaggcccuaaacua

SEQ ID NO: 246287 - RNA, 19 nt, Artificial Sequence
  Description of Artificial Sequence: Synthetic oligonucleotide
  Antisense strand to SEQ ID NO: 246286
uaguuuagggccuuauuac

SEQ ID NO: 246288 - RNA, 19 nt, Artificial Sequence
  Description of Artificial Sequence: Synthetic oligonucleotide
  Sense strand starting at position 1090 SEQ ID NO: 3168
cuaggaugcugagcucaaa

SEQ ID NO: 246289 - RNA, 19 nt, Artificial Sequence
  Description of Artificial Sequence: Synthetic oligonucleotide
  Antisense strand to SEQ ID NO: 246288
uuugagcucagcauccuag

SEQ ID NO: 246290 - RNA, 19 nt, Artificial Sequence
  Description of Artificial Sequence: Synthetic oligonucleotide
  Sense strand starting at position 1138 SEQ ID NO: 3168
gggccagcgcuuaggagau

SEQ ID NO: 246291 - RNA, 19 nt, Artificial Sequence
  Description of Artificial Sequence: Synthetic oligonucleotide
  Antisense strand to SEQ ID NO: 246290
aucuccuaagcgcuggccc

SEQ ID NO: 246292 - RNA, 19 nt, Artificial Sequence
  Description of Artificial Sequence: Synthetic oligonucleotide
  Sense strand starting at position 1296 SEQ ID NO: 3168
uuaagauggugauuaauuc

SEQ ID NO: 246293 - RNA, 19 nt, Artificial Sequence
  Description of Artificial Sequence: Synthetic oligonucleotide
  Antisense strand to SEQ ID NO: 246292
gaauuaaucaccaucuuaa

SEQ ID NO: 246294 - RNA, 19 nt, Artificial Sequence
  Description of Artificial Sequence: Synthetic oligonucleotide
  Sense strand starting at position 2223 SEQ ID NO: 3168
gguguccgauuucugucaa

SEQ ID NO: 246295 - RNA, 19 nt, Artificial Sequence
  Description of Artificial Sequence: Synthetic oligonucleotide
  Antisense strand to SEQ ID NO: 246294
uugacagaaaucggacacc

SEQ ID NO: 246296 - RNA, 19 nt, Artificial Sequence
  Description of Artificial Sequence: Synthetic oligonucleotide
  Sense strand starting at position 2248 SEQ ID NO: 3168
uugaguuccuguccaagaa

SEQ ID NO: 246297 - RNA, 19 nt, Artificial Sequence
  Description of Artificial Sequence: Synthetic oligonucleotide
  Antisense strand to SEQ ID NO: 246296
uucuuggacaggaacucaa

SEQ ID NO: 246298 - RNA, 19 nt, Artificial Sequence
  Description of Artificial Sequence: Synthetic oligonucleotide
  Sense strand starting at position 2249 SEQ ID NO: 3168
ugaguuccuguccaagaag

SEQ ID NO: 246299 - RNA, 19 nt, Artificial Sequence
  Description of Artificial Sequence: Synthetic oligonucleotide
  Antisense strand to SEQ ID NO: 246298
cuucuuggacaggaacuca

SEQ ID NO: 246300 - RNA, 19 nt, Artificial Sequence
  Description of Artificial Sequence: Synthetic oligonucleotide
  Sense strand starting at position 2277 SEQ ID NO: 3168
gagagaaacgucugagcuc

SEQ ID NO: 246301 - RNA, 19 nt, Artificial Sequence
  Description of Artificial Sequence: Synthetic oligonucleotide
  Antisense strand to SEQ ID NO: 246300
gagcucagacguuucucuc

SEQ ID NO: 246302 - RNA, 19 nt, Artificial Sequence
  Description of Artificial Sequence: Synthetic oligonucleotide
  Sense strand starting at position 2470 SEQ ID NO: 3168
ggaggcauucccugacuug

SEQ ID NO: 246303 - RNA, 19 nt, Artificial Sequence
  Description of Artificial Sequence: Synthetic oligonucleotide
  Antisense strand to SEQ ID NO: 246302
caagucagggaaugccucc

SEQ ID NO: 246304 - RNA, 19 nt, Artificial Sequence
  Description of Artificial Sequence: Synthetic oligonucleotide
  Sense strand starting at position 2471 SEQ ID NO: 3168
gaggcauucccugacuugu

SEQ ID NO: 246305 - RNA, 19 nt, Artificial Sequence
  Description of Artificial Sequence: Synthetic oligonucleotide
  Antisense strand to SEQ ID NO: 246304
acaagucagggaaugccuc

SEQ ID NO: 246306 - RNA, 19 nt, Artificial Sequence
  Description of Artificial Sequence: Synthetic oligonucleotide
  Sense strand starting at position 2549 SEQ ID NO: 3168
ccuccaugccuguaaagag

SEQ ID NO: 246307 - RNA, 19 nt, Artificial Sequence
  Description of Artificial Sequence: Synthetic oligonucleotide
  Antisense strand to SEQ ID NO: 246306
cucuuuacaggcauggagg

SEQ ID NO: 246308 - RNA, 19 nt, Artificial Sequence
  Description of Artificial Sequence: Synthetic oligonucleotide
  Sense strand starting at position 2653 SEQ ID NO: 3168
guucucuuugaaugugaac

SEQ ID NO: 246309 - RNA, 19 nt, Artificial Sequence
  Description of Artificial Sequence: Synthetic oligonucleotide
  Antisense strand to SEQ ID NO: 246308
guucacauucaaagagaac

SEQ ID NO: 246310 - RNA, 19 nt, Artificial Sequence
  Description of Artificial Sequence: Synthetic oligonucleotide
  Sense strand starting at position 2686 SEQ ID NO: 3168
ccaacaucaggccgugaua

SEQ ID NO: 246311 - RNA, 19 nt, Artificial Sequence
  Description of Artificial Sequence: Synthetic oligonucleotide
  Antisense strand to SEQ ID NO: 246310
uaucacggccugauguugg

SEQ ID NO: 246312 - RNA, 19 nt, Artificial Sequence
  Description of Artificial Sequence: Synthetic oligonucleotide
  Sense strand starting at position 2688 SEQ ID NO: 3168
aacaucaggccgugauaca

SEQ ID NO: 246313 - RNA, 19 nt, Artificial Sequence
  Description of Artificial Sequence: Synthetic oligonucleotide
  Antisense strand to SEQ ID NO: 246312
uguaucacggccugauguu

SEQ ID NO: 246314 - RNA, 19 nt, Artificial Sequence
  Description of Artificial Sequence: Synthetic oligonucleotide
  Sense strand starting at position 2695 SEQ ID NO: 3168
ggccgugauacagaucaag

SEQ ID NO: 246315 - RNA, 19 nt, Artificial Sequence
  Description of Artificial Sequence: Synthetic oligonucleotide
  Antisense strand to SEQ ID NO: 246314
cuugaucuguaucacggcc

SEQ ID NO: 246316 - RNA, 19 nt, Artificial Sequence
  Description of Artificial Sequence: Synthetic oligonucleotide
  Sense strand starting at position 2801 SEQ ID NO: 3168
cgucuuggccaauaagagu

SEQ ID NO: 246317 - RNA, 19 nt, Artificial Sequence
  Description of Artificial Sequence: Synthetic oligonucleotide
  Antisense strand to SEQ ID NO: 246316
acucuuauuggccaagacg

SEQ ID NO: 246318 - RNA, 19 nt, Artificial Sequence
  Description of Artificial Sequence: Synthetic oligonucleotide
  Sense strand starting at position 2808 SEQ ID NO: 3168
gccaauaagagugauugcu

SEQ ID NO: 246319 - RNA, 19 nt, Artificial Sequence
  Description of Artificial Sequence: Synthetic oligonucleotide
  Antisense strand to SEQ ID NO: 246318
agcaaucacucuuauuggc

SEQ ID NO: 246320 - RNA, 19 nt, Artificial Sequence
  Description of Artificial Sequence: Synthetic oligonucleotide
  Sense strand starting at position 2861 SEQ ID NO: 3168
guccuccugccgucuagau

SEQ ID NO: 246321 - RNA, 19 nt, Artificial Sequence
  Description of Artificial Sequence: Synthetic oligonucleotide
  Antisense strand to SEQ ID NO: 246320
aucuagacggcaggaggac

SEQ ID NO: 246322 - RNA, 19 nt, Artificial Sequence
  Description of Artificial Sequence: Synthetic oligonucleotide
  Sense strand starting at position 2863 SEQ ID NO: 3168
ccuccugccgucuagauaa

SEQ ID NO: 246323 - RNA, 19 nt, Artificial Sequence
  Description of Artificial Sequence: Synthetic oligonucleotide
  Antisense strand to SEQ ID NO: 246322
uuaucuagacggcaggagg

SEQ ID NO: 246324 - RNA, 19 nt, Artificial Sequence
  Description of Artificial Sequence: Synthetic oligonucleotide
  Sense strand starting at position 3037 SEQ ID NO: 3168
guggucucccuccaugcaa

SEQ ID NO: 246325 - RNA, 19 nt, Artificial Sequence
  Description of Artificial Sequence: Synthetic oligonucleotide
  Antisense strand to SEQ ID NO: 246324
uugcauggagggagaccac

SEQ ID NO: 246326 - RNA, 19 nt, Artificial Sequence
  Description of Artificial Sequence: Synthetic oligonucleotide
  Sense strand starting at position 3168 SEQ ID NO: 3168
cuagcaaccguuugagaua

SEQ ID NO: 246327 - RNA, 19 nt, Artificial Sequence
  Description of Artificial Sequence: Synthetic oligonucleotide
  Antisense strand to SEQ ID NO: 246326
uaucucaaacgguugcuag

SEQ ID NO: 246328 - RNA, 19 nt, Artificial Sequence
  Description of Artificial Sequence: Synthetic oligonucleotide
  Sense strand starting at position 3232 SEQ ID NO: 3168
gcuuguaaccguuaaagaa

SEQ ID NO: 246329 - RNA, 19 nt, Artificial Sequence
  Description of Artificial Sequence: Synthetic oligonucleotide
  Antisense strand to SEQ ID NO: 246328
uucuuuaacgguuacaagc

SEQ ID NO: 246330 - RNA, 19 nt, Artificial Sequence
  Description of Artificial Sequence: Synthetic oligonucleotide
  Sense strand starting at position 3467 SEQ ID NO: 3168
agguuauuucaggguuagc

SEQ ID NO: 246331 - RNA, 19 nt, Artificial Sequence
  Description of Artificial Sequence: Synthetic oligonucleotide
  Antisense strand to SEQ ID NO: 246330
gcuaacccugaaauaaccu

SEQ ID NO: 246332 - RNA, 19 nt, Artificial Sequence
  Description of Artificial Sequence: Synthetic oligonucleotide
  Sense strand starting at position 3485 SEQ ID NO: 3168
cauguuucugguugaagag

SEQ ID NO: 246333 - RNA, 19 nt, Artificial Sequence
  Description of Artificial Sequence: Synthetic oligonucleotide
  Antisense strand to SEQ ID NO: 246332
cucuucaaccagaaacaug

SEQ ID NO: 246334 - RNA, 19 nt, Artificial Sequence
  Description of Artificial Sequence: Synthetic oligonucleotide
  Sense strand starting at position 3486 SEQ ID NO: 3168
auguuucugguugaagaga

SEQ ID NO: 246335 - RNA, 19 nt, Artificial Sequence
  Description of Artificial Sequence: Synthetic oligonucleotide
  Antisense strand to SEQ ID NO: 246334
ucucuucaaccagaaacau

SEQ ID NO: 246336 - RNA, 19 nt, Artificial Sequence
  Description of Artificial Sequence: Synthetic oligonucleotide
  Sense strand starting at position 3508 SEQ ID NO: 3168
uuaucuuaggguuggaaua

SEQ ID NO: 246337 - RNA, 19 nt, Artificial Sequence
  Description of Artificial Sequence: Synthetic oligonucleotide
  Antisense strand to SEQ ID NO: 246336
uauuccaacccuaagauaa

SEQ ID NO: 246338 - RNA, 19 nt, Artificial Sequence
  Description of Artificial Sequence: Synthetic oligonucleotide
  Sense strand starting at position 3509 SEQ ID NO: 3168
uaucuuaggguuggaauau

SEQ ID NO: 246339 - RNA, 19 nt, Artificial Sequence
  Description of Artificial Sequence: Synthetic oligonucleotide
  Antisense strand to SEQ ID NO: 246338
auauuccaacccuaagaua

SEQ ID NO: 246340 - RNA, 19 nt, Artificial Sequence
  Description of Artificial Sequence: Synthetic oligonucleotide
  Sense strand starting at position 3601 SEQ ID NO: 3168
aacuuagaaaggugguguu

SEQ ID NO: 246341 - RNA, 19 nt, Artificial Sequence
  Description of Artificial Sequence: Synthetic oligonucleotide
  Antisense strand to SEQ ID NO: 246340
aacaccaccuuucuaaguu

SEQ ID NO: 246342 - RNA, 19 nt, Artificial Sequence
  Description of Artificial Sequence: Synthetic oligonucleotide
  Sense strand starting at position 3615 SEQ ID NO: 3168
guguuuguccaagauggca

SEQ ID NO: 246343 - RNA, 19 nt, Artificial Sequence
  Description of Artificial Sequence: Synthetic oligonucleotide
  Antisense strand to SEQ ID NO: 246342
ugccaucuuggacaaacac

SEQ ID NO: 246344 - RNA, 19 nt, Artificial Sequence
  Description of Artificial Sequence: Synthetic oligonucleotide
  Sense strand starting at position 3725 SEQ ID NO: 3168
cagagaguucuuugguuuc

SEQ ID NO: 246345 - RNA, 19 nt, Artificial Sequence
  Description of Artificial Sequence: Synthetic oligonucleotide
  Antisense strand to SEQ ID NO: 246344
gaaaccaaagaacucucug

SEQ ID NO: 246346 - RNA, 19 nt, Artificial Sequence
  Description of Artificial Sequence: Synthetic oligonucleotide
  Sense strand starting at position 3782 SEQ ID NO: 3168
uggguaauugucugugaga

SEQ ID NO: 246347 - RNA, 19 nt, Artificial Sequence
  Description of Artificial Sequence: Synthetic oligonucleotide
  Antisense strand to SEQ ID NO: 246346
ucucacagacaauuaccca

SEQ ID NO: 246348 - RNA, 19 nt, Artificial Sequence
  Description of Artificial Sequence: Synthetic oligonucleotide
  Sense strand starting at position 3783 SEQ ID NO: 3168
ggguaauugucugugagau

SEQ ID NO: 246349 - RNA, 19 nt, Artificial Sequence
  Description of Artificial Sequence: Synthetic oligonucleotide
  Antisense strand to SEQ ID NO: 246348
aucucacagacaauuaccc

SEQ ID NO: 246350 - RNA, 19 nt, Artificial Sequence
  Description of Artificial Sequence: Synthetic oligonucleotide
  Sense strand starting at position 3793 SEQ ID NO: 3168
cugugagauggccaugauc

SEQ ID NO: 246351 - RNA, 19 nt, Artificial Sequence
  Description of Artificial Sequence: Synthetic oligonucleotide
  Antisense strand to SEQ ID NO: 246350
gaucauggccaucucacag

SEQ ID NO: 246352 - RNA, 19 nt, Artificial Sequence
  Description of Artificial Sequence: Synthetic oligonucleotide
  Sense strand starting at position 3805 SEQ ID NO: 3168
caugauccugcugguuaaa

SEQ ID NO: 246353 - RNA, 19 nt, Artificial Sequence
  Description of Artificial Sequence: Synthetic oligonucleotide
  Antisense strand to SEQ ID NO: 246352
uuuaaccagcaggaucaug

SEQ ID NO: 246354 - RNA, 19 nt, Artificial Sequence
  Description of Artificial Sequence: Synthetic oligonucleotide
  Sense strand starting at position 251 SEQ ID NO: 3169
agcaaacaucaauguuaug

SEQ ID NO: 246355 - RNA, 19 nt, Artificial Sequence
  Description of Artificial Sequence: Synthetic oligonucleotide
  Antisense strand to SEQ ID NO: 246354
cauaacauugauguuugcu

SEQ ID NO: 246356 - RNA, 19 nt, Artificial Sequence
  Description of Artificial Sequence: Synthetic oligonucleotide
  Sense strand starting at position 561 SEQ ID NO: 3169
gcugcuaaauuugugguau

SEQ ID NO: 246357 - RNA, 19 nt, Artificial Sequence
  Description of Artificial Sequence: Synthetic oligonucleotide
  Antisense strand to SEQ ID NO: 246356
auaccacaaauuuagcagc

SEQ ID NO: 246358 - RNA, 19 nt, Artificial Sequence
  Description of Artificial Sequence: Synthetic oligonucleotide
  Sense strand starting at position 565 SEQ ID NO: 3169
cuaaauuugugguauuugu

SEQ ID NO: 246359 - RNA, 19 nt, Artificial Sequence
  Description of Artificial Sequence: Synthetic oligonucleotide
  Antisense strand to SEQ ID NO: 246358
acaaauaccacaaauuuag

SEQ ID NO: 246360 - RNA, 19 nt, Artificial Sequence
  Description of Artificial Sequence: Synthetic oligonucleotide
  Sense strand starting at position 575 SEQ ID NO: 3169
gguauuuguuacgcagcaa

SEQ ID NO: 246361 - RNA, 19 nt, Artificial Sequence
  Description of Artificial Sequence: Synthetic oligonucleotide
  Antisense strand to SEQ ID NO: 246360
uugcugcguaacaaauacc

SEQ ID NO: 246362 - RNA, 19 nt, Artificial Sequence
  Description of Artificial Sequence: Synthetic oligonucleotide
  Sense strand starting at position 576 SEQ ID NO: 3169
guauuuguuacgcagcaau

SEQ ID NO: 246363 - RNA, 19 nt, Artificial Sequence
  Description of Artificial Sequence: Synthetic oligonucleotide
  Antisense strand to SEQ ID NO: 246362
auugcugcguaacaaauac

SEQ ID NO: 246364 - RNA, 19 nt, Artificial Sequence
  Description of Artificial Sequence: Synthetic oligonucleotide
  Sense strand starting at position 714 SEQ ID NO: 3169
ucacuauuccuagggauuc

SEQ ID NO: 246365 - RNA, 19 nt, Artificial Sequence
  Description of Artificial Sequence: Synthetic oligonucleotide
  Antisense strand to SEQ ID NO: 246364
gaaucccuaggaauaguga

SEQ ID NO: 246366 - RNA, 19 nt, Artificial Sequence
  Description of Artificial Sequence: Synthetic oligonucleotide
  Sense strand starting at position 872 SEQ ID NO: 3169
acuagaaguaacuggguau

SEQ ID NO: 246367 - RNA, 19 nt, Artificial Sequence
  Description of Artificial Sequence: Synthetic oligonucleotide
  Antisense strand to SEQ ID NO: 246366
auacccaguuacuucuagu

SEQ ID NO: 246368 - RNA, 19 nt, Artificial Sequence
  Description of Artificial Sequence: Synthetic oligonucleotide
  Sense strand starting at position 873 SEQ ID NO: 3169
cuagaaguaacuggguauu

SEQ ID NO: 246369 - RNA, 19 nt, Artificial Sequence
  Description of Artificial Sequence: Synthetic oligonucleotide
  Antisense strand to SEQ ID NO: 246368
aauacccaguuacuucuag

SEQ ID NO: 246370 - RNA, 19 nt, Artificial Sequence
  Description of Artificial Sequence: Synthetic oligonucleotide
  Sense strand starting at position 893 SEQ ID NO: 3169
aggcuccuugaaugucaaa

SEQ ID NO: 246371 - RNA, 19 nt, Artificial Sequence
  Description of Artificial Sequence: Synthetic oligonucleotide
  Antisense strand to SEQ ID NO: 246370
uuugacauucaaggagccu

SEQ ID NO: 246372 - RNA, 19 nt, Artificial Sequence
  Description of Artificial Sequence: Synthetic oligonucleotide
  Sense strand starting at position 978 SEQ ID NO: 3169
uccugucuuuccuugaaga

SEQ ID NO: 246373 - RNA, 19 nt, Artificial Sequence
  Description of Artificial Sequence: Synthetic oligonucleotide
  Antisense strand to SEQ ID NO: 246372
ucuucaaggaaagacagga

SEQ ID NO: 246374 - RNA, 19 nt, Artificial Sequence
  Description of Artificial Sequence: Synthetic oligonucleotide
  Sense strand starting at position 979 SEQ ID NO: 3169
ccugucuuuccuugaagac

SEQ ID NO: 246375 - RNA, 19 nt, Artificial Sequence
  Description of Artificial Sequence: Synthetic oligonucleotide
  Antisense strand to SEQ ID NO: 246374
gucuucaaggaaagacagg

SEQ ID NO: 246376 - RNA, 19 nt, Artificial Sequence
  Description of Artificial Sequence: Synthetic oligonucleotide
  Sense strand starting at position 988 SEQ ID NO: 3169
ccuugaagaccaggaguuu

SEQ ID NO: 246377 - RNA, 19 nt, Artificial Sequence
  Description of Artificial Sequence: Synthetic oligonucleotide
  Antisense strand to SEQ ID NO: 246376
aaacuccuggucuucaagg

SEQ ID NO: 246378 - RNA, 19 nt, Artificial Sequence
  Description of Artificial Sequence: Synthetic oligonucleotide
  Sense strand starting at position 1147 SEQ ID NO: 3169
ggcaccuccuuauuaagga

SEQ ID NO: 246379 - RNA, 19 nt, Artificial Sequence
  Description of Artificial Sequence: Synthetic oligonucleotide
  Antisense strand to SEQ ID NO: 246378
uccuuaauaaggaggugcc

SEQ ID NO: 246380 - RNA, 19 nt, Artificial Sequence
  Description of Artificial Sequence: Synthetic oligonucleotide
  Sense strand starting at position 1154 SEQ ID NO: 3169
ccuuauuaaggaugcaaca

SEQ ID NO: 246381 - RNA, 19 nt, Artificial Sequence
  Description of Artificial Sequence: Synthetic oligonucleotide
  Antisense strand to SEQ ID NO: 246380
uguugcauccuuaauaagg

SEQ ID NO: 246382 - RNA, 19 nt, Artificial Sequence
  Description of Artificial Sequence: Synthetic oligonucleotide
  Sense strand starting at position 1580 SEQ ID NO: 3169
ggucacacccgauaacuga

SEQ ID NO: 246383 - RNA, 19 nt, Artificial Sequence
  Description of Artificial Sequence: Synthetic oligonucleotide
  Antisense strand to SEQ ID NO: 246382
ucaguuaucgggugugacc

SEQ ID NO: 246384 - RNA, 19 nt, Artificial Sequence
  Description of Artificial Sequence: Synthetic oligonucleotide
  Sense strand starting at position 2037 SEQ ID NO: 3169
gauauuucguaggaaggag

SEQ ID NO: 246385 - RNA, 19 nt, Artificial Sequence
  Description of Artificial Sequence: Synthetic oligonucleotide
  Antisense strand to SEQ ID NO: 246384
cuccuuccuacgaaauauc

SEQ ID NO: 246386 - RNA, 19 nt, Artificial Sequence
  Description of Artificial Sequence: Synthetic oligonucleotide
  Sense strand starting at position 2054 SEQ ID NO: 3169
agccgauuuggcgaaaguu

SEQ ID NO: 246387 - RNA, 19 nt, Artificial Sequence
  Description of Artificial Sequence: Synthetic oligonucleotide
  Antisense strand to SEQ ID NO: 246386
aacuuucgccaaaucggcu

SEQ ID NO: 246388 - RNA, 19 nt, Artificial Sequence
  Description of Artificial Sequence: Synthetic oligonucleotide
  Sense strand starting at position 2064 SEQ ID NO: 3169
gcgaaaguuacguaaacaa

SEQ ID NO: 246389 - RNA, 19 nt, Artificial Sequence
  Description of Artificial Sequence: Synthetic oligonucleotide
  Antisense strand to SEQ ID NO: 246388
uuguuuacguaacuuucgc

SEQ ID NO: 246390 - RNA, 19 nt, Artificial Sequence
  Description of Artificial Sequence: Synthetic oligonucleotide
  Sense strand starting at position 2071 SEQ ID NO: 3169
uuacguaaacaauggaauu

SEQ ID NO: 246391 - RNA, 19 nt, Artificial Sequence
  Description of Artificial Sequence: Synthetic oligonucleotide
  Antisense strand to SEQ ID NO: 246390
aauuccauuguuuacguaa

SEQ ID NO: 246392 - RNA, 19 nt, Artificial Sequence
  Description of Artificial Sequence: Synthetic oligonucleotide
  Sense strand starting at position 2129 SEQ ID NO: 3169
gggagucauagugauugcu

SEQ ID NO: 246393 - RNA, 19 nt, Artificial Sequence
  Description of Artificial Sequence: Synthetic oligonucleotide
  Antisense strand to SEQ ID NO: 246392
agcaaucacuaugacuccc

SEQ ID NO: 246394 - RNA, 19 nt, Artificial Sequence
  Description of Artificial Sequence: Synthetic oligonucleotide
  Sense strand starting at position 2179 SEQ ID NO: 3169
ugugcuaaacgugucaagu

SEQ ID NO: 246395 - RNA, 19 nt, Artificial Sequence
  Description of Artificial Sequence: Synthetic oligonucleotide
  Antisense strand to SEQ ID NO: 246394
acuugacacguuuagcaca

SEQ ID NO: 246396 - RNA, 19 nt, Artificial Sequence
  Description of Artificial Sequence: Synthetic oligonucleotide
  Sense strand starting at position 2243 SEQ ID NO: 3169
cugcuccuuccagauuaag

SEQ ID NO: 246397 - RNA, 19 nt, Artificial Sequence
  Description of Artificial Sequence: Synthetic oligonucleotide
  Antisense strand to SEQ ID NO: 246396
cuuaaucuggaaggagcag

SEQ ID NO: 246398 - RNA, 19 nt, Artificial Sequence
  Description of Artificial Sequence: Synthetic oligonucleotide
  Sense strand starting at position 2315 SEQ ID NO: 3169
uguggauggguuggaagau

SEQ ID NO: 246399 - RNA, 19 nt, Artificial Sequence
  Description of Artificial Sequence: Synthetic oligonucleotide
  Antisense strand to SEQ ID NO: 246398
aucuuccaacccauccaca

SEQ ID NO: 246400 - RNA, 19 nt, Artificial Sequence
  Description of Artificial Sequence: Synthetic oligonucleotide
  Sense strand starting at position 2332 SEQ ID NO: 3169
augggaagucaaugcagaa

SEQ ID NO: 246401 - RNA, 19 nt, Artificial Sequence
  Description of Artificial Sequence: Synthetic oligonucleotide
  Antisense strand to SEQ ID NO: 246400
uucugcauugacuucccau

SEQ ID NO: 246402 - RNA, 19 nt, Artificial Sequence
  Description of Artificial Sequence: Synthetic oligonucleotide
  Sense strand starting at position 2878 SEQ ID NO: 3169
ugguauuaauacuccaugu

SEQ ID NO: 246403 - RNA, 19 nt, Artificial Sequence
  Description of Artificial Sequence: Synthetic oligonucleotide
  Antisense strand to SEQ ID NO: 246402
acauggaguauuaauacca

SEQ ID NO: 246404 - RNA, 19 nt, Artificial Sequence
  Description of Artificial Sequence: Synthetic oligonucleotide
  Sense strand starting at position 2880 SEQ ID NO: 3169
guauuaauacuccauguau

SEQ ID NO: 246405 - RNA, 19 nt, Artificial Sequence
  Description of Artificial Sequence: Synthetic oligonucleotide
  Antisense strand to SEQ ID NO: 246404
auacauggaguauuaauac

SEQ ID NO: 246406 - RNA, 19 nt, Artificial Sequence
  Description of Artificial Sequence: Synthetic oligonucleotide
  Sense strand starting at position 2903 SEQ ID NO: 3169
cagaauuaauauguucgua

SEQ ID NO: 246407 - RNA, 19 nt, Artificial Sequence
  Description of Artificial Sequence: Synthetic oligonucleotide
  Antisense strand to SEQ ID NO: 246406
uacgaacauauuaauucug

SEQ ID NO: 246408 - RNA, 19 nt, Artificial Sequence
  Description of Artificial Sequence: Synthetic oligonucleotide
  Sense strand starting at position 2943 SEQ ID NO: 3169
ugcaauaucguggaaacua

SEQ ID NO: 246409 - RNA, 19 nt, Artificial Sequence
  Description of Artificial Sequence: Synthetic oligonucleotide
  Antisense strand to SEQ ID NO: 246408
uaguuuccacgauauugca

SEQ ID NO: 246410 - RNA, 19 nt, Artificial Sequence
  Description of Artificial Sequence: Synthetic oligonucleotide
  Sense strand starting at position 2998 SEQ ID NO: 3169
aagucuuaacuggguaauu

SEQ ID NO: 246411 - RNA, 19 nt, Artificial Sequence
  Description of Artificial Sequence: Synthetic oligonucleotide
  Antisense strand to SEQ ID NO: 246410
aauuacccaguuaagacuu

SEQ ID NO: 246412 - RNA, 19 nt, Artificial Sequence
  Description of Artificial Sequence: Synthetic oligonucleotide
  Sense strand starting at position 3025 SEQ ID NO: 3169
uauguauucucucuagagg

SEQ ID NO: 246413 - RNA, 19 nt, Artificial Sequence
  Description of Artificial Sequence: Synthetic oligonucleotide
  Antisense strand to SEQ ID NO: 246412
ccucuagagagaauacaua

SEQ ID NO: 246414 - RNA, 19 nt, Artificial Sequence
  Description of Artificial Sequence: Synthetic oligonucleotide
  Sense strand starting at position 3026 SEQ ID NO: 3169
auguauucucucuagaggu

SEQ ID NO: 246415 - RNA, 19 nt, Artificial Sequence
  Description of Artificial Sequence: Synthetic oligonucleotide
  Antisense strand to SEQ ID NO: 246414
accucuagagagaauacau

SEQ ID NO: 246416 - RNA, 19 nt, Artificial Sequence
  Description of Artificial Sequence: Synthetic oligonucleotide
  Sense strand starting at position 3028 SEQ ID NO: 3169
guauucucucuagagguag

SEQ ID NO: 246417 - RNA, 19 nt, Artificial Sequence
  Description of Artificial Sequence: Synthetic oligonucleotide
  Antisense strand to SEQ ID NO: 246416
cuaccucuagagagaauac

SEQ ID NO: 246418 - RNA, 19 nt, Artificial Sequence
  Description of Artificial Sequence: Synthetic oligonucleotide
  Sense strand starting at position 3050 SEQ ID NO: 3169
gcgcuaugacuuguagcau

SEQ ID NO: 246419 - RNA, 19 nt, Artificial Sequence
  Description of Artificial Sequence: Synthetic oligonucleotide
  Antisense strand to SEQ ID NO: 246418
augcuacaagucauagcgc

SEQ ID NO: 246420 - RNA, 19 nt, Artificial Sequence
  Description of Artificial Sequence: Synthetic oligonucleotide
  Sense strand starting at position 3056 SEQ ID NO: 3169
ugacuuguagcauggagag

SEQ ID NO: 246421 - RNA, 19 nt, Artificial Sequence
  Description of Artificial Sequence: Synthetic oligonucleotide
  Antisense strand to SEQ ID NO: 246420
cucuccaugcuacaaguca

SEQ ID NO: 246422 - RNA, 19 nt, Artificial Sequence
  Description of Artificial Sequence: Synthetic oligonucleotide
  Sense strand starting at position 3090 SEQ ID NO: 3169
aucugaaagcaauaguuau

SEQ ID NO: 246423 - RNA, 19 nt, Artificial Sequence
  Description of Artificial Sequence: Synthetic oligonucleotide
  Antisense strand to SEQ ID NO: 246422
auaacuauugcuuucagau

SEQ ID NO: 246424 - RNA, 19 nt, Artificial Sequence
  Description of Artificial Sequence: Synthetic oligonucleotide
  Sense strand starting at position 3347 SEQ ID NO: 3169
uguggugcccgugugauga

SEQ ID NO: 246425 - RNA, 19 nt, Artificial Sequence
  Description of Artificial Sequence: Synthetic oligonucleotide
  Antisense strand to SEQ ID NO: 246424
ucaucacacgggcaccaca

SEQ ID NO: 246426 - RNA, 19 nt, Artificial Sequence
  Description of Artificial Sequence: Synthetic oligonucleotide
  Sense strand starting at position 3387 SEQ ID NO: 3169
ugaauuugucaaugccagu

SEQ ID NO: 246427 - RNA, 19 nt, Artificial Sequence
  Description of Artificial Sequence: Synthetic oligonucleotide
  Antisense strand to SEQ ID NO: 246426
acuggcauugacaaauuca

SEQ ID NO: 246428 - RNA, 19 nt, Artificial Sequence
  Description of Artificial Sequence: Synthetic oligonucleotide
  Sense strand starting at position 3454 SEQ ID NO: 3169
gccugaacaucauuagcaa

SEQ ID NO: 246429 - RNA, 19 nt, Artificial Sequence
  Description of Artificial Sequence: Synthetic oligonucleotide
  Antisense strand to SEQ ID NO: 246428
uugcuaaugauguucaggc

SEQ ID NO: 246430 - RNA, 19 nt, Artificial Sequence
  Description of Artificial Sequence: Synthetic oligonucleotide
  Sense strand starting at position 3915 SEQ ID NO: 3169
ggcucauaucccggcauuu

SEQ ID NO: 246431 - RNA, 19 nt, Artificial Sequence
  Description of Artificial Sequence: Synthetic oligonucleotide
  Antisense strand to SEQ ID NO: 246430
aaaugccgggauaugagcc

SEQ ID NO: 246432 - RNA, 19 nt, Artificial Sequence
  Description of Artificial Sequence: Synthetic oligonucleotide
  Sense strand starting at position 3974 SEQ ID NO: 3169
ugagaccugccugagcaaa

SEQ ID NO: 246433 - RNA, 19 nt, Artificial Sequence
  Description of Artificial Sequence: Synthetic oligonucleotide
  Antisense strand to SEQ ID NO: 246432
uuugcucaggcaggucuca

SEQ ID NO: 246434 - RNA, 19 nt, Artificial Sequence
  Description of Artificial Sequence: Synthetic oligonucleotide
  Sense strand starting at position 107 SEQ ID NO: 3170
aggagcaguuuccucugau

SEQ ID NO: 246435 - RNA, 19 nt, Artificial Sequence
  Description of Artificial Sequence: Synthetic oligonucleotide
  Antisense strand to SEQ ID NO: 246434
aucagaggaaacugcuccu

SEQ ID NO: 246436 - RNA, 19 nt, Artificial Sequence
  Description of Artificial Sequence: Synthetic oligonucleotide
  Sense strand starting at position 108 SEQ ID NO: 3170
ggagcaguuuccucugaug

SEQ ID NO: 246437 - RNA, 19 nt, Artificial Sequence
  Description of Artificial Sequence: Synthetic oligonucleotide
  Antisense strand to SEQ ID NO: 246436
caucagaggaaacugcucc

SEQ ID NO: 246438 - RNA, 19 nt, Artificial Sequence
  Description of Artificial Sequence: Synthetic oligonucleotide
  Sense strand starting at position 358 SEQ ID NO: 3170
agcuuauuagccugcacau

SEQ ID NO: 246439 - RNA, 19 nt, Artificial Sequence
  Description of Artificial Sequence: Synthetic oligonucleotide
  Antisense strand to SEQ ID NO: 246438
augugcaggcuaauaagcu

SEQ ID NO: 246440 - RNA, 19 nt, Artificial Sequence
  Description of Artificial Sequence: Synthetic oligonucleotide
  Sense strand starting at position 367 SEQ ID NO: 3170
gccugcacaugcuugaaau

SEQ ID NO: 246441 - RNA, 19 nt, Artificial Sequence
  Description of Artificial Sequence: Synthetic oligonucleotide
  Antisense strand to SEQ ID NO: 246440
auuucaagcaugugcaggc

SEQ ID NO: 246442 - RNA, 19 nt, Artificial Sequence
  Description of Artificial Sequence: Synthetic oligonucleotide
  Sense strand starting at position 368 SEQ ID NO: 3170
ccugcacaugcuugaaaua

SEQ ID NO: 246443 - RNA, 19 nt, Artificial Sequence
  Description of Artificial Sequence: Synthetic oligonucleotide
  Antisense strand to SEQ ID NO: 246442
uauuucaagcaugugcagg

SEQ ID NO: 246444 - RNA, 19 nt, Artificial Sequence
  Description of Artificial Sequence: Synthetic oligonucleotide
  Sense strand starting at position 369 SEQ ID NO: 3170
cugcacaugcuugaaauaa

SEQ ID NO: 246445 - RNA, 19 nt, Artificial Sequence
  Description of Artificial Sequence: Synthetic oligonucleotide
  Antisense strand to SEQ ID NO: 246444
uuauuucaagcaugugcag

SEQ ID NO: 246446 - RNA, 19 nt, Artificial Sequence
  Description of Artificial Sequence: Synthetic oligonucleotide
  Sense strand starting at position 400 SEQ ID NO: 3170
ccuuucugagcuuggauaa

SEQ ID NO: 246447 - RNA, 19 nt, Artificial Sequence
  Description of Artificial Sequence: Synthetic oligonucleotide
  Antisense strand to SEQ ID NO: 246446
uuauccaagcucagaaagg

SEQ ID NO: 246448 - RNA, 19 nt, Artificial Sequence
  Description of Artificial Sequence: Synthetic oligonucleotide
  Sense strand starting at position 401 SEQ ID NO: 3170
cuuucugagcuuggauaaa

SEQ ID NO: 246449 - RNA, 19 nt, Artificial Sequence
  Description of Artificial Sequence: Synthetic oligonucleotide
  Antisense strand to SEQ ID NO: 246448
uuuauccaagcucagaaag

SEQ ID NO: 246450 - RNA, 19 nt, Artificial Sequence
  Description of Artificial Sequence: Synthetic oligonucleotide
  Sense strand starting at position 896 SEQ ID NO: 3170
auagacuguucuguacgua

SEQ ID NO: 246451 - RNA, 19 nt, Artificial Sequence
  Description of Artificial Sequence: Synthetic oligonucleotide
  Antisense strand to SEQ ID NO: 246450
uacguacagaacagucuau

SEQ ID NO: 246452 - RNA, 19 nt, Artificial Sequence
  Description of Artificial Sequence: Synthetic oligonucleotide
  Sense strand starting at position 897 SEQ ID NO: 3170
uagacuguucuguacguau

SEQ ID NO: 246453 - RNA, 19 nt, Artificial Sequence
  Description of Artificial Sequence: Synthetic oligonucleotide
  Antisense strand to SEQ ID NO: 246452
auacguacagaacagucua

SEQ ID NO: 246454 - RNA, 19 nt, Artificial Sequence
  Description of Artificial Sequence: Synthetic oligonucleotide
  Sense strand starting at position 899 SEQ ID NO: 3170
gacuguucuguacguauga

SEQ ID NO: 246455 - RNA, 19 nt, Artificial Sequence
  Description of Artificial Sequence: Synthetic oligonucleotide
  Antisense strand to SEQ ID NO: 246454
ucauacguacagaacaguc

SEQ ID NO: 246456 - RNA, 19 nt, Artificial Sequence
  Description of Artificial Sequence: Synthetic oligonucleotide
  Sense strand starting at position 900 SEQ ID NO: 3170
acuguucuguacguaugau

SEQ ID NO: 246457 - RNA, 19 nt, Artificial Sequence
  Description of Artificial Sequence: Synthetic oligonucleotide
  Antisense strand to SEQ ID NO: 246456
aucauacguacagaacagu

SEQ ID NO: 246458 - RNA, 19 nt, Artificial Sequence
  Description of Artificial Sequence: Synthetic oligonucleotide
  Sense strand starting at position 901 SEQ ID NO: 3170
cuguucuguacguaugaug

SEQ ID NO: 246459 - RNA, 19 nt, Artificial Sequence
  Description of Artificial Sequence: Synthetic oligonucleotide
  Antisense strand to SEQ ID NO: 246458
caucauacguacagaacag

SEQ ID NO: 246460 - RNA, 19 nt, Artificial Sequence
  Description of Artificial Sequence: Synthetic oligonucleotide
  Sense strand starting at position 1130 SEQ ID NO: 3170
gcgcuauccagauagucuu

SEQ ID NO: 246461 - RNA, 19 nt, Artificial Sequence
  Description of Artificial Sequence: Synthetic oligonucleotide
  Antisense strand to SEQ ID NO: 246460
aagacuaucuggauagcgc

SEQ ID NO: 246462 - RNA, 19 nt, Artificial Sequence
  Description of Artificial Sequence: Synthetic oligonucleotide
  Sense strand starting at position 1136 SEQ ID NO: 3170
uccagauagucuuuagaga

SEQ ID NO: 246463 - RNA, 19 nt, Artificial Sequence
  Description of Artificial Sequence: Synthetic oligonucleotide
  Antisense strand to SEQ ID NO: 246462
ucucuaaagacuaucugga

SEQ ID NO: 246464 - RNA, 19 nt, Artificial Sequence
  Description of Artificial Sequence: Synthetic oligonucleotide
  Sense strand starting at position 1631 SEQ ID NO: 3170
cggcaagcauuuggaaaga

SEQ ID NO: 246465 - RNA, 19 nt, Artificial Sequence
  Description of Artificial Sequence: Synthetic oligonucleotide
  Antisense strand to SEQ ID NO: 246464
ucuuuccaaaugcuugccg

SEQ ID NO: 246466 - RNA, 19 nt, Artificial Sequence
  Description of Artificial Sequence: Synthetic oligonucleotide
  Sense strand starting at position 1642 SEQ ID NO: 3170
uggaaagacgcucggauau

SEQ ID NO: 246467 - RNA, 19 nt, Artificial Sequence
  Description of Artificial Sequence: Synthetic oligonucleotide
  Antisense strand to SEQ ID NO: 246466
auauccgagcgucuuucca

SEQ ID NO: 246468 - RNA, 19 nt, Artificial Sequence
  Description of Artificial Sequence: Synthetic oligonucleotide
  Sense strand starting at position 2064 SEQ ID NO: 3170
ccaagauggucccuuagac

SEQ ID NO: 246469 - RNA, 19 nt, Artificial Sequence
  Description of Artificial Sequence: Synthetic oligonucleotide
  Antisense strand to SEQ ID NO: 246468
gucuaagggaccaucuugg

SEQ ID NO: 246470 - RNA, 19 nt, Artificial Sequence
  Description of Artificial Sequence: Synthetic oligonucleotide
  Sense strand starting at position 2107 SEQ ID NO: 3170
gggaaugcccuauguuaag

SEQ ID NO: 246471 - RNA, 19 nt, Artificial Sequence
  Description of Artificial Sequence: Synthetic oligonucleotide
  Antisense strand to SEQ ID NO: 246470
cuuaacauagggcauuccc

SEQ ID NO: 246472 - RNA, 19 nt, Artificial Sequence
  Description of Artificial Sequence: Synthetic oligonucleotide
  Sense strand starting at position 2116 SEQ ID NO: 3170
cuauguuaagauggcgaau

SEQ ID NO: 246473 - RNA, 19 nt, Artificial Sequence
  Description of Artificial Sequence: Synthetic oligonucleotide
  Antisense strand to SEQ ID NO: 246472
auucgccaucuuaacauag

SEQ ID NO: 246474 - RNA, 19 nt, Artificial Sequence
  Description of Artificial Sequence: Synthetic oligonucleotide
  Sense strand starting at position 2141 SEQ ID NO: 3170
gggacaucucaaggcgauu

SEQ ID NO: 246475 - RNA, 19 nt, Artificial Sequence
  Description of Artificial Sequence: Synthetic oligonucleotide
  Antisense strand to SEQ ID NO: 246474
aaucgccuugagauguccc

SEQ ID NO: 246476 - RNA, 19 nt, Artificial Sequence
  Description of Artificial Sequence: Synthetic oligonucleotide
  Sense strand starting at position 2173 SEQ ID NO: 3170
gggcguucuccuugggaua

SEQ ID NO: 246477 - RNA, 19 nt, Artificial Sequence
  Description of Artificial Sequence: Synthetic oligonucleotide
  Antisense strand to SEQ ID NO: 246476
uaucccaaggagaacgccc

SEQ ID NO: 246478 - RNA, 19 nt, Artificial Sequence
  Description of Artificial Sequence: Synthetic oligonucleotide
  Sense strand starting at position 2174 SEQ ID NO: 3170
ggcguucuccuugggauaa

SEQ ID NO: 246479 - RNA, 19 nt, Artificial Sequence
  Description of Artificial Sequence: Synthetic oligonucleotide
  Antisense strand to SEQ ID NO: 246478
uuaucccaaggagaacgcc

SEQ ID NO: 246480 - RNA, 19 nt, Artificial Sequence
  Description of Artificial Sequence: Synthetic oligonucleotide
  Sense strand starting at position 2335 SEQ ID NO: 3170
auaauuagcggcuggaaac

SEQ ID NO: 246481 - RNA, 19 nt, Artificial Sequence
  Description of Artificial Sequence: Synthetic oligonucleotide
  Antisense strand to SEQ ID NO: 246480
guuuccagccgcuaauuau

SEQ ID NO: 246482 - RNA, 19 nt, Artificial Sequence
  Description of Artificial Sequence: Synthetic oligonucleotide
  Sense strand starting at position 2494 SEQ ID NO: 3170
uucuaagauucggcagcuu

SEQ ID NO: 246483 - RNA, 19 nt, Artificial Sequence
  Description of Artificial Sequence: Synthetic oligonucleotide
  Antisense strand to SEQ ID NO: 246482
aagcugccgaaucuuagaa

SEQ ID NO: 246484 - RNA, 19 nt, Artificial Sequence
  Description of Artificial Sequence: Synthetic oligonucleotide
  Sense strand starting at position 2626 SEQ ID NO: 3170
ggcgcuugcccuuaaagaa

SEQ ID NO: 246485 - RNA, 19 nt, Artificial Sequence
  Description of Artificial Sequence: Synthetic oligonucleotide
  Antisense strand to SEQ ID NO: 246484
uucuuuaagggcaagcgcc

SEQ ID NO: 246486 - RNA, 19 nt, Artificial Sequence
  Description of Artificial Sequence: Synthetic oligonucleotide
  Sense strand starting at position 2707 SEQ ID NO: 3170
gaggaucucgugugccuau

SEQ ID NO: 246487 - RNA, 19 nt, Artificial Sequence
  Description of Artificial Sequence: Synthetic oligonucleotide
  Antisense strand to SEQ ID NO: 246486
auaggcacacgagauccuc

SEQ ID NO: 246488 - RNA, 19 nt, Artificial Sequence
  Description of Artificial Sequence: Synthetic oligonucleotide
  Sense strand starting at position 3032 SEQ ID NO: 3170
gcaguaugcuucccacaug

SEQ ID NO: 246489 - RNA, 19 nt, Artificial Sequence
  Description of Artificial Sequence: Synthetic oligonucleotide
  Antisense strand to SEQ ID NO: 246488
caugugggaagcauacugc

SEQ ID NO: 246490 - RNA, 19 nt, Artificial Sequence
  Description of Artificial Sequence: Synthetic oligonucleotide
  Sense strand starting at position 3415 SEQ ID NO: 3170
agagaaauuguuggugagu

SEQ ID NO: 246491 - RNA, 19 nt, Artificial Sequence
  Description of Artificial Sequence: Synthetic oligonucleotide
  Antisense strand to SEQ ID NO: 246490
acucaccaacaauuucucu

SEQ ID NO: 246492 - RNA, 19 nt, Artificial Sequence
  Description of Artificial Sequence: Synthetic oligonucleotide
  Sense strand starting at position 3416 SEQ ID NO: 3170
gagaaauuguuggugaguu

SEQ ID NO: 246493 - RNA, 19 nt, Artificial Sequence
  Description of Artificial Sequence: Synthetic oligonucleotide
  Antisense strand to SEQ ID NO: 246492
aacucaccaacaauuucuc

SEQ ID NO: 246494 - RNA, 19 nt, Artificial Sequence
  Description of Artificial Sequence: Synthetic oligonucleotide
  Sense strand starting at position 3424 SEQ ID NO: 3170
guuggugaguugcuuuaca

SEQ ID NO: 246495 - RNA, 19 nt, Artificial Sequence
  Description of Artificial Sequence: Synthetic oligonucleotide
  Antisense strand to SEQ ID NO: 246494
uguaaagcaacucaccaac

SEQ ID NO: 246496 - RNA, 19 nt, Artificial Sequence
  Description of Artificial Sequence: Synthetic oligonucleotide
  Sense strand starting at position 3432 SEQ ID NO: 3170
guugcuuuacacugggaau

SEQ ID NO: 246497 - RNA, 19 nt, Artificial Sequence
  Description of Artificial Sequence: Synthetic oligonucleotide
  Antisense strand to SEQ ID NO: 246496
auucccaguguaaagcaac

SEQ ID NO: 246498 - RNA, 19 nt, Artificial Sequence
  Description of Artificial Sequence: Synthetic oligonucleotide
  Sense strand starting at position 3446 SEQ ID NO: 3170
ggaauagauuuacaaucac

SEQ ID NO: 246499 - RNA, 19 nt, Artificial Sequence
  Description of Artificial Sequence: Synthetic oligonucleotide
  Antisense strand to SEQ ID NO: 246498
gugauuguaaaucuauucc

SEQ ID NO: 246500 - RNA, 19 nt, Artificial Sequence
  Description of Artificial Sequence: Synthetic oligonucleotide
  Sense strand starting at position 3491 SEQ ID NO: 3170
auauuuaucugugugucua

SEQ ID NO: 246501 - RNA, 19 nt, Artificial Sequence
  Description of Artificial Sequence: Synthetic oligonucleotide
  Antisense strand to SEQ ID NO: 246500
uagacacacagauaaauau

SEQ ID NO: 246502 - RNA, 19 nt, Artificial Sequence
  Description of Artificial Sequence: Synthetic oligonucleotide
  Sense strand starting at position 3492 SEQ ID NO: 3170
uauuuaucugugugucuag

SEQ ID NO: 246503 - RNA, 19 nt, Artificial Sequence
  Description of Artificial Sequence: Synthetic oligonucleotide
  Antisense strand to SEQ ID NO: 246502
cuagacacacagauaaaua

SEQ ID NO: 246504 - RNA, 19 nt, Artificial Sequence
  Description of Artificial Sequence: Synthetic oligonucleotide
  Sense strand starting at position 3578 SEQ ID NO: 3170
cgucuaugucuggucuguu

SEQ ID NO: 246505 - RNA, 19 nt, Artificial Sequence
  Description of Artificial Sequence: Synthetic oligonucleotide
  Antisense strand to SEQ ID NO: 246504
aacagaccagacauagacg

SEQ ID NO: 246506 - RNA, 19 nt, Artificial Sequence
  Description of Artificial Sequence: Synthetic oligonucleotide
  Sense strand starting at position 3615 SEQ ID NO: 3170
ggguaagaucagugucaca

SEQ ID NO: 246507 - RNA, 19 nt, Artificial Sequence
  Description of Artificial Sequence: Synthetic oligonucleotide
  Antisense strand to SEQ ID NO: 246506
ugugacacugaucuuaccc

SEQ ID NO: 246508 - RNA, 19 nt, Artificial Sequence
  Description of Artificial Sequence: Synthetic oligonucleotide
  Sense strand starting at position 3642 SEQ ID NO: 3170
gggucaucagugggucuua

SEQ ID NO: 246509 - RNA, 19 nt, Artificial Sequence
  Description of Artificial Sequence: Synthetic oligonucleotide
  Antisense strand to SEQ ID NO: 246508
uaagacccacugaugaccc

SEQ ID NO: 246510 - RNA, 19 nt, Artificial Sequence
  Description of Artificial Sequence: Synthetic oligonucleotide
  Sense strand starting at position 3651 SEQ ID NO: 3170
gugggucuuacaggaguca

SEQ ID NO: 246511 - RNA, 19 nt, Artificial Sequence
  Description of Artificial Sequence: Synthetic oligonucleotide
  Antisense strand to SEQ ID NO: 246510
ugacuccuguaagacccac

SEQ ID NO: 246512 - RNA, 19 nt, Artificial Sequence
  Description of Artificial Sequence: Synthetic oligonucleotide
  Sense strand starting at position 3956 SEQ ID NO: 3170
uuggaauccuaguuccuca

SEQ ID NO: 246513 - RNA, 19 nt, Artificial Sequence
  Description of Artificial Sequence: Synthetic oligonucleotide
  Antisense strand to SEQ ID NO: 246512
ugaggaacuaggauuccaa

SEQ ID NO: 246514 - RNA, 19 nt, Artificial Sequence
  Description of Artificial Sequence: Synthetic oligonucleotide
  Sense strand starting at position 59 SEQ ID NO: 3171
ccagaaauccagugcauug

SEQ ID NO: 246515 - RNA, 19 nt, Artificial Sequence
  Description of Artificial Sequence: Synthetic oligonucleotide
  Antisense strand to SEQ ID NO: 246514
caaugcacuggauuucugg

SEQ ID NO: 246516 - RNA, 19 nt, Artificial Sequence
  Description of Artificial Sequence: Synthetic oligonucleotide
  Sense strand starting at position 100 SEQ ID NO: 3171
cgcgacuuuaugcaaggau

SEQ ID NO: 246517 - RNA, 19 nt, Artificial Sequence
  Description of Artificial Sequence: Synthetic oligonucleotide
  Antisense strand to SEQ ID NO: 246516
auccuugcauaaagucgcg

SEQ ID NO: 246518 - RNA, 19 nt, Artificial Sequence
  Description of Artificial Sequence: Synthetic oligonucleotide
  Sense strand starting at position 103 SEQ ID NO: 3171
gacuuuaugcaaggauaga

SEQ ID NO: 246519 - RNA, 19 nt, Artificial Sequence
  Description of Artificial Sequence: Synthetic oligonucleotide
  Antisense strand to SEQ ID NO: 246518
ucuauccuugcauaaaguc

SEQ ID NO: 246520 - RNA, 19 nt, Artificial Sequence
  Description of Artificial Sequence: Synthetic oligonucleotide
  Sense strand starting at position 122 SEQ ID NO: 3171
aauguuuccucucucggau

SEQ ID NO: 246521 - RNA, 19 nt, Artificial Sequence
  Description of Artificial Sequence: Synthetic oligonucleotide
  Antisense strand to SEQ ID NO: 246520
auccgagagaggaaacauu

SEQ ID NO: 246522 - RNA, 19 nt, Artificial Sequence
  Description of Artificial Sequence: Synthetic oligonucleotide
  Sense strand starting at position 442 SEQ ID NO: 3171
aaauguucucucugagcug

SEQ ID NO: 246523 - RNA, 19 nt, Artificial Sequence
  Description of Artificial Sequence: Synthetic oligonucleotide
  Antisense strand to SEQ ID NO: 246522
cagcucagagagaacauuu

SEQ ID NO: 246524 - RNA, 19 nt, Artificial Sequence
  Description of Artificial Sequence: Synthetic oligonucleotide
  Sense strand starting at position 600 SEQ ID NO: 3171
uuucgcgucugcuuuguua

SEQ ID NO: 246525 - RNA, 19 nt, Artificial Sequence
  Description of Artificial Sequence: Synthetic oligonucleotide
  Antisense strand to SEQ ID NO: 246524
uaacaaagcagacgcgaaa

SEQ ID NO: 246526 - RNA, 19 nt, Artificial Sequence
  Description of Artificial Sequence: Synthetic oligonucleotide
  Sense strand starting at position 1702 SEQ ID NO: 3171
ccgugacgcaccuggaauu

SEQ ID NO: 246527 - RNA, 19 nt, Artificial Sequence
  Description of Artificial Sequence: Synthetic oligonucleotide
  Antisense strand to SEQ ID NO: 246526
aauuccaggugcgucacgg

SEQ ID NO: 246528 - RNA, 19 nt, Artificial Sequence
  Description of Artificial Sequence: Synthetic oligonucleotide
  Sense strand starting at position 1930 SEQ ID NO: 3171
gcgcgcuuacuguccagau

SEQ ID NO: 246529 - RNA, 19 nt, Artificial Sequence
  Description of Artificial Sequence: Synthetic oligonucleotide
  Antisense strand to SEQ ID NO: 246528
aucuggacaguaagcgcgc

SEQ ID NO: 246530 - RNA, 19 nt, Artificial Sequence
  Description of Artificial Sequence: Synthetic oligonucleotide
  Sense strand starting at position 1931 SEQ ID NO: 3171
cgcgcuuacuguccagaua

SEQ ID NO: 246531 - RNA, 19 nt, Artificial Sequence
  Description of Artificial Sequence: Synthetic oligonucleotide
  Antisense strand to SEQ ID NO: 246530
uaucuggacaguaagcgcg

SEQ ID NO: 246532 - RNA, 19 nt, Artificial Sequence
  Description of Artificial Sequence: Synthetic oligonucleotide
  Sense strand starting at position 1932 SEQ ID NO: 3171
gcgcuuacuguccagauag

SEQ ID NO: 246533 - RNA, 19 nt, Artificial Sequence
  Description of Artificial Sequence: Synthetic oligonucleotide
  Antisense strand to SEQ ID NO: 246532
cuaucuggacaguaagcgc

SEQ ID NO: 246534 - RNA, 19 nt, Artificial Sequence
  Description of Artificial Sequence: Synthetic oligonucleotide
  Sense strand starting at position 2049 SEQ ID NO: 3171
gcgcgcucacuauucauga

SEQ ID NO: 246535 - RNA, 19 nt, Artificial Sequence
  Description of Artificial Sequence: Synthetic oligonucleotide
  Antisense strand to SEQ ID NO: 246534
ucaugaauagugagcgcgc

SEQ ID NO: 246536 - RNA, 19 nt, Artificial Sequence
  Description of Artificial Sequence: Synthetic oligonucleotide
  Sense strand starting at position 2707 SEQ ID NO: 3171
gcggcaguaugauauaguu

SEQ ID NO: 246537 - RNA, 19 nt, Artificial Sequence
  Description of Artificial Sequence: Synthetic oligonucleotide
  Antisense strand to SEQ ID NO: 246536
aacuauaucauacugccgc

SEQ ID NO: 246538 - RNA, 19 nt, Artificial Sequence
  Description of Artificial Sequence: Synthetic oligonucleotide
  Sense strand starting at position 2709 SEQ ID NO: 3171
ggcaguaugauauaguuaa

SEQ ID NO: 246539 - RNA, 19 nt, Artificial Sequence
  Description of Artificial Sequence: Synthetic oligonucleotide
  Antisense strand to SEQ ID NO: 246538
uuaacuauaucauacugcc

SEQ ID NO: 246540 - RNA, 19 nt, Artificial Sequence
  Description of Artificial Sequence: Synthetic oligonucleotide
  Sense strand starting at position 2724 SEQ ID NO: 3171
uuaauaagauggcgugcaa

SEQ ID NO: 246541 - RNA, 19 nt, Artificial Sequence
  Description of Artificial Sequence: Synthetic oligonucleotide
  Antisense strand to SEQ ID NO: 246540
uugcacgccaucuuauuaa

SEQ ID NO: 246542 - RNA, 19 nt, Artificial Sequence
  Description of Artificial Sequence: Synthetic oligonucleotide
  Sense strand starting at position 2741 SEQ ID NO: 3171
aaaggugugccguaagaug

SEQ ID NO: 246543 - RNA, 19 nt, Artificial Sequence
  Description of Artificial Sequence: Synthetic oligonucleotide
  Antisense strand to SEQ ID NO: 246542
caucuuacggcacaccuuu

SEQ ID NO: 246544 - RNA, 19 nt, Artificial Sequence
  Description of Artificial Sequence: Synthetic oligonucleotide
  Sense strand starting at position 2748 SEQ ID NO: 3171
ugccguaagaugcaugcaa

SEQ ID NO: 246545 - RNA, 19 nt, Artificial Sequence
  Description of Artificial Sequence: Synthetic oligonucleotide
  Antisense strand to SEQ ID NO: 246544
uugcaugcaucuuacggca

SEQ ID NO: 246546 - RNA, 19 nt, Artificial Sequence
  Description of Artificial Sequence: Synthetic oligonucleotide
  Sense strand starting at position 536 SEQ ID NO: 3172
cggccuauauuacucuuua

SEQ ID NO: 246547 - RNA, 19 nt, Artificial Sequence
  Description of Artificial Sequence: Synthetic oligonucleotide
  Antisense strand to SEQ ID NO: 246546
uaaagaguaauauaggccg

SEQ ID NO: 246548 - RNA, 19 nt, Artificial Sequence
  Description of Artificial Sequence: Synthetic oligonucleotide
  Sense strand starting at position 550 SEQ ID NO: 3172
cuuuauaucuuuggcaugu

SEQ ID NO: 246549 - RNA, 19 nt, Artificial Sequence
  Description of Artificial Sequence: Synthetic oligonucleotide
  Antisense strand to SEQ ID NO: 246548
acaugccaaagauauaaag

SEQ ID NO: 246550 - RNA, 19 nt, Artificial Sequence
  Description of Artificial Sequence: Synthetic oligonucleotide
  Sense strand starting at position 552 SEQ ID NO: 3172
uuauaucuuuggcauguca

SEQ ID NO: 246551 - RNA, 19 nt, Artificial Sequence
  Description of Artificial Sequence: Synthetic oligonucleotide
  Antisense strand to SEQ ID NO: 246550
ugacaugccaaagauauaa

SEQ ID NO: 246552 - RNA, 19 nt, Artificial Sequence
  Description of Artificial Sequence: Synthetic oligonucleotide
  Sense strand starting at position 559 SEQ ID NO: 3172
uuuggcaugucaggaauau

SEQ ID NO: 246553 - RNA, 19 nt, Artificial Sequence
  Description of Artificial Sequence: Synthetic oligonucleotide
  Antisense strand to SEQ ID NO: 246552
auauuccugacaugccaaa

SEQ ID NO: 246554 - RNA, 19 nt, Artificial Sequence
  Description of Artificial Sequence: Synthetic oligonucleotide
  Sense strand starting at position 560 SEQ ID NO: 3172
uuggcaugucaggaauauu

SEQ ID NO: 246555 - RNA, 19 nt, Artificial Sequence
  Description of Artificial Sequence: Synthetic oligonucleotide
  Antisense strand to SEQ ID NO: 246554
aauauuccugacaugccaa

SEQ ID NO: 246556 - RNA, 19 nt, Artificial Sequence
  Description of Artificial Sequence: Synthetic oligonucleotide
  Sense strand starting at position 563 SEQ ID NO: 3172
gcaugucaggaauauugua

SEQ ID NO: 246557 - RNA, 19 nt, Artificial Sequence
  Description of Artificial Sequence: Synthetic oligonucleotide
  Antisense strand to SEQ ID NO: 246556
uacaauauuccugacaugc

SEQ ID NO: 246558 - RNA, 19 nt, Artificial Sequence
  Description of Artificial Sequence: Synthetic oligonucleotide
  Sense strand starting at position 568 SEQ ID NO: 3172
ucaggaauauuguaggaua

SEQ ID NO: 246559 - RNA, 19 nt, Artificial Sequence
  Description of Artificial Sequence: Synthetic oligonucleotide
  Antisense strand to SEQ ID NO: 246558
uauccuacaauauuccuga

SEQ ID NO: 246560 - RNA, 19 nt, Artificial Sequence
  Description of Artificial Sequence: Synthetic oligonucleotide
  Sense strand starting at position 571 SEQ ID NO: 3172
ggaauauuguaggauaaau

SEQ ID NO: 246561 - RNA, 19 nt, Artificial Sequence
  Description of Artificial Sequence: Synthetic oligonucleotide
  Antisense strand to SEQ ID NO: 246560
auuuauccuacaauauucc

SEQ ID NO: 246562 - RNA, 19 nt, Artificial Sequence
  Description of Artificial Sequence: Synthetic oligonucleotide
  Sense strand starting at position 719 SEQ ID NO: 3172
ggcuguaacucagaacaga

SEQ ID NO: 246563 - RNA, 19 nt, Artificial Sequence
  Description of Artificial Sequence: Synthetic oligonucleotide
  Antisense strand to SEQ ID NO: 246562
ucuguucugaguuacagcc

SEQ ID NO: 246564 - RNA, 19 nt, Artificial Sequence
  Description of Artificial Sequence: Synthetic oligonucleotide
  Sense strand starting at position 751 SEQ ID NO: 3172
aagaauguguaguuagcau

SEQ ID NO: 246565 - RNA, 19 nt, Artificial Sequence
  Description of Artificial Sequence: Synthetic oligonucleotide
  Antisense strand to SEQ ID NO: 246564
augcuaacuacacauucuu

SEQ ID NO: 246566 - RNA, 19 nt, Artificial Sequence
  Description of Artificial Sequence: Synthetic oligonucleotide
  Sense strand starting at position 837 SEQ ID NO: 3172
uuggaacuauacuguuaca

SEQ ID NO: 246567 - RNA, 19 nt, Artificial Sequence
  Description of Artificial Sequence: Synthetic oligonucleotide
  Antisense strand to SEQ ID NO: 246566
uguaacaguauaguuccaa

SEQ ID NO: 246568 - RNA, 19 nt, Artificial Sequence
  Description of Artificial Sequence: Synthetic oligonucleotide
  Sense strand starting at position 1028 SEQ ID NO: 3172
gguccucucuaagagaaag

SEQ ID NO: 246569 - RNA, 19 nt, Artificial Sequence
  Description of Artificial Sequence: Synthetic oligonucleotide
  Antisense strand to SEQ ID NO: 246568
cuuucucuuagagaggacc

SEQ ID NO: 246570 - RNA, 19 nt, Artificial Sequence
  Description of Artificial Sequence: Synthetic oligonucleotide
  Sense strand starting at position 1111 SEQ ID NO: 3172
gggcacauauauguugaga

SEQ ID NO: 246571 - RNA, 19 nt, Artificial Sequence
  Description of Artificial Sequence: Synthetic oligonucleotide
  Antisense strand to SEQ ID NO: 246570
ucucaacauauaugugccc

SEQ ID NO: 246572 - RNA, 19 nt, Artificial Sequence
  Description of Artificial Sequence: Synthetic oligonucleotide
  Sense strand starting at position 1113 SEQ ID NO: 3172
gcacauauauguugagaca

SEQ ID NO: 246573 - RNA, 19 nt, Artificial Sequence
  Description of Artificial Sequence: Synthetic oligonucleotide
  Antisense strand to SEQ ID NO: 246572
ugucucaacauauaugugc

SEQ ID NO: 246574 - RNA, 19 nt, Artificial Sequence
  Description of Artificial Sequence: Synthetic oligonucleotide
  Sense strand starting at position 1116 SEQ ID NO: 3172
cauauauguugagacagga

SEQ ID NO: 246575 - RNA, 19 nt, Artificial Sequence
  Description of Artificial Sequence: Synthetic oligonucleotide
  Antisense strand to SEQ ID NO: 246574
uccugucucaacauauaug

SEQ ID NO: 246576 - RNA, 19 nt, Artificial Sequence
  Description of Artificial Sequence: Synthetic oligonucleotide
  Sense strand starting at position 1187 SEQ ID NO: 3172
gccuguaucucugauagcu

SEQ ID NO: 246577 - RNA, 19 nt, Artificial Sequence
  Description of Artificial Sequence: Synthetic oligonucleotide
  Antisense strand to SEQ ID NO: 246576
agcuaucagagauacaggc

SEQ ID NO: 246578 - RNA, 19 nt, Artificial Sequence
  Description of Artificial Sequence: Synthetic oligonucleotide
  Sense strand starting at position 1189 SEQ ID NO: 3172
cuguaucucugauagcuuc

SEQ ID NO: 246579 - RNA, 19 nt, Artificial Sequence
  Description of Artificial Sequence: Synthetic oligonucleotide
  Antisense strand to SEQ ID NO: 246578
gaagcuaucagagauacag

SEQ ID NO: 246580 - RNA, 19 nt, Artificial Sequence
  Description of Artificial Sequence: Synthetic oligonucleotide
  Sense strand starting at position 1196 SEQ ID NO: 3172
ucugauagcuucucagugu

SEQ ID NO: 246581 - RNA, 19 nt, Artificial Sequence
  Description of Artificial Sequence: Synthetic oligonucleotide
  Antisense strand to SEQ ID NO: 246580
acacugagaagcuaucaga

SEQ ID NO: 246582 - RNA, 19 nt, Artificial Sequence
  Description of Artificial Sequence: Synthetic oligonucleotide
  Sense strand starting at position 1213 SEQ ID NO: 3172
gucagcuaccugggaguaa

SEQ ID NO: 246583 - RNA, 19 nt, Artificial Sequence
  Description of Artificial Sequence: Synthetic oligonucleotide
  Antisense strand to SEQ ID NO: 246582
uuacucccagguagcugac

SEQ ID NO: 246584 - RNA, 19 nt, Artificial Sequence
  Description of Artificial Sequence: Synthetic oligonucleotide
  Sense strand starting at position 1214 SEQ ID NO: 3172
ucagcuaccugggaguaaa

SEQ ID NO: 246585 - RNA, 19 nt, Artificial Sequence
  Description of Artificial Sequence: Synthetic oligonucleotide
  Antisense strand to SEQ ID NO: 246584
uuuacucccagguagcuga

SEQ ID NO: 246586 - RNA, 19 nt, Artificial Sequence
  Description of Artificial Sequence: Synthetic oligonucleotide
  Sense strand starting at position 1336 SEQ ID NO: 3172
agcgcauacuucccaaaug

SEQ ID NO: 246587 - RNA, 19 nt, Artificial Sequence
  Description of Artificial Sequence: Synthetic oligonucleotide
  Antisense strand to SEQ ID NO: 246586
cauuugggaaguaugcgcu

SEQ ID NO: 246588 - RNA, 19 nt, Artificial Sequence
  Description of Artificial Sequence: Synthetic oligonucleotide
  Sense strand starting at position 1378 SEQ ID NO: 3172
gguacagccucucacuuaa

SEQ ID NO: 246589 - RNA, 19 nt, Artificial Sequence
  Description of Artificial Sequence: Synthetic oligonucleotide
  Antisense strand to SEQ ID NO: 246588
uuaagugagaggcuguacc

SEQ ID NO: 246590 - RNA, 19 nt, Artificial Sequence
  Description of Artificial Sequence: Synthetic oligonucleotide
  Sense strand starting at position 1586 SEQ ID NO: 3172
guuaccuguggcugggaaa

SEQ ID NO: 246591 - RNA, 19 nt, Artificial Sequence
  Description of Artificial Sequence: Synthetic oligonucleotide
  Antisense strand to SEQ ID NO: 246590
uuucccagccacagguaac

SEQ ID NO: 246592 - RNA, 19 nt, Artificial Sequence
  Description of Artificial Sequence: Synthetic oligonucleotide
  Sense strand starting at position 2048 SEQ ID NO: 3172
uccuaucucugacgcagau

SEQ ID NO: 246593 - RNA, 19 nt, Artificial Sequence
  Description of Artificial Sequence: Synthetic oligonucleotide
  Antisense strand to SEQ ID NO: 246592
aucugcgucagagauagga

SEQ ID NO: 246594 - RNA, 19 nt, Artificial Sequence
  Description of Artificial Sequence: Synthetic oligonucleotide
  Sense strand starting at position 2060 SEQ ID NO: 3172
cgcagaugucuguggccau

SEQ ID NO: 246595 - RNA, 19 nt, Artificial Sequence
  Description of Artificial Sequence: Synthetic oligonucleotide
  Antisense strand to SEQ ID NO: 246594
auggccacagacaucugcg

SEQ ID NO: 246596 - RNA, 19 nt, Artificial Sequence
  Description of Artificial Sequence: Synthetic oligonucleotide
  Sense strand starting at position 2332 SEQ ID NO: 3172
cccagaaaguguuauuugu

SEQ ID NO: 246597 - RNA, 19 nt, Artificial Sequence
  Description of Artificial Sequence: Synthetic oligonucleotide
  Antisense strand to SEQ ID NO: 246596
acaaauaacacuuucuggg

SEQ ID NO: 246598 - RNA, 19 nt, Artificial Sequence
  Description of Artificial Sequence: Synthetic oligonucleotide
  Sense strand starting at position 2339 SEQ ID NO: 3172
aguguuauuugucagggag

SEQ ID NO: 246599 - RNA, 19 nt, Artificial Sequence
  Description of Artificial Sequence: Synthetic oligonucleotide
  Antisense strand to SEQ ID NO: 246598
cucccugacaaauaacacu

SEQ ID NO: 246600 - RNA, 19 nt, Artificial Sequence
  Description of Artificial Sequence: Synthetic oligonucleotide
  Sense strand starting at position 2341 SEQ ID NO: 3172
uguuauuugucagggagac

SEQ ID NO: 246601 - RNA, 19 nt, Artificial Sequence
  Description of Artificial Sequence: Synthetic oligonucleotide
  Antisense strand to SEQ ID NO: 246600
gucucccugacaaauaaca

SEQ ID NO: 246602 - RNA, 19 nt, Artificial Sequence
  Description of Artificial Sequence: Synthetic oligonucleotide
  Sense strand starting at position 2489 SEQ ID NO: 3172
gcucuauacuuagaccagu

SEQ ID NO: 246603 - RNA, 19 nt, Artificial Sequence
  Description of Artificial Sequence: Synthetic oligonucleotide
  Antisense strand to SEQ ID NO: 246602
acuggucuaaguauagagc

SEQ ID NO: 246604 - RNA, 19 nt, Artificial Sequence
  Description of Artificial Sequence: Synthetic oligonucleotide
  Sense strand starting at position 2532 SEQ ID NO: 3172
ccagcugugucaucagaga

SEQ ID NO: 246605 - RNA, 19 nt, Artificial Sequence
  Description of Artificial Sequence: Synthetic oligonucleotide
  Antisense strand to SEQ ID NO: 246604
ucucugaugacacagcugg

SEQ ID NO: 246606 - RNA, 19 nt, Artificial Sequence
  Description of Artificial Sequence: Synthetic oligonucleotide
  Sense strand starting at position 3121 SEQ ID NO: 3172
ccuguaguggugugggaga

SEQ ID NO: 246607 - RNA, 19 nt, Artificial Sequence
  Description of Artificial Sequence: Synthetic oligonucleotide
  Antisense strand to SEQ ID NO: 246606
ucucccacaccacuacagg

SEQ ID NO: 246608 - RNA, 19 nt, Artificial Sequence
  Description of Artificial Sequence: Synthetic oligonucleotide
  Sense strand starting at position 3122 SEQ ID NO: 3172
cuguaguggugugggagaa

SEQ ID NO: 246609 - RNA, 19 nt, Artificial Sequence
  Description of Artificial Sequence: Synthetic oligonucleotide
  Antisense strand to SEQ ID NO: 246608
uucucccacaccacuacag

SEQ ID NO: 246610 - RNA, 19 nt, Artificial Sequence
  Description of Artificial Sequence: Synthetic oligonucleotide
  Sense strand starting at position 3755 SEQ ID NO: 3172
cuaagaccuucugggugaa

SEQ ID NO: 246611 - RNA, 19 nt, Artificial Sequence
  Description of Artificial Sequence: Synthetic oligonucleotide
  Antisense strand to SEQ ID NO: 246610
uucacccagaaggucuuag

SEQ ID NO: 246612 - RNA, 19 nt, Artificial Sequence
  Description of Artificial Sequence: Synthetic oligonucleotide
  Sense strand starting at position 3758 SEQ ID NO: 3172
agaccuucugggugaacga

SEQ ID NO: 246613 - RNA, 19 nt, Artificial Sequence
  Description of Artificial Sequence: Synthetic oligonucleotide
  Antisense strand to SEQ ID NO: 246612
ucguucacccagaaggucu

SEQ ID NO: 246614 - RNA, 19 nt, Artificial Sequence
  Description of Artificial Sequence: Synthetic oligonucleotide
  Sense strand starting at position 9 SEQ ID NO: 3173
ucgccuggcuccucuaaua

SEQ ID NO: 246615 - RNA, 19 nt, Artificial Sequence
  Description of Artificial Sequence: Synthetic oligonucleotide
  Antisense strand to SEQ ID NO: 246614
uauuagaggagccaggcga

SEQ ID NO: 246616 - RNA, 19 nt, Artificial Sequence
  Description of Artificial Sequence: Synthetic oligonucleotide
  Sense strand starting at position 123 SEQ ID NO: 3173
aagagcuggcuccgugaaa

SEQ ID NO: 246617 - RNA, 19 nt, Artificial Sequence
  Description of Artificial Sequence: Synthetic oligonucleotide
  Antisense strand to SEQ ID NO: 246616
uuucacggagccagcucuu

SEQ ID NO: 246618 - RNA, 19 nt, Artificial Sequence
  Description of Artificial Sequence: Synthetic oligonucleotide
  Sense strand starting at position 272 SEQ ID NO: 3173
uggcgagcuuucccugacu

SEQ ID NO: 246619 - RNA, 19 nt, Artificial Sequence
  Description of Artificial Sequence: Synthetic oligonucleotide
  Antisense strand to SEQ ID NO: 246618
agucagggaaagcucgcca

SEQ ID NO: 246620 - RNA, 19 nt, Artificial Sequence
  Description of Artificial Sequence: Synthetic oligonucleotide
  Sense strand starting at position 274 SEQ ID NO: 3173
gcgagcuuucccugacuca

SEQ ID NO: 246621 - RNA, 19 nt, Artificial Sequence
  Description of Artificial Sequence: Synthetic oligonucleotide
  Antisense strand to SEQ ID NO: 246620
ugagucagggaaagcucgc

SEQ ID NO: 246622 - RNA, 19 nt, Artificial Sequence
  Description of Artificial Sequence: Synthetic oligonucleotide
  Sense strand starting at position 291 SEQ ID NO: 3173
cacuuuaguggacagcuaa

SEQ ID NO: 246623 - RNA, 19 nt, Artificial Sequence
  Description of Artificial Sequence: Synthetic oligonucleotide
  Antisense strand to SEQ ID NO: 246622
uuagcuguccacuaaagug

SEQ ID NO: 246624 - RNA, 19 nt, Artificial Sequence
  Description of Artificial Sequence: Synthetic oligonucleotide
  Sense strand starting at position 313 SEQ ID NO: 3173
ggcaaugcauuucuuucua

SEQ ID NO: 246625 - RNA, 19 nt, Artificial Sequence
  Description of Artificial Sequence: Synthetic oligonucleotide
  Antisense strand to SEQ ID NO: 246624
uagaaagaaaugcauugcc

SEQ ID NO: 246626 - RNA, 19 nt, Artificial Sequence
  Description of Artificial Sequence: Synthetic oligonucleotide
  Sense strand starting at position 704 SEQ ID NO: 3173
uuuagacaguguuagagau

SEQ ID NO: 246627 - RNA, 19 nt, Artificial Sequence
  Description of Artificial Sequence: Synthetic oligonucleotide
  Antisense strand to SEQ ID NO: 246626
aucucuaacacugucuaaa

SEQ ID NO: 246628 - RNA, 19 nt, Artificial Sequence
  Description of Artificial Sequence: Synthetic oligonucleotide
  Sense strand starting at position 714 SEQ ID NO: 3173
guuagagauuugcaaucug

SEQ ID NO: 246629 - RNA, 19 nt, Artificial Sequence
  Description of Artificial Sequence: Synthetic oligonucleotide
  Antisense strand to SEQ ID NO: 246628
cagauugcaaaucucuaac

SEQ ID NO: 246630 - RNA, 19 nt, Artificial Sequence
  Description of Artificial Sequence: Synthetic oligonucleotide
  Sense strand starting at position 858 SEQ ID NO: 3173
cgcggcuuucucuguguaa

SEQ ID NO: 246631 - RNA, 19 nt, Artificial Sequence
  Description of Artificial Sequence: Synthetic oligonucleotide
  Antisense strand to SEQ ID NO: 246630
uuacacagagaaagccgcg

SEQ ID NO: 246632 - RNA, 19 nt, Artificial Sequence
  Description of Artificial Sequence: Synthetic oligonucleotide
  Sense strand starting at position 859 SEQ ID NO: 3173
gcggcuuucucuguguaaa

SEQ ID NO: 246633 - RNA, 19 nt, Artificial Sequence
  Description of Artificial Sequence: Synthetic oligonucleotide
  Antisense strand to SEQ ID NO: 246632
uuuacacagagaaagccgc

SEQ ID NO: 246634 - RNA, 19 nt, Artificial Sequence
  Description of Artificial Sequence: Synthetic oligonucleotide
  Sense strand starting at position 860 SEQ ID NO: 3173
cggcuuucucuguguaaau

SEQ ID NO: 246635 - RNA, 19 nt, Artificial Sequence
  Description of Artificial Sequence: Synthetic oligonucleotide
  Antisense strand to SEQ ID NO: 246634
auuuacacagagaaagccg

SEQ ID NO: 246636 - RNA, 19 nt, Artificial Sequence
  Description of Artificial Sequence: Synthetic oligonucleotide
  Sense strand starting at position 861 SEQ ID NO: 3173
ggcuuucucuguguaaaug

SEQ ID NO: 246637 - RNA, 19 nt, Artificial Sequence
  Description of Artificial Sequence: Synthetic oligonucleotide
  Antisense strand to SEQ ID NO: 246636
cauuuacacagagaaagcc

SEQ ID NO: 246638 - RNA, 19 nt, Artificial Sequence
  Description of Artificial Sequence: Synthetic oligonucleotide
  Sense strand starting at position 862 SEQ ID NO: 3173
gcuuucucuguguaaauga

SEQ ID NO: 246639 - RNA, 19 nt, Artificial Sequence
  Description of Artificial Sequence: Synthetic oligonucleotide
  Antisense strand to SEQ ID NO: 246638
ucauuuacacagagaaagc

SEQ ID NO: 246640 - RNA, 19 nt, Artificial Sequence
  Description of Artificial Sequence: Synthetic oligonucleotide
  Sense strand starting at position 1138 SEQ ID NO: 3173
cuccgaucgugggaaacaa

SEQ ID NO: 246641 - RNA, 19 nt, Artificial Sequence
  Description of Artificial Sequence: Synthetic oligonucleotide
  Antisense strand to SEQ ID NO: 246640
uuguuucccacgaucggag

SEQ ID NO: 246642 - RNA, 19 nt, Artificial Sequence
  Description of Artificial Sequence: Synthetic oligonucleotide
  Sense strand starting at position 2702 SEQ ID NO: 3173
caaaguugucuccaggauc

SEQ ID NO: 246643 - RNA, 19 nt, Artificial Sequence
  Description of Artificial Sequence: Synthetic oligonucleotide
  Antisense strand to SEQ ID NO: 246642
gauccuggagacaacuuug

SEQ ID NO: 246644 - RNA, 19 nt, Artificial Sequence
  Description of Artificial Sequence: Synthetic oligonucleotide
  Sense strand starting at position 3075 SEQ ID NO: 3173
aggaguucuucucuuuggu

SEQ ID NO: 246645 - RNA, 19 nt, Artificial Sequence
  Description of Artificial Sequence: Synthetic oligonucleotide
  Antisense strand to SEQ ID NO: 246644
accaaagagaagaacuccu

SEQ ID NO: 246646 - RNA, 19 nt, Artificial Sequence
  Description of Artificial Sequence: Synthetic oligonucleotide
  Sense strand starting at position 3077 SEQ ID NO: 3173
gaguucuucucuuuggucu

SEQ ID NO: 246647 - RNA, 19 nt, Artificial Sequence
  Description of Artificial Sequence: Synthetic oligonucleotide
  Antisense strand to SEQ ID NO: 246646
agaccaaagagaagaacuc

SEQ ID NO: 246648 - RNA, 19 nt, Artificial Sequence
  Description of Artificial Sequence: Synthetic oligonucleotide
  Sense strand starting at position 3164 SEQ ID NO: 3173
gcgcguugagauagacguu

SEQ ID NO: 246649 - RNA, 19 nt, Artificial Sequence
  Description of Artificial Sequence: Synthetic oligonucleotide
  Antisense strand to SEQ ID NO: 246648
aacgucuaucucaacgcgc

SEQ ID NO: 246650 - RNA, 19 nt, Artificial Sequence
  Description of Artificial Sequence: Synthetic oligonucleotide
  Sense strand starting at position 3170 SEQ ID NO: 3173
ugagauagacguuggcaga

SEQ ID NO: 246651 - RNA, 19 nt, Artificial Sequence
  Description of Artificial Sequence: Synthetic oligonucleotide
  Antisense strand to SEQ ID NO: 246650
ucugccaacgucuaucuca

SEQ ID NO: 246652 - RNA, 19 nt, Artificial Sequence
  Description of Artificial Sequence: Synthetic oligonucleotide
  Sense strand starting at position 3171 SEQ ID NO: 3173
gagauagacguuggcagaa

SEQ ID NO: 246653 - RNA, 19 nt, Artificial Sequence
  Description of Artificial Sequence: Synthetic oligonucleotide
  Antisense strand to SEQ ID NO: 246652
uucugccaacgucuaucuc

SEQ ID NO: 246654 - RNA, 19 nt, Artificial Sequence
  Description of Artificial Sequence: Synthetic oligonucleotide
  Sense strand starting at position 3285 SEQ ID NO: 3173
agcggaaucuguucagguu

SEQ ID NO: 246655 - RNA, 19 nt, Artificial Sequence
  Description of Artificial Sequence: Synthetic oligonucleotide
  Antisense strand to SEQ ID NO: 246654
aaccugaacagauuccgcu

SEQ ID NO: 246656 - RNA, 19 nt, Artificial Sequence
  Description of Artificial Sequence: Synthetic oligonucleotide
  Sense strand starting at position 3352 SEQ ID NO: 3173
cuuucugccuucccgagaa

SEQ ID NO: 246657 - RNA, 19 nt, Artificial Sequence
  Description of Artificial Sequence: Synthetic oligonucleotide
  Antisense strand to SEQ ID NO: 246656
uucucgggaaggcagaaag

SEQ ID NO: 246658 - RNA, 19 nt, Artificial Sequence
  Description of Artificial Sequence: Synthetic oligonucleotide
  Sense strand starting at position 30 SEQ ID NO: 3174
gagaguaucagguggauaa

SEQ ID NO: 246659 - RNA, 19 nt, Artificial Sequence
  Description of Artificial Sequence: Synthetic oligonucleotide
  Antisense strand to SEQ ID NO: 246658
uuauccaccugauacucuc

SEQ ID NO: 246660 - RNA, 19 nt, Artificial Sequence
  Description of Artificial Sequence: Synthetic oligonucleotide
  Sense strand starting at position 42 SEQ ID NO: 3174
uggauaacugcucaagcca

SEQ ID NO: 246661 - RNA, 19 nt, Artificial Sequence
  Description of Artificial Sequence: Synthetic oligonucleotide
  Antisense strand to SEQ ID NO: 246660
uggcuugagcaguuaucca

SEQ ID NO: 246662 - RNA, 19 nt, Artificial Sequence
  Description of Artificial Sequence: Synthetic oligonucleotide
  Sense strand starting at position 67 SEQ ID NO: 3174
caggcuuagccuugauaua

SEQ ID NO: 246663 - RNA, 19 nt, Artificial Sequence
  Description of Artificial Sequence: Synthetic oligonucleotide
  Antisense strand to SEQ ID NO: 246662
uauaucaaggcuaagccug

SEQ ID NO: 246664 - RNA, 19 nt, Artificial Sequence
  Description of Artificial Sequence: Synthetic oligonucleotide
  Sense strand starting at position 68 SEQ ID NO: 3174
aggcuuagccuugauauau

SEQ ID NO: 246665 - RNA, 19 nt, Artificial Sequence
  Description of Artificial Sequence: Synthetic oligonucleotide
  Antisense strand to SEQ ID NO: 246664
auauaucaaggcuaagccu

SEQ ID NO: 246666 - RNA, 19 nt, Artificial Sequence
  Description of Artificial Sequence: Synthetic oligonucleotide
  Sense strand starting at position 221 SEQ ID NO: 3174
cuaguuguucuccauacuu

SEQ ID NO: 246667 - RNA, 19 nt, Artificial Sequence
  Description of Artificial Sequence: Synthetic oligonucleotide
  Antisense strand to SEQ ID NO: 246666
aaguauggagaacaacuag

SEQ ID NO: 246668 - RNA, 19 nt, Artificial Sequence
  Description of Artificial Sequence: Synthetic oligonucleotide
  Sense strand starting at position 223 SEQ ID NO: 3174
aguuguucuccauacuucu

SEQ ID NO: 246669 - RNA, 19 nt, Artificial Sequence
  Description of Artificial Sequence: Synthetic oligonucleotide
  Antisense strand to SEQ ID NO: 246668
agaaguauggagaacaacu

SEQ ID NO: 246670 - RNA, 19 nt, Artificial Sequence
  Description of Artificial Sequence: Synthetic oligonucleotide
  Sense strand starting at position 245 SEQ ID NO: 3174
ucuugucuccacgaagauu

SEQ ID NO: 246671 - RNA, 19 nt, Artificial Sequence
  Description of Artificial Sequence: Synthetic oligonucleotide
  Antisense strand to SEQ ID NO: 246670
aaucuucguggagacaaga

SEQ ID NO: 246672 - RNA, 19 nt, Artificial Sequence
  Description of Artificial Sequence: Synthetic oligonucleotide
  Sense strand starting at position 360 SEQ ID NO: 3174
ucuccuuugcuagacaugu

SEQ ID NO: 246673 - RNA, 19 nt, Artificial Sequence
  Description of Artificial Sequence: Synthetic oligonucleotide
  Antisense strand to SEQ ID NO: 246672
acaugucuagcaaaggaga

SEQ ID NO: 246674 - RNA, 19 nt, Artificial Sequence
  Description of Artificial Sequence: Synthetic oligonucleotide
  Sense strand starting at position 491 SEQ ID NO: 3174
ucauuucuaucuguuuguu

SEQ ID NO: 246675 - RNA, 19 nt, Artificial Sequence
  Description of Artificial Sequence: Synthetic oligonucleotide
  Antisense strand to SEQ ID NO: 246674
aacaaacagauagaaauga

SEQ ID NO: 246676 - RNA, 19 nt, Artificial Sequence
  Description of Artificial Sequence: Synthetic oligonucleotide
  Sense strand starting at position 692 SEQ ID NO: 3174
cguggagaguucucaauac

SEQ ID NO: 246677 - RNA, 19 nt, Artificial Sequence
  Description of Artificial Sequence: Synthetic oligonucleotide
  Antisense strand to SEQ ID NO: 246676
guauugagaacucuccacg

SEQ ID NO: 246678 - RNA, 19 nt, Artificial Sequence
  Description of Artificial Sequence: Synthetic oligonucleotide
  Sense strand starting at position 696 SEQ ID NO: 3174
gagaguucucaauacugua

SEQ ID NO: 246679 - RNA, 19 nt, Artificial Sequence
  Description of Artificial Sequence: Synthetic oligonucleotide
  Antisense strand to SEQ ID NO: 246678
uacaguauugagaacucuc

SEQ ID NO: 246680 - RNA, 19 nt, Artificial Sequence
  Description of Artificial Sequence: Synthetic oligonucleotide
  Sense strand starting at position 913 SEQ ID NO: 3174
ugucuucaucugggaagga

SEQ ID NO: 246681 - RNA, 19 nt, Artificial Sequence
  Description of Artificial Sequence: Synthetic oligonucleotide
  Antisense strand to SEQ ID NO: 246680
uccuucccagaugaagaca

SEQ ID NO: 246682 - RNA, 19 nt, Artificial Sequence
  Description of Artificial Sequence: Synthetic oligonucleotide
  Sense strand starting at position 982 SEQ ID NO: 3174
ugaguuaauacugggacau

SEQ ID NO: 246683 - RNA, 19 nt, Artificial Sequence
  Description of Artificial Sequence: Synthetic oligonucleotide
  Antisense strand to SEQ ID NO: 246682
augucccaguauuaacuca

SEQ ID NO: 246684 - RNA, 19 nt, Artificial Sequence
  Description of Artificial Sequence: Synthetic oligonucleotide
  Sense strand starting at position 1036 SEQ ID NO: 3174
ucuuuaggcggguauaaua

SEQ ID NO: 246685 - RNA, 19 nt, Artificial Sequence
  Description of Artificial Sequence: Synthetic oligonucleotide
  Antisense strand to SEQ ID NO: 246684
uauuauacccgccuaaaga

SEQ ID NO: 246686 - RNA, 19 nt, Artificial Sequence
  Description of Artificial Sequence: Synthetic oligonucleotide
  Sense strand starting at position 1333 SEQ ID NO: 3174
uccauucggucuucuagaa

SEQ ID NO: 246687 - RNA, 19 nt, Artificial Sequence
  Description of Artificial Sequence: Synthetic oligonucleotide
  Antisense strand to SEQ ID NO: 246686
uucuagaagaccgaaugga

SEQ ID NO: 246688 - RNA, 19 nt, Artificial Sequence
  Description of Artificial Sequence: Synthetic oligonucleotide
  Sense strand starting at position 1711 SEQ ID NO: 3174
gcaguacucgcuguuacca

SEQ ID NO: 246689 - RNA, 19 nt, Artificial Sequence
  Description of Artificial Sequence: Synthetic oligonucleotide
  Antisense strand to SEQ ID NO: 246688
ugguaacagcgaguacugc

SEQ ID NO: 246690 - RNA, 19 nt, Artificial Sequence
  Description of Artificial Sequence: Synthetic oligonucleotide
  Sense strand starting at position 1777 SEQ ID NO: 3174
uggacucuccgaggagcaa

SEQ ID NO: 246691 - RNA, 19 nt, Artificial Sequence
  Description of Artificial Sequence: Synthetic oligonucleotide
  Antisense strand to SEQ ID NO: 246690
uugcuccucggagagucca

SEQ ID NO: 246692 - RNA, 19 nt, Artificial Sequence
  Description of Artificial Sequence: Synthetic oligonucleotide
  Sense strand starting at position 2203 SEQ ID NO: 3174
aaguuuggugaauguauac

SEQ ID NO: 246693 - RNA, 19 nt, Artificial Sequence
  Description of Artificial Sequence: Synthetic oligonucleotide
  Antisense strand to SEQ ID NO: 246692
guauacauucaccaaacuu

SEQ ID NO: 246694 - RNA, 19 nt, Artificial Sequence
  Description of Artificial Sequence: Synthetic oligonucleotide
  Sense strand starting at position 2299 SEQ ID NO: 3174
acaguuggguggaggaaua

SEQ ID NO: 246695 - RNA, 19 nt, Artificial Sequence
  Description of Artificial Sequence: Synthetic oligonucleotide
  Antisense strand to SEQ ID NO: 246694
uauuccuccacccaacugu

SEQ ID NO: 246696 - RNA, 19 nt, Artificial Sequence
  Description of Artificial Sequence: Synthetic oligonucleotide
  Sense strand starting at position 2342 SEQ ID NO: 3174
ggccgaaaugguuaaacag

SEQ ID NO: 246697 - RNA, 19 nt, Artificial Sequence
  Description of Artificial Sequence: Synthetic oligonucleotide
  Antisense strand to SEQ ID NO: 246696
cuguuuaaccauuucggcc

SEQ ID NO: 246698 - RNA, 19 nt, Artificial Sequence
  Description of Artificial Sequence: Synthetic oligonucleotide
  Sense strand starting at position 2377 SEQ ID NO: 3174
gcagaugcaguuuagguau

SEQ ID NO: 246699 - RNA, 19 nt, Artificial Sequence
  Description of Artificial Sequence: Synthetic oligonucleotide
  Antisense strand to SEQ ID NO: 246698
auaccuaaacugcaucugc

SEQ ID NO: 246700 - RNA, 19 nt, Artificial Sequence
  Description of Artificial Sequence: Synthetic oligonucleotide
  Sense strand starting at position 2524 SEQ ID NO: 3174
caaucuaaguguccugaug

SEQ ID NO: 246701 - RNA, 19 nt, Artificial Sequence
  Description of Artificial Sequence: Synthetic oligonucleotide
  Antisense strand to SEQ ID NO: 246700
caucaggacacuuagauug

SEQ ID NO: 246702 - RNA, 19 nt, Artificial Sequence
  Description of Artificial Sequence: Synthetic oligonucleotide
  Sense strand starting at position 2535 SEQ ID NO: 3174
uccugaugaauugguguau

SEQ ID NO: 246703 - RNA, 19 nt, Artificial Sequence
  Description of Artificial Sequence: Synthetic oligonucleotide
  Antisense strand to SEQ ID NO: 246702
auacaccaauucaucagga

SEQ ID NO: 246704 - RNA, 19 nt, Artificial Sequence
  Description of Artificial Sequence: Synthetic oligonucleotide
  Sense strand starting at position 2539 SEQ ID NO: 3174
gaugaauugguguauccau

SEQ ID NO: 246705 - RNA, 19 nt, Artificial Sequence
  Description of Artificial Sequence: Synthetic oligonucleotide
  Antisense strand to SEQ ID NO: 246704
auggauacaccaauucauc

SEQ ID NO: 246706 - RNA, 19 nt, Artificial Sequence
  Description of Artificial Sequence: Synthetic oligonucleotide
  Sense strand starting at position 2599 SEQ ID NO: 3174
ccagaaggcuaucuaggaa

SEQ ID NO: 246707 - RNA, 19 nt, Artificial Sequence
  Description of Artificial Sequence: Synthetic oligonucleotide
  Antisense strand to SEQ ID NO: 246706
uuccuagauagccuucugg

SEQ ID NO: 246708 - RNA, 19 nt, Artificial Sequence
  Description of Artificial Sequence: Synthetic oligonucleotide
  Sense strand starting at position 2602 SEQ ID NO: 3174
gaaggcuaucuaggaaauu

SEQ ID NO: 246709 - RNA, 19 nt, Artificial Sequence
  Description of Artificial Sequence: Synthetic oligonucleotide
  Antisense strand to SEQ ID NO: 246708
aauuuccuagauagccuuc

SEQ ID NO: 246710 - RNA, 19 nt, Artificial Sequence
  Description of Artificial Sequence: Synthetic oligonucleotide
  Sense strand starting at position 2774 SEQ ID NO: 3174
ugugcugauacacgaaaua

SEQ ID NO: 246711 - RNA, 19 nt, Artificial Sequence
  Description of Artificial Sequence: Synthetic oligonucleotide
  Antisense strand to SEQ ID NO: 246710
uauuucguguaucagcaca

SEQ ID NO: 246712 - RNA, 19 nt, Artificial Sequence
  Description of Artificial Sequence: Synthetic oligonucleotide
  Sense strand starting at position 3049 SEQ ID NO: 3174
aagauuaugugaucugauu

SEQ ID NO: 246713 - RNA, 19 nt, Artificial Sequence
  Description of Artificial Sequence: Synthetic oligonucleotide
  Antisense strand to SEQ ID NO: 246712
aaucagaucacauaaucuu

SEQ ID NO: 246714 - RNA, 19 nt, Artificial Sequence
  Description of Artificial Sequence: Synthetic oligonucleotide
  Sense strand starting at position 3109 SEQ ID NO: 3174
aggaauguauaccuguuaa

SEQ ID NO: 246715 - RNA, 19 nt, Artificial Sequence
  Description of Artificial Sequence: Synthetic oligonucleotide
  Antisense strand to SEQ ID NO: 246714
uuaacagguauacauuccu

SEQ ID NO: 246716 - RNA, 19 nt, Artificial Sequence
  Description of Artificial Sequence: Synthetic oligonucleotide
  Sense strand starting at position 3123 SEQ ID NO: 3174
guuaauguugguuaacugu

SEQ ID NO: 246717 - RNA, 19 nt, Artificial Sequence
  Description of Artificial Sequence: Synthetic oligonucleotide
  Antisense strand to SEQ ID NO: 246716
acaguuaaccaacauuaac

SEQ ID NO: 246718 - RNA, 19 nt, Artificial Sequence
  Description of Artificial Sequence: Synthetic oligonucleotide
  Sense strand starting at position 3254 SEQ ID NO: 3174
auauaugagugucugagca

SEQ ID NO: 246719 - RNA, 19 nt, Artificial Sequence
  Description of Artificial Sequence: Synthetic oligonucleotide
  Antisense strand to SEQ ID NO: 246718
ugcucagacacucauauau

SEQ ID NO: 246720 - RNA, 19 nt, Artificial Sequence
  Description of Artificial Sequence: Synthetic oligonucleotide
  Sense strand starting at position 3361 SEQ ID NO: 3174
ucauguaguaugugauuau

SEQ ID NO: 246721 - RNA, 19 nt, Artificial Sequence
  Description of Artificial Sequence: Synthetic oligonucleotide
  Antisense strand to SEQ ID NO: 246720
auaaucacauacuacauga

SEQ ID NO: 246722 - RNA, 19 nt, Artificial Sequence
  Description of Artificial Sequence: Synthetic oligonucleotide
  Sense strand starting at position 3364 SEQ ID NO: 3174
uguaguaugugauuaugaa

SEQ ID NO: 246723 - RNA, 19 nt, Artificial Sequence
  Description of Artificial Sequence: Synthetic oligonucleotide
  Antisense strand to SEQ ID NO: 246722
uucauaaucacauacuaca

SEQ ID NO: 246724 - RNA, 19 nt, Artificial Sequence
  Description of Artificial Sequence: Synthetic oligonucleotide
  Sense strand starting at position 3365 SEQ ID NO: 3174
guaguaugugauuaugaaa

SEQ ID NO: 246725 - RNA, 19 nt, Artificial Sequence
  Description of Artificial Sequence: Synthetic oligonucleotide
  Antisense strand to SEQ ID NO: 246724
uuucauaaucacauacuac

SEQ ID NO: 246726 - RNA, 19 nt, Artificial Sequence
  Description of Artificial Sequence: Synthetic oligonucleotide
  Sense strand starting at position 3396 SEQ ID NO: 3174
gucagacaagccuauuauc

SEQ ID NO: 246727 - RNA, 19 nt, Artificial Sequence
  Description of Artificial Sequence: Synthetic oligonucleotide
  Antisense strand to SEQ ID NO: 246726
gauaauaggcuugucugac

SEQ ID NO: 246728 - RNA, 19 nt, Artificial Sequence
  Description of Artificial Sequence: Synthetic oligonucleotide
  Sense strand starting at position 3492 SEQ ID NO: 3174
gcucuauaagauggaauac

SEQ ID NO: 246729 - RNA, 19 nt, Artificial Sequence
  Description of Artificial Sequence: Synthetic oligonucleotide
  Antisense strand to SEQ ID NO: 246728
guauuccaucuuauagagc

SEQ ID NO: 246730 - RNA, 19 nt, Artificial Sequence
  Description of Artificial Sequence: Synthetic oligonucleotide
  Sense strand starting at position 3646 SEQ ID NO: 3174
agguuucuagccuaaguau

SEQ ID NO: 246731 - RNA, 19 nt, Artificial Sequence
  Description of Artificial Sequence: Synthetic oligonucleotide
  Antisense strand to SEQ ID NO: 246730
auacuuaggcuagaaaccu

SEQ ID NO: 246732 - RNA, 19 nt, Artificial Sequence
  Description of Artificial Sequence: Synthetic oligonucleotide
  Sense strand starting at position 3714 SEQ ID NO: 3174
gcaaguuaagaagggaauu

SEQ ID NO: 246733 - RNA, 19 nt, Artificial Sequence
  Description of Artificial Sequence: Synthetic oligonucleotide
  Antisense strand to SEQ ID NO: 246732
aauucccuucuuaacuugc

SEQ ID NO: 246734 - RNA, 19 nt, Artificial Sequence
  Description of Artificial Sequence: Synthetic oligonucleotide
  Sense strand starting at position 3810 SEQ ID NO: 3174
caaggaugaaagugugagu

SEQ ID NO: 246735 - RNA, 19 nt, Artificial Sequence
  Description of Artificial Sequence: Synthetic oligonucleotide
  Antisense strand to SEQ ID NO: 246734
acucacacuuucauccuug

SEQ ID NO: 246736 - RNA, 19 nt, Artificial Sequence
  Description of Artificial Sequence: Synthetic oligonucleotide
  Sense strand starting at position 3833 SEQ ID NO: 3174
augucaucagcguaauacu

SEQ ID NO: 246737 - RNA, 19 nt, Artificial Sequence
  Description of Artificial Sequence: Synthetic oligonucleotide
  Antisense strand to SEQ ID NO: 246736
aguauuacgcugaugacau

SEQ ID NO: 246738 - RNA, 19 nt, Artificial Sequence
  Description of Artificial Sequence: Synthetic oligonucleotide
  Sense strand starting at position 206 SEQ ID NO: 3175
cgaauacaagaaugucaca

SEQ ID NO: 246739 - RNA, 19 nt, Artificial Sequence
  Description of Artificial Sequence: Synthetic oligonucleotide
  Antisense strand to SEQ ID NO: 246738
ugugacauucuuguauucg

SEQ ID NO: 246740 - RNA, 19 nt, Artificial Sequence
  Description of Artificial Sequence: Synthetic oligonucleotide
  Sense strand starting at position 633 SEQ ID NO: 3175
aagauuguccggcagaaac

SEQ ID NO: 246741 - RNA, 19 nt, Artificial Sequence
  Description of Artificial Sequence: Synthetic oligonucleotide
  Antisense strand to SEQ ID NO: 246740
guuucugccggacaaucuu

SEQ ID NO: 246742 - RNA, 19 nt, Artificial Sequence
  Description of Artificial Sequence: Synthetic oligonucleotide
  Sense strand starting at position 1849 SEQ ID NO: 3175
gagagccuuucccugucaa

SEQ ID NO: 246743 - RNA, 19 nt, Artificial Sequence
  Description of Artificial Sequence: Synthetic oligonucleotide
  Antisense strand to SEQ ID NO: 246742
uugacagggaaaggcucuc

SEQ ID NO: 246744 - RNA, 19 nt, Artificial Sequence
  Description of Artificial Sequence: Synthetic oligonucleotide
  Sense strand starting at position 1918 SEQ ID NO: 3175
cagggucggugauuauuaa

SEQ ID NO: 246745 - RNA, 19 nt, Artificial Sequence
  Description of Artificial Sequence: Synthetic oligonucleotide
  Antisense strand to SEQ ID NO: 246744
uuaauaaucaccgacccug

SEQ ID NO: 246746 - RNA, 19 nt, Artificial Sequence
  Description of Artificial Sequence: Synthetic oligonucleotide
  Sense strand starting at position 2134 SEQ ID NO: 3175
acccgcucccgauaaagua

SEQ ID NO: 246747 - RNA, 19 nt, Artificial Sequence
  Description of Artificial Sequence: Synthetic oligonucleotide
  Antisense strand to SEQ ID NO: 246746
uacuuuaucgggagcgggu

SEQ ID NO: 246748 - RNA, 19 nt, Artificial Sequence
  Description of Artificial Sequence: Synthetic oligonucleotide
  Sense strand starting at position 2286 SEQ ID NO: 3175
gcaucuucugauggaaaga

SEQ ID NO: 246749 - RNA, 19 nt, Artificial Sequence
  Description of Artificial Sequence: Synthetic oligonucleotide
  Antisense strand to SEQ ID NO: 246748
ucuuuccaucagaagaugc

SEQ ID NO: 246750 - RNA, 19 nt, Artificial Sequence
  Description of Artificial Sequence: Synthetic oligonucleotide
  Sense strand starting at position 2449 SEQ ID NO: 3175
gguggucaguuuguaaauu

SEQ ID NO: 246751 - RNA, 19 nt, Artificial Sequence
  Description of Artificial Sequence: Synthetic oligonucleotide
  Antisense strand to SEQ ID NO: 246750
aauuuacaaacugaccacc

SEQ ID NO: 246752 - RNA, 19 nt, Artificial Sequence
  Description of Artificial Sequence: Synthetic oligonucleotide
  Sense strand starting at position 2497 SEQ ID NO: 3175
auuuauuugucugguuaug

SEQ ID NO: 246753 - RNA, 19 nt, Artificial Sequence
  Description of Artificial Sequence: Synthetic oligonucleotide
  Antisense strand to SEQ ID NO: 246752
cauaaccagacaaauaaau

SEQ ID NO: 246754 - RNA, 19 nt, Artificial Sequence
  Description of Artificial Sequence: Synthetic oligonucleotide
  Sense strand starting at position 2499 SEQ ID NO: 3175
uuauuugucugguuauguu

SEQ ID NO: 246755 - RNA, 19 nt, Artificial Sequence
  Description of Artificial Sequence: Synthetic oligonucleotide
  Antisense strand to SEQ ID NO: 246754
aacauaaccagacaaauaa

SEQ ID NO: 246756 - RNA, 19 nt, Artificial Sequence
  Description of Artificial Sequence: Synthetic oligonucleotide
  Sense strand starting at position 2507 SEQ ID NO: 3175
cugguuauguuauuguaua

SEQ ID NO: 246757 - RNA, 19 nt, Artificial Sequence
  Description of Artificial Sequence: Synthetic oligonucleotide
  Antisense strand to SEQ ID NO: 246756
uauacaauaacauaaccag

SEQ ID NO: 246758 - RNA, 19 nt, Artificial Sequence
  Description of Artificial Sequence: Synthetic oligonucleotide
  Sense strand starting at position 2568 SEQ ID NO: 3175
guuacauguuacucucaga

SEQ ID NO: 246759 - RNA, 19 nt, Artificial Sequence
  Description of Artificial Sequence: Synthetic oligonucleotide
  Antisense strand to SEQ ID NO: 246758
ucugagaguaacauguaac

SEQ ID NO: 246760 - RNA, 19 nt, Artificial Sequence
  Description of Artificial Sequence: Synthetic oligonucleotide
  Sense strand starting at position 2573 SEQ ID NO: 3175
auguuacucucagaacaga

SEQ ID NO: 246761 - RNA, 19 nt, Artificial Sequence
  Description of Artificial Sequence: Synthetic oligonucleotide
  Antisense strand to SEQ ID NO: 246760
ucuguucugagaguaacau

SEQ ID NO: 246762 - RNA, 19 nt, Artificial Sequence
  Description of Artificial Sequence: Synthetic oligonucleotide
  Sense strand starting at position 2581 SEQ ID NO: 3175
cucagaacagauugcugua

SEQ ID NO: 246763 - RNA, 19 nt, Artificial Sequence
  Description of Artificial Sequence: Synthetic oligonucleotide
  Antisense strand to SEQ ID NO: 246762
uacagcaaucuguucugag

SEQ ID NO: 246764 - RNA, 19 nt, Artificial Sequence
  Description of Artificial Sequence: Synthetic oligonucleotide
  Sense strand starting at position 2620 SEQ ID NO: 3175
gucuuucgucuguuucuca

SEQ ID NO: 246765 - RNA, 19 nt, Artificial Sequence
  Description of Artificial Sequence: Synthetic oligonucleotide
  Antisense strand to SEQ ID NO: 246764
ugagaaacagacgaaagac

SEQ ID NO: 246766 - RNA, 19 nt, Artificial Sequence
  Description of Artificial Sequence: Synthetic oligonucleotide
  Sense strand starting at position 2667 SEQ ID NO: 3175
uccagaaaggcaugauaca

SEQ ID NO: 246767 - RNA, 19 nt, Artificial Sequence
  Description of Artificial Sequence: Synthetic oligonucleotide
  Antisense strand to SEQ ID NO: 246766
uguaucaugccuuucugga

SEQ ID NO: 246768 - RNA, 19 nt, Artificial Sequence
  Description of Artificial Sequence: Synthetic oligonucleotide
  Sense strand starting at position 2677 SEQ ID NO: 3175
caugauacagugugucauu

SEQ ID NO: 246769 - RNA, 19 nt, Artificial Sequence
  Description of Artificial Sequence: Synthetic oligonucleotide
  Antisense strand to SEQ ID NO: 246768
aaugacacacuguaucaug

SEQ ID NO: 246770 - RNA, 19 nt, Artificial Sequence
  Description of Artificial Sequence: Synthetic oligonucleotide
  Sense strand starting at position 2761 SEQ ID NO: 3175
cuguuaugcugcccauaca

SEQ ID NO: 246771 - RNA, 19 nt, Artificial Sequence
  Description of Artificial Sequence: Synthetic oligonucleotide
  Antisense strand to SEQ ID NO: 246770
uguaugggcagcauaacag

SEQ ID NO: 246772 - RNA, 19 nt, Artificial Sequence
  Description of Artificial Sequence: Synthetic oligonucleotide
  Sense strand starting at position 2906 SEQ ID NO: 3175
uagcuagaucuuuggugca

SEQ ID NO: 246773 - RNA, 19 nt, Artificial Sequence
  Description of Artificial Sequence: Synthetic oligonucleotide
  Antisense strand to SEQ ID NO: 246772
ugcaccaaagaucuagcua

SEQ ID NO: 246774 - RNA, 19 nt, Artificial Sequence
  Description of Artificial Sequence: Synthetic oligonucleotide
  Sense strand starting at position 2908 SEQ ID NO: 3175
gcuagaucuuuggugcauu

SEQ ID NO: 246775 - RNA, 19 nt, Artificial Sequence
  Description of Artificial Sequence: Synthetic oligonucleotide
  Antisense strand to SEQ ID NO: 246774
aaugcaccaaagaucuagc

SEQ ID NO: 246776 - RNA, 19 nt, Artificial Sequence
  Description of Artificial Sequence: Synthetic oligonucleotide
  Sense strand starting at position 2911 SEQ ID NO: 3175
agaucuuuggugcauuaca

SEQ ID NO: 246777 - RNA, 19 nt, Artificial Sequence
  Description of Artificial Sequence: Synthetic oligonucleotide
  Antisense strand to SEQ ID NO: 246776
uguaaugcaccaaagaucu

SEQ ID NO: 246778 - RNA, 19 nt, Artificial Sequence
  Description of Artificial Sequence: Synthetic oligonucleotide
  Sense strand starting at position 2950 SEQ ID NO: 3175
gugucacagaauugagaaa

SEQ ID NO: 246779 - RNA, 19 nt, Artificial Sequence
  Description of Artificial Sequence: Synthetic oligonucleotide
  Antisense strand to SEQ ID NO: 246778
uuucucaauucugugacac

SEQ ID NO: 246780 - RNA, 19 nt, Artificial Sequence
  Description of Artificial Sequence: Synthetic oligonucleotide
  Sense strand starting at position 3013 SEQ ID NO: 3175
gcugccagccuguaugaua

SEQ ID NO: 246781 - RNA, 19 nt, Artificial Sequence
  Description of Artificial Sequence: Synthetic oligonucleotide
  Antisense strand to SEQ ID NO: 246780
uaucauacaggcuggcagc

SEQ ID NO: 246782 - RNA, 19 nt, Artificial Sequence
  Description of Artificial Sequence: Synthetic oligonucleotide
  Sense strand starting at position 3039 SEQ ID NO: 3175
uguauauugcaguggaugu

SEQ ID NO: 246783 - RNA, 19 nt, Artificial Sequence
  Description of Artificial Sequence: Synthetic oligonucleotide
  Antisense strand to SEQ ID NO: 246782
acauccacugcaauauaca

SEQ ID NO: 246784 - RNA, 19 nt, Artificial Sequence
  Description of Artificial Sequence: Synthetic oligonucleotide
  Sense strand starting at position 3077 SEQ ID NO: 3175
augagcaaagcuuacuaga

SEQ ID NO: 246785 - RNA, 19 nt, Artificial Sequence
  Description of Artificial Sequence: Synthetic oligonucleotide
  Antisense strand to SEQ ID NO: 246784
ucuaguaagcuuugcucau

SEQ ID NO: 246786 - RNA, 19 nt, Artificial Sequence
  Description of Artificial Sequence: Synthetic oligonucleotide
  Sense strand starting at position 3091 SEQ ID NO: 3175
cuagauaaaugggaucaga

SEQ ID NO: 246787 - RNA, 19 nt, Artificial Sequence
  Description of Artificial Sequence: Synthetic oligonucleotide
  Antisense strand to SEQ ID NO: 246786
ucugaucccauuuaucuag

SEQ ID NO: 246788 - RNA, 19 nt, Artificial Sequence
  Description of Artificial Sequence: Synthetic oligonucleotide
  Sense strand starting at position 3107 SEQ ID NO: 3175
agaguuaaacaaugcuguu

SEQ ID NO: 246789 - RNA, 19 nt, Artificial Sequence
  Description of Artificial Sequence: Synthetic oligonucleotide
  Antisense strand to SEQ ID NO: 246788
aacagcauuguuuaacucu

SEQ ID NO: 246790 - RNA, 19 nt, Artificial Sequence
  Description of Artificial Sequence: Synthetic oligonucleotide
  Sense strand starting at position 3178 SEQ ID NO: 3175
acgcuuauuggaggauaaa

SEQ ID NO: 246791 - RNA, 19 nt, Artificial Sequence
  Description of Artificial Sequence: Synthetic oligonucleotide
  Antisense strand to SEQ ID NO: 246790
uuuauccuccaauaagcgu

SEQ ID NO: 246792 - RNA, 19 nt, Artificial Sequence
  Description of Artificial Sequence: Synthetic oligonucleotide
  Sense strand starting at position 3179 SEQ ID NO: 3175
cgcuuauuggaggauaaau

SEQ ID NO: 246793 - RNA, 19 nt, Artificial Sequence
  Description of Artificial Sequence: Synthetic oligonucleotide
  Antisense strand to SEQ ID NO: 246792
auuuauccuccaauaagcg

SEQ ID NO: 246794 - RNA, 19 nt, Artificial Sequence
  Description of Artificial Sequence: Synthetic oligonucleotide
  Sense strand starting at position 3251 SEQ ID NO: 3175
accgacuaucuuuguaugu

SEQ ID NO: 246795 - RNA, 19 nt, Artificial Sequence
  Description of Artificial Sequence: Synthetic oligonucleotide
  Antisense strand to SEQ ID NO: 246794
acauacaaagauagucggu

SEQ ID NO: 246796 - RNA, 19 nt, Artificial Sequence
  Description of Artificial Sequence: Synthetic oligonucleotide
  Sense strand starting at position 3252 SEQ ID NO: 3175
ccgacuaucuuuguauguu

SEQ ID NO: 246797 - RNA, 19 nt, Artificial Sequence
  Description of Artificial Sequence: Synthetic oligonucleotide
  Antisense strand to SEQ ID NO: 246796
aacauacaaagauagucgg

SEQ ID NO: 246798 - RNA, 19 nt, Artificial Sequence
  Description of Artificial Sequence: Synthetic oligonucleotide
  Sense strand starting at position 3255 SEQ ID NO: 3175
acuaucuuuguauguucua

SEQ ID NO: 246799 - RNA, 19 nt, Artificial Sequence
  Description of Artificial Sequence: Synthetic oligonucleotide
  Antisense strand to SEQ ID NO: 246798
uagaacauacaaagauagu

SEQ ID NO: 246800 - RNA, 19 nt, Artificial Sequence
  Description of Artificial Sequence: Synthetic oligonucleotide
  Sense strand starting at position 3326 SEQ ID NO: 3175
ugacuaaccuggcaggaau

SEQ ID NO: 246801 - RNA, 19 nt, Artificial Sequence
  Description of Artificial Sequence: Synthetic oligonucleotide
  Antisense strand to SEQ ID NO: 246800
auuccugccagguuaguca

SEQ ID NO: 246802 - RNA, 19 nt, Artificial Sequence
  Description of Artificial Sequence: Synthetic oligonucleotide
  Sense strand starting at position 3352 SEQ ID NO: 3175
uuauauuagugcccugaau

SEQ ID NO: 246803 - RNA, 19 nt, Artificial Sequence
  Description of Artificial Sequence: Synthetic oligonucleotide
  Antisense strand to SEQ ID NO: 246802
auucagggcacuaauauaa

SEQ ID NO: 246804 - RNA, 19 nt, Artificial Sequence
  Description of Artificial Sequence: Synthetic oligonucleotide
  Sense strand starting at position 3354 SEQ ID NO: 3175
auauuagugcccugaauca

SEQ ID NO: 246805 - RNA, 19 nt, Artificial Sequence
  Description of Artificial Sequence: Synthetic oligonucleotide
  Antisense strand to SEQ ID NO: 246804
ugauucagggcacuaauau

SEQ ID NO: 246806 - RNA, 19 nt, Artificial Sequence
  Description of Artificial Sequence: Synthetic oligonucleotide
  Sense strand starting at position 3361 SEQ ID NO: 3175
ugcccugaaucaguagaau

SEQ ID NO: 246807 - RNA, 19 nt, Artificial Sequence
  Description of Artificial Sequence: Synthetic oligonucleotide
  Antisense strand to SEQ ID NO: 246806
auucuacugauucagggca

SEQ ID NO: 246808 - RNA, 19 nt, Artificial Sequence
  Description of Artificial Sequence: Synthetic oligonucleotide
  Sense strand starting at position 3432 SEQ ID NO: 3175
uuuagaaauuguccugauu

SEQ ID NO: 246809 - RNA, 19 nt, Artificial Sequence
  Description of Artificial Sequence: Synthetic oligonucleotide
  Antisense strand to SEQ ID NO: 246808
aaucaggacaauuucuaaa

SEQ ID NO: 246810 - RNA, 19 nt, Artificial Sequence
  Description of Artificial Sequence: Synthetic oligonucleotide
  Sense strand starting at position 3464 SEQ ID NO: 3175
auguaaugcauauaucgga

SEQ ID NO: 246811 - RNA, 19 nt, Artificial Sequence
  Description of Artificial Sequence: Synthetic oligonucleotide
  Antisense strand to SEQ ID NO: 246810
uccgauauaugcauuacau

SEQ ID NO: 246812 - RNA, 19 nt, Artificial Sequence
  Description of Artificial Sequence: Synthetic oligonucleotide
  Sense strand starting at position 3469 SEQ ID NO: 3175
augcauauaucggauauuu

SEQ ID NO: 246813 - RNA, 19 nt, Artificial Sequence
  Description of Artificial Sequence: Synthetic oligonucleotide
  Antisense strand to SEQ ID NO: 246812
aaauauccgauauaugcau

SEQ ID NO: 246814 - RNA, 19 nt, Artificial Sequence
  Description of Artificial Sequence: Synthetic oligonucleotide
  Sense strand starting at position 3895 SEQ ID NO: 3175
ccucuuuguuugguggaaa

SEQ ID NO: 246815 - RNA, 19 nt, Artificial Sequence
  Description of Artificial Sequence: Synthetic oligonucleotide
  Antisense strand to SEQ ID NO: 246814
uuuccaccaaacaaagagg

SEQ ID NO: 246816 - RNA, 19 nt, Artificial Sequence
  Description of Artificial Sequence: Synthetic oligonucleotide
  Sense strand starting at position 3959 SEQ ID NO: 3175
uugugaagcuauguucuau

SEQ ID NO: 246817 - RNA, 19 nt, Artificial Sequence
  Description of Artificial Sequence: Synthetic oligonucleotide
  Antisense strand to SEQ ID NO: 246816
auagaacauagcuucacaa

SEQ ID NO: 246818 - RNA, 19 nt, Artificial Sequence
  Description of Artificial Sequence: Synthetic oligonucleotide
  Sense strand starting at position 162 SEQ ID NO: 3176
uuuaaagggcauuagucaa

SEQ ID NO: 246819 - RNA, 19 nt, Artificial Sequence
  Description of Artificial Sequence: Synthetic oligonucleotide
  Antisense strand to SEQ ID NO: 246818
uugacuaaugcccuuuaaa

SEQ ID NO: 246820 - RNA, 19 nt, Artificial Sequence
  Description of Artificial Sequence: Synthetic oligonucleotide
  Sense strand starting at position 227 SEQ ID NO: 3176
agugguagcuuauucuaca

SEQ ID NO: 246821 - RNA, 19 nt, Artificial Sequence
  Description of Artificial Sequence: Synthetic oligonucleotide
  Antisense strand to SEQ ID NO: 246820
uguagaauaagcuaccacu

SEQ ID NO: 246822 - RNA, 19 nt, Artificial Sequence
  Description of Artificial Sequence: Synthetic oligonucleotide
  Sense strand starting at position 256 SEQ ID NO: 3176
aguguaacucuauguauuu

SEQ ID NO: 246823 - RNA, 19 nt, Artificial Sequence
  Description of Artificial Sequence: Synthetic oligonucleotide
  Antisense strand to SEQ ID NO: 246822
aaauacauagaguuacacu

SEQ ID NO: 246824 - RNA, 19 nt, Artificial Sequence
  Description of Artificial Sequence: Synthetic oligonucleotide
  Sense strand starting at position 257 SEQ ID NO: 3176
guguaacucuauguauuug

SEQ ID NO: 246825 - RNA, 19 nt, Artificial Sequence
  Description of Artificial Sequence: Synthetic oligonucleotide
  Antisense strand to SEQ ID NO: 246824
caaauacauagaguuacac

SEQ ID NO: 246826 - RNA, 19 nt, Artificial Sequence
  Description of Artificial Sequence: Synthetic oligonucleotide
  Sense strand starting at position 439 SEQ ID NO: 3176
agguaagaaugagaucacu

SEQ ID NO: 246827 - RNA, 19 nt, Artificial Sequence
  Description of Artificial Sequence: Synthetic oligonucleotide
  Antisense strand to SEQ ID NO: 246826
agugaucucauucuuaccu

SEQ ID NO: 246828 - RNA, 19 nt, Artificial Sequence
  Description of Artificial Sequence: Synthetic oligonucleotide
  Sense strand starting at position 448 SEQ ID NO: 3176
ugagaucacuuagcuaauu

SEQ ID NO: 246829 - RNA, 19 nt, Artificial Sequence
  Description of Artificial Sequence: Synthetic oligonucleotide
  Antisense strand to SEQ ID NO: 246828
aauuagcuaagugaucuca

SEQ ID NO: 246830 - RNA, 19 nt, Artificial Sequence
  Description of Artificial Sequence: Synthetic oligonucleotide
  Sense strand starting at position 473 SEQ ID NO: 3176
ucaagaguaguucagugga

SEQ ID NO: 246831 - RNA, 19 nt, Artificial Sequence
  Description of Artificial Sequence: Synthetic oligonucleotide
  Antisense strand to SEQ ID NO: 246830
uccacugaacuacucuuga

SEQ ID NO: 246832 - RNA, 19 nt, Artificial Sequence
  Description of Artificial Sequence: Synthetic oligonucleotide
  Sense strand starting at position 476 SEQ ID NO: 3176
agaguaguucaguggauua

SEQ ID NO: 246833 - RNA, 19 nt, Artificial Sequence
  Description of Artificial Sequence: Synthetic oligonucleotide
  Antisense strand to SEQ ID NO: 246832
uaauccacugaacuacucu

SEQ ID NO: 246834 - RNA, 19 nt, Artificial Sequence
  Description of Artificial Sequence: Synthetic oligonucleotide
  Sense strand starting at position 526 SEQ ID NO: 3176
agggcugauccuuaucaac

SEQ ID NO: 246835 - RNA, 19 nt, Artificial Sequence
  Description of Artificial Sequence: Synthetic oligonucleotide
  Antisense strand to SEQ ID NO: 246834
guugauaaggaucagcccu

SEQ ID NO: 246836 - RNA, 19 nt, Artificial Sequence
  Description of Artificial Sequence: Synthetic oligonucleotide
  Sense strand starting at position 528 SEQ ID NO: 3176
ggcugauccuuaucaacuu

SEQ ID NO: 246837 - RNA, 19 nt, Artificial Sequence
  Description of Artificial Sequence: Synthetic oligonucleotide
  Antisense strand to SEQ ID NO: 246836
aaguugauaaggaucagcc

SEQ ID NO: 246838 - RNA, 19 nt, Artificial Sequence
  Description of Artificial Sequence: Synthetic oligonucleotide
  Sense strand starting at position 614 SEQ ID NO: 3176
acuuaaguggucuguccau

SEQ ID NO: 246839 - RNA, 19 nt, Artificial Sequence
  Description of Artificial Sequence: Synthetic oligonucleotide
  Antisense strand to SEQ ID NO: 246838
auggacagaccacuuaagu

SEQ ID NO: 246840 - RNA, 19 nt, Artificial Sequence
  Description of Artificial Sequence: Synthetic oligonucleotide
  Sense strand starting at position 677 SEQ ID NO: 3176
gggcaaacuucugcuuauu

SEQ ID NO: 246841 - RNA, 19 nt, Artificial Sequence
  Description of Artificial Sequence: Synthetic oligonucleotide
  Antisense strand to SEQ ID NO: 246840
aauaagcagaaguuugccc

SEQ ID NO: 246842 - RNA, 19 nt, Artificial Sequence
  Description of Artificial Sequence: Synthetic oligonucleotide
  Sense strand starting at position 808 SEQ ID NO: 3176
cgccuaaccgucuacauga

SEQ ID NO: 246843 - RNA, 19 nt, Artificial Sequence
  Description of Artificial Sequence: Synthetic oligonucleotide
  Antisense strand to SEQ ID NO: 246842
ucauguagacgguuaggcg

SEQ ID NO: 246844 - RNA, 19 nt, Artificial Sequence
  Description of Artificial Sequence: Synthetic oligonucleotide
  Sense strand starting at position 810 SEQ ID NO: 3176
ccuaaccgucuacaugaua

SEQ ID NO: 246845 - RNA, 19 nt, Artificial Sequence
  Description of Artificial Sequence: Synthetic oligonucleotide
  Antisense strand to SEQ ID NO: 246844
uaucauguagacgguuagg

SEQ ID NO: 246846 - RNA, 19 nt, Artificial Sequence
  Description of Artificial Sequence: Synthetic oligonucleotide
  Sense strand starting at position 829 SEQ ID NO: 3176
gggccaaacccagguuaaa

SEQ ID NO: 246847 - RNA, 19 nt, Artificial Sequence
  Description of Artificial Sequence: Synthetic oligonucleotide
  Antisense strand to SEQ ID NO: 246846
uuuaaccuggguuuggccc

SEQ ID NO: 246848 - RNA, 19 nt, Artificial Sequence
  Description of Artificial Sequence: Synthetic oligonucleotide
  Sense strand starting at position 1029 SEQ ID NO: 3176
ucagaugcaucucucaaag

SEQ ID NO: 246849 - RNA, 19 nt, Artificial Sequence
  Description of Artificial Sequence: Synthetic oligonucleotide
  Antisense strand to SEQ ID NO: 246848
cuuugagagaugcaucuga

SEQ ID NO: 246850 - RNA, 19 nt, Artificial Sequence
  Description of Artificial Sequence: Synthetic oligonucleotide
  Sense strand starting at position 1102 SEQ ID NO: 3176
gggccacugcucuggacaa

SEQ ID NO: 246851 - RNA, 19 nt, Artificial Sequence
  Description of Artificial Sequence: Synthetic oligonucleotide
  Antisense strand to SEQ ID NO: 246850
uuguccagagcaguggccc

SEQ ID NO: 246852 - RNA, 19 nt, Artificial Sequence
  Description of Artificial Sequence: Synthetic oligonucleotide
  Sense strand starting at position 1482 SEQ ID NO: 3176
gggugucguaaggaggaaa

SEQ ID NO: 246853 - RNA, 19 nt, Artificial Sequence
  Description of Artificial Sequence: Synthetic oligonucleotide
  Antisense strand to SEQ ID NO: 246852
uuuccuccuuacgacaccc

SEQ ID NO: 246854 - RNA, 19 nt, Artificial Sequence
  Description of Artificial Sequence: Synthetic oligonucleotide
  Sense strand starting at position 2024 SEQ ID NO: 3176
gcggguuugacagaugggu

SEQ ID NO: 246855 - RNA, 19 nt, Artificial Sequence
  Description of Artificial Sequence: Synthetic oligonucleotide
  Antisense strand to SEQ ID NO: 246854
acccaucugucaaacccgc

SEQ ID NO: 246856 - RNA, 19 nt, Artificial Sequence
  Description of Artificial Sequence: Synthetic oligonucleotide
  Sense strand starting at position 2099 SEQ ID NO: 3176
ggaaaugucagguguacug

SEQ ID NO: 246857 - RNA, 19 nt, Artificial Sequence
  Description of Artificial Sequence: Synthetic oligonucleotide
  Antisense strand to SEQ ID NO: 246856
caguacaccugacauuucc

SEQ ID NO: 246858 - RNA, 19 nt, Artificial Sequence
  Description of Artificial Sequence: Synthetic oligonucleotide
  Sense strand starting at position 2114 SEQ ID NO: 3176
acuggauguuccucaagac

SEQ ID NO: 246859 - RNA, 19 nt, Artificial Sequence
  Description of Artificial Sequence: Synthetic oligonucleotide
  Antisense strand to SEQ ID NO: 246858
gucuugaggaacauccagu

SEQ ID NO: 246860 - RNA, 19 nt, Artificial Sequence
  Description of Artificial Sequence: Synthetic oligonucleotide
  Sense strand starting at position 2234 SEQ ID NO: 3176
ugcugugauacucagugua

SEQ ID NO: 246861 - RNA, 19 nt, Artificial Sequence
  Description of Artificial Sequence: Synthetic oligonucleotide
  Antisense strand to SEQ ID NO: 246860
uacacugaguaucacagca

SEQ ID NO: 246862 - RNA, 19 nt, Artificial Sequence
  Description of Artificial Sequence: Synthetic oligonucleotide
  Sense strand starting at position 2237 SEQ ID NO: 3176
ugugauacucaguguaccu

SEQ ID NO: 246863 - RNA, 19 nt, Artificial Sequence
  Description of Artificial Sequence: Synthetic oligonucleotide
  Antisense strand to SEQ ID NO: 246862
agguacacugaguaucaca

SEQ ID NO: 246864 - RNA, 19 nt, Artificial Sequence
  Description of Artificial Sequence: Synthetic oligonucleotide
  Sense strand starting at position 2244 SEQ ID NO: 3176
cucaguguaccuuaaggau

SEQ ID NO: 246865 - RNA, 19 nt, Artificial Sequence
  Description of Artificial Sequence: Synthetic oligonucleotide
  Antisense strand to SEQ ID NO: 246864
auccuuaagguacacugag

SEQ ID NO: 246866 - RNA, 19 nt, Artificial Sequence
  Description of Artificial Sequence: Synthetic oligonucleotide
  Sense strand starting at position 2388 SEQ ID NO: 3176
gauguuugugaauguacug

SEQ ID NO: 246867 - RNA, 19 nt, Artificial Sequence
  Description of Artificial Sequence: Synthetic oligonucleotide
  Antisense strand to SEQ ID NO: 246866
caguacauucacaaacauc

SEQ ID NO: 246868 - RNA, 19 nt, Artificial Sequence
  Description of Artificial Sequence: Synthetic oligonucleotide
  Sense strand starting at position 2512 SEQ ID NO: 3176
gcagaaggcuuccugcaga

SEQ ID NO: 246869 - RNA, 19 nt, Artificial Sequence
  Description of Artificial Sequence: Synthetic oligonucleotide
  Antisense strand to SEQ ID NO: 246868
ucugcaggaagccuucugc

SEQ ID NO: 246870 - RNA, 19 nt, Artificial Sequence
  Description of Artificial Sequence: Synthetic oligonucleotide
  Sense strand starting at position 2551 SEQ ID NO: 3176
ugggaagacccaugcugua

SEQ ID NO: 246871 - RNA, 19 nt, Artificial Sequence
  Description of Artificial Sequence: Synthetic oligonucleotide
  Antisense strand to SEQ ID NO: 246870
uacagcaugggucuuccca

SEQ ID NO: 246872 - RNA, 19 nt, Artificial Sequence
  Description of Artificial Sequence: Synthetic oligonucleotide
  Sense strand starting at position 2604 SEQ ID NO: 3176
uugggaagcucugcuuaaa

SEQ ID NO: 246873 - RNA, 19 nt, Artificial Sequence
  Description of Artificial Sequence: Synthetic oligonucleotide
  Antisense strand to SEQ ID NO: 246872
uuuaagcagagcuucccaa

SEQ ID NO: 246874 - RNA, 19 nt, Artificial Sequence
  Description of Artificial Sequence: Synthetic oligonucleotide
  Sense strand starting at position 2607 SEQ ID NO: 3176
ggaagcucugcuuaaagcu

SEQ ID NO: 246875 - RNA, 19 nt, Artificial Sequence
  Description of Artificial Sequence: Synthetic oligonucleotide
  Antisense strand to SEQ ID NO: 246874
agcuuuaagcagagcuucc

SEQ ID NO: 246876 - RNA, 19 nt, Artificial Sequence
  Description of Artificial Sequence: Synthetic oligonucleotide
  Sense strand starting at position 2668 SEQ ID NO: 3176
gagacugccucacugaguu

SEQ ID NO: 246877 - RNA, 19 nt, Artificial Sequence
  Description of Artificial Sequence: Synthetic oligonucleotide
  Antisense strand to SEQ ID NO: 246876
aacucagugaggcagucuc

SEQ ID NO: 246878 - RNA, 19 nt, Artificial Sequence
  Description of Artificial Sequence: Synthetic oligonucleotide
  Sense strand starting at position 2753 SEQ ID NO: 3176
uggcaaacuccaggaaaug

SEQ ID NO: 246879 - RNA, 19 nt, Artificial Sequence
  Description of Artificial Sequence: Synthetic oligonucleotide
  Antisense strand to SEQ ID NO: 246878
cauuuccuggaguuugcca

SEQ ID NO: 246880 - RNA, 19 nt, Artificial Sequence
  Description of Artificial Sequence: Synthetic oligonucleotide
  Sense strand starting at position 2786 SEQ ID NO: 3176
uggcuucuugaauggaauu

SEQ ID NO: 246881 - RNA, 19 nt, Artificial Sequence
  Description of Artificial Sequence: Synthetic oligonucleotide
  Antisense strand to SEQ ID NO: 246880
aauuccauucaagaagcca

SEQ ID NO: 246882 - RNA, 19 nt, Artificial Sequence
  Description of Artificial Sequence: Synthetic oligonucleotide
  Sense strand starting at position 2954 SEQ ID NO: 3176
cgguuaggauuacuguuua

SEQ ID NO: 246883 - RNA, 19 nt, Artificial Sequence
  Description of Artificial Sequence: Synthetic oligonucleotide
  Antisense strand to SEQ ID NO: 246882
uaaacaguaauccuaaccg

SEQ ID NO: 246884 - RNA, 19 nt, Artificial Sequence
  Description of Artificial Sequence: Synthetic oligonucleotide
  Sense strand starting at position 3460 SEQ ID NO: 3176
ggcggaaucuaguccauuu

SEQ ID NO: 246885 - RNA, 19 nt, Artificial Sequence
  Description of Artificial Sequence: Synthetic oligonucleotide
  Antisense strand to SEQ ID NO: 246884
aaauggacuagauuccgcc

SEQ ID NO: 246886 - RNA, 19 nt, Artificial Sequence
  Description of Artificial Sequence: Synthetic oligonucleotide
  Sense strand starting at position 3534 SEQ ID NO: 3176
ggcucccaaucucugauaa

SEQ ID NO: 246887 - RNA, 19 nt, Artificial Sequence
  Description of Artificial Sequence: Synthetic oligonucleotide
  Antisense strand to SEQ ID NO: 246886
uuaucagagauugggagcc

SEQ ID NO: 246888 - RNA, 19 nt, Artificial Sequence
  Description of Artificial Sequence: Synthetic oligonucleotide
  Sense strand starting at position 3721 SEQ ID NO: 3176
gggagaguauucucuugcu

SEQ ID NO: 246889 - RNA, 19 nt, Artificial Sequence
  Description of Artificial Sequence: Synthetic oligonucleotide
  Antisense strand to SEQ ID NO: 246888
agcaagagaauacucuccc

SEQ ID NO: 246890 - RNA, 19 nt, Artificial Sequence
  Description of Artificial Sequence: Synthetic oligonucleotide
  Sense strand starting at position 3751 SEQ ID NO: 3176
agcuaaugacacugugcua

SEQ ID NO: 246891 - RNA, 19 nt, Artificial Sequence
  Description of Artificial Sequence: Synthetic oligonucleotide
  Antisense strand to SEQ ID NO: 246890
uagcacagugucauuagcu

SEQ ID NO: 246892 - RNA, 19 nt, Artificial Sequence
  Description of Artificial Sequence: Synthetic oligonucleotide
  Sense strand starting at position 3815 SEQ ID NO: 3176
ugguaaauguuacuguuau

SEQ ID NO: 246893 - RNA, 19 nt, Artificial Sequence
  Description of Artificial Sequence: Synthetic oligonucleotide
  Antisense strand to SEQ ID NO: 246892
auaacaguaacauuuacca

SEQ ID NO: 246894 - RNA, 19 nt, Artificial Sequence
  Description of Artificial Sequence: Synthetic oligonucleotide
  Sense strand starting at position 3821 SEQ ID NO: 3176
auguuacuguuaucuccau

SEQ ID NO: 246895 - RNA, 19 nt, Artificial Sequence
  Description of Artificial Sequence: Synthetic oligonucleotide
  Antisense strand to SEQ ID NO: 246894
auggagauaacaguaacau

SEQ ID NO: 246896 - RNA, 19 nt, Artificial Sequence
  Description of Artificial Sequence: Synthetic oligonucleotide
  Sense strand starting at position 3872 SEQ ID NO: 3176
uuaagugauuugcagaaau

SEQ ID NO: 246897 - RNA, 19 nt, Artificial Sequence
  Description of Artificial Sequence: Synthetic oligonucleotide
  Antisense strand to SEQ ID NO: 246896
auuucugcaaaucacuuaa

SEQ ID NO: 246898 - RNA, 19 nt, Artificial Sequence
  Description of Artificial Sequence: Synthetic oligonucleotide
  Sense strand starting at position 89 SEQ ID NO: 3177
uucugaaucuaguugggaa

SEQ ID NO: 246899 - RNA, 19 nt, Artificial Sequence
  Description of Artificial Sequence: Synthetic oligonucleotide
  Antisense strand to SEQ ID NO: 246898
uucccaacuagauucagaa

SEQ ID NO: 246900 - RNA, 19 nt, Artificial Sequence
  Description of Artificial Sequence: Synthetic oligonucleotide
  Sense strand starting at position 90 SEQ ID NO: 3177
ucugaaucuaguugggaaa

SEQ ID NO: 246901 - RNA, 19 nt, Artificial Sequence
  Description of Artificial Sequence: Synthetic oligonucleotide
  Antisense strand to SEQ ID NO: 246900
uuucccaacuagauucaga

SEQ ID NO: 246902 - RNA, 19 nt, Artificial Sequence
  Description of Artificial Sequence: Synthetic oligonucleotide
  Sense strand starting at position 93 SEQ ID NO: 3177
gaaucuaguugggaaacaa

SEQ ID NO: 246903 - RNA, 19 nt, Artificial Sequence
  Description of Artificial Sequence: Synthetic oligonucleotide
  Antisense strand to SEQ ID NO: 246902
uuguuucccaacuagauuc

SEQ ID NO: 246904 - RNA, 19 nt, Artificial Sequence
  Description of Artificial Sequence: Synthetic oligonucleotide
  Sense strand starting at position 168 SEQ ID NO: 3177
gcuacaugaugaguaaggu

SEQ ID NO: 246905 - RNA, 19 nt, Artificial Sequence
  Description of Artificial Sequence: Synthetic oligonucleotide
  Antisense strand to SEQ ID NO: 246904
accuuacucaucauguagc

SEQ ID NO: 246906 - RNA, 19 nt, Artificial Sequence
  Description of Artificial Sequence: Synthetic oligonucleotide
  Sense strand starting at position 222 SEQ ID NO: 3177
guagaaacacaauguuucu

SEQ ID NO: 246907 - RNA, 19 nt, Artificial Sequence
  Description of Artificial Sequence: Synthetic oligonucleotide
  Antisense strand to SEQ ID NO: 246906
agaaacauuguguuucuac

SEQ ID NO: 246908 - RNA, 19 nt, Artificial Sequence
  Description of Artificial Sequence: Synthetic oligonucleotide
  Sense strand starting at position 321 SEQ ID NO: 3177
gcguguuuacuagacauca

SEQ ID NO: 246909 - RNA, 19 nt, Artificial Sequence
  Description of Artificial Sequence: Synthetic oligonucleotide
  Antisense strand to SEQ ID NO: 246908
ugaugucuaguaaacacgc

SEQ ID NO: 246910 - RNA, 19 nt, Artificial Sequence
  Description of Artificial Sequence: Synthetic oligonucleotide
  Sense strand starting at position 565 SEQ ID NO: 3177
cguuaaagaaaguguguuu

SEQ ID NO: 246911 - RNA, 19 nt, Artificial Sequence
  Description of Artificial Sequence: Synthetic oligonucleotide
  Antisense strand to SEQ ID NO: 246910
aaacacacuuucuuuaacg

SEQ ID NO: 246912 - RNA, 19 nt, Artificial Sequence
  Description of Artificial Sequence: Synthetic oligonucleotide
  Sense strand starting at position 603 SEQ ID NO: 3177
ggcucaauucuaggacaac

SEQ ID NO: 246913 - RNA, 19 nt, Artificial Sequence
  Description of Artificial Sequence: Synthetic oligonucleotide
  Antisense strand to SEQ ID NO: 246912
guuguccuagaauugagcc

SEQ ID NO: 246914 - RNA, 19 nt, Artificial Sequence
  Description of Artificial Sequence: Synthetic oligonucleotide
  Sense strand starting at position 629 SEQ ID NO: 3177
aagcaauucuacgugcacu

SEQ ID NO: 246915 - RNA, 19 nt, Artificial Sequence
  Description of Artificial Sequence: Synthetic oligonucleotide
  Antisense strand to SEQ ID NO: 246914
agugcacguagaauugcuu

SEQ ID NO: 246916 - RNA, 19 nt, Artificial Sequence
  Description of Artificial Sequence: Synthetic oligonucleotide
  Sense strand starting at position 934 SEQ ID NO: 3177
gcagguucccaacacaaga

SEQ ID NO: 246917 - RNA, 19 nt, Artificial Sequence
  Description of Artificial Sequence: Synthetic oligonucleotide
  Antisense strand to SEQ ID NO: 246916
ucuuguguugggaaccugc

SEQ ID NO: 246918 - RNA, 19 nt, Artificial Sequence
  Description of Artificial Sequence: Synthetic oligonucleotide
  Sense strand starting at position 1027 SEQ ID NO: 3177
cauggucugucauuacgga

SEQ ID NO: 246919 - RNA, 19 nt, Artificial Sequence
  Description of Artificial Sequence: Synthetic oligonucleotide
  Antisense strand to SEQ ID NO: 246918
uccguaaugacagaccaug

SEQ ID NO: 246920 - RNA, 19 nt, Artificial Sequence
  Description of Artificial Sequence: Synthetic oligonucleotide
  Sense strand starting at position 1028 SEQ ID NO: 3177
auggucugucauuacggau

SEQ ID NO: 246921 - RNA, 19 nt, Artificial Sequence
  Description of Artificial Sequence: Synthetic oligonucleotide
  Antisense strand to SEQ ID NO: 246920
auccguaaugacagaccau

SEQ ID NO: 246922 - RNA, 19 nt, Artificial Sequence
  Description of Artificial Sequence: Synthetic oligonucleotide
  Sense strand starting at position 1032 SEQ ID NO: 3177
ucugucauuacggaugaac

SEQ ID NO: 246923 - RNA, 19 nt, Artificial Sequence
  Description of Artificial Sequence: Synthetic oligonucleotide
  Antisense strand to SEQ ID NO: 246922
guucauccguaaugacaga

SEQ ID NO: 246924 - RNA, 19 nt, Artificial Sequence
  Description of Artificial Sequence: Synthetic oligonucleotide
  Sense strand starting at position 1034 SEQ ID NO: 3177
ugucauuacggaugaacuc

SEQ ID NO: 246925 - RNA, 19 nt, Artificial Sequence
  Description of Artificial Sequence: Synthetic oligonucleotide
  Antisense strand to SEQ ID NO: 246924
gaguucauccguaaugaca

SEQ ID NO: 246926 - RNA, 19 nt, Artificial Sequence
  Description of Artificial Sequence: Synthetic oligonucleotide
  Sense strand starting at position 1224 SEQ ID NO: 3177
gccacagaucccugcacau

SEQ ID NO: 246927 - RNA, 19 nt, Artificial Sequence
  Description of Artificial Sequence: Synthetic oligonucleotide
  Antisense strand to SEQ ID NO: 246926
augugcagggaucuguggc

SEQ ID NO: 246928 - RNA, 19 nt, Artificial Sequence
  Description of Artificial Sequence: Synthetic oligonucleotide
  Sense strand starting at position 1249 SEQ ID NO: 3177
ggccucaauuaauugacua

SEQ ID NO: 246929 - RNA, 19 nt, Artificial Sequence
  Description of Artificial Sequence: Synthetic oligonucleotide
  Antisense strand to SEQ ID NO: 246928
uagucaauuaauugaggcc

SEQ ID NO: 246930 - RNA, 19 nt, Artificial Sequence
  Description of Artificial Sequence: Synthetic oligonucleotide
  Sense strand starting at position 1379 SEQ ID NO: 3177
cacggagaugcauguuuac

SEQ ID NO: 246931 - RNA, 19 nt, Artificial Sequence
  Description of Artificial Sequence: Synthetic oligonucleotide
  Antisense strand to SEQ ID NO: 246930
guaaacaugcaucuccgug

SEQ ID NO: 246932 - RNA, 19 nt, Artificial Sequence
  Description of Artificial Sequence: Synthetic oligonucleotide
  Sense strand starting at position 1382 SEQ ID NO: 3177
ggagaugcauguuuacuuu

SEQ ID NO: 246933 - RNA, 19 nt, Artificial Sequence
  Description of Artificial Sequence: Synthetic oligonucleotide
  Antisense strand to SEQ ID NO: 246932
aaaguaaacaugcaucucc

SEQ ID NO: 246934 - RNA, 19 nt, Artificial Sequence
  Description of Artificial Sequence: Synthetic oligonucleotide
  Sense strand starting at position 2300 SEQ ID NO: 3177
gaaaguuuccuggaggagc

SEQ ID NO: 246935 - RNA, 19 nt, Artificial Sequence
  Description of Artificial Sequence: Synthetic oligonucleotide
  Antisense strand to SEQ ID NO: 246934
gcuccuccaggaaacuuuc

SEQ ID NO: 246936 - RNA, 19 nt, Artificial Sequence
  Description of Artificial Sequence: Synthetic oligonucleotide
  Sense strand starting at position 2398 SEQ ID NO: 3177
ggagauguuuaggaaacug

SEQ ID NO: 246937 - RNA, 19 nt, Artificial Sequence
  Description of Artificial Sequence: Synthetic oligonucleotide
  Antisense strand to SEQ ID NO: 246936
caguuuccuaaacaucucc

SEQ ID NO: 246938 - RNA, 19 nt, Artificial Sequence
  Description of Artificial Sequence: Synthetic oligonucleotide
  Sense strand starting at position 2489 SEQ ID NO: 3177
auugcuaaccucuaagugu

SEQ ID NO: 246939 - RNA, 19 nt, Artificial Sequence
  Description of Artificial Sequence: Synthetic oligonucleotide
  Antisense strand to SEQ ID NO: 246938
acacuuagagguuagcaau

SEQ ID NO: 246940 - RNA, 19 nt, Artificial Sequence
  Description of Artificial Sequence: Synthetic oligonucleotide
  Sense strand starting at position 2502 SEQ ID NO: 3177
aaguguauguccuuccgga

SEQ ID NO: 246941 - RNA, 19 nt, Artificial Sequence
  Description of Artificial Sequence: Synthetic oligonucleotide
  Antisense strand to SEQ ID NO: 246940
uccggaaggacauacacuu

SEQ ID NO: 246942 - RNA, 19 nt, Artificial Sequence
  Description of Artificial Sequence: Synthetic oligonucleotide
  Sense strand starting at position 2540 SEQ ID NO: 3177
auaagugugcacuaacaga

SEQ ID NO: 246943 - RNA, 19 nt, Artificial Sequence
  Description of Artificial Sequence: Synthetic oligonucleotide
  Antisense strand to SEQ ID NO: 246942
ucuguuagugcacacuuau

SEQ ID NO: 246944 - RNA, 19 nt, Artificial Sequence
  Description of Artificial Sequence: Synthetic oligonucleotide
  Sense strand starting at position 2567 SEQ ID NO: 3177
agcaucaguccuuacacuu

SEQ ID NO: 246945 - RNA, 19 nt, Artificial Sequence
  Description of Artificial Sequence: Synthetic oligonucleotide
  Antisense strand to SEQ ID NO: 246944
aaguguaaggacugaugcu

SEQ ID NO: 246946 - RNA, 19 nt, Artificial Sequence
  Description of Artificial Sequence: Synthetic oligonucleotide
  Sense strand starting at position 2666 SEQ ID NO: 3177
agcauuucuccuugagcaa

SEQ ID NO: 246947 - RNA, 19 nt, Artificial Sequence
  Description of Artificial Sequence: Synthetic oligonucleotide
  Antisense strand to SEQ ID NO: 246946
uugcucaaggagaaaugcu

SEQ ID NO: 246948 - RNA, 19 nt, Artificial Sequence
  Description of Artificial Sequence: Synthetic oligonucleotide
  Sense strand starting at position 2775 SEQ ID NO: 3177
ccagaauacuucucaggca

SEQ ID NO: 246949 - RNA, 19 nt, Artificial Sequence
  Description of Artificial Sequence: Synthetic oligonucleotide
  Antisense strand to SEQ ID NO: 246948
ugccugagaaguauucugg

SEQ ID NO: 246950 - RNA, 19 nt, Artificial Sequence
  Description of Artificial Sequence: Synthetic oligonucleotide
  Sense strand starting at position 2977 SEQ ID NO: 3177
ggagcaucgauugagcaga

SEQ ID NO: 246951 - RNA, 19 nt, Artificial Sequence
  Description of Artificial Sequence: Synthetic oligonucleotide
  Antisense strand to SEQ ID NO: 246950
ucugcucaaucgaugcucc

SEQ ID NO: 246952 - RNA, 19 nt, Artificial Sequence
  Description of Artificial Sequence: Synthetic oligonucleotide
  Sense strand starting at position 3315 SEQ ID NO: 3177
ccaauuaguuugcuuggaa

SEQ ID NO: 246953 - RNA, 19 nt, Artificial Sequence
  Description of Artificial Sequence: Synthetic oligonucleotide
  Antisense strand to SEQ ID NO: 246952
uuccaagcaaacuaauugg

SEQ ID NO: 246954 - RNA, 19 nt, Artificial Sequence
  Description of Artificial Sequence: Synthetic oligonucleotide
  Sense strand starting at position 3316 SEQ ID NO: 3177
caauuaguuugcuuggaac

SEQ ID NO: 246955 - RNA, 19 nt, Artificial Sequence
  Description of Artificial Sequence: Synthetic oligonucleotide
  Antisense strand to SEQ ID NO: 246954
guuccaagcaaacuaauug

SEQ ID NO: 246956 - RNA, 19 nt, Artificial Sequence
  Description of Artificial Sequence: Synthetic oligonucleotide
  Sense strand starting at position 3318 SEQ ID NO: 3177
auuaguuugcuuggaacag

SEQ ID NO: 246957 - RNA, 19 nt, Artificial Sequence
  Description of Artificial Sequence: Synthetic oligonucleotide
  Antisense strand to SEQ ID NO: 246956
cuguuccaagcaaacuaau

SEQ ID NO: 246958 - RNA, 19 nt, Artificial Sequence
  Description of Artificial Sequence: Synthetic oligonucleotide
  Sense strand starting at position 3388 SEQ ID NO: 3177
ucucaaauguauuccuguu

SEQ ID NO: 246959 - RNA, 19 nt, Artificial Sequence
  Description of Artificial Sequence: Synthetic oligonucleotide
  Antisense strand to SEQ ID NO: 246958
aacaggaauacauuugaga

SEQ ID NO: 246960 - RNA, 19 nt, Artificial Sequence
  Description of Artificial Sequence: Synthetic oligonucleotide
  Sense strand starting at position 3423 SEQ ID NO: 3177
uggccaugcuguuuauuua

SEQ ID NO: 246961 - RNA, 19 nt, Artificial Sequence
  Description of Artificial Sequence: Synthetic oligonucleotide
  Antisense strand to SEQ ID NO: 246960
uaaauaaacagcauggcca

SEQ ID NO: 246962 - RNA, 19 nt, Artificial Sequence
  Description of Artificial Sequence: Synthetic oligonucleotide
  Sense strand starting at position 3424 SEQ ID NO: 3177
ggccaugcuguuuauuuau

SEQ ID NO: 246963 - RNA, 19 nt, Artificial Sequence
  Description of Artificial Sequence: Synthetic oligonucleotide
  Antisense strand to SEQ ID NO: 246962
auaaauaaacagcauggcc

SEQ ID NO: 246964 - RNA, 19 nt, Artificial Sequence
  Description of Artificial Sequence: Synthetic oligonucleotide
  Sense strand starting at position 3744 SEQ ID NO: 3177
cuaagaaaguuguuaaaca

SEQ ID NO: 246965 - RNA, 19 nt, Artificial Sequence
  Description of Artificial Sequence: Synthetic oligonucleotide
  Antisense strand to SEQ ID NO: 246964
uguuuaacaacuuucuuag

SEQ ID NO: 246966 - RNA, 19 nt, Artificial Sequence
  Description of Artificial Sequence: Synthetic oligonucleotide
  Sense strand starting at position 3752 SEQ ID NO: 3177
guuguuaaacacuaacuuu

SEQ ID NO: 246967 - RNA, 19 nt, Artificial Sequence
  Description of Artificial Sequence: Synthetic oligonucleotide
  Antisense strand to SEQ ID NO: 246966
aaaguuaguguuuaacaac

SEQ ID NO: 246968 - RNA, 19 nt, Artificial Sequence
  Description of Artificial Sequence: Synthetic oligonucleotide
  Sense strand starting at position 3885 SEQ ID NO: 3177
cugucacuugacuguuaug

SEQ ID NO: 246969 - RNA, 19 nt, Artificial Sequence
  Description of Artificial Sequence: Synthetic oligonucleotide
  Antisense strand to SEQ ID NO: 246968
cauaacagucaagugacag

SEQ ID NO: 246970 - RNA, 19 nt, Artificial Sequence
  Description of Artificial Sequence: Synthetic oligonucleotide
  Sense strand starting at position 3895 SEQ ID NO: 3177
acuguuauguaauucugga

SEQ ID NO: 246971 - RNA, 19 nt, Artificial Sequence
  Description of Artificial Sequence: Synthetic oligonucleotide
  Antisense strand to SEQ ID NO: 246970
uccagaauuacauaacagu

SEQ ID NO: 246972 - RNA, 19 nt, Artificial Sequence
  Description of Artificial Sequence: Synthetic oligonucleotide
  Sense strand starting at position 3902 SEQ ID NO: 3177
uguaauucuggauaaucuu

SEQ ID NO: 246973 - RNA, 19 nt, Artificial Sequence
  Description of Artificial Sequence: Synthetic oligonucleotide
  Antisense strand to SEQ ID NO: 246972
aagauuauccagaauuaca

SEQ ID NO: 246974 - RNA, 19 nt, Artificial Sequence
  Description of Artificial Sequence: Synthetic oligonucleotide
  Sense strand starting at position 3960 SEQ ID NO: 3177
cccuaauuccaccguagaa

SEQ ID NO: 246975 - RNA, 19 nt, Artificial Sequence
  Description of Artificial Sequence: Synthetic oligonucleotide
  Antisense strand to SEQ ID NO: 246974
uucuacgguggaauuaggg

SEQ ID NO: 246976 - RNA, 19 nt, Artificial Sequence
  Description of Artificial Sequence: Synthetic oligonucleotide
  Sense strand starting at position 3962 SEQ ID NO: 3177
cuaauuccaccguagaaug

SEQ ID NO: 246977 - RNA, 19 nt, Artificial Sequence
  Description of Artificial Sequence: Synthetic oligonucleotide
  Antisense strand to SEQ ID NO: 246976
cauucuacgguggaauuag

SEQ ID NO: 246978 - RNA, 19 nt, Artificial Sequence
  Description of Artificial Sequence: Synthetic oligonucleotide
  Sense strand starting at position 202 SEQ ID NO: 3178
cuuugacuguugucacuca

SEQ ID NO: 246979 - RNA, 19 nt, Artificial Sequence
  Description of Artificial Sequence: Synthetic oligonucleotide
  Antisense strand to SEQ ID NO: 246978
ugagugacaacagucaaag

SEQ ID NO: 246980 - RNA, 19 nt, Artificial Sequence
  Description of Artificial Sequence: Synthetic oligonucleotide
  Sense strand starting at position 336 SEQ ID NO: 3178
ccagcugugagucaguauu

SEQ ID NO: 246981 - RNA, 19 nt, Artificial Sequence
  Description of Artificial Sequence: Synthetic oligonucleotide
  Antisense strand to SEQ ID NO: 246980
aauacugacucacagcugg

SEQ ID NO: 246982 - RNA, 19 nt, Artificial Sequence
  Description of Artificial Sequence: Synthetic oligonucleotide
  Sense strand starting at position 443 SEQ ID NO: 3178
cagggaugcuacuugagau

SEQ ID NO: 246983 - RNA, 19 nt, Artificial Sequence
  Description of Artificial Sequence: Synthetic oligonucleotide
  Antisense strand to SEQ ID NO: 246982
aucucaaguagcaucccug

SEQ ID NO: 246984 - RNA, 19 nt, Artificial Sequence
  Description of Artificial Sequence: Synthetic oligonucleotide
  Sense strand starting at position 444 SEQ ID NO: 3178
agggaugcuacuugagaug

SEQ ID NO: 246985 - RNA, 19 nt, Artificial Sequence
  Description of Artificial Sequence: Synthetic oligonucleotide
  Antisense strand to SEQ ID NO: 246984
caucucaaguagcaucccu

SEQ ID NO: 246986 - RNA, 19 nt, Artificial Sequence
  Description of Artificial Sequence: Synthetic oligonucleotide
  Sense strand starting at position 455 SEQ ID NO: 3178
uugagauguucagguggac

SEQ ID NO: 246987 - RNA, 19 nt, Artificial Sequence
  Description of Artificial Sequence: Synthetic oligonucleotide
  Antisense strand to SEQ ID NO: 246986
guccaccugaacaucucaa

SEQ ID NO: 246988 - RNA, 19 nt, Artificial Sequence
  Description of Artificial Sequence: Synthetic oligonucleotide
  Sense strand starting at position 458 SEQ ID NO: 3178
agauguucagguggacaca

SEQ ID NO: 246989 - RNA, 19 nt, Artificial Sequence
  Description of Artificial Sequence: Synthetic oligonucleotide
  Antisense strand to SEQ ID NO: 246988
uguguccaccugaacaucu

SEQ ID NO: 246990 - RNA, 19 nt, Artificial Sequence
  Description of Artificial Sequence: Synthetic oligonucleotide
  Sense strand starting at position 702 SEQ ID NO: 3178
ggaggaguugauggugaca

SEQ ID NO: 246991 - RNA, 19 nt, Artificial Sequence
  Description of Artificial Sequence: Synthetic oligonucleotide
  Antisense strand to SEQ ID NO: 246990
ugucaccaucaacuccucc

SEQ ID NO: 246992 - RNA, 19 nt, Artificial Sequence
  Description of Artificial Sequence: Synthetic oligonucleotide
  Sense strand starting at position 704 SEQ ID NO: 3178
aggaguugauggugacaga

SEQ ID NO: 246993 - RNA, 19 nt, Artificial Sequence
  Description of Artificial Sequence: Synthetic oligonucleotide
  Antisense strand to SEQ ID NO: 246992
ucugucaccaucaacuccu

SEQ ID NO: 246994 - RNA, 19 nt, Artificial Sequence
  Description of Artificial Sequence: Synthetic oligonucleotide
  Sense strand starting at position 807 SEQ ID NO: 3178
gugacuuccucugcucuca

SEQ ID NO: 246995 - RNA, 19 nt, Artificial Sequence
  Description of Artificial Sequence: Synthetic oligonucleotide
  Antisense strand to SEQ ID NO: 246994
ugagagcagaggaagucac

SEQ ID NO: 246996 - RNA, 19 nt, Artificial Sequence
  Description of Artificial Sequence: Synthetic oligonucleotide
  Sense strand starting at position 833 SEQ ID NO: 3178
gaaagcagcuucugacuga

SEQ ID NO: 246997 - RNA, 19 nt, Artificial Sequence
  Description of Artificial Sequence: Synthetic oligonucleotide
  Antisense strand to SEQ ID NO: 246996
ucagucagaagcugcuuuc

SEQ ID NO: 246998 - RNA, 19 nt, Artificial Sequence
  Description of Artificial Sequence: Synthetic oligonucleotide
  Sense strand starting at position 851 SEQ ID NO: 3178
aauggaaaguccuuucuug

SEQ ID NO: 246999 - RNA, 19 nt, Artificial Sequence
  Description of Artificial Sequence: Synthetic oligonucleotide
  Antisense strand to SEQ ID NO: 246998
caagaaaggacuuuccauu

SEQ ID NO: 247000 - RNA, 19 nt, Artificial Sequence
  Description of Artificial Sequence: Synthetic oligonucleotide
  Sense strand starting at position 884 SEQ ID NO: 3178
auauucuuggcucgccaaa

SEQ ID NO: 247001 - RNA, 19 nt, Artificial Sequence
  Description of Artificial Sequence: Synthetic oligonucleotide
  Antisense strand to SEQ ID NO: 247000
uuuggcgagccaagaauau

SEQ ID NO: 247002 - RNA, 19 nt, Artificial Sequence
  Description of Artificial Sequence: Synthetic oligonucleotide
  Sense strand starting at position 886 SEQ ID NO: 3178
auucuuggcucgccaaaca

SEQ ID NO: 247003 - RNA, 19 nt, Artificial Sequence
  Description of Artificial Sequence: Synthetic oligonucleotide
  Antisense strand to SEQ ID NO: 247002
uguuuggcgagccaagaau

SEQ ID NO: 247004 - RNA, 19 nt, Artificial Sequence
  Description of Artificial Sequence: Synthetic oligonucleotide
  Sense strand starting at position 976 SEQ ID NO: 3178
ggguuucugagcugggcau

SEQ ID NO: 247005 - RNA, 19 nt, Artificial Sequence
  Description of Artificial Sequence: Synthetic oligonucleotide
  Antisense strand to SEQ ID NO: 247004
augcccagcucagaaaccc

SEQ ID NO: 247006 - RNA, 19 nt, Artificial Sequence
  Description of Artificial Sequence: Synthetic oligonucleotide
  Sense strand starting at position 989 SEQ ID NO: 3178
gggcaucuuugagcugauc

SEQ ID NO: 247007 - RNA, 19 nt, Artificial Sequence
  Description of Artificial Sequence: Synthetic oligonucleotide
  Antisense strand to SEQ ID NO: 247006
gaucagcucaaagaugccc

SEQ ID NO: 247008 - RNA, 19 nt, Artificial Sequence
  Description of Artificial Sequence: Synthetic oligonucleotide
  Sense strand starting at position 998 SEQ ID NO: 3178
ugagcugaucucuaacaca

SEQ ID NO: 247009 - RNA, 19 nt, Artificial Sequence
  Description of Artificial Sequence: Synthetic oligonucleotide
  Antisense strand to SEQ ID NO: 247008
uguguuagagaucagcuca

SEQ ID NO: 247010 - RNA, 19 nt, Artificial Sequence
  Description of Artificial Sequence: Synthetic oligonucleotide
  Sense strand starting at position 1147 SEQ ID NO: 3178
cagagugguucugacagcu

SEQ ID NO: 247011 - RNA, 19 nt, Artificial Sequence
  Description of Artificial Sequence: Synthetic oligonucleotide
  Antisense strand to SEQ ID NO: 247010
agcugucagaaccacucug

SEQ ID NO: 247012 - RNA, 19 nt, Artificial Sequence
  Description of Artificial Sequence: Synthetic oligonucleotide
  Sense strand starting at position 1239 SEQ ID NO: 3178
aagugugcaugucagauca

SEQ ID NO: 247013 - RNA, 19 nt, Artificial Sequence
  Description of Artificial Sequence: Synthetic oligonucleotide
  Antisense strand to SEQ ID NO: 247012
ugaucugacaugcacacuu

SEQ ID NO: 247014 - RNA, 19 nt, Artificial Sequence
  Description of Artificial Sequence: Synthetic oligonucleotide
  Sense strand starting at position 1241 SEQ ID NO: 3178
gugugcaugucagaucacu

SEQ ID NO: 247015 - RNA, 19 nt, Artificial Sequence
  Description of Artificial Sequence: Synthetic oligonucleotide
  Antisense strand to SEQ ID NO: 247014
agugaucugacaugcacac

SEQ ID NO: 247016 - RNA, 19 nt, Artificial Sequence
  Description of Artificial Sequence: Synthetic oligonucleotide
  Sense strand starting at position 1259 SEQ ID NO: 3178
ucuguccugugacauaaga

SEQ ID NO: 247017 - RNA, 19 nt, Artificial Sequence
  Description of Artificial Sequence: Synthetic oligonucleotide
  Antisense strand to SEQ ID NO: 247016
ucuuaugucacaggacaga

SEQ ID NO: 247018 - RNA, 19 nt, Artificial Sequence
  Description of Artificial Sequence: Synthetic oligonucleotide
  Sense strand starting at position 1341 SEQ ID NO: 3178
gcagguuguacucacagca

SEQ ID NO: 247019 - RNA, 19 nt, Artificial Sequence
  Description of Artificial Sequence: Synthetic oligonucleotide
  Antisense strand to SEQ ID NO: 247018
ugcugugaguacaaccugc

SEQ ID NO: 247020 - RNA, 19 nt, Artificial Sequence
  Description of Artificial Sequence: Synthetic oligonucleotide
  Sense strand starting at position 2228 SEQ ID NO: 3178
aagugauggcucugugacc

SEQ ID NO: 247021 - RNA, 19 nt, Artificial Sequence
  Description of Artificial Sequence: Synthetic oligonucleotide
  Antisense strand to SEQ ID NO: 247020
ggucacagagccaucacuu

SEQ ID NO: 247022 - RNA, 19 nt, Artificial Sequence
  Description of Artificial Sequence: Synthetic oligonucleotide
  Sense strand starting at position 2353 SEQ ID NO: 3178
gccguuuacagcgggaaca

SEQ ID NO: 247023 - RNA, 19 nt, Artificial Sequence
  Description of Artificial Sequence: Synthetic oligonucleotide
  Antisense strand to SEQ ID NO: 247022
uguucccgcuguaaacggc

SEQ ID NO: 247024 - RNA, 19 nt, Artificial Sequence
  Description of Artificial Sequence: Synthetic oligonucleotide
  Sense strand starting at position 2354 SEQ ID NO: 3178
ccguuuacagcgggaacau

SEQ ID NO: 247025 - RNA, 19 nt, Artificial Sequence
  Description of Artificial Sequence: Synthetic oligonucleotide
  Antisense strand to SEQ ID NO: 247024
auguucccgcuguaaacgg

SEQ ID NO: 247026 - RNA, 19 nt, Artificial Sequence
  Description of Artificial Sequence: Synthetic oligonucleotide
  Sense strand starting at position 2355 SEQ ID NO: 3178
cguuuacagcgggaacaua

SEQ ID NO: 247027 - RNA, 19 nt, Artificial Sequence
  Description of Artificial Sequence: Synthetic oligonucleotide
  Antisense strand to SEQ ID NO: 247026
uauguucccgcuguaaacg

SEQ ID NO: 247028 - RNA, 19 nt, Artificial Sequence
  Description of Artificial Sequence: Synthetic oligonucleotide
  Sense strand starting at position 2484 SEQ ID NO: 3178
ugcugaguccugcgucuca

SEQ ID NO: 247029 - RNA, 19 nt, Artificial Sequence
  Description of Artificial Sequence: Synthetic oligonucleotide
  Antisense strand to SEQ ID NO: 247028
ugagacgcaggacucagca

SEQ ID NO: 247030 - RNA, 19 nt, Artificial Sequence
  Description of Artificial Sequence: Synthetic oligonucleotide
  Sense strand starting at position 2610 SEQ ID NO: 3178
agucauuucugagggcucu

SEQ ID NO: 247031 - RNA, 19 nt, Artificial Sequence
  Description of Artificial Sequence: Synthetic oligonucleotide
  Antisense strand to SEQ ID NO: 247030
agagcccucagaaaugacu

SEQ ID NO: 247032 - RNA, 19 nt, Artificial Sequence
  Description of Artificial Sequence: Synthetic oligonucleotide
  Sense strand starting at position 2832 SEQ ID NO: 3178
gugggaaccuggucaaguu

SEQ ID NO: 247033 - RNA, 19 nt, Artificial Sequence
  Description of Artificial Sequence: Synthetic oligonucleotide
  Antisense strand to SEQ ID NO: 247032
aacuugaccagguucccac

SEQ ID NO: 247034 - RNA, 19 nt, Artificial Sequence
  Description of Artificial Sequence: Synthetic oligonucleotide
  Sense strand starting at position 2842 SEQ ID NO: 3178
ggucaaguuucuucucucu

SEQ ID NO: 247035 - RNA, 19 nt, Artificial Sequence
  Description of Artificial Sequence: Synthetic oligonucleotide
  Antisense strand to SEQ ID NO: 247034
agagagaagaaacuugacc

SEQ ID NO: 247036 - RNA, 19 nt, Artificial Sequence
  Description of Artificial Sequence: Synthetic oligonucleotide
  Sense strand starting at position 2867 SEQ ID NO: 3178
cuugguuucuucuugucua

SEQ ID NO: 247037 - RNA, 19 nt, Artificial Sequence
  Description of Artificial Sequence: Synthetic oligonucleotide
  Antisense strand to SEQ ID NO: 247036
uagacaagaagaaaccaag

SEQ ID NO: 247038 - RNA, 19 nt, Artificial Sequence
  Description of Artificial Sequence: Synthetic oligonucleotide
  Sense strand starting at position 2868 SEQ ID NO: 3178
uugguuucuucuugucuaa

SEQ ID NO: 247039 - RNA, 19 nt, Artificial Sequence
  Description of Artificial Sequence: Synthetic oligonucleotide
  Antisense strand to SEQ ID NO: 247038
uuagacaagaagaaaccaa

SEQ ID NO: 247040 - RNA, 19 nt, Artificial Sequence
  Description of Artificial Sequence: Synthetic oligonucleotide
  Sense strand starting at position 2870 SEQ ID NO: 3178
gguuucuucuugucuaacu

SEQ ID NO: 247041 - RNA, 19 nt, Artificial Sequence
  Description of Artificial Sequence: Synthetic oligonucleotide
  Antisense strand to SEQ ID NO: 247040
aguuagacaagaagaaacc

SEQ ID NO: 247042 - RNA, 19 nt, Artificial Sequence
  Description of Artificial Sequence: Synthetic oligonucleotide
  Sense strand starting at position 2871 SEQ ID NO: 3178
guuucuucuugucuaacuu

SEQ ID NO: 247043 - RNA, 19 nt, Artificial Sequence
  Description of Artificial Sequence: Synthetic oligonucleotide
  Antisense strand to SEQ ID NO: 247042
aaguuagacaagaagaaac

SEQ ID NO: 247044 - RNA, 19 nt, Artificial Sequence
  Description of Artificial Sequence: Synthetic oligonucleotide
  Sense strand starting at position 2928 SEQ ID NO: 3178
gggcucaacaugugucaca

SEQ ID NO: 247045 - RNA, 19 nt, Artificial Sequence
  Description of Artificial Sequence: Synthetic oligonucleotide
  Antisense strand to SEQ ID NO: 247044
ugugacacauguugagccc

SEQ ID NO: 247046 - RNA, 19 nt, Artificial Sequence
  Description of Artificial Sequence: Synthetic oligonucleotide
  Sense strand starting at position 2945 SEQ ID NO: 3178
cacugaugguugucccaga

SEQ ID NO: 247047 - RNA, 19 nt, Artificial Sequence
  Description of Artificial Sequence: Synthetic oligonucleotide
  Antisense strand to SEQ ID NO: 247046
ucugggacaaccaucagug

SEQ ID NO: 247048 - RNA, 19 nt, Artificial Sequence
  Description of Artificial Sequence: Synthetic oligonucleotide
  Sense strand starting at position 2946 SEQ ID NO: 3178
acugaugguugucccagaa

SEQ ID NO: 247049 - RNA, 19 nt, Artificial Sequence
  Description of Artificial Sequence: Synthetic oligonucleotide
  Antisense strand to SEQ ID NO: 247048
uucugggacaaccaucagu

SEQ ID NO: 247050 - RNA, 19 nt, Artificial Sequence
  Description of Artificial Sequence: Synthetic oligonucleotide
  Sense strand starting at position 3665 SEQ ID NO: 3178
uuuguaggucuccagucaa

SEQ ID NO: 247051 - RNA, 19 nt, Artificial Sequence
  Description of Artificial Sequence: Synthetic oligonucleotide
  Antisense strand to SEQ ID NO: 247050
uugacuggagaccuacaaa

SEQ ID NO: 247052 - RNA, 19 nt, Artificial Sequence
  Description of Artificial Sequence: Synthetic oligonucleotide
  Sense strand starting at position 3672 SEQ ID NO: 3178
gucuccagucaauauaaau

SEQ ID NO: 247053 - RNA, 19 nt, Artificial Sequence
  Description of Artificial Sequence: Synthetic oligonucleotide
  Antisense strand to SEQ ID NO: 247052
auuuauauugacuggagac

SEQ ID NO: 247054 - RNA, 19 nt, Artificial Sequence
  Description of Artificial Sequence: Synthetic oligonucleotide
  Sense strand starting at position 3717 SEQ ID NO: 3178
aacucaugugagggauagu

SEQ ID NO: 247055 - RNA, 19 nt, Artificial Sequence
  Description of Artificial Sequence: Synthetic oligonucleotide
  Antisense strand to SEQ ID NO: 247054
acuaucccucacaugaguu

SEQ ID NO: 247056 - RNA, 19 nt, Artificial Sequence
  Description of Artificial Sequence: Synthetic oligonucleotide
  Sense strand starting at position 3923 SEQ ID NO: 3178
ugugguacgugccuauaau

SEQ ID NO: 247057 - RNA, 19 nt, Artificial Sequence
  Description of Artificial Sequence: Synthetic oligonucleotide
  Antisense strand to SEQ ID NO: 247056
auuauaggcacguaccaca

SEQ ID NO: 247058 - RNA, 19 nt, Artificial Sequence
  Description of Artificial Sequence: Synthetic oligonucleotide
  Sense strand starting at position 14 SEQ ID NO: 3179
aguuauaagugauuaugag

SEQ ID NO: 247059 - RNA, 19 nt, Artificial Sequence
  Description of Artificial Sequence: Synthetic oligonucleotide
  Antisense strand to SEQ ID NO: 247058
cucauaaucacuuauaacu

SEQ ID NO: 247060 - RNA, 19 nt, Artificial Sequence
  Description of Artificial Sequence: Synthetic oligonucleotide
  Sense strand starting at position 15 SEQ ID NO: 3179
guuauaagugauuaugagc

SEQ ID NO: 247061 - RNA, 19 nt, Artificial Sequence
  Description of Artificial Sequence: Synthetic oligonucleotide
  Antisense strand to SEQ ID NO: 247060
gcucauaaucacuuauaac

SEQ ID NO: 247062 - RNA, 19 nt, Artificial Sequence
  Description of Artificial Sequence: Synthetic oligonucleotide
  Sense strand starting at position 56 SEQ ID NO: 3179
cauguuggccacugaaaca

SEQ ID NO: 247063 - RNA, 19 nt, Artificial Sequence
  Description of Artificial Sequence: Synthetic oligonucleotide
  Antisense strand to SEQ ID NO: 247062
uguuucaguggccaacaug

SEQ ID NO: 247064 - RNA, 19 nt, Artificial Sequence
  Description of Artificial Sequence: Synthetic oligonucleotide
  Sense strand starting at position 197 SEQ ID NO: 3179
uccaaugauuagccguaaa

SEQ ID NO: 247065 - RNA, 19 nt, Artificial Sequence
  Description of Artificial Sequence: Synthetic oligonucleotide
  Antisense strand to SEQ ID NO: 247064
uuuacggcuaaucauugga

SEQ ID NO: 247066 - RNA, 19 nt, Artificial Sequence
  Description of Artificial Sequence: Synthetic oligonucleotide
  Sense strand starting at position 263 SEQ ID NO: 3179
ggucacguaagcuacuaaa

SEQ ID NO: 247067 - RNA, 19 nt, Artificial Sequence
  Description of Artificial Sequence: Synthetic oligonucleotide
  Antisense strand to SEQ ID NO: 247066
uuuaguagcuuacgugacc

SEQ ID NO: 247068 - RNA, 19 nt, Artificial Sequence
  Description of Artificial Sequence: Synthetic oligonucleotide
  Sense strand starting at position 335 SEQ ID NO: 3179
agaauagcauucuugaaau

SEQ ID NO: 247069 - RNA, 19 nt, Artificial Sequence
  Description of Artificial Sequence: Synthetic oligonucleotide
  Antisense strand to SEQ ID NO: 247068
auuucaagaaugcuauucu

SEQ ID NO: 247070 - RNA, 19 nt, Artificial Sequence
  Description of Artificial Sequence: Synthetic oligonucleotide
  Sense strand starting at position 432 SEQ ID NO: 3179
acauguaucaugggcuaga

SEQ ID NO: 247071 - RNA, 19 nt, Artificial Sequence
  Description of Artificial Sequence: Synthetic oligonucleotide
  Antisense strand to SEQ ID NO: 247070
ucuagcccaugauacaugu

SEQ ID NO: 247072 - RNA, 19 nt, Artificial Sequence
  Description of Artificial Sequence: Synthetic oligonucleotide
  Sense strand starting at position 433 SEQ ID NO: 3179
cauguaucaugggcuagag

SEQ ID NO: 247073 - RNA, 19 nt, Artificial Sequence
  Description of Artificial Sequence: Synthetic oligonucleotide
  Antisense strand to SEQ ID NO: 247072
cucuagcccaugauacaug

SEQ ID NO: 247074 - RNA, 19 nt, Artificial Sequence
  Description of Artificial Sequence: Synthetic oligonucleotide
  Sense strand starting at position 441 SEQ ID NO: 3179
augggcuagagacguuaaa

SEQ ID NO: 247075 - RNA, 19 nt, Artificial Sequence
  Description of Artificial Sequence: Synthetic oligonucleotide
  Antisense strand to SEQ ID NO: 247074
uuuaacgucucuagcccau

SEQ ID NO: 247076 - RNA, 19 nt, Artificial Sequence
  Description of Artificial Sequence: Synthetic oligonucleotide
  Sense strand starting at position 543 SEQ ID NO: 3179
guaaguuagcugcauuuac

SEQ ID NO: 247077 - RNA, 19 nt, Artificial Sequence
  Description of Artificial Sequence: Synthetic oligonucleotide
  Antisense strand to SEQ ID NO: 247076
guaaaugcagcuaacuuac

SEQ ID NO: 247078 - RNA, 19 nt, Artificial Sequence
  Description of Artificial Sequence: Synthetic oligonucleotide
  Sense strand starting at position 614 SEQ ID NO: 3179
aucguuucgagauaaguuu

SEQ ID NO: 247079 - RNA, 19 nt, Artificial Sequence
  Description of Artificial Sequence: Synthetic oligonucleotide
  Antisense strand to SEQ ID NO: 247078
aaacuuaucucgaaacgau

SEQ ID NO: 247080 - RNA, 19 nt, Artificial Sequence
  Description of Artificial Sequence: Synthetic oligonucleotide
  Sense strand starting at position 621 SEQ ID NO: 3179
cgagauaaguuucugagaa

SEQ ID NO: 247081 - RNA, 19 nt, Artificial Sequence
  Description of Artificial Sequence: Synthetic oligonucleotide
  Antisense strand to SEQ ID NO: 247080
uucucagaaacuuaucucg

SEQ ID NO: 247082 - RNA, 19 nt, Artificial Sequence
  Description of Artificial Sequence: Synthetic oligonucleotide
  Sense strand starting at position 711 SEQ ID NO: 3179
acaguugucaguuaaacag

SEQ ID NO: 247083 - RNA, 19 nt, Artificial Sequence
  Description of Artificial Sequence: Synthetic oligonucleotide
  Antisense strand to SEQ ID NO: 247082
cuguuuaacugacaacugu

SEQ ID NO: 247084 - RNA, 19 nt, Artificial Sequence
  Description of Artificial Sequence: Synthetic oligonucleotide
  Sense strand starting at position 780 SEQ ID NO: 3179
gcagaugugaacugagaac

SEQ ID NO: 247085 - RNA, 19 nt, Artificial Sequence
  Description of Artificial Sequence: Synthetic oligonucleotide
  Antisense strand to SEQ ID NO: 247084
guucucaguucacaucugc

SEQ ID NO: 247086 - RNA, 19 nt, Artificial Sequence
  Description of Artificial Sequence: Synthetic oligonucleotide
  Sense strand starting at position 1230 SEQ ID NO: 3179
ggacaugggucauuaucac

SEQ ID NO: 247087 - RNA, 19 nt, Artificial Sequence
  Description of Artificial Sequence: Synthetic oligonucleotide
  Antisense strand to SEQ ID NO: 247086
gugauaaugacccaugucc

SEQ ID NO: 247088 - RNA, 19 nt, Artificial Sequence
  Description of Artificial Sequence: Synthetic oligonucleotide
  Sense strand starting at position 1236 SEQ ID NO: 3179
gggucauuaucacuuaagu

SEQ ID NO: 247089 - RNA, 19 nt, Artificial Sequence
  Description of Artificial Sequence: Synthetic oligonucleotide
  Antisense strand to SEQ ID NO: 247088
acuuaagugauaaugaccc

SEQ ID NO: 247090 - RNA, 19 nt, Artificial Sequence
  Description of Artificial Sequence: Synthetic oligonucleotide
  Sense strand starting at position 1464 SEQ ID NO: 3179
gcccuaucuccuuagugga

SEQ ID NO: 247091 - RNA, 19 nt, Artificial Sequence
  Description of Artificial Sequence: Synthetic oligonucleotide
  Antisense strand to SEQ ID NO: 247090
uccacuaaggagauagggc

SEQ ID NO: 247092 - RNA, 19 nt, Artificial Sequence
  Description of Artificial Sequence: Synthetic oligonucleotide
  Sense strand starting at position 1466 SEQ ID NO: 3179
ccuaucuccuuaguggauu

SEQ ID NO: 247093 - RNA, 19 nt, Artificial Sequence
  Description of Artificial Sequence: Synthetic oligonucleotide
  Antisense strand to SEQ ID NO: 247092
aauccacuaaggagauagg

SEQ ID NO: 247094 - RNA, 19 nt, Artificial Sequence
  Description of Artificial Sequence: Synthetic oligonucleotide
  Sense strand starting at position 1469 SEQ ID NO: 3179
aucuccuuaguggauuaua

SEQ ID NO: 247095 - RNA, 19 nt, Artificial Sequence
  Description of Artificial Sequence: Synthetic oligonucleotide
  Antisense strand to SEQ ID NO: 247094
uauaauccacuaaggagau

SEQ ID NO: 247096 - RNA, 19 nt, Artificial Sequence
  Description of Artificial Sequence: Synthetic oligonucleotide
  Sense strand starting at position 2251 SEQ ID NO: 3179
ggcggaguaaaggaaucau

SEQ ID NO: 247097 - RNA, 19 nt, Artificial Sequence
  Description of Artificial Sequence: Synthetic oligonucleotide
  Antisense strand to SEQ ID NO: 247096
augauuccuuuacuccgcc

SEQ ID NO: 247098 - RNA, 19 nt, Artificial Sequence
  Description of Artificial Sequence: Synthetic oligonucleotide
  Sense strand starting at position 2262 SEQ ID NO: 3179
ggaaucaugcacugauaca

SEQ ID NO: 247099 - RNA, 19 nt, Artificial Sequence
  Description of Artificial Sequence: Synthetic oligonucleotide
  Antisense strand to SEQ ID NO: 247098
uguaucagugcaugauucc

SEQ ID NO: 247100 - RNA, 19 nt, Artificial Sequence
  Description of Artificial Sequence: Synthetic oligonucleotide
  Sense strand starting at position 2361 SEQ ID NO: 3179
ggguacuucccgcagagga

SEQ ID NO: 247101 - RNA, 19 nt, Artificial Sequence
  Description of Artificial Sequence: Synthetic oligonucleotide
  Antisense strand to SEQ ID NO: 247100
uccucugcgggaaguaccc

SEQ ID NO: 247102 - RNA, 19 nt, Artificial Sequence
  Description of Artificial Sequence: Synthetic oligonucleotide
  Sense strand starting at position 2556 SEQ ID NO: 3179
agggcuuuauaaguuuaca

SEQ ID NO: 247103 - RNA, 19 nt, Artificial Sequence
  Description of Artificial Sequence: Synthetic oligonucleotide
  Antisense strand to SEQ ID NO: 247102
uguaaacuuauaaagcccu

SEQ ID NO: 247104 - RNA, 19 nt, Artificial Sequence
  Description of Artificial Sequence: Synthetic oligonucleotide
  Sense strand starting at position 2674 SEQ ID NO: 3179
ccaaacagaucuuugcaga

SEQ ID NO: 247105 - RNA, 19 nt, Artificial Sequence
  Description of Artificial Sequence: Synthetic oligonucleotide
  Antisense strand to SEQ ID NO: 247104
ucugcaaagaucuguuugg

SEQ ID NO: 247106 - RNA, 19 nt, Artificial Sequence
  Description of Artificial Sequence: Synthetic oligonucleotide
  Sense strand starting at position 2752 SEQ ID NO: 3179
cauauaagugccgaaaggu

SEQ ID NO: 247107 - RNA, 19 nt, Artificial Sequence
  Description of Artificial Sequence: Synthetic oligonucleotide
  Antisense strand to SEQ ID NO: 247106
accuuucggcacuuauaug

SEQ ID NO: 247108 - RNA, 19 nt, Artificial Sequence
  Description of Artificial Sequence: Synthetic oligonucleotide
  Sense strand starting at position 3156 SEQ ID NO: 3179
auaaucucucuugagugua

SEQ ID NO: 247109 - RNA, 19 nt, Artificial Sequence
  Description of Artificial Sequence: Synthetic oligonucleotide
  Antisense strand to SEQ ID NO: 247108
uacacucaagagagauuau

SEQ ID NO: 247110 - RNA, 19 nt, Artificial Sequence
  Description of Artificial Sequence: Synthetic oligonucleotide
  Sense strand starting at position 3168 SEQ ID NO: 3179
gaguguauuaguuauugag

SEQ ID NO: 247111 - RNA, 19 nt, Artificial Sequence
  Description of Artificial Sequence: Synthetic oligonucleotide
  Antisense strand to SEQ ID NO: 247110
cucaauaacuaauacacuc

SEQ ID NO: 247112 - RNA, 19 nt, Artificial Sequence
  Description of Artificial Sequence: Synthetic oligonucleotide
  Sense strand starting at position 3232 SEQ ID NO: 3179
guaagauuacaauggacuu

SEQ ID NO: 247113 - RNA, 19 nt, Artificial Sequence
  Description of Artificial Sequence: Synthetic oligonucleotide
  Antisense strand to SEQ ID NO: 247112
aaguccauuguaaucuuac

SEQ ID NO: 247114 - RNA, 19 nt, Artificial Sequence
  Description of Artificial Sequence: Synthetic oligonucleotide
  Sense strand starting at position 3242 SEQ ID NO: 3179
aauggacuugaauguucua

SEQ ID NO: 247115 - RNA, 19 nt, Artificial Sequence
  Description of Artificial Sequence: Synthetic oligonucleotide
  Antisense strand to SEQ ID NO: 247114
uagaacauucaaguccauu

SEQ ID NO: 247116 - RNA, 19 nt, Artificial Sequence
  Description of Artificial Sequence: Synthetic oligonucleotide
  Sense strand starting at position 3245 SEQ ID NO: 3179
ggacuugaauguucuagau

SEQ ID NO: 247117 - RNA, 19 nt, Artificial Sequence
  Description of Artificial Sequence: Synthetic oligonucleotide
  Antisense strand to SEQ ID NO: 247116
aucuagaacauucaagucc

SEQ ID NO: 247118 - RNA, 19 nt, Artificial Sequence
  Description of Artificial Sequence: Synthetic oligonucleotide
  Sense strand starting at position 3261 SEQ ID NO: 3179
gaugaaaucugggccgaga

SEQ ID NO: 247119 - RNA, 19 nt, Artificial Sequence
  Description of Artificial Sequence: Synthetic oligonucleotide
  Antisense strand to SEQ ID NO: 247118
ucucggcccagauuucauc

SEQ ID NO: 247120 - RNA, 19 nt, Artificial Sequence
  Description of Artificial Sequence: Synthetic oligonucleotide
  Sense strand starting at position 3263 SEQ ID NO: 3179
ugaaaucugggccgagagu

SEQ ID NO: 247121 - RNA, 19 nt, Artificial Sequence
  Description of Artificial Sequence: Synthetic oligonucleotide
  Antisense strand to SEQ ID NO: 247120
acucucggcccagauuuca

SEQ ID NO: 247122 - RNA, 19 nt, Artificial Sequence
  Description of Artificial Sequence: Synthetic oligonucleotide
  Sense strand starting at position 3264 SEQ ID NO: 3179
gaaaucugggccgagagua

SEQ ID NO: 247123 - RNA, 19 nt, Artificial Sequence
  Description of Artificial Sequence: Synthetic oligonucleotide
  Antisense strand to SEQ ID NO: 247122
uacucucggcccagauuuc

SEQ ID NO: 247124 - RNA, 19 nt, Artificial Sequence
  Description of Artificial Sequence: Synthetic oligonucleotide
  Sense strand starting at position 3296 SEQ ID NO: 3179
uuuccaaaggacugucaga

SEQ ID NO: 247125 - RNA, 19 nt, Artificial Sequence
  Description of Artificial Sequence: Synthetic oligonucleotide
  Antisense strand to SEQ ID NO: 247124
ucugacaguccuuuggaaa

SEQ ID NO: 247126 - RNA, 19 nt, Artificial Sequence
  Description of Artificial Sequence: Synthetic oligonucleotide
  Sense strand starting at position 3303 SEQ ID NO: 3179
aggacugucagaugguaaa

SEQ ID NO: 247127 - RNA, 19 nt, Artificial Sequence
  Description of Artificial Sequence: Synthetic oligonucleotide
  Antisense strand to SEQ ID NO: 247126
uuuaccaucugacaguccu

SEQ ID NO: 247128 - RNA, 19 nt, Artificial Sequence
  Description of Artificial Sequence: Synthetic oligonucleotide
  Sense strand starting at position 3429 SEQ ID NO: 3179
aaauguuucuaggcaagua

SEQ ID NO: 247129 - RNA, 19 nt, Artificial Sequence
  Description of Artificial Sequence: Synthetic oligonucleotide
  Antisense strand to SEQ ID NO: 247128
uacuugccuagaaacauuu

SEQ ID NO: 247130 - RNA, 19 nt, Artificial Sequence
  Description of Artificial Sequence: Synthetic oligonucleotide
  Sense strand starting at position 3442 SEQ ID NO: 3179
caaguauuugcaugaugcu

SEQ ID NO: 247131 - RNA, 19 nt, Artificial Sequence
  Description of Artificial Sequence: Synthetic oligonucleotide
  Antisense strand to SEQ ID NO: 247130
agcaucaugcaaauacuug

SEQ ID NO: 247132 - RNA, 19 nt, Artificial Sequence
  Description of Artificial Sequence: Synthetic oligonucleotide
  Sense strand starting at position 3546 SEQ ID NO: 3179
guaagaaagaucugggcca

SEQ ID NO: 247133 - RNA, 19 nt, Artificial Sequence
  Description of Artificial Sequence: Synthetic oligonucleotide
  Antisense strand to SEQ ID NO: 247132
uggcccagaucuuucuuac

SEQ ID NO: 247134 - RNA, 19 nt, Artificial Sequence
  Description of Artificial Sequence: Synthetic oligonucleotide
  Sense strand starting at position 3635 SEQ ID NO: 3179
auguucugacaucauguau

SEQ ID NO: 247135 - RNA, 19 nt, Artificial Sequence
  Description of Artificial Sequence: Synthetic oligonucleotide
  Antisense strand to SEQ ID NO: 247134
auacaugaugucagaacau

SEQ ID NO: 247136 - RNA, 19 nt, Artificial Sequence
  Description of Artificial Sequence: Synthetic oligonucleotide
  Sense strand starting at position 3934 SEQ ID NO: 3179
ugucuucuuugaccagauu

SEQ ID NO: 247137 - RNA, 19 nt, Artificial Sequence
  Description of Artificial Sequence: Synthetic oligonucleotide
  Antisense strand to SEQ ID NO: 247136
aaucuggucaaagaagaca

SEQ ID NO: 247138 - RNA, 19 nt, Artificial Sequence
  Description of Artificial Sequence: Synthetic oligonucleotide
  Sense strand starting at position 45 SEQ ID NO: 3181
ugcucaaguugcuuuguga

SEQ ID NO: 247139 - RNA, 19 nt, Artificial Sequence
  Description of Artificial Sequence: Synthetic oligonucleotide
  Antisense strand to SEQ ID NO: 247138
ucacaaagcaacuugagca

SEQ ID NO: 247140 - RNA, 19 nt, Artificial Sequence
  Description of Artificial Sequence: Synthetic oligonucleotide
  Sense strand starting at position 52 SEQ ID NO: 3181
guugcuuugugagcuuaau

SEQ ID NO: 247141 - RNA, 19 nt, Artificial Sequence
  Description of Artificial Sequence: Synthetic oligonucleotide
  Antisense strand to SEQ ID NO: 247140
auuaagcucacaaagcaac

SEQ ID NO: 247142 - RNA, 19 nt, Artificial Sequence
  Description of Artificial Sequence: Synthetic oligonucleotide
  Sense strand starting at position 58 SEQ ID NO: 3181
uugugagcuuaauaggauu

SEQ ID NO: 247143 - RNA, 19 nt, Artificial Sequence
  Description of Artificial Sequence: Synthetic oligonucleotide
  Antisense strand to SEQ ID NO: 247142
aauccuauuaagcucacaa

SEQ ID NO: 247144 - RNA, 19 nt, Artificial Sequence
  Description of Artificial Sequence: Synthetic oligonucleotide
  Sense strand starting at position 307 SEQ ID NO: 3181
ccaagaagaugcucaguaa

SEQ ID NO: 247145 - RNA, 19 nt, Artificial Sequence
  Description of Artificial Sequence: Synthetic oligonucleotide
  Antisense strand to SEQ ID NO: 247144
uuacugagcaucuucuugg

SEQ ID NO: 247146 - RNA, 19 nt, Artificial Sequence
  Description of Artificial Sequence: Synthetic oligonucleotide
  Sense strand starting at position 336 SEQ ID NO: 3181
gcagcacaggccugauuaa

SEQ ID NO: 247147 - RNA, 19 nt, Artificial Sequence
  Description of Artificial Sequence: Synthetic oligonucleotide
  Antisense strand to SEQ ID NO: 247146
uuaaucaggccugugcugc

SEQ ID NO: 247148 - RNA, 19 nt, Artificial Sequence
  Description of Artificial Sequence: Synthetic oligonucleotide
  Sense strand starting at position 531 SEQ ID NO: 3181
gcuuauaaauggcaugacu

SEQ ID NO: 247149 - RNA, 19 nt, Artificial Sequence
  Description of Artificial Sequence: Synthetic oligonucleotide
  Antisense strand to SEQ ID NO: 247148
agucaugccauuuauaagc

SEQ ID NO: 247150 - RNA, 19 nt, Artificial Sequence
  Description of Artificial Sequence: Synthetic oligonucleotide
  Sense strand starting at position 984 SEQ ID NO: 3181
guggaagccacaugaaauc

SEQ ID NO: 247151 - RNA, 19 nt, Artificial Sequence
  Description of Artificial Sequence: Synthetic oligonucleotide
  Antisense strand to SEQ ID NO: 247150
gauuucauguggcuuccac

SEQ ID NO: 247152 - RNA, 19 nt, Artificial Sequence
  Description of Artificial Sequence: Synthetic oligonucleotide
  Sense strand starting at position 1018 SEQ ID NO: 3181
cuagaaugcuagguacaga

SEQ ID NO: 247153 - RNA, 19 nt, Artificial Sequence
  Description of Artificial Sequence: Synthetic oligonucleotide
  Antisense strand to SEQ ID NO: 247152
ucuguaccuagcauucuag

SEQ ID NO: 247154 - RNA, 19 nt, Artificial Sequence
  Description of Artificial Sequence: Synthetic oligonucleotide
  Sense strand starting at position 1058 SEQ ID NO: 3181
aucugcuccugucuaaaga

SEQ ID NO: 247155 - RNA, 19 nt, Artificial Sequence
  Description of Artificial Sequence: Synthetic oligonucleotide
  Antisense strand to SEQ ID NO: 247154
ucuuuagacaggagcagau

SEQ ID NO: 247156 - RNA, 19 nt, Artificial Sequence
  Description of Artificial Sequence: Synthetic oligonucleotide
  Sense strand starting at position 1450 SEQ ID NO: 3181
agcauuaaguuuguacaau

SEQ ID NO: 247157 - RNA, 19 nt, Artificial Sequence
  Description of Artificial Sequence: Synthetic oligonucleotide
  Antisense strand to SEQ ID NO: 247156
auuguacaaacuuaaugcu

SEQ ID NO: 247158 - RNA, 19 nt, Artificial Sequence
  Description of Artificial Sequence: Synthetic oligonucleotide
  Sense strand starting at position 1451 SEQ ID NO: 3181
gcauuaaguuuguacaaua

SEQ ID NO: 247159 - RNA, 19 nt, Artificial Sequence
  Description of Artificial Sequence: Synthetic oligonucleotide
  Antisense strand to SEQ ID NO: 247158
uauuguacaaacuuaaugc

SEQ ID NO: 247160 - RNA, 19 nt, Artificial Sequence
  Description of Artificial Sequence: Synthetic oligonucleotide
  Sense strand starting at position 1542 SEQ ID NO: 3181
gcaagagaucucggguuga

SEQ ID NO: 247161 - RNA, 19 nt, Artificial Sequence
  Description of Artificial Sequence: Synthetic oligonucleotide
  Antisense strand to SEQ ID NO: 247160
ucaacccgagaucucuugc

SEQ ID NO: 247162 - RNA, 19 nt, Artificial Sequence
  Description of Artificial Sequence: Synthetic oligonucleotide
  Sense strand starting at position 1546 SEQ ID NO: 3181
gagaucucggguugaagag

SEQ ID NO: 247163 - RNA, 19 nt, Artificial Sequence
  Description of Artificial Sequence: Synthetic oligonucleotide
  Antisense strand to SEQ ID NO: 247162
cucuucaacccgagaucuc

SEQ ID NO: 247164 - RNA, 19 nt, Artificial Sequence
  Description of Artificial Sequence: Synthetic oligonucleotide
  Sense strand starting at position 1913 SEQ ID NO: 3181
cacggaucccugcaucauu

SEQ ID NO: 247165 - RNA, 19 nt, Artificial Sequence
  Description of Artificial Sequence: Synthetic oligonucleotide
  Antisense strand to SEQ ID NO: 247164
aaugaugcagggauccgug

SEQ ID NO: 247166 - RNA, 19 nt, Artificial Sequence
  Description of Artificial Sequence: Synthetic oligonucleotide
  Sense strand starting at position 1938 SEQ ID NO: 3181
uuuccucagcgcugagaga

SEQ ID NO: 247167 - RNA, 19 nt, Artificial Sequence
  Description of Artificial Sequence: Synthetic oligonucleotide
  Antisense strand to SEQ ID NO: 247166
ucucucagcgcugaggaaa

SEQ ID NO: 247168 - RNA, 19 nt, Artificial Sequence
  Description of Artificial Sequence: Synthetic oligonucleotide
  Sense strand starting at position 2240 SEQ ID NO: 3181
ucauaagagcauugaugag

SEQ ID NO: 247169 - RNA, 19 nt, Artificial Sequence
  Description of Artificial Sequence: Synthetic oligonucleotide
  Antisense strand to SEQ ID NO: 247168
cucaucaaugcucuuauga

SEQ ID NO: 247170 - RNA, 19 nt, Artificial Sequence
  Description of Artificial Sequence: Synthetic oligonucleotide
  Sense strand starting at position 2315 SEQ ID NO: 3181
cagcauaguugugcaacua

SEQ ID NO: 247171 - RNA, 19 nt, Artificial Sequence
  Description of Artificial Sequence: Synthetic oligonucleotide
  Antisense strand to SEQ ID NO: 247170
uaguugcacaacuaugcug

SEQ ID NO: 247172 - RNA, 19 nt, Artificial Sequence
  Description of Artificial Sequence: Synthetic oligonucleotide
  Sense strand starting at position 2598 SEQ ID NO: 3181
uugcuaaguuuccuuugua

SEQ ID NO: 247173 - RNA, 19 nt, Artificial Sequence
  Description of Artificial Sequence: Synthetic oligonucleotide
  Antisense strand to SEQ ID NO: 247172
uacaaaggaaacuuagcaa

SEQ ID NO: 247174 - RNA, 19 nt, Artificial Sequence
  Description of Artificial Sequence: Synthetic oligonucleotide
  Sense strand starting at position 2599 SEQ ID NO: 3181
ugcuaaguuuccuuuguac

SEQ ID NO: 247175 - RNA, 19 nt, Artificial Sequence
  Description of Artificial Sequence: Synthetic oligonucleotide
  Antisense strand to SEQ ID NO: 247174
guacaaaggaaacuuagca

SEQ ID NO: 247176 - RNA, 19 nt, Artificial Sequence
  Description of Artificial Sequence: Synthetic oligonucleotide
  Sense strand starting at position 2601 SEQ ID NO: 3181
cuaaguuuccuuuguacag

SEQ ID NO: 247177 - RNA, 19 nt, Artificial Sequence
  Description of Artificial Sequence: Synthetic oligonucleotide
  Antisense strand to SEQ ID NO: 247176
cuguacaaaggaaacuuag

SEQ ID NO: 247178 - RNA, 19 nt, Artificial Sequence
  Description of Artificial Sequence: Synthetic oligonucleotide
  Sense strand starting at position 2678 SEQ ID NO: 3181
uucuuugcugcugugagua

SEQ ID NO: 247179 - RNA, 19 nt, Artificial Sequence
  Description of Artificial Sequence: Synthetic oligonucleotide
  Antisense strand to SEQ ID NO: 247178
uacucacagcagcaaagaa

SEQ ID NO: 247180 - RNA, 19 nt, Artificial Sequence
  Description of Artificial Sequence: Synthetic oligonucleotide
  Sense strand starting at position 2706 SEQ ID NO: 3181
gaagcauuccugugcgagu

SEQ ID NO: 247181 - RNA, 19 nt, Artificial Sequence
  Description of Artificial Sequence: Synthetic oligonucleotide
  Antisense strand to SEQ ID NO: 247180
acucgcacaggaaugcuuc

SEQ ID NO: 247182 - RNA, 19 nt, Artificial Sequence
  Description of Artificial Sequence: Synthetic oligonucleotide
  Sense strand starting at position 2707 SEQ ID NO: 3181
aagcauuccugugcgaguu

SEQ ID NO: 247183 - RNA, 19 nt, Artificial Sequence
  Description of Artificial Sequence: Synthetic oligonucleotide
  Antisense strand to SEQ ID NO: 247182
aacucgcacaggaaugcuu

SEQ ID NO: 247184 - RNA, 19 nt, Artificial Sequence
  Description of Artificial Sequence: Synthetic oligonucleotide
  Sense strand starting at position 2708 SEQ ID NO: 3181
agcauuccugugcgaguuu

SEQ ID NO: 247185 - RNA, 19 nt, Artificial Sequence
  Description of Artificial Sequence: Synthetic oligonucleotide
  Antisense strand to SEQ ID NO: 247184
aaacucgcacaggaaugcu

SEQ ID NO: 247186 - RNA, 19 nt, Artificial Sequence
  Description of Artificial Sequence: Synthetic oligonucleotide
  Sense strand starting at position 2717 SEQ ID NO: 3181
gugcgaguuucugcgugga

SEQ ID NO: 247187 - RNA, 19 nt, Artificial Sequence
  Description of Artificial Sequence: Synthetic oligonucleotide
  Antisense strand to SEQ ID NO: 247186
uccacgcagaaacucgcac

SEQ ID NO: 247188 - RNA, 19 nt, Artificial Sequence
  Description of Artificial Sequence: Synthetic oligonucleotide
  Sense strand starting at position 2718 SEQ ID NO: 3181
ugcgaguuucugcguggaa

SEQ ID NO: 247189 - RNA, 19 nt, Artificial Sequence
  Description of Artificial Sequence: Synthetic oligonucleotide
  Antisense strand to SEQ ID NO: 247188
uuccacgcagaaacucgca

SEQ ID NO: 247190 - RNA, 19 nt, Artificial Sequence
  Description of Artificial Sequence: Synthetic oligonucleotide
  Sense strand starting at position 2719 SEQ ID NO: 3181
gcgaguuucugcguggaaa

SEQ ID NO: 247191 - RNA, 19 nt, Artificial Sequence
  Description of Artificial Sequence: Synthetic oligonucleotide
  Antisense strand to SEQ ID NO: 247190
uuuccacgcagaaacucgc

SEQ ID NO: 247192 - RNA, 19 nt, Artificial Sequence
  Description of Artificial Sequence: Synthetic oligonucleotide
  Sense strand starting at position 2720 SEQ ID NO: 3181
cgaguuucugcguggaaau

SEQ ID NO: 247193 - RNA, 19 nt, Artificial Sequence
  Description of Artificial Sequence: Synthetic oligonucleotide
  Antisense strand to SEQ ID NO: 247192
auuuccacgcagaaacucg

SEQ ID NO: 247194 - RNA, 19 nt, Artificial Sequence
  Description of Artificial Sequence: Synthetic oligonucleotide
  Sense strand starting at position 2721 SEQ ID NO: 3181
gaguuucugcguggaaaua

SEQ ID NO: 247195 - RNA, 19 nt, Artificial Sequence
  Description of Artificial Sequence: Synthetic oligonucleotide
  Antisense strand to SEQ ID NO: 247194
uauuuccacgcagaaacuc

SEQ ID NO: 247196 - RNA, 19 nt, Artificial Sequence
  Description of Artificial Sequence: Synthetic oligonucleotide
  Sense strand starting at position 2722 SEQ ID NO: 3181
aguuucugcguggaaauau

SEQ ID NO: 247197 - RNA, 19 nt, Artificial Sequence
  Description of Artificial Sequence: Synthetic oligonucleotide
  Antisense strand to SEQ ID NO: 247196
auauuuccacgcagaaacu

SEQ ID NO: 247198 - RNA, 19 nt, Artificial Sequence
  Description of Artificial Sequence: Synthetic oligonucleotide
  Sense strand starting at position 2731 SEQ ID NO: 3181
guggaaauaugucuuuauu

SEQ ID NO: 247199 - RNA, 19 nt, Artificial Sequence
  Description of Artificial Sequence: Synthetic oligonucleotide
  Antisense strand to SEQ ID NO: 247198
aauaaagacauauuuccac

SEQ ID NO: 247200 - RNA, 19 nt, Artificial Sequence
  Description of Artificial Sequence: Synthetic oligonucleotide
  Sense strand starting at position 3148 SEQ ID NO: 3181
ugaagaagggcauguuuga

SEQ ID NO: 247201 - RNA, 19 nt, Artificial Sequence
  Description of Artificial Sequence: Synthetic oligonucleotide
  Antisense strand to SEQ ID NO: 247200
ucaaacaugcccuucuuca

SEQ ID NO: 247202 - RNA, 19 nt, Artificial Sequence
  Description of Artificial Sequence: Synthetic oligonucleotide
  Sense strand starting at position 3174 SEQ ID NO: 3181
ugcugucaugauuguaagu

SEQ ID NO: 247203 - RNA, 19 nt, Artificial Sequence
  Description of Artificial Sequence: Synthetic oligonucleotide
  Antisense strand to SEQ ID NO: 247202
acuuacaaucaugacagca

SEQ ID NO: 247204 - RNA, 19 nt, Artificial Sequence
  Description of Artificial Sequence: Synthetic oligonucleotide
  Sense strand starting at position 3310 SEQ ID NO: 3181
gaacaacaggugugaaagu

SEQ ID NO: 247205 - RNA, 19 nt, Artificial Sequence
  Description of Artificial Sequence: Synthetic oligonucleotide
  Antisense strand to SEQ ID NO: 247204
acuuucacaccuguuguuc

SEQ ID NO: 247206 - RNA, 19 nt, Artificial Sequence
  Description of Artificial Sequence: Synthetic oligonucleotide
  Sense strand starting at position 3319 SEQ ID NO: 3181
gugugaaaguguuccugga

SEQ ID NO: 247207 - RNA, 19 nt, Artificial Sequence
  Description of Artificial Sequence: Synthetic oligonucleotide
  Antisense strand to SEQ ID NO: 247206
uccaggaacacuuucacac

SEQ ID NO: 247208 - RNA, 19 nt, Artificial Sequence
  Description of Artificial Sequence: Synthetic oligonucleotide
  Sense strand starting at position 3482 SEQ ID NO: 3181
gacugaauaugacaguuaa

SEQ ID NO: 247209 - RNA, 19 nt, Artificial Sequence
  Description of Artificial Sequence: Synthetic oligonucleotide
  Antisense strand to SEQ ID NO: 247208
uuaacugucauauucaguc

SEQ ID NO: 247210 - RNA, 19 nt, Artificial Sequence
  Description of Artificial Sequence: Synthetic oligonucleotide
  Sense strand starting at position 3503 SEQ ID NO: 3181
agaccagacuguuauuucu

SEQ ID NO: 247211 - RNA, 19 nt, Artificial Sequence
  Description of Artificial Sequence: Synthetic oligonucleotide
  Antisense strand to SEQ ID NO: 247210
agaaauaacagucuggucu

SEQ ID NO: 247212 - RNA, 19 nt, Artificial Sequence
  Description of Artificial Sequence: Synthetic oligonucleotide
  Sense strand starting at position 3719 SEQ ID NO: 3181
gccuucuugcucuacggaa

SEQ ID NO: 247213 - RNA, 19 nt, Artificial Sequence
  Description of Artificial Sequence: Synthetic oligonucleotide
  Antisense strand to SEQ ID NO: 247212
uuccguagagcaagaaggc

SEQ ID NO: 247214 - RNA, 19 nt, Artificial Sequence
  Description of Artificial Sequence: Synthetic oligonucleotide
  Sense strand starting at position 3737 SEQ ID NO: 3181
aggccugucucugcucaga

SEQ ID NO: 247215 - RNA, 19 nt, Artificial Sequence
  Description of Artificial Sequence: Synthetic oligonucleotide
  Antisense strand to SEQ ID NO: 247214
ucugagcagagacaggccu

SEQ ID NO: 247216 - RNA, 19 nt, Artificial Sequence
  Description of Artificial Sequence: Synthetic oligonucleotide
  Sense strand starting at position 3739 SEQ ID NO: 3181
gccugucucugcucagaag

SEQ ID NO: 247217 - RNA, 19 nt, Artificial Sequence
  Description of Artificial Sequence: Synthetic oligonucleotide
  Antisense strand to SEQ ID NO: 247216
cuucugagcagagacaggc

SEQ ID NO: 247218 - RNA, 19 nt, Artificial Sequence
  Description of Artificial Sequence: Synthetic oligonucleotide
  Sense strand starting at position 452 SEQ ID NO: 3180
uugaguaagucuuucuauc

SEQ ID NO: 247219 - RNA, 19 nt, Artificial Sequence
  Description of Artificial Sequence: Synthetic oligonucleotide
  Antisense strand to SEQ ID NO: 247218
gauagaaagacuuacucaa

SEQ ID NO: 247220 - RNA, 19 nt, Artificial Sequence
  Description of Artificial Sequence: Synthetic oligonucleotide
  Sense strand starting at position 495 SEQ ID NO: 3180
ugucaaggucacuggugaa

SEQ ID NO: 247221 - RNA, 19 nt, Artificial Sequence
  Description of Artificial Sequence: Synthetic oligonucleotide
  Antisense strand to SEQ ID NO: 247220
uucaccagugaccuugaca

SEQ ID NO: 247222 - RNA, 19 nt, Artificial Sequence
  Description of Artificial Sequence: Synthetic oligonucleotide
  Sense strand starting at position 588 SEQ ID NO: 3180
agaaguuacuucuccugga

SEQ ID NO: 247223 - RNA, 19 nt, Artificial Sequence
  Description of Artificial Sequence: Synthetic oligonucleotide
  Antisense strand to SEQ ID NO: 247222
uccaggagaaguaacuucu

SEQ ID NO: 247224 - RNA, 19 nt, Artificial Sequence
  Description of Artificial Sequence: Synthetic oligonucleotide
  Sense strand starting at position 589 SEQ ID NO: 3180
gaaguuacuucuccuggaa

SEQ ID NO: 247225 - RNA, 19 nt, Artificial Sequence
  Description of Artificial Sequence: Synthetic oligonucleotide
  Antisense strand to SEQ ID NO: 247224
uuccaggagaaguaacuuc

SEQ ID NO: 247226 - RNA, 19 nt, Artificial Sequence
  Description of Artificial Sequence: Synthetic oligonucleotide
  Sense strand starting at position 592 SEQ ID NO: 3180
guuacuucuccuggaaaca

SEQ ID NO: 247227 - RNA, 19 nt, Artificial Sequence
  Description of Artificial Sequence: Synthetic oligonucleotide
  Antisense strand to SEQ ID NO: 247226
uguuuccaggagaaguaac

SEQ ID NO: 247228 - RNA, 19 nt, Artificial Sequence
  Description of Artificial Sequence: Synthetic oligonucleotide
  Sense strand starting at position 639 SEQ ID NO: 3180
cauggaucaugucuuugau

SEQ ID NO: 247229 - RNA, 19 nt, Artificial Sequence
  Description of Artificial Sequence: Synthetic oligonucleotide
  Antisense strand to SEQ ID NO: 247228
aucaaagacaugauccaug

SEQ ID NO: 247230 - RNA, 19 nt, Artificial Sequence
  Description of Artificial Sequence: Synthetic oligonucleotide
  Sense strand starting at position 641 SEQ ID NO: 3180
uggaucaugucuuugauuc

SEQ ID NO: 247231 - RNA, 19 nt, Artificial Sequence
  Description of Artificial Sequence: Synthetic oligonucleotide
  Antisense strand to SEQ ID NO: 247230
gaaucaaagacaugaucca

SEQ ID NO: 247232 - RNA, 19 nt, Artificial Sequence
  Description of Artificial Sequence: Synthetic oligonucleotide
  Sense strand starting at position 642 SEQ ID NO: 3180
ggaucaugucuuugauucc

SEQ ID NO: 247233 - RNA, 19 nt, Artificial Sequence
  Description of Artificial Sequence: Synthetic oligonucleotide
  Antisense strand to SEQ ID NO: 247232
ggaaucaaagacaugaucc

SEQ ID NO: 247234 - RNA, 19 nt, Artificial Sequence
  Description of Artificial Sequence: Synthetic oligonucleotide
  Sense strand starting at position 966 SEQ ID NO: 3180
gaauacagggcacguaaua

SEQ ID NO: 247235 - RNA, 19 nt, Artificial Sequence
  Description of Artificial Sequence: Synthetic oligonucleotide
  Antisense strand to SEQ ID NO: 247234
uauuacgugcccuguauuc

SEQ ID NO: 247236 - RNA, 19 nt, Artificial Sequence
  Description of Artificial Sequence: Synthetic oligonucleotide
  Sense strand starting at position 1125 SEQ ID NO: 3180
cugugaagcgguuagaaca

SEQ ID NO: 247237 - RNA, 19 nt, Artificial Sequence
  Description of Artificial Sequence: Synthetic oligonucleotide
  Antisense strand to SEQ ID NO: 247236
uguucuaaccgcuucacag

SEQ ID NO: 247238 - RNA, 19 nt, Artificial Sequence
  Description of Artificial Sequence: Synthetic oligonucleotide
  Sense strand starting at position 1164 SEQ ID NO: 3180
guaauaccuguuggaaauu

SEQ ID NO: 247239 - RNA, 19 nt, Artificial Sequence
  Description of Artificial Sequence: Synthetic oligonucleotide
  Antisense strand to SEQ ID NO: 247238
aauuuccaacagguauuac

SEQ ID NO: 247240 - RNA, 19 nt, Artificial Sequence
  Description of Artificial Sequence: Synthetic oligonucleotide
  Sense strand starting at position 1175 SEQ ID NO: 3180
uggaaauuauucuuacgaa

SEQ ID NO: 247241 - RNA, 19 nt, Artificial Sequence
  Description of Artificial Sequence: Synthetic oligonucleotide
  Antisense strand to SEQ ID NO: 247240
uucguaagaauaauuucca

SEQ ID NO: 247242 - RNA, 19 nt, Artificial Sequence
  Description of Artificial Sequence: Synthetic oligonucleotide
  Sense strand starting at position 1212 SEQ ID NO: 3180
ugugcaagugcuguguaaa

SEQ ID NO: 247243 - RNA, 19 nt, Artificial Sequence
  Description of Artificial Sequence: Synthetic oligonucleotide
  Antisense strand to SEQ ID NO: 247242
uuuacacagcacuugcaca

SEQ ID NO: 247244 - RNA, 19 nt, Artificial Sequence
  Description of Artificial Sequence: Synthetic oligonucleotide
  Sense strand starting at position 1288 SEQ ID NO: 3180
agcaaaugucaauaaugcu

SEQ ID NO: 247245 - RNA, 19 nt, Artificial Sequence
  Description of Artificial Sequence: Synthetic oligonucleotide
  Antisense strand to SEQ ID NO: 247244
agcauuauugacauuugcu

SEQ ID NO: 247246 - RNA, 19 nt, Artificial Sequence
  Description of Artificial Sequence: Synthetic oligonucleotide
  Sense strand starting at position 1337 SEQ ID NO: 3180
ggaccuagguguuuccaca

SEQ ID NO: 247247 - RNA, 19 nt, Artificial Sequence
  Description of Artificial Sequence: Synthetic oligonucleotide
  Antisense strand to SEQ ID NO: 247246
uguggaaacaccuaggucc

SEQ ID NO: 247248 - RNA, 19 nt, Artificial Sequence
  Description of Artificial Sequence: Synthetic oligonucleotide
  Sense strand starting at position 1361 SEQ ID NO: 3180
ccguauuuguuaccgugaa

SEQ ID NO: 247249 - RNA, 19 nt, Artificial Sequence
  Description of Artificial Sequence: Synthetic oligonucleotide
  Antisense strand to SEQ ID NO: 247248
uucacgguaacaaauacgg

SEQ ID NO: 247250 - RNA, 19 nt, Artificial Sequence
  Description of Artificial Sequence: Synthetic oligonucleotide
  Sense strand starting at position 1502 SEQ ID NO: 3180
gggagaucuaaguguauga

SEQ ID NO: 247251 - RNA, 19 nt, Artificial Sequence
  Description of Artificial Sequence: Synthetic oligonucleotide
  Antisense strand to SEQ ID NO: 247250
ucauacacuuagaucuccc

SEQ ID NO: 247252 - RNA, 19 nt, Artificial Sequence
  Description of Artificial Sequence: Synthetic oligonucleotide
  Sense strand starting at position 1544 SEQ ID NO: 3180
auacucuaucccgaggcau

SEQ ID NO: 247253 - RNA, 19 nt, Artificial Sequence
  Description of Artificial Sequence: Synthetic oligonucleotide
  Antisense strand to SEQ ID NO: 247252
augccucgggauagaguau

SEQ ID NO: 247254 - RNA, 19 nt, Artificial Sequence
  Description of Artificial Sequence: Synthetic oligonucleotide
  Sense strand starting at position 1546 SEQ ID NO: 3180
acucuaucccgaggcauau

SEQ ID NO: 247255 - RNA, 19 nt, Artificial Sequence
  Description of Artificial Sequence: Synthetic oligonucleotide
  Antisense strand to SEQ ID NO: 247254
auaugccucgggauagagu

SEQ ID NO: 247256 - RNA, 19 nt, Artificial Sequence
  Description of Artificial Sequence: Synthetic oligonucleotide
  Sense strand starting at position 1714 SEQ ID NO: 3180
ucacuuacgcguucgacau

SEQ ID NO: 247257 - RNA, 19 nt, Artificial Sequence
  Description of Artificial Sequence: Synthetic oligonucleotide
  Antisense strand to SEQ ID NO: 247256
augucgaacgcguaaguga

SEQ ID NO: 247258 - RNA, 19 nt, Artificial Sequence
  Description of Artificial Sequence: Synthetic oligonucleotide
  Sense strand starting at position 1865 SEQ ID NO: 3180
aaaccaggacugcgagaau

SEQ ID NO: 247259 - RNA, 19 nt, Artificial Sequence
  Description of Artificial Sequence: Synthetic oligonucleotide
  Antisense strand to SEQ ID NO: 247258
auucucgcaguccugguuu

SEQ ID NO: 247260 - RNA, 19 nt, Artificial Sequence
  Description of Artificial Sequence: Synthetic oligonucleotide
  Sense strand starting at position 1868 SEQ ID NO: 3180
ccaggacugcgagaaucuu

SEQ ID NO: 247261 - RNA, 19 nt, Artificial Sequence
  Description of Artificial Sequence: Synthetic oligonucleotide
  Antisense strand to SEQ ID NO: 247260
aagauucucgcaguccugg

SEQ ID NO: 247262 - RNA, 19 nt, Artificial Sequence
  Description of Artificial Sequence: Synthetic oligonucleotide
  Sense strand starting at position 1885 SEQ ID NO: 3180
uucugcuucgggcaggaaa

SEQ ID NO: 247263 - RNA, 19 nt, Artificial Sequence
  Description of Artificial Sequence: Synthetic oligonucleotide
  Antisense strand to SEQ ID NO: 247262
uuuccugcccgaagcagaa

SEQ ID NO: 247264 - RNA, 19 nt, Artificial Sequence
  Description of Artificial Sequence: Synthetic oligonucleotide
  Sense strand starting at position 2293 SEQ ID NO: 3180
gggcaaggcccuuaaugau

SEQ ID NO: 247265 - RNA, 19 nt, Artificial Sequence
  Description of Artificial Sequence: Synthetic oligonucleotide
  Antisense strand to SEQ ID NO: 247264
aucauuaagggccuugccc

SEQ ID NO: 247266 - RNA, 19 nt, Artificial Sequence
  Description of Artificial Sequence: Synthetic oligonucleotide
  Sense strand starting at position 2332 SEQ ID NO: 3180
ucuguaaacuggguauaac

SEQ ID NO: 247267 - RNA, 19 nt, Artificial Sequence
  Description of Artificial Sequence: Synthetic oligonucleotide
  Antisense strand to SEQ ID NO: 247266
guuauacccaguuuacaga

SEQ ID NO: 247268 - RNA, 19 nt, Artificial Sequence
  Description of Artificial Sequence: Synthetic oligonucleotide
  Sense strand starting at position 2343 SEQ ID NO: 3180
gguauaacagucguucguu

SEQ ID NO: 247269 - RNA, 19 nt, Artificial Sequence
  Description of Artificial Sequence: Synthetic oligonucleotide
  Antisense strand to SEQ ID NO: 247268
aacgaacgacuguuauacc

SEQ ID NO: 247270 - RNA, 19 nt, Artificial Sequence
  Description of Artificial Sequence: Synthetic oligonucleotide
  Sense strand starting at position 2472 SEQ ID NO: 3180
gggugcguuguaaauguaa

SEQ ID NO: 247271 - RNA, 19 nt, Artificial Sequence
  Description of Artificial Sequence: Synthetic oligonucleotide
  Antisense strand to SEQ ID NO: 247270
uuacauuuacaacgcaccc

SEQ ID NO: 247272 - RNA, 19 nt, Artificial Sequence
  Description of Artificial Sequence: Synthetic oligonucleotide
  Sense strand starting at position 2527 SEQ ID NO: 3180
ucgcuaugaguguuggcuu

SEQ ID NO: 247273 - RNA, 19 nt, Artificial Sequence
  Description of Artificial Sequence: Synthetic oligonucleotide
  Antisense strand to SEQ ID NO: 247272
aagccaacacucauagcga

SEQ ID NO: 247274 - RNA, 19 nt, Artificial Sequence
  Description of Artificial Sequence: Synthetic oligonucleotide
  Sense strand starting at position 2569 SEQ ID NO: 3180
uuaguaacuguugagguuu

SEQ ID NO: 247275 - RNA, 19 nt, Artificial Sequence
  Description of Artificial Sequence: Synthetic oligonucleotide
  Antisense strand to SEQ ID NO: 247274
aaaccucaacaguuacuaa

SEQ ID NO: 247276 - RNA, 19 nt, Artificial Sequence
  Description of Artificial Sequence: Synthetic oligonucleotide
  Sense strand starting at position 2617 SEQ ID NO: 3180
auuggaacgccagguuuaa

SEQ ID NO: 247277 - RNA, 19 nt, Artificial Sequence
  Description of Artificial Sequence: Synthetic oligonucleotide
  Antisense strand to SEQ ID NO: 247276
uuaaaccuggcguuccaau

SEQ ID NO: 247278 - RNA, 19 nt, Artificial Sequence
  Description of Artificial Sequence: Synthetic oligonucleotide
  Sense strand starting at position 2852 SEQ ID NO: 3180
ggagaaugguguccagccu

SEQ ID NO: 247279 - RNA, 19 nt, Artificial Sequence
  Description of Artificial Sequence: Synthetic oligonucleotide
  Antisense strand to SEQ ID NO: 247278
aggcuggacaccauucucc

SEQ ID NO: 247280 - RNA, 19 nt, Artificial Sequence
  Description of Artificial Sequence: Synthetic oligonucleotide
  Sense strand starting at position 3089 SEQ ID NO: 3180
gagaaaucuccagggcuug

SEQ ID NO: 247281 - RNA, 19 nt, Artificial Sequence
  Description of Artificial Sequence: Synthetic oligonucleotide
  Antisense strand to SEQ ID NO: 247280
caagcccuggagauuucuc

SEQ ID NO: 247282 - RNA, 19 nt, Artificial Sequence
  Description of Artificial Sequence: Synthetic oligonucleotide
  Sense strand starting at position 3178 SEQ ID NO: 3180
gggcacacucgugacaaga

SEQ ID NO: 247283 - RNA, 19 nt, Artificial Sequence
  Description of Artificial Sequence: Synthetic oligonucleotide
  Antisense strand to SEQ ID NO: 247282
ucuugucacgagugugccc

SEQ ID NO: 247284 - RNA, 19 nt, Artificial Sequence
  Description of Artificial Sequence: Synthetic oligonucleotide
  Sense strand starting at position 3253 SEQ ID NO: 3180
ggaaguuguguggauucaa

SEQ ID NO: 247285 - RNA, 19 nt, Artificial Sequence
  Description of Artificial Sequence: Synthetic oligonucleotide
  Antisense strand to SEQ ID NO: 247284
uugaauccacacaacuucc

SEQ ID NO: 247286 - RNA, 19 nt, Artificial Sequence
  Description of Artificial Sequence: Synthetic oligonucleotide
  Sense strand starting at position 3272 SEQ ID NO: 3180
gggagcaguccuuauccua

SEQ ID NO: 247287 - RNA, 19 nt, Artificial Sequence
  Description of Artificial Sequence: Synthetic oligonucleotide
  Antisense strand to SEQ ID NO: 247286
uaggauaaggacugcuccc

SEQ ID NO: 247288 - RNA, 19 nt, Artificial Sequence
  Description of Artificial Sequence: Synthetic oligonucleotide
  Sense strand starting at position 3373 SEQ ID NO: 3180
agagaauucgcccacauua

SEQ ID NO: 247289 - RNA, 19 nt, Artificial Sequence
  Description of Artificial Sequence: Synthetic oligonucleotide
  Antisense strand to SEQ ID NO: 247288
uaaugugggcgaauucucu

SEQ ID NO: 247290 - RNA, 19 nt, Artificial Sequence
  Description of Artificial Sequence: Synthetic oligonucleotide
  Sense strand starting at position 3375 SEQ ID NO: 3180
agaauucgcccacauuaua

SEQ ID NO: 247291 - RNA, 19 nt, Artificial Sequence
  Description of Artificial Sequence: Synthetic oligonucleotide
  Antisense strand to SEQ ID NO: 247290
uauaaugugggcgaauucu

SEQ ID NO: 247292 - RNA, 19 nt, Artificial Sequence
  Description of Artificial Sequence: Synthetic oligonucleotide
  Sense strand starting at position 3424 SEQ ID NO: 3180
acacguguuaaauaggaau

SEQ ID NO: 247293 - RNA, 19 nt, Artificial Sequence
  Description of Artificial Sequence: Synthetic oligonucleotide
  Antisense strand to SEQ ID NO: 247292
auuccuauuuaacacgugu

SEQ ID NO: 247294 - RNA, 19 nt, Artificial Sequence
  Description of Artificial Sequence: Synthetic oligonucleotide
  Sense strand starting at position 3426 SEQ ID NO: 3180
acguguuaaauaggaauaa

SEQ ID NO: 247295 - RNA, 19 nt, Artificial Sequence
  Description of Artificial Sequence: Synthetic oligonucleotide
  Antisense strand to SEQ ID NO: 247294
uuauuccuauuuaacacgu

SEQ ID NO: 247296 - RNA, 19 nt, Artificial Sequence
  Description of Artificial Sequence: Synthetic oligonucleotide
  Sense strand starting at position 3908 SEQ ID NO: 3180
ugcuccaugcuauagaaua

SEQ ID NO: 247297 - RNA, 19 nt, Artificial Sequence
  Description of Artificial Sequence: Synthetic oligonucleotide
  Antisense strand to SEQ ID NO: 247296
uauucuauagcauggagca

SEQ ID NO: 247298 - RNA, 19 nt, Artificial Sequence
  Description of Artificial Sequence: Synthetic oligonucleotide
  Sense strand starting at position 280 SEQ ID NO: 3182
caggcaucaucucugugua

SEQ ID NO: 247299 - RNA, 19 nt, Artificial Sequence
  Description of Artificial Sequence: Synthetic oligonucleotide
  Antisense strand to SEQ ID NO: 247298
uacacagagaugaugccug

SEQ ID NO: 247300 - RNA, 19 nt, Artificial Sequence
  Description of Artificial Sequence: Synthetic oligonucleotide
  Sense strand starting at position 282 SEQ ID NO: 3182
ggcaucaucucuguguacu

SEQ ID NO: 247301 - RNA, 19 nt, Artificial Sequence
  Description of Artificial Sequence: Synthetic oligonucleotide
  Antisense strand to SEQ ID NO: 247300
aguacacagagaugaugcc

SEQ ID NO: 247302 - RNA, 19 nt, Artificial Sequence
  Description of Artificial Sequence: Synthetic oligonucleotide
  Sense strand starting at position 283 SEQ ID NO: 3182
gcaucaucucuguguacuc

SEQ ID NO: 247303 - RNA, 19 nt, Artificial Sequence
  Description of Artificial Sequence: Synthetic oligonucleotide
  Antisense strand to SEQ ID NO: 247302
gaguacacagagaugaugc

SEQ ID NO: 247304 - RNA, 19 nt, Artificial Sequence
  Description of Artificial Sequence: Synthetic oligonucleotide
  Sense strand starting at position 288 SEQ ID NO: 3182
aucucuguguacuccucaa

SEQ ID NO: 247305 - RNA, 19 nt, Artificial Sequence
  Description of Artificial Sequence: Synthetic oligonucleotide
  Antisense strand to SEQ ID NO: 247304
uugaggaguacacagagau

SEQ ID NO: 247306 - RNA, 19 nt, Artificial Sequence
  Description of Artificial Sequence: Synthetic oligonucleotide
  Sense strand starting at position 292 SEQ ID NO: 3182
cuguguacuccucaaugga

SEQ ID NO: 247307 - RNA, 19 nt, Artificial Sequence
  Description of Artificial Sequence: Synthetic oligonucleotide
  Antisense strand to SEQ ID NO: 247306
uccauugaggaguacacag

SEQ ID NO: 247308 - RNA, 19 nt, Artificial Sequence
  Description of Artificial Sequence: Synthetic oligonucleotide
  Sense strand starting at position 331 SEQ ID NO: 3182
gggucuucugguggguaau

SEQ ID NO: 247309 - RNA, 19 nt, Artificial Sequence
  Description of Artificial Sequence: Synthetic oligonucleotide
  Antisense strand to SEQ ID NO: 247308
auuacccaccagaagaccc

SEQ ID NO: 247310 - RNA, 19 nt, Artificial Sequence
  Description of Artificial Sequence: Synthetic oligonucleotide
  Sense strand starting at position 374 SEQ ID NO: 3182
aguucucuuucggaaccga

SEQ ID NO: 247311 - RNA, 19 nt, Artificial Sequence
  Description of Artificial Sequence: Synthetic oligonucleotide
  Antisense strand to SEQ ID NO: 247310
ucgguuccgaaagagaacu

SEQ ID NO: 247312 - RNA, 19 nt, Artificial Sequence
  Description of Artificial Sequence: Synthetic oligonucleotide
  Sense strand starting at position 549 SEQ ID NO: 3182
cagauauaguugcuuagcu

SEQ ID NO: 247313 - RNA, 19 nt, Artificial Sequence
  Description of Artificial Sequence: Synthetic oligonucleotide
  Antisense strand to SEQ ID NO: 247312
agcuaagcaacuauaucug

SEQ ID NO: 247314 - RNA, 19 nt, Artificial Sequence
  Description of Artificial Sequence: Synthetic oligonucleotide
  Sense strand starting at position 654 SEQ ID NO: 3182
ccauacucauccgaggaga

SEQ ID NO: 247315 - RNA, 19 nt, Artificial Sequence
  Description of Artificial Sequence: Synthetic oligonucleotide
  Antisense strand to SEQ ID NO: 247314
ucuccucggaugaguaugg

SEQ ID NO: 247316 - RNA, 19 nt, Artificial Sequence
  Description of Artificial Sequence: Synthetic oligonucleotide
  Sense strand starting at position 656 SEQ ID NO: 3182
auacucauccgaggagaug

SEQ ID NO: 247317 - RNA, 19 nt, Artificial Sequence
  Description of Artificial Sequence: Synthetic oligonucleotide
  Antisense strand to SEQ ID NO: 247316
caucuccucggaugaguau

SEQ ID NO: 247318 - RNA, 19 nt, Artificial Sequence
  Description of Artificial Sequence: Synthetic oligonucleotide
  Sense strand starting at position 1153 SEQ ID NO: 3182
ggcggaacucaucacucau

SEQ ID NO: 247319 - RNA, 19 nt, Artificial Sequence
  Description of Artificial Sequence: Synthetic oligonucleotide
  Antisense strand to SEQ ID NO: 247318
augagugaugaguuccgcc

SEQ ID NO: 247320 - RNA, 19 nt, Artificial Sequence
  Description of Artificial Sequence: Synthetic oligonucleotide
  Sense strand starting at position 1186 SEQ ID NO: 3182
ccaggauggucucgugcau

SEQ ID NO: 247321 - RNA, 19 nt, Artificial Sequence
  Description of Artificial Sequence: Synthetic oligonucleotide
  Antisense strand to SEQ ID NO: 247320
augcacgagaccauccugg

SEQ ID NO: 247322 - RNA, 19 nt, Artificial Sequence
  Description of Artificial Sequence: Synthetic oligonucleotide
  Sense strand starting at position 1703 SEQ ID NO: 3182
gugcuuguucuuggaguca

SEQ ID NO: 247323 - RNA, 19 nt, Artificial Sequence
  Description of Artificial Sequence: Synthetic oligonucleotide
  Antisense strand to SEQ ID NO: 247322
ugacuccaagaacaagcac

SEQ ID NO: 247324 - RNA, 19 nt, Artificial Sequence
  Description of Artificial Sequence: Synthetic oligonucleotide
  Sense strand starting at position 1723 SEQ ID NO: 3182
cccgcuuguugauguugaa

SEQ ID NO: 247325 - RNA, 19 nt, Artificial Sequence
  Description of Artificial Sequence: Synthetic oligonucleotide
  Antisense strand to SEQ ID NO: 247324
uucaacaucaacaagcggg

SEQ ID NO: 247326 - RNA, 19 nt, Artificial Sequence
  Description of Artificial Sequence: Synthetic oligonucleotide
  Sense strand starting at position 1726 SEQ ID NO: 3182
gcuuguugauguugaagca

SEQ ID NO: 247327 - RNA, 19 nt, Artificial Sequence
  Description of Artificial Sequence: Synthetic oligonucleotide
  Antisense strand to SEQ ID NO: 247326
ugcuucaacaucaacaagc

SEQ ID NO: 247328 - RNA, 19 nt, Artificial Sequence
  Description of Artificial Sequence: Synthetic oligonucleotide
  Sense strand starting at position 1792 SEQ ID NO: 3182
acuucuucucguucucgua

SEQ ID NO: 247329 - RNA, 19 nt, Artificial Sequence
  Description of Artificial Sequence: Synthetic oligonucleotide
  Antisense strand to SEQ ID NO: 247328
uacgagaacgagaagaagu

SEQ ID NO: 247330 - RNA, 19 nt, Artificial Sequence
  Description of Artificial Sequence: Synthetic oligonucleotide
  Sense strand starting at position 1858 SEQ ID NO: 3182
cgaagaagcguuugugcau

SEQ ID NO: 247331 - RNA, 19 nt, Artificial Sequence
  Description of Artificial Sequence: Synthetic oligonucleotide
  Antisense strand to SEQ ID NO: 247330
augcacaaacgcuucuucg

SEQ ID NO: 247332 - RNA, 19 nt, Artificial Sequence
  Description of Artificial Sequence: Synthetic oligonucleotide
  Sense strand starting at position 2396 SEQ ID NO: 3182
agcgauucccgaggcaaau

SEQ ID NO: 247333 - RNA, 19 nt, Artificial Sequence
  Description of Artificial Sequence: Synthetic oligonucleotide
  Antisense strand to SEQ ID NO: 247332
auuugccucgggaaucgcu

SEQ ID NO: 247334 - RNA, 19 nt, Artificial Sequence
  Description of Artificial Sequence: Synthetic oligonucleotide
  Sense strand starting at position 2398 SEQ ID NO: 3182
cgauucccgaggcaaauua

SEQ ID NO: 247335 - RNA, 19 nt, Artificial Sequence
  Description of Artificial Sequence: Synthetic oligonucleotide
  Antisense strand to SEQ ID NO: 247334
uaauuugccucgggaaucg

SEQ ID NO: 247336 - RNA, 19 nt, Artificial Sequence
  Description of Artificial Sequence: Synthetic oligonucleotide
  Sense strand starting at position 2413 SEQ ID NO: 3182
auuaaauauccuugggcag

SEQ ID NO: 247337 - RNA, 19 nt, Artificial Sequence
  Description of Artificial Sequence: Synthetic oligonucleotide
  Antisense strand to SEQ ID NO: 247336
cugcccaaggauauuuaau

SEQ ID NO: 247338 - RNA, 19 nt, Artificial Sequence
  Description of Artificial Sequence: Synthetic oligonucleotide
  Sense strand starting at position 2969 SEQ ID NO: 3182
gucucacucggaggagaaa

SEQ ID NO: 247339 - RNA, 19 nt, Artificial Sequence
  Description of Artificial Sequence: Synthetic oligonucleotide
  Antisense strand to SEQ ID NO: 247338
uuucuccuccgagugagac

SEQ ID NO: 247340 - RNA, 19 nt, Artificial Sequence
  Description of Artificial Sequence: Synthetic oligonucleotide
  Sense strand starting at position 3420 SEQ ID NO: 3182
ucuuaccuaucagguaaga

SEQ ID NO: 247341 - RNA, 19 nt, Artificial Sequence
  Description of Artificial Sequence: Synthetic oligonucleotide
  Antisense strand to SEQ ID NO: 247340
ucuuaccugauagguaaga

SEQ ID NO: 247342 - RNA, 19 nt, Artificial Sequence
  Description of Artificial Sequence: Synthetic oligonucleotide
  Sense strand starting at position 3450 SEQ ID NO: 3182
gagggagguuucuagucaa

SEQ ID NO: 247343 - RNA, 19 nt, Artificial Sequence
  Description of Artificial Sequence: Synthetic oligonucleotide
  Antisense strand to SEQ ID NO: 247342
uugacuagaaaccucccuc

SEQ ID NO: 247344 - RNA, 19 nt, Artificial Sequence
  Description of Artificial Sequence: Synthetic oligonucleotide
  Sense strand starting at position 3454 SEQ ID NO: 3182
gagguuucuagucaaggcu

SEQ ID NO: 247345 - RNA, 19 nt, Artificial Sequence
  Description of Artificial Sequence: Synthetic oligonucleotide
  Antisense strand to SEQ ID NO: 247344
agccuugacuagaaaccuc

SEQ ID NO: 247346 - RNA, 19 nt, Artificial Sequence
  Description of Artificial Sequence: Synthetic oligonucleotide
  Sense strand starting at position 3657 SEQ ID NO: 3182
ggcaguuauggucacuaca

SEQ ID NO: 247347 - RNA, 19 nt, Artificial Sequence
  Description of Artificial Sequence: Synthetic oligonucleotide
  Antisense strand to SEQ ID NO: 247346
uguagugaccauaacugcc

SEQ ID NO: 247348 - RNA, 19 nt, Artificial Sequence
  Description of Artificial Sequence: Synthetic oligonucleotide
  Sense strand starting at position 3719 SEQ ID NO: 3182
uguggaauuaguugcugau

SEQ ID NO: 247349 - RNA, 19 nt, Artificial Sequence
  Description of Artificial Sequence: Synthetic oligonucleotide
  Antisense strand to SEQ ID NO: 247348
aucagcaacuaauuccaca

SEQ ID NO: 247350 - RNA, 19 nt, Artificial Sequence
  Description of Artificial Sequence: Synthetic oligonucleotide
  Sense strand starting at position 3721 SEQ ID NO: 3182
uggaauuaguugcugauca

SEQ ID NO: 247351 - RNA, 19 nt, Artificial Sequence
  Description of Artificial Sequence: Synthetic oligonucleotide
  Antisense strand to SEQ ID NO: 247350
ugaucagcaacuaauucca

SEQ ID NO: 247352 - RNA, 19 nt, Artificial Sequence
  Description of Artificial Sequence: Synthetic oligonucleotide
  Sense strand starting at position 3722 SEQ ID NO: 3182
ggaauuaguugcugaucaa

SEQ ID NO: 247353 - RNA, 19 nt, Artificial Sequence
  Description of Artificial Sequence: Synthetic oligonucleotide
  Antisense strand to SEQ ID NO: 247352
uugaucagcaacuaauucc

SEQ ID NO: 247354 - RNA, 19 nt, Artificial Sequence
  Description of Artificial Sequence: Synthetic oligonucleotide
  Sense strand starting at position 3723 SEQ ID NO: 3182
gaauuaguugcugaucaag

SEQ ID NO: 247355 - RNA, 19 nt, Artificial Sequence
  Description of Artificial Sequence: Synthetic oligonucleotide
  Antisense strand to SEQ ID NO: 247354
cuugaucagcaacuaauuc

SEQ ID NO: 247356 - RNA, 19 nt, Artificial Sequence
  Description of Artificial Sequence: Synthetic oligonucleotide
  Sense strand starting at position 3725 SEQ ID NO: 3182
auuaguugcugaucaagua

SEQ ID NO: 247357 - RNA, 19 nt, Artificial Sequence
  Description of Artificial Sequence: Synthetic oligonucleotide
  Antisense strand to SEQ ID NO: 247356
uacuugaucagcaacuaau

SEQ ID NO: 247358 - RNA, 19 nt, Artificial Sequence
  Description of Artificial Sequence: Synthetic oligonucleotide
  Sense strand starting at position 3844 SEQ ID NO: 3182
agaggucccuuaucauauu

SEQ ID NO: 247359 - RNA, 19 nt, Artificial Sequence
  Description of Artificial Sequence: Synthetic oligonucleotide
  Antisense strand to SEQ ID NO: 247358
aauaugauaagggaccucu

SEQ ID NO: 247360 - RNA, 19 nt, Artificial Sequence
  Description of Artificial Sequence: Synthetic oligonucleotide
  Sense strand starting at position 3853 SEQ ID NO: 3182
uuaucauauuccgaagucu

SEQ ID NO: 247361 - RNA, 19 nt, Artificial Sequence
  Description of Artificial Sequence: Synthetic oligonucleotide
  Antisense strand to SEQ ID NO: 247360
agacuucggaauaugauaa

SEQ ID NO: 247362 - RNA, 19 nt, Artificial Sequence
  Description of Artificial Sequence: Synthetic oligonucleotide
  Sense strand starting at position 3864 SEQ ID NO: 3182
cgaagucuauccgugacuu

SEQ ID NO: 247363 - RNA, 19 nt, Artificial Sequence
  Description of Artificial Sequence: Synthetic oligonucleotide
  Antisense strand to SEQ ID NO: 247362
aagucacggauagacuucg

SEQ ID NO: 247364 - RNA, 19 nt, Artificial Sequence
  Description of Artificial Sequence: Synthetic oligonucleotide
  Sense strand starting at position 3865 SEQ ID NO: 3182
gaagucuauccgugacuuu

SEQ ID NO: 247365 - RNA, 19 nt, Artificial Sequence
  Description of Artificial Sequence: Synthetic oligonucleotide
  Antisense strand to SEQ ID NO: 247364
aaagucacggauagacuuc

SEQ ID NO: 247366 - RNA, 19 nt, Artificial Sequence
  Description of Artificial Sequence: Synthetic oligonucleotide
  Sense strand starting at position 3866 SEQ ID NO: 3182
aagucuauccgugacuuua

SEQ ID NO: 247367 - RNA, 19 nt, Artificial Sequence
  Description of Artificial Sequence: Synthetic oligonucleotide
  Antisense strand to SEQ ID NO: 247366
uaaagucacggauagacuu

SEQ ID NO: 247368 - RNA, 19 nt, Artificial Sequence
  Description of Artificial Sequence: Synthetic oligonucleotide
  Sense strand starting at position 3868 SEQ ID NO: 3182
gucuauccgugacuuuaaa

SEQ ID NO: 247369 - RNA, 19 nt, Artificial Sequence
  Description of Artificial Sequence: Synthetic oligonucleotide
  Antisense strand to SEQ ID NO: 247368
uuuaaagucacggauagac

SEQ ID NO: 247370 - RNA, 19 nt, Artificial Sequence
  Description of Artificial Sequence: Synthetic oligonucleotide
  Sense strand starting at position 3933 SEQ ID NO: 3182
gugcaaauauuggcugaaa

SEQ ID NO: 247371 - RNA, 19 nt, Artificial Sequence
  Description of Artificial Sequence: Synthetic oligonucleotide
  Antisense strand to SEQ ID NO: 247370
uuucagccaauauuugcac

SEQ ID NO: 247372 - RNA, 19 nt, Artificial Sequence
  Description of Artificial Sequence: Synthetic oligonucleotide
  Sense strand starting at position 3934 SEQ ID NO: 3182
ugcaaauauuggcugaaau

SEQ ID NO: 247373 - RNA, 19 nt, Artificial Sequence
  Description of Artificial Sequence: Synthetic oligonucleotide
  Antisense strand to SEQ ID NO: 247372
auuucagccaauauuugca

SEQ ID NO: 247374 - RNA, 19 nt, Artificial Sequence
  Description of Artificial Sequence: Synthetic oligonucleotide
  Sense strand starting at position 3935 SEQ ID NO: 3182
gcaaauauuggcugaaaug

SEQ ID NO: 247375 - RNA, 19 nt, Artificial Sequence
  Description of Artificial Sequence: Synthetic oligonucleotide
  Antisense strand to SEQ ID NO: 247374
cauuucagccaauauuugc

SEQ ID NO: 247376 - RNA, 19 nt, Artificial Sequence
  Description of Artificial Sequence: Synthetic oligonucleotide
  Sense strand starting at position 3936 SEQ ID NO: 3182
caaauauuggcugaaaugu

SEQ ID NO: 247377 - RNA, 19 nt, Artificial Sequence
  Description of Artificial Sequence: Synthetic oligonucleotide
  Antisense strand to SEQ ID NO: 247376
acauuucagccaauauuug

SEQ ID NO: 247378 - RNA, 19 nt, Artificial Sequence
  Description of Artificial Sequence: Synthetic oligonucleotide
  Sense strand starting at position 114 SEQ ID NO: 3183
aggccuuuagguuaaacga

SEQ ID NO: 247379 - RNA, 19 nt, Artificial Sequence
  Description of Artificial Sequence: Synthetic oligonucleotide
  Antisense strand to SEQ ID NO: 247378
ucguuuaaccuaaaggccu

SEQ ID NO: 247380 - RNA, 19 nt, Artificial Sequence
  Description of Artificial Sequence: Synthetic oligonucleotide
  Sense strand starting at position 121 SEQ ID NO: 3183
uagguuaaacgacgggaua

SEQ ID NO: 247381 - RNA, 19 nt, Artificial Sequence
  Description of Artificial Sequence: Synthetic oligonucleotide
  Antisense strand to SEQ ID NO: 247380
uaucccgucguuuaaccua

SEQ ID NO: 247382 - RNA, 19 nt, Artificial Sequence
  Description of Artificial Sequence: Synthetic oligonucleotide
  Sense strand starting at position 122 SEQ ID NO: 3183
agguuaaacgacgggauau

SEQ ID NO: 247383 - RNA, 19 nt, Artificial Sequence
  Description of Artificial Sequence: Synthetic oligonucleotide
  Antisense strand to SEQ ID NO: 247382
auaucccgucguuuaaccu

SEQ ID NO: 247384 - RNA, 19 nt, Artificial Sequence
  Description of Artificial Sequence: Synthetic oligonucleotide
  Sense strand starting at position 182 SEQ ID NO: 3183
uguucuuuaagaggguuga

SEQ ID NO: 247385 - RNA, 19 nt, Artificial Sequence
  Description of Artificial Sequence: Synthetic oligonucleotide
  Antisense strand to SEQ ID NO: 247384
ucaacccucuuaaagaaca

SEQ ID NO: 247386 - RNA, 19 nt, Artificial Sequence
  Description of Artificial Sequence: Synthetic oligonucleotide
  Sense strand starting at position 183 SEQ ID NO: 3183
guucuuuaagaggguugau

SEQ ID NO: 247387 - RNA, 19 nt, Artificial Sequence
  Description of Artificial Sequence: Synthetic oligonucleotide
  Antisense strand to SEQ ID NO: 247386
aucaacccucuuaaagaac

SEQ ID NO: 247388 - RNA, 19 nt, Artificial Sequence
  Description of Artificial Sequence: Synthetic oligonucleotide
  Sense strand starting at position 192 SEQ ID NO: 3183
gaggguugauaggucaaag

SEQ ID NO: 247389 - RNA, 19 nt, Artificial Sequence
  Description of Artificial Sequence: Synthetic oligonucleotide
  Antisense strand to SEQ ID NO: 247388
cuuugaccuaucaacccuc

SEQ ID NO: 247390 - RNA, 19 nt, Artificial Sequence
  Description of Artificial Sequence: Synthetic oligonucleotide
  Sense strand starting at position 250 SEQ ID NO: 3183
uguccuuaauacgcugaga

SEQ ID NO: 247391 - RNA, 19 nt, Artificial Sequence
  Description of Artificial Sequence: Synthetic oligonucleotide
  Antisense strand to SEQ ID NO: 247390
ucucagcguauuaaggaca

SEQ ID NO: 247392 - RNA, 19 nt, Artificial Sequence
  Description of Artificial Sequence: Synthetic oligonucleotide
  Sense strand starting at position 252 SEQ ID NO: 3183
uccuuaauacgcugagaga

SEQ ID NO: 247393 - RNA, 19 nt, Artificial Sequence
  Description of Artificial Sequence: Synthetic oligonucleotide
  Antisense strand to SEQ ID NO: 247392
ucucucagcguauuaagga

SEQ ID NO: 247394 - RNA, 19 nt, Artificial Sequence
  Description of Artificial Sequence: Synthetic oligonucleotide
  Sense strand starting at position 281 SEQ ID NO: 3183
ugcuuuacacacggagaga

SEQ ID NO: 247395 - RNA, 19 nt, Artificial Sequence
  Description of Artificial Sequence: Synthetic oligonucleotide
  Antisense strand to SEQ ID NO: 247394
ucucuccguguguaaagca

SEQ ID NO: 247396 - RNA, 19 nt, Artificial Sequence
  Description of Artificial Sequence: Synthetic oligonucleotide
  Sense strand starting at position 312 SEQ ID NO: 3183
aagagaagguaucauaaga

SEQ ID NO: 247397 - RNA, 19 nt, Artificial Sequence
  Description of Artificial Sequence: Synthetic oligonucleotide
  Antisense strand to SEQ ID NO: 247396
ucuuaugauaccuucucuu

SEQ ID NO: 247398 - RNA, 19 nt, Artificial Sequence
  Description of Artificial Sequence: Synthetic oligonucleotide
  Sense strand starting at position 349 SEQ ID NO: 3183
gucagaguacugcaaucau

SEQ ID NO: 247399 - RNA, 19 nt, Artificial Sequence
  Description of Artificial Sequence: Synthetic oligonucleotide
  Antisense strand to SEQ ID NO: 247398
augauugcaguacucugac

SEQ ID NO: 247400 - RNA, 19 nt, Artificial Sequence
  Description of Artificial Sequence: Synthetic oligonucleotide
  Sense strand starting at position 358 SEQ ID NO: 3183
cugcaaucauugccauaag

SEQ ID NO: 247401 - RNA, 19 nt, Artificial Sequence
  Description of Artificial Sequence: Synthetic oligonucleotide
  Antisense strand to SEQ ID NO: 247400
cuuauggcaaugauugcag

SEQ ID NO: 247402 - RNA, 19 nt, Artificial Sequence
  Description of Artificial Sequence: Synthetic oligonucleotide
  Sense strand starting at position 383 SEQ ID NO: 3183
ggagaacgauauuaacaga

SEQ ID NO: 247403 - RNA, 19 nt, Artificial Sequence
  Description of Artificial Sequence: Synthetic oligonucleotide
  Antisense strand to SEQ ID NO: 247402
ucuguuaauaucguucucc

SEQ ID NO: 247404 - RNA, 19 nt, Artificial Sequence
  Description of Artificial Sequence: Synthetic oligonucleotide
  Sense strand starting at position 386 SEQ ID NO: 3183
gaacgauauuaacagaaag

SEQ ID NO: 247405 - RNA, 19 nt, Artificial Sequence
  Description of Artificial Sequence: Synthetic oligonucleotide
  Antisense strand to SEQ ID NO: 247404
cuuucuguuaauaucguuc

SEQ ID NO: 247406 - RNA, 19 nt, Artificial Sequence
  Description of Artificial Sequence: Synthetic oligonucleotide
  Sense strand starting at position 489 SEQ ID NO: 3183
acgugaaucuuuccaggac

SEQ ID NO: 247407 - RNA, 19 nt, Artificial Sequence
  Description of Artificial Sequence: Synthetic oligonucleotide
  Antisense strand to SEQ ID NO: 247406
guccuggaaagauucacgu

SEQ ID NO: 247408 - RNA, 19 nt, Artificial Sequence
  Description of Artificial Sequence: Synthetic oligonucleotide
  Sense strand starting at position 896 SEQ ID NO: 3183
gcagauuuccagcgagcug

SEQ ID NO: 247409 - RNA, 19 nt, Artificial Sequence
  Description of Artificial Sequence: Synthetic oligonucleotide
  Antisense strand to SEQ ID NO: 247408
cagcucgcuggaaaucugc

SEQ ID NO: 247410 - RNA, 19 nt, Artificial Sequence
  Description of Artificial Sequence: Synthetic oligonucleotide
  Sense strand starting at position 958 SEQ ID NO: 3183
guuugaaucgggcagggaa

SEQ ID NO: 247411 - RNA, 19 nt, Artificial Sequence
  Description of Artificial Sequence: Synthetic oligonucleotide
  Antisense strand to SEQ ID NO: 247410
uucccugcccgauucaaac

SEQ ID NO: 247412 - RNA, 19 nt, Artificial Sequence
  Description of Artificial Sequence: Synthetic oligonucleotide
  Sense strand starting at position 2173 SEQ ID NO: 3183
gaagcacugugacuugauu

SEQ ID NO: 247413 - RNA, 19 nt, Artificial Sequence
  Description of Artificial Sequence: Synthetic oligonucleotide
  Antisense strand to SEQ ID NO: 247412
aaucaagucacagugcuuc

SEQ ID NO: 247414 - RNA, 19 nt, Artificial Sequence
  Description of Artificial Sequence: Synthetic oligonucleotide
  Sense strand starting at position 2215 SEQ ID NO: 3183
ccagcugguaauugaugau

SEQ ID NO: 247415 - RNA, 19 nt, Artificial Sequence
  Description of Artificial Sequence: Synthetic oligonucleotide
  Antisense strand to SEQ ID NO: 247414
aucaucaauuaccagcugg

SEQ ID NO: 247416 - RNA, 19 nt, Artificial Sequence
  Description of Artificial Sequence: Synthetic oligonucleotide
  Sense strand starting at position 2445 SEQ ID NO: 3183
gccauaggugauuauuaga

SEQ ID NO: 247417 - RNA, 19 nt, Artificial Sequence
  Description of Artificial Sequence: Synthetic oligonucleotide
  Antisense strand to SEQ ID NO: 247416
ucuaauaaucaccuauggc

SEQ ID NO: 247418 - RNA, 19 nt, Artificial Sequence
  Description of Artificial Sequence: Synthetic oligonucleotide
  Sense strand starting at position 2711 SEQ ID NO: 3183
aaauguucgcuccaauggu

SEQ ID NO: 247419 - RNA, 19 nt, Artificial Sequence
  Description of Artificial Sequence: Synthetic oligonucleotide
  Antisense strand to SEQ ID NO: 247418
accauuggagcgaacauuu

SEQ ID NO: 247420 - RNA, 19 nt, Artificial Sequence
  Description of Artificial Sequence: Synthetic oligonucleotide
  Sense strand starting at position 2920 SEQ ID NO: 3183
gugauaugaggcugacuua

SEQ ID NO: 247421 - RNA, 19 nt, Artificial Sequence
  Description of Artificial Sequence: Synthetic oligonucleotide
  Antisense strand to SEQ ID NO: 247420
uaagucagccucauaucac

SEQ ID NO: 247422 - RNA, 19 nt, Artificial Sequence
  Description of Artificial Sequence: Synthetic oligonucleotide
  Sense strand starting at position 3018 SEQ ID NO: 3183
gaauuugucucggucagcu

SEQ ID NO: 247423 - RNA, 19 nt, Artificial Sequence
  Description of Artificial Sequence: Synthetic oligonucleotide
  Antisense strand to SEQ ID NO: 247422
agcugaccgagacaaauuc

SEQ ID NO: 247424 - RNA, 19 nt, Artificial Sequence
  Description of Artificial Sequence: Synthetic oligonucleotide
  Sense strand starting at position 3050 SEQ ID NO: 3183
gugugaaugcaagacugaa

SEQ ID NO: 247425 - RNA, 19 nt, Artificial Sequence
  Description of Artificial Sequence: Synthetic oligonucleotide
  Antisense strand to SEQ ID NO: 247424
uucagucuugcauucacac

SEQ ID NO: 247426 - RNA, 19 nt, Artificial Sequence
  Description of Artificial Sequence: Synthetic oligonucleotide
  Sense strand starting at position 3254 SEQ ID NO: 3183
ccauguggaguuugagaug

SEQ ID NO: 247427 - RNA, 19 nt, Artificial Sequence
  Description of Artificial Sequence: Synthetic oligonucleotide
  Antisense strand to SEQ ID NO: 247426
caucucaaacuccacaugg

SEQ ID NO: 247428 - RNA, 19 nt, Artificial Sequence
  Description of Artificial Sequence: Synthetic oligonucleotide
  Sense strand starting at position 3259 SEQ ID NO: 3183
uggaguuugagauguuuau

SEQ ID NO: 247429 - RNA, 19 nt, Artificial Sequence
  Description of Artificial Sequence: Synthetic oligonucleotide
  Antisense strand to SEQ ID NO: 247428
auaaacaucucaaacucca

SEQ ID NO: 247430 - RNA, 19 nt, Artificial Sequence
  Description of Artificial Sequence: Synthetic oligonucleotide
  Sense strand starting at position 3286 SEQ ID NO: 3183
aggauauucuagccaaacu

SEQ ID NO: 247431 - RNA, 19 nt, Artificial Sequence
  Description of Artificial Sequence: Synthetic oligonucleotide
  Antisense strand to SEQ ID NO: 247430
aguuuggcuagaauauccu

SEQ ID NO: 247432 - RNA, 19 nt, Artificial Sequence
  Description of Artificial Sequence: Synthetic oligonucleotide
  Sense strand starting at position 3319 SEQ ID NO: 3183
ucagucugucaacagacaa

SEQ ID NO: 247433 - RNA, 19 nt, Artificial Sequence
  Description of Artificial Sequence: Synthetic oligonucleotide
  Antisense strand to SEQ ID NO: 247432
uugucuguugacagacuga

SEQ ID NO: 247434 - RNA, 19 nt, Artificial Sequence
  Description of Artificial Sequence: Synthetic oligonucleotide
  Sense strand starting at position 3379 SEQ ID NO: 3183
aagucaauacaguguguga

SEQ ID NO: 247435 - RNA, 19 nt, Artificial Sequence
  Description of Artificial Sequence: Synthetic oligonucleotide
  Antisense strand to SEQ ID NO: 247434
ucacacacuguauugacuu

SEQ ID NO: 247436 - RNA, 19 nt, Artificial Sequence
  Description of Artificial Sequence: Synthetic oligonucleotide
  Sense strand starting at position 3381 SEQ ID NO: 3183
gucaauacagugugugaua

SEQ ID NO: 247437 - RNA, 19 nt, Artificial Sequence
  Description of Artificial Sequence: Synthetic oligonucleotide
  Antisense strand to SEQ ID NO: 247436
uaucacacacuguauugac

SEQ ID NO: 247438 - RNA, 19 nt, Artificial Sequence
  Description of Artificial Sequence: Synthetic oligonucleotide
  Sense strand starting at position 3382 SEQ ID NO: 3183
ucaauacagugugugauaa

SEQ ID NO: 247439 - RNA, 19 nt, Artificial Sequence
  Description of Artificial Sequence: Synthetic oligonucleotide
  Antisense strand to SEQ ID NO: 247438
uuaucacacacuguauuga

SEQ ID NO: 247440 - RNA, 19 nt, Artificial Sequence
  Description of Artificial Sequence: Synthetic oligonucleotide
  Sense strand starting at position 3383 SEQ ID NO: 3183
caauacagugugugauaaa

SEQ ID NO: 247441 - RNA, 19 nt, Artificial Sequence
  Description of Artificial Sequence: Synthetic oligonucleotide
  Antisense strand to SEQ ID NO: 247440
uuuaucacacacuguauug

SEQ ID NO: 247442 - RNA, 19 nt, Artificial Sequence
  Description of Artificial Sequence: Synthetic oligonucleotide
  Sense strand starting at position 3392 SEQ ID NO: 3183
gugugauaaaucuauugua

SEQ ID NO: 247443 - RNA, 19 nt, Artificial Sequence
  Description of Artificial Sequence: Synthetic oligonucleotide
  Antisense strand to SEQ ID NO: 247442
uacaauagauuuaucacac

SEQ ID NO: 247444 - RNA, 19 nt, Artificial Sequence
  Description of Artificial Sequence: Synthetic oligonucleotide
  Sense strand starting at position 3466 SEQ ID NO: 3183
guaguagugcugagugugu

SEQ ID NO: 247445 - RNA, 19 nt, Artificial Sequence
  Description of Artificial Sequence: Synthetic oligonucleotide
  Antisense strand to SEQ ID NO: 247444
acacacucagcacuacuac

SEQ ID NO: 247446 - RNA, 19 nt, Artificial Sequence
  Description of Artificial Sequence: Synthetic oligonucleotide
  Sense strand starting at position 3483 SEQ ID NO: 3183
guuucuuucuuaguagauc

SEQ ID NO: 247447 - RNA, 19 nt, Artificial Sequence
  Description of Artificial Sequence: Synthetic oligonucleotide
  Antisense strand to SEQ ID NO: 247446
gaucuacuaagaaagaaac

SEQ ID NO: 247448 - RNA, 19 nt, Artificial Sequence
  Description of Artificial Sequence: Synthetic oligonucleotide
  Sense strand starting at position 3803 SEQ ID NO: 3183
uccauaguaugguuauagu

SEQ ID NO: 247449 - RNA, 19 nt, Artificial Sequence
  Description of Artificial Sequence: Synthetic oligonucleotide
  Antisense strand to SEQ ID NO: 247448
acuauaaccauacuaugga

SEQ ID NO: 247450 - RNA, 19 nt, Artificial Sequence
  Description of Artificial Sequence: Synthetic oligonucleotide
  Sense strand starting at position 3853 SEQ ID NO: 3183
ccuacauuaccucacguua

SEQ ID NO: 247451 - RNA, 19 nt, Artificial Sequence
  Description of Artificial Sequence: Synthetic oligonucleotide
  Antisense strand to SEQ ID NO: 247450
uaacgugagguaauguagg

SEQ ID NO: 247452 - RNA, 19 nt, Artificial Sequence
  Description of Artificial Sequence: Synthetic oligonucleotide
  Sense strand starting at position 3866 SEQ ID NO: 3183
acguuaguuagcugaauuu

SEQ ID NO: 247453 - RNA, 19 nt, Artificial Sequence
  Description of Artificial Sequence: Synthetic oligonucleotide
  Antisense strand to SEQ ID NO: 247452
aaauucagcuaacuaacgu

SEQ ID NO: 247454 - RNA, 19 nt, Artificial Sequence
  Description of Artificial Sequence: Synthetic oligonucleotide
  Sense strand starting at position 3917 SEQ ID NO: 3183
uuccuaauguuagcaggaa

SEQ ID NO: 247455 - RNA, 19 nt, Artificial Sequence
  Description of Artificial Sequence: Synthetic oligonucleotide
  Antisense strand to SEQ ID NO: 247454
uuccugcuaacauuaggaa

SEQ ID NO: 247456 - RNA, 19 nt, Artificial Sequence
  Description of Artificial Sequence: Synthetic oligonucleotide
  Sense strand starting at position 3929 SEQ ID NO: 3183
gcaggaauaaaguguguuu

SEQ ID NO: 247457 - RNA, 19 nt, Artificial Sequence
  Description of Artificial Sequence: Synthetic oligonucleotide
  Antisense strand to SEQ ID NO: 247456
aaacacacuuuauuccugc

SEQ ID NO: 247458 - RNA, 19 nt, Artificial Sequence
  Description of Artificial Sequence: Synthetic oligonucleotide
  Sense strand starting at position 222 SEQ ID NO: 3184
gucaucuauuaacugaguu

SEQ ID NO: 247459 - RNA, 19 nt, Artificial Sequence
  Description of Artificial Sequence: Synthetic oligonucleotide
  Antisense strand to SEQ ID NO: 247458
aacucaguuaauagaugac

SEQ ID NO: 247460 - RNA, 19 nt, Artificial Sequence
  Description of Artificial Sequence: Synthetic oligonucleotide
  Sense strand starting at position 319 SEQ ID NO: 3184
ggcauauagccucagacca

SEQ ID NO: 247461 - RNA, 19 nt, Artificial Sequence
  Description of Artificial Sequence: Synthetic oligonucleotide
  Antisense strand to SEQ ID NO: 247460
uggucugaggcuauaugcc

SEQ ID NO: 247462 - RNA, 19 nt, Artificial Sequence
  Description of Artificial Sequence: Synthetic oligonucleotide
  Sense strand starting at position 454 SEQ ID NO: 3184
uuguuaaccgcugaaauca

SEQ ID NO: 247463 - RNA, 19 nt, Artificial Sequence
  Description of Artificial Sequence: Synthetic oligonucleotide
  Antisense strand to SEQ ID NO: 247462
ugauuucagcgguuaacaa

SEQ ID NO: 247464 - RNA, 19 nt, Artificial Sequence
  Description of Artificial Sequence: Synthetic oligonucleotide
  Sense strand starting at position 462 SEQ ID NO: 3184
cgcugaaaucaagagguuu

SEQ ID NO: 247465 - RNA, 19 nt, Artificial Sequence
  Description of Artificial Sequence: Synthetic oligonucleotide
  Antisense strand to SEQ ID NO: 247464
aaaccucuugauuucagcg

SEQ ID NO: 247466 - RNA, 19 nt, Artificial Sequence
  Description of Artificial Sequence: Synthetic oligonucleotide
  Sense strand starting at position 473 SEQ ID NO: 3184
agagguuuccuccaguucu

SEQ ID NO: 247467 - RNA, 19 nt, Artificial Sequence
  Description of Artificial Sequence: Synthetic oligonucleotide
  Antisense strand to SEQ ID NO: 247466
agaacuggaggaaaccucu

SEQ ID NO: 247468 - RNA, 19 nt, Artificial Sequence
  Description of Artificial Sequence: Synthetic oligonucleotide
  Sense strand starting at position 706 SEQ ID NO: 3184
gcuuaaauagccgaucaug

SEQ ID NO: 247469 - RNA, 19 nt, Artificial Sequence
  Description of Artificial Sequence: Synthetic oligonucleotide
  Antisense strand to SEQ ID NO: 247468
caugaucggcuauuuaagc

SEQ ID NO: 247470 - RNA, 19 nt, Artificial Sequence
  Description of Artificial Sequence: Synthetic oligonucleotide
  Sense strand starting at position 779 SEQ ID NO: 3184
cucuuucuccugggagguu

SEQ ID NO: 247471 - RNA, 19 nt, Artificial Sequence
  Description of Artificial Sequence: Synthetic oligonucleotide
  Antisense strand to SEQ ID NO: 247470
aaccucccaggagaaagag

SEQ ID NO: 247472 - RNA, 19 nt, Artificial Sequence
  Description of Artificial Sequence: Synthetic oligonucleotide
  Sense strand starting at position 971 SEQ ID NO: 3184
gcugaucuaguccagcgaa

SEQ ID NO: 247473 - RNA, 19 nt, Artificial Sequence
  Description of Artificial Sequence: Synthetic oligonucleotide
  Antisense strand to SEQ ID NO: 247472
uucgcuggacuagaucagc

SEQ ID NO: 247474 - RNA, 19 nt, Artificial Sequence
  Description of Artificial Sequence: Synthetic oligonucleotide
  Sense strand starting at position 974 SEQ ID NO: 3184
gaucuaguccagcgaacag

SEQ ID NO: 247475 - RNA, 19 nt, Artificial Sequence
  Description of Artificial Sequence: Synthetic oligonucleotide
  Antisense strand to SEQ ID NO: 247474
cuguucgcuggacuagauc

SEQ ID NO: 247476 - RNA, 19 nt, Artificial Sequence
  Description of Artificial Sequence: Synthetic oligonucleotide
  Sense strand starting at position 989 SEQ ID NO: 3184
acagguguuugguuaauuc

SEQ ID NO: 247477 - RNA, 19 nt, Artificial Sequence
  Description of Artificial Sequence: Synthetic oligonucleotide
  Antisense strand to SEQ ID NO: 247476
gaauuaaccaaacaccugu

SEQ ID NO: 247478 - RNA, 19 nt, Artificial Sequence
  Description of Artificial Sequence: Synthetic oligonucleotide
  Sense strand starting at position 1089 SEQ ID NO: 3184
gaaagucaugcaggacaca

SEQ ID NO: 247479 - RNA, 19 nt, Artificial Sequence
  Description of Artificial Sequence: Synthetic oligonucleotide
  Antisense strand to SEQ ID NO: 247478
uguguccugcaugacuuuc

SEQ ID NO: 247480 - RNA, 19 nt, Artificial Sequence
  Description of Artificial Sequence: Synthetic oligonucleotide
  Sense strand starting at position 1267 SEQ ID NO: 3184
acacgugaagcucagcaaa

SEQ ID NO: 247481 - RNA, 19 nt, Artificial Sequence
  Description of Artificial Sequence: Synthetic oligonucleotide
  Antisense strand to SEQ ID NO: 247480
uuugcugagcuucacgugu

SEQ ID NO: 247482 - RNA, 19 nt, Artificial Sequence
  Description of Artificial Sequence: Synthetic oligonucleotide
  Sense strand starting at position 1336 SEQ ID NO: 3184
cggaaagcacuuuguuuaa

SEQ ID NO: 247483 - RNA, 19 nt, Artificial Sequence
  Description of Artificial Sequence: Synthetic oligonucleotide
  Antisense strand to SEQ ID NO: 247482
uuaaacaaagugcuuuccg

SEQ ID NO: 247484 - RNA, 19 nt, Artificial Sequence
  Description of Artificial Sequence: Synthetic oligonucleotide
  Sense strand starting at position 2215 SEQ ID NO: 3184
gcccucuguggacagaauu

SEQ ID NO: 247485 - RNA, 19 nt, Artificial Sequence
  Description of Artificial Sequence: Synthetic oligonucleotide
  Antisense strand to SEQ ID NO: 247484
aauucuguccacagagggc

SEQ ID NO: 247486 - RNA, 19 nt, Artificial Sequence
  Description of Artificial Sequence: Synthetic oligonucleotide
  Sense strand starting at position 2262 SEQ ID NO: 3184
agacuuuacuacccguuau

SEQ ID NO: 247487 - RNA, 19 nt, Artificial Sequence
  Description of Artificial Sequence: Synthetic oligonucleotide
  Antisense strand to SEQ ID NO: 247486
auaacggguaguaaagucu

SEQ ID NO: 247488 - RNA, 19 nt, Artificial Sequence
  Description of Artificial Sequence: Synthetic oligonucleotide
  Sense strand starting at position 2266 SEQ ID NO: 3184
uuuacuacccguuauaaag

SEQ ID NO: 247489 - RNA, 19 nt, Artificial Sequence
  Description of Artificial Sequence: Synthetic oligonucleotide
  Antisense strand to SEQ ID NO: 247488
cuuuauaacggguaguaaa

SEQ ID NO: 247490 - RNA, 19 nt, Artificial Sequence
  Description of Artificial Sequence: Synthetic oligonucleotide
  Sense strand starting at position 2272 SEQ ID NO: 3184
acccguuauaaagagaagu

SEQ ID NO: 247491 - RNA, 19 nt, Artificial Sequence
  Description of Artificial Sequence: Synthetic oligonucleotide
  Antisense strand to SEQ ID NO: 247490
acuucucuuuauaacgggu

SEQ ID NO: 247492 - RNA, 19 nt, Artificial Sequence
  Description of Artificial Sequence: Synthetic oligonucleotide
  Sense strand starting at position 2441 SEQ ID NO: 3184
uguucuggguccucaaaca

SEQ ID NO: 247493 - RNA, 19 nt, Artificial Sequence
  Description of Artificial Sequence: Synthetic oligonucleotide
  Antisense strand to SEQ ID NO: 247492
uguuugaggacccagaaca

SEQ ID NO: 247494 - RNA, 19 nt, Artificial Sequence
  Description of Artificial Sequence: Synthetic oligonucleotide
  Sense strand starting at position 2495 SEQ ID NO: 3184
uugauagugcuguauaaug

SEQ ID NO: 247495 - RNA, 19 nt, Artificial Sequence
  Description of Artificial Sequence: Synthetic oligonucleotide
  Antisense strand to SEQ ID NO: 247494
cauuauacagcacuaucaa

SEQ ID NO: 247496 - RNA, 19 nt, Artificial Sequence
  Description of Artificial Sequence: Synthetic oligonucleotide
  Sense strand starting at position 2497 SEQ ID NO: 3184
gauagugcuguauaaugua

SEQ ID NO: 247497 - RNA, 19 nt, Artificial Sequence
  Description of Artificial Sequence: Synthetic oligonucleotide
  Antisense strand to SEQ ID NO: 247496
uacauuauacagcacuauc

SEQ ID NO: 247498 - RNA, 19 nt, Artificial Sequence
  Description of Artificial Sequence: Synthetic oligonucleotide
  Sense strand starting at position 2550 SEQ ID NO: 3184
guccuaugagguagguguu

SEQ ID NO: 247499 - RNA, 19 nt, Artificial Sequence
  Description of Artificial Sequence: Synthetic oligonucleotide
  Antisense strand to SEQ ID NO: 247498
aacaccuaccucauaggac

SEQ ID NO: 247500 - RNA, 19 nt, Artificial Sequence
  Description of Artificial Sequence: Synthetic oligonucleotide
  Sense strand starting at position 2670 SEQ ID NO: 3184
aaggauggguuguuuaaag

SEQ ID NO: 247501 - RNA, 19 nt, Artificial Sequence
  Description of Artificial Sequence: Synthetic oligonucleotide
  Antisense strand to SEQ ID NO: 247500
cuuuaaacaacccauccuu

SEQ ID NO: 247502 - RNA, 19 nt, Artificial Sequence
  Description of Artificial Sequence: Synthetic oligonucleotide
  Sense strand starting at position 2908 SEQ ID NO: 3184
ucaagaguacugugaacuu

SEQ ID NO: 247503 - RNA, 19 nt, Artificial Sequence
  Description of Artificial Sequence: Synthetic oligonucleotide
  Antisense strand to SEQ ID NO: 247502
aaguucacaguacucuuga

SEQ ID NO: 247504 - RNA, 19 nt, Artificial Sequence
  Description of Artificial Sequence: Synthetic oligonucleotide
  Sense strand starting at position 3013 SEQ ID NO: 3184
guagcaguaggauaaguau

SEQ ID NO: 247505 - RNA, 19 nt, Artificial Sequence
  Description of Artificial Sequence: Synthetic oligonucleotide
  Antisense strand to SEQ ID NO: 247504
auacuuauccuacugcuac

SEQ ID NO: 247506 - RNA, 19 nt, Artificial Sequence
  Description of Artificial Sequence: Synthetic oligonucleotide
  Sense strand starting at position 3080 SEQ ID NO: 3184
aguuguugcaaguaucuca

SEQ ID NO: 247507 - RNA, 19 nt, Artificial Sequence
  Description of Artificial Sequence: Synthetic oligonucleotide
  Antisense strand to SEQ ID NO: 247506
ugagauacuugcaacaacu

SEQ ID NO: 247508 - RNA, 19 nt, Artificial Sequence
  Description of Artificial Sequence: Synthetic oligonucleotide
  Sense strand starting at position 3380 SEQ ID NO: 3184
cugacaucccugcauugga

SEQ ID NO: 247509 - RNA, 19 nt, Artificial Sequence
  Description of Artificial Sequence: Synthetic oligonucleotide
  Antisense strand to SEQ ID NO: 247508
uccaaugcagggaugucag

SEQ ID NO: 247510 - RNA, 19 nt, Artificial Sequence
  Description of Artificial Sequence: Synthetic oligonucleotide
  Sense strand starting at position 3383 SEQ ID NO: 3184
acaucccugcauuggaaau

SEQ ID NO: 247511 - RNA, 19 nt, Artificial Sequence
  Description of Artificial Sequence: Synthetic oligonucleotide
  Antisense strand to SEQ ID NO: 247510
auuuccaaugcagggaugu

SEQ ID NO: 247512 - RNA, 19 nt, Artificial Sequence
  Description of Artificial Sequence: Synthetic oligonucleotide
  Sense strand starting at position 3563 SEQ ID NO: 3184
gaguaaguccgucaguaua

SEQ ID NO: 247513 - RNA, 19 nt, Artificial Sequence
  Description of Artificial Sequence: Synthetic oligonucleotide
  Antisense strand to SEQ ID NO: 247512
uauacugacggacuuacuc

SEQ ID NO: 247514 - RNA, 19 nt, Artificial Sequence
  Description of Artificial Sequence: Synthetic oligonucleotide
  Sense strand starting at position 3566 SEQ ID NO: 3184
uaaguccgucaguauauua

SEQ ID NO: 247515 - RNA, 19 nt, Artificial Sequence
  Description of Artificial Sequence: Synthetic oligonucleotide
  Antisense strand to SEQ ID NO: 247514
uaauauacugacggacuua

SEQ ID NO: 247516 - RNA, 19 nt, Artificial Sequence
  Description of Artificial Sequence: Synthetic oligonucleotide
  Sense strand starting at position 3621 SEQ ID NO: 3184
agucaauuauaguccaaag

SEQ ID NO: 247517 - RNA, 19 nt, Artificial Sequence
  Description of Artificial Sequence: Synthetic oligonucleotide
  Antisense strand to SEQ ID NO: 247516
cuuuggacuauaauugacu

SEQ ID NO: 247518 - RNA, 19 nt, Artificial Sequence
  Description of Artificial Sequence: Synthetic oligonucleotide
  Sense strand starting at position 3643 SEQ ID NO: 3184
ggugcagugguuuaaauuc

SEQ ID NO: 247519 - RNA, 19 nt, Artificial Sequence
  Description of Artificial Sequence: Synthetic oligonucleotide
  Antisense strand to SEQ ID NO: 247518
gaauuuaaaccacugcacc

SEQ ID NO: 247520 - RNA, 19 nt, Artificial Sequence
  Description of Artificial Sequence: Synthetic oligonucleotide
  Sense strand starting at position 3715 SEQ ID NO: 3184
gagaaacuauuggagacaa

SEQ ID NO: 247521 - RNA, 19 nt, Artificial Sequence
  Description of Artificial Sequence: Synthetic oligonucleotide
  Antisense strand to SEQ ID NO: 247520
uugucuccaauaguuucuc

SEQ ID NO: 247522 - RNA, 19 nt, Artificial Sequence
  Description of Artificial Sequence: Synthetic oligonucleotide
  Sense strand starting at position 3841 SEQ ID NO: 3184
agacuauuauaggcauagu

SEQ ID NO: 247523 - RNA, 19 nt, Artificial Sequence
  Description of Artificial Sequence: Synthetic oligonucleotide
  Antisense strand to SEQ ID NO: 247522
acuaugccuauaauagucu

SEQ ID NO: 247524 - RNA, 19 nt, Artificial Sequence
  Description of Artificial Sequence: Synthetic oligonucleotide
  Sense strand starting at position 3844 SEQ ID NO: 3184
cuauuauaggcauaguaua

SEQ ID NO: 247525 - RNA, 19 nt, Artificial Sequence
  Description of Artificial Sequence: Synthetic oligonucleotide
  Antisense strand to SEQ ID NO: 247524
uauacuaugccuauaauag

SEQ ID NO: 247526 - RNA, 19 nt, Artificial Sequence
  Description of Artificial Sequence: Synthetic oligonucleotide
  Sense strand starting at position 3896 SEQ ID NO: 3184
gcuggugauuuggcuguaa

SEQ ID NO: 247527 - RNA, 19 nt, Artificial Sequence
  Description of Artificial Sequence: Synthetic oligonucleotide
  Antisense strand to SEQ ID NO: 247526
uuacagccaaaucaccagc

SEQ ID NO: 247528 - RNA, 19 nt, Artificial Sequence
  Description of Artificial Sequence: Synthetic oligonucleotide
  Sense strand starting at position 3898 SEQ ID NO: 3184
uggugauuuggcuguaaug

SEQ ID NO: 247529 - RNA, 19 nt, Artificial Sequence
  Description of Artificial Sequence: Synthetic oligonucleotide
  Antisense strand to SEQ ID NO: 247528
cauuacagccaaaucacca

SEQ ID NO: 247530 - RNA, 19 nt, Artificial Sequence
  Description of Artificial Sequence: Synthetic oligonucleotide
  Sense strand starting at position 3907 SEQ ID NO: 3184
ggcuguaaugguuacugaa

SEQ ID NO: 247531 - RNA, 19 nt, Artificial Sequence
  Description of Artificial Sequence: Synthetic oligonucleotide
  Antisense strand to SEQ ID NO: 247530
uucaguaaccauuacagcc

SEQ ID NO: 247532 - RNA, 19 nt, Artificial Sequence
  Description of Artificial Sequence: Synthetic oligonucleotide
  Sense strand starting at position 3909 SEQ ID NO: 3184
cuguaaugguuacugaaau

SEQ ID NO: 247533 - RNA, 19 nt, Artificial Sequence
  Description of Artificial Sequence: Synthetic oligonucleotide
  Antisense strand to SEQ ID NO: 247532
auuucaguaaccauuacag

SEQ ID NO: 247534 - RNA, 19 nt, Artificial Sequence
  Description of Artificial Sequence: Synthetic oligonucleotide
  Sense strand starting at position 3927 SEQ ID NO: 3184
uauucugaauugguugaua

SEQ ID NO: 247535 - RNA, 19 nt, Artificial Sequence
  Description of Artificial Sequence: Synthetic oligonucleotide
  Antisense strand to SEQ ID NO: 247534
uaucaaccaauucagaaua

SEQ ID NO: 247536 - RNA, 19 nt, Artificial Sequence
  Description of Artificial Sequence: Synthetic oligonucleotide
  Sense strand starting at position 3929 SEQ ID NO: 3184
uucugaauugguugauaaa

SEQ ID NO: 247537 - RNA, 19 nt, Artificial Sequence
  Description of Artificial Sequence: Synthetic oligonucleotide
  Antisense strand to SEQ ID NO: 247536
uuuaucaaccaauucagaa

SEQ ID NO: 247538 - RNA, 19 nt, Artificial Sequence
  Description of Artificial Sequence: Synthetic oligonucleotide
  Sense strand starting at position 67 SEQ ID NO: 3186
aaagauaacguuugguauu

SEQ ID NO: 247539 - RNA, 19 nt, Artificial Sequence
  Description of Artificial Sequence: Synthetic oligonucleotide
  Antisense strand to SEQ ID NO: 247538
aauaccaaacguuaucuuu

SEQ ID NO: 247540 - RNA, 19 nt, Artificial Sequence
  Description of Artificial Sequence: Synthetic oligonucleotide
  Sense strand starting at position 156 SEQ ID NO: 3186
gguaaauguugccuaaaua

SEQ ID NO: 247541 - RNA, 19 nt, Artificial Sequence
  Description of Artificial Sequence: Synthetic oligonucleotide
  Antisense strand to SEQ ID NO: 247540
uauuuaggcaacauuuacc

SEQ ID NO: 247542 - RNA, 19 nt, Artificial Sequence
  Description of Artificial Sequence: Synthetic oligonucleotide
  Sense strand starting at position 157 SEQ ID NO: 3186
guaaauguugccuaaauaa

SEQ ID NO: 247543 - RNA, 19 nt, Artificial Sequence
  Description of Artificial Sequence: Synthetic oligonucleotide
  Antisense strand to SEQ ID NO: 247542
uuauuuaggcaacauuuac

SEQ ID NO: 247544 - RNA, 19 nt, Artificial Sequence
  Description of Artificial Sequence: Synthetic oligonucleotide
  Sense strand starting at position 378 SEQ ID NO: 3186
agacuaaauucugcugagu

SEQ ID NO: 247545 - RNA, 19 nt, Artificial Sequence
  Description of Artificial Sequence: Synthetic oligonucleotide
  Antisense strand to SEQ ID NO: 247544
acucagcagaauuuagucu

SEQ ID NO: 247546 - RNA, 19 nt, Artificial Sequence
  Description of Artificial Sequence: Synthetic oligonucleotide
  Sense strand starting at position 558 SEQ ID NO: 3186
ggucuaagcguuuagaagg

SEQ ID NO: 247547 - RNA, 19 nt, Artificial Sequence
  Description of Artificial Sequence: Synthetic oligonucleotide
  Antisense strand to SEQ ID NO: 247546
ccuucuaaacgcuuagacc

SEQ ID NO: 247548 - RNA, 19 nt, Artificial Sequence
  Description of Artificial Sequence: Synthetic oligonucleotide
  Sense strand starting at position 584 SEQ ID NO: 3186
agaacaguuucucucuuga

SEQ ID NO: 247549 - RNA, 19 nt, Artificial Sequence
  Description of Artificial Sequence: Synthetic oligonucleotide
  Antisense strand to SEQ ID NO: 247548
ucaagagagaaacuguucu

SEQ ID NO: 247550 - RNA, 19 nt, Artificial Sequence
  Description of Artificial Sequence: Synthetic oligonucleotide
  Sense strand starting at position 679 SEQ ID NO: 3186
gguggugagaaugauguca

SEQ ID NO: 247551 - RNA, 19 nt, Artificial Sequence
  Description of Artificial Sequence: Synthetic oligonucleotide
  Antisense strand to SEQ ID NO: 247550
ugacaucauucucaccacc

SEQ ID NO: 247552 - RNA, 19 nt, Artificial Sequence
  Description of Artificial Sequence: Synthetic oligonucleotide
  Sense strand starting at position 701 SEQ ID NO: 3186
uucaguaaagucggagaca

SEQ ID NO: 247553 - RNA, 19 nt, Artificial Sequence
  Description of Artificial Sequence: Synthetic oligonucleotide
  Antisense strand to SEQ ID NO: 247552
ugucuccgacuuuacugaa

SEQ ID NO: 247554 - RNA, 19 nt, Artificial Sequence
  Description of Artificial Sequence: Synthetic oligonucleotide
  Sense strand starting at position 1018 SEQ ID NO: 3186
ucaucagaaugucugcaaa

SEQ ID NO: 247555 - RNA, 19 nt, Artificial Sequence
  Description of Artificial Sequence: Synthetic oligonucleotide
  Antisense strand to SEQ ID NO: 247554
uuugcagacauucugauga

SEQ ID NO: 247556 - RNA, 19 nt, Artificial Sequence
  Description of Artificial Sequence: Synthetic oligonucleotide
  Sense strand starting at position 1192 SEQ ID NO: 3186
ugaccaaauccucgacacu

SEQ ID NO: 247557 - RNA, 19 nt, Artificial Sequence
  Description of Artificial Sequence: Synthetic oligonucleotide
  Antisense strand to SEQ ID NO: 247556
agugucgaggauuugguca

SEQ ID NO: 247558 - RNA, 19 nt, Artificial Sequence
  Description of Artificial Sequence: Synthetic oligonucleotide
  Sense strand starting at position 1444 SEQ ID NO: 3186
ccgggaucucucggaaauc

SEQ ID NO: 247559 - RNA, 19 nt, Artificial Sequence
  Description of Artificial Sequence: Synthetic oligonucleotide
  Antisense strand to SEQ ID NO: 247558
gauuuccgagagaucccgg

SEQ ID NO: 247560 - RNA, 19 nt, Artificial Sequence
  Description of Artificial Sequence: Synthetic oligonucleotide
  Sense strand starting at position 2482 SEQ ID NO: 3186
auuaauggucguuaauuac

SEQ ID NO: 247561 - RNA, 19 nt, Artificial Sequence
  Description of Artificial Sequence: Synthetic oligonucleotide
  Antisense strand to SEQ ID NO: 247560
guaauuaacgaccauuaau

SEQ ID NO: 247562 - RNA, 19 nt, Artificial Sequence
  Description of Artificial Sequence: Synthetic oligonucleotide
  Sense strand starting at position 2555 SEQ ID NO: 3186
ccucuugcaagugagguau

SEQ ID NO: 247563 - RNA, 19 nt, Artificial Sequence
  Description of Artificial Sequence: Synthetic oligonucleotide
  Antisense strand to SEQ ID NO: 247562
auaccucacuugcaagagg

SEQ ID NO: 247564 - RNA, 19 nt, Artificial Sequence
  Description of Artificial Sequence: Synthetic oligonucleotide
  Sense strand starting at position 2559 SEQ ID NO: 3186
uugcaagugagguauguaa

SEQ ID NO: 247565 - RNA, 19 nt, Artificial Sequence
  Description of Artificial Sequence: Synthetic oligonucleotide
  Antisense strand to SEQ ID NO: 247564
uuacauaccucacuugcaa

SEQ ID NO: 247566 - RNA, 19 nt, Artificial Sequence
  Description of Artificial Sequence: Synthetic oligonucleotide
  Sense strand starting at position 2561 SEQ ID NO: 3186
gcaagugagguauguaaag

SEQ ID NO: 247567 - RNA, 19 nt, Artificial Sequence
  Description of Artificial Sequence: Synthetic oligonucleotide
  Antisense strand to SEQ ID NO: 247566
cuuuacauaccucacuugc

SEQ ID NO: 247568 - RNA, 19 nt, Artificial Sequence
  Description of Artificial Sequence: Synthetic oligonucleotide
  Sense strand starting at position 2563 SEQ ID NO: 3186
aagugagguauguaaagcu

SEQ ID NO: 247569 - RNA, 19 nt, Artificial Sequence
  Description of Artificial Sequence: Synthetic oligonucleotide
  Antisense strand to SEQ ID NO: 247568
agcuuuacauaccucacuu

SEQ ID NO: 247570 - RNA, 19 nt, Artificial Sequence
  Description of Artificial Sequence: Synthetic oligonucleotide
  Sense strand starting at position 2570 SEQ ID NO: 3186
guauguaaagcuuaacuua

SEQ ID NO: 247571 - RNA, 19 nt, Artificial Sequence
  Description of Artificial Sequence: Synthetic oligonucleotide
  Antisense strand to SEQ ID NO: 247570
uaaguuaagcuuuacauac

SEQ ID NO: 247572 - RNA, 19 nt, Artificial Sequence
  Description of Artificial Sequence: Synthetic oligonucleotide
  Sense strand starting at position 2573 SEQ ID NO: 3186
uguaaagcuuaacuuagua

SEQ ID NO: 247573 - RNA, 19 nt, Artificial Sequence
  Description of Artificial Sequence: Synthetic oligonucleotide
  Antisense strand to SEQ ID NO: 247572
uacuaaguuaagcuuuaca

SEQ ID NO: 247574 - RNA, 19 nt, Artificial Sequence
  Description of Artificial Sequence: Synthetic oligonucleotide
  Sense strand starting at position 2581 SEQ ID NO: 3186
uuaacuuaguagucaaaga

SEQ ID NO: 247575 - RNA, 19 nt, Artificial Sequence
  Description of Artificial Sequence: Synthetic oligonucleotide
  Antisense strand to SEQ ID NO: 247574
ucuuugacuacuaaguuaa

SEQ ID NO: 247576 - RNA, 19 nt, Artificial Sequence
  Description of Artificial Sequence: Synthetic oligonucleotide
  Sense strand starting at position 2599 SEQ ID NO: 3186
aaaggauucgcagggcaaa

SEQ ID NO: 247577 - RNA, 19 nt, Artificial Sequence
  Description of Artificial Sequence: Synthetic oligonucleotide
  Antisense strand to SEQ ID NO: 247576
uuugcccugcgaauccuuu

SEQ ID NO: 247578 - RNA, 19 nt, Artificial Sequence
  Description of Artificial Sequence: Synthetic oligonucleotide
  Sense strand starting at position 2617 SEQ ID NO: 3186
agaauuggcagugaucguu

SEQ ID NO: 247579 - RNA, 19 nt, Artificial Sequence
  Description of Artificial Sequence: Synthetic oligonucleotide
  Antisense strand to SEQ ID NO: 247578
aacgaucacugccaauucu

SEQ ID NO: 247580 - RNA, 19 nt, Artificial Sequence
  Description of Artificial Sequence: Synthetic oligonucleotide
  Sense strand starting at position 2645 SEQ ID NO: 3186
gucagaauaaucgaagccu

SEQ ID NO: 247581 - RNA, 19 nt, Artificial Sequence
  Description of Artificial Sequence: Synthetic oligonucleotide
  Antisense strand to SEQ ID NO: 247580
aggcuucgauuauucugac

SEQ ID NO: 247582 - RNA, 19 nt, Artificial Sequence
  Description of Artificial Sequence: Synthetic oligonucleotide
  Sense strand starting at position 2674 SEQ ID NO: 3186
uuguuagcugcgguuguau

SEQ ID NO: 247583 - RNA, 19 nt, Artificial Sequence
  Description of Artificial Sequence: Synthetic oligonucleotide
  Antisense strand to SEQ ID NO: 247582
auacaaccgcagcuaacaa

SEQ ID NO: 247584 - RNA, 19 nt, Artificial Sequence
  Description of Artificial Sequence: Synthetic oligonucleotide
  Sense strand starting at position 2683 SEQ ID NO: 3186
gcgguuguaugauuuagaa

SEQ ID NO: 247585 - RNA, 19 nt, Artificial Sequence
  Description of Artificial Sequence: Synthetic oligonucleotide
  Antisense strand to SEQ ID NO: 247584
uucuaaaucauacaaccgc

SEQ ID NO: 247586 - RNA, 19 nt, Artificial Sequence
  Description of Artificial Sequence: Synthetic oligonucleotide
  Sense strand starting at position 2687 SEQ ID NO: 3186
uuguaugauuuagaaacac

SEQ ID NO: 247587 - RNA, 19 nt, Artificial Sequence
  Description of Artificial Sequence: Synthetic oligonucleotide
  Antisense strand to SEQ ID NO: 247586
guguuucuaaaucauacaa

SEQ ID NO: 247588 - RNA, 19 nt, Artificial Sequence
  Description of Artificial Sequence: Synthetic oligonucleotide
  Sense strand starting at position 2909 SEQ ID NO: 3186
cagauaguagucgaucaau

SEQ ID NO: 247589 - RNA, 19 nt, Artificial Sequence
  Description of Artificial Sequence: Synthetic oligonucleotide
  Antisense strand to SEQ ID NO: 247588
auugaucgacuacuaucug

SEQ ID NO: 247590 - RNA, 19 nt, Artificial Sequence
  Description of Artificial Sequence: Synthetic oligonucleotide
  Sense strand starting at position 2912 SEQ ID NO: 3186
auaguagucgaucaauaaa

SEQ ID NO: 247591 - RNA, 19 nt, Artificial Sequence
  Description of Artificial Sequence: Synthetic oligonucleotide
  Antisense strand to SEQ ID NO: 247590
uuuauugaucgacuacuau

SEQ ID NO: 247592 - RNA, 19 nt, Artificial Sequence
  Description of Artificial Sequence: Synthetic oligonucleotide
  Sense strand starting at position 2931 SEQ ID NO: 3186
auguccaaucagugaauga

SEQ ID NO: 247593 - RNA, 19 nt, Artificial Sequence
  Description of Artificial Sequence: Synthetic oligonucleotide
  Antisense strand to SEQ ID NO: 247592
ucauucacugauuggacau

SEQ ID NO: 247594 - RNA, 19 nt, Artificial Sequence
  Description of Artificial Sequence: Synthetic oligonucleotide
  Sense strand starting at position 2964 SEQ ID NO: 3186
gagcaaagugcccagagaa

SEQ ID NO: 247595 - RNA, 19 nt, Artificial Sequence
  Description of Artificial Sequence: Synthetic oligonucleotide
  Antisense strand to SEQ ID NO: 247594
uucucugggcacuuugcuc

SEQ ID NO: 247596 - RNA, 19 nt, Artificial Sequence
  Description of Artificial Sequence: Synthetic oligonucleotide
  Sense strand starting at position 3014 SEQ ID NO: 3186
gcuacagaaucuguugaac

SEQ ID NO: 247597 - RNA, 19 nt, Artificial Sequence
  Description of Artificial Sequence: Synthetic oligonucleotide
  Antisense strand to SEQ ID NO: 247596
guucaacagauucuguagc

SEQ ID NO: 247598 - RNA, 19 nt, Artificial Sequence
  Description of Artificial Sequence: Synthetic oligonucleotide
  Sense strand starting at position 3161 SEQ ID NO: 3186
ugugaaaggauauguauau

SEQ ID NO: 247599 - RNA, 19 nt, Artificial Sequence
  Description of Artificial Sequence: Synthetic oligonucleotide
  Antisense strand to SEQ ID NO: 247598
auauacauauccuuucaca

SEQ ID NO: 247600 - RNA, 19 nt, Artificial Sequence
  Description of Artificial Sequence: Synthetic oligonucleotide
  Sense strand starting at position 3162 SEQ ID NO: 3186
gugaaaggauauguauaua

SEQ ID NO: 247601 - RNA, 19 nt, Artificial Sequence
  Description of Artificial Sequence: Synthetic oligonucleotide
  Antisense strand to SEQ ID NO: 247600
uauauacauauccuuucac

SEQ ID NO: 247602 - RNA, 19 nt, Artificial Sequence
  Description of Artificial Sequence: Synthetic oligonucleotide
  Sense strand starting at position 3189 SEQ ID NO: 3186
ugaaaugccuaauucgaau

SEQ ID NO: 247603 - RNA, 19 nt, Artificial Sequence
  Description of Artificial Sequence: Synthetic oligonucleotide
  Antisense strand to SEQ ID NO: 247602
auucgaauuaggcauuuca

SEQ ID NO: 247604 - RNA, 19 nt, Artificial Sequence
  Description of Artificial Sequence: Synthetic oligonucleotide
  Sense strand starting at position 3421 SEQ ID NO: 3186
ucaggaguuccagguuaug

SEQ ID NO: 247605 - RNA, 19 nt, Artificial Sequence
  Description of Artificial Sequence: Synthetic oligonucleotide
  Antisense strand to SEQ ID NO: 247604
cauaaccuggaacuccuga

SEQ ID NO: 247606 - RNA, 19 nt, Artificial Sequence
  Description of Artificial Sequence: Synthetic oligonucleotide
  Sense strand starting at position 3424 SEQ ID NO: 3186
ggaguuccagguuaugaua

SEQ ID NO: 247607 - RNA, 19 nt, Artificial Sequence
  Description of Artificial Sequence: Synthetic oligonucleotide
  Antisense strand to SEQ ID NO: 247606
uaucauaaccuggaacucc

SEQ ID NO: 247608 - RNA, 19 nt, Artificial Sequence
  Description of Artificial Sequence: Synthetic oligonucleotide
  Sense strand starting at position 3432 SEQ ID NO: 3186
agguuaugauaagucauga

SEQ ID NO: 247609 - RNA, 19 nt, Artificial Sequence
  Description of Artificial Sequence: Synthetic oligonucleotide
  Antisense strand to SEQ ID NO: 247608
ucaugacuuaucauaaccu

SEQ ID NO: 247610 - RNA, 19 nt, Artificial Sequence
  Description of Artificial Sequence: Synthetic oligonucleotide
  Sense strand starting at position 3480 SEQ ID NO: 3186
agaacaagacccuguguuu

SEQ ID NO: 247611 - RNA, 19 nt, Artificial Sequence
  Description of Artificial Sequence: Synthetic oligonucleotide
  Antisense strand to SEQ ID NO: 247610
aaacacagggucuuguucu

SEQ ID NO: 247612 - RNA, 19 nt, Artificial Sequence
  Description of Artificial Sequence: Synthetic oligonucleotide
  Sense strand starting at position 3483 SEQ ID NO: 3186
acaagacccuguguuuaaa

SEQ ID NO: 247613 - RNA, 19 nt, Artificial Sequence
  Description of Artificial Sequence: Synthetic oligonucleotide
  Antisense strand to SEQ ID NO: 247612
uuuaaacacagggucuugu

SEQ ID NO: 247614 - RNA, 19 nt, Artificial Sequence
  Description of Artificial Sequence: Synthetic oligonucleotide
  Sense strand starting at position 3880 SEQ ID NO: 3186
cuagcaucugccugaaaga

SEQ ID NO: 247615 - RNA, 19 nt, Artificial Sequence
  Description of Artificial Sequence: Synthetic oligonucleotide
  Antisense strand to SEQ ID NO: 247614
ucuuucaggcagaugcuag

SEQ ID NO: 247616 - RNA, 19 nt, Artificial Sequence
  Description of Artificial Sequence: Synthetic oligonucleotide
  Sense strand starting at position 3900 SEQ ID NO: 3186
auuacugauugagagaaga

SEQ ID NO: 247617 - RNA, 19 nt, Artificial Sequence
  Description of Artificial Sequence: Synthetic oligonucleotide
  Antisense strand to SEQ ID NO: 247616
ucuucucucaaucaguaau

SEQ ID NO: 247618 - RNA, 19 nt, Artificial Sequence
  Description of Artificial Sequence: Synthetic oligonucleotide
  Sense strand starting at position 243 SEQ ID NO: 3185
ucugauuuaugaggagcaa

SEQ ID NO: 247619 - RNA, 19 nt, Artificial Sequence
  Description of Artificial Sequence: Synthetic oligonucleotide
  Antisense strand to SEQ ID NO: 247618
uugcuccucauaaaucaga

SEQ ID NO: 247620 - RNA, 19 nt, Artificial Sequence
  Description of Artificial Sequence: Synthetic oligonucleotide
  Sense strand starting at position 400 SEQ ID NO: 3185
aggcaaguucaggguuaca

SEQ ID NO: 247621 - RNA, 19 nt, Artificial Sequence
  Description of Artificial Sequence: Synthetic oligonucleotide
  Antisense strand to SEQ ID NO: 247620
uguaacccugaacuugccu

SEQ ID NO: 247622 - RNA, 19 nt, Artificial Sequence
  Description of Artificial Sequence: Synthetic oligonucleotide
  Sense strand starting at position 466 SEQ ID NO: 3185
aguuuauuguaugucacau

SEQ ID NO: 247623 - RNA, 19 nt, Artificial Sequence
  Description of Artificial Sequence: Synthetic oligonucleotide
  Antisense strand to SEQ ID NO: 247622
augugacauacaauaaacu

SEQ ID NO: 247624 - RNA, 19 nt, Artificial Sequence
  Description of Artificial Sequence: Synthetic oligonucleotide
  Sense strand starting at position 570 SEQ ID NO: 3185
gcgugugugagagaauuac

SEQ ID NO: 247625 - RNA, 19 nt, Artificial Sequence
  Description of Artificial Sequence: Synthetic oligonucleotide
  Antisense strand to SEQ ID NO: 247624
guaauucucucacacacgc

SEQ ID NO: 247626 - RNA, 19 nt, Artificial Sequence
  Description of Artificial Sequence: Synthetic oligonucleotide
  Sense strand starting at position 576 SEQ ID NO: 3185
gugagagaauuacuaugca

SEQ ID NO: 247627 - RNA, 19 nt, Artificial Sequence
  Description of Artificial Sequence: Synthetic oligonucleotide
  Antisense strand to SEQ ID NO: 247626
ugcauaguaauucucucac

SEQ ID NO: 247628 - RNA, 19 nt, Artificial Sequence
  Description of Artificial Sequence: Synthetic oligonucleotide
  Sense strand starting at position 858 SEQ ID NO: 3185
gguagaacuacaggcauau

SEQ ID NO: 247629 - RNA, 19 nt, Artificial Sequence
  Description of Artificial Sequence: Synthetic oligonucleotide
  Antisense strand to SEQ ID NO: 247628
auaugccuguaguucuacc

SEQ ID NO: 247630 - RNA, 19 nt, Artificial Sequence
  Description of Artificial Sequence: Synthetic oligonucleotide
  Sense strand starting at position 931 SEQ ID NO: 3185
ccacauugccuaggcuuaa

SEQ ID NO: 247631 - RNA, 19 nt, Artificial Sequence
  Description of Artificial Sequence: Synthetic oligonucleotide
  Antisense strand to SEQ ID NO: 247630
uuaagccuaggcaaugugg

SEQ ID NO: 247632 - RNA, 19 nt, Artificial Sequence
  Description of Artificial Sequence: Synthetic oligonucleotide
  Sense strand starting at position 1005 SEQ ID NO: 3185
aucaauucuuggucaaaga

SEQ ID NO: 247633 - RNA, 19 nt, Artificial Sequence
  Description of Artificial Sequence: Synthetic oligonucleotide
  Antisense strand to SEQ ID NO: 247632
ucuuugaccaagaauugau

SEQ ID NO: 247634 - RNA, 19 nt, Artificial Sequence
  Description of Artificial Sequence: Synthetic oligonucleotide
  Sense strand starting at position 1041 SEQ ID NO: 3185
uuucuuugucauuaaggua

SEQ ID NO: 247635 - RNA, 19 nt, Artificial Sequence
  Description of Artificial Sequence: Synthetic oligonucleotide
  Antisense strand to SEQ ID NO: 247634
uaccuuaaugacaaagaaa

SEQ ID NO: 247636 - RNA, 19 nt, Artificial Sequence
  Description of Artificial Sequence: Synthetic oligonucleotide
  Sense strand starting at position 1159 SEQ ID NO: 3185
gugcuuccucuacauaaag

SEQ ID NO: 247637 - RNA, 19 nt, Artificial Sequence
  Description of Artificial Sequence: Synthetic oligonucleotide
  Antisense strand to SEQ ID NO: 247636
cuuuauguagaggaagcac

SEQ ID NO: 247638 - RNA, 19 nt, Artificial Sequence
  Description of Artificial Sequence: Synthetic oligonucleotide
  Sense strand starting at position 1183 SEQ ID NO: 3185
uccuaagugcuagagauac

SEQ ID NO: 247639 - RNA, 19 nt, Artificial Sequence
  Description of Artificial Sequence: Synthetic oligonucleotide
  Antisense strand to SEQ ID NO: 247638
guaucucuagcacuuagga

SEQ ID NO: 247640 - RNA, 19 nt, Artificial Sequence
  Description of Artificial Sequence: Synthetic oligonucleotide
  Sense strand starting at position 1575 SEQ ID NO: 3185
gcaagaaacuagccaauaa

SEQ ID NO: 247641 - RNA, 19 nt, Artificial Sequence
  Description of Artificial Sequence: Synthetic oligonucleotide
  Antisense strand to SEQ ID NO: 247640
uuauuggcuaguuucuugc

SEQ ID NO: 247642 - RNA, 19 nt, Artificial Sequence
  Description of Artificial Sequence: Synthetic oligonucleotide
  Sense strand starting at position 1684 SEQ ID NO: 3185
agcaguuaucucuaaggau

SEQ ID NO: 247643 - RNA, 19 nt, Artificial Sequence
  Description of Artificial Sequence: Synthetic oligonucleotide
  Antisense strand to SEQ ID NO: 247642
auccuuagagauaacugcu

SEQ ID NO: 247644 - RNA, 19 nt, Artificial Sequence
  Description of Artificial Sequence: Synthetic oligonucleotide
  Sense strand starting at position 1801 SEQ ID NO: 3185
agaaguuauuucuaaggaa

SEQ ID NO: 247645 - RNA, 19 nt, Artificial Sequence
  Description of Artificial Sequence: Synthetic oligonucleotide
  Antisense strand to SEQ ID NO: 247644
uuccuuagaaauaacuucu

SEQ ID NO: 247646 - RNA, 19 nt, Artificial Sequence
  Description of Artificial Sequence: Synthetic oligonucleotide
  Sense strand starting at position 2029 SEQ ID NO: 3185
ccgggaguggcacaagaua

SEQ ID NO: 247647 - RNA, 19 nt, Artificial Sequence
  Description of Artificial Sequence: Synthetic oligonucleotide
  Antisense strand to SEQ ID NO: 247646
uaucuugugccacucccgg

SEQ ID NO: 247648 - RNA, 19 nt, Artificial Sequence
  Description of Artificial Sequence: Synthetic oligonucleotide
  Sense strand starting at position 2055 SEQ ID NO: 3185
ggagccuggcaauaacuaa

SEQ ID NO: 247649 - RNA, 19 nt, Artificial Sequence
  Description of Artificial Sequence: Synthetic oligonucleotide
  Antisense strand to SEQ ID NO: 247648
uuaguuauugccaggcucc

SEQ ID NO: 247650 - RNA, 19 nt, Artificial Sequence
  Description of Artificial Sequence: Synthetic oligonucleotide
  Sense strand starting at position 2062 SEQ ID NO: 3185
ggcaauaacuaagucaaau

SEQ ID NO: 247651 - RNA, 19 nt, Artificial Sequence
  Description of Artificial Sequence: Synthetic oligonucleotide
  Antisense strand to SEQ ID NO: 247650
auuugacuuaguuauugcc

SEQ ID NO: 247652 - RNA, 19 nt, Artificial Sequence
  Description of Artificial Sequence: Synthetic oligonucleotide
  Sense strand starting at position 2274 SEQ ID NO: 3185
gagugugaucugcaguaag

SEQ ID NO: 247653 - RNA, 19 nt, Artificial Sequence
  Description of Artificial Sequence: Synthetic oligonucleotide
  Antisense strand to SEQ ID NO: 247652
cuuacugcagaucacacuc

SEQ ID NO: 247654 - RNA, 19 nt, Artificial Sequence
  Description of Artificial Sequence: Synthetic oligonucleotide
  Sense strand starting at position 2404 SEQ ID NO: 3185
ccuucuugagugcauugau

SEQ ID NO: 247655 - RNA, 19 nt, Artificial Sequence
  Description of Artificial Sequence: Synthetic oligonucleotide
  Antisense strand to SEQ ID NO: 247654
aucaaugcacucaagaagg

SEQ ID NO: 247656 - RNA, 19 nt, Artificial Sequence
  Description of Artificial Sequence: Synthetic oligonucleotide
  Sense strand starting at position 2411 SEQ ID NO: 3185
gagugcauugaugggagaa

SEQ ID NO: 247657 - RNA, 19 nt, Artificial Sequence
  Description of Artificial Sequence: Synthetic oligonucleotide
  Antisense strand to SEQ ID NO: 247656
uucucccaucaaugcacuc

SEQ ID NO: 247658 - RNA, 19 nt, Artificial Sequence
  Description of Artificial Sequence: Synthetic oligonucleotide
  Sense strand starting at position 2412 SEQ ID NO: 3185
agugcauugaugggagaaa

SEQ ID NO: 247659 - RNA, 19 nt, Artificial Sequence
  Description of Artificial Sequence: Synthetic oligonucleotide
  Antisense strand to SEQ ID NO: 247658
uuucucccaucaaugcacu

SEQ ID NO: 247660 - RNA, 19 nt, Artificial Sequence
  Description of Artificial Sequence: Synthetic oligonucleotide
  Sense strand starting at position 2453 SEQ ID NO: 3185
aaggcagauuaaguacuua

SEQ ID NO: 247661 - RNA, 19 nt, Artificial Sequence
  Description of Artificial Sequence: Synthetic oligonucleotide
  Antisense strand to SEQ ID NO: 247660
uaaguacuuaaucugccuu

SEQ ID NO: 247662 - RNA, 19 nt, Artificial Sequence
  Description of Artificial Sequence: Synthetic oligonucleotide
  Sense strand starting at position 2636 SEQ ID NO: 3185
gugagcugugauuacaagu

SEQ ID NO: 247663 - RNA, 19 nt, Artificial Sequence
  Description of Artificial Sequence: Synthetic oligonucleotide
  Antisense strand to SEQ ID NO: 247662
acuuguaaucacagcucac

SEQ ID NO: 247664 - RNA, 19 nt, Artificial Sequence
  Description of Artificial Sequence: Synthetic oligonucleotide
  Sense strand starting at position 2647 SEQ ID NO: 3185
uuacaagugcuacaaagua

SEQ ID NO: 247665 - RNA, 19 nt, Artificial Sequence
  Description of Artificial Sequence: Synthetic oligonucleotide
  Antisense strand to SEQ ID NO: 247664
uacuuuguagcacuuguaa

SEQ ID NO: 247666 - RNA, 19 nt, Artificial Sequence
  Description of Artificial Sequence: Synthetic oligonucleotide
  Sense strand starting at position 2688 SEQ ID NO: 3185
augagucccugucucaaga

SEQ ID NO: 247667 - RNA, 19 nt, Artificial Sequence
  Description of Artificial Sequence: Synthetic oligonucleotide
  Antisense strand to SEQ ID NO: 247666
ucuugagacagggacucau

SEQ ID NO: 247668 - RNA, 19 nt, Artificial Sequence
  Description of Artificial Sequence: Synthetic oligonucleotide
  Sense strand starting at position 2759 SEQ ID NO: 3185
guuuguuugagauaucugu

SEQ ID NO: 247669 - RNA, 19 nt, Artificial Sequence
  Description of Artificial Sequence: Synthetic oligonucleotide
  Antisense strand to SEQ ID NO: 247668
acagauaucucaaacaaac

SEQ ID NO: 247670 - RNA, 19 nt, Artificial Sequence
  Description of Artificial Sequence: Synthetic oligonucleotide
  Sense strand starting at position 2763 SEQ ID NO: 3185
guuugagauaucugugagu

SEQ ID NO: 247671 - RNA, 19 nt, Artificial Sequence
  Description of Artificial Sequence: Synthetic oligonucleotide
  Antisense strand to SEQ ID NO: 247670
acucacagauaucucaaac

SEQ ID NO: 247672 - RNA, 19 nt, Artificial Sequence
  Description of Artificial Sequence: Synthetic oligonucleotide
  Sense strand starting at position 2765 SEQ ID NO: 3185
uugagauaucugugaguca

SEQ ID NO: 247673 - RNA, 19 nt, Artificial Sequence
  Description of Artificial Sequence: Synthetic oligonucleotide
  Antisense strand to SEQ ID NO: 247672
ugacucacagauaucucaa

SEQ ID NO: 247674 - RNA, 19 nt, Artificial Sequence
  Description of Artificial Sequence: Synthetic oligonucleotide
  Sense strand starting at position 2812 SEQ ID NO: 3185
gacaguaugcuguaucaga

SEQ ID NO: 247675 - RNA, 19 nt, Artificial Sequence
  Description of Artificial Sequence: Synthetic oligonucleotide
  Antisense strand to SEQ ID NO: 247674
ucugauacagcauacuguc

SEQ ID NO: 247676 - RNA, 19 nt, Artificial Sequence
  Description of Artificial Sequence: Synthetic oligonucleotide
  Sense strand starting at position 2820 SEQ ID NO: 3185
gcuguaucagaacacaguu

SEQ ID NO: 247677 - RNA, 19 nt, Artificial Sequence
  Description of Artificial Sequence: Synthetic oligonucleotide
  Antisense strand to SEQ ID NO: 247676
aacuguguucugauacagc

SEQ ID NO: 247678 - RNA, 19 nt, Artificial Sequence
  Description of Artificial Sequence: Synthetic oligonucleotide
  Sense strand starting at position 2880 SEQ ID NO: 3185
augagugaguucucaggga

SEQ ID NO: 247679 - RNA, 19 nt, Artificial Sequence
  Description of Artificial Sequence: Synthetic oligonucleotide
  Antisense strand to SEQ ID NO: 247678
ucccugagaacucacucau

SEQ ID NO: 247680 - RNA, 19 nt, Artificial Sequence
  Description of Artificial Sequence: Synthetic oligonucleotide
  Sense strand starting at position 2884 SEQ ID NO: 3185
gugaguucucagggacaac

SEQ ID NO: 247681 - RNA, 19 nt, Artificial Sequence
  Description of Artificial Sequence: Synthetic oligonucleotide
  Antisense strand to SEQ ID NO: 247680
guugucccugagaacucac

SEQ ID NO: 247682 - RNA, 19 nt, Artificial Sequence
  Description of Artificial Sequence: Synthetic oligonucleotide
  Sense strand starting at position 2973 SEQ ID NO: 3185
auugaaauauaggaggaaa

SEQ ID NO: 247683 - RNA, 19 nt, Artificial Sequence
  Description of Artificial Sequence: Synthetic oligonucleotide
  Antisense strand to SEQ ID NO: 247682
uuuccuccuauauuucaau

SEQ ID NO: 247684 - RNA, 19 nt, Artificial Sequence
  Description of Artificial Sequence: Synthetic oligonucleotide
  Sense strand starting at position 3121 SEQ ID NO: 3185
gugaaauuagaacgaaugu

SEQ ID NO: 247685 - RNA, 19 nt, Artificial Sequence
  Description of Artificial Sequence: Synthetic oligonucleotide
  Antisense strand to SEQ ID NO: 247684
acauucguucuaauuucac

SEQ ID NO: 247686 - RNA, 19 nt, Artificial Sequence
  Description of Artificial Sequence: Synthetic oligonucleotide
  Sense strand starting at position 3184 SEQ ID NO: 3185
uuucuuauucuggguagua

SEQ ID NO: 247687 - RNA, 19 nt, Artificial Sequence
  Description of Artificial Sequence: Synthetic oligonucleotide
  Antisense strand to SEQ ID NO: 247686
uacuacccagaauaagaaa

SEQ ID NO: 247688 - RNA, 19 nt, Artificial Sequence
  Description of Artificial Sequence: Synthetic oligonucleotide
  Sense strand starting at position 3185 SEQ ID NO: 3185
uucuuauucuggguaguag

SEQ ID NO: 247689 - RNA, 19 nt, Artificial Sequence
  Description of Artificial Sequence: Synthetic oligonucleotide
  Antisense strand to SEQ ID NO: 247688
cuacuacccagaauaagaa

SEQ ID NO: 247690 - RNA, 19 nt, Artificial Sequence
  Description of Artificial Sequence: Synthetic oligonucleotide
  Sense strand starting at position 3241 SEQ ID NO: 3185
uacgaauugcaggguuaca

SEQ ID NO: 247691 - RNA, 19 nt, Artificial Sequence
  Description of Artificial Sequence: Synthetic oligonucleotide
  Antisense strand to SEQ ID NO: 247690
uguaacccugcaauucgua

SEQ ID NO: 247692 - RNA, 19 nt, Artificial Sequence
  Description of Artificial Sequence: Synthetic oligonucleotide
  Sense strand starting at position 3808 SEQ ID NO: 3185
agagcagcucgucaucaaa

SEQ ID NO: 247693 - RNA, 19 nt, Artificial Sequence
  Description of Artificial Sequence: Synthetic oligonucleotide
  Antisense strand to SEQ ID NO: 247692
uuugaugacgagcugcucu

SEQ ID NO: 247694 - RNA, 19 nt, Artificial Sequence
  Description of Artificial Sequence: Synthetic oligonucleotide
  Sense strand starting at position 3847 SEQ ID NO: 3185
agagcagaguugguuaaca

SEQ ID NO: 247695 - RNA, 19 nt, Artificial Sequence
  Description of Artificial Sequence: Synthetic oligonucleotide
  Antisense strand to SEQ ID NO: 247694
uguuaaccaacucugcucu

SEQ ID NO: 247696 - RNA, 19 nt, Artificial Sequence
  Description of Artificial Sequence: Synthetic oligonucleotide
  Sense strand starting at position 3849 SEQ ID NO: 3185
agcagaguugguuaacaca

SEQ ID NO: 247697 - RNA, 19 nt, Artificial Sequence
  Description of Artificial Sequence: Synthetic oligonucleotide
  Antisense strand to SEQ ID NO: 247696
uguguuaaccaacucugcu

SEQ ID NO: 247698 - RNA, 19 nt, Artificial Sequence
  Description of Artificial Sequence: Synthetic oligonucleotide
  Sense strand starting at position 214 SEQ ID NO: 3187
caaugauccugauuggcga

SEQ ID NO: 247699 - RNA, 19 nt, Artificial Sequence
  Description of Artificial Sequence: Synthetic oligonucleotide
  Antisense strand to SEQ ID NO: 247698
ucgccaaucaggaucauug

SEQ ID NO: 247700 - RNA, 19 nt, Artificial Sequence
  Description of Artificial Sequence: Synthetic oligonucleotide
  Sense strand starting at position 336 SEQ ID NO: 3187
ucuauuauugcuggaggaa

SEQ ID NO: 247701 - RNA, 19 nt, Artificial Sequence
  Description of Artificial Sequence: Synthetic oligonucleotide
  Antisense strand to SEQ ID NO: 247700
uuccuccagcaauaauaga

SEQ ID NO: 247702 - RNA, 19 nt, Artificial Sequence
  Description of Artificial Sequence: Synthetic oligonucleotide
  Sense strand starting at position 364 SEQ ID NO: 3187
ucaugauuuccuugcuguc

SEQ ID NO: 247703 - RNA, 19 nt, Artificial Sequence
  Description of Artificial Sequence: Synthetic oligonucleotide
  Antisense strand to SEQ ID NO: 247702
gacagcaaggaaaucauga

SEQ ID NO: 247704 - RNA, 19 nt, Artificial Sequence
  Description of Artificial Sequence: Synthetic oligonucleotide
  Sense strand starting at position 433 SEQ ID NO: 3187
ugaagagcucucugagcca

SEQ ID NO: 247705 - RNA, 19 nt, Artificial Sequence
  Description of Artificial Sequence: Synthetic oligonucleotide
  Antisense strand to SEQ ID NO: 247704
uggcucagagagcucuuca

SEQ ID NO: 247706 - RNA, 19 nt, Artificial Sequence
  Description of Artificial Sequence: Synthetic oligonucleotide
  Sense strand starting at position 514 SEQ ID NO: 3187
gaugaaugugauggauccu

SEQ ID NO: 247707 - RNA, 19 nt, Artificial Sequence
  Description of Artificial Sequence: Synthetic oligonucleotide
  Antisense strand to SEQ ID NO: 247706
aggauccaucacauucauc

SEQ ID NO: 247708 - RNA, 19 nt, Artificial Sequence
  Description of Artificial Sequence: Synthetic oligonucleotide
  Sense strand starting at position 555 SEQ ID NO: 3187
auacaaaguuuggcaugaa

SEQ ID NO: 247709 - RNA, 19 nt, Artificial Sequence
  Description of Artificial Sequence: Synthetic oligonucleotide
  Antisense strand to SEQ ID NO: 247708
uucaugccaaacuuuguau

SEQ ID NO: 247710 - RNA, 19 nt, Artificial Sequence
  Description of Artificial Sequence: Synthetic oligonucleotide
  Sense strand starting at position 567 SEQ ID NO: 3187
gcaugaauuuaaggaauuc

SEQ ID NO: 247711 - RNA, 19 nt, Artificial Sequence
  Description of Artificial Sequence: Synthetic oligonucleotide
  Antisense strand to SEQ ID NO: 247710
gaauuccuuaaauucaugc

SEQ ID NO: 247712 - RNA, 19 nt, Artificial Sequence
  Description of Artificial Sequence: Synthetic oligonucleotide
  Sense strand starting at position 594 SEQ ID NO: 3187
aaggauauuucguggauaa

SEQ ID NO: 247713 - RNA, 19 nt, Artificial Sequence
  Description of Artificial Sequence: Synthetic oligonucleotide
  Antisense strand to SEQ ID NO: 247712
uuauccacgaaauauccuu

SEQ ID NO: 247714 - RNA, 19 nt, Artificial Sequence
  Description of Artificial Sequence: Synthetic oligonucleotide
  Sense strand starting at position 753 SEQ ID NO: 3187
gaccaaagucaacguucuu

SEQ ID NO: 247715 - RNA, 19 nt, Artificial Sequence
  Description of Artificial Sequence: Synthetic oligonucleotide
  Antisense strand to SEQ ID NO: 247714
aagaacguugacuuugguc

SEQ ID NO: 247716 - RNA, 19 nt, Artificial Sequence
  Description of Artificial Sequence: Synthetic oligonucleotide
  Sense strand starting at position 1164 SEQ ID NO: 3187
uacugaagccgagaacuuu

SEQ ID NO: 247717 - RNA, 19 nt, Artificial Sequence
  Description of Artificial Sequence: Synthetic oligonucleotide
  Antisense strand to SEQ ID NO: 247716
aaaguucucggcuucagua

SEQ ID NO: 247718 - RNA, 19 nt, Artificial Sequence
  Description of Artificial Sequence: Synthetic oligonucleotide
  Sense strand starting at position 2725 SEQ ID NO: 3187
agaauuaagucuguuucuu

SEQ ID NO: 247719 - RNA, 19 nt, Artificial Sequence
  Description of Artificial Sequence: Synthetic oligonucleotide
  Antisense strand to SEQ ID NO: 247718
aagaaacagacuuaauucu

SEQ ID NO: 247720 - RNA, 19 nt, Artificial Sequence
  Description of Artificial Sequence: Synthetic oligonucleotide
  Sense strand starting at position 2729 SEQ ID NO: 3187
uuaagucuguuucuuaaca

SEQ ID NO: 247721 - RNA, 19 nt, Artificial Sequence
  Description of Artificial Sequence: Synthetic oligonucleotide
  Antisense strand to SEQ ID NO: 247720
uguuaagaaacagacuuaa

SEQ ID NO: 247722 - RNA, 19 nt, Artificial Sequence
  Description of Artificial Sequence: Synthetic oligonucleotide
  Sense strand starting at position 2756 SEQ ID NO: 3187
ucacaugugccagaaguua

SEQ ID NO: 247723 - RNA, 19 nt, Artificial Sequence
  Description of Artificial Sequence: Synthetic oligonucleotide
  Antisense strand to SEQ ID NO: 247722
uaacuucuggcacauguga

SEQ ID NO: 247724 - RNA, 19 nt, Artificial Sequence
  Description of Artificial Sequence: Synthetic oligonucleotide
  Sense strand starting at position 2840 SEQ ID NO: 3187
guguaaagcuggagaagag

SEQ ID NO: 247725 - RNA, 19 nt, Artificial Sequence
  Description of Artificial Sequence: Synthetic oligonucleotide
  Antisense strand to SEQ ID NO: 247724
cucuucuccagcuuuacac

SEQ ID NO: 247726 - RNA, 19 nt, Artificial Sequence
  Description of Artificial Sequence: Synthetic oligonucleotide
  Sense strand starting at position 2933 SEQ ID NO: 3187
auccucaucagucgggaau

SEQ ID NO: 247727 - RNA, 19 nt, Artificial Sequence
  Description of Artificial Sequence: Synthetic oligonucleotide
  Antisense strand to SEQ ID NO: 247726
auucccgacugaugaggau

SEQ ID NO: 247728 - RNA, 19 nt, Artificial Sequence
  Description of Artificial Sequence: Synthetic oligonucleotide
  Sense strand starting at position 2962 SEQ ID NO: 3187
gggagaugcaaauguagag

SEQ ID NO: 247729 - RNA, 19 nt, Artificial Sequence
  Description of Artificial Sequence: Synthetic oligonucleotide
  Antisense strand to SEQ ID NO: 247728
cucuacauuugcaucuccc

SEQ ID NO: 247730 - RNA, 19 nt, Artificial Sequence
  Description of Artificial Sequence: Synthetic oligonucleotide
  Sense strand starting at position 3072 SEQ ID NO: 3187
gguagaaaguaucuccuuu

SEQ ID NO: 247731 - RNA, 19 nt, Artificial Sequence
  Description of Artificial Sequence: Synthetic oligonucleotide
  Antisense strand to SEQ ID NO: 247730
aaaggagauacuuucuacc

SEQ ID NO: 247732 - RNA, 19 nt, Artificial Sequence
  Description of Artificial Sequence: Synthetic oligonucleotide
  Sense strand starting at position 3129 SEQ ID NO: 3187
gggacauaguccguuuccu

SEQ ID NO: 247733 - RNA, 19 nt, Artificial Sequence
  Description of Artificial Sequence: Synthetic oligonucleotide
  Antisense strand to SEQ ID NO: 247732
aggaaacggacuauguccc

SEQ ID NO: 247734 - RNA, 19 nt, Artificial Sequence
  Description of Artificial Sequence: Synthetic oligonucleotide
  Sense strand starting at position 3137 SEQ ID NO: 3187
guccguuuccuucugcuua

SEQ ID NO: 247735 - RNA, 19 nt, Artificial Sequence
  Description of Artificial Sequence: Synthetic oligonucleotide
  Antisense strand to SEQ ID NO: 247734
uaagcagaaggaaacggac

SEQ ID NO: 247736 - RNA, 19 nt, Artificial Sequence
  Description of Artificial Sequence: Synthetic oligonucleotide
  Sense strand starting at position 3168 SEQ ID NO: 3187
caugucuuccugugaugag

SEQ ID NO: 247737 - RNA, 19 nt, Artificial Sequence
  Description of Artificial Sequence: Synthetic oligonucleotide
  Antisense strand to SEQ ID NO: 247736
cucaucacaggaagacaug

SEQ ID NO: 247738 - RNA, 19 nt, Artificial Sequence
  Description of Artificial Sequence: Synthetic oligonucleotide
  Sense strand starting at position 3172 SEQ ID NO: 3187
ucuuccugugaugagcaaa

SEQ ID NO: 247739 - RNA, 19 nt, Artificial Sequence
  Description of Artificial Sequence: Synthetic oligonucleotide
  Antisense strand to SEQ ID NO: 247738
uuugcucaucacaggaaga

SEQ ID NO: 247740 - RNA, 19 nt, Artificial Sequence
  Description of Artificial Sequence: Synthetic oligonucleotide
  Sense strand starting at position 3245 SEQ ID NO: 3187
aguuaauugcucucgcucu

SEQ ID NO: 247741 - RNA, 19 nt, Artificial Sequence
  Description of Artificial Sequence: Synthetic oligonucleotide
  Antisense strand to SEQ ID NO: 247740
agagcgagagcaauuaacu

SEQ ID NO: 247742 - RNA, 19 nt, Artificial Sequence
  Description of Artificial Sequence: Synthetic oligonucleotide
  Sense strand starting at position 3288 SEQ ID NO: 3187
ugggaaauauuggagagau

SEQ ID NO: 247743 - RNA, 19 nt, Artificial Sequence
  Description of Artificial Sequence: Synthetic oligonucleotide
  Antisense strand to SEQ ID NO: 247742
aucucuccaauauuuccca

SEQ ID NO: 247744 - RNA, 19 nt, Artificial Sequence
  Description of Artificial Sequence: Synthetic oligonucleotide
  Sense strand starting at position 3301 SEQ ID NO: 3187
agagauacuuuggaauaau

SEQ ID NO: 247745 - RNA, 19 nt, Artificial Sequence
  Description of Artificial Sequence: Synthetic oligonucleotide
  Antisense strand to SEQ ID NO: 247744
auuauuccaaaguaucucu

SEQ ID NO: 247746 - RNA, 19 nt, Artificial Sequence
  Description of Artificial Sequence: Synthetic oligonucleotide
  Sense strand starting at position 3310 SEQ ID NO: 3187
uuggaauaauaggagacua

SEQ ID NO: 247747 - RNA, 19 nt, Artificial Sequence
  Description of Artificial Sequence: Synthetic oligonucleotide
  Antisense strand to SEQ ID NO: 247746
uagucuccuauuauuccaa

SEQ ID NO: 247748 - RNA, 19 nt, Artificial Sequence
  Description of Artificial Sequence: Synthetic oligonucleotide
  Sense strand starting at position 3323 SEQ ID NO: 3187
agacuauuacuuugaaguc

SEQ ID NO: 247749 - RNA, 19 nt, Artificial Sequence
  Description of Artificial Sequence: Synthetic oligonucleotide
  Antisense strand to SEQ ID NO: 247748
gacuucaaaguaauagucu

SEQ ID NO: 247750 - RNA, 19 nt, Artificial Sequence
  Description of Artificial Sequence: Synthetic oligonucleotide
  Sense strand starting at position 3378 SEQ ID NO: 3187
ggacaacaaucucacugaa

SEQ ID NO: 247751 - RNA, 19 nt, Artificial Sequence
  Description of Artificial Sequence: Synthetic oligonucleotide
  Antisense strand to SEQ ID NO: 247750
uucagugagauuguugucc

SEQ ID NO: 247752 - RNA, 19 nt, Artificial Sequence
  Description of Artificial Sequence: Synthetic oligonucleotide
  Sense strand starting at position 3444 SEQ ID NO: 3187
gcgguaggugcuuuguaaa

SEQ ID NO: 247753 - RNA, 19 nt, Artificial Sequence
  Description of Artificial Sequence: Synthetic oligonucleotide
  Antisense strand to SEQ ID NO: 247752
uuuacaaagcaccuaccgc

SEQ ID NO: 247754 - RNA, 19 nt, Artificial Sequence
  Description of Artificial Sequence: Synthetic oligonucleotide
  Sense strand starting at position 3494 SEQ ID NO: 3187
ugcacugagcacugugaaa

SEQ ID NO: 247755 - RNA, 19 nt, Artificial Sequence
  Description of Artificial Sequence: Synthetic oligonucleotide
  Antisense strand to SEQ ID NO: 247754
uuucacagugcucagugca

SEQ ID NO: 247756 - RNA, 19 nt, Artificial Sequence
  Description of Artificial Sequence: Synthetic oligonucleotide
  Sense strand starting at position 3496 SEQ ID NO: 3187
cacugagcacugugaaagu

SEQ ID NO: 247757 - RNA, 19 nt, Artificial Sequence
  Description of Artificial Sequence: Synthetic oligonucleotide
  Antisense strand to SEQ ID NO: 247756
acuuucacagugcucagug

SEQ ID NO: 247758 - RNA, 19 nt, Artificial Sequence
  Description of Artificial Sequence: Synthetic oligonucleotide
  Sense strand starting at position 3522 SEQ ID NO: 3187
agggauuucugacagauug

SEQ ID NO: 247759 - RNA, 19 nt, Artificial Sequence
  Description of Artificial Sequence: Synthetic oligonucleotide
  Antisense strand to SEQ ID NO: 247758
caaucugucagaaaucccu

SEQ ID NO: 247760 - RNA, 19 nt, Artificial Sequence
  Description of Artificial Sequence: Synthetic oligonucleotide
  Sense strand starting at position 3631 SEQ ID NO: 3187
ggauguucuaggcagugga

SEQ ID NO: 247761 - RNA, 19 nt, Artificial Sequence
  Description of Artificial Sequence: Synthetic oligonucleotide
  Antisense strand to SEQ ID NO: 247760
uccacugccuagaacaucc

SEQ ID NO: 247762 - RNA, 19 nt, Artificial Sequence
  Description of Artificial Sequence: Synthetic oligonucleotide
  Sense strand starting at position 3662 SEQ ID NO: 3187
gaaagugagaguggucaca

SEQ ID NO: 247763 - RNA, 19 nt, Artificial Sequence
  Description of Artificial Sequence: Synthetic oligonucleotide
  Antisense strand to SEQ ID NO: 247762
ugugaccacucucacuuuc

SEQ ID NO: 247764 - RNA, 19 nt, Artificial Sequence
  Description of Artificial Sequence: Synthetic oligonucleotide
  Sense strand starting at position 3690 SEQ ID NO: 3187
cagauuccucauggcugua

SEQ ID NO: 247765 - RNA, 19 nt, Artificial Sequence
  Description of Artificial Sequence: Synthetic oligonucleotide
  Antisense strand to SEQ ID NO: 247764
uacagccaugaggaaucug

SEQ ID NO: 247766 - RNA, 19 nt, Artificial Sequence
  Description of Artificial Sequence: Synthetic oligonucleotide
  Sense strand starting at position 3742 SEQ ID NO: 3187
gcaguugagguccaguuua

SEQ ID NO: 247767 - RNA, 19 nt, Artificial Sequence
  Description of Artificial Sequence: Synthetic oligonucleotide
  Antisense strand to SEQ ID NO: 247766
uaaacuggaccucaacugc

SEQ ID NO: 247768 - RNA, 19 nt, Artificial Sequence
  Description of Artificial Sequence: Synthetic oligonucleotide
  Sense strand starting at position 3769 SEQ ID NO: 3187
cucguauacacaggaguuu

SEQ ID NO: 247769 - RNA, 19 nt, Artificial Sequence
  Description of Artificial Sequence: Synthetic oligonucleotide
  Antisense strand to SEQ ID NO: 247768
aaacuccuguguauacgag

SEQ ID NO: 247770 - RNA, 19 nt, Artificial Sequence
  Description of Artificial Sequence: Synthetic oligonucleotide
  Sense strand starting at position 3882 SEQ ID NO: 3187
agcaguguagcagaugaau

SEQ ID NO: 247771 - RNA, 19 nt, Artificial Sequence
  Description of Artificial Sequence: Synthetic oligonucleotide
  Antisense strand to SEQ ID NO: 247770
auucaucugcuacacugcu

SEQ ID NO: 247772 - RNA, 19 nt, Artificial Sequence
  Description of Artificial Sequence: Synthetic oligonucleotide
  Sense strand starting at position 3934 SEQ ID NO: 3187
agagcagauucagugagau

SEQ ID NO: 247773 - RNA, 19 nt, Artificial Sequence
  Description of Artificial Sequence: Synthetic oligonucleotide
  Antisense strand to SEQ ID NO: 247772
aucucacugaaucugcucu

SEQ ID NO: 247774 - RNA, 19 nt, Artificial Sequence
  Description of Artificial Sequence: Synthetic oligonucleotide
  Sense strand starting at position 3956 SEQ ID NO: 3187
gaaagauucuaagucuagc

SEQ ID NO: 247775 - RNA, 19 nt, Artificial Sequence
  Description of Artificial Sequence: Synthetic oligonucleotide
  Antisense strand to SEQ ID NO: 247774
gcuagacuuagaaucuuuc

SEQ ID NO: 247776 - RNA, 19 nt, Artificial Sequence
  Description of Artificial Sequence: Synthetic oligonucleotide
  Sense strand starting at position 3964 SEQ ID NO: 3187
cuaagucuagcugacgaga

SEQ ID NO: 247777 - RNA, 19 nt, Artificial Sequence
  Description of Artificial Sequence: Synthetic oligonucleotide
  Antisense strand to SEQ ID NO: 247776
ucucgucagcuagacuuag

SEQ ID NO: 247778 - RNA, 19 nt, Artificial Sequence
  Description of Artificial Sequence: Synthetic oligonucleotide
  Sense strand starting at position 15 SEQ ID NO: 3188
uggguuuccacagguagaa

SEQ ID NO: 247779 - RNA, 19 nt, Artificial Sequence
  Description of Artificial Sequence: Synthetic oligonucleotide
  Antisense strand to SEQ ID NO: 247778
uucuaccuguggaaaccca

SEQ ID NO: 247780 - RNA, 19 nt, Artificial Sequence
  Description of Artificial Sequence: Synthetic oligonucleotide
  Sense strand starting at position 46 SEQ ID NO: 3188
uuuggugucgagguuuguu

SEQ ID NO: 247781 - RNA, 19 nt, Artificial Sequence
  Description of Artificial Sequence: Synthetic oligonucleotide
  Antisense strand to SEQ ID NO: 247780
aacaaaccucgacaccaaa

SEQ ID NO: 247782 - RNA, 19 nt, Artificial Sequence
  Description of Artificial Sequence: Synthetic oligonucleotide
  Sense strand starting at position 99 SEQ ID NO: 3188
uugguauucguaugauuug

SEQ ID NO: 247783 - RNA, 19 nt, Artificial Sequence
  Description of Artificial Sequence: Synthetic oligonucleotide
  Antisense strand to SEQ ID NO: 247782
caaaucauacgaauaccaa

SEQ ID NO: 247784 - RNA, 19 nt, Artificial Sequence
  Description of Artificial Sequence: Synthetic oligonucleotide
  Sense strand starting at position 102 SEQ ID NO: 3188
guauucguaugauuugauu

SEQ ID NO: 247785 - RNA, 19 nt, Artificial Sequence
  Description of Artificial Sequence: Synthetic oligonucleotide
  Antisense strand to SEQ ID NO: 247784
aaucaaaucauacgaauac

SEQ ID NO: 247786 - RNA, 19 nt, Artificial Sequence
  Description of Artificial Sequence: Synthetic oligonucleotide
  Sense strand starting at position 234 SEQ ID NO: 3188
uaggauggcuugguacaua

SEQ ID NO: 247787 - RNA, 19 nt, Artificial Sequence
  Description of Artificial Sequence: Synthetic oligonucleotide
  Antisense strand to SEQ ID NO: 247786
uauguaccaagccauccua

SEQ ID NO: 247788 - RNA, 19 nt, Artificial Sequence
  Description of Artificial Sequence: Synthetic oligonucleotide
  Sense strand starting at position 734 SEQ ID NO: 3188
cuccuuuccugauuuguuu

SEQ ID NO: 247789 - RNA, 19 nt, Artificial Sequence
  Description of Artificial Sequence: Synthetic oligonucleotide
  Antisense strand to SEQ ID NO: 247788
aaacaaaucaggaaaggag

SEQ ID NO: 247790 - RNA, 19 nt, Artificial Sequence
  Description of Artificial Sequence: Synthetic oligonucleotide
  Sense strand starting at position 994 SEQ ID NO: 3188
uuccauuuaugagacugau

SEQ ID NO: 247791 - RNA, 19 nt, Artificial Sequence
  Description of Artificial Sequence: Synthetic oligonucleotide
  Antisense strand to SEQ ID NO: 247790
aucagucucauaaauggaa

SEQ ID NO: 247792 - RNA, 19 nt, Artificial Sequence
  Description of Artificial Sequence: Synthetic oligonucleotide
  Sense strand starting at position 1064 SEQ ID NO: 3188
aaaucaguccucgaaaugu

SEQ ID NO: 247793 - RNA, 19 nt, Artificial Sequence
  Description of Artificial Sequence: Synthetic oligonucleotide
  Antisense strand to SEQ ID NO: 247792
acauuucgaggacugauuu

SEQ ID NO: 247794 - RNA, 19 nt, Artificial Sequence
  Description of Artificial Sequence: Synthetic oligonucleotide
  Sense strand starting at position 1430 SEQ ID NO: 3188
aguuccauugggcaguaau

SEQ ID NO: 247795 - RNA, 19 nt, Artificial Sequence
  Description of Artificial Sequence: Synthetic oligonucleotide
  Antisense strand to SEQ ID NO: 247794
auuacugcccaauggaacu

SEQ ID NO: 247796 - RNA, 19 nt, Artificial Sequence
  Description of Artificial Sequence: Synthetic oligonucleotide
  Sense strand starting at position 1477 SEQ ID NO: 3188
ugugcaaccuuuguauuua

SEQ ID NO: 247797 - RNA, 19 nt, Artificial Sequence
  Description of Artificial Sequence: Synthetic oligonucleotide
  Antisense strand to SEQ ID NO: 247796
uaaauacaaagguugcaca

SEQ ID NO: 247798 - RNA, 19 nt, Artificial Sequence
  Description of Artificial Sequence: Synthetic oligonucleotide
  Sense strand starting at position 1499 SEQ ID NO: 3188
accuuaagccuagagcauu

SEQ ID NO: 247799 - RNA, 19 nt, Artificial Sequence
  Description of Artificial Sequence: Synthetic oligonucleotide
  Antisense strand to SEQ ID NO: 247798
aaugcucuaggcuuaaggu

SEQ ID NO: 247800 - RNA, 19 nt, Artificial Sequence
  Description of Artificial Sequence: Synthetic oligonucleotide
  Sense strand starting at position 1535 SEQ ID NO: 3188
gguguuugucuguaauuug

SEQ ID NO: 247801 - RNA, 19 nt, Artificial Sequence
  Description of Artificial Sequence: Synthetic oligonucleotide
  Antisense strand to SEQ ID NO: 247800
caaauuacagacaaacacc

SEQ ID NO: 247802 - RNA, 19 nt, Artificial Sequence
  Description of Artificial Sequence: Synthetic oligonucleotide
  Sense strand starting at position 1538 SEQ ID NO: 3188
guuugucuguaauuuguua

SEQ ID NO: 247803 - RNA, 19 nt, Artificial Sequence
  Description of Artificial Sequence: Synthetic oligonucleotide
  Antisense strand to SEQ ID NO: 247802
uaacaaauuacagacaaac

SEQ ID NO: 247804 - RNA, 19 nt, Artificial Sequence
  Description of Artificial Sequence: Synthetic oligonucleotide
  Sense strand starting at position 1631 SEQ ID NO: 3188
aaaugacagguuugucaag

SEQ ID NO: 247805 - RNA, 19 nt, Artificial Sequence
  Description of Artificial Sequence: Synthetic oligonucleotide
  Antisense strand to SEQ ID NO: 247804
cuugacaaaccugucauuu

SEQ ID NO: 247806 - RNA, 19 nt, Artificial Sequence
  Description of Artificial Sequence: Synthetic oligonucleotide
  Sense strand starting at position 1646 SEQ ID NO: 3188
caagcauaccacgaaagua

SEQ ID NO: 247807 - RNA, 19 nt, Artificial Sequence
  Description of Artificial Sequence: Synthetic oligonucleotide
  Antisense strand to SEQ ID NO: 247806
uacuuucgugguaugcuug

SEQ ID NO: 247808 - RNA, 19 nt, Artificial Sequence
  Description of Artificial Sequence: Synthetic oligonucleotide
  Sense strand starting at position 2001 SEQ ID NO: 3188
ccuuguucuccuuauaagg

SEQ ID NO: 247809 - RNA, 19 nt, Artificial Sequence
  Description of Artificial Sequence: Synthetic oligonucleotide
  Antisense strand to SEQ ID NO: 247808
ccuuauaaggagaacaagg

SEQ ID NO: 247810 - RNA, 19 nt, Artificial Sequence
  Description of Artificial Sequence: Synthetic oligonucleotide
  Sense strand starting at position 2026 SEQ ID NO: 3188
gguguacaaucaccaagaa

SEQ ID NO: 247811 - RNA, 19 nt, Artificial Sequence
  Description of Artificial Sequence: Synthetic oligonucleotide
  Antisense strand to SEQ ID NO: 247810
uucuuggugauuguacacc

SEQ ID NO: 247812 - RNA, 19 nt, Artificial Sequence
  Description of Artificial Sequence: Synthetic oligonucleotide
  Sense strand starting at position 2221 SEQ ID NO: 3188
gcauauaggcuauauauga

SEQ ID NO: 247813 - RNA, 19 nt, Artificial Sequence
  Description of Artificial Sequence: Synthetic oligonucleotide
  Antisense strand to SEQ ID NO: 247812
ucauauauagccuauaugc

SEQ ID NO: 247814 - RNA, 19 nt, Artificial Sequence
  Description of Artificial Sequence: Synthetic oligonucleotide
  Sense strand starting at position 2545 SEQ ID NO: 3188
aaaugauggugcccaagau

SEQ ID NO: 247815 - RNA, 19 nt, Artificial Sequence
  Description of Artificial Sequence: Synthetic oligonucleotide
  Antisense strand to SEQ ID NO: 247814
aucuugggcaccaucauuu

SEQ ID NO: 247816 - RNA, 19 nt, Artificial Sequence
  Description of Artificial Sequence: Synthetic oligonucleotide
  Sense strand starting at position 2546 SEQ ID NO: 3188
aaugauggugcccaagauu

SEQ ID NO: 247817 - RNA, 19 nt, Artificial Sequence
  Description of Artificial Sequence: Synthetic oligonucleotide
  Antisense strand to SEQ ID NO: 247816
aaucuugggcaccaucauu

SEQ ID NO: 247818 - RNA, 19 nt, Artificial Sequence
  Description of Artificial Sequence: Synthetic oligonucleotide
  Sense strand starting at position 2563 SEQ ID NO: 3188
uucugaaucccucaggcua

SEQ ID NO: 247819 - RNA, 19 nt, Artificial Sequence
  Description of Artificial Sequence: Synthetic oligonucleotide
  Antisense strand to SEQ ID NO: 247818
uagccugagggauucagaa

SEQ ID NO: 247820 - RNA, 19 nt, Artificial Sequence
  Description of Artificial Sequence: Synthetic oligonucleotide
  Sense strand starting at position 2683 SEQ ID NO: 3188
auauaugaucuauggcuaa

SEQ ID NO: 247821 - RNA, 19 nt, Artificial Sequence
  Description of Artificial Sequence: Synthetic oligonucleotide
  Antisense strand to SEQ ID NO: 247820
uuagccauagaucauauau

SEQ ID NO: 247822 - RNA, 19 nt, Artificial Sequence
  Description of Artificial Sequence: Synthetic oligonucleotide
  Sense strand starting at position 2808 SEQ ID NO: 3188
cuagaaacugcugaccuua

SEQ ID NO: 247823 - RNA, 19 nt, Artificial Sequence
  Description of Artificial Sequence: Synthetic oligonucleotide
  Antisense strand to SEQ ID NO: 247822
uaaggucagcaguuucuag

SEQ ID NO: 247824 - RNA, 19 nt, Artificial Sequence
  Description of Artificial Sequence: Synthetic oligonucleotide
  Sense strand starting at position 2876 SEQ ID NO: 3188
aggagcauuccuggguaag

SEQ ID NO: 247825 - RNA, 19 nt, Artificial Sequence
  Description of Artificial Sequence: Synthetic oligonucleotide
  Antisense strand to SEQ ID NO: 247824
cuuacccaggaaugcuccu

SEQ ID NO: 247826 - RNA, 19 nt, Artificial Sequence
  Description of Artificial Sequence: Synthetic oligonucleotide
  Sense strand starting at position 2920 SEQ ID NO: 3188
aacggacuauggucaauaa

SEQ ID NO: 247827 - RNA, 19 nt, Artificial Sequence
  Description of Artificial Sequence: Synthetic oligonucleotide
  Antisense strand to SEQ ID NO: 247826
uuauugaccauaguccguu

SEQ ID NO: 247828 - RNA, 19 nt, Artificial Sequence
  Description of Artificial Sequence: Synthetic oligonucleotide
  Sense strand starting at position 3034 SEQ ID NO: 3188
ccaugagguguuuauuaca

SEQ ID NO: 247829 - RNA, 19 nt, Artificial Sequence
  Description of Artificial Sequence: Synthetic oligonucleotide
  Antisense strand to SEQ ID NO: 247828
uguaauaaacaccucaugg

SEQ ID NO: 247830 - RNA, 19 nt, Artificial Sequence
  Description of Artificial Sequence: Synthetic oligonucleotide
  Sense strand starting at position 3197 SEQ ID NO: 3188
uucucagaagccuauguua

SEQ ID NO: 247831 - RNA, 19 nt, Artificial Sequence
  Description of Artificial Sequence: Synthetic oligonucleotide
  Antisense strand to SEQ ID NO: 247830
uaacauaggcuucugagaa

SEQ ID NO: 247832 - RNA, 19 nt, Artificial Sequence
  Description of Artificial Sequence: Synthetic oligonucleotide
  Sense strand starting at position 3273 SEQ ID NO: 3188
gcgguaacaauccagaauu

SEQ ID NO: 247833 - RNA, 19 nt, Artificial Sequence
  Description of Artificial Sequence: Synthetic oligonucleotide
  Antisense strand to SEQ ID NO: 247832
aauucuggauuguuaccgc

SEQ ID NO: 247834 - RNA, 19 nt, Artificial Sequence
  Description of Artificial Sequence: Synthetic oligonucleotide
  Sense strand starting at position 3466 SEQ ID NO: 3188
ggcauuuacuuucugucaa

SEQ ID NO: 247835 - RNA, 19 nt, Artificial Sequence
  Description of Artificial Sequence: Synthetic oligonucleotide
  Antisense strand to SEQ ID NO: 247834
uugacagaaaguaaaugcc

SEQ ID NO: 247836 - RNA, 19 nt, Artificial Sequence
  Description of Artificial Sequence: Synthetic oligonucleotide
  Sense strand starting at position 3502 SEQ ID NO: 3188
gaggcuacaucagugaaca

SEQ ID NO: 247837 - RNA, 19 nt, Artificial Sequence
  Description of Artificial Sequence: Synthetic oligonucleotide
  Antisense strand to SEQ ID NO: 247836
uguucacugauguagccuc

SEQ ID NO: 247838 - RNA, 19 nt, Artificial Sequence
  Description of Artificial Sequence: Synthetic oligonucleotide
  Sense strand starting at position 3503 SEQ ID NO: 3188
aggcuacaucagugaacac

SEQ ID NO: 247839 - RNA, 19 nt, Artificial Sequence
  Description of Artificial Sequence: Synthetic oligonucleotide
  Antisense strand to SEQ ID NO: 247838
guguucacugauguagccu

SEQ ID NO: 247840 - RNA, 19 nt, Artificial Sequence
  Description of Artificial Sequence: Synthetic oligonucleotide
  Sense strand starting at position 3533 SEQ ID NO: 3188
ugauccaugcagcauauau

SEQ ID NO: 247841 - RNA, 19 nt, Artificial Sequence
  Description of Artificial Sequence: Synthetic oligonucleotide
  Antisense strand to SEQ ID NO: 247840
auauaugcugcauggauca

SEQ ID NO: 247842 - RNA, 19 nt, Artificial Sequence
  Description of Artificial Sequence: Synthetic oligonucleotide
  Sense strand starting at position 3613 SEQ ID NO: 3188
gaaucauaagucuggguaa

SEQ ID NO: 247843 - RNA, 19 nt, Artificial Sequence
  Description of Artificial Sequence: Synthetic oligonucleotide
  Antisense strand to SEQ ID NO: 247842
uuacccagacuuaugauuc

SEQ ID NO: 247844 - RNA, 19 nt, Artificial Sequence
  Description of Artificial Sequence: Synthetic oligonucleotide
  Sense strand starting at position 3663 SEQ ID NO: 3188
ucuuuagaauagucaggga

SEQ ID NO: 247845 - RNA, 19 nt, Artificial Sequence
  Description of Artificial Sequence: Synthetic oligonucleotide
  Antisense strand to SEQ ID NO: 247844
ucccugacuauucuaaaga

SEQ ID NO: 247846 - RNA, 19 nt, Artificial Sequence
  Description of Artificial Sequence: Synthetic oligonucleotide
  Sense strand starting at position 3694 SEQ ID NO: 3188
ccaacuggcaucugagaga

SEQ ID NO: 247847 - RNA, 19 nt, Artificial Sequence
  Description of Artificial Sequence: Synthetic oligonucleotide
  Antisense strand to SEQ ID NO: 247846
ucucucagaugccaguugg

SEQ ID NO: 247848 - RNA, 19 nt, Artificial Sequence
  Description of Artificial Sequence: Synthetic oligonucleotide
  Sense strand starting at position 3715 SEQ ID NO: 3188
ccuagaugacuuugacaac

SEQ ID NO: 247849 - RNA, 19 nt, Artificial Sequence
  Description of Artificial Sequence: Synthetic oligonucleotide
  Antisense strand to SEQ ID NO: 247848
guugucaaagucaucuagg

SEQ ID NO: 247850 - RNA, 19 nt, Artificial Sequence
  Description of Artificial Sequence: Synthetic oligonucleotide
  Sense strand starting at position 3842 SEQ ID NO: 3188
gaucauauguagucuugac

SEQ ID NO: 247851 - RNA, 19 nt, Artificial Sequence
  Description of Artificial Sequence: Synthetic oligonucleotide
  Antisense strand to SEQ ID NO: 247850
gucaagacuacauaugauc

SEQ ID NO: 247852 - RNA, 19 nt, Artificial Sequence
  Description of Artificial Sequence: Synthetic oligonucleotide
  Sense strand starting at position 3879 SEQ ID NO: 3188
ccuuguguaucacuggaaa

SEQ ID NO: 247853 - RNA, 19 nt, Artificial Sequence
  Description of Artificial Sequence: Synthetic oligonucleotide
  Antisense strand to SEQ ID NO: 247852
uuuccagugauacacaagg

SEQ ID NO: 247854 - RNA, 19 nt, Artificial Sequence
  Description of Artificial Sequence: Synthetic oligonucleotide
  Sense strand starting at position 3882 SEQ ID NO: 3188
uguguaucacuggaaaguu

SEQ ID NO: 247855 - RNA, 19 nt, Artificial Sequence
  Description of Artificial Sequence: Synthetic oligonucleotide
  Antisense strand to SEQ ID NO: 247854
aacuuuccagugauacaca

SEQ ID NO: 247856 - RNA, 19 nt, Artificial Sequence
  Description of Artificial Sequence: Synthetic oligonucleotide
  Sense strand starting at position 3979 SEQ ID NO: 3188
gcaagauuggaaggugaau

SEQ ID NO: 247857 - RNA, 19 nt, Artificial Sequence
  Description of Artificial Sequence: Synthetic oligonucleotide
  Antisense strand to SEQ ID NO: 247856
auucaccuuccaaucuugc

SEQ ID NO: 247858 - RNA, 19 nt, Artificial Sequence
  Description of Artificial Sequence: Synthetic oligonucleotide
  Sense strand starting at position 843 SEQ ID NO: 3191
gguucuggcugauuuccau

SEQ ID NO: 247859 - RNA, 19 nt, Artificial Sequence
  Description of Artificial Sequence: Synthetic oligonucleotide
  Antisense strand to SEQ ID NO: 247858
auggaaaucagccagaacc

SEQ ID NO: 247860 - RNA, 19 nt, Artificial Sequence
  Description of Artificial Sequence: Synthetic oligonucleotide
  Sense strand starting at position 865 SEQ ID NO: 3191
aucacuuucuggucuguca

SEQ ID NO: 247861 - RNA, 19 nt, Artificial Sequence
  Description of Artificial Sequence: Synthetic oligonucleotide
  Antisense strand to SEQ ID NO: 247860
ugacagaccagaaagugau

SEQ ID NO: 247862 - RNA, 19 nt, Artificial Sequence
  Description of Artificial Sequence: Synthetic oligonucleotide
  Sense strand starting at position 868 SEQ ID NO: 3191
acuuucuggucugucaauu

SEQ ID NO: 247863 - RNA, 19 nt, Artificial Sequence
  Description of Artificial Sequence: Synthetic oligonucleotide
  Antisense strand to SEQ ID NO: 247862
aauugacagaccagaaagu

SEQ ID NO: 247864 - RNA, 19 nt, Artificial Sequence
  Description of Artificial Sequence: Synthetic oligonucleotide
  Sense strand starting at position 1076 SEQ ID NO: 3191
gcggcuuucccaguugauu

SEQ ID NO: 247865 - RNA, 19 nt, Artificial Sequence
  Description of Artificial Sequence: Synthetic oligonucleotide
  Antisense strand to SEQ ID NO: 247864
aaucaacugggaaagccgc

SEQ ID NO: 247866 - RNA, 19 nt, Artificial Sequence
  Description of Artificial Sequence: Synthetic oligonucleotide
  Sense strand starting at position 1266 SEQ ID NO: 3191
cgcuuuaguacgggacuua

SEQ ID NO: 247867 - RNA, 19 nt, Artificial Sequence
  Description of Artificial Sequence: Synthetic oligonucleotide
  Antisense strand to SEQ ID NO: 247866
uaagucccguacuaaagcg

SEQ ID NO: 247868 - RNA, 19 nt, Artificial Sequence
  Description of Artificial Sequence: Synthetic oligonucleotide
  Sense strand starting at position 1267 SEQ ID NO: 3191
gcuuuaguacgggacuuaa

SEQ ID NO: 247869 - RNA, 19 nt, Artificial Sequence
  Description of Artificial Sequence: Synthetic oligonucleotide
  Antisense strand to SEQ ID NO: 247868
uuaagucccguacuaaagc

SEQ ID NO: 247870 - RNA, 19 nt, Artificial Sequence
  Description of Artificial Sequence: Synthetic oligonucleotide
  Sense strand starting at position 1291 SEQ ID NO: 3191
cuccucauucugggauaag

SEQ ID NO: 247871 - RNA, 19 nt, Artificial Sequence
  Description of Artificial Sequence: Synthetic oligonucleotide
  Antisense strand to SEQ ID NO: 247870
cuuaucccagaaugaggag

SEQ ID NO: 247872 - RNA, 19 nt, Artificial Sequence
  Description of Artificial Sequence: Synthetic oligonucleotide
  Sense strand starting at position 2002 SEQ ID NO: 3191
caguguuugccaggcaaau

SEQ ID NO: 247873 - RNA, 19 nt, Artificial Sequence
  Description of Artificial Sequence: Synthetic oligonucleotide
  Antisense strand to SEQ ID NO: 247872
auuugccuggcaaacacug

SEQ ID NO: 247874 - RNA, 19 nt, Artificial Sequence
  Description of Artificial Sequence: Synthetic oligonucleotide
  Sense strand starting at position 2339 SEQ ID NO: 3191
guugcugcgaccucaguua

SEQ ID NO: 247875 - RNA, 19 nt, Artificial Sequence
  Description of Artificial Sequence: Synthetic oligonucleotide
  Antisense strand to SEQ ID NO: 247874
uaacugaggucgcagcaac

SEQ ID NO: 247876 - RNA, 19 nt, Artificial Sequence
  Description of Artificial Sequence: Synthetic oligonucleotide
  Sense strand starting at position 2449 SEQ ID NO: 3191
ucggguuccacucaagacu

SEQ ID NO: 247877 - RNA, 19 nt, Artificial Sequence
  Description of Artificial Sequence: Synthetic oligonucleotide
  Antisense strand to SEQ ID NO: 247876
agucuugaguggaacccga

SEQ ID NO: 247878 - RNA, 19 nt, Artificial Sequence
  Description of Artificial Sequence: Synthetic oligonucleotide
  Sense strand starting at position 2535 SEQ ID NO: 3191
gcacuaacgcccugaaucu

SEQ ID NO: 247879 - RNA, 19 nt, Artificial Sequence
  Description of Artificial Sequence: Synthetic oligonucleotide
  Antisense strand to SEQ ID NO: 247878
agauucagggcguuagugc

SEQ ID NO: 247880 - RNA, 19 nt, Artificial Sequence
  Description of Artificial Sequence: Synthetic oligonucleotide
  Sense strand starting at position 2785 SEQ ID NO: 3191
ggcucagaucuuggaugaa

SEQ ID NO: 247881 - RNA, 19 nt, Artificial Sequence
  Description of Artificial Sequence: Synthetic oligonucleotide
  Antisense strand to SEQ ID NO: 247880
uucauccaagaucugagcc

SEQ ID NO: 247882 - RNA, 19 nt, Artificial Sequence
  Description of Artificial Sequence: Synthetic oligonucleotide
  Sense strand starting at position 2909 SEQ ID NO: 3191
acagaugguuuggaggaga

SEQ ID NO: 247883 - RNA, 19 nt, Artificial Sequence
  Description of Artificial Sequence: Synthetic oligonucleotide
  Antisense strand to SEQ ID NO: 247882
ucuccuccaaaccaucugu

SEQ ID NO: 247884 - RNA, 19 nt, Artificial Sequence
  Description of Artificial Sequence: Synthetic oligonucleotide
  Sense strand starting at position 2931 SEQ ID NO: 3191
ggaggaaucugguuuggca

SEQ ID NO: 247885 - RNA, 19 nt, Artificial Sequence
  Description of Artificial Sequence: Synthetic oligonucleotide
  Antisense strand to SEQ ID NO: 247884
ugccaaaccagauuccucc

SEQ ID NO: 247886 - RNA, 19 nt, Artificial Sequence
  Description of Artificial Sequence: Synthetic oligonucleotide
  Sense strand starting at position 2935 SEQ ID NO: 3191
gaaucugguuuggcacaga

SEQ ID NO: 247887 - RNA, 19 nt, Artificial Sequence
  Description of Artificial Sequence: Synthetic oligonucleotide
  Antisense strand to SEQ ID NO: 247886
ucugugccaaaccagauuc

SEQ ID NO: 247888 - RNA, 19 nt, Artificial Sequence
  Description of Artificial Sequence: Synthetic oligonucleotide
  Sense strand starting at position 3009 SEQ ID NO: 3191
gaaaccuggugucuggaga

SEQ ID NO: 247889 - RNA, 19 nt, Artificial Sequence
  Description of Artificial Sequence: Synthetic oligonucleotide
  Antisense strand to SEQ ID NO: 247888
ucuccagacaccagguuuc

SEQ ID NO: 247890 - RNA, 19 nt, Artificial Sequence
  Description of Artificial Sequence: Synthetic oligonucleotide
  Sense strand starting at position 3010 SEQ ID NO: 3191
aaaccuggugucuggagaa

SEQ ID NO: 247891 - RNA, 19 nt, Artificial Sequence
  Description of Artificial Sequence: Synthetic oligonucleotide
  Antisense strand to SEQ ID NO: 247890
uucuccagacaccagguuu

SEQ ID NO: 247892 - RNA, 19 nt, Artificial Sequence
  Description of Artificial Sequence: Synthetic oligonucleotide
  Sense strand starting at position 3117 SEQ ID NO: 3191
uguuaagcucuguggcaga

SEQ ID NO: 247893 - RNA, 19 nt, Artificial Sequence
  Description of Artificial Sequence: Synthetic oligonucleotide
  Antisense strand to SEQ ID NO: 247892
ucugccacagagcuuaaca

SEQ ID NO: 247894 - RNA, 19 nt, Artificial Sequence
  Description of Artificial Sequence: Synthetic oligonucleotide
  Sense strand starting at position 3168 SEQ ID NO: 3191
caaggauguggucauguga

SEQ ID NO: 247895 - RNA, 19 nt, Artificial Sequence
  Description of Artificial Sequence: Synthetic oligonucleotide
  Antisense strand to SEQ ID NO: 247894
ucacaugaccacauccuug

SEQ ID NO: 247896 - RNA, 19 nt, Artificial Sequence
  Description of Artificial Sequence: Synthetic oligonucleotide
  Sense strand starting at position 3188 SEQ ID NO: 3191
accuucuaugaguggcauu

SEQ ID NO: 247897 - RNA, 19 nt, Artificial Sequence
  Description of Artificial Sequence: Synthetic oligonucleotide
  Antisense strand to SEQ ID NO: 247896
aaugccacucauagaaggu

SEQ ID NO: 247898 - RNA, 19 nt, Artificial Sequence
  Description of Artificial Sequence: Synthetic oligonucleotide
  Sense strand starting at position 3245 SEQ ID NO: 3191
cucugugaccuacacauua

SEQ ID NO: 247899 - RNA, 19 nt, Artificial Sequence
  Description of Artificial Sequence: Synthetic oligonucleotide
  Antisense strand to SEQ ID NO: 247898
uaauguguaggucacagag

SEQ ID NO: 247900 - RNA, 19 nt, Artificial Sequence
  Description of Artificial Sequence: Synthetic oligonucleotide
  Sense strand starting at position 3256 SEQ ID NO: 3191
acacauuagccucauguua

SEQ ID NO: 247901 - RNA, 19 nt, Artificial Sequence
  Description of Artificial Sequence: Synthetic oligonucleotide
  Antisense strand to SEQ ID NO: 247900
uaacaugaggcuaaugugu

SEQ ID NO: 247902 - RNA, 19 nt, Artificial Sequence
  Description of Artificial Sequence: Synthetic oligonucleotide
  Sense strand starting at position 3270 SEQ ID NO: 3191
uguuaauagugauagaagg

SEQ ID NO: 247903 - RNA, 19 nt, Artificial Sequence
  Description of Artificial Sequence: Synthetic oligonucleotide
  Antisense strand to SEQ ID NO: 247902
ccuucuaucacuauuaaca

SEQ ID NO: 247904 - RNA, 19 nt, Artificial Sequence
  Description of Artificial Sequence: Synthetic oligonucleotide
  Sense strand starting at position 3313 SEQ ID NO: 3191
agagcugguuuggcacaaa

SEQ ID NO: 247905 - RNA, 19 nt, Artificial Sequence
  Description of Artificial Sequence: Synthetic oligonucleotide
  Antisense strand to SEQ ID NO: 247904
uuugugccaaaccagcucu

SEQ ID NO: 247906 - RNA, 19 nt, Artificial Sequence
  Description of Artificial Sequence: Synthetic oligonucleotide
  Sense strand starting at position 3316 SEQ ID NO: 3191
gcugguuuggcacaaaucu

SEQ ID NO: 247907 - RNA, 19 nt, Artificial Sequence
  Description of Artificial Sequence: Synthetic oligonucleotide
  Antisense strand to SEQ ID NO: 247906
agauuugugccaaaccagc

SEQ ID NO: 247908 - RNA, 19 nt, Artificial Sequence
  Description of Artificial Sequence: Synthetic oligonucleotide
  Sense strand starting at position 3327 SEQ ID NO: 3191
acaaaucucuggucagcaa

SEQ ID NO: 247909 - RNA, 19 nt, Artificial Sequence
  Description of Artificial Sequence: Synthetic oligonucleotide
  Antisense strand to SEQ ID NO: 247908
uugcugaccagagauuugu

SEQ ID NO: 247910 - RNA, 19 nt, Artificial Sequence
  Description of Artificial Sequence: Synthetic oligonucleotide
  Sense strand starting at position 3331 SEQ ID NO: 3191
aucucuggucagcaagaca

SEQ ID NO: 247911 - RNA, 19 nt, Artificial Sequence
  Description of Artificial Sequence: Synthetic oligonucleotide
  Antisense strand to SEQ ID NO: 247910
ugucuugcugaccagagau

SEQ ID NO: 247912 - RNA, 19 nt, Artificial Sequence
  Description of Artificial Sequence: Synthetic oligonucleotide
  Sense strand starting at position 3432 SEQ ID NO: 3191
ugggauaagucccuuuccu

SEQ ID NO: 247913 - RNA, 19 nt, Artificial Sequence
  Description of Artificial Sequence: Synthetic oligonucleotide
  Antisense strand to SEQ ID NO: 247912
aggaaagggacuuauccca

SEQ ID NO: 247914 - RNA, 19 nt, Artificial Sequence
  Description of Artificial Sequence: Synthetic oligonucleotide
  Sense strand starting at position 3544 SEQ ID NO: 3191
ugcagugauuccuaaauuu

SEQ ID NO: 247915 - RNA, 19 nt, Artificial Sequence
  Description of Artificial Sequence: Synthetic oligonucleotide
  Antisense strand to SEQ ID NO: 247914
aaauuuaggaaucacugca

SEQ ID NO: 247916 - RNA, 19 nt, Artificial Sequence
  Description of Artificial Sequence: Synthetic oligonucleotide
  Sense strand starting at position 3680 SEQ ID NO: 3191
gcaucaaagcgaugucauc

SEQ ID NO: 247917 - RNA, 19 nt, Artificial Sequence
  Description of Artificial Sequence: Synthetic oligonucleotide
  Antisense strand to SEQ ID NO: 247916
gaugacaucgcuuugaugc

SEQ ID NO: 247918 - RNA, 19 nt, Artificial Sequence
  Description of Artificial Sequence: Synthetic oligonucleotide
  Sense strand starting at position 3686 SEQ ID NO: 3191
aagcgaugucaucacacau

SEQ ID NO: 247919 - RNA, 19 nt, Artificial Sequence
  Description of Artificial Sequence: Synthetic oligonucleotide
  Antisense strand to SEQ ID NO: 247918
augugugaugacaucgcuu

SEQ ID NO: 247920 - RNA, 19 nt, Artificial Sequence
  Description of Artificial Sequence: Synthetic oligonucleotide
  Sense strand starting at position 3757 SEQ ID NO: 3191
ggcaaauaaugacuuauau

SEQ ID NO: 247921 - RNA, 19 nt, Artificial Sequence
  Description of Artificial Sequence: Synthetic oligonucleotide
  Antisense strand to SEQ ID NO: 247920
auauaagucauuauuugcc

SEQ ID NO: 247922 - RNA, 19 nt, Artificial Sequence
  Description of Artificial Sequence: Synthetic oligonucleotide
  Sense strand starting at position 3766 SEQ ID NO: 3191
ugacuuauauuguugcaaa

SEQ ID NO: 247923 - RNA, 19 nt, Artificial Sequence
  Description of Artificial Sequence: Synthetic oligonucleotide
  Antisense strand to SEQ ID NO: 247922
uuugcaacaauauaaguca

SEQ ID NO: 247924 - RNA, 19 nt, Artificial Sequence
  Description of Artificial Sequence: Synthetic oligonucleotide
  Sense strand starting at position 3828 SEQ ID NO: 3191
ggcaccaugcucugcagau

SEQ ID NO: 247925 - RNA, 19 nt, Artificial Sequence
  Description of Artificial Sequence: Synthetic oligonucleotide
  Antisense strand to SEQ ID NO: 247924
aucugcagagcauggugcc

SEQ ID NO: 247926 - RNA, 19 nt, Artificial Sequence
  Description of Artificial Sequence: Synthetic oligonucleotide
  Sense strand starting at position 3875 SEQ ID NO: 3191
uuccauggauucuaagaaa

SEQ ID NO: 247927 - RNA, 19 nt, Artificial Sequence
  Description of Artificial Sequence: Synthetic oligonucleotide
  Antisense strand to SEQ ID NO: 247926
uuucuuagaauccauggaa

SEQ ID NO: 247928 - RNA, 19 nt, Artificial Sequence
  Description of Artificial Sequence: Synthetic oligonucleotide
  Sense strand starting at position 3940 SEQ ID NO: 3191
caauuauaauuggcaguga

SEQ ID NO: 247929 - RNA, 19 nt, Artificial Sequence
  Description of Artificial Sequence: Synthetic oligonucleotide
  Antisense strand to SEQ ID NO: 247928
ucacugccaauuauaauug

SEQ ID NO: 247930 - RNA, 19 nt, Artificial Sequence
  Description of Artificial Sequence: Synthetic oligonucleotide
  Sense strand starting at position 3944 SEQ ID NO: 3191
uauaauuggcagugauuaa

SEQ ID NO: 247931 - RNA, 19 nt, Artificial Sequence
  Description of Artificial Sequence: Synthetic oligonucleotide
  Antisense strand to SEQ ID NO: 247930
uuaaucacugccaauuaua

SEQ ID NO: 247932 - RNA, 19 nt, Artificial Sequence
  Description of Artificial Sequence: Synthetic oligonucleotide
  Sense strand starting at position 3948 SEQ ID NO: 3191
auuggcagugauuaaguaa

SEQ ID NO: 247933 - RNA, 19 nt, Artificial Sequence
  Description of Artificial Sequence: Synthetic oligonucleotide
  Antisense strand to SEQ ID NO: 247932
uuacuuaaucacugccaau

SEQ ID NO: 247934 - RNA, 19 nt, Artificial Sequence
  Description of Artificial Sequence: Synthetic oligonucleotide
  Sense strand starting at position 3951 SEQ ID NO: 3191
ggcagugauuaaguaaugu

SEQ ID NO: 247935 - RNA, 19 nt, Artificial Sequence
  Description of Artificial Sequence: Synthetic oligonucleotide
  Antisense strand to SEQ ID NO: 247934
acauuacuuaaucacugcc

SEQ ID NO: 247936 - RNA, 19 nt, Artificial Sequence
  Description of Artificial Sequence: Synthetic oligonucleotide
  Sense strand starting at position 3979 SEQ ID NO: 3191
gugauagcaucuuauauuu

SEQ ID NO: 247937 - RNA, 19 nt, Artificial Sequence
  Description of Artificial Sequence: Synthetic oligonucleotide
  Antisense strand to SEQ ID NO: 247936
aaauauaagaugcuaucac

SEQ ID NO: 247938 - RNA, 19 nt, Artificial Sequence
  Description of Artificial Sequence: Synthetic oligonucleotide
  Sense strand starting at position 24 SEQ ID NO: 3189
gggaccuucugauggaguu

SEQ ID NO: 247939 - RNA, 19 nt, Artificial Sequence
  Description of Artificial Sequence: Synthetic oligonucleotide
  Antisense strand to SEQ ID NO: 247938
aacuccaucagaagguccc

SEQ ID NO: 247940 - RNA, 19 nt, Artificial Sequence
  Description of Artificial Sequence: Synthetic oligonucleotide
  Sense strand starting at position 30 SEQ ID NO: 3189
uucugauggaguuggaaua

SEQ ID NO: 247941 - RNA, 19 nt, Artificial Sequence
  Description of Artificial Sequence: Synthetic oligonucleotide
  Antisense strand to SEQ ID NO: 247940
uauuccaacuccaucagaa

SEQ ID NO: 247942 - RNA, 19 nt, Artificial Sequence
  Description of Artificial Sequence: Synthetic oligonucleotide
  Sense strand starting at position 1140 SEQ ID NO: 3189
gguucuggcugauuuccau

SEQ ID NO: 247943 - RNA, 19 nt, Artificial Sequence
  Description of Artificial Sequence: Synthetic oligonucleotide
  Antisense strand to SEQ ID NO: 247942
auggaaaucagccagaacc

SEQ ID NO: 247944 - RNA, 19 nt, Artificial Sequence
  Description of Artificial Sequence: Synthetic oligonucleotide
  Sense strand starting at position 1162 SEQ ID NO: 3189
aucacuuucuggucuguca

SEQ ID NO: 247945 - RNA, 19 nt, Artificial Sequence
  Description of Artificial Sequence: Synthetic oligonucleotide
  Antisense strand to SEQ ID NO: 247944
ugacagaccagaaagugau

SEQ ID NO: 247946 - RNA, 19 nt, Artificial Sequence
  Description of Artificial Sequence: Synthetic oligonucleotide
  Sense strand starting at position 1165 SEQ ID NO: 3189
acuuucuggucugucaauu

SEQ ID NO: 247947 - RNA, 19 nt, Artificial Sequence
  Description of Artificial Sequence: Synthetic oligonucleotide
  Antisense strand to SEQ ID NO: 247946
aauugacagaccagaaagu

SEQ ID NO: 247948 - RNA, 19 nt, Artificial Sequence
  Description of Artificial Sequence: Synthetic oligonucleotide
  Sense strand starting at position 1373 SEQ ID NO: 3189
gcggcuuucccaguugauu

SEQ ID NO: 247949 - RNA, 19 nt, Artificial Sequence
  Description of Artificial Sequence: Synthetic oligonucleotide
  Antisense strand to SEQ ID NO: 247948
aaucaacugggaaagccgc

SEQ ID NO: 247950 - RNA, 19 nt, Artificial Sequence
  Description of Artificial Sequence: Synthetic oligonucleotide
  Sense strand starting at position 1563 SEQ ID NO: 3189
cgcuuuaguacgggacuua

SEQ ID NO: 247951 - RNA, 19 nt, Artificial Sequence
  Description of Artificial Sequence: Synthetic oligonucleotide
  Antisense strand to SEQ ID NO: 247950
uaagucccguacuaaagcg

SEQ ID NO: 247952 - RNA, 19 nt, Artificial Sequence
  Description of Artificial Sequence: Synthetic oligonucleotide
  Sense strand starting at position 1564 SEQ ID NO: 3189
gcuuuaguacgggacuuaa

SEQ ID NO: 247953 - RNA, 19 nt, Artificial Sequence
  Description of Artificial Sequence: Synthetic oligonucleotide
  Antisense strand to SEQ ID NO: 247952
uuaagucccguacuaaagc

SEQ ID NO: 247954 - RNA, 19 nt, Artificial Sequence
  Description of Artificial Sequence: Synthetic oligonucleotide
  Sense strand starting at position 1587 SEQ ID NO: 3189
ccuccucauucugggauaa

SEQ ID NO: 247955 - RNA, 19 nt, Artificial Sequence
  Description of Artificial Sequence: Synthetic oligonucleotide
  Antisense strand to SEQ ID NO: 247954
uuaucccagaaugaggagg

SEQ ID NO: 247956 - RNA, 19 nt, Artificial Sequence
  Description of Artificial Sequence: Synthetic oligonucleotide
  Sense strand starting at position 1588 SEQ ID NO: 3189
cuccucauucugggauaag

SEQ ID NO: 247957 - RNA, 19 nt, Artificial Sequence
  Description of Artificial Sequence: Synthetic oligonucleotide
  Antisense strand to SEQ ID NO: 247956
cuuaucccagaaugaggag

SEQ ID NO: 247958 - RNA, 19 nt, Artificial Sequence
  Description of Artificial Sequence: Synthetic oligonucleotide
  Sense strand starting at position 2299 SEQ ID NO: 3189
caguguuugccaggcaaau

SEQ ID NO: 247959 - RNA, 19 nt, Artificial Sequence
  Description of Artificial Sequence: Synthetic oligonucleotide
  Antisense strand to SEQ ID NO: 247958
auuugccuggcaaacacug

SEQ ID NO: 247960 - RNA, 19 nt, Artificial Sequence
  Description of Artificial Sequence: Synthetic oligonucleotide
  Sense strand starting at position 2636 SEQ ID NO: 3189
guugcugcgaccucaguua

SEQ ID NO: 247961 - RNA, 19 nt, Artificial Sequence
  Description of Artificial Sequence: Synthetic oligonucleotide
  Antisense strand to SEQ ID NO: 247960
uaacugaggucgcagcaac

SEQ ID NO: 247962 - RNA, 19 nt, Artificial Sequence
  Description of Artificial Sequence: Synthetic oligonucleotide
  Sense strand starting at position 2644 SEQ ID NO: 3189
gaccucaguuauuggguga

SEQ ID NO: 247963 - RNA, 19 nt, Artificial Sequence
  Description of Artificial Sequence: Synthetic oligonucleotide
  Antisense strand to SEQ ID NO: 247962
ucacccaauaacugagguc

SEQ ID NO: 247964 - RNA, 19 nt, Artificial Sequence
  Description of Artificial Sequence: Synthetic oligonucleotide
  Sense strand starting at position 2746 SEQ ID NO: 3189
ucggguuccacucaagacu

SEQ ID NO: 247965 - RNA, 19 nt, Artificial Sequence
  Description of Artificial Sequence: Synthetic oligonucleotide
  Antisense strand to SEQ ID NO: 247964
agucuugaguggaacccga

SEQ ID NO: 247966 - RNA, 19 nt, Artificial Sequence
  Description of Artificial Sequence: Synthetic oligonucleotide
  Sense strand starting at position 2832 SEQ ID NO: 3189
gcacuaacgcccugaaucu

SEQ ID NO: 247967 - RNA, 19 nt, Artificial Sequence
  Description of Artificial Sequence: Synthetic oligonucleotide
  Antisense strand to SEQ ID NO: 247966
agauucagggcguuagugc

SEQ ID NO: 247968 - RNA, 19 nt, Artificial Sequence
  Description of Artificial Sequence: Synthetic oligonucleotide
  Sense strand starting at position 3081 SEQ ID NO: 3189
uggcucagaucuuggauga

SEQ ID NO: 247969 - RNA, 19 nt, Artificial Sequence
  Description of Artificial Sequence: Synthetic oligonucleotide
  Antisense strand to SEQ ID NO: 247968
ucauccaagaucugagcca

SEQ ID NO: 247970 - RNA, 19 nt, Artificial Sequence
  Description of Artificial Sequence: Synthetic oligonucleotide
  Sense strand starting at position 3082 SEQ ID NO: 3189
ggcucagaucuuggaugaa

SEQ ID NO: 247971 - RNA, 19 nt, Artificial Sequence
  Description of Artificial Sequence: Synthetic oligonucleotide
  Antisense strand to SEQ ID NO: 247970
uucauccaagaucugagcc

SEQ ID NO: 247972 - RNA, 19 nt, Artificial Sequence
  Description of Artificial Sequence: Synthetic oligonucleotide
  Sense strand starting at position 3094 SEQ ID NO: 3189
ggaugaaccuagcaaccuu

SEQ ID NO: 247973 - RNA, 19 nt, Artificial Sequence
  Description of Artificial Sequence: Synthetic oligonucleotide
  Antisense strand to SEQ ID NO: 247972
aagguugcuagguucaucc

SEQ ID NO: 247974 - RNA, 19 nt, Artificial Sequence
  Description of Artificial Sequence: Synthetic oligonucleotide
  Sense strand starting at position 3206 SEQ ID NO: 3189
acagaugguuuggaggaga

SEQ ID NO: 247975 - RNA, 19 nt, Artificial Sequence
  Description of Artificial Sequence: Synthetic oligonucleotide
  Antisense strand to SEQ ID NO: 247974
ucuccuccaaaccaucugu

SEQ ID NO: 247976 - RNA, 19 nt, Artificial Sequence
  Description of Artificial Sequence: Synthetic oligonucleotide
  Sense strand starting at position 3228 SEQ ID NO: 3189
ggaggaaucugguuuggca

SEQ ID NO: 247977 - RNA, 19 nt, Artificial Sequence
  Description of Artificial Sequence: Synthetic oligonucleotide
  Antisense strand to SEQ ID NO: 247976
ugccaaaccagauuccucc

SEQ ID NO: 247978 - RNA, 19 nt, Artificial Sequence
  Description of Artificial Sequence: Synthetic oligonucleotide
  Sense strand starting at position 3232 SEQ ID NO: 3189
gaaucugguuuggcacaga

SEQ ID NO: 247979 - RNA, 19 nt, Artificial Sequence
  Description of Artificial Sequence: Synthetic oligonucleotide
  Antisense strand to SEQ ID NO: 247978
ucugugccaaaccagauuc

SEQ ID NO: 247980 - RNA, 19 nt, Artificial Sequence
  Description of Artificial Sequence: Synthetic oligonucleotide
  Sense strand starting at position 3306 SEQ ID NO: 3189
gaaaccuggugucuggaga

SEQ ID NO: 247981 - RNA, 19 nt, Artificial Sequence
  Description of Artificial Sequence: Synthetic oligonucleotide
  Antisense strand to SEQ ID NO: 247980
ucuccagacaccagguuuc

SEQ ID NO: 247982 - RNA, 19 nt, Artificial Sequence
  Description of Artificial Sequence: Synthetic oligonucleotide
  Sense strand starting at position 3307 SEQ ID NO: 3189
aaaccuggugucuggagaa

SEQ ID NO: 247983 - RNA, 19 nt, Artificial Sequence
  Description of Artificial Sequence: Synthetic oligonucleotide
  Antisense strand to SEQ ID NO: 247982
uucuccagacaccagguuu

SEQ ID NO: 247984 - RNA, 19 nt, Artificial Sequence
  Description of Artificial Sequence: Synthetic oligonucleotide
  Sense strand starting at position 3412 SEQ ID NO: 3189
uguguuaagcucuguggca

SEQ ID NO: 247985 - RNA, 19 nt, Artificial Sequence
  Description of Artificial Sequence: Synthetic oligonucleotide
  Antisense strand to SEQ ID NO: 247984
ugccacagagcuuaacaca

SEQ ID NO: 247986 - RNA, 19 nt, Artificial Sequence
  Description of Artificial Sequence: Synthetic oligonucleotide
  Sense strand starting at position 3414 SEQ ID NO: 3189
uguuaagcucuguggcaga

SEQ ID NO: 247987 - RNA, 19 nt, Artificial Sequence
  Description of Artificial Sequence: Synthetic oligonucleotide
  Antisense strand to SEQ ID NO: 247986
ucugccacagagcuuaaca

SEQ ID NO: 247988 - RNA, 19 nt, Artificial Sequence
  Description of Artificial Sequence: Synthetic oligonucleotide
  Sense strand starting at position 3465 SEQ ID NO: 3189
caaggauguggucauguga

SEQ ID NO: 247989 - RNA, 19 nt, Artificial Sequence
  Description of Artificial Sequence: Synthetic oligonucleotide
  Antisense strand to SEQ ID NO: 247988
ucacaugaccacauccuug

SEQ ID NO: 247990 - RNA, 19 nt, Artificial Sequence
  Description of Artificial Sequence: Synthetic oligonucleotide
  Sense strand starting at position 3479 SEQ ID NO: 3189
ugugaaaccuucuaugagu

SEQ ID NO: 247991 - RNA, 19 nt, Artificial Sequence
  Description of Artificial Sequence: Synthetic oligonucleotide
  Antisense strand to SEQ ID NO: 247990
acucauagaagguuucaca

SEQ ID NO: 247992 - RNA, 19 nt, Artificial Sequence
  Description of Artificial Sequence: Synthetic oligonucleotide
  Sense strand starting at position 3485 SEQ ID NO: 3189
accuucuaugaguggcauu

SEQ ID NO: 247993 - RNA, 19 nt, Artificial Sequence
  Description of Artificial Sequence: Synthetic oligonucleotide
  Antisense strand to SEQ ID NO: 247992
aaugccacucauagaaggu

SEQ ID NO: 247994 - RNA, 19 nt, Artificial Sequence
  Description of Artificial Sequence: Synthetic oligonucleotide
  Sense strand starting at position 3542 SEQ ID NO: 3189
cucugugaccuacacauua

SEQ ID NO: 247995 - RNA, 19 nt, Artificial Sequence
  Description of Artificial Sequence: Synthetic oligonucleotide
  Antisense strand to SEQ ID NO: 247994
uaauguguaggucacagag

SEQ ID NO: 247996 - RNA, 19 nt, Artificial Sequence
  Description of Artificial Sequence: Synthetic oligonucleotide
  Sense strand starting at position 3553 SEQ ID NO: 3189
acacauuagccucauguua

SEQ ID NO: 247997 - RNA, 19 nt, Artificial Sequence
  Description of Artificial Sequence: Synthetic oligonucleotide
  Antisense strand to SEQ ID NO: 247996
uaacaugaggcuaaugugu

SEQ ID NO: 247998 - RNA, 19 nt, Artificial Sequence
  Description of Artificial Sequence: Synthetic oligonucleotide
  Sense strand starting at position 3564 SEQ ID NO: 3189
ucauguuaauagugauaga

SEQ ID NO: 247999 - RNA, 19 nt, Artificial Sequence
  Description of Artificial Sequence: Synthetic oligonucleotide
  Antisense strand to SEQ ID NO: 247998
ucuaucacuauuaacauga

SEQ ID NO: 248000 - RNA, 19 nt, Artificial Sequence
  Description of Artificial Sequence: Synthetic oligonucleotide
  Sense strand starting at position 3567 SEQ ID NO: 3189
uguuaauagugauagaagg

SEQ ID NO: 248001 - RNA, 19 nt, Artificial Sequence
  Description of Artificial Sequence: Synthetic oligonucleotide
  Antisense strand to SEQ ID NO: 248000
ccuucuaucacuauuaaca

SEQ ID NO: 248002 - RNA, 19 nt, Artificial Sequence
  Description of Artificial Sequence: Synthetic oligonucleotide
  Sense strand starting at position 3610 SEQ ID NO: 3189
agagcugguuuggcacaaa

SEQ ID NO: 248003 - RNA, 19 nt, Artificial Sequence
  Description of Artificial Sequence: Synthetic oligonucleotide
  Antisense strand to SEQ ID NO: 248002
uuugugccaaaccagcucu

SEQ ID NO: 248004 - RNA, 19 nt, Artificial Sequence
  Description of Artificial Sequence: Synthetic oligonucleotide
  Sense strand starting at position 3613 SEQ ID NO: 3189
gcugguuuggcacaaaucu

SEQ ID NO: 248005 - RNA, 19 nt, Artificial Sequence
  Description of Artificial Sequence: Synthetic oligonucleotide
  Antisense strand to SEQ ID NO: 248004
agauuugugccaaaccagc

SEQ ID NO: 248006 - RNA, 19 nt, Artificial Sequence
  Description of Artificial Sequence: Synthetic oligonucleotide
  Sense strand starting at position 3624 SEQ ID NO: 3189
acaaaucucuggucagcaa

SEQ ID NO: 248007 - RNA, 19 nt, Artificial Sequence
  Description of Artificial Sequence: Synthetic oligonucleotide
  Antisense strand to SEQ ID NO: 248006
uugcugaccagagauuugu

SEQ ID NO: 248008 - RNA, 19 nt, Artificial Sequence
  Description of Artificial Sequence: Synthetic oligonucleotide
  Sense strand starting at position 3628 SEQ ID NO: 3189
aucucuggucagcaagaca

SEQ ID NO: 248009 - RNA, 19 nt, Artificial Sequence
  Description of Artificial Sequence: Synthetic oligonucleotide
  Antisense strand to SEQ ID NO: 248008
ugucuugcugaccagagau

SEQ ID NO: 248010 - RNA, 19 nt, Artificial Sequence
  Description of Artificial Sequence: Synthetic oligonucleotide
  Sense strand starting at position 3729 SEQ ID NO: 3189
ugggauaagucccuuuccu

SEQ ID NO: 248011 - RNA, 19 nt, Artificial Sequence
  Description of Artificial Sequence: Synthetic oligonucleotide
  Antisense strand to SEQ ID NO: 248010
aggaaagggacuuauccca

SEQ ID NO: 248012 - RNA, 19 nt, Artificial Sequence
  Description of Artificial Sequence: Synthetic oligonucleotide
  Sense strand starting at position 3841 SEQ ID NO: 3189
ugcagugauuccuaaauuu

SEQ ID NO: 248013 - RNA, 19 nt, Artificial Sequence
  Description of Artificial Sequence: Synthetic oligonucleotide
  Antisense strand to SEQ ID NO: 248012
aaauuuaggaaucacugca

SEQ ID NO: 248014 - RNA, 19 nt, Artificial Sequence
  Description of Artificial Sequence: Synthetic oligonucleotide
  Sense strand starting at position 3977 SEQ ID NO: 3189
gcaucaaagcgaugucauc

SEQ ID NO: 248015 - RNA, 19 nt, Artificial Sequence
  Description of Artificial Sequence: Synthetic oligonucleotide
  Antisense strand to SEQ ID NO: 248014
gaugacaucgcuuugaugc

SEQ ID NO: 248016 - RNA, 19 nt, Artificial Sequence
  Description of Artificial Sequence: Synthetic oligonucleotide
  Sense strand starting at position 3983 SEQ ID NO: 3189
aagcgaugucaucacacau

SEQ ID NO: 248017 - RNA, 19 nt, Artificial Sequence
  Description of Artificial Sequence: Synthetic oligonucleotide
  Antisense strand to SEQ ID NO: 248016
augugugaugacaucgcuu

SEQ ID NO: 248018 - RNA, 19 nt, Artificial Sequence
  Description of Artificial Sequence: Synthetic oligonucleotide
  Sense strand starting at position 79 SEQ ID NO: 3190
gggaccuucugauggaguu

SEQ ID NO: 248019 - RNA, 19 nt, Artificial Sequence
  Description of Artificial Sequence: Synthetic oligonucleotide
  Antisense strand to SEQ ID NO: 248018
aacuccaucagaagguccc

SEQ ID NO: 248020 - RNA, 19 nt, Artificial Sequence
  Description of Artificial Sequence: Synthetic oligonucleotide
  Sense strand starting at position 85 SEQ ID NO: 3190
uucugauggaguuggaaua

SEQ ID NO: 248021 - RNA, 19 nt, Artificial Sequence
  Description of Artificial Sequence: Synthetic oligonucleotide
  Antisense strand to SEQ ID NO: 248020
uauuccaacuccaucagaa

SEQ ID NO: 248022 - RNA, 19 nt, Artificial Sequence
  Description of Artificial Sequence: Synthetic oligonucleotide
  Sense strand starting at position 1195 SEQ ID NO: 3190
gguucuggcugauuuccau

SEQ ID NO: 248023 - RNA, 19 nt, Artificial Sequence
  Description of Artificial Sequence: Synthetic oligonucleotide
  Antisense strand to SEQ ID NO: 248022
auggaaaucagccagaacc

SEQ ID NO: 248024 - RNA, 19 nt, Artificial Sequence
  Description of Artificial Sequence: Synthetic oligonucleotide
  Sense strand starting at position 1217 SEQ ID NO: 3190
aucacuuucuggucuguca

SEQ ID NO: 248025 - RNA, 19 nt, Artificial Sequence
  Description of Artificial Sequence: Synthetic oligonucleotide
  Antisense strand to SEQ ID NO: 248024
ugacagaccagaaagugau

SEQ ID NO: 248026 - RNA, 19 nt, Artificial Sequence
  Description of Artificial Sequence: Synthetic oligonucleotide
  Sense strand starting at position 1220 SEQ ID NO: 3190
acuuucuggucugucaauu

SEQ ID NO: 248027 - RNA, 19 nt, Artificial Sequence
  Description of Artificial Sequence: Synthetic oligonucleotide
  Antisense strand to SEQ ID NO: 248026
aauugacagaccagaaagu

SEQ ID NO: 248028 - RNA, 19 nt, Artificial Sequence
  Description of Artificial Sequence: Synthetic oligonucleotide
  Sense strand starting at position 1428 SEQ ID NO: 3190
gcggcuuucccaguugauu

SEQ ID NO: 248029 - RNA, 19 nt, Artificial Sequence
  Description of Artificial Sequence: Synthetic oligonucleotide
  Antisense strand to SEQ ID NO: 248028
aaucaacugggaaagccgc

SEQ ID NO: 248030 - RNA, 19 nt, Artificial Sequence
  Description of Artificial Sequence: Synthetic oligonucleotide
  Sense strand starting at position 1618 SEQ ID NO: 3190
cgcuuuaguacgggacuua

SEQ ID NO: 248031 - RNA, 19 nt, Artificial Sequence
  Description of Artificial Sequence: Synthetic oligonucleotide
  Antisense strand to SEQ ID NO: 248030
uaagucccguacuaaagcg

SEQ ID NO: 248032 - RNA, 19 nt, Artificial Sequence
  Description of Artificial Sequence: Synthetic oligonucleotide
  Sense strand starting at position 1619 SEQ ID NO: 3190
gcuuuaguacgggacuuaa

SEQ ID NO: 248033 - RNA, 19 nt, Artificial Sequence
  Description of Artificial Sequence: Synthetic oligonucleotide
  Antisense strand to SEQ ID NO: 248032
uuaagucccguacuaaagc

SEQ ID NO: 248034 - RNA, 19 nt, Artificial Sequence
  Description of Artificial Sequence: Synthetic oligonucleotide
  Sense strand starting at position 1642 SEQ ID NO: 3190
ccuccucauucugggauaa

SEQ ID NO: 248035 - RNA, 19 nt, Artificial Sequence
  Description of Artificial Sequence: Synthetic oligonucleotide
  Antisense strand to SEQ ID NO: 248034
uuaucccagaaugaggagg

SEQ ID NO: 248036 - RNA, 19 nt, Artificial Sequence
  Description of Artificial Sequence: Synthetic oligonucleotide
  Sense strand starting at position 1643 SEQ ID NO: 3190
cuccucauucugggauaag

SEQ ID NO: 248037 - RNA, 19 nt, Artificial Sequence
  Description of Artificial Sequence: Synthetic oligonucleotide
  Antisense strand to SEQ ID NO: 248036
cuuaucccagaaugaggag

SEQ ID NO: 248038 - RNA, 19 nt, Artificial Sequence
  Description of Artificial Sequence: Synthetic oligonucleotide
  Sense strand starting at position 2354 SEQ ID NO: 3190
caguguuugccaggcaaau

SEQ ID NO: 248039 - RNA, 19 nt, Artificial Sequence
  Description of Artificial Sequence: Synthetic oligonucleotide
  Antisense strand to SEQ ID NO: 248038
auuugccuggcaaacacug

SEQ ID NO: 248040 - RNA, 19 nt, Artificial Sequence
  Description of Artificial Sequence: Synthetic oligonucleotide
  Sense strand starting at position 2691 SEQ ID NO: 3190
guugcugcgaccucaguua

SEQ ID NO: 248041 - RNA, 19 nt, Artificial Sequence
  Description of Artificial Sequence: Synthetic oligonucleotide
  Antisense strand to SEQ ID NO: 248040
uaacugaggucgcagcaac

SEQ ID NO: 248042 - RNA, 19 nt, Artificial Sequence
  Description of Artificial Sequence: Synthetic oligonucleotide
  Sense strand starting at position 2699 SEQ ID NO: 3190
gaccucaguuauuggguga

SEQ ID NO: 248043 - RNA, 19 nt, Artificial Sequence
  Description of Artificial Sequence: Synthetic oligonucleotide
  Antisense strand to SEQ ID NO: 248042
ucacccaauaacugagguc

SEQ ID NO: 248044 - RNA, 19 nt, Artificial Sequence
  Description of Artificial Sequence: Synthetic oligonucleotide
  Sense strand starting at position 2801 SEQ ID NO: 3190
ucggguuccacucaagacu

SEQ ID NO: 248045 - RNA, 19 nt, Artificial Sequence
  Description of Artificial Sequence: Synthetic oligonucleotide
  Antisense strand to SEQ ID NO: 248044
agucuugaguggaacccga

SEQ ID NO: 248046 - RNA, 19 nt, Artificial Sequence
  Description of Artificial Sequence: Synthetic oligonucleotide
  Sense strand starting at position 2887 SEQ ID NO: 3190
gcacuaacgcccugaaucu

SEQ ID NO: 248047 - RNA, 19 nt, Artificial Sequence
  Description of Artificial Sequence: Synthetic oligonucleotide
  Antisense strand to SEQ ID NO: 248046
agauucagggcguuagugc

SEQ ID NO: 248048 - RNA, 19 nt, Artificial Sequence
  Description of Artificial Sequence: Synthetic oligonucleotide
  Sense strand starting at position 3136 SEQ ID NO: 3190
uggcucagaucuuggauga

SEQ ID NO: 248049 - RNA, 19 nt, Artificial Sequence
  Description of Artificial Sequence: Synthetic oligonucleotide
  Antisense strand to SEQ ID NO: 248048
ucauccaagaucugagcca

SEQ ID NO: 248050 - RNA, 19 nt, Artificial Sequence
  Description of Artificial Sequence: Synthetic oligonucleotide
  Sense strand starting at position 3137 SEQ ID NO: 3190
ggcucagaucuuggaugaa

SEQ ID NO: 248051 - RNA, 19 nt, Artificial Sequence
  Description of Artificial Sequence: Synthetic oligonucleotide
  Antisense strand to SEQ ID NO: 248050
uucauccaagaucugagcc

SEQ ID NO: 248052 - RNA, 19 nt, Artificial Sequence
  Description of Artificial Sequence: Synthetic oligonucleotide
  Sense strand starting at position 3149 SEQ ID NO: 3190
ggaugaaccuagcaaccuu

SEQ ID NO: 248053 - RNA, 19 nt, Artificial Sequence
  Description of Artificial Sequence: Synthetic oligonucleotide
  Antisense strand to SEQ ID NO: 248052
aagguugcuagguucaucc

SEQ ID NO: 248054 - RNA, 19 nt, Artificial Sequence
  Description of Artificial Sequence: Synthetic oligonucleotide
  Sense strand starting at position 3261 SEQ ID NO: 3190
acagaugguuuggaggaga

SEQ ID NO: 248055 - RNA, 19 nt, Artificial Sequence
  Description of Artificial Sequence: Synthetic oligonucleotide
  Antisense strand to SEQ ID NO: 248054
ucuccuccaaaccaucugu

SEQ ID NO: 248056 - RNA, 19 nt, Artificial Sequence
  Description of Artificial Sequence: Synthetic oligonucleotide
  Sense strand starting at position 3283 SEQ ID NO: 3190
ggaggaaucugguuuggca

SEQ ID NO: 248057 - RNA, 19 nt, Artificial Sequence
  Description of Artificial Sequence: Synthetic oligonucleotide
  Antisense strand to SEQ ID NO: 248056
ugccaaaccagauuccucc

SEQ ID NO: 248058 - RNA, 19 nt, Artificial Sequence
  Description of Artificial Sequence: Synthetic oligonucleotide
  Sense strand starting at position 3287 SEQ ID NO: 3190
gaaucugguuuggcacaga

SEQ ID NO: 248059 - RNA, 19 nt, Artificial Sequence
  Description of Artificial Sequence: Synthetic oligonucleotide
  Antisense strand to SEQ ID NO: 248058
ucugugccaaaccagauuc

SEQ ID NO: 248060 - RNA, 19 nt, Artificial Sequence
  Description of Artificial Sequence: Synthetic oligonucleotide
  Sense strand starting at position 3361 SEQ ID NO: 3190
gaaaccuggugucuggaga

SEQ ID NO: 248061 - RNA, 19 nt, Artificial Sequence
  Description of Artificial Sequence: Synthetic oligonucleotide
  Antisense strand to SEQ ID NO: 248060
ucuccagacaccagguuuc

SEQ ID NO: 248062 - RNA, 19 nt, Artificial Sequence
  Description of Artificial Sequence: Synthetic oligonucleotide
  Sense strand starting at position 3362 SEQ ID NO: 3190
aaaccuggugucuggagaa

SEQ ID NO: 248063 - RNA, 19 nt, Artificial Sequence
  Description of Artificial Sequence: Synthetic oligonucleotide
  Antisense strand to SEQ ID NO: 248062
uucuccagacaccagguuu

SEQ ID NO: 248064 - RNA, 19 nt, Artificial Sequence
  Description of Artificial Sequence: Synthetic oligonucleotide
  Sense strand starting at position 3467 SEQ ID NO: 3190
uguguuaagcucuguggca

SEQ ID NO: 248065 - RNA, 19 nt, Artificial Sequence
  Description of Artificial Sequence: Synthetic oligonucleotide
  Antisense strand to SEQ ID NO: 248064
ugccacagagcuuaacaca

SEQ ID NO: 248066 - RNA, 19 nt, Artificial Sequence
  Description of Artificial Sequence: Synthetic oligonucleotide
  Sense strand starting at position 3469 SEQ ID NO: 3190
uguuaagcucuguggcaga

SEQ ID NO: 248067 - RNA, 19 nt, Artificial Sequence
  Description of Artificial Sequence: Synthetic oligonucleotide
  Antisense strand to SEQ ID NO: 248066
ucugccacagagcuuaaca

SEQ ID NO: 248068 - RNA, 19 nt, Artificial Sequence
  Description of Artificial Sequence: Synthetic oligonucleotide
  Sense strand starting at position 3520 SEQ ID NO: 3190
caaggauguggucauguga

SEQ ID NO: 248069 - RNA, 19 nt, Artificial Sequence
  Description of Artificial Sequence: Synthetic oligonucleotide
  Antisense strand to SEQ ID NO: 248068
ucacaugaccacauccuug

SEQ ID NO: 248070 - RNA, 19 nt, Artificial Sequence
  Description of Artificial Sequence: Synthetic oligonucleotide
  Sense strand starting at position 3534 SEQ ID NO: 3190
ugugaaaccuucuaugagu

SEQ ID NO: 248071 - RNA, 19 nt, Artificial Sequence
  Description of Artificial Sequence: Synthetic oligonucleotide
  Antisense strand to SEQ ID NO: 248070
acucauagaagguuucaca

SEQ ID NO: 248072 - RNA, 19 nt, Artificial Sequence
  Description of Artificial Sequence: Synthetic oligonucleotide
  Sense strand starting at position 3540 SEQ ID NO: 3190
accuucuaugaguggcauu

SEQ ID NO: 248073 - RNA, 19 nt, Artificial Sequence
  Description of Artificial Sequence: Synthetic oligonucleotide
  Antisense strand to SEQ ID NO: 248072
aaugccacucauagaaggu

SEQ ID NO: 248074 - RNA, 19 nt, Artificial Sequence
  Description of Artificial Sequence: Synthetic oligonucleotide
  Sense strand starting at position 3543 SEQ ID NO: 3190
uucuaugaguggcauucuu

SEQ ID NO: 248075 - RNA, 19 nt, Artificial Sequence
  Description of Artificial Sequence: Synthetic oligonucleotide
  Antisense strand to SEQ ID NO: 248074
aagaaugccacucauagaa

SEQ ID NO: 248076 - RNA, 19 nt, Artificial Sequence
  Description of Artificial Sequence: Synthetic oligonucleotide
  Sense strand starting at position 3597 SEQ ID NO: 3190
cucugugaccuacacauua

SEQ ID NO: 248077 - RNA, 19 nt, Artificial Sequence
  Description of Artificial Sequence: Synthetic oligonucleotide
  Antisense strand to SEQ ID NO: 248076
uaauguguaggucacagag

SEQ ID NO: 248078 - RNA, 19 nt, Artificial Sequence
  Description of Artificial Sequence: Synthetic oligonucleotide
  Sense strand starting at position 3608 SEQ ID NO: 3190
acacauuagccucauguua

SEQ ID NO: 248079 - RNA, 19 nt, Artificial Sequence
  Description of Artificial Sequence: Synthetic oligonucleotide
  Antisense strand to SEQ ID NO: 248078
uaacaugaggcuaaugugu

SEQ ID NO: 248080 - RNA, 19 nt, Artificial Sequence
  Description of Artificial Sequence: Synthetic oligonucleotide
  Sense strand starting at position 3616 SEQ ID NO: 3190
gccucauguuaauagugau

SEQ ID NO: 248081 - RNA, 19 nt, Artificial Sequence
  Description of Artificial Sequence: Synthetic oligonucleotide
  Antisense strand to SEQ ID NO: 248080
aucacuauuaacaugaggc

SEQ ID NO: 248082 - RNA, 19 nt, Artificial Sequence
  Description of Artificial Sequence: Synthetic oligonucleotide
  Sense strand starting at position 3619 SEQ ID NO: 3190
ucauguuaauagugauaga

SEQ ID NO: 248083 - RNA, 19 nt, Artificial Sequence
  Description of Artificial Sequence: Synthetic oligonucleotide
  Antisense strand to SEQ ID NO: 248082
ucuaucacuauuaacauga

SEQ ID NO: 248084 - RNA, 19 nt, Artificial Sequence
  Description of Artificial Sequence: Synthetic oligonucleotide
  Sense strand starting at position 3622 SEQ ID NO: 3190
uguuaauagugauagaagg

SEQ ID NO: 248085 - RNA, 19 nt, Artificial Sequence
  Description of Artificial Sequence: Synthetic oligonucleotide
  Antisense strand to SEQ ID NO: 248084
ccuucuaucacuauuaaca

SEQ ID NO: 248086 - RNA, 19 nt, Artificial Sequence
  Description of Artificial Sequence: Synthetic oligonucleotide
  Sense strand starting at position 3665 SEQ ID NO: 3190
agagcugguuuggcacaaa

SEQ ID NO: 248087 - RNA, 19 nt, Artificial Sequence
  Description of Artificial Sequence: Synthetic oligonucleotide
  Antisense strand to SEQ ID NO: 248086
uuugugccaaaccagcucu

SEQ ID NO: 248088 - RNA, 19 nt, Artificial Sequence
  Description of Artificial Sequence: Synthetic oligonucleotide
  Sense strand starting at position 3668 SEQ ID NO: 3190
gcugguuuggcacaaaucu

SEQ ID NO: 248089 - RNA, 19 nt, Artificial Sequence
  Description of Artificial Sequence: Synthetic oligonucleotide
  Antisense strand to SEQ ID NO: 248088
agauuugugccaaaccagc

SEQ ID NO: 248090 - RNA, 19 nt, Artificial Sequence
  Description of Artificial Sequence: Synthetic oligonucleotide
  Sense strand starting at position 3679 SEQ ID NO: 3190
acaaaucucuggucagcaa

SEQ ID NO: 248091 - RNA, 19 nt, Artificial Sequence
  Description of Artificial Sequence: Synthetic oligonucleotide
  Antisense strand to SEQ ID NO: 248090
uugcugaccagagauuugu

SEQ ID NO: 248092 - RNA, 19 nt, Artificial Sequence
  Description of Artificial Sequence: Synthetic oligonucleotide
  Sense strand starting at position 3683 SEQ ID NO: 3190
aucucuggucagcaagaca

SEQ ID NO: 248093 - RNA, 19 nt, Artificial Sequence
  Description of Artificial Sequence: Synthetic oligonucleotide
  Antisense strand to SEQ ID NO: 248092
ugucuugcugaccagagau

SEQ ID NO: 248094 - RNA, 19 nt, Artificial Sequence
  Description of Artificial Sequence: Synthetic oligonucleotide
  Sense strand starting at position 3784 SEQ ID NO: 3190
ugggauaagucccuuuccu

SEQ ID NO: 248095 - RNA, 19 nt, Artificial Sequence
  Description of Artificial Sequence: Synthetic oligonucleotide
  Antisense strand to SEQ ID NO: 248094
aggaaagggacuuauccca

SEQ ID NO: 248096 - RNA, 19 nt, Artificial Sequence
  Description of Artificial Sequence: Synthetic oligonucleotide
  Sense strand starting at position 3896 SEQ ID NO: 3190
ugcagugauuccuaaauuu

SEQ ID NO: 248097 - RNA, 19 nt, Artificial Sequence
  Description of Artificial Sequence: Synthetic oligonucleotide
  Antisense strand to SEQ ID NO: 248096
aaauuuaggaaucacugca

SEQ ID NO: 248098 - RNA, 19 nt, Artificial Sequence
  Description of Artificial Sequence: Synthetic oligonucleotide
  Sense strand starting at position 1191 SEQ ID NO: 3192
ugaagugagccucaucacu

SEQ ID NO: 248099 - RNA, 19 nt, Artificial Sequence
  Description of Artificial Sequence: Synthetic oligonucleotide
  Antisense strand to SEQ ID NO: 248098
agugaugaggcucacuuca

SEQ ID NO: 248100 - RNA, 19 nt, Artificial Sequence
  Description of Artificial Sequence: Synthetic oligonucleotide
  Sense strand starting at position 2119 SEQ ID NO: 3192
ccguggguuugcugggaga

SEQ ID NO: 248101 - RNA, 19 nt, Artificial Sequence
  Description of Artificial Sequence: Synthetic oligonucleotide
  Antisense strand to SEQ ID NO: 248100
ucucccagcaaacccacgg

SEQ ID NO: 248102 - RNA, 19 nt, Artificial Sequence
  Description of Artificial Sequence: Synthetic oligonucleotide
  Sense strand starting at position 2121 SEQ ID NO: 3192
guggguuugcugggagagu

SEQ ID NO: 248103 - RNA, 19 nt, Artificial Sequence
  Description of Artificial Sequence: Synthetic oligonucleotide
  Antisense strand to SEQ ID NO: 248102
acucucccagcaaacccac

SEQ ID NO: 248104 - RNA, 19 nt, Artificial Sequence
  Description of Artificial Sequence: Synthetic oligonucleotide
  Sense strand starting at position 2227 SEQ ID NO: 3192
agcucaguucaguggagaa

SEQ ID NO: 248105 - RNA, 19 nt, Artificial Sequence
  Description of Artificial Sequence: Synthetic oligonucleotide
  Antisense strand to SEQ ID NO: 248104
uucuccacugaacugagcu

SEQ ID NO: 248106 - RNA, 19 nt, Artificial Sequence
  Description of Artificial Sequence: Synthetic oligonucleotide
  Sense strand starting at position 2254 SEQ ID NO: 3192
cuaggauucggguguaagg

SEQ ID NO: 248107 - RNA, 19 nt, Artificial Sequence
  Description of Artificial Sequence: Synthetic oligonucleotide
  Antisense strand to SEQ ID NO: 248106
ccuuacacccgaauccuag

SEQ ID NO: 248108 - RNA, 19 nt, Artificial Sequence
  Description of Artificial Sequence: Synthetic oligonucleotide
  Sense strand starting at position 2256 SEQ ID NO: 3192
aggauucggguguaaggau

SEQ ID NO: 248109 - RNA, 19 nt, Artificial Sequence
  Description of Artificial Sequence: Synthetic oligonucleotide
  Antisense strand to SEQ ID NO: 248108
auccuuacacccgaauccu

SEQ ID NO: 248110 - RNA, 19 nt, Artificial Sequence
  Description of Artificial Sequence: Synthetic oligonucleotide
  Sense strand starting at position 2268 SEQ ID NO: 3192
uaaggaugaugguggcaaa

SEQ ID NO: 248111 - RNA, 19 nt, Artificial Sequence
  Description of Artificial Sequence: Synthetic oligonucleotide
  Antisense strand to SEQ ID NO: 248110
uuugccaccaucauccuua

SEQ ID NO: 248112 - RNA, 19 nt, Artificial Sequence
  Description of Artificial Sequence: Synthetic oligonucleotide
  Sense strand starting at position 2441 SEQ ID NO: 3192
aagugacucucaugaaaga

SEQ ID NO: 248113 - RNA, 19 nt, Artificial Sequence
  Description of Artificial Sequence: Synthetic oligonucleotide
  Antisense strand to SEQ ID NO: 248112
ucuuucaugagagucacuu

SEQ ID NO: 248114 - RNA, 19 nt, Artificial Sequence
  Description of Artificial Sequence: Synthetic oligonucleotide
  Sense strand starting at position 2536 SEQ ID NO: 3192
cagggcagcucugcugaua

SEQ ID NO: 248115 - RNA, 19 nt, Artificial Sequence
  Description of Artificial Sequence: Synthetic oligonucleotide
  Antisense strand to SEQ ID NO: 248114
uaucagcagagcugcccug

SEQ ID NO: 248116 - RNA, 19 nt, Artificial Sequence
  Description of Artificial Sequence: Synthetic oligonucleotide
  Sense strand starting at position 2539 SEQ ID NO: 3192
ggcagcucugcugauacau

SEQ ID NO: 248117 - RNA, 19 nt, Artificial Sequence
  Description of Artificial Sequence: Synthetic oligonucleotide
  Antisense strand to SEQ ID NO: 248116
auguaucagcagagcugcc

SEQ ID NO: 248118 - RNA, 19 nt, Artificial Sequence
  Description of Artificial Sequence: Synthetic oligonucleotide
  Sense strand starting at position 2547 SEQ ID NO: 3192
ugcugauacauggguguau

SEQ ID NO: 248119 - RNA, 19 nt, Artificial Sequence
  Description of Artificial Sequence: Synthetic oligonucleotide
  Antisense strand to SEQ ID NO: 248118
auacacccauguaucagca

SEQ ID NO: 248120 - RNA, 19 nt, Artificial Sequence
  Description of Artificial Sequence: Synthetic oligonucleotide
  Sense strand starting at position 2548 SEQ ID NO: 3192
gcugauacauggguguaua

SEQ ID NO: 248121 - RNA, 19 nt, Artificial Sequence
  Description of Artificial Sequence: Synthetic oligonucleotide
  Antisense strand to SEQ ID NO: 248120
uauacacccauguaucagc

SEQ ID NO: 248122 - RNA, 19 nt, Artificial Sequence
  Description of Artificial Sequence: Synthetic oligonucleotide
  Sense strand starting at position 2549 SEQ ID NO: 3192
cugauacauggguguauaa

SEQ ID NO: 248123 - RNA, 19 nt, Artificial Sequence
  Description of Artificial Sequence: Synthetic oligonucleotide
  Antisense strand to SEQ ID NO: 248122
uuauacacccauguaucag

SEQ ID NO: 248124 - RNA, 19 nt, Artificial Sequence
  Description of Artificial Sequence: Synthetic oligonucleotide
  Sense strand starting at position 2593 SEQ ID NO: 3192
cuggacaagcuuuaucaca

SEQ ID NO: 248125 - RNA, 19 nt, Artificial Sequence
  Description of Artificial Sequence: Synthetic oligonucleotide
  Antisense strand to SEQ ID NO: 248124
ugugauaaagcuuguccag

SEQ ID NO: 248126 - RNA, 19 nt, Artificial Sequence
  Description of Artificial Sequence: Synthetic oligonucleotide
  Sense strand starting at position 2635 SEQ ID NO: 3192
guuuccugaaagggaucuu

SEQ ID NO: 248127 - RNA, 19 nt, Artificial Sequence
  Description of Artificial Sequence: Synthetic oligonucleotide
  Antisense strand to SEQ ID NO: 248126
aagaucccuuucaggaaac

SEQ ID NO: 248128 - RNA, 19 nt, Artificial Sequence
  Description of Artificial Sequence: Synthetic oligonucleotide
  Sense strand starting at position 2680 SEQ ID NO: 3192
uccugucuugugucagcua

SEQ ID NO: 248129 - RNA, 19 nt, Artificial Sequence
  Description of Artificial Sequence: Synthetic oligonucleotide
  Antisense strand to SEQ ID NO: 248128
uagcugacacaagacagga

SEQ ID NO: 248130 - RNA, 19 nt, Artificial Sequence
  Description of Artificial Sequence: Synthetic oligonucleotide
  Sense strand starting at position 2681 SEQ ID NO: 3192
ccugucuugugucagcuau

SEQ ID NO: 248131 - RNA, 19 nt, Artificial Sequence
  Description of Artificial Sequence: Synthetic oligonucleotide
  Antisense strand to SEQ ID NO: 248130
auagcugacacaagacagg

SEQ ID NO: 248132 - RNA, 19 nt, Artificial Sequence
  Description of Artificial Sequence: Synthetic oligonucleotide
  Sense strand starting at position 2688 SEQ ID NO: 3192
ugugucagcuauccaagaa

SEQ ID NO: 248133 - RNA, 19 nt, Artificial Sequence
  Description of Artificial Sequence: Synthetic oligonucleotide
  Antisense strand to SEQ ID NO: 248132
uucuuggauagcugacaca

SEQ ID NO: 248134 - RNA, 19 nt, Artificial Sequence
  Description of Artificial Sequence: Synthetic oligonucleotide
  Sense strand starting at position 2689 SEQ ID NO: 3192
gugucagcuauccaagaag

SEQ ID NO: 248135 - RNA, 19 nt, Artificial Sequence
  Description of Artificial Sequence: Synthetic oligonucleotide
  Antisense strand to SEQ ID NO: 248134
cuucuuggauagcugacac

SEQ ID NO: 248136 - RNA, 19 nt, Artificial Sequence
  Description of Artificial Sequence: Synthetic oligonucleotide
  Sense strand starting at position 3057 SEQ ID NO: 3192
uguguaagccaucacacau

SEQ ID NO: 248137 - RNA, 19 nt, Artificial Sequence
  Description of Artificial Sequence: Synthetic oligonucleotide
  Antisense strand to SEQ ID NO: 248136
augugugauggcuuacaca

SEQ ID NO: 248138 - RNA, 19 nt, Artificial Sequence
  Description of Artificial Sequence: Synthetic oligonucleotide
  Sense strand starting at position 3091 SEQ ID NO: 3192
cuucuuauccaguggcaau

SEQ ID NO: 248139 - RNA, 19 nt, Artificial Sequence
  Description of Artificial Sequence: Synthetic oligonucleotide
  Antisense strand to SEQ ID NO: 248138
auugccacuggauaagaag

SEQ ID NO: 248140 - RNA, 19 nt, Artificial Sequence
  Description of Artificial Sequence: Synthetic oligonucleotide
  Sense strand starting at position 3158 SEQ ID NO: 3192
cuuauuuaauuguggagca

SEQ ID NO: 248141 - RNA, 19 nt, Artificial Sequence
  Description of Artificial Sequence: Synthetic oligonucleotide
  Antisense strand to SEQ ID NO: 248140
ugcuccacaauuaaauaag

SEQ ID NO: 248142 - RNA, 19 nt, Artificial Sequence
  Description of Artificial Sequence: Synthetic oligonucleotide
  Sense strand starting at position 3194 SEQ ID NO: 3192
gcugacaaugacugaaguu

SEQ ID NO: 248143 - RNA, 19 nt, Artificial Sequence
  Description of Artificial Sequence: Synthetic oligonucleotide
  Antisense strand to SEQ ID NO: 248142
aacuucagucauugucagc

SEQ ID NO: 248144 - RNA, 19 nt, Artificial Sequence
  Description of Artificial Sequence: Synthetic oligonucleotide
  Sense strand starting at position 3372 SEQ ID NO: 3192
uguuuaagaccauguguuu

SEQ ID NO: 248145 - RNA, 19 nt, Artificial Sequence
  Description of Artificial Sequence: Synthetic oligonucleotide
  Antisense strand to SEQ ID NO: 248144
aaacacauggucuuaaaca

SEQ ID NO: 248146 - RNA, 19 nt, Artificial Sequence
  Description of Artificial Sequence: Synthetic oligonucleotide
  Sense strand starting at position 3527 SEQ ID NO: 3192
uuguguugggaagguucaa

SEQ ID NO: 248147 - RNA, 19 nt, Artificial Sequence
  Description of Artificial Sequence: Synthetic oligonucleotide
  Antisense strand to SEQ ID NO: 248146
uugaaccuucccaacacaa

SEQ ID NO: 248148 - RNA, 19 nt, Artificial Sequence
  Description of Artificial Sequence: Synthetic oligonucleotide
  Sense strand starting at position 3866 SEQ ID NO: 3192
ccuggucuauuauuguuaa

SEQ ID NO: 248149 - RNA, 19 nt, Artificial Sequence
  Description of Artificial Sequence: Synthetic oligonucleotide
  Antisense strand to SEQ ID NO: 248148
uuaacaauaauagaccagg

SEQ ID NO: 248150 - RNA, 19 nt, Artificial Sequence
  Description of Artificial Sequence: Synthetic oligonucleotide
  Sense strand starting at position 3867 SEQ ID NO: 3192
cuggucuauuauuguuaac

SEQ ID NO: 248151 - RNA, 19 nt, Artificial Sequence
  Description of Artificial Sequence: Synthetic oligonucleotide
  Antisense strand to SEQ ID NO: 248150
guuaacaauaauagaccag

SEQ ID NO: 248152 - RNA, 19 nt, Artificial Sequence
  Description of Artificial Sequence: Synthetic oligonucleotide
  Sense strand starting at position 3869 SEQ ID NO: 3192
ggucuauuauuguuaacug

SEQ ID NO: 248153 - RNA, 19 nt, Artificial Sequence
  Description of Artificial Sequence: Synthetic oligonucleotide
  Antisense strand to SEQ ID NO: 248152
caguuaacaauaauagacc

SEQ ID NO: 248154 - RNA, 19 nt, Artificial Sequence
  Description of Artificial Sequence: Synthetic oligonucleotide
  Sense strand starting at position 3870 SEQ ID NO: 3192
gucuauuauuguuaacugu

SEQ ID NO: 248155 - RNA, 19 nt, Artificial Sequence
  Description of Artificial Sequence: Synthetic oligonucleotide
  Antisense strand to SEQ ID NO: 248154
acaguuaacaauaauagac

SEQ ID NO: 248156 - RNA, 19 nt, Artificial Sequence
  Description of Artificial Sequence: Synthetic oligonucleotide
  Sense strand starting at position 3893 SEQ ID NO: 3192
aaccuacaguggugugaaa

SEQ ID NO: 248157 - RNA, 19 nt, Artificial Sequence
  Description of Artificial Sequence: Synthetic oligonucleotide
  Antisense strand to SEQ ID NO: 248156
uuucacaccacuguagguu

SEQ ID NO: 248158 - RNA, 19 nt, Artificial Sequence
  Description of Artificial Sequence: Synthetic oligonucleotide
  Sense strand starting at position 3906 SEQ ID NO: 3192
gugaaacccuaguacuuag

SEQ ID NO: 248159 - RNA, 19 nt, Artificial Sequence
  Description of Artificial Sequence: Synthetic oligonucleotide
  Antisense strand to SEQ ID NO: 248158
cuaaguacuaggguuucac

SEQ ID NO: 248160 - RNA, 19 nt, Artificial Sequence
  Description of Artificial Sequence: Synthetic oligonucleotide
  Sense strand starting at position 3936 SEQ ID NO: 3192
ggcuauaaucuugaauccu

SEQ ID NO: 248161 - RNA, 19 nt, Artificial Sequence
  Description of Artificial Sequence: Synthetic oligonucleotide
  Antisense strand to SEQ ID NO: 248160
aggauucaagauuauagcc

SEQ ID NO: 248162 - RNA, 19 nt, Artificial Sequence
  Description of Artificial Sequence: Synthetic oligonucleotide
  Sense strand starting at position 1198 SEQ ID NO: 3193
ugaagugagccucaucacu

SEQ ID NO: 248163 - RNA, 19 nt, Artificial Sequence
  Description of Artificial Sequence: Synthetic oligonucleotide
  Antisense strand to SEQ ID NO: 248162
agugaugaggcucacuuca

SEQ ID NO: 248164 - RNA, 19 nt, Artificial Sequence
  Description of Artificial Sequence: Synthetic oligonucleotide
  Sense strand starting at position 2126 SEQ ID NO: 3193
ccguggguuugcugggaga

SEQ ID NO: 248165 - RNA, 19 nt, Artificial Sequence
  Description of Artificial Sequence: Synthetic oligonucleotide
  Antisense strand to SEQ ID NO: 248164
ucucccagcaaacccacgg

SEQ ID NO: 248166 - RNA, 19 nt, Artificial Sequence
  Description of Artificial Sequence: Synthetic oligonucleotide
  Sense strand starting at position 2128 SEQ ID NO: 3193
guggguuugcugggagagu

SEQ ID NO: 248167 - RNA, 19 nt, Artificial Sequence
  Description of Artificial Sequence: Synthetic oligonucleotide
  Antisense strand to SEQ ID NO: 248166
acucucccagcaaacccac

SEQ ID NO: 248168 - RNA, 19 nt, Artificial Sequence
  Description of Artificial Sequence: Synthetic oligonucleotide
  Sense strand starting at position 2234 SEQ ID NO: 3193
agcucaguucaguggagaa

SEQ ID NO: 248169 - RNA, 19 nt, Artificial Sequence
  Description of Artificial Sequence: Synthetic oligonucleotide
  Antisense strand to SEQ ID NO: 248168
uucuccacugaacugagcu

SEQ ID NO: 248170 - RNA, 19 nt, Artificial Sequence
  Description of Artificial Sequence: Synthetic oligonucleotide
  Sense strand starting at position 2261 SEQ ID NO: 3193
cuaggauucggguguaagg

SEQ ID NO: 248171 - RNA, 19 nt, Artificial Sequence
  Description of Artificial Sequence: Synthetic oligonucleotide
  Antisense strand to SEQ ID NO: 248170
ccuuacacccgaauccuag

SEQ ID NO: 248172 - RNA, 19 nt, Artificial Sequence
  Description of Artificial Sequence: Synthetic oligonucleotide
  Sense strand starting at position 2263 SEQ ID NO: 3193
aggauucggguguaaggau

SEQ ID NO: 248173 - RNA, 19 nt, Artificial Sequence
  Description of Artificial Sequence: Synthetic oligonucleotide
  Antisense strand to SEQ ID NO: 248172
auccuuacacccgaauccu

SEQ ID NO: 248174 - RNA, 19 nt, Artificial Sequence
  Description of Artificial Sequence: Synthetic oligonucleotide
  Sense strand starting at position 2275 SEQ ID NO: 3193
uaaggaugaugguggcaaa

SEQ ID NO: 248175 - RNA, 19 nt, Artificial Sequence
  Description of Artificial Sequence: Synthetic oligonucleotide
  Antisense strand to SEQ ID NO: 248174
uuugccaccaucauccuua

SEQ ID NO: 248176 - RNA, 19 nt, Artificial Sequence
  Description of Artificial Sequence: Synthetic oligonucleotide
  Sense strand starting at position 2448 SEQ ID NO: 3193
aagugacucucaugaaaga

SEQ ID NO: 248177 - RNA, 19 nt, Artificial Sequence
  Description of Artificial Sequence: Synthetic oligonucleotide
  Antisense strand to SEQ ID NO: 248176
ucuuucaugagagucacuu

SEQ ID NO: 248178 - RNA, 19 nt, Artificial Sequence
  Description of Artificial Sequence: Synthetic oligonucleotide
  Sense strand starting at position 2543 SEQ ID NO: 3193
cagggcagcucugcugaua

SEQ ID NO: 248179 - RNA, 19 nt, Artificial Sequence
  Description of Artificial Sequence: Synthetic oligonucleotide
  Antisense strand to SEQ ID NO: 248178
uaucagcagagcugcccug

SEQ ID NO: 248180 - RNA, 19 nt, Artificial Sequence
  Description of Artificial Sequence: Synthetic oligonucleotide
  Sense strand starting at position 2546 SEQ ID NO: 3193
ggcagcucugcugauacau

SEQ ID NO: 248181 - RNA, 19 nt, Artificial Sequence
  Description of Artificial Sequence: Synthetic oligonucleotide
  Antisense strand to SEQ ID NO: 248180
auguaucagcagagcugcc

SEQ ID NO: 248182 - RNA, 19 nt, Artificial Sequence
  Description of Artificial Sequence: Synthetic oligonucleotide
  Sense strand starting at position 2554 SEQ ID NO: 3193
ugcugauacauggguguau

SEQ ID NO: 248183 - RNA, 19 nt, Artificial Sequence
  Description of Artificial Sequence: Synthetic oligonucleotide
  Antisense strand to SEQ ID NO: 248182
auacacccauguaucagca

SEQ ID NO: 248184 - RNA, 19 nt, Artificial Sequence
  Description of Artificial Sequence: Synthetic oligonucleotide
  Sense strand starting at position 2555 SEQ ID NO: 3193
gcugauacauggguguaua

SEQ ID NO: 248185 - RNA, 19 nt, Artificial Sequence
  Description of Artificial Sequence: Synthetic oligonucleotide
  Antisense strand to SEQ ID NO: 248184
uauacacccauguaucagc

SEQ ID NO: 248186 - RNA, 19 nt, Artificial Sequence
  Description of Artificial Sequence: Synthetic oligonucleotide
  Sense strand starting at position 2556 SEQ ID NO: 3193
cugauacauggguguauaa

SEQ ID NO: 248187 - RNA, 19 nt, Artificial Sequence
  Description of Artificial Sequence: Synthetic oligonucleotide
  Antisense strand to SEQ ID NO: 248186
uuauacacccauguaucag

SEQ ID NO: 248188 - RNA, 19 nt, Artificial Sequence
  Description of Artificial Sequence: Synthetic oligonucleotide
  Sense strand starting at position 2600 SEQ ID NO: 3193
cuggacaagcuuuaucaca

SEQ ID NO: 248189 - RNA, 19 nt, Artificial Sequence
  Description of Artificial Sequence: Synthetic oligonucleotide
  Antisense strand to SEQ ID NO: 248188
ugugauaaagcuuguccag

SEQ ID NO: 248190 - RNA, 19 nt, Artificial Sequence
  Description of Artificial Sequence: Synthetic oligonucleotide
  Sense strand starting at position 2642 SEQ ID NO: 3193
guuuccugaaagggaucuu

SEQ ID NO: 248191 - RNA, 19 nt, Artificial Sequence
  Description of Artificial Sequence: Synthetic oligonucleotide
  Antisense strand to SEQ ID NO: 248190
aagaucccuuucaggaaac

SEQ ID NO: 248192 - RNA, 19 nt, Artificial Sequence
  Description of Artificial Sequence: Synthetic oligonucleotide
  Sense strand starting at position 2687 SEQ ID NO: 3193
uccugucuugugucagcua

SEQ ID NO: 248193 - RNA, 19 nt, Artificial Sequence
  Description of Artificial Sequence: Synthetic oligonucleotide
  Antisense strand to SEQ ID NO: 248192
uagcugacacaagacagga

SEQ ID NO: 248194 - RNA, 19 nt, Artificial Sequence
  Description of Artificial Sequence: Synthetic oligonucleotide
  Sense strand starting at position 2688 SEQ ID NO: 3193
ccugucuugugucagcuau

SEQ ID NO: 248195 - RNA, 19 nt, Artificial Sequence
  Description of Artificial Sequence: Synthetic oligonucleotide
  Antisense strand to SEQ ID NO: 248194
auagcugacacaagacagg

SEQ ID NO: 248196 - RNA, 19 nt, Artificial Sequence
  Description of Artificial Sequence: Synthetic oligonucleotide
  Sense strand starting at position 2695 SEQ ID NO: 3193
ugugucagcuauccaagaa

SEQ ID NO: 248197 - RNA, 19 nt, Artificial Sequence
  Description of Artificial Sequence: Synthetic oligonucleotide
  Antisense strand to SEQ ID NO: 248196
uucuuggauagcugacaca

SEQ ID NO: 248198 - RNA, 19 nt, Artificial Sequence
  Description of Artificial Sequence: Synthetic oligonucleotide
  Sense strand starting at position 2696 SEQ ID NO: 3193
gugucagcuauccaagaag

SEQ ID NO: 248199 - RNA, 19 nt, Artificial Sequence
  Description of Artificial Sequence: Synthetic oligonucleotide
  Antisense strand to SEQ ID NO: 248198
cuucuuggauagcugacac

SEQ ID NO: 248200 - RNA, 19 nt, Artificial Sequence
  Description of Artificial Sequence: Synthetic oligonucleotide
  Sense strand starting at position 3064 SEQ ID NO: 3193
uguguaagccaucacacau

SEQ ID NO: 248201 - RNA, 19 nt, Artificial Sequence
  Description of Artificial Sequence: Synthetic oligonucleotide
  Antisense strand to SEQ ID NO: 248200
augugugauggcuuacaca

SEQ ID NO: 248202 - RNA, 19 nt, Artificial Sequence
  Description of Artificial Sequence: Synthetic oligonucleotide
  Sense strand starting at position 3098 SEQ ID NO: 3193
cuucuuauccaguggcaau

SEQ ID NO: 248203 - RNA, 19 nt, Artificial Sequence
  Description of Artificial Sequence: Synthetic oligonucleotide
  Antisense strand to SEQ ID NO: 248202
auugccacuggauaagaag

SEQ ID NO: 248204 - RNA, 19 nt, Artificial Sequence
  Description of Artificial Sequence: Synthetic oligonucleotide
  Sense strand starting at position 3165 SEQ ID NO: 3193
cuuauuuaauuguggagca

SEQ ID NO: 248205 - RNA, 19 nt, Artificial Sequence
  Description of Artificial Sequence: Synthetic oligonucleotide
  Antisense strand to SEQ ID NO: 248204
ugcuccacaauuaaauaag

SEQ ID NO: 248206 - RNA, 19 nt, Artificial Sequence
  Description of Artificial Sequence: Synthetic oligonucleotide
  Sense strand starting at position 3201 SEQ ID NO: 3193
gcugacaaugacugaaguu

SEQ ID NO: 248207 - RNA, 19 nt, Artificial Sequence
  Description of Artificial Sequence: Synthetic oligonucleotide
  Antisense strand to SEQ ID NO: 248206
aacuucagucauugucagc

SEQ ID NO: 248208 - RNA, 19 nt, Artificial Sequence
  Description of Artificial Sequence: Synthetic oligonucleotide
  Sense strand starting at position 3379 SEQ ID NO: 3193
uguuuaagaccauguguuu

SEQ ID NO: 248209 - RNA, 19 nt, Artificial Sequence
  Description of Artificial Sequence: Synthetic oligonucleotide
  Antisense strand to SEQ ID NO: 248208
aaacacauggucuuaaaca

SEQ ID NO: 248210 - RNA, 19 nt, Artificial Sequence
  Description of Artificial Sequence: Synthetic oligonucleotide
  Sense strand starting at position 3534 SEQ ID NO: 3193
uuguguugggaagguucaa

SEQ ID NO: 248211 - RNA, 19 nt, Artificial Sequence
  Description of Artificial Sequence: Synthetic oligonucleotide
  Antisense strand to SEQ ID NO: 248210
uugaaccuucccaacacaa

SEQ ID NO: 248212 - RNA, 19 nt, Artificial Sequence
  Description of Artificial Sequence: Synthetic oligonucleotide
  Sense strand starting at position 3873 SEQ ID NO: 3193
ccuggucuauuauuguuaa

SEQ ID NO: 248213 - RNA, 19 nt, Artificial Sequence
  Description of Artificial Sequence: Synthetic oligonucleotide
  Antisense strand to SEQ ID NO: 248212
uuaacaauaauagaccagg

SEQ ID NO: 248214 - RNA, 19 nt, Artificial Sequence
  Description of Artificial Sequence: Synthetic oligonucleotide
  Sense strand starting at position 3874 SEQ ID NO: 3193
cuggucuauuauuguuaac

SEQ ID NO: 248215 - RNA, 19 nt, Artificial Sequence
  Description of Artificial Sequence: Synthetic oligonucleotide
  Antisense strand to SEQ ID NO: 248214
guuaacaauaauagaccag

SEQ ID NO: 248216 - RNA, 19 nt, Artificial Sequence
  Description of Artificial Sequence: Synthetic oligonucleotide
  Sense strand starting at position 3876 SEQ ID NO: 3193
ggucuauuauuguuaacug

SEQ ID NO: 248217 - RNA, 19 nt, Artificial Sequence
  Description of Artificial Sequence: Synthetic oligonucleotide
  Antisense strand to SEQ ID NO: 248216
caguuaacaauaauagacc

SEQ ID NO: 248218 - RNA, 19 nt, Artificial Sequence
  Description of Artificial Sequence: Synthetic oligonucleotide
  Sense strand starting at position 3877 SEQ ID NO: 3193
gucuauuauuguuaacugu

SEQ ID NO: 248219 - RNA, 19 nt, Artificial Sequence
  Description of Artificial Sequence: Synthetic oligonucleotide
  Antisense strand to SEQ ID NO: 248218
acaguuaacaauaauagac

SEQ ID NO: 248220 - RNA, 19 nt, Artificial Sequence
  Description of Artificial Sequence: Synthetic oligonucleotide
  Sense strand starting at position 3900 SEQ ID NO: 3193
aaccuacaguggugugaaa

SEQ ID NO: 248221 - RNA, 19 nt, Artificial Sequence
  Description of Artificial Sequence: Synthetic oligonucleotide
  Antisense strand to SEQ ID NO: 248220
uuucacaccacuguagguu

SEQ ID NO: 248222 - RNA, 19 nt, Artificial Sequence
  Description of Artificial Sequence: Synthetic oligonucleotide
  Sense strand starting at position 3913 SEQ ID NO: 3193
gugaaacccuaguacuuag

SEQ ID NO: 248223 - RNA, 19 nt, Artificial Sequence
  Description of Artificial Sequence: Synthetic oligonucleotide
  Antisense strand to SEQ ID NO: 248222
cuaaguacuaggguuucac

SEQ ID NO: 248224 - RNA, 19 nt, Artificial Sequence
  Description of Artificial Sequence: Synthetic oligonucleotide
  Sense strand starting at position 3943 SEQ ID NO: 3193
ggcuauaaucuugaauccu

SEQ ID NO: 248225 - RNA, 19 nt, Artificial Sequence
  Description of Artificial Sequence: Synthetic oligonucleotide
  Antisense strand to SEQ ID NO: 248224
aggauucaagauuauagcc

SEQ ID NO: 248226 - RNA, 19 nt, Artificial Sequence
  Description of Artificial Sequence: Synthetic oligonucleotide
  Sense strand starting at position 2064 SEQ ID NO: 3195
ugaagugagccucaucacu

SEQ ID NO: 248227 - RNA, 19 nt, Artificial Sequence
  Description of Artificial Sequence: Synthetic oligonucleotide
  Antisense strand to SEQ ID NO: 248226
agugaugaggcucacuuca

SEQ ID NO: 248228 - RNA, 19 nt, Artificial Sequence
  Description of Artificial Sequence: Synthetic oligonucleotide
  Sense strand starting at position 2992 SEQ ID NO: 3195
ccguggguuugcugggaga

SEQ ID NO: 248229 - RNA, 19 nt, Artificial Sequence
  Description of Artificial Sequence: Synthetic oligonucleotide
  Antisense strand to SEQ ID NO: 248228
ucucccagcaaacccacgg

SEQ ID NO: 248230 - RNA, 19 nt, Artificial Sequence
  Description of Artificial Sequence: Synthetic oligonucleotide
  Sense strand starting at position 2994 SEQ ID NO: 3195
guggguuugcugggagagu

SEQ ID NO: 248231 - RNA, 19 nt, Artificial Sequence
  Description of Artificial Sequence: Synthetic oligonucleotide
  Antisense strand to SEQ ID NO: 248230
acucucccagcaaacccac

SEQ ID NO: 248232 - RNA, 19 nt, Artificial Sequence
  Description of Artificial Sequence: Synthetic oligonucleotide
  Sense strand starting at position 3100 SEQ ID NO: 3195
agcucaguucaguggagaa

SEQ ID NO: 248233 - RNA, 19 nt, Artificial Sequence
  Description of Artificial Sequence: Synthetic oligonucleotide
  Antisense strand to SEQ ID NO: 248232
uucuccacugaacugagcu

SEQ ID NO: 248234 - RNA, 19 nt, Artificial Sequence
  Description of Artificial Sequence: Synthetic oligonucleotide
  Sense strand starting at position 3127 SEQ ID NO: 3195
cuaggauucggguguaagg

SEQ ID NO: 248235 - RNA, 19 nt, Artificial Sequence
  Description of Artificial Sequence: Synthetic oligonucleotide
  Antisense strand to SEQ ID NO: 248234
ccuuacacccgaauccuag

SEQ ID NO: 248236 - RNA, 19 nt, Artificial Sequence
  Description of Artificial Sequence: Synthetic oligonucleotide
  Sense strand starting at position 3129 SEQ ID NO: 3195
aggauucggguguaaggau

SEQ ID NO: 248237 - RNA, 19 nt, Artificial Sequence
  Description of Artificial Sequence: Synthetic oligonucleotide
  Antisense strand to SEQ ID NO: 248236
auccuuacacccgaauccu

SEQ ID NO: 248238 - RNA, 19 nt, Artificial Sequence
  Description of Artificial Sequence: Synthetic oligonucleotide
  Sense strand starting at position 3141 SEQ ID NO: 3195
uaaggaugaugguggcaaa

SEQ ID NO: 248239 - RNA, 19 nt, Artificial Sequence
  Description of Artificial Sequence: Synthetic oligonucleotide
  Antisense strand to SEQ ID NO: 248238
uuugccaccaucauccuua

SEQ ID NO: 248240 - RNA, 19 nt, Artificial Sequence
  Description of Artificial Sequence: Synthetic oligonucleotide
  Sense strand starting at position 3314 SEQ ID NO: 3195
aagugacucucaugaaaga

SEQ ID NO: 248241 - RNA, 19 nt, Artificial Sequence
  Description of Artificial Sequence: Synthetic oligonucleotide
  Antisense strand to SEQ ID NO: 248240
ucuuucaugagagucacuu

SEQ ID NO: 248242 - RNA, 19 nt, Artificial Sequence
  Description of Artificial Sequence: Synthetic oligonucleotide
  Sense strand starting at position 3409 SEQ ID NO: 3195
cagggcagcucugcugaua

SEQ ID NO: 248243 - RNA, 19 nt, Artificial Sequence
  Description of Artificial Sequence: Synthetic oligonucleotide
  Antisense strand to SEQ ID NO: 248242
uaucagcagagcugcccug

SEQ ID NO: 248244 - RNA, 19 nt, Artificial Sequence
  Description of Artificial Sequence: Synthetic oligonucleotide
  Sense strand starting at position 3412 SEQ ID NO: 3195
ggcagcucugcugauacau

SEQ ID NO: 248245 - RNA, 19 nt, Artificial Sequence
  Description of Artificial Sequence: Synthetic oligonucleotide
  Antisense strand to SEQ ID NO: 248244
auguaucagcagagcugcc

SEQ ID NO: 248246 - RNA, 19 nt, Artificial Sequence
  Description of Artificial Sequence: Synthetic oligonucleotide
  Sense strand starting at position 3420 SEQ ID NO: 3195
ugcugauacauggguguau

SEQ ID NO: 248247 - RNA, 19 nt, Artificial Sequence
  Description of Artificial Sequence: Synthetic oligonucleotide
  Antisense strand to SEQ ID NO: 248246
auacacccauguaucagca

SEQ ID NO: 248248 - RNA, 19 nt, Artificial Sequence
  Description of Artificial Sequence: Synthetic oligonucleotide
  Sense strand starting at position 3421 SEQ ID NO: 3195
gcugauacauggguguaua

SEQ ID NO: 248249 - RNA, 19 nt, Artificial Sequence
  Description of Artificial Sequence: Synthetic oligonucleotide
  Antisense strand to SEQ ID NO: 248248
uauacacccauguaucagc

SEQ ID NO: 248250 - RNA, 19 nt, Artificial Sequence
  Description of Artificial Sequence: Synthetic oligonucleotide
  Sense strand starting at position 3422 SEQ ID NO: 3195
cugauacauggguguauaa

SEQ ID NO: 248251 - RNA, 19 nt, Artificial Sequence
  Description of Artificial Sequence: Synthetic oligonucleotide
  Antisense strand to SEQ ID NO: 248250
uuauacacccauguaucag

SEQ ID NO: 248252 - RNA, 19 nt, Artificial Sequence
  Description of Artificial Sequence: Synthetic oligonucleotide
  Sense strand starting at position 3466 SEQ ID NO: 3195
cuggacaagcuuuaucaca

SEQ ID NO: 248253 - RNA, 19 nt, Artificial Sequence
  Description of Artificial Sequence: Synthetic oligonucleotide
  Antisense strand to SEQ ID NO: 248252
ugugauaaagcuuguccag

SEQ ID NO: 248254 - RNA, 19 nt, Artificial Sequence
  Description of Artificial Sequence: Synthetic oligonucleotide
  Sense strand starting at position 3508 SEQ ID NO: 3195
guuuccugaaagggaucuu

SEQ ID NO: 248255 - RNA, 19 nt, Artificial Sequence
  Description of Artificial Sequence: Synthetic oligonucleotide
  Antisense strand to SEQ ID NO: 248254
aagaucccuuucaggaaac

SEQ ID NO: 248256 - RNA, 19 nt, Artificial Sequence
  Description of Artificial Sequence: Synthetic oligonucleotide
  Sense strand starting at position 3553 SEQ ID NO: 3195
uccugucuugugucagcua

SEQ ID NO: 248257 - RNA, 19 nt, Artificial Sequence
  Description of Artificial Sequence: Synthetic oligonucleotide
  Antisense strand to SEQ ID NO: 248256
uagcugacacaagacagga

SEQ ID NO: 248258 - RNA, 19 nt, Artificial Sequence
  Description of Artificial Sequence: Synthetic oligonucleotide
  Sense strand starting at position 3554 SEQ ID NO: 3195
ccugucuugugucagcuau

SEQ ID NO: 248259 - RNA, 19 nt, Artificial Sequence
  Description of Artificial Sequence: Synthetic oligonucleotide
  Antisense strand to SEQ ID NO: 248258
auagcugacacaagacagg

SEQ ID NO: 248260 - RNA, 19 nt, Artificial Sequence
  Description of Artificial Sequence: Synthetic oligonucleotide
  Sense strand starting at position 3561 SEQ ID NO: 3195
ugugucagcuauccaagaa

SEQ ID NO: 248261 - RNA, 19 nt, Artificial Sequence
  Description of Artificial Sequence: Synthetic oligonucleotide
  Antisense strand to SEQ ID NO: 248260
uucuuggauagcugacaca

SEQ ID NO: 248262 - RNA, 19 nt, Artificial Sequence
  Description of Artificial Sequence: Synthetic oligonucleotide
  Sense strand starting at position 3562 SEQ ID NO: 3195
gugucagcuauccaagaag

SEQ ID NO: 248263 - RNA, 19 nt, Artificial Sequence
  Description of Artificial Sequence: Synthetic oligonucleotide
  Antisense strand to SEQ ID NO: 248262
cuucuuggauagcugacac

SEQ ID NO: 248264 - RNA, 19 nt, Artificial Sequence
  Description of Artificial Sequence: Synthetic oligonucleotide
  Sense strand starting at position 3930 SEQ ID NO: 3195
uguguaagccaucacacau

SEQ ID NO: 248265 - RNA, 19 nt, Artificial Sequence
  Description of Artificial Sequence: Synthetic oligonucleotide
  Antisense strand to SEQ ID NO: 248264
augugugauggcuuacaca

SEQ ID NO: 248266 - RNA, 19 nt, Artificial Sequence
  Description of Artificial Sequence: Synthetic oligonucleotide
  Sense strand starting at position 3964 SEQ ID NO: 3195
cuucuuauccaguggcaau

SEQ ID NO: 248267 - RNA, 19 nt, Artificial Sequence
  Description of Artificial Sequence: Synthetic oligonucleotide
  Antisense strand to SEQ ID NO: 248266
auugccacuggauaagaag

SEQ ID NO: 248268 - RNA, 19 nt, Artificial Sequence
  Description of Artificial Sequence: Synthetic oligonucleotide
  Sense strand starting at position 2074 SEQ ID NO: 3194
ugaagugagccucaucacu

SEQ ID NO: 248269 - RNA, 19 nt, Artificial Sequence
  Description of Artificial Sequence: Synthetic oligonucleotide
  Antisense strand to SEQ ID NO: 248268
agugaugaggcucacuuca

SEQ ID NO: 248270 - RNA, 19 nt, Artificial Sequence
  Description of Artificial Sequence: Synthetic oligonucleotide
  Sense strand starting at position 3002 SEQ ID NO: 3194
ccguggguuugcugggaga

SEQ ID NO: 248271 - RNA, 19 nt, Artificial Sequence
  Description of Artificial Sequence: Synthetic oligonucleotide
  Antisense strand to SEQ ID NO: 248270
ucucccagcaaacccacgg

SEQ ID NO: 248272 - RNA, 19 nt, Artificial Sequence
  Description of Artificial Sequence: Synthetic oligonucleotide
  Sense strand starting at position 3004 SEQ ID NO: 3194
guggguuugcugggagagu

SEQ ID NO: 248273 - RNA, 19 nt, Artificial Sequence
  Description of Artificial Sequence: Synthetic oligonucleotide
  Antisense strand to SEQ ID NO: 248272
acucucccagcaaacccac

SEQ ID NO: 248274 - RNA, 19 nt, Artificial Sequence
  Description of Artificial Sequence: Synthetic oligonucleotide
  Sense strand starting at position 3110 SEQ ID NO: 3194
agcucaguucaguggagaa

SEQ ID NO: 248275 - RNA, 19 nt, Artificial Sequence
  Description of Artificial Sequence: Synthetic oligonucleotide
  Antisense strand to SEQ ID NO: 248274
uucuccacugaacugagcu

SEQ ID NO: 248276 - RNA, 19 nt, Artificial Sequence
  Description of Artificial Sequence: Synthetic oligonucleotide
  Sense strand starting at position 3137 SEQ ID NO: 3194
cuaggauucggguguaagg

SEQ ID NO: 248277 - RNA, 19 nt, Artificial Sequence
  Description of Artificial Sequence: Synthetic oligonucleotide
  Antisense strand to SEQ ID NO: 248276
ccuuacacccgaauccuag

SEQ ID NO: 248278 - RNA, 19 nt, Artificial Sequence
  Description of Artificial Sequence: Synthetic oligonucleotide
  Sense strand starting at position 3139 SEQ ID NO: 3194
aggauucggguguaaggau

SEQ ID NO: 248279 - RNA, 19 nt, Artificial Sequence
  Description of Artificial Sequence: Synthetic oligonucleotide
  Antisense strand to SEQ ID NO: 248278
auccuuacacccgaauccu

SEQ ID NO: 248280 - RNA, 19 nt, Artificial Sequence
  Description of Artificial Sequence: Synthetic oligonucleotide
  Sense strand starting at position 3151 SEQ ID NO: 3194
uaaggaugaugguggcaaa

SEQ ID NO: 248281 - RNA, 19 nt, Artificial Sequence
  Description of Artificial Sequence: Synthetic oligonucleotide
  Antisense strand to SEQ ID NO: 248280
uuugccaccaucauccuua

SEQ ID NO: 248282 - RNA, 19 nt, Artificial Sequence
  Description of Artificial Sequence: Synthetic oligonucleotide
  Sense strand starting at position 3324 SEQ ID NO: 3194
aagugacucucaugaaaga

SEQ ID NO: 248283 - RNA, 19 nt, Artificial Sequence
  Description of Artificial Sequence: Synthetic oligonucleotide
  Antisense strand to SEQ ID NO: 248282
ucuuucaugagagucacuu

SEQ ID NO: 248284 - RNA, 19 nt, Artificial Sequence
  Description of Artificial Sequence: Synthetic oligonucleotide
  Sense strand starting at position 3419 SEQ ID NO: 3194
cagggcagcucugcugaua

SEQ ID NO: 248285 - RNA, 19 nt, Artificial Sequence
  Description of Artificial Sequence: Synthetic oligonucleotide
  Antisense strand to SEQ ID NO: 248284
uaucagcagagcugcccug

SEQ ID NO: 248286 - RNA, 19 nt, Artificial Sequence
  Description of Artificial Sequence: Synthetic oligonucleotide
  Sense strand starting at position 3422 SEQ ID NO: 3194
ggcagcucugcugauacau

SEQ ID NO: 248287 - RNA, 19 nt, Artificial Sequence
  Description of Artificial Sequence: Synthetic oligonucleotide
  Antisense strand to SEQ ID NO: 248286
auguaucagcagagcugcc

SEQ ID NO: 248288 - RNA, 19 nt, Artificial Sequence
  Description of Artificial Sequence: Synthetic oligonucleotide
  Sense strand starting at position 3430 SEQ ID NO: 3194
ugcugauacauggguguau

SEQ ID NO: 248289 - RNA, 19 nt, Artificial Sequence
  Description of Artificial Sequence: Synthetic oligonucleotide
  Antisense strand to SEQ ID NO: 248288
auacacccauguaucagca

SEQ ID NO: 248290 - RNA, 19 nt, Artificial Sequence
  Description of Artificial Sequence: Synthetic oligonucleotide
  Sense strand starting at position 3431 SEQ ID NO: 3194
gcugauacauggguguaua

SEQ ID NO: 248291 - RNA, 19 nt, Artificial Sequence
  Description of Artificial Sequence: Synthetic oligonucleotide
  Antisense strand to SEQ ID NO: 248290
uauacacccauguaucagc

SEQ ID NO: 248292 - RNA, 19 nt, Artificial Sequence
  Description of Artificial Sequence: Synthetic oligonucleotide
  Sense strand starting at position 3432 SEQ ID NO: 3194
cugauacauggguguauaa

SEQ ID NO: 248293 - RNA, 19 nt, Artificial Sequence
  Description of Artificial Sequence: Synthetic oligonucleotide
  Antisense strand to SEQ ID NO: 248292
uuauacacccauguaucag

SEQ ID NO: 248294 - RNA, 19 nt, Artificial Sequence
  Description of Artificial Sequence: Synthetic oligonucleotide
  Sense strand starting at position 3476 SEQ ID NO: 3194
cuggacaagcuuuaucaca

SEQ ID NO: 248295 - RNA, 19 nt, Artificial Sequence
  Description of Artificial Sequence: Synthetic oligonucleotide
  Antisense strand to SEQ ID NO: 248294
ugugauaaagcuuguccag

SEQ ID NO: 248296 - RNA, 19 nt, Artificial Sequence
  Description of Artificial Sequence: Synthetic oligonucleotide
  Sense strand starting at position 3518 SEQ ID NO: 3194
guuuccugaaagggaucuu

SEQ ID NO: 248297 - RNA, 19 nt, Artificial Sequence
  Description of Artificial Sequence: Synthetic oligonucleotide
  Antisense strand to SEQ ID NO: 248296
aagaucccuuucaggaaac

SEQ ID NO: 248298 - RNA, 19 nt, Artificial Sequence
  Description of Artificial Sequence: Synthetic oligonucleotide
  Sense strand starting at position 3563 SEQ ID NO: 3194
uccugucuugugucagcua

SEQ ID NO: 248299 - RNA, 19 nt, Artificial Sequence
  Description of Artificial Sequence: Synthetic oligonucleotide
  Antisense strand to SEQ ID NO: 248298
uagcugacacaagacagga

SEQ ID NO: 248300 - RNA, 19 nt, Artificial Sequence
  Description of Artificial Sequence: Synthetic oligonucleotide
  Sense strand starting at position 3564 SEQ ID NO: 3194
ccugucuugugucagcuau

SEQ ID NO: 248301 - RNA, 19 nt, Artificial Sequence
  Description of Artificial Sequence: Synthetic oligonucleotide
  Antisense strand to SEQ ID NO: 248300
auagcugacacaagacagg

SEQ ID NO: 248302 - RNA, 19 nt, Artificial Sequence
  Description of Artificial Sequence: Synthetic oligonucleotide
  Sense strand starting at position 3571 SEQ ID NO: 3194
ugugucagcuauccaagaa

SEQ ID NO: 248303 - RNA, 19 nt, Artificial Sequence
  Description of Artificial Sequence: Synthetic oligonucleotide
  Antisense strand to SEQ ID NO: 248302
uucuuggauagcugacaca

SEQ ID NO: 248304 - RNA, 19 nt, Artificial Sequence
  Description of Artificial Sequence: Synthetic oligonucleotide
  Sense strand starting at position 3572 SEQ ID NO: 3194
gugucagcuauccaagaag

SEQ ID NO: 248305 - RNA, 19 nt, Artificial Sequence
  Description of Artificial Sequence: Synthetic oligonucleotide
  Antisense strand to SEQ ID NO: 248304
cuucuuggauagcugacac

SEQ ID NO: 248306 - RNA, 19 nt, Artificial Sequence
  Description of Artificial Sequence: Synthetic oligonucleotide
  Sense strand starting at position 3940 SEQ ID NO: 3194
uguguaagccaucacacau

SEQ ID NO: 248307 - RNA, 19 nt, Artificial Sequence
  Description of Artificial Sequence: Synthetic oligonucleotide
  Antisense strand to SEQ ID NO: 248306
augugugauggcuuacaca

SEQ ID NO: 248308 - RNA, 19 nt, Artificial Sequence
  Description of Artificial Sequence: Synthetic oligonucleotide
  Sense strand starting at position 3974 SEQ ID NO: 3194
cuucuuauccaguggcaau

SEQ ID NO: 248309 - RNA, 19 nt, Artificial Sequence
  Description of Artificial Sequence: Synthetic oligonucleotide
  Antisense strand to SEQ ID NO: 248308
auugccacuggauaagaag

SEQ ID NO: 248310 - RNA, 19 nt, Artificial Sequence
  Description of Artificial Sequence: Synthetic oligonucleotide
  Sense strand starting at position 28 SEQ ID NO: 3196
auggaaauuugugaaacuc

SEQ ID NO: 248311 - RNA, 19 nt, Artificial Sequence
  Description of Artificial Sequence: Synthetic oligonucleotide
  Antisense strand to SEQ ID NO: 248310
gaguuucacaaauuuccau

SEQ ID NO: 248312 - RNA, 19 nt, Artificial Sequence
  Description of Artificial Sequence: Synthetic oligonucleotide
  Sense strand starting at position 180 SEQ ID NO: 3196
gggugauggguacaugcua

SEQ ID NO: 248313 - RNA, 19 nt, Artificial Sequence
  Description of Artificial Sequence: Synthetic oligonucleotide
  Antisense strand to SEQ ID NO: 248312
uagcauguacccaucaccc

SEQ ID NO: 248314 - RNA, 19 nt, Artificial Sequence
  Description of Artificial Sequence: Synthetic oligonucleotide
  Sense strand starting at position 292 SEQ ID NO: 3196
agccuugagauguaccgaa

SEQ ID NO: 248315 - RNA, 19 nt, Artificial Sequence
  Description of Artificial Sequence: Synthetic oligonucleotide
  Antisense strand to SEQ ID NO: 248314
uucgguacaucucaaggcu

SEQ ID NO: 248316 - RNA, 19 nt, Artificial Sequence
  Description of Artificial Sequence: Synthetic oligonucleotide
  Sense strand starting at position 316 SEQ ID NO: 3196
guaacucccugcuuaguaa

SEQ ID NO: 248317 - RNA, 19 nt, Artificial Sequence
  Description of Artificial Sequence: Synthetic oligonucleotide
  Antisense strand to SEQ ID NO: 248316
uuacuaagcagggaguuac

SEQ ID NO: 248318 - RNA, 19 nt, Artificial Sequence
  Description of Artificial Sequence: Synthetic oligonucleotide
  Sense strand starting at position 328 SEQ ID NO: 3196
uuaguaauucuguacaggu

SEQ ID NO: 248319 - RNA, 19 nt, Artificial Sequence
  Description of Artificial Sequence: Synthetic oligonucleotide
  Antisense strand to SEQ ID NO: 248318
accuguacagaauuacuaa

SEQ ID NO: 248320 - RNA, 19 nt, Artificial Sequence
  Description of Artificial Sequence: Synthetic oligonucleotide
  Sense strand starting at position 330 SEQ ID NO: 3196
aguaauucuguacagguca

SEQ ID NO: 248321 - RNA, 19 nt, Artificial Sequence
  Description of Artificial Sequence: Synthetic oligonucleotide
  Antisense strand to SEQ ID NO: 248320
ugaccuguacagaauuacu

SEQ ID NO: 248322 - RNA, 19 nt, Artificial Sequence
  Description of Artificial Sequence: Synthetic oligonucleotide
  Sense strand starting at position 578 SEQ ID NO: 3196
acacaucagaguugucagu

SEQ ID NO: 248323 - RNA, 19 nt, Artificial Sequence
  Description of Artificial Sequence: Synthetic oligonucleotide
  Antisense strand to SEQ ID NO: 248322
acugacaacucugaugugu

SEQ ID NO: 248324 - RNA, 19 nt, Artificial Sequence
  Description of Artificial Sequence: Synthetic oligonucleotide
  Sense strand starting at position 580 SEQ ID NO: 3196
acaucagaguugucaguau

SEQ ID NO: 248325 - RNA, 19 nt, Artificial Sequence
  Description of Artificial Sequence: Synthetic oligonucleotide
  Antisense strand to SEQ ID NO: 248324
auacugacaacucugaugu

SEQ ID NO: 248326 - RNA, 19 nt, Artificial Sequence
  Description of Artificial Sequence: Synthetic oligonucleotide
  Sense strand starting at position 584 SEQ ID NO: 3196
cagaguugucaguaucuuu

SEQ ID NO: 248327 - RNA, 19 nt, Artificial Sequence
  Description of Artificial Sequence: Synthetic oligonucleotide
  Antisense strand to SEQ ID NO: 248326
aaagauacugacaacucug

SEQ ID NO: 248328 - RNA, 19 nt, Artificial Sequence
  Description of Artificial Sequence: Synthetic oligonucleotide
  Sense strand starting at position 587 SEQ ID NO: 3196
aguugucaguaucuuuaaa

SEQ ID NO: 248329 - RNA, 19 nt, Artificial Sequence
  Description of Artificial Sequence: Synthetic oligonucleotide
  Antisense strand to SEQ ID NO: 248328
uuuaaagauacugacaacu

SEQ ID NO: 248330 - RNA, 19 nt, Artificial Sequence
  Description of Artificial Sequence: Synthetic oligonucleotide
  Sense strand starting at position 597 SEQ ID NO: 3196
aucuuuaaauuuggaagga

SEQ ID NO: 248331 - RNA, 19 nt, Artificial Sequence
  Description of Artificial Sequence: Synthetic oligonucleotide
  Antisense strand to SEQ ID NO: 248330
uccuuccaaauuuaaagau

SEQ ID NO: 248332 - RNA, 19 nt, Artificial Sequence
  Description of Artificial Sequence: Synthetic oligonucleotide
  Sense strand starting at position 607 SEQ ID NO: 3196
uuggaaggacgucauuauu

SEQ ID NO: 248333 - RNA, 19 nt, Artificial Sequence
  Description of Artificial Sequence: Synthetic oligonucleotide
  Antisense strand to SEQ ID NO: 248332
aauaaugacguccuuccaa

SEQ ID NO: 248334 - RNA, 19 nt, Artificial Sequence
  Description of Artificial Sequence: Synthetic oligonucleotide
  Sense strand starting at position 619 SEQ ID NO: 3196
cauuauuaauucgcguaaa

SEQ ID NO: 248335 - RNA, 19 nt, Artificial Sequence
  Description of Artificial Sequence: Synthetic oligonucleotide
  Antisense strand to SEQ ID NO: 248334
uuuacgcgaauuaauaaug

SEQ ID NO: 248336 - RNA, 19 nt, Artificial Sequence
  Description of Artificial Sequence: Synthetic oligonucleotide
  Sense strand starting at position 622 SEQ ID NO: 3196
uauuaauucgcguaaaugu

SEQ ID NO: 248337 - RNA, 19 nt, Artificial Sequence
  Description of Artificial Sequence: Synthetic oligonucleotide
  Antisense strand to SEQ ID NO: 248336
acauuuacgcgaauuaaua

SEQ ID NO: 248338 - RNA, 19 nt, Artificial Sequence
  Description of Artificial Sequence: Synthetic oligonucleotide
  Sense strand starting at position 722 SEQ ID NO: 3196
uuucgaaacgcuuaagaag

SEQ ID NO: 248339 - RNA, 19 nt, Artificial Sequence
  Description of Artificial Sequence: Synthetic oligonucleotide
  Antisense strand to SEQ ID NO: 248338
cuucuuaagcguuucgaaa

SEQ ID NO: 248340 - RNA, 19 nt, Artificial Sequence
  Description of Artificial Sequence: Synthetic oligonucleotide
  Sense strand starting at position 806 SEQ ID NO: 3196
ccuugccuauuucugagua

SEQ ID NO: 248341 - RNA, 19 nt, Artificial Sequence
  Description of Artificial Sequence: Synthetic oligonucleotide
  Antisense strand to SEQ ID NO: 248340
uacucagaaauaggcaagg

SEQ ID NO: 248342 - RNA, 19 nt, Artificial Sequence
  Description of Artificial Sequence: Synthetic oligonucleotide
  Sense strand starting at position 810 SEQ ID NO: 3196
gccuauuucugaguaagca

SEQ ID NO: 248343 - RNA, 19 nt, Artificial Sequence
  Description of Artificial Sequence: Synthetic oligonucleotide
  Antisense strand to SEQ ID NO: 248342
ugcuuacucagaaauaggc

SEQ ID NO: 248344 - RNA, 19 nt, Artificial Sequence
  Description of Artificial Sequence: Synthetic oligonucleotide
  Sense strand starting at position 972 SEQ ID NO: 3196
ugccauugguaauucuaga

SEQ ID NO: 248345 - RNA, 19 nt, Artificial Sequence
  Description of Artificial Sequence: Synthetic oligonucleotide
  Antisense strand to SEQ ID NO: 248344
ucuagaauuaccaauggca

SEQ ID NO: 248346 - RNA, 19 nt, Artificial Sequence
  Description of Artificial Sequence: Synthetic oligonucleotide
  Sense strand starting at position 977 SEQ ID NO: 3196
uugguaauucuagagcgac

SEQ ID NO: 248347 - RNA, 19 nt, Artificial Sequence
  Description of Artificial Sequence: Synthetic oligonucleotide
  Antisense strand to SEQ ID NO: 248346
gucgcucuagaauuaccaa

SEQ ID NO: 248348 - RNA, 19 nt, Artificial Sequence
  Description of Artificial Sequence: Synthetic oligonucleotide
  Sense strand starting at position 980 SEQ ID NO: 3196
guaauucuagagcgacaag

SEQ ID NO: 248349 - RNA, 19 nt, Artificial Sequence
  Description of Artificial Sequence: Synthetic oligonucleotide
  Antisense strand to SEQ ID NO: 248348
cuugucgcucuagaauuac

SEQ ID NO: 248350 - RNA, 19 nt, Artificial Sequence
  Description of Artificial Sequence: Synthetic oligonucleotide
  Sense strand starting at position 990 SEQ ID NO: 3196
agcgacaaggcgcauaauu

SEQ ID NO: 248351 - RNA, 19 nt, Artificial Sequence
  Description of Artificial Sequence: Synthetic oligonucleotide
  Antisense strand to SEQ ID NO: 248350
aauuaugcgccuugucgcu

SEQ ID NO: 248352 - RNA, 19 nt, Artificial Sequence
  Description of Artificial Sequence: Synthetic oligonucleotide
  Sense strand starting at position 992 SEQ ID NO: 3196
cgacaaggcgcauaauuaa

SEQ ID NO: 248353 - RNA, 19 nt, Artificial Sequence
  Description of Artificial Sequence: Synthetic oligonucleotide
  Antisense strand to SEQ ID NO: 248352
uuaauuaugcgccuugucg

SEQ ID NO: 248354 - RNA, 19 nt, Artificial Sequence
  Description of Artificial Sequence: Synthetic oligonucleotide
  Sense strand starting at position 1021 SEQ ID NO: 3196
cggagcaucuuucuauaga

SEQ ID NO: 248355 - RNA, 19 nt, Artificial Sequence
  Description of Artificial Sequence: Synthetic oligonucleotide
  Antisense strand to SEQ ID NO: 248354
ucuauagaaagaugcuccg

SEQ ID NO: 248356 - RNA, 19 nt, Artificial Sequence
  Description of Artificial Sequence: Synthetic oligonucleotide
  Sense strand starting at position 1134 SEQ ID NO: 3196
uuuaucuggccugagagau

SEQ ID NO: 248357 - RNA, 19 nt, Artificial Sequence
  Description of Artificial Sequence: Synthetic oligonucleotide
  Antisense strand to SEQ ID NO: 248356
aucucucaggccagauaaa

SEQ ID NO: 248358 - RNA, 19 nt, Artificial Sequence
  Description of Artificial Sequence: Synthetic oligonucleotide
  Sense strand starting at position 1167 SEQ ID NO: 3196
cuuccuguauauucuggaa

SEQ ID NO: 248359 - RNA, 19 nt, Artificial Sequence
  Description of Artificial Sequence: Synthetic oligonucleotide
  Antisense strand to SEQ ID NO: 248358
uuccagaauauacaggaag

SEQ ID NO: 248360 - RNA, 19 nt, Artificial Sequence
  Description of Artificial Sequence: Synthetic oligonucleotide
  Sense strand starting at position 1171 SEQ ID NO: 3196
cuguauauucuggaaguca

SEQ ID NO: 248361 - RNA, 19 nt, Artificial Sequence
  Description of Artificial Sequence: Synthetic oligonucleotide
  Antisense strand to SEQ ID NO: 248360
ugacuuccagaauauacag

SEQ ID NO: 248362 - RNA, 19 nt, Artificial Sequence
  Description of Artificial Sequence: Synthetic oligonucleotide
  Sense strand starting at position 1185 SEQ ID NO: 3196
agucaauaacgcugaaggu

SEQ ID NO: 248363 - RNA, 19 nt, Artificial Sequence
  Description of Artificial Sequence: Synthetic oligonucleotide
  Antisense strand to SEQ ID NO: 248362
accuucagcguuauugacu

SEQ ID NO: 248364 - RNA, 19 nt, Artificial Sequence
  Description of Artificial Sequence: Synthetic oligonucleotide
  Sense strand starting at position 1186 SEQ ID NO: 3196
gucaauaacgcugaaggua

SEQ ID NO: 248365 - RNA, 19 nt, Artificial Sequence
  Description of Artificial Sequence: Synthetic oligonucleotide
  Antisense strand to SEQ ID NO: 248364
uaccuucagcguuauugac

SEQ ID NO: 248366 - RNA, 19 nt, Artificial Sequence
  Description of Artificial Sequence: Synthetic oligonucleotide
  Sense strand starting at position 2141 SEQ ID NO: 3196
ggcauugaacccugaaggu

SEQ ID NO: 248367 - RNA, 19 nt, Artificial Sequence
  Description of Artificial Sequence: Synthetic oligonucleotide
  Antisense strand to SEQ ID NO: 248366
accuucaggguucaaugcc

SEQ ID NO: 248368 - RNA, 19 nt, Artificial Sequence
  Description of Artificial Sequence: Synthetic oligonucleotide
  Sense strand starting at position 2380 SEQ ID NO: 3196
ggguucucccuggaaccuu

SEQ ID NO: 248369 - RNA, 19 nt, Artificial Sequence
  Description of Artificial Sequence: Synthetic oligonucleotide
  Antisense strand to SEQ ID NO: 248368
aagguuccagggagaaccc

SEQ ID NO: 248370 - RNA, 19 nt, Artificial Sequence
  Description of Artificial Sequence: Synthetic oligonucleotide
  Sense strand starting at position 2433 SEQ ID NO: 3196
gaacgaauucucugggaau

SEQ ID NO: 248371 - RNA, 19 nt, Artificial Sequence
  Description of Artificial Sequence: Synthetic oligonucleotide
  Antisense strand to SEQ ID NO: 248370
auucccagagaauucguuc

SEQ ID NO: 248372 - RNA, 19 nt, Artificial Sequence
  Description of Artificial Sequence: Synthetic oligonucleotide
  Sense strand starting at position 2435 SEQ ID NO: 3196
acgaauucucugggaauug

SEQ ID NO: 248373 - RNA, 19 nt, Artificial Sequence
  Description of Artificial Sequence: Synthetic oligonucleotide
  Antisense strand to SEQ ID NO: 248372
caauucccagagaauucgu

SEQ ID NO: 248374 - RNA, 19 nt, Artificial Sequence
  Description of Artificial Sequence: Synthetic oligonucleotide
  Sense strand starting at position 2725 SEQ ID NO: 3196
cgaagcuccuacucagaau

SEQ ID NO: 248375 - RNA, 19 nt, Artificial Sequence
  Description of Artificial Sequence: Synthetic oligonucleotide
  Antisense strand to SEQ ID NO: 248374
auucugaguaggagcuucg

SEQ ID NO: 248376 - RNA, 19 nt, Artificial Sequence
  Description of Artificial Sequence: Synthetic oligonucleotide
  Sense strand starting at position 2830 SEQ ID NO: 3196
aagguuugcccuugacaag

SEQ ID NO: 248377 - RNA, 19 nt, Artificial Sequence
  Description of Artificial Sequence: Synthetic oligonucleotide
  Antisense strand to SEQ ID NO: 248376
cuugucaagggcaaaccuu

SEQ ID NO: 248378 - RNA, 19 nt, Artificial Sequence
  Description of Artificial Sequence: Synthetic oligonucleotide
  Sense strand starting at position 2831 SEQ ID NO: 3196
agguuugcccuugacaaga

SEQ ID NO: 248379 - RNA, 19 nt, Artificial Sequence
  Description of Artificial Sequence: Synthetic oligonucleotide
  Antisense strand to SEQ ID NO: 248378
ucuugucaagggcaaaccu

SEQ ID NO: 248380 - RNA, 19 nt, Artificial Sequence
  Description of Artificial Sequence: Synthetic oligonucleotide
  Sense strand starting at position 2893 SEQ ID NO: 3196
aggaguuaguguuuccuaa

SEQ ID NO: 248381 - RNA, 19 nt, Artificial Sequence
  Description of Artificial Sequence: Synthetic oligonucleotide
  Antisense strand to SEQ ID NO: 248380
uuaggaaacacuaacuccu

SEQ ID NO: 248382 - RNA, 19 nt, Artificial Sequence
  Description of Artificial Sequence: Synthetic oligonucleotide
  Sense strand starting at position 2895 SEQ ID NO: 3196
gaguuaguguuuccuaaug

SEQ ID NO: 248383 - RNA, 19 nt, Artificial Sequence
  Description of Artificial Sequence: Synthetic oligonucleotide
  Antisense strand to SEQ ID NO: 248382
cauuaggaaacacuaacuc

SEQ ID NO: 248384 - RNA, 19 nt, Artificial Sequence
  Description of Artificial Sequence: Synthetic oligonucleotide
  Sense strand starting at position 2901 SEQ ID NO: 3196
guguuuccuaaugaacgua

SEQ ID NO: 248385 - RNA, 19 nt, Artificial Sequence
  Description of Artificial Sequence: Synthetic oligonucleotide
  Antisense strand to SEQ ID NO: 248384
uacguucauuaggaaacac

SEQ ID NO: 248386 - RNA, 19 nt, Artificial Sequence
  Description of Artificial Sequence: Synthetic oligonucleotide
  Sense strand starting at position 3669 SEQ ID NO: 3196
uugaucuguguagaucaaa

SEQ ID NO: 248387 - RNA, 19 nt, Artificial Sequence
  Description of Artificial Sequence: Synthetic oligonucleotide
  Antisense strand to SEQ ID NO: 248386
uuugaucuacacagaucaa

SEQ ID NO: 248388 - RNA, 19 nt, Artificial Sequence
  Description of Artificial Sequence: Synthetic oligonucleotide
  Sense strand starting at position 3845 SEQ ID NO: 3196
uuccuaacucuucgauuag

SEQ ID NO: 248389 - RNA, 19 nt, Artificial Sequence
  Description of Artificial Sequence: Synthetic oligonucleotide
  Antisense strand to SEQ ID NO: 248388
cuaaucgaagaguuaggaa

SEQ ID NO: 248390 - RNA, 19 nt, Artificial Sequence
  Description of Artificial Sequence: Synthetic oligonucleotide
  Sense strand starting at position 787 SEQ ID NO: 3197
cuuugcagucauuagaauu

SEQ ID NO: 248391 - RNA, 19 nt, Artificial Sequence
  Description of Artificial Sequence: Synthetic oligonucleotide
  Antisense strand to SEQ ID NO: 248390
aauucuaaugacugcaaag

SEQ ID NO: 248392 - RNA, 19 nt, Artificial Sequence
  Description of Artificial Sequence: Synthetic oligonucleotide
  Sense strand starting at position 849 SEQ ID NO: 3197
gggcuuaacgcuuaaacaa

SEQ ID NO: 248393 - RNA, 19 nt, Artificial Sequence
  Description of Artificial Sequence: Synthetic oligonucleotide
  Antisense strand to SEQ ID NO: 248392
uuguuuaagcguuaagccc

SEQ ID NO: 248394 - RNA, 19 nt, Artificial Sequence
  Description of Artificial Sequence: Synthetic oligonucleotide
  Sense strand starting at position 1082 SEQ ID NO: 3197
ccaguaacagcuuacagaa

SEQ ID NO: 248395 - RNA, 19 nt, Artificial Sequence
  Description of Artificial Sequence: Synthetic oligonucleotide
  Antisense strand to SEQ ID NO: 248394
uucuguaagcuguuacugg

SEQ ID NO: 248396 - RNA, 19 nt, Artificial Sequence
  Description of Artificial Sequence: Synthetic oligonucleotide
  Sense strand starting at position 1123 SEQ ID NO: 3197
gaccaaacuucggugagga

SEQ ID NO: 248397 - RNA, 19 nt, Artificial Sequence
  Description of Artificial Sequence: Synthetic oligonucleotide
  Antisense strand to SEQ ID NO: 248396
uccucaccgaaguuugguc

SEQ ID NO: 248398 - RNA, 19 nt, Artificial Sequence
  Description of Artificial Sequence: Synthetic oligonucleotide
  Sense strand starting at position 1257 SEQ ID NO: 3197
uguugcaagcaagauuaaa

SEQ ID NO: 248399 - RNA, 19 nt, Artificial Sequence
  Description of Artificial Sequence: Synthetic oligonucleotide
  Antisense strand to SEQ ID NO: 248398
uuuaaucuugcuugcaaca

SEQ ID NO: 248400 - RNA, 19 nt, Artificial Sequence
  Description of Artificial Sequence: Synthetic oligonucleotide
  Sense strand starting at position 1668 SEQ ID NO: 3197
cuggucgccgcuguaauau

SEQ ID NO: 248401 - RNA, 19 nt, Artificial Sequence
  Description of Artificial Sequence: Synthetic oligonucleotide
  Antisense strand to SEQ ID NO: 248400
auauuacagcggcgaccag

SEQ ID NO: 248402 - RNA, 19 nt, Artificial Sequence
  Description of Artificial Sequence: Synthetic oligonucleotide
  Sense strand starting at position 1781 SEQ ID NO: 3197
cggcuaaguguucagagac

SEQ ID NO: 248403 - RNA, 19 nt, Artificial Sequence
  Description of Artificial Sequence: Synthetic oligonucleotide
  Antisense strand to SEQ ID NO: 248402
gucucugaacacuuagccg

SEQ ID NO: 248404 - RNA, 19 nt, Artificial Sequence
  Description of Artificial Sequence: Synthetic oligonucleotide
  Sense strand starting at position 1859 SEQ ID NO: 3197
cgaauucuuugaccuggaa

SEQ ID NO: 248405 - RNA, 19 nt, Artificial Sequence
  Description of Artificial Sequence: Synthetic oligonucleotide
  Antisense strand to SEQ ID NO: 248404
uuccaggucaaagaauucg

SEQ ID NO: 248406 - RNA, 19 nt, Artificial Sequence
  Description of Artificial Sequence: Synthetic oligonucleotide
  Sense strand starting at position 2102 SEQ ID NO: 3197
gaacucgggcuuuaguuaa

SEQ ID NO: 248407 - RNA, 19 nt, Artificial Sequence
  Description of Artificial Sequence: Synthetic oligonucleotide
  Antisense strand to SEQ ID NO: 248406
uuaacuaaagcccgaguuc

SEQ ID NO: 248408 - RNA, 19 nt, Artificial Sequence
  Description of Artificial Sequence: Synthetic oligonucleotide
  Sense strand starting at position 2156 SEQ ID NO: 3197
ugguaauaacguuaucauu

SEQ ID NO: 248409 - RNA, 19 nt, Artificial Sequence
  Description of Artificial Sequence: Synthetic oligonucleotide
  Antisense strand to SEQ ID NO: 248408
aaugauaacguuauuacca

SEQ ID NO: 248410 - RNA, 19 nt, Artificial Sequence
  Description of Artificial Sequence: Synthetic oligonucleotide
  Sense strand starting at position 2158 SEQ ID NO: 3197
guaauaacguuaucauuga

SEQ ID NO: 248411 - RNA, 19 nt, Artificial Sequence
  Description of Artificial Sequence: Synthetic oligonucleotide
  Antisense strand to SEQ ID NO: 248410
ucaaugauaacguuauuac

SEQ ID NO: 248412 - RNA, 19 nt, Artificial Sequence
  Description of Artificial Sequence: Synthetic oligonucleotide
  Sense strand starting at position 2226 SEQ ID NO: 3197
uugagauacucuuccgaaa

SEQ ID NO: 248413 - RNA, 19 nt, Artificial Sequence
  Description of Artificial Sequence: Synthetic oligonucleotide
  Antisense strand to SEQ ID NO: 248412
uuucggaagaguaucucaa

SEQ ID NO: 248414 - RNA, 19 nt, Artificial Sequence
  Description of Artificial Sequence: Synthetic oligonucleotide
  Sense strand starting at position 2356 SEQ ID NO: 3197
cucacugggacuuguagua

SEQ ID NO: 248415 - RNA, 19 nt, Artificial Sequence
  Description of Artificial Sequence: Synthetic oligonucleotide
  Antisense strand to SEQ ID NO: 248414
uacuacaagucccagugag

SEQ ID NO: 248416 - RNA, 19 nt, Artificial Sequence
  Description of Artificial Sequence: Synthetic oligonucleotide
  Sense strand starting at position 2789 SEQ ID NO: 3197
gcugaugauaucgagugau

SEQ ID NO: 248417 - RNA, 19 nt, Artificial Sequence
  Description of Artificial Sequence: Synthetic oligonucleotide
  Antisense strand to SEQ ID NO: 248416
aucacucgauaucaucagc

SEQ ID NO: 248418 - RNA, 19 nt, Artificial Sequence
  Description of Artificial Sequence: Synthetic oligonucleotide
  Sense strand starting at position 2792 SEQ ID NO: 3197
gaugauaucgagugauuag

SEQ ID NO: 248419 - RNA, 19 nt, Artificial Sequence
  Description of Artificial Sequence: Synthetic oligonucleotide
  Antisense strand to SEQ ID NO: 248418
cuaaucacucgauaucauc

SEQ ID NO: 248420 - RNA, 19 nt, Artificial Sequence
  Description of Artificial Sequence: Synthetic oligonucleotide
  Sense strand starting at position 2793 SEQ ID NO: 3197
augauaucgagugauuagu

SEQ ID NO: 248421 - RNA, 19 nt, Artificial Sequence
  Description of Artificial Sequence: Synthetic oligonucleotide
  Antisense strand to SEQ ID NO: 248420
acuaaucacucgauaucau

SEQ ID NO: 248422 - RNA, 19 nt, Artificial Sequence
  Description of Artificial Sequence: Synthetic oligonucleotide
  Sense strand starting at position 2799 SEQ ID NO: 3197
ucgagugauuaguugagau

SEQ ID NO: 248423 - RNA, 19 nt, Artificial Sequence
  Description of Artificial Sequence: Synthetic oligonucleotide
  Antisense strand to SEQ ID NO: 248422
aucucaacuaaucacucga

SEQ ID NO: 248424 - RNA, 19 nt, Artificial Sequence
  Description of Artificial Sequence: Synthetic oligonucleotide
  Sense strand starting at position 2951 SEQ ID NO: 3197
cugccaagacacugaucau

SEQ ID NO: 248425 - RNA, 19 nt, Artificial Sequence
  Description of Artificial Sequence: Synthetic oligonucleotide
  Antisense strand to SEQ ID NO: 248424
augaucagugucuuggcag

SEQ ID NO: 248426 - RNA, 19 nt, Artificial Sequence
  Description of Artificial Sequence: Synthetic oligonucleotide
  Sense strand starting at position 2960 SEQ ID NO: 3197
cacugaucauaucuggagu

SEQ ID NO: 248427 - RNA, 19 nt, Artificial Sequence
  Description of Artificial Sequence: Synthetic oligonucleotide
  Antisense strand to SEQ ID NO: 248426
acuccagauaugaucagug

SEQ ID NO: 248428 - RNA, 19 nt, Artificial Sequence
  Description of Artificial Sequence: Synthetic oligonucleotide
  Sense strand starting at position 2963 SEQ ID NO: 3197
ugaucauaucuggagugcu

SEQ ID NO: 248429 - RNA, 19 nt, Artificial Sequence
  Description of Artificial Sequence: Synthetic oligonucleotide
  Antisense strand to SEQ ID NO: 248428
agcacuccagauaugauca

SEQ ID NO: 248430 - RNA, 19 nt, Artificial Sequence
  Description of Artificial Sequence: Synthetic oligonucleotide
  Sense strand starting at position 2989 SEQ ID NO: 3197
uugcaauaggcugaguaaa

SEQ ID NO: 248431 - RNA, 19 nt, Artificial Sequence
  Description of Artificial Sequence: Synthetic oligonucleotide
  Antisense strand to SEQ ID NO: 248430
uuuacucagccuauugcaa

SEQ ID NO: 248432 - RNA, 19 nt, Artificial Sequence
  Description of Artificial Sequence: Synthetic oligonucleotide
  Sense strand starting at position 3081 SEQ ID NO: 3197
ccaguagagguuuaagcaa

SEQ ID NO: 248433 - RNA, 19 nt, Artificial Sequence
  Description of Artificial Sequence: Synthetic oligonucleotide
  Antisense strand to SEQ ID NO: 248432
uugcuuaaaccucuacugg

SEQ ID NO: 248434 - RNA, 19 nt, Artificial Sequence
  Description of Artificial Sequence: Synthetic oligonucleotide
  Sense strand starting at position 3140 SEQ ID NO: 3197
uuguuacuacugcagauau

SEQ ID NO: 248435 - RNA, 19 nt, Artificial Sequence
  Description of Artificial Sequence: Synthetic oligonucleotide
  Antisense strand to SEQ ID NO: 248434
auaucugcaguaguaacaa

SEQ ID NO: 248436 - RNA, 19 nt, Artificial Sequence
  Description of Artificial Sequence: Synthetic oligonucleotide
  Sense strand starting at position 3142 SEQ ID NO: 3197
guuacuacugcagauaucu

SEQ ID NO: 248437 - RNA, 19 nt, Artificial Sequence
  Description of Artificial Sequence: Synthetic oligonucleotide
  Antisense strand to SEQ ID NO: 248436
agauaucugcaguaguaac

SEQ ID NO: 248438 - RNA, 19 nt, Artificial Sequence
  Description of Artificial Sequence: Synthetic oligonucleotide
  Sense strand starting at position 3249 SEQ ID NO: 3197
gguuucucucuggaaauuc

SEQ ID NO: 248439 - RNA, 19 nt, Artificial Sequence
  Description of Artificial Sequence: Synthetic oligonucleotide
  Antisense strand to SEQ ID NO: 248438
gaauuuccagagagaaacc

SEQ ID NO: 248440 - RNA, 19 nt, Artificial Sequence
  Description of Artificial Sequence: Synthetic oligonucleotide
  Sense strand starting at position 3289 SEQ ID NO: 3197
cauggauauuccuuuccga

SEQ ID NO: 248441 - RNA, 19 nt, Artificial Sequence
  Description of Artificial Sequence: Synthetic oligonucleotide
  Antisense strand to SEQ ID NO: 248440
ucggaaaggaauauccaug

SEQ ID NO: 248442 - RNA, 19 nt, Artificial Sequence
  Description of Artificial Sequence: Synthetic oligonucleotide
  Sense strand starting at position 3431 SEQ ID NO: 3197
agaagauaucaaggcucua

SEQ ID NO: 248443 - RNA, 19 nt, Artificial Sequence
  Description of Artificial Sequence: Synthetic oligonucleotide
  Antisense strand to SEQ ID NO: 248442
uagagccuugauaucuucu

SEQ ID NO: 248444 - RNA, 19 nt, Artificial Sequence
  Description of Artificial Sequence: Synthetic oligonucleotide
  Sense strand starting at position 3473 SEQ ID NO: 3197
agaguacaccuguguaaau

SEQ ID NO: 248445 - RNA, 19 nt, Artificial Sequence
  Description of Artificial Sequence: Synthetic oligonucleotide
  Antisense strand to SEQ ID NO: 248444
auuuacacagguguacucu

SEQ ID NO: 248446 - RNA, 19 nt, Artificial Sequence
  Description of Artificial Sequence: Synthetic oligonucleotide
  Sense strand starting at position 3474 SEQ ID NO: 3197
gaguacaccuguguaaaug

SEQ ID NO: 248447 - RNA, 19 nt, Artificial Sequence
  Description of Artificial Sequence: Synthetic oligonucleotide
  Antisense strand to SEQ ID NO: 248446
cauuuacacagguguacuc

SEQ ID NO: 248448 - RNA, 19 nt, Artificial Sequence
  Description of Artificial Sequence: Synthetic oligonucleotide
  Sense strand starting at position 3484 SEQ ID NO: 3197
guguaaauggagcaggauu

SEQ ID NO: 248449 - RNA, 19 nt, Artificial Sequence
  Description of Artificial Sequence: Synthetic oligonucleotide
  Antisense strand to SEQ ID NO: 248448
aauccugcuccauuuacac

SEQ ID NO: 248450 - RNA, 19 nt, Artificial Sequence
  Description of Artificial Sequence: Synthetic oligonucleotide
  Sense strand starting at position 3578 SEQ ID NO: 3197
caggaaagugguuggguua

SEQ ID NO: 248451 - RNA, 19 nt, Artificial Sequence
  Description of Artificial Sequence: Synthetic oligonucleotide
  Antisense strand to SEQ ID NO: 248450
uaacccaaccacuuuccug

SEQ ID NO: 248452 - RNA, 19 nt, Artificial Sequence
  Description of Artificial Sequence: Synthetic oligonucleotide
  Sense strand starting at position 3579 SEQ ID NO: 3197
aggaaagugguuggguuau

SEQ ID NO: 248453 - RNA, 19 nt, Artificial Sequence
  Description of Artificial Sequence: Synthetic oligonucleotide
  Antisense strand to SEQ ID NO: 248452
auaacccaaccacuuuccu

SEQ ID NO: 248454 - RNA, 19 nt, Artificial Sequence
  Description of Artificial Sequence: Synthetic oligonucleotide
  Sense strand starting at position 3581 SEQ ID NO: 3197
gaaagugguuggguuauaa

SEQ ID NO: 248455 - RNA, 19 nt, Artificial Sequence
  Description of Artificial Sequence: Synthetic oligonucleotide
  Antisense strand to SEQ ID NO: 248454
uuauaacccaaccacuuuc

SEQ ID NO: 248456 - RNA, 19 nt, Artificial Sequence
  Description of Artificial Sequence: Synthetic oligonucleotide
  Sense strand starting at position 3592 SEQ ID NO: 3197
gguuauaaacaaugcaauu

SEQ ID NO: 248457 - RNA, 19 nt, Artificial Sequence
  Description of Artificial Sequence: Synthetic oligonucleotide
  Antisense strand to SEQ ID NO: 248456
aauugcauuguuuauaacc

SEQ ID NO: 248458 - RNA, 19 nt, Artificial Sequence
  Description of Artificial Sequence: Synthetic oligonucleotide
  Sense strand starting at position 3603 SEQ ID NO: 3197
augcaauugccggaugaaa

SEQ ID NO: 248459 - RNA, 19 nt, Artificial Sequence
  Description of Artificial Sequence: Synthetic oligonucleotide
  Antisense strand to SEQ ID NO: 248458
uuucauccggcaauugcau

SEQ ID NO: 248460 - RNA, 19 nt, Artificial Sequence
  Description of Artificial Sequence: Synthetic oligonucleotide
  Sense strand starting at position 3709 SEQ ID NO: 3197
ucuagaagccugcaaagaa

SEQ ID NO: 248461 - RNA, 19 nt, Artificial Sequence
  Description of Artificial Sequence: Synthetic oligonucleotide
  Antisense strand to SEQ ID NO: 248460
uucuuugcaggcuucuaga

SEQ ID NO: 248462 - RNA, 19 nt, Artificial Sequence
  Description of Artificial Sequence: Synthetic oligonucleotide
  Sense strand starting at position 3758 SEQ ID NO: 3197
ccaacaauuuagugagaca

SEQ ID NO: 248463 - RNA, 19 nt, Artificial Sequence
  Description of Artificial Sequence: Synthetic oligonucleotide
  Antisense strand to SEQ ID NO: 248462
ugucucacuaaauuguugg

SEQ ID NO: 248464 - RNA, 19 nt, Artificial Sequence
  Description of Artificial Sequence: Synthetic oligonucleotide
  Sense strand starting at position 3761 SEQ ID NO: 3197
acaauuuagugagacagga

SEQ ID NO: 248465 - RNA, 19 nt, Artificial Sequence
  Description of Artificial Sequence: Synthetic oligonucleotide
  Antisense strand to SEQ ID NO: 248464
uccugucucacuaaauugu

SEQ ID NO: 248466 - RNA, 19 nt, Artificial Sequence
  Description of Artificial Sequence: Synthetic oligonucleotide
  Sense strand starting at position 3797 SEQ ID NO: 3197
uacagagccuuaguuaaag

SEQ ID NO: 248467 - RNA, 19 nt, Artificial Sequence
  Description of Artificial Sequence: Synthetic oligonucleotide
  Antisense strand to SEQ ID NO: 248466
cuuuaacuaaggcucugua

SEQ ID NO: 248468 - RNA, 19 nt, Artificial Sequence
  Description of Artificial Sequence: Synthetic oligonucleotide
  Sense strand starting at position 3920 SEQ ID NO: 3197
acagaugugucuuucugag

SEQ ID NO: 248469 - RNA, 19 nt, Artificial Sequence
  Description of Artificial Sequence: Synthetic oligonucleotide
  Antisense strand to SEQ ID NO: 248468
cucagaaagacacaucugu

SEQ ID NO: 248470 - RNA, 19 nt, Artificial Sequence
  Description of Artificial Sequence: Synthetic oligonucleotide
  Sense strand starting at position 49 SEQ ID NO: 3198
gaauaaugauaugcgaaug

SEQ ID NO: 248471 - RNA, 19 nt, Artificial Sequence
  Description of Artificial Sequence: Synthetic oligonucleotide
  Antisense strand to SEQ ID NO: 248470
cauucgcauaucauuauuc

SEQ ID NO: 248472 - RNA, 19 nt, Artificial Sequence
  Description of Artificial Sequence: Synthetic oligonucleotide
  Sense strand starting at position 222 SEQ ID NO: 3198
ucgauuguuauuugcaaag

SEQ ID NO: 248473 - RNA, 19 nt, Artificial Sequence
  Description of Artificial Sequence: Synthetic oligonucleotide
  Antisense strand to SEQ ID NO: 248472
cuuugcaaauaacaaucga

SEQ ID NO: 248474 - RNA, 19 nt, Artificial Sequence
  Description of Artificial Sequence: Synthetic oligonucleotide
  Sense strand starting at position 288 SEQ ID NO: 3198
agagaauuggccuggauua

SEQ ID NO: 248475 - RNA, 19 nt, Artificial Sequence
  Description of Artificial Sequence: Synthetic oligonucleotide
  Antisense strand to SEQ ID NO: 248474
uaauccaggccaauucucu

SEQ ID NO: 248476 - RNA, 19 nt, Artificial Sequence
  Description of Artificial Sequence: Synthetic oligonucleotide
  Sense strand starting at position 289 SEQ ID NO: 3198
gagaauuggccuggauuaa

SEQ ID NO: 248477 - RNA, 19 nt, Artificial Sequence
  Description of Artificial Sequence: Synthetic oligonucleotide
  Antisense strand to SEQ ID NO: 248476
uuaauccaggccaauucuc

SEQ ID NO: 248478 - RNA, 19 nt, Artificial Sequence
  Description of Artificial Sequence: Synthetic oligonucleotide
  Sense strand starting at position 334 SEQ ID NO: 3198
gacaguuugcgggagagaa

SEQ ID NO: 248479 - RNA, 19 nt, Artificial Sequence
  Description of Artificial Sequence: Synthetic oligonucleotide
  Antisense strand to SEQ ID NO: 248478
uucucucccgcaaacuguc

SEQ ID NO: 248480 - RNA, 19 nt, Artificial Sequence
  Description of Artificial Sequence: Synthetic oligonucleotide
  Sense strand starting at position 336 SEQ ID NO: 3198
caguuugcgggagagaaua

SEQ ID NO: 248481 - RNA, 19 nt, Artificial Sequence
  Description of Artificial Sequence: Synthetic oligonucleotide
  Antisense strand to SEQ ID NO: 248480
uauucucucccgcaaacug

SEQ ID NO: 248482 - RNA, 19 nt, Artificial Sequence
  Description of Artificial Sequence: Synthetic oligonucleotide
  Sense strand starting at position 338 SEQ ID NO: 3198
guuugcgggagagaauaau

SEQ ID NO: 248483 - RNA, 19 nt, Artificial Sequence
  Description of Artificial Sequence: Synthetic oligonucleotide
  Antisense strand to SEQ ID NO: 248482
auuauucucucccgcaaac

SEQ ID NO: 248484 - RNA, 19 nt, Artificial Sequence
  Description of Artificial Sequence: Synthetic oligonucleotide
  Sense strand starting at position 402 SEQ ID NO: 3198
ugaucuaaguagguggaaa

SEQ ID NO: 248485 - RNA, 19 nt, Artificial Sequence
  Description of Artificial Sequence: Synthetic oligonucleotide
  Antisense strand to SEQ ID NO: 248484
uuuccaccuacuuagauca

SEQ ID NO: 248486 - RNA, 19 nt, Artificial Sequence
  Description of Artificial Sequence: Synthetic oligonucleotide
  Sense strand starting at position 558 SEQ ID NO: 3198
cuacuuggcaauugguaga

SEQ ID NO: 248487 - RNA, 19 nt, Artificial Sequence
  Description of Artificial Sequence: Synthetic oligonucleotide
  Antisense strand to SEQ ID NO: 248486
ucuaccaauugccaaguag

SEQ ID NO: 248488 - RNA, 19 nt, Artificial Sequence
  Description of Artificial Sequence: Synthetic oligonucleotide
  Sense strand starting at position 664 SEQ ID NO: 3198
acgaaacaaguuugacauc

SEQ ID NO: 248489 - RNA, 19 nt, Artificial Sequence
  Description of Artificial Sequence: Synthetic oligonucleotide
  Antisense strand to SEQ ID NO: 248488
gaugucaaacuuguuucgu

SEQ ID NO: 248490 - RNA, 19 nt, Artificial Sequence
  Description of Artificial Sequence: Synthetic oligonucleotide
  Sense strand starting at position 702 SEQ ID NO: 3198
agaaauggcuaguuauuaa

SEQ ID NO: 248491 - RNA, 19 nt, Artificial Sequence
  Description of Artificial Sequence: Synthetic oligonucleotide
  Antisense strand to SEQ ID NO: 248490
uuaauaacuagccauuucu

SEQ ID NO: 248492 - RNA, 19 nt, Artificial Sequence
  Description of Artificial Sequence: Synthetic oligonucleotide
  Sense strand starting at position 734 SEQ ID NO: 3198
agagaccacucacuguuaa

SEQ ID NO: 248493 - RNA, 19 nt, Artificial Sequence
  Description of Artificial Sequence: Synthetic oligonucleotide
  Antisense strand to SEQ ID NO: 248492
uuaacagugaguggucucu

SEQ ID NO: 248494 - RNA, 19 nt, Artificial Sequence
  Description of Artificial Sequence: Synthetic oligonucleotide
  Sense strand starting at position 932 SEQ ID NO: 3198
gaaggaaguuugucuccua

SEQ ID NO: 248495 - RNA, 19 nt, Artificial Sequence
  Description of Artificial Sequence: Synthetic oligonucleotide
  Antisense strand to SEQ ID NO: 248494
uaggagacaaacuuccuuc

SEQ ID NO: 248496 - RNA, 19 nt, Artificial Sequence
  Description of Artificial Sequence: Synthetic oligonucleotide
  Sense strand starting at position 933 SEQ ID NO: 3198
aaggaaguuugucuccuaa

SEQ ID NO: 248497 - RNA, 19 nt, Artificial Sequence
  Description of Artificial Sequence: Synthetic oligonucleotide
  Antisense strand to SEQ ID NO: 248496
uuaggagacaaacuuccuu

SEQ ID NO: 248498 - RNA, 19 nt, Artificial Sequence
  Description of Artificial Sequence: Synthetic oligonucleotide
  Sense strand starting at position 935 SEQ ID NO: 3198
ggaaguuugucuccuaaac

SEQ ID NO: 248499 - RNA, 19 nt, Artificial Sequence
  Description of Artificial Sequence: Synthetic oligonucleotide
  Antisense strand to SEQ ID NO: 248498
guuuaggagacaaacuucc

SEQ ID NO: 248500 - RNA, 19 nt, Artificial Sequence
  Description of Artificial Sequence: Synthetic oligonucleotide
  Sense strand starting at position 964 SEQ ID NO: 3198
caugaauguccugaaguuu

SEQ ID NO: 248501 - RNA, 19 nt, Artificial Sequence
  Description of Artificial Sequence: Synthetic oligonucleotide
  Antisense strand to SEQ ID NO: 248500
aaacuucaggacauucaug

SEQ ID NO: 248502 - RNA, 19 nt, Artificial Sequence
  Description of Artificial Sequence: Synthetic oligonucleotide
  Sense strand starting at position 995 SEQ ID NO: 3198
acggaaugugcuuaccaca

SEQ ID NO: 248503 - RNA, 19 nt, Artificial Sequence
  Description of Artificial Sequence: Synthetic oligonucleotide
  Antisense strand to SEQ ID NO: 248502
ugugguaagcacauuccgu

SEQ ID NO: 248504 - RNA, 19 nt, Artificial Sequence
  Description of Artificial Sequence: Synthetic oligonucleotide
  Sense strand starting at position 1144 SEQ ID NO: 3198
aggauaccgccugguauuu

SEQ ID NO: 248505 - RNA, 19 nt, Artificial Sequence
  Description of Artificial Sequence: Synthetic oligonucleotide
  Antisense strand to SEQ ID NO: 248504
aaauaccaggcgguauccu

SEQ ID NO: 248506 - RNA, 19 nt, Artificial Sequence
  Description of Artificial Sequence: Synthetic oligonucleotide
  Sense strand starting at position 1155 SEQ ID NO: 3198
ugguauuucuugcuaccaa

SEQ ID NO: 248507 - RNA, 19 nt, Artificial Sequence
  Description of Artificial Sequence: Synthetic oligonucleotide
  Antisense strand to SEQ ID NO: 248506
uugguagcaagaaauacca

SEQ ID NO: 248508 - RNA, 19 nt, Artificial Sequence
  Description of Artificial Sequence: Synthetic oligonucleotide
  Sense strand starting at position 1595 SEQ ID NO: 3198
gguuuagccguuuaaauuu

SEQ ID NO: 248509 - RNA, 19 nt, Artificial Sequence
  Description of Artificial Sequence: Synthetic oligonucleotide
  Antisense strand to SEQ ID NO: 248508
aaauuuaaacggcuaaacc

SEQ ID NO: 248510 - RNA, 19 nt, Artificial Sequence
  Description of Artificial Sequence: Synthetic oligonucleotide
  Sense strand starting at position 2513 SEQ ID NO: 3198
agagauuucucacaauugu

SEQ ID NO: 248511 - RNA, 19 nt, Artificial Sequence
  Description of Artificial Sequence: Synthetic oligonucleotide
  Antisense strand to SEQ ID NO: 248510
acaauugugagaaaucucu

SEQ ID NO: 248512 - RNA, 19 nt, Artificial Sequence
  Description of Artificial Sequence: Synthetic oligonucleotide
  Sense strand starting at position 2616 SEQ ID NO: 3198
cccugaaguaggugacaaa

SEQ ID NO: 248513 - RNA, 19 nt, Artificial Sequence
  Description of Artificial Sequence: Synthetic oligonucleotide
  Antisense strand to SEQ ID NO: 248512
uuugucaccuacuucaggg

SEQ ID NO: 248514 - RNA, 19 nt, Artificial Sequence
  Description of Artificial Sequence: Synthetic oligonucleotide
  Sense strand starting at position 2619 SEQ ID NO: 3198
ugaaguaggugacaaauuu

SEQ ID NO: 248515 - RNA, 19 nt, Artificial Sequence
  Description of Artificial Sequence: Synthetic oligonucleotide
  Antisense strand to SEQ ID NO: 248514
aaauuugucaccuacuuca

SEQ ID NO: 248516 - RNA, 19 nt, Artificial Sequence
  Description of Artificial Sequence: Synthetic oligonucleotide
  Sense strand starting at position 2704 SEQ ID NO: 3198
cuacaaaucugguuugagu

SEQ ID NO: 248517 - RNA, 19 nt, Artificial Sequence
  Description of Artificial Sequence: Synthetic oligonucleotide
  Antisense strand to SEQ ID NO: 248516
acucaaaccagauuuguag

SEQ ID NO: 248518 - RNA, 19 nt, Artificial Sequence
  Description of Artificial Sequence: Synthetic oligonucleotide
  Sense strand starting at position 2774 SEQ ID NO: 3198
aguuuauguggagauaguu

SEQ ID NO: 248519 - RNA, 19 nt, Artificial Sequence
  Description of Artificial Sequence: Synthetic oligonucleotide
  Antisense strand to SEQ ID NO: 248518
aacuaucuccacauaaacu

SEQ ID NO: 248520 - RNA, 19 nt, Artificial Sequence
  Description of Artificial Sequence: Synthetic oligonucleotide
  Sense strand starting at position 2919 SEQ ID NO: 3198
aaauguagcuucuuagaug

SEQ ID NO: 248521 - RNA, 19 nt, Artificial Sequence
  Description of Artificial Sequence: Synthetic oligonucleotide
  Antisense strand to SEQ ID NO: 248520
caucuaagaagcuacauuu

SEQ ID NO: 248522 - RNA, 19 nt, Artificial Sequence
  Description of Artificial Sequence: Synthetic oligonucleotide
  Sense strand starting at position 3167 SEQ ID NO: 3198
cuucuaguagauugugaua

SEQ ID NO: 248523 - RNA, 19 nt, Artificial Sequence
  Description of Artificial Sequence: Synthetic oligonucleotide
  Antisense strand to SEQ ID NO: 248522
uaucacaaucuacuagaag

SEQ ID NO: 248524 - RNA, 19 nt, Artificial Sequence
  Description of Artificial Sequence: Synthetic oligonucleotide
  Sense strand starting at position 3210 SEQ ID NO: 3198
gcugcauuuauuggagcua

SEQ ID NO: 248525 - RNA, 19 nt, Artificial Sequence
  Description of Artificial Sequence: Synthetic oligonucleotide
  Antisense strand to SEQ ID NO: 248524
uagcuccaauaaaugcagc

SEQ ID NO: 248526 - RNA, 19 nt, Artificial Sequence
  Description of Artificial Sequence: Synthetic oligonucleotide
  Sense strand starting at position 3456 SEQ ID NO: 3198
uaauuagcaguuugagaca

SEQ ID NO: 248527 - RNA, 19 nt, Artificial Sequence
  Description of Artificial Sequence: Synthetic oligonucleotide
  Antisense strand to SEQ ID NO: 248526
ugucucaaacugcuaauua

SEQ ID NO: 248528 - RNA, 19 nt, Artificial Sequence
  Description of Artificial Sequence: Synthetic oligonucleotide
  Sense strand starting at position 3477 SEQ ID NO: 3198
uaauaagcauguguuaaga

SEQ ID NO: 248529 - RNA, 19 nt, Artificial Sequence
  Description of Artificial Sequence: Synthetic oligonucleotide
  Antisense strand to SEQ ID NO: 248528
ucuuaacacaugcuuauua

SEQ ID NO: 248530 - RNA, 19 nt, Artificial Sequence
  Description of Artificial Sequence: Synthetic oligonucleotide
  Sense strand starting at position 3502 SEQ ID NO: 3198
aaaggaagauucuggauuu

SEQ ID NO: 248531 - RNA, 19 nt, Artificial Sequence
  Description of Artificial Sequence: Synthetic oligonucleotide
  Antisense strand to SEQ ID NO: 248530
aaauccagaaucuuccuuu

SEQ ID NO: 248532 - RNA, 19 nt, Artificial Sequence
  Description of Artificial Sequence: Synthetic oligonucleotide
  Sense strand starting at position 3503 SEQ ID NO: 3198
aaggaagauucuggauuug

SEQ ID NO: 248533 - RNA, 19 nt, Artificial Sequence
  Description of Artificial Sequence: Synthetic oligonucleotide
  Antisense strand to SEQ ID NO: 248532
caaauccagaaucuuccuu

SEQ ID NO: 248534 - RNA, 19 nt, Artificial Sequence
  Description of Artificial Sequence: Synthetic oligonucleotide
  Sense strand starting at position 3588 SEQ ID NO: 3198
gggugguuugaggagaugu

SEQ ID NO: 248535 - RNA, 19 nt, Artificial Sequence
  Description of Artificial Sequence: Synthetic oligonucleotide
  Antisense strand to SEQ ID NO: 248534
acaucuccucaaaccaccc

SEQ ID NO: 248536 - RNA, 19 nt, Artificial Sequence
  Description of Artificial Sequence: Synthetic oligonucleotide
  Sense strand starting at position 3598 SEQ ID NO: 3198
aggagauguugugugaaua

SEQ ID NO: 248537 - RNA, 19 nt, Artificial Sequence
  Description of Artificial Sequence: Synthetic oligonucleotide
  Antisense strand to SEQ ID NO: 248536
uauucacacaacaucuccu

SEQ ID NO: 248538 - RNA, 19 nt, Artificial Sequence
  Description of Artificial Sequence: Synthetic oligonucleotide
  Sense strand starting at position 3599 SEQ ID NO: 3198
ggagauguugugugaauau

SEQ ID NO: 248539 - RNA, 19 nt, Artificial Sequence
  Description of Artificial Sequence: Synthetic oligonucleotide
  Antisense strand to SEQ ID NO: 248538
auauucacacaacaucucc

SEQ ID NO: 248540 - RNA, 19 nt, Artificial Sequence
  Description of Artificial Sequence: Synthetic oligonucleotide
  Sense strand starting at position 3639 SEQ ID NO: 3198
ugucaacuagauugaguaa

SEQ ID NO: 248541 - RNA, 19 nt, Artificial Sequence
  Description of Artificial Sequence: Synthetic oligonucleotide
  Antisense strand to SEQ ID NO: 248540
uuacucaaucuaguugaca

SEQ ID NO: 248542 - RNA, 19 nt, Artificial Sequence
  Description of Artificial Sequence: Synthetic oligonucleotide
  Sense strand starting at position 3776 SEQ ID NO: 3198
uugccaaauguuuauugaa

SEQ ID NO: 248543 - RNA, 19 nt, Artificial Sequence
  Description of Artificial Sequence: Synthetic oligonucleotide
  Antisense strand to SEQ ID NO: 248542
uucaauaaacauuuggcaa

SEQ ID NO: 248544 - RNA, 19 nt, Artificial Sequence
  Description of Artificial Sequence: Synthetic oligonucleotide
  Sense strand starting at position 3778 SEQ ID NO: 3198
gccaaauguuuauugaaca

SEQ ID NO: 248545 - RNA, 19 nt, Artificial Sequence
  Description of Artificial Sequence: Synthetic oligonucleotide
  Antisense strand to SEQ ID NO: 248544
uguucaauaaacauuuggc

SEQ ID NO: 248546 - RNA, 19 nt, Artificial Sequence
  Description of Artificial Sequence: Synthetic oligonucleotide
  Sense strand starting at position 3875 SEQ ID NO: 3198
ggauuaagcuuuguaacua

SEQ ID NO: 248547 - RNA, 19 nt, Artificial Sequence
  Description of Artificial Sequence: Synthetic oligonucleotide
  Antisense strand to SEQ ID NO: 248546
uaguuacaaagcuuaaucc

SEQ ID NO: 248548 - RNA, 19 nt, Artificial Sequence
  Description of Artificial Sequence: Synthetic oligonucleotide
  Sense strand starting at position 3965 SEQ ID NO: 3198
ggcuguuuccaauacucua

SEQ ID NO: 248549 - RNA, 19 nt, Artificial Sequence
  Description of Artificial Sequence: Synthetic oligonucleotide
  Antisense strand to SEQ ID NO: 248548
uagaguauuggaaacagcc

SEQ ID NO: 248550 - RNA, 19 nt, Artificial Sequence
  Description of Artificial Sequence: Synthetic oligonucleotide
  Sense strand starting at position 40 SEQ ID NO: 3199
gauagcagcucuguaacaa

SEQ ID NO: 248551 - RNA, 19 nt, Artificial Sequence
  Description of Artificial Sequence: Synthetic oligonucleotide
  Antisense strand to SEQ ID NO: 248550
uuguuacagagcugcuauc

SEQ ID NO: 248552 - RNA, 19 nt, Artificial Sequence
  Description of Artificial Sequence: Synthetic oligonucleotide
  Sense strand starting at position 70 SEQ ID NO: 3199
aagcaacgucuugggaauu

SEQ ID NO: 248553 - RNA, 19 nt, Artificial Sequence
  Description of Artificial Sequence: Synthetic oligonucleotide
  Antisense strand to SEQ ID NO: 248552
aauucccaagacguugcuu

SEQ ID NO: 248554 - RNA, 19 nt, Artificial Sequence
  Description of Artificial Sequence: Synthetic oligonucleotide
  Sense strand starting at position 95 SEQ ID NO: 3199
uaaccuucgugugugaaac

SEQ ID NO: 248555 - RNA, 19 nt, Artificial Sequence
  Description of Artificial Sequence: Synthetic oligonucleotide
  Antisense strand to SEQ ID NO: 248554
guuucacacacgaagguua

SEQ ID NO: 248556 - RNA, 19 nt, Artificial Sequence
  Description of Artificial Sequence: Synthetic oligonucleotide
  Sense strand starting at position 147 SEQ ID NO: 3199
uauuguugccacugucaag

SEQ ID NO: 248557 - RNA, 19 nt, Artificial Sequence
  Description of Artificial Sequence: Synthetic oligonucleotide
  Antisense strand to SEQ ID NO: 248556
cuugacaguggcaacaaua

SEQ ID NO: 248558 - RNA, 19 nt, Artificial Sequence
  Description of Artificial Sequence: Synthetic oligonucleotide
  Sense strand starting at position 202 SEQ ID NO: 3199
guauccuguggguaaucuu

SEQ ID NO: 248559 - RNA, 19 nt, Artificial Sequence
  Description of Artificial Sequence: Synthetic oligonucleotide
  Antisense strand to SEQ ID NO: 248558
aagauuacccacaggauac

SEQ ID NO: 248560 - RNA, 19 nt, Artificial Sequence
  Description of Artificial Sequence: Synthetic oligonucleotide
  Sense strand starting at position 292 SEQ ID NO: 3199
ccuacuaucuaaguggaau

SEQ ID NO: 248561 - RNA, 19 nt, Artificial Sequence
  Description of Artificial Sequence: Synthetic oligonucleotide
  Antisense strand to SEQ ID NO: 248560
auuccacuuagauaguagg

SEQ ID NO: 248562 - RNA, 19 nt, Artificial Sequence
  Description of Artificial Sequence: Synthetic oligonucleotide
  Sense strand starting at position 305 SEQ ID NO: 3199
uggaauagguugucugcuu

SEQ ID NO: 248563 - RNA, 19 nt, Artificial Sequence
  Description of Artificial Sequence: Synthetic oligonucleotide
  Antisense strand to SEQ ID NO: 248562
aagcagacaaccuauucca

SEQ ID NO: 248564 - RNA, 19 nt, Artificial Sequence
  Description of Artificial Sequence: Synthetic oligonucleotide
  Sense strand starting at position 306 SEQ ID NO: 3199
ggaauagguugucugcuuu

SEQ ID NO: 248565 - RNA, 19 nt, Artificial Sequence
  Description of Artificial Sequence: Synthetic oligonucleotide
  Antisense strand to SEQ ID NO: 248564
aaagcagacaaccuauucc

SEQ ID NO: 248566 - RNA, 19 nt, Artificial Sequence
  Description of Artificial Sequence: Synthetic oligonucleotide
  Sense strand starting at position 331 SEQ ID NO: 3199
gcacgucuugcuuuccuaa

SEQ ID NO: 248567 - RNA, 19 nt, Artificial Sequence
  Description of Artificial Sequence: Synthetic oligonucleotide
  Antisense strand to SEQ ID NO: 248566
uuaggaaagcaagacgugc

SEQ ID NO: 248568 - RNA, 19 nt, Artificial Sequence
  Description of Artificial Sequence: Synthetic oligonucleotide
  Sense strand starting at position 358 SEQ ID NO: 3199
agcugucucacagagauag

SEQ ID NO: 248569 - RNA, 19 nt, Artificial Sequence
  Description of Artificial Sequence: Synthetic oligonucleotide
  Antisense strand to SEQ ID NO: 248568
cuaucucugugagacagcu

SEQ ID NO: 248570 - RNA, 19 nt, Artificial Sequence
  Description of Artificial Sequence: Synthetic oligonucleotide
  Sense strand starting at position 395 SEQ ID NO: 3199
uccuuaugcugcuuaagag

SEQ ID NO: 248571 - RNA, 19 nt, Artificial Sequence
  Description of Artificial Sequence: Synthetic oligonucleotide
  Antisense strand to SEQ ID NO: 248570
cucuuaagcagcauaagga

SEQ ID NO: 248572 - RNA, 19 nt, Artificial Sequence
  Description of Artificial Sequence: Synthetic oligonucleotide
  Sense strand starting at position 629 SEQ ID NO: 3199
uuggcauagcuaugaucca

SEQ ID NO: 248573 - RNA, 19 nt, Artificial Sequence
  Description of Artificial Sequence: Synthetic oligonucleotide
  Antisense strand to SEQ ID NO: 248572
uggaucauagcuaugccaa

SEQ ID NO: 248574 - RNA, 19 nt, Artificial Sequence
  Description of Artificial Sequence: Synthetic oligonucleotide
  Sense strand starting at position 798 SEQ ID NO: 3199
gcuagucaccugcagugaa

SEQ ID NO: 248575 - RNA, 19 nt, Artificial Sequence
  Description of Artificial Sequence: Synthetic oligonucleotide
  Antisense strand to SEQ ID NO: 248574
uucacugcaggugacuagc

SEQ ID NO: 248576 - RNA, 19 nt, Artificial Sequence
  Description of Artificial Sequence: Synthetic oligonucleotide
  Sense strand starting at position 901 SEQ ID NO: 3199
auuccuauugaguauccau

SEQ ID NO: 248577 - RNA, 19 nt, Artificial Sequence
  Description of Artificial Sequence: Synthetic oligonucleotide
  Antisense strand to SEQ ID NO: 248576
auggauacucaauaggaau

SEQ ID NO: 248578 - RNA, 19 nt, Artificial Sequence
  Description of Artificial Sequence: Synthetic oligonucleotide
  Sense strand starting at position 1002 SEQ ID NO: 3199
cgaguugucccauacucaa

SEQ ID NO: 248579 - RNA, 19 nt, Artificial Sequence
  Description of Artificial Sequence: Synthetic oligonucleotide
  Antisense strand to SEQ ID NO: 248578
uugaguaugggacaacucg

SEQ ID NO: 248580 - RNA, 19 nt, Artificial Sequence
  Description of Artificial Sequence: Synthetic oligonucleotide
  Sense strand starting at position 1165 SEQ ID NO: 3199
auaugaauucguugaaagc

SEQ ID NO: 248581 - RNA, 19 nt, Artificial Sequence
  Description of Artificial Sequence: Synthetic oligonucleotide
  Antisense strand to SEQ ID NO: 248580
gcuuucaacgaauucauau

SEQ ID NO: 248582 - RNA, 19 nt, Artificial Sequence
  Description of Artificial Sequence: Synthetic oligonucleotide
  Sense strand starting at position 1166 SEQ ID NO: 3199
uaugaauucguugaaagcu

SEQ ID NO: 248583 - RNA, 19 nt, Artificial Sequence
  Description of Artificial Sequence: Synthetic oligonucleotide
  Antisense strand to SEQ ID NO: 248582
agcuuucaacgaauucaua

SEQ ID NO: 248584 - RNA, 19 nt, Artificial Sequence
  Description of Artificial Sequence: Synthetic oligonucleotide
  Sense strand starting at position 1172 SEQ ID NO: 3199
uucguugaaagcuaaggau

SEQ ID NO: 248585 - RNA, 19 nt, Artificial Sequence
  Description of Artificial Sequence: Synthetic oligonucleotide
  Antisense strand to SEQ ID NO: 248584
auccuuagcuuucaacgaa

SEQ ID NO: 248586 - RNA, 19 nt, Artificial Sequence
  Description of Artificial Sequence: Synthetic oligonucleotide
  Sense strand starting at position 1355 SEQ ID NO: 3199
uguuaaguacuucguaaua

SEQ ID NO: 248587 - RNA, 19 nt, Artificial Sequence
  Description of Artificial Sequence: Synthetic oligonucleotide
  Antisense strand to SEQ ID NO: 248586
uauuacgaaguacuuaaca

SEQ ID NO: 248588 - RNA, 19 nt, Artificial Sequence
  Description of Artificial Sequence: Synthetic oligonucleotide
  Sense strand starting at position 1367 SEQ ID NO: 3199
cguaauauuccagaguugu

SEQ ID NO: 248589 - RNA, 19 nt, Artificial Sequence
  Description of Artificial Sequence: Synthetic oligonucleotide
  Antisense strand to SEQ ID NO: 248588
acaacucuggaauauuacg

SEQ ID NO: 248590 - RNA, 19 nt, Artificial Sequence
  Description of Artificial Sequence: Synthetic oligonucleotide
  Sense strand starting at position 1373 SEQ ID NO: 3199
auuccagaguuguuuacau

SEQ ID NO: 248591 - RNA, 19 nt, Artificial Sequence
  Description of Artificial Sequence: Synthetic oligonucleotide
  Antisense strand to SEQ ID NO: 248590
auguaaacaacucuggaau

SEQ ID NO: 248592 - RNA, 19 nt, Artificial Sequence
  Description of Artificial Sequence: Synthetic oligonucleotide
  Sense strand starting at position 1375 SEQ ID NO: 3199
uccagaguuguuuacauaa

SEQ ID NO: 248593 - RNA, 19 nt, Artificial Sequence
  Description of Artificial Sequence: Synthetic oligonucleotide
  Antisense strand to SEQ ID NO: 248592
uuauguaaacaacucugga

SEQ ID NO: 248594 - RNA, 19 nt, Artificial Sequence
  Description of Artificial Sequence: Synthetic oligonucleotide
  Sense strand starting at position 1555 SEQ ID NO: 3199
agggcuaugacucgcauuu

SEQ ID NO: 248595 - RNA, 19 nt, Artificial Sequence
  Description of Artificial Sequence: Synthetic oligonucleotide
  Antisense strand to SEQ ID NO: 248594
aaaugcgagucauagcccu

SEQ ID NO: 248596 - RNA, 19 nt, Artificial Sequence
  Description of Artificial Sequence: Synthetic oligonucleotide
  Sense strand starting at position 2155 SEQ ID NO: 3199
gcgcauauucaguagggaa

SEQ ID NO: 248597 - RNA, 19 nt, Artificial Sequence
  Description of Artificial Sequence: Synthetic oligonucleotide
  Antisense strand to SEQ ID NO: 248596
uucccuacugaauaugcgc

SEQ ID NO: 248598 - RNA, 19 nt, Artificial Sequence
  Description of Artificial Sequence: Synthetic oligonucleotide
  Sense strand starting at position 2157 SEQ ID NO: 3199
gcauauucaguagggaaag

SEQ ID NO: 248599 - RNA, 19 nt, Artificial Sequence
  Description of Artificial Sequence: Synthetic oligonucleotide
  Antisense strand to SEQ ID NO: 248598
cuuucccuacugaauaugc

SEQ ID NO: 248600 - RNA, 19 nt, Artificial Sequence
  Description of Artificial Sequence: Synthetic oligonucleotide
  Sense strand starting at position 2648 SEQ ID NO: 3199
gugguuaacuuuccuaugu

SEQ ID NO: 248601 - RNA, 19 nt, Artificial Sequence
  Description of Artificial Sequence: Synthetic oligonucleotide
  Antisense strand to SEQ ID NO: 248600
acauaggaaaguuaaccac

SEQ ID NO: 248602 - RNA, 19 nt, Artificial Sequence
  Description of Artificial Sequence: Synthetic oligonucleotide
  Sense strand starting at position 2711 SEQ ID NO: 3199
cuuuguauccuccagagaa

SEQ ID NO: 248603 - RNA, 19 nt, Artificial Sequence
  Description of Artificial Sequence: Synthetic oligonucleotide
  Antisense strand to SEQ ID NO: 248602
uucucuggaggauacaaag

SEQ ID NO: 248604 - RNA, 19 nt, Artificial Sequence
  Description of Artificial Sequence: Synthetic oligonucleotide
  Sense strand starting at position 2756 SEQ ID NO: 3199
ucaaauguugacugaucaa

SEQ ID NO: 248605 - RNA, 19 nt, Artificial Sequence
  Description of Artificial Sequence: Synthetic oligonucleotide
  Antisense strand to SEQ ID NO: 248604
uugaucagucaacauuuga

SEQ ID NO: 248606 - RNA, 19 nt, Artificial Sequence
  Description of Artificial Sequence: Synthetic oligonucleotide
  Sense strand starting at position 2766 SEQ ID NO: 3199
acugaucaauaauugguua

SEQ ID NO: 248607 - RNA, 19 nt, Artificial Sequence
  Description of Artificial Sequence: Synthetic oligonucleotide
  Antisense strand to SEQ ID NO: 248606
uaaccaauuauugaucagu

SEQ ID NO: 248608 - RNA, 19 nt, Artificial Sequence
  Description of Artificial Sequence: Synthetic oligonucleotide
  Sense strand starting at position 2786 SEQ ID NO: 3199
uugguugacugacugacaa

SEQ ID NO: 248609 - RNA, 19 nt, Artificial Sequence
  Description of Artificial Sequence: Synthetic oligonucleotide
  Antisense strand to SEQ ID NO: 248608
uugucagucagucaaccaa

SEQ ID NO: 248610 - RNA, 19 nt, Artificial Sequence
  Description of Artificial Sequence: Synthetic oligonucleotide
  Sense strand starting at position 2854 SEQ ID NO: 3199
ugauaaaucucacccggga

SEQ ID NO: 248611 - RNA, 19 nt, Artificial Sequence
  Description of Artificial Sequence: Synthetic oligonucleotide
  Antisense strand to SEQ ID NO: 248610
ucccgggugagauuuauca

SEQ ID NO: 248612 - RNA, 19 nt, Artificial Sequence
  Description of Artificial Sequence: Synthetic oligonucleotide
  Sense strand starting at position 2969 SEQ ID NO: 3199
agacuucguuucuauuuaa

SEQ ID NO: 248613 - RNA, 19 nt, Artificial Sequence
  Description of Artificial Sequence: Synthetic oligonucleotide
  Antisense strand to SEQ ID NO: 248612
uuaaauagaaacgaagucu

SEQ ID NO: 248614 - RNA, 19 nt, Artificial Sequence
  Description of Artificial Sequence: Synthetic oligonucleotide
  Sense strand starting at position 3058 SEQ ID NO: 3199
ucacgaguucaggaguaca

SEQ ID NO: 248615 - RNA, 19 nt, Artificial Sequence
  Description of Artificial Sequence: Synthetic oligonucleotide
  Antisense strand to SEQ ID NO: 248614
uguacuccugaacucguga

SEQ ID NO: 248616 - RNA, 19 nt, Artificial Sequence
  Description of Artificial Sequence: Synthetic oligonucleotide
  Sense strand starting at position 3182 SEQ ID NO: 3199
gugggagaaucucucaaac

SEQ ID NO: 248617 - RNA, 19 nt, Artificial Sequence
  Description of Artificial Sequence: Synthetic oligonucleotide
  Antisense strand to SEQ ID NO: 248616
guuugagagauucucccac

SEQ ID NO: 248618 - RNA, 19 nt, Artificial Sequence
  Description of Artificial Sequence: Synthetic oligonucleotide
  Sense strand starting at position 3340 SEQ ID NO: 3199
agcuguguuccacaaagau

SEQ ID NO: 248619 - RNA, 19 nt, Artificial Sequence
  Description of Artificial Sequence: Synthetic oligonucleotide
  Antisense strand to SEQ ID NO: 248618
aucuuuguggaacacagcu

SEQ ID NO: 248620 - RNA, 19 nt, Artificial Sequence
  Description of Artificial Sequence: Synthetic oligonucleotide
  Sense strand starting at position 3447 SEQ ID NO: 3199
caaagaguaucccaggaca

SEQ ID NO: 248621 - RNA, 19 nt, Artificial Sequence
  Description of Artificial Sequence: Synthetic oligonucleotide
  Antisense strand to SEQ ID NO: 248620
uguccugggauacucuuug

SEQ ID NO: 248622 - RNA, 19 nt, Artificial Sequence
  Description of Artificial Sequence: Synthetic oligonucleotide
  Sense strand starting at position 3623 SEQ ID NO: 3199
agcuuaaggccauagaaau

SEQ ID NO: 248623 - RNA, 19 nt, Artificial Sequence
  Description of Artificial Sequence: Synthetic oligonucleotide
  Antisense strand to SEQ ID NO: 248622
auuucuauggccuuaagcu

SEQ ID NO: 248624 - RNA, 19 nt, Artificial Sequence
  Description of Artificial Sequence: Synthetic oligonucleotide
  Sense strand starting at position 3717 SEQ ID NO: 3199
ggguucugcuauuucucua

SEQ ID NO: 248625 - RNA, 19 nt, Artificial Sequence
  Description of Artificial Sequence: Synthetic oligonucleotide
  Antisense strand to SEQ ID NO: 248624
uagagaaauagcagaaccc

SEQ ID NO: 248626 - RNA, 19 nt, Artificial Sequence
  Description of Artificial Sequence: Synthetic oligonucleotide
  Sense strand starting at position 3798 SEQ ID NO: 3199
gcacaccacguuuaucauu

SEQ ID NO: 248627 - RNA, 19 nt, Artificial Sequence
  Description of Artificial Sequence: Synthetic oligonucleotide
  Antisense strand to SEQ ID NO: 248626
aaugauaaacguggugugc

SEQ ID NO: 248628 - RNA, 19 nt, Artificial Sequence
  Description of Artificial Sequence: Synthetic oligonucleotide
  Sense strand starting at position 3853 SEQ ID NO: 3199
gguaucuuaucccauuuau

SEQ ID NO: 248629 - RNA, 19 nt, Artificial Sequence
  Description of Artificial Sequence: Synthetic oligonucleotide
  Antisense strand to SEQ ID NO: 248628
auaaaugggauaagauacc

SEQ ID NO: 248630 - RNA, 19 nt, Artificial Sequence
  Description of Artificial Sequence: Synthetic oligonucleotide
  Sense strand starting at position 6 SEQ ID NO: 3200
uugucuugaagguggucaa

SEQ ID NO: 248631 - RNA, 19 nt, Artificial Sequence
  Description of Artificial Sequence: Synthetic oligonucleotide
  Antisense strand to SEQ ID NO: 248630
uugaccaccuucaagacaa

SEQ ID NO: 248632 - RNA, 19 nt, Artificial Sequence
  Description of Artificial Sequence: Synthetic oligonucleotide
  Sense strand starting at position 7 SEQ ID NO: 3200
ugucuugaagguggucaau

SEQ ID NO: 248633 - RNA, 19 nt, Artificial Sequence
  Description of Artificial Sequence: Synthetic oligonucleotide
  Antisense strand to SEQ ID NO: 248632
auugaccaccuucaagaca

SEQ ID NO: 248634 - RNA, 19 nt, Artificial Sequence
  Description of Artificial Sequence: Synthetic oligonucleotide
  Sense strand starting at position 9 SEQ ID NO: 3200
ucuugaagguggucaaugu

SEQ ID NO: 248635 - RNA, 19 nt, Artificial Sequence
  Description of Artificial Sequence: Synthetic oligonucleotide
  Antisense strand to SEQ ID NO: 248634
acauugaccaccuucaaga

SEQ ID NO: 248636 - RNA, 19 nt, Artificial Sequence
  Description of Artificial Sequence: Synthetic oligonucleotide
  Sense strand starting at position 10 SEQ ID NO: 3200
cuugaagguggucaaugua

SEQ ID NO: 248637 - RNA, 19 nt, Artificial Sequence
  Description of Artificial Sequence: Synthetic oligonucleotide
  Antisense strand to SEQ ID NO: 248636
uacauugaccaccuucaag

SEQ ID NO: 248638 - RNA, 19 nt, Artificial Sequence
  Description of Artificial Sequence: Synthetic oligonucleotide
  Sense strand starting at position 118 SEQ ID NO: 3200
aggauacauuucgauuaag

SEQ ID NO: 248639 - RNA, 19 nt, Artificial Sequence
  Description of Artificial Sequence: Synthetic oligonucleotide
  Antisense strand to SEQ ID NO: 248638
cuuaaucgaaauguauccu

SEQ ID NO: 248640 - RNA, 19 nt, Artificial Sequence
  Description of Artificial Sequence: Synthetic oligonucleotide
  Sense strand starting at position 190 SEQ ID NO: 3200
gaggcuagguaccucauua

SEQ ID NO: 248641 - RNA, 19 nt, Artificial Sequence
  Description of Artificial Sequence: Synthetic oligonucleotide
  Antisense strand to SEQ ID NO: 248640
uaaugagguaccuagccuc

SEQ ID NO: 248642 - RNA, 19 nt, Artificial Sequence
  Description of Artificial Sequence: Synthetic oligonucleotide
  Sense strand starting at position 223 SEQ ID NO: 3200
acacuugaacacuguaagu

SEQ ID NO: 248643 - RNA, 19 nt, Artificial Sequence
  Description of Artificial Sequence: Synthetic oligonucleotide
  Antisense strand to SEQ ID NO: 248642
acuuacaguguucaagugu

SEQ ID NO: 248644 - RNA, 19 nt, Artificial Sequence
  Description of Artificial Sequence: Synthetic oligonucleotide
  Sense strand starting at position 245 SEQ ID NO: 3200
caacaaaugcuuugcgaag

SEQ ID NO: 248645 - RNA, 19 nt, Artificial Sequence
  Description of Artificial Sequence: Synthetic oligonucleotide
  Antisense strand to SEQ ID NO: 248644
cuucgcaaagcauuuguug

SEQ ID NO: 248646 - RNA, 19 nt, Artificial Sequence
  Description of Artificial Sequence: Synthetic oligonucleotide
  Sense strand starting at position 246 SEQ ID NO: 3200
aacaaaugcuuugcgaaga

SEQ ID NO: 248647 - RNA, 19 nt, Artificial Sequence
  Description of Artificial Sequence: Synthetic oligonucleotide
  Antisense strand to SEQ ID NO: 248646
ucuucgcaaagcauuuguu

SEQ ID NO: 248648 - RNA, 19 nt, Artificial Sequence
  Description of Artificial Sequence: Synthetic oligonucleotide
  Sense strand starting at position 321 SEQ ID NO: 3200
acagaauguugagucaauu

SEQ ID NO: 248649 - RNA, 19 nt, Artificial Sequence
  Description of Artificial Sequence: Synthetic oligonucleotide
  Antisense strand to SEQ ID NO: 248648
aauugacucaacauucugu

SEQ ID NO: 248650 - RNA, 19 nt, Artificial Sequence
  Description of Artificial Sequence: Synthetic oligonucleotide
  Sense strand starting at position 419 SEQ ID NO: 3200
aauucuaagguccguauuu

SEQ ID NO: 248651 - RNA, 19 nt, Artificial Sequence
  Description of Artificial Sequence: Synthetic oligonucleotide
  Antisense strand to SEQ ID NO: 248650
aaauacggaccuuagaauu

SEQ ID NO: 248652 - RNA, 19 nt, Artificial Sequence
  Description of Artificial Sequence: Synthetic oligonucleotide
  Sense strand starting at position 428 SEQ ID NO: 3200
guccguauuucccaaagaa

SEQ ID NO: 248653 - RNA, 19 nt, Artificial Sequence
  Description of Artificial Sequence: Synthetic oligonucleotide
  Antisense strand to SEQ ID NO: 248652
uucuuugggaaauacggac

SEQ ID NO: 248654 - RNA, 19 nt, Artificial Sequence
  Description of Artificial Sequence: Synthetic oligonucleotide
  Sense strand starting at position 771 SEQ ID NO: 3200
ggcuuagagcugucugcuu

SEQ ID NO: 248655 - RNA, 19 nt, Artificial Sequence
  Description of Artificial Sequence: Synthetic oligonucleotide
  Antisense strand to SEQ ID NO: 248654
aagcagacagcucuaagcc

SEQ ID NO: 248656 - RNA, 19 nt, Artificial Sequence
  Description of Artificial Sequence: Synthetic oligonucleotide
  Sense strand starting at position 776 SEQ ID NO: 3200
agagcugucugcuuauuug

SEQ ID NO: 248657 - RNA, 19 nt, Artificial Sequence
  Description of Artificial Sequence: Synthetic oligonucleotide
  Antisense strand to SEQ ID NO: 248656
caaauaagcagacagcucu

SEQ ID NO: 248658 - RNA, 19 nt, Artificial Sequence
  Description of Artificial Sequence: Synthetic oligonucleotide
  Sense strand starting at position 779 SEQ ID NO: 3200
gcugucugcuuauuugcaa

SEQ ID NO: 248659 - RNA, 19 nt, Artificial Sequence
  Description of Artificial Sequence: Synthetic oligonucleotide
  Antisense strand to SEQ ID NO: 248658
uugcaaauaagcagacagc

SEQ ID NO: 248660 - RNA, 19 nt, Artificial Sequence
  Description of Artificial Sequence: Synthetic oligonucleotide
  Sense strand starting at position 2698 SEQ ID NO: 3200
cgaaccaucuccguuaaag

SEQ ID NO: 248661 - RNA, 19 nt, Artificial Sequence
  Description of Artificial Sequence: Synthetic oligonucleotide
  Antisense strand to SEQ ID NO: 248660
cuuuaacggagaugguucg

SEQ ID NO: 248662 - RNA, 19 nt, Artificial Sequence
  Description of Artificial Sequence: Synthetic oligonucleotide
  Sense strand starting at position 2823 SEQ ID NO: 3200
uccugaaaguggucugcuu

SEQ ID NO: 248663 - RNA, 19 nt, Artificial Sequence
  Description of Artificial Sequence: Synthetic oligonucleotide
  Antisense strand to SEQ ID NO: 248662
aagcagaccacuuucagga

SEQ ID NO: 248664 - RNA, 19 nt, Artificial Sequence
  Description of Artificial Sequence: Synthetic oligonucleotide
  Sense strand starting at position 2949 SEQ ID NO: 3200
uuccgugguuugguggaaa

SEQ ID NO: 248665 - RNA, 19 nt, Artificial Sequence
  Description of Artificial Sequence: Synthetic oligonucleotide
  Antisense strand to SEQ ID NO: 248664
uuuccaccaaaccacggaa

SEQ ID NO: 248666 - RNA, 19 nt, Artificial Sequence
  Description of Artificial Sequence: Synthetic oligonucleotide
  Sense strand starting at position 2952 SEQ ID NO: 3200
cgugguuugguggaaauag

SEQ ID NO: 248667 - RNA, 19 nt, Artificial Sequence
  Description of Artificial Sequence: Synthetic oligonucleotide
  Antisense strand to SEQ ID NO: 248666
cuauuuccaccaaaccacg

SEQ ID NO: 248668 - RNA, 19 nt, Artificial Sequence
  Description of Artificial Sequence: Synthetic oligonucleotide
  Sense strand starting at position 2953 SEQ ID NO: 3200
gugguuugguggaaauaga

SEQ ID NO: 248669 - RNA, 19 nt, Artificial Sequence
  Description of Artificial Sequence: Synthetic oligonucleotide
  Antisense strand to SEQ ID NO: 248668
ucuauuuccaccaaaccac

SEQ ID NO: 248670 - RNA, 19 nt, Artificial Sequence
  Description of Artificial Sequence: Synthetic oligonucleotide
  Sense strand starting at position 2990 SEQ ID NO: 3200
acggaucggccauggaauu

SEQ ID NO: 248671 - RNA, 19 nt, Artificial Sequence
  Description of Artificial Sequence: Synthetic oligonucleotide
  Antisense strand to SEQ ID NO: 248670
aauuccauggccgauccgu

SEQ ID NO: 248672 - RNA, 19 nt, Artificial Sequence
  Description of Artificial Sequence: Synthetic oligonucleotide
  Sense strand starting at position 3015 SEQ ID NO: 3200
cugagauccucuguguaac

SEQ ID NO: 248673 - RNA, 19 nt, Artificial Sequence
  Description of Artificial Sequence: Synthetic oligonucleotide
  Antisense strand to SEQ ID NO: 248672
guuacacagaggaucucag

SEQ ID NO: 248674 - RNA, 19 nt, Artificial Sequence
  Description of Artificial Sequence: Synthetic oligonucleotide
  Sense strand starting at position 3187 SEQ ID NO: 3200
cuuugagguuacucuuaua

SEQ ID NO: 248675 - RNA, 19 nt, Artificial Sequence
  Description of Artificial Sequence: Synthetic oligonucleotide
  Antisense strand to SEQ ID NO: 248674
uauaagaguaaccucaaag

SEQ ID NO: 248676 - RNA, 19 nt, Artificial Sequence
  Description of Artificial Sequence: Synthetic oligonucleotide
  Sense strand starting at position 3220 SEQ ID NO: 3200
cuggcugugugaucucuaa

SEQ ID NO: 248677 - RNA, 19 nt, Artificial Sequence
  Description of Artificial Sequence: Synthetic oligonucleotide
  Antisense strand to SEQ ID NO: 248676
uuagagaucacacagccag

SEQ ID NO: 248678 - RNA, 19 nt, Artificial Sequence
  Description of Artificial Sequence: Synthetic oligonucleotide
  Sense strand starting at position 3224 SEQ ID NO: 3200
cugugugaucucuaaaccu

SEQ ID NO: 248679 - RNA, 19 nt, Artificial Sequence
  Description of Artificial Sequence: Synthetic oligonucleotide
  Antisense strand to SEQ ID NO: 248678
agguuuagagaucacacag

SEQ ID NO: 248680 - RNA, 19 nt, Artificial Sequence
  Description of Artificial Sequence: Synthetic oligonucleotide
  Sense strand starting at position 3277 SEQ ID NO: 3200
cguaacaacagagguuuaa

SEQ ID NO: 248681 - RNA, 19 nt, Artificial Sequence
  Description of Artificial Sequence: Synthetic oligonucleotide
  Antisense strand to SEQ ID NO: 248680
uuaaaccucuguuguuacg

SEQ ID NO: 248682 - RNA, 19 nt, Artificial Sequence
  Description of Artificial Sequence: Synthetic oligonucleotide
  Sense strand starting at position 3431 SEQ ID NO: 3200
ucuugaaguccaggaagua

SEQ ID NO: 248683 - RNA, 19 nt, Artificial Sequence
  Description of Artificial Sequence: Synthetic oligonucleotide
  Antisense strand to SEQ ID NO: 248682
uacuuccuggacuucaaga

SEQ ID NO: 248684 - RNA, 19 nt, Artificial Sequence
  Description of Artificial Sequence: Synthetic oligonucleotide
  Sense strand starting at position 3478 SEQ ID NO: 3200
gacuguauuugguaguaac

SEQ ID NO: 248685 - RNA, 19 nt, Artificial Sequence
  Description of Artificial Sequence: Synthetic oligonucleotide
  Antisense strand to SEQ ID NO: 248684
guuacuaccaaauacaguc

SEQ ID NO: 248686 - RNA, 19 nt, Artificial Sequence
  Description of Artificial Sequence: Synthetic oligonucleotide
  Sense strand starting at position 3485 SEQ ID NO: 3200
uuugguaguaacuagugau

SEQ ID NO: 248687 - RNA, 19 nt, Artificial Sequence
  Description of Artificial Sequence: Synthetic oligonucleotide
  Antisense strand to SEQ ID NO: 248686
aucacuaguuacuaccaaa

SEQ ID NO: 248688 - RNA, 19 nt, Artificial Sequence
  Description of Artificial Sequence: Synthetic oligonucleotide
  Sense strand starting at position 3525 SEQ ID NO: 3200
aggacuuugucaccagaga

SEQ ID NO: 248689 - RNA, 19 nt, Artificial Sequence
  Description of Artificial Sequence: Synthetic oligonucleotide
  Antisense strand to SEQ ID NO: 248688
ucucuggugacaaaguccu

SEQ ID NO: 248690 - RNA, 19 nt, Artificial Sequence
  Description of Artificial Sequence: Synthetic oligonucleotide
  Sense strand starting at position 3584 SEQ ID NO: 3200
ccauuucucuuguagaaag

SEQ ID NO: 248691 - RNA, 19 nt, Artificial Sequence
  Description of Artificial Sequence: Synthetic oligonucleotide
  Antisense strand to SEQ ID NO: 248690
cuuucuacaagagaaaugg

SEQ ID NO: 248692 - RNA, 19 nt, Artificial Sequence
  Description of Artificial Sequence: Synthetic oligonucleotide
  Sense strand starting at position 3641 SEQ ID NO: 3200
aaagaaggguauuaaguaa

SEQ ID NO: 248693 - RNA, 19 nt, Artificial Sequence
  Description of Artificial Sequence: Synthetic oligonucleotide
  Antisense strand to SEQ ID NO: 248692
uuacuuaauacccuucuuu

SEQ ID NO: 248694 - RNA, 19 nt, Artificial Sequence
  Description of Artificial Sequence: Synthetic oligonucleotide
  Sense strand starting at position 3702 SEQ ID NO: 3200
auaugugauccuggguauc

SEQ ID NO: 248695 - RNA, 19 nt, Artificial Sequence
  Description of Artificial Sequence: Synthetic oligonucleotide
  Antisense strand to SEQ ID NO: 248694
gauacccaggaucacauau

SEQ ID NO: 248696 - RNA, 19 nt, Artificial Sequence
  Description of Artificial Sequence: Synthetic oligonucleotide
  Sense strand starting at position 3704 SEQ ID NO: 3200
augugauccuggguaucag

SEQ ID NO: 248697 - RNA, 19 nt, Artificial Sequence
  Description of Artificial Sequence: Synthetic oligonucleotide
  Antisense strand to SEQ ID NO: 248696
cugauacccaggaucacau

SEQ ID NO: 248698 - RNA, 19 nt, Artificial Sequence
  Description of Artificial Sequence: Synthetic oligonucleotide
  Sense strand starting at position 3776 SEQ ID NO: 3200
ucuccugauggguaaguga

SEQ ID NO: 248699 - RNA, 19 nt, Artificial Sequence
  Description of Artificial Sequence: Synthetic oligonucleotide
  Antisense strand to SEQ ID NO: 248698
ucacuuacccaucaggaga

SEQ ID NO: 248700 - RNA, 19 nt, Artificial Sequence
  Description of Artificial Sequence: Synthetic oligonucleotide
  Sense strand starting at position 3787 SEQ ID NO: 3200
guaagugaugucuauaaau

SEQ ID NO: 248701 - RNA, 19 nt, Artificial Sequence
  Description of Artificial Sequence: Synthetic oligonucleotide
  Antisense strand to SEQ ID NO: 248700
auuuauagacaucacuuac

SEQ ID NO: 248702 - RNA, 19 nt, Artificial Sequence
  Description of Artificial Sequence: Synthetic oligonucleotide
  Sense strand starting at position 3817 SEQ ID NO: 3200
agauuaaggcauuaucagu

SEQ ID NO: 248703 - RNA, 19 nt, Artificial Sequence
  Description of Artificial Sequence: Synthetic oligonucleotide
  Antisense strand to SEQ ID NO: 248702
acugauaaugccuuaaucu

SEQ ID NO: 248704 - RNA, 19 nt, Artificial Sequence
  Description of Artificial Sequence: Synthetic oligonucleotide
  Sense strand starting at position 3825 SEQ ID NO: 3200
gcauuaucagugcuguagu

SEQ ID NO: 248705 - RNA, 19 nt, Artificial Sequence
  Description of Artificial Sequence: Synthetic oligonucleotide
  Antisense strand to SEQ ID NO: 248704
acuacagcacugauaaugc

SEQ ID NO: 248706 - RNA, 19 nt, Artificial Sequence
  Description of Artificial Sequence: Synthetic oligonucleotide
  Sense strand starting at position 3833 SEQ ID NO: 3200
agugcuguagucugauaaa

SEQ ID NO: 248707 - RNA, 19 nt, Artificial Sequence
  Description of Artificial Sequence: Synthetic oligonucleotide
  Antisense strand to SEQ ID NO: 248706
uuuaucagacuacagcacu

SEQ ID NO: 248708 - RNA, 19 nt, Artificial Sequence
  Description of Artificial Sequence: Synthetic oligonucleotide
  Sense strand starting at position 3943 SEQ ID NO: 3200
aggguuagcuaacuaaaca

SEQ ID NO: 248709 - RNA, 19 nt, Artificial Sequence
  Description of Artificial Sequence: Synthetic oligonucleotide
  Antisense strand to SEQ ID NO: 248708
uguuuaguuagcuaacccu

SEQ ID NO: 248710 - RNA, 19 nt, Artificial Sequence
  Description of Artificial Sequence: Synthetic oligonucleotide
  Sense strand starting at position 1266 SEQ ID NO: 3201
ugacaagagugagcuauga

SEQ ID NO: 248711 - RNA, 19 nt, Artificial Sequence
  Description of Artificial Sequence: Synthetic oligonucleotide
  Antisense strand to SEQ ID NO: 248710
ucauagcucacucuuguca

SEQ ID NO: 248712 - RNA, 19 nt, Artificial Sequence
  Description of Artificial Sequence: Synthetic oligonucleotide
  Sense strand starting at position 1312 SEQ ID NO: 3201
cgggaagguucacugggaa

SEQ ID NO: 248713 - RNA, 19 nt, Artificial Sequence
  Description of Artificial Sequence: Synthetic oligonucleotide
  Antisense strand to SEQ ID NO: 248712
uucccagugaaccuucccg

SEQ ID NO: 248714 - RNA, 19 nt, Artificial Sequence
  Description of Artificial Sequence: Synthetic oligonucleotide
  Sense strand starting at position 1363 SEQ ID NO: 3201
guacacauuuguccuguuu

SEQ ID NO: 248715 - RNA, 19 nt, Artificial Sequence
  Description of Artificial Sequence: Synthetic oligonucleotide
  Antisense strand to SEQ ID NO: 248714
aaacaggacaaauguguac

SEQ ID NO: 248716 - RNA, 19 nt, Artificial Sequence
  Description of Artificial Sequence: Synthetic oligonucleotide
  Sense strand starting at position 1381 SEQ ID NO: 3201
uguagugagcaguauuacu

SEQ ID NO: 248717 - RNA, 19 nt, Artificial Sequence
  Description of Artificial Sequence: Synthetic oligonucleotide
  Antisense strand to SEQ ID NO: 248716
aguaauacugcucacuaca

SEQ ID NO: 248718 - RNA, 19 nt, Artificial Sequence
  Description of Artificial Sequence: Synthetic oligonucleotide
  Sense strand starting at position 1386 SEQ ID NO: 3201
ugagcaguauuacuuugau

SEQ ID NO: 248719 - RNA, 19 nt, Artificial Sequence
  Description of Artificial Sequence: Synthetic oligonucleotide
  Antisense strand to SEQ ID NO: 248718
aucaaaguaauacugcuca

SEQ ID NO: 248720 - RNA, 19 nt, Artificial Sequence
  Description of Artificial Sequence: Synthetic oligonucleotide
  Sense strand starting at position 1389 SEQ ID NO: 3201
gcaguauuacuuugauuaa

SEQ ID NO: 248721 - RNA, 19 nt, Artificial Sequence
  Description of Artificial Sequence: Synthetic oligonucleotide
  Antisense strand to SEQ ID NO: 248720
uuaaucaaaguaauacugc

SEQ ID NO: 248722 - RNA, 19 nt, Artificial Sequence
  Description of Artificial Sequence: Synthetic oligonucleotide
  Sense strand starting at position 1492 SEQ ID NO: 3201
uuuacauuguguuuccaaa

SEQ ID NO: 248723 - RNA, 19 nt, Artificial Sequence
  Description of Artificial Sequence: Synthetic oligonucleotide
  Antisense strand to SEQ ID NO: 248722
uuuggaaacacaauguaaa

SEQ ID NO: 248724 - RNA, 19 nt, Artificial Sequence
  Description of Artificial Sequence: Synthetic oligonucleotide
  Sense strand starting at position 2073 SEQ ID NO: 3201
ccauuauugggcuacaggu

SEQ ID NO: 248725 - RNA, 19 nt, Artificial Sequence
  Description of Artificial Sequence: Synthetic oligonucleotide
  Antisense strand to SEQ ID NO: 248724
accuguagcccaauaaugg

SEQ ID NO: 248726 - RNA, 19 nt, Artificial Sequence
  Description of Artificial Sequence: Synthetic oligonucleotide
  Sense strand starting at position 2102 SEQ ID NO: 3201
agcugaaucccauaaucug

SEQ ID NO: 248727 - RNA, 19 nt, Artificial Sequence
  Description of Artificial Sequence: Synthetic oligonucleotide
  Antisense strand to SEQ ID NO: 248726
cagauuaugggauucagcu

SEQ ID NO: 248728 - RNA, 19 nt, Artificial Sequence
  Description of Artificial Sequence: Synthetic oligonucleotide
  Sense strand starting at position 2136 SEQ ID NO: 3201
gaagcaagugcgggauuua

SEQ ID NO: 248729 - RNA, 19 nt, Artificial Sequence
  Description of Artificial Sequence: Synthetic oligonucleotide
  Antisense strand to SEQ ID NO: 248728
uaaaucccgcacuugcuuc

SEQ ID NO: 248730 - RNA, 19 nt, Artificial Sequence
  Description of Artificial Sequence: Synthetic oligonucleotide
  Sense strand starting at position 2282 SEQ ID NO: 3201
gucuucugcagguaggauu

SEQ ID NO: 248731 - RNA, 19 nt, Artificial Sequence
  Description of Artificial Sequence: Synthetic oligonucleotide
  Antisense strand to SEQ ID NO: 248730
aauccuaccugcagaagac

SEQ ID NO: 248732 - RNA, 19 nt, Artificial Sequence
  Description of Artificial Sequence: Synthetic oligonucleotide
  Sense strand starting at position 2416 SEQ ID NO: 3201
gucacaaaccuauguuuau

SEQ ID NO: 248733 - RNA, 19 nt, Artificial Sequence
  Description of Artificial Sequence: Synthetic oligonucleotide
  Antisense strand to SEQ ID NO: 248732
auaaacauagguuugugac

SEQ ID NO: 248734 - RNA, 19 nt, Artificial Sequence
  Description of Artificial Sequence: Synthetic oligonucleotide
  Sense strand starting at position 2487 SEQ ID NO: 3201
ggaaacauguugucguaaa

SEQ ID NO: 248735 - RNA, 19 nt, Artificial Sequence
  Description of Artificial Sequence: Synthetic oligonucleotide
  Antisense strand to SEQ ID NO: 248734
uuuacgacaacauguuucc

SEQ ID NO: 248736 - RNA, 19 nt, Artificial Sequence
  Description of Artificial Sequence: Synthetic oligonucleotide
  Sense strand starting at position 2669 SEQ ID NO: 3201
gguagacccuguguuuaaa

SEQ ID NO: 248737 - RNA, 19 nt, Artificial Sequence
  Description of Artificial Sequence: Synthetic oligonucleotide
  Antisense strand to SEQ ID NO: 248736
uuuaaacacagggucuacc

SEQ ID NO: 248738 - RNA, 19 nt, Artificial Sequence
  Description of Artificial Sequence: Synthetic oligonucleotide
  Sense strand starting at position 2711 SEQ ID NO: 3201
agaggaauugcaggcuuua

SEQ ID NO: 248739 - RNA, 19 nt, Artificial Sequence
  Description of Artificial Sequence: Synthetic oligonucleotide
  Antisense strand to SEQ ID NO: 248738
uaaagccugcaauuccucu

SEQ ID NO: 248740 - RNA, 19 nt, Artificial Sequence
  Description of Artificial Sequence: Synthetic oligonucleotide
  Sense strand starting at position 2784 SEQ ID NO: 3201
gaaggaaacugggagagau

SEQ ID NO: 248741 - RNA, 19 nt, Artificial Sequence
  Description of Artificial Sequence: Synthetic oligonucleotide
  Antisense strand to SEQ ID NO: 248740
aucucucccaguuuccuuc

SEQ ID NO: 248742 - RNA, 19 nt, Artificial Sequence
  Description of Artificial Sequence: Synthetic oligonucleotide
  Sense strand starting at position 2919 SEQ ID NO: 3201
accugaccugcuugaacau

SEQ ID NO: 248743 - RNA, 19 nt, Artificial Sequence
  Description of Artificial Sequence: Synthetic oligonucleotide
  Antisense strand to SEQ ID NO: 248742
auguucaagcaggucaggu

SEQ ID NO: 248744 - RNA, 19 nt, Artificial Sequence
  Description of Artificial Sequence: Synthetic oligonucleotide
  Sense strand starting at position 2920 SEQ ID NO: 3201
ccugaccugcuugaacaua

SEQ ID NO: 248745 - RNA, 19 nt, Artificial Sequence
  Description of Artificial Sequence: Synthetic oligonucleotide
  Antisense strand to SEQ ID NO: 248744
uauguucaagcaggucagg

SEQ ID NO: 248746 - RNA, 19 nt, Artificial Sequence
  Description of Artificial Sequence: Synthetic oligonucleotide
  Sense strand starting at position 2941 SEQ ID NO: 3201
uagcuuaggcacuggaauu

SEQ ID NO: 248747 - RNA, 19 nt, Artificial Sequence
  Description of Artificial Sequence: Synthetic oligonucleotide
  Antisense strand to SEQ ID NO: 248746
aauuccagugccuaagcua

SEQ ID NO: 248748 - RNA, 19 nt, Artificial Sequence
  Description of Artificial Sequence: Synthetic oligonucleotide
  Sense strand starting at position 2992 SEQ ID NO: 3201
gcaccugauccugauucua

SEQ ID NO: 248749 - RNA, 19 nt, Artificial Sequence
  Description of Artificial Sequence: Synthetic oligonucleotide
  Antisense strand to SEQ ID NO: 248748
uagaaucaggaucaggugc

SEQ ID NO: 248750 - RNA, 19 nt, Artificial Sequence
  Description of Artificial Sequence: Synthetic oligonucleotide
  Sense strand starting at position 3163 SEQ ID NO: 3201
cugugcucacaccaguaaa

SEQ ID NO: 248751 - RNA, 19 nt, Artificial Sequence
  Description of Artificial Sequence: Synthetic oligonucleotide
  Antisense strand to SEQ ID NO: 248750
uuuacuggugugagcacag

SEQ ID NO: 248752 - RNA, 19 nt, Artificial Sequence
  Description of Artificial Sequence: Synthetic oligonucleotide
  Sense strand starting at position 3166 SEQ ID NO: 3201
ugcucacaccaguaaagau

SEQ ID NO: 248753 - RNA, 19 nt, Artificial Sequence
  Description of Artificial Sequence: Synthetic oligonucleotide
  Antisense strand to SEQ ID NO: 248752
aucuuuacuggugugagca

SEQ ID NO: 248754 - RNA, 19 nt, Artificial Sequence
  Description of Artificial Sequence: Synthetic oligonucleotide
  Sense strand starting at position 3187 SEQ ID NO: 3201
ccucaccauuguguuaaua

SEQ ID NO: 248755 - RNA, 19 nt, Artificial Sequence
  Description of Artificial Sequence: Synthetic oligonucleotide
  Antisense strand to SEQ ID NO: 248754
uauuaacacaauggugagg

SEQ ID NO: 248756 - RNA, 19 nt, Artificial Sequence
  Description of Artificial Sequence: Synthetic oligonucleotide
  Sense strand starting at position 3223 SEQ ID NO: 3201
cuaccucagccaugguaga

SEQ ID NO: 248757 - RNA, 19 nt, Artificial Sequence
  Description of Artificial Sequence: Synthetic oligonucleotide
  Antisense strand to SEQ ID NO: 248756
ucuaccauggcugagguag

SEQ ID NO: 248758 - RNA, 19 nt, Artificial Sequence
  Description of Artificial Sequence: Synthetic oligonucleotide
  Sense strand starting at position 3252 SEQ ID NO: 3201
ucaacagguguccaucaua

SEQ ID NO: 248759 - RNA, 19 nt, Artificial Sequence
  Description of Artificial Sequence: Synthetic oligonucleotide
  Antisense strand to SEQ ID NO: 248758
uaugauggacaccuguuga

SEQ ID NO: 248760 - RNA, 19 nt, Artificial Sequence
  Description of Artificial Sequence: Synthetic oligonucleotide
  Sense strand starting at position 3255 SEQ ID NO: 3201
acagguguccaucauaaac

SEQ ID NO: 248761 - RNA, 19 nt, Artificial Sequence
  Description of Artificial Sequence: Synthetic oligonucleotide
  Antisense strand to SEQ ID NO: 248760
guuuaugauggacaccugu

SEQ ID NO: 248762 - RNA, 19 nt, Artificial Sequence
  Description of Artificial Sequence: Synthetic oligonucleotide
  Sense strand starting at position 3307 SEQ ID NO: 3201
cuggaaugucugggacacu

SEQ ID NO: 248763 - RNA, 19 nt, Artificial Sequence
  Description of Artificial Sequence: Synthetic oligonucleotide
  Antisense strand to SEQ ID NO: 248762
agugucccagacauuccag

SEQ ID NO: 248764 - RNA, 19 nt, Artificial Sequence
  Description of Artificial Sequence: Synthetic oligonucleotide
  Sense strand starting at position 3360 SEQ ID NO: 3201
gauuguugacccugguauu

SEQ ID NO: 248765 - RNA, 19 nt, Artificial Sequence
  Description of Artificial Sequence: Synthetic oligonucleotide
  Antisense strand to SEQ ID NO: 248764
aauaccagggucaacaauc

SEQ ID NO: 248766 - RNA, 19 nt, Artificial Sequence
  Description of Artificial Sequence: Synthetic oligonucleotide
  Sense strand starting at position 3397 SEQ ID NO: 3201
gacauacgagauuggucau

SEQ ID NO: 248767 - RNA, 19 nt, Artificial Sequence
  Description of Artificial Sequence: Synthetic oligonucleotide
  Antisense strand to SEQ ID NO: 248766
augaccaaucucguauguc

SEQ ID NO: 248768 - RNA, 19 nt, Artificial Sequence
  Description of Artificial Sequence: Synthetic oligonucleotide
  Sense strand starting at position 3400 SEQ ID NO: 3201
auacgagauuggucaucau

SEQ ID NO: 248769 - RNA, 19 nt, Artificial Sequence
  Description of Artificial Sequence: Synthetic oligonucleotide
  Antisense strand to SEQ ID NO: 248768
augaugaccaaucucguau

SEQ ID NO: 248770 - RNA, 19 nt, Artificial Sequence
  Description of Artificial Sequence: Synthetic oligonucleotide
  Sense strand starting at position 3403 SEQ ID NO: 3201
cgagauuggucaucaucca

SEQ ID NO: 248771 - RNA, 19 nt, Artificial Sequence
  Description of Artificial Sequence: Synthetic oligonucleotide
  Antisense strand to SEQ ID NO: 248770
uggaugaugaccaaucucg

SEQ ID NO: 248772 - RNA, 19 nt, Artificial Sequence
  Description of Artificial Sequence: Synthetic oligonucleotide
  Sense strand starting at position 3410 SEQ ID NO: 3201
ggucaucauccagggauug

SEQ ID NO: 248773 - RNA, 19 nt, Artificial Sequence
  Description of Artificial Sequence: Synthetic oligonucleotide
  Antisense strand to SEQ ID NO: 248772
caaucccuggaugaugacc

SEQ ID NO: 248774 - RNA, 19 nt, Artificial Sequence
  Description of Artificial Sequence: Synthetic oligonucleotide
  Sense strand starting at position 3411 SEQ ID NO: 3201
gucaucauccagggauugu

SEQ ID NO: 248775 - RNA, 19 nt, Artificial Sequence
  Description of Artificial Sequence: Synthetic oligonucleotide
  Antisense strand to SEQ ID NO: 248774
acaaucccuggaugaugac

SEQ ID NO: 248776 - RNA, 19 nt, Artificial Sequence
  Description of Artificial Sequence: Synthetic oligonucleotide
  Sense strand starting at position 3447 SEQ ID NO: 3201
aagcuuugaguaggcagaa

SEQ ID NO: 248777 - RNA, 19 nt, Artificial Sequence
  Description of Artificial Sequence: Synthetic oligonucleotide
  Antisense strand to SEQ ID NO: 248776
uucugccuacucaaagcuu

SEQ ID NO: 248778 - RNA, 19 nt, Artificial Sequence
  Description of Artificial Sequence: Synthetic oligonucleotide
  Sense strand starting at position 3448 SEQ ID NO: 3201
agcuuugaguaggcagaaa

SEQ ID NO: 248779 - RNA, 19 nt, Artificial Sequence
  Description of Artificial Sequence: Synthetic oligonucleotide
  Antisense strand to SEQ ID NO: 248778
uuucugccuacucaaagcu

SEQ ID NO: 248780 - RNA, 19 nt, Artificial Sequence
  Description of Artificial Sequence: Synthetic oligonucleotide
  Sense strand starting at position 3631 SEQ ID NO: 3201
gagaaugaauuccaaagga

SEQ ID NO: 248781 - RNA, 19 nt, Artificial Sequence
  Description of Artificial Sequence: Synthetic oligonucleotide
  Antisense strand to SEQ ID NO: 248780
uccuuuggaauucauucuc

SEQ ID NO: 248782 - RNA, 19 nt, Artificial Sequence
  Description of Artificial Sequence: Synthetic oligonucleotide
  Sense strand starting at position 3679 SEQ ID NO: 3201
ggacuaauugcaggaguca

SEQ ID NO: 248783 - RNA, 19 nt, Artificial Sequence
  Description of Artificial Sequence: Synthetic oligonucleotide
  Antisense strand to SEQ ID NO: 248782
ugacuccugcaauuagucc

SEQ ID NO: 248784 - RNA, 19 nt, Artificial Sequence
  Description of Artificial Sequence: Synthetic oligonucleotide
  Sense strand starting at position 3762 SEQ ID NO: 3201
acauacuuccugcauggau

SEQ ID NO: 248785 - RNA, 19 nt, Artificial Sequence
  Description of Artificial Sequence: Synthetic oligonucleotide
  Antisense strand to SEQ ID NO: 248784
auccaugcaggaaguaugu

SEQ ID NO: 248786 - RNA, 19 nt, Artificial Sequence
  Description of Artificial Sequence: Synthetic oligonucleotide
  Sense strand starting at position 3764 SEQ ID NO: 3201
auacuuccugcauggauau

SEQ ID NO: 248787 - RNA, 19 nt, Artificial Sequence
  Description of Artificial Sequence: Synthetic oligonucleotide
  Antisense strand to SEQ ID NO: 248786
auauccaugcaggaaguau

SEQ ID NO: 248788 - RNA, 19 nt, Artificial Sequence
  Description of Artificial Sequence: Synthetic oligonucleotide
  Sense strand starting at position 3777 SEQ ID NO: 3201
ggauauuucuacuagaguu

SEQ ID NO: 248789 - RNA, 19 nt, Artificial Sequence
  Description of Artificial Sequence: Synthetic oligonucleotide
  Antisense strand to SEQ ID NO: 248788
aacucuaguagaaauaucc

SEQ ID NO: 248790 - RNA, 19 nt, Artificial Sequence
  Description of Artificial Sequence: Synthetic oligonucleotide
  Sense strand starting at position 2041 SEQ ID NO: 3202
acccucuucuggugaaauu

SEQ ID NO: 248791 - RNA, 19 nt, Artificial Sequence
  Description of Artificial Sequence: Synthetic oligonucleotide
  Antisense strand to SEQ ID NO: 248790
aauuucaccagaagagggu

SEQ ID NO: 248792 - RNA, 19 nt, Artificial Sequence
  Description of Artificial Sequence: Synthetic oligonucleotide
  Sense strand starting at position 2042 SEQ ID NO: 3202
cccucuucuggugaaauuc

SEQ ID NO: 248793 - RNA, 19 nt, Artificial Sequence
  Description of Artificial Sequence: Synthetic oligonucleotide
  Antisense strand to SEQ ID NO: 248792
gaauuucaccagaagaggg

SEQ ID NO: 248794 - RNA, 19 nt, Artificial Sequence
  Description of Artificial Sequence: Synthetic oligonucleotide
  Sense strand starting at position 2051 SEQ ID NO: 3202
ggugaaauucugcaaggca

SEQ ID NO: 248795 - RNA, 19 nt, Artificial Sequence
  Description of Artificial Sequence: Synthetic oligonucleotide
  Antisense strand to SEQ ID NO: 248794
ugccuugcagaauuucacc

SEQ ID NO: 248796 - RNA, 19 nt, Artificial Sequence
  Description of Artificial Sequence: Synthetic oligonucleotide
  Sense strand starting at position 2091 SEQ ID NO: 3202
ggauuaacccuugggcaga

SEQ ID NO: 248797 - RNA, 19 nt, Artificial Sequence
  Description of Artificial Sequence: Synthetic oligonucleotide
  Antisense strand to SEQ ID NO: 248796
ucugcccaaggguuaaucc

SEQ ID NO: 248798 - RNA, 19 nt, Artificial Sequence
  Description of Artificial Sequence: Synthetic oligonucleotide
  Sense strand starting at position 2218 SEQ ID NO: 3202
ucucacugcuguuuggaga

SEQ ID NO: 248799 - RNA, 19 nt, Artificial Sequence
  Description of Artificial Sequence: Synthetic oligonucleotide
  Antisense strand to SEQ ID NO: 248798
ucuccaaacagcagugaga

SEQ ID NO: 248800 - RNA, 19 nt, Artificial Sequence
  Description of Artificial Sequence: Synthetic oligonucleotide
  Sense strand starting at position 2225 SEQ ID NO: 3202
gcuguuuggagaggauuag

SEQ ID NO: 248801 - RNA, 19 nt, Artificial Sequence
  Description of Artificial Sequence: Synthetic oligonucleotide
  Antisense strand to SEQ ID NO: 248800
cuaauccucuccaaacagc

SEQ ID NO: 248802 - RNA, 19 nt, Artificial Sequence
  Description of Artificial Sequence: Synthetic oligonucleotide
  Sense strand starting at position 2226 SEQ ID NO: 3202
cuguuuggagaggauuagu

SEQ ID NO: 248803 - RNA, 19 nt, Artificial Sequence
  Description of Artificial Sequence: Synthetic oligonucleotide
  Antisense strand to SEQ ID NO: 248802
acuaauccucuccaaacag

SEQ ID NO: 248804 - RNA, 19 nt, Artificial Sequence
  Description of Artificial Sequence: Synthetic oligonucleotide
  Sense strand starting at position 2300 SEQ ID NO: 3202
cuuagaaggugacuccuau

SEQ ID NO: 248805 - RNA, 19 nt, Artificial Sequence
  Description of Artificial Sequence: Synthetic oligonucleotide
  Antisense strand to SEQ ID NO: 248804
auaggagucaccuucuaag

SEQ ID NO: 248806 - RNA, 19 nt, Artificial Sequence
  Description of Artificial Sequence: Synthetic oligonucleotide
  Sense strand starting at position 2304 SEQ ID NO: 3202
gaaggugacuccuaugucu

SEQ ID NO: 248807 - RNA, 19 nt, Artificial Sequence
  Description of Artificial Sequence: Synthetic oligonucleotide
  Antisense strand to SEQ ID NO: 248806
agacauaggagucaccuuc

SEQ ID NO: 248808 - RNA, 19 nt, Artificial Sequence
  Description of Artificial Sequence: Synthetic oligonucleotide
  Sense strand starting at position 2624 SEQ ID NO: 3202
ucaauucugccuugaaguc

SEQ ID NO: 248809 - RNA, 19 nt, Artificial Sequence
  Description of Artificial Sequence: Synthetic oligonucleotide
  Antisense strand to SEQ ID NO: 248808
gacuucaaggcagaauuga

SEQ ID NO: 248810 - RNA, 19 nt, Artificial Sequence
  Description of Artificial Sequence: Synthetic oligonucleotide
  Sense strand starting at position 2916 SEQ ID NO: 3202
caucuauggccucgagauc

SEQ ID NO: 248811 - RNA, 19 nt, Artificial Sequence
  Description of Artificial Sequence: Synthetic oligonucleotide
  Antisense strand to SEQ ID NO: 248810
gaucucgaggccauagaug

SEQ ID NO: 248812 - RNA, 19 nt, Artificial Sequence
  Description of Artificial Sequence: Synthetic oligonucleotide
  Sense strand starting at position 2989 SEQ ID NO: 3202
ggcagugaaacguaccaua

SEQ ID NO: 248813 - RNA, 19 nt, Artificial Sequence
  Description of Artificial Sequence: Synthetic oligonucleotide
  Antisense strand to SEQ ID NO: 248812
uaugguacguuucacugcc

SEQ ID NO: 248814 - RNA, 19 nt, Artificial Sequence
  Description of Artificial Sequence: Synthetic oligonucleotide
  Sense strand starting at position 2992 SEQ ID NO: 3202
agugaaacguaccauaaug

SEQ ID NO: 248815 - RNA, 19 nt, Artificial Sequence
  Description of Artificial Sequence: Synthetic oligonucleotide
  Antisense strand to SEQ ID NO: 248814
cauuaugguacguuucacu

SEQ ID NO: 248816 - RNA, 19 nt, Artificial Sequence
  Description of Artificial Sequence: Synthetic oligonucleotide
  Sense strand starting at position 3002 SEQ ID NO: 3202
accauaauggcggauaugu

SEQ ID NO: 248817 - RNA, 19 nt, Artificial Sequence
  Description of Artificial Sequence: Synthetic oligonucleotide
  Antisense strand to SEQ ID NO: 248816
acauauccgccauuauggu

SEQ ID NO: 248818 - RNA, 19 nt, Artificial Sequence
  Description of Artificial Sequence: Synthetic oligonucleotide
  Sense strand starting at position 3009 SEQ ID NO: 3202
uggcggauaugugucguua

SEQ ID NO: 248819 - RNA, 19 nt, Artificial Sequence
  Description of Artificial Sequence: Synthetic oligonucleotide
  Antisense strand to SEQ ID NO: 248818
uaacgacacauauccgcca

SEQ ID NO: 248820 - RNA, 19 nt, Artificial Sequence
  Description of Artificial Sequence: Synthetic oligonucleotide
  Sense strand starting at position 3010 SEQ ID NO: 3202
ggcggauaugugucguuau

SEQ ID NO: 248821 - RNA, 19 nt, Artificial Sequence
  Description of Artificial Sequence: Synthetic oligonucleotide
  Antisense strand to SEQ ID NO: 248820
auaacgacacauauccgcc

SEQ ID NO: 248822 - RNA, 19 nt, Artificial Sequence
  Description of Artificial Sequence: Synthetic oligonucleotide
  Sense strand starting at position 3013 SEQ ID NO: 3202
ggauaugugucguuaugca

SEQ ID NO: 248823 - RNA, 19 nt, Artificial Sequence
  Description of Artificial Sequence: Synthetic oligonucleotide
  Antisense strand to SEQ ID NO: 248822
ugcauaacgacacauaucc

SEQ ID NO: 248824 - RNA, 19 nt, Artificial Sequence
  Description of Artificial Sequence: Synthetic oligonucleotide
  Sense strand starting at position 3021 SEQ ID NO: 3202
gucguuaugcaauggucaa

SEQ ID NO: 248825 - RNA, 19 nt, Artificial Sequence
  Description of Artificial Sequence: Synthetic oligonucleotide
  Antisense strand to SEQ ID NO: 248824
uugaccauugcauaacgac

SEQ ID NO: 248826 - RNA, 19 nt, Artificial Sequence
  Description of Artificial Sequence: Synthetic oligonucleotide
  Sense strand starting at position 3022 SEQ ID NO: 3202
ucguuaugcaauggucaaa

SEQ ID NO: 248827 - RNA, 19 nt, Artificial Sequence
  Description of Artificial Sequence: Synthetic oligonucleotide
  Antisense strand to SEQ ID NO: 248826
uuugaccauugcauaacga

SEQ ID NO: 248828 - RNA, 19 nt, Artificial Sequence
  Description of Artificial Sequence: Synthetic oligonucleotide
  Sense strand starting at position 3143 SEQ ID NO: 3202
cccugugugagauguugau

SEQ ID NO: 248829 - RNA, 19 nt, Artificial Sequence
  Description of Artificial Sequence: Synthetic oligonucleotide
  Antisense strand to SEQ ID NO: 248828
aucaacaucucacacaggg

SEQ ID NO: 248830 - RNA, 19 nt, Artificial Sequence
  Description of Artificial Sequence: Synthetic oligonucleotide
  Sense strand starting at position 3194 SEQ ID NO: 3202
gugggaauucucuguacuu

SEQ ID NO: 248831 - RNA, 19 nt, Artificial Sequence
  Description of Artificial Sequence: Synthetic oligonucleotide
  Antisense strand to SEQ ID NO: 248830
aaguacagagaauucccac

SEQ ID NO: 248832 - RNA, 19 nt, Artificial Sequence
  Description of Artificial Sequence: Synthetic oligonucleotide
  Sense strand starting at position 3207 SEQ ID NO: 3202
guacuuucuguugaauugu

SEQ ID NO: 248833 - RNA, 19 nt, Artificial Sequence
  Description of Artificial Sequence: Synthetic oligonucleotide
  Antisense strand to SEQ ID NO: 248832
acaauucaacagaaaguac

SEQ ID NO: 248834 - RNA, 19 nt, Artificial Sequence
  Description of Artificial Sequence: Synthetic oligonucleotide
  Sense strand starting at position 3284 SEQ ID NO: 3202
uaaggacauguccguuaau

SEQ ID NO: 248835 - RNA, 19 nt, Artificial Sequence
  Description of Artificial Sequence: Synthetic oligonucleotide
  Antisense strand to SEQ ID NO: 248834
auuaacggacauguccuua

SEQ ID NO: 248836 - RNA, 19 nt, Artificial Sequence
  Description of Artificial Sequence: Synthetic oligonucleotide
  Sense strand starting at position 3285 SEQ ID NO: 3202
aaggacauguccguuaaug

SEQ ID NO: 248837 - RNA, 19 nt, Artificial Sequence
  Description of Artificial Sequence: Synthetic oligonucleotide
  Antisense strand to SEQ ID NO: 248836
cauuaacggacauguccuu

SEQ ID NO: 248838 - RNA, 19 nt, Artificial Sequence
  Description of Artificial Sequence: Synthetic oligonucleotide
  Sense strand starting at position 3287 SEQ ID NO: 3202
ggacauguccguuaaugga

SEQ ID NO: 248839 - RNA, 19 nt, Artificial Sequence
  Description of Artificial Sequence: Synthetic oligonucleotide
  Antisense strand to SEQ ID NO: 248838
uccauuaacggacaugucc

SEQ ID NO: 248840 - RNA, 19 nt, Artificial Sequence
  Description of Artificial Sequence: Synthetic oligonucleotide
  Sense strand starting at position 3297 SEQ ID NO: 3202
guuaauggauuaugaaauc

SEQ ID NO: 248841 - RNA, 19 nt, Artificial Sequence
  Description of Artificial Sequence: Synthetic oligonucleotide
  Antisense strand to SEQ ID NO: 248840
gauuucauaauccauuaac

SEQ ID NO: 248842 - RNA, 19 nt, Artificial Sequence
  Description of Artificial Sequence: Synthetic oligonucleotide
  Sense strand starting at position 3322 SEQ ID NO: 3202
cugggucacugacaguauu

SEQ ID NO: 248843 - RNA, 19 nt, Artificial Sequence
  Description of Artificial Sequence: Synthetic oligonucleotide
  Antisense strand to SEQ ID NO: 248842
aauacugucagugacccag

SEQ ID NO: 248844 - RNA, 19 nt, Artificial Sequence
  Description of Artificial Sequence: Synthetic oligonucleotide
  Sense strand starting at position 3325 SEQ ID NO: 3202
ggucacugacaguauucuu

SEQ ID NO: 248845 - RNA, 19 nt, Artificial Sequence
  Description of Artificial Sequence: Synthetic oligonucleotide
  Antisense strand to SEQ ID NO: 248844
aagaauacugucagugacc

SEQ ID NO: 248846 - RNA, 19 nt, Artificial Sequence
  Description of Artificial Sequence: Synthetic oligonucleotide
  Sense strand starting at position 3345 SEQ ID NO: 3202
uuucuuuaaugaguuagca

SEQ ID NO: 248847 - RNA, 19 nt, Artificial Sequence
  Description of Artificial Sequence: Synthetic oligonucleotide
  Antisense strand to SEQ ID NO: 248846
ugcuaacucauuaaagaaa

SEQ ID NO: 248848 - RNA, 19 nt, Artificial Sequence
  Description of Artificial Sequence: Synthetic oligonucleotide
  Sense strand starting at position 3521 SEQ ID NO: 3202
acuuauucuccaugggcau

SEQ ID NO: 248849 - RNA, 19 nt, Artificial Sequence
  Description of Artificial Sequence: Synthetic oligonucleotide
  Antisense strand to SEQ ID NO: 248848
augcccauggagaauaagu

SEQ ID NO: 248850 - RNA, 19 nt, Artificial Sequence
  Description of Artificial Sequence: Synthetic oligonucleotide
  Sense strand starting at position 3545 SEQ ID NO: 3202
ugcagucucugagugcuuu

SEQ ID NO: 248851 - RNA, 19 nt, Artificial Sequence
  Description of Artificial Sequence: Synthetic oligonucleotide
  Antisense strand to SEQ ID NO: 248850
aaagcacucagagacugca

SEQ ID NO: 248852 - RNA, 19 nt, Artificial Sequence
  Description of Artificial Sequence: Synthetic oligonucleotide
  Sense strand starting at position 3549 SEQ ID NO: 3202
gucucugagugcuuugcau

SEQ ID NO: 248853 - RNA, 19 nt, Artificial Sequence
  Description of Artificial Sequence: Synthetic oligonucleotide
  Antisense strand to SEQ ID NO: 248852
augcaaagcacucagagac

SEQ ID NO: 248854 - RNA, 19 nt, Artificial Sequence
  Description of Artificial Sequence: Synthetic oligonucleotide
  Sense strand starting at position 3600 SEQ ID NO: 3202
gaaacaagaugucagguaa

SEQ ID NO: 248855 - RNA, 19 nt, Artificial Sequence
  Description of Artificial Sequence: Synthetic oligonucleotide
  Antisense strand to SEQ ID NO: 248854
uuaccugacaucuuguuuc

SEQ ID NO: 248856 - RNA, 19 nt, Artificial Sequence
  Description of Artificial Sequence: Synthetic oligonucleotide
  Sense strand starting at position 3615 SEQ ID NO: 3202
guaaccugccgagaucacu

SEQ ID NO: 248857 - RNA, 19 nt, Artificial Sequence
  Description of Artificial Sequence: Synthetic oligonucleotide
  Antisense strand to SEQ ID NO: 248856
agugaucucggcagguuac

SEQ ID NO: 248858 - RNA, 19 nt, Artificial Sequence
  Description of Artificial Sequence: Synthetic oligonucleotide
  Sense strand starting at position 3623 SEQ ID NO: 3202
ccgagaucacucuguggag

SEQ ID NO: 248859 - RNA, 19 nt, Artificial Sequence
  Description of Artificial Sequence: Synthetic oligonucleotide
  Antisense strand to SEQ ID NO: 248858
cuccacagagugaucucgg

SEQ ID NO: 248860 - RNA, 19 nt, Artificial Sequence
  Description of Artificial Sequence: Synthetic oligonucleotide
  Sense strand starting at position 3667 SEQ ID NO: 3202
gguucugaggccuauucuu

SEQ ID NO: 248861 - RNA, 19 nt, Artificial Sequence
  Description of Artificial Sequence: Synthetic oligonucleotide
  Antisense strand to SEQ ID NO: 248860
aagaauaggccucagaacc

SEQ ID NO: 248862 - RNA, 19 nt, Artificial Sequence
  Description of Artificial Sequence: Synthetic oligonucleotide
  Sense strand starting at position 3763 SEQ ID NO: 3202
cuuaucagcuguccgagua

SEQ ID NO: 248863 - RNA, 19 nt, Artificial Sequence
  Description of Artificial Sequence: Synthetic oligonucleotide
  Antisense strand to SEQ ID NO: 248862
uacucggacagcugauaag

SEQ ID NO: 248864 - RNA, 19 nt, Artificial Sequence
  Description of Artificial Sequence: Synthetic oligonucleotide
  Sense strand starting at position 3776 SEQ ID NO: 3202
cgaguaccugcaggguuaa

SEQ ID NO: 248865 - RNA, 19 nt, Artificial Sequence
  Description of Artificial Sequence: Synthetic oligonucleotide
  Antisense strand to SEQ ID NO: 248864
uuaacccugcagguacucg

SEQ ID NO: 248866 - RNA, 19 nt, Artificial Sequence
  Description of Artificial Sequence: Synthetic oligonucleotide
  Sense strand starting at position 3806 SEQ ID NO: 3202
auccuagucugagcuuaau

SEQ ID NO: 248867 - RNA, 19 nt, Artificial Sequence
  Description of Artificial Sequence: Synthetic oligonucleotide
  Antisense strand to SEQ ID NO: 248866
auuaagcucagacuaggau

SEQ ID NO: 248868 - RNA, 19 nt, Artificial Sequence
  Description of Artificial Sequence: Synthetic oligonucleotide
  Sense strand starting at position 3880 SEQ ID NO: 3202
auggcacaugugugcaaau

SEQ ID NO: 248869 - RNA, 19 nt, Artificial Sequence
  Description of Artificial Sequence: Synthetic oligonucleotide
  Antisense strand to SEQ ID NO: 248868
auuugcacacaugugccau

SEQ ID NO: 248870 - RNA, 19 nt, Artificial Sequence
  Description of Artificial Sequence: Synthetic oligonucleotide
  Sense strand starting at position 47 SEQ ID NO: 3203
cuuuguucucaagguaaug

SEQ ID NO: 248871 - RNA, 19 nt, Artificial Sequence
  Description of Artificial Sequence: Synthetic oligonucleotide
  Antisense strand to SEQ ID NO: 248870
cauuaccuugagaacaaag

SEQ ID NO: 248872 - RNA, 19 nt, Artificial Sequence
  Description of Artificial Sequence: Synthetic oligonucleotide
  Sense strand starting at position 108 SEQ ID NO: 3203
ugugaaucuuugcuaccaa

SEQ ID NO: 248873 - RNA, 19 nt, Artificial Sequence
  Description of Artificial Sequence: Synthetic oligonucleotide
  Antisense strand to SEQ ID NO: 248872
uugguagcaaagauucaca

SEQ ID NO: 248874 - RNA, 19 nt, Artificial Sequence
  Description of Artificial Sequence: Synthetic oligonucleotide
  Sense strand starting at position 132 SEQ ID NO: 3203
ggacaagagguuugcuaac

SEQ ID NO: 248875 - RNA, 19 nt, Artificial Sequence
  Description of Artificial Sequence: Synthetic oligonucleotide
  Antisense strand to SEQ ID NO: 248874
guuagcaaaccucuugucc

SEQ ID NO: 248876 - RNA, 19 nt, Artificial Sequence
  Description of Artificial Sequence: Synthetic oligonucleotide
  Sense strand starting at position 138 SEQ ID NO: 3203
gagguuugcuaacuccaua

SEQ ID NO: 248877 - RNA, 19 nt, Artificial Sequence
  Description of Artificial Sequence: Synthetic oligonucleotide
  Antisense strand to SEQ ID NO: 248876
uauggaguuagcaaaccuc

SEQ ID NO: 248878 - RNA, 19 nt, Artificial Sequence
  Description of Artificial Sequence: Synthetic oligonucleotide
  Sense strand starting at position 149 SEQ ID NO: 3203
acuccauacuuuguaggaa

SEQ ID NO: 248879 - RNA, 19 nt, Artificial Sequence
  Description of Artificial Sequence: Synthetic oligonucleotide
  Antisense strand to SEQ ID NO: 248878
uuccuacaaaguauggagu

SEQ ID NO: 248880 - RNA, 19 nt, Artificial Sequence
  Description of Artificial Sequence: Synthetic oligonucleotide
  Sense strand starting at position 192 SEQ ID NO: 3203
auccauuauuuagagucua

SEQ ID NO: 248881 - RNA, 19 nt, Artificial Sequence
  Description of Artificial Sequence: Synthetic oligonucleotide
  Antisense strand to SEQ ID NO: 248880
uagacucuaaauaauggau

SEQ ID NO: 248882 - RNA, 19 nt, Artificial Sequence
  Description of Artificial Sequence: Synthetic oligonucleotide
  Sense strand starting at position 211 SEQ ID NO: 3203
ucgauaaauuaaccugcuu

SEQ ID NO: 248883 - RNA, 19 nt, Artificial Sequence
  Description of Artificial Sequence: Synthetic oligonucleotide
  Antisense strand to SEQ ID NO: 248882
aagcagguuaauuuaucga

SEQ ID NO: 248884 - RNA, 19 nt, Artificial Sequence
  Description of Artificial Sequence: Synthetic oligonucleotide
  Sense strand starting at position 1106 SEQ ID NO: 3203
uagaucaucucguuguaga

SEQ ID NO: 248885 - RNA, 19 nt, Artificial Sequence
  Description of Artificial Sequence: Synthetic oligonucleotide
  Antisense strand to SEQ ID NO: 248884
ucuacaacgagaugaucua

SEQ ID NO: 248886 - RNA, 19 nt, Artificial Sequence
  Description of Artificial Sequence: Synthetic oligonucleotide
  Sense strand starting at position 1107 SEQ ID NO: 3203
agaucaucucguuguagaa

SEQ ID NO: 248887 - RNA, 19 nt, Artificial Sequence
  Description of Artificial Sequence: Synthetic oligonucleotide
  Antisense strand to SEQ ID NO: 248886
uucuacaacgagaugaucu

SEQ ID NO: 248888 - RNA, 19 nt, Artificial Sequence
  Description of Artificial Sequence: Synthetic oligonucleotide
  Sense strand starting at position 2197 SEQ ID NO: 3203
cugggccaucgggaugaau

SEQ ID NO: 248889 - RNA, 19 nt, Artificial Sequence
  Description of Artificial Sequence: Synthetic oligonucleotide
  Antisense strand to SEQ ID NO: 248888
auucaucccgauggcccag

SEQ ID NO: 248890 - RNA, 19 nt, Artificial Sequence
  Description of Artificial Sequence: Synthetic oligonucleotide
  Sense strand starting at position 2199 SEQ ID NO: 3203
gggccaucgggaugaauug

SEQ ID NO: 248891 - RNA, 19 nt, Artificial Sequence
  Description of Artificial Sequence: Synthetic oligonucleotide
  Antisense strand to SEQ ID NO: 248890
caauucaucccgauggccc

SEQ ID NO: 248892 - RNA, 19 nt, Artificial Sequence
  Description of Artificial Sequence: Synthetic oligonucleotide
  Sense strand starting at position 2351 SEQ ID NO: 3203
aaggauuucucagggaagg

SEQ ID NO: 248893 - RNA, 19 nt, Artificial Sequence
  Description of Artificial Sequence: Synthetic oligonucleotide
  Antisense strand to SEQ ID NO: 248892
ccuucccugagaaauccuu

SEQ ID NO: 248894 - RNA, 19 nt, Artificial Sequence
  Description of Artificial Sequence: Synthetic oligonucleotide
  Sense strand starting at position 2901 SEQ ID NO: 3203
gcgagacaggugaguugua

SEQ ID NO: 248895 - RNA, 19 nt, Artificial Sequence
  Description of Artificial Sequence: Synthetic oligonucleotide
  Antisense strand to SEQ ID NO: 248894
uacaacucaccugucucgc

SEQ ID NO: 248896 - RNA, 19 nt, Artificial Sequence
  Description of Artificial Sequence: Synthetic oligonucleotide
  Sense strand starting at position 2902 SEQ ID NO: 3203
cgagacaggugaguuguaa

SEQ ID NO: 248897 - RNA, 19 nt, Artificial Sequence
  Description of Artificial Sequence: Synthetic oligonucleotide
  Antisense strand to SEQ ID NO: 248896
uuacaacucaccugucucg

SEQ ID NO: 248898 - RNA, 19 nt, Artificial Sequence
  Description of Artificial Sequence: Synthetic oligonucleotide
  Sense strand starting at position 2979 SEQ ID NO: 3203
gugagaugcggucaucuga

SEQ ID NO: 248899 - RNA, 19 nt, Artificial Sequence
  Description of Artificial Sequence: Synthetic oligonucleotide
  Antisense strand to SEQ ID NO: 248898
ucagaugaccgcaucucac

SEQ ID NO: 248900 - RNA, 19 nt, Artificial Sequence
  Description of Artificial Sequence: Synthetic oligonucleotide
  Sense strand starting at position 3003 SEQ ID NO: 3203
ggguaaccuggcugguuaa

SEQ ID NO: 248901 - RNA, 19 nt, Artificial Sequence
  Description of Artificial Sequence: Synthetic oligonucleotide
  Antisense strand to SEQ ID NO: 248900
uuaaccagccagguuaccc

SEQ ID NO: 248902 - RNA, 19 nt, Artificial Sequence
  Description of Artificial Sequence: Synthetic oligonucleotide
  Sense strand starting at position 3004 SEQ ID NO: 3203
gguaaccuggcugguuaaa

SEQ ID NO: 248903 - RNA, 19 nt, Artificial Sequence
  Description of Artificial Sequence: Synthetic oligonucleotide
  Antisense strand to SEQ ID NO: 248902
uuuaaccagccagguuacc

SEQ ID NO: 248904 - RNA, 19 nt, Artificial Sequence
  Description of Artificial Sequence: Synthetic oligonucleotide
  Sense strand starting at position 3251 SEQ ID NO: 3203
ucuuaagagcacuaaaugu

SEQ ID NO: 248905 - RNA, 19 nt, Artificial Sequence
  Description of Artificial Sequence: Synthetic oligonucleotide
  Antisense strand to SEQ ID NO: 248904
acauuuagugcucuuaaga

SEQ ID NO: 248906 - RNA, 19 nt, Artificial Sequence
  Description of Artificial Sequence: Synthetic oligonucleotide
  Sense strand starting at position 3292 SEQ ID NO: 3203
guuauuugcuacuuuagua

SEQ ID NO: 248907 - RNA, 19 nt, Artificial Sequence
  Description of Artificial Sequence: Synthetic oligonucleotide
  Antisense strand to SEQ ID NO: 248906
uacuaaaguagcaaauaac

SEQ ID NO: 248908 - RNA, 19 nt, Artificial Sequence
  Description of Artificial Sequence: Synthetic oligonucleotide
  Sense strand starting at position 3351 SEQ ID NO: 3203
uagugucuacuggguagau

SEQ ID NO: 248909 - RNA, 19 nt, Artificial Sequence
  Description of Artificial Sequence: Synthetic oligonucleotide
  Antisense strand to SEQ ID NO: 248908
aucuacccaguagacacua

SEQ ID NO: 248910 - RNA, 19 nt, Artificial Sequence
  Description of Artificial Sequence: Synthetic oligonucleotide
  Sense strand starting at position 3352 SEQ ID NO: 3203
agugucuacuggguagaua

SEQ ID NO: 248911 - RNA, 19 nt, Artificial Sequence
  Description of Artificial Sequence: Synthetic oligonucleotide
  Antisense strand to SEQ ID NO: 248910
uaucuacccaguagacacu

SEQ ID NO: 248912 - RNA, 19 nt, Artificial Sequence
  Description of Artificial Sequence: Synthetic oligonucleotide
  Sense strand starting at position 3373 SEQ ID NO: 3203
gcuacuuugcuguuuagua

SEQ ID NO: 248913 - RNA, 19 nt, Artificial Sequence
  Description of Artificial Sequence: Synthetic oligonucleotide
  Antisense strand to SEQ ID NO: 248912
uacuaaacagcaaaguagc

SEQ ID NO: 248914 - RNA, 19 nt, Artificial Sequence
  Description of Artificial Sequence: Synthetic oligonucleotide
  Sense strand starting at position 3388 SEQ ID NO: 3203
aguaucuacuaaguagaua

SEQ ID NO: 248915 - RNA, 19 nt, Artificial Sequence
  Description of Artificial Sequence: Synthetic oligonucleotide
  Antisense strand to SEQ ID NO: 248914
uaucuacuuaguagauacu

SEQ ID NO: 248916 - RNA, 19 nt, Artificial Sequence
  Description of Artificial Sequence: Synthetic oligonucleotide
  Sense strand starting at position 3423 SEQ ID NO: 3203
ucuguaagaaagugaguuu

SEQ ID NO: 248917 - RNA, 19 nt, Artificial Sequence
  Description of Artificial Sequence: Synthetic oligonucleotide
  Antisense strand to SEQ ID NO: 248916
aaacucacuuucuuacaga

SEQ ID NO: 248918 - RNA, 19 nt, Artificial Sequence
  Description of Artificial Sequence: Synthetic oligonucleotide
  Sense strand starting at position 3515 SEQ ID NO: 3203
cucgaauguggagguuuaa

SEQ ID NO: 248919 - RNA, 19 nt, Artificial Sequence
  Description of Artificial Sequence: Synthetic oligonucleotide
  Antisense strand to SEQ ID NO: 248918
uuaaaccuccacauucgag

SEQ ID NO: 248920 - RNA, 19 nt, Artificial Sequence
  Description of Artificial Sequence: Synthetic oligonucleotide
  Sense strand starting at position 3526 SEQ ID NO: 3203
agguuuaaagucugugaag

SEQ ID NO: 248921 - RNA, 19 nt, Artificial Sequence
  Description of Artificial Sequence: Synthetic oligonucleotide
  Antisense strand to SEQ ID NO: 248920
cuucacagacuuuaaaccu

SEQ ID NO: 248922 - RNA, 19 nt, Artificial Sequence
  Description of Artificial Sequence: Synthetic oligonucleotide
  Sense strand starting at position 3527 SEQ ID NO: 3203
gguuuaaagucugugaaga

SEQ ID NO: 248923 - RNA, 19 nt, Artificial Sequence
  Description of Artificial Sequence: Synthetic oligonucleotide
  Antisense strand to SEQ ID NO: 248922
ucuucacagacuuuaaacc

SEQ ID NO: 248924 - RNA, 19 nt, Artificial Sequence
  Description of Artificial Sequence: Synthetic oligonucleotide
  Sense strand starting at position 3528 SEQ ID NO: 3203
guuuaaagucugugaagaa

SEQ ID NO: 248925 - RNA, 19 nt, Artificial Sequence
  Description of Artificial Sequence: Synthetic oligonucleotide
  Antisense strand to SEQ ID NO: 248924
uucuucacagacuuuaaac

SEQ ID NO: 248926 - RNA, 19 nt, Artificial Sequence
  Description of Artificial Sequence: Synthetic oligonucleotide
  Sense strand starting at position 3554 SEQ ID NO: 3203
gcacuugcccacugaaaca

SEQ ID NO: 248927 - RNA, 19 nt, Artificial Sequence
  Description of Artificial Sequence: Synthetic oligonucleotide
  Antisense strand to SEQ ID NO: 248926
uguuucagugggcaagugc

SEQ ID NO: 248928 - RNA, 19 nt, Artificial Sequence
  Description of Artificial Sequence: Synthetic oligonucleotide
  Sense strand starting at position 3615 SEQ ID NO: 3203
aauggaaucccuggagguu

SEQ ID NO: 248929 - RNA, 19 nt, Artificial Sequence
  Description of Artificial Sequence: Synthetic oligonucleotide
  Antisense strand to SEQ ID NO: 248928
aaccuccagggauuccauu

SEQ ID NO: 248930 - RNA, 19 nt, Artificial Sequence
  Description of Artificial Sequence: Synthetic oligonucleotide
  Sense strand starting at position 3640 SEQ ID NO: 3203
gcagaaauggcuugaugaa

SEQ ID NO: 248931 - RNA, 19 nt, Artificial Sequence
  Description of Artificial Sequence: Synthetic oligonucleotide
  Antisense strand to SEQ ID NO: 248930
uucaucaagccauuucugc

SEQ ID NO: 248932 - RNA, 19 nt, Artificial Sequence
  Description of Artificial Sequence: Synthetic oligonucleotide
  Sense strand starting at position 3683 SEQ ID NO: 3203
ugcacuuugggucauucua

SEQ ID NO: 248933 - RNA, 19 nt, Artificial Sequence
  Description of Artificial Sequence: Synthetic oligonucleotide
  Antisense strand to SEQ ID NO: 248932
uagaaugacccaaagugca

SEQ ID NO: 248934 - RNA, 19 nt, Artificial Sequence
  Description of Artificial Sequence: Synthetic oligonucleotide
  Sense strand starting at position 3760 SEQ ID NO: 3203
gaagaagggucuguucuga

SEQ ID NO: 248935 - RNA, 19 nt, Artificial Sequence
  Description of Artificial Sequence: Synthetic oligonucleotide
  Antisense strand to SEQ ID NO: 248934
ucagaacagacccuucuuc

SEQ ID NO: 248936 - RNA, 19 nt, Artificial Sequence
  Description of Artificial Sequence: Synthetic oligonucleotide
  Sense strand starting at position 3783 SEQ ID NO: 3203
cgcugagaccaagaacuuu

SEQ ID NO: 248937 - RNA, 19 nt, Artificial Sequence
  Description of Artificial Sequence: Synthetic oligonucleotide
  Antisense strand to SEQ ID NO: 248936
aaaguucuuggucucagcg

SEQ ID NO: 248938 - RNA, 19 nt, Artificial Sequence
  Description of Artificial Sequence: Synthetic oligonucleotide
  Sense strand starting at position 3802 SEQ ID NO: 3203
gcaggucuugaagauggau

SEQ ID NO: 248939 - RNA, 19 nt, Artificial Sequence
  Description of Artificial Sequence: Synthetic oligonucleotide
  Antisense strand to SEQ ID NO: 248938
auccaucuucaagaccugc

SEQ ID NO: 248940 - RNA, 19 nt, Artificial Sequence
  Description of Artificial Sequence: Synthetic oligonucleotide
  Sense strand starting at position 3816 SEQ ID NO: 3203
uggauuuguuguaggacgu

SEQ ID NO: 248941 - RNA, 19 nt, Artificial Sequence
  Description of Artificial Sequence: Synthetic oligonucleotide
  Antisense strand to SEQ ID NO: 248940
acguccuacaacaaaucca

SEQ ID NO: 248942 - RNA, 19 nt, Artificial Sequence
  Description of Artificial Sequence: Synthetic oligonucleotide
  Sense strand starting at position 3853 SEQ ID NO: 3203
gcagaugugagccagagau

SEQ ID NO: 248943 - RNA, 19 nt, Artificial Sequence
  Description of Artificial Sequence: Synthetic oligonucleotide
  Antisense strand to SEQ ID NO: 248942
aucucuggcucacaucugc

SEQ ID NO: 248944 - RNA, 19 nt, Artificial Sequence
  Description of Artificial Sequence: Synthetic oligonucleotide
  Sense strand starting at position 3868 SEQ ID NO: 3203
agaugagccuggcuugaua

SEQ ID NO: 248945 - RNA, 19 nt, Artificial Sequence
  Description of Artificial Sequence: Synthetic oligonucleotide
  Antisense strand to SEQ ID NO: 248944
uaucaagccaggcucaucu

SEQ ID NO: 248946 - RNA, 19 nt, Artificial Sequence
  Description of Artificial Sequence: Synthetic oligonucleotide
  Sense strand starting at position 3879 SEQ ID NO: 3203
gcuugauaccaagagccaa

SEQ ID NO: 248947 - RNA, 19 nt, Artificial Sequence
  Description of Artificial Sequence: Synthetic oligonucleotide
  Antisense strand to SEQ ID NO: 248946
uuggcucuugguaucaagc

SEQ ID NO: 248948 - RNA, 19 nt, Artificial Sequence
  Description of Artificial Sequence: Synthetic oligonucleotide
  Sense strand starting at position 3981 SEQ ID NO: 3203
aacauuauuguaggguuua

SEQ ID NO: 248949 - RNA, 19 nt, Artificial Sequence
  Description of Artificial Sequence: Synthetic oligonucleotide
  Antisense strand to SEQ ID NO: 248948
uaaacccuacaauaauguu

SEQ ID NO: 248950 - RNA, 19 nt, Artificial Sequence
  Description of Artificial Sequence: Synthetic oligonucleotide
  Sense strand starting at position 81 SEQ ID NO: 3204
ugaagcaauuuguugcaua

SEQ ID NO: 248951 - RNA, 19 nt, Artificial Sequence
  Description of Artificial Sequence: Synthetic oligonucleotide
  Antisense strand to SEQ ID NO: 248950
uaugcaacaaauugcuuca

SEQ ID NO: 248952 - RNA, 19 nt, Artificial Sequence
  Description of Artificial Sequence: Synthetic oligonucleotide
  Sense strand starting at position 396 SEQ ID NO: 3204
gugaaacauucuguaguug

SEQ ID NO: 248953 - RNA, 19 nt, Artificial Sequence
  Description of Artificial Sequence: Synthetic oligonucleotide
  Antisense strand to SEQ ID NO: 248952
caacuacagaauguuucac

SEQ ID NO: 248954 - RNA, 19 nt, Artificial Sequence
  Description of Artificial Sequence: Synthetic oligonucleotide
  Sense strand starting at position 397 SEQ ID NO: 3204
ugaaacauucuguaguugu

SEQ ID NO: 248955 - RNA, 19 nt, Artificial Sequence
  Description of Artificial Sequence: Synthetic oligonucleotide
  Antisense strand to SEQ ID NO: 248954
acaacuacagaauguuuca

SEQ ID NO: 248956 - RNA, 19 nt, Artificial Sequence
  Description of Artificial Sequence: Synthetic oligonucleotide
  Sense strand starting at position 401 SEQ ID NO: 3204
acauucuguaguugucaga

SEQ ID NO: 248957 - RNA, 19 nt, Artificial Sequence
  Description of Artificial Sequence: Synthetic oligonucleotide
  Antisense strand to SEQ ID NO: 248956
ucugacaacuacagaaugu

SEQ ID NO: 248958 - RNA, 19 nt, Artificial Sequence
  Description of Artificial Sequence: Synthetic oligonucleotide
  Sense strand starting at position 492 SEQ ID NO: 3204
cucucuuaggcauguuaca

SEQ ID NO: 248959 - RNA, 19 nt, Artificial Sequence
  Description of Artificial Sequence: Synthetic oligonucleotide
  Antisense strand to SEQ ID NO: 248958
uguaacaugccuaagagag

SEQ ID NO: 248960 - RNA, 19 nt, Artificial Sequence
  Description of Artificial Sequence: Synthetic oligonucleotide
  Sense strand starting at position 504 SEQ ID NO: 3204
uguuacacacaucauguua

SEQ ID NO: 248961 - RNA, 19 nt, Artificial Sequence
  Description of Artificial Sequence: Synthetic oligonucleotide
  Antisense strand to SEQ ID NO: 248960
uaacaugauguguguaaca

SEQ ID NO: 248962 - RNA, 19 nt, Artificial Sequence
  Description of Artificial Sequence: Synthetic oligonucleotide
  Sense strand starting at position 531 SEQ ID NO: 3204
ggcaacuagcuuuaguaau

SEQ ID NO: 248963 - RNA, 19 nt, Artificial Sequence
  Description of Artificial Sequence: Synthetic oligonucleotide
  Antisense strand to SEQ ID NO: 248962
auuacuaaagcuaguugcc

SEQ ID NO: 248964 - RNA, 19 nt, Artificial Sequence
  Description of Artificial Sequence: Synthetic oligonucleotide
  Sense strand starting at position 676 SEQ ID NO: 3204
uugggagauccuugaaguu

SEQ ID NO: 248965 - RNA, 19 nt, Artificial Sequence
  Description of Artificial Sequence: Synthetic oligonucleotide
  Antisense strand to SEQ ID NO: 248964
aacuucaaggaucucccaa

SEQ ID NO: 248966 - RNA, 19 nt, Artificial Sequence
  Description of Artificial Sequence: Synthetic oligonucleotide
  Sense strand starting at position 771 SEQ ID NO: 3204
gauugugaagcaggauaua

SEQ ID NO: 248967 - RNA, 19 nt, Artificial Sequence
  Description of Artificial Sequence: Synthetic oligonucleotide
  Antisense strand to SEQ ID NO: 248966
uauauccugcuucacaauc

SEQ ID NO: 248968 - RNA, 19 nt, Artificial Sequence
  Description of Artificial Sequence: Synthetic oligonucleotide
  Sense strand starting at position 828 SEQ ID NO: 3204
cacuaaaugcagugcugaa

SEQ ID NO: 248969 - RNA, 19 nt, Artificial Sequence
  Description of Artificial Sequence: Synthetic oligonucleotide
  Antisense strand to SEQ ID NO: 248968
uucagcacugcauuuagug

SEQ ID NO: 248970 - RNA, 19 nt, Artificial Sequence
  Description of Artificial Sequence: Synthetic oligonucleotide
  Sense strand starting at position 1164 SEQ ID NO: 3204
aggauauauuugcauugau

SEQ ID NO: 248971 - RNA, 19 nt, Artificial Sequence
  Description of Artificial Sequence: Synthetic oligonucleotide
  Antisense strand to SEQ ID NO: 248970
aucaaugcaaauauauccu

SEQ ID NO: 248972 - RNA, 19 nt, Artificial Sequence
  Description of Artificial Sequence: Synthetic oligonucleotide
  Sense strand starting at position 1219 SEQ ID NO: 3204
gcaagcauccgugucauac

SEQ ID NO: 248973 - RNA, 19 nt, Artificial Sequence
  Description of Artificial Sequence: Synthetic oligonucleotide
  Antisense strand to SEQ ID NO: 248972
guaugacacggaugcuugc

SEQ ID NO: 248974 - RNA, 19 nt, Artificial Sequence
  Description of Artificial Sequence: Synthetic oligonucleotide
  Sense strand starting at position 1279 SEQ ID NO: 3204
agucauuuacaucgcuacu

SEQ ID NO: 248975 - RNA, 19 nt, Artificial Sequence
  Description of Artificial Sequence: Synthetic oligonucleotide
  Antisense strand to SEQ ID NO: 248974
aguagcgauguaaaugacu

SEQ ID NO: 248976 - RNA, 19 nt, Artificial Sequence
  Description of Artificial Sequence: Synthetic oligonucleotide
  Sense strand starting at position 1305 SEQ ID NO: 3204
acauucucuuguucgaaua

SEQ ID NO: 248977 - RNA, 19 nt, Artificial Sequence
  Description of Artificial Sequence: Synthetic oligonucleotide
  Antisense strand to SEQ ID NO: 248976
uauucgaacaagagaaugu

SEQ ID NO: 248978 - RNA, 19 nt, Artificial Sequence
  Description of Artificial Sequence: Synthetic oligonucleotide
  Sense strand starting at position 1400 SEQ ID NO: 3204
gcacguucccuuuaagaua

SEQ ID NO: 248979 - RNA, 19 nt, Artificial Sequence
  Description of Artificial Sequence: Synthetic oligonucleotide
  Antisense strand to SEQ ID NO: 248978
uaucuuaaagggaacgugc

SEQ ID NO: 248980 - RNA, 19 nt, Artificial Sequence
  Description of Artificial Sequence: Synthetic oligonucleotide
  Sense strand starting at position 1427 SEQ ID NO: 3204
guaggaaauuaaguagcaa

SEQ ID NO: 248981 - RNA, 19 nt, Artificial Sequence
  Description of Artificial Sequence: Synthetic oligonucleotide
  Antisense strand to SEQ ID NO: 248980
uugcuacuuaauuuccuac

SEQ ID NO: 248982 - RNA, 19 nt, Artificial Sequence
  Description of Artificial Sequence: Synthetic oligonucleotide
  Sense strand starting at position 1473 SEQ ID NO: 3204
ggaucaaauugccuccuau

SEQ ID NO: 248983 - RNA, 19 nt, Artificial Sequence
  Description of Artificial Sequence: Synthetic oligonucleotide
  Antisense strand to SEQ ID NO: 248982
auaggaggcaauuugaucc

SEQ ID NO: 248984 - RNA, 19 nt, Artificial Sequence
  Description of Artificial Sequence: Synthetic oligonucleotide
  Sense strand starting at position 1811 SEQ ID NO: 3204
uggaguucucccgggaucu

SEQ ID NO: 248985 - RNA, 19 nt, Artificial Sequence
  Description of Artificial Sequence: Synthetic oligonucleotide
  Antisense strand to SEQ ID NO: 248984
agaucccgggagaacucca

SEQ ID NO: 248986 - RNA, 19 nt, Artificial Sequence
  Description of Artificial Sequence: Synthetic oligonucleotide
  Sense strand starting at position 1812 SEQ ID NO: 3204
ggaguucucccgggaucuc

SEQ ID NO: 248987 - RNA, 19 nt, Artificial Sequence
  Description of Artificial Sequence: Synthetic oligonucleotide
  Antisense strand to SEQ ID NO: 248986
gagaucccgggagaacucc

SEQ ID NO: 248988 - RNA, 19 nt, Artificial Sequence
  Description of Artificial Sequence: Synthetic oligonucleotide
  Sense strand starting at position 1813 SEQ ID NO: 3204
gaguucucccgggaucucu

SEQ ID NO: 248989 - RNA, 19 nt, Artificial Sequence
  Description of Artificial Sequence: Synthetic oligonucleotide
  Antisense strand to SEQ ID NO: 248988
agagaucccgggagaacuc

SEQ ID NO: 248990 - RNA, 19 nt, Artificial Sequence
  Description of Artificial Sequence: Synthetic oligonucleotide
  Sense strand starting at position 1824 SEQ ID NO: 3204
ggaucucuccucggcuaga

SEQ ID NO: 248991 - RNA, 19 nt, Artificial Sequence
  Description of Artificial Sequence: Synthetic oligonucleotide
  Antisense strand to SEQ ID NO: 248990
ucuagccgaggagagaucc

SEQ ID NO: 248992 - RNA, 19 nt, Artificial Sequence
  Description of Artificial Sequence: Synthetic oligonucleotide
  Sense strand starting at position 2184 SEQ ID NO: 3204
gcgguugcccagagcagua

SEQ ID NO: 248993 - RNA, 19 nt, Artificial Sequence
  Description of Artificial Sequence: Synthetic oligonucleotide
  Antisense strand to SEQ ID NO: 248992
uacugcucugggcaaccgc

SEQ ID NO: 248994 - RNA, 19 nt, Artificial Sequence
  Description of Artificial Sequence: Synthetic oligonucleotide
  Sense strand starting at position 2600 SEQ ID NO: 3204
gaggaauauuuguaagcuc

SEQ ID NO: 248995 - RNA, 19 nt, Artificial Sequence
  Description of Artificial Sequence: Synthetic oligonucleotide
  Antisense strand to SEQ ID NO: 248994
gagcuuacaaauauuccuc

SEQ ID NO: 248996 - RNA, 19 nt, Artificial Sequence
  Description of Artificial Sequence: Synthetic oligonucleotide
  Sense strand starting at position 2603 SEQ ID NO: 3204
gaauauuuguaagcucugu

SEQ ID NO: 248997 - RNA, 19 nt, Artificial Sequence
  Description of Artificial Sequence: Synthetic oligonucleotide
  Antisense strand to SEQ ID NO: 248996
acagagcuuacaaauauuc

SEQ ID NO: 248998 - RNA, 19 nt, Artificial Sequence
  Description of Artificial Sequence: Synthetic oligonucleotide
  Sense strand starting at position 2946 SEQ ID NO: 3204
aggaaagaguuugaaauag

SEQ ID NO: 248999 - RNA, 19 nt, Artificial Sequence
  Description of Artificial Sequence: Synthetic oligonucleotide
  Antisense strand to SEQ ID NO: 248998
cuauuucaaacucuuuccu

SEQ ID NO: 249000 - RNA, 19 nt, Artificial Sequence
  Description of Artificial Sequence: Synthetic oligonucleotide
  Sense strand starting at position 2954 SEQ ID NO: 3204
guuugaaauaggugaggcu

SEQ ID NO: 249001 - RNA, 19 nt, Artificial Sequence
  Description of Artificial Sequence: Synthetic oligonucleotide
  Antisense strand to SEQ ID NO: 249000
agccucaccuauuucaaac

SEQ ID NO: 249002 - RNA, 19 nt, Artificial Sequence
  Description of Artificial Sequence: Synthetic oligonucleotide
  Sense strand starting at position 3042 SEQ ID NO: 3204
gccacucaucuccggaaca

SEQ ID NO: 249003 - RNA, 19 nt, Artificial Sequence
  Description of Artificial Sequence: Synthetic oligonucleotide
  Antisense strand to SEQ ID NO: 249002
uguuccggagaugaguggc

SEQ ID NO: 249004 - RNA, 19 nt, Artificial Sequence
  Description of Artificial Sequence: Synthetic oligonucleotide
  Sense strand starting at position 3136 SEQ ID NO: 3204
ggaauagaguccucuuccu

SEQ ID NO: 249005 - RNA, 19 nt, Artificial Sequence
  Description of Artificial Sequence: Synthetic oligonucleotide
  Antisense strand to SEQ ID NO: 249004
aggaagaggacucuauucc

SEQ ID NO: 249006 - RNA, 19 nt, Artificial Sequence
  Description of Artificial Sequence: Synthetic oligonucleotide
  Sense strand starting at position 3180 SEQ ID NO: 3204
ugggaaucucaggguauac

SEQ ID NO: 249007 - RNA, 19 nt, Artificial Sequence
  Description of Artificial Sequence: Synthetic oligonucleotide
  Antisense strand to SEQ ID NO: 249006
guauacccugagauuccca

SEQ ID NO: 249008 - RNA, 19 nt, Artificial Sequence
  Description of Artificial Sequence: Synthetic oligonucleotide
  Sense strand starting at position 3214 SEQ ID NO: 3204
aauaguccuccuggagacu

SEQ ID NO: 249009 - RNA, 19 nt, Artificial Sequence
  Description of Artificial Sequence: Synthetic oligonucleotide
  Antisense strand to SEQ ID NO: 249008
agucuccaggaggacuauu

SEQ ID NO: 249010 - RNA, 19 nt, Artificial Sequence
  Description of Artificial Sequence: Synthetic oligonucleotide
  Sense strand starting at position 3215 SEQ ID NO: 3204
auaguccuccuggagacuu

SEQ ID NO: 249011 - RNA, 19 nt, Artificial Sequence
  Description of Artificial Sequence: Synthetic oligonucleotide
  Antisense strand to SEQ ID NO: 249010
aagucuccaggaggacuau

SEQ ID NO: 249012 - RNA, 19 nt, Artificial Sequence
  Description of Artificial Sequence: Synthetic oligonucleotide
  Sense strand starting at position 3478 SEQ ID NO: 3204
caugcaguugcaugauaga

SEQ ID NO: 249013 - RNA, 19 nt, Artificial Sequence
  Description of Artificial Sequence: Synthetic oligonucleotide
  Antisense strand to SEQ ID NO: 249012
ucuaucaugcaacugcaug

SEQ ID NO: 249014 - RNA, 19 nt, Artificial Sequence
  Description of Artificial Sequence: Synthetic oligonucleotide
  Sense strand starting at position 3633 SEQ ID NO: 3204
uuaguuuaggaaggugaau

SEQ ID NO: 249015 - RNA, 19 nt, Artificial Sequence
  Description of Artificial Sequence: Synthetic oligonucleotide
  Antisense strand to SEQ ID NO: 249014
auucaccuuccuaaacuaa

SEQ ID NO: 249016 - RNA, 19 nt, Artificial Sequence
  Description of Artificial Sequence: Synthetic oligonucleotide
  Sense strand starting at position 3660 SEQ ID NO: 3204
uugcaauaaccaggaagua

SEQ ID NO: 249017 - RNA, 19 nt, Artificial Sequence
  Description of Artificial Sequence: Synthetic oligonucleotide
  Antisense strand to SEQ ID NO: 249016
uacuuccugguuauugcaa

SEQ ID NO: 249018 - RNA, 19 nt, Artificial Sequence
  Description of Artificial Sequence: Synthetic oligonucleotide
  Sense strand starting at position 3739 SEQ ID NO: 3204
cgaaguaauucuuccucuu

SEQ ID NO: 249019 - RNA, 19 nt, Artificial Sequence
  Description of Artificial Sequence: Synthetic oligonucleotide
  Antisense strand to SEQ ID NO: 249018
aagaggaagaauuacuucg

SEQ ID NO: 249020 - RNA, 19 nt, Artificial Sequence
  Description of Artificial Sequence: Synthetic oligonucleotide
  Sense strand starting at position 3794 SEQ ID NO: 3204
cguuccuaggaauguugaa

SEQ ID NO: 249021 - RNA, 19 nt, Artificial Sequence
  Description of Artificial Sequence: Synthetic oligonucleotide
  Antisense strand to SEQ ID NO: 249020
uucaacauuccuaggaacg

SEQ ID NO: 249022 - RNA, 19 nt, Artificial Sequence
  Description of Artificial Sequence: Synthetic oligonucleotide
  Sense strand starting at position 3820 SEQ ID NO: 3204
gcuaauaagguuuacuuua

SEQ ID NO: 249023 - RNA, 19 nt, Artificial Sequence
  Description of Artificial Sequence: Synthetic oligonucleotide
  Antisense strand to SEQ ID NO: 249022
uaaaguaaaccuuauuagc

SEQ ID NO: 249024 - RNA, 19 nt, Artificial Sequence
  Description of Artificial Sequence: Synthetic oligonucleotide
  Sense strand starting at position 3881 SEQ ID NO: 3204
uugagcuucccugagucuu

SEQ ID NO: 249025 - RNA, 19 nt, Artificial Sequence
  Description of Artificial Sequence: Synthetic oligonucleotide
  Antisense strand to SEQ ID NO: 249024
aagacucagggaagcucaa

SEQ ID NO: 249026 - RNA, 19 nt, Artificial Sequence
  Description of Artificial Sequence: Synthetic oligonucleotide
  Sense strand starting at position 3883 SEQ ID NO: 3204
gagcuucccugagucuuua

SEQ ID NO: 249027 - RNA, 19 nt, Artificial Sequence
  Description of Artificial Sequence: Synthetic oligonucleotide
  Antisense strand to SEQ ID NO: 249026
uaaagacucagggaagcuc

SEQ ID NO: 249028 - RNA, 19 nt, Artificial Sequence
  Description of Artificial Sequence: Synthetic oligonucleotide
  Sense strand starting at position 3978 SEQ ID NO: 3204
guagaucauucugucauac

SEQ ID NO: 249029 - RNA, 19 nt, Artificial Sequence
  Description of Artificial Sequence: Synthetic oligonucleotide
  Antisense strand to SEQ ID NO: 249028
guaugacagaaugaucuac

SEQ ID NO: 249030 - RNA, 19 nt, Artificial Sequence
  Description of Artificial Sequence: Synthetic oligonucleotide
  Sense strand starting at position 280 SEQ ID NO: 3206
cagagugaccuuuggcagu

SEQ ID NO: 249031 - RNA, 19 nt, Artificial Sequence
  Description of Artificial Sequence: Synthetic oligonucleotide
  Antisense strand to SEQ ID NO: 249030
acugccaaaggucacucug

SEQ ID NO: 249032 - RNA, 19 nt, Artificial Sequence
  Description of Artificial Sequence: Synthetic oligonucleotide
  Sense strand starting at position 282 SEQ ID NO: 3206
gagugaccuuuggcaguua

SEQ ID NO: 249033 - RNA, 19 nt, Artificial Sequence
  Description of Artificial Sequence: Synthetic oligonucleotide
  Antisense strand to SEQ ID NO: 249032
uaacugccaaaggucacuc

SEQ ID NO: 249034 - RNA, 19 nt, Artificial Sequence
  Description of Artificial Sequence: Synthetic oligonucleotide
  Sense strand starting at position 283 SEQ ID NO: 3206
agugaccuuuggcaguuaa

SEQ ID NO: 249035 - RNA, 19 nt, Artificial Sequence
  Description of Artificial Sequence: Synthetic oligonucleotide
  Antisense strand to SEQ ID NO: 249034
uuaacugccaaaggucacu

SEQ ID NO: 249036 - RNA, 19 nt, Artificial Sequence
  Description of Artificial Sequence: Synthetic oligonucleotide
  Sense strand starting at position 379 SEQ ID NO: 3206
gcagccugacucuggaaau

SEQ ID NO: 249037 - RNA, 19 nt, Artificial Sequence
  Description of Artificial Sequence: Synthetic oligonucleotide
  Antisense strand to SEQ ID NO: 249036
auuuccagagucaggcugc

SEQ ID NO: 249038 - RNA, 19 nt, Artificial Sequence
  Description of Artificial Sequence: Synthetic oligonucleotide
  Sense strand starting at position 397 SEQ ID NO: 3206
uucccaucucuguagucau

SEQ ID NO: 249039 - RNA, 19 nt, Artificial Sequence
  Description of Artificial Sequence: Synthetic oligonucleotide
  Antisense strand to SEQ ID NO: 249038
augacuacagagaugggaa

SEQ ID NO: 249040 - RNA, 19 nt, Artificial Sequence
  Description of Artificial Sequence: Synthetic oligonucleotide
  Sense strand starting at position 400 SEQ ID NO: 3206
ccaucucuguagucaugca

SEQ ID NO: 249041 - RNA, 19 nt, Artificial Sequence
  Description of Artificial Sequence: Synthetic oligonucleotide
  Antisense strand to SEQ ID NO: 249040
ugcaugacuacagagaugg

SEQ ID NO: 249042 - RNA, 19 nt, Artificial Sequence
  Description of Artificial Sequence: Synthetic oligonucleotide
  Sense strand starting at position 425 SEQ ID NO: 3206
cucaaugugucucugccua

SEQ ID NO: 249043 - RNA, 19 nt, Artificial Sequence
  Description of Artificial Sequence: Synthetic oligonucleotide
  Antisense strand to SEQ ID NO: 249042
uaggcagagacacauugag

SEQ ID NO: 249044 - RNA, 19 nt, Artificial Sequence
  Description of Artificial Sequence: Synthetic oligonucleotide
  Sense strand starting at position 723 SEQ ID NO: 3206
ggaugcuuguccucacaga

SEQ ID NO: 249045 - RNA, 19 nt, Artificial Sequence
  Description of Artificial Sequence: Synthetic oligonucleotide
  Antisense strand to SEQ ID NO: 249044
ucugugaggacaagcaucc

SEQ ID NO: 249046 - RNA, 19 nt, Artificial Sequence
  Description of Artificial Sequence: Synthetic oligonucleotide
  Sense strand starting at position 724 SEQ ID NO: 3206
gaugcuuguccucacagau

SEQ ID NO: 249047 - RNA, 19 nt, Artificial Sequence
  Description of Artificial Sequence: Synthetic oligonucleotide
  Antisense strand to SEQ ID NO: 249046
aucugugaggacaagcauc

SEQ ID NO: 249048 - RNA, 19 nt, Artificial Sequence
  Description of Artificial Sequence: Synthetic oligonucleotide
  Sense strand starting at position 757 SEQ ID NO: 3206
gccaucuguucagggcaga

SEQ ID NO: 249049 - RNA, 19 nt, Artificial Sequence
  Description of Artificial Sequence: Synthetic oligonucleotide
  Antisense strand to SEQ ID NO: 249048
ucugcccugaacagauggc

SEQ ID NO: 249050 - RNA, 19 nt, Artificial Sequence
  Description of Artificial Sequence: Synthetic oligonucleotide
  Sense strand starting at position 862 SEQ ID NO: 3206
ccuuccugcucauauguca

SEQ ID NO: 249051 - RNA, 19 nt, Artificial Sequence
  Description of Artificial Sequence: Synthetic oligonucleotide
  Antisense strand to SEQ ID NO: 249050
ugacauaugagcaggaagg

SEQ ID NO: 249052 - RNA, 19 nt, Artificial Sequence
  Description of Artificial Sequence: Synthetic oligonucleotide
  Sense strand starting at position 869 SEQ ID NO: 3206
gcucauaugucaguaugag

SEQ ID NO: 249053 - RNA, 19 nt, Artificial Sequence
  Description of Artificial Sequence: Synthetic oligonucleotide
  Antisense strand to SEQ ID NO: 249052
cucauacugacauaugagc

SEQ ID NO: 249054 - RNA, 19 nt, Artificial Sequence
  Description of Artificial Sequence: Synthetic oligonucleotide
  Sense strand starting at position 913 SEQ ID NO: 3206
gcaguuauguugcaccuua

SEQ ID NO: 249055 - RNA, 19 nt, Artificial Sequence
  Description of Artificial Sequence: Synthetic oligonucleotide
  Antisense strand to SEQ ID NO: 249054
uaaggugcaacauaacugc

SEQ ID NO: 249056 - RNA, 19 nt, Artificial Sequence
  Description of Artificial Sequence: Synthetic oligonucleotide
  Sense strand starting at position 918 SEQ ID NO: 3206
uauguugcaccuuaaggua

SEQ ID NO: 249057 - RNA, 19 nt, Artificial Sequence
  Description of Artificial Sequence: Synthetic oligonucleotide
  Antisense strand to SEQ ID NO: 249056
uaccuuaaggugcaacaua

SEQ ID NO: 249058 - RNA, 19 nt, Artificial Sequence
  Description of Artificial Sequence: Synthetic oligonucleotide
  Sense strand starting at position 962 SEQ ID NO: 3206
cugaaaugcugcugaucag

SEQ ID NO: 249059 - RNA, 19 nt, Artificial Sequence
  Description of Artificial Sequence: Synthetic oligonucleotide
  Antisense strand to SEQ ID NO: 249058
cugaucagcagcauuucag

SEQ ID NO: 249060 - RNA, 19 nt, Artificial Sequence
  Description of Artificial Sequence: Synthetic oligonucleotide
  Sense strand starting at position 1011 SEQ ID NO: 3206
ucuggacuucugcaugaga

SEQ ID NO: 249061 - RNA, 19 nt, Artificial Sequence
  Description of Artificial Sequence: Synthetic oligonucleotide
  Antisense strand to SEQ ID NO: 249060
ucucaugcagaaguccaga

SEQ ID NO: 249062 - RNA, 19 nt, Artificial Sequence
  Description of Artificial Sequence: Synthetic oligonucleotide
  Sense strand starting at position 1013 SEQ ID NO: 3206
uggacuucugcaugagaga

SEQ ID NO: 249063 - RNA, 19 nt, Artificial Sequence
  Description of Artificial Sequence: Synthetic oligonucleotide
  Antisense strand to SEQ ID NO: 249062
ucucucaugcagaagucca

SEQ ID NO: 249064 - RNA, 19 nt, Artificial Sequence
  Description of Artificial Sequence: Synthetic oligonucleotide
  Sense strand starting at position 1048 SEQ ID NO: 3206
uguuccauccacuguuauu

SEQ ID NO: 249065 - RNA, 19 nt, Artificial Sequence
  Description of Artificial Sequence: Synthetic oligonucleotide
  Antisense strand to SEQ ID NO: 249064
aauaacaguggauggaaca

SEQ ID NO: 249066 - RNA, 19 nt, Artificial Sequence
  Description of Artificial Sequence: Synthetic oligonucleotide
  Sense strand starting at position 1094 SEQ ID NO: 3206
ccugaacuauccugaaugu

SEQ ID NO: 249067 - RNA, 19 nt, Artificial Sequence
  Description of Artificial Sequence: Synthetic oligonucleotide
  Antisense strand to SEQ ID NO: 249066
acauucaggauaguucagg

SEQ ID NO: 249068 - RNA, 19 nt, Artificial Sequence
  Description of Artificial Sequence: Synthetic oligonucleotide
  Sense strand starting at position 1098 SEQ ID NO: 3206
aacuauccugaauguguga

SEQ ID NO: 249069 - RNA, 19 nt, Artificial Sequence
  Description of Artificial Sequence: Synthetic oligonucleotide
  Antisense strand to SEQ ID NO: 249068
ucacacauucaggauaguu

SEQ ID NO: 249070 - RNA, 19 nt, Artificial Sequence
  Description of Artificial Sequence: Synthetic oligonucleotide
  Sense strand starting at position 1361 SEQ ID NO: 3206
gcacucauucguuacuuga

SEQ ID NO: 249071 - RNA, 19 nt, Artificial Sequence
  Description of Artificial Sequence: Synthetic oligonucleotide
  Antisense strand to SEQ ID NO: 249070
ucaaguaacgaaugagugc

SEQ ID NO: 249072 - RNA, 19 nt, Artificial Sequence
  Description of Artificial Sequence: Synthetic oligonucleotide
  Sense strand starting at position 1363 SEQ ID NO: 3206
acucauucguuacuugauu

SEQ ID NO: 249073 - RNA, 19 nt, Artificial Sequence
  Description of Artificial Sequence: Synthetic oligonucleotide
  Antisense strand to SEQ ID NO: 249072
aaucaaguaacgaaugagu

SEQ ID NO: 249074 - RNA, 19 nt, Artificial Sequence
  Description of Artificial Sequence: Synthetic oligonucleotide
  Sense strand starting at position 1371 SEQ ID NO: 3206
guuacuugauugcuugauu

SEQ ID NO: 249075 - RNA, 19 nt, Artificial Sequence
  Description of Artificial Sequence: Synthetic oligonucleotide
  Antisense strand to SEQ ID NO: 249074
aaucaagcaaucaaguaac

SEQ ID NO: 249076 - RNA, 19 nt, Artificial Sequence
  Description of Artificial Sequence: Synthetic oligonucleotide
  Sense strand starting at position 1372 SEQ ID NO: 3206
uuacuugauugcuugauua

SEQ ID NO: 249077 - RNA, 19 nt, Artificial Sequence
  Description of Artificial Sequence: Synthetic oligonucleotide
  Antisense strand to SEQ ID NO: 249076
uaaucaagcaaucaaguaa

SEQ ID NO: 249078 - RNA, 19 nt, Artificial Sequence
  Description of Artificial Sequence: Synthetic oligonucleotide
  Sense strand starting at position 1374 SEQ ID NO: 3206
acuugauugcuugauuaga

SEQ ID NO: 249079 - RNA, 19 nt, Artificial Sequence
  Description of Artificial Sequence: Synthetic oligonucleotide
  Antisense strand to SEQ ID NO: 249078
ucuaaucaagcaaucaagu

SEQ ID NO: 249080 - RNA, 19 nt, Artificial Sequence
  Description of Artificial Sequence: Synthetic oligonucleotide
  Sense strand starting at position 1376 SEQ ID NO: 3206
uugauugcuugauuagaag

SEQ ID NO: 249081 - RNA, 19 nt, Artificial Sequence
  Description of Artificial Sequence: Synthetic oligonucleotide
  Antisense strand to SEQ ID NO: 249080
cuucuaaucaagcaaucaa

SEQ ID NO: 249082 - RNA, 19 nt, Artificial Sequence
  Description of Artificial Sequence: Synthetic oligonucleotide
  Sense strand starting at position 1382 SEQ ID NO: 3206
gcuugauuagaagaugcgu

SEQ ID NO: 249083 - RNA, 19 nt, Artificial Sequence
  Description of Artificial Sequence: Synthetic oligonucleotide
  Antisense strand to SEQ ID NO: 249082
acgcaucuucuaaucaagc

SEQ ID NO: 249084 - RNA, 19 nt, Artificial Sequence
  Description of Artificial Sequence: Synthetic oligonucleotide
  Sense strand starting at position 1390 SEQ ID NO: 3206
agaagaugcguucauugac

SEQ ID NO: 249085 - RNA, 19 nt, Artificial Sequence
  Description of Artificial Sequence: Synthetic oligonucleotide
  Antisense strand to SEQ ID NO: 249084
gucaaugaacgcaucuucu

SEQ ID NO: 249086 - RNA, 19 nt, Artificial Sequence
  Description of Artificial Sequence: Synthetic oligonucleotide
  Sense strand starting at position 2447 SEQ ID NO: 3206
agggaucauuccuggaggu

SEQ ID NO: 249087 - RNA, 19 nt, Artificial Sequence
  Description of Artificial Sequence: Synthetic oligonucleotide
  Antisense strand to SEQ ID NO: 249086
accuccaggaaugaucccu

SEQ ID NO: 249088 - RNA, 19 nt, Artificial Sequence
  Description of Artificial Sequence: Synthetic oligonucleotide
  Sense strand starting at position 2448 SEQ ID NO: 3206
gggaucauuccuggaggua

SEQ ID NO: 249089 - RNA, 19 nt, Artificial Sequence
  Description of Artificial Sequence: Synthetic oligonucleotide
  Antisense strand to SEQ ID NO: 249088
uaccuccaggaaugauccc

SEQ ID NO: 249090 - RNA, 19 nt, Artificial Sequence
  Description of Artificial Sequence: Synthetic oligonucleotide
  Sense strand starting at position 2536 SEQ ID NO: 3206
gugccacccuuaugaugau

SEQ ID NO: 249091 - RNA, 19 nt, Artificial Sequence
  Description of Artificial Sequence: Synthetic oligonucleotide
  Antisense strand to SEQ ID NO: 249090
aucaucauaaggguggcac

SEQ ID NO: 249092 - RNA, 19 nt, Artificial Sequence
  Description of Artificial Sequence: Synthetic oligonucleotide
  Sense strand starting at position 3036 SEQ ID NO: 3206
gccugaaaccuuugccaag

SEQ ID NO: 249093 - RNA, 19 nt, Artificial Sequence
  Description of Artificial Sequence: Synthetic oligonucleotide
  Antisense strand to SEQ ID NO: 249092
cuuggcaaagguuucaggc

SEQ ID NO: 249094 - RNA, 19 nt, Artificial Sequence
  Description of Artificial Sequence: Synthetic oligonucleotide
  Sense strand starting at position 3037 SEQ ID NO: 3206
ccugaaaccuuugccaagu

SEQ ID NO: 249095 - RNA, 19 nt, Artificial Sequence
  Description of Artificial Sequence: Synthetic oligonucleotide
  Antisense strand to SEQ ID NO: 249094
acuuggcaaagguuucagg

SEQ ID NO: 249096 - RNA, 19 nt, Artificial Sequence
  Description of Artificial Sequence: Synthetic oligonucleotide
  Sense strand starting at position 3038 SEQ ID NO: 3206
cugaaaccuuugccaaguu

SEQ ID NO: 249097 - RNA, 19 nt, Artificial Sequence
  Description of Artificial Sequence: Synthetic oligonucleotide
  Antisense strand to SEQ ID NO: 249096
aacuuggcaaagguuucag

SEQ ID NO: 249098 - RNA, 19 nt, Artificial Sequence
  Description of Artificial Sequence: Synthetic oligonucleotide
  Sense strand starting at position 3143 SEQ ID NO: 3206
gcacaauugugcuugcaug

SEQ ID NO: 249099 - RNA, 19 nt, Artificial Sequence
  Description of Artificial Sequence: Synthetic oligonucleotide
  Antisense strand to SEQ ID NO: 249098
caugcaagcacaauugugc

SEQ ID NO: 249100 - RNA, 19 nt, Artificial Sequence
  Description of Artificial Sequence: Synthetic oligonucleotide
  Sense strand starting at position 3756 SEQ ID NO: 3206
gcuggaguuccaggcauga

SEQ ID NO: 249101 - RNA, 19 nt, Artificial Sequence
  Description of Artificial Sequence: Synthetic oligonucleotide
  Antisense strand to SEQ ID NO: 249100
ucaugccuggaacuccagc

SEQ ID NO: 249102 - RNA, 19 nt, Artificial Sequence
  Description of Artificial Sequence: Synthetic oligonucleotide
  Sense strand starting at position 3879 SEQ ID NO: 3206
gaguccucauagugaccuu

SEQ ID NO: 249103 - RNA, 19 nt, Artificial Sequence
  Description of Artificial Sequence: Synthetic oligonucleotide
  Antisense strand to SEQ ID NO: 249102
aaggucacuaugaggacuc

SEQ ID NO: 249104 - RNA, 19 nt, Artificial Sequence
  Description of Artificial Sequence: Synthetic oligonucleotide
  Sense strand starting at position 3907 SEQ ID NO: 3206
guguaauuaucucacucua

SEQ ID NO: 249105 - RNA, 19 nt, Artificial Sequence
  Description of Artificial Sequence: Synthetic oligonucleotide
  Antisense strand to SEQ ID NO: 249104
uagagugagauaauuacac

SEQ ID NO: 249106 - RNA, 19 nt, Artificial Sequence
  Description of Artificial Sequence: Synthetic oligonucleotide
  Sense strand starting at position 3975 SEQ ID NO: 3206
caggcuagggagugguaaa

SEQ ID NO: 249107 - RNA, 19 nt, Artificial Sequence
  Description of Artificial Sequence: Synthetic oligonucleotide
  Antisense strand to SEQ ID NO: 249106
uuuaccacucccuagccug

SEQ ID NO: 249108 - RNA, 19 nt, Artificial Sequence
  Description of Artificial Sequence: Synthetic oligonucleotide
  Sense strand starting at position 3 SEQ ID NO: 3205
ugcuaauaucccugauaag

SEQ ID NO: 249109 - RNA, 19 nt, Artificial Sequence
  Description of Artificial Sequence: Synthetic oligonucleotide
  Antisense strand to SEQ ID NO: 249108
cuuaucagggauauuagca

SEQ ID NO: 249110 - RNA, 19 nt, Artificial Sequence
  Description of Artificial Sequence: Synthetic oligonucleotide
  Sense strand starting at position 4 SEQ ID NO: 3205
gcuaauaucccugauaagc

SEQ ID NO: 249111 - RNA, 19 nt, Artificial Sequence
  Description of Artificial Sequence: Synthetic oligonucleotide
  Antisense strand to SEQ ID NO: 249110
gcuuaucagggauauuagc

SEQ ID NO: 249112 - RNA, 19 nt, Artificial Sequence
  Description of Artificial Sequence: Synthetic oligonucleotide
  Sense strand starting at position 138 SEQ ID NO: 3205
ugaggcuucgacuguuuaa

SEQ ID NO: 249113 - RNA, 19 nt, Artificial Sequence
  Description of Artificial Sequence: Synthetic oligonucleotide
  Antisense strand to SEQ ID NO: 249112
uuaaacagucgaagccuca

SEQ ID NO: 249114 - RNA, 19 nt, Artificial Sequence
  Description of Artificial Sequence: Synthetic oligonucleotide
  Sense strand starting at position 145 SEQ ID NO: 3205
ucgacuguuuaagggauuu

SEQ ID NO: 249115 - RNA, 19 nt, Artificial Sequence
  Description of Artificial Sequence: Synthetic oligonucleotide
  Antisense strand to SEQ ID NO: 249114
aaaucccuuaaacagucga

SEQ ID NO: 249116 - RNA, 19 nt, Artificial Sequence
  Description of Artificial Sequence: Synthetic oligonucleotide
  Sense strand starting at position 170 SEQ ID NO: 3205
ccaguuuaugaaggugaca

SEQ ID NO: 249117 - RNA, 19 nt, Artificial Sequence
  Description of Artificial Sequence: Synthetic oligonucleotide
  Antisense strand to SEQ ID NO: 249116
ugucaccuucauaaacugg

SEQ ID NO: 249118 - RNA, 19 nt, Artificial Sequence
  Description of Artificial Sequence: Synthetic oligonucleotide
  Sense strand starting at position 262 SEQ ID NO: 3205
ggguaugagugggcacaua

SEQ ID NO: 249119 - RNA, 19 nt, Artificial Sequence
  Description of Artificial Sequence: Synthetic oligonucleotide
  Antisense strand to SEQ ID NO: 249118
uaugugcccacucauaccc

SEQ ID NO: 249120 - RNA, 19 nt, Artificial Sequence
  Description of Artificial Sequence: Synthetic oligonucleotide
  Sense strand starting at position 343 SEQ ID NO: 3205
cugucaucuugugcauacu

SEQ ID NO: 249121 - RNA, 19 nt, Artificial Sequence
  Description of Artificial Sequence: Synthetic oligonucleotide
  Antisense strand to SEQ ID NO: 249120
aguaugcacaagaugacag

SEQ ID NO: 249122 - RNA, 19 nt, Artificial Sequence
  Description of Artificial Sequence: Synthetic oligonucleotide
  Sense strand starting at position 701 SEQ ID NO: 3205
cuguaugucccacgaaguu

SEQ ID NO: 249123 - RNA, 19 nt, Artificial Sequence
  Description of Artificial Sequence: Synthetic oligonucleotide
  Antisense strand to SEQ ID NO: 249122
aacuucgugggacauacag

SEQ ID NO: 249124 - RNA, 19 nt, Artificial Sequence
  Description of Artificial Sequence: Synthetic oligonucleotide
  Sense strand starting at position 711 SEQ ID NO: 3205
cacgaaguucccugucaca

SEQ ID NO: 249125 - RNA, 19 nt, Artificial Sequence
  Description of Artificial Sequence: Synthetic oligonucleotide
  Antisense strand to SEQ ID NO: 249124
ugugacagggaacuucgug

SEQ ID NO: 249126 - RNA, 19 nt, Artificial Sequence
  Description of Artificial Sequence: Synthetic oligonucleotide
  Sense strand starting at position 920 SEQ ID NO: 3205
ggcuguggacuuugggaaa

SEQ ID NO: 249127 - RNA, 19 nt, Artificial Sequence
  Description of Artificial Sequence: Synthetic oligonucleotide
  Antisense strand to SEQ ID NO: 249126
uuucccaaaguccacagcc

SEQ ID NO: 249128 - RNA, 19 nt, Artificial Sequence
  Description of Artificial Sequence: Synthetic oligonucleotide
  Sense strand starting at position 1108 SEQ ID NO: 3205
ggucucaguacugagaguu

SEQ ID NO: 249129 - RNA, 19 nt, Artificial Sequence
  Description of Artificial Sequence: Synthetic oligonucleotide
  Antisense strand to SEQ ID NO: 249128
aacucucaguacugagacc

SEQ ID NO: 249130 - RNA, 19 nt, Artificial Sequence
  Description of Artificial Sequence: Synthetic oligonucleotide
  Sense strand starting at position 1329 SEQ ID NO: 3205
gucagugucugauccaagu

SEQ ID NO: 249131 - RNA, 19 nt, Artificial Sequence
  Description of Artificial Sequence: Synthetic oligonucleotide
  Antisense strand to SEQ ID NO: 249130
acuuggaucagacacugac

SEQ ID NO: 249132 - RNA, 19 nt, Artificial Sequence
  Description of Artificial Sequence: Synthetic oligonucleotide
  Sense strand starting at position 1335 SEQ ID NO: 3205
gucugauccaagugugggu

SEQ ID NO: 249133 - RNA, 19 nt, Artificial Sequence
  Description of Artificial Sequence: Synthetic oligonucleotide
  Antisense strand to SEQ ID NO: 249132
acccacacuuggaucagac

SEQ ID NO: 249134 - RNA, 19 nt, Artificial Sequence
  Description of Artificial Sequence: Synthetic oligonucleotide
  Sense strand starting at position 1350 SEQ ID NO: 3205
gggucugucuccucaguua

SEQ ID NO: 249135 - RNA, 19 nt, Artificial Sequence
  Description of Artificial Sequence: Synthetic oligonucleotide
  Antisense strand to SEQ ID NO: 249134
uaacugaggagacagaccc

SEQ ID NO: 249136 - RNA, 19 nt, Artificial Sequence
  Description of Artificial Sequence: Synthetic oligonucleotide
  Sense strand starting at position 1730 SEQ ID NO: 3205
gggacuacgucuccuuagu

SEQ ID NO: 249137 - RNA, 19 nt, Artificial Sequence
  Description of Artificial Sequence: Synthetic oligonucleotide
  Antisense strand to SEQ ID NO: 249136
acuaaggagacguaguccc

SEQ ID NO: 249138 - RNA, 19 nt, Artificial Sequence
  Description of Artificial Sequence: Synthetic oligonucleotide
  Sense strand starting at position 1893 SEQ ID NO: 3205
cguuaccuuccauggauau

SEQ ID NO: 249139 - RNA, 19 nt, Artificial Sequence
  Description of Artificial Sequence: Synthetic oligonucleotide
  Antisense strand to SEQ ID NO: 249138
auauccauggaagguaacg

SEQ ID NO: 249140 - RNA, 19 nt, Artificial Sequence
  Description of Artificial Sequence: Synthetic oligonucleotide
  Sense strand starting at position 1894 SEQ ID NO: 3205
guuaccuuccauggauaug

SEQ ID NO: 249141 - RNA, 19 nt, Artificial Sequence
  Description of Artificial Sequence: Synthetic oligonucleotide
  Antisense strand to SEQ ID NO: 249140
cauauccauggaagguaac

SEQ ID NO: 249142 - RNA, 19 nt, Artificial Sequence
  Description of Artificial Sequence: Synthetic oligonucleotide
  Sense strand starting at position 2252 SEQ ID NO: 3205
cgagucagccggcaaacuu

SEQ ID NO: 249143 - RNA, 19 nt, Artificial Sequence
  Description of Artificial Sequence: Synthetic oligonucleotide
  Antisense strand to SEQ ID NO: 249142
aaguuugccggcugacucg

SEQ ID NO: 249144 - RNA, 19 nt, Artificial Sequence
  Description of Artificial Sequence: Synthetic oligonucleotide
  Sense strand starting at position 2843 SEQ ID NO: 3205
gguccuccgccggagauua

SEQ ID NO: 249145 - RNA, 19 nt, Artificial Sequence
  Description of Artificial Sequence: Synthetic oligonucleotide
  Antisense strand to SEQ ID NO: 249144
uaaucuccggcggaggacc

SEQ ID NO: 249146 - RNA, 19 nt, Artificial Sequence
  Description of Artificial Sequence: Synthetic oligonucleotide
  Sense strand starting at position 2895 SEQ ID NO: 3205
agaaguuggucuccaaagu

SEQ ID NO: 249147 - RNA, 19 nt, Artificial Sequence
  Description of Artificial Sequence: Synthetic oligonucleotide
  Antisense strand to SEQ ID NO: 249146
acuuuggagaccaacuucu

SEQ ID NO: 249148 - RNA, 19 nt, Artificial Sequence
  Description of Artificial Sequence: Synthetic oligonucleotide
  Sense strand starting at position 2896 SEQ ID NO: 3205
gaaguuggucuccaaaguu

SEQ ID NO: 249149 - RNA, 19 nt, Artificial Sequence
  Description of Artificial Sequence: Synthetic oligonucleotide
  Antisense strand to SEQ ID NO: 249148
aacuuuggagaccaacuuc

SEQ ID NO: 249150 - RNA, 19 nt, Artificial Sequence
  Description of Artificial Sequence: Synthetic oligonucleotide
  Sense strand starting at position 2989 SEQ ID NO: 3205
agagcuuggucgcugacuu

SEQ ID NO: 249151 - RNA, 19 nt, Artificial Sequence
  Description of Artificial Sequence: Synthetic oligonucleotide
  Antisense strand to SEQ ID NO: 249150
aagucagcgaccaagcucu

SEQ ID NO: 249152 - RNA, 19 nt, Artificial Sequence
  Description of Artificial Sequence: Synthetic oligonucleotide
  Sense strand starting at position 3397 SEQ ID NO: 3205
cgcuguguuagccaaggga

SEQ ID NO: 249153 - RNA, 19 nt, Artificial Sequence
  Description of Artificial Sequence: Synthetic oligonucleotide
  Antisense strand to SEQ ID NO: 249152
ucccuuggcuaacacagcg

SEQ ID NO: 249154 - RNA, 19 nt, Artificial Sequence
  Description of Artificial Sequence: Synthetic oligonucleotide
  Sense strand starting at position 3400 SEQ ID NO: 3205
uguguuagccaagggagaa

SEQ ID NO: 249155 - RNA, 19 nt, Artificial Sequence
  Description of Artificial Sequence: Synthetic oligonucleotide
  Antisense strand to SEQ ID NO: 249154
uucucccuuggcuaacaca

SEQ ID NO: 249156 - RNA, 19 nt, Artificial Sequence
  Description of Artificial Sequence: Synthetic oligonucleotide
  Sense strand starting at position 3401 SEQ ID NO: 3205
guguuagccaagggagaaa

SEQ ID NO: 249157 - RNA, 19 nt, Artificial Sequence
  Description of Artificial Sequence: Synthetic oligonucleotide
  Antisense strand to SEQ ID NO: 249156
uuucucccuuggcuaacac

SEQ ID NO: 249158 - RNA, 19 nt, Artificial Sequence
  Description of Artificial Sequence: Synthetic oligonucleotide
  Sense strand starting at position 3443 SEQ ID NO: 3205
agcgcgaguccuguuugga

SEQ ID NO: 249159 - RNA, 19 nt, Artificial Sequence
  Description of Artificial Sequence: Synthetic oligonucleotide
  Antisense strand to SEQ ID NO: 249158
uccaaacaggacucgcgcu

SEQ ID NO: 249160 - RNA, 19 nt, Artificial Sequence
  Description of Artificial Sequence: Synthetic oligonucleotide
  Sense strand starting at position 3444 SEQ ID NO: 3205
gcgcgaguccuguuuggac

SEQ ID NO: 249161 - RNA, 19 nt, Artificial Sequence
  Description of Artificial Sequence: Synthetic oligonucleotide
  Antisense strand to SEQ ID NO: 249160
guccaaacaggacucgcgc

SEQ ID NO: 249162 - RNA, 19 nt, Artificial Sequence
  Description of Artificial Sequence: Synthetic oligonucleotide
  Sense strand starting at position 3647 SEQ ID NO: 3205
cuuugagcuuacgugugau

SEQ ID NO: 249163 - RNA, 19 nt, Artificial Sequence
  Description of Artificial Sequence: Synthetic oligonucleotide
  Antisense strand to SEQ ID NO: 249162
aucacacguaagcucaaag

SEQ ID NO: 249164 - RNA, 19 nt, Artificial Sequence
  Description of Artificial Sequence: Synthetic oligonucleotide
  Sense strand starting at position 3653 SEQ ID NO: 3205
gcuuacgugugauucuuaa

SEQ ID NO: 249165 - RNA, 19 nt, Artificial Sequence
  Description of Artificial Sequence: Synthetic oligonucleotide
  Antisense strand to SEQ ID NO: 249164
uuaagaaucacacguaagc

SEQ ID NO: 249166 - RNA, 19 nt, Artificial Sequence
  Description of Artificial Sequence: Synthetic oligonucleotide
  Sense strand starting at position 3787 SEQ ID NO: 3205
gggacuuucccgugacacc

SEQ ID NO: 249167 - RNA, 19 nt, Artificial Sequence
  Description of Artificial Sequence: Synthetic oligonucleotide
  Antisense strand to SEQ ID NO: 249166
ggugucacgggaaaguccc

SEQ ID NO: 249168 - RNA, 19 nt, Artificial Sequence
  Description of Artificial Sequence: Synthetic oligonucleotide
  Sense strand starting at position 3788 SEQ ID NO: 3205
ggacuuucccgugacacca

SEQ ID NO: 249169 - RNA, 19 nt, Artificial Sequence
  Description of Artificial Sequence: Synthetic oligonucleotide
  Antisense strand to SEQ ID NO: 249168
uggugucacgggaaagucc

SEQ ID NO: 249170 - RNA, 19 nt, Artificial Sequence
  Description of Artificial Sequence: Synthetic oligonucleotide
  Sense strand starting at position 3808 SEQ ID NO: 3205
ccuguuucuggugggaaau

SEQ ID NO: 249171 - RNA, 19 nt, Artificial Sequence
  Description of Artificial Sequence: Synthetic oligonucleotide
  Antisense strand to SEQ ID NO: 249170
auuucccaccagaaacagg

SEQ ID NO: 249172 - RNA, 19 nt, Artificial Sequence
  Description of Artificial Sequence: Synthetic oligonucleotide
  Sense strand starting at position 3809 SEQ ID NO: 3205
cuguuucuggugggaaaug

SEQ ID NO: 249173 - RNA, 19 nt, Artificial Sequence
  Description of Artificial Sequence: Synthetic oligonucleotide
  Antisense strand to SEQ ID NO: 249172
cauuucccaccagaaacag

SEQ ID NO: 249174 - RNA, 19 nt, Artificial Sequence
  Description of Artificial Sequence: Synthetic oligonucleotide
  Sense strand starting at position 3860 SEQ ID NO: 3205
uguaucacaugccuaguua

SEQ ID NO: 249175 - RNA, 19 nt, Artificial Sequence
  Description of Artificial Sequence: Synthetic oligonucleotide
  Antisense strand to SEQ ID NO: 249174
uaacuaggcaugugauaca

SEQ ID NO: 249176 - RNA, 19 nt, Artificial Sequence
  Description of Artificial Sequence: Synthetic oligonucleotide
  Sense strand starting at position 3861 SEQ ID NO: 3205
guaucacaugccuaguuaa

SEQ ID NO: 249177 - RNA, 19 nt, Artificial Sequence
  Description of Artificial Sequence: Synthetic oligonucleotide
  Antisense strand to SEQ ID NO: 249176
uuaacuaggcaugugauac

SEQ ID NO: 249178 - RNA, 19 nt, Artificial Sequence
  Description of Artificial Sequence: Synthetic oligonucleotide
  Sense strand starting at position 3864 SEQ ID NO: 3205
ucacaugccuaguuaaaug

SEQ ID NO: 249179 - RNA, 19 nt, Artificial Sequence
  Description of Artificial Sequence: Synthetic oligonucleotide
  Antisense strand to SEQ ID NO: 249178
cauuuaacuaggcauguga

SEQ ID NO: 249180 - RNA, 19 nt, Artificial Sequence
  Description of Artificial Sequence: Synthetic oligonucleotide
  Sense strand starting at position 3911 SEQ ID NO: 3205
acuguaaaugcauagcuuu

SEQ ID NO: 249181 - RNA, 19 nt, Artificial Sequence
  Description of Artificial Sequence: Synthetic oligonucleotide
  Antisense strand to SEQ ID NO: 249180
aaagcuaugcauuuacagu

SEQ ID NO: 249182 - RNA, 19 nt, Artificial Sequence
  Description of Artificial Sequence: Synthetic oligonucleotide
  Sense strand starting at position 3939 SEQ ID NO: 3205
uuaauugggauguggugau

SEQ ID NO: 249183 - RNA, 19 nt, Artificial Sequence
  Description of Artificial Sequence: Synthetic oligonucleotide
  Antisense strand to SEQ ID NO: 249182
aucaccacaucccaauuaa

SEQ ID NO: 249184 - RNA, 19 nt, Artificial Sequence
  Description of Artificial Sequence: Synthetic oligonucleotide
  Sense strand starting at position 3949 SEQ ID NO: 3205
uguggugauucuccacuga

SEQ ID NO: 249185 - RNA, 19 nt, Artificial Sequence
  Description of Artificial Sequence: Synthetic oligonucleotide
  Antisense strand to SEQ ID NO: 249184
ucaguggagaaucaccaca

SEQ ID NO: 249186 - RNA, 19 nt, Artificial Sequence
  Description of Artificial Sequence: Synthetic oligonucleotide
  Sense strand starting at position 3953 SEQ ID NO: 3205
gugauucuccacugaccaa

SEQ ID NO: 249187 - RNA, 19 nt, Artificial Sequence
  Description of Artificial Sequence: Synthetic oligonucleotide
  Antisense strand to SEQ ID NO: 249186
uuggucaguggagaaucac

SEQ ID NO: 249188 - RNA, 19 nt, Artificial Sequence
  Description of Artificial Sequence: Synthetic oligonucleotide
  Sense strand starting at position 74 SEQ ID NO: 3207
ggugaacaacuuugucauu

SEQ ID NO: 249189 - RNA, 19 nt, Artificial Sequence
  Description of Artificial Sequence: Synthetic oligonucleotide
  Antisense strand to SEQ ID NO: 249188
aaugacaaaguuguucacc

SEQ ID NO: 249190 - RNA, 19 nt, Artificial Sequence
  Description of Artificial Sequence: Synthetic oligonucleotide
  Sense strand starting at position 291 SEQ ID NO: 3207
agagccuuucuguauagac

SEQ ID NO: 249191 - RNA, 19 nt, Artificial Sequence
  Description of Artificial Sequence: Synthetic oligonucleotide
  Antisense strand to SEQ ID NO: 249190
gucuauacagaaaggcucu

SEQ ID NO: 249192 - RNA, 19 nt, Artificial Sequence
  Description of Artificial Sequence: Synthetic oligonucleotide
  Sense strand starting at position 300 SEQ ID NO: 3207
cuguauagacuguagcuaa

SEQ ID NO: 249193 - RNA, 19 nt, Artificial Sequence
  Description of Artificial Sequence: Synthetic oligonucleotide
  Antisense strand to SEQ ID NO: 249192
uuagcuacagucuauacag

SEQ ID NO: 249194 - RNA, 19 nt, Artificial Sequence
  Description of Artificial Sequence: Synthetic oligonucleotide
  Sense strand starting at position 483 SEQ ID NO: 3207
ggaacaguuaagcagcauu

SEQ ID NO: 249195 - RNA, 19 nt, Artificial Sequence
  Description of Artificial Sequence: Synthetic oligonucleotide
  Antisense strand to SEQ ID NO: 249194
aaugcugcuuaacuguucc

SEQ ID NO: 249196 - RNA, 19 nt, Artificial Sequence
  Description of Artificial Sequence: Synthetic oligonucleotide
  Sense strand starting at position 547 SEQ ID NO: 3207
uggcaaguggaguaauaua

SEQ ID NO: 249197 - RNA, 19 nt, Artificial Sequence
  Description of Artificial Sequence: Synthetic oligonucleotide
  Antisense strand to SEQ ID NO: 249196
uauauuacuccacuugcca

SEQ ID NO: 249198 - RNA, 19 nt, Artificial Sequence
  Description of Artificial Sequence: Synthetic oligonucleotide
  Sense strand starting at position 641 SEQ ID NO: 3207
ugugguuuaguguagagaa

SEQ ID NO: 249199 - RNA, 19 nt, Artificial Sequence
  Description of Artificial Sequence: Synthetic oligonucleotide
  Antisense strand to SEQ ID NO: 249198
uucucuacacuaaaccaca

SEQ ID NO: 249200 - RNA, 19 nt, Artificial Sequence
  Description of Artificial Sequence: Synthetic oligonucleotide
  Sense strand starting at position 703 SEQ ID NO: 3207
uuacauagcugugucauuu

SEQ ID NO: 249201 - RNA, 19 nt, Artificial Sequence
  Description of Artificial Sequence: Synthetic oligonucleotide
  Antisense strand to SEQ ID NO: 249200
aaaugacacagcuauguaa

SEQ ID NO: 249202 - RNA, 19 nt, Artificial Sequence
  Description of Artificial Sequence: Synthetic oligonucleotide
  Sense strand starting at position 786 SEQ ID NO: 3207
agggaauuaugauaauaag

SEQ ID NO: 249203 - RNA, 19 nt, Artificial Sequence
  Description of Artificial Sequence: Synthetic oligonucleotide
  Antisense strand to SEQ ID NO: 249202
cuuauuaucauaauucccu

SEQ ID NO: 249204 - RNA, 19 nt, Artificial Sequence
  Description of Artificial Sequence: Synthetic oligonucleotide
  Sense strand starting at position 860 SEQ ID NO: 3207
ggauacaaguuuccuauau

SEQ ID NO: 249205 - RNA, 19 nt, Artificial Sequence
  Description of Artificial Sequence: Synthetic oligonucleotide
  Antisense strand to SEQ ID NO: 249204
auauaggaaacuuguaucc

SEQ ID NO: 249206 - RNA, 19 nt, Artificial Sequence
  Description of Artificial Sequence: Synthetic oligonucleotide
  Sense strand starting at position 900 SEQ ID NO: 3207
guuugaugucugcucguau

SEQ ID NO: 249207 - RNA, 19 nt, Artificial Sequence
  Description of Artificial Sequence: Synthetic oligonucleotide
  Antisense strand to SEQ ID NO: 249206
auacgagcagacaucaaac

SEQ ID NO: 249208 - RNA, 19 nt, Artificial Sequence
  Description of Artificial Sequence: Synthetic oligonucleotide
  Sense strand starting at position 903 SEQ ID NO: 3207
ugaugucugcucguauggu

SEQ ID NO: 249209 - RNA, 19 nt, Artificial Sequence
  Description of Artificial Sequence: Synthetic oligonucleotide
  Antisense strand to SEQ ID NO: 249208
accauacgagcagacauca

SEQ ID NO: 249210 - RNA, 19 nt, Artificial Sequence
  Description of Artificial Sequence: Synthetic oligonucleotide
  Sense strand starting at position 932 SEQ ID NO: 3207
auacuauuguuaccugaua

SEQ ID NO: 249211 - RNA, 19 nt, Artificial Sequence
  Description of Artificial Sequence: Synthetic oligonucleotide
  Antisense strand to SEQ ID NO: 249210
uaucagguaacaauaguau

SEQ ID NO: 249212 - RNA, 19 nt, Artificial Sequence
  Description of Artificial Sequence: Synthetic oligonucleotide
  Sense strand starting at position 1266 SEQ ID NO: 3207
ugguguaaauacuuuaaga

SEQ ID NO: 249213 - RNA, 19 nt, Artificial Sequence
  Description of Artificial Sequence: Synthetic oligonucleotide
  Antisense strand to SEQ ID NO: 249212
ucuuaaaguauuuacacca

SEQ ID NO: 249214 - RNA, 19 nt, Artificial Sequence
  Description of Artificial Sequence: Synthetic oligonucleotide
  Sense strand starting at position 1268 SEQ ID NO: 3207
guguaaauacuuuaagacu

SEQ ID NO: 249215 - RNA, 19 nt, Artificial Sequence
  Description of Artificial Sequence: Synthetic oligonucleotide
  Antisense strand to SEQ ID NO: 249214
agucuuaaaguauuuacac

SEQ ID NO: 249216 - RNA, 19 nt, Artificial Sequence
  Description of Artificial Sequence: Synthetic oligonucleotide
  Sense strand starting at position 1354 SEQ ID NO: 3207
ccuguuauauaagcucaga

SEQ ID NO: 249217 - RNA, 19 nt, Artificial Sequence
  Description of Artificial Sequence: Synthetic oligonucleotide
  Antisense strand to SEQ ID NO: 249216
ucugagcuuauauaacagg

SEQ ID NO: 249218 - RNA, 19 nt, Artificial Sequence
  Description of Artificial Sequence: Synthetic oligonucleotide
  Sense strand starting at position 1357 SEQ ID NO: 3207
guuauauaagcucagagau

SEQ ID NO: 249219 - RNA, 19 nt, Artificial Sequence
  Description of Artificial Sequence: Synthetic oligonucleotide
  Antisense strand to SEQ ID NO: 249218
aucucugagcuuauauaac

SEQ ID NO: 249220 - RNA, 19 nt, Artificial Sequence
  Description of Artificial Sequence: Synthetic oligonucleotide
  Sense strand starting at position 1387 SEQ ID NO: 3207
uucucaguugcagaaguau

SEQ ID NO: 249221 - RNA, 19 nt, Artificial Sequence
  Description of Artificial Sequence: Synthetic oligonucleotide
  Antisense strand to SEQ ID NO: 249220
auacuucugcaacugagaa

SEQ ID NO: 249222 - RNA, 19 nt, Artificial Sequence
  Description of Artificial Sequence: Synthetic oligonucleotide
  Sense strand starting at position 1831 SEQ ID NO: 3207
cccuguuucccauaaggaa

SEQ ID NO: 249223 - RNA, 19 nt, Artificial Sequence
  Description of Artificial Sequence: Synthetic oligonucleotide
  Antisense strand to SEQ ID NO: 249222
uuccuuaugggaaacaggg

SEQ ID NO: 249224 - RNA, 19 nt, Artificial Sequence
  Description of Artificial Sequence: Synthetic oligonucleotide
  Sense strand starting at position 2060 SEQ ID NO: 3207
ugaugugauuggucacuua

SEQ ID NO: 249225 - RNA, 19 nt, Artificial Sequence
  Description of Artificial Sequence: Synthetic oligonucleotide
  Antisense strand to SEQ ID NO: 249224
uaagugaccaaucacauca

SEQ ID NO: 249226 - RNA, 19 nt, Artificial Sequence
  Description of Artificial Sequence: Synthetic oligonucleotide
  Sense strand starting at position 2134 SEQ ID NO: 3207
ggaggucuuucuuuaccca

SEQ ID NO: 249227 - RNA, 19 nt, Artificial Sequence
  Description of Artificial Sequence: Synthetic oligonucleotide
  Antisense strand to SEQ ID NO: 249226
uggguaaagaaagaccucc

SEQ ID NO: 249228 - RNA, 19 nt, Artificial Sequence
  Description of Artificial Sequence: Synthetic oligonucleotide
  Sense strand starting at position 2249 SEQ ID NO: 3207
gcauaaucuuacuuaagag

SEQ ID NO: 249229 - RNA, 19 nt, Artificial Sequence
  Description of Artificial Sequence: Synthetic oligonucleotide
  Antisense strand to SEQ ID NO: 249228
cucuuaaguaagauuaugc

SEQ ID NO: 249230 - RNA, 19 nt, Artificial Sequence
  Description of Artificial Sequence: Synthetic oligonucleotide
  Sense strand starting at position 2333 SEQ ID NO: 3207
cauguugaagugugagaua

SEQ ID NO: 249231 - RNA, 19 nt, Artificial Sequence
  Description of Artificial Sequence: Synthetic oligonucleotide
  Antisense strand to SEQ ID NO: 249230
uaucucacacuucaacaug

SEQ ID NO: 249232 - RNA, 19 nt, Artificial Sequence
  Description of Artificial Sequence: Synthetic oligonucleotide
  Sense strand starting at position 2400 SEQ ID NO: 3207
uuauuuggauaaggacuua

SEQ ID NO: 249233 - RNA, 19 nt, Artificial Sequence
  Description of Artificial Sequence: Synthetic oligonucleotide
  Antisense strand to SEQ ID NO: 249232
uaaguccuuauccaaauaa

SEQ ID NO: 249234 - RNA, 19 nt, Artificial Sequence
  Description of Artificial Sequence: Synthetic oligonucleotide
  Sense strand starting at position 2597 SEQ ID NO: 3207
uuaauuguucuguaccuga

SEQ ID NO: 249235 - RNA, 19 nt, Artificial Sequence
  Description of Artificial Sequence: Synthetic oligonucleotide
  Antisense strand to SEQ ID NO: 249234
ucagguacagaacaauuaa

SEQ ID NO: 249236 - RNA, 19 nt, Artificial Sequence
  Description of Artificial Sequence: Synthetic oligonucleotide
  Sense strand starting at position 2602 SEQ ID NO: 3207
uguucuguaccugauacuu

SEQ ID NO: 249237 - RNA, 19 nt, Artificial Sequence
  Description of Artificial Sequence: Synthetic oligonucleotide
  Antisense strand to SEQ ID NO: 249236
aaguaucagguacagaaca

SEQ ID NO: 249238 - RNA, 19 nt, Artificial Sequence
  Description of Artificial Sequence: Synthetic oligonucleotide
  Sense strand starting at position 2677 SEQ ID NO: 3207
ugauguuuagaagauguuu

SEQ ID NO: 249239 - RNA, 19 nt, Artificial Sequence
  Description of Artificial Sequence: Synthetic oligonucleotide
  Antisense strand to SEQ ID NO: 249238
aaacaucuucuaaacauca

SEQ ID NO: 249240 - RNA, 19 nt, Artificial Sequence
  Description of Artificial Sequence: Synthetic oligonucleotide
  Sense strand starting at position 2696 SEQ ID NO: 3207
uccugaucagugugaugaa

SEQ ID NO: 249241 - RNA, 19 nt, Artificial Sequence
  Description of Artificial Sequence: Synthetic oligonucleotide
  Antisense strand to SEQ ID NO: 249240
uucaucacacugaucagga

SEQ ID NO: 249242 - RNA, 19 nt, Artificial Sequence
  Description of Artificial Sequence: Synthetic oligonucleotide
  Sense strand starting at position 2771 SEQ ID NO: 3207
aauaguguuuagcuggaaa

SEQ ID NO: 249243 - RNA, 19 nt, Artificial Sequence
  Description of Artificial Sequence: Synthetic oligonucleotide
  Antisense strand to SEQ ID NO: 249242
uuuccagcuaaacacuauu

SEQ ID NO: 249244 - RNA, 19 nt, Artificial Sequence
  Description of Artificial Sequence: Synthetic oligonucleotide
  Sense strand starting at position 2824 SEQ ID NO: 3207
ugugguauggcuuugugca

SEQ ID NO: 249245 - RNA, 19 nt, Artificial Sequence
  Description of Artificial Sequence: Synthetic oligonucleotide
  Antisense strand to SEQ ID NO: 249244
ugcacaaagccauaccaca

SEQ ID NO: 249246 - RNA, 19 nt, Artificial Sequence
  Description of Artificial Sequence: Synthetic oligonucleotide
  Sense strand starting at position 2930 SEQ ID NO: 3207
aaacaaagacugugauugu

SEQ ID NO: 249247 - RNA, 19 nt, Artificial Sequence
  Description of Artificial Sequence: Synthetic oligonucleotide
  Antisense strand to SEQ ID NO: 249246
acaaucacagucuuuguuu

SEQ ID NO: 249248 - RNA, 19 nt, Artificial Sequence
  Description of Artificial Sequence: Synthetic oligonucleotide
  Sense strand starting at position 3184 SEQ ID NO: 3207
ggauuuguggugugaugcu

SEQ ID NO: 249249 - RNA, 19 nt, Artificial Sequence
  Description of Artificial Sequence: Synthetic oligonucleotide
  Antisense strand to SEQ ID NO: 249248
agcaucacaccacaaaucc

SEQ ID NO: 249250 - RNA, 19 nt, Artificial Sequence
  Description of Artificial Sequence: Synthetic oligonucleotide
  Sense strand starting at position 3212 SEQ ID NO: 3207
cauguacugguaggaauua

SEQ ID NO: 249251 - RNA, 19 nt, Artificial Sequence
  Description of Artificial Sequence: Synthetic oligonucleotide
  Antisense strand to SEQ ID NO: 249250
uaauuccuaccaguacaug

SEQ ID NO: 249252 - RNA, 19 nt, Artificial Sequence
  Description of Artificial Sequence: Synthetic oligonucleotide
  Sense strand starting at position 3328 SEQ ID NO: 3207
gcagaagcacuugagugua

SEQ ID NO: 249253 - RNA, 19 nt, Artificial Sequence
  Description of Artificial Sequence: Synthetic oligonucleotide
  Antisense strand to SEQ ID NO: 249252
uacacucaagugcuucugc

SEQ ID NO: 249254 - RNA, 19 nt, Artificial Sequence
  Description of Artificial Sequence: Synthetic oligonucleotide
  Sense strand starting at position 3679 SEQ ID NO: 3207
cauauuauaguaggcaaga

SEQ ID NO: 249255 - RNA, 19 nt, Artificial Sequence
  Description of Artificial Sequence: Synthetic oligonucleotide
  Antisense strand to SEQ ID NO: 249254
ucuugccuacuauaauaug

SEQ ID NO: 249256 - RNA, 19 nt, Artificial Sequence
  Description of Artificial Sequence: Synthetic oligonucleotide
  Sense strand starting at position 3849 SEQ ID NO: 3207
cuugcuauggucuauaaac

SEQ ID NO: 249257 - RNA, 19 nt, Artificial Sequence
  Description of Artificial Sequence: Synthetic oligonucleotide
  Antisense strand to SEQ ID NO: 249256
guuuauagaccauagcaag

SEQ ID NO: 249258 - RNA, 19 nt, Artificial Sequence
  Description of Artificial Sequence: Synthetic oligonucleotide
  Sense strand starting at position 3851 SEQ ID NO: 3207
ugcuauggucuauaaacag

SEQ ID NO: 249259 - RNA, 19 nt, Artificial Sequence
  Description of Artificial Sequence: Synthetic oligonucleotide
  Antisense strand to SEQ ID NO: 249258
cuguuuauagaccauagca

SEQ ID NO: 249260 - RNA, 19 nt, Artificial Sequence
  Description of Artificial Sequence: Synthetic oligonucleotide
  Sense strand starting at position 3877 SEQ ID NO: 3207
uacugcugugaauauugua

SEQ ID NO: 249261 - RNA, 19 nt, Artificial Sequence
  Description of Artificial Sequence: Synthetic oligonucleotide
  Antisense strand to SEQ ID NO: 249260
uacaauauucacagcagua

SEQ ID NO: 249262 - RNA, 19 nt, Artificial Sequence
  Description of Artificial Sequence: Synthetic oligonucleotide
  Sense strand starting at position 3936 SEQ ID NO: 3207
auuacaauagccugagcau

SEQ ID NO: 249263 - RNA, 19 nt, Artificial Sequence
  Description of Artificial Sequence: Synthetic oligonucleotide
  Antisense strand to SEQ ID NO: 249262
augcucaggcuauuguaau

SEQ ID NO: 249264 - RNA, 19 nt, Artificial Sequence
  Description of Artificial Sequence: Synthetic oligonucleotide
  Sense strand starting at position 3937 SEQ ID NO: 3207
uuacaauagccugagcauu

SEQ ID NO: 249265 - RNA, 19 nt, Artificial Sequence
  Description of Artificial Sequence: Synthetic oligonucleotide
  Antisense strand to SEQ ID NO: 249264
aaugcucaggcuauuguaa

SEQ ID NO: 249266 - RNA, 19 nt, Artificial Sequence
  Description of Artificial Sequence: Synthetic oligonucleotide
  Sense strand starting at position 3960 SEQ ID NO: 3207
gucauuucugguugaaguu

SEQ ID NO: 249267 - RNA, 19 nt, Artificial Sequence
  Description of Artificial Sequence: Synthetic oligonucleotide
  Antisense strand to SEQ ID NO: 249266
aacuucaaccagaaaugac

SEQ ID NO: 249268 - RNA, 19 nt, Artificial Sequence
  Description of Artificial Sequence: Synthetic oligonucleotide
  Sense strand starting at position 185 SEQ ID NO: 3208
acucuaauuggaugaguga

SEQ ID NO: 249269 - RNA, 19 nt, Artificial Sequence
  Description of Artificial Sequence: Synthetic oligonucleotide
  Antisense strand to SEQ ID NO: 249268
ucacucauccaauuagagu

SEQ ID NO: 249270 - RNA, 19 nt, Artificial Sequence
  Description of Artificial Sequence: Synthetic oligonucleotide
  Sense strand starting at position 188 SEQ ID NO: 3208
cuaauuggaugagugauua

SEQ ID NO: 249271 - RNA, 19 nt, Artificial Sequence
  Description of Artificial Sequence: Synthetic oligonucleotide
  Antisense strand to SEQ ID NO: 249270
uaaucacucauccaauuag

SEQ ID NO: 249272 - RNA, 19 nt, Artificial Sequence
  Description of Artificial Sequence: Synthetic oligonucleotide
  Sense strand starting at position 249 SEQ ID NO: 3208
gacggaccuugcuuuaaua

SEQ ID NO: 249273 - RNA, 19 nt, Artificial Sequence
  Description of Artificial Sequence: Synthetic oligonucleotide
  Antisense strand to SEQ ID NO: 249272
uauuaaagcaagguccguc

SEQ ID NO: 249274 - RNA, 19 nt, Artificial Sequence
  Description of Artificial Sequence: Synthetic oligonucleotide
  Sense strand starting at position 291 SEQ ID NO: 3208
uagcauuuacaccguugau

SEQ ID NO: 249275 - RNA, 19 nt, Artificial Sequence
  Description of Artificial Sequence: Synthetic oligonucleotide
  Antisense strand to SEQ ID NO: 249274
aucaacgguguaaaugcua

SEQ ID NO: 249276 - RNA, 19 nt, Artificial Sequence
  Description of Artificial Sequence: Synthetic oligonucleotide
  Sense strand starting at position 314 SEQ ID NO: 3208
ggaagcaauucuucuuuaa

SEQ ID NO: 249277 - RNA, 19 nt, Artificial Sequence
  Description of Artificial Sequence: Synthetic oligonucleotide
  Antisense strand to SEQ ID NO: 249276
uuaaagaagaauugcuucc

SEQ ID NO: 249278 - RNA, 19 nt, Artificial Sequence
  Description of Artificial Sequence: Synthetic oligonucleotide
  Sense strand starting at position 318 SEQ ID NO: 3208
gcaauucuucuuuaaugga

SEQ ID NO: 249279 - RNA, 19 nt, Artificial Sequence
  Description of Artificial Sequence: Synthetic oligonucleotide
  Antisense strand to SEQ ID NO: 249278
uccauuaaagaagaauugc

SEQ ID NO: 249280 - RNA, 19 nt, Artificial Sequence
  Description of Artificial Sequence: Synthetic oligonucleotide
  Sense strand starting at position 325 SEQ ID NO: 3208
uucuuuaauggaugcugaa

SEQ ID NO: 249281 - RNA, 19 nt, Artificial Sequence
  Description of Artificial Sequence: Synthetic oligonucleotide
  Antisense strand to SEQ ID NO: 249280
uucagcauccauuaaagaa

SEQ ID NO: 249282 - RNA, 19 nt, Artificial Sequence
  Description of Artificial Sequence: Synthetic oligonucleotide
  Sense strand starting at position 496 SEQ ID NO: 3208
aagugugguuucuuccacu

SEQ ID NO: 249283 - RNA, 19 nt, Artificial Sequence
  Description of Artificial Sequence: Synthetic oligonucleotide
  Antisense strand to SEQ ID NO: 249282
aguggaagaaaccacacuu

SEQ ID NO: 249284 - RNA, 19 nt, Artificial Sequence
  Description of Artificial Sequence: Synthetic oligonucleotide
  Sense strand starting at position 530 SEQ ID NO: 3208
uguaucuguguguuuguua

SEQ ID NO: 249285 - RNA, 19 nt, Artificial Sequence
  Description of Artificial Sequence: Synthetic oligonucleotide
  Antisense strand to SEQ ID NO: 249284
uaacaaacacacagauaca

SEQ ID NO: 249286 - RNA, 19 nt, Artificial Sequence
  Description of Artificial Sequence: Synthetic oligonucleotide
  Sense strand starting at position 563 SEQ ID NO: 3208
gaguuaaagucauuggguc

SEQ ID NO: 249287 - RNA, 19 nt, Artificial Sequence
  Description of Artificial Sequence: Synthetic oligonucleotide
  Antisense strand to SEQ ID NO: 249286
gacccaaugacuuuaacuc

SEQ ID NO: 249288 - RNA, 19 nt, Artificial Sequence
  Description of Artificial Sequence: Synthetic oligonucleotide
  Sense strand starting at position 567 SEQ ID NO: 3208
uaaagucauuggguccaga

SEQ ID NO: 249289 - RNA, 19 nt, Artificial Sequence
  Description of Artificial Sequence: Synthetic oligonucleotide
  Antisense strand to SEQ ID NO: 249288
ucuggacccaaugacuuua

SEQ ID NO: 249290 - RNA, 19 nt, Artificial Sequence
  Description of Artificial Sequence: Synthetic oligonucleotide
  Sense strand starting at position 845 SEQ ID NO: 3208
acguguuacuaguccagua

SEQ ID NO: 249291 - RNA, 19 nt, Artificial Sequence
  Description of Artificial Sequence: Synthetic oligonucleotide
  Antisense strand to SEQ ID NO: 249290
uacuggacuaguaacacgu

SEQ ID NO: 249292 - RNA, 19 nt, Artificial Sequence
  Description of Artificial Sequence: Synthetic oligonucleotide
  Sense strand starting at position 847 SEQ ID NO: 3208
guguuacuaguccaguaag

SEQ ID NO: 249293 - RNA, 19 nt, Artificial Sequence
  Description of Artificial Sequence: Synthetic oligonucleotide
  Antisense strand to SEQ ID NO: 249292
cuuacuggacuaguaacac

SEQ ID NO: 249294 - RNA, 19 nt, Artificial Sequence
  Description of Artificial Sequence: Synthetic oligonucleotide
  Sense strand starting at position 850 SEQ ID NO: 3208
uuacuaguccaguaaguga

SEQ ID NO: 249295 - RNA, 19 nt, Artificial Sequence
  Description of Artificial Sequence: Synthetic oligonucleotide
  Antisense strand to SEQ ID NO: 249294
ucacuuacuggacuaguaa

SEQ ID NO: 249296 - RNA, 19 nt, Artificial Sequence
  Description of Artificial Sequence: Synthetic oligonucleotide
  Sense strand starting at position 983 SEQ ID NO: 3208
gaaguuuaccuguggcuau

SEQ ID NO: 249297 - RNA, 19 nt, Artificial Sequence
  Description of Artificial Sequence: Synthetic oligonucleotide
  Antisense strand to SEQ ID NO: 249296
auagccacagguaaacuuc

SEQ ID NO: 249298 - RNA, 19 nt, Artificial Sequence
  Description of Artificial Sequence: Synthetic oligonucleotide
  Sense strand starting at position 2003 SEQ ID NO: 3208
ccuucuuuccaaggugagu

SEQ ID NO: 249299 - RNA, 19 nt, Artificial Sequence
  Description of Artificial Sequence: Synthetic oligonucleotide
  Antisense strand to SEQ ID NO: 249298
acucaccuuggaaagaagg

SEQ ID NO: 249300 - RNA, 19 nt, Artificial Sequence
  Description of Artificial Sequence: Synthetic oligonucleotide
  Sense strand starting at position 2008 SEQ ID NO: 3208
uuuccaaggugagucuuua

SEQ ID NO: 249301 - RNA, 19 nt, Artificial Sequence
  Description of Artificial Sequence: Synthetic oligonucleotide
  Antisense strand to SEQ ID NO: 249300
uaaagacucaccuuggaaa

SEQ ID NO: 249302 - RNA, 19 nt, Artificial Sequence
  Description of Artificial Sequence: Synthetic oligonucleotide
  Sense strand starting at position 2030 SEQ ID NO: 3208
aguguucucccgcacucaa

SEQ ID NO: 249303 - RNA, 19 nt, Artificial Sequence
  Description of Artificial Sequence: Synthetic oligonucleotide
  Antisense strand to SEQ ID NO: 249302
uugagugcgggagaacacu

SEQ ID NO: 249304 - RNA, 19 nt, Artificial Sequence
  Description of Artificial Sequence: Synthetic oligonucleotide
  Sense strand starting at position 2768 SEQ ID NO: 3208
cugucccugccagaaagau

SEQ ID NO: 249305 - RNA, 19 nt, Artificial Sequence
  Description of Artificial Sequence: Synthetic oligonucleotide
  Antisense strand to SEQ ID NO: 249304
aucuuucuggcagggacag

SEQ ID NO: 249306 - RNA, 19 nt, Artificial Sequence
  Description of Artificial Sequence: Synthetic oligonucleotide
  Sense strand starting at position 2778 SEQ ID NO: 3208
cagaaagauccuuggcgca

SEQ ID NO: 249307 - RNA, 19 nt, Artificial Sequence
  Description of Artificial Sequence: Synthetic oligonucleotide
  Antisense strand to SEQ ID NO: 249306
ugcgccaaggaucuuucug

SEQ ID NO: 249308 - RNA, 19 nt, Artificial Sequence
  Description of Artificial Sequence: Synthetic oligonucleotide
  Sense strand starting at position 2780 SEQ ID NO: 3208
gaaagauccuuggcgcaca

SEQ ID NO: 249309 - RNA, 19 nt, Artificial Sequence
  Description of Artificial Sequence: Synthetic oligonucleotide
  Antisense strand to SEQ ID NO: 249308
ugugcgccaaggaucuuuc

SEQ ID NO: 249310 - RNA, 19 nt, Artificial Sequence
  Description of Artificial Sequence: Synthetic oligonucleotide
  Sense strand starting at position 3055 SEQ ID NO: 3208
gcgugugaucagcugcaga

SEQ ID NO: 249311 - RNA, 19 nt, Artificial Sequence
  Description of Artificial Sequence: Synthetic oligonucleotide
  Antisense strand to SEQ ID NO: 249310
ucugcagcugaucacacgc

SEQ ID NO: 249312 - RNA, 19 nt, Artificial Sequence
  Description of Artificial Sequence: Synthetic oligonucleotide
  Sense strand starting at position 3277 SEQ ID NO: 3208
agcaaaugcugcucucuga

SEQ ID NO: 249313 - RNA, 19 nt, Artificial Sequence
  Description of Artificial Sequence: Synthetic oligonucleotide
  Antisense strand to SEQ ID NO: 249312
ucagagagcagcauuugcu

SEQ ID NO: 249314 - RNA, 19 nt, Artificial Sequence
  Description of Artificial Sequence: Synthetic oligonucleotide
  Sense strand starting at position 3281 SEQ ID NO: 3208
aaugcugcucucugaagga

SEQ ID NO: 249315 - RNA, 19 nt, Artificial Sequence
  Description of Artificial Sequence: Synthetic oligonucleotide
  Antisense strand to SEQ ID NO: 249314
uccuucagagagcagcauu

SEQ ID NO: 249316 - RNA, 19 nt, Artificial Sequence
  Description of Artificial Sequence: Synthetic oligonucleotide
  Sense strand starting at position 3305 SEQ ID NO: 3208
aguacaauaugucucugua

SEQ ID NO: 249317 - RNA, 19 nt, Artificial Sequence
  Description of Artificial Sequence: Synthetic oligonucleotide
  Antisense strand to SEQ ID NO: 249316
uacagagacauauuguacu

SEQ ID NO: 249318 - RNA, 19 nt, Artificial Sequence
  Description of Artificial Sequence: Synthetic oligonucleotide
  Sense strand starting at position 3308 SEQ ID NO: 3208
acaauaugucucuguaacu

SEQ ID NO: 249319 - RNA, 19 nt, Artificial Sequence
  Description of Artificial Sequence: Synthetic oligonucleotide
  Antisense strand to SEQ ID NO: 249318
aguuacagagacauauugu

SEQ ID NO: 249320 - RNA, 19 nt, Artificial Sequence
  Description of Artificial Sequence: Synthetic oligonucleotide
  Sense strand starting at position 3387 SEQ ID NO: 3208
ggcucucagauaggcauau

SEQ ID NO: 249321 - RNA, 19 nt, Artificial Sequence
  Description of Artificial Sequence: Synthetic oligonucleotide
  Antisense strand to SEQ ID NO: 249320
auaugccuaucugagagcc

SEQ ID NO: 249322 - RNA, 19 nt, Artificial Sequence
  Description of Artificial Sequence: Synthetic oligonucleotide
  Sense strand starting at position 3388 SEQ ID NO: 3208
gcucucagauaggcauauu

SEQ ID NO: 249323 - RNA, 19 nt, Artificial Sequence
  Description of Artificial Sequence: Synthetic oligonucleotide
  Antisense strand to SEQ ID NO: 249322
aauaugccuaucugagagc

SEQ ID NO: 249324 - RNA, 19 nt, Artificial Sequence
  Description of Artificial Sequence: Synthetic oligonucleotide
  Sense strand starting at position 3486 SEQ ID NO: 3208
ugcaaauggcucuauuaga

SEQ ID NO: 249325 - RNA, 19 nt, Artificial Sequence
  Description of Artificial Sequence: Synthetic oligonucleotide
  Antisense strand to SEQ ID NO: 249324
ucuaauagagccauuugca

SEQ ID NO: 249326 - RNA, 19 nt, Artificial Sequence
  Description of Artificial Sequence: Synthetic oligonucleotide
  Sense strand starting at position 3507 SEQ ID NO: 3208
ggcucagaauaucuagagu

SEQ ID NO: 249327 - RNA, 19 nt, Artificial Sequence
  Description of Artificial Sequence: Synthetic oligonucleotide
  Antisense strand to SEQ ID NO: 249326
acucuagauauucugagcc

SEQ ID NO: 249328 - RNA, 19 nt, Artificial Sequence
  Description of Artificial Sequence: Synthetic oligonucleotide
  Sense strand starting at position 3520 SEQ ID NO: 3208
uagaguuaaugugugccua

SEQ ID NO: 249329 - RNA, 19 nt, Artificial Sequence
  Description of Artificial Sequence: Synthetic oligonucleotide
  Antisense strand to SEQ ID NO: 249328
uaggcacacauuaacucua

SEQ ID NO: 249330 - RNA, 19 nt, Artificial Sequence
  Description of Artificial Sequence: Synthetic oligonucleotide
  Sense strand starting at position 3521 SEQ ID NO: 3208
agaguuaaugugugccuau

SEQ ID NO: 249331 - RNA, 19 nt, Artificial Sequence
  Description of Artificial Sequence: Synthetic oligonucleotide
  Antisense strand to SEQ ID NO: 249330
auaggcacacauuaacucu

SEQ ID NO: 249332 - RNA, 19 nt, Artificial Sequence
  Description of Artificial Sequence: Synthetic oligonucleotide
  Sense strand starting at position 3621 SEQ ID NO: 3208
uagagugcccaugaguaaa

SEQ ID NO: 249333 - RNA, 19 nt, Artificial Sequence
  Description of Artificial Sequence: Synthetic oligonucleotide
  Antisense strand to SEQ ID NO: 249332
uuuacucaugggcacucua

SEQ ID NO: 249334 - RNA, 19 nt, Artificial Sequence
  Description of Artificial Sequence: Synthetic oligonucleotide
  Sense strand starting at position 3623 SEQ ID NO: 3208
gagugcccaugaguaaaua

SEQ ID NO: 249335 - RNA, 19 nt, Artificial Sequence
  Description of Artificial Sequence: Synthetic oligonucleotide
  Antisense strand to SEQ ID NO: 249334
uauuuacucaugggcacuc

SEQ ID NO: 249336 - RNA, 19 nt, Artificial Sequence
  Description of Artificial Sequence: Synthetic oligonucleotide
  Sense strand starting at position 3702 SEQ ID NO: 3208
ucagucagcccagauacau

SEQ ID NO: 249337 - RNA, 19 nt, Artificial Sequence
  Description of Artificial Sequence: Synthetic oligonucleotide
  Antisense strand to SEQ ID NO: 249336
auguaucugggcugacuga

SEQ ID NO: 249338 - RNA, 19 nt, Artificial Sequence
  Description of Artificial Sequence: Synthetic oligonucleotide
  Sense strand starting at position 3776 SEQ ID NO: 3208
gcuauaagauucccaugga

SEQ ID NO: 249339 - RNA, 19 nt, Artificial Sequence
  Description of Artificial Sequence: Synthetic oligonucleotide
  Antisense strand to SEQ ID NO: 249338
uccaugggaaucuuauagc

SEQ ID NO: 249340 - RNA, 19 nt, Artificial Sequence
  Description of Artificial Sequence: Synthetic oligonucleotide
  Sense strand starting at position 3777 SEQ ID NO: 3208
cuauaagauucccauggaa

SEQ ID NO: 249341 - RNA, 19 nt, Artificial Sequence
  Description of Artificial Sequence: Synthetic oligonucleotide
  Antisense strand to SEQ ID NO: 249340
uuccaugggaaucuuauag

SEQ ID NO: 249342 - RNA, 19 nt, Artificial Sequence
  Description of Artificial Sequence: Synthetic oligonucleotide
  Sense strand starting at position 3893 SEQ ID NO: 3208
gguugucagccauaagcag

SEQ ID NO: 249343 - RNA, 19 nt, Artificial Sequence
  Description of Artificial Sequence: Synthetic oligonucleotide
  Antisense strand to SEQ ID NO: 249342
cugcuuauggcugacaacc

SEQ ID NO: 249344 - RNA, 19 nt, Artificial Sequence
  Description of Artificial Sequence: Synthetic oligonucleotide
  Sense strand starting at position 3917 SEQ ID NO: 3208
ucucacuguuauuugguua

SEQ ID NO: 249345 - RNA, 19 nt, Artificial Sequence
  Description of Artificial Sequence: Synthetic oligonucleotide
  Antisense strand to SEQ ID NO: 249344
uaaccaaauaacagugaga

SEQ ID NO: 249346 - RNA, 19 nt, Artificial Sequence
  Description of Artificial Sequence: Synthetic oligonucleotide
  Sense strand starting at position 3967 SEQ ID NO: 3208
cugccaguucgcugauaaa

SEQ ID NO: 249347 - RNA, 19 nt, Artificial Sequence
  Description of Artificial Sequence: Synthetic oligonucleotide
  Antisense strand to SEQ ID NO: 249346
uuuaucagcgaacuggcag

SEQ ID NO: 249348 - RNA, 19 nt, Artificial Sequence
  Description of Artificial Sequence: Synthetic oligonucleotide
  Sense strand starting at position 161 SEQ ID NO: 3209
ucagaucaagcaugacaca

SEQ ID NO: 249349 - RNA, 19 nt, Artificial Sequence
  Description of Artificial Sequence: Synthetic oligonucleotide
  Antisense strand to SEQ ID NO: 249348
ugugucaugcuugaucuga

SEQ ID NO: 249350 - RNA, 19 nt, Artificial Sequence
  Description of Artificial Sequence: Synthetic oligonucleotide
  Sense strand starting at position 308 SEQ ID NO: 3209
guggcuuauccugggcagu

SEQ ID NO: 249351 - RNA, 19 nt, Artificial Sequence
  Description of Artificial Sequence: Synthetic oligonucleotide
  Antisense strand to SEQ ID NO: 249350
acugcccaggauaagccac

SEQ ID NO: 249352 - RNA, 19 nt, Artificial Sequence
  Description of Artificial Sequence: Synthetic oligonucleotide
  Sense strand starting at position 309 SEQ ID NO: 3209
uggcuuauccugggcaguu

SEQ ID NO: 249353 - RNA, 19 nt, Artificial Sequence
  Description of Artificial Sequence: Synthetic oligonucleotide
  Antisense strand to SEQ ID NO: 249352
aacugcccaggauaagcca

SEQ ID NO: 249354 - RNA, 19 nt, Artificial Sequence
  Description of Artificial Sequence: Synthetic oligonucleotide
  Sense strand starting at position 310 SEQ ID NO: 3209
ggcuuauccugggcaguua

SEQ ID NO: 249355 - RNA, 19 nt, Artificial Sequence
  Description of Artificial Sequence: Synthetic oligonucleotide
  Antisense strand to SEQ ID NO: 249354
uaacugcccaggauaagcc

SEQ ID NO: 249356 - RNA, 19 nt, Artificial Sequence
  Description of Artificial Sequence: Synthetic oligonucleotide
  Sense strand starting at position 450 SEQ ID NO: 3209
gugccuuagggugacuaga

SEQ ID NO: 249357 - RNA, 19 nt, Artificial Sequence
  Description of Artificial Sequence: Synthetic oligonucleotide
  Antisense strand to SEQ ID NO: 249356
ucuagucacccuaaggcac

SEQ ID NO: 249358 - RNA, 19 nt, Artificial Sequence
  Description of Artificial Sequence: Synthetic oligonucleotide
  Sense strand starting at position 532 SEQ ID NO: 3209
cagccuugucaaggugaua

SEQ ID NO: 249359 - RNA, 19 nt, Artificial Sequence
  Description of Artificial Sequence: Synthetic oligonucleotide
  Antisense strand to SEQ ID NO: 249358
uaucaccuugacaaggcug

SEQ ID NO: 249360 - RNA, 19 nt, Artificial Sequence
  Description of Artificial Sequence: Synthetic oligonucleotide
  Sense strand starting at position 543 SEQ ID NO: 3209
aggugauaagcaugcguuu

SEQ ID NO: 249361 - RNA, 19 nt, Artificial Sequence
  Description of Artificial Sequence: Synthetic oligonucleotide
  Antisense strand to SEQ ID NO: 249360
aaacgcaugcuuaucaccu

SEQ ID NO: 249362 - RNA, 19 nt, Artificial Sequence
  Description of Artificial Sequence: Synthetic oligonucleotide
  Sense strand starting at position 545 SEQ ID NO: 3209
gugauaagcaugcguuucu

SEQ ID NO: 249363 - RNA, 19 nt, Artificial Sequence
  Description of Artificial Sequence: Synthetic oligonucleotide
  Antisense strand to SEQ ID NO: 249362
agaaacgcaugcuuaucac

SEQ ID NO: 249364 - RNA, 19 nt, Artificial Sequence
  Description of Artificial Sequence: Synthetic oligonucleotide
  Sense strand starting at position 567 SEQ ID NO: 3209
gcacucuauacaggugagu

SEQ ID NO: 249365 - RNA, 19 nt, Artificial Sequence
  Description of Artificial Sequence: Synthetic oligonucleotide
  Antisense strand to SEQ ID NO: 249364
acucaccuguauagagugc

SEQ ID NO: 249366 - RNA, 19 nt, Artificial Sequence
  Description of Artificial Sequence: Synthetic oligonucleotide
  Sense strand starting at position 737 SEQ ID NO: 3209
gcagcaaucuggccacaga

SEQ ID NO: 249367 - RNA, 19 nt, Artificial Sequence
  Description of Artificial Sequence: Synthetic oligonucleotide
  Antisense strand to SEQ ID NO: 249366
ucuguggccagauugcugc

SEQ ID NO: 249368 - RNA, 19 nt, Artificial Sequence
  Description of Artificial Sequence: Synthetic oligonucleotide
  Sense strand starting at position 776 SEQ ID NO: 3209
ggaguauugacacagcauu

SEQ ID NO: 249369 - RNA, 19 nt, Artificial Sequence
  Description of Artificial Sequence: Synthetic oligonucleotide
  Antisense strand to SEQ ID NO: 249368
aaugcugugucaauacucc

SEQ ID NO: 249370 - RNA, 19 nt, Artificial Sequence
  Description of Artificial Sequence: Synthetic oligonucleotide
  Sense strand starting at position 815 SEQ ID NO: 3209
gugaacuguuuauauccaa

SEQ ID NO: 249371 - RNA, 19 nt, Artificial Sequence
  Description of Artificial Sequence: Synthetic oligonucleotide
  Antisense strand to SEQ ID NO: 249370
uuggauauaaacaguucac

SEQ ID NO: 249372 - RNA, 19 nt, Artificial Sequence
  Description of Artificial Sequence: Synthetic oligonucleotide
  Sense strand starting at position 897 SEQ ID NO: 3209
uaccacuaaugguuggaaa

SEQ ID NO: 249373 - RNA, 19 nt, Artificial Sequence
  Description of Artificial Sequence: Synthetic oligonucleotide
  Antisense strand to SEQ ID NO: 249372
uuuccaaccauuaguggua

SEQ ID NO: 249374 - RNA, 19 nt, Artificial Sequence
  Description of Artificial Sequence: Synthetic oligonucleotide
  Sense strand starting at position 1048 SEQ ID NO: 3209
ggcgguauagacuguagga

SEQ ID NO: 249375 - RNA, 19 nt, Artificial Sequence
  Description of Artificial Sequence: Synthetic oligonucleotide
  Antisense strand to SEQ ID NO: 249374
uccuacagucuauaccgcc

SEQ ID NO: 249376 - RNA, 19 nt, Artificial Sequence
  Description of Artificial Sequence: Synthetic oligonucleotide
  Sense strand starting at position 1050 SEQ ID NO: 3209
cgguauagacuguaggaga

SEQ ID NO: 249377 - RNA, 19 nt, Artificial Sequence
  Description of Artificial Sequence: Synthetic oligonucleotide
  Antisense strand to SEQ ID NO: 249376
ucuccuacagucuauaccg

SEQ ID NO: 249378 - RNA, 19 nt, Artificial Sequence
  Description of Artificial Sequence: Synthetic oligonucleotide
  Sense strand starting at position 1234 SEQ ID NO: 3209
uugagaucauccuggagag

SEQ ID NO: 249379 - RNA, 19 nt, Artificial Sequence
  Description of Artificial Sequence: Synthetic oligonucleotide
  Antisense strand to SEQ ID NO: 249378
cucuccaggaugaucucaa

SEQ ID NO: 249380 - RNA, 19 nt, Artificial Sequence
  Description of Artificial Sequence: Synthetic oligonucleotide
  Sense strand starting at position 1304 SEQ ID NO: 3209
cuuggcacguauucuuaga

SEQ ID NO: 249381 - RNA, 19 nt, Artificial Sequence
  Description of Artificial Sequence: Synthetic oligonucleotide
  Antisense strand to SEQ ID NO: 249380
ucuaagaauacgugccaag

SEQ ID NO: 249382 - RNA, 19 nt, Artificial Sequence
  Description of Artificial Sequence: Synthetic oligonucleotide
  Sense strand starting at position 1309 SEQ ID NO: 3209
cacguauucuuagaggaga

SEQ ID NO: 249383 - RNA, 19 nt, Artificial Sequence
  Description of Artificial Sequence: Synthetic oligonucleotide
  Antisense strand to SEQ ID NO: 249382
ucuccucuaagaauacgug

SEQ ID NO: 249384 - RNA, 19 nt, Artificial Sequence
  Description of Artificial Sequence: Synthetic oligonucleotide
  Sense strand starting at position 1311 SEQ ID NO: 3209
cguauucuuagaggagaaa

SEQ ID NO: 249385 - RNA, 19 nt, Artificial Sequence
  Description of Artificial Sequence: Synthetic oligonucleotide
  Antisense strand to SEQ ID NO: 249384
uuucuccucuaagaauacg

SEQ ID NO: 249386 - RNA, 19 nt, Artificial Sequence
  Description of Artificial Sequence: Synthetic oligonucleotide
  Sense strand starting at position 1338 SEQ ID NO: 3209
ucacaaaggucagaucaca

SEQ ID NO: 249387 - RNA, 19 nt, Artificial Sequence
  Description of Artificial Sequence: Synthetic oligonucleotide
  Antisense strand to SEQ ID NO: 249386
ugugaucugaccuuuguga

SEQ ID NO: 249388 - RNA, 19 nt, Artificial Sequence
  Description of Artificial Sequence: Synthetic oligonucleotide
  Sense strand starting at position 1706 SEQ ID NO: 3209
ccucguagugccggaggaa

SEQ ID NO: 249389 - RNA, 19 nt, Artificial Sequence
  Description of Artificial Sequence: Synthetic oligonucleotide
  Antisense strand to SEQ ID NO: 249388
uuccuccggcacuacgagg

SEQ ID NO: 249390 - RNA, 19 nt, Artificial Sequence
  Description of Artificial Sequence: Synthetic oligonucleotide
  Sense strand starting at position 2832 SEQ ID NO: 3209
ugcgcuucgccucuggaau

SEQ ID NO: 249391 - RNA, 19 nt, Artificial Sequence
  Description of Artificial Sequence: Synthetic oligonucleotide
  Antisense strand to SEQ ID NO: 249390
auuccagaggcgaagcgca

SEQ ID NO: 249392 - RNA, 19 nt, Artificial Sequence
  Description of Artificial Sequence: Synthetic oligonucleotide
  Sense strand starting at position 2860 SEQ ID NO: 3209
aucucaugccgcggugaaa

SEQ ID NO: 249393 - RNA, 19 nt, Artificial Sequence
  Description of Artificial Sequence: Synthetic oligonucleotide
  Antisense strand to SEQ ID NO: 249392
uuucaccgcggcaugagau

SEQ ID NO: 249394 - RNA, 19 nt, Artificial Sequence
  Description of Artificial Sequence: Synthetic oligonucleotide
  Sense strand starting at position 2871 SEQ ID NO: 3209
cggugaaacuuugcucaag

SEQ ID NO: 249395 - RNA, 19 nt, Artificial Sequence
  Description of Artificial Sequence: Synthetic oligonucleotide
  Antisense strand to SEQ ID NO: 249394
cuugagcaaaguuucaccg

SEQ ID NO: 249396 - RNA, 19 nt, Artificial Sequence
  Description of Artificial Sequence: Synthetic oligonucleotide
  Sense strand starting at position 2872 SEQ ID NO: 3209
ggugaaacuuugcucaagu

SEQ ID NO: 249397 - RNA, 19 nt, Artificial Sequence
  Description of Artificial Sequence: Synthetic oligonucleotide
  Antisense strand to SEQ ID NO: 249396
acuugagcaaaguuucacc

SEQ ID NO: 249398 - RNA, 19 nt, Artificial Sequence
  Description of Artificial Sequence: Synthetic oligonucleotide
  Sense strand starting at position 2873 SEQ ID NO: 3209
gugaaacuuugcucaaguu

SEQ ID NO: 249399 - RNA, 19 nt, Artificial Sequence
  Description of Artificial Sequence: Synthetic oligonucleotide
  Antisense strand to SEQ ID NO: 249398
aacuugagcaaaguuucac

SEQ ID NO: 249400 - RNA, 19 nt, Artificial Sequence
  Description of Artificial Sequence: Synthetic oligonucleotide
  Sense strand starting at position 2947 SEQ ID NO: 3209
uggauucucgggcguuagu

SEQ ID NO: 249401 - RNA, 19 nt, Artificial Sequence
  Description of Artificial Sequence: Synthetic oligonucleotide
  Antisense strand to SEQ ID NO: 249400
acuaacgcccgagaaucca

SEQ ID NO: 249402 - RNA, 19 nt, Artificial Sequence
  Description of Artificial Sequence: Synthetic oligonucleotide
  Sense strand starting at position 2957 SEQ ID NO: 3209
ggcguuaguccgaaguuua

SEQ ID NO: 249403 - RNA, 19 nt, Artificial Sequence
  Description of Artificial Sequence: Synthetic oligonucleotide
  Antisense strand to SEQ ID NO: 249402
uaaacuucggacuaacgcc

SEQ ID NO: 249404 - RNA, 19 nt, Artificial Sequence
  Description of Artificial Sequence: Synthetic oligonucleotide
  Sense strand starting at position 2970 SEQ ID NO: 3209
aguuuaaguucccuucguu

SEQ ID NO: 249405 - RNA, 19 nt, Artificial Sequence
  Description of Artificial Sequence: Synthetic oligonucleotide
  Antisense strand to SEQ ID NO: 249404
aacgaagggaacuuaaacu

SEQ ID NO: 249406 - RNA, 19 nt, Artificial Sequence
  Description of Artificial Sequence: Synthetic oligonucleotide
  Sense strand starting at position 2992 SEQ ID NO: 3209
uccuuugcccuggaucgaa

SEQ ID NO: 249407 - RNA, 19 nt, Artificial Sequence
  Description of Artificial Sequence: Synthetic oligonucleotide
  Antisense strand to SEQ ID NO: 249406
uucgauccagggcaaagga

SEQ ID NO: 249408 - RNA, 19 nt, Artificial Sequence
  Description of Artificial Sequence: Synthetic oligonucleotide
  Sense strand starting at position 3501 SEQ ID NO: 3209
gguagagaguagaggaaua

SEQ ID NO: 249409 - RNA, 19 nt, Artificial Sequence
  Description of Artificial Sequence: Synthetic oligonucleotide
  Antisense strand to SEQ ID NO: 249408
uauuccucuacucucuacc

SEQ ID NO: 249410 - RNA, 19 nt, Artificial Sequence
  Description of Artificial Sequence: Synthetic oligonucleotide
  Sense strand starting at position 3705 SEQ ID NO: 3209
aaaguucuggcguggaaca

SEQ ID NO: 249411 - RNA, 19 nt, Artificial Sequence
  Description of Artificial Sequence: Synthetic oligonucleotide
  Antisense strand to SEQ ID NO: 249410
uguuccacgccagaacuuu

SEQ ID NO: 249412 - RNA, 19 nt, Artificial Sequence
  Description of Artificial Sequence: Synthetic oligonucleotide
  Sense strand starting at position 3801 SEQ ID NO: 3209
gaagcaagacccuggugau

SEQ ID NO: 249413 - RNA, 19 nt, Artificial Sequence
  Description of Artificial Sequence: Synthetic oligonucleotide
  Antisense strand to SEQ ID NO: 249412
aucaccagggucuugcuuc

SEQ ID NO: 249414 - RNA, 19 nt, Artificial Sequence
  Description of Artificial Sequence: Synthetic oligonucleotide
  Sense strand starting at position 3840 SEQ ID NO: 3209
aaauaauaauggugacugu

SEQ ID NO: 249415 - RNA, 19 nt, Artificial Sequence
  Description of Artificial Sequence: Synthetic oligonucleotide
  Antisense strand to SEQ ID NO: 249414
acagucaccauuauuauuu

SEQ ID NO: 249416 - RNA, 19 nt, Artificial Sequence
  Description of Artificial Sequence: Synthetic oligonucleotide
  Sense strand starting at position 3843 SEQ ID NO: 3209
uaauaauggugacuguacu

SEQ ID NO: 249417 - RNA, 19 nt, Artificial Sequence
  Description of Artificial Sequence: Synthetic oligonucleotide
  Antisense strand to SEQ ID NO: 249416
aguacagucaccauuauua

SEQ ID NO: 249418 - RNA, 19 nt, Artificial Sequence
  Description of Artificial Sequence: Synthetic oligonucleotide
  Sense strand starting at position 3849 SEQ ID NO: 3209
uggugacuguacuuagaua

SEQ ID NO: 249419 - RNA, 19 nt, Artificial Sequence
  Description of Artificial Sequence: Synthetic oligonucleotide
  Antisense strand to SEQ ID NO: 249418
uaucuaaguacagucacca

SEQ ID NO: 249420 - RNA, 19 nt, Artificial Sequence
  Description of Artificial Sequence: Synthetic oligonucleotide
  Sense strand starting at position 3850 SEQ ID NO: 3209
ggugacuguacuuagauau

SEQ ID NO: 249421 - RNA, 19 nt, Artificial Sequence
  Description of Artificial Sequence: Synthetic oligonucleotide
  Antisense strand to SEQ ID NO: 249420
auaucuaaguacagucacc

SEQ ID NO: 249422 - RNA, 19 nt, Artificial Sequence
  Description of Artificial Sequence: Synthetic oligonucleotide
  Sense strand starting at position 3861 SEQ ID NO: 3209
uuagauaucccaggugggu

SEQ ID NO: 249423 - RNA, 19 nt, Artificial Sequence
  Description of Artificial Sequence: Synthetic oligonucleotide
  Antisense strand to SEQ ID NO: 249422
acccaccugggauaucuaa

SEQ ID NO: 249424 - RNA, 19 nt, Artificial Sequence
  Description of Artificial Sequence: Synthetic oligonucleotide
  Sense strand starting at position 3874 SEQ ID NO: 3209
gugggugagcgguggcaaa

SEQ ID NO: 249425 - RNA, 19 nt, Artificial Sequence
  Description of Artificial Sequence: Synthetic oligonucleotide
  Antisense strand to SEQ ID NO: 249424
uuugccaccgcucacccac

SEQ ID NO: 249426 - RNA, 19 nt, Artificial Sequence
  Description of Artificial Sequence: Synthetic oligonucleotide
  Sense strand starting at position 3974 SEQ ID NO: 3209
ucaauuacgggucauagua

SEQ ID NO: 249427 - RNA, 19 nt, Artificial Sequence
  Description of Artificial Sequence: Synthetic oligonucleotide
  Antisense strand to SEQ ID NO: 249426
uacuaugacccguaauuga

SEQ ID NO: 249428 - RNA, 19 nt, Artificial Sequence
  Description of Artificial Sequence: Synthetic oligonucleotide
  Sense strand starting at position 34 SEQ ID NO: 3210
ccucuuugggcagaccuaa

SEQ ID NO: 249429 - RNA, 19 nt, Artificial Sequence
  Description of Artificial Sequence: Synthetic oligonucleotide
  Antisense strand to SEQ ID NO: 249428
uuaggucugcccaaagagg

SEQ ID NO: 249430 - RNA, 19 nt, Artificial Sequence
  Description of Artificial Sequence: Synthetic oligonucleotide
  Sense strand starting at position 45 SEQ ID NO: 3210
agaccuaagucugaucauc

SEQ ID NO: 249431 - RNA, 19 nt, Artificial Sequence
  Description of Artificial Sequence: Synthetic oligonucleotide
  Antisense strand to SEQ ID NO: 249430
gaugaucagacuuaggucu

SEQ ID NO: 249432 - RNA, 19 nt, Artificial Sequence
  Description of Artificial Sequence: Synthetic oligonucleotide
  Sense strand starting at position 280 SEQ ID NO: 3210
ccuguugacucccaggaaa

SEQ ID NO: 249433 - RNA, 19 nt, Artificial Sequence
  Description of Artificial Sequence: Synthetic oligonucleotide
  Antisense strand to SEQ ID NO: 249432
uuuccugggagucaacagg

SEQ ID NO: 249434 - RNA, 19 nt, Artificial Sequence
  Description of Artificial Sequence: Synthetic oligonucleotide
  Sense strand starting at position 400 SEQ ID NO: 3210
agaggaaacugcuucugga

SEQ ID NO: 249435 - RNA, 19 nt, Artificial Sequence
  Description of Artificial Sequence: Synthetic oligonucleotide
  Antisense strand to SEQ ID NO: 249434
uccagaagcaguuuccucu

SEQ ID NO: 249436 - RNA, 19 nt, Artificial Sequence
  Description of Artificial Sequence: Synthetic oligonucleotide
  Sense strand starting at position 417 SEQ ID NO: 3210
gaggcaucucaaugggcuu

SEQ ID NO: 249437 - RNA, 19 nt, Artificial Sequence
  Description of Artificial Sequence: Synthetic oligonucleotide
  Antisense strand to SEQ ID NO: 249436
aagcccauugagaugccuc

SEQ ID NO: 249438 - RNA, 19 nt, Artificial Sequence
  Description of Artificial Sequence: Synthetic oligonucleotide
  Sense strand starting at position 485 SEQ ID NO: 3210
aggagcucuugagaucauu

SEQ ID NO: 249439 - RNA, 19 nt, Artificial Sequence
  Description of Artificial Sequence: Synthetic oligonucleotide
  Antisense strand to SEQ ID NO: 249438
aaugaucucaagagcuccu

SEQ ID NO: 249440 - RNA, 19 nt, Artificial Sequence
  Description of Artificial Sequence: Synthetic oligonucleotide
  Sense strand starting at position 568 SEQ ID NO: 3210
gucauauaucacgguagug

SEQ ID NO: 249441 - RNA, 19 nt, Artificial Sequence
  Description of Artificial Sequence: Synthetic oligonucleotide
  Antisense strand to SEQ ID NO: 249440
cacuaccgugauauaugac

SEQ ID NO: 249442 - RNA, 19 nt, Artificial Sequence
  Description of Artificial Sequence: Synthetic oligonucleotide
  Sense strand starting at position 570 SEQ ID NO: 3210
cauauaucacgguagugau

SEQ ID NO: 249443 - RNA, 19 nt, Artificial Sequence
  Description of Artificial Sequence: Synthetic oligonucleotide
  Antisense strand to SEQ ID NO: 249442
aucacuaccgugauauaug

SEQ ID NO: 249444 - RNA, 19 nt, Artificial Sequence
  Description of Artificial Sequence: Synthetic oligonucleotide
  Sense strand starting at position 597 SEQ ID NO: 3210
gcugaaaucauaggguguu

SEQ ID NO: 249445 - RNA, 19 nt, Artificial Sequence
  Description of Artificial Sequence: Synthetic oligonucleotide
  Antisense strand to SEQ ID NO: 249444
aacacccuaugauuucagc

SEQ ID NO: 249446 - RNA, 19 nt, Artificial Sequence
  Description of Artificial Sequence: Synthetic oligonucleotide
  Sense strand starting at position 676 SEQ ID NO: 3210
gcuagagauuccuuuccug

SEQ ID NO: 249447 - RNA, 19 nt, Artificial Sequence
  Description of Artificial Sequence: Synthetic oligonucleotide
  Antisense strand to SEQ ID NO: 249446
caggaaaggaaucucuagc

SEQ ID NO: 249448 - RNA, 19 nt, Artificial Sequence
  Description of Artificial Sequence: Synthetic oligonucleotide
  Sense strand starting at position 761 SEQ ID NO: 3210
cuguguguacccugugagu

SEQ ID NO: 249449 - RNA, 19 nt, Artificial Sequence
  Description of Artificial Sequence: Synthetic oligonucleotide
  Antisense strand to SEQ ID NO: 249448
acucacaggguacacacag

SEQ ID NO: 249450 - RNA, 19 nt, Artificial Sequence
  Description of Artificial Sequence: Synthetic oligonucleotide
  Sense strand starting at position 772 SEQ ID NO: 3210
cugugagugccugugugua

SEQ ID NO: 249451 - RNA, 19 nt, Artificial Sequence
  Description of Artificial Sequence: Synthetic oligonucleotide
  Antisense strand to SEQ ID NO: 249450
uacacacaggcacucacag

SEQ ID NO: 249452 - RNA, 19 nt, Artificial Sequence
  Description of Artificial Sequence: Synthetic oligonucleotide
  Sense strand starting at position 810 SEQ ID NO: 3210
augccuguguugucugaca

SEQ ID NO: 249453 - RNA, 19 nt, Artificial Sequence
  Description of Artificial Sequence: Synthetic oligonucleotide
  Antisense strand to SEQ ID NO: 249452
ugucagacaacacaggcau

SEQ ID NO: 249454 - RNA, 19 nt, Artificial Sequence
  Description of Artificial Sequence: Synthetic oligonucleotide
  Sense strand starting at position 812 SEQ ID NO: 3210
gccuguguugucugacagu

SEQ ID NO: 249455 - RNA, 19 nt, Artificial Sequence
  Description of Artificial Sequence: Synthetic oligonucleotide
  Antisense strand to SEQ ID NO: 249454
acugucagacaacacaggc

SEQ ID NO: 249456 - RNA, 19 nt, Artificial Sequence
  Description of Artificial Sequence: Synthetic oligonucleotide
  Sense strand starting at position 837 SEQ ID NO: 3210
guacguguggccuccuaca

SEQ ID NO: 249457 - RNA, 19 nt, Artificial Sequence
  Description of Artificial Sequence: Synthetic oligonucleotide
  Antisense strand to SEQ ID NO: 249456
uguaggaggccacacguac

SEQ ID NO: 249458 - RNA, 19 nt, Artificial Sequence
  Description of Artificial Sequence: Synthetic oligonucleotide
  Sense strand starting at position 886 SEQ ID NO: 3210
ggguuauuccugugaggug

SEQ ID NO: 249459 - RNA, 19 nt, Artificial Sequence
  Description of Artificial Sequence: Synthetic oligonucleotide
  Antisense strand to SEQ ID NO: 249458
caccucacaggaauaaccc

SEQ ID NO: 249460 - RNA, 19 nt, Artificial Sequence
  Description of Artificial Sequence: Synthetic oligonucleotide
  Sense strand starting at position 2253 SEQ ID NO: 3210
cagcgaaacgcugauaacu

SEQ ID NO: 249461 - RNA, 19 nt, Artificial Sequence
  Description of Artificial Sequence: Synthetic oligonucleotide
  Antisense strand to SEQ ID NO: 249460
aguuaucagcguuucgcug

SEQ ID NO: 249462 - RNA, 19 nt, Artificial Sequence
  Description of Artificial Sequence: Synthetic oligonucleotide
  Sense strand starting at position 2261 SEQ ID NO: 3210
cgcugauaacuacggagaa

SEQ ID NO: 249463 - RNA, 19 nt, Artificial Sequence
  Description of Artificial Sequence: Synthetic oligonucleotide
  Antisense strand to SEQ ID NO: 249462
uucuccguaguuaucagcg

SEQ ID NO: 249464 - RNA, 19 nt, Artificial Sequence
  Description of Artificial Sequence: Synthetic oligonucleotide
  Sense strand starting at position 2574 SEQ ID NO: 3210
gcccuuauccuauggauga

SEQ ID NO: 249465 - RNA, 19 nt, Artificial Sequence
  Description of Artificial Sequence: Synthetic oligonucleotide
  Antisense strand to SEQ ID NO: 249464
ucauccauaggauaagggc

SEQ ID NO: 249466 - RNA, 19 nt, Artificial Sequence
  Description of Artificial Sequence: Synthetic oligonucleotide
  Sense strand starting at position 2575 SEQ ID NO: 3210
cccuuauccuauggaugag

SEQ ID NO: 249467 - RNA, 19 nt, Artificial Sequence
  Description of Artificial Sequence: Synthetic oligonucleotide
  Antisense strand to SEQ ID NO: 249466
cucauccauaggauaaggg

SEQ ID NO: 249468 - RNA, 19 nt, Artificial Sequence
  Description of Artificial Sequence: Synthetic oligonucleotide
  Sense strand starting at position 2634 SEQ ID NO: 3210
cgcagugauuucgugacag

SEQ ID NO: 249469 - RNA, 19 nt, Artificial Sequence
  Description of Artificial Sequence: Synthetic oligonucleotide
  Antisense strand to SEQ ID NO: 249468
cugucacgaaaucacugcg

SEQ ID NO: 249470 - RNA, 19 nt, Artificial Sequence
  Description of Artificial Sequence: Synthetic oligonucleotide
  Sense strand starting at position 2638 SEQ ID NO: 3210
gugauuucgugacagcacu

SEQ ID NO: 249471 - RNA, 19 nt, Artificial Sequence
  Description of Artificial Sequence: Synthetic oligonucleotide
  Antisense strand to SEQ ID NO: 249470
agugcugucacgaaaucac

SEQ ID NO: 249472 - RNA, 19 nt, Artificial Sequence
  Description of Artificial Sequence: Synthetic oligonucleotide
  Sense strand starting at position 2713 SEQ ID NO: 3210
gacucuggcugucuuggaa

SEQ ID NO: 249473 - RNA, 19 nt, Artificial Sequence
  Description of Artificial Sequence: Synthetic oligonucleotide
  Antisense strand to SEQ ID NO: 249472
uuccaagacagccagaguc

SEQ ID NO: 249474 - RNA, 19 nt, Artificial Sequence
  Description of Artificial Sequence: Synthetic oligonucleotide
  Sense strand starting at position 2956 SEQ ID NO: 3210
ugaguugccagagauagca

SEQ ID NO: 249475 - RNA, 19 nt, Artificial Sequence
  Description of Artificial Sequence: Synthetic oligonucleotide
  Antisense strand to SEQ ID NO: 249474
ugcuaucucuggcaacuca

SEQ ID NO: 249476 - RNA, 19 nt, Artificial Sequence
  Description of Artificial Sequence: Synthetic oligonucleotide
  Sense strand starting at position 3006 SEQ ID NO: 3210
ccgggaucuagcuggaauu

SEQ ID NO: 249477 - RNA, 19 nt, Artificial Sequence
  Description of Artificial Sequence: Synthetic oligonucleotide
  Antisense strand to SEQ ID NO: 249476
aauuccagcuagaucccgg

SEQ ID NO: 249478 - RNA, 19 nt, Artificial Sequence
  Description of Artificial Sequence: Synthetic oligonucleotide
  Sense strand starting at position 3185 SEQ ID NO: 3210
agccuuguuuccuuaucuu

SEQ ID NO: 249479 - RNA, 19 nt, Artificial Sequence
  Description of Artificial Sequence: Synthetic oligonucleotide
  Antisense strand to SEQ ID NO: 249478
aagauaaggaaacaaggcu

SEQ ID NO: 249480 - RNA, 19 nt, Artificial Sequence
  Description of Artificial Sequence: Synthetic oligonucleotide
  Sense strand starting at position 3283 SEQ ID NO: 3210
gcagaaugauuggaaugca

SEQ ID NO: 249481 - RNA, 19 nt, Artificial Sequence
  Description of Artificial Sequence: Synthetic oligonucleotide
  Antisense strand to SEQ ID NO: 249480
ugcauuccaaucauucugc

SEQ ID NO: 249482 - RNA, 19 nt, Artificial Sequence
  Description of Artificial Sequence: Synthetic oligonucleotide
  Sense strand starting at position 3297 SEQ ID NO: 3210
augcaaaucucagugccaa

SEQ ID NO: 249483 - RNA, 19 nt, Artificial Sequence
  Description of Artificial Sequence: Synthetic oligonucleotide
  Antisense strand to SEQ ID NO: 249482
uuggcacugagauuugcau

SEQ ID NO: 249484 - RNA, 19 nt, Artificial Sequence
  Description of Artificial Sequence: Synthetic oligonucleotide
  Sense strand starting at position 3298 SEQ ID NO: 3210
ugcaaaucucagugccaag

SEQ ID NO: 249485 - RNA, 19 nt, Artificial Sequence
  Description of Artificial Sequence: Synthetic oligonucleotide
  Antisense strand to SEQ ID NO: 249484
cuuggcacugagauuugca

SEQ ID NO: 249486 - RNA, 19 nt, Artificial Sequence
  Description of Artificial Sequence: Synthetic oligonucleotide
  Sense strand starting at position 3308 SEQ ID NO: 3210
agugccaagaaggguuaaa

SEQ ID NO: 249487 - RNA, 19 nt, Artificial Sequence
  Description of Artificial Sequence: Synthetic oligonucleotide
  Antisense strand to SEQ ID NO: 249486
uuuaacccuucuuggcacu

SEQ ID NO: 249488 - RNA, 19 nt, Artificial Sequence
  Description of Artificial Sequence: Synthetic oligonucleotide
  Sense strand starting at position 3652 SEQ ID NO: 3210
uguagagaaucaguaaauu

SEQ ID NO: 249489 - RNA, 19 nt, Artificial Sequence
  Description of Artificial Sequence: Synthetic oligonucleotide
  Antisense strand to SEQ ID NO: 249488
aauuuacugauucucuaca

SEQ ID NO: 249490 - RNA, 19 nt, Artificial Sequence
  Description of Artificial Sequence: Synthetic oligonucleotide
  Sense strand starting at position 3791 SEQ ID NO: 3210
gcucuacccgcgucuugaa

SEQ ID NO: 249491 - RNA, 19 nt, Artificial Sequence
  Description of Artificial Sequence: Synthetic oligonucleotide
  Antisense strand to SEQ ID NO: 249490
uucaagacgcggguagagc

SEQ ID NO: 249492 - RNA, 19 nt, Artificial Sequence
  Description of Artificial Sequence: Synthetic oligonucleotide
  Sense strand starting at position 3834 SEQ ID NO: 3210
agaacacaugugugcaaau

SEQ ID NO: 249493 - RNA, 19 nt, Artificial Sequence
  Description of Artificial Sequence: Synthetic oligonucleotide
  Antisense strand to SEQ ID NO: 249492
auuugcacacauguguucu

SEQ ID NO: 249494 - RNA, 19 nt, Artificial Sequence
  Description of Artificial Sequence: Synthetic oligonucleotide
  Sense strand starting at position 3845 SEQ ID NO: 3210
gugcaaaucagaugauaug

SEQ ID NO: 249495 - RNA, 19 nt, Artificial Sequence
  Description of Artificial Sequence: Synthetic oligonucleotide
  Antisense strand to SEQ ID NO: 249494
cauaucaucugauuugcac

SEQ ID NO: 249496 - RNA, 19 nt, Artificial Sequence
  Description of Artificial Sequence: Synthetic oligonucleotide
  Sense strand starting at position 3859 SEQ ID NO: 3210
auaugaggcucucuaauga

SEQ ID NO: 249497 - RNA, 19 nt, Artificial Sequence
  Description of Artificial Sequence: Synthetic oligonucleotide
  Antisense strand to SEQ ID NO: 249496
ucauuagagagccucauau

SEQ ID NO: 249498 - RNA, 19 nt, Artificial Sequence
  Description of Artificial Sequence: Synthetic oligonucleotide
  Sense strand starting at position 3890 SEQ ID NO: 3210
augggaggguccuacauuu

SEQ ID NO: 249499 - RNA, 19 nt, Artificial Sequence
  Description of Artificial Sequence: Synthetic oligonucleotide
  Antisense strand to SEQ ID NO: 249498
aaauguaggacccucccau

SEQ ID NO: 249500 - RNA, 19 nt, Artificial Sequence
  Description of Artificial Sequence: Synthetic oligonucleotide
  Sense strand starting at position 3936 SEQ ID NO: 3210
aagggaagaucuuuguuuc

SEQ ID NO: 249501 - RNA, 19 nt, Artificial Sequence
  Description of Artificial Sequence: Synthetic oligonucleotide
  Antisense strand to SEQ ID NO: 249500
gaaacaaagaucuucccuu

SEQ ID NO: 249502 - RNA, 19 nt, Artificial Sequence
  Description of Artificial Sequence: Synthetic oligonucleotide
  Sense strand starting at position 3937 SEQ ID NO: 3210
agggaagaucuuuguuucu

SEQ ID NO: 249503 - RNA, 19 nt, Artificial Sequence
  Description of Artificial Sequence: Synthetic oligonucleotide
  Antisense strand to SEQ ID NO: 249502
agaaacaaagaucuucccu

SEQ ID NO: 249504 - RNA, 19 nt, Artificial Sequence
  Description of Artificial Sequence: Synthetic oligonucleotide
  Sense strand starting at position 3939 SEQ ID NO: 3210
ggaagaucuuuguuucuuu

SEQ ID NO: 249505 - RNA, 19 nt, Artificial Sequence
  Description of Artificial Sequence: Synthetic oligonucleotide
  Antisense strand to SEQ ID NO: 249504
aaagaaacaaagaucuucc

SEQ ID NO: 249506 - RNA, 19 nt, Artificial Sequence
  Description of Artificial Sequence: Synthetic oligonucleotide
  Sense strand starting at position 3963 SEQ ID NO: 3210
cacagaauuucuggucuug

SEQ ID NO: 249507 - RNA, 19 nt, Artificial Sequence
  Description of Artificial Sequence: Synthetic oligonucleotide
  Antisense strand to SEQ ID NO: 249506
caagaccagaaauucugug

SEQ ID NO: 249508 - RNA, 19 nt, Artificial Sequence
  Description of Artificial Sequence: Synthetic oligonucleotide
  Sense strand starting at position 124 SEQ ID NO: 3211
aggugcuccuuucuccaaa

SEQ ID NO: 249509 - RNA, 19 nt, Artificial Sequence
  Description of Artificial Sequence: Synthetic oligonucleotide
  Antisense strand to SEQ ID NO: 249508
uuuggagaaaggagcaccu

SEQ ID NO: 249510 - RNA, 19 nt, Artificial Sequence
  Description of Artificial Sequence: Synthetic oligonucleotide
  Sense strand starting at position 125 SEQ ID NO: 3211
ggugcuccuuucuccaaau

SEQ ID NO: 249511 - RNA, 19 nt, Artificial Sequence
  Description of Artificial Sequence: Synthetic oligonucleotide
  Antisense strand to SEQ ID NO: 249510
auuuggagaaaggagcacc

SEQ ID NO: 249512 - RNA, 19 nt, Artificial Sequence
  Description of Artificial Sequence: Synthetic oligonucleotide
  Sense strand starting at position 718 SEQ ID NO: 3211
cccgaaagcugauccuaaa

SEQ ID NO: 249513 - RNA, 19 nt, Artificial Sequence
  Description of Artificial Sequence: Synthetic oligonucleotide
  Antisense strand to SEQ ID NO: 249512
uuuaggaucagcuuucggg

SEQ ID NO: 249514 - RNA, 19 nt, Artificial Sequence
  Description of Artificial Sequence: Synthetic oligonucleotide
  Sense strand starting at position 1618 SEQ ID NO: 3211
agcgacacuuugcuaauuu

SEQ ID NO: 249515 - RNA, 19 nt, Artificial Sequence
  Description of Artificial Sequence: Synthetic oligonucleotide
  Antisense strand to SEQ ID NO: 249514
aaauuagcaaagugucgcu

SEQ ID NO: 249516 - RNA, 19 nt, Artificial Sequence
  Description of Artificial Sequence: Synthetic oligonucleotide
  Sense strand starting at position 1627 SEQ ID NO: 3211
uugcuaauuugccuggauu

SEQ ID NO: 249517 - RNA, 19 nt, Artificial Sequence
  Description of Artificial Sequence: Synthetic oligonucleotide
  Antisense strand to SEQ ID NO: 249516
aauccaggcaaauuagcaa

SEQ ID NO: 249518 - RNA, 19 nt, Artificial Sequence
  Description of Artificial Sequence: Synthetic oligonucleotide
  Sense strand starting at position 1640 SEQ ID NO: 3211
uggauuuccucaggaaauc

SEQ ID NO: 249519 - RNA, 19 nt, Artificial Sequence
  Description of Artificial Sequence: Synthetic oligonucleotide
  Antisense strand to SEQ ID NO: 249518
gauuuccugaggaaaucca

SEQ ID NO: 249520 - RNA, 19 nt, Artificial Sequence
  Description of Artificial Sequence: Synthetic oligonucleotide
  Sense strand starting at position 1771 SEQ ID NO: 3211
acaagaugcuuugucuuau

SEQ ID NO: 249521 - RNA, 19 nt, Artificial Sequence
  Description of Artificial Sequence: Synthetic oligonucleotide
  Antisense strand to SEQ ID NO: 249520
auaagacaaagcaucuugu

SEQ ID NO: 249522 - RNA, 19 nt, Artificial Sequence
  Description of Artificial Sequence: Synthetic oligonucleotide
  Sense strand starting at position 2002 SEQ ID NO: 3211
gagcgagagcgcucaguua

SEQ ID NO: 249523 - RNA, 19 nt, Artificial Sequence
  Description of Artificial Sequence: Synthetic oligonucleotide
  Antisense strand to SEQ ID NO: 249522
uaacugagcgcucucgcuc

SEQ ID NO: 249524 - RNA, 19 nt, Artificial Sequence
  Description of Artificial Sequence: Synthetic oligonucleotide
  Sense strand starting at position 2004 SEQ ID NO: 3211
gcgagagcgcucaguuaac

SEQ ID NO: 249525 - RNA, 19 nt, Artificial Sequence
  Description of Artificial Sequence: Synthetic oligonucleotide
  Antisense strand to SEQ ID NO: 249524
guuaacugagcgcucucgc

SEQ ID NO: 249526 - RNA, 19 nt, Artificial Sequence
  Description of Artificial Sequence: Synthetic oligonucleotide
  Sense strand starting at position 2101 SEQ ID NO: 3211
ugugcagacguggaacaau

SEQ ID NO: 249527 - RNA, 19 nt, Artificial Sequence
  Description of Artificial Sequence: Synthetic oligonucleotide
  Antisense strand to SEQ ID NO: 249526
auuguuccacgucugcaca

SEQ ID NO: 249528 - RNA, 19 nt, Artificial Sequence
  Description of Artificial Sequence: Synthetic oligonucleotide
  Sense strand starting at position 2113 SEQ ID NO: 3211
gaacaauuccucggagcca

SEQ ID NO: 249529 - RNA, 19 nt, Artificial Sequence
  Description of Artificial Sequence: Synthetic oligonucleotide
  Antisense strand to SEQ ID NO: 249528
uggcuccgaggaauuguuc

SEQ ID NO: 249530 - RNA, 19 nt, Artificial Sequence
  Description of Artificial Sequence: Synthetic oligonucleotide
  Sense strand starting at position 2338 SEQ ID NO: 3211
cugaauacccuauguuaug

SEQ ID NO: 249531 - RNA, 19 nt, Artificial Sequence
  Description of Artificial Sequence: Synthetic oligonucleotide
  Antisense strand to SEQ ID NO: 249530
cauaacauaggguauucag

SEQ ID NO: 249532 - RNA, 19 nt, Artificial Sequence
  Description of Artificial Sequence: Synthetic oligonucleotide
  Sense strand starting at position 2339 SEQ ID NO: 3211
ugaauacccuauguuaugu

SEQ ID NO: 249533 - RNA, 19 nt, Artificial Sequence
  Description of Artificial Sequence: Synthetic oligonucleotide
  Antisense strand to SEQ ID NO: 249532
acauaacauaggguauuca

SEQ ID NO: 249534 - RNA, 19 nt, Artificial Sequence
  Description of Artificial Sequence: Synthetic oligonucleotide
  Sense strand starting at position 2347 SEQ ID NO: 3211
cuauguuauguguggguuu

SEQ ID NO: 249535 - RNA, 19 nt, Artificial Sequence
  Description of Artificial Sequence: Synthetic oligonucleotide
  Antisense strand to SEQ ID NO: 249534
aaacccacacauaacauag

SEQ ID NO: 249536 - RNA, 19 nt, Artificial Sequence
  Description of Artificial Sequence: Synthetic oligonucleotide
  Sense strand starting at position 2415 SEQ ID NO: 3211
ggcaguaauccucaccgua

SEQ ID NO: 249537 - RNA, 19 nt, Artificial Sequence
  Description of Artificial Sequence: Synthetic oligonucleotide
  Antisense strand to SEQ ID NO: 249536
uacggugaggauuacugcc

SEQ ID NO: 249538 - RNA, 19 nt, Artificial Sequence
  Description of Artificial Sequence: Synthetic oligonucleotide
  Sense strand starting at position 2430 SEQ ID NO: 3211
cguaucuugugggcuucaa

SEQ ID NO: 249539 - RNA, 19 nt, Artificial Sequence
  Description of Artificial Sequence: Synthetic oligonucleotide
  Antisense strand to SEQ ID NO: 249538
uugaagcccacaagauacg

SEQ ID NO: 249540 - RNA, 19 nt, Artificial Sequence
  Description of Artificial Sequence: Synthetic oligonucleotide
  Sense strand starting at position 2582 SEQ ID NO: 3211
ucauuuggcuucugggaag

SEQ ID NO: 249541 - RNA, 19 nt, Artificial Sequence
  Description of Artificial Sequence: Synthetic oligonucleotide
  Antisense strand to SEQ ID NO: 249540
cuucccagaagccaaauga

SEQ ID NO: 249542 - RNA, 19 nt, Artificial Sequence
  Description of Artificial Sequence: Synthetic oligonucleotide
  Sense strand starting at position 2609 SEQ ID NO: 3211
agaugcaugugucugcaga

SEQ ID NO: 249543 - RNA, 19 nt, Artificial Sequence
  Description of Artificial Sequence: Synthetic oligonucleotide
  Antisense strand to SEQ ID NO: 249542
ucugcagacacaugcaucu

SEQ ID NO: 249544 - RNA, 19 nt, Artificial Sequence
  Description of Artificial Sequence: Synthetic oligonucleotide
  Sense strand starting at position 2637 SEQ ID NO: 3211
ugagccauuugucccuaau

SEQ ID NO: 249545 - RNA, 19 nt, Artificial Sequence
  Description of Artificial Sequence: Synthetic oligonucleotide
  Antisense strand to SEQ ID NO: 249544
auuagggacaaauggcuca

SEQ ID NO: 249546 - RNA, 19 nt, Artificial Sequence
  Description of Artificial Sequence: Synthetic oligonucleotide
  Sense strand starting at position 2662 SEQ ID NO: 3211
guucuuugguuccuccaau

SEQ ID NO: 249547 - RNA, 19 nt, Artificial Sequence
  Description of Artificial Sequence: Synthetic oligonucleotide
  Antisense strand to SEQ ID NO: 249546
auuggaggaaccaaagaac

SEQ ID NO: 249548 - RNA, 19 nt, Artificial Sequence
  Description of Artificial Sequence: Synthetic oligonucleotide
  Sense strand starting at position 2685 SEQ ID NO: 3211
ucuccucuccuguggaaga

SEQ ID NO: 249549 - RNA, 19 nt, Artificial Sequence
  Description of Artificial Sequence: Synthetic oligonucleotide
  Antisense strand to SEQ ID NO: 249548
ucuuccacaggagaggaga

SEQ ID NO: 249550 - RNA, 19 nt, Artificial Sequence
  Description of Artificial Sequence: Synthetic oligonucleotide
  Sense strand starting at position 2728 SEQ ID NO: 3211
gcuauuuacaaguggcuga

SEQ ID NO: 249551 - RNA, 19 nt, Artificial Sequence
  Description of Artificial Sequence: Synthetic oligonucleotide
  Antisense strand to SEQ ID NO: 249550
ucagccacuuguaaauagc

SEQ ID NO: 249552 - RNA, 19 nt, Artificial Sequence
  Description of Artificial Sequence: Synthetic oligonucleotide
  Sense strand starting at position 2732 SEQ ID NO: 3211
uuuacaaguggcugaagaa

SEQ ID NO: 249553 - RNA, 19 nt, Artificial Sequence
  Description of Artificial Sequence: Synthetic oligonucleotide
  Antisense strand to SEQ ID NO: 249552
uucuucagccacuuguaaa

SEQ ID NO: 249554 - RNA, 19 nt, Artificial Sequence
  Description of Artificial Sequence: Synthetic oligonucleotide
  Sense strand starting at position 2785 SEQ ID NO: 3211
gcucuaagauuguucuaaa

SEQ ID NO: 249555 - RNA, 19 nt, Artificial Sequence
  Description of Artificial Sequence: Synthetic oligonucleotide
  Antisense strand to SEQ ID NO: 249554
uuuagaacaaucuuagagc

SEQ ID NO: 249556 - RNA, 19 nt, Artificial Sequence
  Description of Artificial Sequence: Synthetic oligonucleotide
  Sense strand starting at position 2829 SEQ ID NO: 3211
uuagaagaaugcuuccaga

SEQ ID NO: 249557 - RNA, 19 nt, Artificial Sequence
  Description of Artificial Sequence: Synthetic oligonucleotide
  Antisense strand to SEQ ID NO: 249556
ucuggaagcauucuucuaa

SEQ ID NO: 249558 - RNA, 19 nt, Artificial Sequence
  Description of Artificial Sequence: Synthetic oligonucleotide
  Sense strand starting at position 2907 SEQ ID NO: 3211
cagcaugguuuacuugaga

SEQ ID NO: 249559 - RNA, 19 nt, Artificial Sequence
  Description of Artificial Sequence: Synthetic oligonucleotide
  Antisense strand to SEQ ID NO: 249558
ucucaaguaaaccaugcug

SEQ ID NO: 249560 - RNA, 19 nt, Artificial Sequence
  Description of Artificial Sequence: Synthetic oligonucleotide
  Sense strand starting at position 2912 SEQ ID NO: 3211
ugguuuacuugagaaggaa

SEQ ID NO: 249561 - RNA, 19 nt, Artificial Sequence
  Description of Artificial Sequence: Synthetic oligonucleotide
  Antisense strand to SEQ ID NO: 249560
uuccuucucaaguaaacca

SEQ ID NO: 249562 - RNA, 19 nt, Artificial Sequence
  Description of Artificial Sequence: Synthetic oligonucleotide
  Sense strand starting at position 3140 SEQ ID NO: 3211
gggccacagaucugagaca

SEQ ID NO: 249563 - RNA, 19 nt, Artificial Sequence
  Description of Artificial Sequence: Synthetic oligonucleotide
  Antisense strand to SEQ ID NO: 249562
ugucucagaucuguggccc

SEQ ID NO: 249564 - RNA, 19 nt, Artificial Sequence
  Description of Artificial Sequence: Synthetic oligonucleotide
  Sense strand starting at position 3245 SEQ ID NO: 3211
uccucucucccaggguaau

SEQ ID NO: 249565 - RNA, 19 nt, Artificial Sequence
  Description of Artificial Sequence: Synthetic oligonucleotide
  Antisense strand to SEQ ID NO: 249564
auuacccugggagagagga

SEQ ID NO: 249566 - RNA, 19 nt, Artificial Sequence
  Description of Artificial Sequence: Synthetic oligonucleotide
  Sense strand starting at position 3265 SEQ ID NO: 3211
augugaagccaaugaaaua

SEQ ID NO: 249567 - RNA, 19 nt, Artificial Sequence
  Description of Artificial Sequence: Synthetic oligonucleotide
  Antisense strand to SEQ ID NO: 249566
uauuucauuggcuucacau

SEQ ID NO: 249568 - RNA, 19 nt, Artificial Sequence
  Description of Artificial Sequence: Synthetic oligonucleotide
  Sense strand starting at position 3342 SEQ ID NO: 3211
uugaauguugaccaagguu

SEQ ID NO: 249569 - RNA, 19 nt, Artificial Sequence
  Description of Artificial Sequence: Synthetic oligonucleotide
  Antisense strand to SEQ ID NO: 249568
aaccuuggucaacauucaa

SEQ ID NO: 249570 - RNA, 19 nt, Artificial Sequence
  Description of Artificial Sequence: Synthetic oligonucleotide
  Sense strand starting at position 3491 SEQ ID NO: 3211
uaugccucccgauaugaca

SEQ ID NO: 249571 - RNA, 19 nt, Artificial Sequence
  Description of Artificial Sequence: Synthetic oligonucleotide
  Antisense strand to SEQ ID NO: 249570
ugucauaucgggaggcaua

SEQ ID NO: 249572 - RNA, 19 nt, Artificial Sequence
  Description of Artificial Sequence: Synthetic oligonucleotide
  Sense strand starting at position 3589 SEQ ID NO: 3211
uuuaaucaucguugacaau

SEQ ID NO: 249573 - RNA, 19 nt, Artificial Sequence
  Description of Artificial Sequence: Synthetic oligonucleotide
  Antisense strand to SEQ ID NO: 249572
auugucaacgaugauuaaa

SEQ ID NO: 249574 - RNA, 19 nt, Artificial Sequence
  Description of Artificial Sequence: Synthetic oligonucleotide
  Sense strand starting at position 3590 SEQ ID NO: 3211
uuaaucaucguugacaaua

SEQ ID NO: 249575 - RNA, 19 nt, Artificial Sequence
  Description of Artificial Sequence: Synthetic oligonucleotide
  Antisense strand to SEQ ID NO: 249574
uauugucaacgaugauuaa

SEQ ID NO: 249576 - RNA, 19 nt, Artificial Sequence
  Description of Artificial Sequence: Synthetic oligonucleotide
  Sense strand starting at position 3651 SEQ ID NO: 3211
ggagacacaugccacuaau

SEQ ID NO: 249577 - RNA, 19 nt, Artificial Sequence
  Description of Artificial Sequence: Synthetic oligonucleotide
  Antisense strand to SEQ ID NO: 249576
auuaguggcaugugucucc

SEQ ID NO: 249578 - RNA, 19 nt, Artificial Sequence
  Description of Artificial Sequence: Synthetic oligonucleotide
  Sense strand starting at position 3821 SEQ ID NO: 3211
cuagauuaguacuugccuu

SEQ ID NO: 249579 - RNA, 19 nt, Artificial Sequence
  Description of Artificial Sequence: Synthetic oligonucleotide
  Antisense strand to SEQ ID NO: 249578
aaggcaaguacuaaucuag

SEQ ID NO: 249580 - RNA, 19 nt, Artificial Sequence
  Description of Artificial Sequence: Synthetic oligonucleotide
  Sense strand starting at position 3834 SEQ ID NO: 3211
ugccuuaguccugaaggaa

SEQ ID NO: 249581 - RNA, 19 nt, Artificial Sequence
  Description of Artificial Sequence: Synthetic oligonucleotide
  Antisense strand to SEQ ID NO: 249580
uuccuucaggacuaaggca

SEQ ID NO: 249582 - RNA, 19 nt, Artificial Sequence
  Description of Artificial Sequence: Synthetic oligonucleotide
  Sense strand starting at position 3903 SEQ ID NO: 3211
ugaagaugugcucaucucu

SEQ ID NO: 249583 - RNA, 19 nt, Artificial Sequence
  Description of Artificial Sequence: Synthetic oligonucleotide
  Antisense strand to SEQ ID NO: 249582
agagaugagcacaucuuca

SEQ ID NO: 249584 - RNA, 19 nt, Artificial Sequence
  Description of Artificial Sequence: Synthetic oligonucleotide
  Sense strand starting at position 3952 SEQ ID NO: 3211
cauaaugagcagcguuuau

SEQ ID NO: 249585 - RNA, 19 nt, Artificial Sequence
  Description of Artificial Sequence: Synthetic oligonucleotide
  Antisense strand to SEQ ID NO: 249584
auaaacgcugcucauuaug

SEQ ID NO: 249586 - RNA, 19 nt, Artificial Sequence
  Description of Artificial Sequence: Synthetic oligonucleotide
  Sense strand starting at position 3972 SEQ ID NO: 3211
uggugugugccucucacuu

SEQ ID NO: 249587 - RNA, 19 nt, Artificial Sequence
  Description of Artificial Sequence: Synthetic oligonucleotide
  Antisense strand to SEQ ID NO: 249586
aagugagaggcacacacca

SEQ ID NO: 249588 - RNA, 19 nt, Artificial Sequence
  Description of Artificial Sequence: Synthetic oligonucleotide
  Sense strand starting at position 87 SEQ ID NO: 3212
ccgcaagucuccuuaguau

SEQ ID NO: 249589 - RNA, 19 nt, Artificial Sequence
  Description of Artificial Sequence: Synthetic oligonucleotide
  Antisense strand to SEQ ID NO: 249588
auacuaaggagacuugcgg

SEQ ID NO: 249590 - RNA, 19 nt, Artificial Sequence
  Description of Artificial Sequence: Synthetic oligonucleotide
  Sense strand starting at position 194 SEQ ID NO: 3212
cgacaaacauaauauuaga

SEQ ID NO: 249591 - RNA, 19 nt, Artificial Sequence
  Description of Artificial Sequence: Synthetic oligonucleotide
  Antisense strand to SEQ ID NO: 249590
ucuaauauuauguuugucg

SEQ ID NO: 249592 - RNA, 19 nt, Artificial Sequence
  Description of Artificial Sequence: Synthetic oligonucleotide
  Sense strand starting at position 438 SEQ ID NO: 3212
ccucuucggcuccagauau

SEQ ID NO: 249593 - RNA, 19 nt, Artificial Sequence
  Description of Artificial Sequence: Synthetic oligonucleotide
  Antisense strand to SEQ ID NO: 249592
auaucuggagccgaagagg

SEQ ID NO: 249594 - RNA, 19 nt, Artificial Sequence
  Description of Artificial Sequence: Synthetic oligonucleotide
  Sense strand starting at position 495 SEQ ID NO: 3212
aagagauaggugcgugcuu

SEQ ID NO: 249595 - RNA, 19 nt, Artificial Sequence
  Description of Artificial Sequence: Synthetic oligonucleotide
  Antisense strand to SEQ ID NO: 249594
aagcacgcaccuaucucuu

SEQ ID NO: 249596 - RNA, 19 nt, Artificial Sequence
  Description of Artificial Sequence: Synthetic oligonucleotide
  Sense strand starting at position 506 SEQ ID NO: 3212
gcgugcuuccuguuuaccu

SEQ ID NO: 249597 - RNA, 19 nt, Artificial Sequence
  Description of Artificial Sequence: Synthetic oligonucleotide
  Antisense strand to SEQ ID NO: 249596
agguaaacaggaagcacgc

SEQ ID NO: 249598 - RNA, 19 nt, Artificial Sequence
  Description of Artificial Sequence: Synthetic oligonucleotide
  Sense strand starting at position 557 SEQ ID NO: 3212
ggcaacuaggagugacuua

SEQ ID NO: 249599 - RNA, 19 nt, Artificial Sequence
  Description of Artificial Sequence: Synthetic oligonucleotide
  Antisense strand to SEQ ID NO: 249598
uaagucacuccuaguugcc

SEQ ID NO: 249600 - RNA, 19 nt, Artificial Sequence
  Description of Artificial Sequence: Synthetic oligonucleotide
  Sense strand starting at position 587 SEQ ID NO: 3212
gugaaugguuacgcaaauc

SEQ ID NO: 249601 - RNA, 19 nt, Artificial Sequence
  Description of Artificial Sequence: Synthetic oligonucleotide
  Antisense strand to SEQ ID NO: 249600
gauuugcguaaccauucac

SEQ ID NO: 249602 - RNA, 19 nt, Artificial Sequence
  Description of Artificial Sequence: Synthetic oligonucleotide
  Sense strand starting at position 597 SEQ ID NO: 3212
acgcaaaucgcuugaguaa

SEQ ID NO: 249603 - RNA, 19 nt, Artificial Sequence
  Description of Artificial Sequence: Synthetic oligonucleotide
  Antisense strand to SEQ ID NO: 249602
uuacucaagcgauuugcgu

SEQ ID NO: 249604 - RNA, 19 nt, Artificial Sequence
  Description of Artificial Sequence: Synthetic oligonucleotide
  Sense strand starting at position 598 SEQ ID NO: 3212
cgcaaaucgcuugaguaaa

SEQ ID NO: 249605 - RNA, 19 nt, Artificial Sequence
  Description of Artificial Sequence: Synthetic oligonucleotide
  Antisense strand to SEQ ID NO: 249604
uuuacucaagcgauuugcg

SEQ ID NO: 249606 - RNA, 19 nt, Artificial Sequence
  Description of Artificial Sequence: Synthetic oligonucleotide
  Sense strand starting at position 600 SEQ ID NO: 3212
caaaucgcuugaguaaaua

SEQ ID NO: 249607 - RNA, 19 nt, Artificial Sequence
  Description of Artificial Sequence: Synthetic oligonucleotide
  Antisense strand to SEQ ID NO: 249606
uauuuacucaagcgauuug

SEQ ID NO: 249608 - RNA, 19 nt, Artificial Sequence
  Description of Artificial Sequence: Synthetic oligonucleotide
  Sense strand starting at position 654 SEQ ID NO: 3212
guacucaucugcuccagua

SEQ ID NO: 249609 - RNA, 19 nt, Artificial Sequence
  Description of Artificial Sequence: Synthetic oligonucleotide
  Antisense strand to SEQ ID NO: 249608
uacuggagcagaugaguac

SEQ ID NO: 249610 - RNA, 19 nt, Artificial Sequence
  Description of Artificial Sequence: Synthetic oligonucleotide
  Sense strand starting at position 656 SEQ ID NO: 3212
acucaucugcuccaguauu

SEQ ID NO: 249611 - RNA, 19 nt, Artificial Sequence
  Description of Artificial Sequence: Synthetic oligonucleotide
  Antisense strand to SEQ ID NO: 249610
aauacuggagcagaugagu

SEQ ID NO: 249612 - RNA, 19 nt, Artificial Sequence
  Description of Artificial Sequence: Synthetic oligonucleotide
  Sense strand starting at position 934 SEQ ID NO: 3212
aggugcuccuuucuccaaa

SEQ ID NO: 249613 - RNA, 19 nt, Artificial Sequence
  Description of Artificial Sequence: Synthetic oligonucleotide
  Antisense strand to SEQ ID NO: 249612
uuuggagaaaggagcaccu

SEQ ID NO: 249614 - RNA, 19 nt, Artificial Sequence
  Description of Artificial Sequence: Synthetic oligonucleotide
  Sense strand starting at position 935 SEQ ID NO: 3212
ggugcuccuuucuccaaau

SEQ ID NO: 249615 - RNA, 19 nt, Artificial Sequence
  Description of Artificial Sequence: Synthetic oligonucleotide
  Antisense strand to SEQ ID NO: 249614
auuuggagaaaggagcacc

SEQ ID NO: 249616 - RNA, 19 nt, Artificial Sequence
  Description of Artificial Sequence: Synthetic oligonucleotide
  Sense strand starting at position 1528 SEQ ID NO: 3212
cccgaaagcugauccuaaa

SEQ ID NO: 249617 - RNA, 19 nt, Artificial Sequence
  Description of Artificial Sequence: Synthetic oligonucleotide
  Antisense strand to SEQ ID NO: 249616
uuuaggaucagcuuucggg

SEQ ID NO: 249618 - RNA, 19 nt, Artificial Sequence
  Description of Artificial Sequence: Synthetic oligonucleotide
  Sense strand starting at position 2428 SEQ ID NO: 3212
agcgacacuuugcuaauuu

SEQ ID NO: 249619 - RNA, 19 nt, Artificial Sequence
  Description of Artificial Sequence: Synthetic oligonucleotide
  Antisense strand to SEQ ID NO: 249618
aaauuagcaaagugucgcu

SEQ ID NO: 249620 - RNA, 19 nt, Artificial Sequence
  Description of Artificial Sequence: Synthetic oligonucleotide
  Sense strand starting at position 2437 SEQ ID NO: 3212
uugcuaauuugccuggauu

SEQ ID NO: 249621 - RNA, 19 nt, Artificial Sequence
  Description of Artificial Sequence: Synthetic oligonucleotide
  Antisense strand to SEQ ID NO: 249620
aauccaggcaaauuagcaa

SEQ ID NO: 249622 - RNA, 19 nt, Artificial Sequence
  Description of Artificial Sequence: Synthetic oligonucleotide
  Sense strand starting at position 2450 SEQ ID NO: 3212
uggauuuccucaggaaauc

SEQ ID NO: 249623 - RNA, 19 nt, Artificial Sequence
  Description of Artificial Sequence: Synthetic oligonucleotide
  Antisense strand to SEQ ID NO: 249622
gauuuccugaggaaaucca

SEQ ID NO: 249624 - RNA, 19 nt, Artificial Sequence
  Description of Artificial Sequence: Synthetic oligonucleotide
  Sense strand starting at position 2581 SEQ ID NO: 3212
acaagaugcuuugucuuau

SEQ ID NO: 249625 - RNA, 19 nt, Artificial Sequence
  Description of Artificial Sequence: Synthetic oligonucleotide
  Antisense strand to SEQ ID NO: 249624
auaagacaaagcaucuugu

SEQ ID NO: 249626 - RNA, 19 nt, Artificial Sequence
  Description of Artificial Sequence: Synthetic oligonucleotide
  Sense strand starting at position 2812 SEQ ID NO: 3212
gagcgagagcgcucaguua

SEQ ID NO: 249627 - RNA, 19 nt, Artificial Sequence
  Description of Artificial Sequence: Synthetic oligonucleotide
  Antisense strand to SEQ ID NO: 249626
uaacugagcgcucucgcuc

SEQ ID NO: 249628 - RNA, 19 nt, Artificial Sequence
  Description of Artificial Sequence: Synthetic oligonucleotide
  Sense strand starting at position 2814 SEQ ID NO: 3212
gcgagagcgcucaguuaac

SEQ ID NO: 249629 - RNA, 19 nt, Artificial Sequence
  Description of Artificial Sequence: Synthetic oligonucleotide
  Antisense strand to SEQ ID NO: 249628
guuaacugagcgcucucgc

SEQ ID NO: 249630 - RNA, 19 nt, Artificial Sequence
  Description of Artificial Sequence: Synthetic oligonucleotide
  Sense strand starting at position 2911 SEQ ID NO: 3212
ugugcagacguggaacaau

SEQ ID NO: 249631 - RNA, 19 nt, Artificial Sequence
  Description of Artificial Sequence: Synthetic oligonucleotide
  Antisense strand to SEQ ID NO: 249630
auuguuccacgucugcaca

SEQ ID NO: 249632 - RNA, 19 nt, Artificial Sequence
  Description of Artificial Sequence: Synthetic oligonucleotide
  Sense strand starting at position 2923 SEQ ID NO: 3212
gaacaauuccucggagcca

SEQ ID NO: 249633 - RNA, 19 nt, Artificial Sequence
  Description of Artificial Sequence: Synthetic oligonucleotide
  Antisense strand to SEQ ID NO: 249632
uggcuccgaggaauuguuc

SEQ ID NO: 249634 - RNA, 19 nt, Artificial Sequence
  Description of Artificial Sequence: Synthetic oligonucleotide
  Sense strand starting at position 3148 SEQ ID NO: 3212
cugaauacccuauguuaug

SEQ ID NO: 249635 - RNA, 19 nt, Artificial Sequence
  Description of Artificial Sequence: Synthetic oligonucleotide
  Antisense strand to SEQ ID NO: 249634
cauaacauaggguauucag

SEQ ID NO: 249636 - RNA, 19 nt, Artificial Sequence
  Description of Artificial Sequence: Synthetic oligonucleotide
  Sense strand starting at position 3149 SEQ ID NO: 3212
ugaauacccuauguuaugu

SEQ ID NO: 249637 - RNA, 19 nt, Artificial Sequence
  Description of Artificial Sequence: Synthetic oligonucleotide
  Antisense strand to SEQ ID NO: 249636
acauaacauaggguauuca

SEQ ID NO: 249638 - RNA, 19 nt, Artificial Sequence
  Description of Artificial Sequence: Synthetic oligonucleotide
  Sense strand starting at position 3157 SEQ ID NO: 3212
cuauguuauguguggguuu

SEQ ID NO: 249639 - RNA, 19 nt, Artificial Sequence
  Description of Artificial Sequence: Synthetic oligonucleotide
  Antisense strand to SEQ ID NO: 249638
aaacccacacauaacauag

SEQ ID NO: 249640 - RNA, 19 nt, Artificial Sequence
  Description of Artificial Sequence: Synthetic oligonucleotide
  Sense strand starting at position 3225 SEQ ID NO: 3212
ggcaguaauccucaccgua

SEQ ID NO: 249641 - RNA, 19 nt, Artificial Sequence
  Description of Artificial Sequence: Synthetic oligonucleotide
  Antisense strand to SEQ ID NO: 249640
uacggugaggauuacugcc

SEQ ID NO: 249642 - RNA, 19 nt, Artificial Sequence
  Description of Artificial Sequence: Synthetic oligonucleotide
  Sense strand starting at position 3240 SEQ ID NO: 3212
cguaucuugugggcuucaa

SEQ ID NO: 249643 - RNA, 19 nt, Artificial Sequence
  Description of Artificial Sequence: Synthetic oligonucleotide
  Antisense strand to SEQ ID NO: 249642
uugaagcccacaagauacg

SEQ ID NO: 249644 - RNA, 19 nt, Artificial Sequence
  Description of Artificial Sequence: Synthetic oligonucleotide
  Sense strand starting at position 3392 SEQ ID NO: 3212
ucauuuggcuucugggaag

SEQ ID NO: 249645 - RNA, 19 nt, Artificial Sequence
  Description of Artificial Sequence: Synthetic oligonucleotide
  Antisense strand to SEQ ID NO: 249644
cuucccagaagccaaauga

SEQ ID NO: 249646 - RNA, 19 nt, Artificial Sequence
  Description of Artificial Sequence: Synthetic oligonucleotide
  Sense strand starting at position 3419 SEQ ID NO: 3212
agaugcaugugucugcaga

SEQ ID NO: 249647 - RNA, 19 nt, Artificial Sequence
  Description of Artificial Sequence: Synthetic oligonucleotide
  Antisense strand to SEQ ID NO: 249646
ucugcagacacaugcaucu

SEQ ID NO: 249648 - RNA, 19 nt, Artificial Sequence
  Description of Artificial Sequence: Synthetic oligonucleotide
  Sense strand starting at position 3447 SEQ ID NO: 3212
ugagccauuugucccuaau

SEQ ID NO: 249649 - RNA, 19 nt, Artificial Sequence
  Description of Artificial Sequence: Synthetic oligonucleotide
  Antisense strand to SEQ ID NO: 249648
auuagggacaaauggcuca

SEQ ID NO: 249650 - RNA, 19 nt, Artificial Sequence
  Description of Artificial Sequence: Synthetic oligonucleotide
  Sense strand starting at position 3472 SEQ ID NO: 3212
guucuuugguuccuccaau

SEQ ID NO: 249651 - RNA, 19 nt, Artificial Sequence
  Description of Artificial Sequence: Synthetic oligonucleotide
  Antisense strand to SEQ ID NO: 249650
auuggaggaaccaaagaac

SEQ ID NO: 249652 - RNA, 19 nt, Artificial Sequence
  Description of Artificial Sequence: Synthetic oligonucleotide
  Sense strand starting at position 3495 SEQ ID NO: 3212
ucuccucuccuguggaaga

SEQ ID NO: 249653 - RNA, 19 nt, Artificial Sequence
  Description of Artificial Sequence: Synthetic oligonucleotide
  Antisense strand to SEQ ID NO: 249652
ucuuccacaggagaggaga

SEQ ID NO: 249654 - RNA, 19 nt, Artificial Sequence
  Description of Artificial Sequence: Synthetic oligonucleotide
  Sense strand starting at position 3538 SEQ ID NO: 3212
gcuauuuacaaguggcuga

SEQ ID NO: 249655 - RNA, 19 nt, Artificial Sequence
  Description of Artificial Sequence: Synthetic oligonucleotide
  Antisense strand to SEQ ID NO: 249654
ucagccacuuguaaauagc

SEQ ID NO: 249656 - RNA, 19 nt, Artificial Sequence
  Description of Artificial Sequence: Synthetic oligonucleotide
  Sense strand starting at position 3542 SEQ ID NO: 3212
uuuacaaguggcugaagaa

SEQ ID NO: 249657 - RNA, 19 nt, Artificial Sequence
  Description of Artificial Sequence: Synthetic oligonucleotide
  Antisense strand to SEQ ID NO: 249656
uucuucagccacuuguaaa

SEQ ID NO: 249658 - RNA, 19 nt, Artificial Sequence
  Description of Artificial Sequence: Synthetic oligonucleotide
  Sense strand starting at position 3595 SEQ ID NO: 3212
gcucuaagauuguucuaaa

SEQ ID NO: 249659 - RNA, 19 nt, Artificial Sequence
  Description of Artificial Sequence: Synthetic oligonucleotide
  Antisense strand to SEQ ID NO: 249658
uuuagaacaaucuuagagc

SEQ ID NO: 249660 - RNA, 19 nt, Artificial Sequence
  Description of Artificial Sequence: Synthetic oligonucleotide
  Sense strand starting at position 3639 SEQ ID NO: 3212
uuagaagaaugcuuccaga

SEQ ID NO: 249661 - RNA, 19 nt, Artificial Sequence
  Description of Artificial Sequence: Synthetic oligonucleotide
  Antisense strand to SEQ ID NO: 249660
ucuggaagcauucuucuaa

SEQ ID NO: 249662 - RNA, 19 nt, Artificial Sequence
  Description of Artificial Sequence: Synthetic oligonucleotide
  Sense strand starting at position 3717 SEQ ID NO: 3212
cagcaugguuuacuugaga

SEQ ID NO: 249663 - RNA, 19 nt, Artificial Sequence
  Description of Artificial Sequence: Synthetic oligonucleotide
  Antisense strand to SEQ ID NO: 249662
ucucaaguaaaccaugcug

SEQ ID NO: 249664 - RNA, 19 nt, Artificial Sequence
  Description of Artificial Sequence: Synthetic oligonucleotide
  Sense strand starting at position 3722 SEQ ID NO: 3212
ugguuuacuugagaaggaa

SEQ ID NO: 249665 - RNA, 19 nt, Artificial Sequence
  Description of Artificial Sequence: Synthetic oligonucleotide
  Antisense strand to SEQ ID NO: 249664
uuccuucucaaguaaacca

SEQ ID NO: 249666 - RNA, 19 nt, Artificial Sequence
  Description of Artificial Sequence: Synthetic oligonucleotide
  Sense strand starting at position 3950 SEQ ID NO: 3212
gggccacagaucugagaca

SEQ ID NO: 249667 - RNA, 19 nt, Artificial Sequence
  Description of Artificial Sequence: Synthetic oligonucleotide
  Antisense strand to SEQ ID NO: 249666
ugucucagaucuguggccc

SEQ ID NO: 249668 - RNA, 19 nt, Artificial Sequence
  Description of Artificial Sequence: Synthetic oligonucleotide
  Sense strand starting at position 225 SEQ ID NO: 3213
ugggcagucuggucuccaa

SEQ ID NO: 249669 - RNA, 19 nt, Artificial Sequence
  Description of Artificial Sequence: Synthetic oligonucleotide
  Antisense strand to SEQ ID NO: 249668
uuggagaccagacugccca

SEQ ID NO: 249670 - RNA, 19 nt, Artificial Sequence
  Description of Artificial Sequence: Synthetic oligonucleotide
  Sense strand starting at position 438 SEQ ID NO: 3213
uauugagaaucugcaguau

SEQ ID NO: 249671 - RNA, 19 nt, Artificial Sequence
  Description of Artificial Sequence: Synthetic oligonucleotide
  Antisense strand to SEQ ID NO: 249670
auacugcagauucucaaua

SEQ ID NO: 249672 - RNA, 19 nt, Artificial Sequence
  Description of Artificial Sequence: Synthetic oligonucleotide
  Sense strand starting at position 558 SEQ ID NO: 3213
gccagcuagucuccaauaa

SEQ ID NO: 249673 - RNA, 19 nt, Artificial Sequence
  Description of Artificial Sequence: Synthetic oligonucleotide
  Antisense strand to SEQ ID NO: 249672
uuauuggagacuagcuggc

SEQ ID NO: 249674 - RNA, 19 nt, Artificial Sequence
  Description of Artificial Sequence: Synthetic oligonucleotide
  Sense strand starting at position 604 SEQ ID NO: 3213
gaagaccauguguguagaa

SEQ ID NO: 249675 - RNA, 19 nt, Artificial Sequence
  Description of Artificial Sequence: Synthetic oligonucleotide
  Antisense strand to SEQ ID NO: 249674
uucuacacacauggucuuc

SEQ ID NO: 249676 - RNA, 19 nt, Artificial Sequence
  Description of Artificial Sequence: Synthetic oligonucleotide
  Sense strand starting at position 605 SEQ ID NO: 3213
aagaccauguguguagaau

SEQ ID NO: 249677 - RNA, 19 nt, Artificial Sequence
  Description of Artificial Sequence: Synthetic oligonucleotide
  Antisense strand to SEQ ID NO: 249676
auucuacacacauggucuu

SEQ ID NO: 249678 - RNA, 19 nt, Artificial Sequence
  Description of Artificial Sequence: Synthetic oligonucleotide
  Sense strand starting at position 606 SEQ ID NO: 3213
agaccauguguguagaaua

SEQ ID NO: 249679 - RNA, 19 nt, Artificial Sequence
  Description of Artificial Sequence: Synthetic oligonucleotide
  Antisense strand to SEQ ID NO: 249678
uauucuacacacauggucu

SEQ ID NO: 249680 - RNA, 19 nt, Artificial Sequence
  Description of Artificial Sequence: Synthetic oligonucleotide
  Sense strand starting at position 617 SEQ ID NO: 3213
guagaauacggucagcaac

SEQ ID NO: 249681 - RNA, 19 nt, Artificial Sequence
  Description of Artificial Sequence: Synthetic oligonucleotide
  Antisense strand to SEQ ID NO: 249680
guugcugaccguauucuac

SEQ ID NO: 249682 - RNA, 19 nt, Artificial Sequence
  Description of Artificial Sequence: Synthetic oligonucleotide
  Sense strand starting at position 672 SEQ ID NO: 3213
accacuuauggaugugaca

SEQ ID NO: 249683 - RNA, 19 nt, Artificial Sequence
  Description of Artificial Sequence: Synthetic oligonucleotide
  Antisense strand to SEQ ID NO: 249682
ugucacauccauaaguggu

SEQ ID NO: 249684 - RNA, 19 nt, Artificial Sequence
  Description of Artificial Sequence: Synthetic oligonucleotide
  Sense strand starting at position 701 SEQ ID NO: 3213
ccuagaaguccugggagca

SEQ ID NO: 249685 - RNA, 19 nt, Artificial Sequence
  Description of Artificial Sequence: Synthetic oligonucleotide
  Antisense strand to SEQ ID NO: 249684
ugcucccaggacuucuagg

SEQ ID NO: 249686 - RNA, 19 nt, Artificial Sequence
  Description of Artificial Sequence: Synthetic oligonucleotide
  Sense strand starting at position 714 SEQ ID NO: 3213
ggagcagcacuccaaagau

SEQ ID NO: 249687 - RNA, 19 nt, Artificial Sequence
  Description of Artificial Sequence: Synthetic oligonucleotide
  Antisense strand to SEQ ID NO: 249686
aucuuuggagugcugcucc

SEQ ID NO: 249688 - RNA, 19 nt, Artificial Sequence
  Description of Artificial Sequence: Synthetic oligonucleotide
  Sense strand starting at position 724 SEQ ID NO: 3213
uccaaagauccauguguga

SEQ ID NO: 249689 - RNA, 19 nt, Artificial Sequence
  Description of Artificial Sequence: Synthetic oligonucleotide
  Antisense strand to SEQ ID NO: 249688
ucacacauggaucuuugga

SEQ ID NO: 249690 - RNA, 19 nt, Artificial Sequence
  Description of Artificial Sequence: Synthetic oligonucleotide
  Sense strand starting at position 787 SEQ ID NO: 3213
auuacuggcucccuggaau

SEQ ID NO: 249691 - RNA, 19 nt, Artificial Sequence
  Description of Artificial Sequence: Synthetic oligonucleotide
  Antisense strand to SEQ ID NO: 249690
auuccagggagccaguaau

SEQ ID NO: 249692 - RNA, 19 nt, Artificial Sequence
  Description of Artificial Sequence: Synthetic oligonucleotide
  Sense strand starting at position 1092 SEQ ID NO: 3213
gggaauuacugucccuguu

SEQ ID NO: 249693 - RNA, 19 nt, Artificial Sequence
  Description of Artificial Sequence: Synthetic oligonucleotide
  Antisense strand to SEQ ID NO: 249692
aacagggacaguaauuccc

SEQ ID NO: 249694 - RNA, 19 nt, Artificial Sequence
  Description of Artificial Sequence: Synthetic oligonucleotide
  Sense strand starting at position 1094 SEQ ID NO: 3213
gaauuacugucccuguuga

SEQ ID NO: 249695 - RNA, 19 nt, Artificial Sequence
  Description of Artificial Sequence: Synthetic oligonucleotide
  Antisense strand to SEQ ID NO: 249694
ucaacagggacaguaauuc

SEQ ID NO: 249696 - RNA, 19 nt, Artificial Sequence
  Description of Artificial Sequence: Synthetic oligonucleotide
  Sense strand starting at position 1323 SEQ ID NO: 3213
ucaagacuuggcuacgaua

SEQ ID NO: 249697 - RNA, 19 nt, Artificial Sequence
  Description of Artificial Sequence: Synthetic oligonucleotide
  Antisense strand to SEQ ID NO: 249696
uaucguagccaagucuuga

SEQ ID NO: 249698 - RNA, 19 nt, Artificial Sequence
  Description of Artificial Sequence: Synthetic oligonucleotide
  Sense strand starting at position 1537 SEQ ID NO: 3213
cagagugcauuccuaugau

SEQ ID NO: 249699 - RNA, 19 nt, Artificial Sequence
  Description of Artificial Sequence: Synthetic oligonucleotide
  Antisense strand to SEQ ID NO: 249698
aucauaggaaugcacucug

SEQ ID NO: 249700 - RNA, 19 nt, Artificial Sequence
  Description of Artificial Sequence: Synthetic oligonucleotide
  Sense strand starting at position 1540 SEQ ID NO: 3213
agugcauuccuaugaucac

SEQ ID NO: 249701 - RNA, 19 nt, Artificial Sequence
  Description of Artificial Sequence: Synthetic oligonucleotide
  Antisense strand to SEQ ID NO: 249700
gugaucauaggaaugcacu

SEQ ID NO: 249702 - RNA, 19 nt, Artificial Sequence
  Description of Artificial Sequence: Synthetic oligonucleotide
  Sense strand starting at position 1611 SEQ ID NO: 3213
gcacacaguuccucagaaa

SEQ ID NO: 249703 - RNA, 19 nt, Artificial Sequence
  Description of Artificial Sequence: Synthetic oligonucleotide
  Antisense strand to SEQ ID NO: 249702
uuucugaggaacugugugc

SEQ ID NO: 249704 - RNA, 19 nt, Artificial Sequence
  Description of Artificial Sequence: Synthetic oligonucleotide
  Sense strand starting at position 2182 SEQ ID NO: 3213
gucuuccaucccggaggua

SEQ ID NO: 249705 - RNA, 19 nt, Artificial Sequence
  Description of Artificial Sequence: Synthetic oligonucleotide
  Antisense strand to SEQ ID NO: 249704
uaccuccgggauggaagac

SEQ ID NO: 249706 - RNA, 19 nt, Artificial Sequence
  Description of Artificial Sequence: Synthetic oligonucleotide
  Sense strand starting at position 2298 SEQ ID NO: 3213
agaaguugcgauuguccaa

SEQ ID NO: 249707 - RNA, 19 nt, Artificial Sequence
  Description of Artificial Sequence: Synthetic oligonucleotide
  Antisense strand to SEQ ID NO: 249706
uuggacaaucgcaacuucu

SEQ ID NO: 249708 - RNA, 19 nt, Artificial Sequence
  Description of Artificial Sequence: Synthetic oligonucleotide
  Sense strand starting at position 2310 SEQ ID NO: 3213
uguccaaggucacuuaaua

SEQ ID NO: 249709 - RNA, 19 nt, Artificial Sequence
  Description of Artificial Sequence: Synthetic oligonucleotide
  Antisense strand to SEQ ID NO: 249708
uauuaagugaccuuggaca

SEQ ID NO: 249710 - RNA, 19 nt, Artificial Sequence
  Description of Artificial Sequence: Synthetic oligonucleotide
  Sense strand starting at position 2430 SEQ ID NO: 3213
ggauaagucuaucuggaua

SEQ ID NO: 249711 - RNA, 19 nt, Artificial Sequence
  Description of Artificial Sequence: Synthetic oligonucleotide
  Antisense strand to SEQ ID NO: 249710
uauccagauagacuuaucc

SEQ ID NO: 249712 - RNA, 19 nt, Artificial Sequence
  Description of Artificial Sequence: Synthetic oligonucleotide
  Sense strand starting at position 2505 SEQ ID NO: 3213
cagugauauaaagggugau

SEQ ID NO: 249713 - RNA, 19 nt, Artificial Sequence
  Description of Artificial Sequence: Synthetic oligonucleotide
  Antisense strand to SEQ ID NO: 249712
aucacccuuuauaucacug

SEQ ID NO: 249714 - RNA, 19 nt, Artificial Sequence
  Description of Artificial Sequence: Synthetic oligonucleotide
  Sense strand starting at position 2902 SEQ ID NO: 3213
ggagcaagcacugagagua

SEQ ID NO: 249715 - RNA, 19 nt, Artificial Sequence
  Description of Artificial Sequence: Synthetic oligonucleotide
  Antisense strand to SEQ ID NO: 249714
uacucucagugcuugcucc

SEQ ID NO: 249716 - RNA, 19 nt, Artificial Sequence
  Description of Artificial Sequence: Synthetic oligonucleotide
  Sense strand starting at position 3074 SEQ ID NO: 3213
acaaaugagcauugcuagu

SEQ ID NO: 249717 - RNA, 19 nt, Artificial Sequence
  Description of Artificial Sequence: Synthetic oligonucleotide
  Antisense strand to SEQ ID NO: 249716
acuagcaaugcucauuugu

SEQ ID NO: 249718 - RNA, 19 nt, Artificial Sequence
  Description of Artificial Sequence: Synthetic oligonucleotide
  Sense strand starting at position 3080 SEQ ID NO: 3213
gagcauugcuaguuccaac

SEQ ID NO: 249719 - RNA, 19 nt, Artificial Sequence
  Description of Artificial Sequence: Synthetic oligonucleotide
  Antisense strand to SEQ ID NO: 249718
guuggaacuagcaaugcuc

SEQ ID NO: 249720 - RNA, 19 nt, Artificial Sequence
  Description of Artificial Sequence: Synthetic oligonucleotide
  Sense strand starting at position 3304 SEQ ID NO: 3213
gagugauaacuaggugcga

SEQ ID NO: 249721 - RNA, 19 nt, Artificial Sequence
  Description of Artificial Sequence: Synthetic oligonucleotide
  Antisense strand to SEQ ID NO: 249720
ucgcaccuaguuaucacuc

SEQ ID NO: 249722 - RNA, 19 nt, Artificial Sequence
  Description of Artificial Sequence: Synthetic oligonucleotide
  Sense strand starting at position 3320 SEQ ID NO: 3213
cgaggaaaugaguggacau

SEQ ID NO: 249723 - RNA, 19 nt, Artificial Sequence
  Description of Artificial Sequence: Synthetic oligonucleotide
  Antisense strand to SEQ ID NO: 249722
auguccacucauuuccucg

SEQ ID NO: 249724 - RNA, 19 nt, Artificial Sequence
  Description of Artificial Sequence: Synthetic oligonucleotide
  Sense strand starting at position 3367 SEQ ID NO: 3213
guccaccuucugcagagau

SEQ ID NO: 249725 - RNA, 19 nt, Artificial Sequence
  Description of Artificial Sequence: Synthetic oligonucleotide
  Antisense strand to SEQ ID NO: 249724
aucucugcagaagguggac

SEQ ID NO: 249726 - RNA, 19 nt, Artificial Sequence
  Description of Artificial Sequence: Synthetic oligonucleotide
  Sense strand starting at position 3551 SEQ ID NO: 3213
gagcccagacucuaaagua

SEQ ID NO: 249727 - RNA, 19 nt, Artificial Sequence
  Description of Artificial Sequence: Synthetic oligonucleotide
  Antisense strand to SEQ ID NO: 249726
uacuuuagagucugggcuc

SEQ ID NO: 249728 - RNA, 19 nt, Artificial Sequence
  Description of Artificial Sequence: Synthetic oligonucleotide
  Sense strand starting at position 3705 SEQ ID NO: 3213
auuggaaaggugugagaug

SEQ ID NO: 249729 - RNA, 19 nt, Artificial Sequence
  Description of Artificial Sequence: Synthetic oligonucleotide
  Antisense strand to SEQ ID NO: 249728
caucucacaccuuuccaau

SEQ ID NO: 249730 - RNA, 19 nt, Artificial Sequence
  Description of Artificial Sequence: Synthetic oligonucleotide
  Sense strand starting at position 3710 SEQ ID NO: 3213
aaaggugugagauggaagu

SEQ ID NO: 249731 - RNA, 19 nt, Artificial Sequence
  Description of Artificial Sequence: Synthetic oligonucleotide
  Antisense strand to SEQ ID NO: 249730
acuuccaucucacaccuuu

SEQ ID NO: 249732 - RNA, 19 nt, Artificial Sequence
  Description of Artificial Sequence: Synthetic oligonucleotide
  Sense strand starting at position 3763 SEQ ID NO: 3213
cuuaguuccuccuugagua

SEQ ID NO: 249733 - RNA, 19 nt, Artificial Sequence
  Description of Artificial Sequence: Synthetic oligonucleotide
  Antisense strand to SEQ ID NO: 249732
uacucaaggaggaacuaag

SEQ ID NO: 249734 - RNA, 19 nt, Artificial Sequence
  Description of Artificial Sequence: Synthetic oligonucleotide
  Sense strand starting at position 3764 SEQ ID NO: 3213
uuaguuccuccuugaguag

SEQ ID NO: 249735 - RNA, 19 nt, Artificial Sequence
  Description of Artificial Sequence: Synthetic oligonucleotide
  Antisense strand to SEQ ID NO: 249734
cuacucaaggaggaacuaa

SEQ ID NO: 249736 - RNA, 19 nt, Artificial Sequence
  Description of Artificial Sequence: Synthetic oligonucleotide
  Sense strand starting at position 3765 SEQ ID NO: 3213
uaguuccuccuugaguagu

SEQ ID NO: 249737 - RNA, 19 nt, Artificial Sequence
  Description of Artificial Sequence: Synthetic oligonucleotide
  Antisense strand to SEQ ID NO: 249736
acuacucaaggaggaacua

SEQ ID NO: 249738 - RNA, 19 nt, Artificial Sequence
  Description of Artificial Sequence: Synthetic oligonucleotide
  Sense strand starting at position 3775 SEQ ID NO: 3213
uugaguaguguuggcaaua

SEQ ID NO: 249739 - RNA, 19 nt, Artificial Sequence
  Description of Artificial Sequence: Synthetic oligonucleotide
  Antisense strand to SEQ ID NO: 249738
uauugccaacacuacucaa

SEQ ID NO: 249740 - RNA, 19 nt, Artificial Sequence
  Description of Artificial Sequence: Synthetic oligonucleotide
  Sense strand starting at position 3776 SEQ ID NO: 3213
ugaguaguguuggcaauaa

SEQ ID NO: 249741 - RNA, 19 nt, Artificial Sequence
  Description of Artificial Sequence: Synthetic oligonucleotide
  Antisense strand to SEQ ID NO: 249740
uuauugccaacacuacuca

SEQ ID NO: 249742 - RNA, 19 nt, Artificial Sequence
  Description of Artificial Sequence: Synthetic oligonucleotide
  Sense strand starting at position 3780 SEQ ID NO: 3213
uaguguuggcaauaaagag

SEQ ID NO: 249743 - RNA, 19 nt, Artificial Sequence
  Description of Artificial Sequence: Synthetic oligonucleotide
  Antisense strand to SEQ ID NO: 249742
cucuuuauugccaacacua

SEQ ID NO: 249744 - RNA, 19 nt, Artificial Sequence
  Description of Artificial Sequence: Synthetic oligonucleotide
  Sense strand starting at position 3913 SEQ ID NO: 3213
uuagacaugugagagauuu

SEQ ID NO: 249745 - RNA, 19 nt, Artificial Sequence
  Description of Artificial Sequence: Synthetic oligonucleotide
  Antisense strand to SEQ ID NO: 249744
aaaucucucacaugucuaa

SEQ ID NO: 249746 - RNA, 19 nt, Artificial Sequence
  Description of Artificial Sequence: Synthetic oligonucleotide
  Sense strand starting at position 3937 SEQ ID NO: 3213
agggaacaccugugaggua

SEQ ID NO: 249747 - RNA, 19 nt, Artificial Sequence
  Description of Artificial Sequence: Synthetic oligonucleotide
  Antisense strand to SEQ ID NO: 249746
uaccucacagguguucccu

SEQ ID NO: 249748 - RNA, 19 nt, Artificial Sequence
  Description of Artificial Sequence: Synthetic oligonucleotide
  Sense strand starting at position 4 SEQ ID NO: 3215
uuuggagucuuuguuagga

SEQ ID NO: 249749 - RNA, 19 nt, Artificial Sequence
  Description of Artificial Sequence: Synthetic oligonucleotide
  Antisense strand to SEQ ID NO: 249748
uccuaacaaagacuccaaa

SEQ ID NO: 249750 - RNA, 19 nt, Artificial Sequence
  Description of Artificial Sequence: Synthetic oligonucleotide
  Sense strand starting at position 47 SEQ ID NO: 3215
aaaggagucuuuguuggua

SEQ ID NO: 249751 - RNA, 19 nt, Artificial Sequence
  Description of Artificial Sequence: Synthetic oligonucleotide
  Antisense strand to SEQ ID NO: 249750
uaccaacaaagacuccuuu

SEQ ID NO: 249752 - RNA, 19 nt, Artificial Sequence
  Description of Artificial Sequence: Synthetic oligonucleotide
  Sense strand starting at position 50 SEQ ID NO: 3215
ggagucuuuguugguacaa

SEQ ID NO: 249753 - RNA, 19 nt, Artificial Sequence
  Description of Artificial Sequence: Synthetic oligonucleotide
  Antisense strand to SEQ ID NO: 249752
uuguaccaacaaagacucc

SEQ ID NO: 249754 - RNA, 19 nt, Artificial Sequence
  Description of Artificial Sequence: Synthetic oligonucleotide
  Sense strand starting at position 169 SEQ ID NO: 3215
aaagguucugagugucaua

SEQ ID NO: 249755 - RNA, 19 nt, Artificial Sequence
  Description of Artificial Sequence: Synthetic oligonucleotide
  Antisense strand to SEQ ID NO: 249754
uaugacacucagaaccuuu

SEQ ID NO: 249756 - RNA, 19 nt, Artificial Sequence
  Description of Artificial Sequence: Synthetic oligonucleotide
  Sense strand starting at position 210 SEQ ID NO: 3215
gccgcacuuguucccaauu

SEQ ID NO: 249757 - RNA, 19 nt, Artificial Sequence
  Description of Artificial Sequence: Synthetic oligonucleotide
  Antisense strand to SEQ ID NO: 249756
aauugggaacaagugcggc

SEQ ID NO: 249758 - RNA, 19 nt, Artificial Sequence
  Description of Artificial Sequence: Synthetic oligonucleotide
  Sense strand starting at position 313 SEQ ID NO: 3215
cuccauauauggucauauc

SEQ ID NO: 249759 - RNA, 19 nt, Artificial Sequence
  Description of Artificial Sequence: Synthetic oligonucleotide
  Antisense strand to SEQ ID NO: 249758
gauaugaccauauauggag

SEQ ID NO: 249760 - RNA, 19 nt, Artificial Sequence
  Description of Artificial Sequence: Synthetic oligonucleotide
  Sense strand starting at position 562 SEQ ID NO: 3215
ucuuaaugacuccaaacgu

SEQ ID NO: 249761 - RNA, 19 nt, Artificial Sequence
  Description of Artificial Sequence: Synthetic oligonucleotide
  Antisense strand to SEQ ID NO: 249760
acguuuggagucauuaaga

SEQ ID NO: 249762 - RNA, 19 nt, Artificial Sequence
  Description of Artificial Sequence: Synthetic oligonucleotide
  Sense strand starting at position 740 SEQ ID NO: 3215
acaacucggcucuauacaa

SEQ ID NO: 249763 - RNA, 19 nt, Artificial Sequence
  Description of Artificial Sequence: Synthetic oligonucleotide
  Antisense strand to SEQ ID NO: 249762
uuguauagagccgaguugu

SEQ ID NO: 249764 - RNA, 19 nt, Artificial Sequence
  Description of Artificial Sequence: Synthetic oligonucleotide
  Sense strand starting at position 2024 SEQ ID NO: 3215
gcgagugaucccuccgcca

SEQ ID NO: 249765 - RNA, 19 nt, Artificial Sequence
  Description of Artificial Sequence: Synthetic oligonucleotide
  Antisense strand to SEQ ID NO: 249764
uggcggagggaucacucgc

SEQ ID NO: 249766 - RNA, 19 nt, Artificial Sequence
  Description of Artificial Sequence: Synthetic oligonucleotide
  Sense strand starting at position 2045 SEQ ID NO: 3215
ggccuauucuuuccauuug

SEQ ID NO: 249767 - RNA, 19 nt, Artificial Sequence
  Description of Artificial Sequence: Synthetic oligonucleotide
  Antisense strand to SEQ ID NO: 249766
caaauggaaagaauaggcc

SEQ ID NO: 249768 - RNA, 19 nt, Artificial Sequence
  Description of Artificial Sequence: Synthetic oligonucleotide
  Sense strand starting at position 2055 SEQ ID NO: 3215
uuccauuuguugccucaca

SEQ ID NO: 249769 - RNA, 19 nt, Artificial Sequence
  Description of Artificial Sequence: Synthetic oligonucleotide
  Antisense strand to SEQ ID NO: 249768
ugugaggcaacaaauggaa

SEQ ID NO: 249770 - RNA, 19 nt, Artificial Sequence
  Description of Artificial Sequence: Synthetic oligonucleotide
  Sense strand starting at position 2095 SEQ ID NO: 3215
cgaaaucgguuaucaacuu

SEQ ID NO: 249771 - RNA, 19 nt, Artificial Sequence
  Description of Artificial Sequence: Synthetic oligonucleotide
  Antisense strand to SEQ ID NO: 249770
aaguugauaaccgauuucg

SEQ ID NO: 249772 - RNA, 19 nt, Artificial Sequence
  Description of Artificial Sequence: Synthetic oligonucleotide
  Sense strand starting at position 2158 SEQ ID NO: 3215
uggcgagacccugagcuau

SEQ ID NO: 249773 - RNA, 19 nt, Artificial Sequence
  Description of Artificial Sequence: Synthetic oligonucleotide
  Antisense strand to SEQ ID NO: 249772
auagcucagggucucgcca

SEQ ID NO: 249774 - RNA, 19 nt, Artificial Sequence
  Description of Artificial Sequence: Synthetic oligonucleotide
  Sense strand starting at position 2172 SEQ ID NO: 3215
gcuauaagugccuacugga

SEQ ID NO: 249775 - RNA, 19 nt, Artificial Sequence
  Description of Artificial Sequence: Synthetic oligonucleotide
  Antisense strand to SEQ ID NO: 249774
uccaguaggcacuuauagc

SEQ ID NO: 249776 - RNA, 19 nt, Artificial Sequence
  Description of Artificial Sequence: Synthetic oligonucleotide
  Sense strand starting at position 2231 SEQ ID NO: 3215
uuccacuuggcggaagaau

SEQ ID NO: 249777 - RNA, 19 nt, Artificial Sequence
  Description of Artificial Sequence: Synthetic oligonucleotide
  Antisense strand to SEQ ID NO: 249776
auucuuccgccaaguggaa

SEQ ID NO: 249778 - RNA, 19 nt, Artificial Sequence
  Description of Artificial Sequence: Synthetic oligonucleotide
  Sense strand starting at position 2242 SEQ ID NO: 3215
ggaagaaucucacaggaaa

SEQ ID NO: 249779 - RNA, 19 nt, Artificial Sequence
  Description of Artificial Sequence: Synthetic oligonucleotide
  Antisense strand to SEQ ID NO: 249778
uuuccugugagauucuucc

SEQ ID NO: 249780 - RNA, 19 nt, Artificial Sequence
  Description of Artificial Sequence: Synthetic oligonucleotide
  Sense strand starting at position 2444 SEQ ID NO: 3215
cgucuaaaguccgccauuu

SEQ ID NO: 249781 - RNA, 19 nt, Artificial Sequence
  Description of Artificial Sequence: Synthetic oligonucleotide
  Antisense strand to SEQ ID NO: 249780
aaauggcggacuuuagacg

SEQ ID NO: 249782 - RNA, 19 nt, Artificial Sequence
  Description of Artificial Sequence: Synthetic oligonucleotide
  Sense strand starting at position 2474 SEQ ID NO: 3215
ugaagaaaggcguggaguu

SEQ ID NO: 249783 - RNA, 19 nt, Artificial Sequence
  Description of Artificial Sequence: Synthetic oligonucleotide
  Antisense strand to SEQ ID NO: 249782
aacuccacgccuuucuuca

SEQ ID NO: 249784 - RNA, 19 nt, Artificial Sequence
  Description of Artificial Sequence: Synthetic oligonucleotide
  Sense strand starting at position 2475 SEQ ID NO: 3215
gaagaaaggcguggaguua

SEQ ID NO: 249785 - RNA, 19 nt, Artificial Sequence
  Description of Artificial Sequence: Synthetic oligonucleotide
  Antisense strand to SEQ ID NO: 249784
uaacuccacgccuuucuuc

SEQ ID NO: 249786 - RNA, 19 nt, Artificial Sequence
  Description of Artificial Sequence: Synthetic oligonucleotide
  Sense strand starting at position 2484 SEQ ID NO: 3215
cguggaguuacuggauaau

SEQ ID NO: 249787 - RNA, 19 nt, Artificial Sequence
  Description of Artificial Sequence: Synthetic oligonucleotide
  Antisense strand to SEQ ID NO: 249786
auuauccaguaacuccacg

SEQ ID NO: 249788 - RNA, 19 nt, Artificial Sequence
  Description of Artificial Sequence: Synthetic oligonucleotide
  Sense strand starting at position 2678 SEQ ID NO: 3215
ggaguuuagaggugauugu

SEQ ID NO: 249789 - RNA, 19 nt, Artificial Sequence
  Description of Artificial Sequence: Synthetic oligonucleotide
  Antisense strand to SEQ ID NO: 249788
acaaucaccucuaaacucc

SEQ ID NO: 249790 - RNA, 19 nt, Artificial Sequence
  Description of Artificial Sequence: Synthetic oligonucleotide
  Sense strand starting at position 2698 SEQ ID NO: 3215
ugcucuggaccugaaguau

SEQ ID NO: 249791 - RNA, 19 nt, Artificial Sequence
  Description of Artificial Sequence: Synthetic oligonucleotide
  Antisense strand to SEQ ID NO: 249790
auacuucagguccagagca

SEQ ID NO: 249792 - RNA, 19 nt, Artificial Sequence
  Description of Artificial Sequence: Synthetic oligonucleotide
  Sense strand starting at position 2767 SEQ ID NO: 3215
aaaggcuaguguuugacau

SEQ ID NO: 249793 - RNA, 19 nt, Artificial Sequence
  Description of Artificial Sequence: Synthetic oligonucleotide
  Antisense strand to SEQ ID NO: 249792
augucaaacacuagccuuu

SEQ ID NO: 249794 - RNA, 19 nt, Artificial Sequence
  Description of Artificial Sequence: Synthetic oligonucleotide
  Sense strand starting at position 2774 SEQ ID NO: 3215
aguguuugacauuacauca

SEQ ID NO: 249795 - RNA, 19 nt, Artificial Sequence
  Description of Artificial Sequence: Synthetic oligonucleotide
  Antisense strand to SEQ ID NO: 249794
ugauguaaugucaaacacu

SEQ ID NO: 249796 - RNA, 19 nt, Artificial Sequence
  Description of Artificial Sequence: Synthetic oligonucleotide
  Sense strand starting at position 2835 SEQ ID NO: 3215
cguggaaacguauaaucag

SEQ ID NO: 249797 - RNA, 19 nt, Artificial Sequence
  Description of Artificial Sequence: Synthetic oligonucleotide
  Antisense strand to SEQ ID NO: 249796
cugauuauacguuuccacg

SEQ ID NO: 249798 - RNA, 19 nt, Artificial Sequence
  Description of Artificial Sequence: Synthetic oligonucleotide
  Sense strand starting at position 2843 SEQ ID NO: 3215
cguauaaucagagaauguu

SEQ ID NO: 249799 - RNA, 19 nt, Artificial Sequence
  Description of Artificial Sequence: Synthetic oligonucleotide
  Antisense strand to SEQ ID NO: 249798
aacauucucugauuauacg

SEQ ID NO: 249800 - RNA, 19 nt, Artificial Sequence
  Description of Artificial Sequence: Synthetic oligonucleotide
  Sense strand starting at position 2887 SEQ ID NO: 3215
gcaaaucaacucuggaugu

SEQ ID NO: 249801 - RNA, 19 nt, Artificial Sequence
  Description of Artificial Sequence: Synthetic oligonucleotide
  Antisense strand to SEQ ID NO: 249800
acauccagaguugauuugc

SEQ ID NO: 249802 - RNA, 19 nt, Artificial Sequence
  Description of Artificial Sequence: Synthetic oligonucleotide
  Sense strand starting at position 2919 SEQ ID NO: 3215
acauauucugaaugugauu

SEQ ID NO: 249803 - RNA, 19 nt, Artificial Sequence
  Description of Artificial Sequence: Synthetic oligonucleotide
  Antisense strand to SEQ ID NO: 249802
aaucacauucagaauaugu

SEQ ID NO: 249804 - RNA, 19 nt, Artificial Sequence
  Description of Artificial Sequence: Synthetic oligonucleotide
  Sense strand starting at position 3173 SEQ ID NO: 3215
aaagacaguugggaauaaa

SEQ ID NO: 249805 - RNA, 19 nt, Artificial Sequence
  Description of Artificial Sequence: Synthetic oligonucleotide
  Antisense strand to SEQ ID NO: 249804
uuuauucccaacugucuuu

SEQ ID NO: 249806 - RNA, 19 nt, Artificial Sequence
  Description of Artificial Sequence: Synthetic oligonucleotide
  Sense strand starting at position 3203 SEQ ID NO: 3215
gcuauaaauugaccauaag

SEQ ID NO: 249807 - RNA, 19 nt, Artificial Sequence
  Description of Artificial Sequence: Synthetic oligonucleotide
  Antisense strand to SEQ ID NO: 249806
cuuauggucaauuuauagc

SEQ ID NO: 249808 - RNA, 19 nt, Artificial Sequence
  Description of Artificial Sequence: Synthetic oligonucleotide
  Sense strand starting at position 3285 SEQ ID NO: 3215
aaaugaaagcaguauagca

SEQ ID NO: 249809 - RNA, 19 nt, Artificial Sequence
  Description of Artificial Sequence: Synthetic oligonucleotide
  Antisense strand to SEQ ID NO: 249808
ugcuauacugcuuucauuu

SEQ ID NO: 249810 - RNA, 19 nt, Artificial Sequence
  Description of Artificial Sequence: Synthetic oligonucleotide
  Sense strand starting at position 3287 SEQ ID NO: 3215
augaaagcaguauagcaau

SEQ ID NO: 249811 - RNA, 19 nt, Artificial Sequence
  Description of Artificial Sequence: Synthetic oligonucleotide
  Antisense strand to SEQ ID NO: 249810
auugcuauacugcuuucau

SEQ ID NO: 249812 - RNA, 19 nt, Artificial Sequence
  Description of Artificial Sequence: Synthetic oligonucleotide
  Sense strand starting at position 3293 SEQ ID NO: 3215
gcaguauagcaauauuaau

SEQ ID NO: 249813 - RNA, 19 nt, Artificial Sequence
  Description of Artificial Sequence: Synthetic oligonucleotide
  Antisense strand to SEQ ID NO: 249812
auuaauauugcuauacugc

SEQ ID NO: 249814 - RNA, 19 nt, Artificial Sequence
  Description of Artificial Sequence: Synthetic oligonucleotide
  Sense strand starting at position 3368 SEQ ID NO: 3215
acaguauggucuccugaac

SEQ ID NO: 249815 - RNA, 19 nt, Artificial Sequence
  Description of Artificial Sequence: Synthetic oligonucleotide
  Antisense strand to SEQ ID NO: 249814
guucaggagaccauacugu

SEQ ID NO: 249816 - RNA, 19 nt, Artificial Sequence
  Description of Artificial Sequence: Synthetic oligonucleotide
  Sense strand starting at position 3422 SEQ ID NO: 3215
gacgcuaugaacgaugaga

SEQ ID NO: 249817 - RNA, 19 nt, Artificial Sequence
  Description of Artificial Sequence: Synthetic oligonucleotide
  Antisense strand to SEQ ID NO: 249816
ucucaucguucauagcguc

SEQ ID NO: 249818 - RNA, 19 nt, Artificial Sequence
  Description of Artificial Sequence: Synthetic oligonucleotide
  Sense strand starting at position 3424 SEQ ID NO: 3215
cgcuaugaacgaugagaaa

SEQ ID NO: 249819 - RNA, 19 nt, Artificial Sequence
  Description of Artificial Sequence: Synthetic oligonucleotide
  Antisense strand to SEQ ID NO: 249818
uuucucaucguucauagcg

SEQ ID NO: 249820 - RNA, 19 nt, Artificial Sequence
  Description of Artificial Sequence: Synthetic oligonucleotide
  Sense strand starting at position 3427 SEQ ID NO: 3215
uaugaacgaugagaaauuu

SEQ ID NO: 249821 - RNA, 19 nt, Artificial Sequence
  Description of Artificial Sequence: Synthetic oligonucleotide
  Antisense strand to SEQ ID NO: 249820
aaauuucucaucguucaua

SEQ ID NO: 249822 - RNA, 19 nt, Artificial Sequence
  Description of Artificial Sequence: Synthetic oligonucleotide
  Sense strand starting at position 3705 SEQ ID NO: 3215
ucugaacugggcgaguaua

SEQ ID NO: 249823 - RNA, 19 nt, Artificial Sequence
  Description of Artificial Sequence: Synthetic oligonucleotide
  Antisense strand to SEQ ID NO: 249822
uauacucgcccaguucaga

SEQ ID NO: 249824 - RNA, 19 nt, Artificial Sequence
  Description of Artificial Sequence: Synthetic oligonucleotide
  Sense strand starting at position 3840 SEQ ID NO: 3215
guguuauaugaaugcaaag

SEQ ID NO: 249825 - RNA, 19 nt, Artificial Sequence
  Description of Artificial Sequence: Synthetic oligonucleotide
  Antisense strand to SEQ ID NO: 249824
cuuugcauucauauaacac

SEQ ID NO: 249826 - RNA, 19 nt, Artificial Sequence
  Description of Artificial Sequence: Synthetic oligonucleotide
  Sense strand starting at position 3958 SEQ ID NO: 3215
gaacacuugugaucuuaag

SEQ ID NO: 249827 - RNA, 19 nt, Artificial Sequence
  Description of Artificial Sequence: Synthetic oligonucleotide
  Antisense strand to SEQ ID NO: 249826
cuuaagaucacaaguguuc

SEQ ID NO: 249828 - RNA, 19 nt, Artificial Sequence
  Description of Artificial Sequence: Synthetic oligonucleotide
  Sense strand starting at position 270 SEQ ID NO: 3214
guggaaauaucuucuguuc

SEQ ID NO: 249829 - RNA, 19 nt, Artificial Sequence
  Description of Artificial Sequence: Synthetic oligonucleotide
  Antisense strand to SEQ ID NO: 249828
gaacagaagauauuuccac

SEQ ID NO: 249830 - RNA, 19 nt, Artificial Sequence
  Description of Artificial Sequence: Synthetic oligonucleotide
  Sense strand starting at position 317 SEQ ID NO: 3214
uuuggagucuuuguuagga

SEQ ID NO: 249831 - RNA, 19 nt, Artificial Sequence
  Description of Artificial Sequence: Synthetic oligonucleotide
  Antisense strand to SEQ ID NO: 249830
uccuaacaaagacuccaaa

SEQ ID NO: 249832 - RNA, 19 nt, Artificial Sequence
  Description of Artificial Sequence: Synthetic oligonucleotide
  Sense strand starting at position 360 SEQ ID NO: 3214
aaaggagucuuuguuggua

SEQ ID NO: 249833 - RNA, 19 nt, Artificial Sequence
  Description of Artificial Sequence: Synthetic oligonucleotide
  Antisense strand to SEQ ID NO: 249832
uaccaacaaagacuccuuu

SEQ ID NO: 249834 - RNA, 19 nt, Artificial Sequence
  Description of Artificial Sequence: Synthetic oligonucleotide
  Sense strand starting at position 363 SEQ ID NO: 3214
ggagucuuuguugguacaa

SEQ ID NO: 249835 - RNA, 19 nt, Artificial Sequence
  Description of Artificial Sequence: Synthetic oligonucleotide
  Antisense strand to SEQ ID NO: 249834
uuguaccaacaaagacucc

SEQ ID NO: 249836 - RNA, 19 nt, Artificial Sequence
  Description of Artificial Sequence: Synthetic oligonucleotide
  Sense strand starting at position 482 SEQ ID NO: 3214
aaagguucugagugucaua

SEQ ID NO: 249837 - RNA, 19 nt, Artificial Sequence
  Description of Artificial Sequence: Synthetic oligonucleotide
  Antisense strand to SEQ ID NO: 249836
uaugacacucagaaccuuu

SEQ ID NO: 249838 - RNA, 19 nt, Artificial Sequence
  Description of Artificial Sequence: Synthetic oligonucleotide
  Sense strand starting at position 523 SEQ ID NO: 3214
gccgcacuuguucccaauu

SEQ ID NO: 249839 - RNA, 19 nt, Artificial Sequence
  Description of Artificial Sequence: Synthetic oligonucleotide
  Antisense strand to SEQ ID NO: 249838
aauugggaacaagugcggc

SEQ ID NO: 249840 - RNA, 19 nt, Artificial Sequence
  Description of Artificial Sequence: Synthetic oligonucleotide
  Sense strand starting at position 626 SEQ ID NO: 3214
cuccauauauggucauauc

SEQ ID NO: 249841 - RNA, 19 nt, Artificial Sequence
  Description of Artificial Sequence: Synthetic oligonucleotide
  Antisense strand to SEQ ID NO: 249840
gauaugaccauauauggag

SEQ ID NO: 249842 - RNA, 19 nt, Artificial Sequence
  Description of Artificial Sequence: Synthetic oligonucleotide
  Sense strand starting at position 875 SEQ ID NO: 3214
ucuuaaugacuccaaacgu

SEQ ID NO: 249843 - RNA, 19 nt, Artificial Sequence
  Description of Artificial Sequence: Synthetic oligonucleotide
  Antisense strand to SEQ ID NO: 249842
acguuuggagucauuaaga

SEQ ID NO: 249844 - RNA, 19 nt, Artificial Sequence
  Description of Artificial Sequence: Synthetic oligonucleotide
  Sense strand starting at position 985 SEQ ID NO: 3214
aaugaagcgugucugaaca

SEQ ID NO: 249845 - RNA, 19 nt, Artificial Sequence
  Description of Artificial Sequence: Synthetic oligonucleotide
  Antisense strand to SEQ ID NO: 249844
uguucagacacgcuucauu

SEQ ID NO: 249846 - RNA, 19 nt, Artificial Sequence
  Description of Artificial Sequence: Synthetic oligonucleotide
  Sense strand starting at position 1053 SEQ ID NO: 3214
acaacucggcucuauacaa

SEQ ID NO: 249847 - RNA, 19 nt, Artificial Sequence
  Description of Artificial Sequence: Synthetic oligonucleotide
  Antisense strand to SEQ ID NO: 249846
uuguauagagccgaguugu

SEQ ID NO: 249848 - RNA, 19 nt, Artificial Sequence
  Description of Artificial Sequence: Synthetic oligonucleotide
  Sense strand starting at position 2337 SEQ ID NO: 3214
gcgagugaucccuccgcca

SEQ ID NO: 249849 - RNA, 19 nt, Artificial Sequence
  Description of Artificial Sequence: Synthetic oligonucleotide
  Antisense strand to SEQ ID NO: 249848
uggcggagggaucacucgc

SEQ ID NO: 249850 - RNA, 19 nt, Artificial Sequence
  Description of Artificial Sequence: Synthetic oligonucleotide
  Sense strand starting at position 2358 SEQ ID NO: 3214
ggccuauucuuuccauuug

SEQ ID NO: 249851 - RNA, 19 nt, Artificial Sequence
  Description of Artificial Sequence: Synthetic oligonucleotide
  Antisense strand to SEQ ID NO: 249850
caaauggaaagaauaggcc

SEQ ID NO: 249852 - RNA, 19 nt, Artificial Sequence
  Description of Artificial Sequence: Synthetic oligonucleotide
  Sense strand starting at position 2368 SEQ ID NO: 3214
uuccauuuguugccucaca

SEQ ID NO: 249853 - RNA, 19 nt, Artificial Sequence
  Description of Artificial Sequence: Synthetic oligonucleotide
  Antisense strand to SEQ ID NO: 249852
ugugaggcaacaaauggaa

SEQ ID NO: 249854 - RNA, 19 nt, Artificial Sequence
  Description of Artificial Sequence: Synthetic oligonucleotide
  Sense strand starting at position 2408 SEQ ID NO: 3214
cgaaaucgguuaucaacuu

SEQ ID NO: 249855 - RNA, 19 nt, Artificial Sequence
  Description of Artificial Sequence: Synthetic oligonucleotide
  Antisense strand to SEQ ID NO: 249854
aaguugauaaccgauuucg

SEQ ID NO: 249856 - RNA, 19 nt, Artificial Sequence
  Description of Artificial Sequence: Synthetic oligonucleotide
  Sense strand starting at position 2471 SEQ ID NO: 3214
uggcgagacccugagcuau

SEQ ID NO: 249857 - RNA, 19 nt, Artificial Sequence
  Description of Artificial Sequence: Synthetic oligonucleotide
  Antisense strand to SEQ ID NO: 249856
auagcucagggucucgcca

SEQ ID NO: 249858 - RNA, 19 nt, Artificial Sequence
  Description of Artificial Sequence: Synthetic oligonucleotide
  Sense strand starting at position 2473 SEQ ID NO: 3214
gcgagacccugagcuauaa

SEQ ID NO: 249859 - RNA, 19 nt, Artificial Sequence
  Description of Artificial Sequence: Synthetic oligonucleotide
  Antisense strand to SEQ ID NO: 249858
uuauagcucagggucucgc

SEQ ID NO: 249860 - RNA, 19 nt, Artificial Sequence
  Description of Artificial Sequence: Synthetic oligonucleotide
  Sense strand starting at position 2485 SEQ ID NO: 3214
gcuauaagugccuacugga

SEQ ID NO: 249861 - RNA, 19 nt, Artificial Sequence
  Description of Artificial Sequence: Synthetic oligonucleotide
  Antisense strand to SEQ ID NO: 249860
uccaguaggcacuuauagc

SEQ ID NO: 249862 - RNA, 19 nt, Artificial Sequence
  Description of Artificial Sequence: Synthetic oligonucleotide
  Sense strand starting at position 2544 SEQ ID NO: 3214
uuccacuuggcggaagaau

SEQ ID NO: 249863 - RNA, 19 nt, Artificial Sequence
  Description of Artificial Sequence: Synthetic oligonucleotide
  Antisense strand to SEQ ID NO: 249862
auucuuccgccaaguggaa

SEQ ID NO: 249864 - RNA, 19 nt, Artificial Sequence
  Description of Artificial Sequence: Synthetic oligonucleotide
  Sense strand starting at position 2555 SEQ ID NO: 3214
ggaagaaucucacaggaaa

SEQ ID NO: 249865 - RNA, 19 nt, Artificial Sequence
  Description of Artificial Sequence: Synthetic oligonucleotide
  Antisense strand to SEQ ID NO: 249864
uuuccugugagauucuucc

SEQ ID NO: 249866 - RNA, 19 nt, Artificial Sequence
  Description of Artificial Sequence: Synthetic oligonucleotide
  Sense strand starting at position 2757 SEQ ID NO: 3214
cgucuaaaguccgccauuu

SEQ ID NO: 249867 - RNA, 19 nt, Artificial Sequence
  Description of Artificial Sequence: Synthetic oligonucleotide
  Antisense strand to SEQ ID NO: 249866
aaauggcggacuuuagacg

SEQ ID NO: 249868 - RNA, 19 nt, Artificial Sequence
  Description of Artificial Sequence: Synthetic oligonucleotide
  Sense strand starting at position 2787 SEQ ID NO: 3214
ugaagaaaggcguggaguu

SEQ ID NO: 249869 - RNA, 19 nt, Artificial Sequence
  Description of Artificial Sequence: Synthetic oligonucleotide
  Antisense strand to SEQ ID NO: 249868
aacuccacgccuuucuuca

SEQ ID NO: 249870 - RNA, 19 nt, Artificial Sequence
  Description of Artificial Sequence: Synthetic oligonucleotide
  Sense strand starting at position 2788 SEQ ID NO: 3214
gaagaaaggcguggaguua

SEQ ID NO: 249871 - RNA, 19 nt, Artificial Sequence
  Description of Artificial Sequence: Synthetic oligonucleotide
  Antisense strand to SEQ ID NO: 249870
uaacuccacgccuuucuuc

SEQ ID NO: 249872 - RNA, 19 nt, Artificial Sequence
  Description of Artificial Sequence: Synthetic oligonucleotide
  Sense strand starting at position 2797 SEQ ID NO: 3214
cguggaguuacuggauaau

SEQ ID NO: 249873 - RNA, 19 nt, Artificial Sequence
  Description of Artificial Sequence: Synthetic oligonucleotide
  Antisense strand to SEQ ID NO: 249872
auuauccaguaacuccacg

SEQ ID NO: 249874 - RNA, 19 nt, Artificial Sequence
  Description of Artificial Sequence: Synthetic oligonucleotide
  Sense strand starting at position 2991 SEQ ID NO: 3214
ggaguuuagaggugauugu

SEQ ID NO: 249875 - RNA, 19 nt, Artificial Sequence
  Description of Artificial Sequence: Synthetic oligonucleotide
  Antisense strand to SEQ ID NO: 249874
acaaucaccucuaaacucc

SEQ ID NO: 249876 - RNA, 19 nt, Artificial Sequence
  Description of Artificial Sequence: Synthetic oligonucleotide
  Sense strand starting at position 3011 SEQ ID NO: 3214
ugcucuggaccugaaguau

SEQ ID NO: 249877 - RNA, 19 nt, Artificial Sequence
  Description of Artificial Sequence: Synthetic oligonucleotide
  Antisense strand to SEQ ID NO: 249876
auacuucagguccagagca

SEQ ID NO: 249878 - RNA, 19 nt, Artificial Sequence
  Description of Artificial Sequence: Synthetic oligonucleotide
  Sense strand starting at position 3080 SEQ ID NO: 3214
aaaggcuaguguuugacau

SEQ ID NO: 249879 - RNA, 19 nt, Artificial Sequence
  Description of Artificial Sequence: Synthetic oligonucleotide
  Antisense strand to SEQ ID NO: 249878
augucaaacacuagccuuu

SEQ ID NO: 249880 - RNA, 19 nt, Artificial Sequence
  Description of Artificial Sequence: Synthetic oligonucleotide
  Sense strand starting at position 3087 SEQ ID NO: 3214
aguguuugacauuacauca

SEQ ID NO: 249881 - RNA, 19 nt, Artificial Sequence
  Description of Artificial Sequence: Synthetic oligonucleotide
  Antisense strand to SEQ ID NO: 249880
ugauguaaugucaaacacu

SEQ ID NO: 249882 - RNA, 19 nt, Artificial Sequence
  Description of Artificial Sequence: Synthetic oligonucleotide
  Sense strand starting at position 3148 SEQ ID NO: 3214
cguggaaacguauaaucag

SEQ ID NO: 249883 - RNA, 19 nt, Artificial Sequence
  Description of Artificial Sequence: Synthetic oligonucleotide
  Antisense strand to SEQ ID NO: 249882
cugauuauacguuuccacg

SEQ ID NO: 249884 - RNA, 19 nt, Artificial Sequence
  Description of Artificial Sequence: Synthetic oligonucleotide
  Sense strand starting at position 3156 SEQ ID NO: 3214
cguauaaucagagaauguu

SEQ ID NO: 249885 - RNA, 19 nt, Artificial Sequence
  Description of Artificial Sequence: Synthetic oligonucleotide
  Antisense strand to SEQ ID NO: 249884
aacauucucugauuauacg

SEQ ID NO: 249886 - RNA, 19 nt, Artificial Sequence
  Description of Artificial Sequence: Synthetic oligonucleotide
  Sense strand starting at position 3200 SEQ ID NO: 3214
gcaaaucaacucuggaugu

SEQ ID NO: 249887 - RNA, 19 nt, Artificial Sequence
  Description of Artificial Sequence: Synthetic oligonucleotide
  Antisense strand to SEQ ID NO: 249886
acauccagaguugauuugc

SEQ ID NO: 249888 - RNA, 19 nt, Artificial Sequence
  Description of Artificial Sequence: Synthetic oligonucleotide
  Sense strand starting at position 3232 SEQ ID NO: 3214
acauauucugaaugugauu

SEQ ID NO: 249889 - RNA, 19 nt, Artificial Sequence
  Description of Artificial Sequence: Synthetic oligonucleotide
  Antisense strand to SEQ ID NO: 249888
aaucacauucagaauaugu

SEQ ID NO: 249890 - RNA, 19 nt, Artificial Sequence
  Description of Artificial Sequence: Synthetic oligonucleotide
  Sense strand starting at position 3486 SEQ ID NO: 3214
aaagacaguugggaauaaa

SEQ ID NO: 249891 - RNA, 19 nt, Artificial Sequence
  Description of Artificial Sequence: Synthetic oligonucleotide
  Antisense strand to SEQ ID NO: 249890
uuuauucccaacugucuuu

SEQ ID NO: 249892 - RNA, 19 nt, Artificial Sequence
  Description of Artificial Sequence: Synthetic oligonucleotide
  Sense strand starting at position 3516 SEQ ID NO: 3214
gcuauaaauugaccauaag

SEQ ID NO: 249893 - RNA, 19 nt, Artificial Sequence
  Description of Artificial Sequence: Synthetic oligonucleotide
  Antisense strand to SEQ ID NO: 249892
cuuauggucaauuuauagc

SEQ ID NO: 249894 - RNA, 19 nt, Artificial Sequence
  Description of Artificial Sequence: Synthetic oligonucleotide
  Sense strand starting at position 3598 SEQ ID NO: 3214
aaaugaaagcaguauagca

SEQ ID NO: 249895 - RNA, 19 nt, Artificial Sequence
  Description of Artificial Sequence: Synthetic oligonucleotide
  Antisense strand to SEQ ID NO: 249894
ugcuauacugcuuucauuu

SEQ ID NO: 249896 - RNA, 19 nt, Artificial Sequence
  Description of Artificial Sequence: Synthetic oligonucleotide
  Sense strand starting at position 3600 SEQ ID NO: 3214
augaaagcaguauagcaau

SEQ ID NO: 249897 - RNA, 19 nt, Artificial Sequence
  Description of Artificial Sequence: Synthetic oligonucleotide
  Antisense strand to SEQ ID NO: 249896
auugcuauacugcuuucau

SEQ ID NO: 249898 - RNA, 19 nt, Artificial Sequence
  Description of Artificial Sequence: Synthetic oligonucleotide
  Sense strand starting at position 3606 SEQ ID NO: 3214
gcaguauagcaauauuaau

SEQ ID NO: 249899 - RNA, 19 nt, Artificial Sequence
  Description of Artificial Sequence: Synthetic oligonucleotide
  Antisense strand to SEQ ID NO: 249898
auuaauauugcuauacugc

SEQ ID NO: 249900 - RNA, 19 nt, Artificial Sequence
  Description of Artificial Sequence: Synthetic oligonucleotide
  Sense strand starting at position 3681 SEQ ID NO: 3214
acaguauggucuccugaac

SEQ ID NO: 249901 - RNA, 19 nt, Artificial Sequence
  Description of Artificial Sequence: Synthetic oligonucleotide
  Antisense strand to SEQ ID NO: 249900
guucaggagaccauacugu

SEQ ID NO: 249902 - RNA, 19 nt, Artificial Sequence
  Description of Artificial Sequence: Synthetic oligonucleotide
  Sense strand starting at position 3735 SEQ ID NO: 3214
gacgcuaugaacgaugaga

SEQ ID NO: 249903 - RNA, 19 nt, Artificial Sequence
  Description of Artificial Sequence: Synthetic oligonucleotide
  Antisense strand to SEQ ID NO: 249902
ucucaucguucauagcguc

SEQ ID NO: 249904 - RNA, 19 nt, Artificial Sequence
  Description of Artificial Sequence: Synthetic oligonucleotide
  Sense strand starting at position 3737 SEQ ID NO: 3214
cgcuaugaacgaugagaaa

SEQ ID NO: 249905 - RNA, 19 nt, Artificial Sequence
  Description of Artificial Sequence: Synthetic oligonucleotide
  Antisense strand to SEQ ID NO: 249904
uuucucaucguucauagcg

SEQ ID NO: 249906 - RNA, 19 nt, Artificial Sequence
  Description of Artificial Sequence: Synthetic oligonucleotide
  Sense strand starting at position 3740 SEQ ID NO: 3214
uaugaacgaugagaaauuu

SEQ ID NO: 249907 - RNA, 19 nt, Artificial Sequence
  Description of Artificial Sequence: Synthetic oligonucleotide
  Antisense strand to SEQ ID NO: 249906
aaauuucucaucguucaua

SEQ ID NO: 249908 - RNA, 19 nt, Artificial Sequence
  Description of Artificial Sequence: Synthetic oligonucleotide
  Sense strand starting at position 77 SEQ ID NO: 3216
cagaucacuugagauuaga

SEQ ID NO: 249909 - RNA, 19 nt, Artificial Sequence
  Description of Artificial Sequence: Synthetic oligonucleotide
  Antisense strand to SEQ ID NO: 249908
ucuaaucucaagugaucug

SEQ ID NO: 249910 - RNA, 19 nt, Artificial Sequence
  Description of Artificial Sequence: Synthetic oligonucleotide
  Sense strand starting at position 111 SEQ ID NO: 3216
uggccaacaugucuuuaca

SEQ ID NO: 249911 - RNA, 19 nt, Artificial Sequence
  Description of Artificial Sequence: Synthetic oligonucleotide
  Antisense strand to SEQ ID NO: 249910
uguaaagacauguuggcca

SEQ ID NO: 249912 - RNA, 19 nt, Artificial Sequence
  Description of Artificial Sequence: Synthetic oligonucleotide
  Sense strand starting at position 419 SEQ ID NO: 3216
agaccacucugaucaguau

SEQ ID NO: 249913 - RNA, 19 nt, Artificial Sequence
  Description of Artificial Sequence: Synthetic oligonucleotide
  Antisense strand to SEQ ID NO: 249912
auacugaucagaguggucu

SEQ ID NO: 249914 - RNA, 19 nt, Artificial Sequence
  Description of Artificial Sequence: Synthetic oligonucleotide
  Sense strand starting at position 422 SEQ ID NO: 3216
ccacucugaucaguauagu

SEQ ID NO: 249915 - RNA, 19 nt, Artificial Sequence
  Description of Artificial Sequence: Synthetic oligonucleotide
  Antisense strand to SEQ ID NO: 249914
acuauacugaucagagugg

SEQ ID NO: 249916 - RNA, 19 nt, Artificial Sequence
  Description of Artificial Sequence: Synthetic oligonucleotide
  Sense strand starting at position 428 SEQ ID NO: 3216
ugaucaguauagugagaac

SEQ ID NO: 249917 - RNA, 19 nt, Artificial Sequence
  Description of Artificial Sequence: Synthetic oligonucleotide
  Antisense strand to SEQ ID NO: 249916
guucucacuauacugauca

SEQ ID NO: 249918 - RNA, 19 nt, Artificial Sequence
  Description of Artificial Sequence: Synthetic oligonucleotide
  Sense strand starting at position 673 SEQ ID NO: 3216
gcagacaacugagaaagau

SEQ ID NO: 249919 - RNA, 19 nt, Artificial Sequence
  Description of Artificial Sequence: Synthetic oligonucleotide
  Antisense strand to SEQ ID NO: 249918
aucuuucucaguugucugc

SEQ ID NO: 249920 - RNA, 19 nt, Artificial Sequence
  Description of Artificial Sequence: Synthetic oligonucleotide
  Sense strand starting at position 731 SEQ ID NO: 3216
aaggacuucugguaaacuc

SEQ ID NO: 249921 - RNA, 19 nt, Artificial Sequence
  Description of Artificial Sequence: Synthetic oligonucleotide
  Antisense strand to SEQ ID NO: 249920
gaguuuaccagaaguccuu

SEQ ID NO: 249922 - RNA, 19 nt, Artificial Sequence
  Description of Artificial Sequence: Synthetic oligonucleotide
  Sense strand starting at position 739 SEQ ID NO: 3216
cugguaaacuccucuugga

SEQ ID NO: 249923 - RNA, 19 nt, Artificial Sequence
  Description of Artificial Sequence: Synthetic oligonucleotide
  Antisense strand to SEQ ID NO: 249922
uccaagaggaguuuaccag

SEQ ID NO: 249924 - RNA, 19 nt, Artificial Sequence
  Description of Artificial Sequence: Synthetic oligonucleotide
  Sense strand starting at position 742 SEQ ID NO: 3216
guaaacuccucuuggaauu

SEQ ID NO: 249925 - RNA, 19 nt, Artificial Sequence
  Description of Artificial Sequence: Synthetic oligonucleotide
  Antisense strand to SEQ ID NO: 249924
aauuccaagaggaguuuac

SEQ ID NO: 249926 - RNA, 19 nt, Artificial Sequence
  Description of Artificial Sequence: Synthetic oligonucleotide
  Sense strand starting at position 850 SEQ ID NO: 3216
agcccugagcuauaguuga

SEQ ID NO: 249927 - RNA, 19 nt, Artificial Sequence
  Description of Artificial Sequence: Synthetic oligonucleotide
  Antisense strand to SEQ ID NO: 249926
ucaacuauagcucagggcu

SEQ ID NO: 249928 - RNA, 19 nt, Artificial Sequence
  Description of Artificial Sequence: Synthetic oligonucleotide
  Sense strand starting at position 870 SEQ ID NO: 3216
gcucaaauaccauggucuu

SEQ ID NO: 249929 - RNA, 19 nt, Artificial Sequence
  Description of Artificial Sequence: Synthetic oligonucleotide
  Antisense strand to SEQ ID NO: 249928
aagaccaugguauuugagc

SEQ ID NO: 249930 - RNA, 19 nt, Artificial Sequence
  Description of Artificial Sequence: Synthetic oligonucleotide
  Sense strand starting at position 876 SEQ ID NO: 3216
auaccauggucuuaaaugu

SEQ ID NO: 249931 - RNA, 19 nt, Artificial Sequence
  Description of Artificial Sequence: Synthetic oligonucleotide
  Antisense strand to SEQ ID NO: 249930
acauuuaagaccaugguau

SEQ ID NO: 249932 - RNA, 19 nt, Artificial Sequence
  Description of Artificial Sequence: Synthetic oligonucleotide
  Sense strand starting at position 883 SEQ ID NO: 3216
ggucuuaaauguucuccaa

SEQ ID NO: 249933 - RNA, 19 nt, Artificial Sequence
  Description of Artificial Sequence: Synthetic oligonucleotide
  Antisense strand to SEQ ID NO: 249932
uuggagaacauuuaagacc

SEQ ID NO: 249934 - RNA, 19 nt, Artificial Sequence
  Description of Artificial Sequence: Synthetic oligonucleotide
  Sense strand starting at position 887 SEQ ID NO: 3216
uuaaauguucuccaacagu

SEQ ID NO: 249935 - RNA, 19 nt, Artificial Sequence
  Description of Artificial Sequence: Synthetic oligonucleotide
  Antisense strand to SEQ ID NO: 249934
acuguuggagaacauuuaa

SEQ ID NO: 249936 - RNA, 19 nt, Artificial Sequence
  Description of Artificial Sequence: Synthetic oligonucleotide
  Sense strand starting at position 903 SEQ ID NO: 3216
aguuuaacuguacauacuu

SEQ ID NO: 249937 - RNA, 19 nt, Artificial Sequence
  Description of Artificial Sequence: Synthetic oligonucleotide
  Antisense strand to SEQ ID NO: 249936
aaguauguacaguuaaacu

SEQ ID NO: 249938 - RNA, 19 nt, Artificial Sequence
  Description of Artificial Sequence: Synthetic oligonucleotide
  Sense strand starting at position 948 SEQ ID NO: 3216
cucagaaauaggugcgaga

SEQ ID NO: 249939 - RNA, 19 nt, Artificial Sequence
  Description of Artificial Sequence: Synthetic oligonucleotide
  Antisense strand to SEQ ID NO: 249938
ucucgcaccuauuucugag

SEQ ID NO: 249940 - RNA, 19 nt, Artificial Sequence
  Description of Artificial Sequence: Synthetic oligonucleotide
  Sense strand starting at position 950 SEQ ID NO: 3216
cagaaauaggugcgagaua

SEQ ID NO: 249941 - RNA, 19 nt, Artificial Sequence
  Description of Artificial Sequence: Synthetic oligonucleotide
  Antisense strand to SEQ ID NO: 249940
uaucucgcaccuauuucug

SEQ ID NO: 249942 - RNA, 19 nt, Artificial Sequence
  Description of Artificial Sequence: Synthetic oligonucleotide
  Sense strand starting at position 951 SEQ ID NO: 3216
agaaauaggugcgagauau

SEQ ID NO: 249943 - RNA, 19 nt, Artificial Sequence
  Description of Artificial Sequence: Synthetic oligonucleotide
  Antisense strand to SEQ ID NO: 249942
auaucucgcaccuauuucu

SEQ ID NO: 249944 - RNA, 19 nt, Artificial Sequence
  Description of Artificial Sequence: Synthetic oligonucleotide
  Sense strand starting at position 958 SEQ ID NO: 3216
ggugcgagauauguggaua

SEQ ID NO: 249945 - RNA, 19 nt, Artificial Sequence
  Description of Artificial Sequence: Synthetic oligonucleotide
  Antisense strand to SEQ ID NO: 249944
uauccacauaucucgcacc

SEQ ID NO: 249946 - RNA, 19 nt, Artificial Sequence
  Description of Artificial Sequence: Synthetic oligonucleotide
  Sense strand starting at position 959 SEQ ID NO: 3216
gugcgagauauguggauaa

SEQ ID NO: 249947 - RNA, 19 nt, Artificial Sequence
  Description of Artificial Sequence: Synthetic oligonucleotide
  Antisense strand to SEQ ID NO: 249946
uuauccacauaucucgcac

SEQ ID NO: 249948 - RNA, 19 nt, Artificial Sequence
  Description of Artificial Sequence: Synthetic oligonucleotide
  Sense strand starting at position 961 SEQ ID NO: 3216
gcgagauauguggauaaau

SEQ ID NO: 249949 - RNA, 19 nt, Artificial Sequence
  Description of Artificial Sequence: Synthetic oligonucleotide
  Antisense strand to SEQ ID NO: 249948
auuuauccacauaucucgc

SEQ ID NO: 249950 - RNA, 19 nt, Artificial Sequence
  Description of Artificial Sequence: Synthetic oligonucleotide
  Sense strand starting at position 982 SEQ ID NO: 3216
guuagaaguaaauguugau

SEQ ID NO: 249951 - RNA, 19 nt, Artificial Sequence
  Description of Artificial Sequence: Synthetic oligonucleotide
  Antisense strand to SEQ ID NO: 249950
aucaacauuuacuucuaac

SEQ ID NO: 249952 - RNA, 19 nt, Artificial Sequence
  Description of Artificial Sequence: Synthetic oligonucleotide
  Sense strand starting at position 991 SEQ ID NO: 3216
aaauguugaugagaggcaa

SEQ ID NO: 249953 - RNA, 19 nt, Artificial Sequence
  Description of Artificial Sequence: Synthetic oligonucleotide
  Antisense strand to SEQ ID NO: 249952
uugccucucaucaacauuu

SEQ ID NO: 249954 - RNA, 19 nt, Artificial Sequence
  Description of Artificial Sequence: Synthetic oligonucleotide
  Sense strand starting at position 1136 SEQ ID NO: 3216
ccugaugccugaguugaaa

SEQ ID NO: 249955 - RNA, 19 nt, Artificial Sequence
  Description of Artificial Sequence: Synthetic oligonucleotide
  Antisense strand to SEQ ID NO: 249954
uuucaacucaggcaucagg

SEQ ID NO: 249956 - RNA, 19 nt, Artificial Sequence
  Description of Artificial Sequence: Synthetic oligonucleotide
  Sense strand starting at position 1138 SEQ ID NO: 3216
ugaugccugaguugaaaug

SEQ ID NO: 249957 - RNA, 19 nt, Artificial Sequence
  Description of Artificial Sequence: Synthetic oligonucleotide
  Antisense strand to SEQ ID NO: 249956
cauuucaacucaggcauca

SEQ ID NO: 249958 - RNA, 19 nt, Artificial Sequence
  Description of Artificial Sequence: Synthetic oligonucleotide
  Sense strand starting at position 1162 SEQ ID NO: 3216
uggcuaacacgaugcuauu

SEQ ID NO: 249959 - RNA, 19 nt, Artificial Sequence
  Description of Artificial Sequence: Synthetic oligonucleotide
  Antisense strand to SEQ ID NO: 249958
aauagcaucguguuagcca

SEQ ID NO: 249960 - RNA, 19 nt, Artificial Sequence
  Description of Artificial Sequence: Synthetic oligonucleotide
  Sense strand starting at position 1165 SEQ ID NO: 3216
cuaacacgaugcuauuaaa

SEQ ID NO: 249961 - RNA, 19 nt, Artificial Sequence
  Description of Artificial Sequence: Synthetic oligonucleotide
  Antisense strand to SEQ ID NO: 249960
uuuaauagcaucguguuag

SEQ ID NO: 249962 - RNA, 19 nt, Artificial Sequence
  Description of Artificial Sequence: Synthetic oligonucleotide
  Sense strand starting at position 1176 SEQ ID NO: 3216
cuauuaaauccugggucuu

SEQ ID NO: 249963 - RNA, 19 nt, Artificial Sequence
  Description of Artificial Sequence: Synthetic oligonucleotide
  Antisense strand to SEQ ID NO: 249962
aagacccaggauuuaauag

SEQ ID NO: 249964 - RNA, 19 nt, Artificial Sequence
  Description of Artificial Sequence: Synthetic oligonucleotide
  Sense strand starting at position 1246 SEQ ID NO: 3216
ccaggauucccggguagag

SEQ ID NO: 249965 - RNA, 19 nt, Artificial Sequence
  Description of Artificial Sequence: Synthetic oligonucleotide
  Antisense strand to SEQ ID NO: 249964
cucuacccgggaauccugg

SEQ ID NO: 249966 - RNA, 19 nt, Artificial Sequence
  Description of Artificial Sequence: Synthetic oligonucleotide
  Sense strand starting at position 2320 SEQ ID NO: 3216
guagcagaacgguucguuu

SEQ ID NO: 249967 - RNA, 19 nt, Artificial Sequence
  Description of Artificial Sequence: Synthetic oligonucleotide
  Antisense strand to SEQ ID NO: 249966
aaacgaaccguucugcuac

SEQ ID NO: 249968 - RNA, 19 nt, Artificial Sequence
  Description of Artificial Sequence: Synthetic oligonucleotide
  Sense strand starting at position 2323 SEQ ID NO: 3216
gcagaacgguucguuuagu

SEQ ID NO: 249969 - RNA, 19 nt, Artificial Sequence
  Description of Artificial Sequence: Synthetic oligonucleotide
  Antisense strand to SEQ ID NO: 249968
acuaaacgaaccguucugc

SEQ ID NO: 249970 - RNA, 19 nt, Artificial Sequence
  Description of Artificial Sequence: Synthetic oligonucleotide
  Sense strand starting at position 2324 SEQ ID NO: 3216
cagaacgguucguuuaguu

SEQ ID NO: 249971 - RNA, 19 nt, Artificial Sequence
  Description of Artificial Sequence: Synthetic oligonucleotide
  Antisense strand to SEQ ID NO: 249970
aacuaaacgaaccguucug

SEQ ID NO: 249972 - RNA, 19 nt, Artificial Sequence
  Description of Artificial Sequence: Synthetic oligonucleotide
  Sense strand starting at position 3250 SEQ ID NO: 3216
caguaaagaucugcugaau

SEQ ID NO: 249973 - RNA, 19 nt, Artificial Sequence
  Description of Artificial Sequence: Synthetic oligonucleotide
  Antisense strand to SEQ ID NO: 249972
auucagcagaucuuuacug

SEQ ID NO: 249974 - RNA, 19 nt, Artificial Sequence
  Description of Artificial Sequence: Synthetic oligonucleotide
  Sense strand starting at position 3291 SEQ ID NO: 3216
cccacugccugagaaugaa

SEQ ID NO: 249975 - RNA, 19 nt, Artificial Sequence
  Description of Artificial Sequence: Synthetic oligonucleotide
  Antisense strand to SEQ ID NO: 249974
uucauucucaggcaguggg

SEQ ID NO: 249976 - RNA, 19 nt, Artificial Sequence
  Description of Artificial Sequence: Synthetic oligonucleotide
  Sense strand starting at position 3294 SEQ ID NO: 3216
acugccugagaaugaauaa

SEQ ID NO: 249977 - RNA, 19 nt, Artificial Sequence
  Description of Artificial Sequence: Synthetic oligonucleotide
  Antisense strand to SEQ ID NO: 249976
uuauucauucucaggcagu

SEQ ID NO: 249978 - RNA, 19 nt, Artificial Sequence
  Description of Artificial Sequence: Synthetic oligonucleotide
  Sense strand starting at position 3371 SEQ ID NO: 3216
aggcaagaaugggaagaua

SEQ ID NO: 249979 - RNA, 19 nt, Artificial Sequence
  Description of Artificial Sequence: Synthetic oligonucleotide
  Antisense strand to SEQ ID NO: 249978
uaucuucccauucuugccu

SEQ ID NO: 249980 - RNA, 19 nt, Artificial Sequence
  Description of Artificial Sequence: Synthetic oligonucleotide
  Sense strand starting at position 3382 SEQ ID NO: 3216
ggaagauaucacugcacac

SEQ ID NO: 249981 - RNA, 19 nt, Artificial Sequence
  Description of Artificial Sequence: Synthetic oligonucleotide
  Antisense strand to SEQ ID NO: 249980
gugugcagugauaucuucc

SEQ ID NO: 249982 - RNA, 19 nt, Artificial Sequence
  Description of Artificial Sequence: Synthetic oligonucleotide
  Sense strand starting at position 3589 SEQ ID NO: 3216
gugggaaggguggauguua

SEQ ID NO: 249983 - RNA, 19 nt, Artificial Sequence
  Description of Artificial Sequence: Synthetic oligonucleotide
  Antisense strand to SEQ ID NO: 249982
uaacauccacccuucccac

SEQ ID NO: 249984 - RNA, 19 nt, Artificial Sequence
  Description of Artificial Sequence: Synthetic oligonucleotide
  Sense strand starting at position 3697 SEQ ID NO: 3216
agucacuucucccuccaga

SEQ ID NO: 249985 - RNA, 19 nt, Artificial Sequence
  Description of Artificial Sequence: Synthetic oligonucleotide
  Antisense strand to SEQ ID NO: 249984
ucuggagggagaagugacu

SEQ ID NO: 249986 - RNA, 19 nt, Artificial Sequence
  Description of Artificial Sequence: Synthetic oligonucleotide
  Sense strand starting at position 3967 SEQ ID NO: 3216
agcuuuagucuccaguacu

SEQ ID NO: 249987 - RNA, 19 nt, Artificial Sequence
  Description of Artificial Sequence: Synthetic oligonucleotide
  Antisense strand to SEQ ID NO: 249986
aguacuggagacuaaagcu

SEQ ID NO: 249988 - RNA, 19 nt, Artificial Sequence
  Description of Artificial Sequence: Synthetic oligonucleotide
  Sense strand starting at position 312 SEQ ID NO: 3217
cagugaucucagcaggaca

SEQ ID NO: 249989 - RNA, 19 nt, Artificial Sequence
  Description of Artificial Sequence: Synthetic oligonucleotide
  Antisense strand to SEQ ID NO: 249988
uguccugcugagaucacug

SEQ ID NO: 249990 - RNA, 19 nt, Artificial Sequence
  Description of Artificial Sequence: Synthetic oligonucleotide
  Sense strand starting at position 383 SEQ ID NO: 3217
gcagcauccauggauggua

SEQ ID NO: 249991 - RNA, 19 nt, Artificial Sequence
  Description of Artificial Sequence: Synthetic oligonucleotide
  Antisense strand to SEQ ID NO: 249990
uaccauccauggaugcugc

SEQ ID NO: 249992 - RNA, 19 nt, Artificial Sequence
  Description of Artificial Sequence: Synthetic oligonucleotide
  Sense strand starting at position 625 SEQ ID NO: 3217
caggaucaguguuccugau

SEQ ID NO: 249993 - RNA, 19 nt, Artificial Sequence
  Description of Artificial Sequence: Synthetic oligonucleotide
  Antisense strand to SEQ ID NO: 249992
aucaggaacacugauccug

SEQ ID NO: 249994 - RNA, 19 nt, Artificial Sequence
  Description of Artificial Sequence: Synthetic oligonucleotide
  Sense strand starting at position 732 SEQ ID NO: 3217
acgacacugucucuagaua

SEQ ID NO: 249995 - RNA, 19 nt, Artificial Sequence
  Description of Artificial Sequence: Synthetic oligonucleotide
  Antisense strand to SEQ ID NO: 249994
uaucuagagacagugucgu

SEQ ID NO: 249996 - RNA, 19 nt, Artificial Sequence
  Description of Artificial Sequence: Synthetic oligonucleotide
  Sense strand starting at position 733 SEQ ID NO: 3217
cgacacugucucuagauau

SEQ ID NO: 249997 - RNA, 19 nt, Artificial Sequence
  Description of Artificial Sequence: Synthetic oligonucleotide
  Antisense strand to SEQ ID NO: 249996
auaucuagagacagugucg

SEQ ID NO: 249998 - RNA, 19 nt, Artificial Sequence
  Description of Artificial Sequence: Synthetic oligonucleotide
  Sense strand starting at position 775 SEQ ID NO: 3217
cucaauagguucuuaggau

SEQ ID NO: 249999 - RNA, 19 nt, Artificial Sequence
  Description of Artificial Sequence: Synthetic oligonucleotide
  Antisense strand to SEQ ID NO: 249998
auccuaagaaccuauugag

SEQ ID NO: 250000 - RNA, 19 nt, Artificial Sequence
  Description of Artificial Sequence: Synthetic oligonucleotide
  Sense strand starting at position 795 SEQ ID NO: 3217
accacagugcuccaucauu

SEQ ID NO: 250001 - RNA, 19 nt, Artificial Sequence
  Description of Artificial Sequence: Synthetic oligonucleotide
  Antisense strand to SEQ ID NO: 250000
aaugauggagcacuguggu

SEQ ID NO: 250002 - RNA, 19 nt, Artificial Sequence
  Description of Artificial Sequence: Synthetic oligonucleotide
  Sense strand starting at position 866 SEQ ID NO: 3217
cagauucuagucuauggua

SEQ ID NO: 250003 - RNA, 19 nt, Artificial Sequence
  Description of Artificial Sequence: Synthetic oligonucleotide
  Antisense strand to SEQ ID NO: 250002
uaccauagacuagaaucug

SEQ ID NO: 250004 - RNA, 19 nt, Artificial Sequence
  Description of Artificial Sequence: Synthetic oligonucleotide
  Sense strand starting at position 868 SEQ ID NO: 3217
gauucuagucuaugguaua

SEQ ID NO: 250005 - RNA, 19 nt, Artificial Sequence
  Description of Artificial Sequence: Synthetic oligonucleotide
  Antisense strand to SEQ ID NO: 250004
uauaccauagacuagaauc

SEQ ID NO: 250006 - RNA, 19 nt, Artificial Sequence
  Description of Artificial Sequence: Synthetic oligonucleotide
  Sense strand starting at position 873 SEQ ID NO: 3217
uagucuaugguauaugcaa

SEQ ID NO: 250007 - RNA, 19 nt, Artificial Sequence
  Description of Artificial Sequence: Synthetic oligonucleotide
  Antisense strand to SEQ ID NO: 250006
uugcauauaccauagacua

SEQ ID NO: 250008 - RNA, 19 nt, Artificial Sequence
  Description of Artificial Sequence: Synthetic oligonucleotide
  Sense strand starting at position 881 SEQ ID NO: 3217
gguauaugcaaaugaagga

SEQ ID NO: 250009 - RNA, 19 nt, Artificial Sequence
  Description of Artificial Sequence: Synthetic oligonucleotide
  Antisense strand to SEQ ID NO: 250008
uccuucauuugcauauacc

SEQ ID NO: 250010 - RNA, 19 nt, Artificial Sequence
  Description of Artificial Sequence: Synthetic oligonucleotide
  Sense strand starting at position 920 SEQ ID NO: 3217
cuaguaggauaccuuaaga

SEQ ID NO: 250011 - RNA, 19 nt, Artificial Sequence
  Description of Artificial Sequence: Synthetic oligonucleotide
  Antisense strand to SEQ ID NO: 250010
ucuuaagguauccuacuag

SEQ ID NO: 250012 - RNA, 19 nt, Artificial Sequence
  Description of Artificial Sequence: Synthetic oligonucleotide
  Sense strand starting at position 1112 SEQ ID NO: 3217
ugacuauuaugcucugauc

SEQ ID NO: 250013 - RNA, 19 nt, Artificial Sequence
  Description of Artificial Sequence: Synthetic oligonucleotide
  Antisense strand to SEQ ID NO: 250012
gaucagagcauaauaguca

SEQ ID NO: 250014 - RNA, 19 nt, Artificial Sequence
  Description of Artificial Sequence: Synthetic oligonucleotide
  Sense strand starting at position 1146 SEQ ID NO: 3217
accgaaucuuugccuauga

SEQ ID NO: 250015 - RNA, 19 nt, Artificial Sequence
  Description of Artificial Sequence: Synthetic oligonucleotide
  Antisense strand to SEQ ID NO: 250014
ucauaggcaaagauucggu

SEQ ID NO: 250016 - RNA, 19 nt, Artificial Sequence
  Description of Artificial Sequence: Synthetic oligonucleotide
  Sense strand starting at position 1147 SEQ ID NO: 3217
ccgaaucuuugccuaugau

SEQ ID NO: 250017 - RNA, 19 nt, Artificial Sequence
  Description of Artificial Sequence: Synthetic oligonucleotide
  Antisense strand to SEQ ID NO: 250016
aucauaggcaaagauucgg

SEQ ID NO: 250018 - RNA, 19 nt, Artificial Sequence
  Description of Artificial Sequence: Synthetic oligonucleotide
  Sense strand starting at position 1148 SEQ ID NO: 3217
cgaaucuuugccuaugaug

SEQ ID NO: 250019 - RNA, 19 nt, Artificial Sequence
  Description of Artificial Sequence: Synthetic oligonucleotide
  Antisense strand to SEQ ID NO: 250018
caucauaggcaaagauucg

SEQ ID NO: 250020 - RNA, 19 nt, Artificial Sequence
  Description of Artificial Sequence: Synthetic oligonucleotide
  Sense strand starting at position 1202 SEQ ID NO: 3217
ugugaacacuucuuagauc

SEQ ID NO: 250021 - RNA, 19 nt, Artificial Sequence
  Description of Artificial Sequence: Synthetic oligonucleotide
  Antisense strand to SEQ ID NO: 250020
gaucuaagaaguguucaca

SEQ ID NO: 250022 - RNA, 19 nt, Artificial Sequence
  Description of Artificial Sequence: Synthetic oligonucleotide
  Sense strand starting at position 1422 SEQ ID NO: 3217
gcgcguaaacugcuggauu

SEQ ID NO: 250023 - RNA, 19 nt, Artificial Sequence
  Description of Artificial Sequence: Synthetic oligonucleotide
  Antisense strand to SEQ ID NO: 250022
aauccagcaguuuacgcgc

SEQ ID NO: 250024 - RNA, 19 nt, Artificial Sequence
  Description of Artificial Sequence: Synthetic oligonucleotide
  Sense strand starting at position 1424 SEQ ID NO: 3217
gcguaaacugcuggauuug

SEQ ID NO: 250025 - RNA, 19 nt, Artificial Sequence
  Description of Artificial Sequence: Synthetic oligonucleotide
  Antisense strand to SEQ ID NO: 250024
caaauccagcaguuuacgc

SEQ ID NO: 250026 - RNA, 19 nt, Artificial Sequence
  Description of Artificial Sequence: Synthetic oligonucleotide
  Sense strand starting at position 1453 SEQ ID NO: 3217
gaaaguuggguccagcaaa

SEQ ID NO: 250027 - RNA, 19 nt, Artificial Sequence
  Description of Artificial Sequence: Synthetic oligonucleotide
  Antisense strand to SEQ ID NO: 250026
uuugcuggacccaacuuuc

SEQ ID NO: 250028 - RNA, 19 nt, Artificial Sequence
  Description of Artificial Sequence: Synthetic oligonucleotide
  Sense strand starting at position 2467 SEQ ID NO: 3217
aagugugcauuugaauaaa

SEQ ID NO: 250029 - RNA, 19 nt, Artificial Sequence
  Description of Artificial Sequence: Synthetic oligonucleotide
  Antisense strand to SEQ ID NO: 250028
uuuauucaaaugcacacuu

SEQ ID NO: 250030 - RNA, 19 nt, Artificial Sequence
  Description of Artificial Sequence: Synthetic oligonucleotide
  Sense strand starting at position 2573 SEQ ID NO: 3217
aggugauucauggguguga

SEQ ID NO: 250031 - RNA, 19 nt, Artificial Sequence
  Description of Artificial Sequence: Synthetic oligonucleotide
  Antisense strand to SEQ ID NO: 250030
ucacacccaugaaucaccu

SEQ ID NO: 250032 - RNA, 19 nt, Artificial Sequence
  Description of Artificial Sequence: Synthetic oligonucleotide
  Sense strand starting at position 2575 SEQ ID NO: 3217
gugauucaugggugugaca

SEQ ID NO: 250033 - RNA, 19 nt, Artificial Sequence
  Description of Artificial Sequence: Synthetic oligonucleotide
  Antisense strand to SEQ ID NO: 250032
ugucacacccaugaaucac

SEQ ID NO: 250034 - RNA, 19 nt, Artificial Sequence
  Description of Artificial Sequence: Synthetic oligonucleotide
  Sense strand starting at position 3198 SEQ ID NO: 3217
gaagaaucgagcgaaacga

SEQ ID NO: 250035 - RNA, 19 nt, Artificial Sequence
  Description of Artificial Sequence: Synthetic oligonucleotide
  Antisense strand to SEQ ID NO: 250034
ucguuucgcucgauucuuc

SEQ ID NO: 250036 - RNA, 19 nt, Artificial Sequence
  Description of Artificial Sequence: Synthetic oligonucleotide
  Sense strand starting at position 3236 SEQ ID NO: 3217
uuuacuugggcauaucaaa

SEQ ID NO: 250037 - RNA, 19 nt, Artificial Sequence
  Description of Artificial Sequence: Synthetic oligonucleotide
  Antisense strand to SEQ ID NO: 250036
uuugauaugcccaaguaaa

SEQ ID NO: 250038 - RNA, 19 nt, Artificial Sequence
  Description of Artificial Sequence: Synthetic oligonucleotide
  Sense strand starting at position 3243 SEQ ID NO: 3217
gggcauaucaaacgaaguu

SEQ ID NO: 250039 - RNA, 19 nt, Artificial Sequence
  Description of Artificial Sequence: Synthetic oligonucleotide
  Antisense strand to SEQ ID NO: 250038
aacuucguuugauaugccc

SEQ ID NO: 250040 - RNA, 19 nt, Artificial Sequence
  Description of Artificial Sequence: Synthetic oligonucleotide
  Sense strand starting at position 3244 SEQ ID NO: 3217
ggcauaucaaacgaaguuu

SEQ ID NO: 250041 - RNA, 19 nt, Artificial Sequence
  Description of Artificial Sequence: Synthetic oligonucleotide
  Antisense strand to SEQ ID NO: 250040
aaacuucguuugauaugcc

SEQ ID NO: 250042 - RNA, 19 nt, Artificial Sequence
  Description of Artificial Sequence: Synthetic oligonucleotide
  Sense strand starting at position 3279 SEQ ID NO: 3217
auguuaucccuuggccaca

SEQ ID NO: 250043 - RNA, 19 nt, Artificial Sequence
  Description of Artificial Sequence: Synthetic oligonucleotide
  Antisense strand to SEQ ID NO: 250042
uguggccaagggauaacau

SEQ ID NO: 250044 - RNA, 19 nt, Artificial Sequence
  Description of Artificial Sequence: Synthetic oligonucleotide
  Sense strand starting at position 3280 SEQ ID NO: 3217
uguuaucccuuggccacaa

SEQ ID NO: 250045 - RNA, 19 nt, Artificial Sequence
  Description of Artificial Sequence: Synthetic oligonucleotide
  Antisense strand to SEQ ID NO: 250044
uuguggccaagggauaaca

SEQ ID NO: 250046 - RNA, 19 nt, Artificial Sequence
  Description of Artificial Sequence: Synthetic oligonucleotide
  Sense strand starting at position 3326 SEQ ID NO: 3217
gguuaagugcuuuaaguuc

SEQ ID NO: 250047 - RNA, 19 nt, Artificial Sequence
  Description of Artificial Sequence: Synthetic oligonucleotide
  Antisense strand to SEQ ID NO: 250046
gaacuuaaagcacuuaacc

SEQ ID NO: 250048 - RNA, 19 nt, Artificial Sequence
  Description of Artificial Sequence: Synthetic oligonucleotide
  Sense strand starting at position 3335 SEQ ID NO: 3217
cuuuaaguucccuguauaa

SEQ ID NO: 250049 - RNA, 19 nt, Artificial Sequence
  Description of Artificial Sequence: Synthetic oligonucleotide
  Antisense strand to SEQ ID NO: 250048
uuauacagggaacuuaaag

SEQ ID NO: 250050 - RNA, 19 nt, Artificial Sequence
  Description of Artificial Sequence: Synthetic oligonucleotide
  Sense strand starting at position 3429 SEQ ID NO: 3217
ucaugacaaucagagacaa

SEQ ID NO: 250051 - RNA, 19 nt, Artificial Sequence
  Description of Artificial Sequence: Synthetic oligonucleotide
  Antisense strand to SEQ ID NO: 250050
uugucucugauugucauga

SEQ ID NO: 250052 - RNA, 19 nt, Artificial Sequence
  Description of Artificial Sequence: Synthetic oligonucleotide
  Sense strand starting at position 3639 SEQ ID NO: 3217
gaauuucguuuccagaaua

SEQ ID NO: 250053 - RNA, 19 nt, Artificial Sequence
  Description of Artificial Sequence: Synthetic oligonucleotide
  Antisense strand to SEQ ID NO: 250052
uauucuggaaacgaaauuc

SEQ ID NO: 250054 - RNA, 19 nt, Artificial Sequence
  Description of Artificial Sequence: Synthetic oligonucleotide
  Sense strand starting at position 3644 SEQ ID NO: 3217
ucguuuccagaauaucuua

SEQ ID NO: 250055 - RNA, 19 nt, Artificial Sequence
  Description of Artificial Sequence: Synthetic oligonucleotide
  Antisense strand to SEQ ID NO: 250054
uaagauauucuggaaacga

SEQ ID NO: 250056 - RNA, 19 nt, Artificial Sequence
  Description of Artificial Sequence: Synthetic oligonucleotide
  Sense strand starting at position 3697 SEQ ID NO: 3217
uuugaaguuccuggagguu

SEQ ID NO: 250057 - RNA, 19 nt, Artificial Sequence
  Description of Artificial Sequence: Synthetic oligonucleotide
  Antisense strand to SEQ ID NO: 250056
aaccuccaggaacuucaaa

SEQ ID NO: 250058 - RNA, 19 nt, Artificial Sequence
  Description of Artificial Sequence: Synthetic oligonucleotide
  Sense strand starting at position 3733 SEQ ID NO: 3217
gagguuccuggugauuagu

SEQ ID NO: 250059 - RNA, 19 nt, Artificial Sequence
  Description of Artificial Sequence: Synthetic oligonucleotide
  Antisense strand to SEQ ID NO: 250058
acuaaucaccaggaaccuc

SEQ ID NO: 250060 - RNA, 19 nt, Artificial Sequence
  Description of Artificial Sequence: Synthetic oligonucleotide
  Sense strand starting at position 3735 SEQ ID NO: 3217
gguuccuggugauuaguua

SEQ ID NO: 250061 - RNA, 19 nt, Artificial Sequence
  Description of Artificial Sequence: Synthetic oligonucleotide
  Antisense strand to SEQ ID NO: 250060
uaacuaaucaccaggaacc

SEQ ID NO: 250062 - RNA, 19 nt, Artificial Sequence
  Description of Artificial Sequence: Synthetic oligonucleotide
  Sense strand starting at position 3736 SEQ ID NO: 3217
guuccuggugauuaguuaa

SEQ ID NO: 250063 - RNA, 19 nt, Artificial Sequence
  Description of Artificial Sequence: Synthetic oligonucleotide
  Antisense strand to SEQ ID NO: 250062
uuaacuaaucaccaggaac

SEQ ID NO: 250064 - RNA, 19 nt, Artificial Sequence
  Description of Artificial Sequence: Synthetic oligonucleotide
  Sense strand starting at position 3747 SEQ ID NO: 3217
uuaguuaaggccgagaaca

SEQ ID NO: 250065 - RNA, 19 nt, Artificial Sequence
  Description of Artificial Sequence: Synthetic oligonucleotide
  Antisense strand to SEQ ID NO: 250064
uguucucggccuuaacuaa

SEQ ID NO: 250066 - RNA, 19 nt, Artificial Sequence
  Description of Artificial Sequence: Synthetic oligonucleotide
  Sense strand starting at position 3803 SEQ ID NO: 3217
uugugaauagguugggaaa

SEQ ID NO: 250067 - RNA, 19 nt, Artificial Sequence
  Description of Artificial Sequence: Synthetic oligonucleotide
  Antisense strand to SEQ ID NO: 250066
uuucccaaccuauucacaa

SEQ ID NO: 250068 - RNA, 19 nt, Artificial Sequence
  Description of Artificial Sequence: Synthetic oligonucleotide
  Sense strand starting at position 85 SEQ ID NO: 3218
auguaucauuuggcacagu

SEQ ID NO: 250069 - RNA, 19 nt, Artificial Sequence
  Description of Artificial Sequence: Synthetic oligonucleotide
  Antisense strand to SEQ ID NO: 250068
acugugccaaaugauacau

SEQ ID NO: 250070 - RNA, 19 nt, Artificial Sequence
  Description of Artificial Sequence: Synthetic oligonucleotide
  Sense strand starting at position 115 SEQ ID NO: 3218
aguaguaacugcuuaauug

SEQ ID NO: 250071 - RNA, 19 nt, Artificial Sequence
  Description of Artificial Sequence: Synthetic oligonucleotide
  Antisense strand to SEQ ID NO: 250070
caauuaagcaguuacuacu

SEQ ID NO: 250072 - RNA, 19 nt, Artificial Sequence
  Description of Artificial Sequence: Synthetic oligonucleotide
  Sense strand starting at position 116 SEQ ID NO: 3218
guaguaacugcuuaauugu

SEQ ID NO: 250073 - RNA, 19 nt, Artificial Sequence
  Description of Artificial Sequence: Synthetic oligonucleotide
  Antisense strand to SEQ ID NO: 250072
acaauuaagcaguuacuac

SEQ ID NO: 250074 - RNA, 19 nt, Artificial Sequence
  Description of Artificial Sequence: Synthetic oligonucleotide
  Sense strand starting at position 305 SEQ ID NO: 3218
ucuguagacucugccauua

SEQ ID NO: 250075 - RNA, 19 nt, Artificial Sequence
  Description of Artificial Sequence: Synthetic oligonucleotide
  Antisense strand to SEQ ID NO: 250074
uaauggcagagucuacaga

SEQ ID NO: 250076 - RNA, 19 nt, Artificial Sequence
  Description of Artificial Sequence: Synthetic oligonucleotide
  Sense strand starting at position 320 SEQ ID NO: 3218
auuaaauaaccuuguaggu

SEQ ID NO: 250077 - RNA, 19 nt, Artificial Sequence
  Description of Artificial Sequence: Synthetic oligonucleotide
  Antisense strand to SEQ ID NO: 250076
accuacaagguuauuuaau

SEQ ID NO: 250078 - RNA, 19 nt, Artificial Sequence
  Description of Artificial Sequence: Synthetic oligonucleotide
  Sense strand starting at position 330 SEQ ID NO: 3218
cuuguaggucuuugaagga

SEQ ID NO: 250079 - RNA, 19 nt, Artificial Sequence
  Description of Artificial Sequence: Synthetic oligonucleotide
  Antisense strand to SEQ ID NO: 250078
uccuucaaagaccuacaag

SEQ ID NO: 250080 - RNA, 19 nt, Artificial Sequence
  Description of Artificial Sequence: Synthetic oligonucleotide
  Sense strand starting at position 356 SEQ ID NO: 3218
aaggaaguucuauguuuau

SEQ ID NO: 250081 - RNA, 19 nt, Artificial Sequence
  Description of Artificial Sequence: Synthetic oligonucleotide
  Antisense strand to SEQ ID NO: 250080
auaaacauagaacuuccuu

SEQ ID NO: 250082 - RNA, 19 nt, Artificial Sequence
  Description of Artificial Sequence: Synthetic oligonucleotide
  Sense strand starting at position 459 SEQ ID NO: 3218
ggugauuuauucuagaauu

SEQ ID NO: 250083 - RNA, 19 nt, Artificial Sequence
  Description of Artificial Sequence: Synthetic oligonucleotide
  Antisense strand to SEQ ID NO: 250082
aauucuagaauaaaucacc

SEQ ID NO: 250084 - RNA, 19 nt, Artificial Sequence
  Description of Artificial Sequence: Synthetic oligonucleotide
  Sense strand starting at position 679 SEQ ID NO: 3218
aaauguuucuaugugaagu

SEQ ID NO: 250085 - RNA, 19 nt, Artificial Sequence
  Description of Artificial Sequence: Synthetic oligonucleotide
  Antisense strand to SEQ ID NO: 250084
acuucacauagaaacauuu

SEQ ID NO: 250086 - RNA, 19 nt, Artificial Sequence
  Description of Artificial Sequence: Synthetic oligonucleotide
  Sense strand starting at position 927 SEQ ID NO: 3218
guuugaacauauuccugaa

SEQ ID NO: 250087 - RNA, 19 nt, Artificial Sequence
  Description of Artificial Sequence: Synthetic oligonucleotide
  Antisense strand to SEQ ID NO: 250086
uucaggaauauguucaaac

SEQ ID NO: 250088 - RNA, 19 nt, Artificial Sequence
  Description of Artificial Sequence: Synthetic oligonucleotide
  Sense strand starting at position 972 SEQ ID NO: 3218
cgcuguugaauagagucaa

SEQ ID NO: 250089 - RNA, 19 nt, Artificial Sequence
  Description of Artificial Sequence: Synthetic oligonucleotide
  Antisense strand to SEQ ID NO: 250088
uugacucuauucaacagcg

SEQ ID NO: 250090 - RNA, 19 nt, Artificial Sequence
  Description of Artificial Sequence: Synthetic oligonucleotide
  Sense strand starting at position 1286 SEQ ID NO: 3218
aggacaaugguuggagagu

SEQ ID NO: 250091 - RNA, 19 nt, Artificial Sequence
  Description of Artificial Sequence: Synthetic oligonucleotide
  Antisense strand to SEQ ID NO: 250090
acucuccaaccauuguccu

SEQ ID NO: 250092 - RNA, 19 nt, Artificial Sequence
  Description of Artificial Sequence: Synthetic oligonucleotide
  Sense strand starting at position 1297 SEQ ID NO: 3218
uggagagucucuucucuaa

SEQ ID NO: 250093 - RNA, 19 nt, Artificial Sequence
  Description of Artificial Sequence: Synthetic oligonucleotide
  Antisense strand to SEQ ID NO: 250092
uuagagaagagacucucca

SEQ ID NO: 250094 - RNA, 19 nt, Artificial Sequence
  Description of Artificial Sequence: Synthetic oligonucleotide
  Sense strand starting at position 1299 SEQ ID NO: 3218
gagagucucuucucuaagu

SEQ ID NO: 250095 - RNA, 19 nt, Artificial Sequence
  Description of Artificial Sequence: Synthetic oligonucleotide
  Antisense strand to SEQ ID NO: 250094
acuuagagaagagacucuc

SEQ ID NO: 250096 - RNA, 19 nt, Artificial Sequence
  Description of Artificial Sequence: Synthetic oligonucleotide
  Sense strand starting at position 1300 SEQ ID NO: 3218
agagucucuucucuaagua

SEQ ID NO: 250097 - RNA, 19 nt, Artificial Sequence
  Description of Artificial Sequence: Synthetic oligonucleotide
  Antisense strand to SEQ ID NO: 250096
uacuuagagaagagacucu

SEQ ID NO: 250098 - RNA, 19 nt, Artificial Sequence
  Description of Artificial Sequence: Synthetic oligonucleotide
  Sense strand starting at position 1301 SEQ ID NO: 3218
gagucucuucucuaaguag

SEQ ID NO: 250099 - RNA, 19 nt, Artificial Sequence
  Description of Artificial Sequence: Synthetic oligonucleotide
  Antisense strand to SEQ ID NO: 250098
cuacuuagagaagagacuc

SEQ ID NO: 250100 - RNA, 19 nt, Artificial Sequence
  Description of Artificial Sequence: Synthetic oligonucleotide
  Sense strand starting at position 1449 SEQ ID NO: 3218
gacagcugagcguaggaaa

SEQ ID NO: 250101 - RNA, 19 nt, Artificial Sequence
  Description of Artificial Sequence: Synthetic oligonucleotide
  Antisense strand to SEQ ID NO: 250100
uuuccuacgcucagcuguc

SEQ ID NO: 250102 - RNA, 19 nt, Artificial Sequence
  Description of Artificial Sequence: Synthetic oligonucleotide
  Sense strand starting at position 1462 SEQ ID NO: 3218
aggaaaugcuaguuuggga

SEQ ID NO: 250103 - RNA, 19 nt, Artificial Sequence
  Description of Artificial Sequence: Synthetic oligonucleotide
  Antisense strand to SEQ ID NO: 250102
ucccaaacuagcauuuccu

SEQ ID NO: 250104 - RNA, 19 nt, Artificial Sequence
  Description of Artificial Sequence: Synthetic oligonucleotide
  Sense strand starting at position 1498 SEQ ID NO: 3218
cccaccugugucgagauaa

SEQ ID NO: 250105 - RNA, 19 nt, Artificial Sequence
  Description of Artificial Sequence: Synthetic oligonucleotide
  Antisense strand to SEQ ID NO: 250104
uuaucucgacacagguggg

SEQ ID NO: 250106 - RNA, 19 nt, Artificial Sequence
  Description of Artificial Sequence: Synthetic oligonucleotide
  Sense strand starting at position 1508 SEQ ID NO: 3218
ucgagauaagcucgacaca

SEQ ID NO: 250107 - RNA, 19 nt, Artificial Sequence
  Description of Artificial Sequence: Synthetic oligonucleotide
  Antisense strand to SEQ ID NO: 250106
ugugucgagcuuaucucga

SEQ ID NO: 250108 - RNA, 19 nt, Artificial Sequence
  Description of Artificial Sequence: Synthetic oligonucleotide
  Sense strand starting at position 1509 SEQ ID NO: 3218
cgagauaagcucgacacaa

SEQ ID NO: 250109 - RNA, 19 nt, Artificial Sequence
  Description of Artificial Sequence: Synthetic oligonucleotide
  Antisense strand to SEQ ID NO: 250108
uugugucgagcuuaucucg

SEQ ID NO: 250110 - RNA, 19 nt, Artificial Sequence
  Description of Artificial Sequence: Synthetic oligonucleotide
  Sense strand starting at position 1511 SEQ ID NO: 3218
agauaagcucgacacaagu

SEQ ID NO: 250111 - RNA, 19 nt, Artificial Sequence
  Description of Artificial Sequence: Synthetic oligonucleotide
  Antisense strand to SEQ ID NO: 250110
acuugugucgagcuuaucu

SEQ ID NO: 250112 - RNA, 19 nt, Artificial Sequence
  Description of Artificial Sequence: Synthetic oligonucleotide
  Sense strand starting at position 1861 SEQ ID NO: 3218
gcguucuaccugcaagaag

SEQ ID NO: 250113 - RNA, 19 nt, Artificial Sequence
  Description of Artificial Sequence: Synthetic oligonucleotide
  Antisense strand to SEQ ID NO: 250112
cuucuugcagguagaacgc

SEQ ID NO: 250114 - RNA, 19 nt, Artificial Sequence
  Description of Artificial Sequence: Synthetic oligonucleotide
  Sense strand starting at position 2162 SEQ ID NO: 3218
gucgugucgcaguuaugua

SEQ ID NO: 250115 - RNA, 19 nt, Artificial Sequence
  Description of Artificial Sequence: Synthetic oligonucleotide
  Antisense strand to SEQ ID NO: 250114
uacauaacugcgacacgac

SEQ ID NO: 250116 - RNA, 19 nt, Artificial Sequence
  Description of Artificial Sequence: Synthetic oligonucleotide
  Sense strand starting at position 2259 SEQ ID NO: 3218
ccaagucucgcuggagaag

SEQ ID NO: 250117 - RNA, 19 nt, Artificial Sequence
  Description of Artificial Sequence: Synthetic oligonucleotide
  Antisense strand to SEQ ID NO: 250116
cuucuccagcgagacuugg

SEQ ID NO: 250118 - RNA, 19 nt, Artificial Sequence
  Description of Artificial Sequence: Synthetic oligonucleotide
  Sense strand starting at position 2528 SEQ ID NO: 3218
gucacucuuggacgucaaa

SEQ ID NO: 250119 - RNA, 19 nt, Artificial Sequence
  Description of Artificial Sequence: Synthetic oligonucleotide
  Antisense strand to SEQ ID NO: 250118
uuugacguccaagagugac

SEQ ID NO: 250120 - RNA, 19 nt, Artificial Sequence
  Description of Artificial Sequence: Synthetic oligonucleotide
  Sense strand starting at position 2601 SEQ ID NO: 3218
cgccguaucauguugcuuu

SEQ ID NO: 250121 - RNA, 19 nt, Artificial Sequence
  Description of Artificial Sequence: Synthetic oligonucleotide
  Antisense strand to SEQ ID NO: 250120
aaagcaacaugauacggcg

SEQ ID NO: 250122 - RNA, 19 nt, Artificial Sequence
  Description of Artificial Sequence: Synthetic oligonucleotide
  Sense strand starting at position 2800 SEQ ID NO: 3218
acaaaugaugccugaauga

SEQ ID NO: 250123 - RNA, 19 nt, Artificial Sequence
  Description of Artificial Sequence: Synthetic oligonucleotide
  Antisense strand to SEQ ID NO: 250122
ucauucaggcaucauuugu

SEQ ID NO: 250124 - RNA, 19 nt, Artificial Sequence
  Description of Artificial Sequence: Synthetic oligonucleotide
  Sense strand starting at position 2856 SEQ ID NO: 3218
gggaaacuucagcgaaggu

SEQ ID NO: 250125 - RNA, 19 nt, Artificial Sequence
  Description of Artificial Sequence: Synthetic oligonucleotide
  Antisense strand to SEQ ID NO: 250124
accuucgcugaaguuuccc

SEQ ID NO: 250126 - RNA, 19 nt, Artificial Sequence
  Description of Artificial Sequence: Synthetic oligonucleotide
  Sense strand starting at position 3033 SEQ ID NO: 3218
uuaaacuuugacgaugcaa

SEQ ID NO: 250127 - RNA, 19 nt, Artificial Sequence
  Description of Artificial Sequence: Synthetic oligonucleotide
  Antisense strand to SEQ ID NO: 250126
uugcaucgucaaaguuuaa

SEQ ID NO: 250128 - RNA, 19 nt, Artificial Sequence
  Description of Artificial Sequence: Synthetic oligonucleotide
  Sense strand starting at position 3078 SEQ ID NO: 3218
cauuguuugguugguaaga

SEQ ID NO: 250129 - RNA, 19 nt, Artificial Sequence
  Description of Artificial Sequence: Synthetic oligonucleotide
  Antisense strand to SEQ ID NO: 250128
ucuuaccaaccaaacaaug

SEQ ID NO: 250130 - RNA, 19 nt, Artificial Sequence
  Description of Artificial Sequence: Synthetic oligonucleotide
  Sense strand starting at position 3079 SEQ ID NO: 3218
auuguuugguugguaagaa

SEQ ID NO: 250131 - RNA, 19 nt, Artificial Sequence
  Description of Artificial Sequence: Synthetic oligonucleotide
  Antisense strand to SEQ ID NO: 250130
uucuuaccaaccaaacaau

SEQ ID NO: 250132 - RNA, 19 nt, Artificial Sequence
  Description of Artificial Sequence: Synthetic oligonucleotide
  Sense strand starting at position 3133 SEQ ID NO: 3218
gugcaauuugcuugcccua

SEQ ID NO: 250133 - RNA, 19 nt, Artificial Sequence
  Description of Artificial Sequence: Synthetic oligonucleotide
  Antisense strand to SEQ ID NO: 250132
uagggcaagcaaauugcac

SEQ ID NO: 250134 - RNA, 19 nt, Artificial Sequence
  Description of Artificial Sequence: Synthetic oligonucleotide
  Sense strand starting at position 3135 SEQ ID NO: 3218
gcaauuugcuugcccuaau

SEQ ID NO: 250135 - RNA, 19 nt, Artificial Sequence
  Description of Artificial Sequence: Synthetic oligonucleotide
  Antisense strand to SEQ ID NO: 250134
auuagggcaagcaaauugc

SEQ ID NO: 250136 - RNA, 19 nt, Artificial Sequence
  Description of Artificial Sequence: Synthetic oligonucleotide
  Sense strand starting at position 3168 SEQ ID NO: 3218
guuacaguucuguacacuu

SEQ ID NO: 250137 - RNA, 19 nt, Artificial Sequence
  Description of Artificial Sequence: Synthetic oligonucleotide
  Antisense strand to SEQ ID NO: 250136
aaguguacagaacuguaac

SEQ ID NO: 250138 - RNA, 19 nt, Artificial Sequence
  Description of Artificial Sequence: Synthetic oligonucleotide
  Sense strand starting at position 3527 SEQ ID NO: 3218
agaagagcugucuggauac

SEQ ID NO: 250139 - RNA, 19 nt, Artificial Sequence
  Description of Artificial Sequence: Synthetic oligonucleotide
  Antisense strand to SEQ ID NO: 250138
guauccagacagcucuucu

SEQ ID NO: 250140 - RNA, 19 nt, Artificial Sequence
  Description of Artificial Sequence: Synthetic oligonucleotide
  Sense strand starting at position 3585 SEQ ID NO: 3218
agggaauugcucuaccgag

SEQ ID NO: 250141 - RNA, 19 nt, Artificial Sequence
  Description of Artificial Sequence: Synthetic oligonucleotide
  Antisense strand to SEQ ID NO: 250140
cucgguagagcaauucccu

SEQ ID NO: 250142 - RNA, 19 nt, Artificial Sequence
  Description of Artificial Sequence: Synthetic oligonucleotide
  Sense strand starting at position 3591 SEQ ID NO: 3218
uugcucuaccgagaguaga

SEQ ID NO: 250143 - RNA, 19 nt, Artificial Sequence
  Description of Artificial Sequence: Synthetic oligonucleotide
  Antisense strand to SEQ ID NO: 250142
ucuacucucgguagagcaa

SEQ ID NO: 250144 - RNA, 19 nt, Artificial Sequence
  Description of Artificial Sequence: Synthetic oligonucleotide
  Sense strand starting at position 3720 SEQ ID NO: 3218
gauuauguacacuguugaa

SEQ ID NO: 250145 - RNA, 19 nt, Artificial Sequence
  Description of Artificial Sequence: Synthetic oligonucleotide
  Antisense strand to SEQ ID NO: 250144
uucaacaguguacauaauc

SEQ ID NO: 250146 - RNA, 19 nt, Artificial Sequence
  Description of Artificial Sequence: Synthetic oligonucleotide
  Sense strand starting at position 3771 SEQ ID NO: 3218
agaauaguuguucaucgag

SEQ ID NO: 250147 - RNA, 19 nt, Artificial Sequence
  Description of Artificial Sequence: Synthetic oligonucleotide
  Antisense strand to SEQ ID NO: 250146
cucgaugaacaacuauucu

SEQ ID NO: 250148 - RNA, 19 nt, Artificial Sequence
  Description of Artificial Sequence: Synthetic oligonucleotide
  Sense strand starting at position 6 SEQ ID NO: 3219
cuugcuuucucucuagaga

SEQ ID NO: 250149 - RNA, 19 nt, Artificial Sequence
  Description of Artificial Sequence: Synthetic oligonucleotide
  Antisense strand to SEQ ID NO: 250148
ucucuagagagaaagcaag

SEQ ID NO: 250150 - RNA, 19 nt, Artificial Sequence
  Description of Artificial Sequence: Synthetic oligonucleotide
  Sense strand starting at position 7 SEQ ID NO: 3219
uugcuuucucucuagagaa

SEQ ID NO: 250151 - RNA, 19 nt, Artificial Sequence
  Description of Artificial Sequence: Synthetic oligonucleotide
  Antisense strand to SEQ ID NO: 250150
uucucuagagagaaagcaa

SEQ ID NO: 250152 - RNA, 19 nt, Artificial Sequence
  Description of Artificial Sequence: Synthetic oligonucleotide
  Sense strand starting at position 9 SEQ ID NO: 3219
gcuuucucucuagagaaca

SEQ ID NO: 250153 - RNA, 19 nt, Artificial Sequence
  Description of Artificial Sequence: Synthetic oligonucleotide
  Antisense strand to SEQ ID NO: 250152
uguucucuagagagaaagc

SEQ ID NO: 250154 - RNA, 19 nt, Artificial Sequence
  Description of Artificial Sequence: Synthetic oligonucleotide
  Sense strand starting at position 480 SEQ ID NO: 3219
aaggaucuucccugagagc

SEQ ID NO: 250155 - RNA, 19 nt, Artificial Sequence
  Description of Artificial Sequence: Synthetic oligonucleotide
  Antisense strand to SEQ ID NO: 250154
gcucucagggaagauccuu

SEQ ID NO: 250156 - RNA, 19 nt, Artificial Sequence
  Description of Artificial Sequence: Synthetic oligonucleotide
  Sense strand starting at position 481 SEQ ID NO: 3219
aggaucuucccugagagcu

SEQ ID NO: 250157 - RNA, 19 nt, Artificial Sequence
  Description of Artificial Sequence: Synthetic oligonucleotide
  Antisense strand to SEQ ID NO: 250156
agcucucagggaagauccu

SEQ ID NO: 250158 - RNA, 19 nt, Artificial Sequence
  Description of Artificial Sequence: Synthetic oligonucleotide
  Sense strand starting at position 599 SEQ ID NO: 3219
gcuauacauguuuaagagu

SEQ ID NO: 250159 - RNA, 19 nt, Artificial Sequence
  Description of Artificial Sequence: Synthetic oligonucleotide
  Antisense strand to SEQ ID NO: 250158
acucuuaaacauguauagc

SEQ ID NO: 250160 - RNA, 19 nt, Artificial Sequence
  Description of Artificial Sequence: Synthetic oligonucleotide
  Sense strand starting at position 650 SEQ ID NO: 3219
ucuguugacuuucucuuua

SEQ ID NO: 250161 - RNA, 19 nt, Artificial Sequence
  Description of Artificial Sequence: Synthetic oligonucleotide
  Antisense strand to SEQ ID NO: 250160
uaaagagaaagucaacaga

SEQ ID NO: 250162 - RNA, 19 nt, Artificial Sequence
  Description of Artificial Sequence: Synthetic oligonucleotide
  Sense strand starting at position 652 SEQ ID NO: 3219
uguugacuuucucuuuaua

SEQ ID NO: 250163 - RNA, 19 nt, Artificial Sequence
  Description of Artificial Sequence: Synthetic oligonucleotide
  Antisense strand to SEQ ID NO: 250162
uauaaagagaaagucaaca

SEQ ID NO: 250164 - RNA, 19 nt, Artificial Sequence
  Description of Artificial Sequence: Synthetic oligonucleotide
  Sense strand starting at position 757 SEQ ID NO: 3219
aaggcauagcauugaugga

SEQ ID NO: 250165 - RNA, 19 nt, Artificial Sequence
  Description of Artificial Sequence: Synthetic oligonucleotide
  Antisense strand to SEQ ID NO: 250164
uccaucaaugcuaugccuu

SEQ ID NO: 250166 - RNA, 19 nt, Artificial Sequence
  Description of Artificial Sequence: Synthetic oligonucleotide
  Sense strand starting at position 758 SEQ ID NO: 3219
aggcauagcauugauggau

SEQ ID NO: 250167 - RNA, 19 nt, Artificial Sequence
  Description of Artificial Sequence: Synthetic oligonucleotide
  Antisense strand to SEQ ID NO: 250166
auccaucaaugcuaugccu

SEQ ID NO: 250168 - RNA, 19 nt, Artificial Sequence
  Description of Artificial Sequence: Synthetic oligonucleotide
  Sense strand starting at position 1031 SEQ ID NO: 3219
cuucucuugguuuauguau

SEQ ID NO: 250169 - RNA, 19 nt, Artificial Sequence
  Description of Artificial Sequence: Synthetic oligonucleotide
  Antisense strand to SEQ ID NO: 250168
auacauaaaccaagagaag

SEQ ID NO: 250170 - RNA, 19 nt, Artificial Sequence
  Description of Artificial Sequence: Synthetic oligonucleotide
  Sense strand starting at position 1069 SEQ ID NO: 3219
uaagaagacuagucuaagu

SEQ ID NO: 250171 - RNA, 19 nt, Artificial Sequence
  Description of Artificial Sequence: Synthetic oligonucleotide
  Antisense strand to SEQ ID NO: 250170
acuuagacuagucuucuua

SEQ ID NO: 250172 - RNA, 19 nt, Artificial Sequence
  Description of Artificial Sequence: Synthetic oligonucleotide
  Sense strand starting at position 1074 SEQ ID NO: 3219
agacuagucuaagucacuu

SEQ ID NO: 250173 - RNA, 19 nt, Artificial Sequence
  Description of Artificial Sequence: Synthetic oligonucleotide
  Antisense strand to SEQ ID NO: 250172
aagugacuuagacuagucu

SEQ ID NO: 250174 - RNA, 19 nt, Artificial Sequence
  Description of Artificial Sequence: Synthetic oligonucleotide
  Sense strand starting at position 1115 SEQ ID NO: 3219
acaggaaucugauauauuu

SEQ ID NO: 250175 - RNA, 19 nt, Artificial Sequence
  Description of Artificial Sequence: Synthetic oligonucleotide
  Antisense strand to SEQ ID NO: 250174
aaauauaucagauuccugu

SEQ ID NO: 250176 - RNA, 19 nt, Artificial Sequence
  Description of Artificial Sequence: Synthetic oligonucleotide
  Sense strand starting at position 1270 SEQ ID NO: 3219
ggcgguaacaccgagucau

SEQ ID NO: 250177 - RNA, 19 nt, Artificial Sequence
  Description of Artificial Sequence: Synthetic oligonucleotide
  Antisense strand to SEQ ID NO: 250176
augacucgguguuaccgcc

SEQ ID NO: 250178 - RNA, 19 nt, Artificial Sequence
  Description of Artificial Sequence: Synthetic oligonucleotide
  Sense strand starting at position 2220 SEQ ID NO: 3219
gcgucuugucucuuagcaa

SEQ ID NO: 250179 - RNA, 19 nt, Artificial Sequence
  Description of Artificial Sequence: Synthetic oligonucleotide
  Antisense strand to SEQ ID NO: 250178
uugcuaagagacaagacgc

SEQ ID NO: 250180 - RNA, 19 nt, Artificial Sequence
  Description of Artificial Sequence: Synthetic oligonucleotide
  Sense strand starting at position 2243 SEQ ID NO: 3219
auccuaggagccugaucuu

SEQ ID NO: 250181 - RNA, 19 nt, Artificial Sequence
  Description of Artificial Sequence: Synthetic oligonucleotide
  Antisense strand to SEQ ID NO: 250180
aagaucaggcuccuaggau

SEQ ID NO: 250182 - RNA, 19 nt, Artificial Sequence
  Description of Artificial Sequence: Synthetic oligonucleotide
  Sense strand starting at position 2252 SEQ ID NO: 3219
gccugaucuuaggugacca

SEQ ID NO: 250183 - RNA, 19 nt, Artificial Sequence
  Description of Artificial Sequence: Synthetic oligonucleotide
  Antisense strand to SEQ ID NO: 250182
uggucaccuaagaucaggc

SEQ ID NO: 250184 - RNA, 19 nt, Artificial Sequence
  Description of Artificial Sequence: Synthetic oligonucleotide
  Sense strand starting at position 2323 SEQ ID NO: 3219
ggaugaaauuguucuuggu

SEQ ID NO: 250185 - RNA, 19 nt, Artificial Sequence
  Description of Artificial Sequence: Synthetic oligonucleotide
  Antisense strand to SEQ ID NO: 250184
accaagaacaauuucaucc

SEQ ID NO: 250186 - RNA, 19 nt, Artificial Sequence
  Description of Artificial Sequence: Synthetic oligonucleotide
  Sense strand starting at position 2327 SEQ ID NO: 3219
gaaauuguucuuggugcag

SEQ ID NO: 250187 - RNA, 19 nt, Artificial Sequence
  Description of Artificial Sequence: Synthetic oligonucleotide
  Antisense strand to SEQ ID NO: 250186
cugcaccaagaacaauuuc

SEQ ID NO: 250188 - RNA, 19 nt, Artificial Sequence
  Description of Artificial Sequence: Synthetic oligonucleotide
  Sense strand starting at position 2333 SEQ ID NO: 3219
guucuuggugcagaucauu

SEQ ID NO: 250189 - RNA, 19 nt, Artificial Sequence
  Description of Artificial Sequence: Synthetic oligonucleotide
  Antisense strand to SEQ ID NO: 250188
aaugaucugcaccaagaac

SEQ ID NO: 250190 - RNA, 19 nt, Artificial Sequence
  Description of Artificial Sequence: Synthetic oligonucleotide
  Sense strand starting at position 2363 SEQ ID NO: 3219
uuagguagagcggaaagau

SEQ ID NO: 250191 - RNA, 19 nt, Artificial Sequence
  Description of Artificial Sequence: Synthetic oligonucleotide
  Antisense strand to SEQ ID NO: 250190
aucuuuccgcucuaccuaa

SEQ ID NO: 250192 - RNA, 19 nt, Artificial Sequence
  Description of Artificial Sequence: Synthetic oligonucleotide
  Sense strand starting at position 2413 SEQ ID NO: 3219
agaccaaggucuuugggua

SEQ ID NO: 250193 - RNA, 19 nt, Artificial Sequence
  Description of Artificial Sequence: Synthetic oligonucleotide
  Antisense strand to SEQ ID NO: 250192
uacccaaagaccuuggucu

SEQ ID NO: 250194 - RNA, 19 nt, Artificial Sequence
  Description of Artificial Sequence: Synthetic oligonucleotide
  Sense strand starting at position 2414 SEQ ID NO: 3219
gaccaaggucuuuggguaa

SEQ ID NO: 250195 - RNA, 19 nt, Artificial Sequence
  Description of Artificial Sequence: Synthetic oligonucleotide
  Antisense strand to SEQ ID NO: 250194
uuacccaaagaccuugguc

SEQ ID NO: 250196 - RNA, 19 nt, Artificial Sequence
  Description of Artificial Sequence: Synthetic oligonucleotide
  Sense strand starting at position 2417 SEQ ID NO: 3219
caaggucuuuggguaagga

SEQ ID NO: 250197 - RNA, 19 nt, Artificial Sequence
  Description of Artificial Sequence: Synthetic oligonucleotide
  Antisense strand to SEQ ID NO: 250196
uccuuacccaaagaccuug

SEQ ID NO: 250198 - RNA, 19 nt, Artificial Sequence
  Description of Artificial Sequence: Synthetic oligonucleotide
  Sense strand starting at position 2436 SEQ ID NO: 3219
ccugaagugucuuuaccag

SEQ ID NO: 250199 - RNA, 19 nt, Artificial Sequence
  Description of Artificial Sequence: Synthetic oligonucleotide
  Antisense strand to SEQ ID NO: 250198
cugguaaagacacuucagg

SEQ ID NO: 250200 - RNA, 19 nt, Artificial Sequence
  Description of Artificial Sequence: Synthetic oligonucleotide
  Sense strand starting at position 2442 SEQ ID NO: 3219
gugucuuuaccaggaggua

SEQ ID NO: 250201 - RNA, 19 nt, Artificial Sequence
  Description of Artificial Sequence: Synthetic oligonucleotide
  Antisense strand to SEQ ID NO: 250200
uaccuccugguaaagacac

SEQ ID NO: 250202 - RNA, 19 nt, Artificial Sequence
  Description of Artificial Sequence: Synthetic oligonucleotide
  Sense strand starting at position 2473 SEQ ID NO: 3219
uguaaauagcucuggauua

SEQ ID NO: 250203 - RNA, 19 nt, Artificial Sequence
  Description of Artificial Sequence: Synthetic oligonucleotide
  Antisense strand to SEQ ID NO: 250202
uaauccagagcuauuuaca

SEQ ID NO: 250204 - RNA, 19 nt, Artificial Sequence
  Description of Artificial Sequence: Synthetic oligonucleotide
  Sense strand starting at position 2552 SEQ ID NO: 3219
uguuauugugaggaacacu

SEQ ID NO: 250205 - RNA, 19 nt, Artificial Sequence
  Description of Artificial Sequence: Synthetic oligonucleotide
  Antisense strand to SEQ ID NO: 250204
aguguuccucacaauaaca

SEQ ID NO: 250206 - RNA, 19 nt, Artificial Sequence
  Description of Artificial Sequence: Synthetic oligonucleotide
  Sense strand starting at position 2591 SEQ ID NO: 3219
augcaaacggcucaauauu

SEQ ID NO: 250207 - RNA, 19 nt, Artificial Sequence
  Description of Artificial Sequence: Synthetic oligonucleotide
  Antisense strand to SEQ ID NO: 250206
aauauugagccguuugcau

SEQ ID NO: 250208 - RNA, 19 nt, Artificial Sequence
  Description of Artificial Sequence: Synthetic oligonucleotide
  Sense strand starting at position 2613 SEQ ID NO: 3219
ggguaacugcuacauguca

SEQ ID NO: 250209 - RNA, 19 nt, Artificial Sequence
  Description of Artificial Sequence: Synthetic oligonucleotide
  Antisense strand to SEQ ID NO: 250208
ugacauguagcaguuaccc

SEQ ID NO: 250210 - RNA, 19 nt, Artificial Sequence
  Description of Artificial Sequence: Synthetic oligonucleotide
  Sense strand starting at position 2680 SEQ ID NO: 3219
auguuaggauuagaaagaa

SEQ ID NO: 250211 - RNA, 19 nt, Artificial Sequence
  Description of Artificial Sequence: Synthetic oligonucleotide
  Antisense strand to SEQ ID NO: 250210
uucuuucuaauccuaacau

SEQ ID NO: 250212 - RNA, 19 nt, Artificial Sequence
  Description of Artificial Sequence: Synthetic oligonucleotide
  Sense strand starting at position 2810 SEQ ID NO: 3219
uccugugacuuucugcaga

SEQ ID NO: 250213 - RNA, 19 nt, Artificial Sequence
  Description of Artificial Sequence: Synthetic oligonucleotide
  Antisense strand to SEQ ID NO: 250212
ucugcagaaagucacagga

SEQ ID NO: 250214 - RNA, 19 nt, Artificial Sequence
  Description of Artificial Sequence: Synthetic oligonucleotide
  Sense strand starting at position 2812 SEQ ID NO: 3219
cugugacuuucugcagauc

SEQ ID NO: 250215 - RNA, 19 nt, Artificial Sequence
  Description of Artificial Sequence: Synthetic oligonucleotide
  Antisense strand to SEQ ID NO: 250214
gaucugcagaaagucacag

SEQ ID NO: 250216 - RNA, 19 nt, Artificial Sequence
  Description of Artificial Sequence: Synthetic oligonucleotide
  Sense strand starting at position 2813 SEQ ID NO: 3219
ugugacuuucugcagaucu

SEQ ID NO: 250217 - RNA, 19 nt, Artificial Sequence
  Description of Artificial Sequence: Synthetic oligonucleotide
  Antisense strand to SEQ ID NO: 250216
agaucugcagaaagucaca

SEQ ID NO: 250218 - RNA, 19 nt, Artificial Sequence
  Description of Artificial Sequence: Synthetic oligonucleotide
  Sense strand starting at position 2815 SEQ ID NO: 3219
ugacuuucugcagaucuuu

SEQ ID NO: 250219 - RNA, 19 nt, Artificial Sequence
  Description of Artificial Sequence: Synthetic oligonucleotide
  Antisense strand to SEQ ID NO: 250218
aaagaucugcagaaaguca

SEQ ID NO: 250220 - RNA, 19 nt, Artificial Sequence
  Description of Artificial Sequence: Synthetic oligonucleotide
  Sense strand starting at position 3128 SEQ ID NO: 3219
auaagauguuagguuaagu

SEQ ID NO: 250221 - RNA, 19 nt, Artificial Sequence
  Description of Artificial Sequence: Synthetic oligonucleotide
  Antisense strand to SEQ ID NO: 250220
acuuaaccuaacaucuuau

SEQ ID NO: 250222 - RNA, 19 nt, Artificial Sequence
  Description of Artificial Sequence: Synthetic oligonucleotide
  Sense strand starting at position 3139 SEQ ID NO: 3219
gguuaagucagguaaauuc

SEQ ID NO: 250223 - RNA, 19 nt, Artificial Sequence
  Description of Artificial Sequence: Synthetic oligonucleotide
  Antisense strand to SEQ ID NO: 250222
gaauuuaccugacuuaacc

SEQ ID NO: 250224 - RNA, 19 nt, Artificial Sequence
  Description of Artificial Sequence: Synthetic oligonucleotide
  Sense strand starting at position 3888 SEQ ID NO: 3219
ggcauaguuagcucacgcu

SEQ ID NO: 250225 - RNA, 19 nt, Artificial Sequence
  Description of Artificial Sequence: Synthetic oligonucleotide
  Antisense strand to SEQ ID NO: 250224
agcgugagcuaacuaugcc

SEQ ID NO: 250226 - RNA, 19 nt, Artificial Sequence
  Description of Artificial Sequence: Synthetic oligonucleotide
  Sense strand starting at position 3892 SEQ ID NO: 3219
uaguuagcucacgcuguaa

SEQ ID NO: 250227 - RNA, 19 nt, Artificial Sequence
  Description of Artificial Sequence: Synthetic oligonucleotide
  Antisense strand to SEQ ID NO: 250226
uuacagcgugagcuaacua

SEQ ID NO: 250228 - RNA, 19 nt, Artificial Sequence
  Description of Artificial Sequence: Synthetic oligonucleotide
  Sense strand starting at position 51 SEQ ID NO: 3220
uuggaagggcccugagaaa

SEQ ID NO: 250229 - RNA, 19 nt, Artificial Sequence
  Description of Artificial Sequence: Synthetic oligonucleotide
  Antisense strand to SEQ ID NO: 250228
uuucucagggcccuuccaa

SEQ ID NO: 250230 - RNA, 19 nt, Artificial Sequence
  Description of Artificial Sequence: Synthetic oligonucleotide
  Sense strand starting at position 122 SEQ ID NO: 3220
ugggccuucuaucuuugau

SEQ ID NO: 250231 - RNA, 19 nt, Artificial Sequence
  Description of Artificial Sequence: Synthetic oligonucleotide
  Antisense strand to SEQ ID NO: 250230
aucaaagauagaaggccca

SEQ ID NO: 250232 - RNA, 19 nt, Artificial Sequence
  Description of Artificial Sequence: Synthetic oligonucleotide
  Sense strand starting at position 124 SEQ ID NO: 3220
ggccuucuaucuuugauuc

SEQ ID NO: 250233 - RNA, 19 nt, Artificial Sequence
  Description of Artificial Sequence: Synthetic oligonucleotide
  Antisense strand to SEQ ID NO: 250232
gaaucaaagauagaaggcc

SEQ ID NO: 250234 - RNA, 19 nt, Artificial Sequence
  Description of Artificial Sequence: Synthetic oligonucleotide
  Sense strand starting at position 223 SEQ ID NO: 3220
uuuaauguauccuuuggaa

SEQ ID NO: 250235 - RNA, 19 nt, Artificial Sequence
  Description of Artificial Sequence: Synthetic oligonucleotide
  Antisense strand to SEQ ID NO: 250234
uuccaaaggauacauuaaa

SEQ ID NO: 250236 - RNA, 19 nt, Artificial Sequence
  Description of Artificial Sequence: Synthetic oligonucleotide
  Sense strand starting at position 317 SEQ ID NO: 3220
ucauguccugcuggauuaa

SEQ ID NO: 250237 - RNA, 19 nt, Artificial Sequence
  Description of Artificial Sequence: Synthetic oligonucleotide
  Antisense strand to SEQ ID NO: 250236
uuaauccagcaggacauga

SEQ ID NO: 250238 - RNA, 19 nt, Artificial Sequence
  Description of Artificial Sequence: Synthetic oligonucleotide
  Sense strand starting at position 318 SEQ ID NO: 3220
cauguccugcuggauuaau

SEQ ID NO: 250239 - RNA, 19 nt, Artificial Sequence
  Description of Artificial Sequence: Synthetic oligonucleotide
  Antisense strand to SEQ ID NO: 250238
auuaauccagcaggacaug

SEQ ID NO: 250240 - RNA, 19 nt, Artificial Sequence
  Description of Artificial Sequence: Synthetic oligonucleotide
  Sense strand starting at position 363 SEQ ID NO: 3220
cuugcuuucucucuagaga

SEQ ID NO: 250241 - RNA, 19 nt, Artificial Sequence
  Description of Artificial Sequence: Synthetic oligonucleotide
  Antisense strand to SEQ ID NO: 250240
ucucuagagagaaagcaag

SEQ ID NO: 250242 - RNA, 19 nt, Artificial Sequence
  Description of Artificial Sequence: Synthetic oligonucleotide
  Sense strand starting at position 364 SEQ ID NO: 3220
uugcuuucucucuagagaa

SEQ ID NO: 250243 - RNA, 19 nt, Artificial Sequence
  Description of Artificial Sequence: Synthetic oligonucleotide
  Antisense strand to SEQ ID NO: 250242
uucucuagagagaaagcaa

SEQ ID NO: 250244 - RNA, 19 nt, Artificial Sequence
  Description of Artificial Sequence: Synthetic oligonucleotide
  Sense strand starting at position 366 SEQ ID NO: 3220
gcuuucucucuagagaaca

SEQ ID NO: 250245 - RNA, 19 nt, Artificial Sequence
  Description of Artificial Sequence: Synthetic oligonucleotide
  Antisense strand to SEQ ID NO: 250244
uguucucuagagagaaagc

SEQ ID NO: 250246 - RNA, 19 nt, Artificial Sequence
  Description of Artificial Sequence: Synthetic oligonucleotide
  Sense strand starting at position 837 SEQ ID NO: 3220
aaggaucuucccugagagc

SEQ ID NO: 250247 - RNA, 19 nt, Artificial Sequence
  Description of Artificial Sequence: Synthetic oligonucleotide
  Antisense strand to SEQ ID NO: 250246
gcucucagggaagauccuu

SEQ ID NO: 250248 - RNA, 19 nt, Artificial Sequence
  Description of Artificial Sequence: Synthetic oligonucleotide
  Sense strand starting at position 838 SEQ ID NO: 3220
aggaucuucccugagagcu

SEQ ID NO: 250249 - RNA, 19 nt, Artificial Sequence
  Description of Artificial Sequence: Synthetic oligonucleotide
  Antisense strand to SEQ ID NO: 250248
agcucucagggaagauccu

SEQ ID NO: 250250 - RNA, 19 nt, Artificial Sequence
  Description of Artificial Sequence: Synthetic oligonucleotide
  Sense strand starting at position 956 SEQ ID NO: 3220
gcuauacauguuuaagagu

SEQ ID NO: 250251 - RNA, 19 nt, Artificial Sequence
  Description of Artificial Sequence: Synthetic oligonucleotide
  Antisense strand to SEQ ID NO: 250250
acucuuaaacauguauagc

SEQ ID NO: 250252 - RNA, 19 nt, Artificial Sequence
  Description of Artificial Sequence: Synthetic oligonucleotide
  Sense strand starting at position 1007 SEQ ID NO: 3220
ucuguugacuuucucuuua

SEQ ID NO: 250253 - RNA, 19 nt, Artificial Sequence
  Description of Artificial Sequence: Synthetic oligonucleotide
  Antisense strand to SEQ ID NO: 250252
uaaagagaaagucaacaga

SEQ ID NO: 250254 - RNA, 19 nt, Artificial Sequence
  Description of Artificial Sequence: Synthetic oligonucleotide
  Sense strand starting at position 1009 SEQ ID NO: 3220
uguugacuuucucuuuaua

SEQ ID NO: 250255 - RNA, 19 nt, Artificial Sequence
  Description of Artificial Sequence: Synthetic oligonucleotide
  Antisense strand to SEQ ID NO: 250254
uauaaagagaaagucaaca

SEQ ID NO: 250256 - RNA, 19 nt, Artificial Sequence
  Description of Artificial Sequence: Synthetic oligonucleotide
  Sense strand starting at position 1114 SEQ ID NO: 3220
aaggcauagcauugaugga

SEQ ID NO: 250257 - RNA, 19 nt, Artificial Sequence
  Description of Artificial Sequence: Synthetic oligonucleotide
  Antisense strand to SEQ ID NO: 250256
uccaucaaugcuaugccuu

SEQ ID NO: 250258 - RNA, 19 nt, Artificial Sequence
  Description of Artificial Sequence: Synthetic oligonucleotide
  Sense strand starting at position 1115 SEQ ID NO: 3220
aggcauagcauugauggau

SEQ ID NO: 250259 - RNA, 19 nt, Artificial Sequence
  Description of Artificial Sequence: Synthetic oligonucleotide
  Antisense strand to SEQ ID NO: 250258
auccaucaaugcuaugccu

SEQ ID NO: 250260 - RNA, 19 nt, Artificial Sequence
  Description of Artificial Sequence: Synthetic oligonucleotide
  Sense strand starting at position 1388 SEQ ID NO: 3220
cuucucuugguuuauguau

SEQ ID NO: 250261 - RNA, 19 nt, Artificial Sequence
  Description of Artificial Sequence: Synthetic oligonucleotide
  Antisense strand to SEQ ID NO: 250260
auacauaaaccaagagaag

SEQ ID NO: 250262 - RNA, 19 nt, Artificial Sequence
  Description of Artificial Sequence: Synthetic oligonucleotide
  Sense strand starting at position 1426 SEQ ID NO: 3220
uaagaagacuagucuaagu

SEQ ID NO: 250263 - RNA, 19 nt, Artificial Sequence
  Description of Artificial Sequence: Synthetic oligonucleotide
  Antisense strand to SEQ ID NO: 250262
acuuagacuagucuucuua

SEQ ID NO: 250264 - RNA, 19 nt, Artificial Sequence
  Description of Artificial Sequence: Synthetic oligonucleotide
  Sense strand starting at position 1431 SEQ ID NO: 3220
agacuagucuaagucacuu

SEQ ID NO: 250265 - RNA, 19 nt, Artificial Sequence
  Description of Artificial Sequence: Synthetic oligonucleotide
  Antisense strand to SEQ ID NO: 250264
aagugacuuagacuagucu

SEQ ID NO: 250266 - RNA, 19 nt, Artificial Sequence
  Description of Artificial Sequence: Synthetic oligonucleotide
  Sense strand starting at position 1472 SEQ ID NO: 3220
acaggaaucugauauauuu

SEQ ID NO: 250267 - RNA, 19 nt, Artificial Sequence
  Description of Artificial Sequence: Synthetic oligonucleotide
  Antisense strand to SEQ ID NO: 250266
aaauauaucagauuccugu

SEQ ID NO: 250268 - RNA, 19 nt, Artificial Sequence
  Description of Artificial Sequence: Synthetic oligonucleotide
  Sense strand starting at position 2577 SEQ ID NO: 3220
gcgucuugucucuuagcaa

SEQ ID NO: 250269 - RNA, 19 nt, Artificial Sequence
  Description of Artificial Sequence: Synthetic oligonucleotide
  Antisense strand to SEQ ID NO: 250268
uugcuaagagacaagacgc

SEQ ID NO: 250270 - RNA, 19 nt, Artificial Sequence
  Description of Artificial Sequence: Synthetic oligonucleotide
  Sense strand starting at position 2600 SEQ ID NO: 3220
auccuaggagccugaucuu

SEQ ID NO: 250271 - RNA, 19 nt, Artificial Sequence
  Description of Artificial Sequence: Synthetic oligonucleotide
  Antisense strand to SEQ ID NO: 250270
aagaucaggcuccuaggau

SEQ ID NO: 250272 - RNA, 19 nt, Artificial Sequence
  Description of Artificial Sequence: Synthetic oligonucleotide
  Sense strand starting at position 2609 SEQ ID NO: 3220
gccugaucuuaggugacca

SEQ ID NO: 250273 - RNA, 19 nt, Artificial Sequence
  Description of Artificial Sequence: Synthetic oligonucleotide
  Antisense strand to SEQ ID NO: 250272
uggucaccuaagaucaggc

SEQ ID NO: 250274 - RNA, 19 nt, Artificial Sequence
  Description of Artificial Sequence: Synthetic oligonucleotide
  Sense strand starting at position 2680 SEQ ID NO: 3220
ggaugaaauuguucuuggu

SEQ ID NO: 250275 - RNA, 19 nt, Artificial Sequence
  Description of Artificial Sequence: Synthetic oligonucleotide
  Antisense strand to SEQ ID NO: 250274
accaagaacaauuucaucc

SEQ ID NO: 250276 - RNA, 19 nt, Artificial Sequence
  Description of Artificial Sequence: Synthetic oligonucleotide
  Sense strand starting at position 2690 SEQ ID NO: 3220
guucuuggugcagaucauu

SEQ ID NO: 250277 - RNA, 19 nt, Artificial Sequence
  Description of Artificial Sequence: Synthetic oligonucleotide
  Antisense strand to SEQ ID NO: 250276
aaugaucugcaccaagaac

SEQ ID NO: 250278 - RNA, 19 nt, Artificial Sequence
  Description of Artificial Sequence: Synthetic oligonucleotide
  Sense strand starting at position 2720 SEQ ID NO: 3220
uuagguagagcggaaagau

SEQ ID NO: 250279 - RNA, 19 nt, Artificial Sequence
  Description of Artificial Sequence: Synthetic oligonucleotide
  Antisense strand to SEQ ID NO: 250278
aucuuuccgcucuaccuaa

SEQ ID NO: 250280 - RNA, 19 nt, Artificial Sequence
  Description of Artificial Sequence: Synthetic oligonucleotide
  Sense strand starting at position 2770 SEQ ID NO: 3220
agaccaaggucuuugggua

SEQ ID NO: 250281 - RNA, 19 nt, Artificial Sequence
  Description of Artificial Sequence: Synthetic oligonucleotide
  Antisense strand to SEQ ID NO: 250280
uacccaaagaccuuggucu

SEQ ID NO: 250282 - RNA, 19 nt, Artificial Sequence
  Description of Artificial Sequence: Synthetic oligonucleotide
  Sense strand starting at position 2771 SEQ ID NO: 3220
gaccaaggucuuuggguaa

SEQ ID NO: 250283 - RNA, 19 nt, Artificial Sequence
  Description of Artificial Sequence: Synthetic oligonucleotide
  Antisense strand to SEQ ID NO: 250282
uuacccaaagaccuugguc

SEQ ID NO: 250284 - RNA, 19 nt, Artificial Sequence
  Description of Artificial Sequence: Synthetic oligonucleotide
  Sense strand starting at position 2774 SEQ ID NO: 3220
caaggucuuuggguaagga

SEQ ID NO: 250285 - RNA, 19 nt, Artificial Sequence
  Description of Artificial Sequence: Synthetic oligonucleotide
  Antisense strand to SEQ ID NO: 250284
uccuuacccaaagaccuug

SEQ ID NO: 250286 - RNA, 19 nt, Artificial Sequence
  Description of Artificial Sequence: Synthetic oligonucleotide
  Sense strand starting at position 2793 SEQ ID NO: 3220
ccugaagugucuuuaccag

SEQ ID NO: 250287 - RNA, 19 nt, Artificial Sequence
  Description of Artificial Sequence: Synthetic oligonucleotide
  Antisense strand to SEQ ID NO: 250286
cugguaaagacacuucagg

SEQ ID NO: 250288 - RNA, 19 nt, Artificial Sequence
  Description of Artificial Sequence: Synthetic oligonucleotide
  Sense strand starting at position 2799 SEQ ID NO: 3220
gugucuuuaccaggaggua

SEQ ID NO: 250289 - RNA, 19 nt, Artificial Sequence
  Description of Artificial Sequence: Synthetic oligonucleotide
  Antisense strand to SEQ ID NO: 250288
uaccuccugguaaagacac

SEQ ID NO: 250290 - RNA, 19 nt, Artificial Sequence
  Description of Artificial Sequence: Synthetic oligonucleotide
  Sense strand starting at position 2830 SEQ ID NO: 3220
uguaaauagcucuggauua

SEQ ID NO: 250291 - RNA, 19 nt, Artificial Sequence
  Description of Artificial Sequence: Synthetic oligonucleotide
  Antisense strand to SEQ ID NO: 250290
uaauccagagcuauuuaca

SEQ ID NO: 250292 - RNA, 19 nt, Artificial Sequence
  Description of Artificial Sequence: Synthetic oligonucleotide
  Sense strand starting at position 2909 SEQ ID NO: 3220
uguuauugugaggaacacu

SEQ ID NO: 250293 - RNA, 19 nt, Artificial Sequence
  Description of Artificial Sequence: Synthetic oligonucleotide
  Antisense strand to SEQ ID NO: 250292
aguguuccucacaauaaca

SEQ ID NO: 250294 - RNA, 19 nt, Artificial Sequence
  Description of Artificial Sequence: Synthetic oligonucleotide
  Sense strand starting at position 2948 SEQ ID NO: 3220
augcaaacggcucaauauu

SEQ ID NO: 250295 - RNA, 19 nt, Artificial Sequence
  Description of Artificial Sequence: Synthetic oligonucleotide
  Antisense strand to SEQ ID NO: 250294
aauauugagccguuugcau

SEQ ID NO: 250296 - RNA, 19 nt, Artificial Sequence
  Description of Artificial Sequence: Synthetic oligonucleotide
  Sense strand starting at position 2970 SEQ ID NO: 3220
ggguaacugcuacauguca

SEQ ID NO: 250297 - RNA, 19 nt, Artificial Sequence
  Description of Artificial Sequence: Synthetic oligonucleotide
  Antisense strand to SEQ ID NO: 250296
ugacauguagcaguuaccc

SEQ ID NO: 250298 - RNA, 19 nt, Artificial Sequence
  Description of Artificial Sequence: Synthetic oligonucleotide
  Sense strand starting at position 3037 SEQ ID NO: 3220
auguuaggauuagaaagaa

SEQ ID NO: 250299 - RNA, 19 nt, Artificial Sequence
  Description of Artificial Sequence: Synthetic oligonucleotide
  Antisense strand to SEQ ID NO: 250298
uucuuucuaauccuaacau

SEQ ID NO: 250300 - RNA, 19 nt, Artificial Sequence
  Description of Artificial Sequence: Synthetic oligonucleotide
  Sense strand starting at position 3170 SEQ ID NO: 3220
ugugacuuucugcagaucu

SEQ ID NO: 250301 - RNA, 19 nt, Artificial Sequence
  Description of Artificial Sequence: Synthetic oligonucleotide
  Antisense strand to SEQ ID NO: 250300
agaucugcagaaagucaca

SEQ ID NO: 250302 - RNA, 19 nt, Artificial Sequence
  Description of Artificial Sequence: Synthetic oligonucleotide
  Sense strand starting at position 3172 SEQ ID NO: 3220
ugacuuucugcagaucuuu

SEQ ID NO: 250303 - RNA, 19 nt, Artificial Sequence
  Description of Artificial Sequence: Synthetic oligonucleotide
  Antisense strand to SEQ ID NO: 250302
aaagaucugcagaaaguca

SEQ ID NO: 250304 - RNA, 19 nt, Artificial Sequence
  Description of Artificial Sequence: Synthetic oligonucleotide
  Sense strand starting at position 3485 SEQ ID NO: 3220
auaagauguuagguuaagu

SEQ ID NO: 250305 - RNA, 19 nt, Artificial Sequence
  Description of Artificial Sequence: Synthetic oligonucleotide
  Antisense strand to SEQ ID NO: 250304
acuuaaccuaacaucuuau

SEQ ID NO: 250306 - RNA, 19 nt, Artificial Sequence
  Description of Artificial Sequence: Synthetic oligonucleotide
  Sense strand starting at position 3496 SEQ ID NO: 3220
gguuaagucagguaaauuc

SEQ ID NO: 250307 - RNA, 19 nt, Artificial Sequence
  Description of Artificial Sequence: Synthetic oligonucleotide
  Antisense strand to SEQ ID NO: 250306
gaauuuaccugacuuaacc

SEQ ID NO: 250308 - RNA, 19 nt, Artificial Sequence
  Description of Artificial Sequence: Synthetic oligonucleotide
  Sense strand starting at position 18 SEQ ID NO: 3221
gcaacuggguuucuagaca

SEQ ID NO: 250309 - RNA, 19 nt, Artificial Sequence
  Description of Artificial Sequence: Synthetic oligonucleotide
  Antisense strand to SEQ ID NO: 250308
ugucuagaaacccaguugc

SEQ ID NO: 250310 - RNA, 19 nt, Artificial Sequence
  Description of Artificial Sequence: Synthetic oligonucleotide
  Sense strand starting at position 23 SEQ ID NO: 3221
uggguuucuagacaugcua

SEQ ID NO: 250311 - RNA, 19 nt, Artificial Sequence
  Description of Artificial Sequence: Synthetic oligonucleotide
  Antisense strand to SEQ ID NO: 250310
uagcaugucuagaaaccca

SEQ ID NO: 250312 - RNA, 19 nt, Artificial Sequence
  Description of Artificial Sequence: Synthetic oligonucleotide
  Sense strand starting at position 360 SEQ ID NO: 3221
guaauccugcaaugagaag

SEQ ID NO: 250313 - RNA, 19 nt, Artificial Sequence
  Description of Artificial Sequence: Synthetic oligonucleotide
  Antisense strand to SEQ ID NO: 250312
cuucucauugcaggauuac

SEQ ID NO: 250314 - RNA, 19 nt, Artificial Sequence
  Description of Artificial Sequence: Synthetic oligonucleotide
  Sense strand starting at position 591 SEQ ID NO: 3221
aggagagucauguauggcu

SEQ ID NO: 250315 - RNA, 19 nt, Artificial Sequence
  Description of Artificial Sequence: Synthetic oligonucleotide
  Antisense strand to SEQ ID NO: 250314
agccauacaugacucuccu

SEQ ID NO: 250316 - RNA, 19 nt, Artificial Sequence
  Description of Artificial Sequence: Synthetic oligonucleotide
  Sense strand starting at position 598 SEQ ID NO: 3221
ucauguauggcuggaggau

SEQ ID NO: 250317 - RNA, 19 nt, Artificial Sequence
  Description of Artificial Sequence: Synthetic oligonucleotide
  Antisense strand to SEQ ID NO: 250316
auccuccagccauacauga

SEQ ID NO: 250318 - RNA, 19 nt, Artificial Sequence
  Description of Artificial Sequence: Synthetic oligonucleotide
  Sense strand starting at position 599 SEQ ID NO: 3221
cauguauggcuggaggauu

SEQ ID NO: 250319 - RNA, 19 nt, Artificial Sequence
  Description of Artificial Sequence: Synthetic oligonucleotide
  Antisense strand to SEQ ID NO: 250318
aauccuccagccauacaug

SEQ ID NO: 250320 - RNA, 19 nt, Artificial Sequence
  Description of Artificial Sequence: Synthetic oligonucleotide
  Sense strand starting at position 612 SEQ ID NO: 3221
aggauuaacucagcuugua

SEQ ID NO: 250321 - RNA, 19 nt, Artificial Sequence
  Description of Artificial Sequence: Synthetic oligonucleotide
  Antisense strand to SEQ ID NO: 250320
uacaagcugaguuaauccu

SEQ ID NO: 250322 - RNA, 19 nt, Artificial Sequence
  Description of Artificial Sequence: Synthetic oligonucleotide
  Sense strand starting at position 666 SEQ ID NO: 3221
caaguaaguggucagaauu

SEQ ID NO: 250323 - RNA, 19 nt, Artificial Sequence
  Description of Artificial Sequence: Synthetic oligonucleotide
  Antisense strand to SEQ ID NO: 250322
aauucugaccacuuacuug

SEQ ID NO: 250324 - RNA, 19 nt, Artificial Sequence
  Description of Artificial Sequence: Synthetic oligonucleotide
  Sense strand starting at position 694 SEQ ID NO: 3221
agcagauaacuuugaaauu

SEQ ID NO: 250325 - RNA, 19 nt, Artificial Sequence
  Description of Artificial Sequence: Synthetic oligonucleotide
  Antisense strand to SEQ ID NO: 250324
aauuucaaaguuaucugcu

SEQ ID NO: 250326 - RNA, 19 nt, Artificial Sequence
  Description of Artificial Sequence: Synthetic oligonucleotide
  Sense strand starting at position 796 SEQ ID NO: 3221
uccagaugcuauguaacau

SEQ ID NO: 250327 - RNA, 19 nt, Artificial Sequence
  Description of Artificial Sequence: Synthetic oligonucleotide
  Antisense strand to SEQ ID NO: 250326
auguuacauagcaucugga

SEQ ID NO: 250328 - RNA, 19 nt, Artificial Sequence
  Description of Artificial Sequence: Synthetic oligonucleotide
  Sense strand starting at position 852 SEQ ID NO: 3221
acauaucuuguagguaaga

SEQ ID NO: 250329 - RNA, 19 nt, Artificial Sequence
  Description of Artificial Sequence: Synthetic oligonucleotide
  Antisense strand to SEQ ID NO: 250328
ucuuaccuacaagauaugu

SEQ ID NO: 250330 - RNA, 19 nt, Artificial Sequence
  Description of Artificial Sequence: Synthetic oligonucleotide
  Sense strand starting at position 853 SEQ ID NO: 3221
cauaucuuguagguaagaa

SEQ ID NO: 250331 - RNA, 19 nt, Artificial Sequence
  Description of Artificial Sequence: Synthetic oligonucleotide
  Antisense strand to SEQ ID NO: 250330
uucuuaccuacaagauaug

SEQ ID NO: 250332 - RNA, 19 nt, Artificial Sequence
  Description of Artificial Sequence: Synthetic oligonucleotide
  Sense strand starting at position 883 SEQ ID NO: 3221
ccauacagguccuuugaaa

SEQ ID NO: 250333 - RNA, 19 nt, Artificial Sequence
  Description of Artificial Sequence: Synthetic oligonucleotide
  Antisense strand to SEQ ID NO: 250332
uuucaaaggaccuguaugg

SEQ ID NO: 250334 - RNA, 19 nt, Artificial Sequence
  Description of Artificial Sequence: Synthetic oligonucleotide
  Sense strand starting at position 904 SEQ ID NO: 3221
uuauaugccguuuaacaca

SEQ ID NO: 250335 - RNA, 19 nt, Artificial Sequence
  Description of Artificial Sequence: Synthetic oligonucleotide
  Antisense strand to SEQ ID NO: 250334
uguguuaaacggcauauaa

SEQ ID NO: 250336 - RNA, 19 nt, Artificial Sequence
  Description of Artificial Sequence: Synthetic oligonucleotide
  Sense strand starting at position 957 SEQ ID NO: 3221
aauggaaaucucuguauga

SEQ ID NO: 250337 - RNA, 19 nt, Artificial Sequence
  Description of Artificial Sequence: Synthetic oligonucleotide
  Antisense strand to SEQ ID NO: 250336
ucauacagagauuuccauu

SEQ ID NO: 250338 - RNA, 19 nt, Artificial Sequence
  Description of Artificial Sequence: Synthetic oligonucleotide
  Sense strand starting at position 958 SEQ ID NO: 3221
auggaaaucucuguaugac

SEQ ID NO: 250339 - RNA, 19 nt, Artificial Sequence
  Description of Artificial Sequence: Synthetic oligonucleotide
  Antisense strand to SEQ ID NO: 250338
gucauacagagauuuccau

SEQ ID NO: 250340 - RNA, 19 nt, Artificial Sequence
  Description of Artificial Sequence: Synthetic oligonucleotide
  Sense strand starting at position 1225 SEQ ID NO: 3221
accaucaguuugccuagaa

SEQ ID NO: 250341 - RNA, 19 nt, Artificial Sequence
  Description of Artificial Sequence: Synthetic oligonucleotide
  Antisense strand to SEQ ID NO: 250340
uucuaggcaaacugauggu

SEQ ID NO: 250342 - RNA, 19 nt, Artificial Sequence
  Description of Artificial Sequence: Synthetic oligonucleotide
  Sense strand starting at position 1250 SEQ ID NO: 3221
uggaaauucuggucuugca

SEQ ID NO: 250343 - RNA, 19 nt, Artificial Sequence
  Description of Artificial Sequence: Synthetic oligonucleotide
  Antisense strand to SEQ ID NO: 250342
ugcaagaccagaauuucca

SEQ ID NO: 250344 - RNA, 19 nt, Artificial Sequence
  Description of Artificial Sequence: Synthetic oligonucleotide
  Sense strand starting at position 1300 SEQ ID NO: 3221
ucuccuuugguccaagcaa

SEQ ID NO: 250345 - RNA, 19 nt, Artificial Sequence
  Description of Artificial Sequence: Synthetic oligonucleotide
  Antisense strand to SEQ ID NO: 250344
uugcuuggaccaaaggaga

SEQ ID NO: 250346 - RNA, 19 nt, Artificial Sequence
  Description of Artificial Sequence: Synthetic oligonucleotide
  Sense strand starting at position 2288 SEQ ID NO: 3221
agagccaggguguaaucua

SEQ ID NO: 250347 - RNA, 19 nt, Artificial Sequence
  Description of Artificial Sequence: Synthetic oligonucleotide
  Antisense strand to SEQ ID NO: 250346
uagauuacacccuggcucu

SEQ ID NO: 250348 - RNA, 19 nt, Artificial Sequence
  Description of Artificial Sequence: Synthetic oligonucleotide
  Sense strand starting at position 2293 SEQ ID NO: 3221
caggguguaaucuagguca

SEQ ID NO: 250349 - RNA, 19 nt, Artificial Sequence
  Description of Artificial Sequence: Synthetic oligonucleotide
  Antisense strand to SEQ ID NO: 250348
ugaccuagauuacacccug

SEQ ID NO: 250350 - RNA, 19 nt, Artificial Sequence
  Description of Artificial Sequence: Synthetic oligonucleotide
  Sense strand starting at position 2298 SEQ ID NO: 3221
uguaaucuaggucaccuaa

SEQ ID NO: 250351 - RNA, 19 nt, Artificial Sequence
  Description of Artificial Sequence: Synthetic oligonucleotide
  Antisense strand to SEQ ID NO: 250350
uuaggugaccuagauuaca

SEQ ID NO: 250352 - RNA, 19 nt, Artificial Sequence
  Description of Artificial Sequence: Synthetic oligonucleotide
  Sense strand starting at position 2369 SEQ ID NO: 3221
acgagaccucauuauggua

SEQ ID NO: 250353 - RNA, 19 nt, Artificial Sequence
  Description of Artificial Sequence: Synthetic oligonucleotide
  Antisense strand to SEQ ID NO: 250352
uaccauaaugaggucucgu

SEQ ID NO: 250354 - RNA, 19 nt, Artificial Sequence
  Description of Artificial Sequence: Synthetic oligonucleotide
  Sense strand starting at position 2573 SEQ ID NO: 3221
uucuacauggugugaaauu

SEQ ID NO: 250355 - RNA, 19 nt, Artificial Sequence
  Description of Artificial Sequence: Synthetic oligonucleotide
  Antisense strand to SEQ ID NO: 250354
aauuucacaccauguagaa

SEQ ID NO: 250356 - RNA, 19 nt, Artificial Sequence
  Description of Artificial Sequence: Synthetic oligonucleotide
  Sense strand starting at position 2584 SEQ ID NO: 3221
gugaaauucccacauagug

SEQ ID NO: 250357 - RNA, 19 nt, Artificial Sequence
  Description of Artificial Sequence: Synthetic oligonucleotide
  Antisense strand to SEQ ID NO: 250356
cacuaugugggaauuucac

SEQ ID NO: 250358 - RNA, 19 nt, Artificial Sequence
  Description of Artificial Sequence: Synthetic oligonucleotide
  Sense strand starting at position 2684 SEQ ID NO: 3221
ugacauugugacgagcaca

SEQ ID NO: 250359 - RNA, 19 nt, Artificial Sequence
  Description of Artificial Sequence: Synthetic oligonucleotide
  Antisense strand to SEQ ID NO: 250358
ugugcucgucacaauguca

SEQ ID NO: 250360 - RNA, 19 nt, Artificial Sequence
  Description of Artificial Sequence: Synthetic oligonucleotide
  Sense strand starting at position 2963 SEQ ID NO: 3221
aauagagguucuguuguaa

SEQ ID NO: 250361 - RNA, 19 nt, Artificial Sequence
  Description of Artificial Sequence: Synthetic oligonucleotide
  Antisense strand to SEQ ID NO: 250360
uuacaacagaaccucuauu

SEQ ID NO: 250362 - RNA, 19 nt, Artificial Sequence
  Description of Artificial Sequence: Synthetic oligonucleotide
  Sense strand starting at position 3084 SEQ ID NO: 3221
cuacuaagauggcuauuau

SEQ ID NO: 250363 - RNA, 19 nt, Artificial Sequence
  Description of Artificial Sequence: Synthetic oligonucleotide
  Antisense strand to SEQ ID NO: 250362
auaauagccaucuuaguag

SEQ ID NO: 250364 - RNA, 19 nt, Artificial Sequence
  Description of Artificial Sequence: Synthetic oligonucleotide
  Sense strand starting at position 3209 SEQ ID NO: 3221
uaggaaaugguaugacagu

SEQ ID NO: 250365 - RNA, 19 nt, Artificial Sequence
  Description of Artificial Sequence: Synthetic oligonucleotide
  Antisense strand to SEQ ID NO: 250364
acugucauaccauuuccua

SEQ ID NO: 250366 - RNA, 19 nt, Artificial Sequence
  Description of Artificial Sequence: Synthetic oligonucleotide
  Sense strand starting at position 3218 SEQ ID NO: 3221
guaugacaguuucuaagaa

SEQ ID NO: 250367 - RNA, 19 nt, Artificial Sequence
  Description of Artificial Sequence: Synthetic oligonucleotide
  Antisense strand to SEQ ID NO: 250366
uucuuagaaacugucauac

SEQ ID NO: 250368 - RNA, 19 nt, Artificial Sequence
  Description of Artificial Sequence: Synthetic oligonucleotide
  Sense strand starting at position 3243 SEQ ID NO: 3221
acagaauuaccguaucacc

SEQ ID NO: 250369 - RNA, 19 nt, Artificial Sequence
  Description of Artificial Sequence: Synthetic oligonucleotide
  Antisense strand to SEQ ID NO: 250368
ggugauacgguaauucugu

SEQ ID NO: 250370 - RNA, 19 nt, Artificial Sequence
  Description of Artificial Sequence: Synthetic oligonucleotide
  Sense strand starting at position 3879 SEQ ID NO: 3221
augugaaguacuuagagug

SEQ ID NO: 250371 - RNA, 19 nt, Artificial Sequence
  Description of Artificial Sequence: Synthetic oligonucleotide
  Antisense strand to SEQ ID NO: 250370
cacucuaaguacuucacau

SEQ ID NO: 250372 - RNA, 19 nt, Artificial Sequence
  Description of Artificial Sequence: Synthetic oligonucleotide
  Sense strand starting at position 3885 SEQ ID NO: 3221
aguacuuagaguggucuga

SEQ ID NO: 250373 - RNA, 19 nt, Artificial Sequence
  Description of Artificial Sequence: Synthetic oligonucleotide
  Antisense strand to SEQ ID NO: 250372
ucagaccacucuaaguacu

SEQ ID NO: 250374 - RNA, 19 nt, Artificial Sequence
  Description of Artificial Sequence: Synthetic oligonucleotide
  Sense strand starting at position 3887 SEQ ID NO: 3221
uacuuagaguggucugauu

SEQ ID NO: 250375 - RNA, 19 nt, Artificial Sequence
  Description of Artificial Sequence: Synthetic oligonucleotide
  Antisense strand to SEQ ID NO: 250374
aaucagaccacucuaagua

SEQ ID NO: 250376 - RNA, 19 nt, Artificial Sequence
  Description of Artificial Sequence: Synthetic oligonucleotide
  Sense strand starting at position 3914 SEQ ID NO: 3221
cagaaaguugaaugguaau

SEQ ID NO: 250377 - RNA, 19 nt, Artificial Sequence
  Description of Artificial Sequence: Synthetic oligonucleotide
  Antisense strand to SEQ ID NO: 250376
auuaccauucaacuuucug

SEQ ID NO: 250378 - RNA, 19 nt, Artificial Sequence
  Description of Artificial Sequence: Synthetic oligonucleotide
  Sense strand starting at position 3920 SEQ ID NO: 3221
guugaaugguaauugacag

SEQ ID NO: 250379 - RNA, 19 nt, Artificial Sequence
  Description of Artificial Sequence: Synthetic oligonucleotide
  Antisense strand to SEQ ID NO: 250378
cugucaauuaccauucaac

SEQ ID NO: 250380 - RNA, 19 nt, Artificial Sequence
  Description of Artificial Sequence: Synthetic oligonucleotide
  Sense strand starting at position 3958 SEQ ID NO: 3221
aauggaacaucaguguaua

SEQ ID NO: 250381 - RNA, 19 nt, Artificial Sequence
  Description of Artificial Sequence: Synthetic oligonucleotide
  Antisense strand to SEQ ID NO: 250380
uauacacugauguuccauu

SEQ ID NO: 250382 - RNA, 19 nt, Artificial Sequence
  Description of Artificial Sequence: Synthetic oligonucleotide
  Sense strand starting at position 3959 SEQ ID NO: 3221
auggaacaucaguguauag

SEQ ID NO: 250383 - RNA, 19 nt, Artificial Sequence
  Description of Artificial Sequence: Synthetic oligonucleotide
  Antisense strand to SEQ ID NO: 250382
cuauacacugauguuccau

SEQ ID NO: 250384 - RNA, 19 nt, Artificial Sequence
  Description of Artificial Sequence: Synthetic oligonucleotide
  Sense strand starting at position 3961 SEQ ID NO: 3221
ggaacaucaguguauagug

SEQ ID NO: 250385 - RNA, 19 nt, Artificial Sequence
  Description of Artificial Sequence: Synthetic oligonucleotide
  Antisense strand to SEQ ID NO: 250384
cacuauacacugauguucc

SEQ ID NO: 250386 - RNA, 19 nt, Artificial Sequence
  Description of Artificial Sequence: Synthetic oligonucleotide
  Sense strand starting at position 3969 SEQ ID NO: 3221
aguguauaguggguacaga

SEQ ID NO: 250387 - RNA, 19 nt, Artificial Sequence
  Description of Artificial Sequence: Synthetic oligonucleotide
  Antisense strand to SEQ ID NO: 250386
ucuguacccacuauacacu

SEQ ID NO: 250388 - RNA, 19 nt, Artificial Sequence
  Description of Artificial Sequence: Synthetic oligonucleotide
  Sense strand starting at position 91 SEQ ID NO: 3222
cugggauccugacuucuuu

SEQ ID NO: 250389 - RNA, 19 nt, Artificial Sequence
  Description of Artificial Sequence: Synthetic oligonucleotide
  Antisense strand to SEQ ID NO: 250388
aaagaagucaggaucccag

SEQ ID NO: 250390 - RNA, 19 nt, Artificial Sequence
  Description of Artificial Sequence: Synthetic oligonucleotide
  Sense strand starting at position 161 SEQ ID NO: 3222
aguuucuacugucuucuaa

SEQ ID NO: 250391 - RNA, 19 nt, Artificial Sequence
  Description of Artificial Sequence: Synthetic oligonucleotide
  Antisense strand to SEQ ID NO: 250390
uuagaagacaguagaaacu

SEQ ID NO: 250392 - RNA, 19 nt, Artificial Sequence
  Description of Artificial Sequence: Synthetic oligonucleotide
  Sense strand starting at position 212 SEQ ID NO: 3222
ggagaaacugaccguucuu

SEQ ID NO: 250393 - RNA, 19 nt, Artificial Sequence
  Description of Artificial Sequence: Synthetic oligonucleotide
  Antisense strand to SEQ ID NO: 250392
aagaacggucaguuucucc

SEQ ID NO: 250394 - RNA, 19 nt, Artificial Sequence
  Description of Artificial Sequence: Synthetic oligonucleotide
  Sense strand starting at position 219 SEQ ID NO: 3222
cugaccguucuugagcaaa

SEQ ID NO: 250395 - RNA, 19 nt, Artificial Sequence
  Description of Artificial Sequence: Synthetic oligonucleotide
  Antisense strand to SEQ ID NO: 250394
uuugcucaagaacggucag

SEQ ID NO: 250396 - RNA, 19 nt, Artificial Sequence
  Description of Artificial Sequence: Synthetic oligonucleotide
  Sense strand starting at position 296 SEQ ID NO: 3222
guaugugacccagacugga

SEQ ID NO: 250397 - RNA, 19 nt, Artificial Sequence
  Description of Artificial Sequence: Synthetic oligonucleotide
  Antisense strand to SEQ ID NO: 250396
uccagucugggucacauac

SEQ ID NO: 250398 - RNA, 19 nt, Artificial Sequence
  Description of Artificial Sequence: Synthetic oligonucleotide
  Sense strand starting at position 544 SEQ ID NO: 3222
cagcauaggugacugaaga

SEQ ID NO: 250399 - RNA, 19 nt, Artificial Sequence
  Description of Artificial Sequence: Synthetic oligonucleotide
  Antisense strand to SEQ ID NO: 250398
ucuucagucaccuaugcug

SEQ ID NO: 250400 - RNA, 19 nt, Artificial Sequence
  Description of Artificial Sequence: Synthetic oligonucleotide
  Sense strand starting at position 545 SEQ ID NO: 3222
agcauaggugacugaagaa

SEQ ID NO: 250401 - RNA, 19 nt, Artificial Sequence
  Description of Artificial Sequence: Synthetic oligonucleotide
  Antisense strand to SEQ ID NO: 250400
uucuucagucaccuaugcu

SEQ ID NO: 250402 - RNA, 19 nt, Artificial Sequence
  Description of Artificial Sequence: Synthetic oligonucleotide
  Sense strand starting at position 665 SEQ ID NO: 3222
gggcuuuggccaggcugaa

SEQ ID NO: 250403 - RNA, 19 nt, Artificial Sequence
  Description of Artificial Sequence: Synthetic oligonucleotide
  Antisense strand to SEQ ID NO: 250402
uucagccuggccaaagccc

SEQ ID NO: 250404 - RNA, 19 nt, Artificial Sequence
  Description of Artificial Sequence: Synthetic oligonucleotide
  Sense strand starting at position 754 SEQ ID NO: 3222
gugugugaaugaucuggaa

SEQ ID NO: 250405 - RNA, 19 nt, Artificial Sequence
  Description of Artificial Sequence: Synthetic oligonucleotide
  Antisense strand to SEQ ID NO: 250404
uuccagaucauucacacac

SEQ ID NO: 250406 - RNA, 19 nt, Artificial Sequence
  Description of Artificial Sequence: Synthetic oligonucleotide
  Sense strand starting at position 949 SEQ ID NO: 3222
augaaaguaguccaugcua

SEQ ID NO: 250407 - RNA, 19 nt, Artificial Sequence
  Description of Artificial Sequence: Synthetic oligonucleotide
  Antisense strand to SEQ ID NO: 250406
uagcauggacuacuuucau

SEQ ID NO: 250408 - RNA, 19 nt, Artificial Sequence
  Description of Artificial Sequence: Synthetic oligonucleotide
  Sense strand starting at position 951 SEQ ID NO: 3222
gaaaguaguccaugcuagu

SEQ ID NO: 250409 - RNA, 19 nt, Artificial Sequence
  Description of Artificial Sequence: Synthetic oligonucleotide
  Antisense strand to SEQ ID NO: 250408
acuagcauggacuacuuuc

SEQ ID NO: 250410 - RNA, 19 nt, Artificial Sequence
  Description of Artificial Sequence: Synthetic oligonucleotide
  Sense strand starting at position 1059 SEQ ID NO: 3222
guagaugucugguccucag

SEQ ID NO: 250411 - RNA, 19 nt, Artificial Sequence
  Description of Artificial Sequence: Synthetic oligonucleotide
  Antisense strand to SEQ ID NO: 250410
cugaggaccagacaucuac

SEQ ID NO: 250412 - RNA, 19 nt, Artificial Sequence
  Description of Artificial Sequence: Synthetic oligonucleotide
  Sense strand starting at position 1062 SEQ ID NO: 3222
gaugucugguccucagugu

SEQ ID NO: 250413 - RNA, 19 nt, Artificial Sequence
  Description of Artificial Sequence: Synthetic oligonucleotide
  Antisense strand to SEQ ID NO: 250412
acacugaggaccagacauc

SEQ ID NO: 250414 - RNA, 19 nt, Artificial Sequence
  Description of Artificial Sequence: Synthetic oligonucleotide
  Sense strand starting at position 1202 SEQ ID NO: 3222
cagagauggcugcauaguu

SEQ ID NO: 250415 - RNA, 19 nt, Artificial Sequence
  Description of Artificial Sequence: Synthetic oligonucleotide
  Antisense strand to SEQ ID NO: 250414
aacuaugcagccaucucug

SEQ ID NO: 250416 - RNA, 19 nt, Artificial Sequence
  Description of Artificial Sequence: Synthetic oligonucleotide
  Sense strand starting at position 1282 SEQ ID NO: 3222
auuacaaagugaugaagaa

SEQ ID NO: 250417 - RNA, 19 nt, Artificial Sequence
  Description of Artificial Sequence: Synthetic oligonucleotide
  Antisense strand to SEQ ID NO: 250416
uucuucaucacuuuguaau

SEQ ID NO: 250418 - RNA, 19 nt, Artificial Sequence
  Description of Artificial Sequence: Synthetic oligonucleotide
  Sense strand starting at position 2142 SEQ ID NO: 3222
gugucaaugucacucuuau

SEQ ID NO: 250419 - RNA, 19 nt, Artificial Sequence
  Description of Artificial Sequence: Synthetic oligonucleotide
  Antisense strand to SEQ ID NO: 250418
auaagagugacauugacac

SEQ ID NO: 250420 - RNA, 19 nt, Artificial Sequence
  Description of Artificial Sequence: Synthetic oligonucleotide
  Sense strand starting at position 2148 SEQ ID NO: 3222
augucacucuuauuacagu

SEQ ID NO: 250421 - RNA, 19 nt, Artificial Sequence
  Description of Artificial Sequence: Synthetic oligonucleotide
  Antisense strand to SEQ ID NO: 250420
acuguaauaagagugacau

SEQ ID NO: 250422 - RNA, 19 nt, Artificial Sequence
  Description of Artificial Sequence: Synthetic oligonucleotide
  Sense strand starting at position 2245 SEQ ID NO: 3222
gcacauacauaagaaauga

SEQ ID NO: 250423 - RNA, 19 nt, Artificial Sequence
  Description of Artificial Sequence: Synthetic oligonucleotide
  Antisense strand to SEQ ID NO: 250422
ucauuucuuauguaugugc

SEQ ID NO: 250424 - RNA, 19 nt, Artificial Sequence
  Description of Artificial Sequence: Synthetic oligonucleotide
  Sense strand starting at position 2296 SEQ ID NO: 3222
gagcgagaccucugccuuu

SEQ ID NO: 250425 - RNA, 19 nt, Artificial Sequence
  Description of Artificial Sequence: Synthetic oligonucleotide
  Antisense strand to SEQ ID NO: 250424
aaaggcagaggucucgcuc

SEQ ID NO: 250426 - RNA, 19 nt, Artificial Sequence
  Description of Artificial Sequence: Synthetic oligonucleotide
  Sense strand starting at position 2944 SEQ ID NO: 3222
ccuaaauggugugauuucu

SEQ ID NO: 250427 - RNA, 19 nt, Artificial Sequence
  Description of Artificial Sequence: Synthetic oligonucleotide
  Antisense strand to SEQ ID NO: 250426
agaaaucacaccauuuagg

SEQ ID NO: 250428 - RNA, 19 nt, Artificial Sequence
  Description of Artificial Sequence: Synthetic oligonucleotide
  Sense strand starting at position 2950 SEQ ID NO: 3222
uggugugauuucuucgaua

SEQ ID NO: 250429 - RNA, 19 nt, Artificial Sequence
  Description of Artificial Sequence: Synthetic oligonucleotide
  Antisense strand to SEQ ID NO: 250428
uaucgaagaaaucacacca

SEQ ID NO: 250430 - RNA, 19 nt, Artificial Sequence
  Description of Artificial Sequence: Synthetic oligonucleotide
  Sense strand starting at position 2952 SEQ ID NO: 3222
gugugauuucuucgauaau

SEQ ID NO: 250431 - RNA, 19 nt, Artificial Sequence
  Description of Artificial Sequence: Synthetic oligonucleotide
  Antisense strand to SEQ ID NO: 250430
auuaucgaagaaaucacac

SEQ ID NO: 250432 - RNA, 19 nt, Artificial Sequence
  Description of Artificial Sequence: Synthetic oligonucleotide
  Sense strand starting at position 2953 SEQ ID NO: 3222
ugugauuucuucgauaaug

SEQ ID NO: 250433 - RNA, 19 nt, Artificial Sequence
  Description of Artificial Sequence: Synthetic oligonucleotide
  Antisense strand to SEQ ID NO: 250432
cauuaucgaagaaaucaca

SEQ ID NO: 250434 - RNA, 19 nt, Artificial Sequence
  Description of Artificial Sequence: Synthetic oligonucleotide
  Sense strand starting at position 2961 SEQ ID NO: 3222
cuucgauaaugacuugcua

SEQ ID NO: 250435 - RNA, 19 nt, Artificial Sequence
  Description of Artificial Sequence: Synthetic oligonucleotide
  Antisense strand to SEQ ID NO: 250434
uagcaagucauuaucgaag

SEQ ID NO: 250436 - RNA, 19 nt, Artificial Sequence
  Description of Artificial Sequence: Synthetic oligonucleotide
  Sense strand starting at position 3030 SEQ ID NO: 3222
agaaguaugguagguguau

SEQ ID NO: 250437 - RNA, 19 nt, Artificial Sequence
  Description of Artificial Sequence: Synthetic oligonucleotide
  Antisense strand to SEQ ID NO: 250436
auacaccuaccauacuucu

SEQ ID NO: 250438 - RNA, 19 nt, Artificial Sequence
  Description of Artificial Sequence: Synthetic oligonucleotide
  Sense strand starting at position 3031 SEQ ID NO: 3222
gaaguaugguagguguauu

SEQ ID NO: 250439 - RNA, 19 nt, Artificial Sequence
  Description of Artificial Sequence: Synthetic oligonucleotide
  Antisense strand to SEQ ID NO: 250438
aauacaccuaccauacuuc

SEQ ID NO: 250440 - RNA, 19 nt, Artificial Sequence
  Description of Artificial Sequence: Synthetic oligonucleotide
  Sense strand starting at position 3032 SEQ ID NO: 3222
aaguaugguagguguauua

SEQ ID NO: 250441 - RNA, 19 nt, Artificial Sequence
  Description of Artificial Sequence: Synthetic oligonucleotide
  Antisense strand to SEQ ID NO: 250440
uaauacaccuaccauacuu

SEQ ID NO: 250442 - RNA, 19 nt, Artificial Sequence
  Description of Artificial Sequence: Synthetic oligonucleotide
  Sense strand starting at position 3412 SEQ ID NO: 3222
ccauaucaguaggauauaa

SEQ ID NO: 250443 - RNA, 19 nt, Artificial Sequence
  Description of Artificial Sequence: Synthetic oligonucleotide
  Antisense strand to SEQ ID NO: 250442
uuauauccuacugauaugg

SEQ ID NO: 250444 - RNA, 19 nt, Artificial Sequence
  Description of Artificial Sequence: Synthetic oligonucleotide
  Sense strand starting at position 3470 SEQ ID NO: 3222
acagguuaaaugugcguua

SEQ ID NO: 250445 - RNA, 19 nt, Artificial Sequence
  Description of Artificial Sequence: Synthetic oligonucleotide
  Antisense strand to SEQ ID NO: 250444
uaacgcacauuuaaccugu

SEQ ID NO: 250446 - RNA, 19 nt, Artificial Sequence
  Description of Artificial Sequence: Synthetic oligonucleotide
  Sense strand starting at position 3473 SEQ ID NO: 3222
gguuaaaugugcguuauuu

SEQ ID NO: 250447 - RNA, 19 nt, Artificial Sequence
  Description of Artificial Sequence: Synthetic oligonucleotide
  Antisense strand to SEQ ID NO: 250446
aaauaacgcacauuuaacc

SEQ ID NO: 250448 - RNA, 19 nt, Artificial Sequence
  Description of Artificial Sequence: Synthetic oligonucleotide
  Sense strand starting at position 3477 SEQ ID NO: 3222
aaaugugcguuauuuagca

SEQ ID NO: 250449 - RNA, 19 nt, Artificial Sequence
  Description of Artificial Sequence: Synthetic oligonucleotide
  Antisense strand to SEQ ID NO: 250448
ugcuaaauaacgcacauuu

SEQ ID NO: 250450 - RNA, 19 nt, Artificial Sequence
  Description of Artificial Sequence: Synthetic oligonucleotide
  Sense strand starting at position 3496 SEQ ID NO: 3222
cagccuuucugaguccuga

SEQ ID NO: 250451 - RNA, 19 nt, Artificial Sequence
  Description of Artificial Sequence: Synthetic oligonucleotide
  Antisense strand to SEQ ID NO: 250450
ucaggacucagaaaggcug

SEQ ID NO: 250452 - RNA, 19 nt, Artificial Sequence
  Description of Artificial Sequence: Synthetic oligonucleotide
  Sense strand starting at position 3506 SEQ ID NO: 3222
gaguccugaccauguccua

SEQ ID NO: 250453 - RNA, 19 nt, Artificial Sequence
  Description of Artificial Sequence: Synthetic oligonucleotide
  Antisense strand to SEQ ID NO: 250452
uaggacauggucaggacuc

SEQ ID NO: 250454 - RNA, 19 nt, Artificial Sequence
  Description of Artificial Sequence: Synthetic oligonucleotide
  Sense strand starting at position 3633 SEQ ID NO: 3222
cuguaucugaaguauaguu

SEQ ID NO: 250455 - RNA, 19 nt, Artificial Sequence
  Description of Artificial Sequence: Synthetic oligonucleotide
  Antisense strand to SEQ ID NO: 250454
aacuauacuucagauacag

SEQ ID NO: 250456 - RNA, 19 nt, Artificial Sequence
  Description of Artificial Sequence: Synthetic oligonucleotide
  Sense strand starting at position 3640 SEQ ID NO: 3222
ugaaguauaguuuguccau

SEQ ID NO: 250457 - RNA, 19 nt, Artificial Sequence
  Description of Artificial Sequence: Synthetic oligonucleotide
  Antisense strand to SEQ ID NO: 250456
auggacaaacuauacuuca

SEQ ID NO: 250458 - RNA, 19 nt, Artificial Sequence
  Description of Artificial Sequence: Synthetic oligonucleotide
  Sense strand starting at position 3641 SEQ ID NO: 3222
gaaguauaguuuguccauc

SEQ ID NO: 250459 - RNA, 19 nt, Artificial Sequence
  Description of Artificial Sequence: Synthetic oligonucleotide
  Antisense strand to SEQ ID NO: 250458
gauggacaaacuauacuuc

SEQ ID NO: 250460 - RNA, 19 nt, Artificial Sequence
  Description of Artificial Sequence: Synthetic oligonucleotide
  Sense strand starting at position 3842 SEQ ID NO: 3222
uugaguguuaaguaccauu

SEQ ID NO: 250461 - RNA, 19 nt, Artificial Sequence
  Description of Artificial Sequence: Synthetic oligonucleotide
  Antisense strand to SEQ ID NO: 250460
aaugguacuuaacacucaa

SEQ ID NO: 250462 - RNA, 19 nt, Artificial Sequence
  Description of Artificial Sequence: Synthetic oligonucleotide
  Sense strand starting at position 3850 SEQ ID NO: 3222
uaaguaccauuugggaauu

SEQ ID NO: 250463 - RNA, 19 nt, Artificial Sequence
  Description of Artificial Sequence: Synthetic oligonucleotide
  Antisense strand to SEQ ID NO: 250462
aauucccaaaugguacuua

SEQ ID NO: 250464 - RNA, 19 nt, Artificial Sequence
  Description of Artificial Sequence: Synthetic oligonucleotide
  Sense strand starting at position 3862 SEQ ID NO: 3222
gggaauuuguucuagggaa

SEQ ID NO: 250465 - RNA, 19 nt, Artificial Sequence
  Description of Artificial Sequence: Synthetic oligonucleotide
  Antisense strand to SEQ ID NO: 250464
uucccuagaacaaauuccc

SEQ ID NO: 250466 - RNA, 19 nt, Artificial Sequence
  Description of Artificial Sequence: Synthetic oligonucleotide
  Sense strand starting at position 3912 SEQ ID NO: 3222
ucaaauuuguccuauggaa

SEQ ID NO: 250467 - RNA, 19 nt, Artificial Sequence
  Description of Artificial Sequence: Synthetic oligonucleotide
  Antisense strand to SEQ ID NO: 250466
uuccauaggacaaauuuga

SEQ ID NO: 250468 - RNA, 19 nt, Artificial Sequence
  Description of Artificial Sequence: Synthetic oligonucleotide
  Sense strand starting at position 56 SEQ ID NO: 3224
gaggcuuuguucuuccauc

SEQ ID NO: 250469 - RNA, 19 nt, Artificial Sequence
  Description of Artificial Sequence: Synthetic oligonucleotide
  Antisense strand to SEQ ID NO: 250468
gauggaagaacaaagccuc

SEQ ID NO: 250470 - RNA, 19 nt, Artificial Sequence
  Description of Artificial Sequence: Synthetic oligonucleotide
  Sense strand starting at position 160 SEQ ID NO: 3224
gcaagacugagguggcaau

SEQ ID NO: 250471 - RNA, 19 nt, Artificial Sequence
  Description of Artificial Sequence: Synthetic oligonucleotide
  Antisense strand to SEQ ID NO: 250470
auugccaccucagucuugc

SEQ ID NO: 250472 - RNA, 19 nt, Artificial Sequence
  Description of Artificial Sequence: Synthetic oligonucleotide
  Sense strand starting at position 740 SEQ ID NO: 3224
gucugcuuccaggaaccaa

SEQ ID NO: 250473 - RNA, 19 nt, Artificial Sequence
  Description of Artificial Sequence: Synthetic oligonucleotide
  Antisense strand to SEQ ID NO: 250472
uugguuccuggaagcagac

SEQ ID NO: 250474 - RNA, 19 nt, Artificial Sequence
  Description of Artificial Sequence: Synthetic oligonucleotide
  Sense strand starting at position 836 SEQ ID NO: 3224
cuccauacccuggaguuua

SEQ ID NO: 250475 - RNA, 19 nt, Artificial Sequence
  Description of Artificial Sequence: Synthetic oligonucleotide
  Antisense strand to SEQ ID NO: 250474
uaaacuccaggguauggag

SEQ ID NO: 250476 - RNA, 19 nt, Artificial Sequence
  Description of Artificial Sequence: Synthetic oligonucleotide
  Sense strand starting at position 907 SEQ ID NO: 3224
gggcuucuggaaggaucau

SEQ ID NO: 250477 - RNA, 19 nt, Artificial Sequence
  Description of Artificial Sequence: Synthetic oligonucleotide
  Antisense strand to SEQ ID NO: 250476
augauccuuccagaagccc

SEQ ID NO: 250478 - RNA, 19 nt, Artificial Sequence
  Description of Artificial Sequence: Synthetic oligonucleotide
  Sense strand starting at position 963 SEQ ID NO: 3224
uuccauaggacgugacaga

SEQ ID NO: 250479 - RNA, 19 nt, Artificial Sequence
  Description of Artificial Sequence: Synthetic oligonucleotide
  Antisense strand to SEQ ID NO: 250478
ucugucacguccuauggaa

SEQ ID NO: 250480 - RNA, 19 nt, Artificial Sequence
  Description of Artificial Sequence: Synthetic oligonucleotide
  Sense strand starting at position 1036 SEQ ID NO: 3224
gacuaaaccuagggaggaa

SEQ ID NO: 250481 - RNA, 19 nt, Artificial Sequence
  Description of Artificial Sequence: Synthetic oligonucleotide
  Antisense strand to SEQ ID NO: 250480
uuccucccuagguuuaguc

SEQ ID NO: 250482 - RNA, 19 nt, Artificial Sequence
  Description of Artificial Sequence: Synthetic oligonucleotide
  Sense strand starting at position 1103 SEQ ID NO: 3224
ccugguagauaauagauga

SEQ ID NO: 250483 - RNA, 19 nt, Artificial Sequence
  Description of Artificial Sequence: Synthetic oligonucleotide
  Antisense strand to SEQ ID NO: 250482
ucaucuauuaucuaccagg

SEQ ID NO: 250484 - RNA, 19 nt, Artificial Sequence
  Description of Artificial Sequence: Synthetic oligonucleotide
  Sense strand starting at position 1327 SEQ ID NO: 3224
auugguucuugcuccaaga

SEQ ID NO: 250485 - RNA, 19 nt, Artificial Sequence
  Description of Artificial Sequence: Synthetic oligonucleotide
  Antisense strand to SEQ ID NO: 250484
ucuuggagcaagaaccaau

SEQ ID NO: 250486 - RNA, 19 nt, Artificial Sequence
  Description of Artificial Sequence: Synthetic oligonucleotide
  Sense strand starting at position 1329 SEQ ID NO: 3224
ugguucuugcuccaagaua

SEQ ID NO: 250487 - RNA, 19 nt, Artificial Sequence
  Description of Artificial Sequence: Synthetic oligonucleotide
  Antisense strand to SEQ ID NO: 250486
uaucuuggagcaagaacca

SEQ ID NO: 250488 - RNA, 19 nt, Artificial Sequence
  Description of Artificial Sequence: Synthetic oligonucleotide
  Sense strand starting at position 1374 SEQ ID NO: 3224
acauauggguguccuuaua

SEQ ID NO: 250489 - RNA, 19 nt, Artificial Sequence
  Description of Artificial Sequence: Synthetic oligonucleotide
  Antisense strand to SEQ ID NO: 250488
uauaaggacacccauaugu

SEQ ID NO: 250490 - RNA, 19 nt, Artificial Sequence
  Description of Artificial Sequence: Synthetic oligonucleotide
  Sense strand starting at position 1407 SEQ ID NO: 3224
agugguggguguccuuaua

SEQ ID NO: 250491 - RNA, 19 nt, Artificial Sequence
  Description of Artificial Sequence: Synthetic oligonucleotide
  Antisense strand to SEQ ID NO: 250490
uauaaggacacccaccacu

SEQ ID NO: 250492 - RNA, 19 nt, Artificial Sequence
  Description of Artificial Sequence: Synthetic oligonucleotide
  Sense strand starting at position 1634 SEQ ID NO: 3224
agcguaaaucucuauucuu

SEQ ID NO: 250493 - RNA, 19 nt, Artificial Sequence
  Description of Artificial Sequence: Synthetic oligonucleotide
  Antisense strand to SEQ ID NO: 250492
aagaauagagauuuacgcu

SEQ ID NO: 250494 - RNA, 19 nt, Artificial Sequence
  Description of Artificial Sequence: Synthetic oligonucleotide
  Sense strand starting at position 1839 SEQ ID NO: 3224
ggugcuuccagacaucuga

SEQ ID NO: 250495 - RNA, 19 nt, Artificial Sequence
  Description of Artificial Sequence: Synthetic oligonucleotide
  Antisense strand to SEQ ID NO: 250494
ucagaugucuggaagcacc

SEQ ID NO: 250496 - RNA, 19 nt, Artificial Sequence
  Description of Artificial Sequence: Synthetic oligonucleotide
  Sense strand starting at position 2099 SEQ ID NO: 3224
caaagcucccagugugaua

SEQ ID NO: 250497 - RNA, 19 nt, Artificial Sequence
  Description of Artificial Sequence: Synthetic oligonucleotide
  Antisense strand to SEQ ID NO: 250496
uaucacacugggagcuuug

SEQ ID NO: 250498 - RNA, 19 nt, Artificial Sequence
  Description of Artificial Sequence: Synthetic oligonucleotide
  Sense strand starting at position 2146 SEQ ID NO: 3224
ggaggcagcgcagauaauu

SEQ ID NO: 250499 - RNA, 19 nt, Artificial Sequence
  Description of Artificial Sequence: Synthetic oligonucleotide
  Antisense strand to SEQ ID NO: 250498
aauuaucugcgcugccucc

SEQ ID NO: 250500 - RNA, 19 nt, Artificial Sequence
  Description of Artificial Sequence: Synthetic oligonucleotide
  Sense strand starting at position 2382 SEQ ID NO: 3224
gcuccagaucgacauguca

SEQ ID NO: 250501 - RNA, 19 nt, Artificial Sequence
  Description of Artificial Sequence: Synthetic oligonucleotide
  Antisense strand to SEQ ID NO: 250500
ugacaugucgaucuggagc

SEQ ID NO: 250502 - RNA, 19 nt, Artificial Sequence
  Description of Artificial Sequence: Synthetic oligonucleotide
  Sense strand starting at position 2384 SEQ ID NO: 3224
uccagaucgacaugucaag

SEQ ID NO: 250503 - RNA, 19 nt, Artificial Sequence
  Description of Artificial Sequence: Synthetic oligonucleotide
  Antisense strand to SEQ ID NO: 250502
cuugacaugucgaucugga

SEQ ID NO: 250504 - RNA, 19 nt, Artificial Sequence
  Description of Artificial Sequence: Synthetic oligonucleotide
  Sense strand starting at position 2414 SEQ ID NO: 3224
acagaacaguguucuagaa

SEQ ID NO: 250505 - RNA, 19 nt, Artificial Sequence
  Description of Artificial Sequence: Synthetic oligonucleotide
  Antisense strand to SEQ ID NO: 250504
uucuagaacacuguucugu

SEQ ID NO: 250506 - RNA, 19 nt, Artificial Sequence
  Description of Artificial Sequence: Synthetic oligonucleotide
  Sense strand starting at position 2484 SEQ ID NO: 3224
uaguguggucucugaauua

SEQ ID NO: 250507 - RNA, 19 nt, Artificial Sequence
  Description of Artificial Sequence: Synthetic oligonucleotide
  Antisense strand to SEQ ID NO: 250506
uaauucagagaccacacua

SEQ ID NO: 250508 - RNA, 19 nt, Artificial Sequence
  Description of Artificial Sequence: Synthetic oligonucleotide
  Sense strand starting at position 2584 SEQ ID NO: 3224
caauguccugcugguaauu

SEQ ID NO: 250509 - RNA, 19 nt, Artificial Sequence
  Description of Artificial Sequence: Synthetic oligonucleotide
  Antisense strand to SEQ ID NO: 250508
aauuaccagcaggacauug

SEQ ID NO: 250510 - RNA, 19 nt, Artificial Sequence
  Description of Artificial Sequence: Synthetic oligonucleotide
  Sense strand starting at position 2746 SEQ ID NO: 3224
caguuuaccgucugugaaa

SEQ ID NO: 250511 - RNA, 19 nt, Artificial Sequence
  Description of Artificial Sequence: Synthetic oligonucleotide
  Antisense strand to SEQ ID NO: 250510
uuucacagacgguaaacug

SEQ ID NO: 250512 - RNA, 19 nt, Artificial Sequence
  Description of Artificial Sequence: Synthetic oligonucleotide
  Sense strand starting at position 2747 SEQ ID NO: 3224
aguuuaccgucugugaaau

SEQ ID NO: 250513 - RNA, 19 nt, Artificial Sequence
  Description of Artificial Sequence: Synthetic oligonucleotide
  Antisense strand to SEQ ID NO: 250512
auuucacagacgguaaacu

SEQ ID NO: 250514 - RNA, 19 nt, Artificial Sequence
  Description of Artificial Sequence: Synthetic oligonucleotide
  Sense strand starting at position 2748 SEQ ID NO: 3224
guuuaccgucugugaaaug

SEQ ID NO: 250515 - RNA, 19 nt, Artificial Sequence
  Description of Artificial Sequence: Synthetic oligonucleotide
  Antisense strand to SEQ ID NO: 250514
cauuucacagacgguaaac

SEQ ID NO: 250516 - RNA, 19 nt, Artificial Sequence
  Description of Artificial Sequence: Synthetic oligonucleotide
  Sense strand starting at position 2859 SEQ ID NO: 3224
cgaagcagccacugugaaa

SEQ ID NO: 250517 - RNA, 19 nt, Artificial Sequence
  Description of Artificial Sequence: Synthetic oligonucleotide
  Antisense strand to SEQ ID NO: 250516
uuucacaguggcugcuucg

SEQ ID NO: 250518 - RNA, 19 nt, Artificial Sequence
  Description of Artificial Sequence: Synthetic oligonucleotide
  Sense strand starting at position 2866 SEQ ID NO: 3224
gccacugugaaaggucuuu

SEQ ID NO: 250519 - RNA, 19 nt, Artificial Sequence
  Description of Artificial Sequence: Synthetic oligonucleotide
  Antisense strand to SEQ ID NO: 250518
aaagaccuuucacaguggc

SEQ ID NO: 250520 - RNA, 19 nt, Artificial Sequence
  Description of Artificial Sequence: Synthetic oligonucleotide
  Sense strand starting at position 2976 SEQ ID NO: 3224
gacagagcuguugguuaca

SEQ ID NO: 250521 - RNA, 19 nt, Artificial Sequence
  Description of Artificial Sequence: Synthetic oligonucleotide
  Antisense strand to SEQ ID NO: 250520
uguaaccaacagcucuguc

SEQ ID NO: 250522 - RNA, 19 nt, Artificial Sequence
  Description of Artificial Sequence: Synthetic oligonucleotide
  Sense strand starting at position 2979 SEQ ID NO: 3224
agagcuguugguuacagga

SEQ ID NO: 250523 - RNA, 19 nt, Artificial Sequence
  Description of Artificial Sequence: Synthetic oligonucleotide
  Antisense strand to SEQ ID NO: 250522
uccuguaaccaacagcucu

SEQ ID NO: 250524 - RNA, 19 nt, Artificial Sequence
  Description of Artificial Sequence: Synthetic oligonucleotide
  Sense strand starting at position 3001 SEQ ID NO: 3224
gccagaacuccaugaaaca

SEQ ID NO: 250525 - RNA, 19 nt, Artificial Sequence
  Description of Artificial Sequence: Synthetic oligonucleotide
  Antisense strand to SEQ ID NO: 250524
uguuucauggaguucuggc

SEQ ID NO: 250526 - RNA, 19 nt, Artificial Sequence
  Description of Artificial Sequence: Synthetic oligonucleotide
  Sense strand starting at position 3051 SEQ ID NO: 3224
gccaauugcugucuaaaug

SEQ ID NO: 250527 - RNA, 19 nt, Artificial Sequence
  Description of Artificial Sequence: Synthetic oligonucleotide
  Antisense strand to SEQ ID NO: 250526
cauuuagacagcaauuggc

SEQ ID NO: 250528 - RNA, 19 nt, Artificial Sequence
  Description of Artificial Sequence: Synthetic oligonucleotide
  Sense strand starting at position 3061 SEQ ID NO: 3224
gucuaaaugcucuagggug

SEQ ID NO: 250529 - RNA, 19 nt, Artificial Sequence
  Description of Artificial Sequence: Synthetic oligonucleotide
  Antisense strand to SEQ ID NO: 250528
cacccuagagcauuuagac

SEQ ID NO: 250530 - RNA, 19 nt, Artificial Sequence
  Description of Artificial Sequence: Synthetic oligonucleotide
  Sense strand starting at position 3483 SEQ ID NO: 3224
cgcugaacuccuggaccuu

SEQ ID NO: 250531 - RNA, 19 nt, Artificial Sequence
  Description of Artificial Sequence: Synthetic oligonucleotide
  Antisense strand to SEQ ID NO: 250530
aagguccaggaguucagcg

SEQ ID NO: 250532 - RNA, 19 nt, Artificial Sequence
  Description of Artificial Sequence: Synthetic oligonucleotide
  Sense strand starting at position 3524 SEQ ID NO: 3224
ccagaacuccuccgcagaa

SEQ ID NO: 250533 - RNA, 19 nt, Artificial Sequence
  Description of Artificial Sequence: Synthetic oligonucleotide
  Antisense strand to SEQ ID NO: 250532
uucugcggaggaguucugg

SEQ ID NO: 250534 - RNA, 19 nt, Artificial Sequence
  Description of Artificial Sequence: Synthetic oligonucleotide
  Sense strand starting at position 3526 SEQ ID NO: 3224
agaacuccuccgcagaaca

SEQ ID NO: 250535 - RNA, 19 nt, Artificial Sequence
  Description of Artificial Sequence: Synthetic oligonucleotide
  Antisense strand to SEQ ID NO: 250534
uguucugcggaggaguucu

SEQ ID NO: 250536 - RNA, 19 nt, Artificial Sequence
  Description of Artificial Sequence: Synthetic oligonucleotide
  Sense strand starting at position 3579 SEQ ID NO: 3224
acagcucuuccagaggcua

SEQ ID NO: 250537 - RNA, 19 nt, Artificial Sequence
  Description of Artificial Sequence: Synthetic oligonucleotide
  Antisense strand to SEQ ID NO: 250536
uagccucuggaagagcugu

SEQ ID NO: 250538 - RNA, 19 nt, Artificial Sequence
  Description of Artificial Sequence: Synthetic oligonucleotide
  Sense strand starting at position 3788 SEQ ID NO: 3224
cucugagaaucuguguuuc

SEQ ID NO: 250539 - RNA, 19 nt, Artificial Sequence
  Description of Artificial Sequence: Synthetic oligonucleotide
  Antisense strand to SEQ ID NO: 250538
gaaacacagauucucagag

SEQ ID NO: 250540 - RNA, 19 nt, Artificial Sequence
  Description of Artificial Sequence: Synthetic oligonucleotide
  Sense strand starting at position 3790 SEQ ID NO: 3224
cugagaaucuguguuuccu

SEQ ID NO: 250541 - RNA, 19 nt, Artificial Sequence
  Description of Artificial Sequence: Synthetic oligonucleotide
  Antisense strand to SEQ ID NO: 250540
aggaaacacagauucucag

SEQ ID NO: 250542 - RNA, 19 nt, Artificial Sequence
  Description of Artificial Sequence: Synthetic oligonucleotide
  Sense strand starting at position 3792 SEQ ID NO: 3224
gagaaucuguguuuccuug

SEQ ID NO: 250543 - RNA, 19 nt, Artificial Sequence
  Description of Artificial Sequence: Synthetic oligonucleotide
  Antisense strand to SEQ ID NO: 250542
caaggaaacacagauucuc

SEQ ID NO: 250544 - RNA, 19 nt, Artificial Sequence
  Description of Artificial Sequence: Synthetic oligonucleotide
  Sense strand starting at position 3909 SEQ ID NO: 3224
gcacaaaucccgcaagguu

SEQ ID NO: 250545 - RNA, 19 nt, Artificial Sequence
  Description of Artificial Sequence: Synthetic oligonucleotide
  Antisense strand to SEQ ID NO: 250544
aaccuugcgggauuugugc

SEQ ID NO: 250546 - RNA, 19 nt, Artificial Sequence
  Description of Artificial Sequence: Synthetic oligonucleotide
  Sense strand starting at position 3970 SEQ ID NO: 3224
gucuguaucccuugacuca

SEQ ID NO: 250547 - RNA, 19 nt, Artificial Sequence
  Description of Artificial Sequence: Synthetic oligonucleotide
  Antisense strand to SEQ ID NO: 250546
ugagucaagggauacagac

SEQ ID NO: 250548 - RNA, 19 nt, Artificial Sequence
  Description of Artificial Sequence: Synthetic oligonucleotide
  Sense strand starting at position 81 SEQ ID NO: 3223
gaggguuccugggucuuga

SEQ ID NO: 250549 - RNA, 19 nt, Artificial Sequence
  Description of Artificial Sequence: Synthetic oligonucleotide
  Antisense strand to SEQ ID NO: 250548
ucaagacccaggaacccuc

SEQ ID NO: 250550 - RNA, 19 nt, Artificial Sequence
  Description of Artificial Sequence: Synthetic oligonucleotide
  Sense strand starting at position 571 SEQ ID NO: 3223
ggccuuuaauuccagcaau

SEQ ID NO: 250551 - RNA, 19 nt, Artificial Sequence
  Description of Artificial Sequence: Synthetic oligonucleotide
  Antisense strand to SEQ ID NO: 250550
auugcuggaauuaaaggcc

SEQ ID NO: 250552 - RNA, 19 nt, Artificial Sequence
  Description of Artificial Sequence: Synthetic oligonucleotide
  Sense strand starting at position 899 SEQ ID NO: 3223
gcgugaggagcggcuuaaa

SEQ ID NO: 250553 - RNA, 19 nt, Artificial Sequence
  Description of Artificial Sequence: Synthetic oligonucleotide
  Antisense strand to SEQ ID NO: 250552
uuuaagccgcuccucacgc

SEQ ID NO: 250554 - RNA, 19 nt, Artificial Sequence
  Description of Artificial Sequence: Synthetic oligonucleotide
  Sense strand starting at position 943 SEQ ID NO: 3223
cacuguuccuucgugucau

SEQ ID NO: 250555 - RNA, 19 nt, Artificial Sequence
  Description of Artificial Sequence: Synthetic oligonucleotide
  Antisense strand to SEQ ID NO: 250554
augacacgaaggaacagug

SEQ ID NO: 250556 - RNA, 19 nt, Artificial Sequence
  Description of Artificial Sequence: Synthetic oligonucleotide
  Sense strand starting at position 944 SEQ ID NO: 3223
acuguuccuucgugucauc

SEQ ID NO: 250557 - RNA, 19 nt, Artificial Sequence
  Description of Artificial Sequence: Synthetic oligonucleotide
  Antisense strand to SEQ ID NO: 250556
gaugacacgaaggaacagu

SEQ ID NO: 250558 - RNA, 19 nt, Artificial Sequence
  Description of Artificial Sequence: Synthetic oligonucleotide
  Sense strand starting at position 947 SEQ ID NO: 3223
guuccuucgugucauccga

SEQ ID NO: 250559 - RNA, 19 nt, Artificial Sequence
  Description of Artificial Sequence: Synthetic oligonucleotide
  Antisense strand to SEQ ID NO: 250558
ucggaugacacgaaggaac

SEQ ID NO: 250560 - RNA, 19 nt, Artificial Sequence
  Description of Artificial Sequence: Synthetic oligonucleotide
  Sense strand starting at position 1104 SEQ ID NO: 3223
gggucuuucuggaagggag

SEQ ID NO: 250561 - RNA, 19 nt, Artificial Sequence
  Description of Artificial Sequence: Synthetic oligonucleotide
  Antisense strand to SEQ ID NO: 250560
cucccuuccagaaagaccc

SEQ ID NO: 250562 - RNA, 19 nt, Artificial Sequence
  Description of Artificial Sequence: Synthetic oligonucleotide
  Sense strand starting at position 1610 SEQ ID NO: 3223
cauuguucucugcggagau

SEQ ID NO: 250563 - RNA, 19 nt, Artificial Sequence
  Description of Artificial Sequence: Synthetic oligonucleotide
  Antisense strand to SEQ ID NO: 250562
aucuccgcagagaacaaug

SEQ ID NO: 250564 - RNA, 19 nt, Artificial Sequence
  Description of Artificial Sequence: Synthetic oligonucleotide
  Sense strand starting at position 1611 SEQ ID NO: 3223
auuguucucugcggagaug

SEQ ID NO: 250565 - RNA, 19 nt, Artificial Sequence
  Description of Artificial Sequence: Synthetic oligonucleotide
  Antisense strand to SEQ ID NO: 250564
caucuccgcagagaacaau

SEQ ID NO: 250566 - RNA, 19 nt, Artificial Sequence
  Description of Artificial Sequence: Synthetic oligonucleotide
  Sense strand starting at position 2405 SEQ ID NO: 3223
gcuggcuccggguguaaca

SEQ ID NO: 250567 - RNA, 19 nt, Artificial Sequence
  Description of Artificial Sequence: Synthetic oligonucleotide
  Antisense strand to SEQ ID NO: 250566
uguuacacccggagccagc

SEQ ID NO: 250568 - RNA, 19 nt, Artificial Sequence
  Description of Artificial Sequence: Synthetic oligonucleotide
  Sense strand starting at position 2421 SEQ ID NO: 3223
acaggugcgcggugaaauc

SEQ ID NO: 250569 - RNA, 19 nt, Artificial Sequence
  Description of Artificial Sequence: Synthetic oligonucleotide
  Antisense strand to SEQ ID NO: 250568
gauuucaccgcgcaccugu

SEQ ID NO: 250570 - RNA, 19 nt, Artificial Sequence
  Description of Artificial Sequence: Synthetic oligonucleotide
  Sense strand starting at position 3180 SEQ ID NO: 3223
gccggcaugaaagagaaau

SEQ ID NO: 250571 - RNA, 19 nt, Artificial Sequence
  Description of Artificial Sequence: Synthetic oligonucleotide
  Antisense strand to SEQ ID NO: 250570
auuucucuuucaugccggc

SEQ ID NO: 250572 - RNA, 19 nt, Artificial Sequence
  Description of Artificial Sequence: Synthetic oligonucleotide
  Sense strand starting at position 3207 SEQ ID NO: 3223
cuuccuaacccuggcagaa

SEQ ID NO: 250573 - RNA, 19 nt, Artificial Sequence
  Description of Artificial Sequence: Synthetic oligonucleotide
  Antisense strand to SEQ ID NO: 250572
uucugccaggguuaggaag

SEQ ID NO: 250574 - RNA, 19 nt, Artificial Sequence
  Description of Artificial Sequence: Synthetic oligonucleotide
  Sense strand starting at position 3302 SEQ ID NO: 3223
uucucuauuucucgaggca

SEQ ID NO: 250575 - RNA, 19 nt, Artificial Sequence
  Description of Artificial Sequence: Synthetic oligonucleotide
  Antisense strand to SEQ ID NO: 250574
ugccucgagaaauagagaa

SEQ ID NO: 250576 - RNA, 19 nt, Artificial Sequence
  Description of Artificial Sequence: Synthetic oligonucleotide
  Sense strand starting at position 3685 SEQ ID NO: 3223
gcaugcauuuggccuguau

SEQ ID NO: 250577 - RNA, 19 nt, Artificial Sequence
  Description of Artificial Sequence: Synthetic oligonucleotide
  Antisense strand to SEQ ID NO: 250576
auacaggccaaaugcaugc

SEQ ID NO: 250578 - RNA, 19 nt, Artificial Sequence
  Description of Artificial Sequence: Synthetic oligonucleotide
  Sense strand starting at position 3772 SEQ ID NO: 3223
aaacgucuuucccguuauu

SEQ ID NO: 250579 - RNA, 19 nt, Artificial Sequence
  Description of Artificial Sequence: Synthetic oligonucleotide
  Antisense strand to SEQ ID NO: 250578
aauaacgggaaagacguuu

SEQ ID NO: 250580 - RNA, 19 nt, Artificial Sequence
  Description of Artificial Sequence: Synthetic oligonucleotide
  Sense strand starting at position 3797 SEQ ID NO: 3223
gcuucugucuuucuguauu

SEQ ID NO: 250581 - RNA, 19 nt, Artificial Sequence
  Description of Artificial Sequence: Synthetic oligonucleotide
  Antisense strand to SEQ ID NO: 250580
aauacagaaagacagaagc

SEQ ID NO: 250582 - RNA, 19 nt, Artificial Sequence
  Description of Artificial Sequence: Synthetic oligonucleotide
  Sense strand starting at position 3799 SEQ ID NO: 3223
uucugucuuucuguauuau

SEQ ID NO: 250583 - RNA, 19 nt, Artificial Sequence
  Description of Artificial Sequence: Synthetic oligonucleotide
  Antisense strand to SEQ ID NO: 250582
auaauacagaaagacagaa

SEQ ID NO: 250584 - RNA, 19 nt, Artificial Sequence
  Description of Artificial Sequence: Synthetic oligonucleotide
  Sense strand starting at position 3800 SEQ ID NO: 3223
ucugucuuucuguauuauu

SEQ ID NO: 250585 - RNA, 19 nt, Artificial Sequence
  Description of Artificial Sequence: Synthetic oligonucleotide
  Antisense strand to SEQ ID NO: 250584
aauaauacagaaagacaga

SEQ ID NO: 250586 - RNA, 19 nt, Artificial Sequence
  Description of Artificial Sequence: Synthetic oligonucleotide
  Sense strand starting at position 3825 SEQ ID NO: 3223
cuuugugguucuuuggauu

SEQ ID NO: 250587 - RNA, 19 nt, Artificial Sequence
  Description of Artificial Sequence: Synthetic oligonucleotide
  Antisense strand to SEQ ID NO: 250586
aauccaaagaaccacaaag

SEQ ID NO: 250588 - RNA, 19 nt, Artificial Sequence
  Description of Artificial Sequence: Synthetic oligonucleotide
  Sense strand starting at position 3828 SEQ ID NO: 3223
ugugguucuuuggauuuga

SEQ ID NO: 250589 - RNA, 19 nt, Artificial Sequence
  Description of Artificial Sequence: Synthetic oligonucleotide
  Antisense strand to SEQ ID NO: 250588
ucaaauccaaagaaccaca

SEQ ID NO: 250590 - RNA, 19 nt, Artificial Sequence
  Description of Artificial Sequence: Synthetic oligonucleotide
  Sense strand starting at position 3850 SEQ ID NO: 3223
guuccucugucuugaacca

SEQ ID NO: 250591 - RNA, 19 nt, Artificial Sequence
  Description of Artificial Sequence: Synthetic oligonucleotide
  Antisense strand to SEQ ID NO: 250590
ugguucaagacagaggaac

SEQ ID NO: 250592 - RNA, 19 nt, Artificial Sequence
  Description of Artificial Sequence: Synthetic oligonucleotide
  Sense strand starting at position 3942 SEQ ID NO: 3223
acagaacugucuuggcuga

SEQ ID NO: 250593 - RNA, 19 nt, Artificial Sequence
  Description of Artificial Sequence: Synthetic oligonucleotide
  Antisense strand to SEQ ID NO: 250592
ucagccaagacaguucugu

SEQ ID NO: 250594 - RNA, 19 nt, Artificial Sequence
  Description of Artificial Sequence: Synthetic oligonucleotide
  Sense strand starting at position 3944 SEQ ID NO: 3223
agaacugucuuggcugagu

SEQ ID NO: 250595 - RNA, 19 nt, Artificial Sequence
  Description of Artificial Sequence: Synthetic oligonucleotide
  Antisense strand to SEQ ID NO: 250594
acucagccaagacaguucu

SEQ ID NO: 250596 - RNA, 19 nt, Artificial Sequence
  Description of Artificial Sequence: Synthetic oligonucleotide
  Sense strand starting at position 3953 SEQ ID NO: 3223
uuggcugagucucacaaau

SEQ ID NO: 250597 - RNA, 19 nt, Artificial Sequence
  Description of Artificial Sequence: Synthetic oligonucleotide
  Antisense strand to SEQ ID NO: 250596
auuugugagacucagccaa

SEQ ID NO: 250598 - RNA, 19 nt, Artificial Sequence
  Description of Artificial Sequence: Synthetic oligonucleotide
  Sense strand starting at position 3955 SEQ ID NO: 3223
ggcugagucucacaaauuu

SEQ ID NO: 250599 - RNA, 19 nt, Artificial Sequence
  Description of Artificial Sequence: Synthetic oligonucleotide
  Antisense strand to SEQ ID NO: 250598
aaauuugugagacucagcc

SEQ ID NO: 250600 - RNA, 19 nt, Artificial Sequence
  Description of Artificial Sequence: Synthetic oligonucleotide
  Sense strand starting at position 178 SEQ ID NO: 3225
cgggcaaucuccucuugga

SEQ ID NO: 250601 - RNA, 19 nt, Artificial Sequence
  Description of Artificial Sequence: Synthetic oligonucleotide
  Antisense strand to SEQ ID NO: 250600
uccaagaggagauugcccg

SEQ ID NO: 250602 - RNA, 19 nt, Artificial Sequence
  Description of Artificial Sequence: Synthetic oligonucleotide
  Sense strand starting at position 192 SEQ ID NO: 3225
uuggaauucccgcagcagu

SEQ ID NO: 250603 - RNA, 19 nt, Artificial Sequence
  Description of Artificial Sequence: Synthetic oligonucleotide
  Antisense strand to SEQ ID NO: 250602
acugcugcgggaauuccaa

SEQ ID NO: 250604 - RNA, 19 nt, Artificial Sequence
  Description of Artificial Sequence: Synthetic oligonucleotide
  Sense strand starting at position 290 SEQ ID NO: 3225
ucucaucguagcugugaga

SEQ ID NO: 250605 - RNA, 19 nt, Artificial Sequence
  Description of Artificial Sequence: Synthetic oligonucleotide
  Antisense strand to SEQ ID NO: 250604
ucucacagcuacgaugaga

SEQ ID NO: 250606 - RNA, 19 nt, Artificial Sequence
  Description of Artificial Sequence: Synthetic oligonucleotide
  Sense strand starting at position 665 SEQ ID NO: 3225
ugcacuccacagugaugau

SEQ ID NO: 250607 - RNA, 19 nt, Artificial Sequence
  Description of Artificial Sequence: Synthetic oligonucleotide
  Antisense strand to SEQ ID NO: 250606
aucaucacuguggagugca

SEQ ID NO: 250608 - RNA, 19 nt, Artificial Sequence
  Description of Artificial Sequence: Synthetic oligonucleotide
  Sense strand starting at position 778 SEQ ID NO: 3225
uugacauucuuggugacga

SEQ ID NO: 250609 - RNA, 19 nt, Artificial Sequence
  Description of Artificial Sequence: Synthetic oligonucleotide
  Antisense strand to SEQ ID NO: 250608
ucgucaccaagaaugucaa

SEQ ID NO: 250610 - RNA, 19 nt, Artificial Sequence
  Description of Artificial Sequence: Synthetic oligonucleotide
  Sense strand starting at position 800 SEQ ID NO: 3225
aggagagguccuugaugua

SEQ ID NO: 250611 - RNA, 19 nt, Artificial Sequence
  Description of Artificial Sequence: Synthetic oligonucleotide
  Antisense strand to SEQ ID NO: 250610
uacaucaaggaccucuccu

SEQ ID NO: 250612 - RNA, 19 nt, Artificial Sequence
  Description of Artificial Sequence: Synthetic oligonucleotide
  Sense strand starting at position 884 SEQ ID NO: 3225
gaaucucuuccugguagau

SEQ ID NO: 250613 - RNA, 19 nt, Artificial Sequence
  Description of Artificial Sequence: Synthetic oligonucleotide
  Antisense strand to SEQ ID NO: 250612
aucuaccaggaagagauuc

SEQ ID NO: 250614 - RNA, 19 nt, Artificial Sequence
  Description of Artificial Sequence: Synthetic oligonucleotide
  Sense strand starting at position 893 SEQ ID NO: 3225
ccugguagaucuccaaaua

SEQ ID NO: 250615 - RNA, 19 nt, Artificial Sequence
  Description of Artificial Sequence: Synthetic oligonucleotide
  Antisense strand to SEQ ID NO: 250614
uauuuggagaucuaccagg

SEQ ID NO: 250616 - RNA, 19 nt, Artificial Sequence
  Description of Artificial Sequence: Synthetic oligonucleotide
  Sense strand starting at position 956 SEQ ID NO: 3225
gggugaagaugugcucaaa

SEQ ID NO: 250617 - RNA, 19 nt, Artificial Sequence
  Description of Artificial Sequence: Synthetic oligonucleotide
  Antisense strand to SEQ ID NO: 250616
uuugagcacaucuucaccc

SEQ ID NO: 250618 - RNA, 19 nt, Artificial Sequence
  Description of Artificial Sequence: Synthetic oligonucleotide
  Sense strand starting at position 1148 SEQ ID NO: 3225
caucauacacggcgucaaa

SEQ ID NO: 250619 - RNA, 19 nt, Artificial Sequence
  Description of Artificial Sequence: Synthetic oligonucleotide
  Antisense strand to SEQ ID NO: 250618
uuugacgccguguaugaug

SEQ ID NO: 250620 - RNA, 19 nt, Artificial Sequence
  Description of Artificial Sequence: Synthetic oligonucleotide
  Sense strand starting at position 1551 SEQ ID NO: 3225
ccggcugggaggugaauua

SEQ ID NO: 250621 - RNA, 19 nt, Artificial Sequence
  Description of Artificial Sequence: Synthetic oligonucleotide
  Antisense strand to SEQ ID NO: 250620
uaauucaccucccagccgg

SEQ ID NO: 250622 - RNA, 19 nt, Artificial Sequence
  Description of Artificial Sequence: Synthetic oligonucleotide
  Sense strand starting at position 2196 SEQ ID NO: 3225
cgagcaugccgggaauugu

SEQ ID NO: 250623 - RNA, 19 nt, Artificial Sequence
  Description of Artificial Sequence: Synthetic oligonucleotide
  Antisense strand to SEQ ID NO: 250622
acaauucccggcaugcucg

SEQ ID NO: 250624 - RNA, 19 nt, Artificial Sequence
  Description of Artificial Sequence: Synthetic oligonucleotide
  Sense strand starting at position 2212 SEQ ID NO: 3225
uguaguccugccuuuguua

SEQ ID NO: 250625 - RNA, 19 nt, Artificial Sequence
  Description of Artificial Sequence: Synthetic oligonucleotide
  Antisense strand to SEQ ID NO: 250624
uaacaaaggcaggacuaca

SEQ ID NO: 250626 - RNA, 19 nt, Artificial Sequence
  Description of Artificial Sequence: Synthetic oligonucleotide
  Sense strand starting at position 2619 SEQ ID NO: 3225
gugaaagccucuccaucuu

SEQ ID NO: 250627 - RNA, 19 nt, Artificial Sequence
  Description of Artificial Sequence: Synthetic oligonucleotide
  Antisense strand to SEQ ID NO: 250626
aagauggagaggcuuucac

SEQ ID NO: 250628 - RNA, 19 nt, Artificial Sequence
  Description of Artificial Sequence: Synthetic oligonucleotide
  Sense strand starting at position 2994 SEQ ID NO: 3225
aguucugauggccauccaa

SEQ ID NO: 250629 - RNA, 19 nt, Artificial Sequence
  Description of Artificial Sequence: Synthetic oligonucleotide
  Antisense strand to SEQ ID NO: 250628
uuggauggccaucagaacu

SEQ ID NO: 250630 - RNA, 19 nt, Artificial Sequence
  Description of Artificial Sequence: Synthetic oligonucleotide
  Sense strand starting at position 3153 SEQ ID NO: 3225
gaaguacuguaccaugaga

SEQ ID NO: 250631 - RNA, 19 nt, Artificial Sequence
  Description of Artificial Sequence: Synthetic oligonucleotide
  Antisense strand to SEQ ID NO: 250630
ucucaugguacaguacuuc

SEQ ID NO: 250632 - RNA, 19 nt, Artificial Sequence
  Description of Artificial Sequence: Synthetic oligonucleotide
  Sense strand starting at position 3155 SEQ ID NO: 3225
aguacuguaccaugagaag

SEQ ID NO: 250633 - RNA, 19 nt, Artificial Sequence
  Description of Artificial Sequence: Synthetic oligonucleotide
  Antisense strand to SEQ ID NO: 250632
cuucucaugguacaguacu

SEQ ID NO: 250634 - RNA, 19 nt, Artificial Sequence
  Description of Artificial Sequence: Synthetic oligonucleotide
  Sense strand starting at position 3185 SEQ ID NO: 3225
cuuggauugccugacagcu

SEQ ID NO: 250635 - RNA, 19 nt, Artificial Sequence
  Description of Artificial Sequence: Synthetic oligonucleotide
  Antisense strand to SEQ ID NO: 250634
agcugucaggcaauccaag

SEQ ID NO: 250636 - RNA, 19 nt, Artificial Sequence
  Description of Artificial Sequence: Synthetic oligonucleotide
  Sense strand starting at position 3245 SEQ ID NO: 3225
gguguuccucuaugggagu

SEQ ID NO: 250637 - RNA, 19 nt, Artificial Sequence
  Description of Artificial Sequence: Synthetic oligonucleotide
  Antisense strand to SEQ ID NO: 250636
acucccauagaggaacacc

SEQ ID NO: 250638 - RNA, 19 nt, Artificial Sequence
  Description of Artificial Sequence: Synthetic oligonucleotide
  Sense strand starting at position 3333 SEQ ID NO: 3225
gaguccuauccauggucca

SEQ ID NO: 250639 - RNA, 19 nt, Artificial Sequence
  Description of Artificial Sequence: Synthetic oligonucleotide
  Antisense strand to SEQ ID NO: 250638
uggaccauggauaggacuc

SEQ ID NO: 250640 - RNA, 19 nt, Artificial Sequence
  Description of Artificial Sequence: Synthetic oligonucleotide
  Sense strand starting at position 3363 SEQ ID NO: 3225
gcaguugagucuguggacu

SEQ ID NO: 250641 - RNA, 19 nt, Artificial Sequence
  Description of Artificial Sequence: Synthetic oligonucleotide
  Antisense strand to SEQ ID NO: 250640
aguccacagacucaacugc

SEQ ID NO: 250642 - RNA, 19 nt, Artificial Sequence
  Description of Artificial Sequence: Synthetic oligonucleotide
  Sense strand starting at position 3396 SEQ ID NO: 3225
ugucuuuacucuccauaug

SEQ ID NO: 250643 - RNA, 19 nt, Artificial Sequence
  Description of Artificial Sequence: Synthetic oligonucleotide
  Antisense strand to SEQ ID NO: 250642
cauauggagaguaaagaca

SEQ ID NO: 250644 - RNA, 19 nt, Artificial Sequence
  Description of Artificial Sequence: Synthetic oligonucleotide
  Sense strand starting at position 3397 SEQ ID NO: 3225
gucuuuacucuccauauga

SEQ ID NO: 250645 - RNA, 19 nt, Artificial Sequence
  Description of Artificial Sequence: Synthetic oligonucleotide
  Antisense strand to SEQ ID NO: 250644
ucauauggagaguaaagac

SEQ ID NO: 250646 - RNA, 19 nt, Artificial Sequence
  Description of Artificial Sequence: Synthetic oligonucleotide
  Sense strand starting at position 3420 SEQ ID NO: 3225
cagauugagaggugcuguu

SEQ ID NO: 250647 - RNA, 19 nt, Artificial Sequence
  Description of Artificial Sequence: Synthetic oligonucleotide
  Antisense strand to SEQ ID NO: 250646
aacagcaccucucaaucug

SEQ ID NO: 250648 - RNA, 19 nt, Artificial Sequence
  Description of Artificial Sequence: Synthetic oligonucleotide
  Sense strand starting at position 3473 SEQ ID NO: 3225
ccagaagagucuuuccaca

SEQ ID NO: 250649 - RNA, 19 nt, Artificial Sequence
  Description of Artificial Sequence: Synthetic oligonucleotide
  Antisense strand to SEQ ID NO: 250648
uguggaaagacucuucugg

SEQ ID NO: 250650 - RNA, 19 nt, Artificial Sequence
  Description of Artificial Sequence: Synthetic oligonucleotide
  Sense strand starting at position 3521 SEQ ID NO: 3225
ggacccaauuguuuaguuu

SEQ ID NO: 250651 - RNA, 19 nt, Artificial Sequence
  Description of Artificial Sequence: Synthetic oligonucleotide
  Antisense strand to SEQ ID NO: 250650
aaacuaaacaauugggucc

SEQ ID NO: 250652 - RNA, 19 nt, Artificial Sequence
  Description of Artificial Sequence: Synthetic oligonucleotide
  Sense strand starting at position 3600 SEQ ID NO: 3225
ggacuagaggcuugagacu

SEQ ID NO: 250653 - RNA, 19 nt, Artificial Sequence
  Description of Artificial Sequence: Synthetic oligonucleotide
  Antisense strand to SEQ ID NO: 250652
agucucaagccucuagucc

SEQ ID NO: 250654 - RNA, 19 nt, Artificial Sequence
  Description of Artificial Sequence: Synthetic oligonucleotide
  Sense strand starting at position 3607 SEQ ID NO: 3225
aggcuugagacuuagcuga

SEQ ID NO: 250655 - RNA, 19 nt, Artificial Sequence
  Description of Artificial Sequence: Synthetic oligonucleotide
  Antisense strand to SEQ ID NO: 250654
ucagcuaagucucaagccu

SEQ ID NO: 250656 - RNA, 19 nt, Artificial Sequence
  Description of Artificial Sequence: Synthetic oligonucleotide
  Sense strand starting at position 3609 SEQ ID NO: 3225
gcuugagacuuagcugaga

SEQ ID NO: 250657 - RNA, 19 nt, Artificial Sequence
  Description of Artificial Sequence: Synthetic oligonucleotide
  Antisense strand to SEQ ID NO: 250656
ucucagcuaagucucaagc

SEQ ID NO: 250658 - RNA, 19 nt, Artificial Sequence
  Description of Artificial Sequence: Synthetic oligonucleotide
  Sense strand starting at position 3626 SEQ ID NO: 3225
gagcuugcccgcuucugaa

SEQ ID NO: 250659 - RNA, 19 nt, Artificial Sequence
  Description of Artificial Sequence: Synthetic oligonucleotide
  Antisense strand to SEQ ID NO: 250658
uucagaagcgggcaagcuc

SEQ ID NO: 250660 - RNA, 19 nt, Artificial Sequence
  Description of Artificial Sequence: Synthetic oligonucleotide
  Sense strand starting at position 3679 SEQ ID NO: 3225
agcuccacugcuuaugauu

SEQ ID NO: 250661 - RNA, 19 nt, Artificial Sequence
  Description of Artificial Sequence: Synthetic oligonucleotide
  Antisense strand to SEQ ID NO: 250660
aaucauaagcaguggagcu

SEQ ID NO: 250662 - RNA, 19 nt, Artificial Sequence
  Description of Artificial Sequence: Synthetic oligonucleotide
  Sense strand starting at position 3756 SEQ ID NO: 3225
uggcucucacaacaugauu

SEQ ID NO: 250663 - RNA, 19 nt, Artificial Sequence
  Description of Artificial Sequence: Synthetic oligonucleotide
  Antisense strand to SEQ ID NO: 250662
aaucauguugugagagcca

SEQ ID NO: 250664 - RNA, 19 nt, Artificial Sequence
  Description of Artificial Sequence: Synthetic oligonucleotide
  Sense strand starting at position 3844 SEQ ID NO: 3225
cucugcuuaggcuaaugua

SEQ ID NO: 250665 - RNA, 19 nt, Artificial Sequence
  Description of Artificial Sequence: Synthetic oligonucleotide
  Antisense strand to SEQ ID NO: 250664
uacauuagccuaagcagag

SEQ ID NO: 250666 - RNA, 19 nt, Artificial Sequence
  Description of Artificial Sequence: Synthetic oligonucleotide
  Sense strand starting at position 3867 SEQ ID NO: 3225
acacuacagcgcuggauaa

SEQ ID NO: 250667 - RNA, 19 nt, Artificial Sequence
  Description of Artificial Sequence: Synthetic oligonucleotide
  Antisense strand to SEQ ID NO: 250666
uuauccagcgcuguagugu

SEQ ID NO: 250668 - RNA, 19 nt, Artificial Sequence
  Description of Artificial Sequence: Synthetic oligonucleotide
  Sense strand starting at position 3886 SEQ ID NO: 3225
aagggauucucacccuguu

SEQ ID NO: 250669 - RNA, 19 nt, Artificial Sequence
  Description of Artificial Sequence: Synthetic oligonucleotide
  Antisense strand to SEQ ID NO: 250668
aacagggugagaaucccuu

SEQ ID NO: 250670 - RNA, 19 nt, Artificial Sequence
  Description of Artificial Sequence: Synthetic oligonucleotide
  Sense strand starting at position 3950 SEQ ID NO: 3225
ucuugugugagagggagau

SEQ ID NO: 250671 - RNA, 19 nt, Artificial Sequence
  Description of Artificial Sequence: Synthetic oligonucleotide
  Antisense strand to SEQ ID NO: 250670
aucucccucucacacaaga

SEQ ID NO: 250672 - RNA, 19 nt, Artificial Sequence
  Description of Artificial Sequence: Synthetic oligonucleotide
  Sense strand starting at position 3967 SEQ ID NO: 3225
auuggaaucgcguugcuua

SEQ ID NO: 250673 - RNA, 19 nt, Artificial Sequence
  Description of Artificial Sequence: Synthetic oligonucleotide
  Antisense strand to SEQ ID NO: 250672
uaagcaacgcgauuccaau

SEQ ID NO: 250674 - RNA, 19 nt, Artificial Sequence
  Description of Artificial Sequence: Synthetic oligonucleotide
  Sense strand starting at position 3972 SEQ ID NO: 3225
aaucgcguugcuuacaaga

SEQ ID NO: 250675 - RNA, 19 nt, Artificial Sequence
  Description of Artificial Sequence: Synthetic oligonucleotide
  Antisense strand to SEQ ID NO: 250674
ucuuguaagcaacgcgauu

SEQ ID NO: 250676 - RNA, 19 nt, Artificial Sequence
  Description of Artificial Sequence: Synthetic oligonucleotide
  Sense strand starting at position 3979 SEQ ID NO: 3225
uugcuuacaagauguguga

SEQ ID NO: 250677 - RNA, 19 nt, Artificial Sequence
  Description of Artificial Sequence: Synthetic oligonucleotide
  Antisense strand to SEQ ID NO: 250676
ucacacaucuuguaagcaa

SEQ ID NO: 250678 - RNA, 19 nt, Artificial Sequence
  Description of Artificial Sequence: Synthetic oligonucleotide
  Sense strand starting at position 3981 SEQ ID NO: 3225
gcuuacaagaugugugauc

SEQ ID NO: 250679 - RNA, 19 nt, Artificial Sequence
  Description of Artificial Sequence: Synthetic oligonucleotide
  Antisense strand to SEQ ID NO: 250678
gaucacacaucuuguaagc

SEQ ID NO: 250680 - RNA, 19 nt, Artificial Sequence
  Description of Artificial Sequence: Synthetic oligonucleotide
  Sense strand starting at position 114 SEQ ID NO: 3226
ggcagacaaccuuggcaaa

SEQ ID NO: 250681 - RNA, 19 nt, Artificial Sequence
  Description of Artificial Sequence: Synthetic oligonucleotide
  Antisense strand to SEQ ID NO: 250680
uuugccaagguugucugcc

SEQ ID NO: 250682 - RNA, 19 nt, Artificial Sequence
  Description of Artificial Sequence: Synthetic oligonucleotide
  Sense strand starting at position 201 SEQ ID NO: 3226
gcaauacccucgguaaacu

SEQ ID NO: 250683 - RNA, 19 nt, Artificial Sequence
  Description of Artificial Sequence: Synthetic oligonucleotide
  Antisense strand to SEQ ID NO: 250682
aguuuaccgaggguauugc

SEQ ID NO: 250684 - RNA, 19 nt, Artificial Sequence
  Description of Artificial Sequence: Synthetic oligonucleotide
  Sense strand starting at position 212 SEQ ID NO: 3226
gguaaacugucaccuguca

SEQ ID NO: 250685 - RNA, 19 nt, Artificial Sequence
  Description of Artificial Sequence: Synthetic oligonucleotide
  Antisense strand to SEQ ID NO: 250684
ugacaggugacaguuuacc

SEQ ID NO: 250686 - RNA, 19 nt, Artificial Sequence
  Description of Artificial Sequence: Synthetic oligonucleotide
  Sense strand starting at position 285 SEQ ID NO: 3226
ggagcaugcucagugauca

SEQ ID NO: 250687 - RNA, 19 nt, Artificial Sequence
  Description of Artificial Sequence: Synthetic oligonucleotide
  Antisense strand to SEQ ID NO: 250686
ugaucacugagcaugcucc

SEQ ID NO: 250688 - RNA, 19 nt, Artificial Sequence
  Description of Artificial Sequence: Synthetic oligonucleotide
  Sense strand starting at position 286 SEQ ID NO: 3226
gagcaugcucagugaucag

SEQ ID NO: 250689 - RNA, 19 nt, Artificial Sequence
  Description of Artificial Sequence: Synthetic oligonucleotide
  Antisense strand to SEQ ID NO: 250688
cugaucacugagcaugcuc

SEQ ID NO: 250690 - RNA, 19 nt, Artificial Sequence
  Description of Artificial Sequence: Synthetic oligonucleotide
  Sense strand starting at position 289 SEQ ID NO: 3226
caugcucagugaucaggau

SEQ ID NO: 250691 - RNA, 19 nt, Artificial Sequence
  Description of Artificial Sequence: Synthetic oligonucleotide
  Antisense strand to SEQ ID NO: 250690
auccugaucacugagcaug

SEQ ID NO: 250692 - RNA, 19 nt, Artificial Sequence
  Description of Artificial Sequence: Synthetic oligonucleotide
  Sense strand starting at position 295 SEQ ID NO: 3226
cagugaucaggaugacauc

SEQ ID NO: 250693 - RNA, 19 nt, Artificial Sequence
  Description of Artificial Sequence: Synthetic oligonucleotide
  Antisense strand to SEQ ID NO: 250692
gaugucauccugaucacug

SEQ ID NO: 250694 - RNA, 19 nt, Artificial Sequence
  Description of Artificial Sequence: Synthetic oligonucleotide
  Sense strand starting at position 531 SEQ ID NO: 3226
acuacaauccauugguguu

SEQ ID NO: 250695 - RNA, 19 nt, Artificial Sequence
  Description of Artificial Sequence: Synthetic oligonucleotide
  Antisense strand to SEQ ID NO: 250694
aacaccaauggauuguagu

SEQ ID NO: 250696 - RNA, 19 nt, Artificial Sequence
  Description of Artificial Sequence: Synthetic oligonucleotide
  Sense strand starting at position 976 SEQ ID NO: 3226
ccgagacgcgacuagaaau

SEQ ID NO: 250697 - RNA, 19 nt, Artificial Sequence
  Description of Artificial Sequence: Synthetic oligonucleotide
  Antisense strand to SEQ ID NO: 250696
auuucuagucgcgucucgg

SEQ ID NO: 250698 - RNA, 19 nt, Artificial Sequence
  Description of Artificial Sequence: Synthetic oligonucleotide
  Sense strand starting at position 1050 SEQ ID NO: 3226
ggcguuugguaaaucgaau

SEQ ID NO: 250699 - RNA, 19 nt, Artificial Sequence
  Description of Artificial Sequence: Synthetic oligonucleotide
  Antisense strand to SEQ ID NO: 250698
auucgauuuaccaaacgcc

SEQ ID NO: 250700 - RNA, 19 nt, Artificial Sequence
  Description of Artificial Sequence: Synthetic oligonucleotide
  Sense strand starting at position 1057 SEQ ID NO: 3226
gguaaaucgaauugauuga

SEQ ID NO: 250701 - RNA, 19 nt, Artificial Sequence
  Description of Artificial Sequence: Synthetic oligonucleotide
  Antisense strand to SEQ ID NO: 250700
ucaaucaauucgauuuacc

SEQ ID NO: 250702 - RNA, 19 nt, Artificial Sequence
  Description of Artificial Sequence: Synthetic oligonucleotide
  Sense strand starting at position 1067 SEQ ID NO: 3226
auugauugaugcccagaag

SEQ ID NO: 250703 - RNA, 19 nt, Artificial Sequence
  Description of Artificial Sequence: Synthetic oligonucleotide
  Antisense strand to SEQ ID NO: 250702
cuucugggcaucaaucaau

SEQ ID NO: 250704 - RNA, 19 nt, Artificial Sequence
  Description of Artificial Sequence: Synthetic oligonucleotide
  Sense strand starting at position 1070 SEQ ID NO: 3226
gauugaugcccagaagcau

SEQ ID NO: 250705 - RNA, 19 nt, Artificial Sequence
  Description of Artificial Sequence: Synthetic oligonucleotide
  Antisense strand to SEQ ID NO: 250704
augcuucugggcaucaauc

SEQ ID NO: 250706 - RNA, 19 nt, Artificial Sequence
  Description of Artificial Sequence: Synthetic oligonucleotide
  Sense strand starting at position 1082 SEQ ID NO: 3226
gaagcauuugcggguugca

SEQ ID NO: 250707 - RNA, 19 nt, Artificial Sequence
  Description of Artificial Sequence: Synthetic oligonucleotide
  Antisense strand to SEQ ID NO: 250706
ugcaacccgcaaaugcuuc

SEQ ID NO: 250708 - RNA, 19 nt, Artificial Sequence
  Description of Artificial Sequence: Synthetic oligonucleotide
  Sense strand starting at position 1991 SEQ ID NO: 3226
gcgcucugccgccuugaga

SEQ ID NO: 250709 - RNA, 19 nt, Artificial Sequence
  Description of Artificial Sequence: Synthetic oligonucleotide
  Antisense strand to SEQ ID NO: 250708
ucucaaggcggcagagcgc

SEQ ID NO: 250710 - RNA, 19 nt, Artificial Sequence
  Description of Artificial Sequence: Synthetic oligonucleotide
  Sense strand starting at position 2110 SEQ ID NO: 3226
gggacuuguagucacucua

SEQ ID NO: 250711 - RNA, 19 nt, Artificial Sequence
  Description of Artificial Sequence: Synthetic oligonucleotide
  Antisense strand to SEQ ID NO: 250710
uagagugacuacaaguccc

SEQ ID NO: 250712 - RNA, 19 nt, Artificial Sequence
  Description of Artificial Sequence: Synthetic oligonucleotide
  Sense strand starting at position 2237 SEQ ID NO: 3226
cuagauaacugggucugga

SEQ ID NO: 250713 - RNA, 19 nt, Artificial Sequence
  Description of Artificial Sequence: Synthetic oligonucleotide
  Antisense strand to SEQ ID NO: 250712
uccagacccaguuaucuag

SEQ ID NO: 250714 - RNA, 19 nt, Artificial Sequence
  Description of Artificial Sequence: Synthetic oligonucleotide
  Sense strand starting at position 2240 SEQ ID NO: 3226
gauaacugggucuggauca

SEQ ID NO: 250715 - RNA, 19 nt, Artificial Sequence
  Description of Artificial Sequence: Synthetic oligonucleotide
  Antisense strand to SEQ ID NO: 250714
ugauccagacccaguuauc

SEQ ID NO: 250716 - RNA, 19 nt, Artificial Sequence
  Description of Artificial Sequence: Synthetic oligonucleotide
  Sense strand starting at position 2247 SEQ ID NO: 3226
gggucuggaucauccugau

SEQ ID NO: 250717 - RNA, 19 nt, Artificial Sequence
  Description of Artificial Sequence: Synthetic oligonucleotide
  Antisense strand to SEQ ID NO: 250716
aucaggaugauccagaccc

SEQ ID NO: 250718 - RNA, 19 nt, Artificial Sequence
  Description of Artificial Sequence: Synthetic oligonucleotide
  Sense strand starting at position 2343 SEQ ID NO: 3226
auggaugucuguucagagu

SEQ ID NO: 250719 - RNA, 19 nt, Artificial Sequence
  Description of Artificial Sequence: Synthetic oligonucleotide
  Antisense strand to SEQ ID NO: 250718
acucugaacagacauccau

SEQ ID NO: 250720 - RNA, 19 nt, Artificial Sequence
  Description of Artificial Sequence: Synthetic oligonucleotide
  Sense strand starting at position 2442 SEQ ID NO: 3226
gaggaaucccuugguggga

SEQ ID NO: 250721 - RNA, 19 nt, Artificial Sequence
  Description of Artificial Sequence: Synthetic oligonucleotide
  Antisense strand to SEQ ID NO: 250720
ucccaccaagggauuccuc

SEQ ID NO: 250722 - RNA, 19 nt, Artificial Sequence
  Description of Artificial Sequence: Synthetic oligonucleotide
  Sense strand starting at position 2682 SEQ ID NO: 3226
ggugauaucugcuugauau

SEQ ID NO: 250723 - RNA, 19 nt, Artificial Sequence
  Description of Artificial Sequence: Synthetic oligonucleotide
  Antisense strand to SEQ ID NO: 250722
auaucaagcagauaucacc

SEQ ID NO: 250724 - RNA, 19 nt, Artificial Sequence
  Description of Artificial Sequence: Synthetic oligonucleotide
  Sense strand starting at position 2683 SEQ ID NO: 3226
gugauaucugcuugauauc

SEQ ID NO: 250725 - RNA, 19 nt, Artificial Sequence
  Description of Artificial Sequence: Synthetic oligonucleotide
  Antisense strand to SEQ ID NO: 250724
gauaucaagcagauaucac

SEQ ID NO: 250726 - RNA, 19 nt, Artificial Sequence
  Description of Artificial Sequence: Synthetic oligonucleotide
  Sense strand starting at position 2684 SEQ ID NO: 3226
ugauaucugcuugauaucu

SEQ ID NO: 250727 - RNA, 19 nt, Artificial Sequence
  Description of Artificial Sequence: Synthetic oligonucleotide
  Antisense strand to SEQ ID NO: 250726
agauaucaagcagauauca

SEQ ID NO: 250728 - RNA, 19 nt, Artificial Sequence
  Description of Artificial Sequence: Synthetic oligonucleotide
  Sense strand starting at position 2884 SEQ ID NO: 3226
ucaucucugucauuggaau

SEQ ID NO: 250729 - RNA, 19 nt, Artificial Sequence
  Description of Artificial Sequence: Synthetic oligonucleotide
  Antisense strand to SEQ ID NO: 250728
auuccaaugacagagauga

SEQ ID NO: 250730 - RNA, 19 nt, Artificial Sequence
  Description of Artificial Sequence: Synthetic oligonucleotide
  Sense strand starting at position 2898 SEQ ID NO: 3226
ggaauaauaucaucuugug

SEQ ID NO: 250731 - RNA, 19 nt, Artificial Sequence
  Description of Artificial Sequence: Synthetic oligonucleotide
  Antisense strand to SEQ ID NO: 250730
cacaagaugauauuauucc

SEQ ID NO: 250732 - RNA, 19 nt, Artificial Sequence
  Description of Artificial Sequence: Synthetic oligonucleotide
  Sense strand starting at position 2964 SEQ ID NO: 3226
gugccugacauguauauag

SEQ ID NO: 250733 - RNA, 19 nt, Artificial Sequence
  Description of Artificial Sequence: Synthetic oligonucleotide
  Antisense strand to SEQ ID NO: 250732
cuauauacaugucaggcac

SEQ ID NO: 250734 - RNA, 19 nt, Artificial Sequence
  Description of Artificial Sequence: Synthetic oligonucleotide
  Sense strand starting at position 2966 SEQ ID NO: 3226
gccugacauguauauagga

SEQ ID NO: 250735 - RNA, 19 nt, Artificial Sequence
  Description of Artificial Sequence: Synthetic oligonucleotide
  Antisense strand to SEQ ID NO: 250734
uccuauauacaugucaggc

SEQ ID NO: 250736 - RNA, 19 nt, Artificial Sequence
  Description of Artificial Sequence: Synthetic oligonucleotide
  Sense strand starting at position 2982 SEQ ID NO: 3226
ggauaagcucuugaaaguu

SEQ ID NO: 250737 - RNA, 19 nt, Artificial Sequence
  Description of Artificial Sequence: Synthetic oligonucleotide
  Antisense strand to SEQ ID NO: 250736
aacuuucaagagcuuaucc

SEQ ID NO: 250738 - RNA, 19 nt, Artificial Sequence
  Description of Artificial Sequence: Synthetic oligonucleotide
  Sense strand starting at position 2988 SEQ ID NO: 3226
gcucuugaaaguuagaugu

SEQ ID NO: 250739 - RNA, 19 nt, Artificial Sequence
  Description of Artificial Sequence: Synthetic oligonucleotide
  Antisense strand to SEQ ID NO: 250738
acaucuaacuuucaagagc

SEQ ID NO: 250740 - RNA, 19 nt, Artificial Sequence
  Description of Artificial Sequence: Synthetic oligonucleotide
  Sense strand starting at position 3001 SEQ ID NO: 3226
agauguuauugggugcuga

SEQ ID NO: 250741 - RNA, 19 nt, Artificial Sequence
  Description of Artificial Sequence: Synthetic oligonucleotide
  Antisense strand to SEQ ID NO: 250740
ucagcacccaauaacaucu

SEQ ID NO: 250742 - RNA, 19 nt, Artificial Sequence
  Description of Artificial Sequence: Synthetic oligonucleotide
  Sense strand starting at position 3002 SEQ ID NO: 3226
gauguuauugggugcugaa

SEQ ID NO: 250743 - RNA, 19 nt, Artificial Sequence
  Description of Artificial Sequence: Synthetic oligonucleotide
  Antisense strand to SEQ ID NO: 250742
uucagcacccaauaacauc

SEQ ID NO: 250744 - RNA, 19 nt, Artificial Sequence
  Description of Artificial Sequence: Synthetic oligonucleotide
  Sense strand starting at position 3072 SEQ ID NO: 3226
cuuaaauucggguaauacc

SEQ ID NO: 250745 - RNA, 19 nt, Artificial Sequence
  Description of Artificial Sequence: Synthetic oligonucleotide
  Antisense strand to SEQ ID NO: 250744
gguauuacccgaauuuaag

SEQ ID NO: 250746 - RNA, 19 nt, Artificial Sequence
  Description of Artificial Sequence: Synthetic oligonucleotide
  Sense strand starting at position 3100 SEQ ID NO: 3226
aaguguucucugccuagcu

SEQ ID NO: 250747 - RNA, 19 nt, Artificial Sequence
  Description of Artificial Sequence: Synthetic oligonucleotide
  Antisense strand to SEQ ID NO: 250746
agcuaggcagagaacacuu

SEQ ID NO: 250748 - RNA, 19 nt, Artificial Sequence
  Description of Artificial Sequence: Synthetic oligonucleotide
  Sense strand starting at position 3146 SEQ ID NO: 3226
uuuauaaacccuuguaagu

SEQ ID NO: 250749 - RNA, 19 nt, Artificial Sequence
  Description of Artificial Sequence: Synthetic oligonucleotide
  Antisense strand to SEQ ID NO: 250748
acuuacaaggguuuauaaa

SEQ ID NO: 250750 - RNA, 19 nt, Artificial Sequence
  Description of Artificial Sequence: Synthetic oligonucleotide
  Sense strand starting at position 3380 SEQ ID NO: 3226
gguuuaucugaggagguca

SEQ ID NO: 250751 - RNA, 19 nt, Artificial Sequence
  Description of Artificial Sequence: Synthetic oligonucleotide
  Antisense strand to SEQ ID NO: 250750
ugaccuccucagauaaacc

SEQ ID NO: 250752 - RNA, 19 nt, Artificial Sequence
  Description of Artificial Sequence: Synthetic oligonucleotide
  Sense strand starting at position 3480 SEQ ID NO: 3226
gcuauuaacugagcaaaug

SEQ ID NO: 250753 - RNA, 19 nt, Artificial Sequence
  Description of Artificial Sequence: Synthetic oligonucleotide
  Antisense strand to SEQ ID NO: 250752
cauuugcucaguuaauagc

SEQ ID NO: 250754 - RNA, 19 nt, Artificial Sequence
  Description of Artificial Sequence: Synthetic oligonucleotide
  Sense strand starting at position 3505 SEQ ID NO: 3226
gcugucacucuguaaacuu

SEQ ID NO: 250755 - RNA, 19 nt, Artificial Sequence
  Description of Artificial Sequence: Synthetic oligonucleotide
  Antisense strand to SEQ ID NO: 250754
aaguuuacagagugacagc

SEQ ID NO: 250756 - RNA, 19 nt, Artificial Sequence
  Description of Artificial Sequence: Synthetic oligonucleotide
  Sense strand starting at position 3615 SEQ ID NO: 3226
uuagaaacuagugggagua

SEQ ID NO: 250757 - RNA, 19 nt, Artificial Sequence
  Description of Artificial Sequence: Synthetic oligonucleotide
  Antisense strand to SEQ ID NO: 250756
uacucccacuaguuucuaa

SEQ ID NO: 250758 - RNA, 19 nt, Artificial Sequence
  Description of Artificial Sequence: Synthetic oligonucleotide
  Sense strand starting at position 3654 SEQ ID NO: 3226
guugucugagaaggcuuaa

SEQ ID NO: 250759 - RNA, 19 nt, Artificial Sequence
  Description of Artificial Sequence: Synthetic oligonucleotide
  Antisense strand to SEQ ID NO: 250758
uuaagccuucucagacaac

SEQ ID NO: 250760 - RNA, 19 nt, Artificial Sequence
  Description of Artificial Sequence: Synthetic oligonucleotide
  Sense strand starting at position 28 SEQ ID NO: 3229
cggagaggaucucuuugca

SEQ ID NO: 250761 - RNA, 19 nt, Artificial Sequence
  Description of Artificial Sequence: Synthetic oligonucleotide
  Antisense strand to SEQ ID NO: 250760
ugcaaagagauccucuccg

SEQ ID NO: 250762 - RNA, 19 nt, Artificial Sequence
  Description of Artificial Sequence: Synthetic oligonucleotide
  Sense strand starting at position 31 SEQ ID NO: 3229
agaggaucucuuugcaguu

SEQ ID NO: 250763 - RNA, 19 nt, Artificial Sequence
  Description of Artificial Sequence: Synthetic oligonucleotide
  Antisense strand to SEQ ID NO: 250762
aacugcaaagagauccucu

SEQ ID NO: 250764 - RNA, 19 nt, Artificial Sequence
  Description of Artificial Sequence: Synthetic oligonucleotide
  Sense strand starting at position 32 SEQ ID NO: 3229
gaggaucucuuugcaguuu

SEQ ID NO: 250765 - RNA, 19 nt, Artificial Sequence
  Description of Artificial Sequence: Synthetic oligonucleotide
  Antisense strand to SEQ ID NO: 250764
aaacugcaaagagauccuc

SEQ ID NO: 250766 - RNA, 19 nt, Artificial Sequence
  Description of Artificial Sequence: Synthetic oligonucleotide
  Sense strand starting at position 737 SEQ ID NO: 3229
augagcugaucucuuccaa

SEQ ID NO: 250767 - RNA, 19 nt, Artificial Sequence
  Description of Artificial Sequence: Synthetic oligonucleotide
  Antisense strand to SEQ ID NO: 250766
uuggaagagaucagcucau

SEQ ID NO: 250768 - RNA, 19 nt, Artificial Sequence
  Description of Artificial Sequence: Synthetic oligonucleotide
  Sense strand starting at position 780 SEQ ID NO: 3229
gggugauauuacucugaga

SEQ ID NO: 250769 - RNA, 19 nt, Artificial Sequence
  Description of Artificial Sequence: Synthetic oligonucleotide
  Antisense strand to SEQ ID NO: 250768
ucucagaguaauaucaccc

SEQ ID NO: 250770 - RNA, 19 nt, Artificial Sequence
  Description of Artificial Sequence: Synthetic oligonucleotide
  Sense strand starting at position 782 SEQ ID NO: 3229
gugauauuacucugagaag

SEQ ID NO: 250771 - RNA, 19 nt, Artificial Sequence
  Description of Artificial Sequence: Synthetic oligonucleotide
  Antisense strand to SEQ ID NO: 250770
cuucucagaguaauaucac

SEQ ID NO: 250772 - RNA, 19 nt, Artificial Sequence
  Description of Artificial Sequence: Synthetic oligonucleotide
  Sense strand starting at position 783 SEQ ID NO: 3229
ugauauuacucugagaaga

SEQ ID NO: 250773 - RNA, 19 nt, Artificial Sequence
  Description of Artificial Sequence: Synthetic oligonucleotide
  Antisense strand to SEQ ID NO: 250772
ucuucucagaguaauauca

SEQ ID NO: 250774 - RNA, 19 nt, Artificial Sequence
  Description of Artificial Sequence: Synthetic oligonucleotide
  Sense strand starting at position 785 SEQ ID NO: 3229
auauuacucugagaagagu

SEQ ID NO: 250775 - RNA, 19 nt, Artificial Sequence
  Description of Artificial Sequence: Synthetic oligonucleotide
  Antisense strand to SEQ ID NO: 250774
acucuucucagaguaauau

SEQ ID NO: 250776 - RNA, 19 nt, Artificial Sequence
  Description of Artificial Sequence: Synthetic oligonucleotide
  Sense strand starting at position 912 SEQ ID NO: 3229
ggaaacuuuaaauguacga

SEQ ID NO: 250777 - RNA, 19 nt, Artificial Sequence
  Description of Artificial Sequence: Synthetic oligonucleotide
  Antisense strand to SEQ ID NO: 250776
ucguacauuuaaaguuucc

SEQ ID NO: 250778 - RNA, 19 nt, Artificial Sequence
  Description of Artificial Sequence: Synthetic oligonucleotide
  Sense strand starting at position 916 SEQ ID NO: 3229
acuuuaaauguacgaagau

SEQ ID NO: 250779 - RNA, 19 nt, Artificial Sequence
  Description of Artificial Sequence: Synthetic oligonucleotide
  Antisense strand to SEQ ID NO: 250778
aucuucguacauuuaaagu

SEQ ID NO: 250780 - RNA, 19 nt, Artificial Sequence
  Description of Artificial Sequence: Synthetic oligonucleotide
  Sense strand starting at position 917 SEQ ID NO: 3229
cuuuaaauguacgaagaua

SEQ ID NO: 250781 - RNA, 19 nt, Artificial Sequence
  Description of Artificial Sequence: Synthetic oligonucleotide
  Antisense strand to SEQ ID NO: 250780
uaucuucguacauuuaaag

SEQ ID NO: 250782 - RNA, 19 nt, Artificial Sequence
  Description of Artificial Sequence: Synthetic oligonucleotide
  Sense strand starting at position 933 SEQ ID NO: 3229
auacacguuuccucucuau

SEQ ID NO: 250783 - RNA, 19 nt, Artificial Sequence
  Description of Artificial Sequence: Synthetic oligonucleotide
  Antisense strand to SEQ ID NO: 250782
auagagaggaaacguguau

SEQ ID NO: 250784 - RNA, 19 nt, Artificial Sequence
  Description of Artificial Sequence: Synthetic oligonucleotide
  Sense strand starting at position 1504 SEQ ID NO: 3229
ugacgucauggcuggaaau

SEQ ID NO: 250785 - RNA, 19 nt, Artificial Sequence
  Description of Artificial Sequence: Synthetic oligonucleotide
  Antisense strand to SEQ ID NO: 250784
auuuccagccaugacguca

SEQ ID NO: 250786 - RNA, 19 nt, Artificial Sequence
  Description of Artificial Sequence: Synthetic oligonucleotide
  Sense strand starting at position 1505 SEQ ID NO: 3229
gacgucauggcuggaaaua

SEQ ID NO: 250787 - RNA, 19 nt, Artificial Sequence
  Description of Artificial Sequence: Synthetic oligonucleotide
  Antisense strand to SEQ ID NO: 250786
uauuuccagccaugacguc

SEQ ID NO: 250788 - RNA, 19 nt, Artificial Sequence
  Description of Artificial Sequence: Synthetic oligonucleotide
  Sense strand starting at position 2586 SEQ ID NO: 3229
gccgguucuaggugacauu

SEQ ID NO: 250789 - RNA, 19 nt, Artificial Sequence
  Description of Artificial Sequence: Synthetic oligonucleotide
  Antisense strand to SEQ ID NO: 250788
aaugucaccuagaaccggc

SEQ ID NO: 250790 - RNA, 19 nt, Artificial Sequence
  Description of Artificial Sequence: Synthetic oligonucleotide
  Sense strand starting at position 2640 SEQ ID NO: 3229
agagcuuauuggccugagu

SEQ ID NO: 250791 - RNA, 19 nt, Artificial Sequence
  Description of Artificial Sequence: Synthetic oligonucleotide
  Antisense strand to SEQ ID NO: 250790
acucaggccaauaagcucu

SEQ ID NO: 250792 - RNA, 19 nt, Artificial Sequence
  Description of Artificial Sequence: Synthetic oligonucleotide
  Sense strand starting at position 2642 SEQ ID NO: 3229
agcuuauuggccugagugu

SEQ ID NO: 250793 - RNA, 19 nt, Artificial Sequence
  Description of Artificial Sequence: Synthetic oligonucleotide
  Antisense strand to SEQ ID NO: 250792
acacucaggccaauaagcu

SEQ ID NO: 250794 - RNA, 19 nt, Artificial Sequence
  Description of Artificial Sequence: Synthetic oligonucleotide
  Sense strand starting at position 2691 SEQ ID NO: 3229
ggccucuuccgcucuguua

SEQ ID NO: 250795 - RNA, 19 nt, Artificial Sequence
  Description of Artificial Sequence: Synthetic oligonucleotide
  Antisense strand to SEQ ID NO: 250794
uaacagagcggaagaggcc

SEQ ID NO: 250796 - RNA, 19 nt, Artificial Sequence
  Description of Artificial Sequence: Synthetic oligonucleotide
  Sense strand starting at position 3018 SEQ ID NO: 3229
gccuuugcugagcugugau

SEQ ID NO: 250797 - RNA, 19 nt, Artificial Sequence
  Description of Artificial Sequence: Synthetic oligonucleotide
  Antisense strand to SEQ ID NO: 250796
aucacagcucagcaaaggc

SEQ ID NO: 250798 - RNA, 19 nt, Artificial Sequence
  Description of Artificial Sequence: Synthetic oligonucleotide
  Sense strand starting at position 3145 SEQ ID NO: 3229
cuuugcucugagcgagaga

SEQ ID NO: 250799 - RNA, 19 nt, Artificial Sequence
  Description of Artificial Sequence: Synthetic oligonucleotide
  Antisense strand to SEQ ID NO: 250798
ucucucgcucagagcaaag

SEQ ID NO: 250800 - RNA, 19 nt, Artificial Sequence
  Description of Artificial Sequence: Synthetic oligonucleotide
  Sense strand starting at position 3146 SEQ ID NO: 3229
uuugcucugagcgagagaa

SEQ ID NO: 250801 - RNA, 19 nt, Artificial Sequence
  Description of Artificial Sequence: Synthetic oligonucleotide
  Antisense strand to SEQ ID NO: 250800
uucucucgcucagagcaaa

SEQ ID NO: 250802 - RNA, 19 nt, Artificial Sequence
  Description of Artificial Sequence: Synthetic oligonucleotide
  Sense strand starting at position 3148 SEQ ID NO: 3229
ugcucugagcgagagaauu

SEQ ID NO: 250803 - RNA, 19 nt, Artificial Sequence
  Description of Artificial Sequence: Synthetic oligonucleotide
  Antisense strand to SEQ ID NO: 250802
aauucucucgcucagagca

SEQ ID NO: 250804 - RNA, 19 nt, Artificial Sequence
  Description of Artificial Sequence: Synthetic oligonucleotide
  Sense strand starting at position 3159 SEQ ID NO: 3229
agagaauucuggucuuagg

SEQ ID NO: 250805 - RNA, 19 nt, Artificial Sequence
  Description of Artificial Sequence: Synthetic oligonucleotide
  Antisense strand to SEQ ID NO: 250804
ccuaagaccagaauucucu

SEQ ID NO: 250806 - RNA, 19 nt, Artificial Sequence
  Description of Artificial Sequence: Synthetic oligonucleotide
  Sense strand starting at position 3277 SEQ ID NO: 3229
ggagaggguguuugcugaa

SEQ ID NO: 250807 - RNA, 19 nt, Artificial Sequence
  Description of Artificial Sequence: Synthetic oligonucleotide
  Antisense strand to SEQ ID NO: 250806
uucagcaaacacccucucc

SEQ ID NO: 250808 - RNA, 19 nt, Artificial Sequence
  Description of Artificial Sequence: Synthetic oligonucleotide
  Sense strand starting at position 3291 SEQ ID NO: 3229
cugaaauaguaagaggguu

SEQ ID NO: 250809 - RNA, 19 nt, Artificial Sequence
  Description of Artificial Sequence: Synthetic oligonucleotide
  Antisense strand to SEQ ID NO: 250808
aacccucuuacuauuucag

SEQ ID NO: 250810 - RNA, 19 nt, Artificial Sequence
  Description of Artificial Sequence: Synthetic oligonucleotide
  Sense strand starting at position 3312 SEQ ID NO: 3229
agacgaaagaaccgugaua

SEQ ID NO: 250811 - RNA, 19 nt, Artificial Sequence
  Description of Artificial Sequence: Synthetic oligonucleotide
  Antisense strand to SEQ ID NO: 250810
uaucacgguucuuucgucu

SEQ ID NO: 250812 - RNA, 19 nt, Artificial Sequence
  Description of Artificial Sequence: Synthetic oligonucleotide
  Sense strand starting at position 3314 SEQ ID NO: 3229
acgaaagaaccgugauaaa

SEQ ID NO: 250813 - RNA, 19 nt, Artificial Sequence
  Description of Artificial Sequence: Synthetic oligonucleotide
  Antisense strand to SEQ ID NO: 250812
uuuaucacgguucuuucgu

SEQ ID NO: 250814 - RNA, 19 nt, Artificial Sequence
  Description of Artificial Sequence: Synthetic oligonucleotide
  Sense strand starting at position 3323 SEQ ID NO: 3229
ccgugauaaacugcucgca

SEQ ID NO: 250815 - RNA, 19 nt, Artificial Sequence
  Description of Artificial Sequence: Synthetic oligonucleotide
  Antisense strand to SEQ ID NO: 250814
ugcgagcaguuuaucacgg

SEQ ID NO: 250816 - RNA, 19 nt, Artificial Sequence
  Description of Artificial Sequence: Synthetic oligonucleotide
  Sense strand starting at position 3324 SEQ ID NO: 3229
cgugauaaacugcucgcau

SEQ ID NO: 250817 - RNA, 19 nt, Artificial Sequence
  Description of Artificial Sequence: Synthetic oligonucleotide
  Antisense strand to SEQ ID NO: 250816
augcgagcaguuuaucacg

SEQ ID NO: 250818 - RNA, 19 nt, Artificial Sequence
  Description of Artificial Sequence: Synthetic oligonucleotide
  Sense strand starting at position 3325 SEQ ID NO: 3229
gugauaaacugcucgcaug

SEQ ID NO: 250819 - RNA, 19 nt, Artificial Sequence
  Description of Artificial Sequence: Synthetic oligonucleotide
  Antisense strand to SEQ ID NO: 250818
caugcgagcaguuuaucac

SEQ ID NO: 250820 - RNA, 19 nt, Artificial Sequence
  Description of Artificial Sequence: Synthetic oligonucleotide
  Sense strand starting at position 3326 SEQ ID NO: 3229
ugauaaacugcucgcauga

SEQ ID NO: 250821 - RNA, 19 nt, Artificial Sequence
  Description of Artificial Sequence: Synthetic oligonucleotide
  Antisense strand to SEQ ID NO: 250820
ucaugcgagcaguuuauca

SEQ ID NO: 250822 - RNA, 19 nt, Artificial Sequence
  Description of Artificial Sequence: Synthetic oligonucleotide
  Sense strand starting at position 3370 SEQ ID NO: 3229
gcaggguguucugugugua

SEQ ID NO: 250823 - RNA, 19 nt, Artificial Sequence
  Description of Artificial Sequence: Synthetic oligonucleotide
  Antisense strand to SEQ ID NO: 250822
uacacacagaacacccugc

SEQ ID NO: 250824 - RNA, 19 nt, Artificial Sequence
  Description of Artificial Sequence: Synthetic oligonucleotide
  Sense strand starting at position 3371 SEQ ID NO: 3229
caggguguucuguguguaa

SEQ ID NO: 250825 - RNA, 19 nt, Artificial Sequence
  Description of Artificial Sequence: Synthetic oligonucleotide
  Antisense strand to SEQ ID NO: 250824
uuacacacagaacacccug

SEQ ID NO: 250826 - RNA, 19 nt, Artificial Sequence
  Description of Artificial Sequence: Synthetic oligonucleotide
  Sense strand starting at position 3440 SEQ ID NO: 3229
cugcauucgccuuauaacu

SEQ ID NO: 250827 - RNA, 19 nt, Artificial Sequence
  Description of Artificial Sequence: Synthetic oligonucleotide
  Antisense strand to SEQ ID NO: 250826
aguuauaaggcgaaugcag

SEQ ID NO: 250828 - RNA, 19 nt, Artificial Sequence
  Description of Artificial Sequence: Synthetic oligonucleotide
  Sense strand starting at position 3695 SEQ ID NO: 3229
acuugcuguucccuagaau

SEQ ID NO: 250829 - RNA, 19 nt, Artificial Sequence
  Description of Artificial Sequence: Synthetic oligonucleotide
  Antisense strand to SEQ ID NO: 250828
auucuagggaacagcaagu

SEQ ID NO: 250830 - RNA, 19 nt, Artificial Sequence
  Description of Artificial Sequence: Synthetic oligonucleotide
  Sense strand starting at position 3696 SEQ ID NO: 3229
cuugcuguucccuagaaug

SEQ ID NO: 250831 - RNA, 19 nt, Artificial Sequence
  Description of Artificial Sequence: Synthetic oligonucleotide
  Antisense strand to SEQ ID NO: 250830
cauucuagggaacagcaag

SEQ ID NO: 250832 - RNA, 19 nt, Artificial Sequence
  Description of Artificial Sequence: Synthetic oligonucleotide
  Sense strand starting at position 3698 SEQ ID NO: 3229
ugcuguucccuagaaugcu

SEQ ID NO: 250833 - RNA, 19 nt, Artificial Sequence
  Description of Artificial Sequence: Synthetic oligonucleotide
  Antisense strand to SEQ ID NO: 250832
agcauucuagggaacagca

SEQ ID NO: 250834 - RNA, 19 nt, Artificial Sequence
  Description of Artificial Sequence: Synthetic oligonucleotide
  Sense strand starting at position 3875 SEQ ID NO: 3229
ucaguuauuuaucaucugu

SEQ ID NO: 250835 - RNA, 19 nt, Artificial Sequence
  Description of Artificial Sequence: Synthetic oligonucleotide
  Antisense strand to SEQ ID NO: 250834
acagaugauaaauaacuga

SEQ ID NO: 250836 - RNA, 19 nt, Artificial Sequence
  Description of Artificial Sequence: Synthetic oligonucleotide
  Sense strand starting at position 3926 SEQ ID NO: 3229
gagccuggcuguuuaauaa

SEQ ID NO: 250837 - RNA, 19 nt, Artificial Sequence
  Description of Artificial Sequence: Synthetic oligonucleotide
  Antisense strand to SEQ ID NO: 250836
uuauuaaacagccaggcuc

SEQ ID NO: 250838 - RNA, 19 nt, Artificial Sequence
  Description of Artificial Sequence: Synthetic oligonucleotide
  Sense strand starting at position 3938 SEQ ID NO: 3229
uuaauaaguccacguaggu

SEQ ID NO: 250839 - RNA, 19 nt, Artificial Sequence
  Description of Artificial Sequence: Synthetic oligonucleotide
  Antisense strand to SEQ ID NO: 250838
accuacguggacuuauuaa

SEQ ID NO: 250840 - RNA, 19 nt, Artificial Sequence
  Description of Artificial Sequence: Synthetic oligonucleotide
  Sense strand starting at position 120 SEQ ID NO: 3227
aaagcagugucccuacaga

SEQ ID NO: 250841 - RNA, 19 nt, Artificial Sequence
  Description of Artificial Sequence: Synthetic oligonucleotide
  Antisense strand to SEQ ID NO: 250840
ucuguagggacacugcuuu

SEQ ID NO: 250842 - RNA, 19 nt, Artificial Sequence
  Description of Artificial Sequence: Synthetic oligonucleotide
  Sense strand starting at position 236 SEQ ID NO: 3227
guggaagucaucuguuacu

SEQ ID NO: 250843 - RNA, 19 nt, Artificial Sequence
  Description of Artificial Sequence: Synthetic oligonucleotide
  Antisense strand to SEQ ID NO: 250842
aguaacagaugacuuccac

SEQ ID NO: 250844 - RNA, 19 nt, Artificial Sequence
  Description of Artificial Sequence: Synthetic oligonucleotide
  Sense strand starting at position 302 SEQ ID NO: 3227
cggagaggaucucuuugca

SEQ ID NO: 250845 - RNA, 19 nt, Artificial Sequence
  Description of Artificial Sequence: Synthetic oligonucleotide
  Antisense strand to SEQ ID NO: 250844
ugcaaagagauccucuccg

SEQ ID NO: 250846 - RNA, 19 nt, Artificial Sequence
  Description of Artificial Sequence: Synthetic oligonucleotide
  Sense strand starting at position 305 SEQ ID NO: 3227
agaggaucucuuugcaguu

SEQ ID NO: 250847 - RNA, 19 nt, Artificial Sequence
  Description of Artificial Sequence: Synthetic oligonucleotide
  Antisense strand to SEQ ID NO: 250846
aacugcaaagagauccucu

SEQ ID NO: 250848 - RNA, 19 nt, Artificial Sequence
  Description of Artificial Sequence: Synthetic oligonucleotide
  Sense strand starting at position 306 SEQ ID NO: 3227
gaggaucucuuugcaguuu

SEQ ID NO: 250849 - RNA, 19 nt, Artificial Sequence
  Description of Artificial Sequence: Synthetic oligonucleotide
  Antisense strand to SEQ ID NO: 250848
aaacugcaaagagauccuc

SEQ ID NO: 250850 - RNA, 19 nt, Artificial Sequence
  Description of Artificial Sequence: Synthetic oligonucleotide
  Sense strand starting at position 1011 SEQ ID NO: 3227
augagcugaucucuuccaa

SEQ ID NO: 250851 - RNA, 19 nt, Artificial Sequence
  Description of Artificial Sequence: Synthetic oligonucleotide
  Antisense strand to SEQ ID NO: 250850
uuggaagagaucagcucau

SEQ ID NO: 250852 - RNA, 19 nt, Artificial Sequence
  Description of Artificial Sequence: Synthetic oligonucleotide
  Sense strand starting at position 1054 SEQ ID NO: 3227
gggugauauuacucugaga

SEQ ID NO: 250853 - RNA, 19 nt, Artificial Sequence
  Description of Artificial Sequence: Synthetic oligonucleotide
  Antisense strand to SEQ ID NO: 250852
ucucagaguaauaucaccc

SEQ ID NO: 250854 - RNA, 19 nt, Artificial Sequence
  Description of Artificial Sequence: Synthetic oligonucleotide
  Sense strand starting at position 1056 SEQ ID NO: 3227
gugauauuacucugagaag

SEQ ID NO: 250855 - RNA, 19 nt, Artificial Sequence
  Description of Artificial Sequence: Synthetic oligonucleotide
  Antisense strand to SEQ ID NO: 250854
cuucucagaguaauaucac

SEQ ID NO: 250856 - RNA, 19 nt, Artificial Sequence
  Description of Artificial Sequence: Synthetic oligonucleotide
  Sense strand starting at position 1057 SEQ ID NO: 3227
ugauauuacucugagaaga

SEQ ID NO: 250857 - RNA, 19 nt, Artificial Sequence
  Description of Artificial Sequence: Synthetic oligonucleotide
  Antisense strand to SEQ ID NO: 250856
ucuucucagaguaauauca

SEQ ID NO: 250858 - RNA, 19 nt, Artificial Sequence
  Description of Artificial Sequence: Synthetic oligonucleotide
  Sense strand starting at position 1059 SEQ ID NO: 3227
auauuacucugagaagagu

SEQ ID NO: 250859 - RNA, 19 nt, Artificial Sequence
  Description of Artificial Sequence: Synthetic oligonucleotide
  Antisense strand to SEQ ID NO: 250858
acucuucucagaguaauau

SEQ ID NO: 250860 - RNA, 19 nt, Artificial Sequence
  Description of Artificial Sequence: Synthetic oligonucleotide
  Sense strand starting at position 1186 SEQ ID NO: 3227
ggaaacuuuaaauguacga

SEQ ID NO: 250861 - RNA, 19 nt, Artificial Sequence
  Description of Artificial Sequence: Synthetic oligonucleotide
  Antisense strand to SEQ ID NO: 250860
ucguacauuuaaaguuucc

SEQ ID NO: 250862 - RNA, 19 nt, Artificial Sequence
  Description of Artificial Sequence: Synthetic oligonucleotide
  Sense strand starting at position 1190 SEQ ID NO: 3227
acuuuaaauguacgaagau

SEQ ID NO: 250863 - RNA, 19 nt, Artificial Sequence
  Description of Artificial Sequence: Synthetic oligonucleotide
  Antisense strand to SEQ ID NO: 250862
aucuucguacauuuaaagu

SEQ ID NO: 250864 - RNA, 19 nt, Artificial Sequence
  Description of Artificial Sequence: Synthetic oligonucleotide
  Sense strand starting at position 1191 SEQ ID NO: 3227
cuuuaaauguacgaagaua

SEQ ID NO: 250865 - RNA, 19 nt, Artificial Sequence
  Description of Artificial Sequence: Synthetic oligonucleotide
  Antisense strand to SEQ ID NO: 250864
uaucuucguacauuuaaag

SEQ ID NO: 250866 - RNA, 19 nt, Artificial Sequence
  Description of Artificial Sequence: Synthetic oligonucleotide
  Sense strand starting at position 1207 SEQ ID NO: 3227
auacacguuuccucucuau

SEQ ID NO: 250867 - RNA, 19 nt, Artificial Sequence
  Description of Artificial Sequence: Synthetic oligonucleotide
  Antisense strand to SEQ ID NO: 250866
auagagaggaaacguguau

SEQ ID NO: 250868 - RNA, 19 nt, Artificial Sequence
  Description of Artificial Sequence: Synthetic oligonucleotide
  Sense strand starting at position 1778 SEQ ID NO: 3227
ugacgucauggcuggaaau

SEQ ID NO: 250869 - RNA, 19 nt, Artificial Sequence
  Description of Artificial Sequence: Synthetic oligonucleotide
  Antisense strand to SEQ ID NO: 250868
auuuccagccaugacguca

SEQ ID NO: 250870 - RNA, 19 nt, Artificial Sequence
  Description of Artificial Sequence: Synthetic oligonucleotide
  Sense strand starting at position 1779 SEQ ID NO: 3227
gacgucauggcuggaaaua

SEQ ID NO: 250871 - RNA, 19 nt, Artificial Sequence
  Description of Artificial Sequence: Synthetic oligonucleotide
  Antisense strand to SEQ ID NO: 250870
uauuuccagccaugacguc

SEQ ID NO: 250872 - RNA, 19 nt, Artificial Sequence
  Description of Artificial Sequence: Synthetic oligonucleotide
  Sense strand starting at position 2811 SEQ ID NO: 3227
cccuucgucucuuaggaau

SEQ ID NO: 250873 - RNA, 19 nt, Artificial Sequence
  Description of Artificial Sequence: Synthetic oligonucleotide
  Antisense strand to SEQ ID NO: 250872
auuccuaagagacgaaggg

SEQ ID NO: 250874 - RNA, 19 nt, Artificial Sequence
  Description of Artificial Sequence: Synthetic oligonucleotide
  Sense strand starting at position 2860 SEQ ID NO: 3227
gccgguucuaggugacauu

SEQ ID NO: 250875 - RNA, 19 nt, Artificial Sequence
  Description of Artificial Sequence: Synthetic oligonucleotide
  Antisense strand to SEQ ID NO: 250874
aaugucaccuagaaccggc

SEQ ID NO: 250876 - RNA, 19 nt, Artificial Sequence
  Description of Artificial Sequence: Synthetic oligonucleotide
  Sense strand starting at position 2914 SEQ ID NO: 3227
agagcuuauuggccugagu

SEQ ID NO: 250877 - RNA, 19 nt, Artificial Sequence
  Description of Artificial Sequence: Synthetic oligonucleotide
  Antisense strand to SEQ ID NO: 250876
acucaggccaauaagcucu

SEQ ID NO: 250878 - RNA, 19 nt, Artificial Sequence
  Description of Artificial Sequence: Synthetic oligonucleotide
  Sense strand starting at position 2916 SEQ ID NO: 3227
agcuuauuggccugagugu

SEQ ID NO: 250879 - RNA, 19 nt, Artificial Sequence
  Description of Artificial Sequence: Synthetic oligonucleotide
  Antisense strand to SEQ ID NO: 250878
acacucaggccaauaagcu

SEQ ID NO: 250880 - RNA, 19 nt, Artificial Sequence
  Description of Artificial Sequence: Synthetic oligonucleotide
  Sense strand starting at position 2965 SEQ ID NO: 3227
ggccucuuccgcucuguua

SEQ ID NO: 250881 - RNA, 19 nt, Artificial Sequence
  Description of Artificial Sequence: Synthetic oligonucleotide
  Antisense strand to SEQ ID NO: 250880
uaacagagcggaagaggcc

SEQ ID NO: 250882 - RNA, 19 nt, Artificial Sequence
  Description of Artificial Sequence: Synthetic oligonucleotide
  Sense strand starting at position 3292 SEQ ID NO: 3227
gccuuugcugagcugugau

SEQ ID NO: 250883 - RNA, 19 nt, Artificial Sequence
  Description of Artificial Sequence: Synthetic oligonucleotide
  Antisense strand to SEQ ID NO: 250882
aucacagcucagcaaaggc

SEQ ID NO: 250884 - RNA, 19 nt, Artificial Sequence
  Description of Artificial Sequence: Synthetic oligonucleotide
  Sense strand starting at position 3419 SEQ ID NO: 3227
cuuugcucugagcgagaga

SEQ ID NO: 250885 - RNA, 19 nt, Artificial Sequence
  Description of Artificial Sequence: Synthetic oligonucleotide
  Antisense strand to SEQ ID NO: 250884
ucucucgcucagagcaaag

SEQ ID NO: 250886 - RNA, 19 nt, Artificial Sequence
  Description of Artificial Sequence: Synthetic oligonucleotide
  Sense strand starting at position 3420 SEQ ID NO: 3227
uuugcucugagcgagagaa

SEQ ID NO: 250887 - RNA, 19 nt, Artificial Sequence
  Description of Artificial Sequence: Synthetic oligonucleotide
  Antisense strand to SEQ ID NO: 250886
uucucucgcucagagcaaa

SEQ ID NO: 250888 - RNA, 19 nt, Artificial Sequence
  Description of Artificial Sequence: Synthetic oligonucleotide
  Sense strand starting at position 3422 SEQ ID NO: 3227
ugcucugagcgagagaauu

SEQ ID NO: 250889 - RNA, 19 nt, Artificial Sequence
  Description of Artificial Sequence: Synthetic oligonucleotide
  Antisense strand to SEQ ID NO: 250888
aauucucucgcucagagca

SEQ ID NO: 250890 - RNA, 19 nt, Artificial Sequence
  Description of Artificial Sequence: Synthetic oligonucleotide
  Sense strand starting at position 3433 SEQ ID NO: 3227
agagaauucuggucuuagg

SEQ ID NO: 250891 - RNA, 19 nt, Artificial Sequence
  Description of Artificial Sequence: Synthetic oligonucleotide
  Antisense strand to SEQ ID NO: 250890
ccuaagaccagaauucucu

SEQ ID NO: 250892 - RNA, 19 nt, Artificial Sequence
  Description of Artificial Sequence: Synthetic oligonucleotide
  Sense strand starting at position 3551 SEQ ID NO: 3227
ggagaggguguuugcugaa

SEQ ID NO: 250893 - RNA, 19 nt, Artificial Sequence
  Description of Artificial Sequence: Synthetic oligonucleotide
  Antisense strand to SEQ ID NO: 250892
uucagcaaacacccucucc

SEQ ID NO: 250894 - RNA, 19 nt, Artificial Sequence
  Description of Artificial Sequence: Synthetic oligonucleotide
  Sense strand starting at position 3565 SEQ ID NO: 3227
cugaaauaguaagaggguu

SEQ ID NO: 250895 - RNA, 19 nt, Artificial Sequence
  Description of Artificial Sequence: Synthetic oligonucleotide
  Antisense strand to SEQ ID NO: 250894
aacccucuuacuauuucag

SEQ ID NO: 250896 - RNA, 19 nt, Artificial Sequence
  Description of Artificial Sequence: Synthetic oligonucleotide
  Sense strand starting at position 3586 SEQ ID NO: 3227
agacgaaagaaccgugaua

SEQ ID NO: 250897 - RNA, 19 nt, Artificial Sequence
  Description of Artificial Sequence: Synthetic oligonucleotide
  Antisense strand to SEQ ID NO: 250896
uaucacgguucuuucgucu

SEQ ID NO: 250898 - RNA, 19 nt, Artificial Sequence
  Description of Artificial Sequence: Synthetic oligonucleotide
  Sense strand starting at position 3588 SEQ ID NO: 3227
acgaaagaaccgugauaaa

SEQ ID NO: 250899 - RNA, 19 nt, Artificial Sequence
  Description of Artificial Sequence: Synthetic oligonucleotide
  Antisense strand to SEQ ID NO: 250898
uuuaucacgguucuuucgu

SEQ ID NO: 250900 - RNA, 19 nt, Artificial Sequence
  Description of Artificial Sequence: Synthetic oligonucleotide
  Sense strand starting at position 3597 SEQ ID NO: 3227
ccgugauaaacugcucgca

SEQ ID NO: 250901 - RNA, 19 nt, Artificial Sequence
  Description of Artificial Sequence: Synthetic oligonucleotide
  Antisense strand to SEQ ID NO: 250900
ugcgagcaguuuaucacgg

SEQ ID NO: 250902 - RNA, 19 nt, Artificial Sequence
  Description of Artificial Sequence: Synthetic oligonucleotide
  Sense strand starting at position 3598 SEQ ID NO: 3227
cgugauaaacugcucgcau

SEQ ID NO: 250903 - RNA, 19 nt, Artificial Sequence
  Description of Artificial Sequence: Synthetic oligonucleotide
  Antisense strand to SEQ ID NO: 250902
augcgagcaguuuaucacg

SEQ ID NO: 250904 - RNA, 19 nt, Artificial Sequence
  Description of Artificial Sequence: Synthetic oligonucleotide
  Sense strand starting at position 3599 SEQ ID NO: 3227
gugauaaacugcucgcaug

SEQ ID NO: 250905 - RNA, 19 nt, Artificial Sequence
  Description of Artificial Sequence: Synthetic oligonucleotide
  Antisense strand to SEQ ID NO: 250904
caugcgagcaguuuaucac

SEQ ID NO: 250906 - RNA, 19 nt, Artificial Sequence
  Description of Artificial Sequence: Synthetic oligonucleotide
  Sense strand starting at position 3600 SEQ ID NO: 3227
ugauaaacugcucgcauga

SEQ ID NO: 250907 - RNA, 19 nt, Artificial Sequence
  Description of Artificial Sequence: Synthetic oligonucleotide
  Antisense strand to SEQ ID NO: 250906
ucaugcgagcaguuuauca

SEQ ID NO: 250908 - RNA, 19 nt, Artificial Sequence
  Description of Artificial Sequence: Synthetic oligonucleotide
  Sense strand starting at position 3644 SEQ ID NO: 3227
gcaggguguucugugugua

SEQ ID NO: 250909 - RNA, 19 nt, Artificial Sequence
  Description of Artificial Sequence: Synthetic oligonucleotide
  Antisense strand to SEQ ID NO: 250908
uacacacagaacacccugc

SEQ ID NO: 250910 - RNA, 19 nt, Artificial Sequence
  Description of Artificial Sequence: Synthetic oligonucleotide
  Sense strand starting at position 3645 SEQ ID NO: 3227
caggguguucuguguguaa

SEQ ID NO: 250911 - RNA, 19 nt, Artificial Sequence
  Description of Artificial Sequence: Synthetic oligonucleotide
  Antisense strand to SEQ ID NO: 250910
uuacacacagaacacccug

SEQ ID NO: 250912 - RNA, 19 nt, Artificial Sequence
  Description of Artificial Sequence: Synthetic oligonucleotide
  Sense strand starting at position 3714 SEQ ID NO: 3227
cugcauucgccuuauaacu

SEQ ID NO: 250913 - RNA, 19 nt, Artificial Sequence
  Description of Artificial Sequence: Synthetic oligonucleotide
  Antisense strand to SEQ ID NO: 250912
aguuauaaggcgaaugcag

SEQ ID NO: 250914 - RNA, 19 nt, Artificial Sequence
  Description of Artificial Sequence: Synthetic oligonucleotide
  Sense strand starting at position 3969 SEQ ID NO: 3227
acuugcuguucccuagaau

SEQ ID NO: 250915 - RNA, 19 nt, Artificial Sequence
  Description of Artificial Sequence: Synthetic oligonucleotide
  Antisense strand to SEQ ID NO: 250914
auucuagggaacagcaagu

SEQ ID NO: 250916 - RNA, 19 nt, Artificial Sequence
  Description of Artificial Sequence: Synthetic oligonucleotide
  Sense strand starting at position 3970 SEQ ID NO: 3227
cuugcuguucccuagaaug

SEQ ID NO: 250917 - RNA, 19 nt, Artificial Sequence
  Description of Artificial Sequence: Synthetic oligonucleotide
  Antisense strand to SEQ ID NO: 250916
cauucuagggaacagcaag

SEQ ID NO: 250918 - RNA, 19 nt, Artificial Sequence
  Description of Artificial Sequence: Synthetic oligonucleotide
  Sense strand starting at position 3972 SEQ ID NO: 3227
ugcuguucccuagaaugcu

SEQ ID NO: 250919 - RNA, 19 nt, Artificial Sequence
  Description of Artificial Sequence: Synthetic oligonucleotide
  Antisense strand to SEQ ID NO: 250918
agcauucuagggaacagca

SEQ ID NO: 250920 - RNA, 19 nt, Artificial Sequence
  Description of Artificial Sequence: Synthetic oligonucleotide
  Sense strand starting at position 81 SEQ ID NO: 3228
uguccaugaugucaaccua

SEQ ID NO: 250921 - RNA, 19 nt, Artificial Sequence
  Description of Artificial Sequence: Synthetic oligonucleotide
  Antisense strand to SEQ ID NO: 250920
uagguugacaucauggaca

SEQ ID NO: 250922 - RNA, 19 nt, Artificial Sequence
  Description of Artificial Sequence: Synthetic oligonucleotide
  Sense strand starting at position 151 SEQ ID NO: 3228
ccaugaugggcauguggau

SEQ ID NO: 250923 - RNA, 19 nt, Artificial Sequence
  Description of Artificial Sequence: Synthetic oligonucleotide
  Antisense strand to SEQ ID NO: 250922
auccacaugcccaucaugg

SEQ ID NO: 250924 - RNA, 19 nt, Artificial Sequence
  Description of Artificial Sequence: Synthetic oligonucleotide
  Sense strand starting at position 163 SEQ ID NO: 3228
uguggauaugcauaucaga

SEQ ID NO: 250925 - RNA, 19 nt, Artificial Sequence
  Description of Artificial Sequence: Synthetic oligonucleotide
  Antisense strand to SEQ ID NO: 250924
ucugauaugcauauccaca

SEQ ID NO: 250926 - RNA, 19 nt, Artificial Sequence
  Description of Artificial Sequence: Synthetic oligonucleotide
  Sense strand starting at position 174 SEQ ID NO: 3228
auaucagaagccuacagua

SEQ ID NO: 250927 - RNA, 19 nt, Artificial Sequence
  Description of Artificial Sequence: Synthetic oligonucleotide
  Antisense strand to SEQ ID NO: 250926
uacuguaggcuucugauau

SEQ ID NO: 250928 - RNA, 19 nt, Artificial Sequence
  Description of Artificial Sequence: Synthetic oligonucleotide
  Sense strand starting at position 194 SEQ ID NO: 3228
gcauguaaugcacaugcaa

SEQ ID NO: 250929 - RNA, 19 nt, Artificial Sequence
  Description of Artificial Sequence: Synthetic oligonucleotide
  Antisense strand to SEQ ID NO: 250928
uugcaugugcauuacaugc

SEQ ID NO: 250930 - RNA, 19 nt, Artificial Sequence
  Description of Artificial Sequence: Synthetic oligonucleotide
  Sense strand starting at position 536 SEQ ID NO: 3228
aaagcagugucccuacaga

SEQ ID NO: 250931 - RNA, 19 nt, Artificial Sequence
  Description of Artificial Sequence: Synthetic oligonucleotide
  Antisense strand to SEQ ID NO: 250930
ucuguagggacacugcuuu

SEQ ID NO: 250932 - RNA, 19 nt, Artificial Sequence
  Description of Artificial Sequence: Synthetic oligonucleotide
  Sense strand starting at position 652 SEQ ID NO: 3228
guggaagucaucuguuacu

SEQ ID NO: 250933 - RNA, 19 nt, Artificial Sequence
  Description of Artificial Sequence: Synthetic oligonucleotide
  Antisense strand to SEQ ID NO: 250932
aguaacagaugacuuccac

SEQ ID NO: 250934 - RNA, 19 nt, Artificial Sequence
  Description of Artificial Sequence: Synthetic oligonucleotide
  Sense strand starting at position 655 SEQ ID NO: 3228
gaagucaucuguuacuguc

SEQ ID NO: 250935 - RNA, 19 nt, Artificial Sequence
  Description of Artificial Sequence: Synthetic oligonucleotide
  Antisense strand to SEQ ID NO: 250934
gacaguaacagaugacuuc

SEQ ID NO: 250936 - RNA, 19 nt, Artificial Sequence
  Description of Artificial Sequence: Synthetic oligonucleotide
  Sense strand starting at position 718 SEQ ID NO: 3228
cggagaggaucucuuugca

SEQ ID NO: 250937 - RNA, 19 nt, Artificial Sequence
  Description of Artificial Sequence: Synthetic oligonucleotide
  Antisense strand to SEQ ID NO: 250936
ugcaaagagauccucuccg

SEQ ID NO: 250938 - RNA, 19 nt, Artificial Sequence
  Description of Artificial Sequence: Synthetic oligonucleotide
  Sense strand starting at position 721 SEQ ID NO: 3228
agaggaucucuuugcaguu

SEQ ID NO: 250939 - RNA, 19 nt, Artificial Sequence
  Description of Artificial Sequence: Synthetic oligonucleotide
  Antisense strand to SEQ ID NO: 250938
aacugcaaagagauccucu

SEQ ID NO: 250940 - RNA, 19 nt, Artificial Sequence
  Description of Artificial Sequence: Synthetic oligonucleotide
  Sense strand starting at position 722 SEQ ID NO: 3228
gaggaucucuuugcaguuu

SEQ ID NO: 250941 - RNA, 19 nt, Artificial Sequence
  Description of Artificial Sequence: Synthetic oligonucleotide
  Antisense strand to SEQ ID NO: 250940
aaacugcaaagagauccuc

SEQ ID NO: 250942 - RNA, 19 nt, Artificial Sequence
  Description of Artificial Sequence: Synthetic oligonucleotide
  Sense strand starting at position 1427 SEQ ID NO: 3228
augagcugaucucuuccaa

SEQ ID NO: 250943 - RNA, 19 nt, Artificial Sequence
  Description of Artificial Sequence: Synthetic oligonucleotide
  Antisense strand to SEQ ID NO: 250942
uuggaagagaucagcucau

SEQ ID NO: 250944 - RNA, 19 nt, Artificial Sequence
  Description of Artificial Sequence: Synthetic oligonucleotide
  Sense strand starting at position 1470 SEQ ID NO: 3228
gggugauauuacucugaga

SEQ ID NO: 250945 - RNA, 19 nt, Artificial Sequence
  Description of Artificial Sequence: Synthetic oligonucleotide
  Antisense strand to SEQ ID NO: 250944
ucucagaguaauaucaccc

SEQ ID NO: 250946 - RNA, 19 nt, Artificial Sequence
  Description of Artificial Sequence: Synthetic oligonucleotide
  Sense strand starting at position 1472 SEQ ID NO: 3228
gugauauuacucugagaag

SEQ ID NO: 250947 - RNA, 19 nt, Artificial Sequence
  Description of Artificial Sequence: Synthetic oligonucleotide
  Antisense strand to SEQ ID NO: 250946
cuucucagaguaauaucac

SEQ ID NO: 250948 - RNA, 19 nt, Artificial Sequence
  Description of Artificial Sequence: Synthetic oligonucleotide
  Sense strand starting at position 1473 SEQ ID NO: 3228
ugauauuacucugagaaga

SEQ ID NO: 250949 - RNA, 19 nt, Artificial Sequence
  Description of Artificial Sequence: Synthetic oligonucleotide
  Antisense strand to SEQ ID NO: 250948
ucuucucagaguaauauca

SEQ ID NO: 250950 - RNA, 19 nt, Artificial Sequence
  Description of Artificial Sequence: Synthetic oligonucleotide
  Sense strand starting at position 1475 SEQ ID NO: 3228
auauuacucugagaagagu

SEQ ID NO: 250951 - RNA, 19 nt, Artificial Sequence
  Description of Artificial Sequence: Synthetic oligonucleotide
  Antisense strand to SEQ ID NO: 250950
acucuucucagaguaauau

SEQ ID NO: 250952 - RNA, 19 nt, Artificial Sequence
  Description of Artificial Sequence: Synthetic oligonucleotide
  Sense strand starting at position 1602 SEQ ID NO: 3228
ggaaacuuuaaauguacga

SEQ ID NO: 250953 - RNA, 19 nt, Artificial Sequence
  Description of Artificial Sequence: Synthetic oligonucleotide
  Antisense strand to SEQ ID NO: 250952
ucguacauuuaaaguuucc

SEQ ID NO: 250954 - RNA, 19 nt, Artificial Sequence
  Description of Artificial Sequence: Synthetic oligonucleotide
  Sense strand starting at position 1606 SEQ ID NO: 3228
acuuuaaauguacgaagau

SEQ ID NO: 250955 - RNA, 19 nt, Artificial Sequence
  Description of Artificial Sequence: Synthetic oligonucleotide
  Antisense strand to SEQ ID NO: 250954
aucuucguacauuuaaagu

SEQ ID NO: 250956 - RNA, 19 nt, Artificial Sequence
  Description of Artificial Sequence: Synthetic oligonucleotide
  Sense strand starting at position 1607 SEQ ID NO: 3228
cuuuaaauguacgaagaua

SEQ ID NO: 250957 - RNA, 19 nt, Artificial Sequence
  Description of Artificial Sequence: Synthetic oligonucleotide
  Antisense strand to SEQ ID NO: 250956
uaucuucguacauuuaaag

SEQ ID NO: 250958 - RNA, 19 nt, Artificial Sequence
  Description of Artificial Sequence: Synthetic oligonucleotide
  Sense strand starting at position 1623 SEQ ID NO: 3228
auacacguuuccucucuau

SEQ ID NO: 250959 - RNA, 19 nt, Artificial Sequence
  Description of Artificial Sequence: Synthetic oligonucleotide
  Antisense strand to SEQ ID NO: 250958
auagagaggaaacguguau

SEQ ID NO: 250960 - RNA, 19 nt, Artificial Sequence
  Description of Artificial Sequence: Synthetic oligonucleotide
  Sense strand starting at position 2194 SEQ ID NO: 3228
ugacgucauggcuggaaau

SEQ ID NO: 250961 - RNA, 19 nt, Artificial Sequence
  Description of Artificial Sequence: Synthetic oligonucleotide
  Antisense strand to SEQ ID NO: 250960
auuuccagccaugacguca

SEQ ID NO: 250962 - RNA, 19 nt, Artificial Sequence
  Description of Artificial Sequence: Synthetic oligonucleotide
  Sense strand starting at position 2195 SEQ ID NO: 3228
gacgucauggcuggaaaua

SEQ ID NO: 250963 - RNA, 19 nt, Artificial Sequence
  Description of Artificial Sequence: Synthetic oligonucleotide
  Antisense strand to SEQ ID NO: 250962
uauuuccagccaugacguc

SEQ ID NO: 250964 - RNA, 19 nt, Artificial Sequence
  Description of Artificial Sequence: Synthetic oligonucleotide
  Sense strand starting at position 3227 SEQ ID NO: 3228
cccuucgucucuuaggaau

SEQ ID NO: 250965 - RNA, 19 nt, Artificial Sequence
  Description of Artificial Sequence: Synthetic oligonucleotide
  Antisense strand to SEQ ID NO: 250964
auuccuaagagacgaaggg

SEQ ID NO: 250966 - RNA, 19 nt, Artificial Sequence
  Description of Artificial Sequence: Synthetic oligonucleotide
  Sense strand starting at position 3276 SEQ ID NO: 3228
gccgguucuaggugacauu

SEQ ID NO: 250967 - RNA, 19 nt, Artificial Sequence
  Description of Artificial Sequence: Synthetic oligonucleotide
  Antisense strand to SEQ ID NO: 250966
aaugucaccuagaaccggc

SEQ ID NO: 250968 - RNA, 19 nt, Artificial Sequence
  Description of Artificial Sequence: Synthetic oligonucleotide
  Sense strand starting at position 3330 SEQ ID NO: 3228
agagcuuauuggccugagu

SEQ ID NO: 250969 - RNA, 19 nt, Artificial Sequence
  Description of Artificial Sequence: Synthetic oligonucleotide
  Antisense strand to SEQ ID NO: 250968
acucaggccaauaagcucu

SEQ ID NO: 250970 - RNA, 19 nt, Artificial Sequence
  Description of Artificial Sequence: Synthetic oligonucleotide
  Sense strand starting at position 3332 SEQ ID NO: 3228
agcuuauuggccugagugu

SEQ ID NO: 250971 - RNA, 19 nt, Artificial Sequence
  Description of Artificial Sequence: Synthetic oligonucleotide
  Antisense strand to SEQ ID NO: 250970
acacucaggccaauaagcu

SEQ ID NO: 250972 - RNA, 19 nt, Artificial Sequence
  Description of Artificial Sequence: Synthetic oligonucleotide
  Sense strand starting at position 3381 SEQ ID NO: 3228
ggccucuuccgcucuguua

SEQ ID NO: 250973 - RNA, 19 nt, Artificial Sequence
  Description of Artificial Sequence: Synthetic oligonucleotide
  Antisense strand to SEQ ID NO: 250972
uaacagagcggaagaggcc

SEQ ID NO: 250974 - RNA, 19 nt, Artificial Sequence
  Description of Artificial Sequence: Synthetic oligonucleotide
  Sense strand starting at position 3626 SEQ ID NO: 3228
caggaaccaugcuguuuau

SEQ ID NO: 250975 - RNA, 19 nt, Artificial Sequence
  Description of Artificial Sequence: Synthetic oligonucleotide
  Antisense strand to SEQ ID NO: 250974
auaaacagcaugguuccug

SEQ ID NO: 250976 - RNA, 19 nt, Artificial Sequence
  Description of Artificial Sequence: Synthetic oligonucleotide
  Sense strand starting at position 3708 SEQ ID NO: 3228
gccuuugcugagcugugau

SEQ ID NO: 250977 - RNA, 19 nt, Artificial Sequence
  Description of Artificial Sequence: Synthetic oligonucleotide
  Antisense strand to SEQ ID NO: 250976
aucacagcucagcaaaggc

SEQ ID NO: 250978 - RNA, 19 nt, Artificial Sequence
  Description of Artificial Sequence: Synthetic oligonucleotide
  Sense strand starting at position 3835 SEQ ID NO: 3228
cuuugcucugagcgagaga

SEQ ID NO: 250979 - RNA, 19 nt, Artificial Sequence
  Description of Artificial Sequence: Synthetic oligonucleotide
  Antisense strand to SEQ ID NO: 250978
ucucucgcucagagcaaag

SEQ ID NO: 250980 - RNA, 19 nt, Artificial Sequence
  Description of Artificial Sequence: Synthetic oligonucleotide
  Sense strand starting at position 3836 SEQ ID NO: 3228
uuugcucugagcgagagaa

SEQ ID NO: 250981 - RNA, 19 nt, Artificial Sequence
  Description of Artificial Sequence: Synthetic oligonucleotide
  Antisense strand to SEQ ID NO: 250980
uucucucgcucagagcaaa

SEQ ID NO: 250982 - RNA, 19 nt, Artificial Sequence
  Description of Artificial Sequence: Synthetic oligonucleotide
  Sense strand starting at position 3838 SEQ ID NO: 3228
ugcucugagcgagagaauu

SEQ ID NO: 250983 - RNA, 19 nt, Artificial Sequence
  Description of Artificial Sequence: Synthetic oligonucleotide
  Antisense strand to SEQ ID NO: 250982
aauucucucgcucagagca

SEQ ID NO: 250984 - RNA, 19 nt, Artificial Sequence
  Description of Artificial Sequence: Synthetic oligonucleotide
  Sense strand starting at position 3846 SEQ ID NO: 3228
gcgagagaauucuggucuu

SEQ ID NO: 250985 - RNA, 19 nt, Artificial Sequence
  Description of Artificial Sequence: Synthetic oligonucleotide
  Antisense strand to SEQ ID NO: 250984
aagaccagaauucucucgc

SEQ ID NO: 250986 - RNA, 19 nt, Artificial Sequence
  Description of Artificial Sequence: Synthetic oligonucleotide
  Sense strand starting at position 3849 SEQ ID NO: 3228
agagaauucuggucuuagg

SEQ ID NO: 250987 - RNA, 19 nt, Artificial Sequence
  Description of Artificial Sequence: Synthetic oligonucleotide
  Antisense strand to SEQ ID NO: 250986
ccuaagaccagaauucucu

SEQ ID NO: 250988 - RNA, 19 nt, Artificial Sequence
  Description of Artificial Sequence: Synthetic oligonucleotide
  Sense strand starting at position 3967 SEQ ID NO: 3228
ggagaggguguuugcugaa

SEQ ID NO: 250989 - RNA, 19 nt, Artificial Sequence
  Description of Artificial Sequence: Synthetic oligonucleotide
  Antisense strand to SEQ ID NO: 250988
uucagcaaacacccucucc

SEQ ID NO: 250990 - RNA, 19 nt, Artificial Sequence
  Description of Artificial Sequence: Synthetic oligonucleotide
  Sense strand starting at position 3981 SEQ ID NO: 3228
cugaaauaguaagaggguu

SEQ ID NO: 250991 - RNA, 19 nt, Artificial Sequence
  Description of Artificial Sequence: Synthetic oligonucleotide
  Antisense strand to SEQ ID NO: 250990
aacccucuuacuauuucag

SEQ ID NO: 250992 - RNA, 19 nt, Artificial Sequence
  Description of Artificial Sequence: Synthetic oligonucleotide
  Sense strand starting at position 97 SEQ ID NO: 3232
uacugucaggauugcugaa

SEQ ID NO: 250993 - RNA, 19 nt, Artificial Sequence
  Description of Artificial Sequence: Synthetic oligonucleotide
  Antisense strand to SEQ ID NO: 250992
uucagcaauccugacagua

SEQ ID NO: 250994 - RNA, 19 nt, Artificial Sequence
  Description of Artificial Sequence: Synthetic oligonucleotide
  Sense strand starting at position 109 SEQ ID NO: 3232
ugcugaacuccaugaaaua

SEQ ID NO: 250995 - RNA, 19 nt, Artificial Sequence
  Description of Artificial Sequence: Synthetic oligonucleotide
  Antisense strand to SEQ ID NO: 250994
uauuucauggaguucagca

SEQ ID NO: 250996 - RNA, 19 nt, Artificial Sequence
  Description of Artificial Sequence: Synthetic oligonucleotide
  Sense strand starting at position 443 SEQ ID NO: 3232
gggugaugucuuugaaauu

SEQ ID NO: 250997 - RNA, 19 nt, Artificial Sequence
  Description of Artificial Sequence: Synthetic oligonucleotide
  Antisense strand to SEQ ID NO: 250996
aauuucaaagacaucaccc

SEQ ID NO: 250998 - RNA, 19 nt, Artificial Sequence
  Description of Artificial Sequence: Synthetic oligonucleotide
  Sense strand starting at position 575 SEQ ID NO: 3232
ccaucaaagugagcuuuaa

SEQ ID NO: 250999 - RNA, 19 nt, Artificial Sequence
  Description of Artificial Sequence: Synthetic oligonucleotide
  Antisense strand to SEQ ID NO: 250998
uuaaagcucacuuugaugg

SEQ ID NO: 251000 - RNA, 19 nt, Artificial Sequence
  Description of Artificial Sequence: Synthetic oligonucleotide
  Sense strand starting at position 579 SEQ ID NO: 3232
caaagugagcuuuaaaguc

SEQ ID NO: 251001 - RNA, 19 nt, Artificial Sequence
  Description of Artificial Sequence: Synthetic oligonucleotide
  Antisense strand to SEQ ID NO: 251000
gacuuuaaagcucacuuug

SEQ ID NO: 251002 - RNA, 19 nt, Artificial Sequence
  Description of Artificial Sequence: Synthetic oligonucleotide
  Sense strand starting at position 774 SEQ ID NO: 3232
uucucuaacuugguuuaga

SEQ ID NO: 251003 - RNA, 19 nt, Artificial Sequence
  Description of Artificial Sequence: Synthetic oligonucleotide
  Antisense strand to SEQ ID NO: 251002
ucuaaaccaaguuagagaa

SEQ ID NO: 251004 - RNA, 19 nt, Artificial Sequence
  Description of Artificial Sequence: Synthetic oligonucleotide
  Sense strand starting at position 775 SEQ ID NO: 3232
ucucuaacuugguuuagag

SEQ ID NO: 251005 - RNA, 19 nt, Artificial Sequence
  Description of Artificial Sequence: Synthetic oligonucleotide
  Antisense strand to SEQ ID NO: 251004
cucuaaaccaaguuagaga

SEQ ID NO: 251006 - RNA, 19 nt, Artificial Sequence
  Description of Artificial Sequence: Synthetic oligonucleotide
  Sense strand starting at position 777 SEQ ID NO: 3232
ucuaacuugguuuagaguu

SEQ ID NO: 251007 - RNA, 19 nt, Artificial Sequence
  Description of Artificial Sequence: Synthetic oligonucleotide
  Antisense strand to SEQ ID NO: 251006
aacucuaaaccaaguuaga

SEQ ID NO: 251008 - RNA, 19 nt, Artificial Sequence
  Description of Artificial Sequence: Synthetic oligonucleotide
  Sense strand starting at position 805 SEQ ID NO: 3232
gauguuacucugcaggaca

SEQ ID NO: 251009 - RNA, 19 nt, Artificial Sequence
  Description of Artificial Sequence: Synthetic oligonucleotide
  Antisense strand to SEQ ID NO: 251008
uguccugcagaguaacauc

SEQ ID NO: 251010 - RNA, 19 nt, Artificial Sequence
  Description of Artificial Sequence: Synthetic oligonucleotide
  Sense strand starting at position 819 SEQ ID NO: 3232
ggacauacugacugggagu

SEQ ID NO: 251011 - RNA, 19 nt, Artificial Sequence
  Description of Artificial Sequence: Synthetic oligonucleotide
  Antisense strand to SEQ ID NO: 251010
acucccagucaguaugucc

SEQ ID NO: 251012 - RNA, 19 nt, Artificial Sequence
  Description of Artificial Sequence: Synthetic oligonucleotide
  Sense strand starting at position 925 SEQ ID NO: 3232
acagcuucugaauagucaa

SEQ ID NO: 251013 - RNA, 19 nt, Artificial Sequence
  Description of Artificial Sequence: Synthetic oligonucleotide
  Antisense strand to SEQ ID NO: 251012
uugacuauucagaagcugu

SEQ ID NO: 251014 - RNA, 19 nt, Artificial Sequence
  Description of Artificial Sequence: Synthetic oligonucleotide
  Sense strand starting at position 928 SEQ ID NO: 3232
gcuucugaauagucaagag

SEQ ID NO: 251015 - RNA, 19 nt, Artificial Sequence
  Description of Artificial Sequence: Synthetic oligonucleotide
  Antisense strand to SEQ ID NO: 251014
cucuugacuauucagaagc

SEQ ID NO: 251016 - RNA, 19 nt, Artificial Sequence
  Description of Artificial Sequence: Synthetic oligonucleotide
  Sense strand starting at position 1123 SEQ ID NO: 3232
uuacacuuccacggacaaa

SEQ ID NO: 251017 - RNA, 19 nt, Artificial Sequence
  Description of Artificial Sequence: Synthetic oligonucleotide
  Antisense strand to SEQ ID NO: 251016
uuuguccguggaaguguaa

SEQ ID NO: 251018 - RNA, 19 nt, Artificial Sequence
  Description of Artificial Sequence: Synthetic oligonucleotide
  Sense strand starting at position 1208 SEQ ID NO: 3232
cuggaucugcacugaaagu

SEQ ID NO: 251019 - RNA, 19 nt, Artificial Sequence
  Description of Artificial Sequence: Synthetic oligonucleotide
  Antisense strand to SEQ ID NO: 251018
acuuucagugcagauccag

SEQ ID NO: 251020 - RNA, 19 nt, Artificial Sequence
  Description of Artificial Sequence: Synthetic oligonucleotide
  Sense strand starting at position 1214 SEQ ID NO: 3232
cugcacugaaagugagauu

SEQ ID NO: 251021 - RNA, 19 nt, Artificial Sequence
  Description of Artificial Sequence: Synthetic oligonucleotide
  Antisense strand to SEQ ID NO: 251020
aaucucacuuucagugcag

SEQ ID NO: 251022 - RNA, 19 nt, Artificial Sequence
  Description of Artificial Sequence: Synthetic oligonucleotide
  Sense strand starting at position 1217 SEQ ID NO: 3232
cacugaaagugagauuuaa

SEQ ID NO: 251023 - RNA, 19 nt, Artificial Sequence
  Description of Artificial Sequence: Synthetic oligonucleotide
  Antisense strand to SEQ ID NO: 251022
uuaaaucucacuuucagug

SEQ ID NO: 251024 - RNA, 19 nt, Artificial Sequence
  Description of Artificial Sequence: Synthetic oligonucleotide
  Sense strand starting at position 1386 SEQ ID NO: 3232
agugauggcuuccuaagaa

SEQ ID NO: 251025 - RNA, 19 nt, Artificial Sequence
  Description of Artificial Sequence: Synthetic oligonucleotide
  Antisense strand to SEQ ID NO: 251024
uucuuaggaagccaucacu

SEQ ID NO: 251026 - RNA, 19 nt, Artificial Sequence
  Description of Artificial Sequence: Synthetic oligonucleotide
  Sense strand starting at position 1804 SEQ ID NO: 3232
aaggucugacaaggcauua

SEQ ID NO: 251027 - RNA, 19 nt, Artificial Sequence
  Description of Artificial Sequence: Synthetic oligonucleotide
  Antisense strand to SEQ ID NO: 251026
uaaugccuugucagaccuu

SEQ ID NO: 251028 - RNA, 19 nt, Artificial Sequence
  Description of Artificial Sequence: Synthetic oligonucleotide
  Sense strand starting at position 2058 SEQ ID NO: 3232
ggcuccuuccuggaacaca

SEQ ID NO: 251029 - RNA, 19 nt, Artificial Sequence
  Description of Artificial Sequence: Synthetic oligonucleotide
  Antisense strand to SEQ ID NO: 251028
uguguuccaggaaggagcc

SEQ ID NO: 251030 - RNA, 19 nt, Artificial Sequence
  Description of Artificial Sequence: Synthetic oligonucleotide
  Sense strand starting at position 2268 SEQ ID NO: 3232
gcaauuuaguggcugguaa

SEQ ID NO: 251031 - RNA, 19 nt, Artificial Sequence
  Description of Artificial Sequence: Synthetic oligonucleotide
  Antisense strand to SEQ ID NO: 251030
uuaccagccacuaaauugc

SEQ ID NO: 251032 - RNA, 19 nt, Artificial Sequence
  Description of Artificial Sequence: Synthetic oligonucleotide
  Sense strand starting at position 2275 SEQ ID NO: 3232
aguggcugguaaucauaga

SEQ ID NO: 251033 - RNA, 19 nt, Artificial Sequence
  Description of Artificial Sequence: Synthetic oligonucleotide
  Antisense strand to SEQ ID NO: 251032
ucuaugauuaccagccacu

SEQ ID NO: 251034 - RNA, 19 nt, Artificial Sequence
  Description of Artificial Sequence: Synthetic oligonucleotide
  Sense strand starting at position 2283 SEQ ID NO: 3232
guaaucauagaggaugcuu

SEQ ID NO: 251035 - RNA, 19 nt, Artificial Sequence
  Description of Artificial Sequence: Synthetic oligonucleotide
  Antisense strand to SEQ ID NO: 251034
aagcauccucuaugauuac

SEQ ID NO: 251036 - RNA, 19 nt, Artificial Sequence
  Description of Artificial Sequence: Synthetic oligonucleotide
  Sense strand starting at position 2306 SEQ ID NO: 3232
aacggagagcuuugaggaa

SEQ ID NO: 251037 - RNA, 19 nt, Artificial Sequence
  Description of Artificial Sequence: Synthetic oligonucleotide
  Antisense strand to SEQ ID NO: 251036
uuccucaaagcucuccguu

SEQ ID NO: 251038 - RNA, 19 nt, Artificial Sequence
  Description of Artificial Sequence: Synthetic oligonucleotide
  Sense strand starting at position 2364 SEQ ID NO: 3232
ggaggaauguuucuucuac

SEQ ID NO: 251039 - RNA, 19 nt, Artificial Sequence
  Description of Artificial Sequence: Synthetic oligonucleotide
  Antisense strand to SEQ ID NO: 251038
guagaagaaacauuccucc

SEQ ID NO: 251040 - RNA, 19 nt, Artificial Sequence
  Description of Artificial Sequence: Synthetic oligonucleotide
  Sense strand starting at position 2365 SEQ ID NO: 3232
gaggaauguuucuucuacu

SEQ ID NO: 251041 - RNA, 19 nt, Artificial Sequence
  Description of Artificial Sequence: Synthetic oligonucleotide
  Antisense strand to SEQ ID NO: 251040
aguagaagaaacauuccuc

SEQ ID NO: 251042 - RNA, 19 nt, Artificial Sequence
  Description of Artificial Sequence: Synthetic oligonucleotide
  Sense strand starting at position 2366 SEQ ID NO: 3232
aggaauguuucuucuacuc

SEQ ID NO: 251043 - RNA, 19 nt, Artificial Sequence
  Description of Artificial Sequence: Synthetic oligonucleotide
  Antisense strand to SEQ ID NO: 251042
gaguagaagaaacauuccu

SEQ ID NO: 251044 - RNA, 19 nt, Artificial Sequence
  Description of Artificial Sequence: Synthetic oligonucleotide
  Sense strand starting at position 2441 SEQ ID NO: 3232
ccugauauggauuguugua

SEQ ID NO: 251045 - RNA, 19 nt, Artificial Sequence
  Description of Artificial Sequence: Synthetic oligonucleotide
  Antisense strand to SEQ ID NO: 251044
uacaacaauccauaucagg

SEQ ID NO: 251046 - RNA, 19 nt, Artificial Sequence
  Description of Artificial Sequence: Synthetic oligonucleotide
  Sense strand starting at position 2443 SEQ ID NO: 3232
ugauauggauuguuguacu

SEQ ID NO: 251047 - RNA, 19 nt, Artificial Sequence
  Description of Artificial Sequence: Synthetic oligonucleotide
  Antisense strand to SEQ ID NO: 251046
aguacaacaauccauauca

SEQ ID NO: 251048 - RNA, 19 nt, Artificial Sequence
  Description of Artificial Sequence: Synthetic oligonucleotide
  Sense strand starting at position 2923 SEQ ID NO: 3232
aguaaaccuguuggauaua

SEQ ID NO: 251049 - RNA, 19 nt, Artificial Sequence
  Description of Artificial Sequence: Synthetic oligonucleotide
  Antisense strand to SEQ ID NO: 251048
uauauccaacagguuuacu

SEQ ID NO: 251050 - RNA, 19 nt, Artificial Sequence
  Description of Artificial Sequence: Synthetic oligonucleotide
  Sense strand starting at position 3204 SEQ ID NO: 3232
cuggaagaaaguggucuuu

SEQ ID NO: 251051 - RNA, 19 nt, Artificial Sequence
  Description of Artificial Sequence: Synthetic oligonucleotide
  Antisense strand to SEQ ID NO: 251050
aaagaccacuuucuuccag

SEQ ID NO: 251052 - RNA, 19 nt, Artificial Sequence
  Description of Artificial Sequence: Synthetic oligonucleotide
  Sense strand starting at position 3283 SEQ ID NO: 3232
ccauguuuacaggaugcua

SEQ ID NO: 251053 - RNA, 19 nt, Artificial Sequence
  Description of Artificial Sequence: Synthetic oligonucleotide
  Antisense strand to SEQ ID NO: 251052
uagcauccuguaaacaugg

SEQ ID NO: 251054 - RNA, 19 nt, Artificial Sequence
  Description of Artificial Sequence: Synthetic oligonucleotide
  Sense strand starting at position 3294 SEQ ID NO: 3232
ggaugcuaugaagguuuaa

SEQ ID NO: 251055 - RNA, 19 nt, Artificial Sequence
  Description of Artificial Sequence: Synthetic oligonucleotide
  Antisense strand to SEQ ID NO: 251054
uuaaaccuucauagcaucc

SEQ ID NO: 251056 - RNA, 19 nt, Artificial Sequence
  Description of Artificial Sequence: Synthetic oligonucleotide
  Sense strand starting at position 3488 SEQ ID NO: 3232
agucaacagugaucacaau

SEQ ID NO: 251057 - RNA, 19 nt, Artificial Sequence
  Description of Artificial Sequence: Synthetic oligonucleotide
  Antisense strand to SEQ ID NO: 251056
auugugaucacuguugacu

SEQ ID NO: 251058 - RNA, 19 nt, Artificial Sequence
  Description of Artificial Sequence: Synthetic oligonucleotide
  Sense strand starting at position 3499 SEQ ID NO: 3232
aucacaauccuggguagga

SEQ ID NO: 251059 - RNA, 19 nt, Artificial Sequence
  Description of Artificial Sequence: Synthetic oligonucleotide
  Antisense strand to SEQ ID NO: 251058
uccuacccaggauugugau

SEQ ID NO: 251060 - RNA, 19 nt, Artificial Sequence
  Description of Artificial Sequence: Synthetic oligonucleotide
  Sense strand starting at position 3500 SEQ ID NO: 3232
ucacaauccuggguaggaa

SEQ ID NO: 251061 - RNA, 19 nt, Artificial Sequence
  Description of Artificial Sequence: Synthetic oligonucleotide
  Antisense strand to SEQ ID NO: 251060
uuccuacccaggauuguga

SEQ ID NO: 251062 - RNA, 19 nt, Artificial Sequence
  Description of Artificial Sequence: Synthetic oligonucleotide
  Sense strand starting at position 3579 SEQ ID NO: 3232
agcagugugcauguguuua

SEQ ID NO: 251063 - RNA, 19 nt, Artificial Sequence
  Description of Artificial Sequence: Synthetic oligonucleotide
  Antisense strand to SEQ ID NO: 251062
uaaacacaugcacacugcu

SEQ ID NO: 251064 - RNA, 19 nt, Artificial Sequence
  Description of Artificial Sequence: Synthetic oligonucleotide
  Sense strand starting at position 3589 SEQ ID NO: 3232
auguguuuauuaccaacau

SEQ ID NO: 251065 - RNA, 19 nt, Artificial Sequence
  Description of Artificial Sequence: Synthetic oligonucleotide
  Antisense strand to SEQ ID NO: 251064
auguugguaauaaacacau

SEQ ID NO: 251066 - RNA, 19 nt, Artificial Sequence
  Description of Artificial Sequence: Synthetic oligonucleotide
  Sense strand starting at position 3612 SEQ ID NO: 3232
gguagaacacgucaguauu

SEQ ID NO: 251067 - RNA, 19 nt, Artificial Sequence
  Description of Artificial Sequence: Synthetic oligonucleotide
  Antisense strand to SEQ ID NO: 251066
aauacugacguguucuacc

SEQ ID NO: 251068 - RNA, 19 nt, Artificial Sequence
  Description of Artificial Sequence: Synthetic oligonucleotide
  Sense strand starting at position 3880 SEQ ID NO: 3232
aagcaauuaggaugaguga

SEQ ID NO: 251069 - RNA, 19 nt, Artificial Sequence
  Description of Artificial Sequence: Synthetic oligonucleotide
  Antisense strand to SEQ ID NO: 251068
ucacucauccuaauugcuu

SEQ ID NO: 251070 - RNA, 19 nt, Artificial Sequence
  Description of Artificial Sequence: Synthetic oligonucleotide
  Sense strand starting at position 3939 SEQ ID NO: 3232
agaacucuggccugggaau

SEQ ID NO: 251071 - RNA, 19 nt, Artificial Sequence
  Description of Artificial Sequence: Synthetic oligonucleotide
  Antisense strand to SEQ ID NO: 251070
auucccaggccagaguucu

SEQ ID NO: 251072 - RNA, 19 nt, Artificial Sequence
  Description of Artificial Sequence: Synthetic oligonucleotide
  Sense strand starting at position 35 SEQ ID NO: 3233
acgccaauaccuggaggaa

SEQ ID NO: 251073 - RNA, 19 nt, Artificial Sequence
  Description of Artificial Sequence: Synthetic oligonucleotide
  Antisense strand to SEQ ID NO: 251072
uuccuccagguauuggcgu

SEQ ID NO: 251074 - RNA, 19 nt, Artificial Sequence
  Description of Artificial Sequence: Synthetic oligonucleotide
  Sense strand starting at position 84 SEQ ID NO: 3233
gcaacaaugguacaguuaa

SEQ ID NO: 251075 - RNA, 19 nt, Artificial Sequence
  Description of Artificial Sequence: Synthetic oligonucleotide
  Antisense strand to SEQ ID NO: 251074
uuaacuguaccauuguugc

SEQ ID NO: 251076 - RNA, 19 nt, Artificial Sequence
  Description of Artificial Sequence: Synthetic oligonucleotide
  Sense strand starting at position 189 SEQ ID NO: 3233
ggcaaauccugcuuuggau

SEQ ID NO: 251077 - RNA, 19 nt, Artificial Sequence
  Description of Artificial Sequence: Synthetic oligonucleotide
  Antisense strand to SEQ ID NO: 251076
auccaaagcaggauuugcc

SEQ ID NO: 251078 - RNA, 19 nt, Artificial Sequence
  Description of Artificial Sequence: Synthetic oligonucleotide
  Sense strand starting at position 251 SEQ ID NO: 3233
cugucacuaagcgaagaaa

SEQ ID NO: 251079 - RNA, 19 nt, Artificial Sequence
  Description of Artificial Sequence: Synthetic oligonucleotide
  Antisense strand to SEQ ID NO: 251078
uuucuucgcuuagugacag

SEQ ID NO: 251080 - RNA, 19 nt, Artificial Sequence
  Description of Artificial Sequence: Synthetic oligonucleotide
  Sense strand starting at position 376 SEQ ID NO: 3233
gacugucuucuuggacuuu

SEQ ID NO: 251081 - RNA, 19 nt, Artificial Sequence
  Description of Artificial Sequence: Synthetic oligonucleotide
  Antisense strand to SEQ ID NO: 251080
aaaguccaagaagacaguc

SEQ ID NO: 251082 - RNA, 19 nt, Artificial Sequence
  Description of Artificial Sequence: Synthetic oligonucleotide
  Sense strand starting at position 449 SEQ ID NO: 3233
ccaucuuuccugcagaaug

SEQ ID NO: 251083 - RNA, 19 nt, Artificial Sequence
  Description of Artificial Sequence: Synthetic oligonucleotide
  Antisense strand to SEQ ID NO: 251082
cauucugcaggaaagaugg

SEQ ID NO: 251084 - RNA, 19 nt, Artificial Sequence
  Description of Artificial Sequence: Synthetic oligonucleotide
  Sense strand starting at position 774 SEQ ID NO: 3233
cauagaggguguucucuuu

SEQ ID NO: 251085 - RNA, 19 nt, Artificial Sequence
  Description of Artificial Sequence: Synthetic oligonucleotide
  Antisense strand to SEQ ID NO: 251084
aaagagaacacccucuaug

SEQ ID NO: 251086 - RNA, 19 nt, Artificial Sequence
  Description of Artificial Sequence: Synthetic oligonucleotide
  Sense strand starting at position 784 SEQ ID NO: 3233
guucucuuucuggagggau

SEQ ID NO: 251087 - RNA, 19 nt, Artificial Sequence
  Description of Artificial Sequence: Synthetic oligonucleotide
  Antisense strand to SEQ ID NO: 251086
aucccuccagaaagagaac

SEQ ID NO: 251088 - RNA, 19 nt, Artificial Sequence
  Description of Artificial Sequence: Synthetic oligonucleotide
  Sense strand starting at position 1041 SEQ ID NO: 3233
cagguaucaaguggguaga

SEQ ID NO: 251089 - RNA, 19 nt, Artificial Sequence
  Description of Artificial Sequence: Synthetic oligonucleotide
  Antisense strand to SEQ ID NO: 251088
ucuacccacuugauaccug

SEQ ID NO: 251090 - RNA, 19 nt, Artificial Sequence
  Description of Artificial Sequence: Synthetic oligonucleotide
  Sense strand starting at position 1457 SEQ ID NO: 3233
ccaggucuccuccagggau

SEQ ID NO: 251091 - RNA, 19 nt, Artificial Sequence
  Description of Artificial Sequence: Synthetic oligonucleotide
  Antisense strand to SEQ ID NO: 251090
aucccuggaggagaccugg

SEQ ID NO: 251092 - RNA, 19 nt, Artificial Sequence
  Description of Artificial Sequence: Synthetic oligonucleotide
  Sense strand starting at position 1461 SEQ ID NO: 3233
gucuccuccagggauggua

SEQ ID NO: 251093 - RNA, 19 nt, Artificial Sequence
  Description of Artificial Sequence: Synthetic oligonucleotide
  Antisense strand to SEQ ID NO: 251092
uaccaucccuggaggagac

SEQ ID NO: 251094 - RNA, 19 nt, Artificial Sequence
  Description of Artificial Sequence: Synthetic oligonucleotide
  Sense strand starting at position 1813 SEQ ID NO: 3233
gggacuucuccacgggagu

SEQ ID NO: 251095 - RNA, 19 nt, Artificial Sequence
  Description of Artificial Sequence: Synthetic oligonucleotide
  Antisense strand to SEQ ID NO: 251094
acucccguggagaaguccc

SEQ ID NO: 251096 - RNA, 19 nt, Artificial Sequence
  Description of Artificial Sequence: Synthetic oligonucleotide
  Sense strand starting at position 1814 SEQ ID NO: 3233
ggacuucuccacgggagua

SEQ ID NO: 251097 - RNA, 19 nt, Artificial Sequence
  Description of Artificial Sequence: Synthetic oligonucleotide
  Antisense strand to SEQ ID NO: 251096
uacucccguggagaagucc

SEQ ID NO: 251098 - RNA, 19 nt, Artificial Sequence
  Description of Artificial Sequence: Synthetic oligonucleotide
  Sense strand starting at position 2165 SEQ ID NO: 3233
gcgugugaccauguaaggu

SEQ ID NO: 251099 - RNA, 19 nt, Artificial Sequence
  Description of Artificial Sequence: Synthetic oligonucleotide
  Antisense strand to SEQ ID NO: 251098
accuuacauggucacacgc

SEQ ID NO: 251100 - RNA, 19 nt, Artificial Sequence
  Description of Artificial Sequence: Synthetic oligonucleotide
  Sense strand starting at position 2467 SEQ ID NO: 3233
ccacuagaugccuggcaga

SEQ ID NO: 251101 - RNA, 19 nt, Artificial Sequence
  Description of Artificial Sequence: Synthetic oligonucleotide
  Antisense strand to SEQ ID NO: 251100
ucugccaggcaucuagugg

SEQ ID NO: 251102 - RNA, 19 nt, Artificial Sequence
  Description of Artificial Sequence: Synthetic oligonucleotide
  Sense strand starting at position 3149 SEQ ID NO: 3233
cagagcuucgauggugaga

SEQ ID NO: 251103 - RNA, 19 nt, Artificial Sequence
  Description of Artificial Sequence: Synthetic oligonucleotide
  Antisense strand to SEQ ID NO: 251102
ucucaccaucgaagcucug

SEQ ID NO: 251104 - RNA, 19 nt, Artificial Sequence
  Description of Artificial Sequence: Synthetic oligonucleotide
  Sense strand starting at position 3357 SEQ ID NO: 3233
agaauucggugcuuaagag

SEQ ID NO: 251105 - RNA, 19 nt, Artificial Sequence
  Description of Artificial Sequence: Synthetic oligonucleotide
  Antisense strand to SEQ ID NO: 251104
cucuuaagcaccgaauucu

SEQ ID NO: 251106 - RNA, 19 nt, Artificial Sequence
  Description of Artificial Sequence: Synthetic oligonucleotide
  Sense strand starting at position 3358 SEQ ID NO: 3233
gaauucggugcuuaagaga

SEQ ID NO: 251107 - RNA, 19 nt, Artificial Sequence
  Description of Artificial Sequence: Synthetic oligonucleotide
  Antisense strand to SEQ ID NO: 251106
ucucuuaagcaccgaauuc

SEQ ID NO: 251108 - RNA, 19 nt, Artificial Sequence
  Description of Artificial Sequence: Synthetic oligonucleotide
  Sense strand starting at position 3363 SEQ ID NO: 3233
cggugcuuaagagaugaga

SEQ ID NO: 251109 - RNA, 19 nt, Artificial Sequence
  Description of Artificial Sequence: Synthetic oligonucleotide
  Antisense strand to SEQ ID NO: 251108
ucucaucucuuaagcaccg

SEQ ID NO: 251110 - RNA, 19 nt, Artificial Sequence
  Description of Artificial Sequence: Synthetic oligonucleotide
  Sense strand starting at position 3365 SEQ ID NO: 3233
gugcuuaagagaugagaaa

SEQ ID NO: 251111 - RNA, 19 nt, Artificial Sequence
  Description of Artificial Sequence: Synthetic oligonucleotide
  Antisense strand to SEQ ID NO: 251110
uuucucaucucuuaagcac

SEQ ID NO: 251112 - RNA, 19 nt, Artificial Sequence
  Description of Artificial Sequence: Synthetic oligonucleotide
  Sense strand starting at position 3376 SEQ ID NO: 3233
augagaaacuucguucuac

SEQ ID NO: 251113 - RNA, 19 nt, Artificial Sequence
  Description of Artificial Sequence: Synthetic oligonucleotide
  Antisense strand to SEQ ID NO: 251112
guagaacgaaguuucucau

SEQ ID NO: 251114 - RNA, 19 nt, Artificial Sequence
  Description of Artificial Sequence: Synthetic oligonucleotide
  Sense strand starting at position 3377 SEQ ID NO: 3233
ugagaaacuucguucuacc

SEQ ID NO: 251115 - RNA, 19 nt, Artificial Sequence
  Description of Artificial Sequence: Synthetic oligonucleotide
  Antisense strand to SEQ ID NO: 251114
gguagaacgaaguuucuca

SEQ ID NO: 251116 - RNA, 19 nt, Artificial Sequence
  Description of Artificial Sequence: Synthetic oligonucleotide
  Sense strand starting at position 3386 SEQ ID NO: 3233
ucguucuaccaguaaugga

SEQ ID NO: 251117 - RNA, 19 nt, Artificial Sequence
  Description of Artificial Sequence: Synthetic oligonucleotide
  Antisense strand to SEQ ID NO: 251116
uccauuacugguagaacga

SEQ ID NO: 251118 - RNA, 19 nt, Artificial Sequence
  Description of Artificial Sequence: Synthetic oligonucleotide
  Sense strand starting at position 3444 SEQ ID NO: 3233
ucccuuugacuauguagga

SEQ ID NO: 251119 - RNA, 19 nt, Artificial Sequence
  Description of Artificial Sequence: Synthetic oligonucleotide
  Antisense strand to SEQ ID NO: 251118
uccuacauagucaaaggga

SEQ ID NO: 251120 - RNA, 19 nt, Artificial Sequence
  Description of Artificial Sequence: Synthetic oligonucleotide
  Sense strand starting at position 3453 SEQ ID NO: 3233
cuauguaggacucgauaac

SEQ ID NO: 251121 - RNA, 19 nt, Artificial Sequence
  Description of Artificial Sequence: Synthetic oligonucleotide
  Antisense strand to SEQ ID NO: 251120
guuaucgaguccuacauag

SEQ ID NO: 251122 - RNA, 19 nt, Artificial Sequence
  Description of Artificial Sequence: Synthetic oligonucleotide
  Sense strand starting at position 3594 SEQ ID NO: 3233
uggaauucuguuggccaga

SEQ ID NO: 251123 - RNA, 19 nt, Artificial Sequence
  Description of Artificial Sequence: Synthetic oligonucleotide
  Antisense strand to SEQ ID NO: 251122
ucuggccaacagaauucca

SEQ ID NO: 251124 - RNA, 19 nt, Artificial Sequence
  Description of Artificial Sequence: Synthetic oligonucleotide
  Sense strand starting at position 3595 SEQ ID NO: 3233
ggaauucuguuggccagau

SEQ ID NO: 251125 - RNA, 19 nt, Artificial Sequence
  Description of Artificial Sequence: Synthetic oligonucleotide
  Antisense strand to SEQ ID NO: 251124
aucuggccaacagaauucc

SEQ ID NO: 251126 - RNA, 19 nt, Artificial Sequence
  Description of Artificial Sequence: Synthetic oligonucleotide
  Sense strand starting at position 3596 SEQ ID NO: 3233
gaauucuguuggccagauu

SEQ ID NO: 251127 - RNA, 19 nt, Artificial Sequence
  Description of Artificial Sequence: Synthetic oligonucleotide
  Antisense strand to SEQ ID NO: 251126
aaucuggccaacagaauuc

SEQ ID NO: 251128 - RNA, 19 nt, Artificial Sequence
  Description of Artificial Sequence: Synthetic oligonucleotide
  Sense strand starting at position 3628 SEQ ID NO: 3233
guaugaguauaauuggaac

SEQ ID NO: 251129 - RNA, 19 nt, Artificial Sequence
  Description of Artificial Sequence: Synthetic oligonucleotide
  Antisense strand to SEQ ID NO: 251128
guuccaauuauacucauac

SEQ ID NO: 251130 - RNA, 19 nt, Artificial Sequence
  Description of Artificial Sequence: Synthetic oligonucleotide
  Sense strand starting at position 3677 SEQ ID NO: 3233
gcaauuagaugugcaagga

SEQ ID NO: 251131 - RNA, 19 nt, Artificial Sequence
  Description of Artificial Sequence: Synthetic oligonucleotide
  Antisense strand to SEQ ID NO: 251130
uccuugcacaucuaauugc

SEQ ID NO: 251132 - RNA, 19 nt, Artificial Sequence
  Description of Artificial Sequence: Synthetic oligonucleotide
  Sense strand starting at position 3717 SEQ ID NO: 3233
acgacuuugagcgaauuac

SEQ ID NO: 251133 - RNA, 19 nt, Artificial Sequence
  Description of Artificial Sequence: Synthetic oligonucleotide
  Antisense strand to SEQ ID NO: 251132
guaauucgcucaaagucgu

SEQ ID NO: 251134 - RNA, 19 nt, Artificial Sequence
  Description of Artificial Sequence: Synthetic oligonucleotide
  Sense strand starting at position 3726 SEQ ID NO: 3233
agcgaauuacugggucaga

SEQ ID NO: 251135 - RNA, 19 nt, Artificial Sequence
  Description of Artificial Sequence: Synthetic oligonucleotide
  Antisense strand to SEQ ID NO: 251134
ucugacccaguaauucgcu

SEQ ID NO: 251136 - RNA, 19 nt, Artificial Sequence
  Description of Artificial Sequence: Synthetic oligonucleotide
  Sense strand starting at position 3727 SEQ ID NO: 3233
gcgaauuacugggucagaa

SEQ ID NO: 251137 - RNA, 19 nt, Artificial Sequence
  Description of Artificial Sequence: Synthetic oligonucleotide
  Antisense strand to SEQ ID NO: 251136
uucugacccaguaauucgc

SEQ ID NO: 251138 - RNA, 19 nt, Artificial Sequence
  Description of Artificial Sequence: Synthetic oligonucleotide
  Sense strand starting at position 3736 SEQ ID NO: 3233
ugggucagaacuuguaucu

SEQ ID NO: 251139 - RNA, 19 nt, Artificial Sequence
  Description of Artificial Sequence: Synthetic oligonucleotide
  Antisense strand to SEQ ID NO: 251138
agauacaaguucugaccca

SEQ ID NO: 251140 - RNA, 19 nt, Artificial Sequence
  Description of Artificial Sequence: Synthetic oligonucleotide
  Sense strand starting at position 3777 SEQ ID NO: 3233
gugggauccgcguugucua

SEQ ID NO: 251141 - RNA, 19 nt, Artificial Sequence
  Description of Artificial Sequence: Synthetic oligonucleotide
  Antisense strand to SEQ ID NO: 251140
uagacaacgcggaucccac

SEQ ID NO: 251142 - RNA, 19 nt, Artificial Sequence
  Description of Artificial Sequence: Synthetic oligonucleotide
  Sense strand starting at position 3784 SEQ ID NO: 3233
ccgcguugucuaguuguua

SEQ ID NO: 251143 - RNA, 19 nt, Artificial Sequence
  Description of Artificial Sequence: Synthetic oligonucleotide
  Antisense strand to SEQ ID NO: 251142
uaacaacuagacaacgcgg

SEQ ID NO: 251144 - RNA, 19 nt, Artificial Sequence
  Description of Artificial Sequence: Synthetic oligonucleotide
  Sense strand starting at position 3795 SEQ ID NO: 3233
aguuguuaugaagagucaa

SEQ ID NO: 251145 - RNA, 19 nt, Artificial Sequence
  Description of Artificial Sequence: Synthetic oligonucleotide
  Antisense strand to SEQ ID NO: 251144
uugacucuucauaacaacu

SEQ ID NO: 251146 - RNA, 19 nt, Artificial Sequence
  Description of Artificial Sequence: Synthetic oligonucleotide
  Sense strand starting at position 3846 SEQ ID NO: 3233
ugacacuauuaggugaaua

SEQ ID NO: 251147 - RNA, 19 nt, Artificial Sequence
  Description of Artificial Sequence: Synthetic oligonucleotide
  Antisense strand to SEQ ID NO: 251146
uauucaccuaauaguguca

SEQ ID NO: 251148 - RNA, 19 nt, Artificial Sequence
  Description of Artificial Sequence: Synthetic oligonucleotide
  Sense strand starting at position 3890 SEQ ID NO: 3233
ccacuugagcuauguaaac

SEQ ID NO: 251149 - RNA, 19 nt, Artificial Sequence
  Description of Artificial Sequence: Synthetic oligonucleotide
  Antisense strand to SEQ ID NO: 251148
guuuacauagcucaagugg

SEQ ID NO: 251150 - RNA, 19 nt, Artificial Sequence
  Description of Artificial Sequence: Synthetic oligonucleotide
  Sense strand starting at position 3938 SEQ ID NO: 3233
aauagaaucuuggagauag

SEQ ID NO: 251151 - RNA, 19 nt, Artificial Sequence
  Description of Artificial Sequence: Synthetic oligonucleotide
  Antisense strand to SEQ ID NO: 251150
cuaucuccaagauucuauu

SEQ ID NO: 251152 - RNA, 19 nt, Artificial Sequence
  Description of Artificial Sequence: Synthetic oligonucleotide
  Sense strand starting at position 201 SEQ ID NO: 3230
cagguaucaaguggguaga

SEQ ID NO: 251153 - RNA, 19 nt, Artificial Sequence
  Description of Artificial Sequence: Synthetic oligonucleotide
  Antisense strand to SEQ ID NO: 251152
ucuacccacuugauaccug

SEQ ID NO: 251154 - RNA, 19 nt, Artificial Sequence
  Description of Artificial Sequence: Synthetic oligonucleotide
  Sense strand starting at position 617 SEQ ID NO: 3230
ccaggucuccuccagggau

SEQ ID NO: 251155 - RNA, 19 nt, Artificial Sequence
  Description of Artificial Sequence: Synthetic oligonucleotide
  Antisense strand to SEQ ID NO: 251154
aucccuggaggagaccugg

SEQ ID NO: 251156 - RNA, 19 nt, Artificial Sequence
  Description of Artificial Sequence: Synthetic oligonucleotide
  Sense strand starting at position 621 SEQ ID NO: 3230
gucuccuccagggauggua

SEQ ID NO: 251157 - RNA, 19 nt, Artificial Sequence
  Description of Artificial Sequence: Synthetic oligonucleotide
  Antisense strand to SEQ ID NO: 251156
uaccaucccuggaggagac

SEQ ID NO: 251158 - RNA, 19 nt, Artificial Sequence
  Description of Artificial Sequence: Synthetic oligonucleotide
  Sense strand starting at position 973 SEQ ID NO: 3230
gggacuucuccacgggagu

SEQ ID NO: 251159 - RNA, 19 nt, Artificial Sequence
  Description of Artificial Sequence: Synthetic oligonucleotide
  Antisense strand to SEQ ID NO: 251158
acucccguggagaaguccc

SEQ ID NO: 251160 - RNA, 19 nt, Artificial Sequence
  Description of Artificial Sequence: Synthetic oligonucleotide
  Sense strand starting at position 974 SEQ ID NO: 3230
ggacuucuccacgggagua

SEQ ID NO: 251161 - RNA, 19 nt, Artificial Sequence
  Description of Artificial Sequence: Synthetic oligonucleotide
  Antisense strand to SEQ ID NO: 251160
uacucccguggagaagucc

SEQ ID NO: 251162 - RNA, 19 nt, Artificial Sequence
  Description of Artificial Sequence: Synthetic oligonucleotide
  Sense strand starting at position 1325 SEQ ID NO: 3230
gcgugugaccauguaaggu

SEQ ID NO: 251163 - RNA, 19 nt, Artificial Sequence
  Description of Artificial Sequence: Synthetic oligonucleotide
  Antisense strand to SEQ ID NO: 251162
accuuacauggucacacgc

SEQ ID NO: 251164 - RNA, 19 nt, Artificial Sequence
  Description of Artificial Sequence: Synthetic oligonucleotide
  Sense strand starting at position 1627 SEQ ID NO: 3230
ccacuagaugccuggcaga

SEQ ID NO: 251165 - RNA, 19 nt, Artificial Sequence
  Description of Artificial Sequence: Synthetic oligonucleotide
  Antisense strand to SEQ ID NO: 251164
ucugccaggcaucuagugg

SEQ ID NO: 251166 - RNA, 19 nt, Artificial Sequence
  Description of Artificial Sequence: Synthetic oligonucleotide
  Sense strand starting at position 2309 SEQ ID NO: 3230
cagagcuucgauggugaga

SEQ ID NO: 251167 - RNA, 19 nt, Artificial Sequence
  Description of Artificial Sequence: Synthetic oligonucleotide
  Antisense strand to SEQ ID NO: 251166
ucucaccaucgaagcucug

SEQ ID NO: 251168 - RNA, 19 nt, Artificial Sequence
  Description of Artificial Sequence: Synthetic oligonucleotide
  Sense strand starting at position 2517 SEQ ID NO: 3230
agaauucggugcuuaagag

SEQ ID NO: 251169 - RNA, 19 nt, Artificial Sequence
  Description of Artificial Sequence: Synthetic oligonucleotide
  Antisense strand to SEQ ID NO: 251168
cucuuaagcaccgaauucu

SEQ ID NO: 251170 - RNA, 19 nt, Artificial Sequence
  Description of Artificial Sequence: Synthetic oligonucleotide
  Sense strand starting at position 2518 SEQ ID NO: 3230
gaauucggugcuuaagaga

SEQ ID NO: 251171 - RNA, 19 nt, Artificial Sequence
  Description of Artificial Sequence: Synthetic oligonucleotide
  Antisense strand to SEQ ID NO: 251170
ucucuuaagcaccgaauuc

SEQ ID NO: 251172 - RNA, 19 nt, Artificial Sequence
  Description of Artificial Sequence: Synthetic oligonucleotide
  Sense strand starting at position 2523 SEQ ID NO: 3230
cggugcuuaagagaugaga

SEQ ID NO: 251173 - RNA, 19 nt, Artificial Sequence
  Description of Artificial Sequence: Synthetic oligonucleotide
  Antisense strand to SEQ ID NO: 251172
ucucaucucuuaagcaccg

SEQ ID NO: 251174 - RNA, 19 nt, Artificial Sequence
  Description of Artificial Sequence: Synthetic oligonucleotide
  Sense strand starting at position 2525 SEQ ID NO: 3230
gugcuuaagagaugagaaa

SEQ ID NO: 251175 - RNA, 19 nt, Artificial Sequence
  Description of Artificial Sequence: Synthetic oligonucleotide
  Antisense strand to SEQ ID NO: 251174
uuucucaucucuuaagcac

SEQ ID NO: 251176 - RNA, 19 nt, Artificial Sequence
  Description of Artificial Sequence: Synthetic oligonucleotide
  Sense strand starting at position 2536 SEQ ID NO: 3230
augagaaacuucguucuac

SEQ ID NO: 251177 - RNA, 19 nt, Artificial Sequence
  Description of Artificial Sequence: Synthetic oligonucleotide
  Antisense strand to SEQ ID NO: 251176
guagaacgaaguuucucau

SEQ ID NO: 251178 - RNA, 19 nt, Artificial Sequence
  Description of Artificial Sequence: Synthetic oligonucleotide
  Sense strand starting at position 2537 SEQ ID NO: 3230
ugagaaacuucguucuacc

SEQ ID NO: 251179 - RNA, 19 nt, Artificial Sequence
  Description of Artificial Sequence: Synthetic oligonucleotide
  Antisense strand to SEQ ID NO: 251178
gguagaacgaaguuucuca

SEQ ID NO: 251180 - RNA, 19 nt, Artificial Sequence
  Description of Artificial Sequence: Synthetic oligonucleotide
  Sense strand starting at position 2546 SEQ ID NO: 3230
ucguucuaccaguaaugga

SEQ ID NO: 251181 - RNA, 19 nt, Artificial Sequence
  Description of Artificial Sequence: Synthetic oligonucleotide
  Antisense strand to SEQ ID NO: 251180
uccauuacugguagaacga

SEQ ID NO: 251182 - RNA, 19 nt, Artificial Sequence
  Description of Artificial Sequence: Synthetic oligonucleotide
  Sense strand starting at position 2604 SEQ ID NO: 3230
ucccuuugacuauguagga

SEQ ID NO: 251183 - RNA, 19 nt, Artificial Sequence
  Description of Artificial Sequence: Synthetic oligonucleotide
  Antisense strand to SEQ ID NO: 251182
uccuacauagucaaaggga

SEQ ID NO: 251184 - RNA, 19 nt, Artificial Sequence
  Description of Artificial Sequence: Synthetic oligonucleotide
  Sense strand starting at position 2613 SEQ ID NO: 3230
cuauguaggacucgauaac

SEQ ID NO: 251185 - RNA, 19 nt, Artificial Sequence
  Description of Artificial Sequence: Synthetic oligonucleotide
  Antisense strand to SEQ ID NO: 251184
guuaucgaguccuacauag

SEQ ID NO: 251186 - RNA, 19 nt, Artificial Sequence
  Description of Artificial Sequence: Synthetic oligonucleotide
  Sense strand starting at position 2754 SEQ ID NO: 3230
uggaauucuguuggccaga

SEQ ID NO: 251187 - RNA, 19 nt, Artificial Sequence
  Description of Artificial Sequence: Synthetic oligonucleotide
  Antisense strand to SEQ ID NO: 251186
ucuggccaacagaauucca

SEQ ID NO: 251188 - RNA, 19 nt, Artificial Sequence
  Description of Artificial Sequence: Synthetic oligonucleotide
  Sense strand starting at position 2755 SEQ ID NO: 3230
ggaauucuguuggccagau

SEQ ID NO: 251189 - RNA, 19 nt, Artificial Sequence
  Description of Artificial Sequence: Synthetic oligonucleotide
  Antisense strand to SEQ ID NO: 251188
aucuggccaacagaauucc

SEQ ID NO: 251190 - RNA, 19 nt, Artificial Sequence
  Description of Artificial Sequence: Synthetic oligonucleotide
  Sense strand starting at position 2756 SEQ ID NO: 3230
gaauucuguuggccagauu

SEQ ID NO: 251191 - RNA, 19 nt, Artificial Sequence
  Description of Artificial Sequence: Synthetic oligonucleotide
  Antisense strand to SEQ ID NO: 251190
aaucuggccaacagaauuc

SEQ ID NO: 251192 - RNA, 19 nt, Artificial Sequence
  Description of Artificial Sequence: Synthetic oligonucleotide
  Sense strand starting at position 2788 SEQ ID NO: 3230
guaugaguauaauuggaac

SEQ ID NO: 251193 - RNA, 19 nt, Artificial Sequence
  Description of Artificial Sequence: Synthetic oligonucleotide
  Antisense strand to SEQ ID NO: 251192
guuccaauuauacucauac

SEQ ID NO: 251194 - RNA, 19 nt, Artificial Sequence
  Description of Artificial Sequence: Synthetic oligonucleotide
  Sense strand starting at position 2837 SEQ ID NO: 3230
gcaauuagaugugcaagga

SEQ ID NO: 251195 - RNA, 19 nt, Artificial Sequence
  Description of Artificial Sequence: Synthetic oligonucleotide
  Antisense strand to SEQ ID NO: 251194
uccuugcacaucuaauugc

SEQ ID NO: 251196 - RNA, 19 nt, Artificial Sequence
  Description of Artificial Sequence: Synthetic oligonucleotide
  Sense strand starting at position 2877 SEQ ID NO: 3230
acgacuuugagcgaauuac

SEQ ID NO: 251197 - RNA, 19 nt, Artificial Sequence
  Description of Artificial Sequence: Synthetic oligonucleotide
  Antisense strand to SEQ ID NO: 251196
guaauucgcucaaagucgu

SEQ ID NO: 251198 - RNA, 19 nt, Artificial Sequence
  Description of Artificial Sequence: Synthetic oligonucleotide
  Sense strand starting at position 2886 SEQ ID NO: 3230
agcgaauuacugggucaga

SEQ ID NO: 251199 - RNA, 19 nt, Artificial Sequence
  Description of Artificial Sequence: Synthetic oligonucleotide
  Antisense strand to SEQ ID NO: 251198
ucugacccaguaauucgcu

SEQ ID NO: 251200 - RNA, 19 nt, Artificial Sequence
  Description of Artificial Sequence: Synthetic oligonucleotide
  Sense strand starting at position 2887 SEQ ID NO: 3230
gcgaauuacugggucagaa

SEQ ID NO: 251201 - RNA, 19 nt, Artificial Sequence
  Description of Artificial Sequence: Synthetic oligonucleotide
  Antisense strand to SEQ ID NO: 251200
uucugacccaguaauucgc

SEQ ID NO: 251202 - RNA, 19 nt, Artificial Sequence
  Description of Artificial Sequence: Synthetic oligonucleotide
  Sense strand starting at position 2896 SEQ ID NO: 3230
ugggucagaacuuguaucu

SEQ ID NO: 251203 - RNA, 19 nt, Artificial Sequence
  Description of Artificial Sequence: Synthetic oligonucleotide
  Antisense strand to SEQ ID NO: 251202
agauacaaguucugaccca

SEQ ID NO: 251204 - RNA, 19 nt, Artificial Sequence
  Description of Artificial Sequence: Synthetic oligonucleotide
  Sense strand starting at position 2937 SEQ ID NO: 3230
gugggauccgcguugucua

SEQ ID NO: 251205 - RNA, 19 nt, Artificial Sequence
  Description of Artificial Sequence: Synthetic oligonucleotide
  Antisense strand to SEQ ID NO: 251204
uagacaacgcggaucccac

SEQ ID NO: 251206 - RNA, 19 nt, Artificial Sequence
  Description of Artificial Sequence: Synthetic oligonucleotide
  Sense strand starting at position 2955 SEQ ID NO: 3230
aguuguuaugaagagucaa

SEQ ID NO: 251207 - RNA, 19 nt, Artificial Sequence
  Description of Artificial Sequence: Synthetic oligonucleotide
  Antisense strand to SEQ ID NO: 251206
uugacucuucauaacaacu

SEQ ID NO: 251208 - RNA, 19 nt, Artificial Sequence
  Description of Artificial Sequence: Synthetic oligonucleotide
  Sense strand starting at position 3006 SEQ ID NO: 3230
ugacacuauuaggugaaua

SEQ ID NO: 251209 - RNA, 19 nt, Artificial Sequence
  Description of Artificial Sequence: Synthetic oligonucleotide
  Antisense strand to SEQ ID NO: 251208
uauucaccuaauaguguca

SEQ ID NO: 251210 - RNA, 19 nt, Artificial Sequence
  Description of Artificial Sequence: Synthetic oligonucleotide
  Sense strand starting at position 3050 SEQ ID NO: 3230
ccacuugagcuauguaaac

SEQ ID NO: 251211 - RNA, 19 nt, Artificial Sequence
  Description of Artificial Sequence: Synthetic oligonucleotide
  Antisense strand to SEQ ID NO: 251210
guuuacauagcucaagugg

SEQ ID NO: 251212 - RNA, 19 nt, Artificial Sequence
  Description of Artificial Sequence: Synthetic oligonucleotide
  Sense strand starting at position 3098 SEQ ID NO: 3230
aauagaaucuuggagauag

SEQ ID NO: 251213 - RNA, 19 nt, Artificial Sequence
  Description of Artificial Sequence: Synthetic oligonucleotide
  Antisense strand to SEQ ID NO: 251212
cuaucuccaagauucuauu

SEQ ID NO: 251214 - RNA, 19 nt, Artificial Sequence
  Description of Artificial Sequence: Synthetic oligonucleotide
  Sense strand starting at position 3391 SEQ ID NO: 3230
auaggacauaucgguuaac

SEQ ID NO: 251215 - RNA, 19 nt, Artificial Sequence
  Description of Artificial Sequence: Synthetic oligonucleotide
  Antisense strand to SEQ ID NO: 251214
guuaaccgauauguccuau

SEQ ID NO: 251216 - RNA, 19 nt, Artificial Sequence
  Description of Artificial Sequence: Synthetic oligonucleotide
  Sense strand starting at position 3394 SEQ ID NO: 3230
ggacauaucgguuaacgug

SEQ ID NO: 251217 - RNA, 19 nt, Artificial Sequence
  Description of Artificial Sequence: Synthetic oligonucleotide
  Antisense strand to SEQ ID NO: 251216
cacguuaaccgauaugucc

SEQ ID NO: 251218 - RNA, 19 nt, Artificial Sequence
  Description of Artificial Sequence: Synthetic oligonucleotide
  Sense strand starting at position 3401 SEQ ID NO: 3230
ucgguuaacgugaguuuga

SEQ ID NO: 251219 - RNA, 19 nt, Artificial Sequence
  Description of Artificial Sequence: Synthetic oligonucleotide
  Antisense strand to SEQ ID NO: 251218
ucaaacucacguuaaccga

SEQ ID NO: 251220 - RNA, 19 nt, Artificial Sequence
  Description of Artificial Sequence: Synthetic oligonucleotide
  Sense strand starting at position 3549 SEQ ID NO: 3230
gauacccacgcuuggaaau

SEQ ID NO: 251221 - RNA, 19 nt, Artificial Sequence
  Description of Artificial Sequence: Synthetic oligonucleotide
  Antisense strand to SEQ ID NO: 251220
auuuccaagcguggguauc

SEQ ID NO: 251222 - RNA, 19 nt, Artificial Sequence
  Description of Artificial Sequence: Synthetic oligonucleotide
  Sense strand starting at position 3550 SEQ ID NO: 3230
auacccacgcuuggaaaua

SEQ ID NO: 251223 - RNA, 19 nt, Artificial Sequence
  Description of Artificial Sequence: Synthetic oligonucleotide
  Antisense strand to SEQ ID NO: 251222
uauuuccaagcguggguau

SEQ ID NO: 251224 - RNA, 19 nt, Artificial Sequence
  Description of Artificial Sequence: Synthetic oligonucleotide
  Sense strand starting at position 3561 SEQ ID NO: 3230
uggaaauacuaaguaaguu

SEQ ID NO: 251225 - RNA, 19 nt, Artificial Sequence
  Description of Artificial Sequence: Synthetic oligonucleotide
  Antisense strand to SEQ ID NO: 251224
aacuuacuuaguauuucca

SEQ ID NO: 251226 - RNA, 19 nt, Artificial Sequence
  Description of Artificial Sequence: Synthetic oligonucleotide
  Sense strand starting at position 3742 SEQ ID NO: 3230
ggaggcuuccauugagacu

SEQ ID NO: 251227 - RNA, 19 nt, Artificial Sequence
  Description of Artificial Sequence: Synthetic oligonucleotide
  Antisense strand to SEQ ID NO: 251226
agucucaauggaagccucc

SEQ ID NO: 251228 - RNA, 19 nt, Artificial Sequence
  Description of Artificial Sequence: Synthetic oligonucleotide
  Sense strand starting at position 3853 SEQ ID NO: 3230
ccaagcuuuguagaauauu

SEQ ID NO: 251229 - RNA, 19 nt, Artificial Sequence
  Description of Artificial Sequence: Synthetic oligonucleotide
  Antisense strand to SEQ ID NO: 251228
aauauucuacaaagcuugg

SEQ ID NO: 251230 - RNA, 19 nt, Artificial Sequence
  Description of Artificial Sequence: Synthetic oligonucleotide
  Sense strand starting at position 3903 SEQ ID NO: 3230
ggcauucugaaaggcacau

SEQ ID NO: 251231 - RNA, 19 nt, Artificial Sequence
  Description of Artificial Sequence: Synthetic oligonucleotide
  Antisense strand to SEQ ID NO: 251230
augugccuuucagaaugcc

SEQ ID NO: 251232 - RNA, 19 nt, Artificial Sequence
  Description of Artificial Sequence: Synthetic oligonucleotide
  Sense strand starting at position 227 SEQ ID NO: 3231
ccaggucuccuccagggau

SEQ ID NO: 251233 - RNA, 19 nt, Artificial Sequence
  Description of Artificial Sequence: Synthetic oligonucleotide
  Antisense strand to SEQ ID NO: 251232
aucccuggaggagaccugg

SEQ ID NO: 251234 - RNA, 19 nt, Artificial Sequence
  Description of Artificial Sequence: Synthetic oligonucleotide
  Sense strand starting at position 231 SEQ ID NO: 3231
gucuccuccagggauggua

SEQ ID NO: 251235 - RNA, 19 nt, Artificial Sequence
  Description of Artificial Sequence: Synthetic oligonucleotide
  Antisense strand to SEQ ID NO: 251234
uaccaucccuggaggagac

SEQ ID NO: 251236 - RNA, 19 nt, Artificial Sequence
  Description of Artificial Sequence: Synthetic oligonucleotide
  Sense strand starting at position 583 SEQ ID NO: 3231
gggacuucuccacgggagu

SEQ ID NO: 251237 - RNA, 19 nt, Artificial Sequence
  Description of Artificial Sequence: Synthetic oligonucleotide
  Antisense strand to SEQ ID NO: 251236
acucccguggagaaguccc

SEQ ID NO: 251238 - RNA, 19 nt, Artificial Sequence
  Description of Artificial Sequence: Synthetic oligonucleotide
  Sense strand starting at position 584 SEQ ID NO: 3231
ggacuucuccacgggagua

SEQ ID NO: 251239 - RNA, 19 nt, Artificial Sequence
  Description of Artificial Sequence: Synthetic oligonucleotide
  Antisense strand to SEQ ID NO: 251238
uacucccguggagaagucc

SEQ ID NO: 251240 - RNA, 19 nt, Artificial Sequence
  Description of Artificial Sequence: Synthetic oligonucleotide
  Sense strand starting at position 935 SEQ ID NO: 3231
gcgugugaccauguaaggu

SEQ ID NO: 251241 - RNA, 19 nt, Artificial Sequence
  Description of Artificial Sequence: Synthetic oligonucleotide
  Antisense strand to SEQ ID NO: 251240
accuuacauggucacacgc

SEQ ID NO: 251242 - RNA, 19 nt, Artificial Sequence
  Description of Artificial Sequence: Synthetic oligonucleotide
  Sense strand starting at position 2127 SEQ ID NO: 3231
agaauucggugcuuaagag

SEQ ID NO: 251243 - RNA, 19 nt, Artificial Sequence
  Description of Artificial Sequence: Synthetic oligonucleotide
  Antisense strand to SEQ ID NO: 251242
cucuuaagcaccgaauucu

SEQ ID NO: 251244 - RNA, 19 nt, Artificial Sequence
  Description of Artificial Sequence: Synthetic oligonucleotide
  Sense strand starting at position 2128 SEQ ID NO: 3231
gaauucggugcuuaagaga

SEQ ID NO: 251245 - RNA, 19 nt, Artificial Sequence
  Description of Artificial Sequence: Synthetic oligonucleotide
  Antisense strand to SEQ ID NO: 251244
ucucuuaagcaccgaauuc

SEQ ID NO: 251246 - RNA, 19 nt, Artificial Sequence
  Description of Artificial Sequence: Synthetic oligonucleotide
  Sense strand starting at position 2133 SEQ ID NO: 3231
cggugcuuaagagaugaga

SEQ ID NO: 251247 - RNA, 19 nt, Artificial Sequence
  Description of Artificial Sequence: Synthetic oligonucleotide
  Antisense strand to SEQ ID NO: 251246
ucucaucucuuaagcaccg

SEQ ID NO: 251248 - RNA, 19 nt, Artificial Sequence
  Description of Artificial Sequence: Synthetic oligonucleotide
  Sense strand starting at position 2135 SEQ ID NO: 3231
gugcuuaagagaugagaaa

SEQ ID NO: 251249 - RNA, 19 nt, Artificial Sequence
  Description of Artificial Sequence: Synthetic oligonucleotide
  Antisense strand to SEQ ID NO: 251248
uuucucaucucuuaagcac

SEQ ID NO: 251250 - RNA, 19 nt, Artificial Sequence
  Description of Artificial Sequence: Synthetic oligonucleotide
  Sense strand starting at position 2146 SEQ ID NO: 3231
augagaaacuucguucuac

SEQ ID NO: 251251 - RNA, 19 nt, Artificial Sequence
  Description of Artificial Sequence: Synthetic oligonucleotide
  Antisense strand to SEQ ID NO: 251250
guagaacgaaguuucucau

SEQ ID NO: 251252 - RNA, 19 nt, Artificial Sequence
  Description of Artificial Sequence: Synthetic oligonucleotide
  Sense strand starting at position 2147 SEQ ID NO: 3231
ugagaaacuucguucuacc

SEQ ID NO: 251253 - RNA, 19 nt, Artificial Sequence
  Description of Artificial Sequence: Synthetic oligonucleotide
  Antisense strand to SEQ ID NO: 251252
gguagaacgaaguuucuca

SEQ ID NO: 251254 - RNA, 19 nt, Artificial Sequence
  Description of Artificial Sequence: Synthetic oligonucleotide
  Sense strand starting at position 2156 SEQ ID NO: 3231
ucguucuaccaguaaugga

SEQ ID NO: 251255 - RNA, 19 nt, Artificial Sequence
  Description of Artificial Sequence: Synthetic oligonucleotide
  Antisense strand to SEQ ID NO: 251254
uccauuacugguagaacga

SEQ ID NO: 251256 - RNA, 19 nt, Artificial Sequence
  Description of Artificial Sequence: Synthetic oligonucleotide
  Sense strand starting at position 2214 SEQ ID NO: 3231
ucccuuugacuauguagga

SEQ ID NO: 251257 - RNA, 19 nt, Artificial Sequence
  Description of Artificial Sequence: Synthetic oligonucleotide
  Antisense strand to SEQ ID NO: 251256
uccuacauagucaaaggga

SEQ ID NO: 251258 - RNA, 19 nt, Artificial Sequence
  Description of Artificial Sequence: Synthetic oligonucleotide
  Sense strand starting at position 2223 SEQ ID NO: 3231
cuauguaggacucgauaac

SEQ ID NO: 251259 - RNA, 19 nt, Artificial Sequence
  Description of Artificial Sequence: Synthetic oligonucleotide
  Antisense strand to SEQ ID NO: 251258
guuaucgaguccuacauag

SEQ ID NO: 251260 - RNA, 19 nt, Artificial Sequence
  Description of Artificial Sequence: Synthetic oligonucleotide
  Sense strand starting at position 2364 SEQ ID NO: 3231
uggaauucuguuggccaga

SEQ ID NO: 251261 - RNA, 19 nt, Artificial Sequence
  Description of Artificial Sequence: Synthetic oligonucleotide
  Antisense strand to SEQ ID NO: 251260
ucuggccaacagaauucca

SEQ ID NO: 251262 - RNA, 19 nt, Artificial Sequence
  Description of Artificial Sequence: Synthetic oligonucleotide
  Sense strand starting at position 2365 SEQ ID NO: 3231
ggaauucuguuggccagau

SEQ ID NO: 251263 - RNA, 19 nt, Artificial Sequence
  Description of Artificial Sequence: Synthetic oligonucleotide
  Antisense strand to SEQ ID NO: 251262
aucuggccaacagaauucc

SEQ ID NO: 251264 - RNA, 19 nt, Artificial Sequence
  Description of Artificial Sequence: Synthetic oligonucleotide
  Sense strand starting at position 2398 SEQ ID NO: 3231
guaugaguauaauuggaac

SEQ ID NO: 251265 - RNA, 19 nt, Artificial Sequence
  Description of Artificial Sequence: Synthetic oligonucleotide
  Antisense strand to SEQ ID NO: 251264
guuccaauuauacucauac

SEQ ID NO: 251266 - RNA, 19 nt, Artificial Sequence
  Description of Artificial Sequence: Synthetic oligonucleotide
  Sense strand starting at position 2447 SEQ ID NO: 3231
gcaauuagaugugcaagga

SEQ ID NO: 251267 - RNA, 19 nt, Artificial Sequence
  Description of Artificial Sequence: Synthetic oligonucleotide
  Antisense strand to SEQ ID NO: 251266
uccuugcacaucuaauugc

SEQ ID NO: 251268 - RNA, 19 nt, Artificial Sequence
  Description of Artificial Sequence: Synthetic oligonucleotide
  Sense strand starting at position 2487 SEQ ID NO: 3231
acgacuuugagcgaauuac

SEQ ID NO: 251269 - RNA, 19 nt, Artificial Sequence
  Description of Artificial Sequence: Synthetic oligonucleotide
  Antisense strand to SEQ ID NO: 251268
guaauucgcucaaagucgu

SEQ ID NO: 251270 - RNA, 19 nt, Artificial Sequence
  Description of Artificial Sequence: Synthetic oligonucleotide
  Sense strand starting at position 2496 SEQ ID NO: 3231
agcgaauuacugggucaga

SEQ ID NO: 251271 - RNA, 19 nt, Artificial Sequence
  Description of Artificial Sequence: Synthetic oligonucleotide
  Antisense strand to SEQ ID NO: 251270
ucugacccaguaauucgcu

SEQ ID NO: 251272 - RNA, 19 nt, Artificial Sequence
  Description of Artificial Sequence: Synthetic oligonucleotide
  Sense strand starting at position 2497 SEQ ID NO: 3231
gcgaauuacugggucagaa

SEQ ID NO: 251273 - RNA, 19 nt, Artificial Sequence
  Description of Artificial Sequence: Synthetic oligonucleotide
  Antisense strand to SEQ ID NO: 251272
uucugacccaguaauucgc

SEQ ID NO: 251274 - RNA, 19 nt, Artificial Sequence
  Description of Artificial Sequence: Synthetic oligonucleotide
  Sense strand starting at position 2506 SEQ ID NO: 3231
ugggucagaacuuguaucu

SEQ ID NO: 251275 - RNA, 19 nt, Artificial Sequence
  Description of Artificial Sequence: Synthetic oligonucleotide
  Antisense strand to SEQ ID NO: 251274
agauacaaguucugaccca

SEQ ID NO: 251276 - RNA, 19 nt, Artificial Sequence
  Description of Artificial Sequence: Synthetic oligonucleotide
  Sense strand starting at position 2547 SEQ ID NO: 3231
gugggauccgcguugucua

SEQ ID NO: 251277 - RNA, 19 nt, Artificial Sequence
  Description of Artificial Sequence: Synthetic oligonucleotide
  Antisense strand to SEQ ID NO: 251276
uagacaacgcggaucccac

SEQ ID NO: 251278 - RNA, 19 nt, Artificial Sequence
  Description of Artificial Sequence: Synthetic oligonucleotide
  Sense strand starting at position 2565 SEQ ID NO: 3231
aguuguuaugaagagucaa

SEQ ID NO: 251279 - RNA, 19 nt, Artificial Sequence
  Description of Artificial Sequence: Synthetic oligonucleotide
  Antisense strand to SEQ ID NO: 251278
uugacucuucauaacaacu

SEQ ID NO: 251280 - RNA, 19 nt, Artificial Sequence
  Description of Artificial Sequence: Synthetic oligonucleotide
  Sense strand starting at position 2616 SEQ ID NO: 3231
ugacacuauuaggugaaua

SEQ ID NO: 251281 - RNA, 19 nt, Artificial Sequence
  Description of Artificial Sequence: Synthetic oligonucleotide
  Antisense strand to SEQ ID NO: 251280
uauucaccuaauaguguca

SEQ ID NO: 251282 - RNA, 19 nt, Artificial Sequence
  Description of Artificial Sequence: Synthetic oligonucleotide
  Sense strand starting at position 3001 SEQ ID NO: 3231
auaggacauaucgguuaac

SEQ ID NO: 251283 - RNA, 19 nt, Artificial Sequence
  Description of Artificial Sequence: Synthetic oligonucleotide
  Antisense strand to SEQ ID NO: 251282
guuaaccgauauguccuau

SEQ ID NO: 251284 - RNA, 19 nt, Artificial Sequence
  Description of Artificial Sequence: Synthetic oligonucleotide
  Sense strand starting at position 3004 SEQ ID NO: 3231
ggacauaucgguuaacgug

SEQ ID NO: 251285 - RNA, 19 nt, Artificial Sequence
  Description of Artificial Sequence: Synthetic oligonucleotide
  Antisense strand to SEQ ID NO: 251284
cacguuaaccgauaugucc

SEQ ID NO: 251286 - RNA, 19 nt, Artificial Sequence
  Description of Artificial Sequence: Synthetic oligonucleotide
  Sense strand starting at position 3011 SEQ ID NO: 3231
ucgguuaacgugaguuuga

SEQ ID NO: 251287 - RNA, 19 nt, Artificial Sequence
  Description of Artificial Sequence: Synthetic oligonucleotide
  Antisense strand to SEQ ID NO: 251286
ucaaacucacguuaaccga

SEQ ID NO: 251288 - RNA, 19 nt, Artificial Sequence
  Description of Artificial Sequence: Synthetic oligonucleotide
  Sense strand starting at position 3159 SEQ ID NO: 3231
gauacccacgcuuggaaau

SEQ ID NO: 251289 - RNA, 19 nt, Artificial Sequence
  Description of Artificial Sequence: Synthetic oligonucleotide
  Antisense strand to SEQ ID NO: 251288
auuuccaagcguggguauc

SEQ ID NO: 251290 - RNA, 19 nt, Artificial Sequence
  Description of Artificial Sequence: Synthetic oligonucleotide
  Sense strand starting at position 3160 SEQ ID NO: 3231
auacccacgcuuggaaaua

SEQ ID NO: 251291 - RNA, 19 nt, Artificial Sequence
  Description of Artificial Sequence: Synthetic oligonucleotide
  Antisense strand to SEQ ID NO: 251290
uauuuccaagcguggguau

SEQ ID NO: 251292 - RNA, 19 nt, Artificial Sequence
  Description of Artificial Sequence: Synthetic oligonucleotide
  Sense strand starting at position 3171 SEQ ID NO: 3231
uggaaauacuaaguaaguu

SEQ ID NO: 251293 - RNA, 19 nt, Artificial Sequence
  Description of Artificial Sequence: Synthetic oligonucleotide
  Antisense strand to SEQ ID NO: 251292
aacuuacuuaguauuucca

SEQ ID NO: 251294 - RNA, 19 nt, Artificial Sequence
  Description of Artificial Sequence: Synthetic oligonucleotide
  Sense strand starting at position 3352 SEQ ID NO: 3231
ggaggcuuccauugagacu

SEQ ID NO: 251295 - RNA, 19 nt, Artificial Sequence
  Description of Artificial Sequence: Synthetic oligonucleotide
  Antisense strand to SEQ ID NO: 251294
agucucaauggaagccucc

SEQ ID NO: 251296 - RNA, 19 nt, Artificial Sequence
  Description of Artificial Sequence: Synthetic oligonucleotide
  Sense strand starting at position 3463 SEQ ID NO: 3231
ccaagcuuuguagaauauu

SEQ ID NO: 251297 - RNA, 19 nt, Artificial Sequence
  Description of Artificial Sequence: Synthetic oligonucleotide
  Antisense strand to SEQ ID NO: 251296
aauauucuacaaagcuugg

SEQ ID NO: 251298 - RNA, 19 nt, Artificial Sequence
  Description of Artificial Sequence: Synthetic oligonucleotide
  Sense strand starting at position 3513 SEQ ID NO: 3231
ggcauucugaaaggcacau

SEQ ID NO: 251299 - RNA, 19 nt, Artificial Sequence
  Description of Artificial Sequence: Synthetic oligonucleotide
  Antisense strand to SEQ ID NO: 251298
augugccuuucagaaugcc

SEQ ID NO: 251300 - RNA, 19 nt, Artificial Sequence
  Description of Artificial Sequence: Synthetic oligonucleotide
  Sense strand starting at position 3643 SEQ ID NO: 3231
acaagagaacuuuggcagu

SEQ ID NO: 251301 - RNA, 19 nt, Artificial Sequence
  Description of Artificial Sequence: Synthetic oligonucleotide
  Antisense strand to SEQ ID NO: 251300
acugccaaaguucucuugu

SEQ ID NO: 251302 - RNA, 19 nt, Artificial Sequence
  Description of Artificial Sequence: Synthetic oligonucleotide
  Sense strand starting at position 3696 SEQ ID NO: 3231
accacuuacugguugauua

SEQ ID NO: 251303 - RNA, 19 nt, Artificial Sequence
  Description of Artificial Sequence: Synthetic oligonucleotide
  Antisense strand to SEQ ID NO: 251302
uaaucaaccaguaaguggu

SEQ ID NO: 251304 - RNA, 19 nt, Artificial Sequence
  Description of Artificial Sequence: Synthetic oligonucleotide
  Sense strand starting at position 3697 SEQ ID NO: 3231
ccacuuacugguugauuac

SEQ ID NO: 251305 - RNA, 19 nt, Artificial Sequence
  Description of Artificial Sequence: Synthetic oligonucleotide
  Antisense strand to SEQ ID NO: 251304
guaaucaaccaguaagugg

SEQ ID NO: 251306 - RNA, 19 nt, Artificial Sequence
  Description of Artificial Sequence: Synthetic oligonucleotide
  Sense strand starting at position 3753 SEQ ID NO: 3231
uccacaauccugugaggga

SEQ ID NO: 251307 - RNA, 19 nt, Artificial Sequence
  Description of Artificial Sequence: Synthetic oligonucleotide
  Antisense strand to SEQ ID NO: 251306
ucccucacaggauugugga

SEQ ID NO: 251308 - RNA, 19 nt, Artificial Sequence
  Description of Artificial Sequence: Synthetic oligonucleotide
  Sense strand starting at position 3905 SEQ ID NO: 3231
aucugucuucuccacaagu

SEQ ID NO: 251309 - RNA, 19 nt, Artificial Sequence
  Description of Artificial Sequence: Synthetic oligonucleotide
  Antisense strand to SEQ ID NO: 251308
acuuguggagaagacagau

SEQ ID NO: 251310 - RNA, 19 nt, Artificial Sequence
  Description of Artificial Sequence: Synthetic oligonucleotide
  Sense strand starting at position 3957 SEQ ID NO: 3231
aaugucaaucuuuggaagu

SEQ ID NO: 251311 - RNA, 19 nt, Artificial Sequence
  Description of Artificial Sequence: Synthetic oligonucleotide
  Antisense strand to SEQ ID NO: 251310
acuuccaaagauugacauu

SEQ ID NO: 251312 - RNA, 19 nt, Artificial Sequence
  Description of Artificial Sequence: Synthetic oligonucleotide
  Sense strand starting at position 826 SEQ ID NO: 3234
gagccauggcugcaauaaa

SEQ ID NO: 251313 - RNA, 19 nt, Artificial Sequence
  Description of Artificial Sequence: Synthetic oligonucleotide
  Antisense strand to SEQ ID NO: 251312
uuuauugcagccauggcuc

SEQ ID NO: 251314 - RNA, 19 nt, Artificial Sequence
  Description of Artificial Sequence: Synthetic oligonucleotide
  Sense strand starting at position 905 SEQ ID NO: 3234
acuugacuaucaucggaua

SEQ ID NO: 251315 - RNA, 19 nt, Artificial Sequence
  Description of Artificial Sequence: Synthetic oligonucleotide
  Antisense strand to SEQ ID NO: 251314
uauccgaugauagucaagu

SEQ ID NO: 251316 - RNA, 19 nt, Artificial Sequence
  Description of Artificial Sequence: Synthetic oligonucleotide
  Sense strand starting at position 906 SEQ ID NO: 3234
cuugacuaucaucggauau

SEQ ID NO: 251317 - RNA, 19 nt, Artificial Sequence
  Description of Artificial Sequence: Synthetic oligonucleotide
  Antisense strand to SEQ ID NO: 251316
auauccgaugauagucaag

SEQ ID NO: 251318 - RNA, 19 nt, Artificial Sequence
  Description of Artificial Sequence: Synthetic oligonucleotide
  Sense strand starting at position 908 SEQ ID NO: 3234
ugacuaucaucggauauac

SEQ ID NO: 251319 - RNA, 19 nt, Artificial Sequence
  Description of Artificial Sequence: Synthetic oligonucleotide
  Antisense strand to SEQ ID NO: 251318
guauauccgaugauaguca

SEQ ID NO: 251320 - RNA, 19 nt, Artificial Sequence
  Description of Artificial Sequence: Synthetic oligonucleotide
  Sense strand starting at position 989 SEQ ID NO: 3234
ucauuuauaugguggucaa

SEQ ID NO: 251321 - RNA, 19 nt, Artificial Sequence
  Description of Artificial Sequence: Synthetic oligonucleotide
  Antisense strand to SEQ ID NO: 251320
uugaccaccauauaaauga

SEQ ID NO: 251322 - RNA, 19 nt, Artificial Sequence
  Description of Artificial Sequence: Synthetic oligonucleotide
  Sense strand starting at position 1035 SEQ ID NO: 3234
aaaugaggcuccuggauuu

SEQ ID NO: 251323 - RNA, 19 nt, Artificial Sequence
  Description of Artificial Sequence: Synthetic oligonucleotide
  Antisense strand to SEQ ID NO: 251322
aaauccaggagccucauuu

SEQ ID NO: 251324 - RNA, 19 nt, Artificial Sequence
  Description of Artificial Sequence: Synthetic oligonucleotide
  Sense strand starting at position 1113 SEQ ID NO: 3234
cuggcguucggagaugaga

SEQ ID NO: 251325 - RNA, 19 nt, Artificial Sequence
  Description of Artificial Sequence: Synthetic oligonucleotide
  Antisense strand to SEQ ID NO: 251324
ucucaucuccgaacgccag

SEQ ID NO: 251326 - RNA, 19 nt, Artificial Sequence
  Description of Artificial Sequence: Synthetic oligonucleotide
  Sense strand starting at position 1319 SEQ ID NO: 3234
agcccuuucgcuuaaggaa

SEQ ID NO: 251327 - RNA, 19 nt, Artificial Sequence
  Description of Artificial Sequence: Synthetic oligonucleotide
  Antisense strand to SEQ ID NO: 251326
uuccuuaagcgaaagggcu

SEQ ID NO: 251328 - RNA, 19 nt, Artificial Sequence
  Description of Artificial Sequence: Synthetic oligonucleotide
  Sense strand starting at position 2161 SEQ ID NO: 3234
ucgagcgucuucucuuaga

SEQ ID NO: 251329 - RNA, 19 nt, Artificial Sequence
  Description of Artificial Sequence: Synthetic oligonucleotide
  Antisense strand to SEQ ID NO: 251328
ucuaagagaagacgcucga

SEQ ID NO: 251330 - RNA, 19 nt, Artificial Sequence
  Description of Artificial Sequence: Synthetic oligonucleotide
  Sense strand starting at position 2178 SEQ ID NO: 3234
gauaaacucugaguccuga

SEQ ID NO: 251331 - RNA, 19 nt, Artificial Sequence
  Description of Artificial Sequence: Synthetic oligonucleotide
  Antisense strand to SEQ ID NO: 251330
ucaggacucagaguuuauc

SEQ ID NO: 251332 - RNA, 19 nt, Artificial Sequence
  Description of Artificial Sequence: Synthetic oligonucleotide
  Sense strand starting at position 2382 SEQ ID NO: 3234
guugaaaugccagaaguag

SEQ ID NO: 251333 - RNA, 19 nt, Artificial Sequence
  Description of Artificial Sequence: Synthetic oligonucleotide
  Antisense strand to SEQ ID NO: 251332
cuacuucuggcauuucaac

SEQ ID NO: 251334 - RNA, 19 nt, Artificial Sequence
  Description of Artificial Sequence: Synthetic oligonucleotide
  Sense strand starting at position 2537 SEQ ID NO: 3234
cgaaguccagucgugcuaa

SEQ ID NO: 251335 - RNA, 19 nt, Artificial Sequence
  Description of Artificial Sequence: Synthetic oligonucleotide
  Antisense strand to SEQ ID NO: 251334
uuagcacgacuggacuucg

SEQ ID NO: 251336 - RNA, 19 nt, Artificial Sequence
  Description of Artificial Sequence: Synthetic oligonucleotide
  Sense strand starting at position 2625 SEQ ID NO: 3234
cacagaugucuauguggua

SEQ ID NO: 251337 - RNA, 19 nt, Artificial Sequence
  Description of Artificial Sequence: Synthetic oligonucleotide
  Antisense strand to SEQ ID NO: 251336
uaccacauagacaucugug

SEQ ID NO: 251338 - RNA, 19 nt, Artificial Sequence
  Description of Artificial Sequence: Synthetic oligonucleotide
  Sense strand starting at position 2634 SEQ ID NO: 3234
cuaugugguacacaaaguu

SEQ ID NO: 251339 - RNA, 19 nt, Artificial Sequence
  Description of Artificial Sequence: Synthetic oligonucleotide
  Antisense strand to SEQ ID NO: 251338
aacuuuguguaccacauag

SEQ ID NO: 251340 - RNA, 19 nt, Artificial Sequence
  Description of Artificial Sequence: Synthetic oligonucleotide
  Sense strand starting at position 2723 SEQ ID NO: 3234
uuuauuaagugcuucuagu

SEQ ID NO: 251341 - RNA, 19 nt, Artificial Sequence
  Description of Artificial Sequence: Synthetic oligonucleotide
  Antisense strand to SEQ ID NO: 251340
acuagaagcacuuaauaaa

SEQ ID NO: 251342 - RNA, 19 nt, Artificial Sequence
  Description of Artificial Sequence: Synthetic oligonucleotide
  Sense strand starting at position 2752 SEQ ID NO: 3234
gauagacacuaguagugau

SEQ ID NO: 251343 - RNA, 19 nt, Artificial Sequence
  Description of Artificial Sequence: Synthetic oligonucleotide
  Antisense strand to SEQ ID NO: 251342
aucacuacuagugucuauc

SEQ ID NO: 251344 - RNA, 19 nt, Artificial Sequence
  Description of Artificial Sequence: Synthetic oligonucleotide
  Sense strand starting at position 2764 SEQ ID NO: 3234
uagugauaagaguguugac

SEQ ID NO: 251345 - RNA, 19 nt, Artificial Sequence
  Description of Artificial Sequence: Synthetic oligonucleotide
  Antisense strand to SEQ ID NO: 251344
gucaacacucuuaucacua

SEQ ID NO: 251346 - RNA, 19 nt, Artificial Sequence
  Description of Artificial Sequence: Synthetic oligonucleotide
  Sense strand starting at position 2781 SEQ ID NO: 3234
acagauggucccuagcuca

SEQ ID NO: 251347 - RNA, 19 nt, Artificial Sequence
  Description of Artificial Sequence: Synthetic oligonucleotide
  Antisense strand to SEQ ID NO: 251346
ugagcuagggaccaucugu

SEQ ID NO: 251348 - RNA, 19 nt, Artificial Sequence
  Description of Artificial Sequence: Synthetic oligonucleotide
  Sense strand starting at position 2817 SEQ ID NO: 3234
accagaggaccauguguuu

SEQ ID NO: 251349 - RNA, 19 nt, Artificial Sequence
  Description of Artificial Sequence: Synthetic oligonucleotide
  Antisense strand to SEQ ID NO: 251348
aaacacaugguccucuggu

SEQ ID NO: 251350 - RNA, 19 nt, Artificial Sequence
  Description of Artificial Sequence: Synthetic oligonucleotide
  Sense strand starting at position 2828 SEQ ID NO: 3234
auguguuucccagaguaug

SEQ ID NO: 251351 - RNA, 19 nt, Artificial Sequence
  Description of Artificial Sequence: Synthetic oligonucleotide
  Antisense strand to SEQ ID NO: 251350
cauacucugggaaacacau

SEQ ID NO: 251352 - RNA, 19 nt, Artificial Sequence
  Description of Artificial Sequence: Synthetic oligonucleotide
  Sense strand starting at position 2836 SEQ ID NO: 3234
cccagaguauggucucaga

SEQ ID NO: 251353 - RNA, 19 nt, Artificial Sequence
  Description of Artificial Sequence: Synthetic oligonucleotide
  Antisense strand to SEQ ID NO: 251352
ucugagaccauacucuggg

SEQ ID NO: 251354 - RNA, 19 nt, Artificial Sequence
  Description of Artificial Sequence: Synthetic oligonucleotide
  Sense strand starting at position 2839 SEQ ID NO: 3234
agaguauggucucagaaac

SEQ ID NO: 251355 - RNA, 19 nt, Artificial Sequence
  Description of Artificial Sequence: Synthetic oligonucleotide
  Antisense strand to SEQ ID NO: 251354
guuucugagaccauacucu

SEQ ID NO: 251356 - RNA, 19 nt, Artificial Sequence
  Description of Artificial Sequence: Synthetic oligonucleotide
  Sense strand starting at position 2845 SEQ ID NO: 3234
uggucucagaaacgcaaua

SEQ ID NO: 251357 - RNA, 19 nt, Artificial Sequence
  Description of Artificial Sequence: Synthetic oligonucleotide
  Antisense strand to SEQ ID NO: 251356
uauugcguuucugagacca

SEQ ID NO: 251358 - RNA, 19 nt, Artificial Sequence
  Description of Artificial Sequence: Synthetic oligonucleotide
  Sense strand starting at position 2874 SEQ ID NO: 3234
gccagauaguaugugacaa

SEQ ID NO: 251359 - RNA, 19 nt, Artificial Sequence
  Description of Artificial Sequence: Synthetic oligonucleotide
  Antisense strand to SEQ ID NO: 251358
uugucacauacuaucuggc

SEQ ID NO: 251360 - RNA, 19 nt, Artificial Sequence
  Description of Artificial Sequence: Synthetic oligonucleotide
  Sense strand starting at position 2876 SEQ ID NO: 3234
cagauaguaugugacaaca

SEQ ID NO: 251361 - RNA, 19 nt, Artificial Sequence
  Description of Artificial Sequence: Synthetic oligonucleotide
  Antisense strand to SEQ ID NO: 251360
uguugucacauacuaucug

SEQ ID NO: 251362 - RNA, 19 nt, Artificial Sequence
  Description of Artificial Sequence: Synthetic oligonucleotide
  Sense strand starting at position 2878 SEQ ID NO: 3234
gauaguaugugacaacaga

SEQ ID NO: 251363 - RNA, 19 nt, Artificial Sequence
  Description of Artificial Sequence: Synthetic oligonucleotide
  Antisense strand to SEQ ID NO: 251362
ucuguugucacauacuauc

SEQ ID NO: 251364 - RNA, 19 nt, Artificial Sequence
  Description of Artificial Sequence: Synthetic oligonucleotide
  Sense strand starting at position 2970 SEQ ID NO: 3234
guagucaacgacuggcaau

SEQ ID NO: 251365 - RNA, 19 nt, Artificial Sequence
  Description of Artificial Sequence: Synthetic oligonucleotide
  Antisense strand to SEQ ID NO: 251364
auugccagucguugacuac

SEQ ID NO: 251366 - RNA, 19 nt, Artificial Sequence
  Description of Artificial Sequence: Synthetic oligonucleotide
  Sense strand starting at position 3043 SEQ ID NO: 3234
aauguagucgcacgaucuu

SEQ ID NO: 251367 - RNA, 19 nt, Artificial Sequence
  Description of Artificial Sequence: Synthetic oligonucleotide
  Antisense strand to SEQ ID NO: 251366
aagaucgugcgacuacauu

SEQ ID NO: 251368 - RNA, 19 nt, Artificial Sequence
  Description of Artificial Sequence: Synthetic oligonucleotide
  Sense strand starting at position 3126 SEQ ID NO: 3234
cgacuacagaugugcaauu

SEQ ID NO: 251369 - RNA, 19 nt, Artificial Sequence
  Description of Artificial Sequence: Synthetic oligonucleotide
  Antisense strand to SEQ ID NO: 251368
aauugcacaucuguagucg

SEQ ID NO: 251370 - RNA, 19 nt, Artificial Sequence
  Description of Artificial Sequence: Synthetic oligonucleotide
  Sense strand starting at position 3301 SEQ ID NO: 3234
agccaaauauguuccgcaa

SEQ ID NO: 251371 - RNA, 19 nt, Artificial Sequence
  Description of Artificial Sequence: Synthetic oligonucleotide
  Antisense strand to SEQ ID NO: 251370
uugcggaacauauuuggcu

SEQ ID NO: 251372 - RNA, 19 nt, Artificial Sequence
  Description of Artificial Sequence: Synthetic oligonucleotide
  Sense strand starting at position 3360 SEQ ID NO: 3234
gcagcuuucccaugccaac

SEQ ID NO: 251373 - RNA, 19 nt, Artificial Sequence
  Description of Artificial Sequence: Synthetic oligonucleotide
  Antisense strand to SEQ ID NO: 251372
guuggcaugggaaagcugc

SEQ ID NO: 251374 - RNA, 19 nt, Artificial Sequence
  Description of Artificial Sequence: Synthetic oligonucleotide
  Sense strand starting at position 3459 SEQ ID NO: 3234
ugacaaagugauggugagu

SEQ ID NO: 251375 - RNA, 19 nt, Artificial Sequence
  Description of Artificial Sequence: Synthetic oligonucleotide
  Antisense strand to SEQ ID NO: 251374
acucaccaucacuuuguca

SEQ ID NO: 251376 - RNA, 19 nt, Artificial Sequence
  Description of Artificial Sequence: Synthetic oligonucleotide
  Sense strand starting at position 3543 SEQ ID NO: 3234
aguuuaauuccacaaguca

SEQ ID NO: 251377 - RNA, 19 nt, Artificial Sequence
  Description of Artificial Sequence: Synthetic oligonucleotide
  Antisense strand to SEQ ID NO: 251376
ugacuuguggaauuaaacu

SEQ ID NO: 251378 - RNA, 19 nt, Artificial Sequence
  Description of Artificial Sequence: Synthetic oligonucleotide
  Sense strand starting at position 3558 SEQ ID NO: 3234
gucagaucaucuuaauuga

SEQ ID NO: 251379 - RNA, 19 nt, Artificial Sequence
  Description of Artificial Sequence: Synthetic oligonucleotide
  Antisense strand to SEQ ID NO: 251378
ucaauuaagaugaucugac

SEQ ID NO: 251380 - RNA, 19 nt, Artificial Sequence
  Description of Artificial Sequence: Synthetic oligonucleotide
  Sense strand starting at position 3580 SEQ ID NO: 3234
auguaagaugcugguuaug

SEQ ID NO: 251381 - RNA, 19 nt, Artificial Sequence
  Description of Artificial Sequence: Synthetic oligonucleotide
  Antisense strand to SEQ ID NO: 251380
cauaaccagcaucuuacau

SEQ ID NO: 251382 - RNA, 19 nt, Artificial Sequence
  Description of Artificial Sequence: Synthetic oligonucleotide
  Sense strand starting at position 3582 SEQ ID NO: 3234
guaagaugcugguuaugca

SEQ ID NO: 251383 - RNA, 19 nt, Artificial Sequence
  Description of Artificial Sequence: Synthetic oligonucleotide
  Antisense strand to SEQ ID NO: 251382
ugcauaaccagcaucuuac

SEQ ID NO: 251384 - RNA, 19 nt, Artificial Sequence
  Description of Artificial Sequence: Synthetic oligonucleotide
  Sense strand starting at position 3674 SEQ ID NO: 3234
ggcagcaggugauucuuau

SEQ ID NO: 251385 - RNA, 19 nt, Artificial Sequence
  Description of Artificial Sequence: Synthetic oligonucleotide
  Antisense strand to SEQ ID NO: 251384
auaagaaucaccugcugcc

SEQ ID NO: 251386 - RNA, 19 nt, Artificial Sequence
  Description of Artificial Sequence: Synthetic oligonucleotide
  Sense strand starting at position 3703 SEQ ID NO: 3234
gagaauguguuggacccaa

SEQ ID NO: 251387 - RNA, 19 nt, Artificial Sequence
  Description of Artificial Sequence: Synthetic oligonucleotide
  Antisense strand to SEQ ID NO: 251386
uuggguccaacacauucuc

SEQ ID NO: 251388 - RNA, 19 nt, Artificial Sequence
  Description of Artificial Sequence: Synthetic oligonucleotide
  Sense strand starting at position 3755 SEQ ID NO: 3234
ucugguaaacaguauaguu

SEQ ID NO: 251389 - RNA, 19 nt, Artificial Sequence
  Description of Artificial Sequence: Synthetic oligonucleotide
  Antisense strand to SEQ ID NO: 251388
aacuauacuguuuaccaga

SEQ ID NO: 251390 - RNA, 19 nt, Artificial Sequence
  Description of Artificial Sequence: Synthetic oligonucleotide
  Sense strand starting at position 3779 SEQ ID NO: 3234
aggaaagcauaugagauuu

SEQ ID NO: 251391 - RNA, 19 nt, Artificial Sequence
  Description of Artificial Sequence: Synthetic oligonucleotide
  Antisense strand to SEQ ID NO: 251390
aaaucucauaugcuuuccu

SEQ ID NO: 251392 - RNA, 19 nt, Artificial Sequence
  Description of Artificial Sequence: Synthetic oligonucleotide
  Sense strand starting at position 28 SEQ ID NO: 3235
ggaagaaacucuguaguga

SEQ ID NO: 251393 - RNA, 19 nt, Artificial Sequence
  Description of Artificial Sequence: Synthetic oligonucleotide
  Antisense strand to SEQ ID NO: 251392
ucacuacagaguuucuucc

SEQ ID NO: 251394 - RNA, 19 nt, Artificial Sequence
  Description of Artificial Sequence: Synthetic oligonucleotide
  Sense strand starting at position 89 SEQ ID NO: 3235
agccguaaccaggacagau

SEQ ID NO: 251395 - RNA, 19 nt, Artificial Sequence
  Description of Artificial Sequence: Synthetic oligonucleotide
  Antisense strand to SEQ ID NO: 251394
aucuguccugguuacggcu

SEQ ID NO: 251396 - RNA, 19 nt, Artificial Sequence
  Description of Artificial Sequence: Synthetic oligonucleotide
  Sense strand starting at position 102 SEQ ID NO: 3235
acagaucugucauugcaag

SEQ ID NO: 251397 - RNA, 19 nt, Artificial Sequence
  Description of Artificial Sequence: Synthetic oligonucleotide
  Antisense strand to SEQ ID NO: 251396
cuugcaaugacagaucugu

SEQ ID NO: 251398 - RNA, 19 nt, Artificial Sequence
  Description of Artificial Sequence: Synthetic oligonucleotide
  Sense strand starting at position 103 SEQ ID NO: 3235
cagaucugucauugcaaga

SEQ ID NO: 251399 - RNA, 19 nt, Artificial Sequence
  Description of Artificial Sequence: Synthetic oligonucleotide
  Antisense strand to SEQ ID NO: 251398
ucuugcaaugacagaucug

SEQ ID NO: 251400 - RNA, 19 nt, Artificial Sequence
  Description of Artificial Sequence: Synthetic oligonucleotide
  Sense strand starting at position 108 SEQ ID NO: 3235
cugucauugcaagaggagu

SEQ ID NO: 251401 - RNA, 19 nt, Artificial Sequence
  Description of Artificial Sequence: Synthetic oligonucleotide
  Antisense strand to SEQ ID NO: 251400
acuccucuugcaaugacag

SEQ ID NO: 251402 - RNA, 19 nt, Artificial Sequence
  Description of Artificial Sequence: Synthetic oligonucleotide
  Sense strand starting at position 205 SEQ ID NO: 3235
ggaaguuucgcaggcagca

SEQ ID NO: 251403 - RNA, 19 nt, Artificial Sequence
  Description of Artificial Sequence: Synthetic oligonucleotide
  Antisense strand to SEQ ID NO: 251402
ugcugccugcgaaacuucc

SEQ ID NO: 251404 - RNA, 19 nt, Artificial Sequence
  Description of Artificial Sequence: Synthetic oligonucleotide
  Sense strand starting at position 259 SEQ ID NO: 3235
cgccgaggucucgccuaau

SEQ ID NO: 251405 - RNA, 19 nt, Artificial Sequence
  Description of Artificial Sequence: Synthetic oligonucleotide
  Antisense strand to SEQ ID NO: 251404
auuaggcgagaccucggcg

SEQ ID NO: 251406 - RNA, 19 nt, Artificial Sequence
  Description of Artificial Sequence: Synthetic oligonucleotide
  Sense strand starting at position 262 SEQ ID NO: 3235
cgaggucucgccuaaugcu

SEQ ID NO: 251407 - RNA, 19 nt, Artificial Sequence
  Description of Artificial Sequence: Synthetic oligonucleotide
  Antisense strand to SEQ ID NO: 251406
agcauuaggcgagaccucg

SEQ ID NO: 251408 - RNA, 19 nt, Artificial Sequence
  Description of Artificial Sequence: Synthetic oligonucleotide
  Sense strand starting at position 270 SEQ ID NO: 3235
cgccuaaugcuacauaaau

SEQ ID NO: 251409 - RNA, 19 nt, Artificial Sequence
  Description of Artificial Sequence: Synthetic oligonucleotide
  Antisense strand to SEQ ID NO: 251408
auuuauguagcauuaggcg

SEQ ID NO: 251410 - RNA, 19 nt, Artificial Sequence
  Description of Artificial Sequence: Synthetic oligonucleotide
  Sense strand starting at position 1055 SEQ ID NO: 3235
gcucaucuaccucgaaagu

SEQ ID NO: 251411 - RNA, 19 nt, Artificial Sequence
  Description of Artificial Sequence: Synthetic oligonucleotide
  Antisense strand to SEQ ID NO: 251410
acuuucgagguagaugagc

SEQ ID NO: 251412 - RNA, 19 nt, Artificial Sequence
  Description of Artificial Sequence: Synthetic oligonucleotide
  Sense strand starting at position 1056 SEQ ID NO: 3235
cucaucuaccucgaaaguu

SEQ ID NO: 251413 - RNA, 19 nt, Artificial Sequence
  Description of Artificial Sequence: Synthetic oligonucleotide
  Antisense strand to SEQ ID NO: 251412
aacuuucgagguagaugag

SEQ ID NO: 251414 - RNA, 19 nt, Artificial Sequence
  Description of Artificial Sequence: Synthetic oligonucleotide
  Sense strand starting at position 1064 SEQ ID NO: 3235
ccucgaaaguuacuuggga

SEQ ID NO: 251415 - RNA, 19 nt, Artificial Sequence
  Description of Artificial Sequence: Synthetic oligonucleotide
  Antisense strand to SEQ ID NO: 251414
ucccaaguaacuuucgagg

SEQ ID NO: 251416 - RNA, 19 nt, Artificial Sequence
  Description of Artificial Sequence: Synthetic oligonucleotide
  Sense strand starting at position 1065 SEQ ID NO: 3235
cucgaaaguuacuugggau

SEQ ID NO: 251417 - RNA, 19 nt, Artificial Sequence
  Description of Artificial Sequence: Synthetic oligonucleotide
  Antisense strand to SEQ ID NO: 251416
aucccaaguaacuuucgag

SEQ ID NO: 251418 - RNA, 19 nt, Artificial Sequence
  Description of Artificial Sequence: Synthetic oligonucleotide
  Sense strand starting at position 1066 SEQ ID NO: 3235
ucgaaaguuacuugggauu

SEQ ID NO: 251419 - RNA, 19 nt, Artificial Sequence
  Description of Artificial Sequence: Synthetic oligonucleotide
  Antisense strand to SEQ ID NO: 251418
aaucccaaguaacuuucga

SEQ ID NO: 251420 - RNA, 19 nt, Artificial Sequence
  Description of Artificial Sequence: Synthetic oligonucleotide
  Sense strand starting at position 1068 SEQ ID NO: 3235
gaaaguuacuugggauuga

SEQ ID NO: 251421 - RNA, 19 nt, Artificial Sequence
  Description of Artificial Sequence: Synthetic oligonucleotide
  Antisense strand to SEQ ID NO: 251420
ucaaucccaaguaacuuuc

SEQ ID NO: 251422 - RNA, 19 nt, Artificial Sequence
  Description of Artificial Sequence: Synthetic oligonucleotide
  Sense strand starting at position 1072 SEQ ID NO: 3235
guuacuugggauugaguaa

SEQ ID NO: 251423 - RNA, 19 nt, Artificial Sequence
  Description of Artificial Sequence: Synthetic oligonucleotide
  Antisense strand to SEQ ID NO: 251422
uuacucaaucccaaguaac

SEQ ID NO: 251424 - RNA, 19 nt, Artificial Sequence
  Description of Artificial Sequence: Synthetic oligonucleotide
  Sense strand starting at position 1148 SEQ ID NO: 3235
uggcuucucgcugcacaga

SEQ ID NO: 251425 - RNA, 19 nt, Artificial Sequence
  Description of Artificial Sequence: Synthetic oligonucleotide
  Antisense strand to SEQ ID NO: 251424
ucugugcagcgagaagcca

SEQ ID NO: 251426 - RNA, 19 nt, Artificial Sequence
  Description of Artificial Sequence: Synthetic oligonucleotide
  Sense strand starting at position 2237 SEQ ID NO: 3235
ccggguaccgucugcuuua

SEQ ID NO: 251427 - RNA, 19 nt, Artificial Sequence
  Description of Artificial Sequence: Synthetic oligonucleotide
  Antisense strand to SEQ ID NO: 251426
uaaagcagacgguacccgg

SEQ ID NO: 251428 - RNA, 19 nt, Artificial Sequence
  Description of Artificial Sequence: Synthetic oligonucleotide
  Sense strand starting at position 2733 SEQ ID NO: 3235
gcaggaauuguccacaccu

SEQ ID NO: 251429 - RNA, 19 nt, Artificial Sequence
  Description of Artificial Sequence: Synthetic oligonucleotide
  Antisense strand to SEQ ID NO: 251428
agguguggacaauuccugc

SEQ ID NO: 251430 - RNA, 19 nt, Artificial Sequence
  Description of Artificial Sequence: Synthetic oligonucleotide
  Sense strand starting at position 2735 SEQ ID NO: 3235
aggaauuguccacaccucu

SEQ ID NO: 251431 - RNA, 19 nt, Artificial Sequence
  Description of Artificial Sequence: Synthetic oligonucleotide
  Antisense strand to SEQ ID NO: 251430
agagguguggacaauuccu

SEQ ID NO: 251432 - RNA, 19 nt, Artificial Sequence
  Description of Artificial Sequence: Synthetic oligonucleotide
  Sense strand starting at position 2857 SEQ ID NO: 3235
caggaagccuucucuguuu

SEQ ID NO: 251433 - RNA, 19 nt, Artificial Sequence
  Description of Artificial Sequence: Synthetic oligonucleotide
  Antisense strand to SEQ ID NO: 251432
aaacagagaaggcuuccug

SEQ ID NO: 251434 - RNA, 19 nt, Artificial Sequence
  Description of Artificial Sequence: Synthetic oligonucleotide
  Sense strand starting at position 2859 SEQ ID NO: 3235
ggaagccuucucuguuuaa

SEQ ID NO: 251435 - RNA, 19 nt, Artificial Sequence
  Description of Artificial Sequence: Synthetic oligonucleotide
  Antisense strand to SEQ ID NO: 251434
uuaaacagagaaggcuucc

SEQ ID NO: 251436 - RNA, 19 nt, Artificial Sequence
  Description of Artificial Sequence: Synthetic oligonucleotide
  Sense strand starting at position 2862 SEQ ID NO: 3235
agccuucucuguuuaacag

SEQ ID NO: 251437 - RNA, 19 nt, Artificial Sequence
  Description of Artificial Sequence: Synthetic oligonucleotide
  Antisense strand to SEQ ID NO: 251436
cuguuaaacagagaaggcu

SEQ ID NO: 251438 - RNA, 19 nt, Artificial Sequence
  Description of Artificial Sequence: Synthetic oligonucleotide
  Sense strand starting at position 3196 SEQ ID NO: 3235
gaggaaauaucuguaccug

SEQ ID NO: 251439 - RNA, 19 nt, Artificial Sequence
  Description of Artificial Sequence: Synthetic oligonucleotide
  Antisense strand to SEQ ID NO: 251438
cagguacagauauuuccuc

SEQ ID NO: 251440 - RNA, 19 nt, Artificial Sequence
  Description of Artificial Sequence: Synthetic oligonucleotide
  Sense strand starting at position 3311 SEQ ID NO: 3235
gaggccuugcuagaaauug

SEQ ID NO: 251441 - RNA, 19 nt, Artificial Sequence
  Description of Artificial Sequence: Synthetic oligonucleotide
  Antisense strand to SEQ ID NO: 251440
caauuucuagcaaggccuc

SEQ ID NO: 251442 - RNA, 19 nt, Artificial Sequence
  Description of Artificial Sequence: Synthetic oligonucleotide
  Sense strand starting at position 3438 SEQ ID NO: 3235
ggaggacugagccgguaaa

SEQ ID NO: 251443 - RNA, 19 nt, Artificial Sequence
  Description of Artificial Sequence: Synthetic oligonucleotide
  Antisense strand to SEQ ID NO: 251442
uuuaccggcucaguccucc

SEQ ID NO: 251444 - RNA, 19 nt, Artificial Sequence
  Description of Artificial Sequence: Synthetic oligonucleotide
  Sense strand starting at position 3439 SEQ ID NO: 3235
gaggacugagccgguaaau

SEQ ID NO: 251445 - RNA, 19 nt, Artificial Sequence
  Description of Artificial Sequence: Synthetic oligonucleotide
  Antisense strand to SEQ ID NO: 251444
auuuaccggcucaguccuc

SEQ ID NO: 251446 - RNA, 19 nt, Artificial Sequence
  Description of Artificial Sequence: Synthetic oligonucleotide
  Sense strand starting at position 3477 SEQ ID NO: 3235
cccugugaugucugaucca

SEQ ID NO: 251447 - RNA, 19 nt, Artificial Sequence
  Description of Artificial Sequence: Synthetic oligonucleotide
  Antisense strand to SEQ ID NO: 251446
uggaucagacaucacaggg

SEQ ID NO: 251448 - RNA, 19 nt, Artificial Sequence
  Description of Artificial Sequence: Synthetic oligonucleotide
  Sense strand starting at position 3502 SEQ ID NO: 3235
ugcucuccuuggcuguaaa

SEQ ID NO: 251449 - RNA, 19 nt, Artificial Sequence
  Description of Artificial Sequence: Synthetic oligonucleotide
  Antisense strand to SEQ ID NO: 251448
uuuacagccaaggagagca

SEQ ID NO: 251450 - RNA, 19 nt, Artificial Sequence
  Description of Artificial Sequence: Synthetic oligonucleotide
  Sense strand starting at position 3528 SEQ ID NO: 3235
cacggauugugucuucuuu

SEQ ID NO: 251451 - RNA, 19 nt, Artificial Sequence
  Description of Artificial Sequence: Synthetic oligonucleotide
  Antisense strand to SEQ ID NO: 251450
aaagaagacacaauccgug

SEQ ID NO: 251452 - RNA, 19 nt, Artificial Sequence
  Description of Artificial Sequence: Synthetic oligonucleotide
  Sense strand starting at position 3530 SEQ ID NO: 3235
cggauugugucuucuuuaa

SEQ ID NO: 251453 - RNA, 19 nt, Artificial Sequence
  Description of Artificial Sequence: Synthetic oligonucleotide
  Antisense strand to SEQ ID NO: 251452
uuaaagaagacacaauccg

SEQ ID NO: 251454 - RNA, 19 nt, Artificial Sequence
  Description of Artificial Sequence: Synthetic oligonucleotide
  Sense strand starting at position 3570 SEQ ID NO: 3235
cagugucguggcugauaaa

SEQ ID NO: 251455 - RNA, 19 nt, Artificial Sequence
  Description of Artificial Sequence: Synthetic oligonucleotide
  Antisense strand to SEQ ID NO: 251454
uuuaucagccacgacacug

SEQ ID NO: 251456 - RNA, 19 nt, Artificial Sequence
  Description of Artificial Sequence: Synthetic oligonucleotide
  Sense strand starting at position 3571 SEQ ID NO: 3235
agugucguggcugauaaau

SEQ ID NO: 251457 - RNA, 19 nt, Artificial Sequence
  Description of Artificial Sequence: Synthetic oligonucleotide
  Antisense strand to SEQ ID NO: 251456
auuuaucagccacgacacu

SEQ ID NO: 251458 - RNA, 19 nt, Artificial Sequence
  Description of Artificial Sequence: Synthetic oligonucleotide
  Sense strand starting at position 3598 SEQ ID NO: 3235
auaauaaucuacugagggu

SEQ ID NO: 251459 - RNA, 19 nt, Artificial Sequence
  Description of Artificial Sequence: Synthetic oligonucleotide
  Antisense strand to SEQ ID NO: 251458
acccucaguagauuauuau

SEQ ID NO: 251460 - RNA, 19 nt, Artificial Sequence
  Description of Artificial Sequence: Synthetic oligonucleotide
  Sense strand starting at position 3661 SEQ ID NO: 3235
gcccacuagugucagaaua

SEQ ID NO: 251461 - RNA, 19 nt, Artificial Sequence
  Description of Artificial Sequence: Synthetic oligonucleotide
  Antisense strand to SEQ ID NO: 251460
uauucugacacuagugggc

SEQ ID NO: 251462 - RNA, 19 nt, Artificial Sequence
  Description of Artificial Sequence: Synthetic oligonucleotide
  Sense strand starting at position 3663 SEQ ID NO: 3235
ccacuagugucagaauaac

SEQ ID NO: 251463 - RNA, 19 nt, Artificial Sequence
  Description of Artificial Sequence: Synthetic oligonucleotide
  Antisense strand to SEQ ID NO: 251462
guuauucugacacuagugg

SEQ ID NO: 251464 - RNA, 19 nt, Artificial Sequence
  Description of Artificial Sequence: Synthetic oligonucleotide
  Sense strand starting at position 3669 SEQ ID NO: 3235
gugucagaauaacugcauu

SEQ ID NO: 251465 - RNA, 19 nt, Artificial Sequence
  Description of Artificial Sequence: Synthetic oligonucleotide
  Antisense strand to SEQ ID NO: 251464
aaugcaguuauucugacac

SEQ ID NO: 251466 - RNA, 19 nt, Artificial Sequence
  Description of Artificial Sequence: Synthetic oligonucleotide
  Sense strand starting at position 3905 SEQ ID NO: 3235
gaaggugaucgauagcuuu

SEQ ID NO: 251467 - RNA, 19 nt, Artificial Sequence
  Description of Artificial Sequence: Synthetic oligonucleotide
  Antisense strand to SEQ ID NO: 251466
aaagcuaucgaucaccuuc

SEQ ID NO: 251468 - RNA, 19 nt, Artificial Sequence
  Description of Artificial Sequence: Synthetic oligonucleotide
  Sense strand starting at position 3911 SEQ ID NO: 3235
gaucgauagcuuugguuug

SEQ ID NO: 251469 - RNA, 19 nt, Artificial Sequence
  Description of Artificial Sequence: Synthetic oligonucleotide
  Antisense strand to SEQ ID NO: 251468
caaaccaaagcuaucgauc

SEQ ID NO: 251470 - RNA, 19 nt, Artificial Sequence
  Description of Artificial Sequence: Synthetic oligonucleotide
  Sense strand starting at position 3964 SEQ ID NO: 3235
auagaagaguacuagauag

SEQ ID NO: 251471 - RNA, 19 nt, Artificial Sequence
  Description of Artificial Sequence: Synthetic oligonucleotide
  Antisense strand to SEQ ID NO: 251470
cuaucuaguacucuucuau

SEQ ID NO: 251472 - RNA, 19 nt, Artificial Sequence
  Description of Artificial Sequence: Synthetic oligonucleotide
  Sense strand starting at position 77 SEQ ID NO: 3236
gucucauccuccugagcaa

SEQ ID NO: 251473 - RNA, 19 nt, Artificial Sequence
  Description of Artificial Sequence: Synthetic oligonucleotide
  Antisense strand to SEQ ID NO: 251472
uugcucaggaggaugagac

SEQ ID NO: 251474 - RNA, 19 nt, Artificial Sequence
  Description of Artificial Sequence: Synthetic oligonucleotide
  Sense strand starting at position 559 SEQ ID NO: 3236
gugcaaucauugccucuuu

SEQ ID NO: 251475 - RNA, 19 nt, Artificial Sequence
  Description of Artificial Sequence: Synthetic oligonucleotide
  Antisense strand to SEQ ID NO: 251474
aaagaggcaaugauugcac

SEQ ID NO: 251476 - RNA, 19 nt, Artificial Sequence
  Description of Artificial Sequence: Synthetic oligonucleotide
  Sense strand starting at position 823 SEQ ID NO: 3236
uaauuaugugcaugugguu

SEQ ID NO: 251477 - RNA, 19 nt, Artificial Sequence
  Description of Artificial Sequence: Synthetic oligonucleotide
  Antisense strand to SEQ ID NO: 251476
aaccacaugcacauaauua

SEQ ID NO: 251478 - RNA, 19 nt, Artificial Sequence
  Description of Artificial Sequence: Synthetic oligonucleotide
  Sense strand starting at position 837 SEQ ID NO: 3236
ugguuuauguccuucuggu

SEQ ID NO: 251479 - RNA, 19 nt, Artificial Sequence
  Description of Artificial Sequence: Synthetic oligonucleotide
  Antisense strand to SEQ ID NO: 251478
accagaaggacauaaacca

SEQ ID NO: 251480 - RNA, 19 nt, Artificial Sequence
  Description of Artificial Sequence: Synthetic oligonucleotide
  Sense strand starting at position 885 SEQ ID NO: 3236
gagaucaagucugugcaca

SEQ ID NO: 251481 - RNA, 19 nt, Artificial Sequence
  Description of Artificial Sequence: Synthetic oligonucleotide
  Antisense strand to SEQ ID NO: 251480
ugugcacagacuugaucuc

SEQ ID NO: 251482 - RNA, 19 nt, Artificial Sequence
  Description of Artificial Sequence: Synthetic oligonucleotide
  Sense strand starting at position 886 SEQ ID NO: 3236
agaucaagucugugcacaa

SEQ ID NO: 251483 - RNA, 19 nt, Artificial Sequence
  Description of Artificial Sequence: Synthetic oligonucleotide
  Antisense strand to SEQ ID NO: 251482
uugugcacagacuugaucu

SEQ ID NO: 251484 - RNA, 19 nt, Artificial Sequence
  Description of Artificial Sequence: Synthetic oligonucleotide
  Sense strand starting at position 887 SEQ ID NO: 3236
gaucaagucugugcacaag

SEQ ID NO: 251485 - RNA, 19 nt, Artificial Sequence
  Description of Artificial Sequence: Synthetic oligonucleotide
  Antisense strand to SEQ ID NO: 251484
cuugugcacagacuugauc

SEQ ID NO: 251486 - RNA, 19 nt, Artificial Sequence
  Description of Artificial Sequence: Synthetic oligonucleotide
  Sense strand starting at position 1449 SEQ ID NO: 3236
gccucacauucccgucauu

SEQ ID NO: 251487 - RNA, 19 nt, Artificial Sequence
  Description of Artificial Sequence: Synthetic oligonucleotide
  Antisense strand to SEQ ID NO: 251486
aaugacgggaaugugaggc

SEQ ID NO: 251488 - RNA, 19 nt, Artificial Sequence
  Description of Artificial Sequence: Synthetic oligonucleotide
  Sense strand starting at position 1452 SEQ ID NO: 3236
ucacauucccgucauuguu

SEQ ID NO: 251489 - RNA, 19 nt, Artificial Sequence
  Description of Artificial Sequence: Synthetic oligonucleotide
  Antisense strand to SEQ ID NO: 251488
aacaaugacgggaauguga

SEQ ID NO: 251490 - RNA, 19 nt, Artificial Sequence
  Description of Artificial Sequence: Synthetic oligonucleotide
  Sense strand starting at position 1774 SEQ ID NO: 3236
agggaaaccugucuccuga

SEQ ID NO: 251491 - RNA, 19 nt, Artificial Sequence
  Description of Artificial Sequence: Synthetic oligonucleotide
  Antisense strand to SEQ ID NO: 251490
ucaggagacagguuucccu

SEQ ID NO: 251492 - RNA, 19 nt, Artificial Sequence
  Description of Artificial Sequence: Synthetic oligonucleotide
  Sense strand starting at position 2180 SEQ ID NO: 3236
uggugacuguuagcucaga

SEQ ID NO: 251493 - RNA, 19 nt, Artificial Sequence
  Description of Artificial Sequence: Synthetic oligonucleotide
  Antisense strand to SEQ ID NO: 251492
ucugagcuaacagucacca

SEQ ID NO: 251494 - RNA, 19 nt, Artificial Sequence
  Description of Artificial Sequence: Synthetic oligonucleotide
  Sense strand starting at position 2181 SEQ ID NO: 3236
ggugacuguuagcucagaa

SEQ ID NO: 251495 - RNA, 19 nt, Artificial Sequence
  Description of Artificial Sequence: Synthetic oligonucleotide
  Antisense strand to SEQ ID NO: 251494
uucugagcuaacagucacc

SEQ ID NO: 251496 - RNA, 19 nt, Artificial Sequence
  Description of Artificial Sequence: Synthetic oligonucleotide
  Sense strand starting at position 2220 SEQ ID NO: 3236
ggacuuguggccuaggaca

SEQ ID NO: 251497 - RNA, 19 nt, Artificial Sequence
  Description of Artificial Sequence: Synthetic oligonucleotide
  Antisense strand to SEQ ID NO: 251496
uguccuaggccacaagucc

SEQ ID NO: 251498 - RNA, 19 nt, Artificial Sequence
  Description of Artificial Sequence: Synthetic oligonucleotide
  Sense strand starting at position 2222 SEQ ID NO: 3236
acuuguggccuaggacaga

SEQ ID NO: 251499 - RNA, 19 nt, Artificial Sequence
  Description of Artificial Sequence: Synthetic oligonucleotide
  Antisense strand to SEQ ID NO: 251498
ucuguccuaggccacaagu

SEQ ID NO: 251500 - RNA, 19 nt, Artificial Sequence
  Description of Artificial Sequence: Synthetic oligonucleotide
  Sense strand starting at position 2269 SEQ ID NO: 3236
ggugaaagcugucgcgguu

SEQ ID NO: 251501 - RNA, 19 nt, Artificial Sequence
  Description of Artificial Sequence: Synthetic oligonucleotide
  Antisense strand to SEQ ID NO: 251500
aaccgcgacagcuuucacc

SEQ ID NO: 251502 - RNA, 19 nt, Artificial Sequence
  Description of Artificial Sequence: Synthetic oligonucleotide
  Sense strand starting at position 2321 SEQ ID NO: 3236
ccaccuguuuccucgucua

SEQ ID NO: 251503 - RNA, 19 nt, Artificial Sequence
  Description of Artificial Sequence: Synthetic oligonucleotide
  Antisense strand to SEQ ID NO: 251502
uagacgaggaaacaggugg

SEQ ID NO: 251504 - RNA, 19 nt, Artificial Sequence
  Description of Artificial Sequence: Synthetic oligonucleotide
  Sense strand starting at position 2324 SEQ ID NO: 3236
ccuguuuccucgucuacaa

SEQ ID NO: 251505 - RNA, 19 nt, Artificial Sequence
  Description of Artificial Sequence: Synthetic oligonucleotide
  Antisense strand to SEQ ID NO: 251504
uuguagacgaggaaacagg

SEQ ID NO: 251506 - RNA, 19 nt, Artificial Sequence
  Description of Artificial Sequence: Synthetic oligonucleotide
  Sense strand starting at position 2326 SEQ ID NO: 3236
uguuuccucgucuacaagu

SEQ ID NO: 251507 - RNA, 19 nt, Artificial Sequence
  Description of Artificial Sequence: Synthetic oligonucleotide
  Antisense strand to SEQ ID NO: 251506
acuuguagacgaggaaaca

SEQ ID NO: 251508 - RNA, 19 nt, Artificial Sequence
  Description of Artificial Sequence: Synthetic oligonucleotide
  Sense strand starting at position 2446 SEQ ID NO: 3236
accuauguguccucuuguu

SEQ ID NO: 251509 - RNA, 19 nt, Artificial Sequence
  Description of Artificial Sequence: Synthetic oligonucleotide
  Antisense strand to SEQ ID NO: 251508
aacaagaggacacauaggu

SEQ ID NO: 251510 - RNA, 19 nt, Artificial Sequence
  Description of Artificial Sequence: Synthetic oligonucleotide
  Sense strand starting at position 2464 SEQ ID NO: 3236
ucuguugucacgugggaaa

SEQ ID NO: 251511 - RNA, 19 nt, Artificial Sequence
  Description of Artificial Sequence: Synthetic oligonucleotide
  Antisense strand to SEQ ID NO: 251510
uuucccacgugacaacaga

SEQ ID NO: 251512 - RNA, 19 nt, Artificial Sequence
  Description of Artificial Sequence: Synthetic oligonucleotide
  Sense strand starting at position 2481 SEQ ID NO: 3236
aaacgugauuaucaugaau

SEQ ID NO: 251513 - RNA, 19 nt, Artificial Sequence
  Description of Artificial Sequence: Synthetic oligonucleotide
  Antisense strand to SEQ ID NO: 251512
auucaugauaaucacguuu

SEQ ID NO: 251514 - RNA, 19 nt, Artificial Sequence
  Description of Artificial Sequence: Synthetic oligonucleotide
  Sense strand starting at position 2483 SEQ ID NO: 3236
acgugauuaucaugaauaa

SEQ ID NO: 251515 - RNA, 19 nt, Artificial Sequence
  Description of Artificial Sequence: Synthetic oligonucleotide
  Antisense strand to SEQ ID NO: 251514
uuauucaugauaaucacgu

SEQ ID NO: 251516 - RNA, 19 nt, Artificial Sequence
  Description of Artificial Sequence: Synthetic oligonucleotide
  Sense strand starting at position 2554 SEQ ID NO: 3236
gggaaacuuugcccagaga

SEQ ID NO: 251517 - RNA, 19 nt, Artificial Sequence
  Description of Artificial Sequence: Synthetic oligonucleotide
  Antisense strand to SEQ ID NO: 251516
ucucugggcaaaguuuccc

SEQ ID NO: 251518 - RNA, 19 nt, Artificial Sequence
  Description of Artificial Sequence: Synthetic oligonucleotide
  Sense strand starting at position 2853 SEQ ID NO: 3236
ggacauuucucacaccagu

SEQ ID NO: 251519 - RNA, 19 nt, Artificial Sequence
  Description of Artificial Sequence: Synthetic oligonucleotide
  Antisense strand to SEQ ID NO: 251518
acuggugugagaaaugucc

SEQ ID NO: 251520 - RNA, 19 nt, Artificial Sequence
  Description of Artificial Sequence: Synthetic oligonucleotide
  Sense strand starting at position 2882 SEQ ID NO: 3236
gagcuuuguggcugaggga

SEQ ID NO: 251521 - RNA, 19 nt, Artificial Sequence
  Description of Artificial Sequence: Synthetic oligonucleotide
  Antisense strand to SEQ ID NO: 251520
ucccucagccacaaagcuc

SEQ ID NO: 251522 - RNA, 19 nt, Artificial Sequence
  Description of Artificial Sequence: Synthetic oligonucleotide
  Sense strand starting at position 3011 SEQ ID NO: 3236
gaguauugggucuggcugu

SEQ ID NO: 251523 - RNA, 19 nt, Artificial Sequence
  Description of Artificial Sequence: Synthetic oligonucleotide
  Antisense strand to SEQ ID NO: 251522
acagccagacccaauacuc

SEQ ID NO: 251524 - RNA, 19 nt, Artificial Sequence
  Description of Artificial Sequence: Synthetic oligonucleotide
  Sense strand starting at position 3034 SEQ ID NO: 3236
ucuugaugcuacuagggau

SEQ ID NO: 251525 - RNA, 19 nt, Artificial Sequence
  Description of Artificial Sequence: Synthetic oligonucleotide
  Antisense strand to SEQ ID NO: 251524
aucccuaguagcaucaaga

SEQ ID NO: 251526 - RNA, 19 nt, Artificial Sequence
  Description of Artificial Sequence: Synthetic oligonucleotide
  Sense strand starting at position 3041 SEQ ID NO: 3236
gcuacuagggauuguccua

SEQ ID NO: 251527 - RNA, 19 nt, Artificial Sequence
  Description of Artificial Sequence: Synthetic oligonucleotide
  Antisense strand to SEQ ID NO: 251526
uaggacaaucccuaguagc

SEQ ID NO: 251528 - RNA, 19 nt, Artificial Sequence
  Description of Artificial Sequence: Synthetic oligonucleotide
  Sense strand starting at position 3046 SEQ ID NO: 3236
uagggauuguccuaaugcu

SEQ ID NO: 251529 - RNA, 19 nt, Artificial Sequence
  Description of Artificial Sequence: Synthetic oligonucleotide
  Antisense strand to SEQ ID NO: 251528
agcauuaggacaaucccua

SEQ ID NO: 251530 - RNA, 19 nt, Artificial Sequence
  Description of Artificial Sequence: Synthetic oligonucleotide
  Sense strand starting at position 3191 SEQ ID NO: 3236
aggguuaccuuccauagag

SEQ ID NO: 251531 - RNA, 19 nt, Artificial Sequence
  Description of Artificial Sequence: Synthetic oligonucleotide
  Antisense strand to SEQ ID NO: 251530
cucuauggaagguaacccu

SEQ ID NO: 251532 - RNA, 19 nt, Artificial Sequence
  Description of Artificial Sequence: Synthetic oligonucleotide
  Sense strand starting at position 3203 SEQ ID NO: 3236
cauagagauucccugaguc

SEQ ID NO: 251533 - RNA, 19 nt, Artificial Sequence
  Description of Artificial Sequence: Synthetic oligonucleotide
  Antisense strand to SEQ ID NO: 251532
gacucagggaaucucuaug

SEQ ID NO: 251534 - RNA, 19 nt, Artificial Sequence
  Description of Artificial Sequence: Synthetic oligonucleotide
  Sense strand starting at position 3642 SEQ ID NO: 3236
gcgcuagaguguuggguuu

SEQ ID NO: 251535 - RNA, 19 nt, Artificial Sequence
  Description of Artificial Sequence: Synthetic oligonucleotide
  Antisense strand to SEQ ID NO: 251534
aaacccaacacucuagcgc

SEQ ID NO: 251536 - RNA, 19 nt, Artificial Sequence
  Description of Artificial Sequence: Synthetic oligonucleotide
  Sense strand starting at position 3885 SEQ ID NO: 3236
ccaucaagagauugcuacu

SEQ ID NO: 251537 - RNA, 19 nt, Artificial Sequence
  Description of Artificial Sequence: Synthetic oligonucleotide
  Antisense strand to SEQ ID NO: 251536
aguagcaaucucuugaugg

SEQ ID NO: 251538 - RNA, 19 nt, Artificial Sequence
  Description of Artificial Sequence: Synthetic oligonucleotide
  Sense strand starting at position 34 SEQ ID NO: 3237
aauccaaaguguguggaau

SEQ ID NO: 251539 - RNA, 19 nt, Artificial Sequence
  Description of Artificial Sequence: Synthetic oligonucleotide
  Antisense strand to SEQ ID NO: 251538
auuccacacacuuuggauu

SEQ ID NO: 251540 - RNA, 19 nt, Artificial Sequence
  Description of Artificial Sequence: Synthetic oligonucleotide
  Sense strand starting at position 35 SEQ ID NO: 3237
auccaaaguguguggaaua

SEQ ID NO: 251541 - RNA, 19 nt, Artificial Sequence
  Description of Artificial Sequence: Synthetic oligonucleotide
  Antisense strand to SEQ ID NO: 251540
uauuccacacacuuuggau

SEQ ID NO: 251542 - RNA, 19 nt, Artificial Sequence
  Description of Artificial Sequence: Synthetic oligonucleotide
  Sense strand starting at position 701 SEQ ID NO: 3237
ggacaucaauuagaguaaa

SEQ ID NO: 251543 - RNA, 19 nt, Artificial Sequence
  Description of Artificial Sequence: Synthetic oligonucleotide
  Antisense strand to SEQ ID NO: 251542
uuuacucuaauugaugucc

SEQ ID NO: 251544 - RNA, 19 nt, Artificial Sequence
  Description of Artificial Sequence: Synthetic oligonucleotide
  Sense strand starting at position 720 SEQ ID NO: 3237
augcaagcagcuugaauaa

SEQ ID NO: 251545 - RNA, 19 nt, Artificial Sequence
  Description of Artificial Sequence: Synthetic oligonucleotide
  Antisense strand to SEQ ID NO: 251544
uuauucaagcugcuugcau

SEQ ID NO: 251546 - RNA, 19 nt, Artificial Sequence
  Description of Artificial Sequence: Synthetic oligonucleotide
  Sense strand starting at position 805 SEQ ID NO: 3237
uccuucuuaccuggaagaa

SEQ ID NO: 251547 - RNA, 19 nt, Artificial Sequence
  Description of Artificial Sequence: Synthetic oligonucleotide
  Antisense strand to SEQ ID NO: 251546
uucuuccagguaagaagga

SEQ ID NO: 251548 - RNA, 19 nt, Artificial Sequence
  Description of Artificial Sequence: Synthetic oligonucleotide
  Sense strand starting at position 1999 SEQ ID NO: 3237
aaggcagaucagugugcuu

SEQ ID NO: 251549 - RNA, 19 nt, Artificial Sequence
  Description of Artificial Sequence: Synthetic oligonucleotide
  Antisense strand to SEQ ID NO: 251548
aagcacacugaucugccuu

SEQ ID NO: 251550 - RNA, 19 nt, Artificial Sequence
  Description of Artificial Sequence: Synthetic oligonucleotide
  Sense strand starting at position 2012 SEQ ID NO: 3237
gugcuuugcccagcuugaa

SEQ ID NO: 251551 - RNA, 19 nt, Artificial Sequence
  Description of Artificial Sequence: Synthetic oligonucleotide
  Antisense strand to SEQ ID NO: 251550
uucaagcugggcaaagcac

SEQ ID NO: 251552 - RNA, 19 nt, Artificial Sequence
  Description of Artificial Sequence: Synthetic oligonucleotide
  Sense strand starting at position 2024 SEQ ID NO: 3237
gcuugaagccuuugcaauu

SEQ ID NO: 251553 - RNA, 19 nt, Artificial Sequence
  Description of Artificial Sequence: Synthetic oligonucleotide
  Antisense strand to SEQ ID NO: 251552
aauugcaaaggcuucaagc

SEQ ID NO: 251554 - RNA, 19 nt, Artificial Sequence
  Description of Artificial Sequence: Synthetic oligonucleotide
  Sense strand starting at position 2025 SEQ ID NO: 3237
cuugaagccuuugcaauuu

SEQ ID NO: 251555 - RNA, 19 nt, Artificial Sequence
  Description of Artificial Sequence: Synthetic oligonucleotide
  Antisense strand to SEQ ID NO: 251554
aaauugcaaaggcuucaag

SEQ ID NO: 251556 - RNA, 19 nt, Artificial Sequence
  Description of Artificial Sequence: Synthetic oligonucleotide
  Sense strand starting at position 2092 SEQ ID NO: 3237
gagagcuggcuuggaaaga

SEQ ID NO: 251557 - RNA, 19 nt, Artificial Sequence
  Description of Artificial Sequence: Synthetic oligonucleotide
  Antisense strand to SEQ ID NO: 251556
ucuuuccaagccagcucuc

SEQ ID NO: 251558 - RNA, 19 nt, Artificial Sequence
  Description of Artificial Sequence: Synthetic oligonucleotide
  Sense strand starting at position 2114 SEQ ID NO: 3237
guuguucuugcagcuguua

SEQ ID NO: 251559 - RNA, 19 nt, Artificial Sequence
  Description of Artificial Sequence: Synthetic oligonucleotide
  Antisense strand to SEQ ID NO: 251558
uaacagcugcaagaacaac

SEQ ID NO: 251560 - RNA, 19 nt, Artificial Sequence
  Description of Artificial Sequence: Synthetic oligonucleotide
  Sense strand starting at position 2123 SEQ ID NO: 3237
gcagcuguuauagauugaa

SEQ ID NO: 251561 - RNA, 19 nt, Artificial Sequence
  Description of Artificial Sequence: Synthetic oligonucleotide
  Antisense strand to SEQ ID NO: 251560
uucaaucuauaacagcugc

SEQ ID NO: 251562 - RNA, 19 nt, Artificial Sequence
  Description of Artificial Sequence: Synthetic oligonucleotide
  Sense strand starting at position 2126 SEQ ID NO: 3237
gcuguuauagauugaaagu

SEQ ID NO: 251563 - RNA, 19 nt, Artificial Sequence
  Description of Artificial Sequence: Synthetic oligonucleotide
  Antisense strand to SEQ ID NO: 251562
acuuucaaucuauaacagc

SEQ ID NO: 251564 - RNA, 19 nt, Artificial Sequence
  Description of Artificial Sequence: Synthetic oligonucleotide
  Sense strand starting at position 2158 SEQ ID NO: 3237
uuuaaucacuagggaaaca

SEQ ID NO: 251565 - RNA, 19 nt, Artificial Sequence
  Description of Artificial Sequence: Synthetic oligonucleotide
  Antisense strand to SEQ ID NO: 251564
uguuucccuagugauuaaa

SEQ ID NO: 251566 - RNA, 19 nt, Artificial Sequence
  Description of Artificial Sequence: Synthetic oligonucleotide
  Sense strand starting at position 2336 SEQ ID NO: 3237
cuacuuggcucucugaauu

SEQ ID NO: 251567 - RNA, 19 nt, Artificial Sequence
  Description of Artificial Sequence: Synthetic oligonucleotide
  Antisense strand to SEQ ID NO: 251566
aauucagagagccaaguag

SEQ ID NO: 251568 - RNA, 19 nt, Artificial Sequence
  Description of Artificial Sequence: Synthetic oligonucleotide
  Sense strand starting at position 2505 SEQ ID NO: 3237
uguuuacuucuguacuagu

SEQ ID NO: 251569 - RNA, 19 nt, Artificial Sequence
  Description of Artificial Sequence: Synthetic oligonucleotide
  Antisense strand to SEQ ID NO: 251568
acuaguacagaaguaaaca

SEQ ID NO: 251570 - RNA, 19 nt, Artificial Sequence
  Description of Artificial Sequence: Synthetic oligonucleotide
  Sense strand starting at position 2533 SEQ ID NO: 3237
ccuuuaauguugccaugau

SEQ ID NO: 251571 - RNA, 19 nt, Artificial Sequence
  Description of Artificial Sequence: Synthetic oligonucleotide
  Antisense strand to SEQ ID NO: 251570
aucauggcaacauuaaagg

SEQ ID NO: 251572 - RNA, 19 nt, Artificial Sequence
  Description of Artificial Sequence: Synthetic oligonucleotide
  Sense strand starting at position 2891 SEQ ID NO: 3237
ccaugagaacaauguuauc

SEQ ID NO: 251573 - RNA, 19 nt, Artificial Sequence
  Description of Artificial Sequence: Synthetic oligonucleotide
  Antisense strand to SEQ ID NO: 251572
gauaacauuguucucaugg

SEQ ID NO: 251574 - RNA, 19 nt, Artificial Sequence
  Description of Artificial Sequence: Synthetic oligonucleotide
  Sense strand starting at position 2894 SEQ ID NO: 3237
ugagaacaauguuaucacu

SEQ ID NO: 251575 - RNA, 19 nt, Artificial Sequence
  Description of Artificial Sequence: Synthetic oligonucleotide
  Antisense strand to SEQ ID NO: 251574
agugauaacauuguucuca

SEQ ID NO: 251576 - RNA, 19 nt, Artificial Sequence
  Description of Artificial Sequence: Synthetic oligonucleotide
  Sense strand starting at position 2936 SEQ ID NO: 3237
cuccuacaauggucauaga

SEQ ID NO: 251577 - RNA, 19 nt, Artificial Sequence
  Description of Artificial Sequence: Synthetic oligonucleotide
  Antisense strand to SEQ ID NO: 251576
ucuaugaccauuguaggag

SEQ ID NO: 251578 - RNA, 19 nt, Artificial Sequence
  Description of Artificial Sequence: Synthetic oligonucleotide
  Sense strand starting at position 2939 SEQ ID NO: 3237
cuacaauggucauagagaa

SEQ ID NO: 251579 - RNA, 19 nt, Artificial Sequence
  Description of Artificial Sequence: Synthetic oligonucleotide
  Antisense strand to SEQ ID NO: 251578
uucucuaugaccauuguag

SEQ ID NO: 251580 - RNA, 19 nt, Artificial Sequence
  Description of Artificial Sequence: Synthetic oligonucleotide
  Sense strand starting at position 3001 SEQ ID NO: 3237
guaggcuguugauuauaau

SEQ ID NO: 251581 - RNA, 19 nt, Artificial Sequence
  Description of Artificial Sequence: Synthetic oligonucleotide
  Antisense strand to SEQ ID NO: 251580
auuauaaucaacagccuac

SEQ ID NO: 251582 - RNA, 19 nt, Artificial Sequence
  Description of Artificial Sequence: Synthetic oligonucleotide
  Sense strand starting at position 3002 SEQ ID NO: 3237
uaggcuguugauuauaaua

SEQ ID NO: 251583 - RNA, 19 nt, Artificial Sequence
  Description of Artificial Sequence: Synthetic oligonucleotide
  Antisense strand to SEQ ID NO: 251582
uauuauaaucaacagccua

SEQ ID NO: 251584 - RNA, 19 nt, Artificial Sequence
  Description of Artificial Sequence: Synthetic oligonucleotide
  Sense strand starting at position 3067 SEQ ID NO: 3237
aucgguccuuuguuuauau

SEQ ID NO: 251585 - RNA, 19 nt, Artificial Sequence
  Description of Artificial Sequence: Synthetic oligonucleotide
  Antisense strand to SEQ ID NO: 251584
auauaaacaaaggaccgau

SEQ ID NO: 251586 - RNA, 19 nt, Artificial Sequence
  Description of Artificial Sequence: Synthetic oligonucleotide
  Sense strand starting at position 3068 SEQ ID NO: 3237
ucgguccuuuguuuauaua

SEQ ID NO: 251587 - RNA, 19 nt, Artificial Sequence
  Description of Artificial Sequence: Synthetic oligonucleotide
  Antisense strand to SEQ ID NO: 251586
uauauaaacaaaggaccga

SEQ ID NO: 251588 - RNA, 19 nt, Artificial Sequence
  Description of Artificial Sequence: Synthetic oligonucleotide
  Sense strand starting at position 3069 SEQ ID NO: 3237
cgguccuuuguuuauauau

SEQ ID NO: 251589 - RNA, 19 nt, Artificial Sequence
  Description of Artificial Sequence: Synthetic oligonucleotide
  Antisense strand to SEQ ID NO: 251588
auauauaaacaaaggaccg

SEQ ID NO: 251590 - RNA, 19 nt, Artificial Sequence
  Description of Artificial Sequence: Synthetic oligonucleotide
  Sense strand starting at position 3436 SEQ ID NO: 3237
acagucauauugucacauu

SEQ ID NO: 251591 - RNA, 19 nt, Artificial Sequence
  Description of Artificial Sequence: Synthetic oligonucleotide
  Antisense strand to SEQ ID NO: 251590
aaugugacaauaugacugu

SEQ ID NO: 251592 - RNA, 19 nt, Artificial Sequence
  Description of Artificial Sequence: Synthetic oligonucleotide
  Sense strand starting at position 3464 SEQ ID NO: 3237
caaguagggcuguagaaau

SEQ ID NO: 251593 - RNA, 19 nt, Artificial Sequence
  Description of Artificial Sequence: Synthetic oligonucleotide
  Antisense strand to SEQ ID NO: 251592
auuucuacagcccuacuug

SEQ ID NO: 251594 - RNA, 19 nt, Artificial Sequence
  Description of Artificial Sequence: Synthetic oligonucleotide
  Sense strand starting at position 3588 SEQ ID NO: 3237
gguuucgugagugcuuuau

SEQ ID NO: 251595 - RNA, 19 nt, Artificial Sequence
  Description of Artificial Sequence: Synthetic oligonucleotide
  Antisense strand to SEQ ID NO: 251594
auaaagcacucacgaaacc

SEQ ID NO: 251596 - RNA, 19 nt, Artificial Sequence
  Description of Artificial Sequence: Synthetic oligonucleotide
  Sense strand starting at position 3590 SEQ ID NO: 3237
uuucgugagugcuuuauaa

SEQ ID NO: 251597 - RNA, 19 nt, Artificial Sequence
  Description of Artificial Sequence: Synthetic oligonucleotide
  Antisense strand to SEQ ID NO: 251596
uuauaaagcacucacgaaa

SEQ ID NO: 251598 - RNA, 19 nt, Artificial Sequence
  Description of Artificial Sequence: Synthetic oligonucleotide
  Sense strand starting at position 3592 SEQ ID NO: 3237
ucgugagugcuuuauaagu

SEQ ID NO: 251599 - RNA, 19 nt, Artificial Sequence
  Description of Artificial Sequence: Synthetic oligonucleotide
  Antisense strand to SEQ ID NO: 251598
acuuauaaagcacucacga

SEQ ID NO: 251600 - RNA, 19 nt, Artificial Sequence
  Description of Artificial Sequence: Synthetic oligonucleotide
  Sense strand starting at position 3598 SEQ ID NO: 3237
gugcuuuauaaguauuugu

SEQ ID NO: 251601 - RNA, 19 nt, Artificial Sequence
  Description of Artificial Sequence: Synthetic oligonucleotide
  Antisense strand to SEQ ID NO: 251600
acaaauacuuauaaagcac

SEQ ID NO: 251602 - RNA, 19 nt, Artificial Sequence
  Description of Artificial Sequence: Synthetic oligonucleotide
  Sense strand starting at position 3667 SEQ ID NO: 3237
ggucucuauccaugaguaa

SEQ ID NO: 251603 - RNA, 19 nt, Artificial Sequence
  Description of Artificial Sequence: Synthetic oligonucleotide
  Antisense strand to SEQ ID NO: 251602
uuacucauggauagagacc

SEQ ID NO: 251604 - RNA, 19 nt, Artificial Sequence
  Description of Artificial Sequence: Synthetic oligonucleotide
  Sense strand starting at position 3668 SEQ ID NO: 3237
gucucuauccaugaguaaa

SEQ ID NO: 251605 - RNA, 19 nt, Artificial Sequence
  Description of Artificial Sequence: Synthetic oligonucleotide
  Antisense strand to SEQ ID NO: 251604
uuuacucauggauagagac

SEQ ID NO: 251606 - RNA, 19 nt, Artificial Sequence
  Description of Artificial Sequence: Synthetic oligonucleotide
  Sense strand starting at position 3702 SEQ ID NO: 3237
uuuacaucacagugaaguc

SEQ ID NO: 251607 - RNA, 19 nt, Artificial Sequence
  Description of Artificial Sequence: Synthetic oligonucleotide
  Antisense strand to SEQ ID NO: 251606
gacuucacugugauguaaa

SEQ ID NO: 251608 - RNA, 19 nt, Artificial Sequence
  Description of Artificial Sequence: Synthetic oligonucleotide
  Sense strand starting at position 3711 SEQ ID NO: 3237
cagugaagucaaugguacu

SEQ ID NO: 251609 - RNA, 19 nt, Artificial Sequence
  Description of Artificial Sequence: Synthetic oligonucleotide
  Antisense strand to SEQ ID NO: 251608
aguaccauugacuucacug

SEQ ID NO: 251610 - RNA, 19 nt, Artificial Sequence
  Description of Artificial Sequence: Synthetic oligonucleotide
  Sense strand starting at position 3724 SEQ ID NO: 3237
gguacugucagcugcuaaa

SEQ ID NO: 251611 - RNA, 19 nt, Artificial Sequence
  Description of Artificial Sequence: Synthetic oligonucleotide
  Antisense strand to SEQ ID NO: 251610
uuuagcagcugacaguacc

SEQ ID NO: 251612 - RNA, 19 nt, Artificial Sequence
  Description of Artificial Sequence: Synthetic oligonucleotide
  Sense strand starting at position 3755 SEQ ID NO: 3237
agaagagcucauugacucu

SEQ ID NO: 251613 - RNA, 19 nt, Artificial Sequence
  Description of Artificial Sequence: Synthetic oligonucleotide
  Antisense strand to SEQ ID NO: 251612
agagucaaugagcucuucu

SEQ ID NO: 251614 - RNA, 19 nt, Artificial Sequence
  Description of Artificial Sequence: Synthetic oligonucleotide
  Sense strand starting at position 3783 SEQ ID NO: 3237
uauagaugccacuaaaggu

SEQ ID NO: 251615 - RNA, 19 nt, Artificial Sequence
  Description of Artificial Sequence: Synthetic oligonucleotide
  Antisense strand to SEQ ID NO: 251614
accuuuaguggcaucuaua

SEQ ID NO: 251616 - RNA, 19 nt, Artificial Sequence
  Description of Artificial Sequence: Synthetic oligonucleotide
  Sense strand starting at position 3928 SEQ ID NO: 3237
ugagauuauuccuuacuag

SEQ ID NO: 251617 - RNA, 19 nt, Artificial Sequence
  Description of Artificial Sequence: Synthetic oligonucleotide
  Antisense strand to SEQ ID NO: 251616
cuaguaaggaauaaucuca

SEQ ID NO: 251618 - RNA, 19 nt, Artificial Sequence
  Description of Artificial Sequence: Synthetic oligonucleotide
  Sense strand starting at position 104 SEQ ID NO: 3238
guuauauuuauaggugucu

SEQ ID NO: 251619 - RNA, 19 nt, Artificial Sequence
  Description of Artificial Sequence: Synthetic oligonucleotide
  Antisense strand to SEQ ID NO: 251618
agacaccuauaaauauaac

SEQ ID NO: 251620 - RNA, 19 nt, Artificial Sequence
  Description of Artificial Sequence: Synthetic oligonucleotide
  Sense strand starting at position 113 SEQ ID NO: 3238
auaggugucucucuuggaa

SEQ ID NO: 251621 - RNA, 19 nt, Artificial Sequence
  Description of Artificial Sequence: Synthetic oligonucleotide
  Antisense strand to SEQ ID NO: 251620
uuccaagagagacaccuau

SEQ ID NO: 251622 - RNA, 19 nt, Artificial Sequence
  Description of Artificial Sequence: Synthetic oligonucleotide
  Sense strand starting at position 347 SEQ ID NO: 3238
gcuguuugcagacauauag

SEQ ID NO: 251623 - RNA, 19 nt, Artificial Sequence
  Description of Artificial Sequence: Synthetic oligonucleotide
  Antisense strand to SEQ ID NO: 251622
cuauaugucugcaaacagc

SEQ ID NO: 251624 - RNA, 19 nt, Artificial Sequence
  Description of Artificial Sequence: Synthetic oligonucleotide
  Sense strand starting at position 433 SEQ ID NO: 3238
gggcaauguguuggagaac

SEQ ID NO: 251625 - RNA, 19 nt, Artificial Sequence
  Description of Artificial Sequence: Synthetic oligonucleotide
  Antisense strand to SEQ ID NO: 251624
guucuccaacacauugccc

SEQ ID NO: 251626 - RNA, 19 nt, Artificial Sequence
  Description of Artificial Sequence: Synthetic oligonucleotide
  Sense strand starting at position 676 SEQ ID NO: 3238
cuccucuguuccuuugaga

SEQ ID NO: 251627 - RNA, 19 nt, Artificial Sequence
  Description of Artificial Sequence: Synthetic oligonucleotide
  Antisense strand to SEQ ID NO: 251626
ucucaaaggaacagaggag

SEQ ID NO: 251628 - RNA, 19 nt, Artificial Sequence
  Description of Artificial Sequence: Synthetic oligonucleotide
  Sense strand starting at position 869 SEQ ID NO: 3238
ugaucagcacuuuguaauu

SEQ ID NO: 251629 - RNA, 19 nt, Artificial Sequence
  Description of Artificial Sequence: Synthetic oligonucleotide
  Antisense strand to SEQ ID NO: 251628
aauuacaaagugcugauca

SEQ ID NO: 251630 - RNA, 19 nt, Artificial Sequence
  Description of Artificial Sequence: Synthetic oligonucleotide
  Sense strand starting at position 1006 SEQ ID NO: 3238
ucaggaguugcggaauaaa

SEQ ID NO: 251631 - RNA, 19 nt, Artificial Sequence
  Description of Artificial Sequence: Synthetic oligonucleotide
  Antisense strand to SEQ ID NO: 251630
uuuauuccgcaacuccuga

SEQ ID NO: 251632 - RNA, 19 nt, Artificial Sequence
  Description of Artificial Sequence: Synthetic oligonucleotide
  Sense strand starting at position 1064 SEQ ID NO: 3238
cugacauugguagguacau

SEQ ID NO: 251633 - RNA, 19 nt, Artificial Sequence
  Description of Artificial Sequence: Synthetic oligonucleotide
  Antisense strand to SEQ ID NO: 251632
auguaccuaccaaugucag

SEQ ID NO: 251634 - RNA, 19 nt, Artificial Sequence
  Description of Artificial Sequence: Synthetic oligonucleotide
  Sense strand starting at position 1065 SEQ ID NO: 3238
ugacauugguagguacaua

SEQ ID NO: 251635 - RNA, 19 nt, Artificial Sequence
  Description of Artificial Sequence: Synthetic oligonucleotide
  Antisense strand to SEQ ID NO: 251634
uauguaccuaccaauguca

SEQ ID NO: 251636 - RNA, 19 nt, Artificial Sequence
  Description of Artificial Sequence: Synthetic oligonucleotide
  Sense strand starting at position 1225 SEQ ID NO: 3238
agaccuccgucucuaaauu

SEQ ID NO: 251637 - RNA, 19 nt, Artificial Sequence
  Description of Artificial Sequence: Synthetic oligonucleotide
  Antisense strand to SEQ ID NO: 251636
aauuuagagacggaggucu

SEQ ID NO: 251638 - RNA, 19 nt, Artificial Sequence
  Description of Artificial Sequence: Synthetic oligonucleotide
  Sense strand starting at position 1285 SEQ ID NO: 3238
ucaagacgggccuauaaau

SEQ ID NO: 251639 - RNA, 19 nt, Artificial Sequence
  Description of Artificial Sequence: Synthetic oligonucleotide
  Antisense strand to SEQ ID NO: 251638
auuuauaggcccgucuuga

SEQ ID NO: 251640 - RNA, 19 nt, Artificial Sequence
  Description of Artificial Sequence: Synthetic oligonucleotide
  Sense strand starting at position 1302 SEQ ID NO: 3238
aucuuagaagcuugucuua

SEQ ID NO: 251641 - RNA, 19 nt, Artificial Sequence
  Description of Artificial Sequence: Synthetic oligonucleotide
  Antisense strand to SEQ ID NO: 251640
uaagacaagcuucuaagau

SEQ ID NO: 251642 - RNA, 19 nt, Artificial Sequence
  Description of Artificial Sequence: Synthetic oligonucleotide
  Sense strand starting at position 1304 SEQ ID NO: 3238
cuuagaagcuugucuuaua

SEQ ID NO: 251643 - RNA, 19 nt, Artificial Sequence
  Description of Artificial Sequence: Synthetic oligonucleotide
  Antisense strand to SEQ ID NO: 251642
uauaagacaagcuucuaag

SEQ ID NO: 251644 - RNA, 19 nt, Artificial Sequence
  Description of Artificial Sequence: Synthetic oligonucleotide
  Sense strand starting at position 1305 SEQ ID NO: 3238
uuagaagcuugucuuauag

SEQ ID NO: 251645 - RNA, 19 nt, Artificial Sequence
  Description of Artificial Sequence: Synthetic oligonucleotide
  Antisense strand to SEQ ID NO: 251644
cuauaagacaagcuucuaa

SEQ ID NO: 251646 - RNA, 19 nt, Artificial Sequence
  Description of Artificial Sequence: Synthetic oligonucleotide
  Sense strand starting at position 1449 SEQ ID NO: 3238
aagcguccuacgucaaagu

SEQ ID NO: 251647 - RNA, 19 nt, Artificial Sequence
  Description of Artificial Sequence: Synthetic oligonucleotide
  Antisense strand to SEQ ID NO: 251646
acuuugacguaggacgcuu

SEQ ID NO: 251648 - RNA, 19 nt, Artificial Sequence
  Description of Artificial Sequence: Synthetic oligonucleotide
  Sense strand starting at position 2096 SEQ ID NO: 3238
ggcuuaugacuggacagca

SEQ ID NO: 251649 - RNA, 19 nt, Artificial Sequence
  Description of Artificial Sequence: Synthetic oligonucleotide
  Antisense strand to SEQ ID NO: 251648
ugcuguccagucauaagcc

SEQ ID NO: 251650 - RNA, 19 nt, Artificial Sequence
  Description of Artificial Sequence: Synthetic oligonucleotide
  Sense strand starting at position 2414 SEQ ID NO: 3238
augaucuguugccuuauca

SEQ ID NO: 251651 - RNA, 19 nt, Artificial Sequence
  Description of Artificial Sequence: Synthetic oligonucleotide
  Antisense strand to SEQ ID NO: 251650
ugauaaggcaacagaucau

SEQ ID NO: 251652 - RNA, 19 nt, Artificial Sequence
  Description of Artificial Sequence: Synthetic oligonucleotide
  Sense strand starting at position 2442 SEQ ID NO: 3238
acaauauagguucguguaa

SEQ ID NO: 251653 - RNA, 19 nt, Artificial Sequence
  Description of Artificial Sequence: Synthetic oligonucleotide
  Antisense strand to SEQ ID NO: 251652
uuacacgaaccuauauugu

SEQ ID NO: 251654 - RNA, 19 nt, Artificial Sequence
  Description of Artificial Sequence: Synthetic oligonucleotide
  Sense strand starting at position 2593 SEQ ID NO: 3238
gggccuuuaugaguaaggu

SEQ ID NO: 251655 - RNA, 19 nt, Artificial Sequence
  Description of Artificial Sequence: Synthetic oligonucleotide
  Antisense strand to SEQ ID NO: 251654
accuuacucauaaaggccc

SEQ ID NO: 251656 - RNA, 19 nt, Artificial Sequence
  Description of Artificial Sequence: Synthetic oligonucleotide
  Sense strand starting at position 2594 SEQ ID NO: 3238
ggccuuuaugaguaaggua

SEQ ID NO: 251657 - RNA, 19 nt, Artificial Sequence
  Description of Artificial Sequence: Synthetic oligonucleotide
  Antisense strand to SEQ ID NO: 251656
uaccuuacucauaaaggcc

SEQ ID NO: 251658 - RNA, 19 nt, Artificial Sequence
  Description of Artificial Sequence: Synthetic oligonucleotide
  Sense strand starting at position 2713 SEQ ID NO: 3238
ggaggucugcgugaccuaa

SEQ ID NO: 251659 - RNA, 19 nt, Artificial Sequence
  Description of Artificial Sequence: Synthetic oligonucleotide
  Antisense strand to SEQ ID NO: 251658
uuaggucacgcagaccucc

SEQ ID NO: 251660 - RNA, 19 nt, Artificial Sequence
  Description of Artificial Sequence: Synthetic oligonucleotide
  Sense strand starting at position 3113 SEQ ID NO: 3238
guuaaucaaucacuaguga

SEQ ID NO: 251661 - RNA, 19 nt, Artificial Sequence
  Description of Artificial Sequence: Synthetic oligonucleotide
  Antisense strand to SEQ ID NO: 251660
ucacuagugauugauuaac

SEQ ID NO: 251662 - RNA, 19 nt, Artificial Sequence
  Description of Artificial Sequence: Synthetic oligonucleotide
  Sense strand starting at position 3128 SEQ ID NO: 3238
gugacuacccucuacugaa

SEQ ID NO: 251663 - RNA, 19 nt, Artificial Sequence
  Description of Artificial Sequence: Synthetic oligonucleotide
  Antisense strand to SEQ ID NO: 251662
uucaguagaggguagucac

SEQ ID NO: 251664 - RNA, 19 nt, Artificial Sequence
  Description of Artificial Sequence: Synthetic oligonucleotide
  Sense strand starting at position 3142 SEQ ID NO: 3238
cugaaaugacuacgugcaa

SEQ ID NO: 251665 - RNA, 19 nt, Artificial Sequence
  Description of Artificial Sequence: Synthetic oligonucleotide
  Antisense strand to SEQ ID NO: 251664
uugcacguagucauuucag

SEQ ID NO: 251666 - RNA, 19 nt, Artificial Sequence
  Description of Artificial Sequence: Synthetic oligonucleotide
  Sense strand starting at position 3281 SEQ ID NO: 3238
agaguagauuaagcacaau

SEQ ID NO: 251667 - RNA, 19 nt, Artificial Sequence
  Description of Artificial Sequence: Synthetic oligonucleotide
  Antisense strand to SEQ ID NO: 251666
auugugcuuaaucuacucu

SEQ ID NO: 251668 - RNA, 19 nt, Artificial Sequence
  Description of Artificial Sequence: Synthetic oligonucleotide
  Sense strand starting at position 3298 SEQ ID NO: 3238
auccuuugucaucauacgu

SEQ ID NO: 251669 - RNA, 19 nt, Artificial Sequence
  Description of Artificial Sequence: Synthetic oligonucleotide
  Antisense strand to SEQ ID NO: 251668
acguaugaugacaaaggau

SEQ ID NO: 251670 - RNA, 19 nt, Artificial Sequence
  Description of Artificial Sequence: Synthetic oligonucleotide
  Sense strand starting at position 3304 SEQ ID NO: 3238
ugucaucauacgucgucau

SEQ ID NO: 251671 - RNA, 19 nt, Artificial Sequence
  Description of Artificial Sequence: Synthetic oligonucleotide
  Antisense strand to SEQ ID NO: 251670
augacgacguaugaugaca

SEQ ID NO: 251672 - RNA, 19 nt, Artificial Sequence
  Description of Artificial Sequence: Synthetic oligonucleotide
  Sense strand starting at position 3317 SEQ ID NO: 3238
cgucaucauugguccauaa

SEQ ID NO: 251673 - RNA, 19 nt, Artificial Sequence
  Description of Artificial Sequence: Synthetic oligonucleotide
  Antisense strand to SEQ ID NO: 251672
uuauggaccaaugaugacg

SEQ ID NO: 251674 - RNA, 19 nt, Artificial Sequence
  Description of Artificial Sequence: Synthetic oligonucleotide
  Sense strand starting at position 3410 SEQ ID NO: 3238
uauguauguguauaucuca

SEQ ID NO: 251675 - RNA, 19 nt, Artificial Sequence
  Description of Artificial Sequence: Synthetic oligonucleotide
  Antisense strand to SEQ ID NO: 251674
ugagauauacacauacaua

SEQ ID NO: 251676 - RNA, 19 nt, Artificial Sequence
  Description of Artificial Sequence: Synthetic oligonucleotide
  Sense strand starting at position 3413 SEQ ID NO: 3238
guauguguauaucucauca

SEQ ID NO: 251677 - RNA, 19 nt, Artificial Sequence
  Description of Artificial Sequence: Synthetic oligonucleotide
  Antisense strand to SEQ ID NO: 251676
ugaugagauauacacauac

SEQ ID NO: 251678 - RNA, 19 nt, Artificial Sequence
  Description of Artificial Sequence: Synthetic oligonucleotide
  Sense strand starting at position 3417 SEQ ID NO: 3238
guguauaucucaucaucuc

SEQ ID NO: 251679 - RNA, 19 nt, Artificial Sequence
  Description of Artificial Sequence: Synthetic oligonucleotide
  Antisense strand to SEQ ID NO: 251678
gagaugaugagauauacac

SEQ ID NO: 251680 - RNA, 19 nt, Artificial Sequence
  Description of Artificial Sequence: Synthetic oligonucleotide
  Sense strand starting at position 3457 SEQ ID NO: 3238
ucacuaaccugguuuguau

SEQ ID NO: 251681 - RNA, 19 nt, Artificial Sequence
  Description of Artificial Sequence: Synthetic oligonucleotide
  Antisense strand to SEQ ID NO: 251680
auacaaaccagguuaguga

SEQ ID NO: 251682 - RNA, 19 nt, Artificial Sequence
  Description of Artificial Sequence: Synthetic oligonucleotide
  Sense strand starting at position 3613 SEQ ID NO: 3238
gucuaagcuguugaagaca

SEQ ID NO: 251683 - RNA, 19 nt, Artificial Sequence
  Description of Artificial Sequence: Synthetic oligonucleotide
  Antisense strand to SEQ ID NO: 251682
ugucuucaacagcuuagac

SEQ ID NO: 251684 - RNA, 19 nt, Artificial Sequence
  Description of Artificial Sequence: Synthetic oligonucleotide
  Sense strand starting at position 3622 SEQ ID NO: 3238
guugaagacagcuguaauu

SEQ ID NO: 251685 - RNA, 19 nt, Artificial Sequence
  Description of Artificial Sequence: Synthetic oligonucleotide
  Antisense strand to SEQ ID NO: 251684
aauuacagcugucuucaac

SEQ ID NO: 251686 - RNA, 19 nt, Artificial Sequence
  Description of Artificial Sequence: Synthetic oligonucleotide
  Sense strand starting at position 3697 SEQ ID NO: 3238
ccugguauacuguggaaga

SEQ ID NO: 251687 - RNA, 19 nt, Artificial Sequence
  Description of Artificial Sequence: Synthetic oligonucleotide
  Antisense strand to SEQ ID NO: 251686
ucuuccacaguauaccagg

SEQ ID NO: 251688 - RNA, 19 nt, Artificial Sequence
  Description of Artificial Sequence: Synthetic oligonucleotide
  Sense strand starting at position 3699 SEQ ID NO: 3238
ugguauacuguggaagagu

SEQ ID NO: 251689 - RNA, 19 nt, Artificial Sequence
  Description of Artificial Sequence: Synthetic oligonucleotide
  Antisense strand to SEQ ID NO: 251688
acucuuccacaguauacca

SEQ ID NO: 251690 - RNA, 19 nt, Artificial Sequence
  Description of Artificial Sequence: Synthetic oligonucleotide
  Sense strand starting at position 3778 SEQ ID NO: 3238
caacucuugcuagaaacgu

SEQ ID NO: 251691 - RNA, 19 nt, Artificial Sequence
  Description of Artificial Sequence: Synthetic oligonucleotide
  Antisense strand to SEQ ID NO: 251690
acguuucuagcaagaguug

SEQ ID NO: 251692 - RNA, 19 nt, Artificial Sequence
  Description of Artificial Sequence: Synthetic oligonucleotide
  Sense strand starting at position 3848 SEQ ID NO: 3238
gccaaaggguucucucuaa

SEQ ID NO: 251693 - RNA, 19 nt, Artificial Sequence
  Description of Artificial Sequence: Synthetic oligonucleotide
  Antisense strand to SEQ ID NO: 251692
uuagagagaacccuuuggc

SEQ ID NO: 251694 - RNA, 19 nt, Artificial Sequence
  Description of Artificial Sequence: Synthetic oligonucleotide
  Sense strand starting at position 3901 SEQ ID NO: 3238
aggucaaacugaguacuau

SEQ ID NO: 251695 - RNA, 19 nt, Artificial Sequence
  Description of Artificial Sequence: Synthetic oligonucleotide
  Antisense strand to SEQ ID NO: 251694
auaguacucaguuugaccu

SEQ ID NO: 251696 - RNA, 19 nt, Artificial Sequence
  Description of Artificial Sequence: Synthetic oligonucleotide
  Sense strand starting at position 3907 SEQ ID NO: 3238
aacugaguacuaugagguu

SEQ ID NO: 251697 - RNA, 19 nt, Artificial Sequence
  Description of Artificial Sequence: Synthetic oligonucleotide
  Antisense strand to SEQ ID NO: 251696
aaccucauaguacucaguu

SEQ ID NO: 251698 - RNA, 19 nt, Artificial Sequence
  Description of Artificial Sequence: Synthetic oligonucleotide
  Sense strand starting at position 1 SEQ ID NO: 3239
uguauucuuugaucaaagu

SEQ ID NO: 251699 - RNA, 19 nt, Artificial Sequence
  Description of Artificial Sequence: Synthetic oligonucleotide
  Antisense strand to SEQ ID NO: 251698
acuuugaucaaagaauaca

SEQ ID NO: 251700 - RNA, 19 nt, Artificial Sequence
  Description of Artificial Sequence: Synthetic oligonucleotide
  Sense strand starting at position 2 SEQ ID NO: 3239
guauucuuugaucaaaguc

SEQ ID NO: 251701 - RNA, 19 nt, Artificial Sequence
  Description of Artificial Sequence: Synthetic oligonucleotide
  Antisense strand to SEQ ID NO: 251700
gacuuugaucaaagaauac

SEQ ID NO: 251702 - RNA, 19 nt, Artificial Sequence
  Description of Artificial Sequence: Synthetic oligonucleotide
  Sense strand starting at position 455 SEQ ID NO: 3239
aaugauaggucagcaucuu

SEQ ID NO: 251703 - RNA, 19 nt, Artificial Sequence
  Description of Artificial Sequence: Synthetic oligonucleotide
  Antisense strand to SEQ ID NO: 251702
aagaugcugaccuaucauu

SEQ ID NO: 251704 - RNA, 19 nt, Artificial Sequence
  Description of Artificial Sequence: Synthetic oligonucleotide
  Sense strand starting at position 456 SEQ ID NO: 3239
augauaggucagcaucuuu

SEQ ID NO: 251705 - RNA, 19 nt, Artificial Sequence
  Description of Artificial Sequence: Synthetic oligonucleotide
  Antisense strand to SEQ ID NO: 251704
aaagaugcugaccuaucau

SEQ ID NO: 251706 - RNA, 19 nt, Artificial Sequence
  Description of Artificial Sequence: Synthetic oligonucleotide
  Sense strand starting at position 792 SEQ ID NO: 3239
gccagucucuguggaauga

SEQ ID NO: 251707 - RNA, 19 nt, Artificial Sequence
  Description of Artificial Sequence: Synthetic oligonucleotide
  Antisense strand to SEQ ID NO: 251706
ucauuccacagagacuggc

SEQ ID NO: 251708 - RNA, 19 nt, Artificial Sequence
  Description of Artificial Sequence: Synthetic oligonucleotide
  Sense strand starting at position 793 SEQ ID NO: 3239
ccagucucuguggaaugaa

SEQ ID NO: 251709 - RNA, 19 nt, Artificial Sequence
  Description of Artificial Sequence: Synthetic oligonucleotide
  Antisense strand to SEQ ID NO: 251708
uucauuccacagagacugg

SEQ ID NO: 251710 - RNA, 19 nt, Artificial Sequence
  Description of Artificial Sequence: Synthetic oligonucleotide
  Sense strand starting at position 1049 SEQ ID NO: 3239
ggcuuuguagaccacaaga

SEQ ID NO: 251711 - RNA, 19 nt, Artificial Sequence
  Description of Artificial Sequence: Synthetic oligonucleotide
  Antisense strand to SEQ ID NO: 251710
ucuuguggucuacaaagcc

SEQ ID NO: 251712 - RNA, 19 nt, Artificial Sequence
  Description of Artificial Sequence: Synthetic oligonucleotide
  Sense strand starting at position 1069 SEQ ID NO: 3239
ggaagagaaugugcucaca

SEQ ID NO: 251713 - RNA, 19 nt, Artificial Sequence
  Description of Artificial Sequence: Synthetic oligonucleotide
  Antisense strand to SEQ ID NO: 251712
ugugagcacauucucuucc

SEQ ID NO: 251714 - RNA, 19 nt, Artificial Sequence
  Description of Artificial Sequence: Synthetic oligonucleotide
  Sense strand starting at position 1071 SEQ ID NO: 3239
aagagaaugugcucacaua

SEQ ID NO: 251715 - RNA, 19 nt, Artificial Sequence
  Description of Artificial Sequence: Synthetic oligonucleotide
  Antisense strand to SEQ ID NO: 251714
uaugugagcacauucucuu

SEQ ID NO: 251716 - RNA, 19 nt, Artificial Sequence
  Description of Artificial Sequence: Synthetic oligonucleotide
  Sense strand starting at position 1423 SEQ ID NO: 3239
acucaagccuacucguuaa

SEQ ID NO: 251717 - RNA, 19 nt, Artificial Sequence
  Description of Artificial Sequence: Synthetic oligonucleotide
  Antisense strand to SEQ ID NO: 251716
uuaacgaguaggcuugagu

SEQ ID NO: 251718 - RNA, 19 nt, Artificial Sequence
  Description of Artificial Sequence: Synthetic oligonucleotide
  Sense strand starting at position 1515 SEQ ID NO: 3239
acggaaacgcucuguggaa

SEQ ID NO: 251719 - RNA, 19 nt, Artificial Sequence
  Description of Artificial Sequence: Synthetic oligonucleotide
  Antisense strand to SEQ ID NO: 251718
uuccacagagcguuuccgu

SEQ ID NO: 251720 - RNA, 19 nt, Artificial Sequence
  Description of Artificial Sequence: Synthetic oligonucleotide
  Sense strand starting at position 2788 SEQ ID NO: 3239
gggauauucucaucugaca

SEQ ID NO: 251721 - RNA, 19 nt, Artificial Sequence
  Description of Artificial Sequence: Synthetic oligonucleotide
  Antisense strand to SEQ ID NO: 251720
ugucagaugagaauauccc

SEQ ID NO: 251722 - RNA, 19 nt, Artificial Sequence
  Description of Artificial Sequence: Synthetic oligonucleotide
  Sense strand starting at position 2876 SEQ ID NO: 3239
gcuaaacugucagucagau

SEQ ID NO: 251723 - RNA, 19 nt, Artificial Sequence
  Description of Artificial Sequence: Synthetic oligonucleotide
  Antisense strand to SEQ ID NO: 251722
aucugacugacaguuuagc

SEQ ID NO: 251724 - RNA, 19 nt, Artificial Sequence
  Description of Artificial Sequence: Synthetic oligonucleotide
  Sense strand starting at position 2903 SEQ ID NO: 3239
ugcuuuagggucuaagaua

SEQ ID NO: 251725 - RNA, 19 nt, Artificial Sequence
  Description of Artificial Sequence: Synthetic oligonucleotide
  Antisense strand to SEQ ID NO: 251724
uaucuuagacccuaaagca

SEQ ID NO: 251726 - RNA, 19 nt, Artificial Sequence
  Description of Artificial Sequence: Synthetic oligonucleotide
  Sense strand starting at position 2911 SEQ ID NO: 3239
ggucuaagauagucauucu

SEQ ID NO: 251727 - RNA, 19 nt, Artificial Sequence
  Description of Artificial Sequence: Synthetic oligonucleotide
  Antisense strand to SEQ ID NO: 251726
agaaugacuaucuuagacc

SEQ ID NO: 251728 - RNA, 19 nt, Artificial Sequence
  Description of Artificial Sequence: Synthetic oligonucleotide
  Sense strand starting at position 2914 SEQ ID NO: 3239
cuaagauagucauucuaug

SEQ ID NO: 251729 - RNA, 19 nt, Artificial Sequence
  Description of Artificial Sequence: Synthetic oligonucleotide
  Antisense strand to SEQ ID NO: 251728
cauagaaugacuaucuuag

SEQ ID NO: 251730 - RNA, 19 nt, Artificial Sequence
  Description of Artificial Sequence: Synthetic oligonucleotide
  Sense strand starting at position 2919 SEQ ID NO: 3239
auagucauucuaugugagu

SEQ ID NO: 251731 - RNA, 19 nt, Artificial Sequence
  Description of Artificial Sequence: Synthetic oligonucleotide
  Antisense strand to SEQ ID NO: 251730
acucacauagaaugacuau

SEQ ID NO: 251732 - RNA, 19 nt, Artificial Sequence
  Description of Artificial Sequence: Synthetic oligonucleotide
  Sense strand starting at position 2922 SEQ ID NO: 3239
gucauucuaugugagucaa

SEQ ID NO: 251733 - RNA, 19 nt, Artificial Sequence
  Description of Artificial Sequence: Synthetic oligonucleotide
  Antisense strand to SEQ ID NO: 251732
uugacucacauagaaugac

SEQ ID NO: 251734 - RNA, 19 nt, Artificial Sequence
  Description of Artificial Sequence: Synthetic oligonucleotide
  Sense strand starting at position 2924 SEQ ID NO: 3239
cauucuaugugagucaaug

SEQ ID NO: 251735 - RNA, 19 nt, Artificial Sequence
  Description of Artificial Sequence: Synthetic oligonucleotide
  Antisense strand to SEQ ID NO: 251734
cauugacucacauagaaug

SEQ ID NO: 251736 - RNA, 19 nt, Artificial Sequence
  Description of Artificial Sequence: Synthetic oligonucleotide
  Sense strand starting at position 2940 SEQ ID NO: 3239
auguguuacugccuuguca

SEQ ID NO: 251737 - RNA, 19 nt, Artificial Sequence
  Description of Artificial Sequence: Synthetic oligonucleotide
  Antisense strand to SEQ ID NO: 251736
ugacaaggcaguaacacau

SEQ ID NO: 251738 - RNA, 19 nt, Artificial Sequence
  Description of Artificial Sequence: Synthetic oligonucleotide
  Sense strand starting at position 3005 SEQ ID NO: 3239
ucuccauccucugagggaa

SEQ ID NO: 251739 - RNA, 19 nt, Artificial Sequence
  Description of Artificial Sequence: Synthetic oligonucleotide
  Antisense strand to SEQ ID NO: 251738
uucccucagaggauggaga

SEQ ID NO: 251740 - RNA, 19 nt, Artificial Sequence
  Description of Artificial Sequence: Synthetic oligonucleotide
  Sense strand starting at position 3090 SEQ ID NO: 3239
agaagugucagcuggagaa

SEQ ID NO: 251741 - RNA, 19 nt, Artificial Sequence
  Description of Artificial Sequence: Synthetic oligonucleotide
  Antisense strand to SEQ ID NO: 251740
uucuccagcugacacuucu

SEQ ID NO: 251742 - RNA, 19 nt, Artificial Sequence
  Description of Artificial Sequence: Synthetic oligonucleotide
  Sense strand starting at position 3092 SEQ ID NO: 3239
aagugucagcuggagaaua

SEQ ID NO: 251743 - RNA, 19 nt, Artificial Sequence
  Description of Artificial Sequence: Synthetic oligonucleotide
  Antisense strand to SEQ ID NO: 251742
uauucuccagcugacacuu

SEQ ID NO: 251744 - RNA, 19 nt, Artificial Sequence
  Description of Artificial Sequence: Synthetic oligonucleotide
  Sense strand starting at position 3179 SEQ ID NO: 3239
agccuuacgugguguuuga

SEQ ID NO: 251745 - RNA, 19 nt, Artificial Sequence
  Description of Artificial Sequence: Synthetic oligonucleotide
  Antisense strand to SEQ ID NO: 251744
ucaaacaccacguaaggcu

SEQ ID NO: 251746 - RNA, 19 nt, Artificial Sequence
  Description of Artificial Sequence: Synthetic oligonucleotide
  Sense strand starting at position 3595 SEQ ID NO: 3239
cugugaacgccuuaggaua

SEQ ID NO: 251747 - RNA, 19 nt, Artificial Sequence
  Description of Artificial Sequence: Synthetic oligonucleotide
  Antisense strand to SEQ ID NO: 251746
uauccuaaggcguucacag

SEQ ID NO: 251748 - RNA, 19 nt, Artificial Sequence
  Description of Artificial Sequence: Synthetic oligonucleotide
  Sense strand starting at position 3621 SEQ ID NO: 3239
ccgccugcuuccucaagaa

SEQ ID NO: 251749 - RNA, 19 nt, Artificial Sequence
  Description of Artificial Sequence: Synthetic oligonucleotide
  Antisense strand to SEQ ID NO: 251748
uucuugaggaagcaggcgg

SEQ ID NO: 251750 - RNA, 19 nt, Artificial Sequence
  Description of Artificial Sequence: Synthetic oligonucleotide
  Sense strand starting at position 3796 SEQ ID NO: 3239
uuuacagagccucaagagu

SEQ ID NO: 251751 - RNA, 19 nt, Artificial Sequence
  Description of Artificial Sequence: Synthetic oligonucleotide
  Antisense strand to SEQ ID NO: 251750
acucuugaggcucuguaaa

SEQ ID NO: 251752 - RNA, 19 nt, Artificial Sequence
  Description of Artificial Sequence: Synthetic oligonucleotide
  Sense strand starting at position 3809 SEQ ID NO: 3239
aagaguggucgugaccaau

SEQ ID NO: 251753 - RNA, 19 nt, Artificial Sequence
  Description of Artificial Sequence: Synthetic oligonucleotide
  Antisense strand to SEQ ID NO: 251752
auuggucacgaccacucuu

SEQ ID NO: 251754 - RNA, 19 nt, Artificial Sequence
  Description of Artificial Sequence: Synthetic oligonucleotide
  Sense strand starting at position 3956 SEQ ID NO: 3239
ggaucaugucuggagggca

SEQ ID NO: 251755 - RNA, 19 nt, Artificial Sequence
  Description of Artificial Sequence: Synthetic oligonucleotide
  Antisense strand to SEQ ID NO: 251754
ugcccuccagacaugaucc

SEQ ID NO: 251756 - RNA, 19 nt, Artificial Sequence
  Description of Artificial Sequence: Synthetic oligonucleotide
  Sense strand starting at position 3972 SEQ ID NO: 3239
gcaugauggagugggauau

SEQ ID NO: 251757 - RNA, 19 nt, Artificial Sequence
  Description of Artificial Sequence: Synthetic oligonucleotide
  Antisense strand to SEQ ID NO: 251756
auaucccacuccaucaugc

SEQ ID NO: 251758 - RNA, 19 nt, Artificial Sequence
  Description of Artificial Sequence: Synthetic oligonucleotide
  Sense strand starting at position 3973 SEQ ID NO: 3239
caugauggagugggauauu

SEQ ID NO: 251759 - RNA, 19 nt, Artificial Sequence
  Description of Artificial Sequence: Synthetic oligonucleotide
  Antisense strand to SEQ ID NO: 251758
aauaucccacuccaucaug

SEQ ID NO: 251760 - RNA, 19 nt, Artificial Sequence
  Description of Artificial Sequence: Synthetic oligonucleotide
  Sense strand starting at position 3982 SEQ ID NO: 3239
gugggauauuaugaaggga

SEQ ID NO: 251761 - RNA, 19 nt, Artificial Sequence
  Description of Artificial Sequence: Synthetic oligonucleotide
  Antisense strand to SEQ ID NO: 251760
ucccuucauaauaucccac

SEQ ID NO: 251762 - RNA, 19 nt, Artificial Sequence
  Description of Artificial Sequence: Synthetic oligonucleotide
  Sense strand starting at position 294 SEQ ID NO: 3240
gagauaccugaugggcaua

SEQ ID NO: 251763 - RNA, 19 nt, Artificial Sequence
  Description of Artificial Sequence: Synthetic oligonucleotide
  Antisense strand to SEQ ID NO: 251762
uaugcccaucagguaucuc

SEQ ID NO: 251764 - RNA, 19 nt, Artificial Sequence
  Description of Artificial Sequence: Synthetic oligonucleotide
  Sense strand starting at position 403 SEQ ID NO: 3240
gugcacucacucuaaggau

SEQ ID NO: 251765 - RNA, 19 nt, Artificial Sequence
  Description of Artificial Sequence: Synthetic oligonucleotide
  Antisense strand to SEQ ID NO: 251764
auccuuagagugagugcac

SEQ ID NO: 251766 - RNA, 19 nt, Artificial Sequence
  Description of Artificial Sequence: Synthetic oligonucleotide
  Sense strand starting at position 736 SEQ ID NO: 3240
aaaggauuaugguuaagcu

SEQ ID NO: 251767 - RNA, 19 nt, Artificial Sequence
  Description of Artificial Sequence: Synthetic oligonucleotide
  Antisense strand to SEQ ID NO: 251766
agcuuaaccauaauccuuu

SEQ ID NO: 251768 - RNA, 19 nt, Artificial Sequence
  Description of Artificial Sequence: Synthetic oligonucleotide
  Sense strand starting at position 740 SEQ ID NO: 3240
gauuaugguuaagcucaaa

SEQ ID NO: 251769 - RNA, 19 nt, Artificial Sequence
  Description of Artificial Sequence: Synthetic oligonucleotide
  Antisense strand to SEQ ID NO: 251768
uuugagcuuaaccauaauc

SEQ ID NO: 251770 - RNA, 19 nt, Artificial Sequence
  Description of Artificial Sequence: Synthetic oligonucleotide
  Sense strand starting at position 743 SEQ ID NO: 3240
uaugguuaagcucaaauga

SEQ ID NO: 251771 - RNA, 19 nt, Artificial Sequence
  Description of Artificial Sequence: Synthetic oligonucleotide
  Antisense strand to SEQ ID NO: 251770
ucauuugagcuuaaccaua

SEQ ID NO: 251772 - RNA, 19 nt, Artificial Sequence
  Description of Artificial Sequence: Synthetic oligonucleotide
  Sense strand starting at position 844 SEQ ID NO: 3240
gugccuucgauuuagguuu

SEQ ID NO: 251773 - RNA, 19 nt, Artificial Sequence
  Description of Artificial Sequence: Synthetic oligonucleotide
  Antisense strand to SEQ ID NO: 251772
aaaccuaaaucgaaggcac

SEQ ID NO: 251774 - RNA, 19 nt, Artificial Sequence
  Description of Artificial Sequence: Synthetic oligonucleotide
  Sense strand starting at position 852 SEQ ID NO: 3240
gauuuagguuuggaaauug

SEQ ID NO: 251775 - RNA, 19 nt, Artificial Sequence
  Description of Artificial Sequence: Synthetic oligonucleotide
  Antisense strand to SEQ ID NO: 251774
caauuuccaaaccuaaauc

SEQ ID NO: 251776 - RNA, 19 nt, Artificial Sequence
  Description of Artificial Sequence: Synthetic oligonucleotide
  Sense strand starting at position 992 SEQ ID NO: 3240
agggcuaaauaguuaaaua

SEQ ID NO: 251777 - RNA, 19 nt, Artificial Sequence
  Description of Artificial Sequence: Synthetic oligonucleotide
  Antisense strand to SEQ ID NO: 251776
uauuuaacuauuuagcccu

SEQ ID NO: 251778 - RNA, 19 nt, Artificial Sequence
  Description of Artificial Sequence: Synthetic oligonucleotide
  Sense strand starting at position 1026 SEQ ID NO: 3240
gguaguuaaucuuuacaca

SEQ ID NO: 251779 - RNA, 19 nt, Artificial Sequence
  Description of Artificial Sequence: Synthetic oligonucleotide
  Antisense strand to SEQ ID NO: 251778
uguguaaagauuaacuacc

SEQ ID NO: 251780 - RNA, 19 nt, Artificial Sequence
  Description of Artificial Sequence: Synthetic oligonucleotide
  Sense strand starting at position 1027 SEQ ID NO: 3240
guaguuaaucuuuacacag

SEQ ID NO: 251781 - RNA, 19 nt, Artificial Sequence
  Description of Artificial Sequence: Synthetic oligonucleotide
  Antisense strand to SEQ ID NO: 251780
cuguguaaagauuaacuac

SEQ ID NO: 251782 - RNA, 19 nt, Artificial Sequence
  Description of Artificial Sequence: Synthetic oligonucleotide
  Sense strand starting at position 1069 SEQ ID NO: 3240
gcaaauuguacauaggagu

SEQ ID NO: 251783 - RNA, 19 nt, Artificial Sequence
  Description of Artificial Sequence: Synthetic oligonucleotide
  Antisense strand to SEQ ID NO: 251782
acuccuauguacaauuugc

SEQ ID NO: 251784 - RNA, 19 nt, Artificial Sequence
  Description of Artificial Sequence: Synthetic oligonucleotide
  Sense strand starting at position 1167 SEQ ID NO: 3240
augcauauugagcaagauu

SEQ ID NO: 251785 - RNA, 19 nt, Artificial Sequence
  Description of Artificial Sequence: Synthetic oligonucleotide
  Antisense strand to SEQ ID NO: 251784
aaucuugcucaauaugcau

SEQ ID NO: 251786 - RNA, 19 nt, Artificial Sequence
  Description of Artificial Sequence: Synthetic oligonucleotide
  Sense strand starting at position 1188 SEQ ID NO: 3240
uuaagcauaucauugagaa

SEQ ID NO: 251787 - RNA, 19 nt, Artificial Sequence
  Description of Artificial Sequence: Synthetic oligonucleotide
  Antisense strand to SEQ ID NO: 251786
uucucaaugauaugcuuaa

SEQ ID NO: 251788 - RNA, 19 nt, Artificial Sequence
  Description of Artificial Sequence: Synthetic oligonucleotide
  Sense strand starting at position 1222 SEQ ID NO: 3240
cugcuacgaguguauauuu

SEQ ID NO: 251789 - RNA, 19 nt, Artificial Sequence
  Description of Artificial Sequence: Synthetic oligonucleotide
  Antisense strand to SEQ ID NO: 251788
aaauauacacucguagcag

SEQ ID NO: 251790 - RNA, 19 nt, Artificial Sequence
  Description of Artificial Sequence: Synthetic oligonucleotide
  Sense strand starting at position 1253 SEQ ID NO: 3240
augaauuacuugcugaaca

SEQ ID NO: 251791 - RNA, 19 nt, Artificial Sequence
  Description of Artificial Sequence: Synthetic oligonucleotide
  Antisense strand to SEQ ID NO: 251790
uguucagcaaguaauucau

SEQ ID NO: 251792 - RNA, 19 nt, Artificial Sequence
  Description of Artificial Sequence: Synthetic oligonucleotide
  Sense strand starting at position 1263 SEQ ID NO: 3240
ugcugaacacguuaagaaa

SEQ ID NO: 251793 - RNA, 19 nt, Artificial Sequence
  Description of Artificial Sequence: Synthetic oligonucleotide
  Antisense strand to SEQ ID NO: 251792
uuucuuaacguguucagca

SEQ ID NO: 251794 - RNA, 19 nt, Artificial Sequence
  Description of Artificial Sequence: Synthetic oligonucleotide
  Sense strand starting at position 1556 SEQ ID NO: 3240
ucuggaguuugaccuaauc

SEQ ID NO: 251795 - RNA, 19 nt, Artificial Sequence
  Description of Artificial Sequence: Synthetic oligonucleotide
  Antisense strand to SEQ ID NO: 251794
gauuaggucaaacuccaga

SEQ ID NO: 251796 - RNA, 19 nt, Artificial Sequence
  Description of Artificial Sequence: Synthetic oligonucleotide
  Sense strand starting at position 1616 SEQ ID NO: 3240
ugucaaauguaaccauauu

SEQ ID NO: 251797 - RNA, 19 nt, Artificial Sequence
  Description of Artificial Sequence: Synthetic oligonucleotide
  Antisense strand to SEQ ID NO: 251796
aauaugguuacauuugaca

SEQ ID NO: 251798 - RNA, 19 nt, Artificial Sequence
  Description of Artificial Sequence: Synthetic oligonucleotide
  Sense strand starting at position 1710 SEQ ID NO: 3240
ggccuuuaggaaggucaua

SEQ ID NO: 251799 - RNA, 19 nt, Artificial Sequence
  Description of Artificial Sequence: Synthetic oligonucleotide
  Antisense strand to SEQ ID NO: 251798
uaugaccuuccuaaaggcc

SEQ ID NO: 251800 - RNA, 19 nt, Artificial Sequence
  Description of Artificial Sequence: Synthetic oligonucleotide
  Sense strand starting at position 1803 SEQ ID NO: 3240
caaggauucuagcugacag

SEQ ID NO: 251801 - RNA, 19 nt, Artificial Sequence
  Description of Artificial Sequence: Synthetic oligonucleotide
  Antisense strand to SEQ ID NO: 251800
cugucagcuagaauccuug

SEQ ID NO: 251802 - RNA, 19 nt, Artificial Sequence
  Description of Artificial Sequence: Synthetic oligonucleotide
  Sense strand starting at position 2144 SEQ ID NO: 3240
ggcuucuuuccagaggcaa

SEQ ID NO: 251803 - RNA, 19 nt, Artificial Sequence
  Description of Artificial Sequence: Synthetic oligonucleotide
  Antisense strand to SEQ ID NO: 251802
uugccucuggaaagaagcc

SEQ ID NO: 251804 - RNA, 19 nt, Artificial Sequence
  Description of Artificial Sequence: Synthetic oligonucleotide
  Sense strand starting at position 2227 SEQ ID NO: 3240
aacugaugaguuggucuua

SEQ ID NO: 251805 - RNA, 19 nt, Artificial Sequence
  Description of Artificial Sequence: Synthetic oligonucleotide
  Antisense strand to SEQ ID NO: 251804
uaagaccaacucaucaguu

SEQ ID NO: 251806 - RNA, 19 nt, Artificial Sequence
  Description of Artificial Sequence: Synthetic oligonucleotide
  Sense strand starting at position 2512 SEQ ID NO: 3240
uggaaacuagccuggcaaa

SEQ ID NO: 251807 - RNA, 19 nt, Artificial Sequence
  Description of Artificial Sequence: Synthetic oligonucleotide
  Antisense strand to SEQ ID NO: 251806
uuugccaggcuaguuucca

SEQ ID NO: 251808 - RNA, 19 nt, Artificial Sequence
  Description of Artificial Sequence: Synthetic oligonucleotide
  Sense strand starting at position 2622 SEQ ID NO: 3240
uuugaugaauauccuugua

SEQ ID NO: 251809 - RNA, 19 nt, Artificial Sequence
  Description of Artificial Sequence: Synthetic oligonucleotide
  Antisense strand to SEQ ID NO: 251808
uacaaggauauucaucaaa

SEQ ID NO: 251810 - RNA, 19 nt, Artificial Sequence
  Description of Artificial Sequence: Synthetic oligonucleotide
  Sense strand starting at position 2683 SEQ ID NO: 3240
ggaugaagaaugugcuuga

SEQ ID NO: 251811 - RNA, 19 nt, Artificial Sequence
  Description of Artificial Sequence: Synthetic oligonucleotide
  Antisense strand to SEQ ID NO: 251810
ucaagcacauucuucaucc

SEQ ID NO: 251812 - RNA, 19 nt, Artificial Sequence
  Description of Artificial Sequence: Synthetic oligonucleotide
  Sense strand starting at position 2684 SEQ ID NO: 3240
gaugaagaaugugcuugaa

SEQ ID NO: 251813 - RNA, 19 nt, Artificial Sequence
  Description of Artificial Sequence: Synthetic oligonucleotide
  Antisense strand to SEQ ID NO: 251812
uucaagcacauucuucauc

SEQ ID NO: 251814 - RNA, 19 nt, Artificial Sequence
  Description of Artificial Sequence: Synthetic oligonucleotide
  Sense strand starting at position 2686 SEQ ID NO: 3240
ugaagaaugugcuugaaua

SEQ ID NO: 251815 - RNA, 19 nt, Artificial Sequence
  Description of Artificial Sequence: Synthetic oligonucleotide
  Antisense strand to SEQ ID NO: 251814
uauucaagcacauucuuca

SEQ ID NO: 251816 - RNA, 19 nt, Artificial Sequence
  Description of Artificial Sequence: Synthetic oligonucleotide
  Sense strand starting at position 2687 SEQ ID NO: 3240
gaagaaugugcuugaauaa

SEQ ID NO: 251817 - RNA, 19 nt, Artificial Sequence
  Description of Artificial Sequence: Synthetic oligonucleotide
  Antisense strand to SEQ ID NO: 251816
uuauucaagcacauucuuc

SEQ ID NO: 251818 - RNA, 19 nt, Artificial Sequence
  Description of Artificial Sequence: Synthetic oligonucleotide
  Sense strand starting at position 2694 SEQ ID NO: 3240
gugcuugaauaauugaaug

SEQ ID NO: 251819 - RNA, 19 nt, Artificial Sequence
  Description of Artificial Sequence: Synthetic oligonucleotide
  Antisense strand to SEQ ID NO: 251818
cauucaauuauucaagcac

SEQ ID NO: 251820 - RNA, 19 nt, Artificial Sequence
  Description of Artificial Sequence: Synthetic oligonucleotide
  Sense strand starting at position 2794 SEQ ID NO: 3240
uuguauaacccugagcaau

SEQ ID NO: 251821 - RNA, 19 nt, Artificial Sequence
  Description of Artificial Sequence: Synthetic oligonucleotide
  Antisense strand to SEQ ID NO: 251820
auugcucaggguuauacaa

SEQ ID NO: 251822 - RNA, 19 nt, Artificial Sequence
  Description of Artificial Sequence: Synthetic oligonucleotide
  Sense strand starting at position 2829 SEQ ID NO: 3240
gaggcucagucuccuauuu

SEQ ID NO: 251823 - RNA, 19 nt, Artificial Sequence
  Description of Artificial Sequence: Synthetic oligonucleotide
  Antisense strand to SEQ ID NO: 251822
aaauaggagacugagccuc

SEQ ID NO: 251824 - RNA, 19 nt, Artificial Sequence
  Description of Artificial Sequence: Synthetic oligonucleotide
  Sense strand starting at position 3016 SEQ ID NO: 3240
agauaaagugcaugaaauu

SEQ ID NO: 251825 - RNA, 19 nt, Artificial Sequence
  Description of Artificial Sequence: Synthetic oligonucleotide
  Antisense strand to SEQ ID NO: 251824
aauuucaugcacuuuaucu

SEQ ID NO: 251826 - RNA, 19 nt, Artificial Sequence
  Description of Artificial Sequence: Synthetic oligonucleotide
  Sense strand starting at position 3027 SEQ ID NO: 3240
augaaauugcuuuaauacg

SEQ ID NO: 251827 - RNA, 19 nt, Artificial Sequence
  Description of Artificial Sequence: Synthetic oligonucleotide
  Antisense strand to SEQ ID NO: 251826
cguauuaaagcaauuucau

SEQ ID NO: 251828 - RNA, 19 nt, Artificial Sequence
  Description of Artificial Sequence: Synthetic oligonucleotide
  Sense strand starting at position 3036 SEQ ID NO: 3240
cuuuaauacgaguaauuga

SEQ ID NO: 251829 - RNA, 19 nt, Artificial Sequence
  Description of Artificial Sequence: Synthetic oligonucleotide
  Antisense strand to SEQ ID NO: 251828
ucaauuacucguauuaaag

SEQ ID NO: 251830 - RNA, 19 nt, Artificial Sequence
  Description of Artificial Sequence: Synthetic oligonucleotide
  Sense strand starting at position 3041 SEQ ID NO: 3240
auacgaguaauugaccagu

SEQ ID NO: 251831 - RNA, 19 nt, Artificial Sequence
  Description of Artificial Sequence: Synthetic oligonucleotide
  Antisense strand to SEQ ID NO: 251830
acuggucaauuacucguau

SEQ ID NO: 251832 - RNA, 19 nt, Artificial Sequence
  Description of Artificial Sequence: Synthetic oligonucleotide
  Sense strand starting at position 3043 SEQ ID NO: 3240
acgaguaauugaccaguga

SEQ ID NO: 251833 - RNA, 19 nt, Artificial Sequence
  Description of Artificial Sequence: Synthetic oligonucleotide
  Antisense strand to SEQ ID NO: 251832
ucacuggucaauuacucgu

SEQ ID NO: 251834 - RNA, 19 nt, Artificial Sequence
  Description of Artificial Sequence: Synthetic oligonucleotide
  Sense strand starting at position 3044 SEQ ID NO: 3240
cgaguaauugaccagugaa

SEQ ID NO: 251835 - RNA, 19 nt, Artificial Sequence
  Description of Artificial Sequence: Synthetic oligonucleotide
  Antisense strand to SEQ ID NO: 251834
uucacuggucaauuacucg

SEQ ID NO: 251836 - RNA, 19 nt, Artificial Sequence
  Description of Artificial Sequence: Synthetic oligonucleotide
  Sense strand starting at position 3233 SEQ ID NO: 3240
ggaagauuaccaggcucua

SEQ ID NO: 251837 - RNA, 19 nt, Artificial Sequence
  Description of Artificial Sequence: Synthetic oligonucleotide
  Antisense strand to SEQ ID NO: 251836
uagagccugguaaucuucc

SEQ ID NO: 251838 - RNA, 19 nt, Artificial Sequence
  Description of Artificial Sequence: Synthetic oligonucleotide
  Sense strand starting at position 3468 SEQ ID NO: 3240
ggaggucuaagcuauacuu

SEQ ID NO: 251839 - RNA, 19 nt, Artificial Sequence
  Description of Artificial Sequence: Synthetic oligonucleotide
  Antisense strand to SEQ ID NO: 251838
aaguauagcuuagaccucc

SEQ ID NO: 251840 - RNA, 19 nt, Artificial Sequence
  Description of Artificial Sequence: Synthetic oligonucleotide
  Sense strand starting at position 3800 SEQ ID NO: 3240
aauacugaucauggaaugu

SEQ ID NO: 251841 - RNA, 19 nt, Artificial Sequence
  Description of Artificial Sequence: Synthetic oligonucleotide
  Antisense strand to SEQ ID NO: 251840
acauuccaugaucaguauu

SEQ ID NO: 251842 - RNA, 19 nt, Artificial Sequence
  Description of Artificial Sequence: Synthetic oligonucleotide
  Sense strand starting at position 119 SEQ ID NO: 3241
gguuucugucacuaggaca

SEQ ID NO: 251843 - RNA, 19 nt, Artificial Sequence
  Description of Artificial Sequence: Synthetic oligonucleotide
  Antisense strand to SEQ ID NO: 251842
uguccuagugacagaaacc

SEQ ID NO: 251844 - RNA, 19 nt, Artificial Sequence
  Description of Artificial Sequence: Synthetic oligonucleotide
  Sense strand starting at position 216 SEQ ID NO: 3241
ugagaaucugcacagcuaa

SEQ ID NO: 251845 - RNA, 19 nt, Artificial Sequence
  Description of Artificial Sequence: Synthetic oligonucleotide
  Antisense strand to SEQ ID NO: 251844
uuagcugugcagauucuca

SEQ ID NO: 251846 - RNA, 19 nt, Artificial Sequence
  Description of Artificial Sequence: Synthetic oligonucleotide
  Sense strand starting at position 506 SEQ ID NO: 3241
cuguaaggccuuuauauca

SEQ ID NO: 251847 - RNA, 19 nt, Artificial Sequence
  Description of Artificial Sequence: Synthetic oligonucleotide
  Antisense strand to SEQ ID NO: 251846
ugauauaaaggccuuacag

SEQ ID NO: 251848 - RNA, 19 nt, Artificial Sequence
  Description of Artificial Sequence: Synthetic oligonucleotide
  Sense strand starting at position 1116 SEQ ID NO: 3241
uggagugacaccgguacaa

SEQ ID NO: 251849 - RNA, 19 nt, Artificial Sequence
  Description of Artificial Sequence: Synthetic oligonucleotide
  Antisense strand to SEQ ID NO: 251848
uuguaccggugucacucca

SEQ ID NO: 251850 - RNA, 19 nt, Artificial Sequence
  Description of Artificial Sequence: Synthetic oligonucleotide
  Sense strand starting at position 1171 SEQ ID NO: 3241
gcacuaacaguuuaaagac

SEQ ID NO: 251851 - RNA, 19 nt, Artificial Sequence
  Description of Artificial Sequence: Synthetic oligonucleotide
  Antisense strand to SEQ ID NO: 251850
gucuuuaaacuguuagugc

SEQ ID NO: 251852 - RNA, 19 nt, Artificial Sequence
  Description of Artificial Sequence: Synthetic oligonucleotide
  Sense strand starting at position 1236 SEQ ID NO: 3241
acuuguguauaaucacaaa

SEQ ID NO: 251853 - RNA, 19 nt, Artificial Sequence
  Description of Artificial Sequence: Synthetic oligonucleotide
  Antisense strand to SEQ ID NO: 251852
uuugugauuauacacaagu

SEQ ID NO: 251854 - RNA, 19 nt, Artificial Sequence
  Description of Artificial Sequence: Synthetic oligonucleotide
  Sense strand starting at position 1271 SEQ ID NO: 3241
ugugaauaccguuaggauu

SEQ ID NO: 251855 - RNA, 19 nt, Artificial Sequence
  Description of Artificial Sequence: Synthetic oligonucleotide
  Antisense strand to SEQ ID NO: 251854
aauccuaacgguauucaca

SEQ ID NO: 251856 - RNA, 19 nt, Artificial Sequence
  Description of Artificial Sequence: Synthetic oligonucleotide
  Sense strand starting at position 1485 SEQ ID NO: 3241
acguauuuaucgucgaauc

SEQ ID NO: 251857 - RNA, 19 nt, Artificial Sequence
  Description of Artificial Sequence: Synthetic oligonucleotide
  Antisense strand to SEQ ID NO: 251856
gauucgacgauaaauacgu

SEQ ID NO: 251858 - RNA, 19 nt, Artificial Sequence
  Description of Artificial Sequence: Synthetic oligonucleotide
  Sense strand starting at position 1486 SEQ ID NO: 3241
cguauuuaucgucgaauca

SEQ ID NO: 251859 - RNA, 19 nt, Artificial Sequence
  Description of Artificial Sequence: Synthetic oligonucleotide
  Antisense strand to SEQ ID NO: 251858
ugauucgacgauaaauacg

SEQ ID NO: 251860 - RNA, 19 nt, Artificial Sequence
  Description of Artificial Sequence: Synthetic oligonucleotide
  Sense strand starting at position 1631 SEQ ID NO: 3241
agccuucggccagggauuu

SEQ ID NO: 251861 - RNA, 19 nt, Artificial Sequence
  Description of Artificial Sequence: Synthetic oligonucleotide
  Antisense strand to SEQ ID NO: 251860
aaaucccuggccgaaggcu

SEQ ID NO: 251862 - RNA, 19 nt, Artificial Sequence
  Description of Artificial Sequence: Synthetic oligonucleotide
  Sense strand starting at position 1637 SEQ ID NO: 3241
cggccagggauuuguuaua

SEQ ID NO: 251863 - RNA, 19 nt, Artificial Sequence
  Description of Artificial Sequence: Synthetic oligonucleotide
  Antisense strand to SEQ ID NO: 251862
uauaacaaaucccuggccg

SEQ ID NO: 251864 - RNA, 19 nt, Artificial Sequence
  Description of Artificial Sequence: Synthetic oligonucleotide
  Sense strand starting at position 1642 SEQ ID NO: 3241
agggauuuguuauaaucag

SEQ ID NO: 251865 - RNA, 19 nt, Artificial Sequence
  Description of Artificial Sequence: Synthetic oligonucleotide
  Antisense strand to SEQ ID NO: 251864
cugauuauaacaaaucccu

SEQ ID NO: 251866 - RNA, 19 nt, Artificial Sequence
  Description of Artificial Sequence: Synthetic oligonucleotide
  Sense strand starting at position 1648 SEQ ID NO: 3241
uuguuauaaucagcauaag

SEQ ID NO: 251867 - RNA, 19 nt, Artificial Sequence
  Description of Artificial Sequence: Synthetic oligonucleotide
  Antisense strand to SEQ ID NO: 251866
cuuaugcugauuauaacaa

SEQ ID NO: 251868 - RNA, 19 nt, Artificial Sequence
  Description of Artificial Sequence: Synthetic oligonucleotide
  Sense strand starting at position 2118 SEQ ID NO: 3241
ucuuacaguuuguuaaaga

SEQ ID NO: 251869 - RNA, 19 nt, Artificial Sequence
  Description of Artificial Sequence: Synthetic oligonucleotide
  Antisense strand to SEQ ID NO: 251868
ucuuuaacaaacuguaaga

SEQ ID NO: 251870 - RNA, 19 nt, Artificial Sequence
  Description of Artificial Sequence: Synthetic oligonucleotide
  Sense strand starting at position 2138 SEQ ID NO: 3241
acaggcguguaauuucuaa

SEQ ID NO: 251871 - RNA, 19 nt, Artificial Sequence
  Description of Artificial Sequence: Synthetic oligonucleotide
  Antisense strand to SEQ ID NO: 251870
uuagaaauuacacgccugu

SEQ ID NO: 251872 - RNA, 19 nt, Artificial Sequence
  Description of Artificial Sequence: Synthetic oligonucleotide
  Sense strand starting at position 2156 SEQ ID NO: 3241
aaggauaacgcaggguauu

SEQ ID NO: 251873 - RNA, 19 nt, Artificial Sequence
  Description of Artificial Sequence: Synthetic oligonucleotide
  Antisense strand to SEQ ID NO: 251872
aauacccugcguuauccuu

SEQ ID NO: 251874 - RNA, 19 nt, Artificial Sequence
  Description of Artificial Sequence: Synthetic oligonucleotide
  Sense strand starting at position 2175 SEQ ID NO: 3241
uuaauuacuggguagcaga

SEQ ID NO: 251875 - RNA, 19 nt, Artificial Sequence
  Description of Artificial Sequence: Synthetic oligonucleotide
  Antisense strand to SEQ ID NO: 251874
ucugcuacccaguaauuaa

SEQ ID NO: 251876 - RNA, 19 nt, Artificial Sequence
  Description of Artificial Sequence: Synthetic oligonucleotide
  Sense strand starting at position 2203 SEQ ID NO: 3241
cuagaaucacgcggagaug

SEQ ID NO: 251877 - RNA, 19 nt, Artificial Sequence
  Description of Artificial Sequence: Synthetic oligonucleotide
  Antisense strand to SEQ ID NO: 251876
caucuccgcgugauucuag

SEQ ID NO: 251878 - RNA, 19 nt, Artificial Sequence
  Description of Artificial Sequence: Synthetic oligonucleotide
  Sense strand starting at position 2355 SEQ ID NO: 3241
auuucugcuguucgcaaua

SEQ ID NO: 251879 - RNA, 19 nt, Artificial Sequence
  Description of Artificial Sequence: Synthetic oligonucleotide
  Antisense strand to SEQ ID NO: 251878
uauugcgaacagcagaaau

SEQ ID NO: 251880 - RNA, 19 nt, Artificial Sequence
  Description of Artificial Sequence: Synthetic oligonucleotide
  Sense strand starting at position 2399 SEQ ID NO: 3241
gauaaugucucuccaggga

SEQ ID NO: 251881 - RNA, 19 nt, Artificial Sequence
  Description of Artificial Sequence: Synthetic oligonucleotide
  Antisense strand to SEQ ID NO: 251880
ucccuggagagacauuauc

SEQ ID NO: 251882 - RNA, 19 nt, Artificial Sequence
  Description of Artificial Sequence: Synthetic oligonucleotide
  Sense strand starting at position 3063 SEQ ID NO: 3241
ugagucuuaagcuggauau

SEQ ID NO: 251883 - RNA, 19 nt, Artificial Sequence
  Description of Artificial Sequence: Synthetic oligonucleotide
  Antisense strand to SEQ ID NO: 251882
auauccagcuuaagacuca

SEQ ID NO: 251884 - RNA, 19 nt, Artificial Sequence
  Description of Artificial Sequence: Synthetic oligonucleotide
  Sense strand starting at position 3064 SEQ ID NO: 3241
gagucuuaagcuggauauc

SEQ ID NO: 251885 - RNA, 19 nt, Artificial Sequence
  Description of Artificial Sequence: Synthetic oligonucleotide
  Antisense strand to SEQ ID NO: 251884
gauauccagcuuaagacuc

SEQ ID NO: 251886 - RNA, 19 nt, Artificial Sequence
  Description of Artificial Sequence: Synthetic oligonucleotide
  Sense strand starting at position 3065 SEQ ID NO: 3241
agucuuaagcuggauaucu

SEQ ID NO: 251887 - RNA, 19 nt, Artificial Sequence
  Description of Artificial Sequence: Synthetic oligonucleotide
  Antisense strand to SEQ ID NO: 251886
agauauccagcuuaagacu

SEQ ID NO: 251888 - RNA, 19 nt, Artificial Sequence
  Description of Artificial Sequence: Synthetic oligonucleotide
  Sense strand starting at position 3243 SEQ ID NO: 3241
gcaggaugguaauuguaua

SEQ ID NO: 251889 - RNA, 19 nt, Artificial Sequence
  Description of Artificial Sequence: Synthetic oligonucleotide
  Antisense strand to SEQ ID NO: 251888
uauacaauuaccauccugc

SEQ ID NO: 251890 - RNA, 19 nt, Artificial Sequence
  Description of Artificial Sequence: Synthetic oligonucleotide
  Sense strand starting at position 3267 SEQ ID NO: 3241
auaguaugccucuaucuua

SEQ ID NO: 251891 - RNA, 19 nt, Artificial Sequence
  Description of Artificial Sequence: Synthetic oligonucleotide
  Antisense strand to SEQ ID NO: 251890
uaagauagaggcauacuau

SEQ ID NO: 251892 - RNA, 19 nt, Artificial Sequence
  Description of Artificial Sequence: Synthetic oligonucleotide
  Sense strand starting at position 3270 SEQ ID NO: 3241
guaugccucuaucuuauuu

SEQ ID NO: 251893 - RNA, 19 nt, Artificial Sequence
  Description of Artificial Sequence: Synthetic oligonucleotide
  Antisense strand to SEQ ID NO: 251892
aaauaagauagaggcauac

SEQ ID NO: 251894 - RNA, 19 nt, Artificial Sequence
  Description of Artificial Sequence: Synthetic oligonucleotide
  Sense strand starting at position 3309 SEQ ID NO: 3241
gauggacauuguuucuaac

SEQ ID NO: 251895 - RNA, 19 nt, Artificial Sequence
  Description of Artificial Sequence: Synthetic oligonucleotide
  Antisense strand to SEQ ID NO: 251894
guuagaaacaauguccauc

SEQ ID NO: 251896 - RNA, 19 nt, Artificial Sequence
  Description of Artificial Sequence: Synthetic oligonucleotide
  Sense strand starting at position 3311 SEQ ID NO: 3241
uggacauuguuucuaacuu

SEQ ID NO: 251897 - RNA, 19 nt, Artificial Sequence
  Description of Artificial Sequence: Synthetic oligonucleotide
  Antisense strand to SEQ ID NO: 251896
aaguuagaaacaaugucca

SEQ ID NO: 251898 - RNA, 19 nt, Artificial Sequence
  Description of Artificial Sequence: Synthetic oligonucleotide
  Sense strand starting at position 3377 SEQ ID NO: 3241
gugaguaucccugagacau

SEQ ID NO: 251899 - RNA, 19 nt, Artificial Sequence
  Description of Artificial Sequence: Synthetic oligonucleotide
  Antisense strand to SEQ ID NO: 251898
augucucagggauacucac

SEQ ID NO: 251900 - RNA, 19 nt, Artificial Sequence
  Description of Artificial Sequence: Synthetic oligonucleotide
  Sense strand starting at position 3405 SEQ ID NO: 3241
agucaauugcuggaucaua

SEQ ID NO: 251901 - RNA, 19 nt, Artificial Sequence
  Description of Artificial Sequence: Synthetic oligonucleotide
  Antisense strand to SEQ ID NO: 251900
uaugauccagcaauugacu

SEQ ID NO: 251902 - RNA, 19 nt, Artificial Sequence
  Description of Artificial Sequence: Synthetic oligonucleotide
  Sense strand starting at position 3421 SEQ ID NO: 3241
auaugagauucuguacuua

SEQ ID NO: 251903 - RNA, 19 nt, Artificial Sequence
  Description of Artificial Sequence: Synthetic oligonucleotide
  Antisense strand to SEQ ID NO: 251902
uaaguacagaaucucauau

SEQ ID NO: 251904 - RNA, 19 nt, Artificial Sequence
  Description of Artificial Sequence: Synthetic oligonucleotide
  Sense strand starting at position 3542 SEQ ID NO: 3241
ucaauuguuucugucauuu

SEQ ID NO: 251905 - RNA, 19 nt, Artificial Sequence
  Description of Artificial Sequence: Synthetic oligonucleotide
  Antisense strand to SEQ ID NO: 251904
aaaugacagaaacaauuga

SEQ ID NO: 251906 - RNA, 19 nt, Artificial Sequence
  Description of Artificial Sequence: Synthetic oligonucleotide
  Sense strand starting at position 3546 SEQ ID NO: 3241
uuguuucugucauuuccau

SEQ ID NO: 251907 - RNA, 19 nt, Artificial Sequence
  Description of Artificial Sequence: Synthetic oligonucleotide
  Antisense strand to SEQ ID NO: 251906
auggaaaugacagaaacaa

SEQ ID NO: 251908 - RNA, 19 nt, Artificial Sequence
  Description of Artificial Sequence: Synthetic oligonucleotide
  Sense strand starting at position 3584 SEQ ID NO: 3241
auuaucuaguguucuaaug

SEQ ID NO: 251909 - RNA, 19 nt, Artificial Sequence
  Description of Artificial Sequence: Synthetic oligonucleotide
  Antisense strand to SEQ ID NO: 251908
cauuagaacacuagauaau

SEQ ID NO: 251910 - RNA, 19 nt, Artificial Sequence
  Description of Artificial Sequence: Synthetic oligonucleotide
  Sense strand starting at position 3623 SEQ ID NO: 3241
uguagaaucucacugaugu

SEQ ID NO: 251911 - RNA, 19 nt, Artificial Sequence
  Description of Artificial Sequence: Synthetic oligonucleotide
  Antisense strand to SEQ ID NO: 251910
acaucagugagauucuaca

SEQ ID NO: 251912 - RNA, 19 nt, Artificial Sequence
  Description of Artificial Sequence: Synthetic oligonucleotide
  Sense strand starting at position 3624 SEQ ID NO: 3241
guagaaucucacugauguu

SEQ ID NO: 251913 - RNA, 19 nt, Artificial Sequence
  Description of Artificial Sequence: Synthetic oligonucleotide
  Antisense strand to SEQ ID NO: 251912
aacaucagugagauucuac

SEQ ID NO: 251914 - RNA, 19 nt, Artificial Sequence
  Description of Artificial Sequence: Synthetic oligonucleotide
  Sense strand starting at position 3664 SEQ ID NO: 3241
gcuaaugguguugaacuuu

SEQ ID NO: 251915 - RNA, 19 nt, Artificial Sequence
  Description of Artificial Sequence: Synthetic oligonucleotide
  Antisense strand to SEQ ID NO: 251914
aaaguucaacaccauuagc

SEQ ID NO: 251916 - RNA, 19 nt, Artificial Sequence
  Description of Artificial Sequence: Synthetic oligonucleotide
  Sense strand starting at position 3804 SEQ ID NO: 3241
ggguauauucuguauauua

SEQ ID NO: 251917 - RNA, 19 nt, Artificial Sequence
  Description of Artificial Sequence: Synthetic oligonucleotide
  Antisense strand to SEQ ID NO: 251916
uaauauacagaauauaccc

SEQ ID NO: 251918 - RNA, 19 nt, Artificial Sequence
  Description of Artificial Sequence: Synthetic oligonucleotide
  Sense strand starting at position 3831 SEQ ID NO: 3241
ucacuuuaguuauuguaga

SEQ ID NO: 251919 - RNA, 19 nt, Artificial Sequence
  Description of Artificial Sequence: Synthetic oligonucleotide
  Antisense strand to SEQ ID NO: 251918
ucuacaauaacuaaaguga

SEQ ID NO: 251920 - RNA, 19 nt, Artificial Sequence
  Description of Artificial Sequence: Synthetic oligonucleotide
  Sense strand starting at position 3879 SEQ ID NO: 3241
ggauauccuuuauugaauc

SEQ ID NO: 251921 - RNA, 19 nt, Artificial Sequence
  Description of Artificial Sequence: Synthetic oligonucleotide
  Antisense strand to SEQ ID NO: 251920
gauucaauaaaggauaucc

SEQ ID NO: 251922 - RNA, 19 nt, Artificial Sequence
  Description of Artificial Sequence: Synthetic oligonucleotide
  Sense strand starting at position 57 SEQ ID NO: 3243
gguuucugucacuaggaca

SEQ ID NO: 251923 - RNA, 19 nt, Artificial Sequence
  Description of Artificial Sequence: Synthetic oligonucleotide
  Antisense strand to SEQ ID NO: 251922
uguccuagugacagaaacc

SEQ ID NO: 251924 - RNA, 19 nt, Artificial Sequence
  Description of Artificial Sequence: Synthetic oligonucleotide
  Sense strand starting at position 154 SEQ ID NO: 3243
ugagaaucugcacagcuaa

SEQ ID NO: 251925 - RNA, 19 nt, Artificial Sequence
  Description of Artificial Sequence: Synthetic oligonucleotide
  Antisense strand to SEQ ID NO: 251924
uuagcugugcagauucuca

SEQ ID NO: 251926 - RNA, 19 nt, Artificial Sequence
  Description of Artificial Sequence: Synthetic oligonucleotide
  Sense strand starting at position 444 SEQ ID NO: 3243
cuguaaggccuuuauauca

SEQ ID NO: 251927 - RNA, 19 nt, Artificial Sequence
  Description of Artificial Sequence: Synthetic oligonucleotide
  Antisense strand to SEQ ID NO: 251926
ugauauaaaggccuuacag

SEQ ID NO: 251928 - RNA, 19 nt, Artificial Sequence
  Description of Artificial Sequence: Synthetic oligonucleotide
  Sense strand starting at position 1054 SEQ ID NO: 3243
uggagugacaccgguacaa

SEQ ID NO: 251929 - RNA, 19 nt, Artificial Sequence
  Description of Artificial Sequence: Synthetic oligonucleotide
  Antisense strand to SEQ ID NO: 251928
uuguaccggugucacucca

SEQ ID NO: 251930 - RNA, 19 nt, Artificial Sequence
  Description of Artificial Sequence: Synthetic oligonucleotide
  Sense strand starting at position 1109 SEQ ID NO: 3243
gcacuaacaguuuaaagac

SEQ ID NO: 251931 - RNA, 19 nt, Artificial Sequence
  Description of Artificial Sequence: Synthetic oligonucleotide
  Antisense strand to SEQ ID NO: 251930
gucuuuaaacuguuagugc

SEQ ID NO: 251932 - RNA, 19 nt, Artificial Sequence
  Description of Artificial Sequence: Synthetic oligonucleotide
  Sense strand starting at position 1174 SEQ ID NO: 3243
acuuguguauaaucacaaa

SEQ ID NO: 251933 - RNA, 19 nt, Artificial Sequence
  Description of Artificial Sequence: Synthetic oligonucleotide
  Antisense strand to SEQ ID NO: 251932
uuugugauuauacacaagu

SEQ ID NO: 251934 - RNA, 19 nt, Artificial Sequence
  Description of Artificial Sequence: Synthetic oligonucleotide
  Sense strand starting at position 1209 SEQ ID NO: 3243
ugugaauaccguuaggauu

SEQ ID NO: 251935 - RNA, 19 nt, Artificial Sequence
  Description of Artificial Sequence: Synthetic oligonucleotide
  Antisense strand to SEQ ID NO: 251934
aauccuaacgguauucaca

SEQ ID NO: 251936 - RNA, 19 nt, Artificial Sequence
  Description of Artificial Sequence: Synthetic oligonucleotide
  Sense strand starting at position 1423 SEQ ID NO: 3243
acguauuuaucgucgaauc

SEQ ID NO: 251937 - RNA, 19 nt, Artificial Sequence
  Description of Artificial Sequence: Synthetic oligonucleotide
  Antisense strand to SEQ ID NO: 251936
gauucgacgauaaauacgu

SEQ ID NO: 251938 - RNA, 19 nt, Artificial Sequence
  Description of Artificial Sequence: Synthetic oligonucleotide
  Sense strand starting at position 1424 SEQ ID NO: 3243
cguauuuaucgucgaauca

SEQ ID NO: 251939 - RNA, 19 nt, Artificial Sequence
  Description of Artificial Sequence: Synthetic oligonucleotide
  Antisense strand to SEQ ID NO: 251938
ugauucgacgauaaauacg

SEQ ID NO: 251940 - RNA, 19 nt, Artificial Sequence
  Description of Artificial Sequence: Synthetic oligonucleotide
  Sense strand starting at position 1569 SEQ ID NO: 3243
agccuucggccagggauuu

SEQ ID NO: 251941 - RNA, 19 nt, Artificial Sequence
  Description of Artificial Sequence: Synthetic oligonucleotide
  Antisense strand to SEQ ID NO: 251940
aaaucccuggccgaaggcu

SEQ ID NO: 251942 - RNA, 19 nt, Artificial Sequence
  Description of Artificial Sequence: Synthetic oligonucleotide
  Sense strand starting at position 1575 SEQ ID NO: 3243
cggccagggauuuguuaua

SEQ ID NO: 251943 - RNA, 19 nt, Artificial Sequence
  Description of Artificial Sequence: Synthetic oligonucleotide
  Antisense strand to SEQ ID NO: 251942
uauaacaaaucccuggccg

SEQ ID NO: 251944 - RNA, 19 nt, Artificial Sequence
  Description of Artificial Sequence: Synthetic oligonucleotide
  Sense strand starting at position 1580 SEQ ID NO: 3243
agggauuuguuauaaucag

SEQ ID NO: 251945 - RNA, 19 nt, Artificial Sequence
  Description of Artificial Sequence: Synthetic oligonucleotide
  Antisense strand to SEQ ID NO: 251944
cugauuauaacaaaucccu

SEQ ID NO: 251946 - RNA, 19 nt, Artificial Sequence
  Description of Artificial Sequence: Synthetic oligonucleotide
  Sense strand starting at position 1586 SEQ ID NO: 3243
uuguuauaaucagcauaag

SEQ ID NO: 251947 - RNA, 19 nt, Artificial Sequence
  Description of Artificial Sequence: Synthetic oligonucleotide
  Antisense strand to SEQ ID NO: 251946
cuuaugcugauuauaacaa

SEQ ID NO: 251948 - RNA, 19 nt, Artificial Sequence
  Description of Artificial Sequence: Synthetic oligonucleotide
  Sense strand starting at position 2056 SEQ ID NO: 3243
ucuuacaguuuguuaaaga

SEQ ID NO: 251949 - RNA, 19 nt, Artificial Sequence
  Description of Artificial Sequence: Synthetic oligonucleotide
  Antisense strand to SEQ ID NO: 251948
ucuuuaacaaacuguaaga

SEQ ID NO: 251950 - RNA, 19 nt, Artificial Sequence
  Description of Artificial Sequence: Synthetic oligonucleotide
  Sense strand starting at position 2076 SEQ ID NO: 3243
acaggcguguaauuucuaa

SEQ ID NO: 251951 - RNA, 19 nt, Artificial Sequence
  Description of Artificial Sequence: Synthetic oligonucleotide
  Antisense strand to SEQ ID NO: 251950
uuagaaauuacacgccugu

SEQ ID NO: 251952 - RNA, 19 nt, Artificial Sequence
  Description of Artificial Sequence: Synthetic oligonucleotide
  Sense strand starting at position 2094 SEQ ID NO: 3243
aaggauaacgcaggguauu

SEQ ID NO: 251953 - RNA, 19 nt, Artificial Sequence
  Description of Artificial Sequence: Synthetic oligonucleotide
  Antisense strand to SEQ ID NO: 251952
aauacccugcguuauccuu

SEQ ID NO: 251954 - RNA, 19 nt, Artificial Sequence
  Description of Artificial Sequence: Synthetic oligonucleotide
  Sense strand starting at position 2113 SEQ ID NO: 3243
uuaauuacuggguagcaga

SEQ ID NO: 251955 - RNA, 19 nt, Artificial Sequence
  Description of Artificial Sequence: Synthetic oligonucleotide
  Antisense strand to SEQ ID NO: 251954
ucugcuacccaguaauuaa

SEQ ID NO: 251956 - RNA, 19 nt, Artificial Sequence
  Description of Artificial Sequence: Synthetic oligonucleotide
  Sense strand starting at position 2141 SEQ ID NO: 3243
cuagaaucacgcggagaug

SEQ ID NO: 251957 - RNA, 19 nt, Artificial Sequence
  Description of Artificial Sequence: Synthetic oligonucleotide
  Antisense strand to SEQ ID NO: 251956
caucuccgcgugauucuag

SEQ ID NO: 251958 - RNA, 19 nt, Artificial Sequence
  Description of Artificial Sequence: Synthetic oligonucleotide
  Sense strand starting at position 2293 SEQ ID NO: 3243
auuucugcuguucgcaaua

SEQ ID NO: 251959 - RNA, 19 nt, Artificial Sequence
  Description of Artificial Sequence: Synthetic oligonucleotide
  Antisense strand to SEQ ID NO: 251958
uauugcgaacagcagaaau

SEQ ID NO: 251960 - RNA, 19 nt, Artificial Sequence
  Description of Artificial Sequence: Synthetic oligonucleotide
  Sense strand starting at position 2337 SEQ ID NO: 3243
gauaaugucucuccaggga

SEQ ID NO: 251961 - RNA, 19 nt, Artificial Sequence
  Description of Artificial Sequence: Synthetic oligonucleotide
  Antisense strand to SEQ ID NO: 251960
ucccuggagagacauuauc

SEQ ID NO: 251962 - RNA, 19 nt, Artificial Sequence
  Description of Artificial Sequence: Synthetic oligonucleotide
  Sense strand starting at position 3001 SEQ ID NO: 3243
ugagucuuaagcuggauau

SEQ ID NO: 251963 - RNA, 19 nt, Artificial Sequence
  Description of Artificial Sequence: Synthetic oligonucleotide
  Antisense strand to SEQ ID NO: 251962
auauccagcuuaagacuca

SEQ ID NO: 251964 - RNA, 19 nt, Artificial Sequence
  Description of Artificial Sequence: Synthetic oligonucleotide
  Sense strand starting at position 3002 SEQ ID NO: 3243
gagucuuaagcuggauauc

SEQ ID NO: 251965 - RNA, 19 nt, Artificial Sequence
  Description of Artificial Sequence: Synthetic oligonucleotide
  Antisense strand to SEQ ID NO: 251964
gauauccagcuuaagacuc

SEQ ID NO: 251966 - RNA, 19 nt, Artificial Sequence
  Description of Artificial Sequence: Synthetic oligonucleotide
  Sense strand starting at position 3003 SEQ ID NO: 3243
agucuuaagcuggauaucu

SEQ ID NO: 251967 - RNA, 19 nt, Artificial Sequence
  Description of Artificial Sequence: Synthetic oligonucleotide
  Antisense strand to SEQ ID NO: 251966
agauauccagcuuaagacu

SEQ ID NO: 251968 - RNA, 19 nt, Artificial Sequence
  Description of Artificial Sequence: Synthetic oligonucleotide
  Sense strand starting at position 3181 SEQ ID NO: 3243
gcaggaugguaauuguaua

SEQ ID NO: 251969 - RNA, 19 nt, Artificial Sequence
  Description of Artificial Sequence: Synthetic oligonucleotide
  Antisense strand to SEQ ID NO: 251968
uauacaauuaccauccugc

SEQ ID NO: 251970 - RNA, 19 nt, Artificial Sequence
  Description of Artificial Sequence: Synthetic oligonucleotide
  Sense strand starting at position 3205 SEQ ID NO: 3243
auaguaugccucuaucuua

SEQ ID NO: 251971 - RNA, 19 nt, Artificial Sequence
  Description of Artificial Sequence: Synthetic oligonucleotide
  Antisense strand to SEQ ID NO: 251970
uaagauagaggcauacuau

SEQ ID NO: 251972 - RNA, 19 nt, Artificial Sequence
  Description of Artificial Sequence: Synthetic oligonucleotide
  Sense strand starting at position 3208 SEQ ID NO: 3243
guaugccucuaucuuauuu

SEQ ID NO: 251973 - RNA, 19 nt, Artificial Sequence
  Description of Artificial Sequence: Synthetic oligonucleotide
  Antisense strand to SEQ ID NO: 251972
aaauaagauagaggcauac

SEQ ID NO: 251974 - RNA, 19 nt, Artificial Sequence
  Description of Artificial Sequence: Synthetic oligonucleotide
  Sense strand starting at position 3247 SEQ ID NO: 3243
gauggacauuguuucuaac

SEQ ID NO: 251975 - RNA, 19 nt, Artificial Sequence
  Description of Artificial Sequence: Synthetic oligonucleotide
  Antisense strand to SEQ ID NO: 251974
guuagaaacaauguccauc

SEQ ID NO: 251976 - RNA, 19 nt, Artificial Sequence
  Description of Artificial Sequence: Synthetic oligonucleotide
  Sense strand starting at position 3249 SEQ ID NO: 3243
uggacauuguuucuaacuu

SEQ ID NO: 251977 - RNA, 19 nt, Artificial Sequence
  Description of Artificial Sequence: Synthetic oligonucleotide
  Antisense strand to SEQ ID NO: 251976
aaguuagaaacaaugucca

SEQ ID NO: 251978 - RNA, 19 nt, Artificial Sequence
  Description of Artificial Sequence: Synthetic oligonucleotide
  Sense strand starting at position 3315 SEQ ID NO: 3243
gugaguaucccugagacau

SEQ ID NO: 251979 - RNA, 19 nt, Artificial Sequence
  Description of Artificial Sequence: Synthetic oligonucleotide
  Antisense strand to SEQ ID NO: 251978
augucucagggauacucac

SEQ ID NO: 251980 - RNA, 19 nt, Artificial Sequence
  Description of Artificial Sequence: Synthetic oligonucleotide
  Sense strand starting at position 3343 SEQ ID NO: 3243
agucaauugcuggaucaua

SEQ ID NO: 251981 - RNA, 19 nt, Artificial Sequence
  Description of Artificial Sequence: Synthetic oligonucleotide
  Antisense strand to SEQ ID NO: 251980
uaugauccagcaauugacu

SEQ ID NO: 251982 - RNA, 19 nt, Artificial Sequence
  Description of Artificial Sequence: Synthetic oligonucleotide
  Sense strand starting at position 3359 SEQ ID NO: 3243
auaugagauucuguacuua

SEQ ID NO: 251983 - RNA, 19 nt, Artificial Sequence
  Description of Artificial Sequence: Synthetic oligonucleotide
  Antisense strand to SEQ ID NO: 251982
uaaguacagaaucucauau

SEQ ID NO: 251984 - RNA, 19 nt, Artificial Sequence
  Description of Artificial Sequence: Synthetic oligonucleotide
  Sense strand starting at position 3480 SEQ ID NO: 3243
ucaauuguuucugucauuu

SEQ ID NO: 251985 - RNA, 19 nt, Artificial Sequence
  Description of Artificial Sequence: Synthetic oligonucleotide
  Antisense strand to SEQ ID NO: 251984
aaaugacagaaacaauuga

SEQ ID NO: 251986 - RNA, 19 nt, Artificial Sequence
  Description of Artificial Sequence: Synthetic oligonucleotide
  Sense strand starting at position 3484 SEQ ID NO: 3243
uuguuucugucauuuccau

SEQ ID NO: 251987 - RNA, 19 nt, Artificial Sequence
  Description of Artificial Sequence: Synthetic oligonucleotide
  Antisense strand to SEQ ID NO: 251986
auggaaaugacagaaacaa

SEQ ID NO: 251988 - RNA, 19 nt, Artificial Sequence
  Description of Artificial Sequence: Synthetic oligonucleotide
  Sense strand starting at position 3522 SEQ ID NO: 3243
auuaucuaguguucuaaug

SEQ ID NO: 251989 - RNA, 19 nt, Artificial Sequence
  Description of Artificial Sequence: Synthetic oligonucleotide
  Antisense strand to SEQ ID NO: 251988
cauuagaacacuagauaau

SEQ ID NO: 251990 - RNA, 19 nt, Artificial Sequence
  Description of Artificial Sequence: Synthetic oligonucleotide
  Sense strand starting at position 3561 SEQ ID NO: 3243
uguagaaucucacugaugu

SEQ ID NO: 251991 - RNA, 19 nt, Artificial Sequence
  Description of Artificial Sequence: Synthetic oligonucleotide
  Antisense strand to SEQ ID NO: 251990
acaucagugagauucuaca

SEQ ID NO: 251992 - RNA, 19 nt, Artificial Sequence
  Description of Artificial Sequence: Synthetic oligonucleotide
  Sense strand starting at position 3562 SEQ ID NO: 3243
guagaaucucacugauguu

SEQ ID NO: 251993 - RNA, 19 nt, Artificial Sequence
  Description of Artificial Sequence: Synthetic oligonucleotide
  Antisense strand to SEQ ID NO: 251992
aacaucagugagauucuac

SEQ ID NO: 251994 - RNA, 19 nt, Artificial Sequence
  Description of Artificial Sequence: Synthetic oligonucleotide
  Sense strand starting at position 3602 SEQ ID NO: 3243
gcuaaugguguugaacuuu

SEQ ID NO: 251995 - RNA, 19 nt, Artificial Sequence
  Description of Artificial Sequence: Synthetic oligonucleotide
  Antisense strand to SEQ ID NO: 251994
aaaguucaacaccauuagc

SEQ ID NO: 251996 - RNA, 19 nt, Artificial Sequence
  Description of Artificial Sequence: Synthetic oligonucleotide
  Sense strand starting at position 3742 SEQ ID NO: 3243
ggguauauucuguauauua

SEQ ID NO: 251997 - RNA, 19 nt, Artificial Sequence
  Description of Artificial Sequence: Synthetic oligonucleotide
  Antisense strand to SEQ ID NO: 251996
uaauauacagaauauaccc

SEQ ID NO: 251998 - RNA, 19 nt, Artificial Sequence
  Description of Artificial Sequence: Synthetic oligonucleotide
  Sense strand starting at position 3769 SEQ ID NO: 3243
ucacuuuaguuauuguaga

SEQ ID NO: 251999 - RNA, 19 nt, Artificial Sequence
  Description of Artificial Sequence: Synthetic oligonucleotide
  Antisense strand to SEQ ID NO: 251998
ucuacaauaacuaaaguga

SEQ ID NO: 252000 - RNA, 19 nt, Artificial Sequence
  Description of Artificial Sequence: Synthetic oligonucleotide
  Sense strand starting at position 3817 SEQ ID NO: 3243
ggauauccuuuauugaauc

SEQ ID NO: 252001 - RNA, 19 nt, Artificial Sequence
  Description of Artificial Sequence: Synthetic oligonucleotide
  Antisense strand to SEQ ID NO: 252000
gauucaauaaaggauaucc

SEQ ID NO: 252002 - RNA, 19 nt, Artificial Sequence
  Description of Artificial Sequence: Synthetic oligonucleotide
  Sense strand starting at position 49 SEQ ID NO: 3242
gguuucugucacuaggaca

SEQ ID NO: 252003 - RNA, 19 nt, Artificial Sequence
  Description of Artificial Sequence: Synthetic oligonucleotide
  Antisense strand to SEQ ID NO: 252002
uguccuagugacagaaacc

SEQ ID NO: 252004 - RNA, 19 nt, Artificial Sequence
  Description of Artificial Sequence: Synthetic oligonucleotide
  Sense strand starting at position 146 SEQ ID NO: 3242
ugagaaucugcacagcuaa

SEQ ID NO: 252005 - RNA, 19 nt, Artificial Sequence
  Description of Artificial Sequence: Synthetic oligonucleotide
  Antisense strand to SEQ ID NO: 252004
uuagcugugcagauucuca

SEQ ID NO: 252006 - RNA, 19 nt, Artificial Sequence
  Description of Artificial Sequence: Synthetic oligonucleotide
  Sense strand starting at position 436 SEQ ID NO: 3242
cuguaaggccuuuauauca

SEQ ID NO: 252007 - RNA, 19 nt, Artificial Sequence
  Description of Artificial Sequence: Synthetic oligonucleotide
  Antisense strand to SEQ ID NO: 252006
ugauauaaaggccuuacag

SEQ ID NO: 252008 - RNA, 19 nt, Artificial Sequence
  Description of Artificial Sequence: Synthetic oligonucleotide
  Sense strand starting at position 1046 SEQ ID NO: 3242
uggagugacaccgguacaa

SEQ ID NO: 252009 - RNA, 19 nt, Artificial Sequence
  Description of Artificial Sequence: Synthetic oligonucleotide
  Antisense strand to SEQ ID NO: 252008
uuguaccggugucacucca

SEQ ID NO: 252010 - RNA, 19 nt, Artificial Sequence
  Description of Artificial Sequence: Synthetic oligonucleotide
  Sense strand starting at position 1101 SEQ ID NO: 3242
gcacuaacaguuuaaagac

SEQ ID NO: 252011 - RNA, 19 nt, Artificial Sequence
  Description of Artificial Sequence: Synthetic oligonucleotide
  Antisense strand to SEQ ID NO: 252010
gucuuuaaacuguuagugc

SEQ ID NO: 252012 - RNA, 19 nt, Artificial Sequence
  Description of Artificial Sequence: Synthetic oligonucleotide
  Sense strand starting at position 1166 SEQ ID NO: 3242
acuuguguauaaucacaaa

SEQ ID NO: 252013 - RNA, 19 nt, Artificial Sequence
  Description of Artificial Sequence: Synthetic oligonucleotide
  Antisense strand to SEQ ID NO: 252012
uuugugauuauacacaagu

SEQ ID NO: 252014 - RNA, 19 nt, Artificial Sequence
  Description of Artificial Sequence: Synthetic oligonucleotide
  Sense strand starting at position 1201 SEQ ID NO: 3242
ugugaauaccguuaggauu

SEQ ID NO: 252015 - RNA, 19 nt, Artificial Sequence
  Description of Artificial Sequence: Synthetic oligonucleotide
  Antisense strand to SEQ ID NO: 252014
aauccuaacgguauucaca

SEQ ID NO: 252016 - RNA, 19 nt, Artificial Sequence
  Description of Artificial Sequence: Synthetic oligonucleotide
  Sense strand starting at position 1415 SEQ ID NO: 3242
acguauuuaucgucgaauc

SEQ ID NO: 252017 - RNA, 19 nt, Artificial Sequence
  Description of Artificial Sequence: Synthetic oligonucleotide
  Antisense strand to SEQ ID NO: 252016
gauucgacgauaaauacgu

SEQ ID NO: 252018 - RNA, 19 nt, Artificial Sequence
  Description of Artificial Sequence: Synthetic oligonucleotide
  Sense strand starting at position 1416 SEQ ID NO: 3242
cguauuuaucgucgaauca

SEQ ID NO: 252019 - RNA, 19 nt, Artificial Sequence
  Description of Artificial Sequence: Synthetic oligonucleotide
  Antisense strand to SEQ ID NO: 252018
ugauucgacgauaaauacg

SEQ ID NO: 252020 - RNA, 19 nt, Artificial Sequence
  Description of Artificial Sequence: Synthetic oligonucleotide
  Sense strand starting at position 1561 SEQ ID NO: 3242
agccuucggccagggauuu

SEQ ID NO: 252021 - RNA, 19 nt, Artificial Sequence
  Description of Artificial Sequence: Synthetic oligonucleotide
  Antisense strand to SEQ ID NO: 252020
aaaucccuggccgaaggcu

SEQ ID NO: 252022 - RNA, 19 nt, Artificial Sequence
  Description of Artificial Sequence: Synthetic oligonucleotide
  Sense strand starting at position 1567 SEQ ID NO: 3242
cggccagggauuuguuaua

SEQ ID NO: 252023 - RNA, 19 nt, Artificial Sequence
  Description of Artificial Sequence: Synthetic oligonucleotide
  Antisense strand to SEQ ID NO: 252022
uauaacaaaucccuggccg

SEQ ID NO: 252024 - RNA, 19 nt, Artificial Sequence
  Description of Artificial Sequence: Synthetic oligonucleotide
  Sense strand starting at position 1572 SEQ ID NO: 3242
agggauuuguuauaaucag

SEQ ID NO: 252025 - RNA, 19 nt, Artificial Sequence
  Description of Artificial Sequence: Synthetic oligonucleotide
  Antisense strand to SEQ ID NO: 252024
cugauuauaacaaaucccu

SEQ ID NO: 252026 - RNA, 19 nt, Artificial Sequence
  Description of Artificial Sequence: Synthetic oligonucleotide
  Sense strand starting at position 1578 SEQ ID NO: 3242
uuguuauaaucagcauaag

SEQ ID NO: 252027 - RNA, 19 nt, Artificial Sequence
  Description of Artificial Sequence: Synthetic oligonucleotide
  Antisense strand to SEQ ID NO: 252026
cuuaugcugauuauaacaa

SEQ ID NO: 252028 - RNA, 19 nt, Artificial Sequence
  Description of Artificial Sequence: Synthetic oligonucleotide
  Sense strand starting at position 2048 SEQ ID NO: 3242
ucuuacaguuuguuaaaga

SEQ ID NO: 252029 - RNA, 19 nt, Artificial Sequence
  Description of Artificial Sequence: Synthetic oligonucleotide
  Antisense strand to SEQ ID NO: 252028
ucuuuaacaaacuguaaga

SEQ ID NO: 252030 - RNA, 19 nt, Artificial Sequence
  Description of Artificial Sequence: Synthetic oligonucleotide
  Sense strand starting at position 2068 SEQ ID NO: 3242
acaggcguguaauuucuaa

SEQ ID NO: 252031 - RNA, 19 nt, Artificial Sequence
  Description of Artificial Sequence: Synthetic oligonucleotide
  Antisense strand to SEQ ID NO: 252030
uuagaaauuacacgccugu

SEQ ID NO: 252032 - RNA, 19 nt, Artificial Sequence
  Description of Artificial Sequence: Synthetic oligonucleotide
  Sense strand starting at position 2086 SEQ ID NO: 3242
aaggauaacgcaggguauu

SEQ ID NO: 252033 - RNA, 19 nt, Artificial Sequence
  Description of Artificial Sequence: Synthetic oligonucleotide
  Antisense strand to SEQ ID NO: 252032
aauacccugcguuauccuu

SEQ ID NO: 252034 - RNA, 19 nt, Artificial Sequence
  Description of Artificial Sequence: Synthetic oligonucleotide
  Sense strand starting at position 2105 SEQ ID NO: 3242
uuaauuacuggguagcaga

SEQ ID NO: 252035 - RNA, 19 nt, Artificial Sequence
  Description of Artificial Sequence: Synthetic oligonucleotide
  Antisense strand to SEQ ID NO: 252034
ucugcuacccaguaauuaa

SEQ ID NO: 252036 - RNA, 19 nt, Artificial Sequence
  Description of Artificial Sequence: Synthetic oligonucleotide
  Sense strand starting at position 2133 SEQ ID NO: 3242
cuagaaucacgcggagaug

SEQ ID NO: 252037 - RNA, 19 nt, Artificial Sequence
  Description of Artificial Sequence: Synthetic oligonucleotide
  Antisense strand to SEQ ID NO: 252036
caucuccgcgugauucuag

SEQ ID NO: 252038 - RNA, 19 nt, Artificial Sequence
  Description of Artificial Sequence: Synthetic oligonucleotide
  Sense strand starting at position 2329 SEQ ID NO: 3242
gauaaugucucuccaggga

SEQ ID NO: 252039 - RNA, 19 nt, Artificial Sequence
  Description of Artificial Sequence: Synthetic oligonucleotide
  Antisense strand to SEQ ID NO: 252038
ucccuggagagacauuauc

SEQ ID NO: 252040 - RNA, 19 nt, Artificial Sequence
  Description of Artificial Sequence: Synthetic oligonucleotide
  Sense strand starting at position 2993 SEQ ID NO: 3242
ugagucuuaagcuggauau

SEQ ID NO: 252041 - RNA, 19 nt, Artificial Sequence
  Description of Artificial Sequence: Synthetic oligonucleotide
  Antisense strand to SEQ ID NO: 252040
auauccagcuuaagacuca

SEQ ID NO: 252042 - RNA, 19 nt, Artificial Sequence
  Description of Artificial Sequence: Synthetic oligonucleotide
  Sense strand starting at position 2994 SEQ ID NO: 3242
gagucuuaagcuggauauc

SEQ ID NO: 252043 - RNA, 19 nt, Artificial Sequence
  Description of Artificial Sequence: Synthetic oligonucleotide
  Antisense strand to SEQ ID NO: 252042
gauauccagcuuaagacuc

SEQ ID NO: 252044 - RNA, 19 nt, Artificial Sequence
  Description of Artificial Sequence: Synthetic oligonucleotide
  Sense strand starting at position 2995 SEQ ID NO: 3242
agucuuaagcuggauaucu

SEQ ID NO: 252045 - RNA, 19 nt, Artificial Sequence
  Description of Artificial Sequence: Synthetic oligonucleotide
  Antisense strand to SEQ ID NO: 252044
agauauccagcuuaagacu

SEQ ID NO: 252046 - RNA, 19 nt, Artificial Sequence
  Description of Artificial Sequence: Synthetic oligonucleotide
  Sense strand starting at position 3173 SEQ ID NO: 3242
gcaggaugguaauuguaua

SEQ ID NO: 252047 - RNA, 19 nt, Artificial Sequence
  Description of Artificial Sequence: Synthetic oligonucleotide
  Antisense strand to SEQ ID NO: 252046
uauacaauuaccauccugc

SEQ ID NO: 252048 - RNA, 19 nt, Artificial Sequence
  Description of Artificial Sequence: Synthetic oligonucleotide
  Sense strand starting at position 3197 SEQ ID NO: 3242
auaguaugccucuaucuua

SEQ ID NO: 252049 - RNA, 19 nt, Artificial Sequence
  Description of Artificial Sequence: Synthetic oligonucleotide
  Antisense strand to SEQ ID NO: 252048
uaagauagaggcauacuau

SEQ ID NO: 252050 - RNA, 19 nt, Artificial Sequence
  Description of Artificial Sequence: Synthetic oligonucleotide
  Sense strand starting at position 3200 SEQ ID NO: 3242
guaugccucuaucuuauuu

SEQ ID NO: 252051 - RNA, 19 nt, Artificial Sequence
  Description of Artificial Sequence: Synthetic oligonucleotide
  Antisense strand to SEQ ID NO: 252050
aaauaagauagaggcauac

SEQ ID NO: 252052 - RNA, 19 nt, Artificial Sequence
  Description of Artificial Sequence: Synthetic oligonucleotide
  Sense strand starting at position 3239 SEQ ID NO: 3242
gauggacauuguuucuaac

SEQ ID NO: 252053 - RNA, 19 nt, Artificial Sequence
  Description of Artificial Sequence: Synthetic oligonucleotide
  Antisense strand to SEQ ID NO: 252052
guuagaaacaauguccauc

SEQ ID NO: 252054 - RNA, 19 nt, Artificial Sequence
  Description of Artificial Sequence: Synthetic oligonucleotide
  Sense strand starting at position 3241 SEQ ID NO: 3242
uggacauuguuucuaacuu

SEQ ID NO: 252055 - RNA, 19 nt, Artificial Sequence
  Description of Artificial Sequence: Synthetic oligonucleotide
  Antisense strand to SEQ ID NO: 252054
aaguuagaaacaaugucca

SEQ ID NO: 252056 - RNA, 19 nt, Artificial Sequence
  Description of Artificial Sequence: Synthetic oligonucleotide
  Sense strand starting at position 3307 SEQ ID NO: 3242
gugaguaucccugagacau

SEQ ID NO: 252057 - RNA, 19 nt, Artificial Sequence
  Description of Artificial Sequence: Synthetic oligonucleotide
  Antisense strand to SEQ ID NO: 252056
augucucagggauacucac

SEQ ID NO: 252058 - RNA, 19 nt, Artificial Sequence
  Description of Artificial Sequence: Synthetic oligonucleotide
  Sense strand starting at position 3335 SEQ ID NO: 3242
agucaauugcuggaucaua

SEQ ID NO: 252059 - RNA, 19 nt, Artificial Sequence
  Description of Artificial Sequence: Synthetic oligonucleotide
  Antisense strand to SEQ ID NO: 252058
uaugauccagcaauugacu

SEQ ID NO: 252060 - RNA, 19 nt, Artificial Sequence
  Description of Artificial Sequence: Synthetic oligonucleotide
  Sense strand starting at position 3351 SEQ ID NO: 3242
auaugagauucuguacuua

SEQ ID NO: 252061 - RNA, 19 nt, Artificial Sequence
  Description of Artificial Sequence: Synthetic oligonucleotide
  Antisense strand to SEQ ID NO: 252060
uaaguacagaaucucauau

SEQ ID NO: 252062 - RNA, 19 nt, Artificial Sequence
  Description of Artificial Sequence: Synthetic oligonucleotide
  Sense strand starting at position 3472 SEQ ID NO: 3242
ucaauuguuucugucauuu

SEQ ID NO: 252063 - RNA, 19 nt, Artificial Sequence
  Description of Artificial Sequence: Synthetic oligonucleotide
  Antisense strand to SEQ ID NO: 252062
aaaugacagaaacaauuga

SEQ ID NO: 252064 - RNA, 19 nt, Artificial Sequence
  Description of Artificial Sequence: Synthetic oligonucleotide
  Sense strand starting at position 3476 SEQ ID NO: 3242
uuguuucugucauuuccau

SEQ ID NO: 252065 - RNA, 19 nt, Artificial Sequence
  Description of Artificial Sequence: Synthetic oligonucleotide
  Antisense strand to SEQ ID NO: 252064
auggaaaugacagaaacaa

SEQ ID NO: 252066 - RNA, 19 nt, Artificial Sequence
  Description of Artificial Sequence: Synthetic oligonucleotide
  Sense strand starting at position 3514 SEQ ID NO: 3242
auuaucuaguguucuaaug

SEQ ID NO: 252067 - RNA, 19 nt, Artificial Sequence
  Description of Artificial Sequence: Synthetic oligonucleotide
  Antisense strand to SEQ ID NO: 252066
cauuagaacacuagauaau

SEQ ID NO: 252068 - RNA, 19 nt, Artificial Sequence
  Description of Artificial Sequence: Synthetic oligonucleotide
  Sense strand starting at position 3553 SEQ ID NO: 3242
uguagaaucucacugaugu

SEQ ID NO: 252069 - RNA, 19 nt, Artificial Sequence
  Description of Artificial Sequence: Synthetic oligonucleotide
  Antisense strand to SEQ ID NO: 252068
acaucagugagauucuaca

SEQ ID NO: 252070 - RNA, 19 nt, Artificial Sequence
  Description of Artificial Sequence: Synthetic oligonucleotide
  Sense strand starting at position 3554 SEQ ID NO: 3242
guagaaucucacugauguu

SEQ ID NO: 252071 - RNA, 19 nt, Artificial Sequence
  Description of Artificial Sequence: Synthetic oligonucleotide
  Antisense strand to SEQ ID NO: 252070
aacaucagugagauucuac

SEQ ID NO: 252072 - RNA, 19 nt, Artificial Sequence
  Description of Artificial Sequence: Synthetic oligonucleotide
  Sense strand starting at position 3594 SEQ ID NO: 3242
gcuaaugguguugaacuuu

SEQ ID NO: 252073 - RNA, 19 nt, Artificial Sequence
  Description of Artificial Sequence: Synthetic oligonucleotide
  Antisense strand to SEQ ID NO: 252072
aaaguucaacaccauuagc

SEQ ID NO: 252074 - RNA, 19 nt, Artificial Sequence
  Description of Artificial Sequence: Synthetic oligonucleotide
  Sense strand starting at position 3734 SEQ ID NO: 3242
ggguauauucuguauauua

SEQ ID NO: 252075 - RNA, 19 nt, Artificial Sequence
  Description of Artificial Sequence: Synthetic oligonucleotide
  Antisense strand to SEQ ID NO: 252074
uaauauacagaauauaccc

SEQ ID NO: 252076 - RNA, 19 nt, Artificial Sequence
  Description of Artificial Sequence: Synthetic oligonucleotide
  Sense strand starting at position 3761 SEQ ID NO: 3242
ucacuuuaguuauuguaga

SEQ ID NO: 252077 - RNA, 19 nt, Artificial Sequence
  Description of Artificial Sequence: Synthetic oligonucleotide
  Antisense strand to SEQ ID NO: 252076
ucuacaauaacuaaaguga

SEQ ID NO: 252078 - RNA, 19 nt, Artificial Sequence
  Description of Artificial Sequence: Synthetic oligonucleotide
  Sense strand starting at position 3809 SEQ ID NO: 3242
ggauauccuuuauugaauc

SEQ ID NO: 252079 - RNA, 19 nt, Artificial Sequence
  Description of Artificial Sequence: Synthetic oligonucleotide
  Antisense strand to SEQ ID NO: 252078
gauucaauaaaggauaucc

SEQ ID NO: 252080 - RNA, 19 nt, Artificial Sequence
  Description of Artificial Sequence: Synthetic oligonucleotide
  Sense strand starting at position 3977 SEQ ID NO: 3242
agucuuuaucuggaguuua

SEQ ID NO: 252081 - RNA, 19 nt, Artificial Sequence
  Description of Artificial Sequence: Synthetic oligonucleotide
  Antisense strand to SEQ ID NO: 252080
uaaacuccagauaaagacu

SEQ ID NO: 252082 - RNA, 19 nt, Artificial Sequence
  Description of Artificial Sequence: Synthetic oligonucleotide
  Sense strand starting at position 28 SEQ ID NO: 3244
ugauauaguucugucaaua

SEQ ID NO: 252083 - RNA, 19 nt, Artificial Sequence
  Description of Artificial Sequence: Synthetic oligonucleotide
  Antisense strand to SEQ ID NO: 252082
uauugacagaacuauauca

SEQ ID NO: 252084 - RNA, 19 nt, Artificial Sequence
  Description of Artificial Sequence: Synthetic oligonucleotide
  Sense strand starting at position 235 SEQ ID NO: 3244
uuaagaugauucucaucug

SEQ ID NO: 252085 - RNA, 19 nt, Artificial Sequence
  Description of Artificial Sequence: Synthetic oligonucleotide
  Antisense strand to SEQ ID NO: 252084
cagaugagaaucaucuuaa

SEQ ID NO: 252086 - RNA, 19 nt, Artificial Sequence
  Description of Artificial Sequence: Synthetic oligonucleotide
  Sense strand starting at position 321 SEQ ID NO: 3244
aacagauugugucugggau

SEQ ID NO: 252087 - RNA, 19 nt, Artificial Sequence
  Description of Artificial Sequence: Synthetic oligonucleotide
  Antisense strand to SEQ ID NO: 252086
aucccagacacaaucuguu

SEQ ID NO: 252088 - RNA, 19 nt, Artificial Sequence
  Description of Artificial Sequence: Synthetic oligonucleotide
  Sense strand starting at position 322 SEQ ID NO: 3244
acagauugugucugggaua

SEQ ID NO: 252089 - RNA, 19 nt, Artificial Sequence
  Description of Artificial Sequence: Synthetic oligonucleotide
  Antisense strand to SEQ ID NO: 252088
uaucccagacacaaucugu

SEQ ID NO: 252090 - RNA, 19 nt, Artificial Sequence
  Description of Artificial Sequence: Synthetic oligonucleotide
  Sense strand starting at position 327 SEQ ID NO: 3244
uugugucugggauaacucu

SEQ ID NO: 252091 - RNA, 19 nt, Artificial Sequence
  Description of Artificial Sequence: Synthetic oligonucleotide
  Antisense strand to SEQ ID NO: 252090
agaguuaucccagacacaa

SEQ ID NO: 252092 - RNA, 19 nt, Artificial Sequence
  Description of Artificial Sequence: Synthetic oligonucleotide
  Sense strand starting at position 522 SEQ ID NO: 3244
uagacaaguuagguuuaau

SEQ ID NO: 252093 - RNA, 19 nt, Artificial Sequence
  Description of Artificial Sequence: Synthetic oligonucleotide
  Antisense strand to SEQ ID NO: 252092
auuaaaccuaacuugucua

SEQ ID NO: 252094 - RNA, 19 nt, Artificial Sequence
  Description of Artificial Sequence: Synthetic oligonucleotide
  Sense strand starting at position 532 SEQ ID NO: 3244
agguuuaaugugcauggau

SEQ ID NO: 252095 - RNA, 19 nt, Artificial Sequence
  Description of Artificial Sequence: Synthetic oligonucleotide
  Antisense strand to SEQ ID NO: 252094
auccaugcacauuaaaccu

SEQ ID NO: 252096 - RNA, 19 nt, Artificial Sequence
  Description of Artificial Sequence: Synthetic oligonucleotide
  Sense strand starting at position 597 SEQ ID NO: 3244
agugaaucaccaggcaaca

SEQ ID NO: 252097 - RNA, 19 nt, Artificial Sequence
  Description of Artificial Sequence: Synthetic oligonucleotide
  Antisense strand to SEQ ID NO: 252096
uguugccuggugauucacu

SEQ ID NO: 252098 - RNA, 19 nt, Artificial Sequence
  Description of Artificial Sequence: Synthetic oligonucleotide
  Sense strand starting at position 822 SEQ ID NO: 3244
agcgauucuggagaugcaa

SEQ ID NO: 252099 - RNA, 19 nt, Artificial Sequence
  Description of Artificial Sequence: Synthetic oligonucleotide
  Antisense strand to SEQ ID NO: 252098
uugcaucuccagaaucgcu

SEQ ID NO: 252100 - RNA, 19 nt, Artificial Sequence
  Description of Artificial Sequence: Synthetic oligonucleotide
  Sense strand starting at position 824 SEQ ID NO: 3244
cgauucuggagaugcaaga

SEQ ID NO: 252101 - RNA, 19 nt, Artificial Sequence
  Description of Artificial Sequence: Synthetic oligonucleotide
  Antisense strand to SEQ ID NO: 252100
ucuugcaucuccagaaucg

SEQ ID NO: 252102 - RNA, 19 nt, Artificial Sequence
  Description of Artificial Sequence: Synthetic oligonucleotide
  Sense strand starting at position 837 SEQ ID NO: 3244
gcaagagaggcaugaaaca

SEQ ID NO: 252103 - RNA, 19 nt, Artificial Sequence
  Description of Artificial Sequence: Synthetic oligonucleotide
  Antisense strand to SEQ ID NO: 252102
uguuucaugccucucuugc

SEQ ID NO: 252104 - RNA, 19 nt, Artificial Sequence
  Description of Artificial Sequence: Synthetic oligonucleotide
  Sense strand starting at position 914 SEQ ID NO: 3244
cgggaagaccaaugucgaa

SEQ ID NO: 252105 - RNA, 19 nt, Artificial Sequence
  Description of Artificial Sequence: Synthetic oligonucleotide
  Antisense strand to SEQ ID NO: 252104
uucgacauuggucuucccg

SEQ ID NO: 252106 - RNA, 19 nt, Artificial Sequence
  Description of Artificial Sequence: Synthetic oligonucleotide
  Sense strand starting at position 1197 SEQ ID NO: 3244
ccgauuccugaacaagguu

SEQ ID NO: 252107 - RNA, 19 nt, Artificial Sequence
  Description of Artificial Sequence: Synthetic oligonucleotide
  Antisense strand to SEQ ID NO: 252106
aaccuuguucaggaaucgg

SEQ ID NO: 252108 - RNA, 19 nt, Artificial Sequence
  Description of Artificial Sequence: Synthetic oligonucleotide
  Sense strand starting at position 1220 SEQ ID NO: 3244
ucccaaaguccuuggacuu

SEQ ID NO: 252109 - RNA, 19 nt, Artificial Sequence
  Description of Artificial Sequence: Synthetic oligonucleotide
  Antisense strand to SEQ ID NO: 252108
aaguccaaggacuuuggga

SEQ ID NO: 252110 - RNA, 19 nt, Artificial Sequence
  Description of Artificial Sequence: Synthetic oligonucleotide
  Sense strand starting at position 1243 SEQ ID NO: 3244
cagaguuggcgcgccuuaa

SEQ ID NO: 252111 - RNA, 19 nt, Artificial Sequence
  Description of Artificial Sequence: Synthetic oligonucleotide
  Antisense strand to SEQ ID NO: 252110
uuaaggcgcgccaacucug

SEQ ID NO: 252112 - RNA, 19 nt, Artificial Sequence
  Description of Artificial Sequence: Synthetic oligonucleotide
  Sense strand starting at position 1244 SEQ ID NO: 3244
agaguuggcgcgccuuaaa

SEQ ID NO: 252113 - RNA, 19 nt, Artificial Sequence
  Description of Artificial Sequence: Synthetic oligonucleotide
  Antisense strand to SEQ ID NO: 252112
uuuaaggcgcgccaacucu

SEQ ID NO: 252114 - RNA, 19 nt, Artificial Sequence
  Description of Artificial Sequence: Synthetic oligonucleotide
  Sense strand starting at position 1723 SEQ ID NO: 3244
ccggacuucugauuggaag

SEQ ID NO: 252115 - RNA, 19 nt, Artificial Sequence
  Description of Artificial Sequence: Synthetic oligonucleotide
  Antisense strand to SEQ ID NO: 252114
cuuccaaucagaaguccgg

SEQ ID NO: 252116 - RNA, 19 nt, Artificial Sequence
  Description of Artificial Sequence: Synthetic oligonucleotide
  Sense strand starting at position 1724 SEQ ID NO: 3244
cggacuucugauuggaaga

SEQ ID NO: 252117 - RNA, 19 nt, Artificial Sequence
  Description of Artificial Sequence: Synthetic oligonucleotide
  Antisense strand to SEQ ID NO: 252116
ucuuccaaucagaaguccg

SEQ ID NO: 252118 - RNA, 19 nt, Artificial Sequence
  Description of Artificial Sequence: Synthetic oligonucleotide
  Sense strand starting at position 1872 SEQ ID NO: 3244
ugcacuauucccgagauga

SEQ ID NO: 252119 - RNA, 19 nt, Artificial Sequence
  Description of Artificial Sequence: Synthetic oligonucleotide
  Antisense strand to SEQ ID NO: 252118
ucaucucgggaauagugca

SEQ ID NO: 252120 - RNA, 19 nt, Artificial Sequence
  Description of Artificial Sequence: Synthetic oligonucleotide
  Sense strand starting at position 1976 SEQ ID NO: 3244
gagcaaugugugccacgua

SEQ ID NO: 252121 - RNA, 19 nt, Artificial Sequence
  Description of Artificial Sequence: Synthetic oligonucleotide
  Antisense strand to SEQ ID NO: 252120
uacguggcacacauugcuc

SEQ ID NO: 252122 - RNA, 19 nt, Artificial Sequence
  Description of Artificial Sequence: Synthetic oligonucleotide
  Sense strand starting at position 2489 SEQ ID NO: 3244
cuuacccuuccuugggaaa

SEQ ID NO: 252123 - RNA, 19 nt, Artificial Sequence
  Description of Artificial Sequence: Synthetic oligonucleotide
  Antisense strand to SEQ ID NO: 252122
uuucccaaggaaggguaag

SEQ ID NO: 252124 - RNA, 19 nt, Artificial Sequence
  Description of Artificial Sequence: Synthetic oligonucleotide
  Sense strand starting at position 2515 SEQ ID NO: 3244
uugcaucgauuuguaaauu

SEQ ID NO: 252125 - RNA, 19 nt, Artificial Sequence
  Description of Artificial Sequence: Synthetic oligonucleotide
  Antisense strand to SEQ ID NO: 252124
aauuuacaaaucgaugcaa

SEQ ID NO: 252126 - RNA, 19 nt, Artificial Sequence
  Description of Artificial Sequence: Synthetic oligonucleotide
  Sense strand starting at position 2556 SEQ ID NO: 3244
aauauagaugggugcuuua

SEQ ID NO: 252127 - RNA, 19 nt, Artificial Sequence
  Description of Artificial Sequence: Synthetic oligonucleotide
  Antisense strand to SEQ ID NO: 252126
uaaagcacccaucuauauu

SEQ ID NO: 252128 - RNA, 19 nt, Artificial Sequence
  Description of Artificial Sequence: Synthetic oligonucleotide
  Sense strand starting at position 2559 SEQ ID NO: 3244
auagaugggugcuuuaaau

SEQ ID NO: 252129 - RNA, 19 nt, Artificial Sequence
  Description of Artificial Sequence: Synthetic oligonucleotide
  Antisense strand to SEQ ID NO: 252128
auuuaaagcacccaucuau

SEQ ID NO: 252130 - RNA, 19 nt, Artificial Sequence
  Description of Artificial Sequence: Synthetic oligonucleotide
  Sense strand starting at position 2572 SEQ ID NO: 3244
uuaaauucugcuuagagcu

SEQ ID NO: 252131 - RNA, 19 nt, Artificial Sequence
  Description of Artificial Sequence: Synthetic oligonucleotide
  Antisense strand to SEQ ID NO: 252130
agcucuaagcagaauuuaa

SEQ ID NO: 252132 - RNA, 19 nt, Artificial Sequence
  Description of Artificial Sequence: Synthetic oligonucleotide
  Sense strand starting at position 2613 SEQ ID NO: 3244
ccggguuaaugaguaaaua

SEQ ID NO: 252133 - RNA, 19 nt, Artificial Sequence
  Description of Artificial Sequence: Synthetic oligonucleotide
  Antisense strand to SEQ ID NO: 252132
uauuuacucauuaacccgg

SEQ ID NO: 252134 - RNA, 19 nt, Artificial Sequence
  Description of Artificial Sequence: Synthetic oligonucleotide
  Sense strand starting at position 2827 SEQ ID NO: 3244
uuugaacacugccugaaau

SEQ ID NO: 252135 - RNA, 19 nt, Artificial Sequence
  Description of Artificial Sequence: Synthetic oligonucleotide
  Antisense strand to SEQ ID NO: 252134
auuucaggcaguguucaaa

SEQ ID NO: 252136 - RNA, 19 nt, Artificial Sequence
  Description of Artificial Sequence: Synthetic oligonucleotide
  Sense strand starting at position 2828 SEQ ID NO: 3244
uugaacacugccugaaauu

SEQ ID NO: 252137 - RNA, 19 nt, Artificial Sequence
  Description of Artificial Sequence: Synthetic oligonucleotide
  Antisense strand to SEQ ID NO: 252136
aauuucaggcaguguucaa

SEQ ID NO: 252138 - RNA, 19 nt, Artificial Sequence
  Description of Artificial Sequence: Synthetic oligonucleotide
  Sense strand starting at position 3001 SEQ ID NO: 3244
gcuaacucagaaugaauua

SEQ ID NO: 252139 - RNA, 19 nt, Artificial Sequence
  Description of Artificial Sequence: Synthetic oligonucleotide
  Antisense strand to SEQ ID NO: 252138
uaauucauucugaguuagc

SEQ ID NO: 252140 - RNA, 19 nt, Artificial Sequence
  Description of Artificial Sequence: Synthetic oligonucleotide
  Sense strand starting at position 3029 SEQ ID NO: 3244
ucuacuuauguagggagua

SEQ ID NO: 252141 - RNA, 19 nt, Artificial Sequence
  Description of Artificial Sequence: Synthetic oligonucleotide
  Antisense strand to SEQ ID NO: 252140
uacucccuacauaaguaga

SEQ ID NO: 252142 - RNA, 19 nt, Artificial Sequence
  Description of Artificial Sequence: Synthetic oligonucleotide
  Sense strand starting at position 3041 SEQ ID NO: 3244
gggaguagauuaucuuaac

SEQ ID NO: 252143 - RNA, 19 nt, Artificial Sequence
  Description of Artificial Sequence: Synthetic oligonucleotide
  Antisense strand to SEQ ID NO: 252142
guuaagauaaucuacuccc

SEQ ID NO: 252144 - RNA, 19 nt, Artificial Sequence
  Description of Artificial Sequence: Synthetic oligonucleotide
  Sense strand starting at position 3152 SEQ ID NO: 3244
agguacucuuacguuauuu

SEQ ID NO: 252145 - RNA, 19 nt, Artificial Sequence
  Description of Artificial Sequence: Synthetic oligonucleotide
  Antisense strand to SEQ ID NO: 252144
aaauaacguaagaguaccu

SEQ ID NO: 252146 - RNA, 19 nt, Artificial Sequence
  Description of Artificial Sequence: Synthetic oligonucleotide
  Sense strand starting at position 3272 SEQ ID NO: 3244
auuggcaucaccugaggau

SEQ ID NO: 252147 - RNA, 19 nt, Artificial Sequence
  Description of Artificial Sequence: Synthetic oligonucleotide
  Antisense strand to SEQ ID NO: 252146
auccucaggugaugccaau

SEQ ID NO: 252148 - RNA, 19 nt, Artificial Sequence
  Description of Artificial Sequence: Synthetic oligonucleotide
  Sense strand starting at position 3336 SEQ ID NO: 3244
uuaacugucaugggugaga

SEQ ID NO: 252149 - RNA, 19 nt, Artificial Sequence
  Description of Artificial Sequence: Synthetic oligonucleotide
  Antisense strand to SEQ ID NO: 252148
ucucacccaugacaguuaa

SEQ ID NO: 252150 - RNA, 19 nt, Artificial Sequence
  Description of Artificial Sequence: Synthetic oligonucleotide
  Sense strand starting at position 3352 SEQ ID NO: 3244
agaccugggcauugacauu

SEQ ID NO: 252151 - RNA, 19 nt, Artificial Sequence
  Description of Artificial Sequence: Synthetic oligonucleotide
  Antisense strand to SEQ ID NO: 252150
aaugucaaugcccaggucu

SEQ ID NO: 252152 - RNA, 19 nt, Artificial Sequence
  Description of Artificial Sequence: Synthetic oligonucleotide
  Sense strand starting at position 3418 SEQ ID NO: 3244
uuauucugucuugauauga

SEQ ID NO: 252153 - RNA, 19 nt, Artificial Sequence
  Description of Artificial Sequence: Synthetic oligonucleotide
  Antisense strand to SEQ ID NO: 252152
ucauaucaagacagaauaa

SEQ ID NO: 252154 - RNA, 19 nt, Artificial Sequence
  Description of Artificial Sequence: Synthetic oligonucleotide
  Sense strand starting at position 3429 SEQ ID NO: 3244
ugauaugaaauguggcaga

SEQ ID NO: 252155 - RNA, 19 nt, Artificial Sequence
  Description of Artificial Sequence: Synthetic oligonucleotide
  Antisense strand to SEQ ID NO: 252154
ucugccacauuucauauca

SEQ ID NO: 252156 - RNA, 19 nt, Artificial Sequence
  Description of Artificial Sequence: Synthetic oligonucleotide
  Sense strand starting at position 3924 SEQ ID NO: 3244
gaaccagggagguguaaau

SEQ ID NO: 252157 - RNA, 19 nt, Artificial Sequence
  Description of Artificial Sequence: Synthetic oligonucleotide
  Antisense strand to SEQ ID NO: 252156
auuuacaccucccugguuc

SEQ ID NO: 252158 - RNA, 19 nt, Artificial Sequence
  Description of Artificial Sequence: Synthetic oligonucleotide
  Sense strand starting at position 3933 SEQ ID NO: 3244
agguguaaaucauuagaga

SEQ ID NO: 252159 - RNA, 19 nt, Artificial Sequence
  Description of Artificial Sequence: Synthetic oligonucleotide
  Antisense strand to SEQ ID NO: 252158
ucucuaaugauuuacaccu

SEQ ID NO: 252160 - RNA, 19 nt, Artificial Sequence
  Description of Artificial Sequence: Synthetic oligonucleotide
  Sense strand starting at position 3968 SEQ ID NO: 3244
aucugauagcaauaaugua

SEQ ID NO: 252161 - RNA, 19 nt, Artificial Sequence
  Description of Artificial Sequence: Synthetic oligonucleotide
  Antisense strand to SEQ ID NO: 252160
uacauuauugcuaucagau

SEQ ID NO: 252162 - RNA, 19 nt, Artificial Sequence
  Description of Artificial Sequence: Synthetic oligonucleotide
  Sense strand starting at position 24 SEQ ID NO: 3245
gccugugcacaugguuuaa

SEQ ID NO: 252163 - RNA, 19 nt, Artificial Sequence
  Description of Artificial Sequence: Synthetic oligonucleotide
  Antisense strand to SEQ ID NO: 252162
uuaaaccaugugcacaggc

SEQ ID NO: 252164 - RNA, 19 nt, Artificial Sequence
  Description of Artificial Sequence: Synthetic oligonucleotide
  Sense strand starting at position 71 SEQ ID NO: 3245
gacaguaucuaaggaaaca

SEQ ID NO: 252165 - RNA, 19 nt, Artificial Sequence
  Description of Artificial Sequence: Synthetic oligonucleotide
  Antisense strand to SEQ ID NO: 252164
uguuuccuuagauacuguc

SEQ ID NO: 252166 - RNA, 19 nt, Artificial Sequence
  Description of Artificial Sequence: Synthetic oligonucleotide
  Sense strand starting at position 111 SEQ ID NO: 3245
auuguaugguuacuacaua

SEQ ID NO: 252167 - RNA, 19 nt, Artificial Sequence
  Description of Artificial Sequence: Synthetic oligonucleotide
  Antisense strand to SEQ ID NO: 252166
uauguaguaaccauacaau

SEQ ID NO: 252168 - RNA, 19 nt, Artificial Sequence
  Description of Artificial Sequence: Synthetic oligonucleotide
  Sense strand starting at position 123 SEQ ID NO: 3245
cuacauagauaagaaauga

SEQ ID NO: 252169 - RNA, 19 nt, Artificial Sequence
  Description of Artificial Sequence: Synthetic oligonucleotide
  Antisense strand to SEQ ID NO: 252168
ucauuucuuaucuauguag

SEQ ID NO: 252170 - RNA, 19 nt, Artificial Sequence
  Description of Artificial Sequence: Synthetic oligonucleotide
  Sense strand starting at position 184 SEQ ID NO: 3245
ccucaagaacugugugauc

SEQ ID NO: 252171 - RNA, 19 nt, Artificial Sequence
  Description of Artificial Sequence: Synthetic oligonucleotide
  Antisense strand to SEQ ID NO: 252170
gaucacacaguucuugagg

SEQ ID NO: 252172 - RNA, 19 nt, Artificial Sequence
  Description of Artificial Sequence: Synthetic oligonucleotide
  Sense strand starting at position 186 SEQ ID NO: 3245
ucaagaacugugugaucuu

SEQ ID NO: 252173 - RNA, 19 nt, Artificial Sequence
  Description of Artificial Sequence: Synthetic oligonucleotide
  Antisense strand to SEQ ID NO: 252172
aagaucacacaguucuuga

SEQ ID NO: 252174 - RNA, 19 nt, Artificial Sequence
  Description of Artificial Sequence: Synthetic oligonucleotide
  Sense strand starting at position 189 SEQ ID NO: 3245
agaacugugugaucuugaa

SEQ ID NO: 252175 - RNA, 19 nt, Artificial Sequence
  Description of Artificial Sequence: Synthetic oligonucleotide
  Antisense strand to SEQ ID NO: 252174
uucaagaucacacaguucu

SEQ ID NO: 252176 - RNA, 19 nt, Artificial Sequence
  Description of Artificial Sequence: Synthetic oligonucleotide
  Sense strand starting at position 214 SEQ ID NO: 3245
cuguaacuucucugagcca

SEQ ID NO: 252177 - RNA, 19 nt, Artificial Sequence
  Description of Artificial Sequence: Synthetic oligonucleotide
  Antisense strand to SEQ ID NO: 252176
uggcucagagaaguuacag

SEQ ID NO: 252178 - RNA, 19 nt, Artificial Sequence
  Description of Artificial Sequence: Synthetic oligonucleotide
  Sense strand starting at position 243 SEQ ID NO: 3245
guuugucuguuacucugau

SEQ ID NO: 252179 - RNA, 19 nt, Artificial Sequence
  Description of Artificial Sequence: Synthetic oligonucleotide
  Antisense strand to SEQ ID NO: 252178
aucagaguaacagacaaac

SEQ ID NO: 252180 - RNA, 19 nt, Artificial Sequence
  Description of Artificial Sequence: Synthetic oligonucleotide
  Sense strand starting at position 291 SEQ ID NO: 3245
aagggcuaaugucugcaua

SEQ ID NO: 252181 - RNA, 19 nt, Artificial Sequence
  Description of Artificial Sequence: Synthetic oligonucleotide
  Antisense strand to SEQ ID NO: 252180
uaugcagacauuagcccuu

SEQ ID NO: 252182 - RNA, 19 nt, Artificial Sequence
  Description of Artificial Sequence: Synthetic oligonucleotide
  Sense strand starting at position 292 SEQ ID NO: 3245
agggcuaaugucugcauaa

SEQ ID NO: 252183 - RNA, 19 nt, Artificial Sequence
  Description of Artificial Sequence: Synthetic oligonucleotide
  Antisense strand to SEQ ID NO: 252182
uuaugcagacauuagcccu

SEQ ID NO: 252184 - RNA, 19 nt, Artificial Sequence
  Description of Artificial Sequence: Synthetic oligonucleotide
  Sense strand starting at position 293 SEQ ID NO: 3245
gggcuaaugucugcauaaa

SEQ ID NO: 252185 - RNA, 19 nt, Artificial Sequence
  Description of Artificial Sequence: Synthetic oligonucleotide
  Antisense strand to SEQ ID NO: 252184
uuuaugcagacauuagccc

SEQ ID NO: 252186 - RNA, 19 nt, Artificial Sequence
  Description of Artificial Sequence: Synthetic oligonucleotide
  Sense strand starting at position 329 SEQ ID NO: 3245
agugcuaaucgaugaaaua

SEQ ID NO: 252187 - RNA, 19 nt, Artificial Sequence
  Description of Artificial Sequence: Synthetic oligonucleotide
  Antisense strand to SEQ ID NO: 252186
uauuucaucgauuagcacu

SEQ ID NO: 252188 - RNA, 19 nt, Artificial Sequence
  Description of Artificial Sequence: Synthetic oligonucleotide
  Sense strand starting at position 330 SEQ ID NO: 3245
gugcuaaucgaugaaauaa

SEQ ID NO: 252189 - RNA, 19 nt, Artificial Sequence
  Description of Artificial Sequence: Synthetic oligonucleotide
  Antisense strand to SEQ ID NO: 252188
uuauuucaucgauuagcac

SEQ ID NO: 252190 - RNA, 19 nt, Artificial Sequence
  Description of Artificial Sequence: Synthetic oligonucleotide
  Sense strand starting at position 637 SEQ ID NO: 3245
gggcuuugcggcaaguuua

SEQ ID NO: 252191 - RNA, 19 nt, Artificial Sequence
  Description of Artificial Sequence: Synthetic oligonucleotide
  Antisense strand to SEQ ID NO: 252190
uaaacuugccgcaaagccc

SEQ ID NO: 252192 - RNA, 19 nt, Artificial Sequence
  Description of Artificial Sequence: Synthetic oligonucleotide
  Sense strand starting at position 751 SEQ ID NO: 3245
gggugaagagucugacgua

SEQ ID NO: 252193 - RNA, 19 nt, Artificial Sequence
  Description of Artificial Sequence: Synthetic oligonucleotide
  Antisense strand to SEQ ID NO: 252192
uacgucagacucuucaccc

SEQ ID NO: 252194 - RNA, 19 nt, Artificial Sequence
  Description of Artificial Sequence: Synthetic oligonucleotide
  Sense strand starting at position 818 SEQ ID NO: 3245
aagcgagaagcaugaacuu

SEQ ID NO: 252195 - RNA, 19 nt, Artificial Sequence
  Description of Artificial Sequence: Synthetic oligonucleotide
  Antisense strand to SEQ ID NO: 252194
aaguucaugcuucucgcuu

SEQ ID NO: 252196 - RNA, 19 nt, Artificial Sequence
  Description of Artificial Sequence: Synthetic oligonucleotide
  Sense strand starting at position 1357 SEQ ID NO: 3245
uugagacuugcaugcaaac

SEQ ID NO: 252197 - RNA, 19 nt, Artificial Sequence
  Description of Artificial Sequence: Synthetic oligonucleotide
  Antisense strand to SEQ ID NO: 252196
guuugcaugcaagucucaa

SEQ ID NO: 252198 - RNA, 19 nt, Artificial Sequence
  Description of Artificial Sequence: Synthetic oligonucleotide
  Sense strand starting at position 1454 SEQ ID NO: 3245
cgcauagggugguuucauu

SEQ ID NO: 252199 - RNA, 19 nt, Artificial Sequence
  Description of Artificial Sequence: Synthetic oligonucleotide
  Antisense strand to SEQ ID NO: 252198
aaugaaaccacccuaugcg

SEQ ID NO: 252200 - RNA, 19 nt, Artificial Sequence
  Description of Artificial Sequence: Synthetic oligonucleotide
  Sense strand starting at position 2072 SEQ ID NO: 3245
ucgcccacuccuggaauaa

SEQ ID NO: 252201 - RNA, 19 nt, Artificial Sequence
  Description of Artificial Sequence: Synthetic oligonucleotide
  Antisense strand to SEQ ID NO: 252200
uuauuccaggagugggcga

SEQ ID NO: 252202 - RNA, 19 nt, Artificial Sequence
  Description of Artificial Sequence: Synthetic oligonucleotide
  Sense strand starting at position 2549 SEQ ID NO: 3245
gaaacaagagcaugguuaa

SEQ ID NO: 252203 - RNA, 19 nt, Artificial Sequence
  Description of Artificial Sequence: Synthetic oligonucleotide
  Antisense strand to SEQ ID NO: 252202
uuaaccaugcucuuguuuc

SEQ ID NO: 252204 - RNA, 19 nt, Artificial Sequence
  Description of Artificial Sequence: Synthetic oligonucleotide
  Sense strand starting at position 2552 SEQ ID NO: 3245
acaagagcaugguuaaaga

SEQ ID NO: 252205 - RNA, 19 nt, Artificial Sequence
  Description of Artificial Sequence: Synthetic oligonucleotide
  Antisense strand to SEQ ID NO: 252204
ucuuuaaccaugcucuugu

SEQ ID NO: 252206 - RNA, 19 nt, Artificial Sequence
  Description of Artificial Sequence: Synthetic oligonucleotide
  Sense strand starting at position 2660 SEQ ID NO: 3245
ugaguuccguggaagguuu

SEQ ID NO: 252207 - RNA, 19 nt, Artificial Sequence
  Description of Artificial Sequence: Synthetic oligonucleotide
  Antisense strand to SEQ ID NO: 252206
aaaccuuccacggaacuca

SEQ ID NO: 252208 - RNA, 19 nt, Artificial Sequence
  Description of Artificial Sequence: Synthetic oligonucleotide
  Sense strand starting at position 2697 SEQ ID NO: 3245
uguggugucguccugggua

SEQ ID NO: 252209 - RNA, 19 nt, Artificial Sequence
  Description of Artificial Sequence: Synthetic oligonucleotide
  Antisense strand to SEQ ID NO: 252208
uacccaggacgacaccaca

SEQ ID NO: 252210 - RNA, 19 nt, Artificial Sequence
  Description of Artificial Sequence: Synthetic oligonucleotide
  Sense strand starting at position 2701 SEQ ID NO: 3245
gugucguccuggguaggau

SEQ ID NO: 252211 - RNA, 19 nt, Artificial Sequence
  Description of Artificial Sequence: Synthetic oligonucleotide
  Antisense strand to SEQ ID NO: 252210
auccuacccaggacgacac

SEQ ID NO: 252212 - RNA, 19 nt, Artificial Sequence
  Description of Artificial Sequence: Synthetic oligonucleotide
  Sense strand starting at position 2702 SEQ ID NO: 3245
ugucguccuggguaggauu

SEQ ID NO: 252213 - RNA, 19 nt, Artificial Sequence
  Description of Artificial Sequence: Synthetic oligonucleotide
  Antisense strand to SEQ ID NO: 252212
aauccuacccaggacgaca

SEQ ID NO: 252214 - RNA, 19 nt, Artificial Sequence
  Description of Artificial Sequence: Synthetic oligonucleotide
  Sense strand starting at position 2822 SEQ ID NO: 3245
cgaggagucgcucaugaca

SEQ ID NO: 252215 - RNA, 19 nt, Artificial Sequence
  Description of Artificial Sequence: Synthetic oligonucleotide
  Antisense strand to SEQ ID NO: 252214
ugucaugagcgacuccucg

SEQ ID NO: 252216 - RNA, 19 nt, Artificial Sequence
  Description of Artificial Sequence: Synthetic oligonucleotide
  Sense strand starting at position 3094 SEQ ID NO: 3245
uuggcuuugaagugaauca

SEQ ID NO: 252217 - RNA, 19 nt, Artificial Sequence
  Description of Artificial Sequence: Synthetic oligonucleotide
  Antisense strand to SEQ ID NO: 252216
ugauucacuucaaagccaa

SEQ ID NO: 252218 - RNA, 19 nt, Artificial Sequence
  Description of Artificial Sequence: Synthetic oligonucleotide
  Sense strand starting at position 3136 SEQ ID NO: 3245
guguauugaauccguauau

SEQ ID NO: 252219 - RNA, 19 nt, Artificial Sequence
  Description of Artificial Sequence: Synthetic oligonucleotide
  Antisense strand to SEQ ID NO: 252218
auauacggauucaauacac

SEQ ID NO: 252220 - RNA, 19 nt, Artificial Sequence
  Description of Artificial Sequence: Synthetic oligonucleotide
  Sense strand starting at position 3137 SEQ ID NO: 3245
uguauugaauccguauaua

SEQ ID NO: 252221 - RNA, 19 nt, Artificial Sequence
  Description of Artificial Sequence: Synthetic oligonucleotide
  Antisense strand to SEQ ID NO: 252220
uauauacggauucaauaca

SEQ ID NO: 252222 - RNA, 19 nt, Artificial Sequence
  Description of Artificial Sequence: Synthetic oligonucleotide
  Sense strand starting at position 3140 SEQ ID NO: 3245
auugaauccguauauaugu

SEQ ID NO: 252223 - RNA, 19 nt, Artificial Sequence
  Description of Artificial Sequence: Synthetic oligonucleotide
  Antisense strand to SEQ ID NO: 252222
acauauauacggauucaau

SEQ ID NO: 252224 - RNA, 19 nt, Artificial Sequence
  Description of Artificial Sequence: Synthetic oligonucleotide
  Sense strand starting at position 3149 SEQ ID NO: 3245
guauauauguacuugaaag

SEQ ID NO: 252225 - RNA, 19 nt, Artificial Sequence
  Description of Artificial Sequence: Synthetic oligonucleotide
  Antisense strand to SEQ ID NO: 252224
cuuucaaguacauauauac

SEQ ID NO: 252226 - RNA, 19 nt, Artificial Sequence
  Description of Artificial Sequence: Synthetic oligonucleotide
  Sense strand starting at position 3166 SEQ ID NO: 3245
aguggaaacgcauagcuua

SEQ ID NO: 252227 - RNA, 19 nt, Artificial Sequence
  Description of Artificial Sequence: Synthetic oligonucleotide
  Antisense strand to SEQ ID NO: 252226
uaagcuaugcguuuccacu

SEQ ID NO: 252228 - RNA, 19 nt, Artificial Sequence
  Description of Artificial Sequence: Synthetic oligonucleotide
  Sense strand starting at position 3204 SEQ ID NO: 3245
agaauuaauggcgaagguu

SEQ ID NO: 252229 - RNA, 19 nt, Artificial Sequence
  Description of Artificial Sequence: Synthetic oligonucleotide
  Antisense strand to SEQ ID NO: 252228
aaccuucgccauuaauucu

SEQ ID NO: 252230 - RNA, 19 nt, Artificial Sequence
  Description of Artificial Sequence: Synthetic oligonucleotide
  Sense strand starting at position 3556 SEQ ID NO: 3245
guugauguccugcacagag

SEQ ID NO: 252231 - RNA, 19 nt, Artificial Sequence
  Description of Artificial Sequence: Synthetic oligonucleotide
  Antisense strand to SEQ ID NO: 252230
cucugugcaggacaucaac

SEQ ID NO: 252232 - RNA, 19 nt, Artificial Sequence
  Description of Artificial Sequence: Synthetic oligonucleotide
  Sense strand starting at position 3581 SEQ ID NO: 3245
gaagcuucucagugucacu

SEQ ID NO: 252233 - RNA, 19 nt, Artificial Sequence
  Description of Artificial Sequence: Synthetic oligonucleotide
  Antisense strand to SEQ ID NO: 252232
agugacacugagaagcuuc

SEQ ID NO: 252234 - RNA, 19 nt, Artificial Sequence
  Description of Artificial Sequence: Synthetic oligonucleotide
  Sense strand starting at position 3763 SEQ ID NO: 3245
uggugaggcugggaucaaa

SEQ ID NO: 252235 - RNA, 19 nt, Artificial Sequence
  Description of Artificial Sequence: Synthetic oligonucleotide
  Antisense strand to SEQ ID NO: 252234
uuugaucccagccucacca

SEQ ID NO: 252236 - RNA, 19 nt, Artificial Sequence
  Description of Artificial Sequence: Synthetic oligonucleotide
  Sense strand starting at position 3814 SEQ ID NO: 3245
cacuuuauguguuugugau

SEQ ID NO: 252237 - RNA, 19 nt, Artificial Sequence
  Description of Artificial Sequence: Synthetic oligonucleotide
  Antisense strand to SEQ ID NO: 252236
aucacaaacacauaaagug

SEQ ID NO: 252238 - RNA, 19 nt, Artificial Sequence
  Description of Artificial Sequence: Synthetic oligonucleotide
  Sense strand starting at position 3816 SEQ ID NO: 3245
cuuuauguguuugugauua

SEQ ID NO: 252239 - RNA, 19 nt, Artificial Sequence
  Description of Artificial Sequence: Synthetic oligonucleotide
  Antisense strand to SEQ ID NO: 252238
uaaucacaaacacauaaag

SEQ ID NO: 252240 - RNA, 19 nt, Artificial Sequence
  Description of Artificial Sequence: Synthetic oligonucleotide
  Sense strand starting at position 3829 SEQ ID NO: 3245
ugauuauugccaugugaag

SEQ ID NO: 252241 - RNA, 19 nt, Artificial Sequence
  Description of Artificial Sequence: Synthetic oligonucleotide
  Antisense strand to SEQ ID NO: 252240
cuucacauggcaauaauca

SEQ ID NO: 252242 - RNA, 19 nt, Artificial Sequence
  Description of Artificial Sequence: Synthetic oligonucleotide
  Sense strand starting at position 358 SEQ ID NO: 3247
cggcuuugucuucaaucgu

SEQ ID NO: 252243 - RNA, 19 nt, Artificial Sequence
  Description of Artificial Sequence: Synthetic oligonucleotide
  Antisense strand to SEQ ID NO: 252242
acgauugaagacaaagccg

SEQ ID NO: 252244 - RNA, 19 nt, Artificial Sequence
  Description of Artificial Sequence: Synthetic oligonucleotide
  Sense strand starting at position 380 SEQ ID NO: 3247
ccuguaucuccucgucuga

SEQ ID NO: 252245 - RNA, 19 nt, Artificial Sequence
  Description of Artificial Sequence: Synthetic oligonucleotide
  Antisense strand to SEQ ID NO: 252244
ucagacgaggagauacagg

SEQ ID NO: 252246 - RNA, 19 nt, Artificial Sequence
  Description of Artificial Sequence: Synthetic oligonucleotide
  Sense strand starting at position 382 SEQ ID NO: 3247
uguaucuccucgucugaca

SEQ ID NO: 252247 - RNA, 19 nt, Artificial Sequence
  Description of Artificial Sequence: Synthetic oligonucleotide
  Antisense strand to SEQ ID NO: 252246
ugucagacgaggagauaca

SEQ ID NO: 252248 - RNA, 19 nt, Artificial Sequence
  Description of Artificial Sequence: Synthetic oligonucleotide
  Sense strand starting at position 892 SEQ ID NO: 3247
ccagaacugugaucccuua

SEQ ID NO: 252249 - RNA, 19 nt, Artificial Sequence
  Description of Artificial Sequence: Synthetic oligonucleotide
  Antisense strand to SEQ ID NO: 252248
uaagggaucacaguucugg

SEQ ID NO: 252250 - RNA, 19 nt, Artificial Sequence
  Description of Artificial Sequence: Synthetic oligonucleotide
  Sense strand starting at position 1088 SEQ ID NO: 3247
ggcugagcaggcuauaagu

SEQ ID NO: 252251 - RNA, 19 nt, Artificial Sequence
  Description of Artificial Sequence: Synthetic oligonucleotide
  Antisense strand to SEQ ID NO: 252250
acuuauagccugcucagcc

SEQ ID NO: 252252 - RNA, 19 nt, Artificial Sequence
  Description of Artificial Sequence: Synthetic oligonucleotide
  Sense strand starting at position 1097 SEQ ID NO: 3247
ggcuauaaguugaggguga

SEQ ID NO: 252253 - RNA, 19 nt, Artificial Sequence
  Description of Artificial Sequence: Synthetic oligonucleotide
  Antisense strand to SEQ ID NO: 252252
ucacccucaacuuauagcc

SEQ ID NO: 252254 - RNA, 19 nt, Artificial Sequence
  Description of Artificial Sequence: Synthetic oligonucleotide
  Sense strand starting at position 1099 SEQ ID NO: 3247
cuauaaguugagggugaca

SEQ ID NO: 252255 - RNA, 19 nt, Artificial Sequence
  Description of Artificial Sequence: Synthetic oligonucleotide
  Antisense strand to SEQ ID NO: 252254
ugucacccucaacuuauag

SEQ ID NO: 252256 - RNA, 19 nt, Artificial Sequence
  Description of Artificial Sequence: Synthetic oligonucleotide
  Sense strand starting at position 1202 SEQ ID NO: 3247
gggcauucgguuuacaguu

SEQ ID NO: 252257 - RNA, 19 nt, Artificial Sequence
  Description of Artificial Sequence: Synthetic oligonucleotide
  Antisense strand to SEQ ID NO: 252256
aacuguaaaccgaaugccc

SEQ ID NO: 252258 - RNA, 19 nt, Artificial Sequence
  Description of Artificial Sequence: Synthetic oligonucleotide
  Sense strand starting at position 1211 SEQ ID NO: 3247
guuuacaguuccuuaguga

SEQ ID NO: 252259 - RNA, 19 nt, Artificial Sequence
  Description of Artificial Sequence: Synthetic oligonucleotide
  Antisense strand to SEQ ID NO: 252258
ucacuaaggaacuguaaac

SEQ ID NO: 252260 - RNA, 19 nt, Artificial Sequence
  Description of Artificial Sequence: Synthetic oligonucleotide
  Sense strand starting at position 1325 SEQ ID NO: 3247
agggcuuucugcuccuuga

SEQ ID NO: 252261 - RNA, 19 nt, Artificial Sequence
  Description of Artificial Sequence: Synthetic oligonucleotide
  Antisense strand to SEQ ID NO: 252260
ucaaggagcagaaagcccu

SEQ ID NO: 252262 - RNA, 19 nt, Artificial Sequence
  Description of Artificial Sequence: Synthetic oligonucleotide
  Sense strand starting at position 1373 SEQ ID NO: 3247
ggagcuuggucacccggaa

SEQ ID NO: 252263 - RNA, 19 nt, Artificial Sequence
  Description of Artificial Sequence: Synthetic oligonucleotide
  Antisense strand to SEQ ID NO: 252262
uuccgggugaccaagcucc

SEQ ID NO: 252264 - RNA, 19 nt, Artificial Sequence
  Description of Artificial Sequence: Synthetic oligonucleotide
  Sense strand starting at position 1755 SEQ ID NO: 3247
cgaccuugccggcucuaua

SEQ ID NO: 252265 - RNA, 19 nt, Artificial Sequence
  Description of Artificial Sequence: Synthetic oligonucleotide
  Antisense strand to SEQ ID NO: 252264
uauagagccggcaaggucg

SEQ ID NO: 252266 - RNA, 19 nt, Artificial Sequence
  Description of Artificial Sequence: Synthetic oligonucleotide
  Sense strand starting at position 1916 SEQ ID NO: 3247
gggcuaggaugucugcgau

SEQ ID NO: 252267 - RNA, 19 nt, Artificial Sequence
  Description of Artificial Sequence: Synthetic oligonucleotide
  Antisense strand to SEQ ID NO: 252266
aucgcagacauccuagccc

SEQ ID NO: 252268 - RNA, 19 nt, Artificial Sequence
  Description of Artificial Sequence: Synthetic oligonucleotide
  Sense strand starting at position 1919 SEQ ID NO: 3247
cuaggaugucugcgaugcu

SEQ ID NO: 252269 - RNA, 19 nt, Artificial Sequence
  Description of Artificial Sequence: Synthetic oligonucleotide
  Antisense strand to SEQ ID NO: 252268
agcaucgcagacauccuag

SEQ ID NO: 252270 - RNA, 19 nt, Artificial Sequence
  Description of Artificial Sequence: Synthetic oligonucleotide
  Sense strand starting at position 1922 SEQ ID NO: 3247
ggaugucugcgaugcuuaa

SEQ ID NO: 252271 - RNA, 19 nt, Artificial Sequence
  Description of Artificial Sequence: Synthetic oligonucleotide
  Antisense strand to SEQ ID NO: 252270
uuaagcaucgcagacaucc

SEQ ID NO: 252272 - RNA, 19 nt, Artificial Sequence
  Description of Artificial Sequence: Synthetic oligonucleotide
  Sense strand starting at position 1926 SEQ ID NO: 3247
gucugcgaugcuuaagagu

SEQ ID NO: 252273 - RNA, 19 nt, Artificial Sequence
  Description of Artificial Sequence: Synthetic oligonucleotide
  Antisense strand to SEQ ID NO: 252272
acucuuaagcaucgcagac

SEQ ID NO: 252274 - RNA, 19 nt, Artificial Sequence
  Description of Artificial Sequence: Synthetic oligonucleotide
  Sense strand starting at position 2515 SEQ ID NO: 3247
gagaaacguuguuucuggu

SEQ ID NO: 252275 - RNA, 19 nt, Artificial Sequence
  Description of Artificial Sequence: Synthetic oligonucleotide
  Antisense strand to SEQ ID NO: 252274
accagaaacaacguuucuc

SEQ ID NO: 252276 - RNA, 19 nt, Artificial Sequence
  Description of Artificial Sequence: Synthetic oligonucleotide
  Sense strand starting at position 2605 SEQ ID NO: 3247
gcgacugcaacugggaaua

SEQ ID NO: 252277 - RNA, 19 nt, Artificial Sequence
  Description of Artificial Sequence: Synthetic oligonucleotide
  Antisense strand to SEQ ID NO: 252276
uauucccaguugcagucgc

SEQ ID NO: 252278 - RNA, 19 nt, Artificial Sequence
  Description of Artificial Sequence: Synthetic oligonucleotide
  Sense strand starting at position 2607 SEQ ID NO: 3247
gacugcaacugggaauagu

SEQ ID NO: 252279 - RNA, 19 nt, Artificial Sequence
  Description of Artificial Sequence: Synthetic oligonucleotide
  Antisense strand to SEQ ID NO: 252278
acuauucccaguugcaguc

SEQ ID NO: 252280 - RNA, 19 nt, Artificial Sequence
  Description of Artificial Sequence: Synthetic oligonucleotide
  Sense strand starting at position 2773 SEQ ID NO: 3247
gggucuuugucagugagga

SEQ ID NO: 252281 - RNA, 19 nt, Artificial Sequence
  Description of Artificial Sequence: Synthetic oligonucleotide
  Antisense strand to SEQ ID NO: 252280
uccucacugacaaagaccc

SEQ ID NO: 252282 - RNA, 19 nt, Artificial Sequence
  Description of Artificial Sequence: Synthetic oligonucleotide
  Sense strand starting at position 2774 SEQ ID NO: 3247
ggucuuugucagugaggac

SEQ ID NO: 252283 - RNA, 19 nt, Artificial Sequence
  Description of Artificial Sequence: Synthetic oligonucleotide
  Antisense strand to SEQ ID NO: 252282
guccucacugacaaagacc

SEQ ID NO: 252284 - RNA, 19 nt, Artificial Sequence
  Description of Artificial Sequence: Synthetic oligonucleotide
  Sense strand starting at position 2775 SEQ ID NO: 3247
gucuuugucagugaggacu

SEQ ID NO: 252285 - RNA, 19 nt, Artificial Sequence
  Description of Artificial Sequence: Synthetic oligonucleotide
  Antisense strand to SEQ ID NO: 252284
aguccucacugacaaagac

SEQ ID NO: 252286 - RNA, 19 nt, Artificial Sequence
  Description of Artificial Sequence: Synthetic oligonucleotide
  Sense strand starting at position 2781 SEQ ID NO: 3247
gucagugaggacuggcaaa

SEQ ID NO: 252287 - RNA, 19 nt, Artificial Sequence
  Description of Artificial Sequence: Synthetic oligonucleotide
  Antisense strand to SEQ ID NO: 252286
uuugccaguccucacugac

SEQ ID NO: 252288 - RNA, 19 nt, Artificial Sequence
  Description of Artificial Sequence: Synthetic oligonucleotide
  Sense strand starting at position 2983 SEQ ID NO: 3247
uugggacauuccugacaac

SEQ ID NO: 252289 - RNA, 19 nt, Artificial Sequence
  Description of Artificial Sequence: Synthetic oligonucleotide
  Antisense strand to SEQ ID NO: 252288
guugucaggaaugucccaa

SEQ ID NO: 252290 - RNA, 19 nt, Artificial Sequence
  Description of Artificial Sequence: Synthetic oligonucleotide
  Sense strand starting at position 2986 SEQ ID NO: 3247
ggacauuccugacaaccca

SEQ ID NO: 252291 - RNA, 19 nt, Artificial Sequence
  Description of Artificial Sequence: Synthetic oligonucleotide
  Antisense strand to SEQ ID NO: 252290
uggguugucaggaaugucc

SEQ ID NO: 252292 - RNA, 19 nt, Artificial Sequence
  Description of Artificial Sequence: Synthetic oligonucleotide
  Sense strand starting at position 3011 SEQ ID NO: 3247
aacugugaggccugguaua

SEQ ID NO: 252293 - RNA, 19 nt, Artificial Sequence
  Description of Artificial Sequence: Synthetic oligonucleotide
  Antisense strand to SEQ ID NO: 252292
uauaccaggccucacaguu

SEQ ID NO: 252294 - RNA, 19 nt, Artificial Sequence
  Description of Artificial Sequence: Synthetic oligonucleotide
  Sense strand starting at position 3022 SEQ ID NO: 3247
cugguauacucauuccuau

SEQ ID NO: 252295 - RNA, 19 nt, Artificial Sequence
  Description of Artificial Sequence: Synthetic oligonucleotide
  Antisense strand to SEQ ID NO: 252294
auaggaaugaguauaccag

SEQ ID NO: 252296 - RNA, 19 nt, Artificial Sequence
  Description of Artificial Sequence: Synthetic oligonucleotide
  Sense strand starting at position 3082 SEQ ID NO: 3247
ugggcucauaccuggguaa

SEQ ID NO: 252297 - RNA, 19 nt, Artificial Sequence
  Description of Artificial Sequence: Synthetic oligonucleotide
  Antisense strand to SEQ ID NO: 252296
uuacccagguaugagccca

SEQ ID NO: 252298 - RNA, 19 nt, Artificial Sequence
  Description of Artificial Sequence: Synthetic oligonucleotide
  Sense strand starting at position 3085 SEQ ID NO: 3247
gcucauaccuggguaagca

SEQ ID NO: 252299 - RNA, 19 nt, Artificial Sequence
  Description of Artificial Sequence: Synthetic oligonucleotide
  Antisense strand to SEQ ID NO: 252298
ugcuuacccagguaugagc

SEQ ID NO: 252300 - RNA, 19 nt, Artificial Sequence
  Description of Artificial Sequence: Synthetic oligonucleotide
  Sense strand starting at position 3111 SEQ ID NO: 3247
cccuccuuuguaggaagaa

SEQ ID NO: 252301 - RNA, 19 nt, Artificial Sequence
  Description of Artificial Sequence: Synthetic oligonucleotide
  Antisense strand to SEQ ID NO: 252300
uucuuccuacaaaggaggg

SEQ ID NO: 252302 - RNA, 19 nt, Artificial Sequence
  Description of Artificial Sequence: Synthetic oligonucleotide
  Sense strand starting at position 3347 SEQ ID NO: 3247
uggacuguccauuauguca

SEQ ID NO: 252303 - RNA, 19 nt, Artificial Sequence
  Description of Artificial Sequence: Synthetic oligonucleotide
  Antisense strand to SEQ ID NO: 252302
ugacauaauggacagucca

SEQ ID NO: 252304 - RNA, 19 nt, Artificial Sequence
  Description of Artificial Sequence: Synthetic oligonucleotide
  Sense strand starting at position 3358 SEQ ID NO: 3247
uuaugucacuuuccuugua

SEQ ID NO: 252305 - RNA, 19 nt, Artificial Sequence
  Description of Artificial Sequence: Synthetic oligonucleotide
  Antisense strand to SEQ ID NO: 252304
uacaaggaaagugacauaa

SEQ ID NO: 252306 - RNA, 19 nt, Artificial Sequence
  Description of Artificial Sequence: Synthetic oligonucleotide
  Sense strand starting at position 3360 SEQ ID NO: 3247
augucacuuuccuuguaga

SEQ ID NO: 252307 - RNA, 19 nt, Artificial Sequence
  Description of Artificial Sequence: Synthetic oligonucleotide
  Antisense strand to SEQ ID NO: 252306
ucuacaaggaaagugacau

SEQ ID NO: 252308 - RNA, 19 nt, Artificial Sequence
  Description of Artificial Sequence: Synthetic oligonucleotide
  Sense strand starting at position 3429 SEQ ID NO: 3247
gcaacugcugcaugcaauu

SEQ ID NO: 252309 - RNA, 19 nt, Artificial Sequence
  Description of Artificial Sequence: Synthetic oligonucleotide
  Antisense strand to SEQ ID NO: 252308
aauugcaugcagcaguugc

SEQ ID NO: 252310 - RNA, 19 nt, Artificial Sequence
  Description of Artificial Sequence: Synthetic oligonucleotide
  Sense strand starting at position 3489 SEQ ID NO: 3247
gccaaagacuccuugacaa

SEQ ID NO: 252311 - RNA, 19 nt, Artificial Sequence
  Description of Artificial Sequence: Synthetic oligonucleotide
  Antisense strand to SEQ ID NO: 252310
uugucaaggagucuuuggc

SEQ ID NO: 252312 - RNA, 19 nt, Artificial Sequence
  Description of Artificial Sequence: Synthetic oligonucleotide
  Sense strand starting at position 3527 SEQ ID NO: 3247
uagggucuucuugguaaag

SEQ ID NO: 252313 - RNA, 19 nt, Artificial Sequence
  Description of Artificial Sequence: Synthetic oligonucleotide
  Antisense strand to SEQ ID NO: 252312
cuuuaccaagaagacccua

SEQ ID NO: 252314 - RNA, 19 nt, Artificial Sequence
  Description of Artificial Sequence: Synthetic oligonucleotide
  Sense strand starting at position 3632 SEQ ID NO: 3247
gggccacugcuggaucaaa

SEQ ID NO: 252315 - RNA, 19 nt, Artificial Sequence
  Description of Artificial Sequence: Synthetic oligonucleotide
  Antisense strand to SEQ ID NO: 252314
uuugauccagcaguggccc

SEQ ID NO: 252316 - RNA, 19 nt, Artificial Sequence
  Description of Artificial Sequence: Synthetic oligonucleotide
  Sense strand starting at position 3684 SEQ ID NO: 3247
gccucaggacguuguuaaa

SEQ ID NO: 252317 - RNA, 19 nt, Artificial Sequence
  Description of Artificial Sequence: Synthetic oligonucleotide
  Antisense strand to SEQ ID NO: 252316
uuuaacaacguccugaggc

SEQ ID NO: 252318 - RNA, 19 nt, Artificial Sequence
  Description of Artificial Sequence: Synthetic oligonucleotide
  Sense strand starting at position 3735 SEQ ID NO: 3247
uggagagaucuucgggcua

SEQ ID NO: 252319 - RNA, 19 nt, Artificial Sequence
  Description of Artificial Sequence: Synthetic oligonucleotide
  Antisense strand to SEQ ID NO: 252318
uagcccgaagaucucucca

SEQ ID NO: 252320 - RNA, 19 nt, Artificial Sequence
  Description of Artificial Sequence: Synthetic oligonucleotide
  Sense strand starting at position 3935 SEQ ID NO: 3247
uuacgugugucugugagga

SEQ ID NO: 252321 - RNA, 19 nt, Artificial Sequence
  Description of Artificial Sequence: Synthetic oligonucleotide
  Antisense strand to SEQ ID NO: 252320
uccucacagacacacguaa

SEQ ID NO: 252322 - RNA, 19 nt, Artificial Sequence
  Description of Artificial Sequence: Synthetic oligonucleotide
  Sense strand starting at position 177 SEQ ID NO: 3246
uuacgugugucugugagga

SEQ ID NO: 252323 - RNA, 19 nt, Artificial Sequence
  Description of Artificial Sequence: Synthetic oligonucleotide
  Antisense strand to SEQ ID NO: 252322
uccucacagacacacguaa

SEQ ID NO: 252324 - RNA, 19 nt, Artificial Sequence
  Description of Artificial Sequence: Synthetic oligonucleotide
  Sense strand starting at position 179 SEQ ID NO: 3246
acgugugucugugaggagu

SEQ ID NO: 252325 - RNA, 19 nt, Artificial Sequence
  Description of Artificial Sequence: Synthetic oligonucleotide
  Antisense strand to SEQ ID NO: 252324
acuccucacagacacacgu

SEQ ID NO: 252326 - RNA, 19 nt, Artificial Sequence
  Description of Artificial Sequence: Synthetic oligonucleotide
  Sense strand starting at position 288 SEQ ID NO: 3246
uuggacagcuccuaaacau

SEQ ID NO: 252327 - RNA, 19 nt, Artificial Sequence
  Description of Artificial Sequence: Synthetic oligonucleotide
  Antisense strand to SEQ ID NO: 252326
auguuuaggagcuguccaa

SEQ ID NO: 252328 - RNA, 19 nt, Artificial Sequence
  Description of Artificial Sequence: Synthetic oligonucleotide
  Sense strand starting at position 486 SEQ ID NO: 3246
guaggagggugagugauua

SEQ ID NO: 252329 - RNA, 19 nt, Artificial Sequence
  Description of Artificial Sequence: Synthetic oligonucleotide
  Antisense strand to SEQ ID NO: 252328
uaaucacucacccuccuac

SEQ ID NO: 252330 - RNA, 19 nt, Artificial Sequence
  Description of Artificial Sequence: Synthetic oligonucleotide
  Sense strand starting at position 490 SEQ ID NO: 3246
gagggugagugauuaauga

SEQ ID NO: 252331 - RNA, 19 nt, Artificial Sequence
  Description of Artificial Sequence: Synthetic oligonucleotide
  Antisense strand to SEQ ID NO: 252330
ucauuaaucacucacccuc

SEQ ID NO: 252332 - RNA, 19 nt, Artificial Sequence
  Description of Artificial Sequence: Synthetic oligonucleotide
  Sense strand starting at position 494 SEQ ID NO: 3246
gugagugauuaaugaggaa

SEQ ID NO: 252333 - RNA, 19 nt, Artificial Sequence
  Description of Artificial Sequence: Synthetic oligonucleotide
  Antisense strand to SEQ ID NO: 252332
uuccucauuaaucacucac

SEQ ID NO: 252334 - RNA, 19 nt, Artificial Sequence
  Description of Artificial Sequence: Synthetic oligonucleotide
  Sense strand starting at position 497 SEQ ID NO: 3246
agugauuaaugaggaagau

SEQ ID NO: 252335 - RNA, 19 nt, Artificial Sequence
  Description of Artificial Sequence: Synthetic oligonucleotide
  Antisense strand to SEQ ID NO: 252334
aucuuccucauuaaucacu

SEQ ID NO: 252336 - RNA, 19 nt, Artificial Sequence
  Description of Artificial Sequence: Synthetic oligonucleotide
  Sense strand starting at position 507 SEQ ID NO: 3246
gaggaagauuaagagauua

SEQ ID NO: 252337 - RNA, 19 nt, Artificial Sequence
  Description of Artificial Sequence: Synthetic oligonucleotide
  Antisense strand to SEQ ID NO: 252336
uaaucucuuaaucuuccuc

SEQ ID NO: 252338 - RNA, 19 nt, Artificial Sequence
  Description of Artificial Sequence: Synthetic oligonucleotide
  Sense strand starting at position 559 SEQ ID NO: 3246
ucggcuguccuauagguua

SEQ ID NO: 252339 - RNA, 19 nt, Artificial Sequence
  Description of Artificial Sequence: Synthetic oligonucleotide
  Antisense strand to SEQ ID NO: 252338
uaaccuauaggacagccga

SEQ ID NO: 252340 - RNA, 19 nt, Artificial Sequence
  Description of Artificial Sequence: Synthetic oligonucleotide
  Sense strand starting at position 654 SEQ ID NO: 3246
ucacgauccuucucaagag

SEQ ID NO: 252341 - RNA, 19 nt, Artificial Sequence
  Description of Artificial Sequence: Synthetic oligonucleotide
  Antisense strand to SEQ ID NO: 252340
cucuugagaaggaucguga

SEQ ID NO: 252342 - RNA, 19 nt, Artificial Sequence
  Description of Artificial Sequence: Synthetic oligonucleotide
  Sense strand starting at position 728 SEQ ID NO: 3246
caggcagucucuuguguuu

SEQ ID NO: 252343 - RNA, 19 nt, Artificial Sequence
  Description of Artificial Sequence: Synthetic oligonucleotide
  Antisense strand to SEQ ID NO: 252342
aaacacaagagacugccug

SEQ ID NO: 252344 - RNA, 19 nt, Artificial Sequence
  Description of Artificial Sequence: Synthetic oligonucleotide
  Sense strand starting at position 755 SEQ ID NO: 3246
cucagauuccuuugauugu

SEQ ID NO: 252345 - RNA, 19 nt, Artificial Sequence
  Description of Artificial Sequence: Synthetic oligonucleotide
  Antisense strand to SEQ ID NO: 252344
acaaucaaaggaaucugag

SEQ ID NO: 252346 - RNA, 19 nt, Artificial Sequence
  Description of Artificial Sequence: Synthetic oligonucleotide
  Sense strand starting at position 855 SEQ ID NO: 3246
cccauucccgcuuaaggau

SEQ ID NO: 252347 - RNA, 19 nt, Artificial Sequence
  Description of Artificial Sequence: Synthetic oligonucleotide
  Antisense strand to SEQ ID NO: 252346
auccuuaagcgggaauggg

SEQ ID NO: 252348 - RNA, 19 nt, Artificial Sequence
  Description of Artificial Sequence: Synthetic oligonucleotide
  Sense strand starting at position 1017 SEQ ID NO: 3246
aggccugcucaauaaacga

SEQ ID NO: 252349 - RNA, 19 nt, Artificial Sequence
  Description of Artificial Sequence: Synthetic oligonucleotide
  Antisense strand to SEQ ID NO: 252348
ucguuuauugagcaggccu

SEQ ID NO: 252350 - RNA, 19 nt, Artificial Sequence
  Description of Artificial Sequence: Synthetic oligonucleotide
  Sense strand starting at position 1034 SEQ ID NO: 3246
gaccuuuagucucggauug

SEQ ID NO: 252351 - RNA, 19 nt, Artificial Sequence
  Description of Artificial Sequence: Synthetic oligonucleotide
  Antisense strand to SEQ ID NO: 252350
caauccgagacuaaagguc

SEQ ID NO: 252352 - RNA, 19 nt, Artificial Sequence
  Description of Artificial Sequence: Synthetic oligonucleotide
  Sense strand starting at position 1059 SEQ ID NO: 3246
cggacauuccacugaauuc

SEQ ID NO: 252353 - RNA, 19 nt, Artificial Sequence
  Description of Artificial Sequence: Synthetic oligonucleotide
  Antisense strand to SEQ ID NO: 252352
gaauucaguggaauguccg

SEQ ID NO: 252354 - RNA, 19 nt, Artificial Sequence
  Description of Artificial Sequence: Synthetic oligonucleotide
  Sense strand starting at position 1066 SEQ ID NO: 3246
uccacugaauucugugaau

SEQ ID NO: 252355 - RNA, 19 nt, Artificial Sequence
  Description of Artificial Sequence: Synthetic oligonucleotide
  Antisense strand to SEQ ID NO: 252354
auucacagaauucagugga

SEQ ID NO: 252356 - RNA, 19 nt, Artificial Sequence
  Description of Artificial Sequence: Synthetic oligonucleotide
  Sense strand starting at position 1068 SEQ ID NO: 3246
cacugaauucugugaaugu

SEQ ID NO: 252357 - RNA, 19 nt, Artificial Sequence
  Description of Artificial Sequence: Synthetic oligonucleotide
  Antisense strand to SEQ ID NO: 252356
acauucacagaauucagug

SEQ ID NO: 252358 - RNA, 19 nt, Artificial Sequence
  Description of Artificial Sequence: Synthetic oligonucleotide
  Sense strand starting at position 1069 SEQ ID NO: 3246
acugaauucugugaaugug

SEQ ID NO: 252359 - RNA, 19 nt, Artificial Sequence
  Description of Artificial Sequence: Synthetic oligonucleotide
  Antisense strand to SEQ ID NO: 252358
cacauucacagaauucagu

SEQ ID NO: 252360 - RNA, 19 nt, Artificial Sequence
  Description of Artificial Sequence: Synthetic oligonucleotide
  Sense strand starting at position 1072 SEQ ID NO: 3246
gaauucugugaauguguag

SEQ ID NO: 252361 - RNA, 19 nt, Artificial Sequence
  Description of Artificial Sequence: Synthetic oligonucleotide
  Antisense strand to SEQ ID NO: 252360
cuacacauucacagaauuc

SEQ ID NO: 252362 - RNA, 19 nt, Artificial Sequence
  Description of Artificial Sequence: Synthetic oligonucleotide
  Sense strand starting at position 1136 SEQ ID NO: 3246
aggacaaucucagcgaaga

SEQ ID NO: 252363 - RNA, 19 nt, Artificial Sequence
  Description of Artificial Sequence: Synthetic oligonucleotide
  Antisense strand to SEQ ID NO: 252362
ucuucgcugagauuguccu

SEQ ID NO: 252364 - RNA, 19 nt, Artificial Sequence
  Description of Artificial Sequence: Synthetic oligonucleotide
  Sense strand starting at position 1137 SEQ ID NO: 3246
ggacaaucucagcgaagag

SEQ ID NO: 252365 - RNA, 19 nt, Artificial Sequence
  Description of Artificial Sequence: Synthetic oligonucleotide
  Antisense strand to SEQ ID NO: 252364
cucuucgcugagauugucc

SEQ ID NO: 252366 - RNA, 19 nt, Artificial Sequence
  Description of Artificial Sequence: Synthetic oligonucleotide
  Sense strand starting at position 1178 SEQ ID NO: 3246
uuaggaaacguccgugaac

SEQ ID NO: 252367 - RNA, 19 nt, Artificial Sequence
  Description of Artificial Sequence: Synthetic oligonucleotide
  Antisense strand to SEQ ID NO: 252366
guucacggacguuuccuaa

SEQ ID NO: 252368 - RNA, 19 nt, Artificial Sequence
  Description of Artificial Sequence: Synthetic oligonucleotide
  Sense strand starting at position 1212 SEQ ID NO: 3246
gugggaguucagggagcaa

SEQ ID NO: 252369 - RNA, 19 nt, Artificial Sequence
  Description of Artificial Sequence: Synthetic oligonucleotide
  Antisense strand to SEQ ID NO: 252368
uugcucccugaacucccac

SEQ ID NO: 252370 - RNA, 19 nt, Artificial Sequence
  Description of Artificial Sequence: Synthetic oligonucleotide
  Sense strand starting at position 1270 SEQ ID NO: 3246
cccgcacacuucugggauu

SEQ ID NO: 252371 - RNA, 19 nt, Artificial Sequence
  Description of Artificial Sequence: Synthetic oligonucleotide
  Antisense strand to SEQ ID NO: 252370
aaucccagaagugugcggg

SEQ ID NO: 252372 - RNA, 19 nt, Artificial Sequence
  Description of Artificial Sequence: Synthetic oligonucleotide
  Sense strand starting at position 1272 SEQ ID NO: 3246
cgcacacuucugggauugu

SEQ ID NO: 252373 - RNA, 19 nt, Artificial Sequence
  Description of Artificial Sequence: Synthetic oligonucleotide
  Antisense strand to SEQ ID NO: 252372
acaaucccagaagugugcg

SEQ ID NO: 252374 - RNA, 19 nt, Artificial Sequence
  Description of Artificial Sequence: Synthetic oligonucleotide
  Sense strand starting at position 1273 SEQ ID NO: 3246
gcacacuucugggauuguu

SEQ ID NO: 252375 - RNA, 19 nt, Artificial Sequence
  Description of Artificial Sequence: Synthetic oligonucleotide
  Antisense strand to SEQ ID NO: 252374
aacaaucccagaagugugc

SEQ ID NO: 252376 - RNA, 19 nt, Artificial Sequence
  Description of Artificial Sequence: Synthetic oligonucleotide
  Sense strand starting at position 38 SEQ ID NO: 3249
auaacacaucuguauguca

SEQ ID NO: 252377 - RNA, 19 nt, Artificial Sequence
  Description of Artificial Sequence: Synthetic oligonucleotide
  Antisense strand to SEQ ID NO: 252376
ugacauacagauguguuau

SEQ ID NO: 252378 - RNA, 19 nt, Artificial Sequence
  Description of Artificial Sequence: Synthetic oligonucleotide
  Sense strand starting at position 47 SEQ ID NO: 3249
cuguaugucauaggaagau

SEQ ID NO: 252379 - RNA, 19 nt, Artificial Sequence
  Description of Artificial Sequence: Synthetic oligonucleotide
  Antisense strand to SEQ ID NO: 252378
aucuuccuaugacauacag

SEQ ID NO: 252380 - RNA, 19 nt, Artificial Sequence
  Description of Artificial Sequence: Synthetic oligonucleotide
  Sense strand starting at position 63 SEQ ID NO: 3249
gauaguaggcaugguggua

SEQ ID NO: 252381 - RNA, 19 nt, Artificial Sequence
  Description of Artificial Sequence: Synthetic oligonucleotide
  Antisense strand to SEQ ID NO: 252380
uaccaccaugccuacuauc

SEQ ID NO: 252382 - RNA, 19 nt, Artificial Sequence
  Description of Artificial Sequence: Synthetic oligonucleotide
  Sense strand starting at position 103 SEQ ID NO: 3249
cuggaaacacaaugcuaau

SEQ ID NO: 252383 - RNA, 19 nt, Artificial Sequence
  Description of Artificial Sequence: Synthetic oligonucleotide
  Antisense strand to SEQ ID NO: 252382
auuagcauuguguuuccag

SEQ ID NO: 252384 - RNA, 19 nt, Artificial Sequence
  Description of Artificial Sequence: Synthetic oligonucleotide
  Sense strand starting at position 113 SEQ ID NO: 3249
aaugcuaauugugugauau

SEQ ID NO: 252385 - RNA, 19 nt, Artificial Sequence
  Description of Artificial Sequence: Synthetic oligonucleotide
  Antisense strand to SEQ ID NO: 252384
auaucacacaauuagcauu

SEQ ID NO: 252386 - RNA, 19 nt, Artificial Sequence
  Description of Artificial Sequence: Synthetic oligonucleotide
  Sense strand starting at position 114 SEQ ID NO: 3249
augcuaauugugugauaug

SEQ ID NO: 252387 - RNA, 19 nt, Artificial Sequence
  Description of Artificial Sequence: Synthetic oligonucleotide
  Antisense strand to SEQ ID NO: 252386
cauaucacacaauuagcau

SEQ ID NO: 252388 - RNA, 19 nt, Artificial Sequence
  Description of Artificial Sequence: Synthetic oligonucleotide
  Sense strand starting at position 208 SEQ ID NO: 3249
agugaugcuagaugacuga

SEQ ID NO: 252389 - RNA, 19 nt, Artificial Sequence
  Description of Artificial Sequence: Synthetic oligonucleotide
  Antisense strand to SEQ ID NO: 252388
ucagucaucuagcaucacu

SEQ ID NO: 252390 - RNA, 19 nt, Artificial Sequence
  Description of Artificial Sequence: Synthetic oligonucleotide
  Sense strand starting at position 211 SEQ ID NO: 3249
gaugcuagaugacugaguu

SEQ ID NO: 252391 - RNA, 19 nt, Artificial Sequence
  Description of Artificial Sequence: Synthetic oligonucleotide
  Antisense strand to SEQ ID NO: 252390
aacucagucaucuagcauc

SEQ ID NO: 252392 - RNA, 19 nt, Artificial Sequence
  Description of Artificial Sequence: Synthetic oligonucleotide
  Sense strand starting at position 219 SEQ ID NO: 3249
augacugaguuggcacaua

SEQ ID NO: 252393 - RNA, 19 nt, Artificial Sequence
  Description of Artificial Sequence: Synthetic oligonucleotide
  Antisense strand to SEQ ID NO: 252392
uaugugccaacucagucau

SEQ ID NO: 252394 - RNA, 19 nt, Artificial Sequence
  Description of Artificial Sequence: Synthetic oligonucleotide
  Sense strand starting at position 224 SEQ ID NO: 3249
ugaguuggcacauauaagu

SEQ ID NO: 252395 - RNA, 19 nt, Artificial Sequence
  Description of Artificial Sequence: Synthetic oligonucleotide
  Antisense strand to SEQ ID NO: 252394
acuuauaugugccaacuca

SEQ ID NO: 252396 - RNA, 19 nt, Artificial Sequence
  Description of Artificial Sequence: Synthetic oligonucleotide
  Sense strand starting at position 359 SEQ ID NO: 3249
ccaacagugcaaugagauu

SEQ ID NO: 252397 - RNA, 19 nt, Artificial Sequence
  Description of Artificial Sequence: Synthetic oligonucleotide
  Antisense strand to SEQ ID NO: 252396
aaucucauugcacuguugg

SEQ ID NO: 252398 - RNA, 19 nt, Artificial Sequence
  Description of Artificial Sequence: Synthetic oligonucleotide
  Sense strand starting at position 365 SEQ ID NO: 3249
gugcaaugagauuguuuga

SEQ ID NO: 252399 - RNA, 19 nt, Artificial Sequence
  Description of Artificial Sequence: Synthetic oligonucleotide
  Antisense strand to SEQ ID NO: 252398
ucaaacaaucucauugcac

SEQ ID NO: 252400 - RNA, 19 nt, Artificial Sequence
  Description of Artificial Sequence: Synthetic oligonucleotide
  Sense strand starting at position 368 SEQ ID NO: 3249
caaugagauuguuugaaua

SEQ ID NO: 252401 - RNA, 19 nt, Artificial Sequence
  Description of Artificial Sequence: Synthetic oligonucleotide
  Antisense strand to SEQ ID NO: 252400
uauucaaacaaucucauug

SEQ ID NO: 252402 - RNA, 19 nt, Artificial Sequence
  Description of Artificial Sequence: Synthetic oligonucleotide
  Sense strand starting at position 419 SEQ ID NO: 3249
agugaaguuguaugauuac

SEQ ID NO: 252403 - RNA, 19 nt, Artificial Sequence
  Description of Artificial Sequence: Synthetic oligonucleotide
  Antisense strand to SEQ ID NO: 252402
guaaucauacaacuucacu

SEQ ID NO: 252404 - RNA, 19 nt, Artificial Sequence
  Description of Artificial Sequence: Synthetic oligonucleotide
  Sense strand starting at position 425 SEQ ID NO: 3249
guuguaugauuacccuaag

SEQ ID NO: 252405 - RNA, 19 nt, Artificial Sequence
  Description of Artificial Sequence: Synthetic oligonucleotide
  Antisense strand to SEQ ID NO: 252404
cuuaggguaaucauacaac

SEQ ID NO: 252406 - RNA, 19 nt, Artificial Sequence
  Description of Artificial Sequence: Synthetic oligonucleotide
  Sense strand starting at position 426 SEQ ID NO: 3249
uuguaugauuacccuaaga

SEQ ID NO: 252407 - RNA, 19 nt, Artificial Sequence
  Description of Artificial Sequence: Synthetic oligonucleotide
  Antisense strand to SEQ ID NO: 252406
ucuuaggguaaucauacaa

SEQ ID NO: 252408 - RNA, 19 nt, Artificial Sequence
  Description of Artificial Sequence: Synthetic oligonucleotide
  Sense strand starting at position 639 SEQ ID NO: 3249
guaggagaagccuagcuuu

SEQ ID NO: 252409 - RNA, 19 nt, Artificial Sequence
  Description of Artificial Sequence: Synthetic oligonucleotide
  Antisense strand to SEQ ID NO: 252408
aaagcuaggcuucuccuac

SEQ ID NO: 252410 - RNA, 19 nt, Artificial Sequence
  Description of Artificial Sequence: Synthetic oligonucleotide
  Sense strand starting at position 687 SEQ ID NO: 3249
agagauugcagcuauugau

SEQ ID NO: 252411 - RNA, 19 nt, Artificial Sequence
  Description of Artificial Sequence: Synthetic oligonucleotide
  Antisense strand to SEQ ID NO: 252410
aucaauagcugcaaucucu

SEQ ID NO: 252412 - RNA, 19 nt, Artificial Sequence
  Description of Artificial Sequence: Synthetic oligonucleotide
  Sense strand starting at position 694 SEQ ID NO: 3249
gcagcuauugaugacugaa

SEQ ID NO: 252413 - RNA, 19 nt, Artificial Sequence
  Description of Artificial Sequence: Synthetic oligonucleotide
  Antisense strand to SEQ ID NO: 252412
uucagucaucaauagcugc

SEQ ID NO: 252414 - RNA, 19 nt, Artificial Sequence
  Description of Artificial Sequence: Synthetic oligonucleotide
  Sense strand starting at position 696 SEQ ID NO: 3249
agcuauugaugacugaaac

SEQ ID NO: 252415 - RNA, 19 nt, Artificial Sequence
  Description of Artificial Sequence: Synthetic oligonucleotide
  Antisense strand to SEQ ID NO: 252414
guuucagucaucaauagcu

SEQ ID NO: 252416 - RNA, 19 nt, Artificial Sequence
  Description of Artificial Sequence: Synthetic oligonucleotide
  Sense strand starting at position 697 SEQ ID NO: 3249
gcuauugaugacugaaaca

SEQ ID NO: 252417 - RNA, 19 nt, Artificial Sequence
  Description of Artificial Sequence: Synthetic oligonucleotide
  Antisense strand to SEQ ID NO: 252416
uguuucagucaucaauagc

SEQ ID NO: 252418 - RNA, 19 nt, Artificial Sequence
  Description of Artificial Sequence: Synthetic oligonucleotide
  Sense strand starting at position 792 SEQ ID NO: 3249
gucaguuaacauuaugcuu

SEQ ID NO: 252419 - RNA, 19 nt, Artificial Sequence
  Description of Artificial Sequence: Synthetic oligonucleotide
  Antisense strand to SEQ ID NO: 252418
aagcauaauguuaacugac

SEQ ID NO: 252420 - RNA, 19 nt, Artificial Sequence
  Description of Artificial Sequence: Synthetic oligonucleotide
  Sense strand starting at position 800 SEQ ID NO: 3249
acauuaugcuuaucuguca

SEQ ID NO: 252421 - RNA, 19 nt, Artificial Sequence
  Description of Artificial Sequence: Synthetic oligonucleotide
  Antisense strand to SEQ ID NO: 252420
ugacagauaagcauaaugu

SEQ ID NO: 252422 - RNA, 19 nt, Artificial Sequence
  Description of Artificial Sequence: Synthetic oligonucleotide
  Sense strand starting at position 968 SEQ ID NO: 3249
agaugacguuucuuugaac

SEQ ID NO: 252423 - RNA, 19 nt, Artificial Sequence
  Description of Artificial Sequence: Synthetic oligonucleotide
  Antisense strand to SEQ ID NO: 252422
guucaaagaaacgucaucu

SEQ ID NO: 252424 - RNA, 19 nt, Artificial Sequence
  Description of Artificial Sequence: Synthetic oligonucleotide
  Sense strand starting at position 969 SEQ ID NO: 3249
gaugacguuucuuugaaca

SEQ ID NO: 252425 - RNA, 19 nt, Artificial Sequence
  Description of Artificial Sequence: Synthetic oligonucleotide
  Antisense strand to SEQ ID NO: 252424
uguucaaagaaacgucauc

SEQ ID NO: 252426 - RNA, 19 nt, Artificial Sequence
  Description of Artificial Sequence: Synthetic oligonucleotide
  Sense strand starting at position 974 SEQ ID NO: 3249
cguuucuuugaacaaauaa

SEQ ID NO: 252427 - RNA, 19 nt, Artificial Sequence
  Description of Artificial Sequence: Synthetic oligonucleotide
  Antisense strand to SEQ ID NO: 252426
uuauuuguucaaagaaacg

SEQ ID NO: 252428 - RNA, 19 nt, Artificial Sequence
  Description of Artificial Sequence: Synthetic oligonucleotide
  Sense strand starting at position 2134 SEQ ID NO: 3249
cggguaccuuucuuugaga

SEQ ID NO: 252429 - RNA, 19 nt, Artificial Sequence
  Description of Artificial Sequence: Synthetic oligonucleotide
  Antisense strand to SEQ ID NO: 252428
ucucaaagaaagguacccg

SEQ ID NO: 252430 - RNA, 19 nt, Artificial Sequence
  Description of Artificial Sequence: Synthetic oligonucleotide
  Sense strand starting at position 2252 SEQ ID NO: 3249
gaaauuagcggaggucauu

SEQ ID NO: 252431 - RNA, 19 nt, Artificial Sequence
  Description of Artificial Sequence: Synthetic oligonucleotide
  Antisense strand to SEQ ID NO: 252430
aaugaccuccgcuaauuuc

SEQ ID NO: 252432 - RNA, 19 nt, Artificial Sequence
  Description of Artificial Sequence: Synthetic oligonucleotide
  Sense strand starting at position 2353 SEQ ID NO: 3249
uaaauuuggugcgcgaagu

SEQ ID NO: 252433 - RNA, 19 nt, Artificial Sequence
  Description of Artificial Sequence: Synthetic oligonucleotide
  Antisense strand to SEQ ID NO: 252432
acuucgcgcaccaaauuua

SEQ ID NO: 252434 - RNA, 19 nt, Artificial Sequence
  Description of Artificial Sequence: Synthetic oligonucleotide
  Sense strand starting at position 2364 SEQ ID NO: 3249
cgcgaagucacaggacaaa

SEQ ID NO: 252435 - RNA, 19 nt, Artificial Sequence
  Description of Artificial Sequence: Synthetic oligonucleotide
  Antisense strand to SEQ ID NO: 252434
uuuguccugugacuucgcg

SEQ ID NO: 252436 - RNA, 19 nt, Artificial Sequence
  Description of Artificial Sequence: Synthetic oligonucleotide
  Sense strand starting at position 2518 SEQ ID NO: 3249
aaaggucucgaucaccuau

SEQ ID NO: 252437 - RNA, 19 nt, Artificial Sequence
  Description of Artificial Sequence: Synthetic oligonucleotide
  Antisense strand to SEQ ID NO: 252436
auaggugaucgagaccuuu

SEQ ID NO: 252438 - RNA, 19 nt, Artificial Sequence
  Description of Artificial Sequence: Synthetic oligonucleotide
  Sense strand starting at position 2936 SEQ ID NO: 3249
ucucuaaguuuguuccaaa

SEQ ID NO: 252439 - RNA, 19 nt, Artificial Sequence
  Description of Artificial Sequence: Synthetic oligonucleotide
  Antisense strand to SEQ ID NO: 252438
uuuggaacaaacuuagaga

SEQ ID NO: 252440 - RNA, 19 nt, Artificial Sequence
  Description of Artificial Sequence: Synthetic oligonucleotide
  Sense strand starting at position 3041 SEQ ID NO: 3249
gccaauuaugccuaugacu

SEQ ID NO: 252441 - RNA, 19 nt, Artificial Sequence
  Description of Artificial Sequence: Synthetic oligonucleotide
  Antisense strand to SEQ ID NO: 252440
agucauaggcauaauuggc

SEQ ID NO: 252442 - RNA, 19 nt, Artificial Sequence
  Description of Artificial Sequence: Synthetic oligonucleotide
  Sense strand starting at position 3144 SEQ ID NO: 3249
ggcuaugcuccagaaccuu

SEQ ID NO: 252443 - RNA, 19 nt, Artificial Sequence
  Description of Artificial Sequence: Synthetic oligonucleotide
  Antisense strand to SEQ ID NO: 252442
aagguucuggagcauagcc

SEQ ID NO: 252444 - RNA, 19 nt, Artificial Sequence
  Description of Artificial Sequence: Synthetic oligonucleotide
  Sense strand starting at position 3227 SEQ ID NO: 3249
ugcagagagcucuagcauu

SEQ ID NO: 252445 - RNA, 19 nt, Artificial Sequence
  Description of Artificial Sequence: Synthetic oligonucleotide
  Antisense strand to SEQ ID NO: 252444
aaugcuagagcucucugca

SEQ ID NO: 252446 - RNA, 19 nt, Artificial Sequence
  Description of Artificial Sequence: Synthetic oligonucleotide
  Sense strand starting at position 3760 SEQ ID NO: 3249
gagaucugcuaagugucau

SEQ ID NO: 252447 - RNA, 19 nt, Artificial Sequence
  Description of Artificial Sequence: Synthetic oligonucleotide
  Antisense strand to SEQ ID NO: 252446
augacacuuagcagaucuc

SEQ ID NO: 252448 - RNA, 19 nt, Artificial Sequence
  Description of Artificial Sequence: Synthetic oligonucleotide
  Sense strand starting at position 3844 SEQ ID NO: 3249
ugacgugcccaagaucauu

SEQ ID NO: 252449 - RNA, 19 nt, Artificial Sequence
  Description of Artificial Sequence: Synthetic oligonucleotide
  Antisense strand to SEQ ID NO: 252448
aaugaucuugggcacguca

SEQ ID NO: 252450 - RNA, 19 nt, Artificial Sequence
  Description of Artificial Sequence: Synthetic oligonucleotide
  Sense strand starting at position 3850 SEQ ID NO: 3249
gcccaagaucauuggacca

SEQ ID NO: 252451 - RNA, 19 nt, Artificial Sequence
  Description of Artificial Sequence: Synthetic oligonucleotide
  Antisense strand to SEQ ID NO: 252450
ugguccaaugaucuugggc

SEQ ID NO: 252452 - RNA, 19 nt, Artificial Sequence
  Description of Artificial Sequence: Synthetic oligonucleotide
  Sense strand starting at position 3904 SEQ ID NO: 3249
gcuauuguaccaggaucau

SEQ ID NO: 252453 - RNA, 19 nt, Artificial Sequence
  Description of Artificial Sequence: Synthetic oligonucleotide
  Antisense strand to SEQ ID NO: 252452
augauccugguacaauagc

SEQ ID NO: 252454 - RNA, 19 nt, Artificial Sequence
  Description of Artificial Sequence: Synthetic oligonucleotide
  Sense strand starting at position 3913 SEQ ID NO: 3249
ccaggaucauucuuuguuu

SEQ ID NO: 252455 - RNA, 19 nt, Artificial Sequence
  Description of Artificial Sequence: Synthetic oligonucleotide
  Antisense strand to SEQ ID NO: 252454
aaacaaagaaugauccugg

SEQ ID NO: 252456 - RNA, 19 nt, Artificial Sequence
  Description of Artificial Sequence: Synthetic oligonucleotide
  Sense strand starting at position 52 SEQ ID NO: 3248
auaacacaucuguauguca

SEQ ID NO: 252457 - RNA, 19 nt, Artificial Sequence
  Description of Artificial Sequence: Synthetic oligonucleotide
  Antisense strand to SEQ ID NO: 252456
ugacauacagauguguuau

SEQ ID NO: 252458 - RNA, 19 nt, Artificial Sequence
  Description of Artificial Sequence: Synthetic oligonucleotide
  Sense strand starting at position 61 SEQ ID NO: 3248
cuguaugucauaggaagau

SEQ ID NO: 252459 - RNA, 19 nt, Artificial Sequence
  Description of Artificial Sequence: Synthetic oligonucleotide
  Antisense strand to SEQ ID NO: 252458
aucuuccuaugacauacag

SEQ ID NO: 252460 - RNA, 19 nt, Artificial Sequence
  Description of Artificial Sequence: Synthetic oligonucleotide
  Sense strand starting at position 77 SEQ ID NO: 3248
gauaguaggcaugguggua

SEQ ID NO: 252461 - RNA, 19 nt, Artificial Sequence
  Description of Artificial Sequence: Synthetic oligonucleotide
  Antisense strand to SEQ ID NO: 252460
uaccaccaugccuacuauc

SEQ ID NO: 252462 - RNA, 19 nt, Artificial Sequence
  Description of Artificial Sequence: Synthetic oligonucleotide
  Sense strand starting at position 117 SEQ ID NO: 3248
cuggaaacacaaugcuaau

SEQ ID NO: 252463 - RNA, 19 nt, Artificial Sequence
  Description of Artificial Sequence: Synthetic oligonucleotide
  Antisense strand to SEQ ID NO: 252462
auuagcauuguguuuccag

SEQ ID NO: 252464 - RNA, 19 nt, Artificial Sequence
  Description of Artificial Sequence: Synthetic oligonucleotide
  Sense strand starting at position 127 SEQ ID NO: 3248
aaugcuaauugugugauau

SEQ ID NO: 252465 - RNA, 19 nt, Artificial Sequence
  Description of Artificial Sequence: Synthetic oligonucleotide
  Antisense strand to SEQ ID NO: 252464
auaucacacaauuagcauu

SEQ ID NO: 252466 - RNA, 19 nt, Artificial Sequence
  Description of Artificial Sequence: Synthetic oligonucleotide
  Sense strand starting at position 128 SEQ ID NO: 3248
augcuaauugugugauaug

SEQ ID NO: 252467 - RNA, 19 nt, Artificial Sequence
  Description of Artificial Sequence: Synthetic oligonucleotide
  Antisense strand to SEQ ID NO: 252466
cauaucacacaauuagcau

SEQ ID NO: 252468 - RNA, 19 nt, Artificial Sequence
  Description of Artificial Sequence: Synthetic oligonucleotide
  Sense strand starting at position 222 SEQ ID NO: 3248
agugaugcuagaugacuga

SEQ ID NO: 252469 - RNA, 19 nt, Artificial Sequence
  Description of Artificial Sequence: Synthetic oligonucleotide
  Antisense strand to SEQ ID NO: 252468
ucagucaucuagcaucacu

SEQ ID NO: 252470 - RNA, 19 nt, Artificial Sequence
  Description of Artificial Sequence: Synthetic oligonucleotide
  Sense strand starting at position 225 SEQ ID NO: 3248
gaugcuagaugacugaguu

SEQ ID NO: 252471 - RNA, 19 nt, Artificial Sequence
  Description of Artificial Sequence: Synthetic oligonucleotide
  Antisense strand to SEQ ID NO: 252470
aacucagucaucuagcauc

SEQ ID NO: 252472 - RNA, 19 nt, Artificial Sequence
  Description of Artificial Sequence: Synthetic oligonucleotide
  Sense strand starting at position 233 SEQ ID NO: 3248
augacugaguuggcacaua

SEQ ID NO: 252473 - RNA, 19 nt, Artificial Sequence
  Description of Artificial Sequence: Synthetic oligonucleotide
  Antisense strand to SEQ ID NO: 252472
uaugugccaacucagucau

SEQ ID NO: 252474 - RNA, 19 nt, Artificial Sequence
  Description of Artificial Sequence: Synthetic oligonucleotide
  Sense strand starting at position 238 SEQ ID NO: 3248
ugaguuggcacauauaagu

SEQ ID NO: 252475 - RNA, 19 nt, Artificial Sequence
  Description of Artificial Sequence: Synthetic oligonucleotide
  Antisense strand to SEQ ID NO: 252474
acuuauaugugccaacuca

SEQ ID NO: 252476 - RNA, 19 nt, Artificial Sequence
  Description of Artificial Sequence: Synthetic oligonucleotide
  Sense strand starting at position 373 SEQ ID NO: 3248
ccaacagugcaaugagauu

SEQ ID NO: 252477 - RNA, 19 nt, Artificial Sequence
  Description of Artificial Sequence: Synthetic oligonucleotide
  Antisense strand to SEQ ID NO: 252476
aaucucauugcacuguugg

SEQ ID NO: 252478 - RNA, 19 nt, Artificial Sequence
  Description of Artificial Sequence: Synthetic oligonucleotide
  Sense strand starting at position 379 SEQ ID NO: 3248
gugcaaugagauuguuuga

SEQ ID NO: 252479 - RNA, 19 nt, Artificial Sequence
  Description of Artificial Sequence: Synthetic oligonucleotide
  Antisense strand to SEQ ID NO: 252478
ucaaacaaucucauugcac

SEQ ID NO: 252480 - RNA, 19 nt, Artificial Sequence
  Description of Artificial Sequence: Synthetic oligonucleotide
  Sense strand starting at position 382 SEQ ID NO: 3248
caaugagauuguuugaaua

SEQ ID NO: 252481 - RNA, 19 nt, Artificial Sequence
  Description of Artificial Sequence: Synthetic oligonucleotide
  Antisense strand to SEQ ID NO: 252480
uauucaaacaaucucauug

SEQ ID NO: 252482 - RNA, 19 nt, Artificial Sequence
  Description of Artificial Sequence: Synthetic oligonucleotide
  Sense strand starting at position 433 SEQ ID NO: 3248
agugaaguuguaugauuac

SEQ ID NO: 252483 - RNA, 19 nt, Artificial Sequence
  Description of Artificial Sequence: Synthetic oligonucleotide
  Antisense strand to SEQ ID NO: 252482
guaaucauacaacuucacu

SEQ ID NO: 252484 - RNA, 19 nt, Artificial Sequence
  Description of Artificial Sequence: Synthetic oligonucleotide
  Sense strand starting at position 439 SEQ ID NO: 3248
guuguaugauuacccuaag

SEQ ID NO: 252485 - RNA, 19 nt, Artificial Sequence
  Description of Artificial Sequence: Synthetic oligonucleotide
  Antisense strand to SEQ ID NO: 252484
cuuaggguaaucauacaac

SEQ ID NO: 252486 - RNA, 19 nt, Artificial Sequence
  Description of Artificial Sequence: Synthetic oligonucleotide
  Sense strand starting at position 440 SEQ ID NO: 3248
uuguaugauuacccuaaga

SEQ ID NO: 252487 - RNA, 19 nt, Artificial Sequence
  Description of Artificial Sequence: Synthetic oligonucleotide
  Antisense strand to SEQ ID NO: 252486
ucuuaggguaaucauacaa

SEQ ID NO: 252488 - RNA, 19 nt, Artificial Sequence
  Description of Artificial Sequence: Synthetic oligonucleotide
  Sense strand starting at position 653 SEQ ID NO: 3248
guaggagaagccuagcuuu

SEQ ID NO: 252489 - RNA, 19 nt, Artificial Sequence
  Description of Artificial Sequence: Synthetic oligonucleotide
  Antisense strand to SEQ ID NO: 252488
aaagcuaggcuucuccuac

SEQ ID NO: 252490 - RNA, 19 nt, Artificial Sequence
  Description of Artificial Sequence: Synthetic oligonucleotide
  Sense strand starting at position 701 SEQ ID NO: 3248
agagauugcagcuauugau

SEQ ID NO: 252491 - RNA, 19 nt, Artificial Sequence
  Description of Artificial Sequence: Synthetic oligonucleotide
  Antisense strand to SEQ ID NO: 252490
aucaauagcugcaaucucu

SEQ ID NO: 252492 - RNA, 19 nt, Artificial Sequence
  Description of Artificial Sequence: Synthetic oligonucleotide
  Sense strand starting at position 708 SEQ ID NO: 3248
gcagcuauugaugacugaa

SEQ ID NO: 252493 - RNA, 19 nt, Artificial Sequence
  Description of Artificial Sequence: Synthetic oligonucleotide
  Antisense strand to SEQ ID NO: 252492
uucagucaucaauagcugc

SEQ ID NO: 252494 - RNA, 19 nt, Artificial Sequence
  Description of Artificial Sequence: Synthetic oligonucleotide
  Sense strand starting at position 710 SEQ ID NO: 3248
agcuauugaugacugaaac

SEQ ID NO: 252495 - RNA, 19 nt, Artificial Sequence
  Description of Artificial Sequence: Synthetic oligonucleotide
  Antisense strand to SEQ ID NO: 252494
guuucagucaucaauagcu

SEQ ID NO: 252496 - RNA, 19 nt, Artificial Sequence
  Description of Artificial Sequence: Synthetic oligonucleotide
  Sense strand starting at position 711 SEQ ID NO: 3248
gcuauugaugacugaaaca

SEQ ID NO: 252497 - RNA, 19 nt, Artificial Sequence
  Description of Artificial Sequence: Synthetic oligonucleotide
  Antisense strand to SEQ ID NO: 252496
uguuucagucaucaauagc

SEQ ID NO: 252498 - RNA, 19 nt, Artificial Sequence
  Description of Artificial Sequence: Synthetic oligonucleotide
  Sense strand starting at position 806 SEQ ID NO: 3248
gucaguuaacauuaugcuu

SEQ ID NO: 252499 - RNA, 19 nt, Artificial Sequence
  Description of Artificial Sequence: Synthetic oligonucleotide
  Antisense strand to SEQ ID NO: 252498
aagcauaauguuaacugac

SEQ ID NO: 252500 - RNA, 19 nt, Artificial Sequence
  Description of Artificial Sequence: Synthetic oligonucleotide
  Sense strand starting at position 814 SEQ ID NO: 3248
acauuaugcuuaucuguca

SEQ ID NO: 252501 - RNA, 19 nt, Artificial Sequence
  Description of Artificial Sequence: Synthetic oligonucleotide
  Antisense strand to SEQ ID NO: 252500
ugacagauaagcauaaugu

SEQ ID NO: 252502 - RNA, 19 nt, Artificial Sequence
  Description of Artificial Sequence: Synthetic oligonucleotide
  Sense strand starting at position 982 SEQ ID NO: 3248
agaugacguuucuuugaac

SEQ ID NO: 252503 - RNA, 19 nt, Artificial Sequence
  Description of Artificial Sequence: Synthetic oligonucleotide
  Antisense strand to SEQ ID NO: 252502
guucaaagaaacgucaucu

SEQ ID NO: 252504 - RNA, 19 nt, Artificial Sequence
  Description of Artificial Sequence: Synthetic oligonucleotide
  Sense strand starting at position 983 SEQ ID NO: 3248
gaugacguuucuuugaaca

SEQ ID NO: 252505 - RNA, 19 nt, Artificial Sequence
  Description of Artificial Sequence: Synthetic oligonucleotide
  Antisense strand to SEQ ID NO: 252504
uguucaaagaaacgucauc

SEQ ID NO: 252506 - RNA, 19 nt, Artificial Sequence
  Description of Artificial Sequence: Synthetic oligonucleotide
  Sense strand starting at position 988 SEQ ID NO: 3248
cguuucuuugaacaaauaa

SEQ ID NO: 252507 - RNA, 19 nt, Artificial Sequence
  Description of Artificial Sequence: Synthetic oligonucleotide
  Antisense strand to SEQ ID NO: 252506
uuauuuguucaaagaaacg

SEQ ID NO: 252508 - RNA, 19 nt, Artificial Sequence
  Description of Artificial Sequence: Synthetic oligonucleotide
  Sense strand starting at position 2148 SEQ ID NO: 3248
cggguaccuuucuuugaga

SEQ ID NO: 252509 - RNA, 19 nt, Artificial Sequence
  Description of Artificial Sequence: Synthetic oligonucleotide
  Antisense strand to SEQ ID NO: 252508
ucucaaagaaagguacccg

SEQ ID NO: 252510 - RNA, 19 nt, Artificial Sequence
  Description of Artificial Sequence: Synthetic oligonucleotide
  Sense strand starting at position 2266 SEQ ID NO: 3248
gaaauuagcggaggucauu

SEQ ID NO: 252511 - RNA, 19 nt, Artificial Sequence
  Description of Artificial Sequence: Synthetic oligonucleotide
  Antisense strand to SEQ ID NO: 252510
aaugaccuccgcuaauuuc

SEQ ID NO: 252512 - RNA, 19 nt, Artificial Sequence
  Description of Artificial Sequence: Synthetic oligonucleotide
  Sense strand starting at position 2367 SEQ ID NO: 3248
uaaauuuggugcgcgaagu

SEQ ID NO: 252513 - RNA, 19 nt, Artificial Sequence
  Description of Artificial Sequence: Synthetic oligonucleotide
  Antisense strand to SEQ ID NO: 252512
acuucgcgcaccaaauuua

SEQ ID NO: 252514 - RNA, 19 nt, Artificial Sequence
  Description of Artificial Sequence: Synthetic oligonucleotide
  Sense strand starting at position 2378 SEQ ID NO: 3248
cgcgaagucacaggacaaa

SEQ ID NO: 252515 - RNA, 19 nt, Artificial Sequence
  Description of Artificial Sequence: Synthetic oligonucleotide
  Antisense strand to SEQ ID NO: 252514
uuuguccugugacuucgcg

SEQ ID NO: 252516 - RNA, 19 nt, Artificial Sequence
  Description of Artificial Sequence: Synthetic oligonucleotide
  Sense strand starting at position 2532 SEQ ID NO: 3248
aaaggucucgaucaccuau

SEQ ID NO: 252517 - RNA, 19 nt, Artificial Sequence
  Description of Artificial Sequence: Synthetic oligonucleotide
  Antisense strand to SEQ ID NO: 252516
auaggugaucgagaccuuu

SEQ ID NO: 252518 - RNA, 19 nt, Artificial Sequence
  Description of Artificial Sequence: Synthetic oligonucleotide
  Sense strand starting at position 2950 SEQ ID NO: 3248
ucucuaaguuuguuccaaa

SEQ ID NO: 252519 - RNA, 19 nt, Artificial Sequence
  Description of Artificial Sequence: Synthetic oligonucleotide
  Antisense strand to SEQ ID NO: 252518
uuuggaacaaacuuagaga

SEQ ID NO: 252520 - RNA, 19 nt, Artificial Sequence
  Description of Artificial Sequence: Synthetic oligonucleotide
  Sense strand starting at position 3055 SEQ ID NO: 3248
gccaauuaugccuaugacu

SEQ ID NO: 252521 - RNA, 19 nt, Artificial Sequence
  Description of Artificial Sequence: Synthetic oligonucleotide
  Antisense strand to SEQ ID NO: 252520
agucauaggcauaauuggc

SEQ ID NO: 252522 - RNA, 19 nt, Artificial Sequence
  Description of Artificial Sequence: Synthetic oligonucleotide
  Sense strand starting at position 3158 SEQ ID NO: 3248
ggcuaugcuccagaaccuu

SEQ ID NO: 252523 - RNA, 19 nt, Artificial Sequence
  Description of Artificial Sequence: Synthetic oligonucleotide
  Antisense strand to SEQ ID NO: 252522
aagguucuggagcauagcc
